United States Patent Application Publication US 2014/0004565 A1 - sequence listing, part 107

SEQ ID NO: 2669656 - RNA, 19 nt, Artificial Sequence
  Description of Artificial Sequence: Synthetic oligonucleotide
uuggcgagcagggaaagga

SEQ ID NO: 2669657 - RNA, 19 nt, Artificial Sequence
  Description of Artificial Sequence: Synthetic oligonucleotide
guccaugcugcuuuggcug

SEQ ID NO: 2669658 - RNA, 19 nt, Artificial Sequence
  Description of Artificial Sequence: Synthetic oligonucleotide
aguguuguugggugucauc

SEQ ID NO: 2669659 - RNA, 19 nt, Artificial Sequence
  Description of Artificial Sequence: Synthetic oligonucleotide
gugagaugagagauaacag

SEQ ID NO: 2669660 - RNA, 19 nt, Artificial Sequence
  Description of Artificial Sequence: Synthetic oligonucleotide
gagcagugucgccacauag

SEQ ID NO: 2669661 - RNA, 19 nt, Artificial Sequence
  Description of Artificial Sequence: Synthetic oligonucleotide
ucagccagacccauggcua

SEQ ID NO: 2669662 - RNA, 19 nt, Artificial Sequence
  Description of Artificial Sequence: Synthetic oligonucleotide
cacagcugcagcacuggcg

SEQ ID NO: 2669663 - RNA, 19 nt, Artificial Sequence
  Description of Artificial Sequence: Synthetic oligonucleotide
cagacccauggcuacaggc

SEQ ID NO: 2669664 - RNA, 19 nt, Artificial Sequence
  Description of Artificial Sequence: Synthetic oligonucleotide
cagggcgaugccuagggcc

SEQ ID NO: 2669665 - RNA, 19 nt, Artificial Sequence
  Description of Artificial Sequence: Synthetic oligonucleotide
aguaacaggcuuaggaaga

SEQ ID NO: 2669666 - RNA, 19 nt, Artificial Sequence
  Description of Artificial Sequence: Synthetic oligonucleotide
gcagugucgccacauaggg

SEQ ID NO: 2669667 - RNA, 19 nt, Artificial Sequence
  Description of Artificial Sequence: Synthetic oligonucleotide
guuggcgacgacgaugagg

SEQ ID NO: 2669668 - RNA, 19 nt, Artificial Sequence
  Description of Artificial Sequence: Synthetic oligonucleotide
uggcuacaggcacagcugc

SEQ ID NO: 2669669 - RNA, 19 nt, Artificial Sequence
  Description of Artificial Sequence: Synthetic oligonucleotide
cugcccagugagaugagag

SEQ ID NO: 2669670 - RNA, 19 nt, Artificial Sequence
  Description of Artificial Sequence: Synthetic oligonucleotide
uggacgccgcucauaagcc

SEQ ID NO: 2669671 - RNA, 19 nt, Artificial Sequence
  Description of Artificial Sequence: Synthetic oligonucleotide
cacauagcgcuccccaugc

SEQ ID NO: 2669672 - RNA, 19 nt, Artificial Sequence
  Description of Artificial Sequence: Synthetic oligonucleotide
augagagauaacagaguuc

SEQ ID NO: 2669673 - RNA, 19 nt, Artificial Sequence
  Description of Artificial Sequence: Synthetic oligonucleotide
cuguguagcguugaucagc

SEQ ID NO: 2669674 - RNA, 19 nt, Artificial Sequence
  Description of Artificial Sequence: Synthetic oligonucleotide
agcagauuggcgagcaggg

SEQ ID NO: 2669675 - RNA, 19 nt, Artificial Sequence
  Description of Artificial Sequence: Synthetic oligonucleotide
agaguuccaggcccuagug

SEQ ID NO: 2669676 - RNA, 19 nt, Artificial Sequence
  Description of Artificial Sequence: Synthetic oligonucleotide
uccccaguguuguugggug

SEQ ID NO: 2669677 - RNA, 19 nt, Artificial Sequence
  Description of Artificial Sequence: Synthetic oligonucleotide
cacagcccaggaaggaugg

SEQ ID NO: 2669678 - RNA, 19 nt, Artificial Sequence
  Description of Artificial Sequence: Synthetic oligonucleotide
uccucgaagcacucgcagc

SEQ ID NO: 2669679 - RNA, 19 nt, Artificial Sequence
  Description of Artificial Sequence: Synthetic oligonucleotide
agcguugaucagccagacc

SEQ ID NO: 2669680 - RNA, 19 nt, Artificial Sequence
  Description of Artificial Sequence: Synthetic oligonucleotide
ggaccaguagccccggugg

SEQ ID NO: 2669681 - RNA, 19 nt, Artificial Sequence
  Description of Artificial Sequence: Synthetic oligonucleotide
guccccagcacagaugggg

SEQ ID NO: 2669682 - RNA, 19 nt, Artificial Sequence
  Description of Artificial Sequence: Synthetic oligonucleotide
agcagugucgccacauagg

SEQ ID NO: 2669683 - RNA, 19 nt, Artificial Sequence
  Description of Artificial Sequence: Synthetic oligonucleotide
auaagccaacacugacagg

SEQ ID NO: 2669684 - RNA, 19 nt, Artificial Sequence
  Description of Artificial Sequence: Synthetic oligonucleotide
aaguugggugccaagugga

SEQ ID NO: 2669685 - RNA, 19 nt, Artificial Sequence
  Description of Artificial Sequence: Synthetic oligonucleotide
uggugugguaggcaaugcu

SEQ ID NO: 2669686 - RNA, 19 nt, Artificial Sequence
  Description of Artificial Sequence: Synthetic oligonucleotide
acauaggguccccagcaca

SEQ ID NO: 2669687 - RNA, 19 nt, Artificial Sequence
  Description of Artificial Sequence: Synthetic oligonucleotide
aggcccuagugguggacgc

SEQ ID NO: 2669688 - RNA, 19 nt, Artificial Sequence
  Description of Artificial Sequence: Synthetic oligonucleotide
uuggcucuuccucgaagca

SEQ ID NO: 2669689 - RNA, 19 nt, Artificial Sequence
  Description of Artificial Sequence: Synthetic oligonucleotide
ugguggacgccgcucauaa

SEQ ID NO: 2669690 - RNA, 19 nt, Artificial Sequence
  Description of Artificial Sequence: Synthetic oligonucleotide
gacccauggcuacaggcac

SEQ ID NO: 2669691 - RNA, 19 nt, Artificial Sequence
  Description of Artificial Sequence: Synthetic oligonucleotide
agggaaagcuccagugccc

SEQ ID NO: 2669692 - RNA, 19 nt, Artificial Sequence
  Description of Artificial Sequence: Synthetic oligonucleotide
gccaguaacaggcuuagga

SEQ ID NO: 2669693 - RNA, 19 nt, Artificial Sequence
  Description of Artificial Sequence: Synthetic oligonucleotide
uaacagaguuccaggcccu

SEQ ID NO: 2669694 - RNA, 19 nt, Artificial Sequence
  Description of Artificial Sequence: Synthetic oligonucleotide
acaggcacagcugcagcac

SEQ ID NO: 2669695 - RNA, 19 nt, Artificial Sequence
  Description of Artificial Sequence: Synthetic oligonucleotide
cauagcgcuccccaugcac

SEQ ID NO: 2669696 - RNA, 19 nt, Artificial Sequence
  Description of Artificial Sequence: Synthetic oligonucleotide
guguuguugggugucauca

SEQ ID NO: 2669697 - RNA, 19 nt, Artificial Sequence
  Description of Artificial Sequence: Synthetic oligonucleotide
cugacaggagcagugucgc

SEQ ID NO: 2669698 - RNA, 19 nt, Artificial Sequence
  Description of Artificial Sequence: Synthetic oligonucleotide
ugggcagcugcccuccaug

SEQ ID NO: 2669699 - RNA, 19 nt, Artificial Sequence
  Description of Artificial Sequence: Synthetic oligonucleotide
uccccagcacagauggggc

SEQ ID NO: 2669700 - RNA, 19 nt, Artificial Sequence
  Description of Artificial Sequence: Synthetic oligonucleotide
uugaucagccagacccaug

SEQ ID NO: 2669701 - RNA, 19 nt, Artificial Sequence
  Description of Artificial Sequence: Synthetic oligonucleotide
uccaugcugcuuuggcugc

SEQ ID NO: 2669702 - RNA, 19 nt, Artificial Sequence
  Description of Artificial Sequence: Synthetic oligonucleotide
aggaccaguagccccggug

SEQ ID NO: 2669703 - RNA, 19 nt, Artificial Sequence
  Description of Artificial Sequence: Synthetic oligonucleotide
acgaugaggcuugccaggg

SEQ ID NO: 2669704 - RNA, 19 nt, Artificial Sequence
  Description of Artificial Sequence: Synthetic oligonucleotide
gaguagcccggccaguaac

SEQ ID NO: 2669705 - RNA, 19 nt, Artificial Sequence
  Description of Artificial Sequence: Synthetic oligonucleotide
gauggggccggaguggcug

SEQ ID NO: 2669706 - RNA, 19 nt, Artificial Sequence
  Description of Artificial Sequence: Synthetic oligonucleotide
agaugagagauaacagagu

SEQ ID NO: 2669707 - RNA, 19 nt, Artificial Sequence
  Description of Artificial Sequence: Synthetic oligonucleotide
uaacaggcuuaggaagaag

SEQ ID NO: 2669708 - RNA, 19 nt, Artificial Sequence
  Description of Artificial Sequence: Synthetic oligonucleotide
agugccagcccugugagua

SEQ ID NO: 2669709 - RNA, 19 nt, Artificial Sequence
  Description of Artificial Sequence: Synthetic oligonucleotide
ucgaagcacucgcagccac

SEQ ID NO: 2669710 - RNA, 19 nt, Artificial Sequence
  Description of Artificial Sequence: Synthetic oligonucleotide
gugguaggcaaugcugggg

SEQ ID NO: 2669711 - RNA, 19 nt, Artificial Sequence
  Description of Artificial Sequence: Synthetic oligonucleotide
cugugaguagcccggccag

SEQ ID NO: 2669712 - RNA, 19 nt, Artificial Sequence
  Description of Artificial Sequence: Synthetic oligonucleotide
cuacaggcacagcugcagc

SEQ ID NO: 2669713 - RNA, 19 nt, Artificial Sequence
  Description of Artificial Sequence: Synthetic oligonucleotide
gagcuggccaccuccccag

SEQ ID NO: 2669714 - RNA, 19 nt, Artificial Sequence
  Description of Artificial Sequence: Synthetic oligonucleotide
ggugugguaggcaaugcug

SEQ ID NO: 2669715 - RNA, 19 nt, Artificial Sequence
  Description of Artificial Sequence: Synthetic oligonucleotide
cuccauggggcuguguagc

SEQ ID NO: 2669716 - RNA, 19 nt, Artificial Sequence
  Description of Artificial Sequence: Synthetic oligonucleotide
uguuguugggugucaucau

SEQ ID NO: 2669717 - RNA, 19 nt, Artificial Sequence
  Description of Artificial Sequence: Synthetic oligonucleotide
cauggcuacaggcacagcu

SEQ ID NO: 2669718 - RNA, 19 nt, Artificial Sequence
  Description of Artificial Sequence: Synthetic oligonucleotide
cacuagcagcagauuggcg

SEQ ID NO: 2669719 - RNA, 19 nt, Artificial Sequence
  Description of Artificial Sequence: Synthetic oligonucleotide
acaggcuuaggaagaagca

SEQ ID NO: 2669720 - RNA, 19 nt, Artificial Sequence
  Description of Artificial Sequence: Synthetic oligonucleotide
aagccaacacugacaggag

SEQ ID NO: 2669721 - RNA, 19 nt, Artificial Sequence
  Description of Artificial Sequence: Synthetic oligonucleotide
aauucaagcccagguccau

SEQ ID NO: 2669722 - RNA, 19 nt, Artificial Sequence
  Description of Artificial Sequence: Synthetic oligonucleotide
ggaggcaggaccaguagcc

SEQ ID NO: 2669723 - RNA, 19 nt, Artificial Sequence
  Description of Artificial Sequence: Synthetic oligonucleotide
ccucgaagcacucgcagcc

SEQ ID NO: 2669724 - RNA, 19 nt, Artificial Sequence
  Description of Artificial Sequence: Synthetic oligonucleotide
cgcucauaagccaacacug

SEQ ID NO: 2669725 - RNA, 19 nt, Artificial Sequence
  Description of Artificial Sequence: Synthetic oligonucleotide
agguuggcgacgacgauga

SEQ ID NO: 2669726 - RNA, 19 nt, Artificial Sequence
  Description of Artificial Sequence: Synthetic oligonucleotide
gaucagccagacccauggc

SEQ ID NO: 2669727 - RNA, 19 nt, Artificial Sequence
  Description of Artificial Sequence: Synthetic oligonucleotide
caugggaauggagcuggcc

SEQ ID NO: 2669728 - RNA, 19 nt, Artificial Sequence
  Description of Artificial Sequence: Synthetic oligonucleotide
ugaguagcccggccaguaa

SEQ ID NO: 2669729 - RNA, 19 nt, Artificial Sequence
  Description of Artificial Sequence: Synthetic oligonucleotide
gguggcuccugcuccacag

SEQ ID NO: 2669730 - RNA, 19 nt, Artificial Sequence
  Description of Artificial Sequence: Synthetic oligonucleotide
cagauuggcgagcagggaa

SEQ ID NO: 2669731 - RNA, 19 nt, Artificial Sequence
  Description of Artificial Sequence: Synthetic oligonucleotide
auggggccggaguggcugc

SEQ ID NO: 2669732 - RNA, 19 nt, Artificial Sequence
  Description of Artificial Sequence: Synthetic oligonucleotide
gaccaguagccccgguggc

SEQ ID NO: 2669733 - RNA, 19 nt, Artificial Sequence
  Description of Artificial Sequence: Synthetic oligonucleotide
guagcguugaucagccaga

SEQ ID NO: 2669734 - RNA, 19 nt, Artificial Sequence
  Description of Artificial Sequence: Synthetic oligonucleotide
cagguuggcgacgacgaug

SEQ ID NO: 2669735 - RNA, 19 nt, Artificial Sequence
  Description of Artificial Sequence: Synthetic oligonucleotide
gaggcaggaccaguagccc

SEQ ID NO: 2669736 - RNA, 19 nt, Artificial Sequence
  Description of Artificial Sequence: Synthetic oligonucleotide
gccaaguggagaaggaggc

SEQ ID NO: 2669737 - RNA, 19 nt, Artificial Sequence
  Description of Artificial Sequence: Synthetic oligonucleotide
accuuugggcagcugcccu

SEQ ID NO: 2669738 - RNA, 19 nt, Artificial Sequence
  Description of Artificial Sequence: Synthetic oligonucleotide
gacugccacauagcgcucc

SEQ ID NO: 2669739 - RNA, 19 nt, Artificial Sequence
  Description of Artificial Sequence: Synthetic oligonucleotide
auagcgcuccccaugcacu

SEQ ID NO: 2669740 - RNA, 19 nt, Artificial Sequence
  Description of Artificial Sequence: Synthetic oligonucleotide
uaggcaaugcuggggccug

SEQ ID NO: 2669741 - RNA, 19 nt, Artificial Sequence
  Description of Artificial Sequence: Synthetic oligonucleotide
ggcuuaggaagaagcagcc

SEQ ID NO: 2669742 - RNA, 19 nt, Artificial Sequence
  Description of Artificial Sequence: Synthetic oligonucleotide
ggagaaguugggugccaag

SEQ ID NO: 2669743 - RNA, 19 nt, Artificial Sequence
  Description of Artificial Sequence: Synthetic oligonucleotide
gaagaagcagccggcaggu

SEQ ID NO: 2669744 - RNA, 19 nt, Artificial Sequence
  Description of Artificial Sequence: Synthetic oligonucleotide
agauuggcgagcagggaaa

SEQ ID NO: 2669745 - RNA, 19 nt, Artificial Sequence
  Description of Artificial Sequence: Synthetic oligonucleotide
cacugacaggagcaguguc

SEQ ID NO: 2669746 - RNA, 19 nt, Artificial Sequence
  Description of Artificial Sequence: Synthetic oligonucleotide
gcuacaggcacagcugcag

SEQ ID NO: 2669747 - RNA, 19 nt, Artificial Sequence
  Description of Artificial Sequence: Synthetic oligonucleotide
uagcguugaucagccagac

SEQ ID NO: 2669748 - RNA, 19 nt, Artificial Sequence
  Description of Artificial Sequence: Synthetic oligonucleotide
cagccagacccauggcuac

SEQ ID NO: 2669749 - RNA, 19 nt, Artificial Sequence
  Description of Artificial Sequence: Synthetic oligonucleotide
guagcccggccaguaacag

SEQ ID NO: 2669750 - RNA, 19 nt, Artificial Sequence
  Description of Artificial Sequence: Synthetic oligonucleotide
ccaguaacaggcuuaggaa

SEQ ID NO: 2669751 - RNA, 19 nt, Artificial Sequence
  Description of Artificial Sequence: Synthetic oligonucleotide
aguagcccggccaguaaca

SEQ ID NO: 2669752 - RNA, 19 nt, Artificial Sequence
  Description of Artificial Sequence: Synthetic oligonucleotide
gcagugccagcccugugag

SEQ ID NO: 2669753 - RNA, 19 nt, Artificial Sequence
  Description of Artificial Sequence: Synthetic oligonucleotide
cccaugggaauggagcugg

SEQ ID NO: 2669754 - RNA, 19 nt, Artificial Sequence
  Description of Artificial Sequence: Synthetic oligonucleotide
acacugacaggagcagugu

SEQ ID NO: 2669755 - RNA, 19 nt, Artificial Sequence
  Description of Artificial Sequence: Synthetic oligonucleotide
guugggugccaaguggaga

SEQ ID NO: 2669756 - RNA, 19 nt, Artificial Sequence
  Description of Artificial Sequence: Synthetic oligonucleotide
ugucgccacauaggguccc

SEQ ID NO: 2669757 - RNA, 19 nt, Artificial Sequence
  Description of Artificial Sequence: Synthetic oligonucleotide
gaguggcugcaagacugcc

SEQ ID NO: 2669758 - RNA, 19 nt, Artificial Sequence
  Description of Artificial Sequence: Synthetic oligonucleotide
ccuggacugucccucuugg

SEQ ID NO: 2669759 - RNA, 19 nt, Artificial Sequence
  Description of Artificial Sequence: Synthetic oligonucleotide
cggaguggcugcaagacug

SEQ ID NO: 2669760 - RNA, 19 nt, Artificial Sequence
  Description of Artificial Sequence: Synthetic oligonucleotide
cagauggggccggaguggc

SEQ ID NO: 2669761 - RNA, 19 nt, Artificial Sequence
  Description of Artificial Sequence: Synthetic oligonucleotide
gguaggcaaugcuggggcc

SEQ ID NO: 2669762 - RNA, 19 nt, Artificial Sequence
  Description of Artificial Sequence: Synthetic oligonucleotide
gggugccaaguggagaagg

SEQ ID NO: 2669763 - RNA, 19 nt, Artificial Sequence
  Description of Artificial Sequence: Synthetic oligonucleotide
cuggugugguaggcaaugc

SEQ ID NO: 2669764 - RNA, 19 nt, Artificial Sequence
  Description of Artificial Sequence: Synthetic oligonucleotide
agggcgaugccuagggcca

SEQ ID NO: 2669765 - RNA, 19 nt, Artificial Sequence
  Description of Artificial Sequence: Synthetic oligonucleotide
cuuccucgaagcacucgca

SEQ ID NO: 2669766 - RNA, 19 nt, Artificial Sequence
  Description of Artificial Sequence: Synthetic oligonucleotide
gaauggagcuggccaccuc

SEQ ID NO: 2669767 - RNA, 19 nt, Artificial Sequence
  Description of Artificial Sequence: Synthetic oligonucleotide
cagugagaugagagauaac

SEQ ID NO: 2669768 - RNA, 19 nt, Artificial Sequence
  Description of Artificial Sequence: Synthetic oligonucleotide
gcuguguagcguugaucag

SEQ ID NO: 2669769 - RNA, 19 nt, Artificial Sequence
  Description of Artificial Sequence: Synthetic oligonucleotide
ggcgagcagggaaaggaag

SEQ ID NO: 2669770 - RNA, 19 nt, Artificial Sequence
  Description of Artificial Sequence: Synthetic oligonucleotide
gagagauaacagaguucca

SEQ ID NO: 2669771 - RNA, 19 nt, Artificial Sequence
  Description of Artificial Sequence: Synthetic oligonucleotide
ccaccuuugggcagcugcc

SEQ ID NO: 2669772 - RNA, 19 nt, Artificial Sequence
  Description of Artificial Sequence: Synthetic oligonucleotide
gaagcacucgcagccaccu

SEQ ID NO: 2669773 - RNA, 19 nt, Artificial Sequence
  Description of Artificial Sequence: Synthetic oligonucleotide
caccuuugggcagcugccc

SEQ ID NO: 2669774 - RNA, 19 nt, Artificial Sequence
  Description of Artificial Sequence: Synthetic oligonucleotide
gccacauaggguccccagc

SEQ ID NO: 2669775 - RNA, 19 nt, Artificial Sequence
  Description of Artificial Sequence: Synthetic oligonucleotide
gggaaagcuccagugcccc

SEQ ID NO: 2669776 - RNA, 19 nt, Artificial Sequence
  Description of Artificial Sequence: Synthetic oligonucleotide
gacgccgcucauaagccaa

SEQ ID NO: 2669777 - RNA, 19 nt, Artificial Sequence
  Description of Artificial Sequence: Synthetic oligonucleotide
gaugggcagugccagcccu

SEQ ID NO: 2669778 - RNA, 19 nt, Artificial Sequence
  Description of Artificial Sequence: Synthetic oligonucleotide
aagaagcagccggcaggug

SEQ ID NO: 2669779 - RNA, 19 nt, Artificial Sequence
  Description of Artificial Sequence: Synthetic oligonucleotide
uuugggcagcugcccucca

SEQ ID NO: 2669780 - RNA, 19 nt, Artificial Sequence
  Description of Artificial Sequence: Synthetic oligonucleotide
gcagguggcgauccagggc

SEQ ID NO: 2669781 - RNA, 19 nt, Artificial Sequence
  Description of Artificial Sequence: Synthetic oligonucleotide
auccagggcgaugccuagg

SEQ ID NO: 2669782 - RNA, 19 nt, Artificial Sequence
  Description of Artificial Sequence: Synthetic oligonucleotide
uagcagcagauuggcgagc

SEQ ID NO: 2669783 - RNA, 19 nt, Artificial Sequence
  Description of Artificial Sequence: Synthetic oligonucleotide
acauagcgcuccccaugca

SEQ ID NO: 2669784 - RNA, 19 nt, Artificial Sequence
  Description of Artificial Sequence: Synthetic oligonucleotide
gugccagcccugugaguag

SEQ ID NO: 2669785 - RNA, 19 nt, Artificial Sequence
  Description of Artificial Sequence: Synthetic oligonucleotide
uggcgcugcccagugagau

SEQ ID NO: 2669786 - RNA, 19 nt, Artificial Sequence
  Description of Artificial Sequence: Synthetic oligonucleotide
uagcgcuccccaugcacua

SEQ ID NO: 2669787 - RNA, 19 nt, Artificial Sequence
  Description of Artificial Sequence: Synthetic oligonucleotide
ccacagcccaggaaggaug

SEQ ID NO: 2669788 - RNA, 19 nt, Artificial Sequence
  Description of Artificial Sequence: Synthetic oligonucleotide
agcacuggcgcugcccagu

SEQ ID NO: 2669789 - RNA, 19 nt, Artificial Sequence
  Description of Artificial Sequence: Synthetic oligonucleotide
guggagaaggaggcaggac

SEQ ID NO: 2669790 - RNA, 19 nt, Artificial Sequence
  Description of Artificial Sequence: Synthetic oligonucleotide
cgacgaugaggcuugccag

SEQ ID NO: 2669791 - RNA, 19 nt, Artificial Sequence
  Description of Artificial Sequence: Synthetic oligonucleotide
ccuccauggggcuguguag

SEQ ID NO: 2669792 - RNA, 19 nt, Artificial Sequence
  Description of Artificial Sequence: Synthetic oligonucleotide
gcgacgacgaugaggcuug

SEQ ID NO: 2669793 - RNA, 19 nt, Artificial Sequence
  Description of Artificial Sequence: Synthetic oligonucleotide
gugggcugcgcagguggcg

SEQ ID NO: 2669794 - RNA, 19 nt, Artificial Sequence
  Description of Artificial Sequence: Synthetic oligonucleotide
gcccuagugguggacgccg

SEQ ID NO: 2669795 - RNA, 19 nt, Artificial Sequence
  Description of Artificial Sequence: Synthetic oligonucleotide
uccaggcccuaguggugga

SEQ ID NO: 2669796 - RNA, 19 nt, Artificial Sequence
  Description of Artificial Sequence: Synthetic oligonucleotide
ccacauaggguccccagca

SEQ ID NO: 2669797 - RNA, 19 nt, Artificial Sequence
  Description of Artificial Sequence: Synthetic oligonucleotide
auaggguccccagcacaga

SEQ ID NO: 2669798 - RNA, 19 nt, Artificial Sequence
  Description of Artificial Sequence: Synthetic oligonucleotide
ccagugagaugagagauaa

SEQ ID NO: 2669799 - RNA, 19 nt, Artificial Sequence
  Description of Artificial Sequence: Synthetic oligonucleotide
agugguggacgccgcucau

SEQ ID NO: 2669800 - RNA, 19 nt, Artificial Sequence
  Description of Artificial Sequence: Synthetic oligonucleotide
gugucgccacauagggucc

SEQ ID NO: 2669801 - RNA, 19 nt, Artificial Sequence
  Description of Artificial Sequence: Synthetic oligonucleotide
ccaacacugacaggagcag

SEQ ID NO: 2669802 - RNA, 19 nt, Artificial Sequence
  Description of Artificial Sequence: Synthetic oligonucleotide
caguagccccgguggcucc

SEQ ID NO: 2669803 - RNA, 19 nt, Artificial Sequence
  Description of Artificial Sequence: Synthetic oligonucleotide
augaggcuugccagggcca

SEQ ID NO: 2669804 - RNA, 19 nt, Artificial Sequence
  Description of Artificial Sequence: Synthetic oligonucleotide
uggggccuggacugucccu

SEQ ID NO: 2669805 - RNA, 19 nt, Artificial Sequence
  Description of Artificial Sequence: Synthetic oligonucleotide
ggaugggcagugccagccc

SEQ ID NO: 2669806 - RNA, 19 nt, Artificial Sequence
  Description of Artificial Sequence: Synthetic oligonucleotide
gcucauaagccaacacuga

SEQ ID NO: 2669807 - RNA, 19 nt, Artificial Sequence
  Description of Artificial Sequence: Synthetic oligonucleotide
acgccgcucauaagccaac

SEQ ID NO: 2669808 - RNA, 19 nt, Artificial Sequence
  Description of Artificial Sequence: Synthetic oligonucleotide
guaggcaaugcuggggccu

SEQ ID NO: 2669809 - RNA, 19 nt, Artificial Sequence
  Description of Artificial Sequence: Synthetic oligonucleotide
gguccaugcugcuuuggcu

SEQ ID NO: 2669810 - RNA, 19 nt, Artificial Sequence
  Description of Artificial Sequence: Synthetic oligonucleotide
agcgcuccccaugcacuag

SEQ ID NO: 2669811 - RNA, 19 nt, Artificial Sequence
  Description of Artificial Sequence: Synthetic oligonucleotide
gcagcacuggcgcugccca

SEQ ID NO: 2669812 - RNA, 19 nt, Artificial Sequence
  Description of Artificial Sequence: Synthetic oligonucleotide
ggugccaaguggagaagga

SEQ ID NO: 2669813 - RNA, 19 nt, Artificial Sequence
  Description of Artificial Sequence: Synthetic oligonucleotide
gguggacgccgcucauaag

SEQ ID NO: 2669814 - RNA, 19 nt, Artificial Sequence
  Description of Artificial Sequence: Synthetic oligonucleotide
gccgcucauaagccaacac

SEQ ID NO: 2669815 - RNA, 19 nt, Artificial Sequence
  Description of Artificial Sequence: Synthetic oligonucleotide
gccuggacugucccucuug

SEQ ID NO: 2669816 - RNA, 19 nt, Artificial Sequence
  Description of Artificial Sequence: Synthetic oligonucleotide
gccggaguggcugcaagac

SEQ ID NO: 2669817 - RNA, 19 nt, Artificial Sequence
  Description of Artificial Sequence: Synthetic oligonucleotide
gcagccaccuuugggcagc

SEQ ID NO: 2669818 - RNA, 19 nt, Artificial Sequence
  Description of Artificial Sequence: Synthetic oligonucleotide
guggcgauccagggcgaug

SEQ ID NO: 2669819 - RNA, 19 nt, Artificial Sequence
  Description of Artificial Sequence: Synthetic oligonucleotide
cagcacuggcgcugcccag

SEQ ID NO: 2669820 - RNA, 19 nt, Artificial Sequence
  Description of Artificial Sequence: Synthetic oligonucleotide
ucgccacauagggucccca

SEQ ID NO: 2669821 - RNA, 19 nt, Artificial Sequence
  Description of Artificial Sequence: Synthetic oligonucleotide
cccauggcuacaggcacag

SEQ ID NO: 2669822 - RNA, 19 nt, Artificial Sequence
  Description of Artificial Sequence: Synthetic oligonucleotide
aggcaaugcuggggccugg

SEQ ID NO: 2669823 - RNA, 19 nt, Artificial Sequence
  Description of Artificial Sequence: Synthetic oligonucleotide
acccauggcuacaggcaca

SEQ ID NO: 2669824 - RNA, 19 nt, Artificial Sequence
  Description of Artificial Sequence: Synthetic oligonucleotide
cagaguuccaggcccuagu

SEQ ID NO: 2669825 - RNA, 19 nt, Artificial Sequence
  Description of Artificial Sequence: Synthetic oligonucleotide
gugaguagcccggccagua

SEQ ID NO: 2669826 - RNA, 19 nt, Artificial Sequence
  Description of Artificial Sequence: Synthetic oligonucleotide
gcgcugcccagugagauga

SEQ ID NO: 2669827 - RNA, 19 nt, Artificial Sequence
  Description of Artificial Sequence: Synthetic oligonucleotide
gcacagcugcagcacuggc

SEQ ID NO: 2669828 - RNA, 19 nt, Artificial Sequence
  Description of Artificial Sequence: Synthetic oligonucleotide
gcugcgcagguggcgaucc

SEQ ID NO: 2669829 - RNA, 19 nt, Artificial Sequence
  Description of Artificial Sequence: Synthetic oligonucleotide
gccuagggccaggagcagg

SEQ ID NO: 2669830 - RNA, 19 nt, Artificial Sequence
  Description of Artificial Sequence: Synthetic oligonucleotide
cugccacauagcgcucccc

SEQ ID NO: 2669831 - RNA, 19 nt, Artificial Sequence
  Description of Artificial Sequence: Synthetic oligonucleotide
cauggggcuguguagcguu

SEQ ID NO: 2669832 - RNA, 19 nt, Artificial Sequence
  Description of Artificial Sequence: Synthetic oligonucleotide
gucgccacauagggucccc

SEQ ID NO: 2669833 - RNA, 19 nt, Artificial Sequence
  Description of Artificial Sequence: Synthetic oligonucleotide
ggcgcugcccagugagaug

SEQ ID NO: 2669834 - RNA, 19 nt, Artificial Sequence
  Description of Artificial Sequence: Synthetic oligonucleotide
cucgaagcacucgcagcca

SEQ ID NO: 2669835 - RNA, 19 nt, Artificial Sequence
  Description of Artificial Sequence: Synthetic oligonucleotide
cagccggcaggugggcugc

SEQ ID NO: 2669836 - RNA, 19 nt, Artificial Sequence
  Description of Artificial Sequence: Synthetic oligonucleotide
aguagccccgguggcuccu

SEQ ID NO: 2669837 - RNA, 19 nt, Artificial Sequence
  Description of Artificial Sequence: Synthetic oligonucleotide
ggcucuuccucgaagcacu

SEQ ID NO: 2669838 - RNA, 19 nt, Artificial Sequence
  Description of Artificial Sequence: Synthetic oligonucleotide
gcaaugcuggggccuggac

SEQ ID NO: 2669839 - RNA, 19 nt, Artificial Sequence
  Description of Artificial Sequence: Synthetic oligonucleotide
guugaucagccagacccau

SEQ ID NO: 2669840 - RNA, 19 nt, Artificial Sequence
  Description of Artificial Sequence: Synthetic oligonucleotide
auggggcuguguagcguug

SEQ ID NO: 2669841 - RNA, 19 nt, Artificial Sequence
  Description of Artificial Sequence: Synthetic oligonucleotide
ggccaggagcagguuggcg

SEQ ID NO: 2669842 - RNA, 19 nt, Artificial Sequence
  Description of Artificial Sequence: Synthetic oligonucleotide
ggacgccgcucauaagcca

SEQ ID NO: 2669843 - RNA, 19 nt, Artificial Sequence
  Description of Artificial Sequence: Synthetic oligonucleotide
ccagacccauggcuacagg

SEQ ID NO: 2669844 - RNA, 19 nt, Artificial Sequence
  Description of Artificial Sequence: Synthetic oligonucleotide
gggccggaguggcugcaag

SEQ ID NO: 2669845 - RNA, 19 nt, Artificial Sequence
  Description of Artificial Sequence: Synthetic oligonucleotide
cgaagcacucgcagccacc

SEQ ID NO: 2669846 - RNA, 19 nt, Artificial Sequence
  Description of Artificial Sequence: Synthetic oligonucleotide
ugcuggggccuggacuguc

SEQ ID NO: 2669847 - RNA, 19 nt, Artificial Sequence
  Description of Artificial Sequence: Synthetic oligonucleotide
agcuggccaccuccccagu

SEQ ID NO: 2669848 - RNA, 19 nt, Artificial Sequence
  Description of Artificial Sequence: Synthetic oligonucleotide
gcacucgcagccaccuuug

SEQ ID NO: 2669849 - RNA, 19 nt, Artificial Sequence
  Description of Artificial Sequence: Synthetic oligonucleotide
guguagcguugaucagcca

SEQ ID NO: 2669850 - RNA, 19 nt, Artificial Sequence
  Description of Artificial Sequence: Synthetic oligonucleotide
uggcgacgacgaugaggcu

SEQ ID NO: 2669851 - RNA, 19 nt, Artificial Sequence
  Description of Artificial Sequence: Synthetic oligonucleotide
gcgcuccccaugcacuagc

SEQ ID NO: 2669852 - RNA, 19 nt, Artificial Sequence
  Description of Artificial Sequence: Synthetic oligonucleotide
ggggccuggacugucccuc

SEQ ID NO: 2669853 - RNA, 19 nt, Artificial Sequence
  Description of Artificial Sequence: Synthetic oligonucleotide
ggcgauccagggcgaugcc

SEQ ID NO: 2669854 - RNA, 19 nt, Artificial Sequence
  Description of Artificial Sequence: Synthetic oligonucleotide
ggccggaguggcugcaaga

SEQ ID NO: 2669855 - RNA, 19 nt, Artificial Sequence
  Description of Artificial Sequence: Synthetic oligonucleotide
ggcgaugccuagggccagg

SEQ ID NO: 2669856 - RNA, 19 nt, Artificial Sequence
  Description of Artificial Sequence: Synthetic oligonucleotide
cuggcgcugcccagugaga

SEQ ID NO: 2669857 - RNA, 19 nt, Artificial Sequence
  Description of Artificial Sequence: Synthetic oligonucleotide
ccagcacagauggggccgg

SEQ ID NO: 2669858 - RNA, 19 nt, Artificial Sequence
  Description of Artificial Sequence: Synthetic oligonucleotide
ggcugcaagacugccacau

SEQ ID NO: 2669859 - RNA, 19 nt, Artificial Sequence
  Description of Artificial Sequence: Synthetic oligonucleotide
cagugucgccacauagggu

SEQ ID NO: 2669860 - RNA, 19 nt, Artificial Sequence
  Description of Artificial Sequence: Synthetic oligonucleotide
ccccgguggcuccugcucc

SEQ ID NO: 2669861 - RNA, 19 nt, Artificial Sequence
  Description of Artificial Sequence: Synthetic oligonucleotide
ggccaguaacaggcuuagg

SEQ ID NO: 2669862 - RNA, 19 nt, Artificial Sequence
  Description of Artificial Sequence: Synthetic oligonucleotide
ccaugggaauggagcuggc

SEQ ID NO: 2669863 - RNA, 19 nt, Artificial Sequence
  Description of Artificial Sequence: Synthetic oligonucleotide
ccagguccaugcugcuuug

SEQ ID NO: 2669864 - RNA, 19 nt, Artificial Sequence
  Description of Artificial Sequence: Synthetic oligonucleotide
cccugugaguagcccggcc

SEQ ID NO: 2669865 - RNA, 19 nt, Artificial Sequence
  Description of Artificial Sequence: Synthetic oligonucleotide
cguugaucagccagaccca

SEQ ID NO: 2669866 - RNA, 19 nt, Artificial Sequence
  Description of Artificial Sequence: Synthetic oligonucleotide
cccuagugguggacgccgc

SEQ ID NO: 2669867 - RNA, 19 nt, Artificial Sequence
  Description of Artificial Sequence: Synthetic oligonucleotide
gggcuguguagcguugauc

SEQ ID NO: 2669868 - RNA, 19 nt, Artificial Sequence
  Description of Artificial Sequence: Synthetic oligonucleotide
uggggccggaguggcugca

SEQ ID NO: 2669869 - RNA, 19 nt, Artificial Sequence
  Description of Artificial Sequence: Synthetic oligonucleotide
gguuggcgacgacgaugag

SEQ ID NO: 2669870 - RNA, 19 nt, Artificial Sequence
  Description of Artificial Sequence: Synthetic oligonucleotide
ccaugcacuagcagcagau

SEQ ID NO: 2669871 - RNA, 19 nt, Artificial Sequence
  Description of Artificial Sequence: Synthetic oligonucleotide
gucccucuuggcucuuccu

SEQ ID NO: 2669872 - RNA, 19 nt, Artificial Sequence
  Description of Artificial Sequence: Synthetic oligonucleotide
ccuccccaguguuguuggg

SEQ ID NO: 2669873 - RNA, 19 nt, Artificial Sequence
  Description of Artificial Sequence: Synthetic oligonucleotide
ggugggcugcgcagguggc

SEQ ID NO: 2669874 - RNA, 19 nt, Artificial Sequence
  Description of Artificial Sequence: Synthetic oligonucleotide
agauggggccggaguggcu

SEQ ID NO: 2669875 - RNA, 19 nt, Artificial Sequence
  Description of Artificial Sequence: Synthetic oligonucleotide
ggcccuagugguggacgcc

SEQ ID NO: 2669876 - RNA, 19 nt, Artificial Sequence
  Description of Artificial Sequence: Synthetic oligonucleotide
gcagauuggcgagcaggga

SEQ ID NO: 2669877 - RNA, 19 nt, Artificial Sequence
  Description of Artificial Sequence: Synthetic oligonucleotide
gcuggggccuggacugucc

SEQ ID NO: 2669878 - RNA, 19 nt, Artificial Sequence
  Description of Artificial Sequence: Synthetic oligonucleotide
ccucuuggcucuuccucga

SEQ ID NO: 2669879 - RNA, 19 nt, Artificial Sequence
  Description of Artificial Sequence: Synthetic oligonucleotide
guagccccgguggcuccug

SEQ ID NO: 2669880 - RNA, 19 nt, Artificial Sequence
  Description of Artificial Sequence: Synthetic oligonucleotide
cuccccaguguuguugggu

SEQ ID NO: 2669881 - RNA, 19 nt, Artificial Sequence
  Description of Artificial Sequence: Synthetic oligonucleotide
ggcuacaggcacagcugca

SEQ ID NO: 2669882 - RNA, 19 nt, Artificial Sequence
  Description of Artificial Sequence: Synthetic oligonucleotide
ccuagggccaggagcaggu

SEQ ID NO: 2669883 - RNA, 19 nt, Artificial Sequence
  Description of Artificial Sequence: Synthetic oligonucleotide
gcugcaagacugccacaua

SEQ ID NO: 2669884 - RNA, 19 nt, Artificial Sequence
  Description of Artificial Sequence: Synthetic oligonucleotide
ggcgacgacgaugaggcuu

SEQ ID NO: 2669885 - RNA, 19 nt, Artificial Sequence
  Description of Artificial Sequence: Synthetic oligonucleotide
gggaaaggaaggagaaguu

SEQ ID NO: 2669886 - RNA, 19 nt, Artificial Sequence
  Description of Artificial Sequence: Synthetic oligonucleotide
cgaugaggcuugccagggc

SEQ ID NO: 2669887 - RNA, 19 nt, Artificial Sequence
  Description of Artificial Sequence: Synthetic oligonucleotide
ccccaugggaauggagcug

SEQ ID NO: 2669888 - RNA, 19 nt, Artificial Sequence
  Description of Artificial Sequence: Synthetic oligonucleotide
agguggcgauccagggcga

SEQ ID NO: 2669889 - RNA, 19 nt, Artificial Sequence
  Description of Artificial Sequence: Synthetic oligonucleotide
ggcaaugcuggggccugga

SEQ ID NO: 2669890 - RNA, 19 nt, Artificial Sequence
  Description of Artificial Sequence: Synthetic oligonucleotide
gugguggacgccgcucaua

SEQ ID NO: 2669891 - RNA, 19 nt, Artificial Sequence
  Description of Artificial Sequence: Synthetic oligonucleotide
gccccgguggcuccugcuc

SEQ ID NO: 2669892 - RNA, 19 nt, Artificial Sequence
  Description of Artificial Sequence: Synthetic oligonucleotide
gccagcccugugaguagcc

SEQ ID NO: 2669893 - RNA, 19 nt, Artificial Sequence
  Description of Artificial Sequence: Synthetic oligonucleotide
caugcacuagcagcagauu

SEQ ID NO: 2669894 - RNA, 19 nt, Artificial Sequence
  Description of Artificial Sequence: Synthetic oligonucleotide
ggccagggaaagcuccagu

SEQ ID NO: 2669895 - RNA, 19 nt, Artificial Sequence
  Description of Artificial Sequence: Synthetic oligonucleotide
ugcccuccauggggcugug

SEQ ID NO: 2669896 - RNA, 19 nt, Artificial Sequence
  Description of Artificial Sequence: Synthetic oligonucleotide
agccggcaggugggcugcg

SEQ ID NO: 2669897 - RNA, 19 nt, Artificial Sequence
  Description of Artificial Sequence: Synthetic oligonucleotide
gggcagugccagcccugug

SEQ ID NO: 2669898 - RNA, 19 nt, Artificial Sequence
  Description of Artificial Sequence: Synthetic oligonucleotide
cgaugccuagggccaggag

SEQ ID NO: 2669899 - RNA, 19 nt, Artificial Sequence
  Description of Artificial Sequence: Synthetic oligonucleotide
ccaguguuguuggguguca

SEQ ID NO: 2669900 - RNA, 19 nt, Artificial Sequence
  Description of Artificial Sequence: Synthetic oligonucleotide
cccagguccaugcugcuuu

SEQ ID NO: 2669901 - RNA, 19 nt, Artificial Sequence
  Description of Artificial Sequence: Synthetic oligonucleotide
gcccugugaguagcccggc

SEQ ID NO: 2669902 - RNA, 19 nt, Artificial Sequence
  Description of Artificial Sequence: Synthetic oligonucleotide
ggcuugccagggccaggga

SEQ ID NO: 2669903 - RNA, 19 nt, Artificial Sequence
  Description of Artificial Sequence: Synthetic oligonucleotide
gcgaugccuagggccagga

SEQ ID NO: 2669904 - RNA, 19 nt, Artificial Sequence
  Description of Artificial Sequence: Synthetic oligonucleotide
caguguuguugggugucau

SEQ ID NO: 2669905 - RNA, 19 nt, Artificial Sequence
  Description of Artificial Sequence: Synthetic oligonucleotide
ccggcaggugggcugcgca

SEQ ID NO: 2669906 - RNA, 19 nt, Artificial Sequence
  Description of Artificial Sequence: Synthetic oligonucleotide
ccaggcccuagugguggac

SEQ ID NO: 2669907 - RNA, 19 nt, Artificial Sequence
  Description of Artificial Sequence: Synthetic oligonucleotide
cagugccagcccugugagu

SEQ ID NO: 2669908 - RNA, 19 nt, Artificial Sequence
  Description of Artificial Sequence: Synthetic oligonucleotide
gcgauccagggcgaugccu

SEQ ID NO: 2669909 - RNA, 19 nt, Artificial Sequence
  Description of Artificial Sequence: Synthetic oligonucleotide
cccgguggcuccugcucca

SEQ ID NO: 2669910 - RNA, 19 nt, Artificial Sequence
  Description of Artificial Sequence: Synthetic oligonucleotide
ggggcuguguagcguugau

SEQ ID NO: 2669911 - RNA, 19 nt, Artificial Sequence
  Description of Artificial Sequence: Synthetic oligonucleotide
cagcacagauggggccgga

SEQ ID NO: 2669912 - RNA, 19 nt, Artificial Sequence
  Description of Artificial Sequence: Synthetic oligonucleotide
ccuagugguggacgccgcu

SEQ ID NO: 2669913 - RNA, 19 nt, Artificial Sequence
  Description of Artificial Sequence: Synthetic oligonucleotide
gccggcaggugggcugcgc

SEQ ID NO: 2669914 - RNA, 19 nt, Artificial Sequence
  Description of Artificial Sequence: Synthetic oligonucleotide
gcagguuggcgacgacgau

SEQ ID NO: 2669915 - RNA, 19 nt, Artificial Sequence
  Description of Artificial Sequence: Synthetic oligonucleotide
gggccuggacugucccucu

SEQ ID NO: 2669916 - RNA, 19 nt, Artificial Sequence
  Description of Artificial Sequence: Synthetic oligonucleotide
ccggaguggcugcaagacu

SEQ ID NO: 2669917 - RNA, 19 nt, Artificial Sequence
  Description of Artificial Sequence: Synthetic oligonucleotide
caggaccaguagccccggu

SEQ ID NO: 2669918 - RNA, 19 nt, Artificial Sequence
  Description of Artificial Sequence: Synthetic oligonucleotide
cuagggccaggagcagguu

SEQ ID NO: 2669919 - RNA, 19 nt, Artificial Sequence
  Description of Artificial Sequence: Synthetic oligonucleotide
gguggcgauccagggcgau

SEQ ID NO: 2669920 - RNA, 19 nt, Artificial Sequence
  Description of Artificial Sequence: Synthetic oligonucleotide
ccauggggcuguguagcgu

SEQ ID NO: 2669921 - RNA, 19 nt, Artificial Sequence
  Description of Artificial Sequence: Synthetic oligonucleotide
ggggccggaguggcugcaa

SEQ ID NO: 2669922 - RNA, 19 nt, Artificial Sequence
  Description of Artificial Sequence: Synthetic oligonucleotide
cgccgcucauaagccaaca

SEQ ID NO: 2669923 - RNA, 19 nt, Artificial Sequence
  Description of Artificial Sequence: Synthetic oligonucleotide
cgacgacgaugaggcuugc

SEQ ID NO: 2669924 - RNA, 19 nt, Artificial Sequence
  Description of Artificial Sequence: Synthetic oligonucleotide
ggccuggacugucccucuu

SEQ ID NO: 2669925 - RNA, 19 nt, Artificial Sequence
  Description of Artificial Sequence: Synthetic oligonucleotide
cagccaccuuugggcagcu

SEQ ID NO: 2669926 - RNA, 19 nt, Artificial Sequence
  Description of Artificial Sequence: Synthetic oligonucleotide
cccggccaguaacaggcuu

SEQ ID NO: 2669927 - RNA, 19 nt, Artificial Sequence
  Description of Artificial Sequence: Synthetic oligonucleotide
gcccggccaguaacaggcu

SEQ ID NO: 2669928 - RNA, 19 nt, Artificial Sequence
  Description of Artificial Sequence: Synthetic oligonucleotide
gcccuccauggggcugugu

SEQ ID NO: 2669929 - RNA, 19 nt, Artificial Sequence
  Description of Artificial Sequence: Synthetic oligonucleotide
aaagauuauaacuuuaugu

SEQ ID NO: 2669930 - RNA, 19 nt, Artificial Sequence
  Description of Artificial Sequence: Synthetic oligonucleotide
aauuagaacauuuauuaca

SEQ ID NO: 2669931 - RNA, 19 nt, Artificial Sequence
  Description of Artificial Sequence: Synthetic oligonucleotide
uaaacaguauauaacaugc

SEQ ID NO: 2669932 - RNA, 19 nt, Artificial Sequence
  Description of Artificial Sequence: Synthetic oligonucleotide
uauuaaacaguauauaaca

SEQ ID NO: 2669933 - RNA, 19 nt, Artificial Sequence
  Description of Artificial Sequence: Synthetic oligonucleotide
aaaguagagauucauaggu

SEQ ID NO: 2669934 - RNA, 19 nt, Artificial Sequence
  Description of Artificial Sequence: Synthetic oligonucleotide
uauaccauacuuuugauac

SEQ ID NO: 2669935 - RNA, 19 nt, Artificial Sequence
  Description of Artificial Sequence: Synthetic oligonucleotide
uugaaguucaauaaaauaa

SEQ ID NO: 2669936 - RNA, 19 nt, Artificial Sequence
  Description of Artificial Sequence: Synthetic oligonucleotide
aaauuagaacauuuauuac

SEQ ID NO: 2669937 - RNA, 19 nt, Artificial Sequence
  Description of Artificial Sequence: Synthetic oligonucleotide
aauagagauguauauuuag

SEQ ID NO: 2669938 - RNA, 19 nt, Artificial Sequence
  Description of Artificial Sequence: Synthetic oligonucleotide
ugauuauuuucuuauacag

SEQ ID NO: 2669939 - RNA, 19 nt, Artificial Sequence
  Description of Artificial Sequence: Synthetic oligonucleotide
uaugucaaguauuaaacag

SEQ ID NO: 2669940 - RNA, 19 nt, Artificial Sequence
  Description of Artificial Sequence: Synthetic oligonucleotide
aaaacauuuacauguauau

SEQ ID NO: 2669941 - RNA, 19 nt, Artificial Sequence
  Description of Artificial Sequence: Synthetic oligonucleotide
guaaaguagagauucauag

SEQ ID NO: 2669942 - RNA, 19 nt, Artificial Sequence
  Description of Artificial Sequence: Synthetic oligonucleotide
aagauuauaacuuuaugua

SEQ ID NO: 2669943 - RNA, 19 nt, Artificial Sequence
  Description of Artificial Sequence: Synthetic oligonucleotide
uauauugucuaaauuuuag

SEQ ID NO: 2669944 - RNA, 19 nt, Artificial Sequence
  Description of Artificial Sequence: Synthetic oligonucleotide
aaauggauaauguugaauu

SEQ ID NO: 2669945 - RNA, 19 nt, Artificial Sequence
  Description of Artificial Sequence: Synthetic oligonucleotide
aaauauugaaguucaauaa

SEQ ID NO: 2669946 - RNA, 19 nt, Artificial Sequence
  Description of Artificial Sequence: Synthetic oligonucleotide
uauugucuaaauuuuagug

SEQ ID NO: 2669947 - RNA, 19 nt, Artificial Sequence
  Description of Artificial Sequence: Synthetic oligonucleotide
gaaauuagaacauuuauua

SEQ ID NO: 2669948 - RNA, 19 nt, Artificial Sequence
  Description of Artificial Sequence: Synthetic oligonucleotide
aaaucugaaaacuuuguaa

SEQ ID NO: 2669949 - RNA, 19 nt, Artificial Sequence
  Description of Artificial Sequence: Synthetic oligonucleotide
auuuagaguuccuaaauag

SEQ ID NO: 2669950 - RNA, 19 nt, Artificial Sequence
  Description of Artificial Sequence: Synthetic oligonucleotide
aaaagcaugaaacuuccga

SEQ ID NO: 2669951 - RNA, 19 nt, Artificial Sequence
  Description of Artificial Sequence: Synthetic oligonucleotide
uuugauuauuuucuuauac

SEQ ID NO: 2669952 - RNA, 19 nt, Artificial Sequence
  Description of Artificial Sequence: Synthetic oligonucleotide
uacaguuaacauuauauug

SEQ ID NO: 2669953 - RNA, 19 nt, Artificial Sequence
  Description of Artificial Sequence: Synthetic oligonucleotide
acauguauaucacuaaauc

SEQ ID NO: 2669954 - RNA, 19 nt, Artificial Sequence
  Description of Artificial Sequence: Synthetic oligonucleotide
uuaaacaguauauaacaug

SEQ ID NO: 2669955 - RNA, 19 nt, Artificial Sequence
  Description of Artificial Sequence: Synthetic oligonucleotide
uuggauauugauuaucugc

SEQ ID NO: 2669956 - RNA, 19 nt, Artificial Sequence
  Description of Artificial Sequence: Synthetic oligonucleotide
uaaauuuuagugaaaugga

SEQ ID NO: 2669957 - RNA, 19 nt, Artificial Sequence
  Description of Artificial Sequence: Synthetic oligonucleotide
aucuccauaaaauauacca

SEQ ID NO: 2669958 - RNA, 19 nt, Artificial Sequence
  Description of Artificial Sequence: Synthetic oligonucleotide
ucaaguauuaaacaguaua

SEQ ID NO: 2669959 - RNA, 19 nt, Artificial Sequence
  Description of Artificial Sequence: Synthetic oligonucleotide
ucuuauacagcucuggcac

SEQ ID NO: 2669960 - RNA, 19 nt, Artificial Sequence
  Description of Artificial Sequence: Synthetic oligonucleotide
aacaucaagagagacacag

SEQ ID NO: 2669961 - RNA, 19 nt, Artificial Sequence
  Description of Artificial Sequence: Synthetic oligonucleotide
uaaauauugaaguucaaua

SEQ ID NO: 2669962 - RNA, 19 nt, Artificial Sequence
  Description of Artificial Sequence: Synthetic oligonucleotide
aaaauguacaguucaaaau

SEQ ID NO: 2669963 - RNA, 19 nt, Artificial Sequence
  Description of Artificial Sequence: Synthetic oligonucleotide
ugaaguucaauaaaauaac

SEQ ID NO: 2669964 - RNA, 19 nt, Artificial Sequence
  Description of Artificial Sequence: Synthetic oligonucleotide
aauauugaaguucaauaaa

SEQ ID NO: 2669965 - RNA, 19 nt, Artificial Sequence
  Description of Artificial Sequence: Synthetic oligonucleotide
auaacaugcauucugaaaa

SEQ ID NO: 2669966 - RNA, 19 nt, Artificial Sequence
  Description of Artificial Sequence: Synthetic oligonucleotide
gauaauguugaauugggca

SEQ ID NO: 2669967 - RNA, 19 nt, Artificial Sequence
  Description of Artificial Sequence: Synthetic oligonucleotide
auaaauuucuacuuuggcu

SEQ ID NO: 2669968 - RNA, 19 nt, Artificial Sequence
  Description of Artificial Sequence: Synthetic oligonucleotide
uguauaucacuaaaucucc

SEQ ID NO: 2669969 - RNA, 19 nt, Artificial Sequence
  Description of Artificial Sequence: Synthetic oligonucleotide
uaaauuucuacuuuggcua

SEQ ID NO: 2669970 - RNA, 19 nt, Artificial Sequence
  Description of Artificial Sequence: Synthetic oligonucleotide
ucaagagagacacaguaca

SEQ ID NO: 2669971 - RNA, 19 nt, Artificial Sequence
  Description of Artificial Sequence: Synthetic oligonucleotide
uuaauagagauguauauuu

SEQ ID NO: 2669972 - RNA, 19 nt, Artificial Sequence
  Description of Artificial Sequence: Synthetic oligonucleotide
uccgauuuaauagagaugu

SEQ ID NO: 2669973 - RNA, 19 nt, Artificial Sequence
  Description of Artificial Sequence: Synthetic oligonucleotide
uagagauguauauuuagag

SEQ ID NO: 2669974 - RNA, 19 nt, Artificial Sequence
  Description of Artificial Sequence: Synthetic oligonucleotide
aauacguccaccucuaaaa

SEQ ID NO: 2669975 - RNA, 19 nt, Artificial Sequence
  Description of Artificial Sequence: Synthetic oligonucleotide
uauuuucuuauacagcucu

SEQ ID NO: 2669976 - RNA, 19 nt, Artificial Sequence
  Description of Artificial Sequence: Synthetic oligonucleotide
ucuaaaagcaugaaacuuc

SEQ ID NO: 2669977 - RNA, 19 nt, Artificial Sequence
  Description of Artificial Sequence: Synthetic oligonucleotide
aguauuaaacaguauauaa

SEQ ID NO: 2669978 - RNA, 19 nt, Artificial Sequence
  Description of Artificial Sequence: Synthetic oligonucleotide
uaaaguagagauucauagg

SEQ ID NO: 2669979 - RNA, 19 nt, Artificial Sequence
  Description of Artificial Sequence: Synthetic oligonucleotide
aaauuucuacuuuggcuac

SEQ ID NO: 2669980 - RNA, 19 nt, Artificial Sequence
  Description of Artificial Sequence: Synthetic oligonucleotide
uaaaauauaccauacuuuu

SEQ ID NO: 2669981 - RNA, 19 nt, Artificial Sequence
  Description of Artificial Sequence: Synthetic oligonucleotide
aauguacaguucaaaauac

SEQ ID NO: 2669982 - RNA, 19 nt, Artificial Sequence
  Description of Artificial Sequence: Synthetic oligonucleotide
accucuaaaagcaugaaac

SEQ ID NO: 2669983 - RNA, 19 nt, Artificial Sequence
  Description of Artificial Sequence: Synthetic oligonucleotide
uauauaacaugcauucuga

SEQ ID NO: 2669984 - RNA, 19 nt, Artificial Sequence
  Description of Artificial Sequence: Synthetic oligonucleotide
uuuagugaaauggauaaug

SEQ ID NO: 2669985 - RNA, 19 nt, Artificial Sequence
  Description of Artificial Sequence: Synthetic oligonucleotide
agcaugauuugguaaaugg

SEQ ID NO: 2669986 - RNA, 19 nt, Artificial Sequence
  Description of Artificial Sequence: Synthetic oligonucleotide
auguauaucacuaaaucuc

SEQ ID NO: 2669987 - RNA, 19 nt, Artificial Sequence
  Description of Artificial Sequence: Synthetic oligonucleotide
uuuugauacagcauaggcu

SEQ ID NO: 2669988 - RNA, 19 nt, Artificial Sequence
  Description of Artificial Sequence: Synthetic oligonucleotide
uccuaaauagaaauuagaa

SEQ ID NO: 2669989 - RNA, 19 nt, Artificial Sequence
  Description of Artificial Sequence: Synthetic oligonucleotide
ucaaaauacguccaccucu

SEQ ID NO: 2669990 - RNA, 19 nt, Artificial Sequence
  Description of Artificial Sequence: Synthetic oligonucleotide
uggauauugauuaucugca

SEQ ID NO: 2669991 - RNA, 19 nt, Artificial Sequence
  Description of Artificial Sequence: Synthetic oligonucleotide
ucugaaaauuaaaauguac

SEQ ID NO: 2669992 - RNA, 19 nt, Artificial Sequence
  Description of Artificial Sequence: Synthetic oligonucleotide
gauaugucaaguauuaaac

SEQ ID NO: 2669993 - RNA, 19 nt, Artificial Sequence
  Description of Artificial Sequence: Synthetic oligonucleotide
auuuuagugaaauggauaa

SEQ ID NO: 2669994 - RNA, 19 nt, Artificial Sequence
  Description of Artificial Sequence: Synthetic oligonucleotide
uguacaguucaaaauacgu

SEQ ID NO: 2669995 - RNA, 19 nt, Artificial Sequence
  Description of Artificial Sequence: Synthetic oligonucleotide
uuagaguuccuaaauagaa

SEQ ID NO: 2669996 - RNA, 19 nt, Artificial Sequence
  Description of Artificial Sequence: Synthetic oligonucleotide
ugaaaacuuuguaaaguag

SEQ ID NO: 2669997 - RNA, 19 nt, Artificial Sequence
  Description of Artificial Sequence: Synthetic oligonucleotide
uauuugauuauuuucuuau

SEQ ID NO: 2669998 - RNA, 19 nt, Artificial Sequence
  Description of Artificial Sequence: Synthetic oligonucleotide
aaaacuuuguaaaguagag

SEQ ID NO: 2669999 - RNA, 19 nt, Artificial Sequence
  Description of Artificial Sequence: Synthetic oligonucleotide
aacaguauauaacaugcau

SEQ ID NO: 2670000 - RNA, 19 nt, Artificial Sequence
  Description of Artificial Sequence: Synthetic oligonucleotide
cauuucuuauaauuugugg

SEQ ID NO: 2670001 - RNA, 19 nt, Artificial Sequence
  Description of Artificial Sequence: Synthetic oligonucleotide
aaugaaaagacuagauuug

SEQ ID NO: 2670002 - RNA, 19 nt, Artificial Sequence
  Description of Artificial Sequence: Synthetic oligonucleotide
uguauauaggacauaaauu

SEQ ID NO: 2670003 - RNA, 19 nt, Artificial Sequence
  Description of Artificial Sequence: Synthetic oligonucleotide
guauauaacaugcauucug

SEQ ID NO: 2670004 - RNA, 19 nt, Artificial Sequence
  Description of Artificial Sequence: Synthetic oligonucleotide
uugauuaucugcacagucc

SEQ ID NO: 2670005 - RNA, 19 nt, Artificial Sequence
  Description of Artificial Sequence: Synthetic oligonucleotide
auguauauaggacauaaau

SEQ ID NO: 2670006 - RNA, 19 nt, Artificial Sequence
  Description of Artificial Sequence: Synthetic oligonucleotide
uguaacaucaagagagaca

SEQ ID NO: 2670007 - RNA, 19 nt, Artificial Sequence
  Description of Artificial Sequence: Synthetic oligonucleotide
uuuagaguuccuaaauaga

SEQ ID NO: 2670008 - RNA, 19 nt, Artificial Sequence
  Description of Artificial Sequence: Synthetic oligonucleotide
uggacauguauauaggaca

SEQ ID NO: 2670009 - RNA, 19 nt, Artificial Sequence
  Description of Artificial Sequence: Synthetic oligonucleotide
gguacuguaacaucaagag

SEQ ID NO: 2670010 - RNA, 19 nt, Artificial Sequence
  Description of Artificial Sequence: Synthetic oligonucleotide
uugaauugggcaaaaucug

SEQ ID NO: 2670011 - RNA, 19 nt, Artificial Sequence
  Description of Artificial Sequence: Synthetic oligonucleotide
uauguaaauauugaaguuc

SEQ ID NO: 2670012 - RNA, 19 nt, Artificial Sequence
  Description of Artificial Sequence: Synthetic oligonucleotide
uagguuuggauauugauua

SEQ ID NO: 2670013 - RNA, 19 nt, Artificial Sequence
  Description of Artificial Sequence: Synthetic oligonucleotide
auucugaaaauuaaaaugu

SEQ ID NO: 2670014 - RNA, 19 nt, Artificial Sequence
  Description of Artificial Sequence: Synthetic oligonucleotide
aaagcaugaaacuuccgau

SEQ ID NO: 2670015 - RNA, 19 nt, Artificial Sequence
  Description of Artificial Sequence: Synthetic oligonucleotide
guaacaucaagagagacac

SEQ ID NO: 2670016 - RNA, 19 nt, Artificial Sequence
  Description of Artificial Sequence: Synthetic oligonucleotide
uccauaaaauauaccauac

SEQ ID NO: 2670017 - RNA, 19 nt, Artificial Sequence
  Description of Artificial Sequence: Synthetic oligonucleotide
guuuucaagagauacucug

SEQ ID NO: 2670018 - RNA, 19 nt, Artificial Sequence
  Description of Artificial Sequence: Synthetic oligonucleotide
cugaaaauuaaaauguaca

SEQ ID NO: 2670019 - RNA, 19 nt, Artificial Sequence
  Description of Artificial Sequence: Synthetic oligonucleotide
uguugaauugggcaaaauc

SEQ ID NO: 2670020 - RNA, 19 nt, Artificial Sequence
  Description of Artificial Sequence: Synthetic oligonucleotide
uuacaaacgguacuguaac

SEQ ID NO: 2670021 - RNA, 19 nt, Artificial Sequence
  Description of Artificial Sequence: Synthetic oligonucleotide
aaacuuccgauuuaauaga

SEQ ID NO: 2670022 - RNA, 19 nt, Artificial Sequence
  Description of Artificial Sequence: Synthetic oligonucleotide
ugcauucugaaaauuaaaa

SEQ ID NO: 2670023 - RNA, 19 nt, Artificial Sequence
  Description of Artificial Sequence: Synthetic oligonucleotide
cucuguaugucacagguag

SEQ ID NO: 2670024 - RNA, 19 nt, Artificial Sequence
  Description of Artificial Sequence: Synthetic oligonucleotide
uauauuuagaguuccuaaa

SEQ ID NO: 2670025 - RNA, 19 nt, Artificial Sequence
  Description of Artificial Sequence: Synthetic oligonucleotide
auaggacauaaauuucuac

SEQ ID NO: 2670026 - RNA, 19 nt, Artificial Sequence
  Description of Artificial Sequence: Synthetic oligonucleotide
uuuucuuauacagcucugg

SEQ ID NO: 2670027 - RNA, 19 nt, Artificial Sequence
  Description of Artificial Sequence: Synthetic oligonucleotide
aaaaucugaaaacuuugua

SEQ ID NO: 2670028 - RNA, 19 nt, Artificial Sequence
  Description of Artificial Sequence: Synthetic oligonucleotide
uauauaggacauaaauuuc

SEQ ID NO: 2670029 - RNA, 19 nt, Artificial Sequence
  Description of Artificial Sequence: Synthetic oligonucleotide
ucuaaauuuuagugaaaug

SEQ ID NO: 2670030 - RNA, 19 nt, Artificial Sequence
  Description of Artificial Sequence: Synthetic oligonucleotide
aagagagacacaguacagg

SEQ ID NO: 2670031 - RNA, 19 nt, Artificial Sequence
  Description of Artificial Sequence: Synthetic oligonucleotide
uuauaauuuguggacaacu

SEQ ID NO: 2670032 - RNA, 19 nt, Artificial Sequence
  Description of Artificial Sequence: Synthetic oligonucleotide
uuugccaagauaugucaag

SEQ ID NO: 2670033 - RNA, 19 nt, Artificial Sequence
  Description of Artificial Sequence: Synthetic oligonucleotide
uuucuuauacagcucuggc

SEQ ID NO: 2670034 - RNA, 19 nt, Artificial Sequence
  Description of Artificial Sequence: Synthetic oligonucleotide
uuccuaaauagaaauuaga

SEQ ID NO: 2670035 - RNA, 19 nt, Artificial Sequence
  Description of Artificial Sequence: Synthetic oligonucleotide
uaauuuguggacaacuuuu

SEQ ID NO: 2670036 - RNA, 19 nt, Artificial Sequence
  Description of Artificial Sequence: Synthetic oligonucleotide
agauaugucaaguauuaaa

SEQ ID NO: 2670037 - RNA, 19 nt, Artificial Sequence
  Description of Artificial Sequence: Synthetic oligonucleotide
auaauguugaauugggcaa

SEQ ID NO: 2670038 - RNA, 19 nt, Artificial Sequence
  Description of Artificial Sequence: Synthetic oligonucleotide
agaguuccuaaauagaaau

SEQ ID NO: 2670039 - RNA, 19 nt, Artificial Sequence
  Description of Artificial Sequence: Synthetic oligonucleotide
acuagauuugccaagauau

SEQ ID NO: 2670040 - RNA, 19 nt, Artificial Sequence
  Description of Artificial Sequence: Synthetic oligonucleotide
uaucacuaaaucuccauaa

SEQ ID NO: 2670041 - RNA, 19 nt, Artificial Sequence
  Description of Artificial Sequence: Synthetic oligonucleotide
ugguaaaugggacaguguc

SEQ ID NO: 2670042 - RNA, 19 nt, Artificial Sequence
  Description of Artificial Sequence: Synthetic oligonucleotide
guuaacauuauauugucua

SEQ ID NO: 2670043 - RNA, 19 nt, Artificial Sequence
  Description of Artificial Sequence: Synthetic oligonucleotide
agagauguauauuuagagu

SEQ ID NO: 2670044 - RNA, 19 nt, Artificial Sequence
  Description of Artificial Sequence: Synthetic oligonucleotide
aguucaaaauacguccacc

SEQ ID NO: 2670045 - RNA, 19 nt, Artificial Sequence
  Description of Artificial Sequence: Synthetic oligonucleotide
ucugaaaacuuuguaaagu

SEQ ID NO: 2670046 - RNA, 19 nt, Artificial Sequence
  Description of Artificial Sequence: Synthetic oligonucleotide
ugaauugggcaaaaucuga

SEQ ID NO: 2670047 - RNA, 19 nt, Artificial Sequence
  Description of Artificial Sequence: Synthetic oligonucleotide
auacuuuugauacagcaua

SEQ ID NO: 2670048 - RNA, 19 nt, Artificial Sequence
  Description of Artificial Sequence: Synthetic oligonucleotide
uauugaaguucaauaaaau

SEQ ID NO: 2670049 - RNA, 19 nt, Artificial Sequence
  Description of Artificial Sequence: Synthetic oligonucleotide
ugaaacuuccgauuuaaua

SEQ ID NO: 2670050 - RNA, 19 nt, Artificial Sequence
  Description of Artificial Sequence: Synthetic oligonucleotide
gauguauauuuagaguucc

SEQ ID NO: 2670051 - RNA, 19 nt, Artificial Sequence
  Description of Artificial Sequence: Synthetic oligonucleotide
ugucaaguauuaaacagua

SEQ ID NO: 2670052 - RNA, 19 nt, Artificial Sequence
  Description of Artificial Sequence: Synthetic oligonucleotide
gauauugauuaucugcaca

SEQ ID NO: 2670053 - RNA, 19 nt, Artificial Sequence
  Description of Artificial Sequence: Synthetic oligonucleotide
uacuuuugauacagcauag

SEQ ID NO: 2670054 - RNA, 19 nt, Artificial Sequence
  Description of Artificial Sequence: Synthetic oligonucleotide
acuaaaucuccauaaaaua

SEQ ID NO: 2670055 - RNA, 19 nt, Artificial Sequence
  Description of Artificial Sequence: Synthetic oligonucleotide
uccauuucuuauaauuugu

SEQ ID NO: 2670056 - RNA, 19 nt, Artificial Sequence
  Description of Artificial Sequence: Synthetic oligonucleotide
aauuuguggacaacuuuuc

SEQ ID NO: 2670057 - RNA, 19 nt, Artificial Sequence
  Description of Artificial Sequence: Synthetic oligonucleotide
agauuauaacuuuauguaa

SEQ ID NO: 2670058 - RNA, 19 nt, Artificial Sequence
  Description of Artificial Sequence: Synthetic oligonucleotide
caugauuugguaaauggga

SEQ ID NO: 2670059 - RNA, 19 nt, Artificial Sequence
  Description of Artificial Sequence: Synthetic oligonucleotide
guauauaggacauaaauuu

SEQ ID NO: 2670060 - RNA, 19 nt, Artificial Sequence
  Description of Artificial Sequence: Synthetic oligonucleotide
auaugucaaguauuaaaca

SEQ ID NO: 2670061 - RNA, 19 nt, Artificial Sequence
  Description of Artificial Sequence: Synthetic oligonucleotide
aacuuuauguaaauauuga

SEQ ID NO: 2670062 - RNA, 19 nt, Artificial Sequence
  Description of Artificial Sequence: Synthetic oligonucleotide
uuacauguauaucacuaaa

SEQ ID NO: 2670063 - RNA, 19 nt, Artificial Sequence
  Description of Artificial Sequence: Synthetic oligonucleotide
agagauacucuguauguca

SEQ ID NO: 2670064 - RNA, 19 nt, Artificial Sequence
  Description of Artificial Sequence: Synthetic oligonucleotide
acagugucaguuuucaaga

SEQ ID NO: 2670065 - RNA, 19 nt, Artificial Sequence
  Description of Artificial Sequence: Synthetic oligonucleotide
agauucauagguuuggaua

SEQ ID NO: 2670066 - RNA, 19 nt, Artificial Sequence
  Description of Artificial Sequence: Synthetic oligonucleotide
uuuaccuuuauuugauuau

SEQ ID NO: 2670067 - RNA, 19 nt, Artificial Sequence
  Description of Artificial Sequence: Synthetic oligonucleotide
acaguuaacauuauauugu

SEQ ID NO: 2670068 - RNA, 19 nt, Artificial Sequence
  Description of Artificial Sequence: Synthetic oligonucleotide
uacaggagccaccagaaaa

SEQ ID NO: 2670069 - RNA, 19 nt, Artificial Sequence
  Description of Artificial Sequence: Synthetic oligonucleotide
guauuaaacaguauauaac

SEQ ID NO: 2670070 - RNA, 19 nt, Artificial Sequence
  Description of Artificial Sequence: Synthetic oligonucleotide
acagguaggaaugaaaaga

SEQ ID NO: 2670071 - RNA, 19 nt, Artificial Sequence
  Description of Artificial Sequence: Synthetic oligonucleotide
auauugucuaaauuuuagu

SEQ ID NO: 2670072 - RNA, 19 nt, Artificial Sequence
  Description of Artificial Sequence: Synthetic oligonucleotide
auauuuagaguuccuaaau

SEQ ID NO: 2670073 - RNA, 19 nt, Artificial Sequence
  Description of Artificial Sequence: Synthetic oligonucleotide
guaaaugggacagugucag

SEQ ID NO: 2670074 - RNA, 19 nt, Artificial Sequence
  Description of Artificial Sequence: Synthetic oligonucleotide
uuaacauuauauugucuaa

SEQ ID NO: 2670075 - RNA, 19 nt, Artificial Sequence
  Description of Artificial Sequence: Synthetic oligonucleotide
aucugaaaacuuuguaaag

SEQ ID NO: 2670076 - RNA, 19 nt, Artificial Sequence
  Description of Artificial Sequence: Synthetic oligonucleotide
uucuuauacagcucuggca

SEQ ID NO: 2670077 - RNA, 19 nt, Artificial Sequence
  Description of Artificial Sequence: Synthetic oligonucleotide
aauauaccauacuuuugau

SEQ ID NO: 2670078 - RNA, 19 nt, Artificial Sequence
  Description of Artificial Sequence: Synthetic oligonucleotide
uaccauacuuuugauacag

SEQ ID NO: 2670079 - RNA, 19 nt, Artificial Sequence
  Description of Artificial Sequence: Synthetic oligonucleotide
uauaauuuguggacaacuu

SEQ ID NO: 2670080 - RNA, 19 nt, Artificial Sequence
  Description of Artificial Sequence: Synthetic oligonucleotide
aauuuuagugaaauggaua

SEQ ID NO: 2670081 - RNA, 19 nt, Artificial Sequence
  Description of Artificial Sequence: Synthetic oligonucleotide
ucuuauaauuuguggacaa

SEQ ID NO: 2670082 - RNA, 19 nt, Artificial Sequence
  Description of Artificial Sequence: Synthetic oligonucleotide
aagagauacucuguauguc

SEQ ID NO: 2670083 - RNA, 19 nt, Artificial Sequence
  Description of Artificial Sequence: Synthetic oligonucleotide
uguaaaguagagauucaua

SEQ ID NO: 2670084 - RNA, 19 nt, Artificial Sequence
  Description of Artificial Sequence: Synthetic oligonucleotide
ucuccauaaaauauaccau

SEQ ID NO: 2670085 - RNA, 19 nt, Artificial Sequence
  Description of Artificial Sequence: Synthetic oligonucleotide
ugauuugguaaaugggaca

SEQ ID NO: 2670086 - RNA, 19 nt, Artificial Sequence
  Description of Artificial Sequence: Synthetic oligonucleotide
uuauguaaauauugaaguu

SEQ ID NO: 2670087 - RNA, 19 nt, Artificial Sequence
  Description of Artificial Sequence: Synthetic oligonucleotide
ucuggacauguauauagga

SEQ ID NO: 2670088 - RNA, 19 nt, Artificial Sequence
  Description of Artificial Sequence: Synthetic oligonucleotide
uuauauugucuaaauuuua

SEQ ID NO: 2670089 - RNA, 19 nt, Artificial Sequence
  Description of Artificial Sequence: Synthetic oligonucleotide
gauuugccaagauauguca

SEQ ID NO: 2670090 - RNA, 19 nt, Artificial Sequence
  Description of Artificial Sequence: Synthetic oligonucleotide
augauuugguaaaugggac

SEQ ID NO: 2670091 - RNA, 19 nt, Artificial Sequence
  Description of Artificial Sequence: Synthetic oligonucleotide
uugggcaaaaucugaaaac

SEQ ID NO: 2670092 - RNA, 19 nt, Artificial Sequence
  Description of Artificial Sequence: Synthetic oligonucleotide
aaauuuuagugaaauggau

SEQ ID NO: 2670093 - RNA, 19 nt, Artificial Sequence
  Description of Artificial Sequence: Synthetic oligonucleotide
uucuuuaccuuuauuugau

SEQ ID NO: 2670094 - RNA, 19 nt, Artificial Sequence
  Description of Artificial Sequence: Synthetic oligonucleotide
uuuggcuacaguuaacauu

SEQ ID NO: 2670095 - RNA, 19 nt, Artificial Sequence
  Description of Artificial Sequence: Synthetic oligonucleotide
uuuguaaaguagagauuca

SEQ ID NO: 2670096 - RNA, 19 nt, Artificial Sequence
  Description of Artificial Sequence: Synthetic oligonucleotide
uuuggauauugauuaucug

SEQ ID NO: 2670097 - RNA, 19 nt, Artificial Sequence
  Description of Artificial Sequence: Synthetic oligonucleotide
auuagaacauuuauuacaa

SEQ ID NO: 2670098 - RNA, 19 nt, Artificial Sequence
  Description of Artificial Sequence: Synthetic oligonucleotide
uaaaagcaugaaacuuccg

SEQ ID NO: 2670099 - RNA, 19 nt, Artificial Sequence
  Description of Artificial Sequence: Synthetic oligonucleotide
ccuaaauagaaauuagaac

SEQ ID NO: 2670100 - RNA, 19 nt, Artificial Sequence
  Description of Artificial Sequence: Synthetic oligonucleotide
aguagagauucauagguuu

SEQ ID NO: 2670101 - RNA, 19 nt, Artificial Sequence
  Description of Artificial Sequence: Synthetic oligonucleotide
aaacgguacuguaacauca

SEQ ID NO: 2670102 - RNA, 19 nt, Artificial Sequence
  Description of Artificial Sequence: Synthetic oligonucleotide
uccaccucuaaaagcauga

SEQ ID NO: 2670103 - RNA, 19 nt, Artificial Sequence
  Description of Artificial Sequence: Synthetic oligonucleotide
uuuaauagagauguauauu

SEQ ID NO: 2670104 - RNA, 19 nt, Artificial Sequence
  Description of Artificial Sequence: Synthetic oligonucleotide
aacauuuauuacaaacggu

SEQ ID NO: 2670105 - RNA, 19 nt, Artificial Sequence
  Description of Artificial Sequence: Synthetic oligonucleotide
gagauguauauuuagaguu

SEQ ID NO: 2670106 - RNA, 19 nt, Artificial Sequence
  Description of Artificial Sequence: Synthetic oligonucleotide
uagauuugccaagauaugu

SEQ ID NO: 2670107 - RNA, 19 nt, Artificial Sequence
  Description of Artificial Sequence: Synthetic oligonucleotide
aaauacguccaccucuaaa

SEQ ID NO: 2670108 - RNA, 19 nt, Artificial Sequence
  Description of Artificial Sequence: Synthetic oligonucleotide
cagguaggaaugaaaagac

SEQ ID NO: 2670109 - RNA, 19 nt, Artificial Sequence
  Description of Artificial Sequence: Synthetic oligonucleotide
ucuguaugucacagguagg

SEQ ID NO: 2670110 - RNA, 19 nt, Artificial Sequence
  Description of Artificial Sequence: Synthetic oligonucleotide
uaggcuagcaugauuuggu

SEQ ID NO: 2670111 - RNA, 19 nt, Artificial Sequence
  Description of Artificial Sequence: Synthetic oligonucleotide
uuucaagagauacucugua

SEQ ID NO: 2670112 - RNA, 19 nt, Artificial Sequence
  Description of Artificial Sequence: Synthetic oligonucleotide
aaacuuuguaaaguagaga

SEQ ID NO: 2670113 - RNA, 19 nt, Artificial Sequence
  Description of Artificial Sequence: Synthetic oligonucleotide
acauuuauuacaaacggua

SEQ ID NO: 2670114 - RNA, 19 nt, Artificial Sequence
  Description of Artificial Sequence: Synthetic oligonucleotide
guaggaaugaaaagacuag

SEQ ID NO: 2670115 - RNA, 19 nt, Artificial Sequence
  Description of Artificial Sequence: Synthetic oligonucleotide
uuauuugauuauuuucuua

SEQ ID NO: 2670116 - RNA, 19 nt, Artificial Sequence
  Description of Artificial Sequence: Synthetic oligonucleotide
uucuuauaauuuguggaca

SEQ ID NO: 2670117 - RNA, 19 nt, Artificial Sequence
  Description of Artificial Sequence: Synthetic oligonucleotide
agauguauauuuagaguuc

SEQ ID NO: 2670118 - RNA, 19 nt, Artificial Sequence
  Description of Artificial Sequence: Synthetic oligonucleotide
auuauauugucuaaauuuu

SEQ ID NO: 2670119 - RNA, 19 nt, Artificial Sequence
  Description of Artificial Sequence: Synthetic oligonucleotide
uucugaaaauuaaaaugua

SEQ ID NO: 2670120 - RNA, 19 nt, Artificial Sequence
  Description of Artificial Sequence: Synthetic oligonucleotide
auguaaauauugaaguuca

SEQ ID NO: 2670121 - RNA, 19 nt, Artificial Sequence
  Description of Artificial Sequence: Synthetic oligonucleotide
auaaaauauaccauacuuu

SEQ ID NO: 2670122 - RNA, 19 nt, Artificial Sequence
  Description of Artificial Sequence: Synthetic oligonucleotide
uagaguuccuaaauagaaa

SEQ ID NO: 2670123 - RNA, 19 nt, Artificial Sequence
  Description of Artificial Sequence: Synthetic oligonucleotide
guugaauugggcaaaaucu

SEQ ID NO: 2670124 - RNA, 19 nt, Artificial Sequence
  Description of Artificial Sequence: Synthetic oligonucleotide
guauauuuagaguuccuaa

SEQ ID NO: 2670125 - RNA, 19 nt, Artificial Sequence
  Description of Artificial Sequence: Synthetic oligonucleotide
aguuccuaaauagaaauua

SEQ ID NO: 2670126 - RNA, 19 nt, Artificial Sequence
  Description of Artificial Sequence: Synthetic oligonucleotide
uuccgauuuaauagagaug

SEQ ID NO: 2670127 - RNA, 19 nt, Artificial Sequence
  Description of Artificial Sequence: Synthetic oligonucleotide
auaauuuguggacaacuuu

SEQ ID NO: 2670128 - RNA, 19 nt, Artificial Sequence
  Description of Artificial Sequence: Synthetic oligonucleotide
aaguauuaaacaguauaua

SEQ ID NO: 2670129 - RNA, 19 nt, Artificial Sequence
  Description of Artificial Sequence: Synthetic oligonucleotide
agauuugccaagauauguc

SEQ ID NO: 2670130 - RNA, 19 nt, Artificial Sequence
  Description of Artificial Sequence: Synthetic oligonucleotide
uucaaaauacguccaccuc

SEQ ID NO: 2670131 - RNA, 19 nt, Artificial Sequence
  Description of Artificial Sequence: Synthetic oligonucleotide
uuauuuucuuauacagcuc

SEQ ID NO: 2670132 - RNA, 19 nt, Artificial Sequence
  Description of Artificial Sequence: Synthetic oligonucleotide
gauuuaauagagauguaua

SEQ ID NO: 2670133 - RNA, 19 nt, Artificial Sequence
  Description of Artificial Sequence: Synthetic oligonucleotide
uguauauuuagaguuccua

SEQ ID NO: 2670134 - RNA, 19 nt, Artificial Sequence
  Description of Artificial Sequence: Synthetic oligonucleotide
gauucauagguuuggauau

SEQ ID NO: 2670135 - RNA, 19 nt, Artificial Sequence
  Description of Artificial Sequence: Synthetic oligonucleotide
aucugcacaguccauuucu

SEQ ID NO: 2670136 - RNA, 19 nt, Artificial Sequence
  Description of Artificial Sequence: Synthetic oligonucleotide
aagcaugaaacuuccgauu

SEQ ID NO: 2670137 - RNA, 19 nt, Artificial Sequence
  Description of Artificial Sequence: Synthetic oligonucleotide
acauguauauaggacauaa

SEQ ID NO: 2670138 - RNA, 19 nt, Artificial Sequence
  Description of Artificial Sequence: Synthetic oligonucleotide
uaggaaugaaaagacuaga

SEQ ID NO: 2670139 - RNA, 19 nt, Artificial Sequence
  Description of Artificial Sequence: Synthetic oligonucleotide
guucaauaaaauaacuuaa

SEQ ID NO: 2670140 - RNA, 19 nt, Artificial Sequence
  Description of Artificial Sequence: Synthetic oligonucleotide
auaggcuagcaugauuugg

SEQ ID NO: 2670141 - RNA, 19 nt, Artificial Sequence
  Description of Artificial Sequence: Synthetic oligonucleotide
uauuacaaacgguacugua

SEQ ID NO: 2670142 - RNA, 19 nt, Artificial Sequence
  Description of Artificial Sequence: Synthetic oligonucleotide
auacguccaccucuaaaag

SEQ ID NO: 2670143 - RNA, 19 nt, Artificial Sequence
  Description of Artificial Sequence: Synthetic oligonucleotide
agugucaguuuucaagaga

SEQ ID NO: 2670144 - RNA, 19 nt, Artificial Sequence
  Description of Artificial Sequence: Synthetic oligonucleotide
caguuaacauuauauuguc

SEQ ID NO: 2670145 - RNA, 19 nt, Artificial Sequence
  Description of Artificial Sequence: Synthetic oligonucleotide
aaauagaaauuagaacauu

SEQ ID NO: 2670146 - RNA, 19 nt, Artificial Sequence
  Description of Artificial Sequence: Synthetic oligonucleotide
caagagagacacaguacag

SEQ ID NO: 2670147 - RNA, 19 nt, Artificial Sequence
  Description of Artificial Sequence: Synthetic oligonucleotide
aacuuccgauuuaauagag

SEQ ID NO: 2670148 - RNA, 19 nt, Artificial Sequence
  Description of Artificial Sequence: Synthetic oligonucleotide
acuuuugauacagcauagg

SEQ ID NO: 2670149 - RNA, 19 nt, Artificial Sequence
  Description of Artificial Sequence: Synthetic oligonucleotide
cuagauuugccaagauaug

SEQ ID NO: 2670150 - RNA, 19 nt, Artificial Sequence
  Description of Artificial Sequence: Synthetic oligonucleotide
uucauagguuuggauauug

SEQ ID NO: 2670151 - RNA, 19 nt, Artificial Sequence
  Description of Artificial Sequence: Synthetic oligonucleotide
auagagauguauauuuaga

SEQ ID NO: 2670152 - RNA, 19 nt, Artificial Sequence
  Description of Artificial Sequence: Synthetic oligonucleotide
cauguauaucacuaaaucu

SEQ ID NO: 2670153 - RNA, 19 nt, Artificial Sequence
  Description of Artificial Sequence: Synthetic oligonucleotide
aaugggacagugucaguuu

SEQ ID NO: 2670154 - RNA, 19 nt, Artificial Sequence
  Description of Artificial Sequence: Synthetic oligonucleotide
cacagguaggaaugaaaag

SEQ ID NO: 2670155 - RNA, 19 nt, Artificial Sequence
  Description of Artificial Sequence: Synthetic oligonucleotide
caagauaugucaaguauua

SEQ ID NO: 2670156 - RNA, 19 nt, Artificial Sequence
  Description of Artificial Sequence: Synthetic oligonucleotide
agcaugaaacuuccgauuu

SEQ ID NO: 2670157 - RNA, 19 nt, Artificial Sequence
  Description of Artificial Sequence: Synthetic oligonucleotide
auuacaaacgguacuguaa

SEQ ID NO: 2670158 - RNA, 19 nt, Artificial Sequence
  Description of Artificial Sequence: Synthetic oligonucleotide
cuaaaucuccauaaaauau

SEQ ID NO: 2670159 - RNA, 19 nt, Artificial Sequence
  Description of Artificial Sequence: Synthetic oligonucleotide
uuauacagcucuggcacug

SEQ ID NO: 2670160 - RNA, 19 nt, Artificial Sequence
  Description of Artificial Sequence: Synthetic oligonucleotide
acuuuggcuacaguuaaca

SEQ ID NO: 2670161 - RNA, 19 nt, Artificial Sequence
  Description of Artificial Sequence: Synthetic oligonucleotide
uguaaauauugaaguucaa

SEQ ID NO: 2670162 - RNA, 19 nt, Artificial Sequence
  Description of Artificial Sequence: Synthetic oligonucleotide
auauaccauacuuuugaua

SEQ ID NO: 2670163 - RNA, 19 nt, Artificial Sequence
  Description of Artificial Sequence: Synthetic oligonucleotide
auguacaguucaaaauacg

SEQ ID NO: 2670164 - RNA, 19 nt, Artificial Sequence
  Description of Artificial Sequence: Synthetic oligonucleotide
uucaagagauacucuguau

SEQ ID NO: 2670165 - RNA, 19 nt, Artificial Sequence
  Description of Artificial Sequence: Synthetic oligonucleotide
auuaaacaguauauaacau

SEQ ID NO: 2670166 - RNA, 19 nt, Artificial Sequence
  Description of Artificial Sequence: Synthetic oligonucleotide
uaacaugcauucugaaaau

SEQ ID NO: 2670167 - RNA, 19 nt, Artificial Sequence
  Description of Artificial Sequence: Synthetic oligonucleotide
caugcauucugaaaauuaa

SEQ ID NO: 2670168 - RNA, 19 nt, Artificial Sequence
  Description of Artificial Sequence: Synthetic oligonucleotide
aaacaguauauaacaugca

SEQ ID NO: 2670169 - RNA, 19 nt, Artificial Sequence
  Description of Artificial Sequence: Synthetic oligonucleotide
uugguaaaugggacagugu

SEQ ID NO: 2670170 - RNA, 19 nt, Artificial Sequence
  Description of Artificial Sequence: Synthetic oligonucleotide
cuccauaaaauauaccaua

SEQ ID NO: 2670171 - RNA, 19 nt, Artificial Sequence
  Description of Artificial Sequence: Synthetic oligonucleotide
uuauuacaaacgguacugu

SEQ ID NO: 2670172 - RNA, 19 nt, Artificial Sequence
  Description of Artificial Sequence: Synthetic oligonucleotide
cuuuaccuuuauuugauua

SEQ ID NO: 2670173 - RNA, 19 nt, Artificial Sequence
  Description of Artificial Sequence: Synthetic oligonucleotide
caaacgguacuguaacauc

SEQ ID NO: 2670174 - RNA, 19 nt, Artificial Sequence
  Description of Artificial Sequence: Synthetic oligonucleotide
auuugauuauuuucuuaua

SEQ ID NO: 2670175 - RNA, 19 nt, Artificial Sequence
  Description of Artificial Sequence: Synthetic oligonucleotide
cugaaaacuuuguaaagua

SEQ ID NO: 2670176 - RNA, 19 nt, Artificial Sequence
  Description of Artificial Sequence: Synthetic oligonucleotide
ugucuaaauuuuagugaaa

SEQ ID NO: 2670177 - RNA, 19 nt, Artificial Sequence
  Description of Artificial Sequence: Synthetic oligonucleotide
acaaacgguacuguaacau

SEQ ID NO: 2670178 - RNA, 19 nt, Artificial Sequence
  Description of Artificial Sequence: Synthetic oligonucleotide
auauaacaugcauucugaa

SEQ ID NO: 2670179 - RNA, 19 nt, Artificial Sequence
  Description of Artificial Sequence: Synthetic oligonucleotide
uaccuuuauuugauuauuu

SEQ ID NO: 2670180 - RNA, 19 nt, Artificial Sequence
  Description of Artificial Sequence: Synthetic oligonucleotide
uaauguugaauugggcaaa

SEQ ID NO: 2670181 - RNA, 19 nt, Artificial Sequence
  Description of Artificial Sequence: Synthetic oligonucleotide
uuaucugcacaguccauuu

SEQ ID NO: 2670182 - RNA, 19 nt, Artificial Sequence
  Description of Artificial Sequence: Synthetic oligonucleotide
caucaagagagacacagua

SEQ ID NO: 2670183 - RNA, 19 nt, Artificial Sequence
  Description of Artificial Sequence: Synthetic oligonucleotide
uacaaacgguacuguaaca

SEQ ID NO: 2670184 - RNA, 19 nt, Artificial Sequence
  Description of Artificial Sequence: Synthetic oligonucleotide
uuagaacauuuauuacaaa

SEQ ID NO: 2670185 - RNA, 19 nt, Artificial Sequence
  Description of Artificial Sequence: Synthetic oligonucleotide
gcaugauuugguaaauggg

SEQ ID NO: 2670186 - RNA, 19 nt, Artificial Sequence
  Description of Artificial Sequence: Synthetic oligonucleotide
auuaaaauguacaguucaa

SEQ ID NO: 2670187 - RNA, 19 nt, Artificial Sequence
  Description of Artificial Sequence: Synthetic oligonucleotide
auagguuuggauauugauu

SEQ ID NO: 2670188 - RNA, 19 nt, Artificial Sequence
  Description of Artificial Sequence: Synthetic oligonucleotide
aguauauaacaugcauucu

SEQ ID NO: 2670189 - RNA, 19 nt, Artificial Sequence
  Description of Artificial Sequence: Synthetic oligonucleotide
acaguauauaacaugcauu

SEQ ID NO: 2670190 - RNA, 19 nt, Artificial Sequence
  Description of Artificial Sequence: Synthetic oligonucleotide
cuuccgauuuaauagagau

SEQ ID NO: 2670191 - RNA, 19 nt, Artificial Sequence
  Description of Artificial Sequence: Synthetic oligonucleotide
cacuaaaucuccauaaaau

SEQ ID NO: 2670192 - RNA, 19 nt, Artificial Sequence
  Description of Artificial Sequence: Synthetic oligonucleotide
acugacacuuuacuuuaaa

SEQ ID NO: 2670193 - RNA, 19 nt, Artificial Sequence
  Description of Artificial Sequence: Synthetic oligonucleotide
gacuagauuugccaagaua

SEQ ID NO: 2670194 - RNA, 19 nt, Artificial Sequence
  Description of Artificial Sequence: Synthetic oligonucleotide
aauguugaauugggcaaaa

SEQ ID NO: 2670195 - RNA, 19 nt, Artificial Sequence
  Description of Artificial Sequence: Synthetic oligonucleotide
gagacacaguacaggagcc

SEQ ID NO: 2670196 - RNA, 19 nt, Artificial Sequence
  Description of Artificial Sequence: Synthetic oligonucleotide
acgguacuguaacaucaag

SEQ ID NO: 2670197 - RNA, 19 nt, Artificial Sequence
  Description of Artificial Sequence: Synthetic oligonucleotide
gagagacacaguacaggag

SEQ ID NO: 2670198 - RNA, 19 nt, Artificial Sequence
  Description of Artificial Sequence: Synthetic oligonucleotide
gacacaguacaggagccac

SEQ ID NO: 2670199 - RNA, 19 nt, Artificial Sequence
  Description of Artificial Sequence: Synthetic oligonucleotide
aagauaugucaaguauuaa

SEQ ID NO: 2670200 - RNA, 19 nt, Artificial Sequence
  Description of Artificial Sequence: Synthetic oligonucleotide
cauaggcuagcaugauuug

SEQ ID NO: 2670201 - RNA, 19 nt, Artificial Sequence
  Description of Artificial Sequence: Synthetic oligonucleotide
uuuuagugaaauggauaau

SEQ ID NO: 2670202 - RNA, 19 nt, Artificial Sequence
  Description of Artificial Sequence: Synthetic oligonucleotide
auuaucugcacaguccauu

SEQ ID NO: 2670203 - RNA, 19 nt, Artificial Sequence
  Description of Artificial Sequence: Synthetic oligonucleotide
gguaggaaugaaaagacua

SEQ ID NO: 2670204 - RNA, 19 nt, Artificial Sequence
  Description of Artificial Sequence: Synthetic oligonucleotide
guuuggauauugauuaucu

SEQ ID NO: 2670205 - RNA, 19 nt, Artificial Sequence
  Description of Artificial Sequence: Synthetic oligonucleotide
aaaauacguccaccucuaa

SEQ ID NO: 2670206 - RNA, 19 nt, Artificial Sequence
  Description of Artificial Sequence: Synthetic oligonucleotide
aguccauuucuuauaauuu

SEQ ID NO: 2670207 - RNA, 19 nt, Artificial Sequence
  Description of Artificial Sequence: Synthetic oligonucleotide
aaaucuggacauguauaua

SEQ ID NO: 2670208 - RNA, 19 nt, Artificial Sequence
  Description of Artificial Sequence: Synthetic oligonucleotide
aguuaacauuauauugucu

SEQ ID NO: 2670209 - RNA, 19 nt, Artificial Sequence
  Description of Artificial Sequence: Synthetic oligonucleotide
cagugucaguuuucaagag

SEQ ID NO: 2670210 - RNA, 19 nt, Artificial Sequence
  Description of Artificial Sequence: Synthetic oligonucleotide
cuguaacaucaagagagac

SEQ ID NO: 2670211 - RNA, 19 nt, Artificial Sequence
  Description of Artificial Sequence: Synthetic oligonucleotide
aacaugcauucugaaaauu

SEQ ID NO: 2670212 - RNA, 19 nt, Artificial Sequence
  Description of Artificial Sequence: Synthetic oligonucleotide
uguggacaacuuuuccaaa

SEQ ID NO: 2670213 - RNA, 19 nt, Artificial Sequence
  Description of Artificial Sequence: Synthetic oligonucleotide
uagcaugauuugguaaaug

SEQ ID NO: 2670214 - RNA, 19 nt, Artificial Sequence
  Description of Artificial Sequence: Synthetic oligonucleotide
aaguagagauucauagguu

SEQ ID NO: 2670215 - RNA, 19 nt, Artificial Sequence
  Description of Artificial Sequence: Synthetic oligonucleotide
gcuagcaugauuugguaaa

SEQ ID NO: 2670216 - RNA, 19 nt, Artificial Sequence
  Description of Artificial Sequence: Synthetic oligonucleotide
ugccaagauaugucaagua

SEQ ID NO: 2670217 - RNA, 19 nt, Artificial Sequence
  Description of Artificial Sequence: Synthetic oligonucleotide
accauacuuuugauacagc

SEQ ID NO: 2670218 - RNA, 19 nt, Artificial Sequence
  Description of Artificial Sequence: Synthetic oligonucleotide
uacuuuggcuacaguuaac

SEQ ID NO: 2670219 - RNA, 19 nt, Artificial Sequence
  Description of Artificial Sequence: Synthetic oligonucleotide
guaaauauugaaguucaau

SEQ ID NO: 2670220 - RNA, 19 nt, Artificial Sequence
  Description of Artificial Sequence: Synthetic oligonucleotide
cuguaugucacagguagga

SEQ ID NO: 2670221 - RNA, 19 nt, Artificial Sequence
  Description of Artificial Sequence: Synthetic oligonucleotide
acacaguacaggagccacc

SEQ ID NO: 2670222 - RNA, 19 nt, Artificial Sequence
  Description of Artificial Sequence: Synthetic oligonucleotide
acaugcauucugaaaauua

SEQ ID NO: 2670223 - RNA, 19 nt, Artificial Sequence
  Description of Artificial Sequence: Synthetic oligonucleotide
auuuucuuauacagcucug

SEQ ID NO: 2670224 - RNA, 19 nt, Artificial Sequence
  Description of Artificial Sequence: Synthetic oligonucleotide
agagauucauagguuugga

SEQ ID NO: 2670225 - RNA, 19 nt, Artificial Sequence
  Description of Artificial Sequence: Synthetic oligonucleotide
aguacaggagccaccagaa

SEQ ID NO: 2670226 - RNA, 19 nt, Artificial Sequence
  Description of Artificial Sequence: Synthetic oligonucleotide
caaaauacguccaccucua

SEQ ID NO: 2670227 - RNA, 19 nt, Artificial Sequence
  Description of Artificial Sequence: Synthetic oligonucleotide
ccauuucuuauaauuugug

SEQ ID NO: 2670228 - RNA, 19 nt, Artificial Sequence
  Description of Artificial Sequence: Synthetic oligonucleotide
ggauauugauuaucugcac

SEQ ID NO: 2670229 - RNA, 19 nt, Artificial Sequence
  Description of Artificial Sequence: Synthetic oligonucleotide
ucuuuaccuuuauuugauu

SEQ ID NO: 2670230 - RNA, 19 nt, Artificial Sequence
  Description of Artificial Sequence: Synthetic oligonucleotide
gaaauggauaauguugaau

SEQ ID NO: 2670231 - RNA, 19 nt, Artificial Sequence
  Description of Artificial Sequence: Synthetic oligonucleotide
ccauacuuuugauacagca

SEQ ID NO: 2670232 - RNA, 19 nt, Artificial Sequence
  Description of Artificial Sequence: Synthetic oligonucleotide
acuguaacaucaagagaga

SEQ ID NO: 2670233 - RNA, 19 nt, Artificial Sequence
  Description of Artificial Sequence: Synthetic oligonucleotide
cauacuuuugauacagcau

SEQ ID NO: 2670234 - RNA, 19 nt, Artificial Sequence
  Description of Artificial Sequence: Synthetic oligonucleotide
guaugucacagguaggaau

SEQ ID NO: 2670235 - RNA, 19 nt, Artificial Sequence
  Description of Artificial Sequence: Synthetic oligonucleotide
aacgguacuguaacaucaa

SEQ ID NO: 2670236 - RNA, 19 nt, Artificial Sequence
  Description of Artificial Sequence: Synthetic oligonucleotide
gcuacaguuaacauuauau

SEQ ID NO: 2670237 - RNA, 19 nt, Artificial Sequence
  Description of Artificial Sequence: Synthetic oligonucleotide
ugggacagugucaguuuuc

SEQ ID NO: 2670238 - RNA, 19 nt, Artificial Sequence
  Description of Artificial Sequence: Synthetic oligonucleotide
uaaaugggacagugucagu

SEQ ID NO: 2670239 - RNA, 19 nt, Artificial Sequence
  Description of Artificial Sequence: Synthetic oligonucleotide
ggauaauguugaauugggc

SEQ ID NO: 2670240 - RNA, 19 nt, Artificial Sequence
  Description of Artificial Sequence: Synthetic oligonucleotide
cauagguuuggauauugau

SEQ ID NO: 2670241 - RNA, 19 nt, Artificial Sequence
  Description of Artificial Sequence: Synthetic oligonucleotide
guauaucacuaaaucucca

SEQ ID NO: 2670242 - RNA, 19 nt, Artificial Sequence
  Description of Artificial Sequence: Synthetic oligonucleotide
agcauaggcuagcaugauu

SEQ ID NO: 2670243 - RNA, 19 nt, Artificial Sequence
  Description of Artificial Sequence: Synthetic oligonucleotide
cacaguccauuucuuauaa

SEQ ID NO: 2670244 - RNA, 19 nt, Artificial Sequence
  Description of Artificial Sequence: Synthetic oligonucleotide
caguccauuucuuauaauu

SEQ ID NO: 2670245 - RNA, 19 nt, Artificial Sequence
  Description of Artificial Sequence: Synthetic oligonucleotide
augcauucugaaaauuaaa

SEQ ID NO: 2670246 - RNA, 19 nt, Artificial Sequence
  Description of Artificial Sequence: Synthetic oligonucleotide
gccaccagaaaaucuggac

SEQ ID NO: 2670247 - RNA, 19 nt, Artificial Sequence
  Description of Artificial Sequence: Synthetic oligonucleotide
agguaggaaugaaaagacu

SEQ ID NO: 2670248 - RNA, 19 nt, Artificial Sequence
  Description of Artificial Sequence: Synthetic oligonucleotide
auuugccaagauaugucaa

SEQ ID NO: 2670249 - RNA, 19 nt, Artificial Sequence
  Description of Artificial Sequence: Synthetic oligonucleotide
gguuuggauauugauuauc

SEQ ID NO: 2670250 - RNA, 19 nt, Artificial Sequence
  Description of Artificial Sequence: Synthetic oligonucleotide
accagaaaaucuggacaug

SEQ ID NO: 2670251 - RNA, 19 nt, Artificial Sequence
  Description of Artificial Sequence: Synthetic oligonucleotide
ggaaugaaaagacuagauu

SEQ ID NO: 2670252 - RNA, 19 nt, Artificial Sequence
  Description of Artificial Sequence: Synthetic oligonucleotide
acuuccgauuuaauagaga

SEQ ID NO: 2670253 - RNA, 19 nt, Artificial Sequence
  Description of Artificial Sequence: Synthetic oligonucleotide
ugucacagguaggaaugaa

SEQ ID NO: 2670254 - RNA, 19 nt, Artificial Sequence
  Description of Artificial Sequence: Synthetic oligonucleotide
gagauucauagguuuggau

SEQ ID NO: 2670255 - RNA, 19 nt, Artificial Sequence
  Description of Artificial Sequence: Synthetic oligonucleotide
agacuagauuugccaagau

SEQ ID NO: 2670256 - RNA, 19 nt, Artificial Sequence
  Description of Artificial Sequence: Synthetic oligonucleotide
auguauauuuagaguuccu

SEQ ID NO: 2670257 - RNA, 19 nt, Artificial Sequence
  Description of Artificial Sequence: Synthetic oligonucleotide
auuugguaaaugggacagu

SEQ ID NO: 2670258 - RNA, 19 nt, Artificial Sequence
  Description of Artificial Sequence: Synthetic oligonucleotide
gugucaguuuucaagagau

SEQ ID NO: 2670259 - RNA, 19 nt, Artificial Sequence
  Description of Artificial Sequence: Synthetic oligonucleotide
auacagcauaggcuagcau

SEQ ID NO: 2670260 - RNA, 19 nt, Artificial Sequence
  Description of Artificial Sequence: Synthetic oligonucleotide
ccaccagaaaaucuggaca

SEQ ID NO: 2670261 - RNA, 19 nt, Artificial Sequence
  Description of Artificial Sequence: Synthetic oligonucleotide
caccucuaaaagcaugaaa

SEQ ID NO: 2670262 - RNA, 19 nt, Artificial Sequence
  Description of Artificial Sequence: Synthetic oligonucleotide
agacacaguacaggagcca

SEQ ID NO: 2670263 - RNA, 19 nt, Artificial Sequence
  Description of Artificial Sequence: Synthetic oligonucleotide
guccaccucuaaaagcaug

SEQ ID NO: 2670264 - RNA, 19 nt, Artificial Sequence
  Description of Artificial Sequence: Synthetic oligonucleotide
ggcacugacacuuuacuuu

SEQ ID NO: 2670265 - RNA, 19 nt, Artificial Sequence
  Description of Artificial Sequence: Synthetic oligonucleotide
aggagccaccagaaaaucu

SEQ ID NO: 2670266 - RNA, 19 nt, Artificial Sequence
  Description of Artificial Sequence: Synthetic oligonucleotide
aggcuagcaugauuuggua

SEQ ID NO: 2670267 - RNA, 19 nt, Artificial Sequence
  Description of Artificial Sequence: Synthetic oligonucleotide
cucuaaaagcaugaaacuu

SEQ ID NO: 2670268 - RNA, 19 nt, Artificial Sequence
  Description of Artificial Sequence: Synthetic oligonucleotide
gccaagauaugucaaguau

SEQ ID NO: 2670269 - RNA, 19 nt, Artificial Sequence
  Description of Artificial Sequence: Synthetic oligonucleotide
auucauagguuuggauauu

SEQ ID NO: 2670270 - RNA, 19 nt, Artificial Sequence
  Description of Artificial Sequence: Synthetic oligonucleotide
ggcuagcaugauuugguaa

SEQ ID NO: 2670271 - RNA, 19 nt, Artificial Sequence
  Description of Artificial Sequence: Synthetic oligonucleotide
caggagccaccagaaaauc

SEQ ID NO: 2670272 - RNA, 19 nt, Artificial Sequence
  Description of Artificial Sequence: Synthetic oligonucleotide
cuuauacagcucuggcacu

SEQ ID NO: 2670273 - RNA, 19 nt, Artificial Sequence
  Description of Artificial Sequence: Synthetic oligonucleotide
gacauguauauaggacaua

SEQ ID NO: 2670274 - RNA, 19 nt, Artificial Sequence
  Description of Artificial Sequence: Synthetic oligonucleotide
ggacauaaauuucuacuuu

SEQ ID NO: 2670275 - RNA, 19 nt, Artificial Sequence
  Description of Artificial Sequence: Synthetic oligonucleotide
gcacugacacuuuacuuua

SEQ ID NO: 2670276 - RNA, 19 nt, Artificial Sequence
  Description of Artificial Sequence: Synthetic oligonucleotide
cuggcacugacacuuuacu

SEQ ID NO: 2670277 - RNA, 19 nt, Artificial Sequence
  Description of Artificial Sequence: Synthetic oligonucleotide
augaaacuuccgauuuaau

SEQ ID NO: 2670278 - RNA, 19 nt, Artificial Sequence
  Description of Artificial Sequence: Synthetic oligonucleotide
ggcaaaaucugaaaacuuu

SEQ ID NO: 2670279 - RNA, 19 nt, Artificial Sequence
  Description of Artificial Sequence: Synthetic oligonucleotide
auguugaauugggcaaaau

SEQ ID NO: 2670280 - RNA, 19 nt, Artificial Sequence
  Description of Artificial Sequence: Synthetic oligonucleotide
cuuuggcuacaguuaacau

SEQ ID NO: 2670281 - RNA, 19 nt, Artificial Sequence
  Description of Artificial Sequence: Synthetic oligonucleotide
gaguuccuaaauagaaauu

SEQ ID NO: 2670282 - RNA, 19 nt, Artificial Sequence
  Description of Artificial Sequence: Synthetic oligonucleotide
ccucuaaaagcaugaaacu

SEQ ID NO: 2670283 - RNA, 19 nt, Artificial Sequence
  Description of Artificial Sequence: Synthetic oligonucleotide
gcauaggcuagcaugauuu

SEQ ID NO: 2670284 - RNA, 19 nt, Artificial Sequence
  Description of Artificial Sequence: Synthetic oligonucleotide
cgguacuguaacaucaaga

SEQ ID NO: 2670285 - RNA, 19 nt, Artificial Sequence
  Description of Artificial Sequence: Synthetic oligonucleotide
guacaggagccaccagaaa

SEQ ID NO: 2670286 - RNA, 19 nt, Artificial Sequence
  Description of Artificial Sequence: Synthetic oligonucleotide
ccauaaaauauaccauacu

SEQ ID NO: 2670287 - RNA, 19 nt, Artificial Sequence
  Description of Artificial Sequence: Synthetic oligonucleotide
gcacaguccauuucuuaua

SEQ ID NO: 2670288 - RNA, 19 nt, Artificial Sequence
  Description of Artificial Sequence: Synthetic oligonucleotide
ggacauguauauaggacau

SEQ ID NO: 2670289 - RNA, 19 nt, Artificial Sequence
  Description of Artificial Sequence: Synthetic oligonucleotide
ggcuacaguuaacauuaua

SEQ ID NO: 2670290 - RNA, 19 nt, Artificial Sequence
  Description of Artificial Sequence: Synthetic oligonucleotide
ccaagauaugucaaguauu

SEQ ID NO: 2670291 - RNA, 19 nt, Artificial Sequence
  Description of Artificial Sequence: Synthetic oligonucleotide
acucuguaugucacaggua

SEQ ID NO: 2670292 - RNA, 19 nt, Artificial Sequence
  Description of Artificial Sequence: Synthetic oligonucleotide
gauuaucugcacaguccau

SEQ ID NO: 2670293 - RNA, 19 nt, Artificial Sequence
  Description of Artificial Sequence: Synthetic oligonucleotide
gcaugaaacuuccgauuua

SEQ ID NO: 2670294 - RNA, 19 nt, Artificial Sequence
  Description of Artificial Sequence: Synthetic oligonucleotide
cacugacacuuuacuuuaa

SEQ ID NO: 2670295 - RNA, 19 nt, Artificial Sequence
  Description of Artificial Sequence: Synthetic oligonucleotide
gucaaguauuaaacaguau

SEQ ID NO: 2670296 - RNA, 19 nt, Artificial Sequence
  Description of Artificial Sequence: Synthetic oligonucleotide
cuagcaugauuugguaaau

SEQ ID NO: 2670297 - RNA, 19 nt, Artificial Sequence
  Description of Artificial Sequence: Synthetic oligonucleotide
cgauuuaauagagauguau

SEQ ID NO: 2670298 - RNA, 19 nt, Artificial Sequence
  Description of Artificial Sequence: Synthetic oligonucleotide
ggacagugucaguuuucaa

SEQ ID NO: 2670299 - RNA, 19 nt, Artificial Sequence
  Description of Artificial Sequence: Synthetic oligonucleotide
ccgauuuaauagagaugua

SEQ ID NO: 2670300 - RNA, 19 nt, Artificial Sequence
  Description of Artificial Sequence: Synthetic oligonucleotide
cagcucuggcacugacacu

SEQ ID NO: 2670301 - RNA, 19 nt, Artificial Sequence
  Description of Artificial Sequence: Synthetic oligonucleotide
ccaccucuaaaagcaugaa

SEQ ID NO: 2670302 - RNA, 19 nt, Artificial Sequence
  Description of Artificial Sequence: Synthetic oligonucleotide
cagcauaggcuagcaugau

SEQ ID NO: 2670303 - RNA, 19 nt, Artificial Sequence
  Description of Artificial Sequence: Synthetic oligonucleotide
gcucuggcacugacacuuu

SEQ ID NO: 2670304 - RNA, 19 nt, Artificial Sequence
  Description of Artificial Sequence: Synthetic oligonucleotide
aagaauaugaaauccauac

SEQ ID NO: 2670305 - RNA, 19 nt, Artificial Sequence
  Description of Artificial Sequence: Synthetic oligonucleotide
uaaagaauaauccacacca

SEQ ID NO: 2670306 - RNA, 19 nt, Artificial Sequence
  Description of Artificial Sequence: Synthetic oligonucleotide
cauuaaauaaucaaggcug

SEQ ID NO: 2670307 - RNA, 19 nt, Artificial Sequence
  Description of Artificial Sequence: Synthetic oligonucleotide
accauuauuuauuagacag

SEQ ID NO: 2670308 - RNA, 19 nt, Artificial Sequence
  Description of Artificial Sequence: Synthetic oligonucleotide
ucagcuaagaauaugaaau

SEQ ID NO: 2670309 - RNA, 19 nt, Artificial Sequence
  Description of Artificial Sequence: Synthetic oligonucleotide
augaaauccauacucacac

SEQ ID NO: 2670310 - RNA, 19 nt, Artificial Sequence
  Description of Artificial Sequence: Synthetic oligonucleotide
uccacaaagaaucaugucc

SEQ ID NO: 2670311 - RNA, 19 nt, Artificial Sequence
  Description of Artificial Sequence: Synthetic oligonucleotide
aacuuaaagaauaauccac

SEQ ID NO: 2670312 - RNA, 19 nt, Artificial Sequence
  Description of Artificial Sequence: Synthetic oligonucleotide
uuauuuauuagacaggauu

SEQ ID NO: 2670313 - RNA, 19 nt, Artificial Sequence
  Description of Artificial Sequence: Synthetic oligonucleotide
aucuagaaguguuugaaac

SEQ ID NO: 2670314 - RNA, 19 nt, Artificial Sequence
  Description of Artificial Sequence: Synthetic oligonucleotide
uaaauagucauuaaauaau

SEQ ID NO: 2670315 - RNA, 19 nt, Artificial Sequence
  Description of Artificial Sequence: Synthetic oligonucleotide
auaaauagucauuaaauaa

SEQ ID NO: 2670316 - RNA, 19 nt, Artificial Sequence
  Description of Artificial Sequence: Synthetic oligonucleotide
cuuucaacacaauucaugc

SEQ ID NO: 2670317 - RNA, 19 nt, Artificial Sequence
  Description of Artificial Sequence: Synthetic oligonucleotide
aaauaaauagucauuaaau

SEQ ID NO: 2670318 - RNA, 19 nt, Artificial Sequence
  Description of Artificial Sequence: Synthetic oligonucleotide
uauuuauuagacaggauuc

SEQ ID NO: 2670319 - RNA, 19 nt, Artificial Sequence
  Description of Artificial Sequence: Synthetic oligonucleotide
uauaguguauucuacugcc

SEQ ID NO: 2670320 - RNA, 19 nt, Artificial Sequence
  Description of Artificial Sequence: Synthetic oligonucleotide
aaauagucauuaaauaauc

SEQ ID NO: 2670321 - RNA, 19 nt, Artificial Sequence
  Description of Artificial Sequence: Synthetic oligonucleotide
gacccaauauuucacaagg

SEQ ID NO: 2670322 - RNA, 19 nt, Artificial Sequence
  Description of Artificial Sequence: Synthetic oligonucleotide
uuaaagaauaauccacacc

SEQ ID NO: 2670323 - RNA, 19 nt, Artificial Sequence
  Description of Artificial Sequence: Synthetic oligonucleotide
uguugucacaucuagaagu

SEQ ID NO: 2670324 - RNA, 19 nt, Artificial Sequence
  Description of Artificial Sequence: Synthetic oligonucleotide
uauuagacaggauucagcu

SEQ ID NO: 2670325 - RNA, 19 nt, Artificial Sequence
  Description of Artificial Sequence: Synthetic oligonucleotide
gaagacaaaauaaauaguc

SEQ ID NO: 2670326 - RNA, 19 nt, Artificial Sequence
  Description of Artificial Sequence: Synthetic oligonucleotide
agucauuaaauaaucaagg

SEQ ID NO: 2670327 - RNA, 19 nt, Artificial Sequence
  Description of Artificial Sequence: Synthetic oligonucleotide
aauccauacucacacuguc

SEQ ID NO: 2670328 - RNA, 19 nt, Artificial Sequence
  Description of Artificial Sequence: Synthetic oligonucleotide
uucaacacaauucaugcuc

SEQ ID NO: 2670329 - RNA, 19 nt, Artificial Sequence
  Description of Artificial Sequence: Synthetic oligonucleotide
auaugaaauccauacucac

SEQ ID NO: 2670330 - RNA, 19 nt, Artificial Sequence
  Description of Artificial Sequence: Synthetic oligonucleotide
uaagcuuugggcaaccagc

SEQ ID NO: 2670331 - RNA, 19 nt, Artificial Sequence
  Description of Artificial Sequence: Synthetic oligonucleotide
caauauuucacaaggugag

SEQ ID NO: 2670332 - RNA, 19 nt, Artificial Sequence
  Description of Artificial Sequence: Synthetic oligonucleotide
auucaugcucaccaggccc

SEQ ID NO: 2670333 - RNA, 19 nt, Artificial Sequence
  Description of Artificial Sequence: Synthetic oligonucleotide
aaauaaucaaggcuguuuu

SEQ ID NO: 2670334 - RNA, 19 nt, Artificial Sequence
  Description of Artificial Sequence: Synthetic oligonucleotide
aucaccauuauuuauuaga

SEQ ID NO: 2670335 - RNA, 19 nt, Artificial Sequence
  Description of Artificial Sequence: Synthetic oligonucleotide
agcuaagaauaugaaaucc

SEQ ID NO: 2670336 - RNA, 19 nt, Artificial Sequence
  Description of Artificial Sequence: Synthetic oligonucleotide
aagaauaauccacaccaga

SEQ ID NO: 2670337 - RNA, 19 nt, Artificial Sequence
  Description of Artificial Sequence: Synthetic oligonucleotide
auuauacagggcucugucc

SEQ ID NO: 2670338 - RNA, 19 nt, Artificial Sequence
  Description of Artificial Sequence: Synthetic oligonucleotide
uuagacaggauucagcuuu

SEQ ID NO: 2670339 - RNA, 19 nt, Artificial Sequence
  Description of Artificial Sequence: Synthetic oligonucleotide
aaccagggauuauacaggg

SEQ ID NO: 2670340 - RNA, 19 nt, Artificial Sequence
  Description of Artificial Sequence: Synthetic oligonucleotide
gacaccaacaucuccagug

SEQ ID NO: 2670341 - RNA, 19 nt, Artificial Sequence
  Description of Artificial Sequence: Synthetic oligonucleotide
uuauuagacaggauucagc

SEQ ID NO: 2670342 - RNA, 19 nt, Artificial Sequence
  Description of Artificial Sequence: Synthetic oligonucleotide
ucaccauuauuuauuagac

SEQ ID NO: 2670343 - RNA, 19 nt, Artificial Sequence
  Description of Artificial Sequence: Synthetic oligonucleotide
auauuucacaaggugagac

SEQ ID NO: 2670344 - RNA, 19 nt, Artificial Sequence
  Description of Artificial Sequence: Synthetic oligonucleotide
uuauacagggcucuguccu

SEQ ID NO: 2670345 - RNA, 19 nt, Artificial Sequence
  Description of Artificial Sequence: Synthetic oligonucleotide
uaugaaauccauacucaca

SEQ ID NO: 2670346 - RNA, 19 nt, Artificial Sequence
  Description of Artificial Sequence: Synthetic oligonucleotide
aauaugaaauccauacuca

SEQ ID NO: 2670347 - RNA, 19 nt, Artificial Sequence
  Description of Artificial Sequence: Synthetic oligonucleotide
ugagacagaguugaaaacc

SEQ ID NO: 2670348 - RNA, 19 nt, Artificial Sequence
  Description of Artificial Sequence: Synthetic oligonucleotide
uucuuuaagacaccaacau

SEQ ID NO: 2670349 - RNA, 19 nt, Artificial Sequence
  Description of Artificial Sequence: Synthetic oligonucleotide
caaaaugaccccugcaagg

SEQ ID NO: 2670350 - RNA, 19 nt, Artificial Sequence
  Description of Artificial Sequence: Synthetic oligonucleotide
aguuguugcccacggaggc

SEQ ID NO: 2670351 - RNA, 19 nt, Artificial Sequence
  Description of Artificial Sequence: Synthetic oligonucleotide
aacacaauucaugcucacc

SEQ ID NO: 2670352 - RNA, 19 nt, Artificial Sequence
  Description of Artificial Sequence: Synthetic oligonucleotide
uaauccacaccagagcugg

SEQ ID NO: 2670353 - RNA, 19 nt, Artificial Sequence
  Description of Artificial Sequence: Synthetic oligonucleotide
aguguugucacaucuagaa

SEQ ID NO: 2670354 - RNA, 19 nt, Artificial Sequence
  Description of Artificial Sequence: Synthetic oligonucleotide
ggaaccagggauuauacag

SEQ ID NO: 2670355 - RNA, 19 nt, Artificial Sequence
  Description of Artificial Sequence: Synthetic oligonucleotide
acacaauucaugcucacca

SEQ ID NO: 2670356 - RNA, 19 nt, Artificial Sequence
  Description of Artificial Sequence: Synthetic oligonucleotide
cuuaaagaauaauccacac

SEQ ID NO: 2670357 - RNA, 19 nt, Artificial Sequence
  Description of Artificial Sequence: Synthetic oligonucleotide
cuuuaagacaccaacaucu

SEQ ID NO: 2670358 - RNA, 19 nt, Artificial Sequence
  Description of Artificial Sequence: Synthetic oligonucleotide
ucuagaaguguuugaaacu

SEQ ID NO: 2670359 - RNA, 19 nt, Artificial Sequence
  Description of Artificial Sequence: Synthetic oligonucleotide
uuuauuagacaggauucag

SEQ ID NO: 2670360 - RNA, 19 nt, Artificial Sequence
  Description of Artificial Sequence: Synthetic oligonucleotide
aaaacccuggaguauccug

SEQ ID NO: 2670361 - RNA, 19 nt, Artificial Sequence
  Description of Artificial Sequence: Synthetic oligonucleotide
aaucauguccuuucuggga

SEQ ID NO: 2670362 - RNA, 19 nt, Artificial Sequence
  Description of Artificial Sequence: Synthetic oligonucleotide
agaauaauccacaccagag

SEQ ID NO: 2670363 - RNA, 19 nt, Artificial Sequence
  Description of Artificial Sequence: Synthetic oligonucleotide
cuauaguguauucuacugc

SEQ ID NO: 2670364 - RNA, 19 nt, Artificial Sequence
  Description of Artificial Sequence: Synthetic oligonucleotide
uucacaaggugagacagag

SEQ ID NO: 2670365 - RNA, 19 nt, Artificial Sequence
  Description of Artificial Sequence: Synthetic oligonucleotide
cauacucacacugucagag

SEQ ID NO: 2670366 - RNA, 19 nt, Artificial Sequence
  Description of Artificial Sequence: Synthetic oligonucleotide
aguauccugggccauaugu

SEQ ID NO: 2670367 - RNA, 19 nt, Artificial Sequence
  Description of Artificial Sequence: Synthetic oligonucleotide
aauagucauuaaauaauca

SEQ ID NO: 2670368 - RNA, 19 nt, Artificial Sequence
  Description of Artificial Sequence: Synthetic oligonucleotide
aacucagcuaagaauauga

SEQ ID NO: 2670369 - RNA, 19 nt, Artificial Sequence
  Description of Artificial Sequence: Synthetic oligonucleotide
ucaacacaauucaugcuca

SEQ ID NO: 2670370 - RNA, 19 nt, Artificial Sequence
  Description of Artificial Sequence: Synthetic oligonucleotide
ucuccacaaagaaucaugu

SEQ ID NO: 2670371 - RNA, 19 nt, Artificial Sequence
  Description of Artificial Sequence: Synthetic oligonucleotide
caaagaaucauguccuuuc

SEQ ID NO: 2670372 - RNA, 19 nt, Artificial Sequence
  Description of Artificial Sequence: Synthetic oligonucleotide
aaaugaccccugcaagggg

SEQ ID NO: 2670373 - RNA, 19 nt, Artificial Sequence
  Description of Artificial Sequence: Synthetic oligonucleotide
ugcaaggggaggaagacaa

SEQ ID NO: 2670374 - RNA, 19 nt, Artificial Sequence
  Description of Artificial Sequence: Synthetic oligonucleotide
aagaaucauguccuuucug

SEQ ID NO: 2670375 - RNA, 19 nt, Artificial Sequence
  Description of Artificial Sequence: Synthetic oligonucleotide
ucuuuaagacaccaacauc

SEQ ID NO: 2670376 - RNA, 19 nt, Artificial Sequence
  Description of Artificial Sequence: Synthetic oligonucleotide
uauuucacaaggugagaca

SEQ ID NO: 2670377 - RNA, 19 nt, Artificial Sequence
  Description of Artificial Sequence: Synthetic oligonucleotide
ugggaacucagucacuggc

SEQ ID NO: 2670378 - RNA, 19 nt, Artificial Sequence
  Description of Artificial Sequence: Synthetic oligonucleotide
gauuauacagggcucuguc

SEQ ID NO: 2670379 - RNA, 19 nt, Artificial Sequence
  Description of Artificial Sequence: Synthetic oligonucleotide
uaguguauucuacugccac

SEQ ID NO: 2670380 - RNA, 19 nt, Artificial Sequence
  Description of Artificial Sequence: Synthetic oligonucleotide
gagagaaggccugugaccc

SEQ ID NO: 2670381 - RNA, 19 nt, Artificial Sequence
  Description of Artificial Sequence: Synthetic oligonucleotide
gaaccagggauuauacagg

SEQ ID NO: 2670382 - RNA, 19 nt, Artificial Sequence
  Description of Artificial Sequence: Synthetic oligonucleotide
uaagaauaugaaauccaua

SEQ ID NO: 2670383 - RNA, 19 nt, Artificial Sequence
  Description of Artificial Sequence: Synthetic oligonucleotide
aaggccugugacccugacc

SEQ ID NO: 2670384 - RNA, 19 nt, Artificial Sequence
  Description of Artificial Sequence: Synthetic oligonucleotide
ugacccaauauuucacaag

SEQ ID NO: 2670385 - RNA, 19 nt, Artificial Sequence
  Description of Artificial Sequence: Synthetic oligonucleotide
ucugcucucaggauggaaa

SEQ ID NO: 2670386 - RNA, 19 nt, Artificial Sequence
  Description of Artificial Sequence: Synthetic oligonucleotide
ugacuguuucuuuaagaca

SEQ ID NO: 2670387 - RNA, 19 nt, Artificial Sequence
  Description of Artificial Sequence: Synthetic oligonucleotide
uuuaagacaccaacaucuc

SEQ ID NO: 2670388 - RNA, 19 nt, Artificial Sequence
  Description of Artificial Sequence: Synthetic oligonucleotide
cauuauuuauuagacagga

SEQ ID NO: 2670389 - RNA, 19 nt, Artificial Sequence
  Description of Artificial Sequence: Synthetic oligonucleotide
caggauucagcuuucaaca

SEQ ID NO: 2670390 - RNA, 19 nt, Artificial Sequence
  Description of Artificial Sequence: Synthetic oligonucleotide
acuuaaagaauaauccaca

SEQ ID NO: 2670391 - RNA, 19 nt, Artificial Sequence
  Description of Artificial Sequence: Synthetic oligonucleotide
aggauucagcuuucaacac

SEQ ID NO: 2670392 - RNA, 19 nt, Artificial Sequence
  Description of Artificial Sequence: Synthetic oligonucleotide
gagacagaguugaaaaccc

SEQ ID NO: 2670393 - RNA, 19 nt, Artificial Sequence
  Description of Artificial Sequence: Synthetic oligonucleotide
acagaguugaaaacccugg

SEQ ID NO: 2670394 - RNA, 19 nt, Artificial Sequence
  Description of Artificial Sequence: Synthetic oligonucleotide
ugucccuucuccacaaaga

SEQ ID NO: 2670395 - RNA, 19 nt, Artificial Sequence
  Description of Artificial Sequence: Synthetic oligonucleotide
agcuauaguguauucuacu

SEQ ID NO: 2670396 - RNA, 19 nt, Artificial Sequence
  Description of Artificial Sequence: Synthetic oligonucleotide
uugggcaaccagcaggccc

SEQ ID NO: 2670397 - RNA, 19 nt, Artificial Sequence
  Description of Artificial Sequence: Synthetic oligonucleotide
aguugaaaacccuggagua

SEQ ID NO: 2670398 - RNA, 19 nt, Artificial Sequence
  Description of Artificial Sequence: Synthetic oligonucleotide
ugaaaacccuggaguaucc

SEQ ID NO: 2670399 - RNA, 19 nt, Artificial Sequence
  Description of Artificial Sequence: Synthetic oligonucleotide
agggcucuguccuagcuag

SEQ ID NO: 2670400 - RNA, 19 nt, Artificial Sequence
  Description of Artificial Sequence: Synthetic oligonucleotide
ugucacaucuagaaguguu

SEQ ID NO: 2670401 - RNA, 19 nt, Artificial Sequence
  Description of Artificial Sequence: Synthetic oligonucleotide
ucugggacugggcugaguc

SEQ ID NO: 2670402 - RNA, 19 nt, Artificial Sequence
  Description of Artificial Sequence: Synthetic oligonucleotide
uuucaacacaauucaugcu

SEQ ID NO: 2670403 - RNA, 19 nt, Artificial Sequence
  Description of Artificial Sequence: Synthetic oligonucleotide
gaaucugagcuauagugua

SEQ ID NO: 2670404 - RNA, 19 nt, Artificial Sequence
  Description of Artificial Sequence: Synthetic oligonucleotide
gaguugaaaacccuggagu

SEQ ID NO: 2670405 - RNA, 19 nt, Artificial Sequence
  Description of Artificial Sequence: Synthetic oligonucleotide
guauucuacugccacuccc

SEQ ID NO: 2670406 - RNA, 19 nt, Artificial Sequence
  Description of Artificial Sequence: Synthetic oligonucleotide
ggaguuguugcccacggag

SEQ ID NO: 2670407 - RNA, 19 nt, Artificial Sequence
  Description of Artificial Sequence: Synthetic oligonucleotide
cuaagcuuugggcaaccag

SEQ ID NO: 2670408 - RNA, 19 nt, Artificial Sequence
  Description of Artificial Sequence: Synthetic oligonucleotide
gacagaguugaaaacccug

SEQ ID NO: 2670409 - RNA, 19 nt, Artificial Sequence
  Description of Artificial Sequence: Synthetic oligonucleotide
ugccacucccaaaaugacc

SEQ ID NO: 2670410 - RNA, 19 nt, Artificial Sequence
  Description of Artificial Sequence: Synthetic oligonucleotide
cagggguuaggguaggaag

SEQ ID NO: 2670411 - RNA, 19 nt, Artificial Sequence
  Description of Artificial Sequence: Synthetic oligonucleotide
uuuggugugacuguuucuu

SEQ ID NO: 2670412 - RNA, 19 nt, Artificial Sequence
  Description of Artificial Sequence: Synthetic oligonucleotide
uacugccacucccaaaaug

SEQ ID NO: 2670413 - RNA, 19 nt, Artificial Sequence
  Description of Artificial Sequence: Synthetic oligonucleotide
ugucagaggggugagggca

SEQ ID NO: 2670414 - RNA, 19 nt, Artificial Sequence
  Description of Artificial Sequence: Synthetic oligonucleotide
gcuuugggcaaccagcagg

SEQ ID NO: 2670415 - RNA, 19 nt, Artificial Sequence
  Description of Artificial Sequence: Synthetic oligonucleotide
uguuucuuuaagacaccaa

SEQ ID NO: 2670416 - RNA, 19 nt, Artificial Sequence
  Description of Artificial Sequence: Synthetic oligonucleotide
gcuauaguguauucuacug

SEQ ID NO: 2670417 - RNA, 19 nt, Artificial Sequence
  Description of Artificial Sequence: Synthetic oligonucleotide
auacucacacugucagagg

SEQ ID NO: 2670418 - RNA, 19 nt, Artificial Sequence
  Description of Artificial Sequence: Synthetic oligonucleotide
aguguauucuacugccacu

SEQ ID NO: 2670419 - RNA, 19 nt, Artificial Sequence
  Description of Artificial Sequence: Synthetic oligonucleotide
gaggaagacaaaauaaaua

SEQ ID NO: 2670420 - RNA, 19 nt, Artificial Sequence
  Description of Artificial Sequence: Synthetic oligonucleotide
ugacccugacccaauauuu

SEQ ID NO: 2670421 - RNA, 19 nt, Artificial Sequence
  Description of Artificial Sequence: Synthetic oligonucleotide
gaguuguugcccacggagg

SEQ ID NO: 2670422 - RNA, 19 nt, Artificial Sequence
  Description of Artificial Sequence: Synthetic oligonucleotide
aaccuaagcuuugggcaac

SEQ ID NO: 2670423 - RNA, 19 nt, Artificial Sequence
  Description of Artificial Sequence: Synthetic oligonucleotide
ucuguccuagcuaggcucu

SEQ ID NO: 2670424 - RNA, 19 nt, Artificial Sequence
  Description of Artificial Sequence: Synthetic oligonucleotide
cagcuaagaauaugaaauc

SEQ ID NO: 2670425 - RNA, 19 nt, Artificial Sequence
  Description of Artificial Sequence: Synthetic oligonucleotide
ugggaaccagggauuauac

SEQ ID NO: 2670426 - RNA, 19 nt, Artificial Sequence
  Description of Artificial Sequence: Synthetic oligonucleotide
cacaauucaugcucaccag

SEQ ID NO: 2670427 - RNA, 19 nt, Artificial Sequence
  Description of Artificial Sequence: Synthetic oligonucleotide
ugucaucaccauuauuuau

SEQ ID NO: 2670428 - RNA, 19 nt, Artificial Sequence
  Description of Artificial Sequence: Synthetic oligonucleotide
augucccuucuccacaaag

SEQ ID NO: 2670429 - RNA, 19 nt, Artificial Sequence
  Description of Artificial Sequence: Synthetic oligonucleotide
gauucagcuuucaacacaa

SEQ ID NO: 2670430 - RNA, 19 nt, Artificial Sequence
  Description of Artificial Sequence: Synthetic oligonucleotide
ggugagacagaguugaaaa

SEQ ID NO: 2670431 - RNA, 19 nt, Artificial Sequence
  Description of Artificial Sequence: Synthetic oligonucleotide
ccauuauuuauuagacagg

SEQ ID NO: 2670432 - RNA, 19 nt, Artificial Sequence
  Description of Artificial Sequence: Synthetic oligonucleotide
uugucaucaccauuauuua

SEQ ID NO: 2670433 - RNA, 19 nt, Artificial Sequence
  Description of Artificial Sequence: Synthetic oligonucleotide
ugaaauccauacucacacu

SEQ ID NO: 2670434 - RNA, 19 nt, Artificial Sequence
  Description of Artificial Sequence: Synthetic oligonucleotide
aaugaccccugcaagggga

SEQ ID NO: 2670435 - RNA, 19 nt, Artificial Sequence
  Description of Artificial Sequence: Synthetic oligonucleotide
cuagcuaggcucuggcaac

SEQ ID NO: 2670436 - RNA, 19 nt, Artificial Sequence
  Description of Artificial Sequence: Synthetic oligonucleotide
acaucuagaaguguuugaa

SEQ ID NO: 2670437 - RNA, 19 nt, Artificial Sequence
  Description of Artificial Sequence: Synthetic oligonucleotide
agggaguuguugcccacgg

SEQ ID NO: 2670438 - RNA, 19 nt, Artificial Sequence
  Description of Artificial Sequence: Synthetic oligonucleotide
guguugucacaucuagaag

SEQ ID NO: 2670439 - RNA, 19 nt, Artificial Sequence
  Description of Artificial Sequence: Synthetic oligonucleotide
aagggaguuguugcccacg

SEQ ID NO: 2670440 - RNA, 19 nt, Artificial Sequence
  Description of Artificial Sequence: Synthetic oligonucleotide
uggcaacucagcuaagaau

SEQ ID NO: 2670441 - RNA, 19 nt, Artificial Sequence
  Description of Artificial Sequence: Synthetic oligonucleotide
cucuguccuagcuaggcuc

SEQ ID NO: 2670442 - RNA, 19 nt, Artificial Sequence
  Description of Artificial Sequence: Synthetic oligonucleotide
ggccccaccacacaggaag

SEQ ID NO: 2670443 - RNA, 19 nt, Artificial Sequence
  Description of Artificial Sequence: Synthetic oligonucleotide
uuuuggugugacuguuucu

SEQ ID NO: 2670444 - RNA, 19 nt, Artificial Sequence
  Description of Artificial Sequence: Synthetic oligonucleotide
aggggaggaagacaaaaua

SEQ ID NO: 2670445 - RNA, 19 nt, Artificial Sequence
  Description of Artificial Sequence: Synthetic oligonucleotide
ccaauauuucacaagguga

SEQ ID NO: 2670446 - RNA, 19 nt, Artificial Sequence
  Description of Artificial Sequence: Synthetic oligonucleotide
ucuggcaacucagcuaaga

SEQ ID NO: 2670447 - RNA, 19 nt, Artificial Sequence
  Description of Artificial Sequence: Synthetic oligonucleotide
gugagacagaguugaaaac

SEQ ID NO: 2670448 - RNA, 19 nt, Artificial Sequence
  Description of Artificial Sequence: Synthetic oligonucleotide
acccugacccaauauuuca

SEQ ID NO: 2670449 - RNA, 19 nt, Artificial Sequence
  Description of Artificial Sequence: Synthetic oligonucleotide
cucagcuaagaauaugaaa

SEQ ID NO: 2670450 - RNA, 19 nt, Artificial Sequence
  Description of Artificial Sequence: Synthetic oligonucleotide
ggccauaugucccuucucc

SEQ ID NO: 2670451 - RNA, 19 nt, Artificial Sequence
  Description of Artificial Sequence: Synthetic oligonucleotide
cccaauauuucacaaggug

SEQ ID NO: 2670452 - RNA, 19 nt, Artificial Sequence
  Description of Artificial Sequence: Synthetic oligonucleotide
caucaccauuauuuauuag

SEQ ID NO: 2670453 - RNA, 19 nt, Artificial Sequence
  Description of Artificial Sequence: Synthetic oligonucleotide
cuggcuucugcucucagga

SEQ ID NO: 2670454 - RNA, 19 nt, Artificial Sequence
  Description of Artificial Sequence: Synthetic oligonucleotide
uaggcucuggcaacucagc

SEQ ID NO: 2670455 - RNA, 19 nt, Artificial Sequence
  Description of Artificial Sequence: Synthetic oligonucleotide
ugggccauaugucccuucu

SEQ ID NO: 2670456 - RNA, 19 nt, Artificial Sequence
  Description of Artificial Sequence: Synthetic oligonucleotide
gccacucccaaaaugaccc

SEQ ID NO: 2670457 - RNA, 19 nt, Artificial Sequence
  Description of Artificial Sequence: Synthetic oligonucleotide
ugugacccugacccaauau

SEQ ID NO: 2670458 - RNA, 19 nt, Artificial Sequence
  Description of Artificial Sequence: Synthetic oligonucleotide
guguauucuacugccacuc

SEQ ID NO: 2670459 - RNA, 19 nt, Artificial Sequence
  Description of Artificial Sequence: Synthetic oligonucleotide
gguuaggguaggaagggag

SEQ ID NO: 2670460 - RNA, 19 nt, Artificial Sequence
  Description of Artificial Sequence: Synthetic oligonucleotide
ggaacucagucacuggcug

SEQ ID NO: 2670461 - RNA, 19 nt, Artificial Sequence
  Description of Artificial Sequence: Synthetic oligonucleotide
uguccuagcuaggcucugg

SEQ ID NO: 2670462 - RNA, 19 nt, Artificial Sequence
  Description of Artificial Sequence: Synthetic oligonucleotide
auuagacaggauucagcuu

SEQ ID NO: 2670463 - RNA, 19 nt, Artificial Sequence
  Description of Artificial Sequence: Synthetic oligonucleotide
cacaaggugagacagaguu

SEQ ID NO: 2670464 - RNA, 19 nt, Artificial Sequence
  Description of Artificial Sequence: Synthetic oligonucleotide
uggugugacuguuucuuua

SEQ ID NO: 2670465 - RNA, 19 nt, Artificial Sequence
  Description of Artificial Sequence: Synthetic oligonucleotide
agggauuauacagggcucu

SEQ ID NO: 2670466 - RNA, 19 nt, Artificial Sequence
  Description of Artificial Sequence: Synthetic oligonucleotide
auaugucccuucuccacaa

SEQ ID NO: 2670467 - RNA, 19 nt, Artificial Sequence
  Description of Artificial Sequence: Synthetic oligonucleotide
gcuaagaauaugaaaucca

SEQ ID NO: 2670468 - RNA, 19 nt, Artificial Sequence
  Description of Artificial Sequence: Synthetic oligonucleotide
gagcuauaguguauucuac

SEQ ID NO: 2670469 - RNA, 19 nt, Artificial Sequence
  Description of Artificial Sequence: Synthetic oligonucleotide
cugggaacucagucacugg

SEQ ID NO: 2670470 - RNA, 19 nt, Artificial Sequence
  Description of Artificial Sequence: Synthetic oligonucleotide
gguaggaagggaguuguug

SEQ ID NO: 2670471 - RNA, 19 nt, Artificial Sequence
  Description of Artificial Sequence: Synthetic oligonucleotide
ccaaccuaagcuuugggca

SEQ ID NO: 2670472 - RNA, 19 nt, Artificial Sequence
  Description of Artificial Sequence: Synthetic oligonucleotide
caccauuauuuauuagaca

SEQ ID NO: 2670473 - RNA, 19 nt, Artificial Sequence
  Description of Artificial Sequence: Synthetic oligonucleotide
ggcaacucagcuaagaaua

SEQ ID NO: 2670474 - RNA, 19 nt, Artificial Sequence
  Description of Artificial Sequence: Synthetic oligonucleotide
aaucugagcuauaguguau

SEQ ID NO: 2670475 - RNA, 19 nt, Artificial Sequence
  Description of Artificial Sequence: Synthetic oligonucleotide
aguccuggcuucugcucuc

SEQ ID NO: 2670476 - RNA, 19 nt, Artificial Sequence
  Description of Artificial Sequence: Synthetic oligonucleotide
cuccacaaagaaucauguc

SEQ ID NO: 2670477 - RNA, 19 nt, Artificial Sequence
  Description of Artificial Sequence: Synthetic oligonucleotide
acucacacugucagagggg

SEQ ID NO: 2670478 - RNA, 19 nt, Artificial Sequence
  Description of Artificial Sequence: Synthetic oligonucleotide
caaccagcaggcccagugc

SEQ ID NO: 2670479 - RNA, 19 nt, Artificial Sequence
  Description of Artificial Sequence: Synthetic oligonucleotide
uagacaggauucagcuuuc

SEQ ID NO: 2670480 - RNA, 19 nt, Artificial Sequence
  Description of Artificial Sequence: Synthetic oligonucleotide
uuaggguaggaagggaguu

SEQ ID NO: 2670481 - RNA, 19 nt, Artificial Sequence
  Description of Artificial Sequence: Synthetic oligonucleotide
accuaagcuuugggcaacc

SEQ ID NO: 2670482 - RNA, 19 nt, Artificial Sequence
  Description of Artificial Sequence: Synthetic oligonucleotide
ccaguguugucacaucuag

SEQ ID NO: 2670483 - RNA, 19 nt, Artificial Sequence
  Description of Artificial Sequence: Synthetic oligonucleotide
cccaaccuaagcuuugggc

SEQ ID NO: 2670484 - RNA, 19 nt, Artificial Sequence
  Description of Artificial Sequence: Synthetic oligonucleotide
auuauuuauuagacaggau

SEQ ID NO: 2670485 - RNA, 19 nt, Artificial Sequence
  Description of Artificial Sequence: Synthetic oligonucleotide
uccuagcuaggcucuggca

SEQ ID NO: 2670486 - RNA, 19 nt, Artificial Sequence
  Description of Artificial Sequence: Synthetic oligonucleotide
ggauucagcuuucaacaca

SEQ ID NO: 2670487 - RNA, 19 nt, Artificial Sequence
  Description of Artificial Sequence: Synthetic oligonucleotide
acaaagaaucauguccuuu

SEQ ID NO: 2670488 - RNA, 19 nt, Artificial Sequence
  Description of Artificial Sequence: Synthetic oligonucleotide
cacaucuagaaguguuuga

SEQ ID NO: 2670489 - RNA, 19 nt, Artificial Sequence
  Description of Artificial Sequence: Synthetic oligonucleotide
agcuuugggcaaccagcag

SEQ ID NO: 2670490 - RNA, 19 nt, Artificial Sequence
  Description of Artificial Sequence: Synthetic oligonucleotide
accagggauuauacagggc

SEQ ID NO: 2670491 - RNA, 19 nt, Artificial Sequence
  Description of Artificial Sequence: Synthetic oligonucleotide
uauacagggcucuguccua

SEQ ID NO: 2670492 - RNA, 19 nt, Artificial Sequence
  Description of Artificial Sequence: Synthetic oligonucleotide
ucacaaggugagacagagu

SEQ ID NO: 2670493 - RNA, 19 nt, Artificial Sequence
  Description of Artificial Sequence: Synthetic oligonucleotide
ugggcugaguccuggcuuc

SEQ ID NO: 2670494 - RNA, 19 nt, Artificial Sequence
  Description of Artificial Sequence: Synthetic oligonucleotide
gacaggauucagcuuucaa

SEQ ID NO: 2670495 - RNA, 19 nt, Artificial Sequence
  Description of Artificial Sequence: Synthetic oligonucleotide
cacacugucagagggguga

SEQ ID NO: 2670496 - RNA, 19 nt, Artificial Sequence
  Description of Artificial Sequence: Synthetic oligonucleotide
caacucagcuaagaauaug

SEQ ID NO: 2670497 - RNA, 19 nt, Artificial Sequence
  Description of Artificial Sequence: Synthetic oligonucleotide
ucacacugucagaggggug

SEQ ID NO: 2670498 - RNA, 19 nt, Artificial Sequence
  Description of Artificial Sequence: Synthetic oligonucleotide
cugccacucccaaaaugac

SEQ ID NO: 2670499 - RNA, 19 nt, Artificial Sequence
  Description of Artificial Sequence: Synthetic oligonucleotide
gaaguguuugaaacuuaaa

SEQ ID NO: 2670500 - RNA, 19 nt, Artificial Sequence
  Description of Artificial Sequence: Synthetic oligonucleotide
caaccuaagcuuugggcaa

SEQ ID NO: 2670501 - RNA, 19 nt, Artificial Sequence
  Description of Artificial Sequence: Synthetic oligonucleotide
gaagggaguuguugcccac

SEQ ID NO: 2670502 - RNA, 19 nt, Artificial Sequence
  Description of Artificial Sequence: Synthetic oligonucleotide
auaguguauucuacugcca

SEQ ID NO: 2670503 - RNA, 19 nt, Artificial Sequence
  Description of Artificial Sequence: Synthetic oligonucleotide
ucagggguuaggguaggaa

SEQ ID NO: 2670504 - RNA, 19 nt, Artificial Sequence
  Description of Artificial Sequence: Synthetic oligonucleotide
guccuagcuaggcucuggc

SEQ ID NO: 2670505 - RNA, 19 nt, Artificial Sequence
  Description of Artificial Sequence: Synthetic oligonucleotide
cugucagaggggugagggc

SEQ ID NO: 2670506 - RNA, 19 nt, Artificial Sequence
  Description of Artificial Sequence: Synthetic oligonucleotide
acagggcucuguccuagcu

SEQ ID NO: 2670507 - RNA, 19 nt, Artificial Sequence
  Description of Artificial Sequence: Synthetic oligonucleotide
ugcucucaggauggaaaca

SEQ ID NO: 2670508 - RNA, 19 nt, Artificial Sequence
  Description of Artificial Sequence: Synthetic oligonucleotide
auucuacugccacucccaa

SEQ ID NO: 2670509 - RNA, 19 nt, Artificial Sequence
  Description of Artificial Sequence: Synthetic oligonucleotide
cagaguugaaaacccugga

SEQ ID NO: 2670510 - RNA, 19 nt, Artificial Sequence
  Description of Artificial Sequence: Synthetic oligonucleotide
uccugggccauaugucccu

SEQ ID NO: 2670511 - RNA, 19 nt, Artificial Sequence
  Description of Artificial Sequence: Synthetic oligonucleotide
uucuacugccacucccaaa

SEQ ID NO: 2670512 - RNA, 19 nt, Artificial Sequence
  Description of Artificial Sequence: Synthetic oligonucleotide
gggguuaggguaggaaggg

SEQ ID NO: 2670513 - RNA, 19 nt, Artificial Sequence
  Description of Artificial Sequence: Synthetic oligonucleotide
uugucacaucuagaagugu

SEQ ID NO: 2670514 - RNA, 19 nt, Artificial Sequence
  Description of Artificial Sequence: Synthetic oligonucleotide
gacccugacccaauauuuc

SEQ ID NO: 2670515 - RNA, 19 nt, Artificial Sequence
  Description of Artificial Sequence: Synthetic oligonucleotide
gcucuggcaacucagcuaa

SEQ ID NO: 2670516 - RNA, 19 nt, Artificial Sequence
  Description of Artificial Sequence: Synthetic oligonucleotide
aucugagcuauaguguauu

SEQ ID NO: 2670517 - RNA, 19 nt, Artificial Sequence
  Description of Artificial Sequence: Synthetic oligonucleotide
auccauacucacacuguca

SEQ ID NO: 2670518 - RNA, 19 nt, Artificial Sequence
  Description of Artificial Sequence: Synthetic oligonucleotide
guuguugcccacggaggcc

SEQ ID NO: 2670519 - RNA, 19 nt, Artificial Sequence
  Description of Artificial Sequence: Synthetic oligonucleotide
cuguuucuuuaagacacca

SEQ ID NO: 2670520 - RNA, 19 nt, Artificial Sequence
  Description of Artificial Sequence: Synthetic oligonucleotide
aggugagacagaguugaaa

SEQ ID NO: 2670521 - RNA, 19 nt, Artificial Sequence
  Description of Artificial Sequence: Synthetic oligonucleotide
ccauaugucccuucuccac

SEQ ID NO: 2670522 - RNA, 19 nt, Artificial Sequence
  Description of Artificial Sequence: Synthetic oligonucleotide
ccaggaaucugagcuauag

SEQ ID NO: 2670523 - RNA, 19 nt, Artificial Sequence
  Description of Artificial Sequence: Synthetic oligonucleotide
agacagaguugaaaacccu

SEQ ID NO: 2670524 - RNA, 19 nt, Artificial Sequence
  Description of Artificial Sequence: Synthetic oligonucleotide
agacaccaacaucuccagu

SEQ ID NO: 2670525 - RNA, 19 nt, Artificial Sequence
  Description of Artificial Sequence: Synthetic oligonucleotide
gggaggaagacaaaauaaa

SEQ ID NO: 2670526 - RNA, 19 nt, Artificial Sequence
  Description of Artificial Sequence: Synthetic oligonucleotide
uuggugugacuguuucuuu

SEQ ID NO: 2670527 - RNA, 19 nt, Artificial Sequence
  Description of Artificial Sequence: Synthetic oligonucleotide
cuggcaacucagcuaagaa

SEQ ID NO: 2670528 - RNA, 19 nt, Artificial Sequence
  Description of Artificial Sequence: Synthetic oligonucleotide
cuagaaguguuugaaacuu

SEQ ID NO: 2670529 - RNA, 19 nt, Artificial Sequence
  Description of Artificial Sequence: Synthetic oligonucleotide
uaugucccuucuccacaaa

SEQ ID NO: 2670530 - RNA, 19 nt, Artificial Sequence
  Description of Artificial Sequence: Synthetic oligonucleotide
caaggggaggaagacaaaa

SEQ ID NO: 2670531 - RNA, 19 nt, Artificial Sequence
  Description of Artificial Sequence: Synthetic oligonucleotide
gucaucaccauuauuuauu

SEQ ID NO: 2670532 - RNA, 19 nt, Artificial Sequence
  Description of Artificial Sequence: Synthetic oligonucleotide
agagaaggccugugacccu

SEQ ID NO: 2670533 - RNA, 19 nt, Artificial Sequence
  Description of Artificial Sequence: Synthetic oligonucleotide
ggcuucagggguuagggua

SEQ ID NO: 2670534 - RNA, 19 nt, Artificial Sequence
  Description of Artificial Sequence: Synthetic oligonucleotide
ggggaggaagacaaaauaa

SEQ ID NO: 2670535 - RNA, 19 nt, Artificial Sequence
  Description of Artificial Sequence: Synthetic oligonucleotide
ggugugacuguuucuuuaa

SEQ ID NO: 2670536 - RNA, 19 nt, Artificial Sequence
  Description of Artificial Sequence: Synthetic oligonucleotide
gaguccuggcuucugcucu

SEQ ID NO: 2670537 - RNA, 19 nt, Artificial Sequence
  Description of Artificial Sequence: Synthetic oligonucleotide
uacagggcucuguccuagc

SEQ ID NO: 2670538 - RNA, 19 nt, Artificial Sequence
  Description of Artificial Sequence: Synthetic oligonucleotide
acucagcuaagaauaugaa

SEQ ID NO: 2670539 - RNA, 19 nt, Artificial Sequence
  Description of Artificial Sequence: Synthetic oligonucleotide
acccaauauuucacaaggu

SEQ ID NO: 2670540 - RNA, 19 nt, Artificial Sequence
  Description of Artificial Sequence: Synthetic oligonucleotide
uggcugggaaccagggauu

SEQ ID NO: 2670541 - RNA, 19 nt, Artificial Sequence
  Description of Artificial Sequence: Synthetic oligonucleotide
uuugggcaaccagcaggcc

SEQ ID NO: 2670542 - RNA, 19 nt, Artificial Sequence
  Description of Artificial Sequence: Synthetic oligonucleotide
ccacaccagagcuggagag

SEQ ID NO: 2670543 - RNA, 19 nt, Artificial Sequence
  Description of Artificial Sequence: Synthetic oligonucleotide
caguguugucacaucuaga

SEQ ID NO: 2670544 - RNA, 19 nt, Artificial Sequence
  Description of Artificial Sequence: Synthetic oligonucleotide
ugaccccugcaaggggagg

SEQ ID NO: 2670545 - RNA, 19 nt, Artificial Sequence
  Description of Artificial Sequence: Synthetic oligonucleotide
cuggcugggaaccagggau

SEQ ID NO: 2670546 - RNA, 19 nt, Artificial Sequence
  Description of Artificial Sequence: Synthetic oligonucleotide
ggaagacaaaauaaauagu

SEQ ID NO: 2670547 - RNA, 19 nt, Artificial Sequence
  Description of Artificial Sequence: Synthetic oligonucleotide
gucagaggggugagggcag

SEQ ID NO: 2670548 - RNA, 19 nt, Artificial Sequence
  Description of Artificial Sequence: Synthetic oligonucleotide
ccagggauuauacagggcu

SEQ ID NO: 2670549 - RNA, 19 nt, Artificial Sequence
  Description of Artificial Sequence: Synthetic oligonucleotide
ccacaaagaaucauguccu

SEQ ID NO: 2670550 - RNA, 19 nt, Artificial Sequence
  Description of Artificial Sequence: Synthetic oligonucleotide
ugggcugggugcaggguuu

SEQ ID NO: 2670551 - RNA, 19 nt, Artificial Sequence
  Description of Artificial Sequence: Synthetic oligonucleotide
uagcuaggcucuggcaacu

SEQ ID NO: 2670552 - RNA, 19 nt, Artificial Sequence
  Description of Artificial Sequence: Synthetic oligonucleotide
uucugcucucaggauggaa

SEQ ID NO: 2670553 - RNA, 19 nt, Artificial Sequence
  Description of Artificial Sequence: Synthetic oligonucleotide
acacugucagaggggugag

SEQ ID NO: 2670554 - RNA, 19 nt, Artificial Sequence
  Description of Artificial Sequence: Synthetic oligonucleotide
ccugggaacucagucacug

SEQ ID NO: 2670555 - RNA, 19 nt, Artificial Sequence
  Description of Artificial Sequence: Synthetic oligonucleotide
caacaucuccaguguuguc

SEQ ID NO: 2670556 - RNA, 19 nt, Artificial Sequence
  Description of Artificial Sequence: Synthetic oligonucleotide
uucuuccccugggaacuca

SEQ ID NO: 2670557 - RNA, 19 nt, Artificial Sequence
  Description of Artificial Sequence: Synthetic oligonucleotide
ggaggaagacaaaauaaau

SEQ ID NO: 2670558 - RNA, 19 nt, Artificial Sequence
  Description of Artificial Sequence: Synthetic oligonucleotide
caccagagcuggagagaag

SEQ ID NO: 2670559 - RNA, 19 nt, Artificial Sequence
  Description of Artificial Sequence: Synthetic oligonucleotide
gaccccugcaaggggagga

SEQ ID NO: 2670560 - RNA, 19 nt, Artificial Sequence
  Description of Artificial Sequence: Synthetic oligonucleotide
ccuagcuaggcucuggcaa

SEQ ID NO: 2670561 - RNA, 19 nt, Artificial Sequence
  Description of Artificial Sequence: Synthetic oligonucleotide
augaccccugcaaggggag

SEQ ID NO: 2670562 - RNA, 19 nt, Artificial Sequence
  Description of Artificial Sequence: Synthetic oligonucleotide
guugaaaacccuggaguau

SEQ ID NO: 2670563 - RNA, 19 nt, Artificial Sequence
  Description of Artificial Sequence: Synthetic oligonucleotide
cuccaguguugucacaucu

SEQ ID NO: 2670564 - RNA, 19 nt, Artificial Sequence
  Description of Artificial Sequence: Synthetic oligonucleotide
ucaugcucaccaggcccca

SEQ ID NO: 2670565 - RNA, 19 nt, Artificial Sequence
  Description of Artificial Sequence: Synthetic oligonucleotide
gccauaugucccuucucca

SEQ ID NO: 2670566 - RNA, 19 nt, Artificial Sequence
  Description of Artificial Sequence: Synthetic oligonucleotide
cccugacccaauauuucac

SEQ ID NO: 2670567 - RNA, 19 nt, Artificial Sequence
  Description of Artificial Sequence: Synthetic oligonucleotide
cacggaggccccaaccuaa

SEQ ID NO: 2670568 - RNA, 19 nt, Artificial Sequence
  Description of Artificial Sequence: Synthetic oligonucleotide
uucagggguuaggguagga

SEQ ID NO: 2670569 - RNA, 19 nt, Artificial Sequence
  Description of Artificial Sequence: Synthetic oligonucleotide
gugacccugacccaauauu

SEQ ID NO: 2670570 - RNA, 19 nt, Artificial Sequence
  Description of Artificial Sequence: Synthetic oligonucleotide
ccugacccaauauuucaca

SEQ ID NO: 2670571 - RNA, 19 nt, Artificial Sequence
  Description of Artificial Sequence: Synthetic oligonucleotide
cacugucagaggggugagg

SEQ ID NO: 2670572 - RNA, 19 nt, Artificial Sequence
  Description of Artificial Sequence: Synthetic oligonucleotide
uggaguauccugggccaua

SEQ ID NO: 2670573 - RNA, 19 nt, Artificial Sequence
  Description of Artificial Sequence: Synthetic oligonucleotide
agacaggauucagcuuuca

SEQ ID NO: 2670574 - RNA, 19 nt, Artificial Sequence
  Description of Artificial Sequence: Synthetic oligonucleotide
aaggugagacagaguugaa

SEQ ID NO: 2670575 - RNA, 19 nt, Artificial Sequence
  Description of Artificial Sequence: Synthetic oligonucleotide
cucagucacuggcugggaa

SEQ ID NO: 2670576 - RNA, 19 nt, Artificial Sequence
  Description of Artificial Sequence: Synthetic oligonucleotide
caggccccaccacacagga

SEQ ID NO: 2670577 - RNA, 19 nt, Artificial Sequence
  Description of Artificial Sequence: Synthetic oligonucleotide
ucagaggggugagggcagu

SEQ ID NO: 2670578 - RNA, 19 nt, Artificial Sequence
  Description of Artificial Sequence: Synthetic oligonucleotide
gaaaacccuggaguauccu

SEQ ID NO: 2670579 - RNA, 19 nt, Artificial Sequence
  Description of Artificial Sequence: Synthetic oligonucleotide
cucuggcaacucagcuaag

SEQ ID NO: 2670580 - RNA, 19 nt, Artificial Sequence
  Description of Artificial Sequence: Synthetic oligonucleotide
gggauuauacagggcucug

SEQ ID NO: 2670581 - RNA, 19 nt, Artificial Sequence
  Description of Artificial Sequence: Synthetic oligonucleotide
cucacacugucagaggggu

SEQ ID NO: 2670582 - RNA, 19 nt, Artificial Sequence
  Description of Artificial Sequence: Synthetic oligonucleotide
cacaccagagcuggagaga

SEQ ID NO: 2670583 - RNA, 19 nt, Artificial Sequence
  Description of Artificial Sequence: Synthetic oligonucleotide
ccuggaguauccugggcca

SEQ ID NO: 2670584 - RNA, 19 nt, Artificial Sequence
  Description of Artificial Sequence: Synthetic oligonucleotide
ccugcaaggggaggaagac

SEQ ID NO: 2670585 - RNA, 19 nt, Artificial Sequence
  Description of Artificial Sequence: Synthetic oligonucleotide
gcuaggcucuggcaacuca

SEQ ID NO: 2670586 - RNA, 19 nt, Artificial Sequence
  Description of Artificial Sequence: Synthetic oligonucleotide
ggcucuggcaacucagcua

SEQ ID NO: 2670587 - RNA, 19 nt, Artificial Sequence
  Description of Artificial Sequence: Synthetic oligonucleotide
ggacugggcugaguccugg

SEQ ID NO: 2670588 - RNA, 19 nt, Artificial Sequence
  Description of Artificial Sequence: Synthetic oligonucleotide
ccuucuccacaaagaauca

SEQ ID NO: 2670589 - RNA, 19 nt, Artificial Sequence
  Description of Artificial Sequence: Synthetic oligonucleotide
cugaguccuggcuucugcu

SEQ ID NO: 2670590 - RNA, 19 nt, Artificial Sequence
  Description of Artificial Sequence: Synthetic oligonucleotide
gucacaucuagaaguguuu

SEQ ID NO: 2670591 - RNA, 19 nt, Artificial Sequence
  Description of Artificial Sequence: Synthetic oligonucleotide
gccccaaccuaagcuuugg

SEQ ID NO: 2670592 - RNA, 19 nt, Artificial Sequence
  Description of Artificial Sequence: Synthetic oligonucleotide
ccccaaccuaagcuuuggg

SEQ ID NO: 2670593 - RNA, 19 nt, Artificial Sequence
  Description of Artificial Sequence: Synthetic oligonucleotide
cagggcucuguccuagcua

SEQ ID NO: 2670594 - RNA, 19 nt, Artificial Sequence
  Description of Artificial Sequence: Synthetic oligonucleotide
cuguccuagcuaggcucug

SEQ ID NO: 2670595 - RNA, 19 nt, Artificial Sequence
  Description of Artificial Sequence: Synthetic oligonucleotide
ggauuauacagggcucugu

SEQ ID NO: 2670596 - RNA, 19 nt, Artificial Sequence
  Description of Artificial Sequence: Synthetic oligonucleotide
cagaggggugagggcagug

SEQ ID NO: 2670597 - RNA, 19 nt, Artificial Sequence
  Description of Artificial Sequence: Synthetic oligonucleotide
cagcaggcccagugcccag

SEQ ID NO: 2670598 - RNA, 19 nt, Artificial Sequence
  Description of Artificial Sequence: Synthetic oligonucleotide
cacaaagaaucauguccuu

SEQ ID NO: 2670599 - RNA, 19 nt, Artificial Sequence
  Description of Artificial Sequence: Synthetic oligonucleotide
cccugcaaggggaggaaga

SEQ ID NO: 2670600 - RNA, 19 nt, Artificial Sequence
  Description of Artificial Sequence: Synthetic oligonucleotide
aggccccaaccuaagcuuu

SEQ ID NO: 2670601 - RNA, 19 nt, Artificial Sequence
  Description of Artificial Sequence: Synthetic oligonucleotide
ccauacucacacugucaga

SEQ ID NO: 2670602 - RNA, 19 nt, Artificial Sequence
  Description of Artificial Sequence: Synthetic oligonucleotide
ggaaggcuucagggguuag

SEQ ID NO: 2670603 - RNA, 19 nt, Artificial Sequence
  Description of Artificial Sequence: Synthetic oligonucleotide
gggaguuguugcccacgga

SEQ ID NO: 2670604 - RNA, 19 nt, Artificial Sequence
  Description of Artificial Sequence: Synthetic oligonucleotide
gggccauaugucccuucuc

SEQ ID NO: 2670605 - RNA, 19 nt, Artificial Sequence
  Description of Artificial Sequence: Synthetic oligonucleotide
ggguuaggguaggaaggga

SEQ ID NO: 2670606 - RNA, 19 nt, Artificial Sequence
  Description of Artificial Sequence: Synthetic oligonucleotide
ggccccaaccuaagcuuug

SEQ ID NO: 2670607 - RNA, 19 nt, Artificial Sequence
  Description of Artificial Sequence: Synthetic oligonucleotide
accccugcaaggggaggaa

SEQ ID NO: 2670608 - RNA, 19 nt, Artificial Sequence
  Description of Artificial Sequence: Synthetic oligonucleotide
cugugacccugacccaaua

SEQ ID NO: 2670609 - RNA, 19 nt, Artificial Sequence
  Description of Artificial Sequence: Synthetic oligonucleotide
caccaggccccaccacaca

SEQ ID NO: 2670610 - RNA, 19 nt, Artificial Sequence
  Description of Artificial Sequence: Synthetic oligonucleotide
cuuccccugggaacucagu

SEQ ID NO: 2670611 - RNA, 19 nt, Artificial Sequence
  Description of Artificial Sequence: Synthetic oligonucleotide
gcucuguccuagcuaggcu

SEQ ID NO: 2670612 - RNA, 19 nt, Artificial Sequence
  Description of Artificial Sequence: Synthetic oligonucleotide
caggaaggcuucagggguu

SEQ ID NO: 2670613 - RNA, 19 nt, Artificial Sequence
  Description of Artificial Sequence: Synthetic oligonucleotide
gcaacucagcuaagaauau

SEQ ID NO: 2670614 - RNA, 19 nt, Artificial Sequence
  Description of Artificial Sequence: Synthetic oligonucleotide
gccugugacccugacccaa

SEQ ID NO: 2670615 - RNA, 19 nt, Artificial Sequence
  Description of Artificial Sequence: Synthetic oligonucleotide
ggaguauccugggccauau

SEQ ID NO: 2670616 - RNA, 19 nt, Artificial Sequence
  Description of Artificial Sequence: Synthetic oligonucleotide
cuacugccacucccaaaau

SEQ ID NO: 2670617 - RNA, 19 nt, Artificial Sequence
  Description of Artificial Sequence: Synthetic oligonucleotide
ggcugggaaccagggauua

SEQ ID NO: 2670618 - RNA, 19 nt, Artificial Sequence
  Description of Artificial Sequence: Synthetic oligonucleotide
ccuaagcuuugggcaacca

SEQ ID NO: 2670619 - RNA, 19 nt, Artificial Sequence
  Description of Artificial Sequence: Synthetic oligonucleotide
gcaaggggaggaagacaaa

SEQ ID NO: 2670620 - RNA, 19 nt, Artificial Sequence
  Description of Artificial Sequence: Synthetic oligonucleotide
cuggaguauccugggccau

SEQ ID NO: 2670621 - RNA, 19 nt, Artificial Sequence
  Description of Artificial Sequence: Synthetic oligonucleotide
ccacggaggccccaaccua

SEQ ID NO: 2670622 - RNA, 19 nt, Artificial Sequence
  Description of Artificial Sequence: Synthetic oligonucleotide
ccugugacccugacccaau

SEQ ID NO: 2670623 - RNA, 19 nt, Artificial Sequence
  Description of Artificial Sequence: Synthetic oligonucleotide
gcugggaaccagggauuau

SEQ ID NO: 2670624 - RNA, 19 nt, Artificial Sequence
  Description of Artificial Sequence: Synthetic oligonucleotide
gggcugaguccuggcuucu

SEQ ID NO: 2670625 - RNA, 19 nt, Artificial Sequence
  Description of Artificial Sequence: Synthetic oligonucleotide
ggcaaccagcaggcccagu

SEQ ID NO: 2670626 - RNA, 19 nt, Artificial Sequence
  Description of Artificial Sequence: Synthetic oligonucleotide
gggcugggugcaggguuuu

SEQ ID NO: 2670627 - RNA, 19 nt, Artificial Sequence
  Description of Artificial Sequence: Synthetic oligonucleotide
aucuauauaauuuaucagg

SEQ ID NO: 2670628 - RNA, 19 nt, Artificial Sequence
  Description of Artificial Sequence: Synthetic oligonucleotide
aauuuaucaggucuagugg

SEQ ID NO: 2670629 - RNA, 19 nt, Artificial Sequence
  Description of Artificial Sequence: Synthetic oligonucleotide
uaaauuguugcuuugaccu

SEQ ID NO: 2670630 - RNA, 19 nt, Artificial Sequence
  Description of Artificial Sequence: Synthetic oligonucleotide
uaauuuaucaggucuagug

SEQ ID NO: 2670631 - RNA, 19 nt, Artificial Sequence
  Description of Artificial Sequence: Synthetic oligonucleotide
uuugguggaaucaguaucg

SEQ ID NO: 2670632 - RNA, 19 nt, Artificial Sequence
  Description of Artificial Sequence: Synthetic oligonucleotide
cauagcuugauccagagac

SEQ ID NO: 2670633 - RNA, 19 nt, Artificial Sequence
  Description of Artificial Sequence: Synthetic oligonucleotide
aacauacuuuauucgaaac

SEQ ID NO: 2670634 - RNA, 19 nt, Artificial Sequence
  Description of Artificial Sequence: Synthetic oligonucleotide
acaucuauauaauuuauca

SEQ ID NO: 2670635 - RNA, 19 nt, Artificial Sequence
  Description of Artificial Sequence: Synthetic oligonucleotide
ucuauauaauuuaucaggu

SEQ ID NO: 2670636 - RNA, 19 nt, Artificial Sequence
  Description of Artificial Sequence: Synthetic oligonucleotide
uuauucgaaacucagcaca

SEQ ID NO: 2670637 - RNA, 19 nt, Artificial Sequence
  Description of Artificial Sequence: Synthetic oligonucleotide
uugucagaugucaacacgg

SEQ ID NO: 2670638 - RNA, 19 nt, Artificial Sequence
  Description of Artificial Sequence: Synthetic oligonucleotide
uuucgaaacaucuuucacc

SEQ ID NO: 2670639 - RNA, 19 nt, Artificial Sequence
  Description of Artificial Sequence: Synthetic oligonucleotide
aaacgcuguggauaagacc

SEQ ID NO: 2670640 - RNA, 19 nt, Artificial Sequence
  Description of Artificial Sequence: Synthetic oligonucleotide
acagacuugcucuucgugc

SEQ ID NO: 2670641 - RNA, 19 nt, Artificial Sequence
  Description of Artificial Sequence: Synthetic oligonucleotide
gugguugagacuuuuaugc

SEQ ID NO: 2670642 - RNA, 19 nt, Artificial Sequence
  Description of Artificial Sequence: Synthetic oligonucleotide
uucgaaacaucuuucacca

SEQ ID NO: 2670643 - RNA, 19 nt, Artificial Sequence
  Description of Artificial Sequence: Synthetic oligonucleotide
ucaacacggagucaaacgc

SEQ ID NO: 2670644 - RNA, 19 nt, Artificial Sequence
  Description of Artificial Sequence: Synthetic oligonucleotide
aacgcuguggauaagaccu

SEQ ID NO: 2670645 - RNA, 19 nt, Artificial Sequence
  Description of Artificial Sequence: Synthetic oligonucleotide
ugaccugagcuuuuggugg

SEQ ID NO: 2670646 - RNA, 19 nt, Artificial Sequence
  Description of Artificial Sequence: Synthetic oligonucleotide
cuuuauucgaaacucagca

SEQ ID NO: 2670647 - RNA, 19 nt, Artificial Sequence
  Description of Artificial Sequence: Synthetic oligonucleotide
cuaaauuguugcuuugacc

SEQ ID NO: 2670648 - RNA, 19 nt, Artificial Sequence
  Description of Artificial Sequence: Synthetic oligonucleotide
uuuugguggaaucaguauc

SEQ ID NO: 2670649 - RNA, 19 nt, Artificial Sequence
  Description of Artificial Sequence: Synthetic oligonucleotide
uacauugguaaacccacag

SEQ ID NO: 2670650 - RNA, 19 nt, Artificial Sequence
  Description of Artificial Sequence: Synthetic oligonucleotide
gaugaucagauacagggca

SEQ ID NO: 2670651 - RNA, 19 nt, Artificial Sequence
  Description of Artificial Sequence: Synthetic oligonucleotide
caucuauauaauuuaucag

SEQ ID NO: 2670652 - RNA, 19 nt, Artificial Sequence
  Description of Artificial Sequence: Synthetic oligonucleotide
gauugcuugcgcuugcucc

SEQ ID NO: 2670653 - RNA, 19 nt, Artificial Sequence
  Description of Artificial Sequence: Synthetic oligonucleotide
cuuuccaucuugcugggcg

SEQ ID NO: 2670654 - RNA, 19 nt, Artificial Sequence
  Description of Artificial Sequence: Synthetic oligonucleotide
aacgcccagaauaaacucc

SEQ ID NO: 2670655 - RNA, 19 nt, Artificial Sequence
  Description of Artificial Sequence: Synthetic oligonucleotide
ucuaaauuguugcuuugac

SEQ ID NO: 2670656 - RNA, 19 nt, Artificial Sequence
  Description of Artificial Sequence: Synthetic oligonucleotide
uuuuaugccguacuuggaa

SEQ ID NO: 2670657 - RNA, 19 nt, Artificial Sequence
  Description of Artificial Sequence: Synthetic oligonucleotide
auuuaucaggucuaguggu

SEQ ID NO: 2670658 - RNA, 19 nt, Artificial Sequence
  Description of Artificial Sequence: Synthetic oligonucleotide
ucagauacagggcaugccu

SEQ ID NO: 2670659 - RNA, 19 nt, Artificial Sequence
  Description of Artificial Sequence: Synthetic oligonucleotide
aaacaucuuucaccauagc

SEQ ID NO: 2670660 - RNA, 19 nt, Artificial Sequence
  Description of Artificial Sequence: Synthetic oligonucleotide
auacagggcaugccuaugc

SEQ ID NO: 2670661 - RNA, 19 nt, Artificial Sequence
  Description of Artificial Sequence: Synthetic oligonucleotide
uauaauuuaucaggucuag

SEQ ID NO: 2670662 - RNA, 19 nt, Artificial Sequence
  Description of Artificial Sequence: Synthetic oligonucleotide
agaccuugcagauugcuug

SEQ ID NO: 2670663 - RNA, 19 nt, Artificial Sequence
  Description of Artificial Sequence: Synthetic oligonucleotide
cauacuuuauucgaaacuc

SEQ ID NO: 2670664 - RNA, 19 nt, Artificial Sequence
  Description of Artificial Sequence: Synthetic oligonucleotide
uuuucgaaacaucuuucac

SEQ ID NO: 2670665 - RNA, 19 nt, Artificial Sequence
  Description of Artificial Sequence: Synthetic oligonucleotide
guggauaagaccuugcaga

SEQ ID NO: 2670666 - RNA, 19 nt, Artificial Sequence
  Description of Artificial Sequence: Synthetic oligonucleotide
acauacuuuauucgaaacu

SEQ ID NO: 2670667 - RNA, 19 nt, Artificial Sequence
  Description of Artificial Sequence: Synthetic oligonucleotide
uugccuuuucgaaacaucu

SEQ ID NO: 2670668 - RNA, 19 nt, Artificial Sequence
  Description of Artificial Sequence: Synthetic oligonucleotide
gucaacacggagucaaacg

SEQ ID NO: 2670669 - RNA, 19 nt, Artificial Sequence
  Description of Artificial Sequence: Synthetic oligonucleotide
ugugguugagacuuuuaug

SEQ ID NO: 2670670 - RNA, 19 nt, Artificial Sequence
  Description of Artificial Sequence: Synthetic oligonucleotide
caucuuucaccauagcuug

SEQ ID NO: 2670671 - RNA, 19 nt, Artificial Sequence
  Description of Artificial Sequence: Synthetic oligonucleotide
uaugcagaacgccaugcug

SEQ ID NO: 2670672 - RNA, 19 nt, Artificial Sequence
  Description of Artificial Sequence: Synthetic oligonucleotide
acuugucagaugucaacac

SEQ ID NO: 2670673 - RNA, 19 nt, Artificial Sequence
  Description of Artificial Sequence: Synthetic oligonucleotide
cacgugucuaaauuguugc

SEQ ID NO: 2670674 - RNA, 19 nt, Artificial Sequence
  Description of Artificial Sequence: Synthetic oligonucleotide
gguggaaucaguaucgagg

SEQ ID NO: 2670675 - RNA, 19 nt, Artificial Sequence
  Description of Artificial Sequence: Synthetic oligonucleotide
accaacauacuuuauucga

SEQ ID NO: 2670676 - RNA, 19 nt, Artificial Sequence
  Description of Artificial Sequence: Synthetic oligonucleotide
aaauuguugcuuugaccug

SEQ ID NO: 2670677 - RNA, 19 nt, Artificial Sequence
  Description of Artificial Sequence: Synthetic oligonucleotide
cuugucagaugucaacacg

SEQ ID NO: 2670678 - RNA, 19 nt, Artificial Sequence
  Description of Artificial Sequence: Synthetic oligonucleotide
uuuauucgaaacucagcac

SEQ ID NO: 2670679 - RNA, 19 nt, Artificial Sequence
  Description of Artificial Sequence: Synthetic oligonucleotide
uuucucaauggcaccaaca

SEQ ID NO: 2670680 - RNA, 19 nt, Artificial Sequence
  Description of Artificial Sequence: Synthetic oligonucleotide
caagccaucgucauagcac

SEQ ID NO: 2670681 - RNA, 19 nt, Artificial Sequence
  Description of Artificial Sequence: Synthetic oligonucleotide
guggaaucaguaucgaggc

SEQ ID NO: 2670682 - RNA, 19 nt, Artificial Sequence
  Description of Artificial Sequence: Synthetic oligonucleotide
aagccaucgucauagcaca

SEQ ID NO: 2670683 - RNA, 19 nt, Artificial Sequence
  Description of Artificial Sequence: Synthetic oligonucleotide
uugaccugagcuuuuggug

SEQ ID NO: 2670684 - RNA, 19 nt, Artificial Sequence
  Description of Artificial Sequence: Synthetic oligonucleotide
uucgaaacucagcacacgu

SEQ ID NO: 2670685 - RNA, 19 nt, Artificial Sequence
  Description of Artificial Sequence: Synthetic oligonucleotide
agaguucaggacuugucag

SEQ ID NO: 2670686 - RNA, 19 nt, Artificial Sequence
  Description of Artificial Sequence: Synthetic oligonucleotide
ucaguaucgaggcuggcaa

SEQ ID NO: 2670687 - RNA, 19 nt, Artificial Sequence
  Description of Artificial Sequence: Synthetic oligonucleotide
uauucgaaacucagcacac

SEQ ID NO: 2670688 - RNA, 19 nt, Artificial Sequence
  Description of Artificial Sequence: Synthetic oligonucleotide
caggcuguauucuucauug

SEQ ID NO: 2670689 - RNA, 19 nt, Artificial Sequence
  Description of Artificial Sequence: Synthetic oligonucleotide
ugaucugugguugagacuu

SEQ ID NO: 2670690 - RNA, 19 nt, Artificial Sequence
  Description of Artificial Sequence: Synthetic oligonucleotide
uccaggggaacaaaaggca

SEQ ID NO: 2670691 - RNA, 19 nt, Artificial Sequence
  Description of Artificial Sequence: Synthetic oligonucleotide
uuugaccugagcuuuuggu

SEQ ID NO: 2670692 - RNA, 19 nt, Artificial Sequence
  Description of Artificial Sequence: Synthetic oligonucleotide
cauccggaugaucagauac

SEQ ID NO: 2670693 - RNA, 19 nt, Artificial Sequence
  Description of Artificial Sequence: Synthetic oligonucleotide
acaaaaggcaacuuuccau

SEQ ID NO: 2670694 - RNA, 19 nt, Artificial Sequence
  Description of Artificial Sequence: Synthetic oligonucleotide
uucaccauagcuugaucca

SEQ ID NO: 2670695 - RNA, 19 nt, Artificial Sequence
  Description of Artificial Sequence: Synthetic oligonucleotide
guuacauugguaaacccac

SEQ ID NO: 2670696 - RNA, 19 nt, Artificial Sequence
  Description of Artificial Sequence: Synthetic oligonucleotide
aauuguugcuuugaccuga

SEQ ID NO: 2670697 - RNA, 19 nt, Artificial Sequence
  Description of Artificial Sequence: Synthetic oligonucleotide
cuuggaaacgcccagaaua

SEQ ID NO: 2670698 - RNA, 19 nt, Artificial Sequence
  Description of Artificial Sequence: Synthetic oligonucleotide
uccuuggagacucuucccc

SEQ ID NO: 2670699 - RNA, 19 nt, Artificial Sequence
  Description of Artificial Sequence: Synthetic oligonucleotide
ucccaagccaucgucauag

SEQ ID NO: 2670700 - RNA, 19 nt, Artificial Sequence
  Description of Artificial Sequence: Synthetic oligonucleotide
ucuagugguccuuggagac

SEQ ID NO: 2670701 - RNA, 19 nt, Artificial Sequence
  Description of Artificial Sequence: Synthetic oligonucleotide
cuauauaauuuaucagguc

SEQ ID NO: 2670702 - RNA, 19 nt, Artificial Sequence
  Description of Artificial Sequence: Synthetic oligonucleotide
caccaacauacuuuauucg

SEQ ID NO: 2670703 - RNA, 19 nt, Artificial Sequence
  Description of Artificial Sequence: Synthetic oligonucleotide
uaaacuccuccuccagggg

SEQ ID NO: 2670704 - RNA, 19 nt, Artificial Sequence
  Description of Artificial Sequence: Synthetic oligonucleotide
ucauagcacaccauccgga

SEQ ID NO: 2670705 - RNA, 19 nt, Artificial Sequence
  Description of Artificial Sequence: Synthetic oligonucleotide
aacuuuccaucuugcuggg

SEQ ID NO: 2670706 - RNA, 19 nt, Artificial Sequence
  Description of Artificial Sequence: Synthetic oligonucleotide
uaugccguacuuggaaacg

SEQ ID NO: 2670707 - RNA, 19 nt, Artificial Sequence
  Description of Artificial Sequence: Synthetic oligonucleotide
ucauugcuugcaucugugg

SEQ ID NO: 2670708 - RNA, 19 nt, Artificial Sequence
  Description of Artificial Sequence: Synthetic oligonucleotide
uuuaucaggucuagugguc

SEQ ID NO: 2670709 - RNA, 19 nt, Artificial Sequence
  Description of Artificial Sequence: Synthetic oligonucleotide
gaaucaguaucgaggcugg

SEQ ID NO: 2670710 - RNA, 19 nt, Artificial Sequence
  Description of Artificial Sequence: Synthetic oligonucleotide
aguaucgaggcuggcaacg

SEQ ID NO: 2670711 - RNA, 19 nt, Artificial Sequence
  Description of Artificial Sequence: Synthetic oligonucleotide
uguauucuucauugcuugc

SEQ ID NO: 2670712 - RNA, 19 nt, Artificial Sequence
  Description of Artificial Sequence: Synthetic oligonucleotide
uuuaugccguacuuggaaa

SEQ ID NO: 2670713 - RNA, 19 nt, Artificial Sequence
  Description of Artificial Sequence: Synthetic oligonucleotide
uccacuugacugcagaguu

SEQ ID NO: 2670714 - RNA, 19 nt, Artificial Sequence
  Description of Artificial Sequence: Synthetic oligonucleotide
cacaccauccggaugauca

SEQ ID NO: 2670715 - RNA, 19 nt, Artificial Sequence
  Description of Artificial Sequence: Synthetic oligonucleotide
ucaaacgcuguggauaaga

SEQ ID NO: 2670716 - RNA, 19 nt, Artificial Sequence
  Description of Artificial Sequence: Synthetic oligonucleotide
ugcugugucgcuucuugcc

SEQ ID NO: 2670717 - RNA, 19 nt, Artificial Sequence
  Description of Artificial Sequence: Synthetic oligonucleotide
uuaugccguacuuggaaac

SEQ ID NO: 2670718 - RNA, 19 nt, Artificial Sequence
  Description of Artificial Sequence: Synthetic oligonucleotide
ucgaaacucagcacacgug

SEQ ID NO: 2670719 - RNA, 19 nt, Artificial Sequence
  Description of Artificial Sequence: Synthetic oligonucleotide
gaugucaacacggagucaa

SEQ ID NO: 2670720 - RNA, 19 nt, Artificial Sequence
  Description of Artificial Sequence: Synthetic oligonucleotide
aucagauacagggcaugcc

SEQ ID NO: 2670721 - RNA, 19 nt, Artificial Sequence
  Description of Artificial Sequence: Synthetic oligonucleotide
cagaugucaacacggaguc

SEQ ID NO: 2670722 - RNA, 19 nt, Artificial Sequence
  Description of Artificial Sequence: Synthetic oligonucleotide
ugucagaugucaacacgga

SEQ ID NO: 2670723 - RNA, 19 nt, Artificial Sequence
  Description of Artificial Sequence: Synthetic oligonucleotide
ugucuaaauuguugcuuug

SEQ ID NO: 2670724 - RNA, 19 nt, Artificial Sequence
  Description of Artificial Sequence: Synthetic oligonucleotide
uccggaugaucagauacag

SEQ ID NO: 2670725 - RNA, 19 nt, Artificial Sequence
  Description of Artificial Sequence: Synthetic oligonucleotide
uugcgcuugcuccaggcug

SEQ ID NO: 2670726 - RNA, 19 nt, Artificial Sequence
  Description of Artificial Sequence: Synthetic oligonucleotide
aacacggagucaaacgcug

SEQ ID NO: 2670727 - RNA, 19 nt, Artificial Sequence
  Description of Artificial Sequence: Synthetic oligonucleotide
caggcuguuacauugguaa

SEQ ID NO: 2670728 - RNA, 19 nt, Artificial Sequence
  Description of Artificial Sequence: Synthetic oligonucleotide
gacuuuuaugccguacuug

SEQ ID NO: 2670729 - RNA, 19 nt, Artificial Sequence
  Description of Artificial Sequence: Synthetic oligonucleotide
uggauaagaccuugcagau

SEQ ID NO: 2670730 - RNA, 19 nt, Artificial Sequence
  Description of Artificial Sequence: Synthetic oligonucleotide
cuuuucgaaacaucuuuca

SEQ ID NO: 2670731 - RNA, 19 nt, Artificial Sequence
  Description of Artificial Sequence: Synthetic oligonucleotide
uuacauugguaaacccaca

SEQ ID NO: 2670732 - RNA, 19 nt, Artificial Sequence
  Description of Artificial Sequence: Synthetic oligonucleotide
ggcaugccuaugcagaacg

SEQ ID NO: 2670733 - RNA, 19 nt, Artificial Sequence
  Description of Artificial Sequence: Synthetic oligonucleotide
accauagcuugauccagag

SEQ ID NO: 2670734 - RNA, 19 nt, Artificial Sequence
  Description of Artificial Sequence: Synthetic oligonucleotide
ugguaaacccacaggcugu

SEQ ID NO: 2670735 - RNA, 19 nt, Artificial Sequence
  Description of Artificial Sequence: Synthetic oligonucleotide
agucaaacgcuguggauaa

SEQ ID NO: 2670736 - RNA, 19 nt, Artificial Sequence
  Description of Artificial Sequence: Synthetic oligonucleotide
auugcuugcgcuugcucca

SEQ ID NO: 2670737 - RNA, 19 nt, Artificial Sequence
  Description of Artificial Sequence: Synthetic oligonucleotide
ggaaucaguaucgaggcug

SEQ ID NO: 2670738 - RNA, 19 nt, Artificial Sequence
  Description of Artificial Sequence: Synthetic oligonucleotide
cugggcgacaucuauauaa

SEQ ID NO: 2670739 - RNA, 19 nt, Artificial Sequence
  Description of Artificial Sequence: Synthetic oligonucleotide
cuguuacauugguaaaccc

SEQ ID NO: 2670740 - RNA, 19 nt, Artificial Sequence
  Description of Artificial Sequence: Synthetic oligonucleotide
gucagaugucaacacggag

SEQ ID NO: 2670741 - RNA, 19 nt, Artificial Sequence
  Description of Artificial Sequence: Synthetic oligonucleotide
uugcucuucgugcugacuu

SEQ ID NO: 2670742 - RNA, 19 nt, Artificial Sequence
  Description of Artificial Sequence: Synthetic oligonucleotide
ugguggaaucaguaucgag

SEQ ID NO: 2670743 - RNA, 19 nt, Artificial Sequence
  Description of Artificial Sequence: Synthetic oligonucleotide
uagcuugauccagagacga

SEQ ID NO: 2670744 - RNA, 19 nt, Artificial Sequence
  Description of Artificial Sequence: Synthetic oligonucleotide
ucaccauagcuugauccag

SEQ ID NO: 2670745 - RNA, 19 nt, Artificial Sequence
  Description of Artificial Sequence: Synthetic oligonucleotide
gaucagauacagggcaugc

SEQ ID NO: 2670746 - RNA, 19 nt, Artificial Sequence
  Description of Artificial Sequence: Synthetic oligonucleotide
cuugccuuuucgaaacauc

SEQ ID NO: 2670747 - RNA, 19 nt, Artificial Sequence
  Description of Artificial Sequence: Synthetic oligonucleotide
ggaacaaaaggcaacuuuc

SEQ ID NO: 2670748 - RNA, 19 nt, Artificial Sequence
  Description of Artificial Sequence: Synthetic oligonucleotide
auagcuugauccagagacg

SEQ ID NO: 2670749 - RNA, 19 nt, Artificial Sequence
  Description of Artificial Sequence: Synthetic oligonucleotide
aaucaguaucgaggcuggc

SEQ ID NO: 2670750 - RNA, 19 nt, Artificial Sequence
  Description of Artificial Sequence: Synthetic oligonucleotide
ugaucagauacagggcaug

SEQ ID NO: 2670751 - RNA, 19 nt, Artificial Sequence
  Description of Artificial Sequence: Synthetic oligonucleotide
ucuucgugcugacuucacu

SEQ ID NO: 2670752 - RNA, 19 nt, Artificial Sequence
  Description of Artificial Sequence: Synthetic oligonucleotide
gagcuuuugguggaaucag

SEQ ID NO: 2670753 - RNA, 19 nt, Artificial Sequence
  Description of Artificial Sequence: Synthetic oligonucleotide
ggucuagugguccuuggag

SEQ ID NO: 2670754 - RNA, 19 nt, Artificial Sequence
  Description of Artificial Sequence: Synthetic oligonucleotide
caugccuaugcagaacgcc

SEQ ID NO: 2670755 - RNA, 19 nt, Artificial Sequence
  Description of Artificial Sequence: Synthetic oligonucleotide
gcuugauccagagacgagg

SEQ ID NO: 2670756 - RNA, 19 nt, Artificial Sequence
  Description of Artificial Sequence: Synthetic oligonucleotide
ucgaggcuggcaacggugc

SEQ ID NO: 2670757 - RNA, 19 nt, Artificial Sequence
  Description of Artificial Sequence: Synthetic oligonucleotide
cuuugaccugagcuuuugg

SEQ ID NO: 2670758 - RNA, 19 nt, Artificial Sequence
  Description of Artificial Sequence: Synthetic oligonucleotide
ugccguacuuggaaacgcc

SEQ ID NO: 2670759 - RNA, 19 nt, Artificial Sequence
  Description of Artificial Sequence: Synthetic oligonucleotide
auucgaaacucagcacacg

SEQ ID NO: 2670760 - RNA, 19 nt, Artificial Sequence
  Description of Artificial Sequence: Synthetic oligonucleotide
ugcucccaagccaucguca

SEQ ID NO: 2670761 - RNA, 19 nt, Artificial Sequence
  Description of Artificial Sequence: Synthetic oligonucleotide
gaguucaggacuugucaga

SEQ ID NO: 2670762 - RNA, 19 nt, Artificial Sequence
  Description of Artificial Sequence: Synthetic oligonucleotide
ugcagauugcuugcgcuug

SEQ ID NO: 2670763 - RNA, 19 nt, Artificial Sequence
  Description of Artificial Sequence: Synthetic oligonucleotide
gcaccaacauacuuuauuc

SEQ ID NO: 2670764 - RNA, 19 nt, Artificial Sequence
  Description of Artificial Sequence: Synthetic oligonucleotide
aacgccaugcugaucugug

SEQ ID NO: 2670765 - RNA, 19 nt, Artificial Sequence
  Description of Artificial Sequence: Synthetic oligonucleotide
auagcacaccauccggaug

SEQ ID NO: 2670766 - RNA, 19 nt, Artificial Sequence
  Description of Artificial Sequence: Synthetic oligonucleotide
acggagucaaacgcugugg

SEQ ID NO: 2670767 - RNA, 19 nt, Artificial Sequence
  Description of Artificial Sequence: Synthetic oligonucleotide
gagacuuuuaugccguacu

SEQ ID NO: 2670768 - RNA, 19 nt, Artificial Sequence
  Description of Artificial Sequence: Synthetic oligonucleotide
ggucuugagugccagcaag

SEQ ID NO: 2670769 - RNA, 19 nt, Artificial Sequence
  Description of Artificial Sequence: Synthetic oligonucleotide
guuuccacuugacugcaga

SEQ ID NO: 2670770 - RNA, 19 nt, Artificial Sequence
  Description of Artificial Sequence: Synthetic oligonucleotide
cuggcaacggugcuggauc

SEQ ID NO: 2670771 - RNA, 19 nt, Artificial Sequence
  Description of Artificial Sequence: Synthetic oligonucleotide
uuggagacucuuccccuga

SEQ ID NO: 2670772 - RNA, 19 nt, Artificial Sequence
  Description of Artificial Sequence: Synthetic oligonucleotide
ucuuucaccauagcuugau

SEQ ID NO: 2670773 - RNA, 19 nt, Artificial Sequence
  Description of Artificial Sequence: Synthetic oligonucleotide
ugucaacacggagucaaac

SEQ ID NO: 2670774 - RNA, 19 nt, Artificial Sequence
  Description of Artificial Sequence: Synthetic oligonucleotide
ggugcuggaucuugaaagc

SEQ ID NO: 2670775 - RNA, 19 nt, Artificial Sequence
  Description of Artificial Sequence: Synthetic oligonucleotide
gagucaaacgcuguggaua

SEQ ID NO: 2670776 - RNA, 19 nt, Artificial Sequence
  Description of Artificial Sequence: Synthetic oligonucleotide
acacgugucuaaauuguug

SEQ ID NO: 2670777 - RNA, 19 nt, Artificial Sequence
  Description of Artificial Sequence: Synthetic oligonucleotide
guauucuucauugcuugca

SEQ ID NO: 2670778 - RNA, 19 nt, Artificial Sequence
  Description of Artificial Sequence: Synthetic oligonucleotide
gucuagugguccuuggaga

SEQ ID NO: 2670779 - RNA, 19 nt, Artificial Sequence
  Description of Artificial Sequence: Synthetic oligonucleotide
augcagaacgccaugcuga

SEQ ID NO: 2670780 - RNA, 19 nt, Artificial Sequence
  Description of Artificial Sequence: Synthetic oligonucleotide
uaucaggucuagugguccu

SEQ ID NO: 2670781 - RNA, 19 nt, Artificial Sequence
  Description of Artificial Sequence: Synthetic oligonucleotide
agacuuuuaugccguacuu

SEQ ID NO: 2670782 - RNA, 19 nt, Artificial Sequence
  Description of Artificial Sequence: Synthetic oligonucleotide
acgugucuaaauuguugcu

SEQ ID NO: 2670783 - RNA, 19 nt, Artificial Sequence
  Description of Artificial Sequence: Synthetic oligonucleotide
caagcucuugccugcuccc

SEQ ID NO: 2670784 - RNA, 19 nt, Artificial Sequence
  Description of Artificial Sequence: Synthetic oligonucleotide
aucaguaucgaggcuggca

SEQ ID NO: 2670785 - RNA, 19 nt, Artificial Sequence
  Description of Artificial Sequence: Synthetic oligonucleotide
gcugaucugugguugagac

SEQ ID NO: 2670786 - RNA, 19 nt, Artificial Sequence
  Description of Artificial Sequence: Synthetic oligonucleotide
ugcgcuugcuccaggcugu

SEQ ID NO: 2670787 - RNA, 19 nt, Artificial Sequence
  Description of Artificial Sequence: Synthetic oligonucleotide
ucgugcugacuucacugcu

SEQ ID NO: 2670788 - RNA, 19 nt, Artificial Sequence
  Description of Artificial Sequence: Synthetic oligonucleotide
uggaaucaguaucgaggcu

SEQ ID NO: 2670789 - RNA, 19 nt, Artificial Sequence
  Description of Artificial Sequence: Synthetic oligonucleotide
cagaacgccaugcugaucu

SEQ ID NO: 2670790 - RNA, 19 nt, Artificial Sequence
  Description of Artificial Sequence: Synthetic oligonucleotide
ucugggaacugcugcugcu

SEQ ID NO: 2670791 - RNA, 19 nt, Artificial Sequence
  Description of Artificial Sequence: Synthetic oligonucleotide
aacggugcuggaucuugaa

SEQ ID NO: 2670792 - RNA, 19 nt, Artificial Sequence
  Description of Artificial Sequence: Synthetic oligonucleotide
uugccugcucccaagccau

SEQ ID NO: 2670793 - RNA, 19 nt, Artificial Sequence
  Description of Artificial Sequence: Synthetic oligonucleotide
auaagaccuugcagauugc

SEQ ID NO: 2670794 - RNA, 19 nt, Artificial Sequence
  Description of Artificial Sequence: Synthetic oligonucleotide
aggcaacuuuccaucuugc

SEQ ID NO: 2670795 - RNA, 19 nt, Artificial Sequence
  Description of Artificial Sequence: Synthetic oligonucleotide
ucagcacacgugucuaaau

SEQ ID NO: 2670796 - RNA, 19 nt, Artificial Sequence
  Description of Artificial Sequence: Synthetic oligonucleotide
aguucaggacuugucagau

SEQ ID NO: 2670797 - RNA, 19 nt, Artificial Sequence
  Description of Artificial Sequence: Synthetic oligonucleotide
acgccaugcugaucugugg

SEQ ID NO: 2670798 - RNA, 19 nt, Artificial Sequence
  Description of Artificial Sequence: Synthetic oligonucleotide
ucaggucuagugguccuug

SEQ ID NO: 2670799 - RNA, 19 nt, Artificial Sequence
  Description of Artificial Sequence: Synthetic oligonucleotide
ugccuaugcagaacgccau

SEQ ID NO: 2670800 - RNA, 19 nt, Artificial Sequence
  Description of Artificial Sequence: Synthetic oligonucleotide
uaucgaggcuggcaacggu

SEQ ID NO: 2670801 - RNA, 19 nt, Artificial Sequence
  Description of Artificial Sequence: Synthetic oligonucleotide
ggaaacgcccagaauaaac

SEQ ID NO: 2670802 - RNA, 19 nt, Artificial Sequence
  Description of Artificial Sequence: Synthetic oligonucleotide
acaggcuguauucuucauu

SEQ ID NO: 2670803 - RNA, 19 nt, Artificial Sequence
  Description of Artificial Sequence: Synthetic oligonucleotide
ugccuuuucgaaacaucuu

SEQ ID NO: 2670804 - RNA, 19 nt, Artificial Sequence
  Description of Artificial Sequence: Synthetic oligonucleotide
uucuugccuuuucgaaaca

SEQ ID NO: 2670805 - RNA, 19 nt, Artificial Sequence
  Description of Artificial Sequence: Synthetic oligonucleotide
gauacagggcaugccuaug

SEQ ID NO: 2670806 - RNA, 19 nt, Artificial Sequence
  Description of Artificial Sequence: Synthetic oligonucleotide
cuugccugcucccaagcca

SEQ ID NO: 2670807 - RNA, 19 nt, Artificial Sequence
  Description of Artificial Sequence: Synthetic oligonucleotide
guuucucaauggcaccaac

SEQ ID NO: 2670808 - RNA, 19 nt, Artificial Sequence
  Description of Artificial Sequence: Synthetic oligonucleotide
guaucgaggcuggcaacgg

SEQ ID NO: 2670809 - RNA, 19 nt, Artificial Sequence
  Description of Artificial Sequence: Synthetic oligonucleotide
aacccacaggcuguauucu

SEQ ID NO: 2670810 - RNA, 19 nt, Artificial Sequence
  Description of Artificial Sequence: Synthetic oligonucleotide
cacggagucaaacgcugug

SEQ ID NO: 2670811 - RNA, 19 nt, Artificial Sequence
  Description of Artificial Sequence: Synthetic oligonucleotide
gaaacucagcacacguguc

SEQ ID NO: 2670812 - RNA, 19 nt, Artificial Sequence
  Description of Artificial Sequence: Synthetic oligonucleotide
cuuuuaugccguacuugga

SEQ ID NO: 2670813 - RNA, 19 nt, Artificial Sequence
  Description of Artificial Sequence: Synthetic oligonucleotide
cacuugacugcagaguuca

SEQ ID NO: 2670814 - RNA, 19 nt, Artificial Sequence
  Description of Artificial Sequence: Synthetic oligonucleotide
aggucuagugguccuugga

SEQ ID NO: 2670815 - RNA, 19 nt, Artificial Sequence
  Description of Artificial Sequence: Synthetic oligonucleotide
ggacuugucagaugucaac

SEQ ID NO: 2670816 - RNA, 19 nt, Artificial Sequence
  Description of Artificial Sequence: Synthetic oligonucleotide
ugcagaacgccaugcugau

SEQ ID NO: 2670817 - RNA, 19 nt, Artificial Sequence
  Description of Artificial Sequence: Synthetic oligonucleotide
aagaccuugcagauugcuu

SEQ ID NO: 2670818 - RNA, 19 nt, Artificial Sequence
  Description of Artificial Sequence: Synthetic oligonucleotide
ugcagaguucaggacuugu

SEQ ID NO: 2670819 - RNA, 19 nt, Artificial Sequence
  Description of Artificial Sequence: Synthetic oligonucleotide
guggucuugagugccagca

SEQ ID NO: 2670820 - RNA, 19 nt, Artificial Sequence
  Description of Artificial Sequence: Synthetic oligonucleotide
uugcagauugcuugcgcuu

SEQ ID NO: 2670821 - RNA, 19 nt, Artificial Sequence
  Description of Artificial Sequence: Synthetic oligonucleotide
cggugcuggaucuugaaag

SEQ ID NO: 2670822 - RNA, 19 nt, Artificial Sequence
  Description of Artificial Sequence: Synthetic oligonucleotide
ggaugaucagauacagggc

SEQ ID NO: 2670823 - RNA, 19 nt, Artificial Sequence
  Description of Artificial Sequence: Synthetic oligonucleotide
agcaagcucuugccugcuc

SEQ ID NO: 2670824 - RNA, 19 nt, Artificial Sequence
  Description of Artificial Sequence: Synthetic oligonucleotide
guucaggacuugucagaug

SEQ ID NO: 2670825 - RNA, 19 nt, Artificial Sequence
  Description of Artificial Sequence: Synthetic oligonucleotide
uugcaucuguggucuugag

SEQ ID NO: 2670826 - RNA, 19 nt, Artificial Sequence
  Description of Artificial Sequence: Synthetic oligonucleotide
uugguggaaucaguaucga

SEQ ID NO: 2670827 - RNA, 19 nt, Artificial Sequence
  Description of Artificial Sequence: Synthetic oligonucleotide
ccuuuucgaaacaucuuuc

SEQ ID NO: 2670828 - RNA, 19 nt, Artificial Sequence
  Description of Artificial Sequence: Synthetic oligonucleotide
uggucuugagugccagcaa

SEQ ID NO: 2670829 - RNA, 19 nt, Artificial Sequence
  Description of Artificial Sequence: Synthetic oligonucleotide
gcgacaucuauauaauuua

SEQ ID NO: 2670830 - RNA, 19 nt, Artificial Sequence
  Description of Artificial Sequence: Synthetic oligonucleotide
ugucgcuucuugccuuuuc

SEQ ID NO: 2670831 - RNA, 19 nt, Artificial Sequence
  Description of Artificial Sequence: Synthetic oligonucleotide
auuguugcuuugaccugag

SEQ ID NO: 2670832 - RNA, 19 nt, Artificial Sequence
  Description of Artificial Sequence: Synthetic oligonucleotide
cugcugugucgcuucuugc

SEQ ID NO: 2670833 - RNA, 19 nt, Artificial Sequence
  Description of Artificial Sequence: Synthetic oligonucleotide
caggacuugucagauguca

SEQ ID NO: 2670834 - RNA, 19 nt, Artificial Sequence
  Description of Artificial Sequence: Synthetic oligonucleotide
ggcuguuacauugguaaac

SEQ ID NO: 2670835 - RNA, 19 nt, Artificial Sequence
  Description of Artificial Sequence: Synthetic oligonucleotide
gaccugagcuuuuggugga

SEQ ID NO: 2670836 - RNA, 19 nt, Artificial Sequence
  Description of Artificial Sequence: Synthetic oligonucleotide
cuugcagauugcuugcgcu

SEQ ID NO: 2670837 - RNA, 19 nt, Artificial Sequence
  Description of Artificial Sequence: Synthetic oligonucleotide
acgcccagaauaaacuccu

SEQ ID NO: 2670838 - RNA, 19 nt, Artificial Sequence
  Description of Artificial Sequence: Synthetic oligonucleotide
cgucauagcacaccauccg

SEQ ID NO: 2670839 - RNA, 19 nt, Artificial Sequence
  Description of Artificial Sequence: Synthetic oligonucleotide
uggcaacggugcuggaucu

SEQ ID NO: 2670840 - RNA, 19 nt, Artificial Sequence
  Description of Artificial Sequence: Synthetic oligonucleotide
agggcaugccuaugcagaa

SEQ ID NO: 2670841 - RNA, 19 nt, Artificial Sequence
  Description of Artificial Sequence: Synthetic oligonucleotide
aacuccuccuccaggggaa

SEQ ID NO: 2670842 - RNA, 19 nt, Artificial Sequence
  Description of Artificial Sequence: Synthetic oligonucleotide
gcuggaucuugaaagcccc

SEQ ID NO: 2670843 - RNA, 19 nt, Artificial Sequence
  Description of Artificial Sequence: Synthetic oligonucleotide
caugcugaucugugguuga

SEQ ID NO: 2670844 - RNA, 19 nt, Artificial Sequence
  Description of Artificial Sequence: Synthetic oligonucleotide
agaacgccaugcugaucug

SEQ ID NO: 2670845 - RNA, 19 nt, Artificial Sequence
  Description of Artificial Sequence: Synthetic oligonucleotide
auccggaugaucagauaca

SEQ ID NO: 2670846 - RNA, 19 nt, Artificial Sequence
  Description of Artificial Sequence: Synthetic oligonucleotide
aggcuguuacauugguaaa

SEQ ID NO: 2670847 - RNA, 19 nt, Artificial Sequence
  Description of Artificial Sequence: Synthetic oligonucleotide
caguaucgaggcuggcaac

SEQ ID NO: 2670848 - RNA, 19 nt, Artificial Sequence
  Description of Artificial Sequence: Synthetic oligonucleotide
cuuuugguggaaucaguau

SEQ ID NO: 2670849 - RNA, 19 nt, Artificial Sequence
  Description of Artificial Sequence: Synthetic oligonucleotide
ugugucgcuucuugccuuu

SEQ ID NO: 2670850 - RNA, 19 nt, Artificial Sequence
  Description of Artificial Sequence: Synthetic oligonucleotide
caccauagcuugauccaga

SEQ ID NO: 2670851 - RNA, 19 nt, Artificial Sequence
  Description of Artificial Sequence: Synthetic oligonucleotide
ccuaugcagaacgccaugc

SEQ ID NO: 2670852 - RNA, 19 nt, Artificial Sequence
  Description of Artificial Sequence: Synthetic oligonucleotide
aagcucuugccugcuccca

SEQ ID NO: 2670853 - RNA, 19 nt, Artificial Sequence
  Description of Artificial Sequence: Synthetic oligonucleotide
augaucagauacagggcau

SEQ ID NO: 2670854 - RNA, 19 nt, Artificial Sequence
  Description of Artificial Sequence: Synthetic oligonucleotide
agcuuuugguggaaucagu

SEQ ID NO: 2670855 - RNA, 19 nt, Artificial Sequence
  Description of Artificial Sequence: Synthetic oligonucleotide
ucgaaacaucuuucaccau

SEQ ID NO: 2670856 - RNA, 19 nt, Artificial Sequence
  Description of Artificial Sequence: Synthetic oligonucleotide
uggaaacgcccagaauaaa

SEQ ID NO: 2670857 - RNA, 19 nt, Artificial Sequence
  Description of Artificial Sequence: Synthetic oligonucleotide
cucuucgugcugacuucac

SEQ ID NO: 2670858 - RNA, 19 nt, Artificial Sequence
  Description of Artificial Sequence: Synthetic oligonucleotide
augcugaucugugguugag

SEQ ID NO: 2670859 - RNA, 19 nt, Artificial Sequence
  Description of Artificial Sequence: Synthetic oligonucleotide
cugggaacugcugcugcug

SEQ ID NO: 2670860 - RNA, 19 nt, Artificial Sequence
  Description of Artificial Sequence: Synthetic oligonucleotide
aguuucucaauggcaccaa

SEQ ID NO: 2670861 - RNA, 19 nt, Artificial Sequence
  Description of Artificial Sequence: Synthetic oligonucleotide
ccaacauacuuuauucgaa

SEQ ID NO: 2670862 - RNA, 19 nt, Artificial Sequence
  Description of Artificial Sequence: Synthetic oligonucleotide
cuucauugcuugcaucugu

SEQ ID NO: 2670863 - RNA, 19 nt, Artificial Sequence
  Description of Artificial Sequence: Synthetic oligonucleotide
uugcuugcgcuugcuccag

SEQ ID NO: 2670864 - RNA, 19 nt, Artificial Sequence
  Description of Artificial Sequence: Synthetic oligonucleotide
agcuugauccagagacgag

SEQ ID NO: 2670865 - RNA, 19 nt, Artificial Sequence
  Description of Artificial Sequence: Synthetic oligonucleotide
uuccaucuugcugggcgac

SEQ ID NO: 2670866 - RNA, 19 nt, Artificial Sequence
  Description of Artificial Sequence: Synthetic oligonucleotide
ugcugacuucacugcucug

SEQ ID NO: 2670867 - RNA, 19 nt, Artificial Sequence
  Description of Artificial Sequence: Synthetic oligonucleotide
acucagcacacgugucuaa

SEQ ID NO: 2670868 - RNA, 19 nt, Artificial Sequence
  Description of Artificial Sequence: Synthetic oligonucleotide
uugagacuuuuaugccgua

SEQ ID NO: 2670869 - RNA, 19 nt, Artificial Sequence
  Description of Artificial Sequence: Synthetic oligonucleotide
cugcucccaagccaucguc

SEQ ID NO: 2670870 - RNA, 19 nt, Artificial Sequence
  Description of Artificial Sequence: Synthetic oligonucleotide
guacuuggaaacgcccaga

SEQ ID NO: 2670871 - RNA, 19 nt, Artificial Sequence
  Description of Artificial Sequence: Synthetic oligonucleotide
caacacggagucaaacgcu

SEQ ID NO: 2670872 - RNA, 19 nt, Artificial Sequence
  Description of Artificial Sequence: Synthetic oligonucleotide
aggacuugucagaugucaa

SEQ ID NO: 2670873 - RNA, 19 nt, Artificial Sequence
  Description of Artificial Sequence: Synthetic oligonucleotide
ccuugcagauugcuugcgc

SEQ ID NO: 2670874 - RNA, 19 nt, Artificial Sequence
  Description of Artificial Sequence: Synthetic oligonucleotide
cugugguugagacuuuuau

SEQ ID NO: 2670875 - RNA, 19 nt, Artificial Sequence
  Description of Artificial Sequence: Synthetic oligonucleotide
ccggaugaucagauacagg

SEQ ID NO: 2670876 - RNA, 19 nt, Artificial Sequence
  Description of Artificial Sequence: Synthetic oligonucleotide
agccaucgucauagcacac

SEQ ID NO: 2670877 - RNA, 19 nt, Artificial Sequence
  Description of Artificial Sequence: Synthetic oligonucleotide
agaugucaacacggaguca

SEQ ID NO: 2670878 - RNA, 19 nt, Artificial Sequence
  Description of Artificial Sequence: Synthetic oligonucleotide
cauagcacaccauccggau

SEQ ID NO: 2670879 - RNA, 19 nt, Artificial Sequence
  Description of Artificial Sequence: Synthetic oligonucleotide
gcagauugcuugcgcuugc

SEQ ID NO: 2670880 - RNA, 19 nt, Artificial Sequence
  Description of Artificial Sequence: Synthetic oligonucleotide
gccaucgucauagcacacc

SEQ ID NO: 2670881 - RNA, 19 nt, Artificial Sequence
  Description of Artificial Sequence: Synthetic oligonucleotide
ggcgacaucuauauaauuu

SEQ ID NO: 2670882 - RNA, 19 nt, Artificial Sequence
  Description of Artificial Sequence: Synthetic oligonucleotide
gcaacggugcuggaucuug

SEQ ID NO: 2670883 - RNA, 19 nt, Artificial Sequence
  Description of Artificial Sequence: Synthetic oligonucleotide
ggcaccaacauacuuuauu

SEQ ID NO: 2670884 - RNA, 19 nt, Artificial Sequence
  Description of Artificial Sequence: Synthetic oligonucleotide
aucuuucaccauagcuuga

SEQ ID NO: 2670885 - RNA, 19 nt, Artificial Sequence
  Description of Artificial Sequence: Synthetic oligonucleotide
gccuuuucgaaacaucuuu

SEQ ID NO: 2670886 - RNA, 19 nt, Artificial Sequence
  Description of Artificial Sequence: Synthetic oligonucleotide
gcuuuugguggaaucagua

SEQ ID NO: 2670887 - RNA, 19 nt, Artificial Sequence
  Description of Artificial Sequence: Synthetic oligonucleotide
cccacaggcuguauucuuc

SEQ ID NO: 2670888 - RNA, 19 nt, Artificial Sequence
  Description of Artificial Sequence: Synthetic oligonucleotide
caacggugcuggaucuuga

SEQ ID NO: 2670889 - RNA, 19 nt, Artificial Sequence
  Description of Artificial Sequence: Synthetic oligonucleotide
cuugcugggcgacaucuau

SEQ ID NO: 2670890 - RNA, 19 nt, Artificial Sequence
  Description of Artificial Sequence: Synthetic oligonucleotide
cgaaacaucuuucaccaua

SEQ ID NO: 2670891 - RNA, 19 nt, Artificial Sequence
  Description of Artificial Sequence: Synthetic oligonucleotide
gccuaugcagaacgccaug

SEQ ID NO: 2670892 - RNA, 19 nt, Artificial Sequence
  Description of Artificial Sequence: Synthetic oligonucleotide
gcuuugaccugagcuuuug

SEQ ID NO: 2670893 - RNA, 19 nt, Artificial Sequence
  Description of Artificial Sequence: Synthetic oligonucleotide
acacggagucaaacgcugu

SEQ ID NO: 2670894 - RNA, 19 nt, Artificial Sequence
  Description of Artificial Sequence: Synthetic oligonucleotide
cucagcacacgugucuaaa

SEQ ID NO: 2670895 - RNA, 19 nt, Artificial Sequence
  Description of Artificial Sequence: Synthetic oligonucleotide
caguuuccacuugacugca

SEQ ID NO: 2670896 - RNA, 19 nt, Artificial Sequence
  Description of Artificial Sequence: Synthetic oligonucleotide
cugaucugugguugagacu

SEQ ID NO: 2670897 - RNA, 19 nt, Artificial Sequence
  Description of Artificial Sequence: Synthetic oligonucleotide
acucuuccccugagacagg

SEQ ID NO: 2670898 - RNA, 19 nt, Artificial Sequence
  Description of Artificial Sequence: Synthetic oligonucleotide
aucaggucuagugguccuu

SEQ ID NO: 2670899 - RNA, 19 nt, Artificial Sequence
  Description of Artificial Sequence: Synthetic oligonucleotide
cuucacugcucugggaacu

SEQ ID NO: 2670900 - RNA, 19 nt, Artificial Sequence
  Description of Artificial Sequence: Synthetic oligonucleotide
caccauccggaugaucaga

SEQ ID NO: 2670901 - RNA, 19 nt, Artificial Sequence
  Description of Artificial Sequence: Synthetic oligonucleotide
ggcaacuuuccaucuugcu

SEQ ID NO: 2670902 - RNA, 19 nt, Artificial Sequence
  Description of Artificial Sequence: Synthetic oligonucleotide
ccaagccaucgucauagca

SEQ ID NO: 2670903 - RNA, 19 nt, Artificial Sequence
  Description of Artificial Sequence: Synthetic oligonucleotide
ccguacuuggaaacgccca

SEQ ID NO: 2670904 - RNA, 19 nt, Artificial Sequence
  Description of Artificial Sequence: Synthetic oligonucleotide
ccacuugacugcagaguuc

SEQ ID NO: 2670905 - RNA, 19 nt, Artificial Sequence
  Description of Artificial Sequence: Synthetic oligonucleotide
cgaaacucagcacacgugu

SEQ ID NO: 2670906 - RNA, 19 nt, Artificial Sequence
  Description of Artificial Sequence: Synthetic oligonucleotide
gaacgccaugcugaucugu

SEQ ID NO: 2670907 - RNA, 19 nt, Artificial Sequence
  Description of Artificial Sequence: Synthetic oligonucleotide
gcugugucgcuucuugccu

SEQ ID NO: 2670908 - RNA, 19 nt, Artificial Sequence
  Description of Artificial Sequence: Synthetic oligonucleotide
cagcacacgugucuaaauu

SEQ ID NO: 2670909 - RNA, 19 nt, Artificial Sequence
  Description of Artificial Sequence: Synthetic oligonucleotide
augucaacacggagucaaa

SEQ ID NO: 2670910 - RNA, 19 nt, Artificial Sequence
  Description of Artificial Sequence: Synthetic oligonucleotide
cugcagaguucaggacuug

SEQ ID NO: 2670911 - RNA, 19 nt, Artificial Sequence
  Description of Artificial Sequence: Synthetic oligonucleotide
cuugcgcuugcuccaggcu

SEQ ID NO: 2670912 - RNA, 19 nt, Artificial Sequence
  Description of Artificial Sequence: Synthetic oligonucleotide
gcacacgugucuaaauugu

SEQ ID NO: 2670913 - RNA, 19 nt, Artificial Sequence
  Description of Artificial Sequence: Synthetic oligonucleotide
cacacgugucuaaauuguu

SEQ ID NO: 2670914 - RNA, 19 nt, Artificial Sequence
  Description of Artificial Sequence: Synthetic oligonucleotide
ggagucaaacgcuguggau

SEQ ID NO: 2670915 - RNA, 19 nt, Artificial Sequence
  Description of Artificial Sequence: Synthetic oligonucleotide
gguaaacccacaggcugua

SEQ ID NO: 2670916 - RNA, 19 nt, Artificial Sequence
  Description of Artificial Sequence: Synthetic oligonucleotide
gcucuucgugcugacuuca

SEQ ID NO: 2670917 - RNA, 19 nt, Artificial Sequence
  Description of Artificial Sequence: Synthetic oligonucleotide
agugguccuuggagacucu

SEQ ID NO: 2670918 - RNA, 19 nt, Artificial Sequence
  Description of Artificial Sequence: Synthetic oligonucleotide
ccccaaggcuggaauccac

SEQ ID NO: 2670919 - RNA, 19 nt, Artificial Sequence
  Description of Artificial Sequence: Synthetic oligonucleotide
gggcaugccuaugcagaac

SEQ ID NO: 2670920 - RNA, 19 nt, Artificial Sequence
  Description of Artificial Sequence: Synthetic oligonucleotide
caucgucauagcacaccau

SEQ ID NO: 2670921 - RNA, 19 nt, Artificial Sequence
  Description of Artificial Sequence: Synthetic oligonucleotide
cggagucaaacgcugugga

SEQ ID NO: 2670922 - RNA, 19 nt, Artificial Sequence
  Description of Artificial Sequence: Synthetic oligonucleotide
ccauagcuugauccagaga

SEQ ID NO: 2670923 - RNA, 19 nt, Artificial Sequence
  Description of Artificial Sequence: Synthetic oligonucleotide
ccuuggagacucuuccccu

SEQ ID NO: 2670924 - RNA, 19 nt, Artificial Sequence
  Description of Artificial Sequence: Synthetic oligonucleotide
cugugucgcuucuugccuu

SEQ ID NO: 2670925 - RNA, 19 nt, Artificial Sequence
  Description of Artificial Sequence: Synthetic oligonucleotide
acgcuguggauaagaccuu

SEQ ID NO: 2670926 - RNA, 19 nt, Artificial Sequence
  Description of Artificial Sequence: Synthetic oligonucleotide
guaaacccacaggcuguau

SEQ ID NO: 2670927 - RNA, 19 nt, Artificial Sequence
  Description of Artificial Sequence: Synthetic oligonucleotide
gggcgacaucuauauaauu

SEQ ID NO: 2670928 - RNA, 19 nt, Artificial Sequence
  Description of Artificial Sequence: Synthetic oligonucleotide
gcagaacgccaugcugauc

SEQ ID NO: 2670929 - RNA, 19 nt, Artificial Sequence
  Description of Artificial Sequence: Synthetic oligonucleotide
gcugggcgacaucuauaua

SEQ ID NO: 2670930 - RNA, 19 nt, Artificial Sequence
  Description of Artificial Sequence: Synthetic oligonucleotide
gcuggcaacggugcuggau

SEQ ID NO: 2670931 - RNA, 19 nt, Artificial Sequence
  Description of Artificial Sequence: Synthetic oligonucleotide
ccauccggaugaucagaua

SEQ ID NO: 2670932 - RNA, 19 nt, Artificial Sequence
  Description of Artificial Sequence: Synthetic oligonucleotide
gcacaccauccggaugauc

SEQ ID NO: 2670933 - RNA, 19 nt, Artificial Sequence
  Description of Artificial Sequence: Synthetic oligonucleotide
ccacagacuugcucuucgu

SEQ ID NO: 2670934 - RNA, 19 nt, Artificial Sequence
  Description of Artificial Sequence: Synthetic oligonucleotide
cgccaugcugaucuguggu

SEQ ID NO: 2670935 - RNA, 19 nt, Artificial Sequence
  Description of Artificial Sequence: Synthetic oligonucleotide
cagcaagcucuugccugcu

SEQ ID NO: 2670936 - RNA, 19 nt, Artificial Sequence
  Description of Artificial Sequence: Synthetic oligonucleotide
ccugcucccaagccaucgu

SEQ ID NO: 2670937 - RNA, 19 nt, Artificial Sequence
  Description of Artificial Sequence: Synthetic oligonucleotide
gugucgcuucuugccuuuu

SEQ ID NO: 2670938 - RNA, 19 nt, Artificial Sequence
  Description of Artificial Sequence: Synthetic oligonucleotide
ggcaacggugcuggaucuu

SEQ ID NO: 2670939 - RNA, 19 nt, Artificial Sequence
  Description of Artificial Sequence: Synthetic oligonucleotide
ccccugagacagguccagu

SEQ ID NO: 2670940 - RNA, 19 nt, Artificial Sequence
  Description of Artificial Sequence: Synthetic oligonucleotide
gcgcuugcuccaggcuguu

SEQ ID NO: 2670941 - RNA, 19 nt, Artificial Sequence
  Description of Artificial Sequence: Synthetic oligonucleotide
cgcuugcuccaggcuguua

SEQ ID NO: 2670942 - RNA, 19 nt, Artificial Sequence
  Description of Artificial Sequence: Synthetic oligonucleotide
uauaugauguagcagaagg

SEQ ID NO: 2670943 - RNA, 19 nt, Artificial Sequence
  Description of Artificial Sequence: Synthetic oligonucleotide
gauuauaugauguagcaga

SEQ ID NO: 2670944 - RNA, 19 nt, Artificial Sequence
  Description of Artificial Sequence: Synthetic oligonucleotide
augacaaucaucuucacau

SEQ ID NO: 2670945 - RNA, 19 nt, Artificial Sequence
  Description of Artificial Sequence: Synthetic oligonucleotide
ucuugaaguguucagacgu

SEQ ID NO: 2670946 - RNA, 19 nt, Artificial Sequence
  Description of Artificial Sequence: Synthetic oligonucleotide
augagaugcagccacaguc

SEQ ID NO: 2670947 - RNA, 19 nt, Artificial Sequence
  Description of Artificial Sequence: Synthetic oligonucleotide
gaugaugacaaucaucuuc

SEQ ID NO: 2670948 - RNA, 19 nt, Artificial Sequence
  Description of Artificial Sequence: Synthetic oligonucleotide
ucuuaaguggggauggugc

SEQ ID NO: 2670949 - RNA, 19 nt, Artificial Sequence
  Description of Artificial Sequence: Synthetic oligonucleotide
cuuguuucggagauggucc

SEQ ID NO: 2670950 - RNA, 19 nt, Artificial Sequence
  Description of Artificial Sequence: Synthetic oligonucleotide
ucuuuauugcccaccagcc

SEQ ID NO: 2670951 - RNA, 19 nt, Artificial Sequence
  Description of Artificial Sequence: Synthetic oligonucleotide
agaugguccaaguuuuccc

SEQ ID NO: 2670952 - RNA, 19 nt, Artificial Sequence
  Description of Artificial Sequence: Synthetic oligonucleotide
acauucuuccaccagaacu

SEQ ID NO: 2670953 - RNA, 19 nt, Artificial Sequence
  Description of Artificial Sequence: Synthetic oligonucleotide
uuucccagccacaagcagg

SEQ ID NO: 2670954 - RNA, 19 nt, Artificial Sequence
  Description of Artificial Sequence: Synthetic oligonucleotide
ugcgauguugucuugaagu

SEQ ID NO: 2670955 - RNA, 19 nt, Artificial Sequence
  Description of Artificial Sequence: Synthetic oligonucleotide
ucuuccaccagaacuuccg

SEQ ID NO: 2670956 - RNA, 19 nt, Artificial Sequence
  Description of Artificial Sequence: Synthetic oligonucleotide
auucuugacucccuccacc

SEQ ID NO: 2670957 - RNA, 19 nt, Artificial Sequence
  Description of Artificial Sequence: Synthetic oligonucleotide
ucuggauuauaugauguag

SEQ ID NO: 2670958 - RNA, 19 nt, Artificial Sequence
  Description of Artificial Sequence: Synthetic oligonucleotide
uggauuauaugauguagca

SEQ ID NO: 2670959 - RNA, 19 nt, Artificial Sequence
  Description of Artificial Sequence: Synthetic oligonucleotide
gucaugauauucuugacuc

SEQ ID NO: 2670960 - RNA, 19 nt, Artificial Sequence
  Description of Artificial Sequence: Synthetic oligonucleotide
ugggucaugauauucuuga

SEQ ID NO: 2670961 - RNA, 19 nt, Artificial Sequence
  Description of Artificial Sequence: Synthetic oligonucleotide
cuggauuauaugauguagc

SEQ ID NO: 2670962 - RNA, 19 nt, Artificial Sequence
  Description of Artificial Sequence: Synthetic oligonucleotide
aguggcaaagagcacaaug

SEQ ID NO: 2670963 - RNA, 19 nt, Artificial Sequence
  Description of Artificial Sequence: Synthetic oligonucleotide
agucuguuuccacucaagg

SEQ ID NO: 2670964 - RNA, 19 nt, Artificial Sequence
  Description of Artificial Sequence: Synthetic oligonucleotide
caaguuuuccccucgggcc

SEQ ID NO: 2670965 - RNA, 19 nt, Artificial Sequence
  Description of Artificial Sequence: Synthetic oligonucleotide
ucucaaagcaguacucgcc

SEQ ID NO: 2670966 - RNA, 19 nt, Artificial Sequence
  Description of Artificial Sequence: Synthetic oligonucleotide
agacguggcuuccaagucc

SEQ ID NO: 2670967 - RNA, 19 nt, Artificial Sequence
  Description of Artificial Sequence: Synthetic oligonucleotide
gauauucuugacucccucc

SEQ ID NO: 2670968 - RNA, 19 nt, Artificial Sequence
  Description of Artificial Sequence: Synthetic oligonucleotide
gaugguccaaguuuucccc

SEQ ID NO: 2670969 - RNA, 19 nt, Artificial Sequence
  Description of Artificial Sequence: Synthetic oligonucleotide
gucuuuauugcccaccagc

SEQ ID NO: 2670970 - RNA, 19 nt, Artificial Sequence
  Description of Artificial Sequence: Synthetic oligonucleotide
auaugauguagcagaaggc

SEQ ID NO: 2670971 - RNA, 19 nt, Artificial Sequence
  Description of Artificial Sequence: Synthetic oligonucleotide
ugucuugaaguguucagac

SEQ ID NO: 2670972 - RNA, 19 nt, Artificial Sequence
  Description of Artificial Sequence: Synthetic oligonucleotide
uuucuguggaggaggacag

SEQ ID NO: 2670973 - RNA, 19 nt, Artificial Sequence
  Description of Artificial Sequence: Synthetic oligonucleotide
caugauauucuugacuccc

SEQ ID NO: 2670974 - RNA, 19 nt, Artificial Sequence
  Description of Artificial Sequence: Synthetic oligonucleotide
uccuaacucggucauuucc

SEQ ID NO: 2670975 - RNA, 19 nt, Artificial Sequence
  Description of Artificial Sequence: Synthetic oligonucleotide
acccaugagaugcagccac

SEQ ID NO: 2670976 - RNA, 19 nt, Artificial Sequence
  Description of Artificial Sequence: Synthetic oligonucleotide
acaagcaggguccucuggg

SEQ ID NO: 2670977 - RNA, 19 nt, Artificial Sequence
  Description of Artificial Sequence: Synthetic oligonucleotide
aggaggacaggagagggcc

SEQ ID NO: 2670978 - RNA, 19 nt, Artificial Sequence
  Description of Artificial Sequence: Synthetic oligonucleotide
uguggaggaggacaggaga

SEQ ID NO: 2670979 - RNA, 19 nt, Artificial Sequence
  Description of Artificial Sequence: Synthetic oligonucleotide
gaacggggcucuuaagugg

SEQ ID NO: 2670980 - RNA, 19 nt, Artificial Sequence
  Description of Artificial Sequence: Synthetic oligonucleotide
ugaacggggcucuuaagug

SEQ ID NO: 2670981 - RNA, 19 nt, Artificial Sequence
  Description of Artificial Sequence: Synthetic oligonucleotide
aagagcacaaugaggauga

SEQ ID NO: 2670982 - RNA, 19 nt, Artificial Sequence
  Description of Artificial Sequence: Synthetic oligonucleotide
auauucuugacucccucca

SEQ ID NO: 2670983 - RNA, 19 nt, Artificial Sequence
  Description of Artificial Sequence: Synthetic oligonucleotide
ucagacguggcuuccaagu

SEQ ID NO: 2670984 - RNA, 19 nt, Artificial Sequence
  Description of Artificial Sequence: Synthetic oligonucleotide
augauguagcagaaggccc

SEQ ID NO: 2670985 - RNA, 19 nt, Artificial Sequence
  Description of Artificial Sequence: Synthetic oligonucleotide
gacaaucaucuucacauuc

SEQ ID NO: 2670986 - RNA, 19 nt, Artificial Sequence
  Description of Artificial Sequence: Synthetic oligonucleotide
acaugagggaggguuaccc

SEQ ID NO: 2670987 - RNA, 19 nt, Artificial Sequence
  Description of Artificial Sequence: Synthetic oligonucleotide
agaaggcccucacagggac

SEQ ID NO: 2670988 - RNA, 19 nt, Artificial Sequence
  Description of Artificial Sequence: Synthetic oligonucleotide
cagaugaugacaaucaucu

SEQ ID NO: 2670989 - RNA, 19 nt, Artificial Sequence
  Description of Artificial Sequence: Synthetic oligonucleotide
uugaaguguucagacgugg

SEQ ID NO: 2670990 - RNA, 19 nt, Artificial Sequence
  Description of Artificial Sequence: Synthetic oligonucleotide
cuuaaguggggauggugcc

SEQ ID NO: 2670991 - RNA, 19 nt, Artificial Sequence
  Description of Artificial Sequence: Synthetic oligonucleotide
cucucuaacccacucuccg

SEQ ID NO: 2670992 - RNA, 19 nt, Artificial Sequence
  Description of Artificial Sequence: Synthetic oligonucleotide
aguguucagacguggcuuc

SEQ ID NO: 2670993 - RNA, 19 nt, Artificial Sequence
  Description of Artificial Sequence: Synthetic oligonucleotide
ucucuaacccacucuccgg

SEQ ID NO: 2670994 - RNA, 19 nt, Artificial Sequence
  Description of Artificial Sequence: Synthetic oligonucleotide
augaacggggcucuuaagu

SEQ ID NO: 2670995 - RNA, 19 nt, Artificial Sequence
  Description of Artificial Sequence: Synthetic oligonucleotide
aaguuuuccccucgggcca

SEQ ID NO: 2670996 - RNA, 19 nt, Artificial Sequence
  Description of Artificial Sequence: Synthetic oligonucleotide
guuacccugaagaggaggg

SEQ ID NO: 2670997 - RNA, 19 nt, Artificial Sequence
  Description of Artificial Sequence: Synthetic oligonucleotide
acuugggccucucaaagca

SEQ ID NO: 2670998 - RNA, 19 nt, Artificial Sequence
  Description of Artificial Sequence: Synthetic oligonucleotide
acagaugaugacaaucauc

SEQ ID NO: 2670999 - RNA, 19 nt, Artificial Sequence
  Description of Artificial Sequence: Synthetic oligonucleotide
gaugacaaucaucuucaca

SEQ ID NO: 2671000 - RNA, 19 nt, Artificial Sequence
  Description of Artificial Sequence: Synthetic oligonucleotide
ucggagaugguccaaguuu

SEQ ID NO: 2671001 - RNA, 19 nt, Artificial Sequence
  Description of Artificial Sequence: Synthetic oligonucleotide
aagcaguacucgccuaguc

SEQ ID NO: 2671002 - RNA, 19 nt, Artificial Sequence
  Description of Artificial Sequence: Synthetic oligonucleotide
uuauaugauguagcagaag

SEQ ID NO: 2671003 - RNA, 19 nt, Artificial Sequence
  Description of Artificial Sequence: Synthetic oligonucleotide
ucaugauauucuugacucc

SEQ ID NO: 2671004 - RNA, 19 nt, Artificial Sequence
  Description of Artificial Sequence: Synthetic oligonucleotide
gaggguuacccugaagagg

SEQ ID NO: 2671005 - RNA, 19 nt, Artificial Sequence
  Description of Artificial Sequence: Synthetic oligonucleotide
ucuuguuucggagaugguc

SEQ ID NO: 2671006 - RNA, 19 nt, Artificial Sequence
  Description of Artificial Sequence: Synthetic oligonucleotide
cuaacucggucauuuccgg

SEQ ID NO: 2671007 - RNA, 19 nt, Artificial Sequence
  Description of Artificial Sequence: Synthetic oligonucleotide
gaugcagccacaguccagc

SEQ ID NO: 2671008 - RNA, 19 nt, Artificial Sequence
  Description of Artificial Sequence: Synthetic oligonucleotide
cucucaaagcaguacucgc

SEQ ID NO: 2671009 - RNA, 19 nt, Artificial Sequence
  Description of Artificial Sequence: Synthetic oligonucleotide
uuccaccagaacuuccggg

SEQ ID NO: 2671010 - RNA, 19 nt, Artificial Sequence
  Description of Artificial Sequence: Synthetic oligonucleotide
uaacccacucuccggaccc

SEQ ID NO: 2671011 - RNA, 19 nt, Artificial Sequence
  Description of Artificial Sequence: Synthetic oligonucleotide
uuggcacacaugagggagg

SEQ ID NO: 2671012 - RNA, 19 nt, Artificial Sequence
  Description of Artificial Sequence: Synthetic oligonucleotide
cagagcagcguuucugugg

SEQ ID NO: 2671013 - RNA, 19 nt, Artificial Sequence
  Description of Artificial Sequence: Synthetic oligonucleotide
cuuggcacacaugagggag

SEQ ID NO: 2671014 - RNA, 19 nt, Artificial Sequence
  Description of Artificial Sequence: Synthetic oligonucleotide
uuccacucaaggcagccac

SEQ ID NO: 2671015 - RNA, 19 nt, Artificial Sequence
  Description of Artificial Sequence: Synthetic oligonucleotide
gucuugaaguguucagacg

SEQ ID NO: 2671016 - RNA, 19 nt, Artificial Sequence
  Description of Artificial Sequence: Synthetic oligonucleotide
uagucuguuuccacucaag

SEQ ID NO: 2671017 - RNA, 19 nt, Artificial Sequence
  Description of Artificial Sequence: Synthetic oligonucleotide
ugauauucuugacucccuc

SEQ ID NO: 2671018 - RNA, 19 nt, Artificial Sequence
  Description of Artificial Sequence: Synthetic oligonucleotide
gagggugggaugaacgggg

SEQ ID NO: 2671019 - RNA, 19 nt, Artificial Sequence
  Description of Artificial Sequence: Synthetic oligonucleotide
gugcuucuggauuauauga

SEQ ID NO: 2671020 - RNA, 19 nt, Artificial Sequence
  Description of Artificial Sequence: Synthetic oligonucleotide
caaagcaguacucgccuag

SEQ ID NO: 2671021 - RNA, 19 nt, Artificial Sequence
  Description of Artificial Sequence: Synthetic oligonucleotide
ugcuucuggauuauaugau

SEQ ID NO: 2671022 - RNA, 19 nt, Artificial Sequence
  Description of Artificial Sequence: Synthetic oligonucleotide
aacggggcucuuaaguggg

SEQ ID NO: 2671023 - RNA, 19 nt, Artificial Sequence
  Description of Artificial Sequence: Synthetic oligonucleotide
gcagaaggcccucacaggg

SEQ ID NO: 2671024 - RNA, 19 nt, Artificial Sequence
  Description of Artificial Sequence: Synthetic oligonucleotide
ugucucggagcacuugggc

SEQ ID NO: 2671025 - RNA, 19 nt, Artificial Sequence
  Description of Artificial Sequence: Synthetic oligonucleotide
agcaguacucgccuagucu

SEQ ID NO: 2671026 - RNA, 19 nt, Artificial Sequence
  Description of Artificial Sequence: Synthetic oligonucleotide
cuguuuccacucaaggcag

SEQ ID NO: 2671027 - RNA, 19 nt, Artificial Sequence
  Description of Artificial Sequence: Synthetic oligonucleotide
uguugucuugaaguguuca

SEQ ID NO: 2671028 - RNA, 19 nt, Artificial Sequence
  Description of Artificial Sequence: Synthetic oligonucleotide
agagcagcguuucugugga

SEQ ID NO: 2671029 - RNA, 19 nt, Artificial Sequence
  Description of Artificial Sequence: Synthetic oligonucleotide
uuauugcccaccagccacc

SEQ ID NO: 2671030 - RNA, 19 nt, Artificial Sequence
  Description of Artificial Sequence: Synthetic oligonucleotide
ucaaggugcuucuggauua

SEQ ID NO: 2671031 - RNA, 19 nt, Artificial Sequence
  Description of Artificial Sequence: Synthetic oligonucleotide
agcagaaggcccucacagg

SEQ ID NO: 2671032 - RNA, 19 nt, Artificial Sequence
  Description of Artificial Sequence: Synthetic oligonucleotide
ucucucuaacccacucucc

SEQ ID NO: 2671033 - RNA, 19 nt, Artificial Sequence
  Description of Artificial Sequence: Synthetic oligonucleotide
augagggaggguuacccug

SEQ ID NO: 2671034 - RNA, 19 nt, Artificial Sequence
  Description of Artificial Sequence: Synthetic oligonucleotide
uucuugacucccuccaccu

SEQ ID NO: 2671035 - RNA, 19 nt, Artificial Sequence
  Description of Artificial Sequence: Synthetic oligonucleotide
uauucuugacucccuccac

SEQ ID NO: 2671036 - RNA, 19 nt, Artificial Sequence
  Description of Artificial Sequence: Synthetic oligonucleotide
ucuguggaggaggacagga

SEQ ID NO: 2671037 - RNA, 19 nt, Artificial Sequence
  Description of Artificial Sequence: Synthetic oligonucleotide
ccuaacucggucauuuccg

SEQ ID NO: 2671038 - RNA, 19 nt, Artificial Sequence
  Description of Artificial Sequence: Synthetic oligonucleotide
aggguuacccugaagagga

SEQ ID NO: 2671039 - RNA, 19 nt, Artificial Sequence
  Description of Artificial Sequence: Synthetic oligonucleotide
cuugaaguguucagacgug

SEQ ID NO: 2671040 - RNA, 19 nt, Artificial Sequence
  Description of Artificial Sequence: Synthetic oligonucleotide
uccccucgggccaagauuc

SEQ ID NO: 2671041 - RNA, 19 nt, Artificial Sequence
  Description of Artificial Sequence: Synthetic oligonucleotide
cuccggacccaugagaugc

SEQ ID NO: 2671042 - RNA, 19 nt, Artificial Sequence
  Description of Artificial Sequence: Synthetic oligonucleotide
aucaaggugcuucuggauu

SEQ ID NO: 2671043 - RNA, 19 nt, Artificial Sequence
  Description of Artificial Sequence: Synthetic oligonucleotide
agagggccccucuuggcac

SEQ ID NO: 2671044 - RNA, 19 nt, Artificial Sequence
  Description of Artificial Sequence: Synthetic oligonucleotide
guuucuguggaggaggaca

SEQ ID NO: 2671045 - RNA, 19 nt, Artificial Sequence
  Description of Artificial Sequence: Synthetic oligonucleotide
ugagggaggguuacccuga

SEQ ID NO: 2671046 - RNA, 19 nt, Artificial Sequence
  Description of Artificial Sequence: Synthetic oligonucleotide
acucggucauuuccggcac

SEQ ID NO: 2671047 - RNA, 19 nt, Artificial Sequence
  Description of Artificial Sequence: Synthetic oligonucleotide
acucgccuagucuguuucc

SEQ ID NO: 2671048 - RNA, 19 nt, Artificial Sequence
  Description of Artificial Sequence: Synthetic oligonucleotide
aggagagggccccucuugg

SEQ ID NO: 2671049 - RNA, 19 nt, Artificial Sequence
  Description of Artificial Sequence: Synthetic oligonucleotide
gagaugguccaaguuuucc

SEQ ID NO: 2671050 - RNA, 19 nt, Artificial Sequence
  Description of Artificial Sequence: Synthetic oligonucleotide
agcagcguuucuguggagg

SEQ ID NO: 2671051 - RNA, 19 nt, Artificial Sequence
  Description of Artificial Sequence: Synthetic oligonucleotide
gaugaacggggcucuuaag

SEQ ID NO: 2671052 - RNA, 19 nt, Artificial Sequence
  Description of Artificial Sequence: Synthetic oligonucleotide
aguccucagucuuguuucg

SEQ ID NO: 2671053 - RNA, 19 nt, Artificial Sequence
  Description of Artificial Sequence: Synthetic oligonucleotide
ucaaggcagccacagcuuc

SEQ ID NO: 2671054 - RNA, 19 nt, Artificial Sequence
  Description of Artificial Sequence: Synthetic oligonucleotide
guggcaaagagcacaauga

SEQ ID NO: 2671055 - RNA, 19 nt, Artificial Sequence
  Description of Artificial Sequence: Synthetic oligonucleotide
aaguguucagacguggcuu

SEQ ID NO: 2671056 - RNA, 19 nt, Artificial Sequence
  Description of Artificial Sequence: Synthetic oligonucleotide
gucucucuaacccacucuc

SEQ ID NO: 2671057 - RNA, 19 nt, Artificial Sequence
  Description of Artificial Sequence: Synthetic oligonucleotide
gggaucaaggugcuucugg

SEQ ID NO: 2671058 - RNA, 19 nt, Artificial Sequence
  Description of Artificial Sequence: Synthetic oligonucleotide
ggcaaagagcacaaugagg

SEQ ID NO: 2671059 - RNA, 19 nt, Artificial Sequence
  Description of Artificial Sequence: Synthetic oligonucleotide
uucuggauuauaugaugua

SEQ ID NO: 2671060 - RNA, 19 nt, Artificial Sequence
  Description of Artificial Sequence: Synthetic oligonucleotide
uccucagucuuguuucgga

SEQ ID NO: 2671061 - RNA, 19 nt, Artificial Sequence
  Description of Artificial Sequence: Synthetic oligonucleotide
aggucuuuauugcccacca

SEQ ID NO: 2671062 - RNA, 19 nt, Artificial Sequence
  Description of Artificial Sequence: Synthetic oligonucleotide
ggugcuucuggauuauaug

SEQ ID NO: 2671063 - RNA, 19 nt, Artificial Sequence
  Description of Artificial Sequence: Synthetic oligonucleotide
uacucgccuagucuguuuc

SEQ ID NO: 2671064 - RNA, 19 nt, Artificial Sequence
  Description of Artificial Sequence: Synthetic oligonucleotide
uugggccucucaaagcagu

SEQ ID NO: 2671065 - RNA, 19 nt, Artificial Sequence
  Description of Artificial Sequence: Synthetic oligonucleotide
uguuuccacucaaggcagc

SEQ ID NO: 2671066 - RNA, 19 nt, Artificial Sequence
  Description of Artificial Sequence: Synthetic oligonucleotide
uaacucggucauuuccggc

SEQ ID NO: 2671067 - RNA, 19 nt, Artificial Sequence
  Description of Artificial Sequence: Synthetic oligonucleotide
auuauaugauguagcagaa

SEQ ID NO: 2671068 - RNA, 19 nt, Artificial Sequence
  Description of Artificial Sequence: Synthetic oligonucleotide
ucacucugcagguuccuaa

SEQ ID NO: 2671069 - RNA, 19 nt, Artificial Sequence
  Description of Artificial Sequence: Synthetic oligonucleotide
ggauuauaugauguagcag

SEQ ID NO: 2671070 - RNA, 19 nt, Artificial Sequence
  Description of Artificial Sequence: Synthetic oligonucleotide
gcaguacucgccuagucug

SEQ ID NO: 2671071 - RNA, 19 nt, Artificial Sequence
  Description of Artificial Sequence: Synthetic oligonucleotide
guuucccagccacaagcag

SEQ ID NO: 2671072 - RNA, 19 nt, Artificial Sequence
  Description of Artificial Sequence: Synthetic oligonucleotide
uuguuucggagauggucca

SEQ ID NO: 2671073 - RNA, 19 nt, Artificial Sequence
  Description of Artificial Sequence: Synthetic oligonucleotide
uuaaguggggauggugcca

SEQ ID NO: 2671074 - RNA, 19 nt, Artificial Sequence
  Description of Artificial Sequence: Synthetic oligonucleotide
ucuuggcacacaugaggga

SEQ ID NO: 2671075 - RNA, 19 nt, Artificial Sequence
  Description of Artificial Sequence: Synthetic oligonucleotide
aaagcaguacucgccuagu

SEQ ID NO: 2671076 - RNA, 19 nt, Artificial Sequence
  Description of Artificial Sequence: Synthetic oligonucleotide
caaucacacagaugaugac

SEQ ID NO: 2671077 - RNA, 19 nt, Artificial Sequence
  Description of Artificial Sequence: Synthetic oligonucleotide
ggaggguuacccugaagag

SEQ ID NO: 2671078 - RNA, 19 nt, Artificial Sequence
  Description of Artificial Sequence: Synthetic oligonucleotide
ucugcgauguugucuugaa

SEQ ID NO: 2671079 - RNA, 19 nt, Artificial Sequence
  Description of Artificial Sequence: Synthetic oligonucleotide
uuucggagaugguccaagu

SEQ ID NO: 2671080 - RNA, 19 nt, Artificial Sequence
  Description of Artificial Sequence: Synthetic oligonucleotide
gaaguguucagacguggcu

SEQ ID NO: 2671081 - RNA, 19 nt, Artificial Sequence
  Description of Artificial Sequence: Synthetic oligonucleotide
guuucggagaugguccaag

SEQ ID NO: 2671082 - RNA, 19 nt, Artificial Sequence
  Description of Artificial Sequence: Synthetic oligonucleotide
gccaccagcaguuucccag

SEQ ID NO: 2671083 - RNA, 19 nt, Artificial Sequence
  Description of Artificial Sequence: Synthetic oligonucleotide
ucugggucaugauauucuu

SEQ ID NO: 2671084 - RNA, 19 nt, Artificial Sequence
  Description of Artificial Sequence: Synthetic oligonucleotide
acagggacagagcagcguu

SEQ ID NO: 2671085 - RNA, 19 nt, Artificial Sequence
  Description of Artificial Sequence: Synthetic oligonucleotide
cugggucucucuaacccac

SEQ ID NO: 2671086 - RNA, 19 nt, Artificial Sequence
  Description of Artificial Sequence: Synthetic oligonucleotide
accagccaccagcaguuuc

SEQ ID NO: 2671087 - RNA, 19 nt, Artificial Sequence
  Description of Artificial Sequence: Synthetic oligonucleotide
ugcagguuccuaacucggu

SEQ ID NO: 2671088 - RNA, 19 nt, Artificial Sequence
  Description of Artificial Sequence: Synthetic oligonucleotide
gaacuuccgggccaccuuc

SEQ ID NO: 2671089 - RNA, 19 nt, Artificial Sequence
  Description of Artificial Sequence: Synthetic oligonucleotide
cugggucaugauauucuug

SEQ ID NO: 2671090 - RNA, 19 nt, Artificial Sequence
  Description of Artificial Sequence: Synthetic oligonucleotide
cacuugggccucucaaagc

SEQ ID NO: 2671091 - RNA, 19 nt, Artificial Sequence
  Description of Artificial Sequence: Synthetic oligonucleotide
ucuaacccacucuccggac

SEQ ID NO: 2671092 - RNA, 19 nt, Artificial Sequence
  Description of Artificial Sequence: Synthetic oligonucleotide
ccaaguuuuccccucgggc

SEQ ID NO: 2671093 - RNA, 19 nt, Artificial Sequence
  Description of Artificial Sequence: Synthetic oligonucleotide
agggacagagcagcguuuc

SEQ ID NO: 2671094 - RNA, 19 nt, Artificial Sequence
  Description of Artificial Sequence: Synthetic oligonucleotide
uucggagaugguccaaguu

SEQ ID NO: 2671095 - RNA, 19 nt, Artificial Sequence
  Description of Artificial Sequence: Synthetic oligonucleotide
cuugggccucucaaagcag

SEQ ID NO: 2671096 - RNA, 19 nt, Artificial Sequence
  Description of Artificial Sequence: Synthetic oligonucleotide
ucggucauuuccggcaccc

SEQ ID NO: 2671097 - RNA, 19 nt, Artificial Sequence
  Description of Artificial Sequence: Synthetic oligonucleotide
gagaugcagccacagucca

SEQ ID NO: 2671098 - RNA, 19 nt, Artificial Sequence
  Description of Artificial Sequence: Synthetic oligonucleotide
ggcucuuaaguggggaugg

SEQ ID NO: 2671099 - RNA, 19 nt, Artificial Sequence
  Description of Artificial Sequence: Synthetic oligonucleotide
caggggaucaaggugcuuc

SEQ ID NO: 2671100 - RNA, 19 nt, Artificial Sequence
  Description of Artificial Sequence: Synthetic oligonucleotide
acagagcagcguuucugug

SEQ ID NO: 2671101 - RNA, 19 nt, Artificial Sequence
  Description of Artificial Sequence: Synthetic oligonucleotide
cacucugcagguuccuaac

SEQ ID NO: 2671102 - RNA, 19 nt, Artificial Sequence
  Description of Artificial Sequence: Synthetic oligonucleotide
agcacuugggccucucaaa

SEQ ID NO: 2671103 - RNA, 19 nt, Artificial Sequence
  Description of Artificial Sequence: Synthetic oligonucleotide
cuguggaggaggacaggag

SEQ ID NO: 2671104 - RNA, 19 nt, Artificial Sequence
  Description of Artificial Sequence: Synthetic oligonucleotide
guuuccacucaaggcagcc

SEQ ID NO: 2671105 - RNA, 19 nt, Artificial Sequence
  Description of Artificial Sequence: Synthetic oligonucleotide
ugaugacaaucaucuucac

SEQ ID NO: 2671106 - RNA, 19 nt, Artificial Sequence
  Description of Artificial Sequence: Synthetic oligonucleotide
cucccaggggaucaaggug

SEQ ID NO: 2671107 - RNA, 19 nt, Artificial Sequence
  Description of Artificial Sequence: Synthetic oligonucleotide
gcgauguugucuugaagug

SEQ ID NO: 2671108 - RNA, 19 nt, Artificial Sequence
  Description of Artificial Sequence: Synthetic oligonucleotide
gagagggccccucuuggca

SEQ ID NO: 2671109 - RNA, 19 nt, Artificial Sequence
  Description of Artificial Sequence: Synthetic oligonucleotide
accagaacuuccgggccac

SEQ ID NO: 2671110 - RNA, 19 nt, Artificial Sequence
  Description of Artificial Sequence: Synthetic oligonucleotide
gcacuugggccucucaaag

SEQ ID NO: 2671111 - RNA, 19 nt, Artificial Sequence
  Description of Artificial Sequence: Synthetic oligonucleotide
acccugaagaggagggugg

SEQ ID NO: 2671112 - RNA, 19 nt, Artificial Sequence
  Description of Artificial Sequence: Synthetic oligonucleotide
uucugcgauguugucuuga

SEQ ID NO: 2671113 - RNA, 19 nt, Artificial Sequence
  Description of Artificial Sequence: Synthetic oligonucleotide
aggggaucaaggugcuucu

SEQ ID NO: 2671114 - RNA, 19 nt, Artificial Sequence
  Description of Artificial Sequence: Synthetic oligonucleotide
gaggacaggagagggcccc

SEQ ID NO: 2671115 - RNA, 19 nt, Artificial Sequence
  Description of Artificial Sequence: Synthetic oligonucleotide
gguuacccugaagaggagg

SEQ ID NO: 2671116 - RNA, 19 nt, Artificial Sequence
  Description of Artificial Sequence: Synthetic oligonucleotide
gacagagcagcguuucugu

SEQ ID NO: 2671117 - RNA, 19 nt, Artificial Sequence
  Description of Artificial Sequence: Synthetic oligonucleotide
uugacucccuccaccucac

SEQ ID NO: 2671118 - RNA, 19 nt, Artificial Sequence
  Description of Artificial Sequence: Synthetic oligonucleotide
guccaaguuuuccccucgg

SEQ ID NO: 2671119 - RNA, 19 nt, Artificial Sequence
  Description of Artificial Sequence: Synthetic oligonucleotide
cucuuaaguggggauggug

SEQ ID NO: 2671120 - RNA, 19 nt, Artificial Sequence
  Description of Artificial Sequence: Synthetic oligonucleotide
cauucuuccaccagaacuu

SEQ ID NO: 2671121 - RNA, 19 nt, Artificial Sequence
  Description of Artificial Sequence: Synthetic oligonucleotide
acucugcagguuccuaacu

SEQ ID NO: 2671122 - RNA, 19 nt, Artificial Sequence
  Description of Artificial Sequence: Synthetic oligonucleotide
gguccaaguuuuccccucg

SEQ ID NO: 2671123 - RNA, 19 nt, Artificial Sequence
  Description of Artificial Sequence: Synthetic oligonucleotide
uuuccacucaaggcagcca

SEQ ID NO: 2671124 - RNA, 19 nt, Artificial Sequence
  Description of Artificial Sequence: Synthetic oligonucleotide
cuuccgggccaccuucugc

SEQ ID NO: 2671125 - RNA, 19 nt, Artificial Sequence
  Description of Artificial Sequence: Synthetic oligonucleotide
ucaaagcaguacucgccua

SEQ ID NO: 2671126 - RNA, 19 nt, Artificial Sequence
  Description of Artificial Sequence: Synthetic oligonucleotide
cagguuccuaacucgguca

SEQ ID NO: 2671127 - RNA, 19 nt, Artificial Sequence
  Description of Artificial Sequence: Synthetic oligonucleotide
gauguugucuugaaguguu

SEQ ID NO: 2671128 - RNA, 19 nt, Artificial Sequence
  Description of Artificial Sequence: Synthetic oligonucleotide
ucuccggacccaugagaug

SEQ ID NO: 2671129 - RNA, 19 nt, Artificial Sequence
  Description of Artificial Sequence: Synthetic oligonucleotide
uuccccucgggccaagauu

SEQ ID NO: 2671130 - RNA, 19 nt, Artificial Sequence
  Description of Artificial Sequence: Synthetic oligonucleotide
ggugccaguggcaaagagc

SEQ ID NO: 2671131 - RNA, 19 nt, Artificial Sequence
  Description of Artificial Sequence: Synthetic oligonucleotide
cucuaacccacucuccgga

SEQ ID NO: 2671132 - RNA, 19 nt, Artificial Sequence
  Description of Artificial Sequence: Synthetic oligonucleotide
uucuguggaggaggacagg

SEQ ID NO: 2671133 - RNA, 19 nt, Artificial Sequence
  Description of Artificial Sequence: Synthetic oligonucleotide
ucgggccaagauucuuucc

SEQ ID NO: 2671134 - RNA, 19 nt, Artificial Sequence
  Description of Artificial Sequence: Synthetic oligonucleotide
ggaucaaggugcuucugga

SEQ ID NO: 2671135 - RNA, 19 nt, Artificial Sequence
  Description of Artificial Sequence: Synthetic oligonucleotide
uguucagacguggcuucca

SEQ ID NO: 2671136 - RNA, 19 nt, Artificial Sequence
  Description of Artificial Sequence: Synthetic oligonucleotide
ggucaugauauucuugacu

SEQ ID NO: 2671137 - RNA, 19 nt, Artificial Sequence
  Description of Artificial Sequence: Synthetic oligonucleotide
guagcagaaggcccucaca

SEQ ID NO: 2671138 - RNA, 19 nt, Artificial Sequence
  Description of Artificial Sequence: Synthetic oligonucleotide
cucgggccaagauucuuuc

SEQ ID NO: 2671139 - RNA, 19 nt, Artificial Sequence
  Description of Artificial Sequence: Synthetic oligonucleotide
agcaguuucccagccacaa

SEQ ID NO: 2671140 - RNA, 19 nt, Artificial Sequence
  Description of Artificial Sequence: Synthetic oligonucleotide
cugcgauguugucuugaag

SEQ ID NO: 2671141 - RNA, 19 nt, Artificial Sequence
  Description of Artificial Sequence: Synthetic oligonucleotide
augauauucuugacucccu

SEQ ID NO: 2671142 - RNA, 19 nt, Artificial Sequence
  Description of Artificial Sequence: Synthetic oligonucleotide
cacauucugggucaugaua

SEQ ID NO: 2671143 - RNA, 19 nt, Artificial Sequence
  Description of Artificial Sequence: Synthetic oligonucleotide
uuuccccucgggccaagau

SEQ ID NO: 2671144 - RNA, 19 nt, Artificial Sequence
  Description of Artificial Sequence: Synthetic oligonucleotide
gaggaggacaggagagggc

SEQ ID NO: 2671145 - RNA, 19 nt, Artificial Sequence
  Description of Artificial Sequence: Synthetic oligonucleotide
agguuccuaacucggucau

SEQ ID NO: 2671146 - RNA, 19 nt, Artificial Sequence
  Description of Artificial Sequence: Synthetic oligonucleotide
ugcagccacaguccagcuc

SEQ ID NO: 2671147 - RNA, 19 nt, Artificial Sequence
  Description of Artificial Sequence: Synthetic oligonucleotide
cagacguggcuuccaaguc

SEQ ID NO: 2671148 - RNA, 19 nt, Artificial Sequence
  Description of Artificial Sequence: Synthetic oligonucleotide
ucgccuagucuguuuccac

SEQ ID NO: 2671149 - RNA, 19 nt, Artificial Sequence
  Description of Artificial Sequence: Synthetic oligonucleotide
gagcacuugggccucucaa

SEQ ID NO: 2671150 - RNA, 19 nt, Artificial Sequence
  Description of Artificial Sequence: Synthetic oligonucleotide
caggagagggccccucuug

SEQ ID NO: 2671151 - RNA, 19 nt, Artificial Sequence
  Description of Artificial Sequence: Synthetic oligonucleotide
aguggggauggugccagug

SEQ ID NO: 2671152 - RNA, 19 nt, Artificial Sequence
  Description of Artificial Sequence: Synthetic oligonucleotide
uuccuaacucggucauuuc

SEQ ID NO: 2671153 - RNA, 19 nt, Artificial Sequence
  Description of Artificial Sequence: Synthetic oligonucleotide
ccacaguccagcucucucc

SEQ ID NO: 2671154 - RNA, 19 nt, Artificial Sequence
  Description of Artificial Sequence: Synthetic oligonucleotide
aggugcuucuggauuauau

SEQ ID NO: 2671155 - RNA, 19 nt, Artificial Sequence
  Description of Artificial Sequence: Synthetic oligonucleotide
cuccuccaugucucggagc

SEQ ID NO: 2671156 - RNA, 19 nt, Artificial Sequence
  Description of Artificial Sequence: Synthetic oligonucleotide
uccggacccaugagaugca

SEQ ID NO: 2671157 - RNA, 19 nt, Artificial Sequence
  Description of Artificial Sequence: Synthetic oligonucleotide
uauugcccaccagccacca

SEQ ID NO: 2671158 - RNA, 19 nt, Artificial Sequence
  Description of Artificial Sequence: Synthetic oligonucleotide
ugggucucucuaacccacu

SEQ ID NO: 2671159 - RNA, 19 nt, Artificial Sequence
  Description of Artificial Sequence: Synthetic oligonucleotide
guccucagucuuguuucgg

SEQ ID NO: 2671160 - RNA, 19 nt, Artificial Sequence
  Description of Artificial Sequence: Synthetic oligonucleotide
agggaggguuacccugaag

SEQ ID NO: 2671161 - RNA, 19 nt, Artificial Sequence
  Description of Artificial Sequence: Synthetic oligonucleotide
ggacagagcagcguuucug

SEQ ID NO: 2671162 - RNA, 19 nt, Artificial Sequence
  Description of Artificial Sequence: Synthetic oligonucleotide
cacucaaggcagccacagc

SEQ ID NO: 2671163 - RNA, 19 nt, Artificial Sequence
  Description of Artificial Sequence: Synthetic oligonucleotide
ggucuuuauugcccaccag

SEQ ID NO: 2671164 - RNA, 19 nt, Artificial Sequence
  Description of Artificial Sequence: Synthetic oligonucleotide
gaucaaggugcuucuggau

SEQ ID NO: 2671165 - RNA, 19 nt, Artificial Sequence
  Description of Artificial Sequence: Synthetic oligonucleotide
ugggccucucaaagcagua

SEQ ID NO: 2671166 - RNA, 19 nt, Artificial Sequence
  Description of Artificial Sequence: Synthetic oligonucleotide
gcagguuccuaacucgguc

SEQ ID NO: 2671167 - RNA, 19 nt, Artificial Sequence
  Description of Artificial Sequence: Synthetic oligonucleotide
ggugggaugaacggggcuc

SEQ ID NO: 2671168 - RNA, 19 nt, Artificial Sequence
  Description of Artificial Sequence: Synthetic oligonucleotide
ggaugaacggggcucuuaa

SEQ ID NO: 2671169 - RNA, 19 nt, Artificial Sequence
  Description of Artificial Sequence: Synthetic oligonucleotide
cacucuccggacccaugag

SEQ ID NO: 2671170 - RNA, 19 nt, Artificial Sequence
  Description of Artificial Sequence: Synthetic oligonucleotide
auugcccaccagccaccag

SEQ ID NO: 2671171 - RNA, 19 nt, Artificial Sequence
  Description of Artificial Sequence: Synthetic oligonucleotide
cacaugagggaggguuacc

SEQ ID NO: 2671172 - RNA, 19 nt, Artificial Sequence
  Description of Artificial Sequence: Synthetic oligonucleotide
caaggcagccacagcuuca

SEQ ID NO: 2671173 - RNA, 19 nt, Artificial Sequence
  Description of Artificial Sequence: Synthetic oligonucleotide
gccaguggcaaagagcaca

SEQ ID NO: 2671174 - RNA, 19 nt, Artificial Sequence
  Description of Artificial Sequence: Synthetic oligonucleotide
guucagacguggcuuccaa

SEQ ID NO: 2671175 - RNA, 19 nt, Artificial Sequence
  Description of Artificial Sequence: Synthetic oligonucleotide
gggccaagauucuuuccac

SEQ ID NO: 2671176 - RNA, 19 nt, Artificial Sequence
  Description of Artificial Sequence: Synthetic oligonucleotide
cucggucauuuccggcacc

SEQ ID NO: 2671177 - RNA, 19 nt, Artificial Sequence
  Description of Artificial Sequence: Synthetic oligonucleotide
uguuucggagaugguccaa

SEQ ID NO: 2671178 - RNA, 19 nt, Artificial Sequence
  Description of Artificial Sequence: Synthetic oligonucleotide
gggucaugauauucuugac

SEQ ID NO: 2671179 - RNA, 19 nt, Artificial Sequence
  Description of Artificial Sequence: Synthetic oligonucleotide
guuccuaacucggucauuu

SEQ ID NO: 2671180 - RNA, 19 nt, Artificial Sequence
  Description of Artificial Sequence: Synthetic oligonucleotide
gccuagucuguuuccacuc

SEQ ID NO: 2671181 - RNA, 19 nt, Artificial Sequence
  Description of Artificial Sequence: Synthetic oligonucleotide
gcaguuucccagccacaag

SEQ ID NO: 2671182 - RNA, 19 nt, Artificial Sequence
  Description of Artificial Sequence: Synthetic oligonucleotide
cagaaggcccucacaggga

SEQ ID NO: 2671183 - RNA, 19 nt, Artificial Sequence
  Description of Artificial Sequence: Synthetic oligonucleotide
cacacaugagggaggguua

SEQ ID NO: 2671184 - RNA, 19 nt, Artificial Sequence
  Description of Artificial Sequence: Synthetic oligonucleotide
gacguggcuuccaaguccu

SEQ ID NO: 2671185 - RNA, 19 nt, Artificial Sequence
  Description of Artificial Sequence: Synthetic oligonucleotide
acaggagagggccccucuu

SEQ ID NO: 2671186 - RNA, 19 nt, Artificial Sequence
  Description of Artificial Sequence: Synthetic oligonucleotide
cuucugcgauguugucuug

SEQ ID NO: 2671187 - RNA, 19 nt, Artificial Sequence
  Description of Artificial Sequence: Synthetic oligonucleotide
ggagagggccccucuuggc

SEQ ID NO: 2671188 - RNA, 19 nt, Artificial Sequence
  Description of Artificial Sequence: Synthetic oligonucleotide
ggccaagauucuuuccaca

SEQ ID NO: 2671189 - RNA, 19 nt, Artificial Sequence
  Description of Artificial Sequence: Synthetic oligonucleotide
gacccaugagaugcagcca

SEQ ID NO: 2671190 - RNA, 19 nt, Artificial Sequence
  Description of Artificial Sequence: Synthetic oligonucleotide
caaguccucagucuuguuu

SEQ ID NO: 2671191 - RNA, 19 nt, Artificial Sequence
  Description of Artificial Sequence: Synthetic oligonucleotide
caccagaacuuccgggcca

SEQ ID NO: 2671192 - RNA, 19 nt, Artificial Sequence
  Description of Artificial Sequence: Synthetic oligonucleotide
cucuccggacccaugagau

SEQ ID NO: 2671193 - RNA, 19 nt, Artificial Sequence
  Description of Artificial Sequence: Synthetic oligonucleotide
guguucagacguggcuucc

SEQ ID NO: 2671194 - RNA, 19 nt, Artificial Sequence
  Description of Artificial Sequence: Synthetic oligonucleotide
ccaccagaacuuccgggcc

SEQ ID NO: 2671195 - RNA, 19 nt, Artificial Sequence
  Description of Artificial Sequence: Synthetic oligonucleotide
gggcucuuaaguggggaug

SEQ ID NO: 2671196 - RNA, 19 nt, Artificial Sequence
  Description of Artificial Sequence: Synthetic oligonucleotide
gagcagcguuucuguggag

SEQ ID NO: 2671197 - RNA, 19 nt, Artificial Sequence
  Description of Artificial Sequence: Synthetic oligonucleotide
uuuuccccucgggccaaga

SEQ ID NO: 2671198 - RNA, 19 nt, Artificial Sequence
  Description of Artificial Sequence: Synthetic oligonucleotide
cucgccuagucuguuucca

SEQ ID NO: 2671199 - RNA, 19 nt, Artificial Sequence
  Description of Artificial Sequence: Synthetic oligonucleotide
aguacucgccuagucuguu

SEQ ID NO: 2671200 - RNA, 19 nt, Artificial Sequence
  Description of Artificial Sequence: Synthetic oligonucleotide
cagccaccagcaguuuccc

SEQ ID NO: 2671201 - RNA, 19 nt, Artificial Sequence
  Description of Artificial Sequence: Synthetic oligonucleotide
ccucugggucucucuaacc

SEQ ID NO: 2671202 - RNA, 19 nt, Artificial Sequence
  Description of Artificial Sequence: Synthetic oligonucleotide
caugagggaggguuacccu

SEQ ID NO: 2671203 - RNA, 19 nt, Artificial Sequence
  Description of Artificial Sequence: Synthetic oligonucleotide
ugacucccuccaccucacu

SEQ ID NO: 2671204 - RNA, 19 nt, Artificial Sequence
  Description of Artificial Sequence: Synthetic oligonucleotide
ccaugagaugcagccacag

SEQ ID NO: 2671205 - RNA, 19 nt, Artificial Sequence
  Description of Artificial Sequence: Synthetic oligonucleotide
gacaggagagggccccucu

SEQ ID NO: 2671206 - RNA, 19 nt, Artificial Sequence
  Description of Artificial Sequence: Synthetic oligonucleotide
ggccucucaaagcaguacu

SEQ ID NO: 2671207 - RNA, 19 nt, Artificial Sequence
  Description of Artificial Sequence: Synthetic oligonucleotide
gagggccccucuuggcaca

SEQ ID NO: 2671208 - RNA, 19 nt, Artificial Sequence
  Description of Artificial Sequence: Synthetic oligonucleotide
aacccacucuccggaccca

SEQ ID NO: 2671209 - RNA, 19 nt, Artificial Sequence
  Description of Artificial Sequence: Synthetic oligonucleotide
gggucucucuaacccacuc

SEQ ID NO: 2671210 - RNA, 19 nt, Artificial Sequence
  Description of Artificial Sequence: Synthetic oligonucleotide
cccagccacaagcaggguc

SEQ ID NO: 2671211 - RNA, 19 nt, Artificial Sequence
  Description of Artificial Sequence: Synthetic oligonucleotide
cacaguccagcucucuccu

SEQ ID NO: 2671212 - RNA, 19 nt, Artificial Sequence
  Description of Artificial Sequence: Synthetic oligonucleotide
cacagaugaugacaaucau

SEQ ID NO: 2671213 - RNA, 19 nt, Artificial Sequence
  Description of Artificial Sequence: Synthetic oligonucleotide
ucucuccucccaggggauc

SEQ ID NO: 2671214 - RNA, 19 nt, Artificial Sequence
  Description of Artificial Sequence: Synthetic oligonucleotide
caagcaggguccucugggu

SEQ ID NO: 2671215 - RNA, 19 nt, Artificial Sequence
  Description of Artificial Sequence: Synthetic oligonucleotide
gaaggcccucacagggaca

SEQ ID NO: 2671216 - RNA, 19 nt, Artificial Sequence
  Description of Artificial Sequence: Synthetic oligonucleotide
gagggaggguuacccugaa

SEQ ID NO: 2671217 - RNA, 19 nt, Artificial Sequence
  Description of Artificial Sequence: Synthetic oligonucleotide
aguuuuccccucgggccaa

SEQ ID NO: 2671218 - RNA, 19 nt, Artificial Sequence
  Description of Artificial Sequence: Synthetic oligonucleotide
agccacaagcaggguccuc

SEQ ID NO: 2671219 - RNA, 19 nt, Artificial Sequence
  Description of Artificial Sequence: Synthetic oligonucleotide
acggggcucuuaagugggg

SEQ ID NO: 2671220 - RNA, 19 nt, Artificial Sequence
  Description of Artificial Sequence: Synthetic oligonucleotide
cuccaugucucggagcacu

SEQ ID NO: 2671221 - RNA, 19 nt, Artificial Sequence
  Description of Artificial Sequence: Synthetic oligonucleotide
ggucucucuaacccacucu

SEQ ID NO: 2671222 - RNA, 19 nt, Artificial Sequence
  Description of Artificial Sequence: Synthetic oligonucleotide
gccucucaaagcaguacuc

SEQ ID NO: 2671223 - RNA, 19 nt, Artificial Sequence
  Description of Artificial Sequence: Synthetic oligonucleotide
ccuagucuguuuccacuca

SEQ ID NO: 2671224 - RNA, 19 nt, Artificial Sequence
  Description of Artificial Sequence: Synthetic oligonucleotide
cucggagcacuugggccuc

SEQ ID NO: 2671225 - RNA, 19 nt, Artificial Sequence
  Description of Artificial Sequence: Synthetic oligonucleotide
cccugaagaggaggguggg

SEQ ID NO: 2671226 - RNA, 19 nt, Artificial Sequence
  Description of Artificial Sequence: Synthetic oligonucleotide
gggccucucaaagcaguac

SEQ ID NO: 2671227 - RNA, 19 nt, Artificial Sequence
  Description of Artificial Sequence: Synthetic oligonucleotide
caguacucgccuagucugu

SEQ ID NO: 2671228 - RNA, 19 nt, Artificial Sequence
  Description of Artificial Sequence: Synthetic oligonucleotide
guuuuccccucgggccaag

SEQ ID NO: 2671229 - RNA, 19 nt, Artificial Sequence
  Description of Artificial Sequence: Synthetic oligonucleotide
aggacaggagagggccccu

SEQ ID NO: 2671230 - RNA, 19 nt, Artificial Sequence
  Description of Artificial Sequence: Synthetic oligonucleotide
ccuucugcgauguugucuu

SEQ ID NO: 2671231 - RNA, 19 nt, Artificial Sequence
  Description of Artificial Sequence: Synthetic oligonucleotide
ggagcacuugggccucuca

SEQ ID NO: 2671232 - RNA, 19 nt, Artificial Sequence
  Description of Artificial Sequence: Synthetic oligonucleotide
ccacucuccggacccauga

SEQ ID NO: 2671233 - RNA, 19 nt, Artificial Sequence
  Description of Artificial Sequence: Synthetic oligonucleotide
cauucugggucaugauauu

SEQ ID NO: 2671234 - RNA, 19 nt, Artificial Sequence
  Description of Artificial Sequence: Synthetic oligonucleotide
gugggaugaacggggcucu

SEQ ID NO: 2671235 - RNA, 19 nt, Artificial Sequence
  Description of Artificial Sequence: Synthetic oligonucleotide
cagccacaguccagcucuc

SEQ ID NO: 2671236 - RNA, 19 nt, Artificial Sequence
  Description of Artificial Sequence: Synthetic oligonucleotide
gccacaagcaggguccucu

SEQ ID NO: 2671237 - RNA, 19 nt, Artificial Sequence
  Description of Artificial Sequence: Synthetic oligonucleotide
ggggaucaaggugcuucug

SEQ ID NO: 2671238 - RNA, 19 nt, Artificial Sequence
  Description of Artificial Sequence: Synthetic oligonucleotide
ggguuacccugaagaggag

SEQ ID NO: 2671239 - RNA, 19 nt, Artificial Sequence
  Description of Artificial Sequence: Synthetic oligonucleotide
acguggcuuccaaguccuc

SEQ ID NO: 2671240 - RNA, 19 nt, Artificial Sequence
  Description of Artificial Sequence: Synthetic oligonucleotide
guacucgccuagucuguuu

SEQ ID NO: 2671241 - RNA, 19 nt, Artificial Sequence
  Description of Artificial Sequence: Synthetic oligonucleotide
ugggaugaacggggcucuu

SEQ ID NO: 2671242 - RNA, 19 nt, Artificial Sequence
  Description of Artificial Sequence: Synthetic oligonucleotide
cacuggccuccuccauguc

SEQ ID NO: 2671243 - RNA, 19 nt, Artificial Sequence
  Description of Artificial Sequence: Synthetic oligonucleotide
cacagggacagagcagcgu

SEQ ID NO: 2671244 - RNA, 19 nt, Artificial Sequence
  Description of Artificial Sequence: Synthetic oligonucleotide
ucggagcacuugggccucu

SEQ ID NO: 2671245 - RNA, 19 nt, Artificial Sequence
  Description of Artificial Sequence: Synthetic oligonucleotide
ggggcucuuaaguggggau

SEQ ID NO: 2671246 - RNA, 19 nt, Artificial Sequence
  Description of Artificial Sequence: Synthetic oligonucleotide
ccucccaggggaucaaggu

SEQ ID NO: 2671247 - RNA, 19 nt, Artificial Sequence
  Description of Artificial Sequence: Synthetic oligonucleotide
gcacaaugaggaugaugau

SEQ ID NO: 2671248 - RNA, 19 nt, Artificial Sequence
  Description of Artificial Sequence: Synthetic oligonucleotide
ccggacccaugagaugcag

SEQ ID NO: 2671249 - RNA, 19 nt, Artificial Sequence
  Description of Artificial Sequence: Synthetic oligonucleotide
gggaugaacggggcucuua

SEQ ID NO: 2671250 - RNA, 19 nt, Artificial Sequence
  Description of Artificial Sequence: Synthetic oligonucleotide
gggacagagcagcguuucu

SEQ ID NO: 2671251 - RNA, 19 nt, Artificial Sequence
  Description of Artificial Sequence: Synthetic oligonucleotide
caaggugcuucuggauuau

SEQ ID NO: 2671252 - RNA, 19 nt, Artificial Sequence
  Description of Artificial Sequence: Synthetic oligonucleotide
gucuuguuucggagauggu

SEQ ID NO: 2671253 - RNA, 19 nt, Artificial Sequence
  Description of Artificial Sequence: Synthetic oligonucleotide
ccaccagccaccagcaguu

SEQ ID NO: 2671254 - RNA, 19 nt, Artificial Sequence
  Description of Artificial Sequence: Synthetic oligonucleotide
gcccaccagccaccagcag

SEQ ID NO: 2671255 - RNA, 19 nt, Artificial Sequence
  Description of Artificial Sequence: Synthetic oligonucleotide
ccugaagaggaggguggga

SEQ ID NO: 2671256 - RNA, 19 nt, Artificial Sequence
  Description of Artificial Sequence: Synthetic oligonucleotide
ggguccucugggucucucu

SEQ ID NO: 2671257 - RNA, 19 nt, Artificial Sequence
  Description of Artificial Sequence: Synthetic oligonucleotide
gccccucuuggcacacaug

SEQ ID NO: 2671258 - RNA, 19 nt, Artificial Sequence
  Description of Artificial Sequence: Synthetic oligonucleotide
cguuucuguggaggaggac

SEQ ID NO: 2671259 - RNA, 19 nt, Artificial Sequence
  Description of Artificial Sequence: Synthetic oligonucleotide
cggucauuuccggcacccc

SEQ ID NO: 2671260 - RNA, 19 nt, Artificial Sequence
  Description of Artificial Sequence: Synthetic oligonucleotide
ccucgggccaagauucuuu

SEQ ID NO: 2671261 - RNA, 19 nt, Artificial Sequence
  Description of Artificial Sequence: Synthetic oligonucleotide
cgccuagucuguuuccacu

SEQ ID NO: 2671262 - RNA, 19 nt, Artificial Sequence
  Description of Artificial Sequence: Synthetic oligonucleotide
gcucuuaaguggggauggu

SEQ ID NO: 2671263 - RNA, 19 nt, Artificial Sequence
  Description of Artificial Sequence: Synthetic oligonucleotide
ccacauucugggucaugau

SEQ ID NO: 2671264 - RNA, 19 nt, Artificial Sequence
  Description of Artificial Sequence: Synthetic oligonucleotide
gggccaccuucugcgaugu

SEQ ID NO: 2671265 - RNA, 19 nt, Artificial Sequence
  Description of Artificial Sequence: Synthetic oligonucleotide
cagccacaagcaggguccu

SEQ ID NO: 2671266 - RNA, 19 nt, Artificial Sequence
  Description of Artificial Sequence: Synthetic oligonucleotide
gguuccuaacucggucauu

SEQ ID NO: 2671267 - RNA, 19 nt, Artificial Sequence
  Description of Artificial Sequence: Synthetic oligonucleotide
cccaggggaucaaggugcu

SEQ ID NO: 2671268 - RNA, 19 nt, Artificial Sequence
  Description of Artificial Sequence: Synthetic oligonucleotide
cggggcucuuaagugggga

SEQ ID NO: 2671269 - RNA, 19 nt, Artificial Sequence
  Description of Artificial Sequence: Synthetic oligonucleotide
caguggcaaagagcacaau

SEQ ID NO: 2671270 - RNA, 19 nt, Artificial Sequence
  Description of Artificial Sequence: Synthetic oligonucleotide
caccagccaccagcaguuu

SEQ ID NO: 2671271 - RNA, 19 nt, Artificial Sequence
  Description of Artificial Sequence: Synthetic oligonucleotide
ccgggccaccuucugcgau

SEQ ID NO: 2671272 - RNA, 19 nt, Artificial Sequence
  Description of Artificial Sequence: Synthetic oligonucleotide
cccucgggccaagauucuu

SEQ ID NO: 2671273 - RNA, 19 nt, Artificial Sequence
  Description of Artificial Sequence: Synthetic oligonucleotide
ccaggggaucaaggugcuu

SEQ ID NO: 2671274 - RNA, 19 nt, Artificial Sequence
  Description of Artificial Sequence: Synthetic oligonucleotide
uuauucccaaaacagagcg

SEQ ID NO: 2671275 - RNA, 19 nt, Artificial Sequence
  Description of Artificial Sequence: Synthetic oligonucleotide
aaagcguccagccauagug

SEQ ID NO: 2671276 - RNA, 19 nt, Artificial Sequence
  Description of Artificial Sequence: Synthetic oligonucleotide
aaucucagaaacugccucc

SEQ ID NO: 2671277 - RNA, 19 nt, Artificial Sequence
  Description of Artificial Sequence: Synthetic oligonucleotide
uucuauagaaguuuauucc

SEQ ID NO: 2671278 - RNA, 19 nt, Artificial Sequence
  Description of Artificial Sequence: Synthetic oligonucleotide
aaguguaagugccagguag

SEQ ID NO: 2671279 - RNA, 19 nt, Artificial Sequence
  Description of Artificial Sequence: Synthetic oligonucleotide
ucuauagaaguuuauuccc

SEQ ID NO: 2671280 - RNA, 19 nt, Artificial Sequence
  Description of Artificial Sequence: Synthetic oligonucleotide
ugcucaaccauucucgggg

SEQ ID NO: 2671281 - RNA, 19 nt, Artificial Sequence
  Description of Artificial Sequence: Synthetic oligonucleotide
agaaguuuauucccaaaac

SEQ ID NO: 2671282 - RNA, 19 nt, Artificial Sequence
  Description of Artificial Sequence: Synthetic oligonucleotide
uuucuauagaaguuuauuc

SEQ ID NO: 2671283 - RNA, 19 nt, Artificial Sequence
  Description of Artificial Sequence: Synthetic oligonucleotide
aauagcaaggacgcucucc

SEQ ID NO: 2671284 - RNA, 19 nt, Artificial Sequence
  Description of Artificial Sequence: Synthetic oligonucleotide
acaaacagggaagagggcc

SEQ ID NO: 2671285 - RNA, 19 nt, Artificial Sequence
  Description of Artificial Sequence: Synthetic oligonucleotide
uacagaaccagggaaauag

SEQ ID NO: 2671286 - RNA, 19 nt, Artificial Sequence
  Description of Artificial Sequence: Synthetic oligonucleotide
aagaguagcggcuggcugg

SEQ ID NO: 2671287 - RNA, 19 nt, Artificial Sequence
  Description of Artificial Sequence: Synthetic oligonucleotide
cagggaaauagcaaggacg

SEQ ID NO: 2671288 - RNA, 19 nt, Artificial Sequence
  Description of Artificial Sequence: Synthetic oligonucleotide
ucagcugucgccuuaggag

SEQ ID NO: 2671289 - RNA, 19 nt, Artificial Sequence
  Description of Artificial Sequence: Synthetic oligonucleotide
caucccgugacccaaagcg

SEQ ID NO: 2671290 - RNA, 19 nt, Artificial Sequence
  Description of Artificial Sequence: Synthetic oligonucleotide
accaacaggccacucagcc

SEQ ID NO: 2671291 - RNA, 19 nt, Artificial Sequence
  Description of Artificial Sequence: Synthetic oligonucleotide
gaaccagggaaauagcaag

SEQ ID NO: 2671292 - RNA, 19 nt, Artificial Sequence
  Description of Artificial Sequence: Synthetic oligonucleotide
aauuuccacaaacagggaa

SEQ ID NO: 2671293 - RNA, 19 nt, Artificial Sequence
  Description of Artificial Sequence: Synthetic oligonucleotide
uuuauucccaaaacagagc

SEQ ID NO: 2671294 - RNA, 19 nt, Artificial Sequence
  Description of Artificial Sequence: Synthetic oligonucleotide
auucccaaaacagagcgcg

SEQ ID NO: 2671295 - RNA, 19 nt, Artificial Sequence
  Description of Artificial Sequence: Synthetic oligonucleotide
agggaaauagcaaggacgc

SEQ ID NO: 2671296 - RNA, 19 nt, Artificial Sequence
  Description of Artificial Sequence: Synthetic oligonucleotide
aagagggccacugugcugg

SEQ ID NO: 2671297 - RNA, 19 nt, Artificial Sequence
  Description of Artificial Sequence: Synthetic oligonucleotide
uagaaguuuauucccaaaa

SEQ ID NO: 2671298 - RNA, 19 nt, Artificial Sequence
  Description of Artificial Sequence: Synthetic oligonucleotide
uggugcugcauccaggugc

SEQ ID NO: 2671299 - RNA, 19 nt, Artificial Sequence
  Description of Artificial Sequence: Synthetic oligonucleotide
agugugcucaaccauucuc

SEQ ID NO: 2671300 - RNA, 19 nt, Artificial Sequence
  Description of Artificial Sequence: Synthetic oligonucleotide
auagugccaggguaguccc

SEQ ID NO: 2671301 - RNA, 19 nt, Artificial Sequence
  Description of Artificial Sequence: Synthetic oligonucleotide
ucacggaacaauuuccaca

SEQ ID NO: 2671302 - RNA, 19 nt, Artificial Sequence
  Description of Artificial Sequence: Synthetic oligonucleotide
aaaacagaggcaggaacug

SEQ ID NO: 2671303 - RNA, 19 nt, Artificial Sequence
  Description of Artificial Sequence: Synthetic oligonucleotide
uuaggagcaaguccagcug

SEQ ID NO: 2671304 - RNA, 19 nt, Artificial Sequence
  Description of Artificial Sequence: Synthetic oligonucleotide
caggggaugcaaaacagag

SEQ ID NO: 2671305 - RNA, 19 nt, Artificial Sequence
  Description of Artificial Sequence: Synthetic oligonucleotide
guaagugccagguagaggu

SEQ ID NO: 2671306 - RNA, 19 nt, Artificial Sequence
  Description of Artificial Sequence: Synthetic oligonucleotide
gaugggcagcuacagaacc

SEQ ID NO: 2671307 - RNA, 19 nt, Artificial Sequence
  Description of Artificial Sequence: Synthetic oligonucleotide
agcaaggacgcucucccac

SEQ ID NO: 2671308 - RNA, 19 nt, Artificial Sequence
  Description of Artificial Sequence: Synthetic oligonucleotide
uucucgagaagaguagcgg

SEQ ID NO: 2671309 - RNA, 19 nt, Artificial Sequence
  Description of Artificial Sequence: Synthetic oligonucleotide
ucggggugggcacagaccc

SEQ ID NO: 2671310 - RNA, 19 nt, Artificial Sequence
  Description of Artificial Sequence: Synthetic oligonucleotide
ugugcucaaccauucucgg

SEQ ID NO: 2671311 - RNA, 19 nt, Artificial Sequence
  Description of Artificial Sequence: Synthetic oligonucleotide
ucucgagaagaguagcggc

SEQ ID NO: 2671312 - RNA, 19 nt, Artificial Sequence
  Description of Artificial Sequence: Synthetic oligonucleotide
aggaacuggaacuuccucu

SEQ ID NO: 2671313 - RNA, 19 nt, Artificial Sequence
  Description of Artificial Sequence: Synthetic oligonucleotide
uauagaaguuuauucccaa

SEQ ID NO: 2671314 - RNA, 19 nt, Artificial Sequence
  Description of Artificial Sequence: Synthetic oligonucleotide
ugaaucucagaaacugccu

SEQ ID NO: 2671315 - RNA, 19 nt, Artificial Sequence
  Description of Artificial Sequence: Synthetic oligonucleotide
uuuggcacaggcagcgaag

SEQ ID NO: 2671316 - RNA, 19 nt, Artificial Sequence
  Description of Artificial Sequence: Synthetic oligonucleotide
uuuucuauagaaguuuauu

SEQ ID NO: 2671317 - RNA, 19 nt, Artificial Sequence
  Description of Artificial Sequence: Synthetic oligonucleotide
aacagagcgcggcuucacg

SEQ ID NO: 2671318 - RNA, 19 nt, Artificial Sequence
  Description of Artificial Sequence: Synthetic oligonucleotide
ccacaaacagggaagaggg

SEQ ID NO: 2671319 - RNA, 19 nt, Artificial Sequence
  Description of Artificial Sequence: Synthetic oligonucleotide
gagaugggcagcuacagaa

SEQ ID NO: 2671320 - RNA, 19 nt, Artificial Sequence
  Description of Artificial Sequence: Synthetic oligonucleotide
uuccucuagucucucucgg

SEQ ID NO: 2671321 - RNA, 19 nt, Artificial Sequence
  Description of Artificial Sequence: Synthetic oligonucleotide
ucgccuuaggagcaagucc

SEQ ID NO: 2671322 - RNA, 19 nt, Artificial Sequence
  Description of Artificial Sequence: Synthetic oligonucleotide
cauagugccaggguagucc

SEQ ID NO: 2671323 - RNA, 19 nt, Artificial Sequence
  Description of Artificial Sequence: Synthetic oligonucleotide
agcguccagccauagugcc

SEQ ID NO: 2671324 - RNA, 19 nt, Artificial Sequence
  Description of Artificial Sequence: Synthetic oligonucleotide
gaugcaaaacagaggcagg

SEQ ID NO: 2671325 - RNA, 19 nt, Artificial Sequence
  Description of Artificial Sequence: Synthetic oligonucleotide
uauucccaaaacagagcgc

SEQ ID NO: 2671326 - RNA, 19 nt, Artificial Sequence
  Description of Artificial Sequence: Synthetic oligonucleotide
ggaugcaaaacagaggcag

SEQ ID NO: 2671327 - RNA, 19 nt, Artificial Sequence
  Description of Artificial Sequence: Synthetic oligonucleotide
aagugccagguagaggugg

SEQ ID NO: 2671328 - RNA, 19 nt, Artificial Sequence
  Description of Artificial Sequence: Synthetic oligonucleotide
acagagcgcggcuucacgg

SEQ ID NO: 2671329 - RNA, 19 nt, Artificial Sequence
  Description of Artificial Sequence: Synthetic oligonucleotide
aagcguccagccauagugc

SEQ ID NO: 2671330 - RNA, 19 nt, Artificial Sequence
  Description of Artificial Sequence: Synthetic oligonucleotide
gugugcucaaccauucucg

SEQ ID NO: 2671331 - RNA, 19 nt, Artificial Sequence
  Description of Artificial Sequence: Synthetic oligonucleotide
aaguccagcuguucucgag

SEQ ID NO: 2671332 - RNA, 19 nt, Artificial Sequence
  Description of Artificial Sequence: Synthetic oligonucleotide
uguaagugccagguagagg

SEQ ID NO: 2671333 - RNA, 19 nt, Artificial Sequence
  Description of Artificial Sequence: Synthetic oligonucleotide
ggagcuagggaccugguug

SEQ ID NO: 2671334 - RNA, 19 nt, Artificial Sequence
  Description of Artificial Sequence: Synthetic oligonucleotide
gaucucugggcuccaggcg

SEQ ID NO: 2671335 - RNA, 19 nt, Artificial Sequence
  Description of Artificial Sequence: Synthetic oligonucleotide
aaauagcaaggacgcucuc

SEQ ID NO: 2671336 - RNA, 19 nt, Artificial Sequence
  Description of Artificial Sequence: Synthetic oligonucleotide
aguuuauucccaaaacaga

SEQ ID NO: 2671337 - RNA, 19 nt, Artificial Sequence
  Description of Artificial Sequence: Synthetic oligonucleotide
gaagaguagcggcuggcug

SEQ ID NO: 2671338 - RNA, 19 nt, Artificial Sequence
  Description of Artificial Sequence: Synthetic oligonucleotide
ugccccuaaguccagugca

SEQ ID NO: 2671339 - RNA, 19 nt, Artificial Sequence
  Description of Artificial Sequence: Synthetic oligonucleotide
ucucccaccaacaggccac

SEQ ID NO: 2671340 - RNA, 19 nt, Artificial Sequence
  Description of Artificial Sequence: Synthetic oligonucleotide
acugccuccaaguguaagu

SEQ ID NO: 2671341 - RNA, 19 nt, Artificial Sequence
  Description of Artificial Sequence: Synthetic oligonucleotide
ucaaccauucucggggugc

SEQ ID NO: 2671342 - RNA, 19 nt, Artificial Sequence
  Description of Artificial Sequence: Synthetic oligonucleotide
agggccacugugcuggagg

SEQ ID NO: 2671343 - RNA, 19 nt, Artificial Sequence
  Description of Artificial Sequence: Synthetic oligonucleotide
uguucucgagaagaguagc

SEQ ID NO: 2671344 - RNA, 19 nt, Artificial Sequence
  Description of Artificial Sequence: Synthetic oligonucleotide
uccaaguguaagugccagg

SEQ ID NO: 2671345 - RNA, 19 nt, Artificial Sequence
  Description of Artificial Sequence: Synthetic oligonucleotide
cacucagcccuucaggggc

SEQ ID NO: 2671346 - RNA, 19 nt, Artificial Sequence
  Description of Artificial Sequence: Synthetic oligonucleotide
uaggagcaaguccagcugu

SEQ ID NO: 2671347 - RNA, 19 nt, Artificial Sequence
  Description of Artificial Sequence: Synthetic oligonucleotide
aaguccagugcaucccgug

SEQ ID NO: 2671348 - RNA, 19 nt, Artificial Sequence
  Description of Artificial Sequence: Synthetic oligonucleotide
uucacggaacaauuuccac

SEQ ID NO: 2671349 - RNA, 19 nt, Artificial Sequence
  Description of Artificial Sequence: Synthetic oligonucleotide
cagcugucgccuuaggagc

SEQ ID NO: 2671350 - RNA, 19 nt, Artificial Sequence
  Description of Artificial Sequence: Synthetic oligonucleotide
uucccaaaacagagcgcgg

SEQ ID NO: 2671351 - RNA, 19 nt, Artificial Sequence
  Description of Artificial Sequence: Synthetic oligonucleotide
cuguucucgagaagaguag

SEQ ID NO: 2671352 - RNA, 19 nt, Artificial Sequence
  Description of Artificial Sequence: Synthetic oligonucleotide
guucucgagaagaguagcg

SEQ ID NO: 2671353 - RNA, 19 nt, Artificial Sequence
  Description of Artificial Sequence: Synthetic oligonucleotide
ugcuuccccgaucucuggg

SEQ ID NO: 2671354 - RNA, 19 nt, Artificial Sequence
  Description of Artificial Sequence: Synthetic oligonucleotide
aggacgcucucccaccaac

SEQ ID NO: 2671355 - RNA, 19 nt, Artificial Sequence
  Description of Artificial Sequence: Synthetic oligonucleotide
aaacagagcgcggcuucac

SEQ ID NO: 2671356 - RNA, 19 nt, Artificial Sequence
  Description of Artificial Sequence: Synthetic oligonucleotide
ucggggugccccuaagucc

SEQ ID NO: 2671357 - RNA, 19 nt, Artificial Sequence
  Description of Artificial Sequence: Synthetic oligonucleotide
auagaaguuuauucccaaa

SEQ ID NO: 2671358 - RNA, 19 nt, Artificial Sequence
  Description of Artificial Sequence: Synthetic oligonucleotide
accauucucggggugcccc

SEQ ID NO: 2671359 - RNA, 19 nt, Artificial Sequence
  Description of Artificial Sequence: Synthetic oligonucleotide
cacggaacaauuuccacaa

SEQ ID NO: 2671360 - RNA, 19 nt, Artificial Sequence
  Description of Artificial Sequence: Synthetic oligonucleotide
uccagugcaucccgugacc

SEQ ID NO: 2671361 - RNA, 19 nt, Artificial Sequence
  Description of Artificial Sequence: Synthetic oligonucleotide
ucccaaaacagagcgcggc

SEQ ID NO: 2671362 - RNA, 19 nt, Artificial Sequence
  Description of Artificial Sequence: Synthetic oligonucleotide
gugguagcgugcuuccccg

SEQ ID NO: 2671363 - RNA, 19 nt, Artificial Sequence
  Description of Artificial Sequence: Synthetic oligonucleotide
gaacuggaacuuccucuag

SEQ ID NO: 2671364 - RNA, 19 nt, Artificial Sequence
  Description of Artificial Sequence: Synthetic oligonucleotide
aguccagcuguucucgaga

SEQ ID NO: 2671365 - RNA, 19 nt, Artificial Sequence
  Description of Artificial Sequence: Synthetic oligonucleotide
agugccaggguagucccgg

SEQ ID NO: 2671366 - RNA, 19 nt, Artificial Sequence
  Description of Artificial Sequence: Synthetic oligonucleotide
cuucacggaacaauuucca

SEQ ID NO: 2671367 - RNA, 19 nt, Artificial Sequence
  Description of Artificial Sequence: Synthetic oligonucleotide
agaguagcggcuggcuggc

SEQ ID NO: 2671368 - RNA, 19 nt, Artificial Sequence
  Description of Artificial Sequence: Synthetic oligonucleotide
caaaacagagcgcggcuuc

SEQ ID NO: 2671369 - RNA, 19 nt, Artificial Sequence
  Description of Artificial Sequence: Synthetic oligonucleotide
acccaaagcguccagccau

SEQ ID NO: 2671370 - RNA, 19 nt, Artificial Sequence
  Description of Artificial Sequence: Synthetic oligonucleotide
cagaaccagggaaauagca

SEQ ID NO: 2671371 - RNA, 19 nt, Artificial Sequence
  Description of Artificial Sequence: Synthetic oligonucleotide
ggaacaauuuccacaaaca

SEQ ID NO: 2671372 - RNA, 19 nt, Artificial Sequence
  Description of Artificial Sequence: Synthetic oligonucleotide
gcaaaacagaggcaggaac

SEQ ID NO: 2671373 - RNA, 19 nt, Artificial Sequence
  Description of Artificial Sequence: Synthetic oligonucleotide
ugcugcauccaggugcucc

SEQ ID NO: 2671374 - RNA, 19 nt, Artificial Sequence
  Description of Artificial Sequence: Synthetic oligonucleotide
ucgagaagaguagcggcug

SEQ ID NO: 2671375 - RNA, 19 nt, Artificial Sequence
  Description of Artificial Sequence: Synthetic oligonucleotide
uccucuagucucucucggc

SEQ ID NO: 2671376 - RNA, 19 nt, Artificial Sequence
  Description of Artificial Sequence: Synthetic oligonucleotide
augcaaaacagaggcagga

SEQ ID NO: 2671377 - RNA, 19 nt, Artificial Sequence
  Description of Artificial Sequence: Synthetic oligonucleotide
uaagugccagguagaggug

SEQ ID NO: 2671378 - RNA, 19 nt, Artificial Sequence
  Description of Artificial Sequence: Synthetic oligonucleotide
aacugccuccaaguguaag

SEQ ID NO: 2671379 - RNA, 19 nt, Artificial Sequence
  Description of Artificial Sequence: Synthetic oligonucleotide
agaugggcagcuacagaac

SEQ ID NO: 2671380 - RNA, 19 nt, Artificial Sequence
  Description of Artificial Sequence: Synthetic oligonucleotide
cuuaggagcaaguccagcu

SEQ ID NO: 2671381 - RNA, 19 nt, Artificial Sequence
  Description of Artificial Sequence: Synthetic oligonucleotide
ucccgugacccaaagcguc

SEQ ID NO: 2671382 - RNA, 19 nt, Artificial Sequence
  Description of Artificial Sequence: Synthetic oligonucleotide
acgcucucccaccaacagg

SEQ ID NO: 2671383 - RNA, 19 nt, Artificial Sequence
  Description of Artificial Sequence: Synthetic oligonucleotide
aguagcggcuggcuggcug

SEQ ID NO: 2671384 - RNA, 19 nt, Artificial Sequence
  Description of Artificial Sequence: Synthetic oligonucleotide
uccaggugcuccugggagc

SEQ ID NO: 2671385 - RNA, 19 nt, Artificial Sequence
  Description of Artificial Sequence: Synthetic oligonucleotide
caaacagggaagagggcca

SEQ ID NO: 2671386 - RNA, 19 nt, Artificial Sequence
  Description of Artificial Sequence: Synthetic oligonucleotide
gugcucaaccauucucggg

SEQ ID NO: 2671387 - RNA, 19 nt, Artificial Sequence
  Description of Artificial Sequence: Synthetic oligonucleotide
aggggaugcaaaacagagg

SEQ ID NO: 2671388 - RNA, 19 nt, Artificial Sequence
  Description of Artificial Sequence: Synthetic oligonucleotide
gaaauagcaaggacgcucu

SEQ ID NO: 2671389 - RNA, 19 nt, Artificial Sequence
  Description of Artificial Sequence: Synthetic oligonucleotide
ugcaucccgugacccaaag

SEQ ID NO: 2671390 - RNA, 19 nt, Artificial Sequence
  Description of Artificial Sequence: Synthetic oligonucleotide
ugugcuggagggagacccc

SEQ ID NO: 2671391 - RNA, 19 nt, Artificial Sequence
  Description of Artificial Sequence: Synthetic oligonucleotide
uucagggcguugcggcggg

SEQ ID NO: 2671392 - RNA, 19 nt, Artificial Sequence
  Description of Artificial Sequence: Synthetic oligonucleotide
ugccuccaaguguaagugc

SEQ ID NO: 2671393 - RNA, 19 nt, Artificial Sequence
  Description of Artificial Sequence: Synthetic oligonucleotide
aguccagugcaucccguga

SEQ ID NO: 2671394 - RNA, 19 nt, Artificial Sequence
  Description of Artificial Sequence: Synthetic oligonucleotide
gaagagggccacugugcug

SEQ ID NO: 2671395 - RNA, 19 nt, Artificial Sequence
  Description of Artificial Sequence: Synthetic oligonucleotide
aaccauucucggggugccc

SEQ ID NO: 2671396 - RNA, 19 nt, Artificial Sequence
  Description of Artificial Sequence: Synthetic oligonucleotide
gaggucaggccagucuggg

SEQ ID NO: 2671397 - RNA, 19 nt, Artificial Sequence
  Description of Artificial Sequence: Synthetic oligonucleotide
uccgugguagcgugcuucc

SEQ ID NO: 2671398 - RNA, 19 nt, Artificial Sequence
  Description of Artificial Sequence: Synthetic oligonucleotide
agagaugggcagcuacaga

SEQ ID NO: 2671399 - RNA, 19 nt, Artificial Sequence
  Description of Artificial Sequence: Synthetic oligonucleotide
uaaguccagugcaucccgu

SEQ ID NO: 2671400 - RNA, 19 nt, Artificial Sequence
  Description of Artificial Sequence: Synthetic oligonucleotide
cugguugugggguuuggca

SEQ ID NO: 2671401 - RNA, 19 nt, Artificial Sequence
  Description of Artificial Sequence: Synthetic oligonucleotide
guagaggugggagggucgg

SEQ ID NO: 2671402 - RNA, 19 nt, Artificial Sequence
  Description of Artificial Sequence: Synthetic oligonucleotide
agucucucucggcucagcu

SEQ ID NO: 2671403 - RNA, 19 nt, Artificial Sequence
  Description of Artificial Sequence: Synthetic oligonucleotide
guguaagugccagguagag

SEQ ID NO: 2671404 - RNA, 19 nt, Artificial Sequence
  Description of Artificial Sequence: Synthetic oligonucleotide
ugcaaaacagaggcaggaa

SEQ ID NO: 2671405 - RNA, 19 nt, Artificial Sequence
  Description of Artificial Sequence: Synthetic oligonucleotide
agccauagugccaggguag

SEQ ID NO: 2671406 - RNA, 19 nt, Artificial Sequence
  Description of Artificial Sequence: Synthetic oligonucleotide
aguguaagugccagguaga

SEQ ID NO: 2671407 - RNA, 19 nt, Artificial Sequence
  Description of Artificial Sequence: Synthetic oligonucleotide
gagaagaguagcggcuggc

SEQ ID NO: 2671408 - RNA, 19 nt, Artificial Sequence
  Description of Artificial Sequence: Synthetic oligonucleotide
cuccaaguguaagugccag

SEQ ID NO: 2671409 - RNA, 19 nt, Artificial Sequence
  Description of Artificial Sequence: Synthetic oligonucleotide
cagagaugggcagcuacag

SEQ ID NO: 2671410 - RNA, 19 nt, Artificial Sequence
  Description of Artificial Sequence: Synthetic oligonucleotide
uucaggggcagaggucagg

SEQ ID NO: 2671411 - RNA, 19 nt, Artificial Sequence
  Description of Artificial Sequence: Synthetic oligonucleotide
cucggggugccccuaaguc

SEQ ID NO: 2671412 - RNA, 19 nt, Artificial Sequence
  Description of Artificial Sequence: Synthetic oligonucleotide
cagcuguucucgagaagag

SEQ ID NO: 2671413 - RNA, 19 nt, Artificial Sequence
  Description of Artificial Sequence: Synthetic oligonucleotide
aggggagcuagggaccugg

SEQ ID NO: 2671414 - RNA, 19 nt, Artificial Sequence
  Description of Artificial Sequence: Synthetic oligonucleotide
ggucaggccagucugggca

SEQ ID NO: 2671415 - RNA, 19 nt, Artificial Sequence
  Description of Artificial Sequence: Synthetic oligonucleotide
ucucggcucagcugucgcc

SEQ ID NO: 2671416 - RNA, 19 nt, Artificial Sequence
  Description of Artificial Sequence: Synthetic oligonucleotide
agaagaguagcggcuggcu

SEQ ID NO: 2671417 - RNA, 19 nt, Artificial Sequence
  Description of Artificial Sequence: Synthetic oligonucleotide
gcuucacggaacaauuucc

SEQ ID NO: 2671418 - RNA, 19 nt, Artificial Sequence
  Description of Artificial Sequence: Synthetic oligonucleotide
uagugccaggguagucccg

SEQ ID NO: 2671419 - RNA, 19 nt, Artificial Sequence
  Description of Artificial Sequence: Synthetic oligonucleotide
ggcuucacggaacaauuuc

SEQ ID NO: 2671420 - RNA, 19 nt, Artificial Sequence
  Description of Artificial Sequence: Synthetic oligonucleotide
cugccuccaaguguaagug

SEQ ID NO: 2671421 - RNA, 19 nt, Artificial Sequence
  Description of Artificial Sequence: Synthetic oligonucleotide
ucucggggugccccuaagu

SEQ ID NO: 2671422 - RNA, 19 nt, Artificial Sequence
  Description of Artificial Sequence: Synthetic oligonucleotide
gucucucucggcucagcug

SEQ ID NO: 2671423 - RNA, 19 nt, Artificial Sequence
  Description of Artificial Sequence: Synthetic oligonucleotide
ugucgccuuaggagcaagu

SEQ ID NO: 2671424 - RNA, 19 nt, Artificial Sequence
  Description of Artificial Sequence: Synthetic oligonucleotide
cucuagucucucucggcuc

SEQ ID NO: 2671425 - RNA, 19 nt, Artificial Sequence
  Description of Artificial Sequence: Synthetic oligonucleotide
cuucagggcguugcggcgg

SEQ ID NO: 2671426 - RNA, 19 nt, Artificial Sequence
  Description of Artificial Sequence: Synthetic oligonucleotide
ggguuuggcacaggcagcg

SEQ ID NO: 2671427 - RNA, 19 nt, Artificial Sequence
  Description of Artificial Sequence: Synthetic oligonucleotide
uuggcacaggcagcgaagu

SEQ ID NO: 2671428 - RNA, 19 nt, Artificial Sequence
  Description of Artificial Sequence: Synthetic oligonucleotide
ucucagaaacugccuccaa

SEQ ID NO: 2671429 - RNA, 19 nt, Artificial Sequence
  Description of Artificial Sequence: Synthetic oligonucleotide
acaggcagcgaagugggau

SEQ ID NO: 2671430 - RNA, 19 nt, Artificial Sequence
  Description of Artificial Sequence: Synthetic oligonucleotide
agugccagguagagguggg

SEQ ID NO: 2671431 - RNA, 19 nt, Artificial Sequence
  Description of Artificial Sequence: Synthetic oligonucleotide
guccagugcaucccgugac

SEQ ID NO: 2671432 - RNA, 19 nt, Artificial Sequence
  Description of Artificial Sequence: Synthetic oligonucleotide
caacaggccacucagcccu

SEQ ID NO: 2671433 - RNA, 19 nt, Artificial Sequence
  Description of Artificial Sequence: Synthetic oligonucleotide
aggguagucccgggguggc

SEQ ID NO: 2671434 - RNA, 19 nt, Artificial Sequence
  Description of Artificial Sequence: Synthetic oligonucleotide
uucucggggugccccuaag

SEQ ID NO: 2671435 - RNA, 19 nt, Artificial Sequence
  Description of Artificial Sequence: Synthetic oligonucleotide
ccagguagaggugggaggg

SEQ ID NO: 2671436 - RNA, 19 nt, Artificial Sequence
  Description of Artificial Sequence: Synthetic oligonucleotide
gcucaggggaugcaaaaca

SEQ ID NO: 2671437 - RNA, 19 nt, Artificial Sequence
  Description of Artificial Sequence: Synthetic oligonucleotide
gacccaaagcguccagcca

SEQ ID NO: 2671438 - RNA, 19 nt, Artificial Sequence
  Description of Artificial Sequence: Synthetic oligonucleotide
agcgcggcuucacggaaca

SEQ ID NO: 2671439 - RNA, 19 nt, Artificial Sequence
  Description of Artificial Sequence: Synthetic oligonucleotide
caaccauucucggggugcc

SEQ ID NO: 2671440 - RNA, 19 nt, Artificial Sequence
  Description of Artificial Sequence: Synthetic oligonucleotide
agugcaucccgugacccaa

SEQ ID NO: 2671441 - RNA, 19 nt, Artificial Sequence
  Description of Artificial Sequence: Synthetic oligonucleotide
agcccugagccuccuucag

SEQ ID NO: 2671442 - RNA, 19 nt, Artificial Sequence
  Description of Artificial Sequence: Synthetic oligonucleotide
ggaacuggaacuuccucua

SEQ ID NO: 2671443 - RNA, 19 nt, Artificial Sequence
  Description of Artificial Sequence: Synthetic oligonucleotide
cccuaaguccagugcaucc

SEQ ID NO: 2671444 - RNA, 19 nt, Artificial Sequence
  Description of Artificial Sequence: Synthetic oligonucleotide
gugccccuaaguccagugc

SEQ ID NO: 2671445 - RNA, 19 nt, Artificial Sequence
  Description of Artificial Sequence: Synthetic oligonucleotide
agucugggcaaggggagcu

SEQ ID NO: 2671446 - RNA, 19 nt, Artificial Sequence
  Description of Artificial Sequence: Synthetic oligonucleotide
caggguagucccggggugg

SEQ ID NO: 2671447 - RNA, 19 nt, Artificial Sequence
  Description of Artificial Sequence: Synthetic oligonucleotide
cucagcugucgccuuagga

SEQ ID NO: 2671448 - RNA, 19 nt, Artificial Sequence
  Description of Artificial Sequence: Synthetic oligonucleotide
agcuguucucgagaagagu

SEQ ID NO: 2671449 - RNA, 19 nt, Artificial Sequence
  Description of Artificial Sequence: Synthetic oligonucleotide
cucaaccauucucggggug

SEQ ID NO: 2671450 - RNA, 19 nt, Artificial Sequence
  Description of Artificial Sequence: Synthetic oligonucleotide
caauuuccacaaacaggga

SEQ ID NO: 2671451 - RNA, 19 nt, Artificial Sequence
  Description of Artificial Sequence: Synthetic oligonucleotide
caccaacaggccacucagc

SEQ ID NO: 2671452 - RNA, 19 nt, Artificial Sequence
  Description of Artificial Sequence: Synthetic oligonucleotide
ccuaaguccagugcauccc

SEQ ID NO: 2671453 - RNA, 19 nt, Artificial Sequence
  Description of Artificial Sequence: Synthetic oligonucleotide
cucgagaagaguagcggcu

SEQ ID NO: 2671454 - RNA, 19 nt, Artificial Sequence
  Description of Artificial Sequence: Synthetic oligonucleotide
ggugggagggucggggugg

SEQ ID NO: 2671455 - RNA, 19 nt, Artificial Sequence
  Description of Artificial Sequence: Synthetic oligonucleotide
gguugugggguuuggcaca

SEQ ID NO: 2671456 - RNA, 19 nt, Artificial Sequence
  Description of Artificial Sequence: Synthetic oligonucleotide
gcaaggacgcucucccacc

SEQ ID NO: 2671457 - RNA, 19 nt, Artificial Sequence
  Description of Artificial Sequence: Synthetic oligonucleotide
ggagaccccagagaugggc

SEQ ID NO: 2671458 - RNA, 19 nt, Artificial Sequence
  Description of Artificial Sequence: Synthetic oligonucleotide
aaggacgcucucccaccaa

SEQ ID NO: 2671459 - RNA, 19 nt, Artificial Sequence
  Description of Artificial Sequence: Synthetic oligonucleotide
cuucaggggcagaggucag

SEQ ID NO: 2671460 - RNA, 19 nt, Artificial Sequence
  Description of Artificial Sequence: Synthetic oligonucleotide
gaccccagagaugggcagc

SEQ ID NO: 2671461 - RNA, 19 nt, Artificial Sequence
  Description of Artificial Sequence: Synthetic oligonucleotide
gucgccuuaggagcaaguc

SEQ ID NO: 2671462 - RNA, 19 nt, Artificial Sequence
  Description of Artificial Sequence: Synthetic oligonucleotide
ggugccccuaaguccagug

SEQ ID NO: 2671463 - RNA, 19 nt, Artificial Sequence
  Description of Artificial Sequence: Synthetic oligonucleotide
ggccagucugggcaagggg

SEQ ID NO: 2671464 - RNA, 19 nt, Artificial Sequence
  Description of Artificial Sequence: Synthetic oligonucleotide
gugcuuccccgaucucugg

SEQ ID NO: 2671465 - RNA, 19 nt, Artificial Sequence
  Description of Artificial Sequence: Synthetic oligonucleotide
guagucccgggguggcugc

SEQ ID NO: 2671466 - RNA, 19 nt, Artificial Sequence
  Description of Artificial Sequence: Synthetic oligonucleotide
gcuguucucgagaagagua

SEQ ID NO: 2671467 - RNA, 19 nt, Artificial Sequence
  Description of Artificial Sequence: Synthetic oligonucleotide
gagggagaccccagagaug

SEQ ID NO: 2671468 - RNA, 19 nt, Artificial Sequence
  Description of Artificial Sequence: Synthetic oligonucleotide
gggccacugugcuggaggg

SEQ ID NO: 2671469 - RNA, 19 nt, Artificial Sequence
  Description of Artificial Sequence: Synthetic oligonucleotide
aacagggaagagggccacu

SEQ ID NO: 2671470 - RNA, 19 nt, Artificial Sequence
  Description of Artificial Sequence: Synthetic oligonucleotide
gggguggcugccuccgugg

SEQ ID NO: 2671471 - RNA, 19 nt, Artificial Sequence
  Description of Artificial Sequence: Synthetic oligonucleotide
gaccccagcccugagccuc

SEQ ID NO: 2671472 - RNA, 19 nt, Artificial Sequence
  Description of Artificial Sequence: Synthetic oligonucleotide
ggagggagaccccagagau

SEQ ID NO: 2671473 - RNA, 19 nt, Artificial Sequence
  Description of Artificial Sequence: Synthetic oligonucleotide
agagcgcggcuucacggaa

SEQ ID NO: 2671474 - RNA, 19 nt, Artificial Sequence
  Description of Artificial Sequence: Synthetic oligonucleotide
cugccuccgugguagcgug

SEQ ID NO: 2671475 - RNA, 19 nt, Artificial Sequence
  Description of Artificial Sequence: Synthetic oligonucleotide
guagcgugcuuccccgauc

SEQ ID NO: 2671476 - RNA, 19 nt, Artificial Sequence
  Description of Artificial Sequence: Synthetic oligonucleotide
cagcccuucaggggcagag

SEQ ID NO: 2671477 - RNA, 19 nt, Artificial Sequence
  Description of Artificial Sequence: Synthetic oligonucleotide
gcuuccccgaucucugggc

SEQ ID NO: 2671478 - RNA, 19 nt, Artificial Sequence
  Description of Artificial Sequence: Synthetic oligonucleotide
cugggcuccaggcgggcug

SEQ ID NO: 2671479 - RNA, 19 nt, Artificial Sequence
  Description of Artificial Sequence: Synthetic oligonucleotide
ccacucagcccuucagggg

SEQ ID NO: 2671480 - RNA, 19 nt, Artificial Sequence
  Description of Artificial Sequence: Synthetic oligonucleotide
ccagcuguucucgagaaga

SEQ ID NO: 2671481 - RNA, 19 nt, Artificial Sequence
  Description of Artificial Sequence: Synthetic oligonucleotide
ggggcagugugcucaacca

SEQ ID NO: 2671482 - RNA, 19 nt, Artificial Sequence
  Description of Artificial Sequence: Synthetic oligonucleotide
guccagcuguucucgagaa

SEQ ID NO: 2671483 - RNA, 19 nt, Artificial Sequence
  Description of Artificial Sequence: Synthetic oligonucleotide
gucggggugggcacagacc

SEQ ID NO: 2671484 - RNA, 19 nt, Artificial Sequence
  Description of Artificial Sequence: Synthetic oligonucleotide
aucccgugacccaaagcgu

SEQ ID NO: 2671485 - RNA, 19 nt, Artificial Sequence
  Description of Artificial Sequence: Synthetic oligonucleotide
gcaaggggagcuagggacc

SEQ ID NO: 2671486 - RNA, 19 nt, Artificial Sequence
  Description of Artificial Sequence: Synthetic oligonucleotide
uagucucucucggcucagc

SEQ ID NO: 2671487 - RNA, 19 nt, Artificial Sequence
  Description of Artificial Sequence: Synthetic oligonucleotide
cccagagaugggcagcuac

SEQ ID NO: 2671488 - RNA, 19 nt, Artificial Sequence
  Description of Artificial Sequence: Synthetic oligonucleotide
cagccauagugccagggua

SEQ ID NO: 2671489 - RNA, 19 nt, Artificial Sequence
  Description of Artificial Sequence: Synthetic oligonucleotide
agcgugcuuccccgaucuc

SEQ ID NO: 2671490 - RNA, 19 nt, Artificial Sequence
  Description of Artificial Sequence: Synthetic oligonucleotide
ugguagcgugcuuccccga

SEQ ID NO: 2671491 - RNA, 19 nt, Artificial Sequence
  Description of Artificial Sequence: Synthetic oligonucleotide
cuagucucucucggcucag

SEQ ID NO: 2671492 - RNA, 19 nt, Artificial Sequence
  Description of Artificial Sequence: Synthetic oligonucleotide
ccuucagggcguugcggcg

SEQ ID NO: 2671493 - RNA, 19 nt, Artificial Sequence
  Description of Artificial Sequence: Synthetic oligonucleotide
cgugguagcgugcuucccc

SEQ ID NO: 2671494 - RNA, 19 nt, Artificial Sequence
  Description of Artificial Sequence: Synthetic oligonucleotide
caaggacgcucucccacca

SEQ ID NO: 2671495 - RNA, 19 nt, Artificial Sequence
  Description of Artificial Sequence: Synthetic oligonucleotide
cagucugggcaaggggagc

SEQ ID NO: 2671496 - RNA, 19 nt, Artificial Sequence
  Description of Artificial Sequence: Synthetic oligonucleotide
cagagcgcggcuucacgga

SEQ ID NO: 2671497 - RNA, 19 nt, Artificial Sequence
  Description of Artificial Sequence: Synthetic oligonucleotide
cugcucaggggaugcaaaa

SEQ ID NO: 2671498 - RNA, 19 nt, Artificial Sequence
  Description of Artificial Sequence: Synthetic oligonucleotide
auucucggggugccccuaa

SEQ ID NO: 2671499 - RNA, 19 nt, Artificial Sequence
  Description of Artificial Sequence: Synthetic oligonucleotide
cuggugcugcauccaggug

SEQ ID NO: 2671500 - RNA, 19 nt, Artificial Sequence
  Description of Artificial Sequence: Synthetic oligonucleotide
acggaacaauuuccacaaa

SEQ ID NO: 2671501 - RNA, 19 nt, Artificial Sequence
  Description of Artificial Sequence: Synthetic oligonucleotide
agcugucgccuuaggagca

SEQ ID NO: 2671502 - RNA, 19 nt, Artificial Sequence
  Description of Artificial Sequence: Synthetic oligonucleotide
gccagucugggcaagggga

SEQ ID NO: 2671503 - RNA, 19 nt, Artificial Sequence
  Description of Artificial Sequence: Synthetic oligonucleotide
ggaagagggccacugugcu

SEQ ID NO: 2671504 - RNA, 19 nt, Artificial Sequence
  Description of Artificial Sequence: Synthetic oligonucleotide
aaggggagcuagggaccug

SEQ ID NO: 2671505 - RNA, 19 nt, Artificial Sequence
  Description of Artificial Sequence: Synthetic oligonucleotide
caaguguaagugccaggua

SEQ ID NO: 2671506 - RNA, 19 nt, Artificial Sequence
  Description of Artificial Sequence: Synthetic oligonucleotide
caaguccagcuguucucga

SEQ ID NO: 2671507 - RNA, 19 nt, Artificial Sequence
  Description of Artificial Sequence: Synthetic oligonucleotide
cccgugacccaaagcgucc

SEQ ID NO: 2671508 - RNA, 19 nt, Artificial Sequence
  Description of Artificial Sequence: Synthetic oligonucleotide
cagugcaucccgugaccca

SEQ ID NO: 2671509 - RNA, 19 nt, Artificial Sequence
  Description of Artificial Sequence: Synthetic oligonucleotide
gugggguuuggcacaggca

SEQ ID NO: 2671510 - RNA, 19 nt, Artificial Sequence
  Description of Artificial Sequence: Synthetic oligonucleotide
ccgaucucugggcuccagg

SEQ ID NO: 2671511 - RNA, 19 nt, Artificial Sequence
  Description of Artificial Sequence: Synthetic oligonucleotide
cgagaagaguagcggcugg

SEQ ID NO: 2671512 - RNA, 19 nt, Artificial Sequence
  Description of Artificial Sequence: Synthetic oligonucleotide
gucaggccagucugggcaa

SEQ ID NO: 2671513 - RNA, 19 nt, Artificial Sequence
  Description of Artificial Sequence: Synthetic oligonucleotide
gcaucccgugacccaaagc

SEQ ID NO: 2671514 - RNA, 19 nt, Artificial Sequence
  Description of Artificial Sequence: Synthetic oligonucleotide
ggagggucggggugggcac

SEQ ID NO: 2671515 - RNA, 19 nt, Artificial Sequence
  Description of Artificial Sequence: Synthetic oligonucleotide
gcuccugggagccuggccu

SEQ ID NO: 2671516 - RNA, 19 nt, Artificial Sequence
  Description of Artificial Sequence: Synthetic oligonucleotide
cguccagccauagugccag

SEQ ID NO: 2671517 - RNA, 19 nt, Artificial Sequence
  Description of Artificial Sequence: Synthetic oligonucleotide
cugucgccuuaggagcaag

SEQ ID NO: 2671518 - RNA, 19 nt, Artificial Sequence
  Description of Artificial Sequence: Synthetic oligonucleotide
ccuuaggagcaaguccagc

SEQ ID NO: 2671519 - RNA, 19 nt, Artificial Sequence
  Description of Artificial Sequence: Synthetic oligonucleotide
cgugcuuccccgaucucug

SEQ ID NO: 2671520 - RNA, 19 nt, Artificial Sequence
  Description of Artificial Sequence: Synthetic oligonucleotide
ucccgggguggcugccucc

SEQ ID NO: 2671521 - RNA, 19 nt, Artificial Sequence
  Description of Artificial Sequence: Synthetic oligonucleotide
cacagaccccagcccugag

SEQ ID NO: 2671522 - RNA, 19 nt, Artificial Sequence
  Description of Artificial Sequence: Synthetic oligonucleotide
guccagccauagugccagg

SEQ ID NO: 2671523 - RNA, 19 nt, Artificial Sequence
  Description of Artificial Sequence: Synthetic oligonucleotide
gggagccuggccugcucag

SEQ ID NO: 2671524 - RNA, 19 nt, Artificial Sequence
  Description of Artificial Sequence: Synthetic oligonucleotide
agggucggggugggcacag

SEQ ID NO: 2671525 - RNA, 19 nt, Artificial Sequence
  Description of Artificial Sequence: Synthetic oligonucleotide
gagcgcggcuucacggaac

SEQ ID NO: 2671526 - RNA, 19 nt, Artificial Sequence
  Description of Artificial Sequence: Synthetic oligonucleotide
gggguuuggcacaggcagc

SEQ ID NO: 2671527 - RNA, 19 nt, Artificial Sequence
  Description of Artificial Sequence: Synthetic oligonucleotide
ccaaguguaagugccaggu

SEQ ID NO: 2671528 - RNA, 19 nt, Artificial Sequence
  Description of Artificial Sequence: Synthetic oligonucleotide
ggagcaaguccagcuguuc

SEQ ID NO: 2671529 - RNA, 19 nt, Artificial Sequence
  Description of Artificial Sequence: Synthetic oligonucleotide
cucucucggcucagcuguc

SEQ ID NO: 2671530 - RNA, 19 nt, Artificial Sequence
  Description of Artificial Sequence: Synthetic oligonucleotide
gugggagggucgggguggg

SEQ ID NO: 2671531 - RNA, 19 nt, Artificial Sequence
  Description of Artificial Sequence: Synthetic oligonucleotide
cuacagaaccagggaaaua

SEQ ID NO: 2671532 - RNA, 19 nt, Artificial Sequence
  Description of Artificial Sequence: Synthetic oligonucleotide
gcuggagggagaccccaga

SEQ ID NO: 2671533 - RNA, 19 nt, Artificial Sequence
  Description of Artificial Sequence: Synthetic oligonucleotide
aggagcaaguccagcuguu

SEQ ID NO: 2671534 - RNA, 19 nt, Artificial Sequence
  Description of Artificial Sequence: Synthetic oligonucleotide
ccaggguagucccggggug

SEQ ID NO: 2671535 - RNA, 19 nt, Artificial Sequence
  Description of Artificial Sequence: Synthetic oligonucleotide
ccugguugugggguuuggc

SEQ ID NO: 2671536 - RNA, 19 nt, Artificial Sequence
  Description of Artificial Sequence: Synthetic oligonucleotide
agagggccacugugcugga

SEQ ID NO: 2671537 - RNA, 19 nt, Artificial Sequence
  Description of Artificial Sequence: Synthetic oligonucleotide
gggaugcaaaacagaggca

SEQ ID NO: 2671538 - RNA, 19 nt, Artificial Sequence
  Description of Artificial Sequence: Synthetic oligonucleotide
ucagggcguugcggcgggg

SEQ ID NO: 2671539 - RNA, 19 nt, Artificial Sequence
  Description of Artificial Sequence: Synthetic oligonucleotide
ucagcccuucaggggcaga

SEQ ID NO: 2671540 - RNA, 19 nt, Artificial Sequence
  Description of Artificial Sequence: Synthetic oligonucleotide
gugcuggagggagacccca

SEQ ID NO: 2671541 - RNA, 19 nt, Artificial Sequence
  Description of Artificial Sequence: Synthetic oligonucleotide
ucggcucagcugucgccuu

SEQ ID NO: 2671542 - RNA, 19 nt, Artificial Sequence
  Description of Artificial Sequence: Synthetic oligonucleotide
cucagcccuucaggggcag

SEQ ID NO: 2671543 - RNA, 19 nt, Artificial Sequence
  Description of Artificial Sequence: Synthetic oligonucleotide
cugggagccuggccugcuc

SEQ ID NO: 2671544 - RNA, 19 nt, Artificial Sequence
  Description of Artificial Sequence: Synthetic oligonucleotide
gggagggucggggugggca

SEQ ID NO: 2671545 - RNA, 19 nt, Artificial Sequence
  Description of Artificial Sequence: Synthetic oligonucleotide
ggcugccuccgugguagcg

SEQ ID NO: 2671546 - RNA, 19 nt, Artificial Sequence
  Description of Artificial Sequence: Synthetic oligonucleotide
ggcacagaccccagcccug

SEQ ID NO: 2671547 - RNA, 19 nt, Artificial Sequence
  Description of Artificial Sequence: Synthetic oligonucleotide
caaagcguccagccauagu

SEQ ID NO: 2671548 - RNA, 19 nt, Artificial Sequence
  Description of Artificial Sequence: Synthetic oligonucleotide
gcuacagaaccagggaaau

SEQ ID NO: 2671549 - RNA, 19 nt, Artificial Sequence
  Description of Artificial Sequence: Synthetic oligonucleotide
ccaaagcguccagccauag

SEQ ID NO: 2671550 - RNA, 19 nt, Artificial Sequence
  Description of Artificial Sequence: Synthetic oligonucleotide
ggacgcucucccaccaaca

SEQ ID NO: 2671551 - RNA, 19 nt, Artificial Sequence
  Description of Artificial Sequence: Synthetic oligonucleotide
ggugcugcauccaggugcu

SEQ ID NO: 2671552 - RNA, 19 nt, Artificial Sequence
  Description of Artificial Sequence: Synthetic oligonucleotide
ccucuagucucucucggcu

SEQ ID NO: 2671553 - RNA, 19 nt, Artificial Sequence
  Description of Artificial Sequence: Synthetic oligonucleotide
gagggucggggugggcaca

SEQ ID NO: 2671554 - RNA, 19 nt, Artificial Sequence
  Description of Artificial Sequence: Synthetic oligonucleotide
cggggugccccuaagucca

SEQ ID NO: 2671555 - RNA, 19 nt, Artificial Sequence
  Description of Artificial Sequence: Synthetic oligonucleotide
agucccgggguggcugccu

SEQ ID NO: 2671556 - RNA, 19 nt, Artificial Sequence
  Description of Artificial Sequence: Synthetic oligonucleotide
aacaggccacucagcccuu

SEQ ID NO: 2671557 - RNA, 19 nt, Artificial Sequence
  Description of Artificial Sequence: Synthetic oligonucleotide
gucccgggguggcugccuc

SEQ ID NO: 2671558 - RNA, 19 nt, Artificial Sequence
  Description of Artificial Sequence: Synthetic oligonucleotide
caaggggagcuagggaccu

SEQ ID NO: 2671559 - RNA, 19 nt, Artificial Sequence
  Description of Artificial Sequence: Synthetic oligonucleotide
gccaggguagucccggggu

SEQ ID NO: 2671560 - RNA, 19 nt, Artificial Sequence
  Description of Artificial Sequence: Synthetic oligonucleotide
gcucaaccauucucggggu

SEQ ID NO: 2671561 - RNA, 19 nt, Artificial Sequence
  Description of Artificial Sequence: Synthetic oligonucleotide
ucccaccaacaggccacuc

SEQ ID NO: 2671562 - RNA, 19 nt, Artificial Sequence
  Description of Artificial Sequence: Synthetic oligonucleotide
cagggaagagggccacugu

SEQ ID NO: 2671563 - RNA, 19 nt, Artificial Sequence
  Description of Artificial Sequence: Synthetic oligonucleotide
gguagcgugcuuccccgau

SEQ ID NO: 2671564 - RNA, 19 nt, Artificial Sequence
  Description of Artificial Sequence: Synthetic oligonucleotide
ugggagggucggggugggc

SEQ ID NO: 2671565 - RNA, 19 nt, Artificial Sequence
  Description of Artificial Sequence: Synthetic oligonucleotide
ccccuaaguccagugcauc

SEQ ID NO: 2671566 - RNA, 19 nt, Artificial Sequence
  Description of Artificial Sequence: Synthetic oligonucleotide
ccaggcgggcuggugcugc

SEQ ID NO: 2671567 - RNA, 19 nt, Artificial Sequence
  Description of Artificial Sequence: Synthetic oligonucleotide
ccauagugccaggguaguc

SEQ ID NO: 2671568 - RNA, 19 nt, Artificial Sequence
  Description of Artificial Sequence: Synthetic oligonucleotide
gguuuggcacaggcagcga

SEQ ID NO: 2671569 - RNA, 19 nt, Artificial Sequence
  Description of Artificial Sequence: Synthetic oligonucleotide
gguggcugccuccguggua

SEQ ID NO: 2671570 - RNA, 19 nt, Artificial Sequence
  Description of Artificial Sequence: Synthetic oligonucleotide
gggaaauagcaaggacgcu

SEQ ID NO: 2671571 - RNA, 19 nt, Artificial Sequence
  Description of Artificial Sequence: Synthetic oligonucleotide
gggcagugugcucaaccau

SEQ ID NO: 2671572 - RNA, 19 nt, Artificial Sequence
  Description of Artificial Sequence: Synthetic oligonucleotide
gcgugcuuccccgaucucu

SEQ ID NO: 2671573 - RNA, 19 nt, Artificial Sequence
  Description of Artificial Sequence: Synthetic oligonucleotide
ggcagaggucaggccaguc

SEQ ID NO: 2671574 - RNA, 19 nt, Artificial Sequence
  Description of Artificial Sequence: Synthetic oligonucleotide
caggcgggcuggugcugca

SEQ ID NO: 2671575 - RNA, 19 nt, Artificial Sequence
  Description of Artificial Sequence: Synthetic oligonucleotide
gcguccagccauagugcca

SEQ ID NO: 2671576 - RNA, 19 nt, Artificial Sequence
  Description of Artificial Sequence: Synthetic oligonucleotide
gcggcuucacggaacaauu

SEQ ID NO: 2671577 - RNA, 19 nt, Artificial Sequence
  Description of Artificial Sequence: Synthetic oligonucleotide
gugcaucccgugacccaaa

SEQ ID NO: 2671578 - RNA, 19 nt, Artificial Sequence
  Description of Artificial Sequence: Synthetic oligonucleotide
gccauagugccaggguagu

SEQ ID NO: 2671579 - RNA, 19 nt, Artificial Sequence
  Description of Artificial Sequence: Synthetic oligonucleotide
cccaaagcguccagccaua

SEQ ID NO: 2671580 - RNA, 19 nt, Artificial Sequence
  Description of Artificial Sequence: Synthetic oligonucleotide
ccgugguagcgugcuuccc

SEQ ID NO: 2671581 - RNA, 19 nt, Artificial Sequence
  Description of Artificial Sequence: Synthetic oligonucleotide
aggcgggcuggugcugcau

SEQ ID NO: 2671582 - RNA, 19 nt, Artificial Sequence
  Description of Artificial Sequence: Synthetic oligonucleotide
ggggugccccuaaguccag

SEQ ID NO: 2671583 - RNA, 19 nt, Artificial Sequence
  Description of Artificial Sequence: Synthetic oligonucleotide
gcugucgccuuaggagcaa

SEQ ID NO: 2671584 - RNA, 19 nt, Artificial Sequence
  Description of Artificial Sequence: Synthetic oligonucleotide
cccgaucucugggcuccag

SEQ ID NO: 2671585 - RNA, 19 nt, Artificial Sequence
  Description of Artificial Sequence: Synthetic oligonucleotide
ccgugacccaaagcgucca

SEQ ID NO: 2671586 - RNA, 19 nt, Artificial Sequence
  Description of Artificial Sequence: Synthetic oligonucleotide
cucccaccaacaggccacu

SEQ ID NO: 2671587 - RNA, 19 nt, Artificial Sequence
  Description of Artificial Sequence: Synthetic oligonucleotide
ccaaaacagagcgcggcuu

SEQ ID NO: 2671588 - RNA, 19 nt, Artificial Sequence
  Description of Artificial Sequence: Synthetic oligonucleotide
ggguggcugccuccguggu

SEQ ID NO: 2671589 - RNA, 19 nt, Artificial Sequence
  Description of Artificial Sequence: Synthetic oligonucleotide
gaguagcggcuggcuggcu

SEQ ID NO: 2671590 - RNA, 19 nt, Artificial Sequence
  Description of Artificial Sequence: Synthetic oligonucleotide
gccccuaaguccagugcau

SEQ ID NO: 2671591 - RNA, 19 nt, Artificial Sequence
  Description of Artificial Sequence: Synthetic oligonucleotide
ggaccugguugugggguuu

SEQ ID NO: 2671592 - RNA, 19 nt, Artificial Sequence
  Description of Artificial Sequence: Synthetic oligonucleotide
ccuggccugcucaggggau

SEQ ID NO: 2671593 - RNA, 19 nt, Artificial Sequence
  Description of Artificial Sequence: Synthetic oligonucleotide
ggggagcuagggaccuggu

SEQ ID NO: 2671594 - RNA, 19 nt, Artificial Sequence
  Description of Artificial Sequence: Synthetic oligonucleotide
gggugccccuaaguccagu

SEQ ID NO: 2671595 - RNA, 19 nt, Artificial Sequence
  Description of Artificial Sequence: Synthetic oligonucleotide
gggcagaggucaggccagu

SEQ ID NO: 2671596 - RNA, 19 nt, Artificial Sequence
  Description of Artificial Sequence: Synthetic oligonucleotide
cggcuucacggaacaauuu

SEQ ID NO: 2671597 - RNA, 19 nt, Artificial Sequence
  Description of Artificial Sequence: Synthetic oligonucleotide
gcgcggcuucacggaacaa

SEQ ID NO: 2671598 - RNA, 19 nt, Artificial Sequence
  Description of Artificial Sequence: Synthetic oligonucleotide
ccccagagaugggcagcua

SEQ ID NO: 2671599 - RNA, 19 nt, Artificial Sequence
  Description of Artificial Sequence: Synthetic oligonucleotide
ccccgaucucugggcucca

SEQ ID NO: 2671600 - RNA, 19 nt, Artificial Sequence
  Description of Artificial Sequence: Synthetic oligonucleotide
gggcuccaggcgggcuggu

SEQ ID NO: 2671601 - RNA, 19 nt, Artificial Sequence
  Description of Artificial Sequence: Synthetic oligonucleotide
uucuaaaucagacagaagc

SEQ ID NO: 2671602 - RNA, 19 nt, Artificial Sequence
  Description of Artificial Sequence: Synthetic oligonucleotide
aagaauucaaauuuacuuc

SEQ ID NO: 2671603 - RNA, 19 nt, Artificial Sequence
  Description of Artificial Sequence: Synthetic oligonucleotide
aaagacuugggacucuucc

SEQ ID NO: 2671604 - RNA, 19 nt, Artificial Sequence
  Description of Artificial Sequence: Synthetic oligonucleotide
agagagagaguccaaagcc

SEQ ID NO: 2671605 - RNA, 19 nt, Artificial Sequence
  Description of Artificial Sequence: Synthetic oligonucleotide
uauagaagaauucaaauuu

SEQ ID NO: 2671606 - RNA, 19 nt, Artificial Sequence
  Description of Artificial Sequence: Synthetic oligonucleotide
aaccggaaaagucagagag

SEQ ID NO: 2671607 - RNA, 19 nt, Artificial Sequence
  Description of Artificial Sequence: Synthetic oligonucleotide
cucucuuuaacuuuggccg

SEQ ID NO: 2671608 - RNA, 19 nt, Artificial Sequence
  Description of Artificial Sequence: Synthetic oligonucleotide
gaaaucauugagcagacug

SEQ ID NO: 2671609 - RNA, 19 nt, Artificial Sequence
  Description of Artificial Sequence: Synthetic oligonucleotide
aaaagucagagagagaguc

SEQ ID NO: 2671610 - RNA, 19 nt, Artificial Sequence
  Description of Artificial Sequence: Synthetic oligonucleotide
ucaaauuuacuucuaaauc

SEQ ID NO: 2671611 - RNA, 19 nt, Artificial Sequence
  Description of Artificial Sequence: Synthetic oligonucleotide
acucucuuuaacuuuggcc

SEQ ID NO: 2671612 - RNA, 19 nt, Artificial Sequence
  Description of Artificial Sequence: Synthetic oligonucleotide
uguuccaucuguucuaugg

SEQ ID NO: 2671613 - RNA, 19 nt, Artificial Sequence
  Description of Artificial Sequence: Synthetic oligonucleotide
ucuaaaucagacagaagcc

SEQ ID NO: 2671614 - RNA, 19 nt, Artificial Sequence
  Description of Artificial Sequence: Synthetic oligonucleotide
aguagcuucauuaagacca

SEQ ID NO: 2671615 - RNA, 19 nt, Artificial Sequence
  Description of Artificial Sequence: Synthetic oligonucleotide
auucaagcgagcuaauuuc

SEQ ID NO: 2671616 - RNA, 19 nt, Artificial Sequence
  Description of Artificial Sequence: Synthetic oligonucleotide
cuauggaacauucauuucc

SEQ ID NO: 2671617 - RNA, 19 nt, Artificial Sequence
  Description of Artificial Sequence: Synthetic oligonucleotide
auuuccaaacgccugcagc

SEQ ID NO: 2671618 - RNA, 19 nt, Artificial Sequence
  Description of Artificial Sequence: Synthetic oligonucleotide
uuuacuucuaaaucagaca

SEQ ID NO: 2671619 - RNA, 19 nt, Artificial Sequence
  Description of Artificial Sequence: Synthetic oligonucleotide
uucaaauuuacuucuaaau

SEQ ID NO: 2671620 - RNA, 19 nt, Artificial Sequence
  Description of Artificial Sequence: Synthetic oligonucleotide
uucuuaaccggaaaaguca

SEQ ID NO: 2671621 - RNA, 19 nt, Artificial Sequence
  Description of Artificial Sequence: Synthetic oligonucleotide
auuuacuucuaaaucagac

SEQ ID NO: 2671622 - RNA, 19 nt, Artificial Sequence
  Description of Artificial Sequence: Synthetic oligonucleotide
gaauggaaaucauugagca

SEQ ID NO: 2671623 - RNA, 19 nt, Artificial Sequence
  Description of Artificial Sequence: Synthetic oligonucleotide
uguauagaagaauucaaau

SEQ ID NO: 2671624 - RNA, 19 nt, Artificial Sequence
  Description of Artificial Sequence: Synthetic oligonucleotide
cuuauccucaggaaguucc

SEQ ID NO: 2671625 - RNA, 19 nt, Artificial Sequence
  Description of Artificial Sequence: Synthetic oligonucleotide
gauuuccuuuucuuaaccg

SEQ ID NO: 2671626 - RNA, 19 nt, Artificial Sequence
  Description of Artificial Sequence: Synthetic oligonucleotide
uguuuuagguucuucguug

SEQ ID NO: 2671627 - RNA, 19 nt, Artificial Sequence
  Description of Artificial Sequence: Synthetic oligonucleotide
acaguagcuucauuaagac

SEQ ID NO: 2671628 - RNA, 19 nt, Artificial Sequence
  Description of Artificial Sequence: Synthetic oligonucleotide
uguucuauggaacauucau

SEQ ID NO: 2671629 - RNA, 19 nt, Artificial Sequence
  Description of Artificial Sequence: Synthetic oligonucleotide
auugagcagacugaggagc

SEQ ID NO: 2671630 - RNA, 19 nt, Artificial Sequence
  Description of Artificial Sequence: Synthetic oligonucleotide
aauggaaaucauugagcag

SEQ ID NO: 2671631 - RNA, 19 nt, Artificial Sequence
  Description of Artificial Sequence: Synthetic oligonucleotide
uuaaccggaaaagucagag

SEQ ID NO: 2671632 - RNA, 19 nt, Artificial Sequence
  Description of Artificial Sequence: Synthetic oligonucleotide
ucuuaaccggaaaagucag

SEQ ID NO: 2671633 - RNA, 19 nt, Artificial Sequence
  Description of Artificial Sequence: Synthetic oligonucleotide
ucagacagaagccugucca

SEQ ID NO: 2671634 - RNA, 19 nt, Artificial Sequence
  Description of Artificial Sequence: Synthetic oligonucleotide
uaaaucagacagaagccug

SEQ ID NO: 2671635 - RNA, 19 nt, Artificial Sequence
  Description of Artificial Sequence: Synthetic oligonucleotide
aauuucuccugcauucccc

SEQ ID NO: 2671636 - RNA, 19 nt, Artificial Sequence
  Description of Artificial Sequence: Synthetic oligonucleotide
uuucuuaaccggaaaaguc

SEQ ID NO: 2671637 - RNA, 19 nt, Artificial Sequence
  Description of Artificial Sequence: Synthetic oligonucleotide
guagagugggcacugaaag

SEQ ID NO: 2671638 - RNA, 19 nt, Artificial Sequence
  Description of Artificial Sequence: Synthetic oligonucleotide
uauggaacauucauuucca

SEQ ID NO: 2671639 - RNA, 19 nt, Artificial Sequence
  Description of Artificial Sequence: Synthetic oligonucleotide
uucauuuccaaacgccugc

SEQ ID NO: 2671640 - RNA, 19 nt, Artificial Sequence
  Description of Artificial Sequence: Synthetic oligonucleotide
cuucauuaagaccagagga

SEQ ID NO: 2671641 - RNA, 19 nt, Artificial Sequence
  Description of Artificial Sequence: Synthetic oligonucleotide
aaucauugagcagacugag

SEQ ID NO: 2671642 - RNA, 19 nt, Artificial Sequence
  Description of Artificial Sequence: Synthetic oligonucleotide
uccgcuuauccucaggaag

SEQ ID NO: 2671643 - RNA, 19 nt, Artificial Sequence
  Description of Artificial Sequence: Synthetic oligonucleotide
ucauuaagaccagaggaag

SEQ ID NO: 2671644 - RNA, 19 nt, Artificial Sequence
  Description of Artificial Sequence: Synthetic oligonucleotide
ggaacauucauuuccaaac

SEQ ID NO: 2671645 - RNA, 19 nt, Artificial Sequence
  Description of Artificial Sequence: Synthetic oligonucleotide
uuggcuauuuggcaaaccu

SEQ ID NO: 2671646 - RNA, 19 nt, Artificial Sequence
  Description of Artificial Sequence: Synthetic oligonucleotide
uucuguauagaagaauuca

SEQ ID NO: 2671647 - RNA, 19 nt, Artificial Sequence
  Description of Artificial Sequence: Synthetic oligonucleotide
ucuccuggacaucagagac

SEQ ID NO: 2671648 - RNA, 19 nt, Artificial Sequence
  Description of Artificial Sequence: Synthetic oligonucleotide
aacgccugcagcuuuccag

SEQ ID NO: 2671649 - RNA, 19 nt, Artificial Sequence
  Description of Artificial Sequence: Synthetic oligonucleotide
uuuccaaacgccugcagcu

SEQ ID NO: 2671650 - RNA, 19 nt, Artificial Sequence
  Description of Artificial Sequence: Synthetic oligonucleotide
uggagguuuguucuuuucc

SEQ ID NO: 2671651 - RNA, 19 nt, Artificial Sequence
  Description of Artificial Sequence: Synthetic oligonucleotide
gaccagaggaagaagaggc

SEQ ID NO: 2671652 - RNA, 19 nt, Artificial Sequence
  Description of Artificial Sequence: Synthetic oligonucleotide
ucagagagagaguccaaag

SEQ ID NO: 2671653 - RNA, 19 nt, Artificial Sequence
  Description of Artificial Sequence: Synthetic oligonucleotide
uuuucuuaaccggaaaagu

SEQ ID NO: 2671654 - RNA, 19 nt, Artificial Sequence
  Description of Artificial Sequence: Synthetic oligonucleotide
ucagagacgucugugagga

SEQ ID NO: 2671655 - RNA, 19 nt, Artificial Sequence
  Description of Artificial Sequence: Synthetic oligonucleotide
gaaggaaugcuggaugggg

SEQ ID NO: 2671656 - RNA, 19 nt, Artificial Sequence
  Description of Artificial Sequence: Synthetic oligonucleotide
uacgauuuccuuuucuuaa

SEQ ID NO: 2671657 - RNA, 19 nt, Artificial Sequence
  Description of Artificial Sequence: Synthetic oligonucleotide
agaagaggcuacgauuucc

SEQ ID NO: 2671658 - RNA, 19 nt, Artificial Sequence
  Description of Artificial Sequence: Synthetic oligonucleotide
ucuaacucuccguagaguu

SEQ ID NO: 2671659 - RNA, 19 nt, Artificial Sequence
  Description of Artificial Sequence: Synthetic oligonucleotide
ucuguucuauggaacauuc

SEQ ID NO: 2671660 - RNA, 19 nt, Artificial Sequence
  Description of Artificial Sequence: Synthetic oligonucleotide
cuuuucuuaaccggaaaag

SEQ ID NO: 2671661 - RNA, 19 nt, Artificial Sequence
  Description of Artificial Sequence: Synthetic oligonucleotide
uucuucguugcaucaacag

SEQ ID NO: 2671662 - RNA, 19 nt, Artificial Sequence
  Description of Artificial Sequence: Synthetic oligonucleotide
uuuccgcuuauccucagga

SEQ ID NO: 2671663 - RNA, 19 nt, Artificial Sequence
  Description of Artificial Sequence: Synthetic oligonucleotide
cuuuuacuagcugggaugg

SEQ ID NO: 2671664 - RNA, 19 nt, Artificial Sequence
  Description of Artificial Sequence: Synthetic oligonucleotide
agacuugggacucuuccuc

SEQ ID NO: 2671665 - RNA, 19 nt, Artificial Sequence
  Description of Artificial Sequence: Synthetic oligonucleotide
aaaucauugagcagacuga

SEQ ID NO: 2671666 - RNA, 19 nt, Artificial Sequence
  Description of Artificial Sequence: Synthetic oligonucleotide
aagaagaggcuacgauuuc

SEQ ID NO: 2671667 - RNA, 19 nt, Artificial Sequence
  Description of Artificial Sequence: Synthetic oligonucleotide
ucuucguugcaucaacagu

SEQ ID NO: 2671668 - RNA, 19 nt, Artificial Sequence
  Description of Artificial Sequence: Synthetic oligonucleotide
uuucuguauagaagaauuc

SEQ ID NO: 2671669 - RNA, 19 nt, Artificial Sequence
  Description of Artificial Sequence: Synthetic oligonucleotide
acgauuuccuuuucuuaac

SEQ ID NO: 2671670 - RNA, 19 nt, Artificial Sequence
  Description of Artificial Sequence: Synthetic oligonucleotide
uccguagaguuccaaauuc

SEQ ID NO: 2671671 - RNA, 19 nt, Artificial Sequence
  Description of Artificial Sequence: Synthetic oligonucleotide
uuuacuagcugggauggca

SEQ ID NO: 2671672 - RNA, 19 nt, Artificial Sequence
  Description of Artificial Sequence: Synthetic oligonucleotide
uuuggcaaaccugaguaga

SEQ ID NO: 2671673 - RNA, 19 nt, Artificial Sequence
  Description of Artificial Sequence: Synthetic oligonucleotide
aaguuccucuaacucuccg

SEQ ID NO: 2671674 - RNA, 19 nt, Artificial Sequence
  Description of Artificial Sequence: Synthetic oligonucleotide
aagacuugggacucuuccu

SEQ ID NO: 2671675 - RNA, 19 nt, Artificial Sequence
  Description of Artificial Sequence: Synthetic oligonucleotide
uucguugcaucaacaguag

SEQ ID NO: 2671676 - RNA, 19 nt, Artificial Sequence
  Description of Artificial Sequence: Synthetic oligonucleotide
gaggaaggaaugcuggaug

SEQ ID NO: 2671677 - RNA, 19 nt, Artificial Sequence
  Description of Artificial Sequence: Synthetic oligonucleotide
uuggcaaaccugaguagag

SEQ ID NO: 2671678 - RNA, 19 nt, Artificial Sequence
  Description of Artificial Sequence: Synthetic oligonucleotide
caagcgagcuaauuucucc

SEQ ID NO: 2671679 - RNA, 19 nt, Artificial Sequence
  Description of Artificial Sequence: Synthetic oligonucleotide
aagcccgugcuuuuacuag

SEQ ID NO: 2671680 - RNA, 19 nt, Artificial Sequence
  Description of Artificial Sequence: Synthetic oligonucleotide
uaacucuccguagaguucc

SEQ ID NO: 2671681 - RNA, 19 nt, Artificial Sequence
  Description of Artificial Sequence: Synthetic oligonucleotide
caaaccugaguagaguggg

SEQ ID NO: 2671682 - RNA, 19 nt, Artificial Sequence
  Description of Artificial Sequence: Synthetic oligonucleotide
acuucuaaaucagacagaa

SEQ ID NO: 2671683 - RNA, 19 nt, Artificial Sequence
  Description of Artificial Sequence: Synthetic oligonucleotide
aucagagacgucugugagg

SEQ ID NO: 2671684 - RNA, 19 nt, Artificial Sequence
  Description of Artificial Sequence: Synthetic oligonucleotide
aagcgagcuaauuucuccu

SEQ ID NO: 2671685 - RNA, 19 nt, Artificial Sequence
  Description of Artificial Sequence: Synthetic oligonucleotide
uucaagcgagcuaauuucu

SEQ ID NO: 2671686 - RNA, 19 nt, Artificial Sequence
  Description of Artificial Sequence: Synthetic oligonucleotide
aacuuuggccgcugggaag

SEQ ID NO: 2671687 - RNA, 19 nt, Artificial Sequence
  Description of Artificial Sequence: Synthetic oligonucleotide
ugggaaguugacugugccg

SEQ ID NO: 2671688 - RNA, 19 nt, Artificial Sequence
  Description of Artificial Sequence: Synthetic oligonucleotide
uccucuaacucuccguaga

SEQ ID NO: 2671689 - RNA, 19 nt, Artificial Sequence
  Description of Artificial Sequence: Synthetic oligonucleotide
uccaucuguucuauggaac

SEQ ID NO: 2671690 - RNA, 19 nt, Artificial Sequence
  Description of Artificial Sequence: Synthetic oligonucleotide
uguucuuuuccuucaucac

SEQ ID NO: 2671691 - RNA, 19 nt, Artificial Sequence
  Description of Artificial Sequence: Synthetic oligonucleotide
aucugccaaaugcaguuuc

SEQ ID NO: 2671692 - RNA, 19 nt, Artificial Sequence
  Description of Artificial Sequence: Synthetic oligonucleotide
aagaccagaggaagaagag

SEQ ID NO: 2671693 - RNA, 19 nt, Artificial Sequence
  Description of Artificial Sequence: Synthetic oligonucleotide
ucucuuuaacuuuggccgc

SEQ ID NO: 2671694 - RNA, 19 nt, Artificial Sequence
  Description of Artificial Sequence: Synthetic oligonucleotide
cuuccucuuagcuuuccgc

SEQ ID NO: 2671695 - RNA, 19 nt, Artificial Sequence
  Description of Artificial Sequence: Synthetic oligonucleotide
uggaacauucauuuccaaa

SEQ ID NO: 2671696 - RNA, 19 nt, Artificial Sequence
  Description of Artificial Sequence: Synthetic oligonucleotide
gcaguuucuguauagaaga

SEQ ID NO: 2671697 - RNA, 19 nt, Artificial Sequence
  Description of Artificial Sequence: Synthetic oligonucleotide
agagacgucugugaggaag

SEQ ID NO: 2671698 - RNA, 19 nt, Artificial Sequence
  Description of Artificial Sequence: Synthetic oligonucleotide
uggcuauuuggcaaaccug

SEQ ID NO: 2671699 - RNA, 19 nt, Artificial Sequence
  Description of Artificial Sequence: Synthetic oligonucleotide
uuugaaaagcccgugcuuu

SEQ ID NO: 2671700 - RNA, 19 nt, Artificial Sequence
  Description of Artificial Sequence: Synthetic oligonucleotide
gcuucauuaagaccagagg

SEQ ID NO: 2671701 - RNA, 19 nt, Artificial Sequence
  Description of Artificial Sequence: Synthetic oligonucleotide
uuccucuuagcuuuccgcu

SEQ ID NO: 2671702 - RNA, 19 nt, Artificial Sequence
  Description of Artificial Sequence: Synthetic oligonucleotide
cuuagcuuuccgcucuucc

SEQ ID NO: 2671703 - RNA, 19 nt, Artificial Sequence
  Description of Artificial Sequence: Synthetic oligonucleotide
ugccgcaggauuugaaaag

SEQ ID NO: 2671704 - RNA, 19 nt, Artificial Sequence
  Description of Artificial Sequence: Synthetic oligonucleotide
auuaagaccagaggaagaa

SEQ ID NO: 2671705 - RNA, 19 nt, Artificial Sequence
  Description of Artificial Sequence: Synthetic oligonucleotide
guuuuagguucuucguugc

SEQ ID NO: 2671706 - RNA, 19 nt, Artificial Sequence
  Description of Artificial Sequence: Synthetic oligonucleotide
cauuccccggacauguucc

SEQ ID NO: 2671707 - RNA, 19 nt, Artificial Sequence
  Description of Artificial Sequence: Synthetic oligonucleotide
agcccgugcuuuuacuagc

SEQ ID NO: 2671708 - RNA, 19 nt, Artificial Sequence
  Description of Artificial Sequence: Synthetic oligonucleotide
uuguuuuagguucuucguu

SEQ ID NO: 2671709 - RNA, 19 nt, Artificial Sequence
  Description of Artificial Sequence: Synthetic oligonucleotide
uuagguucuucguugcauc

SEQ ID NO: 2671710 - RNA, 19 nt, Artificial Sequence
  Description of Artificial Sequence: Synthetic oligonucleotide
aaaagcccgugcuuuuacu

SEQ ID NO: 2671711 - RNA, 19 nt, Artificial Sequence
  Description of Artificial Sequence: Synthetic oligonucleotide
uugacugugccgcaggauu

SEQ ID NO: 2671712 - RNA, 19 nt, Artificial Sequence
  Description of Artificial Sequence: Synthetic oligonucleotide
cuucguugcaucaacagua

SEQ ID NO: 2671713 - RNA, 19 nt, Artificial Sequence
  Description of Artificial Sequence: Synthetic oligonucleotide
uggaaaucauugagcagac

SEQ ID NO: 2671714 - RNA, 19 nt, Artificial Sequence
  Description of Artificial Sequence: Synthetic oligonucleotide
uuaagaccagaggaagaag

SEQ ID NO: 2671715 - RNA, 19 nt, Artificial Sequence
  Description of Artificial Sequence: Synthetic oligonucleotide
gcuaauuucuccugcauuc

SEQ ID NO: 2671716 - RNA, 19 nt, Artificial Sequence
  Description of Artificial Sequence: Synthetic oligonucleotide
gauuugaaaagcccgugcu

SEQ ID NO: 2671717 - RNA, 19 nt, Artificial Sequence
  Description of Artificial Sequence: Synthetic oligonucleotide
ucuccguagaguuccaaau

SEQ ID NO: 2671718 - RNA, 19 nt, Artificial Sequence
  Description of Artificial Sequence: Synthetic oligonucleotide
aauuuacuucuaaaucaga

SEQ ID NO: 2671719 - RNA, 19 nt, Artificial Sequence
  Description of Artificial Sequence: Synthetic oligonucleotide
ugcuuuuacuagcugggau

SEQ ID NO: 2671720 - RNA, 19 nt, Artificial Sequence
  Description of Artificial Sequence: Synthetic oligonucleotide
aaagcccgugcuuuuacua

SEQ ID NO: 2671721 - RNA, 19 nt, Artificial Sequence
  Description of Artificial Sequence: Synthetic oligonucleotide
uccaaauucaagcgagcua

SEQ ID NO: 2671722 - RNA, 19 nt, Artificial Sequence
  Description of Artificial Sequence: Synthetic oligonucleotide
ugcaucugccaaaugcagu

SEQ ID NO: 2671723 - RNA, 19 nt, Artificial Sequence
  Description of Artificial Sequence: Synthetic oligonucleotide
ucugugaggaaggaaugcu

SEQ ID NO: 2671724 - RNA, 19 nt, Artificial Sequence
  Description of Artificial Sequence: Synthetic oligonucleotide
gcuuuuacuagcugggaug

SEQ ID NO: 2671725 - RNA, 19 nt, Artificial Sequence
  Description of Artificial Sequence: Synthetic oligonucleotide
uccuggacaucagagacgu

SEQ ID NO: 2671726 - RNA, 19 nt, Artificial Sequence
  Description of Artificial Sequence: Synthetic oligonucleotide
agcuucauuaagaccagag

SEQ ID NO: 2671727 - RNA, 19 nt, Artificial Sequence
  Description of Artificial Sequence: Synthetic oligonucleotide
gagacgucugugaggaagg

SEQ ID NO: 2671728 - RNA, 19 nt, Artificial Sequence
  Description of Artificial Sequence: Synthetic oligonucleotide
ucuauggaacauucauuuc

SEQ ID NO: 2671729 - RNA, 19 nt, Artificial Sequence
  Description of Artificial Sequence: Synthetic oligonucleotide
uuccaaauucaagcgagcu

SEQ ID NO: 2671730 - RNA, 19 nt, Artificial Sequence
  Description of Artificial Sequence: Synthetic oligonucleotide
caucagagacgucugugag

SEQ ID NO: 2671731 - RNA, 19 nt, Artificial Sequence
  Description of Artificial Sequence: Synthetic oligonucleotide
cauugagcagacugaggag

SEQ ID NO: 2671732 - RNA, 19 nt, Artificial Sequence
  Description of Artificial Sequence: Synthetic oligonucleotide
gcaggauuugaaaagcccg

SEQ ID NO: 2671733 - RNA, 19 nt, Artificial Sequence
  Description of Artificial Sequence: Synthetic oligonucleotide
uaacuuuggccgcugggaa

SEQ ID NO: 2671734 - RNA, 19 nt, Artificial Sequence
  Description of Artificial Sequence: Synthetic oligonucleotide
uuuagguucuucguugcau

SEQ ID NO: 2671735 - RNA, 19 nt, Artificial Sequence
  Description of Artificial Sequence: Synthetic oligonucleotide
cuguauagaagaauucaaa

SEQ ID NO: 2671736 - RNA, 19 nt, Artificial Sequence
  Description of Artificial Sequence: Synthetic oligonucleotide
guauagaagaauucaaauu

SEQ ID NO: 2671737 - RNA, 19 nt, Artificial Sequence
  Description of Artificial Sequence: Synthetic oligonucleotide
aguuccucuaacucuccgu

SEQ ID NO: 2671738 - RNA, 19 nt, Artificial Sequence
  Description of Artificial Sequence: Synthetic oligonucleotide
ugugccgcaggauuugaaa

SEQ ID NO: 2671739 - RNA, 19 nt, Artificial Sequence
  Description of Artificial Sequence: Synthetic oligonucleotide
gaaaagcccgugcuuuuac

SEQ ID NO: 2671740 - RNA, 19 nt, Artificial Sequence
  Description of Artificial Sequence: Synthetic oligonucleotide
caguagcuucauuaagacc

SEQ ID NO: 2671741 - RNA, 19 nt, Artificial Sequence
  Description of Artificial Sequence: Synthetic oligonucleotide
caggaaguuccucuaacuc

SEQ ID NO: 2671742 - RNA, 19 nt, Artificial Sequence
  Description of Artificial Sequence: Synthetic oligonucleotide
aggaagaagaggcuacgau

SEQ ID NO: 2671743 - RNA, 19 nt, Artificial Sequence
  Description of Artificial Sequence: Synthetic oligonucleotide
cuucuaaaucagacagaag

SEQ ID NO: 2671744 - RNA, 19 nt, Artificial Sequence
  Description of Artificial Sequence: Synthetic oligonucleotide
agaggaagaagaggcuacg

SEQ ID NO: 2671745 - RNA, 19 nt, Artificial Sequence
  Description of Artificial Sequence: Synthetic oligonucleotide
uuacuagcugggauggcau

SEQ ID NO: 2671746 - RNA, 19 nt, Artificial Sequence
  Description of Artificial Sequence: Synthetic oligonucleotide
uaaccggaaaagucagaga

SEQ ID NO: 2671747 - RNA, 19 nt, Artificial Sequence
  Description of Artificial Sequence: Synthetic oligonucleotide
ucaagcgagcuaauuucuc

SEQ ID NO: 2671748 - RNA, 19 nt, Artificial Sequence
  Description of Artificial Sequence: Synthetic oligonucleotide
uuccauuguuuuagguucu

SEQ ID NO: 2671749 - RNA, 19 nt, Artificial Sequence
  Description of Artificial Sequence: Synthetic oligonucleotide
uuccucuaacucuccguag

SEQ ID NO: 2671750 - RNA, 19 nt, Artificial Sequence
  Description of Artificial Sequence: Synthetic oligonucleotide
uuggccgcugggaaguuga

SEQ ID NO: 2671751 - RNA, 19 nt, Artificial Sequence
  Description of Artificial Sequence: Synthetic oligonucleotide
uucuccugcauuccccgga

SEQ ID NO: 2671752 - RNA, 19 nt, Artificial Sequence
  Description of Artificial Sequence: Synthetic oligonucleotide
ggauuugaaaagcccgugc

SEQ ID NO: 2671753 - RNA, 19 nt, Artificial Sequence
  Description of Artificial Sequence: Synthetic oligonucleotide
agaggcuacgauuuccuuu

SEQ ID NO: 2671754 - RNA, 19 nt, Artificial Sequence
  Description of Artificial Sequence: Synthetic oligonucleotide
agacagaagccuguccagg

SEQ ID NO: 2671755 - RNA, 19 nt, Artificial Sequence
  Description of Artificial Sequence: Synthetic oligonucleotide
uagcuuuccgcucuuccau

SEQ ID NO: 2671756 - RNA, 19 nt, Artificial Sequence
  Description of Artificial Sequence: Synthetic oligonucleotide
uagguucuucguugcauca

SEQ ID NO: 2671757 - RNA, 19 nt, Artificial Sequence
  Description of Artificial Sequence: Synthetic oligonucleotide
cuuuaacuuuggccgcugg

SEQ ID NO: 2671758 - RNA, 19 nt, Artificial Sequence
  Description of Artificial Sequence: Synthetic oligonucleotide
aaauucaagcgagcuaauu

SEQ ID NO: 2671759 - RNA, 19 nt, Artificial Sequence
  Description of Artificial Sequence: Synthetic oligonucleotide
cugggaaguugacugugcc

SEQ ID NO: 2671760 - RNA, 19 nt, Artificial Sequence
  Description of Artificial Sequence: Synthetic oligonucleotide
cucaggaaguuccucuaac

SEQ ID NO: 2671761 - RNA, 19 nt, Artificial Sequence
  Description of Artificial Sequence: Synthetic oligonucleotide
uccuuuucuuaaccggaaa

SEQ ID NO: 2671762 - RNA, 19 nt, Artificial Sequence
  Description of Artificial Sequence: Synthetic oligonucleotide
cauuaagaccagaggaaga

SEQ ID NO: 2671763 - RNA, 19 nt, Artificial Sequence
  Description of Artificial Sequence: Synthetic oligonucleotide
agguuggcgucgcuggccg

SEQ ID NO: 2671764 - RNA, 19 nt, Artificial Sequence
  Description of Artificial Sequence: Synthetic oligonucleotide
cuucaucacucucuuuaac

SEQ ID NO: 2671765 - RNA, 19 nt, Artificial Sequence
  Description of Artificial Sequence: Synthetic oligonucleotide
cuaacucuccguagaguuc

SEQ ID NO: 2671766 - RNA, 19 nt, Artificial Sequence
  Description of Artificial Sequence: Synthetic oligonucleotide
agcuaauuucuccugcauu

SEQ ID NO: 2671767 - RNA, 19 nt, Artificial Sequence
  Description of Artificial Sequence: Synthetic oligonucleotide
auagaagaauucaaauuua

SEQ ID NO: 2671768 - RNA, 19 nt, Artificial Sequence
  Description of Artificial Sequence: Synthetic oligonucleotide
gaaguugacugugccgcag

SEQ ID NO: 2671769 - RNA, 19 nt, Artificial Sequence
  Description of Artificial Sequence: Synthetic oligonucleotide
cagaagccuguccagguug

SEQ ID NO: 2671770 - RNA, 19 nt, Artificial Sequence
  Description of Artificial Sequence: Synthetic oligonucleotide
gacucuuccucuuagcuuu

SEQ ID NO: 2671771 - RNA, 19 nt, Artificial Sequence
  Description of Artificial Sequence: Synthetic oligonucleotide
uuuggcuauuuggcaaacc

SEQ ID NO: 2671772 - RNA, 19 nt, Artificial Sequence
  Description of Artificial Sequence: Synthetic oligonucleotide
ucguugcaucaacaguagc

SEQ ID NO: 2671773 - RNA, 19 nt, Artificial Sequence
  Description of Artificial Sequence: Synthetic oligonucleotide
agcgagcuaauuucuccug

SEQ ID NO: 2671774 - RNA, 19 nt, Artificial Sequence
  Description of Artificial Sequence: Synthetic oligonucleotide
agccuguccagguuggcgu

SEQ ID NO: 2671775 - RNA, 19 nt, Artificial Sequence
  Description of Artificial Sequence: Synthetic oligonucleotide
cacccuucccuucuccucc

SEQ ID NO: 2671776 - RNA, 19 nt, Artificial Sequence
  Description of Artificial Sequence: Synthetic oligonucleotide
gaagaagaggcuacgauuu

SEQ ID NO: 2671777 - RNA, 19 nt, Artificial Sequence
  Description of Artificial Sequence: Synthetic oligonucleotide
gccgcugggaaguugacug

SEQ ID NO: 2671778 - RNA, 19 nt, Artificial Sequence
  Description of Artificial Sequence: Synthetic oligonucleotide
cuuuccgcuuauccucagg

SEQ ID NO: 2671779 - RNA, 19 nt, Artificial Sequence
  Description of Artificial Sequence: Synthetic oligonucleotide
acgucugugaggaaggaau

SEQ ID NO: 2671780 - RNA, 19 nt, Artificial Sequence
  Description of Artificial Sequence: Synthetic oligonucleotide
aggauuugaaaagcccgug

SEQ ID NO: 2671781 - RNA, 19 nt, Artificial Sequence
  Description of Artificial Sequence: Synthetic oligonucleotide
ggcacugaaagacuuggga

SEQ ID NO: 2671782 - RNA, 19 nt, Artificial Sequence
  Description of Artificial Sequence: Synthetic oligonucleotide
ccggaaaagucagagagag

SEQ ID NO: 2671783 - RNA, 19 nt, Artificial Sequence
  Description of Artificial Sequence: Synthetic oligonucleotide
uggucugagcacccuuccc

SEQ ID NO: 2671784 - RNA, 19 nt, Artificial Sequence
  Description of Artificial Sequence: Synthetic oligonucleotide
uccucuuagcuuuccgcuc

SEQ ID NO: 2671785 - RNA, 19 nt, Artificial Sequence
  Description of Artificial Sequence: Synthetic oligonucleotide
cgugcuuuuacuagcuggg

SEQ ID NO: 2671786 - RNA, 19 nt, Artificial Sequence
  Description of Artificial Sequence: Synthetic oligonucleotide
ccgugcuuuuacuagcugg

SEQ ID NO: 2671787 - RNA, 19 nt, Artificial Sequence
  Description of Artificial Sequence: Synthetic oligonucleotide
guagcuucauuaagaccag

SEQ ID NO: 2671788 - RNA, 19 nt, Artificial Sequence
  Description of Artificial Sequence: Synthetic oligonucleotide
acuuuggccgcugggaagu

SEQ ID NO: 2671789 - RNA, 19 nt, Artificial Sequence
  Description of Artificial Sequence: Synthetic oligonucleotide
ggcuauuuggcaaaccuga

SEQ ID NO: 2671790 - RNA, 19 nt, Artificial Sequence
  Description of Artificial Sequence: Synthetic oligonucleotide
cacugaaagacuugggacu

SEQ ID NO: 2671791 - RNA, 19 nt, Artificial Sequence
  Description of Artificial Sequence: Synthetic oligonucleotide
acgccugcagcuuuccaga

SEQ ID NO: 2671792 - RNA, 19 nt, Artificial Sequence
  Description of Artificial Sequence: Synthetic oligonucleotide
gucugugaggaaggaaugc

SEQ ID NO: 2671793 - RNA, 19 nt, Artificial Sequence
  Description of Artificial Sequence: Synthetic oligonucleotide
cuaaaucagacagaagccu

SEQ ID NO: 2671794 - RNA, 19 nt, Artificial Sequence
  Description of Artificial Sequence: Synthetic oligonucleotide
gguucuucguugcaucaac

SEQ ID NO: 2671795 - RNA, 19 nt, Artificial Sequence
  Description of Artificial Sequence: Synthetic oligonucleotide
gcaaaccugaguagagugg

SEQ ID NO: 2671796 - RNA, 19 nt, Artificial Sequence
  Description of Artificial Sequence: Synthetic oligonucleotide
uugaaaagcccgugcuuuu

SEQ ID NO: 2671797 - RNA, 19 nt, Artificial Sequence
  Description of Artificial Sequence: Synthetic oligonucleotide
aagaggcuacgauuuccuu

SEQ ID NO: 2671798 - RNA, 19 nt, Artificial Sequence
  Description of Artificial Sequence: Synthetic oligonucleotide
ugacugugccgcaggauuu

SEQ ID NO: 2671799 - RNA, 19 nt, Artificial Sequence
  Description of Artificial Sequence: Synthetic oligonucleotide
guuccucuaacucuccgua

SEQ ID NO: 2671800 - RNA, 19 nt, Artificial Sequence
  Description of Artificial Sequence: Synthetic oligonucleotide
uuuuggcuauuuggcaaac

SEQ ID NO: 2671801 - RNA, 19 nt, Artificial Sequence
  Description of Artificial Sequence: Synthetic oligonucleotide
uuuccgcucuuccauuguu

SEQ ID NO: 2671802 - RNA, 19 nt, Artificial Sequence
  Description of Artificial Sequence: Synthetic oligonucleotide
gaggcuacgauuuccuuuu

SEQ ID NO: 2671803 - RNA, 19 nt, Artificial Sequence
  Description of Artificial Sequence: Synthetic oligonucleotide
aaacgccugcagcuuucca

SEQ ID NO: 2671804 - RNA, 19 nt, Artificial Sequence
  Description of Artificial Sequence: Synthetic oligonucleotide
uuuuacuagcugggauggc

SEQ ID NO: 2671805 - RNA, 19 nt, Artificial Sequence
  Description of Artificial Sequence: Synthetic oligonucleotide
uccgcucuuccauuguuuu

SEQ ID NO: 2671806 - RNA, 19 nt, Artificial Sequence
  Description of Artificial Sequence: Synthetic oligonucleotide
gaaguuccucuaacucucc

SEQ ID NO: 2671807 - RNA, 19 nt, Artificial Sequence
  Description of Artificial Sequence: Synthetic oligonucleotide
gugcaucugccaaaugcag

SEQ ID NO: 2671808 - RNA, 19 nt, Artificial Sequence
  Description of Artificial Sequence: Synthetic oligonucleotide
cuacgauuuccuuuucuua

SEQ ID NO: 2671809 - RNA, 19 nt, Artificial Sequence
  Description of Artificial Sequence: Synthetic oligonucleotide
uuccgcuuauccucaggaa

SEQ ID NO: 2671810 - RNA, 19 nt, Artificial Sequence
  Description of Artificial Sequence: Synthetic oligonucleotide
aguagagugggcacugaaa

SEQ ID NO: 2671811 - RNA, 19 nt, Artificial Sequence
  Description of Artificial Sequence: Synthetic oligonucleotide
ucgcuggccgcuuuccgcu

SEQ ID NO: 2671812 - RNA, 19 nt, Artificial Sequence
  Description of Artificial Sequence: Synthetic oligonucleotide
uccaaacgccugcagcuuu

SEQ ID NO: 2671813 - RNA, 19 nt, Artificial Sequence
  Description of Artificial Sequence: Synthetic oligonucleotide
guggucugagcacccuucc

SEQ ID NO: 2671814 - RNA, 19 nt, Artificial Sequence
  Description of Artificial Sequence: Synthetic oligonucleotide
gucgcuggccgcuuuccgc

SEQ ID NO: 2671815 - RNA, 19 nt, Artificial Sequence
  Description of Artificial Sequence: Synthetic oligonucleotide
cauccugugcaucugccaa

SEQ ID NO: 2671816 - RNA, 19 nt, Artificial Sequence
  Description of Artificial Sequence: Synthetic oligonucleotide
ugaaagacuugggacucuu

SEQ ID NO: 2671817 - RNA, 19 nt, Artificial Sequence
  Description of Artificial Sequence: Synthetic oligonucleotide
gacagaagccuguccaggu

SEQ ID NO: 2671818 - RNA, 19 nt, Artificial Sequence
  Description of Artificial Sequence: Synthetic oligonucleotide
ugaaaagcccgugcuuuua

SEQ ID NO: 2671819 - RNA, 19 nt, Artificial Sequence
  Description of Artificial Sequence: Synthetic oligonucleotide
cuuaaccggaaaagucaga

SEQ ID NO: 2671820 - RNA, 19 nt, Artificial Sequence
  Description of Artificial Sequence: Synthetic oligonucleotide
gugaggaaggaaugcugga

SEQ ID NO: 2671821 - RNA, 19 nt, Artificial Sequence
  Description of Artificial Sequence: Synthetic oligonucleotide
ggaaggaaugcuggauggg

SEQ ID NO: 2671822 - RNA, 19 nt, Artificial Sequence
  Description of Artificial Sequence: Synthetic oligonucleotide
ugagcagacugaggagccc

SEQ ID NO: 2671823 - RNA, 19 nt, Artificial Sequence
  Description of Artificial Sequence: Synthetic oligonucleotide
gaguagagugggcacugaa

SEQ ID NO: 2671824 - RNA, 19 nt, Artificial Sequence
  Description of Artificial Sequence: Synthetic oligonucleotide
gagagagaguccaaagccu

SEQ ID NO: 2671825 - RNA, 19 nt, Artificial Sequence
  Description of Artificial Sequence: Synthetic oligonucleotide
auggaacauucauuuccaa

SEQ ID NO: 2671826 - RNA, 19 nt, Artificial Sequence
  Description of Artificial Sequence: Synthetic oligonucleotide
ucugagcacccuucccuuc

SEQ ID NO: 2671827 - RNA, 19 nt, Artificial Sequence
  Description of Artificial Sequence: Synthetic oligonucleotide
uccccggacauguuccauc

SEQ ID NO: 2671828 - RNA, 19 nt, Artificial Sequence
  Description of Artificial Sequence: Synthetic oligonucleotide
gaggaagaagaggcuacga

SEQ ID NO: 2671829 - RNA, 19 nt, Artificial Sequence
  Description of Artificial Sequence: Synthetic oligonucleotide
cuauuuggcaaaccugagu

SEQ ID NO: 2671830 - RNA, 19 nt, Artificial Sequence
  Description of Artificial Sequence: Synthetic oligonucleotide
aucuguucuauggaacauu

SEQ ID NO: 2671831 - RNA, 19 nt, Artificial Sequence
  Description of Artificial Sequence: Synthetic oligonucleotide
gacugugccgcaggauuug

SEQ ID NO: 2671832 - RNA, 19 nt, Artificial Sequence
  Description of Artificial Sequence: Synthetic oligonucleotide
gcgagcuaauuucuccugc

SEQ ID NO: 2671833 - RNA, 19 nt, Artificial Sequence
  Description of Artificial Sequence: Synthetic oligonucleotide
gugccgcaggauuugaaaa

SEQ ID NO: 2671834 - RNA, 19 nt, Artificial Sequence
  Description of Artificial Sequence: Synthetic oligonucleotide
cgcaggauuugaaaagccc

SEQ ID NO: 2671835 - RNA, 19 nt, Artificial Sequence
  Description of Artificial Sequence: Synthetic oligonucleotide
ggacauguuccaucuguuc

SEQ ID NO: 2671836 - RNA, 19 nt, Artificial Sequence
  Description of Artificial Sequence: Synthetic oligonucleotide
cuguucuauggaacauuca

SEQ ID NO: 2671837 - RNA, 19 nt, Artificial Sequence
  Description of Artificial Sequence: Synthetic oligonucleotide
ucgcuccaucuccuggaca

SEQ ID NO: 2671838 - RNA, 19 nt, Artificial Sequence
  Description of Artificial Sequence: Synthetic oligonucleotide
auuccccggacauguucca

SEQ ID NO: 2671839 - RNA, 19 nt, Artificial Sequence
  Description of Artificial Sequence: Synthetic oligonucleotide
gcucuuccauuguuuuagg

SEQ ID NO: 2671840 - RNA, 19 nt, Artificial Sequence
  Description of Artificial Sequence: Synthetic oligonucleotide
acuagcugggauggcauuu

SEQ ID NO: 2671841 - RNA, 19 nt, Artificial Sequence
  Description of Artificial Sequence: Synthetic oligonucleotide
gaaagacuugggacucuuc

SEQ ID NO: 2671842 - RNA, 19 nt, Artificial Sequence
  Description of Artificial Sequence: Synthetic oligonucleotide
caggauuugaaaagcccgu

SEQ ID NO: 2671843 - RNA, 19 nt, Artificial Sequence
  Description of Artificial Sequence: Synthetic oligonucleotide
gaaaagucagagagagagu

SEQ ID NO: 2671844 - RNA, 19 nt, Artificial Sequence
  Description of Artificial Sequence: Synthetic oligonucleotide
gcuauuuggcaaaccugag

SEQ ID NO: 2671845 - RNA, 19 nt, Artificial Sequence
  Description of Artificial Sequence: Synthetic oligonucleotide
ggaagaagaggcuacgauu

SEQ ID NO: 2671846 - RNA, 19 nt, Artificial Sequence
  Description of Artificial Sequence: Synthetic oligonucleotide
accggaaaagucagagaga

SEQ ID NO: 2671847 - RNA, 19 nt, Artificial Sequence
  Description of Artificial Sequence: Synthetic oligonucleotide
uuuggccgcugggaaguug

SEQ ID NO: 2671848 - RNA, 19 nt, Artificial Sequence
  Description of Artificial Sequence: Synthetic oligonucleotide
cgauuuccuuuucuuaacc

SEQ ID NO: 2671849 - RNA, 19 nt, Artificial Sequence
  Description of Artificial Sequence: Synthetic oligonucleotide
auguuccaucuguucuaug

SEQ ID NO: 2671850 - RNA, 19 nt, Artificial Sequence
  Description of Artificial Sequence: Synthetic oligonucleotide
ccagaauggaaaucauuga

SEQ ID NO: 2671851 - RNA, 19 nt, Artificial Sequence
  Description of Artificial Sequence: Synthetic oligonucleotide
ugaguagagugggcacuga

SEQ ID NO: 2671852 - RNA, 19 nt, Artificial Sequence
  Description of Artificial Sequence: Synthetic oligonucleotide
ccaucuguucuauggaaca

SEQ ID NO: 2671853 - RNA, 19 nt, Artificial Sequence
  Description of Artificial Sequence: Synthetic oligonucleotide
aggcuacgauuuccuuuuc

SEQ ID NO: 2671854 - RNA, 19 nt, Artificial Sequence
  Description of Artificial Sequence: Synthetic oligonucleotide
guucuucguugcaucaaca

SEQ ID NO: 2671855 - RNA, 19 nt, Artificial Sequence
  Description of Artificial Sequence: Synthetic oligonucleotide
gacuugggacucuuccucu

SEQ ID NO: 2671856 - RNA, 19 nt, Artificial Sequence
  Description of Artificial Sequence: Synthetic oligonucleotide
acuugggacucuuccucuu

SEQ ID NO: 2671857 - RNA, 19 nt, Artificial Sequence
  Description of Artificial Sequence: Synthetic oligonucleotide
cucuccguagaguuccaaa

SEQ ID NO: 2671858 - RNA, 19 nt, Artificial Sequence
  Description of Artificial Sequence: Synthetic oligonucleotide
caaacgccugcagcuuucc

SEQ ID NO: 2671859 - RNA, 19 nt, Artificial Sequence
  Description of Artificial Sequence: Synthetic oligonucleotide
uacuagcugggauggcauu

SEQ ID NO: 2671860 - RNA, 19 nt, Artificial Sequence
  Description of Artificial Sequence: Synthetic oligonucleotide
gccgcaggauuugaaaagc

SEQ ID NO: 2671861 - RNA, 19 nt, Artificial Sequence
  Description of Artificial Sequence: Synthetic oligonucleotide
uagcuucauuaagaccaga

SEQ ID NO: 2671862 - RNA, 19 nt, Artificial Sequence
  Description of Artificial Sequence: Synthetic oligonucleotide
aggagcccucgcuccaucu

SEQ ID NO: 2671863 - RNA, 19 nt, Artificial Sequence
  Description of Artificial Sequence: Synthetic oligonucleotide
cucgcuccaucuccuggac

SEQ ID NO: 2671864 - RNA, 19 nt, Artificial Sequence
  Description of Artificial Sequence: Synthetic oligonucleotide
ccgcuuuccgcuuauccuc

SEQ ID NO: 2671865 - RNA, 19 nt, Artificial Sequence
  Description of Artificial Sequence: Synthetic oligonucleotide
ccgcaggauuugaaaagcc

SEQ ID NO: 2671866 - RNA, 19 nt, Artificial Sequence
  Description of Artificial Sequence: Synthetic oligonucleotide
gaagccuguccagguuggc

SEQ ID NO: 2671867 - RNA, 19 nt, Artificial Sequence
  Description of Artificial Sequence: Synthetic oligonucleotide
ccuuuucuuaaccggaaaa

SEQ ID NO: 2671868 - RNA, 19 nt, Artificial Sequence
  Description of Artificial Sequence: Synthetic oligonucleotide
gagcuaauuucuccugcau

SEQ ID NO: 2671869 - RNA, 19 nt, Artificial Sequence
  Description of Artificial Sequence: Synthetic oligonucleotide
agcagacugaggagcccuc

SEQ ID NO: 2671870 - RNA, 19 nt, Artificial Sequence
  Description of Artificial Sequence: Synthetic oligonucleotide
uuccaaacgccugcagcuu

SEQ ID NO: 2671871 - RNA, 19 nt, Artificial Sequence
  Description of Artificial Sequence: Synthetic oligonucleotide
uccuggagguuuguucuuu

SEQ ID NO: 2671872 - RNA, 19 nt, Artificial Sequence
  Description of Artificial Sequence: Synthetic oligonucleotide
ggucugagcacccuucccu

SEQ ID NO: 2671873 - RNA, 19 nt, Artificial Sequence
  Description of Artificial Sequence: Synthetic oligonucleotide
gcagcuuuccagaauggaa

SEQ ID NO: 2671874 - RNA, 19 nt, Artificial Sequence
  Description of Artificial Sequence: Synthetic oligonucleotide
agguucuucguugcaucaa

SEQ ID NO: 2671875 - RNA, 19 nt, Artificial Sequence
  Description of Artificial Sequence: Synthetic oligonucleotide
uccauuguuuuagguucuu

SEQ ID NO: 2671876 - RNA, 19 nt, Artificial Sequence
  Description of Artificial Sequence: Synthetic oligonucleotide
gacgucugugaggaaggaa

SEQ ID NO: 2671877 - RNA, 19 nt, Artificial Sequence
  Description of Artificial Sequence: Synthetic oligonucleotide
gggacucuuccucuuagcu

SEQ ID NO: 2671878 - RNA, 19 nt, Artificial Sequence
  Description of Artificial Sequence: Synthetic oligonucleotide
gcauuccccggacauguuc

SEQ ID NO: 2671879 - RNA, 19 nt, Artificial Sequence
  Description of Artificial Sequence: Synthetic oligonucleotide
cucuuccauuguuuuaggu

SEQ ID NO: 2671880 - RNA, 19 nt, Artificial Sequence
  Description of Artificial Sequence: Synthetic oligonucleotide
caucacucucuuuaacuuu

SEQ ID NO: 2671881 - RNA, 19 nt, Artificial Sequence
  Description of Artificial Sequence: Synthetic oligonucleotide
gcagacugaggagcccucg

SEQ ID NO: 2671882 - RNA, 19 nt, Artificial Sequence
  Description of Artificial Sequence: Synthetic oligonucleotide
gugcuuuuacuagcuggga

SEQ ID NO: 2671883 - RNA, 19 nt, Artificial Sequence
  Description of Artificial Sequence: Synthetic oligonucleotide
gcuacgauuuccuuuucuu

SEQ ID NO: 2671884 - RNA, 19 nt, Artificial Sequence
  Description of Artificial Sequence: Synthetic oligonucleotide
ggaaguugacugugccgca

SEQ ID NO: 2671885 - RNA, 19 nt, Artificial Sequence
  Description of Artificial Sequence: Synthetic oligonucleotide
agacgucugugaggaagga

SEQ ID NO: 2671886 - RNA, 19 nt, Artificial Sequence
  Description of Artificial Sequence: Synthetic oligonucleotide
ccguagaguuccaaauuca

SEQ ID NO: 2671887 - RNA, 19 nt, Artificial Sequence
  Description of Artificial Sequence: Synthetic oligonucleotide
aacucuccguagaguucca

SEQ ID NO: 2671888 - RNA, 19 nt, Artificial Sequence
  Description of Artificial Sequence: Synthetic oligonucleotide
cuugggacucuuccucuua

SEQ ID NO: 2671889 - RNA, 19 nt, Artificial Sequence
  Description of Artificial Sequence: Synthetic oligonucleotide
gcaucugccaaaugcaguu

SEQ ID NO: 2671890 - RNA, 19 nt, Artificial Sequence
  Description of Artificial Sequence: Synthetic oligonucleotide
gggcacugaaagacuuggg

SEQ ID NO: 2671891 - RNA, 19 nt, Artificial Sequence
  Description of Artificial Sequence: Synthetic oligonucleotide
acugugccgcaggauuuga

SEQ ID NO: 2671892 - RNA, 19 nt, Artificial Sequence
  Description of Artificial Sequence: Synthetic oligonucleotide
cguugcaucaacaguagcu

SEQ ID NO: 2671893 - RNA, 19 nt, Artificial Sequence
  Description of Artificial Sequence: Synthetic oligonucleotide
gguggucugagcacccuuc

SEQ ID NO: 2671894 - RNA, 19 nt, Artificial Sequence
  Description of Artificial Sequence: Synthetic oligonucleotide
gagcagacugaggagcccu

SEQ ID NO: 2671895 - RNA, 19 nt, Artificial Sequence
  Description of Artificial Sequence: Synthetic oligonucleotide
uggggacauccugugcauc

SEQ ID NO: 2671896 - RNA, 19 nt, Artificial Sequence
  Description of Artificial Sequence: Synthetic oligonucleotide
ugcauuccccggacauguu

SEQ ID NO: 2671897 - RNA, 19 nt, Artificial Sequence
  Description of Artificial Sequence: Synthetic oligonucleotide
cgucugugaggaaggaaug

SEQ ID NO: 2671898 - RNA, 19 nt, Artificial Sequence
  Description of Artificial Sequence: Synthetic oligonucleotide
gaggagcccucgcuccauc

SEQ ID NO: 2671899 - RNA, 19 nt, Artificial Sequence
  Description of Artificial Sequence: Synthetic oligonucleotide
cugcauuccccggacaugu

SEQ ID NO: 2671900 - RNA, 19 nt, Artificial Sequence
  Description of Artificial Sequence: Synthetic oligonucleotide
ggggacauccugugcaucu

SEQ ID NO: 2671901 - RNA, 19 nt, Artificial Sequence
  Description of Artificial Sequence: Synthetic oligonucleotide
ugaggagcccucgcuccau

SEQ ID NO: 2671902 - RNA, 19 nt, Artificial Sequence
  Description of Artificial Sequence: Synthetic oligonucleotide
uggccgcugggaaguugac

SEQ ID NO: 2671903 - RNA, 19 nt, Artificial Sequence
  Description of Artificial Sequence: Synthetic oligonucleotide
gcuuuccagaauggaaauc

SEQ ID NO: 2671904 - RNA, 19 nt, Artificial Sequence
  Description of Artificial Sequence: Synthetic oligonucleotide
ccaaaugcaguuucuguau

SEQ ID NO: 2671905 - RNA, 19 nt, Artificial Sequence
  Description of Artificial Sequence: Synthetic oligonucleotide
cugaggagcccucgcucca

SEQ ID NO: 2671906 - RNA, 19 nt, Artificial Sequence
  Description of Artificial Sequence: Synthetic oligonucleotide
ccaaacgccugcagcuuuc

SEQ ID NO: 2671907 - RNA, 19 nt, Artificial Sequence
  Description of Artificial Sequence: Synthetic oligonucleotide
agucagagagagaguccaa

SEQ ID NO: 2671908 - RNA, 19 nt, Artificial Sequence
  Description of Artificial Sequence: Synthetic oligonucleotide
cccucgcuccaucuccugg

SEQ ID NO: 2671909 - RNA, 19 nt, Artificial Sequence
  Description of Artificial Sequence: Synthetic oligonucleotide
cugagcacccuucccuucu

SEQ ID NO: 2671910 - RNA, 19 nt, Artificial Sequence
  Description of Artificial Sequence: Synthetic oligonucleotide
gcuuuccgcuuauccucag

SEQ ID NO: 2671911 - RNA, 19 nt, Artificial Sequence
  Description of Artificial Sequence: Synthetic oligonucleotide
cuccguagaguuccaaauu

SEQ ID NO: 2671912 - RNA, 19 nt, Artificial Sequence
  Description of Artificial Sequence: Synthetic oligonucleotide
uuccccggacauguuccau

SEQ ID NO: 2671913 - RNA, 19 nt, Artificial Sequence
  Description of Artificial Sequence: Synthetic oligonucleotide
ccauuguuuuagguucuuc

SEQ ID NO: 2671914 - RNA, 19 nt, Artificial Sequence
  Description of Artificial Sequence: Synthetic oligonucleotide
gcuuauccucaggaaguuc

SEQ ID NO: 2671915 - RNA, 19 nt, Artificial Sequence
  Description of Artificial Sequence: Synthetic oligonucleotide
cuuuccgcucuuccauugu

SEQ ID NO: 2671916 - RNA, 19 nt, Artificial Sequence
  Description of Artificial Sequence: Synthetic oligonucleotide
cucuaacucuccguagagu

SEQ ID NO: 2671917 - RNA, 19 nt, Artificial Sequence
  Description of Artificial Sequence: Synthetic oligonucleotide
cgagcuaauuucuccugca

SEQ ID NO: 2671918 - RNA, 19 nt, Artificial Sequence
  Description of Artificial Sequence: Synthetic oligonucleotide
ggcuacgauuuccuuuucu

SEQ ID NO: 2671919 - RNA, 19 nt, Artificial Sequence
  Description of Artificial Sequence: Synthetic oligonucleotide
cugugccgcaggauuugaa

SEQ ID NO: 2671920 - RNA, 19 nt, Artificial Sequence
  Description of Artificial Sequence: Synthetic oligonucleotide
acucuccguagaguuccaa

SEQ ID NO: 2671921 - RNA, 19 nt, Artificial Sequence
  Description of Artificial Sequence: Synthetic oligonucleotide
gucugagcacccuucccuu

SEQ ID NO: 2671922 - RNA, 19 nt, Artificial Sequence
  Description of Artificial Sequence: Synthetic oligonucleotide
cauguuccaucuguucuau

SEQ ID NO: 2671923 - RNA, 19 nt, Artificial Sequence
  Description of Artificial Sequence: Synthetic oligonucleotide
caucuguucuauggaacau

SEQ ID NO: 2671924 - RNA, 19 nt, Artificial Sequence
  Description of Artificial Sequence: Synthetic oligonucleotide
ccgcuuauccucaggaagu

SEQ ID NO: 2671925 - RNA, 19 nt, Artificial Sequence
  Description of Artificial Sequence: Synthetic oligonucleotide
ccucgcuccaucuccugga

SEQ ID NO: 2671926 - RNA, 19 nt, Artificial Sequence
  Description of Artificial Sequence: Synthetic oligonucleotide
ccugcauuccccggacaug

SEQ ID NO: 2671927 - RNA, 19 nt, Artificial Sequence
  Description of Artificial Sequence: Synthetic oligonucleotide
ccaucuccuggacaucaga

SEQ ID NO: 2671928 - RNA, 19 nt, Artificial Sequence
  Description of Artificial Sequence: Synthetic oligonucleotide
ccggacauguuccaucugu

SEQ ID NO: 2671929 - RNA, 19 nt, Artificial Sequence
  Description of Artificial Sequence: Synthetic oligonucleotide
guuggcgucgcuggccgcu

SEQ ID NO: 2671930 - RNA, 19 nt, Artificial Sequence
  Description of Artificial Sequence: Synthetic oligonucleotide
guugacugugccgcaggau

SEQ ID NO: 2671931 - RNA, 19 nt, Artificial Sequence
  Description of Artificial Sequence: Synthetic oligonucleotide
ccucuuagcuuuccgcucu

SEQ ID NO: 2671932 - RNA, 19 nt, Artificial Sequence
  Description of Artificial Sequence: Synthetic oligonucleotide
gccuguccagguuggcguc

SEQ ID NO: 2671933 - RNA, 19 nt, Artificial Sequence
  Description of Artificial Sequence: Synthetic oligonucleotide
cccgugcuuuuacuagcug

SEQ ID NO: 2671934 - RNA, 19 nt, Artificial Sequence
  Description of Artificial Sequence: Synthetic oligonucleotide
gguuggcgucgcuggccgc

SEQ ID NO: 2671935 - RNA, 19 nt, Artificial Sequence
  Description of Artificial Sequence: Synthetic oligonucleotide
cugaaagacuugggacucu

SEQ ID NO: 2671936 - RNA, 19 nt, Artificial Sequence
  Description of Artificial Sequence: Synthetic oligonucleotide
uuggcgucgcuggccgcuu

SEQ ID NO: 2671937 - RNA, 19 nt, Artificial Sequence
  Description of Artificial Sequence: Synthetic oligonucleotide
cuagcugggauggcauuuu

SEQ ID NO: 2671938 - RNA, 19 nt, Artificial Sequence
  Description of Artificial Sequence: Synthetic oligonucleotide
cgucgcuggccgcuuuccg

SEQ ID NO: 2671939 - RNA, 19 nt, Artificial Sequence
  Description of Artificial Sequence: Synthetic oligonucleotide
uggcgucgcuggccgcuuu

SEQ ID NO: 2671940 - RNA, 19 nt, Artificial Sequence
  Description of Artificial Sequence: Synthetic oligonucleotide
ggaaaucauugagcagacu

SEQ ID NO: 2671941 - RNA, 19 nt, Artificial Sequence
  Description of Artificial Sequence: Synthetic oligonucleotide
ggcgucgcuggccgcuuuc

SEQ ID NO: 2671942 - RNA, 19 nt, Artificial Sequence
  Description of Artificial Sequence: Synthetic oligonucleotide
cgcuuuccgcuuauccuca

SEQ ID NO: 2671943 - RNA, 19 nt, Artificial Sequence
  Description of Artificial Sequence: Synthetic oligonucleotide
gcgucgcuggccgcuuucc

SEQ ID NO: 2671944 - RNA, 19 nt, Artificial Sequence
  Description of Artificial Sequence: Synthetic oligonucleotide
uggccgcuuuccgcuuauc

SEQ ID NO: 2671945 - RNA, 19 nt, Artificial Sequence
  Description of Artificial Sequence: Synthetic oligonucleotide
cagagacgucugugaggaa

SEQ ID NO: 2671946 - RNA, 19 nt, Artificial Sequence
  Description of Artificial Sequence: Synthetic oligonucleotide
cgcuccaucuccuggacau

SEQ ID NO: 2671947 - RNA, 19 nt, Artificial Sequence
  Description of Artificial Sequence: Synthetic oligonucleotide
cccggacauguuccaucug

SEQ ID NO: 2671948 - RNA, 19 nt, Artificial Sequence
  Description of Artificial Sequence: Synthetic oligonucleotide
caucugccaaaugcaguuu

SEQ ID NO: 2671949 - RNA, 19 nt, Artificial Sequence
  Description of Artificial Sequence: Synthetic oligonucleotide
cuccuggagguuuguucuu

SEQ ID NO: 2671950 - RNA, 19 nt, Artificial Sequence
  Description of Artificial Sequence: Synthetic oligonucleotide
cucuuagcuuuccgcucuu

SEQ ID NO: 2671951 - RNA, 19 nt, Artificial Sequence
  Description of Artificial Sequence: Synthetic oligonucleotide
gcuggccgcuuuccgcuua

SEQ ID NO: 2671952 - RNA, 19 nt, Artificial Sequence
  Description of Artificial Sequence: Synthetic oligonucleotide
gcccgugcuuuuacuagcu

SEQ ID NO: 2671953 - RNA, 19 nt, Artificial Sequence
  Description of Artificial Sequence: Synthetic oligonucleotide
ggguggucugagcacccuu

SEQ ID NO: 2671954 - RNA, 19 nt, Artificial Sequence
  Description of Artificial Sequence: Synthetic oligonucleotide
cccuucccuucuccuccug

SEQ ID NO: 2671955 - RNA, 19 nt, Artificial Sequence
  Description of Artificial Sequence: Synthetic oligonucleotide
ggccgcugggaaguugacu

SEQ ID NO: 2671956 - RNA, 19 nt, Artificial Sequence
  Description of Artificial Sequence: Synthetic oligonucleotide
cuggccgcuuuccgcuuau

SEQ ID NO: 2671957 - RNA, 19 nt, Artificial Sequence
  Description of Artificial Sequence: Synthetic oligonucleotide
ccuggagguuuguucuuuu

SEQ ID NO: 2671958 - RNA, 19 nt, Artificial Sequence
  Description of Artificial Sequence: Synthetic oligonucleotide
ccgcugggaaguugacugu

SEQ ID NO: 2671959 - RNA, 19 nt, Artificial Sequence
  Description of Artificial Sequence: Synthetic oligonucleotide
gggguggucugagcacccu

SEQ ID NO: 2671960 - RNA, 19 nt, Artificial Sequence
  Description of Artificial Sequence: Synthetic oligonucleotide
cuuuggccgcugggaaguu

SEQ ID NO: 2671961 - RNA, 19 nt, Artificial Sequence
  Description of Artificial Sequence: Synthetic oligonucleotide
cgcuuauccucaggaaguu

SEQ ID NO: 2671962 - RNA, 19 nt, Artificial Sequence
  Description of Artificial Sequence: Synthetic oligonucleotide
cgcuggccgcuuuccgcuu

SEQ ID NO: 2671963 - RNA, 19 nt, Artificial Sequence
  Description of Artificial Sequence: Synthetic oligonucleotide
aauuaaauaagcucuaucc

SEQ ID NO: 2671964 - RNA, 19 nt, Artificial Sequence
  Description of Artificial Sequence: Synthetic oligonucleotide
aauauuugaauuuaauccc

SEQ ID NO: 2671965 - RNA, 19 nt, Artificial Sequence
  Description of Artificial Sequence: Synthetic oligonucleotide
caauauuugaauuuaaucc

SEQ ID NO: 2671966 - RNA, 19 nt, Artificial Sequence
  Description of Artificial Sequence: Synthetic oligonucleotide
aaagauuuaagacagcucu

SEQ ID NO: 2671967 - RNA, 19 nt, Artificial Sequence
  Description of Artificial Sequence: Synthetic oligonucleotide
uuuaagacagcucugauac

SEQ ID NO: 2671968 - RNA, 19 nt, Artificial Sequence
  Description of Artificial Sequence: Synthetic oligonucleotide
uuugcaguauguuugaagc

SEQ ID NO: 2671969 - RNA, 19 nt, Artificial Sequence
  Description of Artificial Sequence: Synthetic oligonucleotide
uccuguucaagccagagag

SEQ ID NO: 2671970 - RNA, 19 nt, Artificial Sequence
  Description of Artificial Sequence: Synthetic oligonucleotide
agcuuaauuaaauaagcuc

SEQ ID NO: 2671971 - RNA, 19 nt, Artificial Sequence
  Description of Artificial Sequence: Synthetic oligonucleotide
aauaagcucuauccaaggg

SEQ ID NO: 2671972 - RNA, 19 nt, Artificial Sequence
  Description of Artificial Sequence: Synthetic oligonucleotide
aguuuuguccacuuuuagc

SEQ ID NO: 2671973 - RNA, 19 nt, Artificial Sequence
  Description of Artificial Sequence: Synthetic oligonucleotide
uaaauaagcucuauccaag

SEQ ID NO: 2671974 - RNA, 19 nt, Artificial Sequence
  Description of Artificial Sequence: Synthetic oligonucleotide
aaauaagcucuauccaagg

SEQ ID NO: 2671975 - RNA, 19 nt, Artificial Sequence
  Description of Artificial Sequence: Synthetic oligonucleotide
ucuaacugcuuacauagcc

SEQ ID NO: 2671976 - RNA, 19 nt, Artificial Sequence
  Description of Artificial Sequence: Synthetic oligonucleotide
auaagcucuauccaagggg

SEQ ID NO: 2671977 - RNA, 19 nt, Artificial Sequence
  Description of Artificial Sequence: Synthetic oligonucleotide
agagcuuaauuaaauaagc

SEQ ID NO: 2671978 - RNA, 19 nt, Artificial Sequence
  Description of Artificial Sequence: Synthetic oligonucleotide
ucuuauuccaauauuugaa

SEQ ID NO: 2671979 - RNA, 19 nt, Artificial Sequence
  Description of Artificial Sequence: Synthetic oligonucleotide
ugauacaucuuccuguuca

SEQ ID NO: 2671980 - RNA, 19 nt, Artificial Sequence
  Description of Artificial Sequence: Synthetic oligonucleotide
acagcuaggucucuuauuc

SEQ ID NO: 2671981 - RNA, 19 nt, Artificial Sequence
  Description of Artificial Sequence: Synthetic oligonucleotide
uguacagucgaacuguaca

SEQ ID NO: 2671982 - RNA, 19 nt, Artificial Sequence
  Description of Artificial Sequence: Synthetic oligonucleotide
cauaugacagcacugcugg

SEQ ID NO: 2671983 - RNA, 19 nt, Artificial Sequence
  Description of Artificial Sequence: Synthetic oligonucleotide
uuaaauaagcucuauccaa

SEQ ID NO: 2671984 - RNA, 19 nt, Artificial Sequence
  Description of Artificial Sequence: Synthetic oligonucleotide
ugaauuuaaucccaguaaa

SEQ ID NO: 2671985 - RNA, 19 nt, Artificial Sequence
  Description of Artificial Sequence: Synthetic oligonucleotide
auuaaauaagcucuaucca

SEQ ID NO: 2671986 - RNA, 19 nt, Artificial Sequence
  Description of Artificial Sequence: Synthetic oligonucleotide
uucagaauucugcaugccg

SEQ ID NO: 2671987 - RNA, 19 nt, Artificial Sequence
  Description of Artificial Sequence: Synthetic oligonucleotide
ugugcagacagacuggagc

SEQ ID NO: 2671988 - RNA, 19 nt, Artificial Sequence
  Description of Artificial Sequence: Synthetic oligonucleotide
acuagcuaaaucuccagag

SEQ ID NO: 2671989 - RNA, 19 nt, Artificial Sequence
  Description of Artificial Sequence: Synthetic oligonucleotide
auacaggcaaaauacucac

SEQ ID NO: 2671990 - RNA, 19 nt, Artificial Sequence
  Description of Artificial Sequence: Synthetic oligonucleotide
uaagcucuauccaaggggc

SEQ ID NO: 2671991 - RNA, 19 nt, Artificial Sequence
  Description of Artificial Sequence: Synthetic oligonucleotide
uacauagccgaucaaauau

SEQ ID NO: 2671992 - RNA, 19 nt, Artificial Sequence
  Description of Artificial Sequence: Synthetic oligonucleotide
cacucaaaagauuuaagac

SEQ ID NO: 2671993 - RNA, 19 nt, Artificial Sequence
  Description of Artificial Sequence: Synthetic oligonucleotide
ucucuuauuccaauauuug

SEQ ID NO: 2671994 - RNA, 19 nt, Artificial Sequence
  Description of Artificial Sequence: Synthetic oligonucleotide
ugugcuucgguaaggcugg

SEQ ID NO: 2671995 - RNA, 19 nt, Artificial Sequence
  Description of Artificial Sequence: Synthetic oligonucleotide
ugcuggacuagcuaaaucu

SEQ ID NO: 2671996 - RNA, 19 nt, Artificial Sequence
  Description of Artificial Sequence: Synthetic oligonucleotide
uauuugaauuuaaucccag

SEQ ID NO: 2671997 - RNA, 19 nt, Artificial Sequence
  Description of Artificial Sequence: Synthetic oligonucleotide
acacucaaaagauuuaaga

SEQ ID NO: 2671998 - RNA, 19 nt, Artificial Sequence
  Description of Artificial Sequence: Synthetic oligonucleotide
ucagaauucugcaugccga

SEQ ID NO: 2671999 - RNA, 19 nt, Artificial Sequence
  Description of Artificial Sequence: Synthetic oligonucleotide
accaguuccgacuccaugg

SEQ ID NO: 2672000 - RNA, 19 nt, Artificial Sequence
  Description of Artificial Sequence: Synthetic oligonucleotide
cuaacugcuuacauagccg

SEQ ID NO: 2672001 - RNA, 19 nt, Artificial Sequence
  Description of Artificial Sequence: Synthetic oligonucleotide
caaaauacucacacacugg

SEQ ID NO: 2672002 - RNA, 19 nt, Artificial Sequence
  Description of Artificial Sequence: Synthetic oligonucleotide
gaauucugcaugccgacag

SEQ ID NO: 2672003 - RNA, 19 nt, Artificial Sequence
  Description of Artificial Sequence: Synthetic oligonucleotide
agucgaacuguacagcuag

SEQ ID NO: 2672004 - RNA, 19 nt, Artificial Sequence
  Description of Artificial Sequence: Synthetic oligonucleotide
uuagacagccgcaaguacu

SEQ ID NO: 2672005 - RNA, 19 nt, Artificial Sequence
  Description of Artificial Sequence: Synthetic oligonucleotide
ucaugcaggacgcugcaag

SEQ ID NO: 2672006 - RNA, 19 nt, Artificial Sequence
  Description of Artificial Sequence: Synthetic oligonucleotide
uauuccaauauuugaauuu

SEQ ID NO: 2672007 - RNA, 19 nt, Artificial Sequence
  Description of Artificial Sequence: Synthetic oligonucleotide
ucuguuaaccugcugccca

SEQ ID NO: 2672008 - RNA, 19 nt, Artificial Sequence
  Description of Artificial Sequence: Synthetic oligonucleotide
uagccgaucaaauauugcu

SEQ ID NO: 2672009 - RNA, 19 nt, Artificial Sequence
  Description of Artificial Sequence: Synthetic oligonucleotide
aagccagagagcuuaauua

SEQ ID NO: 2672010 - RNA, 19 nt, Artificial Sequence
  Description of Artificial Sequence: Synthetic oligonucleotide
uagcuaaaucuccagaguc

SEQ ID NO: 2672011 - RNA, 19 nt, Artificial Sequence
  Description of Artificial Sequence: Synthetic oligonucleotide
aaucccaguaaacacucaa

SEQ ID NO: 2672012 - RNA, 19 nt, Artificial Sequence
  Description of Artificial Sequence: Synthetic oligonucleotide
cuuugcaguauguuugaag

SEQ ID NO: 2672013 - RNA, 19 nt, Artificial Sequence
  Description of Artificial Sequence: Synthetic oligonucleotide
agagucucuguuaaccugc

SEQ ID NO: 2672014 - RNA, 19 nt, Artificial Sequence
  Description of Artificial Sequence: Synthetic oligonucleotide
uccaauauuugaauuuaau

SEQ ID NO: 2672015 - RNA, 19 nt, Artificial Sequence
  Description of Artificial Sequence: Synthetic oligonucleotide
aacuguacagcuaggucuc

SEQ ID NO: 2672016 - RNA, 19 nt, Artificial Sequence
  Description of Artificial Sequence: Synthetic oligonucleotide
gaacuguacagcuaggucu

SEQ ID NO: 2672017 - RNA, 19 nt, Artificial Sequence
  Description of Artificial Sequence: Synthetic oligonucleotide
uuaaccugcugcccaaucu

SEQ ID NO: 2672018 - RNA, 19 nt, Artificial Sequence
  Description of Artificial Sequence: Synthetic oligonucleotide
ucccaguaaacacucaaaa

SEQ ID NO: 2672019 - RNA, 19 nt, Artificial Sequence
  Description of Artificial Sequence: Synthetic oligonucleotide
uaacugcuuacauagccga

SEQ ID NO: 2672020 - RNA, 19 nt, Artificial Sequence
  Description of Artificial Sequence: Synthetic oligonucleotide
aggcauaugacagcacugc

SEQ ID NO: 2672021 - RNA, 19 nt, Artificial Sequence
  Description of Artificial Sequence: Synthetic oligonucleotide
guacagucgaacuguacag

SEQ ID NO: 2672022 - RNA, 19 nt, Artificial Sequence
  Description of Artificial Sequence: Synthetic oligonucleotide
uaguuuuguccacuuuuag

SEQ ID NO: 2672023 - RNA, 19 nt, Artificial Sequence
  Description of Artificial Sequence: Synthetic oligonucleotide
acugcuucuguacagucga

SEQ ID NO: 2672024 - RNA, 19 nt, Artificial Sequence
  Description of Artificial Sequence: Synthetic oligonucleotide
aaacacucaaaagauuuaa

SEQ ID NO: 2672025 - RNA, 19 nt, Artificial Sequence
  Description of Artificial Sequence: Synthetic oligonucleotide
uggacucauagcuuugcag

SEQ ID NO: 2672026 - RNA, 19 nt, Artificial Sequence
  Description of Artificial Sequence: Synthetic oligonucleotide
uggacuagcuaaaucucca

SEQ ID NO: 2672027 - RNA, 19 nt, Artificial Sequence
  Description of Artificial Sequence: Synthetic oligonucleotide
ucucuguuaaccugcugcc

SEQ ID NO: 2672028 - RNA, 19 nt, Artificial Sequence
  Description of Artificial Sequence: Synthetic oligonucleotide
uaguuaucauuuuaguuuu

SEQ ID NO: 2672029 - RNA, 19 nt, Artificial Sequence
  Description of Artificial Sequence: Synthetic oligonucleotide
uuaguuuuguccacuuuua

SEQ ID NO: 2672030 - RNA, 19 nt, Artificial Sequence
  Description of Artificial Sequence: Synthetic oligonucleotide
gaauuuaaucccaguaaac

SEQ ID NO: 2672031 - RNA, 19 nt, Artificial Sequence
  Description of Artificial Sequence: Synthetic oligonucleotide
aaaaguggccuggacaagu

SEQ ID NO: 2672032 - RNA, 19 nt, Artificial Sequence
  Description of Artificial Sequence: Synthetic oligonucleotide
auagcuuugcaguauguuu

SEQ ID NO: 2672033 - RNA, 19 nt, Artificial Sequence
  Description of Artificial Sequence: Synthetic oligonucleotide
uuaucauuuuaguuuuguc

SEQ ID NO: 2672034 - RNA, 19 nt, Artificial Sequence
  Description of Artificial Sequence: Synthetic oligonucleotide
uuauuccaauauuugaauu

SEQ ID NO: 2672035 - RNA, 19 nt, Artificial Sequence
  Description of Artificial Sequence: Synthetic oligonucleotide
aaguggccuggacaagucg

SEQ ID NO: 2672036 - RNA, 19 nt, Artificial Sequence
  Description of Artificial Sequence: Synthetic oligonucleotide
cugugcuucgguaaggcug

SEQ ID NO: 2672037 - RNA, 19 nt, Artificial Sequence
  Description of Artificial Sequence: Synthetic oligonucleotide
uuuguccacuuuuagcuuc

SEQ ID NO: 2672038 - RNA, 19 nt, Artificial Sequence
  Description of Artificial Sequence: Synthetic oligonucleotide
ucugcaugccgacaguagu

SEQ ID NO: 2672039 - RNA, 19 nt, Artificial Sequence
  Description of Artificial Sequence: Synthetic oligonucleotide
auggcugggagaaacgcgc

SEQ ID NO: 2672040 - RNA, 19 nt, Artificial Sequence
  Description of Artificial Sequence: Synthetic oligonucleotide
uaagacagcucugauacau

SEQ ID NO: 2672041 - RNA, 19 nt, Artificial Sequence
  Description of Artificial Sequence: Synthetic oligonucleotide
auacucacacacuggcuuc

SEQ ID NO: 2672042 - RNA, 19 nt, Artificial Sequence
  Description of Artificial Sequence: Synthetic oligonucleotide
cauagccgaucaaauauug

SEQ ID NO: 2672043 - RNA, 19 nt, Artificial Sequence
  Description of Artificial Sequence: Synthetic oligonucleotide
acuucaugcaggacgcugc

SEQ ID NO: 2672044 - RNA, 19 nt, Artificial Sequence
  Description of Artificial Sequence: Synthetic oligonucleotide
auuugaauuuaaucccagu

SEQ ID NO: 2672045 - RNA, 19 nt, Artificial Sequence
  Description of Artificial Sequence: Synthetic oligonucleotide
cuggacuagcuaaaucucc

SEQ ID NO: 2672046 - RNA, 19 nt, Artificial Sequence
  Description of Artificial Sequence: Synthetic oligonucleotide
aagguccaggcauaugaca

SEQ ID NO: 2672047 - RNA, 19 nt, Artificial Sequence
  Description of Artificial Sequence: Synthetic oligonucleotide
auuuaagacagcucugaua

SEQ ID NO: 2672048 - RNA, 19 nt, Artificial Sequence
  Description of Artificial Sequence: Synthetic oligonucleotide
gacgcugcaagguccaggc

SEQ ID NO: 2672049 - RNA, 19 nt, Artificial Sequence
  Description of Artificial Sequence: Synthetic oligonucleotide
cucugcuuuccucaggacc

SEQ ID NO: 2672050 - RNA, 19 nt, Artificial Sequence
  Description of Artificial Sequence: Synthetic oligonucleotide
ucagugcuggacuagcuaa

SEQ ID NO: 2672051 - RNA, 19 nt, Artificial Sequence
  Description of Artificial Sequence: Synthetic oligonucleotide
uccauacaggcaaaauacu

SEQ ID NO: 2672052 - RNA, 19 nt, Artificial Sequence
  Description of Artificial Sequence: Synthetic oligonucleotide
ugguuucugaacugugugc

SEQ ID NO: 2672053 - RNA, 19 nt, Artificial Sequence
  Description of Artificial Sequence: Synthetic oligonucleotide
uucuguacagucgaacugu

SEQ ID NO: 2672054 - RNA, 19 nt, Artificial Sequence
  Description of Artificial Sequence: Synthetic oligonucleotide
ugcccaaucuucucuaacu

SEQ ID NO: 2672055 - RNA, 19 nt, Artificial Sequence
  Description of Artificial Sequence: Synthetic oligonucleotide
acagucgaacuguacagcu

SEQ ID NO: 2672056 - RNA, 19 nt, Artificial Sequence
  Description of Artificial Sequence: Synthetic oligonucleotide
uugcaguauguuugaagcc

SEQ ID NO: 2672057 - RNA, 19 nt, Artificial Sequence
  Description of Artificial Sequence: Synthetic oligonucleotide
acugcuuacauagccgauc

SEQ ID NO: 2672058 - RNA, 19 nt, Artificial Sequence
  Description of Artificial Sequence: Synthetic oligonucleotide
uccucugcuuuccucagga

SEQ ID NO: 2672059 - RNA, 19 nt, Artificial Sequence
  Description of Artificial Sequence: Synthetic oligonucleotide
aagauuuaagacagcucug

SEQ ID NO: 2672060 - RNA, 19 nt, Artificial Sequence
  Description of Artificial Sequence: Synthetic oligonucleotide
ugaacugugugcagacaga

SEQ ID NO: 2672061 - RNA, 19 nt, Artificial Sequence
  Description of Artificial Sequence: Synthetic oligonucleotide
agcuaggucucuuauucca

SEQ ID NO: 2672062 - RNA, 19 nt, Artificial Sequence
  Description of Artificial Sequence: Synthetic oligonucleotide
ccaguaaacacucaaaaga

SEQ ID NO: 2672063 - RNA, 19 nt, Artificial Sequence
  Description of Artificial Sequence: Synthetic oligonucleotide
auauuugaauuuaauccca

SEQ ID NO: 2672064 - RNA, 19 nt, Artificial Sequence
  Description of Artificial Sequence: Synthetic oligonucleotide
cucuuauuccaauauuuga

SEQ ID NO: 2672065 - RNA, 19 nt, Artificial Sequence
  Description of Artificial Sequence: Synthetic oligonucleotide
auagccgaucaaauauugc

SEQ ID NO: 2672066 - RNA, 19 nt, Artificial Sequence
  Description of Artificial Sequence: Synthetic oligonucleotide
uuacauagccgaucaaaua

SEQ ID NO: 2672067 - RNA, 19 nt, Artificial Sequence
  Description of Artificial Sequence: Synthetic oligonucleotide
gugaaaaguggccuggaca

SEQ ID NO: 2672068 - RNA, 19 nt, Artificial Sequence
  Description of Artificial Sequence: Synthetic oligonucleotide
gggcacuucaugcaggacg

SEQ ID NO: 2672069 - RNA, 19 nt, Artificial Sequence
  Description of Artificial Sequence: Synthetic oligonucleotide
aguauguuugaagccaugu

SEQ ID NO: 2672070 - RNA, 19 nt, Artificial Sequence
  Description of Artificial Sequence: Synthetic oligonucleotide
caagucgagaucugccugc

SEQ ID NO: 2672071 - RNA, 19 nt, Artificial Sequence
  Description of Artificial Sequence: Synthetic oligonucleotide
acaagucgagaucugccug

SEQ ID NO: 2672072 - RNA, 19 nt, Artificial Sequence
  Description of Artificial Sequence: Synthetic oligonucleotide
uccauggcugggagaaacg

SEQ ID NO: 2672073 - RNA, 19 nt, Artificial Sequence
  Description of Artificial Sequence: Synthetic oligonucleotide
aauucugcaugccgacagu

SEQ ID NO: 2672074 - RNA, 19 nt, Artificial Sequence
  Description of Artificial Sequence: Synthetic oligonucleotide
ucugauacaucuuccuguu

SEQ ID NO: 2672075 - RNA, 19 nt, Artificial Sequence
  Description of Artificial Sequence: Synthetic oligonucleotide
uagacagccgcaaguacuc

SEQ ID NO: 2672076 - RNA, 19 nt, Artificial Sequence
  Description of Artificial Sequence: Synthetic oligonucleotide
agcgguggugaaaaguggc

SEQ ID NO: 2672077 - RNA, 19 nt, Artificial Sequence
  Description of Artificial Sequence: Synthetic oligonucleotide
uguccacugcuucuguaca

SEQ ID NO: 2672078 - RNA, 19 nt, Artificial Sequence
  Description of Artificial Sequence: Synthetic oligonucleotide
caugcaggacgcugcaagg

SEQ ID NO: 2672079 - RNA, 19 nt, Artificial Sequence
  Description of Artificial Sequence: Synthetic oligonucleotide
uucugaacugugugcagac

SEQ ID NO: 2672080 - RNA, 19 nt, Artificial Sequence
  Description of Artificial Sequence: Synthetic oligonucleotide
augccgacaguagugcagc

SEQ ID NO: 2672081 - RNA, 19 nt, Artificial Sequence
  Description of Artificial Sequence: Synthetic oligonucleotide
cacugcuucuguacagucg

SEQ ID NO: 2672082 - RNA, 19 nt, Artificial Sequence
  Description of Artificial Sequence: Synthetic oligonucleotide
uuucacaccggauguaguu

SEQ ID NO: 2672083 - RNA, 19 nt, Artificial Sequence
  Description of Artificial Sequence: Synthetic oligonucleotide
uuccaauauuugaauuuaa

SEQ ID NO: 2672084 - RNA, 19 nt, Artificial Sequence
  Description of Artificial Sequence: Synthetic oligonucleotide
gcuuaauuaaauaagcucu

SEQ ID NO: 2672085 - RNA, 19 nt, Artificial Sequence
  Description of Artificial Sequence: Synthetic oligonucleotide
uuuucacaccggauguagu

SEQ ID NO: 2672086 - RNA, 19 nt, Artificial Sequence
  Description of Artificial Sequence: Synthetic oligonucleotide
aaaguggccuggacaaguc

SEQ ID NO: 2672087 - RNA, 19 nt, Artificial Sequence
  Description of Artificial Sequence: Synthetic oligonucleotide
ucuucucuaacugcuuaca

SEQ ID NO: 2672088 - RNA, 19 nt, Artificial Sequence
  Description of Artificial Sequence: Synthetic oligonucleotide
aaggccgaggcgcggggcg

SEQ ID NO: 2672089 - RNA, 19 nt, Artificial Sequence
  Description of Artificial Sequence: Synthetic oligonucleotide
agcucuauccaaggggcac

SEQ ID NO: 2672090 - RNA, 19 nt, Artificial Sequence
  Description of Artificial Sequence: Synthetic oligonucleotide
agguccaggcauaugacag

SEQ ID NO: 2672091 - RNA, 19 nt, Artificial Sequence
  Description of Artificial Sequence: Synthetic oligonucleotide
agccagagagcuuaauuaa

SEQ ID NO: 2672092 - RNA, 19 nt, Artificial Sequence
  Description of Artificial Sequence: Synthetic oligonucleotide
gacuagcuaaaucuccaga

SEQ ID NO: 2672093 - RNA, 19 nt, Artificial Sequence
  Description of Artificial Sequence: Synthetic oligonucleotide
guauguuugaagccauguc

SEQ ID NO: 2672094 - RNA, 19 nt, Artificial Sequence
  Description of Artificial Sequence: Synthetic oligonucleotide
uacaggcaaaauacucaca

SEQ ID NO: 2672095 - RNA, 19 nt, Artificial Sequence
  Description of Artificial Sequence: Synthetic oligonucleotide
auuccaauauuugaauuua

SEQ ID NO: 2672096 - RNA, 19 nt, Artificial Sequence
  Description of Artificial Sequence: Synthetic oligonucleotide
accuuagacagccgcaagu

SEQ ID NO: 2672097 - RNA, 19 nt, Artificial Sequence
  Description of Artificial Sequence: Synthetic oligonucleotide
guuccgacuccauggcugg

SEQ ID NO: 2672098 - RNA, 19 nt, Artificial Sequence
  Description of Artificial Sequence: Synthetic oligonucleotide
uacagucgaacuguacagc

SEQ ID NO: 2672099 - RNA, 19 nt, Artificial Sequence
  Description of Artificial Sequence: Synthetic oligonucleotide
ucuucagugcuggacuagc

SEQ ID NO: 2672100 - RNA, 19 nt, Artificial Sequence
  Description of Artificial Sequence: Synthetic oligonucleotide
gaacugugugcagacagac

SEQ ID NO: 2672101 - RNA, 19 nt, Artificial Sequence
  Description of Artificial Sequence: Synthetic oligonucleotide
aggucucuuauuccaauau

SEQ ID NO: 2672102 - RNA, 19 nt, Artificial Sequence
  Description of Artificial Sequence: Synthetic oligonucleotide
ucauagcuuugcaguaugu

SEQ ID NO: 2672103 - RNA, 19 nt, Artificial Sequence
  Description of Artificial Sequence: Synthetic oligonucleotide
cuuagacagccgcaaguac

SEQ ID NO: 2672104 - RNA, 19 nt, Artificial Sequence
  Description of Artificial Sequence: Synthetic oligonucleotide
aagacagcucugauacauc

SEQ ID NO: 2672105 - RNA, 19 nt, Artificial Sequence
  Description of Artificial Sequence: Synthetic oligonucleotide
aaucuccagagucucuguu

SEQ ID NO: 2672106 - RNA, 19 nt, Artificial Sequence
  Description of Artificial Sequence: Synthetic oligonucleotide
cugugugcagacagacugg

SEQ ID NO: 2672107 - RNA, 19 nt, Artificial Sequence
  Description of Artificial Sequence: Synthetic oligonucleotide
uguacagcuaggucucuua

SEQ ID NO: 2672108 - RNA, 19 nt, Artificial Sequence
  Description of Artificial Sequence: Synthetic oligonucleotide
ugcugguuucugaacugug

SEQ ID NO: 2672109 - RNA, 19 nt, Artificial Sequence
  Description of Artificial Sequence: Synthetic oligonucleotide
cuucgguaaggcuggacuc

SEQ ID NO: 2672110 - RNA, 19 nt, Artificial Sequence
  Description of Artificial Sequence: Synthetic oligonucleotide
uggacaagucgagaucugc

SEQ ID NO: 2672111 - RNA, 19 nt, Artificial Sequence
  Description of Artificial Sequence: Synthetic oligonucleotide
gagcaccucaccuuagaca

SEQ ID NO: 2672112 - RNA, 19 nt, Artificial Sequence
  Description of Artificial Sequence: Synthetic oligonucleotide
uuguccacuuuuagcuuca

SEQ ID NO: 2672113 - RNA, 19 nt, Artificial Sequence
  Description of Artificial Sequence: Synthetic oligonucleotide
cagagucucuguuaaccug

SEQ ID NO: 2672114 - RNA, 19 nt, Artificial Sequence
  Description of Artificial Sequence: Synthetic oligonucleotide
caaggggcacuucaugcag

SEQ ID NO: 2672115 - RNA, 19 nt, Artificial Sequence
  Description of Artificial Sequence: Synthetic oligonucleotide
uaaccugcugcccaaucuu

SEQ ID NO: 2672116 - RNA, 19 nt, Artificial Sequence
  Description of Artificial Sequence: Synthetic oligonucleotide
cagaauucugcaugccgac

SEQ ID NO: 2672117 - RNA, 19 nt, Artificial Sequence
  Description of Artificial Sequence: Synthetic oligonucleotide
agacuggagcaccucaccu

SEQ ID NO: 2672118 - RNA, 19 nt, Artificial Sequence
  Description of Artificial Sequence: Synthetic oligonucleotide
ugcaugccgacaguagugc

SEQ ID NO: 2672119 - RNA, 19 nt, Artificial Sequence
  Description of Artificial Sequence: Synthetic oligonucleotide
uccgcaaggccgaggcgcg

SEQ ID NO: 2672120 - RNA, 19 nt, Artificial Sequence
  Description of Artificial Sequence: Synthetic oligonucleotide
ugugugcagacagacugga

SEQ ID NO: 2672121 - RNA, 19 nt, Artificial Sequence
  Description of Artificial Sequence: Synthetic oligonucleotide
ucgaacuguacagcuaggu

SEQ ID NO: 2672122 - RNA, 19 nt, Artificial Sequence
  Description of Artificial Sequence: Synthetic oligonucleotide
uaugacagcacugcugguu

SEQ ID NO: 2672123 - RNA, 19 nt, Artificial Sequence
  Description of Artificial Sequence: Synthetic oligonucleotide
caccucaccuuagacagcc

SEQ ID NO: 2672124 - RNA, 19 nt, Artificial Sequence
  Description of Artificial Sequence: Synthetic oligonucleotide
uuaagacagcucugauaca

SEQ ID NO: 2672125 - RNA, 19 nt, Artificial Sequence
  Description of Artificial Sequence: Synthetic oligonucleotide
gugcagacagacuggagca

SEQ ID NO: 2672126 - RNA, 19 nt, Artificial Sequence
  Description of Artificial Sequence: Synthetic oligonucleotide
aguuccgacuccauggcug

SEQ ID NO: 2672127 - RNA, 19 nt, Artificial Sequence
  Description of Artificial Sequence: Synthetic oligonucleotide
caggcauaugacagcacug

SEQ ID NO: 2672128 - RNA, 19 nt, Artificial Sequence
  Description of Artificial Sequence: Synthetic oligonucleotide
uucgguaaggcuggacuca

SEQ ID NO: 2672129 - RNA, 19 nt, Artificial Sequence
  Description of Artificial Sequence: Synthetic oligonucleotide
cugcaugccgacaguagug

SEQ ID NO: 2672130 - RNA, 19 nt, Artificial Sequence
  Description of Artificial Sequence: Synthetic oligonucleotide
agcuuugcaguauguuuga

SEQ ID NO: 2672131 - RNA, 19 nt, Artificial Sequence
  Description of Artificial Sequence: Synthetic oligonucleotide
ucacaccggauguaguuau

SEQ ID NO: 2672132 - RNA, 19 nt, Artificial Sequence
  Description of Artificial Sequence: Synthetic oligonucleotide
gcuucagaauucugcaugc

SEQ ID NO: 2672133 - RNA, 19 nt, Artificial Sequence
  Description of Artificial Sequence: Synthetic oligonucleotide
ugcaggacgcugcaagguc

SEQ ID NO: 2672134 - RNA, 19 nt, Artificial Sequence
  Description of Artificial Sequence: Synthetic oligonucleotide
cuuauuccaauauuugaau

SEQ ID NO: 2672135 - RNA, 19 nt, Artificial Sequence
  Description of Artificial Sequence: Synthetic oligonucleotide
aaccugcugcccaaucuuc

SEQ ID NO: 2672136 - RNA, 19 nt, Artificial Sequence
  Description of Artificial Sequence: Synthetic oligonucleotide
caagguccaggcauaugac

SEQ ID NO: 2672137 - RNA, 19 nt, Artificial Sequence
  Description of Artificial Sequence: Synthetic oligonucleotide
cccaguaaacacucaaaag

SEQ ID NO: 2672138 - RNA, 19 nt, Artificial Sequence
  Description of Artificial Sequence: Synthetic oligonucleotide
acagacuggagcaccucac

SEQ ID NO: 2672139 - RNA, 19 nt, Artificial Sequence
  Description of Artificial Sequence: Synthetic oligonucleotide
agcuaaaucuccagagucu

SEQ ID NO: 2672140 - RNA, 19 nt, Artificial Sequence
  Description of Artificial Sequence: Synthetic oligonucleotide
auccaaggggcacuucaug

SEQ ID NO: 2672141 - RNA, 19 nt, Artificial Sequence
  Description of Artificial Sequence: Synthetic oligonucleotide
cucuaacugcuuacauagc

SEQ ID NO: 2672142 - RNA, 19 nt, Artificial Sequence
  Description of Artificial Sequence: Synthetic oligonucleotide
agugcagcgguggugaaaa

SEQ ID NO: 2672143 - RNA, 19 nt, Artificial Sequence
  Description of Artificial Sequence: Synthetic oligonucleotide
gacaagucgagaucugccu

SEQ ID NO: 2672144 - RNA, 19 nt, Artificial Sequence
  Description of Artificial Sequence: Synthetic oligonucleotide
accggauguaguuaucauu

SEQ ID NO: 2672145 - RNA, 19 nt, Artificial Sequence
  Description of Artificial Sequence: Synthetic oligonucleotide
cagcgguggugaaaagugg

SEQ ID NO: 2672146 - RNA, 19 nt, Artificial Sequence
  Description of Artificial Sequence: Synthetic oligonucleotide
gacuccauggcugggagaa

SEQ ID NO: 2672147 - RNA, 19 nt, Artificial Sequence
  Description of Artificial Sequence: Synthetic oligonucleotide
uugaagccauguccacugc

SEQ ID NO: 2672148 - RNA, 19 nt, Artificial Sequence
  Description of Artificial Sequence: Synthetic oligonucleotide
cuuacauagccgaucaaau

SEQ ID NO: 2672149 - RNA, 19 nt, Artificial Sequence
  Description of Artificial Sequence: Synthetic oligonucleotide
acuggagcaccucaccuua

SEQ ID NO: 2672150 - RNA, 19 nt, Artificial Sequence
  Description of Artificial Sequence: Synthetic oligonucleotide
augacagcacugcugguuu

SEQ ID NO: 2672151 - RNA, 19 nt, Artificial Sequence
  Description of Artificial Sequence: Synthetic oligonucleotide
ugcuucuguacagucgaac

SEQ ID NO: 2672152 - RNA, 19 nt, Artificial Sequence
  Description of Artificial Sequence: Synthetic oligonucleotide
gagcuuaauuaaauaagcu

SEQ ID NO: 2672153 - RNA, 19 nt, Artificial Sequence
  Description of Artificial Sequence: Synthetic oligonucleotide
cucugauacaucuuccugu

SEQ ID NO: 2672154 - RNA, 19 nt, Artificial Sequence
  Description of Artificial Sequence: Synthetic oligonucleotide
ugcagcgguggugaaaagu

SEQ ID NO: 2672155 - RNA, 19 nt, Artificial Sequence
  Description of Artificial Sequence: Synthetic oligonucleotide
uaggucucuuauuccaaua

SEQ ID NO: 2672156 - RNA, 19 nt, Artificial Sequence
  Description of Artificial Sequence: Synthetic oligonucleotide
gacucauagcuuugcagua

SEQ ID NO: 2672157 - RNA, 19 nt, Artificial Sequence
  Description of Artificial Sequence: Synthetic oligonucleotide
ugcugugcuucgguaaggc

SEQ ID NO: 2672158 - RNA, 19 nt, Artificial Sequence
  Description of Artificial Sequence: Synthetic oligonucleotide
cuccgcaaggccgaggcgc

SEQ ID NO: 2672159 - RNA, 19 nt, Artificial Sequence
  Description of Artificial Sequence: Synthetic oligonucleotide
aucuuccuguucaagccag

SEQ ID NO: 2672160 - RNA, 19 nt, Artificial Sequence
  Description of Artificial Sequence: Synthetic oligonucleotide
cagcuaggucucuuauucc

SEQ ID NO: 2672161 - RNA, 19 nt, Artificial Sequence
  Description of Artificial Sequence: Synthetic oligonucleotide
cuucagaauucugcaugcc

SEQ ID NO: 2672162 - RNA, 19 nt, Artificial Sequence
  Description of Artificial Sequence: Synthetic oligonucleotide
guucaagccagagagcuua

SEQ ID NO: 2672163 - RNA, 19 nt, Artificial Sequence
  Description of Artificial Sequence: Synthetic oligonucleotide
guccacugcuucuguacag

SEQ ID NO: 2672164 - RNA, 19 nt, Artificial Sequence
  Description of Artificial Sequence: Synthetic oligonucleotide
acaccggauguaguuauca

SEQ ID NO: 2672165 - RNA, 19 nt, Artificial Sequence
  Description of Artificial Sequence: Synthetic oligonucleotide
ucuuccuguucaagccaga

SEQ ID NO: 2672166 - RNA, 19 nt, Artificial Sequence
  Description of Artificial Sequence: Synthetic oligonucleotide
uagcuucagaauucugcau

SEQ ID NO: 2672167 - RNA, 19 nt, Artificial Sequence
  Description of Artificial Sequence: Synthetic oligonucleotide
ggacuagcuaaaucuccag

SEQ ID NO: 2672168 - RNA, 19 nt, Artificial Sequence
  Description of Artificial Sequence: Synthetic oligonucleotide
cuguacagucgaacuguac

SEQ ID NO: 2672169 - RNA, 19 nt, Artificial Sequence
  Description of Artificial Sequence: Synthetic oligonucleotide
uccacugcuucuguacagu

SEQ ID NO: 2672170 - RNA, 19 nt, Artificial Sequence
  Description of Artificial Sequence: Synthetic oligonucleotide
ggacucauagcuuugcagu

SEQ ID NO: 2672171 - RNA, 19 nt, Artificial Sequence
  Description of Artificial Sequence: Synthetic oligonucleotide
aacugugugcagacagacu

SEQ ID NO: 2672172 - RNA, 19 nt, Artificial Sequence
  Description of Artificial Sequence: Synthetic oligonucleotide
agacagccgcaaguacucc

SEQ ID NO: 2672173 - RNA, 19 nt, Artificial Sequence
  Description of Artificial Sequence: Synthetic oligonucleotide
ucugccugcugugcuucgg

SEQ ID NO: 2672174 - RNA, 19 nt, Artificial Sequence
  Description of Artificial Sequence: Synthetic oligonucleotide
cucuguuaaccugcugccc

SEQ ID NO: 2672175 - RNA, 19 nt, Artificial Sequence
  Description of Artificial Sequence: Synthetic oligonucleotide
gucgagaucugccugcugu

SEQ ID NO: 2672176 - RNA, 19 nt, Artificial Sequence
  Description of Artificial Sequence: Synthetic oligonucleotide
gauuuaagacagcucugau

SEQ ID NO: 2672177 - RNA, 19 nt, Artificial Sequence
  Description of Artificial Sequence: Synthetic oligonucleotide
uucacaccggauguaguua

SEQ ID NO: 2672178 - RNA, 19 nt, Artificial Sequence
  Description of Artificial Sequence: Synthetic oligonucleotide
gcucugauacaucuuccug

SEQ ID NO: 2672179 - RNA, 19 nt, Artificial Sequence
  Description of Artificial Sequence: Synthetic oligonucleotide
cuccauggcugggagaaac

SEQ ID NO: 2672180 - RNA, 19 nt, Artificial Sequence
  Description of Artificial Sequence: Synthetic oligonucleotide
uguucaagccagagagcuu

SEQ ID NO: 2672181 - RNA, 19 nt, Artificial Sequence
  Description of Artificial Sequence: Synthetic oligonucleotide
aggggcacuucaugcagga

SEQ ID NO: 2672182 - RNA, 19 nt, Artificial Sequence
  Description of Artificial Sequence: Synthetic oligonucleotide
aguggccuggacaagucga

SEQ ID NO: 2672183 - RNA, 19 nt, Artificial Sequence
  Description of Artificial Sequence: Synthetic oligonucleotide
ggcacuucaugcaggacgc

SEQ ID NO: 2672184 - RNA, 19 nt, Artificial Sequence
  Description of Artificial Sequence: Synthetic oligonucleotide
cucaccuuagacagccgca

SEQ ID NO: 2672185 - RNA, 19 nt, Artificial Sequence
  Description of Artificial Sequence: Synthetic oligonucleotide
caguauguuugaagccaug

SEQ ID NO: 2672186 - RNA, 19 nt, Artificial Sequence
  Description of Artificial Sequence: Synthetic oligonucleotide
aagucgagaucugccugcu

SEQ ID NO: 2672187 - RNA, 19 nt, Artificial Sequence
  Description of Artificial Sequence: Synthetic oligonucleotide
cagagagcuuaauuaaaua

SEQ ID NO: 2672188 - RNA, 19 nt, Artificial Sequence
  Description of Artificial Sequence: Synthetic oligonucleotide
agaauucugcaugccgaca

SEQ ID NO: 2672189 - RNA, 19 nt, Artificial Sequence
  Description of Artificial Sequence: Synthetic oligonucleotide
aggcuggacucauagcuuu

SEQ ID NO: 2672190 - RNA, 19 nt, Artificial Sequence
  Description of Artificial Sequence: Synthetic oligonucleotide
caaguacuccucugcuuuc

SEQ ID NO: 2672191 - RNA, 19 nt, Artificial Sequence
  Description of Artificial Sequence: Synthetic oligonucleotide
cacuucaugcaggacgcug

SEQ ID NO: 2672192 - RNA, 19 nt, Artificial Sequence
  Description of Artificial Sequence: Synthetic oligonucleotide
ugccgacaguagugcagcg

SEQ ID NO: 2672193 - RNA, 19 nt, Artificial Sequence
  Description of Artificial Sequence: Synthetic oligonucleotide
cuagcuaaaucuccagagu

SEQ ID NO: 2672194 - RNA, 19 nt, Artificial Sequence
  Description of Artificial Sequence: Synthetic oligonucleotide
uacucacacacuggcuucu

SEQ ID NO: 2672195 - RNA, 19 nt, Artificial Sequence
  Description of Artificial Sequence: Synthetic oligonucleotide
gcccaaucuucucuaacug

SEQ ID NO: 2672196 - RNA, 19 nt, Artificial Sequence
  Description of Artificial Sequence: Synthetic oligonucleotide
acauccauacaggcaaaau

SEQ ID NO: 2672197 - RNA, 19 nt, Artificial Sequence
  Description of Artificial Sequence: Synthetic oligonucleotide
aguuaucauuuuaguuuug

SEQ ID NO: 2672198 - RNA, 19 nt, Artificial Sequence
  Description of Artificial Sequence: Synthetic oligonucleotide
cugcccaaucuucucuaac

SEQ ID NO: 2672199 - RNA, 19 nt, Artificial Sequence
  Description of Artificial Sequence: Synthetic oligonucleotide
acucauagcuuugcaguau

SEQ ID NO: 2672200 - RNA, 19 nt, Artificial Sequence
  Description of Artificial Sequence: Synthetic oligonucleotide
auaugacagcacugcuggu

SEQ ID NO: 2672201 - RNA, 19 nt, Artificial Sequence
  Description of Artificial Sequence: Synthetic oligonucleotide
uucaagccagagagcuuaa

SEQ ID NO: 2672202 - RNA, 19 nt, Artificial Sequence
  Description of Artificial Sequence: Synthetic oligonucleotide
cuguucaagccagagagcu

SEQ ID NO: 2672203 - RNA, 19 nt, Artificial Sequence
  Description of Artificial Sequence: Synthetic oligonucleotide
uccaggcauaugacagcac

SEQ ID NO: 2672204 - RNA, 19 nt, Artificial Sequence
  Description of Artificial Sequence: Synthetic oligonucleotide
gguccaggcauaugacagc

SEQ ID NO: 2672205 - RNA, 19 nt, Artificial Sequence
  Description of Artificial Sequence: Synthetic oligonucleotide
agaucugccugcugugcuu

SEQ ID NO: 2672206 - RNA, 19 nt, Artificial Sequence
  Description of Artificial Sequence: Synthetic oligonucleotide
gccgcaaguacuccucugc

SEQ ID NO: 2672207 - RNA, 19 nt, Artificial Sequence
  Description of Artificial Sequence: Synthetic oligonucleotide
aucugccugcugugcuucg

SEQ ID NO: 2672208 - RNA, 19 nt, Artificial Sequence
  Description of Artificial Sequence: Synthetic oligonucleotide
ugcuuacauagccgaucaa

SEQ ID NO: 2672209 - RNA, 19 nt, Artificial Sequence
  Description of Artificial Sequence: Synthetic oligonucleotide
caccaguuccgacuccaug

SEQ ID NO: 2672210 - RNA, 19 nt, Artificial Sequence
  Description of Artificial Sequence: Synthetic oligonucleotide
uccgacuccauggcuggga

SEQ ID NO: 2672211 - RNA, 19 nt, Artificial Sequence
  Description of Artificial Sequence: Synthetic oligonucleotide
acauagccgaucaaauauu

SEQ ID NO: 2672212 - RNA, 19 nt, Artificial Sequence
  Description of Artificial Sequence: Synthetic oligonucleotide
aagcucuauccaaggggca

SEQ ID NO: 2672213 - RNA, 19 nt, Artificial Sequence
  Description of Artificial Sequence: Synthetic oligonucleotide
agccgaucaaauauugcuu

SEQ ID NO: 2672214 - RNA, 19 nt, Artificial Sequence
  Description of Artificial Sequence: Synthetic oligonucleotide
gucgaacuguacagcuagg

SEQ ID NO: 2672215 - RNA, 19 nt, Artificial Sequence
  Description of Artificial Sequence: Synthetic oligonucleotide
ggcuccgcaaggccgaggc

SEQ ID NO: 2672216 - RNA, 19 nt, Artificial Sequence
  Description of Artificial Sequence: Synthetic oligonucleotide
agccgcaaguacuccucug

SEQ ID NO: 2672217 - RNA, 19 nt, Artificial Sequence
  Description of Artificial Sequence: Synthetic oligonucleotide
aacugcuuacauagccgau

SEQ ID NO: 2672218 - RNA, 19 nt, Artificial Sequence
  Description of Artificial Sequence: Synthetic oligonucleotide
ccucaccuuagacagccgc

SEQ ID NO: 2672219 - RNA, 19 nt, Artificial Sequence
  Description of Artificial Sequence: Synthetic oligonucleotide
agugcuggacuagcuaaau

SEQ ID NO: 2672220 - RNA, 19 nt, Artificial Sequence
  Description of Artificial Sequence: Synthetic oligonucleotide
ggagcaccucaccuuagac

SEQ ID NO: 2672221 - RNA, 19 nt, Artificial Sequence
  Description of Artificial Sequence: Synthetic oligonucleotide
gaucugccugcugugcuuc

SEQ ID NO: 2672222 - RNA, 19 nt, Artificial Sequence
  Description of Artificial Sequence: Synthetic oligonucleotide
gugcuggacuagcuaaauc

SEQ ID NO: 2672223 - RNA, 19 nt, Artificial Sequence
  Description of Artificial Sequence: Synthetic oligonucleotide
ugcaagguccaggcauaug

SEQ ID NO: 2672224 - RNA, 19 nt, Artificial Sequence
  Description of Artificial Sequence: Synthetic oligonucleotide
gagaucugccugcugugcu

SEQ ID NO: 2672225 - RNA, 19 nt, Artificial Sequence
  Description of Artificial Sequence: Synthetic oligonucleotide
augcaggacgcugcaaggu

SEQ ID NO: 2672226 - RNA, 19 nt, Artificial Sequence
  Description of Artificial Sequence: Synthetic oligonucleotide
aucccaguaaacacucaaa

SEQ ID NO: 2672227 - RNA, 19 nt, Artificial Sequence
  Description of Artificial Sequence: Synthetic oligonucleotide
ugacagcacugcugguuuc

SEQ ID NO: 2672228 - RNA, 19 nt, Artificial Sequence
  Description of Artificial Sequence: Synthetic oligonucleotide
guacuccucugcuuuccuc

SEQ ID NO: 2672229 - RNA, 19 nt, Artificial Sequence
  Description of Artificial Sequence: Synthetic oligonucleotide
gcuucuguacagucgaacu

SEQ ID NO: 2672230 - RNA, 19 nt, Artificial Sequence
  Description of Artificial Sequence: Synthetic oligonucleotide
cuggagcaccucaccuuag

SEQ ID NO: 2672231 - RNA, 19 nt, Artificial Sequence
  Description of Artificial Sequence: Synthetic oligonucleotide
uguccacuuuuagcuucag

SEQ ID NO: 2672232 - RNA, 19 nt, Artificial Sequence
  Description of Artificial Sequence: Synthetic oligonucleotide
agucgagaucugccugcug

SEQ ID NO: 2672233 - RNA, 19 nt, Artificial Sequence
  Description of Artificial Sequence: Synthetic oligonucleotide
gcagacagacuggagcacc

SEQ ID NO: 2672234 - RNA, 19 nt, Artificial Sequence
  Description of Artificial Sequence: Synthetic oligonucleotide
cuggacucauagcuuugca

SEQ ID NO: 2672235 - RNA, 19 nt, Artificial Sequence
  Description of Artificial Sequence: Synthetic oligonucleotide
cugcugugcuucgguaagg

SEQ ID NO: 2672236 - RNA, 19 nt, Artificial Sequence
  Description of Artificial Sequence: Synthetic oligonucleotide
gcuucgguaaggcuggacu

SEQ ID NO: 2672237 - RNA, 19 nt, Artificial Sequence
  Description of Artificial Sequence: Synthetic oligonucleotide
ccaguuccgacuccauggc

SEQ ID NO: 2672238 - RNA, 19 nt, Artificial Sequence
  Description of Artificial Sequence: Synthetic oligonucleotide
cauuuuaguuuuguccacu

SEQ ID NO: 2672239 - RNA, 19 nt, Artificial Sequence
  Description of Artificial Sequence: Synthetic oligonucleotide
ucgguaaggcuggacucau

SEQ ID NO: 2672240 - RNA, 19 nt, Artificial Sequence
  Description of Artificial Sequence: Synthetic oligonucleotide
uguuaaccugcugcccaau

SEQ ID NO: 2672241 - RNA, 19 nt, Artificial Sequence
  Description of Artificial Sequence: Synthetic oligonucleotide
cuaaaucuccagagucucu

SEQ ID NO: 2672242 - RNA, 19 nt, Artificial Sequence
  Description of Artificial Sequence: Synthetic oligonucleotide
gcuggacuagcuaaaucuc

SEQ ID NO: 2672243 - RNA, 19 nt, Artificial Sequence
  Description of Artificial Sequence: Synthetic oligonucleotide
uuccgacuccauggcuggg

SEQ ID NO: 2672244 - RNA, 19 nt, Artificial Sequence
  Description of Artificial Sequence: Synthetic oligonucleotide
cacaccggauguaguuauc

SEQ ID NO: 2672245 - RNA, 19 nt, Artificial Sequence
  Description of Artificial Sequence: Synthetic oligonucleotide
gcaggacgcugcaaggucc

SEQ ID NO: 2672246 - RNA, 19 nt, Artificial Sequence
  Description of Artificial Sequence: Synthetic oligonucleotide
caagccagagagcuuaauu

SEQ ID NO: 2672247 - RNA, 19 nt, Artificial Sequence
  Description of Artificial Sequence: Synthetic oligonucleotide
cuguuaaccugcugcccaa

SEQ ID NO: 2672248 - RNA, 19 nt, Artificial Sequence
  Description of Artificial Sequence: Synthetic oligonucleotide
ggacgcugcaagguccagg

SEQ ID NO: 2672249 - RNA, 19 nt, Artificial Sequence
  Description of Artificial Sequence: Synthetic oligonucleotide
uagugcagcgguggugaaa

SEQ ID NO: 2672250 - RNA, 19 nt, Artificial Sequence
  Description of Artificial Sequence: Synthetic oligonucleotide
gugugcagacagacuggag

SEQ ID NO: 2672251 - RNA, 19 nt, Artificial Sequence
  Description of Artificial Sequence: Synthetic oligonucleotide
gcaaguacuccucugcuuu

SEQ ID NO: 2672252 - RNA, 19 nt, Artificial Sequence
  Description of Artificial Sequence: Synthetic oligonucleotide
ucuauccaaggggcacuuc

SEQ ID NO: 2672253 - RNA, 19 nt, Artificial Sequence
  Description of Artificial Sequence: Synthetic oligonucleotide
accugcugcccaaucuucu

SEQ ID NO: 2672254 - RNA, 19 nt, Artificial Sequence
  Description of Artificial Sequence: Synthetic oligonucleotide
gacuggagcaccucaccuu

SEQ ID NO: 2672255 - RNA, 19 nt, Artificial Sequence
  Description of Artificial Sequence: Synthetic oligonucleotide
ccauggcugggagaaacgc

SEQ ID NO: 2672256 - RNA, 19 nt, Artificial Sequence
  Description of Artificial Sequence: Synthetic oligonucleotide
ugcuucgguaaggcuggac

SEQ ID NO: 2672257 - RNA, 19 nt, Artificial Sequence
  Description of Artificial Sequence: Synthetic oligonucleotide
cgaacuguacagcuagguc

SEQ ID NO: 2672258 - RNA, 19 nt, Artificial Sequence
  Description of Artificial Sequence: Synthetic oligonucleotide
gccgacaguagugcagcgg

SEQ ID NO: 2672259 - RNA, 19 nt, Artificial Sequence
  Description of Artificial Sequence: Synthetic oligonucleotide
ugccugcugugcuucggua

SEQ ID NO: 2672260 - RNA, 19 nt, Artificial Sequence
  Description of Artificial Sequence: Synthetic oligonucleotide
cuucucuaacugcuuacau

SEQ ID NO: 2672261 - RNA, 19 nt, Artificial Sequence
  Description of Artificial Sequence: Synthetic oligonucleotide
caggacgcugcaaggucca

SEQ ID NO: 2672262 - RNA, 19 nt, Artificial Sequence
  Description of Artificial Sequence: Synthetic oligonucleotide
cagugcuggacuagcuaaa

SEQ ID NO: 2672263 - RNA, 19 nt, Artificial Sequence
  Description of Artificial Sequence: Synthetic oligonucleotide
gcgguggugaaaaguggcc

SEQ ID NO: 2672264 - RNA, 19 nt, Artificial Sequence
  Description of Artificial Sequence: Synthetic oligonucleotide
guacagcuaggucucuuau

SEQ ID NO: 2672265 - RNA, 19 nt, Artificial Sequence
  Description of Artificial Sequence: Synthetic oligonucleotide
cagucgaacuguacagcua

SEQ ID NO: 2672266 - RNA, 19 nt, Artificial Sequence
  Description of Artificial Sequence: Synthetic oligonucleotide
ccaaggggcacuucaugca

SEQ ID NO: 2672267 - RNA, 19 nt, Artificial Sequence
  Description of Artificial Sequence: Synthetic oligonucleotide
ggcaaaauacucacacacu

SEQ ID NO: 2672268 - RNA, 19 nt, Artificial Sequence
  Description of Artificial Sequence: Synthetic oligonucleotide
ccggauguaguuaucauuu

SEQ ID NO: 2672269 - RNA, 19 nt, Artificial Sequence
  Description of Artificial Sequence: Synthetic oligonucleotide
gccgaucaaauauugcuuu

SEQ ID NO: 2672270 - RNA, 19 nt, Artificial Sequence
  Description of Artificial Sequence: Synthetic oligonucleotide
ggcauaugacagcacugcu

SEQ ID NO: 2672271 - RNA, 19 nt, Artificial Sequence
  Description of Artificial Sequence: Synthetic oligonucleotide
cauagcuuugcaguauguu

SEQ ID NO: 2672272 - RNA, 19 nt, Artificial Sequence
  Description of Artificial Sequence: Synthetic oligonucleotide
acgcugcaagguccaggca

SEQ ID NO: 2672273 - RNA, 19 nt, Artificial Sequence
  Description of Artificial Sequence: Synthetic oligonucleotide
gugcagcgguggugaaaag

SEQ ID NO: 2672274 - RNA, 19 nt, Artificial Sequence
  Description of Artificial Sequence: Synthetic oligonucleotide
accucaccuuagacagccg

SEQ ID NO: 2672275 - RNA, 19 nt, Artificial Sequence
  Description of Artificial Sequence: Synthetic oligonucleotide
ccacugcuucuguacaguc

SEQ ID NO: 2672276 - RNA, 19 nt, Artificial Sequence
  Description of Artificial Sequence: Synthetic oligonucleotide
gcaaggccgaggcgcgggg

SEQ ID NO: 2672277 - RNA, 19 nt, Artificial Sequence
  Description of Artificial Sequence: Synthetic oligonucleotide
gccgcaccaguuccgacuc

SEQ ID NO: 2672278 - RNA, 19 nt, Artificial Sequence
  Description of Artificial Sequence: Synthetic oligonucleotide
ggucucuuauuccaauauu

SEQ ID NO: 2672279 - RNA, 19 nt, Artificial Sequence
  Description of Artificial Sequence: Synthetic oligonucleotide
ccgacuccauggcugggag

SEQ ID NO: 2672280 - RNA, 19 nt, Artificial Sequence
  Description of Artificial Sequence: Synthetic oligonucleotide
ccaggcauaugacagcacu

SEQ ID NO: 2672281 - RNA, 19 nt, Artificial Sequence
  Description of Artificial Sequence: Synthetic oligonucleotide
gccagagagcuuaauuaaa

SEQ ID NO: 2672282 - RNA, 19 nt, Artificial Sequence
  Description of Artificial Sequence: Synthetic oligonucleotide
ccccggcuccgcaaggccg

SEQ ID NO: 2672283 - RNA, 19 nt, Artificial Sequence
  Description of Artificial Sequence: Synthetic oligonucleotide
cugcugcccaaucuucucu

SEQ ID NO: 2672284 - RNA, 19 nt, Artificial Sequence
  Description of Artificial Sequence: Synthetic oligonucleotide
aggacgcugcaagguccag

SEQ ID NO: 2672285 - RNA, 19 nt, Artificial Sequence
  Description of Artificial Sequence: Synthetic oligonucleotide
gcaugccgacaguagugca

SEQ ID NO: 2672286 - RNA, 19 nt, Artificial Sequence
  Description of Artificial Sequence: Synthetic oligonucleotide
gcuaggucucuuauuccaa

SEQ ID NO: 2672287 - RNA, 19 nt, Artificial Sequence
  Description of Artificial Sequence: Synthetic oligonucleotide
gcuccgcaaggccgaggcg

SEQ ID NO: 2672288 - RNA, 19 nt, Artificial Sequence
  Description of Artificial Sequence: Synthetic oligonucleotide
ggcuggacucauagcuuug

SEQ ID NO: 2672289 - RNA, 19 nt, Artificial Sequence
  Description of Artificial Sequence: Synthetic oligonucleotide
ccacuuuuagcuucagaau

SEQ ID NO: 2672290 - RNA, 19 nt, Artificial Sequence
  Description of Artificial Sequence: Synthetic oligonucleotide
guagugcagcgguggugaa

SEQ ID NO: 2672291 - RNA, 19 nt, Artificial Sequence
  Description of Artificial Sequence: Synthetic oligonucleotide
ccuuagacagccgcaagua

SEQ ID NO: 2672292 - RNA, 19 nt, Artificial Sequence
  Description of Artificial Sequence: Synthetic oligonucleotide
acucacacacuggcuucuu

SEQ ID NO: 2672293 - RNA, 19 nt, Artificial Sequence
  Description of Artificial Sequence: Synthetic oligonucleotide
caccggauguaguuaucau

SEQ ID NO: 2672294 - RNA, 19 nt, Artificial Sequence
  Description of Artificial Sequence: Synthetic oligonucleotide
ccgacaguagugcagcggu

SEQ ID NO: 2672295 - RNA, 19 nt, Artificial Sequence
  Description of Artificial Sequence: Synthetic oligonucleotide
ccucugcuuuccucaggac

SEQ ID NO: 2672296 - RNA, 19 nt, Artificial Sequence
  Description of Artificial Sequence: Synthetic oligonucleotide
cugcugguuucugaacugu

SEQ ID NO: 2672297 - RNA, 19 nt, Artificial Sequence
  Description of Artificial Sequence: Synthetic oligonucleotide
gcugcaagguccaggcaua

SEQ ID NO: 2672298 - RNA, 19 nt, Artificial Sequence
  Description of Artificial Sequence: Synthetic oligonucleotide
ggggcgaggcgccgcacca

SEQ ID NO: 2672299 - RNA, 19 nt, Artificial Sequence
  Description of Artificial Sequence: Synthetic oligonucleotide
caguuccgacuccauggcu

SEQ ID NO: 2672300 - RNA, 19 nt, Artificial Sequence
  Description of Artificial Sequence: Synthetic oligonucleotide
gcugugcuucgguaaggcu

SEQ ID NO: 2672301 - RNA, 19 nt, Artificial Sequence
  Description of Artificial Sequence: Synthetic oligonucleotide
gcaguauguuugaagccau

SEQ ID NO: 2672302 - RNA, 19 nt, Artificial Sequence
  Description of Artificial Sequence: Synthetic oligonucleotide
gcuuugcaguauguuugaa

SEQ ID NO: 2672303 - RNA, 19 nt, Artificial Sequence
  Description of Artificial Sequence: Synthetic oligonucleotide
gcucuauccaaggggcacu

SEQ ID NO: 2672304 - RNA, 19 nt, Artificial Sequence
  Description of Artificial Sequence: Synthetic oligonucleotide
cucacacacuggcuucuuu

SEQ ID NO: 2672305 - RNA, 19 nt, Artificial Sequence
  Description of Artificial Sequence: Synthetic oligonucleotide
cgaggcgccgcaccaguuc

SEQ ID NO: 2672306 - RNA, 19 nt, Artificial Sequence
  Description of Artificial Sequence: Synthetic oligonucleotide
cagccgcaaguacuccucu

SEQ ID NO: 2672307 - RNA, 19 nt, Artificial Sequence
  Description of Artificial Sequence: Synthetic oligonucleotide
ggggcacuucaugcaggac

SEQ ID NO: 2672308 - RNA, 19 nt, Artificial Sequence
  Description of Artificial Sequence: Synthetic oligonucleotide
cgcaaggccgaggcgcggg

SEQ ID NO: 2672309 - RNA, 19 nt, Artificial Sequence
  Description of Artificial Sequence: Synthetic oligonucleotide
cucuauccaaggggcacuu

SEQ ID NO: 2672310 - RNA, 19 nt, Artificial Sequence
  Description of Artificial Sequence: Synthetic oligonucleotide
ggcgaggcgccgcaccagu

SEQ ID NO: 2672311 - RNA, 19 nt, Artificial Sequence
  Description of Artificial Sequence: Synthetic oligonucleotide
gggcgaggcgccgcaccag

SEQ ID NO: 2672312 - RNA, 19 nt, Artificial Sequence
  Description of Artificial Sequence: Synthetic oligonucleotide
ccgaucaaauauugcuuuu

SEQ ID NO: 2672313 - RNA, 19 nt, Artificial Sequence
  Description of Artificial Sequence: Synthetic oligonucleotide
ccgcaaguacuccucugcu

SEQ ID NO: 2672314 - RNA, 19 nt, Artificial Sequence
  Description of Artificial Sequence: Synthetic oligonucleotide
cgcaccaguuccgacucca

SEQ ID NO: 2672315 - RNA, 19 nt, Artificial Sequence
  Description of Artificial Sequence: Synthetic oligonucleotide
ccgcaccaguuccgacucc

SEQ ID NO: 2672316 - RNA, 19 nt, Artificial Sequence
  Description of Artificial Sequence: Synthetic oligonucleotide
gugcuucgguaaggcugga

SEQ ID NO: 2672317 - RNA, 19 nt, Artificial Sequence
  Description of Artificial Sequence: Synthetic oligonucleotide
cugcaagguccaggcauau

SEQ ID NO: 2672318 - RNA, 19 nt, Artificial Sequence
  Description of Artificial Sequence: Synthetic oligonucleotide
cggggcgaggcgccgcacc

SEQ ID NO: 2672319 - RNA, 19 nt, Artificial Sequence
  Description of Artificial Sequence: Synthetic oligonucleotide
gcgccgcaccaguuccgac

SEQ ID NO: 2672320 - RNA, 19 nt, Artificial Sequence
  Description of Artificial Sequence: Synthetic oligonucleotide
ccgaggcgcggggcgaggc

SEQ ID NO: 2672321 - RNA, 19 nt, Artificial Sequence
  Description of Artificial Sequence: Synthetic oligonucleotide
gccgaggcgcggggcgagg

SEQ ID NO: 2672322 - RNA, 19 nt, Artificial Sequence
  Description of Artificial Sequence: Synthetic oligonucleotide
cgguggugaaaaguggccu

SEQ ID NO: 2672323 - RNA, 19 nt, Artificial Sequence
  Description of Artificial Sequence: Synthetic oligonucleotide
cgacuccauggcugggaga

SEQ ID NO: 2672324 - RNA, 19 nt, Artificial Sequence
  Description of Artificial Sequence: Synthetic oligonucleotide
ccgcaaggccgaggcgcgg

SEQ ID NO: 2672325 - RNA, 19 nt, Artificial Sequence
  Description of Artificial Sequence: Synthetic oligonucleotide
cgccgcaccaguuccgacu

SEQ ID NO: 2672326 - RNA, 19 nt, Artificial Sequence
  Description of Artificial Sequence: Synthetic oligonucleotide
cgcaaguacuccucugcuu

SEQ ID NO: 2672327 - RNA, 19 nt, Artificial Sequence
  Description of Artificial Sequence: Synthetic oligonucleotide
cggauguaguuaucauuuu

SEQ ID NO: 2672328 - RNA, 19 nt, Artificial Sequence
  Description of Artificial Sequence: Synthetic oligonucleotide
ccggcuccgcaaggccgag

SEQ ID NO: 2672329 - RNA, 19 nt, Artificial Sequence
  Description of Artificial Sequence: Synthetic oligonucleotide
gcgcggggcgaggcgccgc

SEQ ID NO: 2672330 - RNA, 19 nt, Artificial Sequence
  Description of Artificial Sequence: Synthetic oligonucleotide
cggcuccgcaaggccgagg

SEQ ID NO: 2672331 - RNA, 19 nt, Artificial Sequence
  Description of Artificial Sequence: Synthetic oligonucleotide
cgcggggcgaggcgccgca

SEQ ID NO: 2672332 - RNA, 19 nt, Artificial Sequence
  Description of Artificial Sequence: Synthetic oligonucleotide
aauccaguaagccuuggcc

SEQ ID NO: 2672333 - RNA, 19 nt, Artificial Sequence
  Description of Artificial Sequence: Synthetic oligonucleotide
uaaaauaaaauaaaauaaa

SEQ ID NO: 2672334 - RNA, 19 nt, Artificial Sequence
  Description of Artificial Sequence: Synthetic oligonucleotide
uauaguucuuuucauuugg

SEQ ID NO: 2672335 - RNA, 19 nt, Artificial Sequence
  Description of Artificial Sequence: Synthetic oligonucleotide
aauaaguucgagcccaguc

SEQ ID NO: 2672336 - RNA, 19 nt, Artificial Sequence
  Description of Artificial Sequence: Synthetic oligonucleotide
gagacaauaaaauaaaaua

SEQ ID NO: 2672337 - RNA, 19 nt, Artificial Sequence
  Description of Artificial Sequence: Synthetic oligonucleotide
aaaauaaaauaaaauaaaa

SEQ ID NO: 2672338 - RNA, 19 nt, Artificial Sequence
  Description of Artificial Sequence: Synthetic oligonucleotide
uaagccuuggccaauaagu

SEQ ID NO: 2672339 - RNA, 19 nt, Artificial Sequence
  Description of Artificial Sequence: Synthetic oligonucleotide
uggccaauaaguucgagcc

SEQ ID NO: 2672340 - RNA, 19 nt, Artificial Sequence
  Description of Artificial Sequence: Synthetic oligonucleotide
guucuuuucauuuggagac

SEQ ID NO: 2672341 - RNA, 19 nt, Artificial Sequence
  Description of Artificial Sequence: Synthetic oligonucleotide
aaaggcagaguuuccuugg

SEQ ID NO: 2672342 - RNA, 19 nt, Artificial Sequence
  Description of Artificial Sequence: Synthetic oligonucleotide
aaaaggcagaguuuccuug

SEQ ID NO: 2672343 - RNA, 19 nt, Artificial Sequence
  Description of Artificial Sequence: Synthetic oligonucleotide
agaacaauccaguaagccu

SEQ ID NO: 2672344 - RNA, 19 nt, Artificial Sequence
  Description of Artificial Sequence: Synthetic oligonucleotide
aguucuuuucauuuggaga

SEQ ID NO: 2672345 - RNA, 19 nt, Artificial Sequence
  Description of Artificial Sequence: Synthetic oligonucleotide
acuuccugcaguuucuccg

SEQ ID NO: 2672346 - RNA, 19 nt, Artificial Sequence
  Description of Artificial Sequence: Synthetic oligonucleotide
aguuucuccgccugcgucc

SEQ ID NO: 2672347 - RNA, 19 nt, Artificial Sequence
  Description of Artificial Sequence: Synthetic oligonucleotide
uucgagcccagucaugugg

SEQ ID NO: 2672348 - RNA, 19 nt, Artificial Sequence
  Description of Artificial Sequence: Synthetic oligonucleotide
auaaguucgagcccaguca

SEQ ID NO: 2672349 - RNA, 19 nt, Artificial Sequence
  Description of Artificial Sequence: Synthetic oligonucleotide
auauaguucuuuucauuug

SEQ ID NO: 2672350 - RNA, 19 nt, Artificial Sequence
  Description of Artificial Sequence: Synthetic oligonucleotide
uccuuggugaccgaggucc

SEQ ID NO: 2672351 - RNA, 19 nt, Artificial Sequence
  Description of Artificial Sequence: Synthetic oligonucleotide
uaguucuuuucauuuggag

SEQ ID NO: 2672352 - RNA, 19 nt, Artificial Sequence
  Description of Artificial Sequence: Synthetic oligonucleotide
uuucauuuggagaccuggc

SEQ ID NO: 2672353 - RNA, 19 nt, Artificial Sequence
  Description of Artificial Sequence: Synthetic oligonucleotide
uuggccaauaaguucgagc

SEQ ID NO: 2672354 - RNA, 19 nt, Artificial Sequence
  Description of Artificial Sequence: Synthetic oligonucleotide
uucauuuggagaccuggcu

SEQ ID NO: 2672355 - RNA, 19 nt, Artificial Sequence
  Description of Artificial Sequence: Synthetic oligonucleotide
gagaacaauccaguaagcc

SEQ ID NO: 2672356 - RNA, 19 nt, Artificial Sequence
  Description of Artificial Sequence: Synthetic oligonucleotide
cauuuggagaccuggcuug

SEQ ID NO: 2672357 - RNA, 19 nt, Artificial Sequence
  Description of Artificial Sequence: Synthetic oligonucleotide
uuuccuuggugaccgaggu

SEQ ID NO: 2672358 - RNA, 19 nt, Artificial Sequence
  Description of Artificial Sequence: Synthetic oligonucleotide
aaggcuggcaagaaggccu

SEQ ID NO: 2672359 - RNA, 19 nt, Artificial Sequence
  Description of Artificial Sequence: Synthetic oligonucleotide
ucauuuggagaccuggcuu

SEQ ID NO: 2672360 - RNA, 19 nt, Artificial Sequence
  Description of Artificial Sequence: Synthetic oligonucleotide
agcugcuccauuuggaccu

SEQ ID NO: 2672361 - RNA, 19 nt, Artificial Sequence
  Description of Artificial Sequence: Synthetic oligonucleotide
uucgggaagccccucuucc

SEQ ID NO: 2672362 - RNA, 19 nt, Artificial Sequence
  Description of Artificial Sequence: Synthetic oligonucleotide
auccaguaagccuuggcca

SEQ ID NO: 2672363 - RNA, 19 nt, Artificial Sequence
  Description of Artificial Sequence: Synthetic oligonucleotide
uaaguucgagcccagucau

SEQ ID NO: 2672364 - RNA, 19 nt, Artificial Sequence
  Description of Artificial Sequence: Synthetic oligonucleotide
uggcaagaaggccuccagg

SEQ ID NO: 2672365 - RNA, 19 nt, Artificial Sequence
  Description of Artificial Sequence: Synthetic oligonucleotide
agccuuggccaauaaguuc

SEQ ID NO: 2672366 - RNA, 19 nt, Artificial Sequence
  Description of Artificial Sequence: Synthetic oligonucleotide
ugggcgggaguccaagggg

SEQ ID NO: 2672367 - RNA, 19 nt, Artificial Sequence
  Description of Artificial Sequence: Synthetic oligonucleotide
agcagggaaggguuugggg

SEQ ID NO: 2672368 - RNA, 19 nt, Artificial Sequence
  Description of Artificial Sequence: Synthetic oligonucleotide
uucccgacgccucagcacu

SEQ ID NO: 2672369 - RNA, 19 nt, Artificial Sequence
  Description of Artificial Sequence: Synthetic oligonucleotide
ucuuuucauuuggagaccu

SEQ ID NO: 2672370 - RNA, 19 nt, Artificial Sequence
  Description of Artificial Sequence: Synthetic oligonucleotide
ugcaguuucuccgccugcg

SEQ ID NO: 2672371 - RNA, 19 nt, Artificial Sequence
  Description of Artificial Sequence: Synthetic oligonucleotide
ggcaagaaggccuccaggc

SEQ ID NO: 2672372 - RNA, 19 nt, Artificial Sequence
  Description of Artificial Sequence: Synthetic oligonucleotide
agcccagucauguggcagg

SEQ ID NO: 2672373 - RNA, 19 nt, Artificial Sequence
  Description of Artificial Sequence: Synthetic oligonucleotide
guaagccuuggccaauaag

SEQ ID NO: 2672374 - RNA, 19 nt, Artificial Sequence
  Description of Artificial Sequence: Synthetic oligonucleotide
uuggagaccuggcuuggca

SEQ ID NO: 2672375 - RNA, 19 nt, Artificial Sequence
  Description of Artificial Sequence: Synthetic oligonucleotide
aaaggggcacccgggagag

SEQ ID NO: 2672376 - RNA, 19 nt, Artificial Sequence
  Description of Artificial Sequence: Synthetic oligonucleotide
agucauguggcagggugcg

SEQ ID NO: 2672377 - RNA, 19 nt, Artificial Sequence
  Description of Artificial Sequence: Synthetic oligonucleotide
uccgggguacggcuggagg

SEQ ID NO: 2672378 - RNA, 19 nt, Artificial Sequence
  Description of Artificial Sequence: Synthetic oligonucleotide
gccuuggccaauaaguucg

SEQ ID NO: 2672379 - RNA, 19 nt, Artificial Sequence
  Description of Artificial Sequence: Synthetic oligonucleotide
caagaaggccuccaggcuc

SEQ ID NO: 2672380 - RNA, 19 nt, Artificial Sequence
  Description of Artificial Sequence: Synthetic oligonucleotide
ucgagcccagucauguggc

SEQ ID NO: 2672381 - RNA, 19 nt, Artificial Sequence
  Description of Artificial Sequence: Synthetic oligonucleotide
aguucgagcccagucaugu

SEQ ID NO: 2672382 - RNA, 19 nt, Artificial Sequence
  Description of Artificial Sequence: Synthetic oligonucleotide
cuuggcacccuggaggacc

SEQ ID NO: 2672383 - RNA, 19 nt, Artificial Sequence
  Description of Artificial Sequence: Synthetic oligonucleotide
uuggcacccuggaggaccg

SEQ ID NO: 2672384 - RNA, 19 nt, Artificial Sequence
  Description of Artificial Sequence: Synthetic oligonucleotide
aaggcagaguuuccuuggu

SEQ ID NO: 2672385 - RNA, 19 nt, Artificial Sequence
  Description of Artificial Sequence: Synthetic oligonucleotide
gggagagcccuucaguggg

SEQ ID NO: 2672386 - RNA, 19 nt, Artificial Sequence
  Description of Artificial Sequence: Synthetic oligonucleotide
uggaggaccggggagacaa

SEQ ID NO: 2672387 - RNA, 19 nt, Artificial Sequence
  Description of Artificial Sequence: Synthetic oligonucleotide
caauccaguaagccuuggc

SEQ ID NO: 2672388 - RNA, 19 nt, Artificial Sequence
  Description of Artificial Sequence: Synthetic oligonucleotide
acgccucagcacuuccugc

SEQ ID NO: 2672389 - RNA, 19 nt, Artificial Sequence
  Description of Artificial Sequence: Synthetic oligonucleotide
ggauccauggcgguggcgg

SEQ ID NO: 2672390 - RNA, 19 nt, Artificial Sequence
  Description of Artificial Sequence: Synthetic oligonucleotide
aacaauccaguaagccuug

SEQ ID NO: 2672391 - RNA, 19 nt, Artificial Sequence
  Description of Artificial Sequence: Synthetic oligonucleotide
caggccucucccaagcaag

SEQ ID NO: 2672392 - RNA, 19 nt, Artificial Sequence
  Description of Artificial Sequence: Synthetic oligonucleotide
gaaggcuggcaagaaggcc

SEQ ID NO: 2672393 - RNA, 19 nt, Artificial Sequence
  Description of Artificial Sequence: Synthetic oligonucleotide
cagucauguggcagggugc

SEQ ID NO: 2672394 - RNA, 19 nt, Artificial Sequence
  Description of Artificial Sequence: Synthetic oligonucleotide
ucugcgggccucuucggga

SEQ ID NO: 2672395 - RNA, 19 nt, Artificial Sequence
  Description of Artificial Sequence: Synthetic oligonucleotide
ucauguggcagggugcgac

SEQ ID NO: 2672396 - RNA, 19 nt, Artificial Sequence
  Description of Artificial Sequence: Synthetic oligonucleotide
agcagcaguaguggggccg

SEQ ID NO: 2672397 - RNA, 19 nt, Artificial Sequence
  Description of Artificial Sequence: Synthetic oligonucleotide
cugggcgggaguccaaggg

SEQ ID NO: 2672398 - RNA, 19 nt, Artificial Sequence
  Description of Artificial Sequence: Synthetic oligonucleotide
uggagaccuggcuuggcac

SEQ ID NO: 2672399 - RNA, 19 nt, Artificial Sequence
  Description of Artificial Sequence: Synthetic oligonucleotide
auuuggagaccuggcuugg

SEQ ID NO: 2672400 - RNA, 19 nt, Artificial Sequence
  Description of Artificial Sequence: Synthetic oligonucleotide
aguggggccggcugggcag

SEQ ID NO: 2672401 - RNA, 19 nt, Artificial Sequence
  Description of Artificial Sequence: Synthetic oligonucleotide
cagcucagccuccaggggc

SEQ ID NO: 2672402 - RNA, 19 nt, Artificial Sequence
  Description of Artificial Sequence: Synthetic oligonucleotide
ggaccaaaggggcacccgg

SEQ ID NO: 2672403 - RNA, 19 nt, Artificial Sequence
  Description of Artificial Sequence: Synthetic oligonucleotide
gaacaauccaguaagccuu

SEQ ID NO: 2672404 - RNA, 19 nt, Artificial Sequence
  Description of Artificial Sequence: Synthetic oligonucleotide
cuuuucauuuggagaccug

SEQ ID NO: 2672405 - RNA, 19 nt, Artificial Sequence
  Description of Artificial Sequence: Synthetic oligonucleotide
cagcugcuccauuuggacc

SEQ ID NO: 2672406 - RNA, 19 nt, Artificial Sequence
  Description of Artificial Sequence: Synthetic oligonucleotide
cagcacggcagcagcaggg

SEQ ID NO: 2672407 - RNA, 19 nt, Artificial Sequence
  Description of Artificial Sequence: Synthetic oligonucleotide
cugcguccgccucaggugg

SEQ ID NO: 2672408 - RNA, 19 nt, Artificial Sequence
  Description of Artificial Sequence: Synthetic oligonucleotide
ggcagaguuuccuugguga

SEQ ID NO: 2672409 - RNA, 19 nt, Artificial Sequence
  Description of Artificial Sequence: Synthetic oligonucleotide
ucgggaagccccucuuccc

SEQ ID NO: 2672410 - RNA, 19 nt, Artificial Sequence
  Description of Artificial Sequence: Synthetic oligonucleotide
ggugcgacaggccucuccc

SEQ ID NO: 2672411 - RNA, 19 nt, Artificial Sequence
  Description of Artificial Sequence: Synthetic oligonucleotide
ugcgacaggccucucccaa

SEQ ID NO: 2672412 - RNA, 19 nt, Artificial Sequence
  Description of Artificial Sequence: Synthetic oligonucleotide
cuggaaggcuggcaagaag

SEQ ID NO: 2672413 - RNA, 19 nt, Artificial Sequence
  Description of Artificial Sequence: Synthetic oligonucleotide
cagaguuuccuuggugacc

SEQ ID NO: 2672414 - RNA, 19 nt, Artificial Sequence
  Description of Artificial Sequence: Synthetic oligonucleotide
auaguucuuuucauuugga

SEQ ID NO: 2672415 - RNA, 19 nt, Artificial Sequence
  Description of Artificial Sequence: Synthetic oligonucleotide
acugggcgggaguccaagg

SEQ ID NO: 2672416 - RNA, 19 nt, Artificial Sequence
  Description of Artificial Sequence: Synthetic oligonucleotide
aagccuuggccaauaaguu

SEQ ID NO: 2672417 - RNA, 19 nt, Artificial Sequence
  Description of Artificial Sequence: Synthetic oligonucleotide
cuggcaagaaggccuccag

SEQ ID NO: 2672418 - RNA, 19 nt, Artificial Sequence
  Description of Artificial Sequence: Synthetic oligonucleotide
aggcagaguuuccuuggug

SEQ ID NO: 2672419 - RNA, 19 nt, Artificial Sequence
  Description of Artificial Sequence: Synthetic oligonucleotide
cacuuccugcaguuucucc

SEQ ID NO: 2672420 - RNA, 19 nt, Artificial Sequence
  Description of Artificial Sequence: Synthetic oligonucleotide
uacggcuggagguggcccc

SEQ ID NO: 2672421 - RNA, 19 nt, Artificial Sequence
  Description of Artificial Sequence: Synthetic oligonucleotide
agcagcagcagcagcagca

SEQ ID NO: 2672422 - RNA, 19 nt, Artificial Sequence
  Description of Artificial Sequence: Synthetic oligonucleotide
agcagcagcugcuccauuu

SEQ ID NO: 2672423 - RNA, 19 nt, Artificial Sequence
  Description of Artificial Sequence: Synthetic oligonucleotide
caguaguggggccggcugg

SEQ ID NO: 2672424 - RNA, 19 nt, Artificial Sequence
  Description of Artificial Sequence: Synthetic oligonucleotide
cagcacuuccugcaguuuc

SEQ ID NO: 2672425 - RNA, 19 nt, Artificial Sequence
  Description of Artificial Sequence: Synthetic oligonucleotide
gauccauggcgguggcggc

SEQ ID NO: 2672426 - RNA, 19 nt, Artificial Sequence
  Description of Artificial Sequence: Synthetic oligonucleotide
accggggagacaauaaaau

SEQ ID NO: 2672427 - RNA, 19 nt, Artificial Sequence
  Description of Artificial Sequence: Synthetic oligonucleotide
ucaggugggccagggcgcg

SEQ ID NO: 2672428 - RNA, 19 nt, Artificial Sequence
  Description of Artificial Sequence: Synthetic oligonucleotide
guuucuccgccugcguccg

SEQ ID NO: 2672429 - RNA, 19 nt, Artificial Sequence
  Description of Artificial Sequence: Synthetic oligonucleotide
accgagguccagcacccug

SEQ ID NO: 2672430 - RNA, 19 nt, Artificial Sequence
  Description of Artificial Sequence: Synthetic oligonucleotide
gagcccagucauguggcag

SEQ ID NO: 2672431 - RNA, 19 nt, Artificial Sequence
  Description of Artificial Sequence: Synthetic oligonucleotide
ggagacaauaaaauaaaau

SEQ ID NO: 2672432 - RNA, 19 nt, Artificial Sequence
  Description of Artificial Sequence: Synthetic oligonucleotide
guucccgacgccucagcac

SEQ ID NO: 2672433 - RNA, 19 nt, Artificial Sequence
  Description of Artificial Sequence: Synthetic oligonucleotide
ggcagagcguucccgacgc

SEQ ID NO: 2672434 - RNA, 19 nt, Artificial Sequence
  Description of Artificial Sequence: Synthetic oligonucleotide
caaaggggcacccgggaga

SEQ ID NO: 2672435 - RNA, 19 nt, Artificial Sequence
  Description of Artificial Sequence: Synthetic oligonucleotide
ccagucauguggcagggug

SEQ ID NO: 2672436 - RNA, 19 nt, Artificial Sequence
  Description of Artificial Sequence: Synthetic oligonucleotide
gagaccuggcuuggcaccc

SEQ ID NO: 2672437 - RNA, 19 nt, Artificial Sequence
  Description of Artificial Sequence: Synthetic oligonucleotide
acaauccaguaagccuugg

SEQ ID NO: 2672438 - RNA, 19 nt, Artificial Sequence
  Description of Artificial Sequence: Synthetic oligonucleotide
agagcguucccgacgccuc

SEQ ID NO: 2672439 - RNA, 19 nt, Artificial Sequence
  Description of Artificial Sequence: Synthetic oligonucleotide
acaggccucucccaagcaa

SEQ ID NO: 2672440 - RNA, 19 nt, Artificial Sequence
  Description of Artificial Sequence: Synthetic oligonucleotide
cucugcgggccucuucggg

SEQ ID NO: 2672441 - RNA, 19 nt, Artificial Sequence
  Description of Artificial Sequence: Synthetic oligonucleotide
gccaauaaguucgagccca

SEQ ID NO: 2672442 - RNA, 19 nt, Artificial Sequence
  Description of Artificial Sequence: Synthetic oligonucleotide
ucuucgggaagccccucuu

SEQ ID NO: 2672443 - RNA, 19 nt, Artificial Sequence
  Description of Artificial Sequence: Synthetic oligonucleotide
guggcagggugcgacaggc

SEQ ID NO: 2672444 - RNA, 19 nt, Artificial Sequence
  Description of Artificial Sequence: Synthetic oligonucleotide
ucuggaaggcuggcaagaa

SEQ ID NO: 2672445 - RNA, 19 nt, Artificial Sequence
  Description of Artificial Sequence: Synthetic oligonucleotide
uuuggagaccuggcuuggc

SEQ ID NO: 2672446 - RNA, 19 nt, Artificial Sequence
  Description of Artificial Sequence: Synthetic oligonucleotide
ggagaccuggcuuggcacc

SEQ ID NO: 2672447 - RNA, 19 nt, Artificial Sequence
  Description of Artificial Sequence: Synthetic oligonucleotide
aggccucucccaagcaagc

SEQ ID NO: 2672448 - RNA, 19 nt, Artificial Sequence
  Description of Artificial Sequence: Synthetic oligonucleotide
cuggcuuggcacccuggag

SEQ ID NO: 2672449 - RNA, 19 nt, Artificial Sequence
  Description of Artificial Sequence: Synthetic oligonucleotide
aguaagccuuggccaauaa

SEQ ID NO: 2672450 - RNA, 19 nt, Artificial Sequence
  Description of Artificial Sequence: Synthetic oligonucleotide
cacccugcccaccccaccc

SEQ ID NO: 2672451 - RNA, 19 nt, Artificial Sequence
  Description of Artificial Sequence: Synthetic oligonucleotide
uccauggcgguggcggcag

SEQ ID NO: 2672452 - RNA, 19 nt, Artificial Sequence
  Description of Artificial Sequence: Synthetic oligonucleotide
agcagcagggaaggguuug

SEQ ID NO: 2672453 - RNA, 19 nt, Artificial Sequence
  Description of Artificial Sequence: Synthetic oligonucleotide
ccucucccaagcaagcccc

SEQ ID NO: 2672454 - RNA, 19 nt, Artificial Sequence
  Description of Artificial Sequence: Synthetic oligonucleotide
ugcguccgccucagguggg

SEQ ID NO: 2672455 - RNA, 19 nt, Artificial Sequence
  Description of Artificial Sequence: Synthetic oligonucleotide
gcagcagcaguaguggggc

SEQ ID NO: 2672456 - RNA, 19 nt, Artificial Sequence
  Description of Artificial Sequence: Synthetic oligonucleotide
ggggagacaauaaaauaaa

SEQ ID NO: 2672457 - RNA, 19 nt, Artificial Sequence
  Description of Artificial Sequence: Synthetic oligonucleotide
gaccggggagacaauaaaa

SEQ ID NO: 2672458 - RNA, 19 nt, Artificial Sequence
  Description of Artificial Sequence: Synthetic oligonucleotide
aaguucgagcccagucaug

SEQ ID NO: 2672459 - RNA, 19 nt, Artificial Sequence
  Description of Artificial Sequence: Synthetic oligonucleotide
gcagaguuuccuuggugac

SEQ ID NO: 2672460 - RNA, 19 nt, Artificial Sequence
  Description of Artificial Sequence: Synthetic oligonucleotide
uucuccgccugcguccgcc

SEQ ID NO: 2672461 - RNA, 19 nt, Artificial Sequence
  Description of Artificial Sequence: Synthetic oligonucleotide
ggccaauaaguucgagccc

SEQ ID NO: 2672462 - RNA, 19 nt, Artificial Sequence
  Description of Artificial Sequence: Synthetic oligonucleotide
ccccauauaguucuuuuca

SEQ ID NO: 2672463 - RNA, 19 nt, Artificial Sequence
  Description of Artificial Sequence: Synthetic oligonucleotide
ugggcagagcguucccgac

SEQ ID NO: 2672464 - RNA, 19 nt, Artificial Sequence
  Description of Artificial Sequence: Synthetic oligonucleotide
cuuggccaauaaguucgag

SEQ ID NO: 2672465 - RNA, 19 nt, Artificial Sequence
  Description of Artificial Sequence: Synthetic oligonucleotide
aggugggccagggcgcggc

SEQ ID NO: 2672466 - RNA, 19 nt, Artificial Sequence
  Description of Artificial Sequence: Synthetic oligonucleotide
cuucgggaagccccucuuc

SEQ ID NO: 2672467 - RNA, 19 nt, Artificial Sequence
  Description of Artificial Sequence: Synthetic oligonucleotide
auguggcagggugcgacag

SEQ ID NO: 2672468 - RNA, 19 nt, Artificial Sequence
  Description of Artificial Sequence: Synthetic oligonucleotide
gccucucccaagcaagccc

SEQ ID NO: 2672469 - RNA, 19 nt, Artificial Sequence
  Description of Artificial Sequence: Synthetic oligonucleotide
gggcagagcguucccgacg

SEQ ID NO: 2672470 - RNA, 19 nt, Artificial Sequence
  Description of Artificial Sequence: Synthetic oligonucleotide
guucgagcccagucaugug

SEQ ID NO: 2672471 - RNA, 19 nt, Artificial Sequence
  Description of Artificial Sequence: Synthetic oligonucleotide
ggcgcggccccucuggaag

SEQ ID NO: 2672472 - RNA, 19 nt, Artificial Sequence
  Description of Artificial Sequence: Synthetic oligonucleotide
agcagcagcagcagcagua

SEQ ID NO: 2672473 - RNA, 19 nt, Artificial Sequence
  Description of Artificial Sequence: Synthetic oligonucleotide
acccgggagagcccuucag

SEQ ID NO: 2672474 - RNA, 19 nt, Artificial Sequence
  Description of Artificial Sequence: Synthetic oligonucleotide
agcagcugcuccauuugga

SEQ ID NO: 2672475 - RNA, 19 nt, Artificial Sequence
  Description of Artificial Sequence: Synthetic oligonucleotide
cccucugcgggccucuucg

SEQ ID NO: 2672476 - RNA, 19 nt, Artificial Sequence
  Description of Artificial Sequence: Synthetic oligonucleotide
cggggagacaauaaaauaa

SEQ ID NO: 2672477 - RNA, 19 nt, Artificial Sequence
  Description of Artificial Sequence: Synthetic oligonucleotide
gaagccccucuuccccagc

SEQ ID NO: 2672478 - RNA, 19 nt, Artificial Sequence
  Description of Artificial Sequence: Synthetic oligonucleotide
cagggcgcggccccucugg

SEQ ID NO: 2672479 - RNA, 19 nt, Artificial Sequence
  Description of Artificial Sequence: Synthetic oligonucleotide
gcaguaguggggccggcug

SEQ ID NO: 2672480 - RNA, 19 nt, Artificial Sequence
  Description of Artificial Sequence: Synthetic oligonucleotide
cagcagggaaggguuuggg

SEQ ID NO: 2672481 - RNA, 19 nt, Artificial Sequence
  Description of Artificial Sequence: Synthetic oligonucleotide
ucagccuccaggggcccug

SEQ ID NO: 2672482 - RNA, 19 nt, Artificial Sequence
  Description of Artificial Sequence: Synthetic oligonucleotide
uggcagggugcgacaggcc

SEQ ID NO: 2672483 - RNA, 19 nt, Artificial Sequence
  Description of Artificial Sequence: Synthetic oligonucleotide
cuuccccagcucagccucc

SEQ ID NO: 2672484 - RNA, 19 nt, Artificial Sequence
  Description of Artificial Sequence: Synthetic oligonucleotide
cuuggugaccgagguccag

SEQ ID NO: 2672485 - RNA, 19 nt, Artificial Sequence
  Description of Artificial Sequence: Synthetic oligonucleotide
ugcgggccucuucgggaag

SEQ ID NO: 2672486 - RNA, 19 nt, Artificial Sequence
  Description of Artificial Sequence: Synthetic oligonucleotide
cugggcagagcguucccga

SEQ ID NO: 2672487 - RNA, 19 nt, Artificial Sequence
  Description of Artificial Sequence: Synthetic oligonucleotide
ccgggagagcccuucagug

SEQ ID NO: 2672488 - RNA, 19 nt, Artificial Sequence
  Description of Artificial Sequence: Synthetic oligonucleotide
gaccuggcuuggcacccug

SEQ ID NO: 2672489 - RNA, 19 nt, Artificial Sequence
  Description of Artificial Sequence: Synthetic oligonucleotide
gcagcacggcagcagcagg

SEQ ID NO: 2672490 - RNA, 19 nt, Artificial Sequence
  Description of Artificial Sequence: Synthetic oligonucleotide
ggccucuucgggaagcccc

SEQ ID NO: 2672491 - RNA, 19 nt, Artificial Sequence
  Description of Artificial Sequence: Synthetic oligonucleotide
gugggcagcacggcagcag

SEQ ID NO: 2672492 - RNA, 19 nt, Artificial Sequence
  Description of Artificial Sequence: Synthetic oligonucleotide
guacggcuggagguggccc

SEQ ID NO: 2672493 - RNA, 19 nt, Artificial Sequence
  Description of Artificial Sequence: Synthetic oligonucleotide
ccaauaaguucgagcccag

SEQ ID NO: 2672494 - RNA, 19 nt, Artificial Sequence
  Description of Artificial Sequence: Synthetic oligonucleotide
ccgagguccagcacccugc

SEQ ID NO: 2672495 - RNA, 19 nt, Artificial Sequence
  Description of Artificial Sequence: Synthetic oligonucleotide
cauguggcagggugcgaca

SEQ ID NO: 2672496 - RNA, 19 nt, Artificial Sequence
  Description of Artificial Sequence: Synthetic oligonucleotide
cagcagcagcagcagcagc

SEQ ID NO: 2672497 - RNA, 19 nt, Artificial Sequence
  Description of Artificial Sequence: Synthetic oligonucleotide
ggcagcagcagcagcagca

SEQ ID NO: 2672498 - RNA, 19 nt, Artificial Sequence
  Description of Artificial Sequence: Synthetic oligonucleotide
gccugccugaggcuagggg

SEQ ID NO: 2672499 - RNA, 19 nt, Artificial Sequence
  Description of Artificial Sequence: Synthetic oligonucleotide
ggcuuggcacccuggagga

SEQ ID NO: 2672500 - RNA, 19 nt, Artificial Sequence
  Description of Artificial Sequence: Synthetic oligonucleotide
gggagacaauaaaauaaaa

SEQ ID NO: 2672501 - RNA, 19 nt, Artificial Sequence
  Description of Artificial Sequence: Synthetic oligonucleotide
ccugcguccgccucaggug

SEQ ID NO: 2672502 - RNA, 19 nt, Artificial Sequence
  Description of Artificial Sequence: Synthetic oligonucleotide
ggcuccgggguacggcugg

SEQ ID NO: 2672503 - RNA, 19 nt, Artificial Sequence
  Description of Artificial Sequence: Synthetic oligonucleotide
ggaagccccucuuccccag

SEQ ID NO: 2672504 - RNA, 19 nt, Artificial Sequence
  Description of Artificial Sequence: Synthetic oligonucleotide
auggcgguggcggcagcag

SEQ ID NO: 2672505 - RNA, 19 nt, Artificial Sequence
  Description of Artificial Sequence: Synthetic oligonucleotide
agcacggcagcagcaggga

SEQ ID NO: 2672506 - RNA, 19 nt, Artificial Sequence
  Description of Artificial Sequence: Synthetic oligonucleotide
agcacccugcccaccccac

SEQ ID NO: 2672507 - RNA, 19 nt, Artificial Sequence
  Description of Artificial Sequence: Synthetic oligonucleotide
agcaguaguggggccggcu

SEQ ID NO: 2672508 - RNA, 19 nt, Artificial Sequence
  Description of Artificial Sequence: Synthetic oligonucleotide
ccucuuccccagcucagcc

SEQ ID NO: 2672509 - RNA, 19 nt, Artificial Sequence
  Description of Artificial Sequence: Synthetic oligonucleotide
cacugggcgggaguccaag

SEQ ID NO: 2672510 - RNA, 19 nt, Artificial Sequence
  Description of Artificial Sequence: Synthetic oligonucleotide
gcagcagggaaggguuugg

SEQ ID NO: 2672511 - RNA, 19 nt, Artificial Sequence
  Description of Artificial Sequence: Synthetic oligonucleotide
gagcguucccgacgccuca

SEQ ID NO: 2672512 - RNA, 19 nt, Artificial Sequence
  Description of Artificial Sequence: Synthetic oligonucleotide
cagcagcaguaguggggcc

SEQ ID NO: 2672513 - RNA, 19 nt, Artificial Sequence
  Description of Artificial Sequence: Synthetic oligonucleotide
aggaccggggagacaauaa

SEQ ID NO: 2672514 - RNA, 19 nt, Artificial Sequence
  Description of Artificial Sequence: Synthetic oligonucleotide
ggcagcacggcagcagcag

SEQ ID NO: 2672515 - RNA, 19 nt, Artificial Sequence
  Description of Artificial Sequence: Synthetic oligonucleotide
uuccccagcucagccucca

SEQ ID NO: 2672516 - RNA, 19 nt, Artificial Sequence
  Description of Artificial Sequence: Synthetic oligonucleotide
gcugggcagagcguucccg

SEQ ID NO: 2672517 - RNA, 19 nt, Artificial Sequence
  Description of Artificial Sequence: Synthetic oligonucleotide
gggaccaaaggggcacccg

SEQ ID NO: 2672518 - RNA, 19 nt, Artificial Sequence
  Description of Artificial Sequence: Synthetic oligonucleotide
gccucagcacuuccugcag

SEQ ID NO: 2672519 - RNA, 19 nt, Artificial Sequence
  Description of Artificial Sequence: Synthetic oligonucleotide
ggaccggggagacaauaaa

SEQ ID NO: 2672520 - RNA, 19 nt, Artificial Sequence
  Description of Artificial Sequence: Synthetic oligonucleotide
agcguucccgacgccucag

SEQ ID NO: 2672521 - RNA, 19 nt, Artificial Sequence
  Description of Artificial Sequence: Synthetic oligonucleotide
uuucuccgccugcguccgc

SEQ ID NO: 2672522 - RNA, 19 nt, Artificial Sequence
  Description of Artificial Sequence: Synthetic oligonucleotide
gcagcagcagcagcagcag

SEQ ID NO: 2672523 - RNA, 19 nt, Artificial Sequence
  Description of Artificial Sequence: Synthetic oligonucleotide
gggugcgacaggccucucc

SEQ ID NO: 2672524 - RNA, 19 nt, Artificial Sequence
  Description of Artificial Sequence: Synthetic oligonucleotide
auccauggcgguggcggca

SEQ ID NO: 2672525 - RNA, 19 nt, Artificial Sequence
  Description of Artificial Sequence: Synthetic oligonucleotide
gaggaccggggagacaaua

SEQ ID NO: 2672526 - RNA, 19 nt, Artificial Sequence
  Description of Artificial Sequence: Synthetic oligonucleotide
uccaggggcccugggccug

SEQ ID NO: 2672527 - RNA, 19 nt, Artificial Sequence
  Description of Artificial Sequence: Synthetic oligonucleotide
ucuccgccugcguccgccu

SEQ ID NO: 2672528 - RNA, 19 nt, Artificial Sequence
  Description of Artificial Sequence: Synthetic oligonucleotide
ccagcucagccuccagggg

SEQ ID NO: 2672529 - RNA, 19 nt, Artificial Sequence
  Description of Artificial Sequence: Synthetic oligonucleotide
ggagagcccuucagugggg

SEQ ID NO: 2672530 - RNA, 19 nt, Artificial Sequence
  Description of Artificial Sequence: Synthetic oligonucleotide
gguacggcuggagguggcc

SEQ ID NO: 2672531 - RNA, 19 nt, Artificial Sequence
  Description of Artificial Sequence: Synthetic oligonucleotide
cacccuggaggaccgggga

SEQ ID NO: 2672532 - RNA, 19 nt, Artificial Sequence
  Description of Artificial Sequence: Synthetic oligonucleotide
ggcagggugcgacaggccu

SEQ ID NO: 2672533 - RNA, 19 nt, Artificial Sequence
  Description of Artificial Sequence: Synthetic oligonucleotide
cucagcacuuccugcaguu

SEQ ID NO: 2672534 - RNA, 19 nt, Artificial Sequence
  Description of Artificial Sequence: Synthetic oligonucleotide
agccuccaggggcccuggg

SEQ ID NO: 2672535 - RNA, 19 nt, Artificial Sequence
  Description of Artificial Sequence: Synthetic oligonucleotide
ggggcccugggccugccug

SEQ ID NO: 2672536 - RNA, 19 nt, Artificial Sequence
  Description of Artificial Sequence: Synthetic oligonucleotide
gaguuuccuuggugaccga

SEQ ID NO: 2672537 - RNA, 19 nt, Artificial Sequence
  Description of Artificial Sequence: Synthetic oligonucleotide
gcaagaaggccuccaggcu

SEQ ID NO: 2672538 - RNA, 19 nt, Artificial Sequence
  Description of Artificial Sequence: Synthetic oligonucleotide
ggugaccgagguccagcac

SEQ ID NO: 2672539 - RNA, 19 nt, Artificial Sequence
  Description of Artificial Sequence: Synthetic oligonucleotide
guccgccucaggugggcca

SEQ ID NO: 2672540 - RNA, 19 nt, Artificial Sequence
  Description of Artificial Sequence: Synthetic oligonucleotide
gcacccuggaggaccgggg

SEQ ID NO: 2672541 - RNA, 19 nt, Artificial Sequence
  Description of Artificial Sequence: Synthetic oligonucleotide
gggaagccccucuucccca

SEQ ID NO: 2672542 - RNA, 19 nt, Artificial Sequence
  Description of Artificial Sequence: Synthetic oligonucleotide
ggccccucuggaaggcugg

SEQ ID NO: 2672543 - RNA, 19 nt, Artificial Sequence
  Description of Artificial Sequence: Synthetic oligonucleotide
gccccucuuccccagcuca

SEQ ID NO: 2672544 - RNA, 19 nt, Artificial Sequence
  Description of Artificial Sequence: Synthetic oligonucleotide
ccggggagacaauaaaaua

SEQ ID NO: 2672545 - RNA, 19 nt, Artificial Sequence
  Description of Artificial Sequence: Synthetic oligonucleotide
ggccucucccaagcaagcc

SEQ ID NO: 2672546 - RNA, 19 nt, Artificial Sequence
  Description of Artificial Sequence: Synthetic oligonucleotide
cgggaagccccucuucccc

SEQ ID NO: 2672547 - RNA, 19 nt, Artificial Sequence
  Description of Artificial Sequence: Synthetic oligonucleotide
agggcgcggccccucugga

SEQ ID NO: 2672548 - RNA, 19 nt, Artificial Sequence
  Description of Artificial Sequence: Synthetic oligonucleotide
gugcgacaggccucuccca

SEQ ID NO: 2672549 - RNA, 19 nt, Artificial Sequence
  Description of Artificial Sequence: Synthetic oligonucleotide
cugcgggccucuucgggaa

SEQ ID NO: 2672550 - RNA, 19 nt, Artificial Sequence
  Description of Artificial Sequence: Synthetic oligonucleotide
ccauauaguucuuuucauu

SEQ ID NO: 2672551 - RNA, 19 nt, Artificial Sequence
  Description of Artificial Sequence: Synthetic oligonucleotide
ccuccaggcucuguucccc

SEQ ID NO: 2672552 - RNA, 19 nt, Artificial Sequence
  Description of Artificial Sequence: Synthetic oligonucleotide
gccccggugggcagcacgg

SEQ ID NO: 2672553 - RNA, 19 nt, Artificial Sequence
  Description of Artificial Sequence: Synthetic oligonucleotide
cauggcgguggcggcagca

SEQ ID NO: 2672554 - RNA, 19 nt, Artificial Sequence
  Description of Artificial Sequence: Synthetic oligonucleotide
caggcuccgggguacggcu

SEQ ID NO: 2672555 - RNA, 19 nt, Artificial Sequence
  Description of Artificial Sequence: Synthetic oligonucleotide
agaccuggcuuggcacccu

SEQ ID NO: 2672556 - RNA, 19 nt, Artificial Sequence
  Description of Artificial Sequence: Synthetic oligonucleotide
gcuggcaagaaggccucca

SEQ ID NO: 2672557 - RNA, 19 nt, Artificial Sequence
  Description of Artificial Sequence: Synthetic oligonucleotide
ucccgacgccucagcacuu

SEQ ID NO: 2672558 - RNA, 19 nt, Artificial Sequence
  Description of Artificial Sequence: Synthetic oligonucleotide
cuccgggguacggcuggag

SEQ ID NO: 2672559 - RNA, 19 nt, Artificial Sequence
  Description of Artificial Sequence: Synthetic oligonucleotide
cagcacccugcccacccca

SEQ ID NO: 2672560 - RNA, 19 nt, Artificial Sequence
  Description of Artificial Sequence: Synthetic oligonucleotide
gcgcggccccucuggaagg

SEQ ID NO: 2672561 - RNA, 19 nt, Artificial Sequence
  Description of Artificial Sequence: Synthetic oligonucleotide
gcaggcuccgggguacggc

SEQ ID NO: 2672562 - RNA, 19 nt, Artificial Sequence
  Description of Artificial Sequence: Synthetic oligonucleotide
agaaggccuccaggcucug

SEQ ID NO: 2672563 - RNA, 19 nt, Artificial Sequence
  Description of Artificial Sequence: Synthetic oligonucleotide
uggcacccuggaggaccgg

SEQ ID NO: 2672564 - RNA, 19 nt, Artificial Sequence
  Description of Artificial Sequence: Synthetic oligonucleotide
ggggauccauggcgguggc

SEQ ID NO: 2672565 - RNA, 19 nt, Artificial Sequence
  Description of Artificial Sequence: Synthetic oligonucleotide
gggauccauggcgguggcg

SEQ ID NO: 2672566 - RNA, 19 nt, Artificial Sequence
  Description of Artificial Sequence: Synthetic oligonucleotide
ggggaccaaaggggcaccc

SEQ ID NO: 2672567 - RNA, 19 nt, Artificial Sequence
  Description of Artificial Sequence: Synthetic oligonucleotide
ccucugcgggccucuucgg

SEQ ID NO: 2672568 - RNA, 19 nt, Artificial Sequence
  Description of Artificial Sequence: Synthetic oligonucleotide
cccauauaguucuuuucau

SEQ ID NO: 2672569 - RNA, 19 nt, Artificial Sequence
  Description of Artificial Sequence: Synthetic oligonucleotide
cucuucgggaagccccucu

SEQ ID NO: 2672570 - RNA, 19 nt, Artificial Sequence
  Description of Artificial Sequence: Synthetic oligonucleotide
caauaaguucgagcccagu

SEQ ID NO: 2672571 - RNA, 19 nt, Artificial Sequence
  Description of Artificial Sequence: Synthetic oligonucleotide
caguaagccuuggccaaua

SEQ ID NO: 2672572 - RNA, 19 nt, Artificial Sequence
  Description of Artificial Sequence: Synthetic oligonucleotide
cagagcguucccgacgccu

SEQ ID NO: 2672573 - RNA, 19 nt, Artificial Sequence
  Description of Artificial Sequence: Synthetic oligonucleotide
ccuggcuuggcacccugga

SEQ ID NO: 2672574 - RNA, 19 nt, Artificial Sequence
  Description of Artificial Sequence: Synthetic oligonucleotide
gugggccagggcgcggccc

SEQ ID NO: 2672575 - RNA, 19 nt, Artificial Sequence
  Description of Artificial Sequence: Synthetic oligonucleotide
cagccuccaggggcccugg

SEQ ID NO: 2672576 - RNA, 19 nt, Artificial Sequence
  Description of Artificial Sequence: Synthetic oligonucleotide
ccgacgccucagcacuucc

SEQ ID NO: 2672577 - RNA, 19 nt, Artificial Sequence
  Description of Artificial Sequence: Synthetic oligonucleotide
gucauguggcagggugcga

SEQ ID NO: 2672578 - RNA, 19 nt, Artificial Sequence
  Description of Artificial Sequence: Synthetic oligonucleotide
ggggcacugggcgggaguc

SEQ ID NO: 2672579 - RNA, 19 nt, Artificial Sequence
  Description of Artificial Sequence: Synthetic oligonucleotide
gccugcguccgccucaggu

SEQ ID NO: 2672580 - RNA, 19 nt, Artificial Sequence
  Description of Artificial Sequence: Synthetic oligonucleotide
ccccgggcggccccggugg

SEQ ID NO: 2672581 - RNA, 19 nt, Artificial Sequence
  Description of Artificial Sequence: Synthetic oligonucleotide
ggcaggcuccgggguacgg

SEQ ID NO: 2672582 - RNA, 19 nt, Artificial Sequence
  Description of Artificial Sequence: Synthetic oligonucleotide
cgagguccagcacccugcc

SEQ ID NO: 2672583 - RNA, 19 nt, Artificial Sequence
  Description of Artificial Sequence: Synthetic oligonucleotide
cccucuuccccagcucagc

SEQ ID NO: 2672584 - RNA, 19 nt, Artificial Sequence
  Description of Artificial Sequence: Synthetic oligonucleotide
ccuggaggaccggggagac

SEQ ID NO: 2672585 - RNA, 19 nt, Artificial Sequence
  Description of Artificial Sequence: Synthetic oligonucleotide
gccucaggugggccagggc

SEQ ID NO: 2672586 - RNA, 19 nt, Artificial Sequence
  Description of Artificial Sequence: Synthetic oligonucleotide
aggcuccgggguacggcug

SEQ ID NO: 2672587 - RNA, 19 nt, Artificial Sequence
  Description of Artificial Sequence: Synthetic oligonucleotide
cagcaguaguggggccggc

SEQ ID NO: 2672588 - RNA, 19 nt, Artificial Sequence
  Description of Artificial Sequence: Synthetic oligonucleotide
caggugggccagggcgcgg

SEQ ID NO: 2672589 - RNA, 19 nt, Artificial Sequence
  Description of Artificial Sequence: Synthetic oligonucleotide
gcguucccgacgccucagc

SEQ ID NO: 2672590 - RNA, 19 nt, Artificial Sequence
  Description of Artificial Sequence: Synthetic oligonucleotide
ggggcaggcuccgggguac

SEQ ID NO: 2672591 - RNA, 19 nt, Artificial Sequence
  Description of Artificial Sequence: Synthetic oligonucleotide
uggggccggcugggcagag

SEQ ID NO: 2672592 - RNA, 19 nt, Artificial Sequence
  Description of Artificial Sequence: Synthetic oligonucleotide
ccuuggccaauaaguucga

SEQ ID NO: 2672593 - RNA, 19 nt, Artificial Sequence
  Description of Artificial Sequence: Synthetic oligonucleotide
ggugggccagggcgcggcc

SEQ ID NO: 2672594 - RNA, 19 nt, Artificial Sequence
  Description of Artificial Sequence: Synthetic oligonucleotide
gcagggugcgacaggccuc

SEQ ID NO: 2672595 - RNA, 19 nt, Artificial Sequence
  Description of Artificial Sequence: Synthetic oligonucleotide
gcagagcguucccgacgcc

SEQ ID NO: 2672596 - RNA, 19 nt, Artificial Sequence
  Description of Artificial Sequence: Synthetic oligonucleotide
cagggugcgacaggccucu

SEQ ID NO: 2672597 - RNA, 19 nt, Artificial Sequence
  Description of Artificial Sequence: Synthetic oligonucleotide
aggggcccugggccugccu

SEQ ID NO: 2672598 - RNA, 19 nt, Artificial Sequence
  Description of Artificial Sequence: Synthetic oligonucleotide
cacccgggagagcccuuca

SEQ ID NO: 2672599 - RNA, 19 nt, Artificial Sequence
  Description of Artificial Sequence: Synthetic oligonucleotide
cgccucagcacuuccugca

SEQ ID NO: 2672600 - RNA, 19 nt, Artificial Sequence
  Description of Artificial Sequence: Synthetic oligonucleotide
gcgggccucuucgggaagc

SEQ ID NO: 2672601 - RNA, 19 nt, Artificial Sequence
  Description of Artificial Sequence: Synthetic oligonucleotide
gggccucuucgggaagccc

SEQ ID NO: 2672602 - RNA, 19 nt, Artificial Sequence
  Description of Artificial Sequence: Synthetic oligonucleotide
gggcccugggccugccuga

SEQ ID NO: 2672603 - RNA, 19 nt, Artificial Sequence
  Description of Artificial Sequence: Synthetic oligonucleotide
ccuuggugaccgaggucca

SEQ ID NO: 2672604 - RNA, 19 nt, Artificial Sequence
  Description of Artificial Sequence: Synthetic oligonucleotide
agggugcgacaggccucuc

SEQ ID NO: 2672605 - RNA, 19 nt, Artificial Sequence
  Description of Artificial Sequence: Synthetic oligonucleotide
ggcuggcaagaaggccucc

SEQ ID NO: 2672606 - RNA, 19 nt, Artificial Sequence
  Description of Artificial Sequence: Synthetic oligonucleotide
gggcacugggcgggagucc

SEQ ID NO: 2672607 - RNA, 19 nt, Artificial Sequence
  Description of Artificial Sequence: Synthetic oligonucleotide
ggcccugggccugccugag

SEQ ID NO: 2672608 - RNA, 19 nt, Artificial Sequence
  Description of Artificial Sequence: Synthetic oligonucleotide
ggugggcagcacggcagca

SEQ ID NO: 2672609 - RNA, 19 nt, Artificial Sequence
  Description of Artificial Sequence: Synthetic oligonucleotide
cgggguacggcuggaggug

SEQ ID NO: 2672610 - RNA, 19 nt, Artificial Sequence
  Description of Artificial Sequence: Synthetic oligonucleotide
cuggaggaccggggagaca

SEQ ID NO: 2672611 - RNA, 19 nt, Artificial Sequence
  Description of Artificial Sequence: Synthetic oligonucleotide
cggugggcagcacggcagc

SEQ ID NO: 2672612 - RNA, 19 nt, Artificial Sequence
  Description of Artificial Sequence: Synthetic oligonucleotide
ccgggguacggcuggaggu

SEQ ID NO: 2672613 - RNA, 19 nt, Artificial Sequence
  Description of Artificial Sequence: Synthetic oligonucleotide
cagcagcagcagcagcagu

SEQ ID NO: 2672614 - RNA, 19 nt, Artificial Sequence
  Description of Artificial Sequence: Synthetic oligonucleotide
gggcaggcuccgggguacg

SEQ ID NO: 2672615 - RNA, 19 nt, Artificial Sequence
  Description of Artificial Sequence: Synthetic oligonucleotide
cguucccgacgccucagca

SEQ ID NO: 2672616 - RNA, 19 nt, Artificial Sequence
  Description of Artificial Sequence: Synthetic oligonucleotide
guggggccggcugggcaga

SEQ ID NO: 2672617 - RNA, 19 nt, Artificial Sequence
  Description of Artificial Sequence: Synthetic oligonucleotide
gggcagcacggcagcagca

SEQ ID NO: 2672618 - RNA, 19 nt, Artificial Sequence
  Description of Artificial Sequence: Synthetic oligonucleotide
ccggcugggcagagcguuc

SEQ ID NO: 2672619 - RNA, 19 nt, Artificial Sequence
  Description of Artificial Sequence: Synthetic oligonucleotide
gcguccgccucaggugggc

SEQ ID NO: 2672620 - RNA, 19 nt, Artificial Sequence
  Description of Artificial Sequence: Synthetic oligonucleotide
ggggcacccgggagagccc

SEQ ID NO: 2672621 - RNA, 19 nt, Artificial Sequence
  Description of Artificial Sequence: Synthetic oligonucleotide
gcuuggcacccuggaggac

SEQ ID NO: 2672622 - RNA, 19 nt, Artificial Sequence
  Description of Artificial Sequence: Synthetic oligonucleotide
gcacccgggagagcccuuc

SEQ ID NO: 2672623 - RNA, 19 nt, Artificial Sequence
  Description of Artificial Sequence: Synthetic oligonucleotide
gccccucuggaaggcuggc

SEQ ID NO: 2672624 - RNA, 19 nt, Artificial Sequence
  Description of Artificial Sequence: Synthetic oligonucleotide
cggcagcagcagcagcagc

SEQ ID NO: 2672625 - RNA, 19 nt, Artificial Sequence
  Description of Artificial Sequence: Synthetic oligonucleotide
cagcagcagggaaggguuu

SEQ ID NO: 2672626 - RNA, 19 nt, Artificial Sequence
  Description of Artificial Sequence: Synthetic oligonucleotide
caggggcccugggccugcc

SEQ ID NO: 2672627 - RNA, 19 nt, Artificial Sequence
  Description of Artificial Sequence: Synthetic oligonucleotide
cccgggagagcccuucagu

SEQ ID NO: 2672628 - RNA, 19 nt, Artificial Sequence
  Description of Artificial Sequence: Synthetic oligonucleotide
gcccucugcgggccucuuc

SEQ ID NO: 2672629 - RNA, 19 nt, Artificial Sequence
  Description of Artificial Sequence: Synthetic oligonucleotide
ccucagcacuuccugcagu

SEQ ID NO: 2672630 - RNA, 19 nt, Artificial Sequence
  Description of Artificial Sequence: Synthetic oligonucleotide
gaccgagguccagcacccu

SEQ ID NO: 2672631 - RNA, 19 nt, Artificial Sequence
  Description of Artificial Sequence: Synthetic oligonucleotide
cccgacgccucagcacuuc

SEQ ID NO: 2672632 - RNA, 19 nt, Artificial Sequence
  Description of Artificial Sequence: Synthetic oligonucleotide
ggcggccccggugggcagc

SEQ ID NO: 2672633 - RNA, 19 nt, Artificial Sequence
  Description of Artificial Sequence: Synthetic oligonucleotide
gccucuucgggaagccccu

SEQ ID NO: 2672634 - RNA, 19 nt, Artificial Sequence
  Description of Artificial Sequence: Synthetic oligonucleotide
cgccucaggugggccaggg

SEQ ID NO: 2672635 - RNA, 19 nt, Artificial Sequence
  Description of Artificial Sequence: Synthetic oligonucleotide
cgggccucuucgggaagcc

SEQ ID NO: 2672636 - RNA, 19 nt, Artificial Sequence
  Description of Artificial Sequence: Synthetic oligonucleotide
cgagcccagucauguggca

SEQ ID NO: 2672637 - RNA, 19 nt, Artificial Sequence
  Description of Artificial Sequence: Synthetic oligonucleotide
cgguggcggcagcagcagc

SEQ ID NO: 2672638 - RNA, 19 nt, Artificial Sequence
  Description of Artificial Sequence: Synthetic oligonucleotide
gggcgcggccccucuggaa

SEQ ID NO: 2672639 - RNA, 19 nt, Artificial Sequence
  Description of Artificial Sequence: Synthetic oligonucleotide
ccgccugcguccgccucag

SEQ ID NO: 2672640 - RNA, 19 nt, Artificial Sequence
  Description of Artificial Sequence: Synthetic oligonucleotide
ccagggcgcggccccucug

SEQ ID NO: 2672641 - RNA, 19 nt, Artificial Sequence
  Description of Artificial Sequence: Synthetic oligonucleotide
ccaggggcccugggccugc

SEQ ID NO: 2672642 - RNA, 19 nt, Artificial Sequence
  Description of Artificial Sequence: Synthetic oligonucleotide
ccucuucgggaagccccuc

SEQ ID NO: 2672643 - RNA, 19 nt, Artificial Sequence
  Description of Artificial Sequence: Synthetic oligonucleotide
cguccgccucaggugggcc

SEQ ID NO: 2672644 - RNA, 19 nt, Artificial Sequence
  Description of Artificial Sequence: Synthetic oligonucleotide
ccccggugggcagcacggc

SEQ ID NO: 2672645 - RNA, 19 nt, Artificial Sequence
  Description of Artificial Sequence: Synthetic oligonucleotide
ccagcccucugcgggccuc

SEQ ID NO: 2672646 - RNA, 19 nt, Artificial Sequence
  Description of Artificial Sequence: Synthetic oligonucleotide
agcccucugcgggccucuu

SEQ ID NO: 2672647 - RNA, 19 nt, Artificial Sequence
  Description of Artificial Sequence: Synthetic oligonucleotide
gccggcugggcagagcguu

SEQ ID NO: 2672648 - RNA, 19 nt, Artificial Sequence
  Description of Artificial Sequence: Synthetic oligonucleotide
gggcacccgggagagcccu

SEQ ID NO: 2672649 - RNA, 19 nt, Artificial Sequence
  Description of Artificial Sequence: Synthetic oligonucleotide
ccccucuggaaggcuggca

SEQ ID NO: 2672650 - RNA, 19 nt, Artificial Sequence
  Description of Artificial Sequence: Synthetic oligonucleotide
cgcggccccucuggaaggc

SEQ ID NO: 2672651 - RNA, 19 nt, Artificial Sequence
  Description of Artificial Sequence: Synthetic oligonucleotide
gcuccgggguacggcugga

SEQ ID NO: 2672652 - RNA, 19 nt, Artificial Sequence
  Description of Artificial Sequence: Synthetic oligonucleotide
ccaguaagccuuggccaau

SEQ ID NO: 2672653 - RNA, 19 nt, Artificial Sequence
  Description of Artificial Sequence: Synthetic oligonucleotide
ccgggcggccccggugggc

SEQ ID NO: 2672654 - RNA, 19 nt, Artificial Sequence
  Description of Artificial Sequence: Synthetic oligonucleotide
gcacugggcgggaguccaa

SEQ ID NO: 2672655 - RNA, 19 nt, Artificial Sequence
  Description of Artificial Sequence: Synthetic oligonucleotide
cagcccucugcgggccucu

SEQ ID NO: 2672656 - RNA, 19 nt, Artificial Sequence
  Description of Artificial Sequence: Synthetic oligonucleotide
cagcagcagcugcuccauu

SEQ ID NO: 2672657 - RNA, 19 nt, Artificial Sequence
  Description of Artificial Sequence: Synthetic oligonucleotide
gccagggcgcggccccucu

SEQ ID NO: 2672658 - RNA, 19 nt, Artificial Sequence
  Description of Artificial Sequence: Synthetic oligonucleotide
ggccagggcgcggccccuc

SEQ ID NO: 2672659 - RNA, 19 nt, Artificial Sequence
  Description of Artificial Sequence: Synthetic oligonucleotide
ggaggaccggggagacaau

SEQ ID NO: 2672660 - RNA, 19 nt, Artificial Sequence
  Description of Artificial Sequence: Synthetic oligonucleotide
cgggcggccccggugggca

SEQ ID NO: 2672661 - RNA, 19 nt, Artificial Sequence
  Description of Artificial Sequence: Synthetic oligonucleotide
ggccggcugggcagagcgu

SEQ ID NO: 2672662 - RNA, 19 nt, Artificial Sequence
  Description of Artificial Sequence: Synthetic oligonucleotide
gcggccccucuggaaggcu

SEQ ID NO: 2672663 - RNA, 19 nt, Artificial Sequence
  Description of Artificial Sequence: Synthetic oligonucleotide
cgccugcguccgccucagg

SEQ ID NO: 2672664 - RNA, 19 nt, Artificial Sequence
  Description of Artificial Sequence: Synthetic oligonucleotide
cccagucauguggcagggu

SEQ ID NO: 2672665 - RNA, 19 nt, Artificial Sequence
  Description of Artificial Sequence: Synthetic oligonucleotide
cccagcccucugcgggccu

SEQ ID NO: 2672666 - RNA, 19 nt, Artificial Sequence
  Description of Artificial Sequence: Synthetic oligonucleotide
ggcacccgggagagcccuu

SEQ ID NO: 2672667 - RNA, 19 nt, Artificial Sequence
  Description of Artificial Sequence: Synthetic oligonucleotide
cggccccggugggcagcac

SEQ ID NO: 2672668 - RNA, 19 nt, Artificial Sequence
  Description of Artificial Sequence: Synthetic oligonucleotide
aagaccaauaaccaaaggc

SEQ ID NO: 2672669 - RNA, 19 nt, Artificial Sequence
  Description of Artificial Sequence: Synthetic oligonucleotide
agggguacaacugugaccc

SEQ ID NO: 2672670 - RNA, 19 nt, Artificial Sequence
  Description of Artificial Sequence: Synthetic oligonucleotide
ucaaucuccguucuggaag

SEQ ID NO: 2672671 - RNA, 19 nt, Artificial Sequence
  Description of Artificial Sequence: Synthetic oligonucleotide
aauguccaugcagaaagcc

SEQ ID NO: 2672672 - RNA, 19 nt, Artificial Sequence
  Description of Artificial Sequence: Synthetic oligonucleotide
gaaagguacgccaugacag

SEQ ID NO: 2672673 - RNA, 19 nt, Artificial Sequence
  Description of Artificial Sequence: Synthetic oligonucleotide
aauaaccaaaggcaaggca

SEQ ID NO: 2672674 - RNA, 19 nt, Artificial Sequence
  Description of Artificial Sequence: Synthetic oligonucleotide
aaagguacgccaugacagg

SEQ ID NO: 2672675 - RNA, 19 nt, Artificial Sequence
  Description of Artificial Sequence: Synthetic oligonucleotide
accccuaugaacuauguca

SEQ ID NO: 2672676 - RNA, 19 nt, Artificial Sequence
  Description of Artificial Sequence: Synthetic oligonucleotide
auaaccaaaggcaaggcag

SEQ ID NO: 2672677 - RNA, 19 nt, Artificial Sequence
  Description of Artificial Sequence: Synthetic oligonucleotide
uaaccaaaggcaaggcagg

SEQ ID NO: 2672678 - RNA, 19 nt, Artificial Sequence
  Description of Artificial Sequence: Synthetic oligonucleotide
ugaacuaugucaccccacc

SEQ ID NO: 2672679 - RNA, 19 nt, Artificial Sequence
  Description of Artificial Sequence: Synthetic oligonucleotide
acuaccaaugagcuuccgc

SEQ ID NO: 2672680 - RNA, 19 nt, Artificial Sequence
  Description of Artificial Sequence: Synthetic oligonucleotide
gaagacgacggcaaggagg

SEQ ID NO: 2672681 - RNA, 19 nt, Artificial Sequence
  Description of Artificial Sequence: Synthetic oligonucleotide
ucgaucacucugcaggugg

SEQ ID NO: 2672682 - RNA, 19 nt, Artificial Sequence
  Description of Artificial Sequence: Synthetic oligonucleotide
aagacgacggcaaggaggg

SEQ ID NO: 2672683 - RNA, 19 nt, Artificial Sequence
  Description of Artificial Sequence: Synthetic oligonucleotide
gaugcaggcagguagcccc

SEQ ID NO: 2672684 - RNA, 19 nt, Artificial Sequence
  Description of Artificial Sequence: Synthetic oligonucleotide
aacuaugucaccccacccu

SEQ ID NO: 2672685 - RNA, 19 nt, Artificial Sequence
  Description of Artificial Sequence: Synthetic oligonucleotide
cagaaagccaucuuggcug

SEQ ID NO: 2672686 - RNA, 19 nt, Artificial Sequence
  Description of Artificial Sequence: Synthetic oligonucleotide
aaaggcaaggcaggaaagg

SEQ ID NO: 2672687 - RNA, 19 nt, Artificial Sequence
  Description of Artificial Sequence: Synthetic oligonucleotide
cccaagaagaccaauaacc

SEQ ID NO: 2672688 - RNA, 19 nt, Artificial Sequence
  Description of Artificial Sequence: Synthetic oligonucleotide
ugugucugugcccaggggc

SEQ ID NO: 2672689 - RNA, 19 nt, Artificial Sequence
  Description of Artificial Sequence: Synthetic oligonucleotide
ucuguguccagaugcagcc

SEQ ID NO: 2672690 - RNA, 19 nt, Artificial Sequence
  Description of Artificial Sequence: Synthetic oligonucleotide
aagaagaccaauaaccaaa

SEQ ID NO: 2672691 - RNA, 19 nt, Artificial Sequence
  Description of Artificial Sequence: Synthetic oligonucleotide
auccacacuaccaaugagc

SEQ ID NO: 2672692 - RNA, 19 nt, Artificial Sequence
  Description of Artificial Sequence: Synthetic oligonucleotide
agagaucauccacacuacc

SEQ ID NO: 2672693 - RNA, 19 nt, Artificial Sequence
  Description of Artificial Sequence: Synthetic oligonucleotide
agggcaagagaucauccac

SEQ ID NO: 2672694 - RNA, 19 nt, Artificial Sequence
  Description of Artificial Sequence: Synthetic oligonucleotide
uccacacuaccaaugagcu

SEQ ID NO: 2672695 - RNA, 19 nt, Artificial Sequence
  Description of Artificial Sequence: Synthetic oligonucleotide
agaccaauaaccaaaggca

SEQ ID NO: 2672696 - RNA, 19 nt, Artificial Sequence
  Description of Artificial Sequence: Synthetic oligonucleotide
ucuccguucuggaagacga

SEQ ID NO: 2672697 - RNA, 19 nt, Artificial Sequence
  Description of Artificial Sequence: Synthetic oligonucleotide
cacacuaccaaugagcuuc

SEQ ID NO: 2672698 - RNA, 19 nt, Artificial Sequence
  Description of Artificial Sequence: Synthetic oligonucleotide
caugcagaaagccaucuug

SEQ ID NO: 2672699 - RNA, 19 nt, Artificial Sequence
  Description of Artificial Sequence: Synthetic oligonucleotide
uaugaacuaugucacccca

SEQ ID NO: 2672700 - RNA, 19 nt, Artificial Sequence
  Description of Artificial Sequence: Synthetic oligonucleotide
agucccacguucuugacca

SEQ ID NO: 2672701 - RNA, 19 nt, Artificial Sequence
  Description of Artificial Sequence: Synthetic oligonucleotide
aaggcaggaaagguacgcc

SEQ ID NO: 2672702 - RNA, 19 nt, Artificial Sequence
  Description of Artificial Sequence: Synthetic oligonucleotide
uucuugaccaccaccacau

SEQ ID NO: 2672703 - RNA, 19 nt, Artificial Sequence
  Description of Artificial Sequence: Synthetic oligonucleotide
aggugggugggccagauug

SEQ ID NO: 2672704 - RNA, 19 nt, Artificial Sequence
  Description of Artificial Sequence: Synthetic oligonucleotide
uguccaugcagaaagccau

SEQ ID NO: 2672705 - RNA, 19 nt, Artificial Sequence
  Description of Artificial Sequence: Synthetic oligonucleotide
ucgugcaaaguggugaggg

SEQ ID NO: 2672706 - RNA, 19 nt, Artificial Sequence
  Description of Artificial Sequence: Synthetic oligonucleotide
agcaguaccccuaugaacu

SEQ ID NO: 2672707 - RNA, 19 nt, Artificial Sequence
  Description of Artificial Sequence: Synthetic oligonucleotide
cuaugaacuaugucacccc

SEQ ID NO: 2672708 - RNA, 19 nt, Artificial Sequence
  Description of Artificial Sequence: Synthetic oligonucleotide
gaagaccaauaaccaaagg

SEQ ID NO: 2672709 - RNA, 19 nt, Artificial Sequence
  Description of Artificial Sequence: Synthetic oligonucleotide
aagagaucauccacacuac

SEQ ID NO: 2672710 - RNA, 19 nt, Artificial Sequence
  Description of Artificial Sequence: Synthetic oligonucleotide
agaaccuuggcuuggucca

SEQ ID NO: 2672711 - RNA, 19 nt, Artificial Sequence
  Description of Artificial Sequence: Synthetic oligonucleotide
uucccaagaagaccaauaa

SEQ ID NO: 2672712 - RNA, 19 nt, Artificial Sequence
  Description of Artificial Sequence: Synthetic oligonucleotide
aaggggaagucgugcaaag

SEQ ID NO: 2672713 - RNA, 19 nt, Artificial Sequence
  Description of Artificial Sequence: Synthetic oligonucleotide
aagucgugcaaagugguga

SEQ ID NO: 2672714 - RNA, 19 nt, Artificial Sequence
  Description of Artificial Sequence: Synthetic oligonucleotide
cuaccaaugagcuuccgca

SEQ ID NO: 2672715 - RNA, 19 nt, Artificial Sequence
  Description of Artificial Sequence: Synthetic oligonucleotide
uguguccagaugcagccug

SEQ ID NO: 2672716 - RNA, 19 nt, Artificial Sequence
  Description of Artificial Sequence: Synthetic oligonucleotide
agaaagccaucuuggcugg

SEQ ID NO: 2672717 - RNA, 19 nt, Artificial Sequence
  Description of Artificial Sequence: Synthetic oligonucleotide
cagaaccuuggcuuggucc

SEQ ID NO: 2672718 - RNA, 19 nt, Artificial Sequence
  Description of Artificial Sequence: Synthetic oligonucleotide
accaaugagcuuccgcagg

SEQ ID NO: 2672719 - RNA, 19 nt, Artificial Sequence
  Description of Artificial Sequence: Synthetic oligonucleotide
acuaugucaccccacccug

SEQ ID NO: 2672720 - RNA, 19 nt, Artificial Sequence
  Description of Artificial Sequence: Synthetic oligonucleotide
gaggcugugagcaucugcc

SEQ ID NO: 2672721 - RNA, 19 nt, Artificial Sequence
  Description of Artificial Sequence: Synthetic oligonucleotide
ucagggaugucacagcauu

SEQ ID NO: 2672722 - RNA, 19 nt, Artificial Sequence
  Description of Artificial Sequence: Synthetic oligonucleotide
ucagccuucccaagaagac

SEQ ID NO: 2672723 - RNA, 19 nt, Artificial Sequence
  Description of Artificial Sequence: Synthetic oligonucleotide
cuugcaguccucacucagg

SEQ ID NO: 2672724 - RNA, 19 nt, Artificial Sequence
  Description of Artificial Sequence: Synthetic oligonucleotide
cacuccaguacccaggcug

SEQ ID NO: 2672725 - RNA, 19 nt, Artificial Sequence
  Description of Artificial Sequence: Synthetic oligonucleotide
uucugggucccuucaaucu

SEQ ID NO: 2672726 - RNA, 19 nt, Artificial Sequence
  Description of Artificial Sequence: Synthetic oligonucleotide
uugagcaguuucugggucc

SEQ ID NO: 2672727 - RNA, 19 nt, Artificial Sequence
  Description of Artificial Sequence: Synthetic oligonucleotide
uacgccaugacagguuggg

SEQ ID NO: 2672728 - RNA, 19 nt, Artificial Sequence
  Description of Artificial Sequence: Synthetic oligonucleotide
uccguucuggaagacgacg

SEQ ID NO: 2672729 - RNA, 19 nt, Artificial Sequence
  Description of Artificial Sequence: Synthetic oligonucleotide
ucccaagaagaccaauaac

SEQ ID NO: 2672730 - RNA, 19 nt, Artificial Sequence
  Description of Artificial Sequence: Synthetic oligonucleotide
uccuuguugagcaguuucu

SEQ ID NO: 2672731 - RNA, 19 nt, Artificial Sequence
  Description of Artificial Sequence: Synthetic oligonucleotide
uagggguacaacugugacc

SEQ ID NO: 2672732 - RNA, 19 nt, Artificial Sequence
  Description of Artificial Sequence: Synthetic oligonucleotide
uguugagcaguuucugggu

SEQ ID NO: 2672733 - RNA, 19 nt, Artificial Sequence
  Description of Artificial Sequence: Synthetic oligonucleotide
accccaaugacacuccagu

SEQ ID NO: 2672734 - RNA, 19 nt, Artificial Sequence
  Description of Artificial Sequence: Synthetic oligonucleotide
agguuggggcagaagaugc

SEQ ID NO: 2672735 - RNA, 19 nt, Artificial Sequence
  Description of Artificial Sequence: Synthetic oligonucleotide
uaccaaugagcuuccgcag

SEQ ID NO: 2672736 - RNA, 19 nt, Artificial Sequence
  Description of Artificial Sequence: Synthetic oligonucleotide
ucuggaagacgacggcaag

SEQ ID NO: 2672737 - RNA, 19 nt, Artificial Sequence
  Description of Artificial Sequence: Synthetic oligonucleotide
aacugugaccccaaugaca

SEQ ID NO: 2672738 - RNA, 19 nt, Artificial Sequence
  Description of Artificial Sequence: Synthetic oligonucleotide
agucgugcaaaguggugag

SEQ ID NO: 2672739 - RNA, 19 nt, Artificial Sequence
  Description of Artificial Sequence: Synthetic oligonucleotide
uucuggaagacgacggcaa

SEQ ID NO: 2672740 - RNA, 19 nt, Artificial Sequence
  Description of Artificial Sequence: Synthetic oligonucleotide
augcagaaagccaucuugg

SEQ ID NO: 2672741 - RNA, 19 nt, Artificial Sequence
  Description of Artificial Sequence: Synthetic oligonucleotide
agaagaccaauaaccaaag

SEQ ID NO: 2672742 - RNA, 19 nt, Artificial Sequence
  Description of Artificial Sequence: Synthetic oligonucleotide
caaaggcaaggcaggaaag

SEQ ID NO: 2672743 - RNA, 19 nt, Artificial Sequence
  Description of Artificial Sequence: Synthetic oligonucleotide
gaacuaugucaccccaccc

SEQ ID NO: 2672744 - RNA, 19 nt, Artificial Sequence
  Description of Artificial Sequence: Synthetic oligonucleotide
ggcuucuguguccagaugc

SEQ ID NO: 2672745 - RNA, 19 nt, Artificial Sequence
  Description of Artificial Sequence: Synthetic oligonucleotide
gagaucauccacacuacca

SEQ ID NO: 2672746 - RNA, 19 nt, Artificial Sequence
  Description of Artificial Sequence: Synthetic oligonucleotide
agcuuccgcagguucaguc

SEQ ID NO: 2672747 - RNA, 19 nt, Artificial Sequence
  Description of Artificial Sequence: Synthetic oligonucleotide
augacacuccaguacccag

SEQ ID NO: 2672748 - RNA, 19 nt, Artificial Sequence
  Description of Artificial Sequence: Synthetic oligonucleotide
ccaauaaccaaaggcaagg

SEQ ID NO: 2672749 - RNA, 19 nt, Artificial Sequence
  Description of Artificial Sequence: Synthetic oligonucleotide
ucugggucccuucaaucuc

SEQ ID NO: 2672750 - RNA, 19 nt, Artificial Sequence
  Description of Artificial Sequence: Synthetic oligonucleotide
ccaaugacacuccaguacc

SEQ ID NO: 2672751 - RNA, 19 nt, Artificial Sequence
  Description of Artificial Sequence: Synthetic oligonucleotide
ugucaccccacccuguguc

SEQ ID NO: 2672752 - RNA, 19 nt, Artificial Sequence
  Description of Artificial Sequence: Synthetic oligonucleotide
ucucagccuucccaagaag

SEQ ID NO: 2672753 - RNA, 19 nt, Artificial Sequence
  Description of Artificial Sequence: Synthetic oligonucleotide
uuucugggucccuucaauc

SEQ ID NO: 2672754 - RNA, 19 nt, Artificial Sequence
  Description of Artificial Sequence: Synthetic oligonucleotide
caaugacacuccaguaccc

SEQ ID NO: 2672755 - RNA, 19 nt, Artificial Sequence
  Description of Artificial Sequence: Synthetic oligonucleotide
uucucagccuucccaagaa

SEQ ID NO: 2672756 - RNA, 19 nt, Artificial Sequence
  Description of Artificial Sequence: Synthetic oligonucleotide
ugguagggguacaacugug

SEQ ID NO: 2672757 - RNA, 19 nt, Artificial Sequence
  Description of Artificial Sequence: Synthetic oligonucleotide
agauuggccagaaccuugg

SEQ ID NO: 2672758 - RNA, 19 nt, Artificial Sequence
  Description of Artificial Sequence: Synthetic oligonucleotide
ggggaagucgugcaaagug

SEQ ID NO: 2672759 - RNA, 19 nt, Artificial Sequence
  Description of Artificial Sequence: Synthetic oligonucleotide
aguggccggcagcaguacc

SEQ ID NO: 2672760 - RNA, 19 nt, Artificial Sequence
  Description of Artificial Sequence: Synthetic oligonucleotide
cuuccgcagguucaguccc

SEQ ID NO: 2672761 - RNA, 19 nt, Artificial Sequence
  Description of Artificial Sequence: Synthetic oligonucleotide
guagggguacaacugugac

SEQ ID NO: 2672762 - RNA, 19 nt, Artificial Sequence
  Description of Artificial Sequence: Synthetic oligonucleotide
uucaaucuccguucuggaa

SEQ ID NO: 2672763 - RNA, 19 nt, Artificial Sequence
  Description of Artificial Sequence: Synthetic oligonucleotide
ucucgaucacucugcaggu

SEQ ID NO: 2672764 - RNA, 19 nt, Artificial Sequence
  Description of Artificial Sequence: Synthetic oligonucleotide
ccuaugaacuaugucaccc

SEQ ID NO: 2672765 - RNA, 19 nt, Artificial Sequence
  Description of Artificial Sequence: Synthetic oligonucleotide
caauaaccaaaggcaaggc

SEQ ID NO: 2672766 - RNA, 19 nt, Artificial Sequence
  Description of Artificial Sequence: Synthetic oligonucleotide
caaggcaggaaagguacgc

SEQ ID NO: 2672767 - RNA, 19 nt, Artificial Sequence
  Description of Artificial Sequence: Synthetic oligonucleotide
agaugcaggcagguagccc

SEQ ID NO: 2672768 - RNA, 19 nt, Artificial Sequence
  Description of Artificial Sequence: Synthetic oligonucleotide
cugcguagcacgagucugg

SEQ ID NO: 2672769 - RNA, 19 nt, Artificial Sequence
  Description of Artificial Sequence: Synthetic oligonucleotide
aucauccacacuaccaaug

SEQ ID NO: 2672770 - RNA, 19 nt, Artificial Sequence
  Description of Artificial Sequence: Synthetic oligonucleotide
cugggucccuucaaucucc

SEQ ID NO: 2672771 - RNA, 19 nt, Artificial Sequence
  Description of Artificial Sequence: Synthetic oligonucleotide
aggagggcaagagaucauc

SEQ ID NO: 2672772 - RNA, 19 nt, Artificial Sequence
  Description of Artificial Sequence: Synthetic oligonucleotide
agcaucugccgcuugcagu

SEQ ID NO: 2672773 - RNA, 19 nt, Artificial Sequence
  Description of Artificial Sequence: Synthetic oligonucleotide
uugaugagcucugccaggu

SEQ ID NO: 2672774 - RNA, 19 nt, Artificial Sequence
  Description of Artificial Sequence: Synthetic oligonucleotide
ugagcuuccgcagguucag

SEQ ID NO: 2672775 - RNA, 19 nt, Artificial Sequence
  Description of Artificial Sequence: Synthetic oligonucleotide
aagguacgccaugacaggu

SEQ ID NO: 2672776 - RNA, 19 nt, Artificial Sequence
  Description of Artificial Sequence: Synthetic oligonucleotide
uccucacucagggauguca

SEQ ID NO: 2672777 - RNA, 19 nt, Artificial Sequence
  Description of Artificial Sequence: Synthetic oligonucleotide
gagggcaagagaucaucca

SEQ ID NO: 2672778 - RNA, 19 nt, Artificial Sequence
  Description of Artificial Sequence: Synthetic oligonucleotide
augcagccugcguagcacg

SEQ ID NO: 2672779 - RNA, 19 nt, Artificial Sequence
  Description of Artificial Sequence: Synthetic oligonucleotide
acguucuugaccaccacca

SEQ ID NO: 2672780 - RNA, 19 nt, Artificial Sequence
  Description of Artificial Sequence: Synthetic oligonucleotide
aggcaggaaagguacgcca

SEQ ID NO: 2672781 - RNA, 19 nt, Artificial Sequence
  Description of Artificial Sequence: Synthetic oligonucleotide
guucuugaccaccaccaca

SEQ ID NO: 2672782 - RNA, 19 nt, Artificial Sequence
  Description of Artificial Sequence: Synthetic oligonucleotide
cuggaagacgacggcaagg

SEQ ID NO: 2672783 - RNA, 19 nt, Artificial Sequence
  Description of Artificial Sequence: Synthetic oligonucleotide
guccuuguugagcaguuuc

SEQ ID NO: 2672784 - RNA, 19 nt, Artificial Sequence
  Description of Artificial Sequence: Synthetic oligonucleotide
gucccuucaaucuccguuc

SEQ ID NO: 2672785 - RNA, 19 nt, Artificial Sequence
  Description of Artificial Sequence: Synthetic oligonucleotide
caagaagaccaauaaccaa

SEQ ID NO: 2672786 - RNA, 19 nt, Artificial Sequence
  Description of Artificial Sequence: Synthetic oligonucleotide
gggaagucgugcaaagugg

SEQ ID NO: 2672787 - RNA, 19 nt, Artificial Sequence
  Description of Artificial Sequence: Synthetic oligonucleotide
gaccaauaaccaaaggcaa

SEQ ID NO: 2672788 - RNA, 19 nt, Artificial Sequence
  Description of Artificial Sequence: Synthetic oligonucleotide
aaguggugaggggaggacu

SEQ ID NO: 2672789 - RNA, 19 nt, Artificial Sequence
  Description of Artificial Sequence: Synthetic oligonucleotide
ggaaagguacgccaugaca

SEQ ID NO: 2672790 - RNA, 19 nt, Artificial Sequence
  Description of Artificial Sequence: Synthetic oligonucleotide
cauccacacuaccaaugag

SEQ ID NO: 2672791 - RNA, 19 nt, Artificial Sequence
  Description of Artificial Sequence: Synthetic oligonucleotide
ucucucgaucacucugcag

SEQ ID NO: 2672792 - RNA, 19 nt, Artificial Sequence
  Description of Artificial Sequence: Synthetic oligonucleotide
gggaggacucuucucagcc

SEQ ID NO: 2672793 - RNA, 19 nt, Artificial Sequence
  Description of Artificial Sequence: Synthetic oligonucleotide
ugggucccuucaaucuccg

SEQ ID NO: 2672794 - RNA, 19 nt, Artificial Sequence
  Description of Artificial Sequence: Synthetic oligonucleotide
agccuucccaagaagacca

SEQ ID NO: 2672795 - RNA, 19 nt, Artificial Sequence
  Description of Artificial Sequence: Synthetic oligonucleotide
acuccaguacccaggcugg

SEQ ID NO: 2672796 - RNA, 19 nt, Artificial Sequence
  Description of Artificial Sequence: Synthetic oligonucleotide
uguccagaugcagccugcg

SEQ ID NO: 2672797 - RNA, 19 nt, Artificial Sequence
  Description of Artificial Sequence: Synthetic oligonucleotide
ggcauccacagccagggug

SEQ ID NO: 2672798 - RNA, 19 nt, Artificial Sequence
  Description of Artificial Sequence: Synthetic oligonucleotide
ugcguagcacgagucuggg

SEQ ID NO: 2672799 - RNA, 19 nt, Artificial Sequence
  Description of Artificial Sequence: Synthetic oligonucleotide
aucuccguucuggaagacg

SEQ ID NO: 2672800 - RNA, 19 nt, Artificial Sequence
  Description of Artificial Sequence: Synthetic oligonucleotide
gaugcagccugcguagcac

SEQ ID NO: 2672801 - RNA, 19 nt, Artificial Sequence
  Description of Artificial Sequence: Synthetic oligonucleotide
aggggaggacucuucucag

SEQ ID NO: 2672802 - RNA, 19 nt, Artificial Sequence
  Description of Artificial Sequence: Synthetic oligonucleotide
gguacgccaugacagguug

SEQ ID NO: 2672803 - RNA, 19 nt, Artificial Sequence
  Description of Artificial Sequence: Synthetic oligonucleotide
caacugugaccccaaugac

SEQ ID NO: 2672804 - RNA, 19 nt, Artificial Sequence
  Description of Artificial Sequence: Synthetic oligonucleotide
uagcacgagucuggggucg

SEQ ID NO: 2672805 - RNA, 19 nt, Artificial Sequence
  Description of Artificial Sequence: Synthetic oligonucleotide
uaccccuaugaacuauguc

SEQ ID NO: 2672806 - RNA, 19 nt, Artificial Sequence
  Description of Artificial Sequence: Synthetic oligonucleotide
gaagucgugcaaaguggug

SEQ ID NO: 2672807 - RNA, 19 nt, Artificial Sequence
  Description of Artificial Sequence: Synthetic oligonucleotide
ccaagaagaccaauaacca

SEQ ID NO: 2672808 - RNA, 19 nt, Artificial Sequence
  Description of Artificial Sequence: Synthetic oligonucleotide
ggcaagagaucauccacac

SEQ ID NO: 2672809 - RNA, 19 nt, Artificial Sequence
  Description of Artificial Sequence: Synthetic oligonucleotide
gacgacggcaaggagggca

SEQ ID NO: 2672810 - RNA, 19 nt, Artificial Sequence
  Description of Artificial Sequence: Synthetic oligonucleotide
gccaaccucaucuuguuga

SEQ ID NO: 2672811 - RNA, 19 nt, Artificial Sequence
  Description of Artificial Sequence: Synthetic oligonucleotide
guacccaggcuggaguagg

SEQ ID NO: 2672812 - RNA, 19 nt, Artificial Sequence
  Description of Artificial Sequence: Synthetic oligonucleotide
gauuggccagaaccuuggc

SEQ ID NO: 2672813 - RNA, 19 nt, Artificial Sequence
  Description of Artificial Sequence: Synthetic oligonucleotide
auguccaugcagaaagcca

SEQ ID NO: 2672814 - RNA, 19 nt, Artificial Sequence
  Description of Artificial Sequence: Synthetic oligonucleotide
aguaccccuaugaacuaug

SEQ ID NO: 2672815 - RNA, 19 nt, Artificial Sequence
  Description of Artificial Sequence: Synthetic oligonucleotide
acacuaccaaugagcuucc

SEQ ID NO: 2672816 - RNA, 19 nt, Artificial Sequence
  Description of Artificial Sequence: Synthetic oligonucleotide
cccaaugacacuccaguac

SEQ ID NO: 2672817 - RNA, 19 nt, Artificial Sequence
  Description of Artificial Sequence: Synthetic oligonucleotide
cuucccaagaagaccaaua

SEQ ID NO: 2672818 - RNA, 19 nt, Artificial Sequence
  Description of Artificial Sequence: Synthetic oligonucleotide
uccaguacccaggcuggag

SEQ ID NO: 2672819 - RNA, 19 nt, Artificial Sequence
  Description of Artificial Sequence: Synthetic oligonucleotide
caaucuccguucuggaaga

SEQ ID NO: 2672820 - RNA, 19 nt, Artificial Sequence
  Description of Artificial Sequence: Synthetic oligonucleotide
agaugcagccugcguagca

SEQ ID NO: 2672821 - RNA, 19 nt, Artificial Sequence
  Description of Artificial Sequence: Synthetic oligonucleotide
cagucccacguucuugacc

SEQ ID NO: 2672822 - RNA, 19 nt, Artificial Sequence
  Description of Artificial Sequence: Synthetic oligonucleotide
ucccuucaaucuccguucu

SEQ ID NO: 2672823 - RNA, 19 nt, Artificial Sequence
  Description of Artificial Sequence: Synthetic oligonucleotide
gagucuggggucggguggg

SEQ ID NO: 2672824 - RNA, 19 nt, Artificial Sequence
  Description of Artificial Sequence: Synthetic oligonucleotide
cugagccaaccucaucuug

SEQ ID NO: 2672825 - RNA, 19 nt, Artificial Sequence
  Description of Artificial Sequence: Synthetic oligonucleotide
aaagccaucuuggcuggua

SEQ ID NO: 2672826 - RNA, 19 nt, Artificial Sequence
  Description of Artificial Sequence: Synthetic oligonucleotide
cagccuucccaagaagacc

SEQ ID NO: 2672827 - RNA, 19 nt, Artificial Sequence
  Description of Artificial Sequence: Synthetic oligonucleotide
cuucaaucuccguucugga

SEQ ID NO: 2672828 - RNA, 19 nt, Artificial Sequence
  Description of Artificial Sequence: Synthetic oligonucleotide
ggcagcaguaccccuauga

SEQ ID NO: 2672829 - RNA, 19 nt, Artificial Sequence
  Description of Artificial Sequence: Synthetic oligonucleotide
cagguucagucccacguuc

SEQ ID NO: 2672830 - RNA, 19 nt, Artificial Sequence
  Description of Artificial Sequence: Synthetic oligonucleotide
ugaggggaggacucuucuc

SEQ ID NO: 2672831 - RNA, 19 nt, Artificial Sequence
  Description of Artificial Sequence: Synthetic oligonucleotide
gccaucuuggcugguaggg

SEQ ID NO: 2672832 - RNA, 19 nt, Artificial Sequence
  Description of Artificial Sequence: Synthetic oligonucleotide
ccccuaugaacuaugucac

SEQ ID NO: 2672833 - RNA, 19 nt, Artificial Sequence
  Description of Artificial Sequence: Synthetic oligonucleotide
aguacccaggcuggaguag

SEQ ID NO: 2672834 - RNA, 19 nt, Artificial Sequence
  Description of Artificial Sequence: Synthetic oligonucleotide
ccagaugcagccugcguag

SEQ ID NO: 2672835 - RNA, 19 nt, Artificial Sequence
  Description of Artificial Sequence: Synthetic oligonucleotide
agccaaccucaucuuguug

SEQ ID NO: 2672836 - RNA, 19 nt, Artificial Sequence
  Description of Artificial Sequence: Synthetic oligonucleotide
gugcaaaguggugagggga

SEQ ID NO: 2672837 - RNA, 19 nt, Artificial Sequence
  Description of Artificial Sequence: Synthetic oligonucleotide
cacucugcagguggguggg

SEQ ID NO: 2672838 - RNA, 19 nt, Artificial Sequence
  Description of Artificial Sequence: Synthetic oligonucleotide
ucccacguucuugaccacc

SEQ ID NO: 2672839 - RNA, 19 nt, Artificial Sequence
  Description of Artificial Sequence: Synthetic oligonucleotide
gguggggaaggggaagucg

SEQ ID NO: 2672840 - RNA, 19 nt, Artificial Sequence
  Description of Artificial Sequence: Synthetic oligonucleotide
guucuggaagacgacggca

SEQ ID NO: 2672841 - RNA, 19 nt, Artificial Sequence
  Description of Artificial Sequence: Synthetic oligonucleotide
caguccucacucagggaug

SEQ ID NO: 2672842 - RNA, 19 nt, Artificial Sequence
  Description of Artificial Sequence: Synthetic oligonucleotide
gcuuccgcagguucagucc

SEQ ID NO: 2672843 - RNA, 19 nt, Artificial Sequence
  Description of Artificial Sequence: Synthetic oligonucleotide
gcaucugccgcuugcaguc

SEQ ID NO: 2672844 - RNA, 19 nt, Artificial Sequence
  Description of Artificial Sequence: Synthetic oligonucleotide
gaccccaaugacacuccag

SEQ ID NO: 2672845 - RNA, 19 nt, Artificial Sequence
  Description of Artificial Sequence: Synthetic oligonucleotide
gcugguagggguacaacug

SEQ ID NO: 2672846 - RNA, 19 nt, Artificial Sequence
  Description of Artificial Sequence: Synthetic oligonucleotide
ugcaguccucacucaggga

SEQ ID NO: 2672847 - RNA, 19 nt, Artificial Sequence
  Description of Artificial Sequence: Synthetic oligonucleotide
guagcacgagucugggguc

SEQ ID NO: 2672848 - RNA, 19 nt, Artificial Sequence
  Description of Artificial Sequence: Synthetic oligonucleotide
ccucucucgaucacucugc

SEQ ID NO: 2672849 - RNA, 19 nt, Artificial Sequence
  Description of Artificial Sequence: Synthetic oligonucleotide
ggaggcugugagcaucugc

SEQ ID NO: 2672850 - RNA, 19 nt, Artificial Sequence
  Description of Artificial Sequence: Synthetic oligonucleotide
ugacagguuggggcagaag

SEQ ID NO: 2672851 - RNA, 19 nt, Artificial Sequence
  Description of Artificial Sequence: Synthetic oligonucleotide
ucggguggggaaggggaag

SEQ ID NO: 2672852 - RNA, 19 nt, Artificial Sequence
  Description of Artificial Sequence: Synthetic oligonucleotide
gagggaguggccggcagca

SEQ ID NO: 2672853 - RNA, 19 nt, Artificial Sequence
  Description of Artificial Sequence: Synthetic oligonucleotide
guggccggcagcaguaccc

SEQ ID NO: 2672854 - RNA, 19 nt, Artificial Sequence
  Description of Artificial Sequence: Synthetic oligonucleotide
ggagggcaagagaucaucc

SEQ ID NO: 2672855 - RNA, 19 nt, Artificial Sequence
  Description of Artificial Sequence: Synthetic oligonucleotide
uuccgcagguucaguccca

SEQ ID NO: 2672856 - RNA, 19 nt, Artificial Sequence
  Description of Artificial Sequence: Synthetic oligonucleotide
ggaagacgacggcaaggag

SEQ ID NO: 2672857 - RNA, 19 nt, Artificial Sequence
  Description of Artificial Sequence: Synthetic oligonucleotide
gucgugcaaaguggugagg

SEQ ID NO: 2672858 - RNA, 19 nt, Artificial Sequence
  Description of Artificial Sequence: Synthetic oligonucleotide
uggggucggguggggaagg

SEQ ID NO: 2672859 - RNA, 19 nt, Artificial Sequence
  Description of Artificial Sequence: Synthetic oligonucleotide
ucaccccacccugugucug

SEQ ID NO: 2672860 - RNA, 19 nt, Artificial Sequence
  Description of Artificial Sequence: Synthetic oligonucleotide
cagcagguucuuggcaucc

SEQ ID NO: 2672861 - RNA, 19 nt, Artificial Sequence
  Description of Artificial Sequence: Synthetic oligonucleotide
uuggcugguagggguacaa

SEQ ID NO: 2672862 - RNA, 19 nt, Artificial Sequence
  Description of Artificial Sequence: Synthetic oligonucleotide
augucaccccacccugugu

SEQ ID NO: 2672863 - RNA, 19 nt, Artificial Sequence
  Description of Artificial Sequence: Synthetic oligonucleotide
guacgccaugacagguugg

SEQ ID NO: 2672864 - RNA, 19 nt, Artificial Sequence
  Description of Artificial Sequence: Synthetic oligonucleotide
caaaguggugaggggagga

SEQ ID NO: 2672865 - RNA, 19 nt, Artificial Sequence
  Description of Artificial Sequence: Synthetic oligonucleotide
caucuuggcugguaggggu

SEQ ID NO: 2672866 - RNA, 19 nt, Artificial Sequence
  Description of Artificial Sequence: Synthetic oligonucleotide
ugugggaggcugugagcau

SEQ ID NO: 2672867 - RNA, 19 nt, Artificial Sequence
  Description of Artificial Sequence: Synthetic oligonucleotide
agcauucugcugagccaac

SEQ ID NO: 2672868 - RNA, 19 nt, Artificial Sequence
  Description of Artificial Sequence: Synthetic oligonucleotide
cuccguucuggaagacgac

SEQ ID NO: 2672869 - RNA, 19 nt, Artificial Sequence
  Description of Artificial Sequence: Synthetic oligonucleotide
ccaaaggcaaggcaggaaa

SEQ ID NO: 2672870 - RNA, 19 nt, Artificial Sequence
  Description of Artificial Sequence: Synthetic oligonucleotide
gaggacucuucucagccuu

SEQ ID NO: 2672871 - RNA, 19 nt, Artificial Sequence
  Description of Artificial Sequence: Synthetic oligonucleotide
aggacucuucucagccuuc

SEQ ID NO: 2672872 - RNA, 19 nt, Artificial Sequence
  Description of Artificial Sequence: Synthetic oligonucleotide
augagcucugccagguccu

SEQ ID NO: 2672873 - RNA, 19 nt, Artificial Sequence
  Description of Artificial Sequence: Synthetic oligonucleotide
agccugcguagcacgaguc

SEQ ID NO: 2672874 - RNA, 19 nt, Artificial Sequence
  Description of Artificial Sequence: Synthetic oligonucleotide
aucugccgcuugcaguccu

SEQ ID NO: 2672875 - RNA, 19 nt, Artificial Sequence
  Description of Artificial Sequence: Synthetic oligonucleotide
acgccaugacagguugggg

SEQ ID NO: 2672876 - RNA, 19 nt, Artificial Sequence
  Description of Artificial Sequence: Synthetic oligonucleotide
gcagaaagccaucuuggcu

SEQ ID NO: 2672877 - RNA, 19 nt, Artificial Sequence
  Description of Artificial Sequence: Synthetic oligonucleotide
gcaaaguggugaggggagg

SEQ ID NO: 2672878 - RNA, 19 nt, Artificial Sequence
  Description of Artificial Sequence: Synthetic oligonucleotide
caaccucaucuuguugaug

SEQ ID NO: 2672879 - RNA, 19 nt, Artificial Sequence
  Description of Artificial Sequence: Synthetic oligonucleotide
gacggcaaggagggcaaga

SEQ ID NO: 2672880 - RNA, 19 nt, Artificial Sequence
  Description of Artificial Sequence: Synthetic oligonucleotide
uggccggcagcaguacccc

SEQ ID NO: 2672881 - RNA, 19 nt, Artificial Sequence
  Description of Artificial Sequence: Synthetic oligonucleotide
cauucugcugagccaaccu

SEQ ID NO: 2672882 - RNA, 19 nt, Artificial Sequence
  Description of Artificial Sequence: Synthetic oligonucleotide
aggggaagucgugcaaagu

SEQ ID NO: 2672883 - RNA, 19 nt, Artificial Sequence
  Description of Artificial Sequence: Synthetic oligonucleotide
agcacgagucuggggucgg

SEQ ID NO: 2672884 - RNA, 19 nt, Artificial Sequence
  Description of Artificial Sequence: Synthetic oligonucleotide
cccuaugaacuaugucacc

SEQ ID NO: 2672885 - RNA, 19 nt, Artificial Sequence
  Description of Artificial Sequence: Synthetic oligonucleotide
cugccagguccuuguugag

SEQ ID NO: 2672886 - RNA, 19 nt, Artificial Sequence
  Description of Artificial Sequence: Synthetic oligonucleotide
gguagggguacaacuguga

SEQ ID NO: 2672887 - RNA, 19 nt, Artificial Sequence
  Description of Artificial Sequence: Synthetic oligonucleotide
gcaguccucacucagggau

SEQ ID NO: 2672888 - RNA, 19 nt, Artificial Sequence
  Description of Artificial Sequence: Synthetic oligonucleotide
cucgaucacucugcaggug

SEQ ID NO: 2672889 - RNA, 19 nt, Artificial Sequence
  Description of Artificial Sequence: Synthetic oligonucleotide
gcagcaguaccccuaugaa

SEQ ID NO: 2672890 - RNA, 19 nt, Artificial Sequence
  Description of Artificial Sequence: Synthetic oligonucleotide
ucacagcauucugcugagc

SEQ ID NO: 2672891 - RNA, 19 nt, Artificial Sequence
  Description of Artificial Sequence: Synthetic oligonucleotide
guguccagaugcagccugc

SEQ ID NO: 2672892 - RNA, 19 nt, Artificial Sequence
  Description of Artificial Sequence: Synthetic oligonucleotide
gcaaggcaggaaagguacg

SEQ ID NO: 2672893 - RNA, 19 nt, Artificial Sequence
  Description of Artificial Sequence: Synthetic oligonucleotide
cugguagggguacaacugu

SEQ ID NO: 2672894 - RNA, 19 nt, Artificial Sequence
  Description of Artificial Sequence: Synthetic oligonucleotide
gggcaagagaucauccaca

SEQ ID NO: 2672895 - RNA, 19 nt, Artificial Sequence
  Description of Artificial Sequence: Synthetic oligonucleotide
ccuuguugagcaguuucug

SEQ ID NO: 2672896 - RNA, 19 nt, Artificial Sequence
  Description of Artificial Sequence: Synthetic oligonucleotide
cccucucucgaucacucug

SEQ ID NO: 2672897 - RNA, 19 nt, Artificial Sequence
  Description of Artificial Sequence: Synthetic oligonucleotide
agcaguuucugggucccuu

SEQ ID NO: 2672898 - RNA, 19 nt, Artificial Sequence
  Description of Artificial Sequence: Synthetic oligonucleotide
uccgcagguucagucccac

SEQ ID NO: 2672899 - RNA, 19 nt, Artificial Sequence
  Description of Artificial Sequence: Synthetic oligonucleotide
ggcugguagggguacaacu

SEQ ID NO: 2672900 - RNA, 19 nt, Artificial Sequence
  Description of Artificial Sequence: Synthetic oligonucleotide
gugggaggcugugagcauc

SEQ ID NO: 2672901 - RNA, 19 nt, Artificial Sequence
  Description of Artificial Sequence: Synthetic oligonucleotide
uggcugguagggguacaac

SEQ ID NO: 2672902 - RNA, 19 nt, Artificial Sequence
  Description of Artificial Sequence: Synthetic oligonucleotide
cagccagggugugggaggc

SEQ ID NO: 2672903 - RNA, 19 nt, Artificial Sequence
  Description of Artificial Sequence: Synthetic oligonucleotide
ugggccagauuggccagaa

SEQ ID NO: 2672904 - RNA, 19 nt, Artificial Sequence
  Description of Artificial Sequence: Synthetic oligonucleotide
ugccgcuugcaguccucac

SEQ ID NO: 2672905 - RNA, 19 nt, Artificial Sequence
  Description of Artificial Sequence: Synthetic oligonucleotide
cccacccugugucugugcc

SEQ ID NO: 2672906 - RNA, 19 nt, Artificial Sequence
  Description of Artificial Sequence: Synthetic oligonucleotide
gcauucugcugagccaacc

SEQ ID NO: 2672907 - RNA, 19 nt, Artificial Sequence
  Description of Artificial Sequence: Synthetic oligonucleotide
agacgacggcaaggagggc

SEQ ID NO: 2672908 - RNA, 19 nt, Artificial Sequence
  Description of Artificial Sequence: Synthetic oligonucleotide
ggguacaacugugacccca

SEQ ID NO: 2672909 - RNA, 19 nt, Artificial Sequence
  Description of Artificial Sequence: Synthetic oligonucleotide
gugaggggaggacucuucu

SEQ ID NO: 2672910 - RNA, 19 nt, Artificial Sequence
  Description of Artificial Sequence: Synthetic oligonucleotide
ccgcuugcaguccucacuc

SEQ ID NO: 2672911 - RNA, 19 nt, Artificial Sequence
  Description of Artificial Sequence: Synthetic oligonucleotide
ccugcguagcacgagucug

SEQ ID NO: 2672912 - RNA, 19 nt, Artificial Sequence
  Description of Artificial Sequence: Synthetic oligonucleotide
agcagguucuuggcaucca

SEQ ID NO: 2672913 - RNA, 19 nt, Artificial Sequence
  Description of Artificial Sequence: Synthetic oligonucleotide
cacuaccaaugagcuuccg

SEQ ID NO: 2672914 - RNA, 19 nt, Artificial Sequence
  Description of Artificial Sequence: Synthetic oligonucleotide
ggucccuucaaucuccguu

SEQ ID NO: 2672915 - RNA, 19 nt, Artificial Sequence
  Description of Artificial Sequence: Synthetic oligonucleotide
cguucuggaagacgacggc

SEQ ID NO: 2672916 - RNA, 19 nt, Artificial Sequence
  Description of Artificial Sequence: Synthetic oligonucleotide
caguacccaggcuggagua

SEQ ID NO: 2672917 - RNA, 19 nt, Artificial Sequence
  Description of Artificial Sequence: Synthetic oligonucleotide
cgaucacucugcagguggg

SEQ ID NO: 2672918 - RNA, 19 nt, Artificial Sequence
  Description of Artificial Sequence: Synthetic oligonucleotide
ggucggguggggaagggga

SEQ ID NO: 2672919 - RNA, 19 nt, Artificial Sequence
  Description of Artificial Sequence: Synthetic oligonucleotide
guccaugcagaaagccauc

SEQ ID NO: 2672920 - RNA, 19 nt, Artificial Sequence
  Description of Artificial Sequence: Synthetic oligonucleotide
ggaguaggagggaguggcc

SEQ ID NO: 2672921 - RNA, 19 nt, Artificial Sequence
  Description of Artificial Sequence: Synthetic oligonucleotide
ggccagaaccuuggcuugg

SEQ ID NO: 2672922 - RNA, 19 nt, Artificial Sequence
  Description of Artificial Sequence: Synthetic oligonucleotide
cugcugagccaaccucauc

SEQ ID NO: 2672923 - RNA, 19 nt, Artificial Sequence
  Description of Artificial Sequence: Synthetic oligonucleotide
cguagcacgagucuggggu

SEQ ID NO: 2672924 - RNA, 19 nt, Artificial Sequence
  Description of Artificial Sequence: Synthetic oligonucleotide
gcguagcacgagucugggg

SEQ ID NO: 2672925 - RNA, 19 nt, Artificial Sequence
  Description of Artificial Sequence: Synthetic oligonucleotide
gguacaacugugaccccaa

SEQ ID NO: 2672926 - RNA, 19 nt, Artificial Sequence
  Description of Artificial Sequence: Synthetic oligonucleotide
acgacggcaaggagggcaa

SEQ ID NO: 2672927 - RNA, 19 nt, Artificial Sequence
  Description of Artificial Sequence: Synthetic oligonucleotide
gagccaaccucaucuuguu

SEQ ID NO: 2672928 - RNA, 19 nt, Artificial Sequence
  Description of Artificial Sequence: Synthetic oligonucleotide
ggaagucgugcaaaguggu

SEQ ID NO: 2672929 - RNA, 19 nt, Artificial Sequence
  Description of Artificial Sequence: Synthetic oligonucleotide
uggugaggggaggacucuu

SEQ ID NO: 2672930 - RNA, 19 nt, Artificial Sequence
  Description of Artificial Sequence: Synthetic oligonucleotide
caugacagguuggggcaga

SEQ ID NO: 2672931 - RNA, 19 nt, Artificial Sequence
  Description of Artificial Sequence: Synthetic oligonucleotide
agguacgccaugacagguu

SEQ ID NO: 2672932 - RNA, 19 nt, Artificial Sequence
  Description of Artificial Sequence: Synthetic oligonucleotide
agguccuuguugagcaguu

SEQ ID NO: 2672933 - RNA, 19 nt, Artificial Sequence
  Description of Artificial Sequence: Synthetic oligonucleotide
ugucugugcccaggggcuu

SEQ ID NO: 2672934 - RNA, 19 nt, Artificial Sequence
  Description of Artificial Sequence: Synthetic oligonucleotide
gaguggccggcagcaguac

SEQ ID NO: 2672935 - RNA, 19 nt, Artificial Sequence
  Description of Artificial Sequence: Synthetic oligonucleotide
ggugaggggaggacucuuc

SEQ ID NO: 2672936 - RNA, 19 nt, Artificial Sequence
  Description of Artificial Sequence: Synthetic oligonucleotide
agggaguggccggcagcag

SEQ ID NO: 2672937 - RNA, 19 nt, Artificial Sequence
  Description of Artificial Sequence: Synthetic oligonucleotide
guaccccuaugaacuaugu

SEQ ID NO: 2672938 - RNA, 19 nt, Artificial Sequence
  Description of Artificial Sequence: Synthetic oligonucleotide
cagaagaugcaggcaggua

SEQ ID NO: 2672939 - RNA, 19 nt, Artificial Sequence
  Description of Artificial Sequence: Synthetic oligonucleotide
gcagccugcguagcacgag

SEQ ID NO: 2672940 - RNA, 19 nt, Artificial Sequence
  Description of Artificial Sequence: Synthetic oligonucleotide
guccagaugcagccugcgu

SEQ ID NO: 2672941 - RNA, 19 nt, Artificial Sequence
  Description of Artificial Sequence: Synthetic oligonucleotide
ccagguccuuguugagcag

SEQ ID NO: 2672942 - RNA, 19 nt, Artificial Sequence
  Description of Artificial Sequence: Synthetic oligonucleotide
ggggcagaagaugcaggca

SEQ ID NO: 2672943 - RNA, 19 nt, Artificial Sequence
  Description of Artificial Sequence: Synthetic oligonucleotide
gucaccccacccugugucu

SEQ ID NO: 2672944 - RNA, 19 nt, Artificial Sequence
  Description of Artificial Sequence: Synthetic oligonucleotide
caggggcuucuguguccag

SEQ ID NO: 2672945 - RNA, 19 nt, Artificial Sequence
  Description of Artificial Sequence: Synthetic oligonucleotide
ggaggacucuucucagccu

SEQ ID NO: 2672946 - RNA, 19 nt, Artificial Sequence
  Description of Artificial Sequence: Synthetic oligonucleotide
gucccacguucuugaccac

SEQ ID NO: 2672947 - RNA, 19 nt, Artificial Sequence
  Description of Artificial Sequence: Synthetic oligonucleotide
caggcuggaguaggaggga

SEQ ID NO: 2672948 - RNA, 19 nt, Artificial Sequence
  Description of Artificial Sequence: Synthetic oligonucleotide
gggguacaacugugacccc

SEQ ID NO: 2672949 - RNA, 19 nt, Artificial Sequence
  Description of Artificial Sequence: Synthetic oligonucleotide
gcaagagaucauccacacu

SEQ ID NO: 2672950 - RNA, 19 nt, Artificial Sequence
  Description of Artificial Sequence: Synthetic oligonucleotide
gcaguaccccuaugaacua

SEQ ID NO: 2672951 - RNA, 19 nt, Artificial Sequence
  Description of Artificial Sequence: Synthetic oligonucleotide
gucggguggggaaggggaa

SEQ ID NO: 2672952 - RNA, 19 nt, Artificial Sequence
  Description of Artificial Sequence: Synthetic oligonucleotide
ggggcuucuguguccagau

SEQ ID NO: 2672953 - RNA, 19 nt, Artificial Sequence
  Description of Artificial Sequence: Synthetic oligonucleotide
cagguccuuguugagcagu

SEQ ID NO: 2672954 - RNA, 19 nt, Artificial Sequence
  Description of Artificial Sequence: Synthetic oligonucleotide
ccaaugagcuuccgcaggu

SEQ ID NO: 2672955 - RNA, 19 nt, Artificial Sequence
  Description of Artificial Sequence: Synthetic oligonucleotide
cagccugcguagcacgagu

SEQ ID NO: 2672956 - RNA, 19 nt, Artificial Sequence
  Description of Artificial Sequence: Synthetic oligonucleotide
cccuucaaucuccguucug

SEQ ID NO: 2672957 - RNA, 19 nt, Artificial Sequence
  Description of Artificial Sequence: Synthetic oligonucleotide
ggaguggccggcagcagua

SEQ ID NO: 2672958 - RNA, 19 nt, Artificial Sequence
  Description of Artificial Sequence: Synthetic oligonucleotide
gcccaggggcuucuguguc

SEQ ID NO: 2672959 - RNA, 19 nt, Artificial Sequence
  Description of Artificial Sequence: Synthetic oligonucleotide
gcagaagaugcaggcaggu

SEQ ID NO: 2672960 - RNA, 19 nt, Artificial Sequence
  Description of Artificial Sequence: Synthetic oligonucleotide
ccagaaccuuggcuugguc

SEQ ID NO: 2672961 - RNA, 19 nt, Artificial Sequence
  Description of Artificial Sequence: Synthetic oligonucleotide
gggaguggccggcagcagu

SEQ ID NO: 2672962 - RNA, 19 nt, Artificial Sequence
  Description of Artificial Sequence: Synthetic oligonucleotide
guacaacugugaccccaau

SEQ ID NO: 2672963 - RNA, 19 nt, Artificial Sequence
  Description of Artificial Sequence: Synthetic oligonucleotide
cugccgcuugcaguccuca

SEQ ID NO: 2672964 - RNA, 19 nt, Artificial Sequence
  Description of Artificial Sequence: Synthetic oligonucleotide
ccgcagguucagucccacg

SEQ ID NO: 2672965 - RNA, 19 nt, Artificial Sequence
  Description of Artificial Sequence: Synthetic oligonucleotide
gcacgagucuggggucggg

SEQ ID NO: 2672966 - RNA, 19 nt, Artificial Sequence
  Description of Artificial Sequence: Synthetic oligonucleotide
gaaagccaucuuggcuggu

SEQ ID NO: 2672967 - RNA, 19 nt, Artificial Sequence
  Description of Artificial Sequence: Synthetic oligonucleotide
ccaguacccaggcuggagu

SEQ ID NO: 2672968 - RNA, 19 nt, Artificial Sequence
  Description of Artificial Sequence: Synthetic oligonucleotide
gugggccagauuggccaga

SEQ ID NO: 2672969 - RNA, 19 nt, Artificial Sequence
  Description of Artificial Sequence: Synthetic oligonucleotide
gguucagucccacguucuu

SEQ ID NO: 2672970 - RNA, 19 nt, Artificial Sequence
  Description of Artificial Sequence: Synthetic oligonucleotide
cuccaguacccaggcugga

SEQ ID NO: 2672971 - RNA, 19 nt, Artificial Sequence
  Description of Artificial Sequence: Synthetic oligonucleotide
cgcagguucagucccacgu

SEQ ID NO: 2672972 - RNA, 19 nt, Artificial Sequence
  Description of Artificial Sequence: Synthetic oligonucleotide
guggugaggggaggacucu

SEQ ID NO: 2672973 - RNA, 19 nt, Artificial Sequence
  Description of Artificial Sequence: Synthetic oligonucleotide
gccugcguagcacgagucu

SEQ ID NO: 2672974 - RNA, 19 nt, Artificial Sequence
  Description of Artificial Sequence: Synthetic oligonucleotide
ccccaaugacacuccagua

SEQ ID NO: 2672975 - RNA, 19 nt, Artificial Sequence
  Description of Artificial Sequence: Synthetic oligonucleotide
gcagguucagucccacguu

SEQ ID NO: 2672976 - RNA, 19 nt, Artificial Sequence
  Description of Artificial Sequence: Synthetic oligonucleotide
gggccagauuggccagaac

SEQ ID NO: 2672977 - RNA, 19 nt, Artificial Sequence
  Description of Artificial Sequence: Synthetic oligonucleotide
cugugaccccaaugacacu

SEQ ID NO: 2672978 - RNA, 19 nt, Artificial Sequence
  Description of Artificial Sequence: Synthetic oligonucleotide
cacgagucuggggucgggu

SEQ ID NO: 2672979 - RNA, 19 nt, Artificial Sequence
  Description of Artificial Sequence: Synthetic oligonucleotide
caguaccccuaugaacuau

SEQ ID NO: 2672980 - RNA, 19 nt, Artificial Sequence
  Description of Artificial Sequence: Synthetic oligonucleotide
guccucacucagggauguc

SEQ ID NO: 2672981 - RNA, 19 nt, Artificial Sequence
  Description of Artificial Sequence: Synthetic oligonucleotide
ccccacccugugucugugc

SEQ ID NO: 2672982 - RNA, 19 nt, Artificial Sequence
  Description of Artificial Sequence: Synthetic oligonucleotide
caccccacccugugucugu

SEQ ID NO: 2672983 - RNA, 19 nt, Artificial Sequence
  Description of Artificial Sequence: Synthetic oligonucleotide
cuguguccagaugcagccu

SEQ ID NO: 2672984 - RNA, 19 nt, Artificial Sequence
  Description of Artificial Sequence: Synthetic oligonucleotide
caaugagcuuccgcagguu

SEQ ID NO: 2672985 - RNA, 19 nt, Artificial Sequence
  Description of Artificial Sequence: Synthetic oligonucleotide
gccggcagcaguaccccua

SEQ ID NO: 2672986 - RNA, 19 nt, Artificial Sequence
  Description of Artificial Sequence: Synthetic oligonucleotide
gccagaaccuuggcuuggu

SEQ ID NO: 2672987 - RNA, 19 nt, Artificial Sequence
  Description of Artificial Sequence: Synthetic oligonucleotide
cugugagcaucugccgcuu

SEQ ID NO: 2672988 - RNA, 19 nt, Artificial Sequence
  Description of Artificial Sequence: Synthetic oligonucleotide
gggucccuucaaucuccgu

SEQ ID NO: 2672989 - RNA, 19 nt, Artificial Sequence
  Description of Artificial Sequence: Synthetic oligonucleotide
gccuucccaagaagaccaa

SEQ ID NO: 2672990 - RNA, 19 nt, Artificial Sequence
  Description of Artificial Sequence: Synthetic oligonucleotide
cgcuugcaguccucacuca

SEQ ID NO: 2672991 - RNA, 19 nt, Artificial Sequence
  Description of Artificial Sequence: Synthetic oligonucleotide
gguccuuguugagcaguuu

SEQ ID NO: 2672992 - RNA, 19 nt, Artificial Sequence
  Description of Artificial Sequence: Synthetic oligonucleotide
ccuucccaagaagaccaau

SEQ ID NO: 2672993 - RNA, 19 nt, Artificial Sequence
  Description of Artificial Sequence: Synthetic oligonucleotide
ggccggcagcaguaccccu

SEQ ID NO: 2672994 - RNA, 19 nt, Artificial Sequence
  Description of Artificial Sequence: Synthetic oligonucleotide
gcaggugggugggccagau

SEQ ID NO: 2672995 - RNA, 19 nt, Artificial Sequence
  Description of Artificial Sequence: Synthetic oligonucleotide
cgacggcaaggagggcaag

SEQ ID NO: 2672996 - RNA, 19 nt, Artificial Sequence
  Description of Artificial Sequence: Synthetic oligonucleotide
cggcagcaguaccccuaug

SEQ ID NO: 2672997 - RNA, 19 nt, Artificial Sequence
  Description of Artificial Sequence: Synthetic oligonucleotide
ccccucucucgaucacucu

SEQ ID NO: 2672998 - RNA, 19 nt, Artificial Sequence
  Description of Artificial Sequence: Synthetic oligonucleotide
gaugauacaggcuacaaag

SEQ ID NO: 2672999 - RNA, 19 nt, Artificial Sequence
  Description of Artificial Sequence: Synthetic oligonucleotide
aacacacacacacacacac

SEQ ID NO: 2673000 - RNA, 19 nt, Artificial Sequence
  Description of Artificial Sequence: Synthetic oligonucleotide
aacauguugguacagucuc

SEQ ID NO: 2673001 - RNA, 19 nt, Artificial Sequence
  Description of Artificial Sequence: Synthetic oligonucleotide
aaacacuuugagcagcccc

SEQ ID NO: 2673002 - RNA, 19 nt, Artificial Sequence
  Description of Artificial Sequence: Synthetic oligonucleotide
uccacaaucaggaugacga

SEQ ID NO: 2673003 - RNA, 19 nt, Artificial Sequence
  Description of Artificial Sequence: Synthetic oligonucleotide
acaagugcagcuugcaucc

SEQ ID NO: 2673004 - RNA, 19 nt, Artificial Sequence
  Description of Artificial Sequence: Synthetic oligonucleotide
augaacugcacguaggugg

SEQ ID NO: 2673005 - RNA, 19 nt, Artificial Sequence
  Description of Artificial Sequence: Synthetic oligonucleotide
agagacuaaggccaggccc

SEQ ID NO: 2673006 - RNA, 19 nt, Artificial Sequence
  Description of Artificial Sequence: Synthetic oligonucleotide
uuaacacacacacacacac

SEQ ID NO: 2673007 - RNA, 19 nt, Artificial Sequence
  Description of Artificial Sequence: Synthetic oligonucleotide
cauacaagaggacagagac

SEQ ID NO: 2673008 - RNA, 19 nt, Artificial Sequence
  Description of Artificial Sequence: Synthetic oligonucleotide
gucucaaacacuuugagca

SEQ ID NO: 2673009 - RNA, 19 nt, Artificial Sequence
  Description of Artificial Sequence: Synthetic oligonucleotide
aagagagccgcguagcagg

SEQ ID NO: 2673010 - RNA, 19 nt, Artificial Sequence
  Description of Artificial Sequence: Synthetic oligonucleotide
caugacaagggaaagcggg

SEQ ID NO: 2673011 - RNA, 19 nt, Artificial Sequence
  Description of Artificial Sequence: Synthetic oligonucleotide
aauuccacaaucaggauga

SEQ ID NO: 2673012 - RNA, 19 nt, Artificial Sequence
  Description of Artificial Sequence: Synthetic oligonucleotide
aaacaagcgacgcaggaga

SEQ ID NO: 2673013 - RNA, 19 nt, Artificial Sequence
  Description of Artificial Sequence: Synthetic oligonucleotide
agaggacagagacuaaggc

SEQ ID NO: 2673014 - RNA, 19 nt, Artificial Sequence
  Description of Artificial Sequence: Synthetic oligonucleotide
augauggaagaugacaggc

SEQ ID NO: 2673015 - RNA, 19 nt, Artificial Sequence
  Description of Artificial Sequence: Synthetic oligonucleotide
uggucgaauugguagaggg

SEQ ID NO: 2673016 - RNA, 19 nt, Artificial Sequence
  Description of Artificial Sequence: Synthetic oligonucleotide
uagcauaggccaaacaagc

SEQ ID NO: 2673017 - RNA, 19 nt, Artificial Sequence
  Description of Artificial Sequence: Synthetic oligonucleotide
ugauacaggcuacaaaggu

SEQ ID NO: 2673018 - RNA, 19 nt, Artificial Sequence
  Description of Artificial Sequence: Synthetic oligonucleotide
uguugguacagucucccag

SEQ ID NO: 2673019 - RNA, 19 nt, Artificial Sequence
  Description of Artificial Sequence: Synthetic oligonucleotide
aaggugauggggaaguuuc

SEQ ID NO: 2673020 - RNA, 19 nt, Artificial Sequence
  Description of Artificial Sequence: Synthetic oligonucleotide
ugagccaugaacugcacgu

SEQ ID NO: 2673021 - RNA, 19 nt, Artificial Sequence
  Description of Artificial Sequence: Synthetic oligonucleotide
ugguagaggggccagagga

SEQ ID NO: 2673022 - RNA, 19 nt, Artificial Sequence
  Description of Artificial Sequence: Synthetic oligonucleotide
aacacuuugagcagccccg

SEQ ID NO: 2673023 - RNA, 19 nt, Artificial Sequence
  Description of Artificial Sequence: Synthetic oligonucleotide
auggcaguggcauacaaga

SEQ ID NO: 2673024 - RNA, 19 nt, Artificial Sequence
  Description of Artificial Sequence: Synthetic oligonucleotide
aacgguucgcugaugaagg

SEQ ID NO: 2673025 - RNA, 19 nt, Artificial Sequence
  Description of Artificial Sequence: Synthetic oligonucleotide
uacaagaggacagagacua

SEQ ID NO: 2673026 - RNA, 19 nt, Artificial Sequence
  Description of Artificial Sequence: Synthetic oligonucleotide
aacgggaugggcaacaugu

SEQ ID NO: 2673027 - RNA, 19 nt, Artificial Sequence
  Description of Artificial Sequence: Synthetic oligonucleotide
uugagcaggauggucaccg

SEQ ID NO: 2673028 - RNA, 19 nt, Artificial Sequence
  Description of Artificial Sequence: Synthetic oligonucleotide
uguaccucuggucgaauug

SEQ ID NO: 2673029 - RNA, 19 nt, Artificial Sequence
  Description of Artificial Sequence: Synthetic oligonucleotide
guugguacagucucccagg

SEQ ID NO: 2673030 - RNA, 19 nt, Artificial Sequence
  Description of Artificial Sequence: Synthetic oligonucleotide
gguacagucucccagguug

SEQ ID NO: 2673031 - RNA, 19 nt, Artificial Sequence
  Description of Artificial Sequence: Synthetic oligonucleotide
aagaggacagagacuaagg

SEQ ID NO: 2673032 - RNA, 19 nt, Artificial Sequence
  Description of Artificial Sequence: Synthetic oligonucleotide
cacacacacacacaagugc

SEQ ID NO: 2673033 - RNA, 19 nt, Artificial Sequence
  Description of Artificial Sequence: Synthetic oligonucleotide
gagacuaaggccaggcccg

SEQ ID NO: 2673034 - RNA, 19 nt, Artificial Sequence
  Description of Artificial Sequence: Synthetic oligonucleotide
uugugcugguacaggaacg

SEQ ID NO: 2673035 - RNA, 19 nt, Artificial Sequence
  Description of Artificial Sequence: Synthetic oligonucleotide
ugcagcuugcauccgacgc

SEQ ID NO: 2673036 - RNA, 19 nt, Artificial Sequence
  Description of Artificial Sequence: Synthetic oligonucleotide
uucgccaugacaagggaaa

SEQ ID NO: 2673037 - RNA, 19 nt, Artificial Sequence
  Description of Artificial Sequence: Synthetic oligonucleotide
aaguuucgccaugacaagg

SEQ ID NO: 2673038 - RNA, 19 nt, Artificial Sequence
  Description of Artificial Sequence: Synthetic oligonucleotide
cauaggccaaacaagcgac

SEQ ID NO: 2673039 - RNA, 19 nt, Artificial Sequence
  Description of Artificial Sequence: Synthetic oligonucleotide
acagagacuaaggccaggc

SEQ ID NO: 2673040 - RNA, 19 nt, Artificial Sequence
  Description of Artificial Sequence: Synthetic oligonucleotide
cacacacacacacacacac

SEQ ID NO: 2673041 - RNA, 19 nt, Artificial Sequence
  Description of Artificial Sequence: Synthetic oligonucleotide
ugauggaagaugacaggca

SEQ ID NO: 2673042 - RNA, 19 nt, Artificial Sequence
  Description of Artificial Sequence: Synthetic oligonucleotide
uagacggccacacaccacu

SEQ ID NO: 2673043 - RNA, 19 nt, Artificial Sequence
  Description of Artificial Sequence: Synthetic oligonucleotide
uugcauccgacgcacgccg

SEQ ID NO: 2673044 - RNA, 19 nt, Artificial Sequence
  Description of Artificial Sequence: Synthetic oligonucleotide
aacugcacguagguggugg

SEQ ID NO: 2673045 - RNA, 19 nt, Artificial Sequence
  Description of Artificial Sequence: Synthetic oligonucleotide
guagcauaggccaaacaag

SEQ ID NO: 2673046 - RNA, 19 nt, Artificial Sequence
  Description of Artificial Sequence: Synthetic oligonucleotide
uacaggaacgguucgcuga

SEQ ID NO: 2673047 - RNA, 19 nt, Artificial Sequence
  Description of Artificial Sequence: Synthetic oligonucleotide
ucucaccaggccuugcgcg

SEQ ID NO: 2673048 - RNA, 19 nt, Artificial Sequence
  Description of Artificial Sequence: Synthetic oligonucleotide
ugugcugguacaggaacgg

SEQ ID NO: 2673049 - RNA, 19 nt, Artificial Sequence
  Description of Artificial Sequence: Synthetic oligonucleotide
ugauggggaaguuucgcca

SEQ ID NO: 2673050 - RNA, 19 nt, Artificial Sequence
  Description of Artificial Sequence: Synthetic oligonucleotide
aggacagagacuaaggcca

SEQ ID NO: 2673051 - RNA, 19 nt, Artificial Sequence
  Description of Artificial Sequence: Synthetic oligonucleotide
agaggacaauggcaguggc

SEQ ID NO: 2673052 - RNA, 19 nt, Artificial Sequence
  Description of Artificial Sequence: Synthetic oligonucleotide
gucgaauugguagaggggc

SEQ ID NO: 2673053 - RNA, 19 nt, Artificial Sequence
  Description of Artificial Sequence: Synthetic oligonucleotide
acgguggccauguagccgg

SEQ ID NO: 2673054 - RNA, 19 nt, Artificial Sequence
  Description of Artificial Sequence: Synthetic oligonucleotide
ccuaauuccacaaucagga

SEQ ID NO: 2673055 - RNA, 19 nt, Artificial Sequence
  Description of Artificial Sequence: Synthetic oligonucleotide
gaaguuucgccaugacaag

SEQ ID NO: 2673056 - RNA, 19 nt, Artificial Sequence
  Description of Artificial Sequence: Synthetic oligonucleotide
accucgguagcauaggcca

SEQ ID NO: 2673057 - RNA, 19 nt, Artificial Sequence
  Description of Artificial Sequence: Synthetic oligonucleotide
uacaaaggucucaaacacu

SEQ ID NO: 2673058 - RNA, 19 nt, Artificial Sequence
  Description of Artificial Sequence: Synthetic oligonucleotide
gaacgguucgcugaugaag

SEQ ID NO: 2673059 - RNA, 19 nt, Artificial Sequence
  Description of Artificial Sequence: Synthetic oligonucleotide
cacaagugcagcuugcauc

SEQ ID NO: 2673060 - RNA, 19 nt, Artificial Sequence
  Description of Artificial Sequence: Synthetic oligonucleotide
aauggcaguggcauacaag

SEQ ID NO: 2673061 - RNA, 19 nt, Artificial Sequence
  Description of Artificial Sequence: Synthetic oligonucleotide
aggucucaaacacuuugag

SEQ ID NO: 2673062 - RNA, 19 nt, Artificial Sequence
  Description of Artificial Sequence: Synthetic oligonucleotide
cuugugcugguacaggaac

SEQ ID NO: 2673063 - RNA, 19 nt, Artificial Sequence
  Description of Artificial Sequence: Synthetic oligonucleotide
gauacaggcuacaaagguc

SEQ ID NO: 2673064 - RNA, 19 nt, Artificial Sequence
  Description of Artificial Sequence: Synthetic oligonucleotide
aguuucgccaugacaaggg

SEQ ID NO: 2673065 - RNA, 19 nt, Artificial Sequence
  Description of Artificial Sequence: Synthetic oligonucleotide
aguggcauacaagaggaca

SEQ ID NO: 2673066 - RNA, 19 nt, Artificial Sequence
  Description of Artificial Sequence: Synthetic oligonucleotide
ucgaauugguagaggggcc

SEQ ID NO: 2673067 - RNA, 19 nt, Artificial Sequence
  Description of Artificial Sequence: Synthetic oligonucleotide
gauggcguagucccggcug

SEQ ID NO: 2673068 - RNA, 19 nt, Artificial Sequence
  Description of Artificial Sequence: Synthetic oligonucleotide
gguagcauaggccaaacaa

SEQ ID NO: 2673069 - RNA, 19 nt, Artificial Sequence
  Description of Artificial Sequence: Synthetic oligonucleotide
augacaagggaaagcgggc

SEQ ID NO: 2673070 - RNA, 19 nt, Artificial Sequence
  Description of Artificial Sequence: Synthetic oligonucleotide
ugggguagaugauggaaga

SEQ ID NO: 2673071 - RNA, 19 nt, Artificial Sequence
  Description of Artificial Sequence: Synthetic oligonucleotide
ggaaguuucgccaugacaa

SEQ ID NO: 2673072 - RNA, 19 nt, Artificial Sequence
  Description of Artificial Sequence: Synthetic oligonucleotide
auggcguagucccggcugc

SEQ ID NO: 2673073 - RNA, 19 nt, Artificial Sequence
  Description of Artificial Sequence: Synthetic oligonucleotide
gccguuguaccucuggucg

SEQ ID NO: 2673074 - RNA, 19 nt, Artificial Sequence
  Description of Artificial Sequence: Synthetic oligonucleotide
auggcauagacggccacac

SEQ ID NO: 2673075 - RNA, 19 nt, Artificial Sequence
  Description of Artificial Sequence: Synthetic oligonucleotide
uaacacacacacacacaca

SEQ ID NO: 2673076 - RNA, 19 nt, Artificial Sequence
  Description of Artificial Sequence: Synthetic oligonucleotide
cauguugguacagucuccc

SEQ ID NO: 2673077 - RNA, 19 nt, Artificial Sequence
  Description of Artificial Sequence: Synthetic oligonucleotide
guggcauacaagaggacag

SEQ ID NO: 2673078 - RNA, 19 nt, Artificial Sequence
  Description of Artificial Sequence: Synthetic oligonucleotide
ucccagguugagcaggaug

SEQ ID NO: 2673079 - RNA, 19 nt, Artificial Sequence
  Description of Artificial Sequence: Synthetic oligonucleotide
aaagcgggccuggagcccg

SEQ ID NO: 2673080 - RNA, 19 nt, Artificial Sequence
  Description of Artificial Sequence: Synthetic oligonucleotide
gccaugacaagggaaagcg

SEQ ID NO: 2673081 - RNA, 19 nt, Artificial Sequence
  Description of Artificial Sequence: Synthetic oligonucleotide
guagccguuguaccucugg

SEQ ID NO: 2673082 - RNA, 19 nt, Artificial Sequence
  Description of Artificial Sequence: Synthetic oligonucleotide
gugauggggaaguuucgcc

SEQ ID NO: 2673083 - RNA, 19 nt, Artificial Sequence
  Description of Artificial Sequence: Synthetic oligonucleotide
aaggucucaaacacuuuga

SEQ ID NO: 2673084 - RNA, 19 nt, Artificial Sequence
  Description of Artificial Sequence: Synthetic oligonucleotide
uuucgccaugacaagggaa

SEQ ID NO: 2673085 - RNA, 19 nt, Artificial Sequence
  Description of Artificial Sequence: Synthetic oligonucleotide
guaccucuggucgaauugg

SEQ ID NO: 2673086 - RNA, 19 nt, Artificial Sequence
  Description of Artificial Sequence: Synthetic oligonucleotide
gaugaaggcaaagaugaua

SEQ ID NO: 2673087 - RNA, 19 nt, Artificial Sequence
  Description of Artificial Sequence: Synthetic oligonucleotide
aggaacgguucgcugauga

SEQ ID NO: 2673088 - RNA, 19 nt, Artificial Sequence
  Description of Artificial Sequence: Synthetic oligonucleotide
auugguagaggggccagag

SEQ ID NO: 2673089 - RNA, 19 nt, Artificial Sequence
  Description of Artificial Sequence: Synthetic oligonucleotide
cuggagcccgccuaauucc

SEQ ID NO: 2673090 - RNA, 19 nt, Artificial Sequence
  Description of Artificial Sequence: Synthetic oligonucleotide
gaagagagccgcguagcag

SEQ ID NO: 2673091 - RNA, 19 nt, Artificial Sequence
  Description of Artificial Sequence: Synthetic oligonucleotide
agccguuguaccucugguc

SEQ ID NO: 2673092 - RNA, 19 nt, Artificial Sequence
  Description of Artificial Sequence: Synthetic oligonucleotide
caaacaagcgacgcaggag

SEQ ID NO: 2673093 - RNA, 19 nt, Artificial Sequence
  Description of Artificial Sequence: Synthetic oligonucleotide
cuuaacacacacacacaca

SEQ ID NO: 2673094 - RNA, 19 nt, Artificial Sequence
  Description of Artificial Sequence: Synthetic oligonucleotide
acauguugguacagucucc

SEQ ID NO: 2673095 - RNA, 19 nt, Artificial Sequence
  Description of Artificial Sequence: Synthetic oligonucleotide
cuuugagcagccccggcac

SEQ ID NO: 2673096 - RNA, 19 nt, Artificial Sequence
  Description of Artificial Sequence: Synthetic oligonucleotide
uaggccaaacaagcgacgc

SEQ ID NO: 2673097 - RNA, 19 nt, Artificial Sequence
  Description of Artificial Sequence: Synthetic oligonucleotide
ggcauagacggccacacac

SEQ ID NO: 2673098 - RNA, 19 nt, Artificial Sequence
  Description of Artificial Sequence: Synthetic oligonucleotide
gggaugggcaacauguugg

SEQ ID NO: 2673099 - RNA, 19 nt, Artificial Sequence
  Description of Artificial Sequence: Synthetic oligonucleotide
aagaugauacaggcuacaa

SEQ ID NO: 2673100 - RNA, 19 nt, Artificial Sequence
  Description of Artificial Sequence: Synthetic oligonucleotide
uccagcgccggcuugugcu

SEQ ID NO: 2673101 - RNA, 19 nt, Artificial Sequence
  Description of Artificial Sequence: Synthetic oligonucleotide
ggucucaaacacuuugagc

SEQ ID NO: 2673102 - RNA, 19 nt, Artificial Sequence
  Description of Artificial Sequence: Synthetic oligonucleotide
gacgauggcguagucccgg

SEQ ID NO: 2673103 - RNA, 19 nt, Artificial Sequence
  Description of Artificial Sequence: Synthetic oligonucleotide
uagccggugaucucaccag

SEQ ID NO: 2673104 - RNA, 19 nt, Artificial Sequence
  Description of Artificial Sequence: Synthetic oligonucleotide
uucgcugaugaaggcaaag

SEQ ID NO: 2673105 - RNA, 19 nt, Artificial Sequence
  Description of Artificial Sequence: Synthetic oligonucleotide
acagucucccagguugagc

SEQ ID NO: 2673106 - RNA, 19 nt, Artificial Sequence
  Description of Artificial Sequence: Synthetic oligonucleotide
acgguucgcugaugaaggc

SEQ ID NO: 2673107 - RNA, 19 nt, Artificial Sequence
  Description of Artificial Sequence: Synthetic oligonucleotide
gcgacgauggcguaguccc

SEQ ID NO: 2673108 - RNA, 19 nt, Artificial Sequence
  Description of Artificial Sequence: Synthetic oligonucleotide
cacacacacacaagugcag

SEQ ID NO: 2673109 - RNA, 19 nt, Artificial Sequence
  Description of Artificial Sequence: Synthetic oligonucleotide
guggugggguagaugaugg

SEQ ID NO: 2673110 - RNA, 19 nt, Artificial Sequence
  Description of Artificial Sequence: Synthetic oligonucleotide
acuaaggccaggcccgaca

SEQ ID NO: 2673111 - RNA, 19 nt, Artificial Sequence
  Description of Artificial Sequence: Synthetic oligonucleotide
cacacaccacuccagcgcc

SEQ ID NO: 2673112 - RNA, 19 nt, Artificial Sequence
  Description of Artificial Sequence: Synthetic oligonucleotide
cacacacacacacacacaa

SEQ ID NO: 2673113 - RNA, 19 nt, Artificial Sequence
  Description of Artificial Sequence: Synthetic oligonucleotide
agaagagagccgcguagca

SEQ ID NO: 2673114 - RNA, 19 nt, Artificial Sequence
  Description of Artificial Sequence: Synthetic oligonucleotide
gguagaugauggaagauga

SEQ ID NO: 2673115 - RNA, 19 nt, Artificial Sequence
  Description of Artificial Sequence: Synthetic oligonucleotide
acacacacacacaagugca

SEQ ID NO: 2673116 - RNA, 19 nt, Artificial Sequence
  Description of Artificial Sequence: Synthetic oligonucleotide
ugcugguacaggaacgguu

SEQ ID NO: 2673117 - RNA, 19 nt, Artificial Sequence
  Description of Artificial Sequence: Synthetic oligonucleotide
uugagcagccccggcacgg

SEQ ID NO: 2673118 - RNA, 19 nt, Artificial Sequence
  Description of Artificial Sequence: Synthetic oligonucleotide
uugguacagucucccaggu

SEQ ID NO: 2673119 - RNA, 19 nt, Artificial Sequence
  Description of Artificial Sequence: Synthetic oligonucleotide
ccucuggucgaauugguag

SEQ ID NO: 2673120 - RNA, 19 nt, Artificial Sequence
  Description of Artificial Sequence: Synthetic oligonucleotide
agguugagcaggaugguca

SEQ ID NO: 2673121 - RNA, 19 nt, Artificial Sequence
  Description of Artificial Sequence: Synthetic oligonucleotide
aggcccgacaggaaggugg

SEQ ID NO: 2673122 - RNA, 19 nt, Artificial Sequence
  Description of Artificial Sequence: Synthetic oligonucleotide
cagaggacaauggcagugg

SEQ ID NO: 2673123 - RNA, 19 nt, Artificial Sequence
  Description of Artificial Sequence: Synthetic oligonucleotide
guagccggugaucucacca

SEQ ID NO: 2673124 - RNA, 19 nt, Artificial Sequence
  Description of Artificial Sequence: Synthetic oligonucleotide
gccuaauuccacaaucagg

SEQ ID NO: 2673125 - RNA, 19 nt, Artificial Sequence
  Description of Artificial Sequence: Synthetic oligonucleotide
acgcaggagaagguggugg

SEQ ID NO: 2673126 - RNA, 19 nt, Artificial Sequence
  Description of Artificial Sequence: Synthetic oligonucleotide
acacacaagugcagcuugc

SEQ ID NO: 2673127 - RNA, 19 nt, Artificial Sequence
  Description of Artificial Sequence: Synthetic oligonucleotide
acugcacguaggugguggg

SEQ ID NO: 2673128 - RNA, 19 nt, Artificial Sequence
  Description of Artificial Sequence: Synthetic oligonucleotide
ucgcugaugaaggcaaaga

SEQ ID NO: 2673129 - RNA, 19 nt, Artificial Sequence
  Description of Artificial Sequence: Synthetic oligonucleotide
agccggugaucucaccagg

SEQ ID NO: 2673130 - RNA, 19 nt, Artificial Sequence
  Description of Artificial Sequence: Synthetic oligonucleotide
caccucgguagcauaggcc

SEQ ID NO: 2673131 - RNA, 19 nt, Artificial Sequence
  Description of Artificial Sequence: Synthetic oligonucleotide
agagccgcguagcaggcga

SEQ ID NO: 2673132 - RNA, 19 nt, Artificial Sequence
  Description of Artificial Sequence: Synthetic oligonucleotide
uagccguuguaccucuggu

SEQ ID NO: 2673133 - RNA, 19 nt, Artificial Sequence
  Description of Artificial Sequence: Synthetic oligonucleotide
acgauggcguagucccggc

SEQ ID NO: 2673134 - RNA, 19 nt, Artificial Sequence
  Description of Artificial Sequence: Synthetic oligonucleotide
cuugcauccgacgcacgcc

SEQ ID NO: 2673135 - RNA, 19 nt, Artificial Sequence
  Description of Artificial Sequence: Synthetic oligonucleotide
ucucccagguugagcagga

SEQ ID NO: 2673136 - RNA, 19 nt, Artificial Sequence
  Description of Artificial Sequence: Synthetic oligonucleotide
agggaaagcgggccuggag

SEQ ID NO: 2673137 - RNA, 19 nt, Artificial Sequence
  Description of Artificial Sequence: Synthetic oligonucleotide
gcagauggcauagacggcc

SEQ ID NO: 2673138 - RNA, 19 nt, Artificial Sequence
  Description of Artificial Sequence: Synthetic oligonucleotide
auaggccaaacaagcgacg

SEQ ID NO: 2673139 - RNA, 19 nt, Artificial Sequence
  Description of Artificial Sequence: Synthetic oligonucleotide
ggugguggcgacgauggcg

SEQ ID NO: 2673140 - RNA, 19 nt, Artificial Sequence
  Description of Artificial Sequence: Synthetic oligonucleotide
cagaagagagccgcguagc

SEQ ID NO: 2673141 - RNA, 19 nt, Artificial Sequence
  Description of Artificial Sequence: Synthetic oligonucleotide
acacacacacacacaagug

SEQ ID NO: 2673142 - RNA, 19 nt, Artificial Sequence
  Description of Artificial Sequence: Synthetic oligonucleotide
ggaaagcgggccuggagcc

SEQ ID NO: 2673143 - RNA, 19 nt, Artificial Sequence
  Description of Artificial Sequence: Synthetic oligonucleotide
uggggaacgggaugggcaa

SEQ ID NO: 2673144 - RNA, 19 nt, Artificial Sequence
  Description of Artificial Sequence: Synthetic oligonucleotide
cauagacggccacacacca

SEQ ID NO: 2673145 - RNA, 19 nt, Artificial Sequence
  Description of Artificial Sequence: Synthetic oligonucleotide
uggagcccgccuaauucca

SEQ ID NO: 2673146 - RNA, 19 nt, Artificial Sequence
  Description of Artificial Sequence: Synthetic oligonucleotide
cagagacuaaggccaggcc

SEQ ID NO: 2673147 - RNA, 19 nt, Artificial Sequence
  Description of Artificial Sequence: Synthetic oligonucleotide
cacacacacacacacaagu

SEQ ID NO: 2673148 - RNA, 19 nt, Artificial Sequence
  Description of Artificial Sequence: Synthetic oligonucleotide
cauguagccggugaucuca

SEQ ID NO: 2673149 - RNA, 19 nt, Artificial Sequence
  Description of Artificial Sequence: Synthetic oligonucleotide
gaacgggaugggcaacaug

SEQ ID NO: 2673150 - RNA, 19 nt, Artificial Sequence
  Description of Artificial Sequence: Synthetic oligonucleotide
ugguacaggaacgguucgc

SEQ ID NO: 2673151 - RNA, 19 nt, Artificial Sequence
  Description of Artificial Sequence: Synthetic oligonucleotide
uaccucuggucgaauuggu

SEQ ID NO: 2673152 - RNA, 19 nt, Artificial Sequence
  Description of Artificial Sequence: Synthetic oligonucleotide
gauggucaccgccgccagg

SEQ ID NO: 2673153 - RNA, 19 nt, Artificial Sequence
  Description of Artificial Sequence: Synthetic oligonucleotide
acaggaacgguucgcugau

SEQ ID NO: 2673154 - RNA, 19 nt, Artificial Sequence
  Description of Artificial Sequence: Synthetic oligonucleotide
caugaacugcacguaggug

SEQ ID NO: 2673155 - RNA, 19 nt, Artificial Sequence
  Description of Artificial Sequence: Synthetic oligonucleotide
gacggccacacaccacucc

SEQ ID NO: 2673156 - RNA, 19 nt, Artificial Sequence
  Description of Artificial Sequence: Synthetic oligonucleotide
acacaagugcagcuugcau

SEQ ID NO: 2673157 - RNA, 19 nt, Artificial Sequence
  Description of Artificial Sequence: Synthetic oligonucleotide
cucuggucgaauugguaga

SEQ ID NO: 2673158 - RNA, 19 nt, Artificial Sequence
  Description of Artificial Sequence: Synthetic oligonucleotide
uggcauacaagaggacaga

SEQ ID NO: 2673159 - RNA, 19 nt, Artificial Sequence
  Description of Artificial Sequence: Synthetic oligonucleotide
caggcgaaggugaugggga

SEQ ID NO: 2673160 - RNA, 19 nt, Artificial Sequence
  Description of Artificial Sequence: Synthetic oligonucleotide
ugcauccgacgcacgccgg

SEQ ID NO: 2673161 - RNA, 19 nt, Artificial Sequence
  Description of Artificial Sequence: Synthetic oligonucleotide
ggucgaauugguagagggg

SEQ ID NO: 2673162 - RNA, 19 nt, Artificial Sequence
  Description of Artificial Sequence: Synthetic oligonucleotide
gauggcauagacggccaca

SEQ ID NO: 2673163 - RNA, 19 nt, Artificial Sequence
  Description of Artificial Sequence: Synthetic oligonucleotide
agagagccgcguagcaggc

SEQ ID NO: 2673164 - RNA, 19 nt, Artificial Sequence
  Description of Artificial Sequence: Synthetic oligonucleotide
gacaggcagaagagagccg

SEQ ID NO: 2673165 - RNA, 19 nt, Artificial Sequence
  Description of Artificial Sequence: Synthetic oligonucleotide
caggcagaagagagccgcg

SEQ ID NO: 2673166 - RNA, 19 nt, Artificial Sequence
  Description of Artificial Sequence: Synthetic oligonucleotide
ugagcaggauggucaccgc

SEQ ID NO: 2673167 - RNA, 19 nt, Artificial Sequence
  Description of Artificial Sequence: Synthetic oligonucleotide
ucgccaugacaagggaaag

SEQ ID NO: 2673168 - RNA, 19 nt, Artificial Sequence
  Description of Artificial Sequence: Synthetic oligonucleotide
aggccaaacaagcgacgca

SEQ ID NO: 2673169 - RNA, 19 nt, Artificial Sequence
  Description of Artificial Sequence: Synthetic oligonucleotide
ggcauacaagaggacagag

SEQ ID NO: 2673170 - RNA, 19 nt, Artificial Sequence
  Description of Artificial Sequence: Synthetic oligonucleotide
auagacggccacacaccac

SEQ ID NO: 2673171 - RNA, 19 nt, Artificial Sequence
  Description of Artificial Sequence: Synthetic oligonucleotide
auacaagaggacagagacu

SEQ ID NO: 2673172 - RNA, 19 nt, Artificial Sequence
  Description of Artificial Sequence: Synthetic oligonucleotide
auggucaccgccgccagga

SEQ ID NO: 2673173 - RNA, 19 nt, Artificial Sequence
  Description of Artificial Sequence: Synthetic oligonucleotide
acaagcgacgcaggagaag

SEQ ID NO: 2673174 - RNA, 19 nt, Artificial Sequence
  Description of Artificial Sequence: Synthetic oligonucleotide
guccgugagccaugaacug

SEQ ID NO: 2673175 - RNA, 19 nt, Artificial Sequence
  Description of Artificial Sequence: Synthetic oligonucleotide
gucaccgccgccaggauga

SEQ ID NO: 2673176 - RNA, 19 nt, Artificial Sequence
  Description of Artificial Sequence: Synthetic oligonucleotide
agcgacgcaggagaaggug

SEQ ID NO: 2673177 - RNA, 19 nt, Artificial Sequence
  Description of Artificial Sequence: Synthetic oligonucleotide
uguagccggugaucucacc

SEQ ID NO: 2673178 - RNA, 19 nt, Artificial Sequence
  Description of Artificial Sequence: Synthetic oligonucleotide
gugcagcuugcauccgacg

SEQ ID NO: 2673179 - RNA, 19 nt, Artificial Sequence
  Description of Artificial Sequence: Synthetic oligonucleotide
acaggcuacaaaggucuca

SEQ ID NO: 2673180 - RNA, 19 nt, Artificial Sequence
  Description of Artificial Sequence: Synthetic oligonucleotide
cacgguggccauguagccg

SEQ ID NO: 2673181 - RNA, 19 nt, Artificial Sequence
  Description of Artificial Sequence: Synthetic oligonucleotide
caagggaaagcgggccugg

SEQ ID NO: 2673182 - RNA, 19 nt, Artificial Sequence
  Description of Artificial Sequence: Synthetic oligonucleotide
uuguaccucuggucgaauu

SEQ ID NO: 2673183 - RNA, 19 nt, Artificial Sequence
  Description of Artificial Sequence: Synthetic oligonucleotide
cuugcgcgaguccaggcca

SEQ ID NO: 2673184 - RNA, 19 nt, Artificial Sequence
  Description of Artificial Sequence: Synthetic oligonucleotide
gggaaguuucgccaugaca

SEQ ID NO: 2673185 - RNA, 19 nt, Artificial Sequence
  Description of Artificial Sequence: Synthetic oligonucleotide
gcaguggcauacaagagga

SEQ ID NO: 2673186 - RNA, 19 nt, Artificial Sequence
  Description of Artificial Sequence: Synthetic oligonucleotide
guagaggggccagaggaca

SEQ ID NO: 2673187 - RNA, 19 nt, Artificial Sequence
  Description of Artificial Sequence: Synthetic oligonucleotide
guuucgccaugacaaggga

SEQ ID NO: 2673188 - RNA, 19 nt, Artificial Sequence
  Description of Artificial Sequence: Synthetic oligonucleotide
aggaugaagcagauggcau

SEQ ID NO: 2673189 - RNA, 19 nt, Artificial Sequence
  Description of Artificial Sequence: Synthetic oligonucleotide
ggugauggggaaguuucgc

SEQ ID NO: 2673190 - RNA, 19 nt, Artificial Sequence
  Description of Artificial Sequence: Synthetic oligonucleotide
acacacacacacacacaag

SEQ ID NO: 2673191 - RNA, 19 nt, Artificial Sequence
  Description of Artificial Sequence: Synthetic oligonucleotide
gcuugcauccgacgcacgc

SEQ ID NO: 2673192 - RNA, 19 nt, Artificial Sequence
  Description of Artificial Sequence: Synthetic oligonucleotide
cuggucgaauugguagagg

SEQ ID NO: 2673193 - RNA, 19 nt, Artificial Sequence
  Description of Artificial Sequence: Synthetic oligonucleotide
caaacacuuugagcagccc

SEQ ID NO: 2673194 - RNA, 19 nt, Artificial Sequence
  Description of Artificial Sequence: Synthetic oligonucleotide
auguugguacagucuccca

SEQ ID NO: 2673195 - RNA, 19 nt, Artificial Sequence
  Description of Artificial Sequence: Synthetic oligonucleotide
gcguccgugagccaugaac

SEQ ID NO: 2673196 - RNA, 19 nt, Artificial Sequence
  Description of Artificial Sequence: Synthetic oligonucleotide
uggcauagacggccacaca

SEQ ID NO: 2673197 - RNA, 19 nt, Artificial Sequence
  Description of Artificial Sequence: Synthetic oligonucleotide
caacauguugguacagucu

SEQ ID NO: 2673198 - RNA, 19 nt, Artificial Sequence
  Description of Artificial Sequence: Synthetic oligonucleotide
guagucccggcugcguccg

SEQ ID NO: 2673199 - RNA, 19 nt, Artificial Sequence
  Description of Artificial Sequence: Synthetic oligonucleotide
ccaugacaagggaaagcgg

SEQ ID NO: 2673200 - RNA, 19 nt, Artificial Sequence
  Description of Artificial Sequence: Synthetic oligonucleotide
cacaccacuccagcgccgg

SEQ ID NO: 2673201 - RNA, 19 nt, Artificial Sequence
  Description of Artificial Sequence: Synthetic oligonucleotide
acaccacuccagcgccggc

SEQ ID NO: 2673202 - RNA, 19 nt, Artificial Sequence
  Description of Artificial Sequence: Synthetic oligonucleotide
gguggugggguagaugaug

SEQ ID NO: 2673203 - RNA, 19 nt, Artificial Sequence
  Description of Artificial Sequence: Synthetic oligonucleotide
gccaugaacugcacguagg

SEQ ID NO: 2673204 - RNA, 19 nt, Artificial Sequence
  Description of Artificial Sequence: Synthetic oligonucleotide
gauggggaaguuucgccau

SEQ ID NO: 2673205 - RNA, 19 nt, Artificial Sequence
  Description of Artificial Sequence: Synthetic oligonucleotide
uccaggccaccucgguagc

SEQ ID NO: 2673206 - RNA, 19 nt, Artificial Sequence
  Description of Artificial Sequence: Synthetic oligonucleotide
aacaagcgacgcaggagaa

SEQ ID NO: 2673207 - RNA, 19 nt, Artificial Sequence
  Description of Artificial Sequence: Synthetic oligonucleotide
auuccacaaucaggaugac

SEQ ID NO: 2673208 - RNA, 19 nt, Artificial Sequence
  Description of Artificial Sequence: Synthetic oligonucleotide
uggccauguagccggugau

SEQ ID NO: 2673209 - RNA, 19 nt, Artificial Sequence
  Description of Artificial Sequence: Synthetic oligonucleotide
gaaagcgggccuggagccc

SEQ ID NO: 2673210 - RNA, 19 nt, Artificial Sequence
  Description of Artificial Sequence: Synthetic oligonucleotide
gaggggccagaggacaaug

SEQ ID NO: 2673211 - RNA, 19 nt, Artificial Sequence
  Description of Artificial Sequence: Synthetic oligonucleotide
gagcccgccuaauuccaca

SEQ ID NO: 2673212 - RNA, 19 nt, Artificial Sequence
  Description of Artificial Sequence: Synthetic oligonucleotide
guggggaacgggaugggca

SEQ ID NO: 2673213 - RNA, 19 nt, Artificial Sequence
  Description of Artificial Sequence: Synthetic oligonucleotide
gcauagacggccacacacc

SEQ ID NO: 2673214 - RNA, 19 nt, Artificial Sequence
  Description of Artificial Sequence: Synthetic oligonucleotide
cagcuugcauccgacgcac

SEQ ID NO: 2673215 - RNA, 19 nt, Artificial Sequence
  Description of Artificial Sequence: Synthetic oligonucleotide
cauccgacgcacgccgggg

SEQ ID NO: 2673216 - RNA, 19 nt, Artificial Sequence
  Description of Artificial Sequence: Synthetic oligonucleotide
ucgguagcauaggccaaac

SEQ ID NO: 2673217 - RNA, 19 nt, Artificial Sequence
  Description of Artificial Sequence: Synthetic oligonucleotide
acacacacaagugcagcuu

SEQ ID NO: 2673218 - RNA, 19 nt, Artificial Sequence
  Description of Artificial Sequence: Synthetic oligonucleotide
cugcacguagguggugggg

SEQ ID NO: 2673219 - RNA, 19 nt, Artificial Sequence
  Description of Artificial Sequence: Synthetic oligonucleotide
ugguacagucucccagguu

SEQ ID NO: 2673220 - RNA, 19 nt, Artificial Sequence
  Description of Artificial Sequence: Synthetic oligonucleotide
gacgcaggagaagguggug

SEQ ID NO: 2673221 - RNA, 19 nt, Artificial Sequence
  Description of Artificial Sequence: Synthetic oligonucleotide
cacguagguggugggguag

SEQ ID NO: 2673222 - RNA, 19 nt, Artificial Sequence
  Description of Artificial Sequence: Synthetic oligonucleotide
gcgacgcaggagaaggugg

SEQ ID NO: 2673223 - RNA, 19 nt, Artificial Sequence
  Description of Artificial Sequence: Synthetic oligonucleotide
caguggcauacaagaggac

SEQ ID NO: 2673224 - RNA, 19 nt, Artificial Sequence
  Description of Artificial Sequence: Synthetic oligonucleotide
ggccaggcccgacaggaag

SEQ ID NO: 2673225 - RNA, 19 nt, Artificial Sequence
  Description of Artificial Sequence: Synthetic oligonucleotide
cucaccaggccuugcgcga

SEQ ID NO: 2673226 - RNA, 19 nt, Artificial Sequence
  Description of Artificial Sequence: Synthetic oligonucleotide
uugcgcgaguccaggccac

SEQ ID NO: 2673227 - RNA, 19 nt, Artificial Sequence
  Description of Artificial Sequence: Synthetic oligonucleotide
ccuggagcccgccuaauuc

SEQ ID NO: 2673228 - RNA, 19 nt, Artificial Sequence
  Description of Artificial Sequence: Synthetic oligonucleotide
acacacacacacacacaca

SEQ ID NO: 2673229 - RNA, 19 nt, Artificial Sequence
  Description of Artificial Sequence: Synthetic oligonucleotide
gagagccgcguagcaggcg

SEQ ID NO: 2673230 - RNA, 19 nt, Artificial Sequence
  Description of Artificial Sequence: Synthetic oligonucleotide
caggcuacaaaggucucaa

SEQ ID NO: 2673231 - RNA, 19 nt, Artificial Sequence
  Description of Artificial Sequence: Synthetic oligonucleotide
agcccgccuaauuccacaa

SEQ ID NO: 2673232 - RNA, 19 nt, Artificial Sequence
  Description of Artificial Sequence: Synthetic oligonucleotide
gguucgcugaugaaggcaa

SEQ ID NO: 2673233 - RNA, 19 nt, Artificial Sequence
  Description of Artificial Sequence: Synthetic oligonucleotide
cccgccuaauuccacaauc

SEQ ID NO: 2673234 - RNA, 19 nt, Artificial Sequence
  Description of Artificial Sequence: Synthetic oligonucleotide
guugagcaggauggucacc

SEQ ID NO: 2673235 - RNA, 19 nt, Artificial Sequence
  Description of Artificial Sequence: Synthetic oligonucleotide
aggcgaaggugauggggaa

SEQ ID NO: 2673236 - RNA, 19 nt, Artificial Sequence
  Description of Artificial Sequence: Synthetic oligonucleotide
aggcagaagagagccgcgu

SEQ ID NO: 2673237 - RNA, 19 nt, Artificial Sequence
  Description of Artificial Sequence: Synthetic oligonucleotide
ccuugcgcgaguccaggcc

SEQ ID NO: 2673238 - RNA, 19 nt, Artificial Sequence
  Description of Artificial Sequence: Synthetic oligonucleotide
ccagaggacaauggcagug

SEQ ID NO: 2673239 - RNA, 19 nt, Artificial Sequence
  Description of Artificial Sequence: Synthetic oligonucleotide
ggagaaggugguggcgacg

SEQ ID NO: 2673240 - RNA, 19 nt, Artificial Sequence
  Description of Artificial Sequence: Synthetic oligonucleotide
uggcguagucccggcugcg

SEQ ID NO: 2673241 - RNA, 19 nt, Artificial Sequence
  Description of Artificial Sequence: Synthetic oligonucleotide
gcagcuugcauccgacgca

SEQ ID NO: 2673242 - RNA, 19 nt, Artificial Sequence
  Description of Artificial Sequence: Synthetic oligonucleotide
caagugcagcuugcauccg

SEQ ID NO: 2673243 - RNA, 19 nt, Artificial Sequence
  Description of Artificial Sequence: Synthetic oligonucleotide
gcauccgacgcacgccggg

SEQ ID NO: 2673244 - RNA, 19 nt, Artificial Sequence
  Description of Artificial Sequence: Synthetic oligonucleotide
gcauacaagaggacagaga

SEQ ID NO: 2673245 - RNA, 19 nt, Artificial Sequence
  Description of Artificial Sequence: Synthetic oligonucleotide
ccggcugcguccgugagcc

SEQ ID NO: 2673246 - RNA, 19 nt, Artificial Sequence
  Description of Artificial Sequence: Synthetic oligonucleotide
aagcgacgcaggagaaggu

SEQ ID NO: 2673247 - RNA, 19 nt, Artificial Sequence
  Description of Artificial Sequence: Synthetic oligonucleotide
gugaucucaccaggccuug

SEQ ID NO: 2673248 - RNA, 19 nt, Artificial Sequence
  Description of Artificial Sequence: Synthetic oligonucleotide
cacacaagugcagcuugca

SEQ ID NO: 2673249 - RNA, 19 nt, Artificial Sequence
  Description of Artificial Sequence: Synthetic oligonucleotide
accaggccuugcgcgaguc

SEQ ID NO: 2673250 - RNA, 19 nt, Artificial Sequence
  Description of Artificial Sequence: Synthetic oligonucleotide
ccggugaucucaccaggcc

SEQ ID NO: 2673251 - RNA, 19 nt, Artificial Sequence
  Description of Artificial Sequence: Synthetic oligonucleotide
gcaggauggucaccgccgc

SEQ ID NO: 2673252 - RNA, 19 nt, Artificial Sequence
  Description of Artificial Sequence: Synthetic oligonucleotide
ggcgacgauggcguagucc

SEQ ID NO: 2673253 - RNA, 19 nt, Artificial Sequence
  Description of Artificial Sequence: Synthetic oligonucleotide
gguagaggggccagaggac

SEQ ID NO: 2673254 - RNA, 19 nt, Artificial Sequence
  Description of Artificial Sequence: Synthetic oligonucleotide
caauggcaguggcauacaa

SEQ ID NO: 2673255 - RNA, 19 nt, Artificial Sequence
  Description of Artificial Sequence: Synthetic oligonucleotide
ggacagagacuaaggccag

SEQ ID NO: 2673256 - RNA, 19 nt, Artificial Sequence
  Description of Artificial Sequence: Synthetic oligonucleotide
ggucaccgccgccaggaug

SEQ ID NO: 2673257 - RNA, 19 nt, Artificial Sequence
  Description of Artificial Sequence: Synthetic oligonucleotide
cuaauuccacaaucaggau

SEQ ID NO: 2673258 - RNA, 19 nt, Artificial Sequence
  Description of Artificial Sequence: Synthetic oligonucleotide
gaaggugauggggaaguuu

SEQ ID NO: 2673259 - RNA, 19 nt, Artificial Sequence
  Description of Artificial Sequence: Synthetic oligonucleotide
acacaccacuccagcgccg

SEQ ID NO: 2673260 - RNA, 19 nt, Artificial Sequence
  Description of Artificial Sequence: Synthetic oligonucleotide
cgccuaauuccacaaucag

SEQ ID NO: 2673261 - RNA, 19 nt, Artificial Sequence
  Description of Artificial Sequence: Synthetic oligonucleotide
gguggcgacgauggcguag

SEQ ID NO: 2673262 - RNA, 19 nt, Artificial Sequence
  Description of Artificial Sequence: Synthetic oligonucleotide
agacggccacacaccacuc

SEQ ID NO: 2673263 - RNA, 19 nt, Artificial Sequence
  Description of Artificial Sequence: Synthetic oligonucleotide
gcacgguggccauguagcc

SEQ ID NO: 2673264 - RNA, 19 nt, Artificial Sequence
  Description of Artificial Sequence: Synthetic oligonucleotide
aggcuacaaaggucucaaa

SEQ ID NO: 2673265 - RNA, 19 nt, Artificial Sequence
  Description of Artificial Sequence: Synthetic oligonucleotide
aagcgggccuggagcccgc

SEQ ID NO: 2673266 - RNA, 19 nt, Artificial Sequence
  Description of Artificial Sequence: Synthetic oligonucleotide
ccaccucgguagcauaggc

SEQ ID NO: 2673267 - RNA, 19 nt, Artificial Sequence
  Description of Artificial Sequence: Synthetic oligonucleotide
gccaggcccgacaggaagg

SEQ ID NO: 2673268 - RNA, 19 nt, Artificial Sequence
  Description of Artificial Sequence: Synthetic oligonucleotide
agaaggugguggcgacgau

SEQ ID NO: 2673269 - RNA, 19 nt, Artificial Sequence
  Description of Artificial Sequence: Synthetic oligonucleotide
ggcccgacaggaagguggg

SEQ ID NO: 2673270 - RNA, 19 nt, Artificial Sequence
  Description of Artificial Sequence: Synthetic oligonucleotide
gaugggcaacauguuggua

SEQ ID NO: 2673271 - RNA, 19 nt, Artificial Sequence
  Description of Artificial Sequence: Synthetic oligonucleotide
gccgccaggaugaagcaga

SEQ ID NO: 2673272 - RNA, 19 nt, Artificial Sequence
  Description of Artificial Sequence: Synthetic oligonucleotide
ccgccuaauuccacaauca

SEQ ID NO: 2673273 - RNA, 19 nt, Artificial Sequence
  Description of Artificial Sequence: Synthetic oligonucleotide
ggcgaaggugauggggaag

SEQ ID NO: 2673274 - RNA, 19 nt, Artificial Sequence
  Description of Artificial Sequence: Synthetic oligonucleotide
gugguggcgacgauggcgu

SEQ ID NO: 2673275 - RNA, 19 nt, Artificial Sequence
  Description of Artificial Sequence: Synthetic oligonucleotide
gggccagaggacaauggca

SEQ ID NO: 2673276 - RNA, 19 nt, Artificial Sequence
  Description of Artificial Sequence: Synthetic oligonucleotide
agacuaaggccaggcccga

SEQ ID NO: 2673277 - RNA, 19 nt, Artificial Sequence
  Description of Artificial Sequence: Synthetic oligonucleotide
gagccaugaacugcacgua

SEQ ID NO: 2673278 - RNA, 19 nt, Artificial Sequence
  Description of Artificial Sequence: Synthetic oligonucleotide
gguacaggaacgguucgcu

SEQ ID NO: 2673279 - RNA, 19 nt, Artificial Sequence
  Description of Artificial Sequence: Synthetic oligonucleotide
cguagucccggcugcgucc

SEQ ID NO: 2673280 - RNA, 19 nt, Artificial Sequence
  Description of Artificial Sequence: Synthetic oligonucleotide
acguagguggugggguaga

SEQ ID NO: 2673281 - RNA, 19 nt, Artificial Sequence
  Description of Artificial Sequence: Synthetic oligonucleotide
agccgcguagcaggcgaag

SEQ ID NO: 2673282 - RNA, 19 nt, Artificial Sequence
  Description of Artificial Sequence: Synthetic oligonucleotide
ggccaccucgguagcauag

SEQ ID NO: 2673283 - RNA, 19 nt, Artificial Sequence
  Description of Artificial Sequence: Synthetic oligonucleotide
gccaccucgguagcauagg

SEQ ID NO: 2673284 - RNA, 19 nt, Artificial Sequence
  Description of Artificial Sequence: Synthetic oligonucleotide
agucccggcugcguccgug

SEQ ID NO: 2673285 - RNA, 19 nt, Artificial Sequence
  Description of Artificial Sequence: Synthetic oligonucleotide
gguggggaacgggaugggc

SEQ ID NO: 2673286 - RNA, 19 nt, Artificial Sequence
  Description of Artificial Sequence: Synthetic oligonucleotide
ccgugagccaugaacugca

SEQ ID NO: 2673287 - RNA, 19 nt, Artificial Sequence
  Description of Artificial Sequence: Synthetic oligonucleotide
ugcgcgaguccaggccacc

SEQ ID NO: 2673288 - RNA, 19 nt, Artificial Sequence
  Description of Artificial Sequence: Synthetic oligonucleotide
cucgguagcauaggccaaa

SEQ ID NO: 2673289 - RNA, 19 nt, Artificial Sequence
  Description of Artificial Sequence: Synthetic oligonucleotide
agcuugcauccgacgcacg

SEQ ID NO: 2673290 - RNA, 19 nt, Artificial Sequence
  Description of Artificial Sequence: Synthetic oligonucleotide
cuccagcgccggcuugugc

SEQ ID NO: 2673291 - RNA, 19 nt, Artificial Sequence
  Description of Artificial Sequence: Synthetic oligonucleotide
gacuaaggccaggcccgac

SEQ ID NO: 2673292 - RNA, 19 nt, Artificial Sequence
  Description of Artificial Sequence: Synthetic oligonucleotide
gccgcguagcaggcgaagg

SEQ ID NO: 2673293 - RNA, 19 nt, Artificial Sequence
  Description of Artificial Sequence: Synthetic oligonucleotide
acaagaggacagagacuaa

SEQ ID NO: 2673294 - RNA, 19 nt, Artificial Sequence
  Description of Artificial Sequence: Synthetic oligonucleotide
ggaugggcaacauguuggu

SEQ ID NO: 2673295 - RNA, 19 nt, Artificial Sequence
  Description of Artificial Sequence: Synthetic oligonucleotide
ggggaaguuucgccaugac

SEQ ID NO: 2673296 - RNA, 19 nt, Artificial Sequence
  Description of Artificial Sequence: Synthetic oligonucleotide
cgggaugggcaacauguug

SEQ ID NO: 2673297 - RNA, 19 nt, Artificial Sequence
  Description of Artificial Sequence: Synthetic oligonucleotide
ggaacgguucgcugaugaa

SEQ ID NO: 2673298 - RNA, 19 nt, Artificial Sequence
  Description of Artificial Sequence: Synthetic oligonucleotide
gccggugaucucaccaggc

SEQ ID NO: 2673299 - RNA, 19 nt, Artificial Sequence
  Description of Artificial Sequence: Synthetic oligonucleotide
aggccuugcgcgaguccag

SEQ ID NO: 2673300 - RNA, 19 nt, Artificial Sequence
  Description of Artificial Sequence: Synthetic oligonucleotide
ggccuugcgcgaguccagg

SEQ ID NO: 2673301 - RNA, 19 nt, Artificial Sequence
  Description of Artificial Sequence: Synthetic oligonucleotide
uggucaccgccgccaggau

SEQ ID NO: 2673302 - RNA, 19 nt, Artificial Sequence
  Description of Artificial Sequence: Synthetic oligonucleotide
accucuggucgaauuggua

SEQ ID NO: 2673303 - RNA, 19 nt, Artificial Sequence
  Description of Artificial Sequence: Synthetic oligonucleotide
gggguagccguuguaccuc

SEQ ID NO: 2673304 - RNA, 19 nt, Artificial Sequence
  Description of Artificial Sequence: Synthetic oligonucleotide
gccauguagccggugaucu

SEQ ID NO: 2673305 - RNA, 19 nt, Artificial Sequence
  Description of Artificial Sequence: Synthetic oligonucleotide
acuccagcgccggcuugug

SEQ ID NO: 2673306 - RNA, 19 nt, Artificial Sequence
  Description of Artificial Sequence: Synthetic oligonucleotide
cagcgccggcuugugcugg

SEQ ID NO: 2673307 - RNA, 19 nt, Artificial Sequence
  Description of Artificial Sequence: Synthetic oligonucleotide
gggcaacauguugguacag

SEQ ID NO: 2673308 - RNA, 19 nt, Artificial Sequence
  Description of Artificial Sequence: Synthetic oligonucleotide
gggaacgggaugggcaaca

SEQ ID NO: 2673309 - RNA, 19 nt, Artificial Sequence
  Description of Artificial Sequence: Synthetic oligonucleotide
aggccaccucgguagcaua

SEQ ID NO: 2673310 - RNA, 19 nt, Artificial Sequence
  Description of Artificial Sequence: Synthetic oligonucleotide
ccggcuugugcugguacag

SEQ ID NO: 2673311 - RNA, 19 nt, Artificial Sequence
  Description of Artificial Sequence: Synthetic oligonucleotide
caaaggucucaaacacuuu

SEQ ID NO: 2673312 - RNA, 19 nt, Artificial Sequence
  Description of Artificial Sequence: Synthetic oligonucleotide
ugcguccgugagccaugaa

SEQ ID NO: 2673313 - RNA, 19 nt, Artificial Sequence
  Description of Artificial Sequence: Synthetic oligonucleotide
gccuugcgcgaguccaggc

SEQ ID NO: 2673314 - RNA, 19 nt, Artificial Sequence
  Description of Artificial Sequence: Synthetic oligonucleotide
gccggcuugugcugguaca

SEQ ID NO: 2673315 - RNA, 19 nt, Artificial Sequence
  Description of Artificial Sequence: Synthetic oligonucleotide
uggcgacgauggcguaguc

SEQ ID NO: 2673316 - RNA, 19 nt, Artificial Sequence
  Description of Artificial Sequence: Synthetic oligonucleotide
ggcaacauguugguacagu

SEQ ID NO: 2673317 - RNA, 19 nt, Artificial Sequence
  Description of Artificial Sequence: Synthetic oligonucleotide
caggaacgguucgcugaug

SEQ ID NO: 2673318 - RNA, 19 nt, Artificial Sequence
  Description of Artificial Sequence: Synthetic oligonucleotide
guggcgacgauggcguagu

SEQ ID NO: 2673319 - RNA, 19 nt, Artificial Sequence
  Description of Artificial Sequence: Synthetic oligonucleotide
cguccgugagccaugaacu

SEQ ID NO: 2673320 - RNA, 19 nt, Artificial Sequence
  Description of Artificial Sequence: Synthetic oligonucleotide
ggccauguagccggugauc

SEQ ID NO: 2673321 - RNA, 19 nt, Artificial Sequence
  Description of Artificial Sequence: Synthetic oligonucleotide
ccauguagccggugaucuc

SEQ ID NO: 2673322 - RNA, 19 nt, Artificial Sequence
  Description of Artificial Sequence: Synthetic oligonucleotide
guucgcugaugaaggcaaa

SEQ ID NO: 2673323 - RNA, 19 nt, Artificial Sequence
  Description of Artificial Sequence: Synthetic oligonucleotide
gcguagucccggcugcguc

SEQ ID NO: 2673324 - RNA, 19 nt, Artificial Sequence
  Description of Artificial Sequence: Synthetic oligonucleotide
gcagccccggcacgguggc

SEQ ID NO: 2673325 - RNA, 19 nt, Artificial Sequence
  Description of Artificial Sequence: Synthetic oligonucleotide
acgggaugggcaacauguu

SEQ ID NO: 2673326 - RNA, 19 nt, Artificial Sequence
  Description of Artificial Sequence: Synthetic oligonucleotide
cccgacaggaaggugggga

SEQ ID NO: 2673327 - RNA, 19 nt, Artificial Sequence
  Description of Artificial Sequence: Synthetic oligonucleotide
ggugaucucaccaggccuu

SEQ ID NO: 2673328 - RNA, 19 nt, Artificial Sequence
  Description of Artificial Sequence: Synthetic oligonucleotide
gcugcguccgugagccaug

SEQ ID NO: 2673329 - RNA, 19 nt, Artificial Sequence
  Description of Artificial Sequence: Synthetic oligonucleotide
caggcccgacaggaaggug

SEQ ID NO: 2673330 - RNA, 19 nt, Artificial Sequence
  Description of Artificial Sequence: Synthetic oligonucleotide
ccagcgccggcuugugcug

SEQ ID NO: 2673331 - RNA, 19 nt, Artificial Sequence
  Description of Artificial Sequence: Synthetic oligonucleotide
ugguggcgacgauggcgua

SEQ ID NO: 2673332 - RNA, 19 nt, Artificial Sequence
  Description of Artificial Sequence: Synthetic oligonucleotide
uagucccggcugcguccgu

SEQ ID NO: 2673333 - RNA, 19 nt, Artificial Sequence
  Description of Artificial Sequence: Synthetic oligonucleotide
ccaggccuugcgcgagucc

SEQ ID NO: 2673334 - RNA, 19 nt, Artificial Sequence
  Description of Artificial Sequence: Synthetic oligonucleotide
ggagcccgccuaauuccac

SEQ ID NO: 2673335 - RNA, 19 nt, Artificial Sequence
  Description of Artificial Sequence: Synthetic oligonucleotide
cgaauugguagaggggcca

SEQ ID NO: 2673336 - RNA, 19 nt, Artificial Sequence
  Description of Artificial Sequence: Synthetic oligonucleotide
gguagccguuguaccucug

SEQ ID NO: 2673337 - RNA, 19 nt, Artificial Sequence
  Description of Artificial Sequence: Synthetic oligonucleotide
ccguuguaccucuggucga

SEQ ID NO: 2673338 - RNA, 19 nt, Artificial Sequence
  Description of Artificial Sequence: Synthetic oligonucleotide
cccggcugcguccgugagc

SEQ ID NO: 2673339 - RNA, 19 nt, Artificial Sequence
  Description of Artificial Sequence: Synthetic oligonucleotide
gguggccauguagccggug

SEQ ID NO: 2673340 - RNA, 19 nt, Artificial Sequence
  Description of Artificial Sequence: Synthetic oligonucleotide
gcacguaggugguggggua

SEQ ID NO: 2673341 - RNA, 19 nt, Artificial Sequence
  Description of Artificial Sequence: Synthetic oligonucleotide
caccgccgccaggaugaag

SEQ ID NO: 2673342 - RNA, 19 nt, Artificial Sequence
  Description of Artificial Sequence: Synthetic oligonucleotide
ggguagccguuguaccucu

SEQ ID NO: 2673343 - RNA, 19 nt, Artificial Sequence
  Description of Artificial Sequence: Synthetic oligonucleotide
cugcguccgugagccauga

SEQ ID NO: 2673344 - RNA, 19 nt, Artificial Sequence
  Description of Artificial Sequence: Synthetic oligonucleotide
gugcugguacaggaacggu

SEQ ID NO: 2673345 - RNA, 19 nt, Artificial Sequence
  Description of Artificial Sequence: Synthetic oligonucleotide
ggggaacgggaugggcaac

SEQ ID NO: 2673346 - RNA, 19 nt, Artificial Sequence
  Description of Artificial Sequence: Synthetic oligonucleotide
caccacuccagcgccggcu

SEQ ID NO: 2673347 - RNA, 19 nt, Artificial Sequence
  Description of Artificial Sequence: Synthetic oligonucleotide
ucaccgccgccaggaugaa

SEQ ID NO: 2673348 - RNA, 19 nt, Artificial Sequence
  Description of Artificial Sequence: Synthetic oligonucleotide
guuguaccucuggucgaau

SEQ ID NO: 2673349 - RNA, 19 nt, Artificial Sequence
  Description of Artificial Sequence: Synthetic oligonucleotide
gagccgcguagcaggcgaa

SEQ ID NO: 2673350 - RNA, 19 nt, Artificial Sequence
  Description of Artificial Sequence: Synthetic oligonucleotide
cgcugaugaaggcaaagau

SEQ ID NO: 2673351 - RNA, 19 nt, Artificial Sequence
  Description of Artificial Sequence: Synthetic oligonucleotide
gggccuggagcccgccuaa

SEQ ID NO: 2673352 - RNA, 19 nt, Artificial Sequence
  Description of Artificial Sequence: Synthetic oligonucleotide
caggccaccucgguagcau

SEQ ID NO: 2673353 - RNA, 19 nt, Artificial Sequence
  Description of Artificial Sequence: Synthetic oligonucleotide
ggcugcguccgugagccau

SEQ ID NO: 2673354 - RNA, 19 nt, Artificial Sequence
  Description of Artificial Sequence: Synthetic oligonucleotide
cgguucgcugaugaaggca

SEQ ID NO: 2673355 - RNA, 19 nt, Artificial Sequence
  Description of Artificial Sequence: Synthetic oligonucleotide
cgcgaguccaggccaccuc

SEQ ID NO: 2673356 - RNA, 19 nt, Artificial Sequence
  Description of Artificial Sequence: Synthetic oligonucleotide
cgccggcuugugcugguac

SEQ ID NO: 2673357 - RNA, 19 nt, Artificial Sequence
  Description of Artificial Sequence: Synthetic oligonucleotide
cguuguaccucuggucgaa

SEQ ID NO: 2673358 - RNA, 19 nt, Artificial Sequence
  Description of Artificial Sequence: Synthetic oligonucleotide
cagccccggcacgguggcc

SEQ ID NO: 2673359 - RNA, 19 nt, Artificial Sequence
  Description of Artificial Sequence: Synthetic oligonucleotide
cgguagcauaggccaaaca

SEQ ID NO: 2673360 - RNA, 19 nt, Artificial Sequence
  Description of Artificial Sequence: Synthetic oligonucleotide
ggaacgggaugggcaacau

SEQ ID NO: 2673361 - RNA, 19 nt, Artificial Sequence
  Description of Artificial Sequence: Synthetic oligonucleotide
cgccgccaggaugaagcag

SEQ ID NO: 2673362 - RNA, 19 nt, Artificial Sequence
  Description of Artificial Sequence: Synthetic oligonucleotide
ccgccgccaggaugaagca

SEQ ID NO: 2673363 - RNA, 19 nt, Artificial Sequence
  Description of Artificial Sequence: Synthetic oligonucleotide
ggcguagucccggcugcgu

SEQ ID NO: 2673364 - RNA, 19 nt, Artificial Sequence
  Description of Artificial Sequence: Synthetic oligonucleotide
gccuggagcccgccuaauu

SEQ ID NO: 2673365 - RNA, 19 nt, Artificial Sequence
  Description of Artificial Sequence: Synthetic oligonucleotide
cgccaggaugaagcagaug

SEQ ID NO: 2673366 - RNA, 19 nt, Artificial Sequence
  Description of Artificial Sequence: Synthetic oligonucleotide
ccaggccaccucgguagca

SEQ ID NO: 2673367 - RNA, 19 nt, Artificial Sequence
  Description of Artificial Sequence: Synthetic oligonucleotide
gcccgccuaauuccacaau

SEQ ID NO: 2673368 - RNA, 19 nt, Artificial Sequence
  Description of Artificial Sequence: Synthetic oligonucleotide
ccaggcccgacaggaaggu

SEQ ID NO: 2673369 - RNA, 19 nt, Artificial Sequence
  Description of Artificial Sequence: Synthetic oligonucleotide
cccggcacgguggccaugu

SEQ ID NO: 2673370 - RNA, 19 nt, Artificial Sequence
  Description of Artificial Sequence: Synthetic oligonucleotide
gcgcgaguccaggccaccu

SEQ ID NO: 2673371 - RNA, 19 nt, Artificial Sequence
  Description of Artificial Sequence: Synthetic oligonucleotide
cgggccuggagcccgccua

SEQ ID NO: 2673372 - RNA, 19 nt, Artificial Sequence
  Description of Artificial Sequence: Synthetic oligonucleotide
ccgccaggaugaagcagau

SEQ ID NO: 2673373 - RNA, 19 nt, Artificial Sequence
  Description of Artificial Sequence: Synthetic oligonucleotide
gcgggccuggagcccgccu

SEQ ID NO: 2673374 - RNA, 19 nt, Artificial Sequence
  Description of Artificial Sequence: Synthetic oligonucleotide
ggccuggagcccgccuaau

SEQ ID NO: 2673375 - RNA, 19 nt, Artificial Sequence
  Description of Artificial Sequence: Synthetic oligonucleotide
ccccggcacgguggccaug

SEQ ID NO: 2673376 - RNA, 19 nt, Artificial Sequence
  Description of Artificial Sequence: Synthetic oligonucleotide
gcgccggcuugugcuggua

SEQ ID NO: 2673377 - RNA, 19 nt, Artificial Sequence
  Description of Artificial Sequence: Synthetic oligonucleotide
gccccggcacgguggccau

SEQ ID NO: 2673378 - RNA, 19 nt, Artificial Sequence
  Description of Artificial Sequence: Synthetic oligonucleotide
cgaaggugauggggaaguu

SEQ ID NO: 2673379 - RNA, 19 nt, Artificial Sequence
  Description of Artificial Sequence: Synthetic oligonucleotide
ccggcacgguggccaugua

SEQ ID NO: 2673380 - RNA, 19 nt, Artificial Sequence
  Description of Artificial Sequence: Synthetic oligonucleotide
cggcugcguccgugagcca

SEQ ID NO: 2673381 - RNA, 19 nt, Artificial Sequence
  Description of Artificial Sequence: Synthetic oligonucleotide
aauauacuugcagagauuc

SEQ ID NO: 2673382 - RNA, 19 nt, Artificial Sequence
  Description of Artificial Sequence: Synthetic oligonucleotide
aaacuugucaagcacaugu

SEQ ID NO: 2673383 - RNA, 19 nt, Artificial Sequence
  Description of Artificial Sequence: Synthetic oligonucleotide
acaaaugucacacacuguc

SEQ ID NO: 2673384 - RNA, 19 nt, Artificial Sequence
  Description of Artificial Sequence: Synthetic oligonucleotide
aguguaaccacaaaauucc

SEQ ID NO: 2673385 - RNA, 19 nt, Artificial Sequence
  Description of Artificial Sequence: Synthetic oligonucleotide
cuuauaauccuuuaugcug

SEQ ID NO: 2673386 - RNA, 19 nt, Artificial Sequence
  Description of Artificial Sequence: Synthetic oligonucleotide
accaucaugagggugaucc

SEQ ID NO: 2673387 - RNA, 19 nt, Artificial Sequence
  Description of Artificial Sequence: Synthetic oligonucleotide
ugcacgagggacuagaaag

SEQ ID NO: 2673388 - RNA, 19 nt, Artificial Sequence
  Description of Artificial Sequence: Synthetic oligonucleotide
uauuaggcaaauauacuug

SEQ ID NO: 2673389 - RNA, 19 nt, Artificial Sequence
  Description of Artificial Sequence: Synthetic oligonucleotide
acaaaauuccacuuccggg

SEQ ID NO: 2673390 - RNA, 19 nt, Artificial Sequence
  Description of Artificial Sequence: Synthetic oligonucleotide
aaaguggguucauuucugc

SEQ ID NO: 2673391 - RNA, 19 nt, Artificial Sequence
  Description of Artificial Sequence: Synthetic oligonucleotide
uaggguaugguccuccucg

SEQ ID NO: 2673392 - RNA, 19 nt, Artificial Sequence
  Description of Artificial Sequence: Synthetic oligonucleotide
aaggcugucuuccucucgc

SEQ ID NO: 2673393 - RNA, 19 nt, Artificial Sequence
  Description of Artificial Sequence: Synthetic oligonucleotide
uuugcucucugaaggaugg

SEQ ID NO: 2673394 - RNA, 19 nt, Artificial Sequence
  Description of Artificial Sequence: Synthetic oligonucleotide
uccuuauaauccuuuaugc

SEQ ID NO: 2673395 - RNA, 19 nt, Artificial Sequence
  Description of Artificial Sequence: Synthetic oligonucleotide
uuuauuaggcaaauauacu

SEQ ID NO: 2673396 - RNA, 19 nt, Artificial Sequence
  Description of Artificial Sequence: Synthetic oligonucleotide
aagagaauuuccuagggua

SEQ ID NO: 2673397 - RNA, 19 nt, Artificial Sequence
  Description of Artificial Sequence: Synthetic oligonucleotide
aauuuccuaggguaugguc

SEQ ID NO: 2673398 - RNA, 19 nt, Artificial Sequence
  Description of Artificial Sequence: Synthetic oligonucleotide
auuuccuaggguauggucc

SEQ ID NO: 2673399 - RNA, 19 nt, Artificial Sequence
  Description of Artificial Sequence: Synthetic oligonucleotide
ucuaacucuaguuuuggga

SEQ ID NO: 2673400 - RNA, 19 nt, Artificial Sequence
  Description of Artificial Sequence: Synthetic oligonucleotide
aaauuaauuuugcucucug

SEQ ID NO: 2673401 - RNA, 19 nt, Artificial Sequence
  Description of Artificial Sequence: Synthetic oligonucleotide
uuauuaggcaaauauacuu

SEQ ID NO: 2673402 - RNA, 19 nt, Artificial Sequence
  Description of Artificial Sequence: Synthetic oligonucleotide
uaguguaaccacaaaauuc

SEQ ID NO: 2673403 - RNA, 19 nt, Artificial Sequence
  Description of Artificial Sequence: Synthetic oligonucleotide
ucauucuucaaucucuaac

SEQ ID NO: 2673404 - RNA, 19 nt, Artificial Sequence
  Description of Artificial Sequence: Synthetic oligonucleotide
ucugaauucgcaaauuaau

SEQ ID NO: 2673405 - RNA, 19 nt, Artificial Sequence
  Description of Artificial Sequence: Synthetic oligonucleotide
auuaauuuugcucucugaa

SEQ ID NO: 2673406 - RNA, 19 nt, Artificial Sequence
  Description of Artificial Sequence: Synthetic oligonucleotide
aucugcaccaucaugaggg

SEQ ID NO: 2673407 - RNA, 19 nt, Artificial Sequence
  Description of Artificial Sequence: Synthetic oligonucleotide
aauuaauuuugcucucuga

SEQ ID NO: 2673408 - RNA, 19 nt, Artificial Sequence
  Description of Artificial Sequence: Synthetic oligonucleotide
uguaccgaagagaauuucc

SEQ ID NO: 2673409 - RNA, 19 nt, Artificial Sequence
  Description of Artificial Sequence: Synthetic oligonucleotide
uauaagacagaacaugcuu

SEQ ID NO: 2673410 - RNA, 19 nt, Artificial Sequence
  Description of Artificial Sequence: Synthetic oligonucleotide
ucuuccaucgcgaggggcg

SEQ ID NO: 2673411 - RNA, 19 nt, Artificial Sequence
  Description of Artificial Sequence: Synthetic oligonucleotide
gaauuuauuaggcaaauau

SEQ ID NO: 2673412 - RNA, 19 nt, Artificial Sequence
  Description of Artificial Sequence: Synthetic oligonucleotide
ugaaggaugggucguagug

SEQ ID NO: 2673413 - RNA, 19 nt, Artificial Sequence
  Description of Artificial Sequence: Synthetic oligonucleotide
ugcaguacaaaugucacac

SEQ ID NO: 2673414 - RNA, 19 nt, Artificial Sequence
  Description of Artificial Sequence: Synthetic oligonucleotide
ucuucaaucucuaacucua

SEQ ID NO: 2673415 - RNA, 19 nt, Artificial Sequence
  Description of Artificial Sequence: Synthetic oligonucleotide
uauacuugcagagauucca

SEQ ID NO: 2673416 - RNA, 19 nt, Artificial Sequence
  Description of Artificial Sequence: Synthetic oligonucleotide
gaaaaggacgcucuucccc

SEQ ID NO: 2673417 - RNA, 19 nt, Artificial Sequence
  Description of Artificial Sequence: Synthetic oligonucleotide
gacagaacaugcuucauuc

SEQ ID NO: 2673418 - RNA, 19 nt, Artificial Sequence
  Description of Artificial Sequence: Synthetic oligonucleotide
aaaaggacgcucuucccca

SEQ ID NO: 2673419 - RNA, 19 nt, Artificial Sequence
  Description of Artificial Sequence: Synthetic oligonucleotide
gacgcucuuccccauaucg

SEQ ID NO: 2673420 - RNA, 19 nt, Artificial Sequence
  Description of Artificial Sequence: Synthetic oligonucleotide
uccggguucuucaugauca

SEQ ID NO: 2673421 - RNA, 19 nt, Artificial Sequence
  Description of Artificial Sequence: Synthetic oligonucleotide
aauuuugcucucugaagga

SEQ ID NO: 2673422 - RNA, 19 nt, Artificial Sequence
  Description of Artificial Sequence: Synthetic oligonucleotide
uccugauccucuuccaucg

SEQ ID NO: 2673423 - RNA, 19 nt, Artificial Sequence
  Description of Artificial Sequence: Synthetic oligonucleotide
uccuauaagacagaacaug

SEQ ID NO: 2673424 - RNA, 19 nt, Artificial Sequence
  Description of Artificial Sequence: Synthetic oligonucleotide
aauucgcaaauuaauuuug

SEQ ID NO: 2673425 - RNA, 19 nt, Artificial Sequence
  Description of Artificial Sequence: Synthetic oligonucleotide
uccucuuccaucgcgaggg

SEQ ID NO: 2673426 - RNA, 19 nt, Artificial Sequence
  Description of Artificial Sequence: Synthetic oligonucleotide
gagagaauuuauuaggcaa

SEQ ID NO: 2673427 - RNA, 19 nt, Artificial Sequence
  Description of Artificial Sequence: Synthetic oligonucleotide
cacccuuccuauaagacag

SEQ ID NO: 2673428 - RNA, 19 nt, Artificial Sequence
  Description of Artificial Sequence: Synthetic oligonucleotide
caugcuucauucuucaauc

SEQ ID NO: 2673429 - RNA, 19 nt, Artificial Sequence
  Description of Artificial Sequence: Synthetic oligonucleotide
auaagacagaacaugcuuc

SEQ ID NO: 2673430 - RNA, 19 nt, Artificial Sequence
  Description of Artificial Sequence: Synthetic oligonucleotide
ucgugcaguacaaauguca

SEQ ID NO: 2673431 - RNA, 19 nt, Artificial Sequence
  Description of Artificial Sequence: Synthetic oligonucleotide
ucgcaaauuaauuuugcuc

SEQ ID NO: 2673432 - RNA, 19 nt, Artificial Sequence
  Description of Artificial Sequence: Synthetic oligonucleotide
cacaaaauuccacuuccgg

SEQ ID NO: 2673433 - RNA, 19 nt, Artificial Sequence
  Description of Artificial Sequence: Synthetic oligonucleotide
uguaaccacaaaauuccac

SEQ ID NO: 2673434 - RNA, 19 nt, Artificial Sequence
  Description of Artificial Sequence: Synthetic oligonucleotide
agggugauccuccuuguac

SEQ ID NO: 2673435 - RNA, 19 nt, Artificial Sequence
  Description of Artificial Sequence: Synthetic oligonucleotide
augaucauguaccgaagag

SEQ ID NO: 2673436 - RNA, 19 nt, Artificial Sequence
  Description of Artificial Sequence: Synthetic oligonucleotide
uuuaugcuggccucaaacu

SEQ ID NO: 2673437 - RNA, 19 nt, Artificial Sequence
  Description of Artificial Sequence: Synthetic oligonucleotide
cuuuaugcuggccucaaac

SEQ ID NO: 2673438 - RNA, 19 nt, Artificial Sequence
  Description of Artificial Sequence: Synthetic oligonucleotide
cauucaugagcucauucag

SEQ ID NO: 2673439 - RNA, 19 nt, Artificial Sequence
  Description of Artificial Sequence: Synthetic oligonucleotide
ucauguaccgaagagaauu

SEQ ID NO: 2673440 - RNA, 19 nt, Artificial Sequence
  Description of Artificial Sequence: Synthetic oligonucleotide
guaaugggucaacagcugg

SEQ ID NO: 2673441 - RNA, 19 nt, Artificial Sequence
  Description of Artificial Sequence: Synthetic oligonucleotide
aaauuccacuuccggguuc

SEQ ID NO: 2673442 - RNA, 19 nt, Artificial Sequence
  Description of Artificial Sequence: Synthetic oligonucleotide
ggcaaauauacuugcagag

SEQ ID NO: 2673443 - RNA, 19 nt, Artificial Sequence
  Description of Artificial Sequence: Synthetic oligonucleotide
ucgccuucggccauugagg

SEQ ID NO: 2673444 - RNA, 19 nt, Artificial Sequence
  Description of Artificial Sequence: Synthetic oligonucleotide
auucgcaaauuaauuuugc

SEQ ID NO: 2673445 - RNA, 19 nt, Artificial Sequence
  Description of Artificial Sequence: Synthetic oligonucleotide
uguaaugggucaacagcug

SEQ ID NO: 2673446 - RNA, 19 nt, Artificial Sequence
  Description of Artificial Sequence: Synthetic oligonucleotide
caaaagagagaauuuauua

SEQ ID NO: 2673447 - RNA, 19 nt, Artificial Sequence
  Description of Artificial Sequence: Synthetic oligonucleotide
ucaaucucuaacucuaguu

SEQ ID NO: 2673448 - RNA, 19 nt, Artificial Sequence
  Description of Artificial Sequence: Synthetic oligonucleotide
uucuucaaucucuaacucu

SEQ ID NO: 2673449 - RNA, 19 nt, Artificial Sequence
  Description of Artificial Sequence: Synthetic oligonucleotide
uugucaagcacauguuggc

SEQ ID NO: 2673450 - RNA, 19 nt, Artificial Sequence
  Description of Artificial Sequence: Synthetic oligonucleotide
uuuauccuuauaauccuuu

SEQ ID NO: 2673451 - RNA, 19 nt, Artificial Sequence
  Description of Artificial Sequence: Synthetic oligonucleotide
ccuauaagacagaacaugc

SEQ ID NO: 2673452 - RNA, 19 nt, Artificial Sequence
  Description of Artificial Sequence: Synthetic oligonucleotide
acugucuaucuguuccagc

SEQ ID NO: 2673453 - RNA, 19 nt, Artificial Sequence
  Description of Artificial Sequence: Synthetic oligonucleotide
cuaguuuugggaucugcac

SEQ ID NO: 2673454 - RNA, 19 nt, Artificial Sequence
  Description of Artificial Sequence: Synthetic oligonucleotide
cucucugaaggaugggucg

SEQ ID NO: 2673455 - RNA, 19 nt, Artificial Sequence
  Description of Artificial Sequence: Synthetic oligonucleotide
ugaucauguaccgaagaga

SEQ ID NO: 2673456 - RNA, 19 nt, Artificial Sequence
  Description of Artificial Sequence: Synthetic oligonucleotide
aggcaaauauacuugcaga

SEQ ID NO: 2673457 - RNA, 19 nt, Artificial Sequence
  Description of Artificial Sequence: Synthetic oligonucleotide
augagggugauccuccuug

SEQ ID NO: 2673458 - RNA, 19 nt, Artificial Sequence
  Description of Artificial Sequence: Synthetic oligonucleotide
ucaugaucauguaccgaag

SEQ ID NO: 2673459 - RNA, 19 nt, Artificial Sequence
  Description of Artificial Sequence: Synthetic oligonucleotide
uucgcaaauuaauuuugcu

SEQ ID NO: 2673460 - RNA, 19 nt, Artificial Sequence
  Description of Artificial Sequence: Synthetic oligonucleotide
uauccuuauaauccuuuau

SEQ ID NO: 2673461 - RNA, 19 nt, Artificial Sequence
  Description of Artificial Sequence: Synthetic oligonucleotide
agaauuuccuaggguaugg

SEQ ID NO: 2673462 - RNA, 19 nt, Artificial Sequence
  Description of Artificial Sequence: Synthetic oligonucleotide
acuugcagagauuccaaca

SEQ ID NO: 2673463 - RNA, 19 nt, Artificial Sequence
  Description of Artificial Sequence: Synthetic oligonucleotide
ucaacagcuggaaccacac

SEQ ID NO: 2673464 - RNA, 19 nt, Artificial Sequence
  Description of Artificial Sequence: Synthetic oligonucleotide
uccucgugcaguacaaaug

SEQ ID NO: 2673465 - RNA, 19 nt, Artificial Sequence
  Description of Artificial Sequence: Synthetic oligonucleotide
cuuguacccugcacgaggg

SEQ ID NO: 2673466 - RNA, 19 nt, Artificial Sequence
  Description of Artificial Sequence: Synthetic oligonucleotide
gaucauguaccgaagagaa

SEQ ID NO: 2673467 - RNA, 19 nt, Artificial Sequence
  Description of Artificial Sequence: Synthetic oligonucleotide
aacucuaguuuugggaucu

SEQ ID NO: 2673468 - RNA, 19 nt, Artificial Sequence
  Description of Artificial Sequence: Synthetic oligonucleotide
aaugucacacacugucuau

SEQ ID NO: 2673469 - RNA, 19 nt, Artificial Sequence
  Description of Artificial Sequence: Synthetic oligonucleotide
uaaugggucaacagcugga

SEQ ID NO: 2673470 - RNA, 19 nt, Artificial Sequence
  Description of Artificial Sequence: Synthetic oligonucleotide
ucucuaacucuaguuuugg

SEQ ID NO: 2673471 - RNA, 19 nt, Artificial Sequence
  Description of Artificial Sequence: Synthetic oligonucleotide
uucaaucucuaacucuagu

SEQ ID NO: 2673472 - RNA, 19 nt, Artificial Sequence
  Description of Artificial Sequence: Synthetic oligonucleotide
ugucugaauucgcaaauua

SEQ ID NO: 2673473 - RNA, 19 nt, Artificial Sequence
  Description of Artificial Sequence: Synthetic oligonucleotide
aucaugagggugauccucc

SEQ ID NO: 2673474 - RNA, 19 nt, Artificial Sequence
  Description of Artificial Sequence: Synthetic oligonucleotide
ucaacagcuggaaggguac

SEQ ID NO: 2673475 - RNA, 19 nt, Artificial Sequence
  Description of Artificial Sequence: Synthetic oligonucleotide
gucaagcacauguuggcag

SEQ ID NO: 2673476 - RNA, 19 nt, Artificial Sequence
  Description of Artificial Sequence: Synthetic oligonucleotide
acaugcuucauucuucaau

SEQ ID NO: 2673477 - RNA, 19 nt, Artificial Sequence
  Description of Artificial Sequence: Synthetic oligonucleotide
uccacuuccggguucuuca

SEQ ID NO: 2673478 - RNA, 19 nt, Artificial Sequence
  Description of Artificial Sequence: Synthetic oligonucleotide
ggugcugccgaaaaggacg

SEQ ID NO: 2673479 - RNA, 19 nt, Artificial Sequence
  Description of Artificial Sequence: Synthetic oligonucleotide
agaacaugcuucauucuuc

SEQ ID NO: 2673480 - RNA, 19 nt, Artificial Sequence
  Description of Artificial Sequence: Synthetic oligonucleotide
uucaacagcuggaagggua

SEQ ID NO: 2673481 - RNA, 19 nt, Artificial Sequence
  Description of Artificial Sequence: Synthetic oligonucleotide
gaucugcaccaucaugagg

SEQ ID NO: 2673482 - RNA, 19 nt, Artificial Sequence
  Description of Artificial Sequence: Synthetic oligonucleotide
uuuccuaggguaugguccu

SEQ ID NO: 2673483 - RNA, 19 nt, Artificial Sequence
  Description of Artificial Sequence: Synthetic oligonucleotide
gcuguaaugggucaacagc

SEQ ID NO: 2673484 - RNA, 19 nt, Artificial Sequence
  Description of Artificial Sequence: Synthetic oligonucleotide
agcuguaaugggucaacag

SEQ ID NO: 2673485 - RNA, 19 nt, Artificial Sequence
  Description of Artificial Sequence: Synthetic oligonucleotide
cacauguuggcagacauuc

SEQ ID NO: 2673486 - RNA, 19 nt, Artificial Sequence
  Description of Artificial Sequence: Synthetic oligonucleotide
acuuccggguucuucauga

SEQ ID NO: 2673487 - RNA, 19 nt, Artificial Sequence
  Description of Artificial Sequence: Synthetic oligonucleotide
aaaauuccacuuccggguu

SEQ ID NO: 2673488 - RNA, 19 nt, Artificial Sequence
  Description of Artificial Sequence: Synthetic oligonucleotide
ucaagcacauguuggcaga

SEQ ID NO: 2673489 - RNA, 19 nt, Artificial Sequence
  Description of Artificial Sequence: Synthetic oligonucleotide
aaccacacccuuccuauaa

SEQ ID NO: 2673490 - RNA, 19 nt, Artificial Sequence
  Description of Artificial Sequence: Synthetic oligonucleotide
ugauccucuuccaucgcga

SEQ ID NO: 2673491 - RNA, 19 nt, Artificial Sequence
  Description of Artificial Sequence: Synthetic oligonucleotide
auauacuugcagagauucc

SEQ ID NO: 2673492 - RNA, 19 nt, Artificial Sequence
  Description of Artificial Sequence: Synthetic oligonucleotide
gaacaugcuucauucuuca

SEQ ID NO: 2673493 - RNA, 19 nt, Artificial Sequence
  Description of Artificial Sequence: Synthetic oligonucleotide
acacccuuccuauaagaca

SEQ ID NO: 2673494 - RNA, 19 nt, Artificial Sequence
  Description of Artificial Sequence: Synthetic oligonucleotide
gaugggucguaguguaacc

SEQ ID NO: 2673495 - RNA, 19 nt, Artificial Sequence
  Description of Artificial Sequence: Synthetic oligonucleotide
aaggaugggucguagugua

SEQ ID NO: 2673496 - RNA, 19 nt, Artificial Sequence
  Description of Artificial Sequence: Synthetic oligonucleotide
gacauucaugagcucauuc

SEQ ID NO: 2673497 - RNA, 19 nt, Artificial Sequence
  Description of Artificial Sequence: Synthetic oligonucleotide
ucauucaggccuuucugaa

SEQ ID NO: 2673498 - RNA, 19 nt, Artificial Sequence
  Description of Artificial Sequence: Synthetic oligonucleotide
uauaauccuuuaugcuggc

SEQ ID NO: 2673499 - RNA, 19 nt, Artificial Sequence
  Description of Artificial Sequence: Synthetic oligonucleotide
ugauccuccuuguacccug

SEQ ID NO: 2673500 - RNA, 19 nt, Artificial Sequence
  Description of Artificial Sequence: Synthetic oligonucleotide
guggguucauuucugcuug

SEQ ID NO: 2673501 - RNA, 19 nt, Artificial Sequence
  Description of Artificial Sequence: Synthetic oligonucleotide
uuuuauccuuauaauccuu

SEQ ID NO: 2673502 - RNA, 19 nt, Artificial Sequence
  Description of Artificial Sequence: Synthetic oligonucleotide
gaaaguggguucauuucug

SEQ ID NO: 2673503 - RNA, 19 nt, Artificial Sequence
  Description of Artificial Sequence: Synthetic oligonucleotide
cucuaacucuaguuuuggg

SEQ ID NO: 2673504 - RNA, 19 nt, Artificial Sequence
  Description of Artificial Sequence: Synthetic oligonucleotide
cucaaacuugucaagcaca

SEQ ID NO: 2673505 - RNA, 19 nt, Artificial Sequence
  Description of Artificial Sequence: Synthetic oligonucleotide
ucuaucuguuccagcugcc

SEQ ID NO: 2673506 - RNA, 19 nt, Artificial Sequence
  Description of Artificial Sequence: Synthetic oligonucleotide
uuccuauaagacagaacau

SEQ ID NO: 2673507 - RNA, 19 nt, Artificial Sequence
  Description of Artificial Sequence: Synthetic oligonucleotide
caaaauuccacuuccgggu

SEQ ID NO: 2673508 - RNA, 19 nt, Artificial Sequence
  Description of Artificial Sequence: Synthetic oligonucleotide
auugaggucuucaauccug

SEQ ID NO: 2673509 - RNA, 19 nt, Artificial Sequence
  Description of Artificial Sequence: Synthetic oligonucleotide
uuauccuuauaauccuuua

SEQ ID NO: 2673510 - RNA, 19 nt, Artificial Sequence
  Description of Artificial Sequence: Synthetic oligonucleotide
uaccccgugucugaauucg

SEQ ID NO: 2673511 - RNA, 19 nt, Artificial Sequence
  Description of Artificial Sequence: Synthetic oligonucleotide
aauuccacuuccggguucu

SEQ ID NO: 2673512 - RNA, 19 nt, Artificial Sequence
  Description of Artificial Sequence: Synthetic oligonucleotide
uacaaaugucacacacugu

SEQ ID NO: 2673513 - RNA, 19 nt, Artificial Sequence
  Description of Artificial Sequence: Synthetic oligonucleotide
aguggguucauuucugcuu

SEQ ID NO: 2673514 - RNA, 19 nt, Artificial Sequence
  Description of Artificial Sequence: Synthetic oligonucleotide
ucaugagcucauucaggcc

SEQ ID NO: 2673515 - RNA, 19 nt, Artificial Sequence
  Description of Artificial Sequence: Synthetic oligonucleotide
cucgccuucggccauugag

SEQ ID NO: 2673516 - RNA, 19 nt, Artificial Sequence
  Description of Artificial Sequence: Synthetic oligonucleotide
cugauccucuuccaucgcg

SEQ ID NO: 2673517 - RNA, 19 nt, Artificial Sequence
  Description of Artificial Sequence: Synthetic oligonucleotide
uuccaacagcuguaauggg

SEQ ID NO: 2673518 - RNA, 19 nt, Artificial Sequence
  Description of Artificial Sequence: Synthetic oligonucleotide
gguggugcugccgaaaagg

SEQ ID NO: 2673519 - RNA, 19 nt, Artificial Sequence
  Description of Artificial Sequence: Synthetic oligonucleotide
gagaauuuccuaggguaug

SEQ ID NO: 2673520 - RNA, 19 nt, Artificial Sequence
  Description of Artificial Sequence: Synthetic oligonucleotide
ucuucaauccugacauuuu

SEQ ID NO: 2673521 - RNA, 19 nt, Artificial Sequence
  Description of Artificial Sequence: Synthetic oligonucleotide
augggucaacagcuggaac

SEQ ID NO: 2673522 - RNA, 19 nt, Artificial Sequence
  Description of Artificial Sequence: Synthetic oligonucleotide
gguaugguccuccucgugc

SEQ ID NO: 2673523 - RNA, 19 nt, Artificial Sequence
  Description of Artificial Sequence: Synthetic oligonucleotide
agcacauguuggcagacau

SEQ ID NO: 2673524 - RNA, 19 nt, Artificial Sequence
  Description of Artificial Sequence: Synthetic oligonucleotide
cacacccuuccuauaagac

SEQ ID NO: 2673525 - RNA, 19 nt, Artificial Sequence
  Description of Artificial Sequence: Synthetic oligonucleotide
gauccucuuccaucgcgag

SEQ ID NO: 2673526 - RNA, 19 nt, Artificial Sequence
  Description of Artificial Sequence: Synthetic oligonucleotide
agcucauucaggccuuucu

SEQ ID NO: 2673527 - RNA, 19 nt, Artificial Sequence
  Description of Artificial Sequence: Synthetic oligonucleotide
acagcuguaaugggucaac

SEQ ID NO: 2673528 - RNA, 19 nt, Artificial Sequence
  Description of Artificial Sequence: Synthetic oligonucleotide
aaugggucaacagcuggaa

SEQ ID NO: 2673529 - RNA, 19 nt, Artificial Sequence
  Description of Artificial Sequence: Synthetic oligonucleotide
aguacaaaugucacacacu

SEQ ID NO: 2673530 - RNA, 19 nt, Artificial Sequence
  Description of Artificial Sequence: Synthetic oligonucleotide
caaauauacuugcagagau

SEQ ID NO: 2673531 - RNA, 19 nt, Artificial Sequence
  Description of Artificial Sequence: Synthetic oligonucleotide
ugggucguaguguaaccac

SEQ ID NO: 2673532 - RNA, 19 nt, Artificial Sequence
  Description of Artificial Sequence: Synthetic oligonucleotide
ucugaaggaugggucguag

SEQ ID NO: 2673533 - RNA, 19 nt, Artificial Sequence
  Description of Artificial Sequence: Synthetic oligonucleotide
uguacccugcacgagggac

SEQ ID NO: 2673534 - RNA, 19 nt, Artificial Sequence
  Description of Artificial Sequence: Synthetic oligonucleotide
aaacgguucaacagcugga

SEQ ID NO: 2673535 - RNA, 19 nt, Artificial Sequence
  Description of Artificial Sequence: Synthetic oligonucleotide
uacuugcagagauuccaac

SEQ ID NO: 2673536 - RNA, 19 nt, Artificial Sequence
  Description of Artificial Sequence: Synthetic oligonucleotide
augucacacacugucuauc

SEQ ID NO: 2673537 - RNA, 19 nt, Artificial Sequence
  Description of Artificial Sequence: Synthetic oligonucleotide
ugucaagcacauguuggca

SEQ ID NO: 2673538 - RNA, 19 nt, Artificial Sequence
  Description of Artificial Sequence: Synthetic oligonucleotide
aacgguucaacagcuggaa

SEQ ID NO: 2673539 - RNA, 19 nt, Artificial Sequence
  Description of Artificial Sequence: Synthetic oligonucleotide
gaagagaauuuccuagggu

SEQ ID NO: 2673540 - RNA, 19 nt, Artificial Sequence
  Description of Artificial Sequence: Synthetic oligonucleotide
agacagaacaugcuucauu

SEQ ID NO: 2673541 - RNA, 19 nt, Artificial Sequence
  Description of Artificial Sequence: Synthetic oligonucleotide
cuaacucuaguuuugggau

SEQ ID NO: 2673542 - RNA, 19 nt, Artificial Sequence
  Description of Artificial Sequence: Synthetic oligonucleotide
ccauugaggucuucaaucc

SEQ ID NO: 2673543 - RNA, 19 nt, Artificial Sequence
  Description of Artificial Sequence: Synthetic oligonucleotide
aaauauacuugcagagauu

SEQ ID NO: 2673544 - RNA, 19 nt, Artificial Sequence
  Description of Artificial Sequence: Synthetic oligonucleotide
cuguaaugggucaacagcu

SEQ ID NO: 2673545 - RNA, 19 nt, Artificial Sequence
  Description of Artificial Sequence: Synthetic oligonucleotide
gcuggaaccacacccuucc

SEQ ID NO: 2673546 - RNA, 19 nt, Artificial Sequence
  Description of Artificial Sequence: Synthetic oligonucleotide
acacacugucuaucuguuc

SEQ ID NO: 2673547 - RNA, 19 nt, Artificial Sequence
  Description of Artificial Sequence: Synthetic oligonucleotide
gaaggguaccccgugucug

SEQ ID NO: 2673548 - RNA, 19 nt, Artificial Sequence
  Description of Artificial Sequence: Synthetic oligonucleotide
cgagggacuagaaaguggg

SEQ ID NO: 2673549 - RNA, 19 nt, Artificial Sequence
  Description of Artificial Sequence: Synthetic oligonucleotide
uggaaggguaccccguguc

SEQ ID NO: 2673550 - RNA, 19 nt, Artificial Sequence
  Description of Artificial Sequence: Synthetic oligonucleotide
auguaccgaagagaauuuc

SEQ ID NO: 2673551 - RNA, 19 nt, Artificial Sequence
  Description of Artificial Sequence: Synthetic oligonucleotide
ccuccuuguacccugcacg

SEQ ID NO: 2673552 - RNA, 19 nt, Artificial Sequence
  Description of Artificial Sequence: Synthetic oligonucleotide
uucauucuucaaucucuaa

SEQ ID NO: 2673553 - RNA, 19 nt, Artificial Sequence
  Description of Artificial Sequence: Synthetic oligonucleotide
uggccucaaacuugucaag

SEQ ID NO: 2673554 - RNA, 19 nt, Artificial Sequence
  Description of Artificial Sequence: Synthetic oligonucleotide
uggaaccacacccuuccua

SEQ ID NO: 2673555 - RNA, 19 nt, Artificial Sequence
  Description of Artificial Sequence: Synthetic oligonucleotide
caugaucauguaccgaaga

SEQ ID NO: 2673556 - RNA, 19 nt, Artificial Sequence
  Description of Artificial Sequence: Synthetic oligonucleotide
uaugguccuccucgugcag

SEQ ID NO: 2673557 - RNA, 19 nt, Artificial Sequence
  Description of Artificial Sequence: Synthetic oligonucleotide
ccgaagagaauuuccuagg

SEQ ID NO: 2673558 - RNA, 19 nt, Artificial Sequence
  Description of Artificial Sequence: Synthetic oligonucleotide
ccgaaaaggacgcucuucc

SEQ ID NO: 2673559 - RNA, 19 nt, Artificial Sequence
  Description of Artificial Sequence: Synthetic oligonucleotide
accacacccuuccuauaag

SEQ ID NO: 2673560 - RNA, 19 nt, Artificial Sequence
  Description of Artificial Sequence: Synthetic oligonucleotide
gggugauccuccuuguacc

SEQ ID NO: 2673561 - RNA, 19 nt, Artificial Sequence
  Description of Artificial Sequence: Synthetic oligonucleotide
uaccgaagagaauuuccua

SEQ ID NO: 2673562 - RNA, 19 nt, Artificial Sequence
  Description of Artificial Sequence: Synthetic oligonucleotide
aggcugucuuccucucgcc

SEQ ID NO: 2673563 - RNA, 19 nt, Artificial Sequence
  Description of Artificial Sequence: Synthetic oligonucleotide
agagaauuuccuaggguau

SEQ ID NO: 2673564 - RNA, 19 nt, Artificial Sequence
  Description of Artificial Sequence: Synthetic oligonucleotide
acgagggacuagaaagugg

SEQ ID NO: 2673565 - RNA, 19 nt, Artificial Sequence
  Description of Artificial Sequence: Synthetic oligonucleotide
acgguucaacagcuggaag

SEQ ID NO: 2673566 - RNA, 19 nt, Artificial Sequence
  Description of Artificial Sequence: Synthetic oligonucleotide
uuccucucgccuucggcca

SEQ ID NO: 2673567 - RNA, 19 nt, Artificial Sequence
  Description of Artificial Sequence: Synthetic oligonucleotide
cgguucaacagcuggaagg

SEQ ID NO: 2673568 - RNA, 19 nt, Artificial Sequence
  Description of Artificial Sequence: Synthetic oligonucleotide
acgcucuuccccauaucgc

SEQ ID NO: 2673569 - RNA, 19 nt, Artificial Sequence
  Description of Artificial Sequence: Synthetic oligonucleotide
uccuccuuguacccugcac

SEQ ID NO: 2673570 - RNA, 19 nt, Artificial Sequence
  Description of Artificial Sequence: Synthetic oligonucleotide
cugucuaucuguuccagcu

SEQ ID NO: 2673571 - RNA, 19 nt, Artificial Sequence
  Description of Artificial Sequence: Synthetic oligonucleotide
uuccggguucuucaugauc

SEQ ID NO: 2673572 - RNA, 19 nt, Artificial Sequence
  Description of Artificial Sequence: Synthetic oligonucleotide
ccuuguacccugcacgagg

SEQ ID NO: 2673573 - RNA, 19 nt, Artificial Sequence
  Description of Artificial Sequence: Synthetic oligonucleotide
aucgcgaggggcgggcucc

SEQ ID NO: 2673574 - RNA, 19 nt, Artificial Sequence
  Description of Artificial Sequence: Synthetic oligonucleotide
cucuaguuuugggaucugc

SEQ ID NO: 2673575 - RNA, 19 nt, Artificial Sequence
  Description of Artificial Sequence: Synthetic oligonucleotide
caucaugagggugauccuc

SEQ ID NO: 2673576 - RNA, 19 nt, Artificial Sequence
  Description of Artificial Sequence: Synthetic oligonucleotide
cuauaagacagaacaugcu

SEQ ID NO: 2673577 - RNA, 19 nt, Artificial Sequence
  Description of Artificial Sequence: Synthetic oligonucleotide
cagcuggaaggguaccccg

SEQ ID NO: 2673578 - RNA, 19 nt, Artificial Sequence
  Description of Artificial Sequence: Synthetic oligonucleotide
guaugguccuccucgugca

SEQ ID NO: 2673579 - RNA, 19 nt, Artificial Sequence
  Description of Artificial Sequence: Synthetic oligonucleotide
aacagcuguaaugggucaa

SEQ ID NO: 2673580 - RNA, 19 nt, Artificial Sequence
  Description of Artificial Sequence: Synthetic oligonucleotide
cuuccccauaucgcgaaag

SEQ ID NO: 2673581 - RNA, 19 nt, Artificial Sequence
  Description of Artificial Sequence: Synthetic oligonucleotide
caaggcugucuuccucucg

SEQ ID NO: 2673582 - RNA, 19 nt, Artificial Sequence
  Description of Artificial Sequence: Synthetic oligonucleotide
gaaauccucagguggugcu

SEQ ID NO: 2673583 - RNA, 19 nt, Artificial Sequence
  Description of Artificial Sequence: Synthetic oligonucleotide
ucucugaaggaugggucgu

SEQ ID NO: 2673584 - RNA, 19 nt, Artificial Sequence
  Description of Artificial Sequence: Synthetic oligonucleotide
guaguguaaccacaaaauu

SEQ ID NO: 2673585 - RNA, 19 nt, Artificial Sequence
  Description of Artificial Sequence: Synthetic oligonucleotide
aaaggacgcucuuccccau

SEQ ID NO: 2673586 - RNA, 19 nt, Artificial Sequence
  Description of Artificial Sequence: Synthetic oligonucleotide
uuccaaggcugucuuccuc

SEQ ID NO: 2673587 - RNA, 19 nt, Artificial Sequence
  Description of Artificial Sequence: Synthetic oligonucleotide
uccuaggguaugguccucc

SEQ ID NO: 2673588 - RNA, 19 nt, Artificial Sequence
  Description of Artificial Sequence: Synthetic oligonucleotide
ggugauccuccuuguaccc

SEQ ID NO: 2673589 - RNA, 19 nt, Artificial Sequence
  Description of Artificial Sequence: Synthetic oligonucleotide
gcaaauuaauuuugcucuc

SEQ ID NO: 2673590 - RNA, 19 nt, Artificial Sequence
  Description of Artificial Sequence: Synthetic oligonucleotide
cugaauucgcaaauuaauu

SEQ ID NO: 2673591 - RNA, 19 nt, Artificial Sequence
  Description of Artificial Sequence: Synthetic oligonucleotide
ucugcaccaucaugagggu

SEQ ID NO: 2673592 - RNA, 19 nt, Artificial Sequence
  Description of Artificial Sequence: Synthetic oligonucleotide
uccuccucgugcaguacaa

SEQ ID NO: 2673593 - RNA, 19 nt, Artificial Sequence
  Description of Artificial Sequence: Synthetic oligonucleotide
agagauuccaacagcugua

SEQ ID NO: 2673594 - RNA, 19 nt, Artificial Sequence
  Description of Artificial Sequence: Synthetic oligonucleotide
gucugaauucgcaaauuaa

SEQ ID NO: 2673595 - RNA, 19 nt, Artificial Sequence
  Description of Artificial Sequence: Synthetic oligonucleotide
cgaagagaauuuccuaggg

SEQ ID NO: 2673596 - RNA, 19 nt, Artificial Sequence
  Description of Artificial Sequence: Synthetic oligonucleotide
ucaugagggugauccuccu

SEQ ID NO: 2673597 - RNA, 19 nt, Artificial Sequence
  Description of Artificial Sequence: Synthetic oligonucleotide
ccacaaaauuccacuuccg

SEQ ID NO: 2673598 - RNA, 19 nt, Artificial Sequence
  Description of Artificial Sequence: Synthetic oligonucleotide
cacgagggacuagaaagug

SEQ ID NO: 2673599 - RNA, 19 nt, Artificial Sequence
  Description of Artificial Sequence: Synthetic oligonucleotide
augggucguaguguaacca

SEQ ID NO: 2673600 - RNA, 19 nt, Artificial Sequence
  Description of Artificial Sequence: Synthetic oligonucleotide
cuucauucuucaaucucua

SEQ ID NO: 2673601 - RNA, 19 nt, Artificial Sequence
  Description of Artificial Sequence: Synthetic oligonucleotide
caaucucuaacucuaguuu

SEQ ID NO: 2673602 - RNA, 19 nt, Artificial Sequence
  Description of Artificial Sequence: Synthetic oligonucleotide
uggguucauuucugcuugc

SEQ ID NO: 2673603 - RNA, 19 nt, Artificial Sequence
  Description of Artificial Sequence: Synthetic oligonucleotide
gugcaguacaaaugucaca

SEQ ID NO: 2673604 - RNA, 19 nt, Artificial Sequence
  Description of Artificial Sequence: Synthetic oligonucleotide
aggaaauccucagguggug

SEQ ID NO: 2673605 - RNA, 19 nt, Artificial Sequence
  Description of Artificial Sequence: Synthetic oligonucleotide
uccucagguggugcugccg

SEQ ID NO: 2673606 - RNA, 19 nt, Artificial Sequence
  Description of Artificial Sequence: Synthetic oligonucleotide
cuccuuguacccugcacga

SEQ ID NO: 2673607 - RNA, 19 nt, Artificial Sequence
  Description of Artificial Sequence: Synthetic oligonucleotide
gagauuccaacagcuguaa

SEQ ID NO: 2673608 - RNA, 19 nt, Artificial Sequence
  Description of Artificial Sequence: Synthetic oligonucleotide
gaaggaugggucguagugu

SEQ ID NO: 2673609 - RNA, 19 nt, Artificial Sequence
  Description of Artificial Sequence: Synthetic oligonucleotide
cucgugcaguacaaauguc

SEQ ID NO: 2673610 - RNA, 19 nt, Artificial Sequence
  Description of Artificial Sequence: Synthetic oligonucleotide
uccuuguacccugcacgag

SEQ ID NO: 2673611 - RNA, 19 nt, Artificial Sequence
  Description of Artificial Sequence: Synthetic oligonucleotide
caacagcuggaaccacacc

SEQ ID NO: 2673612 - RNA, 19 nt, Artificial Sequence
  Description of Artificial Sequence: Synthetic oligonucleotide
cauuuccaaggcugucuuc

SEQ ID NO: 2673613 - RNA, 19 nt, Artificial Sequence
  Description of Artificial Sequence: Synthetic oligonucleotide
agauuccaacagcuguaau

SEQ ID NO: 2673614 - RNA, 19 nt, Artificial Sequence
  Description of Artificial Sequence: Synthetic oligonucleotide
cuuccaucgcgaggggcgg

SEQ ID NO: 2673615 - RNA, 19 nt, Artificial Sequence
  Description of Artificial Sequence: Synthetic oligonucleotide
caaaugucacacacugucu

SEQ ID NO: 2673616 - RNA, 19 nt, Artificial Sequence
  Description of Artificial Sequence: Synthetic oligonucleotide
aggguaugguccuccucgu

SEQ ID NO: 2673617 - RNA, 19 nt, Artificial Sequence
  Description of Artificial Sequence: Synthetic oligonucleotide
caaacuugucaagcacaug

SEQ ID NO: 2673618 - RNA, 19 nt, Artificial Sequence
  Description of Artificial Sequence: Synthetic oligonucleotide
cgcucuuccccauaucgcg

SEQ ID NO: 2673619 - RNA, 19 nt, Artificial Sequence
  Description of Artificial Sequence: Synthetic oligonucleotide
cgugcaguacaaaugucac

SEQ ID NO: 2673620 - RNA, 19 nt, Artificial Sequence
  Description of Artificial Sequence: Synthetic oligonucleotide
gucaacagcuggaaccaca

SEQ ID NO: 2673621 - RNA, 19 nt, Artificial Sequence
  Description of Artificial Sequence: Synthetic oligonucleotide
uuguacccugcacgaggga

SEQ ID NO: 2673622 - RNA, 19 nt, Artificial Sequence
  Description of Artificial Sequence: Synthetic oligonucleotide
guaccgaagagaauuuccu

SEQ ID NO: 2673623 - RNA, 19 nt, Artificial Sequence
  Description of Artificial Sequence: Synthetic oligonucleotide
auacuugcagagauuccaa

SEQ ID NO: 2673624 - RNA, 19 nt, Artificial Sequence
  Description of Artificial Sequence: Synthetic oligonucleotide
ggaaauccucagguggugc

SEQ ID NO: 2673625 - RNA, 19 nt, Artificial Sequence
  Description of Artificial Sequence: Synthetic oligonucleotide
ggccucaaacuugucaagc

SEQ ID NO: 2673626 - RNA, 19 nt, Artificial Sequence
  Description of Artificial Sequence: Synthetic oligonucleotide
cuaggguaugguccuccuc

SEQ ID NO: 2673627 - RNA, 19 nt, Artificial Sequence
  Description of Artificial Sequence: Synthetic oligonucleotide
ucuuccccauaucgcgaaa

SEQ ID NO: 2673628 - RNA, 19 nt, Artificial Sequence
  Description of Artificial Sequence: Synthetic oligonucleotide
caagcacauguuggcagac

SEQ ID NO: 2673629 - RNA, 19 nt, Artificial Sequence
  Description of Artificial Sequence: Synthetic oligonucleotide
ggaugggucguaguguaac

SEQ ID NO: 2673630 - RNA, 19 nt, Artificial Sequence
  Description of Artificial Sequence: Synthetic oligonucleotide
cauucaggccuuucugaaa

SEQ ID NO: 2673631 - RNA, 19 nt, Artificial Sequence
  Description of Artificial Sequence: Synthetic oligonucleotide
caacagcuguaauggguca

SEQ ID NO: 2673632 - RNA, 19 nt, Artificial Sequence
  Description of Artificial Sequence: Synthetic oligonucleotide
ccuuccuauaagacagaac

SEQ ID NO: 2673633 - RNA, 19 nt, Artificial Sequence
  Description of Artificial Sequence: Synthetic oligonucleotide
uccuuuaugcuggccucaa

SEQ ID NO: 2673634 - RNA, 19 nt, Artificial Sequence
  Description of Artificial Sequence: Synthetic oligonucleotide
gauccuccuuguacccugc

SEQ ID NO: 2673635 - RNA, 19 nt, Artificial Sequence
  Description of Artificial Sequence: Synthetic oligonucleotide
caggaaauccucagguggu

SEQ ID NO: 2673636 - RNA, 19 nt, Artificial Sequence
  Description of Artificial Sequence: Synthetic oligonucleotide
cucuuccaucgcgaggggc

SEQ ID NO: 2673637 - RNA, 19 nt, Artificial Sequence
  Description of Artificial Sequence: Synthetic oligonucleotide
gugcugccgaaaaggacgc

SEQ ID NO: 2673638 - RNA, 19 nt, Artificial Sequence
  Description of Artificial Sequence: Synthetic oligonucleotide
ccuuauaauccuuuaugcu

SEQ ID NO: 2673639 - RNA, 19 nt, Artificial Sequence
  Description of Artificial Sequence: Synthetic oligonucleotide
guguaaccacaaaauucca

SEQ ID NO: 2673640 - RNA, 19 nt, Artificial Sequence
  Description of Artificial Sequence: Synthetic oligonucleotide
uccaucgcgaggggcgggc

SEQ ID NO: 2673641 - RNA, 19 nt, Artificial Sequence
  Description of Artificial Sequence: Synthetic oligonucleotide
cagaacaugcuucauucuu

SEQ ID NO: 2673642 - RNA, 19 nt, Artificial Sequence
  Description of Artificial Sequence: Synthetic oligonucleotide
ggaaccacacccuuccuau

SEQ ID NO: 2673643 - RNA, 19 nt, Artificial Sequence
  Description of Artificial Sequence: Synthetic oligonucleotide
accccgugucugaauucgc

SEQ ID NO: 2673644 - RNA, 19 nt, Artificial Sequence
  Description of Artificial Sequence: Synthetic oligonucleotide
ugccgaaaaggacgcucuu

SEQ ID NO: 2673645 - RNA, 19 nt, Artificial Sequence
  Description of Artificial Sequence: Synthetic oligonucleotide
gcagagauuccaacagcug

SEQ ID NO: 2673646 - RNA, 19 nt, Artificial Sequence
  Description of Artificial Sequence: Synthetic oligonucleotide
gccuuucugaaacgguuca

SEQ ID NO: 2673647 - RNA, 19 nt, Artificial Sequence
  Description of Artificial Sequence: Synthetic oligonucleotide
gcuggaaggguaccccgug

SEQ ID NO: 2673648 - RNA, 19 nt, Artificial Sequence
  Description of Artificial Sequence: Synthetic oligonucleotide
acauguuggcagacauuca

SEQ ID NO: 2673649 - RNA, 19 nt, Artificial Sequence
  Description of Artificial Sequence: Synthetic oligonucleotide
gucuucaauccugacauuu

SEQ ID NO: 2673650 - RNA, 19 nt, Artificial Sequence
  Description of Artificial Sequence: Synthetic oligonucleotide
gucguaguguaaccacaaa

SEQ ID NO: 2673651 - RNA, 19 nt, Artificial Sequence
  Description of Artificial Sequence: Synthetic oligonucleotide
uuccaucgcgaggggcggg

SEQ ID NO: 2673652 - RNA, 19 nt, Artificial Sequence
  Description of Artificial Sequence: Synthetic oligonucleotide
gaauuuccuaggguauggu

SEQ ID NO: 2673653 - RNA, 19 nt, Artificial Sequence
  Description of Artificial Sequence: Synthetic oligonucleotide
guaccccgugucugaauuc

SEQ ID NO: 2673654 - RNA, 19 nt, Artificial Sequence
  Description of Artificial Sequence: Synthetic oligonucleotide
cauugaggucuucaauccu

SEQ ID NO: 2673655 - RNA, 19 nt, Artificial Sequence
  Description of Artificial Sequence: Synthetic oligonucleotide
aucauguaccgaagagaau

SEQ ID NO: 2673656 - RNA, 19 nt, Artificial Sequence
  Description of Artificial Sequence: Synthetic oligonucleotide
ggguucauuucugcuugcc

SEQ ID NO: 2673657 - RNA, 19 nt, Artificial Sequence
  Description of Artificial Sequence: Synthetic oligonucleotide
cagacauucaugagcucau

SEQ ID NO: 2673658 - RNA, 19 nt, Artificial Sequence
  Description of Artificial Sequence: Synthetic oligonucleotide
cugcaccaucaugagggug

SEQ ID NO: 2673659 - RNA, 19 nt, Artificial Sequence
  Description of Artificial Sequence: Synthetic oligonucleotide
cguaguguaaccacaaaau

SEQ ID NO: 2673660 - RNA, 19 nt, Artificial Sequence
  Description of Artificial Sequence: Synthetic oligonucleotide
uacccugcacgagggacua

SEQ ID NO: 2673661 - RNA, 19 nt, Artificial Sequence
  Description of Artificial Sequence: Synthetic oligonucleotide
cauguaccgaagagaauuu

SEQ ID NO: 2673662 - RNA, 19 nt, Artificial Sequence
  Description of Artificial Sequence: Synthetic oligonucleotide
agcuggaaggguaccccgu

SEQ ID NO: 2673663 - RNA, 19 nt, Artificial Sequence
  Description of Artificial Sequence: Synthetic oligonucleotide
uccucucgccuucggccau

SEQ ID NO: 2673664 - RNA, 19 nt, Artificial Sequence
  Description of Artificial Sequence: Synthetic oligonucleotide
cugcacgagggacuagaaa

SEQ ID NO: 2673665 - RNA, 19 nt, Artificial Sequence
  Description of Artificial Sequence: Synthetic oligonucleotide
cuccucgugcaguacaaau

SEQ ID NO: 2673666 - RNA, 19 nt, Artificial Sequence
  Description of Artificial Sequence: Synthetic oligonucleotide
cagguggugcugccgaaaa

SEQ ID NO: 2673667 - RNA, 19 nt, Artificial Sequence
  Description of Artificial Sequence: Synthetic oligonucleotide
ggucguaguguaaccacaa

SEQ ID NO: 2673668 - RNA, 19 nt, Artificial Sequence
  Description of Artificial Sequence: Synthetic oligonucleotide
ucucgccuucggccauuga

SEQ ID NO: 2673669 - RNA, 19 nt, Artificial Sequence
  Description of Artificial Sequence: Synthetic oligonucleotide
ccucgugcaguacaaaugu

SEQ ID NO: 2673670 - RNA, 19 nt, Artificial Sequence
  Description of Artificial Sequence: Synthetic oligonucleotide
ggguaugguccuccucgug

SEQ ID NO: 2673671 - RNA, 19 nt, Artificial Sequence
  Description of Artificial Sequence: Synthetic oligonucleotide
ggcgggcuccaggaaaucc

SEQ ID NO: 2673672 - RNA, 19 nt, Artificial Sequence
  Description of Artificial Sequence: Synthetic oligonucleotide
gggucguaguguaaccaca

SEQ ID NO: 2673673 - RNA, 19 nt, Artificial Sequence
  Description of Artificial Sequence: Synthetic oligonucleotide
cagcuguaaugggucaaca

SEQ ID NO: 2673674 - RNA, 19 nt, Artificial Sequence
  Description of Artificial Sequence: Synthetic oligonucleotide
gagcucauucaggccuuuc

SEQ ID NO: 2673675 - RNA, 19 nt, Artificial Sequence
  Description of Artificial Sequence: Synthetic oligonucleotide
augagcucauucaggccuu

SEQ ID NO: 2673676 - RNA, 19 nt, Artificial Sequence
  Description of Artificial Sequence: Synthetic oligonucleotide
cugaaggaugggucguagu

SEQ ID NO: 2673677 - RNA, 19 nt, Artificial Sequence
  Description of Artificial Sequence: Synthetic oligonucleotide
ccuucggccauugaggucu

SEQ ID NO: 2673678 - RNA, 19 nt, Artificial Sequence
  Description of Artificial Sequence: Synthetic oligonucleotide
caucgcgaggggcgggcuc

SEQ ID NO: 2673679 - RNA, 19 nt, Artificial Sequence
  Description of Artificial Sequence: Synthetic oligonucleotide
caggccuuucugaaacggu

SEQ ID NO: 2673680 - RNA, 19 nt, Artificial Sequence
  Description of Artificial Sequence: Synthetic oligonucleotide
uccagcugccuggaccauu

SEQ ID NO: 2673681 - RNA, 19 nt, Artificial Sequence
  Description of Artificial Sequence: Synthetic oligonucleotide
gguaccccgugucugaauu

SEQ ID NO: 2673682 - RNA, 19 nt, Artificial Sequence
  Description of Artificial Sequence: Synthetic oligonucleotide
gccgaaaaggacgcucuuc

SEQ ID NO: 2673683 - RNA, 19 nt, Artificial Sequence
  Description of Artificial Sequence: Synthetic oligonucleotide
ggaaggguaccccgugucu

SEQ ID NO: 2673684 - RNA, 19 nt, Artificial Sequence
  Description of Artificial Sequence: Synthetic oligonucleotide
gcgaggggcgggcuccagg

SEQ ID NO: 2673685 - RNA, 19 nt, Artificial Sequence
  Description of Artificial Sequence: Synthetic oligonucleotide
guacccugcacgagggacu

SEQ ID NO: 2673686 - RNA, 19 nt, Artificial Sequence
  Description of Artificial Sequence: Synthetic oligonucleotide
ccugauccucuuccaucgc

SEQ ID NO: 2673687 - RNA, 19 nt, Artificial Sequence
  Description of Artificial Sequence: Synthetic oligonucleotide
ugcugccgaaaaggacgcu

SEQ ID NO: 2673688 - RNA, 19 nt, Artificial Sequence
  Description of Artificial Sequence: Synthetic oligonucleotide
uuccuaggguaugguccuc

SEQ ID NO: 2673689 - RNA, 19 nt, Artificial Sequence
  Description of Artificial Sequence: Synthetic oligonucleotide
ugagcucauucaggccuuu

SEQ ID NO: 2673690 - RNA, 19 nt, Artificial Sequence
  Description of Artificial Sequence: Synthetic oligonucleotide
gagggacuagaaagugggu

SEQ ID NO: 2673691 - RNA, 19 nt, Artificial Sequence
  Description of Artificial Sequence: Synthetic oligonucleotide
acccuuccuauaagacaga

SEQ ID NO: 2673692 - RNA, 19 nt, Artificial Sequence
  Description of Artificial Sequence: Synthetic oligonucleotide
cucagguggugcugccgaa

SEQ ID NO: 2673693 - RNA, 19 nt, Artificial Sequence
  Description of Artificial Sequence: Synthetic oligonucleotide
ccgugucugaauucgcaaa

SEQ ID NO: 2673694 - RNA, 19 nt, Artificial Sequence
  Description of Artificial Sequence: Synthetic oligonucleotide
cucucgccuucggccauug

SEQ ID NO: 2673695 - RNA, 19 nt, Artificial Sequence
  Description of Artificial Sequence: Synthetic oligonucleotide
aggaugggucguaguguaa

SEQ ID NO: 2673696 - RNA, 19 nt, Artificial Sequence
  Description of Artificial Sequence: Synthetic oligonucleotide
cuggaaggguaccccgugu

SEQ ID NO: 2673697 - RNA, 19 nt, Artificial Sequence
  Description of Artificial Sequence: Synthetic oligonucleotide
gugucugaauucgcaaauu

SEQ ID NO: 2673698 - RNA, 19 nt, Artificial Sequence
  Description of Artificial Sequence: Synthetic oligonucleotide
gaggggcgggcuccaggaa

SEQ ID NO: 2673699 - RNA, 19 nt, Artificial Sequence
  Description of Artificial Sequence: Synthetic oligonucleotide
ggucaacagcuggaaccac

SEQ ID NO: 2673700 - RNA, 19 nt, Artificial Sequence
  Description of Artificial Sequence: Synthetic oligonucleotide
gugauccuccuuguacccu

SEQ ID NO: 2673701 - RNA, 19 nt, Artificial Sequence
  Description of Artificial Sequence: Synthetic oligonucleotide
ccucuuccaucgcgagggg

SEQ ID NO: 2673702 - RNA, 19 nt, Artificial Sequence
  Description of Artificial Sequence: Synthetic oligonucleotide
cccgugucugaauucgcaa

SEQ ID NO: 2673703 - RNA, 19 nt, Artificial Sequence
  Description of Artificial Sequence: Synthetic oligonucleotide
cucugaaggaugggucgua

SEQ ID NO: 2673704 - RNA, 19 nt, Artificial Sequence
  Description of Artificial Sequence: Synthetic oligonucleotide
ggacgcucuuccccauauc

SEQ ID NO: 2673705 - RNA, 19 nt, Artificial Sequence
  Description of Artificial Sequence: Synthetic oligonucleotide
ccccgugucugaauucgca

SEQ ID NO: 2673706 - RNA, 19 nt, Artificial Sequence
  Description of Artificial Sequence: Synthetic oligonucleotide
gcacgagggacuagaaagu

SEQ ID NO: 2673707 - RNA, 19 nt, Artificial Sequence
  Description of Artificial Sequence: Synthetic oligonucleotide
ggaccauuuccaaggcugu

SEQ ID NO: 2673708 - RNA, 19 nt, Artificial Sequence
  Description of Artificial Sequence: Synthetic oligonucleotide
gccuucggccauugagguc

SEQ ID NO: 2673709 - RNA, 19 nt, Artificial Sequence
  Description of Artificial Sequence: Synthetic oligonucleotide
acccugcacgagggacuag

SEQ ID NO: 2673710 - RNA, 19 nt, Artificial Sequence
  Description of Artificial Sequence: Synthetic oligonucleotide
cuuccggguucuucaugau

SEQ ID NO: 2673711 - RNA, 19 nt, Artificial Sequence
  Description of Artificial Sequence: Synthetic oligonucleotide
guuuugggaucugcaccau

SEQ ID NO: 2673712 - RNA, 19 nt, Artificial Sequence
  Description of Artificial Sequence: Synthetic oligonucleotide
caugagggugauccuccuu

SEQ ID NO: 2673713 - RNA, 19 nt, Artificial Sequence
  Description of Artificial Sequence: Synthetic oligonucleotide
ucgcgaggggcgggcucca

SEQ ID NO: 2673714 - RNA, 19 nt, Artificial Sequence
  Description of Artificial Sequence: Synthetic oligonucleotide
cccugcacgagggacuaga

SEQ ID NO: 2673715 - RNA, 19 nt, Artificial Sequence
  Description of Artificial Sequence: Synthetic oligonucleotide
cccuuccuauaagacagaa

SEQ ID NO: 2673716 - RNA, 19 nt, Artificial Sequence
  Description of Artificial Sequence: Synthetic oligonucleotide
cuggaaccacacccuuccu

SEQ ID NO: 2673717 - RNA, 19 nt, Artificial Sequence
  Description of Artificial Sequence: Synthetic oligonucleotide
cgaggggcgggcuccagga

SEQ ID NO: 2673718 - RNA, 19 nt, Artificial Sequence
  Description of Artificial Sequence: Synthetic oligonucleotide
cgugucugaauucgcaaau

SEQ ID NO: 2673719 - RNA, 19 nt, Artificial Sequence
  Description of Artificial Sequence: Synthetic oligonucleotide
gcgggcuccaggaaauccu

SEQ ID NO: 2673720 - RNA, 19 nt, Artificial Sequence
  Description of Artificial Sequence: Synthetic oligonucleotide
ccuuuaugcuggccucaaa

SEQ ID NO: 2673721 - RNA, 19 nt, Artificial Sequence
  Description of Artificial Sequence: Synthetic oligonucleotide
ccuaggguaugguccuccu

SEQ ID NO: 2673722 - RNA, 19 nt, Artificial Sequence
  Description of Artificial Sequence: Synthetic oligonucleotide
cgccuucggccauugaggu

SEQ ID NO: 2673723 - RNA, 19 nt, Artificial Sequence
  Description of Artificial Sequence: Synthetic oligonucleotide
gcacauguuggcagacauu

SEQ ID NO: 2673724 - RNA, 19 nt, Artificial Sequence
  Description of Artificial Sequence: Synthetic oligonucleotide
gggcgggcuccaggaaauc

SEQ ID NO: 2673725 - RNA, 19 nt, Artificial Sequence
  Description of Artificial Sequence: Synthetic oligonucleotide
cuucggccauugaggucuu

SEQ ID NO: 2673726 - RNA, 19 nt, Artificial Sequence
  Description of Artificial Sequence: Synthetic oligonucleotide
ccuccucgugcaguacaaa

SEQ ID NO: 2673727 - RNA, 19 nt, Artificial Sequence
  Description of Artificial Sequence: Synthetic oligonucleotide
ccggguucuucaugaucau

SEQ ID NO: 2673728 - RNA, 19 nt, Artificial Sequence
  Description of Artificial Sequence: Synthetic oligonucleotide
cgcgaggggcgggcuccag

SEQ ID NO: 2673729 - RNA, 19 nt, Artificial Sequence
  Description of Artificial Sequence: Synthetic oligonucleotide
ccaucgcgaggggcgggcu

SEQ ID NO: 2673730 - RNA, 19 nt, Artificial Sequence
  Description of Artificial Sequence: Synthetic oligonucleotide
aagaauuuaccacagaugc

SEQ ID NO: 2673731 - RNA, 19 nt, Artificial Sequence
  Description of Artificial Sequence: Synthetic oligonucleotide
auuaacaaagucuugaaac

SEQ ID NO: 2673732 - RNA, 19 nt, Artificial Sequence
  Description of Artificial Sequence: Synthetic oligonucleotide
agaaaaguuggucugaugg

SEQ ID NO: 2673733 - RNA, 19 nt, Artificial Sequence
  Description of Artificial Sequence: Synthetic oligonucleotide
uuuuaaacaacggagagcc

SEQ ID NO: 2673734 - RNA, 19 nt, Artificial Sequence
  Description of Artificial Sequence: Synthetic oligonucleotide
ucuccuuucauuaguaugg

SEQ ID NO: 2673735 - RNA, 19 nt, Artificial Sequence
  Description of Artificial Sequence: Synthetic oligonucleotide
ugaauggugauccaugucc

SEQ ID NO: 2673736 - RNA, 19 nt, Artificial Sequence
  Description of Artificial Sequence: Synthetic oligonucleotide
uaaacuggugaucaugugg

SEQ ID NO: 2673737 - RNA, 19 nt, Artificial Sequence
  Description of Artificial Sequence: Synthetic oligonucleotide
uuauuaaggaaucuccuug

SEQ ID NO: 2673738 - RNA, 19 nt, Artificial Sequence
  Description of Artificial Sequence: Synthetic oligonucleotide
uuguagauuaacaaagucu

SEQ ID NO: 2673739 - RNA, 19 nt, Artificial Sequence
  Description of Artificial Sequence: Synthetic oligonucleotide
aaugguaauucucucucuc

SEQ ID NO: 2673740 - RNA, 19 nt, Artificial Sequence
  Description of Artificial Sequence: Synthetic oligonucleotide
gagaguguaaauaaacugg

SEQ ID NO: 2673741 - RNA, 19 nt, Artificial Sequence
  Description of Artificial Sequence: Synthetic oligonucleotide
cucuaaaugggucauagcc

SEQ ID NO: 2673742 - RNA, 19 nt, Artificial Sequence
  Description of Artificial Sequence: Synthetic oligonucleotide
uguagauuaacaaagucuu

SEQ ID NO: 2673743 - RNA, 19 nt, Artificial Sequence
  Description of Artificial Sequence: Synthetic oligonucleotide
aaacuggugaucauguggc

SEQ ID NO: 2673744 - RNA, 19 nt, Artificial Sequence
  Description of Artificial Sequence: Synthetic oligonucleotide
auaaugguaauucucucuc

SEQ ID NO: 2673745 - RNA, 19 nt, Artificial Sequence
  Description of Artificial Sequence: Synthetic oligonucleotide
uaguauggugacauaaugg

SEQ ID NO: 2673746 - RNA, 19 nt, Artificial Sequence
  Description of Artificial Sequence: Synthetic oligonucleotide
agucuugaaacacugaaug

SEQ ID NO: 2673747 - RNA, 19 nt, Artificial Sequence
  Description of Artificial Sequence: Synthetic oligonucleotide
aaggguucgaguuacuuug

SEQ ID NO: 2673748 - RNA, 19 nt, Artificial Sequence
  Description of Artificial Sequence: Synthetic oligonucleotide
uauuaaggaaucuccuugg

SEQ ID NO: 2673749 - RNA, 19 nt, Artificial Sequence
  Description of Artificial Sequence: Synthetic oligonucleotide
aaagucuugaaacacugaa

SEQ ID NO: 2673750 - RNA, 19 nt, Artificial Sequence
  Description of Artificial Sequence: Synthetic oligonucleotide
cucaacaaaagaauuuacc

SEQ ID NO: 2673751 - RNA, 19 nt, Artificial Sequence
  Description of Artificial Sequence: Synthetic oligonucleotide
aguauggugacauaauggu

SEQ ID NO: 2673752 - RNA, 19 nt, Artificial Sequence
  Description of Artificial Sequence: Synthetic oligonucleotide
cuugcucuuuuaaacaacg

SEQ ID NO: 2673753 - RNA, 19 nt, Artificial Sequence
  Description of Artificial Sequence: Synthetic oligonucleotide
aaguuggucugauggaggg

SEQ ID NO: 2673754 - RNA, 19 nt, Artificial Sequence
  Description of Artificial Sequence: Synthetic oligonucleotide
aaaaguuggucugauggag

SEQ ID NO: 2673755 - RNA, 19 nt, Artificial Sequence
  Description of Artificial Sequence: Synthetic oligonucleotide
accgaauuccaaaugaccc

SEQ ID NO: 2673756 - RNA, 19 nt, Artificial Sequence
  Description of Artificial Sequence: Synthetic oligonucleotide
uaaggaaucuccuuggguc

SEQ ID NO: 2673757 - RNA, 19 nt, Artificial Sequence
  Description of Artificial Sequence: Synthetic oligonucleotide
ucuaaaugggucauagccu

SEQ ID NO: 2673758 - RNA, 19 nt, Artificial Sequence
  Description of Artificial Sequence: Synthetic oligonucleotide
ucuguacccuuccaggugg

SEQ ID NO: 2673759 - RNA, 19 nt, Artificial Sequence
  Description of Artificial Sequence: Synthetic oligonucleotide
aaagaauuuaccacagaug

SEQ ID NO: 2673760 - RNA, 19 nt, Artificial Sequence
  Description of Artificial Sequence: Synthetic oligonucleotide
aaaugggucauagccuugc

SEQ ID NO: 2673761 - RNA, 19 nt, Artificial Sequence
  Description of Artificial Sequence: Synthetic oligonucleotide
caacaaaagaauuuaccac

SEQ ID NO: 2673762 - RNA, 19 nt, Artificial Sequence
  Description of Artificial Sequence: Synthetic oligonucleotide
ugcucuuuuaaacaacgga

SEQ ID NO: 2673763 - RNA, 19 nt, Artificial Sequence
  Description of Artificial Sequence: Synthetic oligonucleotide
aagauuuucuuaaggguuc

SEQ ID NO: 2673764 - RNA, 19 nt, Artificial Sequence
  Description of Artificial Sequence: Synthetic oligonucleotide
aauaaacuggugaucaugu

SEQ ID NO: 2673765 - RNA, 19 nt, Artificial Sequence
  Description of Artificial Sequence: Synthetic oligonucleotide
uuaaacaacggagagccca

SEQ ID NO: 2673766 - RNA, 19 nt, Artificial Sequence
  Description of Artificial Sequence: Synthetic oligonucleotide
uuugggagaguguaaauaa

SEQ ID NO: 2673767 - RNA, 19 nt, Artificial Sequence
  Description of Artificial Sequence: Synthetic oligonucleotide
ucagguccucucuaaaugg

SEQ ID NO: 2673768 - RNA, 19 nt, Artificial Sequence
  Description of Artificial Sequence: Synthetic oligonucleotide
uucagguccucucuaaaug

SEQ ID NO: 2673769 - RNA, 19 nt, Artificial Sequence
  Description of Artificial Sequence: Synthetic oligonucleotide
ugaucauguggccuuguag

SEQ ID NO: 2673770 - RNA, 19 nt, Artificial Sequence
  Description of Artificial Sequence: Synthetic oligonucleotide
uuucuuaaggguucgaguu

SEQ ID NO: 2673771 - RNA, 19 nt, Artificial Sequence
  Description of Artificial Sequence: Synthetic oligonucleotide
gaucauguggccuuguaga

SEQ ID NO: 2673772 - RNA, 19 nt, Artificial Sequence
  Description of Artificial Sequence: Synthetic oligonucleotide
uuuucuuaaggguucgagu

SEQ ID NO: 2673773 - RNA, 19 nt, Artificial Sequence
  Description of Artificial Sequence: Synthetic oligonucleotide
ugggucauagccuugcucu

SEQ ID NO: 2673774 - RNA, 19 nt, Artificial Sequence
  Description of Artificial Sequence: Synthetic oligonucleotide
uucuccuuucauuaguaug

SEQ ID NO: 2673775 - RNA, 19 nt, Artificial Sequence
  Description of Artificial Sequence: Synthetic oligonucleotide
auuaaggaaucuccuuggg

SEQ ID NO: 2673776 - RNA, 19 nt, Artificial Sequence
  Description of Artificial Sequence: Synthetic oligonucleotide
aauggugauccauguccac

SEQ ID NO: 2673777 - RNA, 19 nt, Artificial Sequence
  Description of Artificial Sequence: Synthetic oligonucleotide
gagggaauucuucccaagg

SEQ ID NO: 2673778 - RNA, 19 nt, Artificial Sequence
  Description of Artificial Sequence: Synthetic oligonucleotide
ugauggagggaauucuucc

SEQ ID NO: 2673779 - RNA, 19 nt, Artificial Sequence
  Description of Artificial Sequence: Synthetic oligonucleotide
cuuucauuaguauggugac

SEQ ID NO: 2673780 - RNA, 19 nt, Artificial Sequence
  Description of Artificial Sequence: Synthetic oligonucleotide
aacuggugaucauguggcc

SEQ ID NO: 2673781 - RNA, 19 nt, Artificial Sequence
  Description of Artificial Sequence: Synthetic oligonucleotide
acauaaugguaauucucuc

SEQ ID NO: 2673782 - RNA, 19 nt, Artificial Sequence
  Description of Artificial Sequence: Synthetic oligonucleotide
uuaaggaaucuccuugggu

SEQ ID NO: 2673783 - RNA, 19 nt, Artificial Sequence
  Description of Artificial Sequence: Synthetic oligonucleotide
gaauuuaccacagaugcaa

SEQ ID NO: 2673784 - RNA, 19 nt, Artificial Sequence
  Description of Artificial Sequence: Synthetic oligonucleotide
uucauuaguauggugacau

SEQ ID NO: 2673785 - RNA, 19 nt, Artificial Sequence
  Description of Artificial Sequence: Synthetic oligonucleotide
uuuauuaaggaaucuccuu

SEQ ID NO: 2673786 - RNA, 19 nt, Artificial Sequence
  Description of Artificial Sequence: Synthetic oligonucleotide
uaaacaacggagagcccag

SEQ ID NO: 2673787 - RNA, 19 nt, Artificial Sequence
  Description of Artificial Sequence: Synthetic oligonucleotide
ucuccuuggguccuuggag

SEQ ID NO: 2673788 - RNA, 19 nt, Artificial Sequence
  Description of Artificial Sequence: Synthetic oligonucleotide
cacgccaacacccacuccg

SEQ ID NO: 2673789 - RNA, 19 nt, Artificial Sequence
  Description of Artificial Sequence: Synthetic oligonucleotide
aaaguuggucugauggagg

SEQ ID NO: 2673790 - RNA, 19 nt, Artificial Sequence
  Description of Artificial Sequence: Synthetic oligonucleotide
aacgacccuuuccucuucc

SEQ ID NO: 2673791 - RNA, 19 nt, Artificial Sequence
  Description of Artificial Sequence: Synthetic oligonucleotide
ggagaguguaaauaaacug

SEQ ID NO: 2673792 - RNA, 19 nt, Artificial Sequence
  Description of Artificial Sequence: Synthetic oligonucleotide
cuuguagauuaacaaaguc

SEQ ID NO: 2673793 - RNA, 19 nt, Artificial Sequence
  Description of Artificial Sequence: Synthetic oligonucleotide
cuuuuaaacaacggagagc

SEQ ID NO: 2673794 - RNA, 19 nt, Artificial Sequence
  Description of Artificial Sequence: Synthetic oligonucleotide
gauggagggaauucuuccc

SEQ ID NO: 2673795 - RNA, 19 nt, Artificial Sequence
  Description of Artificial Sequence: Synthetic oligonucleotide
ucucucaacaaaagaauuu

SEQ ID NO: 2673796 - RNA, 19 nt, Artificial Sequence
  Description of Artificial Sequence: Synthetic oligonucleotide
uguaaauaaacuggugauc

SEQ ID NO: 2673797 - RNA, 19 nt, Artificial Sequence
  Description of Artificial Sequence: Synthetic oligonucleotide
uccacuucuccuuucauua

SEQ ID NO: 2673798 - RNA, 19 nt, Artificial Sequence
  Description of Artificial Sequence: Synthetic oligonucleotide
ucugaauggugauccaugu

SEQ ID NO: 2673799 - RNA, 19 nt, Artificial Sequence
  Description of Artificial Sequence: Synthetic oligonucleotide
auuuucuuaaggguucgag

SEQ ID NO: 2673800 - RNA, 19 nt, Artificial Sequence
  Description of Artificial Sequence: Synthetic oligonucleotide
augcucgcagcucaccacc

SEQ ID NO: 2673801 - RNA, 19 nt, Artificial Sequence
  Description of Artificial Sequence: Synthetic oligonucleotide
agguuccauauucuuuggc

SEQ ID NO: 2673802 - RNA, 19 nt, Artificial Sequence
  Description of Artificial Sequence: Synthetic oligonucleotide
gaaaaguuggucugaugga

SEQ ID NO: 2673803 - RNA, 19 nt, Artificial Sequence
  Description of Artificial Sequence: Synthetic oligonucleotide
gauuaacaaagucuugaaa

SEQ ID NO: 2673804 - RNA, 19 nt, Artificial Sequence
  Description of Artificial Sequence: Synthetic oligonucleotide
acaaaagaauuuaccacag

SEQ ID NO: 2673805 - RNA, 19 nt, Artificial Sequence
  Description of Artificial Sequence: Synthetic oligonucleotide
uuccauauucuuuggcucu

SEQ ID NO: 2673806 - RNA, 19 nt, Artificial Sequence
  Description of Artificial Sequence: Synthetic oligonucleotide
aggugcucuccucuguacc

SEQ ID NO: 2673807 - RNA, 19 nt, Artificial Sequence
  Description of Artificial Sequence: Synthetic oligonucleotide
caccgaauuccaaaugacc

SEQ ID NO: 2673808 - RNA, 19 nt, Artificial Sequence
  Description of Artificial Sequence: Synthetic oligonucleotide
agauuaacaaagucuugaa

SEQ ID NO: 2673809 - RNA, 19 nt, Artificial Sequence
  Description of Artificial Sequence: Synthetic oligonucleotide
cucuuuuaaacaacggaga

SEQ ID NO: 2673810 - RNA, 19 nt, Artificial Sequence
  Description of Artificial Sequence: Synthetic oligonucleotide
uaccacagaugcaaagcgc

SEQ ID NO: 2673811 - RNA, 19 nt, Artificial Sequence
  Description of Artificial Sequence: Synthetic oligonucleotide
ucgaguuacuuugggagag

SEQ ID NO: 2673812 - RNA, 19 nt, Artificial Sequence
  Description of Artificial Sequence: Synthetic oligonucleotide
agcccagaaaaguuggucu

SEQ ID NO: 2673813 - RNA, 19 nt, Artificial Sequence
  Description of Artificial Sequence: Synthetic oligonucleotide
ucaccgaauuccaaaugac

SEQ ID NO: 2673814 - RNA, 19 nt, Artificial Sequence
  Description of Artificial Sequence: Synthetic oligonucleotide
cucucucucaacaaaagaa

SEQ ID NO: 2673815 - RNA, 19 nt, Artificial Sequence
  Description of Artificial Sequence: Synthetic oligonucleotide
uucgaguuacuuugggaga

SEQ ID NO: 2673816 - RNA, 19 nt, Artificial Sequence
  Description of Artificial Sequence: Synthetic oligonucleotide
ucuuaaggguucgaguuac

SEQ ID NO: 2673817 - RNA, 19 nt, Artificial Sequence
  Description of Artificial Sequence: Synthetic oligonucleotide
agaguguaaauaaacuggu

SEQ ID NO: 2673818 - RNA, 19 nt, Artificial Sequence
  Description of Artificial Sequence: Synthetic oligonucleotide
acagaugcaaagcgcacgu

SEQ ID NO: 2673819 - RNA, 19 nt, Artificial Sequence
  Description of Artificial Sequence: Synthetic oligonucleotide
cuccuuggguccuuggagg

SEQ ID NO: 2673820 - RNA, 19 nt, Artificial Sequence
  Description of Artificial Sequence: Synthetic oligonucleotide
ucucaccgaauuccaaaug

SEQ ID NO: 2673821 - RNA, 19 nt, Artificial Sequence
  Description of Artificial Sequence: Synthetic oligonucleotide
uggccuuguagauuaacaa

SEQ ID NO: 2673822 - RNA, 19 nt, Artificial Sequence
  Description of Artificial Sequence: Synthetic oligonucleotide
guuccauauucuuuggcuc

SEQ ID NO: 2673823 - RNA, 19 nt, Artificial Sequence
  Description of Artificial Sequence: Synthetic oligonucleotide
aagcugccggcuccaaacg

SEQ ID NO: 2673824 - RNA, 19 nt, Artificial Sequence
  Description of Artificial Sequence: Synthetic oligonucleotide
cucugaauggugauccaug

SEQ ID NO: 2673825 - RNA, 19 nt, Artificial Sequence
  Description of Artificial Sequence: Synthetic oligonucleotide
agggaauucuucccaagga

SEQ ID NO: 2673826 - RNA, 19 nt, Artificial Sequence
  Description of Artificial Sequence: Synthetic oligonucleotide
uggcucugaauggugaucc

SEQ ID NO: 2673827 - RNA, 19 nt, Artificial Sequence
  Description of Artificial Sequence: Synthetic oligonucleotide
gacauaaugguaauucucu

SEQ ID NO: 2673828 - RNA, 19 nt, Artificial Sequence
  Description of Artificial Sequence: Synthetic oligonucleotide
agauuuucuuaaggguucg

SEQ ID NO: 2673829 - RNA, 19 nt, Artificial Sequence
  Description of Artificial Sequence: Synthetic oligonucleotide
ggugacauaaugguaauuc

SEQ ID NO: 2673830 - RNA, 19 nt, Artificial Sequence
  Description of Artificial Sequence: Synthetic oligonucleotide
ugaaacacugaauguuuua

SEQ ID NO: 2673831 - RNA, 19 nt, Artificial Sequence
  Description of Artificial Sequence: Synthetic oligonucleotide
auaaacuggugaucaugug

SEQ ID NO: 2673832 - RNA, 19 nt, Artificial Sequence
  Description of Artificial Sequence: Synthetic oligonucleotide
uuuaaacaacggagagccc

SEQ ID NO: 2673833 - RNA, 19 nt, Artificial Sequence
  Description of Artificial Sequence: Synthetic oligonucleotide
uaaugguaauucucucucu

SEQ ID NO: 2673834 - RNA, 19 nt, Artificial Sequence
  Description of Artificial Sequence: Synthetic oligonucleotide
augguaauucucucucuca

SEQ ID NO: 2673835 - RNA, 19 nt, Artificial Sequence
  Description of Artificial Sequence: Synthetic oligonucleotide
auagccuugcucuuuuaaa

SEQ ID NO: 2673836 - RNA, 19 nt, Artificial Sequence
  Description of Artificial Sequence: Synthetic oligonucleotide
uucucagguuccauauucu

SEQ ID NO: 2673837 - RNA, 19 nt, Artificial Sequence
  Description of Artificial Sequence: Synthetic oligonucleotide
uccgcguuggcggucauag

SEQ ID NO: 2673838 - RNA, 19 nt, Artificial Sequence
  Description of Artificial Sequence: Synthetic oligonucleotide
caaggaauccacucccaac

SEQ ID NO: 2673839 - RNA, 19 nt, Artificial Sequence
  Description of Artificial Sequence: Synthetic oligonucleotide
ucucuaaaugggucauagc

SEQ ID NO: 2673840 - RNA, 19 nt, Artificial Sequence
  Description of Artificial Sequence: Synthetic oligonucleotide
gccuuguagauuaacaaag

SEQ ID NO: 2673841 - RNA, 19 nt, Artificial Sequence
  Description of Artificial Sequence: Synthetic oligonucleotide
aaacgacccuuuccucuuc

SEQ ID NO: 2673842 - RNA, 19 nt, Artificial Sequence
  Description of Artificial Sequence: Synthetic oligonucleotide
ccuuucauuaguaugguga

SEQ ID NO: 2673843 - RNA, 19 nt, Artificial Sequence
  Description of Artificial Sequence: Synthetic oligonucleotide
ggaagcuggaagcugccgg

SEQ ID NO: 2673844 - RNA, 19 nt, Artificial Sequence
  Description of Artificial Sequence: Synthetic oligonucleotide
cugagcacacucuucccag

SEQ ID NO: 2673845 - RNA, 19 nt, Artificial Sequence
  Description of Artificial Sequence: Synthetic oligonucleotide
uaaggguucgaguuacuuu

SEQ ID NO: 2673846 - RNA, 19 nt, Artificial Sequence
  Description of Artificial Sequence: Synthetic oligonucleotide
guuacuuugggagagugua

SEQ ID NO: 2673847 - RNA, 19 nt, Artificial Sequence
  Description of Artificial Sequence: Synthetic oligonucleotide
aacaacggagagcccagaa

SEQ ID NO: 2673848 - RNA, 19 nt, Artificial Sequence
  Description of Artificial Sequence: Synthetic oligonucleotide
cucaccgaauuccaaauga

SEQ ID NO: 2673849 - RNA, 19 nt, Artificial Sequence
  Description of Artificial Sequence: Synthetic oligonucleotide
gacgcagcggggaugcucg

SEQ ID NO: 2673850 - RNA, 19 nt, Artificial Sequence
  Description of Artificial Sequence: Synthetic oligonucleotide
uugggagaguguaaauaaa

SEQ ID NO: 2673851 - RNA, 19 nt, Artificial Sequence
  Description of Artificial Sequence: Synthetic oligonucleotide
uucuuaaggguucgaguua

SEQ ID NO: 2673852 - RNA, 19 nt, Artificial Sequence
  Description of Artificial Sequence: Synthetic oligonucleotide
gaauccacucccaacuuuc

SEQ ID NO: 2673853 - RNA, 19 nt, Artificial Sequence
  Description of Artificial Sequence: Synthetic oligonucleotide
cagguccucucuaaauggg

SEQ ID NO: 2673854 - RNA, 19 nt, Artificial Sequence
  Description of Artificial Sequence: Synthetic oligonucleotide
cacagaugcaaagcgcacg

SEQ ID NO: 2673855 - RNA, 19 nt, Artificial Sequence
  Description of Artificial Sequence: Synthetic oligonucleotide
caccaccacgccaacaccc

SEQ ID NO: 2673856 - RNA, 19 nt, Artificial Sequence
  Description of Artificial Sequence: Synthetic oligonucleotide
aagucuugaaacacugaau

SEQ ID NO: 2673857 - RNA, 19 nt, Artificial Sequence
  Description of Artificial Sequence: Synthetic oligonucleotide
uuucauuaguauggugaca

SEQ ID NO: 2673858 - RNA, 19 nt, Artificial Sequence
  Description of Artificial Sequence: Synthetic oligonucleotide
aaugggucauagccuugcu

SEQ ID NO: 2673859 - RNA, 19 nt, Artificial Sequence
  Description of Artificial Sequence: Synthetic oligonucleotide
cucuuccccagaaggacgc

SEQ ID NO: 2673860 - RNA, 19 nt, Artificial Sequence
  Description of Artificial Sequence: Synthetic oligonucleotide
aacggagagcccagaaaag

SEQ ID NO: 2673861 - RNA, 19 nt, Artificial Sequence
  Description of Artificial Sequence: Synthetic oligonucleotide
gaagauuuucuuaaggguu

SEQ ID NO: 2673862 - RNA, 19 nt, Artificial Sequence
  Description of Artificial Sequence: Synthetic oligonucleotide
uacuuugggagaguguaaa

SEQ ID NO: 2673863 - RNA, 19 nt, Artificial Sequence
  Description of Artificial Sequence: Synthetic oligonucleotide
uuacuuugggagaguguaa

SEQ ID NO: 2673864 - RNA, 19 nt, Artificial Sequence
  Description of Artificial Sequence: Synthetic oligonucleotide
cugauggagggaauucuuc

SEQ ID NO: 2673865 - RNA, 19 nt, Artificial Sequence
  Description of Artificial Sequence: Synthetic oligonucleotide
cauguggccuuguagauua

SEQ ID NO: 2673866 - RNA, 19 nt, Artificial Sequence
  Description of Artificial Sequence: Synthetic oligonucleotide
guagauuaacaaagucuug

SEQ ID NO: 2673867 - RNA, 19 nt, Artificial Sequence
  Description of Artificial Sequence: Synthetic oligonucleotide
guguaaauaaacuggugau

SEQ ID NO: 2673868 - RNA, 19 nt, Artificial Sequence
  Description of Artificial Sequence: Synthetic oligonucleotide
cauuaguauggugacauaa

SEQ ID NO: 2673869 - RNA, 19 nt, Artificial Sequence
  Description of Artificial Sequence: Synthetic oligonucleotide
aggugguucagguccucuc

SEQ ID NO: 2673870 - RNA, 19 nt, Artificial Sequence
  Description of Artificial Sequence: Synthetic oligonucleotide
auuaguauggugacauaau

SEQ ID NO: 2673871 - RNA, 19 nt, Artificial Sequence
  Description of Artificial Sequence: Synthetic oligonucleotide
gacccuuuccucuucccca

SEQ ID NO: 2673872 - RNA, 19 nt, Artificial Sequence
  Description of Artificial Sequence: Synthetic oligonucleotide
ucccagguuucccucugag

SEQ ID NO: 2673873 - RNA, 19 nt, Artificial Sequence
  Description of Artificial Sequence: Synthetic oligonucleotide
caacggagagcccagaaaa

SEQ ID NO: 2673874 - RNA, 19 nt, Artificial Sequence
  Description of Artificial Sequence: Synthetic oligonucleotide
gaguuacuuugggagagug

SEQ ID NO: 2673875 - RNA, 19 nt, Artificial Sequence
  Description of Artificial Sequence: Synthetic oligonucleotide
uuuucagguguagcgcagc

SEQ ID NO: 2673876 - RNA, 19 nt, Artificial Sequence
  Description of Artificial Sequence: Synthetic oligonucleotide
uucuuuggcucugaauggu

SEQ ID NO: 2673877 - RNA, 19 nt, Artificial Sequence
  Description of Artificial Sequence: Synthetic oligonucleotide
accacagaugcaaagcgca

SEQ ID NO: 2673878 - RNA, 19 nt, Artificial Sequence
  Description of Artificial Sequence: Synthetic oligonucleotide
gaugcucgcagcucaccac

SEQ ID NO: 2673879 - RNA, 19 nt, Artificial Sequence
  Description of Artificial Sequence: Synthetic oligonucleotide
agcacacucuucccagguc

SEQ ID NO: 2673880 - RNA, 19 nt, Artificial Sequence
  Description of Artificial Sequence: Synthetic oligonucleotide
acgacccuuuccucuuccc

SEQ ID NO: 2673881 - RNA, 19 nt, Artificial Sequence
  Description of Artificial Sequence: Synthetic oligonucleotide
gaauggugauccaugucca

SEQ ID NO: 2673882 - RNA, 19 nt, Artificial Sequence
  Description of Artificial Sequence: Synthetic oligonucleotide
agcgcagccucuucccagg

SEQ ID NO: 2673883 - RNA, 19 nt, Artificial Sequence
  Description of Artificial Sequence: Synthetic oligonucleotide
aucauguggccuuguagau

SEQ ID NO: 2673884 - RNA, 19 nt, Artificial Sequence
  Description of Artificial Sequence: Synthetic oligonucleotide
cccagaaggacgcagcggg

SEQ ID NO: 2673885 - RNA, 19 nt, Artificial Sequence
  Description of Artificial Sequence: Synthetic oligonucleotide
acaacggagagcccagaaa

SEQ ID NO: 2673886 - RNA, 19 nt, Artificial Sequence
  Description of Artificial Sequence: Synthetic oligonucleotide
cagguuccauauucuuugg

SEQ ID NO: 2673887 - RNA, 19 nt, Artificial Sequence
  Description of Artificial Sequence: Synthetic oligonucleotide
ggaagauuuucuuaagggu

SEQ ID NO: 2673888 - RNA, 19 nt, Artificial Sequence
  Description of Artificial Sequence: Synthetic oligonucleotide
aacacccacuccgggccgc

SEQ ID NO: 2673889 - RNA, 19 nt, Artificial Sequence
  Description of Artificial Sequence: Synthetic oligonucleotide
uccauauucuuuggcucug

SEQ ID NO: 2673890 - RNA, 19 nt, Artificial Sequence
  Description of Artificial Sequence: Synthetic oligonucleotide
agaauuuaccacagaugca

SEQ ID NO: 2673891 - RNA, 19 nt, Artificial Sequence
  Description of Artificial Sequence: Synthetic oligonucleotide
uuaaggguucgaguuacuu

SEQ ID NO: 2673892 - RNA, 19 nt, Artificial Sequence
  Description of Artificial Sequence: Synthetic oligonucleotide
uuuucucagguuccauauu

SEQ ID NO: 2673893 - RNA, 19 nt, Artificial Sequence
  Description of Artificial Sequence: Synthetic oligonucleotide
ucucagguuccauauucuu

SEQ ID NO: 2673894 - RNA, 19 nt, Artificial Sequence
  Description of Artificial Sequence: Synthetic oligonucleotide
cuuuggcucugaaugguga

SEQ ID NO: 2673895 - RNA, 19 nt, Artificial Sequence
  Description of Artificial Sequence: Synthetic oligonucleotide
uuggcggucauagcucuug

SEQ ID NO: 2673896 - RNA, 19 nt, Artificial Sequence
  Description of Artificial Sequence: Synthetic oligonucleotide
cucuguacccuuccaggug

SEQ ID NO: 2673897 - RNA, 19 nt, Artificial Sequence
  Description of Artificial Sequence: Synthetic oligonucleotide
uuggaggugcucuccucug

SEQ ID NO: 2673898 - RNA, 19 nt, Artificial Sequence
  Description of Artificial Sequence: Synthetic oligonucleotide
acuggugaucauguggccu

SEQ ID NO: 2673899 - RNA, 19 nt, Artificial Sequence
  Description of Artificial Sequence: Synthetic oligonucleotide
uagcgcagccucuucccag

SEQ ID NO: 2673900 - RNA, 19 nt, Artificial Sequence
  Description of Artificial Sequence: Synthetic oligonucleotide
aucuccuuggguccuugga

SEQ ID NO: 2673901 - RNA, 19 nt, Artificial Sequence
  Description of Artificial Sequence: Synthetic oligonucleotide
cagaaaaguuggucugaug

SEQ ID NO: 2673902 - RNA, 19 nt, Artificial Sequence
  Description of Artificial Sequence: Synthetic oligonucleotide
ccgaauuccaaaugacccc

SEQ ID NO: 2673903 - RNA, 19 nt, Artificial Sequence
  Description of Artificial Sequence: Synthetic oligonucleotide
cuccucuguacccuuccag

SEQ ID NO: 2673904 - RNA, 19 nt, Artificial Sequence
  Description of Artificial Sequence: Synthetic oligonucleotide
acccuuuccucuuccccag

SEQ ID NO: 2673905 - RNA, 19 nt, Artificial Sequence
  Description of Artificial Sequence: Synthetic oligonucleotide
cucucaacaaaagaauuua

SEQ ID NO: 2673906 - RNA, 19 nt, Artificial Sequence
  Description of Artificial Sequence: Synthetic oligonucleotide
ccagguuucccucugagca

SEQ ID NO: 2673907 - RNA, 19 nt, Artificial Sequence
  Description of Artificial Sequence: Synthetic oligonucleotide
uccuuggguccuuggaggu

SEQ ID NO: 2673908 - RNA, 19 nt, Artificial Sequence
  Description of Artificial Sequence: Synthetic oligonucleotide
guguagcgcagccucuucc

SEQ ID NO: 2673909 - RNA, 19 nt, Artificial Sequence
  Description of Artificial Sequence: Synthetic oligonucleotide
acuuugggagaguguaaau

SEQ ID NO: 2673910 - RNA, 19 nt, Artificial Sequence
  Description of Artificial Sequence: Synthetic oligonucleotide
auggugauccauguccacu

SEQ ID NO: 2673911 - RNA, 19 nt, Artificial Sequence
  Description of Artificial Sequence: Synthetic oligonucleotide
gugacauaaugguaauucu

SEQ ID NO: 2673912 - RNA, 19 nt, Artificial Sequence
  Description of Artificial Sequence: Synthetic oligonucleotide
uccuuggaggugcucuccu

SEQ ID NO: 2673913 - RNA, 19 nt, Artificial Sequence
  Description of Artificial Sequence: Synthetic oligonucleotide
ggugcucuccucuguaccc

SEQ ID NO: 2673914 - RNA, 19 nt, Artificial Sequence
  Description of Artificial Sequence: Synthetic oligonucleotide
caaaagaauuuaccacaga

SEQ ID NO: 2673915 - RNA, 19 nt, Artificial Sequence
  Description of Artificial Sequence: Synthetic oligonucleotide
gguuccauauucuuuggcu

SEQ ID NO: 2673916 - RNA, 19 nt, Artificial Sequence
  Description of Artificial Sequence: Synthetic oligonucleotide
aauccacucccaacuuuca

SEQ ID NO: 2673917 - RNA, 19 nt, Artificial Sequence
  Description of Artificial Sequence: Synthetic oligonucleotide
guuggucugauggagggaa

SEQ ID NO: 2673918 - RNA, 19 nt, Artificial Sequence
  Description of Artificial Sequence: Synthetic oligonucleotide
ucccaggucucaccgaauu

SEQ ID NO: 2673919 - RNA, 19 nt, Artificial Sequence
  Description of Artificial Sequence: Synthetic oligonucleotide
cucuccucuguacccuucc

SEQ ID NO: 2673920 - RNA, 19 nt, Artificial Sequence
  Description of Artificial Sequence: Synthetic oligonucleotide
uccaaacgacccuuuccuc

SEQ ID NO: 2673921 - RNA, 19 nt, Artificial Sequence
  Description of Artificial Sequence: Synthetic oligonucleotide
cugaauggugauccauguc

SEQ ID NO: 2673922 - RNA, 19 nt, Artificial Sequence
  Description of Artificial Sequence: Synthetic oligonucleotide
ugccggcuccaaacgaccc

SEQ ID NO: 2673923 - RNA, 19 nt, Artificial Sequence
  Description of Artificial Sequence: Synthetic oligonucleotide
gcuccaaacgacccuuucc

SEQ ID NO: 2673924 - RNA, 19 nt, Artificial Sequence
  Description of Artificial Sequence: Synthetic oligonucleotide
cagguuucccucugagcac

SEQ ID NO: 2673925 - RNA, 19 nt, Artificial Sequence
  Description of Artificial Sequence: Synthetic oligonucleotide
ugguucagguccucucuaa

SEQ ID NO: 2673926 - RNA, 19 nt, Artificial Sequence
  Description of Artificial Sequence: Synthetic oligonucleotide
gagcccagaaaaguugguc

SEQ ID NO: 2673927 - RNA, 19 nt, Artificial Sequence
  Description of Artificial Sequence: Synthetic oligonucleotide
cuuugggagaguguaaaua

SEQ ID NO: 2673928 - RNA, 19 nt, Artificial Sequence
  Description of Artificial Sequence: Synthetic oligonucleotide
ucauuaguauggugacaua

SEQ ID NO: 2673929 - RNA, 19 nt, Artificial Sequence
  Description of Artificial Sequence: Synthetic oligonucleotide
uguggccuuguagauuaac

SEQ ID NO: 2673930 - RNA, 19 nt, Artificial Sequence
  Description of Artificial Sequence: Synthetic oligonucleotide
ucuucccaggucucaccga

SEQ ID NO: 2673931 - RNA, 19 nt, Artificial Sequence
  Description of Artificial Sequence: Synthetic oligonucleotide
gucuugaaacacugaaugu

SEQ ID NO: 2673932 - RNA, 19 nt, Artificial Sequence
  Description of Artificial Sequence: Synthetic oligonucleotide
gguucgaguuacuuuggga

SEQ ID NO: 2673933 - RNA, 19 nt, Artificial Sequence
  Description of Artificial Sequence: Synthetic oligonucleotide
ggagggaauucuucccaag

SEQ ID NO: 2673934 - RNA, 19 nt, Artificial Sequence
  Description of Artificial Sequence: Synthetic oligonucleotide
ccaggucucaccgaauucc

SEQ ID NO: 2673935 - RNA, 19 nt, Artificial Sequence
  Description of Artificial Sequence: Synthetic oligonucleotide
gcagcucaccaccaccacg

SEQ ID NO: 2673936 - RNA, 19 nt, Artificial Sequence
  Description of Artificial Sequence: Synthetic oligonucleotide
ggguucgaguuacuuuggg

SEQ ID NO: 2673937 - RNA, 19 nt, Artificial Sequence
  Description of Artificial Sequence: Synthetic oligonucleotide
gggaauucuucccaaggaa

SEQ ID NO: 2673938 - RNA, 19 nt, Artificial Sequence
  Description of Artificial Sequence: Synthetic oligonucleotide
aggaagcuggaagcugccg

SEQ ID NO: 2673939 - RNA, 19 nt, Artificial Sequence
  Description of Artificial Sequence: Synthetic oligonucleotide
aguuacuuugggagagugu

SEQ ID NO: 2673940 - RNA, 19 nt, Artificial Sequence
  Description of Artificial Sequence: Synthetic oligonucleotide
cauagccuugcucuuuuaa

SEQ ID NO: 2673941 - RNA, 19 nt, Artificial Sequence
  Description of Artificial Sequence: Synthetic oligonucleotide
cuccaaacgacccuuuccu

SEQ ID NO: 2673942 - RNA, 19 nt, Artificial Sequence
  Description of Artificial Sequence: Synthetic oligonucleotide
ggccuuguagauuaacaaa

SEQ ID NO: 2673943 - RNA, 19 nt, Artificial Sequence
  Description of Artificial Sequence: Synthetic oligonucleotide
ugcucgcagcucaccacca

SEQ ID NO: 2673944 - RNA, 19 nt, Artificial Sequence
  Description of Artificial Sequence: Synthetic oligonucleotide
uucagguguagcgcagccu

SEQ ID NO: 2673945 - RNA, 19 nt, Artificial Sequence
  Description of Artificial Sequence: Synthetic oligonucleotide
uuggcucugaauggugauc

SEQ ID NO: 2673946 - RNA, 19 nt, Artificial Sequence
  Description of Artificial Sequence: Synthetic oligonucleotide
gaaggacgcagcggggaug

SEQ ID NO: 2673947 - RNA, 19 nt, Artificial Sequence
  Description of Artificial Sequence: Synthetic oligonucleotide
uccucucuaaaugggucau

SEQ ID NO: 2673948 - RNA, 19 nt, Artificial Sequence
  Description of Artificial Sequence: Synthetic oligonucleotide
aaacaacggagagcccaga

SEQ ID NO: 2673949 - RNA, 19 nt, Artificial Sequence
  Description of Artificial Sequence: Synthetic oligonucleotide
gauuuucuuaaggguucga

SEQ ID NO: 2673950 - RNA, 19 nt, Artificial Sequence
  Description of Artificial Sequence: Synthetic oligonucleotide
gcccagaaaaguuggucug

SEQ ID NO: 2673951 - RNA, 19 nt, Artificial Sequence
  Description of Artificial Sequence: Synthetic oligonucleotide
agcggggaugcucgcagcu

SEQ ID NO: 2673952 - RNA, 19 nt, Artificial Sequence
  Description of Artificial Sequence: Synthetic oligonucleotide
ccucuuccccagaaggacg

SEQ ID NO: 2673953 - RNA, 19 nt, Artificial Sequence
  Description of Artificial Sequence: Synthetic oligonucleotide
aggaauccacucccaacuu

SEQ ID NO: 2673954 - RNA, 19 nt, Artificial Sequence
  Description of Artificial Sequence: Synthetic oligonucleotide
ucauguggccuuguagauu

SEQ ID NO: 2673955 - RNA, 19 nt, Artificial Sequence
  Description of Artificial Sequence: Synthetic oligonucleotide
ccuugcucuuuuaaacaac

SEQ ID NO: 2673956 - RNA, 19 nt, Artificial Sequence
  Description of Artificial Sequence: Synthetic oligonucleotide
uucccagguuucccucuga

SEQ ID NO: 2673957 - RNA, 19 nt, Artificial Sequence
  Description of Artificial Sequence: Synthetic oligonucleotide
guacccuuccaggugguuc

SEQ ID NO: 2673958 - RNA, 19 nt, Artificial Sequence
  Description of Artificial Sequence: Synthetic oligonucleotide
cacacucuucccaggucuc

SEQ ID NO: 2673959 - RNA, 19 nt, Artificial Sequence
  Description of Artificial Sequence: Synthetic oligonucleotide
cucuucccagguuucccuc

SEQ ID NO: 2673960 - RNA, 19 nt, Artificial Sequence
  Description of Artificial Sequence: Synthetic oligonucleotide
ggucucaccgaauuccaaa

SEQ ID NO: 2673961 - RNA, 19 nt, Artificial Sequence
  Description of Artificial Sequence: Synthetic oligonucleotide
gaaucuccuuggguccuug

SEQ ID NO: 2673962 - RNA, 19 nt, Artificial Sequence
  Description of Artificial Sequence: Synthetic oligonucleotide
agcugccggcuccaaacga

SEQ ID NO: 2673963 - RNA, 19 nt, Artificial Sequence
  Description of Artificial Sequence: Synthetic oligonucleotide
guauggugacauaauggua

SEQ ID NO: 2673964 - RNA, 19 nt, Artificial Sequence
  Description of Artificial Sequence: Synthetic oligonucleotide
caacacccacuccgggccg

SEQ ID NO: 2673965 - RNA, 19 nt, Artificial Sequence
  Description of Artificial Sequence: Synthetic oligonucleotide
caggucucaccgaauucca

SEQ ID NO: 2673966 - RNA, 19 nt, Artificial Sequence
  Description of Artificial Sequence: Synthetic oligonucleotide
uggucugauggagggaauu

SEQ ID NO: 2673967 - RNA, 19 nt, Artificial Sequence
  Description of Artificial Sequence: Synthetic oligonucleotide
agguccucucuaaaugggu

SEQ ID NO: 2673968 - RNA, 19 nt, Artificial Sequence
  Description of Artificial Sequence: Synthetic oligonucleotide
cauauucuuuggcucugaa

SEQ ID NO: 2673969 - RNA, 19 nt, Artificial Sequence
  Description of Artificial Sequence: Synthetic oligonucleotide
guucagguccucucuaaau

SEQ ID NO: 2673970 - RNA, 19 nt, Artificial Sequence
  Description of Artificial Sequence: Synthetic oligonucleotide
uggugaucauguggccuug

SEQ ID NO: 2673971 - RNA, 19 nt, Artificial Sequence
  Description of Artificial Sequence: Synthetic oligonucleotide
gcagcggggaugcucgcag

SEQ ID NO: 2673972 - RNA, 19 nt, Artificial Sequence
  Description of Artificial Sequence: Synthetic oligonucleotide
aguuggucugauggaggga

SEQ ID NO: 2673973 - RNA, 19 nt, Artificial Sequence
  Description of Artificial Sequence: Synthetic oligonucleotide
ggaugcucgcagcucacca

SEQ ID NO: 2673974 - RNA, 19 nt, Artificial Sequence
  Description of Artificial Sequence: Synthetic oligonucleotide
acgccaacacccacuccgg

SEQ ID NO: 2673975 - RNA, 19 nt, Artificial Sequence
  Description of Artificial Sequence: Synthetic oligonucleotide
gucucaccgaauuccaaau

SEQ ID NO: 2673976 - RNA, 19 nt, Artificial Sequence
  Description of Artificial Sequence: Synthetic oligonucleotide
ucauagccuugcucuuuua

SEQ ID NO: 2673977 - RNA, 19 nt, Artificial Sequence
  Description of Artificial Sequence: Synthetic oligonucleotide
guagcgcagccucuuccca

SEQ ID NO: 2673978 - RNA, 19 nt, Artificial Sequence
  Description of Artificial Sequence: Synthetic oligonucleotide
gguccucucuaaauggguc

SEQ ID NO: 2673979 - RNA, 19 nt, Artificial Sequence
  Description of Artificial Sequence: Synthetic oligonucleotide
gggagaguguaaauaaacu

SEQ ID NO: 2673980 - RNA, 19 nt, Artificial Sequence
  Description of Artificial Sequence: Synthetic oligonucleotide
uggugacauaaugguaauu

SEQ ID NO: 2673981 - RNA, 19 nt, Artificial Sequence
  Description of Artificial Sequence: Synthetic oligonucleotide
ggucugauggagggaauuc

SEQ ID NO: 2673982 - RNA, 19 nt, Artificial Sequence
  Description of Artificial Sequence: Synthetic oligonucleotide
ccacuucuccuuucauuag

SEQ ID NO: 2673983 - RNA, 19 nt, Artificial Sequence
  Description of Artificial Sequence: Synthetic oligonucleotide
cacuucuccuuucauuagu

SEQ ID NO: 2673984 - RNA, 19 nt, Artificial Sequence
  Description of Artificial Sequence: Synthetic oligonucleotide
ggcggucauagcucuuggc

SEQ ID NO: 2673985 - RNA, 19 nt, Artificial Sequence
  Description of Artificial Sequence: Synthetic oligonucleotide
cccagguuucccucugagc

SEQ ID NO: 2673986 - RNA, 19 nt, Artificial Sequence
  Description of Artificial Sequence: Synthetic oligonucleotide
acgcagcggggaugcucgc

SEQ ID NO: 2673987 - RNA, 19 nt, Artificial Sequence
  Description of Artificial Sequence: Synthetic oligonucleotide
ucuuccccagaaggacgca

SEQ ID NO: 2673988 - RNA, 19 nt, Artificial Sequence
  Description of Artificial Sequence: Synthetic oligonucleotide
cagaaggacgcagcgggga

SEQ ID NO: 2673989 - RNA, 19 nt, Artificial Sequence
  Description of Artificial Sequence: Synthetic oligonucleotide
ccagaaggacgcagcgggg

SEQ ID NO: 2673990 - RNA, 19 nt, Artificial Sequence
  Description of Artificial Sequence: Synthetic oligonucleotide
gugaucauguggccuugua

SEQ ID NO: 2673991 - RNA, 19 nt, Artificial Sequence
  Description of Artificial Sequence: Synthetic oligonucleotide
ggugauccauguccacuuc

SEQ ID NO: 2673992 - RNA, 19 nt, Artificial Sequence
  Description of Artificial Sequence: Synthetic oligonucleotide
gguucagguccucucuaaa

SEQ ID NO: 2673993 - RNA, 19 nt, Artificial Sequence
  Description of Artificial Sequence: Synthetic oligonucleotide
ggugguucagguccucucu

SEQ ID NO: 2673994 - RNA, 19 nt, Artificial Sequence
  Description of Artificial Sequence: Synthetic oligonucleotide
gugguucagguccucucua

SEQ ID NO: 2673995 - RNA, 19 nt, Artificial Sequence
  Description of Artificial Sequence: Synthetic oligonucleotide
cagcggggaugcucgcagc

SEQ ID NO: 2673996 - RNA, 19 nt, Artificial Sequence
  Description of Artificial Sequence: Synthetic oligonucleotide
cuucuccuuucauuaguau

SEQ ID NO: 2673997 - RNA, 19 nt, Artificial Sequence
  Description of Artificial Sequence: Synthetic oligonucleotide
ccuuguagauuaacaaagu

SEQ ID NO: 2673998 - RNA, 19 nt, Artificial Sequence
  Description of Artificial Sequence: Synthetic oligonucleotide
caaacgacccuuuccucuu

SEQ ID NO: 2673999 - RNA, 19 nt, Artificial Sequence
  Description of Artificial Sequence: Synthetic oligonucleotide
gucauagccuugcucuuuu

SEQ ID NO: 2674000 - RNA, 19 nt, Artificial Sequence
  Description of Artificial Sequence: Synthetic oligonucleotide
ccaaacgacccuuuccucu

SEQ ID NO: 2674001 - RNA, 19 nt, Artificial Sequence
  Description of Artificial Sequence: Synthetic oligonucleotide
gguguagcgcagccucuuc

SEQ ID NO: 2674002 - RNA, 19 nt, Artificial Sequence
  Description of Artificial Sequence: Synthetic oligonucleotide
ggcuccaaacgacccuuuc

SEQ ID NO: 2674003 - RNA, 19 nt, Artificial Sequence
  Description of Artificial Sequence: Synthetic oligonucleotide
uguacccuuccaggugguu

SEQ ID NO: 2674004 - RNA, 19 nt, Artificial Sequence
  Description of Artificial Sequence: Synthetic oligonucleotide
agguguagcgcagccucuu

SEQ ID NO: 2674005 - RNA, 19 nt, Artificial Sequence
  Description of Artificial Sequence: Synthetic oligonucleotide
cuuaaggguucgaguuacu

SEQ ID NO: 2674006 - RNA, 19 nt, Artificial Sequence
  Description of Artificial Sequence: Synthetic oligonucleotide
ccaccaccacgccaacacc

SEQ ID NO: 2674007 - RNA, 19 nt, Artificial Sequence
  Description of Artificial Sequence: Synthetic oligonucleotide
caccacgccaacacccacu

SEQ ID NO: 2674008 - RNA, 19 nt, Artificial Sequence
  Description of Artificial Sequence: Synthetic oligonucleotide
ggcucugaauggugaucca

SEQ ID NO: 2674009 - RNA, 19 nt, Artificial Sequence
  Description of Artificial Sequence: Synthetic oligonucleotide
gggaugcucgcagcucacc

SEQ ID NO: 2674010 - RNA, 19 nt, Artificial Sequence
  Description of Artificial Sequence: Synthetic oligonucleotide
cccaggucucaccgaauuc

SEQ ID NO: 2674011 - RNA, 19 nt, Artificial Sequence
  Description of Artificial Sequence: Synthetic oligonucleotide
ccaaggaauccacucccaa

SEQ ID NO: 2674012 - RNA, 19 nt, Artificial Sequence
  Description of Artificial Sequence: Synthetic oligonucleotide
cuccgggccgccgccucgg

SEQ ID NO: 2674013 - RNA, 19 nt, Artificial Sequence
  Description of Artificial Sequence: Synthetic oligonucleotide
ggaagcugccggcuccaaa

SEQ ID NO: 2674014 - RNA, 19 nt, Artificial Sequence
  Description of Artificial Sequence: Synthetic oligonucleotide
ccccagaaggacgcagcgg

SEQ ID NO: 2674015 - RNA, 19 nt, Artificial Sequence
  Description of Artificial Sequence: Synthetic oligonucleotide
gcguuggcggucauagcuc

SEQ ID NO: 2674016 - RNA, 19 nt, Artificial Sequence
  Description of Artificial Sequence: Synthetic oligonucleotide
gcucgcagcucaccaccac

SEQ ID NO: 2674017 - RNA, 19 nt, Artificial Sequence
  Description of Artificial Sequence: Synthetic oligonucleotide
ggacgcagcggggaugcuc

SEQ ID NO: 2674018 - RNA, 19 nt, Artificial Sequence
  Description of Artificial Sequence: Synthetic oligonucleotide
cccaaggaauccacuccca

SEQ ID NO: 2674019 - RNA, 19 nt, Artificial Sequence
  Description of Artificial Sequence: Synthetic oligonucleotide
ccacucccaacuuucauuu

SEQ ID NO: 2674020 - RNA, 19 nt, Artificial Sequence
  Description of Artificial Sequence: Synthetic oligonucleotide
ggguccuuggaggugcucu

SEQ ID NO: 2674021 - RNA, 19 nt, Artificial Sequence
  Description of Artificial Sequence: Synthetic oligonucleotide
uggguccuuggaggugcuc

SEQ ID NO: 2674022 - RNA, 19 nt, Artificial Sequence
  Description of Artificial Sequence: Synthetic oligonucleotide
cacuccgggccgccgccuc

SEQ ID NO: 2674023 - RNA, 19 nt, Artificial Sequence
  Description of Artificial Sequence: Synthetic oligonucleotide
ccucuguacccuuccaggu

SEQ ID NO: 2674024 - RNA, 19 nt, Artificial Sequence
  Description of Artificial Sequence: Synthetic oligonucleotide
cagguguagcgcagccucu

SEQ ID NO: 2674025 - RNA, 19 nt, Artificial Sequence
  Description of Artificial Sequence: Synthetic oligonucleotide
cacccacuccgggccgccg

SEQ ID NO: 2674026 - RNA, 19 nt, Artificial Sequence
  Description of Artificial Sequence: Synthetic oligonucleotide
gguuucccucugagcacac

SEQ ID NO: 2674027 - RNA, 19 nt, Artificial Sequence
  Description of Artificial Sequence: Synthetic oligonucleotide
ccaccacgccaacacccac

SEQ ID NO: 2674028 - RNA, 19 nt, Artificial Sequence
  Description of Artificial Sequence: Synthetic oligonucleotide
cgcguuggcggucauagcu

SEQ ID NO: 2674029 - RNA, 19 nt, Artificial Sequence
  Description of Artificial Sequence: Synthetic oligonucleotide
ccucggcuccgcguuggcg

SEQ ID NO: 2674030 - RNA, 19 nt, Artificial Sequence
  Description of Artificial Sequence: Synthetic oligonucleotide
cgccaacacccacuccggg

SEQ ID NO: 2674031 - RNA, 19 nt, Artificial Sequence
  Description of Artificial Sequence: Synthetic oligonucleotide
cuguacccuuccagguggu

SEQ ID NO: 2674032 - RNA, 19 nt, Artificial Sequence
  Description of Artificial Sequence: Synthetic oligonucleotide
cccacuccgggccgccgcc

SEQ ID NO: 2674033 - RNA, 19 nt, Artificial Sequence
  Description of Artificial Sequence: Synthetic oligonucleotide
ggggaugcucgcagcucac

SEQ ID NO: 2674034 - RNA, 19 nt, Artificial Sequence
  Description of Artificial Sequence: Synthetic oligonucleotide
cggggaugcucgcagcuca

SEQ ID NO: 2674035 - RNA, 19 nt, Artificial Sequence
  Description of Artificial Sequence: Synthetic oligonucleotide
auguggccuuguagauuaa

SEQ ID NO: 2674036 - RNA, 19 nt, Artificial Sequence
  Description of Artificial Sequence: Synthetic oligonucleotide
ccgcguuggcggucauagc

SEQ ID NO: 2674037 - RNA, 19 nt, Artificial Sequence
  Description of Artificial Sequence: Synthetic oligonucleotide
ggucauagccuugcucuuu

SEQ ID NO: 2674038 - RNA, 19 nt, Artificial Sequence
  Description of Artificial Sequence: Synthetic oligonucleotide
gcucuccucuguacccuuc

SEQ ID NO: 2674039 - RNA, 19 nt, Artificial Sequence
  Description of Artificial Sequence: Synthetic oligonucleotide
gggucauagccuugcucuu

SEQ ID NO: 2674040 - RNA, 19 nt, Artificial Sequence
  Description of Artificial Sequence: Synthetic oligonucleotide
ggcuccgcguuggcgguca

SEQ ID NO: 2674041 - RNA, 19 nt, Artificial Sequence
  Description of Artificial Sequence: Synthetic oligonucleotide
gccggcuccaaacgacccu

SEQ ID NO: 2674042 - RNA, 19 nt, Artificial Sequence
  Description of Artificial Sequence: Synthetic oligonucleotide
gcggggaugcucgcagcuc

SEQ ID NO: 2674043 - RNA, 19 nt, Artificial Sequence
  Description of Artificial Sequence: Synthetic oligonucleotide
aggacgcagcggggaugcu

SEQ ID NO: 2674044 - RNA, 19 nt, Artificial Sequence
  Description of Artificial Sequence: Synthetic oligonucleotide
ggugaucauguggccuugu

SEQ ID NO: 2674045 - RNA, 19 nt, Artificial Sequence
  Description of Artificial Sequence: Synthetic oligonucleotide
ccagaaaaguuggucugau

SEQ ID NO: 2674046 - RNA, 19 nt, Artificial Sequence
  Description of Artificial Sequence: Synthetic oligonucleotide
cguuggcggucauagcucu

SEQ ID NO: 2674047 - RNA, 19 nt, Artificial Sequence
  Description of Artificial Sequence: Synthetic oligonucleotide
cagaugcaaagcgcacguu

SEQ ID NO: 2674048 - RNA, 19 nt, Artificial Sequence
  Description of Artificial Sequence: Synthetic oligonucleotide
ccaggugguucagguccuc

SEQ ID NO: 2674049 - RNA, 19 nt, Artificial Sequence
  Description of Artificial Sequence: Synthetic oligonucleotide
guuggcggucauagcucuu

SEQ ID NO: 2674050 - RNA, 19 nt, Artificial Sequence
  Description of Artificial Sequence: Synthetic oligonucleotide
gccgccucggcuccgcguu

SEQ ID NO: 2674051 - RNA, 19 nt, Artificial Sequence
  Description of Artificial Sequence: Synthetic oligonucleotide
cuccgcguuggcggucaua

SEQ ID NO: 2674052 - RNA, 19 nt, Artificial Sequence
  Description of Artificial Sequence: Synthetic oligonucleotide
ccgccucggcuccgcguug

SEQ ID NO: 2674053 - RNA, 19 nt, Artificial Sequence
  Description of Artificial Sequence: Synthetic oligonucleotide
ccgccgccucggcuccgcg

SEQ ID NO: 2674054 - RNA, 19 nt, Artificial Sequence
  Description of Artificial Sequence: Synthetic oligonucleotide
gcgcagccucuucccaggu

SEQ ID NO: 2674055 - RNA, 19 nt, Artificial Sequence
  Description of Artificial Sequence: Synthetic oligonucleotide
cgaguuacuuugggagagu

SEQ ID NO: 2674056 - RNA, 19 nt, Artificial Sequence
  Description of Artificial Sequence: Synthetic oligonucleotide
ccggcuccaaacgacccuu

SEQ ID NO: 2674057 - RNA, 19 nt, Artificial Sequence
  Description of Artificial Sequence: Synthetic oligonucleotide
gcuccgcguuggcggucau

SEQ ID NO: 2674058 - RNA, 19 nt, Artificial Sequence
  Description of Artificial Sequence: Synthetic oligonucleotide
cgcagccucuucccagguu

SEQ ID NO: 2674059 - RNA, 19 nt, Artificial Sequence
  Description of Artificial Sequence: Synthetic oligonucleotide
cggcuccgcguuggcgguc

SEQ ID NO: 2674060 - RNA, 19 nt, Artificial Sequence
  Description of Artificial Sequence: Synthetic oligonucleotide
cggcuccaaacgacccuuu

SEQ ID NO: 2674061 - RNA, 19 nt, Artificial Sequence
  Description of Artificial Sequence: Synthetic oligonucleotide
ccacuccgggccgccgccu

SEQ ID NO: 2674062 - RNA, 19 nt, Artificial Sequence
  Description of Artificial Sequence: Synthetic oligonucleotide
aaaauaguuguguauagac

SEQ ID NO: 2674063 - RNA, 19 nt, Artificial Sequence
  Description of Artificial Sequence: Synthetic oligonucleotide
aauaguuguguauagacuc

SEQ ID NO: 2674064 - RNA, 19 nt, Artificial Sequence
  Description of Artificial Sequence: Synthetic oligonucleotide
uguguaguaauaaaguuca

SEQ ID NO: 2674065 - RNA, 19 nt, Artificial Sequence
  Description of Artificial Sequence: Synthetic oligonucleotide
auguacaucauaugcaugc

SEQ ID NO: 2674066 - RNA, 19 nt, Artificial Sequence
  Description of Artificial Sequence: Synthetic oligonucleotide
acacauguacaucauaugc

SEQ ID NO: 2674067 - RNA, 19 nt, Artificial Sequence
  Description of Artificial Sequence: Synthetic oligonucleotide
auguccgucauuuaugucc

SEQ ID NO: 2674068 - RNA, 19 nt, Artificial Sequence
  Description of Artificial Sequence: Synthetic oligonucleotide
ugcauguguaguaauaaag

SEQ ID NO: 2674069 - RNA, 19 nt, Artificial Sequence
  Description of Artificial Sequence: Synthetic oligonucleotide
ugcauauacauguuuugcg

SEQ ID NO: 2674070 - RNA, 19 nt, Artificial Sequence
  Description of Artificial Sequence: Synthetic oligonucleotide
aguaauaaaguucagcuuu

SEQ ID NO: 2674071 - RNA, 19 nt, Artificial Sequence
  Description of Artificial Sequence: Synthetic oligonucleotide
uguguauagacucaggcau

SEQ ID NO: 2674072 - RNA, 19 nt, Artificial Sequence
  Description of Artificial Sequence: Synthetic oligonucleotide
ucuuagaucccacacacac

SEQ ID NO: 2674073 - RNA, 19 nt, Artificial Sequence
  Description of Artificial Sequence: Synthetic oligonucleotide
uuagaucccacacacacac

SEQ ID NO: 2674074 - RNA, 19 nt, Artificial Sequence
  Description of Artificial Sequence: Synthetic oligonucleotide
uuggaaacugaggagaugg

SEQ ID NO: 2674075 - RNA, 19 nt, Artificial Sequence
  Description of Artificial Sequence: Synthetic oligonucleotide
acuucaaccauuucuccac

SEQ ID NO: 2674076 - RNA, 19 nt, Artificial Sequence
  Description of Artificial Sequence: Synthetic oligonucleotide
auauacauguuuugcguac

SEQ ID NO: 2674077 - RNA, 19 nt, Artificial Sequence
  Description of Artificial Sequence: Synthetic oligonucleotide
auguuuugcguacacacgg

SEQ ID NO: 2674078 - RNA, 19 nt, Artificial Sequence
  Description of Artificial Sequence: Synthetic oligonucleotide
cuugucucuaucuugcagg

SEQ ID NO: 2674079 - RNA, 19 nt, Artificial Sequence
  Description of Artificial Sequence: Synthetic oligonucleotide
augggagcuacauaguugg

SEQ ID NO: 2674080 - RNA, 19 nt, Artificial Sequence
  Description of Artificial Sequence: Synthetic oligonucleotide
caguuuguuguguagacgg

SEQ ID NO: 2674081 - RNA, 19 nt, Artificial Sequence
  Description of Artificial Sequence: Synthetic oligonucleotide
uuuguuguguagacggccg

SEQ ID NO: 2674082 - RNA, 19 nt, Artificial Sequence
  Description of Artificial Sequence: Synthetic oligonucleotide
gugaaaaugguguugcugc

SEQ ID NO: 2674083 - RNA, 19 nt, Artificial Sequence
  Description of Artificial Sequence: Synthetic oligonucleotide
agaucccacacacacacac

SEQ ID NO: 2674084 - RNA, 19 nt, Artificial Sequence
  Description of Artificial Sequence: Synthetic oligonucleotide
uacaucauaugcaugcaug

SEQ ID NO: 2674085 - RNA, 19 nt, Artificial Sequence
  Description of Artificial Sequence: Synthetic oligonucleotide
uguaguaauaaaguucagc

SEQ ID NO: 2674086 - RNA, 19 nt, Artificial Sequence
  Description of Artificial Sequence: Synthetic oligonucleotide
aaugccacaauguccguca

SEQ ID NO: 2674087 - RNA, 19 nt, Artificial Sequence
  Description of Artificial Sequence: Synthetic oligonucleotide
agucauauagugcccgggc

SEQ ID NO: 2674088 - RNA, 19 nt, Artificial Sequence
  Description of Artificial Sequence: Synthetic oligonucleotide
uguacugacagcuuccggu

SEQ ID NO: 2674089 - RNA, 19 nt, Artificial Sequence
  Description of Artificial Sequence: Synthetic oligonucleotide
uacucaucgagucauggga

SEQ ID NO: 2674090 - RNA, 19 nt, Artificial Sequence
  Description of Artificial Sequence: Synthetic oligonucleotide
guuguguauagacucaggc

SEQ ID NO: 2674091 - RNA, 19 nt, Artificial Sequence
  Description of Artificial Sequence: Synthetic oligonucleotide
guaguaauaaaguucagcu

SEQ ID NO: 2674092 - RNA, 19 nt, Artificial Sequence
  Description of Artificial Sequence: Synthetic oligonucleotide
aaaaugguguugcugcaga

SEQ ID NO: 2674093 - RNA, 19 nt, Artificial Sequence
  Description of Artificial Sequence: Synthetic oligonucleotide
auguguaguaauaaaguuc

SEQ ID NO: 2674094 - RNA, 19 nt, Artificial Sequence
  Description of Artificial Sequence: Synthetic oligonucleotide
gucauuuauguccaggcug

SEQ ID NO: 2674095 - RNA, 19 nt, Artificial Sequence
  Description of Artificial Sequence: Synthetic oligonucleotide
augcauauacauguuuugc

SEQ ID NO: 2674096 - RNA, 19 nt, Artificial Sequence
  Description of Artificial Sequence: Synthetic oligonucleotide
uuuauguccaggcugccuc

SEQ ID NO: 2674097 - RNA, 19 nt, Artificial Sequence
  Description of Artificial Sequence: Synthetic oligonucleotide
aucccacacacacacacac

SEQ ID NO: 2674098 - RNA, 19 nt, Artificial Sequence
  Description of Artificial Sequence: Synthetic oligonucleotide
ucauauagugcccgggccc

SEQ ID NO: 2674099 - RNA, 19 nt, Artificial Sequence
  Description of Artificial Sequence: Synthetic oligonucleotide
uuguguauagacucaggca

SEQ ID NO: 2674100 - RNA, 19 nt, Artificial Sequence
  Description of Artificial Sequence: Synthetic oligonucleotide
gacucaggcaugcauauac

SEQ ID NO: 2674101 - RNA, 19 nt, Artificial Sequence
  Description of Artificial Sequence: Synthetic oligonucleotide
gucucuaucuugcaggcag

SEQ ID NO: 2674102 - RNA, 19 nt, Artificial Sequence
  Description of Artificial Sequence: Synthetic oligonucleotide
ucaggcaugcauauacaug

SEQ ID NO: 2674103 - RNA, 19 nt, Artificial Sequence
  Description of Artificial Sequence: Synthetic oligonucleotide
uguuuugcguacacacggg

SEQ ID NO: 2674104 - RNA, 19 nt, Artificial Sequence
  Description of Artificial Sequence: Synthetic oligonucleotide
gucaguaugucuccggugc

SEQ ID NO: 2674105 - RNA, 19 nt, Artificial Sequence
  Description of Artificial Sequence: Synthetic oligonucleotide
uuugcguacacacgggcac

SEQ ID NO: 2674106 - RNA, 19 nt, Artificial Sequence
  Description of Artificial Sequence: Synthetic oligonucleotide
gaaacugaggagauggcug

SEQ ID NO: 2674107 - RNA, 19 nt, Artificial Sequence
  Description of Artificial Sequence: Synthetic oligonucleotide
cauguuuugcguacacacg

SEQ ID NO: 2674108 - RNA, 19 nt, Artificial Sequence
  Description of Artificial Sequence: Synthetic oligonucleotide
ucggaaucccagcucaucc

SEQ ID NO: 2674109 - RNA, 19 nt, Artificial Sequence
  Description of Artificial Sequence: Synthetic oligonucleotide
uauagacucaggcaugcau

SEQ ID NO: 2674110 - RNA, 19 nt, Artificial Sequence
  Description of Artificial Sequence: Synthetic oligonucleotide
acauguacaucauaugcau

SEQ ID NO: 2674111 - RNA, 19 nt, Artificial Sequence
  Description of Artificial Sequence: Synthetic oligonucleotide
cuaucuugcaggcagcuuc

SEQ ID NO: 2674112 - RNA, 19 nt, Artificial Sequence
  Description of Artificial Sequence: Synthetic oligonucleotide
aagaggucccaguuuguug

SEQ ID NO: 2674113 - RNA, 19 nt, Artificial Sequence
  Description of Artificial Sequence: Synthetic oligonucleotide
aauguccgucauuuauguc

SEQ ID NO: 2674114 - RNA, 19 nt, Artificial Sequence
  Description of Artificial Sequence: Synthetic oligonucleotide
auacauguuuugcguacac

SEQ ID NO: 2674115 - RNA, 19 nt, Artificial Sequence
  Description of Artificial Sequence: Synthetic oligonucleotide
cacacacacacacacacac

SEQ ID NO: 2674116 - RNA, 19 nt, Artificial Sequence
  Description of Artificial Sequence: Synthetic oligonucleotide
ucuccggugcaucagggug

SEQ ID NO: 2674117 - RNA, 19 nt, Artificial Sequence
  Description of Artificial Sequence: Synthetic oligonucleotide
uggcauucaucucacugcc

SEQ ID NO: 2674118 - RNA, 19 nt, Artificial Sequence
  Description of Artificial Sequence: Synthetic oligonucleotide
uuuugcguacacacgggca

SEQ ID NO: 2674119 - RNA, 19 nt, Artificial Sequence
  Description of Artificial Sequence: Synthetic oligonucleotide
agaggucccaguuuguugu

SEQ ID NO: 2674120 - RNA, 19 nt, Artificial Sequence
  Description of Artificial Sequence: Synthetic oligonucleotide
acaucauaugcaugcaugu

SEQ ID NO: 2674121 - RNA, 19 nt, Artificial Sequence
  Description of Artificial Sequence: Synthetic oligonucleotide
gauaccgcuggggaggugg

SEQ ID NO: 2674122 - RNA, 19 nt, Artificial Sequence
  Description of Artificial Sequence: Synthetic oligonucleotide
caugcauauacauguuuug

SEQ ID NO: 2674123 - RNA, 19 nt, Artificial Sequence
  Description of Artificial Sequence: Synthetic oligonucleotide
uguauagacucaggcaugc

SEQ ID NO: 2674124 - RNA, 19 nt, Artificial Sequence
  Description of Artificial Sequence: Synthetic oligonucleotide
ucauaugcaugcaugugua

SEQ ID NO: 2674125 - RNA, 19 nt, Artificial Sequence
  Description of Artificial Sequence: Synthetic oligonucleotide
guggcauucaucucacugc

SEQ ID NO: 2674126 - RNA, 19 nt, Artificial Sequence
  Description of Artificial Sequence: Synthetic oligonucleotide
uuuucccuugucucuaucu

SEQ ID NO: 2674127 - RNA, 19 nt, Artificial Sequence
  Description of Artificial Sequence: Synthetic oligonucleotide
uguccgucauuuaugucca

SEQ ID NO: 2674128 - RNA, 19 nt, Artificial Sequence
  Description of Artificial Sequence: Synthetic oligonucleotide
aagucauauagugcccggg

SEQ ID NO: 2674129 - RNA, 19 nt, Artificial Sequence
  Description of Artificial Sequence: Synthetic oligonucleotide
ucaucucacugccaaugcc

SEQ ID NO: 2674130 - RNA, 19 nt, Artificial Sequence
  Description of Artificial Sequence: Synthetic oligonucleotide
acuucggaaucccagcuca

SEQ ID NO: 2674131 - RNA, 19 nt, Artificial Sequence
  Description of Artificial Sequence: Synthetic oligonucleotide
agcuacauaguuggcaggg

SEQ ID NO: 2674132 - RNA, 19 nt, Artificial Sequence
  Description of Artificial Sequence: Synthetic oligonucleotide
aaccauuucuccacuucgg

SEQ ID NO: 2674133 - RNA, 19 nt, Artificial Sequence
  Description of Artificial Sequence: Synthetic oligonucleotide
aguacucaucgagucaugg

SEQ ID NO: 2674134 - RNA, 19 nt, Artificial Sequence
  Description of Artificial Sequence: Synthetic oligonucleotide
ggagcuacauaguuggcag

SEQ ID NO: 2674135 - RNA, 19 nt, Artificial Sequence
  Description of Artificial Sequence: Synthetic oligonucleotide
cacagggucaguaugucuc

SEQ ID NO: 2674136 - RNA, 19 nt, Artificial Sequence
  Description of Artificial Sequence: Synthetic oligonucleotide
uccacggcgguccugguga

SEQ ID NO: 2674137 - RNA, 19 nt, Artificial Sequence
  Description of Artificial Sequence: Synthetic oligonucleotide
uuguuguguagacggccgg

SEQ ID NO: 2674138 - RNA, 19 nt, Artificial Sequence
  Description of Artificial Sequence: Synthetic oligonucleotide
acacacacgaaaauaguug

SEQ ID NO: 2674139 - RNA, 19 nt, Artificial Sequence
  Description of Artificial Sequence: Synthetic oligonucleotide
guacucaucgagucauggg

SEQ ID NO: 2674140 - RNA, 19 nt, Artificial Sequence
  Description of Artificial Sequence: Synthetic oligonucleotide
cuccuggcaguacucaucg

SEQ ID NO: 2674141 - RNA, 19 nt, Artificial Sequence
  Description of Artificial Sequence: Synthetic oligonucleotide
gguguugcugcagauaccg

SEQ ID NO: 2674142 - RNA, 19 nt, Artificial Sequence
  Description of Artificial Sequence: Synthetic oligonucleotide
caugggagcuacauaguug

SEQ ID NO: 2674143 - RNA, 19 nt, Artificial Sequence
  Description of Artificial Sequence: Synthetic oligonucleotide
auucaucucacugccaaug

SEQ ID NO: 2674144 - RNA, 19 nt, Artificial Sequence
  Description of Artificial Sequence: Synthetic oligonucleotide
uaguaauaaaguucagcuu

SEQ ID NO: 2674145 - RNA, 19 nt, Artificial Sequence
  Description of Artificial Sequence: Synthetic oligonucleotide
uccacuucggaaucccagc

SEQ ID NO: 2674146 - RNA, 19 nt, Artificial Sequence
  Description of Artificial Sequence: Synthetic oligonucleotide
gaaaaugguguugcugcag

SEQ ID NO: 2674147 - RNA, 19 nt, Artificial Sequence
  Description of Artificial Sequence: Synthetic oligonucleotide
ugcagauaccgcuggggag

SEQ ID NO: 2674148 - RNA, 19 nt, Artificial Sequence
  Description of Artificial Sequence: Synthetic oligonucleotide
gccaaugccacaauguccg

SEQ ID NO: 2674149 - RNA, 19 nt, Artificial Sequence
  Description of Artificial Sequence: Synthetic oligonucleotide
agcgcacucgcccugccac

SEQ ID NO: 2674150 - RNA, 19 nt, Artificial Sequence
  Description of Artificial Sequence: Synthetic oligonucleotide
uguguagacggccggucca

SEQ ID NO: 2674151 - RNA, 19 nt, Artificial Sequence
  Description of Artificial Sequence: Synthetic oligonucleotide
ugucuccggugcaucaggg

SEQ ID NO: 2674152 - RNA, 19 nt, Artificial Sequence
  Description of Artificial Sequence: Synthetic oligonucleotide
uaucuugcaggcagcuuca

SEQ ID NO: 2674153 - RNA, 19 nt, Artificial Sequence
  Description of Artificial Sequence: Synthetic oligonucleotide
uguuggaaacugaggagau

SEQ ID NO: 2674154 - RNA, 19 nt, Artificial Sequence
  Description of Artificial Sequence: Synthetic oligonucleotide
uucccuugucucuaucuug

SEQ ID NO: 2674155 - RNA, 19 nt, Artificial Sequence
  Description of Artificial Sequence: Synthetic oligonucleotide
uuguguagacggccggucc

SEQ ID NO: 2674156 - RNA, 19 nt, Artificial Sequence
  Description of Artificial Sequence: Synthetic oligonucleotide
uaguuguguauagacucag

SEQ ID NO: 2674157 - RNA, 19 nt, Artificial Sequence
  Description of Artificial Sequence: Synthetic oligonucleotide
aaucccagcucauccuccu

SEQ ID NO: 2674158 - RNA, 19 nt, Artificial Sequence
  Description of Artificial Sequence: Synthetic oligonucleotide
uccuccagagccucaaagu

SEQ ID NO: 2674159 - RNA, 19 nt, Artificial Sequence
  Description of Artificial Sequence: Synthetic oligonucleotide
uugcacagggucaguaugu

SEQ ID NO: 2674160 - RNA, 19 nt, Artificial Sequence
  Description of Artificial Sequence: Synthetic oligonucleotide
gucauauagugcccgggcc

SEQ ID NO: 2674161 - RNA, 19 nt, Artificial Sequence
  Description of Artificial Sequence: Synthetic oligonucleotide
auaugcaugcauguguagu

SEQ ID NO: 2674162 - RNA, 19 nt, Artificial Sequence
  Description of Artificial Sequence: Synthetic oligonucleotide
acgaaaauaguuguguaua

SEQ ID NO: 2674163 - RNA, 19 nt, Artificial Sequence
  Description of Artificial Sequence: Synthetic oligonucleotide
guuuguuguguagacggcc

SEQ ID NO: 2674164 - RNA, 19 nt, Artificial Sequence
  Description of Artificial Sequence: Synthetic oligonucleotide
guuuugcguacacacgggc

SEQ ID NO: 2674165 - RNA, 19 nt, Artificial Sequence
  Description of Artificial Sequence: Synthetic oligonucleotide
ucaugggagcuacauaguu

SEQ ID NO: 2674166 - RNA, 19 nt, Artificial Sequence
  Description of Artificial Sequence: Synthetic oligonucleotide
uauacauguuuugcguaca

SEQ ID NO: 2674167 - RNA, 19 nt, Artificial Sequence
  Description of Artificial Sequence: Synthetic oligonucleotide
gguggcauucaucucacug

SEQ ID NO: 2674168 - RNA, 19 nt, Artificial Sequence
  Description of Artificial Sequence: Synthetic oligonucleotide
cacacacacacacacacga

SEQ ID NO: 2674169 - RNA, 19 nt, Artificial Sequence
  Description of Artificial Sequence: Synthetic oligonucleotide
uguacaucauaugcaugca

SEQ ID NO: 2674170 - RNA, 19 nt, Artificial Sequence
  Description of Artificial Sequence: Synthetic oligonucleotide
acaauguccgucauuuaug

SEQ ID NO: 2674171 - RNA, 19 nt, Artificial Sequence
  Description of Artificial Sequence: Synthetic oligonucleotide
aaaugguguugcugcagau

SEQ ID NO: 2674172 - RNA, 19 nt, Artificial Sequence
  Description of Artificial Sequence: Synthetic oligonucleotide
gagcuacauaguuggcagg

SEQ ID NO: 2674173 - RNA, 19 nt, Artificial Sequence
  Description of Artificial Sequence: Synthetic oligonucleotide
cucaucgagucaugggagc

SEQ ID NO: 2674174 - RNA, 19 nt, Artificial Sequence
  Description of Artificial Sequence: Synthetic oligonucleotide
guuguacugacagcuuccg

SEQ ID NO: 2674175 - RNA, 19 nt, Artificial Sequence
  Description of Artificial Sequence: Synthetic oligonucleotide
aucgagucaugggagcuac

SEQ ID NO: 2674176 - RNA, 19 nt, Artificial Sequence
  Description of Artificial Sequence: Synthetic oligonucleotide
uggaguugcacagggucag

SEQ ID NO: 2674177 - RNA, 19 nt, Artificial Sequence
  Description of Artificial Sequence: Synthetic oligonucleotide
ucucuaucuugcaggcagc

SEQ ID NO: 2674178 - RNA, 19 nt, Artificial Sequence
  Description of Artificial Sequence: Synthetic oligonucleotide
caggcaugcauauacaugu

SEQ ID NO: 2674179 - RNA, 19 nt, Artificial Sequence
  Description of Artificial Sequence: Synthetic oligonucleotide
cauaugcaugcauguguag

SEQ ID NO: 2674180 - RNA, 19 nt, Artificial Sequence
  Description of Artificial Sequence: Synthetic oligonucleotide
augucuccggugcaucagg

SEQ ID NO: 2674181 - RNA, 19 nt, Artificial Sequence
  Description of Artificial Sequence: Synthetic oligonucleotide
agauggguuggagcugucc

SEQ ID NO: 2674182 - RNA, 19 nt, Artificial Sequence
  Description of Artificial Sequence: Synthetic oligonucleotide
uagacucaggcaugcauau

SEQ ID NO: 2674183 - RNA, 19 nt, Artificial Sequence
  Description of Artificial Sequence: Synthetic oligonucleotide
caccaagauggguuggagc

SEQ ID NO: 2674184 - RNA, 19 nt, Artificial Sequence
  Description of Artificial Sequence: Synthetic oligonucleotide
accauuucuccacuucgga

SEQ ID NO: 2674185 - RNA, 19 nt, Artificial Sequence
  Description of Artificial Sequence: Synthetic oligonucleotide
cuccggugcaucagggugg

SEQ ID NO: 2674186 - RNA, 19 nt, Artificial Sequence
  Description of Artificial Sequence: Synthetic oligonucleotide
agggucaguaugucuccgg

SEQ ID NO: 2674187 - RNA, 19 nt, Artificial Sequence
  Description of Artificial Sequence: Synthetic oligonucleotide
aguaugucuccggugcauc

SEQ ID NO: 2674188 - RNA, 19 nt, Artificial Sequence
  Description of Artificial Sequence: Synthetic oligonucleotide
gguacuguuggggacgggg

SEQ ID NO: 2674189 - RNA, 19 nt, Artificial Sequence
  Description of Artificial Sequence: Synthetic oligonucleotide
uaugucuccggugcaucag

SEQ ID NO: 2674190 - RNA, 19 nt, Artificial Sequence
  Description of Artificial Sequence: Synthetic oligonucleotide
uggcaguacucaucgaguc

SEQ ID NO: 2674191 - RNA, 19 nt, Artificial Sequence
  Description of Artificial Sequence: Synthetic oligonucleotide
uacauguuuugcguacaca

SEQ ID NO: 2674192 - RNA, 19 nt, Artificial Sequence
  Description of Artificial Sequence: Synthetic oligonucleotide
auagugcccgggcccagcg

SEQ ID NO: 2674193 - RNA, 19 nt, Artificial Sequence
  Description of Artificial Sequence: Synthetic oligonucleotide
acacgaaaauaguugugua

SEQ ID NO: 2674194 - RNA, 19 nt, Artificial Sequence
  Description of Artificial Sequence: Synthetic oligonucleotide
augcauguguaguaauaaa

SEQ ID NO: 2674195 - RNA, 19 nt, Artificial Sequence
  Description of Artificial Sequence: Synthetic oligonucleotide
aguuguguauagacucagg

SEQ ID NO: 2674196 - RNA, 19 nt, Artificial Sequence
  Description of Artificial Sequence: Synthetic oligonucleotide
cugccaaugccacaauguc

SEQ ID NO: 2674197 - RNA, 19 nt, Artificial Sequence
  Description of Artificial Sequence: Synthetic oligonucleotide
acucaucgagucaugggag

SEQ ID NO: 2674198 - RNA, 19 nt, Artificial Sequence
  Description of Artificial Sequence: Synthetic oligonucleotide
auaguuguguauagacuca

SEQ ID NO: 2674199 - RNA, 19 nt, Artificial Sequence
  Description of Artificial Sequence: Synthetic oligonucleotide
cuguuggaaacugaggaga

SEQ ID NO: 2674200 - RNA, 19 nt, Artificial Sequence
  Description of Artificial Sequence: Synthetic oligonucleotide
caccuggaguugcacaggg

SEQ ID NO: 2674201 - RNA, 19 nt, Artificial Sequence
  Description of Artificial Sequence: Synthetic oligonucleotide
aaaagccuccagccuccug

SEQ ID NO: 2674202 - RNA, 19 nt, Artificial Sequence
  Description of Artificial Sequence: Synthetic oligonucleotide
cauauacauguuuugcgua

SEQ ID NO: 2674203 - RNA, 19 nt, Artificial Sequence
  Description of Artificial Sequence: Synthetic oligonucleotide
caucauaugcaugcaugug

SEQ ID NO: 2674204 - RNA, 19 nt, Artificial Sequence
  Description of Artificial Sequence: Synthetic oligonucleotide
uguccaggacuucaaccau

SEQ ID NO: 2674205 - RNA, 19 nt, Artificial Sequence
  Description of Artificial Sequence: Synthetic oligonucleotide
ucaucgagucaugggagcu

SEQ ID NO: 2674206 - RNA, 19 nt, Artificial Sequence
  Description of Artificial Sequence: Synthetic oligonucleotide
gcagauaccgcuggggagg

SEQ ID NO: 2674207 - RNA, 19 nt, Artificial Sequence
  Description of Artificial Sequence: Synthetic oligonucleotide
guugcugcagauaccgcug

SEQ ID NO: 2674208 - RNA, 19 nt, Artificial Sequence
  Description of Artificial Sequence: Synthetic oligonucleotide
cuuagaucccacacacaca

SEQ ID NO: 2674209 - RNA, 19 nt, Artificial Sequence
  Description of Artificial Sequence: Synthetic oligonucleotide
aguugcacagggucaguau

SEQ ID NO: 2674210 - RNA, 19 nt, Artificial Sequence
  Description of Artificial Sequence: Synthetic oligonucleotide
ggugguacuguuggggacg

SEQ ID NO: 2674211 - RNA, 19 nt, Artificial Sequence
  Description of Artificial Sequence: Synthetic oligonucleotide
caggguggcauucaucuca

SEQ ID NO: 2674212 - RNA, 19 nt, Artificial Sequence
  Description of Artificial Sequence: Synthetic oligonucleotide
uacuguuggggacggggaa

SEQ ID NO: 2674213 - RNA, 19 nt, Artificial Sequence
  Description of Artificial Sequence: Synthetic oligonucleotide
caggacuucaaccauuucu

SEQ ID NO: 2674214 - RNA, 19 nt, Artificial Sequence
  Description of Artificial Sequence: Synthetic oligonucleotide
guuggagcuguccaggacu

SEQ ID NO: 2674215 - RNA, 19 nt, Artificial Sequence
  Description of Artificial Sequence: Synthetic oligonucleotide
cacacacgaaaauaguugu

SEQ ID NO: 2674216 - RNA, 19 nt, Artificial Sequence
  Description of Artificial Sequence: Synthetic oligonucleotide
ccgucauuuauguccaggc

SEQ ID NO: 2674217 - RNA, 19 nt, Artificial Sequence
  Description of Artificial Sequence: Synthetic oligonucleotide
ccuggcaguacucaucgag

SEQ ID NO: 2674218 - RNA, 19 nt, Artificial Sequence
  Description of Artificial Sequence: Synthetic oligonucleotide
auuuauguccaggcugccu

SEQ ID NO: 2674219 - RNA, 19 nt, Artificial Sequence
  Description of Artificial Sequence: Synthetic oligonucleotide
acacacacacacgaaaaua

SEQ ID NO: 2674220 - RNA, 19 nt, Artificial Sequence
  Description of Artificial Sequence: Synthetic oligonucleotide
cgaaaauaguuguguauag

SEQ ID NO: 2674221 - RNA, 19 nt, Artificial Sequence
  Description of Artificial Sequence: Synthetic oligonucleotide
gcuggugguacuguugggg

SEQ ID NO: 2674222 - RNA, 19 nt, Artificial Sequence
  Description of Artificial Sequence: Synthetic oligonucleotide
cauuucuccacuucggaau

SEQ ID NO: 2674223 - RNA, 19 nt, Artificial Sequence
  Description of Artificial Sequence: Synthetic oligonucleotide
ucuccacuucggaauccca

SEQ ID NO: 2674224 - RNA, 19 nt, Artificial Sequence
  Description of Artificial Sequence: Synthetic oligonucleotide
acacacacacacacacacg

SEQ ID NO: 2674225 - RNA, 19 nt, Artificial Sequence
  Description of Artificial Sequence: Synthetic oligonucleotide
ucccacacacacacacaca

SEQ ID NO: 2674226 - RNA, 19 nt, Artificial Sequence
  Description of Artificial Sequence: Synthetic oligonucleotide
uguuguguagacggccggu

SEQ ID NO: 2674227 - RNA, 19 nt, Artificial Sequence
  Description of Artificial Sequence: Synthetic oligonucleotide
agugcccgggcccagcgca

SEQ ID NO: 2674228 - RNA, 19 nt, Artificial Sequence
  Description of Artificial Sequence: Synthetic oligonucleotide
ccuguuggaaacugaggag

SEQ ID NO: 2674229 - RNA, 19 nt, Artificial Sequence
  Description of Artificial Sequence: Synthetic oligonucleotide
uggugguacuguuggggac

SEQ ID NO: 2674230 - RNA, 19 nt, Artificial Sequence
  Description of Artificial Sequence: Synthetic oligonucleotide
cccacacacacacacacac

SEQ ID NO: 2674231 - RNA, 19 nt, Artificial Sequence
  Description of Artificial Sequence: Synthetic oligonucleotide
cacacacacacacacgaaa

SEQ ID NO: 2674232 - RNA, 19 nt, Artificial Sequence
  Description of Artificial Sequence: Synthetic oligonucleotide
agagccucaaagucauaua

SEQ ID NO: 2674233 - RNA, 19 nt, Artificial Sequence
  Description of Artificial Sequence: Synthetic oligonucleotide
guguauagacucaggcaug

SEQ ID NO: 2674234 - RNA, 19 nt, Artificial Sequence
  Description of Artificial Sequence: Synthetic oligonucleotide
ggacuucaaccauuucucc

SEQ ID NO: 2674235 - RNA, 19 nt, Artificial Sequence
  Description of Artificial Sequence: Synthetic oligonucleotide
gguuguacugacagcuucc

SEQ ID NO: 2674236 - RNA, 19 nt, Artificial Sequence
  Description of Artificial Sequence: Synthetic oligonucleotide
uccaccaagauggguugga

SEQ ID NO: 2674237 - RNA, 19 nt, Artificial Sequence
  Description of Artificial Sequence: Synthetic oligonucleotide
acacacacacacacgaaaa

SEQ ID NO: 2674238 - RNA, 19 nt, Artificial Sequence
  Description of Artificial Sequence: Synthetic oligonucleotide
acacacgaaaauaguugug

SEQ ID NO: 2674239 - RNA, 19 nt, Artificial Sequence
  Description of Artificial Sequence: Synthetic oligonucleotide
caauguccgucauuuaugu

SEQ ID NO: 2674240 - RNA, 19 nt, Artificial Sequence
  Description of Artificial Sequence: Synthetic oligonucleotide
guaugucuccggugcauca

SEQ ID NO: 2674241 - RNA, 19 nt, Artificial Sequence
  Description of Artificial Sequence: Synthetic oligonucleotide
gcauauacauguuuugcgu

SEQ ID NO: 2674242 - RNA, 19 nt, Artificial Sequence
  Description of Artificial Sequence: Synthetic oligonucleotide
aggguggcauucaucucac

SEQ ID NO: 2674243 - RNA, 19 nt, Artificial Sequence
  Description of Artificial Sequence: Synthetic oligonucleotide
uagaucccacacacacaca

SEQ ID NO: 2674244 - RNA, 19 nt, Artificial Sequence
  Description of Artificial Sequence: Synthetic oligonucleotide
ucgcccugccaccuggagu

SEQ ID NO: 2674245 - RNA, 19 nt, Artificial Sequence
  Description of Artificial Sequence: Synthetic oligonucleotide
cucacugccaaugccacaa

SEQ ID NO: 2674246 - RNA, 19 nt, Artificial Sequence
  Description of Artificial Sequence: Synthetic oligonucleotide
agacggccgguccaccaag

SEQ ID NO: 2674247 - RNA, 19 nt, Artificial Sequence
  Description of Artificial Sequence: Synthetic oligonucleotide
caucaggguggcauucauc

SEQ ID NO: 2674248 - RNA, 19 nt, Artificial Sequence
  Description of Artificial Sequence: Synthetic oligonucleotide
cacacgaaaauaguugugu

SEQ ID NO: 2674249 - RNA, 19 nt, Artificial Sequence
  Description of Artificial Sequence: Synthetic oligonucleotide
acgggcacacauguacauc

SEQ ID NO: 2674250 - RNA, 19 nt, Artificial Sequence
  Description of Artificial Sequence: Synthetic oligonucleotide
gcauucaucucacugccaa

SEQ ID NO: 2674251 - RNA, 19 nt, Artificial Sequence
  Description of Artificial Sequence: Synthetic oligonucleotide
uagacggccgguccaccaa

SEQ ID NO: 2674252 - RNA, 19 nt, Artificial Sequence
  Description of Artificial Sequence: Synthetic oligonucleotide
cugcagauaccgcugggga

SEQ ID NO: 2674253 - RNA, 19 nt, Artificial Sequence
  Description of Artificial Sequence: Synthetic oligonucleotide
aacugaggagauggcugcu

SEQ ID NO: 2674254 - RNA, 19 nt, Artificial Sequence
  Description of Artificial Sequence: Synthetic oligonucleotide
uauagugcccgggcccagc

SEQ ID NO: 2674255 - RNA, 19 nt, Artificial Sequence
  Description of Artificial Sequence: Synthetic oligonucleotide
uucggaaucccagcucauc

SEQ ID NO: 2674256 - RNA, 19 nt, Artificial Sequence
  Description of Artificial Sequence: Synthetic oligonucleotide
cacaauguccgucauuuau

SEQ ID NO: 2674257 - RNA, 19 nt, Artificial Sequence
  Description of Artificial Sequence: Synthetic oligonucleotide
agggaagaggucccaguuu

SEQ ID NO: 2674258 - RNA, 19 nt, Artificial Sequence
  Description of Artificial Sequence: Synthetic oligonucleotide
guguaguaauaaaguucag

SEQ ID NO: 2674259 - RNA, 19 nt, Artificial Sequence
  Description of Artificial Sequence: Synthetic oligonucleotide
ggucaguaugucuccggug

SEQ ID NO: 2674260 - RNA, 19 nt, Artificial Sequence
  Description of Artificial Sequence: Synthetic oligonucleotide
cacgaaaauaguuguguau

SEQ ID NO: 2674261 - RNA, 19 nt, Artificial Sequence
  Description of Artificial Sequence: Synthetic oligonucleotide
gcugcagauaccgcugggg

SEQ ID NO: 2674262 - RNA, 19 nt, Artificial Sequence
  Description of Artificial Sequence: Synthetic oligonucleotide
cauuuauguccaggcugcc

SEQ ID NO: 2674263 - RNA, 19 nt, Artificial Sequence
  Description of Artificial Sequence: Synthetic oligonucleotide
cacucgcccugccaccugg

SEQ ID NO: 2674264 - RNA, 19 nt, Artificial Sequence
  Description of Artificial Sequence: Synthetic oligonucleotide
ugucucuaucuugcaggca

SEQ ID NO: 2674265 - RNA, 19 nt, Artificial Sequence
  Description of Artificial Sequence: Synthetic oligonucleotide
ccuugucucuaucuugcag

SEQ ID NO: 2674266 - RNA, 19 nt, Artificial Sequence
  Description of Artificial Sequence: Synthetic oligonucleotide
gcgguccuggugaaaaugg

SEQ ID NO: 2674267 - RNA, 19 nt, Artificial Sequence
  Description of Artificial Sequence: Synthetic oligonucleotide
ggaaucccagcucauccuc

SEQ ID NO: 2674268 - RNA, 19 nt, Artificial Sequence
  Description of Artificial Sequence: Synthetic oligonucleotide
cacuucggaaucccagcuc

SEQ ID NO: 2674269 - RNA, 19 nt, Artificial Sequence
  Description of Artificial Sequence: Synthetic oligonucleotide
uggcccuguuggaaacuga

SEQ ID NO: 2674270 - RNA, 19 nt, Artificial Sequence
  Description of Artificial Sequence: Synthetic oligonucleotide
gaucccacacacacacaca

SEQ ID NO: 2674271 - RNA, 19 nt, Artificial Sequence
  Description of Artificial Sequence: Synthetic oligonucleotide
ugcacagggucaguauguc

SEQ ID NO: 2674272 - RNA, 19 nt, Artificial Sequence
  Description of Artificial Sequence: Synthetic oligonucleotide
gugguacuguuggggacgg

SEQ ID NO: 2674273 - RNA, 19 nt, Artificial Sequence
  Description of Artificial Sequence: Synthetic oligonucleotide
caaugccacaauguccguc

SEQ ID NO: 2674274 - RNA, 19 nt, Artificial Sequence
  Description of Artificial Sequence: Synthetic oligonucleotide
cauauagugcccgggccca

SEQ ID NO: 2674275 - RNA, 19 nt, Artificial Sequence
  Description of Artificial Sequence: Synthetic oligonucleotide
cccaguuuguuguguagac

SEQ ID NO: 2674276 - RNA, 19 nt, Artificial Sequence
  Description of Artificial Sequence: Synthetic oligonucleotide
guuguguagacggccgguc

SEQ ID NO: 2674277 - RNA, 19 nt, Artificial Sequence
  Description of Artificial Sequence: Synthetic oligonucleotide
gcauguguaguaauaaagu

SEQ ID NO: 2674278 - RNA, 19 nt, Artificial Sequence
  Description of Artificial Sequence: Synthetic oligonucleotide
cacacacacgaaaauaguu

SEQ ID NO: 2674279 - RNA, 19 nt, Artificial Sequence
  Description of Artificial Sequence: Synthetic oligonucleotide
uguagacggccgguccacc

SEQ ID NO: 2674280 - RNA, 19 nt, Artificial Sequence
  Description of Artificial Sequence: Synthetic oligonucleotide
auaccgcuggggagguggc

SEQ ID NO: 2674281 - RNA, 19 nt, Artificial Sequence
  Description of Artificial Sequence: Synthetic oligonucleotide
cagggucaguaugucuccg

SEQ ID NO: 2674282 - RNA, 19 nt, Artificial Sequence
  Description of Artificial Sequence: Synthetic oligonucleotide
guagacggccgguccacca

SEQ ID NO: 2674283 - RNA, 19 nt, Artificial Sequence
  Description of Artificial Sequence: Synthetic oligonucleotide
uccggugcaucaggguggc

SEQ ID NO: 2674284 - RNA, 19 nt, Artificial Sequence
  Description of Artificial Sequence: Synthetic oligonucleotide
ggaaggaggguuguacuga

SEQ ID NO: 2674285 - RNA, 19 nt, Artificial Sequence
  Description of Artificial Sequence: Synthetic oligonucleotide
aaggaggguuguacugaca

SEQ ID NO: 2674286 - RNA, 19 nt, Artificial Sequence
  Description of Artificial Sequence: Synthetic oligonucleotide
acucaggcaugcauauaca

SEQ ID NO: 2674287 - RNA, 19 nt, Artificial Sequence
  Description of Artificial Sequence: Synthetic oligonucleotide
caguacucaucgagucaug

SEQ ID NO: 2674288 - RNA, 19 nt, Artificial Sequence
  Description of Artificial Sequence: Synthetic oligonucleotide
ggcccuguuggaaacugag

SEQ ID NO: 2674289 - RNA, 19 nt, Artificial Sequence
  Description of Artificial Sequence: Synthetic oligonucleotide
aagauggguuggagcuguc

SEQ ID NO: 2674290 - RNA, 19 nt, Artificial Sequence
  Description of Artificial Sequence: Synthetic oligonucleotide
gggagcuacauaguuggca

SEQ ID NO: 2674291 - RNA, 19 nt, Artificial Sequence
  Description of Artificial Sequence: Synthetic oligonucleotide
ucgagucaugggagcuaca

SEQ ID NO: 2674292 - RNA, 19 nt, Artificial Sequence
  Description of Artificial Sequence: Synthetic oligonucleotide
ggcaguacucaucgaguca

SEQ ID NO: 2674293 - RNA, 19 nt, Artificial Sequence
  Description of Artificial Sequence: Synthetic oligonucleotide
uguggcccuguuggaaacu

SEQ ID NO: 2674294 - RNA, 19 nt, Artificial Sequence
  Description of Artificial Sequence: Synthetic oligonucleotide
acacacacacacacacaca

SEQ ID NO: 2674295 - RNA, 19 nt, Artificial Sequence
  Description of Artificial Sequence: Synthetic oligonucleotide
ccaggcugccuccacggcg

SEQ ID NO: 2674296 - RNA, 19 nt, Artificial Sequence
  Description of Artificial Sequence: Synthetic oligonucleotide
cuggcaguacucaucgagu

SEQ ID NO: 2674297 - RNA, 19 nt, Artificial Sequence
  Description of Artificial Sequence: Synthetic oligonucleotide
guacuguuggggacgggga

SEQ ID NO: 2674298 - RNA, 19 nt, Artificial Sequence
  Description of Artificial Sequence: Synthetic oligonucleotide
guccaccaagauggguugg

SEQ ID NO: 2674299 - RNA, 19 nt, Artificial Sequence
  Description of Artificial Sequence: Synthetic oligonucleotide
uagugcccgggcccagcgc

SEQ ID NO: 2674300 - RNA, 19 nt, Artificial Sequence
  Description of Artificial Sequence: Synthetic oligonucleotide
aucuuagaucccacacaca

SEQ ID NO: 2674301 - RNA, 19 nt, Artificial Sequence
  Description of Artificial Sequence: Synthetic oligonucleotide
guggcccuguuggaaacug

SEQ ID NO: 2674302 - RNA, 19 nt, Artificial Sequence
  Description of Artificial Sequence: Synthetic oligonucleotide
acggcgguccuggugaaaa

SEQ ID NO: 2674303 - RNA, 19 nt, Artificial Sequence
  Description of Artificial Sequence: Synthetic oligonucleotide
guaauaaaguucagcuuuu

SEQ ID NO: 2674304 - RNA, 19 nt, Artificial Sequence
  Description of Artificial Sequence: Synthetic oligonucleotide
cucaggcaugcauauacau

SEQ ID NO: 2674305 - RNA, 19 nt, Artificial Sequence
  Description of Artificial Sequence: Synthetic oligonucleotide
ggagcuguccaggacuuca

SEQ ID NO: 2674306 - RNA, 19 nt, Artificial Sequence
  Description of Artificial Sequence: Synthetic oligonucleotide
auauagugcccgggcccag

SEQ ID NO: 2674307 - RNA, 19 nt, Artificial Sequence
  Description of Artificial Sequence: Synthetic oligonucleotide
uccuggcaguacucaucga

SEQ ID NO: 2674308 - RNA, 19 nt, Artificial Sequence
  Description of Artificial Sequence: Synthetic oligonucleotide
gaguugcacagggucagua

SEQ ID NO: 2674309 - RNA, 19 nt, Artificial Sequence
  Description of Artificial Sequence: Synthetic oligonucleotide
ggcgguccuggugaaaaug

SEQ ID NO: 2674310 - RNA, 19 nt, Artificial Sequence
  Description of Artificial Sequence: Synthetic oligonucleotide
gcccuguuggaaacugagg

SEQ ID NO: 2674311 - RNA, 19 nt, Artificial Sequence
  Description of Artificial Sequence: Synthetic oligonucleotide
guauagacucaggcaugca

SEQ ID NO: 2674312 - RNA, 19 nt, Artificial Sequence
  Description of Artificial Sequence: Synthetic oligonucleotide
guguagacggccgguccac

SEQ ID NO: 2674313 - RNA, 19 nt, Artificial Sequence
  Description of Artificial Sequence: Synthetic oligonucleotide
cuccacggcgguccuggug

SEQ ID NO: 2674314 - RNA, 19 nt, Artificial Sequence
  Description of Artificial Sequence: Synthetic oligonucleotide
acacacacacacacacgaa

SEQ ID NO: 2674315 - RNA, 19 nt, Artificial Sequence
  Description of Artificial Sequence: Synthetic oligonucleotide
cacacacacacacgaaaau

SEQ ID NO: 2674316 - RNA, 19 nt, Artificial Sequence
  Description of Artificial Sequence: Synthetic oligonucleotide
gaagaggucccaguuuguu

SEQ ID NO: 2674317 - RNA, 19 nt, Artificial Sequence
  Description of Artificial Sequence: Synthetic oligonucleotide
gccuccacggcgguccugg

SEQ ID NO: 2674318 - RNA, 19 nt, Artificial Sequence
  Description of Artificial Sequence: Synthetic oligonucleotide
guccgucauuuauguccag

SEQ ID NO: 2674319 - RNA, 19 nt, Artificial Sequence
  Description of Artificial Sequence: Synthetic oligonucleotide
agccuccuggcaguacuca

SEQ ID NO: 2674320 - RNA, 19 nt, Artificial Sequence
  Description of Artificial Sequence: Synthetic oligonucleotide
cagagccucaaagucauau

SEQ ID NO: 2674321 - RNA, 19 nt, Artificial Sequence
  Description of Artificial Sequence: Synthetic oligonucleotide
cgggcacacauguacauca

SEQ ID NO: 2674322 - RNA, 19 nt, Artificial Sequence
  Description of Artificial Sequence: Synthetic oligonucleotide
gcuggugcuggugguacug

SEQ ID NO: 2674323 - RNA, 19 nt, Artificial Sequence
  Description of Artificial Sequence: Synthetic oligonucleotide
ccauuucuccacuucggaa

SEQ ID NO: 2674324 - RNA, 19 nt, Artificial Sequence
  Description of Artificial Sequence: Synthetic oligonucleotide
acggccgguccaccaagau

SEQ ID NO: 2674325 - RNA, 19 nt, Artificial Sequence
  Description of Artificial Sequence: Synthetic oligonucleotide
uggcagggaagagguccca

SEQ ID NO: 2674326 - RNA, 19 nt, Artificial Sequence
  Description of Artificial Sequence: Synthetic oligonucleotide
gcaugcauauacauguuuu

SEQ ID NO: 2674327 - RNA, 19 nt, Artificial Sequence
  Description of Artificial Sequence: Synthetic oligonucleotide
ggucccaguuuguugugua

SEQ ID NO: 2674328 - RNA, 19 nt, Artificial Sequence
  Description of Artificial Sequence: Synthetic oligonucleotide
gcaugcauguguaguaaua

SEQ ID NO: 2674329 - RNA, 19 nt, Artificial Sequence
  Description of Artificial Sequence: Synthetic oligonucleotide
ggggaaggaggguuguacu

SEQ ID NO: 2674330 - RNA, 19 nt, Artificial Sequence
  Description of Artificial Sequence: Synthetic oligonucleotide
gcaguacucaucgagucau

SEQ ID NO: 2674331 - RNA, 19 nt, Artificial Sequence
  Description of Artificial Sequence: Synthetic oligonucleotide
cauucaucucacugccaau

SEQ ID NO: 2674332 - RNA, 19 nt, Artificial Sequence
  Description of Artificial Sequence: Synthetic oligonucleotide
ggcaugcauauacauguuu

SEQ ID NO: 2674333 - RNA, 19 nt, Artificial Sequence
  Description of Artificial Sequence: Synthetic oligonucleotide
ccaagauggguuggagcug

SEQ ID NO: 2674334 - RNA, 19 nt, Artificial Sequence
  Description of Artificial Sequence: Synthetic oligonucleotide
gggucaguaugucuccggu

SEQ ID NO: 2674335 - RNA, 19 nt, Artificial Sequence
  Description of Artificial Sequence: Synthetic oligonucleotide
ggacggggaaggaggguug

SEQ ID NO: 2674336 - RNA, 19 nt, Artificial Sequence
  Description of Artificial Sequence: Synthetic oligonucleotide
agacucaggcaugcauaua

SEQ ID NO: 2674337 - RNA, 19 nt, Artificial Sequence
  Description of Artificial Sequence: Synthetic oligonucleotide
aggcaugcauauacauguu

SEQ ID NO: 2674338 - RNA, 19 nt, Artificial Sequence
  Description of Artificial Sequence: Synthetic oligonucleotide
uggagcuguccaggacuuc

SEQ ID NO: 2674339 - RNA, 19 nt, Artificial Sequence
  Description of Artificial Sequence: Synthetic oligonucleotide
gacggccgguccaccaaga

SEQ ID NO: 2674340 - RNA, 19 nt, Artificial Sequence
  Description of Artificial Sequence: Synthetic oligonucleotide
cagggaagaggucccaguu

SEQ ID NO: 2674341 - RNA, 19 nt, Artificial Sequence
  Description of Artificial Sequence: Synthetic oligonucleotide
uaccgcuggggagguggcu

SEQ ID NO: 2674342 - RNA, 19 nt, Artificial Sequence
  Description of Artificial Sequence: Synthetic oligonucleotide
gucuccggugcaucagggu

SEQ ID NO: 2674343 - RNA, 19 nt, Artificial Sequence
  Description of Artificial Sequence: Synthetic oligonucleotide
caucgagucaugggagcua

SEQ ID NO: 2674344 - RNA, 19 nt, Artificial Sequence
  Description of Artificial Sequence: Synthetic oligonucleotide
ccacacacacacacacaca

SEQ ID NO: 2674345 - RNA, 19 nt, Artificial Sequence
  Description of Artificial Sequence: Synthetic oligonucleotide
cacgggcacacauguacau

SEQ ID NO: 2674346 - RNA, 19 nt, Artificial Sequence
  Description of Artificial Sequence: Synthetic oligonucleotide
gcagggaagaggucccagu

SEQ ID NO: 2674347 - RNA, 19 nt, Artificial Sequence
  Description of Artificial Sequence: Synthetic oligonucleotide
gacggggaaggaggguugu

SEQ ID NO: 2674348 - RNA, 19 nt, Artificial Sequence
  Description of Artificial Sequence: Synthetic oligonucleotide
agauaccgcuggggaggug

SEQ ID NO: 2674349 - RNA, 19 nt, Artificial Sequence
  Description of Artificial Sequence: Synthetic oligonucleotide
ugcccgggcccagcgcacu

SEQ ID NO: 2674350 - RNA, 19 nt, Artificial Sequence
  Description of Artificial Sequence: Synthetic oligonucleotide
gcgcacucgcccugccacc

SEQ ID NO: 2674351 - RNA, 19 nt, Artificial Sequence
  Description of Artificial Sequence: Synthetic oligonucleotide
cuucggaaucccagcucau

SEQ ID NO: 2674352 - RNA, 19 nt, Artificial Sequence
  Description of Artificial Sequence: Synthetic oligonucleotide
ccaggacuucaaccauuuc

SEQ ID NO: 2674353 - RNA, 19 nt, Artificial Sequence
  Description of Artificial Sequence: Synthetic oligonucleotide
ugccuccacggcgguccug

SEQ ID NO: 2674354 - RNA, 19 nt, Artificial Sequence
  Description of Artificial Sequence: Synthetic oligonucleotide
cagcgcacucgcccugcca

SEQ ID NO: 2674355 - RNA, 19 nt, Artificial Sequence
  Description of Artificial Sequence: Synthetic oligonucleotide
gccgguccaccaagauggg

SEQ ID NO: 2674356 - RNA, 19 nt, Artificial Sequence
  Description of Artificial Sequence: Synthetic oligonucleotide
acucgcccugccaccugga

SEQ ID NO: 2674357 - RNA, 19 nt, Artificial Sequence
  Description of Artificial Sequence: Synthetic oligonucleotide
ccacuucggaaucccagcu

SEQ ID NO: 2674358 - RNA, 19 nt, Artificial Sequence
  Description of Artificial Sequence: Synthetic oligonucleotide
cgucauuuauguccaggcu

SEQ ID NO: 2674359 - RNA, 19 nt, Artificial Sequence
  Description of Artificial Sequence: Synthetic oligonucleotide
gcaucaggguggcauucau

SEQ ID NO: 2674360 - RNA, 19 nt, Artificial Sequence
  Description of Artificial Sequence: Synthetic oligonucleotide
gcacucgcccugccaccug

SEQ ID NO: 2674361 - RNA, 19 nt, Artificial Sequence
  Description of Artificial Sequence: Synthetic oligonucleotide
gggacggggaaggaggguu

SEQ ID NO: 2674362 - RNA, 19 nt, Artificial Sequence
  Description of Artificial Sequence: Synthetic oligonucleotide
ccgggcccagcgcacucgc

SEQ ID NO: 2674363 - RNA, 19 nt, Artificial Sequence
  Description of Artificial Sequence: Synthetic oligonucleotide
ccagcgcacucgcccugcc

SEQ ID NO: 2674364 - RNA, 19 nt, Artificial Sequence
  Description of Artificial Sequence: Synthetic oligonucleotide
cagauaccgcuggggaggu

SEQ ID NO: 2674365 - RNA, 19 nt, Artificial Sequence
  Description of Artificial Sequence: Synthetic oligonucleotide
gcaggcagcuucagacaaa

SEQ ID NO: 2674366 - RNA, 19 nt, Artificial Sequence
  Description of Artificial Sequence: Synthetic oligonucleotide
gcccagcgcacucgcccug

SEQ ID NO: 2674367 - RNA, 19 nt, Artificial Sequence
  Description of Artificial Sequence: Synthetic oligonucleotide
cguacacacgggcacacau

SEQ ID NO: 2674368 - RNA, 19 nt, Artificial Sequence
  Description of Artificial Sequence: Synthetic oligonucleotide
cccagcgcacucgcccugc

SEQ ID NO: 2674369 - RNA, 19 nt, Artificial Sequence
  Description of Artificial Sequence: Synthetic oligonucleotide
gugcccgggcccagcgcac

SEQ ID NO: 2674370 - RNA, 19 nt, Artificial Sequence
  Description of Artificial Sequence: Synthetic oligonucleotide
ggcccagcgcacucgcccu

SEQ ID NO: 2674371 - RNA, 19 nt, Artificial Sequence
  Description of Artificial Sequence: Synthetic oligonucleotide
cccgggcccagcgcacucg

SEQ ID NO: 2674372 - RNA, 19 nt, Artificial Sequence
  Description of Artificial Sequence: Synthetic oligonucleotide
ccacaauguccgucauuua

SEQ ID NO: 2674373 - RNA, 19 nt, Artificial Sequence
  Description of Artificial Sequence: Synthetic oligonucleotide
gcguacacacgggcacaca

SEQ ID NO: 2674374 - RNA, 19 nt, Artificial Sequence
  Description of Artificial Sequence: Synthetic oligonucleotide
ggaguugcacagggucagu

SEQ ID NO: 2674375 - RNA, 19 nt, Artificial Sequence
  Description of Artificial Sequence: Synthetic oligonucleotide
cgagucaugggagcuacau

SEQ ID NO: 2674376 - RNA, 19 nt, Artificial Sequence
  Description of Artificial Sequence: Synthetic oligonucleotide
cgcccugccaccuggaguu

SEQ ID NO: 2674377 - RNA, 19 nt, Artificial Sequence
  Description of Artificial Sequence: Synthetic oligonucleotide
cacggcgguccuggugaaa

SEQ ID NO: 2674378 - RNA, 19 nt, Artificial Sequence
  Description of Artificial Sequence: Synthetic oligonucleotide
ggguggcauucaucucacu

SEQ ID NO: 2674379 - RNA, 19 nt, Artificial Sequence
  Description of Artificial Sequence: Synthetic oligonucleotide
ccaaugccacaauguccgu

SEQ ID NO: 2674380 - RNA, 19 nt, Artificial Sequence
  Description of Artificial Sequence: Synthetic oligonucleotide
gcccugccaccuggaguug

SEQ ID NO: 2674381 - RNA, 19 nt, Artificial Sequence
  Description of Artificial Sequence: Synthetic oligonucleotide
gcccgggcccagcgcacuc

SEQ ID NO: 2674382 - RNA, 19 nt, Artificial Sequence
  Description of Artificial Sequence: Synthetic oligonucleotide
cggugcaucaggguggcau

SEQ ID NO: 2674383 - RNA, 19 nt, Artificial Sequence
  Description of Artificial Sequence: Synthetic oligonucleotide
cugccuccacggcgguccu

SEQ ID NO: 2674384 - RNA, 19 nt, Artificial Sequence
  Description of Artificial Sequence: Synthetic oligonucleotide
ggggacggggaaggagggu

SEQ ID NO: 2674385 - RNA, 19 nt, Artificial Sequence
  Description of Artificial Sequence: Synthetic oligonucleotide
ccacggcgguccuggugaa

SEQ ID NO: 2674386 - RNA, 19 nt, Artificial Sequence
  Description of Artificial Sequence: Synthetic oligonucleotide
cgcacucgcccugccaccu

SEQ ID NO: 2674387 - RNA, 19 nt, Artificial Sequence
  Description of Artificial Sequence: Synthetic oligonucleotide
ccuccacggcgguccuggu

SEQ ID NO: 2674388 - RNA, 19 nt, Artificial Sequence
  Description of Artificial Sequence: Synthetic oligonucleotide
ccggugcaucaggguggca

SEQ ID NO: 2674389 - RNA, 19 nt, Artificial Sequence
  Description of Artificial Sequence: Synthetic oligonucleotide
aauuuuauugaagaguauc

SEQ ID NO: 2674390 - RNA, 19 nt, Artificial Sequence
  Description of Artificial Sequence: Synthetic oligonucleotide
uuauugaagaguaucagga

SEQ ID NO: 2674391 - RNA, 19 nt, Artificial Sequence
  Description of Artificial Sequence: Synthetic oligonucleotide
agaaaggagacccaagagc

SEQ ID NO: 2674392 - RNA, 19 nt, Artificial Sequence
  Description of Artificial Sequence: Synthetic oligonucleotide
uuuauugaagaguaucagg

SEQ ID NO: 2674393 - RNA, 19 nt, Artificial Sequence
  Description of Artificial Sequence: Synthetic oligonucleotide
uaguaacuggaccagaugg

SEQ ID NO: 2674394 - RNA, 19 nt, Artificial Sequence
  Description of Artificial Sequence: Synthetic oligonucleotide
uccaucacaaacaggagcg

SEQ ID NO: 2674395 - RNA, 19 nt, Artificial Sequence
  Description of Artificial Sequence: Synthetic oligonucleotide
ugauuaaugacuuuauuuc

SEQ ID NO: 2674396 - RNA, 19 nt, Artificial Sequence
  Description of Artificial Sequence: Synthetic oligonucleotide
ucaauuuuauugaagagua

SEQ ID NO: 2674397 - RNA, 19 nt, Artificial Sequence
  Description of Artificial Sequence: Synthetic oligonucleotide
agaggcauccaucacaaac

SEQ ID NO: 2674398 - RNA, 19 nt, Artificial Sequence
  Description of Artificial Sequence: Synthetic oligonucleotide
gauuaaugacuuuauuucc

SEQ ID NO: 2674399 - RNA, 19 nt, Artificial Sequence
  Description of Artificial Sequence: Synthetic oligonucleotide
agcaaugaugucuggaagc

SEQ ID NO: 2674400 - RNA, 19 nt, Artificial Sequence
  Description of Artificial Sequence: Synthetic oligonucleotide
aucccuggcacuuauuucc

SEQ ID NO: 2674401 - RNA, 19 nt, Artificial Sequence
  Description of Artificial Sequence: Synthetic oligonucleotide
gacuuuauuuccuccacgg

SEQ ID NO: 2674402 - RNA, 19 nt, Artificial Sequence
  Description of Artificial Sequence: Synthetic oligonucleotide
acaaacaggagcgaguggc

SEQ ID NO: 2674403 - RNA, 19 nt, Artificial Sequence
  Description of Artificial Sequence: Synthetic oligonucleotide
aaugacuuuauuuccucca

SEQ ID NO: 2674404 - RNA, 19 nt, Artificial Sequence
  Description of Artificial Sequence: Synthetic oligonucleotide
ucagcuauaauccucuguc

SEQ ID NO: 2674405 - RNA, 19 nt, Artificial Sequence
  Description of Artificial Sequence: Synthetic oligonucleotide
agauucaccugucucuucc

SEQ ID NO: 2674406 - RNA, 19 nt, Artificial Sequence
  Description of Artificial Sequence: Synthetic oligonucleotide
uugaagaguaucaggacug

SEQ ID NO: 2674407 - RNA, 19 nt, Artificial Sequence
  Description of Artificial Sequence: Synthetic oligonucleotide
uuuguguugcuccuggagc

SEQ ID NO: 2674408 - RNA, 19 nt, Artificial Sequence
  Description of Artificial Sequence: Synthetic oligonucleotide
aaaggcacgugccaccagg

SEQ ID NO: 2674409 - RNA, 19 nt, Artificial Sequence
  Description of Artificial Sequence: Synthetic oligonucleotide
uuuccauaguaacuggacc

SEQ ID NO: 2674410 - RNA, 19 nt, Artificial Sequence
  Description of Artificial Sequence: Synthetic oligonucleotide
auugaagaguaucaggacu

SEQ ID NO: 2674411 - RNA, 19 nt, Artificial Sequence
  Description of Artificial Sequence: Synthetic oligonucleotide
ucuccuaggcacuggaugg

SEQ ID NO: 2674412 - RNA, 19 nt, Artificial Sequence
  Description of Artificial Sequence: Synthetic oligonucleotide
aagaguaucaggacugagg

SEQ ID NO: 2674413 - RNA, 19 nt, Artificial Sequence
  Description of Artificial Sequence: Synthetic oligonucleotide
gaugggucagcuauaaucc

SEQ ID NO: 2674414 - RNA, 19 nt, Artificial Sequence
  Description of Artificial Sequence: Synthetic oligonucleotide
aauccucugucuugcaguc

SEQ ID NO: 2674415 - RNA, 19 nt, Artificial Sequence
  Description of Artificial Sequence: Synthetic oligonucleotide
cuuggcacaagcaaugaug

SEQ ID NO: 2674416 - RNA, 19 nt, Artificial Sequence
  Description of Artificial Sequence: Synthetic oligonucleotide
uuccauaguaacuggacca

SEQ ID NO: 2674417 - RNA, 19 nt, Artificial Sequence
  Description of Artificial Sequence: Synthetic oligonucleotide
ugcuccuggagccagagca

SEQ ID NO: 2674418 - RNA, 19 nt, Artificial Sequence
  Description of Artificial Sequence: Synthetic oligonucleotide
acugcagacaagccagugc

SEQ ID NO: 2674419 - RNA, 19 nt, Artificial Sequence
  Description of Artificial Sequence: Synthetic oligonucleotide
ucuucugcagaaaggagac

SEQ ID NO: 2674420 - RNA, 19 nt, Artificial Sequence
  Description of Artificial Sequence: Synthetic oligonucleotide
aagcaaugaugucuggaag

SEQ ID NO: 2674421 - RNA, 19 nt, Artificial Sequence
  Description of Artificial Sequence: Synthetic oligonucleotide
cugucuugcagucagcugc

SEQ ID NO: 2674422 - RNA, 19 nt, Artificial Sequence
  Description of Artificial Sequence: Synthetic oligonucleotide
ugacuuuauuuccuccacg

SEQ ID NO: 2674423 - RNA, 19 nt, Artificial Sequence
  Description of Artificial Sequence: Synthetic oligonucleotide
uaugcugcuuggcacaagc

SEQ ID NO: 2674424 - RNA, 19 nt, Artificial Sequence
  Description of Artificial Sequence: Synthetic oligonucleotide
uucugcagaaaggagaccc

SEQ ID NO: 2674425 - RNA, 19 nt, Artificial Sequence
  Description of Artificial Sequence: Synthetic oligonucleotide
gaaaggagacccaagagca

SEQ ID NO: 2674426 - RNA, 19 nt, Artificial Sequence
  Description of Artificial Sequence: Synthetic oligonucleotide
uuggcacaagcaaugaugu

SEQ ID NO: 2674427 - RNA, 19 nt, Artificial Sequence
  Description of Artificial Sequence: Synthetic oligonucleotide
augacuuuauuuccuccac

SEQ ID NO: 2674428 - RNA, 19 nt, Artificial Sequence
  Description of Artificial Sequence: Synthetic oligonucleotide
agacaagccagugccaucc

SEQ ID NO: 2674429 - RNA, 19 nt, Artificial Sequence
  Description of Artificial Sequence: Synthetic oligonucleotide
aguacugcagacaagccag

SEQ ID NO: 2674430 - RNA, 19 nt, Artificial Sequence
  Description of Artificial Sequence: Synthetic oligonucleotide
ugaggcuuuugcaaguucu

SEQ ID NO: 2674431 - RNA, 19 nt, Artificial Sequence
  Description of Artificial Sequence: Synthetic oligonucleotide
aacuggaccagauggggcu

SEQ ID NO: 2674432 - RNA, 19 nt, Artificial Sequence
  Description of Artificial Sequence: Synthetic oligonucleotide
uuagaggcauccaucacaa

SEQ ID NO: 2674433 - RNA, 19 nt, Artificial Sequence
  Description of Artificial Sequence: Synthetic oligonucleotide
auuuguguugcuccuggag

SEQ ID NO: 2674434 - RNA, 19 nt, Artificial Sequence
  Description of Artificial Sequence: Synthetic oligonucleotide
guaauaugcugcuuggcac

SEQ ID NO: 2674435 - RNA, 19 nt, Artificial Sequence
  Description of Artificial Sequence: Synthetic oligonucleotide
uaauaugcugcuuggcaca

SEQ ID NO: 2674436 - RNA, 19 nt, Artificial Sequence
  Description of Artificial Sequence: Synthetic oligonucleotide
cacgaugucagugagguug

SEQ ID NO: 2674437 - RNA, 19 nt, Artificial Sequence
  Description of Artificial Sequence: Synthetic oligonucleotide
uauugaagaguaucaggac

SEQ ID NO: 2674438 - RNA, 19 nt, Artificial Sequence
  Description of Artificial Sequence: Synthetic oligonucleotide
uaaugacuuuauuuccucc

SEQ ID NO: 2674439 - RNA, 19 nt, Artificial Sequence
  Description of Artificial Sequence: Synthetic oligonucleotide
gaccagauggggcucaugc

SEQ ID NO: 2674440 - RNA, 19 nt, Artificial Sequence
  Description of Artificial Sequence: Synthetic oligonucleotide
uaauccucugucuugcagu

SEQ ID NO: 2674441 - RNA, 19 nt, Artificial Sequence
  Description of Artificial Sequence: Synthetic oligonucleotide
agagcagcacacaggaugc

SEQ ID NO: 2674442 - RNA, 19 nt, Artificial Sequence
  Description of Artificial Sequence: Synthetic oligonucleotide
aaguucuucugcagaaagg

SEQ ID NO: 2674443 - RNA, 19 nt, Artificial Sequence
  Description of Artificial Sequence: Synthetic oligonucleotide
auaauccucugucuugcag

SEQ ID NO: 2674444 - RNA, 19 nt, Artificial Sequence
  Description of Artificial Sequence: Synthetic oligonucleotide
guuagaggcauccaucaca

SEQ ID NO: 2674445 - RNA, 19 nt, Artificial Sequence
  Description of Artificial Sequence: Synthetic oligonucleotide
auuaaugacuuuauuuccu

SEQ ID NO: 2674446 - RNA, 19 nt, Artificial Sequence
  Description of Artificial Sequence: Synthetic oligonucleotide
cauguaacagggcagguca

SEQ ID NO: 2674447 - RNA, 19 nt, Artificial Sequence
  Description of Artificial Sequence: Synthetic oligonucleotide
ucacaaacaggagcgagug

SEQ ID NO: 2674448 - RNA, 19 nt, Artificial Sequence
  Description of Artificial Sequence: Synthetic oligonucleotide
uccuccacggucauguaac

SEQ ID NO: 2674449 - RNA, 19 nt, Artificial Sequence
  Description of Artificial Sequence: Synthetic oligonucleotide
acggucauguaacagggca

SEQ ID NO: 2674450 - RNA, 19 nt, Artificial Sequence
  Description of Artificial Sequence: Synthetic oligonucleotide
ucaggacugaggcuuuugc

SEQ ID NO: 2674451 - RNA, 19 nt, Artificial Sequence
  Description of Artificial Sequence: Synthetic oligonucleotide
gugguaauaugcugcuugg

SEQ ID NO: 2674452 - RNA, 19 nt, Artificial Sequence
  Description of Artificial Sequence: Synthetic oligonucleotide
aguaucaggacugaggcuu

SEQ ID NO: 2674453 - RNA, 19 nt, Artificial Sequence
  Description of Artificial Sequence: Synthetic oligonucleotide
auuuccuccacggucaugu

SEQ ID NO: 2674454 - RNA, 19 nt, Artificial Sequence
  Description of Artificial Sequence: Synthetic oligonucleotide
aagccagugccaucccugg

SEQ ID NO: 2674455 - RNA, 19 nt, Artificial Sequence
  Description of Artificial Sequence: Synthetic oligonucleotide
auaguaacuggaccagaug

SEQ ID NO: 2674456 - RNA, 19 nt, Artificial Sequence
  Description of Artificial Sequence: Synthetic oligonucleotide
guaacuggaccagaugggg

SEQ ID NO: 2674457 - RNA, 19 nt, Artificial Sequence
  Description of Artificial Sequence: Synthetic oligonucleotide
ggaugggucagcuauaauc

SEQ ID NO: 2674458 - RNA, 19 nt, Artificial Sequence
  Description of Artificial Sequence: Synthetic oligonucleotide
auggggcucaugcaacccc

SEQ ID NO: 2674459 - RNA, 19 nt, Artificial Sequence
  Description of Artificial Sequence: Synthetic oligonucleotide
ugcagaaaggagacccaag

SEQ ID NO: 2674460 - RNA, 19 nt, Artificial Sequence
  Description of Artificial Sequence: Synthetic oligonucleotide
aguaacuggaccagauggg

SEQ ID NO: 2674461 - RNA, 19 nt, Artificial Sequence
  Description of Artificial Sequence: Synthetic oligonucleotide
uaacuggaccagauggggc

SEQ ID NO: 2674462 - RNA, 19 nt, Artificial Sequence
  Description of Artificial Sequence: Synthetic oligonucleotide
ucuugcagucagcugcugc

SEQ ID NO: 2674463 - RNA, 19 nt, Artificial Sequence
  Description of Artificial Sequence: Synthetic oligonucleotide
uagccagagccucuccugg

SEQ ID NO: 2674464 - RNA, 19 nt, Artificial Sequence
  Description of Artificial Sequence: Synthetic oligonucleotide
uccauaguaacuggaccag

SEQ ID NO: 2674465 - RNA, 19 nt, Artificial Sequence
  Description of Artificial Sequence: Synthetic oligonucleotide
cuuccugugggccacgaug

SEQ ID NO: 2674466 - RNA, 19 nt, Artificial Sequence
  Description of Artificial Sequence: Synthetic oligonucleotide
ggucaauuuuauugaagag

SEQ ID NO: 2674467 - RNA, 19 nt, Artificial Sequence
  Description of Artificial Sequence: Synthetic oligonucleotide
cagaaaggagacccaagag

SEQ ID NO: 2674468 - RNA, 19 nt, Artificial Sequence
  Description of Artificial Sequence: Synthetic oligonucleotide
aggacugaggcuuuugcaa

SEQ ID NO: 2674469 - RNA, 19 nt, Artificial Sequence
  Description of Artificial Sequence: Synthetic oligonucleotide
uucaccugucucuuccugc

SEQ ID NO: 2674470 - RNA, 19 nt, Artificial Sequence
  Description of Artificial Sequence: Synthetic oligonucleotide
cuuauuuccgccgugguaa

SEQ ID NO: 2674471 - RNA, 19 nt, Artificial Sequence
  Description of Artificial Sequence: Synthetic oligonucleotide
agacccaagagcagcacac

SEQ ID NO: 2674472 - RNA, 19 nt, Artificial Sequence
  Description of Artificial Sequence: Synthetic oligonucleotide
gguaauaugcugcuuggca

SEQ ID NO: 2674473 - RNA, 19 nt, Artificial Sequence
  Description of Artificial Sequence: Synthetic oligonucleotide
uggcaguuuccauaguaac

SEQ ID NO: 2674474 - RNA, 19 nt, Artificial Sequence
  Description of Artificial Sequence: Synthetic oligonucleotide
gugagguuggugcccaccg

SEQ ID NO: 2674475 - RNA, 19 nt, Artificial Sequence
  Description of Artificial Sequence: Synthetic oligonucleotide
cuggcacuuauuuccgccg

SEQ ID NO: 2674476 - RNA, 19 nt, Artificial Sequence
  Description of Artificial Sequence: Synthetic oligonucleotide
gucuccuaggcacuggaug

SEQ ID NO: 2674477 - RNA, 19 nt, Artificial Sequence
  Description of Artificial Sequence: Synthetic oligonucleotide
ucugcagaaaggagaccca

SEQ ID NO: 2674478 - RNA, 19 nt, Artificial Sequence
  Description of Artificial Sequence: Synthetic oligonucleotide
ucggauggugaucuuccug

SEQ ID NO: 2674479 - RNA, 19 nt, Artificial Sequence
  Description of Artificial Sequence: Synthetic oligonucleotide
gaggcauccaucacaaaca

SEQ ID NO: 2674480 - RNA, 19 nt, Artificial Sequence
  Description of Artificial Sequence: Synthetic oligonucleotide
agcuauaauccucugucuu

SEQ ID NO: 2674481 - RNA, 19 nt, Artificial Sequence
  Description of Artificial Sequence: Synthetic oligonucleotide
gucaauuuuauugaagagu

SEQ ID NO: 2674482 - RNA, 19 nt, Artificial Sequence
  Description of Artificial Sequence: Synthetic oligonucleotide
ucccuggcacuuauuuccg

SEQ ID NO: 2674483 - RNA, 19 nt, Artificial Sequence
  Description of Artificial Sequence: Synthetic oligonucleotide
aggagcgaguggcaguuuc

SEQ ID NO: 2674484 - RNA, 19 nt, Artificial Sequence
  Description of Artificial Sequence: Synthetic oligonucleotide
guuuccauaguaacuggac

SEQ ID NO: 2674485 - RNA, 19 nt, Artificial Sequence
  Description of Artificial Sequence: Synthetic oligonucleotide
cugauuaaugacuuuauuu

SEQ ID NO: 2674486 - RNA, 19 nt, Artificial Sequence
  Description of Artificial Sequence: Synthetic oligonucleotide
gcuauaauccucugucuug

SEQ ID NO: 2674487 - RNA, 19 nt, Artificial Sequence
  Description of Artificial Sequence: Synthetic oligonucleotide
cuggaagccugauuaauga

SEQ ID NO: 2674488 - RNA, 19 nt, Artificial Sequence
  Description of Artificial Sequence: Synthetic oligonucleotide
aaggcacgugccaccaggc

SEQ ID NO: 2674489 - RNA, 19 nt, Artificial Sequence
  Description of Artificial Sequence: Synthetic oligonucleotide
uccgccgugguaauaugcu

SEQ ID NO: 2674490 - RNA, 19 nt, Artificial Sequence
  Description of Artificial Sequence: Synthetic oligonucleotide
ucugucuugcagucagcug

SEQ ID NO: 2674491 - RNA, 19 nt, Artificial Sequence
  Description of Artificial Sequence: Synthetic oligonucleotide
gagguuggugcccaccgug

SEQ ID NO: 2674492 - RNA, 19 nt, Artificial Sequence
  Description of Artificial Sequence: Synthetic oligonucleotide
cugugggccacgaugucag

SEQ ID NO: 2674493 - RNA, 19 nt, Artificial Sequence
  Description of Artificial Sequence: Synthetic oligonucleotide
ugggucagcuauaauccuc

SEQ ID NO: 2674494 - RNA, 19 nt, Artificial Sequence
  Description of Artificial Sequence: Synthetic oligonucleotide
uuccgccgugguaauaugc

SEQ ID NO: 2674495 - RNA, 19 nt, Artificial Sequence
  Description of Artificial Sequence: Synthetic oligonucleotide
uggaagccugauuaaugac

SEQ ID NO: 2674496 - RNA, 19 nt, Artificial Sequence
  Description of Artificial Sequence: Synthetic oligonucleotide
aaaggagacccaagagcag

SEQ ID NO: 2674497 - RNA, 19 nt, Artificial Sequence
  Description of Artificial Sequence: Synthetic oligonucleotide
agugagguuggugcccacc

SEQ ID NO: 2674498 - RNA, 19 nt, Artificial Sequence
  Description of Artificial Sequence: Synthetic oligonucleotide
ugggccacgaugucaguga

SEQ ID NO: 2674499 - RNA, 19 nt, Artificial Sequence
  Description of Artificial Sequence: Synthetic oligonucleotide
ucaccugucucuuccugcu

SEQ ID NO: 2674500 - RNA, 19 nt, Artificial Sequence
  Description of Artificial Sequence: Synthetic oligonucleotide
gaagaguaucaggacugag

SEQ ID NO: 2674501 - RNA, 19 nt, Artificial Sequence
  Description of Artificial Sequence: Synthetic oligonucleotide
caagccagugccaucccug

SEQ ID NO: 2674502 - RNA, 19 nt, Artificial Sequence
  Description of Artificial Sequence: Synthetic oligonucleotide
uugucuccuaggcacugga

SEQ ID NO: 2674503 - RNA, 19 nt, Artificial Sequence
  Description of Artificial Sequence: Synthetic oligonucleotide
cugcuuggcacaagcaaug

SEQ ID NO: 2674504 - RNA, 19 nt, Artificial Sequence
  Description of Artificial Sequence: Synthetic oligonucleotide
ugucuugcagucagcugcu

SEQ ID NO: 2674505 - RNA, 19 nt, Artificial Sequence
  Description of Artificial Sequence: Synthetic oligonucleotide
uuugucuccuaggcacugg

SEQ ID NO: 2674506 - RNA, 19 nt, Artificial Sequence
  Description of Artificial Sequence: Synthetic oligonucleotide
cuugcagucagcugcugca

SEQ ID NO: 2674507 - RNA, 19 nt, Artificial Sequence
  Description of Artificial Sequence: Synthetic oligonucleotide
uauaauccucugucuugca

SEQ ID NO: 2674508 - RNA, 19 nt, Artificial Sequence
  Description of Artificial Sequence: Synthetic oligonucleotide
gcauuuguguugcuccugg

SEQ ID NO: 2674509 - RNA, 19 nt, Artificial Sequence
  Description of Artificial Sequence: Synthetic oligonucleotide
ggucauguaacagggcagg

SEQ ID NO: 2674510 - RNA, 19 nt, Artificial Sequence
  Description of Artificial Sequence: Synthetic oligonucleotide
acaagcaaugaugucugga

SEQ ID NO: 2674511 - RNA, 19 nt, Artificial Sequence
  Description of Artificial Sequence: Synthetic oligonucleotide
accaggcccguuugucucc

SEQ ID NO: 2674512 - RNA, 19 nt, Artificial Sequence
  Description of Artificial Sequence: Synthetic oligonucleotide
guagccagagccucuccug

SEQ ID NO: 2674513 - RNA, 19 nt, Artificial Sequence
  Description of Artificial Sequence: Synthetic oligonucleotide
uuggugcccaccgugggcc

SEQ ID NO: 2674514 - RNA, 19 nt, Artificial Sequence
  Description of Artificial Sequence: Synthetic oligonucleotide
ugaagaguaucaggacuga

SEQ ID NO: 2674515 - RNA, 19 nt, Artificial Sequence
  Description of Artificial Sequence: Synthetic oligonucleotide
gcuuuugcaaguucuucug

SEQ ID NO: 2674516 - RNA, 19 nt, Artificial Sequence
  Description of Artificial Sequence: Synthetic oligonucleotide
uaacagggcaggucaauuu

SEQ ID NO: 2674517 - RNA, 19 nt, Artificial Sequence
  Description of Artificial Sequence: Synthetic oligonucleotide
ucuguguagccagagccuc

SEQ ID NO: 2674518 - RNA, 19 nt, Artificial Sequence
  Description of Artificial Sequence: Synthetic oligonucleotide
aggcacgugccaccaggcc

SEQ ID NO: 2674519 - RNA, 19 nt, Artificial Sequence
  Description of Artificial Sequence: Synthetic oligonucleotide
ggacugaggcuuuugcaag

SEQ ID NO: 2674520 - RNA, 19 nt, Artificial Sequence
  Description of Artificial Sequence: Synthetic oligonucleotide
ugguaauaugcugcuuggc

SEQ ID NO: 2674521 - RNA, 19 nt, Artificial Sequence
  Description of Artificial Sequence: Synthetic oligonucleotide
aauaugcugcuuggcacaa

SEQ ID NO: 2674522 - RNA, 19 nt, Artificial Sequence
  Description of Artificial Sequence: Synthetic oligonucleotide
acuuauuuccgccguggua

SEQ ID NO: 2674523 - RNA, 19 nt, Artificial Sequence
  Description of Artificial Sequence: Synthetic oligonucleotide
uaaaggcacgugccaccag

SEQ ID NO: 2674524 - RNA, 19 nt, Artificial Sequence
  Description of Artificial Sequence: Synthetic oligonucleotide
auuuccgccgugguaauau

SEQ ID NO: 2674525 - RNA, 19 nt, Artificial Sequence
  Description of Artificial Sequence: Synthetic oligonucleotide
agcucucggauggugaucu

SEQ ID NO: 2674526 - RNA, 19 nt, Artificial Sequence
  Description of Artificial Sequence: Synthetic oligonucleotide
uuccuccacggucauguaa

SEQ ID NO: 2674527 - RNA, 19 nt, Artificial Sequence
  Description of Artificial Sequence: Synthetic oligonucleotide
ccguuugucuccuaggcac

SEQ ID NO: 2674528 - RNA, 19 nt, Artificial Sequence
  Description of Artificial Sequence: Synthetic oligonucleotide
uggcacuuauuuccgccgu

SEQ ID NO: 2674529 - RNA, 19 nt, Artificial Sequence
  Description of Artificial Sequence: Synthetic oligonucleotide
uggugaucuuccugugggc

SEQ ID NO: 2674530 - RNA, 19 nt, Artificial Sequence
  Description of Artificial Sequence: Synthetic oligonucleotide
ccacggucauguaacaggg

SEQ ID NO: 2674531 - RNA, 19 nt, Artificial Sequence
  Description of Artificial Sequence: Synthetic oligonucleotide
gcagaaaggagacccaaga

SEQ ID NO: 2674532 - RNA, 19 nt, Artificial Sequence
  Description of Artificial Sequence: Synthetic oligonucleotide
cuuccugcugagugcuggg

SEQ ID NO: 2674533 - RNA, 19 nt, Artificial Sequence
  Description of Artificial Sequence: Synthetic oligonucleotide
aguuuccauaguaacugga

SEQ ID NO: 2674534 - RNA, 19 nt, Artificial Sequence
  Description of Artificial Sequence: Synthetic oligonucleotide
ggaugcagagagcugggug

SEQ ID NO: 2674535 - RNA, 19 nt, Artificial Sequence
  Description of Artificial Sequence: Synthetic oligonucleotide
augggucagcuauaauccu

SEQ ID NO: 2674536 - RNA, 19 nt, Artificial Sequence
  Description of Artificial Sequence: Synthetic oligonucleotide
cuugccaucucccgcgcuc

SEQ ID NO: 2674537 - RNA, 19 nt, Artificial Sequence
  Description of Artificial Sequence: Synthetic oligonucleotide
agcagcacacaggaugcag

SEQ ID NO: 2674538 - RNA, 19 nt, Artificial Sequence
  Description of Artificial Sequence: Synthetic oligonucleotide
acgaugucagugagguugg

SEQ ID NO: 2674539 - RNA, 19 nt, Artificial Sequence
  Description of Artificial Sequence: Synthetic oligonucleotide
caucccuggcacuuauuuc

SEQ ID NO: 2674540 - RNA, 19 nt, Artificial Sequence
  Description of Artificial Sequence: Synthetic oligonucleotide
agccugauuaaugacuuua

SEQ ID NO: 2674541 - RNA, 19 nt, Artificial Sequence
  Description of Artificial Sequence: Synthetic oligonucleotide
gauggggcucaugcaaccc

SEQ ID NO: 2674542 - RNA, 19 nt, Artificial Sequence
  Description of Artificial Sequence: Synthetic oligonucleotide
ugaucuuccugugggccac

SEQ ID NO: 2674543 - RNA, 19 nt, Artificial Sequence
  Description of Artificial Sequence: Synthetic oligonucleotide
uacugcagacaagccagug

SEQ ID NO: 2674544 - RNA, 19 nt, Artificial Sequence
  Description of Artificial Sequence: Synthetic oligonucleotide
ugagguuggugcccaccgu

SEQ ID NO: 2674545 - RNA, 19 nt, Artificial Sequence
  Description of Artificial Sequence: Synthetic oligonucleotide
augcagagagcuggguggg

SEQ ID NO: 2674546 - RNA, 19 nt, Artificial Sequence
  Description of Artificial Sequence: Synthetic oligonucleotide
uuuccgccgugguaauaug

SEQ ID NO: 2674547 - RNA, 19 nt, Artificial Sequence
  Description of Artificial Sequence: Synthetic oligonucleotide
cgugguaauaugcugcuug

SEQ ID NO: 2674548 - RNA, 19 nt, Artificial Sequence
  Description of Artificial Sequence: Synthetic oligonucleotide
uguaacagggcaggucaau

SEQ ID NO: 2674549 - RNA, 19 nt, Artificial Sequence
  Description of Artificial Sequence: Synthetic oligonucleotide
ggcacgugccaccaggccc

SEQ ID NO: 2674550 - RNA, 19 nt, Artificial Sequence
  Description of Artificial Sequence: Synthetic oligonucleotide
ggugaucuuccugugggcc

SEQ ID NO: 2674551 - RNA, 19 nt, Artificial Sequence
  Description of Artificial Sequence: Synthetic oligonucleotide
acaagccagugccaucccu

SEQ ID NO: 2674552 - RNA, 19 nt, Artificial Sequence
  Description of Artificial Sequence: Synthetic oligonucleotide
ggguuagaggcauccauca

SEQ ID NO: 2674553 - RNA, 19 nt, Artificial Sequence
  Description of Artificial Sequence: Synthetic oligonucleotide
cccaagagcagcacacagg

SEQ ID NO: 2674554 - RNA, 19 nt, Artificial Sequence
  Description of Artificial Sequence: Synthetic oligonucleotide
aggcccguuugucuccuag

SEQ ID NO: 2674555 - RNA, 19 nt, Artificial Sequence
  Description of Artificial Sequence: Synthetic oligonucleotide
agagauucaccugucucuu

SEQ ID NO: 2674556 - RNA, 19 nt, Artificial Sequence
  Description of Artificial Sequence: Synthetic oligonucleotide
gcugcugcauuuguguugc

SEQ ID NO: 2674557 - RNA, 19 nt, Artificial Sequence
  Description of Artificial Sequence: Synthetic oligonucleotide
ccaagagcagcacacagga

SEQ ID NO: 2674558 - RNA, 19 nt, Artificial Sequence
  Description of Artificial Sequence: Synthetic oligonucleotide
gugaucuuccugugggcca

SEQ ID NO: 2674559 - RNA, 19 nt, Artificial Sequence
  Description of Artificial Sequence: Synthetic oligonucleotide
uuauuuccgccgugguaau

SEQ ID NO: 2674560 - RNA, 19 nt, Artificial Sequence
  Description of Artificial Sequence: Synthetic oligonucleotide
ccuggcacuuauuuccgcc

SEQ ID NO: 2674561 - RNA, 19 nt, Artificial Sequence
  Description of Artificial Sequence: Synthetic oligonucleotide
cauaguaacuggaccagau

SEQ ID NO: 2674562 - RNA, 19 nt, Artificial Sequence
  Description of Artificial Sequence: Synthetic oligonucleotide
aagccugauuaaugacuuu

SEQ ID NO: 2674563 - RNA, 19 nt, Artificial Sequence
  Description of Artificial Sequence: Synthetic oligonucleotide
ggcacaagcaaugaugucu

SEQ ID NO: 2674564 - RNA, 19 nt, Artificial Sequence
  Description of Artificial Sequence: Synthetic oligonucleotide
caaacaggagcgaguggca

SEQ ID NO: 2674565 - RNA, 19 nt, Artificial Sequence
  Description of Artificial Sequence: Synthetic oligonucleotide
gcacuuauuuccgccgugg

SEQ ID NO: 2674566 - RNA, 19 nt, Artificial Sequence
  Description of Artificial Sequence: Synthetic oligonucleotide
gucagugagguuggugccc

SEQ ID NO: 2674567 - RNA, 19 nt, Artificial Sequence
  Description of Artificial Sequence: Synthetic oligonucleotide
agguuggugcccaccgugg

SEQ ID NO: 2674568 - RNA, 19 nt, Artificial Sequence
  Description of Artificial Sequence: Synthetic oligonucleotide
cacggucauguaacagggc

SEQ ID NO: 2674569 - RNA, 19 nt, Artificial Sequence
  Description of Artificial Sequence: Synthetic oligonucleotide
guugcuccuggagccagag

SEQ ID NO: 2674570 - RNA, 19 nt, Artificial Sequence
  Description of Artificial Sequence: Synthetic oligonucleotide
gcacaagcaaugaugucug

SEQ ID NO: 2674571 - RNA, 19 nt, Artificial Sequence
  Description of Artificial Sequence: Synthetic oligonucleotide
gaagccugauuaaugacuu

SEQ ID NO: 2674572 - RNA, 19 nt, Artificial Sequence
  Description of Artificial Sequence: Synthetic oligonucleotide
gagauucaccugucucuuc

SEQ ID NO: 2674573 - RNA, 19 nt, Artificial Sequence
  Description of Artificial Sequence: Synthetic oligonucleotide
ugucuccuaggcacuggau

SEQ ID NO: 2674574 - RNA, 19 nt, Artificial Sequence
  Description of Artificial Sequence: Synthetic oligonucleotide
ggagccagagcaguacugc

SEQ ID NO: 2674575 - RNA, 19 nt, Artificial Sequence
  Description of Artificial Sequence: Synthetic oligonucleotide
acuggaccagauggggcuc

SEQ ID NO: 2674576 - RNA, 19 nt, Artificial Sequence
  Description of Artificial Sequence: Synthetic oligonucleotide
ggugggguuagaggcaucc

SEQ ID NO: 2674577 - RNA, 19 nt, Artificial Sequence
  Description of Artificial Sequence: Synthetic oligonucleotide
guuugucuccuaggcacug

SEQ ID NO: 2674578 - RNA, 19 nt, Artificial Sequence
  Description of Artificial Sequence: Synthetic oligonucleotide
cuccuaggcacuggauggg

SEQ ID NO: 2674579 - RNA, 19 nt, Artificial Sequence
  Description of Artificial Sequence: Synthetic oligonucleotide
gcccuugccaucucccgcg

SEQ ID NO: 2674580 - RNA, 19 nt, Artificial Sequence
  Description of Artificial Sequence: Synthetic oligonucleotide
cugaggcuuuugcaaguuc

SEQ ID NO: 2674581 - RNA, 19 nt, Artificial Sequence
  Description of Artificial Sequence: Synthetic oligonucleotide
cacuggaugggucagcuau

SEQ ID NO: 2674582 - RNA, 19 nt, Artificial Sequence
  Description of Artificial Sequence: Synthetic oligonucleotide
gcccguuugucuccuaggc

SEQ ID NO: 2674583 - RNA, 19 nt, Artificial Sequence
  Description of Artificial Sequence: Synthetic oligonucleotide
gucagcuauaauccucugu

SEQ ID NO: 2674584 - RNA, 19 nt, Artificial Sequence
  Description of Artificial Sequence: Synthetic oligonucleotide
uggcacaagcaaugauguc

SEQ ID NO: 2674585 - RNA, 19 nt, Artificial Sequence
  Description of Artificial Sequence: Synthetic oligonucleotide
aucaggacugaggcuuuug

SEQ ID NO: 2674586 - RNA, 19 nt, Artificial Sequence
  Description of Artificial Sequence: Synthetic oligonucleotide
cuccacggucauguaacag

SEQ ID NO: 2674587 - RNA, 19 nt, Artificial Sequence
  Description of Artificial Sequence: Synthetic oligonucleotide
gguuagaggcauccaucac

SEQ ID NO: 2674588 - RNA, 19 nt, Artificial Sequence
  Description of Artificial Sequence: Synthetic oligonucleotide
guggcaguuuccauaguaa

SEQ ID NO: 2674589 - RNA, 19 nt, Artificial Sequence
  Description of Artificial Sequence: Synthetic oligonucleotide
gacugaggcuuuugcaagu

SEQ ID NO: 2674590 - RNA, 19 nt, Artificial Sequence
  Description of Artificial Sequence: Synthetic oligonucleotide
uccuaggcacuggaugggu

SEQ ID NO: 2674591 - RNA, 19 nt, Artificial Sequence
  Description of Artificial Sequence: Synthetic oligonucleotide
gagcugggugggguuagag

SEQ ID NO: 2674592 - RNA, 19 nt, Artificial Sequence
  Description of Artificial Sequence: Synthetic oligonucleotide
cagacaagccagugccauc

SEQ ID NO: 2674593 - RNA, 19 nt, Artificial Sequence
  Description of Artificial Sequence: Synthetic oligonucleotide
gagcgaguggcaguuucca

SEQ ID NO: 2674594 - RNA, 19 nt, Artificial Sequence
  Description of Artificial Sequence: Synthetic oligonucleotide
acaggagcgaguggcaguu

SEQ ID NO: 2674595 - RNA, 19 nt, Artificial Sequence
  Description of Artificial Sequence: Synthetic oligonucleotide
ggcccguuugucuccuagg

SEQ ID NO: 2674596 - RNA, 19 nt, Artificial Sequence
  Description of Artificial Sequence: Synthetic oligonucleotide
uggaugggucagcuauaau

SEQ ID NO: 2674597 - RNA, 19 nt, Artificial Sequence
  Description of Artificial Sequence: Synthetic oligonucleotide
uccuggagccagagcagua

SEQ ID NO: 2674598 - RNA, 19 nt, Artificial Sequence
  Description of Artificial Sequence: Synthetic oligonucleotide
gugggccacgaugucagug

SEQ ID NO: 2674599 - RNA, 19 nt, Artificial Sequence
  Description of Artificial Sequence: Synthetic oligonucleotide
gcacgugccaccaggcccg

SEQ ID NO: 2674600 - RNA, 19 nt, Artificial Sequence
  Description of Artificial Sequence: Synthetic oligonucleotide
ggaagccugauuaaugacu

SEQ ID NO: 2674601 - RNA, 19 nt, Artificial Sequence
  Description of Artificial Sequence: Synthetic oligonucleotide
ugccaucccuggcacuuau

SEQ ID NO: 2674602 - RNA, 19 nt, Artificial Sequence
  Description of Artificial Sequence: Synthetic oligonucleotide
uggugcccaccgugggccg

SEQ ID NO: 2674603 - RNA, 19 nt, Artificial Sequence
  Description of Artificial Sequence: Synthetic oligonucleotide
ucuuccugugggccacgau

SEQ ID NO: 2674604 - RNA, 19 nt, Artificial Sequence
  Description of Artificial Sequence: Synthetic oligonucleotide
agcgaguggcaguuuccau

SEQ ID NO: 2674605 - RNA, 19 nt, Artificial Sequence
  Description of Artificial Sequence: Synthetic oligonucleotide
gccagagcaguacugcaga

SEQ ID NO: 2674606 - RNA, 19 nt, Artificial Sequence
  Description of Artificial Sequence: Synthetic oligonucleotide
cauuuguguugcuccugga

SEQ ID NO: 2674607 - RNA, 19 nt, Artificial Sequence
  Description of Artificial Sequence: Synthetic oligonucleotide
ugaugucuggaagccugau

SEQ ID NO: 2674608 - RNA, 19 nt, Artificial Sequence
  Description of Artificial Sequence: Synthetic oligonucleotide
aggagacccaagagcagca

SEQ ID NO: 2674609 - RNA, 19 nt, Artificial Sequence
  Description of Artificial Sequence: Synthetic oligonucleotide
gaucuuccugugggccacg

SEQ ID NO: 2674610 - RNA, 19 nt, Artificial Sequence
  Description of Artificial Sequence: Synthetic oligonucleotide
gucgcccuugccaucuccc

SEQ ID NO: 2674611 - RNA, 19 nt, Artificial Sequence
  Description of Artificial Sequence: Synthetic oligonucleotide
auaugcugcuuggcacaag

SEQ ID NO: 2674612 - RNA, 19 nt, Artificial Sequence
  Description of Artificial Sequence: Synthetic oligonucleotide
ggcacuuauuuccgccgug

SEQ ID NO: 2674613 - RNA, 19 nt, Artificial Sequence
  Description of Artificial Sequence: Synthetic oligonucleotide
cgccgugguaauaugcugc

SEQ ID NO: 2674614 - RNA, 19 nt, Artificial Sequence
  Description of Artificial Sequence: Synthetic oligonucleotide
augaugucuggaagccuga

SEQ ID NO: 2674615 - RNA, 19 nt, Artificial Sequence
  Description of Artificial Sequence: Synthetic oligonucleotide
gaugucuggaagccugauu

SEQ ID NO: 2674616 - RNA, 19 nt, Artificial Sequence
  Description of Artificial Sequence: Synthetic oligonucleotide
cucuguguagccagagccu

SEQ ID NO: 2674617 - RNA, 19 nt, Artificial Sequence
  Description of Artificial Sequence: Synthetic oligonucleotide
acugaggcuuuugcaaguu

SEQ ID NO: 2674618 - RNA, 19 nt, Artificial Sequence
  Description of Artificial Sequence: Synthetic oligonucleotide
ugggccgcgucggcggagg

SEQ ID NO: 2674619 - RNA, 19 nt, Artificial Sequence
  Description of Artificial Sequence: Synthetic oligonucleotide
gggguuagaggcauccauc

SEQ ID NO: 2674620 - RNA, 19 nt, Artificial Sequence
  Description of Artificial Sequence: Synthetic oligonucleotide
ugccaccaggcccguuugu

SEQ ID NO: 2674621 - RNA, 19 nt, Artificial Sequence
  Description of Artificial Sequence: Synthetic oligonucleotide
gugccaccaggcccguuug

SEQ ID NO: 2674622 - RNA, 19 nt, Artificial Sequence
  Description of Artificial Sequence: Synthetic oligonucleotide
ggagcgaguggcaguuucc

SEQ ID NO: 2674623 - RNA, 19 nt, Artificial Sequence
  Description of Artificial Sequence: Synthetic oligonucleotide
cagcuauaauccucugucu

SEQ ID NO: 2674624 - RNA, 19 nt, Artificial Sequence
  Description of Artificial Sequence: Synthetic oligonucleotide
ggucagcuauaauccucug

SEQ ID NO: 2674625 - RNA, 19 nt, Artificial Sequence
  Description of Artificial Sequence: Synthetic oligonucleotide
uuuccuccacggucaugua

SEQ ID NO: 2674626 - RNA, 19 nt, Artificial Sequence
  Description of Artificial Sequence: Synthetic oligonucleotide
aggaugcagagagcugggu

SEQ ID NO: 2674627 - RNA, 19 nt, Artificial Sequence
  Description of Artificial Sequence: Synthetic oligonucleotide
ugugggccacgaugucagu

SEQ ID NO: 2674628 - RNA, 19 nt, Artificial Sequence
  Description of Artificial Sequence: Synthetic oligonucleotide
ggcaguuuccauaguaacu

SEQ ID NO: 2674629 - RNA, 19 nt, Artificial Sequence
  Description of Artificial Sequence: Synthetic oligonucleotide
ccagauggggcucaugcaa

SEQ ID NO: 2674630 - RNA, 19 nt, Artificial Sequence
  Description of Artificial Sequence: Synthetic oligonucleotide
gagccucuccuggcacugg

SEQ ID NO: 2674631 - RNA, 19 nt, Artificial Sequence
  Description of Artificial Sequence: Synthetic oligonucleotide
uauuuccgccgugguaaua

SEQ ID NO: 2674632 - RNA, 19 nt, Artificial Sequence
  Description of Artificial Sequence: Synthetic oligonucleotide
gcgaguggcaguuuccaua

SEQ ID NO: 2674633 - RNA, 19 nt, Artificial Sequence
  Description of Artificial Sequence: Synthetic oligonucleotide
gggccacgaugucagugag

SEQ ID NO: 2674634 - RNA, 19 nt, Artificial Sequence
  Description of Artificial Sequence: Synthetic oligonucleotide
cuggaugggucagcuauaa

SEQ ID NO: 2674635 - RNA, 19 nt, Artificial Sequence
  Description of Artificial Sequence: Synthetic oligonucleotide
gccgcgucggcggaggucc

SEQ ID NO: 2674636 - RNA, 19 nt, Artificial Sequence
  Description of Artificial Sequence: Synthetic oligonucleotide
cccaccgugggccgcgucg

SEQ ID NO: 2674637 - RNA, 19 nt, Artificial Sequence
  Description of Artificial Sequence: Synthetic oligonucleotide
gagcucucggauggugauc

SEQ ID NO: 2674638 - RNA, 19 nt, Artificial Sequence
  Description of Artificial Sequence: Synthetic oligonucleotide
auguaacagggcaggucaa

SEQ ID NO: 2674639 - RNA, 19 nt, Artificial Sequence
  Description of Artificial Sequence: Synthetic oligonucleotide
aggucgcccuugccaucuc

SEQ ID NO: 2674640 - RNA, 19 nt, Artificial Sequence
  Description of Artificial Sequence: Synthetic oligonucleotide
ggucgcccuugccaucucc

SEQ ID NO: 2674641 - RNA, 19 nt, Artificial Sequence
  Description of Artificial Sequence: Synthetic oligonucleotide
ggcacuggcuuuggagacc

SEQ ID NO: 2674642 - RNA, 19 nt, Artificial Sequence
  Description of Artificial Sequence: Synthetic oligonucleotide
acuggaugggucagcuaua

SEQ ID NO: 2674643 - RNA, 19 nt, Artificial Sequence
  Description of Artificial Sequence: Synthetic oligonucleotide
auccucugucuugcaguca

SEQ ID NO: 2674644 - RNA, 19 nt, Artificial Sequence
  Description of Artificial Sequence: Synthetic oligonucleotide
ccuaggcacuggauggguc

SEQ ID NO: 2674645 - RNA, 19 nt, Artificial Sequence
  Description of Artificial Sequence: Synthetic oligonucleotide
ggccacgaugucagugagg

SEQ ID NO: 2674646 - RNA, 19 nt, Artificial Sequence
  Description of Artificial Sequence: Synthetic oligonucleotide
guaacagggcaggucaauu

SEQ ID NO: 2674647 - RNA, 19 nt, Artificial Sequence
  Description of Artificial Sequence: Synthetic oligonucleotide
gggucagcuauaauccucu

SEQ ID NO: 2674648 - RNA, 19 nt, Artificial Sequence
  Description of Artificial Sequence: Synthetic oligonucleotide
aucuuccugugggccacga

SEQ ID NO: 2674649 - RNA, 19 nt, Artificial Sequence
  Description of Artificial Sequence: Synthetic oligonucleotide
gugcccaccgugggccgcg

SEQ ID NO: 2674650 - RNA, 19 nt, Artificial Sequence
  Description of Artificial Sequence: Synthetic oligonucleotide
ccgccgugguaauaugcug

SEQ ID NO: 2674651 - RNA, 19 nt, Artificial Sequence
  Description of Artificial Sequence: Synthetic oligonucleotide
cuggagccagagcaguacu

SEQ ID NO: 2674652 - RNA, 19 nt, Artificial Sequence
  Description of Artificial Sequence: Synthetic oligonucleotide
gcacuggcuuuggagacca

SEQ ID NO: 2674653 - RNA, 19 nt, Artificial Sequence
  Description of Artificial Sequence: Synthetic oligonucleotide
ggagacccaagagcagcac

SEQ ID NO: 2674654 - RNA, 19 nt, Artificial Sequence
  Description of Artificial Sequence: Synthetic oligonucleotide
gugggguuagaggcaucca

SEQ ID NO: 2674655 - RNA, 19 nt, Artificial Sequence
  Description of Artificial Sequence: Synthetic oligonucleotide
agagcugggugggguuaga

SEQ ID NO: 2674656 - RNA, 19 nt, Artificial Sequence
  Description of Artificial Sequence: Synthetic oligonucleotide
cagugagguuggugcccac

SEQ ID NO: 2674657 - RNA, 19 nt, Artificial Sequence
  Description of Artificial Sequence: Synthetic oligonucleotide
caaugaugucuggaagccu

SEQ ID NO: 2674658 - RNA, 19 nt, Artificial Sequence
  Description of Artificial Sequence: Synthetic oligonucleotide
ccucugucuugcagucagc

SEQ ID NO: 2674659 - RNA, 19 nt, Artificial Sequence
  Description of Artificial Sequence: Synthetic oligonucleotide
gcugcuuggcacaagcaau

SEQ ID NO: 2674660 - RNA, 19 nt, Artificial Sequence
  Description of Artificial Sequence: Synthetic oligonucleotide
cccuggcacuuauuuccgc

SEQ ID NO: 2674661 - RNA, 19 nt, Artificial Sequence
  Description of Artificial Sequence: Synthetic oligonucleotide
gccgugguaauaugcugcu

SEQ ID NO: 2674662 - RNA, 19 nt, Artificial Sequence
  Description of Artificial Sequence: Synthetic oligonucleotide
cccguuugucuccuaggca

SEQ ID NO: 2674663 - RNA, 19 nt, Artificial Sequence
  Description of Artificial Sequence: Synthetic oligonucleotide
ccgagcucucggaugguga

SEQ ID NO: 2674664 - RNA, 19 nt, Artificial Sequence
  Description of Artificial Sequence: Synthetic oligonucleotide
cagagccucuccuggcacu

SEQ ID NO: 2674665 - RNA, 19 nt, Artificial Sequence
  Description of Artificial Sequence: Synthetic oligonucleotide
caccgugggccgcgucggc

SEQ ID NO: 2674666 - RNA, 19 nt, Artificial Sequence
  Description of Artificial Sequence: Synthetic oligonucleotide
gaguggcaguuuccauagu

SEQ ID NO: 2674667 - RNA, 19 nt, Artificial Sequence
  Description of Artificial Sequence: Synthetic oligonucleotide
ccccaggucgcccuugcca

SEQ ID NO: 2674668 - RNA, 19 nt, Artificial Sequence
  Description of Artificial Sequence: Synthetic oligonucleotide
ccugugggccacgauguca

SEQ ID NO: 2674669 - RNA, 19 nt, Artificial Sequence
  Description of Artificial Sequence: Synthetic oligonucleotide
gcuuggcacaagcaaugau

SEQ ID NO: 2674670 - RNA, 19 nt, Artificial Sequence
  Description of Artificial Sequence: Synthetic oligonucleotide
ccugauuaaugacuuuauu

SEQ ID NO: 2674671 - RNA, 19 nt, Artificial Sequence
  Description of Artificial Sequence: Synthetic oligonucleotide
gcagacaagccagugccau

SEQ ID NO: 2674672 - RNA, 19 nt, Artificial Sequence
  Description of Artificial Sequence: Synthetic oligonucleotide
caagagcagcacacaggau

SEQ ID NO: 2674673 - RNA, 19 nt, Artificial Sequence
  Description of Artificial Sequence: Synthetic oligonucleotide
ccaccgugggccgcgucgg

SEQ ID NO: 2674674 - RNA, 19 nt, Artificial Sequence
  Description of Artificial Sequence: Synthetic oligonucleotide
gccugauuaaugacuuuau

SEQ ID NO: 2674675 - RNA, 19 nt, Artificial Sequence
  Description of Artificial Sequence: Synthetic oligonucleotide
ggaccagauggggcucaug

SEQ ID NO: 2674676 - RNA, 19 nt, Artificial Sequence
  Description of Artificial Sequence: Synthetic oligonucleotide
ccuccacggucauguaaca

SEQ ID NO: 2674677 - RNA, 19 nt, Artificial Sequence
  Description of Artificial Sequence: Synthetic oligonucleotide
guaucaggacugaggcuuu

SEQ ID NO: 2674678 - RNA, 19 nt, Artificial Sequence
  Description of Artificial Sequence: Synthetic oligonucleotide
ccaucccuggcacuuauuu

SEQ ID NO: 2674679 - RNA, 19 nt, Artificial Sequence
  Description of Artificial Sequence: Synthetic oligonucleotide
cagagagcugggugggguu

SEQ ID NO: 2674680 - RNA, 19 nt, Artificial Sequence
  Description of Artificial Sequence: Synthetic oligonucleotide
ccaucacaaacaggagcga

SEQ ID NO: 2674681 - RNA, 19 nt, Artificial Sequence
  Description of Artificial Sequence: Synthetic oligonucleotide
gugggccgcgucggcggag

SEQ ID NO: 2674682 - RNA, 19 nt, Artificial Sequence
  Description of Artificial Sequence: Synthetic oligonucleotide
ggugcccaccgugggccgc

SEQ ID NO: 2674683 - RNA, 19 nt, Artificial Sequence
  Description of Artificial Sequence: Synthetic oligonucleotide
cccgagcucucggauggug

SEQ ID NO: 2674684 - RNA, 19 nt, Artificial Sequence
  Description of Artificial Sequence: Synthetic oligonucleotide
ccaggucgcccuugccauc

SEQ ID NO: 2674685 - RNA, 19 nt, Artificial Sequence
  Description of Artificial Sequence: Synthetic oligonucleotide
cccaggucgcccuugccau

SEQ ID NO: 2674686 - RNA, 19 nt, Artificial Sequence
  Description of Artificial Sequence: Synthetic oligonucleotide
cagugccaucccuggcacu

SEQ ID NO: 2674687 - RNA, 19 nt, Artificial Sequence
  Description of Artificial Sequence: Synthetic oligonucleotide
ugcccaccgugggccgcgu

SEQ ID NO: 2674688 - RNA, 19 nt, Artificial Sequence
  Description of Artificial Sequence: Synthetic oligonucleotide
cguuugucuccuaggcacu

SEQ ID NO: 2674689 - RNA, 19 nt, Artificial Sequence
  Description of Artificial Sequence: Synthetic oligonucleotide
ggccgcgucggcggagguc

SEQ ID NO: 2674690 - RNA, 19 nt, Artificial Sequence
  Description of Artificial Sequence: Synthetic oligonucleotide
gggugggguuagaggcauc

SEQ ID NO: 2674691 - RNA, 19 nt, Artificial Sequence
  Description of Artificial Sequence: Synthetic oligonucleotide
cgagcucucggauggugau

SEQ ID NO: 2674692 - RNA, 19 nt, Artificial Sequence
  Description of Artificial Sequence: Synthetic oligonucleotide
caggcccguuugucuccua

SEQ ID NO: 2674693 - RNA, 19 nt, Artificial Sequence
  Description of Artificial Sequence: Synthetic oligonucleotide
ccgcgucggcggagguccc

SEQ ID NO: 2674694 - RNA, 19 nt, Artificial Sequence
  Description of Artificial Sequence: Synthetic oligonucleotide
acgugccaccaggcccguu

SEQ ID NO: 2674695 - RNA, 19 nt, Artificial Sequence
  Description of Artificial Sequence: Synthetic oligonucleotide
cgcgucggcggaggucccc

SEQ ID NO: 2674696 - RNA, 19 nt, Artificial Sequence
  Description of Artificial Sequence: Synthetic oligonucleotide
ccuugccaucucccgcgcu

SEQ ID NO: 2674697 - RNA, 19 nt, Artificial Sequence
  Description of Artificial Sequence: Synthetic oligonucleotide
gcccaccgugggccgcguc

SEQ ID NO: 2674698 - RNA, 19 nt, Artificial Sequence
  Description of Artificial Sequence: Synthetic oligonucleotide
gcucucggauggugaucuu

SEQ ID NO: 2674699 - RNA, 19 nt, Artificial Sequence
  Description of Artificial Sequence: Synthetic oligonucleotide
caggagcgaguggcaguuu

SEQ ID NO: 2674700 - RNA, 19 nt, Artificial Sequence
  Description of Artificial Sequence: Synthetic oligonucleotide
cacgugccaccaggcccgu

SEQ ID NO: 2674701 - RNA, 19 nt, Artificial Sequence
  Description of Artificial Sequence: Synthetic oligonucleotide
ccaggcccguuugucuccu

SEQ ID NO: 2674702 - RNA, 19 nt, Artificial Sequence
  Description of Artificial Sequence: Synthetic oligonucleotide
cgugggccgcgucggcgga

SEQ ID NO: 2674703 - RNA, 19 nt, Artificial Sequence
  Description of Artificial Sequence: Synthetic oligonucleotide
gggccgcgucggcggaggu

SEQ ID NO: 2674704 - RNA, 19 nt, Artificial Sequence
  Description of Artificial Sequence: Synthetic oligonucleotide
ccgugguaauaugcugcuu

SEQ ID NO: 2674705 - RNA, 19 nt, Artificial Sequence
  Description of Artificial Sequence: Synthetic oligonucleotide
ccccgagcucucggauggu

SEQ ID NO: 2674706 - RNA, 19 nt, Artificial Sequence
  Description of Artificial Sequence: Synthetic oligonucleotide
uuuauuaggagauuaagag

SEQ ID NO: 2674707 - RNA, 19 nt, Artificial Sequence
  Description of Artificial Sequence: Synthetic oligonucleotide
aaaguuugcaccauaagac

SEQ ID NO: 2674708 - RNA, 19 nt, Artificial Sequence
  Description of Artificial Sequence: Synthetic oligonucleotide
ugcucaauaaccuggaugg

SEQ ID NO: 2674709 - RNA, 19 nt, Artificial Sequence
  Description of Artificial Sequence: Synthetic oligonucleotide
aaaaguuugcaccauaaga

SEQ ID NO: 2674710 - RNA, 19 nt, Artificial Sequence
  Description of Artificial Sequence: Synthetic oligonucleotide
ugugucuugaguuuggucc

SEQ ID NO: 2674711 - RNA, 19 nt, Artificial Sequence
  Description of Artificial Sequence: Synthetic oligonucleotide
uguuguuuacuccagacug

SEQ ID NO: 2674712 - RNA, 19 nt, Artificial Sequence
  Description of Artificial Sequence: Synthetic oligonucleotide
uuaaaggucacauuuauua

SEQ ID NO: 2674713 - RNA, 19 nt, Artificial Sequence
  Description of Artificial Sequence: Synthetic oligonucleotide
uguuaaaguagugauaucc

SEQ ID NO: 2674714 - RNA, 19 nt, Artificial Sequence
  Description of Artificial Sequence: Synthetic oligonucleotide
uauuauuucgagcaggaac

SEQ ID NO: 2674715 - RNA, 19 nt, Artificial Sequence
  Description of Artificial Sequence: Synthetic oligonucleotide
uucaucaacuguuauaagc

SEQ ID NO: 2674716 - RNA, 19 nt, Artificial Sequence
  Description of Artificial Sequence: Synthetic oligonucleotide
ucugguaucaaacuccagc

SEQ ID NO: 2674717 - RNA, 19 nt, Artificial Sequence
  Description of Artificial Sequence: Synthetic oligonucleotide
uccaagaaaaguuugcacc

SEQ ID NO: 2674718 - RNA, 19 nt, Artificial Sequence
  Description of Artificial Sequence: Synthetic oligonucleotide
gaagguuagaaccauguug

SEQ ID NO: 2674719 - RNA, 19 nt, Artificial Sequence
  Description of Artificial Sequence: Synthetic oligonucleotide
uuauccauggacuauaaau

SEQ ID NO: 2674720 - RNA, 19 nt, Artificial Sequence
  Description of Artificial Sequence: Synthetic oligonucleotide
aacaacgccugucucagcg

SEQ ID NO: 2674721 - RNA, 19 nt, Artificial Sequence
  Description of Artificial Sequence: Synthetic oligonucleotide
uucacagucaagcagaaau

SEQ ID NO: 2674722 - RNA, 19 nt, Artificial Sequence
  Description of Artificial Sequence: Synthetic oligonucleotide
ucaucaacuguuauaagcu

SEQ ID NO: 2674723 - RNA, 19 nt, Artificial Sequence
  Description of Artificial Sequence: Synthetic oligonucleotide
uuuuguuccaagaaaaguu

SEQ ID NO: 2674724 - RNA, 19 nt, Artificial Sequence
  Description of Artificial Sequence: Synthetic oligonucleotide
acugcauauuauuucgagc

SEQ ID NO: 2674725 - RNA, 19 nt, Artificial Sequence
  Description of Artificial Sequence: Synthetic oligonucleotide
aaaguagugauauccaguu

SEQ ID NO: 2674726 - RNA, 19 nt, Artificial Sequence
  Description of Artificial Sequence: Synthetic oligonucleotide
uugauucacagucaagcag

SEQ ID NO: 2674727 - RNA, 19 nt, Artificial Sequence
  Description of Artificial Sequence: Synthetic oligonucleotide
ucuuccacgucauagcucc

SEQ ID NO: 2674728 - RNA, 19 nt, Artificial Sequence
  Description of Artificial Sequence: Synthetic oligonucleotide
gauggaacucuagagacgg

SEQ ID NO: 2674729 - RNA, 19 nt, Artificial Sequence
  Description of Artificial Sequence: Synthetic oligonucleotide
ugugccagcuuccaugugg

SEQ ID NO: 2674730 - RNA, 19 nt, Artificial Sequence
  Description of Artificial Sequence: Synthetic oligonucleotide
ucuagagacggaaacggcc

SEQ ID NO: 2674731 - RNA, 19 nt, Artificial Sequence
  Description of Artificial Sequence: Synthetic oligonucleotide
aggugcauuauccauggac

SEQ ID NO: 2674732 - RNA, 19 nt, Artificial Sequence
  Description of Artificial Sequence: Synthetic oligonucleotide
aacuguuauaagcugugug

SEQ ID NO: 2674733 - RNA, 19 nt, Artificial Sequence
  Description of Artificial Sequence: Synthetic oligonucleotide
uauuuuguagacacucuug

SEQ ID NO: 2674734 - RNA, 19 nt, Artificial Sequence
  Description of Artificial Sequence: Synthetic oligonucleotide
aagauccugaccuuucuug

SEQ ID NO: 2674735 - RNA, 19 nt, Artificial Sequence
  Description of Artificial Sequence: Synthetic oligonucleotide
aggaacaaagauccugacc

SEQ ID NO: 2674736 - RNA, 19 nt, Artificial Sequence
  Description of Artificial Sequence: Synthetic oligonucleotide
uggacuauaaauagugcac

SEQ ID NO: 2674737 - RNA, 19 nt, Artificial Sequence
  Description of Artificial Sequence: Synthetic oligonucleotide
acuguuauaagcugugugu

SEQ ID NO: 2674738 - RNA, 19 nt, Artificial Sequence
  Description of Artificial Sequence: Synthetic oligonucleotide
uuuaguuuaaaggucacau

SEQ ID NO: 2674739 - RNA, 19 nt, Artificial Sequence
  Description of Artificial Sequence: Synthetic oligonucleotide
guuagaaccauguuggaga

SEQ ID NO: 2674740 - RNA, 19 nt, Artificial Sequence
  Description of Artificial Sequence: Synthetic oligonucleotide
uucuuuuguuccaagaaaa

SEQ ID NO: 2674741 - RNA, 19 nt, Artificial Sequence
  Description of Artificial Sequence: Synthetic oligonucleotide
gaugugcucaauaaccugg

SEQ ID NO: 2674742 - RNA, 19 nt, Artificial Sequence
  Description of Artificial Sequence: Synthetic oligonucleotide
uaaaguagugauauccagu

SEQ ID NO: 2674743 - RNA, 19 nt, Artificial Sequence
  Description of Artificial Sequence: Synthetic oligonucleotide
uauccauggacuauaaaua

SEQ ID NO: 2674744 - RNA, 19 nt, Artificial Sequence
  Description of Artificial Sequence: Synthetic oligonucleotide
ucuuuuguuccaagaaaag

SEQ ID NO: 2674745 - RNA, 19 nt, Artificial Sequence
  Description of Artificial Sequence: Synthetic oligonucleotide
cagacugcauauuauuucg

SEQ ID NO: 2674746 - RNA, 19 nt, Artificial Sequence
  Description of Artificial Sequence: Synthetic oligonucleotide
uguuccaagaaaaguuugc

SEQ ID NO: 2674747 - RNA, 19 nt, Artificial Sequence
  Description of Artificial Sequence: Synthetic oligonucleotide
aaguuugcaccauaagacu

SEQ ID NO: 2674748 - RNA, 19 nt, Artificial Sequence
  Description of Artificial Sequence: Synthetic oligonucleotide
uauaaauagugcacagcug

SEQ ID NO: 2674749 - RNA, 19 nt, Artificial Sequence
  Description of Artificial Sequence: Synthetic oligonucleotide
auuuuguagacacucuugu

SEQ ID NO: 2674750 - RNA, 19 nt, Artificial Sequence
  Description of Artificial Sequence: Synthetic oligonucleotide
uguucuuuuguuccaagaa

SEQ ID NO: 2674751 - RNA, 19 nt, Artificial Sequence
  Description of Artificial Sequence: Synthetic oligonucleotide
agggaucagccguugaugc

SEQ ID NO: 2674752 - RNA, 19 nt, Artificial Sequence
  Description of Artificial Sequence: Synthetic oligonucleotide
auuauuucgagcaggaaca

SEQ ID NO: 2674753 - RNA, 19 nt, Artificial Sequence
  Description of Artificial Sequence: Synthetic oligonucleotide
aacucuagagacggaaacg

SEQ ID NO: 2674754 - RNA, 19 nt, Artificial Sequence
  Description of Artificial Sequence: Synthetic oligonucleotide
ucaacuguuauaagcugug

SEQ ID NO: 2674755 - RNA, 19 nt, Artificial Sequence
  Description of Artificial Sequence: Synthetic oligonucleotide
aagacuuggacuuggguuu

SEQ ID NO: 2674756 - RNA, 19 nt, Artificial Sequence
  Description of Artificial Sequence: Synthetic oligonucleotide
aguagugauauccaguuuu

SEQ ID NO: 2674757 - RNA, 19 nt, Artificial Sequence
  Description of Artificial Sequence: Synthetic oligonucleotide
ucuggaacaccuguuaaag

SEQ ID NO: 2674758 - RNA, 19 nt, Artificial Sequence
  Description of Artificial Sequence: Synthetic oligonucleotide
auccauggacuauaaauag

SEQ ID NO: 2674759 - RNA, 19 nt, Artificial Sequence
  Description of Artificial Sequence: Synthetic oligonucleotide
uggauggaacucuagagac

SEQ ID NO: 2674760 - RNA, 19 nt, Artificial Sequence
  Description of Artificial Sequence: Synthetic oligonucleotide
agaggugcauuauccaugg

SEQ ID NO: 2674761 - RNA, 19 nt, Artificial Sequence
  Description of Artificial Sequence: Synthetic oligonucleotide
cuagagacggaaacggccg

SEQ ID NO: 2674762 - RNA, 19 nt, Artificial Sequence
  Description of Artificial Sequence: Synthetic oligonucleotide
gaaaaguuugcaccauaag

SEQ ID NO: 2674763 - RNA, 19 nt, Artificial Sequence
  Description of Artificial Sequence: Synthetic oligonucleotide
ugcacagcugacuugauuc

SEQ ID NO: 2674764 - RNA, 19 nt, Artificial Sequence
  Description of Artificial Sequence: Synthetic oligonucleotide
auuucgagcaggaacaaag

SEQ ID NO: 2674765 - RNA, 19 nt, Artificial Sequence
  Description of Artificial Sequence: Synthetic oligonucleotide
ucaagcagaaaugaugcca

SEQ ID NO: 2674766 - RNA, 19 nt, Artificial Sequence
  Description of Artificial Sequence: Synthetic oligonucleotide
uuuuggaaccuucuucucu

SEQ ID NO: 2674767 - RNA, 19 nt, Artificial Sequence
  Description of Artificial Sequence: Synthetic oligonucleotide
aauaaccuggauggaacuc

SEQ ID NO: 2674768 - RNA, 19 nt, Artificial Sequence
  Description of Artificial Sequence: Synthetic oligonucleotide
cugcauauuauuucgagca

SEQ ID NO: 2674769 - RNA, 19 nt, Artificial Sequence
  Description of Artificial Sequence: Synthetic oligonucleotide
accuauuuuguagacacuc

SEQ ID NO: 2674770 - RNA, 19 nt, Artificial Sequence
  Description of Artificial Sequence: Synthetic oligonucleotide
uggacuuggguuuuggaac

SEQ ID NO: 2674771 - RNA, 19 nt, Artificial Sequence
  Description of Artificial Sequence: Synthetic oligonucleotide
uuagaaccauguuggagag

SEQ ID NO: 2674772 - RNA, 19 nt, Artificial Sequence
  Description of Artificial Sequence: Synthetic oligonucleotide
caagcagaaaugaugccag

SEQ ID NO: 2674773 - RNA, 19 nt, Artificial Sequence
  Description of Artificial Sequence: Synthetic oligonucleotide
uuguagacacucuuguucu

SEQ ID NO: 2674774 - RNA, 19 nt, Artificial Sequence
  Description of Artificial Sequence: Synthetic oligonucleotide
gacugcauauuauuucgag

SEQ ID NO: 2674775 - RNA, 19 nt, Artificial Sequence
  Description of Artificial Sequence: Synthetic oligonucleotide
uggaacaccuguuaaagua

SEQ ID NO: 2674776 - RNA, 19 nt, Artificial Sequence
  Description of Artificial Sequence: Synthetic oligonucleotide
auuuauuaggagauuaaga

SEQ ID NO: 2674777 - RNA, 19 nt, Artificial Sequence
  Description of Artificial Sequence: Synthetic oligonucleotide
uguguuguuuacuccagac

SEQ ID NO: 2674778 - RNA, 19 nt, Artificial Sequence
  Description of Artificial Sequence: Synthetic oligonucleotide
aacccaucaaaggauuuuc

SEQ ID NO: 2674779 - RNA, 19 nt, Artificial Sequence
  Description of Artificial Sequence: Synthetic oligonucleotide
ucacagucaagcagaaaug

SEQ ID NO: 2674780 - RNA, 19 nt, Artificial Sequence
  Description of Artificial Sequence: Synthetic oligonucleotide
acucuagagacggaaacgg

SEQ ID NO: 2674781 - RNA, 19 nt, Artificial Sequence
  Description of Artificial Sequence: Synthetic oligonucleotide
uuaagaggugcauuaucca

SEQ ID NO: 2674782 - RNA, 19 nt, Artificial Sequence
  Description of Artificial Sequence: Synthetic oligonucleotide
cagucaagcagaaaugaug

SEQ ID NO: 2674783 - RNA, 19 nt, Artificial Sequence
  Description of Artificial Sequence: Synthetic oligonucleotide
ugcccaacccaucaaagga

SEQ ID NO: 2674784 - RNA, 19 nt, Artificial Sequence
  Description of Artificial Sequence: Synthetic oligonucleotide
ucgagcaggaacaaagauc

SEQ ID NO: 2674785 - RNA, 19 nt, Artificial Sequence
  Description of Artificial Sequence: Synthetic oligonucleotide
uuucuuguuuugaugugcu

SEQ ID NO: 2674786 - RNA, 19 nt, Artificial Sequence
  Description of Artificial Sequence: Synthetic oligonucleotide
cauuuauuaggagauuaag

SEQ ID NO: 2674787 - RNA, 19 nt, Artificial Sequence
  Description of Artificial Sequence: Synthetic oligonucleotide
uuaggagauuaagaggugc

SEQ ID NO: 2674788 - RNA, 19 nt, Artificial Sequence
  Description of Artificial Sequence: Synthetic oligonucleotide
uguggaugugcucaauaac

SEQ ID NO: 2674789 - RNA, 19 nt, Artificial Sequence
  Description of Artificial Sequence: Synthetic oligonucleotide
uuggagagggaucagccgu

SEQ ID NO: 2674790 - RNA, 19 nt, Artificial Sequence
  Description of Artificial Sequence: Synthetic oligonucleotide
uucuuuguguuguuuacuc

SEQ ID NO: 2674791 - RNA, 19 nt, Artificial Sequence
  Description of Artificial Sequence: Synthetic oligonucleotide
aaggucacauuuauuagga

SEQ ID NO: 2674792 - RNA, 19 nt, Artificial Sequence
  Description of Artificial Sequence: Synthetic oligonucleotide
cagaaaugaugccagugcc

SEQ ID NO: 2674793 - RNA, 19 nt, Artificial Sequence
  Description of Artificial Sequence: Synthetic oligonucleotide
aaaugaugccagugccaac

SEQ ID NO: 2674794 - RNA, 19 nt, Artificial Sequence
  Description of Artificial Sequence: Synthetic oligonucleotide
gaacucuagagacggaaac

SEQ ID NO: 2674795 - RNA, 19 nt, Artificial Sequence
  Description of Artificial Sequence: Synthetic oligonucleotide
uuuucugcaaaggcaacug

SEQ ID NO: 2674796 - RNA, 19 nt, Artificial Sequence
  Description of Artificial Sequence: Synthetic oligonucleotide
ggaacaaagauccugaccu

SEQ ID NO: 2674797 - RNA, 19 nt, Artificial Sequence
  Description of Artificial Sequence: Synthetic oligonucleotide
uaggagauuaagaggugca

SEQ ID NO: 2674798 - RNA, 19 nt, Artificial Sequence
  Description of Artificial Sequence: Synthetic oligonucleotide
uguuauaagcugugugucu

SEQ ID NO: 2674799 - RNA, 19 nt, Artificial Sequence
  Description of Artificial Sequence: Synthetic oligonucleotide
ucuuuguguuguuuacucc

SEQ ID NO: 2674800 - RNA, 19 nt, Artificial Sequence
  Description of Artificial Sequence: Synthetic oligonucleotide
gauuaagaggugcauuauc

SEQ ID NO: 2674801 - RNA, 19 nt, Artificial Sequence
  Description of Artificial Sequence: Synthetic oligonucleotide
ucuuugguacugaagguua

SEQ ID NO: 2674802 - RNA, 19 nt, Artificial Sequence
  Description of Artificial Sequence: Synthetic oligonucleotide
uuuacuccagacugcauau

SEQ ID NO: 2674803 - RNA, 19 nt, Artificial Sequence
  Description of Artificial Sequence: Synthetic oligonucleotide
ugaugugcucuucuggaac

SEQ ID NO: 2674804 - RNA, 19 nt, Artificial Sequence
  Description of Artificial Sequence: Synthetic oligonucleotide
cauggacuauaaauagugc

SEQ ID NO: 2674805 - RNA, 19 nt, Artificial Sequence
  Description of Artificial Sequence: Synthetic oligonucleotide
gcugacuugauucacaguc

SEQ ID NO: 2674806 - RNA, 19 nt, Artificial Sequence
  Description of Artificial Sequence: Synthetic oligonucleotide
uuccaagaaaaguuugcac

SEQ ID NO: 2674807 - RNA, 19 nt, Artificial Sequence
  Description of Artificial Sequence: Synthetic oligonucleotide
uaaauagugcacagcugac

SEQ ID NO: 2674808 - RNA, 19 nt, Artificial Sequence
  Description of Artificial Sequence: Synthetic oligonucleotide
gagauuaagaggugcauua

SEQ ID NO: 2674809 - RNA, 19 nt, Artificial Sequence
  Description of Artificial Sequence: Synthetic oligonucleotide
cgagcaggaacaaagaucc

SEQ ID NO: 2674810 - RNA, 19 nt, Artificial Sequence
  Description of Artificial Sequence: Synthetic oligonucleotide
cuuuguguuguuuacucca

SEQ ID NO: 2674811 - RNA, 19 nt, Artificial Sequence
  Description of Artificial Sequence: Synthetic oligonucleotide
uuggacuuggguuuuggaa

SEQ ID NO: 2674812 - RNA, 19 nt, Artificial Sequence
  Description of Artificial Sequence: Synthetic oligonucleotide
uuucgagcaggaacaaaga

SEQ ID NO: 2674813 - RNA, 19 nt, Artificial Sequence
  Description of Artificial Sequence: Synthetic oligonucleotide
gugccaaccuauuuuguag

SEQ ID NO: 2674814 - RNA, 19 nt, Artificial Sequence
  Description of Artificial Sequence: Synthetic oligonucleotide
uuucugcaaaggcaacugc

SEQ ID NO: 2674815 - RNA, 19 nt, Artificial Sequence
  Description of Artificial Sequence: Synthetic oligonucleotide
uuugcaccauaagacuugg

SEQ ID NO: 2674816 - RNA, 19 nt, Artificial Sequence
  Description of Artificial Sequence: Synthetic oligonucleotide
uaagaggugcauuauccau

SEQ ID NO: 2674817 - RNA, 19 nt, Artificial Sequence
  Description of Artificial Sequence: Synthetic oligonucleotide
aaauagugcacagcugacu

SEQ ID NO: 2674818 - RNA, 19 nt, Artificial Sequence
  Description of Artificial Sequence: Synthetic oligonucleotide
ucucuuccacgucauagcu

SEQ ID NO: 2674819 - RNA, 19 nt, Artificial Sequence
  Description of Artificial Sequence: Synthetic oligonucleotide
aagaggugcauuauccaug

SEQ ID NO: 2674820 - RNA, 19 nt, Artificial Sequence
  Description of Artificial Sequence: Synthetic oligonucleotide
uccauggacuauaaauagu

SEQ ID NO: 2674821 - RNA, 19 nt, Artificial Sequence
  Description of Artificial Sequence: Synthetic oligonucleotide
ucucucugguaucaaacuc

SEQ ID NO: 2674822 - RNA, 19 nt, Artificial Sequence
  Description of Artificial Sequence: Synthetic oligonucleotide
ugcaaaggcaacugcgucu

SEQ ID NO: 2674823 - RNA, 19 nt, Artificial Sequence
  Description of Artificial Sequence: Synthetic oligonucleotide
uuccauguggaugugcuca

SEQ ID NO: 2674824 - RNA, 19 nt, Artificial Sequence
  Description of Artificial Sequence: Synthetic oligonucleotide
aucaaaggauuuucccauc

SEQ ID NO: 2674825 - RNA, 19 nt, Artificial Sequence
  Description of Artificial Sequence: Synthetic oligonucleotide
gugcucaauaaccuggaug

SEQ ID NO: 2674826 - RNA, 19 nt, Artificial Sequence
  Description of Artificial Sequence: Synthetic oligonucleotide
ugacuugauucacagucaa

SEQ ID NO: 2674827 - RNA, 19 nt, Artificial Sequence
  Description of Artificial Sequence: Synthetic oligonucleotide
ucuucuggaacaccuguua

SEQ ID NO: 2674828 - RNA, 19 nt, Artificial Sequence
  Description of Artificial Sequence: Synthetic oligonucleotide
uuuuaguuuaaaggucaca

SEQ ID NO: 2674829 - RNA, 19 nt, Artificial Sequence
  Description of Artificial Sequence: Synthetic oligonucleotide
aggauuuucccaucucucu

SEQ ID NO: 2674830 - RNA, 19 nt, Artificial Sequence
  Description of Artificial Sequence: Synthetic oligonucleotide
cuucucuuccacgucauag

SEQ ID NO: 2674831 - RNA, 19 nt, Artificial Sequence
  Description of Artificial Sequence: Synthetic oligonucleotide
aagaaaaguuugcaccaua

SEQ ID NO: 2674832 - RNA, 19 nt, Artificial Sequence
  Description of Artificial Sequence: Synthetic oligonucleotide
aaacggccgcuguagccac

SEQ ID NO: 2674833 - RNA, 19 nt, Artificial Sequence
  Description of Artificial Sequence: Synthetic oligonucleotide
ccauggacuauaaauagug

SEQ ID NO: 2674834 - RNA, 19 nt, Artificial Sequence
  Description of Artificial Sequence: Synthetic oligonucleotide
uuauaagcugugugucuug

SEQ ID NO: 2674835 - RNA, 19 nt, Artificial Sequence
  Description of Artificial Sequence: Synthetic oligonucleotide
aaaggcaacugcgucuucu

SEQ ID NO: 2674836 - RNA, 19 nt, Artificial Sequence
  Description of Artificial Sequence: Synthetic oligonucleotide
uuaguuuaaaggucacauu

SEQ ID NO: 2674837 - RNA, 19 nt, Artificial Sequence
  Description of Artificial Sequence: Synthetic oligonucleotide
aguuugguccugugccagc

SEQ ID NO: 2674838 - RNA, 19 nt, Artificial Sequence
  Description of Artificial Sequence: Synthetic oligonucleotide
uacuccagacugcauauua

SEQ ID NO: 2674839 - RNA, 19 nt, Artificial Sequence
  Description of Artificial Sequence: Synthetic oligonucleotide
caucaacuguuauaagcug

SEQ ID NO: 2674840 - RNA, 19 nt, Artificial Sequence
  Description of Artificial Sequence: Synthetic oligonucleotide
agcaggaacaaagauccug

SEQ ID NO: 2674841 - RNA, 19 nt, Artificial Sequence
  Description of Artificial Sequence: Synthetic oligonucleotide
uucgagcaggaacaaagau

SEQ ID NO: 2674842 - RNA, 19 nt, Artificial Sequence
  Description of Artificial Sequence: Synthetic oligonucleotide
ugguacugaagguuagaac

SEQ ID NO: 2674843 - RNA, 19 nt, Artificial Sequence
  Description of Artificial Sequence: Synthetic oligonucleotide
agauccugaccuuucuugu

SEQ ID NO: 2674844 - RNA, 19 nt, Artificial Sequence
  Description of Artificial Sequence: Synthetic oligonucleotide
auaaccuggauggaacucu

SEQ ID NO: 2674845 - RNA, 19 nt, Artificial Sequence
  Description of Artificial Sequence: Synthetic oligonucleotide
ggucacauuuauuaggaga

SEQ ID NO: 2674846 - RNA, 19 nt, Artificial Sequence
  Description of Artificial Sequence: Synthetic oligonucleotide
uuggguuuuggaaccuucu

SEQ ID NO: 2674847 - RNA, 19 nt, Artificial Sequence
  Description of Artificial Sequence: Synthetic oligonucleotide
gaugugcucuucuggaaca

SEQ ID NO: 2674848 - RNA, 19 nt, Artificial Sequence
  Description of Artificial Sequence: Synthetic oligonucleotide
cuugauucacagucaagca

SEQ ID NO: 2674849 - RNA, 19 nt, Artificial Sequence
  Description of Artificial Sequence: Synthetic oligonucleotide
agcgccgccacugacauug

SEQ ID NO: 2674850 - RNA, 19 nt, Artificial Sequence
  Description of Artificial Sequence: Synthetic oligonucleotide
aaccauguuggagagggau

SEQ ID NO: 2674851 - RNA, 19 nt, Artificial Sequence
  Description of Artificial Sequence: Synthetic oligonucleotide
ugccaaccuauuuuguaga

SEQ ID NO: 2674852 - RNA, 19 nt, Artificial Sequence
  Description of Artificial Sequence: Synthetic oligonucleotide
agccguugaugcccaaccc

SEQ ID NO: 2674853 - RNA, 19 nt, Artificial Sequence
  Description of Artificial Sequence: Synthetic oligonucleotide
acaacgccugucucagcgc

SEQ ID NO: 2674854 - RNA, 19 nt, Artificial Sequence
  Description of Artificial Sequence: Synthetic oligonucleotide
aacugcgucuucuuuggua

SEQ ID NO: 2674855 - RNA, 19 nt, Artificial Sequence
  Description of Artificial Sequence: Synthetic oligonucleotide
gaaccuucuucucuuccac

SEQ ID NO: 2674856 - RNA, 19 nt, Artificial Sequence
  Description of Artificial Sequence: Synthetic oligonucleotide
uucuggaacaccuguuaaa

SEQ ID NO: 2674857 - RNA, 19 nt, Artificial Sequence
  Description of Artificial Sequence: Synthetic oligonucleotide
ugaguuugguccugugcca

SEQ ID NO: 2674858 - RNA, 19 nt, Artificial Sequence
  Description of Artificial Sequence: Synthetic oligonucleotide
gaaaugaugccagugccaa

SEQ ID NO: 2674859 - RNA, 19 nt, Artificial Sequence
  Description of Artificial Sequence: Synthetic oligonucleotide
guuuacuccagacugcaua

SEQ ID NO: 2674860 - RNA, 19 nt, Artificial Sequence
  Description of Artificial Sequence: Synthetic oligonucleotide
guaucaaacuccagcuucc

SEQ ID NO: 2674861 - RNA, 19 nt, Artificial Sequence
  Description of Artificial Sequence: Synthetic oligonucleotide
acaaagauccugaccuuuc

SEQ ID NO: 2674862 - RNA, 19 nt, Artificial Sequence
  Description of Artificial Sequence: Synthetic oligonucleotide
uauaagcugugugucuuga

SEQ ID NO: 2674863 - RNA, 19 nt, Artificial Sequence
  Description of Artificial Sequence: Synthetic oligonucleotide
gcauauuauuucgagcagg

SEQ ID NO: 2674864 - RNA, 19 nt, Artificial Sequence
  Description of Artificial Sequence: Synthetic oligonucleotide
acaccuguuaaaguaguga

SEQ ID NO: 2674865 - RNA, 19 nt, Artificial Sequence
  Description of Artificial Sequence: Synthetic oligonucleotide
uccccaacaacgccugucu

SEQ ID NO: 2674866 - RNA, 19 nt, Artificial Sequence
  Description of Artificial Sequence: Synthetic oligonucleotide
agcagaaaugaugccagug

SEQ ID NO: 2674867 - RNA, 19 nt, Artificial Sequence
  Description of Artificial Sequence: Synthetic oligonucleotide
auaagcugugugucuugag

SEQ ID NO: 2674868 - RNA, 19 nt, Artificial Sequence
  Description of Artificial Sequence: Synthetic oligonucleotide
uuuuguagacacucuuguu

SEQ ID NO: 2674869 - RNA, 19 nt, Artificial Sequence
  Description of Artificial Sequence: Synthetic oligonucleotide
ugaagguuagaaccauguu

SEQ ID NO: 2674870 - RNA, 19 nt, Artificial Sequence
  Description of Artificial Sequence: Synthetic oligonucleotide
uuguguuguuuacuccaga

SEQ ID NO: 2674871 - RNA, 19 nt, Artificial Sequence
  Description of Artificial Sequence: Synthetic oligonucleotide
guuugcaccauaagacuug

SEQ ID NO: 2674872 - RNA, 19 nt, Artificial Sequence
  Description of Artificial Sequence: Synthetic oligonucleotide
cucuagagacggaaacggc

SEQ ID NO: 2674873 - RNA, 19 nt, Artificial Sequence
  Description of Artificial Sequence: Synthetic oligonucleotide
ucccaucucucucugguau

SEQ ID NO: 2674874 - RNA, 19 nt, Artificial Sequence
  Description of Artificial Sequence: Synthetic oligonucleotide
guuguuuacuccagacugc

SEQ ID NO: 2674875 - RNA, 19 nt, Artificial Sequence
  Description of Artificial Sequence: Synthetic oligonucleotide
gcaacugcgucuucuuugg

SEQ ID NO: 2674876 - RNA, 19 nt, Artificial Sequence
  Description of Artificial Sequence: Synthetic oligonucleotide
acccaucaaaggauuuucc

SEQ ID NO: 2674877 - RNA, 19 nt, Artificial Sequence
  Description of Artificial Sequence: Synthetic oligonucleotide
cuguuauaagcuguguguc

SEQ ID NO: 2674878 - RNA, 19 nt, Artificial Sequence
  Description of Artificial Sequence: Synthetic oligonucleotide
cuggauggaacucuagaga

SEQ ID NO: 2674879 - RNA, 19 nt, Artificial Sequence
  Description of Artificial Sequence: Synthetic oligonucleotide
uggaacucuagagacggaa

SEQ ID NO: 2674880 - RNA, 19 nt, Artificial Sequence
  Description of Artificial Sequence: Synthetic oligonucleotide
agugccaaccuauuuugua

SEQ ID NO: 2674881 - RNA, 19 nt, Artificial Sequence
  Description of Artificial Sequence: Synthetic oligonucleotide
auagugcacagcugacuug

SEQ ID NO: 2674882 - RNA, 19 nt, Artificial Sequence
  Description of Artificial Sequence: Synthetic oligonucleotide
uugguacugaagguuagaa

SEQ ID NO: 2674883 - RNA, 19 nt, Artificial Sequence
  Description of Artificial Sequence: Synthetic oligonucleotide
uucuccccaacaacgccug

SEQ ID NO: 2674884 - RNA, 19 nt, Artificial Sequence
  Description of Artificial Sequence: Synthetic oligonucleotide
uucuuugguacugaagguu

SEQ ID NO: 2674885 - RNA, 19 nt, Artificial Sequence
  Description of Artificial Sequence: Synthetic oligonucleotide
agaaaaguuugcaccauaa

SEQ ID NO: 2674886 - RNA, 19 nt, Artificial Sequence
  Description of Artificial Sequence: Synthetic oligonucleotide
aacaccuguuaaaguagug

SEQ ID NO: 2674887 - RNA, 19 nt, Artificial Sequence
  Description of Artificial Sequence: Synthetic oligonucleotide
uuugguacugaagguuaga

SEQ ID NO: 2674888 - RNA, 19 nt, Artificial Sequence
  Description of Artificial Sequence: Synthetic oligonucleotide
ccuggauggaacucuagag

SEQ ID NO: 2674889 - RNA, 19 nt, Artificial Sequence
  Description of Artificial Sequence: Synthetic oligonucleotide
guuccaagaaaaguuugca

SEQ ID NO: 2674890 - RNA, 19 nt, Artificial Sequence
  Description of Artificial Sequence: Synthetic oligonucleotide
aagcagaaaugaugccagu

SEQ ID NO: 2674891 - RNA, 19 nt, Artificial Sequence
  Description of Artificial Sequence: Synthetic oligonucleotide
agagggaucagccguugau

SEQ ID NO: 2674892 - RNA, 19 nt, Artificial Sequence
  Description of Artificial Sequence: Synthetic oligonucleotide
cauuucuuuguguuguuua

SEQ ID NO: 2674893 - RNA, 19 nt, Artificial Sequence
  Description of Artificial Sequence: Synthetic oligonucleotide
aaguagugauauccaguuu

SEQ ID NO: 2674894 - RNA, 19 nt, Artificial Sequence
  Description of Artificial Sequence: Synthetic oligonucleotide
uugaugugcucuucuggaa

SEQ ID NO: 2674895 - RNA, 19 nt, Artificial Sequence
  Description of Artificial Sequence: Synthetic oligonucleotide
gaaacggccgcuguagcca

SEQ ID NO: 2674896 - RNA, 19 nt, Artificial Sequence
  Description of Artificial Sequence: Synthetic oligonucleotide
gguuagaaccauguuggag

SEQ ID NO: 2674897 - RNA, 19 nt, Artificial Sequence
  Description of Artificial Sequence: Synthetic oligonucleotide
guuuaaaggucacauuuau

SEQ ID NO: 2674898 - RNA, 19 nt, Artificial Sequence
  Description of Artificial Sequence: Synthetic oligonucleotide
gucaagcagaaaugaugcc

SEQ ID NO: 2674899 - RNA, 19 nt, Artificial Sequence
  Description of Artificial Sequence: Synthetic oligonucleotide
ggaacaccuguuaaaguag

SEQ ID NO: 2674900 - RNA, 19 nt, Artificial Sequence
  Description of Artificial Sequence: Synthetic oligonucleotide
gagggaucagccguugaug

SEQ ID NO: 2674901 - RNA, 19 nt, Artificial Sequence
  Description of Artificial Sequence: Synthetic oligonucleotide
agccacugcccuucucccc

SEQ ID NO: 2674902 - RNA, 19 nt, Artificial Sequence
  Description of Artificial Sequence: Synthetic oligonucleotide
cagccguugaugcccaacc

SEQ ID NO: 2674903 - RNA, 19 nt, Artificial Sequence
  Description of Artificial Sequence: Synthetic oligonucleotide
agaaaugaugccagugcca

SEQ ID NO: 2674904 - RNA, 19 nt, Artificial Sequence
  Description of Artificial Sequence: Synthetic oligonucleotide
ggacuuggguuuuggaacc

SEQ ID NO: 2674905 - RNA, 19 nt, Artificial Sequence
  Description of Artificial Sequence: Synthetic oligonucleotide
ggcaacugcgucuucuuug

SEQ ID NO: 2674906 - RNA, 19 nt, Artificial Sequence
  Description of Artificial Sequence: Synthetic oligonucleotide
ugcauuauccauggacuau

SEQ ID NO: 2674907 - RNA, 19 nt, Artificial Sequence
  Description of Artificial Sequence: Synthetic oligonucleotide
cccaucaaaggauuuuccc

SEQ ID NO: 2674908 - RNA, 19 nt, Artificial Sequence
  Description of Artificial Sequence: Synthetic oligonucleotide
auuauccauggacuauaaa

SEQ ID NO: 2674909 - RNA, 19 nt, Artificial Sequence
  Description of Artificial Sequence: Synthetic oligonucleotide
ugucucagcgccgccacug

SEQ ID NO: 2674910 - RNA, 19 nt, Artificial Sequence
  Description of Artificial Sequence: Synthetic oligonucleotide
gaguuugguccugugccag

SEQ ID NO: 2674911 - RNA, 19 nt, Artificial Sequence
  Description of Artificial Sequence: Synthetic oligonucleotide
agacacucuuguucuuuug

SEQ ID NO: 2674912 - RNA, 19 nt, Artificial Sequence
  Description of Artificial Sequence: Synthetic oligonucleotide
acauuuauuaggagauuaa

SEQ ID NO: 2674913 - RNA, 19 nt, Artificial Sequence
  Description of Artificial Sequence: Synthetic oligonucleotide
caacgccugucucagcgcc

SEQ ID NO: 2674914 - RNA, 19 nt, Artificial Sequence
  Description of Artificial Sequence: Synthetic oligonucleotide
caaaggauuuucccaucuc

SEQ ID NO: 2674915 - RNA, 19 nt, Artificial Sequence
  Description of Artificial Sequence: Synthetic oligonucleotide
gguuuuggaaccuucuucu

SEQ ID NO: 2674916 - RNA, 19 nt, Artificial Sequence
  Description of Artificial Sequence: Synthetic oligonucleotide
cugguaucaaacuccagcu

SEQ ID NO: 2674917 - RNA, 19 nt, Artificial Sequence
  Description of Artificial Sequence: Synthetic oligonucleotide
gacuugauucacagucaag

SEQ ID NO: 2674918 - RNA, 19 nt, Artificial Sequence
  Description of Artificial Sequence: Synthetic oligonucleotide
ugguaucaaacuccagcuu

SEQ ID NO: 2674919 - RNA, 19 nt, Artificial Sequence
  Description of Artificial Sequence: Synthetic oligonucleotide
acuuggacuuggguuuugg

SEQ ID NO: 2674920 - RNA, 19 nt, Artificial Sequence
  Description of Artificial Sequence: Synthetic oligonucleotide
ugcgucuucuuugguacug

SEQ ID NO: 2674921 - RNA, 19 nt, Artificial Sequence
  Description of Artificial Sequence: Synthetic oligonucleotide
acggaaacggccgcuguag

SEQ ID NO: 2674922 - RNA, 19 nt, Artificial Sequence
  Description of Artificial Sequence: Synthetic oligonucleotide
auuaggagauuaagaggug

SEQ ID NO: 2674923 - RNA, 19 nt, Artificial Sequence
  Description of Artificial Sequence: Synthetic oligonucleotide
gucacauuuauuaggagau

SEQ ID NO: 2674924 - RNA, 19 nt, Artificial Sequence
  Description of Artificial Sequence: Synthetic oligonucleotide
uggguuuuggaaccuucuu

SEQ ID NO: 2674925 - RNA, 19 nt, Artificial Sequence
  Description of Artificial Sequence: Synthetic oligonucleotide
cugacuugauucacaguca

SEQ ID NO: 2674926 - RNA, 19 nt, Artificial Sequence
  Description of Artificial Sequence: Synthetic oligonucleotide
aguuuaaaggucacauuua

SEQ ID NO: 2674927 - RNA, 19 nt, Artificial Sequence
  Description of Artificial Sequence: Synthetic oligonucleotide
uaucaaacuccagcuucca

SEQ ID NO: 2674928 - RNA, 19 nt, Artificial Sequence
  Description of Artificial Sequence: Synthetic oligonucleotide
gacacucuuguucuuuugu

SEQ ID NO: 2674929 - RNA, 19 nt, Artificial Sequence
  Description of Artificial Sequence: Synthetic oligonucleotide
cugaagguuagaaccaugu

SEQ ID NO: 2674930 - RNA, 19 nt, Artificial Sequence
  Description of Artificial Sequence: Synthetic oligonucleotide
cacauuuauuaggagauua

SEQ ID NO: 2674931 - RNA, 19 nt, Artificial Sequence
  Description of Artificial Sequence: Synthetic oligonucleotide
cacagucaagcagaaauga

SEQ ID NO: 2674932 - RNA, 19 nt, Artificial Sequence
  Description of Artificial Sequence: Synthetic oligonucleotide
ccaagaaaaguuugcacca

SEQ ID NO: 2674933 - RNA, 19 nt, Artificial Sequence
  Description of Artificial Sequence: Synthetic oligonucleotide
ccagacugcauauuauuuc

SEQ ID NO: 2674934 - RNA, 19 nt, Artificial Sequence
  Description of Artificial Sequence: Synthetic oligonucleotide
ugugcucuucuggaacacc

SEQ ID NO: 2674935 - RNA, 19 nt, Artificial Sequence
  Description of Artificial Sequence: Synthetic oligonucleotide
ggaucagccguugaugccc

SEQ ID NO: 2674936 - RNA, 19 nt, Artificial Sequence
  Description of Artificial Sequence: Synthetic oligonucleotide
ggguuuuggaaccuucuuc

SEQ ID NO: 2674937 - RNA, 19 nt, Artificial Sequence
  Description of Artificial Sequence: Synthetic oligonucleotide
aguuugcaccauaagacuu

SEQ ID NO: 2674938 - RNA, 19 nt, Artificial Sequence
  Description of Artificial Sequence: Synthetic oligonucleotide
caggaacaaagauccugac

SEQ ID NO: 2674939 - RNA, 19 nt, Artificial Sequence
  Description of Artificial Sequence: Synthetic oligonucleotide
caucaaaggauuuucccau

SEQ ID NO: 2674940 - RNA, 19 nt, Artificial Sequence
  Description of Artificial Sequence: Synthetic oligonucleotide
uucuuguuuugaugugcuc

SEQ ID NO: 2674941 - RNA, 19 nt, Artificial Sequence
  Description of Artificial Sequence: Synthetic oligonucleotide
uuauuucgagcaggaacaa

SEQ ID NO: 2674942 - RNA, 19 nt, Artificial Sequence
  Description of Artificial Sequence: Synthetic oligonucleotide
cugcaaaggcaacugcguc

SEQ ID NO: 2674943 - RNA, 19 nt, Artificial Sequence
  Description of Artificial Sequence: Synthetic oligonucleotide
acgucauagcuccauccau

SEQ ID NO: 2674944 - RNA, 19 nt, Artificial Sequence
  Description of Artificial Sequence: Synthetic oligonucleotide
uccacgucauagcuccauc

SEQ ID NO: 2674945 - RNA, 19 nt, Artificial Sequence
  Description of Artificial Sequence: Synthetic oligonucleotide
ggacuauaaauagugcaca

SEQ ID NO: 2674946 - RNA, 19 nt, Artificial Sequence
  Description of Artificial Sequence: Synthetic oligonucleotide
uagacacucuuguucuuuu

SEQ ID NO: 2674947 - RNA, 19 nt, Artificial Sequence
  Description of Artificial Sequence: Synthetic oligonucleotide
ggauggaacucuagagacg

SEQ ID NO: 2674948 - RNA, 19 nt, Artificial Sequence
  Description of Artificial Sequence: Synthetic oligonucleotide
augugcucuucuggaacac

SEQ ID NO: 2674949 - RNA, 19 nt, Artificial Sequence
  Description of Artificial Sequence: Synthetic oligonucleotide
ggaaacggccgcuguagcc

SEQ ID NO: 2674950 - RNA, 19 nt, Artificial Sequence
  Description of Artificial Sequence: Synthetic oligonucleotide
agauuaagaggugcauuau

SEQ ID NO: 2674951 - RNA, 19 nt, Artificial Sequence
  Description of Artificial Sequence: Synthetic oligonucleotide
cuguuaaaguagugauauc

SEQ ID NO: 2674952 - RNA, 19 nt, Artificial Sequence
  Description of Artificial Sequence: Synthetic oligonucleotide
caccauaagacuuggacuu

SEQ ID NO: 2674953 - RNA, 19 nt, Artificial Sequence
  Description of Artificial Sequence: Synthetic oligonucleotide
uguuuacuccagacugcau

SEQ ID NO: 2674954 - RNA, 19 nt, Artificial Sequence
  Description of Artificial Sequence: Synthetic oligonucleotide
uauuucgagcaggaacaaa

SEQ ID NO: 2674955 - RNA, 19 nt, Artificial Sequence
  Description of Artificial Sequence: Synthetic oligonucleotide
agcuuccauuucuuugugu

SEQ ID NO: 2674956 - RNA, 19 nt, Artificial Sequence
  Description of Artificial Sequence: Synthetic oligonucleotide
cucaauaaccuggauggaa

SEQ ID NO: 2674957 - RNA, 19 nt, Artificial Sequence
  Description of Artificial Sequence: Synthetic oligonucleotide
ugugugucuugaguuuggu

SEQ ID NO: 2674958 - RNA, 19 nt, Artificial Sequence
  Description of Artificial Sequence: Synthetic oligonucleotide
uacugaagguuagaaccau

SEQ ID NO: 2674959 - RNA, 19 nt, Artificial Sequence
  Description of Artificial Sequence: Synthetic oligonucleotide
ccagugccaaccuauuuug

SEQ ID NO: 2674960 - RNA, 19 nt, Artificial Sequence
  Description of Artificial Sequence: Synthetic oligonucleotide
cucuuccacgucauagcuc

SEQ ID NO: 2674961 - RNA, 19 nt, Artificial Sequence
  Description of Artificial Sequence: Synthetic oligonucleotide
agguuagaaccauguugga

SEQ ID NO: 2674962 - RNA, 19 nt, Artificial Sequence
  Description of Artificial Sequence: Synthetic oligonucleotide
uccauguggaugugcucaa

SEQ ID NO: 2674963 - RNA, 19 nt, Artificial Sequence
  Description of Artificial Sequence: Synthetic oligonucleotide
aaccuauuuuguagacacu

SEQ ID NO: 2674964 - RNA, 19 nt, Artificial Sequence
  Description of Artificial Sequence: Synthetic oligonucleotide
acugaagguuagaaccaug

SEQ ID NO: 2674965 - RNA, 19 nt, Artificial Sequence
  Description of Artificial Sequence: Synthetic oligonucleotide
cacgucauagcuccaucca

SEQ ID NO: 2674966 - RNA, 19 nt, Artificial Sequence
  Description of Artificial Sequence: Synthetic oligonucleotide
aaccuggauggaacucuag

SEQ ID NO: 2674967 - RNA, 19 nt, Artificial Sequence
  Description of Artificial Sequence: Synthetic oligonucleotide
ucauagcuccauccauuuu

SEQ ID NO: 2674968 - RNA, 19 nt, Artificial Sequence
  Description of Artificial Sequence: Synthetic oligonucleotide
accauaagacuuggacuug

SEQ ID NO: 2674969 - RNA, 19 nt, Artificial Sequence
  Description of Artificial Sequence: Synthetic oligonucleotide
auauuauuucgagcaggaa

SEQ ID NO: 2674970 - RNA, 19 nt, Artificial Sequence
  Description of Artificial Sequence: Synthetic oligonucleotide
aggagauuaagaggugcau

SEQ ID NO: 2674971 - RNA, 19 nt, Artificial Sequence
  Description of Artificial Sequence: Synthetic oligonucleotide
uguagacacucuuguucuu

SEQ ID NO: 2674972 - RNA, 19 nt, Artificial Sequence
  Description of Artificial Sequence: Synthetic oligonucleotide
gagacggaaacggccgcug

SEQ ID NO: 2674973 - RNA, 19 nt, Artificial Sequence
  Description of Artificial Sequence: Synthetic oligonucleotide
cauuauccauggacuauaa

SEQ ID NO: 2674974 - RNA, 19 nt, Artificial Sequence
  Description of Artificial Sequence: Synthetic oligonucleotide
guguuguuuacuccagacu

SEQ ID NO: 2674975 - RNA, 19 nt, Artificial Sequence
  Description of Artificial Sequence: Synthetic oligonucleotide
cucugguaucaaacuccag

SEQ ID NO: 2674976 - RNA, 19 nt, Artificial Sequence
  Description of Artificial Sequence: Synthetic oligonucleotide
gugugucuugaguuugguc

SEQ ID NO: 2674977 - RNA, 19 nt, Artificial Sequence
  Description of Artificial Sequence: Synthetic oligonucleotide
uggagagggaucagccguu

SEQ ID NO: 2674978 - RNA, 19 nt, Artificial Sequence
  Description of Artificial Sequence: Synthetic oligonucleotide
ggugcauuauccauggacu

SEQ ID NO: 2674979 - RNA, 19 nt, Artificial Sequence
  Description of Artificial Sequence: Synthetic oligonucleotide
agcugacuugauucacagu

SEQ ID NO: 2674980 - RNA, 19 nt, Artificial Sequence
  Description of Artificial Sequence: Synthetic oligonucleotide
uuguuuugaugugcucuuc

SEQ ID NO: 2674981 - RNA, 19 nt, Artificial Sequence
  Description of Artificial Sequence: Synthetic oligonucleotide
ucacauuuauuaggagauu

SEQ ID NO: 2674982 - RNA, 19 nt, Artificial Sequence
  Description of Artificial Sequence: Synthetic oligonucleotide
gcaggaacaaagauccuga

SEQ ID NO: 2674983 - RNA, 19 nt, Artificial Sequence
  Description of Artificial Sequence: Synthetic oligonucleotide
gauucacagucaagcagaa

SEQ ID NO: 2674984 - RNA, 19 nt, Artificial Sequence
  Description of Artificial Sequence: Synthetic oligonucleotide
ccacgucauagcuccaucc

SEQ ID NO: 2674985 - RNA, 19 nt, Artificial Sequence
  Description of Artificial Sequence: Synthetic oligonucleotide
cacagcugacuugauucac

SEQ ID NO: 2674986 - RNA, 19 nt, Artificial Sequence
  Description of Artificial Sequence: Synthetic oligonucleotide
gugcauuauccauggacua

SEQ ID NO: 2674987 - RNA, 19 nt, Artificial Sequence
  Description of Artificial Sequence: Synthetic oligonucleotide
ccauaagacuuggacuugg

SEQ ID NO: 2674988 - RNA, 19 nt, Artificial Sequence
  Description of Artificial Sequence: Synthetic oligonucleotide
uccugaccuuucuuguuuu

SEQ ID NO: 2674989 - RNA, 19 nt, Artificial Sequence
  Description of Artificial Sequence: Synthetic oligonucleotide
uugcaccauaagacuugga

SEQ ID NO: 2674990 - RNA, 19 nt, Artificial Sequence
  Description of Artificial Sequence: Synthetic oligonucleotide
ucucagcgccgccacugac

SEQ ID NO: 2674991 - RNA, 19 nt, Artificial Sequence
  Description of Artificial Sequence: Synthetic oligonucleotide
ucagccguugaugcccaac

SEQ ID NO: 2674992 - RNA, 19 nt, Artificial Sequence
  Description of Artificial Sequence: Synthetic oligonucleotide
agacggaaacggccgcugu

SEQ ID NO: 2674993 - RNA, 19 nt, Artificial Sequence
  Description of Artificial Sequence: Synthetic oligonucleotide
cauguggaugugcucaaua

SEQ ID NO: 2674994 - RNA, 19 nt, Artificial Sequence
  Description of Artificial Sequence: Synthetic oligonucleotide
ccaacaacgccugucucag

SEQ ID NO: 2674995 - RNA, 19 nt, Artificial Sequence
  Description of Artificial Sequence: Synthetic oligonucleotide
agacugcauauuauuucga

SEQ ID NO: 2674996 - RNA, 19 nt, Artificial Sequence
  Description of Artificial Sequence: Synthetic oligonucleotide
caauaaccuggauggaacu

SEQ ID NO: 2674997 - RNA, 19 nt, Artificial Sequence
  Description of Artificial Sequence: Synthetic oligonucleotide
guuauaagcugugugucuu

SEQ ID NO: 2674998 - RNA, 19 nt, Artificial Sequence
  Description of Artificial Sequence: Synthetic oligonucleotide
gaacaccuguuaaaguagu

SEQ ID NO: 2674999 - RNA, 19 nt, Artificial Sequence
  Description of Artificial Sequence: Synthetic oligonucleotide
uucccaucucucucuggua

SEQ ID NO: 2675000 - RNA, 19 nt, Artificial Sequence
  Description of Artificial Sequence: Synthetic oligonucleotide
uuccacgucauagcuccau

SEQ ID NO: 2675001 - RNA, 19 nt, Artificial Sequence
  Description of Artificial Sequence: Synthetic oligonucleotide
agagacggaaacggccgcu

SEQ ID NO: 2675002 - RNA, 19 nt, Artificial Sequence
  Description of Artificial Sequence: Synthetic oligonucleotide
accuguuaaaguagugaua

SEQ ID NO: 2675003 - RNA, 19 nt, Artificial Sequence
  Description of Artificial Sequence: Synthetic oligonucleotide
gccaaccuauuuuguagac

SEQ ID NO: 2675004 - RNA, 19 nt, Artificial Sequence
  Description of Artificial Sequence: Synthetic oligonucleotide
gggaucagccguugaugcc

SEQ ID NO: 2675005 - RNA, 19 nt, Artificial Sequence
  Description of Artificial Sequence: Synthetic oligonucleotide
gccagcuuccauguggaug

SEQ ID NO: 2675006 - RNA, 19 nt, Artificial Sequence
  Description of Artificial Sequence: Synthetic oligonucleotide
uuugguccugugccagcuu

SEQ ID NO: 2675007 - RNA, 19 nt, Artificial Sequence
  Description of Artificial Sequence: Synthetic oligonucleotide
gagagggaucagccguuga

SEQ ID NO: 2675008 - RNA, 19 nt, Artificial Sequence
  Description of Artificial Sequence: Synthetic oligonucleotide
ccuguuaaaguagugauau

SEQ ID NO: 2675009 - RNA, 19 nt, Artificial Sequence
  Description of Artificial Sequence: Synthetic oligonucleotide
gacggaaacggccgcugua

SEQ ID NO: 2675010 - RNA, 19 nt, Artificial Sequence
  Description of Artificial Sequence: Synthetic oligonucleotide
cccuucuccccaacaacgc

SEQ ID NO: 2675011 - RNA, 19 nt, Artificial Sequence
  Description of Artificial Sequence: Synthetic oligonucleotide
caacaacgccugucucagc

SEQ ID NO: 2675012 - RNA, 19 nt, Artificial Sequence
  Description of Artificial Sequence: Synthetic oligonucleotide
ccagcuuccauguggaugu

SEQ ID NO: 2675013 - RNA, 19 nt, Artificial Sequence
  Description of Artificial Sequence: Synthetic oligonucleotide
ggccgcuguagccacugcc

SEQ ID NO: 2675014 - RNA, 19 nt, Artificial Sequence
  Description of Artificial Sequence: Synthetic oligonucleotide
gccguugaugcccaaccca

SEQ ID NO: 2675015 - RNA, 19 nt, Artificial Sequence
  Description of Artificial Sequence: Synthetic oligonucleotide
gauccugaccuuucuuguu

SEQ ID NO: 2675016 - RNA, 19 nt, Artificial Sequence
  Description of Artificial Sequence: Synthetic oligonucleotide
aggcaacugcgucuucuuu

SEQ ID NO: 2675017 - RNA, 19 nt, Artificial Sequence
  Description of Artificial Sequence: Synthetic oligonucleotide
ucuccccaacaacgccugu

SEQ ID NO: 2675018 - RNA, 19 nt, Artificial Sequence
  Description of Artificial Sequence: Synthetic oligonucleotide
uuacuccagacugcauauu

SEQ ID NO: 2675019 - RNA, 19 nt, Artificial Sequence
  Description of Artificial Sequence: Synthetic oligonucleotide
cuggaacaccuguuaaagu

SEQ ID NO: 2675020 - RNA, 19 nt, Artificial Sequence
  Description of Artificial Sequence: Synthetic oligonucleotide
gacuuggacuuggguuuug

SEQ ID NO: 2675021 - RNA, 19 nt, Artificial Sequence
  Description of Artificial Sequence: Synthetic oligonucleotide
ccauguuggagagggauca

SEQ ID NO: 2675022 - RNA, 19 nt, Artificial Sequence
  Description of Artificial Sequence: Synthetic oligonucleotide
gccgcuguagccacugccc

SEQ ID NO: 2675023 - RNA, 19 nt, Artificial Sequence
  Description of Artificial Sequence: Synthetic oligonucleotide
cccaacaacgccugucuca

SEQ ID NO: 2675024 - RNA, 19 nt, Artificial Sequence
  Description of Artificial Sequence: Synthetic oligonucleotide
gugccagcuuccaugugga

SEQ ID NO: 2675025 - RNA, 19 nt, Artificial Sequence
  Description of Artificial Sequence: Synthetic oligonucleotide
gcauuauccauggacuaua

SEQ ID NO: 2675026 - RNA, 19 nt, Artificial Sequence
  Description of Artificial Sequence: Synthetic oligonucleotide
cuccagacugcauauuauu

SEQ ID NO: 2675027 - RNA, 19 nt, Artificial Sequence
  Description of Artificial Sequence: Synthetic oligonucleotide
gaggugcauuauccaugga

SEQ ID NO: 2675028 - RNA, 19 nt, Artificial Sequence
  Description of Artificial Sequence: Synthetic oligonucleotide
acggccgcuguagccacug

SEQ ID NO: 2675029 - RNA, 19 nt, Artificial Sequence
  Description of Artificial Sequence: Synthetic oligonucleotide
agacuuggacuuggguuuu

SEQ ID NO: 2675030 - RNA, 19 nt, Artificial Sequence
  Description of Artificial Sequence: Synthetic oligonucleotide
gaaccauguuggagaggga

SEQ ID NO: 2675031 - RNA, 19 nt, Artificial Sequence
  Description of Artificial Sequence: Synthetic oligonucleotide
ccuauuuuguagacacucu

SEQ ID NO: 2675032 - RNA, 19 nt, Artificial Sequence
  Description of Artificial Sequence: Synthetic oligonucleotide
guagacacucuuguucuuu

SEQ ID NO: 2675033 - RNA, 19 nt, Artificial Sequence
  Description of Artificial Sequence: Synthetic oligonucleotide
gucucagcgccgccacuga

SEQ ID NO: 2675034 - RNA, 19 nt, Artificial Sequence
  Description of Artificial Sequence: Synthetic oligonucleotide
ggagagggaucagccguug

SEQ ID NO: 2675035 - RNA, 19 nt, Artificial Sequence
  Description of Artificial Sequence: Synthetic oligonucleotide
ccugucucagcgccgccac

SEQ ID NO: 2675036 - RNA, 19 nt, Artificial Sequence
  Description of Artificial Sequence: Synthetic oligonucleotide
gccagugccaaccuauuuu

SEQ ID NO: 2675037 - RNA, 19 nt, Artificial Sequence
  Description of Artificial Sequence: Synthetic oligonucleotide
ugccagcuuccauguggau

SEQ ID NO: 2675038 - RNA, 19 nt, Artificial Sequence
  Description of Artificial Sequence: Synthetic oligonucleotide
gcuuccauguggaugugcu

SEQ ID NO: 2675039 - RNA, 19 nt, Artificial Sequence
  Description of Artificial Sequence: Synthetic oligonucleotide
ccaaccuauuuuguagaca

SEQ ID NO: 2675040 - RNA, 19 nt, Artificial Sequence
  Description of Artificial Sequence: Synthetic oligonucleotide
cugugccagcuuccaugug

SEQ ID NO: 2675041 - RNA, 19 nt, Artificial Sequence
  Description of Artificial Sequence: Synthetic oligonucleotide
auggaacucuagagacgga

SEQ ID NO: 2675042 - RNA, 19 nt, Artificial Sequence
  Description of Artificial Sequence: Synthetic oligonucleotide
ggagauuaagaggugcauu

SEQ ID NO: 2675043 - RNA, 19 nt, Artificial Sequence
  Description of Artificial Sequence: Synthetic oligonucleotide
cccaucucucucugguauc

SEQ ID NO: 2675044 - RNA, 19 nt, Artificial Sequence
  Description of Artificial Sequence: Synthetic oligonucleotide
caacuguuauaagcugugu

SEQ ID NO: 2675045 - RNA, 19 nt, Artificial Sequence
  Description of Artificial Sequence: Synthetic oligonucleotide
gacuuggguuuuggaaccu

SEQ ID NO: 2675046 - RNA, 19 nt, Artificial Sequence
  Description of Artificial Sequence: Synthetic oligonucleotide
cuuccacgucauagcucca

SEQ ID NO: 2675047 - RNA, 19 nt, Artificial Sequence
  Description of Artificial Sequence: Synthetic oligonucleotide
cagugccaaccuauuuugu

SEQ ID NO: 2675048 - RNA, 19 nt, Artificial Sequence
  Description of Artificial Sequence: Synthetic oligonucleotide
ccaucucucucugguauca

SEQ ID NO: 2675049 - RNA, 19 nt, Artificial Sequence
  Description of Artificial Sequence: Synthetic oligonucleotide
caacccaucaaaggauuuu

SEQ ID NO: 2675050 - RNA, 19 nt, Artificial Sequence
  Description of Artificial Sequence: Synthetic oligonucleotide
aacggccgcuguagccacu

SEQ ID NO: 2675051 - RNA, 19 nt, Artificial Sequence
  Description of Artificial Sequence: Synthetic oligonucleotide
cacugcccuucuccccaac

SEQ ID NO: 2675052 - RNA, 19 nt, Artificial Sequence
  Description of Artificial Sequence: Synthetic oligonucleotide
gcucaauaaccuggaugga

SEQ ID NO: 2675053 - RNA, 19 nt, Artificial Sequence
  Description of Artificial Sequence: Synthetic oligonucleotide
aucagccguugaugcccaa

SEQ ID NO: 2675054 - RNA, 19 nt, Artificial Sequence
  Description of Artificial Sequence: Synthetic oligonucleotide
cguugaugcccaacccauc

SEQ ID NO: 2675055 - RNA, 19 nt, Artificial Sequence
  Description of Artificial Sequence: Synthetic oligonucleotide
cggaaacggccgcuguagc

SEQ ID NO: 2675056 - RNA, 19 nt, Artificial Sequence
  Description of Artificial Sequence: Synthetic oligonucleotide
gcgucuucuuugguacuga

SEQ ID NO: 2675057 - RNA, 19 nt, Artificial Sequence
  Description of Artificial Sequence: Synthetic oligonucleotide
cugcgucuucuuugguacu

SEQ ID NO: 2675058 - RNA, 19 nt, Artificial Sequence
  Description of Artificial Sequence: Synthetic oligonucleotide
ccguugaugcccaacccau

SEQ ID NO: 2675059 - RNA, 19 nt, Artificial Sequence
  Description of Artificial Sequence: Synthetic oligonucleotide
ccccaacaacgccugucuc

SEQ ID NO: 2675060 - RNA, 19 nt, Artificial Sequence
  Description of Artificial Sequence: Synthetic oligonucleotide
caacugcgucuucuuuggu

SEQ ID NO: 2675061 - RNA, 19 nt, Artificial Sequence
  Description of Artificial Sequence: Synthetic oligonucleotide
gcccaacccaucaaaggau

SEQ ID NO: 2675062 - RNA, 19 nt, Artificial Sequence
  Description of Artificial Sequence: Synthetic oligonucleotide
cgucauagcuccauccauu

SEQ ID NO: 2675063 - RNA, 19 nt, Artificial Sequence
  Description of Artificial Sequence: Synthetic oligonucleotide
ccaacccaucaaaggauuu

SEQ ID NO: 2675064 - RNA, 19 nt, Artificial Sequence
  Description of Artificial Sequence: Synthetic oligonucleotide
cugucucagcgccgccacu

SEQ ID NO: 2675065 - RNA, 19 nt, Artificial Sequence
  Description of Artificial Sequence: Synthetic oligonucleotide
ccgcuguagccacugcccu

SEQ ID NO: 2675066 - RNA, 19 nt, Artificial Sequence
  Description of Artificial Sequence: Synthetic oligonucleotide
ccacugcccuucuccccaa

SEQ ID NO: 2675067 - RNA, 19 nt, Artificial Sequence
  Description of Artificial Sequence: Synthetic oligonucleotide
cgccugucucagcgccgcc

SEQ ID NO: 2675068 - RNA, 19 nt, Artificial Sequence
  Description of Artificial Sequence: Synthetic oligonucleotide
cggccgcuguagccacugc

SEQ ID NO: 2675069 - RNA, 19 nt, Artificial Sequence
  Description of Artificial Sequence: Synthetic oligonucleotide
cgcuguagccacugcccuu

SEQ ID NO: 2675070 - RNA, 19 nt, Artificial Sequence
  Description of Artificial Sequence: Synthetic oligonucleotide
cagcgccgccacugacauu

SEQ ID NO: 2675071 - RNA, 19 nt, Artificial Sequence
  Description of Artificial Sequence: Synthetic oligonucleotide
uaagauacacauuuuagcc

SEQ ID NO: 2675072 - RNA, 19 nt, Artificial Sequence
  Description of Artificial Sequence: Synthetic oligonucleotide
cuaagauacacauuuuagc

SEQ ID NO: 2675073 - RNA, 19 nt, Artificial Sequence
  Description of Artificial Sequence: Synthetic oligonucleotide
cugaauaagggcuuggccc

SEQ ID NO: 2675074 - RNA, 19 nt, Artificial Sequence
  Description of Artificial Sequence: Synthetic oligonucleotide
uucacauccacuuggacca

SEQ ID NO: 2675075 - RNA, 19 nt, Artificial Sequence
  Description of Artificial Sequence: Synthetic oligonucleotide
aggaaaagggcgcaagugc

SEQ ID NO: 2675076 - RNA, 19 nt, Artificial Sequence
  Description of Artificial Sequence: Synthetic oligonucleotide
uuucacauccacuuggacc

SEQ ID NO: 2675077 - RNA, 19 nt, Artificial Sequence
  Description of Artificial Sequence: Synthetic oligonucleotide
agauacacauuuuagccag

SEQ ID NO: 2675078 - RNA, 19 nt, Artificial Sequence
  Description of Artificial Sequence: Synthetic oligonucleotide
aacuucaacacaggguugc

SEQ ID NO: 2675079 - RNA, 19 nt, Artificial Sequence
  Description of Artificial Sequence: Synthetic oligonucleotide
ugggcaauggcauacucgg

SEQ ID NO: 2675080 - RNA, 19 nt, Artificial Sequence
  Description of Artificial Sequence: Synthetic oligonucleotide
cugaggaucuuucacaucc

SEQ ID NO: 2675081 - RNA, 19 nt, Artificial Sequence
  Description of Artificial Sequence: Synthetic oligonucleotide
aagauacacauuuuagcca

SEQ ID NO: 2675082 - RNA, 19 nt, Artificial Sequence
  Description of Artificial Sequence: Synthetic oligonucleotide
guggauguagucuggaugg

SEQ ID NO: 2675083 - RNA, 19 nt, Artificial Sequence
  Description of Artificial Sequence: Synthetic oligonucleotide
uccgcuaagauacacauuu

SEQ ID NO: 2675084 - RNA, 19 nt, Artificial Sequence
  Description of Artificial Sequence: Synthetic oligonucleotide
auagucaggggucaccucg

SEQ ID NO: 2675085 - RNA, 19 nt, Artificial Sequence
  Description of Artificial Sequence: Synthetic oligonucleotide
ugcucauaugccuuguagg

SEQ ID NO: 2675086 - RNA, 19 nt, Artificial Sequence
  Description of Artificial Sequence: Synthetic oligonucleotide
ugcuauuggauuucgcucc

SEQ ID NO: 2675087 - RNA, 19 nt, Artificial Sequence
  Description of Artificial Sequence: Synthetic oligonucleotide
ugaauaagggcuuggcccc

SEQ ID NO: 2675088 - RNA, 19 nt, Artificial Sequence
  Description of Artificial Sequence: Synthetic oligonucleotide
uucgcucccguuuucaccg

SEQ ID NO: 2675089 - RNA, 19 nt, Artificial Sequence
  Description of Artificial Sequence: Synthetic oligonucleotide
ugaggaucugaauaagggc

SEQ ID NO: 2675090 - RNA, 19 nt, Artificial Sequence
  Description of Artificial Sequence: Synthetic oligonucleotide
uucaacacaggguugcccc

SEQ ID NO: 2675091 - RNA, 19 nt, Artificial Sequence
  Description of Artificial Sequence: Synthetic oligonucleotide
augcuauuggauuucgcuc

SEQ ID NO: 2675092 - RNA, 19 nt, Artificial Sequence
  Description of Artificial Sequence: Synthetic oligonucleotide
uugcgcacgaacuucaaca

SEQ ID NO: 2675093 - RNA, 19 nt, Artificial Sequence
  Description of Artificial Sequence: Synthetic oligonucleotide
agccagguccuucagggcc

SEQ ID NO: 2675094 - RNA, 19 nt, Artificial Sequence
  Description of Artificial Sequence: Synthetic oligonucleotide
uggauggagauugugguag

SEQ ID NO: 2675095 - RNA, 19 nt, Artificial Sequence
  Description of Artificial Sequence: Synthetic oligonucleotide
uuuagccagguccuucagg

SEQ ID NO: 2675096 - RNA, 19 nt, Artificial Sequence
  Description of Artificial Sequence: Synthetic oligonucleotide
gugaggaucugaauaaggg

SEQ ID NO: 2675097 - RNA, 19 nt, Artificial Sequence
  Description of Artificial Sequence: Synthetic oligonucleotide
aauggcauacucggcguac

SEQ ID NO: 2675098 - RNA, 19 nt, Artificial Sequence
  Description of Artificial Sequence: Synthetic oligonucleotide
agugggaucacaaacuucu

SEQ ID NO: 2675099 - RNA, 19 nt, Artificial Sequence
  Description of Artificial Sequence: Synthetic oligonucleotide
guuuucaccgucuggccgg

SEQ ID NO: 2675100 - RNA, 19 nt, Artificial Sequence
  Description of Artificial Sequence: Synthetic oligonucleotide
acaggguugccccucugcc

SEQ ID NO: 2675101 - RNA, 19 nt, Artificial Sequence
  Description of Artificial Sequence: Synthetic oligonucleotide
guagucuggauggagauug

SEQ ID NO: 2675102 - RNA, 19 nt, Artificial Sequence
  Description of Artificial Sequence: Synthetic oligonucleotide
uccagugggaucacaaacu

SEQ ID NO: 2675103 - RNA, 19 nt, Artificial Sequence
  Description of Artificial Sequence: Synthetic oligonucleotide
uuccagugggaucacaaac

SEQ ID NO: 2675104 - RNA, 19 nt, Artificial Sequence
  Description of Artificial Sequence: Synthetic oligonucleotide
gagauugugguagcggagg

SEQ ID NO: 2675105 - RNA, 19 nt, Artificial Sequence
  Description of Artificial Sequence: Synthetic oligonucleotide
acuuggaccaacagcacac

SEQ ID NO: 2675106 - RNA, 19 nt, Artificial Sequence
  Description of Artificial Sequence: Synthetic oligonucleotide
gggaucacaaacuucuucc

SEQ ID NO: 2675107 - RNA, 19 nt, Artificial Sequence
  Description of Artificial Sequence: Synthetic oligonucleotide
aauucccagggcacguugc

SEQ ID NO: 2675108 - RNA, 19 nt, Artificial Sequence
  Description of Artificial Sequence: Synthetic oligonucleotide
uggagauugugguagcgga

SEQ ID NO: 2675109 - RNA, 19 nt, Artificial Sequence
  Description of Artificial Sequence: Synthetic oligonucleotide
uccaugaggaggucagcgg

SEQ ID NO: 2675110 - RNA, 19 nt, Artificial Sequence
  Description of Artificial Sequence: Synthetic oligonucleotide
gaugcuauuggauuucgcu

SEQ ID NO: 2675111 - RNA, 19 nt, Artificial Sequence
  Description of Artificial Sequence: Synthetic oligonucleotide
ggcaauggcauacucggcg

SEQ ID NO: 2675112 - RNA, 19 nt, Artificial Sequence
  Description of Artificial Sequence: Synthetic oligonucleotide
agguucagagccugugggc

SEQ ID NO: 2675113 - RNA, 19 nt, Artificial Sequence
  Description of Artificial Sequence: Synthetic oligonucleotide
acaaggaugcuauuggauu

SEQ ID NO: 2675114 - RNA, 19 nt, Artificial Sequence
  Description of Artificial Sequence: Synthetic oligonucleotide
uuccgugaggaucugaaua

SEQ ID NO: 2675115 - RNA, 19 nt, Artificial Sequence
  Description of Artificial Sequence: Synthetic oligonucleotide
aucugaauaagggcuuggc

SEQ ID NO: 2675116 - RNA, 19 nt, Artificial Sequence
  Description of Artificial Sequence: Synthetic oligonucleotide
uggaccaacagcacacgca

SEQ ID NO: 2675117 - RNA, 19 nt, Artificial Sequence
  Description of Artificial Sequence: Synthetic oligonucleotide
ucgucuuccagugggauca

SEQ ID NO: 2675118 - RNA, 19 nt, Artificial Sequence
  Description of Artificial Sequence: Synthetic oligonucleotide
cucggcguacgucugaggg

SEQ ID NO: 2675119 - RNA, 19 nt, Artificial Sequence
  Description of Artificial Sequence: Synthetic oligonucleotide
aagugcucugucccagcac

SEQ ID NO: 2675120 - RNA, 19 nt, Artificial Sequence
  Description of Artificial Sequence: Synthetic oligonucleotide
auuuuagccagguccuuca

SEQ ID NO: 2675121 - RNA, 19 nt, Artificial Sequence
  Description of Artificial Sequence: Synthetic oligonucleotide
cacgaacuucaacacaggg

SEQ ID NO: 2675122 - RNA, 19 nt, Artificial Sequence
  Description of Artificial Sequence: Synthetic oligonucleotide
aagggcuuggccccugcag

SEQ ID NO: 2675123 - RNA, 19 nt, Artificial Sequence
  Description of Artificial Sequence: Synthetic oligonucleotide
cugggcaauggcauacucg

SEQ ID NO: 2675124 - RNA, 19 nt, Artificial Sequence
  Description of Artificial Sequence: Synthetic oligonucleotide
uccgugaggaucugaauaa

SEQ ID NO: 2675125 - RNA, 19 nt, Artificial Sequence
  Description of Artificial Sequence: Synthetic oligonucleotide
uuguaggucuccagguacc

SEQ ID NO: 2675126 - RNA, 19 nt, Artificial Sequence
  Description of Artificial Sequence: Synthetic oligonucleotide
ugaggaaaagggcgcaagu

SEQ ID NO: 2675127 - RNA, 19 nt, Artificial Sequence
  Description of Artificial Sequence: Synthetic oligonucleotide
ucaggggucaccucgccga

SEQ ID NO: 2675128 - RNA, 19 nt, Artificial Sequence
  Description of Artificial Sequence: Synthetic oligonucleotide
uuggauuucgcucccguuu

SEQ ID NO: 2675129 - RNA, 19 nt, Artificial Sequence
  Description of Artificial Sequence: Synthetic oligonucleotide
auuucgcucccguuuucac

SEQ ID NO: 2675130 - RNA, 19 nt, Artificial Sequence
  Description of Artificial Sequence: Synthetic oligonucleotide
aguccgcuaagauacacau

SEQ ID NO: 2675131 - RNA, 19 nt, Artificial Sequence
  Description of Artificial Sequence: Synthetic oligonucleotide
aggguugccccucugccgg

SEQ ID NO: 2675132 - RNA, 19 nt, Artificial Sequence
  Description of Artificial Sequence: Synthetic oligonucleotide
uauuggauuucgcucccgu

SEQ ID NO: 2675133 - RNA, 19 nt, Artificial Sequence
  Description of Artificial Sequence: Synthetic oligonucleotide
gugcaguccgcuaagauac

SEQ ID NO: 2675134 - RNA, 19 nt, Artificial Sequence
  Description of Artificial Sequence: Synthetic oligonucleotide
aaaagggcgcaagugcucu

SEQ ID NO: 2675135 - RNA, 19 nt, Artificial Sequence
  Description of Artificial Sequence: Synthetic oligonucleotide
ugggguuccgugaggaucu

SEQ ID NO: 2675136 - RNA, 19 nt, Artificial Sequence
  Description of Artificial Sequence: Synthetic oligonucleotide
auugugguagcggaggcug

SEQ ID NO: 2675137 - RNA, 19 nt, Artificial Sequence
  Description of Artificial Sequence: Synthetic oligonucleotide
cagguucagagccuguggg

SEQ ID NO: 2675138 - RNA, 19 nt, Artificial Sequence
  Description of Artificial Sequence: Synthetic oligonucleotide
uucugaggaucuuucacau

SEQ ID NO: 2675139 - RNA, 19 nt, Artificial Sequence
  Description of Artificial Sequence: Synthetic oligonucleotide
gcuaagauacacauuuuag

SEQ ID NO: 2675140 - RNA, 19 nt, Artificial Sequence
  Description of Artificial Sequence: Synthetic oligonucleotide
ugggaucacaaacuucuuc

SEQ ID NO: 2675141 - RNA, 19 nt, Artificial Sequence
  Description of Artificial Sequence: Synthetic oligonucleotide
uuucgcucccguuuucacc

SEQ ID NO: 2675142 - RNA, 19 nt, Artificial Sequence
  Description of Artificial Sequence: Synthetic oligonucleotide
ucacaaggaugcuauugga

SEQ ID NO: 2675143 - RNA, 19 nt, Artificial Sequence
  Description of Artificial Sequence: Synthetic oligonucleotide
gauggagauugugguagcg

SEQ ID NO: 2675144 - RNA, 19 nt, Artificial Sequence
  Description of Artificial Sequence: Synthetic oligonucleotide
guaccguccugcuuccucg

SEQ ID NO: 2675145 - RNA, 19 nt, Artificial Sequence
  Description of Artificial Sequence: Synthetic oligonucleotide
agggcuuggccccugcagg

SEQ ID NO: 2675146 - RNA, 19 nt, Artificial Sequence
  Description of Artificial Sequence: Synthetic oligonucleotide
uuuuagccagguccuucag

SEQ ID NO: 2675147 - RNA, 19 nt, Artificial Sequence
  Description of Artificial Sequence: Synthetic oligonucleotide
ucgccgaauucccagggca

SEQ ID NO: 2675148 - RNA, 19 nt, Artificial Sequence
  Description of Artificial Sequence: Synthetic oligonucleotide
gaggaaaagggcgcaagug

SEQ ID NO: 2675149 - RNA, 19 nt, Artificial Sequence
  Description of Artificial Sequence: Synthetic oligonucleotide
ugcaggaggggccucgucu

SEQ ID NO: 2675150 - RNA, 19 nt, Artificial Sequence
  Description of Artificial Sequence: Synthetic oligonucleotide
gauguagucuggauggaga

SEQ ID NO: 2675151 - RNA, 19 nt, Artificial Sequence
  Description of Artificial Sequence: Synthetic oligonucleotide
cugcucauaugccuuguag

SEQ ID NO: 2675152 - RNA, 19 nt, Artificial Sequence
  Description of Artificial Sequence: Synthetic oligonucleotide
uuggaccaacagcacacgc

SEQ ID NO: 2675153 - RNA, 19 nt, Artificial Sequence
  Description of Artificial Sequence: Synthetic oligonucleotide
ugaggggccgcugggaccg

SEQ ID NO: 2675154 - RNA, 19 nt, Artificial Sequence
  Description of Artificial Sequence: Synthetic oligonucleotide
auggagauugugguagcgg

SEQ ID NO: 2675155 - RNA, 19 nt, Artificial Sequence
  Description of Artificial Sequence: Synthetic oligonucleotide
gaucugaauaagggcuugg

SEQ ID NO: 2675156 - RNA, 19 nt, Artificial Sequence
  Description of Artificial Sequence: Synthetic oligonucleotide
ccuucacagguucagagcc

SEQ ID NO: 2675157 - RNA, 19 nt, Artificial Sequence
  Description of Artificial Sequence: Synthetic oligonucleotide
ucacaaacuucuuccuggu

SEQ ID NO: 2675158 - RNA, 19 nt, Artificial Sequence
  Description of Artificial Sequence: Synthetic oligonucleotide
uccucggcacuccaggcca

SEQ ID NO: 2675159 - RNA, 19 nt, Artificial Sequence
  Description of Artificial Sequence: Synthetic oligonucleotide
gaauucccagggcacguug

SEQ ID NO: 2675160 - RNA, 19 nt, Artificial Sequence
  Description of Artificial Sequence: Synthetic oligonucleotide
ugguagcggaggcugagga

SEQ ID NO: 2675161 - RNA, 19 nt, Artificial Sequence
  Description of Artificial Sequence: Synthetic oligonucleotide
ucggcguacgucugagggg

SEQ ID NO: 2675162 - RNA, 19 nt, Artificial Sequence
  Description of Artificial Sequence: Synthetic oligonucleotide
ugcgcacgaacuucaacac

SEQ ID NO: 2675163 - RNA, 19 nt, Artificial Sequence
  Description of Artificial Sequence: Synthetic oligonucleotide
ugaggaucuuucacaucca

SEQ ID NO: 2675164 - RNA, 19 nt, Artificial Sequence
  Description of Artificial Sequence: Synthetic oligonucleotide
auaagggcuuggccccugc

SEQ ID NO: 2675165 - RNA, 19 nt, Artificial Sequence
  Description of Artificial Sequence: Synthetic oligonucleotide
cuccaugaggaggucagcg

SEQ ID NO: 2675166 - RNA, 19 nt, Artificial Sequence
  Description of Artificial Sequence: Synthetic oligonucleotide
uucacagguucagagccug

SEQ ID NO: 2675167 - RNA, 19 nt, Artificial Sequence
  Description of Artificial Sequence: Synthetic oligonucleotide
caugaggaggucagcgggc

SEQ ID NO: 2675168 - RNA, 19 nt, Artificial Sequence
  Description of Artificial Sequence: Synthetic oligonucleotide
agggcaaagcucuucccca

SEQ ID NO: 2675169 - RNA, 19 nt, Artificial Sequence
  Description of Artificial Sequence: Synthetic oligonucleotide
uuccucggcacuccaggcc

SEQ ID NO: 2675170 - RNA, 19 nt, Artificial Sequence
  Description of Artificial Sequence: Synthetic oligonucleotide
acuucaacacaggguugcc

SEQ ID NO: 2675171 - RNA, 19 nt, Artificial Sequence
  Description of Artificial Sequence: Synthetic oligonucleotide
gauacacauuuuagccagg

SEQ ID NO: 2675172 - RNA, 19 nt, Artificial Sequence
  Description of Artificial Sequence: Synthetic oligonucleotide
gaggaucuuucacauccac

SEQ ID NO: 2675173 - RNA, 19 nt, Artificial Sequence
  Description of Artificial Sequence: Synthetic oligonucleotide
ucccguuuucaccgucugg

SEQ ID NO: 2675174 - RNA, 19 nt, Artificial Sequence
  Description of Artificial Sequence: Synthetic oligonucleotide
ucucccuucacagguucag

SEQ ID NO: 2675175 - RNA, 19 nt, Artificial Sequence
  Description of Artificial Sequence: Synthetic oligonucleotide
aggcugaggaaaagggcgc

SEQ ID NO: 2675176 - RNA, 19 nt, Artificial Sequence
  Description of Artificial Sequence: Synthetic oligonucleotide
acgaacuucaacacagggu

SEQ ID NO: 2675177 - RNA, 19 nt, Artificial Sequence
  Description of Artificial Sequence: Synthetic oligonucleotide
uggauuucgcucccguuuu

SEQ ID NO: 2675178 - RNA, 19 nt, Artificial Sequence
  Description of Artificial Sequence: Synthetic oligonucleotide
cuuggccccugcaggaggg

SEQ ID NO: 2675179 - RNA, 19 nt, Artificial Sequence
  Description of Artificial Sequence: Synthetic oligonucleotide
uaugccuuguaggucucca

SEQ ID NO: 2675180 - RNA, 19 nt, Artificial Sequence
  Description of Artificial Sequence: Synthetic oligonucleotide
acgucugaggggccgcugg

SEQ ID NO: 2675181 - RNA, 19 nt, Artificial Sequence
  Description of Artificial Sequence: Synthetic oligonucleotide
ucugcagccguucguggau

SEQ ID NO: 2675182 - RNA, 19 nt, Artificial Sequence
  Description of Artificial Sequence: Synthetic oligonucleotide
aacacaggguugccccucu

SEQ ID NO: 2675183 - RNA, 19 nt, Artificial Sequence
  Description of Artificial Sequence: Synthetic oligonucleotide
auacacauuuuagccaggu

SEQ ID NO: 2675184 - RNA, 19 nt, Artificial Sequence
  Description of Artificial Sequence: Synthetic oligonucleotide
cuuucacauccacuuggac

SEQ ID NO: 2675185 - RNA, 19 nt, Artificial Sequence
  Description of Artificial Sequence: Synthetic oligonucleotide
cagcacauagucagggguc

SEQ ID NO: 2675186 - RNA, 19 nt, Artificial Sequence
  Description of Artificial Sequence: Synthetic oligonucleotide
agcacacgcagggcaaagc

SEQ ID NO: 2675187 - RNA, 19 nt, Artificial Sequence
  Description of Artificial Sequence: Synthetic oligonucleotide
cuuccccaggcucugcagc

SEQ ID NO: 2675188 - RNA, 19 nt, Artificial Sequence
  Description of Artificial Sequence: Synthetic oligonucleotide
uucaccgucuggccggggu

SEQ ID NO: 2675189 - RNA, 19 nt, Artificial Sequence
  Description of Artificial Sequence: Synthetic oligonucleotide
aaagggcgcaagugcucug

SEQ ID NO: 2675190 - RNA, 19 nt, Artificial Sequence
  Description of Artificial Sequence: Synthetic oligonucleotide
aggaugcuauuggauuucg

SEQ ID NO: 2675191 - RNA, 19 nt, Artificial Sequence
  Description of Artificial Sequence: Synthetic oligonucleotide
ggcgcaagugcucuguccc

SEQ ID NO: 2675192 - RNA, 19 nt, Artificial Sequence
  Description of Artificial Sequence: Synthetic oligonucleotide
caggguugccccucugccg

SEQ ID NO: 2675193 - RNA, 19 nt, Artificial Sequence
  Description of Artificial Sequence: Synthetic oligonucleotide
acacgcagggcaaagcucu

SEQ ID NO: 2675194 - RNA, 19 nt, Artificial Sequence
  Description of Artificial Sequence: Synthetic oligonucleotide
ggcacuccaggccaggacc

SEQ ID NO: 2675195 - RNA, 19 nt, Artificial Sequence
  Description of Artificial Sequence: Synthetic oligonucleotide
accucgccgaauucccagg

SEQ ID NO: 2675196 - RNA, 19 nt, Artificial Sequence
  Description of Artificial Sequence: Synthetic oligonucleotide
gcuuccucggcacuccagg

SEQ ID NO: 2675197 - RNA, 19 nt, Artificial Sequence
  Description of Artificial Sequence: Synthetic oligonucleotide
cauccacuuggaccaacag

SEQ ID NO: 2675198 - RNA, 19 nt, Artificial Sequence
  Description of Artificial Sequence: Synthetic oligonucleotide
cuuccucggcacuccaggc

SEQ ID NO: 2675199 - RNA, 19 nt, Artificial Sequence
  Description of Artificial Sequence: Synthetic oligonucleotide
cgcacgaacuucaacacag

SEQ ID NO: 2675200 - RNA, 19 nt, Artificial Sequence
  Description of Artificial Sequence: Synthetic oligonucleotide
gaacuucaacacaggguug

SEQ ID NO: 2675201 - RNA, 19 nt, Artificial Sequence
  Description of Artificial Sequence: Synthetic oligonucleotide
guucagagccugugggccc

SEQ ID NO: 2675202 - RNA, 19 nt, Artificial Sequence
  Description of Artificial Sequence: Synthetic oligonucleotide
aggucuccagguaccgucc

SEQ ID NO: 2675203 - RNA, 19 nt, Artificial Sequence
  Description of Artificial Sequence: Synthetic oligonucleotide
cauuuuagccagguccuuc

SEQ ID NO: 2675204 - RNA, 19 nt, Artificial Sequence
  Description of Artificial Sequence: Synthetic oligonucleotide
aggcugggcaauggcauac

SEQ ID NO: 2675205 - RNA, 19 nt, Artificial Sequence
  Description of Artificial Sequence: Synthetic oligonucleotide
gcucugucccagcacauag

SEQ ID NO: 2675206 - RNA, 19 nt, Artificial Sequence
  Description of Artificial Sequence: Synthetic oligonucleotide
ggccucgucuuccaguggg

SEQ ID NO: 2675207 - RNA, 19 nt, Artificial Sequence
  Description of Artificial Sequence: Synthetic oligonucleotide
cauacucggcguacgucug

SEQ ID NO: 2675208 - RNA, 19 nt, Artificial Sequence
  Description of Artificial Sequence: Synthetic oligonucleotide
ucugaggaucuuucacauc

SEQ ID NO: 2675209 - RNA, 19 nt, Artificial Sequence
  Description of Artificial Sequence: Synthetic oligonucleotide
gguucagagccugugggcc

SEQ ID NO: 2675210 - RNA, 19 nt, Artificial Sequence
  Description of Artificial Sequence: Synthetic oligonucleotide
cacauuuuagccagguccu

SEQ ID NO: 2675211 - RNA, 19 nt, Artificial Sequence
  Description of Artificial Sequence: Synthetic oligonucleotide
gucaggggucaccucgccg

SEQ ID NO: 2675212 - RNA, 19 nt, Artificial Sequence
  Description of Artificial Sequence: Synthetic oligonucleotide
cucauaugccuuguagguc

SEQ ID NO: 2675213 - RNA, 19 nt, Artificial Sequence
  Description of Artificial Sequence: Synthetic oligonucleotide
auggcauacucggcguacg

SEQ ID NO: 2675214 - RNA, 19 nt, Artificial Sequence
  Description of Artificial Sequence: Synthetic oligonucleotide
uuuucaccgucuggccggg

SEQ ID NO: 2675215 - RNA, 19 nt, Artificial Sequence
  Description of Artificial Sequence: Synthetic oligonucleotide
ggugcugggguuccgugag

SEQ ID NO: 2675216 - RNA, 19 nt, Artificial Sequence
  Description of Artificial Sequence: Synthetic oligonucleotide
cacaggguugccccucugc

SEQ ID NO: 2675217 - RNA, 19 nt, Artificial Sequence
  Description of Artificial Sequence: Synthetic oligonucleotide
aauaagggcuuggccccug

SEQ ID NO: 2675218 - RNA, 19 nt, Artificial Sequence
  Description of Artificial Sequence: Synthetic oligonucleotide
agcacauagucagggguca

SEQ ID NO: 2675219 - RNA, 19 nt, Artificial Sequence
  Description of Artificial Sequence: Synthetic oligonucleotide
gaaaagggcgcaagugcuc

SEQ ID NO: 2675220 - RNA, 19 nt, Artificial Sequence
  Description of Artificial Sequence: Synthetic oligonucleotide
cgggcuucugcucauaugc

SEQ ID NO: 2675221 - RNA, 19 nt, Artificial Sequence
  Description of Artificial Sequence: Synthetic oligonucleotide
gauuucgcucccguuuuca

SEQ ID NO: 2675222 - RNA, 19 nt, Artificial Sequence
  Description of Artificial Sequence: Synthetic oligonucleotide
caacagcacacgcagggca

SEQ ID NO: 2675223 - RNA, 19 nt, Artificial Sequence
  Description of Artificial Sequence: Synthetic oligonucleotide
auuggauuucgcucccguu

SEQ ID NO: 2675224 - RNA, 19 nt, Artificial Sequence
  Description of Artificial Sequence: Synthetic oligonucleotide
guugcgcacgaacuucaac

SEQ ID NO: 2675225 - RNA, 19 nt, Artificial Sequence
  Description of Artificial Sequence: Synthetic oligonucleotide
uaccguccugcuuccucgg

SEQ ID NO: 2675226 - RNA, 19 nt, Artificial Sequence
  Description of Artificial Sequence: Synthetic oligonucleotide
ccagguaccguccugcuuc

SEQ ID NO: 2675227 - RNA, 19 nt, Artificial Sequence
  Description of Artificial Sequence: Synthetic oligonucleotide
caccucgccgaauucccag

SEQ ID NO: 2675228 - RNA, 19 nt, Artificial Sequence
  Description of Artificial Sequence: Synthetic oligonucleotide
accguccugcuuccucggc

SEQ ID NO: 2675229 - RNA, 19 nt, Artificial Sequence
  Description of Artificial Sequence: Synthetic oligonucleotide
uacucggcguacgucugag

SEQ ID NO: 2675230 - RNA, 19 nt, Artificial Sequence
  Description of Artificial Sequence: Synthetic oligonucleotide
guagcggaggcugaggaaa

SEQ ID NO: 2675231 - RNA, 19 nt, Artificial Sequence
  Description of Artificial Sequence: Synthetic oligonucleotide
cgugaggaucugaauaagg

SEQ ID NO: 2675232 - RNA, 19 nt, Artificial Sequence
  Description of Artificial Sequence: Synthetic oligonucleotide
cacacgcagggcaaagcuc

SEQ ID NO: 2675233 - RNA, 19 nt, Artificial Sequence
  Description of Artificial Sequence: Synthetic oligonucleotide
gucaccucgccgaauuccc

SEQ ID NO: 2675234 - RNA, 19 nt, Artificial Sequence
  Description of Artificial Sequence: Synthetic oligonucleotide
uucguggauguagucugga

SEQ ID NO: 2675235 - RNA, 19 nt, Artificial Sequence
  Description of Artificial Sequence: Synthetic oligonucleotide
uggcauacucggcguacgu

SEQ ID NO: 2675236 - RNA, 19 nt, Artificial Sequence
  Description of Artificial Sequence: Synthetic oligonucleotide
aagggcgcaagugcucugu

SEQ ID NO: 2675237 - RNA, 19 nt, Artificial Sequence
  Description of Artificial Sequence: Synthetic oligonucleotide
aacagcacacgcagggcaa

SEQ ID NO: 2675238 - RNA, 19 nt, Artificial Sequence
  Description of Artificial Sequence: Synthetic oligonucleotide
ccuucugaggaucuuucac

SEQ ID NO: 2675239 - RNA, 19 nt, Artificial Sequence
  Description of Artificial Sequence: Synthetic oligonucleotide
uugugguagcggaggcuga

SEQ ID NO: 2675240 - RNA, 19 nt, Artificial Sequence
  Description of Artificial Sequence: Synthetic oligonucleotide
ucaccucgccgaauuccca

SEQ ID NO: 2675241 - RNA, 19 nt, Artificial Sequence
  Description of Artificial Sequence: Synthetic oligonucleotide
cagugggaucacaaacuuc

SEQ ID NO: 2675242 - RNA, 19 nt, Artificial Sequence
  Description of Artificial Sequence: Synthetic oligonucleotide
uaagggcuuggccccugca

SEQ ID NO: 2675243 - RNA, 19 nt, Artificial Sequence
  Description of Artificial Sequence: Synthetic oligonucleotide
cuggccgggguucucuccc

SEQ ID NO: 2675244 - RNA, 19 nt, Artificial Sequence
  Description of Artificial Sequence: Synthetic oligonucleotide
cucgucuuccagugggauc

SEQ ID NO: 2675245 - RNA, 19 nt, Artificial Sequence
  Description of Artificial Sequence: Synthetic oligonucleotide
guucguggauguagucugg

SEQ ID NO: 2675246 - RNA, 19 nt, Artificial Sequence
  Description of Artificial Sequence: Synthetic oligonucleotide
ucuggccgggguucucucc

SEQ ID NO: 2675247 - RNA, 19 nt, Artificial Sequence
  Description of Artificial Sequence: Synthetic oligonucleotide
cagccguucguggauguag

SEQ ID NO: 2675248 - RNA, 19 nt, Artificial Sequence
  Description of Artificial Sequence: Synthetic oligonucleotide
cccguuuucaccgucuggc

SEQ ID NO: 2675249 - RNA, 19 nt, Artificial Sequence
  Description of Artificial Sequence: Synthetic oligonucleotide
gcucacaaggaugcuauug

SEQ ID NO: 2675250 - RNA, 19 nt, Artificial Sequence
  Description of Artificial Sequence: Synthetic oligonucleotide
cugggguuccgugaggauc

SEQ ID NO: 2675251 - RNA, 19 nt, Artificial Sequence
  Description of Artificial Sequence: Synthetic oligonucleotide
gaggaggucagcgggcuuc

SEQ ID NO: 2675252 - RNA, 19 nt, Artificial Sequence
  Description of Artificial Sequence: Synthetic oligonucleotide
gucagcgggcuucugcuca

SEQ ID NO: 2675253 - RNA, 19 nt, Artificial Sequence
  Description of Artificial Sequence: Synthetic oligonucleotide
ucguggauguagucuggau

SEQ ID NO: 2675254 - RNA, 19 nt, Artificial Sequence
  Description of Artificial Sequence: Synthetic oligonucleotide
uagucuggauggagauugu

SEQ ID NO: 2675255 - RNA, 19 nt, Artificial Sequence
  Description of Artificial Sequence: Synthetic oligonucleotide
caggcucugcagccguucg

SEQ ID NO: 2675256 - RNA, 19 nt, Artificial Sequence
  Description of Artificial Sequence: Synthetic oligonucleotide
ggauguagucuggauggag

SEQ ID NO: 2675257 - RNA, 19 nt, Artificial Sequence
  Description of Artificial Sequence: Synthetic oligonucleotide
ugcaguccgcuaagauaca

SEQ ID NO: 2675258 - RNA, 19 nt, Artificial Sequence
  Description of Artificial Sequence: Synthetic oligonucleotide
ggugcaguccgcuaagaua

SEQ ID NO: 2675259 - RNA, 19 nt, Artificial Sequence
  Description of Artificial Sequence: Synthetic oligonucleotide
gcuauuggauuucgcuccc

SEQ ID NO: 2675260 - RNA, 19 nt, Artificial Sequence
  Description of Artificial Sequence: Synthetic oligonucleotide
ggcaaagcucuuccccagg

SEQ ID NO: 2675261 - RNA, 19 nt, Artificial Sequence
  Description of Artificial Sequence: Synthetic oligonucleotide
cucgccgaauucccagggc

SEQ ID NO: 2675262 - RNA, 19 nt, Artificial Sequence
  Description of Artificial Sequence: Synthetic oligonucleotide
cguucguggauguagucug

SEQ ID NO: 2675263 - RNA, 19 nt, Artificial Sequence
  Description of Artificial Sequence: Synthetic oligonucleotide
uagcggaggcugaggaaaa

SEQ ID NO: 2675264 - RNA, 19 nt, Artificial Sequence
  Description of Artificial Sequence: Synthetic oligonucleotide
auacucggcguacgucuga

SEQ ID NO: 2675265 - RNA, 19 nt, Artificial Sequence
  Description of Artificial Sequence: Synthetic oligonucleotide
uguagucuggauggagauu

SEQ ID NO: 2675266 - RNA, 19 nt, Artificial Sequence
  Description of Artificial Sequence: Synthetic oligonucleotide
gcucauaugccuuguaggu

SEQ ID NO: 2675267 - RNA, 19 nt, Artificial Sequence
  Description of Artificial Sequence: Synthetic oligonucleotide
agggcgcaagugcucuguc

SEQ ID NO: 2675268 - RNA, 19 nt, Artificial Sequence
  Description of Artificial Sequence: Synthetic oligonucleotide
ggagauugugguagcggag

SEQ ID NO: 2675269 - RNA, 19 nt, Artificial Sequence
  Description of Artificial Sequence: Synthetic oligonucleotide
cguggauguagucuggaug

SEQ ID NO: 2675270 - RNA, 19 nt, Artificial Sequence
  Description of Artificial Sequence: Synthetic oligonucleotide
cauaugccuuguaggucuc

SEQ ID NO: 2675271 - RNA, 19 nt, Artificial Sequence
  Description of Artificial Sequence: Synthetic oligonucleotide
cacguugcgcacgaacuuc

SEQ ID NO: 2675272 - RNA, 19 nt, Artificial Sequence
  Description of Artificial Sequence: Synthetic oligonucleotide
gggacaggaaguucugcuc

SEQ ID NO: 2675273 - RNA, 19 nt, Artificial Sequence
  Description of Artificial Sequence: Synthetic oligonucleotide
ggauggagauugugguagc

SEQ ID NO: 2675274 - RNA, 19 nt, Artificial Sequence
  Description of Artificial Sequence: Synthetic oligonucleotide
cagguaccguccugcuucc

SEQ ID NO: 2675275 - RNA, 19 nt, Artificial Sequence
  Description of Artificial Sequence: Synthetic oligonucleotide
uucugcucauaugccuugu

SEQ ID NO: 2675276 - RNA, 19 nt, Artificial Sequence
  Description of Artificial Sequence: Synthetic oligonucleotide
caguccgcuaagauacaca

SEQ ID NO: 2675277 - RNA, 19 nt, Artificial Sequence
  Description of Artificial Sequence: Synthetic oligonucleotide
cagggugcaguccgcuaag

SEQ ID NO: 2675278 - RNA, 19 nt, Artificial Sequence
  Description of Artificial Sequence: Synthetic oligonucleotide
cuuccagugggaucacaaa

SEQ ID NO: 2675279 - RNA, 19 nt, Artificial Sequence
  Description of Artificial Sequence: Synthetic oligonucleotide
cguuuucaccgucuggccg

SEQ ID NO: 2675280 - RNA, 19 nt, Artificial Sequence
  Description of Artificial Sequence: Synthetic oligonucleotide
cccuucacagguucagagc

SEQ ID NO: 2675281 - RNA, 19 nt, Artificial Sequence
  Description of Artificial Sequence: Synthetic oligonucleotide
uucucucccuucacagguu

SEQ ID NO: 2675282 - RNA, 19 nt, Artificial Sequence
  Description of Artificial Sequence: Synthetic oligonucleotide
ggucaccucgccgaauucc

SEQ ID NO: 2675283 - RNA, 19 nt, Artificial Sequence
  Description of Artificial Sequence: Synthetic oligonucleotide
ugcagccguucguggaugu

SEQ ID NO: 2675284 - RNA, 19 nt, Artificial Sequence
  Description of Artificial Sequence: Synthetic oligonucleotide
ucagggccuucugaggauc

SEQ ID NO: 2675285 - RNA, 19 nt, Artificial Sequence
  Description of Artificial Sequence: Synthetic oligonucleotide
caagugcucugucccagca

SEQ ID NO: 2675286 - RNA, 19 nt, Artificial Sequence
  Description of Artificial Sequence: Synthetic oligonucleotide
ggggccucgucuuccagug

SEQ ID NO: 2675287 - RNA, 19 nt, Artificial Sequence
  Description of Artificial Sequence: Synthetic oligonucleotide
uccagguaccguccugcuu

SEQ ID NO: 2675288 - RNA, 19 nt, Artificial Sequence
  Description of Artificial Sequence: Synthetic oligonucleotide
cucccguuuucaccgucug

SEQ ID NO: 2675289 - RNA, 19 nt, Artificial Sequence
  Description of Artificial Sequence: Synthetic oligonucleotide
ggaucugaauaagggcuug

SEQ ID NO: 2675290 - RNA, 19 nt, Artificial Sequence
  Description of Artificial Sequence: Synthetic oligonucleotide
gggcaaagcucuuccccag

SEQ ID NO: 2675291 - RNA, 19 nt, Artificial Sequence
  Description of Artificial Sequence: Synthetic oligonucleotide
guggugcugggguuccgug

SEQ ID NO: 2675292 - RNA, 19 nt, Artificial Sequence
  Description of Artificial Sequence: Synthetic oligonucleotide
gcauacucggcguacgucu

SEQ ID NO: 2675293 - RNA, 19 nt, Artificial Sequence
  Description of Artificial Sequence: Synthetic oligonucleotide
cugugggcccugugggccc

SEQ ID NO: 2675294 - RNA, 19 nt, Artificial Sequence
  Description of Artificial Sequence: Synthetic oligonucleotide
gcggaggcugaggaaaagg

SEQ ID NO: 2675295 - RNA, 19 nt, Artificial Sequence
  Description of Artificial Sequence: Synthetic oligonucleotide
gguaccguccugcuuccuc

SEQ ID NO: 2675296 - RNA, 19 nt, Artificial Sequence
  Description of Artificial Sequence: Synthetic oligonucleotide
gccgaauucccagggcacg

SEQ ID NO: 2675297 - RNA, 19 nt, Artificial Sequence
  Description of Artificial Sequence: Synthetic oligonucleotide
agcgggcuucugcucauau

SEQ ID NO: 2675298 - RNA, 19 nt, Artificial Sequence
  Description of Artificial Sequence: Synthetic oligonucleotide
agcggaggcugaggaaaag

SEQ ID NO: 2675299 - RNA, 19 nt, Artificial Sequence
  Description of Artificial Sequence: Synthetic oligonucleotide
acguugcgcacgaacuuca

SEQ ID NO: 2675300 - RNA, 19 nt, Artificial Sequence
  Description of Artificial Sequence: Synthetic oligonucleotide
ucagcgggcuucugcucau

SEQ ID NO: 2675301 - RNA, 19 nt, Artificial Sequence
  Description of Artificial Sequence: Synthetic oligonucleotide
ggaaaagggcgcaagugcu

SEQ ID NO: 2675302 - RNA, 19 nt, Artificial Sequence
  Description of Artificial Sequence: Synthetic oligonucleotide
gcucugcagccguucgugg

SEQ ID NO: 2675303 - RNA, 19 nt, Artificial Sequence
  Description of Artificial Sequence: Synthetic oligonucleotide
gauugugguagcggaggcu

SEQ ID NO: 2675304 - RNA, 19 nt, Artificial Sequence
  Description of Artificial Sequence: Synthetic oligonucleotide
ggaucacaaacuucuuccu

SEQ ID NO: 2675305 - RNA, 19 nt, Artificial Sequence
  Description of Artificial Sequence: Synthetic oligonucleotide
ggcucugcagccguucgug

SEQ ID NO: 2675306 - RNA, 19 nt, Artificial Sequence
  Description of Artificial Sequence: Synthetic oligonucleotide
gcacgaacuucaacacagg

SEQ ID NO: 2675307 - RNA, 19 nt, Artificial Sequence
  Description of Artificial Sequence: Synthetic oligonucleotide
gugcugggguuccgugagg

SEQ ID NO: 2675308 - RNA, 19 nt, Artificial Sequence
  Description of Artificial Sequence: Synthetic oligonucleotide
ccguuuucaccgucuggcc

SEQ ID NO: 2675309 - RNA, 19 nt, Artificial Sequence
  Description of Artificial Sequence: Synthetic oligonucleotide
ugcucugucccagcacaua

SEQ ID NO: 2675310 - RNA, 19 nt, Artificial Sequence
  Description of Artificial Sequence: Synthetic oligonucleotide
gggcgcaagugcucugucc

SEQ ID NO: 2675311 - RNA, 19 nt, Artificial Sequence
  Description of Artificial Sequence: Synthetic oligonucleotide
gcccugugggcccagcccc

SEQ ID NO: 2675312 - RNA, 19 nt, Artificial Sequence
  Description of Artificial Sequence: Synthetic oligonucleotide
gggccgcugggaccgaggg

SEQ ID NO: 2675313 - RNA, 19 nt, Artificial Sequence
  Description of Artificial Sequence: Synthetic oligonucleotide
uacgucugaggggccgcug

SEQ ID NO: 2675314 - RNA, 19 nt, Artificial Sequence
  Description of Artificial Sequence: Synthetic oligonucleotide
gaggcugggcaauggcaua

SEQ ID NO: 2675315 - RNA, 19 nt, Artificial Sequence
  Description of Artificial Sequence: Synthetic oligonucleotide
ggaugcuauuggauuucgc

SEQ ID NO: 2675316 - RNA, 19 nt, Artificial Sequence
  Description of Artificial Sequence: Synthetic oligonucleotide
agccguucguggauguagu

SEQ ID NO: 2675317 - RNA, 19 nt, Artificial Sequence
  Description of Artificial Sequence: Synthetic oligonucleotide
caacacaggguugccccuc

SEQ ID NO: 2675318 - RNA, 19 nt, Artificial Sequence
  Description of Artificial Sequence: Synthetic oligonucleotide
ugaggaggucagcgggcuu

SEQ ID NO: 2675319 - RNA, 19 nt, Artificial Sequence
  Description of Artificial Sequence: Synthetic oligonucleotide
gcaagugcucugucccagc

SEQ ID NO: 2675320 - RNA, 19 nt, Artificial Sequence
  Description of Artificial Sequence: Synthetic oligonucleotide
acauuuuagccagguccuu

SEQ ID NO: 2675321 - RNA, 19 nt, Artificial Sequence
  Description of Artificial Sequence: Synthetic oligonucleotide
cgaacuucaacacaggguu

SEQ ID NO: 2675322 - RNA, 19 nt, Artificial Sequence
  Description of Artificial Sequence: Synthetic oligonucleotide
acacaggguugccccucug

SEQ ID NO: 2675323 - RNA, 19 nt, Artificial Sequence
  Description of Artificial Sequence: Synthetic oligonucleotide
ccucgccgaauucccaggg

SEQ ID NO: 2675324 - RNA, 19 nt, Artificial Sequence
  Description of Artificial Sequence: Synthetic oligonucleotide
gggcacguugcgcacgaac

SEQ ID NO: 2675325 - RNA, 19 nt, Artificial Sequence
  Description of Artificial Sequence: Synthetic oligonucleotide
cagcacacgcagggcaaag

SEQ ID NO: 2675326 - RNA, 19 nt, Artificial Sequence
  Description of Artificial Sequence: Synthetic oligonucleotide
cucuuccccaggcucugca

SEQ ID NO: 2675327 - RNA, 19 nt, Artificial Sequence
  Description of Artificial Sequence: Synthetic oligonucleotide
cucucccuucacagguuca

SEQ ID NO: 2675328 - RNA, 19 nt, Artificial Sequence
  Description of Artificial Sequence: Synthetic oligonucleotide
cucggcacuccaggccagg

SEQ ID NO: 2675329 - RNA, 19 nt, Artificial Sequence
  Description of Artificial Sequence: Synthetic oligonucleotide
aggaggucagcgggcuucu

SEQ ID NO: 2675330 - RNA, 19 nt, Artificial Sequence
  Description of Artificial Sequence: Synthetic oligonucleotide
acagcacacgcagggcaaa

SEQ ID NO: 2675331 - RNA, 19 nt, Artificial Sequence
  Description of Artificial Sequence: Synthetic oligonucleotide
ccaacagcacacgcagggc

SEQ ID NO: 2675332 - RNA, 19 nt, Artificial Sequence
  Description of Artificial Sequence: Synthetic oligonucleotide
gcaauggcauacucggcgu

SEQ ID NO: 2675333 - RNA, 19 nt, Artificial Sequence
  Description of Artificial Sequence: Synthetic oligonucleotide
gcugggcaauggcauacuc

SEQ ID NO: 2675334 - RNA, 19 nt, Artificial Sequence
  Description of Artificial Sequence: Synthetic oligonucleotide
cugcagccguucguggaug

SEQ ID NO: 2675335 - RNA, 19 nt, Artificial Sequence
  Description of Artificial Sequence: Synthetic oligonucleotide
gguagcggaggcugaggaa

SEQ ID NO: 2675336 - RNA, 19 nt, Artificial Sequence
  Description of Artificial Sequence: Synthetic oligonucleotide
cccagccccuccuggaggc

SEQ ID NO: 2675337 - RNA, 19 nt, Artificial Sequence
  Description of Artificial Sequence: Synthetic oligonucleotide
caauggcauacucggcgua

SEQ ID NO: 2675338 - RNA, 19 nt, Artificial Sequence
  Description of Artificial Sequence: Synthetic oligonucleotide
gccuucugaggaucuuuca

SEQ ID NO: 2675339 - RNA, 19 nt, Artificial Sequence
  Description of Artificial Sequence: Synthetic oligonucleotide
gcaguccgcuaagauacac

SEQ ID NO: 2675340 - RNA, 19 nt, Artificial Sequence
  Description of Artificial Sequence: Synthetic oligonucleotide
uggccgggguucucucccu

SEQ ID NO: 2675341 - RNA, 19 nt, Artificial Sequence
  Description of Artificial Sequence: Synthetic oligonucleotide
ucacauccacuuggaccaa

SEQ ID NO: 2675342 - RNA, 19 nt, Artificial Sequence
  Description of Artificial Sequence: Synthetic oligonucleotide
gcgggcuucugcucauaug

SEQ ID NO: 2675343 - RNA, 19 nt, Artificial Sequence
  Description of Artificial Sequence: Synthetic oligonucleotide
gcguacgucugaggggccg

SEQ ID NO: 2675344 - RNA, 19 nt, Artificial Sequence
  Description of Artificial Sequence: Synthetic oligonucleotide
ggcccagccccuccuggag

SEQ ID NO: 2675345 - RNA, 19 nt, Artificial Sequence
  Description of Artificial Sequence: Synthetic oligonucleotide
gcacacgcagggcaaagcu

SEQ ID NO: 2675346 - RNA, 19 nt, Artificial Sequence
  Description of Artificial Sequence: Synthetic oligonucleotide
ggcauacucggcguacguc

SEQ ID NO: 2675347 - RNA, 19 nt, Artificial Sequence
  Description of Artificial Sequence: Synthetic oligonucleotide
ggauuucgcucccguuuuc

SEQ ID NO: 2675348 - RNA, 19 nt, Artificial Sequence
  Description of Artificial Sequence: Synthetic oligonucleotide
agggugcaguccgcuaaga

SEQ ID NO: 2675349 - RNA, 19 nt, Artificial Sequence
  Description of Artificial Sequence: Synthetic oligonucleotide
gaauaagggcuuggccccu

SEQ ID NO: 2675350 - RNA, 19 nt, Artificial Sequence
  Description of Artificial Sequence: Synthetic oligonucleotide
ggcacguugcgcacgaacu

SEQ ID NO: 2675351 - RNA, 19 nt, Artificial Sequence
  Description of Artificial Sequence: Synthetic oligonucleotide
cggcguacgucugaggggc

SEQ ID NO: 2675352 - RNA, 19 nt, Artificial Sequence
  Description of Artificial Sequence: Synthetic oligonucleotide
ggaaguucugcuccagcuu

SEQ ID NO: 2675353 - RNA, 19 nt, Artificial Sequence
  Description of Artificial Sequence: Synthetic oligonucleotide
cagggcacguugcgcacga

SEQ ID NO: 2675354 - RNA, 19 nt, Artificial Sequence
  Description of Artificial Sequence: Synthetic oligonucleotide
ucgcucccguuuucaccgu

SEQ ID NO: 2675355 - RNA, 19 nt, Artificial Sequence
  Description of Artificial Sequence: Synthetic oligonucleotide
gcgcacgaacuucaacaca

SEQ ID NO: 2675356 - RNA, 19 nt, Artificial Sequence
  Description of Artificial Sequence: Synthetic oligonucleotide
ccgugaggaucugaauaag

SEQ ID NO: 2675357 - RNA, 19 nt, Artificial Sequence
  Description of Artificial Sequence: Synthetic oligonucleotide
caccgucuggccgggguuc

SEQ ID NO: 2675358 - RNA, 19 nt, Artificial Sequence
  Description of Artificial Sequence: Synthetic oligonucleotide
ccagcacauagucaggggu

SEQ ID NO: 2675359 - RNA, 19 nt, Artificial Sequence
  Description of Artificial Sequence: Synthetic oligonucleotide
cgcuaagauacacauuuua

SEQ ID NO: 2675360 - RNA, 19 nt, Artificial Sequence
  Description of Artificial Sequence: Synthetic oligonucleotide
gucuggccgggguucucuc

SEQ ID NO: 2675361 - RNA, 19 nt, Artificial Sequence
  Description of Artificial Sequence: Synthetic oligonucleotide
ggccgcugggaccgagggg

SEQ ID NO: 2675362 - RNA, 19 nt, Artificial Sequence
  Description of Artificial Sequence: Synthetic oligonucleotide
cucccuucacagguucaga

SEQ ID NO: 2675363 - RNA, 19 nt, Artificial Sequence
  Description of Artificial Sequence: Synthetic oligonucleotide
gggcuuggccccugcagga

SEQ ID NO: 2675364 - RNA, 19 nt, Artificial Sequence
  Description of Artificial Sequence: Synthetic oligonucleotide
gucugaggggccgcuggga

SEQ ID NO: 2675365 - RNA, 19 nt, Artificial Sequence
  Description of Artificial Sequence: Synthetic oligonucleotide
gguugccccucugccgggg

SEQ ID NO: 2675366 - RNA, 19 nt, Artificial Sequence
  Description of Artificial Sequence: Synthetic oligonucleotide
gggccucgucuuccagugg

SEQ ID NO: 2675367 - RNA, 19 nt, Artificial Sequence
  Description of Artificial Sequence: Synthetic oligonucleotide
gggcaauggcauacucggc

SEQ ID NO: 2675368 - RNA, 19 nt, Artificial Sequence
  Description of Artificial Sequence: Synthetic oligonucleotide
ggucagcgggcuucugcuc

SEQ ID NO: 2675369 - RNA, 19 nt, Artificial Sequence
  Description of Artificial Sequence: Synthetic oligonucleotide
ggcuuggccccugcaggag

SEQ ID NO: 2675370 - RNA, 19 nt, Artificial Sequence
  Description of Artificial Sequence: Synthetic oligonucleotide
accgucuggccgggguucu

SEQ ID NO: 2675371 - RNA, 19 nt, Artificial Sequence
  Description of Artificial Sequence: Synthetic oligonucleotide
gccguucguggauguaguc

SEQ ID NO: 2675372 - RNA, 19 nt, Artificial Sequence
  Description of Artificial Sequence: Synthetic oligonucleotide
gucuuccagugggaucaca

SEQ ID NO: 2675373 - RNA, 19 nt, Artificial Sequence
  Description of Artificial Sequence: Synthetic oligonucleotide
ccagggugcaguccgcuaa

SEQ ID NO: 2675374 - RNA, 19 nt, Artificial Sequence
  Description of Artificial Sequence: Synthetic oligonucleotide
ggaggcugggcaauggcau

SEQ ID NO: 2675375 - RNA, 19 nt, Artificial Sequence
  Description of Artificial Sequence: Synthetic oligonucleotide
ggccccugcaggaggggcc

SEQ ID NO: 2675376 - RNA, 19 nt, Artificial Sequence
  Description of Artificial Sequence: Synthetic oligonucleotide
cgccgaauucccagggcac

SEQ ID NO: 2675377 - RNA, 19 nt, Artificial Sequence
  Description of Artificial Sequence: Synthetic oligonucleotide
ccagggcacguugcgcacg

SEQ ID NO: 2675378 - RNA, 19 nt, Artificial Sequence
  Description of Artificial Sequence: Synthetic oligonucleotide
cgcaagugcucugucccag

SEQ ID NO: 2675379 - RNA, 19 nt, Artificial Sequence
  Description of Artificial Sequence: Synthetic oligonucleotide
gcgcaagugcucuguccca

SEQ ID NO: 2675380 - RNA, 19 nt, Artificial Sequence
  Description of Artificial Sequence: Synthetic oligonucleotide
gaccagggugcaguccgcu

SEQ ID NO: 2675381 - RNA, 19 nt, Artificial Sequence
  Description of Artificial Sequence: Synthetic oligonucleotide
ccgggacaggaaguucugc

SEQ ID NO: 2675382 - RNA, 19 nt, Artificial Sequence
  Description of Artificial Sequence: Synthetic oligonucleotide
gcacauagucaggggucac

SEQ ID NO: 2675383 - RNA, 19 nt, Artificial Sequence
  Description of Artificial Sequence: Synthetic oligonucleotide
agggccuucugaggaucuu

SEQ ID NO: 2675384 - RNA, 19 nt, Artificial Sequence
  Description of Artificial Sequence: Synthetic oligonucleotide
cagggccuucugaggaucu

SEQ ID NO: 2675385 - RNA, 19 nt, Artificial Sequence
  Description of Artificial Sequence: Synthetic oligonucleotide
cuccagguaccguccugcu

SEQ ID NO: 2675386 - RNA, 19 nt, Artificial Sequence
  Description of Artificial Sequence: Synthetic oligonucleotide
cccagggcacguugcgcac

SEQ ID NO: 2675387 - RNA, 19 nt, Artificial Sequence
  Description of Artificial Sequence: Synthetic oligonucleotide
ggaccagggugcaguccgc

SEQ ID NO: 2675388 - RNA, 19 nt, Artificial Sequence
  Description of Artificial Sequence: Synthetic oligonucleotide
ggggccgcugggaccgagg

SEQ ID NO: 2675389 - RNA, 19 nt, Artificial Sequence
  Description of Artificial Sequence: Synthetic oligonucleotide
aggggccgcugggaccgag

SEQ ID NO: 2675390 - RNA, 19 nt, Artificial Sequence
  Description of Artificial Sequence: Synthetic oligonucleotide
ggggucaccucgccgaauu

SEQ ID NO: 2675391 - RNA, 19 nt, Artificial Sequence
  Description of Artificial Sequence: Synthetic oligonucleotide
cccugcaggaggggccucg

SEQ ID NO: 2675392 - RNA, 19 nt, Artificial Sequence
  Description of Artificial Sequence: Synthetic oligonucleotide
gggugcaguccgcuaagau

SEQ ID NO: 2675393 - RNA, 19 nt, Artificial Sequence
  Description of Artificial Sequence: Synthetic oligonucleotide
gccgggguucucucccuuc

SEQ ID NO: 2675394 - RNA, 19 nt, Artificial Sequence
  Description of Artificial Sequence: Synthetic oligonucleotide
caggggucaccucgccgaa

SEQ ID NO: 2675395 - RNA, 19 nt, Artificial Sequence
  Description of Artificial Sequence: Synthetic oligonucleotide
aggggucaccucgccgaau

SEQ ID NO: 2675396 - RNA, 19 nt, Artificial Sequence
  Description of Artificial Sequence: Synthetic oligonucleotide
ccucggcacuccaggccag

SEQ ID NO: 2675397 - RNA, 19 nt, Artificial Sequence
  Description of Artificial Sequence: Synthetic oligonucleotide
agguaccguccugcuuccu

SEQ ID NO: 2675398 - RNA, 19 nt, Artificial Sequence
  Description of Artificial Sequence: Synthetic oligonucleotide
gccguggugcugggguucc

SEQ ID NO: 2675399 - RNA, 19 nt, Artificial Sequence
  Description of Artificial Sequence: Synthetic oligonucleotide
cguacgucugaggggccgc

SEQ ID NO: 2675400 - RNA, 19 nt, Artificial Sequence
  Description of Artificial Sequence: Synthetic oligonucleotide
ccguccugcuuccucggca

SEQ ID NO: 2675401 - RNA, 19 nt, Artificial Sequence
  Description of Artificial Sequence: Synthetic oligonucleotide
ccgggguucucucccuuca

SEQ ID NO: 2675402 - RNA, 19 nt, Artificial Sequence
  Description of Artificial Sequence: Synthetic oligonucleotide
gcacguugcgcacgaacuu

SEQ ID NO: 2675403 - RNA, 19 nt, Artificial Sequence
  Description of Artificial Sequence: Synthetic oligonucleotide
ggccguggugcugggguuc

SEQ ID NO: 2675404 - RNA, 19 nt, Artificial Sequence
  Description of Artificial Sequence: Synthetic oligonucleotide
ggcguacgucugaggggcc

SEQ ID NO: 2675405 - RNA, 19 nt, Artificial Sequence
  Description of Artificial Sequence: Synthetic oligonucleotide
gcaggaggggccucgucuu

SEQ ID NO: 2675406 - RNA, 19 nt, Artificial Sequence
  Description of Artificial Sequence: Synthetic oligonucleotide
guacgucugaggggccgcu

SEQ ID NO: 2675407 - RNA, 19 nt, Artificial Sequence
  Description of Artificial Sequence: Synthetic oligonucleotide
ccguucguggauguagucu

SEQ ID NO: 2675408 - RNA, 19 nt, Artificial Sequence
  Description of Artificial Sequence: Synthetic oligonucleotide
gugggaucacaaacuucuu

SEQ ID NO: 2675409 - RNA, 19 nt, Artificial Sequence
  Description of Artificial Sequence: Synthetic oligonucleotide
guccgcuaagauacacauu

SEQ ID NO: 2675410 - RNA, 19 nt, Artificial Sequence
  Description of Artificial Sequence: Synthetic oligonucleotide
cggcacuccaggccaggac

SEQ ID NO: 2675411 - RNA, 19 nt, Artificial Sequence
  Description of Artificial Sequence: Synthetic oligonucleotide
ggaggucagcgggcuucug

SEQ ID NO: 2675412 - RNA, 19 nt, Artificial Sequence
  Description of Artificial Sequence: Synthetic oligonucleotide
ggguuccgugaggaucuga

SEQ ID NO: 2675413 - RNA, 19 nt, Artificial Sequence
  Description of Artificial Sequence: Synthetic oligonucleotide
gcucccguuuucaccgucu

SEQ ID NO: 2675414 - RNA, 19 nt, Artificial Sequence
  Description of Artificial Sequence: Synthetic oligonucleotide
gggguuccgugaggaucug

SEQ ID NO: 2675415 - RNA, 19 nt, Artificial Sequence
  Description of Artificial Sequence: Synthetic oligonucleotide
gugcucugucccagcacau

SEQ ID NO: 2675416 - RNA, 19 nt, Artificial Sequence
  Description of Artificial Sequence: Synthetic oligonucleotide
agggcacguugcgcacgaa

SEQ ID NO: 2675417 - RNA, 19 nt, Artificial Sequence
  Description of Artificial Sequence: Synthetic oligonucleotide
cacgcagggcaaagcucuu

SEQ ID NO: 2675418 - RNA, 19 nt, Artificial Sequence
  Description of Artificial Sequence: Synthetic oligonucleotide
gcugggguuccgugaggau

SEQ ID NO: 2675419 - RNA, 19 nt, Artificial Sequence
  Description of Artificial Sequence: Synthetic oligonucleotide
gggccuucugaggaucuuu

SEQ ID NO: 2675420 - RNA, 19 nt, Artificial Sequence
  Description of Artificial Sequence: Synthetic oligonucleotide
ggcugggcaauggcauacu

SEQ ID NO: 2675421 - RNA, 19 nt, Artificial Sequence
  Description of Artificial Sequence: Synthetic oligonucleotide
ggcucacaaggaugcuauu

SEQ ID NO: 2675422 - RNA, 19 nt, Artificial Sequence
  Description of Artificial Sequence: Synthetic oligonucleotide
cgcucccguuuucaccguc

SEQ ID NO: 2675423 - RNA, 19 nt, Artificial Sequence
  Description of Artificial Sequence: Synthetic oligonucleotide
ccgaauucccagggcacgu

SEQ ID NO: 2675424 - RNA, 19 nt, Artificial Sequence
  Description of Artificial Sequence: Synthetic oligonucleotide
cguugcgcacgaacuucaa

SEQ ID NO: 2675425 - RNA, 19 nt, Artificial Sequence
  Description of Artificial Sequence: Synthetic oligonucleotide
gcagccguucguggaugua

SEQ ID NO: 2675426 - RNA, 19 nt, Artificial Sequence
  Description of Artificial Sequence: Synthetic oligonucleotide
ccgcuaagauacacauuuu

SEQ ID NO: 2675427 - RNA, 19 nt, Artificial Sequence
  Description of Artificial Sequence: Synthetic oligonucleotide
cagcgggcuucugcucaua

SEQ ID NO: 2675428 - RNA, 19 nt, Artificial Sequence
  Description of Artificial Sequence: Synthetic oligonucleotide
gggccguggugcugggguu

SEQ ID NO: 2675429 - RNA, 19 nt, Artificial Sequence
  Description of Artificial Sequence: Synthetic oligonucleotide
ggccgggguucucucccuu

SEQ ID NO: 2675430 - RNA, 19 nt, Artificial Sequence
  Description of Artificial Sequence: Synthetic oligonucleotide
ccgucuggccgggguucuc

SEQ ID NO: 2675431 - RNA, 19 nt, Artificial Sequence
  Description of Artificial Sequence: Synthetic oligonucleotide
cgucuggccgggguucucu

SEQ ID NO: 2675432 - RNA, 19 nt, Artificial Sequence
  Description of Artificial Sequence: Synthetic oligonucleotide
cgaauucccagggcacguu

SEQ ID NO: 2675433 - RNA, 19 nt, Artificial Sequence
  Description of Artificial Sequence: Synthetic oligonucleotide
ucuacguucacagagggag

SEQ ID NO: 2675434 - RNA, 19 nt, Artificial Sequence
  Description of Artificial Sequence: Synthetic oligonucleotide
uucuaguagauucuguagc

SEQ ID NO: 2675435 - RNA, 19 nt, Artificial Sequence
  Description of Artificial Sequence: Synthetic oligonucleotide
uagucguugacgaacaaug

SEQ ID NO: 2675436 - RNA, 19 nt, Artificial Sequence
  Description of Artificial Sequence: Synthetic oligonucleotide
ucguugacgaacaaugugc

SEQ ID NO: 2675437 - RNA, 19 nt, Artificial Sequence
  Description of Artificial Sequence: Synthetic oligonucleotide
aggaagagcauuccgcugc

SEQ ID NO: 2675438 - RNA, 19 nt, Artificial Sequence
  Description of Artificial Sequence: Synthetic oligonucleotide
ucugaauagucguugacga

SEQ ID NO: 2675439 - RNA, 19 nt, Artificial Sequence
  Description of Artificial Sequence: Synthetic oligonucleotide
gaucauggcagccaggagc

SEQ ID NO: 2675440 - RNA, 19 nt, Artificial Sequence
  Description of Artificial Sequence: Synthetic oligonucleotide
gaagggcgcaaucacaacg

SEQ ID NO: 2675441 - RNA, 19 nt, Artificial Sequence
  Description of Artificial Sequence: Synthetic oligonucleotide
ugaggcuaccaccagauac

SEQ ID NO: 2675442 - RNA, 19 nt, Artificial Sequence
  Description of Artificial Sequence: Synthetic oligonucleotide
gauccaagagcccagccag

SEQ ID NO: 2675443 - RNA, 19 nt, Artificial Sequence
  Description of Artificial Sequence: Synthetic oligonucleotide
ugagcuagugugauguuug

SEQ ID NO: 2675444 - RNA, 19 nt, Artificial Sequence
  Description of Artificial Sequence: Synthetic oligonucleotide
agugucacgggucgcauac

SEQ ID NO: 2675445 - RNA, 19 nt, Artificial Sequence
  Description of Artificial Sequence: Synthetic oligonucleotide
ugugauguuugugaggaag

SEQ ID NO: 2675446 - RNA, 19 nt, Artificial Sequence
  Description of Artificial Sequence: Synthetic oligonucleotide
uuugccaucgcgagccugg

SEQ ID NO: 2675447 - RNA, 19 nt, Artificial Sequence
  Description of Artificial Sequence: Synthetic oligonucleotide
gauucuguagcgccaggcg

SEQ ID NO: 2675448 - RNA, 19 nt, Artificial Sequence
  Description of Artificial Sequence: Synthetic oligonucleotide
uuucuccagaccaccaggg

SEQ ID NO: 2675449 - RNA, 19 nt, Artificial Sequence
  Description of Artificial Sequence: Synthetic oligonucleotide
aucacaacgccauggguuc

SEQ ID NO: 2675450 - RNA, 19 nt, Artificial Sequence
  Description of Artificial Sequence: Synthetic oligonucleotide
ucgagcugcgcaaaggugc

SEQ ID NO: 2675451 - RNA, 19 nt, Artificial Sequence
  Description of Artificial Sequence: Synthetic oligonucleotide
agguuugccaucgcgagcc

SEQ ID NO: 2675452 - RNA, 19 nt, Artificial Sequence
  Description of Artificial Sequence: Synthetic oligonucleotide
ugaauagucguugacgaac

SEQ ID NO: 2675453 - RNA, 19 nt, Artificial Sequence
  Description of Artificial Sequence: Synthetic oligonucleotide
aagagcauuccgcugccag

SEQ ID NO: 2675454 - RNA, 19 nt, Artificial Sequence
  Description of Artificial Sequence: Synthetic oligonucleotide
uaguagauucuguagcgcc

SEQ ID NO: 2675455 - RNA, 19 nt, Artificial Sequence
  Description of Artificial Sequence: Synthetic oligonucleotide
uuugugaggaagagcauuc

SEQ ID NO: 2675456 - RNA, 19 nt, Artificial Sequence
  Description of Artificial Sequence: Synthetic oligonucleotide
aagggcgcaaucacaacgc

SEQ ID NO: 2675457 - RNA, 19 nt, Artificial Sequence
  Description of Artificial Sequence: Synthetic oligonucleotide
cuucuaguagauucuguag

SEQ ID NO: 2675458 - RNA, 19 nt, Artificial Sequence
  Description of Artificial Sequence: Synthetic oligonucleotide
ugcgcaaaggugcaaggcc

SEQ ID NO: 2675459 - RNA, 19 nt, Artificial Sequence
  Description of Artificial Sequence: Synthetic oligonucleotide
caugugaucuucuugucuc

SEQ ID NO: 2675460 - RNA, 19 nt, Artificial Sequence
  Description of Artificial Sequence: Synthetic oligonucleotide
ugagguuugccaucgcgag

SEQ ID NO: 2675461 - RNA, 19 nt, Artificial Sequence
  Description of Artificial Sequence: Synthetic oligonucleotide
aucacggaguuccucgagc

SEQ ID NO: 2675462 - RNA, 19 nt, Artificial Sequence
  Description of Artificial Sequence: Synthetic oligonucleotide
ucuccagaccaccaggggc

SEQ ID NO: 2675463 - RNA, 19 nt, Artificial Sequence
  Description of Artificial Sequence: Synthetic oligonucleotide
uccgcugccagugucacgg

SEQ ID NO: 2675464 - RNA, 19 nt, Artificial Sequence
  Description of Artificial Sequence: Synthetic oligonucleotide
ucuuugauccaagagccca

SEQ ID NO: 2675465 - RNA, 19 nt, Artificial Sequence
  Description of Artificial Sequence: Synthetic oligonucleotide
aaaggugcaaggcccgucu

SEQ ID NO: 2675466 - RNA, 19 nt, Artificial Sequence
  Description of Artificial Sequence: Synthetic oligonucleotide
ugauccaagagcccagcca

SEQ ID NO: 2675467 - RNA, 19 nt, Artificial Sequence
  Description of Artificial Sequence: Synthetic oligonucleotide
uugagguuugccaucgcga

SEQ ID NO: 2675468 - RNA, 19 nt, Artificial Sequence
  Description of Artificial Sequence: Synthetic oligonucleotide
aacgccauggguucucugu

SEQ ID NO: 2675469 - RNA, 19 nt, Artificial Sequence
  Description of Artificial Sequence: Synthetic oligonucleotide
accagauacuucuaguaga

SEQ ID NO: 2675470 - RNA, 19 nt, Artificial Sequence
  Description of Artificial Sequence: Synthetic oligonucleotide
gucugaauagucguugacg

SEQ ID NO: 2675471 - RNA, 19 nt, Artificial Sequence
  Description of Artificial Sequence: Synthetic oligonucleotide
cuagugugauguuugugag

SEQ ID NO: 2675472 - RNA, 19 nt, Artificial Sequence
  Description of Artificial Sequence: Synthetic oligonucleotide
aggagcagcgcagugagcg

SEQ ID NO: 2675473 - RNA, 19 nt, Artificial Sequence
  Description of Artificial Sequence: Synthetic oligonucleotide
cuugagguuugccaucgcg

SEQ ID NO: 2675474 - RNA, 19 nt, Artificial Sequence
  Description of Artificial Sequence: Synthetic oligonucleotide
ugcguugcuaggcccaggg

SEQ ID NO: 2675475 - RNA, 19 nt, Artificial Sequence
  Description of Artificial Sequence: Synthetic oligonucleotide
cuuucuccagaccaccagg

SEQ ID NO: 2675476 - RNA, 19 nt, Artificial Sequence
  Description of Artificial Sequence: Synthetic oligonucleotide
aaucacaacgccauggguu

SEQ ID NO: 2675477 - RNA, 19 nt, Artificial Sequence
  Description of Artificial Sequence: Synthetic oligonucleotide
uugucucuggagcucagca

SEQ ID NO: 2675478 - RNA, 19 nt, Artificial Sequence
  Description of Artificial Sequence: Synthetic oligonucleotide
uagugugauguuugugagg

SEQ ID NO: 2675479 - RNA, 19 nt, Artificial Sequence
  Description of Artificial Sequence: Synthetic oligonucleotide
acgauagcugcugcgaucg

SEQ ID NO: 2675480 - RNA, 19 nt, Artificial Sequence
  Description of Artificial Sequence: Synthetic oligonucleotide
uucuguagcgccaggcgug

SEQ ID NO: 2675481 - RNA, 19 nt, Artificial Sequence
  Description of Artificial Sequence: Synthetic oligonucleotide
acuucuaguagauucugua

SEQ ID NO: 2675482 - RNA, 19 nt, Artificial Sequence
  Description of Artificial Sequence: Synthetic oligonucleotide
acgaacaaugugccuuccc

SEQ ID NO: 2675483 - RNA, 19 nt, Artificial Sequence
  Description of Artificial Sequence: Synthetic oligonucleotide
ccucuuugauccaagagcc

SEQ ID NO: 2675484 - RNA, 19 nt, Artificial Sequence
  Description of Artificial Sequence: Synthetic oligonucleotide
ugucacgggucgcauaccc

SEQ ID NO: 2675485 - RNA, 19 nt, Artificial Sequence
  Description of Artificial Sequence: Synthetic oligonucleotide
gauguuugugaggaagagc

SEQ ID NO: 2675486 - RNA, 19 nt, Artificial Sequence
  Description of Artificial Sequence: Synthetic oligonucleotide
uguagcgccaggcgugggg

SEQ ID NO: 2675487 - RNA, 19 nt, Artificial Sequence
  Description of Artificial Sequence: Synthetic oligonucleotide
agcacaugugaucuucuug

SEQ ID NO: 2675488 - RNA, 19 nt, Artificial Sequence
  Description of Artificial Sequence: Synthetic oligonucleotide
uucuccagaccaccagggg

SEQ ID NO: 2675489 - RNA, 19 nt, Artificial Sequence
  Description of Artificial Sequence: Synthetic oligonucleotide
caccagauacuucuaguag

SEQ ID NO: 2675490 - RNA, 19 nt, Artificial Sequence
  Description of Artificial Sequence: Synthetic oligonucleotide
gucguugacgaacaaugug

SEQ ID NO: 2675491 - RNA, 19 nt, Artificial Sequence
  Description of Artificial Sequence: Synthetic oligonucleotide
acaugugaucuucuugucu

SEQ ID NO: 2675492 - RNA, 19 nt, Artificial Sequence
  Description of Artificial Sequence: Synthetic oligonucleotide
ugcaaggcccgucugaaua

SEQ ID NO: 2675493 - RNA, 19 nt, Artificial Sequence
  Description of Artificial Sequence: Synthetic oligonucleotide
uaccaccagauacuucuag

SEQ ID NO: 2675494 - RNA, 19 nt, Artificial Sequence
  Description of Artificial Sequence: Synthetic oligonucleotide
guauccugaugccuggcag

SEQ ID NO: 2675495 - RNA, 19 nt, Artificial Sequence
  Description of Artificial Sequence: Synthetic oligonucleotide
agcccagccagugaagggc

SEQ ID NO: 2675496 - RNA, 19 nt, Artificial Sequence
  Description of Artificial Sequence: Synthetic oligonucleotide
uugacgaacaaugugccuu

SEQ ID NO: 2675497 - RNA, 19 nt, Artificial Sequence
  Description of Artificial Sequence: Synthetic oligonucleotide
caugcugccugccucgugc

SEQ ID NO: 2675498 - RNA, 19 nt, Artificial Sequence
  Description of Artificial Sequence: Synthetic oligonucleotide
uuuuacgccgccgccggcg

SEQ ID NO: 2675499 - RNA, 19 nt, Artificial Sequence
  Description of Artificial Sequence: Synthetic oligonucleotide
auucuguagcgccaggcgu

SEQ ID NO: 2675500 - RNA, 19 nt, Artificial Sequence
  Description of Artificial Sequence: Synthetic oligonucleotide
cuuugauccaagagcccag

SEQ ID NO: 2675501 - RNA, 19 nt, Artificial Sequence
  Description of Artificial Sequence: Synthetic oligonucleotide
guuagcugugagcucuggg

SEQ ID NO: 2675502 - RNA, 19 nt, Artificial Sequence
  Description of Artificial Sequence: Synthetic oligonucleotide
acgggucgcauacccaccc

SEQ ID NO: 2675503 - RNA, 19 nt, Artificial Sequence
  Description of Artificial Sequence: Synthetic oligonucleotide
uucacagagggaggaaugc

SEQ ID NO: 2675504 - RNA, 19 nt, Artificial Sequence
  Description of Artificial Sequence: Synthetic oligonucleotide
gcuagugugauguuuguga

SEQ ID NO: 2675505 - RNA, 19 nt, Artificial Sequence
  Description of Artificial Sequence: Synthetic oligonucleotide
agcgccagcagcacgauag

SEQ ID NO: 2675506 - RNA, 19 nt, Artificial Sequence
  Description of Artificial Sequence: Synthetic oligonucleotide
uacuucuaguagauucugu

SEQ ID NO: 2675507 - RNA, 19 nt, Artificial Sequence
  Description of Artificial Sequence: Synthetic oligonucleotide
cccucuuugauccaagagc

SEQ ID NO: 2675508 - RNA, 19 nt, Artificial Sequence
  Description of Artificial Sequence: Synthetic oligonucleotide
uugauccaagagcccagcc

SEQ ID NO: 2675509 - RNA, 19 nt, Artificial Sequence
  Description of Artificial Sequence: Synthetic oligonucleotide
uggguauccugaugccugg

SEQ ID NO: 2675510 - RNA, 19 nt, Artificial Sequence
  Description of Artificial Sequence: Synthetic oligonucleotide
ucacgggucgcauacccac

SEQ ID NO: 2675511 - RNA, 19 nt, Artificial Sequence
  Description of Artificial Sequence: Synthetic oligonucleotide
cuaguagauucuguagcgc

SEQ ID NO: 2675512 - RNA, 19 nt, Artificial Sequence
  Description of Artificial Sequence: Synthetic oligonucleotide
ucacggaguuccucgagcu

SEQ ID NO: 2675513 - RNA, 19 nt, Artificial Sequence
  Description of Artificial Sequence: Synthetic oligonucleotide
gcaaucacaacgccauggg

SEQ ID NO: 2675514 - RNA, 19 nt, Artificial Sequence
  Description of Artificial Sequence: Synthetic oligonucleotide
agggcgcaaucacaacgcc

SEQ ID NO: 2675515 - RNA, 19 nt, Artificial Sequence
  Description of Artificial Sequence: Synthetic oligonucleotide
cuacguucacagagggagg

SEQ ID NO: 2675516 - RNA, 19 nt, Artificial Sequence
  Description of Artificial Sequence: Synthetic oligonucleotide
ucgcauacccacccaggcc

SEQ ID NO: 2675517 - RNA, 19 nt, Artificial Sequence
  Description of Artificial Sequence: Synthetic oligonucleotide
gaauagucguugacgaaca

SEQ ID NO: 2675518 - RNA, 19 nt, Artificial Sequence
  Description of Artificial Sequence: Synthetic oligonucleotide
agugagcgccagcagcacg

SEQ ID NO: 2675519 - RNA, 19 nt, Artificial Sequence
  Description of Artificial Sequence: Synthetic oligonucleotide
uagauucuguagcgccagg

SEQ ID NO: 2675520 - RNA, 19 nt, Artificial Sequence
  Description of Artificial Sequence: Synthetic oligonucleotide
aauagucguugacgaacaa

SEQ ID NO: 2675521 - RNA, 19 nt, Artificial Sequence
  Description of Artificial Sequence: Synthetic oligonucleotide
agagcccagccagugaagg

SEQ ID NO: 2675522 - RNA, 19 nt, Artificial Sequence
  Description of Artificial Sequence: Synthetic oligonucleotide
ugacgaacaaugugccuuc

SEQ ID NO: 2675523 - RNA, 19 nt, Artificial Sequence
  Description of Artificial Sequence: Synthetic oligonucleotide
agaugaggcuaccaccaga

SEQ ID NO: 2675524 - RNA, 19 nt, Artificial Sequence
  Description of Artificial Sequence: Synthetic oligonucleotide
uacguucacagagggagga

SEQ ID NO: 2675525 - RNA, 19 nt, Artificial Sequence
  Description of Artificial Sequence: Synthetic oligonucleotide
gggcucuacguucacagag

SEQ ID NO: 2675526 - RNA, 19 nt, Artificial Sequence
  Description of Artificial Sequence: Synthetic oligonucleotide
cuggcaggcuaccugcagg

SEQ ID NO: 2675527 - RNA, 19 nt, Artificial Sequence
  Description of Artificial Sequence: Synthetic oligonucleotide
auacuucuaguagauucug

SEQ ID NO: 2675528 - RNA, 19 nt, Artificial Sequence
  Description of Artificial Sequence: Synthetic oligonucleotide
ugccuggcaggcuaccugc

SEQ ID NO: 2675529 - RNA, 19 nt, Artificial Sequence
  Description of Artificial Sequence: Synthetic oligonucleotide
gucgcauacccacccaggc

SEQ ID NO: 2675530 - RNA, 19 nt, Artificial Sequence
  Description of Artificial Sequence: Synthetic oligonucleotide
aggaaugcagaugaggcua

SEQ ID NO: 2675531 - RNA, 19 nt, Artificial Sequence
  Description of Artificial Sequence: Synthetic oligonucleotide
aaggccaugcugccugccu

SEQ ID NO: 2675532 - RNA, 19 nt, Artificial Sequence
  Description of Artificial Sequence: Synthetic oligonucleotide
uggggcaccuuucuccaga

SEQ ID NO: 2675533 - RNA, 19 nt, Artificial Sequence
  Description of Artificial Sequence: Synthetic oligonucleotide
ggcaccuuucuccagacca

SEQ ID NO: 2675534 - RNA, 19 nt, Artificial Sequence
  Description of Artificial Sequence: Synthetic oligonucleotide
ugugaucuucuugucucug

SEQ ID NO: 2675535 - RNA, 19 nt, Artificial Sequence
  Description of Artificial Sequence: Synthetic oligonucleotide
ucuguagcgccaggcgugg

SEQ ID NO: 2675536 - RNA, 19 nt, Artificial Sequence
  Description of Artificial Sequence: Synthetic oligonucleotide
cucuuugauccaagagccc

SEQ ID NO: 2675537 - RNA, 19 nt, Artificial Sequence
  Description of Artificial Sequence: Synthetic oligonucleotide
uguggguauccugaugccu

SEQ ID NO: 2675538 - RNA, 19 nt, Artificial Sequence
  Description of Artificial Sequence: Synthetic oligonucleotide
gcugcgaucgcugucugcg

SEQ ID NO: 2675539 - RNA, 19 nt, Artificial Sequence
  Description of Artificial Sequence: Synthetic oligonucleotide
ucaucacggaguuccucga

SEQ ID NO: 2675540 - RNA, 19 nt, Artificial Sequence
  Description of Artificial Sequence: Synthetic oligonucleotide
cugccagugucacgggucg

SEQ ID NO: 2675541 - RNA, 19 nt, Artificial Sequence
  Description of Artificial Sequence: Synthetic oligonucleotide
uccaagagcccagccagug

SEQ ID NO: 2675542 - RNA, 19 nt, Artificial Sequence
  Description of Artificial Sequence: Synthetic oligonucleotide
uccucgagcugcgcaaagg

SEQ ID NO: 2675543 - RNA, 19 nt, Artificial Sequence
  Description of Artificial Sequence: Synthetic oligonucleotide
aguuccucgagcugcgcaa

SEQ ID NO: 2675544 - RNA, 19 nt, Artificial Sequence
  Description of Artificial Sequence: Synthetic oligonucleotide
guugcuaggcccagggcgc

SEQ ID NO: 2675545 - RNA, 19 nt, Artificial Sequence
  Description of Artificial Sequence: Synthetic oligonucleotide
agaucauggcagccaggag

SEQ ID NO: 2675546 - RNA, 19 nt, Artificial Sequence
  Description of Artificial Sequence: Synthetic oligonucleotide
uggagcucagcagccgacg

SEQ ID NO: 2675547 - RNA, 19 nt, Artificial Sequence
  Description of Artificial Sequence: Synthetic oligonucleotide
gagguuugccaucgcgagc

SEQ ID NO: 2675548 - RNA, 19 nt, Artificial Sequence
  Description of Artificial Sequence: Synthetic oligonucleotide
agagcauuccgcugccagu

SEQ ID NO: 2675549 - RNA, 19 nt, Artificial Sequence
  Description of Artificial Sequence: Synthetic oligonucleotide
uguuugugaggaagagcau

SEQ ID NO: 2675550 - RNA, 19 nt, Artificial Sequence
  Description of Artificial Sequence: Synthetic oligonucleotide
gcucuacguucacagaggg

SEQ ID NO: 2675551 - RNA, 19 nt, Artificial Sequence
  Description of Artificial Sequence: Synthetic oligonucleotide
guggguauccugaugccug

SEQ ID NO: 2675552 - RNA, 19 nt, Artificial Sequence
  Description of Artificial Sequence: Synthetic oligonucleotide
uugugaggaagagcauucc

SEQ ID NO: 2675553 - RNA, 19 nt, Artificial Sequence
  Description of Artificial Sequence: Synthetic oligonucleotide
aguagauucuguagcgcca

SEQ ID NO: 2675554 - RNA, 19 nt, Artificial Sequence
  Description of Artificial Sequence: Synthetic oligonucleotide
guucacagagggaggaaug

SEQ ID NO: 2675555 - RNA, 19 nt, Artificial Sequence
  Description of Artificial Sequence: Synthetic oligonucleotide
cagugaagggcgcaaucac

SEQ ID NO: 2675556 - RNA, 19 nt, Artificial Sequence
  Description of Artificial Sequence: Synthetic oligonucleotide
ucuugucucuggagcucag

SEQ ID NO: 2675557 - RNA, 19 nt, Artificial Sequence
  Description of Artificial Sequence: Synthetic oligonucleotide
cuaccugcagguccucccc

SEQ ID NO: 2675558 - RNA, 19 nt, Artificial Sequence
  Description of Artificial Sequence: Synthetic oligonucleotide
auagucguugacgaacaau

SEQ ID NO: 2675559 - RNA, 19 nt, Artificial Sequence
  Description of Artificial Sequence: Synthetic oligonucleotide
ugaagggcgcaaucacaac

SEQ ID NO: 2675560 - RNA, 19 nt, Artificial Sequence
  Description of Artificial Sequence: Synthetic oligonucleotide
auuccgcugccagugucac

SEQ ID NO: 2675561 - RNA, 19 nt, Artificial Sequence
  Description of Artificial Sequence: Synthetic oligonucleotide
agcacgauagcugcugcga

SEQ ID NO: 2675562 - RNA, 19 nt, Artificial Sequence
  Description of Artificial Sequence: Synthetic oligonucleotide
agcgcagugagcgccagca

SEQ ID NO: 2675563 - RNA, 19 nt, Artificial Sequence
  Description of Artificial Sequence: Synthetic oligonucleotide
cuguggguauccugaugcc

SEQ ID NO: 2675564 - RNA, 19 nt, Artificial Sequence
  Description of Artificial Sequence: Synthetic oligonucleotide
ggcagaucauggcagccag

SEQ ID NO: 2675565 - RNA, 19 nt, Artificial Sequence
  Description of Artificial Sequence: Synthetic oligonucleotide
aaggcccgucugaauaguc

SEQ ID NO: 2675566 - RNA, 19 nt, Artificial Sequence
  Description of Artificial Sequence: Synthetic oligonucleotide
gaccaccaggggcuguggg

SEQ ID NO: 2675567 - RNA, 19 nt, Artificial Sequence
  Description of Artificial Sequence: Synthetic oligonucleotide
agcagcacgauagcugcug

SEQ ID NO: 2675568 - RNA, 19 nt, Artificial Sequence
  Description of Artificial Sequence: Synthetic oligonucleotide
cagcacgauagcugcugcg

SEQ ID NO: 2675569 - RNA, 19 nt, Artificial Sequence
  Description of Artificial Sequence: Synthetic oligonucleotide
acgccauggguucucugug

SEQ ID NO: 2675570 - RNA, 19 nt, Artificial Sequence
  Description of Artificial Sequence: Synthetic oligonucleotide
agugaagggcgcaaucaca

SEQ ID NO: 2675571 - RNA, 19 nt, Artificial Sequence
  Description of Artificial Sequence: Synthetic oligonucleotide
cgaacaaugugccuucccc

SEQ ID NO: 2675572 - RNA, 19 nt, Artificial Sequence
  Description of Artificial Sequence: Synthetic oligonucleotide
cacaugugaucuucuuguc

SEQ ID NO: 2675573 - RNA, 19 nt, Artificial Sequence
  Description of Artificial Sequence: Synthetic oligonucleotide
uuccucgagcugcgcaaag

SEQ ID NO: 2675574 - RNA, 19 nt, Artificial Sequence
  Description of Artificial Sequence: Synthetic oligonucleotide
gccaucgcgagccuggggc

SEQ ID NO: 2675575 - RNA, 19 nt, Artificial Sequence
  Description of Artificial Sequence: Synthetic oligonucleotide
gagcucagcagccgacggc

SEQ ID NO: 2675576 - RNA, 19 nt, Artificial Sequence
  Description of Artificial Sequence: Synthetic oligonucleotide
agcugcgcaaaggugcaag

SEQ ID NO: 2675577 - RNA, 19 nt, Artificial Sequence
  Description of Artificial Sequence: Synthetic oligonucleotide
cacgauagcugcugcgauc

SEQ ID NO: 2675578 - RNA, 19 nt, Artificial Sequence
  Description of Artificial Sequence: Synthetic oligonucleotide
aggcccgucugaauagucg

SEQ ID NO: 2675579 - RNA, 19 nt, Artificial Sequence
  Description of Artificial Sequence: Synthetic oligonucleotide
cagaucauggcagccagga

SEQ ID NO: 2675580 - RNA, 19 nt, Artificial Sequence
  Description of Artificial Sequence: Synthetic oligonucleotide
gucggcagaucauggcagc

SEQ ID NO: 2675581 - RNA, 19 nt, Artificial Sequence
  Description of Artificial Sequence: Synthetic oligonucleotide
caagagcccagccagugaa

SEQ ID NO: 2675582 - RNA, 19 nt, Artificial Sequence
  Description of Artificial Sequence: Synthetic oligonucleotide
caucacggaguuccucgag

SEQ ID NO: 2675583 - RNA, 19 nt, Artificial Sequence
  Description of Artificial Sequence: Synthetic oligonucleotide
agcugcugcgaucgcuguc

SEQ ID NO: 2675584 - RNA, 19 nt, Artificial Sequence
  Description of Artificial Sequence: Synthetic oligonucleotide
uuuacgccgccgccggcgu

SEQ ID NO: 2675585 - RNA, 19 nt, Artificial Sequence
  Description of Artificial Sequence: Synthetic oligonucleotide
gcacaugugaucuucuugu

SEQ ID NO: 2675586 - RNA, 19 nt, Artificial Sequence
  Description of Artificial Sequence: Synthetic oligonucleotide
agcuagugugauguuugug

SEQ ID NO: 2675587 - RNA, 19 nt, Artificial Sequence
  Description of Artificial Sequence: Synthetic oligonucleotide
ggcucuacguucacagagg

SEQ ID NO: 2675588 - RNA, 19 nt, Artificial Sequence
  Description of Artificial Sequence: Synthetic oligonucleotide
cugcgcaaaggugcaaggc

SEQ ID NO: 2675589 - RNA, 19 nt, Artificial Sequence
  Description of Artificial Sequence: Synthetic oligonucleotide
ggcuugagguuugccaucg

SEQ ID NO: 2675590 - RNA, 19 nt, Artificial Sequence
  Description of Artificial Sequence: Synthetic oligonucleotide
gaugaggcuaccaccagau

SEQ ID NO: 2675591 - RNA, 19 nt, Artificial Sequence
  Description of Artificial Sequence: Synthetic oligonucleotide
agucguugacgaacaaugu

SEQ ID NO: 2675592 - RNA, 19 nt, Artificial Sequence
  Description of Artificial Sequence: Synthetic oligonucleotide
ucugcguugcuaggcccag

SEQ ID NO: 2675593 - RNA, 19 nt, Artificial Sequence
  Description of Artificial Sequence: Synthetic oligonucleotide
gugaagggcgcaaucacaa

SEQ ID NO: 2675594 - RNA, 19 nt, Artificial Sequence
  Description of Artificial Sequence: Synthetic oligonucleotide
cguugacgaacaaugugcc

SEQ ID NO: 2675595 - RNA, 19 nt, Artificial Sequence
  Description of Artificial Sequence: Synthetic oligonucleotide
ugccaucgcgagccugggg

SEQ ID NO: 2675596 - RNA, 19 nt, Artificial Sequence
  Description of Artificial Sequence: Synthetic oligonucleotide
gaaugcagaugaggcuacc

SEQ ID NO: 2675597 - RNA, 19 nt, Artificial Sequence
  Description of Artificial Sequence: Synthetic oligonucleotide
cagaugaggcuaccaccag

SEQ ID NO: 2675598 - RNA, 19 nt, Artificial Sequence
  Description of Artificial Sequence: Synthetic oligonucleotide
gcaaggcccgucugaauag

SEQ ID NO: 2675599 - RNA, 19 nt, Artificial Sequence
  Description of Artificial Sequence: Synthetic oligonucleotide
ucggcagaucauggcagcc

SEQ ID NO: 2675600 - RNA, 19 nt, Artificial Sequence
  Description of Artificial Sequence: Synthetic oligonucleotide
gcugcgcaaaggugcaagg

SEQ ID NO: 2675601 - RNA, 19 nt, Artificial Sequence
  Description of Artificial Sequence: Synthetic oligonucleotide
gaggcuaccaccagauacu

SEQ ID NO: 2675602 - RNA, 19 nt, Artificial Sequence
  Description of Artificial Sequence: Synthetic oligonucleotide
cuugucucuggagcucagc

SEQ ID NO: 2675603 - RNA, 19 nt, Artificial Sequence
  Description of Artificial Sequence: Synthetic oligonucleotide
cauuccgcugccaguguca

SEQ ID NO: 2675604 - RNA, 19 nt, Artificial Sequence
  Description of Artificial Sequence: Synthetic oligonucleotide
ugggcuugggcuugagguu

SEQ ID NO: 2675605 - RNA, 19 nt, Artificial Sequence
  Description of Artificial Sequence: Synthetic oligonucleotide
cucagcagccgacggcccc

SEQ ID NO: 2675606 - RNA, 19 nt, Artificial Sequence
  Description of Artificial Sequence: Synthetic oligonucleotide
ugcgaucgcugucugcguu

SEQ ID NO: 2675607 - RNA, 19 nt, Artificial Sequence
  Description of Artificial Sequence: Synthetic oligonucleotide
gcuaccugcagguccuccc

SEQ ID NO: 2675608 - RNA, 19 nt, Artificial Sequence
  Description of Artificial Sequence: Synthetic oligonucleotide
cuggagcucagcagccgac

SEQ ID NO: 2675609 - RNA, 19 nt, Artificial Sequence
  Description of Artificial Sequence: Synthetic oligonucleotide
agggcgcggaaggccaugc

SEQ ID NO: 2675610 - RNA, 19 nt, Artificial Sequence
  Description of Artificial Sequence: Synthetic oligonucleotide
cacgggucgcauacccacc

SEQ ID NO: 2675611 - RNA, 19 nt, Artificial Sequence
  Description of Artificial Sequence: Synthetic oligonucleotide
gacgaacaaugugccuucc

SEQ ID NO: 2675612 - RNA, 19 nt, Artificial Sequence
  Description of Artificial Sequence: Synthetic oligonucleotide
gcagaugaggcuaccacca

SEQ ID NO: 2675613 - RNA, 19 nt, Artificial Sequence
  Description of Artificial Sequence: Synthetic oligonucleotide
uuccgcugccagugucacg

SEQ ID NO: 2675614 - RNA, 19 nt, Artificial Sequence
  Description of Artificial Sequence: Synthetic oligonucleotide
cugaauagucguugacgaa

SEQ ID NO: 2675615 - RNA, 19 nt, Artificial Sequence
  Description of Artificial Sequence: Synthetic oligonucleotide
cucuggagcucagcagccg

SEQ ID NO: 2675616 - RNA, 19 nt, Artificial Sequence
  Description of Artificial Sequence: Synthetic oligonucleotide
cugguguuccagguuccag

SEQ ID NO: 2675617 - RNA, 19 nt, Artificial Sequence
  Description of Artificial Sequence: Synthetic oligonucleotide
cugaugccuggcaggcuac

SEQ ID NO: 2675618 - RNA, 19 nt, Artificial Sequence
  Description of Artificial Sequence: Synthetic oligonucleotide
uugccaucgcgagccuggg

SEQ ID NO: 2675619 - RNA, 19 nt, Artificial Sequence
  Description of Artificial Sequence: Synthetic oligonucleotide
ugcugcgaucgcugucugc

SEQ ID NO: 2675620 - RNA, 19 nt, Artificial Sequence
  Description of Artificial Sequence: Synthetic oligonucleotide
cuccagaccaccaggggcu

SEQ ID NO: 2675621 - RNA, 19 nt, Artificial Sequence
  Description of Artificial Sequence: Synthetic oligonucleotide
gguauccugaugccuggca

SEQ ID NO: 2675622 - RNA, 19 nt, Artificial Sequence
  Description of Artificial Sequence: Synthetic oligonucleotide
ggcgcggaaggccaugcug

SEQ ID NO: 2675623 - RNA, 19 nt, Artificial Sequence
  Description of Artificial Sequence: Synthetic oligonucleotide
guuccagguuccagcuggg

SEQ ID NO: 2675624 - RNA, 19 nt, Artificial Sequence
  Description of Artificial Sequence: Synthetic oligonucleotide
gcgcaaaggugcaaggccc

SEQ ID NO: 2675625 - RNA, 19 nt, Artificial Sequence
  Description of Artificial Sequence: Synthetic oligonucleotide
gggucgcauacccacccag

SEQ ID NO: 2675626 - RNA, 19 nt, Artificial Sequence
  Description of Artificial Sequence: Synthetic oligonucleotide
agcauuccgcugccagugu

SEQ ID NO: 2675627 - RNA, 19 nt, Artificial Sequence
  Description of Artificial Sequence: Synthetic oligonucleotide
cgcaaucacaacgccaugg

SEQ ID NO: 2675628 - RNA, 19 nt, Artificial Sequence
  Description of Artificial Sequence: Synthetic oligonucleotide
ugaugccuggcaggcuacc

SEQ ID NO: 2675629 - RNA, 19 nt, Artificial Sequence
  Description of Artificial Sequence: Synthetic oligonucleotide
gugagcgccagcagcacga

SEQ ID NO: 2675630 - RNA, 19 nt, Artificial Sequence
  Description of Artificial Sequence: Synthetic oligonucleotide
aucgcugucugcguugcua

SEQ ID NO: 2675631 - RNA, 19 nt, Artificial Sequence
  Description of Artificial Sequence: Synthetic oligonucleotide
guuugugaggaagagcauu

SEQ ID NO: 2675632 - RNA, 19 nt, Artificial Sequence
  Description of Artificial Sequence: Synthetic oligonucleotide
guugacgaacaaugugccu

SEQ ID NO: 2675633 - RNA, 19 nt, Artificial Sequence
  Description of Artificial Sequence: Synthetic oligonucleotide
cauacccacccaggccugg

SEQ ID NO: 2675634 - RNA, 19 nt, Artificial Sequence
  Description of Artificial Sequence: Synthetic oligonucleotide
cucuacguucacagaggga

SEQ ID NO: 2675635 - RNA, 19 nt, Artificial Sequence
  Description of Artificial Sequence: Synthetic oligonucleotide
ucgugccggggcgugagcu

SEQ ID NO: 2675636 - RNA, 19 nt, Artificial Sequence
  Description of Artificial Sequence: Synthetic oligonucleotide
caaaggugcaaggcccguc

SEQ ID NO: 2675637 - RNA, 19 nt, Artificial Sequence
  Description of Artificial Sequence: Synthetic oligonucleotide
gaaggccaugcugccugcc

SEQ ID NO: 2675638 - RNA, 19 nt, Artificial Sequence
  Description of Artificial Sequence: Synthetic oligonucleotide
guuugccaucgcgagccug

SEQ ID NO: 2675639 - RNA, 19 nt, Artificial Sequence
  Description of Artificial Sequence: Synthetic oligonucleotide
ggcgucggcagaucauggc

SEQ ID NO: 2675640 - RNA, 19 nt, Artificial Sequence
  Description of Artificial Sequence: Synthetic oligonucleotide
cggggcgugagcuagugug

SEQ ID NO: 2675641 - RNA, 19 nt, Artificial Sequence
  Description of Artificial Sequence: Synthetic oligonucleotide
ccccucuuugauccaagag

SEQ ID NO: 2675642 - RNA, 19 nt, Artificial Sequence
  Description of Artificial Sequence: Synthetic oligonucleotide
cagaccaccaggggcugug

SEQ ID NO: 2675643 - RNA, 19 nt, Artificial Sequence
  Description of Artificial Sequence: Synthetic oligonucleotide
ucacaacgccauggguucu

SEQ ID NO: 2675644 - RNA, 19 nt, Artificial Sequence
  Description of Artificial Sequence: Synthetic oligonucleotide
ggaaugcagaugaggcuac

SEQ ID NO: 2675645 - RNA, 19 nt, Artificial Sequence
  Description of Artificial Sequence: Synthetic oligonucleotide
agaccaccaggggcugugg

SEQ ID NO: 2675646 - RNA, 19 nt, Artificial Sequence
  Description of Artificial Sequence: Synthetic oligonucleotide
ggggcuguggguauccuga

SEQ ID NO: 2675647 - RNA, 19 nt, Artificial Sequence
  Description of Artificial Sequence: Synthetic oligonucleotide
accuuucuccagaccacca

SEQ ID NO: 2675648 - RNA, 19 nt, Artificial Sequence
  Description of Artificial Sequence: Synthetic oligonucleotide
gcagcacgauagcugcugc

SEQ ID NO: 2675649 - RNA, 19 nt, Artificial Sequence
  Description of Artificial Sequence: Synthetic oligonucleotide
gagcuagugugauguuugu

SEQ ID NO: 2675650 - RNA, 19 nt, Artificial Sequence
  Description of Artificial Sequence: Synthetic oligonucleotide
gcgucggcagaucauggca

SEQ ID NO: 2675651 - RNA, 19 nt, Artificial Sequence
  Description of Artificial Sequence: Synthetic oligonucleotide
gguuagcugugagcucugg

SEQ ID NO: 2675652 - RNA, 19 nt, Artificial Sequence
  Description of Artificial Sequence: Synthetic oligonucleotide
ugcuaggcccagggcgcgg

SEQ ID NO: 2675653 - RNA, 19 nt, Artificial Sequence
  Description of Artificial Sequence: Synthetic oligonucleotide
gugccggggcgugagcuag

SEQ ID NO: 2675654 - RNA, 19 nt, Artificial Sequence
  Description of Artificial Sequence: Synthetic oligonucleotide
caaucacaacgccaugggu

SEQ ID NO: 2675655 - RNA, 19 nt, Artificial Sequence
  Description of Artificial Sequence: Synthetic oligonucleotide
caacgccauggguucucug

SEQ ID NO: 2675656 - RNA, 19 nt, Artificial Sequence
  Description of Artificial Sequence: Synthetic oligonucleotide
ggagcagcgcagugagcgc

SEQ ID NO: 2675657 - RNA, 19 nt, Artificial Sequence
  Description of Artificial Sequence: Synthetic oligonucleotide
cuggggcaccuuucuccag

SEQ ID NO: 2675658 - RNA, 19 nt, Artificial Sequence
  Description of Artificial Sequence: Synthetic oligonucleotide
cgcaaaggugcaaggcccg

SEQ ID NO: 2675659 - RNA, 19 nt, Artificial Sequence
  Description of Artificial Sequence: Synthetic oligonucleotide
cgucggcagaucauggcag

SEQ ID NO: 2675660 - RNA, 19 nt, Artificial Sequence
  Description of Artificial Sequence: Synthetic oligonucleotide
augaggcuaccaccagaua

SEQ ID NO: 2675661 - RNA, 19 nt, Artificial Sequence
  Description of Artificial Sequence: Synthetic oligonucleotide
ggcucagcacaugugaucu

SEQ ID NO: 2675662 - RNA, 19 nt, Artificial Sequence
  Description of Artificial Sequence: Synthetic oligonucleotide
acaacgccauggguucucu

SEQ ID NO: 2675663 - RNA, 19 nt, Artificial Sequence
  Description of Artificial Sequence: Synthetic oligonucleotide
gucugcguugcuaggccca

SEQ ID NO: 2675664 - RNA, 19 nt, Artificial Sequence
  Description of Artificial Sequence: Synthetic oligonucleotide
gcgaucgcugucugcguug

SEQ ID NO: 2675665 - RNA, 19 nt, Artificial Sequence
  Description of Artificial Sequence: Synthetic oligonucleotide
ccugccucgugccggggcg

SEQ ID NO: 2675666 - RNA, 19 nt, Artificial Sequence
  Description of Artificial Sequence: Synthetic oligonucleotide
cacaacgccauggguucuc

SEQ ID NO: 2675667 - RNA, 19 nt, Artificial Sequence
  Description of Artificial Sequence: Synthetic oligonucleotide
gaagagcauuccgcugcca

SEQ ID NO: 2675668 - RNA, 19 nt, Artificial Sequence
  Description of Artificial Sequence: Synthetic oligonucleotide
ccccagguuagcugugagc

SEQ ID NO: 2675669 - RNA, 19 nt, Artificial Sequence
  Description of Artificial Sequence: Synthetic oligonucleotide
ccaccagauacuucuagua

SEQ ID NO: 2675670 - RNA, 19 nt, Artificial Sequence
  Description of Artificial Sequence: Synthetic oligonucleotide
cccgucugaauagucguug

SEQ ID NO: 2675671 - RNA, 19 nt, Artificial Sequence
  Description of Artificial Sequence: Synthetic oligonucleotide
caggcuaccugcagguccu

SEQ ID NO: 2675672 - RNA, 19 nt, Artificial Sequence
  Description of Artificial Sequence: Synthetic oligonucleotide
ggcgugagcuagugugaug

SEQ ID NO: 2675673 - RNA, 19 nt, Artificial Sequence
  Description of Artificial Sequence: Synthetic oligonucleotide
ggaaggccaugcugccugc

SEQ ID NO: 2675674 - RNA, 19 nt, Artificial Sequence
  Description of Artificial Sequence: Synthetic oligonucleotide
gcgugagcuagugugaugu

SEQ ID NO: 2675675 - RNA, 19 nt, Artificial Sequence
  Description of Artificial Sequence: Synthetic oligonucleotide
gcccagccagugaagggcg

SEQ ID NO: 2675676 - RNA, 19 nt, Artificial Sequence
  Description of Artificial Sequence: Synthetic oligonucleotide
gccagugaagggcgcaauc

SEQ ID NO: 2675677 - RNA, 19 nt, Artificial Sequence
  Description of Artificial Sequence: Synthetic oligonucleotide
ggcgcaaucacaacgccau

SEQ ID NO: 2675678 - RNA, 19 nt, Artificial Sequence
  Description of Artificial Sequence: Synthetic oligonucleotide
caucgcgagccuggggcac

SEQ ID NO: 2675679 - RNA, 19 nt, Artificial Sequence
  Description of Artificial Sequence: Synthetic oligonucleotide
aggcuaccaccagauacuu

SEQ ID NO: 2675680 - RNA, 19 nt, Artificial Sequence
  Description of Artificial Sequence: Synthetic oligonucleotide
ugccagugucacgggucgc

SEQ ID NO: 2675681 - RNA, 19 nt, Artificial Sequence
  Description of Artificial Sequence: Synthetic oligonucleotide
ccagugaagggcgcaauca

SEQ ID NO: 2675682 - RNA, 19 nt, Artificial Sequence
  Description of Artificial Sequence: Synthetic oligonucleotide
cuaccaccagauacuucua

SEQ ID NO: 2675683 - RNA, 19 nt, Artificial Sequence
  Description of Artificial Sequence: Synthetic oligonucleotide
agguuagcugugagcucug

SEQ ID NO: 2675684 - RNA, 19 nt, Artificial Sequence
  Description of Artificial Sequence: Synthetic oligonucleotide
ggugcaaggcccgucugaa

SEQ ID NO: 2675685 - RNA, 19 nt, Artificial Sequence
  Description of Artificial Sequence: Synthetic oligonucleotide
ggggcaccuuucuccagac

SEQ ID NO: 2675686 - RNA, 19 nt, Artificial Sequence
  Description of Artificial Sequence: Synthetic oligonucleotide
ccagauacuucuaguagau

SEQ ID NO: 2675687 - RNA, 19 nt, Artificial Sequence
  Description of Artificial Sequence: Synthetic oligonucleotide
gcauuccgcugccaguguc

SEQ ID NO: 2675688 - RNA, 19 nt, Artificial Sequence
  Description of Artificial Sequence: Synthetic oligonucleotide
cgucugaauagucguugac

SEQ ID NO: 2675689 - RNA, 19 nt, Artificial Sequence
  Description of Artificial Sequence: Synthetic oligonucleotide
gucacgggucgcauaccca

SEQ ID NO: 2675690 - RNA, 19 nt, Artificial Sequence
  Description of Artificial Sequence: Synthetic oligonucleotide
cccagguuagcugugagcu

SEQ ID NO: 2675691 - RNA, 19 nt, Artificial Sequence
  Description of Artificial Sequence: Synthetic oligonucleotide
acguucacagagggaggaa

SEQ ID NO: 2675692 - RNA, 19 nt, Artificial Sequence
  Description of Artificial Sequence: Synthetic oligonucleotide
gggcuugagguuugccauc

SEQ ID NO: 2675693 - RNA, 19 nt, Artificial Sequence
  Description of Artificial Sequence: Synthetic oligonucleotide
gugugauguuugugaggaa

SEQ ID NO: 2675694 - RNA, 19 nt, Artificial Sequence
  Description of Artificial Sequence: Synthetic oligonucleotide
cugcguugcuaggcccagg

SEQ ID NO: 2675695 - RNA, 19 nt, Artificial Sequence
  Description of Artificial Sequence: Synthetic oligonucleotide
cagugagcgccagcagcac

SEQ ID NO: 2675696 - RNA, 19 nt, Artificial Sequence
  Description of Artificial Sequence: Synthetic oligonucleotide
gugucacgggucgcauacc

SEQ ID NO: 2675697 - RNA, 19 nt, Artificial Sequence
  Description of Artificial Sequence: Synthetic oligonucleotide
ggcccgucugaauagucgu

SEQ ID NO: 2675698 - RNA, 19 nt, Artificial Sequence
  Description of Artificial Sequence: Synthetic oligonucleotide
ccagguuagcugugagcuc

SEQ ID NO: 2675699 - RNA, 19 nt, Artificial Sequence
  Description of Artificial Sequence: Synthetic oligonucleotide
cucgugccggggcgugagc

SEQ ID NO: 2675700 - RNA, 19 nt, Artificial Sequence
  Description of Artificial Sequence: Synthetic oligonucleotide
cggaguuccucgagcugcg

SEQ ID NO: 2675701 - RNA, 19 nt, Artificial Sequence
  Description of Artificial Sequence: Synthetic oligonucleotide
agccagugaagggcgcaau

SEQ ID NO: 2675702 - RNA, 19 nt, Artificial Sequence
  Description of Artificial Sequence: Synthetic oligonucleotide
uuacgccgccgccggcguc

SEQ ID NO: 2675703 - RNA, 19 nt, Artificial Sequence
  Description of Artificial Sequence: Synthetic oligonucleotide
gcuugagguuugccaucgc

SEQ ID NO: 2675704 - RNA, 19 nt, Artificial Sequence
  Description of Artificial Sequence: Synthetic oligonucleotide
ccugaugccuggcaggcua

SEQ ID NO: 2675705 - RNA, 19 nt, Artificial Sequence
  Description of Artificial Sequence: Synthetic oligonucleotide
ugccucgugccggggcgug

SEQ ID NO: 2675706 - RNA, 19 nt, Artificial Sequence
  Description of Artificial Sequence: Synthetic oligonucleotide
ugccggggcgugagcuagu

SEQ ID NO: 2675707 - RNA, 19 nt, Artificial Sequence
  Description of Artificial Sequence: Synthetic oligonucleotide
cagcgcagugagcgccagc

SEQ ID NO: 2675708 - RNA, 19 nt, Artificial Sequence
  Description of Artificial Sequence: Synthetic oligonucleotide
cuguagcgccaggcguggg

SEQ ID NO: 2675709 - RNA, 19 nt, Artificial Sequence
  Description of Artificial Sequence: Synthetic oligonucleotide
gcguugcuaggcccagggc

SEQ ID NO: 2675710 - RNA, 19 nt, Artificial Sequence
  Description of Artificial Sequence: Synthetic oligonucleotide
gggcaccuuucuccagacc

SEQ ID NO: 2675711 - RNA, 19 nt, Artificial Sequence
  Description of Artificial Sequence: Synthetic oligonucleotide
gggcgcaaucacaacgcca

SEQ ID NO: 2675712 - RNA, 19 nt, Artificial Sequence
  Description of Artificial Sequence: Synthetic oligonucleotide
ggggcucuacguucacaga

SEQ ID NO: 2675713 - RNA, 19 nt, Artificial Sequence
  Description of Artificial Sequence: Synthetic oligonucleotide
ccgucugaauagucguuga

SEQ ID NO: 2675714 - RNA, 19 nt, Artificial Sequence
  Description of Artificial Sequence: Synthetic oligonucleotide
ugccugccucgugccgggg

SEQ ID NO: 2675715 - RNA, 19 nt, Artificial Sequence
  Description of Artificial Sequence: Synthetic oligonucleotide
gcgcaaucacaacgccaug

SEQ ID NO: 2675716 - RNA, 19 nt, Artificial Sequence
  Description of Artificial Sequence: Synthetic oligonucleotide
aggcuaccugcagguccuc

SEQ ID NO: 2675717 - RNA, 19 nt, Artificial Sequence
  Description of Artificial Sequence: Synthetic oligonucleotide
gccagugucacgggucgca

SEQ ID NO: 2675718 - RNA, 19 nt, Artificial Sequence
  Description of Artificial Sequence: Synthetic oligonucleotide
ggcuaccugcagguccucc

SEQ ID NO: 2675719 - RNA, 19 nt, Artificial Sequence
  Description of Artificial Sequence: Synthetic oligonucleotide
gcgccagcagcacgauagc

SEQ ID NO: 2675720 - RNA, 19 nt, Artificial Sequence
  Description of Artificial Sequence: Synthetic oligonucleotide
gccugguguuccagguucc

SEQ ID NO: 2675721 - RNA, 19 nt, Artificial Sequence
  Description of Artificial Sequence: Synthetic oligonucleotide
ggggcgugagcuaguguga

SEQ ID NO: 2675722 - RNA, 19 nt, Artificial Sequence
  Description of Artificial Sequence: Synthetic oligonucleotide
gcgcagugagcgccagcag

SEQ ID NO: 2675723 - RNA, 19 nt, Artificial Sequence
  Description of Artificial Sequence: Synthetic oligonucleotide
cagugucacgggucgcaua

SEQ ID NO: 2675724 - RNA, 19 nt, Artificial Sequence
  Description of Artificial Sequence: Synthetic oligonucleotide
ccggcgucggcagaucaug

SEQ ID NO: 2675725 - RNA, 19 nt, Artificial Sequence
  Description of Artificial Sequence: Synthetic oligonucleotide
ggaguuccucgagcugcgc

SEQ ID NO: 2675726 - RNA, 19 nt, Artificial Sequence
  Description of Artificial Sequence: Synthetic oligonucleotide
gccugccucgugccggggc

SEQ ID NO: 2675727 - RNA, 19 nt, Artificial Sequence
  Description of Artificial Sequence: Synthetic oligonucleotide
cgcauacccacccaggccu

SEQ ID NO: 2675728 - RNA, 19 nt, Artificial Sequence
  Description of Artificial Sequence: Synthetic oligonucleotide
cccagccagugaagggcgc

SEQ ID NO: 2675729 - RNA, 19 nt, Artificial Sequence
  Description of Artificial Sequence: Synthetic oligonucleotide
ccaagagcccagccaguga

SEQ ID NO: 2675730 - RNA, 19 nt, Artificial Sequence
  Description of Artificial Sequence: Synthetic oligonucleotide
cggcgucggcagaucaugg

SEQ ID NO: 2675731 - RNA, 19 nt, Artificial Sequence
  Description of Artificial Sequence: Synthetic oligonucleotide
gcauacccacccaggccug

SEQ ID NO: 2675732 - RNA, 19 nt, Artificial Sequence
  Description of Artificial Sequence: Synthetic oligonucleotide
gagcgccagcagcacgaua

SEQ ID NO: 2675733 - RNA, 19 nt, Artificial Sequence
  Description of Artificial Sequence: Synthetic oligonucleotide
gaucgcugucugcguugcu

SEQ ID NO: 2675734 - RNA, 19 nt, Artificial Sequence
  Description of Artificial Sequence: Synthetic oligonucleotide
cagggcgcggaaggccaug

SEQ ID NO: 2675735 - RNA, 19 nt, Artificial Sequence
  Description of Artificial Sequence: Synthetic oligonucleotide
cagcacaugugaucuucuu

SEQ ID NO: 2675736 - RNA, 19 nt, Artificial Sequence
  Description of Artificial Sequence: Synthetic oligonucleotide
ggcuaccaccagauacuuc

SEQ ID NO: 2675737 - RNA, 19 nt, Artificial Sequence
  Description of Artificial Sequence: Synthetic oligonucleotide
ccucgagcugcgcaaaggu

SEQ ID NO: 2675738 - RNA, 19 nt, Artificial Sequence
  Description of Artificial Sequence: Synthetic oligonucleotide
cgagcugcgcaaaggugca

SEQ ID NO: 2675739 - RNA, 19 nt, Artificial Sequence
  Description of Artificial Sequence: Synthetic oligonucleotide
caaggcccgucugaauagu

SEQ ID NO: 2675740 - RNA, 19 nt, Artificial Sequence
  Description of Artificial Sequence: Synthetic oligonucleotide
ccaucgcgagccuggggca

SEQ ID NO: 2675741 - RNA, 19 nt, Artificial Sequence
  Description of Artificial Sequence: Synthetic oligonucleotide
gagcugcgcaaaggugcaa

SEQ ID NO: 2675742 - RNA, 19 nt, Artificial Sequence
  Description of Artificial Sequence: Synthetic oligonucleotide
gcacgauagcugcugcgau

SEQ ID NO: 2675743 - RNA, 19 nt, Artificial Sequence
  Description of Artificial Sequence: Synthetic oligonucleotide
ccucgugccggggcgugag

SEQ ID NO: 2675744 - RNA, 19 nt, Artificial Sequence
  Description of Artificial Sequence: Synthetic oligonucleotide
cugcgaucgcugucugcgu

SEQ ID NO: 2675745 - RNA, 19 nt, Artificial Sequence
  Description of Artificial Sequence: Synthetic oligonucleotide
gugcaaggcccgucugaau

SEQ ID NO: 2675746 - RNA, 19 nt, Artificial Sequence
  Description of Artificial Sequence: Synthetic oligonucleotide
cagauacuucuaguagauu

SEQ ID NO: 2675747 - RNA, 19 nt, Artificial Sequence
  Description of Artificial Sequence: Synthetic oligonucleotide
ccaugcugccugccucgug

SEQ ID NO: 2675748 - RNA, 19 nt, Artificial Sequence
  Description of Artificial Sequence: Synthetic oligonucleotide
gcagcgcagugagcgccag

SEQ ID NO: 2675749 - RNA, 19 nt, Artificial Sequence
  Description of Artificial Sequence: Synthetic oligonucleotide
gccggggcgugagcuagug

SEQ ID NO: 2675750 - RNA, 19 nt, Artificial Sequence
  Description of Artificial Sequence: Synthetic oligonucleotide
ggcaggcuaccugcagguc

SEQ ID NO: 2675751 - RNA, 19 nt, Artificial Sequence
  Description of Artificial Sequence: Synthetic oligonucleotide
cagcagcacgauagcugcu

SEQ ID NO: 2675752 - RNA, 19 nt, Artificial Sequence
  Description of Artificial Sequence: Synthetic oligonucleotide
ccgcugccagugucacggg

SEQ ID NO: 2675753 - RNA, 19 nt, Artificial Sequence
  Description of Artificial Sequence: Synthetic oligonucleotide
cgauagcugcugcgaucgc

SEQ ID NO: 2675754 - RNA, 19 nt, Artificial Sequence
  Description of Artificial Sequence: Synthetic oligonucleotide
gggcuugggcuugagguuu

SEQ ID NO: 2675755 - RNA, 19 nt, Artificial Sequence
  Description of Artificial Sequence: Synthetic oligonucleotide
gcaaaggugcaaggcccgu

SEQ ID NO: 2675756 - RNA, 19 nt, Artificial Sequence
  Description of Artificial Sequence: Synthetic oligonucleotide
gguuugccaucgcgagccu

SEQ ID NO: 2675757 - RNA, 19 nt, Artificial Sequence
  Description of Artificial Sequence: Synthetic oligonucleotide
cggcagaucauggcagcca

SEQ ID NO: 2675758 - RNA, 19 nt, Artificial Sequence
  Description of Artificial Sequence: Synthetic oligonucleotide
gggcuguggguauccugau

SEQ ID NO: 2675759 - RNA, 19 nt, Artificial Sequence
  Description of Artificial Sequence: Synthetic oligonucleotide
gggcgugagcuagugugau

SEQ ID NO: 2675760 - RNA, 19 nt, Artificial Sequence
  Description of Artificial Sequence: Synthetic oligonucleotide
cguucacagagggaggaau

SEQ ID NO: 2675761 - RNA, 19 nt, Artificial Sequence
  Description of Artificial Sequence: Synthetic oligonucleotide
gcgagccuggggcaccuuu

SEQ ID NO: 2675762 - RNA, 19 nt, Artificial Sequence
  Description of Artificial Sequence: Synthetic oligonucleotide
gggcgcggaaggccaugcu

SEQ ID NO: 2675763 - RNA, 19 nt, Artificial Sequence
  Description of Artificial Sequence: Synthetic oligonucleotide
cugccucgugccggggcgu

SEQ ID NO: 2675764 - RNA, 19 nt, Artificial Sequence
  Description of Artificial Sequence: Synthetic oligonucleotide
cgggucgcauacccaccca

SEQ ID NO: 2675765 - RNA, 19 nt, Artificial Sequence
  Description of Artificial Sequence: Synthetic oligonucleotide
gccucgugccggggcguga

SEQ ID NO: 2675766 - RNA, 19 nt, Artificial Sequence
  Description of Artificial Sequence: Synthetic oligonucleotide
cgccggcgucggcagauca

SEQ ID NO: 2675767 - RNA, 19 nt, Artificial Sequence
  Description of Artificial Sequence: Synthetic oligonucleotide
cgugccggggcgugagcua

SEQ ID NO: 2675768 - RNA, 19 nt, Artificial Sequence
  Description of Artificial Sequence: Synthetic oligonucleotide
ccagugucacgggucgcau

SEQ ID NO: 2675769 - RNA, 19 nt, Artificial Sequence
  Description of Artificial Sequence: Synthetic oligonucleotide
gccggcgucggcagaucau

SEQ ID NO: 2675770 - RNA, 19 nt, Artificial Sequence
  Description of Artificial Sequence: Synthetic oligonucleotide
gccgccggcgucggcagau

SEQ ID NO: 2675771 - RNA, 19 nt, Artificial Sequence
  Description of Artificial Sequence: Synthetic oligonucleotide
cgugagcuagugugauguu

SEQ ID NO: 2675772 - RNA, 19 nt, Artificial Sequence
  Description of Artificial Sequence: Synthetic oligonucleotide
cgcugccagugucacgggu

SEQ ID NO: 2675773 - RNA, 19 nt, Artificial Sequence
  Description of Artificial Sequence: Synthetic oligonucleotide
ccgccggcgucggcagauc

SEQ ID NO: 2675774 - RNA, 19 nt, Artificial Sequence
  Description of Artificial Sequence: Synthetic oligonucleotide
ccggggcgugagcuagugu

SEQ ID NO: 2675775 - RNA, 19 nt, Artificial Sequence
  Description of Artificial Sequence: Synthetic oligonucleotide
ccggggcgcaggcaccuuu

SEQ ID NO: 2675776 - RNA, 19 nt, Artificial Sequence
  Description of Artificial Sequence: Synthetic oligonucleotide
cggggcgcaggcaccuuuu

SEQ ID NO: 2675777 - RNA, 19 nt, Artificial Sequence
  Description of Artificial Sequence: Synthetic oligonucleotide
ccccggggcgcaggcaccu

SEQ ID NO: 2675778 - RNA, 19 nt, Artificial Sequence
  Description of Artificial Sequence: Synthetic oligonucleotide
cgccgccggcgucggcaga

SEQ ID NO: 2675779 - RNA, 19 nt, Artificial Sequence
  Description of Artificial Sequence: Synthetic oligonucleotide
cccggggcgcaggcaccuu

SEQ ID NO: 2675780 - RNA, 19 nt, Artificial Sequence
  Description of Artificial Sequence: Synthetic oligonucleotide
cgcgagccuggggcaccuu

SEQ ID NO: 2675781 - RNA, 19 nt, Artificial Sequence
  Description of Artificial Sequence: Synthetic oligonucleotide
aagggaaagcuuuagacac

SEQ ID NO: 2675782 - RNA, 19 nt, Artificial Sequence
  Description of Artificial Sequence: Synthetic oligonucleotide
uucaagggaagacugaugg

SEQ ID NO: 2675783 - RNA, 19 nt, Artificial Sequence
  Description of Artificial Sequence: Synthetic oligonucleotide
uccagauuaaaccacagug

SEQ ID NO: 2675784 - RNA, 19 nt, Artificial Sequence
  Description of Artificial Sequence: Synthetic oligonucleotide
auuauagucauucaucuca

SEQ ID NO: 2675785 - RNA, 19 nt, Artificial Sequence
  Description of Artificial Sequence: Synthetic oligonucleotide
aagcuuuagacacuacagc

SEQ ID NO: 2675786 - RNA, 19 nt, Artificial Sequence
  Description of Artificial Sequence: Synthetic oligonucleotide
uuggccaauacacuuaacc

SEQ ID NO: 2675787 - RNA, 19 nt, Artificial Sequence
  Description of Artificial Sequence: Synthetic oligonucleotide
aauacacuuaaccucucug

SEQ ID NO: 2675788 - RNA, 19 nt, Artificial Sequence
  Description of Artificial Sequence: Synthetic oligonucleotide
ucauuauagucauucaucu

SEQ ID NO: 2675789 - RNA, 19 nt, Artificial Sequence
  Description of Artificial Sequence: Synthetic oligonucleotide
uugucuaccuagaucaucc

SEQ ID NO: 2675790 - RNA, 19 nt, Artificial Sequence
  Description of Artificial Sequence: Synthetic oligonucleotide
uacacuuaaccucucuggg

SEQ ID NO: 2675791 - RNA, 19 nt, Artificial Sequence
  Description of Artificial Sequence: Synthetic oligonucleotide
cuaagggaaagcuuuagac

SEQ ID NO: 2675792 - RNA, 19 nt, Artificial Sequence
  Description of Artificial Sequence: Synthetic oligonucleotide
agcuguuugacuuuggcca

SEQ ID NO: 2675793 - RNA, 19 nt, Artificial Sequence
  Description of Artificial Sequence: Synthetic oligonucleotide
auagguaccagguuguugu

SEQ ID NO: 2675794 - RNA, 19 nt, Artificial Sequence
  Description of Artificial Sequence: Synthetic oligonucleotide
uuugacuuuggccaauaca

SEQ ID NO: 2675795 - RNA, 19 nt, Artificial Sequence
  Description of Artificial Sequence: Synthetic oligonucleotide
uaagggaaagcuuuagaca

SEQ ID NO: 2675796 - RNA, 19 nt, Artificial Sequence
  Description of Artificial Sequence: Synthetic oligonucleotide
ucuaccuagaucauccacu

SEQ ID NO: 2675797 - RNA, 19 nt, Artificial Sequence
  Description of Artificial Sequence: Synthetic oligonucleotide
aacaagguggacauggcuc

SEQ ID NO: 2675798 - RNA, 19 nt, Artificial Sequence
  Description of Artificial Sequence: Synthetic oligonucleotide
ucugcgaugcuuuggagcc

SEQ ID NO: 2675799 - RNA, 19 nt, Artificial Sequence
  Description of Artificial Sequence: Synthetic oligonucleotide
guuguugucuuucucugcg

SEQ ID NO: 2675800 - RNA, 19 nt, Artificial Sequence
  Description of Artificial Sequence: Synthetic oligonucleotide
cuugccaauagguaccagg

SEQ ID NO: 2675801 - RNA, 19 nt, Artificial Sequence
  Description of Artificial Sequence: Synthetic oligonucleotide
gauuaaaccacagugucuc

SEQ ID NO: 2675802 - RNA, 19 nt, Artificial Sequence
  Description of Artificial Sequence: Synthetic oligonucleotide
cugagaaagugccuaaggg

SEQ ID NO: 2675803 - RNA, 19 nt, Artificial Sequence
  Description of Artificial Sequence: Synthetic oligonucleotide
caucguagugcucugaggc

SEQ ID NO: 2675804 - RNA, 19 nt, Artificial Sequence
  Description of Artificial Sequence: Synthetic oligonucleotide
aacgaguccuuauccuggc

SEQ ID NO: 2675805 - RNA, 19 nt, Artificial Sequence
  Description of Artificial Sequence: Synthetic oligonucleotide
acacuuaaccucucugggc

SEQ ID NO: 2675806 - RNA, 19 nt, Artificial Sequence
  Description of Artificial Sequence: Synthetic oligonucleotide
uucguugccuuccaugucc

SEQ ID NO: 2675807 - RNA, 19 nt, Artificial Sequence
  Description of Artificial Sequence: Synthetic oligonucleotide
guggaugcaagauaggcug

SEQ ID NO: 2675808 - RNA, 19 nt, Artificial Sequence
  Description of Artificial Sequence: Synthetic oligonucleotide
ugucucagucacacgaggg

SEQ ID NO: 2675809 - RNA, 19 nt, Artificial Sequence
  Description of Artificial Sequence: Synthetic oligonucleotide
uugucuuucucugcgaugc

SEQ ID NO: 2675810 - RNA, 19 nt, Artificial Sequence
  Description of Artificial Sequence: Synthetic oligonucleotide
accuagaucauccacuggu

SEQ ID NO: 2675811 - RNA, 19 nt, Artificial Sequence
  Description of Artificial Sequence: Synthetic oligonucleotide
auguccaccucauugaccu

SEQ ID NO: 2675812 - RNA, 19 nt, Artificial Sequence
  Description of Artificial Sequence: Synthetic oligonucleotide
cacuacagccacaagcugg

SEQ ID NO: 2675813 - RNA, 19 nt, Artificial Sequence
  Description of Artificial Sequence: Synthetic oligonucleotide
ugcaagauaggcuggggug

SEQ ID NO: 2675814 - RNA, 19 nt, Artificial Sequence
  Description of Artificial Sequence: Synthetic oligonucleotide
acagggucgauccagauua

SEQ ID NO: 2675815 - RNA, 19 nt, Artificial Sequence
  Description of Artificial Sequence: Synthetic oligonucleotide
cacuuaaccucucugggcc

SEQ ID NO: 2675816 - RNA, 19 nt, Artificial Sequence
  Description of Artificial Sequence: Synthetic oligonucleotide
uccaucacuuacuagcugu

SEQ ID NO: 2675817 - RNA, 19 nt, Artificial Sequence
  Description of Artificial Sequence: Synthetic oligonucleotide
aaacaagguggacauggcu

SEQ ID NO: 2675818 - RNA, 19 nt, Artificial Sequence
  Description of Artificial Sequence: Synthetic oligonucleotide
aucacuuacuagcuguuug

SEQ ID NO: 2675819 - RNA, 19 nt, Artificial Sequence
  Description of Artificial Sequence: Synthetic oligonucleotide
cuuuagacacuacagccac

SEQ ID NO: 2675820 - RNA, 19 nt, Artificial Sequence
  Description of Artificial Sequence: Synthetic oligonucleotide
caagggaagacugauggcc

SEQ ID NO: 2675821 - RNA, 19 nt, Artificial Sequence
  Description of Artificial Sequence: Synthetic oligonucleotide
ggaaacaagguggacaugg

SEQ ID NO: 2675822 - RNA, 19 nt, Artificial Sequence
  Description of Artificial Sequence: Synthetic oligonucleotide
uguucguugccuuccaugu

SEQ ID NO: 2675823 - RNA, 19 nt, Artificial Sequence
  Description of Artificial Sequence: Synthetic oligonucleotide
uggccaauacacuuaaccu

SEQ ID NO: 2675824 - RNA, 19 nt, Artificial Sequence
  Description of Artificial Sequence: Synthetic oligonucleotide
ugacucauuauagucauuc

SEQ ID NO: 2675825 - RNA, 19 nt, Artificial Sequence
  Description of Artificial Sequence: Synthetic oligonucleotide
uugccaauagguaccaggu

SEQ ID NO: 2675826 - RNA, 19 nt, Artificial Sequence
  Description of Artificial Sequence: Synthetic oligonucleotide
cagauuaaaccacaguguc

SEQ ID NO: 2675827 - RNA, 19 nt, Artificial Sequence
  Description of Artificial Sequence: Synthetic oligonucleotide
ggucgauccagauuaaacc

SEQ ID NO: 2675828 - RNA, 19 nt, Artificial Sequence
  Description of Artificial Sequence: Synthetic oligonucleotide
gaaggaaacaagguggaca

SEQ ID NO: 2675829 - RNA, 19 nt, Artificial Sequence
  Description of Artificial Sequence: Synthetic oligonucleotide
ggcuccaucacuuacuagc

SEQ ID NO: 2675830 - RNA, 19 nt, Artificial Sequence
  Description of Artificial Sequence: Synthetic oligonucleotide
acaagcugguucugcagac

SEQ ID NO: 2675831 - RNA, 19 nt, Artificial Sequence
  Description of Artificial Sequence: Synthetic oligonucleotide
cuaagcugaguuugagucc

SEQ ID NO: 2675832 - RNA, 19 nt, Artificial Sequence
  Description of Artificial Sequence: Synthetic oligonucleotide
uggacauggcuccuaagcu

SEQ ID NO: 2675833 - RNA, 19 nt, Artificial Sequence
  Description of Artificial Sequence: Synthetic oligonucleotide
guggacauggcuccuaagc

SEQ ID NO: 2675834 - RNA, 19 nt, Artificial Sequence
  Description of Artificial Sequence: Synthetic oligonucleotide
cuggcuugccaauagguac

SEQ ID NO: 2675835 - RNA, 19 nt, Artificial Sequence
  Description of Artificial Sequence: Synthetic oligonucleotide
cuagaucauccacuggucc

SEQ ID NO: 2675836 - RNA, 19 nt, Artificial Sequence
  Description of Artificial Sequence: Synthetic oligonucleotide
aauagguaccagguuguug

SEQ ID NO: 2675837 - RNA, 19 nt, Artificial Sequence
  Description of Artificial Sequence: Synthetic oligonucleotide
augcuuuggagccaggccu

SEQ ID NO: 2675838 - RNA, 19 nt, Artificial Sequence
  Description of Artificial Sequence: Synthetic oligonucleotide
ggcuugucuaccuagauca

SEQ ID NO: 2675839 - RNA, 19 nt, Artificial Sequence
  Description of Artificial Sequence: Synthetic oligonucleotide
uucucugcgaugcuuugga

SEQ ID NO: 2675840 - RNA, 19 nt, Artificial Sequence
  Description of Artificial Sequence: Synthetic oligonucleotide
cacgagggaacagugaagg

SEQ ID NO: 2675841 - RNA, 19 nt, Artificial Sequence
  Description of Artificial Sequence: Synthetic oligonucleotide
cugguccugauccuguucg

SEQ ID NO: 2675842 - RNA, 19 nt, Artificial Sequence
  Description of Artificial Sequence: Synthetic oligonucleotide
uagcuguuugacuuuggcc

SEQ ID NO: 2675843 - RNA, 19 nt, Artificial Sequence
  Description of Artificial Sequence: Synthetic oligonucleotide
cucuccaucaucaggugac

SEQ ID NO: 2675844 - RNA, 19 nt, Artificial Sequence
  Description of Artificial Sequence: Synthetic oligonucleotide
ucaucguagugcucugagg

SEQ ID NO: 2675845 - RNA, 19 nt, Artificial Sequence
  Description of Artificial Sequence: Synthetic oligonucleotide
ucugaauccucuucacugu

SEQ ID NO: 2675846 - RNA, 19 nt, Artificial Sequence
  Description of Artificial Sequence: Synthetic oligonucleotide
caaacgaguccuuauccug

SEQ ID NO: 2675847 - RNA, 19 nt, Artificial Sequence
  Description of Artificial Sequence: Synthetic oligonucleotide
uaagcugaguuugaguccu

SEQ ID NO: 2675848 - RNA, 19 nt, Artificial Sequence
  Description of Artificial Sequence: Synthetic oligonucleotide
aucaucguagugcucugag

SEQ ID NO: 2675849 - RNA, 19 nt, Artificial Sequence
  Description of Artificial Sequence: Synthetic oligonucleotide
uccuuauccuggcagcagc

SEQ ID NO: 2675850 - RNA, 19 nt, Artificial Sequence
  Description of Artificial Sequence: Synthetic oligonucleotide
ucgauccagauuaaaccac

SEQ ID NO: 2675851 - RNA, 19 nt, Artificial Sequence
  Description of Artificial Sequence: Synthetic oligonucleotide
uuagacacuacagccacaa

SEQ ID NO: 2675852 - RNA, 19 nt, Artificial Sequence
  Description of Artificial Sequence: Synthetic oligonucleotide
uggaugcaagauaggcugg

SEQ ID NO: 2675853 - RNA, 19 nt, Artificial Sequence
  Description of Artificial Sequence: Synthetic oligonucleotide
uggcuugccaauagguacc

SEQ ID NO: 2675854 - RNA, 19 nt, Artificial Sequence
  Description of Artificial Sequence: Synthetic oligonucleotide
uagaucauccacugguccu

SEQ ID NO: 2675855 - RNA, 19 nt, Artificial Sequence
  Description of Artificial Sequence: Synthetic oligonucleotide
ucaggugacucauuauagu

SEQ ID NO: 2675856 - RNA, 19 nt, Artificial Sequence
  Description of Artificial Sequence: Synthetic oligonucleotide
cuaccuagaucauccacug

SEQ ID NO: 2675857 - RNA, 19 nt, Artificial Sequence
  Description of Artificial Sequence: Synthetic oligonucleotide
gucgauccagauuaaacca

SEQ ID NO: 2675858 - RNA, 19 nt, Artificial Sequence
  Description of Artificial Sequence: Synthetic oligonucleotide
gaguuugaguccuggcucc

SEQ ID NO: 2675859 - RNA, 19 nt, Artificial Sequence
  Description of Artificial Sequence: Synthetic oligonucleotide
caggugacucauuauaguc

SEQ ID NO: 2675860 - RNA, 19 nt, Artificial Sequence
  Description of Artificial Sequence: Synthetic oligonucleotide
uuuggagccaggccugaug

SEQ ID NO: 2675861 - RNA, 19 nt, Artificial Sequence
  Description of Artificial Sequence: Synthetic oligonucleotide
cucugcgaugcuuuggagc

SEQ ID NO: 2675862 - RNA, 19 nt, Artificial Sequence
  Description of Artificial Sequence: Synthetic oligonucleotide
gagaaagugccuaagggaa

SEQ ID NO: 2675863 - RNA, 19 nt, Artificial Sequence
  Description of Artificial Sequence: Synthetic oligonucleotide
ccuaagcugaguuugaguc

SEQ ID NO: 2675864 - RNA, 19 nt, Artificial Sequence
  Description of Artificial Sequence: Synthetic oligonucleotide
gccaauagguaccagguug

SEQ ID NO: 2675865 - RNA, 19 nt, Artificial Sequence
  Description of Artificial Sequence: Synthetic oligonucleotide
ucuccuccacacagggucg

SEQ ID NO: 2675866 - RNA, 19 nt, Artificial Sequence
  Description of Artificial Sequence: Synthetic oligonucleotide
agguuguugucuuucucug

SEQ ID NO: 2675867 - RNA, 19 nt, Artificial Sequence
  Description of Artificial Sequence: Synthetic oligonucleotide
acuuacuagcuguuugacu

SEQ ID NO: 2675868 - RNA, 19 nt, Artificial Sequence
  Description of Artificial Sequence: Synthetic oligonucleotide
ugacuuuggccaauacacu

SEQ ID NO: 2675869 - RNA, 19 nt, Artificial Sequence
  Description of Artificial Sequence: Synthetic oligonucleotide
aucaggugacucauuauag

SEQ ID NO: 2675870 - RNA, 19 nt, Artificial Sequence
  Description of Artificial Sequence: Synthetic oligonucleotide
cagcagcugagaaagugcc

SEQ ID NO: 2675871 - RNA, 19 nt, Artificial Sequence
  Description of Artificial Sequence: Synthetic oligonucleotide
cuuacuagcuguuugacuu

SEQ ID NO: 2675872 - RNA, 19 nt, Artificial Sequence
  Description of Artificial Sequence: Synthetic oligonucleotide
uccugauccuguucguugc

SEQ ID NO: 2675873 - RNA, 19 nt, Artificial Sequence
  Description of Artificial Sequence: Synthetic oligonucleotide
uggagggccaaacgagucc

SEQ ID NO: 2675874 - RNA, 19 nt, Artificial Sequence
  Description of Artificial Sequence: Synthetic oligonucleotide
uguugucuuucucugcgau

SEQ ID NO: 2675875 - RNA, 19 nt, Artificial Sequence
  Description of Artificial Sequence: Synthetic oligonucleotide
gaguccuuauccuggcagc

SEQ ID NO: 2675876 - RNA, 19 nt, Artificial Sequence
  Description of Artificial Sequence: Synthetic oligonucleotide
auugaccucuccaucauca

SEQ ID NO: 2675877 - RNA, 19 nt, Artificial Sequence
  Description of Artificial Sequence: Synthetic oligonucleotide
cauuauagucauucaucuc

SEQ ID NO: 2675878 - RNA, 19 nt, Artificial Sequence
  Description of Artificial Sequence: Synthetic oligonucleotide
gcugagaaagugccuaagg

SEQ ID NO: 2675879 - RNA, 19 nt, Artificial Sequence
  Description of Artificial Sequence: Synthetic oligonucleotide
uaccuagaucauccacugg

SEQ ID NO: 2675880 - RNA, 19 nt, Artificial Sequence
  Description of Artificial Sequence: Synthetic oligonucleotide
gaugcaagauaggcugggg

SEQ ID NO: 2675881 - RNA, 19 nt, Artificial Sequence
  Description of Artificial Sequence: Synthetic oligonucleotide
gauccagauuaaaccacag

SEQ ID NO: 2675882 - RNA, 19 nt, Artificial Sequence
  Description of Artificial Sequence: Synthetic oligonucleotide
uggaaucacccugaggcca

SEQ ID NO: 2675883 - RNA, 19 nt, Artificial Sequence
  Description of Artificial Sequence: Synthetic oligonucleotide
gugucucagucacacgagg

SEQ ID NO: 2675884 - RNA, 19 nt, Artificial Sequence
  Description of Artificial Sequence: Synthetic oligonucleotide
uuuagacacuacagccaca

SEQ ID NO: 2675885 - RNA, 19 nt, Artificial Sequence
  Description of Artificial Sequence: Synthetic oligonucleotide
cacagugucucagucacac

SEQ ID NO: 2675886 - RNA, 19 nt, Artificial Sequence
  Description of Artificial Sequence: Synthetic oligonucleotide
cauguccaccucauugacc

SEQ ID NO: 2675887 - RNA, 19 nt, Artificial Sequence
  Description of Artificial Sequence: Synthetic oligonucleotide
augcaagauaggcuggggu

SEQ ID NO: 2675888 - RNA, 19 nt, Artificial Sequence
  Description of Artificial Sequence: Synthetic oligonucleotide
uccuaagcugaguuugagu

SEQ ID NO: 2675889 - RNA, 19 nt, Artificial Sequence
  Description of Artificial Sequence: Synthetic oligonucleotide
auccagauuaaaccacagu

SEQ ID NO: 2675890 - RNA, 19 nt, Artificial Sequence
  Description of Artificial Sequence: Synthetic oligonucleotide
aagauaggcugggguggcc

SEQ ID NO: 2675891 - RNA, 19 nt, Artificial Sequence
  Description of Artificial Sequence: Synthetic oligonucleotide
cuggaaucacccugaggcc

SEQ ID NO: 2675892 - RNA, 19 nt, Artificial Sequence
  Description of Artificial Sequence: Synthetic oligonucleotide
gacacuacagccacaagcu

SEQ ID NO: 2675893 - RNA, 19 nt, Artificial Sequence
  Description of Artificial Sequence: Synthetic oligonucleotide
gacucauuauagucauuca

SEQ ID NO: 2675894 - RNA, 19 nt, Artificial Sequence
  Description of Artificial Sequence: Synthetic oligonucleotide
accucauugaccucuccau

SEQ ID NO: 2675895 - RNA, 19 nt, Artificial Sequence
  Description of Artificial Sequence: Synthetic oligonucleotide
uuugaguccuggcuccauc

SEQ ID NO: 2675896 - RNA, 19 nt, Artificial Sequence
  Description of Artificial Sequence: Synthetic oligonucleotide
cagugucucagucacacga

SEQ ID NO: 2675897 - RNA, 19 nt, Artificial Sequence
  Description of Artificial Sequence: Synthetic oligonucleotide
gaggcuggcuugccaauag

SEQ ID NO: 2675898 - RNA, 19 nt, Artificial Sequence
  Description of Artificial Sequence: Synthetic oligonucleotide
cuguucguugccuuccaug

SEQ ID NO: 2675899 - RNA, 19 nt, Artificial Sequence
  Description of Artificial Sequence: Synthetic oligonucleotide
ucguagugcucugaggcug

SEQ ID NO: 2675900 - RNA, 19 nt, Artificial Sequence
  Description of Artificial Sequence: Synthetic oligonucleotide
uggcuugucuaccuagauc

SEQ ID NO: 2675901 - RNA, 19 nt, Artificial Sequence
  Description of Artificial Sequence: Synthetic oligonucleotide
aagggaagacugauggccu

SEQ ID NO: 2675902 - RNA, 19 nt, Artificial Sequence
  Description of Artificial Sequence: Synthetic oligonucleotide
gaaacaagguggacauggc

SEQ ID NO: 2675903 - RNA, 19 nt, Artificial Sequence
  Description of Artificial Sequence: Synthetic oligonucleotide
guggccuggaaucacccug

SEQ ID NO: 2675904 - RNA, 19 nt, Artificial Sequence
  Description of Artificial Sequence: Synthetic oligonucleotide
uggccuggagggccaaacg

SEQ ID NO: 2675905 - RNA, 19 nt, Artificial Sequence
  Description of Artificial Sequence: Synthetic oligonucleotide
agugcucugaggcuggcuu

SEQ ID NO: 2675906 - RNA, 19 nt, Artificial Sequence
  Description of Artificial Sequence: Synthetic oligonucleotide
agauuaaaccacagugucu

SEQ ID NO: 2675907 - RNA, 19 nt, Artificial Sequence
  Description of Artificial Sequence: Synthetic oligonucleotide
guccugauccuguucguug

SEQ ID NO: 2675908 - RNA, 19 nt, Artificial Sequence
  Description of Artificial Sequence: Synthetic oligonucleotide
ggccaauacacuuaaccuc

SEQ ID NO: 2675909 - RNA, 19 nt, Artificial Sequence
  Description of Artificial Sequence: Synthetic oligonucleotide
ggcuguggaugcaagauag

SEQ ID NO: 2675910 - RNA, 19 nt, Artificial Sequence
  Description of Artificial Sequence: Synthetic oligonucleotide
gaagacugauggccuggag

SEQ ID NO: 2675911 - RNA, 19 nt, Artificial Sequence
  Description of Artificial Sequence: Synthetic oligonucleotide
ugaggcuguggaugcaaga

SEQ ID NO: 2675912 - RNA, 19 nt, Artificial Sequence
  Description of Artificial Sequence: Synthetic oligonucleotide
guugccuuccauguccacc

SEQ ID NO: 2675913 - RNA, 19 nt, Artificial Sequence
  Description of Artificial Sequence: Synthetic oligonucleotide
gagggaacagugaaggaaa

SEQ ID NO: 2675914 - RNA, 19 nt, Artificial Sequence
  Description of Artificial Sequence: Synthetic oligonucleotide
cucagucacacgagggaac

SEQ ID NO: 2675915 - RNA, 19 nt, Artificial Sequence
  Description of Artificial Sequence: Synthetic oligonucleotide
ucucagucacacgagggaa

SEQ ID NO: 2675916 - RNA, 19 nt, Artificial Sequence
  Description of Artificial Sequence: Synthetic oligonucleotide
agaucauccacugguccug

SEQ ID NO: 2675917 - RNA, 19 nt, Artificial Sequence
  Description of Artificial Sequence: Synthetic oligonucleotide
aggugacucauuauaguca

SEQ ID NO: 2675918 - RNA, 19 nt, Artificial Sequence
  Description of Artificial Sequence: Synthetic oligonucleotide
acagugucucagucacacg

SEQ ID NO: 2675919 - RNA, 19 nt, Artificial Sequence
  Description of Artificial Sequence: Synthetic oligonucleotide
ucaucaucguagugcucug

SEQ ID NO: 2675920 - RNA, 19 nt, Artificial Sequence
  Description of Artificial Sequence: Synthetic oligonucleotide
uacuagcuguuugacuuug

SEQ ID NO: 2675921 - RNA, 19 nt, Artificial Sequence
  Description of Artificial Sequence: Synthetic oligonucleotide
gucuaccuagaucauccac

SEQ ID NO: 2675922 - RNA, 19 nt, Artificial Sequence
  Description of Artificial Sequence: Synthetic oligonucleotide
aucguagugcucugaggcu

SEQ ID NO: 2675923 - RNA, 19 nt, Artificial Sequence
  Description of Artificial Sequence: Synthetic oligonucleotide
ugcgaugcuuuggagccag

SEQ ID NO: 2675924 - RNA, 19 nt, Artificial Sequence
  Description of Artificial Sequence: Synthetic oligonucleotide
uggccuggaaucacccuga

SEQ ID NO: 2675925 - RNA, 19 nt, Artificial Sequence
  Description of Artificial Sequence: Synthetic oligonucleotide
gccaaacgaguccuuaucc

SEQ ID NO: 2675926 - RNA, 19 nt, Artificial Sequence
  Description of Artificial Sequence: Synthetic oligonucleotide
uuggcuugucuaccuagau

SEQ ID NO: 2675927 - RNA, 19 nt, Artificial Sequence
  Description of Artificial Sequence: Synthetic oligonucleotide
ggacauggcuccuaagcug

SEQ ID NO: 2675928 - RNA, 19 nt, Artificial Sequence
  Description of Artificial Sequence: Synthetic oligonucleotide
gcaagauaggcuggggugg

SEQ ID NO: 2675929 - RNA, 19 nt, Artificial Sequence
  Description of Artificial Sequence: Synthetic oligonucleotide
ucaucaggugacucauuau

SEQ ID NO: 2675930 - RNA, 19 nt, Artificial Sequence
  Description of Artificial Sequence: Synthetic oligonucleotide
acacuacagccacaagcug

SEQ ID NO: 2675931 - RNA, 19 nt, Artificial Sequence
  Description of Artificial Sequence: Synthetic oligonucleotide
uuguugucuuucucugcga

SEQ ID NO: 2675932 - RNA, 19 nt, Artificial Sequence
  Description of Artificial Sequence: Synthetic oligonucleotide
ucucugcgaugcuuuggag

SEQ ID NO: 2675933 - RNA, 19 nt, Artificial Sequence
  Description of Artificial Sequence: Synthetic oligonucleotide
ugucuaccuagaucaucca

SEQ ID NO: 2675934 - RNA, 19 nt, Artificial Sequence
  Description of Artificial Sequence: Synthetic oligonucleotide
agucacacgagggaacagu

SEQ ID NO: 2675935 - RNA, 19 nt, Artificial Sequence
  Description of Artificial Sequence: Synthetic oligonucleotide
uccuggcuccaucacuuac

SEQ ID NO: 2675936 - RNA, 19 nt, Artificial Sequence
  Description of Artificial Sequence: Synthetic oligonucleotide
agccacaagcugguucugc

SEQ ID NO: 2675937 - RNA, 19 nt, Artificial Sequence
  Description of Artificial Sequence: Synthetic oligonucleotide
ugaguccuggcuccaucac

SEQ ID NO: 2675938 - RNA, 19 nt, Artificial Sequence
  Description of Artificial Sequence: Synthetic oligonucleotide
gucucagucacacgaggga

SEQ ID NO: 2675939 - RNA, 19 nt, Artificial Sequence
  Description of Artificial Sequence: Synthetic oligonucleotide
acuacagccacaagcuggu

SEQ ID NO: 2675940 - RNA, 19 nt, Artificial Sequence
  Description of Artificial Sequence: Synthetic oligonucleotide
ugaaggaaacaagguggac

SEQ ID NO: 2675941 - RNA, 19 nt, Artificial Sequence
  Description of Artificial Sequence: Synthetic oligonucleotide
gauccuguucguugccuuc

SEQ ID NO: 2675942 - RNA, 19 nt, Artificial Sequence
  Description of Artificial Sequence: Synthetic oligonucleotide
agugucucagucacacgag

SEQ ID NO: 2675943 - RNA, 19 nt, Artificial Sequence
  Description of Artificial Sequence: Synthetic oligonucleotide
cuugucuaccuagaucauc

SEQ ID NO: 2675944 - RNA, 19 nt, Artificial Sequence
  Description of Artificial Sequence: Synthetic oligonucleotide
uuuggccaauacacuuaac

SEQ ID NO: 2675945 - RNA, 19 nt, Artificial Sequence
  Description of Artificial Sequence: Synthetic oligonucleotide
agggaagacugauggccug

SEQ ID NO: 2675946 - RNA, 19 nt, Artificial Sequence
  Description of Artificial Sequence: Synthetic oligonucleotide
cacacgagggaacagugaa

SEQ ID NO: 2675947 - RNA, 19 nt, Artificial Sequence
  Description of Artificial Sequence: Synthetic oligonucleotide
agggaacagugaaggaaac

SEQ ID NO: 2675948 - RNA, 19 nt, Artificial Sequence
  Description of Artificial Sequence: Synthetic oligonucleotide
acuuaaccucucugggccu

SEQ ID NO: 2675949 - RNA, 19 nt, Artificial Sequence
  Description of Artificial Sequence: Synthetic oligonucleotide
cugcauguccucaucaucu

SEQ ID NO: 2675950 - RNA, 19 nt, Artificial Sequence
  Description of Artificial Sequence: Synthetic oligonucleotide
aggcuggcuugccaauagg

SEQ ID NO: 2675951 - RNA, 19 nt, Artificial Sequence
  Description of Artificial Sequence: Synthetic oligonucleotide
uuacuagcuguuugacuuu

SEQ ID NO: 2675952 - RNA, 19 nt, Artificial Sequence
  Description of Artificial Sequence: Synthetic oligonucleotide
cugaauccucuucacuguc

SEQ ID NO: 2675953 - RNA, 19 nt, Artificial Sequence
  Description of Artificial Sequence: Synthetic oligonucleotide
accagguuguugucuuucu

SEQ ID NO: 2675954 - RNA, 19 nt, Artificial Sequence
  Description of Artificial Sequence: Synthetic oligonucleotide
gucacacgagggaacagug

SEQ ID NO: 2675955 - RNA, 19 nt, Artificial Sequence
  Description of Artificial Sequence: Synthetic oligonucleotide
gacuuuggccaauacacuu

SEQ ID NO: 2675956 - RNA, 19 nt, Artificial Sequence
  Description of Artificial Sequence: Synthetic oligonucleotide
ucguugccuuccaugucca

SEQ ID NO: 2675957 - RNA, 19 nt, Artificial Sequence
  Description of Artificial Sequence: Synthetic oligonucleotide
cauucaucucauccauguc

SEQ ID NO: 2675958 - RNA, 19 nt, Artificial Sequence
  Description of Artificial Sequence: Synthetic oligonucleotide
guuugacuuuggccaauac

SEQ ID NO: 2675959 - RNA, 19 nt, Artificial Sequence
  Description of Artificial Sequence: Synthetic oligonucleotide
gugaaggaaacaaggugga

SEQ ID NO: 2675960 - RNA, 19 nt, Artificial Sequence
  Description of Artificial Sequence: Synthetic oligonucleotide
gaccucuccaucaucaggu

SEQ ID NO: 2675961 - RNA, 19 nt, Artificial Sequence
  Description of Artificial Sequence: Synthetic oligonucleotide
gguuguugucuuucucugc

SEQ ID NO: 2675962 - RNA, 19 nt, Artificial Sequence
  Description of Artificial Sequence: Synthetic oligonucleotide
ggcuccuaagcugaguuug

SEQ ID NO: 2675963 - RNA, 19 nt, Artificial Sequence
  Description of Artificial Sequence: Synthetic oligonucleotide
agcugagaaagugccuaag

SEQ ID NO: 2675964 - RNA, 19 nt, Artificial Sequence
  Description of Artificial Sequence: Synthetic oligonucleotide
cuuggcuugucuaccuaga

SEQ ID NO: 2675965 - RNA, 19 nt, Artificial Sequence
  Description of Artificial Sequence: Synthetic oligonucleotide
cuggagggccaaacgaguc

SEQ ID NO: 2675966 - RNA, 19 nt, Artificial Sequence
  Description of Artificial Sequence: Synthetic oligonucleotide
uccugcauguccucaucau

SEQ ID NO: 2675967 - RNA, 19 nt, Artificial Sequence
  Description of Artificial Sequence: Synthetic oligonucleotide
cacuuacuagcuguuugac

SEQ ID NO: 2675968 - RNA, 19 nt, Artificial Sequence
  Description of Artificial Sequence: Synthetic oligonucleotide
cacaagcugguucugcaga

SEQ ID NO: 2675969 - RNA, 19 nt, Artificial Sequence
  Description of Artificial Sequence: Synthetic oligonucleotide
caagauaggcugggguggc

SEQ ID NO: 2675970 - RNA, 19 nt, Artificial Sequence
  Description of Artificial Sequence: Synthetic oligonucleotide
ugauccuguucguugccuu

SEQ ID NO: 2675971 - RNA, 19 nt, Artificial Sequence
  Description of Artificial Sequence: Synthetic oligonucleotide
ggaugcaagauaggcuggg

SEQ ID NO: 2675972 - RNA, 19 nt, Artificial Sequence
  Description of Artificial Sequence: Synthetic oligonucleotide
ugucuuucucugcgaugcu

SEQ ID NO: 2675973 - RNA, 19 nt, Artificial Sequence
  Description of Artificial Sequence: Synthetic oligonucleotide
uccuguucguugccuucca

SEQ ID NO: 2675974 - RNA, 19 nt, Artificial Sequence
  Description of Artificial Sequence: Synthetic oligonucleotide
uccacacagggucgaucca

SEQ ID NO: 2675975 - RNA, 19 nt, Artificial Sequence
  Description of Artificial Sequence: Synthetic oligonucleotide
ugccaauagguaccagguu

SEQ ID NO: 2675976 - RNA, 19 nt, Artificial Sequence
  Description of Artificial Sequence: Synthetic oligonucleotide
aguccuuauccuggcagca

SEQ ID NO: 2675977 - RNA, 19 nt, Artificial Sequence
  Description of Artificial Sequence: Synthetic oligonucleotide
cuuccucaucaucguagug

SEQ ID NO: 2675978 - RNA, 19 nt, Artificial Sequence
  Description of Artificial Sequence: Synthetic oligonucleotide
ugccuaagggaaagcuuua

SEQ ID NO: 2675979 - RNA, 19 nt, Artificial Sequence
  Description of Artificial Sequence: Synthetic oligonucleotide
uaccagguuguugucuuuc

SEQ ID NO: 2675980 - RNA, 19 nt, Artificial Sequence
  Description of Artificial Sequence: Synthetic oligonucleotide
uggcuccaucacuuacuag

SEQ ID NO: 2675981 - RNA, 19 nt, Artificial Sequence
  Description of Artificial Sequence: Synthetic oligonucleotide
cagguuguugucuuucucu

SEQ ID NO: 2675982 - RNA, 19 nt, Artificial Sequence
  Description of Artificial Sequence: Synthetic oligonucleotide
cuuauccuggcagcagcug

SEQ ID NO: 2675983 - RNA, 19 nt, Artificial Sequence
  Description of Artificial Sequence: Synthetic oligonucleotide
cuccuaagcugaguuugag

SEQ ID NO: 2675984 - RNA, 19 nt, Artificial Sequence
  Description of Artificial Sequence: Synthetic oligonucleotide
uguuugacuuuggccaaua

SEQ ID NO: 2675985 - RNA, 19 nt, Artificial Sequence
  Description of Artificial Sequence: Synthetic oligonucleotide
acgagggaacagugaagga

SEQ ID NO: 2675986 - RNA, 19 nt, Artificial Sequence
  Description of Artificial Sequence: Synthetic oligonucleotide
agauaggcugggguggccu

SEQ ID NO: 2675987 - RNA, 19 nt, Artificial Sequence
  Description of Artificial Sequence: Synthetic oligonucleotide
cauugaccucuccaucauc

SEQ ID NO: 2675988 - RNA, 19 nt, Artificial Sequence
  Description of Artificial Sequence: Synthetic oligonucleotide
acacgagggaacagugaag

SEQ ID NO: 2675989 - RNA, 19 nt, Artificial Sequence
  Description of Artificial Sequence: Synthetic oligonucleotide
ucuccaucaucaggugacu

SEQ ID NO: 2675990 - RNA, 19 nt, Artificial Sequence
  Description of Artificial Sequence: Synthetic oligonucleotide
gaggggcugaggcugugga

SEQ ID NO: 2675991 - RNA, 19 nt, Artificial Sequence
  Description of Artificial Sequence: Synthetic oligonucleotide
gggucgauccagauuaaac

SEQ ID NO: 2675992 - RNA, 19 nt, Artificial Sequence
  Description of Artificial Sequence: Synthetic oligonucleotide
caccucauugaccucucca

SEQ ID NO: 2675993 - RNA, 19 nt, Artificial Sequence
  Description of Artificial Sequence: Synthetic oligonucleotide
gcugggguggccuggaauc

SEQ ID NO: 2675994 - RNA, 19 nt, Artificial Sequence
  Description of Artificial Sequence: Synthetic oligonucleotide
gcagcagcugagaaagugc

SEQ ID NO: 2675995 - RNA, 19 nt, Artificial Sequence
  Description of Artificial Sequence: Synthetic oligonucleotide
uuaaccucucugggccuca

SEQ ID NO: 2675996 - RNA, 19 nt, Artificial Sequence
  Description of Artificial Sequence: Synthetic oligonucleotide
aggcuguggaugcaagaua

SEQ ID NO: 2675997 - RNA, 19 nt, Artificial Sequence
  Description of Artificial Sequence: Synthetic oligonucleotide
aaccucucugggccucagu

SEQ ID NO: 2675998 - RNA, 19 nt, Artificial Sequence
  Description of Artificial Sequence: Synthetic oligonucleotide
cuuaaccucucugggccuc

SEQ ID NO: 2675999 - RNA, 19 nt, Artificial Sequence
  Description of Artificial Sequence: Synthetic oligonucleotide
uagguaccagguuguuguc

SEQ ID NO: 2676000 - RNA, 19 nt, Artificial Sequence
  Description of Artificial Sequence: Synthetic oligonucleotide
guccuuauccuggcagcag

SEQ ID NO: 2676001 - RNA, 19 nt, Artificial Sequence
  Description of Artificial Sequence: Synthetic oligonucleotide
agguaccagguuguugucu

SEQ ID NO: 2676002 - RNA, 19 nt, Artificial Sequence
  Description of Artificial Sequence: Synthetic oligonucleotide
ggugacucauuauagucau

SEQ ID NO: 2676003 - RNA, 19 nt, Artificial Sequence
  Description of Artificial Sequence: Synthetic oligonucleotide
ccuagaucauccacugguc

SEQ ID NO: 2676004 - RNA, 19 nt, Artificial Sequence
  Description of Artificial Sequence: Synthetic oligonucleotide
ugcagacugaggggcugag

SEQ ID NO: 2676005 - RNA, 19 nt, Artificial Sequence
  Description of Artificial Sequence: Synthetic oligonucleotide
gggaagacugauggccugg

SEQ ID NO: 2676006 - RNA, 19 nt, Artificial Sequence
  Description of Artificial Sequence: Synthetic oligonucleotide
gccaccuuggcuugucuac

SEQ ID NO: 2676007 - RNA, 19 nt, Artificial Sequence
  Description of Artificial Sequence: Synthetic oligonucleotide
ugguccugauccuguucgu

SEQ ID NO: 2676008 - RNA, 19 nt, Artificial Sequence
  Description of Artificial Sequence: Synthetic oligonucleotide
cugaggccaccuuggcuug

SEQ ID NO: 2676009 - RNA, 19 nt, Artificial Sequence
  Description of Artificial Sequence: Synthetic oligonucleotide
gacugauggccuggagggc

SEQ ID NO: 2676010 - RNA, 19 nt, Artificial Sequence
  Description of Artificial Sequence: Synthetic oligonucleotide
ccagauuaaaccacagugu

SEQ ID NO: 2676011 - RNA, 19 nt, Artificial Sequence
  Description of Artificial Sequence: Synthetic oligonucleotide
ggccaaacgaguccuuauc

SEQ ID NO: 2676012 - RNA, 19 nt, Artificial Sequence
  Description of Artificial Sequence: Synthetic oligonucleotide
agggaaagcuuuagacacu

SEQ ID NO: 2676013 - RNA, 19 nt, Artificial Sequence
  Description of Artificial Sequence: Synthetic oligonucleotide
acgaguccuuauccuggca

SEQ ID NO: 2676014 - RNA, 19 nt, Artificial Sequence
  Description of Artificial Sequence: Synthetic oligonucleotide
gccaauacacuuaaccucu

SEQ ID NO: 2676015 - RNA, 19 nt, Artificial Sequence
  Description of Artificial Sequence: Synthetic oligonucleotide
cgaguccuuauccuggcag

SEQ ID NO: 2676016 - RNA, 19 nt, Artificial Sequence
  Description of Artificial Sequence: Synthetic oligonucleotide
acacagggucgauccagau

SEQ ID NO: 2676017 - RNA, 19 nt, Artificial Sequence
  Description of Artificial Sequence: Synthetic oligonucleotide
cacacagggucgauccaga

SEQ ID NO: 2676018 - RNA, 19 nt, Artificial Sequence
  Description of Artificial Sequence: Synthetic oligonucleotide
gaggcuguggaugcaagau

SEQ ID NO: 2676019 - RNA, 19 nt, Artificial Sequence
  Description of Artificial Sequence: Synthetic oligonucleotide
aguuugaguccuggcucca

SEQ ID NO: 2676020 - RNA, 19 nt, Artificial Sequence
  Description of Artificial Sequence: Synthetic oligonucleotide
gaucauccacugguccuga

SEQ ID NO: 2676021 - RNA, 19 nt, Artificial Sequence
  Description of Artificial Sequence: Synthetic oligonucleotide
uaaccucucugggccucag

SEQ ID NO: 2676022 - RNA, 19 nt, Artificial Sequence
  Description of Artificial Sequence: Synthetic oligonucleotide
gaaucacccugaggccacc

SEQ ID NO: 2676023 - RNA, 19 nt, Artificial Sequence
  Description of Artificial Sequence: Synthetic oligonucleotide
caauacacuuaaccucucu

SEQ ID NO: 2676024 - RNA, 19 nt, Artificial Sequence
  Description of Artificial Sequence: Synthetic oligonucleotide
ggccuggagggccaaacga

SEQ ID NO: 2676025 - RNA, 19 nt, Artificial Sequence
  Description of Artificial Sequence: Synthetic oligonucleotide
gccuggaaucacccugagg

SEQ ID NO: 2676026 - RNA, 19 nt, Artificial Sequence
  Description of Artificial Sequence: Synthetic oligonucleotide
ccuaagggaaagcuuuaga

SEQ ID NO: 2676027 - RNA, 19 nt, Artificial Sequence
  Description of Artificial Sequence: Synthetic oligonucleotide
cuccaucaucaggugacuc

SEQ ID NO: 2676028 - RNA, 19 nt, Artificial Sequence
  Description of Artificial Sequence: Synthetic oligonucleotide
gccuaagggaaagcuuuag

SEQ ID NO: 2676029 - RNA, 19 nt, Artificial Sequence
  Description of Artificial Sequence: Synthetic oligonucleotide
ccugcauguccucaucauc

SEQ ID NO: 2676030 - RNA, 19 nt, Artificial Sequence
  Description of Artificial Sequence: Synthetic oligonucleotide
gugccuaagggaaagcuuu

SEQ ID NO: 2676031 - RNA, 19 nt, Artificial Sequence
  Description of Artificial Sequence: Synthetic oligonucleotide
cuggcuccaucacuuacua

SEQ ID NO: 2676032 - RNA, 19 nt, Artificial Sequence
  Description of Artificial Sequence: Synthetic oligonucleotide
ugggguggccuggaaucac

SEQ ID NO: 2676033 - RNA, 19 nt, Artificial Sequence
  Description of Artificial Sequence: Synthetic oligonucleotide
gcuguuugacuuuggccaa

SEQ ID NO: 2676034 - RNA, 19 nt, Artificial Sequence
  Description of Artificial Sequence: Synthetic oligonucleotide
ggaaucacccugaggccac

SEQ ID NO: 2676035 - RNA, 19 nt, Artificial Sequence
  Description of Artificial Sequence: Synthetic oligonucleotide
cguagugcucugaggcugg

SEQ ID NO: 2676036 - RNA, 19 nt, Artificial Sequence
  Description of Artificial Sequence: Synthetic oligonucleotide
aucacccugaggccaccuu

SEQ ID NO: 2676037 - RNA, 19 nt, Artificial Sequence
  Description of Artificial Sequence: Synthetic oligonucleotide
gcagcugagaaagugccua

SEQ ID NO: 2676038 - RNA, 19 nt, Artificial Sequence
  Description of Artificial Sequence: Synthetic oligonucleotide
uagugcucugaggcuggcu

SEQ ID NO: 2676039 - RNA, 19 nt, Artificial Sequence
  Description of Artificial Sequence: Synthetic oligonucleotide
gggaacagugaaggaaaca

SEQ ID NO: 2676040 - RNA, 19 nt, Artificial Sequence
  Description of Artificial Sequence: Synthetic oligonucleotide
aagcugaguuugaguccug

SEQ ID NO: 2676041 - RNA, 19 nt, Artificial Sequence
  Description of Artificial Sequence: Synthetic oligonucleotide
gggaaagcuuuagacacua

SEQ ID NO: 2676042 - RNA, 19 nt, Artificial Sequence
  Description of Artificial Sequence: Synthetic oligonucleotide
ccacacagggucgauccag

SEQ ID NO: 2676043 - RNA, 19 nt, Artificial Sequence
  Description of Artificial Sequence: Synthetic oligonucleotide
aucauccacugguccugau

SEQ ID NO: 2676044 - RNA, 19 nt, Artificial Sequence
  Description of Artificial Sequence: Synthetic oligonucleotide
ccugauccuguucguugcc

SEQ ID NO: 2676045 - RNA, 19 nt, Artificial Sequence
  Description of Artificial Sequence: Synthetic oligonucleotide
agggucgauccagauuaaa

SEQ ID NO: 2676046 - RNA, 19 nt, Artificial Sequence
  Description of Artificial Sequence: Synthetic oligonucleotide
cagcugagaaagugccuaa

SEQ ID NO: 2676047 - RNA, 19 nt, Artificial Sequence
  Description of Artificial Sequence: Synthetic oligonucleotide
aggccaccuuggcuugucu

SEQ ID NO: 2676048 - RNA, 19 nt, Artificial Sequence
  Description of Artificial Sequence: Synthetic oligonucleotide
gguaccagguuguugucuu

SEQ ID NO: 2676049 - RNA, 19 nt, Artificial Sequence
  Description of Artificial Sequence: Synthetic oligonucleotide
ccaauagguaccagguugu

SEQ ID NO: 2676050 - RNA, 19 nt, Artificial Sequence
  Description of Artificial Sequence: Synthetic oligonucleotide
guagugcucugaggcuggc

SEQ ID NO: 2676051 - RNA, 19 nt, Artificial Sequence
  Description of Artificial Sequence: Synthetic oligonucleotide
ccaauacacuuaaccucuc

SEQ ID NO: 2676052 - RNA, 19 nt, Artificial Sequence
  Description of Artificial Sequence: Synthetic oligonucleotide
caucaucguagugcucuga

SEQ ID NO: 2676053 - RNA, 19 nt, Artificial Sequence
  Description of Artificial Sequence: Synthetic oligonucleotide
ccaccuuggcuugucuacc

SEQ ID NO: 2676054 - RNA, 19 nt, Artificial Sequence
  Description of Artificial Sequence: Synthetic oligonucleotide
gaggccaccuuggcuuguc

SEQ ID NO: 2676055 - RNA, 19 nt, Artificial Sequence
  Description of Artificial Sequence: Synthetic oligonucleotide
ggaaagcuuuagacacuac

SEQ ID NO: 2676056 - RNA, 19 nt, Artificial Sequence
  Description of Artificial Sequence: Synthetic oligonucleotide
ccaaacgaguccuuauccu

SEQ ID NO: 2676057 - RNA, 19 nt, Artificial Sequence
  Description of Artificial Sequence: Synthetic oligonucleotide
ggguggccuggaaucaccc

SEQ ID NO: 2676058 - RNA, 19 nt, Artificial Sequence
  Description of Artificial Sequence: Synthetic oligonucleotide
ggccuggaaucacccugag

SEQ ID NO: 2676059 - RNA, 19 nt, Artificial Sequence
  Description of Artificial Sequence: Synthetic oligonucleotide
cgaugcuuuggagccaggc

SEQ ID NO: 2676060 - RNA, 19 nt, Artificial Sequence
  Description of Artificial Sequence: Synthetic oligonucleotide
ggaagacugauggccugga

SEQ ID NO: 2676061 - RNA, 19 nt, Artificial Sequence
  Description of Artificial Sequence: Synthetic oligonucleotide
gggguggccuggaaucacc

SEQ ID NO: 2676062 - RNA, 19 nt, Artificial Sequence
  Description of Artificial Sequence: Synthetic oligonucleotide
cugggguggccuggaauca

SEQ ID NO: 2676063 - RNA, 19 nt, Artificial Sequence
  Description of Artificial Sequence: Synthetic oligonucleotide
caccuuggcuugucuaccu

SEQ ID NO: 2676064 - RNA, 19 nt, Artificial Sequence
  Description of Artificial Sequence: Synthetic oligonucleotide
uccuccacacagggucgau

SEQ ID NO: 2676065 - RNA, 19 nt, Artificial Sequence
  Description of Artificial Sequence: Synthetic oligonucleotide
gcuccaucacuuacuagcu

SEQ ID NO: 2676066 - RNA, 19 nt, Artificial Sequence
  Description of Artificial Sequence: Synthetic oligonucleotide
ggagggccaaacgaguccu

SEQ ID NO: 2676067 - RNA, 19 nt, Artificial Sequence
  Description of Artificial Sequence: Synthetic oligonucleotide
ggcuggcuugccaauaggu

SEQ ID NO: 2676068 - RNA, 19 nt, Artificial Sequence
  Description of Artificial Sequence: Synthetic oligonucleotide
gcuccuaagcugaguuuga

SEQ ID NO: 2676069 - RNA, 19 nt, Artificial Sequence
  Description of Artificial Sequence: Synthetic oligonucleotide
cacagggucgauccagauu

SEQ ID NO: 2676070 - RNA, 19 nt, Artificial Sequence
  Description of Artificial Sequence: Synthetic oligonucleotide
cugauccuguucguugccu

SEQ ID NO: 2676071 - RNA, 19 nt, Artificial Sequence
  Description of Artificial Sequence: Synthetic oligonucleotide
cagccacaagcugguucug

SEQ ID NO: 2676072 - RNA, 19 nt, Artificial Sequence
  Description of Artificial Sequence: Synthetic oligonucleotide
cagggucgauccagauuaa

SEQ ID NO: 2676073 - RNA, 19 nt, Artificial Sequence
  Description of Artificial Sequence: Synthetic oligonucleotide
ccaccucauugaccucucc

SEQ ID NO: 2676074 - RNA, 19 nt, Artificial Sequence
  Description of Artificial Sequence: Synthetic oligonucleotide
caagcugguucugcagacu

SEQ ID NO: 2676075 - RNA, 19 nt, Artificial Sequence
  Description of Artificial Sequence: Synthetic oligonucleotide
guccuggcuccaucacuua

SEQ ID NO: 2676076 - RNA, 19 nt, Artificial Sequence
  Description of Artificial Sequence: Synthetic oligonucleotide
ggccaccuuggcuugucua

SEQ ID NO: 2676077 - RNA, 19 nt, Artificial Sequence
  Description of Artificial Sequence: Synthetic oligonucleotide
cuccuccacacagggucga

SEQ ID NO: 2676078 - RNA, 19 nt, Artificial Sequence
  Description of Artificial Sequence: Synthetic oligonucleotide
ccuggagggccaaacgagu

SEQ ID NO: 2676079 - RNA, 19 nt, Artificial Sequence
  Description of Artificial Sequence: Synthetic oligonucleotide
gguggccuggaaucacccu

SEQ ID NO: 2676080 - RNA, 19 nt, Artificial Sequence
  Description of Artificial Sequence: Synthetic oligonucleotide
ccuuauccuggcagcagcu

SEQ ID NO: 2676081 - RNA, 19 nt, Artificial Sequence
  Description of Artificial Sequence: Synthetic oligonucleotide
cugcgaugcuuuggagcca

SEQ ID NO: 2676082 - RNA, 19 nt, Artificial Sequence
  Description of Artificial Sequence: Synthetic oligonucleotide
guaccagguuguugucuuu

SEQ ID NO: 2676083 - RNA, 19 nt, Artificial Sequence
  Description of Artificial Sequence: Synthetic oligonucleotide
gggccaaacgaguccuuau

SEQ ID NO: 2676084 - RNA, 19 nt, Artificial Sequence
  Description of Artificial Sequence: Synthetic oligonucleotide
caucaucaggugacucauu

SEQ ID NO: 2676085 - RNA, 19 nt, Artificial Sequence
  Description of Artificial Sequence: Synthetic oligonucleotide
gcucugaggcuggcuugcc

SEQ ID NO: 2676086 - RNA, 19 nt, Artificial Sequence
  Description of Artificial Sequence: Synthetic oligonucleotide
gcgaugcuuuggagccagg

SEQ ID NO: 2676087 - RNA, 19 nt, Artificial Sequence
  Description of Artificial Sequence: Synthetic oligonucleotide
ggcugggguggccuggaau

SEQ ID NO: 2676088 - RNA, 19 nt, Artificial Sequence
  Description of Artificial Sequence: Synthetic oligonucleotide
cguugccuuccauguccac

SEQ ID NO: 2676089 - RNA, 19 nt, Artificial Sequence
  Description of Artificial Sequence: Synthetic oligonucleotide
gugacucauuauagucauu

SEQ ID NO: 2676090 - RNA, 19 nt, Artificial Sequence
  Description of Artificial Sequence: Synthetic oligonucleotide
ccaucacuuacuagcuguu

SEQ ID NO: 2676091 - RNA, 19 nt, Artificial Sequence
  Description of Artificial Sequence: Synthetic oligonucleotide
gguccugauccuguucguu

SEQ ID NO: 2676092 - RNA, 19 nt, Artificial Sequence
  Description of Artificial Sequence: Synthetic oligonucleotide
gcuugucuaccuagaucau

SEQ ID NO: 2676093 - RNA, 19 nt, Artificial Sequence
  Description of Artificial Sequence: Synthetic oligonucleotide
gagggccaaacgaguccuu

SEQ ID NO: 2676094 - RNA, 19 nt, Artificial Sequence
  Description of Artificial Sequence: Synthetic oligonucleotide
ccuguucguugccuuccau

SEQ ID NO: 2676095 - RNA, 19 nt, Artificial Sequence
  Description of Artificial Sequence: Synthetic oligonucleotide
cuacagccacaagcugguu

SEQ ID NO: 2676096 - RNA, 19 nt, Artificial Sequence
  Description of Artificial Sequence: Synthetic oligonucleotide
aaacacauaauuuuggcag

SEQ ID NO: 2676097 - RNA, 19 nt, Artificial Sequence
  Description of Artificial Sequence: Synthetic oligonucleotide
aauacuuggcugcauagcg

SEQ ID NO: 2676098 - RNA, 19 nt, Artificial Sequence
  Description of Artificial Sequence: Synthetic oligonucleotide
aacgucuucaaucagcagu

SEQ ID NO: 2676099 - RNA, 19 nt, Artificial Sequence
  Description of Artificial Sequence: Synthetic oligonucleotide
uuucaggugccucacauag

SEQ ID NO: 2676100 - RNA, 19 nt, Artificial Sequence
  Description of Artificial Sequence: Synthetic oligonucleotide
uauaauucuguccuccacc

SEQ ID NO: 2676101 - RNA, 19 nt, Artificial Sequence
  Description of Artificial Sequence: Synthetic oligonucleotide
ucgucuauaauucuguccu

SEQ ID NO: 2676102 - RNA, 19 nt, Artificial Sequence
  Description of Artificial Sequence: Synthetic oligonucleotide
aacacauaauuuuggcagg

SEQ ID NO: 2676103 - RNA, 19 nt, Artificial Sequence
  Description of Artificial Sequence: Synthetic oligonucleotide
ugcauagcgaaacacauaa

SEQ ID NO: 2676104 - RNA, 19 nt, Artificial Sequence
  Description of Artificial Sequence: Synthetic oligonucleotide
uuguaaugcacccaggcac

SEQ ID NO: 2676105 - RNA, 19 nt, Artificial Sequence
  Description of Artificial Sequence: Synthetic oligonucleotide
uaugucaacgucuucaauc

SEQ ID NO: 2676106 - RNA, 19 nt, Artificial Sequence
  Description of Artificial Sequence: Synthetic oligonucleotide
uucucauuuccaaaucagg

SEQ ID NO: 2676107 - RNA, 19 nt, Artificial Sequence
  Description of Artificial Sequence: Synthetic oligonucleotide
uuuccuacgguaauacuug

SEQ ID NO: 2676108 - RNA, 19 nt, Artificial Sequence
  Description of Artificial Sequence: Synthetic oligonucleotide
ucucauuuccaaaucaggu

SEQ ID NO: 2676109 - RNA, 19 nt, Artificial Sequence
  Description of Artificial Sequence: Synthetic oligonucleotide
uguuguaaugcacccaggc

SEQ ID NO: 2676110 - RNA, 19 nt, Artificial Sequence
  Description of Artificial Sequence: Synthetic oligonucleotide
uaugcagccuuuccuacgg

SEQ ID NO: 2676111 - RNA, 19 nt, Artificial Sequence
  Description of Artificial Sequence: Synthetic oligonucleotide
ucuaucucagcacacucca

SEQ ID NO: 2676112 - RNA, 19 nt, Artificial Sequence
  Description of Artificial Sequence: Synthetic oligonucleotide
uacgguaauacuuggcugc

SEQ ID NO: 2676113 - RNA, 19 nt, Artificial Sequence
  Description of Artificial Sequence: Synthetic oligonucleotide
ugugaagugacaccucagc

SEQ ID NO: 2676114 - RNA, 19 nt, Artificial Sequence
  Description of Artificial Sequence: Synthetic oligonucleotide
ucaacgucuucaaucagca

SEQ ID NO: 2676115 - RNA, 19 nt, Artificial Sequence
  Description of Artificial Sequence: Synthetic oligonucleotide
uucuugaugucuaggaacu

SEQ ID NO: 2676116 - RNA, 19 nt, Artificial Sequence
  Description of Artificial Sequence: Synthetic oligonucleotide
ugaagugacaccucagcug

SEQ ID NO: 2676117 - RNA, 19 nt, Artificial Sequence
  Description of Artificial Sequence: Synthetic oligonucleotide
aaaucagguaugucaacgu

SEQ ID NO: 2676118 - RNA, 19 nt, Artificial Sequence
  Description of Artificial Sequence: Synthetic oligonucleotide
ugguaaugcagguagccag

SEQ ID NO: 2676119 - RNA, 19 nt, Artificial Sequence
  Description of Artificial Sequence: Synthetic oligonucleotide
cacacuccauccuauagcg

SEQ ID NO: 2676120 - RNA, 19 nt, Artificial Sequence
  Description of Artificial Sequence: Synthetic oligonucleotide
cauguuguaaugcacccag

SEQ ID NO: 2676121 - RNA, 19 nt, Artificial Sequence
  Description of Artificial Sequence: Synthetic oligonucleotide
aauucuguccuccaccuuu

SEQ ID NO: 2676122 - RNA, 19 nt, Artificial Sequence
  Description of Artificial Sequence: Synthetic oligonucleotide
gaaacacauaauuuuggca

SEQ ID NO: 2676123 - RNA, 19 nt, Artificial Sequence
  Description of Artificial Sequence: Synthetic oligonucleotide
uucaauguguguuucugcu

SEQ ID NO: 2676124 - RNA, 19 nt, Artificial Sequence
  Description of Artificial Sequence: Synthetic oligonucleotide
caaaucagguaugucaacg

SEQ ID NO: 2676125 - RNA, 19 nt, Artificial Sequence
  Description of Artificial Sequence: Synthetic oligonucleotide
acauaauuuuggcaggaug

SEQ ID NO: 2676126 - RNA, 19 nt, Artificial Sequence
  Description of Artificial Sequence: Synthetic oligonucleotide
cuguguaggagauggagag

SEQ ID NO: 2676127 - RNA, 19 nt, Artificial Sequence
  Description of Artificial Sequence: Synthetic oligonucleotide
uaggaacugaaccuccucc

SEQ ID NO: 2676128 - RNA, 19 nt, Artificial Sequence
  Description of Artificial Sequence: Synthetic oligonucleotide
aauuuuggcaggaugugcu

SEQ ID NO: 2676129 - RNA, 19 nt, Artificial Sequence
  Description of Artificial Sequence: Synthetic oligonucleotide
gaagugacaccucagcuga

SEQ ID NO: 2676130 - RNA, 19 nt, Artificial Sequence
  Description of Artificial Sequence: Synthetic oligonucleotide
agagccuugucuaugcagc

SEQ ID NO: 2676131 - RNA, 19 nt, Artificial Sequence
  Description of Artificial Sequence: Synthetic oligonucleotide
augucuaggaacugaaccu

SEQ ID NO: 2676132 - RNA, 19 nt, Artificial Sequence
  Description of Artificial Sequence: Synthetic oligonucleotide
ucaaucagcaguccccaug

SEQ ID NO: 2676133 - RNA, 19 nt, Artificial Sequence
  Description of Artificial Sequence: Synthetic oligonucleotide
uuugguaaugcagguagcc

SEQ ID NO: 2676134 - RNA, 19 nt, Artificial Sequence
  Description of Artificial Sequence: Synthetic oligonucleotide
guucuugaugucuaggaac

SEQ ID NO: 2676135 - RNA, 19 nt, Artificial Sequence
  Description of Artificial Sequence: Synthetic oligonucleotide
gauucucauuuccaaauca

SEQ ID NO: 2676136 - RNA, 19 nt, Artificial Sequence
  Description of Artificial Sequence: Synthetic oligonucleotide
uguaaugcacccaggcaca

SEQ ID NO: 2676137 - RNA, 19 nt, Artificial Sequence
  Description of Artificial Sequence: Synthetic oligonucleotide
uguuucugcuucacaaagc

SEQ ID NO: 2676138 - RNA, 19 nt, Artificial Sequence
  Description of Artificial Sequence: Synthetic oligonucleotide
auaauucuguccuccaccu

SEQ ID NO: 2676139 - RNA, 19 nt, Artificial Sequence
  Description of Artificial Sequence: Synthetic oligonucleotide
augucaacgucuucaauca

SEQ ID NO: 2676140 - RNA, 19 nt, Artificial Sequence
  Description of Artificial Sequence: Synthetic oligonucleotide
guaauacuuggcugcauag

SEQ ID NO: 2676141 - RNA, 19 nt, Artificial Sequence
  Description of Artificial Sequence: Synthetic oligonucleotide
aaugcacccaggcacaguu

SEQ ID NO: 2676142 - RNA, 19 nt, Artificial Sequence
  Description of Artificial Sequence: Synthetic oligonucleotide
agucuaucucagcacacuc

SEQ ID NO: 2676143 - RNA, 19 nt, Artificial Sequence
  Description of Artificial Sequence: Synthetic oligonucleotide
cuugcaaguguucuccacc

SEQ ID NO: 2676144 - RNA, 19 nt, Artificial Sequence
  Description of Artificial Sequence: Synthetic oligonucleotide
cucgucuauaauucugucc

SEQ ID NO: 2676145 - RNA, 19 nt, Artificial Sequence
  Description of Artificial Sequence: Synthetic oligonucleotide
ugucuaugcagccuuuccu

SEQ ID NO: 2676146 - RNA, 19 nt, Artificial Sequence
  Description of Artificial Sequence: Synthetic oligonucleotide
uggauucucauuuccaaau

SEQ ID NO: 2676147 - RNA, 19 nt, Artificial Sequence
  Description of Artificial Sequence: Synthetic oligonucleotide
ucagcaguccccaugugaa

SEQ ID NO: 2676148 - RNA, 19 nt, Artificial Sequence
  Description of Artificial Sequence: Synthetic oligonucleotide
uaucucagcacacuccauc

SEQ ID NO: 2676149 - RNA, 19 nt, Artificial Sequence
  Description of Artificial Sequence: Synthetic oligonucleotide
cauggcucgucuauaauuc

SEQ ID NO: 2676150 - RNA, 19 nt, Artificial Sequence
  Description of Artificial Sequence: Synthetic oligonucleotide
uagcgaaacacauaauuuu

SEQ ID NO: 2676151 - RNA, 19 nt, Artificial Sequence
  Description of Artificial Sequence: Synthetic oligonucleotide
uugucuaugcagccuuucc

SEQ ID NO: 2676152 - RNA, 19 nt, Artificial Sequence
  Description of Artificial Sequence: Synthetic oligonucleotide
uuuugguaaugcagguagc

SEQ ID NO: 2676153 - RNA, 19 nt, Artificial Sequence
  Description of Artificial Sequence: Synthetic oligonucleotide
ccaccuuucagcaaggccc

SEQ ID NO: 2676154 - RNA, 19 nt, Artificial Sequence
  Description of Artificial Sequence: Synthetic oligonucleotide
ucugacaagcuguccaugu

SEQ ID NO: 2676155 - RNA, 19 nt, Artificial Sequence
  Description of Artificial Sequence: Synthetic oligonucleotide
uaauuuuggcaggaugugc

SEQ ID NO: 2676156 - RNA, 19 nt, Artificial Sequence
  Description of Artificial Sequence: Synthetic oligonucleotide
caaagcaggccauggcucg

SEQ ID NO: 2676157 - RNA, 19 nt, Artificial Sequence
  Description of Artificial Sequence: Synthetic oligonucleotide
cuuucagcaaggcccacgc

SEQ ID NO: 2676158 - RNA, 19 nt, Artificial Sequence
  Description of Artificial Sequence: Synthetic oligonucleotide
ugcacccaggcacaguugc

SEQ ID NO: 2676159 - RNA, 19 nt, Artificial Sequence
  Description of Artificial Sequence: Synthetic oligonucleotide
uccaccuuucagcaaggcc

SEQ ID NO: 2676160 - RNA, 19 nt, Artificial Sequence
  Description of Artificial Sequence: Synthetic oligonucleotide
uugaugucuaggaacugaa

SEQ ID NO: 2676161 - RNA, 19 nt, Artificial Sequence
  Description of Artificial Sequence: Synthetic oligonucleotide
gacaccucagcugaagcag

SEQ ID NO: 2676162 - RNA, 19 nt, Artificial Sequence
  Description of Artificial Sequence: Synthetic oligonucleotide
aagcuguccauguuguaau

SEQ ID NO: 2676163 - RNA, 19 nt, Artificial Sequence
  Description of Artificial Sequence: Synthetic oligonucleotide
auuccuugcaaguguucuc

SEQ ID NO: 2676164 - RNA, 19 nt, Artificial Sequence
  Description of Artificial Sequence: Synthetic oligonucleotide
uccuauagcggaagggacu

SEQ ID NO: 2676165 - RNA, 19 nt, Artificial Sequence
  Description of Artificial Sequence: Synthetic oligonucleotide
guguaggagauggagagcc

SEQ ID NO: 2676166 - RNA, 19 nt, Artificial Sequence
  Description of Artificial Sequence: Synthetic oligonucleotide
uguccuccaccuuucagca

SEQ ID NO: 2676167 - RNA, 19 nt, Artificial Sequence
  Description of Artificial Sequence: Synthetic oligonucleotide
uccauccuauagcggaagg

SEQ ID NO: 2676168 - RNA, 19 nt, Artificial Sequence
  Description of Artificial Sequence: Synthetic oligonucleotide
uaauacuuggcugcauagc

SEQ ID NO: 2676169 - RNA, 19 nt, Artificial Sequence
  Description of Artificial Sequence: Synthetic oligonucleotide
cucaugcuggccuuucagg

SEQ ID NO: 2676170 - RNA, 19 nt, Artificial Sequence
  Description of Artificial Sequence: Synthetic oligonucleotide
uauagcggaagggacuugc

SEQ ID NO: 2676171 - RNA, 19 nt, Artificial Sequence
  Description of Artificial Sequence: Synthetic oligonucleotide
aauguguguuucugcuuca

SEQ ID NO: 2676172 - RNA, 19 nt, Artificial Sequence
  Description of Artificial Sequence: Synthetic oligonucleotide
uuccuugcaaguguucucc

SEQ ID NO: 2676173 - RNA, 19 nt, Artificial Sequence
  Description of Artificial Sequence: Synthetic oligonucleotide
aggugccucacauaggcca

SEQ ID NO: 2676174 - RNA, 19 nt, Artificial Sequence
  Description of Artificial Sequence: Synthetic oligonucleotide
ucagguaugucaacgucuu

SEQ ID NO: 2676175 - RNA, 19 nt, Artificial Sequence
  Description of Artificial Sequence: Synthetic oligonucleotide
agguaugucaacgucuuca

SEQ ID NO: 2676176 - RNA, 19 nt, Artificial Sequence
  Description of Artificial Sequence: Synthetic oligonucleotide
agcgaaacacauaauuuug

SEQ ID NO: 2676177 - RNA, 19 nt, Artificial Sequence
  Description of Artificial Sequence: Synthetic oligonucleotide
cuacgguaauacuuggcug

SEQ ID NO: 2676178 - RNA, 19 nt, Artificial Sequence
  Description of Artificial Sequence: Synthetic oligonucleotide
ugacaccucagcugaagca

SEQ ID NO: 2676179 - RNA, 19 nt, Artificial Sequence
  Description of Artificial Sequence: Synthetic oligonucleotide
cuaugcagccuuuccuacg

SEQ ID NO: 2676180 - RNA, 19 nt, Artificial Sequence
  Description of Artificial Sequence: Synthetic oligonucleotide
uuccuacgguaauacuugg

SEQ ID NO: 2676181 - RNA, 19 nt, Artificial Sequence
  Description of Artificial Sequence: Synthetic oligonucleotide
acgucuucaaucagcaguc

SEQ ID NO: 2676182 - RNA, 19 nt, Artificial Sequence
  Description of Artificial Sequence: Synthetic oligonucleotide
gucuauaauucuguccucc

SEQ ID NO: 2676183 - RNA, 19 nt, Artificial Sequence
  Description of Artificial Sequence: Synthetic oligonucleotide
ucugggucagggcuucugc

SEQ ID NO: 2676184 - RNA, 19 nt, Artificial Sequence
  Description of Artificial Sequence: Synthetic oligonucleotide
uucaggugccucacauagg

SEQ ID NO: 2676185 - RNA, 19 nt, Artificial Sequence
  Description of Artificial Sequence: Synthetic oligonucleotide
uggagagccuugucuaugc

SEQ ID NO: 2676186 - RNA, 19 nt, Artificial Sequence
  Description of Artificial Sequence: Synthetic oligonucleotide
uccuggauucucauuucca

SEQ ID NO: 2676187 - RNA, 19 nt, Artificial Sequence
  Description of Artificial Sequence: Synthetic oligonucleotide
uguaaggcccuguguagga

SEQ ID NO: 2676188 - RNA, 19 nt, Artificial Sequence
  Description of Artificial Sequence: Synthetic oligonucleotide
uacuuggcugcauagcgaa

SEQ ID NO: 2676189 - RNA, 19 nt, Artificial Sequence
  Description of Artificial Sequence: Synthetic oligonucleotide
uugcaaguguucuccaccu

SEQ ID NO: 2676190 - RNA, 19 nt, Artificial Sequence
  Description of Artificial Sequence: Synthetic oligonucleotide
ugcgaauuccuugcaagug

SEQ ID NO: 2676191 - RNA, 19 nt, Artificial Sequence
  Description of Artificial Sequence: Synthetic oligonucleotide
uggcucgucuauaauucug

SEQ ID NO: 2676192 - RNA, 19 nt, Artificial Sequence
  Description of Artificial Sequence: Synthetic oligonucleotide
gaagggacuugcgaauucc

SEQ ID NO: 2676193 - RNA, 19 nt, Artificial Sequence
  Description of Artificial Sequence: Synthetic oligonucleotide
uugcgaauuccuugcaagu

SEQ ID NO: 2676194 - RNA, 19 nt, Artificial Sequence
  Description of Artificial Sequence: Synthetic oligonucleotide
ucacagucuaucucagcac

SEQ ID NO: 2676195 - RNA, 19 nt, Artificial Sequence
  Description of Artificial Sequence: Synthetic oligonucleotide
agccagagucaggugaugc

SEQ ID NO: 2676196 - RNA, 19 nt, Artificial Sequence
  Description of Artificial Sequence: Synthetic oligonucleotide
ugaugucuaggaacugaac

SEQ ID NO: 2676197 - RNA, 19 nt, Artificial Sequence
  Description of Artificial Sequence: Synthetic oligonucleotide
uccuacgguaauacuuggc

SEQ ID NO: 2676198 - RNA, 19 nt, Artificial Sequence
  Description of Artificial Sequence: Synthetic oligonucleotide
gucaacgucuucaaucagc

SEQ ID NO: 2676199 - RNA, 19 nt, Artificial Sequence
  Description of Artificial Sequence: Synthetic oligonucleotide
ugucaacgucuucaaucag

SEQ ID NO: 2676200 - RNA, 19 nt, Artificial Sequence
  Description of Artificial Sequence: Synthetic oligonucleotide
cuuggcugcauagcgaaac

SEQ ID NO: 2676201 - RNA, 19 nt, Artificial Sequence
  Description of Artificial Sequence: Synthetic oligonucleotide
auagcgaaacacauaauuu

SEQ ID NO: 2676202 - RNA, 19 nt, Artificial Sequence
  Description of Artificial Sequence: Synthetic oligonucleotide
uuuggcaggaugugcugcu

SEQ ID NO: 2676203 - RNA, 19 nt, Artificial Sequence
  Description of Artificial Sequence: Synthetic oligonucleotide
ugcagguagccagagucag

SEQ ID NO: 2676204 - RNA, 19 nt, Artificial Sequence
  Description of Artificial Sequence: Synthetic oligonucleotide
uccucacagucuaucucag

SEQ ID NO: 2676205 - RNA, 19 nt, Artificial Sequence
  Description of Artificial Sequence: Synthetic oligonucleotide
guguguuucugcuucacaa

SEQ ID NO: 2676206 - RNA, 19 nt, Artificial Sequence
  Description of Artificial Sequence: Synthetic oligonucleotide
cacuccauccuauagcgga

SEQ ID NO: 2676207 - RNA, 19 nt, Artificial Sequence
  Description of Artificial Sequence: Synthetic oligonucleotide
ucagcugaagcagauucuc

SEQ ID NO: 2676208 - RNA, 19 nt, Artificial Sequence
  Description of Artificial Sequence: Synthetic oligonucleotide
uugguaaugcagguagcca

SEQ ID NO: 2676209 - RNA, 19 nt, Artificial Sequence
  Description of Artificial Sequence: Synthetic oligonucleotide
auccuauagcggaagggac

SEQ ID NO: 2676210 - RNA, 19 nt, Artificial Sequence
  Description of Artificial Sequence: Synthetic oligonucleotide
ugucuaggaacugaaccuc

SEQ ID NO: 2676211 - RNA, 19 nt, Artificial Sequence
  Description of Artificial Sequence: Synthetic oligonucleotide
acccaggcacaguugcccc

SEQ ID NO: 2676212 - RNA, 19 nt, Artificial Sequence
  Description of Artificial Sequence: Synthetic oligonucleotide
ugagggcuucuucaaugug

SEQ ID NO: 2676213 - RNA, 19 nt, Artificial Sequence
  Description of Artificial Sequence: Synthetic oligonucleotide
uaaggcccuguguaggaga

SEQ ID NO: 2676214 - RNA, 19 nt, Artificial Sequence
  Description of Artificial Sequence: Synthetic oligonucleotide
agcggaagggacuugcgaa

SEQ ID NO: 2676215 - RNA, 19 nt, Artificial Sequence
  Description of Artificial Sequence: Synthetic oligonucleotide
aucagguaugucaacgucu

SEQ ID NO: 2676216 - RNA, 19 nt, Artificial Sequence
  Description of Artificial Sequence: Synthetic oligonucleotide
uuggcugcauagcgaaaca

SEQ ID NO: 2676217 - RNA, 19 nt, Artificial Sequence
  Description of Artificial Sequence: Synthetic oligonucleotide
gucaggugaugccuguaag

SEQ ID NO: 2676218 - RNA, 19 nt, Artificial Sequence
  Description of Artificial Sequence: Synthetic oligonucleotide
cuucuuucacgcucuccag

SEQ ID NO: 2676219 - RNA, 19 nt, Artificial Sequence
  Description of Artificial Sequence: Synthetic oligonucleotide
caugugaagugacaccuca

SEQ ID NO: 2676220 - RNA, 19 nt, Artificial Sequence
  Description of Artificial Sequence: Synthetic oligonucleotide
uagcggaagggacuugcga

SEQ ID NO: 2676221 - RNA, 19 nt, Artificial Sequence
  Description of Artificial Sequence: Synthetic oligonucleotide
ggacuugcgaauuccuugc

SEQ ID NO: 2676222 - RNA, 19 nt, Artificial Sequence
  Description of Artificial Sequence: Synthetic oligonucleotide
cucauuuccaaaucaggua

SEQ ID NO: 2676223 - RNA, 19 nt, Artificial Sequence
  Description of Artificial Sequence: Synthetic oligonucleotide
gggacuugcgaauuccuug

SEQ ID NO: 2676224 - RNA, 19 nt, Artificial Sequence
  Description of Artificial Sequence: Synthetic oligonucleotide
cuguaaggcccuguguagg

SEQ ID NO: 2676225 - RNA, 19 nt, Artificial Sequence
  Description of Artificial Sequence: Synthetic oligonucleotide
gguagccagagucagguga

SEQ ID NO: 2676226 - RNA, 19 nt, Artificial Sequence
  Description of Artificial Sequence: Synthetic oligonucleotide
cuccuggauucucauuucc

SEQ ID NO: 2676227 - RNA, 19 nt, Artificial Sequence
  Description of Artificial Sequence: Synthetic oligonucleotide
cuuccucacagucuaucuc

SEQ ID NO: 2676228 - RNA, 19 nt, Artificial Sequence
  Description of Artificial Sequence: Synthetic oligonucleotide
caugcuggccuuucaggug

SEQ ID NO: 2676229 - RNA, 19 nt, Artificial Sequence
  Description of Artificial Sequence: Synthetic oligonucleotide
gucuaucucagcacacucc

SEQ ID NO: 2676230 - RNA, 19 nt, Artificial Sequence
  Description of Artificial Sequence: Synthetic oligonucleotide
cauagcgaaacacauaauu

SEQ ID NO: 2676231 - RNA, 19 nt, Artificial Sequence
  Description of Artificial Sequence: Synthetic oligonucleotide
gcgaaacacauaauuuugg

SEQ ID NO: 2676232 - RNA, 19 nt, Artificial Sequence
  Description of Artificial Sequence: Synthetic oligonucleotide
uguaggagauggagagccu

SEQ ID NO: 2676233 - RNA, 19 nt, Artificial Sequence
  Description of Artificial Sequence: Synthetic oligonucleotide
uguguaggagauggagagc

SEQ ID NO: 2676234 - RNA, 19 nt, Artificial Sequence
  Description of Artificial Sequence: Synthetic oligonucleotide
gcaaguguucuccaccuug

SEQ ID NO: 2676235 - RNA, 19 nt, Artificial Sequence
  Description of Artificial Sequence: Synthetic oligonucleotide
gugacaccucagcugaagc

SEQ ID NO: 2676236 - RNA, 19 nt, Artificial Sequence
  Description of Artificial Sequence: Synthetic oligonucleotide
ucaauguguguuucugcuu

SEQ ID NO: 2676237 - RNA, 19 nt, Artificial Sequence
  Description of Artificial Sequence: Synthetic oligonucleotide
ucucagcacacuccauccu

SEQ ID NO: 2676238 - RNA, 19 nt, Artificial Sequence
  Description of Artificial Sequence: Synthetic oligonucleotide
cuguccauguuguaaugca

SEQ ID NO: 2676239 - RNA, 19 nt, Artificial Sequence
  Description of Artificial Sequence: Synthetic oligonucleotide
cgaaacacauaauuuuggc

SEQ ID NO: 2676240 - RNA, 19 nt, Artificial Sequence
  Description of Artificial Sequence: Synthetic oligonucleotide
cauccuauagcggaaggga

SEQ ID NO: 2676241 - RNA, 19 nt, Artificial Sequence
  Description of Artificial Sequence: Synthetic oligonucleotide
agguugugcaucccugcug

SEQ ID NO: 2676242 - RNA, 19 nt, Artificial Sequence
  Description of Artificial Sequence: Synthetic oligonucleotide
cacagucuaucucagcaca

SEQ ID NO: 2676243 - RNA, 19 nt, Artificial Sequence
  Description of Artificial Sequence: Synthetic oligonucleotide
cagcugaagcagauucucc

SEQ ID NO: 2676244 - RNA, 19 nt, Artificial Sequence
  Description of Artificial Sequence: Synthetic oligonucleotide
uaaugcagguagccagagu

SEQ ID NO: 2676245 - RNA, 19 nt, Artificial Sequence
  Description of Artificial Sequence: Synthetic oligonucleotide
uccccaugugaagugacac

SEQ ID NO: 2676246 - RNA, 19 nt, Artificial Sequence
  Description of Artificial Sequence: Synthetic oligonucleotide
ggcccuguguaggagaugg

SEQ ID NO: 2676247 - RNA, 19 nt, Artificial Sequence
  Description of Artificial Sequence: Synthetic oligonucleotide
cuugaugucuaggaacuga

SEQ ID NO: 2676248 - RNA, 19 nt, Artificial Sequence
  Description of Artificial Sequence: Synthetic oligonucleotide
cuuuccuacgguaauacuu

SEQ ID NO: 2676249 - RNA, 19 nt, Artificial Sequence
  Description of Artificial Sequence: Synthetic oligonucleotide
agucaggugaugccuguaa

SEQ ID NO: 2676250 - RNA, 19 nt, Artificial Sequence
  Description of Artificial Sequence: Synthetic oligonucleotide
acacauaauuuuggcagga

SEQ ID NO: 2676251 - RNA, 19 nt, Artificial Sequence
  Description of Artificial Sequence: Synthetic oligonucleotide
guaaugcagguagccagag

SEQ ID NO: 2676252 - RNA, 19 nt, Artificial Sequence
  Description of Artificial Sequence: Synthetic oligonucleotide
gcugagggcuucuucaaug

SEQ ID NO: 2676253 - RNA, 19 nt, Artificial Sequence
  Description of Artificial Sequence: Synthetic oligonucleotide
cuaggaacugaaccuccuc

SEQ ID NO: 2676254 - RNA, 19 nt, Artificial Sequence
  Description of Artificial Sequence: Synthetic oligonucleotide
uggcaggaugugcugcuga

SEQ ID NO: 2676255 - RNA, 19 nt, Artificial Sequence
  Description of Artificial Sequence: Synthetic oligonucleotide
auguguguuucugcuucac

SEQ ID NO: 2676256 - RNA, 19 nt, Artificial Sequence
  Description of Artificial Sequence: Synthetic oligonucleotide
cagagucaggugaugccug

SEQ ID NO: 2676257 - RNA, 19 nt, Artificial Sequence
  Description of Artificial Sequence: Synthetic oligonucleotide
agcaaggcccacgccuucc

SEQ ID NO: 2676258 - RNA, 19 nt, Artificial Sequence
  Description of Artificial Sequence: Synthetic oligonucleotide
caccaggcuucucuugucc

SEQ ID NO: 2676259 - RNA, 19 nt, Artificial Sequence
  Description of Artificial Sequence: Synthetic oligonucleotide
auggcucgucuauaauucu

SEQ ID NO: 2676260 - RNA, 19 nt, Artificial Sequence
  Description of Artificial Sequence: Synthetic oligonucleotide
agcaguccccaugugaagu

SEQ ID NO: 2676261 - RNA, 19 nt, Artificial Sequence
  Description of Artificial Sequence: Synthetic oligonucleotide
cacaguugccccaggucac

SEQ ID NO: 2676262 - RNA, 19 nt, Artificial Sequence
  Description of Artificial Sequence: Synthetic oligonucleotide
auucuguccuccaccuuuc

SEQ ID NO: 2676263 - RNA, 19 nt, Artificial Sequence
  Description of Artificial Sequence: Synthetic oligonucleotide
uucugacaagcuguccaug

SEQ ID NO: 2676264 - RNA, 19 nt, Artificial Sequence
  Description of Artificial Sequence: Synthetic oligonucleotide
ugcuggguucuugaugucu

SEQ ID NO: 2676265 - RNA, 19 nt, Artificial Sequence
  Description of Artificial Sequence: Synthetic oligonucleotide
gucuaugcagccuuuccua

SEQ ID NO: 2676266 - RNA, 19 nt, Artificial Sequence
  Description of Artificial Sequence: Synthetic oligonucleotide
aggcccacgccuuccucac

SEQ ID NO: 2676267 - RNA, 19 nt, Artificial Sequence
  Description of Artificial Sequence: Synthetic oligonucleotide
cuuucacgcucuccagggc

SEQ ID NO: 2676268 - RNA, 19 nt, Artificial Sequence
  Description of Artificial Sequence: Synthetic oligonucleotide
ugccuguaaggcccugugu

SEQ ID NO: 2676269 - RNA, 19 nt, Artificial Sequence
  Description of Artificial Sequence: Synthetic oligonucleotide
aagggacuugcgaauuccu

SEQ ID NO: 2676270 - RNA, 19 nt, Artificial Sequence
  Description of Artificial Sequence: Synthetic oligonucleotide
cuggguucuugaugucuag

SEQ ID NO: 2676271 - RNA, 19 nt, Artificial Sequence
  Description of Artificial Sequence: Synthetic oligonucleotide
guaggccugggcuucugac

SEQ ID NO: 2676272 - RNA, 19 nt, Artificial Sequence
  Description of Artificial Sequence: Synthetic oligonucleotide
gcacaguugccccagguca

SEQ ID NO: 2676273 - RNA, 19 nt, Artificial Sequence
  Description of Artificial Sequence: Synthetic oligonucleotide
aguccccaugugaagugac

SEQ ID NO: 2676274 - RNA, 19 nt, Artificial Sequence
  Description of Artificial Sequence: Synthetic oligonucleotide
auagcggaagggacuugcg

SEQ ID NO: 2676275 - RNA, 19 nt, Artificial Sequence
  Description of Artificial Sequence: Synthetic oligonucleotide
accaggcuucucuugucca

SEQ ID NO: 2676276 - RNA, 19 nt, Artificial Sequence
  Description of Artificial Sequence: Synthetic oligonucleotide
gugaagugacaccucagcu

SEQ ID NO: 2676277 - RNA, 19 nt, Artificial Sequence
  Description of Artificial Sequence: Synthetic oligonucleotide
aucccugcuggguucuuga

SEQ ID NO: 2676278 - RNA, 19 nt, Artificial Sequence
  Description of Artificial Sequence: Synthetic oligonucleotide
uccuugcaaguguucucca

SEQ ID NO: 2676279 - RNA, 19 nt, Artificial Sequence
  Description of Artificial Sequence: Synthetic oligonucleotide
ugcagccuuuccuacggua

SEQ ID NO: 2676280 - RNA, 19 nt, Artificial Sequence
  Description of Artificial Sequence: Synthetic oligonucleotide
cacccaggcacaguugccc

SEQ ID NO: 2676281 - RNA, 19 nt, Artificial Sequence
  Description of Artificial Sequence: Synthetic oligonucleotide
gguaauacuuggcugcaua

SEQ ID NO: 2676282 - RNA, 19 nt, Artificial Sequence
  Description of Artificial Sequence: Synthetic oligonucleotide
auggagagccuugucuaug

SEQ ID NO: 2676283 - RNA, 19 nt, Artificial Sequence
  Description of Artificial Sequence: Synthetic oligonucleotide
auguuguaaugcacccagg

SEQ ID NO: 2676284 - RNA, 19 nt, Artificial Sequence
  Description of Artificial Sequence: Synthetic oligonucleotide
caacgucuucaaucagcag

SEQ ID NO: 2676285 - RNA, 19 nt, Artificial Sequence
  Description of Artificial Sequence: Synthetic oligonucleotide
ugcugagggcuucuucaau

SEQ ID NO: 2676286 - RNA, 19 nt, Artificial Sequence
  Description of Artificial Sequence: Synthetic oligonucleotide
auacuuggcugcauagcga

SEQ ID NO: 2676287 - RNA, 19 nt, Artificial Sequence
  Description of Artificial Sequence: Synthetic oligonucleotide
augugaagugacaccucag

SEQ ID NO: 2676288 - RNA, 19 nt, Artificial Sequence
  Description of Artificial Sequence: Synthetic oligonucleotide
uggcugcauagcgaaacac

SEQ ID NO: 2676289 - RNA, 19 nt, Artificial Sequence
  Description of Artificial Sequence: Synthetic oligonucleotide
ccuguaaggcccuguguag

SEQ ID NO: 2676290 - RNA, 19 nt, Artificial Sequence
  Description of Artificial Sequence: Synthetic oligonucleotide
agcagguugugcaucccug

SEQ ID NO: 2676291 - RNA, 19 nt, Artificial Sequence
  Description of Artificial Sequence: Synthetic oligonucleotide
uaauucuguccuccaccuu

SEQ ID NO: 2676292 - RNA, 19 nt, Artificial Sequence
  Description of Artificial Sequence: Synthetic oligonucleotide
gguucuugaugucuaggaa

SEQ ID NO: 2676293 - RNA, 19 nt, Artificial Sequence
  Description of Artificial Sequence: Synthetic oligonucleotide
gagggcuucuucaaugugu

SEQ ID NO: 2676294 - RNA, 19 nt, Artificial Sequence
  Description of Artificial Sequence: Synthetic oligonucleotide
gguaugucaacgucuucaa

SEQ ID NO: 2676295 - RNA, 19 nt, Artificial Sequence
  Description of Artificial Sequence: Synthetic oligonucleotide
guaaggcccuguguaggag

SEQ ID NO: 2676296 - RNA, 19 nt, Artificial Sequence
  Description of Artificial Sequence: Synthetic oligonucleotide
cuugucuaugcagccuuuc

SEQ ID NO: 2676297 - RNA, 19 nt, Artificial Sequence
  Description of Artificial Sequence: Synthetic oligonucleotide
aggcuucucuuguccagcu

SEQ ID NO: 2676298 - RNA, 19 nt, Artificial Sequence
  Description of Artificial Sequence: Synthetic oligonucleotide
gacuugcgaauuccuugca

SEQ ID NO: 2676299 - RNA, 19 nt, Artificial Sequence
  Description of Artificial Sequence: Synthetic oligonucleotide
ucaccaggcuucucuuguc

SEQ ID NO: 2676300 - RNA, 19 nt, Artificial Sequence
  Description of Artificial Sequence: Synthetic oligonucleotide
aggagauggagagccuugu

SEQ ID NO: 2676301 - RNA, 19 nt, Artificial Sequence
  Description of Artificial Sequence: Synthetic oligonucleotide
caccuuucagcaaggccca

SEQ ID NO: 2676302 - RNA, 19 nt, Artificial Sequence
  Description of Artificial Sequence: Synthetic oligonucleotide
acacuccauccuauagcgg

SEQ ID NO: 2676303 - RNA, 19 nt, Artificial Sequence
  Description of Artificial Sequence: Synthetic oligonucleotide
cuccauccuauagcggaag

SEQ ID NO: 2676304 - RNA, 19 nt, Artificial Sequence
  Description of Artificial Sequence: Synthetic oligonucleotide
gcagguugugcaucccugc

SEQ ID NO: 2676305 - RNA, 19 nt, Artificial Sequence
  Description of Artificial Sequence: Synthetic oligonucleotide
acgguaauacuuggcugca

SEQ ID NO: 2676306 - RNA, 19 nt, Artificial Sequence
  Description of Artificial Sequence: Synthetic oligonucleotide
ccauccuauagcggaaggg

SEQ ID NO: 2676307 - RNA, 19 nt, Artificial Sequence
  Description of Artificial Sequence: Synthetic oligonucleotide
ugugcugcugagggcuucu

SEQ ID NO: 2676308 - RNA, 19 nt, Artificial Sequence
  Description of Artificial Sequence: Synthetic oligonucleotide
ugccucacauaggccagca

SEQ ID NO: 2676309 - RNA, 19 nt, Artificial Sequence
  Description of Artificial Sequence: Synthetic oligonucleotide
gauggagagccuugucuau

SEQ ID NO: 2676310 - RNA, 19 nt, Artificial Sequence
  Description of Artificial Sequence: Synthetic oligonucleotide
uaaugcacccaggcacagu

SEQ ID NO: 2676311 - RNA, 19 nt, Artificial Sequence
  Description of Artificial Sequence: Synthetic oligonucleotide
agguagccagagucaggug

SEQ ID NO: 2676312 - RNA, 19 nt, Artificial Sequence
  Description of Artificial Sequence: Synthetic oligonucleotide
cucagcacacuccauccua

SEQ ID NO: 2676313 - RNA, 19 nt, Artificial Sequence
  Description of Artificial Sequence: Synthetic oligonucleotide
ccuguguaggagauggaga

SEQ ID NO: 2676314 - RNA, 19 nt, Artificial Sequence
  Description of Artificial Sequence: Synthetic oligonucleotide
gcaguccccaugugaagug

SEQ ID NO: 2676315 - RNA, 19 nt, Artificial Sequence
  Description of Artificial Sequence: Synthetic oligonucleotide
ggcugcauagcgaaacaca

SEQ ID NO: 2676316 - RNA, 19 nt, Artificial Sequence
  Description of Artificial Sequence: Synthetic oligonucleotide
ggaagggacuugcgaauuc

SEQ ID NO: 2676317 - RNA, 19 nt, Artificial Sequence
  Description of Artificial Sequence: Synthetic oligonucleotide
gccuguaaggcccugugua

SEQ ID NO: 2676318 - RNA, 19 nt, Artificial Sequence
  Description of Artificial Sequence: Synthetic oligonucleotide
ggugccucacauaggccag

SEQ ID NO: 2676319 - RNA, 19 nt, Artificial Sequence
  Description of Artificial Sequence: Synthetic oligonucleotide
agcaggccauggcucgucu

SEQ ID NO: 2676320 - RNA, 19 nt, Artificial Sequence
  Description of Artificial Sequence: Synthetic oligonucleotide
gcccacgccuuccucacag

SEQ ID NO: 2676321 - RNA, 19 nt, Artificial Sequence
  Description of Artificial Sequence: Synthetic oligonucleotide
ugcaucccugcuggguucu

SEQ ID NO: 2676322 - RNA, 19 nt, Artificial Sequence
  Description of Artificial Sequence: Synthetic oligonucleotide
ccuacgguaauacuuggcu

SEQ ID NO: 2676323 - RNA, 19 nt, Artificial Sequence
  Description of Artificial Sequence: Synthetic oligonucleotide
uagccagagucaggugaug

SEQ ID NO: 2676324 - RNA, 19 nt, Artificial Sequence
  Description of Artificial Sequence: Synthetic oligonucleotide
cugcauagcgaaacacaua

SEQ ID NO: 2676325 - RNA, 19 nt, Artificial Sequence
  Description of Artificial Sequence: Synthetic oligonucleotide
caggucaccaggcuucucu

SEQ ID NO: 2676326 - RNA, 19 nt, Artificial Sequence
  Description of Artificial Sequence: Synthetic oligonucleotide
cagguagccagagucaggu

SEQ ID NO: 2676327 - RNA, 19 nt, Artificial Sequence
  Description of Artificial Sequence: Synthetic oligonucleotide
ccuugcaaguguucuccac

SEQ ID NO: 2676328 - RNA, 19 nt, Artificial Sequence
  Description of Artificial Sequence: Synthetic oligonucleotide
cuucucuuguccagcuucu

SEQ ID NO: 2676329 - RNA, 19 nt, Artificial Sequence
  Description of Artificial Sequence: Synthetic oligonucleotide
gcgaauuccuugcaagugu

SEQ ID NO: 2676330 - RNA, 19 nt, Artificial Sequence
  Description of Artificial Sequence: Synthetic oligonucleotide
ccuuucagcaaggcccacg

SEQ ID NO: 2676331 - RNA, 19 nt, Artificial Sequence
  Description of Artificial Sequence: Synthetic oligonucleotide
cuucugacaagcuguccau

SEQ ID NO: 2676332 - RNA, 19 nt, Artificial Sequence
  Description of Artificial Sequence: Synthetic oligonucleotide
cagguaugucaacgucuuc

SEQ ID NO: 2676333 - RNA, 19 nt, Artificial Sequence
  Description of Artificial Sequence: Synthetic oligonucleotide
gcucgucuauaauucuguc

SEQ ID NO: 2676334 - RNA, 19 nt, Artificial Sequence
  Description of Artificial Sequence: Synthetic oligonucleotide
gugcaucccugcuggguuc

SEQ ID NO: 2676335 - RNA, 19 nt, Artificial Sequence
  Description of Artificial Sequence: Synthetic oligonucleotide
acuccauccuauagcggaa

SEQ ID NO: 2676336 - RNA, 19 nt, Artificial Sequence
  Description of Artificial Sequence: Synthetic oligonucleotide
cuauagcggaagggacuug

SEQ ID NO: 2676337 - RNA, 19 nt, Artificial Sequence
  Description of Artificial Sequence: Synthetic oligonucleotide
augcagccuuuccuacggu

SEQ ID NO: 2676338 - RNA, 19 nt, Artificial Sequence
  Description of Artificial Sequence: Synthetic oligonucleotide
accuuucagcaaggcccac

SEQ ID NO: 2676339 - RNA, 19 nt, Artificial Sequence
  Description of Artificial Sequence: Synthetic oligonucleotide
ccucacagucuaucucagc

SEQ ID NO: 2676340 - RNA, 19 nt, Artificial Sequence
  Description of Artificial Sequence: Synthetic oligonucleotide
ugaugccuguaaggcccug

SEQ ID NO: 2676341 - RNA, 19 nt, Artificial Sequence
  Description of Artificial Sequence: Synthetic oligonucleotide
agggacuugcgaauuccuu

SEQ ID NO: 2676342 - RNA, 19 nt, Artificial Sequence
  Description of Artificial Sequence: Synthetic oligonucleotide
cugcugagggcuucuucaa

SEQ ID NO: 2676343 - RNA, 19 nt, Artificial Sequence
  Description of Artificial Sequence: Synthetic oligonucleotide
agccuuuccuacgguaaua

SEQ ID NO: 2676344 - RNA, 19 nt, Artificial Sequence
  Description of Artificial Sequence: Synthetic oligonucleotide
gcagguagccagagucagg

SEQ ID NO: 2676345 - RNA, 19 nt, Artificial Sequence
  Description of Artificial Sequence: Synthetic oligonucleotide
guaugucaacgucuucaau

SEQ ID NO: 2676346 - RNA, 19 nt, Artificial Sequence
  Description of Artificial Sequence: Synthetic oligonucleotide
cacgccuuccucacagucu

SEQ ID NO: 2676347 - RNA, 19 nt, Artificial Sequence
  Description of Artificial Sequence: Synthetic oligonucleotide
caggcacaguugccccagg

SEQ ID NO: 2676348 - RNA, 19 nt, Artificial Sequence
  Description of Artificial Sequence: Synthetic oligonucleotide
caaggcccacgccuuccuc

SEQ ID NO: 2676349 - RNA, 19 nt, Artificial Sequence
  Description of Artificial Sequence: Synthetic oligonucleotide
guccccaugugaagugaca

SEQ ID NO: 2676350 - RNA, 19 nt, Artificial Sequence
  Description of Artificial Sequence: Synthetic oligonucleotide
ccaugugaagugacaccuc

SEQ ID NO: 2676351 - RNA, 19 nt, Artificial Sequence
  Description of Artificial Sequence: Synthetic oligonucleotide
aagugacaccucagcugaa

SEQ ID NO: 2676352 - RNA, 19 nt, Artificial Sequence
  Description of Artificial Sequence: Synthetic oligonucleotide
cccugcuggguucuugaug

SEQ ID NO: 2676353 - RNA, 19 nt, Artificial Sequence
  Description of Artificial Sequence: Synthetic oligonucleotide
guagccagagucaggugau

SEQ ID NO: 2676354 - RNA, 19 nt, Artificial Sequence
  Description of Artificial Sequence: Synthetic oligonucleotide
gugccucacauaggccagc

SEQ ID NO: 2676355 - RNA, 19 nt, Artificial Sequence
  Description of Artificial Sequence: Synthetic oligonucleotide
ggcuuccucaugcuggccu

SEQ ID NO: 2676356 - RNA, 19 nt, Artificial Sequence
  Description of Artificial Sequence: Synthetic oligonucleotide
ggccauggcucgucuauaa

SEQ ID NO: 2676357 - RNA, 19 nt, Artificial Sequence
  Description of Artificial Sequence: Synthetic oligonucleotide
gcagccuuuccuacgguaa

SEQ ID NO: 2676358 - RNA, 19 nt, Artificial Sequence
  Description of Artificial Sequence: Synthetic oligonucleotide
guaggagauggagagccuu

SEQ ID NO: 2676359 - RNA, 19 nt, Artificial Sequence
  Description of Artificial Sequence: Synthetic oligonucleotide
augcacccaggcacaguug

SEQ ID NO: 2676360 - RNA, 19 nt, Artificial Sequence
  Description of Artificial Sequence: Synthetic oligonucleotide
cugggucagggcuucugcu

SEQ ID NO: 2676361 - RNA, 19 nt, Artificial Sequence
  Description of Artificial Sequence: Synthetic oligonucleotide
cagucuaucucagcacacu

SEQ ID NO: 2676362 - RNA, 19 nt, Artificial Sequence
  Description of Artificial Sequence: Synthetic oligonucleotide
cagguugugcaucccugcu

SEQ ID NO: 2676363 - RNA, 19 nt, Artificial Sequence
  Description of Artificial Sequence: Synthetic oligonucleotide
cugaaccuccuccuggauu

SEQ ID NO: 2676364 - RNA, 19 nt, Artificial Sequence
  Description of Artificial Sequence: Synthetic oligonucleotide
gguaggccugggcuucuga

SEQ ID NO: 2676365 - RNA, 19 nt, Artificial Sequence
  Description of Artificial Sequence: Synthetic oligonucleotide
caguccccaugugaaguga

SEQ ID NO: 2676366 - RNA, 19 nt, Artificial Sequence
  Description of Artificial Sequence: Synthetic oligonucleotide
caggccauggcucgucuau

SEQ ID NO: 2676367 - RNA, 19 nt, Artificial Sequence
  Description of Artificial Sequence: Synthetic oligonucleotide
accucagcugaagcagauu

SEQ ID NO: 2676368 - RNA, 19 nt, Artificial Sequence
  Description of Artificial Sequence: Synthetic oligonucleotide
cgucuauaauucuguccuc

SEQ ID NO: 2676369 - RNA, 19 nt, Artificial Sequence
  Description of Artificial Sequence: Synthetic oligonucleotide
gcuggguucuugaugucua

SEQ ID NO: 2676370 - RNA, 19 nt, Artificial Sequence
  Description of Artificial Sequence: Synthetic oligonucleotide
cuaucucagcacacuccau

SEQ ID NO: 2676371 - RNA, 19 nt, Artificial Sequence
  Description of Artificial Sequence: Synthetic oligonucleotide
cagcacacuccauccuaua

SEQ ID NO: 2676372 - RNA, 19 nt, Artificial Sequence
  Description of Artificial Sequence: Synthetic oligonucleotide
cugacaagcuguccauguu

SEQ ID NO: 2676373 - RNA, 19 nt, Artificial Sequence
  Description of Artificial Sequence: Synthetic oligonucleotide
cacauaauuuuggcaggau

SEQ ID NO: 2676374 - RNA, 19 nt, Artificial Sequence
  Description of Artificial Sequence: Synthetic oligonucleotide
agguaggccugggcuucug

SEQ ID NO: 2676375 - RNA, 19 nt, Artificial Sequence
  Description of Artificial Sequence: Synthetic oligonucleotide
aggcccuguguaggagaug

SEQ ID NO: 2676376 - RNA, 19 nt, Artificial Sequence
  Description of Artificial Sequence: Synthetic oligonucleotide
ccauggcucgucuauaauu

SEQ ID NO: 2676377 - RNA, 19 nt, Artificial Sequence
  Description of Artificial Sequence: Synthetic oligonucleotide
aggccauggcucgucuaua

SEQ ID NO: 2676378 - RNA, 19 nt, Artificial Sequence
  Description of Artificial Sequence: Synthetic oligonucleotide
guccuccaccuuucagcaa

SEQ ID NO: 2676379 - RNA, 19 nt, Artificial Sequence
  Description of Artificial Sequence: Synthetic oligonucleotide
gcacccaggcacaguugcc

SEQ ID NO: 2676380 - RNA, 19 nt, Artificial Sequence
  Description of Artificial Sequence: Synthetic oligonucleotide
ccuuucaggugccucacau

SEQ ID NO: 2676381 - RNA, 19 nt, Artificial Sequence
  Description of Artificial Sequence: Synthetic oligonucleotide
caccucagcugaagcagau

SEQ ID NO: 2676382 - RNA, 19 nt, Artificial Sequence
  Description of Artificial Sequence: Synthetic oligonucleotide
gccuugucuaugcagccuu

SEQ ID NO: 2676383 - RNA, 19 nt, Artificial Sequence
  Description of Artificial Sequence: Synthetic oligonucleotide
gcggaagggacuugcgaau

SEQ ID NO: 2676384 - RNA, 19 nt, Artificial Sequence
  Description of Artificial Sequence: Synthetic oligonucleotide
ccagagucaggugaugccu

SEQ ID NO: 2676385 - RNA, 19 nt, Artificial Sequence
  Description of Artificial Sequence: Synthetic oligonucleotide
ccuuuccuacgguaauacu

SEQ ID NO: 2676386 - RNA, 19 nt, Artificial Sequence
  Description of Artificial Sequence: Synthetic oligonucleotide
gugaugccuguaaggcccu

SEQ ID NO: 2676387 - RNA, 19 nt, Artificial Sequence
  Description of Artificial Sequence: Synthetic oligonucleotide
ccuauagcggaagggacuu

SEQ ID NO: 2676388 - RNA, 19 nt, Artificial Sequence
  Description of Artificial Sequence: Synthetic oligonucleotide
gcaaggcccacgccuuccu

SEQ ID NO: 2676389 - RNA, 19 nt, Artificial Sequence
  Description of Artificial Sequence: Synthetic oligonucleotide
gccauggcucgucuauaau

SEQ ID NO: 2676390 - RNA, 19 nt, Artificial Sequence
  Description of Artificial Sequence: Synthetic oligonucleotide
gcauagcgaaacacauaau

SEQ ID NO: 2676391 - RNA, 19 nt, Artificial Sequence
  Description of Artificial Sequence: Synthetic oligonucleotide
ggcccacgccuuccucaca

SEQ ID NO: 2676392 - RNA, 19 nt, Artificial Sequence
  Description of Artificial Sequence: Synthetic oligonucleotide
cuuccucaugcuggccuuu

SEQ ID NO: 2676393 - RNA, 19 nt, Artificial Sequence
  Description of Artificial Sequence: Synthetic oligonucleotide
gccccaggucaccaggcuu

SEQ ID NO: 2676394 - RNA, 19 nt, Artificial Sequence
  Description of Artificial Sequence: Synthetic oligonucleotide
cagguaggccugggcuucu

SEQ ID NO: 2676395 - RNA, 19 nt, Artificial Sequence
  Description of Artificial Sequence: Synthetic oligonucleotide
ccuugucuaugcagccuuu

SEQ ID NO: 2676396 - RNA, 19 nt, Artificial Sequence
  Description of Artificial Sequence: Synthetic oligonucleotide
cccacgccuuccucacagu

SEQ ID NO: 2676397 - RNA, 19 nt, Artificial Sequence
  Description of Artificial Sequence: Synthetic oligonucleotide
cggaagggacuugcgaauu

SEQ ID NO: 2676398 - RNA, 19 nt, Artificial Sequence
  Description of Artificial Sequence: Synthetic oligonucleotide
cgguaauacuuggcugcau

SEQ ID NO: 2676399 - RNA, 19 nt, Artificial Sequence
  Description of Artificial Sequence: Synthetic oligonucleotide
cgccuuccucacagucuau

SEQ ID NO: 2676400 - RNA, 19 nt, Artificial Sequence
  Description of Artificial Sequence: Synthetic oligonucleotide
aauuauuugguguuuacag

SEQ ID NO: 2676401 - RNA, 19 nt, Artificial Sequence
  Description of Artificial Sequence: Synthetic oligonucleotide
auuccauagaagcagaagg

SEQ ID NO: 2676402 - RNA, 19 nt, Artificial Sequence
  Description of Artificial Sequence: Synthetic oligonucleotide
acaauagcaucccagagac

SEQ ID NO: 2676403 - RNA, 19 nt, Artificial Sequence
  Description of Artificial Sequence: Synthetic oligonucleotide
gauggugcuacuuucaugc

SEQ ID NO: 2676404 - RNA, 19 nt, Artificial Sequence
  Description of Artificial Sequence: Synthetic oligonucleotide
ucaugcuuagcucauagag

SEQ ID NO: 2676405 - RNA, 19 nt, Artificial Sequence
  Description of Artificial Sequence: Synthetic oligonucleotide
auagcauucauccaucauc

SEQ ID NO: 2676406 - RNA, 19 nt, Artificial Sequence
  Description of Artificial Sequence: Synthetic oligonucleotide
ucauccaucauccuggugu

SEQ ID NO: 2676407 - RNA, 19 nt, Artificial Sequence
  Description of Artificial Sequence: Synthetic oligonucleotide
aauagcaucccagagaccu

SEQ ID NO: 2676408 - RNA, 19 nt, Artificial Sequence
  Description of Artificial Sequence: Synthetic oligonucleotide
acaauguugucauacuucg

SEQ ID NO: 2676409 - RNA, 19 nt, Artificial Sequence
  Description of Artificial Sequence: Synthetic oligonucleotide
uuuacaggagauuccauag

SEQ ID NO: 2676410 - RNA, 19 nt, Artificial Sequence
  Description of Artificial Sequence: Synthetic oligonucleotide
uuauuugguguuuacagga

SEQ ID NO: 2676411 - RNA, 19 nt, Artificial Sequence
  Description of Artificial Sequence: Synthetic oligonucleotide
acaggggccaacuugaauc

SEQ ID NO: 2676412 - RNA, 19 nt, Artificial Sequence
  Description of Artificial Sequence: Synthetic oligonucleotide
cauagaagcagaaggacag

SEQ ID NO: 2676413 - RNA, 19 nt, Artificial Sequence
  Description of Artificial Sequence: Synthetic oligonucleotide
aauggugccaagucauagg

SEQ ID NO: 2676414 - RNA, 19 nt, Artificial Sequence
  Description of Artificial Sequence: Synthetic oligonucleotide
ucugauagcauucauccau

SEQ ID NO: 2676415 - RNA, 19 nt, Artificial Sequence
  Description of Artificial Sequence: Synthetic oligonucleotide
aauccaugcccagagaauc

SEQ ID NO: 2676416 - RNA, 19 nt, Artificial Sequence
  Description of Artificial Sequence: Synthetic oligonucleotide
uagcauucauccaucaucc

SEQ ID NO: 2676417 - RNA, 19 nt, Artificial Sequence
  Description of Artificial Sequence: Synthetic oligonucleotide
agucucaugcuccagcugg

SEQ ID NO: 2676418 - RNA, 19 nt, Artificial Sequence
  Description of Artificial Sequence: Synthetic oligonucleotide
agcaggaggaccuucuucg

SEQ ID NO: 2676419 - RNA, 19 nt, Artificial Sequence
  Description of Artificial Sequence: Synthetic oligonucleotide
uaagccuuucugauuaugc

SEQ ID NO: 2676420 - RNA, 19 nt, Artificial Sequence
  Description of Artificial Sequence: Synthetic oligonucleotide
agugaagcagccuuggaug

SEQ ID NO: 2676421 - RNA, 19 nt, Artificial Sequence
  Description of Artificial Sequence: Synthetic oligonucleotide
uuucaugcuuagcucauag

SEQ ID NO: 2676422 - RNA, 19 nt, Artificial Sequence
  Description of Artificial Sequence: Synthetic oligonucleotide
agugacugggaacagagga

SEQ ID NO: 2676423 - RNA, 19 nt, Artificial Sequence
  Description of Artificial Sequence: Synthetic oligonucleotide
gaagcaaguacuucuccag

SEQ ID NO: 2676424 - RNA, 19 nt, Artificial Sequence
  Description of Artificial Sequence: Synthetic oligonucleotide
gacgucuuccccaugaggg

SEQ ID NO: 2676425 - RNA, 19 nt, Artificial Sequence
  Description of Artificial Sequence: Synthetic oligonucleotide
caugcuuagcucauagagg

SEQ ID NO: 2676426 - RNA, 19 nt, Artificial Sequence
  Description of Artificial Sequence: Synthetic oligonucleotide
gaugacaauguugucauac

SEQ ID NO: 2676427 - RNA, 19 nt, Artificial Sequence
  Description of Artificial Sequence: Synthetic oligonucleotide
guugucauacuucgggugg

SEQ ID NO: 2676428 - RNA, 19 nt, Artificial Sequence
  Description of Artificial Sequence: Synthetic oligonucleotide
guccaugugagcuuccucg

SEQ ID NO: 2676429 - RNA, 19 nt, Artificial Sequence
  Description of Artificial Sequence: Synthetic oligonucleotide
ugguguagaaguccucugg

SEQ ID NO: 2676430 - RNA, 19 nt, Artificial Sequence
  Description of Artificial Sequence: Synthetic oligonucleotide
cucaguguagagaagcggc

SEQ ID NO: 2676431 - RNA, 19 nt, Artificial Sequence
  Description of Artificial Sequence: Synthetic oligonucleotide
uuccauagaagcagaagga

SEQ ID NO: 2676432 - RNA, 19 nt, Artificial Sequence
  Description of Artificial Sequence: Synthetic oligonucleotide
gauuaugcggcucugucca

SEQ ID NO: 2676433 - RNA, 19 nt, Artificial Sequence
  Description of Artificial Sequence: Synthetic oligonucleotide
agucauaggauggugcuac

SEQ ID NO: 2676434 - RNA, 19 nt, Artificial Sequence
  Description of Artificial Sequence: Synthetic oligonucleotide
auaggauggugcuacuuuc

SEQ ID NO: 2676435 - RNA, 19 nt, Artificial Sequence
  Description of Artificial Sequence: Synthetic oligonucleotide
uccgaucacaauagcaucc

SEQ ID NO: 2676436 - RNA, 19 nt, Artificial Sequence
  Description of Artificial Sequence: Synthetic oligonucleotide
uagagaagcggcucauucg

SEQ ID NO: 2676437 - RNA, 19 nt, Artificial Sequence
  Description of Artificial Sequence: Synthetic oligonucleotide
agccuuucugauuaugcgg

SEQ ID NO: 2676438 - RNA, 19 nt, Artificial Sequence
  Description of Artificial Sequence: Synthetic oligonucleotide
uauuugguguuuacaggag

SEQ ID NO: 2676439 - RNA, 19 nt, Artificial Sequence
  Description of Artificial Sequence: Synthetic oligonucleotide
ugggaaaagagauggacuc

SEQ ID NO: 2676440 - RNA, 19 nt, Artificial Sequence
  Description of Artificial Sequence: Synthetic oligonucleotide
aagcagaaggacaggagac

SEQ ID NO: 2676441 - RNA, 19 nt, Artificial Sequence
  Description of Artificial Sequence: Synthetic oligonucleotide
aggaucaauuauuuggugu

SEQ ID NO: 2676442 - RNA, 19 nt, Artificial Sequence
  Description of Artificial Sequence: Synthetic oligonucleotide
uaugcagugaagcagccuu

SEQ ID NO: 2676443 - RNA, 19 nt, Artificial Sequence
  Description of Artificial Sequence: Synthetic oligonucleotide
ucuggggaugggaaaagag

SEQ ID NO: 2676444 - RNA, 19 nt, Artificial Sequence
  Description of Artificial Sequence: Synthetic oligonucleotide
ugguaugcagugaagcagc

SEQ ID NO: 2676445 - RNA, 19 nt, Artificial Sequence
  Description of Artificial Sequence: Synthetic oligonucleotide
aaauggugccaagucauag

SEQ ID NO: 2676446 - RNA, 19 nt, Artificial Sequence
  Description of Artificial Sequence: Synthetic oligonucleotide
ucgaaauggugccaaguca

SEQ ID NO: 2676447 - RNA, 19 nt, Artificial Sequence
  Description of Artificial Sequence: Synthetic oligonucleotide
ugauuaugcggcucugucc

SEQ ID NO: 2676448 - RNA, 19 nt, Artificial Sequence
  Description of Artificial Sequence: Synthetic oligonucleotide
uguugucauacuucgggug

SEQ ID NO: 2676449 - RNA, 19 nt, Artificial Sequence
  Description of Artificial Sequence: Synthetic oligonucleotide
uuugguguuuacaggagau

SEQ ID NO: 2676450 - RNA, 19 nt, Artificial Sequence
  Description of Artificial Sequence: Synthetic oligonucleotide
gaugggaaaagagauggac

SEQ ID NO: 2676451 - RNA, 19 nt, Artificial Sequence
  Description of Artificial Sequence: Synthetic oligonucleotide
uguagaaguccucuggaua

SEQ ID NO: 2676452 - RNA, 19 nt, Artificial Sequence
  Description of Artificial Sequence: Synthetic oligonucleotide
uucgaaauggugccaaguc

SEQ ID NO: 2676453 - RNA, 19 nt, Artificial Sequence
  Description of Artificial Sequence: Synthetic oligonucleotide
gaucacaauagcaucccag

SEQ ID NO: 2676454 - RNA, 19 nt, Artificial Sequence
  Description of Artificial Sequence: Synthetic oligonucleotide
uuucugauuaugcggcucu

SEQ ID NO: 2676455 - RNA, 19 nt, Artificial Sequence
  Description of Artificial Sequence: Synthetic oligonucleotide
ucaaaggugggcuuugcuc

SEQ ID NO: 2676456 - RNA, 19 nt, Artificial Sequence
  Description of Artificial Sequence: Synthetic oligonucleotide
aucacaauagcaucccaga

SEQ ID NO: 2676457 - RNA, 19 nt, Artificial Sequence
  Description of Artificial Sequence: Synthetic oligonucleotide
gaucuuccccacaacaggg

SEQ ID NO: 2676458 - RNA, 19 nt, Artificial Sequence
  Description of Artificial Sequence: Synthetic oligonucleotide
acaugccauggcuacuucc

SEQ ID NO: 2676459 - RNA, 19 nt, Artificial Sequence
  Description of Artificial Sequence: Synthetic oligonucleotide
ugcucaguguagagaagcg

SEQ ID NO: 2676460 - RNA, 19 nt, Artificial Sequence
  Description of Artificial Sequence: Synthetic oligonucleotide
ucucuggcugacuuucugg

SEQ ID NO: 2676461 - RNA, 19 nt, Artificial Sequence
  Description of Artificial Sequence: Synthetic oligonucleotide
aggugguaugcagugaagc

SEQ ID NO: 2676462 - RNA, 19 nt, Artificial Sequence
  Description of Artificial Sequence: Synthetic oligonucleotide
acaggagacaugccauggc

SEQ ID NO: 2676463 - RNA, 19 nt, Artificial Sequence
  Description of Artificial Sequence: Synthetic oligonucleotide
ugcaauugggcuccagucu

SEQ ID NO: 2676464 - RNA, 19 nt, Artificial Sequence
  Description of Artificial Sequence: Synthetic oligonucleotide
gauuccauagaagcagaag

SEQ ID NO: 2676465 - RNA, 19 nt, Artificial Sequence
  Description of Artificial Sequence: Synthetic oligonucleotide
agagaagcggcucauucga

SEQ ID NO: 2676466 - RNA, 19 nt, Artificial Sequence
  Description of Artificial Sequence: Synthetic oligonucleotide
ugugcaauugggcuccagu

SEQ ID NO: 2676467 - RNA, 19 nt, Artificial Sequence
  Description of Artificial Sequence: Synthetic oligonucleotide
gggaugggaaaagagaugg

SEQ ID NO: 2676468 - RNA, 19 nt, Artificial Sequence
  Description of Artificial Sequence: Synthetic oligonucleotide
ucuccuagacgucuucccc

SEQ ID NO: 2676469 - RNA, 19 nt, Artificial Sequence
  Description of Artificial Sequence: Synthetic oligonucleotide
ugcuccgaucacaauagca

SEQ ID NO: 2676470 - RNA, 19 nt, Artificial Sequence
  Description of Artificial Sequence: Synthetic oligonucleotide
agccuuggaugccugcucc

SEQ ID NO: 2676471 - RNA, 19 nt, Artificial Sequence
  Description of Artificial Sequence: Synthetic oligonucleotide
gaauccagcaccgaugaca

SEQ ID NO: 2676472 - RNA, 19 nt, Artificial Sequence
  Description of Artificial Sequence: Synthetic oligonucleotide
ggugccaagucauaggaug

SEQ ID NO: 2676473 - RNA, 19 nt, Artificial Sequence
  Description of Artificial Sequence: Synthetic oligonucleotide
ccaacuugaauccaugccc

SEQ ID NO: 2676474 - RNA, 19 nt, Artificial Sequence
  Description of Artificial Sequence: Synthetic oligonucleotide
uuacaggagauuccauaga

SEQ ID NO: 2676475 - RNA, 19 nt, Artificial Sequence
  Description of Artificial Sequence: Synthetic oligonucleotide
uccaugugagcuuccucgg

SEQ ID NO: 2676476 - RNA, 19 nt, Artificial Sequence
  Description of Artificial Sequence: Synthetic oligonucleotide
uugcucaguguagagaagc

SEQ ID NO: 2676477 - RNA, 19 nt, Artificial Sequence
  Description of Artificial Sequence: Synthetic oligonucleotide
aaaggugggcuuugcucag

SEQ ID NO: 2676478 - RNA, 19 nt, Artificial Sequence
  Description of Artificial Sequence: Synthetic oligonucleotide
gagaauccagcaccgauga

SEQ ID NO: 2676479 - RNA, 19 nt, Artificial Sequence
  Description of Artificial Sequence: Synthetic oligonucleotide
ugggcuuugcucaguguag

SEQ ID NO: 2676480 - RNA, 19 nt, Artificial Sequence
  Description of Artificial Sequence: Synthetic oligonucleotide
auuugguguuuacaggaga

SEQ ID NO: 2676481 - RNA, 19 nt, Artificial Sequence
  Description of Artificial Sequence: Synthetic oligonucleotide
cucuggcugacuuucuggg

SEQ ID NO: 2676482 - RNA, 19 nt, Artificial Sequence
  Description of Artificial Sequence: Synthetic oligonucleotide
agcaaguacuucuccagca

SEQ ID NO: 2676483 - RNA, 19 nt, Artificial Sequence
  Description of Artificial Sequence: Synthetic oligonucleotide
auggacucaggagagugac

SEQ ID NO: 2676484 - RNA, 19 nt, Artificial Sequence
  Description of Artificial Sequence: Synthetic oligonucleotide
uacuuccuucuccuagacg

SEQ ID NO: 2676485 - RNA, 19 nt, Artificial Sequence
  Description of Artificial Sequence: Synthetic oligonucleotide
aucccagagaccuuucuga

SEQ ID NO: 2676486 - RNA, 19 nt, Artificial Sequence
  Description of Artificial Sequence: Synthetic oligonucleotide
guagaaguccucuggauaa

SEQ ID NO: 2676487 - RNA, 19 nt, Artificial Sequence
  Description of Artificial Sequence: Synthetic oligonucleotide
ucaguguagagaagcggcu

SEQ ID NO: 2676488 - RNA, 19 nt, Artificial Sequence
  Description of Artificial Sequence: Synthetic oligonucleotide
ugagcuuccucgggaaugg

SEQ ID NO: 2676489 - RNA, 19 nt, Artificial Sequence
  Description of Artificial Sequence: Synthetic oligonucleotide
auggugccaagucauagga

SEQ ID NO: 2676490 - RNA, 19 nt, Artificial Sequence
  Description of Artificial Sequence: Synthetic oligonucleotide
ucuggcugacuuucugggg

SEQ ID NO: 2676491 - RNA, 19 nt, Artificial Sequence
  Description of Artificial Sequence: Synthetic oligonucleotide
ggaucuuccccacaacagg

SEQ ID NO: 2676492 - RNA, 19 nt, Artificial Sequence
  Description of Artificial Sequence: Synthetic oligonucleotide
uccauagaagcagaaggac

SEQ ID NO: 2676493 - RNA, 19 nt, Artificial Sequence
  Description of Artificial Sequence: Synthetic oligonucleotide
ugacaauguugucauacuu

SEQ ID NO: 2676494 - RNA, 19 nt, Artificial Sequence
  Description of Artificial Sequence: Synthetic oligonucleotide
caaaggugggcuuugcuca

SEQ ID NO: 2676495 - RNA, 19 nt, Artificial Sequence
  Description of Artificial Sequence: Synthetic oligonucleotide
uuugcucaguguagagaag

SEQ ID NO: 2676496 - RNA, 19 nt, Artificial Sequence
  Description of Artificial Sequence: Synthetic oligonucleotide
aguguagagaagcggcuca

SEQ ID NO: 2676497 - RNA, 19 nt, Artificial Sequence
  Description of Artificial Sequence: Synthetic oligonucleotide
agaggaucaauuauuuggu

SEQ ID NO: 2676498 - RNA, 19 nt, Artificial Sequence
  Description of Artificial Sequence: Synthetic oligonucleotide
acucaggagagugacuggg

SEQ ID NO: 2676499 - RNA, 19 nt, Artificial Sequence
  Description of Artificial Sequence: Synthetic oligonucleotide
agcggcucauucgaaaugg

SEQ ID NO: 2676500 - RNA, 19 nt, Artificial Sequence
  Description of Artificial Sequence: Synthetic oligonucleotide
uucuccuagacgucuuccc

SEQ ID NO: 2676501 - RNA, 19 nt, Artificial Sequence
  Description of Artificial Sequence: Synthetic oligonucleotide
acagaggaucaauuauuug

SEQ ID NO: 2676502 - RNA, 19 nt, Artificial Sequence
  Description of Artificial Sequence: Synthetic oligonucleotide
accgaugacaauguuguca

SEQ ID NO: 2676503 - RNA, 19 nt, Artificial Sequence
  Description of Artificial Sequence: Synthetic oligonucleotide
gaaaagagauggacucagg

SEQ ID NO: 2676504 - RNA, 19 nt, Artificial Sequence
  Description of Artificial Sequence: Synthetic oligonucleotide
cacaacaggggccaacuug

SEQ ID NO: 2676505 - RNA, 19 nt, Artificial Sequence
  Description of Artificial Sequence: Synthetic oligonucleotide
agacgucuuccccaugagg

SEQ ID NO: 2676506 - RNA, 19 nt, Artificial Sequence
  Description of Artificial Sequence: Synthetic oligonucleotide
auggcuacuuccuucuccu

SEQ ID NO: 2676507 - RNA, 19 nt, Artificial Sequence
  Description of Artificial Sequence: Synthetic oligonucleotide
cuacuuucaugcuuagcuc

SEQ ID NO: 2676508 - RNA, 19 nt, Artificial Sequence
  Description of Artificial Sequence: Synthetic oligonucleotide
gagagagucagcugugguc

SEQ ID NO: 2676509 - RNA, 19 nt, Artificial Sequence
  Description of Artificial Sequence: Synthetic oligonucleotide
cgucugauagcauucaucc

SEQ ID NO: 2676510 - RNA, 19 nt, Artificial Sequence
  Description of Artificial Sequence: Synthetic oligonucleotide
augacaauguugucauacu

SEQ ID NO: 2676511 - RNA, 19 nt, Artificial Sequence
  Description of Artificial Sequence: Synthetic oligonucleotide
uguuuggccaggugguaug

SEQ ID NO: 2676512 - RNA, 19 nt, Artificial Sequence
  Description of Artificial Sequence: Synthetic oligonucleotide
gaggaucuuccccacaaca

SEQ ID NO: 2676513 - RNA, 19 nt, Artificial Sequence
  Description of Artificial Sequence: Synthetic oligonucleotide
guagagaagcggcucauuc

SEQ ID NO: 2676514 - RNA, 19 nt, Artificial Sequence
  Description of Artificial Sequence: Synthetic oligonucleotide
aagcggcucauucgaaaug

SEQ ID NO: 2676515 - RNA, 19 nt, Artificial Sequence
  Description of Artificial Sequence: Synthetic oligonucleotide
ugauagcauucauccauca

SEQ ID NO: 2676516 - RNA, 19 nt, Artificial Sequence
  Description of Artificial Sequence: Synthetic oligonucleotide
uggaugccugcuccgauca

SEQ ID NO: 2676517 - RNA, 19 nt, Artificial Sequence
  Description of Artificial Sequence: Synthetic oligonucleotide
ugcggcucuguccauguga

SEQ ID NO: 2676518 - RNA, 19 nt, Artificial Sequence
  Description of Artificial Sequence: Synthetic oligonucleotide
gugguaugcagugaagcag

SEQ ID NO: 2676519 - RNA, 19 nt, Artificial Sequence
  Description of Artificial Sequence: Synthetic oligonucleotide
ucccagagaccuuucugag

SEQ ID NO: 2676520 - RNA, 19 nt, Artificial Sequence
  Description of Artificial Sequence: Synthetic oligonucleotide
agaggaucuuccccacaac

SEQ ID NO: 2676521 - RNA, 19 nt, Artificial Sequence
  Description of Artificial Sequence: Synthetic oligonucleotide
aaguacuucuccagcagga

SEQ ID NO: 2676522 - RNA, 19 nt, Artificial Sequence
  Description of Artificial Sequence: Synthetic oligonucleotide
aauccagcaccgaugacaa

SEQ ID NO: 2676523 - RNA, 19 nt, Artificial Sequence
  Description of Artificial Sequence: Synthetic oligonucleotide
auguugucauacuucgggu

SEQ ID NO: 2676524 - RNA, 19 nt, Artificial Sequence
  Description of Artificial Sequence: Synthetic oligonucleotide
ugcagugaagcagccuugg

SEQ ID NO: 2676525 - RNA, 19 nt, Artificial Sequence
  Description of Artificial Sequence: Synthetic oligonucleotide
gcuacuuucaugcuuagcu

SEQ ID NO: 2676526 - RNA, 19 nt, Artificial Sequence
  Description of Artificial Sequence: Synthetic oligonucleotide
agagauggacucaggagag

SEQ ID NO: 2676527 - RNA, 19 nt, Artificial Sequence
  Description of Artificial Sequence: Synthetic oligonucleotide
guuuacaggagauuccaua

SEQ ID NO: 2676528 - RNA, 19 nt, Artificial Sequence
  Description of Artificial Sequence: Synthetic oligonucleotide
ggcucauucgaaauggugc

SEQ ID NO: 2676529 - RNA, 19 nt, Artificial Sequence
  Description of Artificial Sequence: Synthetic oligonucleotide
aggaggaccuucuucgagu

SEQ ID NO: 2676530 - RNA, 19 nt, Artificial Sequence
  Description of Artificial Sequence: Synthetic oligonucleotide
gaaguccucuggauaagcc

SEQ ID NO: 2676531 - RNA, 19 nt, Artificial Sequence
  Description of Artificial Sequence: Synthetic oligonucleotide
cacaauagcaucccagaga

SEQ ID NO: 2676532 - RNA, 19 nt, Artificial Sequence
  Description of Artificial Sequence: Synthetic oligonucleotide
agagaauccagcaccgaug

SEQ ID NO: 2676533 - RNA, 19 nt, Artificial Sequence
  Description of Artificial Sequence: Synthetic oligonucleotide
cuucuucgaguguuuggcc

SEQ ID NO: 2676534 - RNA, 19 nt, Artificial Sequence
  Description of Artificial Sequence: Synthetic oligonucleotide
uuccccaugaggguucucc

SEQ ID NO: 2676535 - RNA, 19 nt, Artificial Sequence
  Description of Artificial Sequence: Synthetic oligonucleotide
uucaugcuuagcucauaga

SEQ ID NO: 2676536 - RNA, 19 nt, Artificial Sequence
  Description of Artificial Sequence: Synthetic oligonucleotide
gacucaggagagugacugg

SEQ ID NO: 2676537 - RNA, 19 nt, Artificial Sequence
  Description of Artificial Sequence: Synthetic oligonucleotide
gcucauucgaaauggugcc

SEQ ID NO: 2676538 - RNA, 19 nt, Artificial Sequence
  Description of Artificial Sequence: Synthetic oligonucleotide
uccaucauccugguguaga

SEQ ID NO: 2676539 - RNA, 19 nt, Artificial Sequence
  Description of Artificial Sequence: Synthetic oligonucleotide
cugauagcauucauccauc

SEQ ID NO: 2676540 - RNA, 19 nt, Artificial Sequence
  Description of Artificial Sequence: Synthetic oligonucleotide
cugauuaugcggcucuguc

SEQ ID NO: 2676541 - RNA, 19 nt, Artificial Sequence
  Description of Artificial Sequence: Synthetic oligonucleotide
acaacaggggccaacuuga

SEQ ID NO: 2676542 - RNA, 19 nt, Artificial Sequence
  Description of Artificial Sequence: Synthetic oligonucleotide
caggggccaacuugaaucc

SEQ ID NO: 2676543 - RNA, 19 nt, Artificial Sequence
  Description of Artificial Sequence: Synthetic oligonucleotide
gcauucauccaucauccug

SEQ ID NO: 2676544 - RNA, 19 nt, Artificial Sequence
  Description of Artificial Sequence: Synthetic oligonucleotide
acgucugauagcauucauc

SEQ ID NO: 2676545 - RNA, 19 nt, Artificial Sequence
  Description of Artificial Sequence: Synthetic oligonucleotide
cuuccccacaacaggggcc

SEQ ID NO: 2676546 - RNA, 19 nt, Artificial Sequence
  Description of Artificial Sequence: Synthetic oligonucleotide
ucauucgaaauggugccaa

SEQ ID NO: 2676547 - RNA, 19 nt, Artificial Sequence
  Description of Artificial Sequence: Synthetic oligonucleotide
ggauaagccuuucugauua

SEQ ID NO: 2676548 - RNA, 19 nt, Artificial Sequence
  Description of Artificial Sequence: Synthetic oligonucleotide
auacuucggguggcaaucc

SEQ ID NO: 2676549 - RNA, 19 nt, Artificial Sequence
  Description of Artificial Sequence: Synthetic oligonucleotide
cauacuucggguggcaauc

SEQ ID NO: 2676550 - RNA, 19 nt, Artificial Sequence
  Description of Artificial Sequence: Synthetic oligonucleotide
gugccaagucauaggaugg

SEQ ID NO: 2676551 - RNA, 19 nt, Artificial Sequence
  Description of Artificial Sequence: Synthetic oligonucleotide
ugggaacagaggaucaauu

SEQ ID NO: 2676552 - RNA, 19 nt, Artificial Sequence
  Description of Artificial Sequence: Synthetic oligonucleotide
ucauacuucggguggcaau

SEQ ID NO: 2676553 - RNA, 19 nt, Artificial Sequence
  Description of Artificial Sequence: Synthetic oligonucleotide
agaagcagaaggacaggag

SEQ ID NO: 2676554 - RNA, 19 nt, Artificial Sequence
  Description of Artificial Sequence: Synthetic oligonucleotide
gguggcaauccucagucug

SEQ ID NO: 2676555 - RNA, 19 nt, Artificial Sequence
  Description of Artificial Sequence: Synthetic oligonucleotide
uugaauccaugcccagaga

SEQ ID NO: 2676556 - RNA, 19 nt, Artificial Sequence
  Description of Artificial Sequence: Synthetic oligonucleotide
agcaccgaugacaauguug

SEQ ID NO: 2676557 - RNA, 19 nt, Artificial Sequence
  Description of Artificial Sequence: Synthetic oligonucleotide
agucugccugugcaauugg

SEQ ID NO: 2676558 - RNA, 19 nt, Artificial Sequence
  Description of Artificial Sequence: Synthetic oligonucleotide
gugcaauugggcuccaguc

SEQ ID NO: 2676559 - RNA, 19 nt, Artificial Sequence
  Description of Artificial Sequence: Synthetic oligonucleotide
uuucuggggaugggaaaag

SEQ ID NO: 2676560 - RNA, 19 nt, Artificial Sequence
  Description of Artificial Sequence: Synthetic oligonucleotide
caucccagagaccuuucug

SEQ ID NO: 2676561 - RNA, 19 nt, Artificial Sequence
  Description of Artificial Sequence: Synthetic oligonucleotide
uaugcggcucuguccaugu

SEQ ID NO: 2676562 - RNA, 19 nt, Artificial Sequence
  Description of Artificial Sequence: Synthetic oligonucleotide
cuagacgucuuccccauga

SEQ ID NO: 2676563 - RNA, 19 nt, Artificial Sequence
  Description of Artificial Sequence: Synthetic oligonucleotide
ccaagucauaggauggugc

SEQ ID NO: 2676564 - RNA, 19 nt, Artificial Sequence
  Description of Artificial Sequence: Synthetic oligonucleotide
gccaacuugaauccaugcc

SEQ ID NO: 2676565 - RNA, 19 nt, Artificial Sequence
  Description of Artificial Sequence: Synthetic oligonucleotide
auucgaaauggugccaagu

SEQ ID NO: 2676566 - RNA, 19 nt, Artificial Sequence
  Description of Artificial Sequence: Synthetic oligonucleotide
agaagcggcucauucgaaa

SEQ ID NO: 2676567 - RNA, 19 nt, Artificial Sequence
  Description of Artificial Sequence: Synthetic oligonucleotide
agaauccagcaccgaugac

SEQ ID NO: 2676568 - RNA, 19 nt, Artificial Sequence
  Description of Artificial Sequence: Synthetic oligonucleotide
ugacuuucuggggauggga

SEQ ID NO: 2676569 - RNA, 19 nt, Artificial Sequence
  Description of Artificial Sequence: Synthetic oligonucleotide
uggauaagccuuucugauu

SEQ ID NO: 2676570 - RNA, 19 nt, Artificial Sequence
  Description of Artificial Sequence: Synthetic oligonucleotide
ggcuacuuccuucuccuag

SEQ ID NO: 2676571 - RNA, 19 nt, Artificial Sequence
  Description of Artificial Sequence: Synthetic oligonucleotide
cauucgaaauggugccaag

SEQ ID NO: 2676572 - RNA, 19 nt, Artificial Sequence
  Description of Artificial Sequence: Synthetic oligonucleotide
caauuauuugguguuuaca

SEQ ID NO: 2676573 - RNA, 19 nt, Artificial Sequence
  Description of Artificial Sequence: Synthetic oligonucleotide
auaagccuuucugauuaug

SEQ ID NO: 2676574 - RNA, 19 nt, Artificial Sequence
  Description of Artificial Sequence: Synthetic oligonucleotide
gcccagagaauccagcacc

SEQ ID NO: 2676575 - RNA, 19 nt, Artificial Sequence
  Description of Artificial Sequence: Synthetic oligonucleotide
ucugauuaugcggcucugu

SEQ ID NO: 2676576 - RNA, 19 nt, Artificial Sequence
  Description of Artificial Sequence: Synthetic oligonucleotide
uggugcuacuuucaugcuu

SEQ ID NO: 2676577 - RNA, 19 nt, Artificial Sequence
  Description of Artificial Sequence: Synthetic oligonucleotide
ucggguggcaauccucagu

SEQ ID NO: 2676578 - RNA, 19 nt, Artificial Sequence
  Description of Artificial Sequence: Synthetic oligonucleotide
uugucauacuucggguggc

SEQ ID NO: 2676579 - RNA, 19 nt, Artificial Sequence
  Description of Artificial Sequence: Synthetic oligonucleotide
caggagagugacugggaac

SEQ ID NO: 2676580 - RNA, 19 nt, Artificial Sequence
  Description of Artificial Sequence: Synthetic oligonucleotide
aauggggaagcaaguacuu

SEQ ID NO: 2676581 - RNA, 19 nt, Artificial Sequence
  Description of Artificial Sequence: Synthetic oligonucleotide
uagcucauagaggaucuuc

SEQ ID NO: 2676582 - RNA, 19 nt, Artificial Sequence
  Description of Artificial Sequence: Synthetic oligonucleotide
ggugguaugcagugaagca

SEQ ID NO: 2676583 - RNA, 19 nt, Artificial Sequence
  Description of Artificial Sequence: Synthetic oligonucleotide
cugggcccacgucugauag

SEQ ID NO: 2676584 - RNA, 19 nt, Artificial Sequence
  Description of Artificial Sequence: Synthetic oligonucleotide
cuucuccuagacgucuucc

SEQ ID NO: 2676585 - RNA, 19 nt, Artificial Sequence
  Description of Artificial Sequence: Synthetic oligonucleotide
cuucggguggcaauccuca

SEQ ID NO: 2676586 - RNA, 19 nt, Artificial Sequence
  Description of Artificial Sequence: Synthetic oligonucleotide
ugccugugcaauugggcuc

SEQ ID NO: 2676587 - RNA, 19 nt, Artificial Sequence
  Description of Artificial Sequence: Synthetic oligonucleotide
uuaugcggcucuguccaug

SEQ ID NO: 2676588 - RNA, 19 nt, Artificial Sequence
  Description of Artificial Sequence: Synthetic oligonucleotide
uuggaugccugcuccgauc

SEQ ID NO: 2676589 - RNA, 19 nt, Artificial Sequence
  Description of Artificial Sequence: Synthetic oligonucleotide
uguccaugugagcuuccuc

SEQ ID NO: 2676590 - RNA, 19 nt, Artificial Sequence
  Description of Artificial Sequence: Synthetic oligonucleotide
aggagagagucagcugugg

SEQ ID NO: 2676591 - RNA, 19 nt, Artificial Sequence
  Description of Artificial Sequence: Synthetic oligonucleotide
uggccaggugguaugcagu

SEQ ID NO: 2676592 - RNA, 19 nt, Artificial Sequence
  Description of Artificial Sequence: Synthetic oligonucleotide
uccaugcccagagaaucca

SEQ ID NO: 2676593 - RNA, 19 nt, Artificial Sequence
  Description of Artificial Sequence: Synthetic oligonucleotide
ugaagcagccuuggaugcc

SEQ ID NO: 2676594 - RNA, 19 nt, Artificial Sequence
  Description of Artificial Sequence: Synthetic oligonucleotide
gagauuccauagaagcaga

SEQ ID NO: 2676595 - RNA, 19 nt, Artificial Sequence
  Description of Artificial Sequence: Synthetic oligonucleotide
caggaggaccuucuucgag

SEQ ID NO: 2676596 - RNA, 19 nt, Artificial Sequence
  Description of Artificial Sequence: Synthetic oligonucleotide
agcagaaggacaggagaca

SEQ ID NO: 2676597 - RNA, 19 nt, Artificial Sequence
  Description of Artificial Sequence: Synthetic oligonucleotide
ccuucuucgaguguuuggc

SEQ ID NO: 2676598 - RNA, 19 nt, Artificial Sequence
  Description of Artificial Sequence: Synthetic oligonucleotide
acuucggguggcaauccuc

SEQ ID NO: 2676599 - RNA, 19 nt, Artificial Sequence
  Description of Artificial Sequence: Synthetic oligonucleotide
ccagagaccuuucugagca

SEQ ID NO: 2676600 - RNA, 19 nt, Artificial Sequence
  Description of Artificial Sequence: Synthetic oligonucleotide
uuccucgggaauggggaag

SEQ ID NO: 2676601 - RNA, 19 nt, Artificial Sequence
  Description of Artificial Sequence: Synthetic oligonucleotide
cuuagcucauagaggaucu

SEQ ID NO: 2676602 - RNA, 19 nt, Artificial Sequence
  Description of Artificial Sequence: Synthetic oligonucleotide
gguguagaaguccucugga

SEQ ID NO: 2676603 - RNA, 19 nt, Artificial Sequence
  Description of Artificial Sequence: Synthetic oligonucleotide
cagaaggacaggagacaug

SEQ ID NO: 2676604 - RNA, 19 nt, Artificial Sequence
  Description of Artificial Sequence: Synthetic oligonucleotide
uccucgggaauggggaagc

SEQ ID NO: 2676605 - RNA, 19 nt, Artificial Sequence
  Description of Artificial Sequence: Synthetic oligonucleotide
guggcaauccucagucugc

SEQ ID NO: 2676606 - RNA, 19 nt, Artificial Sequence
  Description of Artificial Sequence: Synthetic oligonucleotide
agagaccuuucugagcagu

SEQ ID NO: 2676607 - RNA, 19 nt, Artificial Sequence
  Description of Artificial Sequence: Synthetic oligonucleotide
uacuucggguggcaauccu

SEQ ID NO: 2676608 - RNA, 19 nt, Artificial Sequence
  Description of Artificial Sequence: Synthetic oligonucleotide
caauagcaucccagagacc

SEQ ID NO: 2676609 - RNA, 19 nt, Artificial Sequence
  Description of Artificial Sequence: Synthetic oligonucleotide
uccuagacgucuuccccau

SEQ ID NO: 2676610 - RNA, 19 nt, Artificial Sequence
  Description of Artificial Sequence: Synthetic oligonucleotide
uguggucaaaggugggcuu

SEQ ID NO: 2676611 - RNA, 19 nt, Artificial Sequence
  Description of Artificial Sequence: Synthetic oligonucleotide
ugcuacuuucaugcuuagc

SEQ ID NO: 2676612 - RNA, 19 nt, Artificial Sequence
  Description of Artificial Sequence: Synthetic oligonucleotide
uucggguggcaauccucag

SEQ ID NO: 2676613 - RNA, 19 nt, Artificial Sequence
  Description of Artificial Sequence: Synthetic oligonucleotide
caagucauaggauggugcu

SEQ ID NO: 2676614 - RNA, 19 nt, Artificial Sequence
  Description of Artificial Sequence: Synthetic oligonucleotide
acgucuuccccaugagggu

SEQ ID NO: 2676615 - RNA, 19 nt, Artificial Sequence
  Description of Artificial Sequence: Synthetic oligonucleotide
gcaauugggcuccagucuc

SEQ ID NO: 2676616 - RNA, 19 nt, Artificial Sequence
  Description of Artificial Sequence: Synthetic oligonucleotide
aauccucagucugccugug

SEQ ID NO: 2676617 - RNA, 19 nt, Artificial Sequence
  Description of Artificial Sequence: Synthetic oligonucleotide
gugggcuuugcucagugua

SEQ ID NO: 2676618 - RNA, 19 nt, Artificial Sequence
  Description of Artificial Sequence: Synthetic oligonucleotide
caucauccugguguagaag

SEQ ID NO: 2676619 - RNA, 19 nt, Artificial Sequence
  Description of Artificial Sequence: Synthetic oligonucleotide
caggagagagucagcugug

SEQ ID NO: 2676620 - RNA, 19 nt, Artificial Sequence
  Description of Artificial Sequence: Synthetic oligonucleotide
ugucauacuucggguggca

SEQ ID NO: 2676621 - RNA, 19 nt, Artificial Sequence
  Description of Artificial Sequence: Synthetic oligonucleotide
caugaggguucuccucccc

SEQ ID NO: 2676622 - RNA, 19 nt, Artificial Sequence
  Description of Artificial Sequence: Synthetic oligonucleotide
ggauggugcuacuuucaug

SEQ ID NO: 2676623 - RNA, 19 nt, Artificial Sequence
  Description of Artificial Sequence: Synthetic oligonucleotide
aggaccuucuucgaguguu

SEQ ID NO: 2676624 - RNA, 19 nt, Artificial Sequence
  Description of Artificial Sequence: Synthetic oligonucleotide
gauggacucaggagaguga

SEQ ID NO: 2676625 - RNA, 19 nt, Artificial Sequence
  Description of Artificial Sequence: Synthetic oligonucleotide
gauagcauucauccaucau

SEQ ID NO: 2676626 - RNA, 19 nt, Artificial Sequence
  Description of Artificial Sequence: Synthetic oligonucleotide
uucugauuaugcggcucug

SEQ ID NO: 2676627 - RNA, 19 nt, Artificial Sequence
  Description of Artificial Sequence: Synthetic oligonucleotide
ggaggaccuucuucgagug

SEQ ID NO: 2676628 - RNA, 19 nt, Artificial Sequence
  Description of Artificial Sequence: Synthetic oligonucleotide
aagucauaggauggugcua

SEQ ID NO: 2676629 - RNA, 19 nt, Artificial Sequence
  Description of Artificial Sequence: Synthetic oligonucleotide
gggaagcaaguacuucucc

SEQ ID NO: 2676630 - RNA, 19 nt, Artificial Sequence
  Description of Artificial Sequence: Synthetic oligonucleotide
ugccaagucauaggauggu

SEQ ID NO: 2676631 - RNA, 19 nt, Artificial Sequence
  Description of Artificial Sequence: Synthetic oligonucleotide
gcucaguguagagaagcgg

SEQ ID NO: 2676632 - RNA, 19 nt, Artificial Sequence
  Description of Artificial Sequence: Synthetic oligonucleotide
uggugccaagucauaggau

SEQ ID NO: 2676633 - RNA, 19 nt, Artificial Sequence
  Description of Artificial Sequence: Synthetic oligonucleotide
cccaugaggguucuccucc

SEQ ID NO: 2676634 - RNA, 19 nt, Artificial Sequence
  Description of Artificial Sequence: Synthetic oligonucleotide
cuccuagacgucuucccca

SEQ ID NO: 2676635 - RNA, 19 nt, Artificial Sequence
  Description of Artificial Sequence: Synthetic oligonucleotide
gucugccugugcaauuggg

SEQ ID NO: 2676636 - RNA, 19 nt, Artificial Sequence
  Description of Artificial Sequence: Synthetic oligonucleotide
agcauucauccaucauccu

SEQ ID NO: 2676637 - RNA, 19 nt, Artificial Sequence
  Description of Artificial Sequence: Synthetic oligonucleotide
gucugauagcauucaucca

SEQ ID NO: 2676638 - RNA, 19 nt, Artificial Sequence
  Description of Artificial Sequence: Synthetic oligonucleotide
gaagcggcucauucgaaau

SEQ ID NO: 2676639 - RNA, 19 nt, Artificial Sequence
  Description of Artificial Sequence: Synthetic oligonucleotide
cccagagaauccagcaccg

SEQ ID NO: 2676640 - RNA, 19 nt, Artificial Sequence
  Description of Artificial Sequence: Synthetic oligonucleotide
caugccauggcuacuuccu

SEQ ID NO: 2676641 - RNA, 19 nt, Artificial Sequence
  Description of Artificial Sequence: Synthetic oligonucleotide
ugcuuagcucauagaggau

SEQ ID NO: 2676642 - RNA, 19 nt, Artificial Sequence
  Description of Artificial Sequence: Synthetic oligonucleotide
ccauagaagcagaaggaca

SEQ ID NO: 2676643 - RNA, 19 nt, Artificial Sequence
  Description of Artificial Sequence: Synthetic oligonucleotide
ggaacagaggaucaauuau

SEQ ID NO: 2676644 - RNA, 19 nt, Artificial Sequence
  Description of Artificial Sequence: Synthetic oligonucleotide
gcuuagcucauagaggauc

SEQ ID NO: 2676645 - RNA, 19 nt, Artificial Sequence
  Description of Artificial Sequence: Synthetic oligonucleotide
ggccaacuugaauccaugc

SEQ ID NO: 2676646 - RNA, 19 nt, Artificial Sequence
  Description of Artificial Sequence: Synthetic oligonucleotide
ugagucucuggcugacuuu

SEQ ID NO: 2676647 - RNA, 19 nt, Artificial Sequence
  Description of Artificial Sequence: Synthetic oligonucleotide
ucauaggauggugcuacuu

SEQ ID NO: 2676648 - RNA, 19 nt, Artificial Sequence
  Description of Artificial Sequence: Synthetic oligonucleotide
cagucugccugugcaauug

SEQ ID NO: 2676649 - RNA, 19 nt, Artificial Sequence
  Description of Artificial Sequence: Synthetic oligonucleotide
ggaucaauuauuugguguu

SEQ ID NO: 2676650 - RNA, 19 nt, Artificial Sequence
  Description of Artificial Sequence: Synthetic oligonucleotide
gaccuucuucgaguguuug

SEQ ID NO: 2676651 - RNA, 19 nt, Artificial Sequence
  Description of Artificial Sequence: Synthetic oligonucleotide
cuggauaagccuuucugau

SEQ ID NO: 2676652 - RNA, 19 nt, Artificial Sequence
  Description of Artificial Sequence: Synthetic oligonucleotide
aggacaggagacaugccau

SEQ ID NO: 2676653 - RNA, 19 nt, Artificial Sequence
  Description of Artificial Sequence: Synthetic oligonucleotide
auggugcuacuuucaugcu

SEQ ID NO: 2676654 - RNA, 19 nt, Artificial Sequence
  Description of Artificial Sequence: Synthetic oligonucleotide
gagaccuuucugagcaguc

SEQ ID NO: 2676655 - RNA, 19 nt, Artificial Sequence
  Description of Artificial Sequence: Synthetic oligonucleotide
gggaacagaggaucaauua

SEQ ID NO: 2676656 - RNA, 19 nt, Artificial Sequence
  Description of Artificial Sequence: Synthetic oligonucleotide
uugguguuuacaggagauu

SEQ ID NO: 2676657 - RNA, 19 nt, Artificial Sequence
  Description of Artificial Sequence: Synthetic oligonucleotide
agacaugccauggcuacuu

SEQ ID NO: 2676658 - RNA, 19 nt, Artificial Sequence
  Description of Artificial Sequence: Synthetic oligonucleotide
caguguagagaagcggcuc

SEQ ID NO: 2676659 - RNA, 19 nt, Artificial Sequence
  Description of Artificial Sequence: Synthetic oligonucleotide
ggcuuugcucaguguagag

SEQ ID NO: 2676660 - RNA, 19 nt, Artificial Sequence
  Description of Artificial Sequence: Synthetic oligonucleotide
cagcaggaggaccuucuuc

SEQ ID NO: 2676661 - RNA, 19 nt, Artificial Sequence
  Description of Artificial Sequence: Synthetic oligonucleotide
ggugcuacuuucaugcuua

SEQ ID NO: 2676662 - RNA, 19 nt, Artificial Sequence
  Description of Artificial Sequence: Synthetic oligonucleotide
acuuucaugcuuagcucau

SEQ ID NO: 2676663 - RNA, 19 nt, Artificial Sequence
  Description of Artificial Sequence: Synthetic oligonucleotide
gaccuuucugagcagucau

SEQ ID NO: 2676664 - RNA, 19 nt, Artificial Sequence
  Description of Artificial Sequence: Synthetic oligonucleotide
uagcaucccagagaccuuu

SEQ ID NO: 2676665 - RNA, 19 nt, Artificial Sequence
  Description of Artificial Sequence: Synthetic oligonucleotide
gacaugccauggcuacuuc

SEQ ID NO: 2676666 - RNA, 19 nt, Artificial Sequence
  Description of Artificial Sequence: Synthetic oligonucleotide
uguagagaagcggcucauu

SEQ ID NO: 2676667 - RNA, 19 nt, Artificial Sequence
  Description of Artificial Sequence: Synthetic oligonucleotide
acugggaacagaggaucaa

SEQ ID NO: 2676668 - RNA, 19 nt, Artificial Sequence
  Description of Artificial Sequence: Synthetic oligonucleotide
uccuucuccuagacgucuu

SEQ ID NO: 2676669 - RNA, 19 nt, Artificial Sequence
  Description of Artificial Sequence: Synthetic oligonucleotide
cauaggauggugcuacuuu

SEQ ID NO: 2676670 - RNA, 19 nt, Artificial Sequence
  Description of Artificial Sequence: Synthetic oligonucleotide
gaaauggugccaagucaua

SEQ ID NO: 2676671 - RNA, 19 nt, Artificial Sequence
  Description of Artificial Sequence: Synthetic oligonucleotide
agauuccauagaagcagaa

SEQ ID NO: 2676672 - RNA, 19 nt, Artificial Sequence
  Description of Artificial Sequence: Synthetic oligonucleotide
gcaccgaugacaauguugu

SEQ ID NO: 2676673 - RNA, 19 nt, Artificial Sequence
  Description of Artificial Sequence: Synthetic oligonucleotide
caauugggcuccagucuca

SEQ ID NO: 2676674 - RNA, 19 nt, Artificial Sequence
  Description of Artificial Sequence: Synthetic oligonucleotide
gaagcagccuuggaugccu

SEQ ID NO: 2676675 - RNA, 19 nt, Artificial Sequence
  Description of Artificial Sequence: Synthetic oligonucleotide
cauccaucauccuggugua

SEQ ID NO: 2676676 - RNA, 19 nt, Artificial Sequence
  Description of Artificial Sequence: Synthetic oligonucleotide
augcagugaagcagccuug

SEQ ID NO: 2676677 - RNA, 19 nt, Artificial Sequence
  Description of Artificial Sequence: Synthetic oligonucleotide
auuaugcggcucuguccau

SEQ ID NO: 2676678 - RNA, 19 nt, Artificial Sequence
  Description of Artificial Sequence: Synthetic oligonucleotide
cccagagaccuuucugagc

SEQ ID NO: 2676679 - RNA, 19 nt, Artificial Sequence
  Description of Artificial Sequence: Synthetic oligonucleotide
gaauccaugcccagagaau

SEQ ID NO: 2676680 - RNA, 19 nt, Artificial Sequence
  Description of Artificial Sequence: Synthetic oligonucleotide
gguaugcagugaagcagcc

SEQ ID NO: 2676681 - RNA, 19 nt, Artificial Sequence
  Description of Artificial Sequence: Synthetic oligonucleotide
aaggugggcuuugcucagu

SEQ ID NO: 2676682 - RNA, 19 nt, Artificial Sequence
  Description of Artificial Sequence: Synthetic oligonucleotide
cccacgucugauagcauuc

SEQ ID NO: 2676683 - RNA, 19 nt, Artificial Sequence
  Description of Artificial Sequence: Synthetic oligonucleotide
ccaugugagcuuccucggg

SEQ ID NO: 2676684 - RNA, 19 nt, Artificial Sequence
  Description of Artificial Sequence: Synthetic oligonucleotide
gaucaauuauuugguguuu

SEQ ID NO: 2676685 - RNA, 19 nt, Artificial Sequence
  Description of Artificial Sequence: Synthetic oligonucleotide
cagccuuggaugccugcuc

SEQ ID NO: 2676686 - RNA, 19 nt, Artificial Sequence
  Description of Artificial Sequence: Synthetic oligonucleotide
ccgaucacaauagcauccc

SEQ ID NO: 2676687 - RNA, 19 nt, Artificial Sequence
  Description of Artificial Sequence: Synthetic oligonucleotide
gagcuuccucgggaauggg

SEQ ID NO: 2676688 - RNA, 19 nt, Artificial Sequence
  Description of Artificial Sequence: Synthetic oligonucleotide
gccugugcaauugggcucc

SEQ ID NO: 2676689 - RNA, 19 nt, Artificial Sequence
  Description of Artificial Sequence: Synthetic oligonucleotide
ggcucuguccaugugagcu

SEQ ID NO: 2676690 - RNA, 19 nt, Artificial Sequence
  Description of Artificial Sequence: Synthetic oligonucleotide
cucauucgaaauggugcca

SEQ ID NO: 2676691 - RNA, 19 nt, Artificial Sequence
  Description of Artificial Sequence: Synthetic oligonucleotide
agcaucccagagaccuuuc

SEQ ID NO: 2676692 - RNA, 19 nt, Artificial Sequence
  Description of Artificial Sequence: Synthetic oligonucleotide
augccauggcuacuuccuu

SEQ ID NO: 2676693 - RNA, 19 nt, Artificial Sequence
  Description of Artificial Sequence: Synthetic oligonucleotide
ucuuccccaugaggguucu

SEQ ID NO: 2676694 - RNA, 19 nt, Artificial Sequence
  Description of Artificial Sequence: Synthetic oligonucleotide
gauaagccuuucugauuau

SEQ ID NO: 2676695 - RNA, 19 nt, Artificial Sequence
  Description of Artificial Sequence: Synthetic oligonucleotide
gccuuggaugccugcuccg

SEQ ID NO: 2676696 - RNA, 19 nt, Artificial Sequence
  Description of Artificial Sequence: Synthetic oligonucleotide
gccaagucauaggauggug

SEQ ID NO: 2676697 - RNA, 19 nt, Artificial Sequence
  Description of Artificial Sequence: Synthetic oligonucleotide
cagagaauccagcaccgau

SEQ ID NO: 2676698 - RNA, 19 nt, Artificial Sequence
  Description of Artificial Sequence: Synthetic oligonucleotide
gcggcucuguccaugugag

SEQ ID NO: 2676699 - RNA, 19 nt, Artificial Sequence
  Description of Artificial Sequence: Synthetic oligonucleotide
cuuccucgggaauggggaa

SEQ ID NO: 2676700 - RNA, 19 nt, Artificial Sequence
  Description of Artificial Sequence: Synthetic oligonucleotide
gagagucagcuguggucaa

SEQ ID NO: 2676701 - RNA, 19 nt, Artificial Sequence
  Description of Artificial Sequence: Synthetic oligonucleotide
ccaggagagagucagcugu

SEQ ID NO: 2676702 - RNA, 19 nt, Artificial Sequence
  Description of Artificial Sequence: Synthetic oligonucleotide
gggcccacgucugauagca

SEQ ID NO: 2676703 - RNA, 19 nt, Artificial Sequence
  Description of Artificial Sequence: Synthetic oligonucleotide
caccgaugacaauguuguc

SEQ ID NO: 2676704 - RNA, 19 nt, Artificial Sequence
  Description of Artificial Sequence: Synthetic oligonucleotide
aagcagccuuggaugccug

SEQ ID NO: 2676705 - RNA, 19 nt, Artificial Sequence
  Description of Artificial Sequence: Synthetic oligonucleotide
aguguuuggccagguggua

SEQ ID NO: 2676706 - RNA, 19 nt, Artificial Sequence
  Description of Artificial Sequence: Synthetic oligonucleotide
augccugcuccgaucacaa

SEQ ID NO: 2676707 - RNA, 19 nt, Artificial Sequence
  Description of Artificial Sequence: Synthetic oligonucleotide
ccaugaggguucuccuccc

SEQ ID NO: 2676708 - RNA, 19 nt, Artificial Sequence
  Description of Artificial Sequence: Synthetic oligonucleotide
gucuuccccaugaggguuc

SEQ ID NO: 2676709 - RNA, 19 nt, Artificial Sequence
  Description of Artificial Sequence: Synthetic oligonucleotide
ggggaagcaaguacuucuc

SEQ ID NO: 2676710 - RNA, 19 nt, Artificial Sequence
  Description of Artificial Sequence: Synthetic oligonucleotide
agagucagcuguggucaaa

SEQ ID NO: 2676711 - RNA, 19 nt, Artificial Sequence
  Description of Artificial Sequence: Synthetic oligonucleotide
cggguggcaauccucaguc

SEQ ID NO: 2676712 - RNA, 19 nt, Artificial Sequence
  Description of Artificial Sequence: Synthetic oligonucleotide
ccaugcccagagaauccag

SEQ ID NO: 2676713 - RNA, 19 nt, Artificial Sequence
  Description of Artificial Sequence: Synthetic oligonucleotide
augcggcucuguccaugug

SEQ ID NO: 2676714 - RNA, 19 nt, Artificial Sequence
  Description of Artificial Sequence: Synthetic oligonucleotide
gagaagcggcucauucgaa

SEQ ID NO: 2676715 - RNA, 19 nt, Artificial Sequence
  Description of Artificial Sequence: Synthetic oligonucleotide
caugcuccagcugggccca

SEQ ID NO: 2676716 - RNA, 19 nt, Artificial Sequence
  Description of Artificial Sequence: Synthetic oligonucleotide
uggcuacuuccuucuccua

SEQ ID NO: 2676717 - RNA, 19 nt, Artificial Sequence
  Description of Artificial Sequence: Synthetic oligonucleotide
ggucaaaggugggcuuugc

SEQ ID NO: 2676718 - RNA, 19 nt, Artificial Sequence
  Description of Artificial Sequence: Synthetic oligonucleotide
gggccaacuugaauccaug

SEQ ID NO: 2676719 - RNA, 19 nt, Artificial Sequence
  Description of Artificial Sequence: Synthetic oligonucleotide
ccaggugguaugcagugaa

SEQ ID NO: 2676720 - RNA, 19 nt, Artificial Sequence
  Description of Artificial Sequence: Synthetic oligonucleotide
cuccagucucaugcuccag

SEQ ID NO: 2676721 - RNA, 19 nt, Artificial Sequence
  Description of Artificial Sequence: Synthetic oligonucleotide
gucauacuucggguggcaa

SEQ ID NO: 2676722 - RNA, 19 nt, Artificial Sequence
  Description of Artificial Sequence: Synthetic oligonucleotide
aggggccaacuugaaucca

SEQ ID NO: 2676723 - RNA, 19 nt, Artificial Sequence
  Description of Artificial Sequence: Synthetic oligonucleotide
gugacugggaacagaggau

SEQ ID NO: 2676724 - RNA, 19 nt, Artificial Sequence
  Description of Artificial Sequence: Synthetic oligonucleotide
ggagagagucagcuguggu

SEQ ID NO: 2676725 - RNA, 19 nt, Artificial Sequence
  Description of Artificial Sequence: Synthetic oligonucleotide
cggcucauucgaaauggug

SEQ ID NO: 2676726 - RNA, 19 nt, Artificial Sequence
  Description of Artificial Sequence: Synthetic oligonucleotide
cugugcaauugggcuccag

SEQ ID NO: 2676727 - RNA, 19 nt, Artificial Sequence
  Description of Artificial Sequence: Synthetic oligonucleotide
auagcaucccagagaccuu

SEQ ID NO: 2676728 - RNA, 19 nt, Artificial Sequence
  Description of Artificial Sequence: Synthetic oligonucleotide
ccgaugacaauguugucau

SEQ ID NO: 2676729 - RNA, 19 nt, Artificial Sequence
  Description of Artificial Sequence: Synthetic oligonucleotide
gagacaugccauggcuacu

SEQ ID NO: 2676730 - RNA, 19 nt, Artificial Sequence
  Description of Artificial Sequence: Synthetic oligonucleotide
gaggaccuucuucgagugu

SEQ ID NO: 2676731 - RNA, 19 nt, Artificial Sequence
  Description of Artificial Sequence: Synthetic oligonucleotide
gcaggaggaccuucuucga

SEQ ID NO: 2676732 - RNA, 19 nt, Artificial Sequence
  Description of Artificial Sequence: Synthetic oligonucleotide
guaugcagugaagcagccu

SEQ ID NO: 2676733 - RNA, 19 nt, Artificial Sequence
  Description of Artificial Sequence: Synthetic oligonucleotide
caacaggggccaacuugaa

SEQ ID NO: 2676734 - RNA, 19 nt, Artificial Sequence
  Description of Artificial Sequence: Synthetic oligonucleotide
gucauaggauggugcuacu

SEQ ID NO: 2676735 - RNA, 19 nt, Artificial Sequence
  Description of Artificial Sequence: Synthetic oligonucleotide
cgaaauggugccaagucau

SEQ ID NO: 2676736 - RNA, 19 nt, Artificial Sequence
  Description of Artificial Sequence: Synthetic oligonucleotide
gagauggacucaggagagu

SEQ ID NO: 2676737 - RNA, 19 nt, Artificial Sequence
  Description of Artificial Sequence: Synthetic oligonucleotide
ugccugcuccgaucacaau

SEQ ID NO: 2676738 - RNA, 19 nt, Artificial Sequence
  Description of Artificial Sequence: Synthetic oligonucleotide
cuccagcaggaggaccuuc

SEQ ID NO: 2676739 - RNA, 19 nt, Artificial Sequence
  Description of Artificial Sequence: Synthetic oligonucleotide
ccuucuccuagacgucuuc

SEQ ID NO: 2676740 - RNA, 19 nt, Artificial Sequence
  Description of Artificial Sequence: Synthetic oligonucleotide
cuccagcugggcccacguc

SEQ ID NO: 2676741 - RNA, 19 nt, Artificial Sequence
  Description of Artificial Sequence: Synthetic oligonucleotide
cuuggaugccugcuccgau

SEQ ID NO: 2676742 - RNA, 19 nt, Artificial Sequence
  Description of Artificial Sequence: Synthetic oligonucleotide
auccagcaccgaugacaau

SEQ ID NO: 2676743 - RNA, 19 nt, Artificial Sequence
  Description of Artificial Sequence: Synthetic oligonucleotide
guguuuggccaggugguau

SEQ ID NO: 2676744 - RNA, 19 nt, Artificial Sequence
  Description of Artificial Sequence: Synthetic oligonucleotide
gcagaaggacaggagacau

SEQ ID NO: 2676745 - RNA, 19 nt, Artificial Sequence
  Description of Artificial Sequence: Synthetic oligonucleotide
cucagucugccugugcaau

SEQ ID NO: 2676746 - RNA, 19 nt, Artificial Sequence
  Description of Artificial Sequence: Synthetic oligonucleotide
ggcugacuuucuggggaug

SEQ ID NO: 2676747 - RNA, 19 nt, Artificial Sequence
  Description of Artificial Sequence: Synthetic oligonucleotide
ggaugccugcuccgaucac

SEQ ID NO: 2676748 - RNA, 19 nt, Artificial Sequence
  Description of Artificial Sequence: Synthetic oligonucleotide
cacgucugauagcauucau

SEQ ID NO: 2676749 - RNA, 19 nt, Artificial Sequence
  Description of Artificial Sequence: Synthetic oligonucleotide
ccagcaccgaugacaaugu

SEQ ID NO: 2676750 - RNA, 19 nt, Artificial Sequence
  Description of Artificial Sequence: Synthetic oligonucleotide
ccugguguagaaguccucu

SEQ ID NO: 2676751 - RNA, 19 nt, Artificial Sequence
  Description of Artificial Sequence: Synthetic oligonucleotide
guguagagaagcggcucau

SEQ ID NO: 2676752 - RNA, 19 nt, Artificial Sequence
  Description of Artificial Sequence: Synthetic oligonucleotide
gcaucccagagaccuuucu

SEQ ID NO: 2676753 - RNA, 19 nt, Artificial Sequence
  Description of Artificial Sequence: Synthetic oligonucleotide
ccuagacgucuuccccaug

SEQ ID NO: 2676754 - RNA, 19 nt, Artificial Sequence
  Description of Artificial Sequence: Synthetic oligonucleotide
ggugggcuuugcucagugu

SEQ ID NO: 2676755 - RNA, 19 nt, Artificial Sequence
  Description of Artificial Sequence: Synthetic oligonucleotide
gcccacgucugauagcauu

SEQ ID NO: 2676756 - RNA, 19 nt, Artificial Sequence
  Description of Artificial Sequence: Synthetic oligonucleotide
ccauggcuacuuccuucuc

SEQ ID NO: 2676757 - RNA, 19 nt, Artificial Sequence
  Description of Artificial Sequence: Synthetic oligonucleotide
ccuuggaugccugcuccga

SEQ ID NO: 2676758 - RNA, 19 nt, Artificial Sequence
  Description of Artificial Sequence: Synthetic oligonucleotide
ccacgucugauagcauuca

SEQ ID NO: 2676759 - RNA, 19 nt, Artificial Sequence
  Description of Artificial Sequence: Synthetic oligonucleotide
cagcugggcccacgucuga

SEQ ID NO: 2676760 - RNA, 19 nt, Artificial Sequence
  Description of Artificial Sequence: Synthetic oligonucleotide
cuuccccaugaggguucuc

SEQ ID NO: 2676761 - RNA, 19 nt, Artificial Sequence
  Description of Artificial Sequence: Synthetic oligonucleotide
ggggccaacuugaauccau

SEQ ID NO: 2676762 - RNA, 19 nt, Artificial Sequence
  Description of Artificial Sequence: Synthetic oligonucleotide
gcucuguccaugugagcuu

SEQ ID NO: 2676763 - RNA, 19 nt, Artificial Sequence
  Description of Artificial Sequence: Synthetic oligonucleotide
ggguggcaauccucagucu

SEQ ID NO: 2676764 - RNA, 19 nt, Artificial Sequence
  Description of Artificial Sequence: Synthetic oligonucleotide
ccccacaacaggggccaac

SEQ ID NO: 2676765 - RNA, 19 nt, Artificial Sequence
  Description of Artificial Sequence: Synthetic oligonucleotide
cccacaacaggggccaacu

SEQ ID NO: 2676766 - RNA, 19 nt, Artificial Sequence
  Description of Artificial Sequence: Synthetic oligonucleotide
ggaccuucuucgaguguuu

SEQ ID NO: 2676767 - RNA, 19 nt, Artificial Sequence
  Description of Artificial Sequence: Synthetic oligonucleotide
gcggcucauucgaaauggu

SEQ ID NO: 2676768 - RNA, 19 nt, Artificial Sequence
  Description of Artificial Sequence: Synthetic oligonucleotide
cagcaccgaugacaauguu

SEQ ID NO: 2676769 - RNA, 19 nt, Artificial Sequence
  Description of Artificial Sequence: Synthetic oligonucleotide
ccagcaggaggaccuucuu

SEQ ID NO: 2676770 - RNA, 19 nt, Artificial Sequence
  Description of Artificial Sequence: Synthetic oligonucleotide
ccugugcaauugggcucca

SEQ ID NO: 2676771 - RNA, 19 nt, Artificial Sequence
  Description of Artificial Sequence: Synthetic oligonucleotide
ggcccacgucugauagcau

SEQ ID NO: 2676772 - RNA, 19 nt, Artificial Sequence
  Description of Artificial Sequence: Synthetic oligonucleotide
ucuuaguguauccauaugc

SEQ ID NO: 2676773 - RNA, 19 nt, Artificial Sequence
  Description of Artificial Sequence: Synthetic oligonucleotide
ugugcagagacuccgagag

SEQ ID NO: 2676774 - RNA, 19 nt, Artificial Sequence
  Description of Artificial Sequence: Synthetic oligonucleotide
aucacaaccauccccacac

SEQ ID NO: 2676775 - RNA, 19 nt, Artificial Sequence
  Description of Artificial Sequence: Synthetic oligonucleotide
uuguggaucacaaccaucc

SEQ ID NO: 2676776 - RNA, 19 nt, Artificial Sequence
  Description of Artificial Sequence: Synthetic oligonucleotide
auucuuugcaagcagaacu

SEQ ID NO: 2676777 - RNA, 19 nt, Artificial Sequence
  Description of Artificial Sequence: Synthetic oligonucleotide
cuuaguguauccauaugcc

SEQ ID NO: 2676778 - RNA, 19 nt, Artificial Sequence
  Description of Artificial Sequence: Synthetic oligonucleotide
uauccauaugcccuacugg

SEQ ID NO: 2676779 - RNA, 19 nt, Artificial Sequence
  Description of Artificial Sequence: Synthetic oligonucleotide
auccuaucauugcugagcc

SEQ ID NO: 2676780 - RNA, 19 nt, Artificial Sequence
  Description of Artificial Sequence: Synthetic oligonucleotide
uuuccuucuucucuuagug

SEQ ID NO: 2676781 - RNA, 19 nt, Artificial Sequence
  Description of Artificial Sequence: Synthetic oligonucleotide
agaucgauccuaucauugc

SEQ ID NO: 2676782 - RNA, 19 nt, Artificial Sequence
  Description of Artificial Sequence: Synthetic oligonucleotide
agcuguuggcauuaagggc

SEQ ID NO: 2676783 - RNA, 19 nt, Artificial Sequence
  Description of Artificial Sequence: Synthetic oligonucleotide
uaagggcucagucagggug

SEQ ID NO: 2676784 - RNA, 19 nt, Artificial Sequence
  Description of Artificial Sequence: Synthetic oligonucleotide
uaguguauccauaugcccu

SEQ ID NO: 2676785 - RNA, 19 nt, Artificial Sequence
  Description of Artificial Sequence: Synthetic oligonucleotide
uuaguguauccauaugccc

SEQ ID NO: 2676786 - RNA, 19 nt, Artificial Sequence
  Description of Artificial Sequence: Synthetic oligonucleotide
uggaucacaaccaucccca

SEQ ID NO: 2676787 - RNA, 19 nt, Artificial Sequence
  Description of Artificial Sequence: Synthetic oligonucleotide
uuugcaagcagaacuggcu

SEQ ID NO: 2676788 - RNA, 19 nt, Artificial Sequence
  Description of Artificial Sequence: Synthetic oligonucleotide
uagaucgauccuaucauug

SEQ ID NO: 2676789 - RNA, 19 nt, Artificial Sequence
  Description of Artificial Sequence: Synthetic oligonucleotide
uucuuugcaagcagaacug

SEQ ID NO: 2676790 - RNA, 19 nt, Artificial Sequence
  Description of Artificial Sequence: Synthetic oligonucleotide
ucuuggaacgcagaagggg

SEQ ID NO: 2676791 - RNA, 19 nt, Artificial Sequence
  Description of Artificial Sequence: Synthetic oligonucleotide
ugcuccgugagcaaagacc

SEQ ID NO: 2676792 - RNA, 19 nt, Artificial Sequence
  Description of Artificial Sequence: Synthetic oligonucleotide
aaaaccagaccuuggugga

SEQ ID NO: 2676793 - RNA, 19 nt, Artificial Sequence
  Description of Artificial Sequence: Synthetic oligonucleotide
auugcugagccaugggaac

SEQ ID NO: 2676794 - RNA, 19 nt, Artificial Sequence
  Description of Artificial Sequence: Synthetic oligonucleotide
gauccuaucauugcugagc

SEQ ID NO: 2676795 - RNA, 19 nt, Artificial Sequence
  Description of Artificial Sequence: Synthetic oligonucleotide
cugggugccauacuuaagc

SEQ ID NO: 2676796 - RNA, 19 nt, Artificial Sequence
  Description of Artificial Sequence: Synthetic oligonucleotide
auuaagggcucagucaggg

SEQ ID NO: 2676797 - RNA, 19 nt, Artificial Sequence
  Description of Artificial Sequence: Synthetic oligonucleotide
cuucggaggaucuuggaac

SEQ ID NO: 2676798 - RNA, 19 nt, Artificial Sequence
  Description of Artificial Sequence: Synthetic oligonucleotide
ugugaagaugucugagucc

SEQ ID NO: 2676799 - RNA, 19 nt, Artificial Sequence
  Description of Artificial Sequence: Synthetic oligonucleotide
accuugguggauucuuugc

SEQ ID NO: 2676800 - RNA, 19 nt, Artificial Sequence
  Description of Artificial Sequence: Synthetic oligonucleotide
uagggaggugugaagcugg

SEQ ID NO: 2676801 - RNA, 19 nt, Artificial Sequence
  Description of Artificial Sequence: Synthetic oligonucleotide
accaucagggaguagagaa

SEQ ID NO: 2676802 - RNA, 19 nt, Artificial Sequence
  Description of Artificial Sequence: Synthetic oligonucleotide
ugugaagcugggcccacgg

SEQ ID NO: 2676803 - RNA, 19 nt, Artificial Sequence
  Description of Artificial Sequence: Synthetic oligonucleotide
uugcaagcagaacuggcug

SEQ ID NO: 2676804 - RNA, 19 nt, Artificial Sequence
  Description of Artificial Sequence: Synthetic oligonucleotide
acugcuaggcccugggcgg

SEQ ID NO: 2676805 - RNA, 19 nt, Artificial Sequence
  Description of Artificial Sequence: Synthetic oligonucleotide
uccccugugaagaugucug

SEQ ID NO: 2676806 - RNA, 19 nt, Artificial Sequence
  Description of Artificial Sequence: Synthetic oligonucleotide
aucgcuucuagucucuuca

SEQ ID NO: 2676807 - RNA, 19 nt, Artificial Sequence
  Description of Artificial Sequence: Synthetic oligonucleotide
cagcuauugccacaaaggc

SEQ ID NO: 2676808 - RNA, 19 nt, Artificial Sequence
  Description of Artificial Sequence: Synthetic oligonucleotide
uuaagcuguuggcauuaag

SEQ ID NO: 2676809 - RNA, 19 nt, Artificial Sequence
  Description of Artificial Sequence: Synthetic oligonucleotide
caggcuaggcaucuguugg

SEQ ID NO: 2676810 - RNA, 19 nt, Artificial Sequence
  Description of Artificial Sequence: Synthetic oligonucleotide
cuuugcaagcagaacuggc

SEQ ID NO: 2676811 - RNA, 19 nt, Artificial Sequence
  Description of Artificial Sequence: Synthetic oligonucleotide
uugguggauucuuugcaag

SEQ ID NO: 2676812 - RNA, 19 nt, Artificial Sequence
  Description of Artificial Sequence: Synthetic oligonucleotide
ugggucgguagaucgaucc

SEQ ID NO: 2676813 - RNA, 19 nt, Artificial Sequence
  Description of Artificial Sequence: Synthetic oligonucleotide
guauccauaugcccuacug

SEQ ID NO: 2676814 - RNA, 19 nt, Artificial Sequence
  Description of Artificial Sequence: Synthetic oligonucleotide
uggauucuuugcaagcaga

SEQ ID NO: 2676815 - RNA, 19 nt, Artificial Sequence
  Description of Artificial Sequence: Synthetic oligonucleotide
ucucuuaguguauccauau

SEQ ID NO: 2676816 - RNA, 19 nt, Artificial Sequence
  Description of Artificial Sequence: Synthetic oligonucleotide
gcauuaagggcucagucag

SEQ ID NO: 2676817 - RNA, 19 nt, Artificial Sequence
  Description of Artificial Sequence: Synthetic oligonucleotide
auacuuaagcuguuggcau

SEQ ID NO: 2676818 - RNA, 19 nt, Artificial Sequence
  Description of Artificial Sequence: Synthetic oligonucleotide
uccgugagcaaagacccgg

SEQ ID NO: 2676819 - RNA, 19 nt, Artificial Sequence
  Description of Artificial Sequence: Synthetic oligonucleotide
uggcuacucccacuggugg

SEQ ID NO: 2676820 - RNA, 19 nt, Artificial Sequence
  Description of Artificial Sequence: Synthetic oligonucleotide
aaggcuuggaggcuucgga

SEQ ID NO: 2676821 - RNA, 19 nt, Artificial Sequence
  Description of Artificial Sequence: Synthetic oligonucleotide
aagcagaacuggcuguugu

SEQ ID NO: 2676822 - RNA, 19 nt, Artificial Sequence
  Description of Artificial Sequence: Synthetic oligonucleotide
agccaugggaaccugggug

SEQ ID NO: 2676823 - RNA, 19 nt, Artificial Sequence
  Description of Artificial Sequence: Synthetic oligonucleotide
uggcuguuguccuugaguc

SEQ ID NO: 2676824 - RNA, 19 nt, Artificial Sequence
  Description of Artificial Sequence: Synthetic oligonucleotide
ggaggugugaagcugggcc

SEQ ID NO: 2676825 - RNA, 19 nt, Artificial Sequence
  Description of Artificial Sequence: Synthetic oligonucleotide
aaggggacgcugccacugc

SEQ ID NO: 2676826 - RNA, 19 nt, Artificial Sequence
  Description of Artificial Sequence: Synthetic oligonucleotide
ucaggcuaggcaucuguug

SEQ ID NO: 2676827 - RNA, 19 nt, Artificial Sequence
  Description of Artificial Sequence: Synthetic oligonucleotide
cacugcuaggcccugggcg

SEQ ID NO: 2676828 - RNA, 19 nt, Artificial Sequence
  Description of Artificial Sequence: Synthetic oligonucleotide
ugccugggucgguagaucg

SEQ ID NO: 2676829 - RNA, 19 nt, Artificial Sequence
  Description of Artificial Sequence: Synthetic oligonucleotide
cuaggcaucuguuggcuac

SEQ ID NO: 2676830 - RNA, 19 nt, Artificial Sequence
  Description of Artificial Sequence: Synthetic oligonucleotide
guggaucacaaccaucccc

SEQ ID NO: 2676831 - RNA, 19 nt, Artificial Sequence
  Description of Artificial Sequence: Synthetic oligonucleotide
ucgauccuaucauugcuga

SEQ ID NO: 2676832 - RNA, 19 nt, Artificial Sequence
  Description of Artificial Sequence: Synthetic oligonucleotide
uccauaugcccuacuggug

SEQ ID NO: 2676833 - RNA, 19 nt, Artificial Sequence
  Description of Artificial Sequence: Synthetic oligonucleotide
agggaguagagaaggcucc

SEQ ID NO: 2676834 - RNA, 19 nt, Artificial Sequence
  Description of Artificial Sequence: Synthetic oligonucleotide
cauacuuaagcuguuggca

SEQ ID NO: 2676835 - RNA, 19 nt, Artificial Sequence
  Description of Artificial Sequence: Synthetic oligonucleotide
gcagcuauugccacaaagg

SEQ ID NO: 2676836 - RNA, 19 nt, Artificial Sequence
  Description of Artificial Sequence: Synthetic oligonucleotide
uucuucucuuaguguaucc

SEQ ID NO: 2676837 - RNA, 19 nt, Artificial Sequence
  Description of Artificial Sequence: Synthetic oligonucleotide
gaggugugaagcugggccc

SEQ ID NO: 2676838 - RNA, 19 nt, Artificial Sequence
  Description of Artificial Sequence: Synthetic oligonucleotide
agcaguagcgcagcucugc

SEQ ID NO: 2676839 - RNA, 19 nt, Artificial Sequence
  Description of Artificial Sequence: Synthetic oligonucleotide
uuggcuacucccacuggug

SEQ ID NO: 2676840 - RNA, 19 nt, Artificial Sequence
  Description of Artificial Sequence: Synthetic oligonucleotide
cuuggaacgcagaagggga

SEQ ID NO: 2676841 - RNA, 19 nt, Artificial Sequence
  Description of Artificial Sequence: Synthetic oligonucleotide
aguagcgcagcucugcaau

SEQ ID NO: 2676842 - RNA, 19 nt, Artificial Sequence
  Description of Artificial Sequence: Synthetic oligonucleotide
ucuucucuuaguguaucca

SEQ ID NO: 2676843 - RNA, 19 nt, Artificial Sequence
  Description of Artificial Sequence: Synthetic oligonucleotide
uggcauuaagggcucaguc

SEQ ID NO: 2676844 - RNA, 19 nt, Artificial Sequence
  Description of Artificial Sequence: Synthetic oligonucleotide
aggcuaggcaucuguuggc

SEQ ID NO: 2676845 - RNA, 19 nt, Artificial Sequence
  Description of Artificial Sequence: Synthetic oligonucleotide
aguagagaaggcuccccug

SEQ ID NO: 2676846 - RNA, 19 nt, Artificial Sequence
  Description of Artificial Sequence: Synthetic oligonucleotide
agagcuguuggcacugcgc

SEQ ID NO: 2676847 - RNA, 19 nt, Artificial Sequence
  Description of Artificial Sequence: Synthetic oligonucleotide
aucauugcugagccauggg

SEQ ID NO: 2676848 - RNA, 19 nt, Artificial Sequence
  Description of Artificial Sequence: Synthetic oligonucleotide
aaaggcuuggaggcuucgg

SEQ ID NO: 2676849 - RNA, 19 nt, Artificial Sequence
  Description of Artificial Sequence: Synthetic oligonucleotide
agugugcagagacuccgag

SEQ ID NO: 2676850 - RNA, 19 nt, Artificial Sequence
  Description of Artificial Sequence: Synthetic oligonucleotide
uucucuuaguguauccaua

SEQ ID NO: 2676851 - RNA, 19 nt, Artificial Sequence
  Description of Artificial Sequence: Synthetic oligonucleotide
gacccgggcagcuauugcc

SEQ ID NO: 2676852 - RNA, 19 nt, Artificial Sequence
  Description of Artificial Sequence: Synthetic oligonucleotide
gugaagaugucugagucca

SEQ ID NO: 2676853 - RNA, 19 nt, Artificial Sequence
  Description of Artificial Sequence: Synthetic oligonucleotide
acuggugguccucuggcug

SEQ ID NO: 2676854 - RNA, 19 nt, Artificial Sequence
  Description of Artificial Sequence: Synthetic oligonucleotide
agcuguuggcacugcgccc

SEQ ID NO: 2676855 - RNA, 19 nt, Artificial Sequence
  Description of Artificial Sequence: Synthetic oligonucleotide
uguuggcuacucccacugg

SEQ ID NO: 2676856 - RNA, 19 nt, Artificial Sequence
  Description of Artificial Sequence: Synthetic oligonucleotide
gaaggcuccccugugaaga

SEQ ID NO: 2676857 - RNA, 19 nt, Artificial Sequence
  Description of Artificial Sequence: Synthetic oligonucleotide
gauucuuugcaagcagaac

SEQ ID NO: 2676858 - RNA, 19 nt, Artificial Sequence
  Description of Artificial Sequence: Synthetic oligonucleotide
cuugaguccuuguggauca

SEQ ID NO: 2676859 - RNA, 19 nt, Artificial Sequence
  Description of Artificial Sequence: Synthetic oligonucleotide
cauuaagggcucagucagg

SEQ ID NO: 2676860 - RNA, 19 nt, Artificial Sequence
  Description of Artificial Sequence: Synthetic oligonucleotide
cauaugcccuacugguggg

SEQ ID NO: 2676861 - RNA, 19 nt, Artificial Sequence
  Description of Artificial Sequence: Synthetic oligonucleotide
gccauacuuaagcuguugg

SEQ ID NO: 2676862 - RNA, 19 nt, Artificial Sequence
  Description of Artificial Sequence: Synthetic oligonucleotide
uggaacgcagaaggggacg

SEQ ID NO: 2676863 - RNA, 19 nt, Artificial Sequence
  Description of Artificial Sequence: Synthetic oligonucleotide
ugcaagcagaacuggcugu

SEQ ID NO: 2676864 - RNA, 19 nt, Artificial Sequence
  Description of Artificial Sequence: Synthetic oligonucleotide
gcaucuguuggcuacuccc

SEQ ID NO: 2676865 - RNA, 19 nt, Artificial Sequence
  Description of Artificial Sequence: Synthetic oligonucleotide
ccauaugcccuacuggugg

SEQ ID NO: 2676866 - RNA, 19 nt, Artificial Sequence
  Description of Artificial Sequence: Synthetic oligonucleotide
uccaacaguugcuuauaaa

SEQ ID NO: 2676867 - RNA, 19 nt, Artificial Sequence
  Description of Artificial Sequence: Synthetic oligonucleotide
gagagcuguuggcacugcg

SEQ ID NO: 2676868 - RNA, 19 nt, Artificial Sequence
  Description of Artificial Sequence: Synthetic oligonucleotide
uagagaaggcuccccugug

SEQ ID NO: 2676869 - RNA, 19 nt, Artificial Sequence
  Description of Artificial Sequence: Synthetic oligonucleotide
uacuggugggugugcaucc

SEQ ID NO: 2676870 - RNA, 19 nt, Artificial Sequence
  Description of Artificial Sequence: Synthetic oligonucleotide
uauugccacaaaggcuugg

SEQ ID NO: 2676871 - RNA, 19 nt, Artificial Sequence
  Description of Artificial Sequence: Synthetic oligonucleotide
aguguauccauaugcccua

SEQ ID NO: 2676872 - RNA, 19 nt, Artificial Sequence
  Description of Artificial Sequence: Synthetic oligonucleotide
cuuguggaucacaaccauc

SEQ ID NO: 2676873 - RNA, 19 nt, Artificial Sequence
  Description of Artificial Sequence: Synthetic oligonucleotide
uccgagagagcuguuggca

SEQ ID NO: 2676874 - RNA, 19 nt, Artificial Sequence
  Description of Artificial Sequence: Synthetic oligonucleotide
uuggaacgcagaaggggac

SEQ ID NO: 2676875 - RNA, 19 nt, Artificial Sequence
  Description of Artificial Sequence: Synthetic oligonucleotide
ucuguuggcuacucccacu

SEQ ID NO: 2676876 - RNA, 19 nt, Artificial Sequence
  Description of Artificial Sequence: Synthetic oligonucleotide
ggcagcuauugccacaaag

SEQ ID NO: 2676877 - RNA, 19 nt, Artificial Sequence
  Description of Artificial Sequence: Synthetic oligonucleotide
agacccgggcagcuauugc

SEQ ID NO: 2676878 - RNA, 19 nt, Artificial Sequence
  Description of Artificial Sequence: Synthetic oligonucleotide
cuguuggcuacucccacug

SEQ ID NO: 2676879 - RNA, 19 nt, Artificial Sequence
  Description of Artificial Sequence: Synthetic oligonucleotide
ugggugccauacuuaagcu

SEQ ID NO: 2676880 - RNA, 19 nt, Artificial Sequence
  Description of Artificial Sequence: Synthetic oligonucleotide
uguauccauaugcccuacu

SEQ ID NO: 2676881 - RNA, 19 nt, Artificial Sequence
  Description of Artificial Sequence: Synthetic oligonucleotide
cacggggaccaucagggag

SEQ ID NO: 2676882 - RNA, 19 nt, Artificial Sequence
  Description of Artificial Sequence: Synthetic oligonucleotide
agagaaggcuccccuguga

SEQ ID NO: 2676883 - RNA, 19 nt, Artificial Sequence
  Description of Artificial Sequence: Synthetic oligonucleotide
gaugucugaguccaacagu

SEQ ID NO: 2676884 - RNA, 19 nt, Artificial Sequence
  Description of Artificial Sequence: Synthetic oligonucleotide
cccacggggaccaucaggg

SEQ ID NO: 2676885 - RNA, 19 nt, Artificial Sequence
  Description of Artificial Sequence: Synthetic oligonucleotide
ugacugggacucaggcuag

SEQ ID NO: 2676886 - RNA, 19 nt, Artificial Sequence
  Description of Artificial Sequence: Synthetic oligonucleotide
agcuauugccacaaaggcu

SEQ ID NO: 2676887 - RNA, 19 nt, Artificial Sequence
  Description of Artificial Sequence: Synthetic oligonucleotide
ggcauuaagggcucaguca

SEQ ID NO: 2676888 - RNA, 19 nt, Artificial Sequence
  Description of Artificial Sequence: Synthetic oligonucleotide
ggggacaucgcuucuaguc

SEQ ID NO: 2676889 - RNA, 19 nt, Artificial Sequence
  Description of Artificial Sequence: Synthetic oligonucleotide
ccauacuuaagcuguuggc

SEQ ID NO: 2676890 - RNA, 19 nt, Artificial Sequence
  Description of Artificial Sequence: Synthetic oligonucleotide
agaaggcuccccugugaag

SEQ ID NO: 2676891 - RNA, 19 nt, Artificial Sequence
  Description of Artificial Sequence: Synthetic oligonucleotide
cagaaggggacgcugccac

SEQ ID NO: 2676892 - RNA, 19 nt, Artificial Sequence
  Description of Artificial Sequence: Synthetic oligonucleotide
gaucgauccuaucauugcu

SEQ ID NO: 2676893 - RNA, 19 nt, Artificial Sequence
  Description of Artificial Sequence: Synthetic oligonucleotide
cuaucauugcugagccaug

SEQ ID NO: 2676894 - RNA, 19 nt, Artificial Sequence
  Description of Artificial Sequence: Synthetic oligonucleotide
aucgauccuaucauugcug

SEQ ID NO: 2676895 - RNA, 19 nt, Artificial Sequence
  Description of Artificial Sequence: Synthetic oligonucleotide
gaaggggacgcugccacug

SEQ ID NO: 2676896 - RNA, 19 nt, Artificial Sequence
  Description of Artificial Sequence: Synthetic oligonucleotide
ggcuuggaggcuucggagg

SEQ ID NO: 2676897 - RNA, 19 nt, Artificial Sequence
  Description of Artificial Sequence: Synthetic oligonucleotide
gcuccgugagcaaagaccc

SEQ ID NO: 2676898 - RNA, 19 nt, Artificial Sequence
  Description of Artificial Sequence: Synthetic oligonucleotide
uacuuaagcuguuggcauu

SEQ ID NO: 2676899 - RNA, 19 nt, Artificial Sequence
  Description of Artificial Sequence: Synthetic oligonucleotide
augucugaguccaacaguu

SEQ ID NO: 2676900 - RNA, 19 nt, Artificial Sequence
  Description of Artificial Sequence: Synthetic oligonucleotide
aucuuggaacgcagaaggg

SEQ ID NO: 2676901 - RNA, 19 nt, Artificial Sequence
  Description of Artificial Sequence: Synthetic oligonucleotide
aagacccgggcagcuauug

SEQ ID NO: 2676902 - RNA, 19 nt, Artificial Sequence
  Description of Artificial Sequence: Synthetic oligonucleotide
uaugcccuacuggugggug

SEQ ID NO: 2676903 - RNA, 19 nt, Artificial Sequence
  Description of Artificial Sequence: Synthetic oligonucleotide
cuugguggauucuuugcaa

SEQ ID NO: 2676904 - RNA, 19 nt, Artificial Sequence
  Description of Artificial Sequence: Synthetic oligonucleotide
cuccgagagagcuguuggc

SEQ ID NO: 2676905 - RNA, 19 nt, Artificial Sequence
  Description of Artificial Sequence: Synthetic oligonucleotide
uuaagggcucagucagggu

SEQ ID NO: 2676906 - RNA, 19 nt, Artificial Sequence
  Description of Artificial Sequence: Synthetic oligonucleotide
gagagagcuguuggcacug

SEQ ID NO: 2676907 - RNA, 19 nt, Artificial Sequence
  Description of Artificial Sequence: Synthetic oligonucleotide
guuggcauuaagggcucag

SEQ ID NO: 2676908 - RNA, 19 nt, Artificial Sequence
  Description of Artificial Sequence: Synthetic oligonucleotide
guagggaggugugaagcug

SEQ ID NO: 2676909 - RNA, 19 nt, Artificial Sequence
  Description of Artificial Sequence: Synthetic oligonucleotide
ugccauacuuaagcuguug

SEQ ID NO: 2676910 - RNA, 19 nt, Artificial Sequence
  Description of Artificial Sequence: Synthetic oligonucleotide
uuggcauuaagggcucagu

SEQ ID NO: 2676911 - RNA, 19 nt, Artificial Sequence
  Description of Artificial Sequence: Synthetic oligonucleotide
uagcgcagcucugcaaucc

SEQ ID NO: 2676912 - RNA, 19 nt, Artificial Sequence
  Description of Artificial Sequence: Synthetic oligonucleotide
agucaggguggcugcuccg

SEQ ID NO: 2676913 - RNA, 19 nt, Artificial Sequence
  Description of Artificial Sequence: Synthetic oligonucleotide
gagaaggcuccccugugaa

SEQ ID NO: 2676914 - RNA, 19 nt, Artificial Sequence
  Description of Artificial Sequence: Synthetic oligonucleotide
uccccacacuggauauggg

SEQ ID NO: 2676915 - RNA, 19 nt, Artificial Sequence
  Description of Artificial Sequence: Synthetic oligonucleotide
gacuccgagagagcuguug

SEQ ID NO: 2676916 - RNA, 19 nt, Artificial Sequence
  Description of Artificial Sequence: Synthetic oligonucleotide
ucaggguggcugcuccgug

SEQ ID NO: 2676917 - RNA, 19 nt, Artificial Sequence
  Description of Artificial Sequence: Synthetic oligonucleotide
guuggcacugcgcccaguc

SEQ ID NO: 2676918 - RNA, 19 nt, Artificial Sequence
  Description of Artificial Sequence: Synthetic oligonucleotide
cagucagggcugcugcucc

SEQ ID NO: 2676919 - RNA, 19 nt, Artificial Sequence
  Description of Artificial Sequence: Synthetic oligonucleotide
ugaguccaacaguugcuua

SEQ ID NO: 2676920 - RNA, 19 nt, Artificial Sequence
  Description of Artificial Sequence: Synthetic oligonucleotide
uuggcacugcgcccaguca

SEQ ID NO: 2676921 - RNA, 19 nt, Artificial Sequence
  Description of Artificial Sequence: Synthetic oligonucleotide
acgcagaaggggacgcugc

SEQ ID NO: 2676922 - RNA, 19 nt, Artificial Sequence
  Description of Artificial Sequence: Synthetic oligonucleotide
cuauugccacaaaggcuug

SEQ ID NO: 2676923 - RNA, 19 nt, Artificial Sequence
  Description of Artificial Sequence: Synthetic oligonucleotide
cuacuggugggugugcauc

SEQ ID NO: 2676924 - RNA, 19 nt, Artificial Sequence
  Description of Artificial Sequence: Synthetic oligonucleotide
aggaguuggcugaggcccc

SEQ ID NO: 2676925 - RNA, 19 nt, Artificial Sequence
  Description of Artificial Sequence: Synthetic oligonucleotide
acuuaagcuguuggcauua

SEQ ID NO: 2676926 - RNA, 19 nt, Artificial Sequence
  Description of Artificial Sequence: Synthetic oligonucleotide
aacuggcuguuguccuuga

SEQ ID NO: 2676927 - RNA, 19 nt, Artificial Sequence
  Description of Artificial Sequence: Synthetic oligonucleotide
uggaggcuucggaggaucu

SEQ ID NO: 2676928 - RNA, 19 nt, Artificial Sequence
  Description of Artificial Sequence: Synthetic oligonucleotide
gaguccaacaguugcuuau

SEQ ID NO: 2676929 - RNA, 19 nt, Artificial Sequence
  Description of Artificial Sequence: Synthetic oligonucleotide
gaguagagaaggcuccccu

SEQ ID NO: 2676930 - RNA, 19 nt, Artificial Sequence
  Description of Artificial Sequence: Synthetic oligonucleotide
uguuguccuugaguccuug

SEQ ID NO: 2676931 - RNA, 19 nt, Artificial Sequence
  Description of Artificial Sequence: Synthetic oligonucleotide
aaccagaccuugguggauu

SEQ ID NO: 2676932 - RNA, 19 nt, Artificial Sequence
  Description of Artificial Sequence: Synthetic oligonucleotide
cuccugggcacugcuaggc

SEQ ID NO: 2676933 - RNA, 19 nt, Artificial Sequence
  Description of Artificial Sequence: Synthetic oligonucleotide
agagagcuguuggcacugc

SEQ ID NO: 2676934 - RNA, 19 nt, Artificial Sequence
  Description of Artificial Sequence: Synthetic oligonucleotide
caaccauccccacacugga

SEQ ID NO: 2676935 - RNA, 19 nt, Artificial Sequence
  Description of Artificial Sequence: Synthetic oligonucleotide
gagacuccgagagagcugu

SEQ ID NO: 2676936 - RNA, 19 nt, Artificial Sequence
  Description of Artificial Sequence: Synthetic oligonucleotide
gggaccaucagggaguaga

SEQ ID NO: 2676937 - RNA, 19 nt, Artificial Sequence
  Description of Artificial Sequence: Synthetic oligonucleotide
gggugccauacuuaagcug

SEQ ID NO: 2676938 - RNA, 19 nt, Artificial Sequence
  Description of Artificial Sequence: Synthetic oligonucleotide
ucacaaccauccccacacu

SEQ ID NO: 2676939 - RNA, 19 nt, Artificial Sequence
  Description of Artificial Sequence: Synthetic oligonucleotide
uccuaucauugcugagcca

SEQ ID NO: 2676940 - RNA, 19 nt, Artificial Sequence
  Description of Artificial Sequence: Synthetic oligonucleotide
ggugccauacuuaagcugu

SEQ ID NO: 2676941 - RNA, 19 nt, Artificial Sequence
  Description of Artificial Sequence: Synthetic oligonucleotide
cuccgugagcaaagacccg

SEQ ID NO: 2676942 - RNA, 19 nt, Artificial Sequence
  Description of Artificial Sequence: Synthetic oligonucleotide
gguagaucgauccuaucau

SEQ ID NO: 2676943 - RNA, 19 nt, Artificial Sequence
  Description of Artificial Sequence: Synthetic oligonucleotide
aaaccagaccuugguggau

SEQ ID NO: 2676944 - RNA, 19 nt, Artificial Sequence
  Description of Artificial Sequence: Synthetic oligonucleotide
guuggcuacucccacuggu

SEQ ID NO: 2676945 - RNA, 19 nt, Artificial Sequence
  Description of Artificial Sequence: Synthetic oligonucleotide
ugcccuacuggugggugug

SEQ ID NO: 2676946 - RNA, 19 nt, Artificial Sequence
  Description of Artificial Sequence: Synthetic oligonucleotide
ggcacugcuaggcccuggg

SEQ ID NO: 2676947 - RNA, 19 nt, Artificial Sequence
  Description of Artificial Sequence: Synthetic oligonucleotide
uccuugaguccuuguggau

SEQ ID NO: 2676948 - RNA, 19 nt, Artificial Sequence
  Description of Artificial Sequence: Synthetic oligonucleotide
ccaucagggaguagagaag

SEQ ID NO: 2676949 - RNA, 19 nt, Artificial Sequence
  Description of Artificial Sequence: Synthetic oligonucleotide
uuggaggcuucggaggauc

SEQ ID NO: 2676950 - RNA, 19 nt, Artificial Sequence
  Description of Artificial Sequence: Synthetic oligonucleotide
gagcaaagacccgggcagc

SEQ ID NO: 2676951 - RNA, 19 nt, Artificial Sequence
  Description of Artificial Sequence: Synthetic oligonucleotide
gugugcagagacuccgaga

SEQ ID NO: 2676952 - RNA, 19 nt, Artificial Sequence
  Description of Artificial Sequence: Synthetic oligonucleotide
ggcucagucaggguggcug

SEQ ID NO: 2676953 - RNA, 19 nt, Artificial Sequence
  Description of Artificial Sequence: Synthetic oligonucleotide
gggugugcaucccaggcca

SEQ ID NO: 2676954 - RNA, 19 nt, Artificial Sequence
  Description of Artificial Sequence: Synthetic oligonucleotide
ucggaggaucuuggaacgc

SEQ ID NO: 2676955 - RNA, 19 nt, Artificial Sequence
  Description of Artificial Sequence: Synthetic oligonucleotide
acggggaccaucagggagu

SEQ ID NO: 2676956 - RNA, 19 nt, Artificial Sequence
  Description of Artificial Sequence: Synthetic oligonucleotide
caaaggcuuggaggcuucg

SEQ ID NO: 2676957 - RNA, 19 nt, Artificial Sequence
  Description of Artificial Sequence: Synthetic oligonucleotide
agagacuccgagagagcug

SEQ ID NO: 2676958 - RNA, 19 nt, Artificial Sequence
  Description of Artificial Sequence: Synthetic oligonucleotide
agaaggggacgcugccacu

SEQ ID NO: 2676959 - RNA, 19 nt, Artificial Sequence
  Description of Artificial Sequence: Synthetic oligonucleotide
cuucucuuaguguauccau

SEQ ID NO: 2676960 - RNA, 19 nt, Artificial Sequence
  Description of Artificial Sequence: Synthetic oligonucleotide
gcaggaguuggcugaggcc

SEQ ID NO: 2676961 - RNA, 19 nt, Artificial Sequence
  Description of Artificial Sequence: Synthetic oligonucleotide
ggacaucgcuucuagucuc

SEQ ID NO: 2676962 - RNA, 19 nt, Artificial Sequence
  Description of Artificial Sequence: Synthetic oligonucleotide
aggcuucggaggaucuugg

SEQ ID NO: 2676963 - RNA, 19 nt, Artificial Sequence
  Description of Artificial Sequence: Synthetic oligonucleotide
uaggcaucuguuggcuacu

SEQ ID NO: 2676964 - RNA, 19 nt, Artificial Sequence
  Description of Artificial Sequence: Synthetic oligonucleotide
aguuggcugaggccccagu

SEQ ID NO: 2676965 - RNA, 19 nt, Artificial Sequence
  Description of Artificial Sequence: Synthetic oligonucleotide
augcccuacuggugggugu

SEQ ID NO: 2676966 - RNA, 19 nt, Artificial Sequence
  Description of Artificial Sequence: Synthetic oligonucleotide
ucgcuucuagucucuucau

SEQ ID NO: 2676967 - RNA, 19 nt, Artificial Sequence
  Description of Artificial Sequence: Synthetic oligonucleotide
cuacucccacugguggucc

SEQ ID NO: 2676968 - RNA, 19 nt, Artificial Sequence
  Description of Artificial Sequence: Synthetic oligonucleotide
gacugggacucaggcuagg

SEQ ID NO: 2676969 - RNA, 19 nt, Artificial Sequence
  Description of Artificial Sequence: Synthetic oligonucleotide
cugggacucaggcuaggca

SEQ ID NO: 2676970 - RNA, 19 nt, Artificial Sequence
  Description of Artificial Sequence: Synthetic oligonucleotide
ucgguagaucgauccuauc

SEQ ID NO: 2676971 - RNA, 19 nt, Artificial Sequence
  Description of Artificial Sequence: Synthetic oligonucleotide
aguccaacaguugcuuaua

SEQ ID NO: 2676972 - RNA, 19 nt, Artificial Sequence
  Description of Artificial Sequence: Synthetic oligonucleotide
ggaccaucagggaguagag

SEQ ID NO: 2676973 - RNA, 19 nt, Artificial Sequence
  Description of Artificial Sequence: Synthetic oligonucleotide
acgcugccacugcugacug

SEQ ID NO: 2676974 - RNA, 19 nt, Artificial Sequence
  Description of Artificial Sequence: Synthetic oligonucleotide
caagcagaacuggcuguug

SEQ ID NO: 2676975 - RNA, 19 nt, Artificial Sequence
  Description of Artificial Sequence: Synthetic oligonucleotide
augccugggucgguagauc

SEQ ID NO: 2676976 - RNA, 19 nt, Artificial Sequence
  Description of Artificial Sequence: Synthetic oligonucleotide
ggaacgcagaaggggacgc

SEQ ID NO: 2676977 - RNA, 19 nt, Artificial Sequence
  Description of Artificial Sequence: Synthetic oligonucleotide
acucccacuggugguccuc

SEQ ID NO: 2676978 - RNA, 19 nt, Artificial Sequence
  Description of Artificial Sequence: Synthetic oligonucleotide
agggaggugugaagcuggg

SEQ ID NO: 2676979 - RNA, 19 nt, Artificial Sequence
  Description of Artificial Sequence: Synthetic oligonucleotide
cugcuccgugagcaaagac

SEQ ID NO: 2676980 - RNA, 19 nt, Artificial Sequence
  Description of Artificial Sequence: Synthetic oligonucleotide
ggaguagagaaggcucccc

SEQ ID NO: 2676981 - RNA, 19 nt, Artificial Sequence
  Description of Artificial Sequence: Synthetic oligonucleotide
ggauucuuugcaagcagaa

SEQ ID NO: 2676982 - RNA, 19 nt, Artificial Sequence
  Description of Artificial Sequence: Synthetic oligonucleotide
ggcaucuguuggcuacucc

SEQ ID NO: 2676983 - RNA, 19 nt, Artificial Sequence
  Description of Artificial Sequence: Synthetic oligonucleotide
aggcaucuguuggcuacuc

SEQ ID NO: 2676984 - RNA, 19 nt, Artificial Sequence
  Description of Artificial Sequence: Synthetic oligonucleotide
gaccaucagggaguagaga

SEQ ID NO: 2676985 - RNA, 19 nt, Artificial Sequence
  Description of Artificial Sequence: Synthetic oligonucleotide
aaccugggugccauacuua

SEQ ID NO: 2676986 - RNA, 19 nt, Artificial Sequence
  Description of Artificial Sequence: Synthetic oligonucleotide
gcuucggaggaucuuggaa

SEQ ID NO: 2676987 - RNA, 19 nt, Artificial Sequence
  Description of Artificial Sequence: Synthetic oligonucleotide
cacagcaguagcgcagcuc

SEQ ID NO: 2676988 - RNA, 19 nt, Artificial Sequence
  Description of Artificial Sequence: Synthetic oligonucleotide
guagaucgauccuaucauu

SEQ ID NO: 2676989 - RNA, 19 nt, Artificial Sequence
  Description of Artificial Sequence: Synthetic oligonucleotide
ccacuggugguccucuggc

SEQ ID NO: 2676990 - RNA, 19 nt, Artificial Sequence
  Description of Artificial Sequence: Synthetic oligonucleotide
uguuggcauuaagggcuca

SEQ ID NO: 2676991 - RNA, 19 nt, Artificial Sequence
  Description of Artificial Sequence: Synthetic oligonucleotide
ccuugaguccuuguggauc

SEQ ID NO: 2676992 - RNA, 19 nt, Artificial Sequence
  Description of Artificial Sequence: Synthetic oligonucleotide
auaugcccuacuggugggu

SEQ ID NO: 2676993 - RNA, 19 nt, Artificial Sequence
  Description of Artificial Sequence: Synthetic oligonucleotide
gggacaucgcuucuagucu

SEQ ID NO: 2676994 - RNA, 19 nt, Artificial Sequence
  Description of Artificial Sequence: Synthetic oligonucleotide
aggggacgcugccacugcu

SEQ ID NO: 2676995 - RNA, 19 nt, Artificial Sequence
  Description of Artificial Sequence: Synthetic oligonucleotide
ccuugguggauucuuugca

SEQ ID NO: 2676996 - RNA, 19 nt, Artificial Sequence
  Description of Artificial Sequence: Synthetic oligonucleotide
ccgagagagcuguuggcac

SEQ ID NO: 2676997 - RNA, 19 nt, Artificial Sequence
  Description of Artificial Sequence: Synthetic oligonucleotide
gugugaagcugggcccacg

SEQ ID NO: 2676998 - RNA, 19 nt, Artificial Sequence
  Description of Artificial Sequence: Synthetic oligonucleotide
cagaacuggcuguuguccu

SEQ ID NO: 2676999 - RNA, 19 nt, Artificial Sequence
  Description of Artificial Sequence: Synthetic oligonucleotide
gcuguuguccuugaguccu

SEQ ID NO: 2677000 - RNA, 19 nt, Artificial Sequence
  Description of Artificial Sequence: Synthetic oligonucleotide
ggcacugcgcccagucagg

SEQ ID NO: 2677001 - RNA, 19 nt, Artificial Sequence
  Description of Artificial Sequence: Synthetic oligonucleotide
uacucccacuggugguccu

SEQ ID NO: 2677002 - RNA, 19 nt, Artificial Sequence
  Description of Artificial Sequence: Synthetic oligonucleotide
gggaguagagaaggcuccc

SEQ ID NO: 2677003 - RNA, 19 nt, Artificial Sequence
  Description of Artificial Sequence: Synthetic oligonucleotide
cagagacuccgagagagcu

SEQ ID NO: 2677004 - RNA, 19 nt, Artificial Sequence
  Description of Artificial Sequence: Synthetic oligonucleotide
ccgugagcaaagacccggg

SEQ ID NO: 2677005 - RNA, 19 nt, Artificial Sequence
  Description of Artificial Sequence: Synthetic oligonucleotide
aaccauccccacacuggau

SEQ ID NO: 2677006 - RNA, 19 nt, Artificial Sequence
  Description of Artificial Sequence: Synthetic oligonucleotide
gcuguuggcacugcgccca

SEQ ID NO: 2677007 - RNA, 19 nt, Artificial Sequence
  Description of Artificial Sequence: Synthetic oligonucleotide
gcccagucagggcugcugc

SEQ ID NO: 2677008 - RNA, 19 nt, Artificial Sequence
  Description of Artificial Sequence: Synthetic oligonucleotide
ggaucacaaccauccccac

SEQ ID NO: 2677009 - RNA, 19 nt, Artificial Sequence
  Description of Artificial Sequence: Synthetic oligonucleotide
guguauccauaugcccuac

SEQ ID NO: 2677010 - RNA, 19 nt, Artificial Sequence
  Description of Artificial Sequence: Synthetic oligonucleotide
uggugguccucuggcugca

SEQ ID NO: 2677011 - RNA, 19 nt, Artificial Sequence
  Description of Artificial Sequence: Synthetic oligonucleotide
aaagacccgggcagcuauu

SEQ ID NO: 2677012 - RNA, 19 nt, Artificial Sequence
  Description of Artificial Sequence: Synthetic oligonucleotide
cccugugaagaugucugag

SEQ ID NO: 2677013 - RNA, 19 nt, Artificial Sequence
  Description of Artificial Sequence: Synthetic oligonucleotide
cagcaguagcgcagcucug

SEQ ID NO: 2677014 - RNA, 19 nt, Artificial Sequence
  Description of Artificial Sequence: Synthetic oligonucleotide
caaagacccgggcagcuau

SEQ ID NO: 2677015 - RNA, 19 nt, Artificial Sequence
  Description of Artificial Sequence: Synthetic oligonucleotide
uggcugcuccgugagcaaa

SEQ ID NO: 2677016 - RNA, 19 nt, Artificial Sequence
  Description of Artificial Sequence: Synthetic oligonucleotide
gggaaccugggugccauac

SEQ ID NO: 2677017 - RNA, 19 nt, Artificial Sequence
  Description of Artificial Sequence: Synthetic oligonucleotide
gaugccugggucgguagau

SEQ ID NO: 2677018 - RNA, 19 nt, Artificial Sequence
  Description of Artificial Sequence: Synthetic oligonucleotide
gggacgcugccacugcuga

SEQ ID NO: 2677019 - RNA, 19 nt, Artificial Sequence
  Description of Artificial Sequence: Synthetic oligonucleotide
gaguuggcugaggccccag

SEQ ID NO: 2677020 - RNA, 19 nt, Artificial Sequence
  Description of Artificial Sequence: Synthetic oligonucleotide
ccugggugccauacuuaag

SEQ ID NO: 2677021 - RNA, 19 nt, Artificial Sequence
  Description of Artificial Sequence: Synthetic oligonucleotide
gugcagagacuccgagaga

SEQ ID NO: 2677022 - RNA, 19 nt, Artificial Sequence
  Description of Artificial Sequence: Synthetic oligonucleotide
ugcugcuccugggcacugc

SEQ ID NO: 2677023 - RNA, 19 nt, Artificial Sequence
  Description of Artificial Sequence: Synthetic oligonucleotide
uugaguccuuguggaucac

SEQ ID NO: 2677024 - RNA, 19 nt, Artificial Sequence
  Description of Artificial Sequence: Synthetic oligonucleotide
gacaucgcuucuagucucu

SEQ ID NO: 2677025 - RNA, 19 nt, Artificial Sequence
  Description of Artificial Sequence: Synthetic oligonucleotide
gcuacucccacuggugguc

SEQ ID NO: 2677026 - RNA, 19 nt, Artificial Sequence
  Description of Artificial Sequence: Synthetic oligonucleotide
gcaguagcgcagcucugca

SEQ ID NO: 2677027 - RNA, 19 nt, Artificial Sequence
  Description of Artificial Sequence: Synthetic oligonucleotide
cuguuggcacugcgcccag

SEQ ID NO: 2677028 - RNA, 19 nt, Artificial Sequence
  Description of Artificial Sequence: Synthetic oligonucleotide
ugcgcccagucagggcugc

SEQ ID NO: 2677029 - RNA, 19 nt, Artificial Sequence
  Description of Artificial Sequence: Synthetic oligonucleotide
ccuaucauugcugagccau

SEQ ID NO: 2677030 - RNA, 19 nt, Artificial Sequence
  Description of Artificial Sequence: Synthetic oligonucleotide
cugcgcccagucagggcug

SEQ ID NO: 2677031 - RNA, 19 nt, Artificial Sequence
  Description of Artificial Sequence: Synthetic oligonucleotide
caguagcgcagcucugcaa

SEQ ID NO: 2677032 - RNA, 19 nt, Artificial Sequence
  Description of Artificial Sequence: Synthetic oligonucleotide
ggucgguagaucgauccua

SEQ ID NO: 2677033 - RNA, 19 nt, Artificial Sequence
  Description of Artificial Sequence: Synthetic oligonucleotide
aggccagugugcagagacu

SEQ ID NO: 2677034 - RNA, 19 nt, Artificial Sequence
  Description of Artificial Sequence: Synthetic oligonucleotide
cgauccuaucauugcugag

SEQ ID NO: 2677035 - RNA, 19 nt, Artificial Sequence
  Description of Artificial Sequence: Synthetic oligonucleotide
cgugagcaaagacccgggc

SEQ ID NO: 2677036 - RNA, 19 nt, Artificial Sequence
  Description of Artificial Sequence: Synthetic oligonucleotide
gcugacugggacucaggcu

SEQ ID NO: 2677037 - RNA, 19 nt, Artificial Sequence
  Description of Artificial Sequence: Synthetic oligonucleotide
gccagugugcagagacucc

SEQ ID NO: 2677038 - RNA, 19 nt, Artificial Sequence
  Description of Artificial Sequence: Synthetic oligonucleotide
gucgguagaucgauccuau

SEQ ID NO: 2677039 - RNA, 19 nt, Artificial Sequence
  Description of Artificial Sequence: Synthetic oligonucleotide
gcacugcuaggcccugggc

SEQ ID NO: 2677040 - RNA, 19 nt, Artificial Sequence
  Description of Artificial Sequence: Synthetic oligonucleotide
gggacucaggcuaggcauc

SEQ ID NO: 2677041 - RNA, 19 nt, Artificial Sequence
  Description of Artificial Sequence: Synthetic oligonucleotide
ugggaaccugggugccaua

SEQ ID NO: 2677042 - RNA, 19 nt, Artificial Sequence
  Description of Artificial Sequence: Synthetic oligonucleotide
gaacgcagaaggggacgcu

SEQ ID NO: 2677043 - RNA, 19 nt, Artificial Sequence
  Description of Artificial Sequence: Synthetic oligonucleotide
cucaggcuaggcaucuguu

SEQ ID NO: 2677044 - RNA, 19 nt, Artificial Sequence
  Description of Artificial Sequence: Synthetic oligonucleotide
ggggacgcugccacugcug

SEQ ID NO: 2677045 - RNA, 19 nt, Artificial Sequence
  Description of Artificial Sequence: Synthetic oligonucleotide
cccugggcgguccagggca

SEQ ID NO: 2677046 - RNA, 19 nt, Artificial Sequence
  Description of Artificial Sequence: Synthetic oligonucleotide
ggacgcugccacugcugac

SEQ ID NO: 2677047 - RNA, 19 nt, Artificial Sequence
  Description of Artificial Sequence: Synthetic oligonucleotide
ugggcccacggggaccauc

SEQ ID NO: 2677048 - RNA, 19 nt, Artificial Sequence
  Description of Artificial Sequence: Synthetic oligonucleotide
cugaguccaacaguugcuu

SEQ ID NO: 2677049 - RNA, 19 nt, Artificial Sequence
  Description of Artificial Sequence: Synthetic oligonucleotide
gcagaaggggacgcugcca

SEQ ID NO: 2677050 - RNA, 19 nt, Artificial Sequence
  Description of Artificial Sequence: Synthetic oligonucleotide
cuccccugugaagaugucu

SEQ ID NO: 2677051 - RNA, 19 nt, Artificial Sequence
  Description of Artificial Sequence: Synthetic oligonucleotide
ggaaccugggugccauacu

SEQ ID NO: 2677052 - RNA, 19 nt, Artificial Sequence
  Description of Artificial Sequence: Synthetic oligonucleotide
cacaaaggcuuggaggcuu

SEQ ID NO: 2677053 - RNA, 19 nt, Artificial Sequence
  Description of Artificial Sequence: Synthetic oligonucleotide
ggcuacucccacugguggu

SEQ ID NO: 2677054 - RNA, 19 nt, Artificial Sequence
  Description of Artificial Sequence: Synthetic oligonucleotide
gcuaggcaucuguuggcua

SEQ ID NO: 2677055 - RNA, 19 nt, Artificial Sequence
  Description of Artificial Sequence: Synthetic oligonucleotide
ugcuaggcccugggcgguc

SEQ ID NO: 2677056 - RNA, 19 nt, Artificial Sequence
  Description of Artificial Sequence: Synthetic oligonucleotide
ggcuccccugugaagaugu

SEQ ID NO: 2677057 - RNA, 19 nt, Artificial Sequence
  Description of Artificial Sequence: Synthetic oligonucleotide
gucaggguggcugcuccgu

SEQ ID NO: 2677058 - RNA, 19 nt, Artificial Sequence
  Description of Artificial Sequence: Synthetic oligonucleotide
ggugugaagcugggcccac

SEQ ID NO: 2677059 - RNA, 19 nt, Artificial Sequence
  Description of Artificial Sequence: Synthetic oligonucleotide
gggcccacggggaccauca

SEQ ID NO: 2677060 - RNA, 19 nt, Artificial Sequence
  Description of Artificial Sequence: Synthetic oligonucleotide
cccgggcagcuauugccac

SEQ ID NO: 2677061 - RNA, 19 nt, Artificial Sequence
  Description of Artificial Sequence: Synthetic oligonucleotide
gcugcuccgugagcaaaga

SEQ ID NO: 2677062 - RNA, 19 nt, Artificial Sequence
  Description of Artificial Sequence: Synthetic oligonucleotide
ggcuaggcaucuguuggcu

SEQ ID NO: 2677063 - RNA, 19 nt, Artificial Sequence
  Description of Artificial Sequence: Synthetic oligonucleotide
cccaguagggaggugugaa

SEQ ID NO: 2677064 - RNA, 19 nt, Artificial Sequence
  Description of Artificial Sequence: Synthetic oligonucleotide
gggucgguagaucgauccu

SEQ ID NO: 2677065 - RNA, 19 nt, Artificial Sequence
  Description of Artificial Sequence: Synthetic oligonucleotide
ggccccaguagggaggugu

SEQ ID NO: 2677066 - RNA, 19 nt, Artificial Sequence
  Description of Artificial Sequence: Synthetic oligonucleotide
gcuaggcccugggcggucc

SEQ ID NO: 2677067 - RNA, 19 nt, Artificial Sequence
  Description of Artificial Sequence: Synthetic oligonucleotide
cugcuccugggcacugcua

SEQ ID NO: 2677068 - RNA, 19 nt, Artificial Sequence
  Description of Artificial Sequence: Synthetic oligonucleotide
ccccugugaagaugucuga

SEQ ID NO: 2677069 - RNA, 19 nt, Artificial Sequence
  Description of Artificial Sequence: Synthetic oligonucleotide
ggugguccucuggcugcag

SEQ ID NO: 2677070 - RNA, 19 nt, Artificial Sequence
  Description of Artificial Sequence: Synthetic oligonucleotide
ggcccacggggaccaucag

SEQ ID NO: 2677071 - RNA, 19 nt, Artificial Sequence
  Description of Artificial Sequence: Synthetic oligonucleotide
ggaguuggcugaggcccca

SEQ ID NO: 2677072 - RNA, 19 nt, Artificial Sequence
  Description of Artificial Sequence: Synthetic oligonucleotide
gggcgguccagggcagcag

SEQ ID NO: 2677073 - RNA, 19 nt, Artificial Sequence
  Description of Artificial Sequence: Synthetic oligonucleotide
gcaagcagaacuggcuguu

SEQ ID NO: 2677074 - RNA, 19 nt, Artificial Sequence
  Description of Artificial Sequence: Synthetic oligonucleotide
cggaggaucuuggaacgca

SEQ ID NO: 2677075 - RNA, 19 nt, Artificial Sequence
  Description of Artificial Sequence: Synthetic oligonucleotide
gcaaagacccgggcagcua

SEQ ID NO: 2677076 - RNA, 19 nt, Artificial Sequence
  Description of Artificial Sequence: Synthetic oligonucleotide
gccugggucgguagaucga

SEQ ID NO: 2677077 - RNA, 19 nt, Artificial Sequence
  Description of Artificial Sequence: Synthetic oligonucleotide
cucccacuggugguccucu

SEQ ID NO: 2677078 - RNA, 19 nt, Artificial Sequence
  Description of Artificial Sequence: Synthetic oligonucleotide
ccgggcagcuauugccaca

SEQ ID NO: 2677079 - RNA, 19 nt, Artificial Sequence
  Description of Artificial Sequence: Synthetic oligonucleotide
gcccuacuggugggugugc

SEQ ID NO: 2677080 - RNA, 19 nt, Artificial Sequence
  Description of Artificial Sequence: Synthetic oligonucleotide
cgagagagcuguuggcacu

SEQ ID NO: 2677081 - RNA, 19 nt, Artificial Sequence
  Description of Artificial Sequence: Synthetic oligonucleotide
cuguuguccuugaguccuu

SEQ ID NO: 2677082 - RNA, 19 nt, Artificial Sequence
  Description of Artificial Sequence: Synthetic oligonucleotide
ggggaccaucagggaguag

SEQ ID NO: 2677083 - RNA, 19 nt, Artificial Sequence
  Description of Artificial Sequence: Synthetic oligonucleotide
cccuacuggugggugugca

SEQ ID NO: 2677084 - RNA, 19 nt, Artificial Sequence
  Description of Artificial Sequence: Synthetic oligonucleotide
agacuccgagagagcuguu

SEQ ID NO: 2677085 - RNA, 19 nt, Artificial Sequence
  Description of Artificial Sequence: Synthetic oligonucleotide
ccuacuggugggugugcau

SEQ ID NO: 2677086 - RNA, 19 nt, Artificial Sequence
  Description of Artificial Sequence: Synthetic oligonucleotide
cgggcagcuauugccacaa

SEQ ID NO: 2677087 - RNA, 19 nt, Artificial Sequence
  Description of Artificial Sequence: Synthetic oligonucleotide
cgcccagucagggcugcug

SEQ ID NO: 2677088 - RNA, 19 nt, Artificial Sequence
  Description of Artificial Sequence: Synthetic oligonucleotide
ccugggucgguagaucgau

SEQ ID NO: 2677089 - RNA, 19 nt, Artificial Sequence
  Description of Artificial Sequence: Synthetic oligonucleotide
gcuccccugugaagauguc

SEQ ID NO: 2677090 - RNA, 19 nt, Artificial Sequence
  Description of Artificial Sequence: Synthetic oligonucleotide
gggcagcuauugccacaaa

SEQ ID NO: 2677091 - RNA, 19 nt, Artificial Sequence
  Description of Artificial Sequence: Synthetic oligonucleotide
ccccaguagggagguguga

SEQ ID NO: 2677092 - RNA, 19 nt, Artificial Sequence
  Description of Artificial Sequence: Synthetic oligonucleotide
cccagucagggcugcugcu

SEQ ID NO: 2677093 - RNA, 19 nt, Artificial Sequence
  Description of Artificial Sequence: Synthetic oligonucleotide
cgcuucuagucucuucauu

SEQ ID NO: 2677094 - RNA, 19 nt, Artificial Sequence
  Description of Artificial Sequence: Synthetic oligonucleotide
gggcucagucaggguggcu

SEQ ID NO: 2677095 - RNA, 19 nt, Artificial Sequence
  Description of Artificial Sequence: Synthetic oligonucleotide
cggggaccaucagggagua

SEQ ID NO: 2677096 - RNA, 19 nt, Artificial Sequence
  Description of Artificial Sequence: Synthetic oligonucleotide
gcgcccagucagggcugcu

SEQ ID NO: 2677097 - RNA, 19 nt, Artificial Sequence
  Description of Artificial Sequence: Synthetic oligonucleotide
cugggcccacggggaccau

SEQ ID NO: 2677098 - RNA, 19 nt, Artificial Sequence
  Description of Artificial Sequence: Synthetic oligonucleotide
aagucuaauauuuuaaauc

SEQ ID NO: 2677099 - RNA, 19 nt, Artificial Sequence
  Description of Artificial Sequence: Synthetic oligonucleotide
aaaaugaaucauuugcucg

SEQ ID NO: 2677100 - RNA, 19 nt, Artificial Sequence
  Description of Artificial Sequence: Synthetic oligonucleotide
cuuauuuccaauaacuugc

SEQ ID NO: 2677101 - RNA, 19 nt, Artificial Sequence
  Description of Artificial Sequence: Synthetic oligonucleotide
aaaugaaucauuugcucgg

SEQ ID NO: 2677102 - RNA, 19 nt, Artificial Sequence
  Description of Artificial Sequence: Synthetic oligonucleotide
uaaugauuccacuaaauag

SEQ ID NO: 2677103 - RNA, 19 nt, Artificial Sequence
  Description of Artificial Sequence: Synthetic oligonucleotide
aaaucauuaauaaaugcag

SEQ ID NO: 2677104 - RNA, 19 nt, Artificial Sequence
  Description of Artificial Sequence: Synthetic oligonucleotide
uaaauagugacugucacag

SEQ ID NO: 2677105 - RNA, 19 nt, Artificial Sequence
  Description of Artificial Sequence: Synthetic oligonucleotide
auaguauaaccuuugauug

SEQ ID NO: 2677106 - RNA, 19 nt, Artificial Sequence
  Description of Artificial Sequence: Synthetic oligonucleotide
aaaauaaugauuccacuaa

SEQ ID NO: 2677107 - RNA, 19 nt, Artificial Sequence
  Description of Artificial Sequence: Synthetic oligonucleotide
uauuuuaaaucauuaauaa

SEQ ID NO: 2677108 - RNA, 19 nt, Artificial Sequence
  Description of Artificial Sequence: Synthetic oligonucleotide
acuccuaugagucaaugac

SEQ ID NO: 2677109 - RNA, 19 nt, Artificial Sequence
  Description of Artificial Sequence: Synthetic oligonucleotide
uuaauaaaugcagaaauac

SEQ ID NO: 2677110 - RNA, 19 nt, Artificial Sequence
  Description of Artificial Sequence: Synthetic oligonucleotide
agugguauuaacuguaaag

SEQ ID NO: 2677111 - RNA, 19 nt, Artificial Sequence
  Description of Artificial Sequence: Synthetic oligonucleotide
ucuuguaacagcagaauca

SEQ ID NO: 2677112 - RNA, 19 nt, Artificial Sequence
  Description of Artificial Sequence: Synthetic oligonucleotide
ucaccaaacgcucagaagu

SEQ ID NO: 2677113 - RNA, 19 nt, Artificial Sequence
  Description of Artificial Sequence: Synthetic oligonucleotide
aacgcucagaaguacuacc

SEQ ID NO: 2677114 - RNA, 19 nt, Artificial Sequence
  Description of Artificial Sequence: Synthetic oligonucleotide
aaugauuccacuaaauagu

SEQ ID NO: 2677115 - RNA, 19 nt, Artificial Sequence
  Description of Artificial Sequence: Synthetic oligonucleotide
uacagaauuuauuuacagg

SEQ ID NO: 2677116 - RNA, 19 nt, Artificial Sequence
  Description of Artificial Sequence: Synthetic oligonucleotide
ucagaagugguauuaacug

SEQ ID NO: 2677117 - RNA, 19 nt, Artificial Sequence
  Description of Artificial Sequence: Synthetic oligonucleotide
acaaacaggacuuccuugg

SEQ ID NO: 2677118 - RNA, 19 nt, Artificial Sequence
  Description of Artificial Sequence: Synthetic oligonucleotide
uaaccuuugauugagguga

SEQ ID NO: 2677119 - RNA, 19 nt, Artificial Sequence
  Description of Artificial Sequence: Synthetic oligonucleotide
aauagugacugucacaguu

SEQ ID NO: 2677120 - RNA, 19 nt, Artificial Sequence
  Description of Artificial Sequence: Synthetic oligonucleotide
uccuaugagucaaugacug

SEQ ID NO: 2677121 - RNA, 19 nt, Artificial Sequence
  Description of Artificial Sequence: Synthetic oligonucleotide
ucuaauauuuuaaaucauu

SEQ ID NO: 2677122 - RNA, 19 nt, Artificial Sequence
  Description of Artificial Sequence: Synthetic oligonucleotide
uucagaagugguauuaacu

SEQ ID NO: 2677123 - RNA, 19 nt, Artificial Sequence
  Description of Artificial Sequence: Synthetic oligonucleotide
uuuguaaauggcuucuugu

SEQ ID NO: 2677124 - RNA, 19 nt, Artificial Sequence
  Description of Artificial Sequence: Synthetic oligonucleotide
auacagaauuuauuuacag

SEQ ID NO: 2677125 - RNA, 19 nt, Artificial Sequence
  Description of Artificial Sequence: Synthetic oligonucleotide
ucuguucucaccaaacgcu

SEQ ID NO: 2677126 - RNA, 19 nt, Artificial Sequence
  Description of Artificial Sequence: Synthetic oligonucleotide
auugaggugacggagggac

SEQ ID NO: 2677127 - RNA, 19 nt, Artificial Sequence
  Description of Artificial Sequence: Synthetic oligonucleotide
uguaaauggcuucuuguac

SEQ ID NO: 2677128 - RNA, 19 nt, Artificial Sequence
  Description of Artificial Sequence: Synthetic oligonucleotide
ugcucuaacagguuucucc

SEQ ID NO: 2677129 - RNA, 19 nt, Artificial Sequence
  Description of Artificial Sequence: Synthetic oligonucleotide
aaucauuugcucggugugc

SEQ ID NO: 2677130 - RNA, 19 nt, Artificial Sequence
  Description of Artificial Sequence: Synthetic oligonucleotide
uuugauugaggugacggag

SEQ ID NO: 2677131 - RNA, 19 nt, Artificial Sequence
  Description of Artificial Sequence: Synthetic oligonucleotide
aacagcagaaucaguggcc

SEQ ID NO: 2677132 - RNA, 19 nt, Artificial Sequence
  Description of Artificial Sequence: Synthetic oligonucleotide
gacacuuuguccaaaauga

SEQ ID NO: 2677133 - RNA, 19 nt, Artificial Sequence
  Description of Artificial Sequence: Synthetic oligonucleotide
uugauugaggugacggagg

SEQ ID NO: 2677134 - RNA, 19 nt, Artificial Sequence
  Description of Artificial Sequence: Synthetic oligonucleotide
aucauuaauaaaugcagaa

SEQ ID NO: 2677135 - RNA, 19 nt, Artificial Sequence
  Description of Artificial Sequence: Synthetic oligonucleotide
acugacuccucuucgguac

SEQ ID NO: 2677136 - RNA, 19 nt, Artificial Sequence
  Description of Artificial Sequence: Synthetic oligonucleotide
uuuccaauaacuugcuuuc

SEQ ID NO: 2677137 - RNA, 19 nt, Artificial Sequence
  Description of Artificial Sequence: Synthetic oligonucleotide
aaauaaugauuccacuaaa

SEQ ID NO: 2677138 - RNA, 19 nt, Artificial Sequence
  Description of Artificial Sequence: Synthetic oligonucleotide
uucgguacuccuaugaguc

SEQ ID NO: 2677139 - RNA, 19 nt, Artificial Sequence
  Description of Artificial Sequence: Synthetic oligonucleotide
auaacuugcuuucuucuug

SEQ ID NO: 2677140 - RNA, 19 nt, Artificial Sequence
  Description of Artificial Sequence: Synthetic oligonucleotide
ugauugaggugacggaggg

SEQ ID NO: 2677141 - RNA, 19 nt, Artificial Sequence
  Description of Artificial Sequence: Synthetic oligonucleotide
uuggguacaauauacuguc

SEQ ID NO: 2677142 - RNA, 19 nt, Artificial Sequence
  Description of Artificial Sequence: Synthetic oligonucleotide
acuaccugaaacuucuuca

SEQ ID NO: 2677143 - RNA, 19 nt, Artificial Sequence
  Description of Artificial Sequence: Synthetic oligonucleotide
uaacagcagaaucaguggc

SEQ ID NO: 2677144 - RNA, 19 nt, Artificial Sequence
  Description of Artificial Sequence: Synthetic oligonucleotide
cauuccuacagauccagag

SEQ ID NO: 2677145 - RNA, 19 nt, Artificial Sequence
  Description of Artificial Sequence: Synthetic oligonucleotide
gcuucauuccuacagaucc

SEQ ID NO: 2677146 - RNA, 19 nt, Artificial Sequence
  Description of Artificial Sequence: Synthetic oligonucleotide
aguauaaccuuugauugag

SEQ ID NO: 2677147 - RNA, 19 nt, Artificial Sequence
  Description of Artificial Sequence: Synthetic oligonucleotide
aauuuauuuacaggauucu

SEQ ID NO: 2677148 - RNA, 19 nt, Artificial Sequence
  Description of Artificial Sequence: Synthetic oligonucleotide
uguacauaguauaaccuuu

SEQ ID NO: 2677149 - RNA, 19 nt, Artificial Sequence
  Description of Artificial Sequence: Synthetic oligonucleotide
aauacagaauuuauuuaca

SEQ ID NO: 2677150 - RNA, 19 nt, Artificial Sequence
  Description of Artificial Sequence: Synthetic oligonucleotide
ugaaucauuugcucggugu

SEQ ID NO: 2677151 - RNA, 19 nt, Artificial Sequence
  Description of Artificial Sequence: Synthetic oligonucleotide
caaaaugaaucauuugcuc

SEQ ID NO: 2677152 - RNA, 19 nt, Artificial Sequence
  Description of Artificial Sequence: Synthetic oligonucleotide
ucuucuuguaacagcagaa

SEQ ID NO: 2677153 - RNA, 19 nt, Artificial Sequence
  Description of Artificial Sequence: Synthetic oligonucleotide
agaacugacuccucuucgg

SEQ ID NO: 2677154 - RNA, 19 nt, Artificial Sequence
  Description of Artificial Sequence: Synthetic oligonucleotide
gaaucauuugcucggugug

SEQ ID NO: 2677155 - RNA, 19 nt, Artificial Sequence
  Description of Artificial Sequence: Synthetic oligonucleotide
aauauacugucccgucuug

SEQ ID NO: 2677156 - RNA, 19 nt, Artificial Sequence
  Description of Artificial Sequence: Synthetic oligonucleotide
uuccuuggguacaauauac

SEQ ID NO: 2677157 - RNA, 19 nt, Artificial Sequence
  Description of Artificial Sequence: Synthetic oligonucleotide
agaauuuauuuacaggauu

SEQ ID NO: 2677158 - RNA, 19 nt, Artificial Sequence
  Description of Artificial Sequence: Synthetic oligonucleotide
agagaacugacuccucuuc

SEQ ID NO: 2677159 - RNA, 19 nt, Artificial Sequence
  Description of Artificial Sequence: Synthetic oligonucleotide
uacugucccgucuugcugg

SEQ ID NO: 2677160 - RNA, 19 nt, Artificial Sequence
  Description of Artificial Sequence: Synthetic oligonucleotide
cuuucuucuuguaacagca

SEQ ID NO: 2677161 - RNA, 19 nt, Artificial Sequence
  Description of Artificial Sequence: Synthetic oligonucleotide
ugagucaaugacugguugc

SEQ ID NO: 2677162 - RNA, 19 nt, Artificial Sequence
  Description of Artificial Sequence: Synthetic oligonucleotide
gagaacugacuccucuucg

SEQ ID NO: 2677163 - RNA, 19 nt, Artificial Sequence
  Description of Artificial Sequence: Synthetic oligonucleotide
auaaccuuugauugaggug

SEQ ID NO: 2677164 - RNA, 19 nt, Artificial Sequence
  Description of Artificial Sequence: Synthetic oligonucleotide
ugacugucacaguugauca

SEQ ID NO: 2677165 - RNA, 19 nt, Artificial Sequence
  Description of Artificial Sequence: Synthetic oligonucleotide
uguccaaaaugaaucauuu

SEQ ID NO: 2677166 - RNA, 19 nt, Artificial Sequence
  Description of Artificial Sequence: Synthetic oligonucleotide
uuagugggacacuuugucc

SEQ ID NO: 2677167 - RNA, 19 nt, Artificial Sequence
  Description of Artificial Sequence: Synthetic oligonucleotide
ucuucgguacuccuaugag

SEQ ID NO: 2677168 - RNA, 19 nt, Artificial Sequence
  Description of Artificial Sequence: Synthetic oligonucleotide
uguagcuuguacugguuca

SEQ ID NO: 2677169 - RNA, 19 nt, Artificial Sequence
  Description of Artificial Sequence: Synthetic oligonucleotide
gucauuguggcacccauug

SEQ ID NO: 2677170 - RNA, 19 nt, Artificial Sequence
  Description of Artificial Sequence: Synthetic oligonucleotide
uucacaaacaggacuuccu

SEQ ID NO: 2677171 - RNA, 19 nt, Artificial Sequence
  Description of Artificial Sequence: Synthetic oligonucleotide
aaacgcucagaaguacuac

SEQ ID NO: 2677172 - RNA, 19 nt, Artificial Sequence
  Description of Artificial Sequence: Synthetic oligonucleotide
acggagggacuucaggacc

SEQ ID NO: 2677173 - RNA, 19 nt, Artificial Sequence
  Description of Artificial Sequence: Synthetic oligonucleotide
guaaauggcuucuuguaca

SEQ ID NO: 2677174 - RNA, 19 nt, Artificial Sequence
  Description of Artificial Sequence: Synthetic oligonucleotide
cuucuguucucaccaaacg

SEQ ID NO: 2677175 - RNA, 19 nt, Artificial Sequence
  Description of Artificial Sequence: Synthetic oligonucleotide
uccaguaucaggagagaac

SEQ ID NO: 2677176 - RNA, 19 nt, Artificial Sequence
  Description of Artificial Sequence: Synthetic oligonucleotide
uuauuuccaauaacuugcu

SEQ ID NO: 2677177 - RNA, 19 nt, Artificial Sequence
  Description of Artificial Sequence: Synthetic oligonucleotide
aacaggacuuccuugggua

SEQ ID NO: 2677178 - RNA, 19 nt, Artificial Sequence
  Description of Artificial Sequence: Synthetic oligonucleotide
uuguacauaguauaaccuu

SEQ ID NO: 2677179 - RNA, 19 nt, Artificial Sequence
  Description of Artificial Sequence: Synthetic oligonucleotide
gugugcuucauuccuacag

SEQ ID NO: 2677180 - RNA, 19 nt, Artificial Sequence
  Description of Artificial Sequence: Synthetic oligonucleotide
cuaccugaaacuucuucag

SEQ ID NO: 2677181 - RNA, 19 nt, Artificial Sequence
  Description of Artificial Sequence: Synthetic oligonucleotide
aguacuaccugaaacuucu

SEQ ID NO: 2677182 - RNA, 19 nt, Artificial Sequence
  Description of Artificial Sequence: Synthetic oligonucleotide
ucacaguugaucaguauuu

SEQ ID NO: 2677183 - RNA, 19 nt, Artificial Sequence
  Description of Artificial Sequence: Synthetic oligonucleotide
uaguauaaccuuugauuga

SEQ ID NO: 2677184 - RNA, 19 nt, Artificial Sequence
  Description of Artificial Sequence: Synthetic oligonucleotide
ugguauuaacuguaaagua

SEQ ID NO: 2677185 - RNA, 19 nt, Artificial Sequence
  Description of Artificial Sequence: Synthetic oligonucleotide
uacauaguauaaccuuuga

SEQ ID NO: 2677186 - RNA, 19 nt, Artificial Sequence
  Description of Artificial Sequence: Synthetic oligonucleotide
uguacugguucacuugcac

SEQ ID NO: 2677187 - RNA, 19 nt, Artificial Sequence
  Description of Artificial Sequence: Synthetic oligonucleotide
cuuagugggacacuuuguc

SEQ ID NO: 2677188 - RNA, 19 nt, Artificial Sequence
  Description of Artificial Sequence: Synthetic oligonucleotide
ucuuguagcuuguacuggu

SEQ ID NO: 2677189 - RNA, 19 nt, Artificial Sequence
  Description of Artificial Sequence: Synthetic oligonucleotide
ugacggagggacuucagga

SEQ ID NO: 2677190 - RNA, 19 nt, Artificial Sequence
  Description of Artificial Sequence: Synthetic oligonucleotide
uuguaaauggcuucuugua

SEQ ID NO: 2677191 - RNA, 19 nt, Artificial Sequence
  Description of Artificial Sequence: Synthetic oligonucleotide
cauaguauaaccuuugauu

SEQ ID NO: 2677192 - RNA, 19 nt, Artificial Sequence
  Description of Artificial Sequence: Synthetic oligonucleotide
cucuggauccaguaucagg

SEQ ID NO: 2677193 - RNA, 19 nt, Artificial Sequence
  Description of Artificial Sequence: Synthetic oligonucleotide
aaguacuaccugaaacuuc

SEQ ID NO: 2677194 - RNA, 19 nt, Artificial Sequence
  Description of Artificial Sequence: Synthetic oligonucleotide
auaaaugcagaaauacaga

SEQ ID NO: 2677195 - RNA, 19 nt, Artificial Sequence
  Description of Artificial Sequence: Synthetic oligonucleotide
ucuuuuccaugagagaacu

SEQ ID NO: 2677196 - RNA, 19 nt, Artificial Sequence
  Description of Artificial Sequence: Synthetic oligonucleotide
uauacugucccgucuugcu

SEQ ID NO: 2677197 - RNA, 19 nt, Artificial Sequence
  Description of Artificial Sequence: Synthetic oligonucleotide
acaauauacugucccgucu

SEQ ID NO: 2677198 - RNA, 19 nt, Artificial Sequence
  Description of Artificial Sequence: Synthetic oligonucleotide
uuguccaaaaugaaucauu

SEQ ID NO: 2677199 - RNA, 19 nt, Artificial Sequence
  Description of Artificial Sequence: Synthetic oligonucleotide
auauacugucccgucuugc

SEQ ID NO: 2677200 - RNA, 19 nt, Artificial Sequence
  Description of Artificial Sequence: Synthetic oligonucleotide
uagugacugucacaguuga

SEQ ID NO: 2677201 - RNA, 19 nt, Artificial Sequence
  Description of Artificial Sequence: Synthetic oligonucleotide
acauaguauaaccuuugau

SEQ ID NO: 2677202 - RNA, 19 nt, Artificial Sequence
  Description of Artificial Sequence: Synthetic oligonucleotide
uuccaugagagaacugacu

SEQ ID NO: 2677203 - RNA, 19 nt, Artificial Sequence
  Description of Artificial Sequence: Synthetic oligonucleotide
uacaauauacugucccguc

SEQ ID NO: 2677204 - RNA, 19 nt, Artificial Sequence
  Description of Artificial Sequence: Synthetic oligonucleotide
ugauuccacuaaauaguga

SEQ ID NO: 2677205 - RNA, 19 nt, Artificial Sequence
  Description of Artificial Sequence: Synthetic oligonucleotide
aaaugcagaaauacagaau

SEQ ID NO: 2677206 - RNA, 19 nt, Artificial Sequence
  Description of Artificial Sequence: Synthetic oligonucleotide
guaucaggagagaaccugg

SEQ ID NO: 2677207 - RNA, 19 nt, Artificial Sequence
  Description of Artificial Sequence: Synthetic oligonucleotide
uacuaccugaaacuucuuc

SEQ ID NO: 2677208 - RNA, 19 nt, Artificial Sequence
  Description of Artificial Sequence: Synthetic oligonucleotide
ggacacuuuguccaaaaug

SEQ ID NO: 2677209 - RNA, 19 nt, Artificial Sequence
  Description of Artificial Sequence: Synthetic oligonucleotide
acaggacuuccuuggguac

SEQ ID NO: 2677210 - RNA, 19 nt, Artificial Sequence
  Description of Artificial Sequence: Synthetic oligonucleotide
augagucaaugacugguug

SEQ ID NO: 2677211 - RNA, 19 nt, Artificial Sequence
  Description of Artificial Sequence: Synthetic oligonucleotide
auuaauaaaugcagaaaua

SEQ ID NO: 2677212 - RNA, 19 nt, Artificial Sequence
  Description of Artificial Sequence: Synthetic oligonucleotide
cuuuguccaaaaugaauca

SEQ ID NO: 2677213 - RNA, 19 nt, Artificial Sequence
  Description of Artificial Sequence: Synthetic oligonucleotide
aaugaaucauuugcucggu

SEQ ID NO: 2677214 - RNA, 19 nt, Artificial Sequence
  Description of Artificial Sequence: Synthetic oligonucleotide
uacugguucacuugcacuu

SEQ ID NO: 2677215 - RNA, 19 nt, Artificial Sequence
  Description of Artificial Sequence: Synthetic oligonucleotide
ggguacaauauacuguccc

SEQ ID NO: 2677216 - RNA, 19 nt, Artificial Sequence
  Description of Artificial Sequence: Synthetic oligonucleotide
uacuccuaugagucaauga

SEQ ID NO: 2677217 - RNA, 19 nt, Artificial Sequence
  Description of Artificial Sequence: Synthetic oligonucleotide
ucucaccaaacgcucagaa

SEQ ID NO: 2677218 - RNA, 19 nt, Artificial Sequence
  Description of Artificial Sequence: Synthetic oligonucleotide
uguucucaccaaacgcuca

SEQ ID NO: 2677219 - RNA, 19 nt, Artificial Sequence
  Description of Artificial Sequence: Synthetic oligonucleotide
uaugagucaaugacugguu

SEQ ID NO: 2677220 - RNA, 19 nt, Artificial Sequence
  Description of Artificial Sequence: Synthetic oligonucleotide
auuguggcacccauuguuc

SEQ ID NO: 2677221 - RNA, 19 nt, Artificial Sequence
  Description of Artificial Sequence: Synthetic oligonucleotide
cuaaauagugacugucaca

SEQ ID NO: 2677222 - RNA, 19 nt, Artificial Sequence
  Description of Artificial Sequence: Synthetic oligonucleotide
ucagaaguacuaccugaaa

SEQ ID NO: 2677223 - RNA, 19 nt, Artificial Sequence
  Description of Artificial Sequence: Synthetic oligonucleotide
ugcucggugugcuucauuc

SEQ ID NO: 2677224 - RNA, 19 nt, Artificial Sequence
  Description of Artificial Sequence: Synthetic oligonucleotide
aaauagugacugucacagu

SEQ ID NO: 2677225 - RNA, 19 nt, Artificial Sequence
  Description of Artificial Sequence: Synthetic oligonucleotide
agaaucaguggcccuguca

SEQ ID NO: 2677226 - RNA, 19 nt, Artificial Sequence
  Description of Artificial Sequence: Synthetic oligonucleotide
uccuuggguacaauauacu

SEQ ID NO: 2677227 - RNA, 19 nt, Artificial Sequence
  Description of Artificial Sequence: Synthetic oligonucleotide
uaucaggagagaaccuggu

SEQ ID NO: 2677228 - RNA, 19 nt, Artificial Sequence
  Description of Artificial Sequence: Synthetic oligonucleotide
augauuccacuaaauagug

SEQ ID NO: 2677229 - RNA, 19 nt, Artificial Sequence
  Description of Artificial Sequence: Synthetic oligonucleotide
guacauaguauaaccuuug

SEQ ID NO: 2677230 - RNA, 19 nt, Artificial Sequence
  Description of Artificial Sequence: Synthetic oligonucleotide
uucugcucuaacagguuuc

SEQ ID NO: 2677231 - RNA, 19 nt, Artificial Sequence
  Description of Artificial Sequence: Synthetic oligonucleotide
guucucaccaaacgcucag

SEQ ID NO: 2677232 - RNA, 19 nt, Artificial Sequence
  Description of Artificial Sequence: Synthetic oligonucleotide
uccucuucgguacuccuau

SEQ ID NO: 2677233 - RNA, 19 nt, Artificial Sequence
  Description of Artificial Sequence: Synthetic oligonucleotide
cucaccaaacgcucagaag

SEQ ID NO: 2677234 - RNA, 19 nt, Artificial Sequence
  Description of Artificial Sequence: Synthetic oligonucleotide
guucagaagugguauuaac

SEQ ID NO: 2677235 - RNA, 19 nt, Artificial Sequence
  Description of Artificial Sequence: Synthetic oligonucleotide
caaacaggacuuccuuggg

SEQ ID NO: 2677236 - RNA, 19 nt, Artificial Sequence
  Description of Artificial Sequence: Synthetic oligonucleotide
aucaguggcccugucauug

SEQ ID NO: 2677237 - RNA, 19 nt, Artificial Sequence
  Description of Artificial Sequence: Synthetic oligonucleotide
ucuccacuuauuuccaaua

SEQ ID NO: 2677238 - RNA, 19 nt, Artificial Sequence
  Description of Artificial Sequence: Synthetic oligonucleotide
gugacugucacaguugauc

SEQ ID NO: 2677239 - RNA, 19 nt, Artificial Sequence
  Description of Artificial Sequence: Synthetic oligonucleotide
guccaaaaugaaucauuug

SEQ ID NO: 2677240 - RNA, 19 nt, Artificial Sequence
  Description of Artificial Sequence: Synthetic oligonucleotide
cacuaaauagugacuguca

SEQ ID NO: 2677241 - RNA, 19 nt, Artificial Sequence
  Description of Artificial Sequence: Synthetic oligonucleotide
ugucccgucuugcuggaac

SEQ ID NO: 2677242 - RNA, 19 nt, Artificial Sequence
  Description of Artificial Sequence: Synthetic oligonucleotide
gacugucacaguugaucag

SEQ ID NO: 2677243 - RNA, 19 nt, Artificial Sequence
  Description of Artificial Sequence: Synthetic oligonucleotide
gguucacuugcacuuagug

SEQ ID NO: 2677244 - RNA, 19 nt, Artificial Sequence
  Description of Artificial Sequence: Synthetic oligonucleotide
auuaacuguaaaguauuuu

SEQ ID NO: 2677245 - RNA, 19 nt, Artificial Sequence
  Description of Artificial Sequence: Synthetic oligonucleotide
uuguggcacccauuguucc

SEQ ID NO: 2677246 - RNA, 19 nt, Artificial Sequence
  Description of Artificial Sequence: Synthetic oligonucleotide
ccaguaucaggagagaacc

SEQ ID NO: 2677247 - RNA, 19 nt, Artificial Sequence
  Description of Artificial Sequence: Synthetic oligonucleotide
uuuguccaaaaugaaucau

SEQ ID NO: 2677248 - RNA, 19 nt, Artificial Sequence
  Description of Artificial Sequence: Synthetic oligonucleotide
gacggagggacuucaggac

SEQ ID NO: 2677249 - RNA, 19 nt, Artificial Sequence
  Description of Artificial Sequence: Synthetic oligonucleotide
ucaaugacugguugcucuc

SEQ ID NO: 2677250 - RNA, 19 nt, Artificial Sequence
  Description of Artificial Sequence: Synthetic oligonucleotide
auacugucccgucuugcug

SEQ ID NO: 2677251 - RNA, 19 nt, Artificial Sequence
  Description of Artificial Sequence: Synthetic oligonucleotide
uggguacaauauacugucc

SEQ ID NO: 2677252 - RNA, 19 nt, Artificial Sequence
  Description of Artificial Sequence: Synthetic oligonucleotide
gugguauuaacuguaaagu

SEQ ID NO: 2677253 - RNA, 19 nt, Artificial Sequence
  Description of Artificial Sequence: Synthetic oligonucleotide
cuuuucugcucuaacaggu

SEQ ID NO: 2677254 - RNA, 19 nt, Artificial Sequence
  Description of Artificial Sequence: Synthetic oligonucleotide
accaaacgcucagaaguac

SEQ ID NO: 2677255 - RNA, 19 nt, Artificial Sequence
  Description of Artificial Sequence: Synthetic oligonucleotide
uccucuuuuccaugagaga

SEQ ID NO: 2677256 - RNA, 19 nt, Artificial Sequence
  Description of Artificial Sequence: Synthetic oligonucleotide
ugcuucauuccuacagauc

SEQ ID NO: 2677257 - RNA, 19 nt, Artificial Sequence
  Description of Artificial Sequence: Synthetic oligonucleotide
uucuccacuuauuuccaau

SEQ ID NO: 2677258 - RNA, 19 nt, Artificial Sequence
  Description of Artificial Sequence: Synthetic oligonucleotide
cuugcacuuagugggacac

SEQ ID NO: 2677259 - RNA, 19 nt, Artificial Sequence
  Description of Artificial Sequence: Synthetic oligonucleotide
ccuuugauugaggugacgg

SEQ ID NO: 2677260 - RNA, 19 nt, Artificial Sequence
  Description of Artificial Sequence: Synthetic oligonucleotide
gaaucaguggcccugucau

SEQ ID NO: 2677261 - RNA, 19 nt, Artificial Sequence
  Description of Artificial Sequence: Synthetic oligonucleotide
aaugacugguugcucucuu

SEQ ID NO: 2677262 - RNA, 19 nt, Artificial Sequence
  Description of Artificial Sequence: Synthetic oligonucleotide
ucacuugcacuuaguggga

SEQ ID NO: 2677263 - RNA, 19 nt, Artificial Sequence
  Description of Artificial Sequence: Synthetic oligonucleotide
cuuggguacaauauacugu

SEQ ID NO: 2677264 - RNA, 19 nt, Artificial Sequence
  Description of Artificial Sequence: Synthetic oligonucleotide
auagugacugucacaguug

SEQ ID NO: 2677265 - RNA, 19 nt, Artificial Sequence
  Description of Artificial Sequence: Synthetic oligonucleotide
aacugacuccucuucggua

SEQ ID NO: 2677266 - RNA, 19 nt, Artificial Sequence
  Description of Artificial Sequence: Synthetic oligonucleotide
aaccuuugauugaggugac

SEQ ID NO: 2677267 - RNA, 19 nt, Artificial Sequence
  Description of Artificial Sequence: Synthetic oligonucleotide
ugcacucuggauccaguau

SEQ ID NO: 2677268 - RNA, 19 nt, Artificial Sequence
  Description of Artificial Sequence: Synthetic oligonucleotide
uguucagaagugguauuaa

SEQ ID NO: 2677269 - RNA, 19 nt, Artificial Sequence
  Description of Artificial Sequence: Synthetic oligonucleotide
augaaucauuugcucggug

SEQ ID NO: 2677270 - RNA, 19 nt, Artificial Sequence
  Description of Artificial Sequence: Synthetic oligonucleotide
cucuuguagcuuguacugg

SEQ ID NO: 2677271 - RNA, 19 nt, Artificial Sequence
  Description of Artificial Sequence: Synthetic oligonucleotide
uuguacugguucacuugca

SEQ ID NO: 2677272 - RNA, 19 nt, Artificial Sequence
  Description of Artificial Sequence: Synthetic oligonucleotide
cuuugauugaggugacgga

SEQ ID NO: 2677273 - RNA, 19 nt, Artificial Sequence
  Description of Artificial Sequence: Synthetic oligonucleotide
acccauuguuccucuuuuc

SEQ ID NO: 2677274 - RNA, 19 nt, Artificial Sequence
  Description of Artificial Sequence: Synthetic oligonucleotide
acuuccuuggguacaauau

SEQ ID NO: 2677275 - RNA, 19 nt, Artificial Sequence
  Description of Artificial Sequence: Synthetic oligonucleotide
agcagaaucaguggcccug

SEQ ID NO: 2677276 - RNA, 19 nt, Artificial Sequence
  Description of Artificial Sequence: Synthetic oligonucleotide
uguggcacccauuguuccu

SEQ ID NO: 2677277 - RNA, 19 nt, Artificial Sequence
  Description of Artificial Sequence: Synthetic oligonucleotide
ccuuggguacaauauacug

SEQ ID NO: 2677278 - RNA, 19 nt, Artificial Sequence
  Description of Artificial Sequence: Synthetic oligonucleotide
guauaaccuuugauugagg

SEQ ID NO: 2677279 - RNA, 19 nt, Artificial Sequence
  Description of Artificial Sequence: Synthetic oligonucleotide
gucuuggggccucuuguag

SEQ ID NO: 2677280 - RNA, 19 nt, Artificial Sequence
  Description of Artificial Sequence: Synthetic oligonucleotide
ucauuguggcacccauugu

SEQ ID NO: 2677281 - RNA, 19 nt, Artificial Sequence
  Description of Artificial Sequence: Synthetic oligonucleotide
auuugcucggugugcuuca

SEQ ID NO: 2677282 - RNA, 19 nt, Artificial Sequence
  Description of Artificial Sequence: Synthetic oligonucleotide
aucauuugcucggugugcu

SEQ ID NO: 2677283 - RNA, 19 nt, Artificial Sequence
  Description of Artificial Sequence: Synthetic oligonucleotide
aaccugguccuuggcuggc

SEQ ID NO: 2677284 - RNA, 19 nt, Artificial Sequence
  Description of Artificial Sequence: Synthetic oligonucleotide
uggggccucuuguagcuug

SEQ ID NO: 2677285 - RNA, 19 nt, Artificial Sequence
  Description of Artificial Sequence: Synthetic oligonucleotide
ggaccuucuguucucacca

SEQ ID NO: 2677286 - RNA, 19 nt, Artificial Sequence
  Description of Artificial Sequence: Synthetic oligonucleotide
agucaaugacugguugcuc

SEQ ID NO: 2677287 - RNA, 19 nt, Artificial Sequence
  Description of Artificial Sequence: Synthetic oligonucleotide
gcuuguacugguucacuug

SEQ ID NO: 2677288 - RNA, 19 nt, Artificial Sequence
  Description of Artificial Sequence: Synthetic oligonucleotide
cucagaaguacuaccugaa

SEQ ID NO: 2677289 - RNA, 19 nt, Artificial Sequence
  Description of Artificial Sequence: Synthetic oligonucleotide
caauaacuugcuuucuucu

SEQ ID NO: 2677290 - RNA, 19 nt, Artificial Sequence
  Description of Artificial Sequence: Synthetic oligonucleotide
auuccacuaaauagugacu

SEQ ID NO: 2677291 - RNA, 19 nt, Artificial Sequence
  Description of Artificial Sequence: Synthetic oligonucleotide
cuuuuccaugagagaacug

SEQ ID NO: 2677292 - RNA, 19 nt, Artificial Sequence
  Description of Artificial Sequence: Synthetic oligonucleotide
aguggcccugucauugugg

SEQ ID NO: 2677293 - RNA, 19 nt, Artificial Sequence
  Description of Artificial Sequence: Synthetic oligonucleotide
gguauuaacuguaaaguau

SEQ ID NO: 2677294 - RNA, 19 nt, Artificial Sequence
  Description of Artificial Sequence: Synthetic oligonucleotide
ccaugagagaacugacucc

SEQ ID NO: 2677295 - RNA, 19 nt, Artificial Sequence
  Description of Artificial Sequence: Synthetic oligonucleotide
uuucuccacuuauuuccaa

SEQ ID NO: 2677296 - RNA, 19 nt, Artificial Sequence
  Description of Artificial Sequence: Synthetic oligonucleotide
cucuucgguacuccuauga

SEQ ID NO: 2677297 - RNA, 19 nt, Artificial Sequence
  Description of Artificial Sequence: Synthetic oligonucleotide
cucuaacagguuucuccac

SEQ ID NO: 2677298 - RNA, 19 nt, Artificial Sequence
  Description of Artificial Sequence: Synthetic oligonucleotide
cauuugcucggugugcuuc

SEQ ID NO: 2677299 - RNA, 19 nt, Artificial Sequence
  Description of Artificial Sequence: Synthetic oligonucleotide
cuaugagucaaugacuggu

SEQ ID NO: 2677300 - RNA, 19 nt, Artificial Sequence
  Description of Artificial Sequence: Synthetic oligonucleotide
ugguucacuugcacuuagu

SEQ ID NO: 2677301 - RNA, 19 nt, Artificial Sequence
  Description of Artificial Sequence: Synthetic oligonucleotide
guauuaacuguaaaguauu

SEQ ID NO: 2677302 - RNA, 19 nt, Artificial Sequence
  Description of Artificial Sequence: Synthetic oligonucleotide
ucgguacuccuaugaguca

SEQ ID NO: 2677303 - RNA, 19 nt, Artificial Sequence
  Description of Artificial Sequence: Synthetic oligonucleotide
aaucaguggcccugucauu

SEQ ID NO: 2677304 - RNA, 19 nt, Artificial Sequence
  Description of Artificial Sequence: Synthetic oligonucleotide
uggcuguucagaaguggua

SEQ ID NO: 2677305 - RNA, 19 nt, Artificial Sequence
  Description of Artificial Sequence: Synthetic oligonucleotide
gacuucaggaccuucuguu

SEQ ID NO: 2677306 - RNA, 19 nt, Artificial Sequence
  Description of Artificial Sequence: Synthetic oligonucleotide
cuucauuccuacagaucca

SEQ ID NO: 2677307 - RNA, 19 nt, Artificial Sequence
  Description of Artificial Sequence: Synthetic oligonucleotide
gaagugguauuaacuguaa

SEQ ID NO: 2677308 - RNA, 19 nt, Artificial Sequence
  Description of Artificial Sequence: Synthetic oligonucleotide
uuccaauaacuugcuuucu

SEQ ID NO: 2677309 - RNA, 19 nt, Artificial Sequence
  Description of Artificial Sequence: Synthetic oligonucleotide
gacuuccuuggguacaaua

SEQ ID NO: 2677310 - RNA, 19 nt, Artificial Sequence
  Description of Artificial Sequence: Synthetic oligonucleotide
gucacaguugaucaguauu

SEQ ID NO: 2677311 - RNA, 19 nt, Artificial Sequence
  Description of Artificial Sequence: Synthetic oligonucleotide
gucccgucuugcuggaacc

SEQ ID NO: 2677312 - RNA, 19 nt, Artificial Sequence
  Description of Artificial Sequence: Synthetic oligonucleotide
caugagagaacugacuccu

SEQ ID NO: 2677313 - RNA, 19 nt, Artificial Sequence
  Description of Artificial Sequence: Synthetic oligonucleotide
guagcuuguacugguucac

SEQ ID NO: 2677314 - RNA, 19 nt, Artificial Sequence
  Description of Artificial Sequence: Synthetic oligonucleotide
uugaggugacggagggacu

SEQ ID NO: 2677315 - RNA, 19 nt, Artificial Sequence
  Description of Artificial Sequence: Synthetic oligonucleotide
ccuucuguucucaccaaac

SEQ ID NO: 2677316 - RNA, 19 nt, Artificial Sequence
  Description of Artificial Sequence: Synthetic oligonucleotide
ugucauuguggcacccauu

SEQ ID NO: 2677317 - RNA, 19 nt, Artificial Sequence
  Description of Artificial Sequence: Synthetic oligonucleotide
caaacgcucagaaguacua

SEQ ID NO: 2677318 - RNA, 19 nt, Artificial Sequence
  Description of Artificial Sequence: Synthetic oligonucleotide
gagucaaugacugguugcu

SEQ ID NO: 2677319 - RNA, 19 nt, Artificial Sequence
  Description of Artificial Sequence: Synthetic oligonucleotide
ugaggugacggagggacuu

SEQ ID NO: 2677320 - RNA, 19 nt, Artificial Sequence
  Description of Artificial Sequence: Synthetic oligonucleotide
ucaguggcccugucauugu

SEQ ID NO: 2677321 - RNA, 19 nt, Artificial Sequence
  Description of Artificial Sequence: Synthetic oligonucleotide
uccuacagauccagagauu

SEQ ID NO: 2677322 - RNA, 19 nt, Artificial Sequence
  Description of Artificial Sequence: Synthetic oligonucleotide
acuuagugggacacuuugu

SEQ ID NO: 2677323 - RNA, 19 nt, Artificial Sequence
  Description of Artificial Sequence: Synthetic oligonucleotide
acgcucagaaguacuaccu

SEQ ID NO: 2677324 - RNA, 19 nt, Artificial Sequence
  Description of Artificial Sequence: Synthetic oligonucleotide
acuccucuucgguacuccu

SEQ ID NO: 2677325 - RNA, 19 nt, Artificial Sequence
  Description of Artificial Sequence: Synthetic oligonucleotide
guacuccuaugagucaaug

SEQ ID NO: 2677326 - RNA, 19 nt, Artificial Sequence
  Description of Artificial Sequence: Synthetic oligonucleotide
ccacuuauuuccaauaacu

SEQ ID NO: 2677327 - RNA, 19 nt, Artificial Sequence
  Description of Artificial Sequence: Synthetic oligonucleotide
cagaagugguauuaacugu

SEQ ID NO: 2677328 - RNA, 19 nt, Artificial Sequence
  Description of Artificial Sequence: Synthetic oligonucleotide
gacuccucuucgguacucc

SEQ ID NO: 2677329 - RNA, 19 nt, Artificial Sequence
  Description of Artificial Sequence: Synthetic oligonucleotide
ucggugugcuucauuccua

SEQ ID NO: 2677330 - RNA, 19 nt, Artificial Sequence
  Description of Artificial Sequence: Synthetic oligonucleotide
ggcccugucauuguggcac

SEQ ID NO: 2677331 - RNA, 19 nt, Artificial Sequence
  Description of Artificial Sequence: Synthetic oligonucleotide
uucucaccaaacgcucaga

SEQ ID NO: 2677332 - RNA, 19 nt, Artificial Sequence
  Description of Artificial Sequence: Synthetic oligonucleotide
auccaguaucaggagagaa

SEQ ID NO: 2677333 - RNA, 19 nt, Artificial Sequence
  Description of Artificial Sequence: Synthetic oligonucleotide
gaacugacuccucuucggu

SEQ ID NO: 2677334 - RNA, 19 nt, Artificial Sequence
  Description of Artificial Sequence: Synthetic oligonucleotide
cauuguuccucuuuuccau

SEQ ID NO: 2677335 - RNA, 19 nt, Artificial Sequence
  Description of Artificial Sequence: Synthetic oligonucleotide
gaaguacuaccugaaacuu

SEQ ID NO: 2677336 - RNA, 19 nt, Artificial Sequence
  Description of Artificial Sequence: Synthetic oligonucleotide
agucuuggggccucuugua

SEQ ID NO: 2677337 - RNA, 19 nt, Artificial Sequence
  Description of Artificial Sequence: Synthetic oligonucleotide
accuuugauugaggugacg

SEQ ID NO: 2677338 - RNA, 19 nt, Artificial Sequence
  Description of Artificial Sequence: Synthetic oligonucleotide
cacuuuguccaaaaugaau

SEQ ID NO: 2677339 - RNA, 19 nt, Artificial Sequence
  Description of Artificial Sequence: Synthetic oligonucleotide
cuccuaugagucaaugacu

SEQ ID NO: 2677340 - RNA, 19 nt, Artificial Sequence
  Description of Artificial Sequence: Synthetic oligonucleotide
cuucgguacuccuaugagu

SEQ ID NO: 2677341 - RNA, 19 nt, Artificial Sequence
  Description of Artificial Sequence: Synthetic oligonucleotide
guacugguucacuugcacu

SEQ ID NO: 2677342 - RNA, 19 nt, Artificial Sequence
  Description of Artificial Sequence: Synthetic oligonucleotide
cacuuauuuccaauaacuu

SEQ ID NO: 2677343 - RNA, 19 nt, Artificial Sequence
  Description of Artificial Sequence: Synthetic oligonucleotide
gauccaguaucaggagaga

SEQ ID NO: 2677344 - RNA, 19 nt, Artificial Sequence
  Description of Artificial Sequence: Synthetic oligonucleotide
gcuggcuguucagaagugg

SEQ ID NO: 2677345 - RNA, 19 nt, Artificial Sequence
  Description of Artificial Sequence: Synthetic oligonucleotide
acacuuuguccaaaaugaa

SEQ ID NO: 2677346 - RNA, 19 nt, Artificial Sequence
  Description of Artificial Sequence: Synthetic oligonucleotide
augagagaacugacuccuc

SEQ ID NO: 2677347 - RNA, 19 nt, Artificial Sequence
  Description of Artificial Sequence: Synthetic oligonucleotide
cauuguggcacccauuguu

SEQ ID NO: 2677348 - RNA, 19 nt, Artificial Sequence
  Description of Artificial Sequence: Synthetic oligonucleotide
ucuucagucuuggggccuc

SEQ ID NO: 2677349 - RNA, 19 nt, Artificial Sequence
  Description of Artificial Sequence: Synthetic oligonucleotide
ccacuaaauagugacuguc

SEQ ID NO: 2677350 - RNA, 19 nt, Artificial Sequence
  Description of Artificial Sequence: Synthetic oligonucleotide
ucccgucuugcuggaaccc

SEQ ID NO: 2677351 - RNA, 19 nt, Artificial Sequence
  Description of Artificial Sequence: Synthetic oligonucleotide
ugguugcucucuucacaaa

SEQ ID NO: 2677352 - RNA, 19 nt, Artificial Sequence
  Description of Artificial Sequence: Synthetic oligonucleotide
ggagagaaccugguccuug

SEQ ID NO: 2677353 - RNA, 19 nt, Artificial Sequence
  Description of Artificial Sequence: Synthetic oligonucleotide
gauugaggugacggaggga

SEQ ID NO: 2677354 - RNA, 19 nt, Artificial Sequence
  Description of Artificial Sequence: Synthetic oligonucleotide
cuggcuguucagaaguggu

SEQ ID NO: 2677355 - RNA, 19 nt, Artificial Sequence
  Description of Artificial Sequence: Synthetic oligonucleotide
ucauuugcucggugugcuu

SEQ ID NO: 2677356 - RNA, 19 nt, Artificial Sequence
  Description of Artificial Sequence: Synthetic oligonucleotide
acugucccgucuugcugga

SEQ ID NO: 2677357 - RNA, 19 nt, Artificial Sequence
  Description of Artificial Sequence: Synthetic oligonucleotide
cacuugcacuuagugggac

SEQ ID NO: 2677358 - RNA, 19 nt, Artificial Sequence
  Description of Artificial Sequence: Synthetic oligonucleotide
caccaaacgcucagaagua

SEQ ID NO: 2677359 - RNA, 19 nt, Artificial Sequence
  Description of Artificial Sequence: Synthetic oligonucleotide
cucggugugcuucauuccu

SEQ ID NO: 2677360 - RNA, 19 nt, Artificial Sequence
  Description of Artificial Sequence: Synthetic oligonucleotide
gccucuuguagcuuguacu

SEQ ID NO: 2677361 - RNA, 19 nt, Artificial Sequence
  Description of Artificial Sequence: Synthetic oligonucleotide
caggaccuucuguucucac

SEQ ID NO: 2677362 - RNA, 19 nt, Artificial Sequence
  Description of Artificial Sequence: Synthetic oligonucleotide
auggcuucuuguacauagu

SEQ ID NO: 2677363 - RNA, 19 nt, Artificial Sequence
  Description of Artificial Sequence: Synthetic oligonucleotide
uugcacuuagugggacacu

SEQ ID NO: 2677364 - RNA, 19 nt, Artificial Sequence
  Description of Artificial Sequence: Synthetic oligonucleotide
uggcacccauuguuccucu

SEQ ID NO: 2677365 - RNA, 19 nt, Artificial Sequence
  Description of Artificial Sequence: Synthetic oligonucleotide
ggccucuuguagcuuguac

SEQ ID NO: 2677366 - RNA, 19 nt, Artificial Sequence
  Description of Artificial Sequence: Synthetic oligonucleotide
caguggcccugucauugug

SEQ ID NO: 2677367 - RNA, 19 nt, Artificial Sequence
  Description of Artificial Sequence: Synthetic oligonucleotide
guggcacccauuguuccuc

SEQ ID NO: 2677368 - RNA, 19 nt, Artificial Sequence
  Description of Artificial Sequence: Synthetic oligonucleotide
cuaacagguuucuccacuu

SEQ ID NO: 2677369 - RNA, 19 nt, Artificial Sequence
  Description of Artificial Sequence: Synthetic oligonucleotide
gaccuucuguucucaccaa

SEQ ID NO: 2677370 - RNA, 19 nt, Artificial Sequence
  Description of Artificial Sequence: Synthetic oligonucleotide
aggugacggagggacuuca

SEQ ID NO: 2677371 - RNA, 19 nt, Artificial Sequence
  Description of Artificial Sequence: Synthetic oligonucleotide
uugcucggugugcuucauu

SEQ ID NO: 2677372 - RNA, 19 nt, Artificial Sequence
  Description of Artificial Sequence: Synthetic oligonucleotide
gaggugacggagggacuuc

SEQ ID NO: 2677373 - RNA, 19 nt, Artificial Sequence
  Description of Artificial Sequence: Synthetic oligonucleotide
uuugcucggugugcuucau

SEQ ID NO: 2677374 - RNA, 19 nt, Artificial Sequence
  Description of Artificial Sequence: Synthetic oligonucleotide
caggacuuccuuggguaca

SEQ ID NO: 2677375 - RNA, 19 nt, Artificial Sequence
  Description of Artificial Sequence: Synthetic oligonucleotide
cagaaucaguggcccuguc

SEQ ID NO: 2677376 - RNA, 19 nt, Artificial Sequence
  Description of Artificial Sequence: Synthetic oligonucleotide
gagggacuucaggaccuuc

SEQ ID NO: 2677377 - RNA, 19 nt, Artificial Sequence
  Description of Artificial Sequence: Synthetic oligonucleotide
agugacugucacaguugau

SEQ ID NO: 2677378 - RNA, 19 nt, Artificial Sequence
  Description of Artificial Sequence: Synthetic oligonucleotide
cuccucuucgguacuccua

SEQ ID NO: 2677379 - RNA, 19 nt, Artificial Sequence
  Description of Artificial Sequence: Synthetic oligonucleotide
caguaucaggagagaaccu

SEQ ID NO: 2677380 - RNA, 19 nt, Artificial Sequence
  Description of Artificial Sequence: Synthetic oligonucleotide
ggugacggagggacuucag

SEQ ID NO: 2677381 - RNA, 19 nt, Artificial Sequence
  Description of Artificial Sequence: Synthetic oligonucleotide
ccgucuugcuggaacccug

SEQ ID NO: 2677382 - RNA, 19 nt, Artificial Sequence
  Description of Artificial Sequence: Synthetic oligonucleotide
cugcucuaacagguuucuc

SEQ ID NO: 2677383 - RNA, 19 nt, Artificial Sequence
  Description of Artificial Sequence: Synthetic oligonucleotide
ggacuucaggaccuucugu

SEQ ID NO: 2677384 - RNA, 19 nt, Artificial Sequence
  Description of Artificial Sequence: Synthetic oligonucleotide
cugucauuguggcacccau

SEQ ID NO: 2677385 - RNA, 19 nt, Artificial Sequence
  Description of Artificial Sequence: Synthetic oligonucleotide
cgcucagaaguacuaccug

SEQ ID NO: 2677386 - RNA, 19 nt, Artificial Sequence
  Description of Artificial Sequence: Synthetic oligonucleotide
cuacagauccagagauuuu

SEQ ID NO: 2677387 - RNA, 19 nt, Artificial Sequence
  Description of Artificial Sequence: Synthetic oligonucleotide
ggcuucuuguacauaguau

SEQ ID NO: 2677388 - RNA, 19 nt, Artificial Sequence
  Description of Artificial Sequence: Synthetic oligonucleotide
ccuacagauccagagauuu

SEQ ID NO: 2677389 - RNA, 19 nt, Artificial Sequence
  Description of Artificial Sequence: Synthetic oligonucleotide
ccaaacgcucagaaguacu

SEQ ID NO: 2677390 - RNA, 19 nt, Artificial Sequence
  Description of Artificial Sequence: Synthetic oligonucleotide
cacccauuguuccucuuuu

SEQ ID NO: 2677391 - RNA, 19 nt, Artificial Sequence
  Description of Artificial Sequence: Synthetic oligonucleotide
gcccugucauuguggcacc

SEQ ID NO: 2677392 - RNA, 19 nt, Artificial Sequence
  Description of Artificial Sequence: Synthetic oligonucleotide
aggagagaaccugguccuu

SEQ ID NO: 2677393 - RNA, 19 nt, Artificial Sequence
  Description of Artificial Sequence: Synthetic oligonucleotide
ggcuggcuguucagaagug

SEQ ID NO: 2677394 - RNA, 19 nt, Artificial Sequence
  Description of Artificial Sequence: Synthetic oligonucleotide
caaugacugguugcucucu

SEQ ID NO: 2677395 - RNA, 19 nt, Artificial Sequence
  Description of Artificial Sequence: Synthetic oligonucleotide
cacaguugaucaguauuuu

SEQ ID NO: 2677396 - RNA, 19 nt, Artificial Sequence
  Description of Artificial Sequence: Synthetic oligonucleotide
gugggacacuuuguccaaa

SEQ ID NO: 2677397 - RNA, 19 nt, Artificial Sequence
  Description of Artificial Sequence: Synthetic oligonucleotide
cugguccuuggcuggcugu

SEQ ID NO: 2677398 - RNA, 19 nt, Artificial Sequence
  Description of Artificial Sequence: Synthetic oligonucleotide
ccucuucgguacuccuaug

SEQ ID NO: 2677399 - RNA, 19 nt, Artificial Sequence
  Description of Artificial Sequence: Synthetic oligonucleotide
cugacuccucuucgguacu

SEQ ID NO: 2677400 - RNA, 19 nt, Artificial Sequence
  Description of Artificial Sequence: Synthetic oligonucleotide
gggacacuuuguccaaaau

SEQ ID NO: 2677401 - RNA, 19 nt, Artificial Sequence
  Description of Artificial Sequence: Synthetic oligonucleotide
gcacccauuguuccucuuu

SEQ ID NO: 2677402 - RNA, 19 nt, Artificial Sequence
  Description of Artificial Sequence: Synthetic oligonucleotide
gcagaaucaguggcccugu

SEQ ID NO: 2677403 - RNA, 19 nt, Artificial Sequence
  Description of Artificial Sequence: Synthetic oligonucleotide
ccuuggcuggcuguucaga

SEQ ID NO: 2677404 - RNA, 19 nt, Artificial Sequence
  Description of Artificial Sequence: Synthetic oligonucleotide
gguacuccuaugagucaau

SEQ ID NO: 2677405 - RNA, 19 nt, Artificial Sequence
  Description of Artificial Sequence: Synthetic oligonucleotide
guacuaccugaaacuucuu

SEQ ID NO: 2677406 - RNA, 19 nt, Artificial Sequence
  Description of Artificial Sequence: Synthetic oligonucleotide
cuucagucuuggggccucu

SEQ ID NO: 2677407 - RNA, 19 nt, Artificial Sequence
  Description of Artificial Sequence: Synthetic oligonucleotide
cugucccgucuugcuggaa

SEQ ID NO: 2677408 - RNA, 19 nt, Artificial Sequence
  Description of Artificial Sequence: Synthetic oligonucleotide
gggccucuuguagcuugua

SEQ ID NO: 2677409 - RNA, 19 nt, Artificial Sequence
  Description of Artificial Sequence: Synthetic oligonucleotide
ggcacccauuguuccucuu

SEQ ID NO: 2677410 - RNA, 19 nt, Artificial Sequence
  Description of Artificial Sequence: Synthetic oligonucleotide
cccgucuugcuggaacccu

SEQ ID NO: 2677411 - RNA, 19 nt, Artificial Sequence
  Description of Artificial Sequence: Synthetic oligonucleotide
ggacuuccuuggguacaau

SEQ ID NO: 2677412 - RNA, 19 nt, Artificial Sequence
  Description of Artificial Sequence: Synthetic oligonucleotide
aauacagcgauauccagcg

SEQ ID NO: 2677413 - RNA, 19 nt, Artificial Sequence
  Description of Artificial Sequence: Synthetic oligonucleotide
aaaccaagcaaccagacca

SEQ ID NO: 2677414 - RNA, 19 nt, Artificial Sequence
  Description of Artificial Sequence: Synthetic oligonucleotide
aaaggauauaaaugguggc

SEQ ID NO: 2677415 - RNA, 19 nt, Artificial Sequence
  Description of Artificial Sequence: Synthetic oligonucleotide
ucugcuaaaauaauuuuca

SEQ ID NO: 2677416 - RNA, 19 nt, Artificial Sequence
  Description of Artificial Sequence: Synthetic oligonucleotide
auaaccccaaaauacagcg

SEQ ID NO: 2677417 - RNA, 19 nt, Artificial Sequence
  Description of Artificial Sequence: Synthetic oligonucleotide
uccuuugucaagcagaagc

SEQ ID NO: 2677418 - RNA, 19 nt, Artificial Sequence
  Description of Artificial Sequence: Synthetic oligonucleotide
uuuguugccacccagagua

SEQ ID NO: 2677419 - RNA, 19 nt, Artificial Sequence
  Description of Artificial Sequence: Synthetic oligonucleotide
uaacauguuagcuaugugc

SEQ ID NO: 2677420 - RNA, 19 nt, Artificial Sequence
  Description of Artificial Sequence: Synthetic oligonucleotide
acaguuuucaugucuuugc

SEQ ID NO: 2677421 - RNA, 19 nt, Artificial Sequence
  Description of Artificial Sequence: Synthetic oligonucleotide
aaauacagcgauauccagc

SEQ ID NO: 2677422 - RNA, 19 nt, Artificial Sequence
  Description of Artificial Sequence: Synthetic oligonucleotide
uugcuuaaacucuucagcg

SEQ ID NO: 2677423 - RNA, 19 nt, Artificial Sequence
  Description of Artificial Sequence: Synthetic oligonucleotide
aauccuuuacaucugcaug

SEQ ID NO: 2677424 - RNA, 19 nt, Artificial Sequence
  Description of Artificial Sequence: Synthetic oligonucleotide
uuauaaccccaaaauacag

SEQ ID NO: 2677425 - RNA, 19 nt, Artificial Sequence
  Description of Artificial Sequence: Synthetic oligonucleotide
uuagcuugcagccagucac

SEQ ID NO: 2677426 - RNA, 19 nt, Artificial Sequence
  Description of Artificial Sequence: Synthetic oligonucleotide
acugguuaggaaccaaggc

SEQ ID NO: 2677427 - RNA, 19 nt, Artificial Sequence
  Description of Artificial Sequence: Synthetic oligonucleotide
ucuacuccaaggaacacca

SEQ ID NO: 2677428 - RNA, 19 nt, Artificial Sequence
  Description of Artificial Sequence: Synthetic oligonucleotide
ucucuuuuagcuugcagcc

SEQ ID NO: 2677429 - RNA, 19 nt, Artificial Sequence
  Description of Artificial Sequence: Synthetic oligonucleotide
agaaauccuuuacaucugc

SEQ ID NO: 2677430 - RNA, 19 nt, Artificial Sequence
  Description of Artificial Sequence: Synthetic oligonucleotide
auaaaugguggcugggugg

SEQ ID NO: 2677431 - RNA, 19 nt, Artificial Sequence
  Description of Artificial Sequence: Synthetic oligonucleotide
uguucugcuaaaauaauuu

SEQ ID NO: 2677432 - RNA, 19 nt, Artificial Sequence
  Description of Artificial Sequence: Synthetic oligonucleotide
ucagcugcaaaagagccgg

SEQ ID NO: 2677433 - RNA, 19 nt, Artificial Sequence
  Description of Artificial Sequence: Synthetic oligonucleotide
caugucuuugcuuaaacuc

SEQ ID NO: 2677434 - RNA, 19 nt, Artificial Sequence
  Description of Artificial Sequence: Synthetic oligonucleotide
uuagcuaugugcuuauaac

SEQ ID NO: 2677435 - RNA, 19 nt, Artificial Sequence
  Description of Artificial Sequence: Synthetic oligonucleotide
uaguguucugcuaaaauaa

SEQ ID NO: 2677436 - RNA, 19 nt, Artificial Sequence
  Description of Artificial Sequence: Synthetic oligonucleotide
uauaaccccaaaauacagc

SEQ ID NO: 2677437 - RNA, 19 nt, Artificial Sequence
  Description of Artificial Sequence: Synthetic oligonucleotide
agcuaugugcuuauaaccc

SEQ ID NO: 2677438 - RNA, 19 nt, Artificial Sequence
  Description of Artificial Sequence: Synthetic oligonucleotide
aaccagaccauccucgucu

SEQ ID NO: 2677439 - RNA, 19 nt, Artificial Sequence
  Description of Artificial Sequence: Synthetic oligonucleotide
uagcuaugugcuuauaacc

SEQ ID NO: 2677440 - RNA, 19 nt, Artificial Sequence
  Description of Artificial Sequence: Synthetic oligonucleotide
ugacuuguugacaagugac

SEQ ID NO: 2677441 - RNA, 19 nt, Artificial Sequence
  Description of Artificial Sequence: Synthetic oligonucleotide
aacauguuagcuaugugcu

SEQ ID NO: 2677442 - RNA, 19 nt, Artificial Sequence
  Description of Artificial Sequence: Synthetic oligonucleotide
uucugcuaaaauaauuuuc

SEQ ID NO: 2677443 - RNA, 19 nt, Artificial Sequence
  Description of Artificial Sequence: Synthetic oligonucleotide
ugugcuuauaaccccaaaa

SEQ ID NO: 2677444 - RNA, 19 nt, Artificial Sequence
  Description of Artificial Sequence: Synthetic oligonucleotide
aguauucuuacgccacccc

SEQ ID NO: 2677445 - RNA, 19 nt, Artificial Sequence
  Description of Artificial Sequence: Synthetic oligonucleotide
aaggauauaaaugguggcu

SEQ ID NO: 2677446 - RNA, 19 nt, Artificial Sequence
  Description of Artificial Sequence: Synthetic oligonucleotide
ugcuuaaacucuucagcgg

SEQ ID NO: 2677447 - RNA, 19 nt, Artificial Sequence
  Description of Artificial Sequence: Synthetic oligonucleotide
ugccgcauacauuaaggcg

SEQ ID NO: 2677448 - RNA, 19 nt, Artificial Sequence
  Description of Artificial Sequence: Synthetic oligonucleotide
uacuccaaggaacaccaag

SEQ ID NO: 2677449 - RNA, 19 nt, Artificial Sequence
  Description of Artificial Sequence: Synthetic oligonucleotide
aguuugaugugacuuguug

SEQ ID NO: 2677450 - RNA, 19 nt, Artificial Sequence
  Description of Artificial Sequence: Synthetic oligonucleotide
ucgaguucuacuccaagga

SEQ ID NO: 2677451 - RNA, 19 nt, Artificial Sequence
  Description of Artificial Sequence: Synthetic oligonucleotide
acauucgucuacuucacug

SEQ ID NO: 2677452 - RNA, 19 nt, Artificial Sequence
  Description of Artificial Sequence: Synthetic oligonucleotide
guuuaggucugagaaaagg

SEQ ID NO: 2677453 - RNA, 19 nt, Artificial Sequence
  Description of Artificial Sequence: Synthetic oligonucleotide
cuuauaaccccaaaauaca

SEQ ID NO: 2677454 - RNA, 19 nt, Artificial Sequence
  Description of Artificial Sequence: Synthetic oligonucleotide
uucagcugcaaaagagccg

SEQ ID NO: 2677455 - RNA, 19 nt, Artificial Sequence
  Description of Artificial Sequence: Synthetic oligonucleotide
uugacaagugaccugucac

SEQ ID NO: 2677456 - RNA, 19 nt, Artificial Sequence
  Description of Artificial Sequence: Synthetic oligonucleotide
uuaggucugagaaaaggau

SEQ ID NO: 2677457 - RNA, 19 nt, Artificial Sequence
  Description of Artificial Sequence: Synthetic oligonucleotide
cauucgucuacuucacugg

SEQ ID NO: 2677458 - RNA, 19 nt, Artificial Sequence
  Description of Artificial Sequence: Synthetic oligonucleotide
ucagggugcgccaagaaau

SEQ ID NO: 2677459 - RNA, 19 nt, Artificial Sequence
  Description of Artificial Sequence: Synthetic oligonucleotide
aaccaaggcuucuucccac

SEQ ID NO: 2677460 - RNA, 19 nt, Artificial Sequence
  Description of Artificial Sequence: Synthetic oligonucleotide
ugugacuuguugacaagug

SEQ ID NO: 2677461 - RNA, 19 nt, Artificial Sequence
  Description of Artificial Sequence: Synthetic oligonucleotide
uucaguauucuuacgccac

SEQ ID NO: 2677462 - RNA, 19 nt, Artificial Sequence
  Description of Artificial Sequence: Synthetic oligonucleotide
ugcagaaaauaacaguuuu

SEQ ID NO: 2677463 - RNA, 19 nt, Artificial Sequence
  Description of Artificial Sequence: Synthetic oligonucleotide
aggaaccaaggcuucuucc

SEQ ID NO: 2677464 - RNA, 19 nt, Artificial Sequence
  Description of Artificial Sequence: Synthetic oligonucleotide
ugcauuagcuaacauguua

SEQ ID NO: 2677465 - RNA, 19 nt, Artificial Sequence
  Description of Artificial Sequence: Synthetic oligonucleotide
gauauaaaugguggcuggg

SEQ ID NO: 2677466 - RNA, 19 nt, Artificial Sequence
  Description of Artificial Sequence: Synthetic oligonucleotide
uccaguaguguucugcuaa

SEQ ID NO: 2677467 - RNA, 19 nt, Artificial Sequence
  Description of Artificial Sequence: Synthetic oligonucleotide
aacaguuuucaugucuuug

SEQ ID NO: 2677468 - RNA, 19 nt, Artificial Sequence
  Description of Artificial Sequence: Synthetic oligonucleotide
cucgaguucuacuccaagg

SEQ ID NO: 2677469 - RNA, 19 nt, Artificial Sequence
  Description of Artificial Sequence: Synthetic oligonucleotide
ugcuuauaaccccaaaaua

SEQ ID NO: 2677470 - RNA, 19 nt, Artificial Sequence
  Description of Artificial Sequence: Synthetic oligonucleotide
caaaauacagcgauaucca

SEQ ID NO: 2677471 - RNA, 19 nt, Artificial Sequence
  Description of Artificial Sequence: Synthetic oligonucleotide
uuuuguucacuccuccggu

SEQ ID NO: 2677472 - RNA, 19 nt, Artificial Sequence
  Description of Artificial Sequence: Synthetic oligonucleotide
cuuaaacucuucagcggcg

SEQ ID NO: 2677473 - RNA, 19 nt, Artificial Sequence
  Description of Artificial Sequence: Synthetic oligonucleotide
ugggaacucucuuuguugc

SEQ ID NO: 2677474 - RNA, 19 nt, Artificial Sequence
  Description of Artificial Sequence: Synthetic oligonucleotide
ucacugguuaggaaccaag

SEQ ID NO: 2677475 - RNA, 19 nt, Artificial Sequence
  Description of Artificial Sequence: Synthetic oligonucleotide
acgccuucaguauucuuac

SEQ ID NO: 2677476 - RNA, 19 nt, Artificial Sequence
  Description of Artificial Sequence: Synthetic oligonucleotide
aaggugaucuucucagggu

SEQ ID NO: 2677477 - RNA, 19 nt, Artificial Sequence
  Description of Artificial Sequence: Synthetic oligonucleotide
aacucuucagcggcgacag

SEQ ID NO: 2677478 - RNA, 19 nt, Artificial Sequence
  Description of Artificial Sequence: Synthetic oligonucleotide
uccaaggaacaccaaggug

SEQ ID NO: 2677479 - RNA, 19 nt, Artificial Sequence
  Description of Artificial Sequence: Synthetic oligonucleotide
ucaucucgaguucuacucc

SEQ ID NO: 2677480 - RNA, 19 nt, Artificial Sequence
  Description of Artificial Sequence: Synthetic oligonucleotide
acuccaaggaacaccaagg

SEQ ID NO: 2677481 - RNA, 19 nt, Artificial Sequence
  Description of Artificial Sequence: Synthetic oligonucleotide
gcuuauaaccccaaaauac

SEQ ID NO: 2677482 - RNA, 19 nt, Artificial Sequence
  Description of Artificial Sequence: Synthetic oligonucleotide
ucuuacgccaccccuuucu

SEQ ID NO: 2677483 - RNA, 19 nt, Artificial Sequence
  Description of Artificial Sequence: Synthetic oligonucleotide
ugguuaggaaccaaggcuu

SEQ ID NO: 2677484 - RNA, 19 nt, Artificial Sequence
  Description of Artificial Sequence: Synthetic oligonucleotide
uucaugucuuugcuuaaac

SEQ ID NO: 2677485 - RNA, 19 nt, Artificial Sequence
  Description of Artificial Sequence: Synthetic oligonucleotide
uuguucacuccuccggucc

SEQ ID NO: 2677486 - RNA, 19 nt, Artificial Sequence
  Description of Artificial Sequence: Synthetic oligonucleotide
auuagcuaacauguuagcu

SEQ ID NO: 2677487 - RNA, 19 nt, Artificial Sequence
  Description of Artificial Sequence: Synthetic oligonucleotide
uagcuaacauguuagcuau

SEQ ID NO: 2677488 - RNA, 19 nt, Artificial Sequence
  Description of Artificial Sequence: Synthetic oligonucleotide
uuuagcuugcagccaguca

SEQ ID NO: 2677489 - RNA, 19 nt, Artificial Sequence
  Description of Artificial Sequence: Synthetic oligonucleotide
cucaucucgaguucuacuc

SEQ ID NO: 2677490 - RNA, 19 nt, Artificial Sequence
  Description of Artificial Sequence: Synthetic oligonucleotide
ucaguauucuuacgccacc

SEQ ID NO: 2677491 - RNA, 19 nt, Artificial Sequence
  Description of Artificial Sequence: Synthetic oligonucleotide
ugucacauccuuugucaag

SEQ ID NO: 2677492 - RNA, 19 nt, Artificial Sequence
  Description of Artificial Sequence: Synthetic oligonucleotide
uuguugacaagugaccugu

SEQ ID NO: 2677493 - RNA, 19 nt, Artificial Sequence
  Description of Artificial Sequence: Synthetic oligonucleotide
cacugguuaggaaccaagg

SEQ ID NO: 2677494 - RNA, 19 nt, Artificial Sequence
  Description of Artificial Sequence: Synthetic oligonucleotide
aguaguguucugcuaaaau

SEQ ID NO: 2677495 - RNA, 19 nt, Artificial Sequence
  Description of Artificial Sequence: Synthetic oligonucleotide
aggauauaaaugguggcug

SEQ ID NO: 2677496 - RNA, 19 nt, Artificial Sequence
  Description of Artificial Sequence: Synthetic oligonucleotide
cauuagcuaacauguuagc

SEQ ID NO: 2677497 - RNA, 19 nt, Artificial Sequence
  Description of Artificial Sequence: Synthetic oligonucleotide
ggauauaaaugguggcugg

SEQ ID NO: 2677498 - RNA, 19 nt, Artificial Sequence
  Description of Artificial Sequence: Synthetic oligonucleotide
uaauuuucacauucgucua

SEQ ID NO: 2677499 - RNA, 19 nt, Artificial Sequence
  Description of Artificial Sequence: Synthetic oligonucleotide
uuccgugccgcauacauua

SEQ ID NO: 2677500 - RNA, 19 nt, Artificial Sequence
  Description of Artificial Sequence: Synthetic oligonucleotide
uucuacuccaaggaacacc

SEQ ID NO: 2677501 - RNA, 19 nt, Artificial Sequence
  Description of Artificial Sequence: Synthetic oligonucleotide
ucgucuacuucacugguua

SEQ ID NO: 2677502 - RNA, 19 nt, Artificial Sequence
  Description of Artificial Sequence: Synthetic oligonucleotide
auccagcgcaguuugaugu

SEQ ID NO: 2677503 - RNA, 19 nt, Artificial Sequence
  Description of Artificial Sequence: Synthetic oligonucleotide
uaggucugagaaaaggaua

SEQ ID NO: 2677504 - RNA, 19 nt, Artificial Sequence
  Description of Artificial Sequence: Synthetic oligonucleotide
guaguguucugcuaaaaua

SEQ ID NO: 2677505 - RNA, 19 nt, Artificial Sequence
  Description of Artificial Sequence: Synthetic oligonucleotide
guggcucucuuuuagcuug

SEQ ID NO: 2677506 - RNA, 19 nt, Artificial Sequence
  Description of Artificial Sequence: Synthetic oligonucleotide
gacuuguugacaagugacc

SEQ ID NO: 2677507 - RNA, 19 nt, Artificial Sequence
  Description of Artificial Sequence: Synthetic oligonucleotide
gccgcauacauuaaggcgg

SEQ ID NO: 2677508 - RNA, 19 nt, Artificial Sequence
  Description of Artificial Sequence: Synthetic oligonucleotide
caaaccaagcaaccagacc

SEQ ID NO: 2677509 - RNA, 19 nt, Artificial Sequence
  Description of Artificial Sequence: Synthetic oligonucleotide
gcuuaaacucuucagcggc

SEQ ID NO: 2677510 - RNA, 19 nt, Artificial Sequence
  Description of Artificial Sequence: Synthetic oligonucleotide
gaguucuacuccaaggaac

SEQ ID NO: 2677511 - RNA, 19 nt, Artificial Sequence
  Description of Artificial Sequence: Synthetic oligonucleotide
gucacauccuuugucaagc

SEQ ID NO: 2677512 - RNA, 19 nt, Artificial Sequence
  Description of Artificial Sequence: Synthetic oligonucleotide
aagaaauccuuuacaucug

SEQ ID NO: 2677513 - RNA, 19 nt, Artificial Sequence
  Description of Artificial Sequence: Synthetic oligonucleotide
cuuguugacaagugaccug

SEQ ID NO: 2677514 - RNA, 19 nt, Artificial Sequence
  Description of Artificial Sequence: Synthetic oligonucleotide
aaggcuucuucccaccuuu

SEQ ID NO: 2677515 - RNA, 19 nt, Artificial Sequence
  Description of Artificial Sequence: Synthetic oligonucleotide
uauucuuacgccaccccuu

SEQ ID NO: 2677516 - RNA, 19 nt, Artificial Sequence
  Description of Artificial Sequence: Synthetic oligonucleotide
agaaaaggauauaaauggu

SEQ ID NO: 2677517 - RNA, 19 nt, Artificial Sequence
  Description of Artificial Sequence: Synthetic oligonucleotide
agccagucacaauuauuuc

SEQ ID NO: 2677518 - RNA, 19 nt, Artificial Sequence
  Description of Artificial Sequence: Synthetic oligonucleotide
guuagcuaugugcuuauaa

SEQ ID NO: 2677519 - RNA, 19 nt, Artificial Sequence
  Description of Artificial Sequence: Synthetic oligonucleotide
ucacauucgucuacuucac

SEQ ID NO: 2677520 - RNA, 19 nt, Artificial Sequence
  Description of Artificial Sequence: Synthetic oligonucleotide
aguucuacuccaaggaaca

SEQ ID NO: 2677521 - RNA, 19 nt, Artificial Sequence
  Description of Artificial Sequence: Synthetic oligonucleotide
gaucuucucagggugcgcc

SEQ ID NO: 2677522 - RNA, 19 nt, Artificial Sequence
  Description of Artificial Sequence: Synthetic oligonucleotide
aggaugcccguuccgugcc

SEQ ID NO: 2677523 - RNA, 19 nt, Artificial Sequence
  Description of Artificial Sequence: Synthetic oligonucleotide
cauacauuaaggcggucca

SEQ ID NO: 2677524 - RNA, 19 nt, Artificial Sequence
  Description of Artificial Sequence: Synthetic oligonucleotide
gcauuagcuaacauguuag

SEQ ID NO: 2677525 - RNA, 19 nt, Artificial Sequence
  Description of Artificial Sequence: Synthetic oligonucleotide
uuaaacucuucagcggcga

SEQ ID NO: 2677526 - RNA, 19 nt, Artificial Sequence
  Description of Artificial Sequence: Synthetic oligonucleotide
aaacucuucagcggcgaca

SEQ ID NO: 2677527 - RNA, 19 nt, Artificial Sequence
  Description of Artificial Sequence: Synthetic oligonucleotide
caugguucagcuggcagag

SEQ ID NO: 2677528 - RNA, 19 nt, Artificial Sequence
  Description of Artificial Sequence: Synthetic oligonucleotide
cugagaaaaggauauaaau

SEQ ID NO: 2677529 - RNA, 19 nt, Artificial Sequence
  Description of Artificial Sequence: Synthetic oligonucleotide
auauaaaugguggcugggu

SEQ ID NO: 2677530 - RNA, 19 nt, Artificial Sequence
  Description of Artificial Sequence: Synthetic oligonucleotide
gccuucaguauucuuacgc

SEQ ID NO: 2677531 - RNA, 19 nt, Artificial Sequence
  Description of Artificial Sequence: Synthetic oligonucleotide
cuaacauguuagcuaugug

SEQ ID NO: 2677532 - RNA, 19 nt, Artificial Sequence
  Description of Artificial Sequence: Synthetic oligonucleotide
auucgucuacuucacuggu

SEQ ID NO: 2677533 - RNA, 19 nt, Artificial Sequence
  Description of Artificial Sequence: Synthetic oligonucleotide
cagaccauccucgucuucc

SEQ ID NO: 2677534 - RNA, 19 nt, Artificial Sequence
  Description of Artificial Sequence: Synthetic oligonucleotide
caccuuuugcauuagcuaa

SEQ ID NO: 2677535 - RNA, 19 nt, Artificial Sequence
  Description of Artificial Sequence: Synthetic oligonucleotide
gaaccaaggcuucuuccca

SEQ ID NO: 2677536 - RNA, 19 nt, Artificial Sequence
  Description of Artificial Sequence: Synthetic oligonucleotide
gaacucucuuuguugccac

SEQ ID NO: 2677537 - RNA, 19 nt, Artificial Sequence
  Description of Artificial Sequence: Synthetic oligonucleotide
ucaggaugcccguuccgug

SEQ ID NO: 2677538 - RNA, 19 nt, Artificial Sequence
  Description of Artificial Sequence: Synthetic oligonucleotide
cuaugugcuuauaacccca

SEQ ID NO: 2677539 - RNA, 19 nt, Artificial Sequence
  Description of Artificial Sequence: Synthetic oligonucleotide
gcuaugugcuuauaacccc

SEQ ID NO: 2677540 - RNA, 19 nt, Artificial Sequence
  Description of Artificial Sequence: Synthetic oligonucleotide
uaugugcuuauaaccccaa

SEQ ID NO: 2677541 - RNA, 19 nt, Artificial Sequence
  Description of Artificial Sequence: Synthetic oligonucleotide
ugcgccaagaaauccuuua

SEQ ID NO: 2677542 - RNA, 19 nt, Artificial Sequence
  Description of Artificial Sequence: Synthetic oligonucleotide
agguucgaugccgagagca

SEQ ID NO: 2677543 - RNA, 19 nt, Artificial Sequence
  Description of Artificial Sequence: Synthetic oligonucleotide
cacccagaguaaccgaggg

SEQ ID NO: 2677544 - RNA, 19 nt, Artificial Sequence
  Description of Artificial Sequence: Synthetic oligonucleotide
uugaugugacuuguugaca

SEQ ID NO: 2677545 - RNA, 19 nt, Artificial Sequence
  Description of Artificial Sequence: Synthetic oligonucleotide
gugccgcauacauuaaggc

SEQ ID NO: 2677546 - RNA, 19 nt, Artificial Sequence
  Description of Artificial Sequence: Synthetic oligonucleotide
acccagaguaaccgagggg

SEQ ID NO: 2677547 - RNA, 19 nt, Artificial Sequence
  Description of Artificial Sequence: Synthetic oligonucleotide
auacagcgauauccagcgc

SEQ ID NO: 2677548 - RNA, 19 nt, Artificial Sequence
  Description of Artificial Sequence: Synthetic oligonucleotide
guugacaagugaccuguca

SEQ ID NO: 2677549 - RNA, 19 nt, Artificial Sequence
  Description of Artificial Sequence: Synthetic oligonucleotide
gugacuuguugacaaguga

SEQ ID NO: 2677550 - RNA, 19 nt, Artificial Sequence
  Description of Artificial Sequence: Synthetic oligonucleotide
ucugggacgccuucaguau

SEQ ID NO: 2677551 - RNA, 19 nt, Artificial Sequence
  Description of Artificial Sequence: Synthetic oligonucleotide
accccuuucucaucucgag

SEQ ID NO: 2677552 - RNA, 19 nt, Artificial Sequence
  Description of Artificial Sequence: Synthetic oligonucleotide
agggugcgccaagaaaucc

SEQ ID NO: 2677553 - RNA, 19 nt, Artificial Sequence
  Description of Artificial Sequence: Synthetic oligonucleotide
agggugcagaaaauaacag

SEQ ID NO: 2677554 - RNA, 19 nt, Artificial Sequence
  Description of Artificial Sequence: Synthetic oligonucleotide
gaugccgagagcaaaccaa

SEQ ID NO: 2677555 - RNA, 19 nt, Artificial Sequence
  Description of Artificial Sequence: Synthetic oligonucleotide
acuccuccgguccaguagu

SEQ ID NO: 2677556 - RNA, 19 nt, Artificial Sequence
  Description of Artificial Sequence: Synthetic oligonucleotide
uaaacucuucagcggcgac

SEQ ID NO: 2677557 - RNA, 19 nt, Artificial Sequence
  Description of Artificial Sequence: Synthetic oligonucleotide
gugaucuucucagggugcg

SEQ ID NO: 2677558 - RNA, 19 nt, Artificial Sequence
  Description of Artificial Sequence: Synthetic oligonucleotide
ugccgagagcaaaccaagc

SEQ ID NO: 2677559 - RNA, 19 nt, Artificial Sequence
  Description of Artificial Sequence: Synthetic oligonucleotide
caggaugcccguuccgugc

SEQ ID NO: 2677560 - RNA, 19 nt, Artificial Sequence
  Description of Artificial Sequence: Synthetic oligonucleotide
agcggcgacagguucgaug

SEQ ID NO: 2677561 - RNA, 19 nt, Artificial Sequence
  Description of Artificial Sequence: Synthetic oligonucleotide
cugguuaggaaccaaggcu

SEQ ID NO: 2677562 - RNA, 19 nt, Artificial Sequence
  Description of Artificial Sequence: Synthetic oligonucleotide
cacauccuuugucaagcag

SEQ ID NO: 2677563 - RNA, 19 nt, Artificial Sequence
  Description of Artificial Sequence: Synthetic oligonucleotide
agagccugacuuccggcug

SEQ ID NO: 2677564 - RNA, 19 nt, Artificial Sequence
  Description of Artificial Sequence: Synthetic oligonucleotide
augugacuuguugacaagu

SEQ ID NO: 2677565 - RNA, 19 nt, Artificial Sequence
  Description of Artificial Sequence: Synthetic oligonucleotide
gugcuuauaaccccaaaau

SEQ ID NO: 2677566 - RNA, 19 nt, Artificial Sequence
  Description of Artificial Sequence: Synthetic oligonucleotide
gacgccuucaguauucuua

SEQ ID NO: 2677567 - RNA, 19 nt, Artificial Sequence
  Description of Artificial Sequence: Synthetic oligonucleotide
caguauucuuacgccaccc

SEQ ID NO: 2677568 - RNA, 19 nt, Artificial Sequence
  Description of Artificial Sequence: Synthetic oligonucleotide
gcauacauuaaggcggucc

SEQ ID NO: 2677569 - RNA, 19 nt, Artificial Sequence
  Description of Artificial Sequence: Synthetic oligonucleotide
uccagcgcaguuugaugug

SEQ ID NO: 2677570 - RNA, 19 nt, Artificial Sequence
  Description of Artificial Sequence: Synthetic oligonucleotide
agcaaaccaagcaaccaga

SEQ ID NO: 2677571 - RNA, 19 nt, Artificial Sequence
  Description of Artificial Sequence: Synthetic oligonucleotide
ugggacgccuucaguauuc

SEQ ID NO: 2677572 - RNA, 19 nt, Artificial Sequence
  Description of Artificial Sequence: Synthetic oligonucleotide
uuacgccaccccuuucuca

SEQ ID NO: 2677573 - RNA, 19 nt, Artificial Sequence
  Description of Artificial Sequence: Synthetic oligonucleotide
gcggcgacagguucgaugc

SEQ ID NO: 2677574 - RNA, 19 nt, Artificial Sequence
  Description of Artificial Sequence: Synthetic oligonucleotide
agcgauauccagcgcaguu

SEQ ID NO: 2677575 - RNA, 19 nt, Artificial Sequence
  Description of Artificial Sequence: Synthetic oligonucleotide
ccaagcaaccagaccaucc

SEQ ID NO: 2677576 - RNA, 19 nt, Artificial Sequence
  Description of Artificial Sequence: Synthetic oligonucleotide
acagcgauauccagcgcag

SEQ ID NO: 2677577 - RNA, 19 nt, Artificial Sequence
  Description of Artificial Sequence: Synthetic oligonucleotide
uccuuuacaucugcauggu

SEQ ID NO: 2677578 - RNA, 19 nt, Artificial Sequence
  Description of Artificial Sequence: Synthetic oligonucleotide
auucuuacgccaccccuuu

SEQ ID NO: 2677579 - RNA, 19 nt, Artificial Sequence
  Description of Artificial Sequence: Synthetic oligonucleotide
auauccagcgcaguuugau

SEQ ID NO: 2677580 - RNA, 19 nt, Artificial Sequence
  Description of Artificial Sequence: Synthetic oligonucleotide
ucgaugccgagagcaaacc

SEQ ID NO: 2677581 - RNA, 19 nt, Artificial Sequence
  Description of Artificial Sequence: Synthetic oligonucleotide
gagccugacuuccggcugc

SEQ ID NO: 2677582 - RNA, 19 nt, Artificial Sequence
  Description of Artificial Sequence: Synthetic oligonucleotide
caucggagggugcagaaaa

SEQ ID NO: 2677583 - RNA, 19 nt, Artificial Sequence
  Description of Artificial Sequence: Synthetic oligonucleotide
augccgagagcaaaccaag

SEQ ID NO: 2677584 - RNA, 19 nt, Artificial Sequence
  Description of Artificial Sequence: Synthetic oligonucleotide
caucaggaugcccguuccg

SEQ ID NO: 2677585 - RNA, 19 nt, Artificial Sequence
  Description of Artificial Sequence: Synthetic oligonucleotide
cacuccuccgguccaguag

SEQ ID NO: 2677586 - RNA, 19 nt, Artificial Sequence
  Description of Artificial Sequence: Synthetic oligonucleotide
caaaagagccggcaucgga

SEQ ID NO: 2677587 - RNA, 19 nt, Artificial Sequence
  Description of Artificial Sequence: Synthetic oligonucleotide
aucaggaugcccguuccgu

SEQ ID NO: 2677588 - RNA, 19 nt, Artificial Sequence
  Description of Artificial Sequence: Synthetic oligonucleotide
ucuucagcggcgacagguu

SEQ ID NO: 2677589 - RNA, 19 nt, Artificial Sequence
  Description of Artificial Sequence: Synthetic oligonucleotide
uucgucuacuucacugguu

SEQ ID NO: 2677590 - RNA, 19 nt, Artificial Sequence
  Description of Artificial Sequence: Synthetic oligonucleotide
caucucgaguucuacucca

SEQ ID NO: 2677591 - RNA, 19 nt, Artificial Sequence
  Description of Artificial Sequence: Synthetic oligonucleotide
auguuagcuaugugcuuau

SEQ ID NO: 2677592 - RNA, 19 nt, Artificial Sequence
  Description of Artificial Sequence: Synthetic oligonucleotide
cgugccgcauacauuaagg

SEQ ID NO: 2677593 - RNA, 19 nt, Artificial Sequence
  Description of Artificial Sequence: Synthetic oligonucleotide
ccugacuuccggcugcugg

SEQ ID NO: 2677594 - RNA, 19 nt, Artificial Sequence
  Description of Artificial Sequence: Synthetic oligonucleotide
ggguuuaggucugagaaaa

SEQ ID NO: 2677595 - RNA, 19 nt, Artificial Sequence
  Description of Artificial Sequence: Synthetic oligonucleotide
aguguucugcuaaaauaau

SEQ ID NO: 2677596 - RNA, 19 nt, Artificial Sequence
  Description of Artificial Sequence: Synthetic oligonucleotide
uugcauuagcuaacauguu

SEQ ID NO: 2677597 - RNA, 19 nt, Artificial Sequence
  Description of Artificial Sequence: Synthetic oligonucleotide
ucucagggugcgccaagaa

SEQ ID NO: 2677598 - RNA, 19 nt, Artificial Sequence
  Description of Artificial Sequence: Synthetic oligonucleotide
aaccaagcaaccagaccau

SEQ ID NO: 2677599 - RNA, 19 nt, Artificial Sequence
  Description of Artificial Sequence: Synthetic oligonucleotide
uguugacaagugaccuguc

SEQ ID NO: 2677600 - RNA, 19 nt, Artificial Sequence
  Description of Artificial Sequence: Synthetic oligonucleotide
uggcucucuuuuagcuugc

SEQ ID NO: 2677601 - RNA, 19 nt, Artificial Sequence
  Description of Artificial Sequence: Synthetic oligonucleotide
agcgcaguuugaugugacu

SEQ ID NO: 2677602 - RNA, 19 nt, Artificial Sequence
  Description of Artificial Sequence: Synthetic oligonucleotide
uccgguccaguaguguucu

SEQ ID NO: 2677603 - RNA, 19 nt, Artificial Sequence
  Description of Artificial Sequence: Synthetic oligonucleotide
cagccagucacaauuauuu

SEQ ID NO: 2677604 - RNA, 19 nt, Artificial Sequence
  Description of Artificial Sequence: Synthetic oligonucleotide
ggugcagaaaauaacaguu

SEQ ID NO: 2677605 - RNA, 19 nt, Artificial Sequence
  Description of Artificial Sequence: Synthetic oligonucleotide
cuuacgccaccccuuucuc

SEQ ID NO: 2677606 - RNA, 19 nt, Artificial Sequence
  Description of Artificial Sequence: Synthetic oligonucleotide
accaagcaaccagaccauc

SEQ ID NO: 2677607 - RNA, 19 nt, Artificial Sequence
  Description of Artificial Sequence: Synthetic oligonucleotide
ucggagggugcagaaaaua

SEQ ID NO: 2677608 - RNA, 19 nt, Artificial Sequence
  Description of Artificial Sequence: Synthetic oligonucleotide
cuccgguccaguaguguuc

SEQ ID NO: 2677609 - RNA, 19 nt, Artificial Sequence
  Description of Artificial Sequence: Synthetic oligonucleotide
ggcgacagguucgaugccg

SEQ ID NO: 2677610 - RNA, 19 nt, Artificial Sequence
  Description of Artificial Sequence: Synthetic oligonucleotide
ugaucuucucagggugcgc

SEQ ID NO: 2677611 - RNA, 19 nt, Artificial Sequence
  Description of Artificial Sequence: Synthetic oligonucleotide
cagggugcgccaagaaauc

SEQ ID NO: 2677612 - RNA, 19 nt, Artificial Sequence
  Description of Artificial Sequence: Synthetic oligonucleotide
uucucagggugcgccaaga

SEQ ID NO: 2677613 - RNA, 19 nt, Artificial Sequence
  Description of Artificial Sequence: Synthetic oligonucleotide
cuucagcggcgacagguuc

SEQ ID NO: 2677614 - RNA, 19 nt, Artificial Sequence
  Description of Artificial Sequence: Synthetic oligonucleotide
uucacugguuaggaaccaa

SEQ ID NO: 2677615 - RNA, 19 nt, Artificial Sequence
  Description of Artificial Sequence: Synthetic oligonucleotide
gccgagagcaaaccaagca

SEQ ID NO: 2677616 - RNA, 19 nt, Artificial Sequence
  Description of Artificial Sequence: Synthetic oligonucleotide
ccaaggugaucuucucagg

SEQ ID NO: 2677617 - RNA, 19 nt, Artificial Sequence
  Description of Artificial Sequence: Synthetic oligonucleotide
ucagcggcgacagguucga

SEQ ID NO: 2677618 - RNA, 19 nt, Artificial Sequence
  Description of Artificial Sequence: Synthetic oligonucleotide
gcaugguucagcuggcaga

SEQ ID NO: 2677619 - RNA, 19 nt, Artificial Sequence
  Description of Artificial Sequence: Synthetic oligonucleotide
augugcuuauaaccccaaa

SEQ ID NO: 2677620 - RNA, 19 nt, Artificial Sequence
  Description of Artificial Sequence: Synthetic oligonucleotide
caagcaaccagaccauccu

SEQ ID NO: 2677621 - RNA, 19 nt, Artificial Sequence
  Description of Artificial Sequence: Synthetic oligonucleotide
cuucucagggugcgccaag

SEQ ID NO: 2677622 - RNA, 19 nt, Artificial Sequence
  Description of Artificial Sequence: Synthetic oligonucleotide
ugccacccagaguaaccga

SEQ ID NO: 2677623 - RNA, 19 nt, Artificial Sequence
  Description of Artificial Sequence: Synthetic oligonucleotide
gccagucacaauuauuucu

SEQ ID NO: 2677624 - RNA, 19 nt, Artificial Sequence
  Description of Artificial Sequence: Synthetic oligonucleotide
ggugaucuucucagggugc

SEQ ID NO: 2677625 - RNA, 19 nt, Artificial Sequence
  Description of Artificial Sequence: Synthetic oligonucleotide
gacaagugaccugucacau

SEQ ID NO: 2677626 - RNA, 19 nt, Artificial Sequence
  Description of Artificial Sequence: Synthetic oligonucleotide
uucuuacgccaccccuuuc

SEQ ID NO: 2677627 - RNA, 19 nt, Artificial Sequence
  Description of Artificial Sequence: Synthetic oligonucleotide
gaugcccguuccgugccgc

SEQ ID NO: 2677628 - RNA, 19 nt, Artificial Sequence
  Description of Artificial Sequence: Synthetic oligonucleotide
ggaacucucuuuguugcca

SEQ ID NO: 2677629 - RNA, 19 nt, Artificial Sequence
  Description of Artificial Sequence: Synthetic oligonucleotide
cucagggugcgccaagaaa

SEQ ID NO: 2677630 - RNA, 19 nt, Artificial Sequence
  Description of Artificial Sequence: Synthetic oligonucleotide
ugacuuccggcugcuggga

SEQ ID NO: 2677631 - RNA, 19 nt, Artificial Sequence
  Description of Artificial Sequence: Synthetic oligonucleotide
caaccagaccauccucguc

SEQ ID NO: 2677632 - RNA, 19 nt, Artificial Sequence
  Description of Artificial Sequence: Synthetic oligonucleotide
gagccggcaucggagggug

SEQ ID NO: 2677633 - RNA, 19 nt, Artificial Sequence
  Description of Artificial Sequence: Synthetic oligonucleotide
acucuucagcggcgacagg

SEQ ID NO: 2677634 - RNA, 19 nt, Artificial Sequence
  Description of Artificial Sequence: Synthetic oligonucleotide
gcgccaagaaauccuuuac

SEQ ID NO: 2677635 - RNA, 19 nt, Artificial Sequence
  Description of Artificial Sequence: Synthetic oligonucleotide
gcuaacauguuagcuaugu

SEQ ID NO: 2677636 - RNA, 19 nt, Artificial Sequence
  Description of Artificial Sequence: Synthetic oligonucleotide
gcaaaccaagcaaccagac

SEQ ID NO: 2677637 - RNA, 19 nt, Artificial Sequence
  Description of Artificial Sequence: Synthetic oligonucleotide
cgauauccagcgcaguuug

SEQ ID NO: 2677638 - RNA, 19 nt, Artificial Sequence
  Description of Artificial Sequence: Synthetic oligonucleotide
aagugaccugucacauccu

SEQ ID NO: 2677639 - RNA, 19 nt, Artificial Sequence
  Description of Artificial Sequence: Synthetic oligonucleotide
cuccaaggaacaccaaggu

SEQ ID NO: 2677640 - RNA, 19 nt, Artificial Sequence
  Description of Artificial Sequence: Synthetic oligonucleotide
guucacuccuccgguccag

SEQ ID NO: 2677641 - RNA, 19 nt, Artificial Sequence
  Description of Artificial Sequence: Synthetic oligonucleotide
cgcaguuugaugugacuug

SEQ ID NO: 2677642 - RNA, 19 nt, Artificial Sequence
  Description of Artificial Sequence: Synthetic oligonucleotide
agagccggcaucggagggu

SEQ ID NO: 2677643 - RNA, 19 nt, Artificial Sequence
  Description of Artificial Sequence: Synthetic oligonucleotide
cuacuucacugguuaggaa

SEQ ID NO: 2677644 - RNA, 19 nt, Artificial Sequence
  Description of Artificial Sequence: Synthetic oligonucleotide
acgccaccccuuucucauc

SEQ ID NO: 2677645 - RNA, 19 nt, Artificial Sequence
  Description of Artificial Sequence: Synthetic oligonucleotide
cucuucagcggcgacaggu

SEQ ID NO: 2677646 - RNA, 19 nt, Artificial Sequence
  Description of Artificial Sequence: Synthetic oligonucleotide
uccuccgguccaguagugu

SEQ ID NO: 2677647 - RNA, 19 nt, Artificial Sequence
  Description of Artificial Sequence: Synthetic oligonucleotide
uccgugccgcauacauuaa

SEQ ID NO: 2677648 - RNA, 19 nt, Artificial Sequence
  Description of Artificial Sequence: Synthetic oligonucleotide
uguuagcuaugugcuuaua

SEQ ID NO: 2677649 - RNA, 19 nt, Artificial Sequence
  Description of Artificial Sequence: Synthetic oligonucleotide
caccccuuucucaucucga

SEQ ID NO: 2677650 - RNA, 19 nt, Artificial Sequence
  Description of Artificial Sequence: Synthetic oligonucleotide
guucgaugccgagagcaaa

SEQ ID NO: 2677651 - RNA, 19 nt, Artificial Sequence
  Description of Artificial Sequence: Synthetic oligonucleotide
gcaaaagagccggcaucgg

SEQ ID NO: 2677652 - RNA, 19 nt, Artificial Sequence
  Description of Artificial Sequence: Synthetic oligonucleotide
uucccaccuuuugcauuag

SEQ ID NO: 2677653 - RNA, 19 nt, Artificial Sequence
  Description of Artificial Sequence: Synthetic oligonucleotide
gggguuuaggucugagaaa

SEQ ID NO: 2677654 - RNA, 19 nt, Artificial Sequence
  Description of Artificial Sequence: Synthetic oligonucleotide
gguccaguaguguucugcu

SEQ ID NO: 2677655 - RNA, 19 nt, Artificial Sequence
  Description of Artificial Sequence: Synthetic oligonucleotide
cagcugcaaaagagccggc

SEQ ID NO: 2677656 - RNA, 19 nt, Artificial Sequence
  Description of Artificial Sequence: Synthetic oligonucleotide
gguuaggaaccaaggcuuc

SEQ ID NO: 2677657 - RNA, 19 nt, Artificial Sequence
  Description of Artificial Sequence: Synthetic oligonucleotide
cagguucgaugccgagagc

SEQ ID NO: 2677658 - RNA, 19 nt, Artificial Sequence
  Description of Artificial Sequence: Synthetic oligonucleotide
cuucacugguuaggaacca

SEQ ID NO: 2677659 - RNA, 19 nt, Artificial Sequence
  Description of Artificial Sequence: Synthetic oligonucleotide
ccgagagcaaaccaagcaa

SEQ ID NO: 2677660 - RNA, 19 nt, Artificial Sequence
  Description of Artificial Sequence: Synthetic oligonucleotide
guuaggaaccaaggcuucu

SEQ ID NO: 2677661 - RNA, 19 nt, Artificial Sequence
  Description of Artificial Sequence: Synthetic oligonucleotide
cuccuccgguccaguagug

SEQ ID NO: 2677662 - RNA, 19 nt, Artificial Sequence
  Description of Artificial Sequence: Synthetic oligonucleotide
cccaaaauacagcgauauc

SEQ ID NO: 2677663 - RNA, 19 nt, Artificial Sequence
  Description of Artificial Sequence: Synthetic oligonucleotide
gaccugucacauccuuugu

SEQ ID NO: 2677664 - RNA, 19 nt, Artificial Sequence
  Description of Artificial Sequence: Synthetic oligonucleotide
gacuuccggcugcugggaa

SEQ ID NO: 2677665 - RNA, 19 nt, Artificial Sequence
  Description of Artificial Sequence: Synthetic oligonucleotide
ggaugcccguuccgugccg

SEQ ID NO: 2677666 - RNA, 19 nt, Artificial Sequence
  Description of Artificial Sequence: Synthetic oligonucleotide
aucggagggugcagaaaau

SEQ ID NO: 2677667 - RNA, 19 nt, Artificial Sequence
  Description of Artificial Sequence: Synthetic oligonucleotide
guccaguaguguucugcua

SEQ ID NO: 2677668 - RNA, 19 nt, Artificial Sequence
  Description of Artificial Sequence: Synthetic oligonucleotide
cuuuugcauuagcuaacau

SEQ ID NO: 2677669 - RNA, 19 nt, Artificial Sequence
  Description of Artificial Sequence: Synthetic oligonucleotide
ccgugccgcauacauuaag

SEQ ID NO: 2677670 - RNA, 19 nt, Artificial Sequence
  Description of Artificial Sequence: Synthetic oligonucleotide
gcugcaaaagagccggcau

SEQ ID NO: 2677671 - RNA, 19 nt, Artificial Sequence
  Description of Artificial Sequence: Synthetic oligonucleotide
augcccguuccgugccgca

SEQ ID NO: 2677672 - RNA, 19 nt, Artificial Sequence
  Description of Artificial Sequence: Synthetic oligonucleotide
caguaguguucugcuaaaa

SEQ ID NO: 2677673 - RNA, 19 nt, Artificial Sequence
  Description of Artificial Sequence: Synthetic oligonucleotide
gcaguuugaugugacuugu

SEQ ID NO: 2677674 - RNA, 19 nt, Artificial Sequence
  Description of Artificial Sequence: Synthetic oligonucleotide
accccaaaauacagcgaua

SEQ ID NO: 2677675 - RNA, 19 nt, Artificial Sequence
  Description of Artificial Sequence: Synthetic oligonucleotide
cgguccaguaguguucugc

SEQ ID NO: 2677676 - RNA, 19 nt, Artificial Sequence
  Description of Artificial Sequence: Synthetic oligonucleotide
cgucuacuucacugguuag

SEQ ID NO: 2677677 - RNA, 19 nt, Artificial Sequence
  Description of Artificial Sequence: Synthetic oligonucleotide
cuacuccaaggaacaccaa

SEQ ID NO: 2677678 - RNA, 19 nt, Artificial Sequence
  Description of Artificial Sequence: Synthetic oligonucleotide
ugcccguuccgugccgcau

SEQ ID NO: 2677679 - RNA, 19 nt, Artificial Sequence
  Description of Artificial Sequence: Synthetic oligonucleotide
gguucgaugccgagagcaa

SEQ ID NO: 2677680 - RNA, 19 nt, Artificial Sequence
  Description of Artificial Sequence: Synthetic oligonucleotide
cacauucgucuacuucacu

SEQ ID NO: 2677681 - RNA, 19 nt, Artificial Sequence
  Description of Artificial Sequence: Synthetic oligonucleotide
cccuuucucaucucgaguu

SEQ ID NO: 2677682 - RNA, 19 nt, Artificial Sequence
  Description of Artificial Sequence: Synthetic oligonucleotide
agccugacuuccggcugcu

SEQ ID NO: 2677683 - RNA, 19 nt, Artificial Sequence
  Description of Artificial Sequence: Synthetic oligonucleotide
cagucacaauuauuucuuu

SEQ ID NO: 2677684 - RNA, 19 nt, Artificial Sequence
  Description of Artificial Sequence: Synthetic oligonucleotide
ccaguaguguucugcuaaa

SEQ ID NO: 2677685 - RNA, 19 nt, Artificial Sequence
  Description of Artificial Sequence: Synthetic oligonucleotide
agccggcaucggagggugc

SEQ ID NO: 2677686 - RNA, 19 nt, Artificial Sequence
  Description of Artificial Sequence: Synthetic oligonucleotide
cgccuucaguauucuuacg

SEQ ID NO: 2677687 - RNA, 19 nt, Artificial Sequence
  Description of Artificial Sequence: Synthetic oligonucleotide
cgaguucuacuccaaggaa

SEQ ID NO: 2677688 - RNA, 19 nt, Artificial Sequence
  Description of Artificial Sequence: Synthetic oligonucleotide
cccguuccgugccgcauac

SEQ ID NO: 2677689 - RNA, 19 nt, Artificial Sequence
  Description of Artificial Sequence: Synthetic oligonucleotide
ggcuggguggcucucuuuu

SEQ ID NO: 2677690 - RNA, 19 nt, Artificial Sequence
  Description of Artificial Sequence: Synthetic oligonucleotide
gcgacagguucgaugccga

SEQ ID NO: 2677691 - RNA, 19 nt, Artificial Sequence
  Description of Artificial Sequence: Synthetic oligonucleotide
caguuugaugugacuuguu

SEQ ID NO: 2677692 - RNA, 19 nt, Artificial Sequence
  Description of Artificial Sequence: Synthetic oligonucleotide
gcuggguggcucucuuuua

SEQ ID NO: 2677693 - RNA, 19 nt, Artificial Sequence
  Description of Artificial Sequence: Synthetic oligonucleotide
gcgcaguuugaugugacuu

SEQ ID NO: 2677694 - RNA, 19 nt, Artificial Sequence
  Description of Artificial Sequence: Synthetic oligonucleotide
gguucagcuggcagagccu

SEQ ID NO: 2677695 - RNA, 19 nt, Artificial Sequence
  Description of Artificial Sequence: Synthetic oligonucleotide
cgacagguucgaugccgag

SEQ ID NO: 2677696 - RNA, 19 nt, Artificial Sequence
  Description of Artificial Sequence: Synthetic oligonucleotide
aggcuucuucccaccuuuu

SEQ ID NO: 2677697 - RNA, 19 nt, Artificial Sequence
  Description of Artificial Sequence: Synthetic oligonucleotide
ccagcgcaguuugauguga

SEQ ID NO: 2677698 - RNA, 19 nt, Artificial Sequence
  Description of Artificial Sequence: Synthetic oligonucleotide
cugggacgccuucaguauu

SEQ ID NO: 2677699 - RNA, 19 nt, Artificial Sequence
  Description of Artificial Sequence: Synthetic oligonucleotide
guuccgugccgcauacauu

SEQ ID NO: 2677700 - RNA, 19 nt, Artificial Sequence
  Description of Artificial Sequence: Synthetic oligonucleotide
gcgauauccagcgcaguuu

SEQ ID NO: 2677701 - RNA, 19 nt, Artificial Sequence
  Description of Artificial Sequence: Synthetic oligonucleotide
ccgcauacauuaaggcggu

SEQ ID NO: 2677702 - RNA, 19 nt, Artificial Sequence
  Description of Artificial Sequence: Synthetic oligonucleotide
gccaccccuuucucaucuc

SEQ ID NO: 2677703 - RNA, 19 nt, Artificial Sequence
  Description of Artificial Sequence: Synthetic oligonucleotide
gcagccagucacaauuauu

SEQ ID NO: 2677704 - RNA, 19 nt, Artificial Sequence
  Description of Artificial Sequence: Synthetic oligonucleotide
ccggcaucggagggugcag

SEQ ID NO: 2677705 - RNA, 19 nt, Artificial Sequence
  Description of Artificial Sequence: Synthetic oligonucleotide
cguuccgugccgcauacau

SEQ ID NO: 2677706 - RNA, 19 nt, Artificial Sequence
  Description of Artificial Sequence: Synthetic oligonucleotide
gcuugcagccagucacaau

SEQ ID NO: 2677707 - RNA, 19 nt, Artificial Sequence
  Description of Artificial Sequence: Synthetic oligonucleotide
ccccuuucucaucucgagu

SEQ ID NO: 2677708 - RNA, 19 nt, Artificial Sequence
  Description of Artificial Sequence: Synthetic oligonucleotide
ccuccgguccaguaguguu

SEQ ID NO: 2677709 - RNA, 19 nt, Artificial Sequence
  Description of Artificial Sequence: Synthetic oligonucleotide
gcccguuccgugccgcaua

SEQ ID NO: 2677710 - RNA, 19 nt, Artificial Sequence
  Description of Artificial Sequence: Synthetic oligonucleotide
gugcgccaagaaauccuuu

SEQ ID NO: 2677711 - RNA, 19 nt, Artificial Sequence
  Description of Artificial Sequence: Synthetic oligonucleotide
ccgguccaguaguguucug

SEQ ID NO: 2677712 - RNA, 19 nt, Artificial Sequence
  Description of Artificial Sequence: Synthetic oligonucleotide
cggcgacagguucgaugcc

SEQ ID NO: 2677713 - RNA, 19 nt, Artificial Sequence
  Description of Artificial Sequence: Synthetic oligonucleotide
cgcauacauuaaggcgguc

SEQ ID NO: 2677714 - RNA, 19 nt, Artificial Sequence
  Description of Artificial Sequence: Synthetic oligonucleotide
cagcaucaggaugcccguu

SEQ ID NO: 2677715 - RNA, 19 nt, Artificial Sequence
  Description of Artificial Sequence: Synthetic oligonucleotide
ccguuccgugccgcauaca

SEQ ID NO: 2677716 - RNA, 19 nt, Artificial Sequence
  Description of Artificial Sequence: Synthetic oligonucleotide
cagcggcgacagguucgau

SEQ ID NO: 2677717 - RNA, 19 nt, Artificial Sequence
  Description of Artificial Sequence: Synthetic oligonucleotide
aaauacucugaugaggggc

SEQ ID NO: 2677718 - RNA, 19 nt, Artificial Sequence
  Description of Artificial Sequence: Synthetic oligonucleotide
uguucuuugaggaugaaau

SEQ ID NO: 2677719 - RNA, 19 nt, Artificial Sequence
  Description of Artificial Sequence: Synthetic oligonucleotide
gaggaugaaaucuuccugg

SEQ ID NO: 2677720 - RNA, 19 nt, Artificial Sequence
  Description of Artificial Sequence: Synthetic oligonucleotide
ugcuuuauaaggcugcuug

SEQ ID NO: 2677721 - RNA, 19 nt, Artificial Sequence
  Description of Artificial Sequence: Synthetic oligonucleotide
aaguggaggaagcacaaag

SEQ ID NO: 2677722 - RNA, 19 nt, Artificial Sequence
  Description of Artificial Sequence: Synthetic oligonucleotide
aguggaggcggguagaggc

SEQ ID NO: 2677723 - RNA, 19 nt, Artificial Sequence
  Description of Artificial Sequence: Synthetic oligonucleotide
uuauaaggcugcuuggccg

SEQ ID NO: 2677724 - RNA, 19 nt, Artificial Sequence
  Description of Artificial Sequence: Synthetic oligonucleotide
acagguaacaccuggguag

SEQ ID NO: 2677725 - RNA, 19 nt, Artificial Sequence
  Description of Artificial Sequence: Synthetic oligonucleotide
uuuuagaaaccaaacccug

SEQ ID NO: 2677726 - RNA, 19 nt, Artificial Sequence
  Description of Artificial Sequence: Synthetic oligonucleotide
agugaggugacagaggugg

SEQ ID NO: 2677727 - RNA, 19 nt, Artificial Sequence
  Description of Artificial Sequence: Synthetic oligonucleotide
aaaucuuccuggauaaggg

SEQ ID NO: 2677728 - RNA, 19 nt, Artificial Sequence
  Description of Artificial Sequence: Synthetic oligonucleotide
uuuauaaggcugcuuggcc

SEQ ID NO: 2677729 - RNA, 19 nt, Artificial Sequence
  Description of Artificial Sequence: Synthetic oligonucleotide
aaaauacucugaugagggg

SEQ ID NO: 2677730 - RNA, 19 nt, Artificial Sequence
  Description of Artificial Sequence: Synthetic oligonucleotide
aaacccugcuuuauaaggc

SEQ ID NO: 2677731 - RNA, 19 nt, Artificial Sequence
  Description of Artificial Sequence: Synthetic oligonucleotide
caaacccugcuuuauaagg

SEQ ID NO: 2677732 - RNA, 19 nt, Artificial Sequence
  Description of Artificial Sequence: Synthetic oligonucleotide
gauaugaggugccagccag

SEQ ID NO: 2677733 - RNA, 19 nt, Artificial Sequence
  Description of Artificial Sequence: Synthetic oligonucleotide
aguacuugaguacagguaa

SEQ ID NO: 2677734 - RNA, 19 nt, Artificial Sequence
  Description of Artificial Sequence: Synthetic oligonucleotide
cuuguuucugauuacaaca

SEQ ID NO: 2677735 - RNA, 19 nt, Artificial Sequence
  Description of Artificial Sequence: Synthetic oligonucleotide
ucuucuugggcuuggguag

SEQ ID NO: 2677736 - RNA, 19 nt, Artificial Sequence
  Description of Artificial Sequence: Synthetic oligonucleotide
uggaauugugcccagagua

SEQ ID NO: 2677737 - RNA, 19 nt, Artificial Sequence
  Description of Artificial Sequence: Synthetic oligonucleotide
ucuacugagauaugaggug

SEQ ID NO: 2677738 - RNA, 19 nt, Artificial Sequence
  Description of Artificial Sequence: Synthetic oligonucleotide
ucuacaauagaaccacuuc

SEQ ID NO: 2677739 - RNA, 19 nt, Artificial Sequence
  Description of Artificial Sequence: Synthetic oligonucleotide
ucuggaauugugcccagag

SEQ ID NO: 2677740 - RNA, 19 nt, Artificial Sequence
  Description of Artificial Sequence: Synthetic oligonucleotide
ugaggaugaaaucuuccug

SEQ ID NO: 2677741 - RNA, 19 nt, Artificial Sequence
  Description of Artificial Sequence: Synthetic oligonucleotide
cugaugaggggcaaagugg

SEQ ID NO: 2677742 - RNA, 19 nt, Artificial Sequence
  Description of Artificial Sequence: Synthetic oligonucleotide
accagcaugacucuucuug

SEQ ID NO: 2677743 - RNA, 19 nt, Artificial Sequence
  Description of Artificial Sequence: Synthetic oligonucleotide
agcaugacucuucuugggc

SEQ ID NO: 2677744 - RNA, 19 nt, Artificial Sequence
  Description of Artificial Sequence: Synthetic oligonucleotide
uacaauagaaccacuucaa

SEQ ID NO: 2677745 - RNA, 19 nt, Artificial Sequence
  Description of Artificial Sequence: Synthetic oligonucleotide
ucagaggacagcauguuuc

SEQ ID NO: 2677746 - RNA, 19 nt, Artificial Sequence
  Description of Artificial Sequence: Synthetic oligonucleotide
uucucuacugagauaugag

SEQ ID NO: 2677747 - RNA, 19 nt, Artificial Sequence
  Description of Artificial Sequence: Synthetic oligonucleotide
agcauguuucccucggagc

SEQ ID NO: 2677748 - RNA, 19 nt, Artificial Sequence
  Description of Artificial Sequence: Synthetic oligonucleotide
acaaagucuggaauugugc

SEQ ID NO: 2677749 - RNA, 19 nt, Artificial Sequence
  Description of Artificial Sequence: Synthetic oligonucleotide
cucacagcagucaggaggg

SEQ ID NO: 2677750 - RNA, 19 nt, Artificial Sequence
  Description of Artificial Sequence: Synthetic oligonucleotide
uuucugauuacaacauccu

SEQ ID NO: 2677751 - RNA, 19 nt, Artificial Sequence
  Description of Artificial Sequence: Synthetic oligonucleotide
accuuccucaccuucuccc

SEQ ID NO: 2677752 - RNA, 19 nt, Artificial Sequence
  Description of Artificial Sequence: Synthetic oligonucleotide
ugguuggacucucugcugg

SEQ ID NO: 2677753 - RNA, 19 nt, Artificial Sequence
  Description of Artificial Sequence: Synthetic oligonucleotide
gugcagaccagucacaggc

SEQ ID NO: 2677754 - RNA, 19 nt, Artificial Sequence
  Description of Artificial Sequence: Synthetic oligonucleotide
ucuucagaggacagcaugu

SEQ ID NO: 2677755 - RNA, 19 nt, Artificial Sequence
  Description of Artificial Sequence: Synthetic oligonucleotide
ucauuagcaggucgguucc

SEQ ID NO: 2677756 - RNA, 19 nt, Artificial Sequence
  Description of Artificial Sequence: Synthetic oligonucleotide
uggaggaagcacaaagucu

SEQ ID NO: 2677757 - RNA, 19 nt, Artificial Sequence
  Description of Artificial Sequence: Synthetic oligonucleotide
agagguggaaccuuccuca

SEQ ID NO: 2677758 - RNA, 19 nt, Artificial Sequence
  Description of Artificial Sequence: Synthetic oligonucleotide
agugguuggacucucugcu

SEQ ID NO: 2677759 - RNA, 19 nt, Artificial Sequence
  Description of Artificial Sequence: Synthetic oligonucleotide
guaacaccuggguagagug

SEQ ID NO: 2677760 - RNA, 19 nt, Artificial Sequence
  Description of Artificial Sequence: Synthetic oligonucleotide
uauaaggcugcuuggccgc

SEQ ID NO: 2677761 - RNA, 19 nt, Artificial Sequence
  Description of Artificial Sequence: Synthetic oligonucleotide
cucauuagcaggucgguuc

SEQ ID NO: 2677762 - RNA, 19 nt, Artificial Sequence
  Description of Artificial Sequence: Synthetic oligonucleotide
uuguuucugauuacaacau

SEQ ID NO: 2677763 - RNA, 19 nt, Artificial Sequence
  Description of Artificial Sequence: Synthetic oligonucleotide
cuacaauagaaccacuuca

SEQ ID NO: 2677764 - RNA, 19 nt, Artificial Sequence
  Description of Artificial Sequence: Synthetic oligonucleotide
aauacucugaugaggggca

SEQ ID NO: 2677765 - RNA, 19 nt, Artificial Sequence
  Description of Artificial Sequence: Synthetic oligonucleotide
agaguacuugaguacaggu

SEQ ID NO: 2677766 - RNA, 19 nt, Artificial Sequence
  Description of Artificial Sequence: Synthetic oligonucleotide
augaaaucuuccuggauaa

SEQ ID NO: 2677767 - RNA, 19 nt, Artificial Sequence
  Description of Artificial Sequence: Synthetic oligonucleotide
ugaggggcaaaguggaggc

SEQ ID NO: 2677768 - RNA, 19 nt, Artificial Sequence
  Description of Artificial Sequence: Synthetic oligonucleotide
cuuuauaaggcugcuuggc

SEQ ID NO: 2677769 - RNA, 19 nt, Artificial Sequence
  Description of Artificial Sequence: Synthetic oligonucleotide
aagucuggaauugugccca

SEQ ID NO: 2677770 - RNA, 19 nt, Artificial Sequence
  Description of Artificial Sequence: Synthetic oligonucleotide
gacagcauguuucccucgg

SEQ ID NO: 2677771 - RNA, 19 nt, Artificial Sequence
  Description of Artificial Sequence: Synthetic oligonucleotide
ucuuugaggaugaaaucuu

SEQ ID NO: 2677772 - RNA, 19 nt, Artificial Sequence
  Description of Artificial Sequence: Synthetic oligonucleotide
acuugaguacagguaacac

SEQ ID NO: 2677773 - RNA, 19 nt, Artificial Sequence
  Description of Artificial Sequence: Synthetic oligonucleotide
uccugugcagaccagucac

SEQ ID NO: 2677774 - RNA, 19 nt, Artificial Sequence
  Description of Artificial Sequence: Synthetic oligonucleotide
guucccuugagguagcuga

SEQ ID NO: 2677775 - RNA, 19 nt, Artificial Sequence
  Description of Artificial Sequence: Synthetic oligonucleotide
cuacugagauaugaggugc

SEQ ID NO: 2677776 - RNA, 19 nt, Artificial Sequence
  Description of Artificial Sequence: Synthetic oligonucleotide
uaacaccuggguagagugg

SEQ ID NO: 2677777 - RNA, 19 nt, Artificial Sequence
  Description of Artificial Sequence: Synthetic oligonucleotide
caauagaaccacuucaaaa

SEQ ID NO: 2677778 - RNA, 19 nt, Artificial Sequence
  Description of Artificial Sequence: Synthetic oligonucleotide
agaaaccaaacccugcuuu

SEQ ID NO: 2677779 - RNA, 19 nt, Artificial Sequence
  Description of Artificial Sequence: Synthetic oligonucleotide
gguaguaucccaucuucag

SEQ ID NO: 2677780 - RNA, 19 nt, Artificial Sequence
  Description of Artificial Sequence: Synthetic oligonucleotide
accagucacaggcucacag

SEQ ID NO: 2677781 - RNA, 19 nt, Artificial Sequence
  Description of Artificial Sequence: Synthetic oligonucleotide
uggguaguaucccaucuuc

SEQ ID NO: 2677782 - RNA, 19 nt, Artificial Sequence
  Description of Artificial Sequence: Synthetic oligonucleotide
cacaaagucuggaauugug

SEQ ID NO: 2677783 - RNA, 19 nt, Artificial Sequence
  Description of Artificial Sequence: Synthetic oligonucleotide
aacaccuggguagaguggu

SEQ ID NO: 2677784 - RNA, 19 nt, Artificial Sequence
  Description of Artificial Sequence: Synthetic oligonucleotide
uacugagauaugaggugcc

SEQ ID NO: 2677785 - RNA, 19 nt, Artificial Sequence
  Description of Artificial Sequence: Synthetic oligonucleotide
uaucccaucuucagaggac

SEQ ID NO: 2677786 - RNA, 19 nt, Artificial Sequence
  Description of Artificial Sequence: Synthetic oligonucleotide
aggucgguucccuugaggu

SEQ ID NO: 2677787 - RNA, 19 nt, Artificial Sequence
  Description of Artificial Sequence: Synthetic oligonucleotide
ggaggaagcacaaagucug

SEQ ID NO: 2677788 - RNA, 19 nt, Artificial Sequence
  Description of Artificial Sequence: Synthetic oligonucleotide
aguacagguaacaccuggg

SEQ ID NO: 2677789 - RNA, 19 nt, Artificial Sequence
  Description of Artificial Sequence: Synthetic oligonucleotide
ugugcagaccagucacagg

SEQ ID NO: 2677790 - RNA, 19 nt, Artificial Sequence
  Description of Artificial Sequence: Synthetic oligonucleotide
cuuugaggaugaaaucuuc

SEQ ID NO: 2677791 - RNA, 19 nt, Artificial Sequence
  Description of Artificial Sequence: Synthetic oligonucleotide
gaggcucaggcucauuagc

SEQ ID NO: 2677792 - RNA, 19 nt, Artificial Sequence
  Description of Artificial Sequence: Synthetic oligonucleotide
uacagguaacaccugggua

SEQ ID NO: 2677793 - RNA, 19 nt, Artificial Sequence
  Description of Artificial Sequence: Synthetic oligonucleotide
gagugguuggacucucugc

SEQ ID NO: 2677794 - RNA, 19 nt, Artificial Sequence
  Description of Artificial Sequence: Synthetic oligonucleotide
gaugcccgcaucuacaaua

SEQ ID NO: 2677795 - RNA, 19 nt, Artificial Sequence
  Description of Artificial Sequence: Synthetic oligonucleotide
acugggaaguggaggaagc

SEQ ID NO: 2677796 - RNA, 19 nt, Artificial Sequence
  Description of Artificial Sequence: Synthetic oligonucleotide
uucugauuacaacauccuu

SEQ ID NO: 2677797 - RNA, 19 nt, Artificial Sequence
  Description of Artificial Sequence: Synthetic oligonucleotide
ugacuuguuucugauuaca

SEQ ID NO: 2677798 - RNA, 19 nt, Artificial Sequence
  Description of Artificial Sequence: Synthetic oligonucleotide
guggaggaagcacaaaguc

SEQ ID NO: 2677799 - RNA, 19 nt, Artificial Sequence
  Description of Artificial Sequence: Synthetic oligonucleotide
acaauagaaccacuucaaa

SEQ ID NO: 2677800 - RNA, 19 nt, Artificial Sequence
  Description of Artificial Sequence: Synthetic oligonucleotide
agcacaaagucuggaauug

SEQ ID NO: 2677801 - RNA, 19 nt, Artificial Sequence
  Description of Artificial Sequence: Synthetic oligonucleotide
uaugaggugccagccaggc

SEQ ID NO: 2677802 - RNA, 19 nt, Artificial Sequence
  Description of Artificial Sequence: Synthetic oligonucleotide
gucgguucccuugagguag

SEQ ID NO: 2677803 - RNA, 19 nt, Artificial Sequence
  Description of Artificial Sequence: Synthetic oligonucleotide
cugauuacaacauccuuua

SEQ ID NO: 2677804 - RNA, 19 nt, Artificial Sequence
  Description of Artificial Sequence: Synthetic oligonucleotide
aaggcugcuuggccgccac

SEQ ID NO: 2677805 - RNA, 19 nt, Artificial Sequence
  Description of Artificial Sequence: Synthetic oligonucleotide
agagugguuggacucucug

SEQ ID NO: 2677806 - RNA, 19 nt, Artificial Sequence
  Description of Artificial Sequence: Synthetic oligonucleotide
uuucccucggagcagcuuu

SEQ ID NO: 2677807 - RNA, 19 nt, Artificial Sequence
  Description of Artificial Sequence: Synthetic oligonucleotide
uuggacucucugcuggugu

SEQ ID NO: 2677808 - RNA, 19 nt, Artificial Sequence
  Description of Artificial Sequence: Synthetic oligonucleotide
gcuuuauaaggcugcuugg

SEQ ID NO: 2677809 - RNA, 19 nt, Artificial Sequence
  Description of Artificial Sequence: Synthetic oligonucleotide
aggaugaaaucuuccugga

SEQ ID NO: 2677810 - RNA, 19 nt, Artificial Sequence
  Description of Artificial Sequence: Synthetic oligonucleotide
uccagaugcccgcaucuac

SEQ ID NO: 2677811 - RNA, 19 nt, Artificial Sequence
  Description of Artificial Sequence: Synthetic oligonucleotide
guucuuugaggaugaaauc

SEQ ID NO: 2677812 - RNA, 19 nt, Artificial Sequence
  Description of Artificial Sequence: Synthetic oligonucleotide
uugacuuguuucugauuac

SEQ ID NO: 2677813 - RNA, 19 nt, Artificial Sequence
  Description of Artificial Sequence: Synthetic oligonucleotide
guaguaucccaucuucaga

SEQ ID NO: 2677814 - RNA, 19 nt, Artificial Sequence
  Description of Artificial Sequence: Synthetic oligonucleotide
accuggguagagugguugg

SEQ ID NO: 2677815 - RNA, 19 nt, Artificial Sequence
  Description of Artificial Sequence: Synthetic oligonucleotide
agauaugaggugccagcca

SEQ ID NO: 2677816 - RNA, 19 nt, Artificial Sequence
  Description of Artificial Sequence: Synthetic oligonucleotide
uucccuugagguagcugag

SEQ ID NO: 2677817 - RNA, 19 nt, Artificial Sequence
  Description of Artificial Sequence: Synthetic oligonucleotide
uucuugacuuguuucugau

SEQ ID NO: 2677818 - RNA, 19 nt, Artificial Sequence
  Description of Artificial Sequence: Synthetic oligonucleotide
uggguagagugguuggacu

SEQ ID NO: 2677819 - RNA, 19 nt, Artificial Sequence
  Description of Artificial Sequence: Synthetic oligonucleotide
guaucccaucuucagagga

SEQ ID NO: 2677820 - RNA, 19 nt, Artificial Sequence
  Description of Artificial Sequence: Synthetic oligonucleotide
agcugagugcuccugugca

SEQ ID NO: 2677821 - RNA, 19 nt, Artificial Sequence
  Description of Artificial Sequence: Synthetic oligonucleotide
cugacugggaaguggagga

SEQ ID NO: 2677822 - RNA, 19 nt, Artificial Sequence
  Description of Artificial Sequence: Synthetic oligonucleotide
uagcugagugcuccugugc

SEQ ID NO: 2677823 - RNA, 19 nt, Artificial Sequence
  Description of Artificial Sequence: Synthetic oligonucleotide
auguuucccucggagcagc

SEQ ID NO: 2677824 - RNA, 19 nt, Artificial Sequence
  Description of Artificial Sequence: Synthetic oligonucleotide
caggcucauuagcaggucg

SEQ ID NO: 2677825 - RNA, 19 nt, Artificial Sequence
  Description of Artificial Sequence: Synthetic oligonucleotide
gucaggagggagucacugg

SEQ ID NO: 2677826 - RNA, 19 nt, Artificial Sequence
  Description of Artificial Sequence: Synthetic oligonucleotide
cauuguucuuugaggauga

SEQ ID NO: 2677827 - RNA, 19 nt, Artificial Sequence
  Description of Artificial Sequence: Synthetic oligonucleotide
cagcaugacucuucuuggg

SEQ ID NO: 2677828 - RNA, 19 nt, Artificial Sequence
  Description of Artificial Sequence: Synthetic oligonucleotide
cucuacugagauaugaggu

SEQ ID NO: 2677829 - RNA, 19 nt, Artificial Sequence
  Description of Artificial Sequence: Synthetic oligonucleotide
gacugggaaguggaggaag

SEQ ID NO: 2677830 - RNA, 19 nt, Artificial Sequence
  Description of Artificial Sequence: Synthetic oligonucleotide
gaaaccaaacccugcuuua

SEQ ID NO: 2677831 - RNA, 19 nt, Artificial Sequence
  Description of Artificial Sequence: Synthetic oligonucleotide
agaccagucacaggcucac

SEQ ID NO: 2677832 - RNA, 19 nt, Artificial Sequence
  Description of Artificial Sequence: Synthetic oligonucleotide
aaccaaacccugcuuuaua

SEQ ID NO: 2677833 - RNA, 19 nt, Artificial Sequence
  Description of Artificial Sequence: Synthetic oligonucleotide
ugacagagguggaaccuuc

SEQ ID NO: 2677834 - RNA, 19 nt, Artificial Sequence
  Description of Artificial Sequence: Synthetic oligonucleotide
aaaccaaacccugcuuuau

SEQ ID NO: 2677835 - RNA, 19 nt, Artificial Sequence
  Description of Artificial Sequence: Synthetic oligonucleotide
ugaaaucuuccuggauaag

SEQ ID NO: 2677836 - RNA, 19 nt, Artificial Sequence
  Description of Artificial Sequence: Synthetic oligonucleotide
gaagcacaaagucuggaau

SEQ ID NO: 2677837 - RNA, 19 nt, Artificial Sequence
  Description of Artificial Sequence: Synthetic oligonucleotide
gcaucuacaauagaaccac

SEQ ID NO: 2677838 - RNA, 19 nt, Artificial Sequence
  Description of Artificial Sequence: Synthetic oligonucleotide
cagcauguuucccucggag

SEQ ID NO: 2677839 - RNA, 19 nt, Artificial Sequence
  Description of Artificial Sequence: Synthetic oligonucleotide
uagaaaccaaacccugcuu

SEQ ID NO: 2677840 - RNA, 19 nt, Artificial Sequence
  Description of Artificial Sequence: Synthetic oligonucleotide
uagcaggucgguucccuug

SEQ ID NO: 2677841 - RNA, 19 nt, Artificial Sequence
  Description of Artificial Sequence: Synthetic oligonucleotide
aaguggaggcggguagagg

SEQ ID NO: 2677842 - RNA, 19 nt, Artificial Sequence
  Description of Artificial Sequence: Synthetic oligonucleotide
gaggugacagagguggaac

SEQ ID NO: 2677843 - RNA, 19 nt, Artificial Sequence
  Description of Artificial Sequence: Synthetic oligonucleotide
ccgcaucuacaauagaacc

SEQ ID NO: 2677844 - RNA, 19 nt, Artificial Sequence
  Description of Artificial Sequence: Synthetic oligonucleotide
uuguucuuugaggaugaaa

SEQ ID NO: 2677845 - RNA, 19 nt, Artificial Sequence
  Description of Artificial Sequence: Synthetic oligonucleotide
ggagucacuggcugacugg

SEQ ID NO: 2677846 - RNA, 19 nt, Artificial Sequence
  Description of Artificial Sequence: Synthetic oligonucleotide
cugagauaugaggugccag

SEQ ID NO: 2677847 - RNA, 19 nt, Artificial Sequence
  Description of Artificial Sequence: Synthetic oligonucleotide
cuucucuacugagauauga

SEQ ID NO: 2677848 - RNA, 19 nt, Artificial Sequence
  Description of Artificial Sequence: Synthetic oligonucleotide
ugggcuuggguaguauccc

SEQ ID NO: 2677849 - RNA, 19 nt, Artificial Sequence
  Description of Artificial Sequence: Synthetic oligonucleotide
aggcucauuagcaggucgg

SEQ ID NO: 2677850 - RNA, 19 nt, Artificial Sequence
  Description of Artificial Sequence: Synthetic oligonucleotide
auugugcccagaguacuug

SEQ ID NO: 2677851 - RNA, 19 nt, Artificial Sequence
  Description of Artificial Sequence: Synthetic oligonucleotide
cuugggcuuggguaguauc

SEQ ID NO: 2677852 - RNA, 19 nt, Artificial Sequence
  Description of Artificial Sequence: Synthetic oligonucleotide
cuggcugacugggaagugg

SEQ ID NO: 2677853 - RNA, 19 nt, Artificial Sequence
  Description of Artificial Sequence: Synthetic oligonucleotide
uugugcccagaguacuuga

SEQ ID NO: 2677854 - RNA, 19 nt, Artificial Sequence
  Description of Artificial Sequence: Synthetic oligonucleotide
gaggacagcauguuucccu

SEQ ID NO: 2677855 - RNA, 19 nt, Artificial Sequence
  Description of Artificial Sequence: Synthetic oligonucleotide
ugcagaccagucacaggcu

SEQ ID NO: 2677856 - RNA, 19 nt, Artificial Sequence
  Description of Artificial Sequence: Synthetic oligonucleotide
cagucacaggcucacagca

SEQ ID NO: 2677857 - RNA, 19 nt, Artificial Sequence
  Description of Artificial Sequence: Synthetic oligonucleotide
cagagguggaaccuuccuc

SEQ ID NO: 2677858 - RNA, 19 nt, Artificial Sequence
  Description of Artificial Sequence: Synthetic oligonucleotide
gcaaaguggaggcggguag

SEQ ID NO: 2677859 - RNA, 19 nt, Artificial Sequence
  Description of Artificial Sequence: Synthetic oligonucleotide
cugugcagaccagucacag

SEQ ID NO: 2677860 - RNA, 19 nt, Artificial Sequence
  Description of Artificial Sequence: Synthetic oligonucleotide
aucuacaauagaaccacuu

SEQ ID NO: 2677861 - RNA, 19 nt, Artificial Sequence
  Description of Artificial Sequence: Synthetic oligonucleotide
auaaggcugcuuggccgcc

SEQ ID NO: 2677862 - RNA, 19 nt, Artificial Sequence
  Description of Artificial Sequence: Synthetic oligonucleotide
ugacucuucuugggcuugg

SEQ ID NO: 2677863 - RNA, 19 nt, Artificial Sequence
  Description of Artificial Sequence: Synthetic oligonucleotide
aucccaucuucagaggaca

SEQ ID NO: 2677864 - RNA, 19 nt, Artificial Sequence
  Description of Artificial Sequence: Synthetic oligonucleotide
uguccucauuguucuuuga

SEQ ID NO: 2677865 - RNA, 19 nt, Artificial Sequence
  Description of Artificial Sequence: Synthetic oligonucleotide
gacuuguuucugauuacaa

SEQ ID NO: 2677866 - RNA, 19 nt, Artificial Sequence
  Description of Artificial Sequence: Synthetic oligonucleotide
gaguacuugaguacaggua

SEQ ID NO: 2677867 - RNA, 19 nt, Artificial Sequence
  Description of Artificial Sequence: Synthetic oligonucleotide
ugagugcuccugugcagac

SEQ ID NO: 2677868 - RNA, 19 nt, Artificial Sequence
  Description of Artificial Sequence: Synthetic oligonucleotide
acucuucuugggcuugggu

SEQ ID NO: 2677869 - RNA, 19 nt, Artificial Sequence
  Description of Artificial Sequence: Synthetic oligonucleotide
auuagcaggucgguucccu

SEQ ID NO: 2677870 - RNA, 19 nt, Artificial Sequence
  Description of Artificial Sequence: Synthetic oligonucleotide
aauugugcccagaguacuu

SEQ ID NO: 2677871 - RNA, 19 nt, Artificial Sequence
  Description of Artificial Sequence: Synthetic oligonucleotide
ggcggguagaggcucaggc

SEQ ID NO: 2677872 - RNA, 19 nt, Artificial Sequence
  Description of Artificial Sequence: Synthetic oligonucleotide
auaugaggugccagccagg

SEQ ID NO: 2677873 - RNA, 19 nt, Artificial Sequence
  Description of Artificial Sequence: Synthetic oligonucleotide
caggucgguucccuugagg

SEQ ID NO: 2677874 - RNA, 19 nt, Artificial Sequence
  Description of Artificial Sequence: Synthetic oligonucleotide
acugagauaugaggugcca

SEQ ID NO: 2677875 - RNA, 19 nt, Artificial Sequence
  Description of Artificial Sequence: Synthetic oligonucleotide
uucccucggagcagcuuug

SEQ ID NO: 2677876 - RNA, 19 nt, Artificial Sequence
  Description of Artificial Sequence: Synthetic oligonucleotide
cccgcaucuacaauagaac

SEQ ID NO: 2677877 - RNA, 19 nt, Artificial Sequence
  Description of Artificial Sequence: Synthetic oligonucleotide
cacagcagucaggagggag

SEQ ID NO: 2677878 - RNA, 19 nt, Artificial Sequence
  Description of Artificial Sequence: Synthetic oligonucleotide
ggaauugugcccagaguac

SEQ ID NO: 2677879 - RNA, 19 nt, Artificial Sequence
  Description of Artificial Sequence: Synthetic oligonucleotide
ggaagcacaaagucuggaa

SEQ ID NO: 2677880 - RNA, 19 nt, Artificial Sequence
  Description of Artificial Sequence: Synthetic oligonucleotide
uagagugguuggacucucu

SEQ ID NO: 2677881 - RNA, 19 nt, Artificial Sequence
  Description of Artificial Sequence: Synthetic oligonucleotide
cuggguagagugguuggac

SEQ ID NO: 2677882 - RNA, 19 nt, Artificial Sequence
  Description of Artificial Sequence: Synthetic oligonucleotide
gugguuggacucucugcug

SEQ ID NO: 2677883 - RNA, 19 nt, Artificial Sequence
  Description of Artificial Sequence: Synthetic oligonucleotide
acagcauguuucccucgga

SEQ ID NO: 2677884 - RNA, 19 nt, Artificial Sequence
  Description of Artificial Sequence: Synthetic oligonucleotide
cugcuuggccgccacuggc

SEQ ID NO: 2677885 - RNA, 19 nt, Artificial Sequence
  Description of Artificial Sequence: Synthetic oligonucleotide
ccaaacccugcuuuauaag

SEQ ID NO: 2677886 - RNA, 19 nt, Artificial Sequence
  Description of Artificial Sequence: Synthetic oligonucleotide
guacuugaguacagguaac

SEQ ID NO: 2677887 - RNA, 19 nt, Artificial Sequence
  Description of Artificial Sequence: Synthetic oligonucleotide
guacagguaacaccugggu

SEQ ID NO: 2677888 - RNA, 19 nt, Artificial Sequence
  Description of Artificial Sequence: Synthetic oligonucleotide
cccugcuuuauaaggcugc

SEQ ID NO: 2677889 - RNA, 19 nt, Artificial Sequence
  Description of Artificial Sequence: Synthetic oligonucleotide
ucgguucccuugagguagc

SEQ ID NO: 2677890 - RNA, 19 nt, Artificial Sequence
  Description of Artificial Sequence: Synthetic oligonucleotide
ugcugguguccucauuguu

SEQ ID NO: 2677891 - RNA, 19 nt, Artificial Sequence
  Description of Artificial Sequence: Synthetic oligonucleotide
ggguagagugguuggacuc

SEQ ID NO: 2677892 - RNA, 19 nt, Artificial Sequence
  Description of Artificial Sequence: Synthetic oligonucleotide
uuggccgccacuggcuucu

SEQ ID NO: 2677893 - RNA, 19 nt, Artificial Sequence
  Description of Artificial Sequence: Synthetic oligonucleotide
gaggggcaaaguggaggcg

SEQ ID NO: 2677894 - RNA, 19 nt, Artificial Sequence
  Description of Artificial Sequence: Synthetic oligonucleotide
caccaccaccccuccagcc

SEQ ID NO: 2677895 - RNA, 19 nt, Artificial Sequence
  Description of Artificial Sequence: Synthetic oligonucleotide
cuuggguaguaucccaucu

SEQ ID NO: 2677896 - RNA, 19 nt, Artificial Sequence
  Description of Artificial Sequence: Synthetic oligonucleotide
uguuucccucggagcagcu

SEQ ID NO: 2677897 - RNA, 19 nt, Artificial Sequence
  Description of Artificial Sequence: Synthetic oligonucleotide
ggacagcauguuucccucg

SEQ ID NO: 2677898 - RNA, 19 nt, Artificial Sequence
  Description of Artificial Sequence: Synthetic oligonucleotide
cagcccuccagaugcccgc

SEQ ID NO: 2677899 - RNA, 19 nt, Artificial Sequence
  Description of Artificial Sequence: Synthetic oligonucleotide
cagccaggcagugagguga

SEQ ID NO: 2677900 - RNA, 19 nt, Artificial Sequence
  Description of Artificial Sequence: Synthetic oligonucleotide
uuagcaggucgguucccuu

SEQ ID NO: 2677901 - RNA, 19 nt, Artificial Sequence
  Description of Artificial Sequence: Synthetic oligonucleotide
caccuggguagagugguug

SEQ ID NO: 2677902 - RNA, 19 nt, Artificial Sequence
  Description of Artificial Sequence: Synthetic oligonucleotide
gcagugaggugacagaggu

SEQ ID NO: 2677903 - RNA, 19 nt, Artificial Sequence
  Description of Artificial Sequence: Synthetic oligonucleotide
guuggacucucugcuggug

SEQ ID NO: 2677904 - RNA, 19 nt, Artificial Sequence
  Description of Artificial Sequence: Synthetic oligonucleotide
gcugagugcuccugugcag

SEQ ID NO: 2677905 - RNA, 19 nt, Artificial Sequence
  Description of Artificial Sequence: Synthetic oligonucleotide
ggcuucucuacugagauau

SEQ ID NO: 2677906 - RNA, 19 nt, Artificial Sequence
  Description of Artificial Sequence: Synthetic oligonucleotide
gagugcuccugugcagacc

SEQ ID NO: 2677907 - RNA, 19 nt, Artificial Sequence
  Description of Artificial Sequence: Synthetic oligonucleotide
cagaccagucacaggcuca

SEQ ID NO: 2677908 - RNA, 19 nt, Artificial Sequence
  Description of Artificial Sequence: Synthetic oligonucleotide
cuggcuucucuacugagau

SEQ ID NO: 2677909 - RNA, 19 nt, Artificial Sequence
  Description of Artificial Sequence: Synthetic oligonucleotide
cccuugagguagcugagug

SEQ ID NO: 2677910 - RNA, 19 nt, Artificial Sequence
  Description of Artificial Sequence: Synthetic oligonucleotide
ugcccgcaucuacaauaga

SEQ ID NO: 2677911 - RNA, 19 nt, Artificial Sequence
  Description of Artificial Sequence: Synthetic oligonucleotide
acccugcuuuauaaggcug

SEQ ID NO: 2677912 - RNA, 19 nt, Artificial Sequence
  Description of Artificial Sequence: Synthetic oligonucleotide
augaggugccagccaggca

SEQ ID NO: 2677913 - RNA, 19 nt, Artificial Sequence
  Description of Artificial Sequence: Synthetic oligonucleotide
ucccuugagguagcugagu

SEQ ID NO: 2677914 - RNA, 19 nt, Artificial Sequence
  Description of Artificial Sequence: Synthetic oligonucleotide
ucaggcucauuagcagguc

SEQ ID NO: 2677915 - RNA, 19 nt, Artificial Sequence
  Description of Artificial Sequence: Synthetic oligonucleotide
agaugcccgcaucuacaau

SEQ ID NO: 2677916 - RNA, 19 nt, Artificial Sequence
  Description of Artificial Sequence: Synthetic oligonucleotide
ugacugggaaguggaggaa

SEQ ID NO: 2677917 - RNA, 19 nt, Artificial Sequence
  Description of Artificial Sequence: Synthetic oligonucleotide
gcccagaguacuugaguac

SEQ ID NO: 2677918 - RNA, 19 nt, Artificial Sequence
  Description of Artificial Sequence: Synthetic oligonucleotide
cugagugcuccugugcaga

SEQ ID NO: 2677919 - RNA, 19 nt, Artificial Sequence
  Description of Artificial Sequence: Synthetic oligonucleotide
guagagugguuggacucuc

SEQ ID NO: 2677920 - RNA, 19 nt, Artificial Sequence
  Description of Artificial Sequence: Synthetic oligonucleotide
cuccugugcagaccaguca

SEQ ID NO: 2677921 - RNA, 19 nt, Artificial Sequence
  Description of Artificial Sequence: Synthetic oligonucleotide
cccaucaccaccaccccuc

SEQ ID NO: 2677922 - RNA, 19 nt, Artificial Sequence
  Description of Artificial Sequence: Synthetic oligonucleotide
cucggagcagcuuugcuuu

SEQ ID NO: 2677923 - RNA, 19 nt, Artificial Sequence
  Description of Artificial Sequence: Synthetic oligonucleotide
cgcaucuacaauagaacca

SEQ ID NO: 2677924 - RNA, 19 nt, Artificial Sequence
  Description of Artificial Sequence: Synthetic oligonucleotide
cagaugcccgcaucuacaa

SEQ ID NO: 2677925 - RNA, 19 nt, Artificial Sequence
  Description of Artificial Sequence: Synthetic oligonucleotide
ccaggcagugaggugacag

SEQ ID NO: 2677926 - RNA, 19 nt, Artificial Sequence
  Description of Artificial Sequence: Synthetic oligonucleotide
agccaggcagugaggugac

SEQ ID NO: 2677927 - RNA, 19 nt, Artificial Sequence
  Description of Artificial Sequence: Synthetic oligonucleotide
uggaggcggguagaggcuc

SEQ ID NO: 2677928 - RNA, 19 nt, Artificial Sequence
  Description of Artificial Sequence: Synthetic oligonucleotide
gcagaccagucacaggcuc

SEQ ID NO: 2677929 - RNA, 19 nt, Artificial Sequence
  Description of Artificial Sequence: Synthetic oligonucleotide
ucuugggcuuggguaguau

SEQ ID NO: 2677930 - RNA, 19 nt, Artificial Sequence
  Description of Artificial Sequence: Synthetic oligonucleotide
caaaguggaggcggguaga

SEQ ID NO: 2677931 - RNA, 19 nt, Artificial Sequence
  Description of Artificial Sequence: Synthetic oligonucleotide
uaaggcugcuuggccgcca

SEQ ID NO: 2677932 - RNA, 19 nt, Artificial Sequence
  Description of Artificial Sequence: Synthetic oligonucleotide
agguaacaccuggguagag

SEQ ID NO: 2677933 - RNA, 19 nt, Artificial Sequence
  Description of Artificial Sequence: Synthetic oligonucleotide
uggcuucucuacugagaua

SEQ ID NO: 2677934 - RNA, 19 nt, Artificial Sequence
  Description of Artificial Sequence: Synthetic oligonucleotide
ccagcccuccagaugcccg

SEQ ID NO: 2677935 - RNA, 19 nt, Artificial Sequence
  Description of Artificial Sequence: Synthetic oligonucleotide
cuuggccgccacuggcuuc

SEQ ID NO: 2677936 - RNA, 19 nt, Artificial Sequence
  Description of Artificial Sequence: Synthetic oligonucleotide
gcuuggguaguaucccauc

SEQ ID NO: 2677937 - RNA, 19 nt, Artificial Sequence
  Description of Artificial Sequence: Synthetic oligonucleotide
gcaugacucuucuugggcu

SEQ ID NO: 2677938 - RNA, 19 nt, Artificial Sequence
  Description of Artificial Sequence: Synthetic oligonucleotide
cagguaacaccuggguaga

SEQ ID NO: 2677939 - RNA, 19 nt, Artificial Sequence
  Description of Artificial Sequence: Synthetic oligonucleotide
ucccucggagcagcuuugc

SEQ ID NO: 2677940 - RNA, 19 nt, Artificial Sequence
  Description of Artificial Sequence: Synthetic oligonucleotide
uccucaccuucuccccauc

SEQ ID NO: 2677941 - RNA, 19 nt, Artificial Sequence
  Description of Artificial Sequence: Synthetic oligonucleotide
gaggcggguagaggcucag

SEQ ID NO: 2677942 - RNA, 19 nt, Artificial Sequence
  Description of Artificial Sequence: Synthetic oligonucleotide
ccagaugcccgcaucuaca

SEQ ID NO: 2677943 - RNA, 19 nt, Artificial Sequence
  Description of Artificial Sequence: Synthetic oligonucleotide
auuguucuuugaggaugaa

SEQ ID NO: 2677944 - RNA, 19 nt, Artificial Sequence
  Description of Artificial Sequence: Synthetic oligonucleotide
gcccgcaucuacaauagaa

SEQ ID NO: 2677945 - RNA, 19 nt, Artificial Sequence
  Description of Artificial Sequence: Synthetic oligonucleotide
caucuacaauagaaccacu

SEQ ID NO: 2677946 - RNA, 19 nt, Artificial Sequence
  Description of Artificial Sequence: Synthetic oligonucleotide
ggguaguaucccaucuuca

SEQ ID NO: 2677947 - RNA, 19 nt, Artificial Sequence
  Description of Artificial Sequence: Synthetic oligonucleotide
cagcuuugcuuucuugacu

SEQ ID NO: 2677948 - RNA, 19 nt, Artificial Sequence
  Description of Artificial Sequence: Synthetic oligonucleotide
auacucugaugaggggcaa

SEQ ID NO: 2677949 - RNA, 19 nt, Artificial Sequence
  Description of Artificial Sequence: Synthetic oligonucleotide
caugacucuucuugggcuu

SEQ ID NO: 2677950 - RNA, 19 nt, Artificial Sequence
  Description of Artificial Sequence: Synthetic oligonucleotide
agcagucaggagggaguca

SEQ ID NO: 2677951 - RNA, 19 nt, Artificial Sequence
  Description of Artificial Sequence: Synthetic oligonucleotide
cccagaguacuugaguaca

SEQ ID NO: 2677952 - RNA, 19 nt, Artificial Sequence
  Description of Artificial Sequence: Synthetic oligonucleotide
uucuugggcuuggguagua

SEQ ID NO: 2677953 - RNA, 19 nt, Artificial Sequence
  Description of Artificial Sequence: Synthetic oligonucleotide
aggcggguagaggcucagg

SEQ ID NO: 2677954 - RNA, 19 nt, Artificial Sequence
  Description of Artificial Sequence: Synthetic oligonucleotide
ucacagcagucaggaggga

SEQ ID NO: 2677955 - RNA, 19 nt, Artificial Sequence
  Description of Artificial Sequence: Synthetic oligonucleotide
gguucccuugagguagcug

SEQ ID NO: 2677956 - RNA, 19 nt, Artificial Sequence
  Description of Artificial Sequence: Synthetic oligonucleotide
gguaacaccuggguagagu

SEQ ID NO: 2677957 - RNA, 19 nt, Artificial Sequence
  Description of Artificial Sequence: Synthetic oligonucleotide
gggcuuggguaguauccca

SEQ ID NO: 2677958 - RNA, 19 nt, Artificial Sequence
  Description of Artificial Sequence: Synthetic oligonucleotide
ggugacagagguggaaccu

SEQ ID NO: 2677959 - RNA, 19 nt, Artificial Sequence
  Description of Artificial Sequence: Synthetic oligonucleotide
agggagucacuggcugacu

SEQ ID NO: 2677960 - RNA, 19 nt, Artificial Sequence
  Description of Artificial Sequence: Synthetic oligonucleotide
gcaggucgguucccuugag

SEQ ID NO: 2677961 - RNA, 19 nt, Artificial Sequence
  Description of Artificial Sequence: Synthetic oligonucleotide
ggucgguucccuugaggua

SEQ ID NO: 2677962 - RNA, 19 nt, Artificial Sequence
  Description of Artificial Sequence: Synthetic oligonucleotide
caggagggagucacuggcu

SEQ ID NO: 2677963 - RNA, 19 nt, Artificial Sequence
  Description of Artificial Sequence: Synthetic oligonucleotide
gcuucucuacugagauaug

SEQ ID NO: 2677964 - RNA, 19 nt, Artificial Sequence
  Description of Artificial Sequence: Synthetic oligonucleotide
ccgccacuggcuucucuac

SEQ ID NO: 2677965 - RNA, 19 nt, Artificial Sequence
  Description of Artificial Sequence: Synthetic oligonucleotide
gugacagagguggaaccuu

SEQ ID NO: 2677966 - RNA, 19 nt, Artificial Sequence
  Description of Artificial Sequence: Synthetic oligonucleotide
gccgccacuggcuucucua

SEQ ID NO: 2677967 - RNA, 19 nt, Artificial Sequence
  Description of Artificial Sequence: Synthetic oligonucleotide
gguuggacucucugcuggu

SEQ ID NO: 2677968 - RNA, 19 nt, Artificial Sequence
  Description of Artificial Sequence: Synthetic oligonucleotide
gcggguagaggcucaggcu

SEQ ID NO: 2677969 - RNA, 19 nt, Artificial Sequence
  Description of Artificial Sequence: Synthetic oligonucleotide
gugcuccugugcagaccag

SEQ ID NO: 2677970 - RNA, 19 nt, Artificial Sequence
  Description of Artificial Sequence: Synthetic oligonucleotide
cucugaugaggggcaaagu

SEQ ID NO: 2677971 - RNA, 19 nt, Artificial Sequence
  Description of Artificial Sequence: Synthetic oligonucleotide
ggugccagccaggcaguga

SEQ ID NO: 2677972 - RNA, 19 nt, Artificial Sequence
  Description of Artificial Sequence: Synthetic oligonucleotide
cuccagaugcccgcaucua

SEQ ID NO: 2677973 - RNA, 19 nt, Artificial Sequence
  Description of Artificial Sequence: Synthetic oligonucleotide
ccucaccuucuccccauca

SEQ ID NO: 2677974 - RNA, 19 nt, Artificial Sequence
  Description of Artificial Sequence: Synthetic oligonucleotide
acaccuggguagagugguu

SEQ ID NO: 2677975 - RNA, 19 nt, Artificial Sequence
  Description of Artificial Sequence: Synthetic oligonucleotide
gcacaaagucuggaauugu

SEQ ID NO: 2677976 - RNA, 19 nt, Artificial Sequence
  Description of Artificial Sequence: Synthetic oligonucleotide
ggcucauuagcaggucggu

SEQ ID NO: 2677977 - RNA, 19 nt, Artificial Sequence
  Description of Artificial Sequence: Synthetic oligonucleotide
ccuccagaugcccgcaucu

SEQ ID NO: 2677978 - RNA, 19 nt, Artificial Sequence
  Description of Artificial Sequence: Synthetic oligonucleotide
ggaggcggguagaggcuca

SEQ ID NO: 2677979 - RNA, 19 nt, Artificial Sequence
  Description of Artificial Sequence: Synthetic oligonucleotide
ggcuuggguaguaucccau

SEQ ID NO: 2677980 - RNA, 19 nt, Artificial Sequence
  Description of Artificial Sequence: Synthetic oligonucleotide
cugcuuuauaaggcugcuu

SEQ ID NO: 2677981 - RNA, 19 nt, Artificial Sequence
  Description of Artificial Sequence: Synthetic oligonucleotide
guuucccucggagcagcuu

SEQ ID NO: 2677982 - RNA, 19 nt, Artificial Sequence
  Description of Artificial Sequence: Synthetic oligonucleotide
ccugcuuuauaaggcugcu

SEQ ID NO: 2677983 - RNA, 19 nt, Artificial Sequence
  Description of Artificial Sequence: Synthetic oligonucleotide
gcucauuagcaggucgguu

SEQ ID NO: 2677984 - RNA, 19 nt, Artificial Sequence
  Description of Artificial Sequence: Synthetic oligonucleotide
gguagaggcucaggcucau

SEQ ID NO: 2677985 - RNA, 19 nt, Artificial Sequence
  Description of Artificial Sequence: Synthetic oligonucleotide
guagaggcucaggcucauu

SEQ ID NO: 2677986 - RNA, 19 nt, Artificial Sequence
  Description of Artificial Sequence: Synthetic oligonucleotide
uggccgccacuggcuucuc

SEQ ID NO: 2677987 - RNA, 19 nt, Artificial Sequence
  Description of Artificial Sequence: Synthetic oligonucleotide
gggcaaaguggaggcgggu

SEQ ID NO: 2677988 - RNA, 19 nt, Artificial Sequence
  Description of Artificial Sequence: Synthetic oligonucleotide
cccucggagcagcuuugcu

SEQ ID NO: 2677989 - RNA, 19 nt, Artificial Sequence
  Description of Artificial Sequence: Synthetic oligonucleotide
ccaccccuccagcccucca

SEQ ID NO: 2677990 - RNA, 19 nt, Artificial Sequence
  Description of Artificial Sequence: Synthetic oligonucleotide
cgguucccuugagguagcu

SEQ ID NO: 2677991 - RNA, 19 nt, Artificial Sequence
  Description of Artificial Sequence: Synthetic oligonucleotide
uuuguaaacaacuucggcc

SEQ ID NO: 2677992 - RNA, 19 nt, Artificial Sequence
  Description of Artificial Sequence: Synthetic oligonucleotide
uauuucuuguaccugaugc

SEQ ID NO: 2677993 - RNA, 19 nt, Artificial Sequence
  Description of Artificial Sequence: Synthetic oligonucleotide
  modified_base (19)..(19): a, c, u, g, unknown or other
uucuacaagaagcacagcn

SEQ ID NO: 2677994 - RNA, 19 nt, Artificial Sequence
  Description of Artificial Sequence: Synthetic oligonucleotide
uuccuugccauauuuaggg

SEQ ID NO: 2677995 - RNA, 19 nt, Artificial Sequence
  Description of Artificial Sequence: Synthetic oligonucleotide
uguaucugaaacuccaaag

SEQ ID NO: 2677996 - RNA, 19 nt, Artificial Sequence
  Description of Artificial Sequence: Synthetic oligonucleotide
uauuuagggagucugacau

SEQ ID NO: 2677997 - RNA, 19 nt, Artificial Sequence
  Description of Artificial Sequence: Synthetic oligonucleotide
uuguaaacaacuucggcca

SEQ ID NO: 2677998 - RNA, 19 nt, Artificial Sequence
  Description of Artificial Sequence: Synthetic oligonucleotide
uuuuguaaacaacuucggc

SEQ ID NO: 2677999 - RNA, 19 nt, Artificial Sequence
  Description of Artificial Sequence: Synthetic oligonucleotide
ugaaacuccaaagucaccc

SEQ ID NO: 2678000 - RNA, 19 nt, Artificial Sequence
  Description of Artificial Sequence: Synthetic oligonucleotide
  modified_base (12)..(12): a, c, u, g, unknown or other
agaagcacagcnccggggc

SEQ ID NO: 2678001 - RNA, 19 nt, Artificial Sequence
  Description of Artificial Sequence: Synthetic oligonucleotide
  modified_base (16)..(16): a, c, u, g, unknown or other
uacaagaagcacagcnccg

SEQ ID NO: 2678002 - RNA, 19 nt, Artificial Sequence
  Description of Artificial Sequence: Synthetic oligonucleotide
ucugaaacuccaaagucac

SEQ ID NO: 2678003 - RNA, 19 nt, Artificial Sequence
  Description of Artificial Sequence: Synthetic oligonucleotide
uguaccugaugccacaggc

SEQ ID NO: 2678004 - RNA, 19 nt, Artificial Sequence
  Description of Artificial Sequence: Synthetic oligonucleotide
uugggagugaggcaucucg

SEQ ID NO: 2678005 - RNA, 19 nt, Artificial Sequence
  Description of Artificial Sequence: Synthetic oligonucleotide
aaucuggaggcuagaaucc

SEQ ID NO: 2678006 - RNA, 19 nt, Artificial Sequence
  Description of Artificial Sequence: Synthetic oligonucleotide
  modified_base (18)..(18): a, c, u, g, unknown or other
ucuacaagaagcacagcnc

SEQ ID NO: 2678007 - RNA, 19 nt, Artificial Sequence
  Description of Artificial Sequence: Synthetic oligonucleotide
uuuagggagucugacaucc

SEQ ID NO: 2678008 - RNA, 19 nt, Artificial Sequence
  Description of Artificial Sequence: Synthetic oligonucleotide
caaucuggaggcuagaauc

SEQ ID NO: 2678009 - RNA, 19 nt, Artificial Sequence
  Description of Artificial Sequence: Synthetic oligonucleotide
uaucugaaacuccaaaguc

SEQ ID NO: 2678010 - RNA, 19 nt, Artificial Sequence
  Description of Artificial Sequence: Synthetic oligonucleotide
cugacaagggccuuggaag

SEQ ID NO: 2678011 - RNA, 19 nt, Artificial Sequence
  Description of Artificial Sequence: Synthetic oligonucleotide
cuuggaagggcuugcaggg

SEQ ID NO: 2678012 - RNA, 19 nt, Artificial Sequence
  Description of Artificial Sequence: Synthetic oligonucleotide
  modified_base (17)..(17): a, c, u, g, unknown or other
cuacaagaagcacagcncc

SEQ ID NO: 2678013 - RNA, 19 nt, Artificial Sequence
  Description of Artificial Sequence: Synthetic oligonucleotide
uuucuuggagaaaaggcaa

SEQ ID NO: 2678014 - RNA, 19 nt, Artificial Sequence
  Description of Artificial Sequence: Synthetic oligonucleotide
agaaguuccugcccgcggc

SEQ ID NO: 2678015 - RNA, 19 nt, Artificial Sequence
  Description of Artificial Sequence: Synthetic oligonucleotide
ucgguguccagacagggug

SEQ ID NO: 2678016 - RNA, 19 nt, Artificial Sequence
  Description of Artificial Sequence: Synthetic oligonucleotide
gguggguacaaucuggagg

SEQ ID NO: 2678017 - RNA, 19 nt, Artificial Sequence
  Description of Artificial Sequence: Synthetic oligonucleotide
uguagguggguacaaucug

SEQ ID NO: 2678018 - RNA, 19 nt, Artificial Sequence
  Description of Artificial Sequence: Synthetic oligonucleotide
aucccuaugaccaucagcu

SEQ ID NO: 2678019 - RNA, 19 nt, Artificial Sequence
  Description of Artificial Sequence: Synthetic oligonucleotide
  modified_base (10)..(10): a, c, u, g, unknown or other
aagcacagcnccggggccc

SEQ ID NO: 2678020 - RNA, 19 nt, Artificial Sequence
  Description of Artificial Sequence: Synthetic oligonucleotide
agucugacaucccuaugac

SEQ ID NO: 2678021 - RNA, 19 nt, Artificial Sequence
  Description of Artificial Sequence: Synthetic oligonucleotide
aaggggaccccaguggccc

SEQ ID NO: 2678022 - RNA, 19 nt, Artificial Sequence
  Description of Artificial Sequence: Synthetic oligonucleotide
aguggaguccucuggguuc

SEQ ID NO: 2678023 - RNA, 19 nt, Artificial Sequence
  Description of Artificial Sequence: Synthetic oligonucleotide
gaugccacaggcauugcag

SEQ ID NO: 2678024 - RNA, 19 nt, Artificial Sequence
  Description of Artificial Sequence: Synthetic oligonucleotide
accaucagcucccagcaag

SEQ ID NO: 2678025 - RNA, 19 nt, Artificial Sequence
  Description of Artificial Sequence: Synthetic oligonucleotide
ugaccaucagcucccagca

SEQ ID NO: 2678026 - RNA, 19 nt, Artificial Sequence
  Description of Artificial Sequence: Synthetic oligonucleotide
ucuggaggcuagaauccgg

SEQ ID NO: 2678027 - RNA, 19 nt, Artificial Sequence
  Description of Artificial Sequence: Synthetic oligonucleotide
gagucugacaucccuauga

SEQ ID NO: 2678028 - RNA, 19 nt, Artificial Sequence
  Description of Artificial Sequence: Synthetic oligonucleotide
acagggaccugccauuggg

SEQ ID NO: 2678029 - RNA, 19 nt, Artificial Sequence
  Description of Artificial Sequence: Synthetic oligonucleotide
uguaaacaacuucggccag

SEQ ID NO: 2678030 - RNA, 19 nt, Artificial Sequence
  Description of Artificial Sequence: Synthetic oligonucleotide
auauuuagggagucugaca

SEQ ID NO: 2678031 - RNA, 19 nt, Artificial Sequence
  Description of Artificial Sequence: Synthetic oligonucleotide
gaaacuccaaagucacccc

SEQ ID NO: 2678032 - RNA, 19 nt, Artificial Sequence
  Description of Artificial Sequence: Synthetic oligonucleotide
ugccauauuucuuguaccu

SEQ ID NO: 2678033 - RNA, 19 nt, Artificial Sequence
  Description of Artificial Sequence: Synthetic oligonucleotide
uucuuuucuuggagaaaag

SEQ ID NO: 2678034 - RNA, 19 nt, Artificial Sequence
  Description of Artificial Sequence: Synthetic oligonucleotide
  modified_base (15)..(15): a, c, u, g, unknown or other
acaagaagcacagcnccgg

SEQ ID NO: 2678035 - RNA, 19 nt, Artificial Sequence
  Description of Artificial Sequence: Synthetic oligonucleotide
uucagcaucucuccagagu

SEQ ID NO: 2678036 - RNA, 19 nt, Artificial Sequence
  Description of Artificial Sequence: Synthetic oligonucleotide
agagaggggucccaucuuc

SEQ ID NO: 2678037 - RNA, 19 nt, Artificial Sequence
  Description of Artificial Sequence: Synthetic oligonucleotide
uaaacaacuucggccaggc

SEQ ID NO: 2678038 - RNA, 19 nt, Artificial Sequence
  Description of Artificial Sequence: Synthetic oligonucleotide
auccggcuguaucugaaac

SEQ ID NO: 2678039 - RNA, 19 nt, Artificial Sequence
  Description of Artificial Sequence: Synthetic oligonucleotide
cuuggagaaaaggcaaugc

SEQ ID NO: 2678040 - RNA, 19 nt, Artificial Sequence
  Description of Artificial Sequence: Synthetic oligonucleotide
auuuagggagucugacauc

SEQ ID NO: 2678041 - RNA, 19 nt, Artificial Sequence
  Description of Artificial Sequence: Synthetic oligonucleotide
ucuuggagaaaaggcaaug

SEQ ID NO: 2678042 - RNA, 19 nt, Artificial Sequence
  Description of Artificial Sequence: Synthetic oligonucleotide
cauauuuagggagucugac

SEQ ID NO: 2678043 - RNA, 19 nt, Artificial Sequence
  Description of Artificial Sequence: Synthetic oligonucleotide
aacagcgggugccauauuu

SEQ ID NO: 2678044 - RNA, 19 nt, Artificial Sequence
  Description of Artificial Sequence: Synthetic oligonucleotide
gguucuacaagaagcacag

SEQ ID NO: 2678045 - RNA, 19 nt, Artificial Sequence
  Description of Artificial Sequence: Synthetic oligonucleotide
uaccugaugccacaggcau

SEQ ID NO: 2678046 - RNA, 19 nt, Artificial Sequence
  Description of Artificial Sequence: Synthetic oligonucleotide
guagguggguacaaucugg

SEQ ID NO: 2678047 - RNA, 19 nt, Artificial Sequence
  Description of Artificial Sequence: Synthetic oligonucleotide
gugaaggggaccccagugg

SEQ ID NO: 2678048 - RNA, 19 nt, Artificial Sequence
  Description of Artificial Sequence: Synthetic oligonucleotide
uuacggagcgacucggugu

SEQ ID NO: 2678049 - RNA, 19 nt, Artificial Sequence
  Description of Artificial Sequence: Synthetic oligonucleotide
acuucggccaggcaagcug

SEQ ID NO: 2678050 - RNA, 19 nt, Artificial Sequence
  Description of Artificial Sequence: Synthetic oligonucleotide
uucucauuccggguugggg

SEQ ID NO: 2678051 - RNA, 19 nt, Artificial Sequence
  Description of Artificial Sequence: Synthetic oligonucleotide
cugccauugggagugaggc

SEQ ID NO: 2678052 - RNA, 19 nt, Artificial Sequence
  Description of Artificial Sequence: Synthetic oligonucleotide
ucuuguaccugaugccaca

SEQ ID NO: 2678053 - RNA, 19 nt, Artificial Sequence
  Description of Artificial Sequence: Synthetic oligonucleotide
uuguaccugaugccacagg

SEQ ID NO: 2678054 - RNA, 19 nt, Artificial Sequence
  Description of Artificial Sequence: Synthetic oligonucleotide
ggugccauauuucuuguac

SEQ ID NO: 2678055 - RNA, 19 nt, Artificial Sequence
  Description of Artificial Sequence: Synthetic oligonucleotide
uucuuguaccugaugccac

SEQ ID NO: 2678056 - RNA, 19 nt, Artificial Sequence
  Description of Artificial Sequence: Synthetic oligonucleotide
acaggguggcgccagaagu

SEQ ID NO: 2678057 - RNA, 19 nt, Artificial Sequence
  Description of Artificial Sequence: Synthetic oligonucleotide
uagguggguacaaucugga

SEQ ID NO: 2678058 - RNA, 19 nt, Artificial Sequence
  Description of Artificial Sequence: Synthetic oligonucleotide
gucacucucgggcuggugc

SEQ ID NO: 2678059 - RNA, 19 nt, Artificial Sequence
  Description of Artificial Sequence: Synthetic oligonucleotide
caucccuaugaccaucagc

SEQ ID NO: 2678060 - RNA, 19 nt, Artificial Sequence
  Description of Artificial Sequence: Synthetic oligonucleotide
uguccagacaggguggcgc

SEQ ID NO: 2678061 - RNA, 19 nt, Artificial Sequence
  Description of Artificial Sequence: Synthetic oligonucleotide
acaacuucggccaggcaag

SEQ ID NO: 2678062 - RNA, 19 nt, Artificial Sequence
  Description of Artificial Sequence: Synthetic oligonucleotide
gugccauauuucuuguacc

SEQ ID NO: 2678063 - RNA, 19 nt, Artificial Sequence
  Description of Artificial Sequence: Synthetic oligonucleotide
cagcaacuggaacagcggg

SEQ ID NO: 2678064 - RNA, 19 nt, Artificial Sequence
  Description of Artificial Sequence: Synthetic oligonucleotide
acaaucuggaggcuagaau

SEQ ID NO: 2678065 - RNA, 19 nt, Artificial Sequence
  Description of Artificial Sequence: Synthetic oligonucleotide
gaaguuccugcccgcggcg

SEQ ID NO: 2678066 - RNA, 19 nt, Artificial Sequence
  Description of Artificial Sequence: Synthetic oligonucleotide
acaagggccuuggaagggc

SEQ ID NO: 2678067 - RNA, 19 nt, Artificial Sequence
  Description of Artificial Sequence: Synthetic oligonucleotide
guaaacaacuucggccagg

SEQ ID NO: 2678068 - RNA, 19 nt, Artificial Sequence
  Description of Artificial Sequence: Synthetic oligonucleotide
cuggaggcuagaauccggc

SEQ ID NO: 2678069 - RNA, 19 nt, Artificial Sequence
  Description of Artificial Sequence: Synthetic oligonucleotide
uucuuggagaaaaggcaau

SEQ ID NO: 2678070 - RNA, 19 nt, Artificial Sequence
  Description of Artificial Sequence: Synthetic oligonucleotide
ugccacaggcauugcagag

SEQ ID NO: 2678071 - RNA, 19 nt, Artificial Sequence
  Description of Artificial Sequence: Synthetic oligonucleotide
aucucgagggcugcaggcc

SEQ ID NO: 2678072 - RNA, 19 nt, Artificial Sequence
  Description of Artificial Sequence: Synthetic oligonucleotide
caggcaagcuguagguggg

SEQ ID NO: 2678073 - RNA, 19 nt, Artificial Sequence
  Description of Artificial Sequence: Synthetic oligonucleotide
caucucgagggcugcaggc

SEQ ID NO: 2678074 - RNA, 19 nt, Artificial Sequence
  Description of Artificial Sequence: Synthetic oligonucleotide
cuuacggagcgacucggug

SEQ ID NO: 2678075 - RNA, 19 nt, Artificial Sequence
  Description of Artificial Sequence: Synthetic oligonucleotide
ugcugugcugaccgagucc

SEQ ID NO: 2678076 - RNA, 19 nt, Artificial Sequence
  Description of Artificial Sequence: Synthetic oligonucleotide
uccggcuguaucugaaacu

SEQ ID NO: 2678077 - RNA, 19 nt, Artificial Sequence
  Description of Artificial Sequence: Synthetic oligonucleotide
uagaauccggcuguaucug

SEQ ID NO: 2678078 - RNA, 19 nt, Artificial Sequence
  Description of Artificial Sequence: Synthetic oligonucleotide
uacggagcgacucgguguc

SEQ ID NO: 2678079 - RNA, 19 nt, Artificial Sequence
  Description of Artificial Sequence: Synthetic oligonucleotide
  modified_base (4)..(4): a, c, u, g, unknown or other
agcnccggggcccgagggc

SEQ ID NO: 2678080 - RNA, 19 nt, Artificial Sequence
  Description of Artificial Sequence: Synthetic oligonucleotide
ucacucucgggcuggugcc

SEQ ID NO: 2678081 - RNA, 19 nt, Artificial Sequence
  Description of Artificial Sequence: Synthetic oligonucleotide
ccaggcaagcuguaggugg

SEQ ID NO: 2678082 - RNA, 19 nt, Artificial Sequence
  Description of Artificial Sequence: Synthetic oligonucleotide
augcugugcugaccgaguc

SEQ ID NO: 2678083 - RNA, 19 nt, Artificial Sequence
  Description of Artificial Sequence: Synthetic oligonucleotide
aauccggcuguaucugaaa

SEQ ID NO: 2678084 - RNA, 19 nt, Artificial Sequence
  Description of Artificial Sequence: Synthetic oligonucleotide
gacaagggccuuggaaggg

SEQ ID NO: 2678085 - RNA, 19 nt, Artificial Sequence
  Description of Artificial Sequence: Synthetic oligonucleotide
aggcauugcagagaggggu

SEQ ID NO: 2678086 - RNA, 19 nt, Artificial Sequence
  Description of Artificial Sequence: Synthetic oligonucleotide
  modified_base (11)..(11): a, c, u, g, unknown or other
gaagcacagcnccggggcc

SEQ ID NO: 2678087 - RNA, 19 nt, Artificial Sequence
  Description of Artificial Sequence: Synthetic oligonucleotide
ccuaugaccaucagcuccc

SEQ ID NO: 2678088 - RNA, 19 nt, Artificial Sequence
  Description of Artificial Sequence: Synthetic oligonucleotide
aaugcugugcugaccgagu

SEQ ID NO: 2678089 - RNA, 19 nt, Artificial Sequence
  Description of Artificial Sequence: Synthetic oligonucleotide
cuagaauccggcuguaucu

SEQ ID NO: 2678090 - RNA, 19 nt, Artificial Sequence
  Description of Artificial Sequence: Synthetic oligonucleotide
ccuugccauauuuagggag

SEQ ID NO: 2678091 - RNA, 19 nt, Artificial Sequence
  Description of Artificial Sequence: Synthetic oligonucleotide
cacacaggccacagggacc

SEQ ID NO: 2678092 - RNA, 19 nt, Artificial Sequence
  Description of Artificial Sequence: Synthetic oligonucleotide
gguacaaucuggaggcuag

SEQ ID NO: 2678093 - RNA, 19 nt, Artificial Sequence
  Description of Artificial Sequence: Synthetic oligonucleotide
cugaaacuccaaagucacc

SEQ ID NO: 2678094 - RNA, 19 nt, Artificial Sequence
  Description of Artificial Sequence: Synthetic oligonucleotide
uuagggagucugacauccc

SEQ ID NO: 2678095 - RNA, 19 nt, Artificial Sequence
  Description of Artificial Sequence: Synthetic oligonucleotide
ggcuuuuguaaacaacuuc

SEQ ID NO: 2678096 - RNA, 19 nt, Artificial Sequence
  Description of Artificial Sequence: Synthetic oligonucleotide
aguccucuggguucuacaa

SEQ ID NO: 2678097 - RNA, 19 nt, Artificial Sequence
  Description of Artificial Sequence: Synthetic oligonucleotide
gucugacaucccuaugacc

SEQ ID NO: 2678098 - RNA, 19 nt, Artificial Sequence
  Description of Artificial Sequence: Synthetic oligonucleotide
ggaggcuagaauccggcug

SEQ ID NO: 2678099 - RNA, 19 nt, Artificial Sequence
  Description of Artificial Sequence: Synthetic oligonucleotide
acucgguguccagacaggg

SEQ ID NO: 2678100 - RNA, 19 nt, Artificial Sequence
  Description of Artificial Sequence: Synthetic oligonucleotide
accccaguggccccuuuuc

SEQ ID NO: 2678101 - RNA, 19 nt, Artificial Sequence
  Description of Artificial Sequence: Synthetic oligonucleotide
ucccagcaaggccccaggg

SEQ ID NO: 2678102 - RNA, 19 nt, Artificial Sequence
  Description of Artificial Sequence: Synthetic oligonucleotide
cccuaugaccaucagcucc

SEQ ID NO: 2678103 - RNA, 19 nt, Artificial Sequence
  Description of Artificial Sequence: Synthetic oligonucleotide
gguccacuuucucauuccg

SEQ ID NO: 2678104 - RNA, 19 nt, Artificial Sequence
  Description of Artificial Sequence: Synthetic oligonucleotide
ggcacugugugcucuuggg

SEQ ID NO: 2678105 - RNA, 19 nt, Artificial Sequence
  Description of Artificial Sequence: Synthetic oligonucleotide
uugggauuccuugccauau

SEQ ID NO: 2678106 - RNA, 19 nt, Artificial Sequence
  Description of Artificial Sequence: Synthetic oligonucleotide
agaguggaguccucugggu

SEQ ID NO: 2678107 - RNA, 19 nt, Artificial Sequence
  Description of Artificial Sequence: Synthetic oligonucleotide
gaggcuagaauccggcugu

SEQ ID NO: 2678108 - RNA, 19 nt, Artificial Sequence
  Description of Artificial Sequence: Synthetic oligonucleotide
ucuuacggagcgacucggu

SEQ ID NO: 2678109 - RNA, 19 nt, Artificial Sequence
  Description of Artificial Sequence: Synthetic oligonucleotide
aguuccugcccgcggcgcg

SEQ ID NO: 2678110 - RNA, 19 nt, Artificial Sequence
  Description of Artificial Sequence: Synthetic oligonucleotide
agaauccggcuguaucuga

SEQ ID NO: 2678111 - RNA, 19 nt, Artificial Sequence
  Description of Artificial Sequence: Synthetic oligonucleotide
ugaaccugggguccacuuu

SEQ ID NO: 2678112 - RNA, 19 nt, Artificial Sequence
  Description of Artificial Sequence: Synthetic oligonucleotide
caaugcugugcugaccgag

SEQ ID NO: 2678113 - RNA, 19 nt, Artificial Sequence
  Description of Artificial Sequence: Synthetic oligonucleotide
ugcugaccgaguccuggca

SEQ ID NO: 2678114 - RNA, 19 nt, Artificial Sequence
  Description of Artificial Sequence: Synthetic oligonucleotide
acagcgggugccauauuuc

SEQ ID NO: 2678115 - RNA, 19 nt, Artificial Sequence
  Description of Artificial Sequence: Synthetic oligonucleotide
gcuagaauccggcuguauc

SEQ ID NO: 2678116 - RNA, 19 nt, Artificial Sequence
  Description of Artificial Sequence: Synthetic oligonucleotide
cucuuacggagcgacucgg

SEQ ID NO: 2678117 - RNA, 19 nt, Artificial Sequence
  Description of Artificial Sequence: Synthetic oligonucleotide
ucggcucuuacggagcgac

SEQ ID NO: 2678118 - RNA, 19 nt, Artificial Sequence
  Description of Artificial Sequence: Synthetic oligonucleotide
cuuucucauuccggguugg

SEQ ID NO: 2678119 - RNA, 19 nt, Artificial Sequence
  Description of Artificial Sequence: Synthetic oligonucleotide
cuugccauauuuagggagu

SEQ ID NO: 2678120 - RNA, 19 nt, Artificial Sequence
  Description of Artificial Sequence: Synthetic oligonucleotide
gcgggugccauauuucuug

SEQ ID NO: 2678121 - RNA, 19 nt, Artificial Sequence
  Description of Artificial Sequence: Synthetic oligonucleotide
gacucgguguccagacagg

SEQ ID NO: 2678122 - RNA, 19 nt, Artificial Sequence
  Description of Artificial Sequence: Synthetic oligonucleotide
gagggcugcaggccucccg

SEQ ID NO: 2678123 - RNA, 19 nt, Artificial Sequence
  Description of Artificial Sequence: Synthetic oligonucleotide
agcaucucuccagagugga

SEQ ID NO: 2678124 - RNA, 19 nt, Artificial Sequence
  Description of Artificial Sequence: Synthetic oligonucleotide
uggguucuacaagaagcac

SEQ ID NO: 2678125 - RNA, 19 nt, Artificial Sequence
  Description of Artificial Sequence: Synthetic oligonucleotide
cuguaucugaaacuccaaa

SEQ ID NO: 2678126 - RNA, 19 nt, Artificial Sequence
  Description of Artificial Sequence: Synthetic oligonucleotide
ugugcucuugggauuccuu

SEQ ID NO: 2678127 - RNA, 19 nt, Artificial Sequence
  Description of Artificial Sequence: Synthetic oligonucleotide
acugugugcucuugggauu

SEQ ID NO: 2678128 - RNA, 19 nt, Artificial Sequence
  Description of Artificial Sequence: Synthetic oligonucleotide
uggaggcuagaauccggcu

SEQ ID NO: 2678129 - RNA, 19 nt, Artificial Sequence
  Description of Artificial Sequence: Synthetic oligonucleotide
ugccauugggagugaggca

SEQ ID NO: 2678130 - RNA, 19 nt, Artificial Sequence
  Description of Artificial Sequence: Synthetic oligonucleotide
ggaccugccauugggagug

SEQ ID NO: 2678131 - RNA, 19 nt, Artificial Sequence
  Description of Artificial Sequence: Synthetic oligonucleotide
aggguggcgccagaaguuc

SEQ ID NO: 2678132 - RNA, 19 nt, Artificial Sequence
  Description of Artificial Sequence: Synthetic oligonucleotide
gcucuuacggagcgacucg

SEQ ID NO: 2678133 - RNA, 19 nt, Artificial Sequence
  Description of Artificial Sequence: Synthetic oligonucleotide
gaguccucuggguucuaca

SEQ ID NO: 2678134 - RNA, 19 nt, Artificial Sequence
  Description of Artificial Sequence: Synthetic oligonucleotide
aguggcuggugaaggggac

SEQ ID NO: 2678135 - RNA, 19 nt, Artificial Sequence
  Description of Artificial Sequence: Synthetic oligonucleotide
ccagcaacuggaacagcgg

SEQ ID NO: 2678136 - RNA, 19 nt, Artificial Sequence
  Description of Artificial Sequence: Synthetic oligonucleotide
gacaucccuaugaccauca

SEQ ID NO: 2678137 - RNA, 19 nt, Artificial Sequence
  Description of Artificial Sequence: Synthetic oligonucleotide
acaucccuaugaccaucag

SEQ ID NO: 2678138 - RNA, 19 nt, Artificial Sequence
  Description of Artificial Sequence: Synthetic oligonucleotide
gcuguagguggguacaauc

SEQ ID NO: 2678139 - RNA, 19 nt, Artificial Sequence
  Description of Artificial Sequence: Synthetic oligonucleotide
gcaacuggaacagcgggug

SEQ ID NO: 2678140 - RNA, 19 nt, Artificial Sequence
  Description of Artificial Sequence: Synthetic oligonucleotide
  modified_base (6)..(6): a, c, u, g, unknown or other
acagcnccggggcccgagg

SEQ ID NO: 2678141 - RNA, 19 nt, Artificial Sequence
  Description of Artificial Sequence: Synthetic oligonucleotide
uugaaccugggguccacuu

SEQ ID NO: 2678142 - RNA, 19 nt, Artificial Sequence
  Description of Artificial Sequence: Synthetic oligonucleotide
ggcgccagaaguuccugcc

SEQ ID NO: 2678143 - RNA, 19 nt, Artificial Sequence
  Description of Artificial Sequence: Synthetic oligonucleotide
cuguagguggguacaaucu

SEQ ID NO: 2678144 - RNA, 19 nt, Artificial Sequence
  Description of Artificial Sequence: Synthetic oligonucleotide
gaaggggaccccaguggcc

SEQ ID NO: 2678145 - RNA, 19 nt, Artificial Sequence
  Description of Artificial Sequence: Synthetic oligonucleotide
cucauuccggguuggggca

SEQ ID NO: 2678146 - RNA, 19 nt, Artificial Sequence
  Description of Artificial Sequence: Synthetic oligonucleotide
ggggucggcucuuacggag

SEQ ID NO: 2678147 - RNA, 19 nt, Artificial Sequence
  Description of Artificial Sequence: Synthetic oligonucleotide
cauugcagagagggguccc

SEQ ID NO: 2678148 - RNA, 19 nt, Artificial Sequence
  Description of Artificial Sequence: Synthetic oligonucleotide
uugccauauuuagggaguc

SEQ ID NO: 2678149 - RNA, 19 nt, Artificial Sequence
  Description of Artificial Sequence: Synthetic oligonucleotide
gcucuugggauuccuugcc

SEQ ID NO: 2678150 - RNA, 19 nt, Artificial Sequence
  Description of Artificial Sequence: Synthetic oligonucleotide
ugccauauuuagggagucu

SEQ ID NO: 2678151 - RNA, 19 nt, Artificial Sequence
  Description of Artificial Sequence: Synthetic oligonucleotide
ggguucuacaagaagcaca

SEQ ID NO: 2678152 - RNA, 19 nt, Artificial Sequence
  Description of Artificial Sequence: Synthetic oligonucleotide
ugacaucccuaugaccauc

SEQ ID NO: 2678153 - RNA, 19 nt, Artificial Sequence
  Description of Artificial Sequence: Synthetic oligonucleotide
ggucggcucuuacggagcg

SEQ ID NO: 2678154 - RNA, 19 nt, Artificial Sequence
  Description of Artificial Sequence: Synthetic oligonucleotide
auugggagugaggcaucuc

SEQ ID NO: 2678155 - RNA, 19 nt, Artificial Sequence
  Description of Artificial Sequence: Synthetic oligonucleotide
ugggcugacaagggccuug

SEQ ID NO: 2678156 - RNA, 19 nt, Artificial Sequence
  Description of Artificial Sequence: Synthetic oligonucleotide
caagcuguagguggguaca

SEQ ID NO: 2678157 - RNA, 19 nt, Artificial Sequence
  Description of Artificial Sequence: Synthetic oligonucleotide
ggcuguaucugaaacucca

SEQ ID NO: 2678158 - RNA, 19 nt, Artificial Sequence
  Description of Artificial Sequence: Synthetic oligonucleotide
cucccagcaaggccccagg

SEQ ID NO: 2678159 - RNA, 19 nt, Artificial Sequence
  Description of Artificial Sequence: Synthetic oligonucleotide
aacuucggccaggcaagcu

SEQ ID NO: 2678160 - RNA, 19 nt, Artificial Sequence
  Description of Artificial Sequence: Synthetic oligonucleotide
cacagggaccugccauugg

SEQ ID NO: 2678161 - RNA, 19 nt, Artificial Sequence
  Description of Artificial Sequence: Synthetic oligonucleotide
gcugacaagggccuuggaa

SEQ ID NO: 2678162 - RNA, 19 nt, Artificial Sequence
  Description of Artificial Sequence: Synthetic oligonucleotide
ugcagagaggggucccauc

SEQ ID NO: 2678163 - RNA, 19 nt, Artificial Sequence
  Description of Artificial Sequence: Synthetic oligonucleotide
ucccuaugaccaucagcuc

SEQ ID NO: 2678164 - RNA, 19 nt, Artificial Sequence
  Description of Artificial Sequence: Synthetic oligonucleotide
gcaucucgagggcugcagg

SEQ ID NO: 2678165 - RNA, 19 nt, Artificial Sequence
  Description of Artificial Sequence: Synthetic oligonucleotide
gaguccuggcacacaggcc

SEQ ID NO: 2678166 - RNA, 19 nt, Artificial Sequence
  Description of Artificial Sequence: Synthetic oligonucleotide
gcaagcuguagguggguac

SEQ ID NO: 2678167 - RNA, 19 nt, Artificial Sequence
  Description of Artificial Sequence: Synthetic oligonucleotide
cugugugcucuugggauuc

SEQ ID NO: 2678168 - RNA, 19 nt, Artificial Sequence
  Description of Artificial Sequence: Synthetic oligonucleotide
acuggaacagcgggugcca

SEQ ID NO: 2678169 - RNA, 19 nt, Artificial Sequence
  Description of Artificial Sequence: Synthetic oligonucleotide
  modified_base (9)..(9): a, c, u, g, unknown or other
agcacagcnccggggcccg

SEQ ID NO: 2678170 - RNA, 19 nt, Artificial Sequence
  Description of Artificial Sequence: Synthetic oligonucleotide
ggguccacuuucucauucc

SEQ ID NO: 2678171 - RNA, 19 nt, Artificial Sequence
  Description of Artificial Sequence: Synthetic oligonucleotide
ccugccauugggagugagg

SEQ ID NO: 2678172 - RNA, 19 nt, Artificial Sequence
  Description of Artificial Sequence: Synthetic oligonucleotide
ugggauuccuugccauauu

SEQ ID NO: 2678173 - RNA, 19 nt, Artificial Sequence
  Description of Artificial Sequence: Synthetic oligonucleotide
cgaguccuggcacacaggc

SEQ ID NO: 2678174 - RNA, 19 nt, Artificial Sequence
  Description of Artificial Sequence: Synthetic oligonucleotide
gaauccggcuguaucugaa

SEQ ID NO: 2678175 - RNA, 19 nt, Artificial Sequence
  Description of Artificial Sequence: Synthetic oligonucleotide
  modified_base (5)..(5): a, c, u, g, unknown or other
cagcnccggggcccgaggg

SEQ ID NO: 2678176 - RNA, 19 nt, Artificial Sequence
  Description of Artificial Sequence: Synthetic oligonucleotide
guaccugaugccacaggca

SEQ ID NO: 2678177 - RNA, 19 nt, Artificial Sequence
  Description of Artificial Sequence: Synthetic oligonucleotide
uggaacagcgggugccaua

SEQ ID NO: 2678178 - RNA, 19 nt, Artificial Sequence
  Description of Artificial Sequence: Synthetic oligonucleotide
gaggcaucucgagggcugc

SEQ ID NO: 2678179 - RNA, 19 nt, Artificial Sequence
  Description of Artificial Sequence: Synthetic oligonucleotide
ugaccgaguccuggcacac

SEQ ID NO: 2678180 - RNA, 19 nt, Artificial Sequence
  Description of Artificial Sequence: Synthetic oligonucleotide
cacaggcauugcagagagg

SEQ ID NO: 2678181 - RNA, 19 nt, Artificial Sequence
  Description of Artificial Sequence: Synthetic oligonucleotide
caucuucagcaucucucca

SEQ ID NO: 2678182 - RNA, 19 nt, Artificial Sequence
  Description of Artificial Sequence: Synthetic oligonucleotide
aagcuguagguggguacaa

SEQ ID NO: 2678183 - RNA, 19 nt, Artificial Sequence
  Description of Artificial Sequence: Synthetic oligonucleotide
cauauuucuuguaccugau

SEQ ID NO: 2678184 - RNA, 19 nt, Artificial Sequence
  Description of Artificial Sequence: Synthetic oligonucleotide
ugugugcucuugggauucc

SEQ ID NO: 2678185 - RNA, 19 nt, Artificial Sequence
  Description of Artificial Sequence: Synthetic oligonucleotide
cuugggauuccuugccaua

SEQ ID NO: 2678186 - RNA, 19 nt, Artificial Sequence
  Description of Artificial Sequence: Synthetic oligonucleotide
guucuacaagaagcacagc

SEQ ID NO: 2678187 - RNA, 19 nt, Artificial Sequence
  Description of Artificial Sequence: Synthetic oligonucleotide
ggugccgccuccaucgccc

SEQ ID NO: 2678188 - RNA, 19 nt, Artificial Sequence
  Description of Artificial Sequence: Synthetic oligonucleotide
ccggcuguaucugaaacuc

SEQ ID NO: 2678189 - RNA, 19 nt, Artificial Sequence
  Description of Artificial Sequence: Synthetic oligonucleotide
ggcucuuacggagcgacuc

SEQ ID NO: 2678190 - RNA, 19 nt, Artificial Sequence
  Description of Artificial Sequence: Synthetic oligonucleotide
cgacucgguguccagacag

SEQ ID NO: 2678191 - RNA, 19 nt, Artificial Sequence
  Description of Artificial Sequence: Synthetic oligonucleotide
guggcuggugaaggggacc

SEQ ID NO: 2678192 - RNA, 19 nt, Artificial Sequence
  Description of Artificial Sequence: Synthetic oligonucleotide
gcugaccgaguccuggcac

SEQ ID NO: 2678193 - RNA, 19 nt, Artificial Sequence
  Description of Artificial Sequence: Synthetic oligonucleotide
ccauauuuagggagucuga

SEQ ID NO: 2678194 - RNA, 19 nt, Artificial Sequence
  Description of Artificial Sequence: Synthetic oligonucleotide
cugggguccacuuucucau

SEQ ID NO: 2678195 - RNA, 19 nt, Artificial Sequence
  Description of Artificial Sequence: Synthetic oligonucleotide
ggcccgagggccucgcugc

SEQ ID NO: 2678196 - RNA, 19 nt, Artificial Sequence
  Description of Artificial Sequence: Synthetic oligonucleotide
ucgagggcugcaggccucc

SEQ ID NO: 2678197 - RNA, 19 nt, Artificial Sequence
  Description of Artificial Sequence: Synthetic oligonucleotide
cagggaccugccauuggga

SEQ ID NO: 2678198 - RNA, 19 nt, Artificial Sequence
  Description of Artificial Sequence: Synthetic oligonucleotide
caacuucggccaggcaagc

SEQ ID NO: 2678199 - RNA, 19 nt, Artificial Sequence
  Description of Artificial Sequence: Synthetic oligonucleotide
ggcugcaggccucccgcgg

SEQ ID NO: 2678200 - RNA, 19 nt, Artificial Sequence
  Description of Artificial Sequence: Synthetic oligonucleotide
cacucucgggcuggugccg

SEQ ID NO: 2678201 - RNA, 19 nt, Artificial Sequence
  Description of Artificial Sequence: Synthetic oligonucleotide
gcagagaggggucccaucu

SEQ ID NO: 2678202 - RNA, 19 nt, Artificial Sequence
  Description of Artificial Sequence: Synthetic oligonucleotide
  modified_base (7)..(7): a, c, u, g, unknown or other
cacagcnccggggcccgag

SEQ ID NO: 2678203 - RNA, 19 nt, Artificial Sequence
  Description of Artificial Sequence: Synthetic oligonucleotide
uggguacaaucuggaggcu

SEQ ID NO: 2678204 - RNA, 19 nt, Artificial Sequence
  Description of Artificial Sequence: Synthetic oligonucleotide
cucgagggcugcaggccuc

SEQ ID NO: 2678205 - RNA, 19 nt, Artificial Sequence
  Description of Artificial Sequence: Synthetic oligonucleotide
acggagcgacucggugucc

SEQ ID NO: 2678206 - RNA, 19 nt, Artificial Sequence
  Description of Artificial Sequence: Synthetic oligonucleotide
gguguccagacaggguggc

SEQ ID NO: 2678207 - RNA, 19 nt, Artificial Sequence
  Description of Artificial Sequence: Synthetic oligonucleotide
gccagaaguuccugcccgc

SEQ ID NO: 2678208 - RNA, 19 nt, Artificial Sequence
  Description of Artificial Sequence: Synthetic oligonucleotide
ggcaucucgagggcugcag

SEQ ID NO: 2678209 - RNA, 19 nt, Artificial Sequence
  Description of Artificial Sequence: Synthetic oligonucleotide
uugcagagaggggucccau

SEQ ID NO: 2678210 - RNA, 19 nt, Artificial Sequence
  Description of Artificial Sequence: Synthetic oligonucleotide
gcauugcagagaggggucc

SEQ ID NO: 2678211 - RNA, 19 nt, Artificial Sequence
  Description of Artificial Sequence: Synthetic oligonucleotide
ccagaaguuccugcccgcg

SEQ ID NO: 2678212 - RNA, 19 nt, Artificial Sequence
  Description of Artificial Sequence: Synthetic oligonucleotide
agcuguagguggguacaau

SEQ ID NO: 2678213 - RNA, 19 nt, Artificial Sequence
  Description of Artificial Sequence: Synthetic oligonucleotide
ggagcgacucgguguccag

SEQ ID NO: 2678214 - RNA, 19 nt, Artificial Sequence
  Description of Artificial Sequence: Synthetic oligonucleotide
ggcauugcagagagggguc

SEQ ID NO: 2678215 - RNA, 19 nt, Artificial Sequence
  Description of Artificial Sequence: Synthetic oligonucleotide
uucggccaggcaagcugua

SEQ ID NO: 2678216 - RNA, 19 nt, Artificial Sequence
  Description of Artificial Sequence: Synthetic oligonucleotide
guacaaucuggaggcuaga

SEQ ID NO: 2678217 - RNA, 19 nt, Artificial Sequence
  Description of Artificial Sequence: Synthetic oligonucleotide
cucucgggcuggugccgcc

SEQ ID NO: 2678218 - RNA, 19 nt, Artificial Sequence
  Description of Artificial Sequence: Synthetic oligonucleotide
agggagucugacaucccua

SEQ ID NO: 2678219 - RNA, 19 nt, Artificial Sequence
  Description of Artificial Sequence: Synthetic oligonucleotide
ggucccaucuucagcaucu

SEQ ID NO: 2678220 - RNA, 19 nt, Artificial Sequence
  Description of Artificial Sequence: Synthetic oligonucleotide
gcgccagaaguuccugccc

SEQ ID NO: 2678221 - RNA, 19 nt, Artificial Sequence
  Description of Artificial Sequence: Synthetic oligonucleotide
gagcgacucgguguccaga

SEQ ID NO: 2678222 - RNA, 19 nt, Artificial Sequence
  Description of Artificial Sequence: Synthetic oligonucleotide
ggguuggggcacugugugc

SEQ ID NO: 2678223 - RNA, 19 nt, Artificial Sequence
  Description of Artificial Sequence: Synthetic oligonucleotide
gaccaucagcucccagcaa

SEQ ID NO: 2678224 - RNA, 19 nt, Artificial Sequence
  Description of Artificial Sequence: Synthetic oligonucleotide
cugugcugaccgaguccug

SEQ ID NO: 2678225 - RNA, 19 nt, Artificial Sequence
  Description of Artificial Sequence: Synthetic oligonucleotide
cagcgggugccauauuucu

SEQ ID NO: 2678226 - RNA, 19 nt, Artificial Sequence
  Description of Artificial Sequence: Synthetic oligonucleotide
gguuggggcacugugugcu

SEQ ID NO: 2678227 - RNA, 19 nt, Artificial Sequence
  Description of Artificial Sequence: Synthetic oligonucleotide
accugccauugggagugag

SEQ ID NO: 2678228 - RNA, 19 nt, Artificial Sequence
  Description of Artificial Sequence: Synthetic oligonucleotide
agacaggguggcgccagaa

SEQ ID NO: 2678229 - RNA, 19 nt, Artificial Sequence
  Description of Artificial Sequence: Synthetic oligonucleotide
gccugaguggcuggugaag

SEQ ID NO: 2678230 - RNA, 19 nt, Artificial Sequence
  Description of Artificial Sequence: Synthetic oligonucleotide
cucuccagaguggaguccu

SEQ ID NO: 2678231 - RNA, 19 nt, Artificial Sequence
  Description of Artificial Sequence: Synthetic oligonucleotide
guggcgccagaaguuccug

SEQ ID NO: 2678232 - RNA, 19 nt, Artificial Sequence
  Description of Artificial Sequence: Synthetic oligonucleotide
gccauugggagugaggcau

SEQ ID NO: 2678233 - RNA, 19 nt, Artificial Sequence
  Description of Artificial Sequence: Synthetic oligonucleotide
gcugugcugaccgaguccu

SEQ ID NO: 2678234 - RNA, 19 nt, Artificial Sequence
  Description of Artificial Sequence: Synthetic oligonucleotide
cggcgcgucacucucgggc

SEQ ID NO: 2678235 - RNA, 19 nt, Artificial Sequence
  Description of Artificial Sequence: Synthetic oligonucleotide
agggccugaguggcuggug

SEQ ID NO: 2678236 - RNA, 19 nt, Artificial Sequence
  Description of Artificial Sequence: Synthetic oligonucleotide
aggcaagcuguaggugggu

SEQ ID NO: 2678237 - RNA, 19 nt, Artificial Sequence
  Description of Artificial Sequence: Synthetic oligonucleotide
gggauuccuugccauauuu

SEQ ID NO: 2678238 - RNA, 19 nt, Artificial Sequence
  Description of Artificial Sequence: Synthetic oligonucleotide
  modified_base (3)..(3): a, c, u, g, unknown or other
gcnccggggcccgagggcc

SEQ ID NO: 2678239 - RNA, 19 nt, Artificial Sequence
  Description of Artificial Sequence: Synthetic oligonucleotide
gcaucucuccagaguggag

SEQ ID NO: 2678240 - RNA, 19 nt, Artificial Sequence
  Description of Artificial Sequence: Synthetic oligonucleotide
ggaacagcgggugccauau

SEQ ID NO: 2678241 - RNA, 19 nt, Artificial Sequence
  Description of Artificial Sequence: Synthetic oligonucleotide
gggagucugacaucccuau

SEQ ID NO: 2678242 - RNA, 19 nt, Artificial Sequence
  Description of Artificial Sequence: Synthetic oligonucleotide
auuccggguuggggcacug

SEQ ID NO: 2678243 - RNA, 19 nt, Artificial Sequence
  Description of Artificial Sequence: Synthetic oligonucleotide
ccgaguccuggcacacagg

SEQ ID NO: 2678244 - RNA, 19 nt, Artificial Sequence
  Description of Artificial Sequence: Synthetic oligonucleotide
gggcccgagggccucgcug

SEQ ID NO: 2678245 - RNA, 19 nt, Artificial Sequence
  Description of Artificial Sequence: Synthetic oligonucleotide
cugacaucccuaugaccau

SEQ ID NO: 2678246 - RNA, 19 nt, Artificial Sequence
  Description of Artificial Sequence: Synthetic oligonucleotide
agcgggugccauauuucuu

SEQ ID NO: 2678247 - RNA, 19 nt, Artificial Sequence
  Description of Artificial Sequence: Synthetic oligonucleotide
gggucggcucuuacggagc

SEQ ID NO: 2678248 - RNA, 19 nt, Artificial Sequence
  Description of Artificial Sequence: Synthetic oligonucleotide
gcuguaucugaaacuccaa

SEQ ID NO: 2678249 - RNA, 19 nt, Artificial Sequence
  Description of Artificial Sequence: Synthetic oligonucleotide
cucgggcuggugccgccuc

SEQ ID NO: 2678250 - RNA, 19 nt, Artificial Sequence
  Description of Artificial Sequence: Synthetic oligonucleotide
cuaugaccaucagcuccca

SEQ ID NO: 2678251 - RNA, 19 nt, Artificial Sequence
  Description of Artificial Sequence: Synthetic oligonucleotide
cggcuguaucugaaacucc

SEQ ID NO: 2678252 - RNA, 19 nt, Artificial Sequence
  Description of Artificial Sequence: Synthetic oligonucleotide
guggaguccucuggguucu

SEQ ID NO: 2678253 - RNA, 19 nt, Artificial Sequence
  Description of Artificial Sequence: Synthetic oligonucleotide
ccccuugaaccuggggucc

SEQ ID NO: 2678254 - RNA, 19 nt, Artificial Sequence
  Description of Artificial Sequence: Synthetic oligonucleotide
ccauugggagugaggcauc

SEQ ID NO: 2678255 - RNA, 19 nt, Artificial Sequence
  Description of Artificial Sequence: Synthetic oligonucleotide
gcucccagcaaggccccag

SEQ ID NO: 2678256 - RNA, 19 nt, Artificial Sequence
  Description of Artificial Sequence: Synthetic oligonucleotide
gcaaugcugugcugaccga

SEQ ID NO: 2678257 - RNA, 19 nt, Artificial Sequence
  Description of Artificial Sequence: Synthetic oligonucleotide
ggguacaaucuggaggcua

SEQ ID NO: 2678258 - RNA, 19 nt, Artificial Sequence
  Description of Artificial Sequence: Synthetic oligonucleotide
cauugggagugaggcaucu

SEQ ID NO: 2678259 - RNA, 19 nt, Artificial Sequence
  Description of Artificial Sequence: Synthetic oligonucleotide
ggaguccucuggguucuac

SEQ ID NO: 2678260 - RNA, 19 nt, Artificial Sequence
  Description of Artificial Sequence: Synthetic oligonucleotide
gaccgaguccuggcacaca

SEQ ID NO: 2678261 - RNA, 19 nt, Artificial Sequence
  Description of Artificial Sequence: Synthetic oligonucleotide
accugaugccacaggcauu

SEQ ID NO: 2678262 - RNA, 19 nt, Artificial Sequence
  Description of Artificial Sequence: Synthetic oligonucleotide
gggaccugccauugggagu

SEQ ID NO: 2678263 - RNA, 19 nt, Artificial Sequence
  Description of Artificial Sequence: Synthetic oligonucleotide
gggccuuggaagggcuugc

SEQ ID NO: 2678264 - RNA, 19 nt, Artificial Sequence
  Description of Artificial Sequence: Synthetic oligonucleotide
caggguggcgccagaaguu

SEQ ID NO: 2678265 - RNA, 19 nt, Artificial Sequence
  Description of Artificial Sequence: Synthetic oligonucleotide
aggcaucucgagggcugca

SEQ ID NO: 2678266 - RNA, 19 nt, Artificial Sequence
  Description of Artificial Sequence: Synthetic oligonucleotide
ggcgcgucacucucgggcu

SEQ ID NO: 2678267 - RNA, 19 nt, Artificial Sequence
  Description of Artificial Sequence: Synthetic oligonucleotide
ggccacagggaccugccau

SEQ ID NO: 2678268 - RNA, 19 nt, Artificial Sequence
  Description of Artificial Sequence: Synthetic oligonucleotide
ggccugaguggcuggugaa

SEQ ID NO: 2678269 - RNA, 19 nt, Artificial Sequence
  Description of Artificial Sequence: Synthetic oligonucleotide
cagcaaggccccagggccu

SEQ ID NO: 2678270 - RNA, 19 nt, Artificial Sequence
  Description of Artificial Sequence: Synthetic oligonucleotide
cuugaaccugggguccacu

SEQ ID NO: 2678271 - RNA, 19 nt, Artificial Sequence
  Description of Artificial Sequence: Synthetic oligonucleotide
ugcccgcggcgcgucacuc

SEQ ID NO: 2678272 - RNA, 19 nt, Artificial Sequence
  Description of Artificial Sequence: Synthetic oligonucleotide
gucggcucuuacggagcga

SEQ ID NO: 2678273 - RNA, 19 nt, Artificial Sequence
  Description of Artificial Sequence: Synthetic oligonucleotide
gaccccaguggccccuuuu

SEQ ID NO: 2678274 - RNA, 19 nt, Artificial Sequence
  Description of Artificial Sequence: Synthetic oligonucleotide
aggcuagaauccggcugua

SEQ ID NO: 2678275 - RNA, 19 nt, Artificial Sequence
  Description of Artificial Sequence: Synthetic oligonucleotide
ggcuggugaaggggacccc

SEQ ID NO: 2678276 - RNA, 19 nt, Artificial Sequence
  Description of Artificial Sequence: Synthetic oligonucleotide
gcgcgucacucucgggcug

SEQ ID NO: 2678277 - RNA, 19 nt, Artificial Sequence
  Description of Artificial Sequence: Synthetic oligonucleotide
ggcaagcuguaggugggua

SEQ ID NO: 2678278 - RNA, 19 nt, Artificial Sequence
  Description of Artificial Sequence: Synthetic oligonucleotide
gggcuuuuguaaacaacuu

SEQ ID NO: 2678279 - RNA, 19 nt, Artificial Sequence
  Description of Artificial Sequence: Synthetic oligonucleotide
cgcggcgcgucacucucgg

SEQ ID NO: 2678280 - RNA, 19 nt, Artificial Sequence
  Description of Artificial Sequence: Synthetic oligonucleotide
gguggcgccagaaguuccu

SEQ ID NO: 2678281 - RNA, 19 nt, Artificial Sequence
  Description of Artificial Sequence: Synthetic oligonucleotide
gugugcucuugggauuccu

SEQ ID NO: 2678282 - RNA, 19 nt, Artificial Sequence
  Description of Artificial Sequence: Synthetic oligonucleotide
cccgcggcgcgucacucuc

SEQ ID NO: 2678283 - RNA, 19 nt, Artificial Sequence
  Description of Artificial Sequence: Synthetic oligonucleotide
cgcgucacucucgggcugg

SEQ ID NO: 2678284 - RNA, 19 nt, Artificial Sequence
  Description of Artificial Sequence: Synthetic oligonucleotide
ggccuuggaagggcuugca

SEQ ID NO: 2678285 - RNA, 19 nt, Artificial Sequence
  Description of Artificial Sequence: Synthetic oligonucleotide
gcggcgcgucacucucggg

SEQ ID NO: 2678286 - RNA, 19 nt, Artificial Sequence
  Description of Artificial Sequence: Synthetic oligonucleotide
gaccugccauugggaguga

SEQ ID NO: 2678287 - RNA, 19 nt, Artificial Sequence
  Description of Artificial Sequence: Synthetic oligonucleotide
uggaguccucuggguucua

SEQ ID NO: 2678288 - RNA, 19 nt, Artificial Sequence
  Description of Artificial Sequence: Synthetic oligonucleotide
ccaguggccccuuuucuuu

SEQ ID NO: 2678289 - RNA, 19 nt, Artificial Sequence
  Description of Artificial Sequence: Synthetic oligonucleotide
gcccgagggccucgcugcc

SEQ ID NO: 2678290 - RNA, 19 nt, Artificial Sequence
  Description of Artificial Sequence: Synthetic oligonucleotide
guuccugcccgcggcgcgu

SEQ ID NO: 2678291 - RNA, 19 nt, Artificial Sequence
  Description of Artificial Sequence: Synthetic oligonucleotide
gaacagcgggugccauauu

SEQ ID NO: 2678292 - RNA, 19 nt, Artificial Sequence
  Description of Artificial Sequence: Synthetic oligonucleotide
ccgcggcgcgucacucucg

SEQ ID NO: 2678293 - RNA, 19 nt, Artificial Sequence
  Description of Artificial Sequence: Synthetic oligonucleotide
cauuccggguuggggcacu

SEQ ID NO: 2678294 - RNA, 19 nt, Artificial Sequence
  Description of Artificial Sequence: Synthetic oligonucleotide
cccaguggccccuuuucuu

SEQ ID NO: 2678295 - RNA, 19 nt, Artificial Sequence
  Description of Artificial Sequence: Synthetic oligonucleotide
ggcuagaauccggcuguau

SEQ ID NO: 2678296 - RNA, 19 nt, Artificial Sequence
  Description of Artificial Sequence: Synthetic oligonucleotide
cuggaacagcgggugccau

SEQ ID NO: 2678297 - RNA, 19 nt, Artificial Sequence
  Description of Artificial Sequence: Synthetic oligonucleotide
ggggucccaucuucagcau

SEQ ID NO: 2678298 - RNA, 19 nt, Artificial Sequence
  Description of Artificial Sequence: Synthetic oligonucleotide
ccugcccgcggcgcgucac

SEQ ID NO: 2678299 - RNA, 19 nt, Artificial Sequence
  Description of Artificial Sequence: Synthetic oligonucleotide
  modified_base (2)..(2): a, c, u, g, unknown or other
cnccggggcccgagggccu

SEQ ID NO: 2678300 - RNA, 19 nt, Artificial Sequence
  Description of Artificial Sequence: Synthetic oligonucleotide
ccccaguggccccuuuucu

SEQ ID NO: 2678301 - RNA, 19 nt, Artificial Sequence
  Description of Artificial Sequence: Synthetic oligonucleotide
cugcccgcggcgcgucacu

SEQ ID NO: 2678302 - RNA, 19 nt, Artificial Sequence
  Description of Artificial Sequence: Synthetic oligonucleotide
cggagcgacucggugucca

SEQ ID NO: 2678303 - RNA, 19 nt, Artificial Sequence
  Description of Artificial Sequence: Synthetic oligonucleotide
cgggugccauauuucuugu

SEQ ID NO: 2678304 - RNA, 19 nt, Artificial Sequence
  Description of Artificial Sequence: Synthetic oligonucleotide
cgucacucucgggcuggug

SEQ ID NO: 2678305 - RNA, 19 nt, Artificial Sequence
  Description of Artificial Sequence: Synthetic oligonucleotide
cugggcugacaagggccuu

SEQ ID NO: 2678306 - RNA, 19 nt, Artificial Sequence
  Description of Artificial Sequence: Synthetic oligonucleotide
gcccgcggcgcgucacucu

SEQ ID NO: 2678307 - RNA, 19 nt, Artificial Sequence
  Description of Artificial Sequence: Synthetic oligonucleotide
ccggggcccgagggccucg

SEQ ID NO: 2678308 - RNA, 19 nt, Artificial Sequence
  Description of Artificial Sequence: Synthetic oligonucleotide
ggggcccgagggccucgcu

SEQ ID NO: 2678309 - RNA, 19 nt, Artificial Sequence
  Description of Artificial Sequence: Synthetic oligonucleotide
  modified_base (8)..(8): a, c, u, g, unknown or other
gcacagcnccggggcccga

SEQ ID NO: 2678310 - RNA, 19 nt, Artificial Sequence
  Description of Artificial Sequence: Synthetic oligonucleotide
gcgucacucucgggcuggu

SEQ ID NO: 2678311 - RNA, 19 nt, Artificial Sequence
  Description of Artificial Sequence: Synthetic oligonucleotide
ggaccccaguggccccuuu

SEQ ID NO: 2678312 - RNA, 19 nt, Artificial Sequence
  Description of Artificial Sequence: Synthetic oligonucleotide
cggcucuuacggagcgacu

SEQ ID NO: 2678313 - RNA, 19 nt, Artificial Sequence
  Description of Artificial Sequence: Synthetic oligonucleotide
cccgagggccucgcugccu

SEQ ID NO: 2678314 - RNA, 19 nt, Artificial Sequence
  Description of Artificial Sequence: Synthetic oligonucleotide
gggaccccaguggccccuu

SEQ ID NO: 2678315 - RNA, 19 nt, Artificial Sequence
  Description of Artificial Sequence: Synthetic oligonucleotide
acuaaaauagaauagaagc

SEQ ID NO: 2678316 - RNA, 19 nt, Artificial Sequence
  Description of Artificial Sequence: Synthetic oligonucleotide
aauauugccaccuauuuac

SEQ ID NO: 2678317 - RNA, 19 nt, Artificial Sequence
  Description of Artificial Sequence: Synthetic oligonucleotide
ucuuuuaugaacauaaucc

SEQ ID NO: 2678318 - RNA, 19 nt, Artificial Sequence
  Description of Artificial Sequence: Synthetic oligonucleotide
uaauguaaaacacacagag

SEQ ID NO: 2678319 - RNA, 19 nt, Artificial Sequence
  Description of Artificial Sequence: Synthetic oligonucleotide
uauacuuuacuucacaucc

SEQ ID NO: 2678320 - RNA, 19 nt, Artificial Sequence
  Description of Artificial Sequence: Synthetic oligonucleotide
aguaauguaaaacacacag

SEQ ID NO: 2678321 - RNA, 19 nt, Artificial Sequence
  Description of Artificial Sequence: Synthetic oligonucleotide
aagacugucuuuuacauuc

SEQ ID NO: 2678322 - RNA, 19 nt, Artificial Sequence
  Description of Artificial Sequence: Synthetic oligonucleotide
aaauauguuuccaaaaugg

SEQ ID NO: 2678323 - RNA, 19 nt, Artificial Sequence
  Description of Artificial Sequence: Synthetic oligonucleotide
caaauagggacuaaaauag

SEQ ID NO: 2678324 - RNA, 19 nt, Artificial Sequence
  Description of Artificial Sequence: Synthetic oligonucleotide
aauagaauagaagcuacac

SEQ ID NO: 2678325 - RNA, 19 nt, Artificial Sequence
  Description of Artificial Sequence: Synthetic oligonucleotide
aaugucuugagaaugcagc

SEQ ID NO: 2678326 - RNA, 19 nt, Artificial Sequence
  Description of Artificial Sequence: Synthetic oligonucleotide
ucuucuaucauucuucccc

SEQ ID NO: 2678327 - RNA, 19 nt, Artificial Sequence
  Description of Artificial Sequence: Synthetic oligonucleotide
aauuacagacuucaaaucu

SEQ ID NO: 2678328 - RNA, 19 nt, Artificial Sequence
  Description of Artificial Sequence: Synthetic oligonucleotide
auuaauuucaacagugucc

SEQ ID NO: 2678329 - RNA, 19 nt, Artificial Sequence
  Description of Artificial Sequence: Synthetic oligonucleotide
aaaauauguuuccaaaaug

SEQ ID NO: 2678330 - RNA, 19 nt, Artificial Sequence
  Description of Artificial Sequence: Synthetic oligonucleotide
uaaaauuucuauccuuugg

SEQ ID NO: 2678331 - RNA, 19 nt, Artificial Sequence
  Description of Artificial Sequence: Synthetic oligonucleotide
aaagguuagaaacauuuga

SEQ ID NO: 2678332 - RNA, 19 nt, Artificial Sequence
  Description of Artificial Sequence: Synthetic oligonucleotide
aaaagcauaugacucuagg

SEQ ID NO: 2678333 - RNA, 19 nt, Artificial Sequence
  Description of Artificial Sequence: Synthetic oligonucleotide
aaaauuucuauccuuugga

SEQ ID NO: 2678334 - RNA, 19 nt, Artificial Sequence
  Description of Artificial Sequence: Synthetic oligonucleotide
aauaauuacagacuucaaa

SEQ ID NO: 2678335 - RNA, 19 nt, Artificial Sequence
  Description of Artificial Sequence: Synthetic oligonucleotide
uccucaaugaugaugaaug

SEQ ID NO: 2678336 - RNA, 19 nt, Artificial Sequence
  Description of Artificial Sequence: Synthetic oligonucleotide
uucaacaguguccaaauag

SEQ ID NO: 2678337 - RNA, 19 nt, Artificial Sequence
  Description of Artificial Sequence: Synthetic oligonucleotide
aacauucugucacagcugg

SEQ ID NO: 2678338 - RNA, 19 nt, Artificial Sequence
  Description of Artificial Sequence: Synthetic oligonucleotide
uuuaugaacauaauccccu

SEQ ID NO: 2678339 - RNA, 19 nt, Artificial Sequence
  Description of Artificial Sequence: Synthetic oligonucleotide
ucaacaguguccaaauagg

SEQ ID NO: 2678340 - RNA, 19 nt, Artificial Sequence
  Description of Artificial Sequence: Synthetic oligonucleotide
caguuuaauaauuacagac

SEQ ID NO: 2678341 - RNA, 19 nt, Artificial Sequence
  Description of Artificial Sequence: Synthetic oligonucleotide
agguuagaaacauuugacc

SEQ ID NO: 2678342 - RNA, 19 nt, Artificial Sequence
  Description of Artificial Sequence: Synthetic oligonucleotide
ugaugaaugcuucagaauc

SEQ ID NO: 2678343 - RNA, 19 nt, Artificial Sequence
  Description of Artificial Sequence: Synthetic oligonucleotide
ugacucuagguuuagagag

SEQ ID NO: 2678344 - RNA, 19 nt, Artificial Sequence
  Description of Artificial Sequence: Synthetic oligonucleotide
augaacauaauccccugcc

SEQ ID NO: 2678345 - RNA, 19 nt, Artificial Sequence
  Description of Artificial Sequence: Synthetic oligonucleotide
uuuuaugaacauaaucccc

SEQ ID NO: 2678346 - RNA, 19 nt, Artificial Sequence
  Description of Artificial Sequence: Synthetic oligonucleotide
ucauggggaauuaagagca

SEQ ID NO: 2678347 - RNA, 19 nt, Artificial Sequence
  Description of Artificial Sequence: Synthetic oligonucleotide
gagaggaaagguuagaaac

SEQ ID NO: 2678348 - RNA, 19 nt, Artificial Sequence
  Description of Artificial Sequence: Synthetic oligonucleotide
uuuacacugaguaauguaa

SEQ ID NO: 2678349 - RNA, 19 nt, Artificial Sequence
  Description of Artificial Sequence: Synthetic oligonucleotide
uaugacucuagguuuagag

SEQ ID NO: 2678350 - RNA, 19 nt, Artificial Sequence
  Description of Artificial Sequence: Synthetic oligonucleotide
uuuccauacacaccugugg

SEQ ID NO: 2678351 - RNA, 19 nt, Artificial Sequence
  Description of Artificial Sequence: Synthetic oligonucleotide
aagguuagaaacauuugac

SEQ ID NO: 2678352 - RNA, 19 nt, Artificial Sequence
  Description of Artificial Sequence: Synthetic oligonucleotide
uuaauuucaacagugucca

SEQ ID NO: 2678353 - RNA, 19 nt, Artificial Sequence
  Description of Artificial Sequence: Synthetic oligonucleotide
auuucuauccuuuggaaga

SEQ ID NO: 2678354 - RNA, 19 nt, Artificial Sequence
  Description of Artificial Sequence: Synthetic oligonucleotide
cucuuauuaauuucaacag

SEQ ID NO: 2678355 - RNA, 19 nt, Artificial Sequence
  Description of Artificial Sequence: Synthetic oligonucleotide
uucauaucuucuuuuauga

SEQ ID NO: 2678356 - RNA, 19 nt, Artificial Sequence
  Description of Artificial Sequence: Synthetic oligonucleotide
acagacuucaaaucuauug

SEQ ID NO: 2678357 - RNA, 19 nt, Artificial Sequence
  Description of Artificial Sequence: Synthetic oligonucleotide
aaauauacuuuacuucaca

SEQ ID NO: 2678358 - RNA, 19 nt, Artificial Sequence
  Description of Artificial Sequence: Synthetic oligonucleotide
uuuaaaauuucuauccuuu

SEQ ID NO: 2678359 - RNA, 19 nt, Artificial Sequence
  Description of Artificial Sequence: Synthetic oligonucleotide
aaagcauaugacucuaggu

SEQ ID NO: 2678360 - RNA, 19 nt, Artificial Sequence
  Description of Artificial Sequence: Synthetic oligonucleotide
auauacuuuacuucacauc

SEQ ID NO: 2678361 - RNA, 19 nt, Artificial Sequence
  Description of Artificial Sequence: Synthetic oligonucleotide
acaguauuuaaccaauuca

SEQ ID NO: 2678362 - RNA, 19 nt, Artificial Sequence
  Description of Artificial Sequence: Synthetic oligonucleotide
uuuagagaggaaagguuag

SEQ ID NO: 2678363 - RNA, 19 nt, Artificial Sequence
  Description of Artificial Sequence: Synthetic oligonucleotide
ucuuauuaauuucaacagu

SEQ ID NO: 2678364 - RNA, 19 nt, Artificial Sequence
  Description of Artificial Sequence: Synthetic oligonucleotide
aagcauaugacucuagguu

SEQ ID NO: 2678365 - RNA, 19 nt, Artificial Sequence
  Description of Artificial Sequence: Synthetic oligonucleotide
uucauggggaauuaagagc

SEQ ID NO: 2678366 - RNA, 19 nt, Artificial Sequence
  Description of Artificial Sequence: Synthetic oligonucleotide
augucuugagaaugcagcc

SEQ ID NO: 2678367 - RNA, 19 nt, Artificial Sequence
  Description of Artificial Sequence: Synthetic oligonucleotide
uuuacaguauuuaaccaau

SEQ ID NO: 2678368 - RNA, 19 nt, Artificial Sequence
  Description of Artificial Sequence: Synthetic oligonucleotide
aacauuugaccucuuauua

SEQ ID NO: 2678369 - RNA, 19 nt, Artificial Sequence
  Description of Artificial Sequence: Synthetic oligonucleotide
aauagaagcuacaccagag

SEQ ID NO: 2678370 - RNA, 19 nt, Artificial Sequence
  Description of Artificial Sequence: Synthetic oligonucleotide
uauuuaaccaauucauauc

SEQ ID NO: 2678371 - RNA, 19 nt, Artificial Sequence
  Description of Artificial Sequence: Synthetic oligonucleotide
ucuucauggggaauuaaga

SEQ ID NO: 2678372 - RNA, 19 nt, Artificial Sequence
  Description of Artificial Sequence: Synthetic oligonucleotide
aauuaggugaaugucuuga

SEQ ID NO: 2678373 - RNA, 19 nt, Artificial Sequence
  Description of Artificial Sequence: Synthetic oligonucleotide
uaaaauagaauagaagcua

SEQ ID NO: 2678374 - RNA, 19 nt, Artificial Sequence
  Description of Artificial Sequence: Synthetic oligonucleotide
agucuucuaucauucuucc

SEQ ID NO: 2678375 - RNA, 19 nt, Artificial Sequence
  Description of Artificial Sequence: Synthetic oligonucleotide
uuauuaauuucaacagugu

SEQ ID NO: 2678376 - RNA, 19 nt, Artificial Sequence
  Description of Artificial Sequence: Synthetic oligonucleotide
agaguggcuaauuagguga

SEQ ID NO: 2678377 - RNA, 19 nt, Artificial Sequence
  Description of Artificial Sequence: Synthetic oligonucleotide
gacuaaaauagaauagaag

SEQ ID NO: 2678378 - RNA, 19 nt, Artificial Sequence
  Description of Artificial Sequence: Synthetic oligonucleotide
aagucuucuaucauucuuc

SEQ ID NO: 2678379 - RNA, 19 nt, Artificial Sequence
  Description of Artificial Sequence: Synthetic oligonucleotide
cacagaguggcuaauuagg

SEQ ID NO: 2678380 - RNA, 19 nt, Artificial Sequence
  Description of Artificial Sequence: Synthetic oligonucleotide
uuaaccaauucauaucuuc

SEQ ID NO: 2678381 - RNA, 19 nt, Artificial Sequence
  Description of Artificial Sequence: Synthetic oligonucleotide
acuucaaaucuauugcuug

SEQ ID NO: 2678382 - RNA, 19 nt, Artificial Sequence
  Description of Artificial Sequence: Synthetic oligonucleotide
cuucauggggaauuaagag

SEQ ID NO: 2678383 - RNA, 19 nt, Artificial Sequence
  Description of Artificial Sequence: Synthetic oligonucleotide
aaacauuugaccucuuauu

SEQ ID NO: 2678384 - RNA, 19 nt, Artificial Sequence
  Description of Artificial Sequence: Synthetic oligonucleotide
cuagguuuagagaggaaag

SEQ ID NO: 2678385 - RNA, 19 nt, Artificial Sequence
  Description of Artificial Sequence: Synthetic oligonucleotide
ugaaucuaugguaagucaa

SEQ ID NO: 2678386 - RNA, 19 nt, Artificial Sequence
  Description of Artificial Sequence: Synthetic oligonucleotide
auuuacaguauuuaaccaa

SEQ ID NO: 2678387 - RNA, 19 nt, Artificial Sequence
  Description of Artificial Sequence: Synthetic oligonucleotide
aaugaugaugaaugcuuca

SEQ ID NO: 2678388 - RNA, 19 nt, Artificial Sequence
  Description of Artificial Sequence: Synthetic oligonucleotide
uuuaauaauuacagacuuc

SEQ ID NO: 2678389 - RNA, 19 nt, Artificial Sequence
  Description of Artificial Sequence: Synthetic oligonucleotide
acugaguaauguaaaacac

SEQ ID NO: 2678390 - RNA, 19 nt, Artificial Sequence
  Description of Artificial Sequence: Synthetic oligonucleotide
aaauuucuauccuuuggaa

SEQ ID NO: 2678391 - RNA, 19 nt, Artificial Sequence
  Description of Artificial Sequence: Synthetic oligonucleotide
auugcuugaaucuauggua

SEQ ID NO: 2678392 - RNA, 19 nt, Artificial Sequence
  Description of Artificial Sequence: Synthetic oligonucleotide
ugaccucuuauuaauuuca

SEQ ID NO: 2678393 - RNA, 19 nt, Artificial Sequence
  Description of Artificial Sequence: Synthetic oligonucleotide
agaugaacacuuucccagc

SEQ ID NO: 2678394 - RNA, 19 nt, Artificial Sequence
  Description of Artificial Sequence: Synthetic oligonucleotide
aauucauaucuucuuuuau

SEQ ID NO: 2678395 - RNA, 19 nt, Artificial Sequence
  Description of Artificial Sequence: Synthetic oligonucleotide
uaaccaauucauaucuucu

SEQ ID NO: 2678396 - RNA, 19 nt, Artificial Sequence
  Description of Artificial Sequence: Synthetic oligonucleotide
ugagaaugcagccuguguc

SEQ ID NO: 2678397 - RNA, 19 nt, Artificial Sequence
  Description of Artificial Sequence: Synthetic oligonucleotide
caaaucuauugcuugaauc

SEQ ID NO: 2678398 - RNA, 19 nt, Artificial Sequence
  Description of Artificial Sequence: Synthetic oligonucleotide
uacaguauuuaaccaauuc

SEQ ID NO: 2678399 - RNA, 19 nt, Artificial Sequence
  Description of Artificial Sequence: Synthetic oligonucleotide
uaggugaaugucuugagaa

SEQ ID NO: 2678400 - RNA, 19 nt, Artificial Sequence
  Description of Artificial Sequence: Synthetic oligonucleotide
ucuauccuuuggaagacug

SEQ ID NO: 2678401 - RNA, 19 nt, Artificial Sequence
  Description of Artificial Sequence: Synthetic oligonucleotide
uccaaauagggacuaaaau

SEQ ID NO: 2678402 - RNA, 19 nt, Artificial Sequence
  Description of Artificial Sequence: Synthetic oligonucleotide
aauauguuuccaaaaugga

SEQ ID NO: 2678403 - RNA, 19 nt, Artificial Sequence
  Description of Artificial Sequence: Synthetic oligonucleotide
uuagaaacauuugaccucu

SEQ ID NO: 2678404 - RNA, 19 nt, Artificial Sequence
  Description of Artificial Sequence: Synthetic oligonucleotide
agaagcuacaccagagucc

SEQ ID NO: 2678405 - RNA, 19 nt, Artificial Sequence
  Description of Artificial Sequence: Synthetic oligonucleotide
ucccaguuuaauaauuaca

SEQ ID NO: 2678406 - RNA, 19 nt, Artificial Sequence
  Description of Artificial Sequence: Synthetic oligonucleotide
aggauguuuacacugagua

SEQ ID NO: 2678407 - RNA, 19 nt, Artificial Sequence
  Description of Artificial Sequence: Synthetic oligonucleotide
gaagcuacaccagaguccc

SEQ ID NO: 2678408 - RNA, 19 nt, Artificial Sequence
  Description of Artificial Sequence: Synthetic oligonucleotide
auauguuuccaaaauggag

SEQ ID NO: 2678409 - RNA, 19 nt, Artificial Sequence
  Description of Artificial Sequence: Synthetic oligonucleotide
ucuauugcuugaaucuaug

SEQ ID NO: 2678410 - RNA, 19 nt, Artificial Sequence
  Description of Artificial Sequence: Synthetic oligonucleotide
acacugaguaauguaaaac

SEQ ID NO: 2678411 - RNA, 19 nt, Artificial Sequence
  Description of Artificial Sequence: Synthetic oligonucleotide
aauagggacuaaaauagaa

SEQ ID NO: 2678412 - RNA, 19 nt, Artificial Sequence
  Description of Artificial Sequence: Synthetic oligonucleotide
uuaggugaaugucuugaga

SEQ ID NO: 2678413 - RNA, 19 nt, Artificial Sequence
  Description of Artificial Sequence: Synthetic oligonucleotide
uagguuuagagaggaaagg

SEQ ID NO: 2678414 - RNA, 19 nt, Artificial Sequence
  Description of Artificial Sequence: Synthetic oligonucleotide
gagaugaagucuucuauca

SEQ ID NO: 2678415 - RNA, 19 nt, Artificial Sequence
  Description of Artificial Sequence: Synthetic oligonucleotide
auaucuucuuuuaugaaca

SEQ ID NO: 2678416 - RNA, 19 nt, Artificial Sequence
  Description of Artificial Sequence: Synthetic oligonucleotide
gagaaugcagccugugucc

SEQ ID NO: 2678417 - RNA, 19 nt, Artificial Sequence
  Description of Artificial Sequence: Synthetic oligonucleotide
guagacuugggcuacugug

SEQ ID NO: 2678418 - RNA, 19 nt, Artificial Sequence
  Description of Artificial Sequence: Synthetic oligonucleotide
uugaaucuaugguaaguca

SEQ ID NO: 2678419 - RNA, 19 nt, Artificial Sequence
  Description of Artificial Sequence: Synthetic oligonucleotide
uagaagcuacaccagaguc

SEQ ID NO: 2678420 - RNA, 19 nt, Artificial Sequence
  Description of Artificial Sequence: Synthetic oligonucleotide
caacaguguccaaauaggg

SEQ ID NO: 2678421 - RNA, 19 nt, Artificial Sequence
  Description of Artificial Sequence: Synthetic oligonucleotide
ucuagguuuagagaggaaa

SEQ ID NO: 2678422 - RNA, 19 nt, Artificial Sequence
  Description of Artificial Sequence: Synthetic oligonucleotide
cccaguuuaauaauuacag

SEQ ID NO: 2678423 - RNA, 19 nt, Artificial Sequence
  Description of Artificial Sequence: Synthetic oligonucleotide
accucuuauuaauuucaac

SEQ ID NO: 2678424 - RNA, 19 nt, Artificial Sequence
  Description of Artificial Sequence: Synthetic oligonucleotide
guuagaaacauuugaccuc

SEQ ID NO: 2678425 - RNA, 19 nt, Artificial Sequence
  Description of Artificial Sequence: Synthetic oligonucleotide
uacugugugggauucaguc

SEQ ID NO: 2678426 - RNA, 19 nt, Artificial Sequence
  Description of Artificial Sequence: Synthetic oligonucleotide
uauugccaccuauuuacag

SEQ ID NO: 2678427 - RNA, 19 nt, Artificial Sequence
  Description of Artificial Sequence: Synthetic oligonucleotide
ugaugaugaaugcuucaga

SEQ ID NO: 2678428 - RNA, 19 nt, Artificial Sequence
  Description of Artificial Sequence: Synthetic oligonucleotide
uggaagacugucuuuuaca

SEQ ID NO: 2678429 - RNA, 19 nt, Artificial Sequence
  Description of Artificial Sequence: Synthetic oligonucleotide
auuaggugaaugucuugag

SEQ ID NO: 2678430 - RNA, 19 nt, Artificial Sequence
  Description of Artificial Sequence: Synthetic oligonucleotide
uuccauacacaccuguggu

SEQ ID NO: 2678431 - RNA, 19 nt, Artificial Sequence
  Description of Artificial Sequence: Synthetic oligonucleotide
ucuagcaauauugccaccu

SEQ ID NO: 2678432 - RNA, 19 nt, Artificial Sequence
  Description of Artificial Sequence: Synthetic oligonucleotide
auuucaacaguguccaaau

SEQ ID NO: 2678433 - RNA, 19 nt, Artificial Sequence
  Description of Artificial Sequence: Synthetic oligonucleotide
ugaggauguuuacacugag

SEQ ID NO: 2678434 - RNA, 19 nt, Artificial Sequence
  Description of Artificial Sequence: Synthetic oligonucleotide
cacugaguaauguaaaaca

SEQ ID NO: 2678435 - RNA, 19 nt, Artificial Sequence
  Description of Artificial Sequence: Synthetic oligonucleotide
cuaaaauagaauagaagcu

SEQ ID NO: 2678436 - RNA, 19 nt, Artificial Sequence
  Description of Artificial Sequence: Synthetic oligonucleotide
acacagaguggcuaauuag

SEQ ID NO: 2678437 - RNA, 19 nt, Artificial Sequence
  Description of Artificial Sequence: Synthetic oligonucleotide
uugcuugaaucuaugguaa

SEQ ID NO: 2678438 - RNA, 19 nt, Artificial Sequence
  Description of Artificial Sequence: Synthetic oligonucleotide
auugccaccuauuuacagu

SEQ ID NO: 2678439 - RNA, 19 nt, Artificial Sequence
  Description of Artificial Sequence: Synthetic oligonucleotide
uuaugaacauaauccccug

SEQ ID NO: 2678440 - RNA, 19 nt, Artificial Sequence
  Description of Artificial Sequence: Synthetic oligonucleotide
ugaacauaauccccugccu

SEQ ID NO: 2678441 - RNA, 19 nt, Artificial Sequence
  Description of Artificial Sequence: Synthetic oligonucleotide
aaaauggagaugaagucuu

SEQ ID NO: 2678442 - RNA, 19 nt, Artificial Sequence
  Description of Artificial Sequence: Synthetic oligonucleotide
aauguaaaacacacagagu

SEQ ID NO: 2678443 - RNA, 19 nt, Artificial Sequence
  Description of Artificial Sequence: Synthetic oligonucleotide
gugagaugaacacuuuccc

SEQ ID NO: 2678444 - RNA, 19 nt, Artificial Sequence
  Description of Artificial Sequence: Synthetic oligonucleotide
uuacacugaguaauguaaa

SEQ ID NO: 2678445 - RNA, 19 nt, Artificial Sequence
  Description of Artificial Sequence: Synthetic oligonucleotide
uuugaccucuuauuaauuu

SEQ ID NO: 2678446 - RNA, 19 nt, Artificial Sequence
  Description of Artificial Sequence: Synthetic oligonucleotide
uacuuuacuucacauccuc

SEQ ID NO: 2678447 - RNA, 19 nt, Artificial Sequence
  Description of Artificial Sequence: Synthetic oligonucleotide
uagacuugggcuacugugu

SEQ ID NO: 2678448 - RNA, 19 nt, Artificial Sequence
  Description of Artificial Sequence: Synthetic oligonucleotide
ccuauuuacaguauuuaac

SEQ ID NO: 2678449 - RNA, 19 nt, Artificial Sequence
  Description of Artificial Sequence: Synthetic oligonucleotide
ucuuuccauacacaccugu

SEQ ID NO: 2678450 - RNA, 19 nt, Artificial Sequence
  Description of Artificial Sequence: Synthetic oligonucleotide
aaccaauucauaucuucuu

SEQ ID NO: 2678451 - RNA, 19 nt, Artificial Sequence
  Description of Artificial Sequence: Synthetic oligonucleotide
gaacauaauccccugccuc

SEQ ID NO: 2678452 - RNA, 19 nt, Artificial Sequence
  Description of Artificial Sequence: Synthetic oligonucleotide
uuucccagcaguccuuuga

SEQ ID NO: 2678453 - RNA, 19 nt, Artificial Sequence
  Description of Artificial Sequence: Synthetic oligonucleotide
gaaagguuagaaacauuug

SEQ ID NO: 2678454 - RNA, 19 nt, Artificial Sequence
  Description of Artificial Sequence: Synthetic oligonucleotide
uuuacuucacauccucaau

SEQ ID NO: 2678455 - RNA, 19 nt, Artificial Sequence
  Description of Artificial Sequence: Synthetic oligonucleotide
uggagaugaagucuucuau

SEQ ID NO: 2678456 - RNA, 19 nt, Artificial Sequence
  Description of Artificial Sequence: Synthetic oligonucleotide
cuugaaucuaugguaaguc

SEQ ID NO: 2678457 - RNA, 19 nt, Artificial Sequence
  Description of Artificial Sequence: Synthetic oligonucleotide
uuggaagacugucuuuuac

SEQ ID NO: 2678458 - RNA, 19 nt, Artificial Sequence
  Description of Artificial Sequence: Synthetic oligonucleotide
augacucuagguuuagaga

SEQ ID NO: 2678459 - RNA, 19 nt, Artificial Sequence
  Description of Artificial Sequence: Synthetic oligonucleotide
agcauaugacucuagguuu

SEQ ID NO: 2678460 - RNA, 19 nt, Artificial Sequence
  Description of Artificial Sequence: Synthetic oligonucleotide
auagaagcuacaccagagu

SEQ ID NO: 2678461 - RNA, 19 nt, Artificial Sequence
  Description of Artificial Sequence: Synthetic oligonucleotide
uggcuaauuaggugaaugu

SEQ ID NO: 2678462 - RNA, 19 nt, Artificial Sequence
  Description of Artificial Sequence: Synthetic oligonucleotide
uugaccucuuauuaauuuc

SEQ ID NO: 2678463 - RNA, 19 nt, Artificial Sequence
  Description of Artificial Sequence: Synthetic oligonucleotide
aauggagaugaagucuucu

SEQ ID NO: 2678464 - RNA, 19 nt, Artificial Sequence
  Description of Artificial Sequence: Synthetic oligonucleotide
augaugaugaaugcuucag

SEQ ID NO: 2678465 - RNA, 19 nt, Artificial Sequence
  Description of Artificial Sequence: Synthetic oligonucleotide
gucuugagaaugcagccug

SEQ ID NO: 2678466 - RNA, 19 nt, Artificial Sequence
  Description of Artificial Sequence: Synthetic oligonucleotide
gauguuuacacugaguaau

SEQ ID NO: 2678467 - RNA, 19 nt, Artificial Sequence
  Description of Artificial Sequence: Synthetic oligonucleotide
agggacuaaaauagaauag

SEQ ID NO: 2678468 - RNA, 19 nt, Artificial Sequence
  Description of Artificial Sequence: Synthetic oligonucleotide
cugaguaauguaaaacaca

SEQ ID NO: 2678469 - RNA, 19 nt, Artificial Sequence
  Description of Artificial Sequence: Synthetic oligonucleotide
ccucuuauuaauuucaaca

SEQ ID NO: 2678470 - RNA, 19 nt, Artificial Sequence
  Description of Artificial Sequence: Synthetic oligonucleotide
ugucuuuuacauucaggaa

SEQ ID NO: 2678471 - RNA, 19 nt, Artificial Sequence
  Description of Artificial Sequence: Synthetic oligonucleotide
acuugggcuacuguguggg

SEQ ID NO: 2678472 - RNA, 19 nt, Artificial Sequence
  Description of Artificial Sequence: Synthetic oligonucleotide
accuauuuacaguauuuaa

SEQ ID NO: 2678473 - RNA, 19 nt, Artificial Sequence
  Description of Artificial Sequence: Synthetic oligonucleotide
aaugcagccugugucccag

SEQ ID NO: 2678474 - RNA, 19 nt, Artificial Sequence
  Description of Artificial Sequence: Synthetic oligonucleotide
gaaugucuugagaaugcag

SEQ ID NO: 2678475 - RNA, 19 nt, Artificial Sequence
  Description of Artificial Sequence: Synthetic oligonucleotide
uugagaaugcagccugugu

SEQ ID NO: 2678476 - RNA, 19 nt, Artificial Sequence
  Description of Artificial Sequence: Synthetic oligonucleotide
uaauuaggugaaugucuug

SEQ ID NO: 2678477 - RNA, 19 nt, Artificial Sequence
  Description of Artificial Sequence: Synthetic oligonucleotide
ugucccaguuuaauaauua

SEQ ID NO: 2678478 - RNA, 19 nt, Artificial Sequence
  Description of Artificial Sequence: Synthetic oligonucleotide
caaugaugaugaaugcuuc

SEQ ID NO: 2678479 - RNA, 19 nt, Artificial Sequence
  Description of Artificial Sequence: Synthetic oligonucleotide
agaaugcagccuguguccc

SEQ ID NO: 2678480 - RNA, 19 nt, Artificial Sequence
  Description of Artificial Sequence: Synthetic oligonucleotide
uauccuuuggaagacuguc

SEQ ID NO: 2678481 - RNA, 19 nt, Artificial Sequence
  Description of Artificial Sequence: Synthetic oligonucleotide
uccuuugagaggcugggua

SEQ ID NO: 2678482 - RNA, 19 nt, Artificial Sequence
  Description of Artificial Sequence: Synthetic oligonucleotide
ucauaucuucuuuuaugaa

SEQ ID NO: 2678483 - RNA, 19 nt, Artificial Sequence
  Description of Artificial Sequence: Synthetic oligonucleotide
agagaggaaagguuagaaa

SEQ ID NO: 2678484 - RNA, 19 nt, Artificial Sequence
  Description of Artificial Sequence: Synthetic oligonucleotide
aaauagggacuaaaauaga

SEQ ID NO: 2678485 - RNA, 19 nt, Artificial Sequence
  Description of Artificial Sequence: Synthetic oligonucleotide
ugugggauucagucuuucc

SEQ ID NO: 2678486 - RNA, 19 nt, Artificial Sequence
  Description of Artificial Sequence: Synthetic oligonucleotide
ggugagaugaacacuuucc

SEQ ID NO: 2678487 - RNA, 19 nt, Artificial Sequence
  Description of Artificial Sequence: Synthetic oligonucleotide
ugggauucagucuuuccau

SEQ ID NO: 2678488 - RNA, 19 nt, Artificial Sequence
  Description of Artificial Sequence: Synthetic oligonucleotide
gacucuagguuuagagagg

SEQ ID NO: 2678489 - RNA, 19 nt, Artificial Sequence
  Description of Artificial Sequence: Synthetic oligonucleotide
cacaccugugguuugcuac

SEQ ID NO: 2678490 - RNA, 19 nt, Artificial Sequence
  Description of Artificial Sequence: Synthetic oligonucleotide
aaucuauugcuugaaucua

SEQ ID NO: 2678491 - RNA, 19 nt, Artificial Sequence
  Description of Artificial Sequence: Synthetic oligonucleotide
gguuagaaacauuugaccu

SEQ ID NO: 2678492 - RNA, 19 nt, Artificial Sequence
  Description of Artificial Sequence: Synthetic oligonucleotide
gacugucuuuuacauucag

SEQ ID NO: 2678493 - RNA, 19 nt, Artificial Sequence
  Description of Artificial Sequence: Synthetic oligonucleotide
ugcuugaaucuaugguaag

SEQ ID NO: 2678494 - RNA, 19 nt, Artificial Sequence
  Description of Artificial Sequence: Synthetic oligonucleotide
accaauucauaucuucuuu

SEQ ID NO: 2678495 - RNA, 19 nt, Artificial Sequence
  Description of Artificial Sequence: Synthetic oligonucleotide
cuucaaaucuauugcuuga

SEQ ID NO: 2678496 - RNA, 19 nt, Artificial Sequence
  Description of Artificial Sequence: Synthetic oligonucleotide
uugccaccuauuuacagua

SEQ ID NO: 2678497 - RNA, 19 nt, Artificial Sequence
  Description of Artificial Sequence: Synthetic oligonucleotide
aggcuggguagacuugggc

SEQ ID NO: 2678498 - RNA, 19 nt, Artificial Sequence
  Description of Artificial Sequence: Synthetic oligonucleotide
cuuuacuucacauccucaa

SEQ ID NO: 2678499 - RNA, 19 nt, Artificial Sequence
  Description of Artificial Sequence: Synthetic oligonucleotide
uguuuacacugaguaaugu

SEQ ID NO: 2678500 - RNA, 19 nt, Artificial Sequence
  Description of Artificial Sequence: Synthetic oligonucleotide
gugaaugucuugagaaugc

SEQ ID NO: 2678501 - RNA, 19 nt, Artificial Sequence
  Description of Artificial Sequence: Synthetic oligonucleotide
gucacagcuggugagauga

SEQ ID NO: 2678502 - RNA, 19 nt, Artificial Sequence
  Description of Artificial Sequence: Synthetic oligonucleotide
uagagaggaaagguuagaa

SEQ ID NO: 2678503 - RNA, 19 nt, Artificial Sequence
  Description of Artificial Sequence: Synthetic oligonucleotide
guuuagagaggaaagguua

SEQ ID NO: 2678504 - RNA, 19 nt, Artificial Sequence
  Description of Artificial Sequence: Synthetic oligonucleotide
uuagagaggaaagguuaga

SEQ ID NO: 2678505 - RNA, 19 nt, Artificial Sequence
  Description of Artificial Sequence: Synthetic oligonucleotide
ggugaaugucuugagaaug

SEQ ID NO: 2678506 - RNA, 19 nt, Artificial Sequence
  Description of Artificial Sequence: Synthetic oligonucleotide
uucaaaucuauugcuugaa

SEQ ID NO: 2678507 - RNA, 19 nt, Artificial Sequence
  Description of Artificial Sequence: Synthetic oligonucleotide
acacuuucccagcaguccu

SEQ ID NO: 2678508 - RNA, 19 nt, Artificial Sequence
  Description of Artificial Sequence: Synthetic oligonucleotide
uggugagaugaacacuuuc

SEQ ID NO: 2678509 - RNA, 19 nt, Artificial Sequence
  Description of Artificial Sequence: Synthetic oligonucleotide
auacacaccugugguuugc

SEQ ID NO: 2678510 - RNA, 19 nt, Artificial Sequence
  Description of Artificial Sequence: Synthetic oligonucleotide
gacuugggcuacugugugg

SEQ ID NO: 2678511 - RNA, 19 nt, Artificial Sequence
  Description of Artificial Sequence: Synthetic oligonucleotide
guggcuaauuaggugaaug

SEQ ID NO: 2678512 - RNA, 19 nt, Artificial Sequence
  Description of Artificial Sequence: Synthetic oligonucleotide
agaggcuggguagacuugg

SEQ ID NO: 2678513 - RNA, 19 nt, Artificial Sequence
  Description of Artificial Sequence: Synthetic oligonucleotide
uuucuauccuuuggaagac

SEQ ID NO: 2678514 - RNA, 19 nt, Artificial Sequence
  Description of Artificial Sequence: Synthetic oligonucleotide
ugaaugcuucagaaucuuc

SEQ ID NO: 2678515 - RNA, 19 nt, Artificial Sequence
  Description of Artificial Sequence: Synthetic oligonucleotide
ugugucccaguuuaauaau

SEQ ID NO: 2678516 - RNA, 19 nt, Artificial Sequence
  Description of Artificial Sequence: Synthetic oligonucleotide
cagaguggcuaauuaggug

SEQ ID NO: 2678517 - RNA, 19 nt, Artificial Sequence
  Description of Artificial Sequence: Synthetic oligonucleotide
ucacaucaacauucuguca

SEQ ID NO: 2678518 - RNA, 19 nt, Artificial Sequence
  Description of Artificial Sequence: Synthetic oligonucleotide
agaaucuucauggggaauu

SEQ ID NO: 2678519 - RNA, 19 nt, Artificial Sequence
  Description of Artificial Sequence: Synthetic oligonucleotide
caguauuuaaccaauucau

SEQ ID NO: 2678520 - RNA, 19 nt, Artificial Sequence
  Description of Artificial Sequence: Synthetic oligonucleotide
guaauguaaaacacacaga

SEQ ID NO: 2678521 - RNA, 19 nt, Artificial Sequence
  Description of Artificial Sequence: Synthetic oligonucleotide
cacauccucaaugaugaug

SEQ ID NO: 2678522 - RNA, 19 nt, Artificial Sequence
  Description of Artificial Sequence: Synthetic oligonucleotide
agcuacaccagagucccag

SEQ ID NO: 2678523 - RNA, 19 nt, Artificial Sequence
  Description of Artificial Sequence: Synthetic oligonucleotide
ugucuugagaaugcagccu

SEQ ID NO: 2678524 - RNA, 19 nt, Artificial Sequence
  Description of Artificial Sequence: Synthetic oligonucleotide
auagggacuaaaauagaau

SEQ ID NO: 2678525 - RNA, 19 nt, Artificial Sequence
  Description of Artificial Sequence: Synthetic oligonucleotide
cagcucuagcaauauugcc

SEQ ID NO: 2678526 - RNA, 19 nt, Artificial Sequence
  Description of Artificial Sequence: Synthetic oligonucleotide
ccaaauagggacuaaaaua

SEQ ID NO: 2678527 - RNA, 19 nt, Artificial Sequence
  Description of Artificial Sequence: Synthetic oligonucleotide
uuacaguauuuaaccaauu

SEQ ID NO: 2678528 - RNA, 19 nt, Artificial Sequence
  Description of Artificial Sequence: Synthetic oligonucleotide
gaaucuaugguaagucaaa

SEQ ID NO: 2678529 - RNA, 19 nt, Artificial Sequence
  Description of Artificial Sequence: Synthetic oligonucleotide
cccagcucuagcaauauug

SEQ ID NO: 2678530 - RNA, 19 nt, Artificial Sequence
  Description of Artificial Sequence: Synthetic oligonucleotide
uagcaauauugccaccuau

SEQ ID NO: 2678531 - RNA, 19 nt, Artificial Sequence
  Description of Artificial Sequence: Synthetic oligonucleotide
cugugucccaguuuaauaa

SEQ ID NO: 2678532 - RNA, 19 nt, Artificial Sequence
  Description of Artificial Sequence: Synthetic oligonucleotide
agaaacauuugaccucuua

SEQ ID NO: 2678533 - RNA, 19 nt, Artificial Sequence
  Description of Artificial Sequence: Synthetic oligonucleotide
ggagaugaagucuucuauc

SEQ ID NO: 2678534 - RNA, 19 nt, Artificial Sequence
  Description of Artificial Sequence: Synthetic oligonucleotide
acagcuggugagaugaaca

SEQ ID NO: 2678535 - RNA, 19 nt, Artificial Sequence
  Description of Artificial Sequence: Synthetic oligonucleotide
ucuugagaaugcagccugu

SEQ ID NO: 2678536 - RNA, 19 nt, Artificial Sequence
  Description of Artificial Sequence: Synthetic oligonucleotide
agaugaagucuucuaucau

SEQ ID NO: 2678537 - RNA, 19 nt, Artificial Sequence
  Description of Artificial Sequence: Synthetic oligonucleotide
ccaaaauggagaugaaguc

SEQ ID NO: 2678538 - RNA, 19 nt, Artificial Sequence
  Description of Artificial Sequence: Synthetic oligonucleotide
auuacagacuucaaaucua

SEQ ID NO: 2678539 - RNA, 19 nt, Artificial Sequence
  Description of Artificial Sequence: Synthetic oligonucleotide
acaccugugguuugcuaca

SEQ ID NO: 2678540 - RNA, 19 nt, Artificial Sequence
  Description of Artificial Sequence: Synthetic oligonucleotide
gggacuaaaauagaauaga

SEQ ID NO: 2678541 - RNA, 19 nt, Artificial Sequence
  Description of Artificial Sequence: Synthetic oligonucleotide
aggugaaugucuugagaau

SEQ ID NO: 2678542 - RNA, 19 nt, Artificial Sequence
  Description of Artificial Sequence: Synthetic oligonucleotide
cagcuggugagaugaacac

SEQ ID NO: 2678543 - RNA, 19 nt, Artificial Sequence
  Description of Artificial Sequence: Synthetic oligonucleotide
uguuuccaaaauggagaug

SEQ ID NO: 2678544 - RNA, 19 nt, Artificial Sequence
  Description of Artificial Sequence: Synthetic oligonucleotide
acagaguggcuaauuaggu

SEQ ID NO: 2678545 - RNA, 19 nt, Artificial Sequence
  Description of Artificial Sequence: Synthetic oligonucleotide
caauucauaucuucuuuua

SEQ ID NO: 2678546 - RNA, 19 nt, Artificial Sequence
  Description of Artificial Sequence: Synthetic oligonucleotide
acauaauccccugccucuc

SEQ ID NO: 2678547 - RNA, 19 nt, Artificial Sequence
  Description of Artificial Sequence: Synthetic oligonucleotide
aauccccugccucucuuuu

SEQ ID NO: 2678548 - RNA, 19 nt, Artificial Sequence
  Description of Artificial Sequence: Synthetic oligonucleotide
gaugaaugcuucagaaucu

SEQ ID NO: 2678549 - RNA, 19 nt, Artificial Sequence
  Description of Artificial Sequence: Synthetic oligonucleotide
caaaauggagaugaagucu

SEQ ID NO: 2678550 - RNA, 19 nt, Artificial Sequence
  Description of Artificial Sequence: Synthetic oligonucleotide
cauacacaccugugguuug

SEQ ID NO: 2678551 - RNA, 19 nt, Artificial Sequence
  Description of Artificial Sequence: Synthetic oligonucleotide
ccagcucuagcaauauugc

SEQ ID NO: 2678552 - RNA, 19 nt, Artificial Sequence
  Description of Artificial Sequence: Synthetic oligonucleotide
cagagucccagcucuagca

SEQ ID NO: 2678553 - RNA, 19 nt, Artificial Sequence
  Description of Artificial Sequence: Synthetic oligonucleotide
cuugagaaugcagccugug

SEQ ID NO: 2678554 - RNA, 19 nt, Artificial Sequence
  Description of Artificial Sequence: Synthetic oligonucleotide
cauuugaccucuuauuaau

SEQ ID NO: 2678555 - RNA, 19 nt, Artificial Sequence
  Description of Artificial Sequence: Synthetic oligonucleotide
ccuuugagaggcuggguag

SEQ ID NO: 2678556 - RNA, 19 nt, Artificial Sequence
  Description of Artificial Sequence: Synthetic oligonucleotide
caauauugccaccuauuua

SEQ ID NO: 2678557 - RNA, 19 nt, Artificial Sequence
  Description of Artificial Sequence: Synthetic oligonucleotide
aucuauugcuugaaucuau

SEQ ID NO: 2678558 - RNA, 19 nt, Artificial Sequence
  Description of Artificial Sequence: Synthetic oligonucleotide
auacuuuacuucacauccu

SEQ ID NO: 2678559 - RNA, 19 nt, Artificial Sequence
  Description of Artificial Sequence: Synthetic oligonucleotide
acuuuacuucacauccuca

SEQ ID NO: 2678560 - RNA, 19 nt, Artificial Sequence
  Description of Artificial Sequence: Synthetic oligonucleotide
ggacuaaaauagaauagaa

SEQ ID NO: 2678561 - RNA, 19 nt, Artificial Sequence
  Description of Artificial Sequence: Synthetic oligonucleotide
ggaaagguuagaaacauuu

SEQ ID NO: 2678562 - RNA, 19 nt, Artificial Sequence
  Description of Artificial Sequence: Synthetic oligonucleotide
ccccuucacaucaacauuc

SEQ ID NO: 2678563 - RNA, 19 nt, Artificial Sequence
  Description of Artificial Sequence: Synthetic oligonucleotide
gcuaauuaggugaaugucu

SEQ ID NO: 2678564 - RNA, 19 nt, Artificial Sequence
  Description of Artificial Sequence: Synthetic oligonucleotide
gaggaaagguuagaaacau

SEQ ID NO: 2678565 - RNA, 19 nt, Artificial Sequence
  Description of Artificial Sequence: Synthetic oligonucleotide
ugggcuacugugugggauu

SEQ ID NO: 2678566 - RNA, 19 nt, Artificial Sequence
  Description of Artificial Sequence: Synthetic oligonucleotide
ggcuaauuaggugaauguc

SEQ ID NO: 2678567 - RNA, 19 nt, Artificial Sequence
  Description of Artificial Sequence: Synthetic oligonucleotide
cucuagcaauauugccacc

SEQ ID NO: 2678568 - RNA, 19 nt, Artificial Sequence
  Description of Artificial Sequence: Synthetic oligonucleotide
uucuauccuuuggaagacu

SEQ ID NO: 2678569 - RNA, 19 nt, Artificial Sequence
  Description of Artificial Sequence: Synthetic oligonucleotide
uaauuucaacaguguccaa

SEQ ID NO: 2678570 - RNA, 19 nt, Artificial Sequence
  Description of Artificial Sequence: Synthetic oligonucleotide
uugggcuacugugugggau

SEQ ID NO: 2678571 - RNA, 19 nt, Artificial Sequence
  Description of Artificial Sequence: Synthetic oligonucleotide
cauucaggaaagaagucuu

SEQ ID NO: 2678572 - RNA, 19 nt, Artificial Sequence
  Description of Artificial Sequence: Synthetic oligonucleotide
aacacacagaguggcuaau

SEQ ID NO: 2678573 - RNA, 19 nt, Artificial Sequence
  Description of Artificial Sequence: Synthetic oligonucleotide
gcuacugugugggauucag

SEQ ID NO: 2678574 - RNA, 19 nt, Artificial Sequence
  Description of Artificial Sequence: Synthetic oligonucleotide
ucccagcaguccuuugaga

SEQ ID NO: 2678575 - RNA, 19 nt, Artificial Sequence
  Description of Artificial Sequence: Synthetic oligonucleotide
accagagucccagcucuag

SEQ ID NO: 2678576 - RNA, 19 nt, Artificial Sequence
  Description of Artificial Sequence: Synthetic oligonucleotide
augaaugcuucagaaucuu

SEQ ID NO: 2678577 - RNA, 19 nt, Artificial Sequence
  Description of Artificial Sequence: Synthetic oligonucleotide
auauugccaccuauuuaca

SEQ ID NO: 2678578 - RNA, 19 nt, Artificial Sequence
  Description of Artificial Sequence: Synthetic oligonucleotide
agcuggugagaugaacacu

SEQ ID NO: 2678579 - RNA, 19 nt, Artificial Sequence
  Description of Artificial Sequence: Synthetic oligonucleotide
auuugaccucuuauuaauu

SEQ ID NO: 2678580 - RNA, 19 nt, Artificial Sequence
  Description of Artificial Sequence: Synthetic oligonucleotide
gaggcuggguagacuuggg

SEQ ID NO: 2678581 - RNA, 19 nt, Artificial Sequence
  Description of Artificial Sequence: Synthetic oligonucleotide
ugugugggauucagucuuu

SEQ ID NO: 2678582 - RNA, 19 nt, Artificial Sequence
  Description of Artificial Sequence: Synthetic oligonucleotide
auaauccccugccucucuu

SEQ ID NO: 2678583 - RNA, 19 nt, Artificial Sequence
  Description of Artificial Sequence: Synthetic oligonucleotide
ccaguuuaauaauuacaga

SEQ ID NO: 2678584 - RNA, 19 nt, Artificial Sequence
  Description of Artificial Sequence: Synthetic oligonucleotide
aguguccaaauagggacua

SEQ ID NO: 2678585 - RNA, 19 nt, Artificial Sequence
  Description of Artificial Sequence: Synthetic oligonucleotide
cacacagaguggcuaauua

SEQ ID NO: 2678586 - RNA, 19 nt, Artificial Sequence
  Description of Artificial Sequence: Synthetic oligonucleotide
uugagaggcuggguagacu

SEQ ID NO: 2678587 - RNA, 19 nt, Artificial Sequence
  Description of Artificial Sequence: Synthetic oligonucleotide
cucaaugaugaugaaugcu

SEQ ID NO: 2678588 - RNA, 19 nt, Artificial Sequence
  Description of Artificial Sequence: Synthetic oligonucleotide
auaugacucuagguuuaga

SEQ ID NO: 2678589 - RNA, 19 nt, Artificial Sequence
  Description of Artificial Sequence: Synthetic oligonucleotide
ggaagacugucuuuuacau

SEQ ID NO: 2678590 - RNA, 19 nt, Artificial Sequence
  Description of Artificial Sequence: Synthetic oligonucleotide
cacagcuggugagaugaac

SEQ ID NO: 2678591 - RNA, 19 nt, Artificial Sequence
  Description of Artificial Sequence: Synthetic oligonucleotide
gaccucuuauuaauuucaa

SEQ ID NO: 2678592 - RNA, 19 nt, Artificial Sequence
  Description of Artificial Sequence: Synthetic oligonucleotide
ugccaccuauuuacaguau

SEQ ID NO: 2678593 - RNA, 19 nt, Artificial Sequence
  Description of Artificial Sequence: Synthetic oligonucleotide
cuggguagacuugggcuac

SEQ ID NO: 2678594 - RNA, 19 nt, Artificial Sequence
  Description of Artificial Sequence: Synthetic oligonucleotide
cuuugagaggcuggguaga

SEQ ID NO: 2678595 - RNA, 19 nt, Artificial Sequence
  Description of Artificial Sequence: Synthetic oligonucleotide
cagccugugucccaguuua

SEQ ID NO: 2678596 - RNA, 19 nt, Artificial Sequence
  Description of Artificial Sequence: Synthetic oligonucleotide
uaauccccugccucucuuu

SEQ ID NO: 2678597 - RNA, 19 nt, Artificial Sequence
  Description of Artificial Sequence: Synthetic oligonucleotide
cuagcaauauugccaccua

SEQ ID NO: 2678598 - RNA, 19 nt, Artificial Sequence
  Description of Artificial Sequence: Synthetic oligonucleotide
auucaggaaagaagucuuu

SEQ ID NO: 2678599 - RNA, 19 nt, Artificial Sequence
  Description of Artificial Sequence: Synthetic oligonucleotide
gaguggcuaauuaggugaa

SEQ ID NO: 2678600 - RNA, 19 nt, Artificial Sequence
  Description of Artificial Sequence: Synthetic oligonucleotide
ucacagcuggugagaugaa

SEQ ID NO: 2678601 - RNA, 19 nt, Artificial Sequence
  Description of Artificial Sequence: Synthetic oligonucleotide
agacugucuuuuacauuca

SEQ ID NO: 2678602 - RNA, 19 nt, Artificial Sequence
  Description of Artificial Sequence: Synthetic oligonucleotide
cuauccuuuggaagacugu

SEQ ID NO: 2678603 - RNA, 19 nt, Artificial Sequence
  Description of Artificial Sequence: Synthetic oligonucleotide
gcaauauugccaccuauuu

SEQ ID NO: 2678604 - RNA, 19 nt, Artificial Sequence
  Description of Artificial Sequence: Synthetic oligonucleotide
gaggauguuuacacugagu

SEQ ID NO: 2678605 - RNA, 19 nt, Artificial Sequence
  Description of Artificial Sequence: Synthetic oligonucleotide
cugugugggauucagucuu

SEQ ID NO: 2678606 - RNA, 19 nt, Artificial Sequence
  Description of Artificial Sequence: Synthetic oligonucleotide
uagaaacauuugaccucuu

SEQ ID NO: 2678607 - RNA, 19 nt, Artificial Sequence
  Description of Artificial Sequence: Synthetic oligonucleotide
cuuuuacauucaggaaaga

SEQ ID NO: 2678608 - RNA, 19 nt, Artificial Sequence
  Description of Artificial Sequence: Synthetic oligonucleotide
gcuacaccagagucccagc

SEQ ID NO: 2678609 - RNA, 19 nt, Artificial Sequence
  Description of Artificial Sequence: Synthetic oligonucleotide
acacacagaguggcuaauu

SEQ ID NO: 2678610 - RNA, 19 nt, Artificial Sequence
  Description of Artificial Sequence: Synthetic oligonucleotide
acacaccugugguuugcua

SEQ ID NO: 2678611 - RNA, 19 nt, Artificial Sequence
  Description of Artificial Sequence: Synthetic oligonucleotide
accugugguuugcuacaaa

SEQ ID NO: 2678612 - RNA, 19 nt, Artificial Sequence
  Description of Artificial Sequence: Synthetic oligonucleotide
ccagagucccagcucuagc

SEQ ID NO: 2678613 - RNA, 19 nt, Artificial Sequence
  Description of Artificial Sequence: Synthetic oligonucleotide
cauggggaauuaagagcaa

SEQ ID NO: 2678614 - RNA, 19 nt, Artificial Sequence
  Description of Artificial Sequence: Synthetic oligonucleotide
aguggcuaauuaggugaau

SEQ ID NO: 2678615 - RNA, 19 nt, Artificial Sequence
  Description of Artificial Sequence: Synthetic oligonucleotide
cuacaccagagucccagcu

SEQ ID NO: 2678616 - RNA, 19 nt, Artificial Sequence
  Description of Artificial Sequence: Synthetic oligonucleotide
aggaaagguuagaaacauu

SEQ ID NO: 2678617 - RNA, 19 nt, Artificial Sequence
  Description of Artificial Sequence: Synthetic oligonucleotide
gcuugaaucuaugguaagu

SEQ ID NO: 2678618 - RNA, 19 nt, Artificial Sequence
  Description of Artificial Sequence: Synthetic oligonucleotide
gguuuagagaggaaagguu

SEQ ID NO: 2678619 - RNA, 19 nt, Artificial Sequence
  Description of Artificial Sequence: Synthetic oligonucleotide
gggauucagucuuuccaua

SEQ ID NO: 2678620 - RNA, 19 nt, Artificial Sequence
  Description of Artificial Sequence: Synthetic oligonucleotide
gcauaugacucuagguuua

SEQ ID NO: 2678621 - RNA, 19 nt, Artificial Sequence
  Description of Artificial Sequence: Synthetic oligonucleotide
cucuagguuuagagaggaa

SEQ ID NO: 2678622 - RNA, 19 nt, Artificial Sequence
  Description of Artificial Sequence: Synthetic oligonucleotide
uggguagacuugggcuacu

SEQ ID NO: 2678623 - RNA, 19 nt, Artificial Sequence
  Description of Artificial Sequence: Synthetic oligonucleotide
gugugggauucagucuuuc

SEQ ID NO: 2678624 - RNA, 19 nt, Artificial Sequence
  Description of Artificial Sequence: Synthetic oligonucleotide
cuugggcuacuguguggga

SEQ ID NO: 2678625 - RNA, 19 nt, Artificial Sequence
  Description of Artificial Sequence: Synthetic oligonucleotide
ccugugucccaguuuaaua

SEQ ID NO: 2678626 - RNA, 19 nt, Artificial Sequence
  Description of Artificial Sequence: Synthetic oligonucleotide
gguagacuugggcuacugu

SEQ ID NO: 2678627 - RNA, 19 nt, Artificial Sequence
  Description of Artificial Sequence: Synthetic oligonucleotide
cauaauccccugccucucu

SEQ ID NO: 2678628 - RNA, 19 nt, Artificial Sequence
  Description of Artificial Sequence: Synthetic oligonucleotide
cuacugugugggauucagu

SEQ ID NO: 2678629 - RNA, 19 nt, Artificial Sequence
  Description of Artificial Sequence: Synthetic oligonucleotide
ccaauucauaucuucuuuu

SEQ ID NO: 2678630 - RNA, 19 nt, Artificial Sequence
  Description of Artificial Sequence: Synthetic oligonucleotide
ggguagacuugggcuacug

SEQ ID NO: 2678631 - RNA, 19 nt, Artificial Sequence
  Description of Artificial Sequence: Synthetic oligonucleotide
aagcuacaccagaguccca

SEQ ID NO: 2678632 - RNA, 19 nt, Artificial Sequence
  Description of Artificial Sequence: Synthetic oligonucleotide
augcagccugugucccagu

SEQ ID NO: 2678633 - RNA, 19 nt, Artificial Sequence
  Description of Artificial Sequence: Synthetic oligonucleotide
gugucccaguuuaauaauu

SEQ ID NO: 2678634 - RNA, 19 nt, Artificial Sequence
  Description of Artificial Sequence: Synthetic oligonucleotide
cccugccucucuuuuaaaa

SEQ ID NO: 2678635 - RNA, 19 nt, Artificial Sequence
  Description of Artificial Sequence: Synthetic oligonucleotide
agcaguccuuugagaggcu

SEQ ID NO: 2678636 - RNA, 19 nt, Artificial Sequence
  Description of Artificial Sequence: Synthetic oligonucleotide
guguccaaauagggacuaa

SEQ ID NO: 2678637 - RNA, 19 nt, Artificial Sequence
  Description of Artificial Sequence: Synthetic oligonucleotide
ccaccuauuuacaguauuu

SEQ ID NO: 2678638 - RNA, 19 nt, Artificial Sequence
  Description of Artificial Sequence: Synthetic oligonucleotide
gggcuacugugugggauuc

SEQ ID NO: 2678639 - RNA, 19 nt, Artificial Sequence
  Description of Artificial Sequence: Synthetic oligonucleotide
caccugugguuugcuacaa

SEQ ID NO: 2678640 - RNA, 19 nt, Artificial Sequence
  Description of Artificial Sequence: Synthetic oligonucleotide
cacuuucccagcaguccuu

SEQ ID NO: 2678641 - RNA, 19 nt, Artificial Sequence
  Description of Artificial Sequence: Synthetic oligonucleotide
cagaaucuucauggggaau

SEQ ID NO: 2678642 - RNA, 19 nt, Artificial Sequence
  Description of Artificial Sequence: Synthetic oligonucleotide
caccagagucccagcucua

SEQ ID NO: 2678643 - RNA, 19 nt, Artificial Sequence
  Description of Artificial Sequence: Synthetic oligonucleotide
agccugugucccaguuuaa

SEQ ID NO: 2678644 - RNA, 19 nt, Artificial Sequence
  Description of Artificial Sequence: Synthetic oligonucleotide
guccuuugagaggcugggu

SEQ ID NO: 2678645 - RNA, 19 nt, Artificial Sequence
  Description of Artificial Sequence: Synthetic oligonucleotide
cccuucacaucaacauucu

SEQ ID NO: 2678646 - RNA, 19 nt, Artificial Sequence
  Description of Artificial Sequence: Synthetic oligonucleotide
ggcuacugugugggauuca

SEQ ID NO: 2678647 - RNA, 19 nt, Artificial Sequence
  Description of Artificial Sequence: Synthetic oligonucleotide
gcagccugugucccaguuu

SEQ ID NO: 2678648 - RNA, 19 nt, Artificial Sequence
  Description of Artificial Sequence: Synthetic oligonucleotide
  modified_base (3)..(3): a, c, u, g, unknown or other
ucnguuuucaacaccaggc

SEQ ID NO: 2678649 - RNA, 19 nt, Artificial Sequence
  Description of Artificial Sequence: Synthetic oligonucleotide
guacauuacacgcaggucc

SEQ ID NO: 2678650 - RNA, 19 nt, Artificial Sequence
  Description of Artificial Sequence: Synthetic oligonucleotide
auauagguaacguuguugu

SEQ ID NO: 2678651 - RNA, 19 nt, Artificial Sequence
  Description of Artificial Sequence: Synthetic oligonucleotide
gauuuuauugccuggguga

SEQ ID NO: 2678652 - RNA, 19 nt, Artificial Sequence
  Description of Artificial Sequence: Synthetic oligonucleotide
agcaggcugauuuuauugc

SEQ ID NO: 2678653 - RNA, 19 nt, Artificial Sequence
  Description of Artificial Sequence: Synthetic oligonucleotide
uacauuacacgcagguccg

SEQ ID NO: 2678654 - RNA, 19 nt, Artificial Sequence
  Description of Artificial Sequence: Synthetic oligonucleotide
ugauuuuauugccugggug

SEQ ID NO: 2678655 - RNA, 19 nt, Artificial Sequence
  Description of Artificial Sequence: Synthetic oligonucleotide
  modified_base (4)..(4): a, c, u, g, unknown or other
aucnguuuucaacaccagg

SEQ ID NO: 2678656 - RNA, 19 nt, Artificial Sequence
  Description of Artificial Sequence: Synthetic oligonucleotide
  modified_base (4)..(4): a, c, u, g, unknown or other
uggngaaccccaauggagc

SEQ ID NO: 2678657 - RNA, 19 nt, Artificial Sequence
  Description of Artificial Sequence: Synthetic oligonucleotide
uguuguucguagcacagca

SEQ ID NO: 2678658 - RNA, 19 nt, Artificial Sequence
  Description of Artificial Sequence: Synthetic oligonucleotide
uagcacagcacucuucccg

SEQ ID NO: 2678659 - RNA, 19 nt, Artificial Sequence
  Description of Artificial Sequence: Synthetic oligonucleotide
gaaggcaccgggcagggcg

SEQ ID NO: 2678660 - RNA, 19 nt, Artificial Sequence
  Description of Artificial Sequence: Synthetic oligonucleotide
guuguugccacagaguucc

SEQ ID NO: 2678661 - RNA, 19 nt, Artificial Sequence
  Description of Artificial Sequence: Synthetic oligonucleotide
uuuuggagcaccugugcag

SEQ ID NO: 2678662 - RNA, 19 nt, Artificial Sequence
  Description of Artificial Sequence: Synthetic oligonucleotide
gauauagguaacguuguug

SEQ ID NO: 2678663 - RNA, 19 nt, Artificial Sequence
  Description of Artificial Sequence: Synthetic oligonucleotide
gcuguguugauguuguucg

SEQ ID NO: 2678664 - RNA, 19 nt, Artificial Sequence
  Description of Artificial Sequence: Synthetic oligonucleotide
guugccacagaguuccugg

SEQ ID NO: 2678665 - RNA, 19 nt, Artificial Sequence
  Description of Artificial Sequence: Synthetic oligonucleotide
uagguaacguuguuguugc

SEQ ID NO: 2678666 - RNA, 19 nt, Artificial Sequence
  Description of Artificial Sequence: Synthetic oligonucleotide
uuguucguagcacagcacu

SEQ ID NO: 2678667 - RNA, 19 nt, Artificial Sequence
  Description of Artificial Sequence: Synthetic oligonucleotide
auagguaacguuguuguug

SEQ ID NO: 2678668 - RNA, 19 nt, Artificial Sequence
  Description of Artificial Sequence: Synthetic oligonucleotide
gaaucuuugcaugggaggc

SEQ ID NO: 2678669 - RNA, 19 nt, Artificial Sequence
  Description of Artificial Sequence: Synthetic oligonucleotide
ggagauauagguaacguug

SEQ ID NO: 2678670 - RNA, 19 nt, Artificial Sequence
  Description of Artificial Sequence: Synthetic oligonucleotide
  modified_base (9)..(9): a, c, u, g, unknown or other
cugacaucnguuuucaaca

SEQ ID NO: 2678671 - RNA, 19 nt, Artificial Sequence
  Description of Artificial Sequence: Synthetic oligonucleotide
uuguuguugccacagaguu

SEQ ID NO: 2678672 - RNA, 19 nt, Artificial Sequence
  Description of Artificial Sequence: Synthetic oligonucleotide
  modified_base (7)..(7): a, c, u, g, unknown or other
gacaucnguuuucaacacc

SEQ ID NO: 2678673 - RNA, 19 nt, Artificial Sequence
  Description of Artificial Sequence: Synthetic oligonucleotide
aacguuguuguugccacag

SEQ ID NO: 2678674 - RNA, 19 nt, Artificial Sequence
  Description of Artificial Sequence: Synthetic oligonucleotide
gacacgaggagauauaggu

SEQ ID NO: 2678675 - RNA, 19 nt, Artificial Sequence
  Description of Artificial Sequence: Synthetic oligonucleotide
guuuucaacaccaggcugc

SEQ ID NO: 2678676 - RNA, 19 nt, Artificial Sequence
  Description of Artificial Sequence: Synthetic oligonucleotide
ugacacgaggagauauagg

SEQ ID NO: 2678677 - RNA, 19 nt, Artificial Sequence
  Description of Artificial Sequence: Synthetic oligonucleotide
ugauguuguucguagcaca

SEQ ID NO: 2678678 - RNA, 19 nt, Artificial Sequence
  Description of Artificial Sequence: Synthetic oligonucleotide
ugguccacaacgcacgacu

SEQ ID NO: 2678679 - RNA, 19 nt, Artificial Sequence
  Description of Artificial Sequence: Synthetic oligonucleotide
ggaaucuuugcaugggagg

SEQ ID NO: 2678680 - RNA, 19 nt, Artificial Sequence
  Description of Artificial Sequence: Synthetic oligonucleotide
uccacaacgcacgacuggg

SEQ ID NO: 2678681 - RNA, 19 nt, Artificial Sequence
  Description of Artificial Sequence: Synthetic oligonucleotide
aagcccagcaggcugauuu

SEQ ID NO: 2678682 - RNA, 19 nt, Artificial Sequence
  Description of Artificial Sequence: Synthetic oligonucleotide
  modified_base (10)..(10): a, c, u, g, unknown or other
gcugacaucnguuuucaac

SEQ ID NO: 2678683 - RNA, 19 nt, Artificial Sequence
  Description of Artificial Sequence: Synthetic oligonucleotide
guguugauguuguucguag

SEQ ID NO: 2678684 - RNA, 19 nt, Artificial Sequence
  Description of Artificial Sequence: Synthetic oligonucleotide
gauguuguucguagcacag

SEQ ID NO: 2678685 - RNA, 19 nt, Artificial Sequence
  Description of Artificial Sequence: Synthetic oligonucleotide
guugauguuguucguagca

SEQ ID NO: 2678686 - RNA, 19 nt, Artificial Sequence
  Description of Artificial Sequence: Synthetic oligonucleotide
agaccugcaagcccgcggg

SEQ ID NO: 2678687 - RNA, 19 nt, Artificial Sequence
  Description of Artificial Sequence: Synthetic oligonucleotide
uccaucgcaggaaucuuug

SEQ ID NO: 2678688 - RNA, 19 nt, Artificial Sequence
  Description of Artificial Sequence: Synthetic oligonucleotide
guaacguuguuguugccac

SEQ ID NO: 2678689 - RNA, 19 nt, Artificial Sequence
  Description of Artificial Sequence: Synthetic oligonucleotide
agagccgcagaccugcaag

SEQ ID NO: 2678690 - RNA, 19 nt, Artificial Sequence
  Description of Artificial Sequence: Synthetic oligonucleotide
cucgguacauuacacgcag

SEQ ID NO: 2678691 - RNA, 19 nt, Artificial Sequence
  Description of Artificial Sequence: Synthetic oligonucleotide
uggacgaggcccaggaagc

SEQ ID NO: 2678692 - RNA, 19 nt, Artificial Sequence
  Description of Artificial Sequence: Synthetic oligonucleotide
ugagugaaguuggaccagg

SEQ ID NO: 2678693 - RNA, 19 nt, Artificial Sequence
  Description of Artificial Sequence: Synthetic oligonucleotide
ucucuguccugcuggagcc

SEQ ID NO: 2678694 - RNA, 19 nt, Artificial Sequence
  Description of Artificial Sequence: Synthetic oligonucleotide
  modified_base (6)..(6): a, c, u, g, unknown or other
acaucnguuuucaacacca

SEQ ID NO: 2678695 - RNA, 19 nt, Artificial Sequence
  Description of Artificial Sequence: Synthetic oligonucleotide
guggacgaggcccaggaag

SEQ ID NO: 2678696 - RNA, 19 nt, Artificial Sequence
  Description of Artificial Sequence: Synthetic oligonucleotide
aaccccaauggagcgggcc

SEQ ID NO: 2678697 - RNA, 19 nt, Artificial Sequence
  Description of Artificial Sequence: Synthetic oligonucleotide
uguugauguuguucguagc

SEQ ID NO: 2678698 - RNA, 19 nt, Artificial Sequence
  Description of Artificial Sequence: Synthetic oligonucleotide
uuacacgcagguccgggug

SEQ ID NO: 2678699 - RNA, 19 nt, Artificial Sequence
  Description of Artificial Sequence: Synthetic oligonucleotide
cacucgucccgguaggugg

SEQ ID NO: 2678700 - RNA, 19 nt, Artificial Sequence
  Description of Artificial Sequence: Synthetic oligonucleotide
agcaccugugcagaugccc

SEQ ID NO: 2678701 - RNA, 19 nt, Artificial Sequence
  Description of Artificial Sequence: Synthetic oligonucleotide
aggacuuuuggcagcggcc

SEQ ID NO: 2678702 - RNA, 19 nt, Artificial Sequence
  Description of Artificial Sequence: Synthetic oligonucleotide
  modified_base (7)..(7): a, c, u, g, unknown or other
ggguggngaaccccaaugg

SEQ ID NO: 2678703 - RNA, 19 nt, Artificial Sequence
  Description of Artificial Sequence: Synthetic oligonucleotide
  modified_base (5)..(5): a, c, u, g, unknown or other
guggngaaccccaauggag

SEQ ID NO: 2678704 - RNA, 19 nt, Artificial Sequence
  Description of Artificial Sequence: Synthetic oligonucleotide
cacgaggagauauagguaa

SEQ ID NO: 2678705 - RNA, 19 nt, Artificial Sequence
  Description of Artificial Sequence: Synthetic oligonucleotide
aucgcaggaaucuuugcau

SEQ ID NO: 2678706 - RNA, 19 nt, Artificial Sequence
  Description of Artificial Sequence: Synthetic oligonucleotide
cucucuguccugcuggagc

SEQ ID NO: 2678707 - RNA, 19 nt, Artificial Sequence
  Description of Artificial Sequence: Synthetic oligonucleotide
acucacaguguggacggcc

SEQ ID NO: 2678708 - RNA, 19 nt, Artificial Sequence
  Description of Artificial Sequence: Synthetic oligonucleotide
  modified_base (8)..(8): a, c, u, g, unknown or other
ugacaucnguuuucaacac

SEQ ID NO: 2678709 - RNA, 19 nt, Artificial Sequence
  Description of Artificial Sequence: Synthetic oligonucleotide
gggugagugaaguuggacc

SEQ ID NO: 2678710 - RNA, 19 nt, Artificial Sequence
  Description of Artificial Sequence: Synthetic oligonucleotide
cagcaggcugauuuuauug

SEQ ID NO: 2678711 - RNA, 19 nt, Artificial Sequence
  Description of Artificial Sequence: Synthetic oligonucleotide
gugagcgcaggacuuuugg

SEQ ID NO: 2678712 - RNA, 19 nt, Artificial Sequence
  Description of Artificial Sequence: Synthetic oligonucleotide
aggcugauuuuauugccug

SEQ ID NO: 2678713 - RNA, 19 nt, Artificial Sequence
  Description of Artificial Sequence: Synthetic oligonucleotide
guagguggcgccgucagag

SEQ ID NO: 2678714 - RNA, 19 nt, Artificial Sequence
  Description of Artificial Sequence: Synthetic oligonucleotide
gagcgcaggacuuuuggca

SEQ ID NO: 2678715 - RNA, 19 nt, Artificial Sequence
  Description of Artificial Sequence: Synthetic oligonucleotide
gucuggugcgcacucacag

SEQ ID NO: 2678716 - RNA, 19 nt, Artificial Sequence
  Description of Artificial Sequence: Synthetic oligonucleotide
uuuggcagcggccucggua

SEQ ID NO: 2678717 - RNA, 19 nt, Artificial Sequence
  Description of Artificial Sequence: Synthetic oligonucleotide
uguucguagcacagcacuc

SEQ ID NO: 2678718 - RNA, 19 nt, Artificial Sequence
  Description of Artificial Sequence: Synthetic oligonucleotide
auguuguucguagcacagc

SEQ ID NO: 2678719 - RNA, 19 nt, Artificial Sequence
  Description of Artificial Sequence: Synthetic oligonucleotide
uugauguuguucguagcac

SEQ ID NO: 2678720 - RNA, 19 nt, Artificial Sequence
  Description of Artificial Sequence: Synthetic oligonucleotide
ucgcaggaaucuuugcaug

SEQ ID NO: 2678721 - RNA, 19 nt, Artificial Sequence
  Description of Artificial Sequence: Synthetic oligonucleotide
ugagcgcaggacuuuuggc

SEQ ID NO: 2678722 - RNA, 19 nt, Artificial Sequence
  Description of Artificial Sequence: Synthetic oligonucleotide
aguuggaccaggcuguguu

SEQ ID NO: 2678723 - RNA, 19 nt, Artificial Sequence
  Description of Artificial Sequence: Synthetic oligonucleotide
aagcagguggccuggcgca

SEQ ID NO: 2678724 - RNA, 19 nt, Artificial Sequence
  Description of Artificial Sequence: Synthetic oligonucleotide
aauggagcgggcccaggaa

SEQ ID NO: 2678725 - RNA, 19 nt, Artificial Sequence
  Description of Artificial Sequence: Synthetic oligonucleotide
  modified_base (3)..(3): a, c, u, g, unknown or other
ggngaaccccaauggagcg

SEQ ID NO: 2678726 - RNA, 19 nt, Artificial Sequence
  Description of Artificial Sequence: Synthetic oligonucleotide
accacgugagcgcaggacu

SEQ ID NO: 2678727 - RNA, 19 nt, Artificial Sequence
  Description of Artificial Sequence: Synthetic oligonucleotide
ggugagugaaguuggacca

SEQ ID NO: 2678728 - RNA, 19 nt, Artificial Sequence
  Description of Artificial Sequence: Synthetic oligonucleotide
aaucuuugcaugggaggca

SEQ ID NO: 2678729 - RNA, 19 nt, Artificial Sequence
  Description of Artificial Sequence: Synthetic oligonucleotide
uguuguugccacagaguuc

SEQ ID NO: 2678730 - RNA, 19 nt, Artificial Sequence
  Description of Artificial Sequence: Synthetic oligonucleotide
acuuuuggcagcggccucg

SEQ ID NO: 2678731 - RNA, 19 nt, Artificial Sequence
  Description of Artificial Sequence: Synthetic oligonucleotide
cuggugcgcacucacagug

SEQ ID NO: 2678732 - RNA, 19 nt, Artificial Sequence
  Description of Artificial Sequence: Synthetic oligonucleotide
ugccacagaguuccuggcc

SEQ ID NO: 2678733 - RNA, 19 nt, Artificial Sequence
  Description of Artificial Sequence: Synthetic oligonucleotide
gcugauuuuauugccuggg

SEQ ID NO: 2678734 - RNA, 19 nt, Artificial Sequence
  Description of Artificial Sequence: Synthetic oligonucleotide
gugacacgaggagauauag

SEQ ID NO: 2678735 - RNA, 19 nt, Artificial Sequence
  Description of Artificial Sequence: Synthetic oligonucleotide
  modified_base (5)..(5): a, c, u, g, unknown or other
caucnguuuucaacaccag

SEQ ID NO: 2678736 - RNA, 19 nt, Artificial Sequence
  Description of Artificial Sequence: Synthetic oligonucleotide
aggaaucuuugcaugggag

SEQ ID NO: 2678737 - RNA, 19 nt, Artificial Sequence
  Description of Artificial Sequence: Synthetic oligonucleotide
uuuucaacaccaggcugca

SEQ ID NO: 2678738 - RNA, 19 nt, Artificial Sequence
  Description of Artificial Sequence: Synthetic oligonucleotide
augcggcacgccuugcugg

SEQ ID NO: 2678739 - RNA, 19 nt, Artificial Sequence
  Description of Artificial Sequence: Synthetic oligonucleotide
ucgguacauuacacgcagg

SEQ ID NO: 2678740 - RNA, 19 nt, Artificial Sequence
  Description of Artificial Sequence: Synthetic oligonucleotide
ugcgcacucacagugugga

SEQ ID NO: 2678741 - RNA, 19 nt, Artificial Sequence
  Description of Artificial Sequence: Synthetic oligonucleotide
aucuuugcaugggaggcag

SEQ ID NO: 2678742 - RNA, 19 nt, Artificial Sequence
  Description of Artificial Sequence: Synthetic oligonucleotide
uacacgcagguccgggugc

SEQ ID NO: 2678743 - RNA, 19 nt, Artificial Sequence
  Description of Artificial Sequence: Synthetic oligonucleotide
ggagcaccugugcagaugc

SEQ ID NO: 2678744 - RNA, 19 nt, Artificial Sequence
  Description of Artificial Sequence: Synthetic oligonucleotide
cuuugcaugggaggcagug

SEQ ID NO: 2678745 - RNA, 19 nt, Artificial Sequence
  Description of Artificial Sequence: Synthetic oligonucleotide
auuacacgcagguccgggu

SEQ ID NO: 2678746 - RNA, 19 nt, Artificial Sequence
  Description of Artificial Sequence: Synthetic oligonucleotide
guccacaacgcacgacugg

SEQ ID NO: 2678747 - RNA, 19 nt, Artificial Sequence
  Description of Artificial Sequence: Synthetic oligonucleotide
caggacuuuuggcagcggc

SEQ ID NO: 2678748 - RNA, 19 nt, Artificial Sequence
  Description of Artificial Sequence: Synthetic oligonucleotide
uggagcgggcccaggaagc

SEQ ID NO: 2678749 - RNA, 19 nt, Artificial Sequence
  Description of Artificial Sequence: Synthetic oligonucleotide
uccacuccaucgcaggaau

SEQ ID NO: 2678750 - RNA, 19 nt, Artificial Sequence
  Description of Artificial Sequence: Synthetic oligonucleotide
  modified_base (2)..(2): a, c, u, g, unknown or other
gngaaccccaauggagcgg

SEQ ID NO: 2678751 - RNA, 19 nt, Artificial Sequence
  Description of Artificial Sequence: Synthetic oligonucleotide
cauuacacgcagguccggg

SEQ ID NO: 2678752 - RNA, 19 nt, Artificial Sequence
  Description of Artificial Sequence: Synthetic oligonucleotide
gccucgguacauuacacgc

SEQ ID NO: 2678753 - RNA, 19 nt, Artificial Sequence
  Description of Artificial Sequence: Synthetic oligonucleotide
uauugccugggugagugaa

SEQ ID NO: 2678754 - RNA, 19 nt, Artificial Sequence
  Description of Artificial Sequence: Synthetic oligonucleotide
gcacucacaguguggacgg

SEQ ID NO: 2678755 - RNA, 19 nt, Artificial Sequence
  Description of Artificial Sequence: Synthetic oligonucleotide
ugcggcacgccuugcuggg

SEQ ID NO: 2678756 - RNA, 19 nt, Artificial Sequence
  Description of Artificial Sequence: Synthetic oligonucleotide
aaggcaccgggcagggcgc

SEQ ID NO: 2678757 - RNA, 19 nt, Artificial Sequence
  Description of Artificial Sequence: Synthetic oligonucleotide
ucgcacucgucccgguagg

SEQ ID NO: 2678758 - RNA, 19 nt, Artificial Sequence
  Description of Artificial Sequence: Synthetic oligonucleotide
gucagagccgcagaccugc

SEQ ID NO: 2678759 - RNA, 19 nt, Artificial Sequence
  Description of Artificial Sequence: Synthetic oligonucleotide
caucgcaggaaucuuugca

SEQ ID NO: 2678760 - RNA, 19 nt, Artificial Sequence
  Description of Artificial Sequence: Synthetic oligonucleotide
ugguacuuuuggagcaccu

SEQ ID NO: 2678761 - RNA, 19 nt, Artificial Sequence
  Description of Artificial Sequence: Synthetic oligonucleotide
cuuuuggagcaccugugca

SEQ ID NO: 2678762 - RNA, 19 nt, Artificial Sequence
  Description of Artificial Sequence: Synthetic oligonucleotide
ucugguccacaacgcacga

SEQ ID NO: 2678763 - RNA, 19 nt, Artificial Sequence
  Description of Artificial Sequence: Synthetic oligonucleotide
cucgcacucgucccgguag

SEQ ID NO: 2678764 - RNA, 19 nt, Artificial Sequence
  Description of Artificial Sequence: Synthetic oligonucleotide
ccugggugagugaaguugg

SEQ ID NO: 2678765 - RNA, 19 nt, Artificial Sequence
  Description of Artificial Sequence: Synthetic oligonucleotide
uauagguaacguuguuguu

SEQ ID NO: 2678766 - RNA, 19 nt, Artificial Sequence
  Description of Artificial Sequence: Synthetic oligonucleotide
agguaacguuguuguugcc

SEQ ID NO: 2678767 - RNA, 19 nt, Artificial Sequence
  Description of Artificial Sequence: Synthetic oligonucleotide
  modified_base (16)..(16): a, c, u, g, unknown or other
uucccggcugacaucnguu

SEQ ID NO: 2678768 - RNA, 19 nt, Artificial Sequence
  Description of Artificial Sequence: Synthetic oligonucleotide
ucuggugcgcacucacagu

SEQ ID NO: 2678769 - RNA, 19 nt, Artificial Sequence
  Description of Artificial Sequence: Synthetic oligonucleotide
agauauagguaacguuguu

SEQ ID NO: 2678770 - RNA, 19 nt, Artificial Sequence
  Description of Artificial Sequence: Synthetic oligonucleotide
gagccgcagaccugcaagc

SEQ ID NO: 2678771 - RNA, 19 nt, Artificial Sequence
  Description of Artificial Sequence: Synthetic oligonucleotide
cagaccugcaagcccgcgg

SEQ ID NO: 2678772 - RNA, 19 nt, Artificial Sequence
  Description of Artificial Sequence: Synthetic oligonucleotide
ggcugauuuuauugccugg

SEQ ID NO: 2678773 - RNA, 19 nt, Artificial Sequence
  Description of Artificial Sequence: Synthetic oligonucleotide
acgaggagauauagguaac

SEQ ID NO: 2678774 - RNA, 19 nt, Artificial Sequence
  Description of Artificial Sequence: Synthetic oligonucleotide
cgacacaccacgcagugcg

SEQ ID NO: 2678775 - RNA, 19 nt, Artificial Sequence
  Description of Artificial Sequence: Synthetic oligonucleotide
gcaggcugauuuuauugcc

SEQ ID NO: 2678776 - RNA, 19 nt, Artificial Sequence
  Description of Artificial Sequence: Synthetic oligonucleotide
agccgcagaccugcaagcc

SEQ ID NO: 2678777 - RNA, 19 nt, Artificial Sequence
  Description of Artificial Sequence: Synthetic oligonucleotide
uugccugggugagugaagu

SEQ ID NO: 2678778 - RNA, 19 nt, Artificial Sequence
  Description of Artificial Sequence: Synthetic oligonucleotide
uaacguuguuguugccaca

SEQ ID NO: 2678779 - RNA, 19 nt, Artificial Sequence
  Description of Artificial Sequence: Synthetic oligonucleotide
guuggaccaggcuguguug

SEQ ID NO: 2678780 - RNA, 19 nt, Artificial Sequence
  Description of Artificial Sequence: Synthetic oligonucleotide
uuuuauugccugggugagu

SEQ ID NO: 2678781 - RNA, 19 nt, Artificial Sequence
  Description of Artificial Sequence: Synthetic oligonucleotide
ugcagguggccucucuguc

SEQ ID NO: 2678782 - RNA, 19 nt, Artificial Sequence
  Description of Artificial Sequence: Synthetic oligonucleotide
agugcgcgcugccagucug

SEQ ID NO: 2678783 - RNA, 19 nt, Artificial Sequence
  Description of Artificial Sequence: Synthetic oligonucleotide
cguagcacagcacucuucc

SEQ ID NO: 2678784 - RNA, 19 nt, Artificial Sequence
  Description of Artificial Sequence: Synthetic oligonucleotide
uucguagcacagcacucuu

SEQ ID NO: 2678785 - RNA, 19 nt, Artificial Sequence
  Description of Artificial Sequence: Synthetic oligonucleotide
ggccucgguacauuacacg

SEQ ID NO: 2678786 - RNA, 19 nt, Artificial Sequence
  Description of Artificial Sequence: Synthetic oligonucleotide
acagaguuccuggccgggg

SEQ ID NO: 2678787 - RNA, 19 nt, Artificial Sequence
  Description of Artificial Sequence: Synthetic oligonucleotide
ugggugagugaaguuggac

SEQ ID NO: 2678788 - RNA, 19 nt, Artificial Sequence
  Description of Artificial Sequence: Synthetic oligonucleotide
caugcggcacgccuugcug

SEQ ID NO: 2678789 - RNA, 19 nt, Artificial Sequence
  Description of Artificial Sequence: Synthetic oligonucleotide
ucguagcacagcacucuuc

SEQ ID NO: 2678790 - RNA, 19 nt, Artificial Sequence
  Description of Artificial Sequence: Synthetic oligonucleotide
aggcccaggaagcccagca

SEQ ID NO: 2678791 - RNA, 19 nt, Artificial Sequence
  Description of Artificial Sequence: Synthetic oligonucleotide
gguaacguuguuguugcca

SEQ ID NO: 2678792 - RNA, 19 nt, Artificial Sequence
  Description of Artificial Sequence: Synthetic oligonucleotide
agguccgggugcccgcggc

SEQ ID NO: 2678793 - RNA, 19 nt, Artificial Sequence
  Description of Artificial Sequence: Synthetic oligonucleotide
uccuggccggggcuggaag

SEQ ID NO: 2678794 - RNA, 19 nt, Artificial Sequence
  Description of Artificial Sequence: Synthetic oligonucleotide
uuauugccugggugaguga

SEQ ID NO: 2678795 - RNA, 19 nt, Artificial Sequence
  Description of Artificial Sequence: Synthetic oligonucleotide
gaggagauauagguaacgu

SEQ ID NO: 2678796 - RNA, 19 nt, Artificial Sequence
  Description of Artificial Sequence: Synthetic oligonucleotide
acgcagugcgcgcugccag

SEQ ID NO: 2678797 - RNA, 19 nt, Artificial Sequence
  Description of Artificial Sequence: Synthetic oligonucleotide
ggcgcgacacaccacgcag

SEQ ID NO: 2678798 - RNA, 19 nt, Artificial Sequence
  Description of Artificial Sequence: Synthetic oligonucleotide
cacaccacgcagugcgcgc

SEQ ID NO: 2678799 - RNA, 19 nt, Artificial Sequence
  Description of Artificial Sequence: Synthetic oligonucleotide
cacaccacgugagcgcagg

SEQ ID NO: 2678800 - RNA, 19 nt, Artificial Sequence
  Description of Artificial Sequence: Synthetic oligonucleotide
  modified_base (6)..(6): a, c, u, g, unknown or other
gguggngaaccccaaugga

SEQ ID NO: 2678801 - RNA, 19 nt, Artificial Sequence
  Description of Artificial Sequence: Synthetic oligonucleotide
gcaggaaucuuugcauggg

SEQ ID NO: 2678802 - RNA, 19 nt, Artificial Sequence
  Description of Artificial Sequence: Synthetic oligonucleotide
acacgcagguccgggugcc

SEQ ID NO: 2678803 - RNA, 19 nt, Artificial Sequence
  Description of Artificial Sequence: Synthetic oligonucleotide
acucgucccgguagguggc

SEQ ID NO: 2678804 - RNA, 19 nt, Artificial Sequence
  Description of Artificial Sequence: Synthetic oligonucleotide
gccgcacuccacuccaucg

SEQ ID NO: 2678805 - RNA, 19 nt, Artificial Sequence
  Description of Artificial Sequence: Synthetic oligonucleotide
aggugacacgaggagauau

SEQ ID NO: 2678806 - RNA, 19 nt, Artificial Sequence
  Description of Artificial Sequence: Synthetic oligonucleotide
uggagcaccugugcagaug

SEQ ID NO: 2678807 - RNA, 19 nt, Artificial Sequence
  Description of Artificial Sequence: Synthetic oligonucleotide
uggggccgcacuccacucc

SEQ ID NO: 2678808 - RNA, 19 nt, Artificial Sequence
  Description of Artificial Sequence: Synthetic oligonucleotide
acauuacacgcagguccgg

SEQ ID NO: 2678809 - RNA, 19 nt, Artificial Sequence
  Description of Artificial Sequence: Synthetic oligonucleotide
gacgaggcccaggaagccc

SEQ ID NO: 2678810 - RNA, 19 nt, Artificial Sequence
  Description of Artificial Sequence: Synthetic oligonucleotide
uggugcgcacucacagugu

SEQ ID NO: 2678811 - RNA, 19 nt, Artificial Sequence
  Description of Artificial Sequence: Synthetic oligonucleotide
cgcgcugccagucuggucc

SEQ ID NO: 2678812 - RNA, 19 nt, Artificial Sequence
  Description of Artificial Sequence: Synthetic oligonucleotide
cagucuggugcgcacucac

SEQ ID NO: 2678813 - RNA, 19 nt, Artificial Sequence
  Description of Artificial Sequence: Synthetic oligonucleotide
gaaguuggaccaggcugug

SEQ ID NO: 2678814 - RNA, 19 nt, Artificial Sequence
  Description of Artificial Sequence: Synthetic oligonucleotide
cguuguuguugccacagag

SEQ ID NO: 2678815 - RNA, 19 nt, Artificial Sequence
  Description of Artificial Sequence: Synthetic oligonucleotide
ggugcgcacucacagugug

SEQ ID NO: 2678816 - RNA, 19 nt, Artificial Sequence
  Description of Artificial Sequence: Synthetic oligonucleotide
  modified_base (2)..(2): a, c, u, g, unknown or other
cnguuuucaacaccaggcu

SEQ ID NO: 2678817 - RNA, 19 nt, Artificial Sequence
  Description of Artificial Sequence: Synthetic oligonucleotide
cuuuuggcagcggccucgg

SEQ ID NO: 2678818 - RNA, 19 nt, Artificial Sequence
  Description of Artificial Sequence: Synthetic oligonucleotide
caggaaucuuugcauggga

SEQ ID NO: 2678819 - RNA, 19 nt, Artificial Sequence
  Description of Artificial Sequence: Synthetic oligonucleotide
auugccugggugagugaag

SEQ ID NO: 2678820 - RNA, 19 nt, Artificial Sequence
  Description of Artificial Sequence: Synthetic oligonucleotide
ucuuugcaugggaggcagu

SEQ ID NO: 2678821 - RNA, 19 nt, Artificial Sequence
  Description of Artificial Sequence: Synthetic oligonucleotide
guuguucguagcacagcac

SEQ ID NO: 2678822 - RNA, 19 nt, Artificial Sequence
  Description of Artificial Sequence: Synthetic oligonucleotide
agcgggcccaggaagcagg

SEQ ID NO: 2678823 - RNA, 19 nt, Artificial Sequence
  Description of Artificial Sequence: Synthetic oligonucleotide
  modified_base (18)..(18): a, c, u, g, unknown or other
ucuucccggcugacaucng

SEQ ID NO: 2678824 - RNA, 19 nt, Artificial Sequence
  Description of Artificial Sequence: Synthetic oligonucleotide
uuucaacaccaggcugcag

SEQ ID NO: 2678825 - RNA, 19 nt, Artificial Sequence
  Description of Artificial Sequence: Synthetic oligonucleotide
aguuccuggccggggcugg

SEQ ID NO: 2678826 - RNA, 19 nt, Artificial Sequence
  Description of Artificial Sequence: Synthetic oligonucleotide
guuguuguugccacagagu

SEQ ID NO: 2678827 - RNA, 19 nt, Artificial Sequence
  Description of Artificial Sequence: Synthetic oligonucleotide
gacuuuuggcagcggccuc

SEQ ID NO: 2678828 - RNA, 19 nt, Artificial Sequence
  Description of Artificial Sequence: Synthetic oligonucleotide
gguacauuacacgcagguc

SEQ ID NO: 2678829 - RNA, 19 nt, Artificial Sequence
  Description of Artificial Sequence: Synthetic oligonucleotide
gccugggugagugaaguug

SEQ ID NO: 2678830 - RNA, 19 nt, Artificial Sequence
  Description of Artificial Sequence: Synthetic oligonucleotide
aaguuggaccaggcugugu

SEQ ID NO: 2678831 - RNA, 19 nt, Artificial Sequence
  Description of Artificial Sequence: Synthetic oligonucleotide
cacagaguuccuggccggg

SEQ ID NO: 2678832 - RNA, 19 nt, Artificial Sequence
  Description of Artificial Sequence: Synthetic oligonucleotide
cucgcagucuggugcgcac

SEQ ID NO: 2678833 - RNA, 19 nt, Artificial Sequence
  Description of Artificial Sequence: Synthetic oligonucleotide
accacgcagugcgcgcugc

SEQ ID NO: 2678834 - RNA, 19 nt, Artificial Sequence
  Description of Artificial Sequence: Synthetic oligonucleotide
ugcaagcccgcgggaagcc

SEQ ID NO: 2678835 - RNA, 19 nt, Artificial Sequence
  Description of Artificial Sequence: Synthetic oligonucleotide
caauggagcgggcccagga

SEQ ID NO: 2678836 - RNA, 19 nt, Artificial Sequence
  Description of Artificial Sequence: Synthetic oligonucleotide
gcagcucgcacucgucccg

SEQ ID NO: 2678837 - RNA, 19 nt, Artificial Sequence
  Description of Artificial Sequence: Synthetic oligonucleotide
caguggacgaggcccagga

SEQ ID NO: 2678838 - RNA, 19 nt, Artificial Sequence
  Description of Artificial Sequence: Synthetic oligonucleotide
cugcaagcccgcgggaagc

SEQ ID NO: 2678839 - RNA, 19 nt, Artificial Sequence
  Description of Artificial Sequence: Synthetic oligonucleotide
gcagguggccucucugucc

SEQ ID NO: 2678840 - RNA, 19 nt, Artificial Sequence
  Description of Artificial Sequence: Synthetic oligonucleotide
acguuguuguugccacaga

SEQ ID NO: 2678841 - RNA, 19 nt, Artificial Sequence
  Description of Artificial Sequence: Synthetic oligonucleotide
agcacucuucccggcugac

SEQ ID NO: 2678842 - RNA, 19 nt, Artificial Sequence
  Description of Artificial Sequence: Synthetic oligonucleotide
aagccccucgcagucuggu

SEQ ID NO: 2678843 - RNA, 19 nt, Artificial Sequence
  Description of Artificial Sequence: Synthetic oligonucleotide
  modified_base (15)..(15): a, c, u, g, unknown or other
agaugcccggguggngaac

SEQ ID NO: 2678844 - RNA, 19 nt, Artificial Sequence
  Description of Artificial Sequence: Synthetic oligonucleotide
caccaugcggcacgccuug

SEQ ID NO: 2678845 - RNA, 19 nt, Artificial Sequence
  Description of Artificial Sequence: Synthetic oligonucleotide
cgcacucacaguguggacg

SEQ ID NO: 2678846 - RNA, 19 nt, Artificial Sequence
  Description of Artificial Sequence: Synthetic oligonucleotide
ggaagccccucgcagucug

SEQ ID NO: 2678847 - RNA, 19 nt, Artificial Sequence
  Description of Artificial Sequence: Synthetic oligonucleotide
ggcuguguugauguuguuc

SEQ ID NO: 2678848 - RNA, 19 nt, Artificial Sequence
  Description of Artificial Sequence: Synthetic oligonucleotide
  modified_base (15)..(15): a, c, u, g, unknown or other
ucccggcugacaucnguuu

SEQ ID NO: 2678849 - RNA, 19 nt, Artificial Sequence
  Description of Artificial Sequence: Synthetic oligonucleotide
gggcacaccacgugagcgc

SEQ ID NO: 2678850 - RNA, 19 nt, Artificial Sequence
  Description of Artificial Sequence: Synthetic oligonucleotide
gccccucgcagucuggugc

SEQ ID NO: 2678851 - RNA, 19 nt, Artificial Sequence
  Description of Artificial Sequence: Synthetic oligonucleotide
gacacaccacgcagugcgc

SEQ ID NO: 2678852 - RNA, 19 nt, Artificial Sequence
  Description of Artificial Sequence: Synthetic oligonucleotide
gaagccccucgcagucugg

SEQ ID NO: 2678853 - RNA, 19 nt, Artificial Sequence
  Description of Artificial Sequence: Synthetic oligonucleotide
cagucugguccacaacgca

SEQ ID NO: 2678854 - RNA, 19 nt, Artificial Sequence
  Description of Artificial Sequence: Synthetic oligonucleotide
guucguagcacagcacucu

SEQ ID NO: 2678855 - RNA, 19 nt, Artificial Sequence
  Description of Artificial Sequence: Synthetic oligonucleotide
cugauuuuauugccugggu

SEQ ID NO: 2678856 - RNA, 19 nt, Artificial Sequence
  Description of Artificial Sequence: Synthetic oligonucleotide
gaguuccuggccggggcug

SEQ ID NO: 2678857 - RNA, 19 nt, Artificial Sequence
  Description of Artificial Sequence: Synthetic oligonucleotide
gugcgcacucacagugugg

SEQ ID NO: 2678858 - RNA, 19 nt, Artificial Sequence
  Description of Artificial Sequence: Synthetic oligonucleotide
caggcugauuuuauugccu

SEQ ID NO: 2678859 - RNA, 19 nt, Artificial Sequence
  Description of Artificial Sequence: Synthetic oligonucleotide
acacgaggagauauaggua

SEQ ID NO: 2678860 - RNA, 19 nt, Artificial Sequence
  Description of Artificial Sequence: Synthetic oligonucleotide
uuggagcaccugugcagau

SEQ ID NO: 2678861 - RNA, 19 nt, Artificial Sequence
  Description of Artificial Sequence: Synthetic oligonucleotide
cgaggagauauagguaacg

SEQ ID NO: 2678862 - RNA, 19 nt, Artificial Sequence
  Description of Artificial Sequence: Synthetic oligonucleotide
caccacgugagcgcaggac

SEQ ID NO: 2678863 - RNA, 19 nt, Artificial Sequence
  Description of Artificial Sequence: Synthetic oligonucleotide
cuggccggggcuggaaggc

SEQ ID NO: 2678864 - RNA, 19 nt, Artificial Sequence
  Description of Artificial Sequence: Synthetic oligonucleotide
  modified_base (13)..(13): a, c, u, g, unknown or other
augcccggguggngaaccc

SEQ ID NO: 2678865 - RNA, 19 nt, Artificial Sequence
  Description of Artificial Sequence: Synthetic oligonucleotide
aguggacgaggcccaggaa

SEQ ID NO: 2678866 - RNA, 19 nt, Artificial Sequence
  Description of Artificial Sequence: Synthetic oligonucleotide
uuuuggcagcggccucggu

SEQ ID NO: 2678867 - RNA, 19 nt, Artificial Sequence
  Description of Artificial Sequence: Synthetic oligonucleotide
ccacagaguuccuggccgg

SEQ ID NO: 2678868 - RNA, 19 nt, Artificial Sequence
  Description of Artificial Sequence: Synthetic oligonucleotide
gguggcgccgucagagccg

SEQ ID NO: 2678869 - RNA, 19 nt, Artificial Sequence
  Description of Artificial Sequence: Synthetic oligonucleotide
  modified_base (13)..(13): a, c, u, g, unknown or other
ccggcugacaucnguuuuc

SEQ ID NO: 2678870 - RNA, 19 nt, Artificial Sequence
  Description of Artificial Sequence: Synthetic oligonucleotide
  modified_base (12)..(12): a, c, u, g, unknown or other
ugcccggguggngaacccc

SEQ ID NO: 2678871 - RNA, 19 nt, Artificial Sequence
  Description of Artificial Sequence: Synthetic oligonucleotide
gcgcaggugacacgaggag

SEQ ID NO: 2678872 - RNA, 19 nt, Artificial Sequence
  Description of Artificial Sequence: Synthetic oligonucleotide
cacuccaucgcaggaaucu

SEQ ID NO: 2678873 - RNA, 19 nt, Artificial Sequence
  Description of Artificial Sequence: Synthetic oligonucleotide
gucccgguagguggcgccg

SEQ ID NO: 2678874 - RNA, 19 nt, Artificial Sequence
  Description of Artificial Sequence: Synthetic oligonucleotide
agccccucgcagucuggug

SEQ ID NO: 2678875 - RNA, 19 nt, Artificial Sequence
  Description of Artificial Sequence: Synthetic oligonucleotide
ccacaacgcacgacugggg

SEQ ID NO: 2678876 - RNA, 19 nt, Artificial Sequence
  Description of Artificial Sequence: Synthetic oligonucleotide
ccaucgcaggaaucuuugc

SEQ ID NO: 2678877 - RNA, 19 nt, Artificial Sequence
  Description of Artificial Sequence: Synthetic oligonucleotide
ucgcagucuggugcgcacu

SEQ ID NO: 2678878 - RNA, 19 nt, Artificial Sequence
  Description of Artificial Sequence: Synthetic oligonucleotide
gagcgggcccaggaagcag

SEQ ID NO: 2678879 - RNA, 19 nt, Artificial Sequence
  Description of Artificial Sequence: Synthetic oligonucleotide
ccuggccggggcuggaagg

SEQ ID NO: 2678880 - RNA, 19 nt, Artificial Sequence
  Description of Artificial Sequence: Synthetic oligonucleotide
acaccacgugagcgcagga

SEQ ID NO: 2678881 - RNA, 19 nt, Artificial Sequence
  Description of Artificial Sequence: Synthetic oligonucleotide
gguccacaacgcacgacug

SEQ ID NO: 2678882 - RNA, 19 nt, Artificial Sequence
  Description of Artificial Sequence: Synthetic oligonucleotide
  modified_base (16)..(16): a, c, u, g, unknown or other
cagaugcccggguggngaa

SEQ ID NO: 2678883 - RNA, 19 nt, Artificial Sequence
  Description of Artificial Sequence: Synthetic oligonucleotide
cugggugagugaaguugga

SEQ ID NO: 2678884 - RNA, 19 nt, Artificial Sequence
  Description of Artificial Sequence: Synthetic oligonucleotide
gguggccucucuguccugc

SEQ ID NO: 2678885 - RNA, 19 nt, Artificial Sequence
  Description of Artificial Sequence: Synthetic oligonucleotide
ugcuggggccgcacuccac

SEQ ID NO: 2678886 - RNA, 19 nt, Artificial Sequence
  Description of Artificial Sequence: Synthetic oligonucleotide
ccaggcuguguugauguug

SEQ ID NO: 2678887 - RNA, 19 nt, Artificial Sequence
  Description of Artificial Sequence: Synthetic oligonucleotide
accgggcagggcgcggcgc

SEQ ID NO: 2678888 - RNA, 19 nt, Artificial Sequence
  Description of Artificial Sequence: Synthetic oligonucleotide
agucuggugcgcacucaca

SEQ ID NO: 2678889 - RNA, 19 nt, Artificial Sequence
  Description of Artificial Sequence: Synthetic oligonucleotide
cuggcgcaggugacacgag

SEQ ID NO: 2678890 - RNA, 19 nt, Artificial Sequence
  Description of Artificial Sequence: Synthetic oligonucleotide
ggggcgcgggcacaccacg

SEQ ID NO: 2678891 - RNA, 19 nt, Artificial Sequence
  Description of Artificial Sequence: Synthetic oligonucleotide
gcggccucgguacauuaca

SEQ ID NO: 2678892 - RNA, 19 nt, Artificial Sequence
  Description of Artificial Sequence: Synthetic oligonucleotide
cagcucgcacucgucccgg

SEQ ID NO: 2678893 - RNA, 19 nt, Artificial Sequence
  Description of Artificial Sequence: Synthetic oligonucleotide
uggccuggcgcaggugaca

SEQ ID NO: 2678894 - RNA, 19 nt, Artificial Sequence
  Description of Artificial Sequence: Synthetic oligonucleotide
ggcgcggcgcgacacacca

SEQ ID NO: 2678895 - RNA, 19 nt, Artificial Sequence
  Description of Artificial Sequence: Synthetic oligonucleotide
cgcggcgcgacacaccacg

SEQ ID NO: 2678896 - RNA, 19 nt, Artificial Sequence
  Description of Artificial Sequence: Synthetic oligonucleotide
ggaccaggcuguguugaug

SEQ ID NO: 2678897 - RNA, 19 nt, Artificial Sequence
  Description of Artificial Sequence: Synthetic oligonucleotide
accugcaagcccgcgggaa

SEQ ID NO: 2678898 - RNA, 19 nt, Artificial Sequence
  Description of Artificial Sequence: Synthetic oligonucleotide
cucgucccgguagguggcg

SEQ ID NO: 2678899 - RNA, 19 nt, Artificial Sequence
  Description of Artificial Sequence: Synthetic oligonucleotide
guggcgccgucagagccgc

SEQ ID NO: 2678900 - RNA, 19 nt, Artificial Sequence
  Description of Artificial Sequence: Synthetic oligonucleotide
uggcagcggccucgguaca

SEQ ID NO: 2678901 - RNA, 19 nt, Artificial Sequence
  Description of Artificial Sequence: Synthetic oligonucleotide
gagcaccugugcagaugcc

SEQ ID NO: 2678902 - RNA, 19 nt, Artificial Sequence
  Description of Artificial Sequence: Synthetic oligonucleotide
cuggggccgcacuccacuc

SEQ ID NO: 2678903 - RNA, 19 nt, Artificial Sequence
  Description of Artificial Sequence: Synthetic oligonucleotide
ugccugggugagugaaguu

SEQ ID NO: 2678904 - RNA, 19 nt, Artificial Sequence
  Description of Artificial Sequence: Synthetic oligonucleotide
ccgcacuccacuccaucgc

SEQ ID NO: 2678905 - RNA, 19 nt, Artificial Sequence
  Description of Artificial Sequence: Synthetic oligonucleotide
gugcgcgcugccagucugg

SEQ ID NO: 2678906 - RNA, 19 nt, Artificial Sequence
  Description of Artificial Sequence: Synthetic oligonucleotide
ucgucccgguagguggcgc

SEQ ID NO: 2678907 - RNA, 19 nt, Artificial Sequence
  Description of Artificial Sequence: Synthetic oligonucleotide
ccucgguacauuacacgca

SEQ ID NO: 2678908 - RNA, 19 nt, Artificial Sequence
  Description of Artificial Sequence: Synthetic oligonucleotide
ggcgcaggugacacgagga

SEQ ID NO: 2678909 - RNA, 19 nt, Artificial Sequence
  Description of Artificial Sequence: Synthetic oligonucleotide
ccccucgcagucuggugcg

SEQ ID NO: 2678910 - RNA, 19 nt, Artificial Sequence
  Description of Artificial Sequence: Synthetic oligonucleotide
  modified_base (8)..(8): a, c, u, g, unknown or other
cggguggngaaccccaaug

SEQ ID NO: 2678911 - RNA, 19 nt, Artificial Sequence
  Description of Artificial Sequence: Synthetic oligonucleotide
ggcgcgggcacaccacgug

SEQ ID NO: 2678912 - RNA, 19 nt, Artificial Sequence
  Description of Artificial Sequence: Synthetic oligonucleotide
  modified_base (17)..(17): a, c, u, g, unknown or other
gcagaugcccggguggnga

SEQ ID NO: 2678913 - RNA, 19 nt, Artificial Sequence
  Description of Artificial Sequence: Synthetic oligonucleotide
cacgccuugcuggggccgc

SEQ ID NO: 2678914 - RNA, 19 nt, Artificial Sequence
  Description of Artificial Sequence: Synthetic oligonucleotide
gaccugcaagcccgcggga

SEQ ID NO: 2678915 - RNA, 19 nt, Artificial Sequence
  Description of Artificial Sequence: Synthetic oligonucleotide
gcgcaggacuuuuggcagc

SEQ ID NO: 2678916 - RNA, 19 nt, Artificial Sequence
  Description of Artificial Sequence: Synthetic oligonucleotide
ggcccaggaagcagguggc

SEQ ID NO: 2678917 - RNA, 19 nt, Artificial Sequence
  Description of Artificial Sequence: Synthetic oligonucleotide
gaaccccaauggagcgggc

SEQ ID NO: 2678918 - RNA, 19 nt, Artificial Sequence
  Description of Artificial Sequence: Synthetic oligonucleotide
guccgggugcccgcggcag

SEQ ID NO: 2678919 - RNA, 19 nt, Artificial Sequence
  Description of Artificial Sequence: Synthetic oligonucleotide
cuccacuccaucgcaggaa

SEQ ID NO: 2678920 - RNA, 19 nt, Artificial Sequence
  Description of Artificial Sequence: Synthetic oligonucleotide
aagcccgcgggaagccccu

SEQ ID NO: 2678921 - RNA, 19 nt, Artificial Sequence
  Description of Artificial Sequence: Synthetic oligonucleotide
cagcacucuucccggcuga

SEQ ID NO: 2678922 - RNA, 19 nt, Artificial Sequence
  Description of Artificial Sequence: Synthetic oligonucleotide
agcucgcacucgucccggu

SEQ ID NO: 2678923 - RNA, 19 nt, Artificial Sequence
  Description of Artificial Sequence: Synthetic oligonucleotide
cacucacaguguggacggc

SEQ ID NO: 2678924 - RNA, 19 nt, Artificial Sequence
  Description of Artificial Sequence: Synthetic oligonucleotide
cuguguugauguuguucgu

SEQ ID NO: 2678925 - RNA, 19 nt, Artificial Sequence
  Description of Artificial Sequence: Synthetic oligonucleotide
gcacuccacuccaucgcag

SEQ ID NO: 2678926 - RNA, 19 nt, Artificial Sequence
  Description of Artificial Sequence: Synthetic oligonucleotide
ggacgaggcccaggaagcc

SEQ ID NO: 2678927 - RNA, 19 nt, Artificial Sequence
  Description of Artificial Sequence: Synthetic oligonucleotide
gggugcccgcggcagcgcg

SEQ ID NO: 2678928 - RNA, 19 nt, Artificial Sequence
  Description of Artificial Sequence: Synthetic oligonucleotide
ggugacacgaggagauaua

SEQ ID NO: 2678929 - RNA, 19 nt, Artificial Sequence
  Description of Artificial Sequence: Synthetic oligonucleotide
caccgggcagggcgcggcg

SEQ ID NO: 2678930 - RNA, 19 nt, Artificial Sequence
  Description of Artificial Sequence: Synthetic oligonucleotide
gccgucagagccgcagacc

SEQ ID NO: 2678931 - RNA, 19 nt, Artificial Sequence
  Description of Artificial Sequence: Synthetic oligonucleotide
cagguccgggugcccgcgg

SEQ ID NO: 2678932 - RNA, 19 nt, Artificial Sequence
  Description of Artificial Sequence: Synthetic oligonucleotide
gcaggugacacgaggagau

SEQ ID NO: 2678933 - RNA, 19 nt, Artificial Sequence
  Description of Artificial Sequence: Synthetic oligonucleotide
cgcagcucgcacucguccc

SEQ ID NO: 2678934 - RNA, 19 nt, Artificial Sequence
  Description of Artificial Sequence: Synthetic oligonucleotide
ggggccgcacuccacucca

SEQ ID NO: 2678935 - RNA, 19 nt, Artificial Sequence
  Description of Artificial Sequence: Synthetic oligonucleotide
gcaguggacgaggcccagg

SEQ ID NO: 2678936 - RNA, 19 nt, Artificial Sequence
  Description of Artificial Sequence: Synthetic oligonucleotide
cgggcacaccacgugagcg

SEQ ID NO: 2678937 - RNA, 19 nt, Artificial Sequence
  Description of Artificial Sequence: Synthetic oligonucleotide
ccuggcgcaggugacacga

SEQ ID NO: 2678938 - RNA, 19 nt, Artificial Sequence
  Description of Artificial Sequence: Synthetic oligonucleotide
acgugagcgcaggacuuuu

SEQ ID NO: 2678939 - RNA, 19 nt, Artificial Sequence
  Description of Artificial Sequence: Synthetic oligonucleotide
gcgggcacaccacgugagc

SEQ ID NO: 2678940 - RNA, 19 nt, Artificial Sequence
  Description of Artificial Sequence: Synthetic oligonucleotide
cgcaggacuuuuggcagcg

SEQ ID NO: 2678941 - RNA, 19 nt, Artificial Sequence
  Description of Artificial Sequence: Synthetic oligonucleotide
ucccgguagguggcgccgu

SEQ ID NO: 2678942 - RNA, 19 nt, Artificial Sequence
  Description of Artificial Sequence: Synthetic oligonucleotide
cuccaucgcaggaaucuuu

SEQ ID NO: 2678943 - RNA, 19 nt, Artificial Sequence
  Description of Artificial Sequence: Synthetic oligonucleotide
gguagguggcgccgucaga

SEQ ID NO: 2678944 - RNA, 19 nt, Artificial Sequence
  Description of Artificial Sequence: Synthetic oligonucleotide
gcagaccugcaagcccgcg

SEQ ID NO: 2678945 - RNA, 19 nt, Artificial Sequence
  Description of Artificial Sequence: Synthetic oligonucleotide
gcacucgucccgguaggug

SEQ ID NO: 2678946 - RNA, 19 nt, Artificial Sequence
  Description of Artificial Sequence: Synthetic oligonucleotide
aggcaccgggcagggcgcg

SEQ ID NO: 2678947 - RNA, 19 nt, Artificial Sequence
  Description of Artificial Sequence: Synthetic oligonucleotide
cgcgacacaccacgcagug

SEQ ID NO: 2678948 - RNA, 19 nt, Artificial Sequence
  Description of Artificial Sequence: Synthetic oligonucleotide
cacgcagugcgcgcugcca

SEQ ID NO: 2678949 - RNA, 19 nt, Artificial Sequence
  Description of Artificial Sequence: Synthetic oligonucleotide
gcagguccgggugcccgcg

SEQ ID NO: 2678950 - RNA, 19 nt, Artificial Sequence
  Description of Artificial Sequence: Synthetic oligonucleotide
ugcccgcggcagcgcgcgg

SEQ ID NO: 2678951 - RNA, 19 nt, Artificial Sequence
  Description of Artificial Sequence: Synthetic oligonucleotide
ggccuggcgcaggugacac

SEQ ID NO: 2678952 - RNA, 19 nt, Artificial Sequence
  Description of Artificial Sequence: Synthetic oligonucleotide
ggccgcacuccacuccauc

SEQ ID NO: 2678953 - RNA, 19 nt, Artificial Sequence
  Description of Artificial Sequence: Synthetic oligonucleotide
gcacgccuugcuggggccg

SEQ ID NO: 2678954 - RNA, 19 nt, Artificial Sequence
  Description of Artificial Sequence: Synthetic oligonucleotide
gcccgcgggaagccccucg

SEQ ID NO: 2678955 - RNA, 19 nt, Artificial Sequence
  Description of Artificial Sequence: Synthetic oligonucleotide
cagagccgcagaccugcaa

SEQ ID NO: 2678956 - RNA, 19 nt, Artificial Sequence
  Description of Artificial Sequence: Synthetic oligonucleotide
cacgcagguccgggugccc

SEQ ID NO: 2678957 - RNA, 19 nt, Artificial Sequence
  Description of Artificial Sequence: Synthetic oligonucleotide
cgcgggcacaccacgugag

SEQ ID NO: 2678958 - RNA, 19 nt, Artificial Sequence
  Description of Artificial Sequence: Synthetic oligonucleotide
gcuggggccgcacuccacu

SEQ ID NO: 2678959 - RNA, 19 nt, Artificial Sequence
  Description of Artificial Sequence: Synthetic oligonucleotide
gcgacacaccacgcagugc

SEQ ID NO: 2678960 - RNA, 19 nt, Artificial Sequence
  Description of Artificial Sequence: Synthetic oligonucleotide
cgguacauuacacgcaggu

SEQ ID NO: 2678961 - RNA, 19 nt, Artificial Sequence
  Description of Artificial Sequence: Synthetic oligonucleotide
ccgucagagccgcagaccu

SEQ ID NO: 2678962 - RNA, 19 nt, Artificial Sequence
  Description of Artificial Sequence: Synthetic oligonucleotide
cucuguccugcuggagcca

SEQ ID NO: 2678963 - RNA, 19 nt, Artificial Sequence
  Description of Artificial Sequence: Synthetic oligonucleotide
ccacuccaucgcaggaauc

SEQ ID NO: 2678964 - RNA, 19 nt, Artificial Sequence
  Description of Artificial Sequence: Synthetic oligonucleotide
cgugagcgcaggacuuuug

SEQ ID NO: 2678965 - RNA, 19 nt, Artificial Sequence
  Description of Artificial Sequence: Synthetic oligonucleotide
cggccucgguacauuacac

SEQ ID NO: 2678966 - RNA, 19 nt, Artificial Sequence
  Description of Artificial Sequence: Synthetic oligonucleotide
ggagcgggcccaggaagca

SEQ ID NO: 2678967 - RNA, 19 nt, Artificial Sequence
  Description of Artificial Sequence: Synthetic oligonucleotide
cccgcgggaagccccucgc

SEQ ID NO: 2678968 - RNA, 19 nt, Artificial Sequence
  Description of Artificial Sequence: Synthetic oligonucleotide
gcgcgggcacaccacguga

SEQ ID NO: 2678969 - RNA, 19 nt, Artificial Sequence
  Description of Artificial Sequence: Synthetic oligonucleotide
gcaagcccgcgggaagccc

SEQ ID NO: 2678970 - RNA, 19 nt, Artificial Sequence
  Description of Artificial Sequence: Synthetic oligonucleotide
  modified_base (11)..(11): a, c, u, g, unknown or other
ggcugacaucnguuuucaa

SEQ ID NO: 2678971 - RNA, 19 nt, Artificial Sequence
  Description of Artificial Sequence: Synthetic oligonucleotide
ggcaguggacgaggcccag

SEQ ID NO: 2678972 - RNA, 19 nt, Artificial Sequence
  Description of Artificial Sequence: Synthetic oligonucleotide
ccgggcagggcgcggcgcg

SEQ ID NO: 2678973 - RNA, 19 nt, Artificial Sequence
  Description of Artificial Sequence: Synthetic oligonucleotide
cgucccgguagguggcgcc

SEQ ID NO: 2678974 - RNA, 19 nt, Artificial Sequence
  Description of Artificial Sequence: Synthetic oligonucleotide
gcgcacucacaguguggac

SEQ ID NO: 2678975 - RNA, 19 nt, Artificial Sequence
  Description of Artificial Sequence: Synthetic oligonucleotide
ccgggugcccgcggcagcg

SEQ ID NO: 2678976 - RNA, 19 nt, Artificial Sequence
  Description of Artificial Sequence: Synthetic oligonucleotide
gguccgggugcccgcggca

SEQ ID NO: 2678977 - RNA, 19 nt, Artificial Sequence
  Description of Artificial Sequence: Synthetic oligonucleotide
gcagugcgcgcugccaguc

SEQ ID NO: 2678978 - RNA, 19 nt, Artificial Sequence
  Description of Artificial Sequence: Synthetic oligonucleotide
ccucucuguccugcuggag

SEQ ID NO: 2678979 - RNA, 19 nt, Artificial Sequence
  Description of Artificial Sequence: Synthetic oligonucleotide
ccacgcagugcgcgcugcc

SEQ ID NO: 2678980 - RNA, 19 nt, Artificial Sequence
  Description of Artificial Sequence: Synthetic oligonucleotide
gcgggaagccccucgcagu

SEQ ID NO: 2678981 - RNA, 19 nt, Artificial Sequence
  Description of Artificial Sequence: Synthetic oligonucleotide
cgucagagccgcagaccug

SEQ ID NO: 2678982 - RNA, 19 nt, Artificial Sequence
  Description of Artificial Sequence: Synthetic oligonucleotide
cccgcggcagcgcgcggcg

SEQ ID NO: 2678983 - RNA, 19 nt, Artificial Sequence
  Description of Artificial Sequence: Synthetic oligonucleotide
  modified_base (11)..(11): a, c, u, g, unknown or other
gcccggguggngaacccca

SEQ ID NO: 2678984 - RNA, 19 nt, Artificial Sequence
  Description of Artificial Sequence: Synthetic oligonucleotide
cccaccaugcggcacgccu

SEQ ID NO: 2678985 - RNA, 19 nt, Artificial Sequence
  Description of Artificial Sequence: Synthetic oligonucleotide
gcacaccacgugagcgcag

SEQ ID NO: 2678986 - RNA, 19 nt, Artificial Sequence
  Description of Artificial Sequence: Synthetic oligonucleotide
cagggcgcggcgcgacaca

SEQ ID NO: 2678987 - RNA, 19 nt, Artificial Sequence
  Description of Artificial Sequence: Synthetic oligonucleotide
gcacucuucccggcugaca

SEQ ID NO: 2678988 - RNA, 19 nt, Artificial Sequence
  Description of Artificial Sequence: Synthetic oligonucleotide
agcccgcgggaagccccuc

SEQ ID NO: 2678989 - RNA, 19 nt, Artificial Sequence
  Description of Artificial Sequence: Synthetic oligonucleotide
caggugacacgaggagaua

SEQ ID NO: 2678990 - RNA, 19 nt, Artificial Sequence
  Description of Artificial Sequence: Synthetic oligonucleotide
ggaaggcaccgggcagggc

SEQ ID NO: 2678991 - RNA, 19 nt, Artificial Sequence
  Description of Artificial Sequence: Synthetic oligonucleotide
guuccuggccggggcugga

SEQ ID NO: 2678992 - RNA, 19 nt, Artificial Sequence
  Description of Artificial Sequence: Synthetic oligonucleotide
gcagggcgcggcgcgacac

SEQ ID NO: 2678993 - RNA, 19 nt, Artificial Sequence
  Description of Artificial Sequence: Synthetic oligonucleotide
gccggggcuggaaggcacc

SEQ ID NO: 2678994 - RNA, 19 nt, Artificial Sequence
  Description of Artificial Sequence: Synthetic oligonucleotide
cgccgucagagccgcagac

SEQ ID NO: 2678995 - RNA, 19 nt, Artificial Sequence
  Description of Artificial Sequence: Synthetic oligonucleotide
ggcaccgggcagggcgcgg

SEQ ID NO: 2678996 - RNA, 19 nt, Artificial Sequence
  Description of Artificial Sequence: Synthetic oligonucleotide
gcggcacgccuugcugggg

SEQ ID NO: 2678997 - RNA, 19 nt, Artificial Sequence
  Description of Artificial Sequence: Synthetic oligonucleotide
acgccuugcuggggccgca

SEQ ID NO: 2678998 - RNA, 19 nt, Artificial Sequence
  Description of Artificial Sequence: Synthetic oligonucleotide
cgcagguccgggugcccgc

SEQ ID NO: 2678999 - RNA, 19 nt, Artificial Sequence
  Description of Artificial Sequence: Synthetic oligonucleotide
gcgccgucagagccgcaga

SEQ ID NO: 2679000 - RNA, 19 nt, Artificial Sequence
  Description of Artificial Sequence: Synthetic oligonucleotide
gcucgcacucgucccggua

SEQ ID NO: 2679001 - RNA, 19 nt, Artificial Sequence
  Description of Artificial Sequence: Synthetic oligonucleotide
gcgcugccagucuggucca

SEQ ID NO: 2679002 - RNA, 19 nt, Artificial Sequence
  Description of Artificial Sequence: Synthetic oligonucleotide
gcggcgcgacacaccacgc

SEQ ID NO: 2679003 - RNA, 19 nt, Artificial Sequence
  Description of Artificial Sequence: Synthetic oligonucleotide
cagugcgcgcugccagucu

SEQ ID NO: 2679004 - RNA, 19 nt, Artificial Sequence
  Description of Artificial Sequence: Synthetic oligonucleotide
  modified_base (10)..(10): a, c, u, g, unknown or other
cccggguggngaaccccaa

SEQ ID NO: 2679005 - RNA, 19 nt, Artificial Sequence
  Description of Artificial Sequence: Synthetic oligonucleotide
  modified_base (12)..(12): a, c, u, g, unknown or other
cggcugacaucnguuuuca

SEQ ID NO: 2679006 - RNA, 19 nt, Artificial Sequence
  Description of Artificial Sequence: Synthetic oligonucleotide
gcccagcaggcugauuuua

SEQ ID NO: 2679007 - RNA, 19 nt, Artificial Sequence
  Description of Artificial Sequence: Synthetic oligonucleotide
gcccgcggcagcgcgcggc

SEQ ID NO: 2679008 - RNA, 19 nt, Artificial Sequence
  Description of Artificial Sequence: Synthetic oligonucleotide
cacgugagcgcaggacuuu

SEQ ID NO: 2679009 - RNA, 19 nt, Artificial Sequence
  Description of Artificial Sequence: Synthetic oligonucleotide
  modified_base (14)..(14): a, c, u, g, unknown or other
cccggcugacaucnguuuu

SEQ ID NO: 2679010 - RNA, 19 nt, Artificial Sequence
  Description of Artificial Sequence: Synthetic oligonucleotide
gggcgcggcgcgacacacc

SEQ ID NO: 2679011 - RNA, 19 nt, Artificial Sequence
  Description of Artificial Sequence: Synthetic oligonucleotide
cccgguagguggcgccguc

SEQ ID NO: 2679012 - RNA, 19 nt, Artificial Sequence
  Description of Artificial Sequence: Synthetic oligonucleotide
ccucgcagucuggugcgca

SEQ ID NO: 2679013 - RNA, 19 nt, Artificial Sequence
  Description of Artificial Sequence: Synthetic oligonucleotide
ccacgugagcgcaggacuu

SEQ ID NO: 2679014 - RNA, 19 nt, Artificial Sequence
  Description of Artificial Sequence: Synthetic oligonucleotide
cgcgcagcucgcacucguc

SEQ ID NO: 2679015 - RNA, 19 nt, Artificial Sequence
  Description of Artificial Sequence: Synthetic oligonucleotide
gggcagggcgcggcgcgac

SEQ ID NO: 2679016 - RNA, 19 nt, Artificial Sequence
  Description of Artificial Sequence: Synthetic oligonucleotide
cccucgcagucuggugcgc

SEQ ID NO: 2679017 - RNA, 19 nt, Artificial Sequence
  Description of Artificial Sequence: Synthetic oligonucleotide
cggcgcgcagcucgcacuc

SEQ ID NO: 2679018 - RNA, 19 nt, Artificial Sequence
  Description of Artificial Sequence: Synthetic oligonucleotide
gcgcgcagcucgcacucgu

SEQ ID NO: 2679019 - RNA, 19 nt, Artificial Sequence
  Description of Artificial Sequence: Synthetic oligonucleotide
cgcggcgcgcagcucgcac

SEQ ID NO: 2679020 - RNA, 19 nt, Artificial Sequence
  Description of Artificial Sequence: Synthetic oligonucleotide
ccugugcagaugcccgggu

SEQ ID NO: 2679021 - RNA, 19 nt, Artificial Sequence
  Description of Artificial Sequence: Synthetic oligonucleotide
gcgcgacacaccacgcagu

SEQ ID NO: 2679022 - RNA, 19 nt, Artificial Sequence
  Description of Artificial Sequence: Synthetic oligonucleotide
gggaagccccucgcagucu

SEQ ID NO: 2679023 - RNA, 19 nt, Artificial Sequence
  Description of Artificial Sequence: Synthetic oligonucleotide
gccuugcuggggccgcacu

SEQ ID NO: 2679024 - RNA, 19 nt, Artificial Sequence
  Description of Artificial Sequence: Synthetic oligonucleotide
ccaccaugcggcacgccuu

SEQ ID NO: 2679025 - RNA, 19 nt, Artificial Sequence
  Description of Artificial Sequence: Synthetic oligonucleotide
ccgguagguggcgccguca

SEQ ID NO: 2679026 - RNA, 19 nt, Artificial Sequence
  Description of Artificial Sequence: Synthetic oligonucleotide
ccgcgggaagccccucgca

SEQ ID NO: 2679027 - RNA, 19 nt, Artificial Sequence
  Description of Artificial Sequence: Synthetic oligonucleotide
cggcgcgacacaccacgca

SEQ ID NO: 2679028 - RNA, 19 nt, Artificial Sequence
  Description of Artificial Sequence: Synthetic oligonucleotide
ggcagcggccucgguacau

SEQ ID NO: 2679029 - RNA, 19 nt, Artificial Sequence
  Description of Artificial Sequence: Synthetic oligonucleotide
gcagcggccucgguacauu

SEQ ID NO: 2679030 - RNA, 19 nt, Artificial Sequence
  Description of Artificial Sequence: Synthetic oligonucleotide
gggcgcgggcacaccacgu

SEQ ID NO: 2679031 - RNA, 19 nt, Artificial Sequence
  Description of Artificial Sequence: Synthetic oligonucleotide
  modified_base (9)..(9): a, c, u, g, unknown or other
ccggguggngaaccccaau

SEQ ID NO: 2679032 - RNA, 19 nt, Artificial Sequence
  Description of Artificial Sequence: Synthetic oligonucleotide
cgggcccaggaagcaggug

SEQ ID NO: 2679033 - RNA, 19 nt, Artificial Sequence
  Description of Artificial Sequence: Synthetic oligonucleotide
gcgggcccaggaagcaggu

SEQ ID NO: 2679034 - RNA, 19 nt, Artificial Sequence
  Description of Artificial Sequence: Synthetic oligonucleotide
cgccuugcuggggccgcac

SEQ ID NO: 2679035 - RNA, 19 nt, Artificial Sequence
  Description of Artificial Sequence: Synthetic oligonucleotide
gcgcggcgcgacacaccac

SEQ ID NO: 2679036 - RNA, 19 nt, Artificial Sequence
  Description of Artificial Sequence: Synthetic oligonucleotide
cgcagugcgcgcugccagu

SEQ ID NO: 2679037 - RNA, 19 nt, Artificial Sequence
  Description of Artificial Sequence: Synthetic oligonucleotide
ccgcggcagcgcgcggcgc

SEQ ID NO: 2679038 - RNA, 19 nt, Artificial Sequence
  Description of Artificial Sequence: Synthetic oligonucleotide
gggccgcacuccacuccau

SEQ ID NO: 2679039 - RNA, 19 nt, Artificial Sequence
  Description of Artificial Sequence: Synthetic oligonucleotide
cgcacucgucccgguaggu

SEQ ID NO: 2679040 - RNA, 19 nt, Artificial Sequence
  Description of Artificial Sequence: Synthetic oligonucleotide
  modified_base (1)..(1): a, c, u, g, unknown or other
nguuuucaacaccaggcug

SEQ ID NO: 2679041 - RNA, 19 nt, Artificial Sequence
  Description of Artificial Sequence: Synthetic oligonucleotide
  modified_base (1)..(1): a, c, u, g, unknown or other
ngaaccccaauggagcggg

SEQ ID NO: 2679042 - RNA, 19 nt, Artificial Sequence
  Description of Artificial Sequence: Synthetic oligonucleotide
aaauauuuguuccaccucc

SEQ ID NO: 2679043 - RNA, 19 nt, Artificial Sequence
  Description of Artificial Sequence: Synthetic oligonucleotide
ucagauauaaauuacaaca

SEQ ID NO: 2679044 - RNA, 19 nt, Artificial Sequence
  Description of Artificial Sequence: Synthetic oligonucleotide
acuaaguaagucuacacgg

SEQ ID NO: 2679045 - RNA, 19 nt, Artificial Sequence
  Description of Artificial Sequence: Synthetic oligonucleotide
aacuaaguaagucuacacg

SEQ ID NO: 2679046 - RNA, 19 nt, Artificial Sequence
  Description of Artificial Sequence: Synthetic oligonucleotide
auuacaacagugcagaaca

SEQ ID NO: 2679047 - RNA, 19 nt, Artificial Sequence
  Description of Artificial Sequence: Synthetic oligonucleotide
aaacuaaguaagucuacac

SEQ ID NO: 2679048 - RNA, 19 nt, Artificial Sequence
  Description of Artificial Sequence: Synthetic oligonucleotide
uuuaaucugaagaauauua

SEQ ID NO: 2679049 - RNA, 19 nt, Artificial Sequence
  Description of Artificial Sequence: Synthetic oligonucleotide
auauaaauuacaacagugc

SEQ ID NO: 2679050 - RNA, 19 nt, Artificial Sequence
  Description of Artificial Sequence: Synthetic oligonucleotide
uuaauugcuggcaagaguc

SEQ ID NO: 2679051 - RNA, 19 nt, Artificial Sequence
  Description of Artificial Sequence: Synthetic oligonucleotide
aaaauauuuguuccaccuc

SEQ ID NO: 2679052 - RNA, 19 nt, Artificial Sequence
  Description of Artificial Sequence: Synthetic oligonucleotide
acuaucuucagauauaaau

SEQ ID NO: 2679053 - RNA, 19 nt, Artificial Sequence
  Description of Artificial Sequence: Synthetic oligonucleotide
acaagcagcgaauucaaac

SEQ ID NO: 2679054 - RNA, 19 nt, Artificial Sequence
  Description of Artificial Sequence: Synthetic oligonucleotide
uaaaauauuuguuccaccu

SEQ ID NO: 2679055 - RNA, 19 nt, Artificial Sequence
  Description of Artificial Sequence: Synthetic oligonucleotide
uuucuuuuaagucaccccu

SEQ ID NO: 2679056 - RNA, 19 nt, Artificial Sequence
  Description of Artificial Sequence: Synthetic oligonucleotide
aauuacaacagugcagaac

SEQ ID NO: 2679057 - RNA, 19 nt, Artificial Sequence
  Description of Artificial Sequence: Synthetic oligonucleotide
uuuuaagucaccccugccc

SEQ ID NO: 2679058 - RNA, 19 nt, Artificial Sequence
  Description of Artificial Sequence: Synthetic oligonucleotide
uagaggaacguccagaaga

SEQ ID NO: 2679059 - RNA, 19 nt, Artificial Sequence
  Description of Artificial Sequence: Synthetic oligonucleotide
uugagaauuaggagcaggg

SEQ ID NO: 2679060 - RNA, 19 nt, Artificial Sequence
  Description of Artificial Sequence: Synthetic oligonucleotide
aagaauauuauuagggucu

SEQ ID NO: 2679061 - RNA, 19 nt, Artificial Sequence
  Description of Artificial Sequence: Synthetic oligonucleotide
aacaccgcggcacacaguc

SEQ ID NO: 2679062 - RNA, 19 nt, Artificial Sequence
  Description of Artificial Sequence: Synthetic oligonucleotide
gagaauuaggagcagggag

SEQ ID NO: 2679063 - RNA, 19 nt, Artificial Sequence
  Description of Artificial Sequence: Synthetic oligonucleotide
auuucaguagacgugcacc

SEQ ID NO: 2679064 - RNA, 19 nt, Artificial Sequence
  Description of Artificial Sequence: Synthetic oligonucleotide
ucacacuucauuuaaucug

SEQ ID NO: 2679065 - RNA, 19 nt, Artificial Sequence
  Description of Artificial Sequence: Synthetic oligonucleotide
uauuauuagggucucacua

SEQ ID NO: 2679066 - RNA, 19 nt, Artificial Sequence
  Description of Artificial Sequence: Synthetic oligonucleotide
agcgcugacacugaggucc

SEQ ID NO: 2679067 - RNA, 19 nt, Artificial Sequence
  Description of Artificial Sequence: Synthetic oligonucleotide
ucuucagauauaaauuaca

SEQ ID NO: 2679068 - RNA, 19 nt, Artificial Sequence
  Description of Artificial Sequence: Synthetic oligonucleotide
cagauauaaauuacaacag

SEQ ID NO: 2679069 - RNA, 19 nt, Artificial Sequence
  Description of Artificial Sequence: Synthetic oligonucleotide
aucugaagaauauuauuag

SEQ ID NO: 2679070 - RNA, 19 nt, Artificial Sequence
  Description of Artificial Sequence: Synthetic oligonucleotide
ucauuuaaucugaagaaua

SEQ ID NO: 2679071 - RNA, 19 nt, Artificial Sequence
  Description of Artificial Sequence: Synthetic oligonucleotide
uuaaaauauuuguuccacc

SEQ ID NO: 2679072 - RNA, 19 nt, Artificial Sequence
  Description of Artificial Sequence: Synthetic oligonucleotide
acaacagugcagaacaagc

SEQ ID NO: 2679073 - RNA, 19 nt, Artificial Sequence
  Description of Artificial Sequence: Synthetic oligonucleotide
gacagcagaaagcggaacg

SEQ ID NO: 2679074 - RNA, 19 nt, Artificial Sequence
  Description of Artificial Sequence: Synthetic oligonucleotide
uaucuucagauauaaauua

SEQ ID NO: 2679075 - RNA, 19 nt, Artificial Sequence
  Description of Artificial Sequence: Synthetic oligonucleotide
uuuaagucaccccugcccu

SEQ ID NO: 2679076 - RNA, 19 nt, Artificial Sequence
  Description of Artificial Sequence: Synthetic oligonucleotide
aaagcggaacguuccgcgc

SEQ ID NO: 2679077 - RNA, 19 nt, Artificial Sequence
  Description of Artificial Sequence: Synthetic oligonucleotide
gaaagcggaacguuccgcg

SEQ ID NO: 2679078 - RNA, 19 nt, Artificial Sequence
  Description of Artificial Sequence: Synthetic oligonucleotide
uucagauauaaauuacaac

SEQ ID NO: 2679079 - RNA, 19 nt, Artificial Sequence
  Description of Artificial Sequence: Synthetic oligonucleotide
aguaaucaaggaccgcggc

SEQ ID NO: 2679080 - RNA, 19 nt, Artificial Sequence
  Description of Artificial Sequence: Synthetic oligonucleotide
agaagaugaagccguagag

SEQ ID NO: 2679081 - RNA, 19 nt, Artificial Sequence
  Description of Artificial Sequence: Synthetic oligonucleotide
aagcggaacguuccgcgcc

SEQ ID NO: 2679082 - RNA, 19 nt, Artificial Sequence
  Description of Artificial Sequence: Synthetic oligonucleotide
uuugagaauuaggagcagg

SEQ ID NO: 2679083 - RNA, 19 nt, Artificial Sequence
  Description of Artificial Sequence: Synthetic oligonucleotide
ucuuuuaagucaccccugc

SEQ ID NO: 2679084 - RNA, 19 nt, Artificial Sequence
  Description of Artificial Sequence: Synthetic oligonucleotide
gauaaggugucacacuuca

SEQ ID NO: 2679085 - RNA, 19 nt, Artificial Sequence
  Description of Artificial Sequence: Synthetic oligonucleotide
auuaggagcagggagagca

SEQ ID NO: 2679086 - RNA, 19 nt, Artificial Sequence
  Description of Artificial Sequence: Synthetic oligonucleotide
ucuucgugacuuaaaauau

SEQ ID NO: 2679087 - RNA, 19 nt, Artificial Sequence
  Description of Artificial Sequence: Synthetic oligonucleotide
uucucgaggccucaacgcg

SEQ ID NO: 2679088 - RNA, 19 nt, Artificial Sequence
  Description of Artificial Sequence: Synthetic oligonucleotide
ugaacggcggcccuucccg

SEQ ID NO: 2679089 - RNA, 19 nt, Artificial Sequence
  Description of Artificial Sequence: Synthetic oligonucleotide
ucccguuuggccaccaccg

SEQ ID NO: 2679090 - RNA, 19 nt, Artificial Sequence
  Description of Artificial Sequence: Synthetic oligonucleotide
gacggaggcaagcagguag

SEQ ID NO: 2679091 - RNA, 19 nt, Artificial Sequence
  Description of Artificial Sequence: Synthetic oligonucleotide
agaacaagcagcgaauuca

SEQ ID NO: 2679092 - RNA, 19 nt, Artificial Sequence
  Description of Artificial Sequence: Synthetic oligonucleotide
guaaucaaggaccgcggcg

SEQ ID NO: 2679093 - RNA, 19 nt, Artificial Sequence
  Description of Artificial Sequence: Synthetic oligonucleotide
auuauuagggucucacuau

SEQ ID NO: 2679094 - RNA, 19 nt, Artificial Sequence
  Description of Artificial Sequence: Synthetic oligonucleotide
uaaggugucacacuucauu

SEQ ID NO: 2679095 - RNA, 19 nt, Artificial Sequence
  Description of Artificial Sequence: Synthetic oligonucleotide
agcgaauucaaacaauuua

SEQ ID NO: 2679096 - RNA, 19 nt, Artificial Sequence
  Description of Artificial Sequence: Synthetic oligonucleotide
uuucaguagacgugcacca

SEQ ID NO: 2679097 - RNA, 19 nt, Artificial Sequence
  Description of Artificial Sequence: Synthetic oligonucleotide
cucauuucaguagacgugc

SEQ ID NO: 2679098 - RNA, 19 nt, Artificial Sequence
  Description of Artificial Sequence: Synthetic oligonucleotide
uauuuguuccaccuccuuc

SEQ ID NO: 2679099 - RNA, 19 nt, Artificial Sequence
  Description of Artificial Sequence: Synthetic oligonucleotide
uucgugacuuaaaauauuu

SEQ ID NO: 2679100 - RNA, 19 nt, Artificial Sequence
  Description of Artificial Sequence: Synthetic oligonucleotide
acagcgcugacacugaggu

SEQ ID NO: 2679101 - RNA, 19 nt, Artificial Sequence
  Description of Artificial Sequence: Synthetic oligonucleotide
ugucacacuucauuuaauc

SEQ ID NO: 2679102 - RNA, 19 nt, Artificial Sequence
  Description of Artificial Sequence: Synthetic oligonucleotide
cuucauuuaaucugaagaa

SEQ ID NO: 2679103 - RNA, 19 nt, Artificial Sequence
  Description of Artificial Sequence: Synthetic oligonucleotide
uguuccaccuccuucccgc

SEQ ID NO: 2679104 - RNA, 19 nt, Artificial Sequence
  Description of Artificial Sequence: Synthetic oligonucleotide
ucuacacgguguuaauugc

SEQ ID NO: 2679105 - RNA, 19 nt, Artificial Sequence
  Description of Artificial Sequence: Synthetic oligonucleotide
aaggugucacacuucauuu

SEQ ID NO: 2679106 - RNA, 19 nt, Artificial Sequence
  Description of Artificial Sequence: Synthetic oligonucleotide
uacacgguguuaauugcug

SEQ ID NO: 2679107 - RNA, 19 nt, Artificial Sequence
  Description of Artificial Sequence: Synthetic oligonucleotide
ucccucagacagcagaaag

SEQ ID NO: 2679108 - RNA, 19 nt, Artificial Sequence
  Description of Artificial Sequence: Synthetic oligonucleotide
ucaguagacgugcaccaug

SEQ ID NO: 2679109 - RNA, 19 nt, Artificial Sequence
  Description of Artificial Sequence: Synthetic oligonucleotide
cagugcagaacaagcagcg

SEQ ID NO: 2679110 - RNA, 19 nt, Artificial Sequence
  Description of Artificial Sequence: Synthetic oligonucleotide
uucuuuuaagucaccccug

SEQ ID NO: 2679111 - RNA, 19 nt, Artificial Sequence
  Description of Artificial Sequence: Synthetic oligonucleotide
aucuucagauauaaauuac

SEQ ID NO: 2679112 - RNA, 19 nt, Artificial Sequence
  Description of Artificial Sequence: Synthetic oligonucleotide
uuauuagggucucacuauc

SEQ ID NO: 2679113 - RNA, 19 nt, Artificial Sequence
  Description of Artificial Sequence: Synthetic oligonucleotide
aaagaggucuucgugacuu

SEQ ID NO: 2679114 - RNA, 19 nt, Artificial Sequence
  Description of Artificial Sequence: Synthetic oligonucleotide
uguuaauugcuggcaagag

SEQ ID NO: 2679115 - RNA, 19 nt, Artificial Sequence
  Description of Artificial Sequence: Synthetic oligonucleotide
gucuucgugacuuaaaaua

SEQ ID NO: 2679116 - RNA, 19 nt, Artificial Sequence
  Description of Artificial Sequence: Synthetic oligonucleotide
uccggcaguaaucaaggac

SEQ ID NO: 2679117 - RNA, 19 nt, Artificial Sequence
  Description of Artificial Sequence: Synthetic oligonucleotide
uagacgugcaccaugccau

SEQ ID NO: 2679118 - RNA, 19 nt, Artificial Sequence
  Description of Artificial Sequence: Synthetic oligonucleotide
gaauuaggagcagggagag

SEQ ID NO: 2679119 - RNA, 19 nt, Artificial Sequence
  Description of Artificial Sequence: Synthetic oligonucleotide
ucaacgcggaacuggaaca

SEQ ID NO: 2679120 - RNA, 19 nt, Artificial Sequence
  Description of Artificial Sequence: Synthetic oligonucleotide
ucgugacuuaaaauauuug

SEQ ID NO: 2679121 - RNA, 19 nt, Artificial Sequence
  Description of Artificial Sequence: Synthetic oligonucleotide
ucucgaggccucaacgcgg

SEQ ID NO: 2679122 - RNA, 19 nt, Artificial Sequence
  Description of Artificial Sequence: Synthetic oligonucleotide
gaggacguaggugaagagg

SEQ ID NO: 2679123 - RNA, 19 nt, Artificial Sequence
  Description of Artificial Sequence: Synthetic oligonucleotide
uauuagggucucacuaucu

SEQ ID NO: 2679124 - RNA, 19 nt, Artificial Sequence
  Description of Artificial Sequence: Synthetic oligonucleotide
agaauauuauuagggucuc

SEQ ID NO: 2679125 - RNA, 19 nt, Artificial Sequence
  Description of Artificial Sequence: Synthetic oligonucleotide
uaauugcuggcaagagucc

SEQ ID NO: 2679126 - RNA, 19 nt, Artificial Sequence
  Description of Artificial Sequence: Synthetic oligonucleotide
cuucagauauaaauuacaa

SEQ ID NO: 2679127 - RNA, 19 nt, Artificial Sequence
  Description of Artificial Sequence: Synthetic oligonucleotide
uaaucaaggaccgcggcgu

SEQ ID NO: 2679128 - RNA, 19 nt, Artificial Sequence
  Description of Artificial Sequence: Synthetic oligonucleotide
aagaggacguaggugaaga

SEQ ID NO: 2679129 - RNA, 19 nt, Artificial Sequence
  Description of Artificial Sequence: Synthetic oligonucleotide
caagcagcgaauucaaaca

SEQ ID NO: 2679130 - RNA, 19 nt, Artificial Sequence
  Description of Artificial Sequence: Synthetic oligonucleotide
aagcagcgaauucaaacaa

SEQ ID NO: 2679131 - RNA, 19 nt, Artificial Sequence
  Description of Artificial Sequence: Synthetic oligonucleotide
agaauuaggagcagggaga

SEQ ID NO: 2679132 - RNA, 19 nt, Artificial Sequence
  Description of Artificial Sequence: Synthetic oligonucleotide
gaacguccagaagaggacg

SEQ ID NO: 2679133 - RNA, 19 nt, Artificial Sequence
  Description of Artificial Sequence: Synthetic oligonucleotide
guagaggccggugaggccg

SEQ ID NO: 2679134 - RNA, 19 nt, Artificial Sequence
  Description of Artificial Sequence: Synthetic oligonucleotide
aaguaagucuacacggugu

SEQ ID NO: 2679135 - RNA, 19 nt, Artificial Sequence
  Description of Artificial Sequence: Synthetic oligonucleotide
ucccgcuuugagaauuagg

SEQ ID NO: 2679136 - RNA, 19 nt, Artificial Sequence
  Description of Artificial Sequence: Synthetic oligonucleotide
aauuaggagcagggagagc

SEQ ID NO: 2679137 - RNA, 19 nt, Artificial Sequence
  Description of Artificial Sequence: Synthetic oligonucleotide
agaaagcggaacguuccgc

SEQ ID NO: 2679138 - RNA, 19 nt, Artificial Sequence
  Description of Artificial Sequence: Synthetic oligonucleotide
cuucucgaggccucaacgc

SEQ ID NO: 2679139 - RNA, 19 nt, Artificial Sequence
  Description of Artificial Sequence: Synthetic oligonucleotide
gcaguaaucaaggaccgcg

SEQ ID NO: 2679140 - RNA, 19 nt, Artificial Sequence
  Description of Artificial Sequence: Synthetic oligonucleotide
caguaaucaaggaccgcgg

SEQ ID NO: 2679141 - RNA, 19 nt, Artificial Sequence
  Description of Artificial Sequence: Synthetic oligonucleotide
aaaagaggucuucgugacu

SEQ ID NO: 2679142 - RNA, 19 nt, Artificial Sequence
  Description of Artificial Sequence: Synthetic oligonucleotide
cacacuucauuuaaucuga

SEQ ID NO: 2679143 - RNA, 19 nt, Artificial Sequence
  Description of Artificial Sequence: Synthetic oligonucleotide
ugacacugagguccggcag

SEQ ID NO: 2679144 - RNA, 19 nt, Artificial Sequence
  Description of Artificial Sequence: Synthetic oligonucleotide
caguagacgugcaccaugc

SEQ ID NO: 2679145 - RNA, 19 nt, Artificial Sequence
  Description of Artificial Sequence: Synthetic oligonucleotide
aacgcggaacuggaacacc

SEQ ID NO: 2679146 - RNA, 19 nt, Artificial Sequence
  Description of Artificial Sequence: Synthetic oligonucleotide
ugcagaacaagcagcgaau

SEQ ID NO: 2679147 - RNA, 19 nt, Artificial Sequence
  Description of Artificial Sequence: Synthetic oligonucleotide
ccggcaguaaucaaggacc

SEQ ID NO: 2679148 - RNA, 19 nt, Artificial Sequence
  Description of Artificial Sequence: Synthetic oligonucleotide
aauugcuggcaagaguccu

SEQ ID NO: 2679149 - RNA, 19 nt, Artificial Sequence
  Description of Artificial Sequence: Synthetic oligonucleotide
aguagacgugcaccaugcc

SEQ ID NO: 2679150 - RNA, 19 nt, Artificial Sequence
  Description of Artificial Sequence: Synthetic oligonucleotide
cucaacgcggaacuggaac

SEQ ID NO: 2679151 - RNA, 19 nt, Artificial Sequence
  Description of Artificial Sequence: Synthetic oligonucleotide
caggacggaggcaagcagg

SEQ ID NO: 2679152 - RNA, 19 nt, Artificial Sequence
  Description of Artificial Sequence: Synthetic oligonucleotide
uucccguuuggccaccacc

SEQ ID NO: 2679153 - RNA, 19 nt, Artificial Sequence
  Description of Artificial Sequence: Synthetic oligonucleotide
gcagguagaagaugaagcc

SEQ ID NO: 2679154 - RNA, 19 nt, Artificial Sequence
  Description of Artificial Sequence: Synthetic oligonucleotide
augaacggcggcccuuccc

SEQ ID NO: 2679155 - RNA, 19 nt, Artificial Sequence
  Description of Artificial Sequence: Synthetic oligonucleotide
ugagaauuaggagcaggga

SEQ ID NO: 2679156 - RNA, 19 nt, Artificial Sequence
  Description of Artificial Sequence: Synthetic oligonucleotide
ugccauagaggaacgucca

SEQ ID NO: 2679157 - RNA, 19 nt, Artificial Sequence
  Description of Artificial Sequence: Synthetic oligonucleotide
cacgguguuaauugcuggc

SEQ ID NO: 2679158 - RNA, 19 nt, Artificial Sequence
  Description of Artificial Sequence: Synthetic oligonucleotide
cacuucauuuaaucugaag

SEQ ID NO: 2679159 - RNA, 19 nt, Artificial Sequence
  Description of Artificial Sequence: Synthetic oligonucleotide
auagaggaacguccagaag

SEQ ID NO: 2679160 - RNA, 19 nt, Artificial Sequence
  Description of Artificial Sequence: Synthetic oligonucleotide
uccgcuucugccuucucga

SEQ ID NO: 2679161 - RNA, 19 nt, Artificial Sequence
  Description of Artificial Sequence: Synthetic oligonucleotide
cuuuuaagucaccccugcc

SEQ ID NO: 2679162 - RNA, 19 nt, Artificial Sequence
  Description of Artificial Sequence: Synthetic oligonucleotide
ugagguccggcaguaauca

SEQ ID NO: 2679163 - RNA, 19 nt, Artificial Sequence
  Description of Artificial Sequence: Synthetic oligonucleotide
agcagaaagcggaacguuc

SEQ ID NO: 2679164 - RNA, 19 nt, Artificial Sequence
  Description of Artificial Sequence: Synthetic oligonucleotide
aguaagucuacacgguguu

SEQ ID NO: 2679165 - RNA, 19 nt, Artificial Sequence
  Description of Artificial Sequence: Synthetic oligonucleotide
uucgcugaugaacggcggc

SEQ ID NO: 2679166 - RNA, 19 nt, Artificial Sequence
  Description of Artificial Sequence: Synthetic oligonucleotide
agcagggagagcaggacgg

SEQ ID NO: 2679167 - RNA, 19 nt, Artificial Sequence
  Description of Artificial Sequence: Synthetic oligonucleotide
caccaugccauagaggaac

SEQ ID NO: 2679168 - RNA, 19 nt, Artificial Sequence
  Description of Artificial Sequence: Synthetic oligonucleotide
agaggaacguccagaagag

SEQ ID NO: 2679169 - RNA, 19 nt, Artificial Sequence
  Description of Artificial Sequence: Synthetic oligonucleotide
gcugcuucgcugaugaacg

SEQ ID NO: 2679170 - RNA, 19 nt, Artificial Sequence
  Description of Artificial Sequence: Synthetic oligonucleotide
gacguaggugaagaggccc

SEQ ID NO: 2679171 - RNA, 19 nt, Artificial Sequence
  Description of Artificial Sequence: Synthetic oligonucleotide
agguagaagaugaagccgu

SEQ ID NO: 2679172 - RNA, 19 nt, Artificial Sequence
  Description of Artificial Sequence: Synthetic oligonucleotide
aagccguagaggccgguga

SEQ ID NO: 2679173 - RNA, 19 nt, Artificial Sequence
  Description of Artificial Sequence: Synthetic oligonucleotide
gaggaugccggcuguggcc

SEQ ID NO: 2679174 - RNA, 19 nt, Artificial Sequence
  Description of Artificial Sequence: Synthetic oligonucleotide
aggucuucgugacuuaaaa

SEQ ID NO: 2679175 - RNA, 19 nt, Artificial Sequence
  Description of Artificial Sequence: Synthetic oligonucleotide
guagacgugcaccaugcca

SEQ ID NO: 2679176 - RNA, 19 nt, Artificial Sequence
  Description of Artificial Sequence: Synthetic oligonucleotide
gguguuaauugcuggcaag

SEQ ID NO: 2679177 - RNA, 19 nt, Artificial Sequence
  Description of Artificial Sequence: Synthetic oligonucleotide
cucagacagcagaaagcgg

SEQ ID NO: 2679178 - RNA, 19 nt, Artificial Sequence
  Description of Artificial Sequence: Synthetic oligonucleotide
cuaucuucagauauaaauu

SEQ ID NO: 2679179 - RNA, 19 nt, Artificial Sequence
  Description of Artificial Sequence: Synthetic oligonucleotide
aggaugccggcuguggccc

SEQ ID NO: 2679180 - RNA, 19 nt, Artificial Sequence
  Description of Artificial Sequence: Synthetic oligonucleotide
acggcugcuucgcugauga

SEQ ID NO: 2679181 - RNA, 19 nt, Artificial Sequence
  Description of Artificial Sequence: Synthetic oligonucleotide
ucaaggaccgcggcguugc

SEQ ID NO: 2679182 - RNA, 19 nt, Artificial Sequence
  Description of Artificial Sequence: Synthetic oligonucleotide
cauuucaguagacgugcac

SEQ ID NO: 2679183 - RNA, 19 nt, Artificial Sequence
  Description of Artificial Sequence: Synthetic oligonucleotide
cauagaggaacguccagaa

SEQ ID NO: 2679184 - RNA, 19 nt, Artificial Sequence
  Description of Artificial Sequence: Synthetic oligonucleotide
auuuaaucugaagaauauu

SEQ ID NO: 2679185 - RNA, 19 nt, Artificial Sequence
  Description of Artificial Sequence: Synthetic oligonucleotide
cagaaagcggaacguuccg

SEQ ID NO: 2679186 - RNA, 19 nt, Artificial Sequence
  Description of Artificial Sequence: Synthetic oligonucleotide
gaugaggccuccuguaaaa

SEQ ID NO: 2679187 - RNA, 19 nt, Artificial Sequence
  Description of Artificial Sequence: Synthetic oligonucleotide
acguaggugaagaggcccc

SEQ ID NO: 2679188 - RNA, 19 nt, Artificial Sequence
  Description of Artificial Sequence: Synthetic oligonucleotide
ccucagacagcagaaagcg

SEQ ID NO: 2679189 - RNA, 19 nt, Artificial Sequence
  Description of Artificial Sequence: Synthetic oligonucleotide
caacagugcagaacaagca

SEQ ID NO: 2679190 - RNA, 19 nt, Artificial Sequence
  Description of Artificial Sequence: Synthetic oligonucleotide
guagaagaugaagccguag

SEQ ID NO: 2679191 - RNA, 19 nt, Artificial Sequence
  Description of Artificial Sequence: Synthetic oligonucleotide
aagucuacacgguguuaau

SEQ ID NO: 2679192 - RNA, 19 nt, Artificial Sequence
  Description of Artificial Sequence: Synthetic oligonucleotide
caugccauagaggaacguc

SEQ ID NO: 2679193 - RNA, 19 nt, Artificial Sequence
  Description of Artificial Sequence: Synthetic oligonucleotide
cuucgcugaugaacggcgg

SEQ ID NO: 2679194 - RNA, 19 nt, Artificial Sequence
  Description of Artificial Sequence: Synthetic oligonucleotide
agaggacguaggugaagag

SEQ ID NO: 2679195 - RNA, 19 nt, Artificial Sequence
  Description of Artificial Sequence: Synthetic oligonucleotide
agcggaacguuccgcgccg

SEQ ID NO: 2679196 - RNA, 19 nt, Artificial Sequence
  Description of Artificial Sequence: Synthetic oligonucleotide
cuccgcuucugccuucucg

SEQ ID NO: 2679197 - RNA, 19 nt, Artificial Sequence
  Description of Artificial Sequence: Synthetic oligonucleotide
guuaauugcuggcaagagu

SEQ ID NO: 2679198 - RNA, 19 nt, Artificial Sequence
  Description of Artificial Sequence: Synthetic oligonucleotide
gaagaggacguaggugaag

SEQ ID NO: 2679199 - RNA, 19 nt, Artificial Sequence
  Description of Artificial Sequence: Synthetic oligonucleotide
accuccuucccgcuuugag

SEQ ID NO: 2679200 - RNA, 19 nt, Artificial Sequence
  Description of Artificial Sequence: Synthetic oligonucleotide
cauuuaaucugaagaauau

SEQ ID NO: 2679201 - RNA, 19 nt, Artificial Sequence
  Description of Artificial Sequence: Synthetic oligonucleotide
uuacaacagugcagaacaa

SEQ ID NO: 2679202 - RNA, 19 nt, Artificial Sequence
  Description of Artificial Sequence: Synthetic oligonucleotide
guccagaagaggacguagg

SEQ ID NO: 2679203 - RNA, 19 nt, Artificial Sequence
  Description of Artificial Sequence: Synthetic oligonucleotide
uaagucaccccugcccuca

SEQ ID NO: 2679204 - RNA, 19 nt, Artificial Sequence
  Description of Artificial Sequence: Synthetic oligonucleotide
gucacacuucauuuaaucu

SEQ ID NO: 2679205 - RNA, 19 nt, Artificial Sequence
  Description of Artificial Sequence: Synthetic oligonucleotide
gugcagaacaagcagcgaa

SEQ ID NO: 2679206 - RNA, 19 nt, Artificial Sequence
  Description of Artificial Sequence: Synthetic oligonucleotide
agacagcagaaagcggaac

SEQ ID NO: 2679207 - RNA, 19 nt, Artificial Sequence
  Description of Artificial Sequence: Synthetic oligonucleotide
caccgcggcacacaguccc

SEQ ID NO: 2679208 - RNA, 19 nt, Artificial Sequence
  Description of Artificial Sequence: Synthetic oligonucleotide
gacagcgcugacacugagg

SEQ ID NO: 2679209 - RNA, 19 nt, Artificial Sequence
  Description of Artificial Sequence: Synthetic oligonucleotide
acagcagaaagcggaacgu

SEQ ID NO: 2679210 - RNA, 19 nt, Artificial Sequence
  Description of Artificial Sequence: Synthetic oligonucleotide
gguccggcaguaaucaagg

SEQ ID NO: 2679211 - RNA, 19 nt, Artificial Sequence
  Description of Artificial Sequence: Synthetic oligonucleotide
gcuuugagaauuaggagca

SEQ ID NO: 2679212 - RNA, 19 nt, Artificial Sequence
  Description of Artificial Sequence: Synthetic oligonucleotide
cagaacaagcagcgaauuc

SEQ ID NO: 2679213 - RNA, 19 nt, Artificial Sequence
  Description of Artificial Sequence: Synthetic oligonucleotide
ucguacggcugcuucgcug

SEQ ID NO: 2679214 - RNA, 19 nt, Artificial Sequence
  Description of Artificial Sequence: Synthetic oligonucleotide
accaccgcggccaucgcac

SEQ ID NO: 2679215 - RNA, 19 nt, Artificial Sequence
  Description of Artificial Sequence: Synthetic oligonucleotide
ucugccuucucgaggccuc

SEQ ID NO: 2679216 - RNA, 19 nt, Artificial Sequence
  Description of Artificial Sequence: Synthetic oligonucleotide
agguccggcaguaaucaag

SEQ ID NO: 2679217 - RNA, 19 nt, Artificial Sequence
  Description of Artificial Sequence: Synthetic oligonucleotide
guguuaauugcuggcaaga

SEQ ID NO: 2679218 - RNA, 19 nt, Artificial Sequence
  Description of Artificial Sequence: Synthetic oligonucleotide
ugcuucgcugaugaacggc

SEQ ID NO: 2679219 - RNA, 19 nt, Artificial Sequence
  Description of Artificial Sequence: Synthetic oligonucleotide
aacguccagaagaggacgu

SEQ ID NO: 2679220 - RNA, 19 nt, Artificial Sequence
  Description of Artificial Sequence: Synthetic oligonucleotide
gcgaauucaaacaauuuaa

SEQ ID NO: 2679221 - RNA, 19 nt, Artificial Sequence
  Description of Artificial Sequence: Synthetic oligonucleotide
cuaaguaagucuacacggu

SEQ ID NO: 2679222 - RNA, 19 nt, Artificial Sequence
  Description of Artificial Sequence: Synthetic oligonucleotide
acuggaacaccgcggcaca

SEQ ID NO: 2679223 - RNA, 19 nt, Artificial Sequence
  Description of Artificial Sequence: Synthetic oligonucleotide
agccguagaggccggugag

SEQ ID NO: 2679224 - RNA, 19 nt, Artificial Sequence
  Description of Artificial Sequence: Synthetic oligonucleotide
acgcggaacuggaacaccg

SEQ ID NO: 2679225 - RNA, 19 nt, Artificial Sequence
  Description of Artificial Sequence: Synthetic oligonucleotide
gaggaacguccagaagagg

SEQ ID NO: 2679226 - RNA, 19 nt, Artificial Sequence
  Description of Artificial Sequence: Synthetic oligonucleotide
aacguuccgcgccgccauc

SEQ ID NO: 2679227 - RNA, 19 nt, Artificial Sequence
  Description of Artificial Sequence: Synthetic oligonucleotide
ccucauuucaguagacgug

SEQ ID NO: 2679228 - RNA, 19 nt, Artificial Sequence
  Description of Artificial Sequence: Synthetic oligonucleotide
ggugucacacuucauuuaa

SEQ ID NO: 2679229 - RNA, 19 nt, Artificial Sequence
  Description of Artificial Sequence: Synthetic oligonucleotide
acgguguuaauugcuggca

SEQ ID NO: 2679230 - RNA, 19 nt, Artificial Sequence
  Description of Artificial Sequence: Synthetic oligonucleotide
gcuucgcugaugaacggcg

SEQ ID NO: 2679231 - RNA, 19 nt, Artificial Sequence
  Description of Artificial Sequence: Synthetic oligonucleotide
gcaagcagguagaagauga

SEQ ID NO: 2679232 - RNA, 19 nt, Artificial Sequence
  Description of Artificial Sequence: Synthetic oligonucleotide
uuaagucaccccugcccuc

SEQ ID NO: 2679233 - RNA, 19 nt, Artificial Sequence
  Description of Artificial Sequence: Synthetic oligonucleotide
ggaacaccgcggcacacag

SEQ ID NO: 2679234 - RNA, 19 nt, Artificial Sequence
  Description of Artificial Sequence: Synthetic oligonucleotide
ccuucucgaggccucaacg

SEQ ID NO: 2679235 - RNA, 19 nt, Artificial Sequence
  Description of Artificial Sequence: Synthetic oligonucleotide
gcagaaagcggaacguucc

SEQ ID NO: 2679236 - RNA, 19 nt, Artificial Sequence
  Description of Artificial Sequence: Synthetic oligonucleotide
cuuugagaauuaggagcag

SEQ ID NO: 2679237 - RNA, 19 nt, Artificial Sequence
  Description of Artificial Sequence: Synthetic oligonucleotide
gaauauuauuagggucuca

SEQ ID NO: 2679238 - RNA, 19 nt, Artificial Sequence
  Description of Artificial Sequence: Synthetic oligonucleotide
aggccggugaggccgagga

SEQ ID NO: 2679239 - RNA, 19 nt, Artificial Sequence
  Description of Artificial Sequence: Synthetic oligonucleotide
gaggccucaacgcggaacu

SEQ ID NO: 2679240 - RNA, 19 nt, Artificial Sequence
  Description of Artificial Sequence: Synthetic oligonucleotide
ggugaggccgaggaugccg

SEQ ID NO: 2679241 - RNA, 19 nt, Artificial Sequence
  Description of Artificial Sequence: Synthetic oligonucleotide
ggucucacuaucuucagau

SEQ ID NO: 2679242 - RNA, 19 nt, Artificial Sequence
  Description of Artificial Sequence: Synthetic oligonucleotide
aaucaaggaccgcggcguu

SEQ ID NO: 2679243 - RNA, 19 nt, Artificial Sequence
  Description of Artificial Sequence: Synthetic oligonucleotide
aggugucacacuucauuua

SEQ ID NO: 2679244 - RNA, 19 nt, Artificial Sequence
  Description of Artificial Sequence: Synthetic oligonucleotide
acgugcaccaugccauaga

SEQ ID NO: 2679245 - RNA, 19 nt, Artificial Sequence
  Description of Artificial Sequence: Synthetic oligonucleotide
cugcuucgcugaugaacgg

SEQ ID NO: 2679246 - RNA, 19 nt, Artificial Sequence
  Description of Artificial Sequence: Synthetic oligonucleotide
uggaacaccgcggcacaca

SEQ ID NO: 2679247 - RNA, 19 nt, Artificial Sequence
  Description of Artificial Sequence: Synthetic oligonucleotide
gacgugcaccaugccauag

SEQ ID NO: 2679248 - RNA, 19 nt, Artificial Sequence
  Description of Artificial Sequence: Synthetic oligonucleotide
aagaggucuucgugacuua

SEQ ID NO: 2679249 - RNA, 19 nt, Artificial Sequence
  Description of Artificial Sequence: Synthetic oligonucleotide
ugccucguacggcugcuuc

SEQ ID NO: 2679250 - RNA, 19 nt, Artificial Sequence
  Description of Artificial Sequence: Synthetic oligonucleotide
ugaugaacggcggcccuuc

SEQ ID NO: 2679251 - RNA, 19 nt, Artificial Sequence
  Description of Artificial Sequence: Synthetic oligonucleotide
aggccgaggaugccggcug

SEQ ID NO: 2679252 - RNA, 19 nt, Artificial Sequence
  Description of Artificial Sequence: Synthetic oligonucleotide
gaugaacggcggcccuucc

SEQ ID NO: 2679253 - RNA, 19 nt, Artificial Sequence
  Description of Artificial Sequence: Synthetic oligonucleotide
ugcccucauuucaguagac

SEQ ID NO: 2679254 - RNA, 19 nt, Artificial Sequence
  Description of Artificial Sequence: Synthetic oligonucleotide
gacacugagguccggcagu

SEQ ID NO: 2679255 - RNA, 19 nt, Artificial Sequence
  Description of Artificial Sequence: Synthetic oligonucleotide
ggcacacagucccucgugc

SEQ ID NO: 2679256 - RNA, 19 nt, Artificial Sequence
  Description of Artificial Sequence: Synthetic oligonucleotide
aacaagcagcgaauucaaa

SEQ ID NO: 2679257 - RNA, 19 nt, Artificial Sequence
  Description of Artificial Sequence: Synthetic oligonucleotide
cugcccucauuucaguaga

SEQ ID NO: 2679258 - RNA, 19 nt, Artificial Sequence
  Description of Artificial Sequence: Synthetic oligonucleotide
uucccgcuuugagaauuag

SEQ ID NO: 2679259 - RNA, 19 nt, Artificial Sequence
  Description of Artificial Sequence: Synthetic oligonucleotide
ccgcuuugagaauuaggag

SEQ ID NO: 2679260 - RNA, 19 nt, Artificial Sequence
  Description of Artificial Sequence: Synthetic oligonucleotide
agucuacacgguguuaauu

SEQ ID NO: 2679261 - RNA, 19 nt, Artificial Sequence
  Description of Artificial Sequence: Synthetic oligonucleotide
gugcaccaugccauagagg

SEQ ID NO: 2679262 - RNA, 19 nt, Artificial Sequence
  Description of Artificial Sequence: Synthetic oligonucleotide
caacgcggaacuggaacac

SEQ ID NO: 2679263 - RNA, 19 nt, Artificial Sequence
  Description of Artificial Sequence: Synthetic oligonucleotide
uucaguagacgugcaccau

SEQ ID NO: 2679264 - RNA, 19 nt, Artificial Sequence
  Description of Artificial Sequence: Synthetic oligonucleotide
gcggccaucgcacccgccg

SEQ ID NO: 2679265 - RNA, 19 nt, Artificial Sequence
  Description of Artificial Sequence: Synthetic oligonucleotide
agugcagaacaagcagcga

SEQ ID NO: 2679266 - RNA, 19 nt, Artificial Sequence
  Description of Artificial Sequence: Synthetic oligonucleotide
ggccucaacgcggaacugg

SEQ ID NO: 2679267 - RNA, 19 nt, Artificial Sequence
  Description of Artificial Sequence: Synthetic oligonucleotide
cgugacuuaaaauauuugu

SEQ ID NO: 2679268 - RNA, 19 nt, Artificial Sequence
  Description of Artificial Sequence: Synthetic oligonucleotide
gcggcguugccucguacgg

SEQ ID NO: 2679269 - RNA, 19 nt, Artificial Sequence
  Description of Artificial Sequence: Synthetic oligonucleotide
aggacggaggcaagcaggu

SEQ ID NO: 2679270 - RNA, 19 nt, Artificial Sequence
  Description of Artificial Sequence: Synthetic oligonucleotide
cguuuggccaccaccgcgg

SEQ ID NO: 2679271 - RNA, 19 nt, Artificial Sequence
  Description of Artificial Sequence: Synthetic oligonucleotide
aaggaccgcggcguugccu

SEQ ID NO: 2679272 - RNA, 19 nt, Artificial Sequence
  Description of Artificial Sequence: Synthetic oligonucleotide
gccucguacggcugcuucg

SEQ ID NO: 2679273 - RNA, 19 nt, Artificial Sequence
  Description of Artificial Sequence: Synthetic oligonucleotide
agcagcgaauucaaacaau

SEQ ID NO: 2679274 - RNA, 19 nt, Artificial Sequence
  Description of Artificial Sequence: Synthetic oligonucleotide
guuuggccaccaccgcggc

SEQ ID NO: 2679275 - RNA, 19 nt, Artificial Sequence
  Description of Artificial Sequence: Synthetic oligonucleotide
agaggucuucgugacuuaa

SEQ ID NO: 2679276 - RNA, 19 nt, Artificial Sequence
  Description of Artificial Sequence: Synthetic oligonucleotide
cuacacgguguuaauugcu

SEQ ID NO: 2679277 - RNA, 19 nt, Artificial Sequence
  Description of Artificial Sequence: Synthetic oligonucleotide
accgcggccaucgcacccg

SEQ ID NO: 2679278 - RNA, 19 nt, Artificial Sequence
  Description of Artificial Sequence: Synthetic oligonucleotide
ucccucgugcucccucaga

SEQ ID NO: 2679279 - RNA, 19 nt, Artificial Sequence
  Description of Artificial Sequence: Synthetic oligonucleotide
ggcccuucccguuuggcca

SEQ ID NO: 2679280 - RNA, 19 nt, Artificial Sequence
  Description of Artificial Sequence: Synthetic oligonucleotide
aucaaggaccgcggcguug

SEQ ID NO: 2679281 - RNA, 19 nt, Artificial Sequence
  Description of Artificial Sequence: Synthetic oligonucleotide
ugcuggcaagaguccugcc

SEQ ID NO: 2679282 - RNA, 19 nt, Artificial Sequence
  Description of Artificial Sequence: Synthetic oligonucleotide
gcccucauuucaguagacg

SEQ ID NO: 2679283 - RNA, 19 nt, Artificial Sequence
  Description of Artificial Sequence: Synthetic oligonucleotide
gcaggacggaggcaagcag

SEQ ID NO: 2679284 - RNA, 19 nt, Artificial Sequence
  Description of Artificial Sequence: Synthetic oligonucleotide
accccugcccucauuucag

SEQ ID NO: 2679285 - RNA, 19 nt, Artificial Sequence
  Description of Artificial Sequence: Synthetic oligonucleotide
gccauagaggaacguccag

SEQ ID NO: 2679286 - RNA, 19 nt, Artificial Sequence
  Description of Artificial Sequence: Synthetic oligonucleotide
cggaacuggaacaccgcgg

SEQ ID NO: 2679287 - RNA, 19 nt, Artificial Sequence
  Description of Artificial Sequence: Synthetic oligonucleotide
ucaccccugcccucauuuc

SEQ ID NO: 2679288 - RNA, 19 nt, Artificial Sequence
  Description of Artificial Sequence: Synthetic oligonucleotide
uagaggccggugaggccga

SEQ ID NO: 2679289 - RNA, 19 nt, Artificial Sequence
  Description of Artificial Sequence: Synthetic oligonucleotide
guuccgcgccgccaucuug

SEQ ID NO: 2679290 - RNA, 19 nt, Artificial Sequence
  Description of Artificial Sequence: Synthetic oligonucleotide
aacggcggcccuucccguu

SEQ ID NO: 2679291 - RNA, 19 nt, Artificial Sequence
  Description of Artificial Sequence: Synthetic oligonucleotide
agaagaggacguaggugaa

SEQ ID NO: 2679292 - RNA, 19 nt, Artificial Sequence
  Description of Artificial Sequence: Synthetic oligonucleotide
ccguuuggccaccaccgcg

SEQ ID NO: 2679293 - RNA, 19 nt, Artificial Sequence
  Description of Artificial Sequence: Synthetic oligonucleotide
aucgcacccgccggggcuc

SEQ ID NO: 2679294 - RNA, 19 nt, Artificial Sequence
  Description of Artificial Sequence: Synthetic oligonucleotide
gccggugaggccgaggaug

SEQ ID NO: 2679295 - RNA, 19 nt, Artificial Sequence
  Description of Artificial Sequence: Synthetic oligonucleotide
acggaggcaagcagguaga

SEQ ID NO: 2679296 - RNA, 19 nt, Artificial Sequence
  Description of Artificial Sequence: Synthetic oligonucleotide
uacggcugcuucgcugaug

SEQ ID NO: 2679297 - RNA, 19 nt, Artificial Sequence
  Description of Artificial Sequence: Synthetic oligonucleotide
cucgaggccucaacgcgga

SEQ ID NO: 2679298 - RNA, 19 nt, Artificial Sequence
  Description of Artificial Sequence: Synthetic oligonucleotide
caccccugcccucauuuca

SEQ ID NO: 2679299 - RNA, 19 nt, Artificial Sequence
  Description of Artificial Sequence: Synthetic oligonucleotide
cgaauucaaacaauuuaaa

SEQ ID NO: 2679300 - RNA, 19 nt, Artificial Sequence
  Description of Artificial Sequence: Synthetic oligonucleotide
gaggucuucgugacuuaaa

SEQ ID NO: 2679301 - RNA, 19 nt, Artificial Sequence
  Description of Artificial Sequence: Synthetic oligonucleotide
cuucgugacuuaaaauauu

SEQ ID NO: 2679302 - RNA, 19 nt, Artificial Sequence
  Description of Artificial Sequence: Synthetic oligonucleotide
agagcaggacggaggcaag

SEQ ID NO: 2679303 - RNA, 19 nt, Artificial Sequence
  Description of Artificial Sequence: Synthetic oligonucleotide
acaccgcggcacacagucc

SEQ ID NO: 2679304 - RNA, 19 nt, Artificial Sequence
  Description of Artificial Sequence: Synthetic oligonucleotide
cacuaucuucagauauaaa

SEQ ID NO: 2679305 - RNA, 19 nt, Artificial Sequence
  Description of Artificial Sequence: Synthetic oligonucleotide
agacgugcaccaugccaua

SEQ ID NO: 2679306 - RNA, 19 nt, Artificial Sequence
  Description of Artificial Sequence: Synthetic oligonucleotide
ccggugaggccgaggaugc

SEQ ID NO: 2679307 - RNA, 19 nt, Artificial Sequence
  Description of Artificial Sequence: Synthetic oligonucleotide
auaaggugucacacuucau

SEQ ID NO: 2679308 - RNA, 19 nt, Artificial Sequence
  Description of Artificial Sequence: Synthetic oligonucleotide
agaguccugccaaucuuuu

SEQ ID NO: 2679309 - RNA, 19 nt, Artificial Sequence
  Description of Artificial Sequence: Synthetic oligonucleotide
gcaagaguccugccaaucu

SEQ ID NO: 2679310 - RNA, 19 nt, Artificial Sequence
  Description of Artificial Sequence: Synthetic oligonucleotide
ccguagaggccggugaggc

SEQ ID NO: 2679311 - RNA, 19 nt, Artificial Sequence
  Description of Artificial Sequence: Synthetic oligonucleotide
caccgcggccaucgcaccc

SEQ ID NO: 2679312 - RNA, 19 nt, Artificial Sequence
  Description of Artificial Sequence: Synthetic oligonucleotide
cuucccguuuggccaccac

SEQ ID NO: 2679313 - RNA, 19 nt, Artificial Sequence
  Description of Artificial Sequence: Synthetic oligonucleotide
cccucauuucaguagacgu

SEQ ID NO: 2679314 - RNA, 19 nt, Artificial Sequence
  Description of Artificial Sequence: Synthetic oligonucleotide
uccuucccgcuuugagaau

SEQ ID NO: 2679315 - RNA, 19 nt, Artificial Sequence
  Description of Artificial Sequence: Synthetic oligonucleotide
guaagucuacacgguguua

SEQ ID NO: 2679316 - RNA, 19 nt, Artificial Sequence
  Description of Artificial Sequence: Synthetic oligonucleotide
ccauagaggaacguccaga

SEQ ID NO: 2679317 - RNA, 19 nt, Artificial Sequence
  Description of Artificial Sequence: Synthetic oligonucleotide
ggcaguaaucaaggaccgc

SEQ ID NO: 2679318 - RNA, 19 nt, Artificial Sequence
  Description of Artificial Sequence: Synthetic oligonucleotide
ggcaagaguccugccaauc

SEQ ID NO: 2679319 - RNA, 19 nt, Artificial Sequence
  Description of Artificial Sequence: Synthetic oligonucleotide
gggucucacuaucuucaga

SEQ ID NO: 2679320 - RNA, 19 nt, Artificial Sequence
  Description of Artificial Sequence: Synthetic oligonucleotide
ggccaucgcacccgccggg

SEQ ID NO: 2679321 - RNA, 19 nt, Artificial Sequence
  Description of Artificial Sequence: Synthetic oligonucleotide
cagucccucgugcucccuc

SEQ ID NO: 2679322 - RNA, 19 nt, Artificial Sequence
  Description of Artificial Sequence: Synthetic oligonucleotide
gagguccggcaguaaucaa

SEQ ID NO: 2679323 - RNA, 19 nt, Artificial Sequence
  Description of Artificial Sequence: Synthetic oligonucleotide
ggucuucgugacuuaaaau

SEQ ID NO: 2679324 - RNA, 19 nt, Artificial Sequence
  Description of Artificial Sequence: Synthetic oligonucleotide
cagcgaauucaaacaauuu

SEQ ID NO: 2679325 - RNA, 19 nt, Artificial Sequence
  Description of Artificial Sequence: Synthetic oligonucleotide
caagaguccugccaaucuu

SEQ ID NO: 2679326 - RNA, 19 nt, Artificial Sequence
  Description of Artificial Sequence: Synthetic oligonucleotide
cuggaacaccgcggcacac

SEQ ID NO: 2679327 - RNA, 19 nt, Artificial Sequence
  Description of Artificial Sequence: Synthetic oligonucleotide
gucaccccugcccucauuu

SEQ ID NO: 2679328 - RNA, 19 nt, Artificial Sequence
  Description of Artificial Sequence: Synthetic oligonucleotide
guccggcaguaaucaagga

SEQ ID NO: 2679329 - RNA, 19 nt, Artificial Sequence
  Description of Artificial Sequence: Synthetic oligonucleotide
acacugagguccggcagua

SEQ ID NO: 2679330 - RNA, 19 nt, Artificial Sequence
  Description of Artificial Sequence: Synthetic oligonucleotide
ggcguugccucguacggcu

SEQ ID NO: 2679331 - RNA, 19 nt, Artificial Sequence
  Description of Artificial Sequence: Synthetic oligonucleotide
acguuccgcgccgccaucu

SEQ ID NO: 2679332 - RNA, 19 nt, Artificial Sequence
  Description of Artificial Sequence: Synthetic oligonucleotide
cgcuucugccuucucgagg

SEQ ID NO: 2679333 - RNA, 19 nt, Artificial Sequence
  Description of Artificial Sequence: Synthetic oligonucleotide
gccguagaggccggugagg

SEQ ID NO: 2679334 - RNA, 19 nt, Artificial Sequence
  Description of Artificial Sequence: Synthetic oligonucleotide
caaggaccgcggcguugcc

SEQ ID NO: 2679335 - RNA, 19 nt, Artificial Sequence
  Description of Artificial Sequence: Synthetic oligonucleotide
cgcggcguugccucguacg

SEQ ID NO: 2679336 - RNA, 19 nt, Artificial Sequence
  Description of Artificial Sequence: Synthetic oligonucleotide
cguccagaagaggacguag

SEQ ID NO: 2679337 - RNA, 19 nt, Artificial Sequence
  Description of Artificial Sequence: Synthetic oligonucleotide
cgauaaggugucacacuuc

SEQ ID NO: 2679338 - RNA, 19 nt, Artificial Sequence
  Description of Artificial Sequence: Synthetic oligonucleotide
gcagcgaauucaaacaauu

SEQ ID NO: 2679339 - RNA, 19 nt, Artificial Sequence
  Description of Artificial Sequence: Synthetic oligonucleotide
acggcggcccuucccguuu

SEQ ID NO: 2679340 - RNA, 19 nt, Artificial Sequence
  Description of Artificial Sequence: Synthetic oligonucleotide
ucgaggccucaacgcggaa

SEQ ID NO: 2679341 - RNA, 19 nt, Artificial Sequence
  Description of Artificial Sequence: Synthetic oligonucleotide
cguacggcugcuucgcuga

SEQ ID NO: 2679342 - RNA, 19 nt, Artificial Sequence
  Description of Artificial Sequence: Synthetic oligonucleotide
acguccagaagaggacgua

SEQ ID NO: 2679343 - RNA, 19 nt, Artificial Sequence
  Description of Artificial Sequence: Synthetic oligonucleotide
gccuucucgaggccucaac

SEQ ID NO: 2679344 - RNA, 19 nt, Artificial Sequence
  Description of Artificial Sequence: Synthetic oligonucleotide
ccgaggaugccggcugugg

SEQ ID NO: 2679345 - RNA, 19 nt, Artificial Sequence
  Description of Artificial Sequence: Synthetic oligonucleotide
aggccucaacgcggaacug

SEQ ID NO: 2679346 - RNA, 19 nt, Artificial Sequence
  Description of Artificial Sequence: Synthetic oligonucleotide
gguagaagaugaagccgua

SEQ ID NO: 2679347 - RNA, 19 nt, Artificial Sequence
  Description of Artificial Sequence: Synthetic oligonucleotide
gccucaacgcggaacugga

SEQ ID NO: 2679348 - RNA, 19 nt, Artificial Sequence
  Description of Artificial Sequence: Synthetic oligonucleotide
gccaucgcacccgccgggg

SEQ ID NO: 2679349 - RNA, 19 nt, Artificial Sequence
  Description of Artificial Sequence: Synthetic oligonucleotide
cguugccucguacggcugc

SEQ ID NO: 2679350 - RNA, 19 nt, Artificial Sequence
  Description of Artificial Sequence: Synthetic oligonucleotide
ugccuucucgaggccucaa

SEQ ID NO: 2679351 - RNA, 19 nt, Artificial Sequence
  Description of Artificial Sequence: Synthetic oligonucleotide
cgcggaacuggaacaccgc

SEQ ID NO: 2679352 - RNA, 19 nt, Artificial Sequence
  Description of Artificial Sequence: Synthetic oligonucleotide
cggcccuucccguuuggcc

SEQ ID NO: 2679353 - RNA, 19 nt, Artificial Sequence
  Description of Artificial Sequence: Synthetic oligonucleotide
cccguuuggccaccaccgc

SEQ ID NO: 2679354 - RNA, 19 nt, Artificial Sequence
  Description of Artificial Sequence: Synthetic oligonucleotide
ggaccgcggcguugccucg

SEQ ID NO: 2679355 - RNA, 19 nt, Artificial Sequence
  Description of Artificial Sequence: Synthetic oligonucleotide
cguagaggccggugaggcc

SEQ ID NO: 2679356 - RNA, 19 nt, Artificial Sequence
  Description of Artificial Sequence: Synthetic oligonucleotide
gcucccucagacagcagaa

SEQ ID NO: 2679357 - RNA, 19 nt, Artificial Sequence
  Description of Artificial Sequence: Synthetic oligonucleotide
gcgcugacacugagguccg

SEQ ID NO: 2679358 - RNA, 19 nt, Artificial Sequence
  Description of Artificial Sequence: Synthetic oligonucleotide
ccgcuucugccuucucgag

SEQ ID NO: 2679359 - RNA, 19 nt, Artificial Sequence
  Description of Artificial Sequence: Synthetic oligonucleotide
gaacggcggcccuucccgu

SEQ ID NO: 2679360 - RNA, 19 nt, Artificial Sequence
  Description of Artificial Sequence: Synthetic oligonucleotide
gcccuucccguuuggccac

SEQ ID NO: 2679361 - RNA, 19 nt, Artificial Sequence
  Description of Artificial Sequence: Synthetic oligonucleotide
caucgcacccgccggggcu

SEQ ID NO: 2679362 - RNA, 19 nt, Artificial Sequence
  Description of Artificial Sequence: Synthetic oligonucleotide
cgcggcacacagucccucg

SEQ ID NO: 2679363 - RNA, 19 nt, Artificial Sequence
  Description of Artificial Sequence: Synthetic oligonucleotide
gcacacagucccucgugcu

SEQ ID NO: 2679364 - RNA, 19 nt, Artificial Sequence
  Description of Artificial Sequence: Synthetic oligonucleotide
ggcggcccuucccguuugg

SEQ ID NO: 2679365 - RNA, 19 nt, Artificial Sequence
  Description of Artificial Sequence: Synthetic oligonucleotide
gugucacacuucauuuaau

SEQ ID NO: 2679366 - RNA, 19 nt, Artificial Sequence
  Description of Artificial Sequence: Synthetic oligonucleotide
guugccucguacggcugcu

SEQ ID NO: 2679367 - RNA, 19 nt, Artificial Sequence
  Description of Artificial Sequence: Synthetic oligonucleotide
accgcggcacacagucccu

SEQ ID NO: 2679368 - RNA, 19 nt, Artificial Sequence
  Description of Artificial Sequence: Synthetic oligonucleotide
ggaugccggcuguggcccc

SEQ ID NO: 2679369 - RNA, 19 nt, Artificial Sequence
  Description of Artificial Sequence: Synthetic oligonucleotide
acagucccucgugcucccu

SEQ ID NO: 2679370 - RNA, 19 nt, Artificial Sequence
  Description of Artificial Sequence: Synthetic oligonucleotide
uugccucguacggcugcuu

SEQ ID NO: 2679371 - RNA, 19 nt, Artificial Sequence
  Description of Artificial Sequence: Synthetic oligonucleotide
ccaucgcacccgccggggc

SEQ ID NO: 2679372 - RNA, 19 nt, Artificial Sequence
  Description of Artificial Sequence: Synthetic oligonucleotide
gcugaugaacggcggcccu

SEQ ID NO: 2679373 - RNA, 19 nt, Artificial Sequence
  Description of Artificial Sequence: Synthetic oligonucleotide
accgcggcguugccucgua

SEQ ID NO: 2679374 - RNA, 19 nt, Artificial Sequence
  Description of Artificial Sequence: Synthetic oligonucleotide
ccgaugaggccuccuguaa

SEQ ID NO: 2679375 - RNA, 19 nt, Artificial Sequence
  Description of Artificial Sequence: Synthetic oligonucleotide
gaacaccgcggcacacagu

SEQ ID NO: 2679376 - RNA, 19 nt, Artificial Sequence
  Description of Artificial Sequence: Synthetic oligonucleotide
cccgaugaggccuccugua

SEQ ID NO: 2679377 - RNA, 19 nt, Artificial Sequence
  Description of Artificial Sequence: Synthetic oligonucleotide
gcagaacaagcagcgaauu

SEQ ID NO: 2679378 - RNA, 19 nt, Artificial Sequence
  Description of Artificial Sequence: Synthetic oligonucleotide
cgguguuaauugcuggcaa

SEQ ID NO: 2679379 - RNA, 19 nt, Artificial Sequence
  Description of Artificial Sequence: Synthetic oligonucleotide
cgaugaggccuccuguaaa

SEQ ID NO: 2679380 - RNA, 19 nt, Artificial Sequence
  Description of Artificial Sequence: Synthetic oligonucleotide
cagcagaaagcggaacguu

SEQ ID NO: 2679381 - RNA, 19 nt, Artificial Sequence
  Description of Artificial Sequence: Synthetic oligonucleotide
cgacagcgcugacacugag

SEQ ID NO: 2679382 - RNA, 19 nt, Artificial Sequence
  Description of Artificial Sequence: Synthetic oligonucleotide
cggcacacagucccucgug

SEQ ID NO: 2679383 - RNA, 19 nt, Artificial Sequence
  Description of Artificial Sequence: Synthetic oligonucleotide
cccgccggggcuccgcuuc

SEQ ID NO: 2679384 - RNA, 19 nt, Artificial Sequence
  Description of Artificial Sequence: Synthetic oligonucleotide
gcaccaugccauagaggaa

SEQ ID NO: 2679385 - RNA, 19 nt, Artificial Sequence
  Description of Artificial Sequence: Synthetic oligonucleotide
ccgacagcgcugacacuga

SEQ ID NO: 2679386 - RNA, 19 nt, Artificial Sequence
  Description of Artificial Sequence: Synthetic oligonucleotide
cucguacggcugcuucgcu

SEQ ID NO: 2679387 - RNA, 19 nt, Artificial Sequence
  Description of Artificial Sequence: Synthetic oligonucleotide
gccgaggaugccggcugug

SEQ ID NO: 2679388 - RNA, 19 nt, Artificial Sequence
  Description of Artificial Sequence: Synthetic oligonucleotide
cggaacguuccgcgccgcc

SEQ ID NO: 2679389 - RNA, 19 nt, Artificial Sequence
  Description of Artificial Sequence: Synthetic oligonucleotide
cugaugaacggcggcccuu

SEQ ID NO: 2679390 - RNA, 19 nt, Artificial Sequence
  Description of Artificial Sequence: Synthetic oligonucleotide
ccucaacgcggaacuggaa

SEQ ID NO: 2679391 - RNA, 19 nt, Artificial Sequence
  Description of Artificial Sequence: Synthetic oligonucleotide
gcguugccucguacggcug

SEQ ID NO: 2679392 - RNA, 19 nt, Artificial Sequence
  Description of Artificial Sequence: Synthetic oligonucleotide
guacggcugcuucgcugau

SEQ ID NO: 2679393 - RNA, 19 nt, Artificial Sequence
  Description of Artificial Sequence: Synthetic oligonucleotide
gcggcacacagucccucgu

SEQ ID NO: 2679394 - RNA, 19 nt, Artificial Sequence
  Description of Artificial Sequence: Synthetic oligonucleotide
gcggaacguuccgcgccgc

SEQ ID NO: 2679395 - RNA, 19 nt, Artificial Sequence
  Description of Artificial Sequence: Synthetic oligonucleotide
gaccgcggcguugccucgu

SEQ ID NO: 2679396 - RNA, 19 nt, Artificial Sequence
  Description of Artificial Sequence: Synthetic oligonucleotide
cggcguugccucguacggc

SEQ ID NO: 2679397 - RNA, 19 nt, Artificial Sequence
  Description of Artificial Sequence: Synthetic oligonucleotide
ggggcuccgcuucugccuu

SEQ ID NO: 2679398 - RNA, 19 nt, Artificial Sequence
  Description of Artificial Sequence: Synthetic oligonucleotide
ggacggaggcaagcaggua

SEQ ID NO: 2679399 - RNA, 19 nt, Artificial Sequence
  Description of Artificial Sequence: Synthetic oligonucleotide
gggcuccgcuucugccuuc

SEQ ID NO: 2679400 - RNA, 19 nt, Artificial Sequence
  Description of Artificial Sequence: Synthetic oligonucleotide
ggccgaggaugccggcugu

SEQ ID NO: 2679401 - RNA, 19 nt, Artificial Sequence
  Description of Artificial Sequence: Synthetic oligonucleotide
ccgcggccaucgcacccgc

SEQ ID NO: 2679402 - RNA, 19 nt, Artificial Sequence
  Description of Artificial Sequence: Synthetic oligonucleotide
ccccgaugaggccuccugu

SEQ ID NO: 2679403 - RNA, 19 nt, Artificial Sequence
  Description of Artificial Sequence: Synthetic oligonucleotide
cccuucccguuuggccacc

SEQ ID NO: 2679404 - RNA, 19 nt, Artificial Sequence
  Description of Artificial Sequence: Synthetic oligonucleotide
ggcuccgcuucugccuucu

SEQ ID NO: 2679405 - RNA, 19 nt, Artificial Sequence
  Description of Artificial Sequence: Synthetic oligonucleotide
ccgcggcguugccucguac

SEQ ID NO: 2679406 - RNA, 19 nt, Artificial Sequence
  Description of Artificial Sequence: Synthetic oligonucleotide
ccaugccauagaggaacgu

SEQ ID NO: 2679407 - RNA, 19 nt, Artificial Sequence
  Description of Artificial Sequence: Synthetic oligonucleotide
cacccgccggggcuccgcu

SEQ ID NO: 2679408 - RNA, 19 nt, Artificial Sequence
  Description of Artificial Sequence: Synthetic oligonucleotide
cgcugacacugagguccgg

SEQ ID NO: 2679409 - RNA, 19 nt, Artificial Sequence
  Description of Artificial Sequence: Synthetic oligonucleotide
cgcggccaucgcacccgcc

SEQ ID NO: 2679410 - RNA, 19 nt, Artificial Sequence
  Description of Artificial Sequence: Synthetic oligonucleotide
ccuucccguuuggccacca

SEQ ID NO: 2679411 - RNA, 19 nt, Artificial Sequence
  Description of Artificial Sequence: Synthetic oligonucleotide
ccccugcccucauuucagu

SEQ ID NO: 2679412 - RNA, 19 nt, Artificial Sequence
  Description of Artificial Sequence: Synthetic oligonucleotide
cggcggcccuucccguuug

SEQ ID NO: 2679413 - RNA, 19 nt, Artificial Sequence
  Description of Artificial Sequence: Synthetic oligonucleotide
cggaggcaagcagguagaa

SEQ ID NO: 2679414 - RNA, 19 nt, Artificial Sequence
  Description of Artificial Sequence: Synthetic oligonucleotide
cgccggggcuccgcuucug

SEQ ID NO: 2679415 - RNA, 19 nt, Artificial Sequence
  Description of Artificial Sequence: Synthetic oligonucleotide
cggcugcuucgcugaugaa

SEQ ID NO: 2679416 - RNA, 19 nt, Artificial Sequence
  Description of Artificial Sequence: Synthetic oligonucleotide
cguuccgcgccgccaucuu

SEQ ID NO: 2679417 - RNA, 19 nt, Artificial Sequence
  Description of Artificial Sequence: Synthetic oligonucleotide
ccgccggggcuccgcuucu

SEQ ID NO: 2679418 - RNA, 19 nt, Artificial Sequence
  Description of Artificial Sequence: Synthetic oligonucleotide
agcacuuugcucucgagcc

SEQ ID NO: 2679419 - RNA, 19 nt, Artificial Sequence
  Description of Artificial Sequence: Synthetic oligonucleotide
aaugaccuguuucaaccgc

SEQ ID NO: 2679420 - RNA, 19 nt, Artificial Sequence
  Description of Artificial Sequence: Synthetic oligonucleotide
ucaaugaccuguuucaacc

SEQ ID NO: 2679421 - RNA, 19 nt, Artificial Sequence
  Description of Artificial Sequence: Synthetic oligonucleotide
ucacucaucagucuguccc

SEQ ID NO: 2679422 - RNA, 19 nt, Artificial Sequence
  Description of Artificial Sequence: Synthetic oligonucleotide
ugcccaagaauuuaucacg

SEQ ID NO: 2679423 - RNA, 19 nt, Artificial Sequence
  Description of Artificial Sequence: Synthetic oligonucleotide
ugaagguccaacucaagcu

SEQ ID NO: 2679424 - RNA, 19 nt, Artificial Sequence
  Description of Artificial Sequence: Synthetic oligonucleotide
ucuguguugcccaagaauu

SEQ ID NO: 2679425 - RNA, 19 nt, Artificial Sequence
  Description of Artificial Sequence: Synthetic oligonucleotide
uuuaucacgugcuucuugu

SEQ ID NO: 2679426 - RNA, 19 nt, Artificial Sequence
  Description of Artificial Sequence: Synthetic oligonucleotide
ucucucuuuucccacaucu

SEQ ID NO: 2679427 - RNA, 19 nt, Artificial Sequence
  Description of Artificial Sequence: Synthetic oligonucleotide
uuuagggucuccucuugcg

SEQ ID NO: 2679428 - RNA, 19 nt, Artificial Sequence
  Description of Artificial Sequence: Synthetic oligonucleotide
cugacuucagcucuucacg

SEQ ID NO: 2679429 - RNA, 19 nt, Artificial Sequence
  Description of Artificial Sequence: Synthetic oligonucleotide
ugcacgcugagccugacug

SEQ ID NO: 2679430 - RNA, 19 nt, Artificial Sequence
  Description of Artificial Sequence: Synthetic oligonucleotide
auuuugacguguccguagg

SEQ ID NO: 2679431 - RNA, 19 nt, Artificial Sequence
  Description of Artificial Sequence: Synthetic oligonucleotide
uuuucccacaucuccuugg

SEQ ID NO: 2679432 - RNA, 19 nt, Artificial Sequence
  Description of Artificial Sequence: Synthetic oligonucleotide
agaauuuaucacgugcuuc

SEQ ID NO: 2679433 - RNA, 19 nt, Artificial Sequence
  Description of Artificial Sequence: Synthetic oligonucleotide
uucucccuguguuuuaggg

SEQ ID NO: 2679434 - RNA, 19 nt, Artificial Sequence
  Description of Artificial Sequence: Synthetic oligonucleotide
cuuuucucguaucugcugc

SEQ ID NO: 2679435 - RNA, 19 nt, Artificial Sequence
  Description of Artificial Sequence: Synthetic oligonucleotide
cuccuuugcacgcugagcc

SEQ ID NO: 2679436 - RNA, 19 nt, Artificial Sequence
  Description of Artificial Sequence: Synthetic oligonucleotide
acucuggaggaguuucucc

SEQ ID NO: 2679437 - RNA, 19 nt, Artificial Sequence
  Description of Artificial Sequence: Synthetic oligonucleotide
aaccucacucaucagucug

SEQ ID NO: 2679438 - RNA, 19 nt, Artificial Sequence
  Description of Artificial Sequence: Synthetic oligonucleotide
uaucacgugcuucuuguga

SEQ ID NO: 2679439 - RNA, 19 nt, Artificial Sequence
  Description of Artificial Sequence: Synthetic oligonucleotide
uguccguagggcuugggcc

SEQ ID NO: 2679440 - RNA, 19 nt, Artificial Sequence
  Description of Artificial Sequence: Synthetic oligonucleotide
uuuucuucucucuguguug

SEQ ID NO: 2679441 - RNA, 19 nt, Artificial Sequence
  Description of Artificial Sequence: Synthetic oligonucleotide
agaaccucacucaucaguc

SEQ ID NO: 2679442 - RNA, 19 nt, Artificial Sequence
  Description of Artificial Sequence: Synthetic oligonucleotide
uugcccaagaauuuaucac

SEQ ID NO: 2679443 - RNA, 19 nt, Artificial Sequence
  Description of Artificial Sequence: Synthetic oligonucleotide
aucggagugcuguucugcc

SEQ ID NO: 2679444 - RNA, 19 nt, Artificial Sequence
  Description of Artificial Sequence: Synthetic oligonucleotide
gaauuuaucacgugcuucu

SEQ ID NO: 2679445 - RNA, 19 nt, Artificial Sequence
  Description of Artificial Sequence: Synthetic oligonucleotide
uguucugcccgcuugaguu

SEQ ID NO: 2679446 - RNA, 19 nt, Artificial Sequence
  Description of Artificial Sequence: Synthetic oligonucleotide
uccaucuuuucucguaucu

SEQ ID NO: 2679447 - RNA, 19 nt, Artificial Sequence
  Description of Artificial Sequence: Synthetic oligonucleotide
gaagguccaacucaagcuc

SEQ ID NO: 2679448 - RNA, 19 nt, Artificial Sequence
  Description of Artificial Sequence: Synthetic oligonucleotide
uuuugacguguccguaggg

SEQ ID NO: 2679449 - RNA, 19 nt, Artificial Sequence
  Description of Artificial Sequence: Synthetic oligonucleotide
gugaagguccaacucaagc

SEQ ID NO: 2679450 - RNA, 19 nt, Artificial Sequence
  Description of Artificial Sequence: Synthetic oligonucleotide
ucuugugaagguccaacuc

SEQ ID NO: 2679451 - RNA, 19 nt, Artificial Sequence
  Description of Artificial Sequence: Synthetic oligonucleotide
uuuuagggucuccucuugc

SEQ ID NO: 2679452 - RNA, 19 nt, Artificial Sequence
  Description of Artificial Sequence: Synthetic oligonucleotide
aagaauuuaucacgugcuu

SEQ ID NO: 2679453 - RNA, 19 nt, Artificial Sequence
  Description of Artificial Sequence: Synthetic oligonucleotide
gaucuuggccuccugcugc

SEQ ID NO: 2679454 - RNA, 19 nt, Artificial Sequence
  Description of Artificial Sequence: Synthetic oligonucleotide
cauuuugacguguccguag

SEQ ID NO: 2679455 - RNA, 19 nt, Artificial Sequence
  Description of Artificial Sequence: Synthetic oligonucleotide
ucccacaucuccuuggccu

SEQ ID NO: 2679456 - RNA, 19 nt, Artificial Sequence
  Description of Artificial Sequence: Synthetic oligonucleotide
cucuggaggaguuucuccc

SEQ ID NO: 2679457 - RNA, 19 nt, Artificial Sequence
  Description of Artificial Sequence: Synthetic oligonucleotide
ucuuuucucguaucugcug

SEQ ID NO: 2679458 - RNA, 19 nt, Artificial Sequence
  Description of Artificial Sequence: Synthetic oligonucleotide
uuagggucuccucuugcgc

SEQ ID NO: 2679459 - RNA, 19 nt, Artificial Sequence
  Description of Artificial Sequence: Synthetic oligonucleotide
ugacuucagcucuucacgc

SEQ ID NO: 2679460 - RNA, 19 nt, Artificial Sequence
  Description of Artificial Sequence: Synthetic oligonucleotide
uuugacguguccguagggc

SEQ ID NO: 2679461 - RNA, 19 nt, Artificial Sequence
  Description of Artificial Sequence: Synthetic oligonucleotide
ucaucagucugucccgagc

SEQ ID NO: 2679462 - RNA, 19 nt, Artificial Sequence
  Description of Artificial Sequence: Synthetic oligonucleotide
ccaagaauuuaucacgugc

SEQ ID NO: 2679463 - RNA, 19 nt, Artificial Sequence
  Description of Artificial Sequence: Synthetic oligonucleotide
caaugaccuguuucaaccg

SEQ ID NO: 2679464 - RNA, 19 nt, Artificial Sequence
  Description of Artificial Sequence: Synthetic oligonucleotide
cucguugucaguccccagg

SEQ ID NO: 2679465 - RNA, 19 nt, Artificial Sequence
  Description of Artificial Sequence: Synthetic oligonucleotide
cuugugaagguccaacuca

SEQ ID NO: 2679466 - RNA, 19 nt, Artificial Sequence
  Description of Artificial Sequence: Synthetic oligonucleotide
uuucccacaucuccuuggc

SEQ ID NO: 2679467 - RNA, 19 nt, Artificial Sequence
  Description of Artificial Sequence: Synthetic oligonucleotide
ugugcucguugucaguccc

SEQ ID NO: 2679468 - RNA, 19 nt, Artificial Sequence
  Description of Artificial Sequence: Synthetic oligonucleotide
uucugcuccaucuuuucuc

SEQ ID NO: 2679469 - RNA, 19 nt, Artificial Sequence
  Description of Artificial Sequence: Synthetic oligonucleotide
gagcacuuugcucucgagc

SEQ ID NO: 2679470 - RNA, 19 nt, Artificial Sequence
  Description of Artificial Sequence: Synthetic oligonucleotide
cucccuguguuuuaggguc

SEQ ID NO: 2679471 - RNA, 19 nt, Artificial Sequence
  Description of Artificial Sequence: Synthetic oligonucleotide
guugcccaagaauuuauca

SEQ ID NO: 2679472 - RNA, 19 nt, Artificial Sequence
  Description of Artificial Sequence: Synthetic oligonucleotide
ugcuucccaagccuggagc

SEQ ID NO: 2679473 - RNA, 19 nt, Artificial Sequence
  Description of Artificial Sequence: Synthetic oligonucleotide
uucuugugaagguccaacu

SEQ ID NO: 2679474 - RNA, 19 nt, Artificial Sequence
  Description of Artificial Sequence: Synthetic oligonucleotide
ucucguaucugcugcugcc

SEQ ID NO: 2679475 - RNA, 19 nt, Artificial Sequence
  Description of Artificial Sequence: Synthetic oligonucleotide
ucuugcgcccgccaguucu

SEQ ID NO: 2679476 - RNA, 19 nt, Artificial Sequence
  Description of Artificial Sequence: Synthetic oligonucleotide
ucguugucaguccccaggc

SEQ ID NO: 2679477 - RNA, 19 nt, Artificial Sequence
  Description of Artificial Sequence: Synthetic oligonucleotide
uugugaagguccaacucaa

SEQ ID NO: 2679478 - RNA, 19 nt, Artificial Sequence
  Description of Artificial Sequence: Synthetic oligonucleotide
caugaucuuggccuccugc

SEQ ID NO: 2679479 - RNA, 19 nt, Artificial Sequence
  Description of Artificial Sequence: Synthetic oligonucleotide
agccugacugccuugccuc

SEQ ID NO: 2679480 - RNA, 19 nt, Artificial Sequence
  Description of Artificial Sequence: Synthetic oligonucleotide
ugaucuuggccuccugcug

SEQ ID NO: 2679481 - RNA, 19 nt, Artificial Sequence
  Description of Artificial Sequence: Synthetic oligonucleotide
uucucguaucugcugcugc

SEQ ID NO: 2679482 - RNA, 19 nt, Artificial Sequence
  Description of Artificial Sequence: Synthetic oligonucleotide
uccccaggccauuuugacg

SEQ ID NO: 2679483 - RNA, 19 nt, Artificial Sequence
  Description of Artificial Sequence: Synthetic oligonucleotide
cucaaugaccuguuucaac

SEQ ID NO: 2679484 - RNA, 19 nt, Artificial Sequence
  Description of Artificial Sequence: Synthetic oligonucleotide
augaucuuggccuccugcu

SEQ ID NO: 2679485 - RNA, 19 nt, Artificial Sequence
  Description of Artificial Sequence: Synthetic oligonucleotide
uagggucuccucuugcgcc

SEQ ID NO: 2679486 - RNA, 19 nt, Artificial Sequence
  Description of Artificial Sequence: Synthetic oligonucleotide
ugugaagguccaacucaag

SEQ ID NO: 2679487 - RNA, 19 nt, Artificial Sequence
  Description of Artificial Sequence: Synthetic oligonucleotide
guagcugcagcucugccuc

SEQ ID NO: 2679488 - RNA, 19 nt, Artificial Sequence
  Description of Artificial Sequence: Synthetic oligonucleotide
uguguuuuagggucuccuc

SEQ ID NO: 2679489 - RNA, 19 nt, Artificial Sequence
  Description of Artificial Sequence: Synthetic oligonucleotide
uugacguguccguagggcu

SEQ ID NO: 2679490 - RNA, 19 nt, Artificial Sequence
  Description of Artificial Sequence: Synthetic oligonucleotide
ugcagcagagcaucggagu

SEQ ID NO: 2679491 - RNA, 19 nt, Artificial Sequence
  Description of Artificial Sequence: Synthetic oligonucleotide
uuugcucucgagcccacuc

SEQ ID NO: 2679492 - RNA, 19 nt, Artificial Sequence
  Description of Artificial Sequence: Synthetic oligonucleotide
uucccaagccuggagcugg

SEQ ID NO: 2679493 - RNA, 19 nt, Artificial Sequence
  Description of Artificial Sequence: Synthetic oligonucleotide
guccguagggcuugggccg

SEQ ID NO: 2679494 - RNA, 19 nt, Artificial Sequence
  Description of Artificial Sequence: Synthetic oligonucleotide
aggaguuucucccuguguu

SEQ ID NO: 2679495 - RNA, 19 nt, Artificial Sequence
  Description of Artificial Sequence: Synthetic oligonucleotide
aggccauuuugacgugucc

SEQ ID NO: 2679496 - RNA, 19 nt, Artificial Sequence
  Description of Artificial Sequence: Synthetic oligonucleotide
uccaacucaagcucacgaa

SEQ ID NO: 2679497 - RNA, 19 nt, Artificial Sequence
  Description of Artificial Sequence: Synthetic oligonucleotide
uccuccagacucuggagga

SEQ ID NO: 2679498 - RNA, 19 nt, Artificial Sequence
  Description of Artificial Sequence: Synthetic oligonucleotide
uuucucccuguguuuuagg

SEQ ID NO: 2679499 - RNA, 19 nt, Artificial Sequence
  Description of Artificial Sequence: Synthetic oligonucleotide
guugucaguccccaggcca

SEQ ID NO: 2679500 - RNA, 19 nt, Artificial Sequence
  Description of Artificial Sequence: Synthetic oligonucleotide
ugcaaccugggcuuccagc

SEQ ID NO: 2679501 - RNA, 19 nt, Artificial Sequence
  Description of Artificial Sequence: Synthetic oligonucleotide
ucugucccgagcacuuugc

SEQ ID NO: 2679502 - RNA, 19 nt, Artificial Sequence
  Description of Artificial Sequence: Synthetic oligonucleotide
ucuucucucuguguugccc

SEQ ID NO: 2679503 - RNA, 19 nt, Artificial Sequence
  Description of Artificial Sequence: Synthetic oligonucleotide
cacucaucagucugucccg

SEQ ID NO: 2679504 - RNA, 19 nt, Artificial Sequence
  Description of Artificial Sequence: Synthetic oligonucleotide
uguuuuagggucuccucuu

SEQ ID NO: 2679505 - RNA, 19 nt, Artificial Sequence
  Description of Artificial Sequence: Synthetic oligonucleotide
ucucccuguguuuuagggu

SEQ ID NO: 2679506 - RNA, 19 nt, Artificial Sequence
  Description of Artificial Sequence: Synthetic oligonucleotide
uguugcccaagaauuuauc

SEQ ID NO: 2679507 - RNA, 19 nt, Artificial Sequence
  Description of Artificial Sequence: Synthetic oligonucleotide
caagaauuuaucacgugcu

SEQ ID NO: 2679508 - RNA, 19 nt, Artificial Sequence
  Description of Artificial Sequence: Synthetic oligonucleotide
uuuucucguaucugcugcu

SEQ ID NO: 2679509 - RNA, 19 nt, Artificial Sequence
  Description of Artificial Sequence: Synthetic oligonucleotide
aucagucugucccgagcac

SEQ ID NO: 2679510 - RNA, 19 nt, Artificial Sequence
  Description of Artificial Sequence: Synthetic oligonucleotide
agggcuugggccgguagcc

SEQ ID NO: 2679511 - RNA, 19 nt, Artificial Sequence
  Description of Artificial Sequence: Synthetic oligonucleotide
uuuucuccugcuccucgcu

SEQ ID NO: 2679512 - RNA, 19 nt, Artificial Sequence
  Description of Artificial Sequence: Synthetic oligonucleotide
uuaucacgugcuucuugug

SEQ ID NO: 2679513 - RNA, 19 nt, Artificial Sequence
  Description of Artificial Sequence: Synthetic oligonucleotide
cuucuugugaagguccaac

SEQ ID NO: 2679514 - RNA, 19 nt, Artificial Sequence
  Description of Artificial Sequence: Synthetic oligonucleotide
cacgcuccuccuuugcacg

SEQ ID NO: 2679515 - RNA, 19 nt, Artificial Sequence
  Description of Artificial Sequence: Synthetic oligonucleotide
uccucccucagcaguagcu

SEQ ID NO: 2679516 - RNA, 19 nt, Artificial Sequence
  Description of Artificial Sequence: Synthetic oligonucleotide
agcaucggagugcuguucu

SEQ ID NO: 2679517 - RNA, 19 nt, Artificial Sequence
  Description of Artificial Sequence: Synthetic oligonucleotide
ugcucucgagcccacucug

SEQ ID NO: 2679518 - RNA, 19 nt, Artificial Sequence
  Description of Artificial Sequence: Synthetic oligonucleotide
ucugugcucguugucaguc

SEQ ID NO: 2679519 - RNA, 19 nt, Artificial Sequence
  Description of Artificial Sequence: Synthetic oligonucleotide
uccuccuuugcacgcugag

SEQ ID NO: 2679520 - RNA, 19 nt, Artificial Sequence
  Description of Artificial Sequence: Synthetic oligonucleotide
guuuuagggucuccucuug

SEQ ID NO: 2679521 - RNA, 19 nt, Artificial Sequence
  Description of Artificial Sequence: Synthetic oligonucleotide
ucacgcuccuccuuugcac

SEQ ID NO: 2679522 - RNA, 19 nt, Artificial Sequence
  Description of Artificial Sequence: Synthetic oligonucleotide
uguguugcccaagaauuua

SEQ ID NO: 2679523 - RNA, 19 nt, Artificial Sequence
  Description of Artificial Sequence: Synthetic oligonucleotide
agcuccugcuuccuggcug

SEQ ID NO: 2679524 - RNA, 19 nt, Artificial Sequence
  Description of Artificial Sequence: Synthetic oligonucleotide
aagguccaacucaagcuca

SEQ ID NO: 2679525 - RNA, 19 nt, Artificial Sequence
  Description of Artificial Sequence: Synthetic oligonucleotide
cugccuccccgccagaacc

SEQ ID NO: 2679526 - RNA, 19 nt, Artificial Sequence
  Description of Artificial Sequence: Synthetic oligonucleotide
cucgagcccacucugcuuc

SEQ ID NO: 2679527 - RNA, 19 nt, Artificial Sequence
  Description of Artificial Sequence: Synthetic oligonucleotide
cuuccuggcugacuucagc

SEQ ID NO: 2679528 - RNA, 19 nt, Artificial Sequence
  Description of Artificial Sequence: Synthetic oligonucleotide
uugcucucgagcccacucu

SEQ ID NO: 2679529 - RNA, 19 nt, Artificial Sequence
  Description of Artificial Sequence: Synthetic oligonucleotide
ugcuguucugcccgcuuga

SEQ ID NO: 2679530 - RNA, 19 nt, Artificial Sequence
  Description of Artificial Sequence: Synthetic oligonucleotide
ugccucccgagcuuucucc

SEQ ID NO: 2679531 - RNA, 19 nt, Artificial Sequence
  Description of Artificial Sequence: Synthetic oligonucleotide
gccagaaccucacucauca

SEQ ID NO: 2679532 - RNA, 19 nt, Artificial Sequence
  Description of Artificial Sequence: Synthetic oligonucleotide
acgcuccuccuuugcacgc

SEQ ID NO: 2679533 - RNA, 19 nt, Artificial Sequence
  Description of Artificial Sequence: Synthetic oligonucleotide
accuguuucaaccgcuuuu

SEQ ID NO: 2679534 - RNA, 19 nt, Artificial Sequence
  Description of Artificial Sequence: Synthetic oligonucleotide
ucuucacgcuccuccuuug

SEQ ID NO: 2679535 - RNA, 19 nt, Artificial Sequence
  Description of Artificial Sequence: Synthetic oligonucleotide
uuucucguaucugcugcug

SEQ ID NO: 2679536 - RNA, 19 nt, Artificial Sequence
  Description of Artificial Sequence: Synthetic oligonucleotide
guccaacucaagcucacga

SEQ ID NO: 2679537 - RNA, 19 nt, Artificial Sequence
  Description of Artificial Sequence: Synthetic oligonucleotide
ccaacucaagcucacgaag

SEQ ID NO: 2679538 - RNA, 19 nt, Artificial Sequence
  Description of Artificial Sequence: Synthetic oligonucleotide
guuucucccuguguuuuag

SEQ ID NO: 2679539 - RNA, 19 nt, Artificial Sequence
  Description of Artificial Sequence: Synthetic oligonucleotide
ucagucugucccgagcacu

SEQ ID NO: 2679540 - RNA, 19 nt, Artificial Sequence
  Description of Artificial Sequence: Synthetic oligonucleotide
cuuuucccacaucuccuug

SEQ ID NO: 2679541 - RNA, 19 nt, Artificial Sequence
  Description of Artificial Sequence: Synthetic oligonucleotide
cucccucagcaguagcugc

SEQ ID NO: 2679542 - RNA, 19 nt, Artificial Sequence
  Description of Artificial Sequence: Synthetic oligonucleotide
ugaguuccuccucuuccuc

SEQ ID NO: 2679543 - RNA, 19 nt, Artificial Sequence
  Description of Artificial Sequence: Synthetic oligonucleotide
uugucaguccccaggccau

SEQ ID NO: 2679544 - RNA, 19 nt, Artificial Sequence
  Description of Artificial Sequence: Synthetic oligonucleotide
ugcuccaucuuuucucgua

SEQ ID NO: 2679545 - RNA, 19 nt, Artificial Sequence
  Description of Artificial Sequence: Synthetic oligonucleotide
ugcuuccuggcugacuuca

SEQ ID NO: 2679546 - RNA, 19 nt, Artificial Sequence
  Description of Artificial Sequence: Synthetic oligonucleotide
ucagcaguagcugcagcuc

SEQ ID NO: 2679547 - RNA, 19 nt, Artificial Sequence
  Description of Artificial Sequence: Synthetic oligonucleotide
caucagucugucccgagca

SEQ ID NO: 2679548 - RNA, 19 nt, Artificial Sequence
  Description of Artificial Sequence: Synthetic oligonucleotide
ugucccgagcacuuugcuc

SEQ ID NO: 2679549 - RNA, 19 nt, Artificial Sequence
  Description of Artificial Sequence: Synthetic oligonucleotide
aauuuaucacgugcuucuu

SEQ ID NO: 2679550 - RNA, 19 nt, Artificial Sequence
  Description of Artificial Sequence: Synthetic oligonucleotide
ucggagugcuguucugccc

SEQ ID NO: 2679551 - RNA, 19 nt, Artificial Sequence
  Description of Artificial Sequence: Synthetic oligonucleotide
cucucuuuucccacaucuc

SEQ ID NO: 2679552 - RNA, 19 nt, Artificial Sequence
  Description of Artificial Sequence: Synthetic oligonucleotide
ggagcuggcgcucugcaac

SEQ ID NO: 2679553 - RNA, 19 nt, Artificial Sequence
  Description of Artificial Sequence: Synthetic oligonucleotide
gucccgagcacuuugcucu

SEQ ID NO: 2679554 - RNA, 19 nt, Artificial Sequence
  Description of Artificial Sequence: Synthetic oligonucleotide
cucacucaucagucugucc

SEQ ID NO: 2679555 - RNA, 19 nt, Artificial Sequence
  Description of Artificial Sequence: Synthetic oligonucleotide
cuccucgcuggcuucuugc

SEQ ID NO: 2679556 - RNA, 19 nt, Artificial Sequence
  Description of Artificial Sequence: Synthetic oligonucleotide
guguccguagggcuugggc

SEQ ID NO: 2679557 - RNA, 19 nt, Artificial Sequence
  Description of Artificial Sequence: Synthetic oligonucleotide
caucggagugcuguucugc

SEQ ID NO: 2679558 - RNA, 19 nt, Artificial Sequence
  Description of Artificial Sequence: Synthetic oligonucleotide
cacgcugagccugacugcc

SEQ ID NO: 2679559 - RNA, 19 nt, Artificial Sequence
  Description of Artificial Sequence: Synthetic oligonucleotide
agcccacucugcuucucuc

SEQ ID NO: 2679560 - RNA, 19 nt, Artificial Sequence
  Description of Artificial Sequence: Synthetic oligonucleotide
ugagccugacugccuugcc

SEQ ID NO: 2679561 - RNA, 19 nt, Artificial Sequence
  Description of Artificial Sequence: Synthetic oligonucleotide
ucguaucugcugcugccuc

SEQ ID NO: 2679562 - RNA, 19 nt, Artificial Sequence
  Description of Artificial Sequence: Synthetic oligonucleotide
cuucucucuguguugccca

SEQ ID NO: 2679563 - RNA, 19 nt, Artificial Sequence
  Description of Artificial Sequence: Synthetic oligonucleotide
uggcgcucugcaaccuggg

SEQ ID NO: 2679564 - RNA, 19 nt, Artificial Sequence
  Description of Artificial Sequence: Synthetic oligonucleotide
ugcugggcugcuucccaag

SEQ ID NO: 2679565 - RNA, 19 nt, Artificial Sequence
  Description of Artificial Sequence: Synthetic oligonucleotide
cugugcucguugucagucc

SEQ ID NO: 2679566 - RNA, 19 nt, Artificial Sequence
  Description of Artificial Sequence: Synthetic oligonucleotide
uucuucucucuguguugcc

SEQ ID NO: 2679567 - RNA, 19 nt, Artificial Sequence
  Description of Artificial Sequence: Synthetic oligonucleotide
gagcuggcgcucugcaacc

SEQ ID NO: 2679568 - RNA, 19 nt, Artificial Sequence
  Description of Artificial Sequence: Synthetic oligonucleotide
cuucacgcuccuccuuugc

SEQ ID NO: 2679569 - RNA, 19 nt, Artificial Sequence
  Description of Artificial Sequence: Synthetic oligonucleotide
cagacucuggaggaguuuc

SEQ ID NO: 2679570 - RNA, 19 nt, Artificial Sequence
  Description of Artificial Sequence: Synthetic oligonucleotide
uccuuugcacgcugagccu

SEQ ID NO: 2679571 - RNA, 19 nt, Artificial Sequence
  Description of Artificial Sequence: Synthetic oligonucleotide
uggaggaguuucucccugu

SEQ ID NO: 2679572 - RNA, 19 nt, Artificial Sequence
  Description of Artificial Sequence: Synthetic oligonucleotide
uccucuugcgcccgccagu

SEQ ID NO: 2679573 - RNA, 19 nt, Artificial Sequence
  Description of Artificial Sequence: Synthetic oligonucleotide
aagccuggagcuggcgcuc

SEQ ID NO: 2679574 - RNA, 19 nt, Artificial Sequence
  Description of Artificial Sequence: Synthetic oligonucleotide
cucccgagcuuucuccagc

SEQ ID NO: 2679575 - RNA, 19 nt, Artificial Sequence
  Description of Artificial Sequence: Synthetic oligonucleotide
ugacguguccguagggcuu

SEQ ID NO: 2679576 - RNA, 19 nt, Artificial Sequence
  Description of Artificial Sequence: Synthetic oligonucleotide
ugcucguugucagucccca

SEQ ID NO: 2679577 - RNA, 19 nt, Artificial Sequence
  Description of Artificial Sequence: Synthetic oligonucleotide
gucugucccgagcacuuug

SEQ ID NO: 2679578 - RNA, 19 nt, Artificial Sequence
  Description of Artificial Sequence: Synthetic oligonucleotide
ugaccuguuucaaccgcuu

SEQ ID NO: 2679579 - RNA, 19 nt, Artificial Sequence
  Description of Artificial Sequence: Synthetic oligonucleotide
uucagcucuucacgcuccu

SEQ ID NO: 2679580 - RNA, 19 nt, Artificial Sequence
  Description of Artificial Sequence: Synthetic oligonucleotide
ugacugccuugccuccucc

SEQ ID NO: 2679581 - RNA, 19 nt, Artificial Sequence
  Description of Artificial Sequence: Synthetic oligonucleotide
ucccuguguuuuagggucu

SEQ ID NO: 2679582 - RNA, 19 nt, Artificial Sequence
  Description of Artificial Sequence: Synthetic oligonucleotide
cucaucagucugucccgag

SEQ ID NO: 2679583 - RNA, 19 nt, Artificial Sequence
  Description of Artificial Sequence: Synthetic oligonucleotide
agcagagcaucggagugcu

SEQ ID NO: 2679584 - RNA, 19 nt, Artificial Sequence
  Description of Artificial Sequence: Synthetic oligonucleotide
gcagcagagcaucggagug

SEQ ID NO: 2679585 - RNA, 19 nt, Artificial Sequence
  Description of Artificial Sequence: Synthetic oligonucleotide
agccaugaucuuggccucc

SEQ ID NO: 2679586 - RNA, 19 nt, Artificial Sequence
  Description of Artificial Sequence: Synthetic oligonucleotide
ucccgagcuuucuccagcu

SEQ ID NO: 2679587 - RNA, 19 nt, Artificial Sequence
  Description of Artificial Sequence: Synthetic oligonucleotide
ucuccucuugcgcccgcca

SEQ ID NO: 2679588 - RNA, 19 nt, Artificial Sequence
  Description of Artificial Sequence: Synthetic oligonucleotide
gacguguccguagggcuug

SEQ ID NO: 2679589 - RNA, 19 nt, Artificial Sequence
  Description of Artificial Sequence: Synthetic oligonucleotide
agguccaacucaagcucac

SEQ ID NO: 2679590 - RNA, 19 nt, Artificial Sequence
  Description of Artificial Sequence: Synthetic oligonucleotide
uucucucuuuucccacauc

SEQ ID NO: 2679591 - RNA, 19 nt, Artificial Sequence
  Description of Artificial Sequence: Synthetic oligonucleotide
ucugcaaccugggcuucca

SEQ ID NO: 2679592 - RNA, 19 nt, Artificial Sequence
  Description of Artificial Sequence: Synthetic oligonucleotide
cugagccugacugccuugc

SEQ ID NO: 2679593 - RNA, 19 nt, Artificial Sequence
  Description of Artificial Sequence: Synthetic oligonucleotide
caacucaagcucacgaagu

SEQ ID NO: 2679594 - RNA, 19 nt, Artificial Sequence
  Description of Artificial Sequence: Synthetic oligonucleotide
augaccuguuucaaccgcu

SEQ ID NO: 2679595 - RNA, 19 nt, Artificial Sequence
  Description of Artificial Sequence: Synthetic oligonucleotide
guagggcuugggccgguag

SEQ ID NO: 2679596 - RNA, 19 nt, Artificial Sequence
  Description of Artificial Sequence: Synthetic oligonucleotide
gugcuguucugcccgcuug

SEQ ID NO: 2679597 - RNA, 19 nt, Artificial Sequence
  Description of Artificial Sequence: Synthetic oligonucleotide
ccgagcuuucuccagcugc

SEQ ID NO: 2679598 - RNA, 19 nt, Artificial Sequence
  Description of Artificial Sequence: Synthetic oligonucleotide
accugcugggcugcuuccc

SEQ ID NO: 2679599 - RNA, 19 nt, Artificial Sequence
  Description of Artificial Sequence: Synthetic oligonucleotide
cagcagagcaucggagugc

SEQ ID NO: 2679600 - RNA, 19 nt, Artificial Sequence
  Description of Artificial Sequence: Synthetic oligonucleotide
caggccauuuugacguguc

SEQ ID NO: 2679601 - RNA, 19 nt, Artificial Sequence
  Description of Artificial Sequence: Synthetic oligonucleotide
guccccaggccauuuugac

SEQ ID NO: 2679602 - RNA, 19 nt, Artificial Sequence
  Description of Artificial Sequence: Synthetic oligonucleotide
ucucucuguguugcccaag

SEQ ID NO: 2679603 - RNA, 19 nt, Artificial Sequence
  Description of Artificial Sequence: Synthetic oligonucleotide
cagaaccucacucaucagu

SEQ ID NO: 2679604 - RNA, 19 nt, Artificial Sequence
  Description of Artificial Sequence: Synthetic oligonucleotide
cuccaucuuuucucguauc

SEQ ID NO: 2679605 - RNA, 19 nt, Artificial Sequence
  Description of Artificial Sequence: Synthetic oligonucleotide
gacucuggaggaguuucuc

SEQ ID NO: 2679606 - RNA, 19 nt, Artificial Sequence
  Description of Artificial Sequence: Synthetic oligonucleotide
uucucucuguguugcccaa

SEQ ID NO: 2679607 - RNA, 19 nt, Artificial Sequence
  Description of Artificial Sequence: Synthetic oligonucleotide
cucagcaguagcugcagcu

SEQ ID NO: 2679608 - RNA, 19 nt, Artificial Sequence
  Description of Artificial Sequence: Synthetic oligonucleotide
caguccccaggccauuuug

SEQ ID NO: 2679609 - RNA, 19 nt, Artificial Sequence
  Description of Artificial Sequence: Synthetic oligonucleotide
uaucugcugcugccucccc

SEQ ID NO: 2679610 - RNA, 19 nt, Artificial Sequence
  Description of Artificial Sequence: Synthetic oligonucleotide
uccguagggcuugggccgg

SEQ ID NO: 2679611 - RNA, 19 nt, Artificial Sequence
  Description of Artificial Sequence: Synthetic oligonucleotide
agagcaucggagugcuguu

SEQ ID NO: 2679612 - RNA, 19 nt, Artificial Sequence
  Description of Artificial Sequence: Synthetic oligonucleotide
uagcccuccucagccauga

SEQ ID NO: 2679613 - RNA, 19 nt, Artificial Sequence
  Description of Artificial Sequence: Synthetic oligonucleotide
gacuucagcucuucacgcu

SEQ ID NO: 2679614 - RNA, 19 nt, Artificial Sequence
  Description of Artificial Sequence: Synthetic oligonucleotide
aguuucucccuguguuuua

SEQ ID NO: 2679615 - RNA, 19 nt, Artificial Sequence
  Description of Artificial Sequence: Synthetic oligonucleotide
caguagcugcagcucugcc

SEQ ID NO: 2679616 - RNA, 19 nt, Artificial Sequence
  Description of Artificial Sequence: Synthetic oligonucleotide
gaaccucacucaucagucu

SEQ ID NO: 2679617 - RNA, 19 nt, Artificial Sequence
  Description of Artificial Sequence: Synthetic oligonucleotide
ggaggaguuucucccugug

SEQ ID NO: 2679618 - RNA, 19 nt, Artificial Sequence
  Description of Artificial Sequence: Synthetic oligonucleotide
ucugccucccgagcuuucu

SEQ ID NO: 2679619 - RNA, 19 nt, Artificial Sequence
  Description of Artificial Sequence: Synthetic oligonucleotide
cuccucuugcgcccgccag

SEQ ID NO: 2679620 - RNA, 19 nt, Artificial Sequence
  Description of Artificial Sequence: Synthetic oligonucleotide
ugccuccccgccagaaccu

SEQ ID NO: 2679621 - RNA, 19 nt, Artificial Sequence
  Description of Artificial Sequence: Synthetic oligonucleotide
uugcacgcugagccugacu

SEQ ID NO: 2679622 - RNA, 19 nt, Artificial Sequence
  Description of Artificial Sequence: Synthetic oligonucleotide
cuugcgcccgccaguucug

SEQ ID NO: 2679623 - RNA, 19 nt, Artificial Sequence
  Description of Artificial Sequence: Synthetic oligonucleotide
ccgguagcccuccucagcc

SEQ ID NO: 2679624 - RNA, 19 nt, Artificial Sequence
  Description of Artificial Sequence: Synthetic oligonucleotide
guucugcccgcuugaguuc

SEQ ID NO: 2679625 - RNA, 19 nt, Artificial Sequence
  Description of Artificial Sequence: Synthetic oligonucleotide
cucgcuggcuucuugcugu

SEQ ID NO: 2679626 - RNA, 19 nt, Artificial Sequence
  Description of Artificial Sequence: Synthetic oligonucleotide
agugcuguucugcccgcuu

SEQ ID NO: 2679627 - RNA, 19 nt, Artificial Sequence
  Description of Artificial Sequence: Synthetic oligonucleotide
ccuugccuccuccagacuc

SEQ ID NO: 2679628 - RNA, 19 nt, Artificial Sequence
  Description of Artificial Sequence: Synthetic oligonucleotide
cagccaugaucuuggccuc

SEQ ID NO: 2679629 - RNA, 19 nt, Artificial Sequence
  Description of Artificial Sequence: Synthetic oligonucleotide
ucucgagcccacucugcuu

SEQ ID NO: 2679630 - RNA, 19 nt, Artificial Sequence
  Description of Artificial Sequence: Synthetic oligonucleotide
ucaguccccaggccauuuu

SEQ ID NO: 2679631 - RNA, 19 nt, Artificial Sequence
  Description of Artificial Sequence: Synthetic oligonucleotide
ucccaagccuggagcuggc

SEQ ID NO: 2679632 - RNA, 19 nt, Artificial Sequence
  Description of Artificial Sequence: Synthetic oligonucleotide
cucuguguugcccaagaau

SEQ ID NO: 2679633 - RNA, 19 nt, Artificial Sequence
  Description of Artificial Sequence: Synthetic oligonucleotide
accucacucaucagucugu

SEQ ID NO: 2679634 - RNA, 19 nt, Artificial Sequence
  Description of Artificial Sequence: Synthetic oligonucleotide
acucaucagucugucccga

SEQ ID NO: 2679635 - RNA, 19 nt, Artificial Sequence
  Description of Artificial Sequence: Synthetic oligonucleotide
cggagugcuguucugcccg

SEQ ID NO: 2679636 - RNA, 19 nt, Artificial Sequence
  Description of Artificial Sequence: Synthetic oligonucleotide
cuuugcacgcugagccuga

SEQ ID NO: 2679637 - RNA, 19 nt, Artificial Sequence
  Description of Artificial Sequence: Synthetic oligonucleotide
cacuuugcucucgagccca

SEQ ID NO: 2679638 - RNA, 19 nt, Artificial Sequence
  Description of Artificial Sequence: Synthetic oligonucleotide
gcugcagcagagcaucgga

SEQ ID NO: 2679639 - RNA, 19 nt, Artificial Sequence
  Description of Artificial Sequence: Synthetic oligonucleotide
aguccccaggccauuuuga

SEQ ID NO: 2679640 - RNA, 19 nt, Artificial Sequence
  Description of Artificial Sequence: Synthetic oligonucleotide
gguccaacucaagcucacg

SEQ ID NO: 2679641 - RNA, 19 nt, Artificial Sequence
  Description of Artificial Sequence: Synthetic oligonucleotide
gacugccuugccuccucca

SEQ ID NO: 2679642 - RNA, 19 nt, Artificial Sequence
  Description of Artificial Sequence: Synthetic oligonucleotide
acuuugcucucgagcccac

SEQ ID NO: 2679643 - RNA, 19 nt, Artificial Sequence
  Description of Artificial Sequence: Synthetic oligonucleotide
caaccugggcuuccagcuc

SEQ ID NO: 2679644 - RNA, 19 nt, Artificial Sequence
  Description of Artificial Sequence: Synthetic oligonucleotide
cccaagaauuuaucacgug

SEQ ID NO: 2679645 - RNA, 19 nt, Artificial Sequence
  Description of Artificial Sequence: Synthetic oligonucleotide
gagccugacugccuugccu

SEQ ID NO: 2679646 - RNA, 19 nt, Artificial Sequence
  Description of Artificial Sequence: Synthetic oligonucleotide
cagagcaucggagugcugu

SEQ ID NO: 2679647 - RNA, 19 nt, Artificial Sequence
  Description of Artificial Sequence: Synthetic oligonucleotide
gcaaccugggcuuccagcu

SEQ ID NO: 2679648 - RNA, 19 nt, Artificial Sequence
  Description of Artificial Sequence: Synthetic oligonucleotide
guucugcuccaucuuuucu

SEQ ID NO: 2679649 - RNA, 19 nt, Artificial Sequence
  Description of Artificial Sequence: Synthetic oligonucleotide
caagccuggagcuggcgcu

SEQ ID NO: 2679650 - RNA, 19 nt, Artificial Sequence
  Description of Artificial Sequence: Synthetic oligonucleotide
ccaucuuuucucguaucug

SEQ ID NO: 2679651 - RNA, 19 nt, Artificial Sequence
  Description of Artificial Sequence: Synthetic oligonucleotide
cuccucccucagcaguagc

SEQ ID NO: 2679652 - RNA, 19 nt, Artificial Sequence
  Description of Artificial Sequence: Synthetic oligonucleotide
ucgagcccacucugcuucu

SEQ ID NO: 2679653 - RNA, 19 nt, Artificial Sequence
  Description of Artificial Sequence: Synthetic oligonucleotide
agacucuggaggaguuucu

SEQ ID NO: 2679654 - RNA, 19 nt, Artificial Sequence
  Description of Artificial Sequence: Synthetic oligonucleotide
ugggccgguagcccuccuc

SEQ ID NO: 2679655 - RNA, 19 nt, Artificial Sequence
  Description of Artificial Sequence: Synthetic oligonucleotide
gcuucucucuuuucccaca

SEQ ID NO: 2679656 - RNA, 19 nt, Artificial Sequence
  Description of Artificial Sequence: Synthetic oligonucleotide
cucugcaaccugggcuucc

SEQ ID NO: 2679657 - RNA, 19 nt, Artificial Sequence
  Description of Artificial Sequence: Synthetic oligonucleotide
gagcaucggagugcuguuc

SEQ ID NO: 2679658 - RNA, 19 nt, Artificial Sequence
  Description of Artificial Sequence: Synthetic oligonucleotide
gcuugaguuccuccucuuc

SEQ ID NO: 2679659 - RNA, 19 nt, Artificial Sequence
  Description of Artificial Sequence: Synthetic oligonucleotide
agcucugccucccgagcuu

SEQ ID NO: 2679660 - RNA, 19 nt, Artificial Sequence
  Description of Artificial Sequence: Synthetic oligonucleotide
cccuccucagccaugaucu

SEQ ID NO: 2679661 - RNA, 19 nt, Artificial Sequence
  Description of Artificial Sequence: Synthetic oligonucleotide
uuugcacgcugagccugac

SEQ ID NO: 2679662 - RNA, 19 nt, Artificial Sequence
  Description of Artificial Sequence: Synthetic oligonucleotide
gcugggcugcuucccaagc

SEQ ID NO: 2679663 - RNA, 19 nt, Artificial Sequence
  Description of Artificial Sequence: Synthetic oligonucleotide
gcagcucugccucccgagc

SEQ ID NO: 2679664 - RNA, 19 nt, Artificial Sequence
  Description of Artificial Sequence: Synthetic oligonucleotide
cugcaaccugggcuuccag

SEQ ID NO: 2679665 - RNA, 19 nt, Artificial Sequence
  Description of Artificial Sequence: Synthetic oligonucleotide
cuugggccgguagcccucc

SEQ ID NO: 2679666 - RNA, 19 nt, Artificial Sequence
  Description of Artificial Sequence: Synthetic oligonucleotide
gccauuuugacguguccgu

SEQ ID NO: 2679667 - RNA, 19 nt, Artificial Sequence
  Description of Artificial Sequence: Synthetic oligonucleotide
ucccgagcacuuugcucuc

SEQ ID NO: 2679668 - RNA, 19 nt, Artificial Sequence
  Description of Artificial Sequence: Synthetic oligonucleotide
gaguuucucccuguguuuu

SEQ ID NO: 2679669 - RNA, 19 nt, Artificial Sequence
  Description of Artificial Sequence: Synthetic oligonucleotide
uggccuccugcugcagcag

SEQ ID NO: 2679670 - RNA, 19 nt, Artificial Sequence
  Description of Artificial Sequence: Synthetic oligonucleotide
gugcucguugucagucccc

SEQ ID NO: 2679671 - RNA, 19 nt, Artificial Sequence
  Description of Artificial Sequence: Synthetic oligonucleotide
cuggagcuggcgcucugca

SEQ ID NO: 2679672 - RNA, 19 nt, Artificial Sequence
  Description of Artificial Sequence: Synthetic oligonucleotide
ggagugcuguucugcccgc

SEQ ID NO: 2679673 - RNA, 19 nt, Artificial Sequence
  Description of Artificial Sequence: Synthetic oligonucleotide
ccuuugcacgcugagccug

SEQ ID NO: 2679674 - RNA, 19 nt, Artificial Sequence
  Description of Artificial Sequence: Synthetic oligonucleotide
gcacgcugagccugacugc

SEQ ID NO: 2679675 - RNA, 19 nt, Artificial Sequence
  Description of Artificial Sequence: Synthetic oligonucleotide
ugcgcccgccaguucugcu

SEQ ID NO: 2679676 - RNA, 19 nt, Artificial Sequence
  Description of Artificial Sequence: Synthetic oligonucleotide
cuguguuuuagggucuccu

SEQ ID NO: 2679677 - RNA, 19 nt, Artificial Sequence
  Description of Artificial Sequence: Synthetic oligonucleotide
gcaguagcugcagcucugc

SEQ ID NO: 2679678 - RNA, 19 nt, Artificial Sequence
  Description of Artificial Sequence: Synthetic oligonucleotide
uccccgccagaaccucacu

SEQ ID NO: 2679679 - RNA, 19 nt, Artificial Sequence
  Description of Artificial Sequence: Synthetic oligonucleotide
guagcccuccucagccaug

SEQ ID NO: 2679680 - RNA, 19 nt, Artificial Sequence
  Description of Artificial Sequence: Synthetic oligonucleotide
ccccaggccauuuugacgu

SEQ ID NO: 2679681 - RNA, 19 nt, Artificial Sequence
  Description of Artificial Sequence: Synthetic oligonucleotide
cugccucccgagcuuucuc

SEQ ID NO: 2679682 - RNA, 19 nt, Artificial Sequence
  Description of Artificial Sequence: Synthetic oligonucleotide
gggccgguagcccuccuca

SEQ ID NO: 2679683 - RNA, 19 nt, Artificial Sequence
  Description of Artificial Sequence: Synthetic oligonucleotide
ggcgcucugcaaccugggc

SEQ ID NO: 2679684 - RNA, 19 nt, Artificial Sequence
  Description of Artificial Sequence: Synthetic oligonucleotide
gagcccacucugcuucucu

SEQ ID NO: 2679685 - RNA, 19 nt, Artificial Sequence
  Description of Artificial Sequence: Synthetic oligonucleotide
gcaucggagugcuguucug

SEQ ID NO: 2679686 - RNA, 19 nt, Artificial Sequence
  Description of Artificial Sequence: Synthetic oligonucleotide
ccuccuuugcacgcugagc

SEQ ID NO: 2679687 - RNA, 19 nt, Artificial Sequence
  Description of Artificial Sequence: Synthetic oligonucleotide
gcccuccucagccaugauc

SEQ ID NO: 2679688 - RNA, 19 nt, Artificial Sequence
  Description of Artificial Sequence: Synthetic oligonucleotide
uggcugacuucagcucuuc

SEQ ID NO: 2679689 - RNA, 19 nt, Artificial Sequence
  Description of Artificial Sequence: Synthetic oligonucleotide
ugcugccuccccgccagaa

SEQ ID NO: 2679690 - RNA, 19 nt, Artificial Sequence
  Description of Artificial Sequence: Synthetic oligonucleotide
cccgccagaaccucacuca

SEQ ID NO: 2679691 - RNA, 19 nt, Artificial Sequence
  Description of Artificial Sequence: Synthetic oligonucleotide
gcuucccaagccuggagcu

SEQ ID NO: 2679692 - RNA, 19 nt, Artificial Sequence
  Description of Artificial Sequence: Synthetic oligonucleotide
cccacaucuccuuggccuc

SEQ ID NO: 2679693 - RNA, 19 nt, Artificial Sequence
  Description of Artificial Sequence: Synthetic oligonucleotide
cucucgagcccacucugcu

SEQ ID NO: 2679694 - RNA, 19 nt, Artificial Sequence
  Description of Artificial Sequence: Synthetic oligonucleotide
uugcgcccgccaguucugc

SEQ ID NO: 2679695 - RNA, 19 nt, Artificial Sequence
  Description of Artificial Sequence: Synthetic oligonucleotide
cuguguugcccaagaauuu

SEQ ID NO: 2679696 - RNA, 19 nt, Artificial Sequence
  Description of Artificial Sequence: Synthetic oligonucleotide
gcugagccugacugccuug

SEQ ID NO: 2679697 - RNA, 19 nt, Artificial Sequence
  Description of Artificial Sequence: Synthetic oligonucleotide
cuucucucuuuucccacau

SEQ ID NO: 2679698 - RNA, 19 nt, Artificial Sequence
  Description of Artificial Sequence: Synthetic oligonucleotide
cagcaguagcugcagcucu

SEQ ID NO: 2679699 - RNA, 19 nt, Artificial Sequence
  Description of Artificial Sequence: Synthetic oligonucleotide
ccagaaccucacucaucag

SEQ ID NO: 2679700 - RNA, 19 nt, Artificial Sequence
  Description of Artificial Sequence: Synthetic oligonucleotide
gccugacugccuugccucc

SEQ ID NO: 2679701 - RNA, 19 nt, Artificial Sequence
  Description of Artificial Sequence: Synthetic oligonucleotide
gcuccuccuuugcacgcug

SEQ ID NO: 2679702 - RNA, 19 nt, Artificial Sequence
  Description of Artificial Sequence: Synthetic oligonucleotide
gcuucucugugcucguugu

SEQ ID NO: 2679703 - RNA, 19 nt, Artificial Sequence
  Description of Artificial Sequence: Synthetic oligonucleotide
gucuccucuugcgcccgcc

SEQ ID NO: 2679704 - RNA, 19 nt, Artificial Sequence
  Description of Artificial Sequence: Synthetic oligonucleotide
gaccuguuucaaccgcuuu

SEQ ID NO: 2679705 - RNA, 19 nt, Artificial Sequence
  Description of Artificial Sequence: Synthetic oligonucleotide
cucugccucccgagcuuuc

SEQ ID NO: 2679706 - RNA, 19 nt, Artificial Sequence
  Description of Artificial Sequence: Synthetic oligonucleotide
cuccuccuuugcacgcuga

SEQ ID NO: 2679707 - RNA, 19 nt, Artificial Sequence
  Description of Artificial Sequence: Synthetic oligonucleotide
gcucguugucaguccccag

SEQ ID NO: 2679708 - RNA, 19 nt, Artificial Sequence
  Description of Artificial Sequence: Synthetic oligonucleotide
ccucccucagcaguagcug

SEQ ID NO: 2679709 - RNA, 19 nt, Artificial Sequence
  Description of Artificial Sequence: Synthetic oligonucleotide
ugucaguccccaggccauu

SEQ ID NO: 2679710 - RNA, 19 nt, Artificial Sequence
  Description of Artificial Sequence: Synthetic oligonucleotide
cucuucacgcuccuccuuu

SEQ ID NO: 2679711 - RNA, 19 nt, Artificial Sequence
  Description of Artificial Sequence: Synthetic oligonucleotide
ggccgguagcccuccucag

SEQ ID NO: 2679712 - RNA, 19 nt, Artificial Sequence
  Description of Artificial Sequence: Synthetic oligonucleotide
ccucccgagcuuucuccag

SEQ ID NO: 2679713 - RNA, 19 nt, Artificial Sequence
  Description of Artificial Sequence: Synthetic oligonucleotide
caguucugcuccaucuuuu

SEQ ID NO: 2679714 - RNA, 19 nt, Artificial Sequence
  Description of Artificial Sequence: Synthetic oligonucleotide
guguugcccaagaauuuau

SEQ ID NO: 2679715 - RNA, 19 nt, Artificial Sequence
  Description of Artificial Sequence: Synthetic oligonucleotide
acguguccguagggcuugg

SEQ ID NO: 2679716 - RNA, 19 nt, Artificial Sequence
  Description of Artificial Sequence: Synthetic oligonucleotide
gcgcucugcaaccugggcu

SEQ ID NO: 2679717 - RNA, 19 nt, Artificial Sequence
  Description of Artificial Sequence: Synthetic oligonucleotide
gccuccugcugcagcagag

SEQ ID NO: 2679718 - RNA, 19 nt, Artificial Sequence
  Description of Artificial Sequence: Synthetic oligonucleotide
cacucugcuucucucuuuu

SEQ ID NO: 2679719 - RNA, 19 nt, Artificial Sequence
  Description of Artificial Sequence: Synthetic oligonucleotide
ucgcuggcuucuugcuguu

SEQ ID NO: 2679720 - RNA, 19 nt, Artificial Sequence
  Description of Artificial Sequence: Synthetic oligonucleotide
gcuccaucuuuucucguau

SEQ ID NO: 2679721 - RNA, 19 nt, Artificial Sequence
  Description of Artificial Sequence: Synthetic oligonucleotide
gcugccuccccgccagaac

SEQ ID NO: 2679722 - RNA, 19 nt, Artificial Sequence
  Description of Artificial Sequence: Synthetic oligonucleotide
ccuguguuuuagggucucc

SEQ ID NO: 2679723 - RNA, 19 nt, Artificial Sequence
  Description of Artificial Sequence: Synthetic oligonucleotide
gcccaagaauuuaucacgu

SEQ ID NO: 2679724 - RNA, 19 nt, Artificial Sequence
  Description of Artificial Sequence: Synthetic oligonucleotide
ggcugacuucagcucuuca

SEQ ID NO: 2679725 - RNA, 19 nt, Artificial Sequence
  Description of Artificial Sequence: Synthetic oligonucleotide
gcucucgagcccacucugc

SEQ ID NO: 2679726 - RNA, 19 nt, Artificial Sequence
  Description of Artificial Sequence: Synthetic oligonucleotide
agucugucccgagcacuuu

SEQ ID NO: 2679727 - RNA, 19 nt, Artificial Sequence
  Description of Artificial Sequence: Synthetic oligonucleotide
cucguaucugcugcugccu

SEQ ID NO: 2679728 - RNA, 19 nt, Artificial Sequence
  Description of Artificial Sequence: Synthetic oligonucleotide
cuguucugcccgcuugagu

SEQ ID NO: 2679729 - RNA, 19 nt, Artificial Sequence
  Description of Artificial Sequence: Synthetic oligonucleotide
uugggccgguagcccuccu

SEQ ID NO: 2679730 - RNA, 19 nt, Artificial Sequence
  Description of Artificial Sequence: Synthetic oligonucleotide
gcuccucgcuggcuucuug

SEQ ID NO: 2679731 - RNA, 19 nt, Artificial Sequence
  Description of Artificial Sequence: Synthetic oligonucleotide
gggucuccucuugcgcccg

SEQ ID NO: 2679732 - RNA, 19 nt, Artificial Sequence
  Description of Artificial Sequence: Synthetic oligonucleotide
ccucacucaucagucuguc

SEQ ID NO: 2679733 - RNA, 19 nt, Artificial Sequence
  Description of Artificial Sequence: Synthetic oligonucleotide
cccgcuugaguuccuccuc

SEQ ID NO: 2679734 - RNA, 19 nt, Artificial Sequence
  Description of Artificial Sequence: Synthetic oligonucleotide
cagcucugccucccgagcu

SEQ ID NO: 2679735 - RNA, 19 nt, Artificial Sequence
  Description of Artificial Sequence: Synthetic oligonucleotide
ccucagccaugaucuuggc

SEQ ID NO: 2679736 - RNA, 19 nt, Artificial Sequence
  Description of Artificial Sequence: Synthetic oligonucleotide
ccuggcugacuucagcucu

SEQ ID NO: 2679737 - RNA, 19 nt, Artificial Sequence
  Description of Artificial Sequence: Synthetic oligonucleotide
cucuugcgcccgccaguuc

SEQ ID NO: 2679738 - RNA, 19 nt, Artificial Sequence
  Description of Artificial Sequence: Synthetic oligonucleotide
gccucccgagcuuucucca

SEQ ID NO: 2679739 - RNA, 19 nt, Artificial Sequence
  Description of Artificial Sequence: Synthetic oligonucleotide
cagucugucccgagcacuu

SEQ ID NO: 2679740 - RNA, 19 nt, Artificial Sequence
  Description of Artificial Sequence: Synthetic oligonucleotide
ccccgccagaaccucacuc

SEQ ID NO: 2679741 - RNA, 19 nt, Artificial Sequence
  Description of Artificial Sequence: Synthetic oligonucleotide
cuccagacucuggaggagu

SEQ ID NO: 2679742 - RNA, 19 nt, Artificial Sequence
  Description of Artificial Sequence: Synthetic oligonucleotide
ccuccagacucuggaggag

SEQ ID NO: 2679743 - RNA, 19 nt, Artificial Sequence
  Description of Artificial Sequence: Synthetic oligonucleotide
cgagcacuuugcucucgag

SEQ ID NO: 2679744 - RNA, 19 nt, Artificial Sequence
  Description of Artificial Sequence: Synthetic oligonucleotide
gguagcccuccucagccau

SEQ ID NO: 2679745 - RNA, 19 nt, Artificial Sequence
  Description of Artificial Sequence: Synthetic oligonucleotide
agccuggagcuggcgcucu

SEQ ID NO: 2679746 - RNA, 19 nt, Artificial Sequence
  Description of Artificial Sequence: Synthetic oligonucleotide
cucugugcucguugucagu

SEQ ID NO: 2679747 - RNA, 19 nt, Artificial Sequence
  Description of Artificial Sequence: Synthetic oligonucleotide
ccugcuccucgcuggcuuc

SEQ ID NO: 2679748 - RNA, 19 nt, Artificial Sequence
  Description of Artificial Sequence: Synthetic oligonucleotide
gcgcccgccaguucugcuc

SEQ ID NO: 2679749 - RNA, 19 nt, Artificial Sequence
  Description of Artificial Sequence: Synthetic oligonucleotide
acgcugagccugacugccu

SEQ ID NO: 2679750 - RNA, 19 nt, Artificial Sequence
  Description of Artificial Sequence: Synthetic oligonucleotide
cugucccgagcacuuugcu

SEQ ID NO: 2679751 - RNA, 19 nt, Artificial Sequence
  Description of Artificial Sequence: Synthetic oligonucleotide
ccaugaucuuggccuccug

SEQ ID NO: 2679752 - RNA, 19 nt, Artificial Sequence
  Description of Artificial Sequence: Synthetic oligonucleotide
gggcuugggccgguagccc

SEQ ID NO: 2679753 - RNA, 19 nt, Artificial Sequence
  Description of Artificial Sequence: Synthetic oligonucleotide
ggucuccucuugcgcccgc

SEQ ID NO: 2679754 - RNA, 19 nt, Artificial Sequence
  Description of Artificial Sequence: Synthetic oligonucleotide
cgcccgccaguucugcucc

SEQ ID NO: 2679755 - RNA, 19 nt, Artificial Sequence
  Description of Artificial Sequence: Synthetic oligonucleotide
ggcuugggccgguagcccu

SEQ ID NO: 2679756 - RNA, 19 nt, Artificial Sequence
  Description of Artificial Sequence: Synthetic oligonucleotide
ugcuccucgcuggcuucuu

SEQ ID NO: 2679757 - RNA, 19 nt, Artificial Sequence
  Description of Artificial Sequence: Synthetic oligonucleotide
gcccgcuugaguuccuccu

SEQ ID NO: 2679758 - RNA, 19 nt, Artificial Sequence
  Description of Artificial Sequence: Synthetic oligonucleotide
ggccuccucccucagcagu

SEQ ID NO: 2679759 - RNA, 19 nt, Artificial Sequence
  Description of Artificial Sequence: Synthetic oligonucleotide
gcuucuugugaagguccaa

SEQ ID NO: 2679760 - RNA, 19 nt, Artificial Sequence
  Description of Artificial Sequence: Synthetic oligonucleotide
cuggcugacuucagcucuu

SEQ ID NO: 2679761 - RNA, 19 nt, Artificial Sequence
  Description of Artificial Sequence: Synthetic oligonucleotide
ccucaaugaccuguuucaa

SEQ ID NO: 2679762 - RNA, 19 nt, Artificial Sequence
  Description of Artificial Sequence: Synthetic oligonucleotide
agcccuccucagccaugau

SEQ ID NO: 2679763 - RNA, 19 nt, Artificial Sequence
  Description of Artificial Sequence: Synthetic oligonucleotide
gcccacucugcuucucucu

SEQ ID NO: 2679764 - RNA, 19 nt, Artificial Sequence
  Description of Artificial Sequence: Synthetic oligonucleotide
cugcuccaucuuuucucgu

SEQ ID NO: 2679765 - RNA, 19 nt, Artificial Sequence
  Description of Artificial Sequence: Synthetic oligonucleotide
cccgagcacuuugcucucg

SEQ ID NO: 2679766 - RNA, 19 nt, Artificial Sequence
  Description of Artificial Sequence: Synthetic oligonucleotide
gagugcuguucugcccgcu

SEQ ID NO: 2679767 - RNA, 19 nt, Artificial Sequence
  Description of Artificial Sequence: Synthetic oligonucleotide
cccgagcuuucuccagcug

SEQ ID NO: 2679768 - RNA, 19 nt, Artificial Sequence
  Description of Artificial Sequence: Synthetic oligonucleotide
cccaagccuggagcuggcg

SEQ ID NO: 2679769 - RNA, 19 nt, Artificial Sequence
  Description of Artificial Sequence: Synthetic oligonucleotide
cccaggccauuuugacgug

SEQ ID NO: 2679770 - RNA, 19 nt, Artificial Sequence
  Description of Artificial Sequence: Synthetic oligonucleotide
ccgagcacuuugcucucga

SEQ ID NO: 2679771 - RNA, 19 nt, Artificial Sequence
  Description of Artificial Sequence: Synthetic oligonucleotide
ccauuuugacguguccgua

SEQ ID NO: 2679772 - RNA, 19 nt, Artificial Sequence
  Description of Artificial Sequence: Synthetic oligonucleotide
cgccagaaccucacucauc

SEQ ID NO: 2679773 - RNA, 19 nt, Artificial Sequence
  Description of Artificial Sequence: Synthetic oligonucleotide
gcuugggccgguagcccuc

SEQ ID NO: 2679774 - RNA, 19 nt, Artificial Sequence
  Description of Artificial Sequence: Synthetic oligonucleotide
cccuguguuuuagggucuc

SEQ ID NO: 2679775 - RNA, 19 nt, Artificial Sequence
  Description of Artificial Sequence: Synthetic oligonucleotide
cuuugcucucgagcccacu

SEQ ID NO: 2679776 - RNA, 19 nt, Artificial Sequence
  Description of Artificial Sequence: Synthetic oligonucleotide
ccgccaguucugcuccauc

SEQ ID NO: 2679777 - RNA, 19 nt, Artificial Sequence
  Description of Artificial Sequence: Synthetic oligonucleotide
cgccaguucugcuccaucu

SEQ ID NO: 2679778 - RNA, 19 nt, Artificial Sequence
  Description of Artificial Sequence: Synthetic oligonucleotide
gccaugaucuuggccuccu

SEQ ID NO: 2679779 - RNA, 19 nt, Artificial Sequence
  Description of Artificial Sequence: Synthetic oligonucleotide
cagcuccugcuuccuggcu

SEQ ID NO: 2679780 - RNA, 19 nt, Artificial Sequence
  Description of Artificial Sequence: Synthetic oligonucleotide
ccuccccgccagaaccuca

SEQ ID NO: 2679781 - RNA, 19 nt, Artificial Sequence
  Description of Artificial Sequence: Synthetic oligonucleotide
ccgcuugaguuccuccucu

SEQ ID NO: 2679782 - RNA, 19 nt, Artificial Sequence
  Description of Artificial Sequence: Synthetic oligonucleotide
gcagagcaucggagugcug

SEQ ID NO: 2679783 - RNA, 19 nt, Artificial Sequence
  Description of Artificial Sequence: Synthetic oligonucleotide
cguguccguagggcuuggg

SEQ ID NO: 2679784 - RNA, 19 nt, Artificial Sequence
  Description of Artificial Sequence: Synthetic oligonucleotide
cugcuccucgcuggcuucu

SEQ ID NO: 2679785 - RNA, 19 nt, Artificial Sequence
  Description of Artificial Sequence: Synthetic oligonucleotide
gccuccccgccagaaccuc

SEQ ID NO: 2679786 - RNA, 19 nt, Artificial Sequence
  Description of Artificial Sequence: Synthetic oligonucleotide
cugcugccuccccgccaga

SEQ ID NO: 2679787 - RNA, 19 nt, Artificial Sequence
  Description of Artificial Sequence: Synthetic oligonucleotide
cccacucugcuucucucuu

SEQ ID NO: 2679788 - RNA, 19 nt, Artificial Sequence
  Description of Artificial Sequence: Synthetic oligonucleotide
ccgccagaaccucacucau

SEQ ID NO: 2679789 - RNA, 19 nt, Artificial Sequence
  Description of Artificial Sequence: Synthetic oligonucleotide
cgguagcccuccucagcca

SEQ ID NO: 2679790 - RNA, 19 nt, Artificial Sequence
  Description of Artificial Sequence: Synthetic oligonucleotide
ccaggccauuuugacgugu

SEQ ID NO: 2679791 - RNA, 19 nt, Artificial Sequence
  Description of Artificial Sequence: Synthetic oligonucleotide
gccuugccuccuccagacu

SEQ ID NO: 2679792 - RNA, 19 nt, Artificial Sequence
  Description of Artificial Sequence: Synthetic oligonucleotide
gcccgccaguucugcucca

SEQ ID NO: 2679793 - RNA, 19 nt, Artificial Sequence
  Description of Artificial Sequence: Synthetic oligonucleotide
ccugacugccuugccuccu

SEQ ID NO: 2679794 - RNA, 19 nt, Artificial Sequence
  Description of Artificial Sequence: Synthetic oligonucleotide
cgagcccacucugcuucuc

SEQ ID NO: 2679795 - RNA, 19 nt, Artificial Sequence
  Description of Artificial Sequence: Synthetic oligonucleotide
ccucuugcgcccgccaguu

SEQ ID NO: 2679796 - RNA, 19 nt, Artificial Sequence
  Description of Artificial Sequence: Synthetic oligonucleotide
ccagacucuggaggaguuu

SEQ ID NO: 2679797 - RNA, 19 nt, Artificial Sequence
  Description of Artificial Sequence: Synthetic oligonucleotide
cgcuugaguuccuccucuu

SEQ ID NO: 2679798 - RNA, 19 nt, Artificial Sequence
  Description of Artificial Sequence: Synthetic oligonucleotide
cgcuccuccuuugcacgcu

SEQ ID NO: 2679799 - RNA, 19 nt, Artificial Sequence
  Description of Artificial Sequence: Synthetic oligonucleotide
cguagggcuugggccggua

SEQ ID NO: 2679800 - RNA, 19 nt, Artificial Sequence
  Description of Artificial Sequence: Synthetic oligonucleotide
cccgccaguucugcuccau

SEQ ID NO: 2679801 - RNA, 19 nt, Artificial Sequence
  Description of Artificial Sequence: Synthetic oligonucleotide
ccguagggcuugggccggu

SEQ ID NO: 2679802 - RNA, 19 nt, Artificial Sequence
  Description of Artificial Sequence: Synthetic oligonucleotide
cgcuggcuucuugcuguuu

SEQ ID NO: 2679803 - RNA, 19 nt, Artificial Sequence
  Description of Artificial Sequence: Synthetic oligonucleotide
aaauuuaucaucuccacaa

SEQ ID NO: 2679804 - RNA, 19 nt, Artificial Sequence
  Description of Artificial Sequence: Synthetic oligonucleotide
uuuaucaucuccacaauca

SEQ ID NO: 2679805 - RNA, 19 nt, Artificial Sequence
  Description of Artificial Sequence: Synthetic oligonucleotide
aaggcaugggccuugcacc

SEQ ID NO: 2679806 - RNA, 19 nt, Artificial Sequence
  Description of Artificial Sequence: Synthetic oligonucleotide
aaaacacucaaacacgcca

SEQ ID NO: 2679807 - RNA, 19 nt, Artificial Sequence
  Description of Artificial Sequence: Synthetic oligonucleotide
acucaaacacgccacaccc

SEQ ID NO: 2679808 - RNA, 19 nt, Artificial Sequence
  Description of Artificial Sequence: Synthetic oligonucleotide
gaugcaaccaaaucugugc

SEQ ID NO: 2679809 - RNA, 19 nt, Artificial Sequence
  Description of Artificial Sequence: Synthetic oligonucleotide
ucaaaacacucaaacacgc

SEQ ID NO: 2679810 - RNA, 19 nt, Artificial Sequence
  Description of Artificial Sequence: Synthetic oligonucleotide
aagaguuguucucaaaaca

SEQ ID NO: 2679811 - RNA, 19 nt, Artificial Sequence
  Description of Artificial Sequence: Synthetic oligonucleotide
cucaaaacacucaaacacg

SEQ ID NO: 2679812 - RNA, 19 nt, Artificial Sequence
  Description of Artificial Sequence: Synthetic oligonucleotide
augcaaaucccauguaagc

SEQ ID NO: 2679813 - RNA, 19 nt, Artificial Sequence
  Description of Artificial Sequence: Synthetic oligonucleotide
auucacgagguccacauag

SEQ ID NO: 2679814 - RNA, 19 nt, Artificial Sequence
  Description of Artificial Sequence: Synthetic oligonucleotide
uugauugccggacacuucc

SEQ ID NO: 2679815 - RNA, 19 nt, Artificial Sequence
  Description of Artificial Sequence: Synthetic oligonucleotide
aauuuuccagcguugugca

SEQ ID NO: 2679816 - RNA, 19 nt, Artificial Sequence
  Description of Artificial Sequence: Synthetic oligonucleotide
ucggauuucacaagaguug

SEQ ID NO: 2679817 - RNA, 19 nt, Artificial Sequence
  Description of Artificial Sequence: Synthetic oligonucleotide
uuuacaucuuccccacagg

SEQ ID NO: 2679818 - RNA, 19 nt, Artificial Sequence
  Description of Artificial Sequence: Synthetic oligonucleotide
aaauucacgagguccacau

SEQ ID NO: 2679819 - RNA, 19 nt, Artificial Sequence
  Description of Artificial Sequence: Synthetic oligonucleotide
ugagcacagaucaugcuug

SEQ ID NO: 2679820 - RNA, 19 nt, Artificial Sequence
  Description of Artificial Sequence: Synthetic oligonucleotide
agaccuggauucuuugugc

SEQ ID NO: 2679821 - RNA, 19 nt, Artificial Sequence
  Description of Artificial Sequence: Synthetic oligonucleotide
uccuugaugaaugacuucc

SEQ ID NO: 2679822 - RNA, 19 nt, Artificial Sequence
  Description of Artificial Sequence: Synthetic oligonucleotide
aguagaaggucccugaaau

SEQ ID NO: 2679823 - RNA, 19 nt, Artificial Sequence
  Description of Artificial Sequence: Synthetic oligonucleotide
ugcugcugagcacagauca

SEQ ID NO: 2679824 - RNA, 19 nt, Artificial Sequence
  Description of Artificial Sequence: Synthetic oligonucleotide
acaaucacaccgauguucc

SEQ ID NO: 2679825 - RNA, 19 nt, Artificial Sequence
  Description of Artificial Sequence: Synthetic oligonucleotide
ugaaauuuaucaucuccac

SEQ ID NO: 2679826 - RNA, 19 nt, Artificial Sequence
  Description of Artificial Sequence: Synthetic oligonucleotide
aaugacuuccccugggcgu

SEQ ID NO: 2679827 - RNA, 19 nt, Artificial Sequence
  Description of Artificial Sequence: Synthetic oligonucleotide
aaacacgccacaccccacg

SEQ ID NO: 2679828 - RNA, 19 nt, Artificial Sequence
  Description of Artificial Sequence: Synthetic oligonucleotide
ucaaacacgccacacccca

SEQ ID NO: 2679829 - RNA, 19 nt, Artificial Sequence
  Description of Artificial Sequence: Synthetic oligonucleotide
cuuuacaucuuccccacag

SEQ ID NO: 2679830 - RNA, 19 nt, Artificial Sequence
  Description of Artificial Sequence: Synthetic oligonucleotide
agucaugcaaaucccaugu

SEQ ID NO: 2679831 - RNA, 19 nt, Artificial Sequence
  Description of Artificial Sequence: Synthetic oligonucleotide
caucuccacaaucacaccg

SEQ ID NO: 2679832 - RNA, 19 nt, Artificial Sequence
  Description of Artificial Sequence: Synthetic oligonucleotide
uaagccucggauuucacaa

SEQ ID NO: 2679833 - RNA, 19 nt, Artificial Sequence
  Description of Artificial Sequence: Synthetic oligonucleotide
auugccggacacuuccugc

SEQ ID NO: 2679834 - RNA, 19 nt, Artificial Sequence
  Description of Artificial Sequence: Synthetic oligonucleotide
ugggccuugcaccucaggg

SEQ ID NO: 2679835 - RNA, 19 nt, Artificial Sequence
  Description of Artificial Sequence: Synthetic oligonucleotide
uugugcagaaaagucaugc

SEQ ID NO: 2679836 - RNA, 19 nt, Artificial Sequence
  Description of Artificial Sequence: Synthetic oligonucleotide
ugcaaaucccauguaagcc

SEQ ID NO: 2679837 - RNA, 19 nt, Artificial Sequence
  Description of Artificial Sequence: Synthetic oligonucleotide
acuagccuccuuuacaucu

SEQ ID NO: 2679838 - RNA, 19 nt, Artificial Sequence
  Description of Artificial Sequence: Synthetic oligonucleotide
aagucaugcaaaucccaug

SEQ ID NO: 2679839 - RNA, 19 nt, Artificial Sequence
  Description of Artificial Sequence: Synthetic oligonucleotide
gaaaagucaugcaaauccc

SEQ ID NO: 2679840 - RNA, 19 nt, Artificial Sequence
  Description of Artificial Sequence: Synthetic oligonucleotide
ucacgagguccacauaggg

SEQ ID NO: 2679841 - RNA, 19 nt, Artificial Sequence
  Description of Artificial Sequence: Synthetic oligonucleotide
acaagaguuguucucaaaa

SEQ ID NO: 2679842 - RNA, 19 nt, Artificial Sequence
  Description of Artificial Sequence: Synthetic oligonucleotide
ucccugaaauuuaucaucu

SEQ ID NO: 2679843 - RNA, 19 nt, Artificial Sequence
  Description of Artificial Sequence: Synthetic oligonucleotide
ugagguagcauucccucug

SEQ ID NO: 2679844 - RNA, 19 nt, Artificial Sequence
  Description of Artificial Sequence: Synthetic oligonucleotide
uuacaucuuccccacaggu

SEQ ID NO: 2679845 - RNA, 19 nt, Artificial Sequence
  Description of Artificial Sequence: Synthetic oligonucleotide
gaaauuuaucaucuccaca

SEQ ID NO: 2679846 - RNA, 19 nt, Artificial Sequence
  Description of Artificial Sequence: Synthetic oligonucleotide
auugaccaaacagugcugg

SEQ ID NO: 2679847 - RNA, 19 nt, Artificial Sequence
  Description of Artificial Sequence: Synthetic oligonucleotide
ugggcgucaaauuuuccag

SEQ ID NO: 2679848 - RNA, 19 nt, Artificial Sequence
  Description of Artificial Sequence: Synthetic oligonucleotide
uggaagaccaucuccuuga

SEQ ID NO: 2679849 - RNA, 19 nt, Artificial Sequence
  Description of Artificial Sequence: Synthetic oligonucleotide
aguuguucucaaaacacuc

SEQ ID NO: 2679850 - RNA, 19 nt, Artificial Sequence
  Description of Artificial Sequence: Synthetic oligonucleotide
uguucugcagggacaggcg

SEQ ID NO: 2679851 - RNA, 19 nt, Artificial Sequence
  Description of Artificial Sequence: Synthetic oligonucleotide
ugaugcaaccaaaucugug

SEQ ID NO: 2679852 - RNA, 19 nt, Artificial Sequence
  Description of Artificial Sequence: Synthetic oligonucleotide
uugaugaaugacuuccccu

SEQ ID NO: 2679853 - RNA, 19 nt, Artificial Sequence
  Description of Artificial Sequence: Synthetic oligonucleotide
ugugccgcaaggcaugggc

SEQ ID NO: 2679854 - RNA, 19 nt, Artificial Sequence
  Description of Artificial Sequence: Synthetic oligonucleotide
ugcaacuggaagaccaucu

SEQ ID NO: 2679855 - RNA, 19 nt, Artificial Sequence
  Description of Artificial Sequence: Synthetic oligonucleotide
caagaguuguucucaaaac

SEQ ID NO: 2679856 - RNA, 19 nt, Artificial Sequence
  Description of Artificial Sequence: Synthetic oligonucleotide
uccgcuguguucugcaggg

SEQ ID NO: 2679857 - RNA, 19 nt, Artificial Sequence
  Description of Artificial Sequence: Synthetic oligonucleotide
gagaccuggauucuuugug

SEQ ID NO: 2679858 - RNA, 19 nt, Artificial Sequence
  Description of Artificial Sequence: Synthetic oligonucleotide
uucacaagaguuguucuca

SEQ ID NO: 2679859 - RNA, 19 nt, Artificial Sequence
  Description of Artificial Sequence: Synthetic oligonucleotide
cuugaugaaugacuucccc

SEQ ID NO: 2679860 - RNA, 19 nt, Artificial Sequence
  Description of Artificial Sequence: Synthetic oligonucleotide
aggucccugaaauuuauca

SEQ ID NO: 2679861 - RNA, 19 nt, Artificial Sequence
  Description of Artificial Sequence: Synthetic oligonucleotide
uucacgagguccacauagg

SEQ ID NO: 2679862 - RNA, 19 nt, Artificial Sequence
  Description of Artificial Sequence: Synthetic oligonucleotide
auuucacaagaguuguucu

SEQ ID NO: 2679863 - RNA, 19 nt, Artificial Sequence
  Description of Artificial Sequence: Synthetic oligonucleotide
guagcauucccucugcaac

SEQ ID NO: 2679864 - RNA, 19 nt, Artificial Sequence
  Description of Artificial Sequence: Synthetic oligonucleotide
agccgcuccgcacacaugg

SEQ ID NO: 2679865 - RNA, 19 nt, Artificial Sequence
  Description of Artificial Sequence: Synthetic oligonucleotide
uccagcguugugcagaaaa

SEQ ID NO: 2679866 - RNA, 19 nt, Artificial Sequence
  Description of Artificial Sequence: Synthetic oligonucleotide
gaugcuucgggugacuagc

SEQ ID NO: 2679867 - RNA, 19 nt, Artificial Sequence
  Description of Artificial Sequence: Synthetic oligonucleotide
ugugcugcugagcacagau

SEQ ID NO: 2679868 - RNA, 19 nt, Artificial Sequence
  Description of Artificial Sequence: Synthetic oligonucleotide
ugcaaccaaaucugugccg

SEQ ID NO: 2679869 - RNA, 19 nt, Artificial Sequence
  Description of Artificial Sequence: Synthetic oligonucleotide
caugguucuggguaucacc

SEQ ID NO: 2679870 - RNA, 19 nt, Artificial Sequence
  Description of Artificial Sequence: Synthetic oligonucleotide
aagguggcaaacaccaaag

SEQ ID NO: 2679871 - RNA, 19 nt, Artificial Sequence
  Description of Artificial Sequence: Synthetic oligonucleotide
ucaugcaguagaagguccc

SEQ ID NO: 2679872 - RNA, 19 nt, Artificial Sequence
  Description of Artificial Sequence: Synthetic oligonucleotide
uuuuccagcguugugcaga

SEQ ID NO: 2679873 - RNA, 19 nt, Artificial Sequence
  Description of Artificial Sequence: Synthetic oligonucleotide
ugugcagaaaagucaugca

SEQ ID NO: 2679874 - RNA, 19 nt, Artificial Sequence
  Description of Artificial Sequence: Synthetic oligonucleotide
ugcugagcacagaucaugc

SEQ ID NO: 2679875 - RNA, 19 nt, Artificial Sequence
  Description of Artificial Sequence: Synthetic oligonucleotide
ucaugcuugagguagcauu

SEQ ID NO: 2679876 - RNA, 19 nt, Artificial Sequence
  Description of Artificial Sequence: Synthetic oligonucleotide
agaccaucuccuugauugc

SEQ ID NO: 2679877 - RNA, 19 nt, Artificial Sequence
  Description of Artificial Sequence: Synthetic oligonucleotide
agguggcaaacaccaaagc

SEQ ID NO: 2679878 - RNA, 19 nt, Artificial Sequence
  Description of Artificial Sequence: Synthetic oligonucleotide
gguggcaaacaccaaagcc

SEQ ID NO: 2679879 - RNA, 19 nt, Artificial Sequence
  Description of Artificial Sequence: Synthetic oligonucleotide
aaaagucaugcaaauccca

SEQ ID NO: 2679880 - RNA, 19 nt, Artificial Sequence
  Description of Artificial Sequence: Synthetic oligonucleotide
ucaaauuuuccagcguugu

SEQ ID NO: 2679881 - RNA, 19 nt, Artificial Sequence
  Description of Artificial Sequence: Synthetic oligonucleotide
uuucacaagaguuguucuc

SEQ ID NO: 2679882 - RNA, 19 nt, Artificial Sequence
  Description of Artificial Sequence: Synthetic oligonucleotide
cuugagguagcauucccuc

SEQ ID NO: 2679883 - RNA, 19 nt, Artificial Sequence
  Description of Artificial Sequence: Synthetic oligonucleotide
caaaacacucaaacacgcc

SEQ ID NO: 2679884 - RNA, 19 nt, Artificial Sequence
  Description of Artificial Sequence: Synthetic oligonucleotide
ccugaaauuuaucaucucc

SEQ ID NO: 2679885 - RNA, 19 nt, Artificial Sequence
  Description of Artificial Sequence: Synthetic oligonucleotide
aacacucaaacacgccaca

SEQ ID NO: 2679886 - RNA, 19 nt, Artificial Sequence
  Description of Artificial Sequence: Synthetic oligonucleotide
caugcuugagguagcauuc

SEQ ID NO: 2679887 - RNA, 19 nt, Artificial Sequence
  Description of Artificial Sequence: Synthetic oligonucleotide
ucacgaacuggcccagccg

SEQ ID NO: 2679888 - RNA, 19 nt, Artificial Sequence
  Description of Artificial Sequence: Synthetic oligonucleotide
cagcauugaccaaacagug

SEQ ID NO: 2679889 - RNA, 19 nt, Artificial Sequence
  Description of Artificial Sequence: Synthetic oligonucleotide
cuggguaucacccucccuc

SEQ ID NO: 2679890 - RNA, 19 nt, Artificial Sequence
  Description of Artificial Sequence: Synthetic oligonucleotide
gggcucaugcaguagaagg

SEQ ID NO: 2679891 - RNA, 19 nt, Artificial Sequence
  Description of Artificial Sequence: Synthetic oligonucleotide
cagcaaauucacgaggucc

SEQ ID NO: 2679892 - RNA, 19 nt, Artificial Sequence
  Description of Artificial Sequence: Synthetic oligonucleotide
ucccauguaagccucggau

SEQ ID NO: 2679893 - RNA, 19 nt, Artificial Sequence
  Description of Artificial Sequence: Synthetic oligonucleotide
ugacuagccuccuuuacau

SEQ ID NO: 2679894 - RNA, 19 nt, Artificial Sequence
  Description of Artificial Sequence: Synthetic oligonucleotide
accuggauucuuugugcgc

SEQ ID NO: 2679895 - RNA, 19 nt, Artificial Sequence
  Description of Artificial Sequence: Synthetic oligonucleotide
ugugcgccccuccucaucc

SEQ ID NO: 2679896 - RNA, 19 nt, Artificial Sequence
  Description of Artificial Sequence: Synthetic oligonucleotide
agcauugaccaaacagugc

SEQ ID NO: 2679897 - RNA, 19 nt, Artificial Sequence
  Description of Artificial Sequence: Synthetic oligonucleotide
agcguugugcagaaaaguc

SEQ ID NO: 2679898 - RNA, 19 nt, Artificial Sequence
  Description of Artificial Sequence: Synthetic oligonucleotide
ugcaguagaaggucccuga

SEQ ID NO: 2679899 - RNA, 19 nt, Artificial Sequence
  Description of Artificial Sequence: Synthetic oligonucleotide
gcacagaucaugcuugagg

SEQ ID NO: 2679900 - RNA, 19 nt, Artificial Sequence
  Description of Artificial Sequence: Synthetic oligonucleotide
cucaugcaguagaaggucc

SEQ ID NO: 2679901 - RNA, 19 nt, Artificial Sequence
  Description of Artificial Sequence: Synthetic oligonucleotide
guggcaaacaccaaagcca

SEQ ID NO: 2679902 - RNA, 19 nt, Artificial Sequence
  Description of Artificial Sequence: Synthetic oligonucleotide
uccccugugcugcugagca

SEQ ID NO: 2679903 - RNA, 19 nt, Artificial Sequence
  Description of Artificial Sequence: Synthetic oligonucleotide
aucuccuugauugccggac

SEQ ID NO: 2679904 - RNA, 19 nt, Artificial Sequence
  Description of Artificial Sequence: Synthetic oligonucleotide
aaagucaugcaaaucccau

SEQ ID NO: 2679905 - RNA, 19 nt, Artificial Sequence
  Description of Artificial Sequence: Synthetic oligonucleotide
uagaaggucccugaaauuu

SEQ ID NO: 2679906 - RNA, 19 nt, Artificial Sequence
  Description of Artificial Sequence: Synthetic oligonucleotide
ggcgucaaauuuuccagcg

SEQ ID NO: 2679907 - RNA, 19 nt, Artificial Sequence
  Description of Artificial Sequence: Synthetic oligonucleotide
cuucgggugacuagccucc

SEQ ID NO: 2679908 - RNA, 19 nt, Artificial Sequence
  Description of Artificial Sequence: Synthetic oligonucleotide
caaggcaugggccuugcac

SEQ ID NO: 2679909 - RNA, 19 nt, Artificial Sequence
  Description of Artificial Sequence: Synthetic oligonucleotide
ucuugaggaccuuccggag

SEQ ID NO: 2679910 - RNA, 19 nt, Artificial Sequence
  Description of Artificial Sequence: Synthetic oligonucleotide
caaacagugcuggaucucc

SEQ ID NO: 2679911 - RNA, 19 nt, Artificial Sequence
  Description of Artificial Sequence: Synthetic oligonucleotide
uggaucuccgcuguguucu

SEQ ID NO: 2679912 - RNA, 19 nt, Artificial Sequence
  Description of Artificial Sequence: Synthetic oligonucleotide
uccacauagggcucaugca

SEQ ID NO: 2679913 - RNA, 19 nt, Artificial Sequence
  Description of Artificial Sequence: Synthetic oligonucleotide
uccuuuacaucuuccccac

SEQ ID NO: 2679914 - RNA, 19 nt, Artificial Sequence
  Description of Artificial Sequence: Synthetic oligonucleotide
cacucaaacacgccacacc

SEQ ID NO: 2679915 - RNA, 19 nt, Artificial Sequence
  Description of Artificial Sequence: Synthetic oligonucleotide
cacgagguccacauagggc

SEQ ID NO: 2679916 - RNA, 19 nt, Artificial Sequence
  Description of Artificial Sequence: Synthetic oligonucleotide
ggacacuuccugcugaugc

SEQ ID NO: 2679917 - RNA, 19 nt, Artificial Sequence
  Description of Artificial Sequence: Synthetic oligonucleotide
cacaaucacaccgauguuc

SEQ ID NO: 2679918 - RNA, 19 nt, Artificial Sequence
  Description of Artificial Sequence: Synthetic oligonucleotide
cacgccacaccccacgucc

SEQ ID NO: 2679919 - RNA, 19 nt, Artificial Sequence
  Description of Artificial Sequence: Synthetic oligonucleotide
cacgaacuggcccagccgc

SEQ ID NO: 2679920 - RNA, 19 nt, Artificial Sequence
  Description of Artificial Sequence: Synthetic oligonucleotide
accgauguuccccugugcu

SEQ ID NO: 2679921 - RNA, 19 nt, Artificial Sequence
  Description of Artificial Sequence: Synthetic oligonucleotide
accaaacagugcuggaucu

SEQ ID NO: 2679922 - RNA, 19 nt, Artificial Sequence
  Description of Artificial Sequence: Synthetic oligonucleotide
cucugcaacuggaagacca

SEQ ID NO: 2679923 - RNA, 19 nt, Artificial Sequence
  Description of Artificial Sequence: Synthetic oligonucleotide
caggucagcagcaaauuca

SEQ ID NO: 2679924 - RNA, 19 nt, Artificial Sequence
  Description of Artificial Sequence: Synthetic oligonucleotide
accaaaucugugccgcaag

SEQ ID NO: 2679925 - RNA, 19 nt, Artificial Sequence
  Description of Artificial Sequence: Synthetic oligonucleotide
aaacagugcuggaucuccg

SEQ ID NO: 2679926 - RNA, 19 nt, Artificial Sequence
  Description of Artificial Sequence: Synthetic oligonucleotide
uucugcagggacaggcggc

SEQ ID NO: 2679927 - RNA, 19 nt, Artificial Sequence
  Description of Artificial Sequence: Synthetic oligonucleotide
cuccuuuacaucuucccca

SEQ ID NO: 2679928 - RNA, 19 nt, Artificial Sequence
  Description of Artificial Sequence: Synthetic oligonucleotide
auccuugaugaaugacuuc

SEQ ID NO: 2679929 - RNA, 19 nt, Artificial Sequence
  Description of Artificial Sequence: Synthetic oligonucleotide
uagcauucccucugcaacu

SEQ ID NO: 2679930 - RNA, 19 nt, Artificial Sequence
  Description of Artificial Sequence: Synthetic oligonucleotide
gucuugaggaccuuccgga

SEQ ID NO: 2679931 - RNA, 19 nt, Artificial Sequence
  Description of Artificial Sequence: Synthetic oligonucleotide
uucgcgccggguccaaagg

SEQ ID NO: 2679932 - RNA, 19 nt, Artificial Sequence
  Description of Artificial Sequence: Synthetic oligonucleotide
gcugaugcaaccaaaucug

SEQ ID NO: 2679933 - RNA, 19 nt, Artificial Sequence
  Description of Artificial Sequence: Synthetic oligonucleotide
agcaaauucacgaggucca

SEQ ID NO: 2679934 - RNA, 19 nt, Artificial Sequence
  Description of Artificial Sequence: Synthetic oligonucleotide
uuccggaggguucguggcg

SEQ ID NO: 2679935 - RNA, 19 nt, Artificial Sequence
  Description of Artificial Sequence: Synthetic oligonucleotide
agggucacgaacuggccca

SEQ ID NO: 2679936 - RNA, 19 nt, Artificial Sequence
  Description of Artificial Sequence: Synthetic oligonucleotide
caaaucugugccgcaaggc

SEQ ID NO: 2679937 - RNA, 19 nt, Artificial Sequence
  Description of Artificial Sequence: Synthetic oligonucleotide
gauugccggacacuuccug

SEQ ID NO: 2679938 - RNA, 19 nt, Artificial Sequence
  Description of Artificial Sequence: Synthetic oligonucleotide
uggguaucacccucccucc

SEQ ID NO: 2679939 - RNA, 19 nt, Artificial Sequence
  Description of Artificial Sequence: Synthetic oligonucleotide
guaucacccucccuccggg

SEQ ID NO: 2679940 - RNA, 19 nt, Artificial Sequence
  Description of Artificial Sequence: Synthetic oligonucleotide
acacucaaacacgccacac

SEQ ID NO: 2679941 - RNA, 19 nt, Artificial Sequence
  Description of Artificial Sequence: Synthetic oligonucleotide
ucuccuugauugccggaca

SEQ ID NO: 2679942 - RNA, 19 nt, Artificial Sequence
  Description of Artificial Sequence: Synthetic oligonucleotide
cccagcauugaccaaacag

SEQ ID NO: 2679943 - RNA, 19 nt, Artificial Sequence
  Description of Artificial Sequence: Synthetic oligonucleotide
acguccccagcauugacca

SEQ ID NO: 2679944 - RNA, 19 nt, Artificial Sequence
  Description of Artificial Sequence: Synthetic oligonucleotide
aucacaccgauguuccccu

SEQ ID NO: 2679945 - RNA, 19 nt, Artificial Sequence
  Description of Artificial Sequence: Synthetic oligonucleotide
gugcagaaaagucaugcaa

SEQ ID NO: 2679946 - RNA, 19 nt, Artificial Sequence
  Description of Artificial Sequence: Synthetic oligonucleotide
guggcgucgguccuucgcg

SEQ ID NO: 2679947 - RNA, 19 nt, Artificial Sequence
  Description of Artificial Sequence: Synthetic oligonucleotide
agaucaugcuugagguagc

SEQ ID NO: 2679948 - RNA, 19 nt, Artificial Sequence
  Description of Artificial Sequence: Synthetic oligonucleotide
uugagguagcauucccucu

SEQ ID NO: 2679949 - RNA, 19 nt, Artificial Sequence
  Description of Artificial Sequence: Synthetic oligonucleotide
aaaucccauguaagccucg

SEQ ID NO: 2679950 - RNA, 19 nt, Artificial Sequence
  Description of Artificial Sequence: Synthetic oligonucleotide
cuuccggaggguucguggc

SEQ ID NO: 2679951 - RNA, 19 nt, Artificial Sequence
  Description of Artificial Sequence: Synthetic oligonucleotide
cuggaagaccaucuccuug

SEQ ID NO: 2679952 - RNA, 19 nt, Artificial Sequence
  Description of Artificial Sequence: Synthetic oligonucleotide
aaucugugccgcaaggcau

SEQ ID NO: 2679953 - RNA, 19 nt, Artificial Sequence
  Description of Artificial Sequence: Synthetic oligonucleotide
cauugaccaaacagugcug

SEQ ID NO: 2679954 - RNA, 19 nt, Artificial Sequence
  Description of Artificial Sequence: Synthetic oligonucleotide
gucacgaacuggcccagcc

SEQ ID NO: 2679955 - RNA, 19 nt, Artificial Sequence
  Description of Artificial Sequence: Synthetic oligonucleotide
cuccgggagaccuggauuc

SEQ ID NO: 2679956 - RNA, 19 nt, Artificial Sequence
  Description of Artificial Sequence: Synthetic oligonucleotide
uucuggguaucacccuccc

SEQ ID NO: 2679957 - RNA, 19 nt, Artificial Sequence
  Description of Artificial Sequence: Synthetic oligonucleotide
agggcauccuugaugaaug

SEQ ID NO: 2679958 - RNA, 19 nt, Artificial Sequence
  Description of Artificial Sequence: Synthetic oligonucleotide
uccgcacacaugguucugg

SEQ ID NO: 2679959 - RNA, 19 nt, Artificial Sequence
  Description of Artificial Sequence: Synthetic oligonucleotide
uucuuugugcgccccuccu

SEQ ID NO: 2679960 - RNA, 19 nt, Artificial Sequence
  Description of Artificial Sequence: Synthetic oligonucleotide
uguuccccugugcugcuga

SEQ ID NO: 2679961 - RNA, 19 nt, Artificial Sequence
  Description of Artificial Sequence: Synthetic oligonucleotide
gagguagcauucccucugc

SEQ ID NO: 2679962 - RNA, 19 nt, Artificial Sequence
  Description of Artificial Sequence: Synthetic oligonucleotide
ugaccaaacagugcuggau

SEQ ID NO: 2679963 - RNA, 19 nt, Artificial Sequence
  Description of Artificial Sequence: Synthetic oligonucleotide
cacagaucaugcuugaggu

SEQ ID NO: 2679964 - RNA, 19 nt, Artificial Sequence
  Description of Artificial Sequence: Synthetic oligonucleotide
cugggcgucaaauuuucca

SEQ ID NO: 2679965 - RNA, 19 nt, Artificial Sequence
  Description of Artificial Sequence: Synthetic oligonucleotide
aacacgccacaccccacgu

SEQ ID NO: 2679966 - RNA, 19 nt, Artificial Sequence
  Description of Artificial Sequence: Synthetic oligonucleotide
gguaucacccucccuccgg

SEQ ID NO: 2679967 - RNA, 19 nt, Artificial Sequence
  Description of Artificial Sequence: Synthetic oligonucleotide
ccacauagggcucaugcag

SEQ ID NO: 2679968 - RNA, 19 nt, Artificial Sequence
  Description of Artificial Sequence: Synthetic oligonucleotide
uugaccaaacagugcugga

SEQ ID NO: 2679969 - RNA, 19 nt, Artificial Sequence
  Description of Artificial Sequence: Synthetic oligonucleotide
guaagccucggauuucaca

SEQ ID NO: 2679970 - RNA, 19 nt, Artificial Sequence
  Description of Artificial Sequence: Synthetic oligonucleotide
acagugcuggaucuccgcu

SEQ ID NO: 2679971 - RNA, 19 nt, Artificial Sequence
  Description of Artificial Sequence: Synthetic oligonucleotide
agccccugucuugaggacc

SEQ ID NO: 2679972 - RNA, 19 nt, Artificial Sequence
  Description of Artificial Sequence: Synthetic oligonucleotide
ucacaagaguuguucucaa

SEQ ID NO: 2679973 - RNA, 19 nt, Artificial Sequence
  Description of Artificial Sequence: Synthetic oligonucleotide
augacuuccccugggcguc

SEQ ID NO: 2679974 - RNA, 19 nt, Artificial Sequence
  Description of Artificial Sequence: Synthetic oligonucleotide
aaggucccugaaauuuauc

SEQ ID NO: 2679975 - RNA, 19 nt, Artificial Sequence
  Description of Artificial Sequence: Synthetic oligonucleotide
uugccggacacuuccugcu

SEQ ID NO: 2679976 - RNA, 19 nt, Artificial Sequence
  Description of Artificial Sequence: Synthetic oligonucleotide
gaccaucuccuugauugcc

SEQ ID NO: 2679977 - RNA, 19 nt, Artificial Sequence
  Description of Artificial Sequence: Synthetic oligonucleotide
uuuccagcguugugcagaa

SEQ ID NO: 2679978 - RNA, 19 nt, Artificial Sequence
  Description of Artificial Sequence: Synthetic oligonucleotide
uccccugggcgucaaauuu

SEQ ID NO: 2679979 - RNA, 19 nt, Artificial Sequence
  Description of Artificial Sequence: Synthetic oligonucleotide
ucuuugugcgccccuccuc

SEQ ID NO: 2679980 - RNA, 19 nt, Artificial Sequence
  Description of Artificial Sequence: Synthetic oligonucleotide
cuccgcuguguucugcagg

SEQ ID NO: 2679981 - RNA, 19 nt, Artificial Sequence
  Description of Artificial Sequence: Synthetic oligonucleotide
gcauugaccaaacagugcu

SEQ ID NO: 2679982 - RNA, 19 nt, Artificial Sequence
  Description of Artificial Sequence: Synthetic oligonucleotide
cuugauugccggacacuuc

SEQ ID NO: 2679983 - RNA, 19 nt, Artificial Sequence
  Description of Artificial Sequence: Synthetic oligonucleotide
acaccgauguuccccugug

SEQ ID NO: 2679984 - RNA, 19 nt, Artificial Sequence
  Description of Artificial Sequence: Synthetic oligonucleotide
aaccaaaucugugccgcaa

SEQ ID NO: 2679985 - RNA, 19 nt, Artificial Sequence
  Description of Artificial Sequence: Synthetic oligonucleotide
aauucacgagguccacaua

SEQ ID NO: 2679986 - RNA, 19 nt, Artificial Sequence
  Description of Artificial Sequence: Synthetic oligonucleotide
uguaagccucggauuucac

SEQ ID NO: 2679987 - RNA, 19 nt, Artificial Sequence
  Description of Artificial Sequence: Synthetic oligonucleotide
gcaaccaaaucugugccgc

SEQ ID NO: 2679988 - RNA, 19 nt, Artificial Sequence
  Description of Artificial Sequence: Synthetic oligonucleotide
uuccugcugaugcaaccaa

SEQ ID NO: 2679989 - RNA, 19 nt, Artificial Sequence
  Description of Artificial Sequence: Synthetic oligonucleotide
uagggcucaugcaguagaa

SEQ ID NO: 2679990 - RNA, 19 nt, Artificial Sequence
  Description of Artificial Sequence: Synthetic oligonucleotide
cuuugugcgccccuccuca

SEQ ID NO: 2679991 - RNA, 19 nt, Artificial Sequence
  Description of Artificial Sequence: Synthetic oligonucleotide
uccugcugaugcaaccaaa

SEQ ID NO: 2679992 - RNA, 19 nt, Artificial Sequence
  Description of Artificial Sequence: Synthetic oligonucleotide
cugcugagcacagaucaug

SEQ ID NO: 2679993 - RNA, 19 nt, Artificial Sequence
  Description of Artificial Sequence: Synthetic oligonucleotide
ucugugccgcaaggcaugg

SEQ ID NO: 2679994 - RNA, 19 nt, Artificial Sequence
  Description of Artificial Sequence: Synthetic oligonucleotide
cuucgcgccggguccaaag

SEQ ID NO: 2679995 - RNA, 19 nt, Artificial Sequence
  Description of Artificial Sequence: Synthetic oligonucleotide
ugccgcaaggcaugggccu

SEQ ID NO: 2679996 - RNA, 19 nt, Artificial Sequence
  Description of Artificial Sequence: Synthetic oligonucleotide
cugcugaugcaaccaaauc

SEQ ID NO: 2679997 - RNA, 19 nt, Artificial Sequence
  Description of Artificial Sequence: Synthetic oligonucleotide
ggacaggcggccuuucugc

SEQ ID NO: 2679998 - RNA, 19 nt, Artificial Sequence
  Description of Artificial Sequence: Synthetic oligonucleotide
auguaagccucggauuuca

SEQ ID NO: 2679999 - RNA, 19 nt, Artificial Sequence
  Description of Artificial Sequence: Synthetic oligonucleotide
ugauugccggacacuuccu

SEQ ID NO: 2680000 - RNA, 19 nt, Artificial Sequence
  Description of Artificial Sequence: Synthetic oligonucleotide
ucuccgcuguguucugcag

SEQ ID NO: 2680001 - RNA, 19 nt, Artificial Sequence
  Description of Artificial Sequence: Synthetic oligonucleotide
ugcuucgggugacuagccu

SEQ ID NO: 2680002 - RNA, 19 nt, Artificial Sequence
  Description of Artificial Sequence: Synthetic oligonucleotide
ucuggguaucacccucccu

SEQ ID NO: 2680003 - RNA, 19 nt, Artificial Sequence
  Description of Artificial Sequence: Synthetic oligonucleotide
gaacuggcccagccgcucc

SEQ ID NO: 2680004 - RNA, 19 nt, Artificial Sequence
  Description of Artificial Sequence: Synthetic oligonucleotide
cagugcuggaucuccgcug

SEQ ID NO: 2680005 - RNA, 19 nt, Artificial Sequence
  Description of Artificial Sequence: Synthetic oligonucleotide
caaucacaccgauguuccc

SEQ ID NO: 2680006 - RNA, 19 nt, Artificial Sequence
  Description of Artificial Sequence: Synthetic oligonucleotide
ccaaaucugugccgcaagg

SEQ ID NO: 2680007 - RNA, 19 nt, Artificial Sequence
  Description of Artificial Sequence: Synthetic oligonucleotide
cuccuugauugccggacac

SEQ ID NO: 2680008 - RNA, 19 nt, Artificial Sequence
  Description of Artificial Sequence: Synthetic oligonucleotide
uccccagcauugaccaaac

SEQ ID NO: 2680009 - RNA, 19 nt, Artificial Sequence
  Description of Artificial Sequence: Synthetic oligonucleotide
acauagggcucaugcagua

SEQ ID NO: 2680010 - RNA, 19 nt, Artificial Sequence
  Description of Artificial Sequence: Synthetic oligonucleotide
gaguuguucucaaaacacu

SEQ ID NO: 2680011 - RNA, 19 nt, Artificial Sequence
  Description of Artificial Sequence: Synthetic oligonucleotide
caucuuccccacaggucag

SEQ ID NO: 2680012 - RNA, 19 nt, Artificial Sequence
  Description of Artificial Sequence: Synthetic oligonucleotide
cauucccucugcaacugga

SEQ ID NO: 2680013 - RNA, 19 nt, Artificial Sequence
  Description of Artificial Sequence: Synthetic oligonucleotide
uggauucuuugugcgcccc

SEQ ID NO: 2680014 - RNA, 19 nt, Artificial Sequence
  Description of Artificial Sequence: Synthetic oligonucleotide
augcuucgggugacuagcc

SEQ ID NO: 2680015 - RNA, 19 nt, Artificial Sequence
  Description of Artificial Sequence: Synthetic oligonucleotide
cuccacaaucacaccgaug

SEQ ID NO: 2680016 - RNA, 19 nt, Artificial Sequence
  Description of Artificial Sequence: Synthetic oligonucleotide
aggcaugggccuugcaccu

SEQ ID NO: 2680017 - RNA, 19 nt, Artificial Sequence
  Description of Artificial Sequence: Synthetic oligonucleotide
ugccggacacuuccugcug

SEQ ID NO: 2680018 - RNA, 19 nt, Artificial Sequence
  Description of Artificial Sequence: Synthetic oligonucleotide
gccuccuuuacaucuuccc

SEQ ID NO: 2680019 - RNA, 19 nt, Artificial Sequence
  Description of Artificial Sequence: Synthetic oligonucleotide
acacgccacaccccacguc

SEQ ID NO: 2680020 - RNA, 19 nt, Artificial Sequence
  Description of Artificial Sequence: Synthetic oligonucleotide
acagaucaugcuugaggua

SEQ ID NO: 2680021 - RNA, 19 nt, Artificial Sequence
  Description of Artificial Sequence: Synthetic oligonucleotide
agcauucccucugcaacug

SEQ ID NO: 2680022 - RNA, 19 nt, Artificial Sequence
  Description of Artificial Sequence: Synthetic oligonucleotide
acuggaagaccaucuccuu

SEQ ID NO: 2680023 - RNA, 19 nt, Artificial Sequence
  Description of Artificial Sequence: Synthetic oligonucleotide
ccuugaugaaugacuuccc

SEQ ID NO: 2680024 - RNA, 19 nt, Artificial Sequence
  Description of Artificial Sequence: Synthetic oligonucleotide
aggaccuuccggaggguuc

SEQ ID NO: 2680025 - RNA, 19 nt, Artificial Sequence
  Description of Artificial Sequence: Synthetic oligonucleotide
gaucaugcuugagguagca

SEQ ID NO: 2680026 - RNA, 19 nt, Artificial Sequence
  Description of Artificial Sequence: Synthetic oligonucleotide
guucuggguaucacccucc

SEQ ID NO: 2680027 - RNA, 19 nt, Artificial Sequence
  Description of Artificial Sequence: Synthetic oligonucleotide
ggaugcuucgggugacuag

SEQ ID NO: 2680028 - RNA, 19 nt, Artificial Sequence
  Description of Artificial Sequence: Synthetic oligonucleotide
cauagggcucaugcaguag

SEQ ID NO: 2680029 - RNA, 19 nt, Artificial Sequence
  Description of Artificial Sequence: Synthetic oligonucleotide
gacuagccuccuuuacauc

SEQ ID NO: 2680030 - RNA, 19 nt, Artificial Sequence
  Description of Artificial Sequence: Synthetic oligonucleotide
ggguucguggcgucggucc

SEQ ID NO: 2680031 - RNA, 19 nt, Artificial Sequence
  Description of Artificial Sequence: Synthetic oligonucleotide
augggccuugcaccucagg

SEQ ID NO: 2680032 - RNA, 19 nt, Artificial Sequence
  Description of Artificial Sequence: Synthetic oligonucleotide
gguucuggguaucacccuc

SEQ ID NO: 2680033 - RNA, 19 nt, Artificial Sequence
  Description of Artificial Sequence: Synthetic oligonucleotide
cacuuccugcugaugcaac

SEQ ID NO: 2680034 - RNA, 19 nt, Artificial Sequence
  Description of Artificial Sequence: Synthetic oligonucleotide
ggugacuagccuccuuuac

SEQ ID NO: 2680035 - RNA, 19 nt, Artificial Sequence
  Description of Artificial Sequence: Synthetic oligonucleotide
gggcgucaaauuuuccagc

SEQ ID NO: 2680036 - RNA, 19 nt, Artificial Sequence
  Description of Artificial Sequence: Synthetic oligonucleotide
gcaaaucccauguaagccu

SEQ ID NO: 2680037 - RNA, 19 nt, Artificial Sequence
  Description of Artificial Sequence: Synthetic oligonucleotide
guugugcagaaaagucaug

SEQ ID NO: 2680038 - RNA, 19 nt, Artificial Sequence
  Description of Artificial Sequence: Synthetic oligonucleotide
ccagcguugugcagaaaag

SEQ ID NO: 2680039 - RNA, 19 nt, Artificial Sequence
  Description of Artificial Sequence: Synthetic oligonucleotide
aucugugccgcaaggcaug

SEQ ID NO: 2680040 - RNA, 19 nt, Artificial Sequence
  Description of Artificial Sequence: Synthetic oligonucleotide
ucgcgccggguccaaaggu

SEQ ID NO: 2680041 - RNA, 19 nt, Artificial Sequence
  Description of Artificial Sequence: Synthetic oligonucleotide
cuggaucuccgcuguguuc

SEQ ID NO: 2680042 - RNA, 19 nt, Artificial Sequence
  Description of Artificial Sequence: Synthetic oligonucleotide
agcacagaucaugcuugag

SEQ ID NO: 2680043 - RNA, 19 nt, Artificial Sequence
  Description of Artificial Sequence: Synthetic oligonucleotide
ccuuccggaggguucgugg

SEQ ID NO: 2680044 - RNA, 19 nt, Artificial Sequence
  Description of Artificial Sequence: Synthetic oligonucleotide
cauguaagccucggauuuc

SEQ ID NO: 2680045 - RNA, 19 nt, Artificial Sequence
  Description of Artificial Sequence: Synthetic oligonucleotide
caaacacgccacaccccac

SEQ ID NO: 2680046 - RNA, 19 nt, Artificial Sequence
  Description of Artificial Sequence: Synthetic oligonucleotide
ggaccuuccggaggguucg

SEQ ID NO: 2680047 - RNA, 19 nt, Artificial Sequence
  Description of Artificial Sequence: Synthetic oligonucleotide
ugcugggagccccugucuu

SEQ ID NO: 2680048 - RNA, 19 nt, Artificial Sequence
  Description of Artificial Sequence: Synthetic oligonucleotide
ccaucuccuugauugccgg

SEQ ID NO: 2680049 - RNA, 19 nt, Artificial Sequence
  Description of Artificial Sequence: Synthetic oligonucleotide
ccagcauugaccaaacagu

SEQ ID NO: 2680050 - RNA, 19 nt, Artificial Sequence
  Description of Artificial Sequence: Synthetic oligonucleotide
aucccauguaagccucgga

SEQ ID NO: 2680051 - RNA, 19 nt, Artificial Sequence
  Description of Artificial Sequence: Synthetic oligonucleotide
gguagcauucccucugcaa

SEQ ID NO: 2680052 - RNA, 19 nt, Artificial Sequence
  Description of Artificial Sequence: Synthetic oligonucleotide
acaccccacguccccagca

SEQ ID NO: 2680053 - RNA, 19 nt, Artificial Sequence
  Description of Artificial Sequence: Synthetic oligonucleotide
uaucacccucccuccggga

SEQ ID NO: 2680054 - RNA, 19 nt, Artificial Sequence
  Description of Artificial Sequence: Synthetic oligonucleotide
gguccuucgcgccgggucc

SEQ ID NO: 2680055 - RNA, 19 nt, Artificial Sequence
  Description of Artificial Sequence: Synthetic oligonucleotide
gccagggucacgaacuggc

SEQ ID NO: 2680056 - RNA, 19 nt, Artificial Sequence
  Description of Artificial Sequence: Synthetic oligonucleotide
ggccuugcaccucagggca

SEQ ID NO: 2680057 - RNA, 19 nt, Artificial Sequence
  Description of Artificial Sequence: Synthetic oligonucleotide
cuuccugcugaugcaacca

SEQ ID NO: 2680058 - RNA, 19 nt, Artificial Sequence
  Description of Artificial Sequence: Synthetic oligonucleotide
gcuucgggugacuagccuc

SEQ ID NO: 2680059 - RNA, 19 nt, Artificial Sequence
  Description of Artificial Sequence: Synthetic oligonucleotide
uggcgucgguccuucgcgc

SEQ ID NO: 2680060 - RNA, 19 nt, Artificial Sequence
  Description of Artificial Sequence: Synthetic oligonucleotide
gcaacuggaagaccaucuc

SEQ ID NO: 2680061 - RNA, 19 nt, Artificial Sequence
  Description of Artificial Sequence: Synthetic oligonucleotide
uccggaggguucguggcgu

SEQ ID NO: 2680062 - RNA, 19 nt, Artificial Sequence
  Description of Artificial Sequence: Synthetic oligonucleotide
gggacaggcggccuuucug

SEQ ID NO: 2680063 - RNA, 19 nt, Artificial Sequence
  Description of Artificial Sequence: Synthetic oligonucleotide
caaauucacgagguccaca

SEQ ID NO: 2680064 - RNA, 19 nt, Artificial Sequence
  Description of Artificial Sequence: Synthetic oligonucleotide
caccgauguuccccugugc

SEQ ID NO: 2680065 - RNA, 19 nt, Artificial Sequence
  Description of Artificial Sequence: Synthetic oligonucleotide
uuccccugggcgucaaauu

SEQ ID NO: 2680066 - RNA, 19 nt, Artificial Sequence
  Description of Artificial Sequence: Synthetic oligonucleotide
ggccuuucugcugggagcc

SEQ ID NO: 2680067 - RNA, 19 nt, Artificial Sequence
  Description of Artificial Sequence: Synthetic oligonucleotide
uugugcgccccuccucauc

SEQ ID NO: 2680068 - RNA, 19 nt, Artificial Sequence
  Description of Artificial Sequence: Synthetic oligonucleotide
gggagaccuggauucuuug

SEQ ID NO: 2680069 - RNA, 19 nt, Artificial Sequence
  Description of Artificial Sequence: Synthetic oligonucleotide
cuugcaccucagggcaucc

SEQ ID NO: 2680070 - RNA, 19 nt, Artificial Sequence
  Description of Artificial Sequence: Synthetic oligonucleotide
cacauagggcucaugcagu

SEQ ID NO: 2680071 - RNA, 19 nt, Artificial Sequence
  Description of Artificial Sequence: Synthetic oligonucleotide
gcguugugcagaaaaguca

SEQ ID NO: 2680072 - RNA, 19 nt, Artificial Sequence
  Description of Artificial Sequence: Synthetic oligonucleotide
acuggcccagccgcuccgc

SEQ ID NO: 2680073 - RNA, 19 nt, Artificial Sequence
  Description of Artificial Sequence: Synthetic oligonucleotide
guuccccugugcugcugag

SEQ ID NO: 2680074 - RNA, 19 nt, Artificial Sequence
  Description of Artificial Sequence: Synthetic oligonucleotide
ggaggguucguggcgucgg

SEQ ID NO: 2680075 - RNA, 19 nt, Artificial Sequence
  Description of Artificial Sequence: Synthetic oligonucleotide
cugagcacagaucaugcuu

SEQ ID NO: 2680076 - RNA, 19 nt, Artificial Sequence
  Description of Artificial Sequence: Synthetic oligonucleotide
uuccccugugcugcugagc

SEQ ID NO: 2680077 - RNA, 19 nt, Artificial Sequence
  Description of Artificial Sequence: Synthetic oligonucleotide
ggguaucacccucccuccg

SEQ ID NO: 2680078 - RNA, 19 nt, Artificial Sequence
  Description of Artificial Sequence: Synthetic oligonucleotide
cacaagaguuguucucaaa

SEQ ID NO: 2680079 - RNA, 19 nt, Artificial Sequence
  Description of Artificial Sequence: Synthetic oligonucleotide
gcucaugcaguagaagguc

SEQ ID NO: 2680080 - RNA, 19 nt, Artificial Sequence
  Description of Artificial Sequence: Synthetic oligonucleotide
uuugugcgccccuccucau

SEQ ID NO: 2680081 - RNA, 19 nt, Artificial Sequence
  Description of Artificial Sequence: Synthetic oligonucleotide
aggguucguggcgucgguc

SEQ ID NO: 2680082 - RNA, 19 nt, Artificial Sequence
  Description of Artificial Sequence: Synthetic oligonucleotide
gcauccuugaugaaugacu

SEQ ID NO: 2680083 - RNA, 19 nt, Artificial Sequence
  Description of Artificial Sequence: Synthetic oligonucleotide
gcauucccucugcaacugg

SEQ ID NO: 2680084 - RNA, 19 nt, Artificial Sequence
  Description of Artificial Sequence: Synthetic oligonucleotide
uggaugcuucgggugacua

SEQ ID NO: 2680085 - RNA, 19 nt, Artificial Sequence
  Description of Artificial Sequence: Synthetic oligonucleotide
agggacaggcggccuuucu

SEQ ID NO: 2680086 - RNA, 19 nt, Artificial Sequence
  Description of Artificial Sequence: Synthetic oligonucleotide
gcggccuuucugcugggag

SEQ ID NO: 2680087 - RNA, 19 nt, Artificial Sequence
  Description of Artificial Sequence: Synthetic oligonucleotide
gugccgcaaggcaugggcc

SEQ ID NO: 2680088 - RNA, 19 nt, Artificial Sequence
  Description of Artificial Sequence: Synthetic oligonucleotide
caaccaaaucugugccgca

SEQ ID NO: 2680089 - RNA, 19 nt, Artificial Sequence
  Description of Artificial Sequence: Synthetic oligonucleotide
ugggagccccugucuugag

SEQ ID NO: 2680090 - RNA, 19 nt, Artificial Sequence
  Description of Artificial Sequence: Synthetic oligonucleotide
gagccuggaugcuucgggu

SEQ ID NO: 2680091 - RNA, 19 nt, Artificial Sequence
  Description of Artificial Sequence: Synthetic oligonucleotide
auucccucugcaacuggaa

SEQ ID NO: 2680092 - RNA, 19 nt, Artificial Sequence
  Description of Artificial Sequence: Synthetic oligonucleotide
acgccacaccccacguccc

SEQ ID NO: 2680093 - RNA, 19 nt, Artificial Sequence
  Description of Artificial Sequence: Synthetic oligonucleotide
cugaugcaaccaaaucugu

SEQ ID NO: 2680094 - RNA, 19 nt, Artificial Sequence
  Description of Artificial Sequence: Synthetic oligonucleotide
cccucugcaacuggaagac

SEQ ID NO: 2680095 - RNA, 19 nt, Artificial Sequence
  Description of Artificial Sequence: Synthetic oligonucleotide
uucguggcgucgguccuuc

SEQ ID NO: 2680096 - RNA, 19 nt, Artificial Sequence
  Description of Artificial Sequence: Synthetic oligonucleotide
aucaugcuugagguagcau

SEQ ID NO: 2680097 - RNA, 19 nt, Artificial Sequence
  Description of Artificial Sequence: Synthetic oligonucleotide
uccgggagaccuggauucu

SEQ ID NO: 2680098 - RNA, 19 nt, Artificial Sequence
  Description of Artificial Sequence: Synthetic oligonucleotide
ggcauccuugaugaaugac

SEQ ID NO: 2680099 - RNA, 19 nt, Artificial Sequence
  Description of Artificial Sequence: Synthetic oligonucleotide
guagaaggucccugaaauu

SEQ ID NO: 2680100 - RNA, 19 nt, Artificial Sequence
  Description of Artificial Sequence: Synthetic oligonucleotide
caugggccuugcaccucag

SEQ ID NO: 2680101 - RNA, 19 nt, Artificial Sequence
  Description of Artificial Sequence: Synthetic oligonucleotide
gcugggagccccugucuug

SEQ ID NO: 2680102 - RNA, 19 nt, Artificial Sequence
  Description of Artificial Sequence: Synthetic oligonucleotide
ggguccaaagguggcaaac

SEQ ID NO: 2680103 - RNA, 19 nt, Artificial Sequence
  Description of Artificial Sequence: Synthetic oligonucleotide
cacacaugguucuggguau

SEQ ID NO: 2680104 - RNA, 19 nt, Artificial Sequence
  Description of Artificial Sequence: Synthetic oligonucleotide
caaacaccaaagccagggu

SEQ ID NO: 2680105 - RNA, 19 nt, Artificial Sequence
  Description of Artificial Sequence: Synthetic oligonucleotide
ccgcacacaugguucuggg

SEQ ID NO: 2680106 - RNA, 19 nt, Artificial Sequence
  Description of Artificial Sequence: Synthetic oligonucleotide
ccgauguuccccugugcug

SEQ ID NO: 2680107 - RNA, 19 nt, Artificial Sequence
  Description of Artificial Sequence: Synthetic oligonucleotide
gauguuccccugugcugcu

SEQ ID NO: 2680108 - RNA, 19 nt, Artificial Sequence
  Description of Artificial Sequence: Synthetic oligonucleotide
gacaggcggccuuucugcu

SEQ ID NO: 2680109 - RNA, 19 nt, Artificial Sequence
  Description of Artificial Sequence: Synthetic oligonucleotide
ucgggugacuagccuccuu

SEQ ID NO: 2680110 - RNA, 19 nt, Artificial Sequence
  Description of Artificial Sequence: Synthetic oligonucleotide
ucguggcgucgguccuucg

SEQ ID NO: 2680111 - RNA, 19 nt, Artificial Sequence
  Description of Artificial Sequence: Synthetic oligonucleotide
gcgucgguccuucgcgccg

SEQ ID NO: 2680112 - RNA, 19 nt, Artificial Sequence
  Description of Artificial Sequence: Synthetic oligonucleotide
gcaaauucacgagguccac

SEQ ID NO: 2680113 - RNA, 19 nt, Artificial Sequence
  Description of Artificial Sequence: Synthetic oligonucleotide
cugggagccccugucuuga

SEQ ID NO: 2680114 - RNA, 19 nt, Artificial Sequence
  Description of Artificial Sequence: Synthetic oligonucleotide
uucgggugacuagccuccu

SEQ ID NO: 2680115 - RNA, 19 nt, Artificial Sequence
  Description of Artificial Sequence: Synthetic oligonucleotide
gccucggauuucacaagag

SEQ ID NO: 2680116 - RNA, 19 nt, Artificial Sequence
  Description of Artificial Sequence: Synthetic oligonucleotide
ggcgucgguccuucgcgcc

SEQ ID NO: 2680117 - RNA, 19 nt, Artificial Sequence
  Description of Artificial Sequence: Synthetic oligonucleotide
uugcaccucagggcauccu

SEQ ID NO: 2680118 - RNA, 19 nt, Artificial Sequence
  Description of Artificial Sequence: Synthetic oligonucleotide
gcaguagaaggucccugaa

SEQ ID NO: 2680119 - RNA, 19 nt, Artificial Sequence
  Description of Artificial Sequence: Synthetic oligonucleotide
gcgccggguccaaaggugg

SEQ ID NO: 2680120 - RNA, 19 nt, Artificial Sequence
  Description of Artificial Sequence: Synthetic oligonucleotide
cccugggcgucaaauuuuc

SEQ ID NO: 2680121 - RNA, 19 nt, Artificial Sequence
  Description of Artificial Sequence: Synthetic oligonucleotide
ggagaccuggauucuuugu

SEQ ID NO: 2680122 - RNA, 19 nt, Artificial Sequence
  Description of Artificial Sequence: Synthetic oligonucleotide
ugacuuccccugggcguca

SEQ ID NO: 2680123 - RNA, 19 nt, Artificial Sequence
  Description of Artificial Sequence: Synthetic oligonucleotide
cacccucccuccgggagac

SEQ ID NO: 2680124 - RNA, 19 nt, Artificial Sequence
  Description of Artificial Sequence: Synthetic oligonucleotide
ccugggcgucaaauuuucc

SEQ ID NO: 2680125 - RNA, 19 nt, Artificial Sequence
  Description of Artificial Sequence: Synthetic oligonucleotide
ggcucaugcaguagaaggu

SEQ ID NO: 2680126 - RNA, 19 nt, Artificial Sequence
  Description of Artificial Sequence: Synthetic oligonucleotide
cagcguugugcagaaaagu

SEQ ID NO: 2680127 - RNA, 19 nt, Artificial Sequence
  Description of Artificial Sequence: Synthetic oligonucleotide
ccccacguccccagcauug

SEQ ID NO: 2680128 - RNA, 19 nt, Artificial Sequence
  Description of Artificial Sequence: Synthetic oligonucleotide
acgaacuggcccagccgcu

SEQ ID NO: 2680129 - RNA, 19 nt, Artificial Sequence
  Description of Artificial Sequence: Synthetic oligonucleotide
accuuccggaggguucgug

SEQ ID NO: 2680130 - RNA, 19 nt, Artificial Sequence
  Description of Artificial Sequence: Synthetic oligonucleotide
gucgguccuucgcgccggg

SEQ ID NO: 2680131 - RNA, 19 nt, Artificial Sequence
  Description of Artificial Sequence: Synthetic oligonucleotide
cggccuuucugcugggagc

SEQ ID NO: 2680132 - RNA, 19 nt, Artificial Sequence
  Description of Artificial Sequence: Synthetic oligonucleotide
cugugccgcaaggcauggg

SEQ ID NO: 2680133 - RNA, 19 nt, Artificial Sequence
  Description of Artificial Sequence: Synthetic oligonucleotide
aggcggccuuucugcuggg

SEQ ID NO: 2680134 - RNA, 19 nt, Artificial Sequence
  Description of Artificial Sequence: Synthetic oligonucleotide
ggaucuccgcuguguucug

SEQ ID NO: 2680135 - RNA, 19 nt, Artificial Sequence
  Description of Artificial Sequence: Synthetic oligonucleotide
caugcaguagaaggucccu

SEQ ID NO: 2680136 - RNA, 19 nt, Artificial Sequence
  Description of Artificial Sequence: Synthetic oligonucleotide
cgcuccgcacacaugguuc

SEQ ID NO: 2680137 - RNA, 19 nt, Artificial Sequence
  Description of Artificial Sequence: Synthetic oligonucleotide
auguuccccugugcugcug

SEQ ID NO: 2680138 - RNA, 19 nt, Artificial Sequence
  Description of Artificial Sequence: Synthetic oligonucleotide
accccacguccccagcauu

SEQ ID NO: 2680139 - RNA, 19 nt, Artificial Sequence
  Description of Artificial Sequence: Synthetic oligonucleotide
cuccgcacacaugguucug

SEQ ID NO: 2680140 - RNA, 19 nt, Artificial Sequence
  Description of Artificial Sequence: Synthetic oligonucleotide
cagggcauccuugaugaau

SEQ ID NO: 2680141 - RNA, 19 nt, Artificial Sequence
  Description of Artificial Sequence: Synthetic oligonucleotide
gccggacacuuccugcuga

SEQ ID NO: 2680142 - RNA, 19 nt, Artificial Sequence
  Description of Artificial Sequence: Synthetic oligonucleotide
ucccuccgggagaccugga

SEQ ID NO: 2680143 - RNA, 19 nt, Artificial Sequence
  Description of Artificial Sequence: Synthetic oligonucleotide
ccaaacagugcuggaucuc

SEQ ID NO: 2680144 - RNA, 19 nt, Artificial Sequence
  Description of Artificial Sequence: Synthetic oligonucleotide
gggcauccuugaugaauga

SEQ ID NO: 2680145 - RNA, 19 nt, Artificial Sequence
  Description of Artificial Sequence: Synthetic oligonucleotide
cguggcgucgguccuucgc

SEQ ID NO: 2680146 - RNA, 19 nt, Artificial Sequence
  Description of Artificial Sequence: Synthetic oligonucleotide
gcugagcacagaucaugcu

SEQ ID NO: 2680147 - RNA, 19 nt, Artificial Sequence
  Description of Artificial Sequence: Synthetic oligonucleotide
gcuugagguagcauucccu

SEQ ID NO: 2680148 - RNA, 19 nt, Artificial Sequence
  Description of Artificial Sequence: Synthetic oligonucleotide
cguugugcagaaaagucau

SEQ ID NO: 2680149 - RNA, 19 nt, Artificial Sequence
  Description of Artificial Sequence: Synthetic oligonucleotide
gggugacuagccuccuuua

SEQ ID NO: 2680150 - RNA, 19 nt, Artificial Sequence
  Description of Artificial Sequence: Synthetic oligonucleotide
gaggguucguggcgucggu

SEQ ID NO: 2680151 - RNA, 19 nt, Artificial Sequence
  Description of Artificial Sequence: Synthetic oligonucleotide
gggucacgaacuggcccag

SEQ ID NO: 2680152 - RNA, 19 nt, Artificial Sequence
  Description of Artificial Sequence: Synthetic oligonucleotide
gcuccgcacacaugguucu

SEQ ID NO: 2680153 - RNA, 19 nt, Artificial Sequence
  Description of Artificial Sequence: Synthetic oligonucleotide
ggauucuuugugcgccccu

SEQ ID NO: 2680154 - RNA, 19 nt, Artificial Sequence
  Description of Artificial Sequence: Synthetic oligonucleotide
agguccacauagggcucau

SEQ ID NO: 2680155 - RNA, 19 nt, Artificial Sequence
  Description of Artificial Sequence: Synthetic oligonucleotide
ucgguccuucgcgccgggu

SEQ ID NO: 2680156 - RNA, 19 nt, Artificial Sequence
  Description of Artificial Sequence: Synthetic oligonucleotide
ccacguccccagcauugac

SEQ ID NO: 2680157 - RNA, 19 nt, Artificial Sequence
  Description of Artificial Sequence: Synthetic oligonucleotide
cgucaaauuuuccagcguu

SEQ ID NO: 2680158 - RNA, 19 nt, Artificial Sequence
  Description of Artificial Sequence: Synthetic oligonucleotide
gguucguggcgucgguccu

SEQ ID NO: 2680159 - RNA, 19 nt, Artificial Sequence
  Description of Artificial Sequence: Synthetic oligonucleotide
uuccagcguugugcagaaa

SEQ ID NO: 2680160 - RNA, 19 nt, Artificial Sequence
  Description of Artificial Sequence: Synthetic oligonucleotide
gaggaccuuccggaggguu

SEQ ID NO: 2680161 - RNA, 19 nt, Artificial Sequence
  Description of Artificial Sequence: Synthetic oligonucleotide
cuggcccagccgcuccgca

SEQ ID NO: 2680162 - RNA, 19 nt, Artificial Sequence
  Description of Artificial Sequence: Synthetic oligonucleotide
guccuucgcgccgggucca

SEQ ID NO: 2680163 - RNA, 19 nt, Artificial Sequence
  Description of Artificial Sequence: Synthetic oligonucleotide
cagggacaggcggccuuuc

SEQ ID NO: 2680164 - RNA, 19 nt, Artificial Sequence
  Description of Artificial Sequence: Synthetic oligonucleotide
uccuucgcgccggguccaa

SEQ ID NO: 2680165 - RNA, 19 nt, Artificial Sequence
  Description of Artificial Sequence: Synthetic oligonucleotide
cccauguaagccucggauu

SEQ ID NO: 2680166 - RNA, 19 nt, Artificial Sequence
  Description of Artificial Sequence: Synthetic oligonucleotide
gccggguccaaagguggca

SEQ ID NO: 2680167 - RNA, 19 nt, Artificial Sequence
  Description of Artificial Sequence: Synthetic oligonucleotide
ccucccuccgggagaccug

SEQ ID NO: 2680168 - RNA, 19 nt, Artificial Sequence
  Description of Artificial Sequence: Synthetic oligonucleotide
cccugucuugaggaccuuc

SEQ ID NO: 2680169 - RNA, 19 nt, Artificial Sequence
  Description of Artificial Sequence: Synthetic oligonucleotide
cgguccuucgcgccggguc

SEQ ID NO: 2680170 - RNA, 19 nt, Artificial Sequence
  Description of Artificial Sequence: Synthetic oligonucleotide
ccuuuacaucuuccccaca

SEQ ID NO: 2680171 - RNA, 19 nt, Artificial Sequence
  Description of Artificial Sequence: Synthetic oligonucleotide
cgccggguccaaagguggc

SEQ ID NO: 2680172 - RNA, 19 nt, Artificial Sequence
  Description of Artificial Sequence: Synthetic oligonucleotide
gccuuucugcugggagccc

SEQ ID NO: 2680173 - RNA, 19 nt, Artificial Sequence
  Description of Artificial Sequence: Synthetic oligonucleotide
ggauuucacaagaguuguu

SEQ ID NO: 2680174 - RNA, 19 nt, Artificial Sequence
  Description of Artificial Sequence: Synthetic oligonucleotide
cgucgguccuucgcgccgg

SEQ ID NO: 2680175 - RNA, 19 nt, Artificial Sequence
  Description of Artificial Sequence: Synthetic oligonucleotide
gccccugucuugaggaccu

SEQ ID NO: 2680176 - RNA, 19 nt, Artificial Sequence
  Description of Artificial Sequence: Synthetic oligonucleotide
cggaggguucguggcgucg

SEQ ID NO: 2680177 - RNA, 19 nt, Artificial Sequence
  Description of Artificial Sequence: Synthetic oligonucleotide
caccccacguccccagcau

SEQ ID NO: 2680178 - RNA, 19 nt, Artificial Sequence
  Description of Artificial Sequence: Synthetic oligonucleotide
cuggaugcuucgggugacu

SEQ ID NO: 2680179 - RNA, 19 nt, Artificial Sequence
  Description of Artificial Sequence: Synthetic oligonucleotide
gcccagccgcuccgcacac

SEQ ID NO: 2680180 - RNA, 19 nt, Artificial Sequence
  Description of Artificial Sequence: Synthetic oligonucleotide
ccggaggguucguggcguc

SEQ ID NO: 2680181 - RNA, 19 nt, Artificial Sequence
  Description of Artificial Sequence: Synthetic oligonucleotide
ccgcaaggcaugggccuug

SEQ ID NO: 2680182 - RNA, 19 nt, Artificial Sequence
  Description of Artificial Sequence: Synthetic oligonucleotide
ccggguccaaagguggcaa

SEQ ID NO: 2680183 - RNA, 19 nt, Artificial Sequence
  Description of Artificial Sequence: Synthetic oligonucleotide
cccacguccccagcauuga

SEQ ID NO: 2680184 - RNA, 19 nt, Artificial Sequence
  Description of Artificial Sequence: Synthetic oligonucleotide
guucguggcgucgguccuu

SEQ ID NO: 2680185 - RNA, 19 nt, Artificial Sequence
  Description of Artificial Sequence: Synthetic oligonucleotide
gaccuuccggaggguucgu

SEQ ID NO: 2680186 - RNA, 19 nt, Artificial Sequence
  Description of Artificial Sequence: Synthetic oligonucleotide
ccagccgcuccgcacacau

SEQ ID NO: 2680187 - RNA, 19 nt, Artificial Sequence
  Description of Artificial Sequence: Synthetic oligonucleotide
ggcggccuuucugcuggga

SEQ ID NO: 2680188 - RNA, 19 nt, Artificial Sequence
  Description of Artificial Sequence: Synthetic oligonucleotide
ccuccgggagaccuggauu

SEQ ID NO: 2680189 - RNA, 19 nt, Artificial Sequence
  Description of Artificial Sequence: Synthetic oligonucleotide
ccccagcauugaccaaaca

SEQ ID NO: 2680190 - RNA, 19 nt, Artificial Sequence
  Description of Artificial Sequence: Synthetic oligonucleotide
ccccugggcgucaaauuuu

SEQ ID NO: 2680191 - RNA, 19 nt, Artificial Sequence
  Description of Artificial Sequence: Synthetic oligonucleotide
cgggugacuagccuccuuu

SEQ ID NO: 2680192 - RNA, 19 nt, Artificial Sequence
  Description of Artificial Sequence: Synthetic oligonucleotide
ccggacacuuccugcugau

SEQ ID NO: 2680193 - RNA, 19 nt, Artificial Sequence
  Description of Artificial Sequence: Synthetic oligonucleotide
ccacaaucacaccgauguu

SEQ ID NO: 2680194 - RNA, 19 nt, Artificial Sequence
  Description of Artificial Sequence: Synthetic oligonucleotide
gcagggacaggcggccuuu

SEQ ID NO: 2680195 - RNA, 19 nt, Artificial Sequence
  Description of Artificial Sequence: Synthetic oligonucleotide
cccuccgggagaccuggau

SEQ ID NO: 2680196 - RNA, 19 nt, Artificial Sequence
  Description of Artificial Sequence: Synthetic oligonucleotide
gccgcuccgcacacauggu

SEQ ID NO: 2680197 - RNA, 19 nt, Artificial Sequence
  Description of Artificial Sequence: Synthetic oligonucleotide
ccgcuccgcacacaugguu

SEQ ID NO: 2680198 - RNA, 19 nt, Artificial Sequence
  Description of Artificial Sequence: Synthetic oligonucleotide
ccgcuguguucugcaggga

SEQ ID NO: 2680199 - RNA, 19 nt, Artificial Sequence
  Description of Artificial Sequence: Synthetic oligonucleotide
cccagccgcuccgcacaca

SEQ ID NO: 2680200 - RNA, 19 nt, Artificial Sequence
  Description of Artificial Sequence: Synthetic oligonucleotide
ccuucgcgccggguccaaa

SEQ ID NO: 2680201 - RNA, 19 nt, Artificial Sequence
  Description of Artificial Sequence: Synthetic oligonucleotide
ccgggagaccuggauucuu

SEQ ID NO: 2680202 - RNA, 19 nt, Artificial Sequence
  Description of Artificial Sequence: Synthetic oligonucleotide
uuugcaaacaaucugauga

SEQ ID NO: 2680203 - RNA, 19 nt, Artificial Sequence
  Description of Artificial Sequence: Synthetic oligonucleotide
aaucugaugacuucagggg

SEQ ID NO: 2680204 - RNA, 19 nt, Artificial Sequence
  Description of Artificial Sequence: Synthetic oligonucleotide
uguaauugcugcaucagcc

SEQ ID NO: 2680205 - RNA, 19 nt, Artificial Sequence
  Description of Artificial Sequence: Synthetic oligonucleotide
uuaaaggccuggcugauag

SEQ ID NO: 2680206 - RNA, 19 nt, Artificial Sequence
  Description of Artificial Sequence: Synthetic oligonucleotide
guuaggauggggcuuaugg

SEQ ID NO: 2680207 - RNA, 19 nt, Artificial Sequence
  Description of Artificial Sequence: Synthetic oligonucleotide
uauggagccaaacugcugc

SEQ ID NO: 2680208 - RNA, 19 nt, Artificial Sequence
  Description of Artificial Sequence: Synthetic oligonucleotide
caaucugaugacuucaggg

SEQ ID NO: 2680209 - RNA, 19 nt, Artificial Sequence
  Description of Artificial Sequence: Synthetic oligonucleotide
uuucuuugcaaacaaucug

SEQ ID NO: 2680210 - RNA, 19 nt, Artificial Sequence
  Description of Artificial Sequence: Synthetic oligonucleotide
uuuucaaccucaaacccug

SEQ ID NO: 2680211 - RNA, 19 nt, Artificial Sequence
  Description of Artificial Sequence: Synthetic oligonucleotide
ugaauagccagcugcaugc

SEQ ID NO: 2680212 - RNA, 19 nt, Artificial Sequence
  Description of Artificial Sequence: Synthetic oligonucleotide
uguuucuuugcaaacaauc

SEQ ID NO: 2680213 - RNA, 19 nt, Artificial Sequence
  Description of Artificial Sequence: Synthetic oligonucleotide
agagcaaggaccuuaucuc

SEQ ID NO: 2680214 - RNA, 19 nt, Artificial Sequence
  Description of Artificial Sequence: Synthetic oligonucleotide
uuggcuaacaggaaggccu

SEQ ID NO: 2680215 - RNA, 19 nt, Artificial Sequence
  Description of Artificial Sequence: Synthetic oligonucleotide
aucucugcuaaccuuaguc

SEQ ID NO: 2680216 - RNA, 19 nt, Artificial Sequence
  Description of Artificial Sequence: Synthetic oligonucleotide
uccaaaguuuccuucuugg

SEQ ID NO: 2680217 - RNA, 19 nt, Artificial Sequence
  Description of Artificial Sequence: Synthetic oligonucleotide
ugugcaguuaggauggggc

SEQ ID NO: 2680218 - RNA, 19 nt, Artificial Sequence
  Description of Artificial Sequence: Synthetic oligonucleotide
aaguugaccugguuguuuc

SEQ ID NO: 2680219 - RNA, 19 nt, Artificial Sequence
  Description of Artificial Sequence: Synthetic oligonucleotide
ucugucuuuccucuggaag

SEQ ID NO: 2680220 - RNA, 19 nt, Artificial Sequence
  Description of Artificial Sequence: Synthetic oligonucleotide
gaugaaagcaccaugugca

SEQ ID NO: 2680221 - RNA, 19 nt, Artificial Sequence
  Description of Artificial Sequence: Synthetic oligonucleotide
accaugugcaguuaggaug

SEQ ID NO: 2680222 - RNA, 19 nt, Artificial Sequence
  Description of Artificial Sequence: Synthetic oligonucleotide
ucuccgagcuuccugagag

SEQ ID NO: 2680223 - RNA, 19 nt, Artificial Sequence
  Description of Artificial Sequence: Synthetic oligonucleotide
aaggaccuuaucuccagag

SEQ ID NO: 2680224 - RNA, 19 nt, Artificial Sequence
  Description of Artificial Sequence: Synthetic oligonucleotide
uccgaaguugaccugguug

SEQ ID NO: 2680225 - RNA, 19 nt, Artificial Sequence
  Description of Artificial Sequence: Synthetic oligonucleotide
uaacaggaaggccucauca

SEQ ID NO: 2680226 - RNA, 19 nt, Artificial Sequence
  Description of Artificial Sequence: Synthetic oligonucleotide
gacuuucucaaacuggcug

SEQ ID NO: 2680227 - RNA, 19 nt, Artificial Sequence
  Description of Artificial Sequence: Synthetic oligonucleotide
ucugcuuuaauuugcucgu

SEQ ID NO: 2680228 - RNA, 19 nt, Artificial Sequence
  Description of Artificial Sequence: Synthetic oligonucleotide
ugccugaauagccagcugc

SEQ ID NO: 2680229 - RNA, 19 nt, Artificial Sequence
  Description of Artificial Sequence: Synthetic oligonucleotide
ucucugcuaaccuuagucc

SEQ ID NO: 2680230 - RNA, 19 nt, Artificial Sequence
  Description of Artificial Sequence: Synthetic oligonucleotide
uauucaucagugucaagcu

SEQ ID NO: 2680231 - RNA, 19 nt, Artificial Sequence
  Description of Artificial Sequence: Synthetic oligonucleotide
gaguucauccaccaaaguc

SEQ ID NO: 2680232 - RNA, 19 nt, Artificial Sequence
  Description of Artificial Sequence: Synthetic oligonucleotide
aaugucauuucuuggcuuu

SEQ ID NO: 2680233 - RNA, 19 nt, Artificial Sequence
  Description of Artificial Sequence: Synthetic oligonucleotide
gagacuuucucaaacuggc

SEQ ID NO: 2680234 - RNA, 19 nt, Artificial Sequence
  Description of Artificial Sequence: Synthetic oligonucleotide
ucaggaugaaagcaccaug

SEQ ID NO: 2680235 - RNA, 19 nt, Artificial Sequence
  Description of Artificial Sequence: Synthetic oligonucleotide
uuguaauugcugcaucagc

SEQ ID NO: 2680236 - RNA, 19 nt, Artificial Sequence
  Description of Artificial Sequence: Synthetic oligonucleotide
cucugcuaaccuuaguccg

SEQ ID NO: 2680237 - RNA, 19 nt, Artificial Sequence
  Description of Artificial Sequence: Synthetic oligonucleotide
cugucuuuccucuggaagc

SEQ ID NO: 2680238 - RNA, 19 nt, Artificial Sequence
  Description of Artificial Sequence: Synthetic oligonucleotide
aauuugcucgucucugucu

SEQ ID NO: 2680239 - RNA, 19 nt, Artificial Sequence
  Description of Artificial Sequence: Synthetic oligonucleotide
aaacaaucugaugacuuca

SEQ ID NO: 2680240 - RNA, 19 nt, Artificial Sequence
  Description of Artificial Sequence: Synthetic oligonucleotide
aggaccuuaucuccagagc

SEQ ID NO: 2680241 - RNA, 19 nt, Artificial Sequence
  Description of Artificial Sequence: Synthetic oligonucleotide
ucauccaccaaagucauau

SEQ ID NO: 2680242 - RNA, 19 nt, Artificial Sequence
  Description of Artificial Sequence: Synthetic oligonucleotide
uggagacuuucucaaacug

SEQ ID NO: 2680243 - RNA, 19 nt, Artificial Sequence
  Description of Artificial Sequence: Synthetic oligonucleotide
gauagcugccugaauagcc

SEQ ID NO: 2680244 - RNA, 19 nt, Artificial Sequence
  Description of Artificial Sequence: Synthetic oligonucleotide
acaaucugaugacuucagg

SEQ ID NO: 2680245 - RNA, 19 nt, Artificial Sequence
  Description of Artificial Sequence: Synthetic oligonucleotide
acuuucucaaacuggcuga

SEQ ID NO: 2680246 - RNA, 19 nt, Artificial Sequence
  Description of Artificial Sequence: Synthetic oligonucleotide
uuucccgacaugauuuucu

SEQ ID NO: 2680247 - RNA, 19 nt, Artificial Sequence
  Description of Artificial Sequence: Synthetic oligonucleotide
ucuguggagacuuucucaa

SEQ ID NO: 2680248 - RNA, 19 nt, Artificial Sequence
  Description of Artificial Sequence: Synthetic oligonucleotide
aggccuggcugauagcugc

SEQ ID NO: 2680249 - RNA, 19 nt, Artificial Sequence
  Description of Artificial Sequence: Synthetic oligonucleotide
uuaggauggggcuuaugga

SEQ ID NO: 2680250 - RNA, 19 nt, Artificial Sequence
  Description of Artificial Sequence: Synthetic oligonucleotide
uauccaguuguucuucuaa

SEQ ID NO: 2680251 - RNA, 19 nt, Artificial Sequence
  Description of Artificial Sequence: Synthetic oligonucleotide
cugaguucauccaccaaag

SEQ ID NO: 2680252 - RNA, 19 nt, Artificial Sequence
  Description of Artificial Sequence: Synthetic oligonucleotide
aagucauauuucccgacau

SEQ ID NO: 2680253 - RNA, 19 nt, Artificial Sequence
  Description of Artificial Sequence: Synthetic oligonucleotide
uaaccuuaguccgaaguug

SEQ ID NO: 2680254 - RNA, 19 nt, Artificial Sequence
  Description of Artificial Sequence: Synthetic oligonucleotide
uucaaccucaaacccugcc

SEQ ID NO: 2680255 - RNA, 19 nt, Artificial Sequence
  Description of Artificial Sequence: Synthetic oligonucleotide
uuaauuugcucgucucugu

SEQ ID NO: 2680256 - RNA, 19 nt, Artificial Sequence
  Description of Artificial Sequence: Synthetic oligonucleotide
uccucaggaugaaagcacc

SEQ ID NO: 2680257 - RNA, 19 nt, Artificial Sequence
  Description of Artificial Sequence: Synthetic oligonucleotide
guggaacucgcucagcugc

SEQ ID NO: 2680258 - RNA, 19 nt, Artificial Sequence
  Description of Artificial Sequence: Synthetic oligonucleotide
caaacaaucugaugacuuc

SEQ ID NO: 2680259 - RNA, 19 nt, Artificial Sequence
  Description of Artificial Sequence: Synthetic oligonucleotide
ucugcuaaccuuaguccga

SEQ ID NO: 2680260 - RNA, 19 nt, Artificial Sequence
  Description of Artificial Sequence: Synthetic oligonucleotide
gagcaaggaccuuaucucc

SEQ ID NO: 2680261 - RNA, 19 nt, Artificial Sequence
  Description of Artificial Sequence: Synthetic oligonucleotide
ggaccuuaucuccagagcc

SEQ ID NO: 2680262 - RNA, 19 nt, Artificial Sequence
  Description of Artificial Sequence: Synthetic oligonucleotide
agaucuuguaauugcugca

SEQ ID NO: 2680263 - RNA, 19 nt, Artificial Sequence
  Description of Artificial Sequence: Synthetic oligonucleotide
aacaaucugaugacuucag

SEQ ID NO: 2680264 - RNA, 19 nt, Artificial Sequence
  Description of Artificial Sequence: Synthetic oligonucleotide
uaguccgaaguugaccugg

SEQ ID NO: 2680265 - RNA, 19 nt, Artificial Sequence
  Description of Artificial Sequence: Synthetic oligonucleotide
ggaugaaagcaccaugugc

SEQ ID NO: 2680266 - RNA, 19 nt, Artificial Sequence
  Description of Artificial Sequence: Synthetic oligonucleotide
aucugaugacuucaggggu

SEQ ID NO: 2680267 - RNA, 19 nt, Artificial Sequence
  Description of Artificial Sequence: Synthetic oligonucleotide
agugucaagcuccucucug

SEQ ID NO: 2680268 - RNA, 19 nt, Artificial Sequence
  Description of Artificial Sequence: Synthetic oligonucleotide
uucuaaauucugcuuuaau

SEQ ID NO: 2680269 - RNA, 19 nt, Artificial Sequence
  Description of Artificial Sequence: Synthetic oligonucleotide
aauagccagcugcaugcca

SEQ ID NO: 2680270 - RNA, 19 nt, Artificial Sequence
  Description of Artificial Sequence: Synthetic oligonucleotide
accaucagaucucugucca

SEQ ID NO: 2680271 - RNA, 19 nt, Artificial Sequence
  Description of Artificial Sequence: Synthetic oligonucleotide
aacugcugcaaugucauuu

SEQ ID NO: 2680272 - RNA, 19 nt, Artificial Sequence
  Description of Artificial Sequence: Synthetic oligonucleotide
ggcuuauggagccaaacug

SEQ ID NO: 2680273 - RNA, 19 nt, Artificial Sequence
  Description of Artificial Sequence: Synthetic oligonucleotide
cuuguaauugcugcaucag

SEQ ID NO: 2680274 - RNA, 19 nt, Artificial Sequence
  Description of Artificial Sequence: Synthetic oligonucleotide
uuauggagccaaacugcug

SEQ ID NO: 2680275 - RNA, 19 nt, Artificial Sequence
  Description of Artificial Sequence: Synthetic oligonucleotide
uuccugagagcagugagga

SEQ ID NO: 2680276 - RNA, 19 nt, Artificial Sequence
  Description of Artificial Sequence: Synthetic oligonucleotide
caaccucaaacccugccag

SEQ ID NO: 2680277 - RNA, 19 nt, Artificial Sequence
  Description of Artificial Sequence: Synthetic oligonucleotide
gcugcaaugucauuucuug

SEQ ID NO: 2680278 - RNA, 19 nt, Artificial Sequence
  Description of Artificial Sequence: Synthetic oligonucleotide
auagccagcugcaugccac

SEQ ID NO: 2680279 - RNA, 19 nt, Artificial Sequence
  Description of Artificial Sequence: Synthetic oligonucleotide
gucauauuucccgacauga

SEQ ID NO: 2680280 - RNA, 19 nt, Artificial Sequence
  Description of Artificial Sequence: Synthetic oligonucleotide
uaauuugcucgucucuguc

SEQ ID NO: 2680281 - RNA, 19 nt, Artificial Sequence
  Description of Artificial Sequence: Synthetic oligonucleotide
guacaggucucuuuccagc

SEQ ID NO: 2680282 - RNA, 19 nt, Artificial Sequence
  Description of Artificial Sequence: Synthetic oligonucleotide
cuuugcaaacaaucugaug

SEQ ID NO: 2680283 - RNA, 19 nt, Artificial Sequence
  Description of Artificial Sequence: Synthetic oligonucleotide
augaaagcaccaugugcag

SEQ ID NO: 2680284 - RNA, 19 nt, Artificial Sequence
  Description of Artificial Sequence: Synthetic oligonucleotide
uguccaucucugcuaaccu

SEQ ID NO: 2680285 - RNA, 19 nt, Artificial Sequence
  Description of Artificial Sequence: Synthetic oligonucleotide
agucauauuucccgacaug

SEQ ID NO: 2680286 - RNA, 19 nt, Artificial Sequence
  Description of Artificial Sequence: Synthetic oligonucleotide
uuaucuccagagccaaggu

SEQ ID NO: 2680287 - RNA, 19 nt, Artificial Sequence
  Description of Artificial Sequence: Synthetic oligonucleotide
ugcuccaaaguuuccuucu

SEQ ID NO: 2680288 - RNA, 19 nt, Artificial Sequence
  Description of Artificial Sequence: Synthetic oligonucleotide
ucaagcuccucucugcauu

SEQ ID NO: 2680289 - RNA, 19 nt, Artificial Sequence
  Description of Artificial Sequence: Synthetic oligonucleotide
ugucaagcuccucucugca

SEQ ID NO: 2680290 - RNA, 19 nt, Artificial Sequence
  Description of Artificial Sequence: Synthetic oligonucleotide
ccaugugcaguuaggaugg

SEQ ID NO: 2680291 - RNA, 19 nt, Artificial Sequence
  Description of Artificial Sequence: Synthetic oligonucleotide
ucguggaacucgcucagcu

SEQ ID NO: 2680292 - RNA, 19 nt, Artificial Sequence
  Description of Artificial Sequence: Synthetic oligonucleotide
aacuggcugagugcagcgc

SEQ ID NO: 2680293 - RNA, 19 nt, Artificial Sequence
  Description of Artificial Sequence: Synthetic oligonucleotide
ucauauuucccgacaugau

SEQ ID NO: 2680294 - RNA, 19 nt, Artificial Sequence
  Description of Artificial Sequence: Synthetic oligonucleotide
cuggaagccaucugaauca

SEQ ID NO: 2680295 - RNA, 19 nt, Artificial Sequence
  Description of Artificial Sequence: Synthetic oligonucleotide
aucuccaccuucugcugcg

SEQ ID NO: 2680296 - RNA, 19 nt, Artificial Sequence
  Description of Artificial Sequence: Synthetic oligonucleotide
aggauggggcuuauggagc

SEQ ID NO: 2680297 - RNA, 19 nt, Artificial Sequence
  Description of Artificial Sequence: Synthetic oligonucleotide
auauuucccgacaugauuu

SEQ ID NO: 2680298 - RNA, 19 nt, Artificial Sequence
  Description of Artificial Sequence: Synthetic oligonucleotide
agcugcaugccacugaguu

SEQ ID NO: 2680299 - RNA, 19 nt, Artificial Sequence
  Description of Artificial Sequence: Synthetic oligonucleotide
gagccaaacugcugcaaug

SEQ ID NO: 2680300 - RNA, 19 nt, Artificial Sequence
  Description of Artificial Sequence: Synthetic oligonucleotide
cuuaguccgaaguugaccu

SEQ ID NO: 2680301 - RNA, 19 nt, Artificial Sequence
  Description of Artificial Sequence: Synthetic oligonucleotide
ugaccugguuguuucuuug

SEQ ID NO: 2680302 - RNA, 19 nt, Artificial Sequence
  Description of Artificial Sequence: Synthetic oligonucleotide
uacaggucucuuuccagcu

SEQ ID NO: 2680303 - RNA, 19 nt, Artificial Sequence
  Description of Artificial Sequence: Synthetic oligonucleotide
ucaaacuggcugagugcag

SEQ ID NO: 2680304 - RNA, 19 nt, Artificial Sequence
  Description of Artificial Sequence: Synthetic oligonucleotide
ggagacuuucucaaacugg

SEQ ID NO: 2680305 - RNA, 19 nt, Artificial Sequence
  Description of Artificial Sequence: Synthetic oligonucleotide
aucagaucucuguccaucu

SEQ ID NO: 2680306 - RNA, 19 nt, Artificial Sequence
  Description of Artificial Sequence: Synthetic oligonucleotide
aaccuuaguccgaaguuga

SEQ ID NO: 2680307 - RNA, 19 nt, Artificial Sequence
  Description of Artificial Sequence: Synthetic oligonucleotide
uucccucagcuucucuccg

SEQ ID NO: 2680308 - RNA, 19 nt, Artificial Sequence
  Description of Artificial Sequence: Synthetic oligonucleotide
caccaucagaucucugucc

SEQ ID NO: 2680309 - RNA, 19 nt, Artificial Sequence
  Description of Artificial Sequence: Synthetic oligonucleotide
ucaucagugucaagcuccu

SEQ ID NO: 2680310 - RNA, 19 nt, Artificial Sequence
  Description of Artificial Sequence: Synthetic oligonucleotide
cuguccaucucugcuaacc

SEQ ID NO: 2680311 - RNA, 19 nt, Artificial Sequence
  Description of Artificial Sequence: Synthetic oligonucleotide
ugguuguuucuuugcaaac

SEQ ID NO: 2680312 - RNA, 19 nt, Artificial Sequence
  Description of Artificial Sequence: Synthetic oligonucleotide
auccaccaaagucauauuu

SEQ ID NO: 2680313 - RNA, 19 nt, Artificial Sequence
  Description of Artificial Sequence: Synthetic oligonucleotide
gagucguggaacucgcuca

SEQ ID NO: 2680314 - RNA, 19 nt, Artificial Sequence
  Description of Artificial Sequence: Synthetic oligonucleotide
ucagugucaagcuccucuc

SEQ ID NO: 2680315 - RNA, 19 nt, Artificial Sequence
  Description of Artificial Sequence: Synthetic oligonucleotide
ccaccaaagucauauuucc

SEQ ID NO: 2680316 - RNA, 19 nt, Artificial Sequence
  Description of Artificial Sequence: Synthetic oligonucleotide
uucagggagucguggaacu

SEQ ID NO: 2680317 - RNA, 19 nt, Artificial Sequence
  Description of Artificial Sequence: Synthetic oligonucleotide
ugaguucauccaccaaagu

SEQ ID NO: 2680318 - RNA, 19 nt, Artificial Sequence
  Description of Artificial Sequence: Synthetic oligonucleotide
cucaaacccugccagagca

SEQ ID NO: 2680319 - RNA, 19 nt, Artificial Sequence
  Description of Artificial Sequence: Synthetic oligonucleotide
agucguggaacucgcucag

SEQ ID NO: 2680320 - RNA, 19 nt, Artificial Sequence
  Description of Artificial Sequence: Synthetic oligonucleotide
ugcaaacaaucugaugacu

SEQ ID NO: 2680321 - RNA, 19 nt, Artificial Sequence
  Description of Artificial Sequence: Synthetic oligonucleotide
augauuuucuucagggagu

SEQ ID NO: 2680322 - RNA, 19 nt, Artificial Sequence
  Description of Artificial Sequence: Synthetic oligonucleotide
auuugcucgucucugucuu

SEQ ID NO: 2680323 - RNA, 19 nt, Artificial Sequence
  Description of Artificial Sequence: Synthetic oligonucleotide
ugauagcugccugaauagc

SEQ ID NO: 2680324 - RNA, 19 nt, Artificial Sequence
  Description of Artificial Sequence: Synthetic oligonucleotide
gaccugguuguuucuuugc

SEQ ID NO: 2680325 - RNA, 19 nt, Artificial Sequence
  Description of Artificial Sequence: Synthetic oligonucleotide
ucucugucuuuccucugga

SEQ ID NO: 2680326 - RNA, 19 nt, Artificial Sequence
  Description of Artificial Sequence: Synthetic oligonucleotide
accucaaacccugccagag

SEQ ID NO: 2680327 - RNA, 19 nt, Artificial Sequence
  Description of Artificial Sequence: Synthetic oligonucleotide
ucugcugcguguacagguc

SEQ ID NO: 2680328 - RNA, 19 nt, Artificial Sequence
  Description of Artificial Sequence: Synthetic oligonucleotide
aaccucaaacccugccaga

SEQ ID NO: 2680329 - RNA, 19 nt, Artificial Sequence
  Description of Artificial Sequence: Synthetic oligonucleotide
gaacucgcucagcugcucc

SEQ ID NO: 2680330 - RNA, 19 nt, Artificial Sequence
  Description of Artificial Sequence: Synthetic oligonucleotide
ucgcucagcugcuccaaag

SEQ ID NO: 2680331 - RNA, 19 nt, Artificial Sequence
  Description of Artificial Sequence: Synthetic oligonucleotide
uuaguccgaaguugaccug

SEQ ID NO: 2680332 - RNA, 19 nt, Artificial Sequence
  Description of Artificial Sequence: Synthetic oligonucleotide
agugcagcgccugcguugg

SEQ ID NO: 2680333 - RNA, 19 nt, Artificial Sequence
  Description of Artificial Sequence: Synthetic oligonucleotide
gagugcagcgccugcguug

SEQ ID NO: 2680334 - RNA, 19 nt, Artificial Sequence
  Description of Artificial Sequence: Synthetic oligonucleotide
gcuuauggagccaaacugc

SEQ ID NO: 2680335 - RNA, 19 nt, Artificial Sequence
  Description of Artificial Sequence: Synthetic oligonucleotide
agccaaggucuguggagac

SEQ ID NO: 2680336 - RNA, 19 nt, Artificial Sequence
  Description of Artificial Sequence: Synthetic oligonucleotide
aaacccugccagagcaagg

SEQ ID NO: 2680337 - RNA, 19 nt, Artificial Sequence
  Description of Artificial Sequence: Synthetic oligonucleotide
aagcuccucucugcauucc

SEQ ID NO: 2680338 - RNA, 19 nt, Artificial Sequence
  Description of Artificial Sequence: Synthetic oligonucleotide
uccaccuucugcugcgugu

SEQ ID NO: 2680339 - RNA, 19 nt, Artificial Sequence
  Description of Artificial Sequence: Synthetic oligonucleotide
cugcaugccacugaguuca

SEQ ID NO: 2680340 - RNA, 19 nt, Artificial Sequence
  Description of Artificial Sequence: Synthetic oligonucleotide
accugguuguuucuuugca

SEQ ID NO: 2680341 - RNA, 19 nt, Artificial Sequence
  Description of Artificial Sequence: Synthetic oligonucleotide
uuucaaccucaaacccugc

SEQ ID NO: 2680342 - RNA, 19 nt, Artificial Sequence
  Description of Artificial Sequence: Synthetic oligonucleotide
agagcagugaggaucucca

SEQ ID NO: 2680343 - RNA, 19 nt, Artificial Sequence
  Description of Artificial Sequence: Synthetic oligonucleotide
guuucuuugcaaacaaucu

SEQ ID NO: 2680344 - RNA, 19 nt, Artificial Sequence
  Description of Artificial Sequence: Synthetic oligonucleotide
gaaagcaccaugugcaguu

SEQ ID NO: 2680345 - RNA, 19 nt, Artificial Sequence
  Description of Artificial Sequence: Synthetic oligonucleotide
cagggagucguggaacucg

SEQ ID NO: 2680346 - RNA, 19 nt, Artificial Sequence
  Description of Artificial Sequence: Synthetic oligonucleotide
auuucccgacaugauuuuc

SEQ ID NO: 2680347 - RNA, 19 nt, Artificial Sequence
  Description of Artificial Sequence: Synthetic oligonucleotide
cugguuguuucuuugcaaa

SEQ ID NO: 2680348 - RNA, 19 nt, Artificial Sequence
  Description of Artificial Sequence: Synthetic oligonucleotide
ugaaagcaccaugugcagu

SEQ ID NO: 2680349 - RNA, 19 nt, Artificial Sequence
  Description of Artificial Sequence: Synthetic oligonucleotide
ugcugcaaugucauuucuu

SEQ ID NO: 2680350 - RNA, 19 nt, Artificial Sequence
  Description of Artificial Sequence: Synthetic oligonucleotide
auagcugccugaauagcca

SEQ ID NO: 2680351 - RNA, 19 nt, Artificial Sequence
  Description of Artificial Sequence: Synthetic oligonucleotide
cucaaacuggcugagugca

SEQ ID NO: 2680352 - RNA, 19 nt, Artificial Sequence
  Description of Artificial Sequence: Synthetic oligonucleotide
ucagaucucuguccaucuc

SEQ ID NO: 2680353 - RNA, 19 nt, Artificial Sequence
  Description of Artificial Sequence: Synthetic oligonucleotide
ccugcguuggcuaacagga

SEQ ID NO: 2680354 - RNA, 19 nt, Artificial Sequence
  Description of Artificial Sequence: Synthetic oligonucleotide
cagagcaaggaccuuaucu

SEQ ID NO: 2680355 - RNA, 19 nt, Artificial Sequence
  Description of Artificial Sequence: Synthetic oligonucleotide
caucagaucucuguccauc

SEQ ID NO: 2680356 - RNA, 19 nt, Artificial Sequence
  Description of Artificial Sequence: Synthetic oligonucleotide
cuaacaggaaggccucauc

SEQ ID NO: 2680357 - RNA, 19 nt, Artificial Sequence
  Description of Artificial Sequence: Synthetic oligonucleotide
uauuucccgacaugauuuu

SEQ ID NO: 2680358 - RNA, 19 nt, Artificial Sequence
  Description of Artificial Sequence: Synthetic oligonucleotide
agccaaacugcugcaaugu

SEQ ID NO: 2680359 - RNA, 19 nt, Artificial Sequence
  Description of Artificial Sequence: Synthetic oligonucleotide
gcugauagcugccugaaua

SEQ ID NO: 2680360 - RNA, 19 nt, Artificial Sequence
  Description of Artificial Sequence: Synthetic oligonucleotide
uuuuaaaggccuggcugau

SEQ ID NO: 2680361 - RNA, 19 nt, Artificial Sequence
  Description of Artificial Sequence: Synthetic oligonucleotide
caggaugaaagcaccaugu

SEQ ID NO: 2680362 - RNA, 19 nt, Artificial Sequence
  Description of Artificial Sequence: Synthetic oligonucleotide
agggagucguggaacucgc

SEQ ID NO: 2680363 - RNA, 19 nt, Artificial Sequence
  Description of Artificial Sequence: Synthetic oligonucleotide
uccuccagaucuuguaauu

SEQ ID NO: 2680364 - RNA, 19 nt, Artificial Sequence
  Description of Artificial Sequence: Synthetic oligonucleotide
cuucagggagucguggaac

SEQ ID NO: 2680365 - RNA, 19 nt, Artificial Sequence
  Description of Artificial Sequence: Synthetic oligonucleotide
guaauugcugcaucagccu

SEQ ID NO: 2680366 - RNA, 19 nt, Artificial Sequence
  Description of Artificial Sequence: Synthetic oligonucleotide
cauauucaucagugucaag

SEQ ID NO: 2680367 - RNA, 19 nt, Artificial Sequence
  Description of Artificial Sequence: Synthetic oligonucleotide
cccgacaugauuuucuuca

SEQ ID NO: 2680368 - RNA, 19 nt, Artificial Sequence
  Description of Artificial Sequence: Synthetic oligonucleotide
uggcuaacaggaaggccuc

SEQ ID NO: 2680369 - RNA, 19 nt, Artificial Sequence
  Description of Artificial Sequence: Synthetic oligonucleotide
augugcaguuaggaugggg

SEQ ID NO: 2680370 - RNA, 19 nt, Artificial Sequence
  Description of Artificial Sequence: Synthetic oligonucleotide
uggaacucgcucagcugcu

SEQ ID NO: 2680371 - RNA, 19 nt, Artificial Sequence
  Description of Artificial Sequence: Synthetic oligonucleotide
cuucucuccgagcuuccug

SEQ ID NO: 2680372 - RNA, 19 nt, Artificial Sequence
  Description of Artificial Sequence: Synthetic oligonucleotide
cuuauggagccaaacugcu

SEQ ID NO: 2680373 - RNA, 19 nt, Artificial Sequence
  Description of Artificial Sequence: Synthetic oligonucleotide
gcuuuaauuugcucgucuc

SEQ ID NO: 2680374 - RNA, 19 nt, Artificial Sequence
  Description of Artificial Sequence: Synthetic oligonucleotide
ucagccuauccaguuguuc

SEQ ID NO: 2680375 - RNA, 19 nt, Artificial Sequence
  Description of Artificial Sequence: Synthetic oligonucleotide
cuuuaauuugcucgucucu

SEQ ID NO: 2680376 - RNA, 19 nt, Artificial Sequence
  Description of Artificial Sequence: Synthetic oligonucleotide
ucaaacccugccagagcaa

SEQ ID NO: 2680377 - RNA, 19 nt, Artificial Sequence
  Description of Artificial Sequence: Synthetic oligonucleotide
gaccuuaucuccagagcca

SEQ ID NO: 2680378 - RNA, 19 nt, Artificial Sequence
  Description of Artificial Sequence: Synthetic oligonucleotide
caaacugcugcaaugucau

SEQ ID NO: 2680379 - RNA, 19 nt, Artificial Sequence
  Description of Artificial Sequence: Synthetic oligonucleotide
gaauagccagcugcaugcc

SEQ ID NO: 2680380 - RNA, 19 nt, Artificial Sequence
  Description of Artificial Sequence: Synthetic oligonucleotide
uugaccugguuguuucuuu

SEQ ID NO: 2680381 - RNA, 19 nt, Artificial Sequence
  Description of Artificial Sequence: Synthetic oligonucleotide
aguugaccugguuguuucu

SEQ ID NO: 2680382 - RNA, 19 nt, Artificial Sequence
  Description of Artificial Sequence: Synthetic oligonucleotide
ggauggggcuuauggagcc

SEQ ID NO: 2680383 - RNA, 19 nt, Artificial Sequence
  Description of Artificial Sequence: Synthetic oligonucleotide
caagcuccucucugcauuc

SEQ ID NO: 2680384 - RNA, 19 nt, Artificial Sequence
  Description of Artificial Sequence: Synthetic oligonucleotide
gguuguuucuuugcaaaca

SEQ ID NO: 2680385 - RNA, 19 nt, Artificial Sequence
  Description of Artificial Sequence: Synthetic oligonucleotide
gccugcguuggcuaacagg

SEQ ID NO: 2680386 - RNA, 19 nt, Artificial Sequence
  Description of Artificial Sequence: Synthetic oligonucleotide
uucuugguuucuucauauu

SEQ ID NO: 2680387 - RNA, 19 nt, Artificial Sequence
  Description of Artificial Sequence: Synthetic oligonucleotide
uucccgacaugauuuucuu

SEQ ID NO: 2680388 - RNA, 19 nt, Artificial Sequence
  Description of Artificial Sequence: Synthetic oligonucleotide
ugcuaaccuuaguccgaag

SEQ ID NO: 2680389 - RNA, 19 nt, Artificial Sequence
  Description of Artificial Sequence: Synthetic oligonucleotide
ccagaucuuguaauugcug

SEQ ID NO: 2680390 - RNA, 19 nt, Artificial Sequence
  Description of Artificial Sequence: Synthetic oligonucleotide
accuuaguccgaaguugac

SEQ ID NO: 2680391 - RNA, 19 nt, Artificial Sequence
  Description of Artificial Sequence: Synthetic oligonucleotide
agcaaggaccuuaucucca

SEQ ID NO: 2680392 - RNA, 19 nt, Artificial Sequence
  Description of Artificial Sequence: Synthetic oligonucleotide
ugcguguacaggucucuuu

SEQ ID NO: 2680393 - RNA, 19 nt, Artificial Sequence
  Description of Artificial Sequence: Synthetic oligonucleotide
ugcaguuaggauggggcuu

SEQ ID NO: 2680394 - RNA, 19 nt, Artificial Sequence
  Description of Artificial Sequence: Synthetic oligonucleotide
gcguuggcuaacaggaagg

SEQ ID NO: 2680395 - RNA, 19 nt, Artificial Sequence
  Description of Artificial Sequence: Synthetic oligonucleotide
gaucuuguaauugcugcau

SEQ ID NO: 2680396 - RNA, 19 nt, Artificial Sequence
  Description of Artificial Sequence: Synthetic oligonucleotide
ggagucguggaacucgcuc

SEQ ID NO: 2680397 - RNA, 19 nt, Artificial Sequence
  Description of Artificial Sequence: Synthetic oligonucleotide
ugcugcguguacaggucuc

SEQ ID NO: 2680398 - RNA, 19 nt, Artificial Sequence
  Description of Artificial Sequence: Synthetic oligonucleotide
cauauuucccgacaugauu

SEQ ID NO: 2680399 - RNA, 19 nt, Artificial Sequence
  Description of Artificial Sequence: Synthetic oligonucleotide
agcuuccccaccaucagau

SEQ ID NO: 2680400 - RNA, 19 nt, Artificial Sequence
  Description of Artificial Sequence: Synthetic oligonucleotide
ucccgacaugauuuucuuc

SEQ ID NO: 2680401 - RNA, 19 nt, Artificial Sequence
  Description of Artificial Sequence: Synthetic oligonucleotide
ccuuaguccgaaguugacc

SEQ ID NO: 2680402 - RNA, 19 nt, Artificial Sequence
  Description of Artificial Sequence: Synthetic oligonucleotide
ugccagagcaaggaccuua

SEQ ID NO: 2680403 - RNA, 19 nt, Artificial Sequence
  Description of Artificial Sequence: Synthetic oligonucleotide
uuuaaaggccuggcugaua

SEQ ID NO: 2680404 - RNA, 19 nt, Artificial Sequence
  Description of Artificial Sequence: Synthetic oligonucleotide
agccuauccaguuguucuu

SEQ ID NO: 2680405 - RNA, 19 nt, Artificial Sequence
  Description of Artificial Sequence: Synthetic oligonucleotide
cagccuauccaguuguucu

SEQ ID NO: 2680406 - RNA, 19 nt, Artificial Sequence
  Description of Artificial Sequence: Synthetic oligonucleotide
uuccagcuuccccaccauc

SEQ ID NO: 2680407 - RNA, 19 nt, Artificial Sequence
  Description of Artificial Sequence: Synthetic oligonucleotide
cugagagcagugaggaucu

SEQ ID NO: 2680408 - RNA, 19 nt, Artificial Sequence
  Description of Artificial Sequence: Synthetic oligonucleotide
gcaucagccuauccaguug

SEQ ID NO: 2680409 - RNA, 19 nt, Artificial Sequence
  Description of Artificial Sequence: Synthetic oligonucleotide
aaacugcugcaaugucauu

SEQ ID NO: 2680410 - RNA, 19 nt, Artificial Sequence
  Description of Artificial Sequence: Synthetic oligonucleotide
cuaaccuuaguccgaaguu

SEQ ID NO: 2680411 - RNA, 19 nt, Artificial Sequence
  Description of Artificial Sequence: Synthetic oligonucleotide
gcguguacaggucucuuuc

SEQ ID NO: 2680412 - RNA, 19 nt, Artificial Sequence
  Description of Artificial Sequence: Synthetic oligonucleotide
accuuaucuccagagccaa

SEQ ID NO: 2680413 - RNA, 19 nt, Artificial Sequence
  Description of Artificial Sequence: Synthetic oligonucleotide
ugagugcagcgccugcguu

SEQ ID NO: 2680414 - RNA, 19 nt, Artificial Sequence
  Description of Artificial Sequence: Synthetic oligonucleotide
gcuaaccuuaguccgaagu

SEQ ID NO: 2680415 - RNA, 19 nt, Artificial Sequence
  Description of Artificial Sequence: Synthetic oligonucleotide
aaagcaccaugugcaguua

SEQ ID NO: 2680416 - RNA, 19 nt, Artificial Sequence
  Description of Artificial Sequence: Synthetic oligonucleotide
cuccgagcuuccugagagc

SEQ ID NO: 2680417 - RNA, 19 nt, Artificial Sequence
  Description of Artificial Sequence: Synthetic oligonucleotide
aggucuguggagacuuucu

SEQ ID NO: 2680418 - RNA, 19 nt, Artificial Sequence
  Description of Artificial Sequence: Synthetic oligonucleotide
ugcagcgccugcguuggcu

SEQ ID NO: 2680419 - RNA, 19 nt, Artificial Sequence
  Description of Artificial Sequence: Synthetic oligonucleotide
caucagccuauccaguugu

SEQ ID NO: 2680420 - RNA, 19 nt, Artificial Sequence
  Description of Artificial Sequence: Synthetic oligonucleotide
gccacugaguucauccacc

SEQ ID NO: 2680421 - RNA, 19 nt, Artificial Sequence
  Description of Artificial Sequence: Synthetic oligonucleotide
gcugagugcagcgccugcg

SEQ ID NO: 2680422 - RNA, 19 nt, Artificial Sequence
  Description of Artificial Sequence: Synthetic oligonucleotide
agcgccugcguuggcuaac

SEQ ID NO: 2680423 - RNA, 19 nt, Artificial Sequence
  Description of Artificial Sequence: Synthetic oligonucleotide
ccagagccaaggucugugg

SEQ ID NO: 2680424 - RNA, 19 nt, Artificial Sequence
  Description of Artificial Sequence: Synthetic oligonucleotide
gcaaugucauuucuuggcu

SEQ ID NO: 2680425 - RNA, 19 nt, Artificial Sequence
  Description of Artificial Sequence: Synthetic oligonucleotide
cgacaugauuuucuucagg

SEQ ID NO: 2680426 - RNA, 19 nt, Artificial Sequence
  Description of Artificial Sequence: Synthetic oligonucleotide
ucagggagucguggaacuc

SEQ ID NO: 2680427 - RNA, 19 nt, Artificial Sequence
  Description of Artificial Sequence: Synthetic oligonucleotide
aguuaggauggggcuuaug

SEQ ID NO: 2680428 - RNA, 19 nt, Artificial Sequence
  Description of Artificial Sequence: Synthetic oligonucleotide
gugcaguuaggauggggcu

SEQ ID NO: 2680429 - RNA, 19 nt, Artificial Sequence
  Description of Artificial Sequence: Synthetic oligonucleotide
uccccaccaucagaucucu

SEQ ID NO: 2680430 - RNA, 19 nt, Artificial Sequence
  Description of Artificial Sequence: Synthetic oligonucleotide
ccaccaucagaucucuguc

SEQ ID NO: 2680431 - RNA, 19 nt, Artificial Sequence
  Description of Artificial Sequence: Synthetic oligonucleotide
caugugcaguuaggauggg

SEQ ID NO: 2680432 - RNA, 19 nt, Artificial Sequence
  Description of Artificial Sequence: Synthetic oligonucleotide
ccuccagaucuuguaauug

SEQ ID NO: 2680433 - RNA, 19 nt, Artificial Sequence
  Description of Artificial Sequence: Synthetic oligonucleotide
uggggcuuauggagccaaa

SEQ ID NO: 2680434 - RNA, 19 nt, Artificial Sequence
  Description of Artificial Sequence: Synthetic oligonucleotide
cuauccaguuguucuucua

SEQ ID NO: 2680435 - RNA, 19 nt, Artificial Sequence
  Description of Artificial Sequence: Synthetic oligonucleotide
cugcuuuaauuugcucguc

SEQ ID NO: 2680436 - RNA, 19 nt, Artificial Sequence
  Description of Artificial Sequence: Synthetic oligonucleotide
cugccugaauagccagcug

SEQ ID NO: 2680437 - RNA, 19 nt, Artificial Sequence
  Description of Artificial Sequence: Synthetic oligonucleotide
ggaaggccucaucaucuuc

SEQ ID NO: 2680438 - RNA, 19 nt, Artificial Sequence
  Description of Artificial Sequence: Synthetic oligonucleotide
caaggaccuuaucuccaga

SEQ ID NO: 2680439 - RNA, 19 nt, Artificial Sequence
  Description of Artificial Sequence: Synthetic oligonucleotide
gaaguugaccugguuguuu

SEQ ID NO: 2680440 - RNA, 19 nt, Artificial Sequence
  Description of Artificial Sequence: Synthetic oligonucleotide
ccucaaacccugccagagc

SEQ ID NO: 2680441 - RNA, 19 nt, Artificial Sequence
  Description of Artificial Sequence: Synthetic oligonucleotide
gggcuuauggagccaaacu

SEQ ID NO: 2680442 - RNA, 19 nt, Artificial Sequence
  Description of Artificial Sequence: Synthetic oligonucleotide
gauggggcuuauggagcca

SEQ ID NO: 2680443 - RNA, 19 nt, Artificial Sequence
  Description of Artificial Sequence: Synthetic oligonucleotide
augucauuucuuggcuuuu

SEQ ID NO: 2680444 - RNA, 19 nt, Artificial Sequence
  Description of Artificial Sequence: Synthetic oligonucleotide
cucugucuuuccucuggaa

SEQ ID NO: 2680445 - RNA, 19 nt, Artificial Sequence
  Description of Artificial Sequence: Synthetic oligonucleotide
aguccgaaguugaccuggu

SEQ ID NO: 2680446 - RNA, 19 nt, Artificial Sequence
  Description of Artificial Sequence: Synthetic oligonucleotide
ggggcuuauggagccaaac

SEQ ID NO: 2680447 - RNA, 19 nt, Artificial Sequence
  Description of Artificial Sequence: Synthetic oligonucleotide
guucauccaccaaagucau

SEQ ID NO: 2680448 - RNA, 19 nt, Artificial Sequence
  Description of Artificial Sequence: Synthetic oligonucleotide
caaugucauuucuuggcuu

SEQ ID NO: 2680449 - RNA, 19 nt, Artificial Sequence
  Description of Artificial Sequence: Synthetic oligonucleotide
gccaaacugcugcaauguc

SEQ ID NO: 2680450 - RNA, 19 nt, Artificial Sequence
  Description of Artificial Sequence: Synthetic oligonucleotide
ccgaaguugaccugguugu

SEQ ID NO: 2680451 - RNA, 19 nt, Artificial Sequence
  Description of Artificial Sequence: Synthetic oligonucleotide
cucuccgagcuuccugaga

SEQ ID NO: 2680452 - RNA, 19 nt, Artificial Sequence
  Description of Artificial Sequence: Synthetic oligonucleotide
gcaaacaaucugaugacuu

SEQ ID NO: 2680453 - RNA, 19 nt, Artificial Sequence
  Description of Artificial Sequence: Synthetic oligonucleotide
gucguggaacucgcucagc

SEQ ID NO: 2680454 - RNA, 19 nt, Artificial Sequence
  Description of Artificial Sequence: Synthetic oligonucleotide
caccuucugcugcguguac

SEQ ID NO: 2680455 - RNA, 19 nt, Artificial Sequence
  Description of Artificial Sequence: Synthetic oligonucleotide
cugcuaaccuuaguccgaa

SEQ ID NO: 2680456 - RNA, 19 nt, Artificial Sequence
  Description of Artificial Sequence: Synthetic oligonucleotide
gccugaauagccagcugca

SEQ ID NO: 2680457 - RNA, 19 nt, Artificial Sequence
  Description of Artificial Sequence: Synthetic oligonucleotide
caccaugugcaguuaggau

SEQ ID NO: 2680458 - RNA, 19 nt, Artificial Sequence
  Description of Artificial Sequence: Synthetic oligonucleotide
cagcuuccccaccaucaga

SEQ ID NO: 2680459 - RNA, 19 nt, Artificial Sequence
  Description of Artificial Sequence: Synthetic oligonucleotide
ugcaugccacugaguucau

SEQ ID NO: 2680460 - RNA, 19 nt, Artificial Sequence
  Description of Artificial Sequence: Synthetic oligonucleotide
cccaccaucagaucucugu

SEQ ID NO: 2680461 - RNA, 19 nt, Artificial Sequence
  Description of Artificial Sequence: Synthetic oligonucleotide
cguuggcuaacaggaaggc

SEQ ID NO: 2680462 - RNA, 19 nt, Artificial Sequence
  Description of Artificial Sequence: Synthetic oligonucleotide
ggagccaaacugcugcaau

SEQ ID NO: 2680463 - RNA, 19 nt, Artificial Sequence
  Description of Artificial Sequence: Synthetic oligonucleotide
cacugaguucauccaccaa

SEQ ID NO: 2680464 - RNA, 19 nt, Artificial Sequence
  Description of Artificial Sequence: Synthetic oligonucleotide
ccacugaguucauccacca

SEQ ID NO: 2680465 - RNA, 19 nt, Artificial Sequence
  Description of Artificial Sequence: Synthetic oligonucleotide
cucuggaagccaucugaau

SEQ ID NO: 2680466 - RNA, 19 nt, Artificial Sequence
  Description of Artificial Sequence: Synthetic oligonucleotide
cugcguuggcuaacaggaa

SEQ ID NO: 2680467 - RNA, 19 nt, Artificial Sequence
  Description of Artificial Sequence: Synthetic oligonucleotide
ccucaggaugaaagcacca

SEQ ID NO: 2680468 - RNA, 19 nt, Artificial Sequence
  Description of Artificial Sequence: Synthetic oligonucleotide
gccuauccaguuguucuuc

SEQ ID NO: 2680469 - RNA, 19 nt, Artificial Sequence
  Description of Artificial Sequence: Synthetic oligonucleotide
gcaguuaggauggggcuua

SEQ ID NO: 2680470 - RNA, 19 nt, Artificial Sequence
  Description of Artificial Sequence: Synthetic oligonucleotide
ccgagcuuccugagagcag

SEQ ID NO: 2680471 - RNA, 19 nt, Artificial Sequence
  Description of Artificial Sequence: Synthetic oligonucleotide
gucaagcuccucucugcau

SEQ ID NO: 2680472 - RNA, 19 nt, Artificial Sequence
  Description of Artificial Sequence: Synthetic oligonucleotide
caucagugucaagcuccuc

SEQ ID NO: 2680473 - RNA, 19 nt, Artificial Sequence
  Description of Artificial Sequence: Synthetic oligonucleotide
ccaaaguuuccuucuuggu

SEQ ID NO: 2680474 - RNA, 19 nt, Artificial Sequence
  Description of Artificial Sequence: Synthetic oligonucleotide
ccucuggaagccaucugaa

SEQ ID NO: 2680475 - RNA, 19 nt, Artificial Sequence
  Description of Artificial Sequence: Synthetic oligonucleotide
guugaccugguuguuucuu

SEQ ID NO: 2680476 - RNA, 19 nt, Artificial Sequence
  Description of Artificial Sequence: Synthetic oligonucleotide
cagugucaagcuccucucu

SEQ ID NO: 2680477 - RNA, 19 nt, Artificial Sequence
  Description of Artificial Sequence: Synthetic oligonucleotide
cugcugcguguacaggucu

SEQ ID NO: 2680478 - RNA, 19 nt, Artificial Sequence
  Description of Artificial Sequence: Synthetic oligonucleotide
cuggcugagugcagcgccu

SEQ ID NO: 2680479 - RNA, 19 nt, Artificial Sequence
  Description of Artificial Sequence: Synthetic oligonucleotide
aucagccuauccaguuguu

SEQ ID NO: 2680480 - RNA, 19 nt, Artificial Sequence
  Description of Artificial Sequence: Synthetic oligonucleotide
cugcugcaaugucauuucu

SEQ ID NO: 2680481 - RNA, 19 nt, Artificial Sequence
  Description of Artificial Sequence: Synthetic oligonucleotide
caucucugcuaaccuuagu

SEQ ID NO: 2680482 - RNA, 19 nt, Artificial Sequence
  Description of Artificial Sequence: Synthetic oligonucleotide
ggaacucgcucagcugcuc

SEQ ID NO: 2680483 - RNA, 19 nt, Artificial Sequence
  Description of Artificial Sequence: Synthetic oligonucleotide
cauccaccaaagucauauu

SEQ ID NO: 2680484 - RNA, 19 nt, Artificial Sequence
  Description of Artificial Sequence: Synthetic oligonucleotide
gcucgucucugucuuuccu

SEQ ID NO: 2680485 - RNA, 19 nt, Artificial Sequence
  Description of Artificial Sequence: Synthetic oligonucleotide
cugcauuccuccagaucuu

SEQ ID NO: 2680486 - RNA, 19 nt, Artificial Sequence
  Description of Artificial Sequence: Synthetic oligonucleotide
gcagcgccugcguuggcua

SEQ ID NO: 2680487 - RNA, 19 nt, Artificial Sequence
  Description of Artificial Sequence: Synthetic oligonucleotide
ccuauccaguuguucuucu

SEQ ID NO: 2680488 - RNA, 19 nt, Artificial Sequence
  Description of Artificial Sequence: Synthetic oligonucleotide
gcuaacaggaaggccucau

SEQ ID NO: 2680489 - RNA, 19 nt, Artificial Sequence
  Description of Artificial Sequence: Synthetic oligonucleotide
gcuccaaaguuuccuucuu

SEQ ID NO: 2680490 - RNA, 19 nt, Artificial Sequence
  Description of Artificial Sequence: Synthetic oligonucleotide
cagcgccugcguuggcuaa

SEQ ID NO: 2680491 - RNA, 19 nt, Artificial Sequence
  Description of Artificial Sequence: Synthetic oligonucleotide
gugcagcgccugcguuggc

SEQ ID NO: 2680492 - RNA, 19 nt, Artificial Sequence
  Description of Artificial Sequence: Synthetic oligonucleotide
ccaaggucuguggagacuu

SEQ ID NO: 2680493 - RNA, 19 nt, Artificial Sequence
  Description of Artificial Sequence: Synthetic oligonucleotide
guccgaaguugaccugguu

SEQ ID NO: 2680494 - RNA, 19 nt, Artificial Sequence
  Description of Artificial Sequence: Synthetic oligonucleotide
gcugcguguacaggucucu

SEQ ID NO: 2680495 - RNA, 19 nt, Artificial Sequence
  Description of Artificial Sequence: Synthetic oligonucleotide
gcaugccacugaguucauc

SEQ ID NO: 2680496 - RNA, 19 nt, Artificial Sequence
  Description of Artificial Sequence: Synthetic oligonucleotide
cagcugcaugccacugagu

SEQ ID NO: 2680497 - RNA, 19 nt, Artificial Sequence
  Description of Artificial Sequence: Synthetic oligonucleotide
cgagcuuccugagagcagu

SEQ ID NO: 2680498 - RNA, 19 nt, Artificial Sequence
  Description of Artificial Sequence: Synthetic oligonucleotide
ggcugauagcugccugaau

SEQ ID NO: 2680499 - RNA, 19 nt, Artificial Sequence
  Description of Artificial Sequence: Synthetic oligonucleotide
gccaaggucuguggagacu

SEQ ID NO: 2680500 - RNA, 19 nt, Artificial Sequence
  Description of Artificial Sequence: Synthetic oligonucleotide
gccagagcaaggaccuuau

SEQ ID NO: 2680501 - RNA, 19 nt, Artificial Sequence
  Description of Artificial Sequence: Synthetic oligonucleotide
gcgccugcguuggcuaaca

SEQ ID NO: 2680502 - RNA, 19 nt, Artificial Sequence
  Description of Artificial Sequence: Synthetic oligonucleotide
ccaccuucugcugcgugua

SEQ ID NO: 2680503 - RNA, 19 nt, Artificial Sequence
  Description of Artificial Sequence: Synthetic oligonucleotide
cgcucagcugcuccaaagu

SEQ ID NO: 2680504 - RNA, 19 nt, Artificial Sequence
  Description of Artificial Sequence: Synthetic oligonucleotide
cugcguguacaggucucuu

SEQ ID NO: 2680505 - RNA, 19 nt, Artificial Sequence
  Description of Artificial Sequence: Synthetic oligonucleotide
ccaucagaucucuguccau

SEQ ID NO: 2680506 - RNA, 19 nt, Artificial Sequence
  Description of Artificial Sequence: Synthetic oligonucleotide
cgccugcguuggcuaacag

SEQ ID NO: 2680507 - RNA, 19 nt, Artificial Sequence
  Description of Artificial Sequence: Synthetic oligonucleotide
caguuaggauggggcuuau

SEQ ID NO: 2680508 - RNA, 19 nt, Artificial Sequence
  Description of Artificial Sequence: Synthetic oligonucleotide
cugccagagcaaggaccuu

SEQ ID NO: 2680509 - RNA, 19 nt, Artificial Sequence
  Description of Artificial Sequence: Synthetic oligonucleotide
cgaaguugaccugguuguu

SEQ ID NO: 2680510 - RNA, 19 nt, Artificial Sequence
  Description of Artificial Sequence: Synthetic oligonucleotide
aacagugacccuaugaacc

SEQ ID NO: 2680511 - RNA, 19 nt, Artificial Sequence
  Description of Artificial Sequence: Synthetic oligonucleotide
uguagcagcagacaaggcg

SEQ ID NO: 2680512 - RNA, 19 nt, Artificial Sequence
  Description of Artificial Sequence: Synthetic oligonucleotide
ucaucuaagaugaggagag

SEQ ID NO: 2680513 - RNA, 19 nt, Artificial Sequence
  Description of Artificial Sequence: Synthetic oligonucleotide
uauuccagguguuagaagc

SEQ ID NO: 2680514 - RNA, 19 nt, Artificial Sequence
  Description of Artificial Sequence: Synthetic oligonucleotide
ugaaauaggaacagugacc

SEQ ID NO: 2680515 - RNA, 19 nt, Artificial Sequence
  Description of Artificial Sequence: Synthetic oligonucleotide
ucuaagaugaggagaggcg

SEQ ID NO: 2680516 - RNA, 19 nt, Artificial Sequence
  Description of Artificial Sequence: Synthetic oligonucleotide
gaaauaggaacagugaccc

SEQ ID NO: 2680517 - RNA, 19 nt, Artificial Sequence
  Description of Artificial Sequence: Synthetic oligonucleotide
gaacaguucaucuaagaug

SEQ ID NO: 2680518 - RNA, 19 nt, Artificial Sequence
  Description of Artificial Sequence: Synthetic oligonucleotide
uugugaaauaggaacagug

SEQ ID NO: 2680519 - RNA, 19 nt, Artificial Sequence
  Description of Artificial Sequence: Synthetic oligonucleotide
uccauuucagaacaguuca

SEQ ID NO: 2680520 - RNA, 19 nt, Artificial Sequence
  Description of Artificial Sequence: Synthetic oligonucleotide
cacuuugugaaauaggaac

SEQ ID NO: 2680521 - RNA, 19 nt, Artificial Sequence
  Description of Artificial Sequence: Synthetic oligonucleotide
augaaucuaagcugcaggg

SEQ ID NO: 2680522 - RNA, 19 nt, Artificial Sequence
  Description of Artificial Sequence: Synthetic oligonucleotide
gauuguuggagcaaggccc

SEQ ID NO: 2680523 - RNA, 19 nt, Artificial Sequence
  Description of Artificial Sequence: Synthetic oligonucleotide
ucuguagcagcagacaagg

SEQ ID NO: 2680524 - RNA, 19 nt, Artificial Sequence
  Description of Artificial Sequence: Synthetic oligonucleotide
gacauaacaggacaucgcc

SEQ ID NO: 2680525 - RNA, 19 nt, Artificial Sequence
  Description of Artificial Sequence: Synthetic oligonucleotide
aacucucucacuuugugaa

SEQ ID NO: 2680526 - RNA, 19 nt, Artificial Sequence
  Description of Artificial Sequence: Synthetic oligonucleotide
aucuaagaugaggagaggc

SEQ ID NO: 2680527 - RNA, 19 nt, Artificial Sequence
  Description of Artificial Sequence: Synthetic oligonucleotide
caugaaucuaagcugcagg

SEQ ID NO: 2680528 - RNA, 19 nt, Artificial Sequence
  Description of Artificial Sequence: Synthetic oligonucleotide
acagugacccuaugaaccc

SEQ ID NO: 2680529 - RNA, 19 nt, Artificial Sequence
  Description of Artificial Sequence: Synthetic oligonucleotide
uccugagugugacuggucg

SEQ ID NO: 2680530 - RNA, 19 nt, Artificial Sequence
  Description of Artificial Sequence: Synthetic oligonucleotide
gagugcuuccgauuguugg

SEQ ID NO: 2680531 - RNA, 19 nt, Artificial Sequence
  Description of Artificial Sequence: Synthetic oligonucleotide
aguggguacugacagauga

SEQ ID NO: 2680532 - RNA, 19 nt, Artificial Sequence
  Description of Artificial Sequence: Synthetic oligonucleotide
gaaucuaagcugcaggguc

SEQ ID NO: 2680533 - RNA, 19 nt, Artificial Sequence
  Description of Artificial Sequence: Synthetic oligonucleotide
guuagaagccccuccacag

SEQ ID NO: 2680534 - RNA, 19 nt, Artificial Sequence
  Description of Artificial Sequence: Synthetic oligonucleotide
cagagagggacauaacagg

SEQ ID NO: 2680535 - RNA, 19 nt, Artificial Sequence
  Description of Artificial Sequence: Synthetic oligonucleotide
gugaaauaggaacagugac

SEQ ID NO: 2680536 - RNA, 19 nt, Artificial Sequence
  Description of Artificial Sequence: Synthetic oligonucleotide
uucaucuaagaugaggaga

SEQ ID NO: 2680537 - RNA, 19 nt, Artificial Sequence
  Description of Artificial Sequence: Synthetic oligonucleotide
ugacagaugagagaugucu

SEQ ID NO: 2680538 - RNA, 19 nt, Artificial Sequence
  Description of Artificial Sequence: Synthetic oligonucleotide
aucgccuccauuucagaac

SEQ ID NO: 2680539 - RNA, 19 nt, Artificial Sequence
  Description of Artificial Sequence: Synthetic oligonucleotide
gacugagcagcccaguaag

SEQ ID NO: 2680540 - RNA, 19 nt, Artificial Sequence
  Description of Artificial Sequence: Synthetic oligonucleotide
aauaggaacagugacccua

SEQ ID NO: 2680541 - RNA, 19 nt, Artificial Sequence
  Description of Artificial Sequence: Synthetic oligonucleotide
cauaacaggacaucgccuc

SEQ ID NO: 2680542 - RNA, 19 nt, Artificial Sequence
  Description of Artificial Sequence: Synthetic oligonucleotide
agccaugaaucuaagcugc

SEQ ID NO: 2680543 - RNA, 19 nt, Artificial Sequence
  Description of Artificial Sequence: Synthetic oligonucleotide
aguucaucuaagaugagga

SEQ ID NO: 2680544 - RNA, 19 nt, Artificial Sequence
  Description of Artificial Sequence: Synthetic oligonucleotide
acaauucucuccuggccac

SEQ ID NO: 2680545 - RNA, 19 nt, Artificial Sequence
  Description of Artificial Sequence: Synthetic oligonucleotide
gaagacaaggcauccugug

SEQ ID NO: 2680546 - RNA, 19 nt, Artificial Sequence
  Description of Artificial Sequence: Synthetic oligonucleotide
agguguuagaagccccucc

SEQ ID NO: 2680547 - RNA, 19 nt, Artificial Sequence
  Description of Artificial Sequence: Synthetic oligonucleotide
cauccugugguugugacag

SEQ ID NO: 2680548 - RNA, 19 nt, Artificial Sequence
  Description of Artificial Sequence: Synthetic oligonucleotide
agagggacauaacaggaca

SEQ ID NO: 2680549 - RNA, 19 nt, Artificial Sequence
  Description of Artificial Sequence: Synthetic oligonucleotide
gacccuaugaacccuacga

SEQ ID NO: 2680550 - RNA, 19 nt, Artificial Sequence
  Description of Artificial Sequence: Synthetic oligonucleotide
ugcuguaaauggcagugga

SEQ ID NO: 2680551 - RNA, 19 nt, Artificial Sequence
  Description of Artificial Sequence: Synthetic oligonucleotide
uuuauuccagguguuagaa

SEQ ID NO: 2680552 - RNA, 19 nt, Artificial Sequence
  Description of Artificial Sequence: Synthetic oligonucleotide
caguaaggugcgaugaagc

SEQ ID NO: 2680553 - RNA, 19 nt, Artificial Sequence
  Description of Artificial Sequence: Synthetic oligonucleotide
ucagaacaguucaucuaag

SEQ ID NO: 2680554 - RNA, 19 nt, Artificial Sequence
  Description of Artificial Sequence: Synthetic oligonucleotide
acugacagaugagagaugu

SEQ ID NO: 2680555 - RNA, 19 nt, Artificial Sequence
  Description of Artificial Sequence: Synthetic oligonucleotide
uccccaucagcccacgugc

SEQ ID NO: 2680556 - RNA, 19 nt, Artificial Sequence
  Description of Artificial Sequence: Synthetic oligonucleotide
aauggcaguggaucagacu

SEQ ID NO: 2680557 - RNA, 19 nt, Artificial Sequence
  Description of Artificial Sequence: Synthetic oligonucleotide
ugggcuaccccaaccaccc

SEQ ID NO: 2680558 - RNA, 19 nt, Artificial Sequence
  Description of Artificial Sequence: Synthetic oligonucleotide
guagcagcagacaaggcgc

SEQ ID NO: 2680559 - RNA, 19 nt, Artificial Sequence
  Description of Artificial Sequence: Synthetic oligonucleotide
aguaaggugcgaugaagca

SEQ ID NO: 2680560 - RNA, 19 nt, Artificial Sequence
  Description of Artificial Sequence: Synthetic oligonucleotide
uaugaacccuacgaggacc

SEQ ID NO: 2680561 - RNA, 19 nt, Artificial Sequence
  Description of Artificial Sequence: Synthetic oligonucleotide
auuguuggagcaaggcccc

SEQ ID NO: 2680562 - RNA, 19 nt, Artificial Sequence
  Description of Artificial Sequence: Synthetic oligonucleotide
uacccuuuccccaccacgc

SEQ ID NO: 2680563 - RNA, 19 nt, Artificial Sequence
  Description of Artificial Sequence: Synthetic oligonucleotide
ugcucaggugaagacaagg

SEQ ID NO: 2680564 - RNA, 19 nt, Artificial Sequence
  Description of Artificial Sequence: Synthetic oligonucleotide
cuuugugaaauaggaacag

SEQ ID NO: 2680565 - RNA, 19 nt, Artificial Sequence
  Description of Artificial Sequence: Synthetic oligonucleotide
aacccuacgaggaccuccc

SEQ ID NO: 2680566 - RNA, 19 nt, Artificial Sequence
  Description of Artificial Sequence: Synthetic oligonucleotide
ugugguugugacagccagg

SEQ ID NO: 2680567 - RNA, 19 nt, Artificial Sequence
  Description of Artificial Sequence: Synthetic oligonucleotide
acagaugagagaugucucu

SEQ ID NO: 2680568 - RNA, 19 nt, Artificial Sequence
  Description of Artificial Sequence: Synthetic oligonucleotide
agacccacaauucucuccu

SEQ ID NO: 2680569 - RNA, 19 nt, Artificial Sequence
  Description of Artificial Sequence: Synthetic oligonucleotide
ucaucagagcugcucaggu

SEQ ID NO: 2680570 - RNA, 19 nt, Artificial Sequence
  Description of Artificial Sequence: Synthetic oligonucleotide
gaacagugacccuaugaac

SEQ ID NO: 2680571 - RNA, 19 nt, Artificial Sequence
  Description of Artificial Sequence: Synthetic oligonucleotide
cuccuggccacagagaggg

SEQ ID NO: 2680572 - RNA, 19 nt, Artificial Sequence
  Description of Artificial Sequence: Synthetic oligonucleotide
uuagaagccccuccacagc

SEQ ID NO: 2680573 - RNA, 19 nt, Artificial Sequence
  Description of Artificial Sequence: Synthetic oligonucleotide
uggguagguacccuuuccc

SEQ ID NO: 2680574 - RNA, 19 nt, Artificial Sequence
  Description of Artificial Sequence: Synthetic oligonucleotide
guucaucuaagaugaggag

SEQ ID NO: 2680575 - RNA, 19 nt, Artificial Sequence
  Description of Artificial Sequence: Synthetic oligonucleotide
uuucagaacaguucaucua

SEQ ID NO: 2680576 - RNA, 19 nt, Artificial Sequence
  Description of Artificial Sequence: Synthetic oligonucleotide
guugugacagccaggacug

SEQ ID NO: 2680577 - RNA, 19 nt, Artificial Sequence
  Description of Artificial Sequence: Synthetic oligonucleotide
cucuccuggccacagagag

SEQ ID NO: 2680578 - RNA, 19 nt, Artificial Sequence
  Description of Artificial Sequence: Synthetic oligonucleotide
cuccauuucagaacaguuc

SEQ ID NO: 2680579 - RNA, 19 nt, Artificial Sequence
  Description of Artificial Sequence: Synthetic oligonucleotide
acuuugugaaauaggaaca

SEQ ID NO: 2680580 - RNA, 19 nt, Artificial Sequence
  Description of Artificial Sequence: Synthetic oligonucleotide
ucacuuugugaaauaggaa

SEQ ID NO: 2680581 - RNA, 19 nt, Artificial Sequence
  Description of Artificial Sequence: Synthetic oligonucleotide
caguucaucuaagaugagg

SEQ ID NO: 2680582 - RNA, 19 nt, Artificial Sequence
  Description of Artificial Sequence: Synthetic oligonucleotide
ucgccuccauuucagaaca

SEQ ID NO: 2680583 - RNA, 19 nt, Artificial Sequence
  Description of Artificial Sequence: Synthetic oligonucleotide
agagaugucucuauaggca

SEQ ID NO: 2680584 - RNA, 19 nt, Artificial Sequence
  Description of Artificial Sequence: Synthetic oligonucleotide
cagccaugaaucuaagcug

SEQ ID NO: 2680585 - RNA, 19 nt, Artificial Sequence
  Description of Artificial Sequence: Synthetic oligonucleotide
uagaagccccuccacagcu

SEQ ID NO: 2680586 - RNA, 19 nt, Artificial Sequence
  Description of Artificial Sequence: Synthetic oligonucleotide
acccuaugaacccuacgag

SEQ ID NO: 2680587 - RNA, 19 nt, Artificial Sequence
  Description of Artificial Sequence: Synthetic oligonucleotide
aggaacagugacccuauga

SEQ ID NO: 2680588 - RNA, 19 nt, Artificial Sequence
  Description of Artificial Sequence: Synthetic oligonucleotide
guacccuuuccccaccacg

SEQ ID NO: 2680589 - RNA, 19 nt, Artificial Sequence
  Description of Artificial Sequence: Synthetic oligonucleotide
uccgauuguuggagcaagg

SEQ ID NO: 2680590 - RNA, 19 nt, Artificial Sequence
  Description of Artificial Sequence: Synthetic oligonucleotide
agugcuuccgauuguugga

SEQ ID NO: 2680591 - RNA, 19 nt, Artificial Sequence
  Description of Artificial Sequence: Synthetic oligonucleotide
ugacccuaugaacccuacg

SEQ ID NO: 2680592 - RNA, 19 nt, Artificial Sequence
  Description of Artificial Sequence: Synthetic oligonucleotide
guaaggugcgaugaagcag

SEQ ID NO: 2680593 - RNA, 19 nt, Artificial Sequence
  Description of Artificial Sequence: Synthetic oligonucleotide
cuagcugcuguaaauggca

SEQ ID NO: 2680594 - RNA, 19 nt, Artificial Sequence
  Description of Artificial Sequence: Synthetic oligonucleotide
aaucuaagcugcagggucu

SEQ ID NO: 2680595 - RNA, 19 nt, Artificial Sequence
  Description of Artificial Sequence: Synthetic oligonucleotide
ucccacugggccaucaacu

SEQ ID NO: 2680596 - RNA, 19 nt, Artificial Sequence
  Description of Artificial Sequence: Synthetic oligonucleotide
agcaacagcaccccaggga

SEQ ID NO: 2680597 - RNA, 19 nt, Artificial Sequence
  Description of Artificial Sequence: Synthetic oligonucleotide
uuugugaaauaggaacagu

SEQ ID NO: 2680598 - RNA, 19 nt, Artificial Sequence
  Description of Artificial Sequence: Synthetic oligonucleotide
aggacaucgccuccauuuc

SEQ ID NO: 2680599 - RNA, 19 nt, Artificial Sequence
  Description of Artificial Sequence: Synthetic oligonucleotide
aggugaagacaaggcaucc

SEQ ID NO: 2680600 - RNA, 19 nt, Artificial Sequence
  Description of Artificial Sequence: Synthetic oligonucleotide
uuccccaccacgcuuccca

SEQ ID NO: 2680601 - RNA, 19 nt, Artificial Sequence
  Description of Artificial Sequence: Synthetic oligonucleotide
agggucucagccuggaacu

SEQ ID NO: 2680602 - RNA, 19 nt, Artificial Sequence
  Description of Artificial Sequence: Synthetic oligonucleotide
caucaacucucucacuuug

SEQ ID NO: 2680603 - RNA, 19 nt, Artificial Sequence
  Description of Artificial Sequence: Synthetic oligonucleotide
aaauaggaacagugacccu

SEQ ID NO: 2680604 - RNA, 19 nt, Artificial Sequence
  Description of Artificial Sequence: Synthetic oligonucleotide
uccagguguuagaagcccc

SEQ ID NO: 2680605 - RNA, 19 nt, Artificial Sequence
  Description of Artificial Sequence: Synthetic oligonucleotide
aggagaggcgagugcuucc

SEQ ID NO: 2680606 - RNA, 19 nt, Artificial Sequence
  Description of Artificial Sequence: Synthetic oligonucleotide
uaaauggcaguggaucaga

SEQ ID NO: 2680607 - RNA, 19 nt, Artificial Sequence
  Description of Artificial Sequence: Synthetic oligonucleotide
gcaacagcaccccagggag

SEQ ID NO: 2680608 - RNA, 19 nt, Artificial Sequence
  Description of Artificial Sequence: Synthetic oligonucleotide
cauuucagaacaguucauc

SEQ ID NO: 2680609 - RNA, 19 nt, Artificial Sequence
  Description of Artificial Sequence: Synthetic oligonucleotide
uagcugcuguaaauggcag

SEQ ID NO: 2680610 - RNA, 19 nt, Artificial Sequence
  Description of Artificial Sequence: Synthetic oligonucleotide
aaccaccccuuccuuaacu

SEQ ID NO: 2680611 - RNA, 19 nt, Artificial Sequence
  Description of Artificial Sequence: Synthetic oligonucleotide
cacagagagggacauaaca

SEQ ID NO: 2680612 - RNA, 19 nt, Artificial Sequence
  Description of Artificial Sequence: Synthetic oligonucleotide
ucagcccacgugcagacau

SEQ ID NO: 2680613 - RNA, 19 nt, Artificial Sequence
  Description of Artificial Sequence: Synthetic oligonucleotide
guaaauggcaguggaucag

SEQ ID NO: 2680614 - RNA, 19 nt, Artificial Sequence
  Description of Artificial Sequence: Synthetic oligonucleotide
gggacauaacaggacaucg

SEQ ID NO: 2680615 - RNA, 19 nt, Artificial Sequence
  Description of Artificial Sequence: Synthetic oligonucleotide
ugaugcaguggguacugac

SEQ ID NO: 2680616 - RNA, 19 nt, Artificial Sequence
  Description of Artificial Sequence: Synthetic oligonucleotide
ugaaucuaagcugcagggu

SEQ ID NO: 2680617 - RNA, 19 nt, Artificial Sequence
  Description of Artificial Sequence: Synthetic oligonucleotide
cgugcagacaucaucagag

SEQ ID NO: 2680618 - RNA, 19 nt, Artificial Sequence
  Description of Artificial Sequence: Synthetic oligonucleotide
gagugugacuggucggucc

SEQ ID NO: 2680619 - RNA, 19 nt, Artificial Sequence
  Description of Artificial Sequence: Synthetic oligonucleotide
gaucagacuucuggguagg

SEQ ID NO: 2680620 - RNA, 19 nt, Artificial Sequence
  Description of Artificial Sequence: Synthetic oligonucleotide
uggguacugacagaugaga

SEQ ID NO: 2680621 - RNA, 19 nt, Artificial Sequence
  Description of Artificial Sequence: Synthetic oligonucleotide
ugcauggggcaucuugcug

SEQ ID NO: 2680622 - RNA, 19 nt, Artificial Sequence
  Description of Artificial Sequence: Synthetic oligonucleotide
gacaucgccuccauuucag

SEQ ID NO: 2680623 - RNA, 19 nt, Artificial Sequence
  Description of Artificial Sequence: Synthetic oligonucleotide
agggacauaacaggacauc

SEQ ID NO: 2680624 - RNA, 19 nt, Artificial Sequence
  Description of Artificial Sequence: Synthetic oligonucleotide
uuccgauuguuggagcaag

SEQ ID NO: 2680625 - RNA, 19 nt, Artificial Sequence
  Description of Artificial Sequence: Synthetic oligonucleotide
agagagggacauaacagga

SEQ ID NO: 2680626 - RNA, 19 nt, Artificial Sequence
  Description of Artificial Sequence: Synthetic oligonucleotide
aggcgagugcuuccgauug

SEQ ID NO: 2680627 - RNA, 19 nt, Artificial Sequence
  Description of Artificial Sequence: Synthetic oligonucleotide
caggugaagacaaggcauc

SEQ ID NO: 2680628 - RNA, 19 nt, Artificial Sequence
  Description of Artificial Sequence: Synthetic oligonucleotide
ggaucagacuucuggguag

SEQ ID NO: 2680629 - RNA, 19 nt, Artificial Sequence
  Description of Artificial Sequence: Synthetic oligonucleotide
gucucuauaggcacacccc

SEQ ID NO: 2680630 - RNA, 19 nt, Artificial Sequence
  Description of Artificial Sequence: Synthetic oligonucleotide
gaugcaguggguacugaca

SEQ ID NO: 2680631 - RNA, 19 nt, Artificial Sequence
  Description of Artificial Sequence: Synthetic oligonucleotide
cuaagaugaggagaggcga

SEQ ID NO: 2680632 - RNA, 19 nt, Artificial Sequence
  Description of Artificial Sequence: Synthetic oligonucleotide
cucaggugaagacaaggca

SEQ ID NO: 2680633 - RNA, 19 nt, Artificial Sequence
  Description of Artificial Sequence: Synthetic oligonucleotide
uggguagauccugagugug

SEQ ID NO: 2680634 - RNA, 19 nt, Artificial Sequence
  Description of Artificial Sequence: Synthetic oligonucleotide
gaacccuacgaggaccucc

SEQ ID NO: 2680635 - RNA, 19 nt, Artificial Sequence
  Description of Artificial Sequence: Synthetic oligonucleotide
uuccagguguuagaagccc

SEQ ID NO: 2680636 - RNA, 19 nt, Artificial Sequence
  Description of Artificial Sequence: Synthetic oligonucleotide
uggucgguccucuguagca

SEQ ID NO: 2680637 - RNA, 19 nt, Artificial Sequence
  Description of Artificial Sequence: Synthetic oligonucleotide
agggagacccacaauucuc

SEQ ID NO: 2680638 - RNA, 19 nt, Artificial Sequence
  Description of Artificial Sequence: Synthetic oligonucleotide
ccuuccuuaacugaacccc

SEQ ID NO: 2680639 - RNA, 19 nt, Artificial Sequence
  Description of Artificial Sequence: Synthetic oligonucleotide
cccuaugaacccuacgagg

SEQ ID NO: 2680640 - RNA, 19 nt, Artificial Sequence
  Description of Artificial Sequence: Synthetic oligonucleotide
gguacugacagaugagaga

SEQ ID NO: 2680641 - RNA, 19 nt, Artificial Sequence
  Description of Artificial Sequence: Synthetic oligonucleotide
gacagaugagagaugucuc

SEQ ID NO: 2680642 - RNA, 19 nt, Artificial Sequence
  Description of Artificial Sequence: Synthetic oligonucleotide
ucuggguagguacccuuuc

SEQ ID NO: 2680643 - RNA, 19 nt, Artificial Sequence
  Description of Artificial Sequence: Synthetic oligonucleotide
cacugggccaucaacucuc

SEQ ID NO: 2680644 - RNA, 19 nt, Artificial Sequence
  Description of Artificial Sequence: Synthetic oligonucleotide
uugcugaugcaguggguac

SEQ ID NO: 2680645 - RNA, 19 nt, Artificial Sequence
  Description of Artificial Sequence: Synthetic oligonucleotide
accaccccuuccuuaacug

SEQ ID NO: 2680646 - RNA, 19 nt, Artificial Sequence
  Description of Artificial Sequence: Synthetic oligonucleotide
ugacuggucgguccucugu

SEQ ID NO: 2680647 - RNA, 19 nt, Artificial Sequence
  Description of Artificial Sequence: Synthetic oligonucleotide
caucuugcugaugcagugg

SEQ ID NO: 2680648 - RNA, 19 nt, Artificial Sequence
  Description of Artificial Sequence: Synthetic oligonucleotide
uaccccaaccaccccuucc

SEQ ID NO: 2680649 - RNA, 19 nt, Artificial Sequence
  Description of Artificial Sequence: Synthetic oligonucleotide
uacgaggaccucccguugu

SEQ ID NO: 2680650 - RNA, 19 nt, Artificial Sequence
  Description of Artificial Sequence: Synthetic oligonucleotide
cccguuguccccaucagcc

SEQ ID NO: 2680651 - RNA, 19 nt, Artificial Sequence
  Description of Artificial Sequence: Synthetic oligonucleotide
gguugugacagccaggacu

SEQ ID NO: 2680652 - RNA, 19 nt, Artificial Sequence
  Description of Artificial Sequence: Synthetic oligonucleotide
cuggguagguacccuuucc

SEQ ID NO: 2680653 - RNA, 19 nt, Artificial Sequence
  Description of Artificial Sequence: Synthetic oligonucleotide
ucccguuguccccaucagc

SEQ ID NO: 2680654 - RNA, 19 nt, Artificial Sequence
  Description of Artificial Sequence: Synthetic oligonucleotide
gagagggacauaacaggac

SEQ ID NO: 2680655 - RNA, 19 nt, Artificial Sequence
  Description of Artificial Sequence: Synthetic oligonucleotide
cagaacaguucaucuaaga

SEQ ID NO: 2680656 - RNA, 19 nt, Artificial Sequence
  Description of Artificial Sequence: Synthetic oligonucleotide
acuggucgguccucuguag

SEQ ID NO: 2680657 - RNA, 19 nt, Artificial Sequence
  Description of Artificial Sequence: Synthetic oligonucleotide
agagcugcucaggugaaga

SEQ ID NO: 2680658 - RNA, 19 nt, Artificial Sequence
  Description of Artificial Sequence: Synthetic oligonucleotide
uccucuguagcagcagaca

SEQ ID NO: 2680659 - RNA, 19 nt, Artificial Sequence
  Description of Artificial Sequence: Synthetic oligonucleotide
gcugcuguaaauggcagug

SEQ ID NO: 2680660 - RNA, 19 nt, Artificial Sequence
  Description of Artificial Sequence: Synthetic oligonucleotide
accccaaccaccccuuccu

SEQ ID NO: 2680661 - RNA, 19 nt, Artificial Sequence
  Description of Artificial Sequence: Synthetic oligonucleotide
aacaggacaucgccuccau

SEQ ID NO: 2680662 - RNA, 19 nt, Artificial Sequence
  Description of Artificial Sequence: Synthetic oligonucleotide
gugguugugacagccagga

SEQ ID NO: 2680663 - RNA, 19 nt, Artificial Sequence
  Description of Artificial Sequence: Synthetic oligonucleotide
ucucuccuggccacagaga

SEQ ID NO: 2680664 - RNA, 19 nt, Artificial Sequence
  Description of Artificial Sequence: Synthetic oligonucleotide
acgaggaccucccguuguc

SEQ ID NO: 2680665 - RNA, 19 nt, Artificial Sequence
  Description of Artificial Sequence: Synthetic oligonucleotide
acgugcagacaucaucaga

SEQ ID NO: 2680666 - RNA, 19 nt, Artificial Sequence
  Description of Artificial Sequence: Synthetic oligonucleotide
uaacaggacaucgccucca

SEQ ID NO: 2680667 - RNA, 19 nt, Artificial Sequence
  Description of Artificial Sequence: Synthetic oligonucleotide
guacugacagaugagagau

SEQ ID NO: 2680668 - RNA, 19 nt, Artificial Sequence
  Description of Artificial Sequence: Synthetic oligonucleotide
acauaacaggacaucgccu

SEQ ID NO: 2680669 - RNA, 19 nt, Artificial Sequence
  Description of Artificial Sequence: Synthetic oligonucleotide
ugcuuccgauuguuggagc

SEQ ID NO: 2680670 - RNA, 19 nt, Artificial Sequence
  Description of Artificial Sequence: Synthetic oligonucleotide
guccccaucagcccacgug

SEQ ID NO: 2680671 - RNA, 19 nt, Artificial Sequence
  Description of Artificial Sequence: Synthetic oligonucleotide
agcccaguaaggugcgaug

SEQ ID NO: 2680672 - RNA, 19 nt, Artificial Sequence
  Description of Artificial Sequence: Synthetic oligonucleotide
gguguuagaagccccucca

SEQ ID NO: 2680673 - RNA, 19 nt, Artificial Sequence
  Description of Artificial Sequence: Synthetic oligonucleotide
caucagcccacgugcagac

SEQ ID NO: 2680674 - RNA, 19 nt, Artificial Sequence
  Description of Artificial Sequence: Synthetic oligonucleotide
aucuaagcugcagggucuc

SEQ ID NO: 2680675 - RNA, 19 nt, Artificial Sequence
  Description of Artificial Sequence: Synthetic oligonucleotide
caucuaagaugaggagagg

SEQ ID NO: 2680676 - RNA, 19 nt, Artificial Sequence
  Description of Artificial Sequence: Synthetic oligonucleotide
gguagguacccuuucccca

SEQ ID NO: 2680677 - RNA, 19 nt, Artificial Sequence
  Description of Artificial Sequence: Synthetic oligonucleotide
cuggucgguccucuguagc

SEQ ID NO: 2680678 - RNA, 19 nt, Artificial Sequence
  Description of Artificial Sequence: Synthetic oligonucleotide
acagcuggggaggggacag

SEQ ID NO: 2680679 - RNA, 19 nt, Artificial Sequence
  Description of Artificial Sequence: Synthetic oligonucleotide
uguuggagcaaggccccug

SEQ ID NO: 2680680 - RNA, 19 nt, Artificial Sequence
  Description of Artificial Sequence: Synthetic oligonucleotide
uagcagcagacaaggcgcu

SEQ ID NO: 2680681 - RNA, 19 nt, Artificial Sequence
  Description of Artificial Sequence: Synthetic oligonucleotide
uucuggguagguacccuuu

SEQ ID NO: 2680682 - RNA, 19 nt, Artificial Sequence
  Description of Artificial Sequence: Synthetic oligonucleotide
cacgugcagacaucaucag

SEQ ID NO: 2680683 - RNA, 19 nt, Artificial Sequence
  Description of Artificial Sequence: Synthetic oligonucleotide
ggguagguacccuuucccc

SEQ ID NO: 2680684 - RNA, 19 nt, Artificial Sequence
  Description of Artificial Sequence: Synthetic oligonucleotide
ggacauaacaggacaucgc

SEQ ID NO: 2680685 - RNA, 19 nt, Artificial Sequence
  Description of Artificial Sequence: Synthetic oligonucleotide
gugacagccaggacugagc

SEQ ID NO: 2680686 - RNA, 19 nt, Artificial Sequence
  Description of Artificial Sequence: Synthetic oligonucleotide
cugcuguaaauggcagugg

SEQ ID NO: 2680687 - RNA, 19 nt, Artificial Sequence
  Description of Artificial Sequence: Synthetic oligonucleotide
gagcugcucaggugaagac

SEQ ID NO: 2680688 - RNA, 19 nt, Artificial Sequence
  Description of Artificial Sequence: Synthetic oligonucleotide
cagugucugugucacugug

SEQ ID NO: 2680689 - RNA, 19 nt, Artificial Sequence
  Description of Artificial Sequence: Synthetic oligonucleotide
ugugacuggucgguccucu

SEQ ID NO: 2680690 - RNA, 19 nt, Artificial Sequence
  Description of Artificial Sequence: Synthetic oligonucleotide
gugcuuccgauuguuggag

SEQ ID NO: 2680691 - RNA, 19 nt, Artificial Sequence
  Description of Artificial Sequence: Synthetic oligonucleotide
augucucuauaggcacacc

SEQ ID NO: 2680692 - RNA, 19 nt, Artificial Sequence
  Description of Artificial Sequence: Synthetic oligonucleotide
uggcaguggaucagacuuc

SEQ ID NO: 2680693 - RNA, 19 nt, Artificial Sequence
  Description of Artificial Sequence: Synthetic oligonucleotide
agcugcucaggugaagaca

SEQ ID NO: 2680694 - RNA, 19 nt, Artificial Sequence
  Description of Artificial Sequence: Synthetic oligonucleotide
uggccagugucugugucac

SEQ ID NO: 2680695 - RNA, 19 nt, Artificial Sequence
  Description of Artificial Sequence: Synthetic oligonucleotide
ggguacugacagaugagag

SEQ ID NO: 2680696 - RNA, 19 nt, Artificial Sequence
  Description of Artificial Sequence: Synthetic oligonucleotide
ucagacuucuggguaggua

SEQ ID NO: 2680697 - RNA, 19 nt, Artificial Sequence
  Description of Artificial Sequence: Synthetic oligonucleotide
uaggaacagugacccuaug

SEQ ID NO: 2680698 - RNA, 19 nt, Artificial Sequence
  Description of Artificial Sequence: Synthetic oligonucleotide
uuggagcaaggccccuggc

SEQ ID NO: 2680699 - RNA, 19 nt, Artificial Sequence
  Description of Artificial Sequence: Synthetic oligonucleotide
agaggcgagugcuuccgau

SEQ ID NO: 2680700 - RNA, 19 nt, Artificial Sequence
  Description of Artificial Sequence: Synthetic oligonucleotide
cuguagcagcagacaaggc

SEQ ID NO: 2680701 - RNA, 19 nt, Artificial Sequence
  Description of Artificial Sequence: Synthetic oligonucleotide
cgauuguuggagcaaggcc

SEQ ID NO: 2680702 - RNA, 19 nt, Artificial Sequence
  Description of Artificial Sequence: Synthetic oligonucleotide
gggccaucaacucucucac

SEQ ID NO: 2680703 - RNA, 19 nt, Artificial Sequence
  Description of Artificial Sequence: Synthetic oligonucleotide
ccacaauucucuccuggcc

SEQ ID NO: 2680704 - RNA, 19 nt, Artificial Sequence
  Description of Artificial Sequence: Synthetic oligonucleotide
acaaggcgcuagcugcugu

SEQ ID NO: 2680705 - RNA, 19 nt, Artificial Sequence
  Description of Artificial Sequence: Synthetic oligonucleotide
augaacccuacgaggaccu

SEQ ID NO: 2680706 - RNA, 19 nt, Artificial Sequence
  Description of Artificial Sequence: Synthetic oligonucleotide
auaggaacagugacccuau

SEQ ID NO: 2680707 - RNA, 19 nt, Artificial Sequence
  Description of Artificial Sequence: Synthetic oligonucleotide
gaggagaggcgagugcuuc

SEQ ID NO: 2680708 - RNA, 19 nt, Artificial Sequence
  Description of Artificial Sequence: Synthetic oligonucleotide
cccacaauucucuccuggc

SEQ ID NO: 2680709 - RNA, 19 nt, Artificial Sequence
  Description of Artificial Sequence: Synthetic oligonucleotide
gcuagcugcuguaaauggc

SEQ ID NO: 2680710 - RNA, 19 nt, Artificial Sequence
  Description of Artificial Sequence: Synthetic oligonucleotide
cugacagaugagagauguc

SEQ ID NO: 2680711 - RNA, 19 nt, Artificial Sequence
  Description of Artificial Sequence: Synthetic oligonucleotide
acaucgccuccauuucaga

SEQ ID NO: 2680712 - RNA, 19 nt, Artificial Sequence
  Description of Artificial Sequence: Synthetic oligonucleotide
cuacgaggaccucccguug

SEQ ID NO: 2680713 - RNA, 19 nt, Artificial Sequence
  Description of Artificial Sequence: Synthetic oligonucleotide
agaugucucuauaggcaca

SEQ ID NO: 2680714 - RNA, 19 nt, Artificial Sequence
  Description of Artificial Sequence: Synthetic oligonucleotide
cagcagacaaggcgcuagc

SEQ ID NO: 2680715 - RNA, 19 nt, Artificial Sequence
  Description of Artificial Sequence: Synthetic oligonucleotide
caucgccuccauuucagaa

SEQ ID NO: 2680716 - RNA, 19 nt, Artificial Sequence
  Description of Artificial Sequence: Synthetic oligonucleotide
ggagaggcgagugcuuccg

SEQ ID NO: 2680717 - RNA, 19 nt, Artificial Sequence
  Description of Artificial Sequence: Synthetic oligonucleotide
ccugagugugacuggucgg

SEQ ID NO: 2680718 - RNA, 19 nt, Artificial Sequence
  Description of Artificial Sequence: Synthetic oligonucleotide
ccacgugcagacaucauca

SEQ ID NO: 2680719 - RNA, 19 nt, Artificial Sequence
  Description of Artificial Sequence: Synthetic oligonucleotide
aggacugagcagcccagua

SEQ ID NO: 2680720 - RNA, 19 nt, Artificial Sequence
  Description of Artificial Sequence: Synthetic oligonucleotide
cuuuccccaccacgcuucc

SEQ ID NO: 2680721 - RNA, 19 nt, Artificial Sequence
  Description of Artificial Sequence: Synthetic oligonucleotide
caggacaucgccuccauuu

SEQ ID NO: 2680722 - RNA, 19 nt, Artificial Sequence
  Description of Artificial Sequence: Synthetic oligonucleotide
uggaacugcauggggcauc

SEQ ID NO: 2680723 - RNA, 19 nt, Artificial Sequence
  Description of Artificial Sequence: Synthetic oligonucleotide
gacuggucgguccucugua

SEQ ID NO: 2680724 - RNA, 19 nt, Artificial Sequence
  Description of Artificial Sequence: Synthetic oligonucleotide
cuggccacagagagggaca

SEQ ID NO: 2680725 - RNA, 19 nt, Artificial Sequence
  Description of Artificial Sequence: Synthetic oligonucleotide
ugguugugacagccaggac

SEQ ID NO: 2680726 - RNA, 19 nt, Artificial Sequence
  Description of Artificial Sequence: Synthetic oligonucleotide
guggaucagacuucugggu

SEQ ID NO: 2680727 - RNA, 19 nt, Artificial Sequence
  Description of Artificial Sequence: Synthetic oligonucleotide
gacaaggcgcuagcugcug

SEQ ID NO: 2680728 - RNA, 19 nt, Artificial Sequence
  Description of Artificial Sequence: Synthetic oligonucleotide
cccuuccuuaacugaaccc

SEQ ID NO: 2680729 - RNA, 19 nt, Artificial Sequence
  Description of Artificial Sequence: Synthetic oligonucleotide
aaggcgcuagcugcuguaa

SEQ ID NO: 2680730 - RNA, 19 nt, Artificial Sequence
  Description of Artificial Sequence: Synthetic oligonucleotide
ccaguaaggugcgaugaag

SEQ ID NO: 2680731 - RNA, 19 nt, Artificial Sequence
  Description of Artificial Sequence: Synthetic oligonucleotide
gacccacaauucucuccug

SEQ ID NO: 2680732 - RNA, 19 nt, Artificial Sequence
  Description of Artificial Sequence: Synthetic oligonucleotide
cucccguuguccccaucag

SEQ ID NO: 2680733 - RNA, 19 nt, Artificial Sequence
  Description of Artificial Sequence: Synthetic oligonucleotide
cgcuagcugcuguaaaugg

SEQ ID NO: 2680734 - RNA, 19 nt, Artificial Sequence
  Description of Artificial Sequence: Synthetic oligonucleotide
ugagugugacuggucgguc

SEQ ID NO: 2680735 - RNA, 19 nt, Artificial Sequence
  Description of Artificial Sequence: Synthetic oligonucleotide
gcuuccgauuguuggagca

SEQ ID NO: 2680736 - RNA, 19 nt, Artificial Sequence
  Description of Artificial Sequence: Synthetic oligonucleotide
gcagcagacaaggcgcuag

SEQ ID NO: 2680737 - RNA, 19 nt, Artificial Sequence
  Description of Artificial Sequence: Synthetic oligonucleotide
agcagacaaggcgcuagcu

SEQ ID NO: 2680738 - RNA, 19 nt, Artificial Sequence
  Description of Artificial Sequence: Synthetic oligonucleotide
caccccuuccuuaacugaa

SEQ ID NO: 2680739 - RNA, 19 nt, Artificial Sequence
  Description of Artificial Sequence: Synthetic oligonucleotide
cugcucaggugaagacaag

SEQ ID NO: 2680740 - RNA, 19 nt, Artificial Sequence
  Description of Artificial Sequence: Synthetic oligonucleotide
agcccacgugcagacauca

SEQ ID NO: 2680741 - RNA, 19 nt, Artificial Sequence
  Description of Artificial Sequence: Synthetic oligonucleotide
ugcagggucucagccugga

SEQ ID NO: 2680742 - RNA, 19 nt, Artificial Sequence
  Description of Artificial Sequence: Synthetic oligonucleotide
agguacccuuuccccacca

SEQ ID NO: 2680743 - RNA, 19 nt, Artificial Sequence
  Description of Artificial Sequence: Synthetic oligonucleotide
ccagggagacccacaauuc

SEQ ID NO: 2680744 - RNA, 19 nt, Artificial Sequence
  Description of Artificial Sequence: Synthetic oligonucleotide
ccgauuguuggagcaaggc

SEQ ID NO: 2680745 - RNA, 19 nt, Artificial Sequence
  Description of Artificial Sequence: Synthetic oligonucleotide
ccaugaaucuaagcugcag

SEQ ID NO: 2680746 - RNA, 19 nt, Artificial Sequence
  Description of Artificial Sequence: Synthetic oligonucleotide
agacaaggcgcuagcugcu

SEQ ID NO: 2680747 - RNA, 19 nt, Artificial Sequence
  Description of Artificial Sequence: Synthetic oligonucleotide
cacuguggguagauccuga

SEQ ID NO: 2680748 - RNA, 19 nt, Artificial Sequence
  Description of Artificial Sequence: Synthetic oligonucleotide
acccuacgaggaccucccg

SEQ ID NO: 2680749 - RNA, 19 nt, Artificial Sequence
  Description of Artificial Sequence: Synthetic oligonucleotide
guggguagauccugagugu

SEQ ID NO: 2680750 - RNA, 19 nt, Artificial Sequence
  Description of Artificial Sequence: Synthetic oligonucleotide
cccacgugcagacaucauc

SEQ ID NO: 2680751 - RNA, 19 nt, Artificial Sequence
  Description of Artificial Sequence: Synthetic oligonucleotide
ccuggaacugcauggggca

SEQ ID NO: 2680752 - RNA, 19 nt, Artificial Sequence
  Description of Artificial Sequence: Synthetic oligonucleotide
ggucgguccucuguagcag

SEQ ID NO: 2680753 - RNA, 19 nt, Artificial Sequence
  Description of Artificial Sequence: Synthetic oligonucleotide
gcugaugcaguggguacug

SEQ ID NO: 2680754 - RNA, 19 nt, Artificial Sequence
  Description of Artificial Sequence: Synthetic oligonucleotide
uguccccaucagcccacgu

SEQ ID NO: 2680755 - RNA, 19 nt, Artificial Sequence
  Description of Artificial Sequence: Synthetic oligonucleotide
gugacuggucgguccucug

SEQ ID NO: 2680756 - RNA, 19 nt, Artificial Sequence
  Description of Artificial Sequence: Synthetic oligonucleotide
ggacugagcagcccaguaa

SEQ ID NO: 2680757 - RNA, 19 nt, Artificial Sequence
  Description of Artificial Sequence: Synthetic oligonucleotide
ggacaucgccuccauuuca

SEQ ID NO: 2680758 - RNA, 19 nt, Artificial Sequence
  Description of Artificial Sequence: Synthetic oligonucleotide
gccaggacugagcagccca

SEQ ID NO: 2680759 - RNA, 19 nt, Artificial Sequence
  Description of Artificial Sequence: Synthetic oligonucleotide
ccuuuccccaccacgcuuc

SEQ ID NO: 2680760 - RNA, 19 nt, Artificial Sequence
  Description of Artificial Sequence: Synthetic oligonucleotide
agugacccuaugaacccua

SEQ ID NO: 2680761 - RNA, 19 nt, Artificial Sequence
  Description of Artificial Sequence: Synthetic oligonucleotide
caaccaccccuuccuuaac

SEQ ID NO: 2680762 - RNA, 19 nt, Artificial Sequence
  Description of Artificial Sequence: Synthetic oligonucleotide
aggcgcuagcugcuguaaa

SEQ ID NO: 2680763 - RNA, 19 nt, Artificial Sequence
  Description of Artificial Sequence: Synthetic oligonucleotide
gagaggcgagugcuuccga

SEQ ID NO: 2680764 - RNA, 19 nt, Artificial Sequence
  Description of Artificial Sequence: Synthetic oligonucleotide
cagguguuagaagccccuc

SEQ ID NO: 2680765 - RNA, 19 nt, Artificial Sequence
  Description of Artificial Sequence: Synthetic oligonucleotide
ggaggggacagccaugaau

SEQ ID NO: 2680766 - RNA, 19 nt, Artificial Sequence
  Description of Artificial Sequence: Synthetic oligonucleotide
gcgcuagcugcuguaaaug

SEQ ID NO: 2680767 - RNA, 19 nt, Artificial Sequence
  Description of Artificial Sequence: Synthetic oligonucleotide
ggagacccacaauucucuc

SEQ ID NO: 2680768 - RNA, 19 nt, Artificial Sequence
  Description of Artificial Sequence: Synthetic oligonucleotide
aucagacuucuggguaggu

SEQ ID NO: 2680769 - RNA, 19 nt, Artificial Sequence
  Description of Artificial Sequence: Synthetic oligonucleotide
gacaaggcauccugugguu

SEQ ID NO: 2680770 - RNA, 19 nt, Artificial Sequence
  Description of Artificial Sequence: Synthetic oligonucleotide
cagggagacccacaauucu

SEQ ID NO: 2680771 - RNA, 19 nt, Artificial Sequence
  Description of Artificial Sequence: Synthetic oligonucleotide
gagggacauaacaggacau

SEQ ID NO: 2680772 - RNA, 19 nt, Artificial Sequence
  Description of Artificial Sequence: Synthetic oligonucleotide
cccacugggccaucaacuc

SEQ ID NO: 2680773 - RNA, 19 nt, Artificial Sequence
  Description of Artificial Sequence: Synthetic oligonucleotide
cuuccgauuguuggagcaa

SEQ ID NO: 2680774 - RNA, 19 nt, Artificial Sequence
  Description of Artificial Sequence: Synthetic oligonucleotide
acaggacaucgccuccauu

SEQ ID NO: 2680775 - RNA, 19 nt, Artificial Sequence
  Description of Artificial Sequence: Synthetic oligonucleotide
cugagcagcccaguaaggu

SEQ ID NO: 2680776 - RNA, 19 nt, Artificial Sequence
  Description of Artificial Sequence: Synthetic oligonucleotide
cccuccacagcuggggagg

SEQ ID NO: 2680777 - RNA, 19 nt, Artificial Sequence
  Description of Artificial Sequence: Synthetic oligonucleotide
gugacccuaugaacccuac

SEQ ID NO: 2680778 - RNA, 19 nt, Artificial Sequence
  Description of Artificial Sequence: Synthetic oligonucleotide
gguacccuuuccccaccac

SEQ ID NO: 2680779 - RNA, 19 nt, Artificial Sequence
  Description of Artificial Sequence: Synthetic oligonucleotide
ccguuguccccaucagccc

SEQ ID NO: 2680780 - RNA, 19 nt, Artificial Sequence
  Description of Artificial Sequence: Synthetic oligonucleotide
ugaacccuacgaggaccuc

SEQ ID NO: 2680781 - RNA, 19 nt, Artificial Sequence
  Description of Artificial Sequence: Synthetic oligonucleotide
gaggcgagugcuuccgauu

SEQ ID NO: 2680782 - RNA, 19 nt, Artificial Sequence
  Description of Artificial Sequence: Synthetic oligonucleotide
gcauccugugguugugaca

SEQ ID NO: 2680783 - RNA, 19 nt, Artificial Sequence
  Description of Artificial Sequence: Synthetic oligonucleotide
ccaaccaccccuuccuuaa

SEQ ID NO: 2680784 - RNA, 19 nt, Artificial Sequence
  Description of Artificial Sequence: Synthetic oligonucleotide
cagcccacgugcagacauc

SEQ ID NO: 2680785 - RNA, 19 nt, Artificial Sequence
  Description of Artificial Sequence: Synthetic oligonucleotide
caaggcgcuagcugcugua

SEQ ID NO: 2680786 - RNA, 19 nt, Artificial Sequence
  Description of Artificial Sequence: Synthetic oligonucleotide
ggacagccaugaaucuaag

SEQ ID NO: 2680787 - RNA, 19 nt, Artificial Sequence
  Description of Artificial Sequence: Synthetic oligonucleotide
accucccguuguccccauc

SEQ ID NO: 2680788 - RNA, 19 nt, Artificial Sequence
  Description of Artificial Sequence: Synthetic oligonucleotide
cuaccccaaccaccccuuc

SEQ ID NO: 2680789 - RNA, 19 nt, Artificial Sequence
  Description of Artificial Sequence: Synthetic oligonucleotide
gcccaguaaggugcgauga

SEQ ID NO: 2680790 - RNA, 19 nt, Artificial Sequence
  Description of Artificial Sequence: Synthetic oligonucleotide
ggggaggggacagccauga

SEQ ID NO: 2680791 - RNA, 19 nt, Artificial Sequence
  Description of Artificial Sequence: Synthetic oligonucleotide
cuguggguagauccugagu

SEQ ID NO: 2680792 - RNA, 19 nt, Artificial Sequence
  Description of Artificial Sequence: Synthetic oligonucleotide
acugggccaucaacucucu

SEQ ID NO: 2680793 - RNA, 19 nt, Artificial Sequence
  Description of Artificial Sequence: Synthetic oligonucleotide
cccaucagcccacgugcag

SEQ ID NO: 2680794 - RNA, 19 nt, Artificial Sequence
  Description of Artificial Sequence: Synthetic oligonucleotide
gcaguggguacugacagau

SEQ ID NO: 2680795 - RNA, 19 nt, Artificial Sequence
  Description of Artificial Sequence: Synthetic oligonucleotide
caauucucuccuggccaca

SEQ ID NO: 2680796 - RNA, 19 nt, Artificial Sequence
  Description of Artificial Sequence: Synthetic oligonucleotide
cugcauggggcaucuugcu

SEQ ID NO: 2680797 - RNA, 19 nt, Artificial Sequence
  Description of Artificial Sequence: Synthetic oligonucleotide
cugggccaucaacucucuc

SEQ ID NO: 2680798 - RNA, 19 nt, Artificial Sequence
  Description of Artificial Sequence: Synthetic oligonucleotide
gggagacccacaauucucu

SEQ ID NO: 2680799 - RNA, 19 nt, Artificial Sequence
  Description of Artificial Sequence: Synthetic oligonucleotide
ccucccguuguccccauca

SEQ ID NO: 2680800 - RNA, 19 nt, Artificial Sequence
  Description of Artificial Sequence: Synthetic oligonucleotide
ggcgcuagcugcuguaaau

SEQ ID NO: 2680801 - RNA, 19 nt, Artificial Sequence
  Description of Artificial Sequence: Synthetic oligonucleotide
aucagcccacgugcagaca

SEQ ID NO: 2680802 - RNA, 19 nt, Artificial Sequence
  Description of Artificial Sequence: Synthetic oligonucleotide
ggcuaccccaaccaccccu

SEQ ID NO: 2680803 - RNA, 19 nt, Artificial Sequence
  Description of Artificial Sequence: Synthetic oligonucleotide
ggugaagacaaggcauccu

SEQ ID NO: 2680804 - RNA, 19 nt, Artificial Sequence
  Description of Artificial Sequence: Synthetic oligonucleotide
acgcuucccacugggccau

SEQ ID NO: 2680805 - RNA, 19 nt, Artificial Sequence
  Description of Artificial Sequence: Synthetic oligonucleotide
ccccuccacagcuggggag

SEQ ID NO: 2680806 - RNA, 19 nt, Artificial Sequence
  Description of Artificial Sequence: Synthetic oligonucleotide
ccccaagcaacagcacccc

SEQ ID NO: 2680807 - RNA, 19 nt, Artificial Sequence
  Description of Artificial Sequence: Synthetic oligonucleotide
gggucucagccuggaacug

SEQ ID NO: 2680808 - RNA, 19 nt, Artificial Sequence
  Description of Artificial Sequence: Synthetic oligonucleotide
ggaacugcauggggcaucu

SEQ ID NO: 2680809 - RNA, 19 nt, Artificial Sequence
  Description of Artificial Sequence: Synthetic oligonucleotide
agcagcagacaaggcgcua

SEQ ID NO: 2680810 - RNA, 19 nt, Artificial Sequence
  Description of Artificial Sequence: Synthetic oligonucleotide
ccaccccuuccuuaacuga

SEQ ID NO: 2680811 - RNA, 19 nt, Artificial Sequence
  Description of Artificial Sequence: Synthetic oligonucleotide
cauggggcaucuugcugau

SEQ ID NO: 2680812 - RNA, 19 nt, Artificial Sequence
  Description of Artificial Sequence: Synthetic oligonucleotide
cccagggagacccacaauu

SEQ ID NO: 2680813 - RNA, 19 nt, Artificial Sequence
  Description of Artificial Sequence: Synthetic oligonucleotide
cugaugcaguggguacuga

SEQ ID NO: 2680814 - RNA, 19 nt, Artificial Sequence
  Description of Artificial Sequence: Synthetic oligonucleotide
cguuguccccaucagccca

SEQ ID NO: 2680815 - RNA, 19 nt, Artificial Sequence
  Description of Artificial Sequence: Synthetic oligonucleotide
ccuccauuucagaacaguu

SEQ ID NO: 2680816 - RNA, 19 nt, Artificial Sequence
  Description of Artificial Sequence: Synthetic oligonucleotide
gccaugaaucuaagcugca

SEQ ID NO: 2680817 - RNA, 19 nt, Artificial Sequence
  Description of Artificial Sequence: Synthetic oligonucleotide
ggaccucccguugucccca

SEQ ID NO: 2680818 - RNA, 19 nt, Artificial Sequence
  Description of Artificial Sequence: Synthetic oligonucleotide
ccaucagcccacgugcaga

SEQ ID NO: 2680819 - RNA, 19 nt, Artificial Sequence
  Description of Artificial Sequence: Synthetic oligonucleotide
ggggacagccaugaaucua

SEQ ID NO: 2680820 - RNA, 19 nt, Artificial Sequence
  Description of Artificial Sequence: Synthetic oligonucleotide
gugugacuggucgguccuc

SEQ ID NO: 2680821 - RNA, 19 nt, Artificial Sequence
  Description of Artificial Sequence: Synthetic oligonucleotide
gcuguaaauggcaguggau

SEQ ID NO: 2680822 - RNA, 19 nt, Artificial Sequence
  Description of Artificial Sequence: Synthetic oligonucleotide
gccuccauuucagaacagu

SEQ ID NO: 2680823 - RNA, 19 nt, Artificial Sequence
  Description of Artificial Sequence: Synthetic oligonucleotide
ccuacgaggaccucccguu

SEQ ID NO: 2680824 - RNA, 19 nt, Artificial Sequence
  Description of Artificial Sequence: Synthetic oligonucleotide
ccagguguuagaagccccu

SEQ ID NO: 2680825 - RNA, 19 nt, Artificial Sequence
  Description of Artificial Sequence: Synthetic oligonucleotide
agcaccccagggagaccca

SEQ ID NO: 2680826 - RNA, 19 nt, Artificial Sequence
  Description of Artificial Sequence: Synthetic oligonucleotide
ccccacuuuuauuccaggu

SEQ ID NO: 2680827 - RNA, 19 nt, Artificial Sequence
  Description of Artificial Sequence: Synthetic oligonucleotide
cagugacccuaugaacccu

SEQ ID NO: 2680828 - RNA, 19 nt, Artificial Sequence
  Description of Artificial Sequence: Synthetic oligonucleotide
gcaaggccccuggccagug

SEQ ID NO: 2680829 - RNA, 19 nt, Artificial Sequence
  Description of Artificial Sequence: Synthetic oligonucleotide
ccauuucagaacaguucau

SEQ ID NO: 2680830 - RNA, 19 nt, Artificial Sequence
  Description of Artificial Sequence: Synthetic oligonucleotide
cccaaccaccccuuccuua

SEQ ID NO: 2680831 - RNA, 19 nt, Artificial Sequence
  Description of Artificial Sequence: Synthetic oligonucleotide
cagcccaguaaggugcgau

SEQ ID NO: 2680832 - RNA, 19 nt, Artificial Sequence
  Description of Artificial Sequence: Synthetic oligonucleotide
ggcgagugcuuccgauugu

SEQ ID NO: 2680833 - RNA, 19 nt, Artificial Sequence
  Description of Artificial Sequence: Synthetic oligonucleotide
gcuggggaggggacagcca

SEQ ID NO: 2680834 - RNA, 19 nt, Artificial Sequence
  Description of Artificial Sequence: Synthetic oligonucleotide
cccaagcaacagcacccca

SEQ ID NO: 2680835 - RNA, 19 nt, Artificial Sequence
  Description of Artificial Sequence: Synthetic oligonucleotide
ggccaucaacucucucacu

SEQ ID NO: 2680836 - RNA, 19 nt, Artificial Sequence
  Description of Artificial Sequence: Synthetic oligonucleotide
ccccaucagcccacgugca

SEQ ID NO: 2680837 - RNA, 19 nt, Artificial Sequence
  Description of Artificial Sequence: Synthetic oligonucleotide
caggacugagcagcccagu

SEQ ID NO: 2680838 - RNA, 19 nt, Artificial Sequence
  Description of Artificial Sequence: Synthetic oligonucleotide
cuggaacugcauggggcau

SEQ ID NO: 2680839 - RNA, 19 nt, Artificial Sequence
  Description of Artificial Sequence: Synthetic oligonucleotide
cccuacgaggaccucccgu

SEQ ID NO: 2680840 - RNA, 19 nt, Artificial Sequence
  Description of Artificial Sequence: Synthetic oligonucleotide
gcgagugcuuccgauuguu

SEQ ID NO: 2680841 - RNA, 19 nt, Artificial Sequence
  Description of Artificial Sequence: Synthetic oligonucleotide
gaccucccguuguccccau

SEQ ID NO: 2680842 - RNA, 19 nt, Artificial Sequence
  Description of Artificial Sequence: Synthetic oligonucleotide
gcagcccaguaaggugcga

SEQ ID NO: 2680843 - RNA, 19 nt, Artificial Sequence
  Description of Artificial Sequence: Synthetic oligonucleotide
ccccaaccaccccuuccuu

SEQ ID NO: 2680844 - RNA, 19 nt, Artificial Sequence
  Description of Artificial Sequence: Synthetic oligonucleotide
cgcuucccacugggccauc

SEQ ID NO: 2680845 - RNA, 19 nt, Artificial Sequence
  Description of Artificial Sequence: Synthetic oligonucleotide
aaaguucugagcuauggcc

SEQ ID NO: 2680846 - RNA, 19 nt, Artificial Sequence
  Description of Artificial Sequence: Synthetic oligonucleotide
acuauuguccacuacacgc

SEQ ID NO: 2680847 - RNA, 19 nt, Artificial Sequence
  Description of Artificial Sequence: Synthetic oligonucleotide
aacaccuuggaauacucgc

SEQ ID NO: 2680848 - RNA, 19 nt, Artificial Sequence
  Description of Artificial Sequence: Synthetic oligonucleotide
ucuguuaccagugugaagg

SEQ ID NO: 2680849 - RNA, 19 nt, Artificial Sequence
  Description of Artificial Sequence: Synthetic oligonucleotide
ugagcuauggccaacaccu

SEQ ID NO: 2680850 - RNA, 19 nt, Artificial Sequence
  Description of Artificial Sequence: Synthetic oligonucleotide
cacauuaaaacauuuauuc

SEQ ID NO: 2680851 - RNA, 19 nt, Artificial Sequence
  Description of Artificial Sequence: Synthetic oligonucleotide
aaacauuuauucuguuacc

SEQ ID NO: 2680852 - RNA, 19 nt, Artificial Sequence
  Description of Artificial Sequence: Synthetic oligonucleotide
aauucgaguccccacaggg

SEQ ID NO: 2680853 - RNA, 19 nt, Artificial Sequence
  Description of Artificial Sequence: Synthetic oligonucleotide
aaaugcucugcugacaugg

SEQ ID NO: 2680854 - RNA, 19 nt, Artificial Sequence
  Description of Artificial Sequence: Synthetic oligonucleotide
agguguuuuaauucgaguc

SEQ ID NO: 2680855 - RNA, 19 nt, Artificial Sequence
  Description of Artificial Sequence: Synthetic oligonucleotide
aguaagaacagccauggga

SEQ ID NO: 2680856 - RNA, 19 nt, Artificial Sequence
  Description of Artificial Sequence: Synthetic oligonucleotide
aaaccuuggggucauucgg

SEQ ID NO: 2680857 - RNA, 19 nt, Artificial Sequence
  Description of Artificial Sequence: Synthetic oligonucleotide
uuuaauucgaguccccaca

SEQ ID NO: 2680858 - RNA, 19 nt, Artificial Sequence
  Description of Artificial Sequence: Synthetic oligonucleotide
uuguuauagacguggaugc

SEQ ID NO: 2680859 - RNA, 19 nt, Artificial Sequence
  Description of Artificial Sequence: Synthetic oligonucleotide
ucugcucacacaaaguucu

SEQ ID NO: 2680860 - RNA, 19 nt, Artificial Sequence
  Description of Artificial Sequence: Synthetic oligonucleotide
uuuaggaagaaaacacaca

SEQ ID NO: 2680861 - RNA, 19 nt, Artificial Sequence
  Description of Artificial Sequence: Synthetic oligonucleotide
uauucuguuaccaguguga

SEQ ID NO: 2680862 - RNA, 19 nt, Artificial Sequence
  Description of Artificial Sequence: Synthetic oligonucleotide
cucaaugaggaccacauug

SEQ ID NO: 2680863 - RNA, 19 nt, Artificial Sequence
  Description of Artificial Sequence: Synthetic oligonucleotide
gaagggaaugguugcaugg

SEQ ID NO: 2680864 - RNA, 19 nt, Artificial Sequence
  Description of Artificial Sequence: Synthetic oligonucleotide
cuuguuauagacguggaug

SEQ ID NO: 2680865 - RNA, 19 nt, Artificial Sequence
  Description of Artificial Sequence: Synthetic oligonucleotide
agcagcgcuggccaaaugc

SEQ ID NO: 2680866 - RNA, 19 nt, Artificial Sequence
  Description of Artificial Sequence: Synthetic oligonucleotide
uucuggauugcaucgaggc

SEQ ID NO: 2680867 - RNA, 19 nt, Artificial Sequence
  Description of Artificial Sequence: Synthetic oligonucleotide
aacauuuauucuguuacca

SEQ ID NO: 2680868 - RNA, 19 nt, Artificial Sequence
  Description of Artificial Sequence: Synthetic oligonucleotide
uuauagacguggaugcagc

SEQ ID NO: 2680869 - RNA, 19 nt, Artificial Sequence
  Description of Artificial Sequence: Synthetic oligonucleotide
uuaauucgaguccccacag

SEQ ID NO: 2680870 - RNA, 19 nt, Artificial Sequence
  Description of Artificial Sequence: Synthetic oligonucleotide
acucuuguuauagacgugg

SEQ ID NO: 2680871 - RNA, 19 nt, Artificial Sequence
  Description of Artificial Sequence: Synthetic oligonucleotide
caugcgaugucccacaaug

SEQ ID NO: 2680872 - RNA, 19 nt, Artificial Sequence
  Description of Artificial Sequence: Synthetic oligonucleotide
uuauucuguuaccagugug

SEQ ID NO: 2680873 - RNA, 19 nt, Artificial Sequence
  Description of Artificial Sequence: Synthetic oligonucleotide
uagacguggaugcagcgag

SEQ ID NO: 2680874 - RNA, 19 nt, Artificial Sequence
  Description of Artificial Sequence: Synthetic oligonucleotide
ucaaugaggaccacauugu

SEQ ID NO: 2680875 - RNA, 19 nt, Artificial Sequence
  Description of Artificial Sequence: Synthetic oligonucleotide
aagggaaugguugcauggc

SEQ ID NO: 2680876 - RNA, 19 nt, Artificial Sequence
  Description of Artificial Sequence: Synthetic oligonucleotide
ugcgaugucccacaaugag

SEQ ID NO: 2680877 - RNA, 19 nt, Artificial Sequence
  Description of Artificial Sequence: Synthetic oligonucleotide
ggauagguguuuuaauucg

SEQ ID NO: 2680878 - RNA, 19 nt, Artificial Sequence
  Description of Artificial Sequence: Synthetic oligonucleotide
aagauggcaaaccgagcag

SEQ ID NO: 2680879 - RNA, 19 nt, Artificial Sequence
  Description of Artificial Sequence: Synthetic oligonucleotide
uaaaacauuuauucuguua

SEQ ID NO: 2680880 - RNA, 19 nt, Artificial Sequence
  Description of Artificial Sequence: Synthetic oligonucleotide
aaugagcgcuuucuucuuc

SEQ ID NO: 2680881 - RNA, 19 nt, Artificial Sequence
  Description of Artificial Sequence: Synthetic oligonucleotide
guuggagucaaaccuuggg

SEQ ID NO: 2680882 - RNA, 19 nt, Artificial Sequence
  Description of Artificial Sequence: Synthetic oligonucleotide
auggccaacaccuuggaau

SEQ ID NO: 2680883 - RNA, 19 nt, Artificial Sequence
  Description of Artificial Sequence: Synthetic oligonucleotide
gguguuuuaauucgagucc

SEQ ID NO: 2680884 - RNA, 19 nt, Artificial Sequence
  Description of Artificial Sequence: Synthetic oligonucleotide
uggagucaaaccuuggggu

SEQ ID NO: 2680885 - RNA, 19 nt, Artificial Sequence
  Description of Artificial Sequence: Synthetic oligonucleotide
aucccaagauggcaaaccg

SEQ ID NO: 2680886 - RNA, 19 nt, Artificial Sequence
  Description of Artificial Sequence: Synthetic oligonucleotide
uuuauucuguuaccagugu

SEQ ID NO: 2680887 - RNA, 19 nt, Artificial Sequence
  Description of Artificial Sequence: Synthetic oligonucleotide
uauagacguggaugcagcg

SEQ ID NO: 2680888 - RNA, 19 nt, Artificial Sequence
  Description of Artificial Sequence: Synthetic oligonucleotide
uuguccucaaugaggacca

SEQ ID NO: 2680889 - RNA, 19 nt, Artificial Sequence
  Description of Artificial Sequence: Synthetic oligonucleotide
auuuauucuguuaccagug

SEQ ID NO: 2680890 - RNA, 19 nt, Artificial Sequence
  Description of Artificial Sequence: Synthetic oligonucleotide
ucuugcgaaggcugguugg

SEQ ID NO: 2680891 - RNA, 19 nt, Artificial Sequence
  Description of Artificial Sequence: Synthetic oligonucleotide
caaaccuuggggucauucg

SEQ ID NO: 2680892 - RNA, 19 nt, Artificial Sequence
  Description of Artificial Sequence: Synthetic oligonucleotide
uguuuuaauucgagucccc

SEQ ID NO: 2680893 - RNA, 19 nt, Artificial Sequence
  Description of Artificial Sequence: Synthetic oligonucleotide
agugugaagggaaugguug

SEQ ID NO: 2680894 - RNA, 19 nt, Artificial Sequence
  Description of Artificial Sequence: Synthetic oligonucleotide
uccccugauggccagcagg

SEQ ID NO: 2680895 - RNA, 19 nt, Artificial Sequence
  Description of Artificial Sequence: Synthetic oligonucleotide
uuguuggagucaaaccuug

SEQ ID NO: 2680896 - RNA, 19 nt, Artificial Sequence
  Description of Artificial Sequence: Synthetic oligonucleotide
uaauucgaguccccacagg

SEQ ID NO: 2680897 - RNA, 19 nt, Artificial Sequence
  Description of Artificial Sequence: Synthetic oligonucleotide
ucauucgggagccaggcau

SEQ ID NO: 2680898 - RNA, 19 nt, Artificial Sequence
  Description of Artificial Sequence: Synthetic oligonucleotide
cuggucgccgacuuuaccc

SEQ ID NO: 2680899 - RNA, 19 nt, Artificial Sequence
  Description of Artificial Sequence: Synthetic oligonucleotide
uguuggagucaaaccuugg

SEQ ID NO: 2680900 - RNA, 19 nt, Artificial Sequence
  Description of Artificial Sequence: Synthetic oligonucleotide
guuauagacguggaugcag

SEQ ID NO: 2680901 - RNA, 19 nt, Artificial Sequence
  Description of Artificial Sequence: Synthetic oligonucleotide
caaaguucugagcuauggc

SEQ ID NO: 2680902 - RNA, 19 nt, Artificial Sequence
  Description of Artificial Sequence: Synthetic oligonucleotide
ugcugacaugggcaaaggg

SEQ ID NO: 2680903 - RNA, 19 nt, Artificial Sequence
  Description of Artificial Sequence: Synthetic oligonucleotide
aaucuccggccacgaaccc

SEQ ID NO: 2680904 - RNA, 19 nt, Artificial Sequence
  Description of Artificial Sequence: Synthetic oligonucleotide
caagauggcaaaccgagca

SEQ ID NO: 2680905 - RNA, 19 nt, Artificial Sequence
  Description of Artificial Sequence: Synthetic oligonucleotide
uccuucuugcgaaggcugg

SEQ ID NO: 2680906 - RNA, 19 nt, Artificial Sequence
  Description of Artificial Sequence: Synthetic oligonucleotide
gaaucuccggccacgaacc

SEQ ID NO: 2680907 - RNA, 19 nt, Artificial Sequence
  Description of Artificial Sequence: Synthetic oligonucleotide
ugggauagguguuuuaauu

SEQ ID NO: 2680908 - RNA, 19 nt, Artificial Sequence
  Description of Artificial Sequence: Synthetic oligonucleotide
aaguucugagcuauggcca

SEQ ID NO: 2680909 - RNA, 19 nt, Artificial Sequence
  Description of Artificial Sequence: Synthetic oligonucleotide
ucugcugacaugggcaaag

SEQ ID NO: 2680910 - RNA, 19 nt, Artificial Sequence
  Description of Artificial Sequence: Synthetic oligonucleotide
uccacuacacgcacccgag

SEQ ID NO: 2680911 - RNA, 19 nt, Artificial Sequence
  Description of Artificial Sequence: Synthetic oligonucleotide
ucccauuguccucaaugag

SEQ ID NO: 2680912 - RNA, 19 nt, Artificial Sequence
  Description of Artificial Sequence: Synthetic oligonucleotide
augguugcauggcucagag

SEQ ID NO: 2680913 - RNA, 19 nt, Artificial Sequence
  Description of Artificial Sequence: Synthetic oligonucleotide
ugaagggaaugguugcaug

SEQ ID NO: 2680914 - RNA, 19 nt, Artificial Sequence
  Description of Artificial Sequence: Synthetic oligonucleotide
cucacacaaaguucugagc

SEQ ID NO: 2680915 - RNA, 19 nt, Artificial Sequence
  Description of Artificial Sequence: Synthetic oligonucleotide
acaccuuggaauacucgcc

SEQ ID NO: 2680916 - RNA, 19 nt, Artificial Sequence
  Description of Artificial Sequence: Synthetic oligonucleotide
uauuguccacuacacgcac

SEQ ID NO: 2680917 - RNA, 19 nt, Artificial Sequence
  Description of Artificial Sequence: Synthetic oligonucleotide
gaucccaagauggcaaacc

SEQ ID NO: 2680918 - RNA, 19 nt, Artificial Sequence
  Description of Artificial Sequence: Synthetic oligonucleotide
agauggcaaaccgagcagg

SEQ ID NO: 2680919 - RNA, 19 nt, Artificial Sequence
  Description of Artificial Sequence: Synthetic oligonucleotide
cuccuagaggugcugaagc

SEQ ID NO: 2680920 - RNA, 19 nt, Artificial Sequence
  Description of Artificial Sequence: Synthetic oligonucleotide
gaugguacgggguguuccc

SEQ ID NO: 2680921 - RNA, 19 nt, Artificial Sequence
  Description of Artificial Sequence: Synthetic oligonucleotide
uuacccaccccacucuugu

SEQ ID NO: 2680922 - RNA, 19 nt, Artificial Sequence
  Description of Artificial Sequence: Synthetic oligonucleotide
gcugacaugggcaaagggg

SEQ ID NO: 2680923 - RNA, 19 nt, Artificial Sequence
  Description of Artificial Sequence: Synthetic oligonucleotide
uggcaaaccgagcaggcuc

SEQ ID NO: 2680924 - RNA, 19 nt, Artificial Sequence
  Description of Artificial Sequence: Synthetic oligonucleotide
guguuuuaauucgaguccc

SEQ ID NO: 2680925 - RNA, 19 nt, Artificial Sequence
  Description of Artificial Sequence: Synthetic oligonucleotide
agaacagccaugggauccc

SEQ ID NO: 2680926 - RNA, 19 nt, Artificial Sequence
  Description of Artificial Sequence: Synthetic oligonucleotide
aggaccacauuguuggagu

SEQ ID NO: 2680927 - RNA, 19 nt, Artificial Sequence
  Description of Artificial Sequence: Synthetic oligonucleotide
ucuggauugcaucgaggcu

SEQ ID NO: 2680928 - RNA, 19 nt, Artificial Sequence
  Description of Artificial Sequence: Synthetic oligonucleotide
uagguguuuuaauucgagu

SEQ ID NO: 2680929 - RNA, 19 nt, Artificial Sequence
  Description of Artificial Sequence: Synthetic oligonucleotide
cacauuguuggagucaaac

SEQ ID NO: 2680930 - RNA, 19 nt, Artificial Sequence
  Description of Artificial Sequence: Synthetic oligonucleotide
uggauugcaucgaggcucc

SEQ ID NO: 2680931 - RNA, 19 nt, Artificial Sequence
  Description of Artificial Sequence: Synthetic oligonucleotide
uucuugcgaaggcugguug

SEQ ID NO: 2680932 - RNA, 19 nt, Artificial Sequence
  Description of Artificial Sequence: Synthetic oligonucleotide
gacuuuacccaccccacuc

SEQ ID NO: 2680933 - RNA, 19 nt, Artificial Sequence
  Description of Artificial Sequence: Synthetic oligonucleotide
cuggauugcaucgaggcuc

SEQ ID NO: 2680934 - RNA, 19 nt, Artificial Sequence
  Description of Artificial Sequence: Synthetic oligonucleotide
agagccgcucugcucacac

SEQ ID NO: 2680935 - RNA, 19 nt, Artificial Sequence
  Description of Artificial Sequence: Synthetic oligonucleotide
cacuauuguccacuacacg

SEQ ID NO: 2680936 - RNA, 19 nt, Artificial Sequence
  Description of Artificial Sequence: Synthetic oligonucleotide
cuucuggauugcaucgagg

SEQ ID NO: 2680937 - RNA, 19 nt, Artificial Sequence
  Description of Artificial Sequence: Synthetic oligonucleotide
cacaaugagcgcuuucuuc

SEQ ID NO: 2680938 - RNA, 19 nt, Artificial Sequence
  Description of Artificial Sequence: Synthetic oligonucleotide
ccaugggaucccaagaugg

SEQ ID NO: 2680939 - RNA, 19 nt, Artificial Sequence
  Description of Artificial Sequence: Synthetic oligonucleotide
ugacaugggcaaaggggcc

SEQ ID NO: 2680940 - RNA, 19 nt, Artificial Sequence
  Description of Artificial Sequence: Synthetic oligonucleotide
cgaugucccacaaugagcg

SEQ ID NO: 2680941 - RNA, 19 nt, Artificial Sequence
  Description of Artificial Sequence: Synthetic oligonucleotide
cuuggaauacucgccuucc

SEQ ID NO: 2680942 - RNA, 19 nt, Artificial Sequence
  Description of Artificial Sequence: Synthetic oligonucleotide
cugagcuauggccaacacc

SEQ ID NO: 2680943 - RNA, 19 nt, Artificial Sequence
  Description of Artificial Sequence: Synthetic oligonucleotide
uucgaguccccacaggguu

SEQ ID NO: 2680944 - RNA, 19 nt, Artificial Sequence
  Description of Artificial Sequence: Synthetic oligonucleotide
uucuguuaccagugugaag

SEQ ID NO: 2680945 - RNA, 19 nt, Artificial Sequence
  Description of Artificial Sequence: Synthetic oligonucleotide
aaccgagcaggcuccccgg

SEQ ID NO: 2680946 - RNA, 19 nt, Artificial Sequence
  Description of Artificial Sequence: Synthetic oligonucleotide
cuauuguccacuacacgca

SEQ ID NO: 2680947 - RNA, 19 nt, Artificial Sequence
  Description of Artificial Sequence: Synthetic oligonucleotide
aacacacauuaaaacauuu

SEQ ID NO: 2680948 - RNA, 19 nt, Artificial Sequence
  Description of Artificial Sequence: Synthetic oligonucleotide
uccuagaggugcugaagca

SEQ ID NO: 2680949 - RNA, 19 nt, Artificial Sequence
  Description of Artificial Sequence: Synthetic oligonucleotide
acccgagucaucuucugga

SEQ ID NO: 2680950 - RNA, 19 nt, Artificial Sequence
  Description of Artificial Sequence: Synthetic oligonucleotide
aaacacacauuaaaacauu

SEQ ID NO: 2680951 - RNA, 19 nt, Artificial Sequence
  Description of Artificial Sequence: Synthetic oligonucleotide
ucccaagauggcaaaccga

SEQ ID NO: 2680952 - RNA, 19 nt, Artificial Sequence
  Description of Artificial Sequence: Synthetic oligonucleotide
ggcacuauuguccacuaca

SEQ ID NO: 2680953 - RNA, 19 nt, Artificial Sequence
  Description of Artificial Sequence: Synthetic oligonucleotide
aaugguugcauggcucaga

SEQ ID NO: 2680954 - RNA, 19 nt, Artificial Sequence
  Description of Artificial Sequence: Synthetic oligonucleotide
uuccccagggcacuauugu

SEQ ID NO: 2680955 - RNA, 19 nt, Artificial Sequence
  Description of Artificial Sequence: Synthetic oligonucleotide
gcucacacaaaguucugag

SEQ ID NO: 2680956 - RNA, 19 nt, Artificial Sequence
  Description of Artificial Sequence: Synthetic oligonucleotide
acuuuacccaccccacucu

SEQ ID NO: 2680957 - RNA, 19 nt, Artificial Sequence
  Description of Artificial Sequence: Synthetic oligonucleotide
aaugcucugcugacauggg

SEQ ID NO: 2680958 - RNA, 19 nt, Artificial Sequence
  Description of Artificial Sequence: Synthetic oligonucleotide
acuacacgcacccgaguca

SEQ ID NO: 2680959 - RNA, 19 nt, Artificial Sequence
  Description of Artificial Sequence: Synthetic oligonucleotide
cucugcucacacaaaguuc

SEQ ID NO: 2680960 - RNA, 19 nt, Artificial Sequence
  Description of Artificial Sequence: Synthetic oligonucleotide
gauggcaaaccgagcaggc

SEQ ID NO: 2680961 - RNA, 19 nt, Artificial Sequence
  Description of Artificial Sequence: Synthetic oligonucleotide
auacucgccuuccuucuug

SEQ ID NO: 2680962 - RNA, 19 nt, Artificial Sequence
  Description of Artificial Sequence: Synthetic oligonucleotide
gggauagguguuuuaauuc

SEQ ID NO: 2680963 - RNA, 19 nt, Artificial Sequence
  Description of Artificial Sequence: Synthetic oligonucleotide
ccaguaagaacagccaugg

SEQ ID NO: 2680964 - RNA, 19 nt, Artificial Sequence
  Description of Artificial Sequence: Synthetic oligonucleotide
gauagguguuuuaauucga

SEQ ID NO: 2680965 - RNA, 19 nt, Artificial Sequence
  Description of Artificial Sequence: Synthetic oligonucleotide
ugugaagggaaugguugca

SEQ ID NO: 2680966 - RNA, 19 nt, Artificial Sequence
  Description of Artificial Sequence: Synthetic oligonucleotide
uggaauacucgccuuccuu

SEQ ID NO: 2680967 - RNA, 19 nt, Artificial Sequence
  Description of Artificial Sequence: Synthetic oligonucleotide
auuguccacuacacgcacc

SEQ ID NO: 2680968 - RNA, 19 nt, Artificial Sequence
  Description of Artificial Sequence: Synthetic oligonucleotide
uuaccagugugaagggaau

SEQ ID NO: 2680969 - RNA, 19 nt, Artificial Sequence
  Description of Artificial Sequence: Synthetic oligonucleotide
uguuauagacguggaugca

SEQ ID NO: 2680970 - RNA, 19 nt, Artificial Sequence
  Description of Artificial Sequence: Synthetic oligonucleotide
cuguuaccagugugaaggg

SEQ ID NO: 2680971 - RNA, 19 nt, Artificial Sequence
  Description of Artificial Sequence: Synthetic oligonucleotide
ggaaucuccggccacgaac

SEQ ID NO: 2680972 - RNA, 19 nt, Artificial Sequence
  Description of Artificial Sequence: Synthetic oligonucleotide
agaggugcugaagcagcgc

SEQ ID NO: 2680973 - RNA, 19 nt, Artificial Sequence
  Description of Artificial Sequence: Synthetic oligonucleotide
cuugcgaaggcugguuggg

SEQ ID NO: 2680974 - RNA, 19 nt, Artificial Sequence
  Description of Artificial Sequence: Synthetic oligonucleotide
guaagaacagccaugggau

SEQ ID NO: 2680975 - RNA, 19 nt, Artificial Sequence
  Description of Artificial Sequence: Synthetic oligonucleotide
ggaauacucgccuuccuuc

SEQ ID NO: 2680976 - RNA, 19 nt, Artificial Sequence
  Description of Artificial Sequence: Synthetic oligonucleotide
uggccaacaccuuggaaua

SEQ ID NO: 2680977 - RNA, 19 nt, Artificial Sequence
  Description of Artificial Sequence: Synthetic oligonucleotide
augagcgcuuucuucuucu

SEQ ID NO: 2680978 - RNA, 19 nt, Artificial Sequence
  Description of Artificial Sequence: Synthetic oligonucleotide
acgcacccgagucaucuuc

SEQ ID NO: 2680979 - RNA, 19 nt, Artificial Sequence
  Description of Artificial Sequence: Synthetic oligonucleotide
gaggaggccgaugguacgg

SEQ ID NO: 2680980 - RNA, 19 nt, Artificial Sequence
  Description of Artificial Sequence: Synthetic oligonucleotide
ucuggucgccgacuuuacc

SEQ ID NO: 2680981 - RNA, 19 nt, Artificial Sequence
  Description of Artificial Sequence: Synthetic oligonucleotide
cacuacacgcacccgaguc

SEQ ID NO: 2680982 - RNA, 19 nt, Artificial Sequence
  Description of Artificial Sequence: Synthetic oligonucleotide
ucgccuuccuucuugcgaa

SEQ ID NO: 2680983 - RNA, 19 nt, Artificial Sequence
  Description of Artificial Sequence: Synthetic oligonucleotide
guuaccagugugaagggaa

SEQ ID NO: 2680984 - RNA, 19 nt, Artificial Sequence
  Description of Artificial Sequence: Synthetic oligonucleotide
uggucgccgacuuuaccca

SEQ ID NO: 2680985 - RNA, 19 nt, Artificial Sequence
  Description of Artificial Sequence: Synthetic oligonucleotide
agggaaugguugcauggcu

SEQ ID NO: 2680986 - RNA, 19 nt, Artificial Sequence
  Description of Artificial Sequence: Synthetic oligonucleotide
auucgggagccaggcaugc

SEQ ID NO: 2680987 - RNA, 19 nt, Artificial Sequence
  Description of Artificial Sequence: Synthetic oligonucleotide
ucaaaccuuggggucauuc

SEQ ID NO: 2680988 - RNA, 19 nt, Artificial Sequence
  Description of Artificial Sequence: Synthetic oligonucleotide
uugcauggcucagagccgc

SEQ ID NO: 2680989 - RNA, 19 nt, Artificial Sequence
  Description of Artificial Sequence: Synthetic oligonucleotide
gacaugggcaaaggggccc

SEQ ID NO: 2680990 - RNA, 19 nt, Artificial Sequence
  Description of Artificial Sequence: Synthetic oligonucleotide
acacaaaguucugagcuau

SEQ ID NO: 2680991 - RNA, 19 nt, Artificial Sequence
  Description of Artificial Sequence: Synthetic oligonucleotide
guuuuaauucgagucccca

SEQ ID NO: 2680992 - RNA, 19 nt, Artificial Sequence
  Description of Artificial Sequence: Synthetic oligonucleotide
uauggccaacaccuuggaa

SEQ ID NO: 2680993 - RNA, 19 nt, Artificial Sequence
  Description of Artificial Sequence: Synthetic oligonucleotide
agccaugggaucccaagau

SEQ ID NO: 2680994 - RNA, 19 nt, Artificial Sequence
  Description of Artificial Sequence: Synthetic oligonucleotide
uguuaccagugugaaggga

SEQ ID NO: 2680995 - RNA, 19 nt, Artificial Sequence
  Description of Artificial Sequence: Synthetic oligonucleotide
ucgaggcuccuagaggugc

SEQ ID NO: 2680996 - RNA, 19 nt, Artificial Sequence
  Description of Artificial Sequence: Synthetic oligonucleotide
uucugagcuauggccaaca

SEQ ID NO: 2680997 - RNA, 19 nt, Artificial Sequence
  Description of Artificial Sequence: Synthetic oligonucleotide
gcuauggccaacaccuugg

SEQ ID NO: 2680998 - RNA, 19 nt, Artificial Sequence
  Description of Artificial Sequence: Synthetic oligonucleotide
cccacucuuguuauagacg

SEQ ID NO: 2680999 - RNA, 19 nt, Artificial Sequence
  Description of Artificial Sequence: Synthetic oligonucleotide
ucgccgacuuuacccaccc

SEQ ID NO: 2681000 - RNA, 19 nt, Artificial Sequence
  Description of Artificial Sequence: Synthetic oligonucleotide
guugcauggcucagagccg

SEQ ID NO: 2681001 - RNA, 19 nt, Artificial Sequence
  Description of Artificial Sequence: Synthetic oligonucleotide
guugggauagguguuuuaa

SEQ ID NO: 2681002 - RNA, 19 nt, Artificial Sequence
  Description of Artificial Sequence: Synthetic oligonucleotide
ggaugcagcgaggaggccg

SEQ ID NO: 2681003 - RNA, 19 nt, Artificial Sequence
  Description of Artificial Sequence: Synthetic oligonucleotide
uacucgccuuccuucuugc

SEQ ID NO: 2681004 - RNA, 19 nt, Artificial Sequence
  Description of Artificial Sequence: Synthetic oligonucleotide
cauucgggagccaggcaug

SEQ ID NO: 2681005 - RNA, 19 nt, Artificial Sequence
  Description of Artificial Sequence: Synthetic oligonucleotide
gagucaaaccuugggguca

SEQ ID NO: 2681006 - RNA, 19 nt, Artificial Sequence
  Description of Artificial Sequence: Synthetic oligonucleotide
augucccacaaugagcgcu

SEQ ID NO: 2681007 - RNA, 19 nt, Artificial Sequence
  Description of Artificial Sequence: Synthetic oligonucleotide
aggccgaugguacggggug

SEQ ID NO: 2681008 - RNA, 19 nt, Artificial Sequence
  Description of Artificial Sequence: Synthetic oligonucleotide
auagacguggaugcagcga

SEQ ID NO: 2681009 - RNA, 19 nt, Artificial Sequence
  Description of Artificial Sequence: Synthetic oligonucleotide
gaaugguugcauggcucag

SEQ ID NO: 2681010 - RNA, 19 nt, Artificial Sequence
  Description of Artificial Sequence: Synthetic oligonucleotide
ugcgaaggcugguugggau

SEQ ID NO: 2681011 - RNA, 19 nt, Artificial Sequence
  Description of Artificial Sequence: Synthetic oligonucleotide
agccgcucugcucacacaa

SEQ ID NO: 2681012 - RNA, 19 nt, Artificial Sequence
  Description of Artificial Sequence: Synthetic oligonucleotide
cacccgagucaucuucugg

SEQ ID NO: 2681013 - RNA, 19 nt, Artificial Sequence
  Description of Artificial Sequence: Synthetic oligonucleotide
ggaaugguugcauggcuca

SEQ ID NO: 2681014 - RNA, 19 nt, Artificial Sequence
  Description of Artificial Sequence: Synthetic oligonucleotide
cuggccaaaugcucugcug

SEQ ID NO: 2681015 - RNA, 19 nt, Artificial Sequence
  Description of Artificial Sequence: Synthetic oligonucleotide
augguacgggguguucccc

SEQ ID NO: 2681016 - RNA, 19 nt, Artificial Sequence
  Description of Artificial Sequence: Synthetic oligonucleotide
ugucccacaaugagcgcuu

SEQ ID NO: 2681017 - RNA, 19 nt, Artificial Sequence
  Description of Artificial Sequence: Synthetic oligonucleotide
caaaggggccccagagccc

SEQ ID NO: 2681018 - RNA, 19 nt, Artificial Sequence
  Description of Artificial Sequence: Synthetic oligonucleotide
accacauuguuggagucaa

SEQ ID NO: 2681019 - RNA, 19 nt, Artificial Sequence
  Description of Artificial Sequence: Synthetic oligonucleotide
caguaagaacagccauggg

SEQ ID NO: 2681020 - RNA, 19 nt, Artificial Sequence
  Description of Artificial Sequence: Synthetic oligonucleotide
uccccgggaaucuccggcc

SEQ ID NO: 2681021 - RNA, 19 nt, Artificial Sequence
  Description of Artificial Sequence: Synthetic oligonucleotide
ucuguccccugauggccag

SEQ ID NO: 2681022 - RNA, 19 nt, Artificial Sequence
  Description of Artificial Sequence: Synthetic oligonucleotide
uaccagugugaagggaaug

SEQ ID NO: 2681023 - RNA, 19 nt, Artificial Sequence
  Description of Artificial Sequence: Synthetic oligonucleotide
ggagucaaaccuugggguc

SEQ ID NO: 2681024 - RNA, 19 nt, Artificial Sequence
  Description of Artificial Sequence: Synthetic oligonucleotide
cuccccgggaaucuccggc

SEQ ID NO: 2681025 - RNA, 19 nt, Artificial Sequence
  Description of Artificial Sequence: Synthetic oligonucleotide
ugguacgggguguucccca

SEQ ID NO: 2681026 - RNA, 19 nt, Artificial Sequence
  Description of Artificial Sequence: Synthetic oligonucleotide
caaaugcucugcugacaug

SEQ ID NO: 2681027 - RNA, 19 nt, Artificial Sequence
  Description of Artificial Sequence: Synthetic oligonucleotide
acacgcacccgagucaucu

SEQ ID NO: 2681028 - RNA, 19 nt, Artificial Sequence
  Description of Artificial Sequence: Synthetic oligonucleotide
guccacuacacgcacccga

SEQ ID NO: 2681029 - RNA, 19 nt, Artificial Sequence
  Description of Artificial Sequence: Synthetic oligonucleotide
acucgccuuccuucuugcg

SEQ ID NO: 2681030 - RNA, 19 nt, Artificial Sequence
  Description of Artificial Sequence: Synthetic oligonucleotide
cacaaaguucugagcuaug

SEQ ID NO: 2681031 - RNA, 19 nt, Artificial Sequence
  Description of Artificial Sequence: Synthetic oligonucleotide
acgggguguuccccagggc

SEQ ID NO: 2681032 - RNA, 19 nt, Artificial Sequence
  Description of Artificial Sequence: Synthetic oligonucleotide
acacacauuaaaacauuua

SEQ ID NO: 2681033 - RNA, 19 nt, Artificial Sequence
  Description of Artificial Sequence: Synthetic oligonucleotide
gaucuggucgccgacuuua

SEQ ID NO: 2681034 - RNA, 19 nt, Artificial Sequence
  Description of Artificial Sequence: Synthetic oligonucleotide
aggcaugcgaugucccaca

SEQ ID NO: 2681035 - RNA, 19 nt, Artificial Sequence
  Description of Artificial Sequence: Synthetic oligonucleotide
gaugcagcgaggaggccga

SEQ ID NO: 2681036 - RNA, 19 nt, Artificial Sequence
  Description of Artificial Sequence: Synthetic oligonucleotide
cacucuuguuauagacgug

SEQ ID NO: 2681037 - RNA, 19 nt, Artificial Sequence
  Description of Artificial Sequence: Synthetic oligonucleotide
ucgaguccccacaggguuc

SEQ ID NO: 2681038 - RNA, 19 nt, Artificial Sequence
  Description of Artificial Sequence: Synthetic oligonucleotide
cguggaugcagcgaggagg

SEQ ID NO: 2681039 - RNA, 19 nt, Artificial Sequence
  Description of Artificial Sequence: Synthetic oligonucleotide
cucuuguuauagacgugga

SEQ ID NO: 2681040 - RNA, 19 nt, Artificial Sequence
  Description of Artificial Sequence: Synthetic oligonucleotide
gaccacauuguuggaguca

SEQ ID NO: 2681041 - RNA, 19 nt, Artificial Sequence
  Description of Artificial Sequence: Synthetic oligonucleotide
cucgccuuccuucuugcga

SEQ ID NO: 2681042 - RNA, 19 nt, Artificial Sequence
  Description of Artificial Sequence: Synthetic oligonucleotide
acguggaugcagcgaggag

SEQ ID NO: 2681043 - RNA, 19 nt, Artificial Sequence
  Description of Artificial Sequence: Synthetic oligonucleotide
uccccagggcacuauuguc

SEQ ID NO: 2681044 - RNA, 19 nt, Artificial Sequence
  Description of Artificial Sequence: Synthetic oligonucleotide
gacguggaugcagcgagga

SEQ ID NO: 2681045 - RNA, 19 nt, Artificial Sequence
  Description of Artificial Sequence: Synthetic oligonucleotide
gaggugcugaagcagcgcu

SEQ ID NO: 2681046 - RNA, 19 nt, Artificial Sequence
  Description of Artificial Sequence: Synthetic oligonucleotide
auggcucagagccgcucug

SEQ ID NO: 2681047 - RNA, 19 nt, Artificial Sequence
  Description of Artificial Sequence: Synthetic oligonucleotide
gccgacuuuacccacccca

SEQ ID NO: 2681048 - RNA, 19 nt, Artificial Sequence
  Description of Artificial Sequence: Synthetic oligonucleotide
ugguugcauggcucagagc

SEQ ID NO: 2681049 - RNA, 19 nt, Artificial Sequence
  Description of Artificial Sequence: Synthetic oligonucleotide
ggucauucgggagccaggc

SEQ ID NO: 2681050 - RNA, 19 nt, Artificial Sequence
  Description of Artificial Sequence: Synthetic oligonucleotide
agcaggcuccccgggaauc

SEQ ID NO: 2681051 - RNA, 19 nt, Artificial Sequence
  Description of Artificial Sequence: Synthetic oligonucleotide
accgagcaggcuccccggg

SEQ ID NO: 2681052 - RNA, 19 nt, Artificial Sequence
  Description of Artificial Sequence: Synthetic oligonucleotide
ggcaaaggggccccagagc

SEQ ID NO: 2681053 - RNA, 19 nt, Artificial Sequence
  Description of Artificial Sequence: Synthetic oligonucleotide
aggaucuggucgccgacuu

SEQ ID NO: 2681054 - RNA, 19 nt, Artificial Sequence
  Description of Artificial Sequence: Synthetic oligonucleotide
auucgaguccccacagggu

SEQ ID NO: 2681055 - RNA, 19 nt, Artificial Sequence
  Description of Artificial Sequence: Synthetic oligonucleotide
guacgggguguuccccagg

SEQ ID NO: 2681056 - RNA, 19 nt, Artificial Sequence
  Description of Artificial Sequence: Synthetic oligonucleotide
aagcagcgcuggccaaaug

SEQ ID NO: 2681057 - RNA, 19 nt, Artificial Sequence
  Description of Artificial Sequence: Synthetic oligonucleotide
cugcugacaugggcaaagg

SEQ ID NO: 2681058 - RNA, 19 nt, Artificial Sequence
  Description of Artificial Sequence: Synthetic oligonucleotide
caggcaugcgaugucccac

SEQ ID NO: 2681059 - RNA, 19 nt, Artificial Sequence
  Description of Artificial Sequence: Synthetic oligonucleotide
uucgggagccaggcaugcg

SEQ ID NO: 2681060 - RNA, 19 nt, Artificial Sequence
  Description of Artificial Sequence: Synthetic oligonucleotide
guuccccagggcacuauug

SEQ ID NO: 2681061 - RNA, 19 nt, Artificial Sequence
  Description of Artificial Sequence: Synthetic oligonucleotide
ccccacucuuguuauagac

SEQ ID NO: 2681062 - RNA, 19 nt, Artificial Sequence
  Description of Artificial Sequence: Synthetic oligonucleotide
gcacuauuguccacuacac

SEQ ID NO: 2681063 - RNA, 19 nt, Artificial Sequence
  Description of Artificial Sequence: Synthetic oligonucleotide
ucccacaaugagcgcuuuc

SEQ ID NO: 2681064 - RNA, 19 nt, Artificial Sequence
  Description of Artificial Sequence: Synthetic oligonucleotide
aucuggucgccgacuuuac

SEQ ID NO: 2681065 - RNA, 19 nt, Artificial Sequence
  Description of Artificial Sequence: Synthetic oligonucleotide
auggcaaaccgagcaggcu

SEQ ID NO: 2681066 - RNA, 19 nt, Artificial Sequence
  Description of Artificial Sequence: Synthetic oligonucleotide
gcgaugucccacaaugagc

SEQ ID NO: 2681067 - RNA, 19 nt, Artificial Sequence
  Description of Artificial Sequence: Synthetic oligonucleotide
caggguucccauuguccuc

SEQ ID NO: 2681068 - RNA, 19 nt, Artificial Sequence
  Description of Artificial Sequence: Synthetic oligonucleotide
ggcaaaccgagcaggcucc

SEQ ID NO: 2681069 - RNA, 19 nt, Artificial Sequence
  Description of Artificial Sequence: Synthetic oligonucleotide
uggcucagagccgcucugc

SEQ ID NO: 2681070 - RNA, 19 nt, Artificial Sequence
  Description of Artificial Sequence: Synthetic oligonucleotide
gguacgggguguuccccag

SEQ ID NO: 2681071 - RNA, 19 nt, Artificial Sequence
  Description of Artificial Sequence: Synthetic oligonucleotide
uugcgaaggcugguuggga

SEQ ID NO: 2681072 - RNA, 19 nt, Artificial Sequence
  Description of Artificial Sequence: Synthetic oligonucleotide
gcgcuuucuucuucugucc

SEQ ID NO: 2681073 - RNA, 19 nt, Artificial Sequence
  Description of Artificial Sequence: Synthetic oligonucleotide
agacguggaugcagcgagg

SEQ ID NO: 2681074 - RNA, 19 nt, Artificial Sequence
  Description of Artificial Sequence: Synthetic oligonucleotide
accuuggaauacucgccuu

SEQ ID NO: 2681075 - RNA, 19 nt, Artificial Sequence
  Description of Artificial Sequence: Synthetic oligonucleotide
accccacucuuguuauaga

SEQ ID NO: 2681076 - RNA, 19 nt, Artificial Sequence
  Description of Artificial Sequence: Synthetic oligonucleotide
cagcgcuggccaaaugcuc

SEQ ID NO: 2681077 - RNA, 19 nt, Artificial Sequence
  Description of Artificial Sequence: Synthetic oligonucleotide
ccuuggaauacucgccuuc

SEQ ID NO: 2681078 - RNA, 19 nt, Artificial Sequence
  Description of Artificial Sequence: Synthetic oligonucleotide
cagccaugggaucccaaga

SEQ ID NO: 2681079 - RNA, 19 nt, Artificial Sequence
  Description of Artificial Sequence: Synthetic oligonucleotide
ucagagccgcucugcucac

SEQ ID NO: 2681080 - RNA, 19 nt, Artificial Sequence
  Description of Artificial Sequence: Synthetic oligonucleotide
cuauggccaacaccuugga

SEQ ID NO: 2681081 - RNA, 19 nt, Artificial Sequence
  Description of Artificial Sequence: Synthetic oligonucleotide
gauugcaucgaggcuccua

SEQ ID NO: 2681082 - RNA, 19 nt, Artificial Sequence
  Description of Artificial Sequence: Synthetic oligonucleotide
ugcauggcucagagccgcu

SEQ ID NO: 2681083 - RNA, 19 nt, Artificial Sequence
  Description of Artificial Sequence: Synthetic oligonucleotide
augcgaugucccacaauga

SEQ ID NO: 2681084 - RNA, 19 nt, Artificial Sequence
  Description of Artificial Sequence: Synthetic oligonucleotide
ccgacuuuacccaccccac

SEQ ID NO: 2681085 - RNA, 19 nt, Artificial Sequence
  Description of Artificial Sequence: Synthetic oligonucleotide
agucaaaccuuggggucau

SEQ ID NO: 2681086 - RNA, 19 nt, Artificial Sequence
  Description of Artificial Sequence: Synthetic oligonucleotide
gagcgcuuucuucuucugu

SEQ ID NO: 2681087 - RNA, 19 nt, Artificial Sequence
  Description of Artificial Sequence: Synthetic oligonucleotide
gucgccgacuuuacccacc

SEQ ID NO: 2681088 - RNA, 19 nt, Artificial Sequence
  Description of Artificial Sequence: Synthetic oligonucleotide
caccuuggaauacucgccu

SEQ ID NO: 2681089 - RNA, 19 nt, Artificial Sequence
  Description of Artificial Sequence: Synthetic oligonucleotide
ccgcucugcucacacaaag

SEQ ID NO: 2681090 - RNA, 19 nt, Artificial Sequence
  Description of Artificial Sequence: Synthetic oligonucleotide
ggggucauucgggagccag

SEQ ID NO: 2681091 - RNA, 19 nt, Artificial Sequence
  Description of Artificial Sequence: Synthetic oligonucleotide
gucauucgggagccaggca

SEQ ID NO: 2681092 - RNA, 19 nt, Artificial Sequence
  Description of Artificial Sequence: Synthetic oligonucleotide
gggucauucgggagccagg

SEQ ID NO: 2681093 - RNA, 19 nt, Artificial Sequence
  Description of Artificial Sequence: Synthetic oligonucleotide
aucgaggcuccuagaggug

SEQ ID NO: 2681094 - RNA, 19 nt, Artificial Sequence
  Description of Artificial Sequence: Synthetic oligonucleotide
guucugagcuauggccaac

SEQ ID NO: 2681095 - RNA, 19 nt, Artificial Sequence
  Description of Artificial Sequence: Synthetic oligonucleotide
uacacgcacccgagucauc

SEQ ID NO: 2681096 - RNA, 19 nt, Artificial Sequence
  Description of Artificial Sequence: Synthetic oligonucleotide
cuuccuucuugcgaaggcu

SEQ ID NO: 2681097 - RNA, 19 nt, Artificial Sequence
  Description of Artificial Sequence: Synthetic oligonucleotide
ccccacaggguucccauug

SEQ ID NO: 2681098 - RNA, 19 nt, Artificial Sequence
  Description of Artificial Sequence: Synthetic oligonucleotide
cauggcucagagccgcucu

SEQ ID NO: 2681099 - RNA, 19 nt, Artificial Sequence
  Description of Artificial Sequence: Synthetic oligonucleotide
uggaugcagcgaggaggcc

SEQ ID NO: 2681100 - RNA, 19 nt, Artificial Sequence
  Description of Artificial Sequence: Synthetic oligonucleotide
ggaucccaagauggcaaac

SEQ ID NO: 2681101 - RNA, 19 nt, Artificial Sequence
  Description of Artificial Sequence: Synthetic oligonucleotide
cagugugaagggaaugguu

SEQ ID NO: 2681102 - RNA, 19 nt, Artificial Sequence
  Description of Artificial Sequence: Synthetic oligonucleotide
uguccucaaugaggaccac

SEQ ID NO: 2681103 - RNA, 19 nt, Artificial Sequence
  Description of Artificial Sequence: Synthetic oligonucleotide
cgaugguacgggguguucc

SEQ ID NO: 2681104 - RNA, 19 nt, Artificial Sequence
  Description of Artificial Sequence: Synthetic oligonucleotide
caaugaggaccacauuguu

SEQ ID NO: 2681105 - RNA, 19 nt, Artificial Sequence
  Description of Artificial Sequence: Synthetic oligonucleotide
gcaggaucuggucgccgac

SEQ ID NO: 2681106 - RNA, 19 nt, Artificial Sequence
  Description of Artificial Sequence: Synthetic oligonucleotide
ggucgccgacuuuacccac

SEQ ID NO: 2681107 - RNA, 19 nt, Artificial Sequence
  Description of Artificial Sequence: Synthetic oligonucleotide
gcacccgagucaucuucug

SEQ ID NO: 2681108 - RNA, 19 nt, Artificial Sequence
  Description of Artificial Sequence: Synthetic oligonucleotide
gggguguuccccagggcac

SEQ ID NO: 2681109 - RNA, 19 nt, Artificial Sequence
  Description of Artificial Sequence: Synthetic oligonucleotide
cgaggaggccgaugguacg

SEQ ID NO: 2681110 - RNA, 19 nt, Artificial Sequence
  Description of Artificial Sequence: Synthetic oligonucleotide
gaggccgaugguacggggu

SEQ ID NO: 2681111 - RNA, 19 nt, Artificial Sequence
  Description of Artificial Sequence: Synthetic oligonucleotide
gugaagggaaugguugcau

SEQ ID NO: 2681112 - RNA, 19 nt, Artificial Sequence
  Description of Artificial Sequence: Synthetic oligonucleotide
ggagccaggcaugcgaugu

SEQ ID NO: 2681113 - RNA, 19 nt, Artificial Sequence
  Description of Artificial Sequence: Synthetic oligonucleotide
gggaucccaagauggcaaa

SEQ ID NO: 2681114 - RNA, 19 nt, Artificial Sequence
  Description of Artificial Sequence: Synthetic oligonucleotide
gggagccaggcaugcgaug

SEQ ID NO: 2681115 - RNA, 19 nt, Artificial Sequence
  Description of Artificial Sequence: Synthetic oligonucleotide
gguugggauagguguuuua

SEQ ID NO: 2681116 - RNA, 19 nt, Artificial Sequence
  Description of Artificial Sequence: Synthetic oligonucleotide
gaagcagcgcuggccaaau

SEQ ID NO: 2681117 - RNA, 19 nt, Artificial Sequence
  Description of Artificial Sequence: Synthetic oligonucleotide
gcgcuggccaaaugcucug

SEQ ID NO: 2681118 - RNA, 19 nt, Artificial Sequence
  Description of Artificial Sequence: Synthetic oligonucleotide
gggcacuauuguccacuac

SEQ ID NO: 2681119 - RNA, 19 nt, Artificial Sequence
  Description of Artificial Sequence: Synthetic oligonucleotide
cugaagcagcgcuggccaa

SEQ ID NO: 2681120 - RNA, 19 nt, Artificial Sequence
  Description of Artificial Sequence: Synthetic oligonucleotide
ccgggaaucuccggccacg

SEQ ID NO: 2681121 - RNA, 19 nt, Artificial Sequence
  Description of Artificial Sequence: Synthetic oligonucleotide
gcuccccgggaaucuccgg

SEQ ID NO: 2681122 - RNA, 19 nt, Artificial Sequence
  Description of Artificial Sequence: Synthetic oligonucleotide
cuuuacccaccccacucuu

SEQ ID NO: 2681123 - RNA, 19 nt, Artificial Sequence
  Description of Artificial Sequence: Synthetic oligonucleotide
caaugagcgcuuucuucuu

SEQ ID NO: 2681124 - RNA, 19 nt, Artificial Sequence
  Description of Artificial Sequence: Synthetic oligonucleotide
cuacacgcacccgagucau

SEQ ID NO: 2681125 - RNA, 19 nt, Artificial Sequence
  Description of Artificial Sequence: Synthetic oligonucleotide
gcccaguaagaacagccau

SEQ ID NO: 2681126 - RNA, 19 nt, Artificial Sequence
  Description of Artificial Sequence: Synthetic oligonucleotide
gcgaaggcugguugggaua

SEQ ID NO: 2681127 - RNA, 19 nt, Artificial Sequence
  Description of Artificial Sequence: Synthetic oligonucleotide
ggccaacaccuuggaauac

SEQ ID NO: 2681128 - RNA, 19 nt, Artificial Sequence
  Description of Artificial Sequence: Synthetic oligonucleotide
ccaggcaugcgauguccca

SEQ ID NO: 2681129 - RNA, 19 nt, Artificial Sequence
  Description of Artificial Sequence: Synthetic oligonucleotide
uggggucauucgggagcca

SEQ ID NO: 2681130 - RNA, 19 nt, Artificial Sequence
  Description of Artificial Sequence: Synthetic oligonucleotide
cccacaaugagcgcuuucu

SEQ ID NO: 2681131 - RNA, 19 nt, Artificial Sequence
  Description of Artificial Sequence: Synthetic oligonucleotide
cgggguguuccccagggca

SEQ ID NO: 2681132 - RNA, 19 nt, Artificial Sequence
  Description of Artificial Sequence: Synthetic oligonucleotide
caggcuccccgggaaucuc

SEQ ID NO: 2681133 - RNA, 19 nt, Artificial Sequence
  Description of Artificial Sequence: Synthetic oligonucleotide
ccagcaggaucuggucgcc

SEQ ID NO: 2681134 - RNA, 19 nt, Artificial Sequence
  Description of Artificial Sequence: Synthetic oligonucleotide
gcaaaccgagcaggcuccc

SEQ ID NO: 2681135 - RNA, 19 nt, Artificial Sequence
  Description of Artificial Sequence: Synthetic oligonucleotide
ggcaugcgaugucccacaa

SEQ ID NO: 2681136 - RNA, 19 nt, Artificial Sequence
  Description of Artificial Sequence: Synthetic oligonucleotide
gcuggccaaaugcucugcu

SEQ ID NO: 2681137 - RNA, 19 nt, Artificial Sequence
  Description of Artificial Sequence: Synthetic oligonucleotide
gcagcgcuggccaaaugcu

SEQ ID NO: 2681138 - RNA, 19 nt, Artificial Sequence
  Description of Artificial Sequence: Synthetic oligonucleotide
cuucuugcgaaggcugguu

SEQ ID NO: 2681139 - RNA, 19 nt, Artificial Sequence
  Description of Artificial Sequence: Synthetic oligonucleotide
gagcaggcuccccgggaau

SEQ ID NO: 2681140 - RNA, 19 nt, Artificial Sequence
  Description of Artificial Sequence: Synthetic oligonucleotide
ggcucagagccgcucugcu

SEQ ID NO: 2681141 - RNA, 19 nt, Artificial Sequence
  Description of Artificial Sequence: Synthetic oligonucleotide
cucugcugacaugggcaaa

SEQ ID NO: 2681142 - RNA, 19 nt, Artificial Sequence
  Description of Artificial Sequence: Synthetic oligonucleotide
gggaaucuccggccacgaa

SEQ ID NO: 2681143 - RNA, 19 nt, Artificial Sequence
  Description of Artificial Sequence: Synthetic oligonucleotide
caggaucuggucgccgacu

SEQ ID NO: 2681144 - RNA, 19 nt, Artificial Sequence
  Description of Artificial Sequence: Synthetic oligonucleotide
gcauggcucagagccgcuc

SEQ ID NO: 2681145 - RNA, 19 nt, Artificial Sequence
  Description of Artificial Sequence: Synthetic oligonucleotide
cccgggaaucuccggccac

SEQ ID NO: 2681146 - RNA, 19 nt, Artificial Sequence
  Description of Artificial Sequence: Synthetic oligonucleotide
gcugguugggauagguguu

SEQ ID NO: 2681147 - RNA, 19 nt, Artificial Sequence
  Description of Artificial Sequence: Synthetic oligonucleotide
gagcuauggccaacaccuu

SEQ ID NO: 2681148 - RNA, 19 nt, Artificial Sequence
  Description of Artificial Sequence: Synthetic oligonucleotide
cgccuuccuucuugcgaag

SEQ ID NO: 2681149 - RNA, 19 nt, Artificial Sequence
  Description of Artificial Sequence: Synthetic oligonucleotide
cagagccgcucugcucaca

SEQ ID NO: 2681150 - RNA, 19 nt, Artificial Sequence
  Description of Artificial Sequence: Synthetic oligonucleotide
cgcuggccaaaugcucugc

SEQ ID NO: 2681151 - RNA, 19 nt, Artificial Sequence
  Description of Artificial Sequence: Synthetic oligonucleotide
gcaugcgaugucccacaau

SEQ ID NO: 2681152 - RNA, 19 nt, Artificial Sequence
  Description of Artificial Sequence: Synthetic oligonucleotide
ccgagcaggcuccccggga

SEQ ID NO: 2681153 - RNA, 19 nt, Artificial Sequence
  Description of Artificial Sequence: Synthetic oligonucleotide
ggguguuccccagggcacu

SEQ ID NO: 2681154 - RNA, 19 nt, Artificial Sequence
  Description of Artificial Sequence: Synthetic oligonucleotide
ccgaugguacgggguguuc

SEQ ID NO: 2681155 - RNA, 19 nt, Artificial Sequence
  Description of Artificial Sequence: Synthetic oligonucleotide
cccgagucaucuucuggau

SEQ ID NO: 2681156 - RNA, 19 nt, Artificial Sequence
  Description of Artificial Sequence: Synthetic oligonucleotide
cccaccccacucuuguuau

SEQ ID NO: 2681157 - RNA, 19 nt, Artificial Sequence
  Description of Artificial Sequence: Synthetic oligonucleotide
ggaucuggucgccgacuuu

SEQ ID NO: 2681158 - RNA, 19 nt, Artificial Sequence
  Description of Artificial Sequence: Synthetic oligonucleotide
gcaggcuccccgggaaucu

SEQ ID NO: 2681159 - RNA, 19 nt, Artificial Sequence
  Description of Artificial Sequence: Synthetic oligonucleotide
augcagcgaggaggccgau

SEQ ID NO: 2681160 - RNA, 19 nt, Artificial Sequence
  Description of Artificial Sequence: Synthetic oligonucleotide
cgcucugcucacacaaagu

SEQ ID NO: 2681161 - RNA, 19 nt, Artificial Sequence
  Description of Artificial Sequence: Synthetic oligonucleotide
cagcgaggaggccgauggu

SEQ ID NO: 2681162 - RNA, 19 nt, Artificial Sequence
  Description of Artificial Sequence: Synthetic oligonucleotide
ccacaaugagcgcuuucuu

SEQ ID NO: 2681163 - RNA, 19 nt, Artificial Sequence
  Description of Artificial Sequence: Synthetic oligonucleotide
cacgcacccgagucaucuu

SEQ ID NO: 2681164 - RNA, 19 nt, Artificial Sequence
  Description of Artificial Sequence: Synthetic oligonucleotide
ccuucuugcgaaggcuggu

SEQ ID NO: 2681165 - RNA, 19 nt, Artificial Sequence
  Description of Artificial Sequence: Synthetic oligonucleotide
guguuccccagggcacuau

SEQ ID NO: 2681166 - RNA, 19 nt, Artificial Sequence
  Description of Artificial Sequence: Synthetic oligonucleotide
cgccgacuuuacccacccc

SEQ ID NO: 2681167 - RNA, 19 nt, Artificial Sequence
  Description of Artificial Sequence: Synthetic oligonucleotide
ccgagucaucuucuggauu

SEQ ID NO: 2681168 - RNA, 19 nt, Artificial Sequence
  Description of Artificial Sequence: Synthetic oligonucleotide
ggccgaugguacggggugu

SEQ ID NO: 2681169 - RNA, 19 nt, Artificial Sequence
  Description of Artificial Sequence: Synthetic oligonucleotide
cgacuuuacccaccccacu

SEQ ID NO: 2681170 - RNA, 19 nt, Artificial Sequence
  Description of Artificial Sequence: Synthetic oligonucleotide
cgcacccgagucaucuucu

SEQ ID NO: 2681171 - RNA, 19 nt, Artificial Sequence
  Description of Artificial Sequence: Synthetic oligonucleotide
ccacuacacgcacccgagu

SEQ ID NO: 2681172 - RNA, 19 nt, Artificial Sequence
  Description of Artificial Sequence: Synthetic oligonucleotide
gucccacaaugagcgcuuu

SEQ ID NO: 2681173 - RNA, 19 nt, Artificial Sequence
  Description of Artificial Sequence: Synthetic oligonucleotide
ccaccccacucuuguuaua

SEQ ID NO: 2681174 - RNA, 19 nt, Artificial Sequence
  Description of Artificial Sequence: Synthetic oligonucleotide
cgaggcuccuagaggugcu

SEQ ID NO: 2681175 - RNA, 19 nt, Artificial Sequence
  Description of Artificial Sequence: Synthetic oligonucleotide
cgggaaucuccggccacga

SEQ ID NO: 2681176 - RNA, 19 nt, Artificial Sequence
  Description of Artificial Sequence: Synthetic oligonucleotide
gccgaugguacgggguguu

SEQ ID NO: 2681177 - RNA, 19 nt, Artificial Sequence
  Description of Artificial Sequence: Synthetic oligonucleotide
gucaaaccuuggggucauu

SEQ ID NO: 2681178 - RNA, 19 nt, Artificial Sequence
  Description of Artificial Sequence: Synthetic oligonucleotide
ggauugcaucgaggcuccu

SEQ ID NO: 2681179 - RNA, 19 nt, Artificial Sequence
  Description of Artificial Sequence: Synthetic oligonucleotide
cccugauggccagcaggau

SEQ ID NO: 2681180 - RNA, 19 nt, Artificial Sequence
  Description of Artificial Sequence: Synthetic oligonucleotide
aaauucaucaaguagaacc

SEQ ID NO: 2681181 - RNA, 19 nt, Artificial Sequence
  Description of Artificial Sequence: Synthetic oligonucleotide
aauucuaauacauuguacc

SEQ ID NO: 2681182 - RNA, 19 nt, Artificial Sequence
  Description of Artificial Sequence: Synthetic oligonucleotide
aaaacgucaauauucaguc

SEQ ID NO: 2681183 - RNA, 19 nt, Artificial Sequence
  Description of Artificial Sequence: Synthetic oligonucleotide
aaaacauaaacuugaaaca

SEQ ID NO: 2681184 - RNA, 19 nt, Artificial Sequence
  Description of Artificial Sequence: Synthetic oligonucleotide
aaauacugaaaagagcggc

SEQ ID NO: 2681185 - RNA, 19 nt, Artificial Sequence
  Description of Artificial Sequence: Synthetic oligonucleotide
gauaaaauacugaaaagag

SEQ ID NO: 2681186 - RNA, 19 nt, Artificial Sequence
  Description of Artificial Sequence: Synthetic oligonucleotide
aauauucagucucagaaga

SEQ ID NO: 2681187 - RNA, 19 nt, Artificial Sequence
  Description of Artificial Sequence: Synthetic oligonucleotide
aacgucaauauucagucuc

SEQ ID NO: 2681188 - RNA, 19 nt, Artificial Sequence
  Description of Artificial Sequence: Synthetic oligonucleotide
ucaauauucagucucagaa

SEQ ID NO: 2681189 - RNA, 19 nt, Artificial Sequence
  Description of Artificial Sequence: Synthetic oligonucleotide
cuugcuaugauguuugacg

SEQ ID NO: 2681190 - RNA, 19 nt, Artificial Sequence
  Description of Artificial Sequence: Synthetic oligonucleotide
aucguaguuacuaagaucg

SEQ ID NO: 2681191 - RNA, 19 nt, Artificial Sequence
  Description of Artificial Sequence: Synthetic oligonucleotide
acugauaaaauacugaaaa

SEQ ID NO: 2681192 - RNA, 19 nt, Artificial Sequence
  Description of Artificial Sequence: Synthetic oligonucleotide
uauucuuaaaugaugagau

SEQ ID NO: 2681193 - RNA, 19 nt, Artificial Sequence
  Description of Artificial Sequence: Synthetic oligonucleotide
uguagauauucuuaaauga

SEQ ID NO: 2681194 - RNA, 19 nt, Artificial Sequence
  Description of Artificial Sequence: Synthetic oligonucleotide
ugauaaaauacugaaaaga

SEQ ID NO: 2681195 - RNA, 19 nt, Artificial Sequence
  Description of Artificial Sequence: Synthetic oligonucleotide
aacaaauucaucaaguaga

SEQ ID NO: 2681196 - RNA, 19 nt, Artificial Sequence
  Description of Artificial Sequence: Synthetic oligonucleotide
acuguaaugaggucauucc

SEQ ID NO: 2681197 - RNA, 19 nt, Artificial Sequence
  Description of Artificial Sequence: Synthetic oligonucleotide
uacauuguaccacugaucu

SEQ ID NO: 2681198 - RNA, 19 nt, Artificial Sequence
  Description of Artificial Sequence: Synthetic oligonucleotide
agcgcagaaaaucaaauuc

SEQ ID NO: 2681199 - RNA, 19 nt, Artificial Sequence
  Description of Artificial Sequence: Synthetic oligonucleotide
uaacucgauacuuugauug

SEQ ID NO: 2681200 - RNA, 19 nt, Artificial Sequence
  Description of Artificial Sequence: Synthetic oligonucleotide
ugucauucagcugugagcg

SEQ ID NO: 2681201 - RNA, 19 nt, Artificial Sequence
  Description of Artificial Sequence: Synthetic oligonucleotide
uauuguucugaaauaaaug

SEQ ID NO: 2681202 - RNA, 19 nt, Artificial Sequence
  Description of Artificial Sequence: Synthetic oligonucleotide
aaaugaugagaugucauuc

SEQ ID NO: 2681203 - RNA, 19 nt, Artificial Sequence
  Description of Artificial Sequence: Synthetic oligonucleotide
aguagaaccggccaagcac

SEQ ID NO: 2681204 - RNA, 19 nt, Artificial Sequence
  Description of Artificial Sequence: Synthetic oligonucleotide
aauacugaaaagagcggcc

SEQ ID NO: 2681205 - RNA, 19 nt, Artificial Sequence
  Description of Artificial Sequence: Synthetic oligonucleotide
aauaucaaggcuucucuga

SEQ ID NO: 2681206 - RNA, 19 nt, Artificial Sequence
  Description of Artificial Sequence: Synthetic oligonucleotide
aacucgauacuuugauugc

SEQ ID NO: 2681207 - RNA, 19 nt, Artificial Sequence
  Description of Artificial Sequence: Synthetic oligonucleotide
agacguguggcucagugcc

SEQ ID NO: 2681208 - RNA, 19 nt, Artificial Sequence
  Description of Artificial Sequence: Synthetic oligonucleotide
uuuucuucacaacaguucu

SEQ ID NO: 2681209 - RNA, 19 nt, Artificial Sequence
  Description of Artificial Sequence: Synthetic oligonucleotide
ucaaauucugcucuguaac

SEQ ID NO: 2681210 - RNA, 19 nt, Artificial Sequence
  Description of Artificial Sequence: Synthetic oligonucleotide
uuucugugcagucacacug

SEQ ID NO: 2681211 - RNA, 19 nt, Artificial Sequence
  Description of Artificial Sequence: Synthetic oligonucleotide
ugaaaaugcacccuuguau

SEQ ID NO: 2681212 - RNA, 19 nt, Artificial Sequence
  Description of Artificial Sequence: Synthetic oligonucleotide
uucuuaaaugaugagaugu

SEQ ID NO: 2681213 - RNA, 19 nt, Artificial Sequence
  Description of Artificial Sequence: Synthetic oligonucleotide
uuuguucauaacucgauac

SEQ ID NO: 2681214 - RNA, 19 nt, Artificial Sequence
  Description of Artificial Sequence: Synthetic oligonucleotide
gaucuuuguucauaacucg

SEQ ID NO: 2681215 - RNA, 19 nt, Artificial Sequence
  Description of Artificial Sequence: Synthetic oligonucleotide
cuuagcaguaucaauauca

SEQ ID NO: 2681216 - RNA, 19 nt, Artificial Sequence
  Description of Artificial Sequence: Synthetic oligonucleotide
uaugagaagucuuucguga

SEQ ID NO: 2681217 - RNA, 19 nt, Artificial Sequence
  Description of Artificial Sequence: Synthetic oligonucleotide
augucauucagcugugagc

SEQ ID NO: 2681218 - RNA, 19 nt, Artificial Sequence
  Description of Artificial Sequence: Synthetic oligonucleotide
cauguaacaagaaaacuuc

SEQ ID NO: 2681219 - RNA, 19 nt, Artificial Sequence
  Description of Artificial Sequence: Synthetic oligonucleotide
ugaucuuuguucauaacuc

SEQ ID NO: 2681220 - RNA, 19 nt, Artificial Sequence
  Description of Artificial Sequence: Synthetic oligonucleotide
ucuaauacauuguaccacu

SEQ ID NO: 2681221 - RNA, 19 nt, Artificial Sequence
  Description of Artificial Sequence: Synthetic oligonucleotide
uuauuguucugaaauaaau

SEQ ID NO: 2681222 - RNA, 19 nt, Artificial Sequence
  Description of Artificial Sequence: Synthetic oligonucleotide
uugcuaugauguuugacgg

SEQ ID NO: 2681223 - RNA, 19 nt, Artificial Sequence
  Description of Artificial Sequence: Synthetic oligonucleotide
aacaguucuugcuaugaug

SEQ ID NO: 2681224 - RNA, 19 nt, Artificial Sequence
  Description of Artificial Sequence: Synthetic oligonucleotide
ucuguagauauucuuaaau

SEQ ID NO: 2681225 - RNA, 19 nt, Artificial Sequence
  Description of Artificial Sequence: Synthetic oligonucleotide
uauucagucucagaagacg

SEQ ID NO: 2681226 - RNA, 19 nt, Artificial Sequence
  Description of Artificial Sequence: Synthetic oligonucleotide
aagaaguacuaugagaagu

SEQ ID NO: 2681227 - RNA, 19 nt, Artificial Sequence
  Description of Artificial Sequence: Synthetic oligonucleotide
ucuuucgugagugaaaaug

SEQ ID NO: 2681228 - RNA, 19 nt, Artificial Sequence
  Description of Artificial Sequence: Synthetic oligonucleotide
acuaagaucggcaugaacu

SEQ ID NO: 2681229 - RNA, 19 nt, Artificial Sequence
  Description of Artificial Sequence: Synthetic oligonucleotide
uguaaugaggucauucccu

SEQ ID NO: 2681230 - RNA, 19 nt, Artificial Sequence
  Description of Artificial Sequence: Synthetic oligonucleotide
ucaauaucaaggcuucucu

SEQ ID NO: 2681231 - RNA, 19 nt, Artificial Sequence
  Description of Artificial Sequence: Synthetic oligonucleotide
cuuucgugagugaaaaugc

SEQ ID NO: 2681232 - RNA, 19 nt, Artificial Sequence
  Description of Artificial Sequence: Synthetic oligonucleotide
agagcuaacauagacuuag

SEQ ID NO: 2681233 - RNA, 19 nt, Artificial Sequence
  Description of Artificial Sequence: Synthetic oligonucleotide
uucugcugaauucuaauac

SEQ ID NO: 2681234 - RNA, 19 nt, Artificial Sequence
  Description of Artificial Sequence: Synthetic oligonucleotide
uugcauuuucuucacaaca

SEQ ID NO: 2681235 - RNA, 19 nt, Artificial Sequence
  Description of Artificial Sequence: Synthetic oligonucleotide
aacaagaaaacuuccuuua

SEQ ID NO: 2681236 - RNA, 19 nt, Artificial Sequence
  Description of Artificial Sequence: Synthetic oligonucleotide
ucuguaacuuuucugugca

SEQ ID NO: 2681237 - RNA, 19 nt, Artificial Sequence
  Description of Artificial Sequence: Synthetic oligonucleotide
uacuaugagaagucuuucg

SEQ ID NO: 2681238 - RNA, 19 nt, Artificial Sequence
  Description of Artificial Sequence: Synthetic oligonucleotide
ucgugagugaaaaugcacc

SEQ ID NO: 2681239 - RNA, 19 nt, Artificial Sequence
  Description of Artificial Sequence: Synthetic oligonucleotide
aaacauaaacuugaaacaa

SEQ ID NO: 2681240 - RNA, 19 nt, Artificial Sequence
  Description of Artificial Sequence: Synthetic oligonucleotide
gauauucuuaaaugaugag

SEQ ID NO: 2681241 - RNA, 19 nt, Artificial Sequence
  Description of Artificial Sequence: Synthetic oligonucleotide
aagacguguggcucagugc

SEQ ID NO: 2681242 - RNA, 19 nt, Artificial Sequence
  Description of Artificial Sequence: Synthetic oligonucleotide
ugcucuguaacuuuucugu

SEQ ID NO: 2681243 - RNA, 19 nt, Artificial Sequence
  Description of Artificial Sequence: Synthetic oligonucleotide
ugugcagucacacuguaau

SEQ ID NO: 2681244 - RNA, 19 nt, Artificial Sequence
  Description of Artificial Sequence: Synthetic oligonucleotide
aaggcauaucuguagauau

SEQ ID NO: 2681245 - RNA, 19 nt, Artificial Sequence
  Description of Artificial Sequence: Synthetic oligonucleotide
uuuaucccuugcaaaauca

SEQ ID NO: 2681246 - RNA, 19 nt, Artificial Sequence
  Description of Artificial Sequence: Synthetic oligonucleotide
uucauaacucgauacuuug

SEQ ID NO: 2681247 - RNA, 19 nt, Artificial Sequence
  Description of Artificial Sequence: Synthetic oligonucleotide
cuguagauauucuuaaaug

SEQ ID NO: 2681248 - RNA, 19 nt, Artificial Sequence
  Description of Artificial Sequence: Synthetic oligonucleotide
ccaagcaccaucuucaucg

SEQ ID NO: 2681249 - RNA, 19 nt, Artificial Sequence
  Description of Artificial Sequence: Synthetic oligonucleotide
cuuugauugcuccagguac

SEQ ID NO: 2681250 - RNA, 19 nt, Artificial Sequence
  Description of Artificial Sequence: Synthetic oligonucleotide
ugaauucuaauacauugua

SEQ ID NO: 2681251 - RNA, 19 nt, Artificial Sequence
  Description of Artificial Sequence: Synthetic oligonucleotide
uuuucacaaaucugaaucu

SEQ ID NO: 2681252 - RNA, 19 nt, Artificial Sequence
  Description of Artificial Sequence: Synthetic oligonucleotide
uucaucguaguuacuaaga

SEQ ID NO: 2681253 - RNA, 19 nt, Artificial Sequence
  Description of Artificial Sequence: Synthetic oligonucleotide
gaaaagagcggccauguuc

SEQ ID NO: 2681254 - RNA, 19 nt, Artificial Sequence
  Description of Artificial Sequence: Synthetic oligonucleotide
uuaaaugaugagaugucau

SEQ ID NO: 2681255 - RNA, 19 nt, Artificial Sequence
  Description of Artificial Sequence: Synthetic oligonucleotide
aaaagagcggccauguucu

SEQ ID NO: 2681256 - RNA, 19 nt, Artificial Sequence
  Description of Artificial Sequence: Synthetic oligonucleotide
gcugaauucuaauacauug

SEQ ID NO: 2681257 - RNA, 19 nt, Artificial Sequence
  Description of Artificial Sequence: Synthetic oligonucleotide
auucuaauacauuguacca

SEQ ID NO: 2681258 - RNA, 19 nt, Artificial Sequence
  Description of Artificial Sequence: Synthetic oligonucleotide
uuuauuguucugaaauaaa

SEQ ID NO: 2681259 - RNA, 19 nt, Artificial Sequence
  Description of Artificial Sequence: Synthetic oligonucleotide
ugaaucuuuauuguucuga

SEQ ID NO: 2681260 - RNA, 19 nt, Artificial Sequence
  Description of Artificial Sequence: Synthetic oligonucleotide
gaugucauucagcugugag

SEQ ID NO: 2681261 - RNA, 19 nt, Artificial Sequence
  Description of Artificial Sequence: Synthetic oligonucleotide
ucaaaggcauaucuguaga

SEQ ID NO: 2681262 - RNA, 19 nt, Artificial Sequence
  Description of Artificial Sequence: Synthetic oligonucleotide
ucugcugaauucuaauaca

SEQ ID NO: 2681263 - RNA, 19 nt, Artificial Sequence
  Description of Artificial Sequence: Synthetic oligonucleotide
agagcggccauguucuccc

SEQ ID NO: 2681264 - RNA, 19 nt, Artificial Sequence
  Description of Artificial Sequence: Synthetic oligonucleotide
ugaucuuuaucccuugcaa

SEQ ID NO: 2681265 - RNA, 19 nt, Artificial Sequence
  Description of Artificial Sequence: Synthetic oligonucleotide
gcuaacauagacuuagcag

SEQ ID NO: 2681266 - RNA, 19 nt, Artificial Sequence
  Description of Artificial Sequence: Synthetic oligonucleotide
ucaucaaguagaaccggcc

SEQ ID NO: 2681267 - RNA, 19 nt, Artificial Sequence
  Description of Artificial Sequence: Synthetic oligonucleotide
uguauauccucccucuuuc

SEQ ID NO: 2681268 - RNA, 19 nt, Artificial Sequence
  Description of Artificial Sequence: Synthetic oligonucleotide
acuaugagaagucuuucgu

SEQ ID NO: 2681269 - RNA, 19 nt, Artificial Sequence
  Description of Artificial Sequence: Synthetic oligonucleotide
ucuuaaaugaugagauguc

SEQ ID NO: 2681270 - RNA, 19 nt, Artificial Sequence
  Description of Artificial Sequence: Synthetic oligonucleotide
gaugagaugucauucagcu

SEQ ID NO: 2681271 - RNA, 19 nt, Artificial Sequence
  Description of Artificial Sequence: Synthetic oligonucleotide
uucaucaaguagaaccggc

SEQ ID NO: 2681272 - RNA, 19 nt, Artificial Sequence
  Description of Artificial Sequence: Synthetic oligonucleotide
aucaaggcuucucugaucu

SEQ ID NO: 2681273 - RNA, 19 nt, Artificial Sequence
  Description of Artificial Sequence: Synthetic oligonucleotide
caauauucagucucagaag

SEQ ID NO: 2681274 - RNA, 19 nt, Artificial Sequence
  Description of Artificial Sequence: Synthetic oligonucleotide
acauagacuuagcaguauc

SEQ ID NO: 2681275 - RNA, 19 nt, Artificial Sequence
  Description of Artificial Sequence: Synthetic oligonucleotide
cuaacauagacuuagcagu

SEQ ID NO: 2681276 - RNA, 19 nt, Artificial Sequence
  Description of Artificial Sequence: Synthetic oligonucleotide
gcuucucugaucuuuaucc

SEQ ID NO: 2681277 - RNA, 19 nt, Artificial Sequence
  Description of Artificial Sequence: Synthetic oligonucleotide
uuguucauaacucgauacu

SEQ ID NO: 2681278 - RNA, 19 nt, Artificial Sequence
  Description of Artificial Sequence: Synthetic oligonucleotide
agauuugcauuuucuucac

SEQ ID NO: 2681279 - RNA, 19 nt, Artificial Sequence
  Description of Artificial Sequence: Synthetic oligonucleotide
acucaacaaauucaucaag

SEQ ID NO: 2681280 - RNA, 19 nt, Artificial Sequence
  Description of Artificial Sequence: Synthetic oligonucleotide
ugcaaaaucaaaggcauau

SEQ ID NO: 2681281 - RNA, 19 nt, Artificial Sequence
  Description of Artificial Sequence: Synthetic oligonucleotide
uguucucccaagcagcaga

SEQ ID NO: 2681282 - RNA, 19 nt, Artificial Sequence
  Description of Artificial Sequence: Synthetic oligonucleotide
aucugaaucuuuauuguuc

SEQ ID NO: 2681283 - RNA, 19 nt, Artificial Sequence
  Description of Artificial Sequence: Synthetic oligonucleotide
agaaguacuaugagaaguc

SEQ ID NO: 2681284 - RNA, 19 nt, Artificial Sequence
  Description of Artificial Sequence: Synthetic oligonucleotide
agcagcagagcuaacauag

SEQ ID NO: 2681285 - RNA, 19 nt, Artificial Sequence
  Description of Artificial Sequence: Synthetic oligonucleotide
aaaugcacccuuguauauc

SEQ ID NO: 2681286 - RNA, 19 nt, Artificial Sequence
  Description of Artificial Sequence: Synthetic oligonucleotide
cuaagaucggcaugaacug

SEQ ID NO: 2681287 - RNA, 19 nt, Artificial Sequence
  Description of Artificial Sequence: Synthetic oligonucleotide
ugaacuguucugcugaauu

SEQ ID NO: 2681288 - RNA, 19 nt, Artificial Sequence
  Description of Artificial Sequence: Synthetic oligonucleotide
uuagcaguaucaauaucaa

SEQ ID NO: 2681289 - RNA, 19 nt, Artificial Sequence
  Description of Artificial Sequence: Synthetic oligonucleotide
aucaauaucaaggcuucuc

SEQ ID NO: 2681290 - RNA, 19 nt, Artificial Sequence
  Description of Artificial Sequence: Synthetic oligonucleotide
aucacauguaacaagaaaa

SEQ ID NO: 2681291 - RNA, 19 nt, Artificial Sequence
  Description of Artificial Sequence: Synthetic oligonucleotide
uugccacucaacaaauuca

SEQ ID NO: 2681292 - RNA, 19 nt, Artificial Sequence
  Description of Artificial Sequence: Synthetic oligonucleotide
uuugauugcuccagguacu

SEQ ID NO: 2681293 - RNA, 19 nt, Artificial Sequence
  Description of Artificial Sequence: Synthetic oligonucleotide
guuacuaagaucggcauga

SEQ ID NO: 2681294 - RNA, 19 nt, Artificial Sequence
  Description of Artificial Sequence: Synthetic oligonucleotide
aaaggaaaagaaguacuau

SEQ ID NO: 2681295 - RNA, 19 nt, Artificial Sequence
  Description of Artificial Sequence: Synthetic oligonucleotide
auguaacaagaaaacuucc

SEQ ID NO: 2681296 - RNA, 19 nt, Artificial Sequence
  Description of Artificial Sequence: Synthetic oligonucleotide
augaugagaugucauucag

SEQ ID NO: 2681297 - RNA, 19 nt, Artificial Sequence
  Description of Artificial Sequence: Synthetic oligonucleotide
uaugauguuugacggauuu

SEQ ID NO: 2681298 - RNA, 19 nt, Artificial Sequence
  Description of Artificial Sequence: Synthetic oligonucleotide
uuucgugagugaaaaugca

SEQ ID NO: 2681299 - RNA, 19 nt, Artificial Sequence
  Description of Artificial Sequence: Synthetic oligonucleotide
gaaaaugcacccuuguaua

SEQ ID NO: 2681300 - RNA, 19 nt, Artificial Sequence
  Description of Artificial Sequence: Synthetic oligonucleotide
guacugauaaaauacugaa

SEQ ID NO: 2681301 - RNA, 19 nt, Artificial Sequence
  Description of Artificial Sequence: Synthetic oligonucleotide
aaaaugcacccuuguauau

SEQ ID NO: 2681302 - RNA, 19 nt, Artificial Sequence
  Description of Artificial Sequence: Synthetic oligonucleotide
uacugauaaaauacugaaa

SEQ ID NO: 2681303 - RNA, 19 nt, Artificial Sequence
  Description of Artificial Sequence: Synthetic oligonucleotide
ugcagucacacuguaauga

SEQ ID NO: 2681304 - RNA, 19 nt, Artificial Sequence
  Description of Artificial Sequence: Synthetic oligonucleotide
uaaaugaugagaugucauu

SEQ ID NO: 2681305 - RNA, 19 nt, Artificial Sequence
  Description of Artificial Sequence: Synthetic oligonucleotide
aaaaggaaaagaaguacua

SEQ ID NO: 2681306 - RNA, 19 nt, Artificial Sequence
  Description of Artificial Sequence: Synthetic oligonucleotide
agucucagaagacgugugg

SEQ ID NO: 2681307 - RNA, 19 nt, Artificial Sequence
  Description of Artificial Sequence: Synthetic oligonucleotide
ucuuuguucauaacucgau

SEQ ID NO: 2681308 - RNA, 19 nt, Artificial Sequence
  Description of Artificial Sequence: Synthetic oligonucleotide
uucgugagugaaaaugcac

SEQ ID NO: 2681309 - RNA, 19 nt, Artificial Sequence
  Description of Artificial Sequence: Synthetic oligonucleotide
uguaacuuuucugugcagu

SEQ ID NO: 2681310 - RNA, 19 nt, Artificial Sequence
  Description of Artificial Sequence: Synthetic oligonucleotide
ucuuuauuguucugaaaua

SEQ ID NO: 2681311 - RNA, 19 nt, Artificial Sequence
  Description of Artificial Sequence: Synthetic oligonucleotide
ucauaacucgauacuuuga

SEQ ID NO: 2681312 - RNA, 19 nt, Artificial Sequence
  Description of Artificial Sequence: Synthetic oligonucleotide
aggaaaagaaguacuauga

SEQ ID NO: 2681313 - RNA, 19 nt, Artificial Sequence
  Description of Artificial Sequence: Synthetic oligonucleotide
gaagacguguggcucagug

SEQ ID NO: 2681314 - RNA, 19 nt, Artificial Sequence
  Description of Artificial Sequence: Synthetic oligonucleotide
cuaugagaagucuuucgug

SEQ ID NO: 2681315 - RNA, 19 nt, Artificial Sequence
  Description of Artificial Sequence: Synthetic oligonucleotide
ucaucguaguuacuaagau

SEQ ID NO: 2681316 - RNA, 19 nt, Artificial Sequence
  Description of Artificial Sequence: Synthetic oligonucleotide
gaauucuaauacauuguac

SEQ ID NO: 2681317 - RNA, 19 nt, Artificial Sequence
  Description of Artificial Sequence: Synthetic oligonucleotide
cuguaaugaggucauuccc

SEQ ID NO: 2681318 - RNA, 19 nt, Artificial Sequence
  Description of Artificial Sequence: Synthetic oligonucleotide
ccagguacugauaaaauac

SEQ ID NO: 2681319 - RNA, 19 nt, Artificial Sequence
  Description of Artificial Sequence: Synthetic oligonucleotide
aauucugcucuguaacuuu

SEQ ID NO: 2681320 - RNA, 19 nt, Artificial Sequence
  Description of Artificial Sequence: Synthetic oligonucleotide
ggaaaagaaguacuaugag

SEQ ID NO: 2681321 - RNA, 19 nt, Artificial Sequence
  Description of Artificial Sequence: Synthetic oligonucleotide
cuucaucguaguuacuaag

SEQ ID NO: 2681322 - RNA, 19 nt, Artificial Sequence
  Description of Artificial Sequence: Synthetic oligonucleotide
ucaaguagaaccggccaag

SEQ ID NO: 2681323 - RNA, 19 nt, Artificial Sequence
  Description of Artificial Sequence: Synthetic oligonucleotide
ucgauacuuugauugcucc

SEQ ID NO: 2681324 - RNA, 19 nt, Artificial Sequence
  Description of Artificial Sequence: Synthetic oligonucleotide
aguuacuaagaucggcaug

SEQ ID NO: 2681325 - RNA, 19 nt, Artificial Sequence
  Description of Artificial Sequence: Synthetic oligonucleotide
acauguaacaagaaaacuu

SEQ ID NO: 2681326 - RNA, 19 nt, Artificial Sequence
  Description of Artificial Sequence: Synthetic oligonucleotide
aagagcggccauguucucc

SEQ ID NO: 2681327 - RNA, 19 nt, Artificial Sequence
  Description of Artificial Sequence: Synthetic oligonucleotide
aucccuugcaaaaucaaag

SEQ ID NO: 2681328 - RNA, 19 nt, Artificial Sequence
  Description of Artificial Sequence: Synthetic oligonucleotide
ugagugaaaaugcacccuu

SEQ ID NO: 2681329 - RNA, 19 nt, Artificial Sequence
  Description of Artificial Sequence: Synthetic oligonucleotide
agugaaaaugcacccuugu

SEQ ID NO: 2681330 - RNA, 19 nt, Artificial Sequence
  Description of Artificial Sequence: Synthetic oligonucleotide
uguaccacugaucuuuguu

SEQ ID NO: 2681331 - RNA, 19 nt, Artificial Sequence
  Description of Artificial Sequence: Synthetic oligonucleotide
gcaguaucaauaucaaggc

SEQ ID NO: 2681332 - RNA, 19 nt, Artificial Sequence
  Description of Artificial Sequence: Synthetic oligonucleotide
ugagcgcagaaaaucaaau

SEQ ID NO: 2681333 - RNA, 19 nt, Artificial Sequence
  Description of Artificial Sequence: Synthetic oligonucleotide
aaucaaauucugcucugua

SEQ ID NO: 2681334 - RNA, 19 nt, Artificial Sequence
  Description of Artificial Sequence: Synthetic oligonucleotide
cagaaaaucaaauucugcu

SEQ ID NO: 2681335 - RNA, 19 nt, Artificial Sequence
  Description of Artificial Sequence: Synthetic oligonucleotide
gagaagucuuucgugagug

SEQ ID NO: 2681336 - RNA, 19 nt, Artificial Sequence
  Description of Artificial Sequence: Synthetic oligonucleotide
auacuuugauugcuccagg

SEQ ID NO: 2681337 - RNA, 19 nt, Artificial Sequence
  Description of Artificial Sequence: Synthetic oligonucleotide
agcuaacauagacuuagca

SEQ ID NO: 2681338 - RNA, 19 nt, Artificial Sequence
  Description of Artificial Sequence: Synthetic oligonucleotide
augagaagucuuucgugag

SEQ ID NO: 2681339 - RNA, 19 nt, Artificial Sequence
  Description of Artificial Sequence: Synthetic oligonucleotide
uaacauagacuuagcagua

SEQ ID NO: 2681340 - RNA, 19 nt, Artificial Sequence
  Description of Artificial Sequence: Synthetic oligonucleotide
uaccacugaucuuuguuca

SEQ ID NO: 2681341 - RNA, 19 nt, Artificial Sequence
  Description of Artificial Sequence: Synthetic oligonucleotide
acuuagcaguaucaauauc

SEQ ID NO: 2681342 - RNA, 19 nt, Artificial Sequence
  Description of Artificial Sequence: Synthetic oligonucleotide
aaguagaaccggccaagca

SEQ ID NO: 2681343 - RNA, 19 nt, Artificial Sequence
  Description of Artificial Sequence: Synthetic oligonucleotide
acugaucuuuguucauaac

SEQ ID NO: 2681344 - RNA, 19 nt, Artificial Sequence
  Description of Artificial Sequence: Synthetic oligonucleotide
aacauaaacuugaaacaaa

SEQ ID NO: 2681345 - RNA, 19 nt, Artificial Sequence
  Description of Artificial Sequence: Synthetic oligonucleotide
aaaucaaauucugcucugu

SEQ ID NO: 2681346 - RNA, 19 nt, Artificial Sequence
  Description of Artificial Sequence: Synthetic oligonucleotide
uaucccuugcaaaaucaaa

SEQ ID NO: 2681347 - RNA, 19 nt, Artificial Sequence
  Description of Artificial Sequence: Synthetic oligonucleotide
aaacgucaauauucagucu

SEQ ID NO: 2681348 - RNA, 19 nt, Artificial Sequence
  Description of Artificial Sequence: Synthetic oligonucleotide
uucacaaaucugaaucuuu

SEQ ID NO: 2681349 - RNA, 19 nt, Artificial Sequence
  Description of Artificial Sequence: Synthetic oligonucleotide
ucagaagacguguggcuca

SEQ ID NO: 2681350 - RNA, 19 nt, Artificial Sequence
  Description of Artificial Sequence: Synthetic oligonucleotide
ucguaguuacuaagaucgg

SEQ ID NO: 2681351 - RNA, 19 nt, Artificial Sequence
  Description of Artificial Sequence: Synthetic oligonucleotide
uucagucucagaagacgug

SEQ ID NO: 2681352 - RNA, 19 nt, Artificial Sequence
  Description of Artificial Sequence: Synthetic oligonucleotide
uguggcucagugcccauca

SEQ ID NO: 2681353 - RNA, 19 nt, Artificial Sequence
  Description of Artificial Sequence: Synthetic oligonucleotide
aucggcaugaacuguucug

SEQ ID NO: 2681354 - RNA, 19 nt, Artificial Sequence
  Description of Artificial Sequence: Synthetic oligonucleotide
uucugaaauaaauguuaaa

SEQ ID NO: 2681355 - RNA, 19 nt, Artificial Sequence
  Description of Artificial Sequence: Synthetic oligonucleotide
gaucuuuaucccuugcaaa

SEQ ID NO: 2681356 - RNA, 19 nt, Artificial Sequence
  Description of Artificial Sequence: Synthetic oligonucleotide
aaaggcauaucuguagaua

SEQ ID NO: 2681357 - RNA, 19 nt, Artificial Sequence
  Description of Artificial Sequence: Synthetic oligonucleotide
uuaucccuugcaaaaucaa

SEQ ID NO: 2681358 - RNA, 19 nt, Artificial Sequence
  Description of Artificial Sequence: Synthetic oligonucleotide
guaguuacuaagaucggca

SEQ ID NO: 2681359 - RNA, 19 nt, Artificial Sequence
  Description of Artificial Sequence: Synthetic oligonucleotide
uguucauaacucgauacuu

SEQ ID NO: 2681360 - RNA, 19 nt, Artificial Sequence
  Description of Artificial Sequence: Synthetic oligonucleotide
ucucagaagacguguggcu

SEQ ID NO: 2681361 - RNA, 19 nt, Artificial Sequence
  Description of Artificial Sequence: Synthetic oligonucleotide
caauaucaaggcuucucug

SEQ ID NO: 2681362 - RNA, 19 nt, Artificial Sequence
  Description of Artificial Sequence: Synthetic oligonucleotide
ucauucagcugugagcgca

SEQ ID NO: 2681363 - RNA, 19 nt, Artificial Sequence
  Description of Artificial Sequence: Synthetic oligonucleotide
cuuuaucccuugcaaaauc

SEQ ID NO: 2681364 - RNA, 19 nt, Artificial Sequence
  Description of Artificial Sequence: Synthetic oligonucleotide
ugccacucaacaaauucau

SEQ ID NO: 2681365 - RNA, 19 nt, Artificial Sequence
  Description of Artificial Sequence: Synthetic oligonucleotide
caucguaguuacuaagauc

SEQ ID NO: 2681366 - RNA, 19 nt, Artificial Sequence
  Description of Artificial Sequence: Synthetic oligonucleotide
ucggcaugaacuguucugc

SEQ ID NO: 2681367 - RNA, 19 nt, Artificial Sequence
  Description of Artificial Sequence: Synthetic oligonucleotide
aaauucugcucuguaacuu

SEQ ID NO: 2681368 - RNA, 19 nt, Artificial Sequence
  Description of Artificial Sequence: Synthetic oligonucleotide
cauagacuuagcaguauca

SEQ ID NO: 2681369 - RNA, 19 nt, Artificial Sequence
  Description of Artificial Sequence: Synthetic oligonucleotide
auauucagucucagaagac

SEQ ID NO: 2681370 - RNA, 19 nt, Artificial Sequence
  Description of Artificial Sequence: Synthetic oligonucleotide
guaccacugaucuuuguuc

SEQ ID NO: 2681371 - RNA, 19 nt, Artificial Sequence
  Description of Artificial Sequence: Synthetic oligonucleotide
ucagucucagaagacgugu

SEQ ID NO: 2681372 - RNA, 19 nt, Artificial Sequence
  Description of Artificial Sequence: Synthetic oligonucleotide
caaaaucaaaggcauaucu

SEQ ID NO: 2681373 - RNA, 19 nt, Artificial Sequence
  Description of Artificial Sequence: Synthetic oligonucleotide
guaacuuuucugugcaguc

SEQ ID NO: 2681374 - RNA, 19 nt, Artificial Sequence
  Description of Artificial Sequence: Synthetic oligonucleotide
uuguauauccucccucuuu

SEQ ID NO: 2681375 - RNA, 19 nt, Artificial Sequence
  Description of Artificial Sequence: Synthetic oligonucleotide
agacuuagcaguaucaaua

SEQ ID NO: 2681376 - RNA, 19 nt, Artificial Sequence
  Description of Artificial Sequence: Synthetic oligonucleotide
uuuucugugcagucacacu

SEQ ID NO: 2681377 - RNA, 19 nt, Artificial Sequence
  Description of Artificial Sequence: Synthetic oligonucleotide
ucuucacaagauuugcauu

SEQ ID NO: 2681378 - RNA, 19 nt, Artificial Sequence
  Description of Artificial Sequence: Synthetic oligonucleotide
cuaauacauuguaccacug

SEQ ID NO: 2681379 - RNA, 19 nt, Artificial Sequence
  Description of Artificial Sequence: Synthetic oligonucleotide
cuuuauuguucugaaauaa

SEQ ID NO: 2681380 - RNA, 19 nt, Artificial Sequence
  Description of Artificial Sequence: Synthetic oligonucleotide
guagaaccggccaagcacc

SEQ ID NO: 2681381 - RNA, 19 nt, Artificial Sequence
  Description of Artificial Sequence: Synthetic oligonucleotide
cuuaaaugaugagauguca

SEQ ID NO: 2681382 - RNA, 19 nt, Artificial Sequence
  Description of Artificial Sequence: Synthetic oligonucleotide
uacuaagaucggcaugaac

SEQ ID NO: 2681383 - RNA, 19 nt, Artificial Sequence
  Description of Artificial Sequence: Synthetic oligonucleotide
aguacuaugagaagucuuu

SEQ ID NO: 2681384 - RNA, 19 nt, Artificial Sequence
  Description of Artificial Sequence: Synthetic oligonucleotide
auaucuguagauauucuua

SEQ ID NO: 2681385 - RNA, 19 nt, Artificial Sequence
  Description of Artificial Sequence: Synthetic oligonucleotide
uaguuacuaagaucggcau

SEQ ID NO: 2681386 - RNA, 19 nt, Artificial Sequence
  Description of Artificial Sequence: Synthetic oligonucleotide
gugcccaucacauguaaca

SEQ ID NO: 2681387 - RNA, 19 nt, Artificial Sequence
  Description of Artificial Sequence: Synthetic oligonucleotide
uucugugcagucacacugu

SEQ ID NO: 2681388 - RNA, 19 nt, Artificial Sequence
  Description of Artificial Sequence: Synthetic oligonucleotide
guaucaauaucaaggcuuc

SEQ ID NO: 2681389 - RNA, 19 nt, Artificial Sequence
  Description of Artificial Sequence: Synthetic oligonucleotide
ucacaagauuugcauuuuc

SEQ ID NO: 2681390 - RNA, 19 nt, Artificial Sequence
  Description of Artificial Sequence: Synthetic oligonucleotide
cucgauacuuugauugcuc

SEQ ID NO: 2681391 - RNA, 19 nt, Artificial Sequence
  Description of Artificial Sequence: Synthetic oligonucleotide
aaagagcggccauguucuc

SEQ ID NO: 2681392 - RNA, 19 nt, Artificial Sequence
  Description of Artificial Sequence: Synthetic oligonucleotide
acaaauucaucaaguagaa

SEQ ID NO: 2681393 - RNA, 19 nt, Artificial Sequence
  Description of Artificial Sequence: Synthetic oligonucleotide
acaacaguucuugcuauga

SEQ ID NO: 2681394 - RNA, 19 nt, Artificial Sequence
  Description of Artificial Sequence: Synthetic oligonucleotide
agguacugauaaaauacug

SEQ ID NO: 2681395 - RNA, 19 nt, Artificial Sequence
  Description of Artificial Sequence: Synthetic oligonucleotide
ugcuaugauguuugacgga

SEQ ID NO: 2681396 - RNA, 19 nt, Artificial Sequence
  Description of Artificial Sequence: Synthetic oligonucleotide
acugaaaagagcggccaug

SEQ ID NO: 2681397 - RNA, 19 nt, Artificial Sequence
  Description of Artificial Sequence: Synthetic oligonucleotide
auaacucgauacuuugauu

SEQ ID NO: 2681398 - RNA, 19 nt, Artificial Sequence
  Description of Artificial Sequence: Synthetic oligonucleotide
ugcugaauucuaauacauu

SEQ ID NO: 2681399 - RNA, 19 nt, Artificial Sequence
  Description of Artificial Sequence: Synthetic oligonucleotide
uuucacaaaucugaaucuu

SEQ ID NO: 2681400 - RNA, 19 nt, Artificial Sequence
  Description of Artificial Sequence: Synthetic oligonucleotide
auagacuuagcaguaucaa

SEQ ID NO: 2681401 - RNA, 19 nt, Artificial Sequence
  Description of Artificial Sequence: Synthetic oligonucleotide
auucagucucagaagacgu

SEQ ID NO: 2681402 - RNA, 19 nt, Artificial Sequence
  Description of Artificial Sequence: Synthetic oligonucleotide
gguacugauaaaauacuga

SEQ ID NO: 2681403 - RNA, 19 nt, Artificial Sequence
  Description of Artificial Sequence: Synthetic oligonucleotide
ucuuuaucccuugcaaaau

SEQ ID NO: 2681404 - RNA, 19 nt, Artificial Sequence
  Description of Artificial Sequence: Synthetic oligonucleotide
ucuugcuaugauguuugac

SEQ ID NO: 2681405 - RNA, 19 nt, Artificial Sequence
  Description of Artificial Sequence: Synthetic oligonucleotide
ucacaacaguucuugcuau

SEQ ID NO: 2681406 - RNA, 19 nt, Artificial Sequence
  Description of Artificial Sequence: Synthetic oligonucleotide
agucuuucgugagugaaaa

SEQ ID NO: 2681407 - RNA, 19 nt, Artificial Sequence
  Description of Artificial Sequence: Synthetic oligonucleotide
uggcucagugcccaucaca

SEQ ID NO: 2681408 - RNA, 19 nt, Artificial Sequence
  Description of Artificial Sequence: Synthetic oligonucleotide
augagaugucauucagcug

SEQ ID NO: 2681409 - RNA, 19 nt, Artificial Sequence
  Description of Artificial Sequence: Synthetic oligonucleotide
agcagagcuaacauagacu

SEQ ID NO: 2681410 - RNA, 19 nt, Artificial Sequence
  Description of Artificial Sequence: Synthetic oligonucleotide
caucacauguaacaagaaa

SEQ ID NO: 2681411 - RNA, 19 nt, Artificial Sequence
  Description of Artificial Sequence: Synthetic oligonucleotide
aagcagcagagcuaacaua

SEQ ID NO: 2681412 - RNA, 19 nt, Artificial Sequence
  Description of Artificial Sequence: Synthetic oligonucleotide
gucaauauucagucucaga

SEQ ID NO: 2681413 - RNA, 19 nt, Artificial Sequence
  Description of Artificial Sequence: Synthetic oligonucleotide
gucucagaagacguguggc

SEQ ID NO: 2681414 - RNA, 19 nt, Artificial Sequence
  Description of Artificial Sequence: Synthetic oligonucleotide
guaacaagaaaacuuccuu

SEQ ID NO: 2681415 - RNA, 19 nt, Artificial Sequence
  Description of Artificial Sequence: Synthetic oligonucleotide
gccauguucucccaagcag

SEQ ID NO: 2681416 - RNA, 19 nt, Artificial Sequence
  Description of Artificial Sequence: Synthetic oligonucleotide
aacauagacuuagcaguau

SEQ ID NO: 2681417 - RNA, 19 nt, Artificial Sequence
  Description of Artificial Sequence: Synthetic oligonucleotide
aguucuugcuaugauguuu

SEQ ID NO: 2681418 - RNA, 19 nt, Artificial Sequence
  Description of Artificial Sequence: Synthetic oligonucleotide
aucuuuguucauaacucga

SEQ ID NO: 2681419 - RNA, 19 nt, Artificial Sequence
  Description of Artificial Sequence: Synthetic oligonucleotide
cugcucuguaacuuuucug

SEQ ID NO: 2681420 - RNA, 19 nt, Artificial Sequence
  Description of Artificial Sequence: Synthetic oligonucleotide
aaguacuaugagaagucuu

SEQ ID NO: 2681421 - RNA, 19 nt, Artificial Sequence
  Description of Artificial Sequence: Synthetic oligonucleotide
uaucaaggcuucucugauc

SEQ ID NO: 2681422 - RNA, 19 nt, Artificial Sequence
  Description of Artificial Sequence: Synthetic oligonucleotide
uaagaucggcaugaacugu

SEQ ID NO: 2681423 - RNA, 19 nt, Artificial Sequence
  Description of Artificial Sequence: Synthetic oligonucleotide
cacccuuguauauccuccc

SEQ ID NO: 2681424 - RNA, 19 nt, Artificial Sequence
  Description of Artificial Sequence: Synthetic oligonucleotide
uugauugcuccagguacug

SEQ ID NO: 2681425 - RNA, 19 nt, Artificial Sequence
  Description of Artificial Sequence: Synthetic oligonucleotide
uacugaaaagagcggccau

SEQ ID NO: 2681426 - RNA, 19 nt, Artificial Sequence
  Description of Artificial Sequence: Synthetic oligonucleotide
cugugagcgcagaaaauca

SEQ ID NO: 2681427 - RNA, 19 nt, Artificial Sequence
  Description of Artificial Sequence: Synthetic oligonucleotide
caucaaguagaaccggcca

SEQ ID NO: 2681428 - RNA, 19 nt, Artificial Sequence
  Description of Artificial Sequence: Synthetic oligonucleotide
gaagucuuucgugagugaa

SEQ ID NO: 2681429 - RNA, 19 nt, Artificial Sequence
  Description of Artificial Sequence: Synthetic oligonucleotide
gaaccggccaagcaccauc

SEQ ID NO: 2681430 - RNA, 19 nt, Artificial Sequence
  Description of Artificial Sequence: Synthetic oligonucleotide
cacucaacaaauucaucaa

SEQ ID NO: 2681431 - RNA, 19 nt, Artificial Sequence
  Description of Artificial Sequence: Synthetic oligonucleotide
cugaauucuaauacauugu

SEQ ID NO: 2681432 - RNA, 19 nt, Artificial Sequence
  Description of Artificial Sequence: Synthetic oligonucleotide
guucugaaauaaauguuaa

SEQ ID NO: 2681433 - RNA, 19 nt, Artificial Sequence
  Description of Artificial Sequence: Synthetic oligonucleotide
gcagucacacuguaaugag

SEQ ID NO: 2681434 - RNA, 19 nt, Artificial Sequence
  Description of Artificial Sequence: Synthetic oligonucleotide
gagugaaaaugcacccuug

SEQ ID NO: 2681435 - RNA, 19 nt, Artificial Sequence
  Description of Artificial Sequence: Synthetic oligonucleotide
gauuugcauuuucuucaca

SEQ ID NO: 2681436 - RNA, 19 nt, Artificial Sequence
  Description of Artificial Sequence: Synthetic oligonucleotide
gcaugaacuguucugcuga

SEQ ID NO: 2681437 - RNA, 19 nt, Artificial Sequence
  Description of Artificial Sequence: Synthetic oligonucleotide
cugaucuuuaucccuugca

SEQ ID NO: 2681438 - RNA, 19 nt, Artificial Sequence
  Description of Artificial Sequence: Synthetic oligonucleotide
gacuuagcaguaucaauau

SEQ ID NO: 2681439 - RNA, 19 nt, Artificial Sequence
  Description of Artificial Sequence: Synthetic oligonucleotide
gcagaaaaucaaauucugc

SEQ ID NO: 2681440 - RNA, 19 nt, Artificial Sequence
  Description of Artificial Sequence: Synthetic oligonucleotide
cugaaucuuuauuguucug

SEQ ID NO: 2681441 - RNA, 19 nt, Artificial Sequence
  Description of Artificial Sequence: Synthetic oligonucleotide
acucgauacuuugauugcu

SEQ ID NO: 2681442 - RNA, 19 nt, Artificial Sequence
  Description of Artificial Sequence: Synthetic oligonucleotide
cacaacaguucuugcuaug

SEQ ID NO: 2681443 - RNA, 19 nt, Artificial Sequence
  Description of Artificial Sequence: Synthetic oligonucleotide
cauucagcugugagcgcag

SEQ ID NO: 2681444 - RNA, 19 nt, Artificial Sequence
  Description of Artificial Sequence: Synthetic oligonucleotide
uugcaaaaucaaaggcaua

SEQ ID NO: 2681445 - RNA, 19 nt, Artificial Sequence
  Description of Artificial Sequence: Synthetic oligonucleotide
aagucuuucgugagugaaa

SEQ ID NO: 2681446 - RNA, 19 nt, Artificial Sequence
  Description of Artificial Sequence: Synthetic oligonucleotide
agugcccaucacauguaac

SEQ ID NO: 2681447 - RNA, 19 nt, Artificial Sequence
  Description of Artificial Sequence: Synthetic oligonucleotide
cuucacaagauuugcauuu

SEQ ID NO: 2681448 - RNA, 19 nt, Artificial Sequence
  Description of Artificial Sequence: Synthetic oligonucleotide
cucagaagacguguggcuc

SEQ ID NO: 2681449 - RNA, 19 nt, Artificial Sequence
  Description of Artificial Sequence: Synthetic oligonucleotide
uauccucccucuuucugua

SEQ ID NO: 2681450 - RNA, 19 nt, Artificial Sequence
  Description of Artificial Sequence: Synthetic oligonucleotide
cucagugcccaucacaugu

SEQ ID NO: 2681451 - RNA, 19 nt, Artificial Sequence
  Description of Artificial Sequence: Synthetic oligonucleotide
cauaacucgauacuuugau

SEQ ID NO: 2681452 - RNA, 19 nt, Artificial Sequence
  Description of Artificial Sequence: Synthetic oligonucleotide
caaguagaaccggccaagc

SEQ ID NO: 2681453 - RNA, 19 nt, Artificial Sequence
  Description of Artificial Sequence: Synthetic oligonucleotide
guucugcugaauucuaaua

SEQ ID NO: 2681454 - RNA, 19 nt, Artificial Sequence
  Description of Artificial Sequence: Synthetic oligonucleotide
cuuuguucauaacucgaua

SEQ ID NO: 2681455 - RNA, 19 nt, Artificial Sequence
  Description of Artificial Sequence: Synthetic oligonucleotide
cuucacaacaguucuugcu

SEQ ID NO: 2681456 - RNA, 19 nt, Artificial Sequence
  Description of Artificial Sequence: Synthetic oligonucleotide
ucugugcagucacacugua

SEQ ID NO: 2681457 - RNA, 19 nt, Artificial Sequence
  Description of Artificial Sequence: Synthetic oligonucleotide
uagaaccggccaagcacca

SEQ ID NO: 2681458 - RNA, 19 nt, Artificial Sequence
  Description of Artificial Sequence: Synthetic oligonucleotide
uucagcugugagcgcagaa

SEQ ID NO: 2681459 - RNA, 19 nt, Artificial Sequence
  Description of Artificial Sequence: Synthetic oligonucleotide
cuguaacuuuucugugcag

SEQ ID NO: 2681460 - RNA, 19 nt, Artificial Sequence
  Description of Artificial Sequence: Synthetic oligonucleotide
cgugagugaaaaugcaccc

SEQ ID NO: 2681461 - RNA, 19 nt, Artificial Sequence
  Description of Artificial Sequence: Synthetic oligonucleotide
cagucucagaagacgugug

SEQ ID NO: 2681462 - RNA, 19 nt, Artificial Sequence
  Description of Artificial Sequence: Synthetic oligonucleotide
ugcccaucacauguaacaa

SEQ ID NO: 2681463 - RNA, 19 nt, Artificial Sequence
  Description of Artificial Sequence: Synthetic oligonucleotide
gugcagucacacuguaaug

SEQ ID NO: 2681464 - RNA, 19 nt, Artificial Sequence
  Description of Artificial Sequence: Synthetic oligonucleotide
ggcaugaacuguucugcug

SEQ ID NO: 2681465 - RNA, 19 nt, Artificial Sequence
  Description of Artificial Sequence: Synthetic oligonucleotide
uucuugcuaugauguuuga

SEQ ID NO: 2681466 - RNA, 19 nt, Artificial Sequence
  Description of Artificial Sequence: Synthetic oligonucleotide
agaucggcaugaacuguuc

SEQ ID NO: 2681467 - RNA, 19 nt, Artificial Sequence
  Description of Artificial Sequence: Synthetic oligonucleotide
gugaaaaugcacccuugua

SEQ ID NO: 2681468 - RNA, 19 nt, Artificial Sequence
  Description of Artificial Sequence: Synthetic oligonucleotide
cacugaucuuuguucauaa

SEQ ID NO: 2681469 - RNA, 19 nt, Artificial Sequence
  Description of Artificial Sequence: Synthetic oligonucleotide
guucucccaagcagcagag

SEQ ID NO: 2681470 - RNA, 19 nt, Artificial Sequence
  Description of Artificial Sequence: Synthetic oligonucleotide
cauuguaccacugaucuuu

SEQ ID NO: 2681471 - RNA, 19 nt, Artificial Sequence
  Description of Artificial Sequence: Synthetic oligonucleotide
guacuaugagaagucuuuc

SEQ ID NO: 2681472 - RNA, 19 nt, Artificial Sequence
  Description of Artificial Sequence: Synthetic oligonucleotide
uucacaagauuugcauuuu

SEQ ID NO: 2681473 - RNA, 19 nt, Artificial Sequence
  Description of Artificial Sequence: Synthetic oligonucleotide
cccaucacauguaacaaga

SEQ ID NO: 2681474 - RNA, 19 nt, Artificial Sequence
  Description of Artificial Sequence: Synthetic oligonucleotide
gaaguacuaugagaagucu

SEQ ID NO: 2681475 - RNA, 19 nt, Artificial Sequence
  Description of Artificial Sequence: Synthetic oligonucleotide
caaauucugcucuguaacu

SEQ ID NO: 2681476 - RNA, 19 nt, Artificial Sequence
  Description of Artificial Sequence: Synthetic oligonucleotide
gcugugagcgcagaaaauc

SEQ ID NO: 2681477 - RNA, 19 nt, Artificial Sequence
  Description of Artificial Sequence: Synthetic oligonucleotide
auuguaccacugaucuuug

SEQ ID NO: 2681478 - RNA, 19 nt, Artificial Sequence
  Description of Artificial Sequence: Synthetic oligonucleotide
gagcuaacauagacuuagc

SEQ ID NO: 2681479 - RNA, 19 nt, Artificial Sequence
  Description of Artificial Sequence: Synthetic oligonucleotide
acgucaauauucagucuca

SEQ ID NO: 2681480 - RNA, 19 nt, Artificial Sequence
  Description of Artificial Sequence: Synthetic oligonucleotide
acccuuguauauccucccu

SEQ ID NO: 2681481 - RNA, 19 nt, Artificial Sequence
  Description of Artificial Sequence: Synthetic oligonucleotide
uaaugaggucauucccuuu

SEQ ID NO: 2681482 - RNA, 19 nt, Artificial Sequence
  Description of Artificial Sequence: Synthetic oligonucleotide
aaccggccaagcaccaucu

SEQ ID NO: 2681483 - RNA, 19 nt, Artificial Sequence
  Description of Artificial Sequence: Synthetic oligonucleotide
cgcagaaaaucaaauucug

SEQ ID NO: 2681484 - RNA, 19 nt, Artificial Sequence
  Description of Artificial Sequence: Synthetic oligonucleotide
gcccaucacauguaacaag

SEQ ID NO: 2681485 - RNA, 19 nt, Artificial Sequence
  Description of Artificial Sequence: Synthetic oligonucleotide
accacugaucuuuguucau

SEQ ID NO: 2681486 - RNA, 19 nt, Artificial Sequence
  Description of Artificial Sequence: Synthetic oligonucleotide
acauuguaccacugaucuu

SEQ ID NO: 2681487 - RNA, 19 nt, Artificial Sequence
  Description of Artificial Sequence: Synthetic oligonucleotide
gucauucagcugugagcgc

SEQ ID NO: 2681488 - RNA, 19 nt, Artificial Sequence
  Description of Artificial Sequence: Synthetic oligonucleotide
aagcaccaucuucaucgua

SEQ ID NO: 2681489 - RNA, 19 nt, Artificial Sequence
  Description of Artificial Sequence: Synthetic oligonucleotide
guaaugaggucauucccuu

SEQ ID NO: 2681490 - RNA, 19 nt, Artificial Sequence
  Description of Artificial Sequence: Synthetic oligonucleotide
uuacuaagaucggcaugaa

SEQ ID NO: 2681491 - RNA, 19 nt, Artificial Sequence
  Description of Artificial Sequence: Synthetic oligonucleotide
cugcugaauucuaauacau

SEQ ID NO: 2681492 - RNA, 19 nt, Artificial Sequence
  Description of Artificial Sequence: Synthetic oligonucleotide
cguaguuacuaagaucggc

SEQ ID NO: 2681493 - RNA, 19 nt, Artificial Sequence
  Description of Artificial Sequence: Synthetic oligonucleotide
gcacccuuguauauccucc

SEQ ID NO: 2681494 - RNA, 19 nt, Artificial Sequence
  Description of Artificial Sequence: Synthetic oligonucleotide
auguucucccaagcagcag

SEQ ID NO: 2681495 - RNA, 19 nt, Artificial Sequence
  Description of Artificial Sequence: Synthetic oligonucleotide
gaucggcaugaacuguucu

SEQ ID NO: 2681496 - RNA, 19 nt, Artificial Sequence
  Description of Artificial Sequence: Synthetic oligonucleotide
cagaagacguguggcucag

SEQ ID NO: 2681497 - RNA, 19 nt, Artificial Sequence
  Description of Artificial Sequence: Synthetic oligonucleotide
cacacuguaaugaggucau

SEQ ID NO: 2681498 - RNA, 19 nt, Artificial Sequence
  Description of Artificial Sequence: Synthetic oligonucleotide
gugagcgcagaaaaucaaa

SEQ ID NO: 2681499 - RNA, 19 nt, Artificial Sequence
  Description of Artificial Sequence: Synthetic oligonucleotide
ggcuucucugaucuuuauc

SEQ ID NO: 2681500 - RNA, 19 nt, Artificial Sequence
  Description of Artificial Sequence: Synthetic oligonucleotide
cacaaaucugaaucuuuau

SEQ ID NO: 2681501 - RNA, 19 nt, Artificial Sequence
  Description of Artificial Sequence: Synthetic oligonucleotide
caugaacuguucugcugaa

SEQ ID NO: 2681502 - RNA, 19 nt, Artificial Sequence
  Description of Artificial Sequence: Synthetic oligonucleotide
auucugcucuguaacuuuu

SEQ ID NO: 2681503 - RNA, 19 nt, Artificial Sequence
  Description of Artificial Sequence: Synthetic oligonucleotide
augauguuugacggauuuu

SEQ ID NO: 2681504 - RNA, 19 nt, Artificial Sequence
  Description of Artificial Sequence: Synthetic oligonucleotide
guucauaacucgauacuuu

SEQ ID NO: 2681505 - RNA, 19 nt, Artificial Sequence
  Description of Artificial Sequence: Synthetic oligonucleotide
gcggccauguucucccaag

SEQ ID NO: 2681506 - RNA, 19 nt, Artificial Sequence
  Description of Artificial Sequence: Synthetic oligonucleotide
guauauccucccucuuucu

SEQ ID NO: 2681507 - RNA, 19 nt, Artificial Sequence
  Description of Artificial Sequence: Synthetic oligonucleotide
agaugucauucagcuguga

SEQ ID NO: 2681508 - RNA, 19 nt, Artificial Sequence
  Description of Artificial Sequence: Synthetic oligonucleotide
ggccauguucucccaagca

SEQ ID NO: 2681509 - RNA, 19 nt, Artificial Sequence
  Description of Artificial Sequence: Synthetic oligonucleotide
gugagugaaaaugcacccu

SEQ ID NO: 2681510 - RNA, 19 nt, Artificial Sequence
  Description of Artificial Sequence: Synthetic oligonucleotide
gcuaugauguuugacggau

SEQ ID NO: 2681511 - RNA, 19 nt, Artificial Sequence
  Description of Artificial Sequence: Synthetic oligonucleotide
aggcauaucuguagauauu

SEQ ID NO: 2681512 - RNA, 19 nt, Artificial Sequence
  Description of Artificial Sequence: Synthetic oligonucleotide
gcgcagaaaaucaaauucu

SEQ ID NO: 2681513 - RNA, 19 nt, Artificial Sequence
  Description of Artificial Sequence: Synthetic oligonucleotide
agcugugagcgcagaaaau

SEQ ID NO: 2681514 - RNA, 19 nt, Artificial Sequence
  Description of Artificial Sequence: Synthetic oligonucleotide
auucagcugugagcgcaga

SEQ ID NO: 2681515 - RNA, 19 nt, Artificial Sequence
  Description of Artificial Sequence: Synthetic oligonucleotide
ccuuguauauccucccucu

SEQ ID NO: 2681516 - RNA, 19 nt, Artificial Sequence
  Description of Artificial Sequence: Synthetic oligonucleotide
cuccagguacugauaaaau

SEQ ID NO: 2681517 - RNA, 19 nt, Artificial Sequence
  Description of Artificial Sequence: Synthetic oligonucleotide
cagagcuaacauagacuua

SEQ ID NO: 2681518 - RNA, 19 nt, Artificial Sequence
  Description of Artificial Sequence: Synthetic oligonucleotide
agcggccauguucucccaa

SEQ ID NO: 2681519 - RNA, 19 nt, Artificial Sequence
  Description of Artificial Sequence: Synthetic oligonucleotide
gcucagugcccaucacaug

SEQ ID NO: 2681520 - RNA, 19 nt, Artificial Sequence
  Description of Artificial Sequence: Synthetic oligonucleotide
ccggccaagcaccaucuuc

SEQ ID NO: 2681521 - RNA, 19 nt, Artificial Sequence
  Description of Artificial Sequence: Synthetic oligonucleotide
auccucccucuuucuguau

SEQ ID NO: 2681522 - RNA, 19 nt, Artificial Sequence
  Description of Artificial Sequence: Synthetic oligonucleotide
guggcucagugcccaucac

SEQ ID NO: 2681523 - RNA, 19 nt, Artificial Sequence
  Description of Artificial Sequence: Synthetic oligonucleotide
cagugcccaucacauguaa

SEQ ID NO: 2681524 - RNA, 19 nt, Artificial Sequence
  Description of Artificial Sequence: Synthetic oligonucleotide
caaggcuucucugaucuuu

SEQ ID NO: 2681525 - RNA, 19 nt, Artificial Sequence
  Description of Artificial Sequence: Synthetic oligonucleotide
cggccaagcaccaucuuca

SEQ ID NO: 2681526 - RNA, 19 nt, Artificial Sequence
  Description of Artificial Sequence: Synthetic oligonucleotide
agaaccggccaagcaccau

SEQ ID NO: 2681527 - RNA, 19 nt, Artificial Sequence
  Description of Artificial Sequence: Synthetic oligonucleotide
caagcaccaucuucaucgu

SEQ ID NO: 2681528 - RNA, 19 nt, Artificial Sequence
  Description of Artificial Sequence: Synthetic oligonucleotide
cuuguauauccucccucuu

SEQ ID NO: 2681529 - RNA, 19 nt, Artificial Sequence
  Description of Artificial Sequence: Synthetic oligonucleotide
cgauacuuugauugcucca

SEQ ID NO: 2681530 - RNA, 19 nt, Artificial Sequence
  Description of Artificial Sequence: Synthetic oligonucleotide
gccaagcaccaucuucauc

SEQ ID NO: 2681531 - RNA, 19 nt, Artificial Sequence
  Description of Artificial Sequence: Synthetic oligonucleotide
cgucaauauucagucucag

SEQ ID NO: 2681532 - RNA, 19 nt, Artificial Sequence
  Description of Artificial Sequence: Synthetic oligonucleotide
agaagacguguggcucagu

SEQ ID NO: 2681533 - RNA, 19 nt, Artificial Sequence
  Description of Artificial Sequence: Synthetic oligonucleotide
ccaucacauguaacaagaa

SEQ ID NO: 2681534 - RNA, 19 nt, Artificial Sequence
  Description of Artificial Sequence: Synthetic oligonucleotide
augcacccuuguauauccu

SEQ ID NO: 2681535 - RNA, 19 nt, Artificial Sequence
  Description of Artificial Sequence: Synthetic oligonucleotide
ggcucagugcccaucacau

SEQ ID NO: 2681536 - RNA, 19 nt, Artificial Sequence
  Description of Artificial Sequence: Synthetic oligonucleotide
gcauaucuguagauauucu

SEQ ID NO: 2681537 - RNA, 19 nt, Artificial Sequence
  Description of Artificial Sequence: Synthetic oligonucleotide
guguggcucagugcccauc

SEQ ID NO: 2681538 - RNA, 19 nt, Artificial Sequence
  Description of Artificial Sequence: Synthetic oligonucleotide
gucuuucgugagugaaaau

SEQ ID NO: 2681539 - RNA, 19 nt, Artificial Sequence
  Description of Artificial Sequence: Synthetic oligonucleotide
gagcggccauguucuccca

SEQ ID NO: 2681540 - RNA, 19 nt, Artificial Sequence
  Description of Artificial Sequence: Synthetic oligonucleotide
accggccaagcaccaucuu

SEQ ID NO: 2681541 - RNA, 19 nt, Artificial Sequence
  Description of Artificial Sequence: Synthetic oligonucleotide
cggccauguucucccaagc

SEQ ID NO: 2681542 - RNA, 19 nt, Artificial Sequence
  Description of Artificial Sequence: Synthetic oligonucleotide
ccacugaucuuuguucaua

SEQ ID NO: 2681543 - RNA, 19 nt, Artificial Sequence
  Description of Artificial Sequence: Synthetic oligonucleotide
cucccucuuucuguauuuu

SEQ ID NO: 2681544 - RNA, 19 nt, Artificial Sequence
  Description of Artificial Sequence: Synthetic oligonucleotide
cggcaugaacuguucugcu

SEQ ID NO: 2681545 - RNA, 19 nt, Artificial Sequence
  Description of Artificial Sequence: Synthetic oligonucleotide
cguguggcucagugcccau

SEQ ID NO: 2681546 - RNA, 19 nt, Artificial Sequence
  Description of Artificial Sequence: Synthetic oligonucleotide
aaacuaaagacccaaacac

SEQ ID NO: 2681547 - RNA, 19 nt, Artificial Sequence
  Description of Artificial Sequence: Synthetic oligonucleotide
aauacuguccuucagcugc

SEQ ID NO: 2681548 - RNA, 19 nt, Artificial Sequence
  Description of Artificial Sequence: Synthetic oligonucleotide
aaugcaaaacuaaagaccc

SEQ ID NO: 2681549 - RNA, 19 nt, Artificial Sequence
  Description of Artificial Sequence: Synthetic oligonucleotide
aaaugcaaaacuaaagacc

SEQ ID NO: 2681550 - RNA, 19 nt, Artificial Sequence
  Description of Artificial Sequence: Synthetic oligonucleotide
uucugauaauucaagaggg

SEQ ID NO: 2681551 - RNA, 19 nt, Artificial Sequence
  Description of Artificial Sequence: Synthetic oligonucleotide
uggaucauuaagaauaucc

SEQ ID NO: 2681552 - RNA, 19 nt, Artificial Sequence
  Description of Artificial Sequence: Synthetic oligonucleotide
aaaacuaaagacccaaaca

SEQ ID NO: 2681553 - RNA, 19 nt, Artificial Sequence
  Description of Artificial Sequence: Synthetic oligonucleotide
ugauggaucauuaagaaua

SEQ ID NO: 2681554 - RNA, 19 nt, Artificial Sequence
  Description of Artificial Sequence: Synthetic oligonucleotide
uauuccaccaucaagugug

SEQ ID NO: 2681555 - RNA, 19 nt, Artificial Sequence
  Description of Artificial Sequence: Synthetic oligonucleotide
uuugugauggaucauuaag

SEQ ID NO: 2681556 - RNA, 19 nt, Artificial Sequence
  Description of Artificial Sequence: Synthetic oligonucleotide
aagacgcugaaccugcugc

SEQ ID NO: 2681557 - RNA, 19 nt, Artificial Sequence
  Description of Artificial Sequence: Synthetic oligonucleotide
uuuucugauaauucaagag

SEQ ID NO: 2681558 - RNA, 19 nt, Artificial Sequence
  Description of Artificial Sequence: Synthetic oligonucleotide
ucuuguguacaucagacug

SEQ ID NO: 2681559 - RNA, 19 nt, Artificial Sequence
  Description of Artificial Sequence: Synthetic oligonucleotide
uuuaaucuuguguacauca

SEQ ID NO: 2681560 - RNA, 19 nt, Artificial Sequence
  Description of Artificial Sequence: Synthetic oligonucleotide
ucagaaaccaccucuaggc

SEQ ID NO: 2681561 - RNA, 19 nt, Artificial Sequence
  Description of Artificial Sequence: Synthetic oligonucleotide
aagaauauccucaaaacca

SEQ ID NO: 2681562 - RNA, 19 nt, Artificial Sequence
  Description of Artificial Sequence: Synthetic oligonucleotide
acagguuugagcuuggaag

SEQ ID NO: 2681563 - RNA, 19 nt, Artificial Sequence
  Description of Artificial Sequence: Synthetic oligonucleotide
uuaagaauauccucaaaac

SEQ ID NO: 2681564 - RNA, 19 nt, Artificial Sequence
  Description of Artificial Sequence: Synthetic oligonucleotide
aaucuuguguacaucagac

SEQ ID NO: 2681565 - RNA, 19 nt, Artificial Sequence
  Description of Artificial Sequence: Synthetic oligonucleotide
uccaucuguaacuucaggg

SEQ ID NO: 2681566 - RNA, 19 nt, Artificial Sequence
  Description of Artificial Sequence: Synthetic oligonucleotide
ucaacuaaaugcaaaacua

SEQ ID NO: 2681567 - RNA, 19 nt, Artificial Sequence
  Description of Artificial Sequence: Synthetic oligonucleotide
acagaagaaaacccuuucc

SEQ ID NO: 2681568 - RNA, 19 nt, Artificial Sequence
  Description of Artificial Sequence: Synthetic oligonucleotide
agaagaaaacccuuuccgg

SEQ ID NO: 2681569 - RNA, 19 nt, Artificial Sequence
  Description of Artificial Sequence: Synthetic oligonucleotide
ugauaauucaagaggguga

SEQ ID NO: 2681570 - RNA, 19 nt, Artificial Sequence
  Description of Artificial Sequence: Synthetic oligonucleotide
uaaagacccaaacacuucc

SEQ ID NO: 2681571 - RNA, 19 nt, Artificial Sequence
  Description of Artificial Sequence: Synthetic oligonucleotide
aauucaagagggugacugg

SEQ ID NO: 2681572 - RNA, 19 nt, Artificial Sequence
  Description of Artificial Sequence: Synthetic oligonucleotide
agcaaaggcaaccacaaug

SEQ ID NO: 2681573 - RNA, 19 nt, Artificial Sequence
  Description of Artificial Sequence: Synthetic oligonucleotide
cagaagaaaacccuuuccg

SEQ ID NO: 2681574 - RNA, 19 nt, Artificial Sequence
  Description of Artificial Sequence: Synthetic oligonucleotide
uaauucaagagggugacug

SEQ ID NO: 2681575 - RNA, 19 nt, Artificial Sequence
  Description of Artificial Sequence: Synthetic oligonucleotide
ucauuucacuuugugaugg

SEQ ID NO: 2681576 - RNA, 19 nt, Artificial Sequence
  Description of Artificial Sequence: Synthetic oligonucleotide
aaaggcaaccacaaugcac

SEQ ID NO: 2681577 - RNA, 19 nt, Artificial Sequence
  Description of Artificial Sequence: Synthetic oligonucleotide
gaaaaguucaucuuguccu

SEQ ID NO: 2681578 - RNA, 19 nt, Artificial Sequence
  Description of Artificial Sequence: Synthetic oligonucleotide
ugucaguucuuuaaucuug

SEQ ID NO: 2681579 - RNA, 19 nt, Artificial Sequence
  Description of Artificial Sequence: Synthetic oligonucleotide
uggaauacuguccuucagc

SEQ ID NO: 2681580 - RNA, 19 nt, Artificial Sequence
  Description of Artificial Sequence: Synthetic oligonucleotide
uuucaacugacucaacuaa

SEQ ID NO: 2681581 - RNA, 19 nt, Artificial Sequence
  Description of Artificial Sequence: Synthetic oligonucleotide
aagugauccugucaguucu

SEQ ID NO: 2681582 - RNA, 19 nt, Artificial Sequence
  Description of Artificial Sequence: Synthetic oligonucleotide
auggucucaucauugcccc

SEQ ID NO: 2681583 - RNA, 19 nt, Artificial Sequence
  Description of Artificial Sequence: Synthetic oligonucleotide
uuaaucuuguguacaucag

SEQ ID NO: 2681584 - RNA, 19 nt, Artificial Sequence
  Description of Artificial Sequence: Synthetic oligonucleotide
acuaaaugcaaaacuaaag

SEQ ID NO: 2681585 - RNA, 19 nt, Artificial Sequence
  Description of Artificial Sequence: Synthetic oligonucleotide
uccucaaaaccaauggucu

SEQ ID NO: 2681586 - RNA, 19 nt, Artificial Sequence
  Description of Artificial Sequence: Synthetic oligonucleotide
ucaucauugccccucaaaa

SEQ ID NO: 2681587 - RNA, 19 nt, Artificial Sequence
  Description of Artificial Sequence: Synthetic oligonucleotide
uuccaaauauccaagugau

SEQ ID NO: 2681588 - RNA, 19 nt, Artificial Sequence
  Description of Artificial Sequence: Synthetic oligonucleotide
uugaacuccaucuguaacu

SEQ ID NO: 2681589 - RNA, 19 nt, Artificial Sequence
  Description of Artificial Sequence: Synthetic oligonucleotide
uggaaggaauggaagacgc

SEQ ID NO: 2681590 - RNA, 19 nt, Artificial Sequence
  Description of Artificial Sequence: Synthetic oligonucleotide
caggggagcaaacagaccc

SEQ ID NO: 2681591 - RNA, 19 nt, Artificial Sequence
  Description of Artificial Sequence: Synthetic oligonucleotide
aauggaagacgcugaaccu

SEQ ID NO: 2681592 - RNA, 19 nt, Artificial Sequence
  Description of Artificial Sequence: Synthetic oligonucleotide
ugugauggaucauuaagaa

SEQ ID NO: 2681593 - RNA, 19 nt, Artificial Sequence
  Description of Artificial Sequence: Synthetic oligonucleotide
aaggcaaccacaaugcacu

SEQ ID NO: 2681594 - RNA, 19 nt, Artificial Sequence
  Description of Artificial Sequence: Synthetic oligonucleotide
aaauauccaagugauccug

SEQ ID NO: 2681595 - RNA, 19 nt, Artificial Sequence
  Description of Artificial Sequence: Synthetic oligonucleotide
uggauguuccucagggugg

SEQ ID NO: 2681596 - RNA, 19 nt, Artificial Sequence
  Description of Artificial Sequence: Synthetic oligonucleotide
gaagaaaacccuuuccgga

SEQ ID NO: 2681597 - RNA, 19 nt, Artificial Sequence
  Description of Artificial Sequence: Synthetic oligonucleotide
cagguuugagcuuggaagg

SEQ ID NO: 2681598 - RNA, 19 nt, Artificial Sequence
  Description of Artificial Sequence: Synthetic oligonucleotide
uauauuccaccaucaagug

SEQ ID NO: 2681599 - RNA, 19 nt, Artificial Sequence
  Description of Artificial Sequence: Synthetic oligonucleotide
ucuuggaaacagcucugcg

SEQ ID NO: 2681600 - RNA, 19 nt, Artificial Sequence
  Description of Artificial Sequence: Synthetic oligonucleotide
ugucacuggaauacugucc

SEQ ID NO: 2681601 - RNA, 19 nt, Artificial Sequence
  Description of Artificial Sequence: Synthetic oligonucleotide
ccaaauauccaagugaucc

SEQ ID NO: 2681602 - RNA, 19 nt, Artificial Sequence
  Description of Artificial Sequence: Synthetic oligonucleotide
uucaggggagcaaacagac

SEQ ID NO: 2681603 - RNA, 19 nt, Artificial Sequence
  Description of Artificial Sequence: Synthetic oligonucleotide
gaaggaauggaagacgcug

SEQ ID NO: 2681604 - RNA, 19 nt, Artificial Sequence
  Description of Artificial Sequence: Synthetic oligonucleotide
agcucugucacuggaauac

SEQ ID NO: 2681605 - RNA, 19 nt, Artificial Sequence
  Description of Artificial Sequence: Synthetic oligonucleotide
agcaaacagacccuggaug

SEQ ID NO: 2681606 - RNA, 19 nt, Artificial Sequence
  Description of Artificial Sequence: Synthetic oligonucleotide
uccagugacagguuugagc

SEQ ID NO: 2681607 - RNA, 19 nt, Artificial Sequence
  Description of Artificial Sequence: Synthetic oligonucleotide
gauaauucaagagggugac

SEQ ID NO: 2681608 - RNA, 19 nt, Artificial Sequence
  Description of Artificial Sequence: Synthetic oligonucleotide
ucaugacucucgaagggcc

SEQ ID NO: 2681609 - RNA, 19 nt, Artificial Sequence
  Description of Artificial Sequence: Synthetic oligonucleotide
uuggaaggaauggaagacg

SEQ ID NO: 2681610 - RNA, 19 nt, Artificial Sequence
  Description of Artificial Sequence: Synthetic oligonucleotide
acuuccaaauauccaagug

SEQ ID NO: 2681611 - RNA, 19 nt, Artificial Sequence
  Description of Artificial Sequence: Synthetic oligonucleotide
accacaaugcacuucugug

SEQ ID NO: 2681612 - RNA, 19 nt, Artificial Sequence
  Description of Artificial Sequence: Synthetic oligonucleotide
aauauccagugacagguuu

SEQ ID NO: 2681613 - RNA, 19 nt, Artificial Sequence
  Description of Artificial Sequence: Synthetic oligonucleotide
aggucaugacucucgaagg

SEQ ID NO: 2681614 - RNA, 19 nt, Artificial Sequence
  Description of Artificial Sequence: Synthetic oligonucleotide
ucaacugacucaacuaaau

SEQ ID NO: 2681615 - RNA, 19 nt, Artificial Sequence
  Description of Artificial Sequence: Synthetic oligonucleotide
auccucaaaaccaaugguc

SEQ ID NO: 2681616 - RNA, 19 nt, Artificial Sequence
  Description of Artificial Sequence: Synthetic oligonucleotide
cuuccaaauauccaaguga

SEQ ID NO: 2681617 - RNA, 19 nt, Artificial Sequence
  Description of Artificial Sequence: Synthetic oligonucleotide
ucugauaauucaagagggu

SEQ ID NO: 2681618 - RNA, 19 nt, Artificial Sequence
  Description of Artificial Sequence: Synthetic oligonucleotide
ucauuaagaauauccucaa

SEQ ID NO: 2681619 - RNA, 19 nt, Artificial Sequence
  Description of Artificial Sequence: Synthetic oligonucleotide
aaccacaaugcacuucugu

SEQ ID NO: 2681620 - RNA, 19 nt, Artificial Sequence
  Description of Artificial Sequence: Synthetic oligonucleotide
aacuccaucuguaacuuca

SEQ ID NO: 2681621 - RNA, 19 nt, Artificial Sequence
  Description of Artificial Sequence: Synthetic oligonucleotide
auugccccucaaaauaucc

SEQ ID NO: 2681622 - RNA, 19 nt, Artificial Sequence
  Description of Artificial Sequence: Synthetic oligonucleotide
aacuaaaugcaaaacuaaa

SEQ ID NO: 2681623 - RNA, 19 nt, Artificial Sequence
  Description of Artificial Sequence: Synthetic oligonucleotide
acucaacuaaaugcaaaac

SEQ ID NO: 2681624 - RNA, 19 nt, Artificial Sequence
  Description of Artificial Sequence: Synthetic oligonucleotide
ucaagagggugacugggca

SEQ ID NO: 2681625 - RNA, 19 nt, Artificial Sequence
  Description of Artificial Sequence: Synthetic oligonucleotide
uauccaagugauccuguca

SEQ ID NO: 2681626 - RNA, 19 nt, Artificial Sequence
  Description of Artificial Sequence: Synthetic oligonucleotide
aacuaaagacccaaacacu

SEQ ID NO: 2681627 - RNA, 19 nt, Artificial Sequence
  Description of Artificial Sequence: Synthetic oligonucleotide
aucauugccccucaaaaua

SEQ ID NO: 2681628 - RNA, 19 nt, Artificial Sequence
  Description of Artificial Sequence: Synthetic oligonucleotide
ugcacuucuguguuccugc

SEQ ID NO: 2681629 - RNA, 19 nt, Artificial Sequence
  Description of Artificial Sequence: Synthetic oligonucleotide
gagaaggucaugacucucg

SEQ ID NO: 2681630 - RNA, 19 nt, Artificial Sequence
  Description of Artificial Sequence: Synthetic oligonucleotide
ucugcgaaagccucucagc

SEQ ID NO: 2681631 - RNA, 19 nt, Artificial Sequence
  Description of Artificial Sequence: Synthetic oligonucleotide
cugauaauucaagagggug

SEQ ID NO: 2681632 - RNA, 19 nt, Artificial Sequence
  Description of Artificial Sequence: Synthetic oligonucleotide
uguccuucagcugcgaccc

SEQ ID NO: 2681633 - RNA, 19 nt, Artificial Sequence
  Description of Artificial Sequence: Synthetic oligonucleotide
acugacucaacuaaaugca

SEQ ID NO: 2681634 - RNA, 19 nt, Artificial Sequence
  Description of Artificial Sequence: Synthetic oligonucleotide
uucuuuaaucuuguguaca

SEQ ID NO: 2681635 - RNA, 19 nt, Artificial Sequence
  Description of Artificial Sequence: Synthetic oligonucleotide
acggccuugaacuccaucu

SEQ ID NO: 2681636 - RNA, 19 nt, Artificial Sequence
  Description of Artificial Sequence: Synthetic oligonucleotide
auauccaagugauccuguc

SEQ ID NO: 2681637 - RNA, 19 nt, Artificial Sequence
  Description of Artificial Sequence: Synthetic oligonucleotide
uucagcugcgacccaaggc

SEQ ID NO: 2681638 - RNA, 19 nt, Artificial Sequence
  Description of Artificial Sequence: Synthetic oligonucleotide
ugcaaaacuaaagacccaa

SEQ ID NO: 2681639 - RNA, 19 nt, Artificial Sequence
  Description of Artificial Sequence: Synthetic oligonucleotide
ugacucaacuaaaugcaaa

SEQ ID NO: 2681640 - RNA, 19 nt, Artificial Sequence
  Description of Artificial Sequence: Synthetic oligonucleotide
auucaagagggugacuggg

SEQ ID NO: 2681641 - RNA, 19 nt, Artificial Sequence
  Description of Artificial Sequence: Synthetic oligonucleotide
cuggauguuccucagggug

SEQ ID NO: 2681642 - RNA, 19 nt, Artificial Sequence
  Description of Artificial Sequence: Synthetic oligonucleotide
aucauuucacuuugugaug

SEQ ID NO: 2681643 - RNA, 19 nt, Artificial Sequence
  Description of Artificial Sequence: Synthetic oligonucleotide
cuggcauucaucuuggaaa

SEQ ID NO: 2681644 - RNA, 19 nt, Artificial Sequence
  Description of Artificial Sequence: Synthetic oligonucleotide
uccaccaucaaguguggcu

SEQ ID NO: 2681645 - RNA, 19 nt, Artificial Sequence
  Description of Artificial Sequence: Synthetic oligonucleotide
uucacagaagaaaacccuu

SEQ ID NO: 2681646 - RNA, 19 nt, Artificial Sequence
  Description of Artificial Sequence: Synthetic oligonucleotide
uucaacugacucaacuaaa

SEQ ID NO: 2681647 - RNA, 19 nt, Artificial Sequence
  Description of Artificial Sequence: Synthetic oligonucleotide
uggcauucaucuuggaaac

SEQ ID NO: 2681648 - RNA, 19 nt, Artificial Sequence
  Description of Artificial Sequence: Synthetic oligonucleotide
uucaagagggugacugggc

SEQ ID NO: 2681649 - RNA, 19 nt, Artificial Sequence
  Description of Artificial Sequence: Synthetic oligonucleotide
cuaggcuuucaacugacuc

SEQ ID NO: 2681650 - RNA, 19 nt, Artificial Sequence
  Description of Artificial Sequence: Synthetic oligonucleotide
cauucaucuuggaaacagc

SEQ ID NO: 2681651 - RNA, 19 nt, Artificial Sequence
  Description of Artificial Sequence: Synthetic oligonucleotide
ugcaucacagcaagcccag

SEQ ID NO: 2681652 - RNA, 19 nt, Artificial Sequence
  Description of Artificial Sequence: Synthetic oligonucleotide
gauccugucaguucuuuaa

SEQ ID NO: 2681653 - RNA, 19 nt, Artificial Sequence
  Description of Artificial Sequence: Synthetic oligonucleotide
uacaucagacuguagcaaa

SEQ ID NO: 2681654 - RNA, 19 nt, Artificial Sequence
  Description of Artificial Sequence: Synthetic oligonucleotide
ccaucuguaacuucagggg

SEQ ID NO: 2681655 - RNA, 19 nt, Artificial Sequence
  Description of Artificial Sequence: Synthetic oligonucleotide
cugcgaaagccucucagcc

SEQ ID NO: 2681656 - RNA, 19 nt, Artificial Sequence
  Description of Artificial Sequence: Synthetic oligonucleotide
uuuccggagaaggucauga

SEQ ID NO: 2681657 - RNA, 19 nt, Artificial Sequence
  Description of Artificial Sequence: Synthetic oligonucleotide
uccggagaaggucaugacu

SEQ ID NO: 2681658 - RNA, 19 nt, Artificial Sequence
  Description of Artificial Sequence: Synthetic oligonucleotide
ucauugccccucaaaauau

SEQ ID NO: 2681659 - RNA, 19 nt, Artificial Sequence
  Description of Artificial Sequence: Synthetic oligonucleotide
aaguucaucuuguccuggu

SEQ ID NO: 2681660 - RNA, 19 nt, Artificial Sequence
  Description of Artificial Sequence: Synthetic oligonucleotide
cuaaagacccaaacacuuc

SEQ ID NO: 2681661 - RNA, 19 nt, Artificial Sequence
  Description of Artificial Sequence: Synthetic oligonucleotide
accucuaggcuuucaacug

SEQ ID NO: 2681662 - RNA, 19 nt, Artificial Sequence
  Description of Artificial Sequence: Synthetic oligonucleotide
guucuuuaaucuuguguac

SEQ ID NO: 2681663 - RNA, 19 nt, Artificial Sequence
  Description of Artificial Sequence: Synthetic oligonucleotide
uguggcucgcccaucauuu

SEQ ID NO: 2681664 - RNA, 19 nt, Artificial Sequence
  Description of Artificial Sequence: Synthetic oligonucleotide
cuguccuucagcugcgacc

SEQ ID NO: 2681665 - RNA, 19 nt, Artificial Sequence
  Description of Artificial Sequence: Synthetic oligonucleotide
auauuccaccaucaagugu

SEQ ID NO: 2681666 - RNA, 19 nt, Artificial Sequence
  Description of Artificial Sequence: Synthetic oligonucleotide
cucucagcccgcuauaguc

SEQ ID NO: 2681667 - RNA, 19 nt, Artificial Sequence
  Description of Artificial Sequence: Synthetic oligonucleotide
gaauacuguccuucagcug

SEQ ID NO: 2681668 - RNA, 19 nt, Artificial Sequence
  Description of Artificial Sequence: Synthetic oligonucleotide
ccucaaaauauccagugac

SEQ ID NO: 2681669 - RNA, 19 nt, Artificial Sequence
  Description of Artificial Sequence: Synthetic oligonucleotide
acuaaagacccaaacacuu

SEQ ID NO: 2681670 - RNA, 19 nt, Artificial Sequence
  Description of Artificial Sequence: Synthetic oligonucleotide
caacugacucaacuaaaug

SEQ ID NO: 2681671 - RNA, 19 nt, Artificial Sequence
  Description of Artificial Sequence: Synthetic oligonucleotide
ugcgaaagccucucagccc

SEQ ID NO: 2681672 - RNA, 19 nt, Artificial Sequence
  Description of Artificial Sequence: Synthetic oligonucleotide
caacuaaaugcaaaacuaa

SEQ ID NO: 2681673 - RNA, 19 nt, Artificial Sequence
  Description of Artificial Sequence: Synthetic oligonucleotide
cucaacuaaaugcaaaacu

SEQ ID NO: 2681674 - RNA, 19 nt, Artificial Sequence
  Description of Artificial Sequence: Synthetic oligonucleotide
ugaaccugcugcacggccu

SEQ ID NO: 2681675 - RNA, 19 nt, Artificial Sequence
  Description of Artificial Sequence: Synthetic oligonucleotide
aaggaauggaagacgcuga

SEQ ID NO: 2681676 - RNA, 19 nt, Artificial Sequence
  Description of Artificial Sequence: Synthetic oligonucleotide
ucuguaacuucaggggagc

SEQ ID NO: 2681677 - RNA, 19 nt, Artificial Sequence
  Description of Artificial Sequence: Synthetic oligonucleotide
aauauccaagugauccugu

SEQ ID NO: 2681678 - RNA, 19 nt, Artificial Sequence
  Description of Artificial Sequence: Synthetic oligonucleotide
aaccaauggucucaucauu

SEQ ID NO: 2681679 - RNA, 19 nt, Artificial Sequence
  Description of Artificial Sequence: Synthetic oligonucleotide
caucagacuguagcaaagg

SEQ ID NO: 2681680 - RNA, 19 nt, Artificial Sequence
  Description of Artificial Sequence: Synthetic oligonucleotide
ggucaugacucucgaaggg

SEQ ID NO: 2681681 - RNA, 19 nt, Artificial Sequence
  Description of Artificial Sequence: Synthetic oligonucleotide
gcgaaagccucucagcccg

SEQ ID NO: 2681682 - RNA, 19 nt, Artificial Sequence
  Description of Artificial Sequence: Synthetic oligonucleotide
guuccugcacagcagcacc

SEQ ID NO: 2681683 - RNA, 19 nt, Artificial Sequence
  Description of Artificial Sequence: Synthetic oligonucleotide
aucuuguguacaucagacu

SEQ ID NO: 2681684 - RNA, 19 nt, Artificial Sequence
  Description of Artificial Sequence: Synthetic oligonucleotide
ucaaguguggcucgcccau

SEQ ID NO: 2681685 - RNA, 19 nt, Artificial Sequence
  Description of Artificial Sequence: Synthetic oligonucleotide
uugccccucaaaauaucca

SEQ ID NO: 2681686 - RNA, 19 nt, Artificial Sequence
  Description of Artificial Sequence: Synthetic oligonucleotide
aacuucaggggagcaaaca

SEQ ID NO: 2681687 - RNA, 19 nt, Artificial Sequence
  Description of Artificial Sequence: Synthetic oligonucleotide
uauccagugacagguuuga

SEQ ID NO: 2681688 - RNA, 19 nt, Artificial Sequence
  Description of Artificial Sequence: Synthetic oligonucleotide
gcaaaggcaaccacaaugc

SEQ ID NO: 2681689 - RNA, 19 nt, Artificial Sequence
  Description of Artificial Sequence: Synthetic oligonucleotide
ucucgaagggcccgcuugc

SEQ ID NO: 2681690 - RNA, 19 nt, Artificial Sequence
  Description of Artificial Sequence: Synthetic oligonucleotide
cagcuuauauuccaccauc

SEQ ID NO: 2681691 - RNA, 19 nt, Artificial Sequence
  Description of Artificial Sequence: Synthetic oligonucleotide
cuuucaacugacucaacua

SEQ ID NO: 2681692 - RNA, 19 nt, Artificial Sequence
  Description of Artificial Sequence: Synthetic oligonucleotide
accaauggucucaucauug

SEQ ID NO: 2681693 - RNA, 19 nt, Artificial Sequence
  Description of Artificial Sequence: Synthetic oligonucleotide
ucaguucuuuaaucuugug

SEQ ID NO: 2681694 - RNA, 19 nt, Artificial Sequence
  Description of Artificial Sequence: Synthetic oligonucleotide
agagcucugucacuggaau

SEQ ID NO: 2681695 - RNA, 19 nt, Artificial Sequence
  Description of Artificial Sequence: Synthetic oligonucleotide
agaauauccucaaaaccaa

SEQ ID NO: 2681696 - RNA, 19 nt, Artificial Sequence
  Description of Artificial Sequence: Synthetic oligonucleotide
caucaaguguggcucgccc

SEQ ID NO: 2681697 - RNA, 19 nt, Artificial Sequence
  Description of Artificial Sequence: Synthetic oligonucleotide
cucagcccgcuauagucgg

SEQ ID NO: 2681698 - RNA, 19 nt, Artificial Sequence
  Description of Artificial Sequence: Synthetic oligonucleotide
uccaaauauccaagugauc

SEQ ID NO: 2681699 - RNA, 19 nt, Artificial Sequence
  Description of Artificial Sequence: Synthetic oligonucleotide
agacccuggauguuccuca

SEQ ID NO: 2681700 - RNA, 19 nt, Artificial Sequence
  Description of Artificial Sequence: Synthetic oligonucleotide
uguguacaucagacuguag

SEQ ID NO: 2681701 - RNA, 19 nt, Artificial Sequence
  Description of Artificial Sequence: Synthetic oligonucleotide
agaaggucaugacucucga

SEQ ID NO: 2681702 - RNA, 19 nt, Artificial Sequence
  Description of Artificial Sequence: Synthetic oligonucleotide
gaagacgcugaaccugcug

SEQ ID NO: 2681703 - RNA, 19 nt, Artificial Sequence
  Description of Artificial Sequence: Synthetic oligonucleotide
uggaaaaguucaucuuguc

SEQ ID NO: 2681704 - RNA, 19 nt, Artificial Sequence
  Description of Artificial Sequence: Synthetic oligonucleotide
auggaagacgcugaaccug

SEQ ID NO: 2681705 - RNA, 19 nt, Artificial Sequence
  Description of Artificial Sequence: Synthetic oligonucleotide
aagccucucagcccgcuau

SEQ ID NO: 2681706 - RNA, 19 nt, Artificial Sequence
  Description of Artificial Sequence: Synthetic oligonucleotide
acgcugaaccugcugcacg

SEQ ID NO: 2681707 - RNA, 19 nt, Artificial Sequence
  Description of Artificial Sequence: Synthetic oligonucleotide
caucuuggaaacagcucug

SEQ ID NO: 2681708 - RNA, 19 nt, Artificial Sequence
  Description of Artificial Sequence: Synthetic oligonucleotide
cucugcgaaagccucucag

SEQ ID NO: 2681709 - RNA, 19 nt, Artificial Sequence
  Description of Artificial Sequence: Synthetic oligonucleotide
ucaggggagcaaacagacc

SEQ ID NO: 2681710 - RNA, 19 nt, Artificial Sequence
  Description of Artificial Sequence: Synthetic oligonucleotide
uguaacuucaggggagcaa

SEQ ID NO: 2681711 - RNA, 19 nt, Artificial Sequence
  Description of Artificial Sequence: Synthetic oligonucleotide
caucuguaacuucagggga

SEQ ID NO: 2681712 - RNA, 19 nt, Artificial Sequence
  Description of Artificial Sequence: Synthetic oligonucleotide
aaagacccaaacacuucca

SEQ ID NO: 2681713 - RNA, 19 nt, Artificial Sequence
  Description of Artificial Sequence: Synthetic oligonucleotide
gcauucaucuuggaaacag

SEQ ID NO: 2681714 - RNA, 19 nt, Artificial Sequence
  Description of Artificial Sequence: Synthetic oligonucleotide
acacuuccaaauauccaag

SEQ ID NO: 2681715 - RNA, 19 nt, Artificial Sequence
  Description of Artificial Sequence: Synthetic oligonucleotide
cugucacuggaauacuguc

SEQ ID NO: 2681716 - RNA, 19 nt, Artificial Sequence
  Description of Artificial Sequence: Synthetic oligonucleotide
agcuuggaaggaauggaag

SEQ ID NO: 2681717 - RNA, 19 nt, Artificial Sequence
  Description of Artificial Sequence: Synthetic oligonucleotide
cucugucacuggaauacug

SEQ ID NO: 2681718 - RNA, 19 nt, Artificial Sequence
  Description of Artificial Sequence: Synthetic oligonucleotide
acagcucugcgaaagccuc

SEQ ID NO: 2681719 - RNA, 19 nt, Artificial Sequence
  Description of Artificial Sequence: Synthetic oligonucleotide
cuucuguguuccugcacag

SEQ ID NO: 2681720 - RNA, 19 nt, Artificial Sequence
  Description of Artificial Sequence: Synthetic oligonucleotide
aucaaguguggcucgccca

SEQ ID NO: 2681721 - RNA, 19 nt, Artificial Sequence
  Description of Artificial Sequence: Synthetic oligonucleotide
acaucagacuguagcaaag

SEQ ID NO: 2681722 - RNA, 19 nt, Artificial Sequence
  Description of Artificial Sequence: Synthetic oligonucleotide
cucuaggcuuucaacugac

SEQ ID NO: 2681723 - RNA, 19 nt, Artificial Sequence
  Description of Artificial Sequence: Synthetic oligonucleotide
cuccaucuguaacuucagg

SEQ ID NO: 2681724 - RNA, 19 nt, Artificial Sequence
  Description of Artificial Sequence: Synthetic oligonucleotide
ugaacuccaucuguaacuu

SEQ ID NO: 2681725 - RNA, 19 nt, Artificial Sequence
  Description of Artificial Sequence: Synthetic oligonucleotide
aaugcacuucuguguuccu

SEQ ID NO: 2681726 - RNA, 19 nt, Artificial Sequence
  Description of Artificial Sequence: Synthetic oligonucleotide
gucaugacucucgaagggc

SEQ ID NO: 2681727 - RNA, 19 nt, Artificial Sequence
  Description of Artificial Sequence: Synthetic oligonucleotide
guagcaaaggcaaccacaa

SEQ ID NO: 2681728 - RNA, 19 nt, Artificial Sequence
  Description of Artificial Sequence: Synthetic oligonucleotide
ucuaggcuuucaacugacu

SEQ ID NO: 2681729 - RNA, 19 nt, Artificial Sequence
  Description of Artificial Sequence: Synthetic oligonucleotide
gucacuggaauacuguccu

SEQ ID NO: 2681730 - RNA, 19 nt, Artificial Sequence
  Description of Artificial Sequence: Synthetic oligonucleotide
uggcucgcccaucauuuca

SEQ ID NO: 2681731 - RNA, 19 nt, Artificial Sequence
  Description of Artificial Sequence: Synthetic oligonucleotide
agacccaaacacuuccaaa

SEQ ID NO: 2681732 - RNA, 19 nt, Artificial Sequence
  Description of Artificial Sequence: Synthetic oligonucleotide
acccuuuccggagaagguc

SEQ ID NO: 2681733 - RNA, 19 nt, Artificial Sequence
  Description of Artificial Sequence: Synthetic oligonucleotide
cuucaggggagcaaacaga

SEQ ID NO: 2681734 - RNA, 19 nt, Artificial Sequence
  Description of Artificial Sequence: Synthetic oligonucleotide
uaacuucaggggagcaaac

SEQ ID NO: 2681735 - RNA, 19 nt, Artificial Sequence
  Description of Artificial Sequence: Synthetic oligonucleotide
auauccagugacagguuug

SEQ ID NO: 2681736 - RNA, 19 nt, Artificial Sequence
  Description of Artificial Sequence: Synthetic oligonucleotide
gcaagcccagcuuauauuc

SEQ ID NO: 2681737 - RNA, 19 nt, Artificial Sequence
  Description of Artificial Sequence: Synthetic oligonucleotide
ucgcccaucauuucacuuu

SEQ ID NO: 2681738 - RNA, 19 nt, Artificial Sequence
  Description of Artificial Sequence: Synthetic oligonucleotide
cuuuaaucuuguguacauc

SEQ ID NO: 2681739 - RNA, 19 nt, Artificial Sequence
  Description of Artificial Sequence: Synthetic oligonucleotide
guaacuucaggggagcaaa

SEQ ID NO: 2681740 - RNA, 19 nt, Artificial Sequence
  Description of Artificial Sequence: Synthetic oligonucleotide
cugcaucacagcaagccca

SEQ ID NO: 2681741 - RNA, 19 nt, Artificial Sequence
  Description of Artificial Sequence: Synthetic oligonucleotide
uguuccugcacagcagcac

SEQ ID NO: 2681742 - RNA, 19 nt, Artificial Sequence
  Description of Artificial Sequence: Synthetic oligonucleotide
augacucucgaagggcccg

SEQ ID NO: 2681743 - RNA, 19 nt, Artificial Sequence
  Description of Artificial Sequence: Synthetic oligonucleotide
gugacugggcaaaaguuca

SEQ ID NO: 2681744 - RNA, 19 nt, Artificial Sequence
  Description of Artificial Sequence: Synthetic oligonucleotide
gacagguuugagcuuggaa

SEQ ID NO: 2681745 - RNA, 19 nt, Artificial Sequence
  Description of Artificial Sequence: Synthetic oligonucleotide
accaucaaguguggcucgc

SEQ ID NO: 2681746 - RNA, 19 nt, Artificial Sequence
  Description of Artificial Sequence: Synthetic oligonucleotide
ucaaaaccaauggucucau

SEQ ID NO: 2681747 - RNA, 19 nt, Artificial Sequence
  Description of Artificial Sequence: Synthetic oligonucleotide
cugaaccugcugcacggcc

SEQ ID NO: 2681748 - RNA, 19 nt, Artificial Sequence
  Description of Artificial Sequence: Synthetic oligonucleotide
uccucaggguggaaaaguu

SEQ ID NO: 2681749 - RNA, 19 nt, Artificial Sequence
  Description of Artificial Sequence: Synthetic oligonucleotide
cuucagcugcgacccaagg

SEQ ID NO: 2681750 - RNA, 19 nt, Artificial Sequence
  Description of Artificial Sequence: Synthetic oligonucleotide
ucaggguggaaaaguucau

SEQ ID NO: 2681751 - RNA, 19 nt, Artificial Sequence
  Description of Artificial Sequence: Synthetic oligonucleotide
auggaucauuaagaauauc

SEQ ID NO: 2681752 - RNA, 19 nt, Artificial Sequence
  Description of Artificial Sequence: Synthetic oligonucleotide
ccggagaaggucaugacuc

SEQ ID NO: 2681753 - RNA, 19 nt, Artificial Sequence
  Description of Artificial Sequence: Synthetic oligonucleotide
gaaaacccuuuccggagaa

SEQ ID NO: 2681754 - RNA, 19 nt, Artificial Sequence
  Description of Artificial Sequence: Synthetic oligonucleotide
caccaucaaguguggcucg

SEQ ID NO: 2681755 - RNA, 19 nt, Artificial Sequence
  Description of Artificial Sequence: Synthetic oligonucleotide
cccuggauguuccucaggg

SEQ ID NO: 2681756 - RNA, 19 nt, Artificial Sequence
  Description of Artificial Sequence: Synthetic oligonucleotide
aggaauggaagacgcugaa

SEQ ID NO: 2681757 - RNA, 19 nt, Artificial Sequence
  Description of Artificial Sequence: Synthetic oligonucleotide
gcaccugcaucacagcaag

SEQ ID NO: 2681758 - RNA, 19 nt, Artificial Sequence
  Description of Artificial Sequence: Synthetic oligonucleotide
uccaagugauccugucagu

SEQ ID NO: 2681759 - RNA, 19 nt, Artificial Sequence
  Description of Artificial Sequence: Synthetic oligonucleotide
aggcuuucaacugacucaa

SEQ ID NO: 2681760 - RNA, 19 nt, Artificial Sequence
  Description of Artificial Sequence: Synthetic oligonucleotide
auccugucaguucuuuaau

SEQ ID NO: 2681761 - RNA, 19 nt, Artificial Sequence
  Description of Artificial Sequence: Synthetic oligonucleotide
ugguugagcuggaaauuuu

SEQ ID NO: 2681762 - RNA, 19 nt, Artificial Sequence
  Description of Artificial Sequence: Synthetic oligonucleotide
agacgcugaaccugcugca

SEQ ID NO: 2681763 - RNA, 19 nt, Artificial Sequence
  Description of Artificial Sequence: Synthetic oligonucleotide
gaagggcccgcuugcugag

SEQ ID NO: 2681764 - RNA, 19 nt, Artificial Sequence
  Description of Artificial Sequence: Synthetic oligonucleotide
ggaauacuguccuucagcu

SEQ ID NO: 2681765 - RNA, 19 nt, Artificial Sequence
  Description of Artificial Sequence: Synthetic oligonucleotide
agcaagcccagcuuauauu

SEQ ID NO: 2681766 - RNA, 19 nt, Artificial Sequence
  Description of Artificial Sequence: Synthetic oligonucleotide
caguucuuuaaucuugugu

SEQ ID NO: 2681767 - RNA, 19 nt, Artificial Sequence
  Description of Artificial Sequence: Synthetic oligonucleotide
aacccuuuccggagaaggu

SEQ ID NO: 2681768 - RNA, 19 nt, Artificial Sequence
  Description of Artificial Sequence: Synthetic oligonucleotide
cauugccccucaaaauauc

SEQ ID NO: 2681769 - RNA, 19 nt, Artificial Sequence
  Description of Artificial Sequence: Synthetic oligonucleotide
agcucugcgaaagccucuc

SEQ ID NO: 2681770 - RNA, 19 nt, Artificial Sequence
  Description of Artificial Sequence: Synthetic oligonucleotide
acccaaacacuuccaaaua

SEQ ID NO: 2681771 - RNA, 19 nt, Artificial Sequence
  Description of Artificial Sequence: Synthetic oligonucleotide
gacccuggauguuccucag

SEQ ID NO: 2681772 - RNA, 19 nt, Artificial Sequence
  Description of Artificial Sequence: Synthetic oligonucleotide
caaauauccaagugauccu

SEQ ID NO: 2681773 - RNA, 19 nt, Artificial Sequence
  Description of Artificial Sequence: Synthetic oligonucleotide
ggagcaaacagacccugga

SEQ ID NO: 2681774 - RNA, 19 nt, Artificial Sequence
  Description of Artificial Sequence: Synthetic oligonucleotide
cuuugugauggaucauuaa

SEQ ID NO: 2681775 - RNA, 19 nt, Artificial Sequence
  Description of Artificial Sequence: Synthetic oligonucleotide
uuccggagaaggucaugac

SEQ ID NO: 2681776 - RNA, 19 nt, Artificial Sequence
  Description of Artificial Sequence: Synthetic oligonucleotide
ugauccugucaguucuuua

SEQ ID NO: 2681777 - RNA, 19 nt, Artificial Sequence
  Description of Artificial Sequence: Synthetic oligonucleotide
accaccucuaggcuuucaa

SEQ ID NO: 2681778 - RNA, 19 nt, Artificial Sequence
  Description of Artificial Sequence: Synthetic oligonucleotide
ugacugggcaaaaguucau

SEQ ID NO: 2681779 - RNA, 19 nt, Artificial Sequence
  Description of Artificial Sequence: Synthetic oligonucleotide
auacuguccuucagcugcg

SEQ ID NO: 2681780 - RNA, 19 nt, Artificial Sequence
  Description of Artificial Sequence: Synthetic oligonucleotide
agggcccgcuugcugagag

SEQ ID NO: 2681781 - RNA, 19 nt, Artificial Sequence
  Description of Artificial Sequence: Synthetic oligonucleotide
gcaaccacaaugcacuucu

SEQ ID NO: 2681782 - RNA, 19 nt, Artificial Sequence
  Description of Artificial Sequence: Synthetic oligonucleotide
cugacucaacuaaaugcaa

SEQ ID NO: 2681783 - RNA, 19 nt, Artificial Sequence
  Description of Artificial Sequence: Synthetic oligonucleotide
aaauauccagugacagguu

SEQ ID NO: 2681784 - RNA, 19 nt, Artificial Sequence
  Description of Artificial Sequence: Synthetic oligonucleotide
ggaucauuaagaauauccu

SEQ ID NO: 2681785 - RNA, 19 nt, Artificial Sequence
  Description of Artificial Sequence: Synthetic oligonucleotide
auaauucaagagggugacu

SEQ ID NO: 2681786 - RNA, 19 nt, Artificial Sequence
  Description of Artificial Sequence: Synthetic oligonucleotide
gagggugacugggcaaaag

SEQ ID NO: 2681787 - RNA, 19 nt, Artificial Sequence
  Description of Artificial Sequence: Synthetic oligonucleotide
acccuggauguuccucagg

SEQ ID NO: 2681788 - RNA, 19 nt, Artificial Sequence
  Description of Artificial Sequence: Synthetic oligonucleotide
gauggaucauuaagaauau

SEQ ID NO: 2681789 - RNA, 19 nt, Artificial Sequence
  Description of Artificial Sequence: Synthetic oligonucleotide
gagcuuggaaggaauggaa

SEQ ID NO: 2681790 - RNA, 19 nt, Artificial Sequence
  Description of Artificial Sequence: Synthetic oligonucleotide
guacaucagacuguagcaa

SEQ ID NO: 2681791 - RNA, 19 nt, Artificial Sequence
  Description of Artificial Sequence: Synthetic oligonucleotide
augcacuucuguguuccug

SEQ ID NO: 2681792 - RNA, 19 nt, Artificial Sequence
  Description of Artificial Sequence: Synthetic oligonucleotide
ccagugacagguuugagcu

SEQ ID NO: 2681793 - RNA, 19 nt, Artificial Sequence
  Description of Artificial Sequence: Synthetic oligonucleotide
gaaggucaugacucucgaa

SEQ ID NO: 2681794 - RNA, 19 nt, Artificial Sequence
  Description of Artificial Sequence: Synthetic oligonucleotide
cucaucauugccccucaaa

SEQ ID NO: 2681795 - RNA, 19 nt, Artificial Sequence
  Description of Artificial Sequence: Synthetic oligonucleotide
caaaggcaaccacaaugca

SEQ ID NO: 2681796 - RNA, 19 nt, Artificial Sequence
  Description of Artificial Sequence: Synthetic oligonucleotide
aaagccucucagcccgcua

SEQ ID NO: 2681797 - RNA, 19 nt, Artificial Sequence
  Description of Artificial Sequence: Synthetic oligonucleotide
agcccgcuauagucggccg

SEQ ID NO: 2681798 - RNA, 19 nt, Artificial Sequence
  Description of Artificial Sequence: Synthetic oligonucleotide
ccucuggcauucaucuugg

SEQ ID NO: 2681799 - RNA, 19 nt, Artificial Sequence
  Description of Artificial Sequence: Synthetic oligonucleotide
gcuuucaacugacucaacu

SEQ ID NO: 2681800 - RNA, 19 nt, Artificial Sequence
  Description of Artificial Sequence: Synthetic oligonucleotide
agguuugagcuuggaagga

SEQ ID NO: 2681801 - RNA, 19 nt, Artificial Sequence
  Description of Artificial Sequence: Synthetic oligonucleotide
caggguggaaaaguucauc

SEQ ID NO: 2681802 - RNA, 19 nt, Artificial Sequence
  Description of Artificial Sequence: Synthetic oligonucleotide
gacgcugaaccugcugcac

SEQ ID NO: 2681803 - RNA, 19 nt, Artificial Sequence
  Description of Artificial Sequence: Synthetic oligonucleotide
caaaaccaauggucucauc

SEQ ID NO: 2681804 - RNA, 19 nt, Artificial Sequence
  Description of Artificial Sequence: Synthetic oligonucleotide
gugauggaucauuaagaau

SEQ ID NO: 2681805 - RNA, 19 nt, Artificial Sequence
  Description of Artificial Sequence: Synthetic oligonucleotide
caucacagcaagcccagcu

SEQ ID NO: 2681806 - RNA, 19 nt, Artificial Sequence
  Description of Artificial Sequence: Synthetic oligonucleotide
auguuccucaggguggaaa

SEQ ID NO: 2681807 - RNA, 19 nt, Artificial Sequence
  Description of Artificial Sequence: Synthetic oligonucleotide
ugacucucgaagggcccgc

SEQ ID NO: 2681808 - RNA, 19 nt, Artificial Sequence
  Description of Artificial Sequence: Synthetic oligonucleotide
augcaaaacuaaagaccca

SEQ ID NO: 2681809 - RNA, 19 nt, Artificial Sequence
  Description of Artificial Sequence: Synthetic oligonucleotide
cagcccgcuauagucggcc

SEQ ID NO: 2681810 - RNA, 19 nt, Artificial Sequence
  Description of Artificial Sequence: Synthetic oligonucleotide
ucucaucauugccccucaa

SEQ ID NO: 2681811 - RNA, 19 nt, Artificial Sequence
  Description of Artificial Sequence: Synthetic oligonucleotide
uuccaccaucaaguguggc

SEQ ID NO: 2681812 - RNA, 19 nt, Artificial Sequence
  Description of Artificial Sequence: Synthetic oligonucleotide
gacccaaggccucuggcau

SEQ ID NO: 2681813 - RNA, 19 nt, Artificial Sequence
  Description of Artificial Sequence: Synthetic oligonucleotide
caucauugccccucaaaau

SEQ ID NO: 2681814 - RNA, 19 nt, Artificial Sequence
  Description of Artificial Sequence: Synthetic oligonucleotide
gagcaaacagacccuggau

SEQ ID NO: 2681815 - RNA, 19 nt, Artificial Sequence
  Description of Artificial Sequence: Synthetic oligonucleotide
gugacagguuugagcuugg

SEQ ID NO: 2681816 - RNA, 19 nt, Artificial Sequence
  Description of Artificial Sequence: Synthetic oligonucleotide
caaccacaaugcacuucug

SEQ ID NO: 2681817 - RNA, 19 nt, Artificial Sequence
  Description of Artificial Sequence: Synthetic oligonucleotide
gucucaucauugccccuca

SEQ ID NO: 2681818 - RNA, 19 nt, Artificial Sequence
  Description of Artificial Sequence: Synthetic oligonucleotide
caagagggugacugggcaa

SEQ ID NO: 2681819 - RNA, 19 nt, Artificial Sequence
  Description of Artificial Sequence: Synthetic oligonucleotide
ccugucaguucuuuaaucu

SEQ ID NO: 2681820 - RNA, 19 nt, Artificial Sequence
  Description of Artificial Sequence: Synthetic oligonucleotide
ugacagguuugagcuugga

SEQ ID NO: 2681821 - RNA, 19 nt, Artificial Sequence
  Description of Artificial Sequence: Synthetic oligonucleotide
ggaauggaagacgcugaac

SEQ ID NO: 2681822 - RNA, 19 nt, Artificial Sequence
  Description of Artificial Sequence: Synthetic oligonucleotide
gagcucugucacuggaaua

SEQ ID NO: 2681823 - RNA, 19 nt, Artificial Sequence
  Description of Artificial Sequence: Synthetic oligonucleotide
gcuauagucggccggccaa

SEQ ID NO: 2681824 - RNA, 19 nt, Artificial Sequence
  Description of Artificial Sequence: Synthetic oligonucleotide
gagagcucugucacuggaa

SEQ ID NO: 2681825 - RNA, 19 nt, Artificial Sequence
  Description of Artificial Sequence: Synthetic oligonucleotide
ucacuggaauacuguccuu

SEQ ID NO: 2681826 - RNA, 19 nt, Artificial Sequence
  Description of Artificial Sequence: Synthetic oligonucleotide
cacaaugcacuucuguguu

SEQ ID NO: 2681827 - RNA, 19 nt, Artificial Sequence
  Description of Artificial Sequence: Synthetic oligonucleotide
ccaccucuaggcuuucaac

SEQ ID NO: 2681828 - RNA, 19 nt, Artificial Sequence
  Description of Artificial Sequence: Synthetic oligonucleotide
caccugcaucacagcaagc

SEQ ID NO: 2681829 - RNA, 19 nt, Artificial Sequence
  Description of Artificial Sequence: Synthetic oligonucleotide
gggagcaaacagacccugg

SEQ ID NO: 2681830 - RNA, 19 nt, Artificial Sequence
  Description of Artificial Sequence: Synthetic oligonucleotide
aggggagcaaacagacccu

SEQ ID NO: 2681831 - RNA, 19 nt, Artificial Sequence
  Description of Artificial Sequence: Synthetic oligonucleotide
cgcugaaccugcugcacgg

SEQ ID NO: 2681832 - RNA, 19 nt, Artificial Sequence
  Description of Artificial Sequence: Synthetic oligonucleotide
ccucaggguggaaaaguuc

SEQ ID NO: 2681833 - RNA, 19 nt, Artificial Sequence
  Description of Artificial Sequence: Synthetic oligonucleotide
cugggcaaaaguucauuuu

SEQ ID NO: 2681834 - RNA, 19 nt, Artificial Sequence
  Description of Artificial Sequence: Synthetic oligonucleotide
cugucaguucuuuaaucuu

SEQ ID NO: 2681835 - RNA, 19 nt, Artificial Sequence
  Description of Artificial Sequence: Synthetic oligonucleotide
cacggccuugaacuccauc

SEQ ID NO: 2681836 - RNA, 19 nt, Artificial Sequence
  Description of Artificial Sequence: Synthetic oligonucleotide
aaccaccucuaggcuuuca

SEQ ID NO: 2681837 - RNA, 19 nt, Artificial Sequence
  Description of Artificial Sequence: Synthetic oligonucleotide
cagaaaccaccucuaggcu

SEQ ID NO: 2681838 - RNA, 19 nt, Artificial Sequence
  Description of Artificial Sequence: Synthetic oligonucleotide
gcccgcuauagucggccgg

SEQ ID NO: 2681839 - RNA, 19 nt, Artificial Sequence
  Description of Artificial Sequence: Synthetic oligonucleotide
ggggagcaaacagacccug

SEQ ID NO: 2681840 - RNA, 19 nt, Artificial Sequence
  Description of Artificial Sequence: Synthetic oligonucleotide
acagcaagcccagcuuaua

SEQ ID NO: 2681841 - RNA, 19 nt, Artificial Sequence
  Description of Artificial Sequence: Synthetic oligonucleotide
cccuuuccggagaagguca

SEQ ID NO: 2681842 - RNA, 19 nt, Artificial Sequence
  Description of Artificial Sequence: Synthetic oligonucleotide
aggcaaccacaaugcacuu

SEQ ID NO: 2681843 - RNA, 19 nt, Artificial Sequence
  Description of Artificial Sequence: Synthetic oligonucleotide
cccucaaaauauccaguga

SEQ ID NO: 2681844 - RNA, 19 nt, Artificial Sequence
  Description of Artificial Sequence: Synthetic oligonucleotide
guguuccugcacagcagca

SEQ ID NO: 2681845 - RNA, 19 nt, Artificial Sequence
  Description of Artificial Sequence: Synthetic oligonucleotide
ccuugaacuccaucuguaa

SEQ ID NO: 2681846 - RNA, 19 nt, Artificial Sequence
  Description of Artificial Sequence: Synthetic oligonucleotide
accugcugcacggccuuga

SEQ ID NO: 2681847 - RNA, 19 nt, Artificial Sequence
  Description of Artificial Sequence: Synthetic oligonucleotide
ggauguuccucagggugga

SEQ ID NO: 2681848 - RNA, 19 nt, Artificial Sequence
  Description of Artificial Sequence: Synthetic oligonucleotide
acccaaggccucuggcauu

SEQ ID NO: 2681849 - RNA, 19 nt, Artificial Sequence
  Description of Artificial Sequence: Synthetic oligonucleotide
cuguaacuucaggggagca

SEQ ID NO: 2681850 - RNA, 19 nt, Artificial Sequence
  Description of Artificial Sequence: Synthetic oligonucleotide
cacuuugugauggaucauu

SEQ ID NO: 2681851 - RNA, 19 nt, Artificial Sequence
  Description of Artificial Sequence: Synthetic oligonucleotide
agccucucagcccgcuaua

SEQ ID NO: 2681852 - RNA, 19 nt, Artificial Sequence
  Description of Artificial Sequence: Synthetic oligonucleotide
cccgcuauagucggccggc

SEQ ID NO: 2681853 - RNA, 19 nt, Artificial Sequence
  Description of Artificial Sequence: Synthetic oligonucleotide
gaaccugcugcacggccuu

SEQ ID NO: 2681854 - RNA, 19 nt, Artificial Sequence
  Description of Artificial Sequence: Synthetic oligonucleotide
aagggcccgcuugcugaga

SEQ ID NO: 2681855 - RNA, 19 nt, Artificial Sequence
  Description of Artificial Sequence: Synthetic oligonucleotide
caaguguggcucgcccauc

SEQ ID NO: 2681856 - RNA, 19 nt, Artificial Sequence
  Description of Artificial Sequence: Synthetic oligonucleotide
agugauccugucaguucuu

SEQ ID NO: 2681857 - RNA, 19 nt, Artificial Sequence
  Description of Artificial Sequence: Synthetic oligonucleotide
gacugggcaaaaguucauu

SEQ ID NO: 2681858 - RNA, 19 nt, Artificial Sequence
  Description of Artificial Sequence: Synthetic oligonucleotide
ggcaaccacaaugcacuuc

SEQ ID NO: 2681859 - RNA, 19 nt, Artificial Sequence
  Description of Artificial Sequence: Synthetic oligonucleotide
agagggugacugggcaaaa

SEQ ID NO: 2681860 - RNA, 19 nt, Artificial Sequence
  Description of Artificial Sequence: Synthetic oligonucleotide
gccucucagcccgcuauag

SEQ ID NO: 2681861 - RNA, 19 nt, Artificial Sequence
  Description of Artificial Sequence: Synthetic oligonucleotide
cagcaagcccagcuuauau

SEQ ID NO: 2681862 - RNA, 19 nt, Artificial Sequence
  Description of Artificial Sequence: Synthetic oligonucleotide
gcacuucuguguuccugca

SEQ ID NO: 2681863 - RNA, 19 nt, Artificial Sequence
  Description of Artificial Sequence: Synthetic oligonucleotide
ccaucaaguguggcucgcc

SEQ ID NO: 2681864 - RNA, 19 nt, Artificial Sequence
  Description of Artificial Sequence: Synthetic oligonucleotide
cacagcaagcccagcuuau

SEQ ID NO: 2681865 - RNA, 19 nt, Artificial Sequence
  Description of Artificial Sequence: Synthetic oligonucleotide
ggcauucaucuuggaaaca

SEQ ID NO: 2681866 - RNA, 19 nt, Artificial Sequence
  Description of Artificial Sequence: Synthetic oligonucleotide
gaaagccucucagcccgcu

SEQ ID NO: 2681867 - RNA, 19 nt, Artificial Sequence
  Description of Artificial Sequence: Synthetic oligonucleotide
cucuggcauucaucuugga

SEQ ID NO: 2681868 - RNA, 19 nt, Artificial Sequence
  Description of Artificial Sequence: Synthetic oligonucleotide
cgaagggcccgcuugcuga

SEQ ID NO: 2681869 - RNA, 19 nt, Artificial Sequence
  Description of Artificial Sequence: Synthetic oligonucleotide
gcugaaccugcugcacggc

SEQ ID NO: 2681870 - RNA, 19 nt, Artificial Sequence
  Description of Artificial Sequence: Synthetic oligonucleotide
ggaaggaauggaagacgcu

SEQ ID NO: 2681871 - RNA, 19 nt, Artificial Sequence
  Description of Artificial Sequence: Synthetic oligonucleotide
guguggcucgcccaucauu

SEQ ID NO: 2681872 - RNA, 19 nt, Artificial Sequence
  Description of Artificial Sequence: Synthetic oligonucleotide
cucgcccaucauuucacuu

SEQ ID NO: 2681873 - RNA, 19 nt, Artificial Sequence
  Description of Artificial Sequence: Synthetic oligonucleotide
cgacccaaggccucuggca

SEQ ID NO: 2681874 - RNA, 19 nt, Artificial Sequence
  Description of Artificial Sequence: Synthetic oligonucleotide
cagcugcgacccaaggccu

SEQ ID NO: 2681875 - RNA, 19 nt, Artificial Sequence
  Description of Artificial Sequence: Synthetic oligonucleotide
ggcccgcuugcugagagcu

SEQ ID NO: 2681876 - RNA, 19 nt, Artificial Sequence
  Description of Artificial Sequence: Synthetic oligonucleotide
gggugacugggcaaaaguu

SEQ ID NO: 2681877 - RNA, 19 nt, Artificial Sequence
  Description of Artificial Sequence: Synthetic oligonucleotide
cugcgacccaaggccucug

SEQ ID NO: 2681878 - RNA, 19 nt, Artificial Sequence
  Description of Artificial Sequence: Synthetic oligonucleotide
gggcccgcuugcugagagc

SEQ ID NO: 2681879 - RNA, 19 nt, Artificial Sequence
  Description of Artificial Sequence: Synthetic oligonucleotide
gcucugcgaaagccucuca

SEQ ID NO: 2681880 - RNA, 19 nt, Artificial Sequence
  Description of Artificial Sequence: Synthetic oligonucleotide
gcaucacagcaagcccagc

SEQ ID NO: 2681881 - RNA, 19 nt, Artificial Sequence
  Description of Artificial Sequence: Synthetic oligonucleotide
caaacagacccuggauguu

SEQ ID NO: 2681882 - RNA, 19 nt, Artificial Sequence
  Description of Artificial Sequence: Synthetic oligonucleotide
gacucucgaagggcccgcu

SEQ ID NO: 2681883 - RNA, 19 nt, Artificial Sequence
  Description of Artificial Sequence: Synthetic oligonucleotide
caaggccucuggcauucau

SEQ ID NO: 2681884 - RNA, 19 nt, Artificial Sequence
  Description of Artificial Sequence: Synthetic oligonucleotide
ccaagugauccugucaguu

SEQ ID NO: 2681885 - RNA, 19 nt, Artificial Sequence
  Description of Artificial Sequence: Synthetic oligonucleotide
ccuggauguuccucagggu

SEQ ID NO: 2681886 - RNA, 19 nt, Artificial Sequence
  Description of Artificial Sequence: Synthetic oligonucleotide
ccgcuugcugagagcucug

SEQ ID NO: 2681887 - RNA, 19 nt, Artificial Sequence
  Description of Artificial Sequence: Synthetic oligonucleotide
ccgcuauagucggccggcc

SEQ ID NO: 2681888 - RNA, 19 nt, Artificial Sequence
  Description of Artificial Sequence: Synthetic oligonucleotide
gcucugucacuggaauacu

SEQ ID NO: 2681889 - RNA, 19 nt, Artificial Sequence
  Description of Artificial Sequence: Synthetic oligonucleotide
cucgaagggcccgcuugcu

SEQ ID NO: 2681890 - RNA, 19 nt, Artificial Sequence
  Description of Artificial Sequence: Synthetic oligonucleotide
cccgcuugcugagagcucu

SEQ ID NO: 2681891 - RNA, 19 nt, Artificial Sequence
  Description of Artificial Sequence: Synthetic oligonucleotide
cgcuauagucggccggcca

SEQ ID NO: 2681892 - RNA, 19 nt, Artificial Sequence
  Description of Artificial Sequence: Synthetic oligonucleotide
ggaagacgcugaaccugcu

SEQ ID NO: 2681893 - RNA, 19 nt, Artificial Sequence
  Description of Artificial Sequence: Synthetic oligonucleotide
cggagaaggucaugacucu

SEQ ID NO: 2681894 - RNA, 19 nt, Artificial Sequence
  Description of Artificial Sequence: Synthetic oligonucleotide
ccucucagcccgcuauagu

SEQ ID NO: 2681895 - RNA, 19 nt, Artificial Sequence
  Description of Artificial Sequence: Synthetic oligonucleotide
gcccgcuugcugagagcuc

SEQ ID NO: 2681896 - RNA, 19 nt, Artificial Sequence
  Description of Artificial Sequence: Synthetic oligonucleotide
gcacggccuugaacuccau

SEQ ID NO: 2681897 - RNA, 19 nt, Artificial Sequence
  Description of Artificial Sequence: Synthetic oligonucleotide
uuugagaccuuucugaguc

SEQ ID NO: 2681898 - RNA, 19 nt, Artificial Sequence
  Description of Artificial Sequence: Synthetic oligonucleotide
uuugggauggaaaauugug

SEQ ID NO: 2681899 - RNA, 19 nt, Artificial Sequence
  Description of Artificial Sequence: Synthetic oligonucleotide
uuuacgacagagaagcaga

SEQ ID NO: 2681900 - RNA, 19 nt, Artificial Sequence
  Description of Artificial Sequence: Synthetic oligonucleotide
augagaaacacaucggugu

SEQ ID NO: 2681901 - RNA, 19 nt, Artificial Sequence
  Description of Artificial Sequence: Synthetic oligonucleotide
ugggauggaaaauugugag

SEQ ID NO: 2681902 - RNA, 19 nt, Artificial Sequence
  Description of Artificial Sequence: Synthetic oligonucleotide
caugcagucuuucaguucc

SEQ ID NO: 2681903 - RNA, 19 nt, Artificial Sequence
  Description of Artificial Sequence: Synthetic oligonucleotide
uucucugcagcucauguug

SEQ ID NO: 2681904 - RNA, 19 nt, Artificial Sequence
  Description of Artificial Sequence: Synthetic oligonucleotide
gaggacguaaggcacaugc

SEQ ID NO: 2681905 - RNA, 19 nt, Artificial Sequence
  Description of Artificial Sequence: Synthetic oligonucleotide
acgacagagaagcagauga

SEQ ID NO: 2681906 - RNA, 19 nt, Artificial Sequence
  Description of Artificial Sequence: Synthetic oligonucleotide
uccuucauguauaggagcc

SEQ ID NO: 2681907 - RNA, 19 nt, Artificial Sequence
  Description of Artificial Sequence: Synthetic oligonucleotide
ugcuuuucuacauccuugg

SEQ ID NO: 2681908 - RNA, 19 nt, Artificial Sequence
  Description of Artificial Sequence: Synthetic oligonucleotide
ucaaucugggucccgauga

SEQ ID NO: 2681909 - RNA, 19 nt, Artificial Sequence
  Description of Artificial Sequence: Synthetic oligonucleotide
agucuuucaguuccgggac

SEQ ID NO: 2681910 - RNA, 19 nt, Artificial Sequence
  Description of Artificial Sequence: Synthetic oligonucleotide
ugugguaagaggcaggguu

SEQ ID NO: 2681911 - RNA, 19 nt, Artificial Sequence
  Description of Artificial Sequence: Synthetic oligonucleotide
ugcuuugagaccuuucuga

SEQ ID NO: 2681912 - RNA, 19 nt, Artificial Sequence
  Description of Artificial Sequence: Synthetic oligonucleotide
gaugauugcacagcagccg

SEQ ID NO: 2681913 - RNA, 19 nt, Artificial Sequence
  Description of Artificial Sequence: Synthetic oligonucleotide
cagaugauugcacagcagc

SEQ ID NO: 2681914 - RNA, 19 nt, Artificial Sequence
  Description of Artificial Sequence: Synthetic oligonucleotide
uucagaugauugcacagca

SEQ ID NO: 2681915 - RNA, 19 nt, Artificial Sequence
  Description of Artificial Sequence: Synthetic oligonucleotide
ugggguaggagaguggucg

SEQ ID NO: 2681916 - RNA, 19 nt, Artificial Sequence
  Description of Artificial Sequence: Synthetic oligonucleotide
agaacauuccaaguagcac

SEQ ID NO: 2681917 - RNA, 19 nt, Artificial Sequence
  Description of Artificial Sequence: Synthetic oligonucleotide
ucuuugggauggaaaauug

SEQ ID NO: 2681918 - RNA, 19 nt, Artificial Sequence
  Description of Artificial Sequence: Synthetic oligonucleotide
uuccaaguagcacugugca

SEQ ID NO: 2681919 - RNA, 19 nt, Artificial Sequence
  Description of Artificial Sequence: Synthetic oligonucleotide
agaugagaaacacaucggu

SEQ ID NO: 2681920 - RNA, 19 nt, Artificial Sequence
  Description of Artificial Sequence: Synthetic oligonucleotide
uggacguugugguaagagg

SEQ ID NO: 2681921 - RNA, 19 nt, Artificial Sequence
  Description of Artificial Sequence: Synthetic oligonucleotide
agaaacacaucgguguugg

SEQ ID NO: 2681922 - RNA, 19 nt, Artificial Sequence
  Description of Artificial Sequence: Synthetic oligonucleotide
aagaggcaggguuuacgac

SEQ ID NO: 2681923 - RNA, 19 nt, Artificial Sequence
  Description of Artificial Sequence: Synthetic oligonucleotide
uagcacugugcaccgaucg

SEQ ID NO: 2681924 - RNA, 19 nt, Artificial Sequence
  Description of Artificial Sequence: Synthetic oligonucleotide
uaagaggcaggguuuacga

SEQ ID NO: 2681925 - RNA, 19 nt, Artificial Sequence
  Description of Artificial Sequence: Synthetic oligonucleotide
auuccaaguagcacugugc

SEQ ID NO: 2681926 - RNA, 19 nt, Artificial Sequence
  Description of Artificial Sequence: Synthetic oligonucleotide
agaugauugcacagcagcc

SEQ ID NO: 2681927 - RNA, 19 nt, Artificial Sequence
  Description of Artificial Sequence: Synthetic oligonucleotide
gaugagaaacacaucggug

SEQ ID NO: 2681928 - RNA, 19 nt, Artificial Sequence
  Description of Artificial Sequence: Synthetic oligonucleotide
accuuucugagucagggca

SEQ ID NO: 2681929 - RNA, 19 nt, Artificial Sequence
  Description of Artificial Sequence: Synthetic oligonucleotide
gaacauuccaaguagcacu

SEQ ID NO: 2681930 - RNA, 19 nt, Artificial Sequence
  Description of Artificial Sequence: Synthetic oligonucleotide
gcuuuugccagcuucacgc

SEQ ID NO: 2681931 - RNA, 19 nt, Artificial Sequence
  Description of Artificial Sequence: Synthetic oligonucleotide
cagaugagaaacacaucgg

SEQ ID NO: 2681932 - RNA, 19 nt, Artificial Sequence
  Description of Artificial Sequence: Synthetic oligonucleotide
agaccuuucugagucaggg

SEQ ID NO: 2681933 - RNA, 19 nt, Artificial Sequence
  Description of Artificial Sequence: Synthetic oligonucleotide
agaggcaggguuuacgaca

SEQ ID NO: 2681934 - RNA, 19 nt, Artificial Sequence
  Description of Artificial Sequence: Synthetic oligonucleotide
augcucguagguaaggggc

SEQ ID NO: 2681935 - RNA, 19 nt, Artificial Sequence
  Description of Artificial Sequence: Synthetic oligonucleotide
guuuacgacagagaagcag

SEQ ID NO: 2681936 - RNA, 19 nt, Artificial Sequence
  Description of Artificial Sequence: Synthetic oligonucleotide
aggaugggucgucaggcgc

SEQ ID NO: 2681937 - RNA, 19 nt, Artificial Sequence
  Description of Artificial Sequence: Synthetic oligonucleotide
guagguaaggggcuucucc

SEQ ID NO: 2681938 - RNA, 19 nt, Artificial Sequence
  Description of Artificial Sequence: Synthetic oligonucleotide
ucauguauaggagccgugc

SEQ ID NO: 2681939 - RNA, 19 nt, Artificial Sequence
  Description of Artificial Sequence: Synthetic oligonucleotide
caugcucguagguaagggg

SEQ ID NO: 2681940 - RNA, 19 nt, Artificial Sequence
  Description of Artificial Sequence: Synthetic oligonucleotide
ggacguaaggcacaugcgg

SEQ ID NO: 2681941 - RNA, 19 nt, Artificial Sequence
  Description of Artificial Sequence: Synthetic oligonucleotide
ugaggauagcuucaucaaa

SEQ ID NO: 2681942 - RNA, 19 nt, Artificial Sequence
  Description of Artificial Sequence: Synthetic oligonucleotide
gauugcacagcagccgugg

SEQ ID NO: 2681943 - RNA, 19 nt, Artificial Sequence
  Description of Artificial Sequence: Synthetic oligonucleotide
aggcgcuucagaugauugc

SEQ ID NO: 2681944 - RNA, 19 nt, Artificial Sequence
  Description of Artificial Sequence: Synthetic oligonucleotide
ucgguguugggguaggaga

SEQ ID NO: 2681945 - RNA, 19 nt, Artificial Sequence
  Description of Artificial Sequence: Synthetic oligonucleotide
aggucuuccccaccgcgcc

SEQ ID NO: 2681946 - RNA, 19 nt, Artificial Sequence
  Description of Artificial Sequence: Synthetic oligonucleotide
agcacugugcaccgaucgc

SEQ ID NO: 2681947 - RNA, 19 nt, Artificial Sequence
  Description of Artificial Sequence: Synthetic oligonucleotide
ggcagaacauuccaaguag

SEQ ID NO: 2681948 - RNA, 19 nt, Artificial Sequence
  Description of Artificial Sequence: Synthetic oligonucleotide
uauaggagccgugccaaag

SEQ ID NO: 2681949 - RNA, 19 nt, Artificial Sequence
  Description of Artificial Sequence: Synthetic oligonucleotide
auccuguucucgucgcgcc

SEQ ID NO: 2681950 - RNA, 19 nt, Artificial Sequence
  Description of Artificial Sequence: Synthetic oligonucleotide
cauguauaggagccgugcc

SEQ ID NO: 2681951 - RNA, 19 nt, Artificial Sequence
  Description of Artificial Sequence: Synthetic oligonucleotide
uagguaaggggcuucuccu

SEQ ID NO: 2681952 - RNA, 19 nt, Artificial Sequence
  Description of Artificial Sequence: Synthetic oligonucleotide
cagggcagaacauuccaag

SEQ ID NO: 2681953 - RNA, 19 nt, Artificial Sequence
  Description of Artificial Sequence: Synthetic oligonucleotide
cuccuucauguauaggagc

SEQ ID NO: 2681954 - RNA, 19 nt, Artificial Sequence
  Description of Artificial Sequence: Synthetic oligonucleotide
aguuccgggacccacuccu

SEQ ID NO: 2681955 - RNA, 19 nt, Artificial Sequence
  Description of Artificial Sequence: Synthetic oligonucleotide
cuucagaugauugcacagc

SEQ ID NO: 2681956 - RNA, 19 nt, Artificial Sequence
  Description of Artificial Sequence: Synthetic oligonucleotide
cuucacgccaugcucguag

SEQ ID NO: 2681957 - RNA, 19 nt, Artificial Sequence
  Description of Artificial Sequence: Synthetic oligonucleotide
aggauccuguucucgucgc

SEQ ID NO: 2681958 - RNA, 19 nt, Artificial Sequence
  Description of Artificial Sequence: Synthetic oligonucleotide
guaagaggcaggguuuacg

SEQ ID NO: 2681959 - RNA, 19 nt, Artificial Sequence
  Description of Artificial Sequence: Synthetic oligonucleotide
cagcuucacgccaugcucg

SEQ ID NO: 2681960 - RNA, 19 nt, Artificial Sequence
  Description of Artificial Sequence: Synthetic oligonucleotide
gacguaaggcacaugcggc

SEQ ID NO: 2681961 - RNA, 19 nt, Artificial Sequence
  Description of Artificial Sequence: Synthetic oligonucleotide
uggcugcuuuucuacaucc

SEQ ID NO: 2681962 - RNA, 19 nt, Artificial Sequence
  Description of Artificial Sequence: Synthetic oligonucleotide
augauugcacagcagccgu

SEQ ID NO: 2681963 - RNA, 19 nt, Artificial Sequence
  Description of Artificial Sequence: Synthetic oligonucleotide
cugcagcucauguuggcgg

SEQ ID NO: 2681964 - RNA, 19 nt, Artificial Sequence
  Description of Artificial Sequence: Synthetic oligonucleotide
gaucgcuuuugccagcuuc

SEQ ID NO: 2681965 - RNA, 19 nt, Artificial Sequence
  Description of Artificial Sequence: Synthetic oligonucleotide
uugaggauccuguucucgu

SEQ ID NO: 2681966 - RNA, 19 nt, Artificial Sequence
  Description of Artificial Sequence: Synthetic oligonucleotide
uacauccuuggauggcagg

SEQ ID NO: 2681967 - RNA, 19 nt, Artificial Sequence
  Description of Artificial Sequence: Synthetic oligonucleotide
uguauaggagccgugccaa

SEQ ID NO: 2681968 - RNA, 19 nt, Artificial Sequence
  Description of Artificial Sequence: Synthetic oligonucleotide
ugagaaacacaucgguguu

SEQ ID NO: 2681969 - RNA, 19 nt, Artificial Sequence
  Description of Artificial Sequence: Synthetic oligonucleotide
ucuuucaguuccgggaccc

SEQ ID NO: 2681970 - RNA, 19 nt, Artificial Sequence
  Description of Artificial Sequence: Synthetic oligonucleotide
ugagaccuuucugagucag

SEQ ID NO: 2681971 - RNA, 19 nt, Artificial Sequence
  Description of Artificial Sequence: Synthetic oligonucleotide
auugcacagcagccguggc

SEQ ID NO: 2681972 - RNA, 19 nt, Artificial Sequence
  Description of Artificial Sequence: Synthetic oligonucleotide
uucauguauaggagccgug

SEQ ID NO: 2681973 - RNA, 19 nt, Artificial Sequence
  Description of Artificial Sequence: Synthetic oligonucleotide
guucucgucgcgcccaccg

SEQ ID NO: 2681974 - RNA, 19 nt, Artificial Sequence
  Description of Artificial Sequence: Synthetic oligonucleotide
ucccggagaucaaucuggg

SEQ ID NO: 2681975 - RNA, 19 nt, Artificial Sequence
  Description of Artificial Sequence: Synthetic oligonucleotide
ucccgaugaggacguaagg

SEQ ID NO: 2681976 - RNA, 19 nt, Artificial Sequence
  Description of Artificial Sequence: Synthetic oligonucleotide
aucccggagaucaaucugg

SEQ ID NO: 2681977 - RNA, 19 nt, Artificial Sequence
  Description of Artificial Sequence: Synthetic oligonucleotide
gaggauagcuucaucaaaa

SEQ ID NO: 2681978 - RNA, 19 nt, Artificial Sequence
  Description of Artificial Sequence: Synthetic oligonucleotide
gggauggaaaauugugagg

SEQ ID NO: 2681979 - RNA, 19 nt, Artificial Sequence
  Description of Artificial Sequence: Synthetic oligonucleotide
aucaaucugggucccgaug

SEQ ID NO: 2681980 - RNA, 19 nt, Artificial Sequence
  Description of Artificial Sequence: Synthetic oligonucleotide
uguuggcggcuccaguugc

SEQ ID NO: 2681981 - RNA, 19 nt, Artificial Sequence
  Description of Artificial Sequence: Synthetic oligonucleotide
agucagggcagaacauucc

SEQ ID NO: 2681982 - RNA, 19 nt, Artificial Sequence
  Description of Artificial Sequence: Synthetic oligonucleotide
uucuuugggauggaaaauu

SEQ ID NO: 2681983 - RNA, 19 nt, Artificial Sequence
  Description of Artificial Sequence: Synthetic oligonucleotide
gucgacagagacuggcugc

SEQ ID NO: 2681984 - RNA, 19 nt, Artificial Sequence
  Description of Artificial Sequence: Synthetic oligonucleotide
ugguuguccuccgggaagg

SEQ ID NO: 2681985 - RNA, 19 nt, Artificial Sequence
  Description of Artificial Sequence: Synthetic oligonucleotide
uaaggcacaugcggcaugc

SEQ ID NO: 2681986 - RNA, 19 nt, Artificial Sequence
  Description of Artificial Sequence: Synthetic oligonucleotide
cagucuuucaguuccggga

SEQ ID NO: 2681987 - RNA, 19 nt, Artificial Sequence
  Description of Artificial Sequence: Synthetic oligonucleotide
aguagcacugugcaccgau

SEQ ID NO: 2681988 - RNA, 19 nt, Artificial Sequence
  Description of Artificial Sequence: Synthetic oligonucleotide
auaggagccgugccaaagu

SEQ ID NO: 2681989 - RNA, 19 nt, Artificial Sequence
  Description of Artificial Sequence: Synthetic oligonucleotide
uucacgccaugcucguagg

SEQ ID NO: 2681990 - RNA, 19 nt, Artificial Sequence
  Description of Artificial Sequence: Synthetic oligonucleotide
ugcaccgaucgcuuuugcc

SEQ ID NO: 2681991 - RNA, 19 nt, Artificial Sequence
  Description of Artificial Sequence: Synthetic oligonucleotide
ggagaguggucgcagcugg

SEQ ID NO: 2681992 - RNA, 19 nt, Artificial Sequence
  Description of Artificial Sequence: Synthetic oligonucleotide
gaggcaggguuuacgacag

SEQ ID NO: 2681993 - RNA, 19 nt, Artificial Sequence
  Description of Artificial Sequence: Synthetic oligonucleotide
agccgugccaaaguuuugg

SEQ ID NO: 2681994 - RNA, 19 nt, Artificial Sequence
  Description of Artificial Sequence: Synthetic oligonucleotide
ggacguugugguaagaggc

SEQ ID NO: 2681995 - RNA, 19 nt, Artificial Sequence
  Description of Artificial Sequence: Synthetic oligonucleotide
cuuuugccagcuucacgcc

SEQ ID NO: 2681996 - RNA, 19 nt, Artificial Sequence
  Description of Artificial Sequence: Synthetic oligonucleotide
aggcaggucuuccccaccg

SEQ ID NO: 2681997 - RNA, 19 nt, Artificial Sequence
  Description of Artificial Sequence: Synthetic oligonucleotide
ugcucguagguaaggggcu

SEQ ID NO: 2681998 - RNA, 19 nt, Artificial Sequence
  Description of Artificial Sequence: Synthetic oligonucleotide
uucaguuccgggacccacu

SEQ ID NO: 2681999 - RNA, 19 nt, Artificial Sequence
  Description of Artificial Sequence: Synthetic oligonucleotide
ucagggcagaacauuccaa

SEQ ID NO: 2682000 - RNA, 19 nt, Artificial Sequence
  Description of Artificial Sequence: Synthetic oligonucleotide
uuacgacagagaagcagau

SEQ ID NO: 2682001 - RNA, 19 nt, Artificial Sequence
  Description of Artificial Sequence: Synthetic oligonucleotide
aggcacaugcggcaugcag

SEQ ID NO: 2682002 - RNA, 19 nt, Artificial Sequence
  Description of Artificial Sequence: Synthetic oligonucleotide
gaaacacaucgguguuggg

SEQ ID NO: 2682003 - RNA, 19 nt, Artificial Sequence
  Description of Artificial Sequence: Synthetic oligonucleotide
gcuucagaugauugcacag

SEQ ID NO: 2682004 - RNA, 19 nt, Artificial Sequence
  Description of Artificial Sequence: Synthetic oligonucleotide
gauccuguucucgucgcgc

SEQ ID NO: 2682005 - RNA, 19 nt, Artificial Sequence
  Description of Artificial Sequence: Synthetic oligonucleotide
ugauugcacagcagccgug

SEQ ID NO: 2682006 - RNA, 19 nt, Artificial Sequence
  Description of Artificial Sequence: Synthetic oligonucleotide
gaguggucgcagcugguug

SEQ ID NO: 2682007 - RNA, 19 nt, Artificial Sequence
  Description of Artificial Sequence: Synthetic oligonucleotide
agcucauguuggcggcucc

SEQ ID NO: 2682008 - RNA, 19 nt, Artificial Sequence
  Description of Artificial Sequence: Synthetic oligonucleotide
ucgucaggcgcuucagaug

SEQ ID NO: 2682009 - RNA, 19 nt, Artificial Sequence
  Description of Artificial Sequence: Synthetic oligonucleotide
gagaaacacaucgguguug

SEQ ID NO: 2682010 - RNA, 19 nt, Artificial Sequence
  Description of Artificial Sequence: Synthetic oligonucleotide
uuucuuugggauggaaaau

SEQ ID NO: 2682011 - RNA, 19 nt, Artificial Sequence
  Description of Artificial Sequence: Synthetic oligonucleotide
caccgaucgcuuuugccag

SEQ ID NO: 2682012 - RNA, 19 nt, Artificial Sequence
  Description of Artificial Sequence: Synthetic oligonucleotide
cugggucccgaugaggacg

SEQ ID NO: 2682013 - RNA, 19 nt, Artificial Sequence
  Description of Artificial Sequence: Synthetic oligonucleotide
acguaaggcacaugcggca

SEQ ID NO: 2682014 - RNA, 19 nt, Artificial Sequence
  Description of Artificial Sequence: Synthetic oligonucleotide
gaccuuucugagucagggc

SEQ ID NO: 2682015 - RNA, 19 nt, Artificial Sequence
  Description of Artificial Sequence: Synthetic oligonucleotide
aguggucgcagcugguugu

SEQ ID NO: 2682016 - RNA, 19 nt, Artificial Sequence
  Description of Artificial Sequence: Synthetic oligonucleotide
ugcagucuuucaguuccgg

SEQ ID NO: 2682017 - RNA, 19 nt, Artificial Sequence
  Description of Artificial Sequence: Synthetic oligonucleotide
uccaaguagcacugugcac

SEQ ID NO: 2682018 - RNA, 19 nt, Artificial Sequence
  Description of Artificial Sequence: Synthetic oligonucleotide
auguuggcggcuccaguug

SEQ ID NO: 2682019 - RNA, 19 nt, Artificial Sequence
  Description of Artificial Sequence: Synthetic oligonucleotide
cuacauccuuggauggcag

SEQ ID NO: 2682020 - RNA, 19 nt, Artificial Sequence
  Description of Artificial Sequence: Synthetic oligonucleotide
ucaguuccgggacccacuc

SEQ ID NO: 2682021 - RNA, 19 nt, Artificial Sequence
  Description of Artificial Sequence: Synthetic oligonucleotide
ucucgucgcgcccaccgca

SEQ ID NO: 2682022 - RNA, 19 nt, Artificial Sequence
  Description of Artificial Sequence: Synthetic oligonucleotide
cuggacguugugguaagag

SEQ ID NO: 2682023 - RNA, 19 nt, Artificial Sequence
  Description of Artificial Sequence: Synthetic oligonucleotide
ugaggauccuguucucguc

SEQ ID NO: 2682024 - RNA, 19 nt, Artificial Sequence
  Description of Artificial Sequence: Synthetic oligonucleotide
accgaucgcuuuugccagc

SEQ ID NO: 2682025 - RNA, 19 nt, Artificial Sequence
  Description of Artificial Sequence: Synthetic oligonucleotide
ucauguuggcggcuccagu

SEQ ID NO: 2682026 - RNA, 19 nt, Artificial Sequence
  Description of Artificial Sequence: Synthetic oligonucleotide
cugcuuugagaccuuucug

SEQ ID NO: 2682027 - RNA, 19 nt, Artificial Sequence
  Description of Artificial Sequence: Synthetic oligonucleotide
uccuggacguugugguaag

SEQ ID NO: 2682028 - RNA, 19 nt, Artificial Sequence
  Description of Artificial Sequence: Synthetic oligonucleotide
uacgacagagaagcagaug

SEQ ID NO: 2682029 - RNA, 19 nt, Artificial Sequence
  Description of Artificial Sequence: Synthetic oligonucleotide
uuccccaccgcgccguccc

SEQ ID NO: 2682030 - RNA, 19 nt, Artificial Sequence
  Description of Artificial Sequence: Synthetic oligonucleotide
gugaggauagcuucaucaa

SEQ ID NO: 2682031 - RNA, 19 nt, Artificial Sequence
  Description of Artificial Sequence: Synthetic oligonucleotide
gaugaggacguaaggcaca

SEQ ID NO: 2682032 - RNA, 19 nt, Artificial Sequence
  Description of Artificial Sequence: Synthetic oligonucleotide
gagucagggcagaacauuc

SEQ ID NO: 2682033 - RNA, 19 nt, Artificial Sequence
  Description of Artificial Sequence: Synthetic oligonucleotide
ugugcaccgaucgcuuuug

SEQ ID NO: 2682034 - RNA, 19 nt, Artificial Sequence
  Description of Artificial Sequence: Synthetic oligonucleotide
ugcggcaugcagucuuuca

SEQ ID NO: 2682035 - RNA, 19 nt, Artificial Sequence
  Description of Artificial Sequence: Synthetic oligonucleotide
aggguuuacgacagagaag

SEQ ID NO: 2682036 - RNA, 19 nt, Artificial Sequence
  Description of Artificial Sequence: Synthetic oligonucleotide
caggcgcuucagaugauug

SEQ ID NO: 2682037 - RNA, 19 nt, Artificial Sequence
  Description of Artificial Sequence: Synthetic oligonucleotide
acaugcggcaugcagucuu

SEQ ID NO: 2682038 - RNA, 19 nt, Artificial Sequence
  Description of Artificial Sequence: Synthetic oligonucleotide
agaucaaucugggucccga

SEQ ID NO: 2682039 - RNA, 19 nt, Artificial Sequence
  Description of Artificial Sequence: Synthetic oligonucleotide
ugggucgucaggcgcuuca

SEQ ID NO: 2682040 - RNA, 19 nt, Artificial Sequence
  Description of Artificial Sequence: Synthetic oligonucleotide
acguugugguaagaggcag

SEQ ID NO: 2682041 - RNA, 19 nt, Artificial Sequence
  Description of Artificial Sequence: Synthetic oligonucleotide
uuucaguuccgggacccac

SEQ ID NO: 2682042 - RNA, 19 nt, Artificial Sequence
  Description of Artificial Sequence: Synthetic oligonucleotide
acccacuccuccuggacgu

SEQ ID NO: 2682043 - RNA, 19 nt, Artificial Sequence
  Description of Artificial Sequence: Synthetic oligonucleotide
ucgacagagacuggcugcu

SEQ ID NO: 2682044 - RNA, 19 nt, Artificial Sequence
  Description of Artificial Sequence: Synthetic oligonucleotide
gcagucuuucaguuccggg

SEQ ID NO: 2682045 - RNA, 19 nt, Artificial Sequence
  Description of Artificial Sequence: Synthetic oligonucleotide
uugagaccuuucugaguca

SEQ ID NO: 2682046 - RNA, 19 nt, Artificial Sequence
  Description of Artificial Sequence: Synthetic oligonucleotide
acgccaugcucguagguaa

SEQ ID NO: 2682047 - RNA, 19 nt, Artificial Sequence
  Description of Artificial Sequence: Synthetic oligonucleotide
gacguugugguaagaggca

SEQ ID NO: 2682048 - RNA, 19 nt, Artificial Sequence
  Description of Artificial Sequence: Synthetic oligonucleotide
uccuguucucgucgcgccc

SEQ ID NO: 2682049 - RNA, 19 nt, Artificial Sequence
  Description of Artificial Sequence: Synthetic oligonucleotide
gcaccgaucgcuuuugcca

SEQ ID NO: 2682050 - RNA, 19 nt, Artificial Sequence
  Description of Artificial Sequence: Synthetic oligonucleotide
ugggucccgaugaggacgu

SEQ ID NO: 2682051 - RNA, 19 nt, Artificial Sequence
  Description of Artificial Sequence: Synthetic oligonucleotide
uugcugcugcugcugcugc

SEQ ID NO: 2682052 - RNA, 19 nt, Artificial Sequence
  Description of Artificial Sequence: Synthetic oligonucleotide
gucccgaugaggacguaag

SEQ ID NO: 2682053 - RNA, 19 nt, Artificial Sequence
  Description of Artificial Sequence: Synthetic oligonucleotide
gagaccuuucugagucagg

SEQ ID NO: 2682054 - RNA, 19 nt, Artificial Sequence
  Description of Artificial Sequence: Synthetic oligonucleotide
cacuugaggauccuguucu

SEQ ID NO: 2682055 - RNA, 19 nt, Artificial Sequence
  Description of Artificial Sequence: Synthetic oligonucleotide
gugccaaaguuuugggguc

SEQ ID NO: 2682056 - RNA, 19 nt, Artificial Sequence
  Description of Artificial Sequence: Synthetic oligonucleotide
uaggagccgugccaaaguu

SEQ ID NO: 2682057 - RNA, 19 nt, Artificial Sequence
  Description of Artificial Sequence: Synthetic oligonucleotide
guaaggcacaugcggcaug

SEQ ID NO: 2682058 - RNA, 19 nt, Artificial Sequence
  Description of Artificial Sequence: Synthetic oligonucleotide
agcugguuguccuccggga

SEQ ID NO: 2682059 - RNA, 19 nt, Artificial Sequence
  Description of Artificial Sequence: Synthetic oligonucleotide
uugugaggauagcuucauc

SEQ ID NO: 2682060 - RNA, 19 nt, Artificial Sequence
  Description of Artificial Sequence: Synthetic oligonucleotide
gucuuucaguuccgggacc

SEQ ID NO: 2682061 - RNA, 19 nt, Artificial Sequence
  Description of Artificial Sequence: Synthetic oligonucleotide
aucgcuuuugccagcuuca

SEQ ID NO: 2682062 - RNA, 19 nt, Artificial Sequence
  Description of Artificial Sequence: Synthetic oligonucleotide
ucugggucccgaugaggac

SEQ ID NO: 2682063 - RNA, 19 nt, Artificial Sequence
  Description of Artificial Sequence: Synthetic oligonucleotide
gagacuggcugcuuuucua

SEQ ID NO: 2682064 - RNA, 19 nt, Artificial Sequence
  Description of Artificial Sequence: Synthetic oligonucleotide
ggcaggguuuacgacagag

SEQ ID NO: 2682065 - RNA, 19 nt, Artificial Sequence
  Description of Artificial Sequence: Synthetic oligonucleotide
gcggcaugcagucuuucag

SEQ ID NO: 2682066 - RNA, 19 nt, Artificial Sequence
  Description of Artificial Sequence: Synthetic oligonucleotide
guguugggguaggagagug

SEQ ID NO: 2682067 - RNA, 19 nt, Artificial Sequence
  Description of Artificial Sequence: Synthetic oligonucleotide
uucucgucgcgcccaccgc

SEQ ID NO: 2682068 - RNA, 19 nt, Artificial Sequence
  Description of Artificial Sequence: Synthetic oligonucleotide
gcagccguggcacucugag

SEQ ID NO: 2682069 - RNA, 19 nt, Artificial Sequence
  Description of Artificial Sequence: Synthetic oligonucleotide
guugcugcugcugcugcug

SEQ ID NO: 2682070 - RNA, 19 nt, Artificial Sequence
  Description of Artificial Sequence: Synthetic oligonucleotide
guaaggggcuucuccuuca

SEQ ID NO: 2682071 - RNA, 19 nt, Artificial Sequence
  Description of Artificial Sequence: Synthetic oligonucleotide
gauggaaaauugugaggau

SEQ ID NO: 2682072 - RNA, 19 nt, Artificial Sequence
  Description of Artificial Sequence: Synthetic oligonucleotide
cuuugggauggaaaauugu

SEQ ID NO: 2682073 - RNA, 19 nt, Artificial Sequence
  Description of Artificial Sequence: Synthetic oligonucleotide
gguaggagaguggucgcag

SEQ ID NO: 2682074 - RNA, 19 nt, Artificial Sequence
  Description of Artificial Sequence: Synthetic oligonucleotide
ucacgccaugcucguaggu

SEQ ID NO: 2682075 - RNA, 19 nt, Artificial Sequence
  Description of Artificial Sequence: Synthetic oligonucleotide
acaucgguguugggguagg

SEQ ID NO: 2682076 - RNA, 19 nt, Artificial Sequence
  Description of Artificial Sequence: Synthetic oligonucleotide
aggagaguggucgcagcug

SEQ ID NO: 2682077 - RNA, 19 nt, Artificial Sequence
  Description of Artificial Sequence: Synthetic oligonucleotide
agcuucacgccaugcucgu

SEQ ID NO: 2682078 - RNA, 19 nt, Artificial Sequence
  Description of Artificial Sequence: Synthetic oligonucleotide
uugggguaggagagugguc

SEQ ID NO: 2682079 - RNA, 19 nt, Artificial Sequence
  Description of Artificial Sequence: Synthetic oligonucleotide
gguaaggggcuucuccuuc

SEQ ID NO: 2682080 - RNA, 19 nt, Artificial Sequence
  Description of Artificial Sequence: Synthetic oligonucleotide
cccgaugaggacguaaggc

SEQ ID NO: 2682081 - RNA, 19 nt, Artificial Sequence
  Description of Artificial Sequence: Synthetic oligonucleotide
uggcacucugagcagccuu

SEQ ID NO: 2682082 - RNA, 19 nt, Artificial Sequence
  Description of Artificial Sequence: Synthetic oligonucleotide
ccuuucugagucagggcag

SEQ ID NO: 2682083 - RNA, 19 nt, Artificial Sequence
  Description of Artificial Sequence: Synthetic oligonucleotide
cacaucgguguugggguag

SEQ ID NO: 2682084 - RNA, 19 nt, Artificial Sequence
  Description of Artificial Sequence: Synthetic oligonucleotide
cucauguuggcggcuccag

SEQ ID NO: 2682085 - RNA, 19 nt, Artificial Sequence
  Description of Artificial Sequence: Synthetic oligonucleotide
ugguaagaggcaggguuua

SEQ ID NO: 2682086 - RNA, 19 nt, Artificial Sequence
  Description of Artificial Sequence: Synthetic oligonucleotide
acgcacuugaggauccugu

SEQ ID NO: 2682087 - RNA, 19 nt, Artificial Sequence
  Description of Artificial Sequence: Synthetic oligonucleotide
ucguagguaaggggcuucu

SEQ ID NO: 2682088 - RNA, 19 nt, Artificial Sequence
  Description of Artificial Sequence: Synthetic oligonucleotide
ccgugccaaaguuuugggg

SEQ ID NO: 2682089 - RNA, 19 nt, Artificial Sequence
  Description of Artificial Sequence: Synthetic oligonucleotide
ggauccuguucucgucgcg

SEQ ID NO: 2682090 - RNA, 19 nt, Artificial Sequence
  Description of Artificial Sequence: Synthetic oligonucleotide
gccgugccaaaguuuuggg

SEQ ID NO: 2682091 - RNA, 19 nt, Artificial Sequence
  Description of Artificial Sequence: Synthetic oligonucleotide
agguaaggggcuucuccuu

SEQ ID NO: 2682092 - RNA, 19 nt, Artificial Sequence
  Description of Artificial Sequence: Synthetic oligonucleotide
cucgucgcgcccaccgcag

SEQ ID NO: 2682093 - RNA, 19 nt, Artificial Sequence
  Description of Artificial Sequence: Synthetic oligonucleotide
uuggcggcuccaguugcug

SEQ ID NO: 2682094 - RNA, 19 nt, Artificial Sequence
  Description of Artificial Sequence: Synthetic oligonucleotide
cuuugagaccuuucugagu

SEQ ID NO: 2682095 - RNA, 19 nt, Artificial Sequence
  Description of Artificial Sequence: Synthetic oligonucleotide
gcacaugcggcaugcaguc

SEQ ID NO: 2682096 - RNA, 19 nt, Artificial Sequence
  Description of Artificial Sequence: Synthetic oligonucleotide
gggcagaacauuccaagua

SEQ ID NO: 2682097 - RNA, 19 nt, Artificial Sequence
  Description of Artificial Sequence: Synthetic oligonucleotide
ggcgcuucagaugauugca

SEQ ID NO: 2682098 - RNA, 19 nt, Artificial Sequence
  Description of Artificial Sequence: Synthetic oligonucleotide
augaggacguaaggcacau

SEQ ID NO: 2682099 - RNA, 19 nt, Artificial Sequence
  Description of Artificial Sequence: Synthetic oligonucleotide
uugugguaagaggcagggu

SEQ ID NO: 2682100 - RNA, 19 nt, Artificial Sequence
  Description of Artificial Sequence: Synthetic oligonucleotide
ccuucauguauaggagccg

SEQ ID NO: 2682101 - RNA, 19 nt, Artificial Sequence
  Description of Artificial Sequence: Synthetic oligonucleotide
cugcugcugcugcugcugc

SEQ ID NO: 2682102 - RNA, 19 nt, Artificial Sequence
  Description of Artificial Sequence: Synthetic oligonucleotide
ucgcuuuugccagcuucac

SEQ ID NO: 2682103 - RNA, 19 nt, Artificial Sequence
  Description of Artificial Sequence: Synthetic oligonucleotide
gucgucaggcgcuucagau

SEQ ID NO: 2682104 - RNA, 19 nt, Artificial Sequence
  Description of Artificial Sequence: Synthetic oligonucleotide
ucaggcgcuucagaugauu

SEQ ID NO: 2682105 - RNA, 19 nt, Artificial Sequence
  Description of Artificial Sequence: Synthetic oligonucleotide
augcagucuuucaguuccg

SEQ ID NO: 2682106 - RNA, 19 nt, Artificial Sequence
  Description of Artificial Sequence: Synthetic oligonucleotide
gcacuugaggauccuguuc

SEQ ID NO: 2682107 - RNA, 19 nt, Artificial Sequence
  Description of Artificial Sequence: Synthetic oligonucleotide
ccaugcucguagguaaggg

SEQ ID NO: 2682108 - RNA, 19 nt, Artificial Sequence
  Description of Artificial Sequence: Synthetic oligonucleotide
cagccguggcacucugagc

SEQ ID NO: 2682109 - RNA, 19 nt, Artificial Sequence
  Description of Artificial Sequence: Synthetic oligonucleotide
ugcugcugcugcugcugcu

SEQ ID NO: 2682110 - RNA, 19 nt, Artificial Sequence
  Description of Artificial Sequence: Synthetic oligonucleotide
cguugugguaagaggcagg

SEQ ID NO: 2682111 - RNA, 19 nt, Artificial Sequence
  Description of Artificial Sequence: Synthetic oligonucleotide
agaguggucgcagcugguu

SEQ ID NO: 2682112 - RNA, 19 nt, Artificial Sequence
  Description of Artificial Sequence: Synthetic oligonucleotide
caggcaggucuuccccacc

SEQ ID NO: 2682113 - RNA, 19 nt, Artificial Sequence
  Description of Artificial Sequence: Synthetic oligonucleotide
ugaggacguaaggcacaug

SEQ ID NO: 2682114 - RNA, 19 nt, Artificial Sequence
  Description of Artificial Sequence: Synthetic oligonucleotide
acagcagccguggcacucu

SEQ ID NO: 2682115 - RNA, 19 nt, Artificial Sequence
  Description of Artificial Sequence: Synthetic oligonucleotide
cauguuggcggcuccaguu

SEQ ID NO: 2682116 - RNA, 19 nt, Artificial Sequence
  Description of Artificial Sequence: Synthetic oligonucleotide
cagagacuggcugcuuuuc

SEQ ID NO: 2682117 - RNA, 19 nt, Artificial Sequence
  Description of Artificial Sequence: Synthetic oligonucleotide
cgguguugggguaggagag

SEQ ID NO: 2682118 - RNA, 19 nt, Artificial Sequence
  Description of Artificial Sequence: Synthetic oligonucleotide
acacaucgguguuggggua

SEQ ID NO: 2682119 - RNA, 19 nt, Artificial Sequence
  Description of Artificial Sequence: Synthetic oligonucleotide
gcagcugguuguccuccgg

SEQ ID NO: 2682120 - RNA, 19 nt, Artificial Sequence
  Description of Artificial Sequence: Synthetic oligonucleotide
acauuccaaguagcacugu

SEQ ID NO: 2682121 - RNA, 19 nt, Artificial Sequence
  Description of Artificial Sequence: Synthetic oligonucleotide
gucgcagcugguuguccuc

SEQ ID NO: 2682122 - RNA, 19 nt, Artificial Sequence
  Description of Artificial Sequence: Synthetic oligonucleotide
gccaugcucguagguaagg

SEQ ID NO: 2682123 - RNA, 19 nt, Artificial Sequence
  Description of Artificial Sequence: Synthetic oligonucleotide
uggucgcagcugguugucc

SEQ ID NO: 2682124 - RNA, 19 nt, Artificial Sequence
  Description of Artificial Sequence: Synthetic oligonucleotide
aaguagcacugugcaccga

SEQ ID NO: 2682125 - RNA, 19 nt, Artificial Sequence
  Description of Artificial Sequence: Synthetic oligonucleotide
cucguagguaaggggcuuc

SEQ ID NO: 2682126 - RNA, 19 nt, Artificial Sequence
  Description of Artificial Sequence: Synthetic oligonucleotide
gaucaaucugggucccgau

SEQ ID NO: 2682127 - RNA, 19 nt, Artificial Sequence
  Description of Artificial Sequence: Synthetic oligonucleotide
cuccuggacguugugguaa

SEQ ID NO: 2682128 - RNA, 19 nt, Artificial Sequence
  Description of Artificial Sequence: Synthetic oligonucleotide
ucgucgcgcccaccgcagc

SEQ ID NO: 2682129 - RNA, 19 nt, Artificial Sequence
  Description of Artificial Sequence: Synthetic oligonucleotide
gggguaggagaguggucgc

SEQ ID NO: 2682130 - RNA, 19 nt, Artificial Sequence
  Description of Artificial Sequence: Synthetic oligonucleotide
guagcacugugcaccgauc

SEQ ID NO: 2682131 - RNA, 19 nt, Artificial Sequence
  Description of Artificial Sequence: Synthetic oligonucleotide
augcggcaugcagucuuuc

SEQ ID NO: 2682132 - RNA, 19 nt, Artificial Sequence
  Description of Artificial Sequence: Synthetic oligonucleotide
aaggcacaugcggcaugca

SEQ ID NO: 2682133 - RNA, 19 nt, Artificial Sequence
  Description of Artificial Sequence: Synthetic oligonucleotide
gcuuuucuacauccuugga

SEQ ID NO: 2682134 - RNA, 19 nt, Artificial Sequence
  Description of Artificial Sequence: Synthetic oligonucleotide
guauaggagccgugccaaa

SEQ ID NO: 2682135 - RNA, 19 nt, Artificial Sequence
  Description of Artificial Sequence: Synthetic oligonucleotide
ggucuuccccaccgcgccg

SEQ ID NO: 2682136 - RNA, 19 nt, Artificial Sequence
  Description of Artificial Sequence: Synthetic oligonucleotide
cucugagcagccuucuuuu

SEQ ID NO: 2682137 - RNA, 19 nt, Artificial Sequence
  Description of Artificial Sequence: Synthetic oligonucleotide
caccgcgccguccccgacc

SEQ ID NO: 2682138 - RNA, 19 nt, Artificial Sequence
  Description of Artificial Sequence: Synthetic oligonucleotide
cgucaggcgcuucagauga

SEQ ID NO: 2682139 - RNA, 19 nt, Artificial Sequence
  Description of Artificial Sequence: Synthetic oligonucleotide
gugcaccgaucgcuuuugc

SEQ ID NO: 2682140 - RNA, 19 nt, Artificial Sequence
  Description of Artificial Sequence: Synthetic oligonucleotide
gagccgugccaaaguuuug

SEQ ID NO: 2682141 - RNA, 19 nt, Artificial Sequence
  Description of Artificial Sequence: Synthetic oligonucleotide
ggacccacuccuccuggac

SEQ ID NO: 2682142 - RNA, 19 nt, Artificial Sequence
  Description of Artificial Sequence: Synthetic oligonucleotide
ccuuggauggcagggagga

SEQ ID NO: 2682143 - RNA, 19 nt, Artificial Sequence
  Description of Artificial Sequence: Synthetic oligonucleotide
gguaagaggcaggguuuac

SEQ ID NO: 2682144 - RNA, 19 nt, Artificial Sequence
  Description of Artificial Sequence: Synthetic oligonucleotide
gcugcugcugcugcugcug

SEQ ID NO: 2682145 - RNA, 19 nt, Artificial Sequence
  Description of Artificial Sequence: Synthetic oligonucleotide
cgcuuuugccagcuucacg

SEQ ID NO: 2682146 - RNA, 19 nt, Artificial Sequence
  Description of Artificial Sequence: Synthetic oligonucleotide
cagcucauguuggcggcuc

SEQ ID NO: 2682147 - RNA, 19 nt, Artificial Sequence
  Description of Artificial Sequence: Synthetic oligonucleotide
ggcacucugagcagccuuc

SEQ ID NO: 2682148 - RNA, 19 nt, Artificial Sequence
  Description of Artificial Sequence: Synthetic oligonucleotide
cacgccaugcucguaggua

SEQ ID NO: 2682149 - RNA, 19 nt, Artificial Sequence
  Description of Artificial Sequence: Synthetic oligonucleotide
gcaggguuuacgacagaga

SEQ ID NO: 2682150 - RNA, 19 nt, Artificial Sequence
  Description of Artificial Sequence: Synthetic oligonucleotide
cguggcacucugagcagcc

SEQ ID NO: 2682151 - RNA, 19 nt, Artificial Sequence
  Description of Artificial Sequence: Synthetic oligonucleotide
aggagccgugccaaaguuu

SEQ ID NO: 2682152 - RNA, 19 nt, Artificial Sequence
  Description of Artificial Sequence: Synthetic oligonucleotide
cuucucugcagcucauguu

SEQ ID NO: 2682153 - RNA, 19 nt, Artificial Sequence
  Description of Artificial Sequence: Synthetic oligonucleotide
ggcacaugcggcaugcagu

SEQ ID NO: 2682154 - RNA, 19 nt, Artificial Sequence
  Description of Artificial Sequence: Synthetic oligonucleotide
cccaccgcagccacagcug

SEQ ID NO: 2682155 - RNA, 19 nt, Artificial Sequence
  Description of Artificial Sequence: Synthetic oligonucleotide
cuuccccaccgcgccgucc

SEQ ID NO: 2682156 - RNA, 19 nt, Artificial Sequence
  Description of Artificial Sequence: Synthetic oligonucleotide
cugagucagggcagaacau

SEQ ID NO: 2682157 - RNA, 19 nt, Artificial Sequence
  Description of Artificial Sequence: Synthetic oligonucleotide
augggucgucaggcgcuuc

SEQ ID NO: 2682158 - RNA, 19 nt, Artificial Sequence
  Description of Artificial Sequence: Synthetic oligonucleotide
ggucgucaggcgcuucaga

SEQ ID NO: 2682159 - RNA, 19 nt, Artificial Sequence
  Description of Artificial Sequence: Synthetic oligonucleotide
uccccaccgcgccgucccc

SEQ ID NO: 2682160 - RNA, 19 nt, Artificial Sequence
  Description of Artificial Sequence: Synthetic oligonucleotide
ggcaugcagucuuucaguu

SEQ ID NO: 2682161 - RNA, 19 nt, Artificial Sequence
  Description of Artificial Sequence: Synthetic oligonucleotide
ggagccgugccaaaguuuu

SEQ ID NO: 2682162 - RNA, 19 nt, Artificial Sequence
  Description of Artificial Sequence: Synthetic oligonucleotide
guggucgcagcugguuguc

SEQ ID NO: 2682163 - RNA, 19 nt, Artificial Sequence
  Description of Artificial Sequence: Synthetic oligonucleotide
aggcaggguuuacgacaga

SEQ ID NO: 2682164 - RNA, 19 nt, Artificial Sequence
  Description of Artificial Sequence: Synthetic oligonucleotide
gcgcccaccgcagccacag

SEQ ID NO: 2682165 - RNA, 19 nt, Artificial Sequence
  Description of Artificial Sequence: Synthetic oligonucleotide
ggucgcagcugguuguccu

SEQ ID NO: 2682166 - RNA, 19 nt, Artificial Sequence
  Description of Artificial Sequence: Synthetic oligonucleotide
gcgcuucagaugauugcac

SEQ ID NO: 2682167 - RNA, 19 nt, Artificial Sequence
  Description of Artificial Sequence: Synthetic oligonucleotide
cagcagccguggcacucug

SEQ ID NO: 2682168 - RNA, 19 nt, Artificial Sequence
  Description of Artificial Sequence: Synthetic oligonucleotide
gggucgucaggcgcuucag

SEQ ID NO: 2682169 - RNA, 19 nt, Artificial Sequence
  Description of Artificial Sequence: Synthetic oligonucleotide
gguuguccuccgggaaggc

SEQ ID NO: 2682170 - RNA, 19 nt, Artificial Sequence
  Description of Artificial Sequence: Synthetic oligonucleotide
cagggaggaugggucguca

SEQ ID NO: 2682171 - RNA, 19 nt, Artificial Sequence
  Description of Artificial Sequence: Synthetic oligonucleotide
gggcuucuccuucauguau

SEQ ID NO: 2682172 - RNA, 19 nt, Artificial Sequence
  Description of Artificial Sequence: Synthetic oligonucleotide
gcacugugcaccgaucgcu

SEQ ID NO: 2682173 - RNA, 19 nt, Artificial Sequence
  Description of Artificial Sequence: Synthetic oligonucleotide
ggguaggagaguggucgca

SEQ ID NO: 2682174 - RNA, 19 nt, Artificial Sequence
  Description of Artificial Sequence: Synthetic oligonucleotide
ggucccgaugaggacguaa

SEQ ID NO: 2682175 - RNA, 19 nt, Artificial Sequence
  Description of Artificial Sequence: Synthetic oligonucleotide
gucgcgcccaccgcagcca

SEQ ID NO: 2682176 - RNA, 19 nt, Artificial Sequence
  Description of Artificial Sequence: Synthetic oligonucleotide
ggaugggucgucaggcgcu

SEQ ID NO: 2682177 - RNA, 19 nt, Artificial Sequence
  Description of Artificial Sequence: Synthetic oligonucleotide
cacugugcaccgaucgcuu

SEQ ID NO: 2682178 - RNA, 19 nt, Artificial Sequence
  Description of Artificial Sequence: Synthetic oligonucleotide
gggacccacuccuccugga

SEQ ID NO: 2682179 - RNA, 19 nt, Artificial Sequence
  Description of Artificial Sequence: Synthetic oligonucleotide
ccguggcacucugagcagc

SEQ ID NO: 2682180 - RNA, 19 nt, Artificial Sequence
  Description of Artificial Sequence: Synthetic oligonucleotide
agcagccguggcacucuga

SEQ ID NO: 2682181 - RNA, 19 nt, Artificial Sequence
  Description of Artificial Sequence: Synthetic oligonucleotide
gcucauguuggcggcucca

SEQ ID NO: 2682182 - RNA, 19 nt, Artificial Sequence
  Description of Artificial Sequence: Synthetic oligonucleotide
gagaguggucgcagcuggu

SEQ ID NO: 2682183 - RNA, 19 nt, Artificial Sequence
  Description of Artificial Sequence: Synthetic oligonucleotide
cgccaugcucguagguaag

SEQ ID NO: 2682184 - RNA, 19 nt, Artificial Sequence
  Description of Artificial Sequence: Synthetic oligonucleotide
guuggcggcuccaguugcu

SEQ ID NO: 2682185 - RNA, 19 nt, Artificial Sequence
  Description of Artificial Sequence: Synthetic oligonucleotide
caugcggcaugcagucuuu

SEQ ID NO: 2682186 - RNA, 19 nt, Artificial Sequence
  Description of Artificial Sequence: Synthetic oligonucleotide
ccgggacccacuccuccug

SEQ ID NO: 2682187 - RNA, 19 nt, Artificial Sequence
  Description of Artificial Sequence: Synthetic oligonucleotide
caucgguguugggguagga

SEQ ID NO: 2682188 - RNA, 19 nt, Artificial Sequence
  Description of Artificial Sequence: Synthetic oligonucleotide
gguguugggguaggagagu

SEQ ID NO: 2682189 - RNA, 19 nt, Artificial Sequence
  Description of Artificial Sequence: Synthetic oligonucleotide
gaugggucgucaggcgcuu

SEQ ID NO: 2682190 - RNA, 19 nt, Artificial Sequence
  Description of Artificial Sequence: Synthetic oligonucleotide
cgucgcgcccaccgcagcc

SEQ ID NO: 2682191 - RNA, 19 nt, Artificial Sequence
  Description of Artificial Sequence: Synthetic oligonucleotide
gcggcuccaguugcugcug

SEQ ID NO: 2682192 - RNA, 19 nt, Artificial Sequence
  Description of Artificial Sequence: Synthetic oligonucleotide
caccgcagccacagcugcu

SEQ ID NO: 2682193 - RNA, 19 nt, Artificial Sequence
  Description of Artificial Sequence: Synthetic oligonucleotide
cguagguaaggggcuucuc

SEQ ID NO: 2682194 - RNA, 19 nt, Artificial Sequence
  Description of Artificial Sequence: Synthetic oligonucleotide
cacucugagcagccuucuu

SEQ ID NO: 2682195 - RNA, 19 nt, Artificial Sequence
  Description of Artificial Sequence: Synthetic oligonucleotide
cacaugcggcaugcagucu

SEQ ID NO: 2682196 - RNA, 19 nt, Artificial Sequence
  Description of Artificial Sequence: Synthetic oligonucleotide
gcacucugagcagccuucu

SEQ ID NO: 2682197 - RNA, 19 nt, Artificial Sequence
  Description of Artificial Sequence: Synthetic oligonucleotide
gcagcucauguuggcggcu

SEQ ID NO: 2682198 - RNA, 19 nt, Artificial Sequence
  Description of Artificial Sequence: Synthetic oligonucleotide
cccggagaucaaucugggu

SEQ ID NO: 2682199 - RNA, 19 nt, Artificial Sequence
  Description of Artificial Sequence: Synthetic oligonucleotide
gcucguagguaaggggcuu

SEQ ID NO: 2682200 - RNA, 19 nt, Artificial Sequence
  Description of Artificial Sequence: Synthetic oligonucleotide
gucaggcgcuucagaugau

SEQ ID NO: 2682201 - RNA, 19 nt, Artificial Sequence
  Description of Artificial Sequence: Synthetic oligonucleotide
ccgaucgcuuuugccagcu

SEQ ID NO: 2682202 - RNA, 19 nt, Artificial Sequence
  Description of Artificial Sequence: Synthetic oligonucleotide
gcuucacgccaugcucgua

SEQ ID NO: 2682203 - RNA, 19 nt, Artificial Sequence
  Description of Artificial Sequence: Synthetic oligonucleotide
cguaaggcacaugcggcau

SEQ ID NO: 2682204 - RNA, 19 nt, Artificial Sequence
  Description of Artificial Sequence: Synthetic oligonucleotide
ccaccgcgccguccccgac

SEQ ID NO: 2682205 - RNA, 19 nt, Artificial Sequence
  Description of Artificial Sequence: Synthetic oligonucleotide
gggucccgaugaggacgua

SEQ ID NO: 2682206 - RNA, 19 nt, Artificial Sequence
  Description of Artificial Sequence: Synthetic oligonucleotide
cgaucgcuuuugccagcuu

SEQ ID NO: 2682207 - RNA, 19 nt, Artificial Sequence
  Description of Artificial Sequence: Synthetic oligonucleotide
accuugauggucuugauac

SEQ ID NO: 2682208 - RNA, 19 nt, Artificial Sequence
  Description of Artificial Sequence: Synthetic oligonucleotide
acggucaugacacagcugc

SEQ ID NO: 2682209 - RNA, 19 nt, Artificial Sequence
  Description of Artificial Sequence: Synthetic oligonucleotide
uggcaguacaccuugaugg

SEQ ID NO: 2682210 - RNA, 19 nt, Artificial Sequence
  Description of Artificial Sequence: Synthetic oligonucleotide
auacuuaggggccaugucc

SEQ ID NO: 2682211 - RNA, 19 nt, Artificial Sequence
  Description of Artificial Sequence: Synthetic oligonucleotide
gaagcuuguaucuagccag

SEQ ID NO: 2682212 - RNA, 19 nt, Artificial Sequence
  Description of Artificial Sequence: Synthetic oligonucleotide
aacacaaacaucuggucug

SEQ ID NO: 2682213 - RNA, 19 nt, Artificial Sequence
  Description of Artificial Sequence: Synthetic oligonucleotide
ugugggaucaucguugugg

SEQ ID NO: 2682214 - RNA, 19 nt, Artificial Sequence
  Description of Artificial Sequence: Synthetic oligonucleotide
uguuccgugauguuaauga

SEQ ID NO: 2682215 - RNA, 19 nt, Artificial Sequence
  Description of Artificial Sequence: Synthetic oligonucleotide
cuuguaucuagccagcagc

SEQ ID NO: 2682216 - RNA, 19 nt, Artificial Sequence
  Description of Artificial Sequence: Synthetic oligonucleotide
agcacugucaggucugugc

SEQ ID NO: 2682217 - RNA, 19 nt, Artificial Sequence
  Description of Artificial Sequence: Synthetic oligonucleotide
ugauguagcggccagcugu

SEQ ID NO: 2682218 - RNA, 19 nt, Artificial Sequence
  Description of Artificial Sequence: Synthetic oligonucleotide
uugauuccaaaguagcgug

SEQ ID NO: 2682219 - RNA, 19 nt, Artificial Sequence
  Description of Artificial Sequence: Synthetic oligonucleotide
uuugauuccaaaguagcgu

SEQ ID NO: 2682220 - RNA, 19 nt, Artificial Sequence
  Description of Artificial Sequence: Synthetic oligonucleotide
cuugauacccaccuugggc

SEQ ID NO: 2682221 - RNA, 19 nt, Artificial Sequence
  Description of Artificial Sequence: Synthetic oligonucleotide
uaaugagcagcucuugcug

SEQ ID NO: 2682222 - RNA, 19 nt, Artificial Sequence
  Description of Artificial Sequence: Synthetic oligonucleotide
uugcggaucuuccacagcc

SEQ ID NO: 2682223 - RNA, 19 nt, Artificial Sequence
  Description of Artificial Sequence: Synthetic oligonucleotide
uugauacccaccuugggcu

SEQ ID NO: 2682224 - RNA, 19 nt, Artificial Sequence
  Description of Artificial Sequence: Synthetic oligonucleotide
uuaaugagcagcucuugcu

SEQ ID NO: 2682225 - RNA, 19 nt, Artificial Sequence
  Description of Artificial Sequence: Synthetic oligonucleotide
agaacacaaacaucugguc

SEQ ID NO: 2682226 - RNA, 19 nt, Artificial Sequence
  Description of Artificial Sequence: Synthetic oligonucleotide
aagugucugguccagcuca

SEQ ID NO: 2682227 - RNA, 19 nt, Artificial Sequence
  Description of Artificial Sequence: Synthetic oligonucleotide
cuuggucaugaccacaugc

SEQ ID NO: 2682228 - RNA, 19 nt, Artificial Sequence
  Description of Artificial Sequence: Synthetic oligonucleotide
acgaagcuuguaucuagcc

SEQ ID NO: 2682229 - RNA, 19 nt, Artificial Sequence
  Description of Artificial Sequence: Synthetic oligonucleotide
acuggguuuguccccaaac

SEQ ID NO: 2682230 - RNA, 19 nt, Artificial Sequence
  Description of Artificial Sequence: Synthetic oligonucleotide
ucuugauacccaccuuggg

SEQ ID NO: 2682231 - RNA, 19 nt, Artificial Sequence
  Description of Artificial Sequence: Synthetic oligonucleotide
uccucguuugauuccaaag

SEQ ID NO: 2682232 - RNA, 19 nt, Artificial Sequence
  Description of Artificial Sequence: Synthetic oligonucleotide
guuugauuccaaaguagcg

SEQ ID NO: 2682233 - RNA, 19 nt, Artificial Sequence
  Description of Artificial Sequence: Synthetic oligonucleotide
uuccgugauguuaaugagc

SEQ ID NO: 2682234 - RNA, 19 nt, Artificial Sequence
  Description of Artificial Sequence: Synthetic oligonucleotide
gauguuaaugagcagcucu

SEQ ID NO: 2682235 - RNA, 19 nt, Artificial Sequence
  Description of Artificial Sequence: Synthetic oligonucleotide
guuaaugagcagcucuugc

SEQ ID NO: 2682236 - RNA, 19 nt, Artificial Sequence
  Description of Artificial Sequence: Synthetic oligonucleotide
acugucaggucugugcgcc

SEQ ID NO: 2682237 - RNA, 19 nt, Artificial Sequence
  Description of Artificial Sequence: Synthetic oligonucleotide
ugaucuucacgaccugucc

SEQ ID NO: 2682238 - RNA, 19 nt, Artificial Sequence
  Description of Artificial Sequence: Synthetic oligonucleotide
cuugauggucuugauaccc

SEQ ID NO: 2682239 - RNA, 19 nt, Artificial Sequence
  Description of Artificial Sequence: Synthetic oligonucleotide
ucacgaagcuuguaucuag

SEQ ID NO: 2682240 - RNA, 19 nt, Artificial Sequence
  Description of Artificial Sequence: Synthetic oligonucleotide
agcugcaugauggucuugc

SEQ ID NO: 2682241 - RNA, 19 nt, Artificial Sequence
  Description of Artificial Sequence: Synthetic oligonucleotide
ugcaccacgaucagcgccc

SEQ ID NO: 2682242 - RNA, 19 nt, Artificial Sequence
  Description of Artificial Sequence: Synthetic oligonucleotide
guagccacggucaugacac

SEQ ID NO: 2682243 - RNA, 19 nt, Artificial Sequence
  Description of Artificial Sequence: Synthetic oligonucleotide
uuguaucuagccagcagcu

SEQ ID NO: 2682244 - RNA, 19 nt, Artificial Sequence
  Description of Artificial Sequence: Synthetic oligonucleotide
cuugaacuccucaaguguc

SEQ ID NO: 2682245 - RNA, 19 nt, Artificial Sequence
  Description of Artificial Sequence: Synthetic oligonucleotide
ucaagugucugguccagcu

SEQ ID NO: 2682246 - RNA, 19 nt, Artificial Sequence
  Description of Artificial Sequence: Synthetic oligonucleotide
ucaugacacagcugcauga

SEQ ID NO: 2682247 - RNA, 19 nt, Artificial Sequence
  Description of Artificial Sequence: Synthetic oligonucleotide
aaacaucuggucuguggga

SEQ ID NO: 2682248 - RNA, 19 nt, Artificial Sequence
  Description of Artificial Sequence: Synthetic oligonucleotide
accuguccucguuugauuc

SEQ ID NO: 2682249 - RNA, 19 nt, Artificial Sequence
  Description of Artificial Sequence: Synthetic oligonucleotide
gauuccaaaguagcgugcc

SEQ ID NO: 2682250 - RNA, 19 nt, Artificial Sequence
  Description of Artificial Sequence: Synthetic oligonucleotide
caaaguagcgugccacugg

SEQ ID NO: 2682251 - RNA, 19 nt, Artificial Sequence
  Description of Artificial Sequence: Synthetic oligonucleotide
uuaggggccauguccacca

SEQ ID NO: 2682252 - RNA, 19 nt, Artificial Sequence
  Description of Artificial Sequence: Synthetic oligonucleotide
ugauuccaaaguagcgugc

SEQ ID NO: 2682253 - RNA, 19 nt, Artificial Sequence
  Description of Artificial Sequence: Synthetic oligonucleotide
caaacugagccuugaacuc

SEQ ID NO: 2682254 - RNA, 19 nt, Artificial Sequence
  Description of Artificial Sequence: Synthetic oligonucleotide
uacugcacuaggcgguagg

SEQ ID NO: 2682255 - RNA, 19 nt, Artificial Sequence
  Description of Artificial Sequence: Synthetic oligonucleotide
cuggucugugggaucaucg

SEQ ID NO: 2682256 - RNA, 19 nt, Artificial Sequence
  Description of Artificial Sequence: Synthetic oligonucleotide
aagcuuguaucuagccagc

SEQ ID NO: 2682257 - RNA, 19 nt, Artificial Sequence
  Description of Artificial Sequence: Synthetic oligonucleotide
cuccucaagugucuggucc

SEQ ID NO: 2682258 - RNA, 19 nt, Artificial Sequence
  Description of Artificial Sequence: Synthetic oligonucleotide
uaggcgguaggugauguag

SEQ ID NO: 2682259 - RNA, 19 nt, Artificial Sequence
  Description of Artificial Sequence: Synthetic oligonucleotide
uaucuagccagcagcucug

SEQ ID NO: 2682260 - RNA, 19 nt, Artificial Sequence
  Description of Artificial Sequence: Synthetic oligonucleotide
ucgucguccaugcugccgc

SEQ ID NO: 2682261 - RNA, 19 nt, Artificial Sequence
  Description of Artificial Sequence: Synthetic oligonucleotide
uugaacuccucaagugucu

SEQ ID NO: 2682262 - RNA, 19 nt, Artificial Sequence
  Description of Artificial Sequence: Synthetic oligonucleotide
ucguguuccgugauguuaa

SEQ ID NO: 2682263 - RNA, 19 nt, Artificial Sequence
  Description of Artificial Sequence: Synthetic oligonucleotide
guuccgugauguuaaugag

SEQ ID NO: 2682264 - RNA, 19 nt, Artificial Sequence
  Description of Artificial Sequence: Synthetic oligonucleotide
ugcggaucuuccacagccg

SEQ ID NO: 2682265 - RNA, 19 nt, Artificial Sequence
  Description of Artificial Sequence: Synthetic oligonucleotide
ugggaagaacacaaacauc

SEQ ID NO: 2682266 - RNA, 19 nt, Artificial Sequence
  Description of Artificial Sequence: Synthetic oligonucleotide
ggucuugauacccaccuug

SEQ ID NO: 2682267 - RNA, 19 nt, Artificial Sequence
  Description of Artificial Sequence: Synthetic oligonucleotide
gggacugcuuggcagaggg

SEQ ID NO: 2682268 - RNA, 19 nt, Artificial Sequence
  Description of Artificial Sequence: Synthetic oligonucleotide
ucacugggccggaugaucu

SEQ ID NO: 2682269 - RNA, 19 nt, Artificial Sequence
  Description of Artificial Sequence: Synthetic oligonucleotide
gaacugcuccagcacauac

SEQ ID NO: 2682270 - RNA, 19 nt, Artificial Sequence
  Description of Artificial Sequence: Synthetic oligonucleotide
ucguugugggccaccagca

SEQ ID NO: 2682271 - RNA, 19 nt, Artificial Sequence
  Description of Artificial Sequence: Synthetic oligonucleotide
augaucuucacgaccuguc

SEQ ID NO: 2682272 - RNA, 19 nt, Artificial Sequence
  Description of Artificial Sequence: Synthetic oligonucleotide
uuccaaaguagcgugccac

SEQ ID NO: 2682273 - RNA, 19 nt, Artificial Sequence
  Description of Artificial Sequence: Synthetic oligonucleotide
ggggcuacugcacuaggcg

SEQ ID NO: 2682274 - RNA, 19 nt, Artificial Sequence
  Description of Artificial Sequence: Synthetic oligonucleotide
uccuuggucaugaccacau

SEQ ID NO: 2682275 - RNA, 19 nt, Artificial Sequence
  Description of Artificial Sequence: Synthetic oligonucleotide
gucaugacacagcugcaug

SEQ ID NO: 2682276 - RNA, 19 nt, Artificial Sequence
  Description of Artificial Sequence: Synthetic oligonucleotide
gauccuaggcagcuggcuc

SEQ ID NO: 2682277 - RNA, 19 nt, Artificial Sequence
  Description of Artificial Sequence: Synthetic oligonucleotide
uaggcagcuggcucucacg

SEQ ID NO: 2682278 - RNA, 19 nt, Artificial Sequence
  Description of Artificial Sequence: Synthetic oligonucleotide
auggucuugcggaucuucc

SEQ ID NO: 2682279 - RNA, 19 nt, Artificial Sequence
  Description of Artificial Sequence: Synthetic oligonucleotide
gucuugauacccaccuugg

SEQ ID NO: 2682280 - RNA, 19 nt, Artificial Sequence
  Description of Artificial Sequence: Synthetic oligonucleotide
gggaucaucguugugggcc

SEQ ID NO: 2682281 - RNA, 19 nt, Artificial Sequence
  Description of Artificial Sequence: Synthetic oligonucleotide
cacgaagcuuguaucuagc

SEQ ID NO: 2682282 - RNA, 19 nt, Artificial Sequence
  Description of Artificial Sequence: Synthetic oligonucleotide
ucugugggaucaucguugu

SEQ ID NO: 2682283 - RNA, 19 nt, Artificial Sequence
  Description of Artificial Sequence: Synthetic oligonucleotide
cucucacgaagcuuguauc

SEQ ID NO: 2682284 - RNA, 19 nt, Artificial Sequence
  Description of Artificial Sequence: Synthetic oligonucleotide
cuucacuggguuugucccc

SEQ ID NO: 2682285 - RNA, 19 nt, Artificial Sequence
  Description of Artificial Sequence: Synthetic oligonucleotide
acuuaggggccauguccac

SEQ ID NO: 2682286 - RNA, 19 nt, Artificial Sequence
  Description of Artificial Sequence: Synthetic oligonucleotide
cagcucuugcuguaggaac

SEQ ID NO: 2682287 - RNA, 19 nt, Artificial Sequence
  Description of Artificial Sequence: Synthetic oligonucleotide
acaucuggucugugggauc

SEQ ID NO: 2682288 - RNA, 19 nt, Artificial Sequence
  Description of Artificial Sequence: Synthetic oligonucleotide
guaucuagccagcagcucu

SEQ ID NO: 2682289 - RNA, 19 nt, Artificial Sequence
  Description of Artificial Sequence: Synthetic oligonucleotide
auccuaggcagcuggcucu

SEQ ID NO: 2682290 - RNA, 19 nt, Artificial Sequence
  Description of Artificial Sequence: Synthetic oligonucleotide
cauacuuaggggccauguc

SEQ ID NO: 2682291 - RNA, 19 nt, Artificial Sequence
  Description of Artificial Sequence: Synthetic oligonucleotide
augacacagcugcaugaug

SEQ ID NO: 2682292 - RNA, 19 nt, Artificial Sequence
  Description of Artificial Sequence: Synthetic oligonucleotide
acauacuuaggggccaugu

SEQ ID NO: 2682293 - RNA, 19 nt, Artificial Sequence
  Description of Artificial Sequence: Synthetic oligonucleotide
uggucugugggaucaucgu

SEQ ID NO: 2682294 - RNA, 19 nt, Artificial Sequence
  Description of Artificial Sequence: Synthetic oligonucleotide
uggucuugcggaucuucca

SEQ ID NO: 2682295 - RNA, 19 nt, Artificial Sequence
  Description of Artificial Sequence: Synthetic oligonucleotide
accacgaucagcgcccgag

SEQ ID NO: 2682296 - RNA, 19 nt, Artificial Sequence
  Description of Artificial Sequence: Synthetic oligonucleotide
uucacuggguuugucccca

SEQ ID NO: 2682297 - RNA, 19 nt, Artificial Sequence
  Description of Artificial Sequence: Synthetic oligonucleotide
aacugcuccagcacauacu

SEQ ID NO: 2682298 - RNA, 19 nt, Artificial Sequence
  Description of Artificial Sequence: Synthetic oligonucleotide
auuccaaaguagcgugcca

SEQ ID NO: 2682299 - RNA, 19 nt, Artificial Sequence
  Description of Artificial Sequence: Synthetic oligonucleotide
ccuucacuggguuuguccc

SEQ ID NO: 2682300 - RNA, 19 nt, Artificial Sequence
  Description of Artificial Sequence: Synthetic oligonucleotide
uaggucuccuccucgucgu

SEQ ID NO: 2682301 - RNA, 19 nt, Artificial Sequence
  Description of Artificial Sequence: Synthetic oligonucleotide
cucguuugauuccaaagua

SEQ ID NO: 2682302 - RNA, 19 nt, Artificial Sequence
  Description of Artificial Sequence: Synthetic oligonucleotide
aucagcgcccgagugaugu

SEQ ID NO: 2682303 - RNA, 19 nt, Artificial Sequence
  Description of Artificial Sequence: Synthetic oligonucleotide
aacugagccuugaacuccu

SEQ ID NO: 2682304 - RNA, 19 nt, Artificial Sequence
  Description of Artificial Sequence: Synthetic oligonucleotide
acgaucagcgcccgaguga

SEQ ID NO: 2682305 - RNA, 19 nt, Artificial Sequence
  Description of Artificial Sequence: Synthetic oligonucleotide
agggaccagcucguguucc

SEQ ID NO: 2682306 - RNA, 19 nt, Artificial Sequence
  Description of Artificial Sequence: Synthetic oligonucleotide
ugcucagggaccagcucgu

SEQ ID NO: 2682307 - RNA, 19 nt, Artificial Sequence
  Description of Artificial Sequence: Synthetic oligonucleotide
cuugggcuccucugggaag

SEQ ID NO: 2682308 - RNA, 19 nt, Artificial Sequence
  Description of Artificial Sequence: Synthetic oligonucleotide
gcuuguaucuagccagcag

SEQ ID NO: 2682309 - RNA, 19 nt, Artificial Sequence
  Description of Artificial Sequence: Synthetic oligonucleotide
aggcgguaggugauguagc

SEQ ID NO: 2682310 - RNA, 19 nt, Artificial Sequence
  Description of Artificial Sequence: Synthetic oligonucleotide
aggcagcuggcucucacga

SEQ ID NO: 2682311 - RNA, 19 nt, Artificial Sequence
  Description of Artificial Sequence: Synthetic oligonucleotide
uggauccuaggcagcuggc

SEQ ID NO: 2682312 - RNA, 19 nt, Artificial Sequence
  Description of Artificial Sequence: Synthetic oligonucleotide
gaucuucacgaccuguccu

SEQ ID NO: 2682313 - RNA, 19 nt, Artificial Sequence
  Description of Artificial Sequence: Synthetic oligonucleotide
gggcuacugcacuaggcgg

SEQ ID NO: 2682314 - RNA, 19 nt, Artificial Sequence
  Description of Artificial Sequence: Synthetic oligonucleotide
agcagcucuugcuguagga

SEQ ID NO: 2682315 - RNA, 19 nt, Artificial Sequence
  Description of Artificial Sequence: Synthetic oligonucleotide
cuuaggggccauguccacc

SEQ ID NO: 2682316 - RNA, 19 nt, Artificial Sequence
  Description of Artificial Sequence: Synthetic oligonucleotide
agcucguguuccgugaugu

SEQ ID NO: 2682317 - RNA, 19 nt, Artificial Sequence
  Description of Artificial Sequence: Synthetic oligonucleotide
gauggucuugcggaucuuc

SEQ ID NO: 2682318 - RNA, 19 nt, Artificial Sequence
  Description of Artificial Sequence: Synthetic oligonucleotide
ucaucguugugggccacca

SEQ ID NO: 2682319 - RNA, 19 nt, Artificial Sequence
  Description of Artificial Sequence: Synthetic oligonucleotide
uuguccccaaacugagccu

SEQ ID NO: 2682320 - RNA, 19 nt, Artificial Sequence
  Description of Artificial Sequence: Synthetic oligonucleotide
gauacccaccuugggcucc

SEQ ID NO: 2682321 - RNA, 19 nt, Artificial Sequence
  Description of Artificial Sequence: Synthetic oligonucleotide
acugggccggaugaucuuc

SEQ ID NO: 2682322 - RNA, 19 nt, Artificial Sequence
  Description of Artificial Sequence: Synthetic oligonucleotide
guagcggccagcugucuca

SEQ ID NO: 2682323 - RNA, 19 nt, Artificial Sequence
  Description of Artificial Sequence: Synthetic oligonucleotide
uagcgugccacuggguccc

SEQ ID NO: 2682324 - RNA, 19 nt, Artificial Sequence
  Description of Artificial Sequence: Synthetic oligonucleotide
uucacgaccuguccucguu

SEQ ID NO: 2682325 - RNA, 19 nt, Artificial Sequence
  Description of Artificial Sequence: Synthetic oligonucleotide
augcgcuggcaguacaccu

SEQ ID NO: 2682326 - RNA, 19 nt, Artificial Sequence
  Description of Artificial Sequence: Synthetic oligonucleotide
agcucuugcuguaggaacu

SEQ ID NO: 2682327 - RNA, 19 nt, Artificial Sequence
  Description of Artificial Sequence: Synthetic oligonucleotide
uguaucuagccagcagcuc

SEQ ID NO: 2682328 - RNA, 19 nt, Artificial Sequence
  Description of Artificial Sequence: Synthetic oligonucleotide
ugauacccaccuugggcuc

SEQ ID NO: 2682329 - RNA, 19 nt, Artificial Sequence
  Description of Artificial Sequence: Synthetic oligonucleotide
accagcucguguuccguga

SEQ ID NO: 2682330 - RNA, 19 nt, Artificial Sequence
  Description of Artificial Sequence: Synthetic oligonucleotide
gucucacugggccggauga

SEQ ID NO: 2682331 - RNA, 19 nt, Artificial Sequence
  Description of Artificial Sequence: Synthetic oligonucleotide
cagcuggcucucacgaagc

SEQ ID NO: 2682332 - RNA, 19 nt, Artificial Sequence
  Description of Artificial Sequence: Synthetic oligonucleotide
aggugauguagcggccagc

SEQ ID NO: 2682333 - RNA, 19 nt, Artificial Sequence
  Description of Artificial Sequence: Synthetic oligonucleotide
cuguaggaacugcuccagc

SEQ ID NO: 2682334 - RNA, 19 nt, Artificial Sequence
  Description of Artificial Sequence: Synthetic oligonucleotide
caugcgcuggcaguacacc

SEQ ID NO: 2682335 - RNA, 19 nt, Artificial Sequence
  Description of Artificial Sequence: Synthetic oligonucleotide
gauguagcggccagcuguc

SEQ ID NO: 2682336 - RNA, 19 nt, Artificial Sequence
  Description of Artificial Sequence: Synthetic oligonucleotide
cagguagccacggucauga

SEQ ID NO: 2682337 - RNA, 19 nt, Artificial Sequence
  Description of Artificial Sequence: Synthetic oligonucleotide
caccuugggcuccucuggg

SEQ ID NO: 2682338 - RNA, 19 nt, Artificial Sequence
  Description of Artificial Sequence: Synthetic oligonucleotide
cacgaccuguccucguuug

SEQ ID NO: 2682339 - RNA, 19 nt, Artificial Sequence
  Description of Artificial Sequence: Synthetic oligonucleotide
cacgaucagcgcccgagug

SEQ ID NO: 2682340 - RNA, 19 nt, Artificial Sequence
  Description of Artificial Sequence: Synthetic oligonucleotide
ugucaggucugugcgccug

SEQ ID NO: 2682341 - RNA, 19 nt, Artificial Sequence
  Description of Artificial Sequence: Synthetic oligonucleotide
uggcagagggcgucaugcc

SEQ ID NO: 2682342 - RNA, 19 nt, Artificial Sequence
  Description of Artificial Sequence: Synthetic oligonucleotide
auguuaaugagcagcucuu

SEQ ID NO: 2682343 - RNA, 19 nt, Artificial Sequence
  Description of Artificial Sequence: Synthetic oligonucleotide
ugcgcuggcaguacaccuu

SEQ ID NO: 2682344 - RNA, 19 nt, Artificial Sequence
  Description of Artificial Sequence: Synthetic oligonucleotide
cacugucaggucugugcgc

SEQ ID NO: 2682345 - RNA, 19 nt, Artificial Sequence
  Description of Artificial Sequence: Synthetic oligonucleotide
ugggaucaucguugugggc

SEQ ID NO: 2682346 - RNA, 19 nt, Artificial Sequence
  Description of Artificial Sequence: Synthetic oligonucleotide
cgguaggugauguagcggc

SEQ ID NO: 2682347 - RNA, 19 nt, Artificial Sequence
  Description of Artificial Sequence: Synthetic oligonucleotide
gcggaucuuccacagccgg

SEQ ID NO: 2682348 - RNA, 19 nt, Artificial Sequence
  Description of Artificial Sequence: Synthetic oligonucleotide
cuaggcagcuggcucucac

SEQ ID NO: 2682349 - RNA, 19 nt, Artificial Sequence
  Description of Artificial Sequence: Synthetic oligonucleotide
gucaggucugugcgccugg

SEQ ID NO: 2682350 - RNA, 19 nt, Artificial Sequence
  Description of Artificial Sequence: Synthetic oligonucleotide
caagugucugguccagcuc

SEQ ID NO: 2682351 - RNA, 19 nt, Artificial Sequence
  Description of Artificial Sequence: Synthetic oligonucleotide
ucuagccagcagcucuguc

SEQ ID NO: 2682352 - RNA, 19 nt, Artificial Sequence
  Description of Artificial Sequence: Synthetic oligonucleotide
ggucaugaccacaugcuca

SEQ ID NO: 2682353 - RNA, 19 nt, Artificial Sequence
  Description of Artificial Sequence: Synthetic oligonucleotide
acuaggcgguaggugaugu

SEQ ID NO: 2682354 - RNA, 19 nt, Artificial Sequence
  Description of Artificial Sequence: Synthetic oligonucleotide
agccacggucaugacacag

SEQ ID NO: 2682355 - RNA, 19 nt, Artificial Sequence
  Description of Artificial Sequence: Synthetic oligonucleotide
cucgucguccaugcugccg

SEQ ID NO: 2682356 - RNA, 19 nt, Artificial Sequence
  Description of Artificial Sequence: Synthetic oligonucleotide
ccgagugauguucuccucc

SEQ ID NO: 2682357 - RNA, 19 nt, Artificial Sequence
  Description of Artificial Sequence: Synthetic oligonucleotide
gaugaucuucacgaccugu

SEQ ID NO: 2682358 - RNA, 19 nt, Artificial Sequence
  Description of Artificial Sequence: Synthetic oligonucleotide
ggcagagggcgucaugccc

SEQ ID NO: 2682359 - RNA, 19 nt, Artificial Sequence
  Description of Artificial Sequence: Synthetic oligonucleotide
acugcacuaggcgguaggu

SEQ ID NO: 2682360 - RNA, 19 nt, Artificial Sequence
  Description of Artificial Sequence: Synthetic oligonucleotide
gcugcaugauggucuugcg

SEQ ID NO: 2682361 - RNA, 19 nt, Artificial Sequence
  Description of Artificial Sequence: Synthetic oligonucleotide
ucacgaccuguccucguuu

SEQ ID NO: 2682362 - RNA, 19 nt, Artificial Sequence
  Description of Artificial Sequence: Synthetic oligonucleotide
guaggugauguagcggcca

SEQ ID NO: 2682363 - RNA, 19 nt, Artificial Sequence
  Description of Artificial Sequence: Synthetic oligonucleotide
caucuggucugugggauca

SEQ ID NO: 2682364 - RNA, 19 nt, Artificial Sequence
  Description of Artificial Sequence: Synthetic oligonucleotide
accagcacugucaggucug

SEQ ID NO: 2682365 - RNA, 19 nt, Artificial Sequence
  Description of Artificial Sequence: Synthetic oligonucleotide
uggucuugauacccaccuu

SEQ ID NO: 2682366 - RNA, 19 nt, Artificial Sequence
  Description of Artificial Sequence: Synthetic oligonucleotide
guguuccgugauguuaaug

SEQ ID NO: 2682367 - RNA, 19 nt, Artificial Sequence
  Description of Artificial Sequence: Synthetic oligonucleotide
cuuggcagagggcgucaug

SEQ ID NO: 2682368 - RNA, 19 nt, Artificial Sequence
  Description of Artificial Sequence: Synthetic oligonucleotide
ccuugauggucuugauacc

SEQ ID NO: 2682369 - RNA, 19 nt, Artificial Sequence
  Description of Artificial Sequence: Synthetic oligonucleotide
aguacaccuugauggucuu

SEQ ID NO: 2682370 - RNA, 19 nt, Artificial Sequence
  Description of Artificial Sequence: Synthetic oligonucleotide
cucacugggccggaugauc

SEQ ID NO: 2682371 - RNA, 19 nt, Artificial Sequence
  Description of Artificial Sequence: Synthetic oligonucleotide
gugauguagcggccagcug

SEQ ID NO: 2682372 - RNA, 19 nt, Artificial Sequence
  Description of Artificial Sequence: Synthetic oligonucleotide
cucaagugucugguccagc

SEQ ID NO: 2682373 - RNA, 19 nt, Artificial Sequence
  Description of Artificial Sequence: Synthetic oligonucleotide
cacggucaugacacagcug

SEQ ID NO: 2682374 - RNA, 19 nt, Artificial Sequence
  Description of Artificial Sequence: Synthetic oligonucleotide
agcuuguaucuagccagca

SEQ ID NO: 2682375 - RNA, 19 nt, Artificial Sequence
  Description of Artificial Sequence: Synthetic oligonucleotide
agggcgucaugcccugcug

SEQ ID NO: 2682376 - RNA, 19 nt, Artificial Sequence
  Description of Artificial Sequence: Synthetic oligonucleotide
agguagccacggucaugac

SEQ ID NO: 2682377 - RNA, 19 nt, Artificial Sequence
  Description of Artificial Sequence: Synthetic oligonucleotide
uccccaaacugagccuuga

SEQ ID NO: 2682378 - RNA, 19 nt, Artificial Sequence
  Description of Artificial Sequence: Synthetic oligonucleotide
uguccucguuugauuccaa

SEQ ID NO: 2682379 - RNA, 19 nt, Artificial Sequence
  Description of Artificial Sequence: Synthetic oligonucleotide
ccuguccucguuugauucc

SEQ ID NO: 2682380 - RNA, 19 nt, Artificial Sequence
  Description of Artificial Sequence: Synthetic oligonucleotide
ggaucaucguugugggcca

SEQ ID NO: 2682381 - RNA, 19 nt, Artificial Sequence
  Description of Artificial Sequence: Synthetic oligonucleotide
gcggccagcugucucacug

SEQ ID NO: 2682382 - RNA, 19 nt, Artificial Sequence
  Description of Artificial Sequence: Synthetic oligonucleotide
acgaccuguccucguuuga

SEQ ID NO: 2682383 - RNA, 19 nt, Artificial Sequence
  Description of Artificial Sequence: Synthetic oligonucleotide
cugagccuugaacuccuca

SEQ ID NO: 2682384 - RNA, 19 nt, Artificial Sequence
  Description of Artificial Sequence: Synthetic oligonucleotide
aggucuccuccucgucguc

SEQ ID NO: 2682385 - RNA, 19 nt, Artificial Sequence
  Description of Artificial Sequence: Synthetic oligonucleotide
caucguugugggccaccag

SEQ ID NO: 2682386 - RNA, 19 nt, Artificial Sequence
  Description of Artificial Sequence: Synthetic oligonucleotide
acaccuugauggucuugau

SEQ ID NO: 2682387 - RNA, 19 nt, Artificial Sequence
  Description of Artificial Sequence: Synthetic oligonucleotide
ggguccccugccuggaucc

SEQ ID NO: 2682388 - RNA, 19 nt, Artificial Sequence
  Description of Artificial Sequence: Synthetic oligonucleotide
accagguagccacggucau

SEQ ID NO: 2682389 - RNA, 19 nt, Artificial Sequence
  Description of Artificial Sequence: Synthetic oligonucleotide
ccaccuugggcuccucugg

SEQ ID NO: 2682390 - RNA, 19 nt, Artificial Sequence
  Description of Artificial Sequence: Synthetic oligonucleotide
cugcacuaggcgguaggug

SEQ ID NO: 2682391 - RNA, 19 nt, Artificial Sequence
  Description of Artificial Sequence: Synthetic oligonucleotide
aaguagcgugccacugggu

SEQ ID NO: 2682392 - RNA, 19 nt, Artificial Sequence
  Description of Artificial Sequence: Synthetic oligonucleotide
gguaggugauguagcggcc

SEQ ID NO: 2682393 - RNA, 19 nt, Artificial Sequence
  Description of Artificial Sequence: Synthetic oligonucleotide
cuguccucguuugauucca

SEQ ID NO: 2682394 - RNA, 19 nt, Artificial Sequence
  Description of Artificial Sequence: Synthetic oligonucleotide
cucguguuccgugauguua

SEQ ID NO: 2682395 - RNA, 19 nt, Artificial Sequence
  Description of Artificial Sequence: Synthetic oligonucleotide
agggacugcuuggcagagg

SEQ ID NO: 2682396 - RNA, 19 nt, Artificial Sequence
  Description of Artificial Sequence: Synthetic oligonucleotide
ugggccggaugaucuucac

SEQ ID NO: 2682397 - RNA, 19 nt, Artificial Sequence
  Description of Artificial Sequence: Synthetic oligonucleotide
cagagggcgucaugcccug

SEQ ID NO: 2682398 - RNA, 19 nt, Artificial Sequence
  Description of Artificial Sequence: Synthetic oligonucleotide
ugugcgccugggucuuccu

SEQ ID NO: 2682399 - RNA, 19 nt, Artificial Sequence
  Description of Artificial Sequence: Synthetic oligonucleotide
agagggcgucaugcccugc

SEQ ID NO: 2682400 - RNA, 19 nt, Artificial Sequence
  Description of Artificial Sequence: Synthetic oligonucleotide
cagggacugcuuggcagag

SEQ ID NO: 2682401 - RNA, 19 nt, Artificial Sequence
  Description of Artificial Sequence: Synthetic oligonucleotide
gggcgucaugcccugcugc

SEQ ID NO: 2682402 - RNA, 19 nt, Artificial Sequence
  Description of Artificial Sequence: Synthetic oligonucleotide
guccucguuugauuccaaa

SEQ ID NO: 2682403 - RNA, 19 nt, Artificial Sequence
  Description of Artificial Sequence: Synthetic oligonucleotide
caccuugauggucuugaua

SEQ ID NO: 2682404 - RNA, 19 nt, Artificial Sequence
  Description of Artificial Sequence: Synthetic oligonucleotide
guacaccuugauggucuug

SEQ ID NO: 2682405 - RNA, 19 nt, Artificial Sequence
  Description of Artificial Sequence: Synthetic oligonucleotide
ccaaaguagcgugccacug

SEQ ID NO: 2682406 - RNA, 19 nt, Artificial Sequence
  Description of Artificial Sequence: Synthetic oligonucleotide
cagcucguguuccgugaug

SEQ ID NO: 2682407 - RNA, 19 nt, Artificial Sequence
  Description of Artificial Sequence: Synthetic oligonucleotide
ccucguuugauuccaaagu

SEQ ID NO: 2682408 - RNA, 19 nt, Artificial Sequence
  Description of Artificial Sequence: Synthetic oligonucleotide
cucacgaagcuuguaucua

SEQ ID NO: 2682409 - RNA, 19 nt, Artificial Sequence
  Description of Artificial Sequence: Synthetic oligonucleotide
cuacugcacuaggcgguag

SEQ ID NO: 2682410 - RNA, 19 nt, Artificial Sequence
  Description of Artificial Sequence: Synthetic oligonucleotide
cugugcgccugggucuucc

SEQ ID NO: 2682411 - RNA, 19 nt, Artificial Sequence
  Description of Artificial Sequence: Synthetic oligonucleotide
cagggaccagcucguguuc

SEQ ID NO: 2682412 - RNA, 19 nt, Artificial Sequence
  Description of Artificial Sequence: Synthetic oligonucleotide
acccaccuugggcuccucu

SEQ ID NO: 2682413 - RNA, 19 nt, Artificial Sequence
  Description of Artificial Sequence: Synthetic oligonucleotide
cacauacuuaggggccaug

SEQ ID NO: 2682414 - RNA, 19 nt, Artificial Sequence
  Description of Artificial Sequence: Synthetic oligonucleotide
cacuaggcgguaggugaug

SEQ ID NO: 2682415 - RNA, 19 nt, Artificial Sequence
  Description of Artificial Sequence: Synthetic oligonucleotide
cugugggaucaucguugug

SEQ ID NO: 2682416 - RNA, 19 nt, Artificial Sequence
  Description of Artificial Sequence: Synthetic oligonucleotide
ggugauguagcggccagcu

SEQ ID NO: 2682417 - RNA, 19 nt, Artificial Sequence
  Description of Artificial Sequence: Synthetic oligonucleotide
gagggcgucaugcccugcu

SEQ ID NO: 2682418 - RNA, 19 nt, Artificial Sequence
  Description of Artificial Sequence: Synthetic oligonucleotide
gcgcuggcaguacaccuug

SEQ ID NO: 2682419 - RNA, 19 nt, Artificial Sequence
  Description of Artificial Sequence: Synthetic oligonucleotide
ggcgucaugcccugcugca

SEQ ID NO: 2682420 - RNA, 19 nt, Artificial Sequence
  Description of Artificial Sequence: Synthetic oligonucleotide
uagccacggucaugacaca

SEQ ID NO: 2682421 - RNA, 19 nt, Artificial Sequence
  Description of Artificial Sequence: Synthetic oligonucleotide
gaucaucguugugggccac

SEQ ID NO: 2682422 - RNA, 19 nt, Artificial Sequence
  Description of Artificial Sequence: Synthetic oligonucleotide
uccuaggcagcuggcucuc

SEQ ID NO: 2682423 - RNA, 19 nt, Artificial Sequence
  Description of Artificial Sequence: Synthetic oligonucleotide
acugagccuugaacuccuc

SEQ ID NO: 2682424 - RNA, 19 nt, Artificial Sequence
  Description of Artificial Sequence: Synthetic oligonucleotide
cgaagcuuguaucuagcca

SEQ ID NO: 2682425 - RNA, 19 nt, Artificial Sequence
  Description of Artificial Sequence: Synthetic oligonucleotide
ccuugaacuccucaagugu

SEQ ID NO: 2682426 - RNA, 19 nt, Artificial Sequence
  Description of Artificial Sequence: Synthetic oligonucleotide
cugcuuggcagagggcguc

SEQ ID NO: 2682427 - RNA, 19 nt, Artificial Sequence
  Description of Artificial Sequence: Synthetic oligonucleotide
gcucuugcuguaggaacug

SEQ ID NO: 2682428 - RNA, 19 nt, Artificial Sequence
  Description of Artificial Sequence: Synthetic oligonucleotide
ggcaguacaccuugauggu

SEQ ID NO: 2682429 - RNA, 19 nt, Artificial Sequence
  Description of Artificial Sequence: Synthetic oligonucleotide
cgucaugcccugcugcacc

SEQ ID NO: 2682430 - RNA, 19 nt, Artificial Sequence
  Description of Artificial Sequence: Synthetic oligonucleotide
gcucucacgaagcuuguau

SEQ ID NO: 2682431 - RNA, 19 nt, Artificial Sequence
  Description of Artificial Sequence: Synthetic oligonucleotide
gcugcaccacgaucagcgc

SEQ ID NO: 2682432 - RNA, 19 nt, Artificial Sequence
  Description of Artificial Sequence: Synthetic oligonucleotide
cuuccacagccgguagguc

SEQ ID NO: 2682433 - RNA, 19 nt, Artificial Sequence
  Description of Artificial Sequence: Synthetic oligonucleotide
ucaugcccugcugcaccac

SEQ ID NO: 2682434 - RNA, 19 nt, Artificial Sequence
  Description of Artificial Sequence: Synthetic oligonucleotide
ccugcugcaccacgaucag

SEQ ID NO: 2682435 - RNA, 19 nt, Artificial Sequence
  Description of Artificial Sequence: Synthetic oligonucleotide
agugucugguccagcucau

SEQ ID NO: 2682436 - RNA, 19 nt, Artificial Sequence
  Description of Artificial Sequence: Synthetic oligonucleotide
auacccaccuugggcuccu

SEQ ID NO: 2682437 - RNA, 19 nt, Artificial Sequence
  Description of Artificial Sequence: Synthetic oligonucleotide
ggucugugcgccugggucu

SEQ ID NO: 2682438 - RNA, 19 nt, Artificial Sequence
  Description of Artificial Sequence: Synthetic oligonucleotide
gaccuguccucguuugauu

SEQ ID NO: 2682439 - RNA, 19 nt, Artificial Sequence
  Description of Artificial Sequence: Synthetic oligonucleotide
gcaguacaccuugaugguc

SEQ ID NO: 2682440 - RNA, 19 nt, Artificial Sequence
  Description of Artificial Sequence: Synthetic oligonucleotide
guccccaaacugagccuug

SEQ ID NO: 2682441 - RNA, 19 nt, Artificial Sequence
  Description of Artificial Sequence: Synthetic oligonucleotide
caugacacagcugcaugau

SEQ ID NO: 2682442 - RNA, 19 nt, Artificial Sequence
  Description of Artificial Sequence: Synthetic oligonucleotide
gaucagcgcccgagugaug

SEQ ID NO: 2682443 - RNA, 19 nt, Artificial Sequence
  Description of Artificial Sequence: Synthetic oligonucleotide
ccgugauguuaaugagcag

SEQ ID NO: 2682444 - RNA, 19 nt, Artificial Sequence
  Description of Artificial Sequence: Synthetic oligonucleotide
cggaugaucuucacgaccu

SEQ ID NO: 2682445 - RNA, 19 nt, Artificial Sequence
  Description of Artificial Sequence: Synthetic oligonucleotide
cuaggcgguaggugaugua

SEQ ID NO: 2682446 - RNA, 19 nt, Artificial Sequence
  Description of Artificial Sequence: Synthetic oligonucleotide
ccuuggucaugaccacaug

SEQ ID NO: 2682447 - RNA, 19 nt, Artificial Sequence
  Description of Artificial Sequence: Synthetic oligonucleotide
agcgugccacugggucccc

SEQ ID NO: 2682448 - RNA, 19 nt, Artificial Sequence
  Description of Artificial Sequence: Synthetic oligonucleotide
agcggccagcugucucacu

SEQ ID NO: 2682449 - RNA, 19 nt, Artificial Sequence
  Description of Artificial Sequence: Synthetic oligonucleotide
gcccgagugauguucuccu

SEQ ID NO: 2682450 - RNA, 19 nt, Artificial Sequence
  Description of Artificial Sequence: Synthetic oligonucleotide
ggucaugacacagcugcau

SEQ ID NO: 2682451 - RNA, 19 nt, Artificial Sequence
  Description of Artificial Sequence: Synthetic oligonucleotide
ggcuacugcacuaggcggu

SEQ ID NO: 2682452 - RNA, 19 nt, Artificial Sequence
  Description of Artificial Sequence: Synthetic oligonucleotide
cagcacugucaggucugug

SEQ ID NO: 2682453 - RNA, 19 nt, Artificial Sequence
  Description of Artificial Sequence: Synthetic oligonucleotide
cugcuccagcacauacuua

SEQ ID NO: 2682454 - RNA, 19 nt, Artificial Sequence
  Description of Artificial Sequence: Synthetic oligonucleotide
cuucacgaccuguccucgu

SEQ ID NO: 2682455 - RNA, 19 nt, Artificial Sequence
  Description of Artificial Sequence: Synthetic oligonucleotide
gugucugguccagcucauc

SEQ ID NO: 2682456 - RNA, 19 nt, Artificial Sequence
  Description of Artificial Sequence: Synthetic oligonucleotide
gcagagggcgucaugcccu

SEQ ID NO: 2682457 - RNA, 19 nt, Artificial Sequence
  Description of Artificial Sequence: Synthetic oligonucleotide
ggacugcuuggcagagggc

SEQ ID NO: 2682458 - RNA, 19 nt, Artificial Sequence
  Description of Artificial Sequence: Synthetic oligonucleotide
cggccagcugucucacugg

SEQ ID NO: 2682459 - RNA, 19 nt, Artificial Sequence
  Description of Artificial Sequence: Synthetic oligonucleotide
cacuggguuuguccccaaa

SEQ ID NO: 2682460 - RNA, 19 nt, Artificial Sequence
  Description of Artificial Sequence: Synthetic oligonucleotide
ggauccuaggcagcuggcu

SEQ ID NO: 2682461 - RNA, 19 nt, Artificial Sequence
  Description of Artificial Sequence: Synthetic oligonucleotide
cccgagugauguucuccuc

SEQ ID NO: 2682462 - RNA, 19 nt, Artificial Sequence
  Description of Artificial Sequence: Synthetic oligonucleotide
ggcagcuggcucucacgaa

SEQ ID NO: 2682463 - RNA, 19 nt, Artificial Sequence
  Description of Artificial Sequence: Synthetic oligonucleotide
aucuggucugugggaucau

SEQ ID NO: 2682464 - RNA, 19 nt, Artificial Sequence
  Description of Artificial Sequence: Synthetic oligonucleotide
gcaccacgaucagcgcccg

SEQ ID NO: 2682465 - RNA, 19 nt, Artificial Sequence
  Description of Artificial Sequence: Synthetic oligonucleotide
gcgccugggucuuccuuca

SEQ ID NO: 2682466 - RNA, 19 nt, Artificial Sequence
  Description of Artificial Sequence: Synthetic oligonucleotide
ccagguagccacggucaug

SEQ ID NO: 2682467 - RNA, 19 nt, Artificial Sequence
  Description of Artificial Sequence: Synthetic oligonucleotide
ccacggucaugacacagcu

SEQ ID NO: 2682468 - RNA, 19 nt, Artificial Sequence
  Description of Artificial Sequence: Synthetic oligonucleotide
gcaugauggucuugcggau

SEQ ID NO: 2682469 - RNA, 19 nt, Artificial Sequence
  Description of Artificial Sequence: Synthetic oligonucleotide
gcccugcugcaccacgauc

SEQ ID NO: 2682470 - RNA, 19 nt, Artificial Sequence
  Description of Artificial Sequence: Synthetic oligonucleotide
cgugccacuggguccccug

SEQ ID NO: 2682471 - RNA, 19 nt, Artificial Sequence
  Description of Artificial Sequence: Synthetic oligonucleotide
ucugugcgccugggucuuc

SEQ ID NO: 2682472 - RNA, 19 nt, Artificial Sequence
  Description of Artificial Sequence: Synthetic oligonucleotide
gccugggucuuccuucacu

SEQ ID NO: 2682473 - RNA, 19 nt, Artificial Sequence
  Description of Artificial Sequence: Synthetic oligonucleotide
cgcccgagugauguucucc

SEQ ID NO: 2682474 - RNA, 19 nt, Artificial Sequence
  Description of Artificial Sequence: Synthetic oligonucleotide
gcgucaugcccugcugcac

SEQ ID NO: 2682475 - RNA, 19 nt, Artificial Sequence
  Description of Artificial Sequence: Synthetic oligonucleotide
gcuacugcacuaggcggua

SEQ ID NO: 2682476 - RNA, 19 nt, Artificial Sequence
  Description of Artificial Sequence: Synthetic oligonucleotide
gggccauguccaccaggga

SEQ ID NO: 2682477 - RNA, 19 nt, Artificial Sequence
  Description of Artificial Sequence: Synthetic oligonucleotide
cgagugauguucuccuccu

SEQ ID NO: 2682478 - RNA, 19 nt, Artificial Sequence
  Description of Artificial Sequence: Synthetic oligonucleotide
cugucaggucugugcgccu

SEQ ID NO: 2682479 - RNA, 19 nt, Artificial Sequence
  Description of Artificial Sequence: Synthetic oligonucleotide
caggucugugcgccugggu

SEQ ID NO: 2682480 - RNA, 19 nt, Artificial Sequence
  Description of Artificial Sequence: Synthetic oligonucleotide
cugucaccuccuccuuggu

SEQ ID NO: 2682481 - RNA, 19 nt, Artificial Sequence
  Description of Artificial Sequence: Synthetic oligonucleotide
caccacgaucagcgcccga

SEQ ID NO: 2682482 - RNA, 19 nt, Artificial Sequence
  Description of Artificial Sequence: Synthetic oligonucleotide
gucugugcgccugggucuu

SEQ ID NO: 2682483 - RNA, 19 nt, Artificial Sequence
  Description of Artificial Sequence: Synthetic oligonucleotide
cacugggccggaugaucuu

SEQ ID NO: 2682484 - RNA, 19 nt, Artificial Sequence
  Description of Artificial Sequence: Synthetic oligonucleotide
ggcucucacgaagcuugua

SEQ ID NO: 2682485 - RNA, 19 nt, Artificial Sequence
  Description of Artificial Sequence: Synthetic oligonucleotide
gcuggcucucacgaagcuu

SEQ ID NO: 2682486 - RNA, 19 nt, Artificial Sequence
  Description of Artificial Sequence: Synthetic oligonucleotide
gcacuaggcgguaggugau

SEQ ID NO: 2682487 - RNA, 19 nt, Artificial Sequence
  Description of Artificial Sequence: Synthetic oligonucleotide
gcucguguuccgugauguu

SEQ ID NO: 2682488 - RNA, 19 nt, Artificial Sequence
  Description of Artificial Sequence: Synthetic oligonucleotide
ccacgaucagcgcccgagu

SEQ ID NO: 2682489 - RNA, 19 nt, Artificial Sequence
  Description of Artificial Sequence: Synthetic oligonucleotide
cgaucagcgcccgagugau

SEQ ID NO: 2682490 - RNA, 19 nt, Artificial Sequence
  Description of Artificial Sequence: Synthetic oligonucleotide
ccuaggcagcuggcucuca

SEQ ID NO: 2682491 - RNA, 19 nt, Artificial Sequence
  Description of Artificial Sequence: Synthetic oligonucleotide
cgccugggucuuccuucac

SEQ ID NO: 2682492 - RNA, 19 nt, Artificial Sequence
  Description of Artificial Sequence: Synthetic oligonucleotide
gguccccugccuggauccu

SEQ ID NO: 2682493 - RNA, 19 nt, Artificial Sequence
  Description of Artificial Sequence: Synthetic oligonucleotide
cgaccuguccucguuugau

SEQ ID NO: 2682494 - RNA, 19 nt, Artificial Sequence
  Description of Artificial Sequence: Synthetic oligonucleotide
ccagcacugucaggucugu

SEQ ID NO: 2682495 - RNA, 19 nt, Artificial Sequence
  Description of Artificial Sequence: Synthetic oligonucleotide
cguguuccgugauguuaau

SEQ ID NO: 2682496 - RNA, 19 nt, Artificial Sequence
  Description of Artificial Sequence: Synthetic oligonucleotide
ccuccucgucguccaugcu

SEQ ID NO: 2682497 - RNA, 19 nt, Artificial Sequence
  Description of Artificial Sequence: Synthetic oligonucleotide
gcgugccacuggguccccu

SEQ ID NO: 2682498 - RNA, 19 nt, Artificial Sequence
  Description of Artificial Sequence: Synthetic oligonucleotide
aaaauugacauccuugccc

SEQ ID NO: 2682499 - RNA, 19 nt, Artificial Sequence
  Description of Artificial Sequence: Synthetic oligonucleotide
auuauaauggcuuuccggc

SEQ ID NO: 2682500 - RNA, 19 nt, Artificial Sequence
  Description of Artificial Sequence: Synthetic oligonucleotide
aauuauaauggcuuuccgg

SEQ ID NO: 2682501 - RNA, 19 nt, Artificial Sequence
  Description of Artificial Sequence: Synthetic oligonucleotide
aaaauuauaauggcuuucc

SEQ ID NO: 2682502 - RNA, 19 nt, Artificial Sequence
  Description of Artificial Sequence: Synthetic oligonucleotide
aaaguuuccaccuugugcu

SEQ ID NO: 2682503 - RNA, 19 nt, Artificial Sequence
  Description of Artificial Sequence: Synthetic oligonucleotide
aaauugacauccuugcccg

SEQ ID NO: 2682504 - RNA, 19 nt, Artificial Sequence
  Description of Artificial Sequence: Synthetic oligonucleotide
agcaaugaagacuacgugc

SEQ ID NO: 2682505 - RNA, 19 nt, Artificial Sequence
  Description of Artificial Sequence: Synthetic oligonucleotide
ucuaagugaaccuuuauga

SEQ ID NO: 2682506 - RNA, 19 nt, Artificial Sequence
  Description of Artificial Sequence: Synthetic oligonucleotide
gaauucaaaauugacaucc

SEQ ID NO: 2682507 - RNA, 19 nt, Artificial Sequence
  Description of Artificial Sequence: Synthetic oligonucleotide
aagugaaccuuuaugagcc

SEQ ID NO: 2682508 - RNA, 19 nt, Artificial Sequence
  Description of Artificial Sequence: Synthetic oligonucleotide
acuuuuacaacugaaacuc

SEQ ID NO: 2682509 - RNA, 19 nt, Artificial Sequence
  Description of Artificial Sequence: Synthetic oligonucleotide
uccaguuucacacggaucc

SEQ ID NO: 2682510 - RNA, 19 nt, Artificial Sequence
  Description of Artificial Sequence: Synthetic oligonucleotide
augaaugacauuuauucag

SEQ ID NO: 2682511 - RNA, 19 nt, Artificial Sequence
  Description of Artificial Sequence: Synthetic oligonucleotide
uuuacaacugaaacucugg

SEQ ID NO: 2682512 - RNA, 19 nt, Artificial Sequence
  Description of Artificial Sequence: Synthetic oligonucleotide
ucaaaauugacauccuugc

SEQ ID NO: 2682513 - RNA, 19 nt, Artificial Sequence
  Description of Artificial Sequence: Synthetic oligonucleotide
aagacuacgugcuucccac

SEQ ID NO: 2682514 - RNA, 19 nt, Artificial Sequence
  Description of Artificial Sequence: Synthetic oligonucleotide
aaauuauaauggcuuuccg

SEQ ID NO: 2682515 - RNA, 19 nt, Artificial Sequence
  Description of Artificial Sequence: Synthetic oligonucleotide
cauuuauucagucauuuac

SEQ ID NO: 2682516 - RNA, 19 nt, Artificial Sequence
  Description of Artificial Sequence: Synthetic oligonucleotide
accuuuaugagccggcugc

SEQ ID NO: 2682517 - RNA, 19 nt, Artificial Sequence
  Description of Artificial Sequence: Synthetic oligonucleotide
aaugacauuuauucaguca

SEQ ID NO: 2682518 - RNA, 19 nt, Artificial Sequence
  Description of Artificial Sequence: Synthetic oligonucleotide
ucuggaacgauuucaacug

SEQ ID NO: 2682519 - RNA, 19 nt, Artificial Sequence
  Description of Artificial Sequence: Synthetic oligonucleotide
acgauuucaacugaggaac

SEQ ID NO: 2682520 - RNA, 19 nt, Artificial Sequence
  Description of Artificial Sequence: Synthetic oligonucleotide
agucauuuacuuuuacaac

SEQ ID NO: 2682521 - RNA, 19 nt, Artificial Sequence
  Description of Artificial Sequence: Synthetic oligonucleotide
ugggaauucaaaauugaca

SEQ ID NO: 2682522 - RNA, 19 nt, Artificial Sequence
  Description of Artificial Sequence: Synthetic oligonucleotide
ucaacugaggaacugguac

SEQ ID NO: 2682523 - RNA, 19 nt, Artificial Sequence
  Description of Artificial Sequence: Synthetic oligonucleotide
uaagugaaccuuuaugagc

SEQ ID NO: 2682524 - RNA, 19 nt, Artificial Sequence
  Description of Artificial Sequence: Synthetic oligonucleotide
ugugcuuugucuaagugaa

SEQ ID NO: 2682525 - RNA, 19 nt, Artificial Sequence
  Description of Artificial Sequence: Synthetic oligonucleotide
uauucagucauuuacuuuu

SEQ ID NO: 2682526 - RNA, 19 nt, Artificial Sequence
  Description of Artificial Sequence: Synthetic oligonucleotide
ugagcaaugaagacuacgu

SEQ ID NO: 2682527 - RNA, 19 nt, Artificial Sequence
  Description of Artificial Sequence: Synthetic oligonucleotide
ucguacuuggauuuucugg

SEQ ID NO: 2682528 - RNA, 19 nt, Artificial Sequence
  Description of Artificial Sequence: Synthetic oligonucleotide
acuuggauuuucuggaacg

SEQ ID NO: 2682529 - RNA, 19 nt, Artificial Sequence
  Description of Artificial Sequence: Synthetic oligonucleotide
uuuucuccaauucacgaac

SEQ ID NO: 2682530 - RNA, 19 nt, Artificial Sequence
  Description of Artificial Sequence: Synthetic oligonucleotide
aacucgucuggcuucucgc

SEQ ID NO: 2682531 - RNA, 19 nt, Artificial Sequence
  Description of Artificial Sequence: Synthetic oligonucleotide
aauggcaucgugcacugca

SEQ ID NO: 2682532 - RNA, 19 nt, Artificial Sequence
  Description of Artificial Sequence: Synthetic oligonucleotide
uaugaaugacauuuauuca

SEQ ID NO: 2682533 - RNA, 19 nt, Artificial Sequence
  Description of Artificial Sequence: Synthetic oligonucleotide
augacauuuauucagucau

SEQ ID NO: 2682534 - RNA, 19 nt, Artificial Sequence
  Description of Artificial Sequence: Synthetic oligonucleotide
uucuggaacgauuucaacu

SEQ ID NO: 2682535 - RNA, 19 nt, Artificial Sequence
  Description of Artificial Sequence: Synthetic oligonucleotide
cuaagugaaccuuuaugag

SEQ ID NO: 2682536 - RNA, 19 nt, Artificial Sequence
  Description of Artificial Sequence: Synthetic oligonucleotide
uugagaucggaguucaucu

SEQ ID NO: 2682537 - RNA, 19 nt, Artificial Sequence
  Description of Artificial Sequence: Synthetic oligonucleotide
aacucugggaauucaaaau

SEQ ID NO: 2682538 - RNA, 19 nt, Artificial Sequence
  Description of Artificial Sequence: Synthetic oligonucleotide
ugcuuugucuaagugaacc

SEQ ID NO: 2682539 - RNA, 19 nt, Artificial Sequence
  Description of Artificial Sequence: Synthetic oligonucleotide
aaucucacuugggaagacc

SEQ ID NO: 2682540 - RNA, 19 nt, Artificial Sequence
  Description of Artificial Sequence: Synthetic oligonucleotide
aagaauggcaucgugcacu

SEQ ID NO: 2682541 - RNA, 19 nt, Artificial Sequence
  Description of Artificial Sequence: Synthetic oligonucleotide
acuucuggggcgcuuuugc

SEQ ID NO: 2682542 - RNA, 19 nt, Artificial Sequence
  Description of Artificial Sequence: Synthetic oligonucleotide
ucugggaauucaaaauuga

SEQ ID NO: 2682543 - RNA, 19 nt, Artificial Sequence
  Description of Artificial Sequence: Synthetic oligonucleotide
ucagucauuuacuuuuaca

SEQ ID NO: 2682544 - RNA, 19 nt, Artificial Sequence
  Description of Artificial Sequence: Synthetic oligonucleotide
cacaaucucacuugggaag

SEQ ID NO: 2682545 - RNA, 19 nt, Artificial Sequence
  Description of Artificial Sequence: Synthetic oligonucleotide
accaccaacuucaauuucc

SEQ ID NO: 2682546 - RNA, 19 nt, Artificial Sequence
  Description of Artificial Sequence: Synthetic oligonucleotide
acgaucuuggcgcucgagc

SEQ ID NO: 2682547 - RNA, 19 nt, Artificial Sequence
  Description of Artificial Sequence: Synthetic oligonucleotide
aagaccaaguccucaagaa

SEQ ID NO: 2682548 - RNA, 19 nt, Artificial Sequence
  Description of Artificial Sequence: Synthetic oligonucleotide
ucgagcugaacauggcucg

SEQ ID NO: 2682549 - RNA, 19 nt, Artificial Sequence
  Description of Artificial Sequence: Synthetic oligonucleotide
uugugcucuacauuguucu

SEQ ID NO: 2682550 - RNA, 19 nt, Artificial Sequence
  Description of Artificial Sequence: Synthetic oligonucleotide
uuuauucagucauuuacuu

SEQ ID NO: 2682551 - RNA, 19 nt, Artificial Sequence
  Description of Artificial Sequence: Synthetic oligonucleotide
uuauaauggcuuuccggcc

SEQ ID NO: 2682552 - RNA, 19 nt, Artificial Sequence
  Description of Artificial Sequence: Synthetic oligonucleotide
acauggcucgcccuuaagg

SEQ ID NO: 2682553 - RNA, 19 nt, Artificial Sequence
  Description of Artificial Sequence: Synthetic oligonucleotide
gaccaaguccucaagaaug

SEQ ID NO: 2682554 - RNA, 19 nt, Artificial Sequence
  Description of Artificial Sequence: Synthetic oligonucleotide
gagggugcgacuucugggg

SEQ ID NO: 2682555 - RNA, 19 nt, Artificial Sequence
  Description of Artificial Sequence: Synthetic oligonucleotide
gaacgauuucaacugagga

SEQ ID NO: 2682556 - RNA, 19 nt, Artificial Sequence
  Description of Artificial Sequence: Synthetic oligonucleotide
ucuacauuguucugcugug

SEQ ID NO: 2682557 - RNA, 19 nt, Artificial Sequence
  Description of Artificial Sequence: Synthetic oligonucleotide
ugagggugcgacuucuggg

SEQ ID NO: 2682558 - RNA, 19 nt, Artificial Sequence
  Description of Artificial Sequence: Synthetic oligonucleotide
uucuuauacacaccagaaa

SEQ ID NO: 2682559 - RNA, 19 nt, Artificial Sequence
  Description of Artificial Sequence: Synthetic oligonucleotide
uucacacggauccucuugc

SEQ ID NO: 2682560 - RNA, 19 nt, Artificial Sequence
  Description of Artificial Sequence: Synthetic oligonucleotide
aguuggcuugggcagaauc

SEQ ID NO: 2682561 - RNA, 19 nt, Artificial Sequence
  Description of Artificial Sequence: Synthetic oligonucleotide
uuuccggccaccaccaacu

SEQ ID NO: 2682562 - RNA, 19 nt, Artificial Sequence
  Description of Artificial Sequence: Synthetic oligonucleotide
ugaaccuuuaugagccggc

SEQ ID NO: 2682563 - RNA, 19 nt, Artificial Sequence
  Description of Artificial Sequence: Synthetic oligonucleotide
auuuauucagucauuuacu

SEQ ID NO: 2682564 - RNA, 19 nt, Artificial Sequence
  Description of Artificial Sequence: Synthetic oligonucleotide
uacauuguucugcugugcu

SEQ ID NO: 2682565 - RNA, 19 nt, Artificial Sequence
  Description of Artificial Sequence: Synthetic oligonucleotide
ugccgugauguucagcucc

SEQ ID NO: 2682566 - RNA, 19 nt, Artificial Sequence
  Description of Artificial Sequence: Synthetic oligonucleotide
auguucagcucccgcacgc

SEQ ID NO: 2682567 - RNA, 19 nt, Artificial Sequence
  Description of Artificial Sequence: Synthetic oligonucleotide
cagucauuuacuuuuacaa

SEQ ID NO: 2682568 - RNA, 19 nt, Artificial Sequence
  Description of Artificial Sequence: Synthetic oligonucleotide
uuggcugccgugauguuca

SEQ ID NO: 2682569 - RNA, 19 nt, Artificial Sequence
  Description of Artificial Sequence: Synthetic oligonucleotide
caaaauugacauccuugcc

SEQ ID NO: 2682570 - RNA, 19 nt, Artificial Sequence
  Description of Artificial Sequence: Synthetic oligonucleotide
uuucuccaauucacgaacc

SEQ ID NO: 2682571 - RNA, 19 nt, Artificial Sequence
  Description of Artificial Sequence: Synthetic oligonucleotide
cucugggaauucaaaauug

SEQ ID NO: 2682572 - RNA, 19 nt, Artificial Sequence
  Description of Artificial Sequence: Synthetic oligonucleotide
uccgaguuggcuugggcag

SEQ ID NO: 2682573 - RNA, 19 nt, Artificial Sequence
  Description of Artificial Sequence: Synthetic oligonucleotide
uuugucuaagugaaccuuu

SEQ ID NO: 2682574 - RNA, 19 nt, Artificial Sequence
  Description of Artificial Sequence: Synthetic oligonucleotide
ugagcuucuuauacacacc

SEQ ID NO: 2682575 - RNA, 19 nt, Artificial Sequence
  Description of Artificial Sequence: Synthetic oligonucleotide
ucgccauugggcuucacga

SEQ ID NO: 2682576 - RNA, 19 nt, Artificial Sequence
  Description of Artificial Sequence: Synthetic oligonucleotide
ugaaacucugggaauucaa

SEQ ID NO: 2682577 - RNA, 19 nt, Artificial Sequence
  Description of Artificial Sequence: Synthetic oligonucleotide
uccaauucacgaaccaguc

SEQ ID NO: 2682578 - RNA, 19 nt, Artificial Sequence
  Description of Artificial Sequence: Synthetic oligonucleotide
ugauguucagcucccgcac

SEQ ID NO: 2682579 - RNA, 19 nt, Artificial Sequence
  Description of Artificial Sequence: Synthetic oligonucleotide
gagcuucuuauacacacca

SEQ ID NO: 2682580 - RNA, 19 nt, Artificial Sequence
  Description of Artificial Sequence: Synthetic oligonucleotide
cugggaauucaaaauugac

SEQ ID NO: 2682581 - RNA, 19 nt, Artificial Sequence
  Description of Artificial Sequence: Synthetic oligonucleotide
uucacgaucuuggcgcucg

SEQ ID NO: 2682582 - RNA, 19 nt, Artificial Sequence
  Description of Artificial Sequence: Synthetic oligonucleotide
acucgucuggcuucucgcc

SEQ ID NO: 2682583 - RNA, 19 nt, Artificial Sequence
  Description of Artificial Sequence: Synthetic oligonucleotide
ucuccaauucacgaaccag

SEQ ID NO: 2682584 - RNA, 19 nt, Artificial Sequence
  Description of Artificial Sequence: Synthetic oligonucleotide
gauguucagcucccgcacg

SEQ ID NO: 2682585 - RNA, 19 nt, Artificial Sequence
  Description of Artificial Sequence: Synthetic oligonucleotide
gaacucgucuggcuucucg

SEQ ID NO: 2682586 - RNA, 19 nt, Artificial Sequence
  Description of Artificial Sequence: Synthetic oligonucleotide
ucuggggcgcuuuugcuug

SEQ ID NO: 2682587 - RNA, 19 nt, Artificial Sequence
  Description of Artificial Sequence: Synthetic oligonucleotide
ggcuucacgaucuuggcgc

SEQ ID NO: 2682588 - RNA, 19 nt, Artificial Sequence
  Description of Artificial Sequence: Synthetic oligonucleotide
auaauggcuuuccggccac

SEQ ID NO: 2682589 - RNA, 19 nt, Artificial Sequence
  Description of Artificial Sequence: Synthetic oligonucleotide
aaguuuccaccuugugcuc

SEQ ID NO: 2682590 - RNA, 19 nt, Artificial Sequence
  Description of Artificial Sequence: Synthetic oligonucleotide
ugcggcuuuuccgaguugg

SEQ ID NO: 2682591 - RNA, 19 nt, Artificial Sequence
  Description of Artificial Sequence: Synthetic oligonucleotide
ucaauuuccuuggcugccg

SEQ ID NO: 2682592 - RNA, 19 nt, Artificial Sequence
  Description of Artificial Sequence: Synthetic oligonucleotide
uuccgaguuggcuugggca

SEQ ID NO: 2682593 - RNA, 19 nt, Artificial Sequence
  Description of Artificial Sequence: Synthetic oligonucleotide
gagcaaugaagacuacgug

SEQ ID NO: 2682594 - RNA, 19 nt, Artificial Sequence
  Description of Artificial Sequence: Synthetic oligonucleotide
acgugcuucccacugaacu

SEQ ID NO: 2682595 - RNA, 19 nt, Artificial Sequence
  Description of Artificial Sequence: Synthetic oligonucleotide
aaccuuuaugagccggcug

SEQ ID NO: 2682596 - RNA, 19 nt, Artificial Sequence
  Description of Artificial Sequence: Synthetic oligonucleotide
gaaugacauuuauucaguc

SEQ ID NO: 2682597 - RNA, 19 nt, Artificial Sequence
  Description of Artificial Sequence: Synthetic oligonucleotide
uucuccaauucacgaacca

SEQ ID NO: 2682598 - RNA, 19 nt, Artificial Sequence
  Description of Artificial Sequence: Synthetic oligonucleotide
gaagaccaaguccucaaga

SEQ ID NO: 2682599 - RNA, 19 nt, Artificial Sequence
  Description of Artificial Sequence: Synthetic oligonucleotide
uuuaugagccggcugccau

SEQ ID NO: 2682600 - RNA, 19 nt, Artificial Sequence
  Description of Artificial Sequence: Synthetic oligonucleotide
uuggcgcucgagcugaaca

SEQ ID NO: 2682601 - RNA, 19 nt, Artificial Sequence
  Description of Artificial Sequence: Synthetic oligonucleotide
acucugggaauucaaaauu

SEQ ID NO: 2682602 - RNA, 19 nt, Artificial Sequence
  Description of Artificial Sequence: Synthetic oligonucleotide
cuugggaagaccaaguccu

SEQ ID NO: 2682603 - RNA, 19 nt, Artificial Sequence
  Description of Artificial Sequence: Synthetic oligonucleotide
uggcuuuccggccaccacc

SEQ ID NO: 2682604 - RNA, 19 nt, Artificial Sequence
  Description of Artificial Sequence: Synthetic oligonucleotide
ugcgccuugagaucggagu

SEQ ID NO: 2682605 - RNA, 19 nt, Artificial Sequence
  Description of Artificial Sequence: Synthetic oligonucleotide
uucaauuuccuuggcugcc

SEQ ID NO: 2682606 - RNA, 19 nt, Artificial Sequence
  Description of Artificial Sequence: Synthetic oligonucleotide
aaguccucaagaauggcau

SEQ ID NO: 2682607 - RNA, 19 nt, Artificial Sequence
  Description of Artificial Sequence: Synthetic oligonucleotide
ugcucuacauuguucugcu

SEQ ID NO: 2682608 - RNA, 19 nt, Artificial Sequence
  Description of Artificial Sequence: Synthetic oligonucleotide
uuauucagucauuuacuuu

SEQ ID NO: 2682609 - RNA, 19 nt, Artificial Sequence
  Description of Artificial Sequence: Synthetic oligonucleotide
cugagcaaugaagacuacg

SEQ ID NO: 2682610 - RNA, 19 nt, Artificial Sequence
  Description of Artificial Sequence: Synthetic oligonucleotide
aaccagucguacuuggauu

SEQ ID NO: 2682611 - RNA, 19 nt, Artificial Sequence
  Description of Artificial Sequence: Synthetic oligonucleotide
cuucuuauacacaccagaa

SEQ ID NO: 2682612 - RNA, 19 nt, Artificial Sequence
  Description of Artificial Sequence: Synthetic oligonucleotide
auucacgaaccagucguac

SEQ ID NO: 2682613 - RNA, 19 nt, Artificial Sequence
  Description of Artificial Sequence: Synthetic oligonucleotide
aauuuccuuggcugccgug

SEQ ID NO: 2682614 - RNA, 19 nt, Artificial Sequence
  Description of Artificial Sequence: Synthetic oligonucleotide
gggaauucaaaauugacau

SEQ ID NO: 2682615 - RNA, 19 nt, Artificial Sequence
  Description of Artificial Sequence: Synthetic oligonucleotide
cucgagcugaacauggcuc

SEQ ID NO: 2682616 - RNA, 19 nt, Artificial Sequence
  Description of Artificial Sequence: Synthetic oligonucleotide
gacuacgugcuucccacug

SEQ ID NO: 2682617 - RNA, 19 nt, Artificial Sequence
  Description of Artificial Sequence: Synthetic oligonucleotide
cugagagaugccagacucg

SEQ ID NO: 2682618 - RNA, 19 nt, Artificial Sequence
  Description of Artificial Sequence: Synthetic oligonucleotide
acgaaccagucguacuugg

SEQ ID NO: 2682619 - RNA, 19 nt, Artificial Sequence
  Description of Artificial Sequence: Synthetic oligonucleotide
uucagucauuuacuuuuac

SEQ ID NO: 2682620 - RNA, 19 nt, Artificial Sequence
  Description of Artificial Sequence: Synthetic oligonucleotide
uucacgaaccagucguacu

SEQ ID NO: 2682621 - RNA, 19 nt, Artificial Sequence
  Description of Artificial Sequence: Synthetic oligonucleotide
gaagacuacgugcuuccca

SEQ ID NO: 2682622 - RNA, 19 nt, Artificial Sequence
  Description of Artificial Sequence: Synthetic oligonucleotide
uguucugcugugcuuuguc

SEQ ID NO: 2682623 - RNA, 19 nt, Artificial Sequence
  Description of Artificial Sequence: Synthetic oligonucleotide
agaauggcaucgugcacug

SEQ ID NO: 2682624 - RNA, 19 nt, Artificial Sequence
  Description of Artificial Sequence: Synthetic oligonucleotide
cuugugcucuacauuguuc

SEQ ID NO: 2682625 - RNA, 19 nt, Artificial Sequence
  Description of Artificial Sequence: Synthetic oligonucleotide
ucgcccuuaaggagugccg

SEQ ID NO: 2682626 - RNA, 19 nt, Artificial Sequence
  Description of Artificial Sequence: Synthetic oligonucleotide
ugagccggcugccauccag

SEQ ID NO: 2682627 - RNA, 19 nt, Artificial Sequence
  Description of Artificial Sequence: Synthetic oligonucleotide
auggcucgcccuuaaggag

SEQ ID NO: 2682628 - RNA, 19 nt, Artificial Sequence
  Description of Artificial Sequence: Synthetic oligonucleotide
uuucuggaacgauuucaac

SEQ ID NO: 2682629 - RNA, 19 nt, Artificial Sequence
  Description of Artificial Sequence: Synthetic oligonucleotide
cuugagaucggaguucauc

SEQ ID NO: 2682630 - RNA, 19 nt, Artificial Sequence
  Description of Artificial Sequence: Synthetic oligonucleotide
uuuccgaguuggcuugggc

SEQ ID NO: 2682631 - RNA, 19 nt, Artificial Sequence
  Description of Artificial Sequence: Synthetic oligonucleotide
agcucccgcacgcugcgcc

SEQ ID NO: 2682632 - RNA, 19 nt, Artificial Sequence
  Description of Artificial Sequence: Synthetic oligonucleotide
cuggcuucucgccauuggg

SEQ ID NO: 2682633 - RNA, 19 nt, Artificial Sequence
  Description of Artificial Sequence: Synthetic oligonucleotide
aacauggcucgcccuuaag

SEQ ID NO: 2682634 - RNA, 19 nt, Artificial Sequence
  Description of Artificial Sequence: Synthetic oligonucleotide
cucgccauugggcuucacg

SEQ ID NO: 2682635 - RNA, 19 nt, Artificial Sequence
  Description of Artificial Sequence: Synthetic oligonucleotide
caauucacgaaccagucgu

SEQ ID NO: 2682636 - RNA, 19 nt, Artificial Sequence
  Description of Artificial Sequence: Synthetic oligonucleotide
cugugcuuugucuaaguga

SEQ ID NO: 2682637 - RNA, 19 nt, Artificial Sequence
  Description of Artificial Sequence: Synthetic oligonucleotide
uccucugagcaaugaagac

SEQ ID NO: 2682638 - RNA, 19 nt, Artificial Sequence
  Description of Artificial Sequence: Synthetic oligonucleotide
gugagggugcgacuucugg

SEQ ID NO: 2682639 - RNA, 19 nt, Artificial Sequence
  Description of Artificial Sequence: Synthetic oligonucleotide
uaugagccggcugccaucc

SEQ ID NO: 2682640 - RNA, 19 nt, Artificial Sequence
  Description of Artificial Sequence: Synthetic oligonucleotide
ugugcucuacauuguucug

SEQ ID NO: 2682641 - RNA, 19 nt, Artificial Sequence
  Description of Artificial Sequence: Synthetic oligonucleotide
uugucuaagugaaccuuua

SEQ ID NO: 2682642 - RNA, 19 nt, Artificial Sequence
  Description of Artificial Sequence: Synthetic oligonucleotide
uccaccuugugcucuacau

SEQ ID NO: 2682643 - RNA, 19 nt, Artificial Sequence
  Description of Artificial Sequence: Synthetic oligonucleotide
agggugcgacuucuggggc

SEQ ID NO: 2682644 - RNA, 19 nt, Artificial Sequence
  Description of Artificial Sequence: Synthetic oligonucleotide
ugccauccaguuucacacg

SEQ ID NO: 2682645 - RNA, 19 nt, Artificial Sequence
  Description of Artificial Sequence: Synthetic oligonucleotide
agaccaaguccucaagaau

SEQ ID NO: 2682646 - RNA, 19 nt, Artificial Sequence
  Description of Artificial Sequence: Synthetic oligonucleotide
ugucuaagugaaccuuuau

SEQ ID NO: 2682647 - RNA, 19 nt, Artificial Sequence
  Description of Artificial Sequence: Synthetic oligonucleotide
cauggcucgcccuuaagga

SEQ ID NO: 2682648 - RNA, 19 nt, Artificial Sequence
  Description of Artificial Sequence: Synthetic oligonucleotide
gugauguucagcucccgca

SEQ ID NO: 2682649 - RNA, 19 nt, Artificial Sequence
  Description of Artificial Sequence: Synthetic oligonucleotide
caucgugcacugcagugag

SEQ ID NO: 2682650 - RNA, 19 nt, Artificial Sequence
  Description of Artificial Sequence: Synthetic oligonucleotide
cuccucugagcaaugaaga

SEQ ID NO: 2682651 - RNA, 19 nt, Artificial Sequence
  Description of Artificial Sequence: Synthetic oligonucleotide
ggaacgauuucaacugagg

SEQ ID NO: 2682652 - RNA, 19 nt, Artificial Sequence
  Description of Artificial Sequence: Synthetic oligonucleotide
acauuuauucagucauuua

SEQ ID NO: 2682653 - RNA, 19 nt, Artificial Sequence
  Description of Artificial Sequence: Synthetic oligonucleotide
cagacucgaacucgucugg

SEQ ID NO: 2682654 - RNA, 19 nt, Artificial Sequence
  Description of Artificial Sequence: Synthetic oligonucleotide
auuuccuuggcugccguga

SEQ ID NO: 2682655 - RNA, 19 nt, Artificial Sequence
  Description of Artificial Sequence: Synthetic oligonucleotide
gugaaccuuuaugagccgg

SEQ ID NO: 2682656 - RNA, 19 nt, Artificial Sequence
  Description of Artificial Sequence: Synthetic oligonucleotide
uggcucgcccuuaaggagu

SEQ ID NO: 2682657 - RNA, 19 nt, Artificial Sequence
  Description of Artificial Sequence: Synthetic oligonucleotide
acaaucucacuugggaaga

SEQ ID NO: 2682658 - RNA, 19 nt, Artificial Sequence
  Description of Artificial Sequence: Synthetic oligonucleotide
auugacauccuugcccgug

SEQ ID NO: 2682659 - RNA, 19 nt, Artificial Sequence
  Description of Artificial Sequence: Synthetic oligonucleotide
ugacauuuauucagucauu

SEQ ID NO: 2682660 - RNA, 19 nt, Artificial Sequence
  Description of Artificial Sequence: Synthetic oligonucleotide
auggcuuuccggccaccac

SEQ ID NO: 2682661 - RNA, 19 nt, Artificial Sequence
  Description of Artificial Sequence: Synthetic oligonucleotide
aauugacauccuugcccgu

SEQ ID NO: 2682662 - RNA, 19 nt, Artificial Sequence
  Description of Artificial Sequence: Synthetic oligonucleotide
uuggcuugggcagaauccu

SEQ ID NO: 2682663 - RNA, 19 nt, Artificial Sequence
  Description of Artificial Sequence: Synthetic oligonucleotide
ugagaucggaguucaucuc

SEQ ID NO: 2682664 - RNA, 19 nt, Artificial Sequence
  Description of Artificial Sequence: Synthetic oligonucleotide
accagucguacuuggauuu

SEQ ID NO: 2682665 - RNA, 19 nt, Artificial Sequence
  Description of Artificial Sequence: Synthetic oligonucleotide
agacucgaacucgucuggc

SEQ ID NO: 2682666 - RNA, 19 nt, Artificial Sequence
  Description of Artificial Sequence: Synthetic oligonucleotide
ucgagcagcgccugagaga

SEQ ID NO: 2682667 - RNA, 19 nt, Artificial Sequence
  Description of Artificial Sequence: Synthetic oligonucleotide
acuaugaaugacauuuauu

SEQ ID NO: 2682668 - RNA, 19 nt, Artificial Sequence
  Description of Artificial Sequence: Synthetic oligonucleotide
guucaucuccagcucgagc

SEQ ID NO: 2682669 - RNA, 19 nt, Artificial Sequence
  Description of Artificial Sequence: Synthetic oligonucleotide
aucucacuugggaagacca

SEQ ID NO: 2682670 - RNA, 19 nt, Artificial Sequence
  Description of Artificial Sequence: Synthetic oligonucleotide
cucuugcccacaaucucac

SEQ ID NO: 2682671 - RNA, 19 nt, Artificial Sequence
  Description of Artificial Sequence: Synthetic oligonucleotide
ugggcuucacgaucuuggc

SEQ ID NO: 2682672 - RNA, 19 nt, Artificial Sequence
  Description of Artificial Sequence: Synthetic oligonucleotide
cucgagcagcgccugagag

SEQ ID NO: 2682673 - RNA, 19 nt, Artificial Sequence
  Description of Artificial Sequence: Synthetic oligonucleotide
gugcucuacauuguucugc

SEQ ID NO: 2682674 - RNA, 19 nt, Artificial Sequence
  Description of Artificial Sequence: Synthetic oligonucleotide
caacugaggaacugguaca

SEQ ID NO: 2682675 - RNA, 19 nt, Artificial Sequence
  Description of Artificial Sequence: Synthetic oligonucleotide
ugacauccuugcccgugag

SEQ ID NO: 2682676 - RNA, 19 nt, Artificial Sequence
  Description of Artificial Sequence: Synthetic oligonucleotide
ucucacuugggaagaccaa

SEQ ID NO: 2682677 - RNA, 19 nt, Artificial Sequence
  Description of Artificial Sequence: Synthetic oligonucleotide
gucguacuuggauuuucug

SEQ ID NO: 2682678 - RNA, 19 nt, Artificial Sequence
  Description of Artificial Sequence: Synthetic oligonucleotide
acuacgugcuucccacuga

SEQ ID NO: 2682679 - RNA, 19 nt, Artificial Sequence
  Description of Artificial Sequence: Synthetic oligonucleotide
uuaugagccggcugccauc

SEQ ID NO: 2682680 - RNA, 19 nt, Artificial Sequence
  Description of Artificial Sequence: Synthetic oligonucleotide
uuuuccgaguuggcuuggg

SEQ ID NO: 2682681 - RNA, 19 nt, Artificial Sequence
  Description of Artificial Sequence: Synthetic oligonucleotide
cuuuccggccaccaccaac

SEQ ID NO: 2682682 - RNA, 19 nt, Artificial Sequence
  Description of Artificial Sequence: Synthetic oligonucleotide
ccugagagaugccagacuc

SEQ ID NO: 2682683 - RNA, 19 nt, Artificial Sequence
  Description of Artificial Sequence: Synthetic oligonucleotide
cuacauuguucugcugugc

SEQ ID NO: 2682684 - RNA, 19 nt, Artificial Sequence
  Description of Artificial Sequence: Synthetic oligonucleotide
gccauccaguuucacacgg

SEQ ID NO: 2682685 - RNA, 19 nt, Artificial Sequence
  Description of Artificial Sequence: Synthetic oligonucleotide
ggaauucaaaauugacauc

SEQ ID NO: 2682686 - RNA, 19 nt, Artificial Sequence
  Description of Artificial Sequence: Synthetic oligonucleotide
uccuccucugagcaaugaa

SEQ ID NO: 2682687 - RNA, 19 nt, Artificial Sequence
  Description of Artificial Sequence: Synthetic oligonucleotide
caagaauggcaucgugcac

SEQ ID NO: 2682688 - RNA, 19 nt, Artificial Sequence
  Description of Artificial Sequence: Synthetic oligonucleotide
cucgaacucgucuggcuuc

SEQ ID NO: 2682689 - RNA, 19 nt, Artificial Sequence
  Description of Artificial Sequence: Synthetic oligonucleotide
gacauccuugcccgugagc

SEQ ID NO: 2682690 - RNA, 19 nt, Artificial Sequence
  Description of Artificial Sequence: Synthetic oligonucleotide
ugggcagaauccuccucug

SEQ ID NO: 2682691 - RNA, 19 nt, Artificial Sequence
  Description of Artificial Sequence: Synthetic oligonucleotide
ugcugugcuuugucuaagu

SEQ ID NO: 2682692 - RNA, 19 nt, Artificial Sequence
  Description of Artificial Sequence: Synthetic oligonucleotide
acucgaacucgucuggcuu

SEQ ID NO: 2682693 - RNA, 19 nt, Artificial Sequence
  Description of Artificial Sequence: Synthetic oligonucleotide
uuggauuuucuggaacgau

SEQ ID NO: 2682694 - RNA, 19 nt, Artificial Sequence
  Description of Artificial Sequence: Synthetic oligonucleotide
gcuuuuccgaguuggcuug

SEQ ID NO: 2682695 - RNA, 19 nt, Artificial Sequence
  Description of Artificial Sequence: Synthetic oligonucleotide
gaaccagucguacuuggau

SEQ ID NO: 2682696 - RNA, 19 nt, Artificial Sequence
  Description of Artificial Sequence: Synthetic oligonucleotide
aguuucacacggauccucu

SEQ ID NO: 2682697 - RNA, 19 nt, Artificial Sequence
  Description of Artificial Sequence: Synthetic oligonucleotide
ccaauucacgaaccagucg

SEQ ID NO: 2682698 - RNA, 19 nt, Artificial Sequence
  Description of Artificial Sequence: Synthetic oligonucleotide
uucuggggcgcuuuugcuu

SEQ ID NO: 2682699 - RNA, 19 nt, Artificial Sequence
  Description of Artificial Sequence: Synthetic oligonucleotide
cuccagcucgagcagcgcc

SEQ ID NO: 2682700 - RNA, 19 nt, Artificial Sequence
  Description of Artificial Sequence: Synthetic oligonucleotide
ucugagcaaugaagacuac

SEQ ID NO: 2682701 - RNA, 19 nt, Artificial Sequence
  Description of Artificial Sequence: Synthetic oligonucleotide
cucgcccuuaaggagugcc

SEQ ID NO: 2682702 - RNA, 19 nt, Artificial Sequence
  Description of Artificial Sequence: Synthetic oligonucleotide
ugaagacuacgugcuuccc

SEQ ID NO: 2682703 - RNA, 19 nt, Artificial Sequence
  Description of Artificial Sequence: Synthetic oligonucleotide
gacauuuauucagucauuu

SEQ ID NO: 2682704 - RNA, 19 nt, Artificial Sequence
  Description of Artificial Sequence: Synthetic oligonucleotide
ugcagugagggugcgacuu

SEQ ID NO: 2682705 - RNA, 19 nt, Artificial Sequence
  Description of Artificial Sequence: Synthetic oligonucleotide
acgcugcgccuugagaucg

SEQ ID NO: 2682706 - RNA, 19 nt, Artificial Sequence
  Description of Artificial Sequence: Synthetic oligonucleotide
acauuguucugcugugcuu

SEQ ID NO: 2682707 - RNA, 19 nt, Artificial Sequence
  Description of Artificial Sequence: Synthetic oligonucleotide
uugggaagaccaaguccuc

SEQ ID NO: 2682708 - RNA, 19 nt, Artificial Sequence
  Description of Artificial Sequence: Synthetic oligonucleotide
aguuuccaccuugugcucu

SEQ ID NO: 2682709 - RNA, 19 nt, Artificial Sequence
  Description of Artificial Sequence: Synthetic oligonucleotide
gggcuucacgaucuuggcg

SEQ ID NO: 2682710 - RNA, 19 nt, Artificial Sequence
  Description of Artificial Sequence: Synthetic oligonucleotide
aguucaucuccagcucgag

SEQ ID NO: 2682711 - RNA, 19 nt, Artificial Sequence
  Description of Artificial Sequence: Synthetic oligonucleotide
uuccaccuugugcucuaca

SEQ ID NO: 2682712 - RNA, 19 nt, Artificial Sequence
  Description of Artificial Sequence: Synthetic oligonucleotide
cuuggauuuucuggaacga

SEQ ID NO: 2682713 - RNA, 19 nt, Artificial Sequence
  Description of Artificial Sequence: Synthetic oligonucleotide
cuuggcugccgugauguuc

SEQ ID NO: 2682714 - RNA, 19 nt, Artificial Sequence
  Description of Artificial Sequence: Synthetic oligonucleotide
aauucacgaaccagucgua

SEQ ID NO: 2682715 - RNA, 19 nt, Artificial Sequence
  Description of Artificial Sequence: Synthetic oligonucleotide
cguacuuggauuuucugga

SEQ ID NO: 2682716 - RNA, 19 nt, Artificial Sequence
  Description of Artificial Sequence: Synthetic oligonucleotide
aucuuggcgcucgagcuga

SEQ ID NO: 2682717 - RNA, 19 nt, Artificial Sequence
  Description of Artificial Sequence: Synthetic oligonucleotide
agucguacuuggauuuucu

SEQ ID NO: 2682718 - RNA, 19 nt, Artificial Sequence
  Description of Artificial Sequence: Synthetic oligonucleotide
gagcugaacauggcucgcc

SEQ ID NO: 2682719 - RNA, 19 nt, Artificial Sequence
  Description of Artificial Sequence: Synthetic oligonucleotide
agaauccuccucugagcaa

SEQ ID NO: 2682720 - RNA, 19 nt, Artificial Sequence
  Description of Artificial Sequence: Synthetic oligonucleotide
uggcgcucgagcugaacau

SEQ ID NO: 2682721 - RNA, 19 nt, Artificial Sequence
  Description of Artificial Sequence: Synthetic oligonucleotide
ccgugagcuucuuauacac

SEQ ID NO: 2682722 - RNA, 19 nt, Artificial Sequence
  Description of Artificial Sequence: Synthetic oligonucleotide
ccggcugccauccaguuuc

SEQ ID NO: 2682723 - RNA, 19 nt, Artificial Sequence
  Description of Artificial Sequence: Synthetic oligonucleotide
cuucucgccauugggcuuc

SEQ ID NO: 2682724 - RNA, 19 nt, Artificial Sequence
  Description of Artificial Sequence: Synthetic oligonucleotide
uacgugcuucccacugaac

SEQ ID NO: 2682725 - RNA, 19 nt, Artificial Sequence
  Description of Artificial Sequence: Synthetic oligonucleotide
gcugccgugauguucagcu

SEQ ID NO: 2682726 - RNA, 19 nt, Artificial Sequence
  Description of Artificial Sequence: Synthetic oligonucleotide
guacuuggauuuucuggaa

SEQ ID NO: 2682727 - RNA, 19 nt, Artificial Sequence
  Description of Artificial Sequence: Synthetic oligonucleotide
gaguucaucuccagcucga

SEQ ID NO: 2682728 - RNA, 19 nt, Artificial Sequence
  Description of Artificial Sequence: Synthetic oligonucleotide
gaauccuccucugagcaau

SEQ ID NO: 2682729 - RNA, 19 nt, Artificial Sequence
  Description of Artificial Sequence: Synthetic oligonucleotide
agcgccugagagaugccag

SEQ ID NO: 2682730 - RNA, 19 nt, Artificial Sequence
  Description of Artificial Sequence: Synthetic oligonucleotide
agcucgagcagcgccugag

SEQ ID NO: 2682731 - RNA, 19 nt, Artificial Sequence
  Description of Artificial Sequence: Synthetic oligonucleotide
ucgucuggcuucucgccau

SEQ ID NO: 2682732 - RNA, 19 nt, Artificial Sequence
  Description of Artificial Sequence: Synthetic oligonucleotide
cuuuuccgaguuggcuugg

SEQ ID NO: 2682733 - RNA, 19 nt, Artificial Sequence
  Description of Artificial Sequence: Synthetic oligonucleotide
ucgaacucgucuggcuucu

SEQ ID NO: 2682734 - RNA, 19 nt, Artificial Sequence
  Description of Artificial Sequence: Synthetic oligonucleotide
auggcaucgugcacugcag

SEQ ID NO: 2682735 - RNA, 19 nt, Artificial Sequence
  Description of Artificial Sequence: Synthetic oligonucleotide
ucuugcccacaaucucacu

SEQ ID NO: 2682736 - RNA, 19 nt, Artificial Sequence
  Description of Artificial Sequence: Synthetic oligonucleotide
gcaaugaagacuacgugcu

SEQ ID NO: 2682737 - RNA, 19 nt, Artificial Sequence
  Description of Artificial Sequence: Synthetic oligonucleotide
caguuucacacggauccuc

SEQ ID NO: 2682738 - RNA, 19 nt, Artificial Sequence
  Description of Artificial Sequence: Synthetic oligonucleotide
cacgcugcgccuugagauc

SEQ ID NO: 2682739 - RNA, 19 nt, Artificial Sequence
  Description of Artificial Sequence: Synthetic oligonucleotide
ugaacauggcucgcccuua

SEQ ID NO: 2682740 - RNA, 19 nt, Artificial Sequence
  Description of Artificial Sequence: Synthetic oligonucleotide
gacuucuggggcgcuuuug

SEQ ID NO: 2682741 - RNA, 19 nt, Artificial Sequence
  Description of Artificial Sequence: Synthetic oligonucleotide
gggugcgacuucuggggcg

SEQ ID NO: 2682742 - RNA, 19 nt, Artificial Sequence
  Description of Artificial Sequence: Synthetic oligonucleotide
gccaccaccaacuucaauu

SEQ ID NO: 2682743 - RNA, 19 nt, Artificial Sequence
  Description of Artificial Sequence: Synthetic oligonucleotide
uccggccaccaccaacuuc

SEQ ID NO: 2682744 - RNA, 19 nt, Artificial Sequence
  Description of Artificial Sequence: Synthetic oligonucleotide
agacuacgugcuucccacu

SEQ ID NO: 2682745 - RNA, 19 nt, Artificial Sequence
  Description of Artificial Sequence: Synthetic oligonucleotide
gcccgugagcuucuuauac

SEQ ID NO: 2682746 - RNA, 19 nt, Artificial Sequence
  Description of Artificial Sequence: Synthetic oligonucleotide
gacucgaacucgucuggcu

SEQ ID NO: 2682747 - RNA, 19 nt, Artificial Sequence
  Description of Artificial Sequence: Synthetic oligonucleotide
cuuaaggagugccggcuua

SEQ ID NO: 2682748 - RNA, 19 nt, Artificial Sequence
  Description of Artificial Sequence: Synthetic oligonucleotide
gaacauggcucgcccuuaa

SEQ ID NO: 2682749 - RNA, 19 nt, Artificial Sequence
  Description of Artificial Sequence: Synthetic oligonucleotide
caccaccaacuucaauuuc

SEQ ID NO: 2682750 - RNA, 19 nt, Artificial Sequence
  Description of Artificial Sequence: Synthetic oligonucleotide
ucgugcggcuuuuccgagu

SEQ ID NO: 2682751 - RNA, 19 nt, Artificial Sequence
  Description of Artificial Sequence: Synthetic oligonucleotide
caaucucacuugggaagac

SEQ ID NO: 2682752 - RNA, 19 nt, Artificial Sequence
  Description of Artificial Sequence: Synthetic oligonucleotide
gccauugggcuucacgauc

SEQ ID NO: 2682753 - RNA, 19 nt, Artificial Sequence
  Description of Artificial Sequence: Synthetic oligonucleotide
cuugcccacaaucucacuu

SEQ ID NO: 2682754 - RNA, 19 nt, Artificial Sequence
  Description of Artificial Sequence: Synthetic oligonucleotide
cugaaacucugggaauuca

SEQ ID NO: 2682755 - RNA, 19 nt, Artificial Sequence
  Description of Artificial Sequence: Synthetic oligonucleotide
cuacgugcuucccacugaa

SEQ ID NO: 2682756 - RNA, 19 nt, Artificial Sequence
  Description of Artificial Sequence: Synthetic oligonucleotide
cagucguacuuggauuuuc

SEQ ID NO: 2682757 - RNA, 19 nt, Artificial Sequence
  Description of Artificial Sequence: Synthetic oligonucleotide
ugccagacucgaacucguc

SEQ ID NO: 2682758 - RNA, 19 nt, Artificial Sequence
  Description of Artificial Sequence: Synthetic oligonucleotide
ugcuucccacugaacuuuu

SEQ ID NO: 2682759 - RNA, 19 nt, Artificial Sequence
  Description of Artificial Sequence: Synthetic oligonucleotide
cugcgccuugagaucggag

SEQ ID NO: 2682760 - RNA, 19 nt, Artificial Sequence
  Description of Artificial Sequence: Synthetic oligonucleotide
cucgucuggcuucucgcca

SEQ ID NO: 2682761 - RNA, 19 nt, Artificial Sequence
  Description of Artificial Sequence: Synthetic oligonucleotide
ucacgaucuuggcgcucga

SEQ ID NO: 2682762 - RNA, 19 nt, Artificial Sequence
  Description of Artificial Sequence: Synthetic oligonucleotide
ugcccgugagcuucuuaua

SEQ ID NO: 2682763 - RNA, 19 nt, Artificial Sequence
  Description of Artificial Sequence: Synthetic oligonucleotide
uaauggcuuuccggccacc

SEQ ID NO: 2682764 - RNA, 19 nt, Artificial Sequence
  Description of Artificial Sequence: Synthetic oligonucleotide
gaaccuuuaugagccggcu

SEQ ID NO: 2682765 - RNA, 19 nt, Artificial Sequence
  Description of Artificial Sequence: Synthetic oligonucleotide
gcgcucgagcugaacaugg

SEQ ID NO: 2682766 - RNA, 19 nt, Artificial Sequence
  Description of Artificial Sequence: Synthetic oligonucleotide
uccuugcccgugagcuucu

SEQ ID NO: 2682767 - RNA, 19 nt, Artificial Sequence
  Description of Artificial Sequence: Synthetic oligonucleotide
gcuuugucuaagugaaccu

SEQ ID NO: 2682768 - RNA, 19 nt, Artificial Sequence
  Description of Artificial Sequence: Synthetic oligonucleotide
guuuccaccuugugcucua

SEQ ID NO: 2682769 - RNA, 19 nt, Artificial Sequence
  Description of Artificial Sequence: Synthetic oligonucleotide
cauuguucugcugugcuuu

SEQ ID NO: 2682770 - RNA, 19 nt, Artificial Sequence
  Description of Artificial Sequence: Synthetic oligonucleotide
cauccaguuucacacggau

SEQ ID NO: 2682771 - RNA, 19 nt, Artificial Sequence
  Description of Artificial Sequence: Synthetic oligonucleotide
ggugcgacuucuggggcgc

SEQ ID NO: 2682772 - RNA, 19 nt, Artificial Sequence
  Description of Artificial Sequence: Synthetic oligonucleotide
accuugugcucuacauugu

SEQ ID NO: 2682773 - RNA, 19 nt, Artificial Sequence
  Description of Artificial Sequence: Synthetic oligonucleotide
gaauggcaucgugcacugc

SEQ ID NO: 2682774 - RNA, 19 nt, Artificial Sequence
  Description of Artificial Sequence: Synthetic oligonucleotide
cacgaucuuggcgcucgag

SEQ ID NO: 2682775 - RNA, 19 nt, Artificial Sequence
  Description of Artificial Sequence: Synthetic oligonucleotide
uuuccaccuugugcucuac

SEQ ID NO: 2682776 - RNA, 19 nt, Artificial Sequence
  Description of Artificial Sequence: Synthetic oligonucleotide
aucgugcacugcagugagg

SEQ ID NO: 2682777 - RNA, 19 nt, Artificial Sequence
  Description of Artificial Sequence: Synthetic oligonucleotide
agugagggugcgacuucug

SEQ ID NO: 2682778 - RNA, 19 nt, Artificial Sequence
  Description of Artificial Sequence: Synthetic oligonucleotide
cuuugucuaagugaaccuu

SEQ ID NO: 2682779 - RNA, 19 nt, Artificial Sequence
  Description of Artificial Sequence: Synthetic oligonucleotide
cugccgugauguucagcuc

SEQ ID NO: 2682780 - RNA, 19 nt, Artificial Sequence
  Description of Artificial Sequence: Synthetic oligonucleotide
ggauuuucuggaacgauuu

SEQ ID NO: 2682781 - RNA, 19 nt, Artificial Sequence
  Description of Artificial Sequence: Synthetic oligonucleotide
cgugauguucagcucccgc

SEQ ID NO: 2682782 - RNA, 19 nt, Artificial Sequence
  Description of Artificial Sequence: Synthetic oligonucleotide
ucccgcacgcugcgccuug

SEQ ID NO: 2682783 - RNA, 19 nt, Artificial Sequence
  Description of Artificial Sequence: Synthetic oligonucleotide
ggcuucucgccauugggcu

SEQ ID NO: 2682784 - RNA, 19 nt, Artificial Sequence
  Description of Artificial Sequence: Synthetic oligonucleotide
caacugaaacucugggaau

SEQ ID NO: 2682785 - RNA, 19 nt, Artificial Sequence
  Description of Artificial Sequence: Synthetic oligonucleotide
ccacaaucucacuugggaa

SEQ ID NO: 2682786 - RNA, 19 nt, Artificial Sequence
  Description of Artificial Sequence: Synthetic oligonucleotide
gcccuuaaggagugccggc

SEQ ID NO: 2682787 - RNA, 19 nt, Artificial Sequence
  Description of Artificial Sequence: Synthetic oligonucleotide
auccuccucugagcaauga

SEQ ID NO: 2682788 - RNA, 19 nt, Artificial Sequence
  Description of Artificial Sequence: Synthetic oligonucleotide
ccuuuaugagccggcugcc

SEQ ID NO: 2682789 - RNA, 19 nt, Artificial Sequence
  Description of Artificial Sequence: Synthetic oligonucleotide
ccaaguccucaagaauggc

SEQ ID NO: 2682790 - RNA, 19 nt, Artificial Sequence
  Description of Artificial Sequence: Synthetic oligonucleotide
gcacgcugcgccuugagau

SEQ ID NO: 2682791 - RNA, 19 nt, Artificial Sequence
  Description of Artificial Sequence: Synthetic oligonucleotide
uggcugccgugauguucag

SEQ ID NO: 2682792 - RNA, 19 nt, Artificial Sequence
  Description of Artificial Sequence: Synthetic oligonucleotide
gugcuuugucuaagugaac

SEQ ID NO: 2682793 - RNA, 19 nt, Artificial Sequence
  Description of Artificial Sequence: Synthetic oligonucleotide
cuuggcgcucgagcugaac

SEQ ID NO: 2682794 - RNA, 19 nt, Artificial Sequence
  Description of Artificial Sequence: Synthetic oligonucleotide
gccuugagaucggaguuca

SEQ ID NO: 2682795 - RNA, 19 nt, Artificial Sequence
  Description of Artificial Sequence: Synthetic oligonucleotide
ucuuggcgcucgagcugaa

SEQ ID NO: 2682796 - RNA, 19 nt, Artificial Sequence
  Description of Artificial Sequence: Synthetic oligonucleotide
ggcgcucgagcugaacaug

SEQ ID NO: 2682797 - RNA, 19 nt, Artificial Sequence
  Description of Artificial Sequence: Synthetic oligonucleotide
uuccggccaccaccaacuu

SEQ ID NO: 2682798 - RNA, 19 nt, Artificial Sequence
  Description of Artificial Sequence: Synthetic oligonucleotide
cugaacauggcucgcccuu

SEQ ID NO: 2682799 - RNA, 19 nt, Artificial Sequence
  Description of Artificial Sequence: Synthetic oligonucleotide
cuucuggggcgcuuuugcu

SEQ ID NO: 2682800 - RNA, 19 nt, Artificial Sequence
  Description of Artificial Sequence: Synthetic oligonucleotide
cuucacgaucuuggcgcuc

SEQ ID NO: 2682801 - RNA, 19 nt, Artificial Sequence
  Description of Artificial Sequence: Synthetic oligonucleotide
cccgugagcuucuuauaca

SEQ ID NO: 2682802 - RNA, 19 nt, Artificial Sequence
  Description of Artificial Sequence: Synthetic oligonucleotide
gccagacucgaacucgucu

SEQ ID NO: 2682803 - RNA, 19 nt, Artificial Sequence
  Description of Artificial Sequence: Synthetic oligonucleotide
gcucgagcugaacauggcu

SEQ ID NO: 2682804 - RNA, 19 nt, Artificial Sequence
  Description of Artificial Sequence: Synthetic oligonucleotide
ggcuuuccggccaccacca

SEQ ID NO: 2682805 - RNA, 19 nt, Artificial Sequence
  Description of Artificial Sequence: Synthetic oligonucleotide
cgcccuuaaggagugccgg

SEQ ID NO: 2682806 - RNA, 19 nt, Artificial Sequence
  Description of Artificial Sequence: Synthetic oligonucleotide
cagcgccugagagaugcca

SEQ ID NO: 2682807 - RNA, 19 nt, Artificial Sequence
  Description of Artificial Sequence: Synthetic oligonucleotide
caauuuccuuggcugccgu

SEQ ID NO: 2682808 - RNA, 19 nt, Artificial Sequence
  Description of Artificial Sequence: Synthetic oligonucleotide
gggcagaauccuccucuga

SEQ ID NO: 2682809 - RNA, 19 nt, Artificial Sequence
  Description of Artificial Sequence: Synthetic oligonucleotide
gugcggcuuuuccgaguug

SEQ ID NO: 2682810 - RNA, 19 nt, Artificial Sequence
  Description of Artificial Sequence: Synthetic oligonucleotide
gcagugagggugcgacuuc

SEQ ID NO: 2682811 - RNA, 19 nt, Artificial Sequence
  Description of Artificial Sequence: Synthetic oligonucleotide
ccauugggcuucacgaucu

SEQ ID NO: 2682812 - RNA, 19 nt, Artificial Sequence
  Description of Artificial Sequence: Synthetic oligonucleotide
uucucgccauugggcuuca

SEQ ID NO: 2682813 - RNA, 19 nt, Artificial Sequence
  Description of Artificial Sequence: Synthetic oligonucleotide
ggcucgcccuuaaggagug

SEQ ID NO: 2682814 - RNA, 19 nt, Artificial Sequence
  Description of Artificial Sequence: Synthetic oligonucleotide
augagccggcugccaucca

SEQ ID NO: 2682815 - RNA, 19 nt, Artificial Sequence
  Description of Artificial Sequence: Synthetic oligonucleotide
ugcgacuucuggggcgcuu

SEQ ID NO: 2682816 - RNA, 19 nt, Artificial Sequence
  Description of Artificial Sequence: Synthetic oligonucleotide
cuugcccgugagcuucuua

SEQ ID NO: 2682817 - RNA, 19 nt, Artificial Sequence
  Description of Artificial Sequence: Synthetic oligonucleotide
caaugaagacuacgugcuu

SEQ ID NO: 2682818 - RNA, 19 nt, Artificial Sequence
  Description of Artificial Sequence: Synthetic oligonucleotide
gcgccugagagaugccaga

SEQ ID NO: 2682819 - RNA, 19 nt, Artificial Sequence
  Description of Artificial Sequence: Synthetic oligonucleotide
cggaguucaucuccagcuc

SEQ ID NO: 2682820 - RNA, 19 nt, Artificial Sequence
  Description of Artificial Sequence: Synthetic oligonucleotide
ccaccaacuucaauuuccu

SEQ ID NO: 2682821 - RNA, 19 nt, Artificial Sequence
  Description of Artificial Sequence: Synthetic oligonucleotide
gcugaacauggcucgcccu

SEQ ID NO: 2682822 - RNA, 19 nt, Artificial Sequence
  Description of Artificial Sequence: Synthetic oligonucleotide
acggauccucuugcccaca

SEQ ID NO: 2682823 - RNA, 19 nt, Artificial Sequence
  Description of Artificial Sequence: Synthetic oligonucleotide
ccauccaguuucacacgga

SEQ ID NO: 2682824 - RNA, 19 nt, Artificial Sequence
  Description of Artificial Sequence: Synthetic oligonucleotide
gcggcuuuuccgaguuggc

SEQ ID NO: 2682825 - RNA, 19 nt, Artificial Sequence
  Description of Artificial Sequence: Synthetic oligonucleotide
gagccggcugccauccagu

SEQ ID NO: 2682826 - RNA, 19 nt, Artificial Sequence
  Description of Artificial Sequence: Synthetic oligonucleotide
cgcucgagcugaacauggc

SEQ ID NO: 2682827 - RNA, 19 nt, Artificial Sequence
  Description of Artificial Sequence: Synthetic oligonucleotide
gcuugggcagaauccuccu

SEQ ID NO: 2682828 - RNA, 19 nt, Artificial Sequence
  Description of Artificial Sequence: Synthetic oligonucleotide
cgaucuuggcgcucgagcu

SEQ ID NO: 2682829 - RNA, 19 nt, Artificial Sequence
  Description of Artificial Sequence: Synthetic oligonucleotide
gcuucacgaucuuggcgcu

SEQ ID NO: 2682830 - RNA, 19 nt, Artificial Sequence
  Description of Artificial Sequence: Synthetic oligonucleotide
cagugagggugcgacuucu

SEQ ID NO: 2682831 - RNA, 19 nt, Artificial Sequence
  Description of Artificial Sequence: Synthetic oligonucleotide
cgaaccagucguacuugga

SEQ ID NO: 2682832 - RNA, 19 nt, Artificial Sequence
  Description of Artificial Sequence: Synthetic oligonucleotide
ccaccaccaacuucaauuu

SEQ ID NO: 2682833 - RNA, 19 nt, Artificial Sequence
  Description of Artificial Sequence: Synthetic oligonucleotide
uggggcgcuuuugcuuguu

SEQ ID NO: 2682834 - RNA, 19 nt, Artificial Sequence
  Description of Artificial Sequence: Synthetic oligonucleotide
cgagcugaacauggcucgc

SEQ ID NO: 2682835 - RNA, 19 nt, Artificial Sequence
  Description of Artificial Sequence: Synthetic oligonucleotide
ggcugccgugauguucagc

SEQ ID NO: 2682836 - RNA, 19 nt, Artificial Sequence
  Description of Artificial Sequence: Synthetic oligonucleotide
gcacugcagugagggugcg

SEQ ID NO: 2682837 - RNA, 19 nt, Artificial Sequence
  Description of Artificial Sequence: Synthetic oligonucleotide
ccgugauguucagcucccg

SEQ ID NO: 2682838 - RNA, 19 nt, Artificial Sequence
  Description of Artificial Sequence: Synthetic oligonucleotide
cauccuugcccgugagcuu

SEQ ID NO: 2682839 - RNA, 19 nt, Artificial Sequence
  Description of Artificial Sequence: Synthetic oligonucleotide
gcgccuugagaucggaguu

SEQ ID NO: 2682840 - RNA, 19 nt, Artificial Sequence
  Description of Artificial Sequence: Synthetic oligonucleotide
ccagcucgagcagcgccug

SEQ ID NO: 2682841 - RNA, 19 nt, Artificial Sequence
  Description of Artificial Sequence: Synthetic oligonucleotide
cgccuugagaucggaguuc

SEQ ID NO: 2682842 - RNA, 19 nt, Artificial Sequence
  Description of Artificial Sequence: Synthetic oligonucleotide
cagcucgagcagcgccuga

SEQ ID NO: 2682843 - RNA, 19 nt, Artificial Sequence
  Description of Artificial Sequence: Synthetic oligonucleotide
ggcugccauccaguuucac

SEQ ID NO: 2682844 - RNA, 19 nt, Artificial Sequence
  Description of Artificial Sequence: Synthetic oligonucleotide
gcugcgccuugagaucgga

SEQ ID NO: 2682845 - RNA, 19 nt, Artificial Sequence
  Description of Artificial Sequence: Synthetic oligonucleotide
gcagcgccugagagaugcc

SEQ ID NO: 2682846 - RNA, 19 nt, Artificial Sequence
  Description of Artificial Sequence: Synthetic oligonucleotide
ccuugugcucuacauuguu

SEQ ID NO: 2682847 - RNA, 19 nt, Artificial Sequence
  Description of Artificial Sequence: Synthetic oligonucleotide
cccuuaaggagugccggcu

SEQ ID NO: 2682848 - RNA, 19 nt, Artificial Sequence
  Description of Artificial Sequence: Synthetic oligonucleotide
gcuucucgccauugggcuu

SEQ ID NO: 2682849 - RNA, 19 nt, Artificial Sequence
  Description of Artificial Sequence: Synthetic oligonucleotide
cgcugcgccuugagaucgg

SEQ ID NO: 2682850 - RNA, 19 nt, Artificial Sequence
  Description of Artificial Sequence: Synthetic oligonucleotide
cgugcuucccacugaacuu

SEQ ID NO: 2682851 - RNA, 19 nt, Artificial Sequence
  Description of Artificial Sequence: Synthetic oligonucleotide
cauugggcuucacgaucuu

SEQ ID NO: 2682852 - RNA, 19 nt, Artificial Sequence
  Description of Artificial Sequence: Synthetic oligonucleotide
ccgcacgcugcgccuugag

SEQ ID NO: 2682853 - RNA, 19 nt, Artificial Sequence
  Description of Artificial Sequence: Synthetic oligonucleotide
cuggggcgcuuuugcuugu

SEQ ID NO: 2682854 - RNA, 19 nt, Artificial Sequence
  Description of Artificial Sequence: Synthetic oligonucleotide
ccgaguuggcuugggcaga

SEQ ID NO: 2682855 - RNA, 19 nt, Artificial Sequence
  Description of Artificial Sequence: Synthetic oligonucleotide
ccaccuugugcucuacauu

SEQ ID NO: 2682856 - RNA, 19 nt, Artificial Sequence
  Description of Artificial Sequence: Synthetic oligonucleotide
ccuuaaggagugccggcuu

SEQ ID NO: 2682857 - RNA, 19 nt, Artificial Sequence
  Description of Artificial Sequence: Synthetic oligonucleotide
gcucgcccuuaaggagugc

SEQ ID NO: 2682858 - RNA, 19 nt, Artificial Sequence
  Description of Artificial Sequence: Synthetic oligonucleotide
cgcacgcugcgccuugaga

SEQ ID NO: 2682859 - RNA, 19 nt, Artificial Sequence
  Description of Artificial Sequence: Synthetic oligonucleotide
ggggcgcuuuugcuuguuu

SEQ ID NO: 2682860 - RNA, 19 nt, Artificial Sequence
  Description of Artificial Sequence: Synthetic oligonucleotide
gcgacuucuggggcgcuuu

SEQ ID NO: 2682861 - RNA, 19 nt, Artificial Sequence
  Description of Artificial Sequence: Synthetic oligonucleotide
cgugcggcuuuuccgaguu

SEQ ID NO: 2682862 - RNA, 19 nt, Artificial Sequence
  Description of Artificial Sequence: Synthetic oligonucleotide
cggauccucuugcccacaa

SEQ ID NO: 2682863 - RNA, 19 nt, Artificial Sequence
  Description of Artificial Sequence: Synthetic oligonucleotide
cgaguuggcuugggcagaa

SEQ ID NO: 2682864 - RNA, 19 nt, Artificial Sequence
  Description of Artificial Sequence: Synthetic oligonucleotide
cgccauugggcuucacgau

SEQ ID NO: 2682865 - RNA, 19 nt, Artificial Sequence
  Description of Artificial Sequence: Synthetic oligonucleotide
cggcuuuuccgaguuggcu

SEQ ID NO: 2682866 - RNA, 19 nt, Artificial Sequence
  Description of Artificial Sequence: Synthetic oligonucleotide
gugcgacuucuggggcgcu

SEQ ID NO: 2682867 - RNA, 19 nt, Artificial Sequence
  Description of Artificial Sequence: Synthetic oligonucleotide
cggcugccauccaguuuca

SEQ ID NO: 2682868 - RNA, 19 nt, Artificial Sequence
  Description of Artificial Sequence: Synthetic oligonucleotide
cccgcacgcugcgccuuga

SEQ ID NO: 2682869 - RNA, 19 nt, Artificial Sequence
  Description of Artificial Sequence: Synthetic oligonucleotide
cgacuucuggggcgcuuuu

SEQ ID NO: 2682870 - RNA, 19 nt, Artificial Sequence
  Description of Artificial Sequence: Synthetic oligonucleotide
ccuugcccgugagcuucuu

SEQ ID NO: 2682871 - RNA, 19 nt, Artificial Sequence
  Description of Artificial Sequence: Synthetic oligonucleotide
aauauagacagcugagaac

SEQ ID NO: 2682872 - RNA, 19 nt, Artificial Sequence
  Description of Artificial Sequence: Synthetic oligonucleotide
uacagaacaaaccagccgg

SEQ ID NO: 2682873 - RNA, 19 nt, Artificial Sequence
  Description of Artificial Sequence: Synthetic oligonucleotide
uuugguaaaauauucuucc

SEQ ID NO: 2682874 - RNA, 19 nt, Artificial Sequence
  Description of Artificial Sequence: Synthetic oligonucleotide
aagaagaucaaagaggcuc

SEQ ID NO: 2682875 - RNA, 19 nt, Artificial Sequence
  Description of Artificial Sequence: Synthetic oligonucleotide
cuaguauauauuuauacag

SEQ ID NO: 2682876 - RNA, 19 nt, Artificial Sequence
  Description of Artificial Sequence: Synthetic oligonucleotide
uauuuauacagaacaaacc

SEQ ID NO: 2682877 - RNA, 19 nt, Artificial Sequence
  Description of Artificial Sequence: Synthetic oligonucleotide
uuuccuuuaagaaacaguc

SEQ ID NO: 2682878 - RNA, 19 nt, Artificial Sequence
  Description of Artificial Sequence: Synthetic oligonucleotide
accaauggggaccagaggc

SEQ ID NO: 2682879 - RNA, 19 nt, Artificial Sequence
  Description of Artificial Sequence: Synthetic oligonucleotide
acugugacugaauauagac

SEQ ID NO: 2682880 - RNA, 19 nt, Artificial Sequence
  Description of Artificial Sequence: Synthetic oligonucleotide
uuauacagaacaaaccagc

SEQ ID NO: 2682881 - RNA, 19 nt, Artificial Sequence
  Description of Artificial Sequence: Synthetic oligonucleotide
uuuauacagaacaaaccag

SEQ ID NO: 2682882 - RNA, 19 nt, Artificial Sequence
  Description of Artificial Sequence: Synthetic oligonucleotide
uauuuacacaaccaauggg

SEQ ID NO: 2682883 - RNA, 19 nt, Artificial Sequence
  Description of Artificial Sequence: Synthetic oligonucleotide
uaaacuuugcuauuuacac

SEQ ID NO: 2682884 - RNA, 19 nt, Artificial Sequence
  Description of Artificial Sequence: Synthetic oligonucleotide
aagaaacaguccuaccacc

SEQ ID NO: 2682885 - RNA, 19 nt, Artificial Sequence
  Description of Artificial Sequence: Synthetic oligonucleotide
aacuuugcuauuuacacaa

SEQ ID NO: 2682886 - RNA, 19 nt, Artificial Sequence
  Description of Artificial Sequence: Synthetic oligonucleotide
auuuacacaaccaaugggg

SEQ ID NO: 2682887 - RNA, 19 nt, Artificial Sequence
  Description of Artificial Sequence: Synthetic oligonucleotide
aaacaguccuaccaccacc

SEQ ID NO: 2682888 - RNA, 19 nt, Artificial Sequence
  Description of Artificial Sequence: Synthetic oligonucleotide
aaauagguuuccuuuaaga

SEQ ID NO: 2682889 - RNA, 19 nt, Artificial Sequence
  Description of Artificial Sequence: Synthetic oligonucleotide
aagacauucuaguauauau

SEQ ID NO: 2682890 - RNA, 19 nt, Artificial Sequence
  Description of Artificial Sequence: Synthetic oligonucleotide
aauagguuuccuuuaagaa

SEQ ID NO: 2682891 - RNA, 19 nt, Artificial Sequence
  Description of Artificial Sequence: Synthetic oligonucleotide
caaagagugaccauauugc

SEQ ID NO: 2682892 - RNA, 19 nt, Artificial Sequence
  Description of Artificial Sequence: Synthetic oligonucleotide
auugcagaggggcacaggc

SEQ ID NO: 2682893 - RNA, 19 nt, Artificial Sequence
  Description of Artificial Sequence: Synthetic oligonucleotide
aauauugaggacagagagc

SEQ ID NO: 2682894 - RNA, 19 nt, Artificial Sequence
  Description of Artificial Sequence: Synthetic oligonucleotide
uagguuuccuuuaagaaac

SEQ ID NO: 2682895 - RNA, 19 nt, Artificial Sequence
  Description of Artificial Sequence: Synthetic oligonucleotide
uucuaguauauauuuauac

SEQ ID NO: 2682896 - RNA, 19 nt, Artificial Sequence
  Description of Artificial Sequence: Synthetic oligonucleotide
aaacauggcauucauuggu

SEQ ID NO: 2682897 - RNA, 19 nt, Artificial Sequence
  Description of Artificial Sequence: Synthetic oligonucleotide
gugaccauauugcagaggg

SEQ ID NO: 2682898 - RNA, 19 nt, Artificial Sequence
  Description of Artificial Sequence: Synthetic oligonucleotide
aaaauauucuuccucugaa

SEQ ID NO: 2682899 - RNA, 19 nt, Artificial Sequence
  Description of Artificial Sequence: Synthetic oligonucleotide
uaaaauauucuuccucuga

SEQ ID NO: 2682900 - RNA, 19 nt, Artificial Sequence
  Description of Artificial Sequence: Synthetic oligonucleotide
ggaaacauggcauucauug

SEQ ID NO: 2682901 - RNA, 19 nt, Artificial Sequence
  Description of Artificial Sequence: Synthetic oligonucleotide
aggacagagagcuaaaugu

SEQ ID NO: 2682902 - RNA, 19 nt, Artificial Sequence
  Description of Artificial Sequence: Synthetic oligonucleotide
uaguauauauuuauacaga

SEQ ID NO: 2682903 - RNA, 19 nt, Artificial Sequence
  Description of Artificial Sequence: Synthetic oligonucleotide
uguggugacacugugacug

SEQ ID NO: 2682904 - RNA, 19 nt, Artificial Sequence
  Description of Artificial Sequence: Synthetic oligonucleotide
agaguacauacacucacac

SEQ ID NO: 2682905 - RNA, 19 nt, Artificial Sequence
  Description of Artificial Sequence: Synthetic oligonucleotide
acugaauauagacagcuga

SEQ ID NO: 2682906 - RNA, 19 nt, Artificial Sequence
  Description of Artificial Sequence: Synthetic oligonucleotide
agcuaaaugugguauuugg

SEQ ID NO: 2682907 - RNA, 19 nt, Artificial Sequence
  Description of Artificial Sequence: Synthetic oligonucleotide
auauugaggacagagagcu

SEQ ID NO: 2682908 - RNA, 19 nt, Artificial Sequence
  Description of Artificial Sequence: Synthetic oligonucleotide
uaagaaacaguccuaccac

SEQ ID NO: 2682909 - RNA, 19 nt, Artificial Sequence
  Description of Artificial Sequence: Synthetic oligonucleotide
uaucaugaaccacaggaga

SEQ ID NO: 2682910 - RNA, 19 nt, Artificial Sequence
  Description of Artificial Sequence: Synthetic oligonucleotide
ugggcuaucaugaaccaca

SEQ ID NO: 2682911 - RNA, 19 nt, Artificial Sequence
  Description of Artificial Sequence: Synthetic oligonucleotide
uuucugaauauugaggaca

SEQ ID NO: 2682912 - RNA, 19 nt, Artificial Sequence
  Description of Artificial Sequence: Synthetic oligonucleotide
uucugaauauugaggacag

SEQ ID NO: 2682913 - RNA, 19 nt, Artificial Sequence
  Description of Artificial Sequence: Synthetic oligonucleotide
aaagagugaccauauugca

SEQ ID NO: 2682914 - RNA, 19 nt, Artificial Sequence
  Description of Artificial Sequence: Synthetic oligonucleotide
ugaauauugaggacagaga

SEQ ID NO: 2682915 - RNA, 19 nt, Artificial Sequence
  Description of Artificial Sequence: Synthetic oligonucleotide
ucuguggugacacugugac

SEQ ID NO: 2682916 - RNA, 19 nt, Artificial Sequence
  Description of Artificial Sequence: Synthetic oligonucleotide
gaaacauggcauucauugg

SEQ ID NO: 2682917 - RNA, 19 nt, Artificial Sequence
  Description of Artificial Sequence: Synthetic oligonucleotide
aucaugacagcucagagua

SEQ ID NO: 2682918 - RNA, 19 nt, Artificial Sequence
  Description of Artificial Sequence: Synthetic oligonucleotide
ucagaguacauacacucac

SEQ ID NO: 2682919 - RNA, 19 nt, Artificial Sequence
  Description of Artificial Sequence: Synthetic oligonucleotide
ugaagcuccagucuguggu

SEQ ID NO: 2682920 - RNA, 19 nt, Artificial Sequence
  Description of Artificial Sequence: Synthetic oligonucleotide
uccagaaagacauucuagu

SEQ ID NO: 2682921 - RNA, 19 nt, Artificial Sequence
  Description of Artificial Sequence: Synthetic oligonucleotide
aaacuuugcuauuuacaca

SEQ ID NO: 2682922 - RNA, 19 nt, Artificial Sequence
  Description of Artificial Sequence: Synthetic oligonucleotide
uuuacacaaccaaugggga

SEQ ID NO: 2682923 - RNA, 19 nt, Artificial Sequence
  Description of Artificial Sequence: Synthetic oligonucleotide
cugaauauugaggacagag

SEQ ID NO: 2682924 - RNA, 19 nt, Artificial Sequence
  Description of Artificial Sequence: Synthetic oligonucleotide
uggugggcuaucaugaacc

SEQ ID NO: 2682925 - RNA, 19 nt, Artificial Sequence
  Description of Artificial Sequence: Synthetic oligonucleotide
auuugguaaaauauucuuc

SEQ ID NO: 2682926 - RNA, 19 nt, Artificial Sequence
  Description of Artificial Sequence: Synthetic oligonucleotide
uauguagccacagauuccc

SEQ ID NO: 2682927 - RNA, 19 nt, Artificial Sequence
  Description of Artificial Sequence: Synthetic oligonucleotide
ugaucaugacagcucagag

SEQ ID NO: 2682928 - RNA, 19 nt, Artificial Sequence
  Description of Artificial Sequence: Synthetic oligonucleotide
gaucugacagagaugaagc

SEQ ID NO: 2682929 - RNA, 19 nt, Artificial Sequence
  Description of Artificial Sequence: Synthetic oligonucleotide
cuuugcuauuuacacaacc

SEQ ID NO: 2682930 - RNA, 19 nt, Artificial Sequence
  Description of Artificial Sequence: Synthetic oligonucleotide
cugaauauagacagcugag

SEQ ID NO: 2682931 - RNA, 19 nt, Artificial Sequence
  Description of Artificial Sequence: Synthetic oligonucleotide
gaauauagacagcugagaa

SEQ ID NO: 2682932 - RNA, 19 nt, Artificial Sequence
  Description of Artificial Sequence: Synthetic oligonucleotide
auagguuuccuuuaagaaa

SEQ ID NO: 2682933 - RNA, 19 nt, Artificial Sequence
  Description of Artificial Sequence: Synthetic oligonucleotide
acauaaauagguuuccuuu

SEQ ID NO: 2682934 - RNA, 19 nt, Artificial Sequence
  Description of Artificial Sequence: Synthetic oligonucleotide
ugugggaguugcuucaucc

SEQ ID NO: 2682935 - RNA, 19 nt, Artificial Sequence
  Description of Artificial Sequence: Synthetic oligonucleotide
ugugguauuugguaaaaua

SEQ ID NO: 2682936 - RNA, 19 nt, Artificial Sequence
  Description of Artificial Sequence: Synthetic oligonucleotide
gcuaucaugaaccacagga

SEQ ID NO: 2682937 - RNA, 19 nt, Artificial Sequence
  Description of Artificial Sequence: Synthetic oligonucleotide
aggagaauaaacuuugcua

SEQ ID NO: 2682938 - RNA, 19 nt, Artificial Sequence
  Description of Artificial Sequence: Synthetic oligonucleotide
ugguaaaauauucuuccuc

SEQ ID NO: 2682939 - RNA, 19 nt, Artificial Sequence
  Description of Artificial Sequence: Synthetic oligonucleotide
agaaagacauucuaguaua

SEQ ID NO: 2682940 - RNA, 19 nt, Artificial Sequence
  Description of Artificial Sequence: Synthetic oligonucleotide
agacaguccucauuccgcc

SEQ ID NO: 2682941 - RNA, 19 nt, Artificial Sequence
  Description of Artificial Sequence: Synthetic oligonucleotide
acagauucccacacaaacc

SEQ ID NO: 2682942 - RNA, 19 nt, Artificial Sequence
  Description of Artificial Sequence: Synthetic oligonucleotide
uacacaaccaauggggacc

SEQ ID NO: 2682943 - RNA, 19 nt, Artificial Sequence
  Description of Artificial Sequence: Synthetic oligonucleotide
gaccauauugcagaggggc

SEQ ID NO: 2682944 - RNA, 19 nt, Artificial Sequence
  Description of Artificial Sequence: Synthetic oligonucleotide
gagaugaagcuccagucug

SEQ ID NO: 2682945 - RNA, 19 nt, Artificial Sequence
  Description of Artificial Sequence: Synthetic oligonucleotide
ugacugaauauagacagcu

SEQ ID NO: 2682946 - RNA, 19 nt, Artificial Sequence
  Description of Artificial Sequence: Synthetic oligonucleotide
ucauuggugggcuaucaug

SEQ ID NO: 2682947 - RNA, 19 nt, Artificial Sequence
  Description of Artificial Sequence: Synthetic oligonucleotide
gacagagagcuaaaugugg

SEQ ID NO: 2682948 - RNA, 19 nt, Artificial Sequence
  Description of Artificial Sequence: Synthetic oligonucleotide
aaaugugguauuugguaaa

SEQ ID NO: 2682949 - RNA, 19 nt, Artificial Sequence
  Description of Artificial Sequence: Synthetic oligonucleotide
agaucugacagagaugaag

SEQ ID NO: 2682950 - RNA, 19 nt, Artificial Sequence
  Description of Artificial Sequence: Synthetic oligonucleotide
gaucaaagaggcucuggcc

SEQ ID NO: 2682951 - RNA, 19 nt, Artificial Sequence
  Description of Artificial Sequence: Synthetic oligonucleotide
auauucuuccucugaacug

SEQ ID NO: 2682952 - RNA, 19 nt, Artificial Sequence
  Description of Artificial Sequence: Synthetic oligonucleotide
caaaccagccggcagacag

SEQ ID NO: 2682953 - RNA, 19 nt, Artificial Sequence
  Description of Artificial Sequence: Synthetic oligonucleotide
uugcuauuuacacaaccaa

SEQ ID NO: 2682954 - RNA, 19 nt, Artificial Sequence
  Description of Artificial Sequence: Synthetic oligonucleotide
uucccacacaaaccuaagg

SEQ ID NO: 2682955 - RNA, 19 nt, Artificial Sequence
  Description of Artificial Sequence: Synthetic oligonucleotide
ugaauauagacagcugaga

SEQ ID NO: 2682956 - RNA, 19 nt, Artificial Sequence
  Description of Artificial Sequence: Synthetic oligonucleotide
cugagaacucucauccugg

SEQ ID NO: 2682957 - RNA, 19 nt, Artificial Sequence
  Description of Artificial Sequence: Synthetic oligonucleotide
agaacaaaccagccggcag

SEQ ID NO: 2682958 - RNA, 19 nt, Artificial Sequence
  Description of Artificial Sequence: Synthetic oligonucleotide
ugcuauuuacacaaccaau

SEQ ID NO: 2682959 - RNA, 19 nt, Artificial Sequence
  Description of Artificial Sequence: Synthetic oligonucleotide
cacacaaaccuaaggcugg

SEQ ID NO: 2682960 - RNA, 19 nt, Artificial Sequence
  Description of Artificial Sequence: Synthetic oligonucleotide
acagagaugaagcuccagu

SEQ ID NO: 2682961 - RNA, 19 nt, Artificial Sequence
  Description of Artificial Sequence: Synthetic oligonucleotide
aagagugaccauauugcag

SEQ ID NO: 2682962 - RNA, 19 nt, Artificial Sequence
  Description of Artificial Sequence: Synthetic oligonucleotide
auggcauucauuggugggc

SEQ ID NO: 2682963 - RNA, 19 nt, Artificial Sequence
  Description of Artificial Sequence: Synthetic oligonucleotide
uuuucugaauauugaggac

SEQ ID NO: 2682964 - RNA, 19 nt, Artificial Sequence
  Description of Artificial Sequence: Synthetic oligonucleotide
cacacuagccuauguagcc

SEQ ID NO: 2682965 - RNA, 19 nt, Artificial Sequence
  Description of Artificial Sequence: Synthetic oligonucleotide
gaggacagagagcuaaaug

SEQ ID NO: 2682966 - RNA, 19 nt, Artificial Sequence
  Description of Artificial Sequence: Synthetic oligonucleotide
cuaaggcugggcuuucugg

SEQ ID NO: 2682967 - RNA, 19 nt, Artificial Sequence
  Description of Artificial Sequence: Synthetic oligonucleotide
aacaaaccagccggcagac

SEQ ID NO: 2682968 - RNA, 19 nt, Artificial Sequence
  Description of Artificial Sequence: Synthetic oligonucleotide
aaccaauggggaccagagg

SEQ ID NO: 2682969 - RNA, 19 nt, Artificial Sequence
  Description of Artificial Sequence: Synthetic oligonucleotide
auccacauaaauagguuuc

SEQ ID NO: 2682970 - RNA, 19 nt, Artificial Sequence
  Description of Artificial Sequence: Synthetic oligonucleotide
cauggcauucauugguggg

SEQ ID NO: 2682971 - RNA, 19 nt, Artificial Sequence
  Description of Artificial Sequence: Synthetic oligonucleotide
aguaguuccugccuccaug

SEQ ID NO: 2682972 - RNA, 19 nt, Artificial Sequence
  Description of Artificial Sequence: Synthetic oligonucleotide
cuaaaugugguauuuggua

SEQ ID NO: 2682973 - RNA, 19 nt, Artificial Sequence
  Description of Artificial Sequence: Synthetic oligonucleotide
ucauccagaaagacauucu

SEQ ID NO: 2682974 - RNA, 19 nt, Artificial Sequence
  Description of Artificial Sequence: Synthetic oligonucleotide
acauggcauucauuggugg

SEQ ID NO: 2682975 - RNA, 19 nt, Artificial Sequence
  Description of Artificial Sequence: Synthetic oligonucleotide
caaccaauggggaccagag

SEQ ID NO: 2682976 - RNA, 19 nt, Artificial Sequence
  Description of Artificial Sequence: Synthetic oligonucleotide
gaacucucauccuggaaac

SEQ ID NO: 2682977 - RNA, 19 nt, Artificial Sequence
  Description of Artificial Sequence: Synthetic oligonucleotide
cuauguagccacagauucc

SEQ ID NO: 2682978 - RNA, 19 nt, Artificial Sequence
  Description of Artificial Sequence: Synthetic oligonucleotide
gcuauuuacacaaccaaug

SEQ ID NO: 2682979 - RNA, 19 nt, Artificial Sequence
  Description of Artificial Sequence: Synthetic oligonucleotide
uugguaaaauauucuuccu

SEQ ID NO: 2682980 - RNA, 19 nt, Artificial Sequence
  Description of Artificial Sequence: Synthetic oligonucleotide
uuacacaaccaauggggac

SEQ ID NO: 2682981 - RNA, 19 nt, Artificial Sequence
  Description of Artificial Sequence: Synthetic oligonucleotide
gaacaaaccagccggcaga

SEQ ID NO: 2682982 - RNA, 19 nt, Artificial Sequence
  Description of Artificial Sequence: Synthetic oligonucleotide
gguauuugguaaaauauuc

SEQ ID NO: 2682983 - RNA, 19 nt, Artificial Sequence
  Description of Artificial Sequence: Synthetic oligonucleotide
aagggagccacuccuuccu

SEQ ID NO: 2682984 - RNA, 19 nt, Artificial Sequence
  Description of Artificial Sequence: Synthetic oligonucleotide
cauuggugggcuaucauga

SEQ ID NO: 2682985 - RNA, 19 nt, Artificial Sequence
  Description of Artificial Sequence: Synthetic oligonucleotide
gacauucuaguauauauuu

SEQ ID NO: 2682986 - RNA, 19 nt, Artificial Sequence
  Description of Artificial Sequence: Synthetic oligonucleotide
auugaggacagagagcuaa

SEQ ID NO: 2682987 - RNA, 19 nt, Artificial Sequence
  Description of Artificial Sequence: Synthetic oligonucleotide
aguccuaccaccaccccac

SEQ ID NO: 2682988 - RNA, 19 nt, Artificial Sequence
  Description of Artificial Sequence: Synthetic oligonucleotide
cagacaguccucauuccgc

SEQ ID NO: 2682989 - RNA, 19 nt, Artificial Sequence
  Description of Artificial Sequence: Synthetic oligonucleotide
guaguuccugccuccaugc

SEQ ID NO: 2682990 - RNA, 19 nt, Artificial Sequence
  Description of Artificial Sequence: Synthetic oligonucleotide
ucauccacauaaauagguu

SEQ ID NO: 2682991 - RNA, 19 nt, Artificial Sequence
  Description of Artificial Sequence: Synthetic oligonucleotide
ugaccauauugcagagggg

SEQ ID NO: 2682992 - RNA, 19 nt, Artificial Sequence
  Description of Artificial Sequence: Synthetic oligonucleotide
accagaggcccucauccac

SEQ ID NO: 2682993 - RNA, 19 nt, Artificial Sequence
  Description of Artificial Sequence: Synthetic oligonucleotide
aacauggcauucauuggug

SEQ ID NO: 2682994 - RNA, 19 nt, Artificial Sequence
  Description of Artificial Sequence: Synthetic oligonucleotide
uguagccacagauucccac

SEQ ID NO: 2682995 - RNA, 19 nt, Artificial Sequence
  Description of Artificial Sequence: Synthetic oligonucleotide
ugaaccacaggagaauaaa

SEQ ID NO: 2682996 - RNA, 19 nt, Artificial Sequence
  Description of Artificial Sequence: Synthetic oligonucleotide
gaggcccucauccacauaa

SEQ ID NO: 2682997 - RNA, 19 nt, Artificial Sequence
  Description of Artificial Sequence: Synthetic oligonucleotide
ugaacugguaggcucuuuu

SEQ ID NO: 2682998 - RNA, 19 nt, Artificial Sequence
  Description of Artificial Sequence: Synthetic oligonucleotide
gacacugugacugaauaua

SEQ ID NO: 2682999 - RNA, 19 nt, Artificial Sequence
  Description of Artificial Sequence: Synthetic oligonucleotide
agccuauguagccacagau

SEQ ID NO: 2683000 - RNA, 19 nt, Artificial Sequence
  Description of Artificial Sequence: Synthetic oligonucleotide
uccucaguaguuccugccu

SEQ ID NO: 2683001 - RNA, 19 nt, Artificial Sequence
  Description of Artificial Sequence: Synthetic oligonucleotide
cauucuaguauauauuuau

SEQ ID NO: 2683002 - RNA, 19 nt, Artificial Sequence
  Description of Artificial Sequence: Synthetic oligonucleotide
ccuauguagccacagauuc

SEQ ID NO: 2683003 - RNA, 19 nt, Artificial Sequence
  Description of Artificial Sequence: Synthetic oligonucleotide
acuccuuccucaguaguuc

SEQ ID NO: 2683004 - RNA, 19 nt, Artificial Sequence
  Description of Artificial Sequence: Synthetic oligonucleotide
aaccagccggcagacaguc

SEQ ID NO: 2683005 - RNA, 19 nt, Artificial Sequence
  Description of Artificial Sequence: Synthetic oligonucleotide
uuggugggcuaucaugaac

SEQ ID NO: 2683006 - RNA, 19 nt, Artificial Sequence
  Description of Artificial Sequence: Synthetic oligonucleotide
uuccucaguaguuccugcc

SEQ ID NO: 2683007 - RNA, 19 nt, Artificial Sequence
  Description of Artificial Sequence: Synthetic oligonucleotide
agagagcuaaaugugguau

SEQ ID NO: 2683008 - RNA, 19 nt, Artificial Sequence
  Description of Artificial Sequence: Synthetic oligonucleotide
ggagaauaaacuuugcuau

SEQ ID NO: 2683009 - RNA, 19 nt, Artificial Sequence
  Description of Artificial Sequence: Synthetic oligonucleotide
cugguaggcucuuuucccc

SEQ ID NO: 2683010 - RNA, 19 nt, Artificial Sequence
  Description of Artificial Sequence: Synthetic oligonucleotide
uagacagcugagaacucuc

SEQ ID NO: 2683011 - RNA, 19 nt, Artificial Sequence
  Description of Artificial Sequence: Synthetic oligonucleotide
gcucagaguacauacacuc

SEQ ID NO: 2683012 - RNA, 19 nt, Artificial Sequence
  Description of Artificial Sequence: Synthetic oligonucleotide
cauaaauagguuuccuuua

SEQ ID NO: 2683013 - RNA, 19 nt, Artificial Sequence
  Description of Artificial Sequence: Synthetic oligonucleotide
gaguacauacacucacaca

SEQ ID NO: 2683014 - RNA, 19 nt, Artificial Sequence
  Description of Artificial Sequence: Synthetic oligonucleotide
agaagaucaaagaggcucu

SEQ ID NO: 2683015 - RNA, 19 nt, Artificial Sequence
  Description of Artificial Sequence: Synthetic oligonucleotide
aaaccuaaggcugggcuuu

SEQ ID NO: 2683016 - RNA, 19 nt, Artificial Sequence
  Description of Artificial Sequence: Synthetic oligonucleotide
aagaggcucuggccugugg

SEQ ID NO: 2683017 - RNA, 19 nt, Artificial Sequence
  Description of Artificial Sequence: Synthetic oligonucleotide
aucugacagagaugaagcu

SEQ ID NO: 2683018 - RNA, 19 nt, Artificial Sequence
  Description of Artificial Sequence: Synthetic oligonucleotide
uccucauuccgccuuguuu

SEQ ID NO: 2683019 - RNA, 19 nt, Artificial Sequence
  Description of Artificial Sequence: Synthetic oligonucleotide
auagacagcugagaacucu

SEQ ID NO: 2683020 - RNA, 19 nt, Artificial Sequence
  Description of Artificial Sequence: Synthetic oligonucleotide
gagugaccauauugcagag

SEQ ID NO: 2683021 - RNA, 19 nt, Artificial Sequence
  Description of Artificial Sequence: Synthetic oligonucleotide
ugagaacucucauccugga

SEQ ID NO: 2683022 - RNA, 19 nt, Artificial Sequence
  Description of Artificial Sequence: Synthetic oligonucleotide
ucugggagccaaagaguga

SEQ ID NO: 2683023 - RNA, 19 nt, Artificial Sequence
  Description of Artificial Sequence: Synthetic oligonucleotide
gaucaugacagcucagagu

SEQ ID NO: 2683024 - RNA, 19 nt, Artificial Sequence
  Description of Artificial Sequence: Synthetic oligonucleotide
cugugacugaauauagaca

SEQ ID NO: 2683025 - RNA, 19 nt, Artificial Sequence
  Description of Artificial Sequence: Synthetic oligonucleotide
uugcagaggggcacaggcc

SEQ ID NO: 2683026 - RNA, 19 nt, Artificial Sequence
  Description of Artificial Sequence: Synthetic oligonucleotide
agaaacaguccuaccacca

SEQ ID NO: 2683027 - RNA, 19 nt, Artificial Sequence
  Description of Artificial Sequence: Synthetic oligonucleotide
caagggagccacuccuucc

SEQ ID NO: 2683028 - RNA, 19 nt, Artificial Sequence
  Description of Artificial Sequence: Synthetic oligonucleotide
gaugaagcuccagucugug

SEQ ID NO: 2683029 - RNA, 19 nt, Artificial Sequence
  Description of Artificial Sequence: Synthetic oligonucleotide
gcugagaacucucauccug

SEQ ID NO: 2683030 - RNA, 19 nt, Artificial Sequence
  Description of Artificial Sequence: Synthetic oligonucleotide
ugacacugugacugaauau

SEQ ID NO: 2683031 - RNA, 19 nt, Artificial Sequence
  Description of Artificial Sequence: Synthetic oligonucleotide
ucaugaaccacaggagaau

SEQ ID NO: 2683032 - RNA, 19 nt, Artificial Sequence
  Description of Artificial Sequence: Synthetic oligonucleotide
cucucauccuggaaacaug

SEQ ID NO: 2683033 - RNA, 19 nt, Artificial Sequence
  Description of Artificial Sequence: Synthetic oligonucleotide
gacugaauauagacagcug

SEQ ID NO: 2683034 - RNA, 19 nt, Artificial Sequence
  Description of Artificial Sequence: Synthetic oligonucleotide
cuccaugccugccaccugc

SEQ ID NO: 2683035 - RNA, 19 nt, Artificial Sequence
  Description of Artificial Sequence: Synthetic oligonucleotide
uauagacagcugagaacuc

SEQ ID NO: 2683036 - RNA, 19 nt, Artificial Sequence
  Description of Artificial Sequence: Synthetic oligonucleotide
acagagagcuaaauguggu

SEQ ID NO: 2683037 - RNA, 19 nt, Artificial Sequence
  Description of Artificial Sequence: Synthetic oligonucleotide
agugaccauauugcagagg

SEQ ID NO: 2683038 - RNA, 19 nt, Artificial Sequence
  Description of Artificial Sequence: Synthetic oligonucleotide
cacuagccuauguagccac

SEQ ID NO: 2683039 - RNA, 19 nt, Artificial Sequence
  Description of Artificial Sequence: Synthetic oligonucleotide
uucauuggugggcuaucau

SEQ ID NO: 2683040 - RNA, 19 nt, Artificial Sequence
  Description of Artificial Sequence: Synthetic oligonucleotide
ccacacaaaccuaaggcug

SEQ ID NO: 2683041 - RNA, 19 nt, Artificial Sequence
  Description of Artificial Sequence: Synthetic oligonucleotide
uauugcagaggggcacagg

SEQ ID NO: 2683042 - RNA, 19 nt, Artificial Sequence
  Description of Artificial Sequence: Synthetic oligonucleotide
cccacacuagccuauguag

SEQ ID NO: 2683043 - RNA, 19 nt, Artificial Sequence
  Description of Artificial Sequence: Synthetic oligonucleotide
uagccuauguagccacaga

SEQ ID NO: 2683044 - RNA, 19 nt, Artificial Sequence
  Description of Artificial Sequence: Synthetic oligonucleotide
cuagccuauguagccacag

SEQ ID NO: 2683045 - RNA, 19 nt, Artificial Sequence
  Description of Artificial Sequence: Synthetic oligonucleotide
gcacaggccagcuggaugc

SEQ ID NO: 2683046 - RNA, 19 nt, Artificial Sequence
  Description of Artificial Sequence: Synthetic oligonucleotide
gagcuaaaugugguauuug

SEQ ID NO: 2683047 - RNA, 19 nt, Artificial Sequence
  Description of Artificial Sequence: Synthetic oligonucleotide
caugacagcucagaguaca

SEQ ID NO: 2683048 - RNA, 19 nt, Artificial Sequence
  Description of Artificial Sequence: Synthetic oligonucleotide
agagcuaaaugugguauuu

SEQ ID NO: 2683049 - RNA, 19 nt, Artificial Sequence
  Description of Artificial Sequence: Synthetic oligonucleotide
acgcuugggcauucuggac

SEQ ID NO: 2683050 - RNA, 19 nt, Artificial Sequence
  Description of Artificial Sequence: Synthetic oligonucleotide
gaagaucaaagaggcucug

SEQ ID NO: 2683051 - RNA, 19 nt, Artificial Sequence
  Description of Artificial Sequence: Synthetic oligonucleotide
caauggggaccagaggccc

SEQ ID NO: 2683052 - RNA, 19 nt, Artificial Sequence
  Description of Artificial Sequence: Synthetic oligonucleotide
acucucauccuggaaacau

SEQ ID NO: 2683053 - RNA, 19 nt, Artificial Sequence
  Description of Artificial Sequence: Synthetic oligonucleotide
cucagaguacauacacuca

SEQ ID NO: 2683054 - RNA, 19 nt, Artificial Sequence
  Description of Artificial Sequence: Synthetic oligonucleotide
agacauucuaguauauauu

SEQ ID NO: 2683055 - RNA, 19 nt, Artificial Sequence
  Description of Artificial Sequence: Synthetic oligonucleotide
acacaaaccuaaggcuggg

SEQ ID NO: 2683056 - RNA, 19 nt, Artificial Sequence
  Description of Artificial Sequence: Synthetic oligonucleotide
ucaugacagcucagaguac

SEQ ID NO: 2683057 - RNA, 19 nt, Artificial Sequence
  Description of Artificial Sequence: Synthetic oligonucleotide
ggacagagagcuaaaugug

SEQ ID NO: 2683058 - RNA, 19 nt, Artificial Sequence
  Description of Artificial Sequence: Synthetic oligonucleotide
cagaguacauacacucaca

SEQ ID NO: 2683059 - RNA, 19 nt, Artificial Sequence
  Description of Artificial Sequence: Synthetic oligonucleotide
acuuugcuauuuacacaac

SEQ ID NO: 2683060 - RNA, 19 nt, Artificial Sequence
  Description of Artificial Sequence: Synthetic oligonucleotide
uccuaccaccaccccacgc

SEQ ID NO: 2683061 - RNA, 19 nt, Artificial Sequence
  Description of Artificial Sequence: Synthetic oligonucleotide
uaguuccugccuccaugcc

SEQ ID NO: 2683062 - RNA, 19 nt, Artificial Sequence
  Description of Artificial Sequence: Synthetic oligonucleotide
uggaaacauggcauucauu

SEQ ID NO: 2683063 - RNA, 19 nt, Artificial Sequence
  Description of Artificial Sequence: Synthetic oligonucleotide
auuccgccuuguuuuaaaa

SEQ ID NO: 2683064 - RNA, 19 nt, Artificial Sequence
  Description of Artificial Sequence: Synthetic oligonucleotide
gguuuccuuuaagaaacag

SEQ ID NO: 2683065 - RNA, 19 nt, Artificial Sequence
  Description of Artificial Sequence: Synthetic oligonucleotide
guuuccuuuaagaaacagu

SEQ ID NO: 2683066 - RNA, 19 nt, Artificial Sequence
  Description of Artificial Sequence: Synthetic oligonucleotide
ucuggaccccuggagcucc

SEQ ID NO: 2683067 - RNA, 19 nt, Artificial Sequence
  Description of Artificial Sequence: Synthetic oligonucleotide
auucauuggugggcuauca

SEQ ID NO: 2683068 - RNA, 19 nt, Artificial Sequence
  Description of Artificial Sequence: Synthetic oligonucleotide
ugggagccaaagagugacc

SEQ ID NO: 2683069 - RNA, 19 nt, Artificial Sequence
  Description of Artificial Sequence: Synthetic oligonucleotide
ugggcauucuggaccccug

SEQ ID NO: 2683070 - RNA, 19 nt, Artificial Sequence
  Description of Artificial Sequence: Synthetic oligonucleotide
cacgcuugggcauucugga

SEQ ID NO: 2683071 - RNA, 19 nt, Artificial Sequence
  Description of Artificial Sequence: Synthetic oligonucleotide
aacucucauccuggaaaca

SEQ ID NO: 2683072 - RNA, 19 nt, Artificial Sequence
  Description of Artificial Sequence: Synthetic oligonucleotide
ccacacuagccuauguagc

SEQ ID NO: 2683073 - RNA, 19 nt, Artificial Sequence
  Description of Artificial Sequence: Synthetic oligonucleotide
gugacugaauauagacagc

SEQ ID NO: 2683074 - RNA, 19 nt, Artificial Sequence
  Description of Artificial Sequence: Synthetic oligonucleotide
auuggugggcuaucaugaa

SEQ ID NO: 2683075 - RNA, 19 nt, Artificial Sequence
  Description of Artificial Sequence: Synthetic oligonucleotide
ccucauccacauaaauagg

SEQ ID NO: 2683076 - RNA, 19 nt, Artificial Sequence
  Description of Artificial Sequence: Synthetic oligonucleotide
cugaucaugacagcucaga

SEQ ID NO: 2683077 - RNA, 19 nt, Artificial Sequence
  Description of Artificial Sequence: Synthetic oligonucleotide
auauugcagaggggcacag

SEQ ID NO: 2683078 - RNA, 19 nt, Artificial Sequence
  Description of Artificial Sequence: Synthetic oligonucleotide
acaguccucauuccgccuu

SEQ ID NO: 2683079 - RNA, 19 nt, Artificial Sequence
  Description of Artificial Sequence: Synthetic oligonucleotide
cauccuggaaacauggcau

SEQ ID NO: 2683080 - RNA, 19 nt, Artificial Sequence
  Description of Artificial Sequence: Synthetic oligonucleotide
ugaggacagagagcuaaau

SEQ ID NO: 2683081 - RNA, 19 nt, Artificial Sequence
  Description of Artificial Sequence: Synthetic oligonucleotide
uccaugccugccaccugcc

SEQ ID NO: 2683082 - RNA, 19 nt, Artificial Sequence
  Description of Artificial Sequence: Synthetic oligonucleotide
auucccacacaaaccuaag

SEQ ID NO: 2683083 - RNA, 19 nt, Artificial Sequence
  Description of Artificial Sequence: Synthetic oligonucleotide
gagccaaagagugaccaua

SEQ ID NO: 2683084 - RNA, 19 nt, Artificial Sequence
  Description of Artificial Sequence: Synthetic oligonucleotide
gcuugggcauucuggaccc

SEQ ID NO: 2683085 - RNA, 19 nt, Artificial Sequence
  Description of Artificial Sequence: Synthetic oligonucleotide
gagaauaaacuuugcuauu

SEQ ID NO: 2683086 - RNA, 19 nt, Artificial Sequence
  Description of Artificial Sequence: Synthetic oligonucleotide
agccacuccuuccucagua

SEQ ID NO: 2683087 - RNA, 19 nt, Artificial Sequence
  Description of Artificial Sequence: Synthetic oligonucleotide
acauucuaguauauauuua

SEQ ID NO: 2683088 - RNA, 19 nt, Artificial Sequence
  Description of Artificial Sequence: Synthetic oligonucleotide
aaccuaaggcugggcuuuc

SEQ ID NO: 2683089 - RNA, 19 nt, Artificial Sequence
  Description of Artificial Sequence: Synthetic oligonucleotide
ccacgcuugggcauucugg

SEQ ID NO: 2683090 - RNA, 19 nt, Artificial Sequence
  Description of Artificial Sequence: Synthetic oligonucleotide
agcugagaacucucauccu

SEQ ID NO: 2683091 - RNA, 19 nt, Artificial Sequence
  Description of Artificial Sequence: Synthetic oligonucleotide
cuccagucuguggugacac

SEQ ID NO: 2683092 - RNA, 19 nt, Artificial Sequence
  Description of Artificial Sequence: Synthetic oligonucleotide
ccaauggggaccagaggcc

SEQ ID NO: 2683093 - RNA, 19 nt, Artificial Sequence
  Description of Artificial Sequence: Synthetic oligonucleotide
cacugugacugaauauaga

SEQ ID NO: 2683094 - RNA, 19 nt, Artificial Sequence
  Description of Artificial Sequence: Synthetic oligonucleotide
accauauugcagaggggca

SEQ ID NO: 2683095 - RNA, 19 nt, Artificial Sequence
  Description of Artificial Sequence: Synthetic oligonucleotide
aaaccagccggcagacagu

SEQ ID NO: 2683096 - RNA, 19 nt, Artificial Sequence
  Description of Artificial Sequence: Synthetic oligonucleotide
uccucugaacugguaggcu

SEQ ID NO: 2683097 - RNA, 19 nt, Artificial Sequence
  Description of Artificial Sequence: Synthetic oligonucleotide
caggagaauaaacuuugcu

SEQ ID NO: 2683098 - RNA, 19 nt, Artificial Sequence
  Description of Artificial Sequence: Synthetic oligonucleotide
ugccaccugcccacacuag

SEQ ID NO: 2683099 - RNA, 19 nt, Artificial Sequence
  Description of Artificial Sequence: Synthetic oligonucleotide
uauugaggacagagagcua

SEQ ID NO: 2683100 - RNA, 19 nt, Artificial Sequence
  Description of Artificial Sequence: Synthetic oligonucleotide
agaugaagcuccagucugu

SEQ ID NO: 2683101 - RNA, 19 nt, Artificial Sequence
  Description of Artificial Sequence: Synthetic oligonucleotide
agggagccacuccuuccuc

SEQ ID NO: 2683102 - RNA, 19 nt, Artificial Sequence
  Description of Artificial Sequence: Synthetic oligonucleotide
ggagccacuccuuccucag

SEQ ID NO: 2683103 - RNA, 19 nt, Artificial Sequence
  Description of Artificial Sequence: Synthetic oligonucleotide
caugccugccaccugccca

SEQ ID NO: 2683104 - RNA, 19 nt, Artificial Sequence
  Description of Artificial Sequence: Synthetic oligonucleotide
acacaaccaauggggacca

SEQ ID NO: 2683105 - RNA, 19 nt, Artificial Sequence
  Description of Artificial Sequence: Synthetic oligonucleotide
cauccacauaaauagguuu

SEQ ID NO: 2683106 - RNA, 19 nt, Artificial Sequence
  Description of Artificial Sequence: Synthetic oligonucleotide
uccaagggagccacuccuu

SEQ ID NO: 2683107 - RNA, 19 nt, Artificial Sequence
  Description of Artificial Sequence: Synthetic oligonucleotide
cacauaaauagguuuccuu

SEQ ID NO: 2683108 - RNA, 19 nt, Artificial Sequence
  Description of Artificial Sequence: Synthetic oligonucleotide
cacaaaccuaaggcugggc

SEQ ID NO: 2683109 - RNA, 19 nt, Artificial Sequence
  Description of Artificial Sequence: Synthetic oligonucleotide
ggaguugcuucauccagaa

SEQ ID NO: 2683110 - RNA, 19 nt, Artificial Sequence
  Description of Artificial Sequence: Synthetic oligonucleotide
cauauugcagaggggcaca

SEQ ID NO: 2683111 - RNA, 19 nt, Artificial Sequence
  Description of Artificial Sequence: Synthetic oligonucleotide
cuggagcuccaagggagcc

SEQ ID NO: 2683112 - RNA, 19 nt, Artificial Sequence
  Description of Artificial Sequence: Synthetic oligonucleotide
ugcccacacuagccuaugu

SEQ ID NO: 2683113 - RNA, 19 nt, Artificial Sequence
  Description of Artificial Sequence: Synthetic oligonucleotide
uggagcuccaagggagcca

SEQ ID NO: 2683114 - RNA, 19 nt, Artificial Sequence
  Description of Artificial Sequence: Synthetic oligonucleotide
cauucauuggugggcuauc

SEQ ID NO: 2683115 - RNA, 19 nt, Artificial Sequence
  Description of Artificial Sequence: Synthetic oligonucleotide
agccaaagagugaccauau

SEQ ID NO: 2683116 - RNA, 19 nt, Artificial Sequence
  Description of Artificial Sequence: Synthetic oligonucleotide
ccucugaacugguaggcuc

SEQ ID NO: 2683117 - RNA, 19 nt, Artificial Sequence
  Description of Artificial Sequence: Synthetic oligonucleotide
ggcuaucaugaaccacagg

SEQ ID NO: 2683118 - RNA, 19 nt, Artificial Sequence
  Description of Artificial Sequence: Synthetic oligonucleotide
augaaccacaggagaauaa

SEQ ID NO: 2683119 - RNA, 19 nt, Artificial Sequence
  Description of Artificial Sequence: Synthetic oligonucleotide
agccacagauucccacaca

SEQ ID NO: 2683120 - RNA, 19 nt, Artificial Sequence
  Description of Artificial Sequence: Synthetic oligonucleotide
cauuccgccuuguuuuaaa

SEQ ID NO: 2683121 - RNA, 19 nt, Artificial Sequence
  Description of Artificial Sequence: Synthetic oligonucleotide
gggcauucuggaccccugg

SEQ ID NO: 2683122 - RNA, 19 nt, Artificial Sequence
  Description of Artificial Sequence: Synthetic oligonucleotide
gagagcuaaaugugguauu

SEQ ID NO: 2683123 - RNA, 19 nt, Artificial Sequence
  Description of Artificial Sequence: Synthetic oligonucleotide
caguccuaccaccacccca

SEQ ID NO: 2683124 - RNA, 19 nt, Artificial Sequence
  Description of Artificial Sequence: Synthetic oligonucleotide
uccagucuguggugacacu

SEQ ID NO: 2683125 - RNA, 19 nt, Artificial Sequence
  Description of Artificial Sequence: Synthetic oligonucleotide
cagagagcuaaauguggua

SEQ ID NO: 2683126 - RNA, 19 nt, Artificial Sequence
  Description of Artificial Sequence: Synthetic oligonucleotide
augugguauuugguaaaau

SEQ ID NO: 2683127 - RNA, 19 nt, Artificial Sequence
  Description of Artificial Sequence: Synthetic oligonucleotide
gacagcugagaacucucau

SEQ ID NO: 2683128 - RNA, 19 nt, Artificial Sequence
  Description of Artificial Sequence: Synthetic oligonucleotide
ucauuccgccuuguuuuaa

SEQ ID NO: 2683129 - RNA, 19 nt, Artificial Sequence
  Description of Artificial Sequence: Synthetic oligonucleotide
ggaugcugaucaugacagc

SEQ ID NO: 2683130 - RNA, 19 nt, Artificial Sequence
  Description of Artificial Sequence: Synthetic oligonucleotide
ggcagacaguccucauucc

SEQ ID NO: 2683131 - RNA, 19 nt, Artificial Sequence
  Description of Artificial Sequence: Synthetic oligonucleotide
ccauauugcagaggggcac

SEQ ID NO: 2683132 - RNA, 19 nt, Artificial Sequence
  Description of Artificial Sequence: Synthetic oligonucleotide
caguccucauuccgccuug

SEQ ID NO: 2683133 - RNA, 19 nt, Artificial Sequence
  Description of Artificial Sequence: Synthetic oligonucleotide
cagaacaaaccagccggca

SEQ ID NO: 2683134 - RNA, 19 nt, Artificial Sequence
  Description of Artificial Sequence: Synthetic oligonucleotide
guccuaccaccaccccacg

SEQ ID NO: 2683135 - RNA, 19 nt, Artificial Sequence
  Description of Artificial Sequence: Synthetic oligonucleotide
ccagaaagacauucuagua

SEQ ID NO: 2683136 - RNA, 19 nt, Artificial Sequence
  Description of Artificial Sequence: Synthetic oligonucleotide
gcuccaagggagccacucc

SEQ ID NO: 2683137 - RNA, 19 nt, Artificial Sequence
  Description of Artificial Sequence: Synthetic oligonucleotide
uucuggaccccuggagcuc

SEQ ID NO: 2683138 - RNA, 19 nt, Artificial Sequence
  Description of Artificial Sequence: Synthetic oligonucleotide
ggugggcuaucaugaacca

SEQ ID NO: 2683139 - RNA, 19 nt, Artificial Sequence
  Description of Artificial Sequence: Synthetic oligonucleotide
gugggcuaucaugaaccac

SEQ ID NO: 2683140 - RNA, 19 nt, Artificial Sequence
  Description of Artificial Sequence: Synthetic oligonucleotide
caaaccuaaggcugggcuu

SEQ ID NO: 2683141 - RNA, 19 nt, Artificial Sequence
  Description of Artificial Sequence: Synthetic oligonucleotide
gggcuaucaugaaccacag

SEQ ID NO: 2683142 - RNA, 19 nt, Artificial Sequence
  Description of Artificial Sequence: Synthetic oligonucleotide
cugugggaguugcuucauc

SEQ ID NO: 2683143 - RNA, 19 nt, Artificial Sequence
  Description of Artificial Sequence: Synthetic oligonucleotide
gucuguggugacacuguga

SEQ ID NO: 2683144 - RNA, 19 nt, Artificial Sequence
  Description of Artificial Sequence: Synthetic oligonucleotide
ugccuccaugccugccacc

SEQ ID NO: 2683145 - RNA, 19 nt, Artificial Sequence
  Description of Artificial Sequence: Synthetic oligonucleotide
gcuaaaugugguauuuggu

SEQ ID NO: 2683146 - RNA, 19 nt, Artificial Sequence
  Description of Artificial Sequence: Synthetic oligonucleotide
cuccaagggagccacuccu

SEQ ID NO: 2683147 - RNA, 19 nt, Artificial Sequence
  Description of Artificial Sequence: Synthetic oligonucleotide
ccucaguaguuccugccuc

SEQ ID NO: 2683148 - RNA, 19 nt, Artificial Sequence
  Description of Artificial Sequence: Synthetic oligonucleotide
acuagccuauguagccaca

SEQ ID NO: 2683149 - RNA, 19 nt, Artificial Sequence
  Description of Artificial Sequence: Synthetic oligonucleotide
gaguugcuucauccagaaa

SEQ ID NO: 2683150 - RNA, 19 nt, Artificial Sequence
  Description of Artificial Sequence: Synthetic oligonucleotide
ccuuuaagaaacaguccua

SEQ ID NO: 2683151 - RNA, 19 nt, Artificial Sequence
  Description of Artificial Sequence: Synthetic oligonucleotide
agaggggcacaggccagcu

SEQ ID NO: 2683152 - RNA, 19 nt, Artificial Sequence
  Description of Artificial Sequence: Synthetic oligonucleotide
cggcagacaguccucauuc

SEQ ID NO: 2683153 - RNA, 19 nt, Artificial Sequence
  Description of Artificial Sequence: Synthetic oligonucleotide
cuggaaacauggcauucau

SEQ ID NO: 2683154 - RNA, 19 nt, Artificial Sequence
  Description of Artificial Sequence: Synthetic oligonucleotide
cucauuccgccuuguuuua

SEQ ID NO: 2683155 - RNA, 19 nt, Artificial Sequence
  Description of Artificial Sequence: Synthetic oligonucleotide
gggaguugcuucauccaga

SEQ ID NO: 2683156 - RNA, 19 nt, Artificial Sequence
  Description of Artificial Sequence: Synthetic oligonucleotide
agauucccacacaaaccua

SEQ ID NO: 2683157 - RNA, 19 nt, Artificial Sequence
  Description of Artificial Sequence: Synthetic oligonucleotide
gcugaucaugacagcucag

SEQ ID NO: 2683158 - RNA, 19 nt, Artificial Sequence
  Description of Artificial Sequence: Synthetic oligonucleotide
cagucuguggugacacugu

SEQ ID NO: 2683159 - RNA, 19 nt, Artificial Sequence
  Description of Artificial Sequence: Synthetic oligonucleotide
gggagccacuccuuccuca

SEQ ID NO: 2683160 - RNA, 19 nt, Artificial Sequence
  Description of Artificial Sequence: Synthetic oligonucleotide
gggaccagaggcccucauc

SEQ ID NO: 2683161 - RNA, 19 nt, Artificial Sequence
  Description of Artificial Sequence: Synthetic oligonucleotide
aguccucauuccgccuugu

SEQ ID NO: 2683162 - RNA, 19 nt, Artificial Sequence
  Description of Artificial Sequence: Synthetic oligonucleotide
ccuggaaacauggcauuca

SEQ ID NO: 2683163 - RNA, 19 nt, Artificial Sequence
  Description of Artificial Sequence: Synthetic oligonucleotide
cagccggcagacaguccuc

SEQ ID NO: 2683164 - RNA, 19 nt, Artificial Sequence
  Description of Artificial Sequence: Synthetic oligonucleotide
cacuccuuccucaguaguu

SEQ ID NO: 2683165 - RNA, 19 nt, Artificial Sequence
  Description of Artificial Sequence: Synthetic oligonucleotide
ccuaccaccaccccacgcu

SEQ ID NO: 2683166 - RNA, 19 nt, Artificial Sequence
  Description of Artificial Sequence: Synthetic oligonucleotide
gcccacacuagccuaugua

SEQ ID NO: 2683167 - RNA, 19 nt, Artificial Sequence
  Description of Artificial Sequence: Synthetic oligonucleotide
accccacgcuugggcauuc

SEQ ID NO: 2683168 - RNA, 19 nt, Artificial Sequence
  Description of Artificial Sequence: Synthetic oligonucleotide
agaggcccucauccacaua

SEQ ID NO: 2683169 - RNA, 19 nt, Artificial Sequence
  Description of Artificial Sequence: Synthetic oligonucleotide
cuguggugacacugugacu

SEQ ID NO: 2683170 - RNA, 19 nt, Artificial Sequence
  Description of Artificial Sequence: Synthetic oligonucleotide
cccacgcuugggcauucug

SEQ ID NO: 2683171 - RNA, 19 nt, Artificial Sequence
  Description of Artificial Sequence: Synthetic oligonucleotide
aggcccucauccacauaaa

SEQ ID NO: 2683172 - RNA, 19 nt, Artificial Sequence
  Description of Artificial Sequence: Synthetic oligonucleotide
ccacagauucccacacaaa

SEQ ID NO: 2683173 - RNA, 19 nt, Artificial Sequence
  Description of Artificial Sequence: Synthetic oligonucleotide
caaagaggcucuggccugu

SEQ ID NO: 2683174 - RNA, 19 nt, Artificial Sequence
  Description of Artificial Sequence: Synthetic oligonucleotide
gcauucauuggugggcuau

SEQ ID NO: 2683175 - RNA, 19 nt, Artificial Sequence
  Description of Artificial Sequence: Synthetic oligonucleotide
gcuccagucuguggugaca

SEQ ID NO: 2683176 - RNA, 19 nt, Artificial Sequence
  Description of Artificial Sequence: Synthetic oligonucleotide
ggcccucauccacauaaau

SEQ ID NO: 2683177 - RNA, 19 nt, Artificial Sequence
  Description of Artificial Sequence: Synthetic oligonucleotide
cuaccaccaccccacgcuu

SEQ ID NO: 2683178 - RNA, 19 nt, Artificial Sequence
  Description of Artificial Sequence: Synthetic oligonucleotide
ggugacacugugacugaau

SEQ ID NO: 2683179 - RNA, 19 nt, Artificial Sequence
  Description of Artificial Sequence: Synthetic oligonucleotide
cagaggcccucauccacau

SEQ ID NO: 2683180 - RNA, 19 nt, Artificial Sequence
  Description of Artificial Sequence: Synthetic oligonucleotide
ggcauucauuggugggcua

SEQ ID NO: 2683181 - RNA, 19 nt, Artificial Sequence
  Description of Artificial Sequence: Synthetic oligonucleotide
cucuggccugugggaguug

SEQ ID NO: 2683182 - RNA, 19 nt, Artificial Sequence
  Description of Artificial Sequence: Synthetic oligonucleotide
gccuauguagccacagauu

SEQ ID NO: 2683183 - RNA, 19 nt, Artificial Sequence
  Description of Artificial Sequence: Synthetic oligonucleotide
ccacauaaauagguuuccu

SEQ ID NO: 2683184 - RNA, 19 nt, Artificial Sequence
  Description of Artificial Sequence: Synthetic oligonucleotide
guccucauuccgccuuguu

SEQ ID NO: 2683185 - RNA, 19 nt, Artificial Sequence
  Description of Artificial Sequence: Synthetic oligonucleotide
cuggccugugggaguugcu

SEQ ID NO: 2683186 - RNA, 19 nt, Artificial Sequence
  Description of Artificial Sequence: Synthetic oligonucleotide
ccaccaccccacgcuuggg

SEQ ID NO: 2683187 - RNA, 19 nt, Artificial Sequence
  Description of Artificial Sequence: Synthetic oligonucleotide
ccugcccacacuagccuau

SEQ ID NO: 2683188 - RNA, 19 nt, Artificial Sequence
  Description of Artificial Sequence: Synthetic oligonucleotide
cacaggccagcuggaugcu

SEQ ID NO: 2683189 - RNA, 19 nt, Artificial Sequence
  Description of Artificial Sequence: Synthetic oligonucleotide
cugaacugguaggcucuuu

SEQ ID NO: 2683190 - RNA, 19 nt, Artificial Sequence
  Description of Artificial Sequence: Synthetic oligonucleotide
ccggcagacaguccucauu

SEQ ID NO: 2683191 - RNA, 19 nt, Artificial Sequence
  Description of Artificial Sequence: Synthetic oligonucleotide
caccccacgcuugggcauu

SEQ ID NO: 2683192 - RNA, 19 nt, Artificial Sequence
  Description of Artificial Sequence: Synthetic oligonucleotide
ccaccccacgcuugggcau

SEQ ID NO: 2683193 - RNA, 19 nt, Artificial Sequence
  Description of Artificial Sequence: Synthetic oligonucleotide
ccugugggaguugcuucau

SEQ ID NO: 2683194 - RNA, 19 nt, Artificial Sequence
  Description of Artificial Sequence: Synthetic oligonucleotide
ccccacgcuugggcauucu

SEQ ID NO: 2683195 - RNA, 19 nt, Artificial Sequence
  Description of Artificial Sequence: Synthetic oligonucleotide
aauaggugaagucacacag

SEQ ID NO: 2683196 - RNA, 19 nt, Artificial Sequence
  Description of Artificial Sequence: Synthetic oligonucleotide
gaugguaacggacacaucc

SEQ ID NO: 2683197 - RNA, 19 nt, Artificial Sequence
  Description of Artificial Sequence: Synthetic oligonucleotide
agggaucucauacacaugc

SEQ ID NO: 2683198 - RNA, 19 nt, Artificial Sequence
  Description of Artificial Sequence: Synthetic oligonucleotide
ucggcaauuauccaguccc

SEQ ID NO: 2683199 - RNA, 19 nt, Artificial Sequence
  Description of Artificial Sequence: Synthetic oligonucleotide
agucaaugcucucugggcc

SEQ ID NO: 2683200 - RNA, 19 nt, Artificial Sequence
  Description of Artificial Sequence: Synthetic oligonucleotide
agaaucggcaauuauccag

SEQ ID NO: 2683201 - RNA, 19 nt, Artificial Sequence
  Description of Artificial Sequence: Synthetic oligonucleotide
agcacugugacccagggca

SEQ ID NO: 2683202 - RNA, 19 nt, Artificial Sequence
  Description of Artificial Sequence: Synthetic oligonucleotide
aaaagggccaaacccgguc

SEQ ID NO: 2683203 - RNA, 19 nt, Artificial Sequence
  Description of Artificial Sequence: Synthetic oligonucleotide
agucugguauuccacaggg

SEQ ID NO: 2683204 - RNA, 19 nt, Artificial Sequence
  Description of Artificial Sequence: Synthetic oligonucleotide
uagagugagguguaauagg

SEQ ID NO: 2683205 - RNA, 19 nt, Artificial Sequence
  Description of Artificial Sequence: Synthetic oligonucleotide
guaacggacacauccagcc

SEQ ID NO: 2683206 - RNA, 19 nt, Artificial Sequence
  Description of Artificial Sequence: Synthetic oligonucleotide
ucugguauuccacagggau

SEQ ID NO: 2683207 - RNA, 19 nt, Artificial Sequence
  Description of Artificial Sequence: Synthetic oligonucleotide
ugagccuuuguacagucug

SEQ ID NO: 2683208 - RNA, 19 nt, Artificial Sequence
  Description of Artificial Sequence: Synthetic oligonucleotide
ggugaagucacacagguac

SEQ ID NO: 2683209 - RNA, 19 nt, Artificial Sequence
  Description of Artificial Sequence: Synthetic oligonucleotide
ucgaugauggcccggagug

SEQ ID NO: 2683210 - RNA, 19 nt, Artificial Sequence
  Description of Artificial Sequence: Synthetic oligonucleotide
gaucucauacacaugcagg

SEQ ID NO: 2683211 - RNA, 19 nt, Artificial Sequence
  Description of Artificial Sequence: Synthetic oligonucleotide
acagguaccugccagcauc

SEQ ID NO: 2683212 - RNA, 19 nt, Artificial Sequence
  Description of Artificial Sequence: Synthetic oligonucleotide
cacccuuuugcacacagcg

SEQ ID NO: 2683213 - RNA, 19 nt, Artificial Sequence
  Description of Artificial Sequence: Synthetic oligonucleotide
cucauacacaugcaggucc

SEQ ID NO: 2683214 - RNA, 19 nt, Artificial Sequence
  Description of Artificial Sequence: Synthetic oligonucleotide
uaggugaagucacacaggu

SEQ ID NO: 2683215 - RNA, 19 nt, Artificial Sequence
  Description of Artificial Sequence: Synthetic oligonucleotide
uccaugucaaugauggagu

SEQ ID NO: 2683216 - RNA, 19 nt, Artificial Sequence
  Description of Artificial Sequence: Synthetic oligonucleotide
uuauccagucccuuguagc

SEQ ID NO: 2683217 - RNA, 19 nt, Artificial Sequence
  Description of Artificial Sequence: Synthetic oligonucleotide
aagcugaggacugugcuuc

SEQ ID NO: 2683218 - RNA, 19 nt, Artificial Sequence
  Description of Artificial Sequence: Synthetic oligonucleotide
uuuuccaguuccugaacag

SEQ ID NO: 2683219 - RNA, 19 nt, Artificial Sequence
  Description of Artificial Sequence: Synthetic oligonucleotide
ugugcuccccaaaagggcc

SEQ ID NO: 2683220 - RNA, 19 nt, Artificial Sequence
  Description of Artificial Sequence: Synthetic oligonucleotide
agguguaauaggugaaguc

SEQ ID NO: 2683221 - RNA, 19 nt, Artificial Sequence
  Description of Artificial Sequence: Synthetic oligonucleotide
uacacaugcagguccacgc

SEQ ID NO: 2683222 - RNA, 19 nt, Artificial Sequence
  Description of Artificial Sequence: Synthetic oligonucleotide
uccugaacagcaauccagc

SEQ ID NO: 2683223 - RNA, 19 nt, Artificial Sequence
  Description of Artificial Sequence: Synthetic oligonucleotide
uguaauaggugaagucaca

SEQ ID NO: 2683224 - RNA, 19 nt, Artificial Sequence
  Description of Artificial Sequence: Synthetic oligonucleotide
aagccgaucggccgcggcc

SEQ ID NO: 2683225 - RNA, 19 nt, Artificial Sequence
  Description of Artificial Sequence: Synthetic oligonucleotide
gacgaaagccgaucggccg

SEQ ID NO: 2683226 - RNA, 19 nt, Artificial Sequence
  Description of Artificial Sequence: Synthetic oligonucleotide
ucccuuguagcccuuguug

SEQ ID NO: 2683227 - RNA, 19 nt, Artificial Sequence
  Description of Artificial Sequence: Synthetic oligonucleotide
auuauccagucccuuguag

SEQ ID NO: 2683228 - RNA, 19 nt, Artificial Sequence
  Description of Artificial Sequence: Synthetic oligonucleotide
cacgcuguccccaaggccc

SEQ ID NO: 2683229 - RNA, 19 nt, Artificial Sequence
  Description of Artificial Sequence: Synthetic oligonucleotide
aucuccucgaugauggccc

SEQ ID NO: 2683230 - RNA, 19 nt, Artificial Sequence
  Description of Artificial Sequence: Synthetic oligonucleotide
aucggcaauuauccagucc

SEQ ID NO: 2683231 - RNA, 19 nt, Artificial Sequence
  Description of Artificial Sequence: Synthetic oligonucleotide
uaauaggugaagucacaca

SEQ ID NO: 2683232 - RNA, 19 nt, Artificial Sequence
  Description of Artificial Sequence: Synthetic oligonucleotide
agcuggucggcauuguagg

SEQ ID NO: 2683233 - RNA, 19 nt, Artificial Sequence
  Description of Artificial Sequence: Synthetic oligonucleotide
acgaaagccgaucggccgc

SEQ ID NO: 2683234 - RNA, 19 nt, Artificial Sequence
  Description of Artificial Sequence: Synthetic oligonucleotide
ugacaccccaacaugcacc

SEQ ID NO: 2683235 - RNA, 19 nt, Artificial Sequence
  Description of Artificial Sequence: Synthetic oligonucleotide
aacccggucaccaccaccg

SEQ ID NO: 2683236 - RNA, 19 nt, Artificial Sequence
  Description of Artificial Sequence: Synthetic oligonucleotide
ugggccguccuccacacag

SEQ ID NO: 2683237 - RNA, 19 nt, Artificial Sequence
  Description of Artificial Sequence: Synthetic oligonucleotide
aaagggccaaacccgguca

SEQ ID NO: 2683238 - RNA, 19 nt, Artificial Sequence
  Description of Artificial Sequence: Synthetic oligonucleotide
aaucggcaauuauccaguc

SEQ ID NO: 2683239 - RNA, 19 nt, Artificial Sequence
  Description of Artificial Sequence: Synthetic oligonucleotide
guccaugucaaugauggag

SEQ ID NO: 2683240 - RNA, 19 nt, Artificial Sequence
  Description of Artificial Sequence: Synthetic oligonucleotide
gagucaaugcucucugggc

SEQ ID NO: 2683241 - RNA, 19 nt, Artificial Sequence
  Description of Artificial Sequence: Synthetic oligonucleotide
uagcuggucggcauuguag

SEQ ID NO: 2683242 - RNA, 19 nt, Artificial Sequence
  Description of Artificial Sequence: Synthetic oligonucleotide
cauggacgaaagccgaucg

SEQ ID NO: 2683243 - RNA, 19 nt, Artificial Sequence
  Description of Artificial Sequence: Synthetic oligonucleotide
ugguaacggacacauccag

SEQ ID NO: 2683244 - RNA, 19 nt, Artificial Sequence
  Description of Artificial Sequence: Synthetic oligonucleotide
aaagccgaucggccgcggc

SEQ ID NO: 2683245 - RNA, 19 nt, Artificial Sequence
  Description of Artificial Sequence: Synthetic oligonucleotide
agugugcuccccaaaaggg

SEQ ID NO: 2683246 - RNA, 19 nt, Artificial Sequence
  Description of Artificial Sequence: Synthetic oligonucleotide
uacagucugguauuccaca

SEQ ID NO: 2683247 - RNA, 19 nt, Artificial Sequence
  Description of Artificial Sequence: Synthetic oligonucleotide
aaugcucucugggccgucc

SEQ ID NO: 2683248 - RNA, 19 nt, Artificial Sequence
  Description of Artificial Sequence: Synthetic oligonucleotide
cagugugcuccccaaaagg

SEQ ID NO: 2683249 - RNA, 19 nt, Artificial Sequence
  Description of Artificial Sequence: Synthetic oligonucleotide
guaccugccagcauccugg

SEQ ID NO: 2683250 - RNA, 19 nt, Artificial Sequence
  Description of Artificial Sequence: Synthetic oligonucleotide
agggaugagccuuuguaca

SEQ ID NO: 2683251 - RNA, 19 nt, Artificial Sequence
  Description of Artificial Sequence: Synthetic oligonucleotide
aagggccaaacccggucac

SEQ ID NO: 2683252 - RNA, 19 nt, Artificial Sequence
  Description of Artificial Sequence: Synthetic oligonucleotide
gucaaugcucucugggccg

SEQ ID NO: 2683253 - RNA, 19 nt, Artificial Sequence
  Description of Artificial Sequence: Synthetic oligonucleotide
uguagggcuugcccagugg

SEQ ID NO: 2683254 - RNA, 19 nt, Artificial Sequence
  Description of Artificial Sequence: Synthetic oligonucleotide
ugugacccagggcagaauc

SEQ ID NO: 2683255 - RNA, 19 nt, Artificial Sequence
  Description of Artificial Sequence: Synthetic oligonucleotide
cugugcuucucccacagug

SEQ ID NO: 2683256 - RNA, 19 nt, Artificial Sequence
  Description of Artificial Sequence: Synthetic oligonucleotide
guagggcuugcccaguggg

SEQ ID NO: 2683257 - RNA, 19 nt, Artificial Sequence
  Description of Artificial Sequence: Synthetic oligonucleotide
ugcaccacaagcugaggac

SEQ ID NO: 2683258 - RNA, 19 nt, Artificial Sequence
  Description of Artificial Sequence: Synthetic oligonucleotide
uggacgaaagccgaucggc

SEQ ID NO: 2683259 - RNA, 19 nt, Artificial Sequence
  Description of Artificial Sequence: Synthetic oligonucleotide
ggagucaaugcucucuggg

SEQ ID NO: 2683260 - RNA, 19 nt, Artificial Sequence
  Description of Artificial Sequence: Synthetic oligonucleotide
gcagaaucggcaauuaucc

SEQ ID NO: 2683261 - RNA, 19 nt, Artificial Sequence
  Description of Artificial Sequence: Synthetic oligonucleotide
cauuguagggcuugcccag

SEQ ID NO: 2683262 - RNA, 19 nt, Artificial Sequence
  Description of Artificial Sequence: Synthetic oligonucleotide
cagaacacccagcaucucc

SEQ ID NO: 2683263 - RNA, 19 nt, Artificial Sequence
  Description of Artificial Sequence: Synthetic oligonucleotide
guggcaacagcugacgucc

SEQ ID NO: 2683264 - RNA, 19 nt, Artificial Sequence
  Description of Artificial Sequence: Synthetic oligonucleotide
acagcaauccagcuggcau

SEQ ID NO: 2683265 - RNA, 19 nt, Artificial Sequence
  Description of Artificial Sequence: Synthetic oligonucleotide
uauuccacagggaucucau

SEQ ID NO: 2683266 - RNA, 19 nt, Artificial Sequence
  Description of Artificial Sequence: Synthetic oligonucleotide
cugaacagcaauccagcug

SEQ ID NO: 2683267 - RNA, 19 nt, Artificial Sequence
  Description of Artificial Sequence: Synthetic oligonucleotide
gcguccaugucaaugaugg

SEQ ID NO: 2683268 - RNA, 19 nt, Artificial Sequence
  Description of Artificial Sequence: Synthetic oligonucleotide
gucaaugauggagucaaug

SEQ ID NO: 2683269 - RNA, 19 nt, Artificial Sequence
  Description of Artificial Sequence: Synthetic oligonucleotide
augucaaugauggagucaa

SEQ ID NO: 2683270 - RNA, 19 nt, Artificial Sequence
  Description of Artificial Sequence: Synthetic oligonucleotide
gaugauggcccggagugcc

SEQ ID NO: 2683271 - RNA, 19 nt, Artificial Sequence
  Description of Artificial Sequence: Synthetic oligonucleotide
agagugagguguaauaggu

SEQ ID NO: 2683272 - RNA, 19 nt, Artificial Sequence
  Description of Artificial Sequence: Synthetic oligonucleotide
auggagucaaugcucucug

SEQ ID NO: 2683273 - RNA, 19 nt, Artificial Sequence
  Description of Artificial Sequence: Synthetic oligonucleotide
cagggaugagccuuuguac

SEQ ID NO: 2683274 - RNA, 19 nt, Artificial Sequence
  Description of Artificial Sequence: Synthetic oligonucleotide
guaauaggugaagucacac

SEQ ID NO: 2683275 - RNA, 19 nt, Artificial Sequence
  Description of Artificial Sequence: Synthetic oligonucleotide
uugcacacagcguccaugu

SEQ ID NO: 2683276 - RNA, 19 nt, Artificial Sequence
  Description of Artificial Sequence: Synthetic oligonucleotide
cccaaaagggccaaacccg

SEQ ID NO: 2683277 - RNA, 19 nt, Artificial Sequence
  Description of Artificial Sequence: Synthetic oligonucleotide
uaacggacacauccagccc

SEQ ID NO: 2683278 - RNA, 19 nt, Artificial Sequence
  Description of Artificial Sequence: Synthetic oligonucleotide
auggacgaaagccgaucgg

SEQ ID NO: 2683279 - RNA, 19 nt, Artificial Sequence
  Description of Artificial Sequence: Synthetic oligonucleotide
aauuauccagucccuugua

SEQ ID NO: 2683280 - RNA, 19 nt, Artificial Sequence
  Description of Artificial Sequence: Synthetic oligonucleotide
cccaacaugcaccacaagc

SEQ ID NO: 2683281 - RNA, 19 nt, Artificial Sequence
  Description of Artificial Sequence: Synthetic oligonucleotide
uuugcacacagcguccaug

SEQ ID NO: 2683282 - RNA, 19 nt, Artificial Sequence
  Description of Artificial Sequence: Synthetic oligonucleotide
ugaggacugugcuucuccc

SEQ ID NO: 2683283 - RNA, 19 nt, Artificial Sequence
  Description of Artificial Sequence: Synthetic oligonucleotide
auaggugaagucacacagg

SEQ ID NO: 2683284 - RNA, 19 nt, Artificial Sequence
  Description of Artificial Sequence: Synthetic oligonucleotide
auacacaugcagguccacg

SEQ ID NO: 2683285 - RNA, 19 nt, Artificial Sequence
  Description of Artificial Sequence: Synthetic oligonucleotide
gaugagccuuuguacaguc

SEQ ID NO: 2683286 - RNA, 19 nt, Artificial Sequence
  Description of Artificial Sequence: Synthetic oligonucleotide
ugccugacaccccaacaug

SEQ ID NO: 2683287 - RNA, 19 nt, Artificial Sequence
  Description of Artificial Sequence: Synthetic oligonucleotide
uguuguguccacacuucuc

SEQ ID NO: 2683288 - RNA, 19 nt, Artificial Sequence
  Description of Artificial Sequence: Synthetic oligonucleotide
aacaugcaccacaagcuga

SEQ ID NO: 2683289 - RNA, 19 nt, Artificial Sequence
  Description of Artificial Sequence: Synthetic oligonucleotide
ggcacauggacgaaagccg

SEQ ID NO: 2683290 - RNA, 19 nt, Artificial Sequence
  Description of Artificial Sequence: Synthetic oligonucleotide
uggagucaaugcucucugg

SEQ ID NO: 2683291 - RNA, 19 nt, Artificial Sequence
  Description of Artificial Sequence: Synthetic oligonucleotide
cugggagaugguaacggac

SEQ ID NO: 2683292 - RNA, 19 nt, Artificial Sequence
  Description of Artificial Sequence: Synthetic oligonucleotide
ccagcuggcauucacagug

SEQ ID NO: 2683293 - RNA, 19 nt, Artificial Sequence
  Description of Artificial Sequence: Synthetic oligonucleotide
cugaggacugugcuucucc

SEQ ID NO: 2683294 - RNA, 19 nt, Artificial Sequence
  Description of Artificial Sequence: Synthetic oligonucleotide
guguaauaggugaagucac

SEQ ID NO: 2683295 - RNA, 19 nt, Artificial Sequence
  Description of Artificial Sequence: Synthetic oligonucleotide
augcaccacaagcugagga

SEQ ID NO: 2683296 - RNA, 19 nt, Artificial Sequence
  Description of Artificial Sequence: Synthetic oligonucleotide
acauggacgaaagccgauc

SEQ ID NO: 2683297 - RNA, 19 nt, Artificial Sequence
  Description of Artificial Sequence: Synthetic oligonucleotide
agcaauccagcuggcauuc

SEQ ID NO: 2683298 - RNA, 19 nt, Artificial Sequence
  Description of Artificial Sequence: Synthetic oligonucleotide
uguccacacuucuccagug

SEQ ID NO: 2683299 - RNA, 19 nt, Artificial Sequence
  Description of Artificial Sequence: Synthetic oligonucleotide
aauccagcuggcauucaca

SEQ ID NO: 2683300 - RNA, 19 nt, Artificial Sequence
  Description of Artificial Sequence: Synthetic oligonucleotide
uggucggcauuguagggcu

SEQ ID NO: 2683301 - RNA, 19 nt, Artificial Sequence
  Description of Artificial Sequence: Synthetic oligonucleotide
augccugacaccccaacau

SEQ ID NO: 2683302 - RNA, 19 nt, Artificial Sequence
  Description of Artificial Sequence: Synthetic oligonucleotide
gcaauuauccagucccuug

SEQ ID NO: 2683303 - RNA, 19 nt, Artificial Sequence
  Description of Artificial Sequence: Synthetic oligonucleotide
gucacccuuuugcacacag

SEQ ID NO: 2683304 - RNA, 19 nt, Artificial Sequence
  Description of Artificial Sequence: Synthetic oligonucleotide
gagccuuuguacagucugg

SEQ ID NO: 2683305 - RNA, 19 nt, Artificial Sequence
  Description of Artificial Sequence: Synthetic oligonucleotide
ugugcgugguugucagugc

SEQ ID NO: 2683306 - RNA, 19 nt, Artificial Sequence
  Description of Artificial Sequence: Synthetic oligonucleotide
uuccgcggcugcuccaugg

SEQ ID NO: 2683307 - RNA, 19 nt, Artificial Sequence
  Description of Artificial Sequence: Synthetic oligonucleotide
ggcauuguagggcuugccc

SEQ ID NO: 2683308 - RNA, 19 nt, Artificial Sequence
  Description of Artificial Sequence: Synthetic oligonucleotide
acaugcaccacaagcugag

SEQ ID NO: 2683309 - RNA, 19 nt, Artificial Sequence
  Description of Artificial Sequence: Synthetic oligonucleotide
agccccagcguggucaccc

SEQ ID NO: 2683310 - RNA, 19 nt, Artificial Sequence
  Description of Artificial Sequence: Synthetic oligonucleotide
ccccaaaagggccaaaccc

SEQ ID NO: 2683311 - RNA, 19 nt, Artificial Sequence
  Description of Artificial Sequence: Synthetic oligonucleotide
ccaaaagggccaaacccgg

SEQ ID NO: 2683312 - RNA, 19 nt, Artificial Sequence
  Description of Artificial Sequence: Synthetic oligonucleotide
ucacccuuuugcacacagc

SEQ ID NO: 2683313 - RNA, 19 nt, Artificial Sequence
  Description of Artificial Sequence: Synthetic oligonucleotide
gggcacauggacgaaagcc

SEQ ID NO: 2683314 - RNA, 19 nt, Artificial Sequence
  Description of Artificial Sequence: Synthetic oligonucleotide
uuguagggcuugcccagug

SEQ ID NO: 2683315 - RNA, 19 nt, Artificial Sequence
  Description of Artificial Sequence: Synthetic oligonucleotide
uuuguacagucugguauuc

SEQ ID NO: 2683316 - RNA, 19 nt, Artificial Sequence
  Description of Artificial Sequence: Synthetic oligonucleotide
gaagucacacagguaccug

SEQ ID NO: 2683317 - RNA, 19 nt, Artificial Sequence
  Description of Artificial Sequence: Synthetic oligonucleotide
ugcgugguugucagugcug

SEQ ID NO: 2683318 - RNA, 19 nt, Artificial Sequence
  Description of Artificial Sequence: Synthetic oligonucleotide
agaacacccagcaucuccu

SEQ ID NO: 2683319 - RNA, 19 nt, Artificial Sequence
  Description of Artificial Sequence: Synthetic oligonucleotide
uguagcccuuguugugucc

SEQ ID NO: 2683320 - RNA, 19 nt, Artificial Sequence
  Description of Artificial Sequence: Synthetic oligonucleotide
cagguaccugccagcaucc

SEQ ID NO: 2683321 - RNA, 19 nt, Artificial Sequence
  Description of Artificial Sequence: Synthetic oligonucleotide
gggaugagccuuuguacag

SEQ ID NO: 2683322 - RNA, 19 nt, Artificial Sequence
  Description of Artificial Sequence: Synthetic oligonucleotide
gagugagguguaauaggug

SEQ ID NO: 2683323 - RNA, 19 nt, Artificial Sequence
  Description of Artificial Sequence: Synthetic oligonucleotide
uuguacagucugguauucc

SEQ ID NO: 2683324 - RNA, 19 nt, Artificial Sequence
  Description of Artificial Sequence: Synthetic oligonucleotide
cuggucggcauuguagggc

SEQ ID NO: 2683325 - RNA, 19 nt, Artificial Sequence
  Description of Artificial Sequence: Synthetic oligonucleotide
ugauggcccggagugcccg

SEQ ID NO: 2683326 - RNA, 19 nt, Artificial Sequence
  Description of Artificial Sequence: Synthetic oligonucleotide
acacaugcagguccacgcu

SEQ ID NO: 2683327 - RNA, 19 nt, Artificial Sequence
  Description of Artificial Sequence: Synthetic oligonucleotide
gaaucggcaauuauccagu

SEQ ID NO: 2683328 - RNA, 19 nt, Artificial Sequence
  Description of Artificial Sequence: Synthetic oligonucleotide
ggcagaaucggcaauuauc

SEQ ID NO: 2683329 - RNA, 19 nt, Artificial Sequence
  Description of Artificial Sequence: Synthetic oligonucleotide
gcuucucccacagugcagg

SEQ ID NO: 2683330 - RNA, 19 nt, Artificial Sequence
  Description of Artificial Sequence: Synthetic oligonucleotide
cugacaccccaacaugcac

SEQ ID NO: 2683331 - RNA, 19 nt, Artificial Sequence
  Description of Artificial Sequence: Synthetic oligonucleotide
cugguggcaacagcugacg

SEQ ID NO: 2683332 - RNA, 19 nt, Artificial Sequence
  Description of Artificial Sequence: Synthetic oligonucleotide
cacaugcagguccacgcug

SEQ ID NO: 2683333 - RNA, 19 nt, Artificial Sequence
  Description of Artificial Sequence: Synthetic oligonucleotide
acauccagccccagcgugg

SEQ ID NO: 2683334 - RNA, 19 nt, Artificial Sequence
  Description of Artificial Sequence: Synthetic oligonucleotide
gugaagucacacagguacc

SEQ ID NO: 2683335 - RNA, 19 nt, Artificial Sequence
  Description of Artificial Sequence: Synthetic oligonucleotide
ugguggcaacagcugacgu

SEQ ID NO: 2683336 - RNA, 19 nt, Artificial Sequence
  Description of Artificial Sequence: Synthetic oligonucleotide
gugugcuccccaaaagggc

SEQ ID NO: 2683337 - RNA, 19 nt, Artificial Sequence
  Description of Artificial Sequence: Synthetic oligonucleotide
cacauccagccccagcgug

SEQ ID NO: 2683338 - RNA, 19 nt, Artificial Sequence
  Description of Artificial Sequence: Synthetic oligonucleotide
cacacagcguccaugucaa

SEQ ID NO: 2683339 - RNA, 19 nt, Artificial Sequence
  Description of Artificial Sequence: Synthetic oligonucleotide
uuuugcacacagcguccau

SEQ ID NO: 2683340 - RNA, 19 nt, Artificial Sequence
  Description of Artificial Sequence: Synthetic oligonucleotide
agcuggcauucacagugug

SEQ ID NO: 2683341 - RNA, 19 nt, Artificial Sequence
  Description of Artificial Sequence: Synthetic oligonucleotide
cuucucccacagugcaggg

SEQ ID NO: 2683342 - RNA, 19 nt, Artificial Sequence
  Description of Artificial Sequence: Synthetic oligonucleotide
augguaacggacacaucca

SEQ ID NO: 2683343 - RNA, 19 nt, Artificial Sequence
  Description of Artificial Sequence: Synthetic oligonucleotide
uuguagcccuuguuguguc

SEQ ID NO: 2683344 - RNA, 19 nt, Artificial Sequence
  Description of Artificial Sequence: Synthetic oligonucleotide
gaggacugugcuucuccca

SEQ ID NO: 2683345 - RNA, 19 nt, Artificial Sequence
  Description of Artificial Sequence: Synthetic oligonucleotide
caauuauccagucccuugu

SEQ ID NO: 2683346 - RNA, 19 nt, Artificial Sequence
  Description of Artificial Sequence: Synthetic oligonucleotide
agggccaaacccggucacc

SEQ ID NO: 2683347 - RNA, 19 nt, Artificial Sequence
  Description of Artificial Sequence: Synthetic oligonucleotide
guacagucugguauuccac

SEQ ID NO: 2683348 - RNA, 19 nt, Artificial Sequence
  Description of Artificial Sequence: Synthetic oligonucleotide
ucugggccguccuccacac

SEQ ID NO: 2683349 - RNA, 19 nt, Artificial Sequence
  Description of Artificial Sequence: Synthetic oligonucleotide
gcacacagcguccauguca

SEQ ID NO: 2683350 - RNA, 19 nt, Artificial Sequence
  Description of Artificial Sequence: Synthetic oligonucleotide
ucacagugugcuccccaaa

SEQ ID NO: 2683351 - RNA, 19 nt, Artificial Sequence
  Description of Artificial Sequence: Synthetic oligonucleotide
ccuuuugcacacagcgucc

SEQ ID NO: 2683352 - RNA, 19 nt, Artificial Sequence
  Description of Artificial Sequence: Synthetic oligonucleotide
uccagcuggcauucacagu

SEQ ID NO: 2683353 - RNA, 19 nt, Artificial Sequence
  Description of Artificial Sequence: Synthetic oligonucleotide
agccuuuguacagucuggu

SEQ ID NO: 2683354 - RNA, 19 nt, Artificial Sequence
  Description of Artificial Sequence: Synthetic oligonucleotide
ugcagggaugagccuuugu

SEQ ID NO: 2683355 - RNA, 19 nt, Artificial Sequence
  Description of Artificial Sequence: Synthetic oligonucleotide
caccccaacaugcaccaca

SEQ ID NO: 2683356 - RNA, 19 nt, Artificial Sequence
  Description of Artificial Sequence: Synthetic oligonucleotide
gguaccugccagcauccug

SEQ ID NO: 2683357 - RNA, 19 nt, Artificial Sequence
  Description of Artificial Sequence: Synthetic oligonucleotide
agucccuuguagcccuugu

SEQ ID NO: 2683358 - RNA, 19 nt, Artificial Sequence
  Description of Artificial Sequence: Synthetic oligonucleotide
gguaacggacacauccagc

SEQ ID NO: 2683359 - RNA, 19 nt, Artificial Sequence
  Description of Artificial Sequence: Synthetic oligonucleotide
caugucaaugauggaguca

SEQ ID NO: 2683360 - RNA, 19 nt, Artificial Sequence
  Description of Artificial Sequence: Synthetic oligonucleotide
gauggcccggagugcccgg

SEQ ID NO: 2683361 - RNA, 19 nt, Artificial Sequence
  Description of Artificial Sequence: Synthetic oligonucleotide
gguggcaacagcugacguc

SEQ ID NO: 2683362 - RNA, 19 nt, Artificial Sequence
  Description of Artificial Sequence: Synthetic oligonucleotide
caugccugacaccccaaca

SEQ ID NO: 2683363 - RNA, 19 nt, Artificial Sequence
  Description of Artificial Sequence: Synthetic oligonucleotide
ugucagugcugguggcaac

SEQ ID NO: 2683364 - RNA, 19 nt, Artificial Sequence
  Description of Artificial Sequence: Synthetic oligonucleotide
cuccccaaaagggccaaac

SEQ ID NO: 2683365 - RNA, 19 nt, Artificial Sequence
  Description of Artificial Sequence: Synthetic oligonucleotide
cuuuguacagucugguauu

SEQ ID NO: 2683366 - RNA, 19 nt, Artificial Sequence
  Description of Artificial Sequence: Synthetic oligonucleotide
acccggucaccaccaccgc

SEQ ID NO: 2683367 - RNA, 19 nt, Artificial Sequence
  Description of Artificial Sequence: Synthetic oligonucleotide
ugucaaugauggagucaau

SEQ ID NO: 2683368 - RNA, 19 nt, Artificial Sequence
  Description of Artificial Sequence: Synthetic oligonucleotide
ugguagagugagguguaau

SEQ ID NO: 2683369 - RNA, 19 nt, Artificial Sequence
  Description of Artificial Sequence: Synthetic oligonucleotide
cagaaucggcaauuaucca

SEQ ID NO: 2683370 - RNA, 19 nt, Artificial Sequence
  Description of Artificial Sequence: Synthetic oligonucleotide
gcuggucggcauuguaggg

SEQ ID NO: 2683371 - RNA, 19 nt, Artificial Sequence
  Description of Artificial Sequence: Synthetic oligonucleotide
cagggaucucauacacaug

SEQ ID NO: 2683372 - RNA, 19 nt, Artificial Sequence
  Description of Artificial Sequence: Synthetic oligonucleotide
gagguguaauaggugaagu

SEQ ID NO: 2683373 - RNA, 19 nt, Artificial Sequence
  Description of Artificial Sequence: Synthetic oligonucleotide
gggagaugguaacggacac

SEQ ID NO: 2683374 - RNA, 19 nt, Artificial Sequence
  Description of Artificial Sequence: Synthetic oligonucleotide
gucggcauuguagggcuug

SEQ ID NO: 2683375 - RNA, 19 nt, Artificial Sequence
  Description of Artificial Sequence: Synthetic oligonucleotide
gccaaacccggucaccacc

SEQ ID NO: 2683376 - RNA, 19 nt, Artificial Sequence
  Description of Artificial Sequence: Synthetic oligonucleotide
augauggcccggagugccc

SEQ ID NO: 2683377 - RNA, 19 nt, Artificial Sequence
  Description of Artificial Sequence: Synthetic oligonucleotide
gaacacccagcaucuccuc

SEQ ID NO: 2683378 - RNA, 19 nt, Artificial Sequence
  Description of Artificial Sequence: Synthetic oligonucleotide
uucucccacagugcaggga

SEQ ID NO: 2683379 - RNA, 19 nt, Artificial Sequence
  Description of Artificial Sequence: Synthetic oligonucleotide
caugcaccacaagcugagg

SEQ ID NO: 2683380 - RNA, 19 nt, Artificial Sequence
  Description of Artificial Sequence: Synthetic oligonucleotide
ucggcauuguagggcuugc

SEQ ID NO: 2683381 - RNA, 19 nt, Artificial Sequence
  Description of Artificial Sequence: Synthetic oligonucleotide
guagcccuuguugugucca

SEQ ID NO: 2683382 - RNA, 19 nt, Artificial Sequence
  Description of Artificial Sequence: Synthetic oligonucleotide
uggcaacagcugacguccc

SEQ ID NO: 2683383 - RNA, 19 nt, Artificial Sequence
  Description of Artificial Sequence: Synthetic oligonucleotide
agcguccaugucaaugaug

SEQ ID NO: 2683384 - RNA, 19 nt, Artificial Sequence
  Description of Artificial Sequence: Synthetic oligonucleotide
gcgugguugucagugcugg

SEQ ID NO: 2683385 - RNA, 19 nt, Artificial Sequence
  Description of Artificial Sequence: Synthetic oligonucleotide
ggacgaaagccgaucggcc

SEQ ID NO: 2683386 - RNA, 19 nt, Artificial Sequence
  Description of Artificial Sequence: Synthetic oligonucleotide
ccaacaugcaccacaagcu

SEQ ID NO: 2683387 - RNA, 19 nt, Artificial Sequence
  Description of Artificial Sequence: Synthetic oligonucleotide
uggcauucacagugugcuc

SEQ ID NO: 2683388 - RNA, 19 nt, Artificial Sequence
  Description of Artificial Sequence: Synthetic oligonucleotide
ugcacacagcguccauguc

SEQ ID NO: 2683389 - RNA, 19 nt, Artificial Sequence
  Description of Artificial Sequence: Synthetic oligonucleotide
gacccagggcagaaucggc

SEQ ID NO: 2683390 - RNA, 19 nt, Artificial Sequence
  Description of Artificial Sequence: Synthetic oligonucleotide
ccuuguagcccuuguugug

SEQ ID NO: 2683391 - RNA, 19 nt, Artificial Sequence
  Description of Artificial Sequence: Synthetic oligonucleotide
uggccaugccugacacccc

SEQ ID NO: 2683392 - RNA, 19 nt, Artificial Sequence
  Description of Artificial Sequence: Synthetic oligonucleotide
auuguagggcuugcccagu

SEQ ID NO: 2683393 - RNA, 19 nt, Artificial Sequence
  Description of Artificial Sequence: Synthetic oligonucleotide
gucagugcugguggcaaca

SEQ ID NO: 2683394 - RNA, 19 nt, Artificial Sequence
  Description of Artificial Sequence: Synthetic oligonucleotide
gccugacaccccaacaugc

SEQ ID NO: 2683395 - RNA, 19 nt, Artificial Sequence
  Description of Artificial Sequence: Synthetic oligonucleotide
uagcccuuguuguguccac

SEQ ID NO: 2683396 - RNA, 19 nt, Artificial Sequence
  Description of Artificial Sequence: Synthetic oligonucleotide
auuccacagggaucucaua

SEQ ID NO: 2683397 - RNA, 19 nt, Artificial Sequence
  Description of Artificial Sequence: Synthetic oligonucleotide
gaaagccgaucggccgcgg

SEQ ID NO: 2683398 - RNA, 19 nt, Artificial Sequence
  Description of Artificial Sequence: Synthetic oligonucleotide
accaccgccuuccgcggcu

SEQ ID NO: 2683399 - RNA, 19 nt, Artificial Sequence
  Description of Artificial Sequence: Synthetic oligonucleotide
cuuguagcccuuguugugu

SEQ ID NO: 2683400 - RNA, 19 nt, Artificial Sequence
  Description of Artificial Sequence: Synthetic oligonucleotide
auggcccggagugcccggc

SEQ ID NO: 2683401 - RNA, 19 nt, Artificial Sequence
  Description of Artificial Sequence: Synthetic oligonucleotide
accacaagcugaggacugu

SEQ ID NO: 2683402 - RNA, 19 nt, Artificial Sequence
  Description of Artificial Sequence: Synthetic oligonucleotide
acccuuuugcacacagcgu

SEQ ID NO: 2683403 - RNA, 19 nt, Artificial Sequence
  Description of Artificial Sequence: Synthetic oligonucleotide
cuccagugucacuguggug

SEQ ID NO: 2683404 - RNA, 19 nt, Artificial Sequence
  Description of Artificial Sequence: Synthetic oligonucleotide
ccaugucaaugauggaguc

SEQ ID NO: 2683405 - RNA, 19 nt, Artificial Sequence
  Description of Artificial Sequence: Synthetic oligonucleotide
uccccaaggcccagcuuuu

SEQ ID NO: 2683406 - RNA, 19 nt, Artificial Sequence
  Description of Artificial Sequence: Synthetic oligonucleotide
cucugggccguccuccaca

SEQ ID NO: 2683407 - RNA, 19 nt, Artificial Sequence
  Description of Artificial Sequence: Synthetic oligonucleotide
cucccacagugcagggaug

SEQ ID NO: 2683408 - RNA, 19 nt, Artificial Sequence
  Description of Artificial Sequence: Synthetic oligonucleotide
caaacccggucaccaccac

SEQ ID NO: 2683409 - RNA, 19 nt, Artificial Sequence
  Description of Artificial Sequence: Synthetic oligonucleotide
gcccuuguuguguccacac

SEQ ID NO: 2683410 - RNA, 19 nt, Artificial Sequence
  Description of Artificial Sequence: Synthetic oligonucleotide
accccaacaugcaccacaa

SEQ ID NO: 2683411 - RNA, 19 nt, Artificial Sequence
  Description of Artificial Sequence: Synthetic oligonucleotide
uggcccggagugcccggcc

SEQ ID NO: 2683412 - RNA, 19 nt, Artificial Sequence
  Description of Artificial Sequence: Synthetic oligonucleotide
augagccuuuguacagucu

SEQ ID NO: 2683413 - RNA, 19 nt, Artificial Sequence
  Description of Artificial Sequence: Synthetic oligonucleotide
ccagugucacugugguggc

SEQ ID NO: 2683414 - RNA, 19 nt, Artificial Sequence
  Description of Artificial Sequence: Synthetic oligonucleotide
cucgaugauggcccggagu

SEQ ID NO: 2683415 - RNA, 19 nt, Artificial Sequence
  Description of Artificial Sequence: Synthetic oligonucleotide
agguccacgcuguccccaa

SEQ ID NO: 2683416 - RNA, 19 nt, Artificial Sequence
  Description of Artificial Sequence: Synthetic oligonucleotide
agugcagggaugagccuuu

SEQ ID NO: 2683417 - RNA, 19 nt, Artificial Sequence
  Description of Artificial Sequence: Synthetic oligonucleotide
caccaccaccgccuuccgc

SEQ ID NO: 2683418 - RNA, 19 nt, Artificial Sequence
  Description of Artificial Sequence: Synthetic oligonucleotide
agggcagaaucggcaauua

SEQ ID NO: 2683419 - RNA, 19 nt, Artificial Sequence
  Description of Artificial Sequence: Synthetic oligonucleotide
gcacauggacgaaagccga

SEQ ID NO: 2683420 - RNA, 19 nt, Artificial Sequence
  Description of Artificial Sequence: Synthetic oligonucleotide
gucugguauuccacaggga

SEQ ID NO: 2683421 - RNA, 19 nt, Artificial Sequence
  Description of Artificial Sequence: Synthetic oligonucleotide
gugcgugguugucagugcu

SEQ ID NO: 2683422 - RNA, 19 nt, Artificial Sequence
  Description of Artificial Sequence: Synthetic oligonucleotide
ccacgcuguccccaaggcc

SEQ ID NO: 2683423 - RNA, 19 nt, Artificial Sequence
  Description of Artificial Sequence: Synthetic oligonucleotide
ccugacaccccaacaugca

SEQ ID NO: 2683424 - RNA, 19 nt, Artificial Sequence
  Description of Artificial Sequence: Synthetic oligonucleotide
cacugugguggccaugccu

SEQ ID NO: 2683425 - RNA, 19 nt, Artificial Sequence
  Description of Artificial Sequence: Synthetic oligonucleotide
caaaagggccaaacccggu

SEQ ID NO: 2683426 - RNA, 19 nt, Artificial Sequence
  Description of Artificial Sequence: Synthetic oligonucleotide
ccaaacccggucaccacca

SEQ ID NO: 2683427 - RNA, 19 nt, Artificial Sequence
  Description of Artificial Sequence: Synthetic oligonucleotide
cagcguggucacccuuuug

SEQ ID NO: 2683428 - RNA, 19 nt, Artificial Sequence
  Description of Artificial Sequence: Synthetic oligonucleotide
cucucugggccguccucca

SEQ ID NO: 2683429 - RNA, 19 nt, Artificial Sequence
  Description of Artificial Sequence: Synthetic oligonucleotide
gcggcccugguagagugag

SEQ ID NO: 2683430 - RNA, 19 nt, Artificial Sequence
  Description of Artificial Sequence: Synthetic oligonucleotide
gggccaaacccggucacca

SEQ ID NO: 2683431 - RNA, 19 nt, Artificial Sequence
  Description of Artificial Sequence: Synthetic oligonucleotide
cagcaauccagcuggcauu

SEQ ID NO: 2683432 - RNA, 19 nt, Artificial Sequence
  Description of Artificial Sequence: Synthetic oligonucleotide
ccaugccugacaccccaac

SEQ ID NO: 2683433 - RNA, 19 nt, Artificial Sequence
  Description of Artificial Sequence: Synthetic oligonucleotide
ggccaaacccggucaccac

SEQ ID NO: 2683434 - RNA, 19 nt, Artificial Sequence
  Description of Artificial Sequence: Synthetic oligonucleotide
gcacugugacccagggcag

SEQ ID NO: 2683435 - RNA, 19 nt, Artificial Sequence
  Description of Artificial Sequence: Synthetic oligonucleotide
aggugaagucacacaggua

SEQ ID NO: 2683436 - RNA, 19 nt, Artificial Sequence
  Description of Artificial Sequence: Synthetic oligonucleotide
cuuccgcggcugcuccaug

SEQ ID NO: 2683437 - RNA, 19 nt, Artificial Sequence
  Description of Artificial Sequence: Synthetic oligonucleotide
gugcuccccaaaagggcca

SEQ ID NO: 2683438 - RNA, 19 nt, Artificial Sequence
  Description of Artificial Sequence: Synthetic oligonucleotide
cccggucaccaccaccgcc

SEQ ID NO: 2683439 - RNA, 19 nt, Artificial Sequence
  Description of Artificial Sequence: Synthetic oligonucleotide
cagucccuuguagcccuug

SEQ ID NO: 2683440 - RNA, 19 nt, Artificial Sequence
  Description of Artificial Sequence: Synthetic oligonucleotide
gcccugguagagugaggug

SEQ ID NO: 2683441 - RNA, 19 nt, Artificial Sequence
  Description of Artificial Sequence: Synthetic oligonucleotide
ggcccugguagagugaggu

SEQ ID NO: 2683442 - RNA, 19 nt, Artificial Sequence
  Description of Artificial Sequence: Synthetic oligonucleotide
gccuagcuggucggcauug

SEQ ID NO: 2683443 - RNA, 19 nt, Artificial Sequence
  Description of Artificial Sequence: Synthetic oligonucleotide
ccguccuccacacagcacu

SEQ ID NO: 2683444 - RNA, 19 nt, Artificial Sequence
  Description of Artificial Sequence: Synthetic oligonucleotide
gguccacgcuguccccaag

SEQ ID NO: 2683445 - RNA, 19 nt, Artificial Sequence
  Description of Artificial Sequence: Synthetic oligonucleotide
agguaccugccagcauccu

SEQ ID NO: 2683446 - RNA, 19 nt, Artificial Sequence
  Description of Artificial Sequence: Synthetic oligonucleotide
ccacaagcugaggacugug

SEQ ID NO: 2683447 - RNA, 19 nt, Artificial Sequence
  Description of Artificial Sequence: Synthetic oligonucleotide
ccuuguuguguccacacuu

SEQ ID NO: 2683448 - RNA, 19 nt, Artificial Sequence
  Description of Artificial Sequence: Synthetic oligonucleotide
cacauggacgaaagccgau

SEQ ID NO: 2683449 - RNA, 19 nt, Artificial Sequence
  Description of Artificial Sequence: Synthetic oligonucleotide
gccuuuguacagucuggua

SEQ ID NO: 2683450 - RNA, 19 nt, Artificial Sequence
  Description of Artificial Sequence: Synthetic oligonucleotide
acgcuguccccaaggccca

SEQ ID NO: 2683451 - RNA, 19 nt, Artificial Sequence
  Description of Artificial Sequence: Synthetic oligonucleotide
cagguccacgcugucccca

SEQ ID NO: 2683452 - RNA, 19 nt, Artificial Sequence
  Description of Artificial Sequence: Synthetic oligonucleotide
ccugguagagugaggugua

SEQ ID NO: 2683453 - RNA, 19 nt, Artificial Sequence
  Description of Artificial Sequence: Synthetic oligonucleotide
cugguagagugagguguaa

SEQ ID NO: 2683454 - RNA, 19 nt, Artificial Sequence
  Description of Artificial Sequence: Synthetic oligonucleotide
ggaugagccuuuguacagu

SEQ ID NO: 2683455 - RNA, 19 nt, Artificial Sequence
  Description of Artificial Sequence: Synthetic oligonucleotide
gugcagggaugagccuuug

SEQ ID NO: 2683456 - RNA, 19 nt, Artificial Sequence
  Description of Artificial Sequence: Synthetic oligonucleotide
gcaccacaagcugaggacu

SEQ ID NO: 2683457 - RNA, 19 nt, Artificial Sequence
  Description of Artificial Sequence: Synthetic oligonucleotide
gcccggccuagcuggucgg

SEQ ID NO: 2683458 - RNA, 19 nt, Artificial Sequence
  Description of Artificial Sequence: Synthetic oligonucleotide
gccagcauccugggagaug

SEQ ID NO: 2683459 - RNA, 19 nt, Artificial Sequence
  Description of Artificial Sequence: Synthetic oligonucleotide
cgaaagccgaucggccgcg

SEQ ID NO: 2683460 - RNA, 19 nt, Artificial Sequence
  Description of Artificial Sequence: Synthetic oligonucleotide
gucccuuguagcccuuguu

SEQ ID NO: 2683461 - RNA, 19 nt, Artificial Sequence
  Description of Artificial Sequence: Synthetic oligonucleotide
ccugaacagcaauccagcu

SEQ ID NO: 2683462 - RNA, 19 nt, Artificial Sequence
  Description of Artificial Sequence: Synthetic oligonucleotide
cagugcagggaugagccuu

SEQ ID NO: 2683463 - RNA, 19 nt, Artificial Sequence
  Description of Artificial Sequence: Synthetic oligonucleotide
caaugcucucugggccguc

SEQ ID NO: 2683464 - RNA, 19 nt, Artificial Sequence
  Description of Artificial Sequence: Synthetic oligonucleotide
ccgcggcccugguagagug

SEQ ID NO: 2683465 - RNA, 19 nt, Artificial Sequence
  Description of Artificial Sequence: Synthetic oligonucleotide
aucggccgcggcccuggua

SEQ ID NO: 2683466 - RNA, 19 nt, Artificial Sequence
  Description of Artificial Sequence: Synthetic oligonucleotide
cguccuccacacagcacug

SEQ ID NO: 2683467 - RNA, 19 nt, Artificial Sequence
  Description of Artificial Sequence: Synthetic oligonucleotide
gcugaggacugugcuucuc

SEQ ID NO: 2683468 - RNA, 19 nt, Artificial Sequence
  Description of Artificial Sequence: Synthetic oligonucleotide
gggccguccuccacacagc

SEQ ID NO: 2683469 - RNA, 19 nt, Artificial Sequence
  Description of Artificial Sequence: Synthetic oligonucleotide
cgaugauggcccggagugc

SEQ ID NO: 2683470 - RNA, 19 nt, Artificial Sequence
  Description of Artificial Sequence: Synthetic oligonucleotide
cagggcagaaucggcaauu

SEQ ID NO: 2683471 - RNA, 19 nt, Artificial Sequence
  Description of Artificial Sequence: Synthetic oligonucleotide
ggcaauuauccagucccuu

SEQ ID NO: 2683472 - RNA, 19 nt, Artificial Sequence
  Description of Artificial Sequence: Synthetic oligonucleotide
ccccaacaugcaccacaag

SEQ ID NO: 2683473 - RNA, 19 nt, Artificial Sequence
  Description of Artificial Sequence: Synthetic oligonucleotide
cauccagccccagcguggu

SEQ ID NO: 2683474 - RNA, 19 nt, Artificial Sequence
  Description of Artificial Sequence: Synthetic oligonucleotide
gggcagaaucggcaauuau

SEQ ID NO: 2683475 - RNA, 19 nt, Artificial Sequence
  Description of Artificial Sequence: Synthetic oligonucleotide
ggccgcggcccugguagag

SEQ ID NO: 2683476 - RNA, 19 nt, Artificial Sequence
  Description of Artificial Sequence: Synthetic oligonucleotide
cagcguccaugucaaugau

SEQ ID NO: 2683477 - RNA, 19 nt, Artificial Sequence
  Description of Artificial Sequence: Synthetic oligonucleotide
cacagguaccugccagcau

SEQ ID NO: 2683478 - RNA, 19 nt, Artificial Sequence
  Description of Artificial Sequence: Synthetic oligonucleotide
guccuccacacagcacugu

SEQ ID NO: 2683479 - RNA, 19 nt, Artificial Sequence
  Description of Artificial Sequence: Synthetic oligonucleotide
cccggagugcccggccuag

SEQ ID NO: 2683480 - RNA, 19 nt, Artificial Sequence
  Description of Artificial Sequence: Synthetic oligonucleotide
cgaucggccgcggcccugg

SEQ ID NO: 2683481 - RNA, 19 nt, Artificial Sequence
  Description of Artificial Sequence: Synthetic oligonucleotide
ccagaacacccagcaucuc

SEQ ID NO: 2683482 - RNA, 19 nt, Artificial Sequence
  Description of Artificial Sequence: Synthetic oligonucleotide
cagccccagcguggucacc

SEQ ID NO: 2683483 - RNA, 19 nt, Artificial Sequence
  Description of Artificial Sequence: Synthetic oligonucleotide
gcaauccagcuggcauuca

SEQ ID NO: 2683484 - RNA, 19 nt, Artificial Sequence
  Description of Artificial Sequence: Synthetic oligonucleotide
cugggccguccuccacaca

SEQ ID NO: 2683485 - RNA, 19 nt, Artificial Sequence
  Description of Artificial Sequence: Synthetic oligonucleotide
cggcauuguagggcuugcc

SEQ ID NO: 2683486 - RNA, 19 nt, Artificial Sequence
  Description of Artificial Sequence: Synthetic oligonucleotide
ggugugcgugguugucagu

SEQ ID NO: 2683487 - RNA, 19 nt, Artificial Sequence
  Description of Artificial Sequence: Synthetic oligonucleotide
gugcccggccuagcugguc

SEQ ID NO: 2683488 - RNA, 19 nt, Artificial Sequence
  Description of Artificial Sequence: Synthetic oligonucleotide
cguccaugucaaugaugga

SEQ ID NO: 2683489 - RNA, 19 nt, Artificial Sequence
  Description of Artificial Sequence: Synthetic oligonucleotide
ggucacccuuuugcacaca

SEQ ID NO: 2683490 - RNA, 19 nt, Artificial Sequence
  Description of Artificial Sequence: Synthetic oligonucleotide
gccuuccgcggcugcucca

SEQ ID NO: 2683491 - RNA, 19 nt, Artificial Sequence
  Description of Artificial Sequence: Synthetic oligonucleotide
gaucggccgcggcccuggu

SEQ ID NO: 2683492 - RNA, 19 nt, Artificial Sequence
  Description of Artificial Sequence: Synthetic oligonucleotide
cccggccuagcuggucggc

SEQ ID NO: 2683493 - RNA, 19 nt, Artificial Sequence
  Description of Artificial Sequence: Synthetic oligonucleotide
ggcccggagugcccggccu

SEQ ID NO: 2683494 - RNA, 19 nt, Artificial Sequence
  Description of Artificial Sequence: Synthetic oligonucleotide
ccggagugcccggccuagc

SEQ ID NO: 2683495 - RNA, 19 nt, Artificial Sequence
  Description of Artificial Sequence: Synthetic oligonucleotide
ggccuagcuggucggcauu

SEQ ID NO: 2683496 - RNA, 19 nt, Artificial Sequence
  Description of Artificial Sequence: Synthetic oligonucleotide
cggcaauuauccagucccu

SEQ ID NO: 2683497 - RNA, 19 nt, Artificial Sequence
  Description of Artificial Sequence: Synthetic oligonucleotide
cccagcguggucacccuuu

SEQ ID NO: 2683498 - RNA, 19 nt, Artificial Sequence
  Description of Artificial Sequence: Synthetic oligonucleotide
gcccggagugcccggccua

SEQ ID NO: 2683499 - RNA, 19 nt, Artificial Sequence
  Description of Artificial Sequence: Synthetic oligonucleotide
ccagggcagaaucggcaau

SEQ ID NO: 2683500 - RNA, 19 nt, Artificial Sequence
  Description of Artificial Sequence: Synthetic oligonucleotide
ccaccgccuuccgcggcug

SEQ ID NO: 2683501 - RNA, 19 nt, Artificial Sequence
  Description of Artificial Sequence: Synthetic oligonucleotide
gcuccccaaaagggccaaa

SEQ ID NO: 2683502 - RNA, 19 nt, Artificial Sequence
  Description of Artificial Sequence: Synthetic oligonucleotide
ccgaucggccgcggcccug

SEQ ID NO: 2683503 - RNA, 19 nt, Artificial Sequence
  Description of Artificial Sequence: Synthetic oligonucleotide
cggagugcccggccuagcu

SEQ ID NO: 2683504 - RNA, 19 nt, Artificial Sequence
  Description of Artificial Sequence: Synthetic oligonucleotide
gccccagcguggucacccu

SEQ ID NO: 2683505 - RNA, 19 nt, Artificial Sequence
  Description of Artificial Sequence: Synthetic oligonucleotide
cgugguugucagugcuggu

SEQ ID NO: 2683506 - RNA, 19 nt, Artificial Sequence
  Description of Artificial Sequence: Synthetic oligonucleotide
ccagcguggucacccuuuu

SEQ ID NO: 2683507 - RNA, 19 nt, Artificial Sequence
  Description of Artificial Sequence: Synthetic oligonucleotide
gccgcggcccugguagagu

SEQ ID NO: 2683508 - RNA, 19 nt, Artificial Sequence
  Description of Artificial Sequence: Synthetic oligonucleotide
cgcggcccugguagaguga

SEQ ID NO: 2683509 - RNA, 19 nt, Artificial Sequence
  Description of Artificial Sequence: Synthetic oligonucleotide
ccccuccaccugcuccaga

SEQ ID NO: 2683510 - RNA, 19 nt, Artificial Sequence
  Description of Artificial Sequence: Synthetic oligonucleotide
gccgaucggccgcggcccu

SEQ ID NO: 2683511 - RNA, 19 nt, Artificial Sequence
  Description of Artificial Sequence: Synthetic oligonucleotide
cgcuguccccaaggcccag

SEQ ID NO: 2683512 - RNA, 19 nt, Artificial Sequence
  Description of Artificial Sequence: Synthetic oligonucleotide
ccuuccgcggcugcuccau

SEQ ID NO: 2683513 - RNA, 19 nt, Artificial Sequence
  Description of Artificial Sequence: Synthetic oligonucleotide
ggucggcauuguagggcuu

SEQ ID NO: 2683514 - RNA, 19 nt, Artificial Sequence
  Description of Artificial Sequence: Synthetic oligonucleotide
cggccuagcuggucggcau

SEQ ID NO: 2683515 - RNA, 19 nt, Artificial Sequence
  Description of Artificial Sequence: Synthetic oligonucleotide
ccccagcguggucacccuu

SEQ ID NO: 2683516 - RNA, 19 nt, Artificial Sequence
  Description of Artificial Sequence: Synthetic oligonucleotide
aauaaauuaacucagcggg

SEQ ID NO: 2683517 - RNA, 19 nt, Artificial Sequence
  Description of Artificial Sequence: Synthetic oligonucleotide
uuaauaaauuaacucagcg

SEQ ID NO: 2683518 - RNA, 19 nt, Artificial Sequence
  Description of Artificial Sequence: Synthetic oligonucleotide
uaaaagauuagaaaaguac

SEQ ID NO: 2683519 - RNA, 19 nt, Artificial Sequence
  Description of Artificial Sequence: Synthetic oligonucleotide
agaauaaaagauuagaaaa

SEQ ID NO: 2683520 - RNA, 19 nt, Artificial Sequence
  Description of Artificial Sequence: Synthetic oligonucleotide
aaaauuucacugcaaguag

SEQ ID NO: 2683521 - RNA, 19 nt, Artificial Sequence
  Description of Artificial Sequence: Synthetic oligonucleotide
aacacguagaaggauacgc

SEQ ID NO: 2683522 - RNA, 19 nt, Artificial Sequence
  Description of Artificial Sequence: Synthetic oligonucleotide
uucaaagccuaacuaaggg

SEQ ID NO: 2683523 - RNA, 19 nt, Artificial Sequence
  Description of Artificial Sequence: Synthetic oligonucleotide
aauaaaagauuagaaaagu

SEQ ID NO: 2683524 - RNA, 19 nt, Artificial Sequence
  Description of Artificial Sequence: Synthetic oligonucleotide
uucucuacagaauaaaaga

SEQ ID NO: 2683525 - RNA, 19 nt, Artificial Sequence
  Description of Artificial Sequence: Synthetic oligonucleotide
aagauuagaaaaguacagg

SEQ ID NO: 2683526 - RNA, 19 nt, Artificial Sequence
  Description of Artificial Sequence: Synthetic oligonucleotide
aaaacugucgccgcaaccg

SEQ ID NO: 2683527 - RNA, 19 nt, Artificial Sequence
  Description of Artificial Sequence: Synthetic oligonucleotide
ucuacagaauaaaagauua

SEQ ID NO: 2683528 - RNA, 19 nt, Artificial Sequence
  Description of Artificial Sequence: Synthetic oligonucleotide
aauuaacucagcgggagac

SEQ ID NO: 2683529 - RNA, 19 nt, Artificial Sequence
  Description of Artificial Sequence: Synthetic oligonucleotide
uauuagauuucaucagugg

SEQ ID NO: 2683530 - RNA, 19 nt, Artificial Sequence
  Description of Artificial Sequence: Synthetic oligonucleotide
gauuuaacgaguuaccguc

SEQ ID NO: 2683531 - RNA, 19 nt, Artificial Sequence
  Description of Artificial Sequence: Synthetic oligonucleotide
uuccuauuagauuucauca

SEQ ID NO: 2683532 - RNA, 19 nt, Artificial Sequence
  Description of Artificial Sequence: Synthetic oligonucleotide
uuagauuucaucaguggcu

SEQ ID NO: 2683533 - RNA, 19 nt, Artificial Sequence
  Description of Artificial Sequence: Synthetic oligonucleotide
cuaacuaagggacacuugc

SEQ ID NO: 2683534 - RNA, 19 nt, Artificial Sequence
  Description of Artificial Sequence: Synthetic oligonucleotide
agauuagaaaaguacagga

SEQ ID NO: 2683535 - RNA, 19 nt, Artificial Sequence
  Description of Artificial Sequence: Synthetic oligonucleotide
aucugaaggacuugaagac

SEQ ID NO: 2683536 - RNA, 19 nt, Artificial Sequence
  Description of Artificial Sequence: Synthetic oligonucleotide
ggacacaacacguagaagg

SEQ ID NO: 2683537 - RNA, 19 nt, Artificial Sequence
  Description of Artificial Sequence: Synthetic oligonucleotide
uuuauccuggguuauuucc

SEQ ID NO: 2683538 - RNA, 19 nt, Artificial Sequence
  Description of Artificial Sequence: Synthetic oligonucleotide
aagauucccacuuccaugu

SEQ ID NO: 2683539 - RNA, 19 nt, Artificial Sequence
  Description of Artificial Sequence: Synthetic oligonucleotide
auuagaaaaguacaggauu

SEQ ID NO: 2683540 - RNA, 19 nt, Artificial Sequence
  Description of Artificial Sequence: Synthetic oligonucleotide
auucuaguuguuuucauga

SEQ ID NO: 2683541 - RNA, 19 nt, Artificial Sequence
  Description of Artificial Sequence: Synthetic oligonucleotide
gaucugaaggacuugaaga

SEQ ID NO: 2683542 - RNA, 19 nt, Artificial Sequence
  Description of Artificial Sequence: Synthetic oligonucleotide
uucacugcaaguagguucc

SEQ ID NO: 2683543 - RNA, 19 nt, Artificial Sequence
  Description of Artificial Sequence: Synthetic oligonucleotide
ucaucaguggcuucaaagc

SEQ ID NO: 2683544 - RNA, 19 nt, Artificial Sequence
  Description of Artificial Sequence: Synthetic oligonucleotide
uacagaauaaaagauuaga

SEQ ID NO: 2683545 - RNA, 19 nt, Artificial Sequence
  Description of Artificial Sequence: Synthetic oligonucleotide
uuuccuauuagauuucauc

SEQ ID NO: 2683546 - RNA, 19 nt, Artificial Sequence
  Description of Artificial Sequence: Synthetic oligonucleotide
uuuucaugauuuaacgagu

SEQ ID NO: 2683547 - RNA, 19 nt, Artificial Sequence
  Description of Artificial Sequence: Synthetic oligonucleotide
auagaaguccauccugcgc

SEQ ID NO: 2683548 - RNA, 19 nt, Artificial Sequence
  Description of Artificial Sequence: Synthetic oligonucleotide
caaagccuaacuaagggac

SEQ ID NO: 2683549 - RNA, 19 nt, Artificial Sequence
  Description of Artificial Sequence: Synthetic oligonucleotide
uaaauuaacucagcgggag

SEQ ID NO: 2683550 - RNA, 19 nt, Artificial Sequence
  Description of Artificial Sequence: Synthetic oligonucleotide
uuagaaaaguacaggauuu

SEQ ID NO: 2683551 - RNA, 19 nt, Artificial Sequence
  Description of Artificial Sequence: Synthetic oligonucleotide
ucaugauuuaacgaguuac

SEQ ID NO: 2683552 - RNA, 19 nt, Artificial Sequence
  Description of Artificial Sequence: Synthetic oligonucleotide
aaauuucacugcaaguagg

SEQ ID NO: 2683553 - RNA, 19 nt, Artificial Sequence
  Description of Artificial Sequence: Synthetic oligonucleotide
aacaccacuucuccgcgac

SEQ ID NO: 2683554 - RNA, 19 nt, Artificial Sequence
  Description of Artificial Sequence: Synthetic oligonucleotide
uagaaguccauccugcgcu

SEQ ID NO: 2683555 - RNA, 19 nt, Artificial Sequence
  Description of Artificial Sequence: Synthetic oligonucleotide
caugauuuaacgaguuacc

SEQ ID NO: 2683556 - RNA, 19 nt, Artificial Sequence
  Description of Artificial Sequence: Synthetic oligonucleotide
uccuauuagauuucaucag

SEQ ID NO: 2683557 - RNA, 19 nt, Artificial Sequence
  Description of Artificial Sequence: Synthetic oligonucleotide
cuugcuuggauucuaguug

SEQ ID NO: 2683558 - RNA, 19 nt, Artificial Sequence
  Description of Artificial Sequence: Synthetic oligonucleotide
uuucacugcaaguagguuc

SEQ ID NO: 2683559 - RNA, 19 nt, Artificial Sequence
  Description of Artificial Sequence: Synthetic oligonucleotide
uaagauucccacuuccaug

SEQ ID NO: 2683560 - RNA, 19 nt, Artificial Sequence
  Description of Artificial Sequence: Synthetic oligonucleotide
ucucuacagaauaaaagau

SEQ ID NO: 2683561 - RNA, 19 nt, Artificial Sequence
  Description of Artificial Sequence: Synthetic oligonucleotide
gauucuaguuguuuucaug

SEQ ID NO: 2683562 - RNA, 19 nt, Artificial Sequence
  Description of Artificial Sequence: Synthetic oligonucleotide
cacuguacucuucaaaugc

SEQ ID NO: 2683563 - RNA, 19 nt, Artificial Sequence
  Description of Artificial Sequence: Synthetic oligonucleotide
guacucuucaaaugcgucg

SEQ ID NO: 2683564 - RNA, 19 nt, Artificial Sequence
  Description of Artificial Sequence: Synthetic oligonucleotide
acgaguuaccgucuccucc

SEQ ID NO: 2683565 - RNA, 19 nt, Artificial Sequence
  Description of Artificial Sequence: Synthetic oligonucleotide
ugauuuaacgaguuaccgu

SEQ ID NO: 2683566 - RNA, 19 nt, Artificial Sequence
  Description of Artificial Sequence: Synthetic oligonucleotide
augauuuaacgaguuaccg

SEQ ID NO: 2683567 - RNA, 19 nt, Artificial Sequence
  Description of Artificial Sequence: Synthetic oligonucleotide
cuucaaagccuaacuaagg

SEQ ID NO: 2683568 - RNA, 19 nt, Artificial Sequence
  Description of Artificial Sequence: Synthetic oligonucleotide
uggguuauuuccuauuaga

SEQ ID NO: 2683569 - RNA, 19 nt, Artificial Sequence
  Description of Artificial Sequence: Synthetic oligonucleotide
cuaagggacacuugcuugg

SEQ ID NO: 2683570 - RNA, 19 nt, Artificial Sequence
  Description of Artificial Sequence: Synthetic oligonucleotide
guugucgggacacaacacg

SEQ ID NO: 2683571 - RNA, 19 nt, Artificial Sequence
  Description of Artificial Sequence: Synthetic oligonucleotide
agaucugaaggacuugaag

SEQ ID NO: 2683572 - RNA, 19 nt, Artificial Sequence
  Description of Artificial Sequence: Synthetic oligonucleotide
acacgugaaaacugucgcc

SEQ ID NO: 2683573 - RNA, 19 nt, Artificial Sequence
  Description of Artificial Sequence: Synthetic oligonucleotide
uucaaaugcgucgucaucu

SEQ ID NO: 2683574 - RNA, 19 nt, Artificial Sequence
  Description of Artificial Sequence: Synthetic oligonucleotide
ucggcauagaaguccaucc

SEQ ID NO: 2683575 - RNA, 19 nt, Artificial Sequence
  Description of Artificial Sequence: Synthetic oligonucleotide
uucgcucucacuccacacg

SEQ ID NO: 2683576 - RNA, 19 nt, Artificial Sequence
  Description of Artificial Sequence: Synthetic oligonucleotide
acaggauuucauuauauua

SEQ ID NO: 2683577 - RNA, 19 nt, Artificial Sequence
  Description of Artificial Sequence: Synthetic oligonucleotide
aagccuaacuaagggacac

SEQ ID NO: 2683578 - RNA, 19 nt, Artificial Sequence
  Description of Artificial Sequence: Synthetic oligonucleotide
uggagugucuucuugccgc

SEQ ID NO: 2683579 - RNA, 19 nt, Artificial Sequence
  Description of Artificial Sequence: Synthetic oligonucleotide
accgucuccuccuaaagag

SEQ ID NO: 2683580 - RNA, 19 nt, Artificial Sequence
  Description of Artificial Sequence: Synthetic oligonucleotide
uuccaugucuacuuuaaaa

SEQ ID NO: 2683581 - RNA, 19 nt, Artificial Sequence
  Description of Artificial Sequence: Synthetic oligonucleotide
ucuucggcggcgaugagcu

SEQ ID NO: 2683582 - RNA, 19 nt, Artificial Sequence
  Description of Artificial Sequence: Synthetic oligonucleotide
agaaggauacgcccggguc

SEQ ID NO: 2683583 - RNA, 19 nt, Artificial Sequence
  Description of Artificial Sequence: Synthetic oligonucleotide
gaagagauguaauccugug

SEQ ID NO: 2683584 - RNA, 19 nt, Artificial Sequence
  Description of Artificial Sequence: Synthetic oligonucleotide
acuaagggacacuugcuug

SEQ ID NO: 2683585 - RNA, 19 nt, Artificial Sequence
  Description of Artificial Sequence: Synthetic oligonucleotide
guaauccugugcuagcugc

SEQ ID NO: 2683586 - RNA, 19 nt, Artificial Sequence
  Description of Artificial Sequence: Synthetic oligonucleotide
uuauccuggguuauuuccu

SEQ ID NO: 2683587 - RNA, 19 nt, Artificial Sequence
  Description of Artificial Sequence: Synthetic oligonucleotide
acuucuccgcgacaucugc

SEQ ID NO: 2683588 - RNA, 19 nt, Artificial Sequence
  Description of Artificial Sequence: Synthetic oligonucleotide
aauuucacugcaaguaggu

SEQ ID NO: 2683589 - RNA, 19 nt, Artificial Sequence
  Description of Artificial Sequence: Synthetic oligonucleotide
gauguaauccugugcuagc

SEQ ID NO: 2683590 - RNA, 19 nt, Artificial Sequence
  Description of Artificial Sequence: Synthetic oligonucleotide
aacuaagggacacuugcuu

SEQ ID NO: 2683591 - RNA, 19 nt, Artificial Sequence
  Description of Artificial Sequence: Synthetic oligonucleotide
agauguaauccugugcuag

SEQ ID NO: 2683592 - RNA, 19 nt, Artificial Sequence
  Description of Artificial Sequence: Synthetic oligonucleotide
cuacagaauaaaagauuag

SEQ ID NO: 2683593 - RNA, 19 nt, Artificial Sequence
  Description of Artificial Sequence: Synthetic oligonucleotide
aaagagggugguccgccuc

SEQ ID NO: 2683594 - RNA, 19 nt, Artificial Sequence
  Description of Artificial Sequence: Synthetic oligonucleotide
aaguccauccugcgcucgc

SEQ ID NO: 2683595 - RNA, 19 nt, Artificial Sequence
  Description of Artificial Sequence: Synthetic oligonucleotide
cacacgugaaaacugucgc

SEQ ID NO: 2683596 - RNA, 19 nt, Artificial Sequence
  Description of Artificial Sequence: Synthetic oligonucleotide
cacguagaaggauacgccc

SEQ ID NO: 2683597 - RNA, 19 nt, Artificial Sequence
  Description of Artificial Sequence: Synthetic oligonucleotide
cauagaaguccauccugcg

SEQ ID NO: 2683598 - RNA, 19 nt, Artificial Sequence
  Description of Artificial Sequence: Synthetic oligonucleotide
gacaucugccagcugcugg

SEQ ID NO: 2683599 - RNA, 19 nt, Artificial Sequence
  Description of Artificial Sequence: Synthetic oligonucleotide
uucauggagugucuucuug

SEQ ID NO: 2683600 - RNA, 19 nt, Artificial Sequence
  Description of Artificial Sequence: Synthetic oligonucleotide
uguacucuucaaaugcguc

SEQ ID NO: 2683601 - RNA, 19 nt, Artificial Sequence
  Description of Artificial Sequence: Synthetic oligonucleotide
aacgaguuaccgucuccuc

SEQ ID NO: 2683602 - RNA, 19 nt, Artificial Sequence
  Description of Artificial Sequence: Synthetic oligonucleotide
cacgugaaaacugucgccg

SEQ ID NO: 2683603 - RNA, 19 nt, Artificial Sequence
  Description of Artificial Sequence: Synthetic oligonucleotide
uguaauccugugcuagcug

SEQ ID NO: 2683604 - RNA, 19 nt, Artificial Sequence
  Description of Artificial Sequence: Synthetic oligonucleotide
acagaauaaaagauuagaa

SEQ ID NO: 2683605 - RNA, 19 nt, Artificial Sequence
  Description of Artificial Sequence: Synthetic oligonucleotide
uuaacgaguuaccgucucc

SEQ ID NO: 2683606 - RNA, 19 nt, Artificial Sequence
  Description of Artificial Sequence: Synthetic oligonucleotide
gaguauuuaauuauaauuu

SEQ ID NO: 2683607 - RNA, 19 nt, Artificial Sequence
  Description of Artificial Sequence: Synthetic oligonucleotide
uccuaaagagggugguccg

SEQ ID NO: 2683608 - RNA, 19 nt, Artificial Sequence
  Description of Artificial Sequence: Synthetic oligonucleotide
ucuaguuguuuucaugauu

SEQ ID NO: 2683609 - RNA, 19 nt, Artificial Sequence
  Description of Artificial Sequence: Synthetic oligonucleotide
gauuucauuauauuauuuu

SEQ ID NO: 2683610 - RNA, 19 nt, Artificial Sequence
  Description of Artificial Sequence: Synthetic oligonucleotide
uggaguauuuaauuauaau

SEQ ID NO: 2683611 - RNA, 19 nt, Artificial Sequence
  Description of Artificial Sequence: Synthetic oligonucleotide
acacguagaaggauacgcc

SEQ ID NO: 2683612 - RNA, 19 nt, Artificial Sequence
  Description of Artificial Sequence: Synthetic oligonucleotide
uuucaugauuuaacgaguu

SEQ ID NO: 2683613 - RNA, 19 nt, Artificial Sequence
  Description of Artificial Sequence: Synthetic oligonucleotide
acugcaaguagguucccug

SEQ ID NO: 2683614 - RNA, 19 nt, Artificial Sequence
  Description of Artificial Sequence: Synthetic oligonucleotide
uuaccgucuccuccuaaag

SEQ ID NO: 2683615 - RNA, 19 nt, Artificial Sequence
  Description of Artificial Sequence: Synthetic oligonucleotide
acaacacguagaaggauac

SEQ ID NO: 2683616 - RNA, 19 nt, Artificial Sequence
  Description of Artificial Sequence: Synthetic oligonucleotide
uugcuuggauucuaguugu

SEQ ID NO: 2683617 - RNA, 19 nt, Artificial Sequence
  Description of Artificial Sequence: Synthetic oligonucleotide
uuuaacgaguuaccgucuc

SEQ ID NO: 2683618 - RNA, 19 nt, Artificial Sequence
  Description of Artificial Sequence: Synthetic oligonucleotide
acgugaaaacugucgccgc

SEQ ID NO: 2683619 - RNA, 19 nt, Artificial Sequence
  Description of Artificial Sequence: Synthetic oligonucleotide
agugucuucuugccgcagg

SEQ ID NO: 2683620 - RNA, 19 nt, Artificial Sequence
  Description of Artificial Sequence: Synthetic oligonucleotide
agcgggagacuuuucuugg

SEQ ID NO: 2683621 - RNA, 19 nt, Artificial Sequence
  Description of Artificial Sequence: Synthetic oligonucleotide
aaaugcgucgucaucugca

SEQ ID NO: 2683622 - RNA, 19 nt, Artificial Sequence
  Description of Artificial Sequence: Synthetic oligonucleotide
gaaaacugucgccgcaacc

SEQ ID NO: 2683623 - RNA, 19 nt, Artificial Sequence
  Description of Artificial Sequence: Synthetic oligonucleotide
uggcauucucuacagaaua

SEQ ID NO: 2683624 - RNA, 19 nt, Artificial Sequence
  Description of Artificial Sequence: Synthetic oligonucleotide
uuggauucuaguuguuuuc

SEQ ID NO: 2683625 - RNA, 19 nt, Artificial Sequence
  Description of Artificial Sequence: Synthetic oligonucleotide
caagacuucauggaguguc

SEQ ID NO: 2683626 - RNA, 19 nt, Artificial Sequence
  Description of Artificial Sequence: Synthetic oligonucleotide
gcggcgaugagcucgaagg

SEQ ID NO: 2683627 - RNA, 19 nt, Artificial Sequence
  Description of Artificial Sequence: Synthetic oligonucleotide
cuccuaaagaggguggucc

SEQ ID NO: 2683628 - RNA, 19 nt, Artificial Sequence
  Description of Artificial Sequence: Synthetic oligonucleotide
ucuugccgcaggaagagau

SEQ ID NO: 2683629 - RNA, 19 nt, Artificial Sequence
  Description of Artificial Sequence: Synthetic oligonucleotide
aagggcaggcagucuucgc

SEQ ID NO: 2683630 - RNA, 19 nt, Artificial Sequence
  Description of Artificial Sequence: Synthetic oligonucleotide
acuguacucuucaaaugcg

SEQ ID NO: 2683631 - RNA, 19 nt, Artificial Sequence
  Description of Artificial Sequence: Synthetic oligonucleotide
agaaaaguacaggauuuca

SEQ ID NO: 2683632 - RNA, 19 nt, Artificial Sequence
  Description of Artificial Sequence: Synthetic oligonucleotide
uugucgggacacaacacgu

SEQ ID NO: 2683633 - RNA, 19 nt, Artificial Sequence
  Description of Artificial Sequence: Synthetic oligonucleotide
ucaaaugcgucgucaucug

SEQ ID NO: 2683634 - RNA, 19 nt, Artificial Sequence
  Description of Artificial Sequence: Synthetic oligonucleotide
uucggcggcgaugagcucg

SEQ ID NO: 2683635 - RNA, 19 nt, Artificial Sequence
  Description of Artificial Sequence: Synthetic oligonucleotide
aguggcuucaaagccuaac

SEQ ID NO: 2683636 - RNA, 19 nt, Artificial Sequence
  Description of Artificial Sequence: Synthetic oligonucleotide
aaguagguucccuggagua

SEQ ID NO: 2683637 - RNA, 19 nt, Artificial Sequence
  Description of Artificial Sequence: Synthetic oligonucleotide
ugcaagaagggcaggcagu

SEQ ID NO: 2683638 - RNA, 19 nt, Artificial Sequence
  Description of Artificial Sequence: Synthetic oligonucleotide
aaugcgucgucaucugcau

SEQ ID NO: 2683639 - RNA, 19 nt, Artificial Sequence
  Description of Artificial Sequence: Synthetic oligonucleotide
cugcaaguagguucccugg

SEQ ID NO: 2683640 - RNA, 19 nt, Artificial Sequence
  Description of Artificial Sequence: Synthetic oligonucleotide
aagggcgugcuggaacacc

SEQ ID NO: 2683641 - RNA, 19 nt, Artificial Sequence
  Description of Artificial Sequence: Synthetic oligonucleotide
uggauucuaguuguuuuca

SEQ ID NO: 2683642 - RNA, 19 nt, Artificial Sequence
  Description of Artificial Sequence: Synthetic oligonucleotide
uuuuauccuggguuauuuc

SEQ ID NO: 2683643 - RNA, 19 nt, Artificial Sequence
  Description of Artificial Sequence: Synthetic oligonucleotide
ucuccuccuaaagagggug

SEQ ID NO: 2683644 - RNA, 19 nt, Artificial Sequence
  Description of Artificial Sequence: Synthetic oligonucleotide
ugcaaguagguucccugga

SEQ ID NO: 2683645 - RNA, 19 nt, Artificial Sequence
  Description of Artificial Sequence: Synthetic oligonucleotide
gucgggacacaacacguag

SEQ ID NO: 2683646 - RNA, 19 nt, Artificial Sequence
  Description of Artificial Sequence: Synthetic oligonucleotide
uccugugcuagcugcaaga

SEQ ID NO: 2683647 - RNA, 19 nt, Artificial Sequence
  Description of Artificial Sequence: Synthetic oligonucleotide
ucugaaggacuugaagacu

SEQ ID NO: 2683648 - RNA, 19 nt, Artificial Sequence
  Description of Artificial Sequence: Synthetic oligonucleotide
ggaguauuuaauuauaauu

SEQ ID NO: 2683649 - RNA, 19 nt, Artificial Sequence
  Description of Artificial Sequence: Synthetic oligonucleotide
aaacugucgccgcaaccgu

SEQ ID NO: 2683650 - RNA, 19 nt, Artificial Sequence
  Description of Artificial Sequence: Synthetic oligonucleotide
uuggcauucucuacagaau

SEQ ID NO: 2683651 - RNA, 19 nt, Artificial Sequence
  Description of Artificial Sequence: Synthetic oligonucleotide
uucaugauuuaacgaguua

SEQ ID NO: 2683652 - RNA, 19 nt, Artificial Sequence
  Description of Artificial Sequence: Synthetic oligonucleotide
uacaggauuucauuauauu

SEQ ID NO: 2683653 - RNA, 19 nt, Artificial Sequence
  Description of Artificial Sequence: Synthetic oligonucleotide
gucgucaucugcaucuggg

SEQ ID NO: 2683654 - RNA, 19 nt, Artificial Sequence
  Description of Artificial Sequence: Synthetic oligonucleotide
uucuccgcgacaucugcca

SEQ ID NO: 2683655 - RNA, 19 nt, Artificial Sequence
  Description of Artificial Sequence: Synthetic oligonucleotide
ugaaaacugucgccgcaac

SEQ ID NO: 2683656 - RNA, 19 nt, Artificial Sequence
  Description of Artificial Sequence: Synthetic oligonucleotide
uaccgucuccuccuaaaga

SEQ ID NO: 2683657 - RNA, 19 nt, Artificial Sequence
  Description of Artificial Sequence: Synthetic oligonucleotide
cuggguuauuuccuauuag

SEQ ID NO: 2683658 - RNA, 19 nt, Artificial Sequence
  Description of Artificial Sequence: Synthetic oligonucleotide
uaauccugugcuagcugca

SEQ ID NO: 2683659 - RNA, 19 nt, Artificial Sequence
  Description of Artificial Sequence: Synthetic oligonucleotide
aagagggugguccgccucu

SEQ ID NO: 2683660 - RNA, 19 nt, Artificial Sequence
  Description of Artificial Sequence: Synthetic oligonucleotide
ucucacuccacacgugaaa

SEQ ID NO: 2683661 - RNA, 19 nt, Artificial Sequence
  Description of Artificial Sequence: Synthetic oligonucleotide
uaacgaguuaccgucuccu

SEQ ID NO: 2683662 - RNA, 19 nt, Artificial Sequence
  Description of Artificial Sequence: Synthetic oligonucleotide
agagaucugaaggacuuga

SEQ ID NO: 2683663 - RNA, 19 nt, Artificial Sequence
  Description of Artificial Sequence: Synthetic oligonucleotide
gucgccgcaaccguugucg

SEQ ID NO: 2683664 - RNA, 19 nt, Artificial Sequence
  Description of Artificial Sequence: Synthetic oligonucleotide
cuaaagagggugguccgcc

SEQ ID NO: 2683665 - RNA, 19 nt, Artificial Sequence
  Description of Artificial Sequence: Synthetic oligonucleotide
auaaauuaacucagcggga

SEQ ID NO: 2683666 - RNA, 19 nt, Artificial Sequence
  Description of Artificial Sequence: Synthetic oligonucleotide
aaagccuaacuaagggaca

SEQ ID NO: 2683667 - RNA, 19 nt, Artificial Sequence
  Description of Artificial Sequence: Synthetic oligonucleotide
ucgaagggcgugcuggaac

SEQ ID NO: 2683668 - RNA, 19 nt, Artificial Sequence
  Description of Artificial Sequence: Synthetic oligonucleotide
aguuguuuucaugauuuaa

SEQ ID NO: 2683669 - RNA, 19 nt, Artificial Sequence
  Description of Artificial Sequence: Synthetic oligonucleotide
gcaggaagagauguaaucc

SEQ ID NO: 2683670 - RNA, 19 nt, Artificial Sequence
  Description of Artificial Sequence: Synthetic oligonucleotide
acguagaaggauacgcccg

SEQ ID NO: 2683671 - RNA, 19 nt, Artificial Sequence
  Description of Artificial Sequence: Synthetic oligonucleotide
ucaguggcuucaaagccua

SEQ ID NO: 2683672 - RNA, 19 nt, Artificial Sequence
  Description of Artificial Sequence: Synthetic oligonucleotide
ucgcucucacuccacacgu

SEQ ID NO: 2683673 - RNA, 19 nt, Artificial Sequence
  Description of Artificial Sequence: Synthetic oligonucleotide
uagaaaaguacaggauuuc

SEQ ID NO: 2683674 - RNA, 19 nt, Artificial Sequence
  Description of Artificial Sequence: Synthetic oligonucleotide
cuaguuguuuucaugauuu

SEQ ID NO: 2683675 - RNA, 19 nt, Artificial Sequence
  Description of Artificial Sequence: Synthetic oligonucleotide
uggcuucaaagccuaacua

SEQ ID NO: 2683676 - RNA, 19 nt, Artificial Sequence
  Description of Artificial Sequence: Synthetic oligonucleotide
uagaaggauacgcccgggu

SEQ ID NO: 2683677 - RNA, 19 nt, Artificial Sequence
  Description of Artificial Sequence: Synthetic oligonucleotide
gacacaacacguagaagga

SEQ ID NO: 2683678 - RNA, 19 nt, Artificial Sequence
  Description of Artificial Sequence: Synthetic oligonucleotide
cugcaagaagggcaggcag

SEQ ID NO: 2683679 - RNA, 19 nt, Artificial Sequence
  Description of Artificial Sequence: Synthetic oligonucleotide
uucuaguuguuuucaugau

SEQ ID NO: 2683680 - RNA, 19 nt, Artificial Sequence
  Description of Artificial Sequence: Synthetic oligonucleotide
gcuucaaagccuaacuaag

SEQ ID NO: 2683681 - RNA, 19 nt, Artificial Sequence
  Description of Artificial Sequence: Synthetic oligonucleotide
caggauuucauuauauuau

SEQ ID NO: 2683682 - RNA, 19 nt, Artificial Sequence
  Description of Artificial Sequence: Synthetic oligonucleotide
agauuucaucaguggcuuc

SEQ ID NO: 2683683 - RNA, 19 nt, Artificial Sequence
  Description of Artificial Sequence: Synthetic oligonucleotide
augagcucgaagggcgugc

SEQ ID NO: 2683684 - RNA, 19 nt, Artificial Sequence
  Description of Artificial Sequence: Synthetic oligonucleotide
cagucuucgcucucacucc

SEQ ID NO: 2683685 - RNA, 19 nt, Artificial Sequence
  Description of Artificial Sequence: Synthetic oligonucleotide
ucgucaucugcaucuggga

SEQ ID NO: 2683686 - RNA, 19 nt, Artificial Sequence
  Description of Artificial Sequence: Synthetic oligonucleotide
gacuucauggagugucuuc

SEQ ID NO: 2683687 - RNA, 19 nt, Artificial Sequence
  Description of Artificial Sequence: Synthetic oligonucleotide
ggcauagaaguccauccug

SEQ ID NO: 2683688 - RNA, 19 nt, Artificial Sequence
  Description of Artificial Sequence: Synthetic oligonucleotide
ucgggacacaacacguaga

SEQ ID NO: 2683689 - RNA, 19 nt, Artificial Sequence
  Description of Artificial Sequence: Synthetic oligonucleotide
uuaacucagcgggagacuu

SEQ ID NO: 2683690 - RNA, 19 nt, Artificial Sequence
  Description of Artificial Sequence: Synthetic oligonucleotide
cuccuccuaaagagggugg

SEQ ID NO: 2683691 - RNA, 19 nt, Artificial Sequence
  Description of Artificial Sequence: Synthetic oligonucleotide
cuccacaucugcacuguac

SEQ ID NO: 2683692 - RNA, 19 nt, Artificial Sequence
  Description of Artificial Sequence: Synthetic oligonucleotide
cagcgggagacuuuucuug

SEQ ID NO: 2683693 - RNA, 19 nt, Artificial Sequence
  Description of Artificial Sequence: Synthetic oligonucleotide
gcagucuucgcucucacuc

SEQ ID NO: 2683694 - RNA, 19 nt, Artificial Sequence
  Description of Artificial Sequence: Synthetic oligonucleotide
agggcaggcagucuucgcu

SEQ ID NO: 2683695 - RNA, 19 nt, Artificial Sequence
  Description of Artificial Sequence: Synthetic oligonucleotide
aggaagagauguaauccug

SEQ ID NO: 2683696 - RNA, 19 nt, Artificial Sequence
  Description of Artificial Sequence: Synthetic oligonucleotide
cuggaguauuuaauuauaa

SEQ ID NO: 2683697 - RNA, 19 nt, Artificial Sequence
  Description of Artificial Sequence: Synthetic oligonucleotide
cuucuugccgcaggaagag

SEQ ID NO: 2683698 - RNA, 19 nt, Artificial Sequence
  Description of Artificial Sequence: Synthetic oligonucleotide
ccacacgugaaaacugucg

SEQ ID NO: 2683699 - RNA, 19 nt, Artificial Sequence
  Description of Artificial Sequence: Synthetic oligonucleotide
aagacuucauggagugucu

SEQ ID NO: 2683700 - RNA, 19 nt, Artificial Sequence
  Description of Artificial Sequence: Synthetic oligonucleotide
caaaugcgucgucaucugc

SEQ ID NO: 2683701 - RNA, 19 nt, Artificial Sequence
  Description of Artificial Sequence: Synthetic oligonucleotide
acucuucaaaugcgucguc

SEQ ID NO: 2683702 - RNA, 19 nt, Artificial Sequence
  Description of Artificial Sequence: Synthetic oligonucleotide
ucacuccacacgugaaaac

SEQ ID NO: 2683703 - RNA, 19 nt, Artificial Sequence
  Description of Artificial Sequence: Synthetic oligonucleotide
ggaacaccacuucuccgcg

SEQ ID NO: 2683704 - RNA, 19 nt, Artificial Sequence
  Description of Artificial Sequence: Synthetic oligonucleotide
aucugggagccccagcaga

SEQ ID NO: 2683705 - RNA, 19 nt, Artificial Sequence
  Description of Artificial Sequence: Synthetic oligonucleotide
ucuuggcauucucuacaga

SEQ ID NO: 2683706 - RNA, 19 nt, Artificial Sequence
  Description of Artificial Sequence: Synthetic oligonucleotide
uccacacgugaaaacuguc

SEQ ID NO: 2683707 - RNA, 19 nt, Artificial Sequence
  Description of Artificial Sequence: Synthetic oligonucleotide
uauccuggguuauuuccua

SEQ ID NO: 2683708 - RNA, 19 nt, Artificial Sequence
  Description of Artificial Sequence: Synthetic oligonucleotide
aucaguggcuucaaagccu

SEQ ID NO: 2683709 - RNA, 19 nt, Artificial Sequence
  Description of Artificial Sequence: Synthetic oligonucleotide
auguaauccugugcuagcu

SEQ ID NO: 2683710 - RNA, 19 nt, Artificial Sequence
  Description of Artificial Sequence: Synthetic oligonucleotide
cacaacacguagaaggaua

SEQ ID NO: 2683711 - RNA, 19 nt, Artificial Sequence
  Description of Artificial Sequence: Synthetic oligonucleotide
agggacacuugcuuggauu

SEQ ID NO: 2683712 - RNA, 19 nt, Artificial Sequence
  Description of Artificial Sequence: Synthetic oligonucleotide
ucuccgcgacaucugccag

SEQ ID NO: 2683713 - RNA, 19 nt, Artificial Sequence
  Description of Artificial Sequence: Synthetic oligonucleotide
cuucuccgcgacaucugcc

SEQ ID NO: 2683714 - RNA, 19 nt, Artificial Sequence
  Description of Artificial Sequence: Synthetic oligonucleotide
uugccgcaggaagagaugu

SEQ ID NO: 2683715 - RNA, 19 nt, Artificial Sequence
  Description of Artificial Sequence: Synthetic oligonucleotide
uaaagagggugguccgccu

SEQ ID NO: 2683716 - RNA, 19 nt, Artificial Sequence
  Description of Artificial Sequence: Synthetic oligonucleotide
gaaaaguacaggauuucau

SEQ ID NO: 2683717 - RNA, 19 nt, Artificial Sequence
  Description of Artificial Sequence: Synthetic oligonucleotide
aacucagcgggagacuuuu

SEQ ID NO: 2683718 - RNA, 19 nt, Artificial Sequence
  Description of Artificial Sequence: Synthetic oligonucleotide
auccugugcuagcugcaag

SEQ ID NO: 2683719 - RNA, 19 nt, Artificial Sequence
  Description of Artificial Sequence: Synthetic oligonucleotide
ggcuucaaagccuaacuaa

SEQ ID NO: 2683720 - RNA, 19 nt, Artificial Sequence
  Description of Artificial Sequence: Synthetic oligonucleotide
cugugcuagcugcaagaag

SEQ ID NO: 2683721 - RNA, 19 nt, Artificial Sequence
  Description of Artificial Sequence: Synthetic oligonucleotide
auuaacucagcgggagacu

SEQ ID NO: 2683722 - RNA, 19 nt, Artificial Sequence
  Description of Artificial Sequence: Synthetic oligonucleotide
cuugccgcaggaagagaug

SEQ ID NO: 2683723 - RNA, 19 nt, Artificial Sequence
  Description of Artificial Sequence: Synthetic oligonucleotide
gaaguccauccugcgcucg

SEQ ID NO: 2683724 - RNA, 19 nt, Artificial Sequence
  Description of Artificial Sequence: Synthetic oligonucleotide
auuuaacgaguuaccgucu

SEQ ID NO: 2683725 - RNA, 19 nt, Artificial Sequence
  Description of Artificial Sequence: Synthetic oligonucleotide
acuccacacgugaaaacug

SEQ ID NO: 2683726 - RNA, 19 nt, Artificial Sequence
  Description of Artificial Sequence: Synthetic oligonucleotide
gcaaguagguucccuggag

SEQ ID NO: 2683727 - RNA, 19 nt, Artificial Sequence
  Description of Artificial Sequence: Synthetic oligonucleotide
gcauagaaguccauccugc

SEQ ID NO: 2683728 - RNA, 19 nt, Artificial Sequence
  Description of Artificial Sequence: Synthetic oligonucleotide
agauucccacuuccauguc

SEQ ID NO: 2683729 - RNA, 19 nt, Artificial Sequence
  Description of Artificial Sequence: Synthetic oligonucleotide
ucagcgggagacuuuucuu

SEQ ID NO: 2683730 - RNA, 19 nt, Artificial Sequence
  Description of Artificial Sequence: Synthetic oligonucleotide
ugaaggacuugaagacuuu

SEQ ID NO: 2683731 - RNA, 19 nt, Artificial Sequence
  Description of Artificial Sequence: Synthetic oligonucleotide
gauucccacuuccaugucu

SEQ ID NO: 2683732 - RNA, 19 nt, Artificial Sequence
  Description of Artificial Sequence: Synthetic oligonucleotide
ugcaucugggagccccagc

SEQ ID NO: 2683733 - RNA, 19 nt, Artificial Sequence
  Description of Artificial Sequence: Synthetic oligonucleotide
ugucgggacacaacacgua

SEQ ID NO: 2683734 - RNA, 19 nt, Artificial Sequence
  Description of Artificial Sequence: Synthetic oligonucleotide
ucugcacuguacucuucaa

SEQ ID NO: 2683735 - RNA, 19 nt, Artificial Sequence
  Description of Artificial Sequence: Synthetic oligonucleotide
guuaccgucuccuccuaaa

SEQ ID NO: 2683736 - RNA, 19 nt, Artificial Sequence
  Description of Artificial Sequence: Synthetic oligonucleotide
gcgaugagcucgaagggcg

SEQ ID NO: 2683737 - RNA, 19 nt, Artificial Sequence
  Description of Artificial Sequence: Synthetic oligonucleotide
caacacguagaaggauacg

SEQ ID NO: 2683738 - RNA, 19 nt, Artificial Sequence
  Description of Artificial Sequence: Synthetic oligonucleotide
uaagggacacuugcuugga

SEQ ID NO: 2683739 - RNA, 19 nt, Artificial Sequence
  Description of Artificial Sequence: Synthetic oligonucleotide
aauccugugcuagcugcaa

SEQ ID NO: 2683740 - RNA, 19 nt, Artificial Sequence
  Description of Artificial Sequence: Synthetic oligonucleotide
ugcuagcugcaagaagggc

SEQ ID NO: 2683741 - RNA, 19 nt, Artificial Sequence
  Description of Artificial Sequence: Synthetic oligonucleotide
aggcagucuucgcucucac

SEQ ID NO: 2683742 - RNA, 19 nt, Artificial Sequence
  Description of Artificial Sequence: Synthetic oligonucleotide
guagaaggauacgcccggg

SEQ ID NO: 2683743 - RNA, 19 nt, Artificial Sequence
  Description of Artificial Sequence: Synthetic oligonucleotide
uccgcgacaucugccagcu

SEQ ID NO: 2683744 - RNA, 19 nt, Artificial Sequence
  Description of Artificial Sequence: Synthetic oligonucleotide
agcagagaucugaaggacu

SEQ ID NO: 2683745 - RNA, 19 nt, Artificial Sequence
  Description of Artificial Sequence: Synthetic oligonucleotide
gaugagcucgaagggcgug

SEQ ID NO: 2683746 - RNA, 19 nt, Artificial Sequence
  Description of Artificial Sequence: Synthetic oligonucleotide
uccauccugcgcucgcucu

SEQ ID NO: 2683747 - RNA, 19 nt, Artificial Sequence
  Description of Artificial Sequence: Synthetic oligonucleotide
gcuagcugcaagaagggca

SEQ ID NO: 2683748 - RNA, 19 nt, Artificial Sequence
  Description of Artificial Sequence: Synthetic oligonucleotide
cgucuccuccuaaagaggg

SEQ ID NO: 2683749 - RNA, 19 nt, Artificial Sequence
  Description of Artificial Sequence: Synthetic oligonucleotide
ggugguccgccucugcucc

SEQ ID NO: 2683750 - RNA, 19 nt, Artificial Sequence
  Description of Artificial Sequence: Synthetic oligonucleotide
uccuccuaaagaggguggu

SEQ ID NO: 2683751 - RNA, 19 nt, Artificial Sequence
  Description of Artificial Sequence: Synthetic oligonucleotide
augcgucgucaucugcauc

SEQ ID NO: 2683752 - RNA, 19 nt, Artificial Sequence
  Description of Artificial Sequence: Synthetic oligonucleotide
accguugucgggacacaac

SEQ ID NO: 2683753 - RNA, 19 nt, Artificial Sequence
  Description of Artificial Sequence: Synthetic oligonucleotide
gagauguaauccugugcua

SEQ ID NO: 2683754 - RNA, 19 nt, Artificial Sequence
  Description of Artificial Sequence: Synthetic oligonucleotide
ucccacuuccaugucuacu

SEQ ID NO: 2683755 - RNA, 19 nt, Artificial Sequence
  Description of Artificial Sequence: Synthetic oligonucleotide
aguagguucccuggaguau

SEQ ID NO: 2683756 - RNA, 19 nt, Artificial Sequence
  Description of Artificial Sequence: Synthetic oligonucleotide
ucgccgcaaccguugucgg

SEQ ID NO: 2683757 - RNA, 19 nt, Artificial Sequence
  Description of Artificial Sequence: Synthetic oligonucleotide
agccccagcagagaucuga

SEQ ID NO: 2683758 - RNA, 19 nt, Artificial Sequence
  Description of Artificial Sequence: Synthetic oligonucleotide
acugucgccgcaaccguug

SEQ ID NO: 2683759 - RNA, 19 nt, Artificial Sequence
  Description of Artificial Sequence: Synthetic oligonucleotide
cuccgcgacaucugccagc

SEQ ID NO: 2683760 - RNA, 19 nt, Artificial Sequence
  Description of Artificial Sequence: Synthetic oligonucleotide
agggugguccgccucugcu

SEQ ID NO: 2683761 - RNA, 19 nt, Artificial Sequence
  Description of Artificial Sequence: Synthetic oligonucleotide
cucucuucggcggcgauga

SEQ ID NO: 2683762 - RNA, 19 nt, Artificial Sequence
  Description of Artificial Sequence: Synthetic oligonucleotide
ccugcgcucgcucucuucg

SEQ ID NO: 2683763 - RNA, 19 nt, Artificial Sequence
  Description of Artificial Sequence: Synthetic oligonucleotide
aaccguugucgggacacaa

SEQ ID NO: 2683764 - RNA, 19 nt, Artificial Sequence
  Description of Artificial Sequence: Synthetic oligonucleotide
cgcgacaucugccagcugc

SEQ ID NO: 2683765 - RNA, 19 nt, Artificial Sequence
  Description of Artificial Sequence: Synthetic oligonucleotide
cugaaggacuugaagacuu

SEQ ID NO: 2683766 - RNA, 19 nt, Artificial Sequence
  Description of Artificial Sequence: Synthetic oligonucleotide
uccuccacaucugcacugu

SEQ ID NO: 2683767 - RNA, 19 nt, Artificial Sequence
  Description of Artificial Sequence: Synthetic oligonucleotide
auucccacuuccaugucua

SEQ ID NO: 2683768 - RNA, 19 nt, Artificial Sequence
  Description of Artificial Sequence: Synthetic oligonucleotide
cguagaaggauacgcccgg

SEQ ID NO: 2683769 - RNA, 19 nt, Artificial Sequence
  Description of Artificial Sequence: Synthetic oligonucleotide
uaacucagcgggagacuuu

SEQ ID NO: 2683770 - RNA, 19 nt, Artificial Sequence
  Description of Artificial Sequence: Synthetic oligonucleotide
auuuccuauuagauuucau

SEQ ID NO: 2683771 - RNA, 19 nt, Artificial Sequence
  Description of Artificial Sequence: Synthetic oligonucleotide
acacaacacguagaaggau

SEQ ID NO: 2683772 - RNA, 19 nt, Artificial Sequence
  Description of Artificial Sequence: Synthetic oligonucleotide
ugagcucgaagggcgugcu

SEQ ID NO: 2683773 - RNA, 19 nt, Artificial Sequence
  Description of Artificial Sequence: Synthetic oligonucleotide
ggcgaugagcucgaagggc

SEQ ID NO: 2683774 - RNA, 19 nt, Artificial Sequence
  Description of Artificial Sequence: Synthetic oligonucleotide
aguuaccgucuccuccuaa

SEQ ID NO: 2683775 - RNA, 19 nt, Artificial Sequence
  Description of Artificial Sequence: Synthetic oligonucleotide
gaacaccacuucuccgcga

SEQ ID NO: 2683776 - RNA, 19 nt, Artificial Sequence
  Description of Artificial Sequence: Synthetic oligonucleotide
cuguacucuucaaaugcgu

SEQ ID NO: 2683777 - RNA, 19 nt, Artificial Sequence
  Description of Artificial Sequence: Synthetic oligonucleotide
cugcgcucgcucucuucgg

SEQ ID NO: 2683778 - RNA, 19 nt, Artificial Sequence
  Description of Artificial Sequence: Synthetic oligonucleotide
ugucuucuugccgcaggaa

SEQ ID NO: 2683779 - RNA, 19 nt, Artificial Sequence
  Description of Artificial Sequence: Synthetic oligonucleotide
gagaucugaaggacuugaa

SEQ ID NO: 2683780 - RNA, 19 nt, Artificial Sequence
  Description of Artificial Sequence: Synthetic oligonucleotide
cagagaucugaaggacuug

SEQ ID NO: 2683781 - RNA, 19 nt, Artificial Sequence
  Description of Artificial Sequence: Synthetic oligonucleotide
gcucucacuccacacguga

SEQ ID NO: 2683782 - RNA, 19 nt, Artificial Sequence
  Description of Artificial Sequence: Synthetic oligonucleotide
caaguagguucccuggagu

SEQ ID NO: 2683783 - RNA, 19 nt, Artificial Sequence
  Description of Artificial Sequence: Synthetic oligonucleotide
gugaaaacugucgccgcaa

SEQ ID NO: 2683784 - RNA, 19 nt, Artificial Sequence
  Description of Artificial Sequence: Synthetic oligonucleotide
ccgucuccuccuaaagagg

SEQ ID NO: 2683785 - RNA, 19 nt, Artificial Sequence
  Description of Artificial Sequence: Synthetic oligonucleotide
uacgcccgggucggcauag

SEQ ID NO: 2683786 - RNA, 19 nt, Artificial Sequence
  Description of Artificial Sequence: Synthetic oligonucleotide
agggcgugcuggaacacca

SEQ ID NO: 2683787 - RNA, 19 nt, Artificial Sequence
  Description of Artificial Sequence: Synthetic oligonucleotide
ugcuuggauucuaguuguu

SEQ ID NO: 2683788 - RNA, 19 nt, Artificial Sequence
  Description of Artificial Sequence: Synthetic oligonucleotide
gcaaccguugucgggacac

SEQ ID NO: 2683789 - RNA, 19 nt, Artificial Sequence
  Description of Artificial Sequence: Synthetic oligonucleotide
cucgcucucuucggcggcg

SEQ ID NO: 2683790 - RNA, 19 nt, Artificial Sequence
  Description of Artificial Sequence: Synthetic oligonucleotide
guacaggauuucauuauau

SEQ ID NO: 2683791 - RNA, 19 nt, Artificial Sequence
  Description of Artificial Sequence: Synthetic oligonucleotide
uucuugccgcaggaagaga

SEQ ID NO: 2683792 - RNA, 19 nt, Artificial Sequence
  Description of Artificial Sequence: Synthetic oligonucleotide
ucucuucggcggcgaugag

SEQ ID NO: 2683793 - RNA, 19 nt, Artificial Sequence
  Description of Artificial Sequence: Synthetic oligonucleotide
cacuccacacgugaaaacu

SEQ ID NO: 2683794 - RNA, 19 nt, Artificial Sequence
  Description of Artificial Sequence: Synthetic oligonucleotide
ugccgcaggaagagaugua

SEQ ID NO: 2683795 - RNA, 19 nt, Artificial Sequence
  Description of Artificial Sequence: Synthetic oligonucleotide
ugucgccgcaaccguuguc

SEQ ID NO: 2683796 - RNA, 19 nt, Artificial Sequence
  Description of Artificial Sequence: Synthetic oligonucleotide
gcaagaagggcaggcaguc

SEQ ID NO: 2683797 - RNA, 19 nt, Artificial Sequence
  Description of Artificial Sequence: Synthetic oligonucleotide
agccuaacuaagggacacu

SEQ ID NO: 2683798 - RNA, 19 nt, Artificial Sequence
  Description of Artificial Sequence: Synthetic oligonucleotide
acaccacuucuccgcgaca

SEQ ID NO: 2683799 - RNA, 19 nt, Artificial Sequence
  Description of Artificial Sequence: Synthetic oligonucleotide
gaagggcgugcuggaacac

SEQ ID NO: 2683800 - RNA, 19 nt, Artificial Sequence
  Description of Artificial Sequence: Synthetic oligonucleotide
ucacugcaaguagguuccc

SEQ ID NO: 2683801 - RNA, 19 nt, Artificial Sequence
  Description of Artificial Sequence: Synthetic oligonucleotide
gggacacaacacguagaag

SEQ ID NO: 2683802 - RNA, 19 nt, Artificial Sequence
  Description of Artificial Sequence: Synthetic oligonucleotide
aguccauccugcgcucgcu

SEQ ID NO: 2683803 - RNA, 19 nt, Artificial Sequence
  Description of Artificial Sequence: Synthetic oligonucleotide
aacugucgccgcaaccguu

SEQ ID NO: 2683804 - RNA, 19 nt, Artificial Sequence
  Description of Artificial Sequence: Synthetic oligonucleotide
ccuaaagagggugguccgc

SEQ ID NO: 2683805 - RNA, 19 nt, Artificial Sequence
  Description of Artificial Sequence: Synthetic oligonucleotide
ggaagagauguaauccugu

SEQ ID NO: 2683806 - RNA, 19 nt, Artificial Sequence
  Description of Artificial Sequence: Synthetic oligonucleotide
ggguuauuuccuauuagau

SEQ ID NO: 2683807 - RNA, 19 nt, Artificial Sequence
  Description of Artificial Sequence: Synthetic oligonucleotide
gaaggacuugaagacuuuu

SEQ ID NO: 2683808 - RNA, 19 nt, Artificial Sequence
  Description of Artificial Sequence: Synthetic oligonucleotide
ccguugucgggacacaaca

SEQ ID NO: 2683809 - RNA, 19 nt, Artificial Sequence
  Description of Artificial Sequence: Synthetic oligonucleotide
gcgggagacuuuucuuggc

SEQ ID NO: 2683810 - RNA, 19 nt, Artificial Sequence
  Description of Artificial Sequence: Synthetic oligonucleotide
ggagugucuucuugccgca

SEQ ID NO: 2683811 - RNA, 19 nt, Artificial Sequence
  Description of Artificial Sequence: Synthetic oligonucleotide
gauacgcccgggucggcau

SEQ ID NO: 2683812 - RNA, 19 nt, Artificial Sequence
  Description of Artificial Sequence: Synthetic oligonucleotide
uccugcgcucgcucucuuc

SEQ ID NO: 2683813 - RNA, 19 nt, Artificial Sequence
  Description of Artificial Sequence: Synthetic oligonucleotide
ggagccccagcagagaucu

SEQ ID NO: 2683814 - RNA, 19 nt, Artificial Sequence
  Description of Artificial Sequence: Synthetic oligonucleotide
ccacaucugcacuguacuc

SEQ ID NO: 2683815 - RNA, 19 nt, Artificial Sequence
  Description of Artificial Sequence: Synthetic oligonucleotide
aggauacgcccgggucggc

SEQ ID NO: 2683816 - RNA, 19 nt, Artificial Sequence
  Description of Artificial Sequence: Synthetic oligonucleotide
guccauccugcgcucgcuc

SEQ ID NO: 2683817 - RNA, 19 nt, Artificial Sequence
  Description of Artificial Sequence: Synthetic oligonucleotide
agagggugguccgccucug

SEQ ID NO: 2683818 - RNA, 19 nt, Artificial Sequence
  Description of Artificial Sequence: Synthetic oligonucleotide
acucagcgggagacuuuuc

SEQ ID NO: 2683819 - RNA, 19 nt, Artificial Sequence
  Description of Artificial Sequence: Synthetic oligonucleotide
gccgcaaccguugucggga

SEQ ID NO: 2683820 - RNA, 19 nt, Artificial Sequence
  Description of Artificial Sequence: Synthetic oligonucleotide
gcugcaagaagggcaggca

SEQ ID NO: 2683821 - RNA, 19 nt, Artificial Sequence
  Description of Artificial Sequence: Synthetic oligonucleotide
cugcaucugggagccccag

SEQ ID NO: 2683822 - RNA, 19 nt, Artificial Sequence
  Description of Artificial Sequence: Synthetic oligonucleotide
cguugucgggacacaacac

SEQ ID NO: 2683823 - RNA, 19 nt, Artificial Sequence
  Description of Artificial Sequence: Synthetic oligonucleotide
cgggucggcauagaagucc

SEQ ID NO: 2683824 - RNA, 19 nt, Artificial Sequence
  Description of Artificial Sequence: Synthetic oligonucleotide
guagguucccuggaguauu

SEQ ID NO: 2683825 - RNA, 19 nt, Artificial Sequence
  Description of Artificial Sequence: Synthetic oligonucleotide
caggcagucuucgcucuca

SEQ ID NO: 2683826 - RNA, 19 nt, Artificial Sequence
  Description of Artificial Sequence: Synthetic oligonucleotide
gaguuaccgucuccuccua

SEQ ID NO: 2683827 - RNA, 19 nt, Artificial Sequence
  Description of Artificial Sequence: Synthetic oligonucleotide
gggugguccgccucugcuc

SEQ ID NO: 2683828 - RNA, 19 nt, Artificial Sequence
  Description of Artificial Sequence: Synthetic oligonucleotide
ggauucuaguuguuuucau

SEQ ID NO: 2683829 - RNA, 19 nt, Artificial Sequence
  Description of Artificial Sequence: Synthetic oligonucleotide
gccgcaggaagagauguaa

SEQ ID NO: 2683830 - RNA, 19 nt, Artificial Sequence
  Description of Artificial Sequence: Synthetic oligonucleotide
gcccgggucggcauagaag

SEQ ID NO: 2683831 - RNA, 19 nt, Artificial Sequence
  Description of Artificial Sequence: Synthetic oligonucleotide
cacuugcuuggauucuagu

SEQ ID NO: 2683832 - RNA, 19 nt, Artificial Sequence
  Description of Artificial Sequence: Synthetic oligonucleotide
ggagacuuuucuuggcauu

SEQ ID NO: 2683833 - RNA, 19 nt, Artificial Sequence
  Description of Artificial Sequence: Synthetic oligonucleotide
ucgcucucuucggcggcga

SEQ ID NO: 2683834 - RNA, 19 nt, Artificial Sequence
  Description of Artificial Sequence: Synthetic oligonucleotide
gggucggcauagaagucca

SEQ ID NO: 2683835 - RNA, 19 nt, Artificial Sequence
  Description of Artificial Sequence: Synthetic oligonucleotide
cggcgaugagcucgaaggg

SEQ ID NO: 2683836 - RNA, 19 nt, Artificial Sequence
  Description of Artificial Sequence: Synthetic oligonucleotide
auacgcccgggucggcaua

SEQ ID NO: 2683837 - RNA, 19 nt, Artificial Sequence
  Description of Artificial Sequence: Synthetic oligonucleotide
ugguccgccucugcuccuc

SEQ ID NO: 2683838 - RNA, 19 nt, Artificial Sequence
  Description of Artificial Sequence: Synthetic oligonucleotide
gcucucuucggcggcgaug

SEQ ID NO: 2683839 - RNA, 19 nt, Artificial Sequence
  Description of Artificial Sequence: Synthetic oligonucleotide
gcagagaucugaaggacuu

SEQ ID NO: 2683840 - RNA, 19 nt, Artificial Sequence
  Description of Artificial Sequence: Synthetic oligonucleotide
cgaagggcgugcuggaaca

SEQ ID NO: 2683841 - RNA, 19 nt, Artificial Sequence
  Description of Artificial Sequence: Synthetic oligonucleotide
cuucauggagugucuucuu

SEQ ID NO: 2683842 - RNA, 19 nt, Artificial Sequence
  Description of Artificial Sequence: Synthetic oligonucleotide
cgggacacaacacguagaa

SEQ ID NO: 2683843 - RNA, 19 nt, Artificial Sequence
  Description of Artificial Sequence: Synthetic oligonucleotide
cgugaaaacugucgccgca

SEQ ID NO: 2683844 - RNA, 19 nt, Artificial Sequence
  Description of Artificial Sequence: Synthetic oligonucleotide
gguccgccucugcuccucc

SEQ ID NO: 2683845 - RNA, 19 nt, Artificial Sequence
  Description of Artificial Sequence: Synthetic oligonucleotide
ccuccuaaagagggugguc

SEQ ID NO: 2683846 - RNA, 19 nt, Artificial Sequence
  Description of Artificial Sequence: Synthetic oligonucleotide
cuucggcggcgaugagcuc

SEQ ID NO: 2683847 - RNA, 19 nt, Artificial Sequence
  Description of Artificial Sequence: Synthetic oligonucleotide
ggauacgcccgggucggca

SEQ ID NO: 2683848 - RNA, 19 nt, Artificial Sequence
  Description of Artificial Sequence: Synthetic oligonucleotide
ggcgugcuggaacaccacu

SEQ ID NO: 2683849 - RNA, 19 nt, Artificial Sequence
  Description of Artificial Sequence: Synthetic oligonucleotide
ccauccugcgcucgcucuc

SEQ ID NO: 2683850 - RNA, 19 nt, Artificial Sequence
  Description of Artificial Sequence: Synthetic oligonucleotide
caaccguugucgggacaca

SEQ ID NO: 2683851 - RNA, 19 nt, Artificial Sequence
  Description of Artificial Sequence: Synthetic oligonucleotide
cgggagacuuuucuuggca

SEQ ID NO: 2683852 - RNA, 19 nt, Artificial Sequence
  Description of Artificial Sequence: Synthetic oligonucleotide
cgaguuaccgucuccuccu

SEQ ID NO: 2683853 - RNA, 19 nt, Artificial Sequence
  Description of Artificial Sequence: Synthetic oligonucleotide
cucgaagggcgugcuggaa

SEQ ID NO: 2683854 - RNA, 19 nt, Artificial Sequence
  Description of Artificial Sequence: Synthetic oligonucleotide
gccuaacuaagggacacuu

SEQ ID NO: 2683855 - RNA, 19 nt, Artificial Sequence
  Description of Artificial Sequence: Synthetic oligonucleotide
cacugcaaguagguucccu

SEQ ID NO: 2683856 - RNA, 19 nt, Artificial Sequence
  Description of Artificial Sequence: Synthetic oligonucleotide
caguggcuucaaagccuaa

SEQ ID NO: 2683857 - RNA, 19 nt, Artificial Sequence
  Description of Artificial Sequence: Synthetic oligonucleotide
ccugugcuagcugcaagaa

SEQ ID NO: 2683858 - RNA, 19 nt, Artificial Sequence
  Description of Artificial Sequence: Synthetic oligonucleotide
cgccgcaaccguugucggg

SEQ ID NO: 2683859 - RNA, 19 nt, Artificial Sequence
  Description of Artificial Sequence: Synthetic oligonucleotide
cauccugcgcucgcucucu

SEQ ID NO: 2683860 - RNA, 19 nt, Artificial Sequence
  Description of Artificial Sequence: Synthetic oligonucleotide
ccgggucggcauagaaguc

SEQ ID NO: 2683861 - RNA, 19 nt, Artificial Sequence
  Description of Artificial Sequence: Synthetic oligonucleotide
gggagccccagcagagauc

SEQ ID NO: 2683862 - RNA, 19 nt, Artificial Sequence
  Description of Artificial Sequence: Synthetic oligonucleotide
ggcagucuucgcucucacu

SEQ ID NO: 2683863 - RNA, 19 nt, Artificial Sequence
  Description of Artificial Sequence: Synthetic oligonucleotide
gagccccagcagagaucug

SEQ ID NO: 2683864 - RNA, 19 nt, Artificial Sequence
  Description of Artificial Sequence: Synthetic oligonucleotide
ccacuucuccgcgacaucu

SEQ ID NO: 2683865 - RNA, 19 nt, Artificial Sequence
  Description of Artificial Sequence: Synthetic oligonucleotide
cgcucucacuccacacgug

SEQ ID NO: 2683866 - RNA, 19 nt, Artificial Sequence
  Description of Artificial Sequence: Synthetic oligonucleotide
ccgcaaccguugucgggac

SEQ ID NO: 2683867 - RNA, 19 nt, Artificial Sequence
  Description of Artificial Sequence: Synthetic oligonucleotide
cugucgccgcaaccguugu

SEQ ID NO: 2683868 - RNA, 19 nt, Artificial Sequence
  Description of Artificial Sequence: Synthetic oligonucleotide
gcgacaucugccagcugcu

SEQ ID NO: 2683869 - RNA, 19 nt, Artificial Sequence
  Description of Artificial Sequence: Synthetic oligonucleotide
gccccagcagagaucugaa

SEQ ID NO: 2683870 - RNA, 19 nt, Artificial Sequence
  Description of Artificial Sequence: Synthetic oligonucleotide
gugguccgccucugcuccu

SEQ ID NO: 2683871 - RNA, 19 nt, Artificial Sequence
  Description of Artificial Sequence: Synthetic oligonucleotide
cggcauagaaguccauccu

SEQ ID NO: 2683872 - RNA, 19 nt, Artificial Sequence
  Description of Artificial Sequence: Synthetic oligonucleotide
gcgugcuggaacaccacuu

SEQ ID NO: 2683873 - RNA, 19 nt, Artificial Sequence
  Description of Artificial Sequence: Synthetic oligonucleotide
acgcccgggucggcauaga

SEQ ID NO: 2683874 - RNA, 19 nt, Artificial Sequence
  Description of Artificial Sequence: Synthetic oligonucleotide
ccgcaggaagagauguaau

SEQ ID NO: 2683875 - RNA, 19 nt, Artificial Sequence
  Description of Artificial Sequence: Synthetic oligonucleotide
cgaugagcucgaagggcgu

SEQ ID NO: 2683876 - RNA, 19 nt, Artificial Sequence
  Description of Artificial Sequence: Synthetic oligonucleotide
cgcaaccguugucgggaca

SEQ ID NO: 2683877 - RNA, 19 nt, Artificial Sequence
  Description of Artificial Sequence: Synthetic oligonucleotide
ggucggcauagaaguccau

SEQ ID NO: 2683878 - RNA, 19 nt, Artificial Sequence
  Description of Artificial Sequence: Synthetic oligonucleotide
ccgcgacaucugccagcug

SEQ ID NO: 2683879 - RNA, 19 nt, Artificial Sequence
  Description of Artificial Sequence: Synthetic oligonucleotide
cgcccgggucggcauagaa

SEQ ID NO: 2683880 - RNA, 19 nt, Artificial Sequence
  Description of Artificial Sequence: Synthetic oligonucleotide
cgcucucuucggcggcgau

SEQ ID NO: 2683881 - RNA, 19 nt, Artificial Sequence
  Description of Artificial Sequence: Synthetic oligonucleotide
cggcggcgaugagcucgaa

SEQ ID NO: 2683882 - RNA, 19 nt, Artificial Sequence
  Description of Artificial Sequence: Synthetic oligonucleotide
aacagcauuccgcagaccc

SEQ ID NO: 2683883 - RNA, 19 nt, Artificial Sequence
  Description of Artificial Sequence: Synthetic oligonucleotide
  modified_base (5)..(5): a, c, u, g, unknown or other
uuuunuuccaccuugacau

SEQ ID NO: 2683884 - RNA, 19 nt, Artificial Sequence
  Description of Artificial Sequence: Synthetic oligonucleotide
aauuucugcuucgagagcc

SEQ ID NO: 2683885 - RNA, 19 nt, Artificial Sequence
  Description of Artificial Sequence: Synthetic oligonucleotide
ugugucaccagcaaguuca

SEQ ID NO: 2683886 - RNA, 19 nt, Artificial Sequence
  Description of Artificial Sequence: Synthetic oligonucleotide
aagagauguacucugucuc

SEQ ID NO: 2683887 - RNA, 19 nt, Artificial Sequence
  Description of Artificial Sequence: Synthetic oligonucleotide
aaguuuaugcuuuagguuu

SEQ ID NO: 2683888 - RNA, 19 nt, Artificial Sequence
  Description of Artificial Sequence: Synthetic oligonucleotide
aaguucaagagauguacuc

SEQ ID NO: 2683889 - RNA, 19 nt, Artificial Sequence
  Description of Artificial Sequence: Synthetic oligonucleotide
cagaaaaugaucugggagg

SEQ ID NO: 2683890 - RNA, 19 nt, Artificial Sequence
  Description of Artificial Sequence: Synthetic oligonucleotide
uucaaguuuaugcuuuagg

SEQ ID NO: 2683891 - RNA, 19 nt, Artificial Sequence
  Description of Artificial Sequence: Synthetic oligonucleotide
ucaaguuuaugcuuuaggu

SEQ ID NO: 2683892 - RNA, 19 nt, Artificial Sequence
  Description of Artificial Sequence: Synthetic oligonucleotide
uuagguuuugaauuucugc

SEQ ID NO: 2683893 - RNA, 19 nt, Artificial Sequence
  Description of Artificial Sequence: Synthetic oligonucleotide
agcaacuccaucucucucc

SEQ ID NO: 2683894 - RNA, 19 nt, Artificial Sequence
  Description of Artificial Sequence: Synthetic oligonucleotide
caggacuucaaguuuaugc

SEQ ID NO: 2683895 - RNA, 19 nt, Artificial Sequence
  Description of Artificial Sequence: Synthetic oligonucleotide
uagguuuugaauuucugcu

SEQ ID NO: 2683896 - RNA, 19 nt, Artificial Sequence
  Description of Artificial Sequence: Synthetic oligonucleotide
ucaugcuggacagugaccg

SEQ ID NO: 2683897 - RNA, 19 nt, Artificial Sequence
  Description of Artificial Sequence: Synthetic oligonucleotide
agagauguacucugucucc

SEQ ID NO: 2683898 - RNA, 19 nt, Artificial Sequence
  Description of Artificial Sequence: Synthetic oligonucleotide
uugaauuucugcuucgaga

SEQ ID NO: 2683899 - RNA, 19 nt, Artificial Sequence
  Description of Artificial Sequence: Synthetic oligonucleotide
uaugcuuuagguuuugaau

SEQ ID NO: 2683900 - RNA, 19 nt, Artificial Sequence
  Description of Artificial Sequence: Synthetic oligonucleotide
aaaucuuuccucguuucuc

SEQ ID NO: 2683901 - RNA, 19 nt, Artificial Sequence
  Description of Artificial Sequence: Synthetic oligonucleotide
uucacuggcucucugacac

SEQ ID NO: 2683902 - RNA, 19 nt, Artificial Sequence
  Description of Artificial Sequence: Synthetic oligonucleotide
cucucugacaccuugucgc

SEQ ID NO: 2683903 - RNA, 19 nt, Artificial Sequence
  Description of Artificial Sequence: Synthetic oligonucleotide
aaucuuuccucguuucucu

SEQ ID NO: 2683904 - RNA, 19 nt, Artificial Sequence
  Description of Artificial Sequence: Synthetic oligonucleotide
ugcuucgagagccagaaaa

SEQ ID NO: 2683905 - RNA, 19 nt, Artificial Sequence
  Description of Artificial Sequence: Synthetic oligonucleotide
uuuagguuuugaauuucug

SEQ ID NO: 2683906 - RNA, 19 nt, Artificial Sequence
  Description of Artificial Sequence: Synthetic oligonucleotide
aggacuucaaguuuaugcu

SEQ ID NO: 2683907 - RNA, 19 nt, Artificial Sequence
  Description of Artificial Sequence: Synthetic oligonucleotide
gugagcagaagggagaugg

SEQ ID NO: 2683908 - RNA, 19 nt, Artificial Sequence
  Description of Artificial Sequence: Synthetic oligonucleotide
gagauggccacucagcaac

SEQ ID NO: 2683909 - RNA, 19 nt, Artificial Sequence
  Description of Artificial Sequence: Synthetic oligonucleotide
uugacaugcuuccucagcu

SEQ ID NO: 2683910 - RNA, 19 nt, Artificial Sequence
  Description of Artificial Sequence: Synthetic oligonucleotide
ugcaaugcaugccuggucu

SEQ ID NO: 2683911 - RNA, 19 nt, Artificial Sequence
  Description of Artificial Sequence: Synthetic oligonucleotide
ugcaacagcauuccgcaga

SEQ ID NO: 2683912 - RNA, 19 nt, Artificial Sequence
  Description of Artificial Sequence: Synthetic oligonucleotide
uccaccuugacaugcuucc

SEQ ID NO: 2683913 - RNA, 19 nt, Artificial Sequence
  Description of Artificial Sequence: Synthetic oligonucleotide
uuucugagugcuaaugcaa

SEQ ID NO: 2683914 - RNA, 19 nt, Artificial Sequence
  Description of Artificial Sequence: Synthetic oligonucleotide
guuuugaauuucugcuucg

SEQ ID NO: 2683915 - RNA, 19 nt, Artificial Sequence
  Description of Artificial Sequence: Synthetic oligonucleotide
guucaagagauguacucug

SEQ ID NO: 2683916 - RNA, 19 nt, Artificial Sequence
  Description of Artificial Sequence: Synthetic oligonucleotide
augcuuuagguuuugaauu

SEQ ID NO: 2683917 - RNA, 19 nt, Artificial Sequence
  Description of Artificial Sequence: Synthetic oligonucleotide
aggguuugcauccgggcac

SEQ ID NO: 2683918 - RNA, 19 nt, Artificial Sequence
  Description of Artificial Sequence: Synthetic oligonucleotide
aagggagauggccacucag

SEQ ID NO: 2683919 - RNA, 19 nt, Artificial Sequence
  Description of Artificial Sequence: Synthetic oligonucleotide
  modified_base (3)..(3): a, c, u, g, unknown or other
uunuuccaccuugacaugc

SEQ ID NO: 2683920 - RNA, 19 nt, Artificial Sequence
  Description of Artificial Sequence: Synthetic oligonucleotide
agugcuaaugcaaugcaug

SEQ ID NO: 2683921 - RNA, 19 nt, Artificial Sequence
  Description of Artificial Sequence: Synthetic oligonucleotide
ugagugcuaaugcaaugca

SEQ ID NO: 2683922 - RNA, 19 nt, Artificial Sequence
  Description of Artificial Sequence: Synthetic oligonucleotide
uuaugcuuuagguuuugaa

SEQ ID NO: 2683923 - RNA, 19 nt, Artificial Sequence
  Description of Artificial Sequence: Synthetic oligonucleotide
agugaccggcuccaggggc

SEQ ID NO: 2683924 - RNA, 19 nt, Artificial Sequence
  Description of Artificial Sequence: Synthetic oligonucleotide
gauggggaaaucuuuccuc

SEQ ID NO: 2683925 - RNA, 19 nt, Artificial Sequence
  Description of Artificial Sequence: Synthetic oligonucleotide
agcuccacaaccuccaggu

SEQ ID NO: 2683926 - RNA, 19 nt, Artificial Sequence
  Description of Artificial Sequence: Synthetic oligonucleotide
gauguacucugucuccgag

SEQ ID NO: 2683927 - RNA, 19 nt, Artificial Sequence
  Description of Artificial Sequence: Synthetic oligonucleotide
uguacucugucuccgaguu

SEQ ID NO: 2683928 - RNA, 19 nt, Artificial Sequence
  Description of Artificial Sequence: Synthetic oligonucleotide
ucugacaccuugucgcugc

SEQ ID NO: 2683929 - RNA, 19 nt, Artificial Sequence
  Description of Artificial Sequence: Synthetic oligonucleotide
aucugugcaacagcauucc

SEQ ID NO: 2683930 - RNA, 19 nt, Artificial Sequence
  Description of Artificial Sequence: Synthetic oligonucleotide
cuccacaaccuccaggugc

SEQ ID NO: 2683931 - RNA, 19 nt, Artificial Sequence
  Description of Artificial Sequence: Synthetic oligonucleotide
uccacaaccuccaggugca

SEQ ID NO: 2683932 - RNA, 19 nt, Artificial Sequence
  Description of Artificial Sequence: Synthetic oligonucleotide
ucugagugcuaaugcaaug

SEQ ID NO: 2683933 - RNA, 19 nt, Artificial Sequence
  Description of Artificial Sequence: Synthetic oligonucleotide
ucugucuccgaguuuucug

SEQ ID NO: 2683934 - RNA, 19 nt, Artificial Sequence
  Description of Artificial Sequence: Synthetic oligonucleotide
ucugucacagcugccagug

SEQ ID NO: 2683935 - RNA, 19 nt, Artificial Sequence
  Description of Artificial Sequence: Synthetic oligonucleotide
  modified_base (4)..(4): a, c, u, g, unknown or other
uuunuuccaccuugacaug

SEQ ID NO: 2683936 - RNA, 19 nt, Artificial Sequence
  Description of Artificial Sequence: Synthetic oligonucleotide
ucugucacgcugcugugga

SEQ ID NO: 2683937 - RNA, 19 nt, Artificial Sequence
  Description of Artificial Sequence: Synthetic oligonucleotide
cuugacaugcuuccucagc

SEQ ID NO: 2683938 - RNA, 19 nt, Artificial Sequence
  Description of Artificial Sequence: Synthetic oligonucleotide
aaugcaaugcaugccuggu

SEQ ID NO: 2683939 - RNA, 19 nt, Artificial Sequence
  Description of Artificial Sequence: Synthetic oligonucleotide
gagauguacucugucuccg

SEQ ID NO: 2683940 - RNA, 19 nt, Artificial Sequence
  Description of Artificial Sequence: Synthetic oligonucleotide
ugucacgcugcuguggagg

SEQ ID NO: 2683941 - RNA, 19 nt, Artificial Sequence
  Description of Artificial Sequence: Synthetic oligonucleotide
uggaucucacucgaugggg

SEQ ID NO: 2683942 - RNA, 19 nt, Artificial Sequence
  Description of Artificial Sequence: Synthetic oligonucleotide
cugagugcuaaugcaaugc

SEQ ID NO: 2683943 - RNA, 19 nt, Artificial Sequence
  Description of Artificial Sequence: Synthetic oligonucleotide
guucuguuccuguagccgc

SEQ ID NO: 2683944 - RNA, 19 nt, Artificial Sequence
  Description of Artificial Sequence: Synthetic oligonucleotide
caccugguccacuucaccg

SEQ ID NO: 2683945 - RNA, 19 nt, Artificial Sequence
  Description of Artificial Sequence: Synthetic oligonucleotide
uucaagagauguacucugu

SEQ ID NO: 2683946 - RNA, 19 nt, Artificial Sequence
  Description of Artificial Sequence: Synthetic oligonucleotide
agagccagaaaaugaucug

SEQ ID NO: 2683947 - RNA, 19 nt, Artificial Sequence
  Description of Artificial Sequence: Synthetic oligonucleotide
ucgauggggaaaucuuucc

SEQ ID NO: 2683948 - RNA, 19 nt, Artificial Sequence
  Description of Artificial Sequence: Synthetic oligonucleotide
ucugugcaacagcauuccg

SEQ ID NO: 2683949 - RNA, 19 nt, Artificial Sequence
  Description of Artificial Sequence: Synthetic oligonucleotide
acaaccuccaggugcaccu

SEQ ID NO: 2683950 - RNA, 19 nt, Artificial Sequence
  Description of Artificial Sequence: Synthetic oligonucleotide
aaugcaugccuggucuguc

SEQ ID NO: 2683951 - RNA, 19 nt, Artificial Sequence
  Description of Artificial Sequence: Synthetic oligonucleotide
uccucaucugugcaacagc

SEQ ID NO: 2683952 - RNA, 19 nt, Artificial Sequence
  Description of Artificial Sequence: Synthetic oligonucleotide
ucguuucucugucacgcug

SEQ ID NO: 2683953 - RNA, 19 nt, Artificial Sequence
  Description of Artificial Sequence: Synthetic oligonucleotide
ccagaaaaugaucugggag

SEQ ID NO: 2683954 - RNA, 19 nt, Artificial Sequence
  Description of Artificial Sequence: Synthetic oligonucleotide
uucugagugcuaaugcaau

SEQ ID NO: 2683955 - RNA, 19 nt, Artificial Sequence
  Description of Artificial Sequence: Synthetic oligonucleotide
cugccagugggcaaggaug

SEQ ID NO: 2683956 - RNA, 19 nt, Artificial Sequence
  Description of Artificial Sequence: Synthetic oligonucleotide
gcuggaucucacucgaugg

SEQ ID NO: 2683957 - RNA, 19 nt, Artificial Sequence
  Description of Artificial Sequence: Synthetic oligonucleotide
  modified_base (2)..(2): a, c, u, g, unknown or other
unuuccaccuugacaugcu

SEQ ID NO: 2683958 - RNA, 19 nt, Artificial Sequence
  Description of Artificial Sequence: Synthetic oligonucleotide
caucugugcaacagcauuc

SEQ ID NO: 2683959 - RNA, 19 nt, Artificial Sequence
  Description of Artificial Sequence: Synthetic oligonucleotide
ucagcaacuccaucucucu

SEQ ID NO: 2683960 - RNA, 19 nt, Artificial Sequence
  Description of Artificial Sequence: Synthetic oligonucleotide
gcaaggaugucuucacugg

SEQ ID NO: 2683961 - RNA, 19 nt, Artificial Sequence
  Description of Artificial Sequence: Synthetic oligonucleotide
uuuugagcugugucaccag

SEQ ID NO: 2683962 - RNA, 19 nt, Artificial Sequence
  Description of Artificial Sequence: Synthetic oligonucleotide
gacagugaccggcuccagg

SEQ ID NO: 2683963 - RNA, 19 nt, Artificial Sequence
  Description of Artificial Sequence: Synthetic oligonucleotide
cuggaucucacucgauggg

SEQ ID NO: 2683964 - RNA, 19 nt, Artificial Sequence
  Description of Artificial Sequence: Synthetic oligonucleotide
ucucucuccucaucugugc

SEQ ID NO: 2683965 - RNA, 19 nt, Artificial Sequence
  Description of Artificial Sequence: Synthetic oligonucleotide
ugcuuuagguuuugaauuu

SEQ ID NO: 2683966 - RNA, 19 nt, Artificial Sequence
  Description of Artificial Sequence: Synthetic oligonucleotide
aggggcuucugccacagcu

SEQ ID NO: 2683967 - RNA, 19 nt, Artificial Sequence
  Description of Artificial Sequence: Synthetic oligonucleotide
uuugcauccgggcacucuu

SEQ ID NO: 2683968 - RNA, 19 nt, Artificial Sequence
  Description of Artificial Sequence: Synthetic oligonucleotide
caaggaugucuucacuggc

SEQ ID NO: 2683969 - RNA, 19 nt, Artificial Sequence
  Description of Artificial Sequence: Synthetic oligonucleotide
ugcuaaugcaaugcaugcc

SEQ ID NO: 2683970 - RNA, 19 nt, Artificial Sequence
  Description of Artificial Sequence: Synthetic oligonucleotide
augcuuccucagcucagcc

SEQ ID NO: 2683971 - RNA, 19 nt, Artificial Sequence
  Description of Artificial Sequence: Synthetic oligonucleotide
cuugucgcugcucuuccag

SEQ ID NO: 2683972 - RNA, 19 nt, Artificial Sequence
  Description of Artificial Sequence: Synthetic oligonucleotide
accagcaaguucaagagau

SEQ ID NO: 2683973 - RNA, 19 nt, Artificial Sequence
  Description of Artificial Sequence: Synthetic oligonucleotide
agccagaaaaugaucuggg

SEQ ID NO: 2683974 - RNA, 19 nt, Artificial Sequence
  Description of Artificial Sequence: Synthetic oligonucleotide
gacaugcuuccucagcuca

SEQ ID NO: 2683975 - RNA, 19 nt, Artificial Sequence
  Description of Artificial Sequence: Synthetic oligonucleotide
uuccucguuucucugucac

SEQ ID NO: 2683976 - RNA, 19 nt, Artificial Sequence
  Description of Artificial Sequence: Synthetic oligonucleotide
uccgaguuuucugagugcu

SEQ ID NO: 2683977 - RNA, 19 nt, Artificial Sequence
  Description of Artificial Sequence: Synthetic oligonucleotide
accuugacaugcuuccuca

SEQ ID NO: 2683978 - RNA, 19 nt, Artificial Sequence
  Description of Artificial Sequence: Synthetic oligonucleotide
cucgauggggaaaucuuuc

SEQ ID NO: 2683979 - RNA, 19 nt, Artificial Sequence
  Description of Artificial Sequence: Synthetic oligonucleotide
gaucugggagggcugggcc

SEQ ID NO: 2683980 - RNA, 19 nt, Artificial Sequence
  Description of Artificial Sequence: Synthetic oligonucleotide
ucuuuccucguuucucugu

SEQ ID NO: 2683981 - RNA, 19 nt, Artificial Sequence
  Description of Artificial Sequence: Synthetic oligonucleotide
ugccagugggcaaggaugu

SEQ ID NO: 2683982 - RNA, 19 nt, Artificial Sequence
  Description of Artificial Sequence: Synthetic oligonucleotide
cucagcaacuccaucucuc

SEQ ID NO: 2683983 - RNA, 19 nt, Artificial Sequence
  Description of Artificial Sequence: Synthetic oligonucleotide
ggcaaggaugucuucacug

SEQ ID NO: 2683984 - RNA, 19 nt, Artificial Sequence
  Description of Artificial Sequence: Synthetic oligonucleotide
ugucuccgaguuuucugag

SEQ ID NO: 2683985 - RNA, 19 nt, Artificial Sequence
  Description of Artificial Sequence: Synthetic oligonucleotide
uccucguuucucugucacg

SEQ ID NO: 2683986 - RNA, 19 nt, Artificial Sequence
  Description of Artificial Sequence: Synthetic oligonucleotide
gcaaguucaagagauguac

SEQ ID NO: 2683987 - RNA, 19 nt, Artificial Sequence
  Description of Artificial Sequence: Synthetic oligonucleotide
aaaugaucugggagggcug

SEQ ID NO: 2683988 - RNA, 19 nt, Artificial Sequence
  Description of Artificial Sequence: Synthetic oligonucleotide
cuucgagagccagaaaaug

SEQ ID NO: 2683989 - RNA, 19 nt, Artificial Sequence
  Description of Artificial Sequence: Synthetic oligonucleotide
uggucugucacagcugcca

SEQ ID NO: 2683990 - RNA, 19 nt, Artificial Sequence
  Description of Artificial Sequence: Synthetic oligonucleotide
agccgcuggaucucacucg

SEQ ID NO: 2683991 - RNA, 19 nt, Artificial Sequence
  Description of Artificial Sequence: Synthetic oligonucleotide
gaugucuucacuggcucuc

SEQ ID NO: 2683992 - RNA, 19 nt, Artificial Sequence
  Description of Artificial Sequence: Synthetic oligonucleotide
ugugccuccuguccaggga

SEQ ID NO: 2683993 - RNA, 19 nt, Artificial Sequence
  Description of Artificial Sequence: Synthetic oligonucleotide
auuccgcagacccgcguuc

SEQ ID NO: 2683994 - RNA, 19 nt, Artificial Sequence
  Description of Artificial Sequence: Synthetic oligonucleotide
uuccaccuugacaugcuuc

SEQ ID NO: 2683995 - RNA, 19 nt, Artificial Sequence
  Description of Artificial Sequence: Synthetic oligonucleotide
gagcugugucaccagcaag

SEQ ID NO: 2683996 - RNA, 19 nt, Artificial Sequence
  Description of Artificial Sequence: Synthetic oligonucleotide
gagagccagaaaaugaucu

SEQ ID NO: 2683997 - RNA, 19 nt, Artificial Sequence
  Description of Artificial Sequence: Synthetic oligonucleotide
acagcugccagugggcaag

SEQ ID NO: 2683998 - RNA, 19 nt, Artificial Sequence
  Description of Artificial Sequence: Synthetic oligonucleotide
ugguccacuucaccgggga

SEQ ID NO: 2683999 - RNA, 19 nt, Artificial Sequence
  Description of Artificial Sequence: Synthetic oligonucleotide
uuuaugcuuuagguuuuga

SEQ ID NO: 2684000 - RNA, 19 nt, Artificial Sequence
  Description of Artificial Sequence: Synthetic oligonucleotide
uaccugugccuccugucca

SEQ ID NO: 2684001 - RNA, 19 nt, Artificial Sequence
  Description of Artificial Sequence: Synthetic oligonucleotide
ucucugacaccuugucgcu

SEQ ID NO: 2684002 - RNA, 19 nt, Artificial Sequence
  Description of Artificial Sequence: Synthetic oligonucleotide
cagacccgcguucuguucc

SEQ ID NO: 2684003 - RNA, 19 nt, Artificial Sequence
  Description of Artificial Sequence: Synthetic oligonucleotide
gaaaaugaucugggagggc

SEQ ID NO: 2684004 - RNA, 19 nt, Artificial Sequence
  Description of Artificial Sequence: Synthetic oligonucleotide
ugcuguggagguaccugug

SEQ ID NO: 2684005 - RNA, 19 nt, Artificial Sequence
  Description of Artificial Sequence: Synthetic oligonucleotide
auguacucugucuccgagu

SEQ ID NO: 2684006 - RNA, 19 nt, Artificial Sequence
  Description of Artificial Sequence: Synthetic oligonucleotide
auccgggcacucuucuggg

SEQ ID NO: 2684007 - RNA, 19 nt, Artificial Sequence
  Description of Artificial Sequence: Synthetic oligonucleotide
gaaaucuuuccucguuucu

SEQ ID NO: 2684008 - RNA, 19 nt, Artificial Sequence
  Description of Artificial Sequence: Synthetic oligonucleotide
uggacagugaccggcucca

SEQ ID NO: 2684009 - RNA, 19 nt, Artificial Sequence
  Description of Artificial Sequence: Synthetic oligonucleotide
ucgcugcucuuccaggacu

SEQ ID NO: 2684010 - RNA, 19 nt, Artificial Sequence
  Description of Artificial Sequence: Synthetic oligonucleotide
uagccgcuggaucucacuc

SEQ ID NO: 2684011 - RNA, 19 nt, Artificial Sequence
  Description of Artificial Sequence: Synthetic oligonucleotide
aucuuuccucguuucucug

SEQ ID NO: 2684012 - RNA, 19 nt, Artificial Sequence
  Description of Artificial Sequence: Synthetic oligonucleotide
cuccuguccagggaggagc

SEQ ID NO: 2684013 - RNA, 19 nt, Artificial Sequence
  Description of Artificial Sequence: Synthetic oligonucleotide
uccacuucaccggggagcu

SEQ ID NO: 2684014 - RNA, 19 nt, Artificial Sequence
  Description of Artificial Sequence: Synthetic oligonucleotide
ugcauccgggcacucuucu

SEQ ID NO: 2684015 - RNA, 19 nt, Artificial Sequence
  Description of Artificial Sequence: Synthetic oligonucleotide
cugucuccgaguuuucuga

SEQ ID NO: 2684016 - RNA, 19 nt, Artificial Sequence
  Description of Artificial Sequence: Synthetic oligonucleotide
agauguacucugucuccga

SEQ ID NO: 2684017 - RNA, 19 nt, Artificial Sequence
  Description of Artificial Sequence: Synthetic oligonucleotide
gacaccuugucgcugcucu

SEQ ID NO: 2684018 - RNA, 19 nt, Artificial Sequence
  Description of Artificial Sequence: Synthetic oligonucleotide
uuuccucguuucucuguca

SEQ ID NO: 2684019 - RNA, 19 nt, Artificial Sequence
  Description of Artificial Sequence: Synthetic oligonucleotide
ggaaaucuuuccucguuuc

SEQ ID NO: 2684020 - RNA, 19 nt, Artificial Sequence
  Description of Artificial Sequence: Synthetic oligonucleotide
ucucacucgauggggaaau

SEQ ID NO: 2684021 - RNA, 19 nt, Artificial Sequence
  Description of Artificial Sequence: Synthetic oligonucleotide
acagcauuccgcagacccg

SEQ ID NO: 2684022 - RNA, 19 nt, Artificial Sequence
  Description of Artificial Sequence: Synthetic oligonucleotide
ugacaugcuuccucagcuc

SEQ ID NO: 2684023 - RNA, 19 nt, Artificial Sequence
  Description of Artificial Sequence: Synthetic oligonucleotide
caugcuggacagugaccgg

SEQ ID NO: 2684024 - RNA, 19 nt, Artificial Sequence
  Description of Artificial Sequence: Synthetic oligonucleotide
ucucuccucaucugugcaa

SEQ ID NO: 2684025 - RNA, 19 nt, Artificial Sequence
  Description of Artificial Sequence: Synthetic oligonucleotide
acucuucugggugagcaga

SEQ ID NO: 2684026 - RNA, 19 nt, Artificial Sequence
  Description of Artificial Sequence: Synthetic oligonucleotide
ugcuggacagugaccggcu

SEQ ID NO: 2684027 - RNA, 19 nt, Artificial Sequence
  Description of Artificial Sequence: Synthetic oligonucleotide
caagagauguacucugucu

SEQ ID NO: 2684028 - RNA, 19 nt, Artificial Sequence
  Description of Artificial Sequence: Synthetic oligonucleotide
gcuaaugcaaugcaugccu

SEQ ID NO: 2684029 - RNA, 19 nt, Artificial Sequence
  Description of Artificial Sequence: Synthetic oligonucleotide
uggggaaaucuuuccucgu

SEQ ID NO: 2684030 - RNA, 19 nt, Artificial Sequence
  Description of Artificial Sequence: Synthetic oligonucleotide
cagcauuccgcagacccgc

SEQ ID NO: 2684031 - RNA, 19 nt, Artificial Sequence
  Description of Artificial Sequence: Synthetic oligonucleotide
cacucagcaacuccaucuc

SEQ ID NO: 2684032 - RNA, 19 nt, Artificial Sequence
  Description of Artificial Sequence: Synthetic oligonucleotide
gcucucugacaccuugucg

SEQ ID NO: 2684033 - RNA, 19 nt, Artificial Sequence
  Description of Artificial Sequence: Synthetic oligonucleotide
cuccgaguuuucugagugc

SEQ ID NO: 2684034 - RNA, 19 nt, Artificial Sequence
  Description of Artificial Sequence: Synthetic oligonucleotide
caugcuuccucagcucagc

SEQ ID NO: 2684035 - RNA, 19 nt, Artificial Sequence
  Description of Artificial Sequence: Synthetic oligonucleotide
uucugccacagcuucuuuu

SEQ ID NO: 2684036 - RNA, 19 nt, Artificial Sequence
  Description of Artificial Sequence: Synthetic oligonucleotide
cuuuagguuuugaauuucu

SEQ ID NO: 2684037 - RNA, 19 nt, Artificial Sequence
  Description of Artificial Sequence: Synthetic oligonucleotide
ugcaccugguccacuucac

SEQ ID NO: 2684038 - RNA, 19 nt, Artificial Sequence
  Description of Artificial Sequence: Synthetic oligonucleotide
gggagcucaugcuggacag

SEQ ID NO: 2684039 - RNA, 19 nt, Artificial Sequence
  Description of Artificial Sequence: Synthetic oligonucleotide
caaguuuaugcuuuagguu

SEQ ID NO: 2684040 - RNA, 19 nt, Artificial Sequence
  Description of Artificial Sequence: Synthetic oligonucleotide
cacgcugcuguggagguac

SEQ ID NO: 2684041 - RNA, 19 nt, Artificial Sequence
  Description of Artificial Sequence: Synthetic oligonucleotide
cucuccucaucugugcaac

SEQ ID NO: 2684042 - RNA, 19 nt, Artificial Sequence
  Description of Artificial Sequence: Synthetic oligonucleotide
caccuugacaugcuuccuc

SEQ ID NO: 2684043 - RNA, 19 nt, Artificial Sequence
  Description of Artificial Sequence: Synthetic oligonucleotide
ucucugucacgcugcugug

SEQ ID NO: 2684044 - RNA, 19 nt, Artificial Sequence
  Description of Artificial Sequence: Synthetic oligonucleotide
uggagguaccugugccucc

SEQ ID NO: 2684045 - RNA, 19 nt, Artificial Sequence
  Description of Artificial Sequence: Synthetic oligonucleotide
guuuaugcuuuagguuuug

SEQ ID NO: 2684046 - RNA, 19 nt, Artificial Sequence
  Description of Artificial Sequence: Synthetic oligonucleotide
ucaccggggagcucaugcu

SEQ ID NO: 2684047 - RNA, 19 nt, Artificial Sequence
  Description of Artificial Sequence: Synthetic oligonucleotide
ccuggucugucacagcugc

SEQ ID NO: 2684048 - RNA, 19 nt, Artificial Sequence
  Description of Artificial Sequence: Synthetic oligonucleotide
gaucucacucgauggggaa

SEQ ID NO: 2684049 - RNA, 19 nt, Artificial Sequence
  Description of Artificial Sequence: Synthetic oligonucleotide
augccuggucugucacagc

SEQ ID NO: 2684050 - RNA, 19 nt, Artificial Sequence
  Description of Artificial Sequence: Synthetic oligonucleotide
gcucaugcuggacagugac

SEQ ID NO: 2684051 - RNA, 19 nt, Artificial Sequence
  Description of Artificial Sequence: Synthetic oligonucleotide
aucugggagggcugggccu

SEQ ID NO: 2684052 - RNA, 19 nt, Artificial Sequence
  Description of Artificial Sequence: Synthetic oligonucleotide
ccucguuucucugucacgc

SEQ ID NO: 2684053 - RNA, 19 nt, Artificial Sequence
  Description of Artificial Sequence: Synthetic oligonucleotide
accggggagcucaugcugg

SEQ ID NO: 2684054 - RNA, 19 nt, Artificial Sequence
  Description of Artificial Sequence: Synthetic oligonucleotide
ugggccuccggcagccuug

SEQ ID NO: 2684055 - RNA, 19 nt, Artificial Sequence
  Description of Artificial Sequence: Synthetic oligonucleotide
ucuccucaucugugcaaca

SEQ ID NO: 2684056 - RNA, 19 nt, Artificial Sequence
  Description of Artificial Sequence: Synthetic oligonucleotide
cugugccuccuguccaggg

SEQ ID NO: 2684057 - RNA, 19 nt, Artificial Sequence
  Description of Artificial Sequence: Synthetic oligonucleotide
cucugucacgcugcugugg

SEQ ID NO: 2684058 - RNA, 19 nt, Artificial Sequence
  Description of Artificial Sequence: Synthetic oligonucleotide
augcaugccuggucuguca

SEQ ID NO: 2684059 - RNA, 19 nt, Artificial Sequence
  Description of Artificial Sequence: Synthetic oligonucleotide
uggcucucugacaccuugu

SEQ ID NO: 2684060 - RNA, 19 nt, Artificial Sequence
  Description of Artificial Sequence: Synthetic oligonucleotide
uguagccgcuggaucucac

SEQ ID NO: 2684061 - RNA, 19 nt, Artificial Sequence
  Description of Artificial Sequence: Synthetic oligonucleotide
caggguuugcauccgggca

SEQ ID NO: 2684062 - RNA, 19 nt, Artificial Sequence
  Description of Artificial Sequence: Synthetic oligonucleotide
gcaacagcauuccgcagac

SEQ ID NO: 2684063 - RNA, 19 nt, Artificial Sequence
  Description of Artificial Sequence: Synthetic oligonucleotide
ugucaccagcaaguucaag

SEQ ID NO: 2684064 - RNA, 19 nt, Artificial Sequence
  Description of Artificial Sequence: Synthetic oligonucleotide
gaagggagauggccacuca

SEQ ID NO: 2684065 - RNA, 19 nt, Artificial Sequence
  Description of Artificial Sequence: Synthetic oligonucleotide
uguccagggaggagcccgu

SEQ ID NO: 2684066 - RNA, 19 nt, Artificial Sequence
  Description of Artificial Sequence: Synthetic oligonucleotide
caaguucaagagauguacu

SEQ ID NO: 2684067 - RNA, 19 nt, Artificial Sequence
  Description of Artificial Sequence: Synthetic oligonucleotide
uggcaccaggguuugcauc

SEQ ID NO: 2684068 - RNA, 19 nt, Artificial Sequence
  Description of Artificial Sequence: Synthetic oligonucleotide
gacuucaaguuuaugcuuu

SEQ ID NO: 2684069 - RNA, 19 nt, Artificial Sequence
  Description of Artificial Sequence: Synthetic oligonucleotide
cagugaccggcuccagggg

SEQ ID NO: 2684070 - RNA, 19 nt, Artificial Sequence
  Description of Artificial Sequence: Synthetic oligonucleotide
acaugcuuccucagcucag

SEQ ID NO: 2684071 - RNA, 19 nt, Artificial Sequence
  Description of Artificial Sequence: Synthetic oligonucleotide
gcuguggagguaccugugc

SEQ ID NO: 2684072 - RNA, 19 nt, Artificial Sequence
  Description of Artificial Sequence: Synthetic oligonucleotide
uugcauccgggcacucuuc

SEQ ID NO: 2684073 - RNA, 19 nt, Artificial Sequence
  Description of Artificial Sequence: Synthetic oligonucleotide
cacuucaccggggagcuca

SEQ ID NO: 2684074 - RNA, 19 nt, Artificial Sequence
  Description of Artificial Sequence: Synthetic oligonucleotide
caccggggagcucaugcug

SEQ ID NO: 2684075 - RNA, 19 nt, Artificial Sequence
  Description of Artificial Sequence: Synthetic oligonucleotide
gugcaccugguccacuuca

SEQ ID NO: 2684076 - RNA, 19 nt, Artificial Sequence
  Description of Artificial Sequence: Synthetic oligonucleotide
gugcaacagcauuccgcag

SEQ ID NO: 2684077 - RNA, 19 nt, Artificial Sequence
  Description of Artificial Sequence: Synthetic oligonucleotide
agcccgugccuccgcagag

SEQ ID NO: 2684078 - RNA, 19 nt, Artificial Sequence
  Description of Artificial Sequence: Synthetic oligonucleotide
agcaaguucaagagaugua

SEQ ID NO: 2684079 - RNA, 19 nt, Artificial Sequence
  Description of Artificial Sequence: Synthetic oligonucleotide
guggagguaccugugccuc

SEQ ID NO: 2684080 - RNA, 19 nt, Artificial Sequence
  Description of Artificial Sequence: Synthetic oligonucleotide
gucgcugcucuuccaggac

SEQ ID NO: 2684081 - RNA, 19 nt, Artificial Sequence
  Description of Artificial Sequence: Synthetic oligonucleotide
acucgauggggaaaucuuu

SEQ ID NO: 2684082 - RNA, 19 nt, Artificial Sequence
  Description of Artificial Sequence: Synthetic oligonucleotide
cucuuccaggacuucaagu

SEQ ID NO: 2684083 - RNA, 19 nt, Artificial Sequence
  Description of Artificial Sequence: Synthetic oligonucleotide
ccagggaggagcccgugcc

SEQ ID NO: 2684084 - RNA, 19 nt, Artificial Sequence
  Description of Artificial Sequence: Synthetic oligonucleotide
gccagaaaaugaucuggga

SEQ ID NO: 2684085 - RNA, 19 nt, Artificial Sequence
  Description of Artificial Sequence: Synthetic oligonucleotide
uccggcagccuuggcacca

SEQ ID NO: 2684086 - RNA, 19 nt, Artificial Sequence
  Description of Artificial Sequence: Synthetic oligonucleotide
cguucuguuccuguagccg

SEQ ID NO: 2684087 - RNA, 19 nt, Artificial Sequence
  Description of Artificial Sequence: Synthetic oligonucleotide
ggggagcucaugcuggaca

SEQ ID NO: 2684088 - RNA, 19 nt, Artificial Sequence
  Description of Artificial Sequence: Synthetic oligonucleotide
ccugguccacuucaccggg

SEQ ID NO: 2684089 - RNA, 19 nt, Artificial Sequence
  Description of Artificial Sequence: Synthetic oligonucleotide
agacccgcguucuguuccu

SEQ ID NO: 2684090 - RNA, 19 nt, Artificial Sequence
  Description of Artificial Sequence: Synthetic oligonucleotide
caccuugucgcugcucuuc

SEQ ID NO: 2684091 - RNA, 19 nt, Artificial Sequence
  Description of Artificial Sequence: Synthetic oligonucleotide
uuccgcagacccgcguucu

SEQ ID NO: 2684092 - RNA, 19 nt, Artificial Sequence
  Description of Artificial Sequence: Synthetic oligonucleotide
aggugcaccugguccacuu

SEQ ID NO: 2684093 - RNA, 19 nt, Artificial Sequence
  Description of Artificial Sequence: Synthetic oligonucleotide
aucucacucgauggggaaa

SEQ ID NO: 2684094 - RNA, 19 nt, Artificial Sequence
  Description of Artificial Sequence: Synthetic oligonucleotide
cugucacgcugcuguggag

SEQ ID NO: 2684095 - RNA, 19 nt, Artificial Sequence
  Description of Artificial Sequence: Synthetic oligonucleotide
gcguucuguuccuguagcc

SEQ ID NO: 2684096 - RNA, 19 nt, Artificial Sequence
  Description of Artificial Sequence: Synthetic oligonucleotide
augucuucacuggcucucu

SEQ ID NO: 2684097 - RNA, 19 nt, Artificial Sequence
  Description of Artificial Sequence: Synthetic oligonucleotide
gcaaugcaugccuggucug

SEQ ID NO: 2684098 - RNA, 19 nt, Artificial Sequence
  Description of Artificial Sequence: Synthetic oligonucleotide
uccgggcacucuucugggu

SEQ ID NO: 2684099 - RNA, 19 nt, Artificial Sequence
  Description of Artificial Sequence: Synthetic oligonucleotide
gagcccgugccuccgcaga

SEQ ID NO: 2684100 - RNA, 19 nt, Artificial Sequence
  Description of Artificial Sequence: Synthetic oligonucleotide
ccagcaaguucaagagaug

SEQ ID NO: 2684101 - RNA, 19 nt, Artificial Sequence
  Description of Artificial Sequence: Synthetic oligonucleotide
agcauuccgcagacccgcg

SEQ ID NO: 2684102 - RNA, 19 nt, Artificial Sequence
  Description of Artificial Sequence: Synthetic oligonucleotide
acccgcguucuguuccugu

SEQ ID NO: 2684103 - RNA, 19 nt, Artificial Sequence
  Description of Artificial Sequence: Synthetic oligonucleotide
agccuuggcaccaggguuu

SEQ ID NO: 2684104 - RNA, 19 nt, Artificial Sequence
  Description of Artificial Sequence: Synthetic oligonucleotide
gagguaccugugccuccug

SEQ ID NO: 2684105 - RNA, 19 nt, Artificial Sequence
  Description of Artificial Sequence: Synthetic oligonucleotide
gggcuucugccacagcuuc

SEQ ID NO: 2684106 - RNA, 19 nt, Artificial Sequence
  Description of Artificial Sequence: Synthetic oligonucleotide
gguccacuucaccggggag

SEQ ID NO: 2684107 - RNA, 19 nt, Artificial Sequence
  Description of Artificial Sequence: Synthetic oligonucleotide
ggaucucacucgaugggga

SEQ ID NO: 2684108 - RNA, 19 nt, Artificial Sequence
  Description of Artificial Sequence: Synthetic oligonucleotide
gcaccugguccacuucacc

SEQ ID NO: 2684109 - RNA, 19 nt, Artificial Sequence
  Description of Artificial Sequence: Synthetic oligonucleotide
gaggagcccgugccuccgc

SEQ ID NO: 2684110 - RNA, 19 nt, Artificial Sequence
  Description of Artificial Sequence: Synthetic oligonucleotide
ccuugacaugcuuccucag

SEQ ID NO: 2684111 - RNA, 19 nt, Artificial Sequence
  Description of Artificial Sequence: Synthetic oligonucleotide
ugccuccgcagaguuucca

SEQ ID NO: 2684112 - RNA, 19 nt, Artificial Sequence
  Description of Artificial Sequence: Synthetic oligonucleotide
cuccggcagccuuggcacc

SEQ ID NO: 2684113 - RNA, 19 nt, Artificial Sequence
  Description of Artificial Sequence: Synthetic oligonucleotide
ccacucagcaacuccaucu

SEQ ID NO: 2684114 - RNA, 19 nt, Artificial Sequence
  Description of Artificial Sequence: Synthetic oligonucleotide
cacucgauggggaaaucuu

SEQ ID NO: 2684115 - RNA, 19 nt, Artificial Sequence
  Description of Artificial Sequence: Synthetic oligonucleotide
caacagcauuccgcagacc

SEQ ID NO: 2684116 - RNA, 19 nt, Artificial Sequence
  Description of Artificial Sequence: Synthetic oligonucleotide
ugacaccuugucgcugcuc

SEQ ID NO: 2684117 - RNA, 19 nt, Artificial Sequence
  Description of Artificial Sequence: Synthetic oligonucleotide
cgagagccagaaaaugauc

SEQ ID NO: 2684118 - RNA, 19 nt, Artificial Sequence
  Description of Artificial Sequence: Synthetic oligonucleotide
gucuccgaguuuucugagu

SEQ ID NO: 2684119 - RNA, 19 nt, Artificial Sequence
  Description of Artificial Sequence: Synthetic oligonucleotide
gccgcuggaucucacucga

SEQ ID NO: 2684120 - RNA, 19 nt, Artificial Sequence
  Description of Artificial Sequence: Synthetic oligonucleotide
ccgggcacucuucugggug

SEQ ID NO: 2684121 - RNA, 19 nt, Artificial Sequence
  Description of Artificial Sequence: Synthetic oligonucleotide
gucacgcugcuguggaggu

SEQ ID NO: 2684122 - RNA, 19 nt, Artificial Sequence
  Description of Artificial Sequence: Synthetic oligonucleotide
gggaggagcccgugccucc

SEQ ID NO: 2684123 - RNA, 19 nt, Artificial Sequence
  Description of Artificial Sequence: Synthetic oligonucleotide
acaccuugucgcugcucuu

SEQ ID NO: 2684124 - RNA, 19 nt, Artificial Sequence
  Description of Artificial Sequence: Synthetic oligonucleotide
gccuccggcagccuuggca

SEQ ID NO: 2684125 - RNA, 19 nt, Artificial Sequence
  Description of Artificial Sequence: Synthetic oligonucleotide
cgcuggaucucacucgaug

SEQ ID NO: 2684126 - RNA, 19 nt, Artificial Sequence
  Description of Artificial Sequence: Synthetic oligonucleotide
cgugccuccgcagaguuuc

SEQ ID NO: 2684127 - RNA, 19 nt, Artificial Sequence
  Description of Artificial Sequence: Synthetic oligonucleotide
ggaggagcccgugccuccg

SEQ ID NO: 2684128 - RNA, 19 nt, Artificial Sequence
  Description of Artificial Sequence: Synthetic oligonucleotide
acgcugcuguggagguacc

SEQ ID NO: 2684129 - RNA, 19 nt, Artificial Sequence
  Description of Artificial Sequence: Synthetic oligonucleotide
caaccuccaggugcaccug

SEQ ID NO: 2684130 - RNA, 19 nt, Artificial Sequence
  Description of Artificial Sequence: Synthetic oligonucleotide
ccgcguucuguuccuguag

SEQ ID NO: 2684131 - RNA, 19 nt, Artificial Sequence
  Description of Artificial Sequence: Synthetic oligonucleotide
cucacucgauggggaaauc

SEQ ID NO: 2684132 - RNA, 19 nt, Artificial Sequence
  Description of Artificial Sequence: Synthetic oligonucleotide
ggugcaccugguccacuuc

SEQ ID NO: 2684133 - RNA, 19 nt, Artificial Sequence
  Description of Artificial Sequence: Synthetic oligonucleotide
guuugcauccgggcacucu

SEQ ID NO: 2684134 - RNA, 19 nt, Artificial Sequence
  Description of Artificial Sequence: Synthetic oligonucleotide
caaugcaugccuggucugu

SEQ ID NO: 2684135 - RNA, 19 nt, Artificial Sequence
  Description of Artificial Sequence: Synthetic oligonucleotide
cucguuucucugucacgcu

SEQ ID NO: 2684136 - RNA, 19 nt, Artificial Sequence
  Description of Artificial Sequence: Synthetic oligonucleotide
gcaccaggguuugcauccg

SEQ ID NO: 2684137 - RNA, 19 nt, Artificial Sequence
  Description of Artificial Sequence: Synthetic oligonucleotide
cgaguuuucugagugcuaa

SEQ ID NO: 2684138 - RNA, 19 nt, Artificial Sequence
  Description of Artificial Sequence: Synthetic oligonucleotide
cagugggcaaggaugucuu

SEQ ID NO: 2684139 - RNA, 19 nt, Artificial Sequence
  Description of Artificial Sequence: Synthetic oligonucleotide
ggggaaaucuuuccucguu

SEQ ID NO: 2684140 - RNA, 19 nt, Artificial Sequence
  Description of Artificial Sequence: Synthetic oligonucleotide
gacccgcguucuguuccug

SEQ ID NO: 2684141 - RNA, 19 nt, Artificial Sequence
  Description of Artificial Sequence: Synthetic oligonucleotide
gcaugccuggucugucaca

SEQ ID NO: 2684142 - RNA, 19 nt, Artificial Sequence
  Description of Artificial Sequence: Synthetic oligonucleotide
cauuccgcagacccgcguu

SEQ ID NO: 2684143 - RNA, 19 nt, Artificial Sequence
  Description of Artificial Sequence: Synthetic oligonucleotide
gcuucgagagccagaaaau

SEQ ID NO: 2684144 - RNA, 19 nt, Artificial Sequence
  Description of Artificial Sequence: Synthetic oligonucleotide
gcuggacagugaccggcuc

SEQ ID NO: 2684145 - RNA, 19 nt, Artificial Sequence
  Description of Artificial Sequence: Synthetic oligonucleotide
caggggcuucugccacagc

SEQ ID NO: 2684146 - RNA, 19 nt, Artificial Sequence
  Description of Artificial Sequence: Synthetic oligonucleotide
cuguagccgcuggaucuca

SEQ ID NO: 2684147 - RNA, 19 nt, Artificial Sequence
  Description of Artificial Sequence: Synthetic oligonucleotide
ccaggggcuucugccacag

SEQ ID NO: 2684148 - RNA, 19 nt, Artificial Sequence
  Description of Artificial Sequence: Synthetic oligonucleotide
cucugucuccgaguuuucu

SEQ ID NO: 2684149 - RNA, 19 nt, Artificial Sequence
  Description of Artificial Sequence: Synthetic oligonucleotide
ugaccggcuccaggggcuu

SEQ ID NO: 2684150 - RNA, 19 nt, Artificial Sequence
  Description of Artificial Sequence: Synthetic oligonucleotide
gccuggucugucacagcug

SEQ ID NO: 2684151 - RNA, 19 nt, Artificial Sequence
  Description of Artificial Sequence: Synthetic oligonucleotide
gugucaccagcaaguucaa

SEQ ID NO: 2684152 - RNA, 19 nt, Artificial Sequence
  Description of Artificial Sequence: Synthetic oligonucleotide
gcugccagugggcaaggau

SEQ ID NO: 2684153 - RNA, 19 nt, Artificial Sequence
  Description of Artificial Sequence: Synthetic oligonucleotide
gugccuccgcagaguuucc

SEQ ID NO: 2684154 - RNA, 19 nt, Artificial Sequence
  Description of Artificial Sequence: Synthetic oligonucleotide
agcugccagugggcaagga

SEQ ID NO: 2684155 - RNA, 19 nt, Artificial Sequence
  Description of Artificial Sequence: Synthetic oligonucleotide
ggagguaccugugccuccu

SEQ ID NO: 2684156 - RNA, 19 nt, Artificial Sequence
  Description of Artificial Sequence: Synthetic oligonucleotide
cagggaggagcccgugccu

SEQ ID NO: 2684157 - RNA, 19 nt, Artificial Sequence
  Description of Artificial Sequence: Synthetic oligonucleotide
ccuccgcagaguuuccaua

SEQ ID NO: 2684158 - RNA, 19 nt, Artificial Sequence
  Description of Artificial Sequence: Synthetic oligonucleotide
ccagugggcaaggaugucu

SEQ ID NO: 2684159 - RNA, 19 nt, Artificial Sequence
  Description of Artificial Sequence: Synthetic oligonucleotide
cagaagggagauggccacu

SEQ ID NO: 2684160 - RNA, 19 nt, Artificial Sequence
  Description of Artificial Sequence: Synthetic oligonucleotide
cgauggggaaaucuuuccu

SEQ ID NO: 2684161 - RNA, 19 nt, Artificial Sequence
  Description of Artificial Sequence: Synthetic oligonucleotide
ccuugucgcugcucuucca

SEQ ID NO: 2684162 - RNA, 19 nt, Artificial Sequence
  Description of Artificial Sequence: Synthetic oligonucleotide
ccuguccagggaggagccc

SEQ ID NO: 2684163 - RNA, 19 nt, Artificial Sequence
  Description of Artificial Sequence: Synthetic oligonucleotide
cugacaccuugucgcugcu

SEQ ID NO: 2684164 - RNA, 19 nt, Artificial Sequence
  Description of Artificial Sequence: Synthetic oligonucleotide
gaccggcuccaggggcuuc

SEQ ID NO: 2684165 - RNA, 19 nt, Artificial Sequence
  Description of Artificial Sequence: Synthetic oligonucleotide
gguuugcauccgggcacuc

SEQ ID NO: 2684166 - RNA, 19 nt, Artificial Sequence
  Description of Artificial Sequence: Synthetic oligonucleotide
ggguuugcauccgggcacu

SEQ ID NO: 2684167 - RNA, 19 nt, Artificial Sequence
  Description of Artificial Sequence: Synthetic oligonucleotide
gcauuccgcagacccgcgu

SEQ ID NO: 2684168 - RNA, 19 nt, Artificial Sequence
  Description of Artificial Sequence: Synthetic oligonucleotide
ccgaguuuucugagugcua

SEQ ID NO: 2684169 - RNA, 19 nt, Artificial Sequence
  Description of Artificial Sequence: Synthetic oligonucleotide
cgggcacucuucuggguga

SEQ ID NO: 2684170 - RNA, 19 nt, Artificial Sequence
  Description of Artificial Sequence: Synthetic oligonucleotide
gccuccgcagaguuuccau

SEQ ID NO: 2684171 - RNA, 19 nt, Artificial Sequence
  Description of Artificial Sequence: Synthetic oligonucleotide
gcugugucaccagcaaguu

SEQ ID NO: 2684172 - RNA, 19 nt, Artificial Sequence
  Description of Artificial Sequence: Synthetic oligonucleotide
cuucugccacagcuucuuu

SEQ ID NO: 2684173 - RNA, 19 nt, Artificial Sequence
  Description of Artificial Sequence: Synthetic oligonucleotide
cccgcguucuguuccugua

SEQ ID NO: 2684174 - RNA, 19 nt, Artificial Sequence
  Description of Artificial Sequence: Synthetic oligonucleotide
gccagugggcaaggauguc

SEQ ID NO: 2684175 - RNA, 19 nt, Artificial Sequence
  Description of Artificial Sequence: Synthetic oligonucleotide
ccggggagcucaugcugga

SEQ ID NO: 2684176 - RNA, 19 nt, Artificial Sequence
  Description of Artificial Sequence: Synthetic oligonucleotide
ggagcucaugcuggacagu

SEQ ID NO: 2684177 - RNA, 19 nt, Artificial Sequence
  Description of Artificial Sequence: Synthetic oligonucleotide
ggggcuucugccacagcuu

SEQ ID NO: 2684178 - RNA, 19 nt, Artificial Sequence
  Description of Artificial Sequence: Synthetic oligonucleotide
ccuuggcaccaggguuugc

SEQ ID NO: 2684179 - RNA, 19 nt, Artificial Sequence
  Description of Artificial Sequence: Synthetic oligonucleotide
cugggccuccggcagccuu

SEQ ID NO: 2684180 - RNA, 19 nt, Artificial Sequence
  Description of Artificial Sequence: Synthetic oligonucleotide
caggugcaccugguccacu

SEQ ID NO: 2684181 - RNA, 19 nt, Artificial Sequence
  Description of Artificial Sequence: Synthetic oligonucleotide
cggggagcucaugcuggac

SEQ ID NO: 2684182 - RNA, 19 nt, Artificial Sequence
  Description of Artificial Sequence: Synthetic oligonucleotide
ccaccuugacaugcuuccu

SEQ ID NO: 2684183 - RNA, 19 nt, Artificial Sequence
  Description of Artificial Sequence: Synthetic oligonucleotide
ccacuucaccggggagcuc

SEQ ID NO: 2684184 - RNA, 19 nt, Artificial Sequence
  Description of Artificial Sequence: Synthetic oligonucleotide
cccgugccuccgcagaguu

SEQ ID NO: 2684185 - RNA, 19 nt, Artificial Sequence
  Description of Artificial Sequence: Synthetic oligonucleotide
ccgcuggaucucacucgau

SEQ ID NO: 2684186 - RNA, 19 nt, Artificial Sequence
  Description of Artificial Sequence: Synthetic oligonucleotide
ccgugccuccgcagaguuu

SEQ ID NO: 2684187 - RNA, 19 nt, Artificial Sequence
  Description of Artificial Sequence: Synthetic oligonucleotide
aaaucaaaggcacaucacc

SEQ ID NO: 2684188 - RNA, 19 nt, Artificial Sequence
  Description of Artificial Sequence: Synthetic oligonucleotide
ucaaagauuauuauaaaca

SEQ ID NO: 2684189 - RNA, 19 nt, Artificial Sequence
  Description of Artificial Sequence: Synthetic oligonucleotide
aauucuuuuagguuuauca

SEQ ID NO: 2684190 - RNA, 19 nt, Artificial Sequence
  Description of Artificial Sequence: Synthetic oligonucleotide
agguuuaucaacuauuccc

SEQ ID NO: 2684191 - RNA, 19 nt, Artificial Sequence
  Description of Artificial Sequence: Synthetic oligonucleotide
aaaauaaacguuucccuuc

SEQ ID NO: 2684192 - RNA, 19 nt, Artificial Sequence
  Description of Artificial Sequence: Synthetic oligonucleotide
aaaauguuuucuugggucg

SEQ ID NO: 2684193 - RNA, 19 nt, Artificial Sequence
  Description of Artificial Sequence: Synthetic oligonucleotide
aauuuuauacuuugucuuc

SEQ ID NO: 2684194 - RNA, 19 nt, Artificial Sequence
  Description of Artificial Sequence: Synthetic oligonucleotide
aacaaauuuuauuagagua

SEQ ID NO: 2684195 - RNA, 19 nt, Artificial Sequence
  Description of Artificial Sequence: Synthetic oligonucleotide
auugcuuccagcuggaacg

SEQ ID NO: 2684196 - RNA, 19 nt, Artificial Sequence
  Description of Artificial Sequence: Synthetic oligonucleotide
aaaacaaauuuuauuagag

SEQ ID NO: 2684197 - RNA, 19 nt, Artificial Sequence
  Description of Artificial Sequence: Synthetic oligonucleotide
uuauuauaaacacaaacuu

SEQ ID NO: 2684198 - RNA, 19 nt, Artificial Sequence
  Description of Artificial Sequence: Synthetic oligonucleotide
aagauuauuauaaacacaa

SEQ ID NO: 2684199 - RNA, 19 nt, Artificial Sequence
  Description of Artificial Sequence: Synthetic oligonucleotide
uuuaguaauuguaaauucu

SEQ ID NO: 2684200 - RNA, 19 nt, Artificial Sequence
  Description of Artificial Sequence: Synthetic oligonucleotide
uaauuguaaauucuuaaaa

SEQ ID NO: 2684201 - RNA, 19 nt, Artificial Sequence
  Description of Artificial Sequence: Synthetic oligonucleotide
aauaacauacuugugacau

SEQ ID NO: 2684202 - RNA, 19 nt, Artificial Sequence
  Description of Artificial Sequence: Synthetic oligonucleotide
caaagauuauuauaaacac

SEQ ID NO: 2684203 - RNA, 19 nt, Artificial Sequence
  Description of Artificial Sequence: Synthetic oligonucleotide
uuugaaaauaaacguuucc

SEQ ID NO: 2684204 - RNA, 19 nt, Artificial Sequence
  Description of Artificial Sequence: Synthetic oligonucleotide
ucuuuuagguuuaucaacu

SEQ ID NO: 2684205 - RNA, 19 nt, Artificial Sequence
  Description of Artificial Sequence: Synthetic oligonucleotide
aguauccccaauuaaauca

SEQ ID NO: 2684206 - RNA, 19 nt, Artificial Sequence
  Description of Artificial Sequence: Synthetic oligonucleotide
ugaauaacauacuugugac

SEQ ID NO: 2684207 - RNA, 19 nt, Artificial Sequence
  Description of Artificial Sequence: Synthetic oligonucleotide
aggaaaaugacaaaugcuc

SEQ ID NO: 2684208 - RNA, 19 nt, Artificial Sequence
  Description of Artificial Sequence: Synthetic oligonucleotide
uucaaagauuauuauaaac

SEQ ID NO: 2684209 - RNA, 19 nt, Artificial Sequence
  Description of Artificial Sequence: Synthetic oligonucleotide
ugaaaauaaacguuucccu

SEQ ID NO: 2684210 - RNA, 19 nt, Artificial Sequence
  Description of Artificial Sequence: Synthetic oligonucleotide
gugacauuaauucuuuuag

SEQ ID NO: 2684211 - RNA, 19 nt, Artificial Sequence
  Description of Artificial Sequence: Synthetic oligonucleotide
uccccaauuaaaucaaagg

SEQ ID NO: 2684212 - RNA, 19 nt, Artificial Sequence
  Description of Artificial Sequence: Synthetic oligonucleotide
aaaacaucccuucccucac

SEQ ID NO: 2684213 - RNA, 19 nt, Artificial Sequence
  Description of Artificial Sequence: Synthetic oligonucleotide
aaguauccccaauuaaauc

SEQ ID NO: 2684214 - RNA, 19 nt, Artificial Sequence
  Description of Artificial Sequence: Synthetic oligonucleotide
aauuaaaucaaaggcacau

SEQ ID NO: 2684215 - RNA, 19 nt, Artificial Sequence
  Description of Artificial Sequence: Synthetic oligonucleotide
caugcaauacugcugaagc

SEQ ID NO: 2684216 - RNA, 19 nt, Artificial Sequence
  Description of Artificial Sequence: Synthetic oligonucleotide
ugacauuaauucuuuuagg

SEQ ID NO: 2684217 - RNA, 19 nt, Artificial Sequence
  Description of Artificial Sequence: Synthetic oligonucleotide
uauuauaaacacaaacuuu

SEQ ID NO: 2684218 - RNA, 19 nt, Artificial Sequence
  Description of Artificial Sequence: Synthetic oligonucleotide
aaauaaacguuucccuucu

SEQ ID NO: 2684219 - RNA, 19 nt, Artificial Sequence
  Description of Artificial Sequence: Synthetic oligonucleotide
ucuucauuuaguaauugua

SEQ ID NO: 2684220 - RNA, 19 nt, Artificial Sequence
  Description of Artificial Sequence: Synthetic oligonucleotide
uggaacgccaagcagcagg

SEQ ID NO: 2684221 - RNA, 19 nt, Artificial Sequence
  Description of Artificial Sequence: Synthetic oligonucleotide
uuauacuuugucuucauuu

SEQ ID NO: 2684222 - RNA, 19 nt, Artificial Sequence
  Description of Artificial Sequence: Synthetic oligonucleotide
uuagguuuaucaacuauuc

SEQ ID NO: 2684223 - RNA, 19 nt, Artificial Sequence
  Description of Artificial Sequence: Synthetic oligonucleotide
uuuucuugggucguggcgg

SEQ ID NO: 2684224 - RNA, 19 nt, Artificial Sequence
  Description of Artificial Sequence: Synthetic oligonucleotide
uuuagguuuaucaacuauu

SEQ ID NO: 2684225 - RNA, 19 nt, Artificial Sequence
  Description of Artificial Sequence: Synthetic oligonucleotide
aaaaguauccccaauuaaa

SEQ ID NO: 2684226 - RNA, 19 nt, Artificial Sequence
  Description of Artificial Sequence: Synthetic oligonucleotide
uucuuuuagguuuaucaac

SEQ ID NO: 2684227 - RNA, 19 nt, Artificial Sequence
  Description of Artificial Sequence: Synthetic oligonucleotide
caucaccugaauaacauac

SEQ ID NO: 2684228 - RNA, 19 nt, Artificial Sequence
  Description of Artificial Sequence: Synthetic oligonucleotide
uuaguaauuguaaauucuu

SEQ ID NO: 2684229 - RNA, 19 nt, Artificial Sequence
  Description of Artificial Sequence: Synthetic oligonucleotide
ucuaaaaguauccccaauu

SEQ ID NO: 2684230 - RNA, 19 nt, Artificial Sequence
  Description of Artificial Sequence: Synthetic oligonucleotide
cuucuaaaaugcaaacacc

SEQ ID NO: 2684231 - RNA, 19 nt, Artificial Sequence
  Description of Artificial Sequence: Synthetic oligonucleotide
ucauuuaguaauuguaaau

SEQ ID NO: 2684232 - RNA, 19 nt, Artificial Sequence
  Description of Artificial Sequence: Synthetic oligonucleotide
aaagcacaggaucugggcu

SEQ ID NO: 2684233 - RNA, 19 nt, Artificial Sequence
  Description of Artificial Sequence: Synthetic oligonucleotide
aguaaaacaucccuucccu

SEQ ID NO: 2684234 - RNA, 19 nt, Artificial Sequence
  Description of Artificial Sequence: Synthetic oligonucleotide
gaagacauggcggcgaagg

SEQ ID NO: 2684235 - RNA, 19 nt, Artificial Sequence
  Description of Artificial Sequence: Synthetic oligonucleotide
aaagauuauuauaaacaca

SEQ ID NO: 2684236 - RNA, 19 nt, Artificial Sequence
  Description of Artificial Sequence: Synthetic oligonucleotide
aacguuucccuucuaaaau

SEQ ID NO: 2684237 - RNA, 19 nt, Artificial Sequence
  Description of Artificial Sequence: Synthetic oligonucleotide
aaacguuucccuucuaaaa

SEQ ID NO: 2684238 - RNA, 19 nt, Artificial Sequence
  Description of Artificial Sequence: Synthetic oligonucleotide
aagcacaggaucugggcuc

SEQ ID NO: 2684239 - RNA, 19 nt, Artificial Sequence
  Description of Artificial Sequence: Synthetic oligonucleotide
uucauuuaguaauuguaaa

SEQ ID NO: 2684240 - RNA, 19 nt, Artificial Sequence
  Description of Artificial Sequence: Synthetic oligonucleotide
cugaauaacauacuuguga

SEQ ID NO: 2684241 - RNA, 19 nt, Artificial Sequence
  Description of Artificial Sequence: Synthetic oligonucleotide
cauucugcaugcaauacug

SEQ ID NO: 2684242 - RNA, 19 nt, Artificial Sequence
  Description of Artificial Sequence: Synthetic oligonucleotide
agggauugcuuccagcugg

SEQ ID NO: 2684243 - RNA, 19 nt, Artificial Sequence
  Description of Artificial Sequence: Synthetic oligonucleotide
gacauuaauucuuuuaggu

SEQ ID NO: 2684244 - RNA, 19 nt, Artificial Sequence
  Description of Artificial Sequence: Synthetic oligonucleotide
ugugacauuaauucuuuua

SEQ ID NO: 2684245 - RNA, 19 nt, Artificial Sequence
  Description of Artificial Sequence: Synthetic oligonucleotide
aaucaaaggcacaucaccu

SEQ ID NO: 2684246 - RNA, 19 nt, Artificial Sequence
  Description of Artificial Sequence: Synthetic oligonucleotide
ucaaaggcacaucaccuga

SEQ ID NO: 2684247 - RNA, 19 nt, Artificial Sequence
  Description of Artificial Sequence: Synthetic oligonucleotide
augacaaaugcucaguuuu

SEQ ID NO: 2684248 - RNA, 19 nt, Artificial Sequence
  Description of Artificial Sequence: Synthetic oligonucleotide
uuuuagguuuaucaacuau

SEQ ID NO: 2684249 - RNA, 19 nt, Artificial Sequence
  Description of Artificial Sequence: Synthetic oligonucleotide
uaaagcacaggaucugggc

SEQ ID NO: 2684250 - RNA, 19 nt, Artificial Sequence
  Description of Artificial Sequence: Synthetic oligonucleotide
gucacaguaaagcacagga

SEQ ID NO: 2684251 - RNA, 19 nt, Artificial Sequence
  Description of Artificial Sequence: Synthetic oligonucleotide
aaaguauccccaauuaaau

SEQ ID NO: 2684252 - RNA, 19 nt, Artificial Sequence
  Description of Artificial Sequence: Synthetic oligonucleotide
auacuuugucuucauuuag

SEQ ID NO: 2684253 - RNA, 19 nt, Artificial Sequence
  Description of Artificial Sequence: Synthetic oligonucleotide
aaugacaaaugcucaguuu

SEQ ID NO: 2684254 - RNA, 19 nt, Artificial Sequence
  Description of Artificial Sequence: Synthetic oligonucleotide
ccaauuaaaucaaaggcac

SEQ ID NO: 2684255 - RNA, 19 nt, Artificial Sequence
  Description of Artificial Sequence: Synthetic oligonucleotide
acacccaguaaguaaaaca

SEQ ID NO: 2684256 - RNA, 19 nt, Artificial Sequence
  Description of Artificial Sequence: Synthetic oligonucleotide
guaauuguaaauucuuaaa

SEQ ID NO: 2684257 - RNA, 19 nt, Artificial Sequence
  Description of Artificial Sequence: Synthetic oligonucleotide
aacaucccuucccucacag

SEQ ID NO: 2684258 - RNA, 19 nt, Artificial Sequence
  Description of Artificial Sequence: Synthetic oligonucleotide
uuucccuucuaaaaugcaa

SEQ ID NO: 2684259 - RNA, 19 nt, Artificial Sequence
  Description of Artificial Sequence: Synthetic oligonucleotide
auuaaaucaaaggcacauc

SEQ ID NO: 2684260 - RNA, 19 nt, Artificial Sequence
  Description of Artificial Sequence: Synthetic oligonucleotide
aacgccaagcagcagggca

SEQ ID NO: 2684261 - RNA, 19 nt, Artificial Sequence
  Description of Artificial Sequence: Synthetic oligonucleotide
agcuggaacgccaagcagc

SEQ ID NO: 2684262 - RNA, 19 nt, Artificial Sequence
  Description of Artificial Sequence: Synthetic oligonucleotide
uucccuucuaaaaugcaaa

SEQ ID NO: 2684263 - RNA, 19 nt, Artificial Sequence
  Description of Artificial Sequence: Synthetic oligonucleotide
cccaguaaguaaaacaucc

SEQ ID NO: 2684264 - RNA, 19 nt, Artificial Sequence
  Description of Artificial Sequence: Synthetic oligonucleotide
aacacccaguaaguaaaac

SEQ ID NO: 2684265 - RNA, 19 nt, Artificial Sequence
  Description of Artificial Sequence: Synthetic oligonucleotide
guuuucuugggucguggcg

SEQ ID NO: 2684266 - RNA, 19 nt, Artificial Sequence
  Description of Artificial Sequence: Synthetic oligonucleotide
ugucgucacaguaaagcac

SEQ ID NO: 2684267 - RNA, 19 nt, Artificial Sequence
  Description of Artificial Sequence: Synthetic oligonucleotide
gaaggcugcgcgcagcggg

SEQ ID NO: 2684268 - RNA, 19 nt, Artificial Sequence
  Description of Artificial Sequence: Synthetic oligonucleotide
uaaacguuucccuucuaaa

SEQ ID NO: 2684269 - RNA, 19 nt, Artificial Sequence
  Description of Artificial Sequence: Synthetic oligonucleotide
acauuaauucuuuuagguu

SEQ ID NO: 2684270 - RNA, 19 nt, Artificial Sequence
  Description of Artificial Sequence: Synthetic oligonucleotide
acaaacuuuccuucuaaaa

SEQ ID NO: 2684271 - RNA, 19 nt, Artificial Sequence
  Description of Artificial Sequence: Synthetic oligonucleotide
cuucauuuaguaauuguaa

SEQ ID NO: 2684272 - RNA, 19 nt, Artificial Sequence
  Description of Artificial Sequence: Synthetic oligonucleotide
uuggcuguugaaaauguuu

SEQ ID NO: 2684273 - RNA, 19 nt, Artificial Sequence
  Description of Artificial Sequence: Synthetic oligonucleotide
agagaccuugauccucucc

SEQ ID NO: 2684274 - RNA, 19 nt, Artificial Sequence
  Description of Artificial Sequence: Synthetic oligonucleotide
aucaaaggcacaucaccug

SEQ ID NO: 2684275 - RNA, 19 nt, Artificial Sequence
  Description of Artificial Sequence: Synthetic oligonucleotide
ccccaauuaaaucaaaggc

SEQ ID NO: 2684276 - RNA, 19 nt, Artificial Sequence
  Description of Artificial Sequence: Synthetic oligonucleotide
ugcaauacugcugaagcuc

SEQ ID NO: 2684277 - RNA, 19 nt, Artificial Sequence
  Description of Artificial Sequence: Synthetic oligonucleotide
ugagagaccuugauccucu

SEQ ID NO: 2684278 - RNA, 19 nt, Artificial Sequence
  Description of Artificial Sequence: Synthetic oligonucleotide
ucccuucccucacaguugg

SEQ ID NO: 2684279 - RNA, 19 nt, Artificial Sequence
  Description of Artificial Sequence: Synthetic oligonucleotide
uccccagcgaacuucuucc

SEQ ID NO: 2684280 - RNA, 19 nt, Artificial Sequence
  Description of Artificial Sequence: Synthetic oligonucleotide
auaaacguuucccuucuaa

SEQ ID NO: 2684281 - RNA, 19 nt, Artificial Sequence
  Description of Artificial Sequence: Synthetic oligonucleotide
aggcacaucaccugaauaa

SEQ ID NO: 2684282 - RNA, 19 nt, Artificial Sequence
  Description of Artificial Sequence: Synthetic oligonucleotide
gguuuaucaacuauucccc

SEQ ID NO: 2684283 - RNA, 19 nt, Artificial Sequence
  Description of Artificial Sequence: Synthetic oligonucleotide
ucaccugaauaacauacuu

SEQ ID NO: 2684284 - RNA, 19 nt, Artificial Sequence
  Description of Artificial Sequence: Synthetic oligonucleotide
aagggauugcuuccagcug

SEQ ID NO: 2684285 - RNA, 19 nt, Artificial Sequence
  Description of Artificial Sequence: Synthetic oligonucleotide
auuuuauacuuugucuuca

SEQ ID NO: 2684286 - RNA, 19 nt, Artificial Sequence
  Description of Artificial Sequence: Synthetic oligonucleotide
acguuucccuucuaaaaug

SEQ ID NO: 2684287 - RNA, 19 nt, Artificial Sequence
  Description of Artificial Sequence: Synthetic oligonucleotide
gaauaacauacuugugaca

SEQ ID NO: 2684288 - RNA, 19 nt, Artificial Sequence
  Description of Artificial Sequence: Synthetic oligonucleotide
uugauccucuccacgccgg

SEQ ID NO: 2684289 - RNA, 19 nt, Artificial Sequence
  Description of Artificial Sequence: Synthetic oligonucleotide
gaucugggcucccggaagg

SEQ ID NO: 2684290 - RNA, 19 nt, Artificial Sequence
  Description of Artificial Sequence: Synthetic oligonucleotide
aacacaaacuuuccuucua

SEQ ID NO: 2684291 - RNA, 19 nt, Artificial Sequence
  Description of Artificial Sequence: Synthetic oligonucleotide
cuugauccucuccacgccg

SEQ ID NO: 2684292 - RNA, 19 nt, Artificial Sequence
  Description of Artificial Sequence: Synthetic oligonucleotide
cauuaauucuuuuagguuu

SEQ ID NO: 2684293 - RNA, 19 nt, Artificial Sequence
  Description of Artificial Sequence: Synthetic oligonucleotide
aaaggcacaucaccugaau

SEQ ID NO: 2684294 - RNA, 19 nt, Artificial Sequence
  Description of Artificial Sequence: Synthetic oligonucleotide
caaacacccaguaaguaaa

SEQ ID NO: 2684295 - RNA, 19 nt, Artificial Sequence
  Description of Artificial Sequence: Synthetic oligonucleotide
gaaaauaaacguuucccuu

SEQ ID NO: 2684296 - RNA, 19 nt, Artificial Sequence
  Description of Artificial Sequence: Synthetic oligonucleotide
gaagggauugcuuccagcu

SEQ ID NO: 2684297 - RNA, 19 nt, Artificial Sequence
  Description of Artificial Sequence: Synthetic oligonucleotide
uuuuauacuuugucuucau

SEQ ID NO: 2684298 - RNA, 19 nt, Artificial Sequence
  Description of Artificial Sequence: Synthetic oligonucleotide
acauacuugugacauuaau

SEQ ID NO: 2684299 - RNA, 19 nt, Artificial Sequence
  Description of Artificial Sequence: Synthetic oligonucleotide
aaugauguauugggcaaaa

SEQ ID NO: 2684300 - RNA, 19 nt, Artificial Sequence
  Description of Artificial Sequence: Synthetic oligonucleotide
aaauguuuucuugggucgu

SEQ ID NO: 2684301 - RNA, 19 nt, Artificial Sequence
  Description of Artificial Sequence: Synthetic oligonucleotide
guaaagcacaggaucuggg

SEQ ID NO: 2684302 - RNA, 19 nt, Artificial Sequence
  Description of Artificial Sequence: Synthetic oligonucleotide
uuuauacuuugucuucauu

SEQ ID NO: 2684303 - RNA, 19 nt, Artificial Sequence
  Description of Artificial Sequence: Synthetic oligonucleotide
aauguuuucuugggucgug

SEQ ID NO: 2684304 - RNA, 19 nt, Artificial Sequence
  Description of Artificial Sequence: Synthetic oligonucleotide
uucuaaaaguauccccaau

SEQ ID NO: 2684305 - RNA, 19 nt, Artificial Sequence
  Description of Artificial Sequence: Synthetic oligonucleotide
ucacaguaaagcacaggau

SEQ ID NO: 2684306 - RNA, 19 nt, Artificial Sequence
  Description of Artificial Sequence: Synthetic oligonucleotide
ugcagggcgcucacgcucg

SEQ ID NO: 2684307 - RNA, 19 nt, Artificial Sequence
  Description of Artificial Sequence: Synthetic oligonucleotide
agggcgcucacgcucgccc

SEQ ID NO: 2684308 - RNA, 19 nt, Artificial Sequence
  Description of Artificial Sequence: Synthetic oligonucleotide
cccaauuaaaucaaaggca

SEQ ID NO: 2684309 - RNA, 19 nt, Artificial Sequence
  Description of Artificial Sequence: Synthetic oligonucleotide
gacauggcggcgaaggcug

SEQ ID NO: 2684310 - RNA, 19 nt, Artificial Sequence
  Description of Artificial Sequence: Synthetic oligonucleotide
aaggcacaucaccugaaua

SEQ ID NO: 2684311 - RNA, 19 nt, Artificial Sequence
  Description of Artificial Sequence: Synthetic oligonucleotide
ugucuucauuuaguaauug

SEQ ID NO: 2684312 - RNA, 19 nt, Artificial Sequence
  Description of Artificial Sequence: Synthetic oligonucleotide
uucccugucgucacaguaa

SEQ ID NO: 2684313 - RNA, 19 nt, Artificial Sequence
  Description of Artificial Sequence: Synthetic oligonucleotide
augcaauacugcugaagcu

SEQ ID NO: 2684314 - RNA, 19 nt, Artificial Sequence
  Description of Artificial Sequence: Synthetic oligonucleotide
caaauuuuauuagaguaua

SEQ ID NO: 2684315 - RNA, 19 nt, Artificial Sequence
  Description of Artificial Sequence: Synthetic oligonucleotide
caauuuuauacuuugucuu

SEQ ID NO: 2684316 - RNA, 19 nt, Artificial Sequence
  Description of Artificial Sequence: Synthetic oligonucleotide
uugcaggcauucugcaugc

SEQ ID NO: 2684317 - RNA, 19 nt, Artificial Sequence
  Description of Artificial Sequence: Synthetic oligonucleotide
ucaccaugugcgcuucccc

SEQ ID NO: 2684318 - RNA, 19 nt, Artificial Sequence
  Description of Artificial Sequence: Synthetic oligonucleotide
agcacaggaucugggcucc

SEQ ID NO: 2684319 - RNA, 19 nt, Artificial Sequence
  Description of Artificial Sequence: Synthetic oligonucleotide
auccccaauuaaaucaaag

SEQ ID NO: 2684320 - RNA, 19 nt, Artificial Sequence
  Description of Artificial Sequence: Synthetic oligonucleotide
cugcaugcaauacugcuga

SEQ ID NO: 2684321 - RNA, 19 nt, Artificial Sequence
  Description of Artificial Sequence: Synthetic oligonucleotide
uccagcuggaacgccaagc

SEQ ID NO: 2684322 - RNA, 19 nt, Artificial Sequence
  Description of Artificial Sequence: Synthetic oligonucleotide
cuucccucacaguuggcug

SEQ ID NO: 2684323 - RNA, 19 nt, Artificial Sequence
  Description of Artificial Sequence: Synthetic oligonucleotide
caauuaaaucaaaggcaca

SEQ ID NO: 2684324 - RNA, 19 nt, Artificial Sequence
  Description of Artificial Sequence: Synthetic oligonucleotide
auguuuucuugggucgugg

SEQ ID NO: 2684325 - RNA, 19 nt, Artificial Sequence
  Description of Artificial Sequence: Synthetic oligonucleotide
accaugugcgcuuccccag

SEQ ID NO: 2684326 - RNA, 19 nt, Artificial Sequence
  Description of Artificial Sequence: Synthetic oligonucleotide
cuucaaagauuauuauaaa

SEQ ID NO: 2684327 - RNA, 19 nt, Artificial Sequence
  Description of Artificial Sequence: Synthetic oligonucleotide
gucgucacaguaaagcaca

SEQ ID NO: 2684328 - RNA, 19 nt, Artificial Sequence
  Description of Artificial Sequence: Synthetic oligonucleotide
ucgucacaguaaagcacag

SEQ ID NO: 2684329 - RNA, 19 nt, Artificial Sequence
  Description of Artificial Sequence: Synthetic oligonucleotide
uuccccagcgaacuucuuc

SEQ ID NO: 2684330 - RNA, 19 nt, Artificial Sequence
  Description of Artificial Sequence: Synthetic oligonucleotide
cauccaucaccaugugcgc

SEQ ID NO: 2684331 - RNA, 19 nt, Artificial Sequence
  Description of Artificial Sequence: Synthetic oligonucleotide
ccugucgucacaguaaagc

SEQ ID NO: 2684332 - RNA, 19 nt, Artificial Sequence
  Description of Artificial Sequence: Synthetic oligonucleotide
acaguuggcuguugaaaau

SEQ ID NO: 2684333 - RNA, 19 nt, Artificial Sequence
  Description of Artificial Sequence: Synthetic oligonucleotide
ucccggaagggauugcuuc

SEQ ID NO: 2684334 - RNA, 19 nt, Artificial Sequence
  Description of Artificial Sequence: Synthetic oligonucleotide
gcagucauccaucaccaug

SEQ ID NO: 2684335 - RNA, 19 nt, Artificial Sequence
  Description of Artificial Sequence: Synthetic oligonucleotide
ugugcgcuuccccagcgaa

SEQ ID NO: 2684336 - RNA, 19 nt, Artificial Sequence
  Description of Artificial Sequence: Synthetic oligonucleotide
uucccucacaguuggcugu

SEQ ID NO: 2684337 - RNA, 19 nt, Artificial Sequence
  Description of Artificial Sequence: Synthetic oligonucleotide
aaggcugcgcgcagcgggc

SEQ ID NO: 2684338 - RNA, 19 nt, Artificial Sequence
  Description of Artificial Sequence: Synthetic oligonucleotide
cugucgucacaguaaagca

SEQ ID NO: 2684339 - RNA, 19 nt, Artificial Sequence
  Description of Artificial Sequence: Synthetic oligonucleotide
ggaaaaugacaaaugcuca

SEQ ID NO: 2684340 - RNA, 19 nt, Artificial Sequence
  Description of Artificial Sequence: Synthetic oligonucleotide
cccaauuuuauacuuuguc

SEQ ID NO: 2684341 - RNA, 19 nt, Artificial Sequence
  Description of Artificial Sequence: Synthetic oligonucleotide
ucccugucgucacaguaaa

SEQ ID NO: 2684342 - RNA, 19 nt, Artificial Sequence
  Description of Artificial Sequence: Synthetic oligonucleotide
acccaguaaguaaaacauc

SEQ ID NO: 2684343 - RNA, 19 nt, Artificial Sequence
  Description of Artificial Sequence: Synthetic oligonucleotide
cauacuugugacauuaauu

SEQ ID NO: 2684344 - RNA, 19 nt, Artificial Sequence
  Description of Artificial Sequence: Synthetic oligonucleotide
uauccccaauuaaaucaaa

SEQ ID NO: 2684345 - RNA, 19 nt, Artificial Sequence
  Description of Artificial Sequence: Synthetic oligonucleotide
ccaguaaguaaaacauccc

SEQ ID NO: 2684346 - RNA, 19 nt, Artificial Sequence
  Description of Artificial Sequence: Synthetic oligonucleotide
cuuugucuucauuuaguaa

SEQ ID NO: 2684347 - RNA, 19 nt, Artificial Sequence
  Description of Artificial Sequence: Synthetic oligonucleotide
gucguggcggcagucaucc

SEQ ID NO: 2684348 - RNA, 19 nt, Artificial Sequence
  Description of Artificial Sequence: Synthetic oligonucleotide
aauaaacguuucccuucua

SEQ ID NO: 2684349 - RNA, 19 nt, Artificial Sequence
  Description of Artificial Sequence: Synthetic oligonucleotide
caguuggcuguugaaaaug

SEQ ID NO: 2684350 - RNA, 19 nt, Artificial Sequence
  Description of Artificial Sequence: Synthetic oligonucleotide
gcgaacuucuucccugucg

SEQ ID NO: 2684351 - RNA, 19 nt, Artificial Sequence
  Description of Artificial Sequence: Synthetic oligonucleotide
ugcgcuuccccagcgaacu

SEQ ID NO: 2684352 - RNA, 19 nt, Artificial Sequence
  Description of Artificial Sequence: Synthetic oligonucleotide
auguuaggaaaaugacaaa

SEQ ID NO: 2684353 - RNA, 19 nt, Artificial Sequence
  Description of Artificial Sequence: Synthetic oligonucleotide
caguaaguaaaacaucccu

SEQ ID NO: 2684354 - RNA, 19 nt, Artificial Sequence
  Description of Artificial Sequence: Synthetic oligonucleotide
uccuugcaggcauucugca

SEQ ID NO: 2684355 - RNA, 19 nt, Artificial Sequence
  Description of Artificial Sequence: Synthetic oligonucleotide
auaacauacuugugacauu

SEQ ID NO: 2684356 - RNA, 19 nt, Artificial Sequence
  Description of Artificial Sequence: Synthetic oligonucleotide
uaauucuuuuagguuuauc

SEQ ID NO: 2684357 - RNA, 19 nt, Artificial Sequence
  Description of Artificial Sequence: Synthetic oligonucleotide
cucgccccggaagacaugg

SEQ ID NO: 2684358 - RNA, 19 nt, Artificial Sequence
  Description of Artificial Sequence: Synthetic oligonucleotide
cauuuaguaauuguaaauu

SEQ ID NO: 2684359 - RNA, 19 nt, Artificial Sequence
  Description of Artificial Sequence: Synthetic oligonucleotide
ccaaguucuucaaagauua

SEQ ID NO: 2684360 - RNA, 19 nt, Artificial Sequence
  Description of Artificial Sequence: Synthetic oligonucleotide
cacccaguaaguaaaacau

SEQ ID NO: 2684361 - RNA, 19 nt, Artificial Sequence
  Description of Artificial Sequence: Synthetic oligonucleotide
uccaucaccaugugcgcuu

SEQ ID NO: 2684362 - RNA, 19 nt, Artificial Sequence
  Description of Artificial Sequence: Synthetic oligonucleotide
caugugcgcuuccccagcg

SEQ ID NO: 2684363 - RNA, 19 nt, Artificial Sequence
  Description of Artificial Sequence: Synthetic oligonucleotide
cucacgcucgccccggaag

SEQ ID NO: 2684364 - RNA, 19 nt, Artificial Sequence
  Description of Artificial Sequence: Synthetic oligonucleotide
cagucauccaucaccaugu

SEQ ID NO: 2684365 - RNA, 19 nt, Artificial Sequence
  Description of Artificial Sequence: Synthetic oligonucleotide
ugauccucuccacgccggc

SEQ ID NO: 2684366 - RNA, 19 nt, Artificial Sequence
  Description of Artificial Sequence: Synthetic oligonucleotide
gcaaacacccaguaaguaa

SEQ ID NO: 2684367 - RNA, 19 nt, Artificial Sequence
  Description of Artificial Sequence: Synthetic oligonucleotide
acaucaccugaauaacaua

SEQ ID NO: 2684368 - RNA, 19 nt, Artificial Sequence
  Description of Artificial Sequence: Synthetic oligonucleotide
ugcaaacacccaguaagua

SEQ ID NO: 2684369 - RNA, 19 nt, Artificial Sequence
  Description of Artificial Sequence: Synthetic oligonucleotide
aucaccugaauaacauacu

SEQ ID NO: 2684370 - RNA, 19 nt, Artificial Sequence
  Description of Artificial Sequence: Synthetic oligonucleotide
agauuauuauaaacacaaa

SEQ ID NO: 2684371 - RNA, 19 nt, Artificial Sequence
  Description of Artificial Sequence: Synthetic oligonucleotide
caguaaagcacaggaucug

SEQ ID NO: 2684372 - RNA, 19 nt, Artificial Sequence
  Description of Artificial Sequence: Synthetic oligonucleotide
ccaauuuuauacuuugucu

SEQ ID NO: 2684373 - RNA, 19 nt, Artificial Sequence
  Description of Artificial Sequence: Synthetic oligonucleotide
agcgaacuucuucccuguc

SEQ ID NO: 2684374 - RNA, 19 nt, Artificial Sequence
  Description of Artificial Sequence: Synthetic oligonucleotide
ggaacgccaagcagcaggg

SEQ ID NO: 2684375 - RNA, 19 nt, Artificial Sequence
  Description of Artificial Sequence: Synthetic oligonucleotide
uuaauucuuuuagguuuau

SEQ ID NO: 2684376 - RNA, 19 nt, Artificial Sequence
  Description of Artificial Sequence: Synthetic oligonucleotide
uggcggcgaaggcugcgcg

SEQ ID NO: 2684377 - RNA, 19 nt, Artificial Sequence
  Description of Artificial Sequence: Synthetic oligonucleotide
auggcggcgaaggcugcgc

SEQ ID NO: 2684378 - RNA, 19 nt, Artificial Sequence
  Description of Artificial Sequence: Synthetic oligonucleotide
cuuuuagguuuaucaacua

SEQ ID NO: 2684379 - RNA, 19 nt, Artificial Sequence
  Description of Artificial Sequence: Synthetic oligonucleotide
guauccccaauuaaaucaa

SEQ ID NO: 2684380 - RNA, 19 nt, Artificial Sequence
  Description of Artificial Sequence: Synthetic oligonucleotide
cguuucccuucuaaaaugc

SEQ ID NO: 2684381 - RNA, 19 nt, Artificial Sequence
  Description of Artificial Sequence: Synthetic oligonucleotide
aaacacccaguaaguaaaa

SEQ ID NO: 2684382 - RNA, 19 nt, Artificial Sequence
  Description of Artificial Sequence: Synthetic oligonucleotide
cacaucaccugaauaacau

SEQ ID NO: 2684383 - RNA, 19 nt, Artificial Sequence
  Description of Artificial Sequence: Synthetic oligonucleotide
uugcuuccagcuggaacgc

SEQ ID NO: 2684384 - RNA, 19 nt, Artificial Sequence
  Description of Artificial Sequence: Synthetic oligonucleotide
ggaucugggcucccggaag

SEQ ID NO: 2684385 - RNA, 19 nt, Artificial Sequence
  Description of Artificial Sequence: Synthetic oligonucleotide
cugagagaccuugauccuc

SEQ ID NO: 2684386 - RNA, 19 nt, Artificial Sequence
  Description of Artificial Sequence: Synthetic oligonucleotide
cacgccggccuccagcuug

SEQ ID NO: 2684387 - RNA, 19 nt, Artificial Sequence
  Description of Artificial Sequence: Synthetic oligonucleotide
cagcuggaacgccaagcag

SEQ ID NO: 2684388 - RNA, 19 nt, Artificial Sequence
  Description of Artificial Sequence: Synthetic oligonucleotide
uugugacauuaauucuuuu

SEQ ID NO: 2684389 - RNA, 19 nt, Artificial Sequence
  Description of Artificial Sequence: Synthetic oligonucleotide
aggaucugggcucccggaa

SEQ ID NO: 2684390 - RNA, 19 nt, Artificial Sequence
  Description of Artificial Sequence: Synthetic oligonucleotide
acuuuccuucuaaaaguau

SEQ ID NO: 2684391 - RNA, 19 nt, Artificial Sequence
  Description of Artificial Sequence: Synthetic oligonucleotide
cuugugacauuaauucuuu

SEQ ID NO: 2684392 - RNA, 19 nt, Artificial Sequence
  Description of Artificial Sequence: Synthetic oligonucleotide
gauccucuccacgccggcc

SEQ ID NO: 2684393 - RNA, 19 nt, Artificial Sequence
  Description of Artificial Sequence: Synthetic oligonucleotide
ccagcgaacuucuucccug

SEQ ID NO: 2684394 - RNA, 19 nt, Artificial Sequence
  Description of Artificial Sequence: Synthetic oligonucleotide
ggcacaucaccugaauaac

SEQ ID NO: 2684395 - RNA, 19 nt, Artificial Sequence
  Description of Artificial Sequence: Synthetic oligonucleotide
caccaugugcgcuucccca

SEQ ID NO: 2684396 - RNA, 19 nt, Artificial Sequence
  Description of Artificial Sequence: Synthetic oligonucleotide
cugcagggcgcucacgcuc

SEQ ID NO: 2684397 - RNA, 19 nt, Artificial Sequence
  Description of Artificial Sequence: Synthetic oligonucleotide
auccaucaccaugugcgcu

SEQ ID NO: 2684398 - RNA, 19 nt, Artificial Sequence
  Description of Artificial Sequence: Synthetic oligonucleotide
gcuguugaaaauguuuucu

SEQ ID NO: 2684399 - RNA, 19 nt, Artificial Sequence
  Description of Artificial Sequence: Synthetic oligonucleotide
uggcggcagucauccauca

SEQ ID NO: 2684400 - RNA, 19 nt, Artificial Sequence
  Description of Artificial Sequence: Synthetic oligonucleotide
caaaggcacaucaccugaa

SEQ ID NO: 2684401 - RNA, 19 nt, Artificial Sequence
  Description of Artificial Sequence: Synthetic oligonucleotide
caucccuucccucacaguu

SEQ ID NO: 2684402 - RNA, 19 nt, Artificial Sequence
  Description of Artificial Sequence: Synthetic oligonucleotide
ugcaugcaauacugcugaa

SEQ ID NO: 2684403 - RNA, 19 nt, Artificial Sequence
  Description of Artificial Sequence: Synthetic oligonucleotide
cuucccugucgucacagua

SEQ ID NO: 2684404 - RNA, 19 nt, Artificial Sequence
  Description of Artificial Sequence: Synthetic oligonucleotide
ugggucguggcggcaguca

SEQ ID NO: 2684405 - RNA, 19 nt, Artificial Sequence
  Description of Artificial Sequence: Synthetic oligonucleotide
ccuugauccucuccacgcc

SEQ ID NO: 2684406 - RNA, 19 nt, Artificial Sequence
  Description of Artificial Sequence: Synthetic oligonucleotide
ggcauucugcaugcaauac

SEQ ID NO: 2684407 - RNA, 19 nt, Artificial Sequence
  Description of Artificial Sequence: Synthetic oligonucleotide
caggcauucugcaugcaau

SEQ ID NO: 2684408 - RNA, 19 nt, Artificial Sequence
  Description of Artificial Sequence: Synthetic oligonucleotide
cauggcggcgaaggcugcg

SEQ ID NO: 2684409 - RNA, 19 nt, Artificial Sequence
  Description of Artificial Sequence: Synthetic oligonucleotide
cuuccagcuggaacgccaa

SEQ ID NO: 2684410 - RNA, 19 nt, Artificial Sequence
  Description of Artificial Sequence: Synthetic oligonucleotide
gccccggaagacauggcgg

SEQ ID NO: 2684411 - RNA, 19 nt, Artificial Sequence
  Description of Artificial Sequence: Synthetic oligonucleotide
ugggcucccggaagggauu

SEQ ID NO: 2684412 - RNA, 19 nt, Artificial Sequence
  Description of Artificial Sequence: Synthetic oligonucleotide
augugcgcuuccccagcga

SEQ ID NO: 2684413 - RNA, 19 nt, Artificial Sequence
  Description of Artificial Sequence: Synthetic oligonucleotide
gaacgccaagcagcagggc

SEQ ID NO: 2684414 - RNA, 19 nt, Artificial Sequence
  Description of Artificial Sequence: Synthetic oligonucleotide
gagagaccuugauccucuc

SEQ ID NO: 2684415 - RNA, 19 nt, Artificial Sequence
  Description of Artificial Sequence: Synthetic oligonucleotide
ccccggaagacauggcggc

SEQ ID NO: 2684416 - RNA, 19 nt, Artificial Sequence
  Description of Artificial Sequence: Synthetic oligonucleotide
gcauucugcaugcaauacu

SEQ ID NO: 2684417 - RNA, 19 nt, Artificial Sequence
  Description of Artificial Sequence: Synthetic oligonucleotide
caggaucugggcucccgga

SEQ ID NO: 2684418 - RNA, 19 nt, Artificial Sequence
  Description of Artificial Sequence: Synthetic oligonucleotide
gcuggaacgccaagcagca

SEQ ID NO: 2684419 - RNA, 19 nt, Artificial Sequence
  Description of Artificial Sequence: Synthetic oligonucleotide
guggcggcagucauccauc

SEQ ID NO: 2684420 - RNA, 19 nt, Artificial Sequence
  Description of Artificial Sequence: Synthetic oligonucleotide
acgccaagcagcagggcau

SEQ ID NO: 2684421 - RNA, 19 nt, Artificial Sequence
  Description of Artificial Sequence: Synthetic oligonucleotide
ucgccccggaagacauggc

SEQ ID NO: 2684422 - RNA, 19 nt, Artificial Sequence
  Description of Artificial Sequence: Synthetic oligonucleotide
aggcugcgcgcagcgggcc

SEQ ID NO: 2684423 - RNA, 19 nt, Artificial Sequence
  Description of Artificial Sequence: Synthetic oligonucleotide
ccagcuggaacgccaagca

SEQ ID NO: 2684424 - RNA, 19 nt, Artificial Sequence
  Description of Artificial Sequence: Synthetic oligonucleotide
gcacaucaccugaauaaca

SEQ ID NO: 2684425 - RNA, 19 nt, Artificial Sequence
  Description of Artificial Sequence: Synthetic oligonucleotide
gcaggcauucugcaugcaa

SEQ ID NO: 2684426 - RNA, 19 nt, Artificial Sequence
  Description of Artificial Sequence: Synthetic oligonucleotide
ggcgcucacgcucgccccg

SEQ ID NO: 2684427 - RNA, 19 nt, Artificial Sequence
  Description of Artificial Sequence: Synthetic oligonucleotide
cccuucuaaaaugcaaaca

SEQ ID NO: 2684428 - RNA, 19 nt, Artificial Sequence
  Description of Artificial Sequence: Synthetic oligonucleotide
uucuugggucguggcggca

SEQ ID NO: 2684429 - RNA, 19 nt, Artificial Sequence
  Description of Artificial Sequence: Synthetic oligonucleotide
ccaugugcgcuuccccagc

SEQ ID NO: 2684430 - RNA, 19 nt, Artificial Sequence
  Description of Artificial Sequence: Synthetic oligonucleotide
ggaagacauggcggcgaag

SEQ ID NO: 2684431 - RNA, 19 nt, Artificial Sequence
  Description of Artificial Sequence: Synthetic oligonucleotide
cuggaacgccaagcagcag

SEQ ID NO: 2684432 - RNA, 19 nt, Artificial Sequence
  Description of Artificial Sequence: Synthetic oligonucleotide
cgcugcagggcgcucacgc

SEQ ID NO: 2684433 - RNA, 19 nt, Artificial Sequence
  Description of Artificial Sequence: Synthetic oligonucleotide
ucccucacaguuggcuguu

SEQ ID NO: 2684434 - RNA, 19 nt, Artificial Sequence
  Description of Artificial Sequence: Synthetic oligonucleotide
uugggucguggcggcaguc

SEQ ID NO: 2684435 - RNA, 19 nt, Artificial Sequence
  Description of Artificial Sequence: Synthetic oligonucleotide
ggcggcgaaggcugcgcgc

SEQ ID NO: 2684436 - RNA, 19 nt, Artificial Sequence
  Description of Artificial Sequence: Synthetic oligonucleotide
cgucacaguaaagcacagg

SEQ ID NO: 2684437 - RNA, 19 nt, Artificial Sequence
  Description of Artificial Sequence: Synthetic oligonucleotide
gugcgcuuccccagcgaac

SEQ ID NO: 2684438 - RNA, 19 nt, Artificial Sequence
  Description of Artificial Sequence: Synthetic oligonucleotide
cacgcucgccccggaagac

SEQ ID NO: 2684439 - RNA, 19 nt, Artificial Sequence
  Description of Artificial Sequence: Synthetic oligonucleotide
acgcucgccccggaagaca

SEQ ID NO: 2684440 - RNA, 19 nt, Artificial Sequence
  Description of Artificial Sequence: Synthetic oligonucleotide
cagcgaacuucuucccugu

SEQ ID NO: 2684441 - RNA, 19 nt, Artificial Sequence
  Description of Artificial Sequence: Synthetic oligonucleotide
ggcauccuugcaggcauuc

SEQ ID NO: 2684442 - RNA, 19 nt, Artificial Sequence
  Description of Artificial Sequence: Synthetic oligonucleotide
ccccagcgaacuucuuccc

SEQ ID NO: 2684443 - RNA, 19 nt, Artificial Sequence
  Description of Artificial Sequence: Synthetic oligonucleotide
cugggcucccggaagggau

SEQ ID NO: 2684444 - RNA, 19 nt, Artificial Sequence
  Description of Artificial Sequence: Synthetic oligonucleotide
gggcgcucacgcucgcccc

SEQ ID NO: 2684445 - RNA, 19 nt, Artificial Sequence
  Description of Artificial Sequence: Synthetic oligonucleotide
ucguggcggcagucaucca

SEQ ID NO: 2684446 - RNA, 19 nt, Artificial Sequence
  Description of Artificial Sequence: Synthetic oligonucleotide
cccugucgucacaguaaag

SEQ ID NO: 2684447 - RNA, 19 nt, Artificial Sequence
  Description of Artificial Sequence: Synthetic oligonucleotide
ggcggcagucauccaucac

SEQ ID NO: 2684448 - RNA, 19 nt, Artificial Sequence
  Description of Artificial Sequence: Synthetic oligonucleotide
cggcagucauccaucacca

SEQ ID NO: 2684449 - RNA, 19 nt, Artificial Sequence
  Description of Artificial Sequence: Synthetic oligonucleotide
gggauugcuuccagcugga

SEQ ID NO: 2684450 - RNA, 19 nt, Artificial Sequence
  Description of Artificial Sequence: Synthetic oligonucleotide
cccggaagacauggcggcg

SEQ ID NO: 2684451 - RNA, 19 nt, Artificial Sequence
  Description of Artificial Sequence: Synthetic oligonucleotide
gcugcgcgcagcgggcccg

SEQ ID NO: 2684452 - RNA, 19 nt, Artificial Sequence
  Description of Artificial Sequence: Synthetic oligonucleotide
cugccugagagaccuugau

SEQ ID NO: 2684453 - RNA, 19 nt, Artificial Sequence
  Description of Artificial Sequence: Synthetic oligonucleotide
gggcucccggaagggauug

SEQ ID NO: 2684454 - RNA, 19 nt, Artificial Sequence
  Description of Artificial Sequence: Synthetic oligonucleotide
ggcugcgcgcagcgggccc

SEQ ID NO: 2684455 - RNA, 19 nt, Artificial Sequence
  Description of Artificial Sequence: Synthetic oligonucleotide
cuugggucguggcggcagu

SEQ ID NO: 2684456 - RNA, 19 nt, Artificial Sequence
  Description of Artificial Sequence: Synthetic oligonucleotide
ccugagagaccuugauccu

SEQ ID NO: 2684457 - RNA, 19 nt, Artificial Sequence
  Description of Artificial Sequence: Synthetic oligonucleotide
gcgcagcgggcccggcugg

SEQ ID NO: 2684458 - RNA, 19 nt, Artificial Sequence
  Description of Artificial Sequence: Synthetic oligonucleotide
ggucguggcggcagucauc

SEQ ID NO: 2684459 - RNA, 19 nt, Artificial Sequence
  Description of Artificial Sequence: Synthetic oligonucleotide
cugcgcgcagcgggcccgg

SEQ ID NO: 2684460 - RNA, 19 nt, Artificial Sequence
  Description of Artificial Sequence: Synthetic oligonucleotide
acgccggccuccagcuuga

SEQ ID NO: 2684461 - RNA, 19 nt, Artificial Sequence
  Description of Artificial Sequence: Synthetic oligonucleotide
cucccggaagggauugcuu

SEQ ID NO: 2684462 - RNA, 19 nt, Artificial Sequence
  Description of Artificial Sequence: Synthetic oligonucleotide
gcgcucacgcucgccccgg

SEQ ID NO: 2684463 - RNA, 19 nt, Artificial Sequence
  Description of Artificial Sequence: Synthetic oligonucleotide
ccggaagggauugcuucca

SEQ ID NO: 2684464 - RNA, 19 nt, Artificial Sequence
  Description of Artificial Sequence: Synthetic oligonucleotide
cgcgcagcgggcccggcug

SEQ ID NO: 2684465 - RNA, 19 nt, Artificial Sequence
  Description of Artificial Sequence: Synthetic oligonucleotide
ggcucccggaagggauugc

SEQ ID NO: 2684466 - RNA, 19 nt, Artificial Sequence
  Description of Artificial Sequence: Synthetic oligonucleotide
ggauugcuuccagcuggaa

SEQ ID NO: 2684467 - RNA, 19 nt, Artificial Sequence
  Description of Artificial Sequence: Synthetic oligonucleotide
gcucccggaagggauugcu

SEQ ID NO: 2684468 - RNA, 19 nt, Artificial Sequence
  Description of Artificial Sequence: Synthetic oligonucleotide
gggucguggcggcagucau

SEQ ID NO: 2684469 - RNA, 19 nt, Artificial Sequence
  Description of Artificial Sequence: Synthetic oligonucleotide
gcauccuugcaggcauucu

SEQ ID NO: 2684470 - RNA, 19 nt, Artificial Sequence
  Description of Artificial Sequence: Synthetic oligonucleotide
gcucacgcucgccccggaa

SEQ ID NO: 2684471 - RNA, 19 nt, Artificial Sequence
  Description of Artificial Sequence: Synthetic oligonucleotide
cccagcgaacuucuucccu

SEQ ID NO: 2684472 - RNA, 19 nt, Artificial Sequence
  Description of Artificial Sequence: Synthetic oligonucleotide
ggcagucauccaucaccau

SEQ ID NO: 2684473 - RNA, 19 nt, Artificial Sequence
  Description of Artificial Sequence: Synthetic oligonucleotide
gcucgccccggaagacaug

SEQ ID NO: 2684474 - RNA, 19 nt, Artificial Sequence
  Description of Artificial Sequence: Synthetic oligonucleotide
cguggcggcagucauccau

SEQ ID NO: 2684475 - RNA, 19 nt, Artificial Sequence
  Description of Artificial Sequence: Synthetic oligonucleotide
cccucacaguuggcuguug

SEQ ID NO: 2684476 - RNA, 19 nt, Artificial Sequence
  Description of Artificial Sequence: Synthetic oligonucleotide
cuuccccagcgaacuucuu

SEQ ID NO: 2684477 - RNA, 19 nt, Artificial Sequence
  Description of Artificial Sequence: Synthetic oligonucleotide
cgccaagcagcagggcauc

SEQ ID NO: 2684478 - RNA, 19 nt, Artificial Sequence
  Description of Artificial Sequence: Synthetic oligonucleotide
cgcagcgggcccggcuggg

SEQ ID NO: 2684479 - RNA, 19 nt, Artificial Sequence
  Description of Artificial Sequence: Synthetic oligonucleotide
cgcucgccccggaagacau

SEQ ID NO: 2684480 - RNA, 19 nt, Artificial Sequence
  Description of Artificial Sequence: Synthetic oligonucleotide
gcgcgcagcgggcccggcu

SEQ ID NO: 2684481 - RNA, 19 nt, Artificial Sequence
  Description of Artificial Sequence: Synthetic oligonucleotide
gcgcuuccccagcgaacuu

SEQ ID NO: 2684482 - RNA, 19 nt, Artificial Sequence
  Description of Artificial Sequence: Synthetic oligonucleotide
cgcucacgcucgccccgga

SEQ ID NO: 2684483 - RNA, 19 nt, Artificial Sequence
  Description of Artificial Sequence: Synthetic oligonucleotide
ccacgccggccuccagcuu

SEQ ID NO: 2684484 - RNA, 19 nt, Artificial Sequence
  Description of Artificial Sequence: Synthetic oligonucleotide
ucucauaucaccaaauaag

SEQ ID NO: 2684485 - RNA, 19 nt, Artificial Sequence
  Description of Artificial Sequence: Synthetic oligonucleotide
aucuguauguuucacagcc

SEQ ID NO: 2684486 - RNA, 19 nt, Artificial Sequence
  Description of Artificial Sequence: Synthetic oligonucleotide
uguuucacagccuuuaugg

SEQ ID NO: 2684487 - RNA, 19 nt, Artificial Sequence
  Description of Artificial Sequence: Synthetic oligonucleotide
aaauaaggagcacaggauc

SEQ ID NO: 2684488 - RNA, 19 nt, Artificial Sequence
  Description of Artificial Sequence: Synthetic oligonucleotide
ucucuauccagucaguagg

SEQ ID NO: 2684489 - RNA, 19 nt, Artificial Sequence
  Description of Artificial Sequence: Synthetic oligonucleotide
cauaucaccaaauaaggag

SEQ ID NO: 2684490 - RNA, 19 nt, Artificial Sequence
  Description of Artificial Sequence: Synthetic oligonucleotide
uuaucugggauucugauuc

SEQ ID NO: 2684491 - RNA, 19 nt, Artificial Sequence
  Description of Artificial Sequence: Synthetic oligonucleotide
gacaagauuguauaguccc

SEQ ID NO: 2684492 - RNA, 19 nt, Artificial Sequence
  Description of Artificial Sequence: Synthetic oligonucleotide
ugagaaaacagaaguagug

SEQ ID NO: 2684493 - RNA, 19 nt, Artificial Sequence
  Description of Artificial Sequence: Synthetic oligonucleotide
agaaaacagaaguaguggg

SEQ ID NO: 2684494 - RNA, 19 nt, Artificial Sequence
  Description of Artificial Sequence: Synthetic oligonucleotide
aaaguuaggacgcgucuac

SEQ ID NO: 2684495 - RNA, 19 nt, Artificial Sequence
  Description of Artificial Sequence: Synthetic oligonucleotide
cucauaucaccaaauaagg

SEQ ID NO: 2684496 - RNA, 19 nt, Artificial Sequence
  Description of Artificial Sequence: Synthetic oligonucleotide
uucacagccuuuauggagg

SEQ ID NO: 2684497 - RNA, 19 nt, Artificial Sequence
  Description of Artificial Sequence: Synthetic oligonucleotide
ucauucucuauccagucag

SEQ ID NO: 2684498 - RNA, 19 nt, Artificial Sequence
  Description of Artificial Sequence: Synthetic oligonucleotide
aaacagaaguagugggacc

SEQ ID NO: 2684499 - RNA, 19 nt, Artificial Sequence
  Description of Artificial Sequence: Synthetic oligonucleotide
aagacagccaaagagcuuc

SEQ ID NO: 2684500 - RNA, 19 nt, Artificial Sequence
  Description of Artificial Sequence: Synthetic oligonucleotide
aaccaggaaacucuuaucu

SEQ ID NO: 2684501 - RNA, 19 nt, Artificial Sequence
  Description of Artificial Sequence: Synthetic oligonucleotide
cacaggaucuucauuaugg

SEQ ID NO: 2684502 - RNA, 19 nt, Artificial Sequence
  Description of Artificial Sequence: Synthetic oligonucleotide
ggcacauaaaguuaggacg

SEQ ID NO: 2684503 - RNA, 19 nt, Artificial Sequence
  Description of Artificial Sequence: Synthetic oligonucleotide
auaucaccaaauaaggagc

SEQ ID NO: 2684504 - RNA, 19 nt, Artificial Sequence
  Description of Artificial Sequence: Synthetic oligonucleotide
ugcauucuaaguaucaaga

SEQ ID NO: 2684505 - RNA, 19 nt, Artificial Sequence
  Description of Artificial Sequence: Synthetic oligonucleotide
aacaaaacgauccucucau

SEQ ID NO: 2684506 - RNA, 19 nt, Artificial Sequence
  Description of Artificial Sequence: Synthetic oligonucleotide
uuauggaggcuccaaagag

SEQ ID NO: 2684507 - RNA, 19 nt, Artificial Sequence
  Description of Artificial Sequence: Synthetic oligonucleotide
uaaguaucaagacagccaa

SEQ ID NO: 2684508 - RNA, 19 nt, Artificial Sequence
  Description of Artificial Sequence: Synthetic oligonucleotide
cuggauucggaacagagcc

SEQ ID NO: 2684509 - RNA, 19 nt, Artificial Sequence
  Description of Artificial Sequence: Synthetic oligonucleotide
auggccaacaaaacgaucc

SEQ ID NO: 2684510 - RNA, 19 nt, Artificial Sequence
  Description of Artificial Sequence: Synthetic oligonucleotide
uggauggccaacaaaacga

SEQ ID NO: 2684511 - RNA, 19 nt, Artificial Sequence
  Description of Artificial Sequence: Synthetic oligonucleotide
uguaagcuauccacgaugc

SEQ ID NO: 2684512 - RNA, 19 nt, Artificial Sequence
  Description of Artificial Sequence: Synthetic oligonucleotide
ucuuguaacaguucucuca

SEQ ID NO: 2684513 - RNA, 19 nt, Artificial Sequence
  Description of Artificial Sequence: Synthetic oligonucleotide
auggagaaaugauggacgc

SEQ ID NO: 2684514 - RNA, 19 nt, Artificial Sequence
  Description of Artificial Sequence: Synthetic oligonucleotide
auuauggcggccaaggugg

SEQ ID NO: 2684515 - RNA, 19 nt, Artificial Sequence
  Description of Artificial Sequence: Synthetic oligonucleotide
uuucacagccuuuauggag

SEQ ID NO: 2684516 - RNA, 19 nt, Artificial Sequence
  Description of Artificial Sequence: Synthetic oligonucleotide
uuuauggaggcuccaaaga

SEQ ID NO: 2684517 - RNA, 19 nt, Artificial Sequence
  Description of Artificial Sequence: Synthetic oligonucleotide
uaagcuauccacgaugcag

SEQ ID NO: 2684518 - RNA, 19 nt, Artificial Sequence
  Description of Artificial Sequence: Synthetic oligonucleotide
uucauuauggcggccaagg

SEQ ID NO: 2684519 - RNA, 19 nt, Artificial Sequence
  Description of Artificial Sequence: Synthetic oligonucleotide
aaaacgauccucucauccu

SEQ ID NO: 2684520 - RNA, 19 nt, Artificial Sequence
  Description of Artificial Sequence: Synthetic oligonucleotide
agucauggagaaaugaugg

SEQ ID NO: 2684521 - RNA, 19 nt, Artificial Sequence
  Description of Artificial Sequence: Synthetic oligonucleotide
gauuguauaguccccucag

SEQ ID NO: 2684522 - RNA, 19 nt, Artificial Sequence
  Description of Artificial Sequence: Synthetic oligonucleotide
uuguauaguccccucagug

SEQ ID NO: 2684523 - RNA, 19 nt, Artificial Sequence
  Description of Artificial Sequence: Synthetic oligonucleotide
aaacucuuaucugggauuc

SEQ ID NO: 2684524 - RNA, 19 nt, Artificial Sequence
  Description of Artificial Sequence: Synthetic oligonucleotide
ucaagacagccaaagagcu

SEQ ID NO: 2684525 - RNA, 19 nt, Artificial Sequence
  Description of Artificial Sequence: Synthetic oligonucleotide
uguguuuugcauucuaagu

SEQ ID NO: 2684526 - RNA, 19 nt, Artificial Sequence
  Description of Artificial Sequence: Synthetic oligonucleotide
auccugagaaaacagaagu

SEQ ID NO: 2684527 - RNA, 19 nt, Artificial Sequence
  Description of Artificial Sequence: Synthetic oligonucleotide
uuuugcauucuaaguauca

SEQ ID NO: 2684528 - RNA, 19 nt, Artificial Sequence
  Description of Artificial Sequence: Synthetic oligonucleotide
caaaacgauccucucaucc

SEQ ID NO: 2684529 - RNA, 19 nt, Artificial Sequence
  Description of Artificial Sequence: Synthetic oligonucleotide
ugucuugacaagcugcagc

SEQ ID NO: 2684530 - RNA, 19 nt, Artificial Sequence
  Description of Artificial Sequence: Synthetic oligonucleotide
aggaacugggcacauaaag

SEQ ID NO: 2684531 - RNA, 19 nt, Artificial Sequence
  Description of Artificial Sequence: Synthetic oligonucleotide
aaugauggacgccucgucu

SEQ ID NO: 2684532 - RNA, 19 nt, Artificial Sequence
  Description of Artificial Sequence: Synthetic oligonucleotide
ucuaaguaucaagacagcc

SEQ ID NO: 2684533 - RNA, 19 nt, Artificial Sequence
  Description of Artificial Sequence: Synthetic oligonucleotide
aguaucaagacagccaaag

SEQ ID NO: 2684534 - RNA, 19 nt, Artificial Sequence
  Description of Artificial Sequence: Synthetic oligonucleotide
uucugauucauuccucacc

SEQ ID NO: 2684535 - RNA, 19 nt, Artificial Sequence
  Description of Artificial Sequence: Synthetic oligonucleotide
cuuguaacaguucucucag

SEQ ID NO: 2684536 - RNA, 19 nt, Artificial Sequence
  Description of Artificial Sequence: Synthetic oligonucleotide
ucuccuguaagcuauccac

SEQ ID NO: 2684537 - RNA, 19 nt, Artificial Sequence
  Description of Artificial Sequence: Synthetic oligonucleotide
aaaugauggacgccucguc

SEQ ID NO: 2684538 - RNA, 19 nt, Artificial Sequence
  Description of Artificial Sequence: Synthetic oligonucleotide
acuuuugaugucuucucuc

SEQ ID NO: 2684539 - RNA, 19 nt, Artificial Sequence
  Description of Artificial Sequence: Synthetic oligonucleotide
ucauaucaccaaauaagga

SEQ ID NO: 2684540 - RNA, 19 nt, Artificial Sequence
  Description of Artificial Sequence: Synthetic oligonucleotide
uugcauucuaaguaucaag

SEQ ID NO: 2684541 - RNA, 19 nt, Artificial Sequence
  Description of Artificial Sequence: Synthetic oligonucleotide
ucauccugagaaaacagaa

SEQ ID NO: 2684542 - RNA, 19 nt, Artificial Sequence
  Description of Artificial Sequence: Synthetic oligonucleotide
aagauuguauaguccccuc

SEQ ID NO: 2684543 - RNA, 19 nt, Artificial Sequence
  Description of Artificial Sequence: Synthetic oligonucleotide
cauacagccagucuuucag

SEQ ID NO: 2684544 - RNA, 19 nt, Artificial Sequence
  Description of Artificial Sequence: Synthetic oligonucleotide
caaugucuugacaagcugc

SEQ ID NO: 2684545 - RNA, 19 nt, Artificial Sequence
  Description of Artificial Sequence: Synthetic oligonucleotide
ucaaccaggaaacucuuau

SEQ ID NO: 2684546 - RNA, 19 nt, Artificial Sequence
  Description of Artificial Sequence: Synthetic oligonucleotide
cuuuauggaggcuccaaag

SEQ ID NO: 2684547 - RNA, 19 nt, Artificial Sequence
  Description of Artificial Sequence: Synthetic oligonucleotide
uccucaaccaggaaacucu

SEQ ID NO: 2684548 - RNA, 19 nt, Artificial Sequence
  Description of Artificial Sequence: Synthetic oligonucleotide
uguuuugcauucuaaguau

SEQ ID NO: 2684549 - RNA, 19 nt, Artificial Sequence
  Description of Artificial Sequence: Synthetic oligonucleotide
aaagagcuuccucaaccag

SEQ ID NO: 2684550 - RNA, 19 nt, Artificial Sequence
  Description of Artificial Sequence: Synthetic oligonucleotide
auguguuuugcauucuaag

SEQ ID NO: 2684551 - RNA, 19 nt, Artificial Sequence
  Description of Artificial Sequence: Synthetic oligonucleotide
aauaaggagcacaggaucu

SEQ ID NO: 2684552 - RNA, 19 nt, Artificial Sequence
  Description of Artificial Sequence: Synthetic oligonucleotide
ugucauccugagaaaacag

SEQ ID NO: 2684553 - RNA, 19 nt, Artificial Sequence
  Description of Artificial Sequence: Synthetic oligonucleotide
uucucuauccagucaguag

SEQ ID NO: 2684554 - RNA, 19 nt, Artificial Sequence
  Description of Artificial Sequence: Synthetic oligonucleotide
uaucaccaaauaaggagca

SEQ ID NO: 2684555 - RNA, 19 nt, Artificial Sequence
  Description of Artificial Sequence: Synthetic oligonucleotide
cuggauggccaacaaaacg

SEQ ID NO: 2684556 - RNA, 19 nt, Artificial Sequence
  Description of Artificial Sequence: Synthetic oligonucleotide
ucuggauucggaacagagc

SEQ ID NO: 2684557 - RNA, 19 nt, Artificial Sequence
  Description of Artificial Sequence: Synthetic oligonucleotide
uauggaggcuccaaagaga

SEQ ID NO: 2684558 - RNA, 19 nt, Artificial Sequence
  Description of Artificial Sequence: Synthetic oligonucleotide
cuaaguaucaagacagcca

SEQ ID NO: 2684559 - RNA, 19 nt, Artificial Sequence
  Description of Artificial Sequence: Synthetic oligonucleotide
aguuaggacgcgucuacuc

SEQ ID NO: 2684560 - RNA, 19 nt, Artificial Sequence
  Description of Artificial Sequence: Synthetic oligonucleotide
ucugacaagauuguauagu

SEQ ID NO: 2684561 - RNA, 19 nt, Artificial Sequence
  Description of Artificial Sequence: Synthetic oligonucleotide
auucugauucauuccucac

SEQ ID NO: 2684562 - RNA, 19 nt, Artificial Sequence
  Description of Artificial Sequence: Synthetic oligonucleotide
ucggaacagagccugggag

SEQ ID NO: 2684563 - RNA, 19 nt, Artificial Sequence
  Description of Artificial Sequence: Synthetic oligonucleotide
auaaaguuaggacgcgucu

SEQ ID NO: 2684564 - RNA, 19 nt, Artificial Sequence
  Description of Artificial Sequence: Synthetic oligonucleotide
ugucugacaagauuguaua

SEQ ID NO: 2684565 - RNA, 19 nt, Artificial Sequence
  Description of Artificial Sequence: Synthetic oligonucleotide
uccaaugucuugacaagcu

SEQ ID NO: 2684566 - RNA, 19 nt, Artificial Sequence
  Description of Artificial Sequence: Synthetic oligonucleotide
ugauucauuccucacccuc

SEQ ID NO: 2684567 - RNA, 19 nt, Artificial Sequence
  Description of Artificial Sequence: Synthetic oligonucleotide
ucauggagaaaugauggac

SEQ ID NO: 2684568 - RNA, 19 nt, Artificial Sequence
  Description of Artificial Sequence: Synthetic oligonucleotide
agaaguagugggaccaagc

SEQ ID NO: 2684569 - RNA, 19 nt, Artificial Sequence
  Description of Artificial Sequence: Synthetic oligonucleotide
gauucugauucauuccuca

SEQ ID NO: 2684570 - RNA, 19 nt, Artificial Sequence
  Description of Artificial Sequence: Synthetic oligonucleotide
agcuaugucaucauuguca

SEQ ID NO: 2684571 - RNA, 19 nt, Artificial Sequence
  Description of Artificial Sequence: Synthetic oligonucleotide
caggaucuucauuauggcg

SEQ ID NO: 2684572 - RNA, 19 nt, Artificial Sequence
  Description of Artificial Sequence: Synthetic oligonucleotide
caccaaauaaggagcacag

SEQ ID NO: 2684573 - RNA, 19 nt, Artificial Sequence
  Description of Artificial Sequence: Synthetic oligonucleotide
cauaaaguuaggacgcguc

SEQ ID NO: 2684574 - RNA, 19 nt, Artificial Sequence
  Description of Artificial Sequence: Synthetic oligonucleotide
caggaaacucuuaucuggg

SEQ ID NO: 2684575 - RNA, 19 nt, Artificial Sequence
  Description of Artificial Sequence: Synthetic oligonucleotide
aaugucuugacaagcugca

SEQ ID NO: 2684576 - RNA, 19 nt, Artificial Sequence
  Description of Artificial Sequence: Synthetic oligonucleotide
acagccuuuauggaggcuc

SEQ ID NO: 2684577 - RNA, 19 nt, Artificial Sequence
  Description of Artificial Sequence: Synthetic oligonucleotide
uacuuuugaugucuucucu

SEQ ID NO: 2684578 - RNA, 19 nt, Artificial Sequence
  Description of Artificial Sequence: Synthetic oligonucleotide
ucaccaaauaaggagcaca

SEQ ID NO: 2684579 - RNA, 19 nt, Artificial Sequence
  Description of Artificial Sequence: Synthetic oligonucleotide
cugggauucugauucauuc

SEQ ID NO: 2684580 - RNA, 19 nt, Artificial Sequence
  Description of Artificial Sequence: Synthetic oligonucleotide
ugggauucugauucauucc

SEQ ID NO: 2684581 - RNA, 19 nt, Artificial Sequence
  Description of Artificial Sequence: Synthetic oligonucleotide
ugacauguguuuugcauuc

SEQ ID NO: 2684582 - RNA, 19 nt, Artificial Sequence
  Description of Artificial Sequence: Synthetic oligonucleotide
aguccaaugucuugacaag

SEQ ID NO: 2684583 - RNA, 19 nt, Artificial Sequence
  Description of Artificial Sequence: Synthetic oligonucleotide
ucaggaucuuguaacaguu

SEQ ID NO: 2684584 - RNA, 19 nt, Artificial Sequence
  Description of Artificial Sequence: Synthetic oligonucleotide
gagucauggagaaaugaug

SEQ ID NO: 2684585 - RNA, 19 nt, Artificial Sequence
  Description of Artificial Sequence: Synthetic oligonucleotide
cauuauggcggccaaggug

SEQ ID NO: 2684586 - RNA, 19 nt, Artificial Sequence
  Description of Artificial Sequence: Synthetic oligonucleotide
cagucuuucaggcggacag

SEQ ID NO: 2684587 - RNA, 19 nt, Artificial Sequence
  Description of Artificial Sequence: Synthetic oligonucleotide
cauccugagaaaacagaag

SEQ ID NO: 2684588 - RNA, 19 nt, Artificial Sequence
  Description of Artificial Sequence: Synthetic oligonucleotide
gacgccucgucucauauca

SEQ ID NO: 2684589 - RNA, 19 nt, Artificial Sequence
  Description of Artificial Sequence: Synthetic oligonucleotide
gucaguaggaacugggcac

SEQ ID NO: 2684590 - RNA, 19 nt, Artificial Sequence
  Description of Artificial Sequence: Synthetic oligonucleotide
augauggacgccucgucuc

SEQ ID NO: 2684591 - RNA, 19 nt, Artificial Sequence
  Description of Artificial Sequence: Synthetic oligonucleotide
caagcuuuccaggacgugg

SEQ ID NO: 2684592 - RNA, 19 nt, Artificial Sequence
  Description of Artificial Sequence: Synthetic oligonucleotide
uaucguacuuuugaugucu

SEQ ID NO: 2684593 - RNA, 19 nt, Artificial Sequence
  Description of Artificial Sequence: Synthetic oligonucleotide
cuguaagcuauccacgaug

SEQ ID NO: 2684594 - RNA, 19 nt, Artificial Sequence
  Description of Artificial Sequence: Synthetic oligonucleotide
cucuggauucggaacagag

SEQ ID NO: 2684595 - RNA, 19 nt, Artificial Sequence
  Description of Artificial Sequence: Synthetic oligonucleotide
ccaggaaacucuuaucugg

SEQ ID NO: 2684596 - RNA, 19 nt, Artificial Sequence
  Description of Artificial Sequence: Synthetic oligonucleotide
uccuguaagcuauccacga

SEQ ID NO: 2684597 - RNA, 19 nt, Artificial Sequence
  Description of Artificial Sequence: Synthetic oligonucleotide
aucucuuggugucugacaa

SEQ ID NO: 2684598 - RNA, 19 nt, Artificial Sequence
  Description of Artificial Sequence: Synthetic oligonucleotide
ucuggauggccaacaaaac

SEQ ID NO: 2684599 - RNA, 19 nt, Artificial Sequence
  Description of Artificial Sequence: Synthetic oligonucleotide
guauaguccccucagugca

SEQ ID NO: 2684600 - RNA, 19 nt, Artificial Sequence
  Description of Artificial Sequence: Synthetic oligonucleotide
acucuccuuagcuauguca

SEQ ID NO: 2684601 - RNA, 19 nt, Artificial Sequence
  Description of Artificial Sequence: Synthetic oligonucleotide
gagcacaggaucuucauua

SEQ ID NO: 2684602 - RNA, 19 nt, Artificial Sequence
  Description of Artificial Sequence: Synthetic oligonucleotide
agugggaccaagcuuucca

SEQ ID NO: 2684603 - RNA, 19 nt, Artificial Sequence
  Description of Artificial Sequence: Synthetic oligonucleotide
cacacuucuuaucuguaug

SEQ ID NO: 2684604 - RNA, 19 nt, Artificial Sequence
  Description of Artificial Sequence: Synthetic oligonucleotide
auguuucacagccuuuaug

SEQ ID NO: 2684605 - RNA, 19 nt, Artificial Sequence
  Description of Artificial Sequence: Synthetic oligonucleotide
aaguagugggaccaagcuu

SEQ ID NO: 2684606 - RNA, 19 nt, Artificial Sequence
  Description of Artificial Sequence: Synthetic oligonucleotide
uucuuaucuguauguuuca

SEQ ID NO: 2684607 - RNA, 19 nt, Artificial Sequence
  Description of Artificial Sequence: Synthetic oligonucleotide
uccacgaugcaggguaucg

SEQ ID NO: 2684608 - RNA, 19 nt, Artificial Sequence
  Description of Artificial Sequence: Synthetic oligonucleotide
cuuuugaugucuucucuca

SEQ ID NO: 2684609 - RNA, 19 nt, Artificial Sequence
  Description of Artificial Sequence: Synthetic oligonucleotide
aguagugggaccaagcuuu

SEQ ID NO: 2684610 - RNA, 19 nt, Artificial Sequence
  Description of Artificial Sequence: Synthetic oligonucleotide
uccuucuccuguaagcuau

SEQ ID NO: 2684611 - RNA, 19 nt, Artificial Sequence
  Description of Artificial Sequence: Synthetic oligonucleotide
accaggaaacucuuaucug

SEQ ID NO: 2684612 - RNA, 19 nt, Artificial Sequence
  Description of Artificial Sequence: Synthetic oligonucleotide
gaggcgacgaugcgcagag

SEQ ID NO: 2684613 - RNA, 19 nt, Artificial Sequence
  Description of Artificial Sequence: Synthetic oligonucleotide
uuugcauucuaaguaucaa

SEQ ID NO: 2684614 - RNA, 19 nt, Artificial Sequence
  Description of Artificial Sequence: Synthetic oligonucleotide
ugggaggcgacgaugcgca

SEQ ID NO: 2684615 - RNA, 19 nt, Artificial Sequence
  Description of Artificial Sequence: Synthetic oligonucleotide
cuuaucuguauguuucaca

SEQ ID NO: 2684616 - RNA, 19 nt, Artificial Sequence
  Description of Artificial Sequence: Synthetic oligonucleotide
gucuucucucaucucuugg

SEQ ID NO: 2684617 - RNA, 19 nt, Artificial Sequence
  Description of Artificial Sequence: Synthetic oligonucleotide
agcuuccucaaccaggaaa

SEQ ID NO: 2684618 - RNA, 19 nt, Artificial Sequence
  Description of Artificial Sequence: Synthetic oligonucleotide
auuguauaguccccucagu

SEQ ID NO: 2684619 - RNA, 19 nt, Artificial Sequence
  Description of Artificial Sequence: Synthetic oligonucleotide
cucagugcaagaauccuga

SEQ ID NO: 2684620 - RNA, 19 nt, Artificial Sequence
  Description of Artificial Sequence: Synthetic oligonucleotide
acaaaacgauccucucauc

SEQ ID NO: 2684621 - RNA, 19 nt, Artificial Sequence
  Description of Artificial Sequence: Synthetic oligonucleotide
cagugcaagaauccugaag

SEQ ID NO: 2684622 - RNA, 19 nt, Artificial Sequence
  Description of Artificial Sequence: Synthetic oligonucleotide
ucuguauguuucacagccu

SEQ ID NO: 2684623 - RNA, 19 nt, Artificial Sequence
  Description of Artificial Sequence: Synthetic oligonucleotide
ucagcucauucucuaucca

SEQ ID NO: 2684624 - RNA, 19 nt, Artificial Sequence
  Description of Artificial Sequence: Synthetic oligonucleotide
ugaaguccaaugucuugac

SEQ ID NO: 2684625 - RNA, 19 nt, Artificial Sequence
  Description of Artificial Sequence: Synthetic oligonucleotide
auucauuccucacccucug

SEQ ID NO: 2684626 - RNA, 19 nt, Artificial Sequence
  Description of Artificial Sequence: Synthetic oligonucleotide
gucucauaucaccaaauaa

SEQ ID NO: 2684627 - RNA, 19 nt, Artificial Sequence
  Description of Artificial Sequence: Synthetic oligonucleotide
cuucucucaucucuuggug

SEQ ID NO: 2684628 - RNA, 19 nt, Artificial Sequence
  Description of Artificial Sequence: Synthetic oligonucleotide
uauguuucacagccuuuau

SEQ ID NO: 2684629 - RNA, 19 nt, Artificial Sequence
  Description of Artificial Sequence: Synthetic oligonucleotide
uucggaacagagccuggga

SEQ ID NO: 2684630 - RNA, 19 nt, Artificial Sequence
  Description of Artificial Sequence: Synthetic oligonucleotide
cagcucauucucuauccag

SEQ ID NO: 2684631 - RNA, 19 nt, Artificial Sequence
  Description of Artificial Sequence: Synthetic oligonucleotide
cagucaguaggaacugggc

SEQ ID NO: 2684632 - RNA, 19 nt, Artificial Sequence
  Description of Artificial Sequence: Synthetic oligonucleotide
ugucuucucucaucucuug

SEQ ID NO: 2684633 - RNA, 19 nt, Artificial Sequence
  Description of Artificial Sequence: Synthetic oligonucleotide
ucuuaucuguauguuucac

SEQ ID NO: 2684634 - RNA, 19 nt, Artificial Sequence
  Description of Artificial Sequence: Synthetic oligonucleotide
ucaguaggaacugggcaca

SEQ ID NO: 2684635 - RNA, 19 nt, Artificial Sequence
  Description of Artificial Sequence: Synthetic oligonucleotide
ucauuauggcggccaaggu

SEQ ID NO: 2684636 - RNA, 19 nt, Artificial Sequence
  Description of Artificial Sequence: Synthetic oligonucleotide
gcacauaaaguuaggacgc

SEQ ID NO: 2684637 - RNA, 19 nt, Artificial Sequence
  Description of Artificial Sequence: Synthetic oligonucleotide
cuauccacgaugcagggua

SEQ ID NO: 2684638 - RNA, 19 nt, Artificial Sequence
  Description of Artificial Sequence: Synthetic oligonucleotide
ugauggacgccucgucuca

SEQ ID NO: 2684639 - RNA, 19 nt, Artificial Sequence
  Description of Artificial Sequence: Synthetic oligonucleotide
uaggacgcgucuacucucc

SEQ ID NO: 2684640 - RNA, 19 nt, Artificial Sequence
  Description of Artificial Sequence: Synthetic oligonucleotide
caggguaucguacuuuuga

SEQ ID NO: 2684641 - RNA, 19 nt, Artificial Sequence
  Description of Artificial Sequence: Synthetic oligonucleotide
auucggaacagagccuggg

SEQ ID NO: 2684642 - RNA, 19 nt, Artificial Sequence
  Description of Artificial Sequence: Synthetic oligonucleotide
gacguggcucuccacacac

SEQ ID NO: 2684643 - RNA, 19 nt, Artificial Sequence
  Description of Artificial Sequence: Synthetic oligonucleotide
accaaauaaggagcacagg

SEQ ID NO: 2684644 - RNA, 19 nt, Artificial Sequence
  Description of Artificial Sequence: Synthetic oligonucleotide
caaagagagucauggagaa

SEQ ID NO: 2684645 - RNA, 19 nt, Artificial Sequence
  Description of Artificial Sequence: Synthetic oligonucleotide
gucuggauggccaacaaaa

SEQ ID NO: 2684646 - RNA, 19 nt, Artificial Sequence
  Description of Artificial Sequence: Synthetic oligonucleotide
aucaccaaauaaggagcac

SEQ ID NO: 2684647 - RNA, 19 nt, Artificial Sequence
  Description of Artificial Sequence: Synthetic oligonucleotide
uggccaacaaaacgauccu

SEQ ID NO: 2684648 - RNA, 19 nt, Artificial Sequence
  Description of Artificial Sequence: Synthetic oligonucleotide
ucucuuggugucugacaag

SEQ ID NO: 2684649 - RNA, 19 nt, Artificial Sequence
  Description of Artificial Sequence: Synthetic oligonucleotide
uuaggacgcgucuacucuc

SEQ ID NO: 2684650 - RNA, 19 nt, Artificial Sequence
  Description of Artificial Sequence: Synthetic oligonucleotide
acucuuaucugggauucug

SEQ ID NO: 2684651 - RNA, 19 nt, Artificial Sequence
  Description of Artificial Sequence: Synthetic oligonucleotide
uggugucugacaagauugu

SEQ ID NO: 2684652 - RNA, 19 nt, Artificial Sequence
  Description of Artificial Sequence: Synthetic oligonucleotide
ugggcacauaaaguuagga

SEQ ID NO: 2684653 - RNA, 19 nt, Artificial Sequence
  Description of Artificial Sequence: Synthetic oligonucleotide
uguauguuucacagccuuu

SEQ ID NO: 2684654 - RNA, 19 nt, Artificial Sequence
  Description of Artificial Sequence: Synthetic oligonucleotide
caaagagcuuccucaacca

SEQ ID NO: 2684655 - RNA, 19 nt, Artificial Sequence
  Description of Artificial Sequence: Synthetic oligonucleotide
acccucuggauucggaaca

SEQ ID NO: 2684656 - RNA, 19 nt, Artificial Sequence
  Description of Artificial Sequence: Synthetic oligonucleotide
caacaaaacgauccucuca

SEQ ID NO: 2684657 - RNA, 19 nt, Artificial Sequence
  Description of Artificial Sequence: Synthetic oligonucleotide
ggcgacgaugcgcagagag

SEQ ID NO: 2684658 - RNA, 19 nt, Artificial Sequence
  Description of Artificial Sequence: Synthetic oligonucleotide
cacauaaaguuaggacgcg

SEQ ID NO: 2684659 - RNA, 19 nt, Artificial Sequence
  Description of Artificial Sequence: Synthetic oligonucleotide
gagagucauggagaaauga

SEQ ID NO: 2684660 - RNA, 19 nt, Artificial Sequence
  Description of Artificial Sequence: Synthetic oligonucleotide
agagucauggagaaaugau

SEQ ID NO: 2684661 - RNA, 19 nt, Artificial Sequence
  Description of Artificial Sequence: Synthetic oligonucleotide
uccagucaguaggaacugg

SEQ ID NO: 2684662 - RNA, 19 nt, Artificial Sequence
  Description of Artificial Sequence: Synthetic oligonucleotide
gcauucuaaguaucaagac

SEQ ID NO: 2684663 - RNA, 19 nt, Artificial Sequence
  Description of Artificial Sequence: Synthetic oligonucleotide
uggagaaaugauggacgcc

SEQ ID NO: 2684664 - RNA, 19 nt, Artificial Sequence
  Description of Artificial Sequence: Synthetic oligonucleotide
ucuccacacacuucuuauc

SEQ ID NO: 2684665 - RNA, 19 nt, Artificial Sequence
  Description of Artificial Sequence: Synthetic oligonucleotide
aggguaucguacuuuugau

SEQ ID NO: 2684666 - RNA, 19 nt, Artificial Sequence
  Description of Artificial Sequence: Synthetic oligonucleotide
uuguaacaguucucucagc

SEQ ID NO: 2684667 - RNA, 19 nt, Artificial Sequence
  Description of Artificial Sequence: Synthetic oligonucleotide
aggaaacucuuaucuggga

SEQ ID NO: 2684668 - RNA, 19 nt, Artificial Sequence
  Description of Artificial Sequence: Synthetic oligonucleotide
ucugggauucugauucauu

SEQ ID NO: 2684669 - RNA, 19 nt, Artificial Sequence
  Description of Artificial Sequence: Synthetic oligonucleotide
cugggcacauaaaguuagg

SEQ ID NO: 2684670 - RNA, 19 nt, Artificial Sequence
  Description of Artificial Sequence: Synthetic oligonucleotide
caaccaggaaacucuuauc

SEQ ID NO: 2684671 - RNA, 19 nt, Artificial Sequence
  Description of Artificial Sequence: Synthetic oligonucleotide
ccagucaguaggaacuggg

SEQ ID NO: 2684672 - RNA, 19 nt, Artificial Sequence
  Description of Artificial Sequence: Synthetic oligonucleotide
gaaacucuuaucugggauu

SEQ ID NO: 2684673 - RNA, 19 nt, Artificial Sequence
  Description of Artificial Sequence: Synthetic oligonucleotide
gacaagcugcagcaguguc

SEQ ID NO: 2684674 - RNA, 19 nt, Artificial Sequence
  Description of Artificial Sequence: Synthetic oligonucleotide
guccaaugucuugacaagc

SEQ ID NO: 2684675 - RNA, 19 nt, Artificial Sequence
  Description of Artificial Sequence: Synthetic oligonucleotide
uauaguccccucagugcaa

SEQ ID NO: 2684676 - RNA, 19 nt, Artificial Sequence
  Description of Artificial Sequence: Synthetic oligonucleotide
ugcaggguaucguacuuuu

SEQ ID NO: 2684677 - RNA, 19 nt, Artificial Sequence
  Description of Artificial Sequence: Synthetic oligonucleotide
ucacccucuggauucggaa

SEQ ID NO: 2684678 - RNA, 19 nt, Artificial Sequence
  Description of Artificial Sequence: Synthetic oligonucleotide
acgaugcaggguaucguac

SEQ ID NO: 2684679 - RNA, 19 nt, Artificial Sequence
  Description of Artificial Sequence: Synthetic oligonucleotide
uggugaaguccaaugucuu

SEQ ID NO: 2684680 - RNA, 19 nt, Artificial Sequence
  Description of Artificial Sequence: Synthetic oligonucleotide
uccaggacguggcucucca

SEQ ID NO: 2684681 - RNA, 19 nt, Artificial Sequence
  Description of Artificial Sequence: Synthetic oligonucleotide
acauaaaguuaggacgcgu

SEQ ID NO: 2684682 - RNA, 19 nt, Artificial Sequence
  Description of Artificial Sequence: Synthetic oligonucleotide
uccugaagagcuuguucuc

SEQ ID NO: 2684683 - RNA, 19 nt, Artificial Sequence
  Description of Artificial Sequence: Synthetic oligonucleotide
gguggugaaguccaauguc

SEQ ID NO: 2684684 - RNA, 19 nt, Artificial Sequence
  Description of Artificial Sequence: Synthetic oligonucleotide
ucaucucuuggugucugac

SEQ ID NO: 2684685 - RNA, 19 nt, Artificial Sequence
  Description of Artificial Sequence: Synthetic oligonucleotide
gucauggagaaaugaugga

SEQ ID NO: 2684686 - RNA, 19 nt, Artificial Sequence
  Description of Artificial Sequence: Synthetic oligonucleotide
agcucauucucuauccagu

SEQ ID NO: 2684687 - RNA, 19 nt, Artificial Sequence
  Description of Artificial Sequence: Synthetic oligonucleotide
ggguaucguacuuuugaug

SEQ ID NO: 2684688 - RNA, 19 nt, Artificial Sequence
  Description of Artificial Sequence: Synthetic oligonucleotide
ccaaagagagucauggaga

SEQ ID NO: 2684689 - RNA, 19 nt, Artificial Sequence
  Description of Artificial Sequence: Synthetic oligonucleotide
cauguguuuugcauucuaa

SEQ ID NO: 2684690 - RNA, 19 nt, Artificial Sequence
  Description of Artificial Sequence: Synthetic oligonucleotide
cagccuuuauggaggcucc

SEQ ID NO: 2684691 - RNA, 19 nt, Artificial Sequence
  Description of Artificial Sequence: Synthetic oligonucleotide
uuccucaaccaggaaacuc

SEQ ID NO: 2684692 - RNA, 19 nt, Artificial Sequence
  Description of Artificial Sequence: Synthetic oligonucleotide
auuccucacccucuggauu

SEQ ID NO: 2684693 - RNA, 19 nt, Artificial Sequence
  Description of Artificial Sequence: Synthetic oligonucleotide
aaggagcacaggaucuuca

SEQ ID NO: 2684694 - RNA, 19 nt, Artificial Sequence
  Description of Artificial Sequence: Synthetic oligonucleotide
gacgcgucuacucuccuua

SEQ ID NO: 2684695 - RNA, 19 nt, Artificial Sequence
  Description of Artificial Sequence: Synthetic oligonucleotide
acauguguuuugcauucua

SEQ ID NO: 2684696 - RNA, 19 nt, Artificial Sequence
  Description of Artificial Sequence: Synthetic oligonucleotide
caaauaaggagcacaggau

SEQ ID NO: 2684697 - RNA, 19 nt, Artificial Sequence
  Description of Artificial Sequence: Synthetic oligonucleotide
gcaagaauccugaagagcu

SEQ ID NO: 2684698 - RNA, 19 nt, Artificial Sequence
  Description of Artificial Sequence: Synthetic oligonucleotide
aaguuaggacgcgucuacu

SEQ ID NO: 2684699 - RNA, 19 nt, Artificial Sequence
  Description of Artificial Sequence: Synthetic oligonucleotide
agcacaggaucuucauuau

SEQ ID NO: 2684700 - RNA, 19 nt, Artificial Sequence
  Description of Artificial Sequence: Synthetic oligonucleotide
agcagugucuggauggcca

SEQ ID NO: 2684701 - RNA, 19 nt, Artificial Sequence
  Description of Artificial Sequence: Synthetic oligonucleotide
agggcucaggaucuuguaa

SEQ ID NO: 2684702 - RNA, 19 nt, Artificial Sequence
  Description of Artificial Sequence: Synthetic oligonucleotide
cacccucuggauucggaac

SEQ ID NO: 2684703 - RNA, 19 nt, Artificial Sequence
  Description of Artificial Sequence: Synthetic oligonucleotide
guuaggacgcgucuacucu

SEQ ID NO: 2684704 - RNA, 19 nt, Artificial Sequence
  Description of Artificial Sequence: Synthetic oligonucleotide
cucuuggugucugacaaga

SEQ ID NO: 2684705 - RNA, 19 nt, Artificial Sequence
  Description of Artificial Sequence: Synthetic oligonucleotide
aaagagagucauggagaaa

SEQ ID NO: 2684706 - RNA, 19 nt, Artificial Sequence
  Description of Artificial Sequence: Synthetic oligonucleotide
ucucauccuucuccuguaa

SEQ ID NO: 2684707 - RNA, 19 nt, Artificial Sequence
  Description of Artificial Sequence: Synthetic oligonucleotide
acaagcugcagcagugucu

SEQ ID NO: 2684708 - RNA, 19 nt, Artificial Sequence
  Description of Artificial Sequence: Synthetic oligonucleotide
guauguuucacagccuuua

SEQ ID NO: 2684709 - RNA, 19 nt, Artificial Sequence
  Description of Artificial Sequence: Synthetic oligonucleotide
guuuugcauucuaaguauc

SEQ ID NO: 2684710 - RNA, 19 nt, Artificial Sequence
  Description of Artificial Sequence: Synthetic oligonucleotide
auaguccccucagugcaag

SEQ ID NO: 2684711 - RNA, 19 nt, Artificial Sequence
  Description of Artificial Sequence: Synthetic oligonucleotide
caggaucuuguaacaguuc

SEQ ID NO: 2684712 - RNA, 19 nt, Artificial Sequence
  Description of Artificial Sequence: Synthetic oligonucleotide
agccaaagagcuuccucaa

SEQ ID NO: 2684713 - RNA, 19 nt, Artificial Sequence
  Description of Artificial Sequence: Synthetic oligonucleotide
cucuuaucugggauucuga

SEQ ID NO: 2684714 - RNA, 19 nt, Artificial Sequence
  Description of Artificial Sequence: Synthetic oligonucleotide
ugcugacauguguuuugca

SEQ ID NO: 2684715 - RNA, 19 nt, Artificial Sequence
  Description of Artificial Sequence: Synthetic oligonucleotide
ucuuggugucugacaagau

SEQ ID NO: 2684716 - RNA, 19 nt, Artificial Sequence
  Description of Artificial Sequence: Synthetic oligonucleotide
uggacgccucgucucauau

SEQ ID NO: 2684717 - RNA, 19 nt, Artificial Sequence
  Description of Artificial Sequence: Synthetic oligonucleotide
cucauucucuauccaguca

SEQ ID NO: 2684718 - RNA, 19 nt, Artificial Sequence
  Description of Artificial Sequence: Synthetic oligonucleotide
ugcgcagagagggcucagg

SEQ ID NO: 2684719 - RNA, 19 nt, Artificial Sequence
  Description of Artificial Sequence: Synthetic oligonucleotide
cucuauccagucaguagga

SEQ ID NO: 2684720 - RNA, 19 nt, Artificial Sequence
  Description of Artificial Sequence: Synthetic oligonucleotide
auggcggccaaggugguga

SEQ ID NO: 2684721 - RNA, 19 nt, Artificial Sequence
  Description of Artificial Sequence: Synthetic oligonucleotide
ucguacuuuugaugucuuc

SEQ ID NO: 2684722 - RNA, 19 nt, Artificial Sequence
  Description of Artificial Sequence: Synthetic oligonucleotide
aggagcacaggaucuucau

SEQ ID NO: 2684723 - RNA, 19 nt, Artificial Sequence
  Description of Artificial Sequence: Synthetic oligonucleotide
gaaaugauggacgccucgu

SEQ ID NO: 2684724 - RNA, 19 nt, Artificial Sequence
  Description of Artificial Sequence: Synthetic oligonucleotide
ggagaaaugauggacgccu

SEQ ID NO: 2684725 - RNA, 19 nt, Artificial Sequence
  Description of Artificial Sequence: Synthetic oligonucleotide
cauugucauccugagaaaa

SEQ ID NO: 2684726 - RNA, 19 nt, Artificial Sequence
  Description of Artificial Sequence: Synthetic oligonucleotide
ugaugucuucucucaucuc

SEQ ID NO: 2684727 - RNA, 19 nt, Artificial Sequence
  Description of Artificial Sequence: Synthetic oligonucleotide
ucagugcaagaauccugaa

SEQ ID NO: 2684728 - RNA, 19 nt, Artificial Sequence
  Description of Artificial Sequence: Synthetic oligonucleotide
ugacaagcugcagcagugu

SEQ ID NO: 2684729 - RNA, 19 nt, Artificial Sequence
  Description of Artificial Sequence: Synthetic oligonucleotide
aacucuuaucugggauucu

SEQ ID NO: 2684730 - RNA, 19 nt, Artificial Sequence
  Description of Artificial Sequence: Synthetic oligonucleotide
cuugacaagcugcagcagu

SEQ ID NO: 2684731 - RNA, 19 nt, Artificial Sequence
  Description of Artificial Sequence: Synthetic oligonucleotide
caucucuuggugucugaca

SEQ ID NO: 2684732 - RNA, 19 nt, Artificial Sequence
  Description of Artificial Sequence: Synthetic oligonucleotide
gaacagagccugggaggcg

SEQ ID NO: 2684733 - RNA, 19 nt, Artificial Sequence
  Description of Artificial Sequence: Synthetic oligonucleotide
cagaaguagugggaccaag

SEQ ID NO: 2684734 - RNA, 19 nt, Artificial Sequence
  Description of Artificial Sequence: Synthetic oligonucleotide
cuuuccaggacguggcucu

SEQ ID NO: 2684735 - RNA, 19 nt, Artificial Sequence
  Description of Artificial Sequence: Synthetic oligonucleotide
acgauccucucauccuucu

SEQ ID NO: 2684736 - RNA, 19 nt, Artificial Sequence
  Description of Artificial Sequence: Synthetic oligonucleotide
gggaccaagcuuuccagga

SEQ ID NO: 2684737 - RNA, 19 nt, Artificial Sequence
  Description of Artificial Sequence: Synthetic oligonucleotide
gucuacucuccuuagcuau

SEQ ID NO: 2684738 - RNA, 19 nt, Artificial Sequence
  Description of Artificial Sequence: Synthetic oligonucleotide
auucucuauccagucagua

SEQ ID NO: 2684739 - RNA, 19 nt, Artificial Sequence
  Description of Artificial Sequence: Synthetic oligonucleotide
acgaugcgcagagagggcu

SEQ ID NO: 2684740 - RNA, 19 nt, Artificial Sequence
  Description of Artificial Sequence: Synthetic oligonucleotide
augucuugacaagcugcag

SEQ ID NO: 2684741 - RNA, 19 nt, Artificial Sequence
  Description of Artificial Sequence: Synthetic oligonucleotide
uauccacgaugcaggguau

SEQ ID NO: 2684742 - RNA, 19 nt, Artificial Sequence
  Description of Artificial Sequence: Synthetic oligonucleotide
caggacguggcucuccaca

SEQ ID NO: 2684743 - RNA, 19 nt, Artificial Sequence
  Description of Artificial Sequence: Synthetic oligonucleotide
agaauccugaagagcuugu

SEQ ID NO: 2684744 - RNA, 19 nt, Artificial Sequence
  Description of Artificial Sequence: Synthetic oligonucleotide
uacucuccuuagcuauguc

SEQ ID NO: 2684745 - RNA, 19 nt, Artificial Sequence
  Description of Artificial Sequence: Synthetic oligonucleotide
guggugaaguccaaugucu

SEQ ID NO: 2684746 - RNA, 19 nt, Artificial Sequence
  Description of Artificial Sequence: Synthetic oligonucleotide
uccucacccucuggauucg

SEQ ID NO: 2684747 - RNA, 19 nt, Artificial Sequence
  Description of Artificial Sequence: Synthetic oligonucleotide
uuauggcggccaagguggu

SEQ ID NO: 2684748 - RNA, 19 nt, Artificial Sequence
  Description of Artificial Sequence: Synthetic oligonucleotide
ccucagugcaagaauccug

SEQ ID NO: 2684749 - RNA, 19 nt, Artificial Sequence
  Description of Artificial Sequence: Synthetic oligonucleotide
aaguaucaagacagccaaa

SEQ ID NO: 2684750 - RNA, 19 nt, Artificial Sequence
  Description of Artificial Sequence: Synthetic oligonucleotide
acgcgucuacucuccuuag

SEQ ID NO: 2684751 - RNA, 19 nt, Artificial Sequence
  Description of Artificial Sequence: Synthetic oligonucleotide
gacgaugcgcagagagggc

SEQ ID NO: 2684752 - RNA, 19 nt, Artificial Sequence
  Description of Artificial Sequence: Synthetic oligonucleotide
cgacgaugcgcagagaggg

SEQ ID NO: 2684753 - RNA, 19 nt, Artificial Sequence
  Description of Artificial Sequence: Synthetic oligonucleotide
gcucauucucuauccaguc

SEQ ID NO: 2684754 - RNA, 19 nt, Artificial Sequence
  Description of Artificial Sequence: Synthetic oligonucleotide
agagccugggaggcgacga

SEQ ID NO: 2684755 - RNA, 19 nt, Artificial Sequence
  Description of Artificial Sequence: Synthetic oligonucleotide
agagggcucaggaucuugu

SEQ ID NO: 2684756 - RNA, 19 nt, Artificial Sequence
  Description of Artificial Sequence: Synthetic oligonucleotide
caucauugucauccugaga

SEQ ID NO: 2684757 - RNA, 19 nt, Artificial Sequence
  Description of Artificial Sequence: Synthetic oligonucleotide
gagagggcucaggaucuug

SEQ ID NO: 2684758 - RNA, 19 nt, Artificial Sequence
  Description of Artificial Sequence: Synthetic oligonucleotide
ccaacaaaacgauccucuc

SEQ ID NO: 2684759 - RNA, 19 nt, Artificial Sequence
  Description of Artificial Sequence: Synthetic oligonucleotide
cacgaugcaggguaucgua

SEQ ID NO: 2684760 - RNA, 19 nt, Artificial Sequence
  Description of Artificial Sequence: Synthetic oligonucleotide
uagugggaccaagcuuucc

SEQ ID NO: 2684761 - RNA, 19 nt, Artificial Sequence
  Description of Artificial Sequence: Synthetic oligonucleotide
ggaaacucuuaucugggau

SEQ ID NO: 2684762 - RNA, 19 nt, Artificial Sequence
  Description of Artificial Sequence: Synthetic oligonucleotide
caagauuguauaguccccu

SEQ ID NO: 2684763 - RNA, 19 nt, Artificial Sequence
  Description of Artificial Sequence: Synthetic oligonucleotide
auccacgaugcaggguauc

SEQ ID NO: 2684764 - RNA, 19 nt, Artificial Sequence
  Description of Artificial Sequence: Synthetic oligonucleotide
aguccccucagugcaagaa

SEQ ID NO: 2684765 - RNA, 19 nt, Artificial Sequence
  Description of Artificial Sequence: Synthetic oligonucleotide
agucuuucaggcggacagu

SEQ ID NO: 2684766 - RNA, 19 nt, Artificial Sequence
  Description of Artificial Sequence: Synthetic oligonucleotide
cugacauguguuuugcauu

SEQ ID NO: 2684767 - RNA, 19 nt, Artificial Sequence
  Description of Artificial Sequence: Synthetic oligonucleotide
ggaccaagcuuuccaggac

SEQ ID NO: 2684768 - RNA, 19 nt, Artificial Sequence
  Description of Artificial Sequence: Synthetic oligonucleotide
gugucugacaagauuguau

SEQ ID NO: 2684769 - RNA, 19 nt, Artificial Sequence
  Description of Artificial Sequence: Synthetic oligonucleotide
cuuaucugggauucugauu

SEQ ID NO: 2684770 - RNA, 19 nt, Artificial Sequence
  Description of Artificial Sequence: Synthetic oligonucleotide
uuccaggacguggcucucc

SEQ ID NO: 2684771 - RNA, 19 nt, Artificial Sequence
  Description of Artificial Sequence: Synthetic oligonucleotide
gaugcaggguaucguacuu

SEQ ID NO: 2684772 - RNA, 19 nt, Artificial Sequence
  Description of Artificial Sequence: Synthetic oligonucleotide
cauccuucuccuguaagcu

SEQ ID NO: 2684773 - RNA, 19 nt, Artificial Sequence
  Description of Artificial Sequence: Synthetic oligonucleotide
gccaagguggugaagucca

SEQ ID NO: 2684774 - RNA, 19 nt, Artificial Sequence
  Description of Artificial Sequence: Synthetic oligonucleotide
cagagagggcucaggaucu

SEQ ID NO: 2684775 - RNA, 19 nt, Artificial Sequence
  Description of Artificial Sequence: Synthetic oligonucleotide
cucuccacacacuucuuau

SEQ ID NO: 2684776 - RNA, 19 nt, Artificial Sequence
  Description of Artificial Sequence: Synthetic oligonucleotide
aucugggauucugauucau

SEQ ID NO: 2684777 - RNA, 19 nt, Artificial Sequence
  Description of Artificial Sequence: Synthetic oligonucleotide
uaguccccucagugcaaga

SEQ ID NO: 2684778 - RNA, 19 nt, Artificial Sequence
  Description of Artificial Sequence: Synthetic oligonucleotide
acagaaguagugggaccaa

SEQ ID NO: 2684779 - RNA, 19 nt, Artificial Sequence
  Description of Artificial Sequence: Synthetic oligonucleotide
gcgacgaugcgcagagagg

SEQ ID NO: 2684780 - RNA, 19 nt, Artificial Sequence
  Description of Artificial Sequence: Synthetic oligonucleotide
gccaacaaaacgauccucu

SEQ ID NO: 2684781 - RNA, 19 nt, Artificial Sequence
  Description of Artificial Sequence: Synthetic oligonucleotide
gagggcucaggaucuugua

SEQ ID NO: 2684782 - RNA, 19 nt, Artificial Sequence
  Description of Artificial Sequence: Synthetic oligonucleotide
gcgucuacucuccuuagcu

SEQ ID NO: 2684783 - RNA, 19 nt, Artificial Sequence
  Description of Artificial Sequence: Synthetic oligonucleotide
gccaaagagcuuccucaac

SEQ ID NO: 2684784 - RNA, 19 nt, Artificial Sequence
  Description of Artificial Sequence: Synthetic oligonucleotide
cucaucucuuggugucuga

SEQ ID NO: 2684785 - RNA, 19 nt, Artificial Sequence
  Description of Artificial Sequence: Synthetic oligonucleotide
cagcagugucuggauggcc

SEQ ID NO: 2684786 - RNA, 19 nt, Artificial Sequence
  Description of Artificial Sequence: Synthetic oligonucleotide
aggcuccaaagagagucau

SEQ ID NO: 2684787 - RNA, 19 nt, Artificial Sequence
  Description of Artificial Sequence: Synthetic oligonucleotide
aggacgcgucuacucuccu

SEQ ID NO: 2684788 - RNA, 19 nt, Artificial Sequence
  Description of Artificial Sequence: Synthetic oligonucleotide
cauucucuauccagucagu

SEQ ID NO: 2684789 - RNA, 19 nt, Artificial Sequence
  Description of Artificial Sequence: Synthetic oligonucleotide
cucaaccaggaaacucuua

SEQ ID NO: 2684790 - RNA, 19 nt, Artificial Sequence
  Description of Artificial Sequence: Synthetic oligonucleotide
augcaggguaucguacuuu

SEQ ID NO: 2684791 - RNA, 19 nt, Artificial Sequence
  Description of Artificial Sequence: Synthetic oligonucleotide
cagagccugggaggcgacg

SEQ ID NO: 2684792 - RNA, 19 nt, Artificial Sequence
  Description of Artificial Sequence: Synthetic oligonucleotide
cgccucgucucauaucacc

SEQ ID NO: 2684793 - RNA, 19 nt, Artificial Sequence
  Description of Artificial Sequence: Synthetic oligonucleotide
guagugggaccaagcuuuc

SEQ ID NO: 2684794 - RNA, 19 nt, Artificial Sequence
  Description of Artificial Sequence: Synthetic oligonucleotide
auggacgccucgucucaua

SEQ ID NO: 2684795 - RNA, 19 nt, Artificial Sequence
  Description of Artificial Sequence: Synthetic oligonucleotide
cauuccucacccucuggau

SEQ ID NO: 2684796 - RNA, 19 nt, Artificial Sequence
  Description of Artificial Sequence: Synthetic oligonucleotide
acgccucgucucauaucac

SEQ ID NO: 2684797 - RNA, 19 nt, Artificial Sequence
  Description of Artificial Sequence: Synthetic oligonucleotide
aucguacuuuugaugucuu

SEQ ID NO: 2684798 - RNA, 19 nt, Artificial Sequence
  Description of Artificial Sequence: Synthetic oligonucleotide
gacauguguuuugcauucu

SEQ ID NO: 2684799 - RNA, 19 nt, Artificial Sequence
  Description of Artificial Sequence: Synthetic oligonucleotide
gcagcagugucuggauggc

SEQ ID NO: 2684800 - RNA, 19 nt, Artificial Sequence
  Description of Artificial Sequence: Synthetic oligonucleotide
agccuuuauggaggcucca

SEQ ID NO: 2684801 - RNA, 19 nt, Artificial Sequence
  Description of Artificial Sequence: Synthetic oligonucleotide
gccucgucucauaucacca

SEQ ID NO: 2684802 - RNA, 19 nt, Artificial Sequence
  Description of Artificial Sequence: Synthetic oligonucleotide
ggccaacaaaacgauccuc

SEQ ID NO: 2684803 - RNA, 19 nt, Artificial Sequence
  Description of Artificial Sequence: Synthetic oligonucleotide
ccuuuauggaggcuccaaa

SEQ ID NO: 2684804 - RNA, 19 nt, Artificial Sequence
  Description of Artificial Sequence: Synthetic oligonucleotide
ggcuccaaagagagucaug

SEQ ID NO: 2684805 - RNA, 19 nt, Artificial Sequence
  Description of Artificial Sequence: Synthetic oligonucleotide
caagaauccugaagagcuu

SEQ ID NO: 2684806 - RNA, 19 nt, Artificial Sequence
  Description of Artificial Sequence: Synthetic oligonucleotide
cuacucuccuuagcuaugu

SEQ ID NO: 2684807 - RNA, 19 nt, Artificial Sequence
  Description of Artificial Sequence: Synthetic oligonucleotide
cugauucauuccucacccu

SEQ ID NO: 2684808 - RNA, 19 nt, Artificial Sequence
  Description of Artificial Sequence: Synthetic oligonucleotide
uggcggccaagguggugaa

SEQ ID NO: 2684809 - RNA, 19 nt, Artificial Sequence
  Description of Artificial Sequence: Synthetic oligonucleotide
ccugggaggcgacgaugcg

SEQ ID NO: 2684810 - RNA, 19 nt, Artificial Sequence
  Description of Artificial Sequence: Synthetic oligonucleotide
gcaggguaucguacuuuug

SEQ ID NO: 2684811 - RNA, 19 nt, Artificial Sequence
  Description of Artificial Sequence: Synthetic oligonucleotide
agccagucuuucaggcgga

SEQ ID NO: 2684812 - RNA, 19 nt, Artificial Sequence
  Description of Artificial Sequence: Synthetic oligonucleotide
ggugucugacaagauugua

SEQ ID NO: 2684813 - RNA, 19 nt, Artificial Sequence
  Description of Artificial Sequence: Synthetic oligonucleotide
cguacuuuugaugucuucu

SEQ ID NO: 2684814 - RNA, 19 nt, Artificial Sequence
  Description of Artificial Sequence: Synthetic oligonucleotide
caagacagccaaagagcuu

SEQ ID NO: 2684815 - RNA, 19 nt, Artificial Sequence
  Description of Artificial Sequence: Synthetic oligonucleotide
gacagccaaagagcuuccu

SEQ ID NO: 2684816 - RNA, 19 nt, Artificial Sequence
  Description of Artificial Sequence: Synthetic oligonucleotide
ggacgccucgucucauauc

SEQ ID NO: 2684817 - RNA, 19 nt, Artificial Sequence
  Description of Artificial Sequence: Synthetic oligonucleotide
ggaggcgacgaugcgcaga

SEQ ID NO: 2684818 - RNA, 19 nt, Artificial Sequence
  Description of Artificial Sequence: Synthetic oligonucleotide
ccuucuccuguaagcuauc

SEQ ID NO: 2684819 - RNA, 19 nt, Artificial Sequence
  Description of Artificial Sequence: Synthetic oligonucleotide
ccucucauccuucuccugu

SEQ ID NO: 2684820 - RNA, 19 nt, Artificial Sequence
  Description of Artificial Sequence: Synthetic oligonucleotide
cccucuggauucggaacag

SEQ ID NO: 2684821 - RNA, 19 nt, Artificial Sequence
  Description of Artificial Sequence: Synthetic oligonucleotide
cgcgucuacucuccuuagc

SEQ ID NO: 2684822 - RNA, 19 nt, Artificial Sequence
  Description of Artificial Sequence: Synthetic oligonucleotide
gcggccaagguggugaagu

SEQ ID NO: 2684823 - RNA, 19 nt, Artificial Sequence
  Description of Artificial Sequence: Synthetic oligonucleotide
ggauggccaacaaaacgau

SEQ ID NO: 2684824 - RNA, 19 nt, Artificial Sequence
  Description of Artificial Sequence: Synthetic oligonucleotide
ccucgucucauaucaccaa

SEQ ID NO: 2684825 - RNA, 19 nt, Artificial Sequence
  Description of Artificial Sequence: Synthetic oligonucleotide
cuuccucaaccaggaaacu

SEQ ID NO: 2684826 - RNA, 19 nt, Artificial Sequence
  Description of Artificial Sequence: Synthetic oligonucleotide
cgucucauaucaccaaaua

SEQ ID NO: 2684827 - RNA, 19 nt, Artificial Sequence
  Description of Artificial Sequence: Synthetic oligonucleotide
gccuuuauggaggcuccaa

SEQ ID NO: 2684828 - RNA, 19 nt, Artificial Sequence
  Description of Artificial Sequence: Synthetic oligonucleotide
ccaagcuuuccaggacgug

SEQ ID NO: 2684829 - RNA, 19 nt, Artificial Sequence
  Description of Artificial Sequence: Synthetic oligonucleotide
cucucaucucuuggugucu

SEQ ID NO: 2684830 - RNA, 19 nt, Artificial Sequence
  Description of Artificial Sequence: Synthetic oligonucleotide
caagguggugaaguccaau

SEQ ID NO: 2684831 - RNA, 19 nt, Artificial Sequence
  Description of Artificial Sequence: Synthetic oligonucleotide
gauggacgccucgucucau

SEQ ID NO: 2684832 - RNA, 19 nt, Artificial Sequence
  Description of Artificial Sequence: Synthetic oligonucleotide
gggaggcgacgaugcgcag

SEQ ID NO: 2684833 - RNA, 19 nt, Artificial Sequence
  Description of Artificial Sequence: Synthetic oligonucleotide
ccaggacguggcucuccac

SEQ ID NO: 2684834 - RNA, 19 nt, Artificial Sequence
  Description of Artificial Sequence: Synthetic oligonucleotide
cgucuacucuccuuagcua

SEQ ID NO: 2684835 - RNA, 19 nt, Artificial Sequence
  Description of Artificial Sequence: Synthetic oligonucleotide
ccucacccucuggauucgg

SEQ ID NO: 2684836 - RNA, 19 nt, Artificial Sequence
  Description of Artificial Sequence: Synthetic oligonucleotide
ccagucuuucaggcggaca

SEQ ID NO: 2684837 - RNA, 19 nt, Artificial Sequence
  Description of Artificial Sequence: Synthetic oligonucleotide
cgaugcaggguaucguacu

SEQ ID NO: 2684838 - RNA, 19 nt, Artificial Sequence
  Description of Artificial Sequence: Synthetic oligonucleotide
gccagucuuucaggcggac

SEQ ID NO: 2684839 - RNA, 19 nt, Artificial Sequence
  Description of Artificial Sequence: Synthetic oligonucleotide
ccuguaagcuauccacgau

SEQ ID NO: 2684840 - RNA, 19 nt, Artificial Sequence
  Description of Artificial Sequence: Synthetic oligonucleotide
gcuauccacgaugcagggu

SEQ ID NO: 2684841 - RNA, 19 nt, Artificial Sequence
  Description of Artificial Sequence: Synthetic oligonucleotide
ccaagguggugaaguccaa

SEQ ID NO: 2684842 - RNA, 19 nt, Artificial Sequence
  Description of Artificial Sequence: Synthetic oligonucleotide
aggcgacgaugcgcagaga

SEQ ID NO: 2684843 - RNA, 19 nt, Artificial Sequence
  Description of Artificial Sequence: Synthetic oligonucleotide
ggacgcgucuacucuccuu

SEQ ID NO: 2684844 - RNA, 19 nt, Artificial Sequence
  Description of Artificial Sequence: Synthetic oligonucleotide
ccucuggauucggaacaga

SEQ ID NO: 2684845 - RNA, 19 nt, Artificial Sequence
  Description of Artificial Sequence: Synthetic oligonucleotide
ccucaaccaggaaacucuu

SEQ ID NO: 2684846 - RNA, 19 nt, Artificial Sequence
  Description of Artificial Sequence: Synthetic oligonucleotide
cacagccuuuauggaggcu

SEQ ID NO: 2684847 - RNA, 19 nt, Artificial Sequence
  Description of Artificial Sequence: Synthetic oligonucleotide
cguggcucuccacacacuu

SEQ ID NO: 2684848 - RNA, 19 nt, Artificial Sequence
  Description of Artificial Sequence: Synthetic oligonucleotide
ccacgaugcaggguaucgu

SEQ ID NO: 2684849 - RNA, 19 nt, Artificial Sequence
  Description of Artificial Sequence: Synthetic oligonucleotide
ggcucuccacacacuucuu

SEQ ID NO: 2684850 - RNA, 19 nt, Artificial Sequence
  Description of Artificial Sequence: Synthetic oligonucleotide
ucaaauauaacacaggucc

SEQ ID NO: 2684851 - RNA, 19 nt, Artificial Sequence
  Description of Artificial Sequence: Synthetic oligonucleotide
uucauuuucaugcagaaag

SEQ ID NO: 2684852 - RNA, 19 nt, Artificial Sequence
  Description of Artificial Sequence: Synthetic oligonucleotide
aaaucuugcauuuauucuc

SEQ ID NO: 2684853 - RNA, 19 nt, Artificial Sequence
  Description of Artificial Sequence: Synthetic oligonucleotide
aaagcugcaaaucauguug

SEQ ID NO: 2684854 - RNA, 19 nt, Artificial Sequence
  Description of Artificial Sequence: Synthetic oligonucleotide
ugagaaauaaucuccaccc

SEQ ID NO: 2684855 - RNA, 19 nt, Artificial Sequence
  Description of Artificial Sequence: Synthetic oligonucleotide
uuuauucucacauuuggag

SEQ ID NO: 2684856 - RNA, 19 nt, Artificial Sequence
  Description of Artificial Sequence: Synthetic oligonucleotide
aauaauuccugacaauucu

SEQ ID NO: 2684857 - RNA, 19 nt, Artificial Sequence
  Description of Artificial Sequence: Synthetic oligonucleotide
auaggagaaaucauuaucc

SEQ ID NO: 2684858 - RNA, 19 nt, Artificial Sequence
  Description of Artificial Sequence: Synthetic oligonucleotide
uuucauuugggccucuugg

SEQ ID NO: 2684859 - RNA, 19 nt, Artificial Sequence
  Description of Artificial Sequence: Synthetic oligonucleotide
aaaaucuugcauuuauucu

SEQ ID NO: 2684860 - RNA, 19 nt, Artificial Sequence
  Description of Artificial Sequence: Synthetic oligonucleotide
aaaucauuauccuucauuu

SEQ ID NO: 2684861 - RNA, 19 nt, Artificial Sequence
  Description of Artificial Sequence: Synthetic oligonucleotide
uuauccuucauuuguagcc

SEQ ID NO: 2684862 - RNA, 19 nt, Artificial Sequence
  Description of Artificial Sequence: Synthetic oligonucleotide
aguuucuucauuguguggc

SEQ ID NO: 2684863 - RNA, 19 nt, Artificial Sequence
  Description of Artificial Sequence: Synthetic oligonucleotide
ucuucaaauauaacacagg

SEQ ID NO: 2684864 - RNA, 19 nt, Artificial Sequence
  Description of Artificial Sequence: Synthetic oligonucleotide
uuuguagccauucuacacc

SEQ ID NO: 2684865 - RNA, 19 nt, Artificial Sequence
  Description of Artificial Sequence: Synthetic oligonucleotide
aaucaauaauuccugacaa

SEQ ID NO: 2684866 - RNA, 19 nt, Artificial Sequence
  Description of Artificial Sequence: Synthetic oligonucleotide
uugagaaauaaucuccacc

SEQ ID NO: 2684867 - RNA, 19 nt, Artificial Sequence
  Description of Artificial Sequence: Synthetic oligonucleotide
auagcugucuacuugcagg

SEQ ID NO: 2684868 - RNA, 19 nt, Artificial Sequence
  Description of Artificial Sequence: Synthetic oligonucleotide
aaucauguugggucuauag

SEQ ID NO: 2684869 - RNA, 19 nt, Artificial Sequence
  Description of Artificial Sequence: Synthetic oligonucleotide
uuccccagcaaacacauag

SEQ ID NO: 2684870 - RNA, 19 nt, Artificial Sequence
  Description of Artificial Sequence: Synthetic oligonucleotide
cauuuauucucacauuugg

SEQ ID NO: 2684871 - RNA, 19 nt, Artificial Sequence
  Description of Artificial Sequence: Synthetic oligonucleotide
  modified_base (14)..(14): a, c, u, g, unknown or other
uguauuucagcacnguuuu

SEQ ID NO: 2684872 - RNA, 19 nt, Artificial Sequence
  Description of Artificial Sequence: Synthetic oligonucleotide
ugugcugccuuucauuugg

SEQ ID NO: 2684873 - RNA, 19 nt, Artificial Sequence
  Description of Artificial Sequence: Synthetic oligonucleotide
aacuccacggcuuucucgg

SEQ ID NO: 2684874 - RNA, 19 nt, Artificial Sequence
  Description of Artificial Sequence: Synthetic oligonucleotide
agucugaaucaauaauucc

SEQ ID NO: 2684875 - RNA, 19 nt, Artificial Sequence
  Description of Artificial Sequence: Synthetic oligonucleotide
uauaggagaaaucauuauc

SEQ ID NO: 2684876 - RNA, 19 nt, Artificial Sequence
  Description of Artificial Sequence: Synthetic oligonucleotide
  modified_base (9)..(9): a, c, u, g, unknown or other
uucagcacnguuuugucag

SEQ ID NO: 2684877 - RNA, 19 nt, Artificial Sequence
  Description of Artificial Sequence: Synthetic oligonucleotide
agaagaguccuugucaugc

SEQ ID NO: 2684878 - RNA, 19 nt, Artificial Sequence
  Description of Artificial Sequence: Synthetic oligonucleotide
aacagaacugcccaucuca

SEQ ID NO: 2684879 - RNA, 19 nt, Artificial Sequence
  Description of Artificial Sequence: Synthetic oligonucleotide
ucuacuugcaggaugggcu

SEQ ID NO: 2684880 - RNA, 19 nt, Artificial Sequence
  Description of Artificial Sequence: Synthetic oligonucleotide
auaaucuccacccugaauu

SEQ ID NO: 2684881 - RNA, 19 nt, Artificial Sequence
  Description of Artificial Sequence: Synthetic oligonucleotide
ugacaauucuaccaggaca

SEQ ID NO: 2684882 - RNA, 19 nt, Artificial Sequence
  Description of Artificial Sequence: Synthetic oligonucleotide
uuaaguuucaugacuggcu

SEQ ID NO: 2684883 - RNA, 19 nt, Artificial Sequence
  Description of Artificial Sequence: Synthetic oligonucleotide
ucauguugggucuauagga

SEQ ID NO: 2684884 - RNA, 19 nt, Artificial Sequence
  Description of Artificial Sequence: Synthetic oligonucleotide
aguaucuucauauucccca

SEQ ID NO: 2684885 - RNA, 19 nt, Artificial Sequence
  Description of Artificial Sequence: Synthetic oligonucleotide
aucauuauccuucauuugu

SEQ ID NO: 2684886 - RNA, 19 nt, Artificial Sequence
  Description of Artificial Sequence: Synthetic oligonucleotide
uggucuuccaacuccacgg

SEQ ID NO: 2684887 - RNA, 19 nt, Artificial Sequence
  Description of Artificial Sequence: Synthetic oligonucleotide
uguuuugagaaauaaucuc

SEQ ID NO: 2684888 - RNA, 19 nt, Artificial Sequence
  Description of Artificial Sequence: Synthetic oligonucleotide
aagucugaaucaauaauuc

SEQ ID NO: 2684889 - RNA, 19 nt, Artificial Sequence
  Description of Artificial Sequence: Synthetic oligonucleotide
gaaucaauaauuccugaca

SEQ ID NO: 2684890 - RNA, 19 nt, Artificial Sequence
  Description of Artificial Sequence: Synthetic oligonucleotide
uaaguuucaugacuggcug

SEQ ID NO: 2684891 - RNA, 19 nt, Artificial Sequence
  Description of Artificial Sequence: Synthetic oligonucleotide
uuuuaaguuucaugacugg

SEQ ID NO: 2684892 - RNA, 19 nt, Artificial Sequence
  Description of Artificial Sequence: Synthetic oligonucleotide
ucuauaggagaaaucauua

SEQ ID NO: 2684893 - RNA, 19 nt, Artificial Sequence
  Description of Artificial Sequence: Synthetic oligonucleotide
guuuugagaaauaaucucc

SEQ ID NO: 2684894 - RNA, 19 nt, Artificial Sequence
  Description of Artificial Sequence: Synthetic oligonucleotide
ugcagaaagcugcaaauca

SEQ ID NO: 2684895 - RNA, 19 nt, Artificial Sequence
  Description of Artificial Sequence: Synthetic oligonucleotide
aauucuaccaggacaaacu

SEQ ID NO: 2684896 - RNA, 19 nt, Artificial Sequence
  Description of Artificial Sequence: Synthetic oligonucleotide
agaaauaaucuccacccug

SEQ ID NO: 2684897 - RNA, 19 nt, Artificial Sequence
  Description of Artificial Sequence: Synthetic oligonucleotide
uuauucucacauuuggaga

SEQ ID NO: 2684898 - RNA, 19 nt, Artificial Sequence
  Description of Artificial Sequence: Synthetic oligonucleotide
ugugucaauucccaaaauc

SEQ ID NO: 2684899 - RNA, 19 nt, Artificial Sequence
  Description of Artificial Sequence: Synthetic oligonucleotide
aaucauuauccuucauuug

SEQ ID NO: 2684900 - RNA, 19 nt, Artificial Sequence
  Description of Artificial Sequence: Synthetic oligonucleotide
aucauguugggucuauagg

SEQ ID NO: 2684901 - RNA, 19 nt, Artificial Sequence
  Description of Artificial Sequence: Synthetic oligonucleotide
accaucuauguuuucuucg

SEQ ID NO: 2684902 - RNA, 19 nt, Artificial Sequence
  Description of Artificial Sequence: Synthetic oligonucleotide
ugaaucaauaauuccugac

SEQ ID NO: 2684903 - RNA, 19 nt, Artificial Sequence
  Description of Artificial Sequence: Synthetic oligonucleotide
uucuacaccaucuauguuu

SEQ ID NO: 2684904 - RNA, 19 nt, Artificial Sequence
  Description of Artificial Sequence: Synthetic oligonucleotide
ugaguuucuucauugugug

SEQ ID NO: 2684905 - RNA, 19 nt, Artificial Sequence
  Description of Artificial Sequence: Synthetic oligonucleotide
cauggaaacagaacugccc

SEQ ID NO: 2684906 - RNA, 19 nt, Artificial Sequence
  Description of Artificial Sequence: Synthetic oligonucleotide
uuuaaguuucaugacuggc

SEQ ID NO: 2684907 - RNA, 19 nt, Artificial Sequence
  Description of Artificial Sequence: Synthetic oligonucleotide
cauuuggagagaaagucug

SEQ ID NO: 2684908 - RNA, 19 nt, Artificial Sequence
  Description of Artificial Sequence: Synthetic oligonucleotide
uaauuccugacaauucuac

SEQ ID NO: 2684909 - RNA, 19 nt, Artificial Sequence
  Description of Artificial Sequence: Synthetic oligonucleotide
uguggcauuuguauuucag

SEQ ID NO: 2684910 - RNA, 19 nt, Artificial Sequence
  Description of Artificial Sequence: Synthetic oligonucleotide
aaagucugaaucaauaauu

SEQ ID NO: 2684911 - RNA, 19 nt, Artificial Sequence
  Description of Artificial Sequence: Synthetic oligonucleotide
  modified_base (16)..(16): a, c, u, g, unknown or other
uuuguauuucagcacnguu

SEQ ID NO: 2684912 - RNA, 19 nt, Artificial Sequence
  Description of Artificial Sequence: Synthetic oligonucleotide
agaacugcccaucucagca

SEQ ID NO: 2684913 - RNA, 19 nt, Artificial Sequence
  Description of Artificial Sequence: Synthetic oligonucleotide
cuucuuuucugucagaaga

SEQ ID NO: 2684914 - RNA, 19 nt, Artificial Sequence
  Description of Artificial Sequence: Synthetic oligonucleotide
ucaauaauuccugacaauu

SEQ ID NO: 2684915 - RNA, 19 nt, Artificial Sequence
  Description of Artificial Sequence: Synthetic oligonucleotide
  modified_base (10)..(10): a, c, u, g, unknown or other
uuucagcacnguuuuguca

SEQ ID NO: 2684916 - RNA, 19 nt, Artificial Sequence
  Description of Artificial Sequence: Synthetic oligonucleotide
cugucuacuugcaggaugg

SEQ ID NO: 2684917 - RNA, 19 nt, Artificial Sequence
  Description of Artificial Sequence: Synthetic oligonucleotide
aaacacauagcugucuacu

SEQ ID NO: 2684918 - RNA, 19 nt, Artificial Sequence
  Description of Artificial Sequence: Synthetic oligonucleotide
aauucccaaaaucuugcau

SEQ ID NO: 2684919 - RNA, 19 nt, Artificial Sequence
  Description of Artificial Sequence: Synthetic oligonucleotide
  modified_base (15)..(15): a, c, u, g, unknown or other
uuguauuucagcacnguuu

SEQ ID NO: 2684920 - RNA, 19 nt, Artificial Sequence
  Description of Artificial Sequence: Synthetic oligonucleotide
caaauauaacacagguccc

SEQ ID NO: 2684921 - RNA, 19 nt, Artificial Sequence
  Description of Artificial Sequence: Synthetic oligonucleotide
uuuugucagucccuuccgg

SEQ ID NO: 2684922 - RNA, 19 nt, Artificial Sequence
  Description of Artificial Sequence: Synthetic oligonucleotide
  modified_base (12)..(12): a, c, u, g, unknown or other
uauuucagcacnguuuugu

SEQ ID NO: 2684923 - RNA, 19 nt, Artificial Sequence
  Description of Artificial Sequence: Synthetic oligonucleotide
  modified_base (6)..(6): a, c, u, g, unknown or other
agcacnguuuugucagucc

SEQ ID NO: 2684924 - RNA, 19 nt, Artificial Sequence
  Description of Artificial Sequence: Synthetic oligonucleotide
acguucaacaccuucuuca

SEQ ID NO: 2684925 - RNA, 19 nt, Artificial Sequence
  Description of Artificial Sequence: Synthetic oligonucleotide
  modified_base (11)..(11): a, c, u, g, unknown or other
auuucagcacnguuuuguc

SEQ ID NO: 2684926 - RNA, 19 nt, Artificial Sequence
  Description of Artificial Sequence: Synthetic oligonucleotide
aaacagaacugcccaucuc

SEQ ID NO: 2684927 - RNA, 19 nt, Artificial Sequence
  Description of Artificial Sequence: Synthetic oligonucleotide
uucauuguguggcauuugu

SEQ ID NO: 2684928 - RNA, 19 nt, Artificial Sequence
  Description of Artificial Sequence: Synthetic oligonucleotide
auggaaacagaacugccca

SEQ ID NO: 2684929 - RNA, 19 nt, Artificial Sequence
  Description of Artificial Sequence: Synthetic oligonucleotide
aacugcccaucucagcagg

SEQ ID NO: 2684930 - RNA, 19 nt, Artificial Sequence
  Description of Artificial Sequence: Synthetic oligonucleotide
uucucugugucaauuccca

SEQ ID NO: 2684931 - RNA, 19 nt, Artificial Sequence
  Description of Artificial Sequence: Synthetic oligonucleotide
aauaaucuccacccugaau

SEQ ID NO: 2684932 - RNA, 19 nt, Artificial Sequence
  Description of Artificial Sequence: Synthetic oligonucleotide
agaaagucugaaucaauaa

SEQ ID NO: 2684933 - RNA, 19 nt, Artificial Sequence
  Description of Artificial Sequence: Synthetic oligonucleotide
cauguugggucuauaggag

SEQ ID NO: 2684934 - RNA, 19 nt, Artificial Sequence
  Description of Artificial Sequence: Synthetic oligonucleotide
uuuucuucgccuuccuucu

SEQ ID NO: 2684935 - RNA, 19 nt, Artificial Sequence
  Description of Artificial Sequence: Synthetic oligonucleotide
caauaauuccugacaauuc

SEQ ID NO: 2684936 - RNA, 19 nt, Artificial Sequence
  Description of Artificial Sequence: Synthetic oligonucleotide
uuugagaaauaaucuccac

SEQ ID NO: 2684937 - RNA, 19 nt, Artificial Sequence
  Description of Artificial Sequence: Synthetic oligonucleotide
ugcaaaucauguugggucu

SEQ ID NO: 2684938 - RNA, 19 nt, Artificial Sequence
  Description of Artificial Sequence: Synthetic oligonucleotide
ucaugcagaaagcugcaaa

SEQ ID NO: 2684939 - RNA, 19 nt, Artificial Sequence
  Description of Artificial Sequence: Synthetic oligonucleotide
uaacacaggucccaagagu

SEQ ID NO: 2684940 - RNA, 19 nt, Artificial Sequence
  Description of Artificial Sequence: Synthetic oligonucleotide
aucuauguuuucuucgccu

SEQ ID NO: 2684941 - RNA, 19 nt, Artificial Sequence
  Description of Artificial Sequence: Synthetic oligonucleotide
uauuccccagcaaacacau

SEQ ID NO: 2684942 - RNA, 19 nt, Artificial Sequence
  Description of Artificial Sequence: Synthetic oligonucleotide
aagcugcaaaucauguugg

SEQ ID NO: 2684943 - RNA, 19 nt, Artificial Sequence
  Description of Artificial Sequence: Synthetic oligonucleotide
ugacuggcuguuuugagaa

SEQ ID NO: 2684944 - RNA, 19 nt, Artificial Sequence
  Description of Artificial Sequence: Synthetic oligonucleotide
agggacaucuccaagagga

SEQ ID NO: 2684945 - RNA, 19 nt, Artificial Sequence
  Description of Artificial Sequence: Synthetic oligonucleotide
uguugggucuauaggagaa

SEQ ID NO: 2684946 - RNA, 19 nt, Artificial Sequence
  Description of Artificial Sequence: Synthetic oligonucleotide
gaaauaaucuccacccuga

SEQ ID NO: 2684947 - RNA, 19 nt, Artificial Sequence
  Description of Artificial Sequence: Synthetic oligonucleotide
cacauuuggagagaaaguc

SEQ ID NO: 2684948 - RNA, 19 nt, Artificial Sequence
  Description of Artificial Sequence: Synthetic oligonucleotide
aaucuugcauuuauucuca

SEQ ID NO: 2684949 - RNA, 19 nt, Artificial Sequence
  Description of Artificial Sequence: Synthetic oligonucleotide
uaggagaaaucauuauccu

SEQ ID NO: 2684950 - RNA, 19 nt, Artificial Sequence
  Description of Artificial Sequence: Synthetic oligonucleotide
uggcgcuacagcuucaucu

SEQ ID NO: 2684951 - RNA, 19 nt, Artificial Sequence
  Description of Artificial Sequence: Synthetic oligonucleotide
ucagaagaguccuugucau

SEQ ID NO: 2684952 - RNA, 19 nt, Artificial Sequence
  Description of Artificial Sequence: Synthetic oligonucleotide
ucugucagaagaguccuug

SEQ ID NO: 2684953 - RNA, 19 nt, Artificial Sequence
  Description of Artificial Sequence: Synthetic oligonucleotide
uagccauucuacaccaucu

SEQ ID NO: 2684954 - RNA, 19 nt, Artificial Sequence
  Description of Artificial Sequence: Synthetic oligonucleotide
ugucaauucccaaaaucuu

SEQ ID NO: 2684955 - RNA, 19 nt, Artificial Sequence
  Description of Artificial Sequence: Synthetic oligonucleotide
gacaauucuaccaggacaa

SEQ ID NO: 2684956 - RNA, 19 nt, Artificial Sequence
  Description of Artificial Sequence: Synthetic oligonucleotide
ggagaaaucauuauccuuc

SEQ ID NO: 2684957 - RNA, 19 nt, Artificial Sequence
  Description of Artificial Sequence: Synthetic oligonucleotide
uuugucagucccuuccgga

SEQ ID NO: 2684958 - RNA, 19 nt, Artificial Sequence
  Description of Artificial Sequence: Synthetic oligonucleotide
uacaccaucuauguuuucu

SEQ ID NO: 2684959 - RNA, 19 nt, Artificial Sequence
  Description of Artificial Sequence: Synthetic oligonucleotide
gauccacacguucaacacc

SEQ ID NO: 2684960 - RNA, 19 nt, Artificial Sequence
  Description of Artificial Sequence: Synthetic oligonucleotide
guaucuucauauuccccag

SEQ ID NO: 2684961 - RNA, 19 nt, Artificial Sequence
  Description of Artificial Sequence: Synthetic oligonucleotide
guuuugucagucccuuccg

SEQ ID NO: 2684962 - RNA, 19 nt, Artificial Sequence
  Description of Artificial Sequence: Synthetic oligonucleotide
ucauuauccuucauuugua

SEQ ID NO: 2684963 - RNA, 19 nt, Artificial Sequence
  Description of Artificial Sequence: Synthetic oligonucleotide
  modified_base (18)..(18): a, c, u, g, unknown or other
cauuuguauuucagcacng

SEQ ID NO: 2684964 - RNA, 19 nt, Artificial Sequence
  Description of Artificial Sequence: Synthetic oligonucleotide
cagaaagcugcaaaucaug

SEQ ID NO: 2684965 - RNA, 19 nt, Artificial Sequence
  Description of Artificial Sequence: Synthetic oligonucleotide
ucuacaccaucuauguuuu

SEQ ID NO: 2684966 - RNA, 19 nt, Artificial Sequence
  Description of Artificial Sequence: Synthetic oligonucleotide
cauauuccccagcaaacac

SEQ ID NO: 2684967 - RNA, 19 nt, Artificial Sequence
  Description of Artificial Sequence: Synthetic oligonucleotide
ucauauuccccagcaaaca

SEQ ID NO: 2684968 - RNA, 19 nt, Artificial Sequence
  Description of Artificial Sequence: Synthetic oligonucleotide
uucauuugggccucuuggu

SEQ ID NO: 2684969 - RNA, 19 nt, Artificial Sequence
  Description of Artificial Sequence: Synthetic oligonucleotide
uucaugacuggcuguuuug

SEQ ID NO: 2684970 - RNA, 19 nt, Artificial Sequence
  Description of Artificial Sequence: Synthetic oligonucleotide
gaguuucuucauugugugg

SEQ ID NO: 2684971 - RNA, 19 nt, Artificial Sequence
  Description of Artificial Sequence: Synthetic oligonucleotide
aacacauagcugucuacuu

SEQ ID NO: 2684972 - RNA, 19 nt, Artificial Sequence
  Description of Artificial Sequence: Synthetic oligonucleotide
ugucagaagaguccuuguc

SEQ ID NO: 2684973 - RNA, 19 nt, Artificial Sequence
  Description of Artificial Sequence: Synthetic oligonucleotide
aaauaaucuccacccugaa

SEQ ID NO: 2684974 - RNA, 19 nt, Artificial Sequence
  Description of Artificial Sequence: Synthetic oligonucleotide
uccugacaauucuaccagg

SEQ ID NO: 2684975 - RNA, 19 nt, Artificial Sequence
  Description of Artificial Sequence: Synthetic oligonucleotide
uuucugucagaagaguccu

SEQ ID NO: 2684976 - RNA, 19 nt, Artificial Sequence
  Description of Artificial Sequence: Synthetic oligonucleotide
ucauuugggccucuugguc

SEQ ID NO: 2684977 - RNA, 19 nt, Artificial Sequence
  Description of Artificial Sequence: Synthetic oligonucleotide
gaaaucauuauccuucauu

SEQ ID NO: 2684978 - RNA, 19 nt, Artificial Sequence
  Description of Artificial Sequence: Synthetic oligonucleotide
gagaaaucauuauccuuca

SEQ ID NO: 2684979 - RNA, 19 nt, Artificial Sequence
  Description of Artificial Sequence: Synthetic oligonucleotide
aacacaggucccaagagua

SEQ ID NO: 2684980 - RNA, 19 nt, Artificial Sequence
  Description of Artificial Sequence: Synthetic oligonucleotide
aaguuucaugacuggcugu

SEQ ID NO: 2684981 - RNA, 19 nt, Artificial Sequence
  Description of Artificial Sequence: Synthetic oligonucleotide
uuuggagagaaagucugaa

SEQ ID NO: 2684982 - RNA, 19 nt, Artificial Sequence
  Description of Artificial Sequence: Synthetic oligonucleotide
augacuggcuguuuugaga

SEQ ID NO: 2684983 - RNA, 19 nt, Artificial Sequence
  Description of Artificial Sequence: Synthetic oligonucleotide
uauccuucauuuguagcca

SEQ ID NO: 2684984 - RNA, 19 nt, Artificial Sequence
  Description of Artificial Sequence: Synthetic oligonucleotide
cuucauauuccccagcaaa

SEQ ID NO: 2684985 - RNA, 19 nt, Artificial Sequence
  Description of Artificial Sequence: Synthetic oligonucleotide
uagcugucuacuugcagga

SEQ ID NO: 2684986 - RNA, 19 nt, Artificial Sequence
  Description of Artificial Sequence: Synthetic oligonucleotide
ucucagcagggacaucucc

SEQ ID NO: 2684987 - RNA, 19 nt, Artificial Sequence
  Description of Artificial Sequence: Synthetic oligonucleotide
uuucaugacuggcuguuuu

SEQ ID NO: 2684988 - RNA, 19 nt, Artificial Sequence
  Description of Artificial Sequence: Synthetic oligonucleotide
aucuccacccugaauuccc

SEQ ID NO: 2684989 - RNA, 19 nt, Artificial Sequence
  Description of Artificial Sequence: Synthetic oligonucleotide
uuccggauccacacguuca

SEQ ID NO: 2684990 - RNA, 19 nt, Artificial Sequence
  Description of Artificial Sequence: Synthetic oligonucleotide
aucaauaauuccugacaau

SEQ ID NO: 2684991 - RNA, 19 nt, Artificial Sequence
  Description of Artificial Sequence: Synthetic oligonucleotide
auuuauucucacauuugga

SEQ ID NO: 2684992 - RNA, 19 nt, Artificial Sequence
  Description of Artificial Sequence: Synthetic oligonucleotide
augcagaaagcugcaaauc

SEQ ID NO: 2684993 - RNA, 19 nt, Artificial Sequence
  Description of Artificial Sequence: Synthetic oligonucleotide
aauucccauggaaacagaa

SEQ ID NO: 2684994 - RNA, 19 nt, Artificial Sequence
  Description of Artificial Sequence: Synthetic oligonucleotide
gacaucuccaagaggacca

SEQ ID NO: 2684995 - RNA, 19 nt, Artificial Sequence
  Description of Artificial Sequence: Synthetic oligonucleotide
agcugcaaaucauguuggg

SEQ ID NO: 2684996 - RNA, 19 nt, Artificial Sequence
  Description of Artificial Sequence: Synthetic oligonucleotide
ucuuccaacuccacggcuu

SEQ ID NO: 2684997 - RNA, 19 nt, Artificial Sequence
  Description of Artificial Sequence: Synthetic oligonucleotide
caucuauguuuucuucgcc

SEQ ID NO: 2684998 - RNA, 19 nt, Artificial Sequence
  Description of Artificial Sequence: Synthetic oligonucleotide
ggagagaaagucugaauca

SEQ ID NO: 2684999 - RNA, 19 nt, Artificial Sequence
  Description of Artificial Sequence: Synthetic oligonucleotide
aacaccuucuucaaauaua

SEQ ID NO: 2685000 - RNA, 19 nt, Artificial Sequence
  Description of Artificial Sequence: Synthetic oligonucleotide
auuguguggcauuuguauu

SEQ ID NO: 2685001 - RNA, 19 nt, Artificial Sequence
  Description of Artificial Sequence: Synthetic oligonucleotide
agaaagcugcaaaucaugu

SEQ ID NO: 2685002 - RNA, 19 nt, Artificial Sequence
  Description of Artificial Sequence: Synthetic oligonucleotide
  modified_base (19)..(19): a, c, u, g, unknown or other
gcauuuguauuucagcacn

SEQ ID NO: 2685003 - RNA, 19 nt, Artificial Sequence
  Description of Artificial Sequence: Synthetic oligonucleotide
aggagaaaucauuauccuu

SEQ ID NO: 2685004 - RNA, 19 nt, Artificial Sequence
  Description of Artificial Sequence: Synthetic oligonucleotide
caaacacauagcugucuac

SEQ ID NO: 2685005 - RNA, 19 nt, Artificial Sequence
  Description of Artificial Sequence: Synthetic oligonucleotide
uccccagcaaacacauagc

SEQ ID NO: 2685006 - RNA, 19 nt, Artificial Sequence
  Description of Artificial Sequence: Synthetic oligonucleotide
gagaaagucugaaucaaua

SEQ ID NO: 2685007 - RNA, 19 nt, Artificial Sequence
  Description of Artificial Sequence: Synthetic oligonucleotide
gucugaaucaauaauuccu

SEQ ID NO: 2685008 - RNA, 19 nt, Artificial Sequence
  Description of Artificial Sequence: Synthetic oligonucleotide
cuccaagaggaccaggguc

SEQ ID NO: 2685009 - RNA, 19 nt, Artificial Sequence
  Description of Artificial Sequence: Synthetic oligonucleotide
cugacaauucuaccaggac

SEQ ID NO: 2685010 - RNA, 19 nt, Artificial Sequence
  Description of Artificial Sequence: Synthetic oligonucleotide
ccugaauucccauggaaac

SEQ ID NO: 2685011 - RNA, 19 nt, Artificial Sequence
  Description of Artificial Sequence: Synthetic oligonucleotide
caauucuaccaggacaaac

SEQ ID NO: 2685012 - RNA, 19 nt, Artificial Sequence
  Description of Artificial Sequence: Synthetic oligonucleotide
gggucuauaggagaaauca

SEQ ID NO: 2685013 - RNA, 19 nt, Artificial Sequence
  Description of Artificial Sequence: Synthetic oligonucleotide
guagccauucuacaccauc

SEQ ID NO: 2685014 - RNA, 19 nt, Artificial Sequence
  Description of Artificial Sequence: Synthetic oligonucleotide
cauagcugucuacuugcag

SEQ ID NO: 2685015 - RNA, 19 nt, Artificial Sequence
  Description of Artificial Sequence: Synthetic oligonucleotide
aucuugcauuuauucucac

SEQ ID NO: 2685016 - RNA, 19 nt, Artificial Sequence
  Description of Artificial Sequence: Synthetic oligonucleotide
aagaggaccaggguccccu

SEQ ID NO: 2685017 - RNA, 19 nt, Artificial Sequence
  Description of Artificial Sequence: Synthetic oligonucleotide
gaguccuugucaugcugag

SEQ ID NO: 2685018 - RNA, 19 nt, Artificial Sequence
  Description of Artificial Sequence: Synthetic oligonucleotide
uuggagagaaagucugaau

SEQ ID NO: 2685019 - RNA, 19 nt, Artificial Sequence
  Description of Artificial Sequence: Synthetic oligonucleotide
ucaugacuggcuguuuuga

SEQ ID NO: 2685020 - RNA, 19 nt, Artificial Sequence
  Description of Artificial Sequence: Synthetic oligonucleotide
auguugggucuauaggaga

SEQ ID NO: 2685021 - RNA, 19 nt, Artificial Sequence
  Description of Artificial Sequence: Synthetic oligonucleotide
aggucccaagaguaucuuc

SEQ ID NO: 2685022 - RNA, 19 nt, Artificial Sequence
  Description of Artificial Sequence: Synthetic oligonucleotide
ucauuguguggcauuugua

SEQ ID NO: 2685023 - RNA, 19 nt, Artificial Sequence
  Description of Artificial Sequence: Synthetic oligonucleotide
ucaacaccuucuucaaaua

SEQ ID NO: 2685024 - RNA, 19 nt, Artificial Sequence
  Description of Artificial Sequence: Synthetic oligonucleotide
  modified_base (17)..(17): a, c, u, g, unknown or other
auuuguauuucagcacngu

SEQ ID NO: 2685025 - RNA, 19 nt, Artificial Sequence
  Description of Artificial Sequence: Synthetic oligonucleotide
auccacacguucaacaccu

SEQ ID NO: 2685026 - RNA, 19 nt, Artificial Sequence
  Description of Artificial Sequence: Synthetic oligonucleotide
caggacaaacugcuccucc

SEQ ID NO: 2685027 - RNA, 19 nt, Artificial Sequence
  Description of Artificial Sequence: Synthetic oligonucleotide
ccaucuauguuuucuucgc

SEQ ID NO: 2685028 - RNA, 19 nt, Artificial Sequence
  Description of Artificial Sequence: Synthetic oligonucleotide
ccauucuacaccaucuaug

SEQ ID NO: 2685029 - RNA, 19 nt, Artificial Sequence
  Description of Artificial Sequence: Synthetic oligonucleotide
ugucagucccuuccggauc

SEQ ID NO: 2685030 - RNA, 19 nt, Artificial Sequence
  Description of Artificial Sequence: Synthetic oligonucleotide
ugggucuauaggagaaauc

SEQ ID NO: 2685031 - RNA, 19 nt, Artificial Sequence
  Description of Artificial Sequence: Synthetic oligonucleotide
gaaacagaacugcccaucu

SEQ ID NO: 2685032 - RNA, 19 nt, Artificial Sequence
  Description of Artificial Sequence: Synthetic oligonucleotide
ucuucauuguguggcauuu

SEQ ID NO: 2685033 - RNA, 19 nt, Artificial Sequence
  Description of Artificial Sequence: Synthetic oligonucleotide
cugaguuucuucauugugu

SEQ ID NO: 2685034 - RNA, 19 nt, Artificial Sequence
  Description of Artificial Sequence: Synthetic oligonucleotide
cugaaucaauaauuccuga

SEQ ID NO: 2685035 - RNA, 19 nt, Artificial Sequence
  Description of Artificial Sequence: Synthetic oligonucleotide
uugucagucccuuccggau

SEQ ID NO: 2685036 - RNA, 19 nt, Artificial Sequence
  Description of Artificial Sequence: Synthetic oligonucleotide
auauuccccagcaaacaca

SEQ ID NO: 2685037 - RNA, 19 nt, Artificial Sequence
  Description of Artificial Sequence: Synthetic oligonucleotide
  modified_base (5)..(5): a, c, u, g, unknown or other
gcacnguuuugucaguccc

SEQ ID NO: 2685038 - RNA, 19 nt, Artificial Sequence
  Description of Artificial Sequence: Synthetic oligonucleotide
cauuguguggcauuuguau

SEQ ID NO: 2685039 - RNA, 19 nt, Artificial Sequence
  Description of Artificial Sequence: Synthetic oligonucleotide
guuucuucauuguguggca

SEQ ID NO: 2685040 - RNA, 19 nt, Artificial Sequence
  Description of Artificial Sequence: Synthetic oligonucleotide
uugggucuauaggagaaau

SEQ ID NO: 2685041 - RNA, 19 nt, Artificial Sequence
  Description of Artificial Sequence: Synthetic oligonucleotide
acuggcuguuuugagaaau

SEQ ID NO: 2685042 - RNA, 19 nt, Artificial Sequence
  Description of Artificial Sequence: Synthetic oligonucleotide
ucccuuccggauccacacg

SEQ ID NO: 2685043 - RNA, 19 nt, Artificial Sequence
  Description of Artificial Sequence: Synthetic oligonucleotide
uccggauccacacguucaa

SEQ ID NO: 2685044 - RNA, 19 nt, Artificial Sequence
  Description of Artificial Sequence: Synthetic oligonucleotide
ggauccacacguucaacac

SEQ ID NO: 2685045 - RNA, 19 nt, Artificial Sequence
  Description of Artificial Sequence: Synthetic oligonucleotide
cagaacugcccaucucagc

SEQ ID NO: 2685046 - RNA, 19 nt, Artificial Sequence
  Description of Artificial Sequence: Synthetic oligonucleotide
uggcuguuuugagaaauaa

SEQ ID NO: 2685047 - RNA, 19 nt, Artificial Sequence
  Description of Artificial Sequence: Synthetic oligonucleotide
gucccuuccggauccacac

SEQ ID NO: 2685048 - RNA, 19 nt, Artificial Sequence
  Description of Artificial Sequence: Synthetic oligonucleotide
ccagcaaacacauagcugu

SEQ ID NO: 2685049 - RNA, 19 nt, Artificial Sequence
  Description of Artificial Sequence: Synthetic oligonucleotide
uccaacuccacggcuuucu

SEQ ID NO: 2685050 - RNA, 19 nt, Artificial Sequence
  Description of Artificial Sequence: Synthetic oligonucleotide
aguuucaugacuggcuguu

SEQ ID NO: 2685051 - RNA, 19 nt, Artificial Sequence
  Description of Artificial Sequence: Synthetic oligonucleotide
ucucacauuuggagagaaa

SEQ ID NO: 2685052 - RNA, 19 nt, Artificial Sequence
  Description of Artificial Sequence: Synthetic oligonucleotide
acagaacugcccaucucag

SEQ ID NO: 2685053 - RNA, 19 nt, Artificial Sequence
  Description of Artificial Sequence: Synthetic oligonucleotide
caccaucuauguuuucuuc

SEQ ID NO: 2685054 - RNA, 19 nt, Artificial Sequence
  Description of Artificial Sequence: Synthetic oligonucleotide
uucuucgccuuccuucuuu

SEQ ID NO: 2685055 - RNA, 19 nt, Artificial Sequence
  Description of Artificial Sequence: Synthetic oligonucleotide
uucucacauuuggagagaa

SEQ ID NO: 2685056 - RNA, 19 nt, Artificial Sequence
  Description of Artificial Sequence: Synthetic oligonucleotide
gucuacuugcaggaugggc

SEQ ID NO: 2685057 - RNA, 19 nt, Artificial Sequence
  Description of Artificial Sequence: Synthetic oligonucleotide
agcaaacacauagcugucu

SEQ ID NO: 2685058 - RNA, 19 nt, Artificial Sequence
  Description of Artificial Sequence: Synthetic oligonucleotide
gagaaauaaucuccacccu

SEQ ID NO: 2685059 - RNA, 19 nt, Artificial Sequence
  Description of Artificial Sequence: Synthetic oligonucleotide
cuuccggauccacacguuc

SEQ ID NO: 2685060 - RNA, 19 nt, Artificial Sequence
  Description of Artificial Sequence: Synthetic oligonucleotide
cuccacggcuuucucgggg

SEQ ID NO: 2685061 - RNA, 19 nt, Artificial Sequence
  Description of Artificial Sequence: Synthetic oligonucleotide
agaguccuugucaugcuga

SEQ ID NO: 2685062 - RNA, 19 nt, Artificial Sequence
  Description of Artificial Sequence: Synthetic oligonucleotide
ugucuacuugcaggauggg

SEQ ID NO: 2685063 - RNA, 19 nt, Artificial Sequence
  Description of Artificial Sequence: Synthetic oligonucleotide
acacguucaacaccuucuu

SEQ ID NO: 2685064 - RNA, 19 nt, Artificial Sequence
  Description of Artificial Sequence: Synthetic oligonucleotide
acccugaauucccauggaa

SEQ ID NO: 2685065 - RNA, 19 nt, Artificial Sequence
  Description of Artificial Sequence: Synthetic oligonucleotide
cagggacaucuccaagagg

SEQ ID NO: 2685066 - RNA, 19 nt, Artificial Sequence
  Description of Artificial Sequence: Synthetic oligonucleotide
guacugcacucucuccugc

SEQ ID NO: 2685067 - RNA, 19 nt, Artificial Sequence
  Description of Artificial Sequence: Synthetic oligonucleotide
  modified_base (3)..(3): a, c, u, g, unknown or other
acnguuuugucagucccuu

SEQ ID NO: 2685068 - RNA, 19 nt, Artificial Sequence
  Description of Artificial Sequence: Synthetic oligonucleotide
  modified_base (8)..(8): a, c, u, g, unknown or other
ucagcacnguuuugucagu

SEQ ID NO: 2685069 - RNA, 19 nt, Artificial Sequence
  Description of Artificial Sequence: Synthetic oligonucleotide
ugcacucucuccugcucgu

SEQ ID NO: 2685070 - RNA, 19 nt, Artificial Sequence
  Description of Artificial Sequence: Synthetic oligonucleotide
gcauuuauucucacauuug

SEQ ID NO: 2685071 - RNA, 19 nt, Artificial Sequence
  Description of Artificial Sequence: Synthetic oligonucleotide
cuuggucuuccaacuccac

SEQ ID NO: 2685072 - RNA, 19 nt, Artificial Sequence
  Description of Artificial Sequence: Synthetic oligonucleotide
caauucccaaaaucuugca

SEQ ID NO: 2685073 - RNA, 19 nt, Artificial Sequence
  Description of Artificial Sequence: Synthetic oligonucleotide
cacacguucaacaccuucu

SEQ ID NO: 2685074 - RNA, 19 nt, Artificial Sequence
  Description of Artificial Sequence: Synthetic oligonucleotide
aggaccaggguccccugcu

SEQ ID NO: 2685075 - RNA, 19 nt, Artificial Sequence
  Description of Artificial Sequence: Synthetic oligonucleotide
caugcagaaagcugcaaau

SEQ ID NO: 2685076 - RNA, 19 nt, Artificial Sequence
  Description of Artificial Sequence: Synthetic oligonucleotide
gaaagcugcaaaucauguu

SEQ ID NO: 2685077 - RNA, 19 nt, Artificial Sequence
  Description of Artificial Sequence: Synthetic oligonucleotide
ggacaucuccaagaggacc

SEQ ID NO: 2685078 - RNA, 19 nt, Artificial Sequence
  Description of Artificial Sequence: Synthetic oligonucleotide
agagaaagucugaaucaau

SEQ ID NO: 2685079 - RNA, 19 nt, Artificial Sequence
  Description of Artificial Sequence: Synthetic oligonucleotide
acaggucccaagaguaucu

SEQ ID NO: 2685080 - RNA, 19 nt, Artificial Sequence
  Description of Artificial Sequence: Synthetic oligonucleotide
cauuugggccucuuggucu

SEQ ID NO: 2685081 - RNA, 19 nt, Artificial Sequence
  Description of Artificial Sequence: Synthetic oligonucleotide
caccuucuucaaauauaac

SEQ ID NO: 2685082 - RNA, 19 nt, Artificial Sequence
  Description of Artificial Sequence: Synthetic oligonucleotide
auucuacaccaucuauguu

SEQ ID NO: 2685083 - RNA, 19 nt, Artificial Sequence
  Description of Artificial Sequence: Synthetic oligonucleotide
acuccacggcuuucucggg

SEQ ID NO: 2685084 - RNA, 19 nt, Artificial Sequence
  Description of Artificial Sequence: Synthetic oligonucleotide
cacaggucccaagaguauc

SEQ ID NO: 2685085 - RNA, 19 nt, Artificial Sequence
  Description of Artificial Sequence: Synthetic oligonucleotide
  modified_base (13)..(13): a, c, u, g, unknown or other
guauuucagcacnguuuug

SEQ ID NO: 2685086 - RNA, 19 nt, Artificial Sequence
  Description of Artificial Sequence: Synthetic oligonucleotide
aaaucauguugggucuaua

SEQ ID NO: 2685087 - RNA, 19 nt, Artificial Sequence
  Description of Artificial Sequence: Synthetic oligonucleotide
cagcaaacacauagcuguc

SEQ ID NO: 2685088 - RNA, 19 nt, Artificial Sequence
  Description of Artificial Sequence: Synthetic oligonucleotide
gaugggcuucucuguguca

SEQ ID NO: 2685089 - RNA, 19 nt, Artificial Sequence
  Description of Artificial Sequence: Synthetic oligonucleotide
cugugcugccuuucauuug

SEQ ID NO: 2685090 - RNA, 19 nt, Artificial Sequence
  Description of Artificial Sequence: Synthetic oligonucleotide
uccuucauuuguagccauu

SEQ ID NO: 2685091 - RNA, 19 nt, Artificial Sequence
  Description of Artificial Sequence: Synthetic oligonucleotide
agccauucuacaccaucua

SEQ ID NO: 2685092 - RNA, 19 nt, Artificial Sequence
  Description of Artificial Sequence: Synthetic oligonucleotide
auucucacauuuggagaga

SEQ ID NO: 2685093 - RNA, 19 nt, Artificial Sequence
  Description of Artificial Sequence: Synthetic oligonucleotide
cacguucaacaccuucuuc

SEQ ID NO: 2685094 - RNA, 19 nt, Artificial Sequence
  Description of Artificial Sequence: Synthetic oligonucleotide
ggaaacagaacugcccauc

SEQ ID NO: 2685095 - RNA, 19 nt, Artificial Sequence
  Description of Artificial Sequence: Synthetic oligonucleotide
uguagccauucuacaccau

SEQ ID NO: 2685096 - RNA, 19 nt, Artificial Sequence
  Description of Artificial Sequence: Synthetic oligonucleotide
augggcuucucugugucaa

SEQ ID NO: 2685097 - RNA, 19 nt, Artificial Sequence
  Description of Artificial Sequence: Synthetic oligonucleotide
auccuucauuuguagccau

SEQ ID NO: 2685098 - RNA, 19 nt, Artificial Sequence
  Description of Artificial Sequence: Synthetic oligonucleotide
gucuauaggagaaaucauu

SEQ ID NO: 2685099 - RNA, 19 nt, Artificial Sequence
  Description of Artificial Sequence: Synthetic oligonucleotide
caucucagcagggacaucu

SEQ ID NO: 2685100 - RNA, 19 nt, Artificial Sequence
  Description of Artificial Sequence: Synthetic oligonucleotide
  modified_base (7)..(7): a, c, u, g, unknown or other
cagcacnguuuugucaguc

SEQ ID NO: 2685101 - RNA, 19 nt, Artificial Sequence
  Description of Artificial Sequence: Synthetic oligonucleotide
gaggaccaggguccccugc

SEQ ID NO: 2685102 - RNA, 19 nt, Artificial Sequence
  Description of Artificial Sequence: Synthetic oligonucleotide
cccagcaaacacauagcug

SEQ ID NO: 2685103 - RNA, 19 nt, Artificial Sequence
  Description of Artificial Sequence: Synthetic oligonucleotide
gaagaguccuugucaugcu

SEQ ID NO: 2685104 - RNA, 19 nt, Artificial Sequence
  Description of Artificial Sequence: Synthetic oligonucleotide
cuucauuguguggcauuug

SEQ ID NO: 2685105 - RNA, 19 nt, Artificial Sequence
  Description of Artificial Sequence: Synthetic oligonucleotide
gaccaggguccccugcuuc

SEQ ID NO: 2685106 - RNA, 19 nt, Artificial Sequence
  Description of Artificial Sequence: Synthetic oligonucleotide
acuugcaggaugggcuucu

SEQ ID NO: 2685107 - RNA, 19 nt, Artificial Sequence
  Description of Artificial Sequence: Synthetic oligonucleotide
aucucagcagggacaucuc

SEQ ID NO: 2685108 - RNA, 19 nt, Artificial Sequence
  Description of Artificial Sequence: Synthetic oligonucleotide
  modified_base (2)..(2): a, c, u, g, unknown or other
cnguuuugucagucccuuc

SEQ ID NO: 2685109 - RNA, 19 nt, Artificial Sequence
  Description of Artificial Sequence: Synthetic oligonucleotide
acugcccaucucagcaggg

SEQ ID NO: 2685110 - RNA, 19 nt, Artificial Sequence
  Description of Artificial Sequence: Synthetic oligonucleotide
uucugucagaagaguccuu

SEQ ID NO: 2685111 - RNA, 19 nt, Artificial Sequence
  Description of Artificial Sequence: Synthetic oligonucleotide
gugugucugcucugugcug

SEQ ID NO: 2685112 - RNA, 19 nt, Artificial Sequence
  Description of Artificial Sequence: Synthetic oligonucleotide
ggacaaacugcuccuccuc

SEQ ID NO: 2685113 - RNA, 19 nt, Artificial Sequence
  Description of Artificial Sequence: Synthetic oligonucleotide
gcaaacacauagcugucua

SEQ ID NO: 2685114 - RNA, 19 nt, Artificial Sequence
  Description of Artificial Sequence: Synthetic oligonucleotide
uccugcucgugugucugcu

SEQ ID NO: 2685115 - RNA, 19 nt, Artificial Sequence
  Description of Artificial Sequence: Synthetic oligonucleotide
gcuuccagguacugcacuc

SEQ ID NO: 2685116 - RNA, 19 nt, Artificial Sequence
  Description of Artificial Sequence: Synthetic oligonucleotide
  modified_base (4)..(4): a, c, u, g, unknown or other
cacnguuuugucagucccu

SEQ ID NO: 2685117 - RNA, 19 nt, Artificial Sequence
  Description of Artificial Sequence: Synthetic oligonucleotide
uugggccucuuggucuucc

SEQ ID NO: 2685118 - RNA, 19 nt, Artificial Sequence
  Description of Artificial Sequence: Synthetic oligonucleotide
acauagcugucuacuugca

SEQ ID NO: 2685119 - RNA, 19 nt, Artificial Sequence
  Description of Artificial Sequence: Synthetic oligonucleotide
cuucgccuuccuucuuuuc

SEQ ID NO: 2685120 - RNA, 19 nt, Artificial Sequence
  Description of Artificial Sequence: Synthetic oligonucleotide
uuucuucgccuuccuucuu

SEQ ID NO: 2685121 - RNA, 19 nt, Artificial Sequence
  Description of Artificial Sequence: Synthetic oligonucleotide
gugucugcucugugcugcc

SEQ ID NO: 2685122 - RNA, 19 nt, Artificial Sequence
  Description of Artificial Sequence: Synthetic oligonucleotide
ucccaaaaucuugcauuua

SEQ ID NO: 2685123 - RNA, 19 nt, Artificial Sequence
  Description of Artificial Sequence: Synthetic oligonucleotide
agucccuuccggauccaca

SEQ ID NO: 2685124 - RNA, 19 nt, Artificial Sequence
  Description of Artificial Sequence: Synthetic oligonucleotide
cucgugugucugcucugug

SEQ ID NO: 2685125 - RNA, 19 nt, Artificial Sequence
  Description of Artificial Sequence: Synthetic oligonucleotide
aguccuugucaugcugagu

SEQ ID NO: 2685126 - RNA, 19 nt, Artificial Sequence
  Description of Artificial Sequence: Synthetic oligonucleotide
ugccuuucauuugggccuc

SEQ ID NO: 2685127 - RNA, 19 nt, Artificial Sequence
  Description of Artificial Sequence: Synthetic oligonucleotide
cuccugcucgugugucugc

SEQ ID NO: 2685128 - RNA, 19 nt, Artificial Sequence
  Description of Artificial Sequence: Synthetic oligonucleotide
acaauucuaccaggacaaa

SEQ ID NO: 2685129 - RNA, 19 nt, Artificial Sequence
  Description of Artificial Sequence: Synthetic oligonucleotide
ugggccucuuggucuucca

SEQ ID NO: 2685130 - RNA, 19 nt, Artificial Sequence
  Description of Artificial Sequence: Synthetic oligonucleotide
caacaccuucuucaaauau

SEQ ID NO: 2685131 - RNA, 19 nt, Artificial Sequence
  Description of Artificial Sequence: Synthetic oligonucleotide
cuacaccaucuauguuuuc

SEQ ID NO: 2685132 - RNA, 19 nt, Artificial Sequence
  Description of Artificial Sequence: Synthetic oligonucleotide
cccugaauucccauggaaa

SEQ ID NO: 2685133 - RNA, 19 nt, Artificial Sequence
  Description of Artificial Sequence: Synthetic oligonucleotide
cuggcuguuuugagaaaua

SEQ ID NO: 2685134 - RNA, 19 nt, Artificial Sequence
  Description of Artificial Sequence: Synthetic oligonucleotide
gugcugccuuucauuuggg

SEQ ID NO: 2685135 - RNA, 19 nt, Artificial Sequence
  Description of Artificial Sequence: Synthetic oligonucleotide
caugcugaguuucuucauu

SEQ ID NO: 2685136 - RNA, 19 nt, Artificial Sequence
  Description of Artificial Sequence: Synthetic oligonucleotide
caagaggaccagggucccc

SEQ ID NO: 2685137 - RNA, 19 nt, Artificial Sequence
  Description of Artificial Sequence: Synthetic oligonucleotide
acacaggucccaagaguau

SEQ ID NO: 2685138 - RNA, 19 nt, Artificial Sequence
  Description of Artificial Sequence: Synthetic oligonucleotide
ccacacguucaacaccuuc

SEQ ID NO: 2685139 - RNA, 19 nt, Artificial Sequence
  Description of Artificial Sequence: Synthetic oligonucleotide
uccacacguucaacaccuu

SEQ ID NO: 2685140 - RNA, 19 nt, Artificial Sequence
  Description of Artificial Sequence: Synthetic oligonucleotide
gucuuccaacuccacggcu

SEQ ID NO: 2685141 - RNA, 19 nt, Artificial Sequence
  Description of Artificial Sequence: Synthetic oligonucleotide
cugcucgugugucugcucu

SEQ ID NO: 2685142 - RNA, 19 nt, Artificial Sequence
  Description of Artificial Sequence: Synthetic oligonucleotide
cuggcgcuacagcuucauc

SEQ ID NO: 2685143 - RNA, 19 nt, Artificial Sequence
  Description of Artificial Sequence: Synthetic oligonucleotide
uuccaacuccacggcuuuc

SEQ ID NO: 2685144 - RNA, 19 nt, Artificial Sequence
  Description of Artificial Sequence: Synthetic oligonucleotide
cacccugaauucccaugga

SEQ ID NO: 2685145 - RNA, 19 nt, Artificial Sequence
  Description of Artificial Sequence: Synthetic oligonucleotide
cuacuugcaggaugggcuu

SEQ ID NO: 2685146 - RNA, 19 nt, Artificial Sequence
  Description of Artificial Sequence: Synthetic oligonucleotide
cggauccacacguucaaca

SEQ ID NO: 2685147 - RNA, 19 nt, Artificial Sequence
  Description of Artificial Sequence: Synthetic oligonucleotide
cccaaaaucuugcauuuau

SEQ ID NO: 2685148 - RNA, 19 nt, Artificial Sequence
  Description of Artificial Sequence: Synthetic oligonucleotide
gggacaucuccaagaggac

SEQ ID NO: 2685149 - RNA, 19 nt, Artificial Sequence
  Description of Artificial Sequence: Synthetic oligonucleotide
agcugucuacuugcaggau

SEQ ID NO: 2685150 - RNA, 19 nt, Artificial Sequence
  Description of Artificial Sequence: Synthetic oligonucleotide
gccauucuacaccaucuau

SEQ ID NO: 2685151 - RNA, 19 nt, Artificial Sequence
  Description of Artificial Sequence: Synthetic oligonucleotide
cuuccagguacugcacucu

SEQ ID NO: 2685152 - RNA, 19 nt, Artificial Sequence
  Description of Artificial Sequence: Synthetic oligonucleotide
gcagaaagcugcaaaucau

SEQ ID NO: 2685153 - RNA, 19 nt, Artificial Sequence
  Description of Artificial Sequence: Synthetic oligonucleotide
ggucuauaggagaaaucau

SEQ ID NO: 2685154 - RNA, 19 nt, Artificial Sequence
  Description of Artificial Sequence: Synthetic oligonucleotide
ggcgcuacagcuucaucuu

SEQ ID NO: 2685155 - RNA, 19 nt, Artificial Sequence
  Description of Artificial Sequence: Synthetic oligonucleotide
cuuccaacuccacggcuuu

SEQ ID NO: 2685156 - RNA, 19 nt, Artificial Sequence
  Description of Artificial Sequence: Synthetic oligonucleotide
caaaucauguugggucuau

SEQ ID NO: 2685157 - RNA, 19 nt, Artificial Sequence
  Description of Artificial Sequence: Synthetic oligonucleotide
cagucccuuccggauccac

SEQ ID NO: 2685158 - RNA, 19 nt, Artificial Sequence
  Description of Artificial Sequence: Synthetic oligonucleotide
gcgcuacagcuucaucuuc

SEQ ID NO: 2685159 - RNA, 19 nt, Artificial Sequence
  Description of Artificial Sequence: Synthetic oligonucleotide
ccaacuccacggcuuucuc

SEQ ID NO: 2685160 - RNA, 19 nt, Artificial Sequence
  Description of Artificial Sequence: Synthetic oligonucleotide
cugugucaauucccaaaau

SEQ ID NO: 2685161 - RNA, 19 nt, Artificial Sequence
  Description of Artificial Sequence: Synthetic oligonucleotide
gcaaaucauguugggucua

SEQ ID NO: 2685162 - RNA, 19 nt, Artificial Sequence
  Description of Artificial Sequence: Synthetic oligonucleotide
gggccucuuggucuuccaa

SEQ ID NO: 2685163 - RNA, 19 nt, Artificial Sequence
  Description of Artificial Sequence: Synthetic oligonucleotide
ccggauccacacguucaac

SEQ ID NO: 2685164 - RNA, 19 nt, Artificial Sequence
  Description of Artificial Sequence: Synthetic oligonucleotide
cccuuccggauccacacgu

SEQ ID NO: 2685165 - RNA, 19 nt, Artificial Sequence
  Description of Artificial Sequence: Synthetic oligonucleotide
gcucgugugucugcucugu

SEQ ID NO: 2685166 - RNA, 19 nt, Artificial Sequence
  Description of Artificial Sequence: Synthetic oligonucleotide
caggucccaagaguaucuu

SEQ ID NO: 2685167 - RNA, 19 nt, Artificial Sequence
  Description of Artificial Sequence: Synthetic oligonucleotide
ccaggguccccugcuucca

SEQ ID NO: 2685168 - RNA, 19 nt, Artificial Sequence
  Description of Artificial Sequence: Synthetic oligonucleotide
ggggcuggcgcuacagcuu

SEQ ID NO: 2685169 - RNA, 19 nt, Artificial Sequence
  Description of Artificial Sequence: Synthetic oligonucleotide
gccuuucauuugggccucu

SEQ ID NO: 2685170 - RNA, 19 nt, Artificial Sequence
  Description of Artificial Sequence: Synthetic oligonucleotide
  modified_base (1)..(1): a, c, u, g, unknown or other
nguuuugucagucccuucc

SEQ ID NO: 2685171 - RNA, 19 nt, Artificial Sequence
  Description of Artificial Sequence: Synthetic oligonucleotide
aaugaugcagauaaugacc

SEQ ID NO: 2685172 - RNA, 19 nt, Artificial Sequence
  Description of Artificial Sequence: Synthetic oligonucleotide
aaaaguaacauuugcauau

SEQ ID NO: 2685173 - RNA, 19 nt, Artificial Sequence
  Description of Artificial Sequence: Synthetic oligonucleotide
acaauaaugaugcagauaa

SEQ ID NO: 2685174 - RNA, 19 nt, Artificial Sequence
  Description of Artificial Sequence: Synthetic oligonucleotide
cagaaguucaugaagagcg

SEQ ID NO: 2685175 - RNA, 19 nt, Artificial Sequence
  Description of Artificial Sequence: Synthetic oligonucleotide
aaaggcuugaaugacugcc

SEQ ID NO: 2685176 - RNA, 19 nt, Artificial Sequence
  Description of Artificial Sequence: Synthetic oligonucleotide
aggacuagaacccagaaug

SEQ ID NO: 2685177 - RNA, 19 nt, Artificial Sequence
  Description of Artificial Sequence: Synthetic oligonucleotide
aaucacaucgcccaccauc

SEQ ID NO: 2685178 - RNA, 19 nt, Artificial Sequence
  Description of Artificial Sequence: Synthetic oligonucleotide
aagggugaaggccucagcc

SEQ ID NO: 2685179 - RNA, 19 nt, Artificial Sequence
  Description of Artificial Sequence: Synthetic oligonucleotide
uuuuauuggauccacugug

SEQ ID NO: 2685180 - RNA, 19 nt, Artificial Sequence
  Description of Artificial Sequence: Synthetic oligonucleotide
uaugaaaaguaacauuugc

SEQ ID NO: 2685181 - RNA, 19 nt, Artificial Sequence
  Description of Artificial Sequence: Synthetic oligonucleotide
aagaucagggaacugaugu

SEQ ID NO: 2685182 - RNA, 19 nt, Artificial Sequence
  Description of Artificial Sequence: Synthetic oligonucleotide
aaggcuugggaauuauggc

SEQ ID NO: 2685183 - RNA, 19 nt, Artificial Sequence
  Description of Artificial Sequence: Synthetic oligonucleotide
aacauuugcauaugcguag

SEQ ID NO: 2685184 - RNA, 19 nt, Artificial Sequence
  Description of Artificial Sequence: Synthetic oligonucleotide
uugaaugacugccacagag

SEQ ID NO: 2685185 - RNA, 19 nt, Artificial Sequence
  Description of Artificial Sequence: Synthetic oligonucleotide
uugugaaaaggcuugaaug

SEQ ID NO: 2685186 - RNA, 19 nt, Artificial Sequence
  Description of Artificial Sequence: Synthetic oligonucleotide
agggaacugauguugaggc

SEQ ID NO: 2685187 - RNA, 19 nt, Artificial Sequence
  Description of Artificial Sequence: Synthetic oligonucleotide
uuuauuggauccacugugg

SEQ ID NO: 2685188 - RNA, 19 nt, Artificial Sequence
  Description of Artificial Sequence: Synthetic oligonucleotide
ugaaaaguaacauuugcau

SEQ ID NO: 2685189 - RNA, 19 nt, Artificial Sequence
  Description of Artificial Sequence: Synthetic oligonucleotide
ugugaaaaggcuugaauga

SEQ ID NO: 2685190 - RNA, 19 nt, Artificial Sequence
  Description of Artificial Sequence: Synthetic oligonucleotide
acagggcaggacuagaacc

SEQ ID NO: 2685191 - RNA, 19 nt, Artificial Sequence
  Description of Artificial Sequence: Synthetic oligonucleotide
uaaacaaagggugaaggcc

SEQ ID NO: 2685192 - RNA, 19 nt, Artificial Sequence
  Description of Artificial Sequence: Synthetic oligonucleotide
uguggacagauauauauga

SEQ ID NO: 2685193 - RNA, 19 nt, Artificial Sequence
  Description of Artificial Sequence: Synthetic oligonucleotide
cauuacuuuuauuggaucc

SEQ ID NO: 2685194 - RNA, 19 nt, Artificial Sequence
  Description of Artificial Sequence: Synthetic oligonucleotide
ugggaauuauggcucaugg

SEQ ID NO: 2685195 - RNA, 19 nt, Artificial Sequence
  Description of Artificial Sequence: Synthetic oligonucleotide
uugauugucucauaacuug

SEQ ID NO: 2685196 - RNA, 19 nt, Artificial Sequence
  Description of Artificial Sequence: Synthetic oligonucleotide
gaaggcuugggaauuaugg

SEQ ID NO: 2685197 - RNA, 19 nt, Artificial Sequence
  Description of Artificial Sequence: Synthetic oligonucleotide
gacagauauauaugaaaag

SEQ ID NO: 2685198 - RNA, 19 nt, Artificial Sequence
  Description of Artificial Sequence: Synthetic oligonucleotide
ugauugucucauaacuugg

SEQ ID NO: 2685199 - RNA, 19 nt, Artificial Sequence
  Description of Artificial Sequence: Synthetic oligonucleotide
gauauauaugaaaaguaac

SEQ ID NO: 2685200 - RNA, 19 nt, Artificial Sequence
  Description of Artificial Sequence: Synthetic oligonucleotide
augacugccacagaggugg

SEQ ID NO: 2685201 - RNA, 19 nt, Artificial Sequence
  Description of Artificial Sequence: Synthetic oligonucleotide
ugaaugacugccacagagg

SEQ ID NO: 2685202 - RNA, 19 nt, Artificial Sequence
  Description of Artificial Sequence: Synthetic oligonucleotide
auauauaugaaaaguaaca

SEQ ID NO: 2685203 - RNA, 19 nt, Artificial Sequence
  Description of Artificial Sequence: Synthetic oligonucleotide
auaaugaccaugaggacac

SEQ ID NO: 2685204 - RNA, 19 nt, Artificial Sequence
  Description of Artificial Sequence: Synthetic oligonucleotide
aacagaaguucaugaagag

SEQ ID NO: 2685205 - RNA, 19 nt, Artificial Sequence
  Description of Artificial Sequence: Synthetic oligonucleotide
acuuuuauuggauccacug

SEQ ID NO: 2685206 - RNA, 19 nt, Artificial Sequence
  Description of Artificial Sequence: Synthetic oligonucleotide
aaacccaggcaacagaagu

SEQ ID NO: 2685207 - RNA, 19 nt, Artificial Sequence
  Description of Artificial Sequence: Synthetic oligonucleotide
aaaaggcuugaaugacugc

SEQ ID NO: 2685208 - RNA, 19 nt, Artificial Sequence
  Description of Artificial Sequence: Synthetic oligonucleotide
acugacucgaacaaucacc

SEQ ID NO: 2685209 - RNA, 19 nt, Artificial Sequence
  Description of Artificial Sequence: Synthetic oligonucleotide
guggagacaauaaugaugc

SEQ ID NO: 2685210 - RNA, 19 nt, Artificial Sequence
  Description of Artificial Sequence: Synthetic oligonucleotide
uaaugaugcagauaaugac

SEQ ID NO: 2685211 - RNA, 19 nt, Artificial Sequence
  Description of Artificial Sequence: Synthetic oligonucleotide
acagauauauaugaaaagu

SEQ ID NO: 2685212 - RNA, 19 nt, Artificial Sequence
  Description of Artificial Sequence: Synthetic oligonucleotide
accaugaggacacugaaga

SEQ ID NO: 2685213 - RNA, 19 nt, Artificial Sequence
  Description of Artificial Sequence: Synthetic oligonucleotide
acuguggacagauauauau

SEQ ID NO: 2685214 - RNA, 19 nt, Artificial Sequence
  Description of Artificial Sequence: Synthetic oligonucleotide
augaagagcgcguugaaca

SEQ ID NO: 2685215 - RNA, 19 nt, Artificial Sequence
  Description of Artificial Sequence: Synthetic oligonucleotide
auugucucauaacuugggg

SEQ ID NO: 2685216 - RNA, 19 nt, Artificial Sequence
  Description of Artificial Sequence: Synthetic oligonucleotide
gaacaaucaccccuucugg

SEQ ID NO: 2685217 - RNA, 19 nt, Artificial Sequence
  Description of Artificial Sequence: Synthetic oligonucleotide
acaacagcugaguuguggg

SEQ ID NO: 2685218 - RNA, 19 nt, Artificial Sequence
  Description of Artificial Sequence: Synthetic oligonucleotide
aauguggcacucuuuguga

SEQ ID NO: 2685219 - RNA, 19 nt, Artificial Sequence
  Description of Artificial Sequence: Synthetic oligonucleotide
gcauuguugguguagaagg

SEQ ID NO: 2685220 - RNA, 19 nt, Artificial Sequence
  Description of Artificial Sequence: Synthetic oligonucleotide
gaauguggcacucuuugug

SEQ ID NO: 2685221 - RNA, 19 nt, Artificial Sequence
  Description of Artificial Sequence: Synthetic oligonucleotide
aaagggugaaggccucagc

SEQ ID NO: 2685222 - RNA, 19 nt, Artificial Sequence
  Description of Artificial Sequence: Synthetic oligonucleotide
aauuauggcucaugguacu

SEQ ID NO: 2685223 - RNA, 19 nt, Artificial Sequence
  Description of Artificial Sequence: Synthetic oligonucleotide
uuugugaaaaggcuugaau

SEQ ID NO: 2685224 - RNA, 19 nt, Artificial Sequence
  Description of Artificial Sequence: Synthetic oligonucleotide
cugacucgaacaaucaccc

SEQ ID NO: 2685225 - RNA, 19 nt, Artificial Sequence
  Description of Artificial Sequence: Synthetic oligonucleotide
aguaacauuugcauaugcg

SEQ ID NO: 2685226 - RNA, 19 nt, Artificial Sequence
  Description of Artificial Sequence: Synthetic oligonucleotide
gauaaugaccaugaggaca

SEQ ID NO: 2685227 - RNA, 19 nt, Artificial Sequence
  Description of Artificial Sequence: Synthetic oligonucleotide
acagaaguucaugaagagc

SEQ ID NO: 2685228 - RNA, 19 nt, Artificial Sequence
  Description of Artificial Sequence: Synthetic oligonucleotide
aaggccucagccuggggcg

SEQ ID NO: 2685229 - RNA, 19 nt, Artificial Sequence
  Description of Artificial Sequence: Synthetic oligonucleotide
cuagaacccagaauguggc

SEQ ID NO: 2685230 - RNA, 19 nt, Artificial Sequence
  Description of Artificial Sequence: Synthetic oligonucleotide
guaaacaaagggugaaggc

SEQ ID NO: 2685231 - RNA, 19 nt, Artificial Sequence
  Description of Artificial Sequence: Synthetic oligonucleotide
uaacauuugcauaugcgua

SEQ ID NO: 2685232 - RNA, 19 nt, Artificial Sequence
  Description of Artificial Sequence: Synthetic oligonucleotide
cuggacuucacagaguagg

SEQ ID NO: 2685233 - RNA, 19 nt, Artificial Sequence
  Description of Artificial Sequence: Synthetic oligonucleotide
uuugcauaugcguagggua

SEQ ID NO: 2685234 - RNA, 19 nt, Artificial Sequence
  Description of Artificial Sequence: Synthetic oligonucleotide
gagacaauaaugaugcaga

SEQ ID NO: 2685235 - RNA, 19 nt, Artificial Sequence
  Description of Artificial Sequence: Synthetic oligonucleotide
gcagauaaugaccaugagg

SEQ ID NO: 2685236 - RNA, 19 nt, Artificial Sequence
  Description of Artificial Sequence: Synthetic oligonucleotide
ugaaaaggcuugaaugacu

SEQ ID NO: 2685237 - RNA, 19 nt, Artificial Sequence
  Description of Artificial Sequence: Synthetic oligonucleotide
guaggguaaacaaagggug

SEQ ID NO: 2685238 - RNA, 19 nt, Artificial Sequence
  Description of Artificial Sequence: Synthetic oligonucleotide
uggacagauauauaugaaa

SEQ ID NO: 2685239 - RNA, 19 nt, Artificial Sequence
  Description of Artificial Sequence: Synthetic oligonucleotide
acuagaacccagaaugugg

SEQ ID NO: 2685240 - RNA, 19 nt, Artificial Sequence
  Description of Artificial Sequence: Synthetic oligonucleotide
uuugauugucucauaacuu

SEQ ID NO: 2685241 - RNA, 19 nt, Artificial Sequence
  Description of Artificial Sequence: Synthetic oligonucleotide
gaaaaggcuugaaugacug

SEQ ID NO: 2685242 - RNA, 19 nt, Artificial Sequence
  Description of Artificial Sequence: Synthetic oligonucleotide
aaacaaagggugaaggccu

SEQ ID NO: 2685243 - RNA, 19 nt, Artificial Sequence
  Description of Artificial Sequence: Synthetic oligonucleotide
ucucacaacagcugaguug

SEQ ID NO: 2685244 - RNA, 19 nt, Artificial Sequence
  Description of Artificial Sequence: Synthetic oligonucleotide
auaaugaugcagauaauga

SEQ ID NO: 2685245 - RNA, 19 nt, Artificial Sequence
  Description of Artificial Sequence: Synthetic oligonucleotide
auuggauccacuguggaca

SEQ ID NO: 2685246 - RNA, 19 nt, Artificial Sequence
  Description of Artificial Sequence: Synthetic oligonucleotide
acagcaacgucucugggca

SEQ ID NO: 2685247 - RNA, 19 nt, Artificial Sequence
  Description of Artificial Sequence: Synthetic oligonucleotide
agauaaugaccaugaggac

SEQ ID NO: 2685248 - RNA, 19 nt, Artificial Sequence
  Description of Artificial Sequence: Synthetic oligonucleotide
gacacugaagaucagggaa

SEQ ID NO: 2685249 - RNA, 19 nt, Artificial Sequence
  Description of Artificial Sequence: Synthetic oligonucleotide
ugcauuacuuuuauuggau

SEQ ID NO: 2685250 - RNA, 19 nt, Artificial Sequence
  Description of Artificial Sequence: Synthetic oligonucleotide
uaugcguaggguaaacaaa

SEQ ID NO: 2685251 - RNA, 19 nt, Artificial Sequence
  Description of Artificial Sequence: Synthetic oligonucleotide
acaaucaccccuucuggag

SEQ ID NO: 2685252 - RNA, 19 nt, Artificial Sequence
  Description of Artificial Sequence: Synthetic oligonucleotide
gaaguucaugaagagcgcg

SEQ ID NO: 2685253 - RNA, 19 nt, Artificial Sequence
  Description of Artificial Sequence: Synthetic oligonucleotide
agauauauaugaaaaguaa

SEQ ID NO: 2685254 - RNA, 19 nt, Artificial Sequence
  Description of Artificial Sequence: Synthetic oligonucleotide
gauugucucauaacuuggg

SEQ ID NO: 2685255 - RNA, 19 nt, Artificial Sequence
  Description of Artificial Sequence: Synthetic oligonucleotide
gaugcagauaaugaccaug

SEQ ID NO: 2685256 - RNA, 19 nt, Artificial Sequence
  Description of Artificial Sequence: Synthetic oligonucleotide
cucuuugugaaaaggcuug

SEQ ID NO: 2685257 - RNA, 19 nt, Artificial Sequence
  Description of Artificial Sequence: Synthetic oligonucleotide
uggcucaugguacugacuc

SEQ ID NO: 2685258 - RNA, 19 nt, Artificial Sequence
  Description of Artificial Sequence: Synthetic oligonucleotide
agaacccagaauguggcac

SEQ ID NO: 2685259 - RNA, 19 nt, Artificial Sequence
  Description of Artificial Sequence: Synthetic oligonucleotide
gaaaaguaacauuugcaua

SEQ ID NO: 2685260 - RNA, 19 nt, Artificial Sequence
  Description of Artificial Sequence: Synthetic oligonucleotide
gaauuauggcucaugguac

SEQ ID NO: 2685261 - RNA, 19 nt, Artificial Sequence
  Description of Artificial Sequence: Synthetic oligonucleotide
uuauuggauccacugugga

SEQ ID NO: 2685262 - RNA, 19 nt, Artificial Sequence
  Description of Artificial Sequence: Synthetic oligonucleotide
ucuuugauugucucauaac

SEQ ID NO: 2685263 - RNA, 19 nt, Artificial Sequence
  Description of Artificial Sequence: Synthetic oligonucleotide
aacgucucugggcauguug

SEQ ID NO: 2685264 - RNA, 19 nt, Artificial Sequence
  Description of Artificial Sequence: Synthetic oligonucleotide
auaugcguaggguaaacaa

SEQ ID NO: 2685265 - RNA, 19 nt, Artificial Sequence
  Description of Artificial Sequence: Synthetic oligonucleotide
ugcguaggguaaacaaagg

SEQ ID NO: 2685266 - RNA, 19 nt, Artificial Sequence
  Description of Artificial Sequence: Synthetic oligonucleotide
caugguacugacucgaaca

SEQ ID NO: 2685267 - RNA, 19 nt, Artificial Sequence
  Description of Artificial Sequence: Synthetic oligonucleotide
gguaaacaaagggugaagg

SEQ ID NO: 2685268 - RNA, 19 nt, Artificial Sequence
  Description of Artificial Sequence: Synthetic oligonucleotide
aaaguaacauuugcauaug

SEQ ID NO: 2685269 - RNA, 19 nt, Artificial Sequence
  Description of Artificial Sequence: Synthetic oligonucleotide
cagaauguggcacucuuug

SEQ ID NO: 2685270 - RNA, 19 nt, Artificial Sequence
  Description of Artificial Sequence: Synthetic oligonucleotide
gaucagggaacugauguug

SEQ ID NO: 2685271 - RNA, 19 nt, Artificial Sequence
  Description of Artificial Sequence: Synthetic oligonucleotide
uaggguaaacaaaggguga

SEQ ID NO: 2685272 - RNA, 19 nt, Artificial Sequence
  Description of Artificial Sequence: Synthetic oligonucleotide
caacagaaguucaugaaga

SEQ ID NO: 2685273 - RNA, 19 nt, Artificial Sequence
  Description of Artificial Sequence: Synthetic oligonucleotide
ugguguagaaggcuuggga

SEQ ID NO: 2685274 - RNA, 19 nt, Artificial Sequence
  Description of Artificial Sequence: Synthetic oligonucleotide
ugaagaucagggaacugau

SEQ ID NO: 2685275 - RNA, 19 nt, Artificial Sequence
  Description of Artificial Sequence: Synthetic oligonucleotide
cauuguugguguagaaggc

SEQ ID NO: 2685276 - RNA, 19 nt, Artificial Sequence
  Description of Artificial Sequence: Synthetic oligonucleotide
guaacauuugcauaugcgu

SEQ ID NO: 2685277 - RNA, 19 nt, Artificial Sequence
  Description of Artificial Sequence: Synthetic oligonucleotide
augaaaaguaacauuugca

SEQ ID NO: 2685278 - RNA, 19 nt, Artificial Sequence
  Description of Artificial Sequence: Synthetic oligonucleotide
auuacuuuuauuggaucca

SEQ ID NO: 2685279 - RNA, 19 nt, Artificial Sequence
  Description of Artificial Sequence: Synthetic oligonucleotide
aggacacugaagaucaggg

SEQ ID NO: 2685280 - RNA, 19 nt, Artificial Sequence
  Description of Artificial Sequence: Synthetic oligonucleotide
ugguucucacaacagcuga

SEQ ID NO: 2685281 - RNA, 19 nt, Artificial Sequence
  Description of Artificial Sequence: Synthetic oligonucleotide
uucaugaagagcgcguuga

SEQ ID NO: 2685282 - RNA, 19 nt, Artificial Sequence
  Description of Artificial Sequence: Synthetic oligonucleotide
ggaaguccggcauuguugg

SEQ ID NO: 2685283 - RNA, 19 nt, Artificial Sequence
  Description of Artificial Sequence: Synthetic oligonucleotide
uggagcacagggcaggacu

SEQ ID NO: 2685284 - RNA, 19 nt, Artificial Sequence
  Description of Artificial Sequence: Synthetic oligonucleotide
gcaacagaaguucaugaag

SEQ ID NO: 2685285 - RNA, 19 nt, Artificial Sequence
  Description of Artificial Sequence: Synthetic oligonucleotide
ggaauuauggcucauggua

SEQ ID NO: 2685286 - RNA, 19 nt, Artificial Sequence
  Description of Artificial Sequence: Synthetic oligonucleotide
uauuggauccacuguggac

SEQ ID NO: 2685287 - RNA, 19 nt, Artificial Sequence
  Description of Artificial Sequence: Synthetic oligonucleotide
uugcauaugcguaggguaa

SEQ ID NO: 2685288 - RNA, 19 nt, Artificial Sequence
  Description of Artificial Sequence: Synthetic oligonucleotide
agcgcguugaacagggacc

SEQ ID NO: 2685289 - RNA, 19 nt, Artificial Sequence
  Description of Artificial Sequence: Synthetic oligonucleotide
uguugguguagaaggcuug

SEQ ID NO: 2685290 - RNA, 19 nt, Artificial Sequence
  Description of Artificial Sequence: Synthetic oligonucleotide
uggacuucacagaguaggc

SEQ ID NO: 2685291 - RNA, 19 nt, Artificial Sequence
  Description of Artificial Sequence: Synthetic oligonucleotide
gaggacacugaagaucagg

SEQ ID NO: 2685292 - RNA, 19 nt, Artificial Sequence
  Description of Artificial Sequence: Synthetic oligonucleotide
ggagacaauaaugaugcag

SEQ ID NO: 2685293 - RNA, 19 nt, Artificial Sequence
  Description of Artificial Sequence: Synthetic oligonucleotide
cagauauauaugaaaagua

SEQ ID NO: 2685294 - RNA, 19 nt, Artificial Sequence
  Description of Artificial Sequence: Synthetic oligonucleotide
augaggacacugaagauca

SEQ ID NO: 2685295 - RNA, 19 nt, Artificial Sequence
  Description of Artificial Sequence: Synthetic oligonucleotide
aaucaccccuucuggagga

SEQ ID NO: 2685296 - RNA, 19 nt, Artificial Sequence
  Description of Artificial Sequence: Synthetic oligonucleotide
augcguaggguaaacaaag

SEQ ID NO: 2685297 - RNA, 19 nt, Artificial Sequence
  Description of Artificial Sequence: Synthetic oligonucleotide
cuuugauugucucauaacu

SEQ ID NO: 2685298 - RNA, 19 nt, Artificial Sequence
  Description of Artificial Sequence: Synthetic oligonucleotide
agaaguucaugaagagcgc

SEQ ID NO: 2685299 - RNA, 19 nt, Artificial Sequence
  Description of Artificial Sequence: Synthetic oligonucleotide
gacuguggagcacagggca

SEQ ID NO: 2685300 - RNA, 19 nt, Artificial Sequence
  Description of Artificial Sequence: Synthetic oligonucleotide
caaucaccccuucuggagg

SEQ ID NO: 2685301 - RNA, 19 nt, Artificial Sequence
  Description of Artificial Sequence: Synthetic oligonucleotide
caugaggacacugaagauc

SEQ ID NO: 2685302 - RNA, 19 nt, Artificial Sequence
  Description of Artificial Sequence: Synthetic oligonucleotide
ugcagauaaugaccaugag

SEQ ID NO: 2685303 - RNA, 19 nt, Artificial Sequence
  Description of Artificial Sequence: Synthetic oligonucleotide
ccgugcauuacuuuuauug

SEQ ID NO: 2685304 - RNA, 19 nt, Artificial Sequence
  Description of Artificial Sequence: Synthetic oligonucleotide
aggcuugaaugacugccac

SEQ ID NO: 2685305 - RNA, 19 nt, Artificial Sequence
  Description of Artificial Sequence: Synthetic oligonucleotide
cacagcaacgucucugggc

SEQ ID NO: 2685306 - RNA, 19 nt, Artificial Sequence
  Description of Artificial Sequence: Synthetic oligonucleotide
augaugcagauaaugacca

SEQ ID NO: 2685307 - RNA, 19 nt, Artificial Sequence
  Description of Artificial Sequence: Synthetic oligonucleotide
cuguggacagauauauaug

SEQ ID NO: 2685308 - RNA, 19 nt, Artificial Sequence
  Description of Artificial Sequence: Synthetic oligonucleotide
acuccucuuugauugucuc

SEQ ID NO: 2685309 - RNA, 19 nt, Artificial Sequence
  Description of Artificial Sequence: Synthetic oligonucleotide
uacugacucgaacaaucac

SEQ ID NO: 2685310 - RNA, 19 nt, Artificial Sequence
  Description of Artificial Sequence: Synthetic oligonucleotide
ucuggaggauggcugcugc

SEQ ID NO: 2685311 - RNA, 19 nt, Artificial Sequence
  Description of Artificial Sequence: Synthetic oligonucleotide
ucaugguacugacucgaac

SEQ ID NO: 2685312 - RNA, 19 nt, Artificial Sequence
  Description of Artificial Sequence: Synthetic oligonucleotide
gguggagacaauaaugaug

SEQ ID NO: 2685313 - RNA, 19 nt, Artificial Sequence
  Description of Artificial Sequence: Synthetic oligonucleotide
aaguccggcauuguuggug

SEQ ID NO: 2685314 - RNA, 19 nt, Artificial Sequence
  Description of Artificial Sequence: Synthetic oligonucleotide
gcuugaaugacugccacag

SEQ ID NO: 2685315 - RNA, 19 nt, Artificial Sequence
  Description of Artificial Sequence: Synthetic oligonucleotide
cugucccuggacuucacag

SEQ ID NO: 2685316 - RNA, 19 nt, Artificial Sequence
  Description of Artificial Sequence: Synthetic oligonucleotide
uuacuuuuauuggauccac

SEQ ID NO: 2685317 - RNA, 19 nt, Artificial Sequence
  Description of Artificial Sequence: Synthetic oligonucleotide
auccacuguggacagauau

SEQ ID NO: 2685318 - RNA, 19 nt, Artificial Sequence
  Description of Artificial Sequence: Synthetic oligonucleotide
uauggcucaugguacugac

SEQ ID NO: 2685319 - RNA, 19 nt, Artificial Sequence
  Description of Artificial Sequence: Synthetic oligonucleotide
uacuuuuauuggauccacu

SEQ ID NO: 2685320 - RNA, 19 nt, Artificial Sequence
  Description of Artificial Sequence: Synthetic oligonucleotide
aggcaacagaaguucauga

SEQ ID NO: 2685321 - RNA, 19 nt, Artificial Sequence
  Description of Artificial Sequence: Synthetic oligonucleotide
acauuugcauaugcguagg

SEQ ID NO: 2685322 - RNA, 19 nt, Artificial Sequence
  Description of Artificial Sequence: Synthetic oligonucleotide
gaaugacugccacagaggu

SEQ ID NO: 2685323 - RNA, 19 nt, Artificial Sequence
  Description of Artificial Sequence: Synthetic oligonucleotide
uuugucaccccgugcauua

SEQ ID NO: 2685324 - RNA, 19 nt, Artificial Sequence
  Description of Artificial Sequence: Synthetic oligonucleotide
gacucgaacaaucaccccu

SEQ ID NO: 2685325 - RNA, 19 nt, Artificial Sequence
  Description of Artificial Sequence: Synthetic oligonucleotide
gacuagaacccagaaugug

SEQ ID NO: 2685326 - RNA, 19 nt, Artificial Sequence
  Description of Artificial Sequence: Synthetic oligonucleotide
ucagggaacugauguugag

SEQ ID NO: 2685327 - RNA, 19 nt, Artificial Sequence
  Description of Artificial Sequence: Synthetic oligonucleotide
uccucuuugauugucucau

SEQ ID NO: 2685328 - RNA, 19 nt, Artificial Sequence
  Description of Artificial Sequence: Synthetic oligonucleotide
gcguaggguaaacaaaggg

SEQ ID NO: 2685329 - RNA, 19 nt, Artificial Sequence
  Description of Artificial Sequence: Synthetic oligonucleotide
uuggauccacuguggacag

SEQ ID NO: 2685330 - RNA, 19 nt, Artificial Sequence
  Description of Artificial Sequence: Synthetic oligonucleotide
auuguugguguagaaggcu

SEQ ID NO: 2685331 - RNA, 19 nt, Artificial Sequence
  Description of Artificial Sequence: Synthetic oligonucleotide
auuugcauaugcguagggu

SEQ ID NO: 2685332 - RNA, 19 nt, Artificial Sequence
  Description of Artificial Sequence: Synthetic oligonucleotide
caacagcugaguugugggg

SEQ ID NO: 2685333 - RNA, 19 nt, Artificial Sequence
  Description of Artificial Sequence: Synthetic oligonucleotide
cauuugcauaugcguaggg

SEQ ID NO: 2685334 - RNA, 19 nt, Artificial Sequence
  Description of Artificial Sequence: Synthetic oligonucleotide
gugcauuacuuuuauugga

SEQ ID NO: 2685335 - RNA, 19 nt, Artificial Sequence
  Description of Artificial Sequence: Synthetic oligonucleotide
guugguguagaaggcuugg

SEQ ID NO: 2685336 - RNA, 19 nt, Artificial Sequence
  Description of Artificial Sequence: Synthetic oligonucleotide
gaagagcgcguugaacagg

SEQ ID NO: 2685337 - RNA, 19 nt, Artificial Sequence
  Description of Artificial Sequence: Synthetic oligonucleotide
aacaaagggugaaggccuc

SEQ ID NO: 2685338 - RNA, 19 nt, Artificial Sequence
  Description of Artificial Sequence: Synthetic oligonucleotide
ggugguggagacaauaaug

SEQ ID NO: 2685339 - RNA, 19 nt, Artificial Sequence
  Description of Artificial Sequence: Synthetic oligonucleotide
aaguucaugaagagcgcgu

SEQ ID NO: 2685340 - RNA, 19 nt, Artificial Sequence
  Description of Artificial Sequence: Synthetic oligonucleotide
gugguggagacaauaauga

SEQ ID NO: 2685341 - RNA, 19 nt, Artificial Sequence
  Description of Artificial Sequence: Synthetic oligonucleotide
ugucccuggacuucacaga

SEQ ID NO: 2685342 - RNA, 19 nt, Artificial Sequence
  Description of Artificial Sequence: Synthetic oligonucleotide
ucgaacaaucaccccuucu

SEQ ID NO: 2685343 - RNA, 19 nt, Artificial Sequence
  Description of Artificial Sequence: Synthetic oligonucleotide
agacaauaaugaugcagau

SEQ ID NO: 2685344 - RNA, 19 nt, Artificial Sequence
  Description of Artificial Sequence: Synthetic oligonucleotide
uacuccucuuugauugucu

SEQ ID NO: 2685345 - RNA, 19 nt, Artificial Sequence
  Description of Artificial Sequence: Synthetic oligonucleotide
cagggaacugauguugagg

SEQ ID NO: 2685346 - RNA, 19 nt, Artificial Sequence
  Description of Artificial Sequence: Synthetic oligonucleotide
cgugcauuacuuuuauugg

SEQ ID NO: 2685347 - RNA, 19 nt, Artificial Sequence
  Description of Artificial Sequence: Synthetic oligonucleotide
agaauguggcacucuuugu

SEQ ID NO: 2685348 - RNA, 19 nt, Artificial Sequence
  Description of Artificial Sequence: Synthetic oligonucleotide
agcucggucaccccguacu

SEQ ID NO: 2685349 - RNA, 19 nt, Artificial Sequence
  Description of Artificial Sequence: Synthetic oligonucleotide
acagaggugguggagacaa

SEQ ID NO: 2685350 - RNA, 19 nt, Artificial Sequence
  Description of Artificial Sequence: Synthetic oligonucleotide
cugaagaucagggaacuga

SEQ ID NO: 2685351 - RNA, 19 nt, Artificial Sequence
  Description of Artificial Sequence: Synthetic oligonucleotide
augguacugacucgaacaa

SEQ ID NO: 2685352 - RNA, 19 nt, Artificial Sequence
  Description of Artificial Sequence: Synthetic oligonucleotide
uugguguagaaggcuuggg

SEQ ID NO: 2685353 - RNA, 19 nt, Artificial Sequence
  Description of Artificial Sequence: Synthetic oligonucleotide
gagcgcguugaacagggac

SEQ ID NO: 2685354 - RNA, 19 nt, Artificial Sequence
  Description of Artificial Sequence: Synthetic oligonucleotide
caccccuucuggaggaugg

SEQ ID NO: 2685355 - RNA, 19 nt, Artificial Sequence
  Description of Artificial Sequence: Synthetic oligonucleotide
ggaacugauguugaggcac

SEQ ID NO: 2685356 - RNA, 19 nt, Artificial Sequence
  Description of Artificial Sequence: Synthetic oligonucleotide
gugaaaaggcuugaaugac

SEQ ID NO: 2685357 - RNA, 19 nt, Artificial Sequence
  Description of Artificial Sequence: Synthetic oligonucleotide
aaugacugccacagaggug

SEQ ID NO: 2685358 - RNA, 19 nt, Artificial Sequence
  Description of Artificial Sequence: Synthetic oligonucleotide
aaggcuugaaugacugcca

SEQ ID NO: 2685359 - RNA, 19 nt, Artificial Sequence
  Description of Artificial Sequence: Synthetic oligonucleotide
ucuuugugaaaaggcuuga

SEQ ID NO: 2685360 - RNA, 19 nt, Artificial Sequence
  Description of Artificial Sequence: Synthetic oligonucleotide
cagccauggacuguggagc

SEQ ID NO: 2685361 - RNA, 19 nt, Artificial Sequence
  Description of Artificial Sequence: Synthetic oligonucleotide
aguccggcauuguuggugu

SEQ ID NO: 2685362 - RNA, 19 nt, Artificial Sequence
  Description of Artificial Sequence: Synthetic oligonucleotide
uuauggcucaugguacuga

SEQ ID NO: 2685363 - RNA, 19 nt, Artificial Sequence
  Description of Artificial Sequence: Synthetic oligonucleotide
ccguacuccucuuugauug

SEQ ID NO: 2685364 - RNA, 19 nt, Artificial Sequence
  Description of Artificial Sequence: Synthetic oligonucleotide
aacccagaauguggcacuc

SEQ ID NO: 2685365 - RNA, 19 nt, Artificial Sequence
  Description of Artificial Sequence: Synthetic oligonucleotide
uccacuguggacagauaua

SEQ ID NO: 2685366 - RNA, 19 nt, Artificial Sequence
  Description of Artificial Sequence: Synthetic oligonucleotide
uugggaauuauggcucaug

SEQ ID NO: 2685367 - RNA, 19 nt, Artificial Sequence
  Description of Artificial Sequence: Synthetic oligonucleotide
uucucacaacagcugaguu

SEQ ID NO: 2685368 - RNA, 19 nt, Artificial Sequence
  Description of Artificial Sequence: Synthetic oligonucleotide
gaccaugaggacacugaag

SEQ ID NO: 2685369 - RNA, 19 nt, Artificial Sequence
  Description of Artificial Sequence: Synthetic oligonucleotide
ggacagauauauaugaaaa

SEQ ID NO: 2685370 - RNA, 19 nt, Artificial Sequence
  Description of Artificial Sequence: Synthetic oligonucleotide
gguacugacucgaacaauc

SEQ ID NO: 2685371 - RNA, 19 nt, Artificial Sequence
  Description of Artificial Sequence: Synthetic oligonucleotide
guucaugaagagcgcguug

SEQ ID NO: 2685372 - RNA, 19 nt, Artificial Sequence
  Description of Artificial Sequence: Synthetic oligonucleotide
agggugaaggccucagccu

SEQ ID NO: 2685373 - RNA, 19 nt, Artificial Sequence
  Description of Artificial Sequence: Synthetic oligonucleotide
gaagaucagggaacugaug

SEQ ID NO: 2685374 - RNA, 19 nt, Artificial Sequence
  Description of Artificial Sequence: Synthetic oligonucleotide
ggcacucuuugugaaaagg

SEQ ID NO: 2685375 - RNA, 19 nt, Artificial Sequence
  Description of Artificial Sequence: Synthetic oligonucleotide
gcuccaaucacaucgccca

SEQ ID NO: 2685376 - RNA, 19 nt, Artificial Sequence
  Description of Artificial Sequence: Synthetic oligonucleotide
ucggucaccccguacuccu

SEQ ID NO: 2685377 - RNA, 19 nt, Artificial Sequence
  Description of Artificial Sequence: Synthetic oligonucleotide
ucaugaagagcgcguugaa

SEQ ID NO: 2685378 - RNA, 19 nt, Artificial Sequence
  Description of Artificial Sequence: Synthetic oligonucleotide
ugguggagacaauaaugau

SEQ ID NO: 2685379 - RNA, 19 nt, Artificial Sequence
  Description of Artificial Sequence: Synthetic oligonucleotide
agcugaguugugggguucc

SEQ ID NO: 2685380 - RNA, 19 nt, Artificial Sequence
  Description of Artificial Sequence: Synthetic oligonucleotide
auuauggcucaugguacug

SEQ ID NO: 2685381 - RNA, 19 nt, Artificial Sequence
  Description of Artificial Sequence: Synthetic oligonucleotide
uagaacccagaauguggca

SEQ ID NO: 2685382 - RNA, 19 nt, Artificial Sequence
  Description of Artificial Sequence: Synthetic oligonucleotide
cucuuugauugucucauaa

SEQ ID NO: 2685383 - RNA, 19 nt, Artificial Sequence
  Description of Artificial Sequence: Synthetic oligonucleotide
ugacucgaacaaucacccc

SEQ ID NO: 2685384 - RNA, 19 nt, Artificial Sequence
  Description of Artificial Sequence: Synthetic oligonucleotide
caugaagagcgcguugaac

SEQ ID NO: 2685385 - RNA, 19 nt, Artificial Sequence
  Description of Artificial Sequence: Synthetic oligonucleotide
cucacaacagcugaguugu

SEQ ID NO: 2685386 - RNA, 19 nt, Artificial Sequence
  Description of Artificial Sequence: Synthetic oligonucleotide
uguggcacucuuugugaaa

SEQ ID NO: 2685387 - RNA, 19 nt, Artificial Sequence
  Description of Artificial Sequence: Synthetic oligonucleotide
gacaauaaugaugcagaua

SEQ ID NO: 2685388 - RNA, 19 nt, Artificial Sequence
  Description of Artificial Sequence: Synthetic oligonucleotide
ggcauuguugguguagaag

SEQ ID NO: 2685389 - RNA, 19 nt, Artificial Sequence
  Description of Artificial Sequence: Synthetic oligonucleotide
gcagccauggacuguggag

SEQ ID NO: 2685390 - RNA, 19 nt, Artificial Sequence
  Description of Artificial Sequence: Synthetic oligonucleotide
agaucagggaacugauguu

SEQ ID NO: 2685391 - RNA, 19 nt, Artificial Sequence
  Description of Artificial Sequence: Synthetic oligonucleotide
uggucaggcacagcaacgu

SEQ ID NO: 2685392 - RNA, 19 nt, Artificial Sequence
  Description of Artificial Sequence: Synthetic oligonucleotide
ugaggacacugaagaucag

SEQ ID NO: 2685393 - RNA, 19 nt, Artificial Sequence
  Description of Artificial Sequence: Synthetic oligonucleotide
aggugguggagacaauaau

SEQ ID NO: 2685394 - RNA, 19 nt, Artificial Sequence
  Description of Artificial Sequence: Synthetic oligonucleotide
uggcacucuuugugaaaag

SEQ ID NO: 2685395 - RNA, 19 nt, Artificial Sequence
  Description of Artificial Sequence: Synthetic oligonucleotide
caggcaacagaaguucaug

SEQ ID NO: 2685396 - RNA, 19 nt, Artificial Sequence
  Description of Artificial Sequence: Synthetic oligonucleotide
cuuuuauuggauccacugu

SEQ ID NO: 2685397 - RNA, 19 nt, Artificial Sequence
  Description of Artificial Sequence: Synthetic oligonucleotide
cacagggcaggacuagaac

SEQ ID NO: 2685398 - RNA, 19 nt, Artificial Sequence
  Description of Artificial Sequence: Synthetic oligonucleotide
cacucuuugugaaaaggcu

SEQ ID NO: 2685399 - RNA, 19 nt, Artificial Sequence
  Description of Artificial Sequence: Synthetic oligonucleotide
cgaacaaucaccccuucug

SEQ ID NO: 2685400 - RNA, 19 nt, Artificial Sequence
  Description of Artificial Sequence: Synthetic oligonucleotide
cuguggagcacagggcagg

SEQ ID NO: 2685401 - RNA, 19 nt, Artificial Sequence
  Description of Artificial Sequence: Synthetic oligonucleotide
aggguaaacaaagggugaa

SEQ ID NO: 2685402 - RNA, 19 nt, Artificial Sequence
  Description of Artificial Sequence: Synthetic oligonucleotide
gcacucuuugugaaaaggc

SEQ ID NO: 2685403 - RNA, 19 nt, Artificial Sequence
  Description of Artificial Sequence: Synthetic oligonucleotide
gugguucucacaacagcug

SEQ ID NO: 2685404 - RNA, 19 nt, Artificial Sequence
  Description of Artificial Sequence: Synthetic oligonucleotide
cacggugguucucacaaca

SEQ ID NO: 2685405 - RNA, 19 nt, Artificial Sequence
  Description of Artificial Sequence: Synthetic oligonucleotide
caaagggugaaggccucag

SEQ ID NO: 2685406 - RNA, 19 nt, Artificial Sequence
  Description of Artificial Sequence: Synthetic oligonucleotide
agccauggacuguggagca

SEQ ID NO: 2685407 - RNA, 19 nt, Artificial Sequence
  Description of Artificial Sequence: Synthetic oligonucleotide
gggugaaggccucagccug

SEQ ID NO: 2685408 - RNA, 19 nt, Artificial Sequence
  Description of Artificial Sequence: Synthetic oligonucleotide
ugaugcagauaaugaccau

SEQ ID NO: 2685409 - RNA, 19 nt, Artificial Sequence
  Description of Artificial Sequence: Synthetic oligonucleotide
aacccaggcaacagaaguu

SEQ ID NO: 2685410 - RNA, 19 nt, Artificial Sequence
  Description of Artificial Sequence: Synthetic oligonucleotide
uggagacaauaaugaugca

SEQ ID NO: 2685411 - RNA, 19 nt, Artificial Sequence
  Description of Artificial Sequence: Synthetic oligonucleotide
gggaaguccggcauuguug

SEQ ID NO: 2685412 - RNA, 19 nt, Artificial Sequence
  Description of Artificial Sequence: Synthetic oligonucleotide
ugcauaugcguaggguaaa

SEQ ID NO: 2685413 - RNA, 19 nt, Artificial Sequence
  Description of Artificial Sequence: Synthetic oligonucleotide
auguggcacucuuugugaa

SEQ ID NO: 2685414 - RNA, 19 nt, Artificial Sequence
  Description of Artificial Sequence: Synthetic oligonucleotide
gcauuacuuuuauuggauc

SEQ ID NO: 2685415 - RNA, 19 nt, Artificial Sequence
  Description of Artificial Sequence: Synthetic oligonucleotide
gaacccagaauguggcacu

SEQ ID NO: 2685416 - RNA, 19 nt, Artificial Sequence
  Description of Artificial Sequence: Synthetic oligonucleotide
ggcucaugguacugacucg

SEQ ID NO: 2685417 - RNA, 19 nt, Artificial Sequence
  Description of Artificial Sequence: Synthetic oligonucleotide
aguucaugaagagcgcguu

SEQ ID NO: 2685418 - RNA, 19 nt, Artificial Sequence
  Description of Artificial Sequence: Synthetic oligonucleotide
uuuugucaccccgugcauu

SEQ ID NO: 2685419 - RNA, 19 nt, Artificial Sequence
  Description of Artificial Sequence: Synthetic oligonucleotide
agcaacgucucugggcaug

SEQ ID NO: 2685420 - RNA, 19 nt, Artificial Sequence
  Description of Artificial Sequence: Synthetic oligonucleotide
aucagggaacugauguuga

SEQ ID NO: 2685421 - RNA, 19 nt, Artificial Sequence
  Description of Artificial Sequence: Synthetic oligonucleotide
acgucucugggcauguuga

SEQ ID NO: 2685422 - RNA, 19 nt, Artificial Sequence
  Description of Artificial Sequence: Synthetic oligonucleotide
agaaggcuugggaauuaug

SEQ ID NO: 2685423 - RNA, 19 nt, Artificial Sequence
  Description of Artificial Sequence: Synthetic oligonucleotide
guacugacucgaacaauca

SEQ ID NO: 2685424 - RNA, 19 nt, Artificial Sequence
  Description of Artificial Sequence: Synthetic oligonucleotide
acuguggagcacagggcag

SEQ ID NO: 2685425 - RNA, 19 nt, Artificial Sequence
  Description of Artificial Sequence: Synthetic oligonucleotide
ggcaacagaaguucaugaa

SEQ ID NO: 2685426 - RNA, 19 nt, Artificial Sequence
  Description of Artificial Sequence: Synthetic oligonucleotide
acugaagaucagggaacug

SEQ ID NO: 2685427 - RNA, 19 nt, Artificial Sequence
  Description of Artificial Sequence: Synthetic oligonucleotide
ccuucuggaggauggcugc

SEQ ID NO: 2685428 - RNA, 19 nt, Artificial Sequence
  Description of Artificial Sequence: Synthetic oligonucleotide
cugaguugugggguucccc

SEQ ID NO: 2685429 - RNA, 19 nt, Artificial Sequence
  Description of Artificial Sequence: Synthetic oligonucleotide
ggguaaacaaagggugaag

SEQ ID NO: 2685430 - RNA, 19 nt, Artificial Sequence
  Description of Artificial Sequence: Synthetic oligonucleotide
gguucucacaacagcugag

SEQ ID NO: 2685431 - RNA, 19 nt, Artificial Sequence
  Description of Artificial Sequence: Synthetic oligonucleotide
gaggugguggagacaauaa

SEQ ID NO: 2685432 - RNA, 19 nt, Artificial Sequence
  Description of Artificial Sequence: Synthetic oligonucleotide
caccccguacuccucuuug

SEQ ID NO: 2685433 - RNA, 19 nt, Artificial Sequence
  Description of Artificial Sequence: Synthetic oligonucleotide
cauaugcguaggguaaaca

SEQ ID NO: 2685434 - RNA, 19 nt, Artificial Sequence
  Description of Artificial Sequence: Synthetic oligonucleotide
ucacaacagcugaguugug

SEQ ID NO: 2685435 - RNA, 19 nt, Artificial Sequence
  Description of Artificial Sequence: Synthetic oligonucleotide
ucacggugguucucacaac

SEQ ID NO: 2685436 - RNA, 19 nt, Artificial Sequence
  Description of Artificial Sequence: Synthetic oligonucleotide
gugaaggccucagccuggg

SEQ ID NO: 2685437 - RNA, 19 nt, Artificial Sequence
  Description of Artificial Sequence: Synthetic oligonucleotide
gagcacagggcaggacuag

SEQ ID NO: 2685438 - RNA, 19 nt, Artificial Sequence
  Description of Artificial Sequence: Synthetic oligonucleotide
ggcuugggaauuauggcuc

SEQ ID NO: 2685439 - RNA, 19 nt, Artificial Sequence
  Description of Artificial Sequence: Synthetic oligonucleotide
uagaaggcuugggaauuau

SEQ ID NO: 2685440 - RNA, 19 nt, Artificial Sequence
  Description of Artificial Sequence: Synthetic oligonucleotide
accccguacuccucuuuga

SEQ ID NO: 2685441 - RNA, 19 nt, Artificial Sequence
  Description of Artificial Sequence: Synthetic oligonucleotide
ugguacugacucgaacaau

SEQ ID NO: 2685442 - RNA, 19 nt, Artificial Sequence
  Description of Artificial Sequence: Synthetic oligonucleotide
ggacacugaagaucaggga

SEQ ID NO: 2685443 - RNA, 19 nt, Artificial Sequence
  Description of Artificial Sequence: Synthetic oligonucleotide
accccuucuggaggauggc

SEQ ID NO: 2685444 - RNA, 19 nt, Artificial Sequence
  Description of Artificial Sequence: Synthetic oligonucleotide
ucagccuggggcgggcagc

SEQ ID NO: 2685445 - RNA, 19 nt, Artificial Sequence
  Description of Artificial Sequence: Synthetic oligonucleotide
guggacagauauauaugaa

SEQ ID NO: 2685446 - RNA, 19 nt, Artificial Sequence
  Description of Artificial Sequence: Synthetic oligonucleotide
auggacuguggagcacagg

SEQ ID NO: 2685447 - RNA, 19 nt, Artificial Sequence
  Description of Artificial Sequence: Synthetic oligonucleotide
cucggucaccccguacucc

SEQ ID NO: 2685448 - RNA, 19 nt, Artificial Sequence
  Description of Artificial Sequence: Synthetic oligonucleotide
acucgaacaaucaccccuu

SEQ ID NO: 2685449 - RNA, 19 nt, Artificial Sequence
  Description of Artificial Sequence: Synthetic oligonucleotide
ggugguucucacaacagcu

SEQ ID NO: 2685450 - RNA, 19 nt, Artificial Sequence
  Description of Artificial Sequence: Synthetic oligonucleotide
cuccaaucacaucgcccac

SEQ ID NO: 2685451 - RNA, 19 nt, Artificial Sequence
  Description of Artificial Sequence: Synthetic oligonucleotide
gcaaugaaacccaggcaac

SEQ ID NO: 2685452 - RNA, 19 nt, Artificial Sequence
  Description of Artificial Sequence: Synthetic oligonucleotide
cuugaaugacugccacaga

SEQ ID NO: 2685453 - RNA, 19 nt, Artificial Sequence
  Description of Artificial Sequence: Synthetic oligonucleotide
ggugaaggccucagccugg

SEQ ID NO: 2685454 - RNA, 19 nt, Artificial Sequence
  Description of Artificial Sequence: Synthetic oligonucleotide
cguugaacagggaccagac

SEQ ID NO: 2685455 - RNA, 19 nt, Artificial Sequence
  Description of Artificial Sequence: Synthetic oligonucleotide
ggcuccaaucacaucgccc

SEQ ID NO: 2685456 - RNA, 19 nt, Artificial Sequence
  Description of Artificial Sequence: Synthetic oligonucleotide
cuuugugaaaaggcuugaa

SEQ ID NO: 2685457 - RNA, 19 nt, Artificial Sequence
  Description of Artificial Sequence: Synthetic oligonucleotide
acaaagggugaaggccuca

SEQ ID NO: 2685458 - RNA, 19 nt, Artificial Sequence
  Description of Artificial Sequence: Synthetic oligonucleotide
cccuucuggaggauggcug

SEQ ID NO: 2685459 - RNA, 19 nt, Artificial Sequence
  Description of Artificial Sequence: Synthetic oligonucleotide
cucgaacaaucaccccuuc

SEQ ID NO: 2685460 - RNA, 19 nt, Artificial Sequence
  Description of Artificial Sequence: Synthetic oligonucleotide
aacugauguugaggcacuu

SEQ ID NO: 2685461 - RNA, 19 nt, Artificial Sequence
  Description of Artificial Sequence: Synthetic oligonucleotide
guucucacaacagcugagu

SEQ ID NO: 2685462 - RNA, 19 nt, Artificial Sequence
  Description of Artificial Sequence: Synthetic oligonucleotide
guacuccucuuugauuguc

SEQ ID NO: 2685463 - RNA, 19 nt, Artificial Sequence
  Description of Artificial Sequence: Synthetic oligonucleotide
agcacagggcaggacuaga

SEQ ID NO: 2685464 - RNA, 19 nt, Artificial Sequence
  Description of Artificial Sequence: Synthetic oligonucleotide
ucaccccgugcauuacuuu

SEQ ID NO: 2685465 - RNA, 19 nt, Artificial Sequence
  Description of Artificial Sequence: Synthetic oligonucleotide
gcucaugguacugacucga

SEQ ID NO: 2685466 - RNA, 19 nt, Artificial Sequence
  Description of Artificial Sequence: Synthetic oligonucleotide
cguaggguaaacaaagggu

SEQ ID NO: 2685467 - RNA, 19 nt, Artificial Sequence
  Description of Artificial Sequence: Synthetic oligonucleotide
cucagccuggggcgggcag

SEQ ID NO: 2685468 - RNA, 19 nt, Artificial Sequence
  Description of Artificial Sequence: Synthetic oligonucleotide
gaacugauguugaggcacu

SEQ ID NO: 2685469 - RNA, 19 nt, Artificial Sequence
  Description of Artificial Sequence: Synthetic oligonucleotide
ggacuguggagcacagggc

SEQ ID NO: 2685470 - RNA, 19 nt, Artificial Sequence
  Description of Artificial Sequence: Synthetic oligonucleotide
ucaccccguacuccucuuu

SEQ ID NO: 2685471 - RNA, 19 nt, Artificial Sequence
  Description of Artificial Sequence: Synthetic oligonucleotide
gcacagcaacgucucuggg

SEQ ID NO: 2685472 - RNA, 19 nt, Artificial Sequence
  Description of Artificial Sequence: Synthetic oligonucleotide
gcuugggaauuauggcuca

SEQ ID NO: 2685473 - RNA, 19 nt, Artificial Sequence
  Description of Artificial Sequence: Synthetic oligonucleotide
ugacugccacagagguggu

SEQ ID NO: 2685474 - RNA, 19 nt, Artificial Sequence
  Description of Artificial Sequence: Synthetic oligonucleotide
ggcuugaaugacugccaca

SEQ ID NO: 2685475 - RNA, 19 nt, Artificial Sequence
  Description of Artificial Sequence: Synthetic oligonucleotide
gacugccacagagguggug

SEQ ID NO: 2685476 - RNA, 19 nt, Artificial Sequence
  Description of Artificial Sequence: Synthetic oligonucleotide
uaaugaccaugaggacacu

SEQ ID NO: 2685477 - RNA, 19 nt, Artificial Sequence
  Description of Artificial Sequence: Synthetic oligonucleotide
gggaacugauguugaggca

SEQ ID NO: 2685478 - RNA, 19 nt, Artificial Sequence
  Description of Artificial Sequence: Synthetic oligonucleotide
cucaugguacugacucgaa

SEQ ID NO: 2685479 - RNA, 19 nt, Artificial Sequence
  Description of Artificial Sequence: Synthetic oligonucleotide
gggaauuauggcucauggu

SEQ ID NO: 2685480 - RNA, 19 nt, Artificial Sequence
  Description of Artificial Sequence: Synthetic oligonucleotide
auggcucaugguacugacu

SEQ ID NO: 2685481 - RNA, 19 nt, Artificial Sequence
  Description of Artificial Sequence: Synthetic oligonucleotide
ccaaucacaucgcccacca

SEQ ID NO: 2685482 - RNA, 19 nt, Artificial Sequence
  Description of Artificial Sequence: Synthetic oligonucleotide
uugucaccccgugcauuac

SEQ ID NO: 2685483 - RNA, 19 nt, Artificial Sequence
  Description of Artificial Sequence: Synthetic oligonucleotide
guagaaggcuugggaauua

SEQ ID NO: 2685484 - RNA, 19 nt, Artificial Sequence
  Description of Artificial Sequence: Synthetic oligonucleotide
gcaggacuagaacccagaa

SEQ ID NO: 2685485 - RNA, 19 nt, Artificial Sequence
  Description of Artificial Sequence: Synthetic oligonucleotide
ccuggacuucacagaguag

SEQ ID NO: 2685486 - RNA, 19 nt, Artificial Sequence
  Description of Artificial Sequence: Synthetic oligonucleotide
caauaaugaugcagauaau

SEQ ID NO: 2685487 - RNA, 19 nt, Artificial Sequence
  Description of Artificial Sequence: Synthetic oligonucleotide
cggugguucucacaacagc

SEQ ID NO: 2685488 - RNA, 19 nt, Artificial Sequence
  Description of Artificial Sequence: Synthetic oligonucleotide
gcauaugcguaggguaaac

SEQ ID NO: 2685489 - RNA, 19 nt, Artificial Sequence
  Description of Artificial Sequence: Synthetic oligonucleotide
cacugaagaucagggaacu

SEQ ID NO: 2685490 - RNA, 19 nt, Artificial Sequence
  Description of Artificial Sequence: Synthetic oligonucleotide
aggccucagccuggggcgg

SEQ ID NO: 2685491 - RNA, 19 nt, Artificial Sequence
  Description of Artificial Sequence: Synthetic oligonucleotide
gggcuccaaucacaucgcc

SEQ ID NO: 2685492 - RNA, 19 nt, Artificial Sequence
  Description of Artificial Sequence: Synthetic oligonucleotide
caggacuagaacccagaau

SEQ ID NO: 2685493 - RNA, 19 nt, Artificial Sequence
  Description of Artificial Sequence: Synthetic oligonucleotide
acccagaauguggcacucu

SEQ ID NO: 2685494 - RNA, 19 nt, Artificial Sequence
  Description of Artificial Sequence: Synthetic oligonucleotide
cacuguggacagauauaua

SEQ ID NO: 2685495 - RNA, 19 nt, Artificial Sequence
  Description of Artificial Sequence: Synthetic oligonucleotide
gcguugaacagggaccaga

SEQ ID NO: 2685496 - RNA, 19 nt, Artificial Sequence
  Description of Artificial Sequence: Synthetic oligonucleotide
cagccuggggcgggcagcc

SEQ ID NO: 2685497 - RNA, 19 nt, Artificial Sequence
  Description of Artificial Sequence: Synthetic oligonucleotide
ggcaggacuagaacccaga

SEQ ID NO: 2685498 - RNA, 19 nt, Artificial Sequence
  Description of Artificial Sequence: Synthetic oligonucleotide
uggauccacuguggacaga

SEQ ID NO: 2685499 - RNA, 19 nt, Artificial Sequence
  Description of Artificial Sequence: Synthetic oligonucleotide
ggauccacuguggacagau

SEQ ID NO: 2685500 - RNA, 19 nt, Artificial Sequence
  Description of Artificial Sequence: Synthetic oligonucleotide
ggcgggcagccauggacug

SEQ ID NO: 2685501 - RNA, 19 nt, Artificial Sequence
  Description of Artificial Sequence: Synthetic oligonucleotide
ccccagcucggucaccccg

SEQ ID NO: 2685502 - RNA, 19 nt, Artificial Sequence
  Description of Artificial Sequence: Synthetic oligonucleotide
gaaguccggcauuguuggu

SEQ ID NO: 2685503 - RNA, 19 nt, Artificial Sequence
  Description of Artificial Sequence: Synthetic oligonucleotide
ggcagccauggacugugga

SEQ ID NO: 2685504 - RNA, 19 nt, Artificial Sequence
  Description of Artificial Sequence: Synthetic oligonucleotide
accccgugcauuacuuuua

SEQ ID NO: 2685505 - RNA, 19 nt, Artificial Sequence
  Description of Artificial Sequence: Synthetic oligonucleotide
gcgcguugaacagggacca

SEQ ID NO: 2685506 - RNA, 19 nt, Artificial Sequence
  Description of Artificial Sequence: Synthetic oligonucleotide
cagcugaguugugggguuc

SEQ ID NO: 2685507 - RNA, 19 nt, Artificial Sequence
  Description of Artificial Sequence: Synthetic oligonucleotide
cagcucggucaccccguac

SEQ ID NO: 2685508 - RNA, 19 nt, Artificial Sequence
  Description of Artificial Sequence: Synthetic oligonucleotide
ggacuagaacccagaaugu

SEQ ID NO: 2685509 - RNA, 19 nt, Artificial Sequence
  Description of Artificial Sequence: Synthetic oligonucleotide
caccccgugcauuacuuuu

SEQ ID NO: 2685510 - RNA, 19 nt, Artificial Sequence
  Description of Artificial Sequence: Synthetic oligonucleotide
gcucggucaccccguacuc

SEQ ID NO: 2685511 - RNA, 19 nt, Artificial Sequence
  Description of Artificial Sequence: Synthetic oligonucleotide
guggagcacagggcaggac

SEQ ID NO: 2685512 - RNA, 19 nt, Artificial Sequence
  Description of Artificial Sequence: Synthetic oligonucleotide
gauccacuguggacagaua

SEQ ID NO: 2685513 - RNA, 19 nt, Artificial Sequence
  Description of Artificial Sequence: Synthetic oligonucleotide
cccaggcaacagaaguuca

SEQ ID NO: 2685514 - RNA, 19 nt, Artificial Sequence
  Description of Artificial Sequence: Synthetic oligonucleotide
ggucaccccguacuccucu

SEQ ID NO: 2685515 - RNA, 19 nt, Artificial Sequence
  Description of Artificial Sequence: Synthetic oligonucleotide
aucaccccuucuggaggau

SEQ ID NO: 2685516 - RNA, 19 nt, Artificial Sequence
  Description of Artificial Sequence: Synthetic oligonucleotide
agagcgcguugaacaggga

SEQ ID NO: 2685517 - RNA, 19 nt, Artificial Sequence
  Description of Artificial Sequence: Synthetic oligonucleotide
gcacagggcaggacuagaa

SEQ ID NO: 2685518 - RNA, 19 nt, Artificial Sequence
  Description of Artificial Sequence: Synthetic oligonucleotide
ccuggggcgggcagccaug

SEQ ID NO: 2685519 - RNA, 19 nt, Artificial Sequence
  Description of Artificial Sequence: Synthetic oligonucleotide
cuucuggaggauggcugcu

SEQ ID NO: 2685520 - RNA, 19 nt, Artificial Sequence
  Description of Artificial Sequence: Synthetic oligonucleotide
ggggaaguccggcauuguu

SEQ ID NO: 2685521 - RNA, 19 nt, Artificial Sequence
  Description of Artificial Sequence: Synthetic oligonucleotide
ggccucagccuggggcggg

SEQ ID NO: 2685522 - RNA, 19 nt, Artificial Sequence
  Description of Artificial Sequence: Synthetic oligonucleotide
cuugggaauuauggcucau

SEQ ID NO: 2685523 - RNA, 19 nt, Artificial Sequence
  Description of Artificial Sequence: Synthetic oligonucleotide
ccaggcaacagaaguucau

SEQ ID NO: 2685524 - RNA, 19 nt, Artificial Sequence
  Description of Artificial Sequence: Synthetic oligonucleotide
gggcgggcagccauggacu

SEQ ID NO: 2685525 - RNA, 19 nt, Artificial Sequence
  Description of Artificial Sequence: Synthetic oligonucleotide
ccaugaggacacugaagau

SEQ ID NO: 2685526 - RNA, 19 nt, Artificial Sequence
  Description of Artificial Sequence: Synthetic oligonucleotide
ccucuuugauugucucaua

SEQ ID NO: 2685527 - RNA, 19 nt, Artificial Sequence
  Description of Artificial Sequence: Synthetic oligonucleotide
guccggcauuguuggugua

SEQ ID NO: 2685528 - RNA, 19 nt, Artificial Sequence
  Description of Artificial Sequence: Synthetic oligonucleotide
gcaacgucucugggcaugu

SEQ ID NO: 2685529 - RNA, 19 nt, Artificial Sequence
  Description of Artificial Sequence: Synthetic oligonucleotide
gucaccccguacuccucuu

SEQ ID NO: 2685530 - RNA, 19 nt, Artificial Sequence
  Description of Artificial Sequence: Synthetic oligonucleotide
cccagaauguggcacucuu

SEQ ID NO: 2685531 - RNA, 19 nt, Artificial Sequence
  Description of Artificial Sequence: Synthetic oligonucleotide
caaucacaucgcccaccau

SEQ ID NO: 2685532 - RNA, 19 nt, Artificial Sequence
  Description of Artificial Sequence: Synthetic oligonucleotide
ccagaauguggcacucuuu

SEQ ID NO: 2685533 - RNA, 19 nt, Artificial Sequence
  Description of Artificial Sequence: Synthetic oligonucleotide
gccucagccuggggcgggc

SEQ ID NO: 2685534 - RNA, 19 nt, Artificial Sequence
  Description of Artificial Sequence: Synthetic oligonucleotide
agccuggggcgggcagcca

SEQ ID NO: 2685535 - RNA, 19 nt, Artificial Sequence
  Description of Artificial Sequence: Synthetic oligonucleotide
cagaggugguggagacaau

SEQ ID NO: 2685536 - RNA, 19 nt, Artificial Sequence
  Description of Artificial Sequence: Synthetic oligonucleotide
cagcaacgucucugggcau

SEQ ID NO: 2685537 - RNA, 19 nt, Artificial Sequence
  Description of Artificial Sequence: Synthetic oligonucleotide
cguacuccucuuugauugu

SEQ ID NO: 2685538 - RNA, 19 nt, Artificial Sequence
  Description of Artificial Sequence: Synthetic oligonucleotide
cccguacuccucuuugauu

SEQ ID NO: 2685539 - RNA, 19 nt, Artificial Sequence
  Description of Artificial Sequence: Synthetic oligonucleotide
ccccguacuccucuuugau

SEQ ID NO: 2685540 - RNA, 19 nt, Artificial Sequence
  Description of Artificial Sequence: Synthetic oligonucleotide
cgcguugaacagggaccag

SEQ ID NO: 2685541 - RNA, 19 nt, Artificial Sequence
  Description of Artificial Sequence: Synthetic oligonucleotide
gccuggggcgggcagccau

SEQ ID NO: 2685542 - RNA, 19 nt, Artificial Sequence
  Description of Artificial Sequence: Synthetic oligonucleotide
cggcauuguugguguagaa

SEQ ID NO: 2685543 - RNA, 19 nt, Artificial Sequence
  Description of Artificial Sequence: Synthetic oligonucleotide
ccccgugcauuacuuuuau

SEQ ID NO: 2685544 - RNA, 19 nt, Artificial Sequence
  Description of Artificial Sequence: Synthetic oligonucleotide
cggucaccccguacuccuc

SEQ ID NO: 2685545 - RNA, 19 nt, Artificial Sequence
  Description of Artificial Sequence: Synthetic oligonucleotide
ccccuucuggaggauggcu

SEQ ID NO: 2685546 - RNA, 19 nt, Artificial Sequence
  Description of Artificial Sequence: Synthetic oligonucleotide
ccagcucggucaccccgua

SEQ ID NO: 2685547 - RNA, 19 nt, Artificial Sequence
  Description of Artificial Sequence: Synthetic oligonucleotide
cgucucugggcauguugau

SEQ ID NO: 2685548 - RNA, 19 nt, Artificial Sequence
  Description of Artificial Sequence: Synthetic oligonucleotide
gcgggcagccauggacugu

SEQ ID NO: 2685549 - RNA, 19 nt, Artificial Sequence
  Description of Artificial Sequence: Synthetic oligonucleotide
cccgugcauuacuuuuauu

SEQ ID NO: 2685550 - RNA, 19 nt, Artificial Sequence
  Description of Artificial Sequence: Synthetic oligonucleotide
ccucagccuggggcgggca

SEQ ID NO: 2685551 - RNA, 19 nt, Artificial Sequence
  Description of Artificial Sequence: Synthetic oligonucleotide
aauaccaugaaauaaauca

SEQ ID NO: 2685552 - RNA, 19 nt, Artificial Sequence
  Description of Artificial Sequence: Synthetic oligonucleotide
aaauaaaucaaaaugcuac

SEQ ID NO: 2685553 - RNA, 19 nt, Artificial Sequence
  Description of Artificial Sequence: Synthetic oligonucleotide
uuauauacacuuuaaaagg

SEQ ID NO: 2685554 - RNA, 19 nt, Artificial Sequence
  Description of Artificial Sequence: Synthetic oligonucleotide
aauacaauuauauacacuu

SEQ ID NO: 2685555 - RNA, 19 nt, Artificial Sequence
  Description of Artificial Sequence: Synthetic oligonucleotide
aaaucaaaaugcuacaaag

SEQ ID NO: 2685556 - RNA, 19 nt, Artificial Sequence
  Description of Artificial Sequence: Synthetic oligonucleotide
ucaaauacaauuauauaca

SEQ ID NO: 2685557 - RNA, 19 nt, Artificial Sequence
  Description of Artificial Sequence: Synthetic oligonucleotide
auaaaauucuguuacuggg

SEQ ID NO: 2685558 - RNA, 19 nt, Artificial Sequence
  Description of Artificial Sequence: Synthetic oligonucleotide
aaaggauugacauccccac

SEQ ID NO: 2685559 - RNA, 19 nt, Artificial Sequence
  Description of Artificial Sequence: Synthetic oligonucleotide
aaugcuacaaaggauugac

SEQ ID NO: 2685560 - RNA, 19 nt, Artificial Sequence
  Description of Artificial Sequence: Synthetic oligonucleotide
aauaaaucaaaaugcuaca

SEQ ID NO: 2685561 - RNA, 19 nt, Artificial Sequence
  Description of Artificial Sequence: Synthetic oligonucleotide
aggauagcgauacagguac

SEQ ID NO: 2685562 - RNA, 19 nt, Artificial Sequence
  Description of Artificial Sequence: Synthetic oligonucleotide
uuuauuaacccauucuaca

SEQ ID NO: 2685563 - RNA, 19 nt, Artificial Sequence
  Description of Artificial Sequence: Synthetic oligonucleotide
aaucaaaaugcuacaaagg

SEQ ID NO: 2685564 - RNA, 19 nt, Artificial Sequence
  Description of Artificial Sequence: Synthetic oligonucleotide
ugcacauaaacacauuuca

SEQ ID NO: 2685565 - RNA, 19 nt, Artificial Sequence
  Description of Artificial Sequence: Synthetic oligonucleotide
aucaaaaugcuacaaagga

SEQ ID NO: 2685566 - RNA, 19 nt, Artificial Sequence
  Description of Artificial Sequence: Synthetic oligonucleotide
uauacacuuuaaaaggacc

SEQ ID NO: 2685567 - RNA, 19 nt, Artificial Sequence
  Description of Artificial Sequence: Synthetic oligonucleotide
ucaaugacuuuauuaaccc

SEQ ID NO: 2685568 - RNA, 19 nt, Artificial Sequence
  Description of Artificial Sequence: Synthetic oligonucleotide
aaaauucuguuacugggcu

SEQ ID NO: 2685569 - RNA, 19 nt, Artificial Sequence
  Description of Artificial Sequence: Synthetic oligonucleotide
cucaaugacuuuauuaacc

SEQ ID NO: 2685570 - RNA, 19 nt, Artificial Sequence
  Description of Artificial Sequence: Synthetic oligonucleotide
auauuucauuauuaauacc

SEQ ID NO: 2685571 - RNA, 19 nt, Artificial Sequence
  Description of Artificial Sequence: Synthetic oligonucleotide
guaaucugcgccuuuaucc

SEQ ID NO: 2685572 - RNA, 19 nt, Artificial Sequence
  Description of Artificial Sequence: Synthetic oligonucleotide
uaucaaguuacucaaugac

SEQ ID NO: 2685573 - RNA, 19 nt, Artificial Sequence
  Description of Artificial Sequence: Synthetic oligonucleotide
cuacaaaggauugacaucc

SEQ ID NO: 2685574 - RNA, 19 nt, Artificial Sequence
  Description of Artificial Sequence: Synthetic oligonucleotide
uacucaaugacuuuauuaa

SEQ ID NO: 2685575 - RNA, 19 nt, Artificial Sequence
  Description of Artificial Sequence: Synthetic oligonucleotide
uaaaauucuguuacugggc

SEQ ID NO: 2685576 - RNA, 19 nt, Artificial Sequence
  Description of Artificial Sequence: Synthetic oligonucleotide
aauucuguuacugggcuuc

SEQ ID NO: 2685577 - RNA, 19 nt, Artificial Sequence
  Description of Artificial Sequence: Synthetic oligonucleotide
aaugcaauauuucauuauu

SEQ ID NO: 2685578 - RNA, 19 nt, Artificial Sequence
  Description of Artificial Sequence: Synthetic oligonucleotide
ucgaagugcaaauuccucg

SEQ ID NO: 2685579 - RNA, 19 nt, Artificial Sequence
  Description of Artificial Sequence: Synthetic oligonucleotide
aaaucugcaauaaaauucu

SEQ ID NO: 2685580 - RNA, 19 nt, Artificial Sequence
  Description of Artificial Sequence: Synthetic oligonucleotide
acacauuucaaauacaauu

SEQ ID NO: 2685581 - RNA, 19 nt, Artificial Sequence
  Description of Artificial Sequence: Synthetic oligonucleotide
ugcgccuuuauccaggaag

SEQ ID NO: 2685582 - RNA, 19 nt, Artificial Sequence
  Description of Artificial Sequence: Synthetic oligonucleotide
ucauuuaggaucuuccacu

SEQ ID NO: 2685583 - RNA, 19 nt, Artificial Sequence
  Description of Artificial Sequence: Synthetic oligonucleotide
auacacuuuaaaaggaccc

SEQ ID NO: 2685584 - RNA, 19 nt, Artificial Sequence
  Description of Artificial Sequence: Synthetic oligonucleotide
gaggauguugcccugacgc

SEQ ID NO: 2685585 - RNA, 19 nt, Artificial Sequence
  Description of Artificial Sequence: Synthetic oligonucleotide
uaaguaucaaguuacucaa

SEQ ID NO: 2685586 - RNA, 19 nt, Artificial Sequence
  Description of Artificial Sequence: Synthetic oligonucleotide
ucaaguuacucaaugacuu

SEQ ID NO: 2685587 - RNA, 19 nt, Artificial Sequence
  Description of Artificial Sequence: Synthetic oligonucleotide
uuauuaacccauucuacac

SEQ ID NO: 2685588 - RNA, 19 nt, Artificial Sequence
  Description of Artificial Sequence: Synthetic oligonucleotide
caauauuucauuauuaaua

SEQ ID NO: 2685589 - RNA, 19 nt, Artificial Sequence
  Description of Artificial Sequence: Synthetic oligonucleotide
aguucagcccauuuccacc

SEQ ID NO: 2685590 - RNA, 19 nt, Artificial Sequence
  Description of Artificial Sequence: Synthetic oligonucleotide
ucaaucucauuuaggaucu

SEQ ID NO: 2685591 - RNA, 19 nt, Artificial Sequence
  Description of Artificial Sequence: Synthetic oligonucleotide
uauuaauaccaugaaauaa

SEQ ID NO: 2685592 - RNA, 19 nt, Artificial Sequence
  Description of Artificial Sequence: Synthetic oligonucleotide
aaguucagcccauuuccac

SEQ ID NO: 2685593 - RNA, 19 nt, Artificial Sequence
  Description of Artificial Sequence: Synthetic oligonucleotide
ucugcaauaaaauucuguu

SEQ ID NO: 2685594 - RNA, 19 nt, Artificial Sequence
  Description of Artificial Sequence: Synthetic oligonucleotide
acauaaacacauuucaaau

SEQ ID NO: 2685595 - RNA, 19 nt, Artificial Sequence
  Description of Artificial Sequence: Synthetic oligonucleotide
uauuaacccauucuacaca

SEQ ID NO: 2685596 - RNA, 19 nt, Artificial Sequence
  Description of Artificial Sequence: Synthetic oligonucleotide
ugcaauauuucauuauuaa

SEQ ID NO: 2685597 - RNA, 19 nt, Artificial Sequence
  Description of Artificial Sequence: Synthetic oligonucleotide
uuaaaaggacccaaugcaa

SEQ ID NO: 2685598 - RNA, 19 nt, Artificial Sequence
  Description of Artificial Sequence: Synthetic oligonucleotide
gauacagguacuucucuug

SEQ ID NO: 2685599 - RNA, 19 nt, Artificial Sequence
  Description of Artificial Sequence: Synthetic oligonucleotide
acuuuaaaaggacccaaug

SEQ ID NO: 2685600 - RNA, 19 nt, Artificial Sequence
  Description of Artificial Sequence: Synthetic oligonucleotide
augaugacaggcuccaguc

SEQ ID NO: 2685601 - RNA, 19 nt, Artificial Sequence
  Description of Artificial Sequence: Synthetic oligonucleotide
aaugacuuuauuaacccau

SEQ ID NO: 2685602 - RNA, 19 nt, Artificial Sequence
  Description of Artificial Sequence: Synthetic oligonucleotide
ugcuacaaaggauugacau

SEQ ID NO: 2685603 - RNA, 19 nt, Artificial Sequence
  Description of Artificial Sequence: Synthetic oligonucleotide
uuaauaccaugaaauaaau

SEQ ID NO: 2685604 - RNA, 19 nt, Artificial Sequence
  Description of Artificial Sequence: Synthetic oligonucleotide
uuacucaaugacuuuauua

SEQ ID NO: 2685605 - RNA, 19 nt, Artificial Sequence
  Description of Artificial Sequence: Synthetic oligonucleotide
auuaauaccaugaaauaaa

SEQ ID NO: 2685606 - RNA, 19 nt, Artificial Sequence
  Description of Artificial Sequence: Synthetic oligonucleotide
ucugaauaugucaucuccu

SEQ ID NO: 2685607 - RNA, 19 nt, Artificial Sequence
  Description of Artificial Sequence: Synthetic oligonucleotide
gaugacaggcuccagucgc

SEQ ID NO: 2685608 - RNA, 19 nt, Artificial Sequence
  Description of Artificial Sequence: Synthetic oligonucleotide
cucugaauaugucaucucc

SEQ ID NO: 2685609 - RNA, 19 nt, Artificial Sequence
  Description of Artificial Sequence: Synthetic oligonucleotide
aauaugucaucuccucaca

SEQ ID NO: 2685610 - RNA, 19 nt, Artificial Sequence
  Description of Artificial Sequence: Synthetic oligonucleotide
ugaauaugucaucuccuca

SEQ ID NO: 2685611 - RNA, 19 nt, Artificial Sequence
  Description of Artificial Sequence: Synthetic oligonucleotide
aagaaaucugcaauaaaau

SEQ ID NO: 2685612 - RNA, 19 nt, Artificial Sequence
  Description of Artificial Sequence: Synthetic oligonucleotide
auaugucaucuccucacac

SEQ ID NO: 2685613 - RNA, 19 nt, Artificial Sequence
  Description of Artificial Sequence: Synthetic oligonucleotide
agaaaucugcaauaaaauu

SEQ ID NO: 2685614 - RNA, 19 nt, Artificial Sequence
  Description of Artificial Sequence: Synthetic oligonucleotide
ugugccuaagaaaucugca

SEQ ID NO: 2685615 - RNA, 19 nt, Artificial Sequence
  Description of Artificial Sequence: Synthetic oligonucleotide
aaauacaauuauauacacu

SEQ ID NO: 2685616 - RNA, 19 nt, Artificial Sequence
  Description of Artificial Sequence: Synthetic oligonucleotide
uucucaaucucugaauaug

SEQ ID NO: 2685617 - RNA, 19 nt, Artificial Sequence
  Description of Artificial Sequence: Synthetic oligonucleotide
uaugucaucuccucacaca

SEQ ID NO: 2685618 - RNA, 19 nt, Artificial Sequence
  Description of Artificial Sequence: Synthetic oligonucleotide
cucacacacacacacacac

SEQ ID NO: 2685619 - RNA, 19 nt, Artificial Sequence
  Description of Artificial Sequence: Synthetic oligonucleotide
uaaaaggacccaaugcaau

SEQ ID NO: 2685620 - RNA, 19 nt, Artificial Sequence
  Description of Artificial Sequence: Synthetic oligonucleotide
uaaucugcgccuuuaucca

SEQ ID NO: 2685621 - RNA, 19 nt, Artificial Sequence
  Description of Artificial Sequence: Synthetic oligonucleotide
aucucgaagugcaaauucc

SEQ ID NO: 2685622 - RNA, 19 nt, Artificial Sequence
  Description of Artificial Sequence: Synthetic oligonucleotide
aaaaugcuacaaaggauug

SEQ ID NO: 2685623 - RNA, 19 nt, Artificial Sequence
  Description of Artificial Sequence: Synthetic oligonucleotide
gacauccccacuuucagca

SEQ ID NO: 2685624 - RNA, 19 nt, Artificial Sequence
  Description of Artificial Sequence: Synthetic oligonucleotide
caggccugcacauaaacac

SEQ ID NO: 2685625 - RNA, 19 nt, Artificial Sequence
  Description of Artificial Sequence: Synthetic oligonucleotide
aaaaggacccaaugcaaua

SEQ ID NO: 2685626 - RNA, 19 nt, Artificial Sequence
  Description of Artificial Sequence: Synthetic oligonucleotide
aacccauucuacacaggcc

SEQ ID NO: 2685627 - RNA, 19 nt, Artificial Sequence
  Description of Artificial Sequence: Synthetic oligonucleotide
acccauucuacacaggccu

SEQ ID NO: 2685628 - RNA, 19 nt, Artificial Sequence
  Description of Artificial Sequence: Synthetic oligonucleotide
cacacacacacacacacac

SEQ ID NO: 2685629 - RNA, 19 nt, Artificial Sequence
  Description of Artificial Sequence: Synthetic oligonucleotide
acuucucuugaucucgaag

SEQ ID NO: 2685630 - RNA, 19 nt, Artificial Sequence
  Description of Artificial Sequence: Synthetic oligonucleotide
uucucuugaucucgaagug

SEQ ID NO: 2685631 - RNA, 19 nt, Artificial Sequence
  Description of Artificial Sequence: Synthetic oligonucleotide
uuaccguuucucaaucucu

SEQ ID NO: 2685632 - RNA, 19 nt, Artificial Sequence
  Description of Artificial Sequence: Synthetic oligonucleotide
ucuguuacugggcuuccca

SEQ ID NO: 2685633 - RNA, 19 nt, Artificial Sequence
  Description of Artificial Sequence: Synthetic oligonucleotide
cucauuuaggaucuuccac

SEQ ID NO: 2685634 - RNA, 19 nt, Artificial Sequence
  Description of Artificial Sequence: Synthetic oligonucleotide
ugccuaagaaaucugcaau

SEQ ID NO: 2685635 - RNA, 19 nt, Artificial Sequence
  Description of Artificial Sequence: Synthetic oligonucleotide
gaucucgaagugcaaauuc

SEQ ID NO: 2685636 - RNA, 19 nt, Artificial Sequence
  Description of Artificial Sequence: Synthetic oligonucleotide
augacgaggauguugcccu

SEQ ID NO: 2685637 - RNA, 19 nt, Artificial Sequence
  Description of Artificial Sequence: Synthetic oligonucleotide
ucucgaagugcaaauuccu

SEQ ID NO: 2685638 - RNA, 19 nt, Artificial Sequence
  Description of Artificial Sequence: Synthetic oligonucleotide
gacccaaugcaauauuuca

SEQ ID NO: 2685639 - RNA, 19 nt, Artificial Sequence
  Description of Artificial Sequence: Synthetic oligonucleotide
ccuuuauccaggaaguagg

SEQ ID NO: 2685640 - RNA, 19 nt, Artificial Sequence
  Description of Artificial Sequence: Synthetic oligonucleotide
gaagugcaaauuccucggg

SEQ ID NO: 2685641 - RNA, 19 nt, Artificial Sequence
  Description of Artificial Sequence: Synthetic oligonucleotide
uguuacugggcuucccaag

SEQ ID NO: 2685642 - RNA, 19 nt, Artificial Sequence
  Description of Artificial Sequence: Synthetic oligonucleotide
cacauuucaaauacaauua

SEQ ID NO: 2685643 - RNA, 19 nt, Artificial Sequence
  Description of Artificial Sequence: Synthetic oligonucleotide
uaccguuucucaaucucug

SEQ ID NO: 2685644 - RNA, 19 nt, Artificial Sequence
  Description of Artificial Sequence: Synthetic oligonucleotide
uuaacccauucuacacagg

SEQ ID NO: 2685645 - RNA, 19 nt, Artificial Sequence
  Description of Artificial Sequence: Synthetic oligonucleotide
aaucugcgccuuuauccag

SEQ ID NO: 2685646 - RNA, 19 nt, Artificial Sequence
  Description of Artificial Sequence: Synthetic oligonucleotide
uguguguguguguaugugu

SEQ ID NO: 2685647 - RNA, 19 nt, Artificial Sequence
  Description of Artificial Sequence: Synthetic oligonucleotide
cugaauaugucaucuccuc

SEQ ID NO: 2685648 - RNA, 19 nt, Artificial Sequence
  Description of Artificial Sequence: Synthetic oligonucleotide
uguaaucugcgccuuuauc

SEQ ID NO: 2685649 - RNA, 19 nt, Artificial Sequence
  Description of Artificial Sequence: Synthetic oligonucleotide
gaugacgaggauguugccc

SEQ ID NO: 2685650 - RNA, 19 nt, Artificial Sequence
  Description of Artificial Sequence: Synthetic oligonucleotide
ugucaucuccucacacacg

SEQ ID NO: 2685651 - RNA, 19 nt, Artificial Sequence
  Description of Artificial Sequence: Synthetic oligonucleotide
ugacuuuauuaacccauuc

SEQ ID NO: 2685652 - RNA, 19 nt, Artificial Sequence
  Description of Artificial Sequence: Synthetic oligonucleotide
uacacuuuaaaaggaccca

SEQ ID NO: 2685653 - RNA, 19 nt, Artificial Sequence
  Description of Artificial Sequence: Synthetic oligonucleotide
guaucaaguuacucaauga

SEQ ID NO: 2685654 - RNA, 19 nt, Artificial Sequence
  Description of Artificial Sequence: Synthetic oligonucleotide
gaaauaaaucaaaaugcua

SEQ ID NO: 2685655 - RNA, 19 nt, Artificial Sequence
  Description of Artificial Sequence: Synthetic oligonucleotide
cugugccuaagaaaucugc

SEQ ID NO: 2685656 - RNA, 19 nt, Artificial Sequence
  Description of Artificial Sequence: Synthetic oligonucleotide
acacacgccagcaucaauc

SEQ ID NO: 2685657 - RNA, 19 nt, Artificial Sequence
  Description of Artificial Sequence: Synthetic oligonucleotide
aaaugcuacaaaggauuga

SEQ ID NO: 2685658 - RNA, 19 nt, Artificial Sequence
  Description of Artificial Sequence: Synthetic oligonucleotide
aucaaguuacucaaugacu

SEQ ID NO: 2685659 - RNA, 19 nt, Artificial Sequence
  Description of Artificial Sequence: Synthetic oligonucleotide
gguacuucucuugaucucg

SEQ ID NO: 2685660 - RNA, 19 nt, Artificial Sequence
  Description of Artificial Sequence: Synthetic oligonucleotide
uugaucucgaagugcaaau

SEQ ID NO: 2685661 - RNA, 19 nt, Artificial Sequence
  Description of Artificial Sequence: Synthetic oligonucleotide
uuucucaaucucugaauau

SEQ ID NO: 2685662 - RNA, 19 nt, Artificial Sequence
  Description of Artificial Sequence: Synthetic oligonucleotide
auagcgauacagguacuuc

SEQ ID NO: 2685663 - RNA, 19 nt, Artificial Sequence
  Description of Artificial Sequence: Synthetic oligonucleotide
agcccauuuccacccaaac

SEQ ID NO: 2685664 - RNA, 19 nt, Artificial Sequence
  Description of Artificial Sequence: Synthetic oligonucleotide
ccaaguucagcccauuucc

SEQ ID NO: 2685665 - RNA, 19 nt, Artificial Sequence
  Description of Artificial Sequence: Synthetic oligonucleotide
aaaggacccaaugcaauau

SEQ ID NO: 2685666 - RNA, 19 nt, Artificial Sequence
  Description of Artificial Sequence: Synthetic oligonucleotide
aaguuacucaaugacuuua

SEQ ID NO: 2685667 - RNA, 19 nt, Artificial Sequence
  Description of Artificial Sequence: Synthetic oligonucleotide
auacagguacuucucuuga

SEQ ID NO: 2685668 - RNA, 19 nt, Artificial Sequence
  Description of Artificial Sequence: Synthetic oligonucleotide
aaggauugacauccccacu

SEQ ID NO: 2685669 - RNA, 19 nt, Artificial Sequence
  Description of Artificial Sequence: Synthetic oligonucleotide
guucagcccauuuccaccc

SEQ ID NO: 2685670 - RNA, 19 nt, Artificial Sequence
  Description of Artificial Sequence: Synthetic oligonucleotide
guuaccguuucucaaucuc

SEQ ID NO: 2685671 - RNA, 19 nt, Artificial Sequence
  Description of Artificial Sequence: Synthetic oligonucleotide
caaaaugcuacaaaggauu

SEQ ID NO: 2685672 - RNA, 19 nt, Artificial Sequence
  Description of Artificial Sequence: Synthetic oligonucleotide
uguguguguguguauguau

SEQ ID NO: 2685673 - RNA, 19 nt, Artificial Sequence
  Description of Artificial Sequence: Synthetic oligonucleotide
ucucuugaucucgaagugc

SEQ ID NO: 2685674 - RNA, 19 nt, Artificial Sequence
  Description of Artificial Sequence: Synthetic oligonucleotide
aggauugacauccccacuu

SEQ ID NO: 2685675 - RNA, 19 nt, Artificial Sequence
  Description of Artificial Sequence: Synthetic oligonucleotide
aacacauuucaaauacaau

SEQ ID NO: 2685676 - RNA, 19 nt, Artificial Sequence
  Description of Artificial Sequence: Synthetic oligonucleotide
auucuacacaggccugcac

SEQ ID NO: 2685677 - RNA, 19 nt, Artificial Sequence
  Description of Artificial Sequence: Synthetic oligonucleotide
accaggauagcgauacagg

SEQ ID NO: 2685678 - RNA, 19 nt, Artificial Sequence
  Description of Artificial Sequence: Synthetic oligonucleotide
cuuggugggagaugacgag

SEQ ID NO: 2685679 - RNA, 19 nt, Artificial Sequence
  Description of Artificial Sequence: Synthetic oligonucleotide
uacaaaggauugacauccc

SEQ ID NO: 2685680 - RNA, 19 nt, Artificial Sequence
  Description of Artificial Sequence: Synthetic oligonucleotide
guuucucaaucucugaaua

SEQ ID NO: 2685681 - RNA, 19 nt, Artificial Sequence
  Description of Artificial Sequence: Synthetic oligonucleotide
agcuuggugggagaugacg

SEQ ID NO: 2685682 - RNA, 19 nt, Artificial Sequence
  Description of Artificial Sequence: Synthetic oligonucleotide
cuucucuugaucucgaagu

SEQ ID NO: 2685683 - RNA, 19 nt, Artificial Sequence
  Description of Artificial Sequence: Synthetic oligonucleotide
aaauucuguuacugggcuu

SEQ ID NO: 2685684 - RNA, 19 nt, Artificial Sequence
  Description of Artificial Sequence: Synthetic oligonucleotide
cacgccagcaucaaucuca

SEQ ID NO: 2685685 - RNA, 19 nt, Artificial Sequence
  Description of Artificial Sequence: Synthetic oligonucleotide
uguguguguguguguaugu

SEQ ID NO: 2685686 - RNA, 19 nt, Artificial Sequence
  Description of Artificial Sequence: Synthetic oligonucleotide
guaugugugugugugugug

SEQ ID NO: 2685687 - RNA, 19 nt, Artificial Sequence
  Description of Artificial Sequence: Synthetic oligonucleotide
acagcuuggugggagauga

SEQ ID NO: 2685688 - RNA, 19 nt, Artificial Sequence
  Description of Artificial Sequence: Synthetic oligonucleotide
uguguguguaugugugugu

SEQ ID NO: 2685689 - RNA, 19 nt, Artificial Sequence
  Description of Artificial Sequence: Synthetic oligonucleotide
auaccaugaaauaaaucaa

SEQ ID NO: 2685690 - RNA, 19 nt, Artificial Sequence
  Description of Artificial Sequence: Synthetic oligonucleotide
agggcugugccuaagaaau

SEQ ID NO: 2685691 - RNA, 19 nt, Artificial Sequence
  Description of Artificial Sequence: Synthetic oligonucleotide
auugacauccccacuuuca

SEQ ID NO: 2685692 - RNA, 19 nt, Artificial Sequence
  Description of Artificial Sequence: Synthetic oligonucleotide
ucacacacacacacacaca

SEQ ID NO: 2685693 - RNA, 19 nt, Artificial Sequence
  Description of Artificial Sequence: Synthetic oligonucleotide
guguguaugugugugugug

SEQ ID NO: 2685694 - RNA, 19 nt, Artificial Sequence
  Description of Artificial Sequence: Synthetic oligonucleotide
uccaugaugacaggcucca

SEQ ID NO: 2685695 - RNA, 19 nt, Artificial Sequence
  Description of Artificial Sequence: Synthetic oligonucleotide
aucugcaauaaaauucugu

SEQ ID NO: 2685696 - RNA, 19 nt, Artificial Sequence
  Description of Artificial Sequence: Synthetic oligonucleotide
uguaugugugugugugugu

SEQ ID NO: 2685697 - RNA, 19 nt, Artificial Sequence
  Description of Artificial Sequence: Synthetic oligonucleotide
cagggccucacacacacac

SEQ ID NO: 2685698 - RNA, 19 nt, Artificial Sequence
  Description of Artificial Sequence: Synthetic oligonucleotide
uguguaugugugugugugu

SEQ ID NO: 2685699 - RNA, 19 nt, Artificial Sequence
  Description of Artificial Sequence: Synthetic oligonucleotide
ugcaccagguccugguaug

SEQ ID NO: 2685700 - RNA, 19 nt, Artificial Sequence
  Description of Artificial Sequence: Synthetic oligonucleotide
uguguguguguaugugugu

SEQ ID NO: 2685701 - RNA, 19 nt, Artificial Sequence
  Description of Artificial Sequence: Synthetic oligonucleotide
cucgaagugcaaauuccuc

SEQ ID NO: 2685702 - RNA, 19 nt, Artificial Sequence
  Description of Artificial Sequence: Synthetic oligonucleotide
uguguguaugugugugugu

SEQ ID NO: 2685703 - RNA, 19 nt, Artificial Sequence
  Description of Artificial Sequence: Synthetic oligonucleotide
cauccccacuuucagcagg

SEQ ID NO: 2685704 - RNA, 19 nt, Artificial Sequence
  Description of Artificial Sequence: Synthetic oligonucleotide
acgaggauguugcccugac

SEQ ID NO: 2685705 - RNA, 19 nt, Artificial Sequence
  Description of Artificial Sequence: Synthetic oligonucleotide
guguaugugugugugugug

SEQ ID NO: 2685706 - RNA, 19 nt, Artificial Sequence
  Description of Artificial Sequence: Synthetic oligonucleotide
uauguaaucugcgccuuua

SEQ ID NO: 2685707 - RNA, 19 nt, Artificial Sequence
  Description of Artificial Sequence: Synthetic oligonucleotide
agguccugguaugacuccc

SEQ ID NO: 2685708 - RNA, 19 nt, Artificial Sequence
  Description of Artificial Sequence: Synthetic oligonucleotide
caccaggauagcgauacag

SEQ ID NO: 2685709 - RNA, 19 nt, Artificial Sequence
  Description of Artificial Sequence: Synthetic oligonucleotide
guguguguguguauguaug

SEQ ID NO: 2685710 - RNA, 19 nt, Artificial Sequence
  Description of Artificial Sequence: Synthetic oligonucleotide
guguguguguguaugugug

SEQ ID NO: 2685711 - RNA, 19 nt, Artificial Sequence
  Description of Artificial Sequence: Synthetic oligonucleotide
uaugugugugugugugugu

SEQ ID NO: 2685712 - RNA, 19 nt, Artificial Sequence
  Description of Artificial Sequence: Synthetic oligonucleotide
uacugggcuucccaaguuc

SEQ ID NO: 2685713 - RNA, 19 nt, Artificial Sequence
  Description of Artificial Sequence: Synthetic oligonucleotide
aaggacccaaugcaauauu

SEQ ID NO: 2685714 - RNA, 19 nt, Artificial Sequence
  Description of Artificial Sequence: Synthetic oligonucleotide
auucuguuacugggcuucc

SEQ ID NO: 2685715 - RNA, 19 nt, Artificial Sequence
  Description of Artificial Sequence: Synthetic oligonucleotide
guugcccugacgcuccagc

SEQ ID NO: 2685716 - RNA, 19 nt, Artificial Sequence
  Description of Artificial Sequence: Synthetic oligonucleotide
augugugugugugugugug

SEQ ID NO: 2685717 - RNA, 19 nt, Artificial Sequence
  Description of Artificial Sequence: Synthetic oligonucleotide
cacaggccugcacauaaac

SEQ ID NO: 2685718 - RNA, 19 nt, Artificial Sequence
  Description of Artificial Sequence: Synthetic oligonucleotide
guguguguguaugugugug

SEQ ID NO: 2685719 - RNA, 19 nt, Artificial Sequence
  Description of Artificial Sequence: Synthetic oligonucleotide
caaugacuuuauuaaccca

SEQ ID NO: 2685720 - RNA, 19 nt, Artificial Sequence
  Description of Artificial Sequence: Synthetic oligonucleotide
acacacacacacgugugug

SEQ ID NO: 2685721 - RNA, 19 nt, Artificial Sequence
  Description of Artificial Sequence: Synthetic oligonucleotide
caguacuggggauggugcc

SEQ ID NO: 2685722 - RNA, 19 nt, Artificial Sequence
  Description of Artificial Sequence: Synthetic oligonucleotide
guguguguaugugugugug

SEQ ID NO: 2685723 - RNA, 19 nt, Artificial Sequence
  Description of Artificial Sequence: Synthetic oligonucleotide
acacuuuaaaaggacccaa

SEQ ID NO: 2685724 - RNA, 19 nt, Artificial Sequence
  Description of Artificial Sequence: Synthetic oligonucleotide
ggggauggugcccagggcc

SEQ ID NO: 2685725 - RNA, 19 nt, Artificial Sequence
  Description of Artificial Sequence: Synthetic oligonucleotide
acacacacacgugugugug

SEQ ID NO: 2685726 - RNA, 19 nt, Artificial Sequence
  Description of Artificial Sequence: Synthetic oligonucleotide
ggagaugacgaggauguug

SEQ ID NO: 2685727 - RNA, 19 nt, Artificial Sequence
  Description of Artificial Sequence: Synthetic oligonucleotide
ugugugugugugugugugu

SEQ ID NO: 2685728 - RNA, 19 nt, Artificial Sequence
  Description of Artificial Sequence: Synthetic oligonucleotide
gugccuaagaaaucugcaa

SEQ ID NO: 2685729 - RNA, 19 nt, Artificial Sequence
  Description of Artificial Sequence: Synthetic oligonucleotide
cugcaauaaaauucuguua

SEQ ID NO: 2685730 - RNA, 19 nt, Artificial Sequence
  Description of Artificial Sequence: Synthetic oligonucleotide
cgaagugcaaauuccucgg

SEQ ID NO: 2685731 - RNA, 19 nt, Artificial Sequence
  Description of Artificial Sequence: Synthetic oligonucleotide
gcuacaaaggauugacauc

SEQ ID NO: 2685732 - RNA, 19 nt, Artificial Sequence
  Description of Artificial Sequence: Synthetic oligonucleotide
aggauguugcccugacgcu

SEQ ID NO: 2685733 - RNA, 19 nt, Artificial Sequence
  Description of Artificial Sequence: Synthetic oligonucleotide
cccacuuucagcagggcug

SEQ ID NO: 2685734 - RNA, 19 nt, Artificial Sequence
  Description of Artificial Sequence: Synthetic oligonucleotide
ucuugaucucgaagugcaa

SEQ ID NO: 2685735 - RNA, 19 nt, Artificial Sequence
  Description of Artificial Sequence: Synthetic oligonucleotide
acacgugugugugugugug

SEQ ID NO: 2685736 - RNA, 19 nt, Artificial Sequence
  Description of Artificial Sequence: Synthetic oligonucleotide
uacagguacuucucuugau

SEQ ID NO: 2685737 - RNA, 19 nt, Artificial Sequence
  Description of Artificial Sequence: Synthetic oligonucleotide
agcgcaugacagcuuggug

SEQ ID NO: 2685738 - RNA, 19 nt, Artificial Sequence
  Description of Artificial Sequence: Synthetic oligonucleotide
guguguguguguguguaug

SEQ ID NO: 2685739 - RNA, 19 nt, Artificial Sequence
  Description of Artificial Sequence: Synthetic oligonucleotide
acacacacacacacacacg

SEQ ID NO: 2685740 - RNA, 19 nt, Artificial Sequence
  Description of Artificial Sequence: Synthetic oligonucleotide
cucacacacgccagcauca

SEQ ID NO: 2685741 - RNA, 19 nt, Artificial Sequence
  Description of Artificial Sequence: Synthetic oligonucleotide
ucugcgccuuuauccagga

SEQ ID NO: 2685742 - RNA, 19 nt, Artificial Sequence
  Description of Artificial Sequence: Synthetic oligonucleotide
uguauguaaucugcgccuu

SEQ ID NO: 2685743 - RNA, 19 nt, Artificial Sequence
  Description of Artificial Sequence: Synthetic oligonucleotide
cacacacacacacacacgu

SEQ ID NO: 2685744 - RNA, 19 nt, Artificial Sequence
  Description of Artificial Sequence: Synthetic oligonucleotide
acacacgugugugugugug

SEQ ID NO: 2685745 - RNA, 19 nt, Artificial Sequence
  Description of Artificial Sequence: Synthetic oligonucleotide
gccucacacacacacacac

SEQ ID NO: 2685746 - RNA, 19 nt, Artificial Sequence
  Description of Artificial Sequence: Synthetic oligonucleotide
aucugcgccuuuauccagg

SEQ ID NO: 2685747 - RNA, 19 nt, Artificial Sequence
  Description of Artificial Sequence: Synthetic oligonucleotide
acgugugugugugugugug

SEQ ID NO: 2685748 - RNA, 19 nt, Artificial Sequence
  Description of Artificial Sequence: Synthetic oligonucleotide
aguuacucaaugacuuuau

SEQ ID NO: 2685749 - RNA, 19 nt, Artificial Sequence
  Description of Artificial Sequence: Synthetic oligonucleotide
gggcuucccaaguucagcc

SEQ ID NO: 2685750 - RNA, 19 nt, Artificial Sequence
  Description of Artificial Sequence: Synthetic oligonucleotide
acacgccagcaucaaucuc

SEQ ID NO: 2685751 - RNA, 19 nt, Artificial Sequence
  Description of Artificial Sequence: Synthetic oligonucleotide
acauccccacuuucagcag

SEQ ID NO: 2685752 - RNA, 19 nt, Artificial Sequence
  Description of Artificial Sequence: Synthetic oligonucleotide
augcaauauuucauuauua

SEQ ID NO: 2685753 - RNA, 19 nt, Artificial Sequence
  Description of Artificial Sequence: Synthetic oligonucleotide
aggcuccagucgcugcacc

SEQ ID NO: 2685754 - RNA, 19 nt, Artificial Sequence
  Description of Artificial Sequence: Synthetic oligonucleotide
uccagucgcugcaccaggu

SEQ ID NO: 2685755 - RNA, 19 nt, Artificial Sequence
  Description of Artificial Sequence: Synthetic oligonucleotide
ccaguacuggggauggugc

SEQ ID NO: 2685756 - RNA, 19 nt, Artificial Sequence
  Description of Artificial Sequence: Synthetic oligonucleotide
caaguucagcccauuucca

SEQ ID NO: 2685757 - RNA, 19 nt, Artificial Sequence
  Description of Artificial Sequence: Synthetic oligonucleotide
uuacugggcuucccaaguu

SEQ ID NO: 2685758 - RNA, 19 nt, Artificial Sequence
  Description of Artificial Sequence: Synthetic oligonucleotide
auguaaucugcgccuuuau

SEQ ID NO: 2685759 - RNA, 19 nt, Artificial Sequence
  Description of Artificial Sequence: Synthetic oligonucleotide
ugaucucgaagugcaaauu

SEQ ID NO: 2685760 - RNA, 19 nt, Artificial Sequence
  Description of Artificial Sequence: Synthetic oligonucleotide
uguguguguguguguguau

SEQ ID NO: 2685761 - RNA, 19 nt, Artificial Sequence
  Description of Artificial Sequence: Synthetic oligonucleotide
aaguaucaaguuacucaau

SEQ ID NO: 2685762 - RNA, 19 nt, Artificial Sequence
  Description of Artificial Sequence: Synthetic oligonucleotide
guuacugggcuucccaagu

SEQ ID NO: 2685763 - RNA, 19 nt, Artificial Sequence
  Description of Artificial Sequence: Synthetic oligonucleotide
cuugaucucgaagugcaaa

SEQ ID NO: 2685764 - RNA, 19 nt, Artificial Sequence
  Description of Artificial Sequence: Synthetic oligonucleotide
gggccucacacacacacac

SEQ ID NO: 2685765 - RNA, 19 nt, Artificial Sequence
  Description of Artificial Sequence: Synthetic oligonucleotide
gcccauuuccacccaaacc

SEQ ID NO: 2685766 - RNA, 19 nt, Artificial Sequence
  Description of Artificial Sequence: Synthetic oligonucleotide
auccccacuuucagcaggg

SEQ ID NO: 2685767 - RNA, 19 nt, Artificial Sequence
  Description of Artificial Sequence: Synthetic oligonucleotide
guguguguguguguaugug

SEQ ID NO: 2685768 - RNA, 19 nt, Artificial Sequence
  Description of Artificial Sequence: Synthetic oligonucleotide
ucagcccauuuccacccaa

SEQ ID NO: 2685769 - RNA, 19 nt, Artificial Sequence
  Description of Artificial Sequence: Synthetic oligonucleotide
acacacacacacacgugug

SEQ ID NO: 2685770 - RNA, 19 nt, Artificial Sequence
  Description of Artificial Sequence: Synthetic oligonucleotide
gccagcaucaaucucauuu

SEQ ID NO: 2685771 - RNA, 19 nt, Artificial Sequence
  Description of Artificial Sequence: Synthetic oligonucleotide
cagguccugguaugacucc

SEQ ID NO: 2685772 - RNA, 19 nt, Artificial Sequence
  Description of Artificial Sequence: Synthetic oligonucleotide
acccaaugcaauauuucau

SEQ ID NO: 2685773 - RNA, 19 nt, Artificial Sequence
  Description of Artificial Sequence: Synthetic oligonucleotide
cacacacacacacacgugu

SEQ ID NO: 2685774 - RNA, 19 nt, Artificial Sequence
  Description of Artificial Sequence: Synthetic oligonucleotide
ggcagcgcaugacagcuug

SEQ ID NO: 2685775 - RNA, 19 nt, Artificial Sequence
  Description of Artificial Sequence: Synthetic oligonucleotide
uacuucucuugaucucgaa

SEQ ID NO: 2685776 - RNA, 19 nt, Artificial Sequence
  Description of Artificial Sequence: Synthetic oligonucleotide
caggauagcgauacaggua

SEQ ID NO: 2685777 - RNA, 19 nt, Artificial Sequence
  Description of Artificial Sequence: Synthetic oligonucleotide
uucuguuacugggcuuccc

SEQ ID NO: 2685778 - RNA, 19 nt, Artificial Sequence
  Description of Artificial Sequence: Synthetic oligonucleotide
gacagcuuggugggagaug

SEQ ID NO: 2685779 - RNA, 19 nt, Artificial Sequence
  Description of Artificial Sequence: Synthetic oligonucleotide
cagcuccaugaugacaggc

SEQ ID NO: 2685780 - RNA, 19 nt, Artificial Sequence
  Description of Artificial Sequence: Synthetic oligonucleotide
ugacaggcuccagucgcug

SEQ ID NO: 2685781 - RNA, 19 nt, Artificial Sequence
  Description of Artificial Sequence: Synthetic oligonucleotide
uccucacacacgccagcau

SEQ ID NO: 2685782 - RNA, 19 nt, Artificial Sequence
  Description of Artificial Sequence: Synthetic oligonucleotide
augacuuuauuaacccauu

SEQ ID NO: 2685783 - RNA, 19 nt, Artificial Sequence
  Description of Artificial Sequence: Synthetic oligonucleotide
gaggcagcgcaugacagcu

SEQ ID NO: 2685784 - RNA, 19 nt, Artificial Sequence
  Description of Artificial Sequence: Synthetic oligonucleotide
gcccugacgcuccagcucc

SEQ ID NO: 2685785 - RNA, 19 nt, Artificial Sequence
  Description of Artificial Sequence: Synthetic oligonucleotide
acacacacacacacacgug

SEQ ID NO: 2685786 - RNA, 19 nt, Artificial Sequence
  Description of Artificial Sequence: Synthetic oligonucleotide
gccuaagaaaucugcaaua

SEQ ID NO: 2685787 - RNA, 19 nt, Artificial Sequence
  Description of Artificial Sequence: Synthetic oligonucleotide
augcuacaaaggauugaca

SEQ ID NO: 2685788 - RNA, 19 nt, Artificial Sequence
  Description of Artificial Sequence: Synthetic oligonucleotide
aggacccaaugcaauauuu

SEQ ID NO: 2685789 - RNA, 19 nt, Artificial Sequence
  Description of Artificial Sequence: Synthetic oligonucleotide
gcaauaaaauucuguuacu

SEQ ID NO: 2685790 - RNA, 19 nt, Artificial Sequence
  Description of Artificial Sequence: Synthetic oligonucleotide
ugacagcuuggugggagau

SEQ ID NO: 2685791 - RNA, 19 nt, Artificial Sequence
  Description of Artificial Sequence: Synthetic oligonucleotide
ggacccaaugcaauauuuc

SEQ ID NO: 2685792 - RNA, 19 nt, Artificial Sequence
  Description of Artificial Sequence: Synthetic oligonucleotide
cagggcugugccuaagaaa

SEQ ID NO: 2685793 - RNA, 19 nt, Artificial Sequence
  Description of Artificial Sequence: Synthetic oligonucleotide
cuguuacugggcuucccaa

SEQ ID NO: 2685794 - RNA, 19 nt, Artificial Sequence
  Description of Artificial Sequence: Synthetic oligonucleotide
acacacacacacacacaca

SEQ ID NO: 2685795 - RNA, 19 nt, Artificial Sequence
  Description of Artificial Sequence: Synthetic oligonucleotide
gauagcgauacagguacuu

SEQ ID NO: 2685796 - RNA, 19 nt, Artificial Sequence
  Description of Artificial Sequence: Synthetic oligonucleotide
ggguuaccguuucucaauc

SEQ ID NO: 2685797 - RNA, 19 nt, Artificial Sequence
  Description of Artificial Sequence: Synthetic oligonucleotide
ccucacacacgccagcauc

SEQ ID NO: 2685798 - RNA, 19 nt, Artificial Sequence
  Description of Artificial Sequence: Synthetic oligonucleotide
cacuuuaaaaggacccaau

SEQ ID NO: 2685799 - RNA, 19 nt, Artificial Sequence
  Description of Artificial Sequence: Synthetic oligonucleotide
gcuuggugggagaugacga

SEQ ID NO: 2685800 - RNA, 19 nt, Artificial Sequence
  Description of Artificial Sequence: Synthetic oligonucleotide
ccuaagaaaucugcaauaa

SEQ ID NO: 2685801 - RNA, 19 nt, Artificial Sequence
  Description of Artificial Sequence: Synthetic oligonucleotide
ccauucuacacaggccugc

SEQ ID NO: 2685802 - RNA, 19 nt, Artificial Sequence
  Description of Artificial Sequence: Synthetic oligonucleotide
uguugcccugacgcuccag

SEQ ID NO: 2685803 - RNA, 19 nt, Artificial Sequence
  Description of Artificial Sequence: Synthetic oligonucleotide
guuacucaaugacuuuauu

SEQ ID NO: 2685804 - RNA, 19 nt, Artificial Sequence
  Description of Artificial Sequence: Synthetic oligonucleotide
guacuucucuugaucucga

SEQ ID NO: 2685805 - RNA, 19 nt, Artificial Sequence
  Description of Artificial Sequence: Synthetic oligonucleotide
gcacauaaacacauuucaa

SEQ ID NO: 2685806 - RNA, 19 nt, Artificial Sequence
  Description of Artificial Sequence: Synthetic oligonucleotide
gugugugugugugugugua

SEQ ID NO: 2685807 - RNA, 19 nt, Artificial Sequence
  Description of Artificial Sequence: Synthetic oligonucleotide
cacacgccagcaucaaucu

SEQ ID NO: 2685808 - RNA, 19 nt, Artificial Sequence
  Description of Artificial Sequence: Synthetic oligonucleotide
augacaggcuccagucgcu

SEQ ID NO: 2685809 - RNA, 19 nt, Artificial Sequence
  Description of Artificial Sequence: Synthetic oligonucleotide
ccaggauagcgauacaggu

SEQ ID NO: 2685810 - RNA, 19 nt, Artificial Sequence
  Description of Artificial Sequence: Synthetic oligonucleotide
caaguuacucaaugacuuu

SEQ ID NO: 2685811 - RNA, 19 nt, Artificial Sequence
  Description of Artificial Sequence: Synthetic oligonucleotide
cacacacacacacgugugu

SEQ ID NO: 2685812 - RNA, 19 nt, Artificial Sequence
  Description of Artificial Sequence: Synthetic oligonucleotide
ggcugugccuaagaaaucu

SEQ ID NO: 2685813 - RNA, 19 nt, Artificial Sequence
  Description of Artificial Sequence: Synthetic oligonucleotide
cccaguacuggggauggug

SEQ ID NO: 2685814 - RNA, 19 nt, Artificial Sequence
  Description of Artificial Sequence: Synthetic oligonucleotide
gguccugguaugacucccc

SEQ ID NO: 2685815 - RNA, 19 nt, Artificial Sequence
  Description of Artificial Sequence: Synthetic oligonucleotide
guguguguguguguaugua

SEQ ID NO: 2685816 - RNA, 19 nt, Artificial Sequence
  Description of Artificial Sequence: Synthetic oligonucleotide
cccauucuacacaggccug

SEQ ID NO: 2685817 - RNA, 19 nt, Artificial Sequence
  Description of Artificial Sequence: Synthetic oligonucleotide
cagcuuggugggagaugac

SEQ ID NO: 2685818 - RNA, 19 nt, Artificial Sequence
  Description of Artificial Sequence: Synthetic oligonucleotide
gggguuaccguuucucaau

SEQ ID NO: 2685819 - RNA, 19 nt, Artificial Sequence
  Description of Artificial Sequence: Synthetic oligonucleotide
uggugcccagggccucaca

SEQ ID NO: 2685820 - RNA, 19 nt, Artificial Sequence
  Description of Artificial Sequence: Synthetic oligonucleotide
agggccucacacacacaca

SEQ ID NO: 2685821 - RNA, 19 nt, Artificial Sequence
  Description of Artificial Sequence: Synthetic oligonucleotide
ggcuccagucgcugcacca

SEQ ID NO: 2685822 - RNA, 19 nt, Artificial Sequence
  Description of Artificial Sequence: Synthetic oligonucleotide
ccguuucucaaucucugaa

SEQ ID NO: 2685823 - RNA, 19 nt, Artificial Sequence
  Description of Artificial Sequence: Synthetic oligonucleotide
gguuaccguuucucaaucu

SEQ ID NO: 2685824 - RNA, 19 nt, Artificial Sequence
  Description of Artificial Sequence: Synthetic oligonucleotide
cagcccauuuccacccaaa

SEQ ID NO: 2685825 - RNA, 19 nt, Artificial Sequence
  Description of Artificial Sequence: Synthetic oligonucleotide
cccaaugcaauauuucauu

SEQ ID NO: 2685826 - RNA, 19 nt, Artificial Sequence
  Description of Artificial Sequence: Synthetic oligonucleotide
guauguaaucugcgccuuu

SEQ ID NO: 2685827 - RNA, 19 nt, Artificial Sequence
  Description of Artificial Sequence: Synthetic oligonucleotide
ccugcacauaaacacauuu

SEQ ID NO: 2685828 - RNA, 19 nt, Artificial Sequence
  Description of Artificial Sequence: Synthetic oligonucleotide
cgaggauguugcccugacg

SEQ ID NO: 2685829 - RNA, 19 nt, Artificial Sequence
  Description of Artificial Sequence: Synthetic oligonucleotide
gcagcgcaugacagcuugg

SEQ ID NO: 2685830 - RNA, 19 nt, Artificial Sequence
  Description of Artificial Sequence: Synthetic oligonucleotide
cacacacacgugugugugu

SEQ ID NO: 2685831 - RNA, 19 nt, Artificial Sequence
  Description of Artificial Sequence: Synthetic oligonucleotide
ccucacacacacacacaca

SEQ ID NO: 2685832 - RNA, 19 nt, Artificial Sequence
  Description of Artificial Sequence: Synthetic oligonucleotide
gcgauacagguacuucucu

SEQ ID NO: 2685833 - RNA, 19 nt, Artificial Sequence
  Description of Artificial Sequence: Synthetic oligonucleotide
cacacgugugugugugugu

SEQ ID NO: 2685834 - RNA, 19 nt, Artificial Sequence
  Description of Artificial Sequence: Synthetic oligonucleotide
cuucccaaguucagcccau

SEQ ID NO: 2685835 - RNA, 19 nt, Artificial Sequence
  Description of Artificial Sequence: Synthetic oligonucleotide
gcgccuuuauccaggaagu

SEQ ID NO: 2685836 - RNA, 19 nt, Artificial Sequence
  Description of Artificial Sequence: Synthetic oligonucleotide
cacgugugugugugugugu

SEQ ID NO: 2685837 - RNA, 19 nt, Artificial Sequence
  Description of Artificial Sequence: Synthetic oligonucleotide
ggccugcacauaaacacau

SEQ ID NO: 2685838 - RNA, 19 nt, Artificial Sequence
  Description of Artificial Sequence: Synthetic oligonucleotide
cagcgcaugacagcuuggu

SEQ ID NO: 2685839 - RNA, 19 nt, Artificial Sequence
  Description of Artificial Sequence: Synthetic oligonucleotide
cacacacgugugugugugu

SEQ ID NO: 2685840 - RNA, 19 nt, Artificial Sequence
  Description of Artificial Sequence: Synthetic oligonucleotide
ggccucacacacacacaca

SEQ ID NO: 2685841 - RNA, 19 nt, Artificial Sequence
  Description of Artificial Sequence: Synthetic oligonucleotide
gcaccagguccugguauga

SEQ ID NO: 2685842 - RNA, 19 nt, Artificial Sequence
  Description of Artificial Sequence: Synthetic oligonucleotide
cacacacgccagcaucaau

SEQ ID NO: 2685843 - RNA, 19 nt, Artificial Sequence
  Description of Artificial Sequence: Synthetic oligonucleotide
cugcgccuuuauccaggaa

SEQ ID NO: 2685844 - RNA, 19 nt, Artificial Sequence
  Description of Artificial Sequence: Synthetic oligonucleotide
ccccacuuucagcagggcu

SEQ ID NO: 2685845 - RNA, 19 nt, Artificial Sequence
  Description of Artificial Sequence: Synthetic oligonucleotide
ggauagcgauacagguacu

SEQ ID NO: 2685846 - RNA, 19 nt, Artificial Sequence
  Description of Artificial Sequence: Synthetic oligonucleotide
aggcagcgcaugacagcuu

SEQ ID NO: 2685847 - RNA, 19 nt, Artificial Sequence
  Description of Artificial Sequence: Synthetic oligonucleotide
cgauacagguacuucucuu

SEQ ID NO: 2685848 - RNA, 19 nt, Artificial Sequence
  Description of Artificial Sequence: Synthetic oligonucleotide
caaucucauuuaggaucuu

SEQ ID NO: 2685849 - RNA, 19 nt, Artificial Sequence
  Description of Artificial Sequence: Synthetic oligonucleotide
cgugugugugugugugugu

SEQ ID NO: 2685850 - RNA, 19 nt, Artificial Sequence
  Description of Artificial Sequence: Synthetic oligonucleotide
gccugcacauaaacacauu

SEQ ID NO: 2685851 - RNA, 19 nt, Artificial Sequence
  Description of Artificial Sequence: Synthetic oligonucleotide
gggagaugacgaggauguu

SEQ ID NO: 2685852 - RNA, 19 nt, Artificial Sequence
  Description of Artificial Sequence: Synthetic oligonucleotide
cgccuuuauccaggaagua

SEQ ID NO: 2685853 - RNA, 19 nt, Artificial Sequence
  Description of Artificial Sequence: Synthetic oligonucleotide
ccugacgcuccagcuccau

SEQ ID NO: 2685854 - RNA, 19 nt, Artificial Sequence
  Description of Artificial Sequence: Synthetic oligonucleotide
cgccagcaucaaucucauu

SEQ ID NO: 2685855 - RNA, 19 nt, Artificial Sequence
  Description of Artificial Sequence: Synthetic oligonucleotide
aaaguuaucaacaagcggu

SEQ ID NO: 2685856 - RNA, 19 nt, Artificial Sequence
  Description of Artificial Sequence: Synthetic oligonucleotide
gagaaaguuaucaacaagc

SEQ ID NO: 2685857 - RNA, 19 nt, Artificial Sequence
  Description of Artificial Sequence: Synthetic oligonucleotide
aaaccugacagggagggcc

SEQ ID NO: 2685858 - RNA, 19 nt, Artificial Sequence
  Description of Artificial Sequence: Synthetic oligonucleotide
gaaaguuaucaacaagcgg

SEQ ID NO: 2685859 - RNA, 19 nt, Artificial Sequence
  Description of Artificial Sequence: Synthetic oligonucleotide
ucaacaagcgguaucccgg

SEQ ID NO: 2685860 - RNA, 19 nt, Artificial Sequence
  Description of Artificial Sequence: Synthetic oligonucleotide
aaccagaagacgcggaagg

SEQ ID NO: 2685861 - RNA, 19 nt, Artificial Sequence
  Description of Artificial Sequence: Synthetic oligonucleotide
acugccaguaccccuaacc

SEQ ID NO: 2685862 - RNA, 19 nt, Artificial Sequence
  Description of Artificial Sequence: Synthetic oligonucleotide
uaggaaaccugacagggag

SEQ ID NO: 2685863 - RNA, 19 nt, Artificial Sequence
  Description of Artificial Sequence: Synthetic oligonucleotide
aauccuuuauuagggaagg

SEQ ID NO: 2685864 - RNA, 19 nt, Artificial Sequence
  Description of Artificial Sequence: Synthetic oligonucleotide
accaguggcgcauaacucc

SEQ ID NO: 2685865 - RNA, 19 nt, Artificial Sequence
  Description of Artificial Sequence: Synthetic oligonucleotide
uuaucaacaagcgguaucc

SEQ ID NO: 2685866 - RNA, 19 nt, Artificial Sequence
  Description of Artificial Sequence: Synthetic oligonucleotide
aaaauccuuuauuagggaa

SEQ ID NO: 2685867 - RNA, 19 nt, Artificial Sequence
  Description of Artificial Sequence: Synthetic oligonucleotide
aaauccuuuauuagggaag

SEQ ID NO: 2685868 - RNA, 19 nt, Artificial Sequence
  Description of Artificial Sequence: Synthetic oligonucleotide
uccuuuauuagggaagggg

SEQ ID NO: 2685869 - RNA, 19 nt, Artificial Sequence
  Description of Artificial Sequence: Synthetic oligonucleotide
  modified_base (8)..(8): a, c, u, g, unknown or other
aggaaagngguacugaagu

SEQ ID NO: 2685870 - RNA, 19 nt, Artificial Sequence
  Description of Artificial Sequence: Synthetic oligonucleotide
agaaaguuaucaacaagcg

SEQ ID NO: 2685871 - RNA, 19 nt, Artificial Sequence
  Description of Artificial Sequence: Synthetic oligonucleotide
gaagucuccugucuuaccc

SEQ ID NO: 2685872 - RNA, 19 nt, Artificial Sequence
  Description of Artificial Sequence: Synthetic oligonucleotide
  modified_base (5)..(5): a, c, u, g, unknown or other
aaagngguacugaagucuc

SEQ ID NO: 2685873 - RNA, 19 nt, Artificial Sequence
  Description of Artificial Sequence: Synthetic oligonucleotide
aacacaaccagaagacgcg

SEQ ID NO: 2685874 - RNA, 19 nt, Artificial Sequence
  Description of Artificial Sequence: Synthetic oligonucleotide
ugucuuacccuuaggaaac

SEQ ID NO: 2685875 - RNA, 19 nt, Artificial Sequence
  Description of Artificial Sequence: Synthetic oligonucleotide
aucaacaagcgguaucccg

SEQ ID NO: 2685876 - RNA, 19 nt, Artificial Sequence
  Description of Artificial Sequence: Synthetic oligonucleotide
uuacccuuaggaaaccuga

SEQ ID NO: 2685877 - RNA, 19 nt, Artificial Sequence
  Description of Artificial Sequence: Synthetic oligonucleotide
  modified_base (16)..(16): a, c, u, g, unknown or other
ugcacaccaggaaagnggu

SEQ ID NO: 2685878 - RNA, 19 nt, Artificial Sequence
  Description of Artificial Sequence: Synthetic oligonucleotide
gaagcugccagagaggaug

SEQ ID NO: 2685879 - RNA, 19 nt, Artificial Sequence
  Description of Artificial Sequence: Synthetic oligonucleotide
cacaccgaaaaccaguggc

SEQ ID NO: 2685880 - RNA, 19 nt, Artificial Sequence
  Description of Artificial Sequence: Synthetic oligonucleotide
ugcaacugggagcagcucc

SEQ ID NO: 2685881 - RNA, 19 nt, Artificial Sequence
  Description of Artificial Sequence: Synthetic oligonucleotide
cagucagagacccaaacac

SEQ ID NO: 2685882 - RNA, 19 nt, Artificial Sequence
  Description of Artificial Sequence: Synthetic oligonucleotide
cagagacccaaacacaacc

SEQ ID NO: 2685883 - RNA, 19 nt, Artificial Sequence
  Description of Artificial Sequence: Synthetic oligonucleotide
aggggcucaaaugagaaag

SEQ ID NO: 2685884 - RNA, 19 nt, Artificial Sequence
  Description of Artificial Sequence: Synthetic oligonucleotide
uggcgcauaacucccggcg

SEQ ID NO: 2685885 - RNA, 19 nt, Artificial Sequence
  Description of Artificial Sequence: Synthetic oligonucleotide
agaccugugcaacugggag

SEQ ID NO: 2685886 - RNA, 19 nt, Artificial Sequence
  Description of Artificial Sequence: Synthetic oligonucleotide
ugcagcgacagccaccacc

SEQ ID NO: 2685887 - RNA, 19 nt, Artificial Sequence
  Description of Artificial Sequence: Synthetic oligonucleotide
ucugcuagccauccgcuga

SEQ ID NO: 2685888 - RNA, 19 nt, Artificial Sequence
  Description of Artificial Sequence: Synthetic oligonucleotide
uguagccugcaccacaccu

SEQ ID NO: 2685889 - RNA, 19 nt, Artificial Sequence
  Description of Artificial Sequence: Synthetic oligonucleotide
aaaaccaguggcgcauaac

SEQ ID NO: 2685890 - RNA, 19 nt, Artificial Sequence
  Description of Artificial Sequence: Synthetic oligonucleotide
  modified_base (14)..(14): a, c, u, g, unknown or other
cacaccaggaaagngguac

SEQ ID NO: 2685891 - RNA, 19 nt, Artificial Sequence
  Description of Artificial Sequence: Synthetic oligonucleotide
augaaagagcugcacacca

SEQ ID NO: 2685892 - RNA, 19 nt, Artificial Sequence
  Description of Artificial Sequence: Synthetic oligonucleotide
uggucugcuagccauccgc

SEQ ID NO: 2685893 - RNA, 19 nt, Artificial Sequence
  Description of Artificial Sequence: Synthetic oligonucleotide
uguagaugaagcugccaga

SEQ ID NO: 2685894 - RNA, 19 nt, Artificial Sequence
  Description of Artificial Sequence: Synthetic oligonucleotide
uccagccgcagcuagcagg

SEQ ID NO: 2685895 - RNA, 19 nt, Artificial Sequence
  Description of Artificial Sequence: Synthetic oligonucleotide
agccccauguagaugaagc

SEQ ID NO: 2685896 - RNA, 19 nt, Artificial Sequence
  Description of Artificial Sequence: Synthetic oligonucleotide
guagcuggaggugagacug

SEQ ID NO: 2685897 - RNA, 19 nt, Artificial Sequence
  Description of Artificial Sequence: Synthetic oligonucleotide
cagaagacgcggaaggggc

SEQ ID NO: 2685898 - RNA, 19 nt, Artificial Sequence
  Description of Artificial Sequence: Synthetic oligonucleotide
guagaugaagcugccagag

SEQ ID NO: 2685899 - RNA, 19 nt, Artificial Sequence
  Description of Artificial Sequence: Synthetic oligonucleotide
  modified_base (4)..(4): a, c, u, g, unknown or other
aagngguacugaagucucc

SEQ ID NO: 2685900 - RNA, 19 nt, Artificial Sequence
  Description of Artificial Sequence: Synthetic oligonucleotide
guaccccuaacccagucag

SEQ ID NO: 2685901 - RNA, 19 nt, Artificial Sequence
  Description of Artificial Sequence: Synthetic oligonucleotide
uagggaaggggcucaaaug

SEQ ID NO: 2685902 - RNA, 19 nt, Artificial Sequence
  Description of Artificial Sequence: Synthetic oligonucleotide
acagggagggcccacggag

SEQ ID NO: 2685903 - RNA, 19 nt, Artificial Sequence
  Description of Artificial Sequence: Synthetic oligonucleotide
ucuccugucuuacccuuag

SEQ ID NO: 2685904 - RNA, 19 nt, Artificial Sequence
  Description of Artificial Sequence: Synthetic oligonucleotide
uuuauuagggaaggggcuc

SEQ ID NO: 2685905 - RNA, 19 nt, Artificial Sequence
  Description of Artificial Sequence: Synthetic oligonucleotide
uuaggaaaccugacaggga

SEQ ID NO: 2685906 - RNA, 19 nt, Artificial Sequence
  Description of Artificial Sequence: Synthetic oligonucleotide
gaugaagcugccagagagg

SEQ ID NO: 2685907 - RNA, 19 nt, Artificial Sequence
  Description of Artificial Sequence: Synthetic oligonucleotide
augagaaaguuaucaacaa

SEQ ID NO: 2685908 - RNA, 19 nt, Artificial Sequence
  Description of Artificial Sequence: Synthetic oligonucleotide
agcgacagccaccaccaac

SEQ ID NO: 2685909 - RNA, 19 nt, Artificial Sequence
  Description of Artificial Sequence: Synthetic oligonucleotide
guuaucaacaagcgguauc

SEQ ID NO: 2685910 - RNA, 19 nt, Artificial Sequence
  Description of Artificial Sequence: Synthetic oligonucleotide
cuaacccagucagagaccc

SEQ ID NO: 2685911 - RNA, 19 nt, Artificial Sequence
  Description of Artificial Sequence: Synthetic oligonucleotide
acagccaccaccaacgcug

SEQ ID NO: 2685912 - RNA, 19 nt, Artificial Sequence
  Description of Artificial Sequence: Synthetic oligonucleotide
uggacggcagguugggagg

SEQ ID NO: 2685913 - RNA, 19 nt, Artificial Sequence
  Description of Artificial Sequence: Synthetic oligonucleotide
agagcugcacaccaggaaa

SEQ ID NO: 2685914 - RNA, 19 nt, Artificial Sequence
  Description of Artificial Sequence: Synthetic oligonucleotide
ccaaacacaaccagaagac

SEQ ID NO: 2685915 - RNA, 19 nt, Artificial Sequence
  Description of Artificial Sequence: Synthetic oligonucleotide
cuuacccuuaggaaaccug

SEQ ID NO: 2685916 - RNA, 19 nt, Artificial Sequence
  Description of Artificial Sequence: Synthetic oligonucleotide
  modified_base (9)..(9): a, c, u, g, unknown or other
caggaaagngguacugaag

SEQ ID NO: 2685917 - RNA, 19 nt, Artificial Sequence
  Description of Artificial Sequence: Synthetic oligonucleotide
acaagcgguaucccgggag

SEQ ID NO: 2685918 - RNA, 19 nt, Artificial Sequence
  Description of Artificial Sequence: Synthetic oligonucleotide
ugaccagucgggcacucgc

SEQ ID NO: 2685919 - RNA, 19 nt, Artificial Sequence
  Description of Artificial Sequence: Synthetic oligonucleotide
ggaugaaagagcugcacac

SEQ ID NO: 2685920 - RNA, 19 nt, Artificial Sequence
  Description of Artificial Sequence: Synthetic oligonucleotide
caaacacaaccagaagacg

SEQ ID NO: 2685921 - RNA, 19 nt, Artificial Sequence
  Description of Artificial Sequence: Synthetic oligonucleotide
acugggagcagcuccccuc

SEQ ID NO: 2685922 - RNA, 19 nt, Artificial Sequence
  Description of Artificial Sequence: Synthetic oligonucleotide
agucccacugccaguaccc

SEQ ID NO: 2685923 - RNA, 19 nt, Artificial Sequence
  Description of Artificial Sequence: Synthetic oligonucleotide
aagagcugcacaccaggaa

SEQ ID NO: 2685924 - RNA, 19 nt, Artificial Sequence
  Description of Artificial Sequence: Synthetic oligonucleotide
uagccugcaccacaccucc

SEQ ID NO: 2685925 - RNA, 19 nt, Artificial Sequence
  Description of Artificial Sequence: Synthetic oligonucleotide
  modified_base (6)..(6): a, c, u, g, unknown or other
gaaagngguacugaagucu

SEQ ID NO: 2685926 - RNA, 19 nt, Artificial Sequence
  Description of Artificial Sequence: Synthetic oligonucleotide
aaccaguggcgcauaacuc

SEQ ID NO: 2685927 - RNA, 19 nt, Artificial Sequence
  Description of Artificial Sequence: Synthetic oligonucleotide
accaacgcugccccguaac

SEQ ID NO: 2685928 - RNA, 19 nt, Artificial Sequence
  Description of Artificial Sequence: Synthetic oligonucleotide
aaccugacagggagggccc

SEQ ID NO: 2685929 - RNA, 19 nt, Artificial Sequence
  Description of Artificial Sequence: Synthetic oligonucleotide
cugucuuacccuuaggaaa

SEQ ID NO: 2685930 - RNA, 19 nt, Artificial Sequence
  Description of Artificial Sequence: Synthetic oligonucleotide
ucagagacccaaacacaac

SEQ ID NO: 2685931 - RNA, 19 nt, Artificial Sequence
  Description of Artificial Sequence: Synthetic oligonucleotide
cuggacggcagguugggag

SEQ ID NO: 2685932 - RNA, 19 nt, Artificial Sequence
  Description of Artificial Sequence: Synthetic oligonucleotide
gaccugugcaacugggagc

SEQ ID NO: 2685933 - RNA, 19 nt, Artificial Sequence
  Description of Artificial Sequence: Synthetic oligonucleotide
aguggcgcauaacucccgg

SEQ ID NO: 2685934 - RNA, 19 nt, Artificial Sequence
  Description of Artificial Sequence: Synthetic oligonucleotide
acaccgaaaaccaguggcg

SEQ ID NO: 2685935 - RNA, 19 nt, Artificial Sequence
  Description of Artificial Sequence: Synthetic oligonucleotide
ggaaaccugacagggaggg

SEQ ID NO: 2685936 - RNA, 19 nt, Artificial Sequence
  Description of Artificial Sequence: Synthetic oligonucleotide
caacaagcgguaucccggg

SEQ ID NO: 2685937 - RNA, 19 nt, Artificial Sequence
  Description of Artificial Sequence: Synthetic oligonucleotide
uuauuagggaaggggcuca

SEQ ID NO: 2685938 - RNA, 19 nt, Artificial Sequence
  Description of Artificial Sequence: Synthetic oligonucleotide
caagcgguaucccgggagg

SEQ ID NO: 2685939 - RNA, 19 nt, Artificial Sequence
  Description of Artificial Sequence: Synthetic oligonucleotide
agcagcuccccucuuucag

SEQ ID NO: 2685940 - RNA, 19 nt, Artificial Sequence
  Description of Artificial Sequence: Synthetic oligonucleotide
ccagagaggaugaaagagc

SEQ ID NO: 2685941 - RNA, 19 nt, Artificial Sequence
  Description of Artificial Sequence: Synthetic oligonucleotide
uaacucccggcgcucaggc

SEQ ID NO: 2685942 - RNA, 19 nt, Artificial Sequence
  Description of Artificial Sequence: Synthetic oligonucleotide
uagucccacugccaguacc

SEQ ID NO: 2685943 - RNA, 19 nt, Artificial Sequence
  Description of Artificial Sequence: Synthetic oligonucleotide
ugaagucuccugucuuacc

SEQ ID NO: 2685944 - RNA, 19 nt, Artificial Sequence
  Description of Artificial Sequence: Synthetic oligonucleotide
ugacagggagggcccacgg

SEQ ID NO: 2685945 - RNA, 19 nt, Artificial Sequence
  Description of Artificial Sequence: Synthetic oligonucleotide
caggccguaggcuccagcc

SEQ ID NO: 2685946 - RNA, 19 nt, Artificial Sequence
  Description of Artificial Sequence: Synthetic oligonucleotide
augaagcugccagagagga

SEQ ID NO: 2685947 - RNA, 19 nt, Artificial Sequence
  Description of Artificial Sequence: Synthetic oligonucleotide
cuagccauccgcugaccag

SEQ ID NO: 2685948 - RNA, 19 nt, Artificial Sequence
  Description of Artificial Sequence: Synthetic oligonucleotide
ucgcaucucccacugcagc

SEQ ID NO: 2685949 - RNA, 19 nt, Artificial Sequence
  Description of Artificial Sequence: Synthetic oligonucleotide
accccuaacccagucagag

SEQ ID NO: 2685950 - RNA, 19 nt, Artificial Sequence
  Description of Artificial Sequence: Synthetic oligonucleotide
cccuuaggaaaccugacag

SEQ ID NO: 2685951 - RNA, 19 nt, Artificial Sequence
  Description of Artificial Sequence: Synthetic oligonucleotide
cucaaaugagaaaguuauc

SEQ ID NO: 2685952 - RNA, 19 nt, Artificial Sequence
  Description of Artificial Sequence: Synthetic oligonucleotide
aguaccccuaacccaguca

SEQ ID NO: 2685953 - RNA, 19 nt, Artificial Sequence
  Description of Artificial Sequence: Synthetic oligonucleotide
acccuuaggaaaccugaca

SEQ ID NO: 2685954 - RNA, 19 nt, Artificial Sequence
  Description of Artificial Sequence: Synthetic oligonucleotide
uacccuuaggaaaccugac

SEQ ID NO: 2685955 - RNA, 19 nt, Artificial Sequence
  Description of Artificial Sequence: Synthetic oligonucleotide
  modified_base (3)..(3): a, c, u, g, unknown or other
agngguacugaagucuccu

SEQ ID NO: 2685956 - RNA, 19 nt, Artificial Sequence
  Description of Artificial Sequence: Synthetic oligonucleotide
  modified_base (2)..(2): a, c, u, g, unknown or other
gngguacugaagucuccug

SEQ ID NO: 2685957 - RNA, 19 nt, Artificial Sequence
  Description of Artificial Sequence: Synthetic oligonucleotide
gugggcacuagucccacug

SEQ ID NO: 2685958 - RNA, 19 nt, Artificial Sequence
  Description of Artificial Sequence: Synthetic oligonucleotide
acccaaacacaaccagaag

SEQ ID NO: 2685959 - RNA, 19 nt, Artificial Sequence
  Description of Artificial Sequence: Synthetic oligonucleotide
aaguuaucaacaagcggua

SEQ ID NO: 2685960 - RNA, 19 nt, Artificial Sequence
  Description of Artificial Sequence: Synthetic oligonucleotide
aagacgcggaaggggcacc

SEQ ID NO: 2685961 - RNA, 19 nt, Artificial Sequence
  Description of Artificial Sequence: Synthetic oligonucleotide
  modified_base (7)..(7): a, c, u, g, unknown or other
ggaaagngguacugaaguc

SEQ ID NO: 2685962 - RNA, 19 nt, Artificial Sequence
  Description of Artificial Sequence: Synthetic oligonucleotide
acugcagcgacagccacca

SEQ ID NO: 2685963 - RNA, 19 nt, Artificial Sequence
  Description of Artificial Sequence: Synthetic oligonucleotide
acacaaccagaagacgcgg

SEQ ID NO: 2685964 - RNA, 19 nt, Artificial Sequence
  Description of Artificial Sequence: Synthetic oligonucleotide
aaggggcucaaaugagaaa

SEQ ID NO: 2685965 - RNA, 19 nt, Artificial Sequence
  Description of Artificial Sequence: Synthetic oligonucleotide
uacugaagucuccugucuu

SEQ ID NO: 2685966 - RNA, 19 nt, Artificial Sequence
  Description of Artificial Sequence: Synthetic oligonucleotide
cuuuauuagggaaggggcu

SEQ ID NO: 2685967 - RNA, 19 nt, Artificial Sequence
  Description of Artificial Sequence: Synthetic oligonucleotide
acugaagucuccugucuua

SEQ ID NO: 2685968 - RNA, 19 nt, Artificial Sequence
  Description of Artificial Sequence: Synthetic oligonucleotide
gaggaugaaagagcugcac

SEQ ID NO: 2685969 - RNA, 19 nt, Artificial Sequence
  Description of Artificial Sequence: Synthetic oligonucleotide
uaucaacaagcgguauccc

SEQ ID NO: 2685970 - RNA, 19 nt, Artificial Sequence
  Description of Artificial Sequence: Synthetic oligonucleotide
gcgacagccaccaccaacg

SEQ ID NO: 2685971 - RNA, 19 nt, Artificial Sequence
  Description of Artificial Sequence: Synthetic oligonucleotide
ugggcacuagucccacugc

SEQ ID NO: 2685972 - RNA, 19 nt, Artificial Sequence
  Description of Artificial Sequence: Synthetic oligonucleotide
cauccgcugaccagucggg

SEQ ID NO: 2685973 - RNA, 19 nt, Artificial Sequence
  Description of Artificial Sequence: Synthetic oligonucleotide
ggugagacuggacggcagg

SEQ ID NO: 2685974 - RNA, 19 nt, Artificial Sequence
  Description of Artificial Sequence: Synthetic oligonucleotide
agggagggcccacggaguc

SEQ ID NO: 2685975 - RNA, 19 nt, Artificial Sequence
  Description of Artificial Sequence: Synthetic oligonucleotide
ucgggcacucgcaucuccc

SEQ ID NO: 2685976 - RNA, 19 nt, Artificial Sequence
  Description of Artificial Sequence: Synthetic oligonucleotide
gagucagcgcgcccugccg

SEQ ID NO: 2685977 - RNA, 19 nt, Artificial Sequence
  Description of Artificial Sequence: Synthetic oligonucleotide
gaaggggcucaaaugagaa

SEQ ID NO: 2685978 - RNA, 19 nt, Artificial Sequence
  Description of Artificial Sequence: Synthetic oligonucleotide
auaacucccggcgcucagg

SEQ ID NO: 2685979 - RNA, 19 nt, Artificial Sequence
  Description of Artificial Sequence: Synthetic oligonucleotide
aggccguaggcuccagccg

SEQ ID NO: 2685980 - RNA, 19 nt, Artificial Sequence
  Description of Artificial Sequence: Synthetic oligonucleotide
agcacaccgaaaaccagug

SEQ ID NO: 2685981 - RNA, 19 nt, Artificial Sequence
  Description of Artificial Sequence: Synthetic oligonucleotide
uccgcugaccagucgggca

SEQ ID NO: 2685982 - RNA, 19 nt, Artificial Sequence
  Description of Artificial Sequence: Synthetic oligonucleotide
agagacccaaacacaacca

SEQ ID NO: 2685983 - RNA, 19 nt, Artificial Sequence
  Description of Artificial Sequence: Synthetic oligonucleotide
aacaagcgguaucccggga

SEQ ID NO: 2685984 - RNA, 19 nt, Artificial Sequence
  Description of Artificial Sequence: Synthetic oligonucleotide
agucagagacccaaacaca

SEQ ID NO: 2685985 - RNA, 19 nt, Artificial Sequence
  Description of Artificial Sequence: Synthetic oligonucleotide
gguacugaagucuccuguc

SEQ ID NO: 2685986 - RNA, 19 nt, Artificial Sequence
  Description of Artificial Sequence: Synthetic oligonucleotide
aacccuccucuguccccgc

SEQ ID NO: 2685987 - RNA, 19 nt, Artificial Sequence
  Description of Artificial Sequence: Synthetic oligonucleotide
cacaccuccaaugcccacc

SEQ ID NO: 2685988 - RNA, 19 nt, Artificial Sequence
  Description of Artificial Sequence: Synthetic oligonucleotide
gucagagacccaaacacaa

SEQ ID NO: 2685989 - RNA, 19 nt, Artificial Sequence
  Description of Artificial Sequence: Synthetic oligonucleotide
cagagaggaugaaagagcu

SEQ ID NO: 2685990 - RNA, 19 nt, Artificial Sequence
  Description of Artificial Sequence: Synthetic oligonucleotide
aacugggagcagcuccccu

SEQ ID NO: 2685991 - RNA, 19 nt, Artificial Sequence
  Description of Artificial Sequence: Synthetic oligonucleotide
ucuuacccuuaggaaaccu

SEQ ID NO: 2685992 - RNA, 19 nt, Artificial Sequence
  Description of Artificial Sequence: Synthetic oligonucleotide
cucgcaucucccacugcag

SEQ ID NO: 2685993 - RNA, 19 nt, Artificial Sequence
  Description of Artificial Sequence: Synthetic oligonucleotide
agguugggagggcucuggg

SEQ ID NO: 2685994 - RNA, 19 nt, Artificial Sequence
  Description of Artificial Sequence: Synthetic oligonucleotide
uagccauccgcugaccagu

SEQ ID NO: 2685995 - RNA, 19 nt, Artificial Sequence
  Description of Artificial Sequence: Synthetic oligonucleotide
auccuuuauuagggaaggg

SEQ ID NO: 2685996 - RNA, 19 nt, Artificial Sequence
  Description of Artificial Sequence: Synthetic oligonucleotide
uaucccgggaggagucagc

SEQ ID NO: 2685997 - RNA, 19 nt, Artificial Sequence
  Description of Artificial Sequence: Synthetic oligonucleotide
cugaagucuccugucuuac

SEQ ID NO: 2685998 - RNA, 19 nt, Artificial Sequence
  Description of Artificial Sequence: Synthetic oligonucleotide
aggaaaccugacagggagg

SEQ ID NO: 2685999 - RNA, 19 nt, Artificial Sequence
  Description of Artificial Sequence: Synthetic oligonucleotide
gcacuagucccacugccag

SEQ ID NO: 2686000 - RNA, 19 nt, Artificial Sequence
  Description of Artificial Sequence: Synthetic oligonucleotide
agacuggacggcagguugg

SEQ ID NO: 2686001 - RNA, 19 nt, Artificial Sequence
  Description of Artificial Sequence: Synthetic oligonucleotide
  modified_base (11)..(11): a, c, u, g, unknown or other
accaggaaagngguacuga

SEQ ID NO: 2686002 - RNA, 19 nt, Artificial Sequence
  Description of Artificial Sequence: Synthetic oligonucleotide
acuagucccacugccagua

SEQ ID NO: 2686003 - RNA, 19 nt, Artificial Sequence
  Description of Artificial Sequence: Synthetic oligonucleotide
cacugcagcgacagccacc

SEQ ID NO: 2686004 - RNA, 19 nt, Artificial Sequence
  Description of Artificial Sequence: Synthetic oligonucleotide
cccgggaggagucagcgcg

SEQ ID NO: 2686005 - RNA, 19 nt, Artificial Sequence
  Description of Artificial Sequence: Synthetic oligonucleotide
gccaguaccccuaacccag

SEQ ID NO: 2686006 - RNA, 19 nt, Artificial Sequence
  Description of Artificial Sequence: Synthetic oligonucleotide
aaugcccaccagucccgga

SEQ ID NO: 2686007 - RNA, 19 nt, Artificial Sequence
  Description of Artificial Sequence: Synthetic oligonucleotide
gcucaaaugagaaaguuau

SEQ ID NO: 2686008 - RNA, 19 nt, Artificial Sequence
  Description of Artificial Sequence: Synthetic oligonucleotide
gaagacgcggaaggggcac

SEQ ID NO: 2686009 - RNA, 19 nt, Artificial Sequence
  Description of Artificial Sequence: Synthetic oligonucleotide
agacgcggaaggggcaccc

SEQ ID NO: 2686010 - RNA, 19 nt, Artificial Sequence
  Description of Artificial Sequence: Synthetic oligonucleotide
ccauccgcugaccagucgg

SEQ ID NO: 2686011 - RNA, 19 nt, Artificial Sequence
  Description of Artificial Sequence: Synthetic oligonucleotide
auccgcugaccagucgggc

SEQ ID NO: 2686012 - RNA, 19 nt, Artificial Sequence
  Description of Artificial Sequence: Synthetic oligonucleotide
cauaacucccggcgcucag

SEQ ID NO: 2686013 - RNA, 19 nt, Artificial Sequence
  Description of Artificial Sequence: Synthetic oligonucleotide
ucaggccguaggcuccagc

SEQ ID NO: 2686014 - RNA, 19 nt, Artificial Sequence
  Description of Artificial Sequence: Synthetic oligonucleotide
agggagaccugugcaacug

SEQ ID NO: 2686015 - RNA, 19 nt, Artificial Sequence
  Description of Artificial Sequence: Synthetic oligonucleotide
ugcccaccagucccggagc

SEQ ID NO: 2686016 - RNA, 19 nt, Artificial Sequence
  Description of Artificial Sequence: Synthetic oligonucleotide
gaaaaccaguggcgcauaa

SEQ ID NO: 2686017 - RNA, 19 nt, Artificial Sequence
  Description of Artificial Sequence: Synthetic oligonucleotide
acgcggaaggggcacccag

SEQ ID NO: 2686018 - RNA, 19 nt, Artificial Sequence
  Description of Artificial Sequence: Synthetic oligonucleotide
uaccccuaacccagucaga

SEQ ID NO: 2686019 - RNA, 19 nt, Artificial Sequence
  Description of Artificial Sequence: Synthetic oligonucleotide
agucagcgcgcccugccga

SEQ ID NO: 2686020 - RNA, 19 nt, Artificial Sequence
  Description of Artificial Sequence: Synthetic oligonucleotide
gaaaccugacagggagggc

SEQ ID NO: 2686021 - RNA, 19 nt, Artificial Sequence
  Description of Artificial Sequence: Synthetic oligonucleotide
ccagaagacgcggaagggg

SEQ ID NO: 2686022 - RNA, 19 nt, Artificial Sequence
  Description of Artificial Sequence: Synthetic oligonucleotide
gucugcuagccauccgcug

SEQ ID NO: 2686023 - RNA, 19 nt, Artificial Sequence
  Description of Artificial Sequence: Synthetic oligonucleotide
caguggcgcauaacucccg

SEQ ID NO: 2686024 - RNA, 19 nt, Artificial Sequence
  Description of Artificial Sequence: Synthetic oligonucleotide
ccaguggcgcauaacuccc

SEQ ID NO: 2686025 - RNA, 19 nt, Artificial Sequence
  Description of Artificial Sequence: Synthetic oligonucleotide
guaggcuccagccgcagcu

SEQ ID NO: 2686026 - RNA, 19 nt, Artificial Sequence
  Description of Artificial Sequence: Synthetic oligonucleotide
uaacccagucagagaccca

SEQ ID NO: 2686027 - RNA, 19 nt, Artificial Sequence
  Description of Artificial Sequence: Synthetic oligonucleotide
accagucccggagcacacc

SEQ ID NO: 2686028 - RNA, 19 nt, Artificial Sequence
  Description of Artificial Sequence: Synthetic oligonucleotide
agaggaugaaagagcugca

SEQ ID NO: 2686029 - RNA, 19 nt, Artificial Sequence
  Description of Artificial Sequence: Synthetic oligonucleotide
gggagaccugugcaacugg

SEQ ID NO: 2686030 - RNA, 19 nt, Artificial Sequence
  Description of Artificial Sequence: Synthetic oligonucleotide
cugcuagccauccgcugac

SEQ ID NO: 2686031 - RNA, 19 nt, Artificial Sequence
  Description of Artificial Sequence: Synthetic oligonucleotide
aagcgguaucccgggagga

SEQ ID NO: 2686032 - RNA, 19 nt, Artificial Sequence
  Description of Artificial Sequence: Synthetic oligonucleotide
cuccugucuuacccuuagg

SEQ ID NO: 2686033 - RNA, 19 nt, Artificial Sequence
  Description of Artificial Sequence: Synthetic oligonucleotide
  modified_base (12)..(12): a, c, u, g, unknown or other
caccaggaaagngguacug

SEQ ID NO: 2686034 - RNA, 19 nt, Artificial Sequence
  Description of Artificial Sequence: Synthetic oligonucleotide
  modified_base (10)..(10): a, c, u, g, unknown or other
ccaggaaagngguacugaa

SEQ ID NO: 2686035 - RNA, 19 nt, Artificial Sequence
  Description of Artificial Sequence: Synthetic oligonucleotide
gaggagucagcgcgcccug

SEQ ID NO: 2686036 - RNA, 19 nt, Artificial Sequence
  Description of Artificial Sequence: Synthetic oligonucleotide
guagccugcaccacaccuc

SEQ ID NO: 2686037 - RNA, 19 nt, Artificial Sequence
  Description of Artificial Sequence: Synthetic oligonucleotide
guacugaagucuccugucu

SEQ ID NO: 2686038 - RNA, 19 nt, Artificial Sequence
  Description of Artificial Sequence: Synthetic oligonucleotide
agcgguaucccgggaggag

SEQ ID NO: 2686039 - RNA, 19 nt, Artificial Sequence
  Description of Artificial Sequence: Synthetic oligonucleotide
guaucccgggaggagucag

SEQ ID NO: 2686040 - RNA, 19 nt, Artificial Sequence
  Description of Artificial Sequence: Synthetic oligonucleotide
ggccguaggcuccagccgc

SEQ ID NO: 2686041 - RNA, 19 nt, Artificial Sequence
  Description of Artificial Sequence: Synthetic oligonucleotide
ggaaggggcacccagcccu

SEQ ID NO: 2686042 - RNA, 19 nt, Artificial Sequence
  Description of Artificial Sequence: Synthetic oligonucleotide
cagguugggagggcucugg

SEQ ID NO: 2686043 - RNA, 19 nt, Artificial Sequence
  Description of Artificial Sequence: Synthetic oligonucleotide
cagcuagcaggggagcccc

SEQ ID NO: 2686044 - RNA, 19 nt, Artificial Sequence
  Description of Artificial Sequence: Synthetic oligonucleotide
gggcacuagucccacugcc

SEQ ID NO: 2686045 - RNA, 19 nt, Artificial Sequence
  Description of Artificial Sequence: Synthetic oligonucleotide
ggcgcauaacucccggcgc

SEQ ID NO: 2686046 - RNA, 19 nt, Artificial Sequence
  Description of Artificial Sequence: Synthetic oligonucleotide
aagcugccagagaggauga

SEQ ID NO: 2686047 - RNA, 19 nt, Artificial Sequence
  Description of Artificial Sequence: Synthetic oligonucleotide
accagucgggcacucgcau

SEQ ID NO: 2686048 - RNA, 19 nt, Artificial Sequence
  Description of Artificial Sequence: Synthetic oligonucleotide
cacaaccagaagacgcgga

SEQ ID NO: 2686049 - RNA, 19 nt, Artificial Sequence
  Description of Artificial Sequence: Synthetic oligonucleotide
cuggucugcuagccauccg

SEQ ID NO: 2686050 - RNA, 19 nt, Artificial Sequence
  Description of Artificial Sequence: Synthetic oligonucleotide
cugccgagagcagggagac

SEQ ID NO: 2686051 - RNA, 19 nt, Artificial Sequence
  Description of Artificial Sequence: Synthetic oligonucleotide
gagaccugugcaacuggga

SEQ ID NO: 2686052 - RNA, 19 nt, Artificial Sequence
  Description of Artificial Sequence: Synthetic oligonucleotide
uauuagggaaggggcucaa

SEQ ID NO: 2686053 - RNA, 19 nt, Artificial Sequence
  Description of Artificial Sequence: Synthetic oligonucleotide
gaggugagacuggacggca

SEQ ID NO: 2686054 - RNA, 19 nt, Artificial Sequence
  Description of Artificial Sequence: Synthetic oligonucleotide
gagcacaccgaaaaccagu

SEQ ID NO: 2686055 - RNA, 19 nt, Artificial Sequence
  Description of Artificial Sequence: Synthetic oligonucleotide
caucucccacugcagcgac

SEQ ID NO: 2686056 - RNA, 19 nt, Artificial Sequence
  Description of Artificial Sequence: Synthetic oligonucleotide
  modified_base (19)..(19): a, c, u, g, unknown or other
agcugcacaccaggaaagn

SEQ ID NO: 2686057 - RNA, 19 nt, Artificial Sequence
  Description of Artificial Sequence: Synthetic oligonucleotide
gcacaccgaaaaccagugg

SEQ ID NO: 2686058 - RNA, 19 nt, Artificial Sequence
  Description of Artificial Sequence: Synthetic oligonucleotide
ccagucccggagcacaccg

SEQ ID NO: 2686059 - RNA, 19 nt, Artificial Sequence
  Description of Artificial Sequence: Synthetic oligonucleotide
guggcgcauaacucccggc

SEQ ID NO: 2686060 - RNA, 19 nt, Artificial Sequence
  Description of Artificial Sequence: Synthetic oligonucleotide
aggagucagcgcgcccugc

SEQ ID NO: 2686061 - RNA, 19 nt, Artificial Sequence
  Description of Artificial Sequence: Synthetic oligonucleotide
ggaggugagacuggacggc

SEQ ID NO: 2686062 - RNA, 19 nt, Artificial Sequence
  Description of Artificial Sequence: Synthetic oligonucleotide
gacagggagggcccacgga

SEQ ID NO: 2686063 - RNA, 19 nt, Artificial Sequence
  Description of Artificial Sequence: Synthetic oligonucleotide
ugagacuggacggcagguu

SEQ ID NO: 2686064 - RNA, 19 nt, Artificial Sequence
  Description of Artificial Sequence: Synthetic oligonucleotide
ccggagcacaccgaaaacc

SEQ ID NO: 2686065 - RNA, 19 nt, Artificial Sequence
  Description of Artificial Sequence: Synthetic oligonucleotide
gucgggcacucgcaucucc

SEQ ID NO: 2686066 - RNA, 19 nt, Artificial Sequence
  Description of Artificial Sequence: Synthetic oligonucleotide
gggaaggggcucaaaugag

SEQ ID NO: 2686067 - RNA, 19 nt, Artificial Sequence
  Description of Artificial Sequence: Synthetic oligonucleotide
gucuuacccuuaggaaacc

SEQ ID NO: 2686068 - RNA, 19 nt, Artificial Sequence
  Description of Artificial Sequence: Synthetic oligonucleotide
gucagcgcgcccugccgag

SEQ ID NO: 2686069 - RNA, 19 nt, Artificial Sequence
  Description of Artificial Sequence: Synthetic oligonucleotide
agcgcgcccugccgagagc

SEQ ID NO: 2686070 - RNA, 19 nt, Artificial Sequence
  Description of Artificial Sequence: Synthetic oligonucleotide
ccaaacccuccucuguccc

SEQ ID NO: 2686071 - RNA, 19 nt, Artificial Sequence
  Description of Artificial Sequence: Synthetic oligonucleotide
cagccaccaccaacgcugc

SEQ ID NO: 2686072 - RNA, 19 nt, Artificial Sequence
  Description of Artificial Sequence: Synthetic oligonucleotide
ggagucagcgcgcccugcc

SEQ ID NO: 2686073 - RNA, 19 nt, Artificial Sequence
  Description of Artificial Sequence: Synthetic oligonucleotide
agaagacgcggaaggggca

SEQ ID NO: 2686074 - RNA, 19 nt, Artificial Sequence
  Description of Artificial Sequence: Synthetic oligonucleotide
gcggaaggggcacccagcc

SEQ ID NO: 2686075 - RNA, 19 nt, Artificial Sequence
  Description of Artificial Sequence: Synthetic oligonucleotide
ggagcacaccgaaaaccag

SEQ ID NO: 2686076 - RNA, 19 nt, Artificial Sequence
  Description of Artificial Sequence: Synthetic oligonucleotide
caaugcccaccagucccgg

SEQ ID NO: 2686077 - RNA, 19 nt, Artificial Sequence
  Description of Artificial Sequence: Synthetic oligonucleotide
ggaaggggcucaaaugaga

SEQ ID NO: 2686078 - RNA, 19 nt, Artificial Sequence
  Description of Artificial Sequence: Synthetic oligonucleotide
ucccgggaggagucagcgc

SEQ ID NO: 2686079 - RNA, 19 nt, Artificial Sequence
  Description of Artificial Sequence: Synthetic oligonucleotide
cuagucccacugccaguac

SEQ ID NO: 2686080 - RNA, 19 nt, Artificial Sequence
  Description of Artificial Sequence: Synthetic oligonucleotide
gcagcgacagccaccacca

SEQ ID NO: 2686081 - RNA, 19 nt, Artificial Sequence
  Description of Artificial Sequence: Synthetic oligonucleotide
ccccauguagaugaagcug

SEQ ID NO: 2686082 - RNA, 19 nt, Artificial Sequence
  Description of Artificial Sequence: Synthetic oligonucleotide
ggcucaaaugagaaaguua

SEQ ID NO: 2686083 - RNA, 19 nt, Artificial Sequence
  Description of Artificial Sequence: Synthetic oligonucleotide
caccagucccggagcacac

SEQ ID NO: 2686084 - RNA, 19 nt, Artificial Sequence
  Description of Artificial Sequence: Synthetic oligonucleotide
caguaccccuaacccaguc

SEQ ID NO: 2686085 - RNA, 19 nt, Artificial Sequence
  Description of Artificial Sequence: Synthetic oligonucleotide
cagcccuggucugcuagcc

SEQ ID NO: 2686086 - RNA, 19 nt, Artificial Sequence
  Description of Artificial Sequence: Synthetic oligonucleotide
ccagucagagacccaaaca

SEQ ID NO: 2686087 - RNA, 19 nt, Artificial Sequence
  Description of Artificial Sequence: Synthetic oligonucleotide
ugcuagccauccgcugacc

SEQ ID NO: 2686088 - RNA, 19 nt, Artificial Sequence
  Description of Artificial Sequence: Synthetic oligonucleotide
cccagucagagacccaaac

SEQ ID NO: 2686089 - RNA, 19 nt, Artificial Sequence
  Description of Artificial Sequence: Synthetic oligonucleotide
agcccuggucugcuagcca

SEQ ID NO: 2686090 - RNA, 19 nt, Artificial Sequence
  Description of Artificial Sequence: Synthetic oligonucleotide
gcacucgcaucucccacug

SEQ ID NO: 2686091 - RNA, 19 nt, Artificial Sequence
  Description of Artificial Sequence: Synthetic oligonucleotide
ugggagggcucugggcagc

SEQ ID NO: 2686092 - RNA, 19 nt, Artificial Sequence
  Description of Artificial Sequence: Synthetic oligonucleotide
ccaacgcugccccguaacc

SEQ ID NO: 2686093 - RNA, 19 nt, Artificial Sequence
  Description of Artificial Sequence: Synthetic oligonucleotide
ccaccaccaacgcugcccc

SEQ ID NO: 2686094 - RNA, 19 nt, Artificial Sequence
  Description of Artificial Sequence: Synthetic oligonucleotide
agugggcacuagucccacu

SEQ ID NO: 2686095 - RNA, 19 nt, Artificial Sequence
  Description of Artificial Sequence: Synthetic oligonucleotide
auuagggaaggggcucaaa

SEQ ID NO: 2686096 - RNA, 19 nt, Artificial Sequence
  Description of Artificial Sequence: Synthetic oligonucleotide
cccgcagugggcacuaguc

SEQ ID NO: 2686097 - RNA, 19 nt, Artificial Sequence
  Description of Artificial Sequence: Synthetic oligonucleotide
caacugggagcagcucccc

SEQ ID NO: 2686098 - RNA, 19 nt, Artificial Sequence
  Description of Artificial Sequence: Synthetic oligonucleotide
gcuagccauccgcugacca

SEQ ID NO: 2686099 - RNA, 19 nt, Artificial Sequence
  Description of Artificial Sequence: Synthetic oligonucleotide
cagcgcgcccugccgagag

SEQ ID NO: 2686100 - RNA, 19 nt, Artificial Sequence
  Description of Artificial Sequence: Synthetic oligonucleotide
cagucgggcacucgcaucu

SEQ ID NO: 2686101 - RNA, 19 nt, Artificial Sequence
  Description of Artificial Sequence: Synthetic oligonucleotide
gaccagucgggcacucgca

SEQ ID NO: 2686102 - RNA, 19 nt, Artificial Sequence
  Description of Artificial Sequence: Synthetic oligonucleotide
acggcagguugggagggcu

SEQ ID NO: 2686103 - RNA, 19 nt, Artificial Sequence
  Description of Artificial Sequence: Synthetic oligonucleotide
agucgggcacucgcaucuc

SEQ ID NO: 2686104 - RNA, 19 nt, Artificial Sequence
  Description of Artificial Sequence: Synthetic oligonucleotide
ggacggcagguugggaggg

SEQ ID NO: 2686105 - RNA, 19 nt, Artificial Sequence
  Description of Artificial Sequence: Synthetic oligonucleotide
gcagggagaccugugcaac

SEQ ID NO: 2686106 - RNA, 19 nt, Artificial Sequence
  Description of Artificial Sequence: Synthetic oligonucleotide
ccuggucugcuagccaucc

SEQ ID NO: 2686107 - RNA, 19 nt, Artificial Sequence
  Description of Artificial Sequence: Synthetic oligonucleotide
cacucgcaucucccacugc

SEQ ID NO: 2686108 - RNA, 19 nt, Artificial Sequence
  Description of Artificial Sequence: Synthetic oligonucleotide
caccaccaacgcugccccg

SEQ ID NO: 2686109 - RNA, 19 nt, Artificial Sequence
  Description of Artificial Sequence: Synthetic oligonucleotide
gacggcagguugggagggc

SEQ ID NO: 2686110 - RNA, 19 nt, Artificial Sequence
  Description of Artificial Sequence: Synthetic oligonucleotide
cuccagccgcagcuagcag

SEQ ID NO: 2686111 - RNA, 19 nt, Artificial Sequence
  Description of Artificial Sequence: Synthetic oligonucleotide
gccgagagcagggagaccu

SEQ ID NO: 2686112 - RNA, 19 nt, Artificial Sequence
  Description of Artificial Sequence: Synthetic oligonucleotide
ccugccgagagcagggaga

SEQ ID NO: 2686113 - RNA, 19 nt, Artificial Sequence
  Description of Artificial Sequence: Synthetic oligonucleotide
ccgaggcucaucagcauca

SEQ ID NO: 2686114 - RNA, 19 nt, Artificial Sequence
  Description of Artificial Sequence: Synthetic oligonucleotide
cggagcacaccgaaaacca

SEQ ID NO: 2686115 - RNA, 19 nt, Artificial Sequence
  Description of Artificial Sequence: Synthetic oligonucleotide
ggcacuagucccacugcca

SEQ ID NO: 2686116 - RNA, 19 nt, Artificial Sequence
  Description of Artificial Sequence: Synthetic oligonucleotide
gguagcuggaggugagacu

SEQ ID NO: 2686117 - RNA, 19 nt, Artificial Sequence
  Description of Artificial Sequence: Synthetic oligonucleotide
gccauccgcugaccagucg

SEQ ID NO: 2686118 - RNA, 19 nt, Artificial Sequence
  Description of Artificial Sequence: Synthetic oligonucleotide
gggcacucgcaucucccac

SEQ ID NO: 2686119 - RNA, 19 nt, Artificial Sequence
  Description of Artificial Sequence: Synthetic oligonucleotide
ccgcugaccagucgggcac

SEQ ID NO: 2686120 - RNA, 19 nt, Artificial Sequence
  Description of Artificial Sequence: Synthetic oligonucleotide
acuggacggcagguuggga

SEQ ID NO: 2686121 - RNA, 19 nt, Artificial Sequence
  Description of Artificial Sequence: Synthetic oligonucleotide
gcgcucaggccguaggcuc

SEQ ID NO: 2686122 - RNA, 19 nt, Artificial Sequence
  Description of Artificial Sequence: Synthetic oligonucleotide
cccgaggcucaucagcauc

SEQ ID NO: 2686123 - RNA, 19 nt, Artificial Sequence
  Description of Artificial Sequence: Synthetic oligonucleotide
ucagcgcgcccugccgaga

SEQ ID NO: 2686124 - RNA, 19 nt, Artificial Sequence
  Description of Artificial Sequence: Synthetic oligonucleotide
cacugccaguaccccuaac

SEQ ID NO: 2686125 - RNA, 19 nt, Artificial Sequence
  Description of Artificial Sequence: Synthetic oligonucleotide
ggaggagucagcgcgcccu

SEQ ID NO: 2686126 - RNA, 19 nt, Artificial Sequence
  Description of Artificial Sequence: Synthetic oligonucleotide
caccuccaaugcccaccag

SEQ ID NO: 2686127 - RNA, 19 nt, Artificial Sequence
  Description of Artificial Sequence: Synthetic oligonucleotide
gugagacuggacggcaggu

SEQ ID NO: 2686128 - RNA, 19 nt, Artificial Sequence
  Description of Artificial Sequence: Synthetic oligonucleotide
cagggagaccugugcaacu

SEQ ID NO: 2686129 - RNA, 19 nt, Artificial Sequence
  Description of Artificial Sequence: Synthetic oligonucleotide
ggcacucgcaucucccacu

SEQ ID NO: 2686130 - RNA, 19 nt, Artificial Sequence
  Description of Artificial Sequence: Synthetic oligonucleotide
cgcccugccgagagcaggg

SEQ ID NO: 2686131 - RNA, 19 nt, Artificial Sequence
  Description of Artificial Sequence: Synthetic oligonucleotide
ccagucgggcacucgcauc

SEQ ID NO: 2686132 - RNA, 19 nt, Artificial Sequence
  Description of Artificial Sequence: Synthetic oligonucleotide
cagucccggagcacaccga

SEQ ID NO: 2686133 - RNA, 19 nt, Artificial Sequence
  Description of Artificial Sequence: Synthetic oligonucleotide
cacuagucccacugccagu

SEQ ID NO: 2686134 - RNA, 19 nt, Artificial Sequence
  Description of Artificial Sequence: Synthetic oligonucleotide
gggaggagucagcgcgccc

SEQ ID NO: 2686135 - RNA, 19 nt, Artificial Sequence
  Description of Artificial Sequence: Synthetic oligonucleotide
gacgcggaaggggcaccca

SEQ ID NO: 2686136 - RNA, 19 nt, Artificial Sequence
  Description of Artificial Sequence: Synthetic oligonucleotide
gcgcccugccgagagcagg

SEQ ID NO: 2686137 - RNA, 19 nt, Artificial Sequence
  Description of Artificial Sequence: Synthetic oligonucleotide
cccugccgagagcagggag

SEQ ID NO: 2686138 - RNA, 19 nt, Artificial Sequence
  Description of Artificial Sequence: Synthetic oligonucleotide
ccgggaggagucagcgcgc

SEQ ID NO: 2686139 - RNA, 19 nt, Artificial Sequence
  Description of Artificial Sequence: Synthetic oligonucleotide
accugacagggagggccca

SEQ ID NO: 2686140 - RNA, 19 nt, Artificial Sequence
  Description of Artificial Sequence: Synthetic oligonucleotide
ccggcgcucaggccguagg

SEQ ID NO: 2686141 - RNA, 19 nt, Artificial Sequence
  Description of Artificial Sequence: Synthetic oligonucleotide
cucugggcagccccaugua

SEQ ID NO: 2686142 - RNA, 19 nt, Artificial Sequence
  Description of Artificial Sequence: Synthetic oligonucleotide
ccacugcagcgacagccac

SEQ ID NO: 2686143 - RNA, 19 nt, Artificial Sequence
  Description of Artificial Sequence: Synthetic oligonucleotide
gguaucccgggaggaguca

SEQ ID NO: 2686144 - RNA, 19 nt, Artificial Sequence
  Description of Artificial Sequence: Synthetic oligonucleotide
cgcggaaggggcacccagc

SEQ ID NO: 2686145 - RNA, 19 nt, Artificial Sequence
  Description of Artificial Sequence: Synthetic oligonucleotide
ggcucugggcagccccaug

SEQ ID NO: 2686146 - RNA, 19 nt, Artificial Sequence
  Description of Artificial Sequence: Synthetic oligonucleotide
gcauaacucccggcgcuca

SEQ ID NO: 2686147 - RNA, 19 nt, Artificial Sequence
  Description of Artificial Sequence: Synthetic oligonucleotide
cccacugccaguaccccua

SEQ ID NO: 2686148 - RNA, 19 nt, Artificial Sequence
  Description of Artificial Sequence: Synthetic oligonucleotide
gggagggcccacggagucc

SEQ ID NO: 2686149 - RNA, 19 nt, Artificial Sequence
  Description of Artificial Sequence: Synthetic oligonucleotide
acccagucagagacccaaa

SEQ ID NO: 2686150 - RNA, 19 nt, Artificial Sequence
  Description of Artificial Sequence: Synthetic oligonucleotide
gcgcauaacucccggcgcu

SEQ ID NO: 2686151 - RNA, 19 nt, Artificial Sequence
  Description of Artificial Sequence: Synthetic oligonucleotide
cagccgcagcuagcagggg

SEQ ID NO: 2686152 - RNA, 19 nt, Artificial Sequence
  Description of Artificial Sequence: Synthetic oligonucleotide
agcugccagagaggaugaa

SEQ ID NO: 2686153 - RNA, 19 nt, Artificial Sequence
  Description of Artificial Sequence: Synthetic oligonucleotide
ccgagagcagggagaccug

SEQ ID NO: 2686154 - RNA, 19 nt, Artificial Sequence
  Description of Artificial Sequence: Synthetic oligonucleotide
cucaggccguaggcuccag

SEQ ID NO: 2686155 - RNA, 19 nt, Artificial Sequence
  Description of Artificial Sequence: Synthetic oligonucleotide
ccaccagucccggagcaca

SEQ ID NO: 2686156 - RNA, 19 nt, Artificial Sequence
  Description of Artificial Sequence: Synthetic oligonucleotide
ggucugcuagccauccgcu

SEQ ID NO: 2686157 - RNA, 19 nt, Artificial Sequence
  Description of Artificial Sequence: Synthetic oligonucleotide
ggggcucaaaugagaaagu

SEQ ID NO: 2686158 - RNA, 19 nt, Artificial Sequence
  Description of Artificial Sequence: Synthetic oligonucleotide
cguaggcuccagccgcagc

SEQ ID NO: 2686159 - RNA, 19 nt, Artificial Sequence
  Description of Artificial Sequence: Synthetic oligonucleotide
cccuggucugcuagccauc

SEQ ID NO: 2686160 - RNA, 19 nt, Artificial Sequence
  Description of Artificial Sequence: Synthetic oligonucleotide
uccccgcagugggcacuag

SEQ ID NO: 2686161 - RNA, 19 nt, Artificial Sequence
  Description of Artificial Sequence: Synthetic oligonucleotide
gcccuggucugcuagccau

SEQ ID NO: 2686162 - RNA, 19 nt, Artificial Sequence
  Description of Artificial Sequence: Synthetic oligonucleotide
ccccuaacccagucagaga

SEQ ID NO: 2686163 - RNA, 19 nt, Artificial Sequence
  Description of Artificial Sequence: Synthetic oligonucleotide
gggcagccccauguagaug

SEQ ID NO: 2686164 - RNA, 19 nt, Artificial Sequence
  Description of Artificial Sequence: Synthetic oligonucleotide
cggaaggggcacccagccc

SEQ ID NO: 2686165 - RNA, 19 nt, Artificial Sequence
  Description of Artificial Sequence: Synthetic oligonucleotide
gucccggagcacaccgaaa

SEQ ID NO: 2686166 - RNA, 19 nt, Artificial Sequence
  Description of Artificial Sequence: Synthetic oligonucleotide
caccaacgcugccccguaa

SEQ ID NO: 2686167 - RNA, 19 nt, Artificial Sequence
  Description of Artificial Sequence: Synthetic oligonucleotide
cugcagcgacagccaccac

SEQ ID NO: 2686168 - RNA, 19 nt, Artificial Sequence
  Description of Artificial Sequence: Synthetic oligonucleotide
agccugcaccacaccucca

SEQ ID NO: 2686169 - RNA, 19 nt, Artificial Sequence
  Description of Artificial Sequence: Synthetic oligonucleotide
cggcgcucaggccguaggc

SEQ ID NO: 2686170 - RNA, 19 nt, Artificial Sequence
  Description of Artificial Sequence: Synthetic oligonucleotide
gcgcgcccugccgagagca

SEQ ID NO: 2686171 - RNA, 19 nt, Artificial Sequence
  Description of Artificial Sequence: Synthetic oligonucleotide
acccagcccuggucugcua

SEQ ID NO: 2686172 - RNA, 19 nt, Artificial Sequence
  Description of Artificial Sequence: Synthetic oligonucleotide
ggcgcucaggccguaggcu

SEQ ID NO: 2686173 - RNA, 19 nt, Artificial Sequence
  Description of Artificial Sequence: Synthetic oligonucleotide
gcgguaucccgggaggagu

SEQ ID NO: 2686174 - RNA, 19 nt, Artificial Sequence
  Description of Artificial Sequence: Synthetic oligonucleotide
ccgcagcuagcaggggagc

SEQ ID NO: 2686175 - RNA, 19 nt, Artificial Sequence
  Description of Artificial Sequence: Synthetic oligonucleotide
ccgaaaaccaguggcgcau

SEQ ID NO: 2686176 - RNA, 19 nt, Artificial Sequence
  Description of Artificial Sequence: Synthetic oligonucleotide
gcugaccagucgggcacuc

SEQ ID NO: 2686177 - RNA, 19 nt, Artificial Sequence
  Description of Artificial Sequence: Synthetic oligonucleotide
cccaccagucccggagcac

SEQ ID NO: 2686178 - RNA, 19 nt, Artificial Sequence
  Description of Artificial Sequence: Synthetic oligonucleotide
cgcauaacucccggcgcuc

SEQ ID NO: 2686179 - RNA, 19 nt, Artificial Sequence
  Description of Artificial Sequence: Synthetic oligonucleotide
cgggaggagucagcgcgcc

SEQ ID NO: 2686180 - RNA, 19 nt, Artificial Sequence
  Description of Artificial Sequence: Synthetic oligonucleotide
guccccgcagugggcacua

SEQ ID NO: 2686181 - RNA, 19 nt, Artificial Sequence
  Description of Artificial Sequence: Synthetic oligonucleotide
cucccggcgcucaggccgu

SEQ ID NO: 2686182 - RNA, 19 nt, Artificial Sequence
  Description of Artificial Sequence: Synthetic oligonucleotide
gccguaggcuccagccgca

SEQ ID NO: 2686183 - RNA, 19 nt, Artificial Sequence
  Description of Artificial Sequence: Synthetic oligonucleotide
ccguaggcuccagccgcag

SEQ ID NO: 2686184 - RNA, 19 nt, Artificial Sequence
  Description of Artificial Sequence: Synthetic oligonucleotide
cagcgacagccaccaccaa

SEQ ID NO: 2686185 - RNA, 19 nt, Artificial Sequence
  Description of Artificial Sequence: Synthetic oligonucleotide
cgggcacucgcaucuccca

SEQ ID NO: 2686186 - RNA, 19 nt, Artificial Sequence
  Description of Artificial Sequence: Synthetic oligonucleotide
  modified_base (15)..(15): a, c, u, g, unknown or other
gcacaccaggaaagnggua

SEQ ID NO: 2686187 - RNA, 19 nt, Artificial Sequence
  Description of Artificial Sequence: Synthetic oligonucleotide
cggcagguugggagggcuc

SEQ ID NO: 2686188 - RNA, 19 nt, Artificial Sequence
  Description of Artificial Sequence: Synthetic oligonucleotide
ccaguaccccuaacccagu

SEQ ID NO: 2686189 - RNA, 19 nt, Artificial Sequence
  Description of Artificial Sequence: Synthetic oligonucleotide
ccaccaacgcugccccgua

SEQ ID NO: 2686190 - RNA, 19 nt, Artificial Sequence
  Description of Artificial Sequence: Synthetic oligonucleotide
ccacugccaguaccccuaa

SEQ ID NO: 2686191 - RNA, 19 nt, Artificial Sequence
  Description of Artificial Sequence: Synthetic oligonucleotide
cgcgcccugccgagagcag

SEQ ID NO: 2686192 - RNA, 19 nt, Artificial Sequence
  Description of Artificial Sequence: Synthetic oligonucleotide
gcccugccgagagcaggga

SEQ ID NO: 2686193 - RNA, 19 nt, Artificial Sequence
  Description of Artificial Sequence: Synthetic oligonucleotide
cgaaaaccaguggcgcaua

SEQ ID NO: 2686194 - RNA, 19 nt, Artificial Sequence
  Description of Artificial Sequence: Synthetic oligonucleotide
cccggcgcucaggccguag

SEQ ID NO: 2686195 - RNA, 19 nt, Artificial Sequence
  Description of Artificial Sequence: Synthetic oligonucleotide
ucccggcgcucaggccgua

SEQ ID NO: 2686196 - RNA, 19 nt, Artificial Sequence
  Description of Artificial Sequence: Synthetic oligonucleotide
ccccgcagugggcacuagu

SEQ ID NO: 2686197 - RNA, 19 nt, Artificial Sequence
  Description of Artificial Sequence: Synthetic oligonucleotide
ccccgaggcucaucagcau

SEQ ID NO: 2686198 - RNA, 19 nt, Artificial Sequence
  Description of Artificial Sequence: Synthetic oligonucleotide
cgaggcucaucagcaucau

SEQ ID NO: 2686199 - RNA, 19 nt, Artificial Sequence
  Description of Artificial Sequence: Synthetic oligonucleotide
cgcugaccagucgggcacu

SEQ ID NO: 2686200 - RNA, 19 nt, Artificial Sequence
  Description of Artificial Sequence: Synthetic oligonucleotide
  modified_base (1)..(1): a, c, u, g, unknown or other
ngguacugaagucuccugu

SEQ ID NO: 2686201 - RNA, 19 nt, Artificial Sequence
  Description of Artificial Sequence: Synthetic oligonucleotide
aguuaugccaaucagcugc

SEQ ID NO: 2686202 - RNA, 19 nt, Artificial Sequence
  Description of Artificial Sequence: Synthetic oligonucleotide
ucuuguaugcgucagacag

SEQ ID NO: 2686203 - RNA, 19 nt, Artificial Sequence
  Description of Artificial Sequence: Synthetic oligonucleotide
uguaaugauaauuuucuag

SEQ ID NO: 2686204 - RNA, 19 nt, Artificial Sequence
  Description of Artificial Sequence: Synthetic oligonucleotide
gauaagacggguuuucugg

SEQ ID NO: 2686205 - RNA, 19 nt, Artificial Sequence
  Description of Artificial Sequence: Synthetic oligonucleotide
ucacaaauuccuuuggugg

SEQ ID NO: 2686206 - RNA, 19 nt, Artificial Sequence
  Description of Artificial Sequence: Synthetic oligonucleotide
aauucaaccuucucuuuac

SEQ ID NO: 2686207 - RNA, 19 nt, Artificial Sequence
  Description of Artificial Sequence: Synthetic oligonucleotide
aaaccggcaucacugaggc

SEQ ID NO: 2686208 - RNA, 19 nt, Artificial Sequence
  Description of Artificial Sequence: Synthetic oligonucleotide
ugcacugacagauaagacg

SEQ ID NO: 2686209 - RNA, 19 nt, Artificial Sequence
  Description of Artificial Sequence: Synthetic oligonucleotide
aacaagcugacuuuuaggu

SEQ ID NO: 2686210 - RNA, 19 nt, Artificial Sequence
  Description of Artificial Sequence: Synthetic oligonucleotide
auaaaagaaagccgugggc

SEQ ID NO: 2686211 - RNA, 19 nt, Artificial Sequence
  Description of Artificial Sequence: Synthetic oligonucleotide
uuaaguuaugccaaucagc

SEQ ID NO: 2686212 - RNA, 19 nt, Artificial Sequence
  Description of Artificial Sequence: Synthetic oligonucleotide
agagucuuugcuuccaugc

SEQ ID NO: 2686213 - RNA, 19 nt, Artificial Sequence
  Description of Artificial Sequence: Synthetic oligonucleotide
aauuccaagagucuuugcu

SEQ ID NO: 2686214 - RNA, 19 nt, Artificial Sequence
  Description of Artificial Sequence: Synthetic oligonucleotide
uuguauuuuagucaagcca

SEQ ID NO: 2686215 - RNA, 19 nt, Artificial Sequence
  Description of Artificial Sequence: Synthetic oligonucleotide
ucuuuacucaacaagcuga

SEQ ID NO: 2686216 - RNA, 19 nt, Artificial Sequence
  Description of Artificial Sequence: Synthetic oligonucleotide
uuucauuuguauuuuaguc

SEQ ID NO: 2686217 - RNA, 19 nt, Artificial Sequence
  Description of Artificial Sequence: Synthetic oligonucleotide
uaaaagaaagccgugggcc

SEQ ID NO: 2686218 - RNA, 19 nt, Artificial Sequence
  Description of Artificial Sequence: Synthetic oligonucleotide
auuaaguuaugccaaucag

SEQ ID NO: 2686219 - RNA, 19 nt, Artificial Sequence
  Description of Artificial Sequence: Synthetic oligonucleotide
uucuaguucacaaauuccu

SEQ ID NO: 2686220 - RNA, 19 nt, Artificial Sequence
  Description of Artificial Sequence: Synthetic oligonucleotide
uuagucaagccauccaagg

SEQ ID NO: 2686221 - RNA, 19 nt, Artificial Sequence
  Description of Artificial Sequence: Synthetic oligonucleotide
ucuuccuucucacuggaag

SEQ ID NO: 2686222 - RNA, 19 nt, Artificial Sequence
  Description of Artificial Sequence: Synthetic oligonucleotide
uguugcaauuccaagaguc

SEQ ID NO: 2686223 - RNA, 19 nt, Artificial Sequence
  Description of Artificial Sequence: Synthetic oligonucleotide
cauaaaagaaagccguggg

SEQ ID NO: 2686224 - RNA, 19 nt, Artificial Sequence
  Description of Artificial Sequence: Synthetic oligonucleotide
auaauuuucuaguucacaa

SEQ ID NO: 2686225 - RNA, 19 nt, Artificial Sequence
  Description of Artificial Sequence: Synthetic oligonucleotide
ucaacaagcugacuuuuag

SEQ ID NO: 2686226 - RNA, 19 nt, Artificial Sequence
  Description of Artificial Sequence: Synthetic oligonucleotide
aacagaaggggccgguuac

SEQ ID NO: 2686227 - RNA, 19 nt, Artificial Sequence
  Description of Artificial Sequence: Synthetic oligonucleotide
ucuaauucaaccuucucuu

SEQ ID NO: 2686228 - RNA, 19 nt, Artificial Sequence
  Description of Artificial Sequence: Synthetic oligonucleotide
uuuucuugcacugacagau

SEQ ID NO: 2686229 - RNA, 19 nt, Artificial Sequence
  Description of Artificial Sequence: Synthetic oligonucleotide
uuuguauuuuagucaagcc

SEQ ID NO: 2686230 - RNA, 19 nt, Artificial Sequence
  Description of Artificial Sequence: Synthetic oligonucleotide
ucauuuguauuuuagucaa

SEQ ID NO: 2686231 - RNA, 19 nt, Artificial Sequence
  Description of Artificial Sequence: Synthetic oligonucleotide
uuuagucaagccauccaag

SEQ ID NO: 2686232 - RNA, 19 nt, Artificial Sequence
  Description of Artificial Sequence: Synthetic oligonucleotide
ucaaccuucucuuuacuca

SEQ ID NO: 2686233 - RNA, 19 nt, Artificial Sequence
  Description of Artificial Sequence: Synthetic oligonucleotide
uucacaaauuccuuuggug

SEQ ID NO: 2686234 - RNA, 19 nt, Artificial Sequence
  Description of Artificial Sequence: Synthetic oligonucleotide
uuuuagucaagccauccaa

SEQ ID NO: 2686235 - RNA, 19 nt, Artificial Sequence
  Description of Artificial Sequence: Synthetic oligonucleotide
caagcugacuuuuagguug

SEQ ID NO: 2686236 - RNA, 19 nt, Artificial Sequence
  Description of Artificial Sequence: Synthetic oligonucleotide
aaagccgugggccaugugu

SEQ ID NO: 2686237 - RNA, 19 nt, Artificial Sequence
  Description of Artificial Sequence: Synthetic oligonucleotide
guaugcgucagacagccgg

SEQ ID NO: 2686238 - RNA, 19 nt, Artificial Sequence
  Description of Artificial Sequence: Synthetic oligonucleotide
agugcuucaagcuccucac

SEQ ID NO: 2686239 - RNA, 19 nt, Artificial Sequence
  Description of Artificial Sequence: Synthetic oligonucleotide
uuggcaauauugcucgcgg

SEQ ID NO: 2686240 - RNA, 19 nt, Artificial Sequence
  Description of Artificial Sequence: Synthetic oligonucleotide
gauuaaguuaugccaauca

SEQ ID NO: 2686241 - RNA, 19 nt, Artificial Sequence
  Description of Artificial Sequence: Synthetic oligonucleotide
ucccauuucaggauuaagu

SEQ ID NO: 2686242 - RNA, 19 nt, Artificial Sequence
  Description of Artificial Sequence: Synthetic oligonucleotide
uuacucaacaagcugacuu

SEQ ID NO: 2686243 - RNA, 19 nt, Artificial Sequence
  Description of Artificial Sequence: Synthetic oligonucleotide
aaaagaaagccgugggcca

SEQ ID NO: 2686244 - RNA, 19 nt, Artificial Sequence
  Description of Artificial Sequence: Synthetic oligonucleotide
gaggcuuucccauuucagg

SEQ ID NO: 2686245 - RNA, 19 nt, Artificial Sequence
  Description of Artificial Sequence: Synthetic oligonucleotide
augccaaucagcugcauug

SEQ ID NO: 2686246 - RNA, 19 nt, Artificial Sequence
  Description of Artificial Sequence: Synthetic oligonucleotide
aagcuccucacuguagucc

SEQ ID NO: 2686247 - RNA, 19 nt, Artificial Sequence
  Description of Artificial Sequence: Synthetic oligonucleotide
aaaaccggcaucacugagg

SEQ ID NO: 2686248 - RNA, 19 nt, Artificial Sequence
  Description of Artificial Sequence: Synthetic oligonucleotide
agucuuugcuuccaugcgg

SEQ ID NO: 2686249 - RNA, 19 nt, Artificial Sequence
  Description of Artificial Sequence: Synthetic oligonucleotide
cuuuggugguugaagacag

SEQ ID NO: 2686250 - RNA, 19 nt, Artificial Sequence
  Description of Artificial Sequence: Synthetic oligonucleotide
auaagacggguuuucuggg

SEQ ID NO: 2686251 - RNA, 19 nt, Artificial Sequence
  Description of Artificial Sequence: Synthetic oligonucleotide
uguguggaacagaaggggc

SEQ ID NO: 2686252 - RNA, 19 nt, Artificial Sequence
  Description of Artificial Sequence: Synthetic oligonucleotide
ucucuuuacucaacaagcu

SEQ ID NO: 2686253 - RNA, 19 nt, Artificial Sequence
  Description of Artificial Sequence: Synthetic oligonucleotide
uucccuguaaugauaauuu

SEQ ID NO: 2686254 - RNA, 19 nt, Artificial Sequence
  Description of Artificial Sequence: Synthetic oligonucleotide
ugggcgaccucauaaaaga

SEQ ID NO: 2686255 - RNA, 19 nt, Artificial Sequence
  Description of Artificial Sequence: Synthetic oligonucleotide
uauuuuagucaagccaucc

SEQ ID NO: 2686256 - RNA, 19 nt, Artificial Sequence
  Description of Artificial Sequence: Synthetic oligonucleotide
uuguaugcgucagacagcc

SEQ ID NO: 2686257 - RNA, 19 nt, Artificial Sequence
  Description of Artificial Sequence: Synthetic oligonucleotide
guugcggucguccguaugg

SEQ ID NO: 2686258 - RNA, 19 nt, Artificial Sequence
  Description of Artificial Sequence: Synthetic oligonucleotide
uaauuuucuaguucacaaa

SEQ ID NO: 2686259 - RNA, 19 nt, Artificial Sequence
  Description of Artificial Sequence: Synthetic oligonucleotide
ucuauguaaggcuggugca

SEQ ID NO: 2686260 - RNA, 19 nt, Artificial Sequence
  Description of Artificial Sequence: Synthetic oligonucleotide
gguguugcaauuccaagag

SEQ ID NO: 2686261 - RNA, 19 nt, Artificial Sequence
  Description of Artificial Sequence: Synthetic oligonucleotide
accucauaaaagaaagccg

SEQ ID NO: 2686262 - RNA, 19 nt, Artificial Sequence
  Description of Artificial Sequence: Synthetic oligonucleotide
gguaaaaccggcaucacug

SEQ ID NO: 2686263 - RNA, 19 nt, Artificial Sequence
  Description of Artificial Sequence: Synthetic oligonucleotide
uaauucaaccuucucuuua

SEQ ID NO: 2686264 - RNA, 19 nt, Artificial Sequence
  Description of Artificial Sequence: Synthetic oligonucleotide
ugaggcuuucccauuucag

SEQ ID NO: 2686265 - RNA, 19 nt, Artificial Sequence
  Description of Artificial Sequence: Synthetic oligonucleotide
agguaggucaggcugaggu

SEQ ID NO: 2686266 - RNA, 19 nt, Artificial Sequence
  Description of Artificial Sequence: Synthetic oligonucleotide
gagucuuugcuuccaugcg

SEQ ID NO: 2686267 - RNA, 19 nt, Artificial Sequence
  Description of Artificial Sequence: Synthetic oligonucleotide
aagacggguuuucugggug

SEQ ID NO: 2686268 - RNA, 19 nt, Artificial Sequence
  Description of Artificial Sequence: Synthetic oligonucleotide
uaaaaccggcaucacugag

SEQ ID NO: 2686269 - RNA, 19 nt, Artificial Sequence
  Description of Artificial Sequence: Synthetic oligonucleotide
uguggaacagaaggggccg

SEQ ID NO: 2686270 - RNA, 19 nt, Artificial Sequence
  Description of Artificial Sequence: Synthetic oligonucleotide
ucaagcuccucacuguagu

SEQ ID NO: 2686271 - RNA, 19 nt, Artificial Sequence
  Description of Artificial Sequence: Synthetic oligonucleotide
ugauaauuuucuaguucac

SEQ ID NO: 2686272 - RNA, 19 nt, Artificial Sequence
  Description of Artificial Sequence: Synthetic oligonucleotide
auuuuagucaagccaucca

SEQ ID NO: 2686273 - RNA, 19 nt, Artificial Sequence
  Description of Artificial Sequence: Synthetic oligonucleotide
gucacugucuauguaaggc

SEQ ID NO: 2686274 - RNA, 19 nt, Artificial Sequence
  Description of Artificial Sequence: Synthetic oligonucleotide
cuuuacucaacaagcugac

SEQ ID NO: 2686275 - RNA, 19 nt, Artificial Sequence
  Description of Artificial Sequence: Synthetic oligonucleotide
ugacagauaagacggguuu

SEQ ID NO: 2686276 - RNA, 19 nt, Artificial Sequence
  Description of Artificial Sequence: Synthetic oligonucleotide
agauaagacggguuuucug

SEQ ID NO: 2686277 - RNA, 19 nt, Artificial Sequence
  Description of Artificial Sequence: Synthetic oligonucleotide
aagagucuuugcuuccaug

SEQ ID NO: 2686278 - RNA, 19 nt, Artificial Sequence
  Description of Artificial Sequence: Synthetic oligonucleotide
ucacugucuauguaaggcu

SEQ ID NO: 2686279 - RNA, 19 nt, Artificial Sequence
  Description of Artificial Sequence: Synthetic oligonucleotide
uuucaggauuaaguuaugc

SEQ ID NO: 2686280 - RNA, 19 nt, Artificial Sequence
  Description of Artificial Sequence: Synthetic oligonucleotide
uuccuucucacuggaagcg

SEQ ID NO: 2686281 - RNA, 19 nt, Artificial Sequence
  Description of Artificial Sequence: Synthetic oligonucleotide
uuacuuucuucccuguaau

SEQ ID NO: 2686282 - RNA, 19 nt, Artificial Sequence
  Description of Artificial Sequence: Synthetic oligonucleotide
uuccuuuggugguugaaga

SEQ ID NO: 2686283 - RNA, 19 nt, Artificial Sequence
  Description of Artificial Sequence: Synthetic oligonucleotide
acuuucuucccuguaauga

SEQ ID NO: 2686284 - RNA, 19 nt, Artificial Sequence
  Description of Artificial Sequence: Synthetic oligonucleotide
aaguuaugccaaucagcug

SEQ ID NO: 2686285 - RNA, 19 nt, Artificial Sequence
  Description of Artificial Sequence: Synthetic oligonucleotide
auccaagguggccugcagc

SEQ ID NO: 2686286 - RNA, 19 nt, Artificial Sequence
  Description of Artificial Sequence: Synthetic oligonucleotide
auguaaggcuggugcagcc

SEQ ID NO: 2686287 - RNA, 19 nt, Artificial Sequence
  Description of Artificial Sequence: Synthetic oligonucleotide
uucuugcacugacagauaa

SEQ ID NO: 2686288 - RNA, 19 nt, Artificial Sequence
  Description of Artificial Sequence: Synthetic oligonucleotide
ucuugcacugacagauaag

SEQ ID NO: 2686289 - RNA, 19 nt, Artificial Sequence
  Description of Artificial Sequence: Synthetic oligonucleotide
uucuucccuguaaugauaa

SEQ ID NO: 2686290 - RNA, 19 nt, Artificial Sequence
  Description of Artificial Sequence: Synthetic oligonucleotide
cucgcggugguaaaaccgg

SEQ ID NO: 2686291 - RNA, 19 nt, Artificial Sequence
  Description of Artificial Sequence: Synthetic oligonucleotide
ucuaguucacaaauuccuu

SEQ ID NO: 2686292 - RNA, 19 nt, Artificial Sequence
  Description of Artificial Sequence: Synthetic oligonucleotide
cucauaaaagaaagccgug

SEQ ID NO: 2686293 - RNA, 19 nt, Artificial Sequence
  Description of Artificial Sequence: Synthetic oligonucleotide
uccaagguggccugcagcu

SEQ ID NO: 2686294 - RNA, 19 nt, Artificial Sequence
  Description of Artificial Sequence: Synthetic oligonucleotide
uucaagcuccucacuguag

SEQ ID NO: 2686295 - RNA, 19 nt, Artificial Sequence
  Description of Artificial Sequence: Synthetic oligonucleotide
uggguguugcaauuccaag

SEQ ID NO: 2686296 - RNA, 19 nt, Artificial Sequence
  Description of Artificial Sequence: Synthetic oligonucleotide
ugguaaaaccggcaucacu

SEQ ID NO: 2686297 - RNA, 19 nt, Artificial Sequence
  Description of Artificial Sequence: Synthetic oligonucleotide
ucacuguaguccugacucg

SEQ ID NO: 2686298 - RNA, 19 nt, Artificial Sequence
  Description of Artificial Sequence: Synthetic oligonucleotide
uucaaccuucucuuuacuc

SEQ ID NO: 2686299 - RNA, 19 nt, Artificial Sequence
  Description of Artificial Sequence: Synthetic oligonucleotide
cugacuuuuagguuggcaa

SEQ ID NO: 2686300 - RNA, 19 nt, Artificial Sequence
  Description of Artificial Sequence: Synthetic oligonucleotide
accaauggugugcuucagg

SEQ ID NO: 2686301 - RNA, 19 nt, Artificial Sequence
  Description of Artificial Sequence: Synthetic oligonucleotide
gucaagccauccaaggugg

SEQ ID NO: 2686302 - RNA, 19 nt, Artificial Sequence
  Description of Artificial Sequence: Synthetic oligonucleotide
cuuguaugcgucagacagc

SEQ ID NO: 2686303 - RNA, 19 nt, Artificial Sequence
  Description of Artificial Sequence: Synthetic oligonucleotide
ugacuuuuagguuggcaau

SEQ ID NO: 2686304 - RNA, 19 nt, Artificial Sequence
  Description of Artificial Sequence: Synthetic oligonucleotide
gaaggggccgguuacuuuc

SEQ ID NO: 2686305 - RNA, 19 nt, Artificial Sequence
  Description of Artificial Sequence: Synthetic oligonucleotide
cauuucaggauuaaguuau

SEQ ID NO: 2686306 - RNA, 19 nt, Artificial Sequence
  Description of Artificial Sequence: Synthetic oligonucleotide
guuggcaauauugcucgcg

SEQ ID NO: 2686307 - RNA, 19 nt, Artificial Sequence
  Description of Artificial Sequence: Synthetic oligonucleotide
uuggugguugaagacagcu

SEQ ID NO: 2686308 - RNA, 19 nt, Artificial Sequence
  Description of Artificial Sequence: Synthetic oligonucleotide
ugcucucuaauucaaccuu

SEQ ID NO: 2686309 - RNA, 19 nt, Artificial Sequence
  Description of Artificial Sequence: Synthetic oligonucleotide
cuucuuguaugcgucagac

SEQ ID NO: 2686310 - RNA, 19 nt, Artificial Sequence
  Description of Artificial Sequence: Synthetic oligonucleotide
cuugcacugacagauaaga

SEQ ID NO: 2686311 - RNA, 19 nt, Artificial Sequence
  Description of Artificial Sequence: Synthetic oligonucleotide
ugcgucagacagccggugg

SEQ ID NO: 2686312 - RNA, 19 nt, Artificial Sequence
  Description of Artificial Sequence: Synthetic oligonucleotide
ccuguuucgagcagcaugc

SEQ ID NO: 2686313 - RNA, 19 nt, Artificial Sequence
  Description of Artificial Sequence: Synthetic oligonucleotide
uacuuucuucccuguaaug

SEQ ID NO: 2686314 - RNA, 19 nt, Artificial Sequence
  Description of Artificial Sequence: Synthetic oligonucleotide
aagccauccaagguggccu

SEQ ID NO: 2686315 - RNA, 19 nt, Artificial Sequence
  Description of Artificial Sequence: Synthetic oligonucleotide
ggcuggugcagccacaggg

SEQ ID NO: 2686316 - RNA, 19 nt, Artificial Sequence
  Description of Artificial Sequence: Synthetic oligonucleotide
ugcaauuccaagagucuuu

SEQ ID NO: 2686317 - RNA, 19 nt, Artificial Sequence
  Description of Artificial Sequence: Synthetic oligonucleotide
ucuggguguugcaauucca

SEQ ID NO: 2686318 - RNA, 19 nt, Artificial Sequence
  Description of Artificial Sequence: Synthetic oligonucleotide
agcugcauuguccuuaauu

SEQ ID NO: 2686319 - RNA, 19 nt, Artificial Sequence
  Description of Artificial Sequence: Synthetic oligonucleotide
agggacagguaggucaggc

SEQ ID NO: 2686320 - RNA, 19 nt, Artificial Sequence
  Description of Artificial Sequence: Synthetic oligonucleotide
uacucaacaagcugacuuu

SEQ ID NO: 2686321 - RNA, 19 nt, Artificial Sequence
  Description of Artificial Sequence: Synthetic oligonucleotide
aagcugacuuuuagguugg

SEQ ID NO: 2686322 - RNA, 19 nt, Artificial Sequence
  Description of Artificial Sequence: Synthetic oligonucleotide
cagcucugcaccaauggug

SEQ ID NO: 2686323 - RNA, 19 nt, Artificial Sequence
  Description of Artificial Sequence: Synthetic oligonucleotide
guaggucaggcugagguug

SEQ ID NO: 2686324 - RNA, 19 nt, Artificial Sequence
  Description of Artificial Sequence: Synthetic oligonucleotide
uuucuucccuguaaugaua

SEQ ID NO: 2686325 - RNA, 19 nt, Artificial Sequence
  Description of Artificial Sequence: Synthetic oligonucleotide
cuauguaaggcuggugcag

SEQ ID NO: 2686326 - RNA, 19 nt, Artificial Sequence
  Description of Artificial Sequence: Synthetic oligonucleotide
gcugcucucuaauucaacc

SEQ ID NO: 2686327 - RNA, 19 nt, Artificial Sequence
  Description of Artificial Sequence: Synthetic oligonucleotide
aguccugacucgucuuuuc

SEQ ID NO: 2686328 - RNA, 19 nt, Artificial Sequence
  Description of Artificial Sequence: Synthetic oligonucleotide
uugcacugacagauaagac

SEQ ID NO: 2686329 - RNA, 19 nt, Artificial Sequence
  Description of Artificial Sequence: Synthetic oligonucleotide
caagguggccugcagcugc

SEQ ID NO: 2686330 - RNA, 19 nt, Artificial Sequence
  Description of Artificial Sequence: Synthetic oligonucleotide
caggauuaaguuaugccaa

SEQ ID NO: 2686331 - RNA, 19 nt, Artificial Sequence
  Description of Artificial Sequence: Synthetic oligonucleotide
cucuaauucaaccuucucu

SEQ ID NO: 2686332 - RNA, 19 nt, Artificial Sequence
  Description of Artificial Sequence: Synthetic oligonucleotide
uaugcgucagacagccggu

SEQ ID NO: 2686333 - RNA, 19 nt, Artificial Sequence
  Description of Artificial Sequence: Synthetic oligonucleotide
ucucuaauucaaccuucuc

SEQ ID NO: 2686334 - RNA, 19 nt, Artificial Sequence
  Description of Artificial Sequence: Synthetic oligonucleotide
uccuuuggugguugaagac

SEQ ID NO: 2686335 - RNA, 19 nt, Artificial Sequence
  Description of Artificial Sequence: Synthetic oligonucleotide
uaugccaaucagcugcauu

SEQ ID NO: 2686336 - RNA, 19 nt, Artificial Sequence
  Description of Artificial Sequence: Synthetic oligonucleotide
ggcaauauugcucgcggug

SEQ ID NO: 2686337 - RNA, 19 nt, Artificial Sequence
  Description of Artificial Sequence: Synthetic oligonucleotide
cugacucgucuuuucuucc

SEQ ID NO: 2686338 - RNA, 19 nt, Artificial Sequence
  Description of Artificial Sequence: Synthetic oligonucleotide
caauggugugcuucaggag

SEQ ID NO: 2686339 - RNA, 19 nt, Artificial Sequence
  Description of Artificial Sequence: Synthetic oligonucleotide
ggacagguaggucaggcug

SEQ ID NO: 2686340 - RNA, 19 nt, Artificial Sequence
  Description of Artificial Sequence: Synthetic oligonucleotide
ugcaccaauggugugcuuc

SEQ ID NO: 2686341 - RNA, 19 nt, Artificial Sequence
  Description of Artificial Sequence: Synthetic oligonucleotide
aaggcuggugcagccacag

SEQ ID NO: 2686342 - RNA, 19 nt, Artificial Sequence
  Description of Artificial Sequence: Synthetic oligonucleotide
uucuuguaugcgucagaca

SEQ ID NO: 2686343 - RNA, 19 nt, Artificial Sequence
  Description of Artificial Sequence: Synthetic oligonucleotide
uaagacggguuuucugggu

SEQ ID NO: 2686344 - RNA, 19 nt, Artificial Sequence
  Description of Artificial Sequence: Synthetic oligonucleotide
gcaauauugcucgcggugg

SEQ ID NO: 2686345 - RNA, 19 nt, Artificial Sequence
  Description of Artificial Sequence: Synthetic oligonucleotide
uuuggugguugaagacagc

SEQ ID NO: 2686346 - RNA, 19 nt, Artificial Sequence
  Description of Artificial Sequence: Synthetic oligonucleotide
gcgaccucauaaaagaaag

SEQ ID NO: 2686347 - RNA, 19 nt, Artificial Sequence
  Description of Artificial Sequence: Synthetic oligonucleotide
cuggaagcggggcugcugc

SEQ ID NO: 2686348 - RNA, 19 nt, Artificial Sequence
  Description of Artificial Sequence: Synthetic oligonucleotide
acugacagauaagacgggu

SEQ ID NO: 2686349 - RNA, 19 nt, Artificial Sequence
  Description of Artificial Sequence: Synthetic oligonucleotide
agcuccucacuguaguccu

SEQ ID NO: 2686350 - RNA, 19 nt, Artificial Sequence
  Description of Artificial Sequence: Synthetic oligonucleotide
uccuucucacuggaagcgg

SEQ ID NO: 2686351 - RNA, 19 nt, Artificial Sequence
  Description of Artificial Sequence: Synthetic oligonucleotide
ggugguaaaaccggcauca

SEQ ID NO: 2686352 - RNA, 19 nt, Artificial Sequence
  Description of Artificial Sequence: Synthetic oligonucleotide
cugagguugcggucguccg

SEQ ID NO: 2686353 - RNA, 19 nt, Artificial Sequence
  Description of Artificial Sequence: Synthetic oligonucleotide
accggcaucacugaggcuu

SEQ ID NO: 2686354 - RNA, 19 nt, Artificial Sequence
  Description of Artificial Sequence: Synthetic oligonucleotide
ucugcaccaauggugugcu

SEQ ID NO: 2686355 - RNA, 19 nt, Artificial Sequence
  Description of Artificial Sequence: Synthetic oligonucleotide
gguugaagacagcuuuucc

SEQ ID NO: 2686356 - RNA, 19 nt, Artificial Sequence
  Description of Artificial Sequence: Synthetic oligonucleotide
aaagaaagccgugggccau

SEQ ID NO: 2686357 - RNA, 19 nt, Artificial Sequence
  Description of Artificial Sequence: Synthetic oligonucleotide
guaaggcuggugcagccac

SEQ ID NO: 2686358 - RNA, 19 nt, Artificial Sequence
  Description of Artificial Sequence: Synthetic oligonucleotide
uguaugcgucagacagccg

SEQ ID NO: 2686359 - RNA, 19 nt, Artificial Sequence
  Description of Artificial Sequence: Synthetic oligonucleotide
cucugcaccaauggugugc

SEQ ID NO: 2686360 - RNA, 19 nt, Artificial Sequence
  Description of Artificial Sequence: Synthetic oligonucleotide
uucccauuucaggauuaag

SEQ ID NO: 2686361 - RNA, 19 nt, Artificial Sequence
  Description of Artificial Sequence: Synthetic oligonucleotide
ugacucgucuuuucuuccu

SEQ ID NO: 2686362 - RNA, 19 nt, Artificial Sequence
  Description of Artificial Sequence: Synthetic oligonucleotide
ugggccauguguggaacag

SEQ ID NO: 2686363 - RNA, 19 nt, Artificial Sequence
  Description of Artificial Sequence: Synthetic oligonucleotide
guaugggccagcucugcac

SEQ ID NO: 2686364 - RNA, 19 nt, Artificial Sequence
  Description of Artificial Sequence: Synthetic oligonucleotide
ggugcagccacagggacag

SEQ ID NO: 2686365 - RNA, 19 nt, Artificial Sequence
  Description of Artificial Sequence: Synthetic oligonucleotide
uuuacucaacaagcugacu

SEQ ID NO: 2686366 - RNA, 19 nt, Artificial Sequence
  Description of Artificial Sequence: Synthetic oligonucleotide
caauuccaagagucuuugc

SEQ ID NO: 2686367 - RNA, 19 nt, Artificial Sequence
  Description of Artificial Sequence: Synthetic oligonucleotide
aagccgugggccaugugug

SEQ ID NO: 2686368 - RNA, 19 nt, Artificial Sequence
  Description of Artificial Sequence: Synthetic oligonucleotide
aauuccuuuggugguugaa

SEQ ID NO: 2686369 - RNA, 19 nt, Artificial Sequence
  Description of Artificial Sequence: Synthetic oligonucleotide
cacugacagauaagacggg

SEQ ID NO: 2686370 - RNA, 19 nt, Artificial Sequence
  Description of Artificial Sequence: Synthetic oligonucleotide
ugagguugcggucguccgu

SEQ ID NO: 2686371 - RNA, 19 nt, Artificial Sequence
  Description of Artificial Sequence: Synthetic oligonucleotide
uccguaugggccagcucug

SEQ ID NO: 2686372 - RNA, 19 nt, Artificial Sequence
  Description of Artificial Sequence: Synthetic oligonucleotide
ucgucuuuucuuccuucuc

SEQ ID NO: 2686373 - RNA, 19 nt, Artificial Sequence
  Description of Artificial Sequence: Synthetic oligonucleotide
ucagacagccggugggcga

SEQ ID NO: 2686374 - RNA, 19 nt, Artificial Sequence
  Description of Artificial Sequence: Synthetic oligonucleotide
ugguugaagacagcuuuuc

SEQ ID NO: 2686375 - RNA, 19 nt, Artificial Sequence
  Description of Artificial Sequence: Synthetic oligonucleotide
ugcucgcggugguaaaacc

SEQ ID NO: 2686376 - RNA, 19 nt, Artificial Sequence
  Description of Artificial Sequence: Synthetic oligonucleotide
agcucugcaccaauggugu

SEQ ID NO: 2686377 - RNA, 19 nt, Artificial Sequence
  Description of Artificial Sequence: Synthetic oligonucleotide
ucaagccauccaagguggc

SEQ ID NO: 2686378 - RNA, 19 nt, Artificial Sequence
  Description of Artificial Sequence: Synthetic oligonucleotide
guccguaugggccagcucu

SEQ ID NO: 2686379 - RNA, 19 nt, Artificial Sequence
  Description of Artificial Sequence: Synthetic oligonucleotide
ugcugcucucuaauucaac

SEQ ID NO: 2686380 - RNA, 19 nt, Artificial Sequence
  Description of Artificial Sequence: Synthetic oligonucleotide
uggugcagccacagggaca

SEQ ID NO: 2686381 - RNA, 19 nt, Artificial Sequence
  Description of Artificial Sequence: Synthetic oligonucleotide
ugcccuguuucgagcagca

SEQ ID NO: 2686382 - RNA, 19 nt, Artificial Sequence
  Description of Artificial Sequence: Synthetic oligonucleotide
ggguguugcaauuccaaga

SEQ ID NO: 2686383 - RNA, 19 nt, Artificial Sequence
  Description of Artificial Sequence: Synthetic oligonucleotide
uucucacuggaagcggggc

SEQ ID NO: 2686384 - RNA, 19 nt, Artificial Sequence
  Description of Artificial Sequence: Synthetic oligonucleotide
cccuguaaugauaauuuuc

SEQ ID NO: 2686385 - RNA, 19 nt, Artificial Sequence
  Description of Artificial Sequence: Synthetic oligonucleotide
ugucuauguaaggcuggug

SEQ ID NO: 2686386 - RNA, 19 nt, Artificial Sequence
  Description of Artificial Sequence: Synthetic oligonucleotide
caagccauccaagguggcc

SEQ ID NO: 2686387 - RNA, 19 nt, Artificial Sequence
  Description of Artificial Sequence: Synthetic oligonucleotide
uuucuugcacugacagaua

SEQ ID NO: 2686388 - RNA, 19 nt, Artificial Sequence
  Description of Artificial Sequence: Synthetic oligonucleotide
aagaaagccgugggccaug

SEQ ID NO: 2686389 - RNA, 19 nt, Artificial Sequence
  Description of Artificial Sequence: Synthetic oligonucleotide
ucgcggugguaaaaccggc

SEQ ID NO: 2686390 - RNA, 19 nt, Artificial Sequence
  Description of Artificial Sequence: Synthetic oligonucleotide
ucccuguaaugauaauuuu

SEQ ID NO: 2686391 - RNA, 19 nt, Artificial Sequence
  Description of Artificial Sequence: Synthetic oligonucleotide
uggcaauauugcucgcggu

SEQ ID NO: 2686392 - RNA, 19 nt, Artificial Sequence
  Description of Artificial Sequence: Synthetic oligonucleotide
uuucuggguguugcaauuc

SEQ ID NO: 2686393 - RNA, 19 nt, Artificial Sequence
  Description of Artificial Sequence: Synthetic oligonucleotide
aauauugcucgcgguggua

SEQ ID NO: 2686394 - RNA, 19 nt, Artificial Sequence
  Description of Artificial Sequence: Synthetic oligonucleotide
auauugcucgcggugguaa

SEQ ID NO: 2686395 - RNA, 19 nt, Artificial Sequence
  Description of Artificial Sequence: Synthetic oligonucleotide
gaacagaaggggccgguua

SEQ ID NO: 2686396 - RNA, 19 nt, Artificial Sequence
  Description of Artificial Sequence: Synthetic oligonucleotide
uugcggucguccguauggg

SEQ ID NO: 2686397 - RNA, 19 nt, Artificial Sequence
  Description of Artificial Sequence: Synthetic oligonucleotide
caaccuucucuuuacucaa

SEQ ID NO: 2686398 - RNA, 19 nt, Artificial Sequence
  Description of Artificial Sequence: Synthetic oligonucleotide
acuguaguccugacucguc

SEQ ID NO: 2686399 - RNA, 19 nt, Artificial Sequence
  Description of Artificial Sequence: Synthetic oligonucleotide
gacuuuuagguuggcaaua

SEQ ID NO: 2686400 - RNA, 19 nt, Artificial Sequence
  Description of Artificial Sequence: Synthetic oligonucleotide
ccucauaaaagaaagccgu

SEQ ID NO: 2686401 - RNA, 19 nt, Artificial Sequence
  Description of Artificial Sequence: Synthetic oligonucleotide
agccgugggccaugugugg

SEQ ID NO: 2686402 - RNA, 19 nt, Artificial Sequence
  Description of Artificial Sequence: Synthetic oligonucleotide
caagcuccucacuguaguc

SEQ ID NO: 2686403 - RNA, 19 nt, Artificial Sequence
  Description of Artificial Sequence: Synthetic oligonucleotide
uauugcucgcggugguaaa

SEQ ID NO: 2686404 - RNA, 19 nt, Artificial Sequence
  Description of Artificial Sequence: Synthetic oligonucleotide
uccugacucgucuuuucuu

SEQ ID NO: 2686405 - RNA, 19 nt, Artificial Sequence
  Description of Artificial Sequence: Synthetic oligonucleotide
guauuuuagucaagccauc

SEQ ID NO: 2686406 - RNA, 19 nt, Artificial Sequence
  Description of Artificial Sequence: Synthetic oligonucleotide
aucagcugcauuguccuua

SEQ ID NO: 2686407 - RNA, 19 nt, Artificial Sequence
  Description of Artificial Sequence: Synthetic oligonucleotide
gcugcugcucucuaauuca

SEQ ID NO: 2686408 - RNA, 19 nt, Artificial Sequence
  Description of Artificial Sequence: Synthetic oligonucleotide
ugccaaucagcugcauugu

SEQ ID NO: 2686409 - RNA, 19 nt, Artificial Sequence
  Description of Artificial Sequence: Synthetic oligonucleotide
gcaauuccaagagucuuug

SEQ ID NO: 2686410 - RNA, 19 nt, Artificial Sequence
  Description of Artificial Sequence: Synthetic oligonucleotide
cuggugcagccacagggac

SEQ ID NO: 2686411 - RNA, 19 nt, Artificial Sequence
  Description of Artificial Sequence: Synthetic oligonucleotide
auuucaggauuaaguuaug

SEQ ID NO: 2686412 - RNA, 19 nt, Artificial Sequence
  Description of Artificial Sequence: Synthetic oligonucleotide
gucagacagccggugggcg

SEQ ID NO: 2686413 - RNA, 19 nt, Artificial Sequence
  Description of Artificial Sequence: Synthetic oligonucleotide
ccugacucgucuuuucuuc

SEQ ID NO: 2686414 - RNA, 19 nt, Artificial Sequence
  Description of Artificial Sequence: Synthetic oligonucleotide
ugcggucguccguaugggc

SEQ ID NO: 2686415 - RNA, 19 nt, Artificial Sequence
  Description of Artificial Sequence: Synthetic oligonucleotide
cuguaaugauaauuuucua

SEQ ID NO: 2686416 - RNA, 19 nt, Artificial Sequence
  Description of Artificial Sequence: Synthetic oligonucleotide
uugcucgcggugguaaaac

SEQ ID NO: 2686417 - RNA, 19 nt, Artificial Sequence
  Description of Artificial Sequence: Synthetic oligonucleotide
cuggguguugcaauuccaa

SEQ ID NO: 2686418 - RNA, 19 nt, Artificial Sequence
  Description of Artificial Sequence: Synthetic oligonucleotide
gcgucagacagccgguggg

SEQ ID NO: 2686419 - RNA, 19 nt, Artificial Sequence
  Description of Artificial Sequence: Synthetic oligonucleotide
gcugcauuguccuuaauuu

SEQ ID NO: 2686420 - RNA, 19 nt, Artificial Sequence
  Description of Artificial Sequence: Synthetic oligonucleotide
acagguaggucaggcugag

SEQ ID NO: 2686421 - RNA, 19 nt, Artificial Sequence
  Description of Artificial Sequence: Synthetic oligonucleotide
cuuucuucccuguaaugau

SEQ ID NO: 2686422 - RNA, 19 nt, Artificial Sequence
  Description of Artificial Sequence: Synthetic oligonucleotide
gcucgcggugguaaaaccg

SEQ ID NO: 2686423 - RNA, 19 nt, Artificial Sequence
  Description of Artificial Sequence: Synthetic oligonucleotide
cauccaagguggccugcag

SEQ ID NO: 2686424 - RNA, 19 nt, Artificial Sequence
  Description of Artificial Sequence: Synthetic oligonucleotide
cccuguuucgagcagcaug

SEQ ID NO: 2686425 - RNA, 19 nt, Artificial Sequence
  Description of Artificial Sequence: Synthetic oligonucleotide
aagcggggcugcugcucuc

SEQ ID NO: 2686426 - RNA, 19 nt, Artificial Sequence
  Description of Artificial Sequence: Synthetic oligonucleotide
ggugguugaagacagcuuu

SEQ ID NO: 2686427 - RNA, 19 nt, Artificial Sequence
  Description of Artificial Sequence: Synthetic oligonucleotide
guuaugccaaucagcugca

SEQ ID NO: 2686428 - RNA, 19 nt, Artificial Sequence
  Description of Artificial Sequence: Synthetic oligonucleotide
agccauccaagguggccug

SEQ ID NO: 2686429 - RNA, 19 nt, Artificial Sequence
  Description of Artificial Sequence: Synthetic oligonucleotide
guugcaauuccaagagucu

SEQ ID NO: 2686430 - RNA, 19 nt, Artificial Sequence
  Description of Artificial Sequence: Synthetic oligonucleotide
ucuucccuguaaugauaau

SEQ ID NO: 2686431 - RNA, 19 nt, Artificial Sequence
  Description of Artificial Sequence: Synthetic oligonucleotide
acucaacaagcugacuuuu

SEQ ID NO: 2686432 - RNA, 19 nt, Artificial Sequence
  Description of Artificial Sequence: Synthetic oligonucleotide
uggaacagaaggggccggu

SEQ ID NO: 2686433 - RNA, 19 nt, Artificial Sequence
  Description of Artificial Sequence: Synthetic oligonucleotide
agaaggggccgguuacuuu

SEQ ID NO: 2686434 - RNA, 19 nt, Artificial Sequence
  Description of Artificial Sequence: Synthetic oligonucleotide
cugaggcuuucccauuuca

SEQ ID NO: 2686435 - RNA, 19 nt, Artificial Sequence
  Description of Artificial Sequence: Synthetic oligonucleotide
ggauuaaguuaugccaauc

SEQ ID NO: 2686436 - RNA, 19 nt, Artificial Sequence
  Description of Artificial Sequence: Synthetic oligonucleotide
cugcucucuaauucaaccu

SEQ ID NO: 2686437 - RNA, 19 nt, Artificial Sequence
  Description of Artificial Sequence: Synthetic oligonucleotide
cucucuaauucaaccuucu

SEQ ID NO: 2686438 - RNA, 19 nt, Artificial Sequence
  Description of Artificial Sequence: Synthetic oligonucleotide
guggaacagaaggggccgg

SEQ ID NO: 2686439 - RNA, 19 nt, Artificial Sequence
  Description of Artificial Sequence: Synthetic oligonucleotide
cuucaagcuccucacugua

SEQ ID NO: 2686440 - RNA, 19 nt, Artificial Sequence
  Description of Artificial Sequence: Synthetic oligonucleotide
ucacugaggcuuucccauu

SEQ ID NO: 2686441 - RNA, 19 nt, Artificial Sequence
  Description of Artificial Sequence: Synthetic oligonucleotide
agcugacuuuuagguuggc

SEQ ID NO: 2686442 - RNA, 19 nt, Artificial Sequence
  Description of Artificial Sequence: Synthetic oligonucleotide
auugcucgcggugguaaaa

SEQ ID NO: 2686443 - RNA, 19 nt, Artificial Sequence
  Description of Artificial Sequence: Synthetic oligonucleotide
cucaacaagcugacuuuua

SEQ ID NO: 2686444 - RNA, 19 nt, Artificial Sequence
  Description of Artificial Sequence: Synthetic oligonucleotide
gaagcggggcugcugcucu

SEQ ID NO: 2686445 - RNA, 19 nt, Artificial Sequence
  Description of Artificial Sequence: Synthetic oligonucleotide
gaaagccgugggccaugug

SEQ ID NO: 2686446 - RNA, 19 nt, Artificial Sequence
  Description of Artificial Sequence: Synthetic oligonucleotide
cagacagccggugggcgac

SEQ ID NO: 2686447 - RNA, 19 nt, Artificial Sequence
  Description of Artificial Sequence: Synthetic oligonucleotide
aaggggccgguuacuuucu

SEQ ID NO: 2686448 - RNA, 19 nt, Artificial Sequence
  Description of Artificial Sequence: Synthetic oligonucleotide
aaccggcaucacugaggcu

SEQ ID NO: 2686449 - RNA, 19 nt, Artificial Sequence
  Description of Artificial Sequence: Synthetic oligonucleotide
ucguccguaugggccagcu

SEQ ID NO: 2686450 - RNA, 19 nt, Artificial Sequence
  Description of Artificial Sequence: Synthetic oligonucleotide
agaaagccgugggccaugu

SEQ ID NO: 2686451 - RNA, 19 nt, Artificial Sequence
  Description of Artificial Sequence: Synthetic oligonucleotide
gcagucugcugucacuguc

SEQ ID NO: 2686452 - RNA, 19 nt, Artificial Sequence
  Description of Artificial Sequence: Synthetic oligonucleotide
cuucccuguaaugauaauu

SEQ ID NO: 2686453 - RNA, 19 nt, Artificial Sequence
  Description of Artificial Sequence: Synthetic oligonucleotide
uggaagcggggcugcugcu

SEQ ID NO: 2686454 - RNA, 19 nt, Artificial Sequence
  Description of Artificial Sequence: Synthetic oligonucleotide
cucgucuuuucuuccuucu

SEQ ID NO: 2686455 - RNA, 19 nt, Artificial Sequence
  Description of Artificial Sequence: Synthetic oligonucleotide
uaguccugacucgucuuuu

SEQ ID NO: 2686456 - RNA, 19 nt, Artificial Sequence
  Description of Artificial Sequence: Synthetic oligonucleotide
gcggucguccguaugggcc

SEQ ID NO: 2686457 - RNA, 19 nt, Artificial Sequence
  Description of Artificial Sequence: Synthetic oligonucleotide
gagguugcggucguccgua

SEQ ID NO: 2686458 - RNA, 19 nt, Artificial Sequence
  Description of Artificial Sequence: Synthetic oligonucleotide
ggcgaccucauaaaagaaa

SEQ ID NO: 2686459 - RNA, 19 nt, Artificial Sequence
  Description of Artificial Sequence: Synthetic oligonucleotide
gugguaaaaccggcaucac

SEQ ID NO: 2686460 - RNA, 19 nt, Artificial Sequence
  Description of Artificial Sequence: Synthetic oligonucleotide
ggcccggugcccuguuucg

SEQ ID NO: 2686461 - RNA, 19 nt, Artificial Sequence
  Description of Artificial Sequence: Synthetic oligonucleotide
ggugcccuguuucgagcag

SEQ ID NO: 2686462 - RNA, 19 nt, Artificial Sequence
  Description of Artificial Sequence: Synthetic oligonucleotide
ggccgguuacuuucuuccc

SEQ ID NO: 2686463 - RNA, 19 nt, Artificial Sequence
  Description of Artificial Sequence: Synthetic oligonucleotide
agacagccggugggcgacc

SEQ ID NO: 2686464 - RNA, 19 nt, Artificial Sequence
  Description of Artificial Sequence: Synthetic oligonucleotide
gacagauaagacggguuuu

SEQ ID NO: 2686465 - RNA, 19 nt, Artificial Sequence
  Description of Artificial Sequence: Synthetic oligonucleotide
augcgucagacagccggug

SEQ ID NO: 2686466 - RNA, 19 nt, Artificial Sequence
  Description of Artificial Sequence: Synthetic oligonucleotide
cugacagauaagacggguu

SEQ ID NO: 2686467 - RNA, 19 nt, Artificial Sequence
  Description of Artificial Sequence: Synthetic oligonucleotide
ggugggcgaccucauaaaa

SEQ ID NO: 2686468 - RNA, 19 nt, Artificial Sequence
  Description of Artificial Sequence: Synthetic oligonucleotide
gguuggcaauauugcucgc

SEQ ID NO: 2686469 - RNA, 19 nt, Artificial Sequence
  Description of Artificial Sequence: Synthetic oligonucleotide
uuaugccaaucagcugcau

SEQ ID NO: 2686470 - RNA, 19 nt, Artificial Sequence
  Description of Artificial Sequence: Synthetic oligonucleotide
gugggccauguguggaaca

SEQ ID NO: 2686471 - RNA, 19 nt, Artificial Sequence
  Description of Artificial Sequence: Synthetic oligonucleotide
cagucugcugucacugucu

SEQ ID NO: 2686472 - RNA, 19 nt, Artificial Sequence
  Description of Artificial Sequence: Synthetic oligonucleotide
caauauugcucgcgguggu

SEQ ID NO: 2686473 - RNA, 19 nt, Artificial Sequence
  Description of Artificial Sequence: Synthetic oligonucleotide
ggccauguguggaacagaa

SEQ ID NO: 2686474 - RNA, 19 nt, Artificial Sequence
  Description of Artificial Sequence: Synthetic oligonucleotide
guccugacucgucuuuucu

SEQ ID NO: 2686475 - RNA, 19 nt, Artificial Sequence
  Description of Artificial Sequence: Synthetic oligonucleotide
cugcauuguccuuaauuuu

SEQ ID NO: 2686476 - RNA, 19 nt, Artificial Sequence
  Description of Artificial Sequence: Synthetic oligonucleotide
guguugcaauuccaagagu

SEQ ID NO: 2686477 - RNA, 19 nt, Artificial Sequence
  Description of Artificial Sequence: Synthetic oligonucleotide
gcugacuuuuagguuggca

SEQ ID NO: 2686478 - RNA, 19 nt, Artificial Sequence
  Description of Artificial Sequence: Synthetic oligonucleotide
cccauuucaggauuaaguu

SEQ ID NO: 2686479 - RNA, 19 nt, Artificial Sequence
  Description of Artificial Sequence: Synthetic oligonucleotide
gguugcggucguccguaug

SEQ ID NO: 2686480 - RNA, 19 nt, Artificial Sequence
  Description of Artificial Sequence: Synthetic oligonucleotide
gccaaucagcugcauuguc

SEQ ID NO: 2686481 - RNA, 19 nt, Artificial Sequence
  Description of Artificial Sequence: Synthetic oligonucleotide
guaguccugacucgucuuu

SEQ ID NO: 2686482 - RNA, 19 nt, Artificial Sequence
  Description of Artificial Sequence: Synthetic oligonucleotide
cagguaggucaggcugagg

SEQ ID NO: 2686483 - RNA, 19 nt, Artificial Sequence
  Description of Artificial Sequence: Synthetic oligonucleotide
cagauaagacggguuuucu

SEQ ID NO: 2686484 - RNA, 19 nt, Artificial Sequence
  Description of Artificial Sequence: Synthetic oligonucleotide
cccggugcccuguuucgag

SEQ ID NO: 2686485 - RNA, 19 nt, Artificial Sequence
  Description of Artificial Sequence: Synthetic oligonucleotide
ggggccgguuacuuucuuc

SEQ ID NO: 2686486 - RNA, 19 nt, Artificial Sequence
  Description of Artificial Sequence: Synthetic oligonucleotide
cagccggugggcgaccuca

SEQ ID NO: 2686487 - RNA, 19 nt, Artificial Sequence
  Description of Artificial Sequence: Synthetic oligonucleotide
agcggggcugcugcucucu

SEQ ID NO: 2686488 - RNA, 19 nt, Artificial Sequence
  Description of Artificial Sequence: Synthetic oligonucleotide
cacagggcccggugcccug

SEQ ID NO: 2686489 - RNA, 19 nt, Artificial Sequence
  Description of Artificial Sequence: Synthetic oligonucleotide
cacuguaguccugacucgu

SEQ ID NO: 2686490 - RNA, 19 nt, Artificial Sequence
  Description of Artificial Sequence: Synthetic oligonucleotide
ggcuuucccauuucaggau

SEQ ID NO: 2686491 - RNA, 19 nt, Artificial Sequence
  Description of Artificial Sequence: Synthetic oligonucleotide
ccggugcccuguuucgagc

SEQ ID NO: 2686492 - RNA, 19 nt, Artificial Sequence
  Description of Artificial Sequence: Synthetic oligonucleotide
gccgguuacuuucuucccu

SEQ ID NO: 2686493 - RNA, 19 nt, Artificial Sequence
  Description of Artificial Sequence: Synthetic oligonucleotide
agguugcggucguccguau

SEQ ID NO: 2686494 - RNA, 19 nt, Artificial Sequence
  Description of Artificial Sequence: Synthetic oligonucleotide
caagagucuuugcuuccau

SEQ ID NO: 2686495 - RNA, 19 nt, Artificial Sequence
  Description of Artificial Sequence: Synthetic oligonucleotide
gugcuucaagcuccucacu

SEQ ID NO: 2686496 - RNA, 19 nt, Artificial Sequence
  Description of Artificial Sequence: Synthetic oligonucleotide
gggacagguaggucaggcu

SEQ ID NO: 2686497 - RNA, 19 nt, Artificial Sequence
  Description of Artificial Sequence: Synthetic oligonucleotide
gguaggucaggcugagguu

SEQ ID NO: 2686498 - RNA, 19 nt, Artificial Sequence
  Description of Artificial Sequence: Synthetic oligonucleotide
ggaagcggggcugcugcuc

SEQ ID NO: 2686499 - RNA, 19 nt, Artificial Sequence
  Description of Artificial Sequence: Synthetic oligonucleotide
gcuuucccauuucaggauu

SEQ ID NO: 2686500 - RNA, 19 nt, Artificial Sequence
  Description of Artificial Sequence: Synthetic oligonucleotide
gcggugguaaaaccggcau

SEQ ID NO: 2686501 - RNA, 19 nt, Artificial Sequence
  Description of Artificial Sequence: Synthetic oligonucleotide
cacugaggcuuucccauuu

SEQ ID NO: 2686502 - RNA, 19 nt, Artificial Sequence
  Description of Artificial Sequence: Synthetic oligonucleotide
gugguugaagacagcuuuu

SEQ ID NO: 2686503 - RNA, 19 nt, Artificial Sequence
  Description of Artificial Sequence: Synthetic oligonucleotide
ccggugggcgaccucauaa

SEQ ID NO: 2686504 - RNA, 19 nt, Artificial Sequence
  Description of Artificial Sequence: Synthetic oligonucleotide
aggggccgguuacuuucuu

SEQ ID NO: 2686505 - RNA, 19 nt, Artificial Sequence
  Description of Artificial Sequence: Synthetic oligonucleotide
cgucagacagccggugggc

SEQ ID NO: 2686506 - RNA, 19 nt, Artificial Sequence
  Description of Artificial Sequence: Synthetic oligonucleotide
ggucguccguaugggccag

SEQ ID NO: 2686507 - RNA, 19 nt, Artificial Sequence
  Description of Artificial Sequence: Synthetic oligonucleotide
cggugguaaaaccggcauc

SEQ ID NO: 2686508 - RNA, 19 nt, Artificial Sequence
  Description of Artificial Sequence: Synthetic oligonucleotide
ggggcugcugcucucuaau

SEQ ID NO: 2686509 - RNA, 19 nt, Artificial Sequence
  Description of Artificial Sequence: Synthetic oligonucleotide
gggcgaccucauaaaagaa

SEQ ID NO: 2686510 - RNA, 19 nt, Artificial Sequence
  Description of Artificial Sequence: Synthetic oligonucleotide
ccaagguggccugcagcug

SEQ ID NO: 2686511 - RNA, 19 nt, Artificial Sequence
  Description of Artificial Sequence: Synthetic oligonucleotide
ccguaugggccagcucugc

SEQ ID NO: 2686512 - RNA, 19 nt, Artificial Sequence
  Description of Artificial Sequence: Synthetic oligonucleotide
gucguccguaugggccagc

SEQ ID NO: 2686513 - RNA, 19 nt, Artificial Sequence
  Description of Artificial Sequence: Synthetic oligonucleotide
gccauccaagguggccugc

SEQ ID NO: 2686514 - RNA, 19 nt, Artificial Sequence
  Description of Artificial Sequence: Synthetic oligonucleotide
ccagcucugcaccaauggu

SEQ ID NO: 2686515 - RNA, 19 nt, Artificial Sequence
  Description of Artificial Sequence: Synthetic oligonucleotide
gggccauguguggaacaga

SEQ ID NO: 2686516 - RNA, 19 nt, Artificial Sequence
  Description of Artificial Sequence: Synthetic oligonucleotide
gccgugggccaugugugga

SEQ ID NO: 2686517 - RNA, 19 nt, Artificial Sequence
  Description of Artificial Sequence: Synthetic oligonucleotide
cgcggugguaaaaccggca

SEQ ID NO: 2686518 - RNA, 19 nt, Artificial Sequence
  Description of Artificial Sequence: Synthetic oligonucleotide
gacagccggugggcgaccu

SEQ ID NO: 2686519 - RNA, 19 nt, Artificial Sequence
  Description of Artificial Sequence: Synthetic oligonucleotide
cggucguccguaugggcca

SEQ ID NO: 2686520 - RNA, 19 nt, Artificial Sequence
  Description of Artificial Sequence: Synthetic oligonucleotide
cguaugggccagcucugca

SEQ ID NO: 2686521 - RNA, 19 nt, Artificial Sequence
  Description of Artificial Sequence: Synthetic oligonucleotide
cagcugcagucugcuguca

SEQ ID NO: 2686522 - RNA, 19 nt, Artificial Sequence
  Description of Artificial Sequence: Synthetic oligonucleotide
cagaaggggccgguuacuu

SEQ ID NO: 2686523 - RNA, 19 nt, Artificial Sequence
  Description of Artificial Sequence: Synthetic oligonucleotide
ccauccaagguggccugca

SEQ ID NO: 2686524 - RNA, 19 nt, Artificial Sequence
  Description of Artificial Sequence: Synthetic oligonucleotide
cuguuucgagcagcaugcu

SEQ ID NO: 2686525 - RNA, 19 nt, Artificial Sequence
  Description of Artificial Sequence: Synthetic oligonucleotide
cggugcccuguuucgagca

SEQ ID NO: 2686526 - RNA, 19 nt, Artificial Sequence
  Description of Artificial Sequence: Synthetic oligonucleotide
ccacagggacagguagguc

SEQ ID NO: 2686527 - RNA, 19 nt, Artificial Sequence
  Description of Artificial Sequence: Synthetic oligonucleotide
agccggugggcgaccucau

SEQ ID NO: 2686528 - RNA, 19 nt, Artificial Sequence
  Description of Artificial Sequence: Synthetic oligonucleotide
ggaacagaaggggccgguu

SEQ ID NO: 2686529 - RNA, 19 nt, Artificial Sequence
  Description of Artificial Sequence: Synthetic oligonucleotide
cggugggcgaccucauaaa

SEQ ID NO: 2686530 - RNA, 19 nt, Artificial Sequence
  Description of Artificial Sequence: Synthetic oligonucleotide
cguccguaugggccagcuc

SEQ ID NO: 2686531 - RNA, 19 nt, Artificial Sequence
  Description of Artificial Sequence: Synthetic oligonucleotide
gggcugcugcucucuaauu

SEQ ID NO: 2686532 - RNA, 19 nt, Artificial Sequence
  Description of Artificial Sequence: Synthetic oligonucleotide
gcccggugcccuguuucga

SEQ ID NO: 2686533 - RNA, 19 nt, Artificial Sequence
  Description of Artificial Sequence: Synthetic oligonucleotide
gcuucaggagcagcuccuu

SEQ ID NO: 2686534 - RNA, 19 nt, Artificial Sequence
  Description of Artificial Sequence: Synthetic oligonucleotide
cacuggaagcggggcugcu

SEQ ID NO: 2686535 - RNA, 19 nt, Artificial Sequence
  Description of Artificial Sequence: Synthetic oligonucleotide
gccggugggcgaccucaua

SEQ ID NO: 2686536 - RNA, 19 nt, Artificial Sequence
  Description of Artificial Sequence: Synthetic oligonucleotide
gcggggcugcugcucucua

SEQ ID NO: 2686537 - RNA, 19 nt, Artificial Sequence
  Description of Artificial Sequence: Synthetic oligonucleotide
cugcaccaauggugugcuu

SEQ ID NO: 2686538 - RNA, 19 nt, Artificial Sequence
  Description of Artificial Sequence: Synthetic oligonucleotide
ccggcaucacugaggcuuu

SEQ ID NO: 2686539 - RNA, 19 nt, Artificial Sequence
  Description of Artificial Sequence: Synthetic oligonucleotide
cggcaucacugaggcuuuc

SEQ ID NO: 2686540 - RNA, 19 nt, Artificial Sequence
  Description of Artificial Sequence: Synthetic oligonucleotide
gcccuguuucgagcagcau

SEQ ID NO: 2686541 - RNA, 19 nt, Artificial Sequence
  Description of Artificial Sequence: Synthetic oligonucleotide
cagggcccggugcccuguu

SEQ ID NO: 2686542 - RNA, 19 nt, Artificial Sequence
  Description of Artificial Sequence: Synthetic oligonucleotide
uuaucuauaguucuuacgg

SEQ ID NO: 2686543 - RNA, 19 nt, Artificial Sequence
  Description of Artificial Sequence: Synthetic oligonucleotide
aauccaaauucccaaaauc

SEQ ID NO: 2686544 - RNA, 19 nt, Artificial Sequence
  Description of Artificial Sequence: Synthetic oligonucleotide
uacuguaacaaucucagga

SEQ ID NO: 2686545 - RNA, 19 nt, Artificial Sequence
  Description of Artificial Sequence: Synthetic oligonucleotide
aucuauaguucuuacggcc

SEQ ID NO: 2686546 - RNA, 19 nt, Artificial Sequence
  Description of Artificial Sequence: Synthetic oligonucleotide
ucuccaauagaccacagug

SEQ ID NO: 2686547 - RNA, 19 nt, Artificial Sequence
  Description of Artificial Sequence: Synthetic oligonucleotide
agugauaauaucuguacag

SEQ ID NO: 2686548 - RNA, 19 nt, Artificial Sequence
  Description of Artificial Sequence: Synthetic oligonucleotide
ucugauaucgcacaguaau

SEQ ID NO: 2686549 - RNA, 19 nt, Artificial Sequence
  Description of Artificial Sequence: Synthetic oligonucleotide
gaugaagaaacacuguuac

SEQ ID NO: 2686550 - RNA, 19 nt, Artificial Sequence
  Description of Artificial Sequence: Synthetic oligonucleotide
aaucucaggaguucgaaga

SEQ ID NO: 2686551 - RNA, 19 nt, Artificial Sequence
  Description of Artificial Sequence: Synthetic oligonucleotide
acaauuucuggguugucgc

SEQ ID NO: 2686552 - RNA, 19 nt, Artificial Sequence
  Description of Artificial Sequence: Synthetic oligonucleotide
gaaacacuguuacacaucc

SEQ ID NO: 2686553 - RNA, 19 nt, Artificial Sequence
  Description of Artificial Sequence: Synthetic oligonucleotide
auuaucuauaguucuuacg

SEQ ID NO: 2686554 - RNA, 19 nt, Artificial Sequence
  Description of Artificial Sequence: Synthetic oligonucleotide
auaauaucuguacagggcu

SEQ ID NO: 2686555 - RNA, 19 nt, Artificial Sequence
  Description of Artificial Sequence: Synthetic oligonucleotide
cuugcuaauuuucugagac

SEQ ID NO: 2686556 - RNA, 19 nt, Artificial Sequence
  Description of Artificial Sequence: Synthetic oligonucleotide
uacgauucuuuccugauca

SEQ ID NO: 2686557 - RNA, 19 nt, Artificial Sequence
  Description of Artificial Sequence: Synthetic oligonucleotide
  modified_base (6)..(6): a, c, u, g, unknown or other
uuaacnguccaauugaguu

SEQ ID NO: 2686558 - RNA, 19 nt, Artificial Sequence
  Description of Artificial Sequence: Synthetic oligonucleotide
ugcugauugacugacagag

SEQ ID NO: 2686559 - RNA, 19 nt, Artificial Sequence
  Description of Artificial Sequence: Synthetic oligonucleotide
accaugaugucugauaucg

SEQ ID NO: 2686560 - RNA, 19 nt, Artificial Sequence
  Description of Artificial Sequence: Synthetic oligonucleotide
acuguaacaaucucaggag

SEQ ID NO: 2686561 - RNA, 19 nt, Artificial Sequence
  Description of Artificial Sequence: Synthetic oligonucleotide
gauaauaucuguacagggc

SEQ ID NO: 2686562 - RNA, 19 nt, Artificial Sequence
  Description of Artificial Sequence: Synthetic oligonucleotide
  modified_base (8)..(8): a, c, u, g, unknown or other
uuuuaacnguccaauugag

SEQ ID NO: 2686563 - RNA, 19 nt, Artificial Sequence
  Description of Artificial Sequence: Synthetic oligonucleotide
aacgcaguuuuccucauug

SEQ ID NO: 2686564 - RNA, 19 nt, Artificial Sequence
  Description of Artificial Sequence: Synthetic oligonucleotide
uauucgaccauccucucca

SEQ ID NO: 2686565 - RNA, 19 nt, Artificial Sequence
  Description of Artificial Sequence: Synthetic oligonucleotide
uuacacauccuguugacga

SEQ ID NO: 2686566 - RNA, 19 nt, Artificial Sequence
  Description of Artificial Sequence: Synthetic oligonucleotide
auagaccacagugaaacgc

SEQ ID NO: 2686567 - RNA, 19 nt, Artificial Sequence
  Description of Artificial Sequence: Synthetic oligonucleotide
uucugagacacgaacuuag

SEQ ID NO: 2686568 - RNA, 19 nt, Artificial Sequence
  Description of Artificial Sequence: Synthetic oligonucleotide
guccaauugaguuuuacug

SEQ ID NO: 2686569 - RNA, 19 nt, Artificial Sequence
  Description of Artificial Sequence: Synthetic oligonucleotide
uccgucagaauccaaauuc

SEQ ID NO: 2686570 - RNA, 19 nt, Artificial Sequence
  Description of Artificial Sequence: Synthetic oligonucleotide
caauagaccacagugaaac

SEQ ID NO: 2686571 - RNA, 19 nt, Artificial Sequence
  Description of Artificial Sequence: Synthetic oligonucleotide
gaagagauuuauucgacca

SEQ ID NO: 2686572 - RNA, 19 nt, Artificial Sequence
  Description of Artificial Sequence: Synthetic oligonucleotide
aauagaccacagugaaacg

SEQ ID NO: 2686573 - RNA, 19 nt, Artificial Sequence
  Description of Artificial Sequence: Synthetic oligonucleotide
  modified_base (7)..(7): a, c, u, g, unknown or other
uuuaacnguccaauugagu

SEQ ID NO: 2686574 - RNA, 19 nt, Artificial Sequence
  Description of Artificial Sequence: Synthetic oligonucleotide
aucgcacaguaauugaugg

SEQ ID NO: 2686575 - RNA, 19 nt, Artificial Sequence
  Description of Artificial Sequence: Synthetic oligonucleotide
uucccaaaaucuccaauag

SEQ ID NO: 2686576 - RNA, 19 nt, Artificial Sequence
  Description of Artificial Sequence: Synthetic oligonucleotide
uauaggaaggacugccagg

SEQ ID NO: 2686577 - RNA, 19 nt, Artificial Sequence
  Description of Artificial Sequence: Synthetic oligonucleotide
ugaaacgcaguuuuccuca

SEQ ID NO: 2686578 - RNA, 19 nt, Artificial Sequence
  Description of Artificial Sequence: Synthetic oligonucleotide
uugaguuuuacuguaacaa

SEQ ID NO: 2686579 - RNA, 19 nt, Artificial Sequence
  Description of Artificial Sequence: Synthetic oligonucleotide
gaaagguuacagcauggag

SEQ ID NO: 2686580 - RNA, 19 nt, Artificial Sequence
  Description of Artificial Sequence: Synthetic oligonucleotide
acgaacuuagcauaaauuu

SEQ ID NO: 2686581 - RNA, 19 nt, Artificial Sequence
  Description of Artificial Sequence: Synthetic oligonucleotide
agcagcuacgauucuuucc

SEQ ID NO: 2686582 - RNA, 19 nt, Artificial Sequence
  Description of Artificial Sequence: Synthetic oligonucleotide
uguaaauccaugacaucac

SEQ ID NO: 2686583 - RNA, 19 nt, Artificial Sequence
  Description of Artificial Sequence: Synthetic oligonucleotide
uccaauugaguuuuacugu

SEQ ID NO: 2686584 - RNA, 19 nt, Artificial Sequence
  Description of Artificial Sequence: Synthetic oligonucleotide
ugagacacgaacuuagcau

SEQ ID NO: 2686585 - RNA, 19 nt, Artificial Sequence
  Description of Artificial Sequence: Synthetic oligonucleotide
gacaauuucuggguugucg

SEQ ID NO: 2686586 - RNA, 19 nt, Artificial Sequence
  Description of Artificial Sequence: Synthetic oligonucleotide
auuuauucgaccauccucu

SEQ ID NO: 2686587 - RNA, 19 nt, Artificial Sequence
  Description of Artificial Sequence: Synthetic oligonucleotide
ugcuaauuuucugagacac

SEQ ID NO: 2686588 - RNA, 19 nt, Artificial Sequence
  Description of Artificial Sequence: Synthetic oligonucleotide
ugaagagauuuauucgacc

SEQ ID NO: 2686589 - RNA, 19 nt, Artificial Sequence
  Description of Artificial Sequence: Synthetic oligonucleotide
uggaguguacugcuguccg

SEQ ID NO: 2686590 - RNA, 19 nt, Artificial Sequence
  Description of Artificial Sequence: Synthetic oligonucleotide
ugauaucgcacaguaauug

SEQ ID NO: 2686591 - RNA, 19 nt, Artificial Sequence
  Description of Artificial Sequence: Synthetic oligonucleotide
ucuauaguucuuacggccu

SEQ ID NO: 2686592 - RNA, 19 nt, Artificial Sequence
  Description of Artificial Sequence: Synthetic oligonucleotide
uaucgcacaguaauugaug

SEQ ID NO: 2686593 - RNA, 19 nt, Artificial Sequence
  Description of Artificial Sequence: Synthetic oligonucleotide
uaucuauaguucuuacggc

SEQ ID NO: 2686594 - RNA, 19 nt, Artificial Sequence
  Description of Artificial Sequence: Synthetic oligonucleotide
uccuuguugucugaaaucc

SEQ ID NO: 2686595 - RNA, 19 nt, Artificial Sequence
  Description of Artificial Sequence: Synthetic oligonucleotide
accaguuagugauaauauc

SEQ ID NO: 2686596 - RNA, 19 nt, Artificial Sequence
  Description of Artificial Sequence: Synthetic oligonucleotide
agagauuuauucgaccauc

SEQ ID NO: 2686597 - RNA, 19 nt, Artificial Sequence
  Description of Artificial Sequence: Synthetic oligonucleotide
ucuuacggccuccuuauga

SEQ ID NO: 2686598 - RNA, 19 nt, Artificial Sequence
  Description of Artificial Sequence: Synthetic oligonucleotide
acaguaauugauggucucc

SEQ ID NO: 2686599 - RNA, 19 nt, Artificial Sequence
  Description of Artificial Sequence: Synthetic oligonucleotide
cugauugacugacagaguc

SEQ ID NO: 2686600 - RNA, 19 nt, Artificial Sequence
  Description of Artificial Sequence: Synthetic oligonucleotide
cucaggaguucgaagaaag

SEQ ID NO: 2686601 - RNA, 19 nt, Artificial Sequence
  Description of Artificial Sequence: Synthetic oligonucleotide
auugaguuuuacuguaaca

SEQ ID NO: 2686602 - RNA, 19 nt, Artificial Sequence
  Description of Artificial Sequence: Synthetic oligonucleotide
uaacaaucucaggaguucg

SEQ ID NO: 2686603 - RNA, 19 nt, Artificial Sequence
  Description of Artificial Sequence: Synthetic oligonucleotide
uguaacaaucucaggaguu

SEQ ID NO: 2686604 - RNA, 19 nt, Artificial Sequence
  Description of Artificial Sequence: Synthetic oligonucleotide
uccgcauuaucuauaguuc

SEQ ID NO: 2686605 - RNA, 19 nt, Artificial Sequence
  Description of Artificial Sequence: Synthetic oligonucleotide
aagaaagguuacagcaugg

SEQ ID NO: 2686606 - RNA, 19 nt, Artificial Sequence
  Description of Artificial Sequence: Synthetic oligonucleotide
ucaccaugaugucugauau

SEQ ID NO: 2686607 - RNA, 19 nt, Artificial Sequence
  Description of Artificial Sequence: Synthetic oligonucleotide
aguuagugauaauaucugu

SEQ ID NO: 2686608 - RNA, 19 nt, Artificial Sequence
  Description of Artificial Sequence: Synthetic oligonucleotide
cccaaaaucuccaauagac

SEQ ID NO: 2686609 - RNA, 19 nt, Artificial Sequence
  Description of Artificial Sequence: Synthetic oligonucleotide
acugcuauaggaaggacug

SEQ ID NO: 2686610 - RNA, 19 nt, Artificial Sequence
  Description of Artificial Sequence: Synthetic oligonucleotide
gguuauuuggaugaugaag

SEQ ID NO: 2686611 - RNA, 19 nt, Artificial Sequence
  Description of Artificial Sequence: Synthetic oligonucleotide
ucauugucccaagagcccg

SEQ ID NO: 2686612 - RNA, 19 nt, Artificial Sequence
  Description of Artificial Sequence: Synthetic oligonucleotide
ugaugucugauaucgcaca

SEQ ID NO: 2686613 - RNA, 19 nt, Artificial Sequence
  Description of Artificial Sequence: Synthetic oligonucleotide
ugucccaagagcccguagc

SEQ ID NO: 2686614 - RNA, 19 nt, Artificial Sequence
  Description of Artificial Sequence: Synthetic oligonucleotide
aagagauuuauucgaccau

SEQ ID NO: 2686615 - RNA, 19 nt, Artificial Sequence
  Description of Artificial Sequence: Synthetic oligonucleotide
guagcgaaggucucugcgg

SEQ ID NO: 2686616 - RNA, 19 nt, Artificial Sequence
  Description of Artificial Sequence: Synthetic oligonucleotide
gaguuuuacuguaacaauc

SEQ ID NO: 2686617 - RNA, 19 nt, Artificial Sequence
  Description of Artificial Sequence: Synthetic oligonucleotide
ugaguuuuacuguaacaau

SEQ ID NO: 2686618 - RNA, 19 nt, Artificial Sequence
  Description of Artificial Sequence: Synthetic oligonucleotide
cuguugacgaagcagcuac

SEQ ID NO: 2686619 - RNA, 19 nt, Artificial Sequence
  Description of Artificial Sequence: Synthetic oligonucleotide
ugcuauaggaaggacugcc

SEQ ID NO: 2686620 - RNA, 19 nt, Artificial Sequence
  Description of Artificial Sequence: Synthetic oligonucleotide
aguuuuacuguaacaaucu

SEQ ID NO: 2686621 - RNA, 19 nt, Artificial Sequence
  Description of Artificial Sequence: Synthetic oligonucleotide
gaugucugauaucgcacag

SEQ ID NO: 2686622 - RNA, 19 nt, Artificial Sequence
  Description of Artificial Sequence: Synthetic oligonucleotide
auucccaaaaucuccaaua

SEQ ID NO: 2686623 - RNA, 19 nt, Artificial Sequence
  Description of Artificial Sequence: Synthetic oligonucleotide
gagucugguuauuuggaug

SEQ ID NO: 2686624 - RNA, 19 nt, Artificial Sequence
  Description of Artificial Sequence: Synthetic oligonucleotide
uuacuguaacaaucucagg

SEQ ID NO: 2686625 - RNA, 19 nt, Artificial Sequence
  Description of Artificial Sequence: Synthetic oligonucleotide
agugaaacgcaguuuuccu

SEQ ID NO: 2686626 - RNA, 19 nt, Artificial Sequence
  Description of Artificial Sequence: Synthetic oligonucleotide
gauaucgcacaguaauuga

SEQ ID NO: 2686627 - RNA, 19 nt, Artificial Sequence
  Description of Artificial Sequence: Synthetic oligonucleotide
uuauucgaccauccucucc

SEQ ID NO: 2686628 - RNA, 19 nt, Artificial Sequence
  Description of Artificial Sequence: Synthetic oligonucleotide
guaaauccaugacaucacc

SEQ ID NO: 2686629 - RNA, 19 nt, Artificial Sequence
  Description of Artificial Sequence: Synthetic oligonucleotide
guucgaagaaagguuacag

SEQ ID NO: 2686630 - RNA, 19 nt, Artificial Sequence
  Description of Artificial Sequence: Synthetic oligonucleotide
cuguaaauccaugacauca

SEQ ID NO: 2686631 - RNA, 19 nt, Artificial Sequence
  Description of Artificial Sequence: Synthetic oligonucleotide
ugauugacugacagagucu

SEQ ID NO: 2686632 - RNA, 19 nt, Artificial Sequence
  Description of Artificial Sequence: Synthetic oligonucleotide
  modified_base (4)..(4): a, c, u, g, unknown or other
aacnguccaauugaguuuu

SEQ ID NO: 2686633 - RNA, 19 nt, Artificial Sequence
  Description of Artificial Sequence: Synthetic oligonucleotide
gagauuuauucgaccaucc

SEQ ID NO: 2686634 - RNA, 19 nt, Artificial Sequence
  Description of Artificial Sequence: Synthetic oligonucleotide
uguacugcuguccgcauua

SEQ ID NO: 2686635 - RNA, 19 nt, Artificial Sequence
  Description of Artificial Sequence: Synthetic oligonucleotide
guaauugauggucuccuuc

SEQ ID NO: 2686636 - RNA, 19 nt, Artificial Sequence
  Description of Artificial Sequence: Synthetic oligonucleotide
ugacgaagcagcuacgauu

SEQ ID NO: 2686637 - RNA, 19 nt, Artificial Sequence
  Description of Artificial Sequence: Synthetic oligonucleotide
uguugacgaagcagcuacg

SEQ ID NO: 2686638 - RNA, 19 nt, Artificial Sequence
  Description of Artificial Sequence: Synthetic oligonucleotide
aagcagcuacgauucuuuc

SEQ ID NO: 2686639 - RNA, 19 nt, Artificial Sequence
  Description of Artificial Sequence: Synthetic oligonucleotide
augaugucugauaucgcac

SEQ ID NO: 2686640 - RNA, 19 nt, Artificial Sequence
  Description of Artificial Sequence: Synthetic oligonucleotide
ucaccaguuagugauaaua

SEQ ID NO: 2686641 - RNA, 19 nt, Artificial Sequence
  Description of Artificial Sequence: Synthetic oligonucleotide
cuuguugucugaaauccca

SEQ ID NO: 2686642 - RNA, 19 nt, Artificial Sequence
  Description of Artificial Sequence: Synthetic oligonucleotide
ucccaaaaucuccaauaga

SEQ ID NO: 2686643 - RNA, 19 nt, Artificial Sequence
  Description of Artificial Sequence: Synthetic oligonucleotide
auaggaaggacugccagga

SEQ ID NO: 2686644 - RNA, 19 nt, Artificial Sequence
  Description of Artificial Sequence: Synthetic oligonucleotide
auggaguguacugcugucc

SEQ ID NO: 2686645 - RNA, 19 nt, Artificial Sequence
  Description of Artificial Sequence: Synthetic oligonucleotide
uguuacacauccuguugac

SEQ ID NO: 2686646 - RNA, 19 nt, Artificial Sequence
  Description of Artificial Sequence: Synthetic oligonucleotide
ucuccuucaaacccuccgu

SEQ ID NO: 2686647 - RNA, 19 nt, Artificial Sequence
  Description of Artificial Sequence: Synthetic oligonucleotide
cucauugucccaagagccc

SEQ ID NO: 2686648 - RNA, 19 nt, Artificial Sequence
  Description of Artificial Sequence: Synthetic oligonucleotide
accuguaugguggugagcu

SEQ ID NO: 2686649 - RNA, 19 nt, Artificial Sequence
  Description of Artificial Sequence: Synthetic oligonucleotide
acauggugcacugcuauag

SEQ ID NO: 2686650 - RNA, 19 nt, Artificial Sequence
  Description of Artificial Sequence: Synthetic oligonucleotide
ucuugcuaauuuucugaga

SEQ ID NO: 2686651 - RNA, 19 nt, Artificial Sequence
  Description of Artificial Sequence: Synthetic oligonucleotide
agaaacacuguuacacauc

SEQ ID NO: 2686652 - RNA, 19 nt, Artificial Sequence
  Description of Artificial Sequence: Synthetic oligonucleotide
uugacugacagagucuggu

SEQ ID NO: 2686653 - RNA, 19 nt, Artificial Sequence
  Description of Artificial Sequence: Synthetic oligonucleotide
agauuuauucgaccauccu

SEQ ID NO: 2686654 - RNA, 19 nt, Artificial Sequence
  Description of Artificial Sequence: Synthetic oligonucleotide
ccucauugucccaagagcc

SEQ ID NO: 2686655 - RNA, 19 nt, Artificial Sequence
  Description of Artificial Sequence: Synthetic oligonucleotide
  modified_base (5)..(5): a, c, u, g, unknown or other
uaacnguccaauugaguuu

SEQ ID NO: 2686656 - RNA, 19 nt, Artificial Sequence
  Description of Artificial Sequence: Synthetic oligonucleotide
aauugauggucuccuucaa

SEQ ID NO: 2686657 - RNA, 19 nt, Artificial Sequence
  Description of Artificial Sequence: Synthetic oligonucleotide
aguucuuacggccuccuua

SEQ ID NO: 2686658 - RNA, 19 nt, Artificial Sequence
  Description of Artificial Sequence: Synthetic oligonucleotide
ucgcacacaaucccuguac

SEQ ID NO: 2686659 - RNA, 19 nt, Artificial Sequence
  Description of Artificial Sequence: Synthetic oligonucleotide
gucccaagagcccguagcg

SEQ ID NO: 2686660 - RNA, 19 nt, Artificial Sequence
  Description of Artificial Sequence: Synthetic oligonucleotide
gagacacgaacuuagcaua

SEQ ID NO: 2686661 - RNA, 19 nt, Artificial Sequence
  Description of Artificial Sequence: Synthetic oligonucleotide
uugucgcacacaaucccug

SEQ ID NO: 2686662 - RNA, 19 nt, Artificial Sequence
  Description of Artificial Sequence: Synthetic oligonucleotide
uugcuaauuuucugagaca

SEQ ID NO: 2686663 - RNA, 19 nt, Artificial Sequence
  Description of Artificial Sequence: Synthetic oligonucleotide
augaagaaacacuguuaca

SEQ ID NO: 2686664 - RNA, 19 nt, Artificial Sequence
  Description of Artificial Sequence: Synthetic oligonucleotide
uggugcacugcuauaggaa

SEQ ID NO: 2686665 - RNA, 19 nt, Artificial Sequence
  Description of Artificial Sequence: Synthetic oligonucleotide
aucaccaugaugucugaua

SEQ ID NO: 2686666 - RNA, 19 nt, Artificial Sequence
  Description of Artificial Sequence: Synthetic oligonucleotide
guuacacauccuguugacg

SEQ ID NO: 2686667 - RNA, 19 nt, Artificial Sequence
  Description of Artificial Sequence: Synthetic oligonucleotide
ucugguuauuuggaugaug

SEQ ID NO: 2686668 - RNA, 19 nt, Artificial Sequence
  Description of Artificial Sequence: Synthetic oligonucleotide
uguaugguggugagcugcu

SEQ ID NO: 2686669 - RNA, 19 nt, Artificial Sequence
  Description of Artificial Sequence: Synthetic oligonucleotide
ucaacucugaagagauuua

SEQ ID NO: 2686670 - RNA, 19 nt, Artificial Sequence
  Description of Artificial Sequence: Synthetic oligonucleotide
uauaguucuuacggccucc

SEQ ID NO: 2686671 - RNA, 19 nt, Artificial Sequence
  Description of Artificial Sequence: Synthetic oligonucleotide
cuguccgcauuaucuauag

SEQ ID NO: 2686672 - RNA, 19 nt, Artificial Sequence
  Description of Artificial Sequence: Synthetic oligonucleotide
cauggugcacugcuauagg

SEQ ID NO: 2686673 - RNA, 19 nt, Artificial Sequence
  Description of Artificial Sequence: Synthetic oligonucleotide
aucuguacagggcucacuu

SEQ ID NO: 2686674 - RNA, 19 nt, Artificial Sequence
  Description of Artificial Sequence: Synthetic oligonucleotide
cacacaaucccuguacaug

SEQ ID NO: 2686675 - RNA, 19 nt, Artificial Sequence
  Description of Artificial Sequence: Synthetic oligonucleotide
acacgaacuuagcauaaau

SEQ ID NO: 2686676 - RNA, 19 nt, Artificial Sequence
  Description of Artificial Sequence: Synthetic oligonucleotide
uagcgaaggucucugcggu

SEQ ID NO: 2686677 - RNA, 19 nt, Artificial Sequence
  Description of Artificial Sequence: Synthetic oligonucleotide
auccaugacaucaccauga

SEQ ID NO: 2686678 - RNA, 19 nt, Artificial Sequence
  Description of Artificial Sequence: Synthetic oligonucleotide
uguacagggcucacuuccu

SEQ ID NO: 2686679 - RNA, 19 nt, Artificial Sequence
  Description of Artificial Sequence: Synthetic oligonucleotide
uguugucugaaaucccaua

SEQ ID NO: 2686680 - RNA, 19 nt, Artificial Sequence
  Description of Artificial Sequence: Synthetic oligonucleotide
guuagugauaauaucugua

SEQ ID NO: 2686681 - RNA, 19 nt, Artificial Sequence
  Description of Artificial Sequence: Synthetic oligonucleotide
agcuacgauucuuuccuga

SEQ ID NO: 2686682 - RNA, 19 nt, Artificial Sequence
  Description of Artificial Sequence: Synthetic oligonucleotide
agagucugguuauuuggau

SEQ ID NO: 2686683 - RNA, 19 nt, Artificial Sequence
  Description of Artificial Sequence: Synthetic oligonucleotide
uguacauggugcacugcua

SEQ ID NO: 2686684 - RNA, 19 nt, Artificial Sequence
  Description of Artificial Sequence: Synthetic oligonucleotide
ggucuugcuaauuuucuga

SEQ ID NO: 2686685 - RNA, 19 nt, Artificial Sequence
  Description of Artificial Sequence: Synthetic oligonucleotide
cuccaauagaccacaguga

SEQ ID NO: 2686686 - RNA, 19 nt, Artificial Sequence
  Description of Artificial Sequence: Synthetic oligonucleotide
aucuccaauagaccacagu

SEQ ID NO: 2686687 - RNA, 19 nt, Artificial Sequence
  Description of Artificial Sequence: Synthetic oligonucleotide
agaaagguuacagcaugga

SEQ ID NO: 2686688 - RNA, 19 nt, Artificial Sequence
  Description of Artificial Sequence: Synthetic oligonucleotide
uugacgaagcagcuacgau

SEQ ID NO: 2686689 - RNA, 19 nt, Artificial Sequence
  Description of Artificial Sequence: Synthetic oligonucleotide
uucaaacccuccgucagaa

SEQ ID NO: 2686690 - RNA, 19 nt, Artificial Sequence
  Description of Artificial Sequence: Synthetic oligonucleotide
cuauaguucuuacggccuc

SEQ ID NO: 2686691 - RNA, 19 nt, Artificial Sequence
  Description of Artificial Sequence: Synthetic oligonucleotide
gguugucgcacacaauccc

SEQ ID NO: 2686692 - RNA, 19 nt, Artificial Sequence
  Description of Artificial Sequence: Synthetic oligonucleotide
cuguuacacauccuguuga

SEQ ID NO: 2686693 - RNA, 19 nt, Artificial Sequence
  Description of Artificial Sequence: Synthetic oligonucleotide
gugaaacgcaguuuuccuc

SEQ ID NO: 2686694 - RNA, 19 nt, Artificial Sequence
  Description of Artificial Sequence: Synthetic oligonucleotide
uuuauucgaccauccucuc

SEQ ID NO: 2686695 - RNA, 19 nt, Artificial Sequence
  Description of Artificial Sequence: Synthetic oligonucleotide
aacaaucucaggaguucga

SEQ ID NO: 2686696 - RNA, 19 nt, Artificial Sequence
  Description of Artificial Sequence: Synthetic oligonucleotide
cacaguaauugauggucuc

SEQ ID NO: 2686697 - RNA, 19 nt, Artificial Sequence
  Description of Artificial Sequence: Synthetic oligonucleotide
gacugacagagucugguua

SEQ ID NO: 2686698 - RNA, 19 nt, Artificial Sequence
  Description of Artificial Sequence: Synthetic oligonucleotide
aguucgaagaaagguuaca

SEQ ID NO: 2686699 - RNA, 19 nt, Artificial Sequence
  Description of Artificial Sequence: Synthetic oligonucleotide
uacacauccuguugacgaa

SEQ ID NO: 2686700 - RNA, 19 nt, Artificial Sequence
  Description of Artificial Sequence: Synthetic oligonucleotide
ugguuauuuggaugaugaa

SEQ ID NO: 2686701 - RNA, 19 nt, Artificial Sequence
  Description of Artificial Sequence: Synthetic oligonucleotide
caagagcccguagcgaagg

SEQ ID NO: 2686702 - RNA, 19 nt, Artificial Sequence
  Description of Artificial Sequence: Synthetic oligonucleotide
gacugccaggaccuguaug

SEQ ID NO: 2686703 - RNA, 19 nt, Artificial Sequence
  Description of Artificial Sequence: Synthetic oligonucleotide
aucucaggaguucgaagaa

SEQ ID NO: 2686704 - RNA, 19 nt, Artificial Sequence
  Description of Artificial Sequence: Synthetic oligonucleotide
guugucugaaaucccauau

SEQ ID NO: 2686705 - RNA, 19 nt, Artificial Sequence
  Description of Artificial Sequence: Synthetic oligonucleotide
cuacgauucuuuccugauc

SEQ ID NO: 2686706 - RNA, 19 nt, Artificial Sequence
  Description of Artificial Sequence: Synthetic oligonucleotide
uuucugagacacgaacuua

SEQ ID NO: 2686707 - RNA, 19 nt, Artificial Sequence
  Description of Artificial Sequence: Synthetic oligonucleotide
ucgcacaguaauugauggu

SEQ ID NO: 2686708 - RNA, 19 nt, Artificial Sequence
  Description of Artificial Sequence: Synthetic oligonucleotide
guccgcauuaucuauaguu

SEQ ID NO: 2686709 - RNA, 19 nt, Artificial Sequence
  Description of Artificial Sequence: Synthetic oligonucleotide
ugucgcacacaaucccugu

SEQ ID NO: 2686710 - RNA, 19 nt, Artificial Sequence
  Description of Artificial Sequence: Synthetic oligonucleotide
acacauccuguugacgaag

SEQ ID NO: 2686711 - RNA, 19 nt, Artificial Sequence
  Description of Artificial Sequence: Synthetic oligonucleotide
aacucugaagagauuuauu

SEQ ID NO: 2686712 - RNA, 19 nt, Artificial Sequence
  Description of Artificial Sequence: Synthetic oligonucleotide
aggaguucgaagaaagguu

SEQ ID NO: 2686713 - RNA, 19 nt, Artificial Sequence
  Description of Artificial Sequence: Synthetic oligonucleotide
aguaauugauggucuccuu

SEQ ID NO: 2686714 - RNA, 19 nt, Artificial Sequence
  Description of Artificial Sequence: Synthetic oligonucleotide
cgaacuuagcauaaauuuc

SEQ ID NO: 2686715 - RNA, 19 nt, Artificial Sequence
  Description of Artificial Sequence: Synthetic oligonucleotide
cagagucugguuauuugga

SEQ ID NO: 2686716 - RNA, 19 nt, Artificial Sequence
  Description of Artificial Sequence: Synthetic oligonucleotide
auaucgcacaguaauugau

SEQ ID NO: 2686717 - RNA, 19 nt, Artificial Sequence
  Description of Artificial Sequence: Synthetic oligonucleotide
gaguucgaagaaagguuac

SEQ ID NO: 2686718 - RNA, 19 nt, Artificial Sequence
  Description of Artificial Sequence: Synthetic oligonucleotide
uugucccaagagcccguag

SEQ ID NO: 2686719 - RNA, 19 nt, Artificial Sequence
  Description of Artificial Sequence: Synthetic oligonucleotide
ccgucagaauccaaauucc

SEQ ID NO: 2686720 - RNA, 19 nt, Artificial Sequence
  Description of Artificial Sequence: Synthetic oligonucleotide
acauccuguugacgaagca

SEQ ID NO: 2686721 - RNA, 19 nt, Artificial Sequence
  Description of Artificial Sequence: Synthetic oligonucleotide
agagcccguagcgaagguc

SEQ ID NO: 2686722 - RNA, 19 nt, Artificial Sequence
  Description of Artificial Sequence: Synthetic oligonucleotide
gcuaauuuucugagacacg

SEQ ID NO: 2686723 - RNA, 19 nt, Artificial Sequence
  Description of Artificial Sequence: Synthetic oligonucleotide
ucccuguacauggugcacu

SEQ ID NO: 2686724 - RNA, 19 nt, Artificial Sequence
  Description of Artificial Sequence: Synthetic oligonucleotide
uucgaccauccucuccaac

SEQ ID NO: 2686725 - RNA, 19 nt, Artificial Sequence
  Description of Artificial Sequence: Synthetic oligonucleotide
aaggucucugcggucugca

SEQ ID NO: 2686726 - RNA, 19 nt, Artificial Sequence
  Description of Artificial Sequence: Synthetic oligonucleotide
uucuuacggccuccuuaug

SEQ ID NO: 2686727 - RNA, 19 nt, Artificial Sequence
  Description of Artificial Sequence: Synthetic oligonucleotide
uguccgcauuaucuauagu

SEQ ID NO: 2686728 - RNA, 19 nt, Artificial Sequence
  Description of Artificial Sequence: Synthetic oligonucleotide
ugacugacagagucugguu

SEQ ID NO: 2686729 - RNA, 19 nt, Artificial Sequence
  Description of Artificial Sequence: Synthetic oligonucleotide
gcagcuacgauucuuuccu

SEQ ID NO: 2686730 - RNA, 19 nt, Artificial Sequence
  Description of Artificial Sequence: Synthetic oligonucleotide
aaacgcaguuuuccucauu

SEQ ID NO: 2686731 - RNA, 19 nt, Artificial Sequence
  Description of Artificial Sequence: Synthetic oligonucleotide
aaacacuguuacacauccu

SEQ ID NO: 2686732 - RNA, 19 nt, Artificial Sequence
  Description of Artificial Sequence: Synthetic oligonucleotide
uacauggugcacugcuaua

SEQ ID NO: 2686733 - RNA, 19 nt, Artificial Sequence
  Description of Artificial Sequence: Synthetic oligonucleotide
uuacagcauggaguguacu

SEQ ID NO: 2686734 - RNA, 19 nt, Artificial Sequence
  Description of Artificial Sequence: Synthetic oligonucleotide
guuacagcauggaguguac

SEQ ID NO: 2686735 - RNA, 19 nt, Artificial Sequence
  Description of Artificial Sequence: Synthetic oligonucleotide
acgcaguuuuccucauugu

SEQ ID NO: 2686736 - RNA, 19 nt, Artificial Sequence
  Description of Artificial Sequence: Synthetic oligonucleotide
  modified_base (2)..(2): a, c, u, g, unknown or other
cnguccaauugaguuuuac

SEQ ID NO: 2686737 - RNA, 19 nt, Artificial Sequence
  Description of Artificial Sequence: Synthetic oligonucleotide
guucuuacggccuccuuau

SEQ ID NO: 2686738 - RNA, 19 nt, Artificial Sequence
  Description of Artificial Sequence: Synthetic oligonucleotide
augucugauaucgcacagu

SEQ ID NO: 2686739 - RNA, 19 nt, Artificial Sequence
  Description of Artificial Sequence: Synthetic oligonucleotide
gcucccagaaggcacuggc

SEQ ID NO: 2686740 - RNA, 19 nt, Artificial Sequence
  Description of Artificial Sequence: Synthetic oligonucleotide
aacccuccgucagaaucca

SEQ ID NO: 2686741 - RNA, 19 nt, Artificial Sequence
  Description of Artificial Sequence: Synthetic oligonucleotide
agcgggucuugcuaauuuu

SEQ ID NO: 2686742 - RNA, 19 nt, Artificial Sequence
  Description of Artificial Sequence: Synthetic oligonucleotide
ggaccuguaugguggugag

SEQ ID NO: 2686743 - RNA, 19 nt, Artificial Sequence
  Description of Artificial Sequence: Synthetic oligonucleotide
cgucagaauccaaauuccc

SEQ ID NO: 2686744 - RNA, 19 nt, Artificial Sequence
  Description of Artificial Sequence: Synthetic oligonucleotide
cuguacauggugcacugcu

SEQ ID NO: 2686745 - RNA, 19 nt, Artificial Sequence
  Description of Artificial Sequence: Synthetic oligonucleotide
ucccaagagcccguagcga

SEQ ID NO: 2686746 - RNA, 19 nt, Artificial Sequence
  Description of Artificial Sequence: Synthetic oligonucleotide
caggaguucgaagaaaggu

SEQ ID NO: 2686747 - RNA, 19 nt, Artificial Sequence
  Description of Artificial Sequence: Synthetic oligonucleotide
cuucaaacccuccgucaga

SEQ ID NO: 2686748 - RNA, 19 nt, Artificial Sequence
  Description of Artificial Sequence: Synthetic oligonucleotide
ugguggugagcugcuggcc

SEQ ID NO: 2686749 - RNA, 19 nt, Artificial Sequence
  Description of Artificial Sequence: Synthetic oligonucleotide
cguagcgaaggucucugcg

SEQ ID NO: 2686750 - RNA, 19 nt, Artificial Sequence
  Description of Artificial Sequence: Synthetic oligonucleotide
ggaguucgaagaaagguua

SEQ ID NO: 2686751 - RNA, 19 nt, Artificial Sequence
  Description of Artificial Sequence: Synthetic oligonucleotide
gguuacagcauggagugua

SEQ ID NO: 2686752 - RNA, 19 nt, Artificial Sequence
  Description of Artificial Sequence: Synthetic oligonucleotide
cugcuauaggaaggacugc

SEQ ID NO: 2686753 - RNA, 19 nt, Artificial Sequence
  Description of Artificial Sequence: Synthetic oligonucleotide
aguguacugcuguccgcau

SEQ ID NO: 2686754 - RNA, 19 nt, Artificial Sequence
  Description of Artificial Sequence: Synthetic oligonucleotide
cacgaacuuagcauaaauu

SEQ ID NO: 2686755 - RNA, 19 nt, Artificial Sequence
  Description of Artificial Sequence: Synthetic oligonucleotide
cuuacggccuccuuaugau

SEQ ID NO: 2686756 - RNA, 19 nt, Artificial Sequence
  Description of Artificial Sequence: Synthetic oligonucleotide
acgauucuuuccugaucaa

SEQ ID NO: 2686757 - RNA, 19 nt, Artificial Sequence
  Description of Artificial Sequence: Synthetic oligonucleotide
agacacgaacuuagcauaa

SEQ ID NO: 2686758 - RNA, 19 nt, Artificial Sequence
  Description of Artificial Sequence: Synthetic oligonucleotide
ccaauugaguuuuacugua

SEQ ID NO: 2686759 - RNA, 19 nt, Artificial Sequence
  Description of Artificial Sequence: Synthetic oligonucleotide
ggaguguacugcuguccgc

SEQ ID NO: 2686760 - RNA, 19 nt, Artificial Sequence
  Description of Artificial Sequence: Synthetic oligonucleotide
ggguugucgcacacaaucc

SEQ ID NO: 2686761 - RNA, 19 nt, Artificial Sequence
  Description of Artificial Sequence: Synthetic oligonucleotide
cugcugauugacugacaga

SEQ ID NO: 2686762 - RNA, 19 nt, Artificial Sequence
  Description of Artificial Sequence: Synthetic oligonucleotide
agcauggaguguacugcug

SEQ ID NO: 2686763 - RNA, 19 nt, Artificial Sequence
  Description of Artificial Sequence: Synthetic oligonucleotide
cgcacaguaauugaugguc

SEQ ID NO: 2686764 - RNA, 19 nt, Artificial Sequence
  Description of Artificial Sequence: Synthetic oligonucleotide
gacacgaacuuagcauaaa

SEQ ID NO: 2686765 - RNA, 19 nt, Artificial Sequence
  Description of Artificial Sequence: Synthetic oligonucleotide
cagcuacgauucuuuccug

SEQ ID NO: 2686766 - RNA, 19 nt, Artificial Sequence
  Description of Artificial Sequence: Synthetic oligonucleotide
auucgaccauccucuccaa

SEQ ID NO: 2686767 - RNA, 19 nt, Artificial Sequence
  Description of Artificial Sequence: Synthetic oligonucleotide
caguaauugauggucuccu

SEQ ID NO: 2686768 - RNA, 19 nt, Artificial Sequence
  Description of Artificial Sequence: Synthetic oligonucleotide
ccaugaugucugauaucgc

SEQ ID NO: 2686769 - RNA, 19 nt, Artificial Sequence
  Description of Artificial Sequence: Synthetic oligonucleotide
acgaagcagcuacgauucu

SEQ ID NO: 2686770 - RNA, 19 nt, Artificial Sequence
  Description of Artificial Sequence: Synthetic oligonucleotide
cucugcggucugcaggcuc

SEQ ID NO: 2686771 - RNA, 19 nt, Artificial Sequence
  Description of Artificial Sequence: Synthetic oligonucleotide
cccagaaggcacuggccgc

SEQ ID NO: 2686772 - RNA, 19 nt, Artificial Sequence
  Description of Artificial Sequence: Synthetic oligonucleotide
cugauaucgcacaguaauu

SEQ ID NO: 2686773 - RNA, 19 nt, Artificial Sequence
  Description of Artificial Sequence: Synthetic oligonucleotide
cacuguuacacauccuguu

SEQ ID NO: 2686774 - RNA, 19 nt, Artificial Sequence
  Description of Artificial Sequence: Synthetic oligonucleotide
guaugguggugagcugcug

SEQ ID NO: 2686775 - RNA, 19 nt, Artificial Sequence
  Description of Artificial Sequence: Synthetic oligonucleotide
gaaacgcaguuuuccucau

SEQ ID NO: 2686776 - RNA, 19 nt, Artificial Sequence
  Description of Artificial Sequence: Synthetic oligonucleotide
gucgcacacaaucccugua

SEQ ID NO: 2686777 - RNA, 19 nt, Artificial Sequence
  Description of Artificial Sequence: Synthetic oligonucleotide
ccaugacaucaccaugaug

SEQ ID NO: 2686778 - RNA, 19 nt, Artificial Sequence
  Description of Artificial Sequence: Synthetic oligonucleotide
uggugagcugcuggccacu

SEQ ID NO: 2686779 - RNA, 19 nt, Artificial Sequence
  Description of Artificial Sequence: Synthetic oligonucleotide
gcauggaguguacugcugu

SEQ ID NO: 2686780 - RNA, 19 nt, Artificial Sequence
  Description of Artificial Sequence: Synthetic oligonucleotide
agcccguagcgaaggucuc

SEQ ID NO: 2686781 - RNA, 19 nt, Artificial Sequence
  Description of Artificial Sequence: Synthetic oligonucleotide
caacucugaagagauuuau

SEQ ID NO: 2686782 - RNA, 19 nt, Artificial Sequence
  Description of Artificial Sequence: Synthetic oligonucleotide
gcgggucuugcuaauuuuc

SEQ ID NO: 2686783 - RNA, 19 nt, Artificial Sequence
  Description of Artificial Sequence: Synthetic oligonucleotide
agguuacagcauggagugu

SEQ ID NO: 2686784 - RNA, 19 nt, Artificial Sequence
  Description of Artificial Sequence: Synthetic oligonucleotide
gcuacgauucuuuccugau

SEQ ID NO: 2686785 - RNA, 19 nt, Artificial Sequence
  Description of Artificial Sequence: Synthetic oligonucleotide
ccuuaugaucaacucugaa

SEQ ID NO: 2686786 - RNA, 19 nt, Artificial Sequence
  Description of Artificial Sequence: Synthetic oligonucleotide
ccaauagaccacagugaaa

SEQ ID NO: 2686787 - RNA, 19 nt, Artificial Sequence
  Description of Artificial Sequence: Synthetic oligonucleotide
cacaaucccuguacauggu

SEQ ID NO: 2686788 - RNA, 19 nt, Artificial Sequence
  Description of Artificial Sequence: Synthetic oligonucleotide
ucucugcggucugcaggcu

SEQ ID NO: 2686789 - RNA, 19 nt, Artificial Sequence
  Description of Artificial Sequence: Synthetic oligonucleotide
ccgcauuaucuauaguucu

SEQ ID NO: 2686790 - RNA, 19 nt, Artificial Sequence
  Description of Artificial Sequence: Synthetic oligonucleotide
cccuccgucagaauccaaa

SEQ ID NO: 2686791 - RNA, 19 nt, Artificial Sequence
  Description of Artificial Sequence: Synthetic oligonucleotide
cauugucccaagagcccgu

SEQ ID NO: 2686792 - RNA, 19 nt, Artificial Sequence
  Description of Artificial Sequence: Synthetic oligonucleotide
ggugagcugcuggccacug

SEQ ID NO: 2686793 - RNA, 19 nt, Artificial Sequence
  Description of Artificial Sequence: Synthetic oligonucleotide
ugcggucugcaggcuccca

SEQ ID NO: 2686794 - RNA, 19 nt, Artificial Sequence
  Description of Artificial Sequence: Synthetic oligonucleotide
cugcggucugcaggcuccc

SEQ ID NO: 2686795 - RNA, 19 nt, Artificial Sequence
  Description of Artificial Sequence: Synthetic oligonucleotide
cuccgucagaauccaaauu

SEQ ID NO: 2686796 - RNA, 19 nt, Artificial Sequence
  Description of Artificial Sequence: Synthetic oligonucleotide
cccguagcgaaggucucug

SEQ ID NO: 2686797 - RNA, 19 nt, Artificial Sequence
  Description of Artificial Sequence: Synthetic oligonucleotide
ccguagcgaaggucucugc

SEQ ID NO: 2686798 - RNA, 19 nt, Artificial Sequence
  Description of Artificial Sequence: Synthetic oligonucleotide
cagugacaauuucuggguu

SEQ ID NO: 2686799 - RNA, 19 nt, Artificial Sequence
  Description of Artificial Sequence: Synthetic oligonucleotide
guacagggcucacuuccuu

SEQ ID NO: 2686800 - RNA, 19 nt, Artificial Sequence
  Description of Artificial Sequence: Synthetic oligonucleotide
gcgaaggucucugcggucu

SEQ ID NO: 2686801 - RNA, 19 nt, Artificial Sequence
  Description of Artificial Sequence: Synthetic oligonucleotide
cgcacacaaucccuguaca

SEQ ID NO: 2686802 - RNA, 19 nt, Artificial Sequence
  Description of Artificial Sequence: Synthetic oligonucleotide
cagcgggucuugcuaauuu

SEQ ID NO: 2686803 - RNA, 19 nt, Artificial Sequence
  Description of Artificial Sequence: Synthetic oligonucleotide
  modified_base (3)..(3): a, c, u, g, unknown or other
acnguccaauugaguuuua

SEQ ID NO: 2686804 - RNA, 19 nt, Artificial Sequence
  Description of Artificial Sequence: Synthetic oligonucleotide
gcugauugacugacagagu

SEQ ID NO: 2686805 - RNA, 19 nt, Artificial Sequence
  Description of Artificial Sequence: Synthetic oligonucleotide
gucugguuauuuggaugau

SEQ ID NO: 2686806 - RNA, 19 nt, Artificial Sequence
  Description of Artificial Sequence: Synthetic oligonucleotide
ccuccgucagaauccaaau

SEQ ID NO: 2686807 - RNA, 19 nt, Artificial Sequence
  Description of Artificial Sequence: Synthetic oligonucleotide
cacuggccgccagcggguc

SEQ ID NO: 2686808 - RNA, 19 nt, Artificial Sequence
  Description of Artificial Sequence: Synthetic oligonucleotide
ccuguugacgaagcagcua

SEQ ID NO: 2686809 - RNA, 19 nt, Artificial Sequence
  Description of Artificial Sequence: Synthetic oligonucleotide
cgcauuaucuauaguucuu

SEQ ID NO: 2686810 - RNA, 19 nt, Artificial Sequence
  Description of Artificial Sequence: Synthetic oligonucleotide
guacugcuguccgcauuau

SEQ ID NO: 2686811 - RNA, 19 nt, Artificial Sequence
  Description of Artificial Sequence: Synthetic oligonucleotide
cagggcucacuuccuuguu

SEQ ID NO: 2686812 - RNA, 19 nt, Artificial Sequence
  Description of Artificial Sequence: Synthetic oligonucleotide
gccgccagcgggucuugcu

SEQ ID NO: 2686813 - RNA, 19 nt, Artificial Sequence
  Description of Artificial Sequence: Synthetic oligonucleotide
acccuccgucagaauccaa

SEQ ID NO: 2686814 - RNA, 19 nt, Artificial Sequence
  Description of Artificial Sequence: Synthetic oligonucleotide
ggacugccaggaccuguau

SEQ ID NO: 2686815 - RNA, 19 nt, Artificial Sequence
  Description of Artificial Sequence: Synthetic oligonucleotide
ccgccagcgggucuugcua

SEQ ID NO: 2686816 - RNA, 19 nt, Artificial Sequence
  Description of Artificial Sequence: Synthetic oligonucleotide
cuggccgccagcgggucuu

SEQ ID NO: 2686817 - RNA, 19 nt, Artificial Sequence
  Description of Artificial Sequence: Synthetic oligonucleotide
gcccguagcgaaggucucu

SEQ ID NO: 2686818 - RNA, 19 nt, Artificial Sequence
  Description of Artificial Sequence: Synthetic oligonucleotide
cgccagcgggucuugcuaa

SEQ ID NO: 2686819 - RNA, 19 nt, Artificial Sequence
  Description of Artificial Sequence: Synthetic oligonucleotide
gccagcgggucuugcuaau

SEQ ID NO: 2686820 - RNA, 19 nt, Artificial Sequence
  Description of Artificial Sequence: Synthetic oligonucleotide
gcacuggccgccagcgggu

SEQ ID NO: 2686821 - RNA, 19 nt, Artificial Sequence
  Description of Artificial Sequence: Synthetic oligonucleotide
ccagcgggucuugcuaauu

SEQ ID NO: 2686822 - RNA, 19 nt, Artificial Sequence
  Description of Artificial Sequence: Synthetic oligonucleotide
ccucuccaacagugacaau

SEQ ID NO: 2686823 - RNA, 19 nt, Artificial Sequence
  Description of Artificial Sequence: Synthetic oligonucleotide
  modified_base (1)..(1): a, c, u, g, unknown or other
nguccaauugaguuuuacu

SEQ ID NO: 2686824 - RNA, 19 nt, Artificial Sequence
  Description of Artificial Sequence: Synthetic oligonucleotide
aauuugauggcucauaaga

SEQ ID NO: 2686825 - RNA, 19 nt, Artificial Sequence
  Description of Artificial Sequence: Synthetic oligonucleotide
ucuucaauacaugagaucg

SEQ ID NO: 2686826 - RNA, 19 nt, Artificial Sequence
  Description of Artificial Sequence: Synthetic oligonucleotide
uguacuaagguuuagcaug

SEQ ID NO: 2686827 - RNA, 19 nt, Artificial Sequence
  Description of Artificial Sequence: Synthetic oligonucleotide
uuuagcaugaauauuacau

SEQ ID NO: 2686828 - RNA, 19 nt, Artificial Sequence
  Description of Artificial Sequence: Synthetic oligonucleotide
uacuaauucgcaaauaucu

SEQ ID NO: 2686829 - RNA, 19 nt, Artificial Sequence
  Description of Artificial Sequence: Synthetic oligonucleotide
aaaacaacuaccaugcaag

SEQ ID NO: 2686830 - RNA, 19 nt, Artificial Sequence
  Description of Artificial Sequence: Synthetic oligonucleotide
acuaccuuuacucagagga

SEQ ID NO: 2686831 - RNA, 19 nt, Artificial Sequence
  Description of Artificial Sequence: Synthetic oligonucleotide
acuuucacacgguauaucc

SEQ ID NO: 2686832 - RNA, 19 nt, Artificial Sequence
  Description of Artificial Sequence: Synthetic oligonucleotide
aauauuacaucucuucagu

SEQ ID NO: 2686833 - RNA, 19 nt, Artificial Sequence
  Description of Artificial Sequence: Synthetic oligonucleotide
aguaucagcacucaucagg

SEQ ID NO: 2686834 - RNA, 19 nt, Artificial Sequence
  Description of Artificial Sequence: Synthetic oligonucleotide
aaccuaaguuuucuaaagc

SEQ ID NO: 2686835 - RNA, 19 nt, Artificial Sequence
  Description of Artificial Sequence: Synthetic oligonucleotide
aaaccuaaguuuucuaaag

SEQ ID NO: 2686836 - RNA, 19 nt, Artificial Sequence
  Description of Artificial Sequence: Synthetic oligonucleotide
aauaucucugcacuguuug

SEQ ID NO: 2686837 - RNA, 19 nt, Artificial Sequence
  Description of Artificial Sequence: Synthetic oligonucleotide
augaauauuacaucucuuc

SEQ ID NO: 2686838 - RNA, 19 nt, Artificial Sequence
  Description of Artificial Sequence: Synthetic oligonucleotide
ucaaugacaaacuaucuac

SEQ ID NO: 2686839 - RNA, 19 nt, Artificial Sequence
  Description of Artificial Sequence: Synthetic oligonucleotide
ugacaaacuaucuacauuc

SEQ ID NO: 2686840 - RNA, 19 nt, Artificial Sequence
  Description of Artificial Sequence: Synthetic oligonucleotide
uaugugagcauacugguga

SEQ ID NO: 2686841 - RNA, 19 nt, Artificial Sequence
  Description of Artificial Sequence: Synthetic oligonucleotide
aauucgcaaauaucucugc

SEQ ID NO: 2686842 - RNA, 19 nt, Artificial Sequence
  Description of Artificial Sequence: Synthetic oligonucleotide
uuuauuacuaauucgcaaa

SEQ ID NO: 2686843 - RNA, 19 nt, Artificial Sequence
  Description of Artificial Sequence: Synthetic oligonucleotide
ucaguaucagcacucauca

SEQ ID NO: 2686844 - RNA, 19 nt, Artificial Sequence
  Description of Artificial Sequence: Synthetic oligonucleotide
aguuuaguggagcuguccc

SEQ ID NO: 2686845 - RNA, 19 nt, Artificial Sequence
  Description of Artificial Sequence: Synthetic oligonucleotide
ugaauauuacaucucuuca

SEQ ID NO: 2686846 - RNA, 19 nt, Artificial Sequence
  Description of Artificial Sequence: Synthetic oligonucleotide
uuuggagauauucagugac

SEQ ID NO: 2686847 - RNA, 19 nt, Artificial Sequence
  Description of Artificial Sequence: Synthetic oligonucleotide
uauucagugacccaagguc

SEQ ID NO: 2686848 - RNA, 19 nt, Artificial Sequence
  Description of Artificial Sequence: Synthetic oligonucleotide
aggacuuucgacuggcucc

SEQ ID NO: 2686849 - RNA, 19 nt, Artificial Sequence
  Description of Artificial Sequence: Synthetic oligonucleotide
ugcaaguuauguacuaagg

SEQ ID NO: 2686850 - RNA, 19 nt, Artificial Sequence
  Description of Artificial Sequence: Synthetic oligonucleotide
auuacuaauucgcaaauau

SEQ ID NO: 2686851 - RNA, 19 nt, Artificial Sequence
  Description of Artificial Sequence: Synthetic oligonucleotide
acaaacuaucuacauuccc

SEQ ID NO: 2686852 - RNA, 19 nt, Artificial Sequence
  Description of Artificial Sequence: Synthetic oligonucleotide
aagcagcauacuuucacac

SEQ ID NO: 2686853 - RNA, 19 nt, Artificial Sequence
  Description of Artificial Sequence: Synthetic oligonucleotide
ugugaugaaaagucacugg

SEQ ID NO: 2686854 - RNA, 19 nt, Artificial Sequence
  Description of Artificial Sequence: Synthetic oligonucleotide
uccacugugaugaaaaguc

SEQ ID NO: 2686855 - RNA, 19 nt, Artificial Sequence
  Description of Artificial Sequence: Synthetic oligonucleotide
ccuacuuuaaguuuagugg

SEQ ID NO: 2686856 - RNA, 19 nt, Artificial Sequence
  Description of Artificial Sequence: Synthetic oligonucleotide
uauguacuaagguuuagca

SEQ ID NO: 2686857 - RNA, 19 nt, Artificial Sequence
  Description of Artificial Sequence: Synthetic oligonucleotide
aaguuuauuuauuacuaau

SEQ ID NO: 2686858 - RNA, 19 nt, Artificial Sequence
  Description of Artificial Sequence: Synthetic oligonucleotide
uaaaacaacuaccaugcaa

SEQ ID NO: 2686859 - RNA, 19 nt, Artificial Sequence
  Description of Artificial Sequence: Synthetic oligonucleotide
auaagaacucacuugagau

SEQ ID NO: 2686860 - RNA, 19 nt, Artificial Sequence
  Description of Artificial Sequence: Synthetic oligonucleotide
uggaaguuuauuuauuacu

SEQ ID NO: 2686861 - RNA, 19 nt, Artificial Sequence
  Description of Artificial Sequence: Synthetic oligonucleotide
uucccuaaaacaacuacca

SEQ ID NO: 2686862 - RNA, 19 nt, Artificial Sequence
  Description of Artificial Sequence: Synthetic oligonucleotide
uaauucgcaaauaucucug

SEQ ID NO: 2686863 - RNA, 19 nt, Artificial Sequence
  Description of Artificial Sequence: Synthetic oligonucleotide
uccuacuuuaaguuuagug

SEQ ID NO: 2686864 - RNA, 19 nt, Artificial Sequence
  Description of Artificial Sequence: Synthetic oligonucleotide
ucuaaagcagcauacuuuc

SEQ ID NO: 2686865 - RNA, 19 nt, Artificial Sequence
  Description of Artificial Sequence: Synthetic oligonucleotide
ucuagcucggacaaauuug

SEQ ID NO: 2686866 - RNA, 19 nt, Artificial Sequence
  Description of Artificial Sequence: Synthetic oligonucleotide
ccuaaaacaacuaccaugc

SEQ ID NO: 2686867 - RNA, 19 nt, Artificial Sequence
  Description of Artificial Sequence: Synthetic oligonucleotide
aaauuugauggcucauaag

SEQ ID NO: 2686868 - RNA, 19 nt, Artificial Sequence
  Description of Artificial Sequence: Synthetic oligonucleotide
auucccuaaaacaacuacc

SEQ ID NO: 2686869 - RNA, 19 nt, Artificial Sequence
  Description of Artificial Sequence: Synthetic oligonucleotide
uaaagcagcauacuuucac

SEQ ID NO: 2686870 - RNA, 19 nt, Artificial Sequence
  Description of Artificial Sequence: Synthetic oligonucleotide
uuuacucagaggaucugcc

SEQ ID NO: 2686871 - RNA, 19 nt, Artificial Sequence
  Description of Artificial Sequence: Synthetic oligonucleotide
uuaaguuuaguggagcugu

SEQ ID NO: 2686872 - RNA, 19 nt, Artificial Sequence
  Description of Artificial Sequence: Synthetic oligonucleotide
uugauggcucauaagaacu

SEQ ID NO: 2686873 - RNA, 19 nt, Artificial Sequence
  Description of Artificial Sequence: Synthetic oligonucleotide
uugaacuaccuuuacucag

SEQ ID NO: 2686874 - RNA, 19 nt, Artificial Sequence
  Description of Artificial Sequence: Synthetic oligonucleotide
uuugauggcucauaagaac

SEQ ID NO: 2686875 - RNA, 19 nt, Artificial Sequence
  Description of Artificial Sequence: Synthetic oligonucleotide
uaccaugcaaguuauguac

SEQ ID NO: 2686876 - RNA, 19 nt, Artificial Sequence
  Description of Artificial Sequence: Synthetic oligonucleotide
ucagguaaaccuaaguuuu

SEQ ID NO: 2686877 - RNA, 19 nt, Artificial Sequence
  Description of Artificial Sequence: Synthetic oligonucleotide
uuucacacgguauauccug

SEQ ID NO: 2686878 - RNA, 19 nt, Artificial Sequence
  Description of Artificial Sequence: Synthetic oligonucleotide
aaagcagcauacuuucaca

SEQ ID NO: 2686879 - RNA, 19 nt, Artificial Sequence
  Description of Artificial Sequence: Synthetic oligonucleotide
acaacuaccaugcaaguua

SEQ ID NO: 2686880 - RNA, 19 nt, Artificial Sequence
  Description of Artificial Sequence: Synthetic oligonucleotide
uuuucucagaggacuuucg

SEQ ID NO: 2686881 - RNA, 19 nt, Artificial Sequence
  Description of Artificial Sequence: Synthetic oligonucleotide
caugagaucgucuauguga

SEQ ID NO: 2686882 - RNA, 19 nt, Artificial Sequence
  Description of Artificial Sequence: Synthetic oligonucleotide
uuugaacuaccuuuacuca

SEQ ID NO: 2686883 - RNA, 19 nt, Artificial Sequence
  Description of Artificial Sequence: Synthetic oligonucleotide
uaugggaagucuucaauac

SEQ ID NO: 2686884 - RNA, 19 nt, Artificial Sequence
  Description of Artificial Sequence: Synthetic oligonucleotide
acuuuaaguuuaguggagc

SEQ ID NO: 2686885 - RNA, 19 nt, Artificial Sequence
  Description of Artificial Sequence: Synthetic oligonucleotide
gauauucagugacccaagg

SEQ ID NO: 2686886 - RNA, 19 nt, Artificial Sequence
  Description of Artificial Sequence: Synthetic oligonucleotide
uuagcaugaauauuacauc

SEQ ID NO: 2686887 - RNA, 19 nt, Artificial Sequence
  Description of Artificial Sequence: Synthetic oligonucleotide
aagcccuugaguucuagcu

SEQ ID NO: 2686888 - RNA, 19 nt, Artificial Sequence
  Description of Artificial Sequence: Synthetic oligonucleotide
uucaguaucagcacucauc

SEQ ID NO: 2686889 - RNA, 19 nt, Artificial Sequence
  Description of Artificial Sequence: Synthetic oligonucleotide
uacuuuaaguuuaguggag

SEQ ID NO: 2686890 - RNA, 19 nt, Artificial Sequence
  Description of Artificial Sequence: Synthetic oligonucleotide
aaguuuaguggagcugucc

SEQ ID NO: 2686891 - RNA, 19 nt, Artificial Sequence
  Description of Artificial Sequence: Synthetic oligonucleotide
uugucuaagcccuugaguu

SEQ ID NO: 2686892 - RNA, 19 nt, Artificial Sequence
  Description of Artificial Sequence: Synthetic oligonucleotide
ugacccaaggucaucgucc

SEQ ID NO: 2686893 - RNA, 19 nt, Artificial Sequence
  Description of Artificial Sequence: Synthetic oligonucleotide
gucuaugugagcauacugg

SEQ ID NO: 2686894 - RNA, 19 nt, Artificial Sequence
  Description of Artificial Sequence: Synthetic oligonucleotide
uaaaccuaaguuuucuaaa

SEQ ID NO: 2686895 - RNA, 19 nt, Artificial Sequence
  Description of Artificial Sequence: Synthetic oligonucleotide
uaagaacucacuugagaug

SEQ ID NO: 2686896 - RNA, 19 nt, Artificial Sequence
  Description of Artificial Sequence: Synthetic oligonucleotide
auuuauuacuaauucgcaa

SEQ ID NO: 2686897 - RNA, 19 nt, Artificial Sequence
  Description of Artificial Sequence: Synthetic oligonucleotide
cuugagauguccuugguga

SEQ ID NO: 2686898 - RNA, 19 nt, Artificial Sequence
  Description of Artificial Sequence: Synthetic oligonucleotide
ucuaugugagcauacuggu

SEQ ID NO: 2686899 - RNA, 19 nt, Artificial Sequence
  Description of Artificial Sequence: Synthetic oligonucleotide
accuaaguuuucuaaagca

SEQ ID NO: 2686900 - RNA, 19 nt, Artificial Sequence
  Description of Artificial Sequence: Synthetic oligonucleotide
uauuacaucucuucaguau

SEQ ID NO: 2686901 - RNA, 19 nt, Artificial Sequence
  Description of Artificial Sequence: Synthetic oligonucleotide
ugaccuuugaacuaccuuu

SEQ ID NO: 2686902 - RNA, 19 nt, Artificial Sequence
  Description of Artificial Sequence: Synthetic oligonucleotide
uccucaugaccuuugaacu

SEQ ID NO: 2686903 - RNA, 19 nt, Artificial Sequence
  Description of Artificial Sequence: Synthetic oligonucleotide
gaagucuucaauacaugag

SEQ ID NO: 2686904 - RNA, 19 nt, Artificial Sequence
  Description of Artificial Sequence: Synthetic oligonucleotide
uccagaauccuaugggaag

SEQ ID NO: 2686905 - RNA, 19 nt, Artificial Sequence
  Description of Artificial Sequence: Synthetic oligonucleotide
uuauuacuaauucgcaaau

SEQ ID NO: 2686906 - RNA, 19 nt, Artificial Sequence
  Description of Artificial Sequence: Synthetic oligonucleotide
aucucuucaguaucagcac

SEQ ID NO: 2686907 - RNA, 19 nt, Artificial Sequence
  Description of Artificial Sequence: Synthetic oligonucleotide
aauacaugagaucgucuau

SEQ ID NO: 2686908 - RNA, 19 nt, Artificial Sequence
  Description of Artificial Sequence: Synthetic oligonucleotide
aauccuaugggaagucuuc

SEQ ID NO: 2686909 - RNA, 19 nt, Artificial Sequence
  Description of Artificial Sequence: Synthetic oligonucleotide
aaacuaucuacauucccua

SEQ ID NO: 2686910 - RNA, 19 nt, Artificial Sequence
  Description of Artificial Sequence: Synthetic oligonucleotide
uuacuaauucgcaaauauc

SEQ ID NO: 2686911 - RNA, 19 nt, Artificial Sequence
  Description of Artificial Sequence: Synthetic oligonucleotide
uucuaaagcagcauacuuu

SEQ ID NO: 2686912 - RNA, 19 nt, Artificial Sequence
  Description of Artificial Sequence: Synthetic oligonucleotide
uuauguacuaagguuuagc

SEQ ID NO: 2686913 - RNA, 19 nt, Artificial Sequence
  Description of Artificial Sequence: Synthetic oligonucleotide
aucagguaaaccuaaguuu

SEQ ID NO: 2686914 - RNA, 19 nt, Artificial Sequence
  Description of Artificial Sequence: Synthetic oligonucleotide
ucgcaaauaucucugcacu

SEQ ID NO: 2686915 - RNA, 19 nt, Artificial Sequence
  Description of Artificial Sequence: Synthetic oligonucleotide
ucacuugagauguccuugg

SEQ ID NO: 2686916 - RNA, 19 nt, Artificial Sequence
  Description of Artificial Sequence: Synthetic oligonucleotide
ugggaagucuucaauacau

SEQ ID NO: 2686917 - RNA, 19 nt, Artificial Sequence
  Description of Artificial Sequence: Synthetic oligonucleotide
cuacuuuaaguuuagugga

SEQ ID NO: 2686918 - RNA, 19 nt, Artificial Sequence
  Description of Artificial Sequence: Synthetic oligonucleotide
cuaagguuuagcaugaaua

SEQ ID NO: 2686919 - RNA, 19 nt, Artificial Sequence
  Description of Artificial Sequence: Synthetic oligonucleotide
aaguuauguacuaagguuu

SEQ ID NO: 2686920 - RNA, 19 nt, Artificial Sequence
  Description of Artificial Sequence: Synthetic oligonucleotide
augcaaguuauguacuaag

SEQ ID NO: 2686921 - RNA, 19 nt, Artificial Sequence
  Description of Artificial Sequence: Synthetic oligonucleotide
uacucagaggaucugccug

SEQ ID NO: 2686922 - RNA, 19 nt, Artificial Sequence
  Description of Artificial Sequence: Synthetic oligonucleotide
acaucucuucaguaucagc

SEQ ID NO: 2686923 - RNA, 19 nt, Artificial Sequence
  Description of Artificial Sequence: Synthetic oligonucleotide
augcacuguugucuaagcc

SEQ ID NO: 2686924 - RNA, 19 nt, Artificial Sequence
  Description of Artificial Sequence: Synthetic oligonucleotide
uuuaaguuuaguggagcug

SEQ ID NO: 2686925 - RNA, 19 nt, Artificial Sequence
  Description of Artificial Sequence: Synthetic oligonucleotide
uuucuaaagcagcauacuu

SEQ ID NO: 2686926 - RNA, 19 nt, Artificial Sequence
  Description of Artificial Sequence: Synthetic oligonucleotide
uuacaucucuucaguauca

SEQ ID NO: 2686927 - RNA, 19 nt, Artificial Sequence
  Description of Artificial Sequence: Synthetic oligonucleotide
uguugucuaagcccuugag

SEQ ID NO: 2686928 - RNA, 19 nt, Artificial Sequence
  Description of Artificial Sequence: Synthetic oligonucleotide
uuguccacugugaugaaaa

SEQ ID NO: 2686929 - RNA, 19 nt, Artificial Sequence
  Description of Artificial Sequence: Synthetic oligonucleotide
uucgcaaauaucucugcac

SEQ ID NO: 2686930 - RNA, 19 nt, Artificial Sequence
  Description of Artificial Sequence: Synthetic oligonucleotide
auauccuggaaguuuauuu

SEQ ID NO: 2686931 - RNA, 19 nt, Artificial Sequence
  Description of Artificial Sequence: Synthetic oligonucleotide
ucauaagaacucacuugag

SEQ ID NO: 2686932 - RNA, 19 nt, Artificial Sequence
  Description of Artificial Sequence: Synthetic oligonucleotide
uucacacgguauauccugg

SEQ ID NO: 2686933 - RNA, 19 nt, Artificial Sequence
  Description of Artificial Sequence: Synthetic oligonucleotide
acacgguauauccuggaag

SEQ ID NO: 2686934 - RNA, 19 nt, Artificial Sequence
  Description of Artificial Sequence: Synthetic oligonucleotide
acuaccaugcaaguuaugu

SEQ ID NO: 2686935 - RNA, 19 nt, Artificial Sequence
  Description of Artificial Sequence: Synthetic oligonucleotide
uuggagauauucagugacc

SEQ ID NO: 2686936 - RNA, 19 nt, Artificial Sequence
  Description of Artificial Sequence: Synthetic oligonucleotide
agcagcauacuuucacacg

SEQ ID NO: 2686937 - RNA, 19 nt, Artificial Sequence
  Description of Artificial Sequence: Synthetic oligonucleotide
uggagauauucagugaccc

SEQ ID NO: 2686938 - RNA, 19 nt, Artificial Sequence
  Description of Artificial Sequence: Synthetic oligonucleotide
gcagcauacuuucacacgg

SEQ ID NO: 2686939 - RNA, 19 nt, Artificial Sequence
  Description of Artificial Sequence: Synthetic oligonucleotide
acuaauucgcaaauaucuc

SEQ ID NO: 2686940 - RNA, 19 nt, Artificial Sequence
  Description of Artificial Sequence: Synthetic oligonucleotide
ugaguucuagcucggacaa

SEQ ID NO: 2686941 - RNA, 19 nt, Artificial Sequence
  Description of Artificial Sequence: Synthetic oligonucleotide
aaacaacuaccaugcaagu

SEQ ID NO: 2686942 - RNA, 19 nt, Artificial Sequence
  Description of Artificial Sequence: Synthetic oligonucleotide
guccucaugaccuuugaac

SEQ ID NO: 2686943 - RNA, 19 nt, Artificial Sequence
  Description of Artificial Sequence: Synthetic oligonucleotide
cuacauucccuaaaacaac

SEQ ID NO: 2686944 - RNA, 19 nt, Artificial Sequence
  Description of Artificial Sequence: Synthetic oligonucleotide
guuuaguggagcugucccg

SEQ ID NO: 2686945 - RNA, 19 nt, Artificial Sequence
  Description of Artificial Sequence: Synthetic oligonucleotide
cauucccuaaaacaacuac

SEQ ID NO: 2686946 - RNA, 19 nt, Artificial Sequence
  Description of Artificial Sequence: Synthetic oligonucleotide
uauccuggaaguuuauuua

SEQ ID NO: 2686947 - RNA, 19 nt, Artificial Sequence
  Description of Artificial Sequence: Synthetic oligonucleotide
ucauuuguccacugugaug

SEQ ID NO: 2686948 - RNA, 19 nt, Artificial Sequence
  Description of Artificial Sequence: Synthetic oligonucleotide
acagggcucacuccacugc

SEQ ID NO: 2686949 - RNA, 19 nt, Artificial Sequence
  Description of Artificial Sequence: Synthetic oligonucleotide
acuggcuccuacuuuaagu

SEQ ID NO: 2686950 - RNA, 19 nt, Artificial Sequence
  Description of Artificial Sequence: Synthetic oligonucleotide
agcucggacaaauuugaug

SEQ ID NO: 2686951 - RNA, 19 nt, Artificial Sequence
  Description of Artificial Sequence: Synthetic oligonucleotide
ucaauacaugagaucgucu

SEQ ID NO: 2686952 - RNA, 19 nt, Artificial Sequence
  Description of Artificial Sequence: Synthetic oligonucleotide
uuucucagaggacuuucga

SEQ ID NO: 2686953 - RNA, 19 nt, Artificial Sequence
  Description of Artificial Sequence: Synthetic oligonucleotide
agaagggagggcugggcac

SEQ ID NO: 2686954 - RNA, 19 nt, Artificial Sequence
  Description of Artificial Sequence: Synthetic oligonucleotide
uuuucuaaagcagcauacu

SEQ ID NO: 2686955 - RNA, 19 nt, Artificial Sequence
  Description of Artificial Sequence: Synthetic oligonucleotide
auauucagugacccaaggu

SEQ ID NO: 2686956 - RNA, 19 nt, Artificial Sequence
  Description of Artificial Sequence: Synthetic oligonucleotide
ucagaggacuuucgacugg

SEQ ID NO: 2686957 - RNA, 19 nt, Artificial Sequence
  Description of Artificial Sequence: Synthetic oligonucleotide
ugcuuuuccugguggacag

SEQ ID NO: 2686958 - RNA, 19 nt, Artificial Sequence
  Description of Artificial Sequence: Synthetic oligonucleotide
uaucuacauucccuaaaac

SEQ ID NO: 2686959 - RNA, 19 nt, Artificial Sequence
  Description of Artificial Sequence: Synthetic oligonucleotide
uacaugagaucgucuaugu

SEQ ID NO: 2686960 - RNA, 19 nt, Artificial Sequence
  Description of Artificial Sequence: Synthetic oligonucleotide
uucauuuguccacugugau

SEQ ID NO: 2686961 - RNA, 19 nt, Artificial Sequence
  Description of Artificial Sequence: Synthetic oligonucleotide
uucucagaggacuuucgac

SEQ ID NO: 2686962 - RNA, 19 nt, Artificial Sequence
  Description of Artificial Sequence: Synthetic oligonucleotide
gaaaagucacugguggagc

SEQ ID NO: 2686963 - RNA, 19 nt, Artificial Sequence
  Description of Artificial Sequence: Synthetic oligonucleotide
guaaaccuaaguuuucuaa

SEQ ID NO: 2686964 - RNA, 19 nt, Artificial Sequence
  Description of Artificial Sequence: Synthetic oligonucleotide
acuugagauguccuuggug

SEQ ID NO: 2686965 - RNA, 19 nt, Artificial Sequence
  Description of Artificial Sequence: Synthetic oligonucleotide
uucaauacaugagaucguc

SEQ ID NO: 2686966 - RNA, 19 nt, Artificial Sequence
  Description of Artificial Sequence: Synthetic oligonucleotide
cuucuuggaagucagcuga

SEQ ID NO: 2686967 - RNA, 19 nt, Artificial Sequence
  Description of Artificial Sequence: Synthetic oligonucleotide
gagaucgucuaugugagca

SEQ ID NO: 2686968 - RNA, 19 nt, Artificial Sequence
  Description of Artificial Sequence: Synthetic oligonucleotide
cauaagaacucacuugaga

SEQ ID NO: 2686969 - RNA, 19 nt, Artificial Sequence
  Description of Artificial Sequence: Synthetic oligonucleotide
cacugugaugaaaagucac

SEQ ID NO: 2686970 - RNA, 19 nt, Artificial Sequence
  Description of Artificial Sequence: Synthetic oligonucleotide
uucuagcucggacaaauuu

SEQ ID NO: 2686971 - RNA, 19 nt, Artificial Sequence
  Description of Artificial Sequence: Synthetic oligonucleotide
gaacuaccuuuacucagag

SEQ ID NO: 2686972 - RNA, 19 nt, Artificial Sequence
  Description of Artificial Sequence: Synthetic oligonucleotide
uuuaguggagcugucccga

SEQ ID NO: 2686973 - RNA, 19 nt, Artificial Sequence
  Description of Artificial Sequence: Synthetic oligonucleotide
acuaucuacauucccuaaa

SEQ ID NO: 2686974 - RNA, 19 nt, Artificial Sequence
  Description of Artificial Sequence: Synthetic oligonucleotide
gagcauacuggugagccag

SEQ ID NO: 2686975 - RNA, 19 nt, Artificial Sequence
  Description of Artificial Sequence: Synthetic oligonucleotide
aucguccucuucuuggaag

SEQ ID NO: 2686976 - RNA, 19 nt, Artificial Sequence
  Description of Artificial Sequence: Synthetic oligonucleotide
ccuaaguuuucuaaagcag

SEQ ID NO: 2686977 - RNA, 19 nt, Artificial Sequence
  Description of Artificial Sequence: Synthetic oligonucleotide
cuuuacucagaggaucugc

SEQ ID NO: 2686978 - RNA, 19 nt, Artificial Sequence
  Description of Artificial Sequence: Synthetic oligonucleotide
auacaugagaucgucuaug

SEQ ID NO: 2686979 - RNA, 19 nt, Artificial Sequence
  Description of Artificial Sequence: Synthetic oligonucleotide
gagauauucagugacccaa

SEQ ID NO: 2686980 - RNA, 19 nt, Artificial Sequence
  Description of Artificial Sequence: Synthetic oligonucleotide
augagaucgucuaugugag

SEQ ID NO: 2686981 - RNA, 19 nt, Artificial Sequence
  Description of Artificial Sequence: Synthetic oligonucleotide
acuuucgacuggcuccuac

SEQ ID NO: 2686982 - RNA, 19 nt, Artificial Sequence
  Description of Artificial Sequence: Synthetic oligonucleotide
auucgcaaauaucucugca

SEQ ID NO: 2686983 - RNA, 19 nt, Artificial Sequence
  Description of Artificial Sequence: Synthetic oligonucleotide
cuugaguucuagcucggac

SEQ ID NO: 2686984 - RNA, 19 nt, Artificial Sequence
  Description of Artificial Sequence: Synthetic oligonucleotide
auguacuaagguuuagcau

SEQ ID NO: 2686985 - RNA, 19 nt, Artificial Sequence
  Description of Artificial Sequence: Synthetic oligonucleotide
cucagaggacuuucgacug

SEQ ID NO: 2686986 - RNA, 19 nt, Artificial Sequence
  Description of Artificial Sequence: Synthetic oligonucleotide
agcaugaauauuacaucuc

SEQ ID NO: 2686987 - RNA, 19 nt, Artificial Sequence
  Description of Artificial Sequence: Synthetic oligonucleotide
aacuaucuacauucccuaa

SEQ ID NO: 2686988 - RNA, 19 nt, Artificial Sequence
  Description of Artificial Sequence: Synthetic oligonucleotide
uaucucugcacuguuugga

SEQ ID NO: 2686989 - RNA, 19 nt, Artificial Sequence
  Description of Artificial Sequence: Synthetic oligonucleotide
aguggagcugucccgaccu

SEQ ID NO: 2686990 - RNA, 19 nt, Artificial Sequence
  Description of Artificial Sequence: Synthetic oligonucleotide
cccuaaaacaacuaccaug

SEQ ID NO: 2686991 - RNA, 19 nt, Artificial Sequence
  Description of Artificial Sequence: Synthetic oligonucleotide
gaacucacuugagaugucc

SEQ ID NO: 2686992 - RNA, 19 nt, Artificial Sequence
  Description of Artificial Sequence: Synthetic oligonucleotide
augacaaacuaucuacauu

SEQ ID NO: 2686993 - RNA, 19 nt, Artificial Sequence
  Description of Artificial Sequence: Synthetic oligonucleotide
caaacuaucuacauucccu

SEQ ID NO: 2686994 - RNA, 19 nt, Artificial Sequence
  Description of Artificial Sequence: Synthetic oligonucleotide
ugauggcucauaagaacuc

SEQ ID NO: 2686995 - RNA, 19 nt, Artificial Sequence
  Description of Artificial Sequence: Synthetic oligonucleotide
ggagguguccuccagaauc

SEQ ID NO: 2686996 - RNA, 19 nt, Artificial Sequence
  Description of Artificial Sequence: Synthetic oligonucleotide
uggugagccagcagagaag

SEQ ID NO: 2686997 - RNA, 19 nt, Artificial Sequence
  Description of Artificial Sequence: Synthetic oligonucleotide
uggugacuggcuuuucuca

SEQ ID NO: 2686998 - RNA, 19 nt, Artificial Sequence
  Description of Artificial Sequence: Synthetic oligonucleotide
acuaagguuuagcaugaau

SEQ ID NO: 2686999 - RNA, 19 nt, Artificial Sequence
  Description of Artificial Sequence: Synthetic oligonucleotide
uggcuuuucucagaggacu

SEQ ID NO: 2687000 - RNA, 19 nt, Artificial Sequence
  Description of Artificial Sequence: Synthetic oligonucleotide
uggcucauaagaacucacu

SEQ ID NO: 2687001 - RNA, 19 nt, Artificial Sequence
  Description of Artificial Sequence: Synthetic oligonucleotide
cauacuuucacacgguaua

SEQ ID NO: 2687002 - RNA, 19 nt, Artificial Sequence
  Description of Artificial Sequence: Synthetic oligonucleotide
cugugaugaaaagucacug

SEQ ID NO: 2687003 - RNA, 19 nt, Artificial Sequence
  Description of Artificial Sequence: Synthetic oligonucleotide
cuuuuccugguggacagcc

SEQ ID NO: 2687004 - RNA, 19 nt, Artificial Sequence
  Description of Artificial Sequence: Synthetic oligonucleotide
gacaaacuaucuacauucc

SEQ ID NO: 2687005 - RNA, 19 nt, Artificial Sequence
  Description of Artificial Sequence: Synthetic oligonucleotide
cuagcucggacaaauuuga

SEQ ID NO: 2687006 - RNA, 19 nt, Artificial Sequence
  Description of Artificial Sequence: Synthetic oligonucleotide
cuaauucgcaaauaucucu

SEQ ID NO: 2687007 - RNA, 19 nt, Artificial Sequence
  Description of Artificial Sequence: Synthetic oligonucleotide
caauacaugagaucgucua

SEQ ID NO: 2687008 - RNA, 19 nt, Artificial Sequence
  Description of Artificial Sequence: Synthetic oligonucleotide
ggaagucuucaauacauga

SEQ ID NO: 2687009 - RNA, 19 nt, Artificial Sequence
  Description of Artificial Sequence: Synthetic oligonucleotide
cuaugugagcauacuggug

SEQ ID NO: 2687010 - RNA, 19 nt, Artificial Sequence
  Description of Artificial Sequence: Synthetic oligonucleotide
cucaugaccuuugaacuac

SEQ ID NO: 2687011 - RNA, 19 nt, Artificial Sequence
  Description of Artificial Sequence: Synthetic oligonucleotide
agcacucaucagguaaacc

SEQ ID NO: 2687012 - RNA, 19 nt, Artificial Sequence
  Description of Artificial Sequence: Synthetic oligonucleotide
uuacucagaggaucugccu

SEQ ID NO: 2687013 - RNA, 19 nt, Artificial Sequence
  Description of Artificial Sequence: Synthetic oligonucleotide
caaugacaaacuaucuaca

SEQ ID NO: 2687014 - RNA, 19 nt, Artificial Sequence
  Description of Artificial Sequence: Synthetic oligonucleotide
auauuacaucucuucagua

SEQ ID NO: 2687015 - RNA, 19 nt, Artificial Sequence
  Description of Artificial Sequence: Synthetic oligonucleotide
caaauuugauggcucauaa

SEQ ID NO: 2687016 - RNA, 19 nt, Artificial Sequence
  Description of Artificial Sequence: Synthetic oligonucleotide
augggaagucuucaauaca

SEQ ID NO: 2687017 - RNA, 19 nt, Artificial Sequence
  Description of Artificial Sequence: Synthetic oligonucleotide
ucaucguccucuucuugga

SEQ ID NO: 2687018 - RNA, 19 nt, Artificial Sequence
  Description of Artificial Sequence: Synthetic oligonucleotide
ucgacuggcuccuacuuua

SEQ ID NO: 2687019 - RNA, 19 nt, Artificial Sequence
  Description of Artificial Sequence: Synthetic oligonucleotide
ugucuaagcccuugaguuc

SEQ ID NO: 2687020 - RNA, 19 nt, Artificial Sequence
  Description of Artificial Sequence: Synthetic oligonucleotide
uaccuuuacucagaggauc

SEQ ID NO: 2687021 - RNA, 19 nt, Artificial Sequence
  Description of Artificial Sequence: Synthetic oligonucleotide
cuaucuacauucccuaaaa

SEQ ID NO: 2687022 - RNA, 19 nt, Artificial Sequence
  Description of Artificial Sequence: Synthetic oligonucleotide
ucaugaccuuugaacuacc

SEQ ID NO: 2687023 - RNA, 19 nt, Artificial Sequence
  Description of Artificial Sequence: Synthetic oligonucleotide
uacaucucuucaguaucag

SEQ ID NO: 2687024 - RNA, 19 nt, Artificial Sequence
  Description of Artificial Sequence: Synthetic oligonucleotide
cucacuugagauguccuug

SEQ ID NO: 2687025 - RNA, 19 nt, Artificial Sequence
  Description of Artificial Sequence: Synthetic oligonucleotide
guuuagcaugaauauuaca

SEQ ID NO: 2687026 - RNA, 19 nt, Artificial Sequence
  Description of Artificial Sequence: Synthetic oligonucleotide
acaugagaucgucuaugug

SEQ ID NO: 2687027 - RNA, 19 nt, Artificial Sequence
  Description of Artificial Sequence: Synthetic oligonucleotide
augugagcauacuggugag

SEQ ID NO: 2687028 - RNA, 19 nt, Artificial Sequence
  Description of Artificial Sequence: Synthetic oligonucleotide
aaguuuucuaaagcagcau

SEQ ID NO: 2687029 - RNA, 19 nt, Artificial Sequence
  Description of Artificial Sequence: Synthetic oligonucleotide
uauuacuaauucgcaaaua

SEQ ID NO: 2687030 - RNA, 19 nt, Artificial Sequence
  Description of Artificial Sequence: Synthetic oligonucleotide
acugugaugaaaagucacu

SEQ ID NO: 2687031 - RNA, 19 nt, Artificial Sequence
  Description of Artificial Sequence: Synthetic oligonucleotide
gcccuugaguucuagcucg

SEQ ID NO: 2687032 - RNA, 19 nt, Artificial Sequence
  Description of Artificial Sequence: Synthetic oligonucleotide
auuugauggcucauaagaa

SEQ ID NO: 2687033 - RNA, 19 nt, Artificial Sequence
  Description of Artificial Sequence: Synthetic oligonucleotide
ucguccucuucuuggaagu

SEQ ID NO: 2687034 - RNA, 19 nt, Artificial Sequence
  Description of Artificial Sequence: Synthetic oligonucleotide
aacaacuaccaugcaaguu

SEQ ID NO: 2687035 - RNA, 19 nt, Artificial Sequence
  Description of Artificial Sequence: Synthetic oligonucleotide
ucuucaguaucagcacuca

SEQ ID NO: 2687036 - RNA, 19 nt, Artificial Sequence
  Description of Artificial Sequence: Synthetic oligonucleotide
uugagauguccuuggugac

SEQ ID NO: 2687037 - RNA, 19 nt, Artificial Sequence
  Description of Artificial Sequence: Synthetic oligonucleotide
cacuguuuggagauauuca

SEQ ID NO: 2687038 - RNA, 19 nt, Artificial Sequence
  Description of Artificial Sequence: Synthetic oligonucleotide
gaggacuuucgacuggcuc

SEQ ID NO: 2687039 - RNA, 19 nt, Artificial Sequence
  Description of Artificial Sequence: Synthetic oligonucleotide
gagguguccuccagaaucc

SEQ ID NO: 2687040 - RNA, 19 nt, Artificial Sequence
  Description of Artificial Sequence: Synthetic oligonucleotide
caaguuauguacuaagguu

SEQ ID NO: 2687041 - RNA, 19 nt, Artificial Sequence
  Description of Artificial Sequence: Synthetic oligonucleotide
cagugacccaaggucaucg

SEQ ID NO: 2687042 - RNA, 19 nt, Artificial Sequence
  Description of Artificial Sequence: Synthetic oligonucleotide
auggcucauaagaacucac

SEQ ID NO: 2687043 - RNA, 19 nt, Artificial Sequence
  Description of Artificial Sequence: Synthetic oligonucleotide
cuaugggaagucuucaaua

SEQ ID NO: 2687044 - RNA, 19 nt, Artificial Sequence
  Description of Artificial Sequence: Synthetic oligonucleotide
gauguccuuggugacuggc

SEQ ID NO: 2687045 - RNA, 19 nt, Artificial Sequence
  Description of Artificial Sequence: Synthetic oligonucleotide
uucagugacccaaggucau

SEQ ID NO: 2687046 - RNA, 19 nt, Artificial Sequence
  Description of Artificial Sequence: Synthetic oligonucleotide
agauauucagugacccaag

SEQ ID NO: 2687047 - RNA, 19 nt, Artificial Sequence
  Description of Artificial Sequence: Synthetic oligonucleotide
aucgucuaugugagcauac

SEQ ID NO: 2687048 - RNA, 19 nt, Artificial Sequence
  Description of Artificial Sequence: Synthetic oligonucleotide
uaaguuuaguggagcuguc

SEQ ID NO: 2687049 - RNA, 19 nt, Artificial Sequence
  Description of Artificial Sequence: Synthetic oligonucleotide
ugagcauacuggugagcca

SEQ ID NO: 2687050 - RNA, 19 nt, Artificial Sequence
  Description of Artificial Sequence: Synthetic oligonucleotide
gauggcucauaagaacuca

SEQ ID NO: 2687051 - RNA, 19 nt, Artificial Sequence
  Description of Artificial Sequence: Synthetic oligonucleotide
cucggacaaauuugauggc

SEQ ID NO: 2687052 - RNA, 19 nt, Artificial Sequence
  Description of Artificial Sequence: Synthetic oligonucleotide
ucccuaaaacaacuaccau

SEQ ID NO: 2687053 - RNA, 19 nt, Artificial Sequence
  Description of Artificial Sequence: Synthetic oligonucleotide
uuucgacuggcuccuacuu

SEQ ID NO: 2687054 - RNA, 19 nt, Artificial Sequence
  Description of Artificial Sequence: Synthetic oligonucleotide
ggaaguuuauuuauuacua

SEQ ID NO: 2687055 - RNA, 19 nt, Artificial Sequence
  Description of Artificial Sequence: Synthetic oligonucleotide
ugagauguccuuggugacu

SEQ ID NO: 2687056 - RNA, 19 nt, Artificial Sequence
  Description of Artificial Sequence: Synthetic oligonucleotide
cuuuucucagaggacuuuc

SEQ ID NO: 2687057 - RNA, 19 nt, Artificial Sequence
  Description of Artificial Sequence: Synthetic oligonucleotide
aacucacuugagauguccu

SEQ ID NO: 2687058 - RNA, 19 nt, Artificial Sequence
  Description of Artificial Sequence: Synthetic oligonucleotide
uccuggaaguuuauuuauu

SEQ ID NO: 2687059 - RNA, 19 nt, Artificial Sequence
  Description of Artificial Sequence: Synthetic oligonucleotide
cauacuggugagccagcag

SEQ ID NO: 2687060 - RNA, 19 nt, Artificial Sequence
  Description of Artificial Sequence: Synthetic oligonucleotide
uaguggagcugucccgacc

SEQ ID NO: 2687061 - RNA, 19 nt, Artificial Sequence
  Description of Artificial Sequence: Synthetic oligonucleotide
augaccuuugaacuaccuu

SEQ ID NO: 2687062 - RNA, 19 nt, Artificial Sequence
  Description of Artificial Sequence: Synthetic oligonucleotide
ucuuggaagucagcugaug

SEQ ID NO: 2687063 - RNA, 19 nt, Artificial Sequence
  Description of Artificial Sequence: Synthetic oligonucleotide
ggugacuggcuuuucucag

SEQ ID NO: 2687064 - RNA, 19 nt, Artificial Sequence
  Description of Artificial Sequence: Synthetic oligonucleotide
ucacacgguauauccugga

SEQ ID NO: 2687065 - RNA, 19 nt, Artificial Sequence
  Description of Artificial Sequence: Synthetic oligonucleotide
aaauaucucugcacuguuu

SEQ ID NO: 2687066 - RNA, 19 nt, Artificial Sequence
  Description of Artificial Sequence: Synthetic oligonucleotide
agucuucaauacaugagau

SEQ ID NO: 2687067 - RNA, 19 nt, Artificial Sequence
  Description of Artificial Sequence: Synthetic oligonucleotide
uacuggagguguccuccag

SEQ ID NO: 2687068 - RNA, 19 nt, Artificial Sequence
  Description of Artificial Sequence: Synthetic oligonucleotide
gacuggcuuuucucagagg

SEQ ID NO: 2687069 - RNA, 19 nt, Artificial Sequence
  Description of Artificial Sequence: Synthetic oligonucleotide
cuuuaaguuuaguggagcu

SEQ ID NO: 2687070 - RNA, 19 nt, Artificial Sequence
  Description of Artificial Sequence: Synthetic oligonucleotide
agaggaucugccugguuuu

SEQ ID NO: 2687071 - RNA, 19 nt, Artificial Sequence
  Description of Artificial Sequence: Synthetic oligonucleotide
agcuacuggagguguccuc

SEQ ID NO: 2687072 - RNA, 19 nt, Artificial Sequence
  Description of Artificial Sequence: Synthetic oligonucleotide
ucccgaccuguccucauga

SEQ ID NO: 2687073 - RNA, 19 nt, Artificial Sequence
  Description of Artificial Sequence: Synthetic oligonucleotide
guugucuaagcccuugagu

SEQ ID NO: 2687074 - RNA, 19 nt, Artificial Sequence
  Description of Artificial Sequence: Synthetic oligonucleotide
uccuaugggaagucuucaa

SEQ ID NO: 2687075 - RNA, 19 nt, Artificial Sequence
  Description of Artificial Sequence: Synthetic oligonucleotide
cuggcuuuucucagaggac

SEQ ID NO: 2687076 - RNA, 19 nt, Artificial Sequence
  Description of Artificial Sequence: Synthetic oligonucleotide
cagguaaaccuaaguuuuc

SEQ ID NO: 2687077 - RNA, 19 nt, Artificial Sequence
  Description of Artificial Sequence: Synthetic oligonucleotide
acuguugucuaagcccuug

SEQ ID NO: 2687078 - RNA, 19 nt, Artificial Sequence
  Description of Artificial Sequence: Synthetic oligonucleotide
cacgguauauccuggaagu

SEQ ID NO: 2687079 - RNA, 19 nt, Artificial Sequence
  Description of Artificial Sequence: Synthetic oligonucleotide
ugagaucgucuaugugagc

SEQ ID NO: 2687080 - RNA, 19 nt, Artificial Sequence
  Description of Artificial Sequence: Synthetic oligonucleotide
ugugagcauacuggugagc

SEQ ID NO: 2687081 - RNA, 19 nt, Artificial Sequence
  Description of Artificial Sequence: Synthetic oligonucleotide
guacuaagguuuagcauga

SEQ ID NO: 2687082 - RNA, 19 nt, Artificial Sequence
  Description of Artificial Sequence: Synthetic oligonucleotide
uauauccuggaaguuuauu

SEQ ID NO: 2687083 - RNA, 19 nt, Artificial Sequence
  Description of Artificial Sequence: Synthetic oligonucleotide
agcauacuuucacacggua

SEQ ID NO: 2687084 - RNA, 19 nt, Artificial Sequence
  Description of Artificial Sequence: Synthetic oligonucleotide
uuccugguggacagccgug

SEQ ID NO: 2687085 - RNA, 19 nt, Artificial Sequence
  Description of Artificial Sequence: Synthetic oligonucleotide
acucacuugagauguccuu

SEQ ID NO: 2687086 - RNA, 19 nt, Artificial Sequence
  Description of Artificial Sequence: Synthetic oligonucleotide
cagaggacuuucgacuggc

SEQ ID NO: 2687087 - RNA, 19 nt, Artificial Sequence
  Description of Artificial Sequence: Synthetic oligonucleotide
uucgacuggcuccuacuuu

SEQ ID NO: 2687088 - RNA, 19 nt, Artificial Sequence
  Description of Artificial Sequence: Synthetic oligonucleotide
aguuauguacuaagguuua

SEQ ID NO: 2687089 - RNA, 19 nt, Artificial Sequence
  Description of Artificial Sequence: Synthetic oligonucleotide
uucuuggaagucagcugau

SEQ ID NO: 2687090 - RNA, 19 nt, Artificial Sequence
  Description of Artificial Sequence: Synthetic oligonucleotide
auacuuucacacgguauau

SEQ ID NO: 2687091 - RNA, 19 nt, Artificial Sequence
  Description of Artificial Sequence: Synthetic oligonucleotide
gcaaguuauguacuaaggu

SEQ ID NO: 2687092 - RNA, 19 nt, Artificial Sequence
  Description of Artificial Sequence: Synthetic oligonucleotide
uacuuucacacgguauauc

SEQ ID NO: 2687093 - RNA, 19 nt, Artificial Sequence
  Description of Artificial Sequence: Synthetic oligonucleotide
cugggcacagggcucacuc

SEQ ID NO: 2687094 - RNA, 19 nt, Artificial Sequence
  Description of Artificial Sequence: Synthetic oligonucleotide
ucgucuaugugagcauacu

SEQ ID NO: 2687095 - RNA, 19 nt, Artificial Sequence
  Description of Artificial Sequence: Synthetic oligonucleotide
cuccagaauccuaugggaa

SEQ ID NO: 2687096 - RNA, 19 nt, Artificial Sequence
  Description of Artificial Sequence: Synthetic oligonucleotide
uuaguggagcugucccgac

SEQ ID NO: 2687097 - RNA, 19 nt, Artificial Sequence
  Description of Artificial Sequence: Synthetic oligonucleotide
uggacagccgugccucacu

SEQ ID NO: 2687098 - RNA, 19 nt, Artificial Sequence
  Description of Artificial Sequence: Synthetic oligonucleotide
agucagcugaugcacuguu

SEQ ID NO: 2687099 - RNA, 19 nt, Artificial Sequence
  Description of Artificial Sequence: Synthetic oligonucleotide
cuaccaugcaaguuaugua

SEQ ID NO: 2687100 - RNA, 19 nt, Artificial Sequence
  Description of Artificial Sequence: Synthetic oligonucleotide
agccgugccucacuugacu

SEQ ID NO: 2687101 - RNA, 19 nt, Artificial Sequence
  Description of Artificial Sequence: Synthetic oligonucleotide
accaugcaaguuauguacu

SEQ ID NO: 2687102 - RNA, 19 nt, Artificial Sequence
  Description of Artificial Sequence: Synthetic oligonucleotide
agcauacuggugagccagc

SEQ ID NO: 2687103 - RNA, 19 nt, Artificial Sequence
  Description of Artificial Sequence: Synthetic oligonucleotide
gguuuagcaugaauauuac

SEQ ID NO: 2687104 - RNA, 19 nt, Artificial Sequence
  Description of Artificial Sequence: Synthetic oligonucleotide
cacucaucagguaaaccua

SEQ ID NO: 2687105 - RNA, 19 nt, Artificial Sequence
  Description of Artificial Sequence: Synthetic oligonucleotide
agugacccaaggucaucgu

SEQ ID NO: 2687106 - RNA, 19 nt, Artificial Sequence
  Description of Artificial Sequence: Synthetic oligonucleotide
uccugguggacagccgugc

SEQ ID NO: 2687107 - RNA, 19 nt, Artificial Sequence
  Description of Artificial Sequence: Synthetic oligonucleotide
caguaucagcacucaucag

SEQ ID NO: 2687108 - RNA, 19 nt, Artificial Sequence
  Description of Artificial Sequence: Synthetic oligonucleotide
cacagggcucacuccacug

SEQ ID NO: 2687109 - RNA, 19 nt, Artificial Sequence
  Description of Artificial Sequence: Synthetic oligonucleotide
guaucagcacucaucaggu

SEQ ID NO: 2687110 - RNA, 19 nt, Artificial Sequence
  Description of Artificial Sequence: Synthetic oligonucleotide
gcuacuggagguguccucc

SEQ ID NO: 2687111 - RNA, 19 nt, Artificial Sequence
  Description of Artificial Sequence: Synthetic oligonucleotide
auccuaugggaagucuuca

SEQ ID NO: 2687112 - RNA, 19 nt, Artificial Sequence
  Description of Artificial Sequence: Synthetic oligonucleotide
gagcugucccgaccugucc

SEQ ID NO: 2687113 - RNA, 19 nt, Artificial Sequence
  Description of Artificial Sequence: Synthetic oligonucleotide
cuaaaacaacuaccaugca

SEQ ID NO: 2687114 - RNA, 19 nt, Artificial Sequence
  Description of Artificial Sequence: Synthetic oligonucleotide
acucaucagguaaaccuaa

SEQ ID NO: 2687115 - RNA, 19 nt, Artificial Sequence
  Description of Artificial Sequence: Synthetic oligonucleotide
gugacuggcuuuucucaga

SEQ ID NO: 2687116 - RNA, 19 nt, Artificial Sequence
  Description of Artificial Sequence: Synthetic oligonucleotide
uggcuccuacuuuaaguuu

SEQ ID NO: 2687117 - RNA, 19 nt, Artificial Sequence
  Description of Artificial Sequence: Synthetic oligonucleotide
gugacccaaggucaucguc

SEQ ID NO: 2687118 - RNA, 19 nt, Artificial Sequence
  Description of Artificial Sequence: Synthetic oligonucleotide
gguauauccuggaaguuua

SEQ ID NO: 2687119 - RNA, 19 nt, Artificial Sequence
  Description of Artificial Sequence: Synthetic oligonucleotide
ggagauauucagugaccca

SEQ ID NO: 2687120 - RNA, 19 nt, Artificial Sequence
  Description of Artificial Sequence: Synthetic oligonucleotide
cuggagguguccuccagaa

SEQ ID NO: 2687121 - RNA, 19 nt, Artificial Sequence
  Description of Artificial Sequence: Synthetic oligonucleotide
gaagggagggcugggcaca

SEQ ID NO: 2687122 - RNA, 19 nt, Artificial Sequence
  Description of Artificial Sequence: Synthetic oligonucleotide
gacagccgugccucacuug

SEQ ID NO: 2687123 - RNA, 19 nt, Artificial Sequence
  Description of Artificial Sequence: Synthetic oligonucleotide
aacuaccaugcaaguuaug

SEQ ID NO: 2687124 - RNA, 19 nt, Artificial Sequence
  Description of Artificial Sequence: Synthetic oligonucleotide
uagcucggacaaauuugau

SEQ ID NO: 2687125 - RNA, 19 nt, Artificial Sequence
  Description of Artificial Sequence: Synthetic oligonucleotide
cuuucacacgguauauccu

SEQ ID NO: 2687126 - RNA, 19 nt, Artificial Sequence
  Description of Artificial Sequence: Synthetic oligonucleotide
uaucagcacucaucaggua

SEQ ID NO: 2687127 - RNA, 19 nt, Artificial Sequence
  Description of Artificial Sequence: Synthetic oligonucleotide
caugcaaguuauguacuaa

SEQ ID NO: 2687128 - RNA, 19 nt, Artificial Sequence
  Description of Artificial Sequence: Synthetic oligonucleotide
cuguuuggagauauucagu

SEQ ID NO: 2687129 - RNA, 19 nt, Artificial Sequence
  Description of Artificial Sequence: Synthetic oligonucleotide
gcacuguuuggagauauuc

SEQ ID NO: 2687130 - RNA, 19 nt, Artificial Sequence
  Description of Artificial Sequence: Synthetic oligonucleotide
ugccucacuugacuugcuu

SEQ ID NO: 2687131 - RNA, 19 nt, Artificial Sequence
  Description of Artificial Sequence: Synthetic oligonucleotide
gguaaaccuaaguuuucua

SEQ ID NO: 2687132 - RNA, 19 nt, Artificial Sequence
  Description of Artificial Sequence: Synthetic oligonucleotide
ggagcuacuggaggugucc

SEQ ID NO: 2687133 - RNA, 19 nt, Artificial Sequence
  Description of Artificial Sequence: Synthetic oligonucleotide
cuucaauacaugagaucgu

SEQ ID NO: 2687134 - RNA, 19 nt, Artificial Sequence
  Description of Artificial Sequence: Synthetic oligonucleotide
gucuaagcccuugaguucu

SEQ ID NO: 2687135 - RNA, 19 nt, Artificial Sequence
  Description of Artificial Sequence: Synthetic oligonucleotide
ugcacuguuuggagauauu

SEQ ID NO: 2687136 - RNA, 19 nt, Artificial Sequence
  Description of Artificial Sequence: Synthetic oligonucleotide
cuaagcccuugaguucuag

SEQ ID NO: 2687137 - RNA, 19 nt, Artificial Sequence
  Description of Artificial Sequence: Synthetic oligonucleotide
uggagguguccuccagaau

SEQ ID NO: 2687138 - RNA, 19 nt, Artificial Sequence
  Description of Artificial Sequence: Synthetic oligonucleotide
agcagagaagggagggcug

SEQ ID NO: 2687139 - RNA, 19 nt, Artificial Sequence
  Description of Artificial Sequence: Synthetic oligonucleotide
cuggcuccuacuuuaaguu

SEQ ID NO: 2687140 - RNA, 19 nt, Artificial Sequence
  Description of Artificial Sequence: Synthetic oligonucleotide
gacccaaggucaucguccu

SEQ ID NO: 2687141 - RNA, 19 nt, Artificial Sequence
  Description of Artificial Sequence: Synthetic oligonucleotide
gggaagucuucaauacaug

SEQ ID NO: 2687142 - RNA, 19 nt, Artificial Sequence
  Description of Artificial Sequence: Synthetic oligonucleotide
ccuggaaguuuauuuauua

SEQ ID NO: 2687143 - RNA, 19 nt, Artificial Sequence
  Description of Artificial Sequence: Synthetic oligonucleotide
cucugcacuguuuggagau

SEQ ID NO: 2687144 - RNA, 19 nt, Artificial Sequence
  Description of Artificial Sequence: Synthetic oligonucleotide
ucuaagcccuugaguucua

SEQ ID NO: 2687145 - RNA, 19 nt, Artificial Sequence
  Description of Artificial Sequence: Synthetic oligonucleotide
cuuucgacuggcuccuacu

SEQ ID NO: 2687146 - RNA, 19 nt, Artificial Sequence
  Description of Artificial Sequence: Synthetic oligonucleotide
ucagaggaucugccugguu

SEQ ID NO: 2687147 - RNA, 19 nt, Artificial Sequence
  Description of Artificial Sequence: Synthetic oligonucleotide
cuguugucuaagcccuuga

SEQ ID NO: 2687148 - RNA, 19 nt, Artificial Sequence
  Description of Artificial Sequence: Synthetic oligonucleotide
ccgaccuguccucaugacc

SEQ ID NO: 2687149 - RNA, 19 nt, Artificial Sequence
  Description of Artificial Sequence: Synthetic oligonucleotide
cacuccacugcugcuuuuc

SEQ ID NO: 2687150 - RNA, 19 nt, Artificial Sequence
  Description of Artificial Sequence: Synthetic oligonucleotide
acauucccuaaaacaacua

SEQ ID NO: 2687151 - RNA, 19 nt, Artificial Sequence
  Description of Artificial Sequence: Synthetic oligonucleotide
cuuggugacuggcuuuucu

SEQ ID NO: 2687152 - RNA, 19 nt, Artificial Sequence
  Description of Artificial Sequence: Synthetic oligonucleotide
gcaaauaucucugcacugu

SEQ ID NO: 2687153 - RNA, 19 nt, Artificial Sequence
  Description of Artificial Sequence: Synthetic oligonucleotide
cacacgguauauccuggaa

SEQ ID NO: 2687154 - RNA, 19 nt, Artificial Sequence
  Description of Artificial Sequence: Synthetic oligonucleotide
gucccgaccuguccucaug

SEQ ID NO: 2687155 - RNA, 19 nt, Artificial Sequence
  Description of Artificial Sequence: Synthetic oligonucleotide
gcuccuacuuuaaguuuag

SEQ ID NO: 2687156 - RNA, 19 nt, Artificial Sequence
  Description of Artificial Sequence: Synthetic oligonucleotide
uacuaagguuuagcaugaa

SEQ ID NO: 2687157 - RNA, 19 nt, Artificial Sequence
  Description of Artificial Sequence: Synthetic oligonucleotide
cgcaaauaucucugcacug

SEQ ID NO: 2687158 - RNA, 19 nt, Artificial Sequence
  Description of Artificial Sequence: Synthetic oligonucleotide
gggcacagggcucacucca

SEQ ID NO: 2687159 - RNA, 19 nt, Artificial Sequence
  Description of Artificial Sequence: Synthetic oligonucleotide
ucugcacuguuuggagaua

SEQ ID NO: 2687160 - RNA, 19 nt, Artificial Sequence
  Description of Artificial Sequence: Synthetic oligonucleotide
caaggucaucguccucuuc

SEQ ID NO: 2687161 - RNA, 19 nt, Artificial Sequence
  Description of Artificial Sequence: Synthetic oligonucleotide
guccacugugaugaaaagu

SEQ ID NO: 2687162 - RNA, 19 nt, Artificial Sequence
  Description of Artificial Sequence: Synthetic oligonucleotide
ggcucauaagaacucacuu

SEQ ID NO: 2687163 - RNA, 19 nt, Artificial Sequence
  Description of Artificial Sequence: Synthetic oligonucleotide
cuacuggagguguccucca

SEQ ID NO: 2687164 - RNA, 19 nt, Artificial Sequence
  Description of Artificial Sequence: Synthetic oligonucleotide
caugaccuuugaacuaccu

SEQ ID NO: 2687165 - RNA, 19 nt, Artificial Sequence
  Description of Artificial Sequence: Synthetic oligonucleotide
cuaccuuuacucagaggau

SEQ ID NO: 2687166 - RNA, 19 nt, Artificial Sequence
  Description of Artificial Sequence: Synthetic oligonucleotide
ggcuccuacuuuaaguuua

SEQ ID NO: 2687167 - RNA, 19 nt, Artificial Sequence
  Description of Artificial Sequence: Synthetic oligonucleotide
caacuaccaugcaaguuau

SEQ ID NO: 2687168 - RNA, 19 nt, Artificial Sequence
  Description of Artificial Sequence: Synthetic oligonucleotide
acgguauauccuggaaguu

SEQ ID NO: 2687169 - RNA, 19 nt, Artificial Sequence
  Description of Artificial Sequence: Synthetic oligonucleotide
ccacugugaugaaaaguca

SEQ ID NO: 2687170 - RNA, 19 nt, Artificial Sequence
  Description of Artificial Sequence: Synthetic oligonucleotide
cagccgugccucacuugac

SEQ ID NO: 2687171 - RNA, 19 nt, Artificial Sequence
  Description of Artificial Sequence: Synthetic oligonucleotide
agaggacuuucgacuggcu

SEQ ID NO: 2687172 - RNA, 19 nt, Artificial Sequence
  Description of Artificial Sequence: Synthetic oligonucleotide
guggagcugucccgaccug

SEQ ID NO: 2687173 - RNA, 19 nt, Artificial Sequence
  Description of Artificial Sequence: Synthetic oligonucleotide
cgugccucacuugacuugc

SEQ ID NO: 2687174 - RNA, 19 nt, Artificial Sequence
  Description of Artificial Sequence: Synthetic oligonucleotide
agggcucacuccacugcug

SEQ ID NO: 2687175 - RNA, 19 nt, Artificial Sequence
  Description of Artificial Sequence: Synthetic oligonucleotide
caucguccucuucuuggaa

SEQ ID NO: 2687176 - RNA, 19 nt, Artificial Sequence
  Description of Artificial Sequence: Synthetic oligonucleotide
cagcagagaagggagggcu

SEQ ID NO: 2687177 - RNA, 19 nt, Artificial Sequence
  Description of Artificial Sequence: Synthetic oligonucleotide
ucacuccacugcugcuuuu

SEQ ID NO: 2687178 - RNA, 19 nt, Artificial Sequence
  Description of Artificial Sequence: Synthetic oligonucleotide
cugaugcacuguugucuaa

SEQ ID NO: 2687179 - RNA, 19 nt, Artificial Sequence
  Description of Artificial Sequence: Synthetic oligonucleotide
cagcauacuuucacacggu

SEQ ID NO: 2687180 - RNA, 19 nt, Artificial Sequence
  Description of Artificial Sequence: Synthetic oligonucleotide
ccugguggacagccgugcc

SEQ ID NO: 2687181 - RNA, 19 nt, Artificial Sequence
  Description of Artificial Sequence: Synthetic oligonucleotide
ccuuugaacuaccuuuacu

SEQ ID NO: 2687182 - RNA, 19 nt, Artificial Sequence
  Description of Artificial Sequence: Synthetic oligonucleotide
ccgugccucacuugacuug

SEQ ID NO: 2687183 - RNA, 19 nt, Artificial Sequence
  Description of Artificial Sequence: Synthetic oligonucleotide
guggacagccgugccucac

SEQ ID NO: 2687184 - RNA, 19 nt, Artificial Sequence
  Description of Artificial Sequence: Synthetic oligonucleotide
cgaccuguccucaugaccu

SEQ ID NO: 2687185 - RNA, 19 nt, Artificial Sequence
  Description of Artificial Sequence: Synthetic oligonucleotide
ccaugcaaguuauguacua

SEQ ID NO: 2687186 - RNA, 19 nt, Artificial Sequence
  Description of Artificial Sequence: Synthetic oligonucleotide
cuucaguaucagcacucau

SEQ ID NO: 2687187 - RNA, 19 nt, Artificial Sequence
  Description of Artificial Sequence: Synthetic oligonucleotide
gaguucuagcucggacaaa

SEQ ID NO: 2687188 - RNA, 19 nt, Artificial Sequence
  Description of Artificial Sequence: Synthetic oligonucleotide
ccucaugaccuuugaacua

SEQ ID NO: 2687189 - RNA, 19 nt, Artificial Sequence
  Description of Artificial Sequence: Synthetic oligonucleotide
gagcuacuggagguguccu

SEQ ID NO: 2687190 - RNA, 19 nt, Artificial Sequence
  Description of Artificial Sequence: Synthetic oligonucleotide
ggagcugucccgaccuguc

SEQ ID NO: 2687191 - RNA, 19 nt, Artificial Sequence
  Description of Artificial Sequence: Synthetic oligonucleotide
cagggcucacuccacugcu

SEQ ID NO: 2687192 - RNA, 19 nt, Artificial Sequence
  Description of Artificial Sequence: Synthetic oligonucleotide
agggagggcugggcacagg

SEQ ID NO: 2687193 - RNA, 19 nt, Artificial Sequence
  Description of Artificial Sequence: Synthetic oligonucleotide
guggagcuacuggaggugu

SEQ ID NO: 2687194 - RNA, 19 nt, Artificial Sequence
  Description of Artificial Sequence: Synthetic oligonucleotide
agucacugguggagcuacu

SEQ ID NO: 2687195 - RNA, 19 nt, Artificial Sequence
  Description of Artificial Sequence: Synthetic oligonucleotide
cacuugagauguccuuggu

SEQ ID NO: 2687196 - RNA, 19 nt, Artificial Sequence
  Description of Artificial Sequence: Synthetic oligonucleotide
gcauacuuucacacgguau

SEQ ID NO: 2687197 - RNA, 19 nt, Artificial Sequence
  Description of Artificial Sequence: Synthetic oligonucleotide
cugcacuguuuggagauau

SEQ ID NO: 2687198 - RNA, 19 nt, Artificial Sequence
  Description of Artificial Sequence: Synthetic oligonucleotide
guauauccuggaaguuuau

SEQ ID NO: 2687199 - RNA, 19 nt, Artificial Sequence
  Description of Artificial Sequence: Synthetic oligonucleotide
ggacuuucgacuggcuccu

SEQ ID NO: 2687200 - RNA, 19 nt, Artificial Sequence
  Description of Artificial Sequence: Synthetic oligonucleotide
ccuaugggaagucuucaau

SEQ ID NO: 2687201 - RNA, 19 nt, Artificial Sequence
  Description of Artificial Sequence: Synthetic oligonucleotide
ggaagucagcugaugcacu

SEQ ID NO: 2687202 - RNA, 19 nt, Artificial Sequence
  Description of Artificial Sequence: Synthetic oligonucleotide
ggcacagggcucacuccac

SEQ ID NO: 2687203 - RNA, 19 nt, Artificial Sequence
  Description of Artificial Sequence: Synthetic oligonucleotide
ccagaauccuaugggaagu

SEQ ID NO: 2687204 - RNA, 19 nt, Artificial Sequence
  Description of Artificial Sequence: Synthetic oligonucleotide
gguggacagccgugccuca

SEQ ID NO: 2687205 - RNA, 19 nt, Artificial Sequence
  Description of Artificial Sequence: Synthetic oligonucleotide
cccgaccuguccucaugac

SEQ ID NO: 2687206 - RNA, 19 nt, Artificial Sequence
  Description of Artificial Sequence: Synthetic oligonucleotide
gaccuguccucaugaccuu

SEQ ID NO: 2687207 - RNA, 19 nt, Artificial Sequence
  Description of Artificial Sequence: Synthetic oligonucleotide
guucuagcucggacaaauu

SEQ ID NO: 2687208 - RNA, 19 nt, Artificial Sequence
  Description of Artificial Sequence: Synthetic oligonucleotide
gcacagggcucacuccacu

SEQ ID NO: 2687209 - RNA, 19 nt, Artificial Sequence
  Description of Artificial Sequence: Synthetic oligonucleotide
cuccuacuuuaaguuuagu

SEQ ID NO: 2687210 - RNA, 19 nt, Artificial Sequence
  Description of Artificial Sequence: Synthetic oligonucleotide
ggcuuuucucagaggacuu

SEQ ID NO: 2687211 - RNA, 19 nt, Artificial Sequence
  Description of Artificial Sequence: Synthetic oligonucleotide
gacuuucgacuggcuccua

SEQ ID NO: 2687212 - RNA, 19 nt, Artificial Sequence
  Description of Artificial Sequence: Synthetic oligonucleotide
ccuugaguucuagcucgga

SEQ ID NO: 2687213 - RNA, 19 nt, Artificial Sequence
  Description of Artificial Sequence: Synthetic oligonucleotide
ggacagccgugccucacuu

SEQ ID NO: 2687214 - RNA, 19 nt, Artificial Sequence
  Description of Artificial Sequence: Synthetic oligonucleotide
gccgugccucacuugacuu

SEQ ID NO: 2687215 - RNA, 19 nt, Artificial Sequence
  Description of Artificial Sequence: Synthetic oligonucleotide
gcucacuccacugcugcuu

SEQ ID NO: 2687216 - RNA, 19 nt, Artificial Sequence
  Description of Artificial Sequence: Synthetic oligonucleotide
ccuuggugacuggcuuuuc

SEQ ID NO: 2687217 - RNA, 19 nt, Artificial Sequence
  Description of Artificial Sequence: Synthetic oligonucleotide
cgguauauccuggaaguuu

SEQ ID NO: 2687218 - RNA, 19 nt, Artificial Sequence
  Description of Artificial Sequence: Synthetic oligonucleotide
cgacuggcuccuacuuuaa

SEQ ID NO: 2687219 - RNA, 19 nt, Artificial Sequence
  Description of Artificial Sequence: Synthetic oligonucleotide
ggcugggcacagggcucac

SEQ ID NO: 2687220 - RNA, 19 nt, Artificial Sequence
  Description of Artificial Sequence: Synthetic oligonucleotide
gcugggcacagggcucacu

SEQ ID NO: 2687221 - RNA, 19 nt, Artificial Sequence
  Description of Artificial Sequence: Synthetic oligonucleotide
gaagacaccauucagagcg

SEQ ID NO: 2687222 - RNA, 19 nt, Artificial Sequence
  Description of Artificial Sequence: Synthetic oligonucleotide
gauaggaaggcacagagcc

SEQ ID NO: 2687223 - RNA, 19 nt, Artificial Sequence
  Description of Artificial Sequence: Synthetic oligonucleotide
agcaguguaacuuuccugc

SEQ ID NO: 2687224 - RNA, 19 nt, Artificial Sequence
  Description of Artificial Sequence: Synthetic oligonucleotide
uuggcuaggaagaucaggg

SEQ ID NO: 2687225 - RNA, 19 nt, Artificial Sequence
  Description of Artificial Sequence: Synthetic oligonucleotide
auucaccacauccucaucc

SEQ ID NO: 2687226 - RNA, 19 nt, Artificial Sequence
  Description of Artificial Sequence: Synthetic oligonucleotide
  modified_base (19)..(19): a, c, u, g, unknown or other
aacuaguacaucuugcagn

SEQ ID NO: 2687227 - RNA, 19 nt, Artificial Sequence
  Description of Artificial Sequence: Synthetic oligonucleotide
gguagaagaaaucuggacg

SEQ ID NO: 2687228 - RNA, 19 nt, Artificial Sequence
  Description of Artificial Sequence: Synthetic oligonucleotide
aaugcaaaggaggaguguc

SEQ ID NO: 2687229 - RNA, 19 nt, Artificial Sequence
  Description of Artificial Sequence: Synthetic oligonucleotide
ugcaugucaggucagagug

SEQ ID NO: 2687230 - RNA, 19 nt, Artificial Sequence
  Description of Artificial Sequence: Synthetic oligonucleotide
uaacuuuccugccagguag

SEQ ID NO: 2687231 - RNA, 19 nt, Artificial Sequence
  Description of Artificial Sequence: Synthetic oligonucleotide
gaaguauucggccuccacg

SEQ ID NO: 2687232 - RNA, 19 nt, Artificial Sequence
  Description of Artificial Sequence: Synthetic oligonucleotide
aagaaaucuggacguggcc

SEQ ID NO: 2687233 - RNA, 19 nt, Artificial Sequence
  Description of Artificial Sequence: Synthetic oligonucleotide
gaaaggagggagcagcucg

SEQ ID NO: 2687234 - RNA, 19 nt, Artificial Sequence
  Description of Artificial Sequence: Synthetic oligonucleotide
  modified_base (18)..(18): a, c, u, g, unknown or other
acuaguacaucuugcagng

SEQ ID NO: 2687235 - RNA, 19 nt, Artificial Sequence
  Description of Artificial Sequence: Synthetic oligonucleotide
  modified_base (16)..(16): a, c, u, g, unknown or other
uaguacaucuugcagnggu

SEQ ID NO: 2687236 - RNA, 19 nt, Artificial Sequence
  Description of Artificial Sequence: Synthetic oligonucleotide
ugcaauuacagcugcgagg

SEQ ID NO: 2687237 - RNA, 19 nt, Artificial Sequence
  Description of Artificial Sequence: Synthetic oligonucleotide
uagaaggaagcaaaggcca

SEQ ID NO: 2687238 - RNA, 19 nt, Artificial Sequence
  Description of Artificial Sequence: Synthetic oligonucleotide
acaaugcaauuacagcugc

SEQ ID NO: 2687239 - RNA, 19 nt, Artificial Sequence
  Description of Artificial Sequence: Synthetic oligonucleotide
agcugcgaggaguagaggc

SEQ ID NO: 2687240 - RNA, 19 nt, Artificial Sequence
  Description of Artificial Sequence: Synthetic oligonucleotide
gagaaaugcaaugacaaac

SEQ ID NO: 2687241 - RNA, 19 nt, Artificial Sequence
  Description of Artificial Sequence: Synthetic oligonucleotide
aaugacaaacauggggacg

SEQ ID NO: 2687242 - RNA, 19 nt, Artificial Sequence
  Description of Artificial Sequence: Synthetic oligonucleotide
aaguauucggccuccacgu

SEQ ID NO: 2687243 - RNA, 19 nt, Artificial Sequence
  Description of Artificial Sequence: Synthetic oligonucleotide
gugaagacaccauucagag

SEQ ID NO: 2687244 - RNA, 19 nt, Artificial Sequence
  Description of Artificial Sequence: Synthetic oligonucleotide
aaagcaguguaacuuuccu

SEQ ID NO: 2687245 - RNA, 19 nt, Artificial Sequence
  Description of Artificial Sequence: Synthetic oligonucleotide
ugugguguaaagcagugua

SEQ ID NO: 2687246 - RNA, 19 nt, Artificial Sequence
  Description of Artificial Sequence: Synthetic oligonucleotide
uccgucucuggaaaggagg

SEQ ID NO: 2687247 - RNA, 19 nt, Artificial Sequence
  Description of Artificial Sequence: Synthetic oligonucleotide
aguguaacuuuccugccag

SEQ ID NO: 2687248 - RNA, 19 nt, Artificial Sequence
  Description of Artificial Sequence: Synthetic oligonucleotide
aaugcaauuacagcugcga

SEQ ID NO: 2687249 - RNA, 19 nt, Artificial Sequence
  Description of Artificial Sequence: Synthetic oligonucleotide
augacaaacauggggacgg

SEQ ID NO: 2687250 - RNA, 19 nt, Artificial Sequence
  Description of Artificial Sequence: Synthetic oligonucleotide
cuuguagucacacgugcgg

SEQ ID NO: 2687251 - RNA, 19 nt, Artificial Sequence
  Description of Artificial Sequence: Synthetic oligonucleotide
aauuacagcugcgaggagu

SEQ ID NO: 2687252 - RNA, 19 nt, Artificial Sequence
  Description of Artificial Sequence: Synthetic oligonucleotide
aaaugcaaugacaaacaug

SEQ ID NO: 2687253 - RNA, 19 nt, Artificial Sequence
  Description of Artificial Sequence: Synthetic oligonucleotide
uggagugagaaaugcaaug

SEQ ID NO: 2687254 - RNA, 19 nt, Artificial Sequence
  Description of Artificial Sequence: Synthetic oligonucleotide
uacggguuccgguagagcc

SEQ ID NO: 2687255 - RNA, 19 nt, Artificial Sequence
  Description of Artificial Sequence: Synthetic oligonucleotide
aacuuggcuaggaagauca

SEQ ID NO: 2687256 - RNA, 19 nt, Artificial Sequence
  Description of Artificial Sequence: Synthetic oligonucleotide
uucuucagaaacuuggcua

SEQ ID NO: 2687257 - RNA, 19 nt, Artificial Sequence
  Description of Artificial Sequence: Synthetic oligonucleotide
uauucggccuccacguacg

SEQ ID NO: 2687258 - RNA, 19 nt, Artificial Sequence
  Description of Artificial Sequence: Synthetic oligonucleotide
acaguggagugagaaaugc

SEQ ID NO: 2687259 - RNA, 19 nt, Artificial Sequence
  Description of Artificial Sequence: Synthetic oligonucleotide
aggaagaucagggacagug

SEQ ID NO: 2687260 - RNA, 19 nt, Artificial Sequence
  Description of Artificial Sequence: Synthetic oligonucleotide
acaccauucagagcgaggg

SEQ ID NO: 2687261 - RNA, 19 nt, Artificial Sequence
  Description of Artificial Sequence: Synthetic oligonucleotide
cccacuaucaguuucacug

SEQ ID NO: 2687262 - RNA, 19 nt, Artificial Sequence
  Description of Artificial Sequence: Synthetic oligonucleotide
guagaaggaagcaaaggcc

SEQ ID NO: 2687263 - RNA, 19 nt, Artificial Sequence
  Description of Artificial Sequence: Synthetic oligonucleotide
uuccgguagagccacagcu

SEQ ID NO: 2687264 - RNA, 19 nt, Artificial Sequence
  Description of Artificial Sequence: Synthetic oligonucleotide
uuggugaagacaccauuca

SEQ ID NO: 2687265 - RNA, 19 nt, Artificial Sequence
  Description of Artificial Sequence: Synthetic oligonucleotide
aggccagaccagcaaaugc

SEQ ID NO: 2687266 - RNA, 19 nt, Artificial Sequence
  Description of Artificial Sequence: Synthetic oligonucleotide
ugcuuguagucacacgugc

SEQ ID NO: 2687267 - RNA, 19 nt, Artificial Sequence
  Description of Artificial Sequence: Synthetic oligonucleotide
uguaaagcaguguaacuuu

SEQ ID NO: 2687268 - RNA, 19 nt, Artificial Sequence
  Description of Artificial Sequence: Synthetic oligonucleotide
cagaccagcaaaugcaaag

SEQ ID NO: 2687269 - RNA, 19 nt, Artificial Sequence
  Description of Artificial Sequence: Synthetic oligonucleotide
aaggccgccguccccauuc

SEQ ID NO: 2687270 - RNA, 19 nt, Artificial Sequence
  Description of Artificial Sequence: Synthetic oligonucleotide
aguagaggcgauaggaagg

SEQ ID NO: 2687271 - RNA, 19 nt, Artificial Sequence
  Description of Artificial Sequence: Synthetic oligonucleotide
uuggugucagcuuucuuca

SEQ ID NO: 2687272 - RNA, 19 nt, Artificial Sequence
  Description of Artificial Sequence: Synthetic oligonucleotide
gacaaugcaauuacagcug

SEQ ID NO: 2687273 - RNA, 19 nt, Artificial Sequence
  Description of Artificial Sequence: Synthetic oligonucleotide
accauucagagcgagggcg

SEQ ID NO: 2687274 - RNA, 19 nt, Artificial Sequence
  Description of Artificial Sequence: Synthetic oligonucleotide
gaaaucuggacguggccug

SEQ ID NO: 2687275 - RNA, 19 nt, Artificial Sequence
  Description of Artificial Sequence: Synthetic oligonucleotide
ggaagcaaaggccagacca

SEQ ID NO: 2687276 - RNA, 19 nt, Artificial Sequence
  Description of Artificial Sequence: Synthetic oligonucleotide
ugcgggacaaugcaauuac

SEQ ID NO: 2687277 - RNA, 19 nt, Artificial Sequence
  Description of Artificial Sequence: Synthetic oligonucleotide
  modified_base (8)..(8): a, c, u, g, unknown or other
cuugcagnggugcuuguag

SEQ ID NO: 2687278 - RNA, 19 nt, Artificial Sequence
  Description of Artificial Sequence: Synthetic oligonucleotide
uccaagauuuccccggccu

SEQ ID NO: 2687279 - RNA, 19 nt, Artificial Sequence
  Description of Artificial Sequence: Synthetic oligonucleotide
agaccagcaaaugcaaagg

SEQ ID NO: 2687280 - RNA, 19 nt, Artificial Sequence
  Description of Artificial Sequence: Synthetic oligonucleotide
aggaggaguguccacuggg

SEQ ID NO: 2687281 - RNA, 19 nt, Artificial Sequence
  Description of Artificial Sequence: Synthetic oligonucleotide
aaaucuggacguggccugc

SEQ ID NO: 2687282 - RNA, 19 nt, Artificial Sequence
  Description of Artificial Sequence: Synthetic oligonucleotide
aaggaggaguguccacugg

SEQ ID NO: 2687283 - RNA, 19 nt, Artificial Sequence
  Description of Artificial Sequence: Synthetic oligonucleotide
aaacuuggcuaggaagauc

SEQ ID NO: 2687284 - RNA, 19 nt, Artificial Sequence
  Description of Artificial Sequence: Synthetic oligonucleotide
gaagaucagggacagugga

SEQ ID NO: 2687285 - RNA, 19 nt, Artificial Sequence
  Description of Artificial Sequence: Synthetic oligonucleotide
gagugagaaaugcaaugac

SEQ ID NO: 2687286 - RNA, 19 nt, Artificial Sequence
  Description of Artificial Sequence: Synthetic oligonucleotide
agcucggucaccaggaagg

SEQ ID NO: 2687287 - RNA, 19 nt, Artificial Sequence
  Description of Artificial Sequence: Synthetic oligonucleotide
aucagggaagcaccgguag

SEQ ID NO: 2687288 - RNA, 19 nt, Artificial Sequence
  Description of Artificial Sequence: Synthetic oligonucleotide
augcaauuacagcugcgag

SEQ ID NO: 2687289 - RNA, 19 nt, Artificial Sequence
  Description of Artificial Sequence: Synthetic oligonucleotide
agaaaucuggacguggccu

SEQ ID NO: 2687290 - RNA, 19 nt, Artificial Sequence
  Description of Artificial Sequence: Synthetic oligonucleotide
uguaacuuuccugccaggu

SEQ ID NO: 2687291 - RNA, 19 nt, Artificial Sequence
  Description of Artificial Sequence: Synthetic oligonucleotide
caaaugcaaaggaggagug

SEQ ID NO: 2687292 - RNA, 19 nt, Artificial Sequence
  Description of Artificial Sequence: Synthetic oligonucleotide
caaacauggggacgguggg

SEQ ID NO: 2687293 - RNA, 19 nt, Artificial Sequence
  Description of Artificial Sequence: Synthetic oligonucleotide
agaggcgauaggaaggcac

SEQ ID NO: 2687294 - RNA, 19 nt, Artificial Sequence
  Description of Artificial Sequence: Synthetic oligonucleotide
  modified_base (14)..(14): a, c, u, g, unknown or other
guacaucuugcagnggugc

SEQ ID NO: 2687295 - RNA, 19 nt, Artificial Sequence
  Description of Artificial Sequence: Synthetic oligonucleotide
cuugugguguaaagcagug

SEQ ID NO: 2687296 - RNA, 19 nt, Artificial Sequence
  Description of Artificial Sequence: Synthetic oligonucleotide
caaugacaaacauggggac

SEQ ID NO: 2687297 - RNA, 19 nt, Artificial Sequence
  Description of Artificial Sequence: Synthetic oligonucleotide
acgguggggaaguauucgg

SEQ ID NO: 2687298 - RNA, 19 nt, Artificial Sequence
  Description of Artificial Sequence: Synthetic oligonucleotide
uguccacuggggaagcucu

SEQ ID NO: 2687299 - RNA, 19 nt, Artificial Sequence
  Description of Artificial Sequence: Synthetic oligonucleotide
aaaggagggagcagcucgg

SEQ ID NO: 2687300 - RNA, 19 nt, Artificial Sequence
  Description of Artificial Sequence: Synthetic oligonucleotide
aagaucagggacaguggag

SEQ ID NO: 2687301 - RNA, 19 nt, Artificial Sequence
  Description of Artificial Sequence: Synthetic oligonucleotide
ucucuggaaaggagggagc

SEQ ID NO: 2687302 - RNA, 19 nt, Artificial Sequence
  Description of Artificial Sequence: Synthetic oligonucleotide
ucacgcucagcuccgcucc

SEQ ID NO: 2687303 - RNA, 19 nt, Artificial Sequence
  Description of Artificial Sequence: Synthetic oligonucleotide
uucagagcgagggcgaggc

SEQ ID NO: 2687304 - RNA, 19 nt, Artificial Sequence
  Description of Artificial Sequence: Synthetic oligonucleotide
gggacaaugcaauuacagc

SEQ ID NO: 2687305 - RNA, 19 nt, Artificial Sequence
  Description of Artificial Sequence: Synthetic oligonucleotide
ugaagacaccauucagagc

SEQ ID NO: 2687306 - RNA, 19 nt, Artificial Sequence
  Description of Artificial Sequence: Synthetic oligonucleotide
uguagucacacgugcggga

SEQ ID NO: 2687307 - RNA, 19 nt, Artificial Sequence
  Description of Artificial Sequence: Synthetic oligonucleotide
aaaugcaaaggaggagugu

SEQ ID NO: 2687308 - RNA, 19 nt, Artificial Sequence
  Description of Artificial Sequence: Synthetic oligonucleotide
caaugcaauuacagcugcg

SEQ ID NO: 2687309 - RNA, 19 nt, Artificial Sequence
  Description of Artificial Sequence: Synthetic oligonucleotide
agaucagggacaguggagu

SEQ ID NO: 2687310 - RNA, 19 nt, Artificial Sequence
  Description of Artificial Sequence: Synthetic oligonucleotide
ugugcaugucaggucagag

SEQ ID NO: 2687311 - RNA, 19 nt, Artificial Sequence
  Description of Artificial Sequence: Synthetic oligonucleotide
agugggccagcccaucagg

SEQ ID NO: 2687312 - RNA, 19 nt, Artificial Sequence
  Description of Artificial Sequence: Synthetic oligonucleotide
aggacccucacgcucagcu

SEQ ID NO: 2687313 - RNA, 19 nt, Artificial Sequence
  Description of Artificial Sequence: Synthetic oligonucleotide
aaucuggacguggccugcc

SEQ ID NO: 2687314 - RNA, 19 nt, Artificial Sequence
  Description of Artificial Sequence: Synthetic oligonucleotide
  modified_base (13)..(13): a, c, u, g, unknown or other
uacaucuugcagnggugcu

SEQ ID NO: 2687315 - RNA, 19 nt, Artificial Sequence
  Description of Artificial Sequence: Synthetic oligonucleotide
ggacaaugcaauuacagcu

SEQ ID NO: 2687316 - RNA, 19 nt, Artificial Sequence
  Description of Artificial Sequence: Synthetic oligonucleotide
ucggccuccacguacgggu

SEQ ID NO: 2687317 - RNA, 19 nt, Artificial Sequence
  Description of Artificial Sequence: Synthetic oligonucleotide
augcaaaggaggagugucc

SEQ ID NO: 2687318 - RNA, 19 nt, Artificial Sequence
  Description of Artificial Sequence: Synthetic oligonucleotide
gaggaguagaggcgauagg

SEQ ID NO: 2687319 - RNA, 19 nt, Artificial Sequence
  Description of Artificial Sequence: Synthetic oligonucleotide
uucagaaacuuggcuagga

SEQ ID NO: 2687320 - RNA, 19 nt, Artificial Sequence
  Description of Artificial Sequence: Synthetic oligonucleotide
ugucguuggugucagcuuu

SEQ ID NO: 2687321 - RNA, 19 nt, Artificial Sequence
  Description of Artificial Sequence: Synthetic oligonucleotide
  modified_base (7)..(7): a, c, u, g, unknown or other
uugcagnggugcuuguagu

SEQ ID NO: 2687322 - RNA, 19 nt, Artificial Sequence
  Description of Artificial Sequence: Synthetic oligonucleotide
accagcaaaugcaaaggag

SEQ ID NO: 2687323 - RNA, 19 nt, Artificial Sequence
  Description of Artificial Sequence: Synthetic oligonucleotide
gcaaugacaaacaugggga

SEQ ID NO: 2687324 - RNA, 19 nt, Artificial Sequence
  Description of Artificial Sequence: Synthetic oligonucleotide
gucagagugggccagccca

SEQ ID NO: 2687325 - RNA, 19 nt, Artificial Sequence
  Description of Artificial Sequence: Synthetic oligonucleotide
uagagccacagcuccucgg

SEQ ID NO: 2687326 - RNA, 19 nt, Artificial Sequence
  Description of Artificial Sequence: Synthetic oligonucleotide
agcaaaugcaaaggaggag

SEQ ID NO: 2687327 - RNA, 19 nt, Artificial Sequence
  Description of Artificial Sequence: Synthetic oligonucleotide
gcgauaggaaggcacagag

SEQ ID NO: 2687328 - RNA, 19 nt, Artificial Sequence
  Description of Artificial Sequence: Synthetic oligonucleotide
ucagcuccgcucccaaggc

SEQ ID NO: 2687329 - RNA, 19 nt, Artificial Sequence
  Description of Artificial Sequence: Synthetic oligonucleotide
uggaaaggagggagcagcu

SEQ ID NO: 2687330 - RNA, 19 nt, Artificial Sequence
  Description of Artificial Sequence: Synthetic oligonucleotide
gaucagggacaguggagug

SEQ ID NO: 2687331 - RNA, 19 nt, Artificial Sequence
  Description of Artificial Sequence: Synthetic oligonucleotide
cacacgugcgggacaaugc

SEQ ID NO: 2687332 - RNA, 19 nt, Artificial Sequence
  Description of Artificial Sequence: Synthetic oligonucleotide
acccaacuaguacaucuug

SEQ ID NO: 2687333 - RNA, 19 nt, Artificial Sequence
  Description of Artificial Sequence: Synthetic oligonucleotide
uggggaagcucuuccggcc

SEQ ID NO: 2687334 - RNA, 19 nt, Artificial Sequence
  Description of Artificial Sequence: Synthetic oligonucleotide
ucagggaagcaccgguaga

SEQ ID NO: 2687335 - RNA, 19 nt, Artificial Sequence
  Description of Artificial Sequence: Synthetic oligonucleotide
  modified_base (6)..(6): a, c, u, g, unknown or other
ugcagnggugcuuguaguc

SEQ ID NO: 2687336 - RNA, 19 nt, Artificial Sequence
  Description of Artificial Sequence: Synthetic oligonucleotide
gaccagcaaaugcaaagga

SEQ ID NO: 2687337 - RNA, 19 nt, Artificial Sequence
  Description of Artificial Sequence: Synthetic oligonucleotide
guauucggccuccacguac

SEQ ID NO: 2687338 - RNA, 19 nt, Artificial Sequence
  Description of Artificial Sequence: Synthetic oligonucleotide
guagaggcgauaggaaggc

SEQ ID NO: 2687339 - RNA, 19 nt, Artificial Sequence
  Description of Artificial Sequence: Synthetic oligonucleotide
aucuggacguggccugccc

SEQ ID NO: 2687340 - RNA, 19 nt, Artificial Sequence
  Description of Artificial Sequence: Synthetic oligonucleotide
  modified_base (4)..(4): a, c, u, g, unknown or other
cagnggugcuuguagucac

SEQ ID NO: 2687341 - RNA, 19 nt, Artificial Sequence
  Description of Artificial Sequence: Synthetic oligonucleotide
uccucauccccugugcaug

SEQ ID NO: 2687342 - RNA, 19 nt, Artificial Sequence
  Description of Artificial Sequence: Synthetic oligonucleotide
aaggccagaccagcaaaug

SEQ ID NO: 2687343 - RNA, 19 nt, Artificial Sequence
  Description of Artificial Sequence: Synthetic oligonucleotide
acagcugcgaggaguagag

SEQ ID NO: 2687344 - RNA, 19 nt, Artificial Sequence
  Description of Artificial Sequence: Synthetic oligonucleotide
acacgugcgggacaaugca

SEQ ID NO: 2687345 - RNA, 19 nt, Artificial Sequence
  Description of Artificial Sequence: Synthetic oligonucleotide
gguggggaaguauucggcc

SEQ ID NO: 2687346 - RNA, 19 nt, Artificial Sequence
  Description of Artificial Sequence: Synthetic oligonucleotide
ggcuaggaagaucagggac

SEQ ID NO: 2687347 - RNA, 19 nt, Artificial Sequence
  Description of Artificial Sequence: Synthetic oligonucleotide
uccgguagagccacagcuc

SEQ ID NO: 2687348 - RNA, 19 nt, Artificial Sequence
  Description of Artificial Sequence: Synthetic oligonucleotide
agccuccaagauuuccccg

SEQ ID NO: 2687349 - RNA, 19 nt, Artificial Sequence
  Description of Artificial Sequence: Synthetic oligonucleotide
ucacacgugcgggacaaug

SEQ ID NO: 2687350 - RNA, 19 nt, Artificial Sequence
  Description of Artificial Sequence: Synthetic oligonucleotide
uccacguacggguuccggu

SEQ ID NO: 2687351 - RNA, 19 nt, Artificial Sequence
  Description of Artificial Sequence: Synthetic oligonucleotide
gacaguggagugagaaaug

SEQ ID NO: 2687352 - RNA, 19 nt, Artificial Sequence
  Description of Artificial Sequence: Synthetic oligonucleotide
uacagcugcgaggaguaga

SEQ ID NO: 2687353 - RNA, 19 nt, Artificial Sequence
  Description of Artificial Sequence: Synthetic oligonucleotide
  modified_base (11)..(11): a, c, u, g, unknown or other
caucuugcagnggugcuug

SEQ ID NO: 2687354 - RNA, 19 nt, Artificial Sequence
  Description of Artificial Sequence: Synthetic oligonucleotide
cacuaucaguuucacugug

SEQ ID NO: 2687355 - RNA, 19 nt, Artificial Sequence
  Description of Artificial Sequence: Synthetic oligonucleotide
caccgguagaagaaaucug

SEQ ID NO: 2687356 - RNA, 19 nt, Artificial Sequence
  Description of Artificial Sequence: Synthetic oligonucleotide
agaaggaagcaaaggccag

SEQ ID NO: 2687357 - RNA, 19 nt, Artificial Sequence
  Description of Artificial Sequence: Synthetic oligonucleotide
gcccucauucaccacaucc

SEQ ID NO: 2687358 - RNA, 19 nt, Artificial Sequence
  Description of Artificial Sequence: Synthetic oligonucleotide
uggauccgucucuggaaag

SEQ ID NO: 2687359 - RNA, 19 nt, Artificial Sequence
  Description of Artificial Sequence: Synthetic oligonucleotide
ggugcuuguagucacacgu

SEQ ID NO: 2687360 - RNA, 19 nt, Artificial Sequence
  Description of Artificial Sequence: Synthetic oligonucleotide
aggaguguccacuggggaa

SEQ ID NO: 2687361 - RNA, 19 nt, Artificial Sequence
  Description of Artificial Sequence: Synthetic oligonucleotide
guagagccacagcuccucg

SEQ ID NO: 2687362 - RNA, 19 nt, Artificial Sequence
  Description of Artificial Sequence: Synthetic oligonucleotide
uggcuaggaagaucaggga

SEQ ID NO: 2687363 - RNA, 19 nt, Artificial Sequence
  Description of Artificial Sequence: Synthetic oligonucleotide
gaaaugcaaugacaaacau

SEQ ID NO: 2687364 - RNA, 19 nt, Artificial Sequence
  Description of Artificial Sequence: Synthetic oligonucleotide
gccuccaagauuuccccgg

SEQ ID NO: 2687365 - RNA, 19 nt, Artificial Sequence
  Description of Artificial Sequence: Synthetic oligonucleotide
aaaggccagaccagcaaau

SEQ ID NO: 2687366 - RNA, 19 nt, Artificial Sequence
  Description of Artificial Sequence: Synthetic oligonucleotide
acaaagagcaggacccuca

SEQ ID NO: 2687367 - RNA, 19 nt, Artificial Sequence
  Description of Artificial Sequence: Synthetic oligonucleotide
ggccuugugguguaaagca

SEQ ID NO: 2687368 - RNA, 19 nt, Artificial Sequence
  Description of Artificial Sequence: Synthetic oligonucleotide
aagauuuccccggccuugu

SEQ ID NO: 2687369 - RNA, 19 nt, Artificial Sequence
  Description of Artificial Sequence: Synthetic oligonucleotide
ucaggucagagugggccag

SEQ ID NO: 2687370 - RNA, 19 nt, Artificial Sequence
  Description of Artificial Sequence: Synthetic oligonucleotide
agcaccgguagaagaaauc

SEQ ID NO: 2687371 - RNA, 19 nt, Artificial Sequence
  Description of Artificial Sequence: Synthetic oligonucleotide
gagugggccagcccaucag

SEQ ID NO: 2687372 - RNA, 19 nt, Artificial Sequence
  Description of Artificial Sequence: Synthetic oligonucleotide
gaggaguguccacugggga

SEQ ID NO: 2687373 - RNA, 19 nt, Artificial Sequence
  Description of Artificial Sequence: Synthetic oligonucleotide
caagauuuccccggccuug

SEQ ID NO: 2687374 - RNA, 19 nt, Artificial Sequence
  Description of Artificial Sequence: Synthetic oligonucleotide
aggagggagcagcucgguc

SEQ ID NO: 2687375 - RNA, 19 nt, Artificial Sequence
  Description of Artificial Sequence: Synthetic oligonucleotide
guaaagcaguguaacuuuc

SEQ ID NO: 2687376 - RNA, 19 nt, Artificial Sequence
  Description of Artificial Sequence: Synthetic oligonucleotide
ggagugagaaaugcaauga

SEQ ID NO: 2687377 - RNA, 19 nt, Artificial Sequence
  Description of Artificial Sequence: Synthetic oligonucleotide
ggagggagcagcucgguca

SEQ ID NO: 2687378 - RNA, 19 nt, Artificial Sequence
  Description of Artificial Sequence: Synthetic oligonucleotide
acuaucaguuucacugugu

SEQ ID NO: 2687379 - RNA, 19 nt, Artificial Sequence
  Description of Artificial Sequence: Synthetic oligonucleotide
cccaacuaguacaucuugc

SEQ ID NO: 2687380 - RNA, 19 nt, Artificial Sequence
  Description of Artificial Sequence: Synthetic oligonucleotide
auuacagcugcgaggagua

SEQ ID NO: 2687381 - RNA, 19 nt, Artificial Sequence
  Description of Artificial Sequence: Synthetic oligonucleotide
gagggagcagcucggucac

SEQ ID NO: 2687382 - RNA, 19 nt, Artificial Sequence
  Description of Artificial Sequence: Synthetic oligonucleotide
ccugccagguagaaggaag

SEQ ID NO: 2687383 - RNA, 19 nt, Artificial Sequence
  Description of Artificial Sequence: Synthetic oligonucleotide
ucacagccaggcaggcuug

SEQ ID NO: 2687384 - RNA, 19 nt, Artificial Sequence
  Description of Artificial Sequence: Synthetic oligonucleotide
ggaguguccacuggggaag

SEQ ID NO: 2687385 - RNA, 19 nt, Artificial Sequence
  Description of Artificial Sequence: Synthetic oligonucleotide
uagucacacgugcgggaca

SEQ ID NO: 2687386 - RNA, 19 nt, Artificial Sequence
  Description of Artificial Sequence: Synthetic oligonucleotide
  modified_base (2)..(2): a, c, u, g, unknown or other
gnggugcuuguagucacac

SEQ ID NO: 2687387 - RNA, 19 nt, Artificial Sequence
  Description of Artificial Sequence: Synthetic oligonucleotide
cuugcugucguugguguca

SEQ ID NO: 2687388 - RNA, 19 nt, Artificial Sequence
  Description of Artificial Sequence: Synthetic oligonucleotide
uggugucagcuuucuucag

SEQ ID NO: 2687389 - RNA, 19 nt, Artificial Sequence
  Description of Artificial Sequence: Synthetic oligonucleotide
ggauccgucucuggaaagg

SEQ ID NO: 2687390 - RNA, 19 nt, Artificial Sequence
  Description of Artificial Sequence: Synthetic oligonucleotide
cuguguuggugaagacacc

SEQ ID NO: 2687391 - RNA, 19 nt, Artificial Sequence
  Description of Artificial Sequence: Synthetic oligonucleotide
agagugggccagcccauca

SEQ ID NO: 2687392 - RNA, 19 nt, Artificial Sequence
  Description of Artificial Sequence: Synthetic oligonucleotide
gagcaggacccucacgcuc

SEQ ID NO: 2687393 - RNA, 19 nt, Artificial Sequence
  Description of Artificial Sequence: Synthetic oligonucleotide
guaacuuuccugccaggua

SEQ ID NO: 2687394 - RNA, 19 nt, Artificial Sequence
  Description of Artificial Sequence: Synthetic oligonucleotide
cucacgcucagcuccgcuc

SEQ ID NO: 2687395 - RNA, 19 nt, Artificial Sequence
  Description of Artificial Sequence: Synthetic oligonucleotide
gaggcgauaggaaggcaca

SEQ ID NO: 2687396 - RNA, 19 nt, Artificial Sequence
  Description of Artificial Sequence: Synthetic oligonucleotide
ucgggcuggauccgucucu

SEQ ID NO: 2687397 - RNA, 19 nt, Artificial Sequence
  Description of Artificial Sequence: Synthetic oligonucleotide
cgggacaaugcaauuacag

SEQ ID NO: 2687398 - RNA, 19 nt, Artificial Sequence
  Description of Artificial Sequence: Synthetic oligonucleotide
cacguacggguuccgguag

SEQ ID NO: 2687399 - RNA, 19 nt, Artificial Sequence
  Description of Artificial Sequence: Synthetic oligonucleotide
gcuuguagucacacgugcg

SEQ ID NO: 2687400 - RNA, 19 nt, Artificial Sequence
  Description of Artificial Sequence: Synthetic oligonucleotide
  modified_base (17)..(17): a, c, u, g, unknown or other
cuaguacaucuugcagngg

SEQ ID NO: 2687401 - RNA, 19 nt, Artificial Sequence
  Description of Artificial Sequence: Synthetic oligonucleotide
gauccgucucuggaaagga

SEQ ID NO: 2687402 - RNA, 19 nt, Artificial Sequence
  Description of Artificial Sequence: Synthetic oligonucleotide
ccaacuaguacaucuugca

SEQ ID NO: 2687403 - RNA, 19 nt, Artificial Sequence
  Description of Artificial Sequence: Synthetic oligonucleotide
guagucacacgugcgggac

SEQ ID NO: 2687404 - RNA, 19 nt, Artificial Sequence
  Description of Artificial Sequence: Synthetic oligonucleotide
aacuuuccugccagguaga

SEQ ID NO: 2687405 - RNA, 19 nt, Artificial Sequence
  Description of Artificial Sequence: Synthetic oligonucleotide
caccauucagagcgagggc

SEQ ID NO: 2687406 - RNA, 19 nt, Artificial Sequence
  Description of Artificial Sequence: Synthetic oligonucleotide
gcugcgaggaguagaggcg

SEQ ID NO: 2687407 - RNA, 19 nt, Artificial Sequence
  Description of Artificial Sequence: Synthetic oligonucleotide
auucggccuccacguacgg

SEQ ID NO: 2687408 - RNA, 19 nt, Artificial Sequence
  Description of Artificial Sequence: Synthetic oligonucleotide
uugcugucguuggugucag

SEQ ID NO: 2687409 - RNA, 19 nt, Artificial Sequence
  Description of Artificial Sequence: Synthetic oligonucleotide
ccgucucuggaaaggaggg

SEQ ID NO: 2687410 - RNA, 19 nt, Artificial Sequence
  Description of Artificial Sequence: Synthetic oligonucleotide
aggcaggcuugcuugcugu

SEQ ID NO: 2687411 - RNA, 19 nt, Artificial Sequence
  Description of Artificial Sequence: Synthetic oligonucleotide
ggaggaguguccacugggg

SEQ ID NO: 2687412 - RNA, 19 nt, Artificial Sequence
  Description of Artificial Sequence: Synthetic oligonucleotide
uucggccuccacguacggg

SEQ ID NO: 2687413 - RNA, 19 nt, Artificial Sequence
  Description of Artificial Sequence: Synthetic oligonucleotide
auccucauccccugugcau

SEQ ID NO: 2687414 - RNA, 19 nt, Artificial Sequence
  Description of Artificial Sequence: Synthetic oligonucleotide
caguguaacuuuccugcca

SEQ ID NO: 2687415 - RNA, 19 nt, Artificial Sequence
  Description of Artificial Sequence: Synthetic oligonucleotide
acguggccugcccacuauc

SEQ ID NO: 2687416 - RNA, 19 nt, Artificial Sequence
  Description of Artificial Sequence: Synthetic oligonucleotide
agacaccauucagagcgag

SEQ ID NO: 2687417 - RNA, 19 nt, Artificial Sequence
  Description of Artificial Sequence: Synthetic oligonucleotide
cuggacguggccugcccac

SEQ ID NO: 2687418 - RNA, 19 nt, Artificial Sequence
  Description of Artificial Sequence: Synthetic oligonucleotide
guuccgguagagccacagc

SEQ ID NO: 2687419 - RNA, 19 nt, Artificial Sequence
  Description of Artificial Sequence: Synthetic oligonucleotide
ggacccaacuaguacaucu

SEQ ID NO: 2687420 - RNA, 19 nt, Artificial Sequence
  Description of Artificial Sequence: Synthetic oligonucleotide
ggugucagcuuucuucaga

SEQ ID NO: 2687421 - RNA, 19 nt, Artificial Sequence
  Description of Artificial Sequence: Synthetic oligonucleotide
gaagcaccgguagaagaaa

SEQ ID NO: 2687422 - RNA, 19 nt, Artificial Sequence
  Description of Artificial Sequence: Synthetic oligonucleotide
guguaaagcaguguaacuu

SEQ ID NO: 2687423 - RNA, 19 nt, Artificial Sequence
  Description of Artificial Sequence: Synthetic oligonucleotide
guuucacuguguuggugaa

SEQ ID NO: 2687424 - RNA, 19 nt, Artificial Sequence
  Description of Artificial Sequence: Synthetic oligonucleotide
caaaggccagaccagcaaa

SEQ ID NO: 2687425 - RNA, 19 nt, Artificial Sequence
  Description of Artificial Sequence: Synthetic oligonucleotide
gcaguguaacuuuccugcc

SEQ ID NO: 2687426 - RNA, 19 nt, Artificial Sequence
  Description of Artificial Sequence: Synthetic oligonucleotide
gcaaaugcaaaggaggagu

SEQ ID NO: 2687427 - RNA, 19 nt, Artificial Sequence
  Description of Artificial Sequence: Synthetic oligonucleotide
cauggggacgguggggaag

SEQ ID NO: 2687428 - RNA, 19 nt, Artificial Sequence
  Description of Artificial Sequence: Synthetic oligonucleotide
gugcuuguagucacacgug

SEQ ID NO: 2687429 - RNA, 19 nt, Artificial Sequence
  Description of Artificial Sequence: Synthetic oligonucleotide
gcgagggcgaggcucacag

SEQ ID NO: 2687430 - RNA, 19 nt, Artificial Sequence
  Description of Artificial Sequence: Synthetic oligonucleotide
aagcaccgguagaagaaau

SEQ ID NO: 2687431 - RNA, 19 nt, Artificial Sequence
  Description of Artificial Sequence: Synthetic oligonucleotide
ccgguagagccacagcucc

SEQ ID NO: 2687432 - RNA, 19 nt, Artificial Sequence
  Description of Artificial Sequence: Synthetic oligonucleotide
uccgcucccaaggccgccg

SEQ ID NO: 2687433 - RNA, 19 nt, Artificial Sequence
  Description of Artificial Sequence: Synthetic oligonucleotide
cauucagagcgagggcgag

SEQ ID NO: 2687434 - RNA, 19 nt, Artificial Sequence
  Description of Artificial Sequence: Synthetic oligonucleotide
aggcgauaggaaggcacag

SEQ ID NO: 2687435 - RNA, 19 nt, Artificial Sequence
  Description of Artificial Sequence: Synthetic oligonucleotide
agcaggacccucacgcuca

SEQ ID NO: 2687436 - RNA, 19 nt, Artificial Sequence
  Description of Artificial Sequence: Synthetic oligonucleotide
cagagcgagggcgaggcuc

SEQ ID NO: 2687437 - RNA, 19 nt, Artificial Sequence
  Description of Artificial Sequence: Synthetic oligonucleotide
cugcccacuaucaguuuca

SEQ ID NO: 2687438 - RNA, 19 nt, Artificial Sequence
  Description of Artificial Sequence: Synthetic oligonucleotide
agucacacgugcgggacaa

SEQ ID NO: 2687439 - RNA, 19 nt, Artificial Sequence
  Description of Artificial Sequence: Synthetic oligonucleotide
cucuggaaaggagggagca

SEQ ID NO: 2687440 - RNA, 19 nt, Artificial Sequence
  Description of Artificial Sequence: Synthetic oligonucleotide
uuacagcugcgaggaguag

SEQ ID NO: 2687441 - RNA, 19 nt, Artificial Sequence
  Description of Artificial Sequence: Synthetic oligonucleotide
ggaaguauucggccuccac

SEQ ID NO: 2687442 - RNA, 19 nt, Artificial Sequence
  Description of Artificial Sequence: Synthetic oligonucleotide
  modified_base (9)..(9): a, c, u, g, unknown or other
ucuugcagnggugcuugua

SEQ ID NO: 2687443 - RNA, 19 nt, Artificial Sequence
  Description of Artificial Sequence: Synthetic oligonucleotide
gggaagcaccgguagaaga

SEQ ID NO: 2687444 - RNA, 19 nt, Artificial Sequence
  Description of Artificial Sequence: Synthetic oligonucleotide
gguguaaagcaguguaacu

SEQ ID NO: 2687445 - RNA, 19 nt, Artificial Sequence
  Description of Artificial Sequence: Synthetic oligonucleotide
uuccccggccuuguggugu

SEQ ID NO: 2687446 - RNA, 19 nt, Artificial Sequence
  Description of Artificial Sequence: Synthetic oligonucleotide
aaggagggagcagcucggu

SEQ ID NO: 2687447 - RNA, 19 nt, Artificial Sequence
  Description of Artificial Sequence: Synthetic oligonucleotide
  modified_base (12)..(12): a, c, u, g, unknown or other
acaucuugcagnggugcuu

SEQ ID NO: 2687448 - RNA, 19 nt, Artificial Sequence
  Description of Artificial Sequence: Synthetic oligonucleotide
agauuuccccggccuugug

SEQ ID NO: 2687449 - RNA, 19 nt, Artificial Sequence
  Description of Artificial Sequence: Synthetic oligonucleotide
auccgucucuggaaaggag

SEQ ID NO: 2687450 - RNA, 19 nt, Artificial Sequence
  Description of Artificial Sequence: Synthetic oligonucleotide
ggccagaccagcaaaugca

SEQ ID NO: 2687451 - RNA, 19 nt, Artificial Sequence
  Description of Artificial Sequence: Synthetic oligonucleotide
aguauucggccuccacgua

SEQ ID NO: 2687452 - RNA, 19 nt, Artificial Sequence
  Description of Artificial Sequence: Synthetic oligonucleotide
ucguuggugucagcuuucu

SEQ ID NO: 2687453 - RNA, 19 nt, Artificial Sequence
  Description of Artificial Sequence: Synthetic oligonucleotide
gaaacuuggcuaggaagau

SEQ ID NO: 2687454 - RNA, 19 nt, Artificial Sequence
  Description of Artificial Sequence: Synthetic oligonucleotide
auggggacgguggggaagu

SEQ ID NO: 2687455 - RNA, 19 nt, Artificial Sequence
  Description of Artificial Sequence: Synthetic oligonucleotide
agcucuuccggcccucauu

SEQ ID NO: 2687456 - RNA, 19 nt, Artificial Sequence
  Description of Artificial Sequence: Synthetic oligonucleotide
cucccaaggccgccguccc

SEQ ID NO: 2687457 - RNA, 19 nt, Artificial Sequence
  Description of Artificial Sequence: Synthetic oligonucleotide
gguuccgguagagccacag

SEQ ID NO: 2687458 - RNA, 19 nt, Artificial Sequence
  Description of Artificial Sequence: Synthetic oligonucleotide
agagcgagggcgaggcuca

SEQ ID NO: 2687459 - RNA, 19 nt, Artificial Sequence
  Description of Artificial Sequence: Synthetic oligonucleotide
cgguagaagaaaucuggac

SEQ ID NO: 2687460 - RNA, 19 nt, Artificial Sequence
  Description of Artificial Sequence: Synthetic oligonucleotide
cauccucauccccugugca

SEQ ID NO: 2687461 - RNA, 19 nt, Artificial Sequence
  Description of Artificial Sequence: Synthetic oligonucleotide
ggaagcaccgguagaagaa

SEQ ID NO: 2687462 - RNA, 19 nt, Artificial Sequence
  Description of Artificial Sequence: Synthetic oligonucleotide
gcaggcuugcuugcugucg

SEQ ID NO: 2687463 - RNA, 19 nt, Artificial Sequence
  Description of Artificial Sequence: Synthetic oligonucleotide
caggcaggcuugcuugcug

SEQ ID NO: 2687464 - RNA, 19 nt, Artificial Sequence
  Description of Artificial Sequence: Synthetic oligonucleotide
ugacaaacauggggacggu

SEQ ID NO: 2687465 - RNA, 19 nt, Artificial Sequence
  Description of Artificial Sequence: Synthetic oligonucleotide
gugguguaaagcaguguaa

SEQ ID NO: 2687466 - RNA, 19 nt, Artificial Sequence
  Description of Artificial Sequence: Synthetic oligonucleotide
cucggucaccaggaaggcc

SEQ ID NO: 2687467 - RNA, 19 nt, Artificial Sequence
  Description of Artificial Sequence: Synthetic oligonucleotide
gaguguccacuggggaagc

SEQ ID NO: 2687468 - RNA, 19 nt, Artificial Sequence
  Description of Artificial Sequence: Synthetic oligonucleotide
ugcgaggaguagaggcgau

SEQ ID NO: 2687469 - RNA, 19 nt, Artificial Sequence
  Description of Artificial Sequence: Synthetic oligonucleotide
gugcaugucaggucagagu

SEQ ID NO: 2687470 - RNA, 19 nt, Artificial Sequence
  Description of Artificial Sequence: Synthetic oligonucleotide
guggggaaguauucggccu

SEQ ID NO: 2687471 - RNA, 19 nt, Artificial Sequence
  Description of Artificial Sequence: Synthetic oligonucleotide
gcaugucaggucagagugg

SEQ ID NO: 2687472 - RNA, 19 nt, Artificial Sequence
  Description of Artificial Sequence: Synthetic oligonucleotide
acgugcgggacaaugcaau

SEQ ID NO: 2687473 - RNA, 19 nt, Artificial Sequence
  Description of Artificial Sequence: Synthetic oligonucleotide
cagcuccgcucccaaggcc

SEQ ID NO: 2687474 - RNA, 19 nt, Artificial Sequence
  Description of Artificial Sequence: Synthetic oligonucleotide
cagggaagcaccgguagaa

SEQ ID NO: 2687475 - RNA, 19 nt, Artificial Sequence
  Description of Artificial Sequence: Synthetic oligonucleotide
acguacggguuccgguaga

SEQ ID NO: 2687476 - RNA, 19 nt, Artificial Sequence
  Description of Artificial Sequence: Synthetic oligonucleotide
ugcccacuaucaguuucac

SEQ ID NO: 2687477 - RNA, 19 nt, Artificial Sequence
  Description of Artificial Sequence: Synthetic oligonucleotide
gccuugugguguaaagcag

SEQ ID NO: 2687478 - RNA, 19 nt, Artificial Sequence
  Description of Artificial Sequence: Synthetic oligonucleotide
  modified_base (5)..(5): a, c, u, g, unknown or other
gcagnggugcuuguaguca

SEQ ID NO: 2687479 - RNA, 19 nt, Artificial Sequence
  Description of Artificial Sequence: Synthetic oligonucleotide
cuccacguacggguuccgg

SEQ ID NO: 2687480 - RNA, 19 nt, Artificial Sequence
  Description of Artificial Sequence: Synthetic oligonucleotide
gguagagccacagcuccuc

SEQ ID NO: 2687481 - RNA, 19 nt, Artificial Sequence
  Description of Artificial Sequence: Synthetic oligonucleotide
  modified_base (3)..(3): a, c, u, g, unknown or other
agnggugcuuguagucaca

SEQ ID NO: 2687482 - RNA, 19 nt, Artificial Sequence
  Description of Artificial Sequence: Synthetic oligonucleotide
uccucgggcuggauccguc

SEQ ID NO: 2687483 - RNA, 19 nt, Artificial Sequence
  Description of Artificial Sequence: Synthetic oligonucleotide
cgauaggaaggcacagagc

SEQ ID NO: 2687484 - RNA, 19 nt, Artificial Sequence
  Description of Artificial Sequence: Synthetic oligonucleotide
guacggguuccgguagagc

SEQ ID NO: 2687485 - RNA, 19 nt, Artificial Sequence
  Description of Artificial Sequence: Synthetic oligonucleotide
caucagggaagcaccggua

SEQ ID NO: 2687486 - RNA, 19 nt, Artificial Sequence
  Description of Artificial Sequence: Synthetic oligonucleotide
ccugcccacuaucaguuuc

SEQ ID NO: 2687487 - RNA, 19 nt, Artificial Sequence
  Description of Artificial Sequence: Synthetic oligonucleotide
cgaggaguagaggcgauag

SEQ ID NO: 2687488 - RNA, 19 nt, Artificial Sequence
  Description of Artificial Sequence: Synthetic oligonucleotide
acagagccuccaagauuuc

SEQ ID NO: 2687489 - RNA, 19 nt, Artificial Sequence
  Description of Artificial Sequence: Synthetic oligonucleotide
cucgggcuggauccgucuc

SEQ ID NO: 2687490 - RNA, 19 nt, Artificial Sequence
  Description of Artificial Sequence: Synthetic oligonucleotide
cccugugcaugucagguca

SEQ ID NO: 2687491 - RNA, 19 nt, Artificial Sequence
  Description of Artificial Sequence: Synthetic oligonucleotide
ccuccaagauuuccccggc

SEQ ID NO: 2687492 - RNA, 19 nt, Artificial Sequence
  Description of Artificial Sequence: Synthetic oligonucleotide
cugcgaggaguagaggcga

SEQ ID NO: 2687493 - RNA, 19 nt, Artificial Sequence
  Description of Artificial Sequence: Synthetic oligonucleotide
cacgcucagcuccgcuccc

SEQ ID NO: 2687494 - RNA, 19 nt, Artificial Sequence
  Description of Artificial Sequence: Synthetic oligonucleotide
gucguuggugucagcuuuc

SEQ ID NO: 2687495 - RNA, 19 nt, Artificial Sequence
  Description of Artificial Sequence: Synthetic oligonucleotide
gcaccgguagaagaaaucu

SEQ ID NO: 2687496 - RNA, 19 nt, Artificial Sequence
  Description of Artificial Sequence: Synthetic oligonucleotide
ggcuugcuugcugucguug

SEQ ID NO: 2687497 - RNA, 19 nt, Artificial Sequence
  Description of Artificial Sequence: Synthetic oligonucleotide
cacgugcgggacaaugcaa

SEQ ID NO: 2687498 - RNA, 19 nt, Artificial Sequence
  Description of Artificial Sequence: Synthetic oligonucleotide
guggagugagaaaugcaau

SEQ ID NO: 2687499 - RNA, 19 nt, Artificial Sequence
  Description of Artificial Sequence: Synthetic oligonucleotide
ccgguagaagaaaucugga

SEQ ID NO: 2687500 - RNA, 19 nt, Artificial Sequence
  Description of Artificial Sequence: Synthetic oligonucleotide
gugcgggacaaugcaauua

SEQ ID NO: 2687501 - RNA, 19 nt, Artificial Sequence
  Description of Artificial Sequence: Synthetic oligonucleotide
ccggccuugugguguaaag

SEQ ID NO: 2687502 - RNA, 19 nt, Artificial Sequence
  Description of Artificial Sequence: Synthetic oligonucleotide
cagcugcgaggaguagagg

SEQ ID NO: 2687503 - RNA, 19 nt, Artificial Sequence
  Description of Artificial Sequence: Synthetic oligonucleotide
aguguccacuggggaagcu

SEQ ID NO: 2687504 - RNA, 19 nt, Artificial Sequence
  Description of Artificial Sequence: Synthetic oligonucleotide
cgguggggaaguauucggc

SEQ ID NO: 2687505 - RNA, 19 nt, Artificial Sequence
  Description of Artificial Sequence: Synthetic oligonucleotide
ugcugucguuggugucagc

SEQ ID NO: 2687506 - RNA, 19 nt, Artificial Sequence
  Description of Artificial Sequence: Synthetic oligonucleotide
ggaaaggagggagcagcuc

SEQ ID NO: 2687507 - RNA, 19 nt, Artificial Sequence
  Description of Artificial Sequence: Synthetic oligonucleotide
ccugugcaugucaggucag

SEQ ID NO: 2687508 - RNA, 19 nt, Artificial Sequence
  Description of Artificial Sequence: Synthetic oligonucleotide
gcccaucagggaagcaccg

SEQ ID NO: 2687509 - RNA, 19 nt, Artificial Sequence
  Description of Artificial Sequence: Synthetic oligonucleotide
gcugucguuggugucagcu

SEQ ID NO: 2687510 - RNA, 19 nt, Artificial Sequence
  Description of Artificial Sequence: Synthetic oligonucleotide
ccuugugguguaaagcagu

SEQ ID NO: 2687511 - RNA, 19 nt, Artificial Sequence
  Description of Artificial Sequence: Synthetic oligonucleotide
ggcgauaggaaggcacaga

SEQ ID NO: 2687512 - RNA, 19 nt, Artificial Sequence
  Description of Artificial Sequence: Synthetic oligonucleotide
gacccaacuaguacaucuu

SEQ ID NO: 2687513 - RNA, 19 nt, Artificial Sequence
  Description of Artificial Sequence: Synthetic oligonucleotide
ccauucagagcgagggcga

SEQ ID NO: 2687514 - RNA, 19 nt, Artificial Sequence
  Description of Artificial Sequence: Synthetic oligonucleotide
gccagguagaaggaagcaa

SEQ ID NO: 2687515 - RNA, 19 nt, Artificial Sequence
  Description of Artificial Sequence: Synthetic oligonucleotide
caggcuugcuugcugucgu

SEQ ID NO: 2687516 - RNA, 19 nt, Artificial Sequence
  Description of Artificial Sequence: Synthetic oligonucleotide
cugugcaugucaggucaga

SEQ ID NO: 2687517 - RNA, 19 nt, Artificial Sequence
  Description of Artificial Sequence: Synthetic oligonucleotide
gggcuggauccgucucugg

SEQ ID NO: 2687518 - RNA, 19 nt, Artificial Sequence
  Description of Artificial Sequence: Synthetic oligonucleotide
cucuuccggcccucauuca

SEQ ID NO: 2687519 - RNA, 19 nt, Artificial Sequence
  Description of Artificial Sequence: Synthetic oligonucleotide
gccuccacguacggguucc

SEQ ID NO: 2687520 - RNA, 19 nt, Artificial Sequence
  Description of Artificial Sequence: Synthetic oligonucleotide
ggacccucacgcucagcuc

SEQ ID NO: 2687521 - RNA, 19 nt, Artificial Sequence
  Description of Artificial Sequence: Synthetic oligonucleotide
aggcuugcuugcugucguu

SEQ ID NO: 2687522 - RNA, 19 nt, Artificial Sequence
  Description of Artificial Sequence: Synthetic oligonucleotide
gcuugcugucguugguguc

SEQ ID NO: 2687523 - RNA, 19 nt, Artificial Sequence
  Description of Artificial Sequence: Synthetic oligonucleotide
ccgccguccccauuccgcc

SEQ ID NO: 2687524 - RNA, 19 nt, Artificial Sequence
  Description of Artificial Sequence: Synthetic oligonucleotide
gccgccguccccauuccgc

SEQ ID NO: 2687525 - RNA, 19 nt, Artificial Sequence
  Description of Artificial Sequence: Synthetic oligonucleotide
uccccggccuuguggugua

SEQ ID NO: 2687526 - RNA, 19 nt, Artificial Sequence
  Description of Artificial Sequence: Synthetic oligonucleotide
gcucggucaccaggaaggc

SEQ ID NO: 2687527 - RNA, 19 nt, Artificial Sequence
  Description of Artificial Sequence: Synthetic oligonucleotide
gccagaccagcaaaugcaa

SEQ ID NO: 2687528 - RNA, 19 nt, Artificial Sequence
  Description of Artificial Sequence: Synthetic oligonucleotide
ggcaggcuugcuugcuguc

SEQ ID NO: 2687529 - RNA, 19 nt, Artificial Sequence
  Description of Artificial Sequence: Synthetic oligonucleotide
ccggcccucauucaccaca

SEQ ID NO: 2687530 - RNA, 19 nt, Artificial Sequence
  Description of Artificial Sequence: Synthetic oligonucleotide
cucauccccugugcauguc

SEQ ID NO: 2687531 - RNA, 19 nt, Artificial Sequence
  Description of Artificial Sequence: Synthetic oligonucleotide
gcaggacccucacgcucag

SEQ ID NO: 2687532 - RNA, 19 nt, Artificial Sequence
  Description of Artificial Sequence: Synthetic oligonucleotide
agcgagggcgaggcucaca

SEQ ID NO: 2687533 - RNA, 19 nt, Artificial Sequence
  Description of Artificial Sequence: Synthetic oligonucleotide
ggcgaggcucacagccagg

SEQ ID NO: 2687534 - RNA, 19 nt, Artificial Sequence
  Description of Artificial Sequence: Synthetic oligonucleotide
acgcucagcuccgcuccca

SEQ ID NO: 2687535 - RNA, 19 nt, Artificial Sequence
  Description of Artificial Sequence: Synthetic oligonucleotide
ccacuaucaguuucacugu

SEQ ID NO: 2687536 - RNA, 19 nt, Artificial Sequence
  Description of Artificial Sequence: Synthetic oligonucleotide
cuccgcucccaaggccgcc

SEQ ID NO: 2687537 - RNA, 19 nt, Artificial Sequence
  Description of Artificial Sequence: Synthetic oligonucleotide
ggccgccguccccauuccg

SEQ ID NO: 2687538 - RNA, 19 nt, Artificial Sequence
  Description of Artificial Sequence: Synthetic oligonucleotide
ggcucacagccaggcaggc

SEQ ID NO: 2687539 - RNA, 19 nt, Artificial Sequence
  Description of Artificial Sequence: Synthetic oligonucleotide
guguuggugaagacaccau

SEQ ID NO: 2687540 - RNA, 19 nt, Artificial Sequence
  Description of Artificial Sequence: Synthetic oligonucleotide
cugucguuggugucagcuu

SEQ ID NO: 2687541 - RNA, 19 nt, Artificial Sequence
  Description of Artificial Sequence: Synthetic oligonucleotide
gccagcccaucagggaagc

SEQ ID NO: 2687542 - RNA, 19 nt, Artificial Sequence
  Description of Artificial Sequence: Synthetic oligonucleotide
ccacguacggguuccggua

SEQ ID NO: 2687543 - RNA, 19 nt, Artificial Sequence
  Description of Artificial Sequence: Synthetic oligonucleotide
ccccugugcaugucagguc

SEQ ID NO: 2687544 - RNA, 19 nt, Artificial Sequence
  Description of Artificial Sequence: Synthetic oligonucleotide
caggacccucacgcucagc

SEQ ID NO: 2687545 - RNA, 19 nt, Artificial Sequence
  Description of Artificial Sequence: Synthetic oligonucleotide
ggccuccacguacggguuc

SEQ ID NO: 2687546 - RNA, 19 nt, Artificial Sequence
  Description of Artificial Sequence: Synthetic oligonucleotide
gcgggacaaugcaauuaca

SEQ ID NO: 2687547 - RNA, 19 nt, Artificial Sequence
  Description of Artificial Sequence: Synthetic oligonucleotide
cguggccugcccacuauca

SEQ ID NO: 2687548 - RNA, 19 nt, Artificial Sequence
  Description of Artificial Sequence: Synthetic oligonucleotide
gggaaguauucggccucca

SEQ ID NO: 2687549 - RNA, 19 nt, Artificial Sequence
  Description of Artificial Sequence: Synthetic oligonucleotide
ggacguggccugcccacua

SEQ ID NO: 2687550 - RNA, 19 nt, Artificial Sequence
  Description of Artificial Sequence: Synthetic oligonucleotide
gagcgagggcgaggcucac

SEQ ID NO: 2687551 - RNA, 19 nt, Artificial Sequence
  Description of Artificial Sequence: Synthetic oligonucleotide
cggguuccgguagagccac

SEQ ID NO: 2687552 - RNA, 19 nt, Artificial Sequence
  Description of Artificial Sequence: Synthetic oligonucleotide
gcuccgcucccaaggccgc

SEQ ID NO: 2687553 - RNA, 19 nt, Artificial Sequence
  Description of Artificial Sequence: Synthetic oligonucleotide
cccaaggccgccgucccca

SEQ ID NO: 2687554 - RNA, 19 nt, Artificial Sequence
  Description of Artificial Sequence: Synthetic oligonucleotide
uggggacgguggggaagua

SEQ ID NO: 2687555 - RNA, 19 nt, Artificial Sequence
  Description of Artificial Sequence: Synthetic oligonucleotide
ggccugcccacuaucaguu

SEQ ID NO: 2687556 - RNA, 19 nt, Artificial Sequence
  Description of Artificial Sequence: Synthetic oligonucleotide
gcccacuaucaguuucacu

SEQ ID NO: 2687557 - RNA, 19 nt, Artificial Sequence
  Description of Artificial Sequence: Synthetic oligonucleotide
ggcccucauucaccacauc

SEQ ID NO: 2687558 - RNA, 19 nt, Artificial Sequence
  Description of Artificial Sequence: Synthetic oligonucleotide
ccaagauuuccccggccuu

SEQ ID NO: 2687559 - RNA, 19 nt, Artificial Sequence
  Description of Artificial Sequence: Synthetic oligonucleotide
gcgaggaguagaggcgaua

SEQ ID NO: 2687560 - RNA, 19 nt, Artificial Sequence
  Description of Artificial Sequence: Synthetic oligonucleotide
ccucauccccugugcaugu

SEQ ID NO: 2687561 - RNA, 19 nt, Artificial Sequence
  Description of Artificial Sequence: Synthetic oligonucleotide
cgucucuggaaaggaggga

SEQ ID NO: 2687562 - RNA, 19 nt, Artificial Sequence
  Description of Artificial Sequence: Synthetic oligonucleotide
guccacuggggaagcucuu

SEQ ID NO: 2687563 - RNA, 19 nt, Artificial Sequence
  Description of Artificial Sequence: Synthetic oligonucleotide
gucacacgugcgggacaau

SEQ ID NO: 2687564 - RNA, 19 nt, Artificial Sequence
  Description of Artificial Sequence: Synthetic oligonucleotide
ccagcccaucagggaagca

SEQ ID NO: 2687565 - RNA, 19 nt, Artificial Sequence
  Description of Artificial Sequence: Synthetic oligonucleotide
cgugcgggacaaugcaauu

SEQ ID NO: 2687566 - RNA, 19 nt, Artificial Sequence
  Description of Artificial Sequence: Synthetic oligonucleotide
ccaggcaggcuugcuugcu

SEQ ID NO: 2687567 - RNA, 19 nt, Artificial Sequence
  Description of Artificial Sequence: Synthetic oligonucleotide
ggguuccgguagagccaca

SEQ ID NO: 2687568 - RNA, 19 nt, Artificial Sequence
  Description of Artificial Sequence: Synthetic oligonucleotide
cgguagagccacagcuccu

SEQ ID NO: 2687569 - RNA, 19 nt, Artificial Sequence
  Description of Artificial Sequence: Synthetic oligonucleotide
gccugcccacuaucaguuu

SEQ ID NO: 2687570 - RNA, 19 nt, Artificial Sequence
  Description of Artificial Sequence: Synthetic oligonucleotide
caaggccgccguccccauu

SEQ ID NO: 2687571 - RNA, 19 nt, Artificial Sequence
  Description of Artificial Sequence: Synthetic oligonucleotide
cccggccuugugguguaaa

SEQ ID NO: 2687572 - RNA, 19 nt, Artificial Sequence
  Description of Artificial Sequence: Synthetic oligonucleotide
cgcucccaaggccgccguc

SEQ ID NO: 2687573 - RNA, 19 nt, Artificial Sequence
  Description of Artificial Sequence: Synthetic oligonucleotide
cguuggugucagcuuucuu

SEQ ID NO: 2687574 - RNA, 19 nt, Artificial Sequence
  Description of Artificial Sequence: Synthetic oligonucleotide
ccaaggccgccguccccau

SEQ ID NO: 2687575 - RNA, 19 nt, Artificial Sequence
  Description of Artificial Sequence: Synthetic oligonucleotide
ccgcucccaaggccgccgu

SEQ ID NO: 2687576 - RNA, 19 nt, Artificial Sequence
  Description of Artificial Sequence: Synthetic oligonucleotide
cggccuccacguacggguu

SEQ ID NO: 2687577 - RNA, 19 nt, Artificial Sequence
  Description of Artificial Sequence: Synthetic oligonucleotide
ccccggccuugugguguaa

SEQ ID NO: 2687578 - RNA, 19 nt, Artificial Sequence
  Description of Artificial Sequence: Synthetic oligonucleotide
  modified_base (1)..(1): a, c, u, g, unknown or other
nggugcuuguagucacacg

SEQ ID NO: 2687579 - RNA, 19 nt, Artificial Sequence
  Description of Artificial Sequence: Synthetic oligonucleotide
aagaucaucacauuggaac

SEQ ID NO: 2687580 - RNA, 19 nt, Artificial Sequence
  Description of Artificial Sequence: Synthetic oligonucleotide
ucaacuaggacacauaagg

SEQ ID NO: 2687581 - RNA, 19 nt, Artificial Sequence
  Description of Artificial Sequence: Synthetic oligonucleotide
uauuaagauaucuaaaagg

SEQ ID NO: 2687582 - RNA, 19 nt, Artificial Sequence
  Description of Artificial Sequence: Synthetic oligonucleotide
ucaguuuuaacucucaucc

SEQ ID NO: 2687583 - RNA, 19 nt, Artificial Sequence
  Description of Artificial Sequence: Synthetic oligonucleotide
uaagauaucuaaaaggucc

SEQ ID NO: 2687584 - RNA, 19 nt, Artificial Sequence
  Description of Artificial Sequence: Synthetic oligonucleotide
aauuaaucaguauagacau

SEQ ID NO: 2687585 - RNA, 19 nt, Artificial Sequence
  Description of Artificial Sequence: Synthetic oligonucleotide
aaugggguaaaucaucugg

SEQ ID NO: 2687586 - RNA, 19 nt, Artificial Sequence
  Description of Artificial Sequence: Synthetic oligonucleotide
uccaucauuacucucaagg

SEQ ID NO: 2687587 - RNA, 19 nt, Artificial Sequence
  Description of Artificial Sequence: Synthetic oligonucleotide
aaucaucuggcaaagaagc

SEQ ID NO: 2687588 - RNA, 19 nt, Artificial Sequence
  Description of Artificial Sequence: Synthetic oligonucleotide
aaucaguauagacauauug

SEQ ID NO: 2687589 - RNA, 19 nt, Artificial Sequence
  Description of Artificial Sequence: Synthetic oligonucleotide
gaucaaauugcauaggaug

SEQ ID NO: 2687590 - RNA, 19 nt, Artificial Sequence
  Description of Artificial Sequence: Synthetic oligonucleotide
ucuaaaagguccaagaaau

SEQ ID NO: 2687591 - RNA, 19 nt, Artificial Sequence
  Description of Artificial Sequence: Synthetic oligonucleotide
aaauuaaucaguauagaca

SEQ ID NO: 2687592 - RNA, 19 nt, Artificial Sequence
  Description of Artificial Sequence: Synthetic oligonucleotide
aagaaauuaaucaguauag

SEQ ID NO: 2687593 - RNA, 19 nt, Artificial Sequence
  Description of Artificial Sequence: Synthetic oligonucleotide
gauaagaucaucacauugg

SEQ ID NO: 2687594 - RNA, 19 nt, Artificial Sequence
  Description of Artificial Sequence: Synthetic oligonucleotide
gaaauuaaucaguauagac

SEQ ID NO: 2687595 - RNA, 19 nt, Artificial Sequence
  Description of Artificial Sequence: Synthetic oligonucleotide
aaugauaagaucaucacau

SEQ ID NO: 2687596 - RNA, 19 nt, Artificial Sequence
  Description of Artificial Sequence: Synthetic oligonucleotide
acugucuuuaauuggaggg

SEQ ID NO: 2687597 - RNA, 19 nt, Artificial Sequence
  Description of Artificial Sequence: Synthetic oligonucleotide
aucaucaguauccauuggc

SEQ ID NO: 2687598 - RNA, 19 nt, Artificial Sequence
  Description of Artificial Sequence: Synthetic oligonucleotide
aauuacucguuccaggugu

SEQ ID NO: 2687599 - RNA, 19 nt, Artificial Sequence
  Description of Artificial Sequence: Synthetic oligonucleotide
cuuaagaucuucuagcuuc

SEQ ID NO: 2687600 - RNA, 19 nt, Artificial Sequence
  Description of Artificial Sequence: Synthetic oligonucleotide
aguauagacauauugaguu

SEQ ID NO: 2687601 - RNA, 19 nt, Artificial Sequence
  Description of Artificial Sequence: Synthetic oligonucleotide
ugauaagaucaucacauug

SEQ ID NO: 2687602 - RNA, 19 nt, Artificial Sequence
  Description of Artificial Sequence: Synthetic oligonucleotide
ucguuuuauacucccaggg

SEQ ID NO: 2687603 - RNA, 19 nt, Artificial Sequence
  Description of Artificial Sequence: Synthetic oligonucleotide
aacuaggacacauaaggca

SEQ ID NO: 2687604 - RNA, 19 nt, Artificial Sequence
  Description of Artificial Sequence: Synthetic oligonucleotide
uucugaaugggguaaauca

SEQ ID NO: 2687605 - RNA, 19 nt, Artificial Sequence
  Description of Artificial Sequence: Synthetic oligonucleotide
ucgauacucauuuauaaga

SEQ ID NO: 2687606 - RNA, 19 nt, Artificial Sequence
  Description of Artificial Sequence: Synthetic oligonucleotide
cauuucaucaacuaggaca

SEQ ID NO: 2687607 - RNA, 19 nt, Artificial Sequence
  Description of Artificial Sequence: Synthetic oligonucleotide
auuaagauaucuaaaaggu

SEQ ID NO: 2687608 - RNA, 19 nt, Artificial Sequence
  Description of Artificial Sequence: Synthetic oligonucleotide
auuggcucaguuuuaacuc

SEQ ID NO: 2687609 - RNA, 19 nt, Artificial Sequence
  Description of Artificial Sequence: Synthetic oligonucleotide
auuucaucaacuaggacac

SEQ ID NO: 2687610 - RNA, 19 nt, Artificial Sequence
  Description of Artificial Sequence: Synthetic oligonucleotide
aaauugcauaggaugaagc

SEQ ID NO: 2687611 - RNA, 19 nt, Artificial Sequence
  Description of Artificial Sequence: Synthetic oligonucleotide
uaaaucaucuggcaaagaa

SEQ ID NO: 2687612 - RNA, 19 nt, Artificial Sequence
  Description of Artificial Sequence: Synthetic oligonucleotide
gacauauugaguuuucuca

SEQ ID NO: 2687613 - RNA, 19 nt, Artificial Sequence
  Description of Artificial Sequence: Synthetic oligonucleotide
aucacauuggaacugguug

SEQ ID NO: 2687614 - RNA, 19 nt, Artificial Sequence
  Description of Artificial Sequence: Synthetic oligonucleotide
uaagaugaugcacauguac

SEQ ID NO: 2687615 - RNA, 19 nt, Artificial Sequence
  Description of Artificial Sequence: Synthetic oligonucleotide
aguacaauugcuguuauca

SEQ ID NO: 2687616 - RNA, 19 nt, Artificial Sequence
  Description of Artificial Sequence: Synthetic oligonucleotide
ucauuuauaagaugaugca

SEQ ID NO: 2687617 - RNA, 19 nt, Artificial Sequence
  Description of Artificial Sequence: Synthetic oligonucleotide
ugcacauguacgaaaagca

SEQ ID NO: 2687618 - RNA, 19 nt, Artificial Sequence
  Description of Artificial Sequence: Synthetic oligonucleotide
uucaauuacucguuccagg

SEQ ID NO: 2687619 - RNA, 19 nt, Artificial Sequence
  Description of Artificial Sequence: Synthetic oligonucleotide
aacugucuuuaauuggagg

SEQ ID NO: 2687620 - RNA, 19 nt, Artificial Sequence
  Description of Artificial Sequence: Synthetic oligonucleotide
cuuucuugugaucaaauug

SEQ ID NO: 2687621 - RNA, 19 nt, Artificial Sequence
  Description of Artificial Sequence: Synthetic oligonucleotide
aagacguugccguuucugg

SEQ ID NO: 2687622 - RNA, 19 nt, Artificial Sequence
  Description of Artificial Sequence: Synthetic oligonucleotide
auaucuaaaagguccaaga

SEQ ID NO: 2687623 - RNA, 19 nt, Artificial Sequence
  Description of Artificial Sequence: Synthetic oligonucleotide
agguccaagaaauuaauca

SEQ ID NO: 2687624 - RNA, 19 nt, Artificial Sequence
  Description of Artificial Sequence: Synthetic oligonucleotide
gaugaagccguucaaugcc

SEQ ID NO: 2687625 - RNA, 19 nt, Artificial Sequence
  Description of Artificial Sequence: Synthetic oligonucleotide
uuaaucaguauagacauau

SEQ ID NO: 2687626 - RNA, 19 nt, Artificial Sequence
  Description of Artificial Sequence: Synthetic oligonucleotide
uguuucugaaaccucucag

SEQ ID NO: 2687627 - RNA, 19 nt, Artificial Sequence
  Description of Artificial Sequence: Synthetic oligonucleotide
uuuggaucauuucaauuac

SEQ ID NO: 2687628 - RNA, 19 nt, Artificial Sequence
  Description of Artificial Sequence: Synthetic oligonucleotide
ucucguuuuauacucccag

SEQ ID NO: 2687629 - RNA, 19 nt, Artificial Sequence
  Description of Artificial Sequence: Synthetic oligonucleotide
aguuuuaacucucaucccu

SEQ ID NO: 2687630 - RNA, 19 nt, Artificial Sequence
  Description of Artificial Sequence: Synthetic oligonucleotide
uccuuauuaagauaucuaa

SEQ ID NO: 2687631 - RNA, 19 nt, Artificial Sequence
  Description of Artificial Sequence: Synthetic oligonucleotide
uguuucaagacguugccgu

SEQ ID NO: 2687632 - RNA, 19 nt, Artificial Sequence
  Description of Artificial Sequence: Synthetic oligonucleotide
aaaucaucuggcaaagaag

SEQ ID NO: 2687633 - RNA, 19 nt, Artificial Sequence
  Description of Artificial Sequence: Synthetic oligonucleotide
agacauauugaguuuucuc

SEQ ID NO: 2687634 - RNA, 19 nt, Artificial Sequence
  Description of Artificial Sequence: Synthetic oligonucleotide
acgaaaagcagcuuaagau

SEQ ID NO: 2687635 - RNA, 19 nt, Artificial Sequence
  Description of Artificial Sequence: Synthetic oligonucleotide
auugcauaggaugaagccg

SEQ ID NO: 2687636 - RNA, 19 nt, Artificial Sequence
  Description of Artificial Sequence: Synthetic oligonucleotide
ucuauaaucuguccuccug

SEQ ID NO: 2687637 - RNA, 19 nt, Artificial Sequence
  Description of Artificial Sequence: Synthetic oligonucleotide
uuaagauaucuaaaagguc

SEQ ID NO: 2687638 - RNA, 19 nt, Artificial Sequence
  Description of Artificial Sequence: Synthetic oligonucleotide
uaaucuguccuccugugac

SEQ ID NO: 2687639 - RNA, 19 nt, Artificial Sequence
  Description of Artificial Sequence: Synthetic oligonucleotide
uauccauuggcucaguuuu

SEQ ID NO: 2687640 - RNA, 19 nt, Artificial Sequence
  Description of Artificial Sequence: Synthetic oligonucleotide
uuuuguccaguacaauugc

SEQ ID NO: 2687641 - RNA, 19 nt, Artificial Sequence
  Description of Artificial Sequence: Synthetic oligonucleotide
aaagaagcaaggcaauuuu

SEQ ID NO: 2687642 - RNA, 19 nt, Artificial Sequence
  Description of Artificial Sequence: Synthetic oligonucleotide
gaucauuucaauuacucgu

SEQ ID NO: 2687643 - RNA, 19 nt, Artificial Sequence
  Description of Artificial Sequence: Synthetic oligonucleotide
augcacauguacgaaaagc

SEQ ID NO: 2687644 - RNA, 19 nt, Artificial Sequence
  Description of Artificial Sequence: Synthetic oligonucleotide
aaggcagcuaucuuucucu

SEQ ID NO: 2687645 - RNA, 19 nt, Artificial Sequence
  Description of Artificial Sequence: Synthetic oligonucleotide
auuucaauuacucguucca

SEQ ID NO: 2687646 - RNA, 19 nt, Artificial Sequence
  Description of Artificial Sequence: Synthetic oligonucleotide
cacauguacgaaaagcagc

SEQ ID NO: 2687647 - RNA, 19 nt, Artificial Sequence
  Description of Artificial Sequence: Synthetic oligonucleotide
ugaaugggguaaaucaucu

SEQ ID NO: 2687648 - RNA, 19 nt, Artificial Sequence
  Description of Artificial Sequence: Synthetic oligonucleotide
ucaauuacucguuccaggu

SEQ ID NO: 2687649 - RNA, 19 nt, Artificial Sequence
  Description of Artificial Sequence: Synthetic oligonucleotide
gaauauuucaucuguauau

SEQ ID NO: 2687650 - RNA, 19 nt, Artificial Sequence
  Description of Artificial Sequence: Synthetic oligonucleotide
gauacucauuuauaagaug

SEQ ID NO: 2687651 - RNA, 19 nt, Artificial Sequence
  Description of Artificial Sequence: Synthetic oligonucleotide
auuucaucuguauauuccu

SEQ ID NO: 2687652 - RNA, 19 nt, Artificial Sequence
  Description of Artificial Sequence: Synthetic oligonucleotide
uacgaaaagcagcuuaaga

SEQ ID NO: 2687653 - RNA, 19 nt, Artificial Sequence
  Description of Artificial Sequence: Synthetic oligonucleotide
uaucuaaaagguccaagaa

SEQ ID NO: 2687654 - RNA, 19 nt, Artificial Sequence
  Description of Artificial Sequence: Synthetic oligonucleotide
uggaucauuucaauuacuc

SEQ ID NO: 2687655 - RNA, 19 nt, Artificial Sequence
  Description of Artificial Sequence: Synthetic oligonucleotide
uggaccuccaucauuacuc

SEQ ID NO: 2687656 - RNA, 19 nt, Artificial Sequence
  Description of Artificial Sequence: Synthetic oligonucleotide
ucaucaguauccauuggcu

SEQ ID NO: 2687657 - RNA, 19 nt, Artificial Sequence
  Description of Artificial Sequence: Synthetic oligonucleotide
uucucuucucguuuuauac

SEQ ID NO: 2687658 - RNA, 19 nt, Artificial Sequence
  Description of Artificial Sequence: Synthetic oligonucleotide
cauucauuucaucaacuag

SEQ ID NO: 2687659 - RNA, 19 nt, Artificial Sequence
  Description of Artificial Sequence: Synthetic oligonucleotide
auacucauuuauaagauga

SEQ ID NO: 2687660 - RNA, 19 nt, Artificial Sequence
  Description of Artificial Sequence: Synthetic oligonucleotide
aauuuuggaucauuucaau

SEQ ID NO: 2687661 - RNA, 19 nt, Artificial Sequence
  Description of Artificial Sequence: Synthetic oligonucleotide
ucacauuggaacugguugc

SEQ ID NO: 2687662 - RNA, 19 nt, Artificial Sequence
  Description of Artificial Sequence: Synthetic oligonucleotide
gaaugauaagaucaucaca

SEQ ID NO: 2687663 - RNA, 19 nt, Artificial Sequence
  Description of Artificial Sequence: Synthetic oligonucleotide
uucauuuuguccaguacaa

SEQ ID NO: 2687664 - RNA, 19 nt, Artificial Sequence
  Description of Artificial Sequence: Synthetic oligonucleotide
aagggcgaaugauaagauc

SEQ ID NO: 2687665 - RNA, 19 nt, Artificial Sequence
  Description of Artificial Sequence: Synthetic oligonucleotide
auaagaucaucacauugga

SEQ ID NO: 2687666 - RNA, 19 nt, Artificial Sequence
  Description of Artificial Sequence: Synthetic oligonucleotide
uuguccaguacaauugcug

SEQ ID NO: 2687667 - RNA, 19 nt, Artificial Sequence
  Description of Artificial Sequence: Synthetic oligonucleotide
agaagcaaggcaauuuugg

SEQ ID NO: 2687668 - RNA, 19 nt, Artificial Sequence
  Description of Artificial Sequence: Synthetic oligonucleotide
uugccgaacaucauguaac

SEQ ID NO: 2687669 - RNA, 19 nt, Artificial Sequence
  Description of Artificial Sequence: Synthetic oligonucleotide
aaugcccugacuuuccaaa

SEQ ID NO: 2687670 - RNA, 19 nt, Artificial Sequence
  Description of Artificial Sequence: Synthetic oligonucleotide
cauuucaauuacucguucc

SEQ ID NO: 2687671 - RNA, 19 nt, Artificial Sequence
  Description of Artificial Sequence: Synthetic oligonucleotide
ucucagcuguuucaagacg

SEQ ID NO: 2687672 - RNA, 19 nt, Artificial Sequence
  Description of Artificial Sequence: Synthetic oligonucleotide
uguacgaaaagcagcuuaa

SEQ ID NO: 2687673 - RNA, 19 nt, Artificial Sequence
  Description of Artificial Sequence: Synthetic oligonucleotide
aagaucuucuagcuucucu

SEQ ID NO: 2687674 - RNA, 19 nt, Artificial Sequence
  Description of Artificial Sequence: Synthetic oligonucleotide
guuucugaaaccucucagc

SEQ ID NO: 2687675 - RNA, 19 nt, Artificial Sequence
  Description of Artificial Sequence: Synthetic oligonucleotide
aucaguauccauuggcuca

SEQ ID NO: 2687676 - RNA, 19 nt, Artificial Sequence
  Description of Artificial Sequence: Synthetic oligonucleotide
uccaaagggcgaaugauaa

SEQ ID NO: 2687677 - RNA, 19 nt, Artificial Sequence
  Description of Artificial Sequence: Synthetic oligonucleotide
aucuaaaagguccaagaaa

SEQ ID NO: 2687678 - RNA, 19 nt, Artificial Sequence
  Description of Artificial Sequence: Synthetic oligonucleotide
uaagccuuccugaauauuu

SEQ ID NO: 2687679 - RNA, 19 nt, Artificial Sequence
  Description of Artificial Sequence: Synthetic oligonucleotide
aaaagguccaagaaauuaa

SEQ ID NO: 2687680 - RNA, 19 nt, Artificial Sequence
  Description of Artificial Sequence: Synthetic oligonucleotide
agcuguuucaagacguugc

SEQ ID NO: 2687681 - RNA, 19 nt, Artificial Sequence
  Description of Artificial Sequence: Synthetic oligonucleotide
auuuuguccaguacaauug

SEQ ID NO: 2687682 - RNA, 19 nt, Artificial Sequence
  Description of Artificial Sequence: Synthetic oligonucleotide
acaauugcuguuaucauca

SEQ ID NO: 2687683 - RNA, 19 nt, Artificial Sequence
  Description of Artificial Sequence: Synthetic oligonucleotide
acuaggacacauaaggcag

SEQ ID NO: 2687684 - RNA, 19 nt, Artificial Sequence
  Description of Artificial Sequence: Synthetic oligonucleotide
aauugcuguuaucaucagu

SEQ ID NO: 2687685 - RNA, 19 nt, Artificial Sequence
  Description of Artificial Sequence: Synthetic oligonucleotide
ucaaggucucucuugcuug

SEQ ID NO: 2687686 - RNA, 19 nt, Artificial Sequence
  Description of Artificial Sequence: Synthetic oligonucleotide
uacaauugcuguuaucauc

SEQ ID NO: 2687687 - RNA, 19 nt, Artificial Sequence
  Description of Artificial Sequence: Synthetic oligonucleotide
agaugaugcacauguacga

SEQ ID NO: 2687688 - RNA, 19 nt, Artificial Sequence
  Description of Artificial Sequence: Synthetic oligonucleotide
cauaaggcagcuaucuuuc

SEQ ID NO: 2687689 - RNA, 19 nt, Artificial Sequence
  Description of Artificial Sequence: Synthetic oligonucleotide
aucauuacucucaaggucu

SEQ ID NO: 2687690 - RNA, 19 nt, Artificial Sequence
  Description of Artificial Sequence: Synthetic oligonucleotide
ucugaaugggguaaaucau

SEQ ID NO: 2687691 - RNA, 19 nt, Artificial Sequence
  Description of Artificial Sequence: Synthetic oligonucleotide
gucgauacucauuuauaag

SEQ ID NO: 2687692 - RNA, 19 nt, Artificial Sequence
  Description of Artificial Sequence: Synthetic oligonucleotide
ggaucauuucaauuacucg

SEQ ID NO: 2687693 - RNA, 19 nt, Artificial Sequence
  Description of Artificial Sequence: Synthetic oligonucleotide
ugaugcacauguacgaaaa

SEQ ID NO: 2687694 - RNA, 19 nt, Artificial Sequence
  Description of Artificial Sequence: Synthetic oligonucleotide
uaacugucuuuaauuggag

SEQ ID NO: 2687695 - RNA, 19 nt, Artificial Sequence
  Description of Artificial Sequence: Synthetic oligonucleotide
aauauuucaucuguauauu

SEQ ID NO: 2687696 - RNA, 19 nt, Artificial Sequence
  Description of Artificial Sequence: Synthetic oligonucleotide
aucaguauagacauauuga

SEQ ID NO: 2687697 - RNA, 19 nt, Artificial Sequence
  Description of Artificial Sequence: Synthetic oligonucleotide
ucaucuguauauuccuuga

SEQ ID NO: 2687698 - RNA, 19 nt, Artificial Sequence
  Description of Artificial Sequence: Synthetic oligonucleotide
uguccaguacaauugcugu

SEQ ID NO: 2687699 - RNA, 19 nt, Artificial Sequence
  Description of Artificial Sequence: Synthetic oligonucleotide
uuuuaacucucaucccugc

SEQ ID NO: 2687700 - RNA, 19 nt, Artificial Sequence
  Description of Artificial Sequence: Synthetic oligonucleotide
aggaugaagccguucaaug

SEQ ID NO: 2687701 - RNA, 19 nt, Artificial Sequence
  Description of Artificial Sequence: Synthetic oligonucleotide
caucuggcaaagaagcaag

SEQ ID NO: 2687702 - RNA, 19 nt, Artificial Sequence
  Description of Artificial Sequence: Synthetic oligonucleotide
uuucaauuacucguuccag

SEQ ID NO: 2687703 - RNA, 19 nt, Artificial Sequence
  Description of Artificial Sequence: Synthetic oligonucleotide
uguucauuuuguccaguac

SEQ ID NO: 2687704 - RNA, 19 nt, Artificial Sequence
  Description of Artificial Sequence: Synthetic oligonucleotide
cuuucucuauaaucugucc

SEQ ID NO: 2687705 - RNA, 19 nt, Artificial Sequence
  Description of Artificial Sequence: Synthetic oligonucleotide
ucauguaacugucuuuaau

SEQ ID NO: 2687706 - RNA, 19 nt, Artificial Sequence
  Description of Artificial Sequence: Synthetic oligonucleotide
caacuaggacacauaaggc

SEQ ID NO: 2687707 - RNA, 19 nt, Artificial Sequence
  Description of Artificial Sequence: Synthetic oligonucleotide
ugugaucaaauugcauagg

SEQ ID NO: 2687708 - RNA, 19 nt, Artificial Sequence
  Description of Artificial Sequence: Synthetic oligonucleotide
auuacucucaaggucucuc

SEQ ID NO: 2687709 - RNA, 19 nt, Artificial Sequence
  Description of Artificial Sequence: Synthetic oligonucleotide
aucaaauugcauaggauga

SEQ ID NO: 2687710 - RNA, 19 nt, Artificial Sequence
  Description of Artificial Sequence: Synthetic oligonucleotide
uucuggaccuccaucauua

SEQ ID NO: 2687711 - RNA, 19 nt, Artificial Sequence
  Description of Artificial Sequence: Synthetic oligonucleotide
augggguaaaucaucuggc

SEQ ID NO: 2687712 - RNA, 19 nt, Artificial Sequence
  Description of Artificial Sequence: Synthetic oligonucleotide
caucauuacucucaagguc

SEQ ID NO: 2687713 - RNA, 19 nt, Artificial Sequence
  Description of Artificial Sequence: Synthetic oligonucleotide
cucguuuuauacucccagg

SEQ ID NO: 2687714 - RNA, 19 nt, Artificial Sequence
  Description of Artificial Sequence: Synthetic oligonucleotide
cucuucucguuuuauacuc

SEQ ID NO: 2687715 - RNA, 19 nt, Artificial Sequence
  Description of Artificial Sequence: Synthetic oligonucleotide
auugcuguuaucaucagua

SEQ ID NO: 2687716 - RNA, 19 nt, Artificial Sequence
  Description of Artificial Sequence: Synthetic oligonucleotide
acauaaggcagcuaucuuu

SEQ ID NO: 2687717 - RNA, 19 nt, Artificial Sequence
  Description of Artificial Sequence: Synthetic oligonucleotide
agggcgaaugauaagauca

SEQ ID NO: 2687718 - RNA, 19 nt, Artificial Sequence
  Description of Artificial Sequence: Synthetic oligonucleotide
ugcccugacuuuccaaagg

SEQ ID NO: 2687719 - RNA, 19 nt, Artificial Sequence
  Description of Artificial Sequence: Synthetic oligonucleotide
aagguccaagaaauuaauc

SEQ ID NO: 2687720 - RNA, 19 nt, Artificial Sequence
  Description of Artificial Sequence: Synthetic oligonucleotide
ugguugccgaacaucaugu

SEQ ID NO: 2687721 - RNA, 19 nt, Artificial Sequence
  Description of Artificial Sequence: Synthetic oligonucleotide
aacugguugccgaacauca

SEQ ID NO: 2687722 - RNA, 19 nt, Artificial Sequence
  Description of Artificial Sequence: Synthetic oligonucleotide
ucucuucucguuuuauacu

SEQ ID NO: 2687723 - RNA, 19 nt, Artificial Sequence
  Description of Artificial Sequence: Synthetic oligonucleotide
uuaacucucaucccugcuu

SEQ ID NO: 2687724 - RNA, 19 nt, Artificial Sequence
  Description of Artificial Sequence: Synthetic oligonucleotide
acucauuuauaagaugaug

SEQ ID NO: 2687725 - RNA, 19 nt, Artificial Sequence
  Description of Artificial Sequence: Synthetic oligonucleotide
uuuaacucucaucccugcu

SEQ ID NO: 2687726 - RNA, 19 nt, Artificial Sequence
  Description of Artificial Sequence: Synthetic oligonucleotide
agaaauuaaucaguauaga

SEQ ID NO: 2687727 - RNA, 19 nt, Artificial Sequence
  Description of Artificial Sequence: Synthetic oligonucleotide
cugucuuuaauuggagggg

SEQ ID NO: 2687728 - RNA, 19 nt, Artificial Sequence
  Description of Artificial Sequence: Synthetic oligonucleotide
ucuggcaaagaagcaaggc

SEQ ID NO: 2687729 - RNA, 19 nt, Artificial Sequence
  Description of Artificial Sequence: Synthetic oligonucleotide
uauagacauauugaguuuu

SEQ ID NO: 2687730 - RNA, 19 nt, Artificial Sequence
  Description of Artificial Sequence: Synthetic oligonucleotide
uuuguccaguacaauugcu

SEQ ID NO: 2687731 - RNA, 19 nt, Artificial Sequence
  Description of Artificial Sequence: Synthetic oligonucleotide
acauguacgaaaagcagcu

SEQ ID NO: 2687732 - RNA, 19 nt, Artificial Sequence
  Description of Artificial Sequence: Synthetic oligonucleotide
auauugaguuuucucaguu

SEQ ID NO: 2687733 - RNA, 19 nt, Artificial Sequence
  Description of Artificial Sequence: Synthetic oligonucleotide
cugaaugggguaaaucauc

SEQ ID NO: 2687734 - RNA, 19 nt, Artificial Sequence
  Description of Artificial Sequence: Synthetic oligonucleotide
cucucaaggucucucuugc

SEQ ID NO: 2687735 - RNA, 19 nt, Artificial Sequence
  Description of Artificial Sequence: Synthetic oligonucleotide
ccugacuuuccaaagggcg

SEQ ID NO: 2687736 - RNA, 19 nt, Artificial Sequence
  Description of Artificial Sequence: Synthetic oligonucleotide
uucugaaaccucucagcug

SEQ ID NO: 2687737 - RNA, 19 nt, Artificial Sequence
  Description of Artificial Sequence: Synthetic oligonucleotide
ucauuucaauuacucguuc

SEQ ID NO: 2687738 - RNA, 19 nt, Artificial Sequence
  Description of Artificial Sequence: Synthetic oligonucleotide
guuuuauacucccagggcu

SEQ ID NO: 2687739 - RNA, 19 nt, Artificial Sequence
  Description of Artificial Sequence: Synthetic oligonucleotide
agaucuucuagcuucucuu

SEQ ID NO: 2687740 - RNA, 19 nt, Artificial Sequence
  Description of Artificial Sequence: Synthetic oligonucleotide
ucaucuggcaaagaagcaa

SEQ ID NO: 2687741 - RNA, 19 nt, Artificial Sequence
  Description of Artificial Sequence: Synthetic oligonucleotide
aagaagcaaggcaauuuug

SEQ ID NO: 2687742 - RNA, 19 nt, Artificial Sequence
  Description of Artificial Sequence: Synthetic oligonucleotide
uaagaucaucacauuggaa

SEQ ID NO: 2687743 - RNA, 19 nt, Artificial Sequence
  Description of Artificial Sequence: Synthetic oligonucleotide
ucaguauccauuggcucag

SEQ ID NO: 2687744 - RNA, 19 nt, Artificial Sequence
  Description of Artificial Sequence: Synthetic oligonucleotide
aagccuuccugaauauuuc

SEQ ID NO: 2687745 - RNA, 19 nt, Artificial Sequence
  Description of Artificial Sequence: Synthetic oligonucleotide
uacucauuuauaagaugau

SEQ ID NO: 2687746 - RNA, 19 nt, Artificial Sequence
  Description of Artificial Sequence: Synthetic oligonucleotide
caaauugcauaggaugaag

SEQ ID NO: 2687747 - RNA, 19 nt, Artificial Sequence
  Description of Artificial Sequence: Synthetic oligonucleotide
acacauaaggcagcuaucu

SEQ ID NO: 2687748 - RNA, 19 nt, Artificial Sequence
  Description of Artificial Sequence: Synthetic oligonucleotide
caauuuuggaucauuucaa

SEQ ID NO: 2687749 - RNA, 19 nt, Artificial Sequence
  Description of Artificial Sequence: Synthetic oligonucleotide
auguacgaaaagcagcuua

SEQ ID NO: 2687750 - RNA, 19 nt, Artificial Sequence
  Description of Artificial Sequence: Synthetic oligonucleotide
uuggaucauuucaauuacu

SEQ ID NO: 2687751 - RNA, 19 nt, Artificial Sequence
  Description of Artificial Sequence: Synthetic oligonucleotide
uuuauacucccagggcucc

SEQ ID NO: 2687752 - RNA, 19 nt, Artificial Sequence
  Description of Artificial Sequence: Synthetic oligonucleotide
ugcuugguggggucgauac

SEQ ID NO: 2687753 - RNA, 19 nt, Artificial Sequence
  Description of Artificial Sequence: Synthetic oligonucleotide
uucaucaacuaggacacau

SEQ ID NO: 2687754 - RNA, 19 nt, Artificial Sequence
  Description of Artificial Sequence: Synthetic oligonucleotide
gaaaccucucagcuguuuc

SEQ ID NO: 2687755 - RNA, 19 nt, Artificial Sequence
  Description of Artificial Sequence: Synthetic oligonucleotide
ucauuucaucaacuaggac

SEQ ID NO: 2687756 - RNA, 19 nt, Artificial Sequence
  Description of Artificial Sequence: Synthetic oligonucleotide
caaagggcgaaugauaaga

SEQ ID NO: 2687757 - RNA, 19 nt, Artificial Sequence
  Description of Artificial Sequence: Synthetic oligonucleotide
acucucaaggucucucuug

SEQ ID NO: 2687758 - RNA, 19 nt, Artificial Sequence
  Description of Artificial Sequence: Synthetic oligonucleotide
uuccaaagggcgaaugaua

SEQ ID NO: 2687759 - RNA, 19 nt, Artificial Sequence
  Description of Artificial Sequence: Synthetic oligonucleotide
uggaacugguugccgaaca

SEQ ID NO: 2687760 - RNA, 19 nt, Artificial Sequence
  Description of Artificial Sequence: Synthetic oligonucleotide
cucucagcuguuucaagac

SEQ ID NO: 2687761 - RNA, 19 nt, Artificial Sequence
  Description of Artificial Sequence: Synthetic oligonucleotide
uuauaagaugaugcacaug

SEQ ID NO: 2687762 - RNA, 19 nt, Artificial Sequence
  Description of Artificial Sequence: Synthetic oligonucleotide
augaagccguucaaugccc

SEQ ID NO: 2687763 - RNA, 19 nt, Artificial Sequence
  Description of Artificial Sequence: Synthetic oligonucleotide
uuacucucaaggucucucu

SEQ ID NO: 2687764 - RNA, 19 nt, Artificial Sequence
  Description of Artificial Sequence: Synthetic oligonucleotide
cuggcaaagaagcaaggca

SEQ ID NO: 2687765 - RNA, 19 nt, Artificial Sequence
  Description of Artificial Sequence: Synthetic oligonucleotide
ucaaauugcauaggaugaa

SEQ ID NO: 2687766 - RNA, 19 nt, Artificial Sequence
  Description of Artificial Sequence: Synthetic oligonucleotide
uucaagacguugccguuuc

SEQ ID NO: 2687767 - RNA, 19 nt, Artificial Sequence
  Description of Artificial Sequence: Synthetic oligonucleotide
caguuuuaacucucauccc

SEQ ID NO: 2687768 - RNA, 19 nt, Artificial Sequence
  Description of Artificial Sequence: Synthetic oligonucleotide
uuuccaaagggcgaaugau

SEQ ID NO: 2687769 - RNA, 19 nt, Artificial Sequence
  Description of Artificial Sequence: Synthetic oligonucleotide
ggaugaagccguucaaugc

SEQ ID NO: 2687770 - RNA, 19 nt, Artificial Sequence
  Description of Artificial Sequence: Synthetic oligonucleotide
guuuuaacucucaucccug

SEQ ID NO: 2687771 - RNA, 19 nt, Artificial Sequence
  Description of Artificial Sequence: Synthetic oligonucleotide
gaaugggguaaaucaucug

SEQ ID NO: 2687772 - RNA, 19 nt, Artificial Sequence
  Description of Artificial Sequence: Synthetic oligonucleotide
auagacauauugaguuuuc

SEQ ID NO: 2687773 - RNA, 19 nt, Artificial Sequence
  Description of Artificial Sequence: Synthetic oligonucleotide
caaggucucucuugcuugg

SEQ ID NO: 2687774 - RNA, 19 nt, Artificial Sequence
  Description of Artificial Sequence: Synthetic oligonucleotide
caucaguauccauuggcuc

SEQ ID NO: 2687775 - RNA, 19 nt, Artificial Sequence
  Description of Artificial Sequence: Synthetic oligonucleotide
gucucucuugcuugguggg

SEQ ID NO: 2687776 - RNA, 19 nt, Artificial Sequence
  Description of Artificial Sequence: Synthetic oligonucleotide
ugggagcuaagccuuccug

SEQ ID NO: 2687777 - RNA, 19 nt, Artificial Sequence
  Description of Artificial Sequence: Synthetic oligonucleotide
uccaguacaauugcuguua

SEQ ID NO: 2687778 - RNA, 19 nt, Artificial Sequence
  Description of Artificial Sequence: Synthetic oligonucleotide
uucucguuuuauacuccca

SEQ ID NO: 2687779 - RNA, 19 nt, Artificial Sequence
  Description of Artificial Sequence: Synthetic oligonucleotide
cugguugccgaacaucaug

SEQ ID NO: 2687780 - RNA, 19 nt, Artificial Sequence
  Description of Artificial Sequence: Synthetic oligonucleotide
ucaucaacuaggacacaua

SEQ ID NO: 2687781 - RNA, 19 nt, Artificial Sequence
  Description of Artificial Sequence: Synthetic oligonucleotide
uccuccugugaccugaauu

SEQ ID NO: 2687782 - RNA, 19 nt, Artificial Sequence
  Description of Artificial Sequence: Synthetic oligonucleotide
cuugguggggucgauacuc

SEQ ID NO: 2687783 - RNA, 19 nt, Artificial Sequence
  Description of Artificial Sequence: Synthetic oligonucleotide
augaugcacauguacgaaa

SEQ ID NO: 2687784 - RNA, 19 nt, Artificial Sequence
  Description of Artificial Sequence: Synthetic oligonucleotide
ugccgaacaucauguaacu

SEQ ID NO: 2687785 - RNA, 19 nt, Artificial Sequence
  Description of Artificial Sequence: Synthetic oligonucleotide
gaguuuucucaguucuuuc

SEQ ID NO: 2687786 - RNA, 19 nt, Artificial Sequence
  Description of Artificial Sequence: Synthetic oligonucleotide
ucuagcuucucuucucguu

SEQ ID NO: 2687787 - RNA, 19 nt, Artificial Sequence
  Description of Artificial Sequence: Synthetic oligonucleotide
uuguucauuuuguccagua

SEQ ID NO: 2687788 - RNA, 19 nt, Artificial Sequence
  Description of Artificial Sequence: Synthetic oligonucleotide
uagacauauugaguuuucu

SEQ ID NO: 2687789 - RNA, 19 nt, Artificial Sequence
  Description of Artificial Sequence: Synthetic oligonucleotide
caucaacuaggacacauaa

SEQ ID NO: 2687790 - RNA, 19 nt, Artificial Sequence
  Description of Artificial Sequence: Synthetic oligonucleotide
caauuacucguuccaggug

SEQ ID NO: 2687791 - RNA, 19 nt, Artificial Sequence
  Description of Artificial Sequence: Synthetic oligonucleotide
aucaacuaggacacauaag

SEQ ID NO: 2687792 - RNA, 19 nt, Artificial Sequence
  Description of Artificial Sequence: Synthetic oligonucleotide
ucauuacucucaaggucuc

SEQ ID NO: 2687793 - RNA, 19 nt, Artificial Sequence
  Description of Artificial Sequence: Synthetic oligonucleotide
aaagggcgaaugauaagau

SEQ ID NO: 2687794 - RNA, 19 nt, Artificial Sequence
  Description of Artificial Sequence: Synthetic oligonucleotide
cauuggcucaguuuuaacu

SEQ ID NO: 2687795 - RNA, 19 nt, Artificial Sequence
  Description of Artificial Sequence: Synthetic oligonucleotide
acucguuccagguguuucu

SEQ ID NO: 2687796 - RNA, 19 nt, Artificial Sequence
  Description of Artificial Sequence: Synthetic oligonucleotide
guugccgaacaucauguaa

SEQ ID NO: 2687797 - RNA, 19 nt, Artificial Sequence
  Description of Artificial Sequence: Synthetic oligonucleotide
cuguuucaagacguugccg

SEQ ID NO: 2687798 - RNA, 19 nt, Artificial Sequence
  Description of Artificial Sequence: Synthetic oligonucleotide
cacauuggaacugguugcc

SEQ ID NO: 2687799 - RNA, 19 nt, Artificial Sequence
  Description of Artificial Sequence: Synthetic oligonucleotide
uguuaucaucaguauccau

SEQ ID NO: 2687800 - RNA, 19 nt, Artificial Sequence
  Description of Artificial Sequence: Synthetic oligonucleotide
augcccugacuuuccaaag

SEQ ID NO: 2687801 - RNA, 19 nt, Artificial Sequence
  Description of Artificial Sequence: Synthetic oligonucleotide
cugacuuuccaaagggcga

SEQ ID NO: 2687802 - RNA, 19 nt, Artificial Sequence
  Description of Artificial Sequence: Synthetic oligonucleotide
ucucucuugcuuggugggg

SEQ ID NO: 2687803 - RNA, 19 nt, Artificial Sequence
  Description of Artificial Sequence: Synthetic oligonucleotide
cuuuccaaagggcgaauga

SEQ ID NO: 2687804 - RNA, 19 nt, Artificial Sequence
  Description of Artificial Sequence: Synthetic oligonucleotide
uaaucaguauagacauauu

SEQ ID NO: 2687805 - RNA, 19 nt, Artificial Sequence
  Description of Artificial Sequence: Synthetic oligonucleotide
aagccguucaaugcccuga

SEQ ID NO: 2687806 - RNA, 19 nt, Artificial Sequence
  Description of Artificial Sequence: Synthetic oligonucleotide
acaucauguaacugucuuu

SEQ ID NO: 2687807 - RNA, 19 nt, Artificial Sequence
  Description of Artificial Sequence: Synthetic oligonucleotide
uuucuggaccuccaucauu

SEQ ID NO: 2687808 - RNA, 19 nt, Artificial Sequence
  Description of Artificial Sequence: Synthetic oligonucleotide
guuaucaucaguauccauu

SEQ ID NO: 2687809 - RNA, 19 nt, Artificial Sequence
  Description of Artificial Sequence: Synthetic oligonucleotide
ugaagccguucaaugcccu

SEQ ID NO: 2687810 - RNA, 19 nt, Artificial Sequence
  Description of Artificial Sequence: Synthetic oligonucleotide
agacguugccguuucugga

SEQ ID NO: 2687811 - RNA, 19 nt, Artificial Sequence
  Description of Artificial Sequence: Synthetic oligonucleotide
agguguuucugaaaccucu

SEQ ID NO: 2687812 - RNA, 19 nt, Artificial Sequence
  Description of Artificial Sequence: Synthetic oligonucleotide
augauaagaucaucacauu

SEQ ID NO: 2687813 - RNA, 19 nt, Artificial Sequence
  Description of Artificial Sequence: Synthetic oligonucleotide
ggucgauacucauuuauaa

SEQ ID NO: 2687814 - RNA, 19 nt, Artificial Sequence
  Description of Artificial Sequence: Synthetic oligonucleotide
ggguaaaucaucuggcaaa

SEQ ID NO: 2687815 - RNA, 19 nt, Artificial Sequence
  Description of Artificial Sequence: Synthetic oligonucleotide
ucaucacauuggaacuggu

SEQ ID NO: 2687816 - RNA, 19 nt, Artificial Sequence
  Description of Artificial Sequence: Synthetic oligonucleotide
agccuuccugaauauuuca

SEQ ID NO: 2687817 - RNA, 19 nt, Artificial Sequence
  Description of Artificial Sequence: Synthetic oligonucleotide
gaggcguugggagcuaagc

SEQ ID NO: 2687818 - RNA, 19 nt, Artificial Sequence
  Description of Artificial Sequence: Synthetic oligonucleotide
acauuggaacugguugccg

SEQ ID NO: 2687819 - RNA, 19 nt, Artificial Sequence
  Description of Artificial Sequence: Synthetic oligonucleotide
aucauuucaauuacucguu

SEQ ID NO: 2687820 - RNA, 19 nt, Artificial Sequence
  Description of Artificial Sequence: Synthetic oligonucleotide
aucccugcuucugaauggg

SEQ ID NO: 2687821 - RNA, 19 nt, Artificial Sequence
  Description of Artificial Sequence: Synthetic oligonucleotide
cauuggaacugguugccga

SEQ ID NO: 2687822 - RNA, 19 nt, Artificial Sequence
  Description of Artificial Sequence: Synthetic oligonucleotide
uugguggggucgauacuca

SEQ ID NO: 2687823 - RNA, 19 nt, Artificial Sequence
  Description of Artificial Sequence: Synthetic oligonucleotide
gcccugacuuuccaaaggg

SEQ ID NO: 2687824 - RNA, 19 nt, Artificial Sequence
  Description of Artificial Sequence: Synthetic oligonucleotide
guacgaaaagcagcuuaag

SEQ ID NO: 2687825 - RNA, 19 nt, Artificial Sequence
  Description of Artificial Sequence: Synthetic oligonucleotide
gaugaugcacauguacgaa

SEQ ID NO: 2687826 - RNA, 19 nt, Artificial Sequence
  Description of Artificial Sequence: Synthetic oligonucleotide
uaggaugaagccguucaau

SEQ ID NO: 2687827 - RNA, 19 nt, Artificial Sequence
  Description of Artificial Sequence: Synthetic oligonucleotide
gaagccguucaaugcccug

SEQ ID NO: 2687828 - RNA, 19 nt, Artificial Sequence
  Description of Artificial Sequence: Synthetic oligonucleotide
uugaguuuucucaguucuu

SEQ ID NO: 2687829 - RNA, 19 nt, Artificial Sequence
  Description of Artificial Sequence: Synthetic oligonucleotide
cauuuuguccaguacaauu

SEQ ID NO: 2687830 - RNA, 19 nt, Artificial Sequence
  Description of Artificial Sequence: Synthetic oligonucleotide
caauugcuguuaucaucag

SEQ ID NO: 2687831 - RNA, 19 nt, Artificial Sequence
  Description of Artificial Sequence: Synthetic oligonucleotide
gcgaaugauaagaucauca

SEQ ID NO: 2687832 - RNA, 19 nt, Artificial Sequence
  Description of Artificial Sequence: Synthetic oligonucleotide
caagacguugccguuucug

SEQ ID NO: 2687833 - RNA, 19 nt, Artificial Sequence
  Description of Artificial Sequence: Synthetic oligonucleotide
uucuagcuucucuucucgu

SEQ ID NO: 2687834 - RNA, 19 nt, Artificial Sequence
  Description of Artificial Sequence: Synthetic oligonucleotide
acuuuccaaagggcgaaug

SEQ ID NO: 2687835 - RNA, 19 nt, Artificial Sequence
  Description of Artificial Sequence: Synthetic oligonucleotide
cgaaugauaagaucaucac

SEQ ID NO: 2687836 - RNA, 19 nt, Artificial Sequence
  Description of Artificial Sequence: Synthetic oligonucleotide
auaaggcagcuaucuuucu

SEQ ID NO: 2687837 - RNA, 19 nt, Artificial Sequence
  Description of Artificial Sequence: Synthetic oligonucleotide
uccauuggcucaguuuuaa

SEQ ID NO: 2687838 - RNA, 19 nt, Artificial Sequence
  Description of Artificial Sequence: Synthetic oligonucleotide
guguuucugaaaccucuca

SEQ ID NO: 2687839 - RNA, 19 nt, Artificial Sequence
  Description of Artificial Sequence: Synthetic oligonucleotide
agcuaucuuucucuauaau

SEQ ID NO: 2687840 - RNA, 19 nt, Artificial Sequence
  Description of Artificial Sequence: Synthetic oligonucleotide
aucuggcaaagaagcaagg

SEQ ID NO: 2687841 - RNA, 19 nt, Artificial Sequence
  Description of Artificial Sequence: Synthetic oligonucleotide
gaacugguugccgaacauc

SEQ ID NO: 2687842 - RNA, 19 nt, Artificial Sequence
  Description of Artificial Sequence: Synthetic oligonucleotide
aagcagcuuaagaucuucu

SEQ ID NO: 2687843 - RNA, 19 nt, Artificial Sequence
  Description of Artificial Sequence: Synthetic oligonucleotide
aucauguaacugucuuuaa

SEQ ID NO: 2687844 - RNA, 19 nt, Artificial Sequence
  Description of Artificial Sequence: Synthetic oligonucleotide
cugaauauuucaucuguau

SEQ ID NO: 2687845 - RNA, 19 nt, Artificial Sequence
  Description of Artificial Sequence: Synthetic oligonucleotide
uacucguuccagguguuuc

SEQ ID NO: 2687846 - RNA, 19 nt, Artificial Sequence
  Description of Artificial Sequence: Synthetic oligonucleotide
uacucucaaggucucucuu

SEQ ID NO: 2687847 - RNA, 19 nt, Artificial Sequence
  Description of Artificial Sequence: Synthetic oligonucleotide
aaccucucagcuguuucaa

SEQ ID NO: 2687848 - RNA, 19 nt, Artificial Sequence
  Description of Artificial Sequence: Synthetic oligonucleotide
uuucaagacguugccguuu

SEQ ID NO: 2687849 - RNA, 19 nt, Artificial Sequence
  Description of Artificial Sequence: Synthetic oligonucleotide
gcacauguacgaaaagcag

SEQ ID NO: 2687850 - RNA, 19 nt, Artificial Sequence
  Description of Artificial Sequence: Synthetic oligonucleotide
gacacauaaggcagcuauc

SEQ ID NO: 2687851 - RNA, 19 nt, Artificial Sequence
  Description of Artificial Sequence: Synthetic oligonucleotide
ucucaaggucucucuugcu

SEQ ID NO: 2687852 - RNA, 19 nt, Artificial Sequence
  Description of Artificial Sequence: Synthetic oligonucleotide
cucagcuguuucaagacgu

SEQ ID NO: 2687853 - RNA, 19 nt, Artificial Sequence
  Description of Artificial Sequence: Synthetic oligonucleotide
caguauagacauauugagu

SEQ ID NO: 2687854 - RNA, 19 nt, Artificial Sequence
  Description of Artificial Sequence: Synthetic oligonucleotide
ucguuccagguguuucuga

SEQ ID NO: 2687855 - RNA, 19 nt, Artificial Sequence
  Description of Artificial Sequence: Synthetic oligonucleotide
aucuguccuccugugaccu

SEQ ID NO: 2687856 - RNA, 19 nt, Artificial Sequence
  Description of Artificial Sequence: Synthetic oligonucleotide
cagguguuucugaaaccuc

SEQ ID NO: 2687857 - RNA, 19 nt, Artificial Sequence
  Description of Artificial Sequence: Synthetic oligonucleotide
cguuuuauacucccagggc

SEQ ID NO: 2687858 - RNA, 19 nt, Artificial Sequence
  Description of Artificial Sequence: Synthetic oligonucleotide
cauauugaguuuucucagu

SEQ ID NO: 2687859 - RNA, 19 nt, Artificial Sequence
  Description of Artificial Sequence: Synthetic oligonucleotide
aguauccauuggcucaguu

SEQ ID NO: 2687860 - RNA, 19 nt, Artificial Sequence
  Description of Artificial Sequence: Synthetic oligonucleotide
ucuggaccuccaucauuac

SEQ ID NO: 2687861 - RNA, 19 nt, Artificial Sequence
  Description of Artificial Sequence: Synthetic oligonucleotide
agauaucuaaaagguccaa

SEQ ID NO: 2687862 - RNA, 19 nt, Artificial Sequence
  Description of Artificial Sequence: Synthetic oligonucleotide
aucaucuggcaaagaagca

SEQ ID NO: 2687863 - RNA, 19 nt, Artificial Sequence
  Description of Artificial Sequence: Synthetic oligonucleotide
ucccagggcuccuuauuaa

SEQ ID NO: 2687864 - RNA, 19 nt, Artificial Sequence
  Description of Artificial Sequence: Synthetic oligonucleotide
ggacacauaaggcagcuau

SEQ ID NO: 2687865 - RNA, 19 nt, Artificial Sequence
  Description of Artificial Sequence: Synthetic oligonucleotide
gggagcuaagccuuccuga

SEQ ID NO: 2687866 - RNA, 19 nt, Artificial Sequence
  Description of Artificial Sequence: Synthetic oligonucleotide
ugccguuucuggaccucca

SEQ ID NO: 2687867 - RNA, 19 nt, Artificial Sequence
  Description of Artificial Sequence: Synthetic oligonucleotide
caguacaauugcuguuauc

SEQ ID NO: 2687868 - RNA, 19 nt, Artificial Sequence
  Description of Artificial Sequence: Synthetic oligonucleotide
ucucuugcuuggugggguc

SEQ ID NO: 2687869 - RNA, 19 nt, Artificial Sequence
  Description of Artificial Sequence: Synthetic oligonucleotide
ucaagacguugccguuucu

SEQ ID NO: 2687870 - RNA, 19 nt, Artificial Sequence
  Description of Artificial Sequence: Synthetic oligonucleotide
guugggagcuaagccuucc

SEQ ID NO: 2687871 - RNA, 19 nt, Artificial Sequence
  Description of Artificial Sequence: Synthetic oligonucleotide
cgaacaucauguaacuguc

SEQ ID NO: 2687872 - RNA, 19 nt, Artificial Sequence
  Description of Artificial Sequence: Synthetic oligonucleotide
cucuugcuugguggggucg

SEQ ID NO: 2687873 - RNA, 19 nt, Artificial Sequence
  Description of Artificial Sequence: Synthetic oligonucleotide
agggcuccuuauuaagaua

SEQ ID NO: 2687874 - RNA, 19 nt, Artificial Sequence
  Description of Artificial Sequence: Synthetic oligonucleotide
gggguaaaucaucuggcaa

SEQ ID NO: 2687875 - RNA, 19 nt, Artificial Sequence
  Description of Artificial Sequence: Synthetic oligonucleotide
guauagacauauugaguuu

SEQ ID NO: 2687876 - RNA, 19 nt, Artificial Sequence
  Description of Artificial Sequence: Synthetic oligonucleotide
guauccauuggcucaguuu

SEQ ID NO: 2687877 - RNA, 19 nt, Artificial Sequence
  Description of Artificial Sequence: Synthetic oligonucleotide
ggagcuaagccuuccugaa

SEQ ID NO: 2687878 - RNA, 19 nt, Artificial Sequence
  Description of Artificial Sequence: Synthetic oligonucleotide
uuucaucaacuaggacaca

SEQ ID NO: 2687879 - RNA, 19 nt, Artificial Sequence
  Description of Artificial Sequence: Synthetic oligonucleotide
guggggucgauacucauuu

SEQ ID NO: 2687880 - RNA, 19 nt, Artificial Sequence
  Description of Artificial Sequence: Synthetic oligonucleotide
guucuuucuugugaucaaa

SEQ ID NO: 2687881 - RNA, 19 nt, Artificial Sequence
  Description of Artificial Sequence: Synthetic oligonucleotide
ugaaaccucucagcuguuu

SEQ ID NO: 2687882 - RNA, 19 nt, Artificial Sequence
  Description of Artificial Sequence: Synthetic oligonucleotide
uaagaucuucuagcuucuc

SEQ ID NO: 2687883 - RNA, 19 nt, Artificial Sequence
  Description of Artificial Sequence: Synthetic oligonucleotide
guacaauugcuguuaucau

SEQ ID NO: 2687884 - RNA, 19 nt, Artificial Sequence
  Description of Artificial Sequence: Synthetic oligonucleotide
guuccagguguuucugaaa

SEQ ID NO: 2687885 - RNA, 19 nt, Artificial Sequence
  Description of Artificial Sequence: Synthetic oligonucleotide
uuauacucccagggcuccu

SEQ ID NO: 2687886 - RNA, 19 nt, Artificial Sequence
  Description of Artificial Sequence: Synthetic oligonucleotide
guaaaucaucuggcaaaga

SEQ ID NO: 2687887 - RNA, 19 nt, Artificial Sequence
  Description of Artificial Sequence: Synthetic oligonucleotide
auuaaucaguauagacaua

SEQ ID NO: 2687888 - RNA, 19 nt, Artificial Sequence
  Description of Artificial Sequence: Synthetic oligonucleotide
ugcauaggaugaagccguu

SEQ ID NO: 2687889 - RNA, 19 nt, Artificial Sequence
  Description of Artificial Sequence: Synthetic oligonucleotide
cucguuccagguguuucug

SEQ ID NO: 2687890 - RNA, 19 nt, Artificial Sequence
  Description of Artificial Sequence: Synthetic oligonucleotide
ccaaagggcgaaugauaag

SEQ ID NO: 2687891 - RNA, 19 nt, Artificial Sequence
  Description of Artificial Sequence: Synthetic oligonucleotide
acucccagggcuccuuauu

SEQ ID NO: 2687892 - RNA, 19 nt, Artificial Sequence
  Description of Artificial Sequence: Synthetic oligonucleotide
ggcguugggagcuaagccu

SEQ ID NO: 2687893 - RNA, 19 nt, Artificial Sequence
  Description of Artificial Sequence: Synthetic oligonucleotide
uauacucccagggcuccuu

SEQ ID NO: 2687894 - RNA, 19 nt, Artificial Sequence
  Description of Artificial Sequence: Synthetic oligonucleotide
cccugacuuuccaaagggc

SEQ ID NO: 2687895 - RNA, 19 nt, Artificial Sequence
  Description of Artificial Sequence: Synthetic oligonucleotide
cccagggcuccuuauuaag

SEQ ID NO: 2687896 - RNA, 19 nt, Artificial Sequence
  Description of Artificial Sequence: Synthetic oligonucleotide
uacucccagggcuccuuau

SEQ ID NO: 2687897 - RNA, 19 nt, Artificial Sequence
  Description of Artificial Sequence: Synthetic oligonucleotide
cuaaaagguccaagaaauu

SEQ ID NO: 2687898 - RNA, 19 nt, Artificial Sequence
  Description of Artificial Sequence: Synthetic oligonucleotide
ugguggggucgauacucau

SEQ ID NO: 2687899 - RNA, 19 nt, Artificial Sequence
  Description of Artificial Sequence: Synthetic oligonucleotide
gguguuucugaaaccucuc

SEQ ID NO: 2687900 - RNA, 19 nt, Artificial Sequence
  Description of Artificial Sequence: Synthetic oligonucleotide
aggcagcuaucuuucucua

SEQ ID NO: 2687901 - RNA, 19 nt, Artificial Sequence
  Description of Artificial Sequence: Synthetic oligonucleotide
agcuucucuucucguuuua

SEQ ID NO: 2687902 - RNA, 19 nt, Artificial Sequence
  Description of Artificial Sequence: Synthetic oligonucleotide
gcuccuuauuaagauaucu

SEQ ID NO: 2687903 - RNA, 19 nt, Artificial Sequence
  Description of Artificial Sequence: Synthetic oligonucleotide
cagggcuccuuauuaagau

SEQ ID NO: 2687904 - RNA, 19 nt, Artificial Sequence
  Description of Artificial Sequence: Synthetic oligonucleotide
cucuauaaucuguccuccu

SEQ ID NO: 2687905 - RNA, 19 nt, Artificial Sequence
  Description of Artificial Sequence: Synthetic oligonucleotide
cucaaggucucucuugcuu

SEQ ID NO: 2687906 - RNA, 19 nt, Artificial Sequence
  Description of Artificial Sequence: Synthetic oligonucleotide
cucccagggcuccuuauua

SEQ ID NO: 2687907 - RNA, 19 nt, Artificial Sequence
  Description of Artificial Sequence: Synthetic oligonucleotide
caaugcccugacuuuccaa

SEQ ID NO: 2687908 - RNA, 19 nt, Artificial Sequence
  Description of Artificial Sequence: Synthetic oligonucleotide
uuacucguuccagguguuu

SEQ ID NO: 2687909 - RNA, 19 nt, Artificial Sequence
  Description of Artificial Sequence: Synthetic oligonucleotide
auacucccagggcuccuua

SEQ ID NO: 2687910 - RNA, 19 nt, Artificial Sequence
  Description of Artificial Sequence: Synthetic oligonucleotide
ggcgaaugauaagaucauc

SEQ ID NO: 2687911 - RNA, 19 nt, Artificial Sequence
  Description of Artificial Sequence: Synthetic oligonucleotide
ccaucauuacucucaaggu

SEQ ID NO: 2687912 - RNA, 19 nt, Artificial Sequence
  Description of Artificial Sequence: Synthetic oligonucleotide
uggggucgauacucauuua

SEQ ID NO: 2687913 - RNA, 19 nt, Artificial Sequence
  Description of Artificial Sequence: Synthetic oligonucleotide
auuacucguuccagguguu

SEQ ID NO: 2687914 - RNA, 19 nt, Artificial Sequence
  Description of Artificial Sequence: Synthetic oligonucleotide
caucacauuggaacugguu

SEQ ID NO: 2687915 - RNA, 19 nt, Artificial Sequence
  Description of Artificial Sequence: Synthetic oligonucleotide
guuucaagacguugccguu

SEQ ID NO: 2687916 - RNA, 19 nt, Artificial Sequence
  Description of Artificial Sequence: Synthetic oligonucleotide
guuucuggaccuccaucau

SEQ ID NO: 2687917 - RNA, 19 nt, Artificial Sequence
  Description of Artificial Sequence: Synthetic oligonucleotide
gagcuaagccuuccugaau

SEQ ID NO: 2687918 - RNA, 19 nt, Artificial Sequence
  Description of Artificial Sequence: Synthetic oligonucleotide
gggcuccuuauuaagauau

SEQ ID NO: 2687919 - RNA, 19 nt, Artificial Sequence
  Description of Artificial Sequence: Synthetic oligonucleotide
guugccguuucuggaccuc

SEQ ID NO: 2687920 - RNA, 19 nt, Artificial Sequence
  Description of Artificial Sequence: Synthetic oligonucleotide
gccgaacaucauguaacug

SEQ ID NO: 2687921 - RNA, 19 nt, Artificial Sequence
  Description of Artificial Sequence: Synthetic oligonucleotide
cuggaccuccaucauuacu

SEQ ID NO: 2687922 - RNA, 19 nt, Artificial Sequence
  Description of Artificial Sequence: Synthetic oligonucleotide
guccaguacaauugcuguu

SEQ ID NO: 2687923 - RNA, 19 nt, Artificial Sequence
  Description of Artificial Sequence: Synthetic oligonucleotide
gggucgauacucauuuaua

SEQ ID NO: 2687924 - RNA, 19 nt, Artificial Sequence
  Description of Artificial Sequence: Synthetic oligonucleotide
ggaccuccaucauuacucu

SEQ ID NO: 2687925 - RNA, 19 nt, Artificial Sequence
  Description of Artificial Sequence: Synthetic oligonucleotide
ccguuucuggaccuccauc

SEQ ID NO: 2687926 - RNA, 19 nt, Artificial Sequence
  Description of Artificial Sequence: Synthetic oligonucleotide
ccuccugugaccugaauuu

SEQ ID NO: 2687927 - RNA, 19 nt, Artificial Sequence
  Description of Artificial Sequence: Synthetic oligonucleotide
auccauuggcucaguuuua

SEQ ID NO: 2687928 - RNA, 19 nt, Artificial Sequence
  Description of Artificial Sequence: Synthetic oligonucleotide
cgauacucauuuauaagau

SEQ ID NO: 2687929 - RNA, 19 nt, Artificial Sequence
  Description of Artificial Sequence: Synthetic oligonucleotide
ccaagaaauuaaucaguau

SEQ ID NO: 2687930 - RNA, 19 nt, Artificial Sequence
  Description of Artificial Sequence: Synthetic oligonucleotide
ccagguguuucugaaaccu

SEQ ID NO: 2687931 - RNA, 19 nt, Artificial Sequence
  Description of Artificial Sequence: Synthetic oligonucleotide
cacauaaggcagcuaucuu

SEQ ID NO: 2687932 - RNA, 19 nt, Artificial Sequence
  Description of Artificial Sequence: Synthetic oligonucleotide
gcauaggaugaagccguuc

SEQ ID NO: 2687933 - RNA, 19 nt, Artificial Sequence
  Description of Artificial Sequence: Synthetic oligonucleotide
ggaggcguugggagcuaag

SEQ ID NO: 2687934 - RNA, 19 nt, Artificial Sequence
  Description of Artificial Sequence: Synthetic oligonucleotide
ggcuccuuauuaagauauc

SEQ ID NO: 2687935 - RNA, 19 nt, Artificial Sequence
  Description of Artificial Sequence: Synthetic oligonucleotide
gguugccgaacaucaugua

SEQ ID NO: 2687936 - RNA, 19 nt, Artificial Sequence
  Description of Artificial Sequence: Synthetic oligonucleotide
cucaucccugcuucugaau

SEQ ID NO: 2687937 - RNA, 19 nt, Artificial Sequence
  Description of Artificial Sequence: Synthetic oligonucleotide
cguuccagguguuucugaa

SEQ ID NO: 2687938 - RNA, 19 nt, Artificial Sequence
  Description of Artificial Sequence: Synthetic oligonucleotide
ccuccaucauuacucucaa

SEQ ID NO: 2687939 - RNA, 19 nt, Artificial Sequence
  Description of Artificial Sequence: Synthetic oligonucleotide
gcucaguuuuaacucucau

SEQ ID NO: 2687940 - RNA, 19 nt, Artificial Sequence
  Description of Artificial Sequence: Synthetic oligonucleotide
gacuuuccaaagggcgaau

SEQ ID NO: 2687941 - RNA, 19 nt, Artificial Sequence
  Description of Artificial Sequence: Synthetic oligonucleotide
cuaagccuuccugaauauu

SEQ ID NO: 2687942 - RNA, 19 nt, Artificial Sequence
  Description of Artificial Sequence: Synthetic oligonucleotide
ggcagcuaucuuucucuau

SEQ ID NO: 2687943 - RNA, 19 nt, Artificial Sequence
  Description of Artificial Sequence: Synthetic oligonucleotide
gggcgaaugauaagaucau

SEQ ID NO: 2687944 - RNA, 19 nt, Artificial Sequence
  Description of Artificial Sequence: Synthetic oligonucleotide
cauguacgaaaagcagcuu

SEQ ID NO: 2687945 - RNA, 19 nt, Artificial Sequence
  Description of Artificial Sequence: Synthetic oligonucleotide
cguugggagcuaagccuuc

SEQ ID NO: 2687946 - RNA, 19 nt, Artificial Sequence
  Description of Artificial Sequence: Synthetic oligonucleotide
gcuugguggggucgauacu

SEQ ID NO: 2687947 - RNA, 19 nt, Artificial Sequence
  Description of Artificial Sequence: Synthetic oligonucleotide
caaggcaauuuuggaucau

SEQ ID NO: 2687948 - RNA, 19 nt, Artificial Sequence
  Description of Artificial Sequence: Synthetic oligonucleotide
cuccugugaccugaauuuu

SEQ ID NO: 2687949 - RNA, 19 nt, Artificial Sequence
  Description of Artificial Sequence: Synthetic oligonucleotide
gguggggucgauacucauu

SEQ ID NO: 2687950 - RNA, 19 nt, Artificial Sequence
  Description of Artificial Sequence: Synthetic oligonucleotide
gcuucugaaugggguaaau

SEQ ID NO: 2687951 - RNA, 19 nt, Artificial Sequence
  Description of Artificial Sequence: Synthetic oligonucleotide
ccaguacaauugcuguuau

SEQ ID NO: 2687952 - RNA, 19 nt, Artificial Sequence
  Description of Artificial Sequence: Synthetic oligonucleotide
gcguugggagcuaagccuu

SEQ ID NO: 2687953 - RNA, 19 nt, Artificial Sequence
  Description of Artificial Sequence: Synthetic oligonucleotide
gccguuucuggaccuccau

SEQ ID NO: 2687954 - RNA, 19 nt, Artificial Sequence
  Description of Artificial Sequence: Synthetic oligonucleotide
guccuccugugaccugaau

SEQ ID NO: 2687955 - RNA, 19 nt, Artificial Sequence
  Description of Artificial Sequence: Synthetic oligonucleotide
caguauccauuggcucagu

SEQ ID NO: 2687956 - RNA, 19 nt, Artificial Sequence
  Description of Artificial Sequence: Synthetic oligonucleotide
gggaggcguugggagcuaa

SEQ ID NO: 2687957 - RNA, 19 nt, Artificial Sequence
  Description of Artificial Sequence: Synthetic oligonucleotide
cguugccguuucuggaccu

SEQ ID NO: 2687958 - RNA, 19 nt, Artificial Sequence
  Description of Artificial Sequence: Synthetic oligonucleotide
ggggaggcguugggagcua

SEQ ID NO: 2687959 - RNA, 19 nt, Artificial Sequence
  Description of Artificial Sequence: Synthetic oligonucleotide
acuuuaaucaaccaguggc

SEQ ID NO: 2687960 - RNA, 19 nt, Artificial Sequence
  Description of Artificial Sequence: Synthetic oligonucleotide
aauagggguaaguagaggg

SEQ ID NO: 2687961 - RNA, 19 nt, Artificial Sequence
  Description of Artificial Sequence: Synthetic oligonucleotide
uugauagcaaugaaggugc

SEQ ID NO: 2687962 - RNA, 19 nt, Artificial Sequence
  Description of Artificial Sequence: Synthetic oligonucleotide
uuucaggccaacaagucgg

SEQ ID NO: 2687963 - RNA, 19 nt, Artificial Sequence
  Description of Artificial Sequence: Synthetic oligonucleotide
cauagauccaguuuugugc

SEQ ID NO: 2687964 - RNA, 19 nt, Artificial Sequence
  Description of Artificial Sequence: Synthetic oligonucleotide
acaacauucaaccccuccc

SEQ ID NO: 2687965 - RNA, 19 nt, Artificial Sequence
  Description of Artificial Sequence: Synthetic oligonucleotide
aaucccuucuguucaaaac

SEQ ID NO: 2687966 - RNA, 19 nt, Artificial Sequence
  Description of Artificial Sequence: Synthetic oligonucleotide
cuuguaauccaccagcucc

SEQ ID NO: 2687967 - RNA, 19 nt, Artificial Sequence
  Description of Artificial Sequence: Synthetic oligonucleotide
gaauaucuagaguugcugg

SEQ ID NO: 2687968 - RNA, 19 nt, Artificial Sequence
  Description of Artificial Sequence: Synthetic oligonucleotide
aauggucccagguuuagag

SEQ ID NO: 2687969 - RNA, 19 nt, Artificial Sequence
  Description of Artificial Sequence: Synthetic oligonucleotide
uaagaauagggguaaguag

SEQ ID NO: 2687970 - RNA, 19 nt, Artificial Sequence
  Description of Artificial Sequence: Synthetic oligonucleotide
ucaggcugaaaccacaagc

SEQ ID NO: 2687971 - RNA, 19 nt, Artificial Sequence
  Description of Artificial Sequence: Synthetic oligonucleotide
gucuucacaacauucaacc

SEQ ID NO: 2687972 - RNA, 19 nt, Artificial Sequence
  Description of Artificial Sequence: Synthetic oligonucleotide
aacacuuuaaucaaccagu

SEQ ID NO: 2687973 - RNA, 19 nt, Artificial Sequence
  Description of Artificial Sequence: Synthetic oligonucleotide
aauguagugcucuuugaga

SEQ ID NO: 2687974 - RNA, 19 nt, Artificial Sequence
  Description of Artificial Sequence: Synthetic oligonucleotide
aauaucuagaguugcuggu

SEQ ID NO: 2687975 - RNA, 19 nt, Artificial Sequence
  Description of Artificial Sequence: Synthetic oligonucleotide
ugcagaggaaaucacagcu

SEQ ID NO: 2687976 - RNA, 19 nt, Artificial Sequence
  Description of Artificial Sequence: Synthetic oligonucleotide
ucacuguuggccauggucc

SEQ ID NO: 2687977 - RNA, 19 nt, Artificial Sequence
  Description of Artificial Sequence: Synthetic oligonucleotide
aaccaguggcacuuaacac

SEQ ID NO: 2687978 - RNA, 19 nt, Artificial Sequence
  Description of Artificial Sequence: Synthetic oligonucleotide
auuucaggccaacaagucg

SEQ ID NO: 2687979 - RNA, 19 nt, Artificial Sequence
  Description of Artificial Sequence: Synthetic oligonucleotide
uccaggaauaucuagaguu

SEQ ID NO: 2687980 - RNA, 19 nt, Artificial Sequence
  Description of Artificial Sequence: Synthetic oligonucleotide
ugagaagguccucugaagc

SEQ ID NO: 2687981 - RNA, 19 nt, Artificial Sequence
  Description of Artificial Sequence: Synthetic oligonucleotide
aagaauagggguaaguaga

SEQ ID NO: 2687982 - RNA, 19 nt, Artificial Sequence
  Description of Artificial Sequence: Synthetic oligonucleotide
aacaagucggaaucccuuc

SEQ ID NO: 2687983 - RNA, 19 nt, Artificial Sequence
  Description of Artificial Sequence: Synthetic oligonucleotide
aaaacgcuugaugaucucg

SEQ ID NO: 2687984 - RNA, 19 nt, Artificial Sequence
  Description of Artificial Sequence: Synthetic oligonucleotide
cuugauagcaaugaaggug

SEQ ID NO: 2687985 - RNA, 19 nt, Artificial Sequence
  Description of Artificial Sequence: Synthetic oligonucleotide
uuucacuaggccaguaaag

SEQ ID NO: 2687986 - RNA, 19 nt, Artificial Sequence
  Description of Artificial Sequence: Synthetic oligonucleotide
aaacgcuugaugaucucgc

SEQ ID NO: 2687987 - RNA, 19 nt, Artificial Sequence
  Description of Artificial Sequence: Synthetic oligonucleotide
aacgcuugaugaucucgcc

SEQ ID NO: 2687988 - RNA, 19 nt, Artificial Sequence
  Description of Artificial Sequence: Synthetic oligonucleotide
uccugucacucauagaucc

SEQ ID NO: 2687989 - RNA, 19 nt, Artificial Sequence
  Description of Artificial Sequence: Synthetic oligonucleotide
uucacaacauucaaccccu

SEQ ID NO: 2687990 - RNA, 19 nt, Artificial Sequence
  Description of Artificial Sequence: Synthetic oligonucleotide
aaaccacaagccgaucucc

SEQ ID NO: 2687991 - RNA, 19 nt, Artificial Sequence
  Description of Artificial Sequence: Synthetic oligonucleotide
aaauuucaggccaacaagu

SEQ ID NO: 2687992 - RNA, 19 nt, Artificial Sequence
  Description of Artificial Sequence: Synthetic oligonucleotide
aacacugcagaggaaauca

SEQ ID NO: 2687993 - RNA, 19 nt, Artificial Sequence
  Description of Artificial Sequence: Synthetic oligonucleotide
aguaaagaagggacggucc

SEQ ID NO: 2687994 - RNA, 19 nt, Artificial Sequence
  Description of Artificial Sequence: Synthetic oligonucleotide
accccaucaggcuugauag

SEQ ID NO: 2687995 - RNA, 19 nt, Artificial Sequence
  Description of Artificial Sequence: Synthetic oligonucleotide
aaagaagggacgguccuuc

SEQ ID NO: 2687996 - RNA, 19 nt, Artificial Sequence
  Description of Artificial Sequence: Synthetic oligonucleotide
ugaaaccacaagccgaucu

SEQ ID NO: 2687997 - RNA, 19 nt, Artificial Sequence
  Description of Artificial Sequence: Synthetic oligonucleotide
uaauccaccagcuccucag

SEQ ID NO: 2687998 - RNA, 19 nt, Artificial Sequence
  Description of Artificial Sequence: Synthetic oligonucleotide
uaucuagaguugcuggucc

SEQ ID NO: 2687999 - RNA, 19 nt, Artificial Sequence
  Description of Artificial Sequence: Synthetic oligonucleotide
gaagggacgguccuucagg

SEQ ID NO: 2688000 - RNA, 19 nt, Artificial Sequence
  Description of Artificial Sequence: Synthetic oligonucleotide
ucauagauccaguuuugug

SEQ ID NO: 2688001 - RNA, 19 nt, Artificial Sequence
  Description of Artificial Sequence: Synthetic oligonucleotide
auagauccaguuuugugca

SEQ ID NO: 2688002 - RNA, 19 nt, Artificial Sequence
  Description of Artificial Sequence: Synthetic oligonucleotide
aggccaacaagucggaauc

SEQ ID NO: 2688003 - RNA, 19 nt, Artificial Sequence
  Description of Artificial Sequence: Synthetic oligonucleotide
ggaugcaaaagucuccucg

SEQ ID NO: 2688004 - RNA, 19 nt, Artificial Sequence
  Description of Artificial Sequence: Synthetic oligonucleotide
aaagucuccucgaaugguc

SEQ ID NO: 2688005 - RNA, 19 nt, Artificial Sequence
  Description of Artificial Sequence: Synthetic oligonucleotide
guaaguagaggggaaaagc

SEQ ID NO: 2688006 - RNA, 19 nt, Artificial Sequence
  Description of Artificial Sequence: Synthetic oligonucleotide
caaaagucuccucgaaugg

SEQ ID NO: 2688007 - RNA, 19 nt, Artificial Sequence
  Description of Artificial Sequence: Synthetic oligonucleotide
guuccaggaauaucuagag

SEQ ID NO: 2688008 - RNA, 19 nt, Artificial Sequence
  Description of Artificial Sequence: Synthetic oligonucleotide
agcuccucaggcugaaacc

SEQ ID NO: 2688009 - RNA, 19 nt, Artificial Sequence
  Description of Artificial Sequence: Synthetic oligonucleotide
aacauucaaccccucccag

SEQ ID NO: 2688010 - RNA, 19 nt, Artificial Sequence
  Description of Artificial Sequence: Synthetic oligonucleotide
aguagaggggaaaagcagg

SEQ ID NO: 2688011 - RNA, 19 nt, Artificial Sequence
  Description of Artificial Sequence: Synthetic oligonucleotide
cauguauuucacuaggcca

SEQ ID NO: 2688012 - RNA, 19 nt, Artificial Sequence
  Description of Artificial Sequence: Synthetic oligonucleotide
accaguggcacuuaacacu

SEQ ID NO: 2688013 - RNA, 19 nt, Artificial Sequence
  Description of Artificial Sequence: Synthetic oligonucleotide
ucggaaucccuucuguuca

SEQ ID NO: 2688014 - RNA, 19 nt, Artificial Sequence
  Description of Artificial Sequence: Synthetic oligonucleotide
cuuggaugcaaaagucucc

SEQ ID NO: 2688015 - RNA, 19 nt, Artificial Sequence
  Description of Artificial Sequence: Synthetic oligonucleotide
caugguccccuucagaagc

SEQ ID NO: 2688016 - RNA, 19 nt, Artificial Sequence
  Description of Artificial Sequence: Synthetic oligonucleotide
gccugcauaaauuucaggc

SEQ ID NO: 2688017 - RNA, 19 nt, Artificial Sequence
  Description of Artificial Sequence: Synthetic oligonucleotide
aaguagaggggaaaagcag

SEQ ID NO: 2688018 - RNA, 19 nt, Artificial Sequence
  Description of Artificial Sequence: Synthetic oligonucleotide
auguauuucacuaggccag

SEQ ID NO: 2688019 - RNA, 19 nt, Artificial Sequence
  Description of Artificial Sequence: Synthetic oligonucleotide
gagaagguccucugaagcc

SEQ ID NO: 2688020 - RNA, 19 nt, Artificial Sequence
  Description of Artificial Sequence: Synthetic oligonucleotide
uucacuaggccaguaaaga

SEQ ID NO: 2688021 - RNA, 19 nt, Artificial Sequence
  Description of Artificial Sequence: Synthetic oligonucleotide
ugcauguauuucacuaggc

SEQ ID NO: 2688022 - RNA, 19 nt, Artificial Sequence
  Description of Artificial Sequence: Synthetic oligonucleotide
aagucuccucgaauggucc

SEQ ID NO: 2688023 - RNA, 19 nt, Artificial Sequence
  Description of Artificial Sequence: Synthetic oligonucleotide
acuuggaugcaaaagucuc

SEQ ID NO: 2688024 - RNA, 19 nt, Artificial Sequence
  Description of Artificial Sequence: Synthetic oligonucleotide
cagaccauagcaaccacug

SEQ ID NO: 2688025 - RNA, 19 nt, Artificial Sequence
  Description of Artificial Sequence: Synthetic oligonucleotide
ucuccaagcaucacccggc

SEQ ID NO: 2688026 - RNA, 19 nt, Artificial Sequence
  Description of Artificial Sequence: Synthetic oligonucleotide
ucccuucuguucaaaacgc

SEQ ID NO: 2688027 - RNA, 19 nt, Artificial Sequence
  Description of Artificial Sequence: Synthetic oligonucleotide
uucucugcacucuccacag

SEQ ID NO: 2688028 - RNA, 19 nt, Artificial Sequence
  Description of Artificial Sequence: Synthetic oligonucleotide
ucuucacaacauucaaccc

SEQ ID NO: 2688029 - RNA, 19 nt, Artificial Sequence
  Description of Artificial Sequence: Synthetic oligonucleotide
ucugaagccugcauaaauu

SEQ ID NO: 2688030 - RNA, 19 nt, Artificial Sequence
  Description of Artificial Sequence: Synthetic oligonucleotide
uuuaaucaaccaguggcac

SEQ ID NO: 2688031 - RNA, 19 nt, Artificial Sequence
  Description of Artificial Sequence: Synthetic oligonucleotide
cuuuaaucaaccaguggca

SEQ ID NO: 2688032 - RNA, 19 nt, Artificial Sequence
  Description of Artificial Sequence: Synthetic oligonucleotide
aucuagaguugcugguccc

SEQ ID NO: 2688033 - RNA, 19 nt, Artificial Sequence
  Description of Artificial Sequence: Synthetic oligonucleotide
ucaggcuugauagcaauga

SEQ ID NO: 2688034 - RNA, 19 nt, Artificial Sequence
  Description of Artificial Sequence: Synthetic oligonucleotide
aauccaccagcuccucagg

SEQ ID NO: 2688035 - RNA, 19 nt, Artificial Sequence
  Description of Artificial Sequence: Synthetic oligonucleotide
uuaaucaaccaguggcacu

SEQ ID NO: 2688036 - RNA, 19 nt, Artificial Sequence
  Description of Artificial Sequence: Synthetic oligonucleotide
aggccaguaaagaagggac

SEQ ID NO: 2688037 - RNA, 19 nt, Artificial Sequence
  Description of Artificial Sequence: Synthetic oligonucleotide
ggucaaaggaaguuccagg

SEQ ID NO: 2688038 - RNA, 19 nt, Artificial Sequence
  Description of Artificial Sequence: Synthetic oligonucleotide
auaucuagaguugcugguc

SEQ ID NO: 2688039 - RNA, 19 nt, Artificial Sequence
  Description of Artificial Sequence: Synthetic oligonucleotide
cauucaaccccucccagac

SEQ ID NO: 2688040 - RNA, 19 nt, Artificial Sequence
  Description of Artificial Sequence: Synthetic oligonucleotide
aaggugcgcucacuguugg

SEQ ID NO: 2688041 - RNA, 19 nt, Artificial Sequence
  Description of Artificial Sequence: Synthetic oligonucleotide
uauuucacuaggccaguaa

SEQ ID NO: 2688042 - RNA, 19 nt, Artificial Sequence
  Description of Artificial Sequence: Synthetic oligonucleotide
auuucacuaggccaguaaa

SEQ ID NO: 2688043 - RNA, 19 nt, Artificial Sequence
  Description of Artificial Sequence: Synthetic oligonucleotide
aggcugaaaccacaagccg

SEQ ID NO: 2688044 - RNA, 19 nt, Artificial Sequence
  Description of Artificial Sequence: Synthetic oligonucleotide
aaaagucuccucgaauggu

SEQ ID NO: 2688045 - RNA, 19 nt, Artificial Sequence
  Description of Artificial Sequence: Synthetic oligonucleotide
gucaaaggaaguuccagga

SEQ ID NO: 2688046 - RNA, 19 nt, Artificial Sequence
  Description of Artificial Sequence: Synthetic oligonucleotide
uguaagaauagggguaagu

SEQ ID NO: 2688047 - RNA, 19 nt, Artificial Sequence
  Description of Artificial Sequence: Synthetic oligonucleotide
ucaaaggaaguuccaggaa

SEQ ID NO: 2688048 - RNA, 19 nt, Artificial Sequence
  Description of Artificial Sequence: Synthetic oligonucleotide
uuuugugcacagcucuugu

SEQ ID NO: 2688049 - RNA, 19 nt, Artificial Sequence
  Description of Artificial Sequence: Synthetic oligonucleotide
ugcacagcucuuguaaucc

SEQ ID NO: 2688050 - RNA, 19 nt, Artificial Sequence
  Description of Artificial Sequence: Synthetic oligonucleotide
cugaaugcauguauuucac

SEQ ID NO: 2688051 - RNA, 19 nt, Artificial Sequence
  Description of Artificial Sequence: Synthetic oligonucleotide
aaaagcaggugcccuccug

SEQ ID NO: 2688052 - RNA, 19 nt, Artificial Sequence
  Description of Artificial Sequence: Synthetic oligonucleotide
ucccuugccuguaagaaua

SEQ ID NO: 2688053 - RNA, 19 nt, Artificial Sequence
  Description of Artificial Sequence: Synthetic oligonucleotide
caacuuggaugcaaaaguc

SEQ ID NO: 2688054 - RNA, 19 nt, Artificial Sequence
  Description of Artificial Sequence: Synthetic oligonucleotide
agucuccucgaaugguccc

SEQ ID NO: 2688055 - RNA, 19 nt, Artificial Sequence
  Description of Artificial Sequence: Synthetic oligonucleotide
gaaaccacaagccgaucuc

SEQ ID NO: 2688056 - RNA, 19 nt, Artificial Sequence
  Description of Artificial Sequence: Synthetic oligonucleotide
aagucggaaucccuucugu

SEQ ID NO: 2688057 - RNA, 19 nt, Artificial Sequence
  Description of Artificial Sequence: Synthetic oligonucleotide
augaaacacuuuaaucaac

SEQ ID NO: 2688058 - RNA, 19 nt, Artificial Sequence
  Description of Artificial Sequence: Synthetic oligonucleotide
caaccacugguccugaaug

SEQ ID NO: 2688059 - RNA, 19 nt, Artificial Sequence
  Description of Artificial Sequence: Synthetic oligonucleotide
cucuccaagcaucacccgg

SEQ ID NO: 2688060 - RNA, 19 nt, Artificial Sequence
  Description of Artificial Sequence: Synthetic oligonucleotide
uuaacacugcagaggaaau

SEQ ID NO: 2688061 - RNA, 19 nt, Artificial Sequence
  Description of Artificial Sequence: Synthetic oligonucleotide
uggucccagguuuagaguc

SEQ ID NO: 2688062 - RNA, 19 nt, Artificial Sequence
  Description of Artificial Sequence: Synthetic oligonucleotide
gaauagggguaaguagagg

SEQ ID NO: 2688063 - RNA, 19 nt, Artificial Sequence
  Description of Artificial Sequence: Synthetic oligonucleotide
cucacuguuggccaugguc

SEQ ID NO: 2688064 - RNA, 19 nt, Artificial Sequence
  Description of Artificial Sequence: Synthetic oligonucleotide
cugcauaaauuucaggcca

SEQ ID NO: 2688065 - RNA, 19 nt, Artificial Sequence
  Description of Artificial Sequence: Synthetic oligonucleotide
uccucugaagccugcauaa

SEQ ID NO: 2688066 - RNA, 19 nt, Artificial Sequence
  Description of Artificial Sequence: Synthetic oligonucleotide
agaauagggguaaguagag

SEQ ID NO: 2688067 - RNA, 19 nt, Artificial Sequence
  Description of Artificial Sequence: Synthetic oligonucleotide
cacuuaacacugcagagga

SEQ ID NO: 2688068 - RNA, 19 nt, Artificial Sequence
  Description of Artificial Sequence: Synthetic oligonucleotide
accagaccccgcuggaccc

SEQ ID NO: 2688069 - RNA, 19 nt, Artificial Sequence
  Description of Artificial Sequence: Synthetic oligonucleotide
uaaucaaccaguggcacuu

SEQ ID NO: 2688070 - RNA, 19 nt, Artificial Sequence
  Description of Artificial Sequence: Synthetic oligonucleotide
ugcauaaauuucaggccaa

SEQ ID NO: 2688071 - RNA, 19 nt, Artificial Sequence
  Description of Artificial Sequence: Synthetic oligonucleotide
aagggacgguccuucaggu

SEQ ID NO: 2688072 - RNA, 19 nt, Artificial Sequence
  Description of Artificial Sequence: Synthetic oligonucleotide
ugaaugcauguauuucacu

SEQ ID NO: 2688073 - RNA, 19 nt, Artificial Sequence
  Description of Artificial Sequence: Synthetic oligonucleotide
ucacucauagauccaguuu

SEQ ID NO: 2688074 - RNA, 19 nt, Artificial Sequence
  Description of Artificial Sequence: Synthetic oligonucleotide
ccugcauaaauuucaggcc

SEQ ID NO: 2688075 - RNA, 19 nt, Artificial Sequence
  Description of Artificial Sequence: Synthetic oligonucleotide
aggaaaucacagcucccag

SEQ ID NO: 2688076 - RNA, 19 nt, Artificial Sequence
  Description of Artificial Sequence: Synthetic oligonucleotide
ucuuguaauccaccagcuc

SEQ ID NO: 2688077 - RNA, 19 nt, Artificial Sequence
  Description of Artificial Sequence: Synthetic oligonucleotide
ucacuaggccaguaaagaa

SEQ ID NO: 2688078 - RNA, 19 nt, Artificial Sequence
  Description of Artificial Sequence: Synthetic oligonucleotide
gcauguauuucacuaggcc

SEQ ID NO: 2688079 - RNA, 19 nt, Artificial Sequence
  Description of Artificial Sequence: Synthetic oligonucleotide
agaccauagcaaccacugg

SEQ ID NO: 2688080 - RNA, 19 nt, Artificial Sequence
  Description of Artificial Sequence: Synthetic oligonucleotide
ugguccugaaugcauguau

SEQ ID NO: 2688081 - RNA, 19 nt, Artificial Sequence
  Description of Artificial Sequence: Synthetic oligonucleotide
cuuaacacugcagaggaaa

SEQ ID NO: 2688082 - RNA, 19 nt, Artificial Sequence
  Description of Artificial Sequence: Synthetic oligonucleotide
cacaacauucaaccccucc

SEQ ID NO: 2688083 - RNA, 19 nt, Artificial Sequence
  Description of Artificial Sequence: Synthetic oligonucleotide
auagcaaccacugguccug

SEQ ID NO: 2688084 - RNA, 19 nt, Artificial Sequence
  Description of Artificial Sequence: Synthetic oligonucleotide
gucucuccaagcaucaccc

SEQ ID NO: 2688085 - RNA, 19 nt, Artificial Sequence
  Description of Artificial Sequence: Synthetic oligonucleotide
caggaauaucuagaguugc

SEQ ID NO: 2688086 - RNA, 19 nt, Artificial Sequence
  Description of Artificial Sequence: Synthetic oligonucleotide
ugcaggguuggucucucca

SEQ ID NO: 2688087 - RNA, 19 nt, Artificial Sequence
  Description of Artificial Sequence: Synthetic oligonucleotide
uuccaggaauaucuagagu

SEQ ID NO: 2688088 - RNA, 19 nt, Artificial Sequence
  Description of Artificial Sequence: Synthetic oligonucleotide
aaaggaaguuccaggaaua

SEQ ID NO: 2688089 - RNA, 19 nt, Artificial Sequence
  Description of Artificial Sequence: Synthetic oligonucleotide
gaggaaaucacagcuccca

SEQ ID NO: 2688090 - RNA, 19 nt, Artificial Sequence
  Description of Artificial Sequence: Synthetic oligonucleotide
guaagaauagggguaagua

SEQ ID NO: 2688091 - RNA, 19 nt, Artificial Sequence
  Description of Artificial Sequence: Synthetic oligonucleotide
gaggggaaaagcaggugcc

SEQ ID NO: 2688092 - RNA, 19 nt, Artificial Sequence
  Description of Artificial Sequence: Synthetic oligonucleotide
agaagggacgguccuucag

SEQ ID NO: 2688093 - RNA, 19 nt, Artificial Sequence
  Description of Artificial Sequence: Synthetic oligonucleotide
aggggaaaagcaggugccc

SEQ ID NO: 2688094 - RNA, 19 nt, Artificial Sequence
  Description of Artificial Sequence: Synthetic oligonucleotide
aggucaaaggaaguuccag

SEQ ID NO: 2688095 - RNA, 19 nt, Artificial Sequence
  Description of Artificial Sequence: Synthetic oligonucleotide
aggaaguuccaggaauauc

SEQ ID NO: 2688096 - RNA, 19 nt, Artificial Sequence
  Description of Artificial Sequence: Synthetic oligonucleotide
uccucaggcugaaaccaca

SEQ ID NO: 2688097 - RNA, 19 nt, Artificial Sequence
  Description of Artificial Sequence: Synthetic oligonucleotide
acaagucggaaucccuucu

SEQ ID NO: 2688098 - RNA, 19 nt, Artificial Sequence
  Description of Artificial Sequence: Synthetic oligonucleotide
ugucacucauagauccagu

SEQ ID NO: 2688099 - RNA, 19 nt, Artificial Sequence
  Description of Artificial Sequence: Synthetic oligonucleotide
gucggaaucccuucuguuc

SEQ ID NO: 2688100 - RNA, 19 nt, Artificial Sequence
  Description of Artificial Sequence: Synthetic oligonucleotide
gugcucuuugagaaggucc

SEQ ID NO: 2688101 - RNA, 19 nt, Artificial Sequence
  Description of Artificial Sequence: Synthetic oligonucleotide
acacuuuaaucaaccagug

SEQ ID NO: 2688102 - RNA, 19 nt, Artificial Sequence
  Description of Artificial Sequence: Synthetic oligonucleotide
acauucaaccccucccaga

SEQ ID NO: 2688103 - RNA, 19 nt, Artificial Sequence
  Description of Artificial Sequence: Synthetic oligonucleotide
ugugcacagcucuuguaau

SEQ ID NO: 2688104 - RNA, 19 nt, Artificial Sequence
  Description of Artificial Sequence: Synthetic oligonucleotide
aguugcuggucccuugccu

SEQ ID NO: 2688105 - RNA, 19 nt, Artificial Sequence
  Description of Artificial Sequence: Synthetic oligonucleotide
gccaguaaagaagggacgg

SEQ ID NO: 2688106 - RNA, 19 nt, Artificial Sequence
  Description of Artificial Sequence: Synthetic oligonucleotide
cugucacucauagauccag

SEQ ID NO: 2688107 - RNA, 19 nt, Artificial Sequence
  Description of Artificial Sequence: Synthetic oligonucleotide
cacagcucuuguaauccac

SEQ ID NO: 2688108 - RNA, 19 nt, Artificial Sequence
  Description of Artificial Sequence: Synthetic oligonucleotide
agcucccagagguuccuuc

SEQ ID NO: 2688109 - RNA, 19 nt, Artificial Sequence
  Description of Artificial Sequence: Synthetic oligonucleotide
ccaggucaaaggaaguucc

SEQ ID NO: 2688110 - RNA, 19 nt, Artificial Sequence
  Description of Artificial Sequence: Synthetic oligonucleotide
acugguccugaaugcaugu

SEQ ID NO: 2688111 - RNA, 19 nt, Artificial Sequence
  Description of Artificial Sequence: Synthetic oligonucleotide
aaggaaguuccaggaauau

SEQ ID NO: 2688112 - RNA, 19 nt, Artificial Sequence
  Description of Artificial Sequence: Synthetic oligonucleotide
aagaagggacgguccuuca

SEQ ID NO: 2688113 - RNA, 19 nt, Artificial Sequence
  Description of Artificial Sequence: Synthetic oligonucleotide
gguaaguagaggggaaaag

SEQ ID NO: 2688114 - RNA, 19 nt, Artificial Sequence
  Description of Artificial Sequence: Synthetic oligonucleotide
guuuugugcacagcucuug

SEQ ID NO: 2688115 - RNA, 19 nt, Artificial Sequence
  Description of Artificial Sequence: Synthetic oligonucleotide
augaaggugcgcucacugu

SEQ ID NO: 2688116 - RNA, 19 nt, Artificial Sequence
  Description of Artificial Sequence: Synthetic oligonucleotide
gaaggugcgcucacuguug

SEQ ID NO: 2688117 - RNA, 19 nt, Artificial Sequence
  Description of Artificial Sequence: Synthetic oligonucleotide
gagucugcaggguuggucu

SEQ ID NO: 2688118 - RNA, 19 nt, Artificial Sequence
  Description of Artificial Sequence: Synthetic oligonucleotide
uguauuucacuaggccagu

SEQ ID NO: 2688119 - RNA, 19 nt, Artificial Sequence
  Description of Artificial Sequence: Synthetic oligonucleotide
caacauucaaccccuccca

SEQ ID NO: 2688120 - RNA, 19 nt, Artificial Sequence
  Description of Artificial Sequence: Synthetic oligonucleotide
uucaggccaacaagucgga

SEQ ID NO: 2688121 - RNA, 19 nt, Artificial Sequence
  Description of Artificial Sequence: Synthetic oligonucleotide
ucuagaguugcuggucccu

SEQ ID NO: 2688122 - RNA, 19 nt, Artificial Sequence
  Description of Artificial Sequence: Synthetic oligonucleotide
agauccaguuuugugcaca

SEQ ID NO: 2688123 - RNA, 19 nt, Artificial Sequence
  Description of Artificial Sequence: Synthetic oligonucleotide
caccagaccccgcuggacc

SEQ ID NO: 2688124 - RNA, 19 nt, Artificial Sequence
  Description of Artificial Sequence: Synthetic oligonucleotide
cagcuccucaggcugaaac

SEQ ID NO: 2688125 - RNA, 19 nt, Artificial Sequence
  Description of Artificial Sequence: Synthetic oligonucleotide
cacuguuggccaugguccc

SEQ ID NO: 2688126 - RNA, 19 nt, Artificial Sequence
  Description of Artificial Sequence: Synthetic oligonucleotide
gaaucccuucuguucaaaa

SEQ ID NO: 2688127 - RNA, 19 nt, Artificial Sequence
  Description of Artificial Sequence: Synthetic oligonucleotide
caagucggaaucccuucug

SEQ ID NO: 2688128 - RNA, 19 nt, Artificial Sequence
  Description of Artificial Sequence: Synthetic oligonucleotide
caggguuggucucuccaag

SEQ ID NO: 2688129 - RNA, 19 nt, Artificial Sequence
  Description of Artificial Sequence: Synthetic oligonucleotide
agucugcaggguuggucuc

SEQ ID NO: 2688130 - RNA, 19 nt, Artificial Sequence
  Description of Artificial Sequence: Synthetic oligonucleotide
gguuccuuccaggucaaag

SEQ ID NO: 2688131 - RNA, 19 nt, Artificial Sequence
  Description of Artificial Sequence: Synthetic oligonucleotide
acucauagauccaguuuug

SEQ ID NO: 2688132 - RNA, 19 nt, Artificial Sequence
  Description of Artificial Sequence: Synthetic oligonucleotide
ucgaauggucccagguuua

SEQ ID NO: 2688133 - RNA, 19 nt, Artificial Sequence
  Description of Artificial Sequence: Synthetic oligonucleotide
auggucccagguuuagagu

SEQ ID NO: 2688134 - RNA, 19 nt, Artificial Sequence
  Description of Artificial Sequence: Synthetic oligonucleotide
aaccccucccagaccauag

SEQ ID NO: 2688135 - RNA, 19 nt, Artificial Sequence
  Description of Artificial Sequence: Synthetic oligonucleotide
cucaggcugaaaccacaag

SEQ ID NO: 2688136 - RNA, 19 nt, Artificial Sequence
  Description of Artificial Sequence: Synthetic oligonucleotide
ccaggaauaucuagaguug

SEQ ID NO: 2688137 - RNA, 19 nt, Artificial Sequence
  Description of Artificial Sequence: Synthetic oligonucleotide
guaaagaagggacgguccu

SEQ ID NO: 2688138 - RNA, 19 nt, Artificial Sequence
  Description of Artificial Sequence: Synthetic oligonucleotide
uggucccuugccuguaaga

SEQ ID NO: 2688139 - RNA, 19 nt, Artificial Sequence
  Description of Artificial Sequence: Synthetic oligonucleotide
gaccccaucaggcuugaua

SEQ ID NO: 2688140 - RNA, 19 nt, Artificial Sequence
  Description of Artificial Sequence: Synthetic oligonucleotide
cacugcagaggaaaucaca

SEQ ID NO: 2688141 - RNA, 19 nt, Artificial Sequence
  Description of Artificial Sequence: Synthetic oligonucleotide
acacugcagaggaaaucac

SEQ ID NO: 2688142 - RNA, 19 nt, Artificial Sequence
  Description of Artificial Sequence: Synthetic oligonucleotide
aaccacaagccgaucuccu

SEQ ID NO: 2688143 - RNA, 19 nt, Artificial Sequence
  Description of Artificial Sequence: Synthetic oligonucleotide
gccaacuuggaugcaaaag

SEQ ID NO: 2688144 - RNA, 19 nt, Artificial Sequence
  Description of Artificial Sequence: Synthetic oligonucleotide
ucuguucaaaacgcuugau

SEQ ID NO: 2688145 - RNA, 19 nt, Artificial Sequence
  Description of Artificial Sequence: Synthetic oligonucleotide
uagugcucuuugagaaggu

SEQ ID NO: 2688146 - RNA, 19 nt, Artificial Sequence
  Description of Artificial Sequence: Synthetic oligonucleotide
ccaagcaucacccggccug

SEQ ID NO: 2688147 - RNA, 19 nt, Artificial Sequence
  Description of Artificial Sequence: Synthetic oligonucleotide
cuccugucacucauagauc

SEQ ID NO: 2688148 - RNA, 19 nt, Artificial Sequence
  Description of Artificial Sequence: Synthetic oligonucleotide
agggacgguccuucagguc

SEQ ID NO: 2688149 - RNA, 19 nt, Artificial Sequence
  Description of Artificial Sequence: Synthetic oligonucleotide
agcaucacccggccugucu

SEQ ID NO: 2688150 - RNA, 19 nt, Artificial Sequence
  Description of Artificial Sequence: Synthetic oligonucleotide
cacucauagauccaguuuu

SEQ ID NO: 2688151 - RNA, 19 nt, Artificial Sequence
  Description of Artificial Sequence: Synthetic oligonucleotide
gugcacagcucuuguaauc

SEQ ID NO: 2688152 - RNA, 19 nt, Artificial Sequence
  Description of Artificial Sequence: Synthetic oligonucleotide
acaagccgaucuccuucuc

SEQ ID NO: 2688153 - RNA, 19 nt, Artificial Sequence
  Description of Artificial Sequence: Synthetic oligonucleotide
agucggaaucccuucuguu

SEQ ID NO: 2688154 - RNA, 19 nt, Artificial Sequence
  Description of Artificial Sequence: Synthetic oligonucleotide
uagauccaguuuugugcac

SEQ ID NO: 2688155 - RNA, 19 nt, Artificial Sequence
  Description of Artificial Sequence: Synthetic oligonucleotide
ggccaguaaagaagggacg

SEQ ID NO: 2688156 - RNA, 19 nt, Artificial Sequence
  Description of Artificial Sequence: Synthetic oligonucleotide
ggugcgcucacuguuggcc

SEQ ID NO: 2688157 - RNA, 19 nt, Artificial Sequence
  Description of Artificial Sequence: Synthetic oligonucleotide
agcaggugcccuccuguca

SEQ ID NO: 2688158 - RNA, 19 nt, Artificial Sequence
  Description of Artificial Sequence: Synthetic oligonucleotide
ccagguuuagagucugcag

SEQ ID NO: 2688159 - RNA, 19 nt, Artificial Sequence
  Description of Artificial Sequence: Synthetic oligonucleotide
cucugcacucuccacagaa

SEQ ID NO: 2688160 - RNA, 19 nt, Artificial Sequence
  Description of Artificial Sequence: Synthetic oligonucleotide
cuccaagcaucacccggcc

SEQ ID NO: 2688161 - RNA, 19 nt, Artificial Sequence
  Description of Artificial Sequence: Synthetic oligonucleotide
ggaaaagcaggugcccucc

SEQ ID NO: 2688162 - RNA, 19 nt, Artificial Sequence
  Description of Artificial Sequence: Synthetic oligonucleotide
uccaagcaucacccggccu

SEQ ID NO: 2688163 - RNA, 19 nt, Artificial Sequence
  Description of Artificial Sequence: Synthetic oligonucleotide
caguuuugugcacagcucu

SEQ ID NO: 2688164 - RNA, 19 nt, Artificial Sequence
  Description of Artificial Sequence: Synthetic oligonucleotide
uaaagaagggacgguccuu

SEQ ID NO: 2688165 - RNA, 19 nt, Artificial Sequence
  Description of Artificial Sequence: Synthetic oligonucleotide
cagagguuccuuccagguc

SEQ ID NO: 2688166 - RNA, 19 nt, Artificial Sequence
  Description of Artificial Sequence: Synthetic oligonucleotide
uggaugcaaaagucuccuc

SEQ ID NO: 2688167 - RNA, 19 nt, Artificial Sequence
  Description of Artificial Sequence: Synthetic oligonucleotide
ccauagcaaccacuggucc

SEQ ID NO: 2688168 - RNA, 19 nt, Artificial Sequence
  Description of Artificial Sequence: Synthetic oligonucleotide
cagcucuuguaauccacca

SEQ ID NO: 2688169 - RNA, 19 nt, Artificial Sequence
  Description of Artificial Sequence: Synthetic oligonucleotide
guaauccaccagcuccuca

SEQ ID NO: 2688170 - RNA, 19 nt, Artificial Sequence
  Description of Artificial Sequence: Synthetic oligonucleotide
acagaaucgcugccaugaa

SEQ ID NO: 2688171 - RNA, 19 nt, Artificial Sequence
  Description of Artificial Sequence: Synthetic oligonucleotide
cauagcaaccacugguccu

SEQ ID NO: 2688172 - RNA, 19 nt, Artificial Sequence
  Description of Artificial Sequence: Synthetic oligonucleotide
ucccagguuuagagucugc

SEQ ID NO: 2688173 - RNA, 19 nt, Artificial Sequence
  Description of Artificial Sequence: Synthetic oligonucleotide
gaaguuccaggaauaucua

SEQ ID NO: 2688174 - RNA, 19 nt, Artificial Sequence
  Description of Artificial Sequence: Synthetic oligonucleotide
gcacucuccacagaaucgc

SEQ ID NO: 2688175 - RNA, 19 nt, Artificial Sequence
  Description of Artificial Sequence: Synthetic oligonucleotide
guccccuucagaagccaag

SEQ ID NO: 2688176 - RNA, 19 nt, Artificial Sequence
  Description of Artificial Sequence: Synthetic oligonucleotide
ccaacuuggaugcaaaagu

SEQ ID NO: 2688177 - RNA, 19 nt, Artificial Sequence
  Description of Artificial Sequence: Synthetic oligonucleotide
uguaauccaccagcuccuc

SEQ ID NO: 2688178 - RNA, 19 nt, Artificial Sequence
  Description of Artificial Sequence: Synthetic oligonucleotide
gccaugguccccuucagaa

SEQ ID NO: 2688179 - RNA, 19 nt, Artificial Sequence
  Description of Artificial Sequence: Synthetic oligonucleotide
cuguaagaauagggguaag

SEQ ID NO: 2688180 - RNA, 19 nt, Artificial Sequence
  Description of Artificial Sequence: Synthetic oligonucleotide
ggcugaaaccacaagccga

SEQ ID NO: 2688181 - RNA, 19 nt, Artificial Sequence
  Description of Artificial Sequence: Synthetic oligonucleotide
cucuuguaauccaccagcu

SEQ ID NO: 2688182 - RNA, 19 nt, Artificial Sequence
  Description of Artificial Sequence: Synthetic oligonucleotide
gcucccagagguuccuucc

SEQ ID NO: 2688183 - RNA, 19 nt, Artificial Sequence
  Description of Artificial Sequence: Synthetic oligonucleotide
gaauggucccagguuuaga

SEQ ID NO: 2688184 - RNA, 19 nt, Artificial Sequence
  Description of Artificial Sequence: Synthetic oligonucleotide
caggucaaaggaaguucca

SEQ ID NO: 2688185 - RNA, 19 nt, Artificial Sequence
  Description of Artificial Sequence: Synthetic oligonucleotide
ucacaacauucaaccccuc

SEQ ID NO: 2688186 - RNA, 19 nt, Artificial Sequence
  Description of Artificial Sequence: Synthetic oligonucleotide
accacaagccgaucuccuu

SEQ ID NO: 2688187 - RNA, 19 nt, Artificial Sequence
  Description of Artificial Sequence: Synthetic oligonucleotide
cuggucccuugccuguaag

SEQ ID NO: 2688188 - RNA, 19 nt, Artificial Sequence
  Description of Artificial Sequence: Synthetic oligonucleotide
ccaguuuugugcacagcuc

SEQ ID NO: 2688189 - RNA, 19 nt, Artificial Sequence
  Description of Artificial Sequence: Synthetic oligonucleotide
gcaggugcccuccugucac

SEQ ID NO: 2688190 - RNA, 19 nt, Artificial Sequence
  Description of Artificial Sequence: Synthetic oligonucleotide
ccuccugucacucauagau

SEQ ID NO: 2688191 - RNA, 19 nt, Artificial Sequence
  Description of Artificial Sequence: Synthetic oligonucleotide
guagaggggaaaagcaggu

SEQ ID NO: 2688192 - RNA, 19 nt, Artificial Sequence
  Description of Artificial Sequence: Synthetic oligonucleotide
gccaacaagucggaauccc

SEQ ID NO: 2688193 - RNA, 19 nt, Artificial Sequence
  Description of Artificial Sequence: Synthetic oligonucleotide
ggguuggucucuccaagca

SEQ ID NO: 2688194 - RNA, 19 nt, Artificial Sequence
  Description of Artificial Sequence: Synthetic oligonucleotide
cuccucgaauggucccagg

SEQ ID NO: 2688195 - RNA, 19 nt, Artificial Sequence
  Description of Artificial Sequence: Synthetic oligonucleotide
cccagagguuccuuccagg

SEQ ID NO: 2688196 - RNA, 19 nt, Artificial Sequence
  Description of Artificial Sequence: Synthetic oligonucleotide
aagcaucacccggccuguc

SEQ ID NO: 2688197 - RNA, 19 nt, Artificial Sequence
  Description of Artificial Sequence: Synthetic oligonucleotide
gugcgcucacuguuggcca

SEQ ID NO: 2688198 - RNA, 19 nt, Artificial Sequence
  Description of Artificial Sequence: Synthetic oligonucleotide
gucacucauagauccaguu

SEQ ID NO: 2688199 - RNA, 19 nt, Artificial Sequence
  Description of Artificial Sequence: Synthetic oligonucleotide
aggugcccuccugucacuc

SEQ ID NO: 2688200 - RNA, 19 nt, Artificial Sequence
  Description of Artificial Sequence: Synthetic oligonucleotide
ugcgcucacuguuggccau

SEQ ID NO: 2688201 - RNA, 19 nt, Artificial Sequence
  Description of Artificial Sequence: Synthetic oligonucleotide
ccaugguccccuucagaag

SEQ ID NO: 2688202 - RNA, 19 nt, Artificial Sequence
  Description of Artificial Sequence: Synthetic oligonucleotide
caucacccggccugucuuc

SEQ ID NO: 2688203 - RNA, 19 nt, Artificial Sequence
  Description of Artificial Sequence: Synthetic oligonucleotide
ccacaagccgaucuccuuc

SEQ ID NO: 2688204 - RNA, 19 nt, Artificial Sequence
  Description of Artificial Sequence: Synthetic oligonucleotide
aaucaaccaguggcacuua

SEQ ID NO: 2688205 - RNA, 19 nt, Artificial Sequence
  Description of Artificial Sequence: Synthetic oligonucleotide
caggcuugauagcaaugaa

SEQ ID NO: 2688206 - RNA, 19 nt, Artificial Sequence
  Description of Artificial Sequence: Synthetic oligonucleotide
ucaggccaacaagucggaa

SEQ ID NO: 2688207 - RNA, 19 nt, Artificial Sequence
  Description of Artificial Sequence: Synthetic oligonucleotide
gcauaaauuucaggccaac

SEQ ID NO: 2688208 - RNA, 19 nt, Artificial Sequence
  Description of Artificial Sequence: Synthetic oligonucleotide
ggucccuugccuguaagaa

SEQ ID NO: 2688209 - RNA, 19 nt, Artificial Sequence
  Description of Artificial Sequence: Synthetic oligonucleotide
ucaaccccucccagaccau

SEQ ID NO: 2688210 - RNA, 19 nt, Artificial Sequence
  Description of Artificial Sequence: Synthetic oligonucleotide
caggccaacaagucggaau

SEQ ID NO: 2688211 - RNA, 19 nt, Artificial Sequence
  Description of Artificial Sequence: Synthetic oligonucleotide
gcagaggaaaucacagcuc

SEQ ID NO: 2688212 - RNA, 19 nt, Artificial Sequence
  Description of Artificial Sequence: Synthetic oligonucleotide
ccgcuggaccccaucaggc

SEQ ID NO: 2688213 - RNA, 19 nt, Artificial Sequence
  Description of Artificial Sequence: Synthetic oligonucleotide
gaaaagcaggugcccuccu

SEQ ID NO: 2688214 - RNA, 19 nt, Artificial Sequence
  Description of Artificial Sequence: Synthetic oligonucleotide
caacaagucggaaucccuu

SEQ ID NO: 2688215 - RNA, 19 nt, Artificial Sequence
  Description of Artificial Sequence: Synthetic oligonucleotide
agggguaaguagaggggaa

SEQ ID NO: 2688216 - RNA, 19 nt, Artificial Sequence
  Description of Artificial Sequence: Synthetic oligonucleotide
gccugucuucacaacauuc

SEQ ID NO: 2688217 - RNA, 19 nt, Artificial Sequence
  Description of Artificial Sequence: Synthetic oligonucleotide
gucuccucgaaugguccca

SEQ ID NO: 2688218 - RNA, 19 nt, Artificial Sequence
  Description of Artificial Sequence: Synthetic oligonucleotide
aucacccggccugucuuca

SEQ ID NO: 2688219 - RNA, 19 nt, Artificial Sequence
  Description of Artificial Sequence: Synthetic oligonucleotide
gccuguaagaauaggggua

SEQ ID NO: 2688220 - RNA, 19 nt, Artificial Sequence
  Description of Artificial Sequence: Synthetic oligonucleotide
cacaagccgaucuccuucu

SEQ ID NO: 2688221 - RNA, 19 nt, Artificial Sequence
  Description of Artificial Sequence: Synthetic oligonucleotide
cugcaggguuggucucucc

SEQ ID NO: 2688222 - RNA, 19 nt, Artificial Sequence
  Description of Artificial Sequence: Synthetic oligonucleotide
ucacccggccugucuucac

SEQ ID NO: 2688223 - RNA, 19 nt, Artificial Sequence
  Description of Artificial Sequence: Synthetic oligonucleotide
acuuaacacugcagaggaa

SEQ ID NO: 2688224 - RNA, 19 nt, Artificial Sequence
  Description of Artificial Sequence: Synthetic oligonucleotide
ccuugccuguaagaauagg

SEQ ID NO: 2688225 - RNA, 19 nt, Artificial Sequence
  Description of Artificial Sequence: Synthetic oligonucleotide
uagcaaccacugguccuga

SEQ ID NO: 2688226 - RNA, 19 nt, Artificial Sequence
  Description of Artificial Sequence: Synthetic oligonucleotide
ccuguaagaauagggguaa

SEQ ID NO: 2688227 - RNA, 19 nt, Artificial Sequence
  Description of Artificial Sequence: Synthetic oligonucleotide
ggguaaguagaggggaaaa

SEQ ID NO: 2688228 - RNA, 19 nt, Artificial Sequence
  Description of Artificial Sequence: Synthetic oligonucleotide
cucauagauccaguuuugu

SEQ ID NO: 2688229 - RNA, 19 nt, Artificial Sequence
  Description of Artificial Sequence: Synthetic oligonucleotide
ggccaacaagucggaaucc

SEQ ID NO: 2688230 - RNA, 19 nt, Artificial Sequence
  Description of Artificial Sequence: Synthetic oligonucleotide
gccgaucuccuucucugca

SEQ ID NO: 2688231 - RNA, 19 nt, Artificial Sequence
  Description of Artificial Sequence: Synthetic oligonucleotide
agcaaccacugguccugaa

SEQ ID NO: 2688232 - RNA, 19 nt, Artificial Sequence
  Description of Artificial Sequence: Synthetic oligonucleotide
uagagucugcaggguuggu

SEQ ID NO: 2688233 - RNA, 19 nt, Artificial Sequence
  Description of Artificial Sequence: Synthetic oligonucleotide
gucccuugccuguaagaau

SEQ ID NO: 2688234 - RNA, 19 nt, Artificial Sequence
  Description of Artificial Sequence: Synthetic oligonucleotide
guauuucacuaggccagua

SEQ ID NO: 2688235 - RNA, 19 nt, Artificial Sequence
  Description of Artificial Sequence: Synthetic oligonucleotide
cccuugccuguaagaauag

SEQ ID NO: 2688236 - RNA, 19 nt, Artificial Sequence
  Description of Artificial Sequence: Synthetic oligonucleotide
uggaccccaucaggcuuga

SEQ ID NO: 2688237 - RNA, 19 nt, Artificial Sequence
  Description of Artificial Sequence: Synthetic oligonucleotide
cagaaucgcugccaugaau

SEQ ID NO: 2688238 - RNA, 19 nt, Artificial Sequence
  Description of Artificial Sequence: Synthetic oligonucleotide
cacccggccugucuucaca

SEQ ID NO: 2688239 - RNA, 19 nt, Artificial Sequence
  Description of Artificial Sequence: Synthetic oligonucleotide
gguuggucucuccaagcau

SEQ ID NO: 2688240 - RNA, 19 nt, Artificial Sequence
  Description of Artificial Sequence: Synthetic oligonucleotide
gggguaaguagaggggaaa

SEQ ID NO: 2688241 - RNA, 19 nt, Artificial Sequence
  Description of Artificial Sequence: Synthetic oligonucleotide
ccugucacucauagaucca

SEQ ID NO: 2688242 - RNA, 19 nt, Artificial Sequence
  Description of Artificial Sequence: Synthetic oligonucleotide
ggugcccuccugucacuca

SEQ ID NO: 2688243 - RNA, 19 nt, Artificial Sequence
  Description of Artificial Sequence: Synthetic oligonucleotide
uguuggccaugguccccuu

SEQ ID NO: 2688244 - RNA, 19 nt, Artificial Sequence
  Description of Artificial Sequence: Synthetic oligonucleotide
gcaaccacugguccugaau

SEQ ID NO: 2688245 - RNA, 19 nt, Artificial Sequence
  Description of Artificial Sequence: Synthetic oligonucleotide
ccaacaagucggaaucccu

SEQ ID NO: 2688246 - RNA, 19 nt, Artificial Sequence
  Description of Artificial Sequence: Synthetic oligonucleotide
cgaauggucccagguuuag

SEQ ID NO: 2688247 - RNA, 19 nt, Artificial Sequence
  Description of Artificial Sequence: Synthetic oligonucleotide
ccuucuguucaaaacgcuu

SEQ ID NO: 2688248 - RNA, 19 nt, Artificial Sequence
  Description of Artificial Sequence: Synthetic oligonucleotide
ccagagguuccuuccaggu

SEQ ID NO: 2688249 - RNA, 19 nt, Artificial Sequence
  Description of Artificial Sequence: Synthetic oligonucleotide
ccagaccauagcaaccacu

SEQ ID NO: 2688250 - RNA, 19 nt, Artificial Sequence
  Description of Artificial Sequence: Synthetic oligonucleotide
ccucaggcugaaaccacaa

SEQ ID NO: 2688251 - RNA, 19 nt, Artificial Sequence
  Description of Artificial Sequence: Synthetic oligonucleotide
ggggaaaagcaggugcccu

SEQ ID NO: 2688252 - RNA, 19 nt, Artificial Sequence
  Description of Artificial Sequence: Synthetic oligonucleotide
ggaaucccuucuguucaaa

SEQ ID NO: 2688253 - RNA, 19 nt, Artificial Sequence
  Description of Artificial Sequence: Synthetic oligonucleotide
cugguccugaaugcaugua

SEQ ID NO: 2688254 - RNA, 19 nt, Artificial Sequence
  Description of Artificial Sequence: Synthetic oligonucleotide
gguccugaaugcauguauu

SEQ ID NO: 2688255 - RNA, 19 nt, Artificial Sequence
  Description of Artificial Sequence: Synthetic oligonucleotide
caagcaucacccggccugu

SEQ ID NO: 2688256 - RNA, 19 nt, Artificial Sequence
  Description of Artificial Sequence: Synthetic oligonucleotide
ccccgcuggaccccaucag

SEQ ID NO: 2688257 - RNA, 19 nt, Artificial Sequence
  Description of Artificial Sequence: Synthetic oligonucleotide
cuagaguugcuggucccuu

SEQ ID NO: 2688258 - RNA, 19 nt, Artificial Sequence
  Description of Artificial Sequence: Synthetic oligonucleotide
gguccucugaagccugcau

SEQ ID NO: 2688259 - RNA, 19 nt, Artificial Sequence
  Description of Artificial Sequence: Synthetic oligonucleotide
caaccccucccagaccaua

SEQ ID NO: 2688260 - RNA, 19 nt, Artificial Sequence
  Description of Artificial Sequence: Synthetic oligonucleotide
cgcucacuguuggccaugg

SEQ ID NO: 2688261 - RNA, 19 nt, Artificial Sequence
  Description of Artificial Sequence: Synthetic oligonucleotide
gcaucacccggccugucuu

SEQ ID NO: 2688262 - RNA, 19 nt, Artificial Sequence
  Description of Artificial Sequence: Synthetic oligonucleotide
ccaccagaccccgcuggac

SEQ ID NO: 2688263 - RNA, 19 nt, Artificial Sequence
  Description of Artificial Sequence: Synthetic oligonucleotide
agguuccuuccaggucaaa

SEQ ID NO: 2688264 - RNA, 19 nt, Artificial Sequence
  Description of Artificial Sequence: Synthetic oligonucleotide
ccagaccccgcuggacccc

SEQ ID NO: 2688265 - RNA, 19 nt, Artificial Sequence
  Description of Artificial Sequence: Synthetic oligonucleotide
gcgcucacuguuggccaug

SEQ ID NO: 2688266 - RNA, 19 nt, Artificial Sequence
  Description of Artificial Sequence: Synthetic oligonucleotide
ccaguaaagaagggacggu

SEQ ID NO: 2688267 - RNA, 19 nt, Artificial Sequence
  Description of Artificial Sequence: Synthetic oligonucleotide
ccucgaauggucccagguu

SEQ ID NO: 2688268 - RNA, 19 nt, Artificial Sequence
  Description of Artificial Sequence: Synthetic oligonucleotide
ccacugguccugaaugcau

SEQ ID NO: 2688269 - RNA, 19 nt, Artificial Sequence
  Description of Artificial Sequence: Synthetic oligonucleotide
caggugcccuccugucacu

SEQ ID NO: 2688270 - RNA, 19 nt, Artificial Sequence
  Description of Artificial Sequence: Synthetic oligonucleotide
cccuccugucacucauaga

SEQ ID NO: 2688271 - RNA, 19 nt, Artificial Sequence
  Description of Artificial Sequence: Synthetic oligonucleotide
ccucugaagccugcauaaa

SEQ ID NO: 2688272 - RNA, 19 nt, Artificial Sequence
  Description of Artificial Sequence: Synthetic oligonucleotide
cggaaucccuucuguucaa

SEQ ID NO: 2688273 - RNA, 19 nt, Artificial Sequence
  Description of Artificial Sequence: Synthetic oligonucleotide
gcucacuguuggccauggu

SEQ ID NO: 2688274 - RNA, 19 nt, Artificial Sequence
  Description of Artificial Sequence: Synthetic oligonucleotide
cggccugucuucacaacau

SEQ ID NO: 2688275 - RNA, 19 nt, Artificial Sequence
  Description of Artificial Sequence: Synthetic oligonucleotide
ccagcuccucaggcugaaa

SEQ ID NO: 2688276 - RNA, 19 nt, Artificial Sequence
  Description of Artificial Sequence: Synthetic oligonucleotide
ggaccccaucaggcuugau

SEQ ID NO: 2688277 - RNA, 19 nt, Artificial Sequence
  Description of Artificial Sequence: Synthetic oligonucleotide
aacccaaaucuuuugaugg

SEQ ID NO: 2688278 - RNA, 19 nt, Artificial Sequence
  Description of Artificial Sequence: Synthetic oligonucleotide
agagacuccacucauaagg

SEQ ID NO: 2688279 - RNA, 19 nt, Artificial Sequence
  Description of Artificial Sequence: Synthetic oligonucleotide
ugacuugacacucaggagg

SEQ ID NO: 2688280 - RNA, 19 nt, Artificial Sequence
  Description of Artificial Sequence: Synthetic oligonucleotide
gaaaucuuggcacugcucg

SEQ ID NO: 2688281 - RNA, 19 nt, Artificial Sequence
  Description of Artificial Sequence: Synthetic oligonucleotide
gauuguauggaauuucucc

SEQ ID NO: 2688282 - RNA, 19 nt, Artificial Sequence
  Description of Artificial Sequence: Synthetic oligonucleotide
uauuaugucugacacagca

SEQ ID NO: 2688283 - RNA, 19 nt, Artificial Sequence
  Description of Artificial Sequence: Synthetic oligonucleotide
auuguauggaauuucuccg

SEQ ID NO: 2688284 - RNA, 19 nt, Artificial Sequence
  Description of Artificial Sequence: Synthetic oligonucleotide
gacucauucacauacauga

SEQ ID NO: 2688285 - RNA, 19 nt, Artificial Sequence
  Description of Artificial Sequence: Synthetic oligonucleotide
cuugccaccauauugcugg

SEQ ID NO: 2688286 - RNA, 19 nt, Artificial Sequence
  Description of Artificial Sequence: Synthetic oligonucleotide
gauucguaccaacagaucc

SEQ ID NO: 2688287 - RNA, 19 nt, Artificial Sequence
  Description of Artificial Sequence: Synthetic oligonucleotide
gaaucgguagauuguaugg

SEQ ID NO: 2688288 - RNA, 19 nt, Artificial Sequence
  Description of Artificial Sequence: Synthetic oligonucleotide
ucuucuugccaccauauug

SEQ ID NO: 2688289 - RNA, 19 nt, Artificial Sequence
  Description of Artificial Sequence: Synthetic oligonucleotide
uucacauacaugaagccca

SEQ ID NO: 2688290 - RNA, 19 nt, Artificial Sequence
  Description of Artificial Sequence: Synthetic oligonucleotide
agucagaaaugucugggcc

SEQ ID NO: 2688291 - RNA, 19 nt, Artificial Sequence
  Description of Artificial Sequence: Synthetic oligonucleotide
auacaugaagcccaccagc

SEQ ID NO: 2688292 - RNA, 19 nt, Artificial Sequence
  Description of Artificial Sequence: Synthetic oligonucleotide
cuucagucgagauagaaac

SEQ ID NO: 2688293 - RNA, 19 nt, Artificial Sequence
  Description of Artificial Sequence: Synthetic oligonucleotide
cuuuugauggcucugaauc

SEQ ID NO: 2688294 - RNA, 19 nt, Artificial Sequence
  Description of Artificial Sequence: Synthetic oligonucleotide
acaauacguaucuugucgc

SEQ ID NO: 2688295 - RNA, 19 nt, Artificial Sequence
  Description of Artificial Sequence: Synthetic oligonucleotide
aaaugucugggccaacuuc

SEQ ID NO: 2688296 - RNA, 19 nt, Artificial Sequence
  Description of Artificial Sequence: Synthetic oligonucleotide
uuaugucugacacagcaca

SEQ ID NO: 2688297 - RNA, 19 nt, Artificial Sequence
  Description of Artificial Sequence: Synthetic oligonucleotide
accugacucauucacauac

SEQ ID NO: 2688298 - RNA, 19 nt, Artificial Sequence
  Description of Artificial Sequence: Synthetic oligonucleotide
guuccuuggauucugacag

SEQ ID NO: 2688299 - RNA, 19 nt, Artificial Sequence
  Description of Artificial Sequence: Synthetic oligonucleotide
agugacuugacacucagga

SEQ ID NO: 2688300 - RNA, 19 nt, Artificial Sequence
  Description of Artificial Sequence: Synthetic oligonucleotide
agguagagugacuugacac

SEQ ID NO: 2688301 - RNA, 19 nt, Artificial Sequence
  Description of Artificial Sequence: Synthetic oligonucleotide
cacaauacguaucuugucg

SEQ ID NO: 2688302 - RNA, 19 nt, Artificial Sequence
  Description of Artificial Sequence: Synthetic oligonucleotide
ucugacagggguauuaugu

SEQ ID NO: 2688303 - RNA, 19 nt, Artificial Sequence
  Description of Artificial Sequence: Synthetic oligonucleotide
uuuugauggcucugaaucg

SEQ ID NO: 2688304 - RNA, 19 nt, Artificial Sequence
  Description of Artificial Sequence: Synthetic oligonucleotide
auucacauacaugaagccc

SEQ ID NO: 2688305 - RNA, 19 nt, Artificial Sequence
  Description of Artificial Sequence: Synthetic oligonucleotide
auuucuccgucucugugcc

SEQ ID NO: 2688306 - RNA, 19 nt, Artificial Sequence
  Description of Artificial Sequence: Synthetic oligonucleotide
aaagaaggacaggugggcc

SEQ ID NO: 2688307 - RNA, 19 nt, Artificial Sequence
  Description of Artificial Sequence: Synthetic oligonucleotide
cuucuugccaccauauugc

SEQ ID NO: 2688308 - RNA, 19 nt, Artificial Sequence
  Description of Artificial Sequence: Synthetic oligonucleotide
ugugaguaccaguacaagc

SEQ ID NO: 2688309 - RNA, 19 nt, Artificial Sequence
  Description of Artificial Sequence: Synthetic oligonucleotide
acucauaagguagagugac

SEQ ID NO: 2688310 - RNA, 19 nt, Artificial Sequence
  Description of Artificial Sequence: Synthetic oligonucleotide
auauugcuggauucguacc

SEQ ID NO: 2688311 - RNA, 19 nt, Artificial Sequence
  Description of Artificial Sequence: Synthetic oligonucleotide
gguauuaugucugacacag

SEQ ID NO: 2688312 - RNA, 19 nt, Artificial Sequence
  Description of Artificial Sequence: Synthetic oligonucleotide
uuuccaaacacuugugaga

SEQ ID NO: 2688313 - RNA, 19 nt, Artificial Sequence
  Description of Artificial Sequence: Synthetic oligonucleotide
gagauagaaacccaaaucu

SEQ ID NO: 2688314 - RNA, 19 nt, Artificial Sequence
  Description of Artificial Sequence: Synthetic oligonucleotide
ugaagcaagagacuccacu

SEQ ID NO: 2688315 - RNA, 19 nt, Artificial Sequence
  Description of Artificial Sequence: Synthetic oligonucleotide
aaggugggagccuugcuag

SEQ ID NO: 2688316 - RNA, 19 nt, Artificial Sequence
  Description of Artificial Sequence: Synthetic oligonucleotide
ugaaucgguagauuguaug

SEQ ID NO: 2688317 - RNA, 19 nt, Artificial Sequence
  Description of Artificial Sequence: Synthetic oligonucleotide
ucagucgagauagaaaccc

SEQ ID NO: 2688318 - RNA, 19 nt, Artificial Sequence
  Description of Artificial Sequence: Synthetic oligonucleotide
ugagaaacguucucugucc

SEQ ID NO: 2688319 - RNA, 19 nt, Artificial Sequence
  Description of Artificial Sequence: Synthetic oligonucleotide
uacaugaagcccaccagcc

SEQ ID NO: 2688320 - RNA, 19 nt, Artificial Sequence
  Description of Artificial Sequence: Synthetic oligonucleotide
uuugauggcucugaaucgg

SEQ ID NO: 2688321 - RNA, 19 nt, Artificial Sequence
  Description of Artificial Sequence: Synthetic oligonucleotide
cuagucacccaccuguugg

SEQ ID NO: 2688322 - RNA, 19 nt, Artificial Sequence
  Description of Artificial Sequence: Synthetic oligonucleotide
cauauugcuggauucguac

SEQ ID NO: 2688323 - RNA, 19 nt, Artificial Sequence
  Description of Artificial Sequence: Synthetic oligonucleotide
uagauuguauggaauuucu

SEQ ID NO: 2688324 - RNA, 19 nt, Artificial Sequence
  Description of Artificial Sequence: Synthetic oligonucleotide
ugucgccacccaaagaagg

SEQ ID NO: 2688325 - RNA, 19 nt, Artificial Sequence
  Description of Artificial Sequence: Synthetic oligonucleotide
aaguagcucauccaacaca

SEQ ID NO: 2688326 - RNA, 19 nt, Artificial Sequence
  Description of Artificial Sequence: Synthetic oligonucleotide
agaaguagcucauccaaca

SEQ ID NO: 2688327 - RNA, 19 nt, Artificial Sequence
  Description of Artificial Sequence: Synthetic oligonucleotide
acauacaugaagcccacca

SEQ ID NO: 2688328 - RNA, 19 nt, Artificial Sequence
  Description of Artificial Sequence: Synthetic oligonucleotide
gaaacguucucuguccagg

SEQ ID NO: 2688329 - RNA, 19 nt, Artificial Sequence
  Description of Artificial Sequence: Synthetic oligonucleotide
uugcuagucacccaccugu

SEQ ID NO: 2688330 - RNA, 19 nt, Artificial Sequence
  Description of Artificial Sequence: Synthetic oligonucleotide
auacguaucuugucgccac

SEQ ID NO: 2688331 - RNA, 19 nt, Artificial Sequence
  Description of Artificial Sequence: Synthetic oligonucleotide
cucauucacauacaugaag

SEQ ID NO: 2688332 - RNA, 19 nt, Artificial Sequence
  Description of Artificial Sequence: Synthetic oligonucleotide
acacuugugagaaacguuc

SEQ ID NO: 2688333 - RNA, 19 nt, Artificial Sequence
  Description of Artificial Sequence: Synthetic oligonucleotide
ucacagucagaaaugucug

SEQ ID NO: 2688334 - RNA, 19 nt, Artificial Sequence
  Description of Artificial Sequence: Synthetic oligonucleotide
acccaaaucuuuugauggc

SEQ ID NO: 2688335 - RNA, 19 nt, Artificial Sequence
  Description of Artificial Sequence: Synthetic oligonucleotide
gugaguaccaguacaagcc

SEQ ID NO: 2688336 - RNA, 19 nt, Artificial Sequence
  Description of Artificial Sequence: Synthetic oligonucleotide
aaacacuugugagaaacgu

SEQ ID NO: 2688337 - RNA, 19 nt, Artificial Sequence
  Description of Artificial Sequence: Synthetic oligonucleotide
ucggccauagcgcagggug

SEQ ID NO: 2688338 - RNA, 19 nt, Artificial Sequence
  Description of Artificial Sequence: Synthetic oligonucleotide
cauucacauacaugaagcc

SEQ ID NO: 2688339 - RNA, 19 nt, Artificial Sequence
  Description of Artificial Sequence: Synthetic oligonucleotide
uguuccuuggauucugaca

SEQ ID NO: 2688340 - RNA, 19 nt, Artificial Sequence
  Description of Artificial Sequence: Synthetic oligonucleotide
cauagaaggucuucuugcc

SEQ ID NO: 2688341 - RNA, 19 nt, Artificial Sequence
  Description of Artificial Sequence: Synthetic oligonucleotide
ugugguuggguuuccaaac

SEQ ID NO: 2688342 - RNA, 19 nt, Artificial Sequence
  Description of Artificial Sequence: Synthetic oligonucleotide
uggauucguaccaacagau

SEQ ID NO: 2688343 - RNA, 19 nt, Artificial Sequence
  Description of Artificial Sequence: Synthetic oligonucleotide
ucugggccaacuucagucg

SEQ ID NO: 2688344 - RNA, 19 nt, Artificial Sequence
  Description of Artificial Sequence: Synthetic oligonucleotide
agaaacccaaaucuuuuga

SEQ ID NO: 2688345 - RNA, 19 nt, Artificial Sequence
  Description of Artificial Sequence: Synthetic oligonucleotide
aaugucugggccaacuuca

SEQ ID NO: 2688346 - RNA, 19 nt, Artificial Sequence
  Description of Artificial Sequence: Synthetic oligonucleotide
aagaaggacaggugggcca

SEQ ID NO: 2688347 - RNA, 19 nt, Artificial Sequence
  Description of Artificial Sequence: Synthetic oligonucleotide
uauggaauuucuccgucuc

SEQ ID NO: 2688348 - RNA, 19 nt, Artificial Sequence
  Description of Artificial Sequence: Synthetic oligonucleotide
ucgagauagaaacccaaau

SEQ ID NO: 2688349 - RNA, 19 nt, Artificial Sequence
  Description of Artificial Sequence: Synthetic oligonucleotide
ugacucauucacauacaug

SEQ ID NO: 2688350 - RNA, 19 nt, Artificial Sequence
  Description of Artificial Sequence: Synthetic oligonucleotide
uugugagaaacguucucug

SEQ ID NO: 2688351 - RNA, 19 nt, Artificial Sequence
  Description of Artificial Sequence: Synthetic oligonucleotide
caggauucggccauagcgc

SEQ ID NO: 2688352 - RNA, 19 nt, Artificial Sequence
  Description of Artificial Sequence: Synthetic oligonucleotide
auaagguagagugacuuga

SEQ ID NO: 2688353 - RNA, 19 nt, Artificial Sequence
  Description of Artificial Sequence: Synthetic oligonucleotide
uaccaacagauccugggca

SEQ ID NO: 2688354 - RNA, 19 nt, Artificial Sequence
  Description of Artificial Sequence: Synthetic oligonucleotide
uagaaacccaaaucuuuug

SEQ ID NO: 2688355 - RNA, 19 nt, Artificial Sequence
  Description of Artificial Sequence: Synthetic oligonucleotide
caaacacuugugagaaacg

SEQ ID NO: 2688356 - RNA, 19 nt, Artificial Sequence
  Description of Artificial Sequence: Synthetic oligonucleotide
acuugugagaaacguucuc

SEQ ID NO: 2688357 - RNA, 19 nt, Artificial Sequence
  Description of Artificial Sequence: Synthetic oligonucleotide
uucagucgagauagaaacc

SEQ ID NO: 2688358 - RNA, 19 nt, Artificial Sequence
  Description of Artificial Sequence: Synthetic oligonucleotide
cacaguaccugacucauuc

SEQ ID NO: 2688359 - RNA, 19 nt, Artificial Sequence
  Description of Artificial Sequence: Synthetic oligonucleotide
aagguagagugacuugaca

SEQ ID NO: 2688360 - RNA, 19 nt, Artificial Sequence
  Description of Artificial Sequence: Synthetic oligonucleotide
aauacguaucuugucgcca

SEQ ID NO: 2688361 - RNA, 19 nt, Artificial Sequence
  Description of Artificial Sequence: Synthetic oligonucleotide
aaaucuuuugauggcucug

SEQ ID NO: 2688362 - RNA, 19 nt, Artificial Sequence
  Description of Artificial Sequence: Synthetic oligonucleotide
aaucuuuugauggcucuga

SEQ ID NO: 2688363 - RNA, 19 nt, Artificial Sequence
  Description of Artificial Sequence: Synthetic oligonucleotide
ccacucauaagguagagug

SEQ ID NO: 2688364 - RNA, 19 nt, Artificial Sequence
  Description of Artificial Sequence: Synthetic oligonucleotide
ucuuggcacugcucgaagg

SEQ ID NO: 2688365 - RNA, 19 nt, Artificial Sequence
  Description of Artificial Sequence: Synthetic oligonucleotide
uaccaguacaagccugggg

SEQ ID NO: 2688366 - RNA, 19 nt, Artificial Sequence
  Description of Artificial Sequence: Synthetic oligonucleotide
uguauggaauuucuccguc

SEQ ID NO: 2688367 - RNA, 19 nt, Artificial Sequence
  Description of Artificial Sequence: Synthetic oligonucleotide
uccuuggauucugacaggg

SEQ ID NO: 2688368 - RNA, 19 nt, Artificial Sequence
  Description of Artificial Sequence: Synthetic oligonucleotide
ugaguaccaguacaagccu

SEQ ID NO: 2688369 - RNA, 19 nt, Artificial Sequence
  Description of Artificial Sequence: Synthetic oligonucleotide
cauacaugaagcccaccag

SEQ ID NO: 2688370 - RNA, 19 nt, Artificial Sequence
  Description of Artificial Sequence: Synthetic oligonucleotide
aaucgguagauuguaugga

SEQ ID NO: 2688371 - RNA, 19 nt, Artificial Sequence
  Description of Artificial Sequence: Synthetic oligonucleotide
uguggcuggccucugaaau

SEQ ID NO: 2688372 - RNA, 19 nt, Artificial Sequence
  Description of Artificial Sequence: Synthetic oligonucleotide
agagugacuugacacucag

SEQ ID NO: 2688373 - RNA, 19 nt, Artificial Sequence
  Description of Artificial Sequence: Synthetic oligonucleotide
ugacacagcacaauacgua

SEQ ID NO: 2688374 - RNA, 19 nt, Artificial Sequence
  Description of Artificial Sequence: Synthetic oligonucleotide
uuccaaacacuugugagaa

SEQ ID NO: 2688375 - RNA, 19 nt, Artificial Sequence
  Description of Artificial Sequence: Synthetic oligonucleotide
ccaggauucggccauagcg

SEQ ID NO: 2688376 - RNA, 19 nt, Artificial Sequence
  Description of Artificial Sequence: Synthetic oligonucleotide
uuguauggaauuucuccgu

SEQ ID NO: 2688377 - RNA, 19 nt, Artificial Sequence
  Description of Artificial Sequence: Synthetic oligonucleotide
gaauuucuccgucucugug

SEQ ID NO: 2688378 - RNA, 19 nt, Artificial Sequence
  Description of Artificial Sequence: Synthetic oligonucleotide
gaagcacaguaccugacuc

SEQ ID NO: 2688379 - RNA, 19 nt, Artificial Sequence
  Description of Artificial Sequence: Synthetic oligonucleotide
aagcccaccagccucugga

SEQ ID NO: 2688380 - RNA, 19 nt, Artificial Sequence
  Description of Artificial Sequence: Synthetic oligonucleotide
uggaauuucuccgucucug

SEQ ID NO: 2688381 - RNA, 19 nt, Artificial Sequence
  Description of Artificial Sequence: Synthetic oligonucleotide
aaaucuuggcacugcucga

SEQ ID NO: 2688382 - RNA, 19 nt, Artificial Sequence
  Description of Artificial Sequence: Synthetic oligonucleotide
aagcacaguaccugacuca

SEQ ID NO: 2688383 - RNA, 19 nt, Artificial Sequence
  Description of Artificial Sequence: Synthetic oligonucleotide
ucuuaagugugguuggguu

SEQ ID NO: 2688384 - RNA, 19 nt, Artificial Sequence
  Description of Artificial Sequence: Synthetic oligonucleotide
cuugucgccacccaaagaa

SEQ ID NO: 2688385 - RNA, 19 nt, Artificial Sequence
  Description of Artificial Sequence: Synthetic oligonucleotide
aaacguucucuguccagga

SEQ ID NO: 2688386 - RNA, 19 nt, Artificial Sequence
  Description of Artificial Sequence: Synthetic oligonucleotide
ugcucgaaggaagacagac

SEQ ID NO: 2688387 - RNA, 19 nt, Artificial Sequence
  Description of Artificial Sequence: Synthetic oligonucleotide
caauacguaucuugucgcc

SEQ ID NO: 2688388 - RNA, 19 nt, Artificial Sequence
  Description of Artificial Sequence: Synthetic oligonucleotide
aguaccaguacaagccugg

SEQ ID NO: 2688389 - RNA, 19 nt, Artificial Sequence
  Description of Artificial Sequence: Synthetic oligonucleotide
ugacagggguauuaugucu

SEQ ID NO: 2688390 - RNA, 19 nt, Artificial Sequence
  Description of Artificial Sequence: Synthetic oligonucleotide
acagauccugggcauguuc

SEQ ID NO: 2688391 - RNA, 19 nt, Artificial Sequence
  Description of Artificial Sequence: Synthetic oligonucleotide
cagcacaauacguaucuug

SEQ ID NO: 2688392 - RNA, 19 nt, Artificial Sequence
  Description of Artificial Sequence: Synthetic oligonucleotide
uuaagugugguuggguuuc

SEQ ID NO: 2688393 - RNA, 19 nt, Artificial Sequence
  Description of Artificial Sequence: Synthetic oligonucleotide
ucauaagguagagugacuu

SEQ ID NO: 2688394 - RNA, 19 nt, Artificial Sequence
  Description of Artificial Sequence: Synthetic oligonucleotide
gaaguagcucauccaacac

SEQ ID NO: 2688395 - RNA, 19 nt, Artificial Sequence
  Description of Artificial Sequence: Synthetic oligonucleotide
ucuccugcaaggugggagc

SEQ ID NO: 2688396 - RNA, 19 nt, Artificial Sequence
  Description of Artificial Sequence: Synthetic oligonucleotide
ugucugacacagcacaaua

SEQ ID NO: 2688397 - RNA, 19 nt, Artificial Sequence
  Description of Artificial Sequence: Synthetic oligonucleotide
agggguauuaugucugaca

SEQ ID NO: 2688398 - RNA, 19 nt, Artificial Sequence
  Description of Artificial Sequence: Synthetic oligonucleotide
agugcagcaccacagccga

SEQ ID NO: 2688399 - RNA, 19 nt, Artificial Sequence
  Description of Artificial Sequence: Synthetic oligonucleotide
cauaagguagagugacuug

SEQ ID NO: 2688400 - RNA, 19 nt, Artificial Sequence
  Description of Artificial Sequence: Synthetic oligonucleotide
uucuccugcaaggugggag

SEQ ID NO: 2688401 - RNA, 19 nt, Artificial Sequence
  Description of Artificial Sequence: Synthetic oligonucleotide
ucugaaaucuuggcacugc

SEQ ID NO: 2688402 - RNA, 19 nt, Artificial Sequence
  Description of Artificial Sequence: Synthetic oligonucleotide
gugagaaacguucucuguc

SEQ ID NO: 2688403 - RNA, 19 nt, Artificial Sequence
  Description of Artificial Sequence: Synthetic oligonucleotide
caaagaaggacaggugggc

SEQ ID NO: 2688404 - RNA, 19 nt, Artificial Sequence
  Description of Artificial Sequence: Synthetic oligonucleotide
cagugcagcaccacagccg

SEQ ID NO: 2688405 - RNA, 19 nt, Artificial Sequence
  Description of Artificial Sequence: Synthetic oligonucleotide
auagcgcagggugacauag

SEQ ID NO: 2688406 - RNA, 19 nt, Artificial Sequence
  Description of Artificial Sequence: Synthetic oligonucleotide
agccucuggaagaaguagc

SEQ ID NO: 2688407 - RNA, 19 nt, Artificial Sequence
  Description of Artificial Sequence: Synthetic oligonucleotide
agaaacguucucuguccag

SEQ ID NO: 2688408 - RNA, 19 nt, Artificial Sequence
  Description of Artificial Sequence: Synthetic oligonucleotide
gacagggguauuaugucug

SEQ ID NO: 2688409 - RNA, 19 nt, Artificial Sequence
  Description of Artificial Sequence: Synthetic oligonucleotide
gggguauuaugucugacac

SEQ ID NO: 2688410 - RNA, 19 nt, Artificial Sequence
  Description of Artificial Sequence: Synthetic oligonucleotide
caugaagcccaccagccuc

SEQ ID NO: 2688411 - RNA, 19 nt, Artificial Sequence
  Description of Artificial Sequence: Synthetic oligonucleotide
uugucgccacccaaagaag

SEQ ID NO: 2688412 - RNA, 19 nt, Artificial Sequence
  Description of Artificial Sequence: Synthetic oligonucleotide
agcacaauacguaucuugu

SEQ ID NO: 2688413 - RNA, 19 nt, Artificial Sequence
  Description of Artificial Sequence: Synthetic oligonucleotide
aucuugucgccacccaaag

SEQ ID NO: 2688414 - RNA, 19 nt, Artificial Sequence
  Description of Artificial Sequence: Synthetic oligonucleotide
ugguuggguuuccaaacac

SEQ ID NO: 2688415 - RNA, 19 nt, Artificial Sequence
  Description of Artificial Sequence: Synthetic oligonucleotide
gugacuugacacucaggag

SEQ ID NO: 2688416 - RNA, 19 nt, Artificial Sequence
  Description of Artificial Sequence: Synthetic oligonucleotide
ucuuuugauggcucugaau

SEQ ID NO: 2688417 - RNA, 19 nt, Artificial Sequence
  Description of Artificial Sequence: Synthetic oligonucleotide
ucugaaucgguagauugua

SEQ ID NO: 2688418 - RNA, 19 nt, Artificial Sequence
  Description of Artificial Sequence: Synthetic oligonucleotide
agauuguauggaauuucuc

SEQ ID NO: 2688419 - RNA, 19 nt, Artificial Sequence
  Description of Artificial Sequence: Synthetic oligonucleotide
ucacccaccuguuggaauc

SEQ ID NO: 2688420 - RNA, 19 nt, Artificial Sequence
  Description of Artificial Sequence: Synthetic oligonucleotide
aucgguagauuguauggaa

SEQ ID NO: 2688421 - RNA, 19 nt, Artificial Sequence
  Description of Artificial Sequence: Synthetic oligonucleotide
caguaccugacucauucac

SEQ ID NO: 2688422 - RNA, 19 nt, Artificial Sequence
  Description of Artificial Sequence: Synthetic oligonucleotide
ccaaagaaggacagguggg

SEQ ID NO: 2688423 - RNA, 19 nt, Artificial Sequence
  Description of Artificial Sequence: Synthetic oligonucleotide
aacuucagucgagauagaa

SEQ ID NO: 2688424 - RNA, 19 nt, Artificial Sequence
  Description of Artificial Sequence: Synthetic oligonucleotide
ucgguagauuguauggaau

SEQ ID NO: 2688425 - RNA, 19 nt, Artificial Sequence
  Description of Artificial Sequence: Synthetic oligonucleotide
ucgaaggaagacagacaug

SEQ ID NO: 2688426 - RNA, 19 nt, Artificial Sequence
  Description of Artificial Sequence: Synthetic oligonucleotide
gcuggauucguaccaacag

SEQ ID NO: 2688427 - RNA, 19 nt, Artificial Sequence
  Description of Artificial Sequence: Synthetic oligonucleotide
uucguaccaacagauccug

SEQ ID NO: 2688428 - RNA, 19 nt, Artificial Sequence
  Description of Artificial Sequence: Synthetic oligonucleotide
ucacauacaugaagcccac

SEQ ID NO: 2688429 - RNA, 19 nt, Artificial Sequence
  Description of Artificial Sequence: Synthetic oligonucleotide
acaggugggccacucgaag

SEQ ID NO: 2688430 - RNA, 19 nt, Artificial Sequence
  Description of Artificial Sequence: Synthetic oligonucleotide
acguaucuugucgccaccc

SEQ ID NO: 2688431 - RNA, 19 nt, Artificial Sequence
  Description of Artificial Sequence: Synthetic oligonucleotide
guagggcugucacagucag

SEQ ID NO: 2688432 - RNA, 19 nt, Artificial Sequence
  Description of Artificial Sequence: Synthetic oligonucleotide
ucagaaaugucugggccaa

SEQ ID NO: 2688433 - RNA, 19 nt, Artificial Sequence
  Description of Artificial Sequence: Synthetic oligonucleotide
uagagugacuugacacuca

SEQ ID NO: 2688434 - RNA, 19 nt, Artificial Sequence
  Description of Artificial Sequence: Synthetic oligonucleotide
gccucugaaaucuuggcac

SEQ ID NO: 2688435 - RNA, 19 nt, Artificial Sequence
  Description of Artificial Sequence: Synthetic oligonucleotide
gcucugaaucgguagauug

SEQ ID NO: 2688436 - RNA, 19 nt, Artificial Sequence
  Description of Artificial Sequence: Synthetic oligonucleotide
caccauauugcuggauucg

SEQ ID NO: 2688437 - RNA, 19 nt, Artificial Sequence
  Description of Artificial Sequence: Synthetic oligonucleotide
aggauucggccauagcgca

SEQ ID NO: 2688438 - RNA, 19 nt, Artificial Sequence
  Description of Artificial Sequence: Synthetic oligonucleotide
cugacagggguauuauguc

SEQ ID NO: 2688439 - RNA, 19 nt, Artificial Sequence
  Description of Artificial Sequence: Synthetic oligonucleotide
ucguaccaacagauccugg

SEQ ID NO: 2688440 - RNA, 19 nt, Artificial Sequence
  Description of Artificial Sequence: Synthetic oligonucleotide
uuccuuggauucugacagg

SEQ ID NO: 2688441 - RNA, 19 nt, Artificial Sequence
  Description of Artificial Sequence: Synthetic oligonucleotide
uucuccgucucugugccug

SEQ ID NO: 2688442 - RNA, 19 nt, Artificial Sequence
  Description of Artificial Sequence: Synthetic oligonucleotide
caagagacuccacucauaa

SEQ ID NO: 2688443 - RNA, 19 nt, Artificial Sequence
  Description of Artificial Sequence: Synthetic oligonucleotide
aacacagcauggccagggu

SEQ ID NO: 2688444 - RNA, 19 nt, Artificial Sequence
  Description of Artificial Sequence: Synthetic oligonucleotide
auggcucugaaucgguaga

SEQ ID NO: 2688445 - RNA, 19 nt, Artificial Sequence
  Description of Artificial Sequence: Synthetic oligonucleotide
ugucacagucagaaauguc

SEQ ID NO: 2688446 - RNA, 19 nt, Artificial Sequence
  Description of Artificial Sequence: Synthetic oligonucleotide
acucgaagcacaguaccug

SEQ ID NO: 2688447 - RNA, 19 nt, Artificial Sequence
  Description of Artificial Sequence: Synthetic oligonucleotide
ucuugucgccacccaaaga

SEQ ID NO: 2688448 - RNA, 19 nt, Artificial Sequence
  Description of Artificial Sequence: Synthetic oligonucleotide
agcaagagacuccacucau

SEQ ID NO: 2688449 - RNA, 19 nt, Artificial Sequence
  Description of Artificial Sequence: Synthetic oligonucleotide
aaucuuggcacugcucgaa

SEQ ID NO: 2688450 - RNA, 19 nt, Artificial Sequence
  Description of Artificial Sequence: Synthetic oligonucleotide
auagaaacccaaaucuuuu

SEQ ID NO: 2688451 - RNA, 19 nt, Artificial Sequence
  Description of Artificial Sequence: Synthetic oligonucleotide
acagccgaugaagaggucu

SEQ ID NO: 2688452 - RNA, 19 nt, Artificial Sequence
  Description of Artificial Sequence: Synthetic oligonucleotide
ugggccaacuucagucgag

SEQ ID NO: 2688453 - RNA, 19 nt, Artificial Sequence
  Description of Artificial Sequence: Synthetic oligonucleotide
uugauggcucugaaucggu

SEQ ID NO: 2688454 - RNA, 19 nt, Artificial Sequence
  Description of Artificial Sequence: Synthetic oligonucleotide
gauagaaacccaaaucuuu

SEQ ID NO: 2688455 - RNA, 19 nt, Artificial Sequence
  Description of Artificial Sequence: Synthetic oligonucleotide
ugggccacucgaagcacag

SEQ ID NO: 2688456 - RNA, 19 nt, Artificial Sequence
  Description of Artificial Sequence: Synthetic oligonucleotide
auucguaccaacagauccu

SEQ ID NO: 2688457 - RNA, 19 nt, Artificial Sequence
  Description of Artificial Sequence: Synthetic oligonucleotide
guagagugacuugacacuc

SEQ ID NO: 2688458 - RNA, 19 nt, Artificial Sequence
  Description of Artificial Sequence: Synthetic oligonucleotide
uacguaucuugucgccacc

SEQ ID NO: 2688459 - RNA, 19 nt, Artificial Sequence
  Description of Artificial Sequence: Synthetic oligonucleotide
ucgaagcacaguaccugac

SEQ ID NO: 2688460 - RNA, 19 nt, Artificial Sequence
  Description of Artificial Sequence: Synthetic oligonucleotide
gaaacccaaaucuuuugau

SEQ ID NO: 2688461 - RNA, 19 nt, Artificial Sequence
  Description of Artificial Sequence: Synthetic oligonucleotide
uucuuaagugugguugggu

SEQ ID NO: 2688462 - RNA, 19 nt, Artificial Sequence
  Description of Artificial Sequence: Synthetic oligonucleotide
aacacuugugagaaacguu

SEQ ID NO: 2688463 - RNA, 19 nt, Artificial Sequence
  Description of Artificial Sequence: Synthetic oligonucleotide
aaggacaggugggccacuc

SEQ ID NO: 2688464 - RNA, 19 nt, Artificial Sequence
  Description of Artificial Sequence: Synthetic oligonucleotide
aacguucucuguccaggau

SEQ ID NO: 2688465 - RNA, 19 nt, Artificial Sequence
  Description of Artificial Sequence: Synthetic oligonucleotide
cuuggauucugacaggggu

SEQ ID NO: 2688466 - RNA, 19 nt, Artificial Sequence
  Description of Artificial Sequence: Synthetic oligonucleotide
gagaaacguucucugucca

SEQ ID NO: 2688467 - RNA, 19 nt, Artificial Sequence
  Description of Artificial Sequence: Synthetic oligonucleotide
caggugggccacucgaagc

SEQ ID NO: 2688468 - RNA, 19 nt, Artificial Sequence
  Description of Artificial Sequence: Synthetic oligonucleotide
aucuuggcacugcucgaag

SEQ ID NO: 2688469 - RNA, 19 nt, Artificial Sequence
  Description of Artificial Sequence: Synthetic oligonucleotide
agggugacauagaaggucu

SEQ ID NO: 2688470 - RNA, 19 nt, Artificial Sequence
  Description of Artificial Sequence: Synthetic oligonucleotide
auggccagggugaagcaag

SEQ ID NO: 2688471 - RNA, 19 nt, Artificial Sequence
  Description of Artificial Sequence: Synthetic oligonucleotide
cagggugacauagaagguc

SEQ ID NO: 2688472 - RNA, 19 nt, Artificial Sequence
  Description of Artificial Sequence: Synthetic oligonucleotide
agauagaaacccaaaucuu

SEQ ID NO: 2688473 - RNA, 19 nt, Artificial Sequence
  Description of Artificial Sequence: Synthetic oligonucleotide
agcgcagggugacauagaa

SEQ ID NO: 2688474 - RNA, 19 nt, Artificial Sequence
  Description of Artificial Sequence: Synthetic oligonucleotide
acguucucuguccaggauu

SEQ ID NO: 2688475 - RNA, 19 nt, Artificial Sequence
  Description of Artificial Sequence: Synthetic oligonucleotide
gauucugacagggguauua

SEQ ID NO: 2688476 - RNA, 19 nt, Artificial Sequence
  Description of Artificial Sequence: Synthetic oligonucleotide
ugggcauguuccuuggauu

SEQ ID NO: 2688477 - RNA, 19 nt, Artificial Sequence
  Description of Artificial Sequence: Synthetic oligonucleotide
cuggauucguaccaacaga

SEQ ID NO: 2688478 - RNA, 19 nt, Artificial Sequence
  Description of Artificial Sequence: Synthetic oligonucleotide
ggaagaaguagcucaucca

SEQ ID NO: 2688479 - RNA, 19 nt, Artificial Sequence
  Description of Artificial Sequence: Synthetic oligonucleotide
cucgaaggaagacagacau

SEQ ID NO: 2688480 - RNA, 19 nt, Artificial Sequence
  Description of Artificial Sequence: Synthetic oligonucleotide
agugugguuggguuuccaa

SEQ ID NO: 2688481 - RNA, 19 nt, Artificial Sequence
  Description of Artificial Sequence: Synthetic oligonucleotide
cuugcuagucacccaccug

SEQ ID NO: 2688482 - RNA, 19 nt, Artificial Sequence
  Description of Artificial Sequence: Synthetic oligonucleotide
gaguaccaguacaagccug

SEQ ID NO: 2688483 - RNA, 19 nt, Artificial Sequence
  Description of Artificial Sequence: Synthetic oligonucleotide
acuucagucgagauagaaa

SEQ ID NO: 2688484 - RNA, 19 nt, Artificial Sequence
  Description of Artificial Sequence: Synthetic oligonucleotide
aguaccugacucauucaca

SEQ ID NO: 2688485 - RNA, 19 nt, Artificial Sequence
  Description of Artificial Sequence: Synthetic oligonucleotide
gguuuccaaacacuuguga

SEQ ID NO: 2688486 - RNA, 19 nt, Artificial Sequence
  Description of Artificial Sequence: Synthetic oligonucleotide
acaguaccugacucauuca

SEQ ID NO: 2688487 - RNA, 19 nt, Artificial Sequence
  Description of Artificial Sequence: Synthetic oligonucleotide
agauccugggcauguuccu

SEQ ID NO: 2688488 - RNA, 19 nt, Artificial Sequence
  Description of Artificial Sequence: Synthetic oligonucleotide
agccgaugaagaggucucc

SEQ ID NO: 2688489 - RNA, 19 nt, Artificial Sequence
  Description of Artificial Sequence: Synthetic oligonucleotide
acagggguauuaugucuga

SEQ ID NO: 2688490 - RNA, 19 nt, Artificial Sequence
  Description of Artificial Sequence: Synthetic oligonucleotide
aggacaggugggccacucg

SEQ ID NO: 2688491 - RNA, 19 nt, Artificial Sequence
  Description of Artificial Sequence: Synthetic oligonucleotide
uccacucauaagguagagu

SEQ ID NO: 2688492 - RNA, 19 nt, Artificial Sequence
  Description of Artificial Sequence: Synthetic oligonucleotide
accauauugcuggauucgu

SEQ ID NO: 2688493 - RNA, 19 nt, Artificial Sequence
  Description of Artificial Sequence: Synthetic oligonucleotide
acuugacacucaggaggcc

SEQ ID NO: 2688494 - RNA, 19 nt, Artificial Sequence
  Description of Artificial Sequence: Synthetic oligonucleotide
cgagauagaaacccaaauc

SEQ ID NO: 2688495 - RNA, 19 nt, Artificial Sequence
  Description of Artificial Sequence: Synthetic oligonucleotide
cacucauaagguagaguga

SEQ ID NO: 2688496 - RNA, 19 nt, Artificial Sequence
  Description of Artificial Sequence: Synthetic oligonucleotide
gucugacacagcacaauac

SEQ ID NO: 2688497 - RNA, 19 nt, Artificial Sequence
  Description of Artificial Sequence: Synthetic oligonucleotide
gagugacuugacacucagg

SEQ ID NO: 2688498 - RNA, 19 nt, Artificial Sequence
  Description of Artificial Sequence: Synthetic oligonucleotide
ugccugguggcuucuccug

SEQ ID NO: 2688499 - RNA, 19 nt, Artificial Sequence
  Description of Artificial Sequence: Synthetic oligonucleotide
ugauggcucugaaucggua

SEQ ID NO: 2688500 - RNA, 19 nt, Artificial Sequence
  Description of Artificial Sequence: Synthetic oligonucleotide
ucuccgucucugugccugg

SEQ ID NO: 2688501 - RNA, 19 nt, Artificial Sequence
  Description of Artificial Sequence: Synthetic oligonucleotide
cucgaagcacaguaccuga

SEQ ID NO: 2688502 - RNA, 19 nt, Artificial Sequence
  Description of Artificial Sequence: Synthetic oligonucleotide
aucuuuugauggcucugaa

SEQ ID NO: 2688503 - RNA, 19 nt, Artificial Sequence
  Description of Artificial Sequence: Synthetic oligonucleotide
cacagcacaauacguaucu

SEQ ID NO: 2688504 - RNA, 19 nt, Artificial Sequence
  Description of Artificial Sequence: Synthetic oligonucleotide
cugugaguaccaguacaag

SEQ ID NO: 2688505 - RNA, 19 nt, Artificial Sequence
  Description of Artificial Sequence: Synthetic oligonucleotide
agcacaguaccugacucau

SEQ ID NO: 2688506 - RNA, 19 nt, Artificial Sequence
  Description of Artificial Sequence: Synthetic oligonucleotide
guaccugacucauucacau

SEQ ID NO: 2688507 - RNA, 19 nt, Artificial Sequence
  Description of Artificial Sequence: Synthetic oligonucleotide
gaagcccaccagccucugg

SEQ ID NO: 2688508 - RNA, 19 nt, Artificial Sequence
  Description of Artificial Sequence: Synthetic oligonucleotide
gugguuggguuuccaaaca

SEQ ID NO: 2688509 - RNA, 19 nt, Artificial Sequence
  Description of Artificial Sequence: Synthetic oligonucleotide
ggugaagcaagagacucca

SEQ ID NO: 2688510 - RNA, 19 nt, Artificial Sequence
  Description of Artificial Sequence: Synthetic oligonucleotide
ccacucgaagcacaguacc

SEQ ID NO: 2688511 - RNA, 19 nt, Artificial Sequence
  Description of Artificial Sequence: Synthetic oligonucleotide
cagccgaugaagaggucuc

SEQ ID NO: 2688512 - RNA, 19 nt, Artificial Sequence
  Description of Artificial Sequence: Synthetic oligonucleotide
guaccaguacaagccuggg

SEQ ID NO: 2688513 - RNA, 19 nt, Artificial Sequence
  Description of Artificial Sequence: Synthetic oligonucleotide
cuugugagaaacguucucu

SEQ ID NO: 2688514 - RNA, 19 nt, Artificial Sequence
  Description of Artificial Sequence: Synthetic oligonucleotide
uccgucucugugccuggug

SEQ ID NO: 2688515 - RNA, 19 nt, Artificial Sequence
  Description of Artificial Sequence: Synthetic oligonucleotide
gguagagugacuugacacu

SEQ ID NO: 2688516 - RNA, 19 nt, Artificial Sequence
  Description of Artificial Sequence: Synthetic oligonucleotide
gugugguuggguuuccaaa

SEQ ID NO: 2688517 - RNA, 19 nt, Artificial Sequence
  Description of Artificial Sequence: Synthetic oligonucleotide
guaucuugucgccacccaa

SEQ ID NO: 2688518 - RNA, 19 nt, Artificial Sequence
  Description of Artificial Sequence: Synthetic oligonucleotide
cucugaaaucuuggcacug

SEQ ID NO: 2688519 - RNA, 19 nt, Artificial Sequence
  Description of Artificial Sequence: Synthetic oligonucleotide
agucgagauagaaacccaa

SEQ ID NO: 2688520 - RNA, 19 nt, Artificial Sequence
  Description of Artificial Sequence: Synthetic oligonucleotide
gggcauguuccuuggauuc

SEQ ID NO: 2688521 - RNA, 19 nt, Artificial Sequence
  Description of Artificial Sequence: Synthetic oligonucleotide
auucugacagggguauuau

SEQ ID NO: 2688522 - RNA, 19 nt, Artificial Sequence
  Description of Artificial Sequence: Synthetic oligonucleotide
ccaaaucuuuugauggcuc

SEQ ID NO: 2688523 - RNA, 19 nt, Artificial Sequence
  Description of Artificial Sequence: Synthetic oligonucleotide
ucgccacccaaagaaggac

SEQ ID NO: 2688524 - RNA, 19 nt, Artificial Sequence
  Description of Artificial Sequence: Synthetic oligonucleotide
guauggaauuucuccgucu

SEQ ID NO: 2688525 - RNA, 19 nt, Artificial Sequence
  Description of Artificial Sequence: Synthetic oligonucleotide
gaaggucuucuugccacca

SEQ ID NO: 2688526 - RNA, 19 nt, Artificial Sequence
  Description of Artificial Sequence: Synthetic oligonucleotide
agcucauccaacacagcau

SEQ ID NO: 2688527 - RNA, 19 nt, Artificial Sequence
  Description of Artificial Sequence: Synthetic oligonucleotide
cugacacagcacaauacgu

SEQ ID NO: 2688528 - RNA, 19 nt, Artificial Sequence
  Description of Artificial Sequence: Synthetic oligonucleotide
acuccacucauaagguaga

SEQ ID NO: 2688529 - RNA, 19 nt, Artificial Sequence
  Description of Artificial Sequence: Synthetic oligonucleotide
gagacuccacucauaaggu

SEQ ID NO: 2688530 - RNA, 19 nt, Artificial Sequence
  Description of Artificial Sequence: Synthetic oligonucleotide
cagucgagauagaaaccca

SEQ ID NO: 2688531 - RNA, 19 nt, Artificial Sequence
  Description of Artificial Sequence: Synthetic oligonucleotide
caaggugggagccuugcua

SEQ ID NO: 2688532 - RNA, 19 nt, Artificial Sequence
  Description of Artificial Sequence: Synthetic oligonucleotide
augucugacacagcacaau

SEQ ID NO: 2688533 - RNA, 19 nt, Artificial Sequence
  Description of Artificial Sequence: Synthetic oligonucleotide
uccaaacacuugugagaaa

SEQ ID NO: 2688534 - RNA, 19 nt, Artificial Sequence
  Description of Artificial Sequence: Synthetic oligonucleotide
cucugaaucgguagauugu

SEQ ID NO: 2688535 - RNA, 19 nt, Artificial Sequence
  Description of Artificial Sequence: Synthetic oligonucleotide
cuccacucauaagguagag

SEQ ID NO: 2688536 - RNA, 19 nt, Artificial Sequence
  Description of Artificial Sequence: Synthetic oligonucleotide
ugcuagucacccaccuguu

SEQ ID NO: 2688537 - RNA, 19 nt, Artificial Sequence
  Description of Artificial Sequence: Synthetic oligonucleotide
uagcgcagggugacauaga

SEQ ID NO: 2688538 - RNA, 19 nt, Artificial Sequence
  Description of Artificial Sequence: Synthetic oligonucleotide
acccaccuguuggaauccc

SEQ ID NO: 2688539 - RNA, 19 nt, Artificial Sequence
  Description of Artificial Sequence: Synthetic oligonucleotide
ccuuggauucugacagggg

SEQ ID NO: 2688540 - RNA, 19 nt, Artificial Sequence
  Description of Artificial Sequence: Synthetic oligonucleotide
gccagggugaagcaagaga

SEQ ID NO: 2688541 - RNA, 19 nt, Artificial Sequence
  Description of Artificial Sequence: Synthetic oligonucleotide
gugggagccuugcuaguca

SEQ ID NO: 2688542 - RNA, 19 nt, Artificial Sequence
  Description of Artificial Sequence: Synthetic oligonucleotide
aagugugguuggguuucca

SEQ ID NO: 2688543 - RNA, 19 nt, Artificial Sequence
  Description of Artificial Sequence: Synthetic oligonucleotide
gucgagauagaaacccaaa

SEQ ID NO: 2688544 - RNA, 19 nt, Artificial Sequence
  Description of Artificial Sequence: Synthetic oligonucleotide
gaaaugucugggccaacuu

SEQ ID NO: 2688545 - RNA, 19 nt, Artificial Sequence
  Description of Artificial Sequence: Synthetic oligonucleotide
cuuaagugugguuggguuu

SEQ ID NO: 2688546 - RNA, 19 nt, Artificial Sequence
  Description of Artificial Sequence: Synthetic oligonucleotide
uaccugacucauucacaua

SEQ ID NO: 2688547 - RNA, 19 nt, Artificial Sequence
  Description of Artificial Sequence: Synthetic oligonucleotide
gcacaauacguaucuuguc

SEQ ID NO: 2688548 - RNA, 19 nt, Artificial Sequence
  Description of Artificial Sequence: Synthetic oligonucleotide
ggguagggcugucacaguc

SEQ ID NO: 2688549 - RNA, 19 nt, Artificial Sequence
  Description of Artificial Sequence: Synthetic oligonucleotide
ccaccauauugcuggauuc

SEQ ID NO: 2688550 - RNA, 19 nt, Artificial Sequence
  Description of Artificial Sequence: Synthetic oligonucleotide
uggcucugaaucgguagau

SEQ ID NO: 2688551 - RNA, 19 nt, Artificial Sequence
  Description of Artificial Sequence: Synthetic oligonucleotide
ggguauuaugucugacaca

SEQ ID NO: 2688552 - RNA, 19 nt, Artificial Sequence
  Description of Artificial Sequence: Synthetic oligonucleotide
aggcccugugaguaccagu

SEQ ID NO: 2688553 - RNA, 19 nt, Artificial Sequence
  Description of Artificial Sequence: Synthetic oligonucleotide
cacugcucgaaggaagaca

SEQ ID NO: 2688554 - RNA, 19 nt, Artificial Sequence
  Description of Artificial Sequence: Synthetic oligonucleotide
auguggcuggccucugaaa

SEQ ID NO: 2688555 - RNA, 19 nt, Artificial Sequence
  Description of Artificial Sequence: Synthetic oligonucleotide
ggacaggugggccacucga

SEQ ID NO: 2688556 - RNA, 19 nt, Artificial Sequence
  Description of Artificial Sequence: Synthetic oligonucleotide
cacauacaugaagcccacc

SEQ ID NO: 2688557 - RNA, 19 nt, Artificial Sequence
  Description of Artificial Sequence: Synthetic oligonucleotide
gcuagucacccaccuguug

SEQ ID NO: 2688558 - RNA, 19 nt, Artificial Sequence
  Description of Artificial Sequence: Synthetic oligonucleotide
gccacccaaagaaggacag

SEQ ID NO: 2688559 - RNA, 19 nt, Artificial Sequence
  Description of Artificial Sequence: Synthetic oligonucleotide
guagcucauccaacacagc

SEQ ID NO: 2688560 - RNA, 19 nt, Artificial Sequence
  Description of Artificial Sequence: Synthetic oligonucleotide
gucgccacccaaagaagga

SEQ ID NO: 2688561 - RNA, 19 nt, Artificial Sequence
  Description of Artificial Sequence: Synthetic oligonucleotide
gggugaagcaagagacucc

SEQ ID NO: 2688562 - RNA, 19 nt, Artificial Sequence
  Description of Artificial Sequence: Synthetic oligonucleotide
caggaggcccugugaguac

SEQ ID NO: 2688563 - RNA, 19 nt, Artificial Sequence
  Description of Artificial Sequence: Synthetic oligonucleotide
cugacucauucacauacau

SEQ ID NO: 2688564 - RNA, 19 nt, Artificial Sequence
  Description of Artificial Sequence: Synthetic oligonucleotide
aacagauccugggcauguu

SEQ ID NO: 2688565 - RNA, 19 nt, Artificial Sequence
  Description of Artificial Sequence: Synthetic oligonucleotide
cagggguauuaugucugac

SEQ ID NO: 2688566 - RNA, 19 nt, Artificial Sequence
  Description of Artificial Sequence: Synthetic oligonucleotide
cugaaaucuuggcacugcu

SEQ ID NO: 2688567 - RNA, 19 nt, Artificial Sequence
  Description of Artificial Sequence: Synthetic oligonucleotide
cacuugugagaaacguucu

SEQ ID NO: 2688568 - RNA, 19 nt, Artificial Sequence
  Description of Artificial Sequence: Synthetic oligonucleotide
gcauguuccuuggauucug

SEQ ID NO: 2688569 - RNA, 19 nt, Artificial Sequence
  Description of Artificial Sequence: Synthetic oligonucleotide
aggugggagccuugcuagu

SEQ ID NO: 2688570 - RNA, 19 nt, Artificial Sequence
  Description of Artificial Sequence: Synthetic oligonucleotide
ccugugaguaccaguacaa

SEQ ID NO: 2688571 - RNA, 19 nt, Artificial Sequence
  Description of Artificial Sequence: Synthetic oligonucleotide
cacccaccuguuggaaucc

SEQ ID NO: 2688572 - RNA, 19 nt, Artificial Sequence
  Description of Artificial Sequence: Synthetic oligonucleotide
cacucgaagcacaguaccu

SEQ ID NO: 2688573 - RNA, 19 nt, Artificial Sequence
  Description of Artificial Sequence: Synthetic oligonucleotide
cucauaagguagagugacu

SEQ ID NO: 2688574 - RNA, 19 nt, Artificial Sequence
  Description of Artificial Sequence: Synthetic oligonucleotide
cacucaggaggcccuguga

SEQ ID NO: 2688575 - RNA, 19 nt, Artificial Sequence
  Description of Artificial Sequence: Synthetic oligonucleotide
uccugcaaggugggagccu

SEQ ID NO: 2688576 - RNA, 19 nt, Artificial Sequence
  Description of Artificial Sequence: Synthetic oligonucleotide
ugaagcccaccagccucug

SEQ ID NO: 2688577 - RNA, 19 nt, Artificial Sequence
  Description of Artificial Sequence: Synthetic oligonucleotide
cugggccaacuucagucga

SEQ ID NO: 2688578 - RNA, 19 nt, Artificial Sequence
  Description of Artificial Sequence: Synthetic oligonucleotide
gacaggugggccacucgaa

SEQ ID NO: 2688579 - RNA, 19 nt, Artificial Sequence
  Description of Artificial Sequence: Synthetic oligonucleotide
ggauucguaccaacagauc

SEQ ID NO: 2688580 - RNA, 19 nt, Artificial Sequence
  Description of Artificial Sequence: Synthetic oligonucleotide
ggaauuucuccgucucugu

SEQ ID NO: 2688581 - RNA, 19 nt, Artificial Sequence
  Description of Artificial Sequence: Synthetic oligonucleotide
gguagggcugucacaguca

SEQ ID NO: 2688582 - RNA, 19 nt, Artificial Sequence
  Description of Artificial Sequence: Synthetic oligonucleotide
agcccaccagccucuggaa

SEQ ID NO: 2688583 - RNA, 19 nt, Artificial Sequence
  Description of Artificial Sequence: Synthetic oligonucleotide
cccagugcagcaccacagc

SEQ ID NO: 2688584 - RNA, 19 nt, Artificial Sequence
  Description of Artificial Sequence: Synthetic oligonucleotide
cugucacagucagaaaugu

SEQ ID NO: 2688585 - RNA, 19 nt, Artificial Sequence
  Description of Artificial Sequence: Synthetic oligonucleotide
uucggccauagcgcagggu

SEQ ID NO: 2688586 - RNA, 19 nt, Artificial Sequence
  Description of Artificial Sequence: Synthetic oligonucleotide
cccaccuguuggaaucccc

SEQ ID NO: 2688587 - RNA, 19 nt, Artificial Sequence
  Description of Artificial Sequence: Synthetic oligonucleotide
cccugugaguaccaguaca

SEQ ID NO: 2688588 - RNA, 19 nt, Artificial Sequence
  Description of Artificial Sequence: Synthetic oligonucleotide
gguagauuguauggaauuu

SEQ ID NO: 2688589 - RNA, 19 nt, Artificial Sequence
  Description of Artificial Sequence: Synthetic oligonucleotide
gccugguggcuucuccugc

SEQ ID NO: 2688590 - RNA, 19 nt, Artificial Sequence
  Description of Artificial Sequence: Synthetic oligonucleotide
ggauucggccauagcgcag

SEQ ID NO: 2688591 - RNA, 19 nt, Artificial Sequence
  Description of Artificial Sequence: Synthetic oligonucleotide
cagggugaagcaagagacu

SEQ ID NO: 2688592 - RNA, 19 nt, Artificial Sequence
  Description of Artificial Sequence: Synthetic oligonucleotide
gugaagcaagagacuccac

SEQ ID NO: 2688593 - RNA, 19 nt, Artificial Sequence
  Description of Artificial Sequence: Synthetic oligonucleotide
cugaaucgguagauuguau

SEQ ID NO: 2688594 - RNA, 19 nt, Artificial Sequence
  Description of Artificial Sequence: Synthetic oligonucleotide
ggcccugugaguaccagua

SEQ ID NO: 2688595 - RNA, 19 nt, Artificial Sequence
  Description of Artificial Sequence: Synthetic oligonucleotide
ccugacucauucacauaca

SEQ ID NO: 2688596 - RNA, 19 nt, Artificial Sequence
  Description of Artificial Sequence: Synthetic oligonucleotide
gcucgaaggaagacagaca

SEQ ID NO: 2688597 - RNA, 19 nt, Artificial Sequence
  Description of Artificial Sequence: Synthetic oligonucleotide
cauagcgcagggugacaua

SEQ ID NO: 2688598 - RNA, 19 nt, Artificial Sequence
  Description of Artificial Sequence: Synthetic oligonucleotide
gccacucgaagcacaguac

SEQ ID NO: 2688599 - RNA, 19 nt, Artificial Sequence
  Description of Artificial Sequence: Synthetic oligonucleotide
ugccaccauauugcuggau

SEQ ID NO: 2688600 - RNA, 19 nt, Artificial Sequence
  Description of Artificial Sequence: Synthetic oligonucleotide
gguuggguuuccaaacacu

SEQ ID NO: 2688601 - RNA, 19 nt, Artificial Sequence
  Description of Artificial Sequence: Synthetic oligonucleotide
ggccauagcgcagggugac

SEQ ID NO: 2688602 - RNA, 19 nt, Artificial Sequence
  Description of Artificial Sequence: Synthetic oligonucleotide
caacuucagucgagauaga

SEQ ID NO: 2688603 - RNA, 19 nt, Artificial Sequence
  Description of Artificial Sequence: Synthetic oligonucleotide
cugcucgaaggaagacaga

SEQ ID NO: 2688604 - RNA, 19 nt, Artificial Sequence
  Description of Artificial Sequence: Synthetic oligonucleotide
cauggccagggugaagcaa

SEQ ID NO: 2688605 - RNA, 19 nt, Artificial Sequence
  Description of Artificial Sequence: Synthetic oligonucleotide
cuguccaggauucggccau

SEQ ID NO: 2688606 - RNA, 19 nt, Artificial Sequence
  Description of Artificial Sequence: Synthetic oligonucleotide
ccacccaaagaaggacagg

SEQ ID NO: 2688607 - RNA, 19 nt, Artificial Sequence
  Description of Artificial Sequence: Synthetic oligonucleotide
gugccugguggcuucuccu

SEQ ID NO: 2688608 - RNA, 19 nt, Artificial Sequence
  Description of Artificial Sequence: Synthetic oligonucleotide
cacagccgaugaagagguc

SEQ ID NO: 2688609 - RNA, 19 nt, Artificial Sequence
  Description of Artificial Sequence: Synthetic oligonucleotide
caacagauccugggcaugu

SEQ ID NO: 2688610 - RNA, 19 nt, Artificial Sequence
  Description of Artificial Sequence: Synthetic oligonucleotide
ccaacagauccugggcaug

SEQ ID NO: 2688611 - RNA, 19 nt, Artificial Sequence
  Description of Artificial Sequence: Synthetic oligonucleotide
gccaccauauugcuggauu

SEQ ID NO: 2688612 - RNA, 19 nt, Artificial Sequence
  Description of Artificial Sequence: Synthetic oligonucleotide
gcaccacagccgaugaaga

SEQ ID NO: 2688613 - RNA, 19 nt, Artificial Sequence
  Description of Artificial Sequence: Synthetic oligonucleotide
ggccagggugaagcaagag

SEQ ID NO: 2688614 - RNA, 19 nt, Artificial Sequence
  Description of Artificial Sequence: Synthetic oligonucleotide
ccauauugcuggauucgua

SEQ ID NO: 2688615 - RNA, 19 nt, Artificial Sequence
  Description of Artificial Sequence: Synthetic oligonucleotide
gucucugugccugguggcu

SEQ ID NO: 2688616 - RNA, 19 nt, Artificial Sequence
  Description of Artificial Sequence: Synthetic oligonucleotide
caccagccucuggaagaag

SEQ ID NO: 2688617 - RNA, 19 nt, Artificial Sequence
  Description of Artificial Sequence: Synthetic oligonucleotide
cugguggcuucuccugcaa

SEQ ID NO: 2688618 - RNA, 19 nt, Artificial Sequence
  Description of Artificial Sequence: Synthetic oligonucleotide
ggugggccacucgaagcac

SEQ ID NO: 2688619 - RNA, 19 nt, Artificial Sequence
  Description of Artificial Sequence: Synthetic oligonucleotide
gucuucuugccaccauauu

SEQ ID NO: 2688620 - RNA, 19 nt, Artificial Sequence
  Description of Artificial Sequence: Synthetic oligonucleotide
gggagccuugcuagucacc

SEQ ID NO: 2688621 - RNA, 19 nt, Artificial Sequence
  Description of Artificial Sequence: Synthetic oligonucleotide
gauccugggcauguuccuu

SEQ ID NO: 2688622 - RNA, 19 nt, Artificial Sequence
  Description of Artificial Sequence: Synthetic oligonucleotide
gcacugcucgaaggaagac

SEQ ID NO: 2688623 - RNA, 19 nt, Artificial Sequence
  Description of Artificial Sequence: Synthetic oligonucleotide
ccucugaaaucuuggcacu

SEQ ID NO: 2688624 - RNA, 19 nt, Artificial Sequence
  Description of Artificial Sequence: Synthetic oligonucleotide
gcaagagacuccacucaua

SEQ ID NO: 2688625 - RNA, 19 nt, Artificial Sequence
  Description of Artificial Sequence: Synthetic oligonucleotide
cccaaaucuuuugauggcu

SEQ ID NO: 2688626 - RNA, 19 nt, Artificial Sequence
  Description of Artificial Sequence: Synthetic oligonucleotide
ggcauguuccuuggauucu

SEQ ID NO: 2688627 - RNA, 19 nt, Artificial Sequence
  Description of Artificial Sequence: Synthetic oligonucleotide
cgccacccaaagaaggaca

SEQ ID NO: 2688628 - RNA, 19 nt, Artificial Sequence
  Description of Artificial Sequence: Synthetic oligonucleotide
cguaucuugucgccaccca

SEQ ID NO: 2688629 - RNA, 19 nt, Artificial Sequence
  Description of Artificial Sequence: Synthetic oligonucleotide
ccuugcuagucacccaccu

SEQ ID NO: 2688630 - RNA, 19 nt, Artificial Sequence
  Description of Artificial Sequence: Synthetic oligonucleotide
cgguagauuguauggaauu

SEQ ID NO: 2688631 - RNA, 19 nt, Artificial Sequence
  Description of Artificial Sequence: Synthetic oligonucleotide
gcaaggugggagccuugcu

SEQ ID NO: 2688632 - RNA, 19 nt, Artificial Sequence
  Description of Artificial Sequence: Synthetic oligonucleotide
gcagggugacauagaaggu

SEQ ID NO: 2688633 - RNA, 19 nt, Artificial Sequence
  Description of Artificial Sequence: Synthetic oligonucleotide
cgaagcacaguaccugacu

SEQ ID NO: 2688634 - RNA, 19 nt, Artificial Sequence
  Description of Artificial Sequence: Synthetic oligonucleotide
gggcugucacagucagaaa

SEQ ID NO: 2688635 - RNA, 19 nt, Artificial Sequence
  Description of Artificial Sequence: Synthetic oligonucleotide
ggaggcccugugaguacca

SEQ ID NO: 2688636 - RNA, 19 nt, Artificial Sequence
  Description of Artificial Sequence: Synthetic oligonucleotide
gccauagcgcagggugaca

SEQ ID NO: 2688637 - RNA, 19 nt, Artificial Sequence
  Description of Artificial Sequence: Synthetic oligonucleotide
cggccauagcgcaggguga

SEQ ID NO: 2688638 - RNA, 19 nt, Artificial Sequence
  Description of Artificial Sequence: Synthetic oligonucleotide
ccauagcgcagggugacau

SEQ ID NO: 2688639 - RNA, 19 nt, Artificial Sequence
  Description of Artificial Sequence: Synthetic oligonucleotide
gggguagggcugucacagu

SEQ ID NO: 2688640 - RNA, 19 nt, Artificial Sequence
  Description of Artificial Sequence: Synthetic oligonucleotide
ccugcaaggugggagccuu

SEQ ID NO: 2688641 - RNA, 19 nt, Artificial Sequence
  Description of Artificial Sequence: Synthetic oligonucleotide
gggugacauagaaggucuu

SEQ ID NO: 2688642 - RNA, 19 nt, Artificial Sequence
  Description of Artificial Sequence: Synthetic oligonucleotide
ggauucugacagggguauu

SEQ ID NO: 2688643 - RNA, 19 nt, Artificial Sequence
  Description of Artificial Sequence: Synthetic oligonucleotide
gggccacucgaagcacagu

SEQ ID NO: 2688644 - RNA, 19 nt, Artificial Sequence
  Description of Artificial Sequence: Synthetic oligonucleotide
gcacaguaccugacucauu

SEQ ID NO: 2688645 - RNA, 19 nt, Artificial Sequence
  Description of Artificial Sequence: Synthetic oligonucleotide
gugcagcaccacagccgau

SEQ ID NO: 2688646 - RNA, 19 nt, Artificial Sequence
  Description of Artificial Sequence: Synthetic oligonucleotide
ugugacaaggacaugacgg

SEQ ID NO: 2688647 - RNA, 19 nt, Artificial Sequence
  Description of Artificial Sequence: Synthetic oligonucleotide
uccagaagagaccagaugg

SEQ ID NO: 2688648 - RNA, 19 nt, Artificial Sequence
  Description of Artificial Sequence: Synthetic oligonucleotide
aaggccuucaacauaaucc

SEQ ID NO: 2688649 - RNA, 19 nt, Artificial Sequence
  Description of Artificial Sequence: Synthetic oligonucleotide
acauaauccucauaagucc

SEQ ID NO: 2688650 - RNA, 19 nt, Artificial Sequence
  Description of Artificial Sequence: Synthetic oligonucleotide
uucaacauaauccucauaa

SEQ ID NO: 2688651 - RNA, 19 nt, Artificial Sequence
  Description of Artificial Sequence: Synthetic oligonucleotide
uuagugaaggcaaacauca

SEQ ID NO: 2688652 - RNA, 19 nt, Artificial Sequence
  Description of Artificial Sequence: Synthetic oligonucleotide
aacaucauccagaagagac

SEQ ID NO: 2688653 - RNA, 19 nt, Artificial Sequence
  Description of Artificial Sequence: Synthetic oligonucleotide
aacauaauccucauaaguc

SEQ ID NO: 2688654 - RNA, 19 nt, Artificial Sequence
  Description of Artificial Sequence: Synthetic oligonucleotide
aguucggucaaacagcugg

SEQ ID NO: 2688655 - RNA, 19 nt, Artificial Sequence
  Description of Artificial Sequence: Synthetic oligonucleotide
gauuucugcacccaugacg

SEQ ID NO: 2688656 - RNA, 19 nt, Artificial Sequence
  Description of Artificial Sequence: Synthetic oligonucleotide
uauggaaauguccucagcc

SEQ ID NO: 2688657 - RNA, 19 nt, Artificial Sequence
  Description of Artificial Sequence: Synthetic oligonucleotide
agcucuucauaguugaugc

SEQ ID NO: 2688658 - RNA, 19 nt, Artificial Sequence
  Description of Artificial Sequence: Synthetic oligonucleotide
aagucacacaucuuggccg

SEQ ID NO: 2688659 - RNA, 19 nt, Artificial Sequence
  Description of Artificial Sequence: Synthetic oligonucleotide
caucucaucacuuuugggg

SEQ ID NO: 2688660 - RNA, 19 nt, Artificial Sequence
  Description of Artificial Sequence: Synthetic oligonucleotide
ugcaauauggaaauguccu

SEQ ID NO: 2688661 - RNA, 19 nt, Artificial Sequence
  Description of Artificial Sequence: Synthetic oligonucleotide
aauguccucagccauucag

SEQ ID NO: 2688662 - RNA, 19 nt, Artificial Sequence
  Description of Artificial Sequence: Synthetic oligonucleotide
uugucaaacacacgaaggc

SEQ ID NO: 2688663 - RNA, 19 nt, Artificial Sequence
  Description of Artificial Sequence: Synthetic oligonucleotide
aauauggaaauguccucag

SEQ ID NO: 2688664 - RNA, 19 nt, Artificial Sequence
  Description of Artificial Sequence: Synthetic oligonucleotide
agugaaggcaaacaucauc

SEQ ID NO: 2688665 - RNA, 19 nt, Artificial Sequence
  Description of Artificial Sequence: Synthetic oligonucleotide
uucaucucaucacuuuugg

SEQ ID NO: 2688666 - RNA, 19 nt, Artificial Sequence
  Description of Artificial Sequence: Synthetic oligonucleotide
aaguccagcaccuucacau

SEQ ID NO: 2688667 - RNA, 19 nt, Artificial Sequence
  Description of Artificial Sequence: Synthetic oligonucleotide
auaaggggagccuucacuc

SEQ ID NO: 2688668 - RNA, 19 nt, Artificial Sequence
  Description of Artificial Sequence: Synthetic oligonucleotide
gcaaacaucauccagaaga

SEQ ID NO: 2688669 - RNA, 19 nt, Artificial Sequence
  Description of Artificial Sequence: Synthetic oligonucleotide
uccucagccauucagcacc

SEQ ID NO: 2688670 - RNA, 19 nt, Artificial Sequence
  Description of Artificial Sequence: Synthetic oligonucleotide
uuuagugaaggcaaacauc

SEQ ID NO: 2688671 - RNA, 19 nt, Artificial Sequence
  Description of Artificial Sequence: Synthetic oligonucleotide
auuucugcacccaugacgg

SEQ ID NO: 2688672 - RNA, 19 nt, Artificial Sequence
  Description of Artificial Sequence: Synthetic oligonucleotide
gaauucugcggucuggucc

SEQ ID NO: 2688673 - RNA, 19 nt, Artificial Sequence
  Description of Artificial Sequence: Synthetic oligonucleotide
aaaggugcugugauaaggg

SEQ ID NO: 2688674 - RNA, 19 nt, Artificial Sequence
  Description of Artificial Sequence: Synthetic oligonucleotide
cauuuuauuuagugaaggc

SEQ ID NO: 2688675 - RNA, 19 nt, Artificial Sequence
  Description of Artificial Sequence: Synthetic oligonucleotide
auuuuauuuagugaaggca

SEQ ID NO: 2688676 - RNA, 19 nt, Artificial Sequence
  Description of Artificial Sequence: Synthetic oligonucleotide
uugcaauauggaaaugucc

SEQ ID NO: 2688677 - RNA, 19 nt, Artificial Sequence
  Description of Artificial Sequence: Synthetic oligonucleotide
ucauaguugaugcaaccgu

SEQ ID NO: 2688678 - RNA, 19 nt, Artificial Sequence
  Description of Artificial Sequence: Synthetic oligonucleotide
cauaauccucauaaguccc

SEQ ID NO: 2688679 - RNA, 19 nt, Artificial Sequence
  Description of Artificial Sequence: Synthetic oligonucleotide
ucaaaguccagcaccuuca

SEQ ID NO: 2688680 - RNA, 19 nt, Artificial Sequence
  Description of Artificial Sequence: Synthetic oligonucleotide
gagcauuuuauuuagugaa

SEQ ID NO: 2688681 - RNA, 19 nt, Artificial Sequence
  Description of Artificial Sequence: Synthetic oligonucleotide
ucaacauaauccucauaag

SEQ ID NO: 2688682 - RNA, 19 nt, Artificial Sequence
  Description of Artificial Sequence: Synthetic oligonucleotide
aauucugcggucugguccu

SEQ ID NO: 2688683 - RNA, 19 nt, Artificial Sequence
  Description of Artificial Sequence: Synthetic oligonucleotide
agagcauuuuauuuaguga

SEQ ID NO: 2688684 - RNA, 19 nt, Artificial Sequence
  Description of Artificial Sequence: Synthetic oligonucleotide
ucggugaagucacacaucu

SEQ ID NO: 2688685 - RNA, 19 nt, Artificial Sequence
  Description of Artificial Sequence: Synthetic oligonucleotide
aaggacaugacggauuucu

SEQ ID NO: 2688686 - RNA, 19 nt, Artificial Sequence
  Description of Artificial Sequence: Synthetic oligonucleotide
uucacucugggcaaggcac

SEQ ID NO: 2688687 - RNA, 19 nt, Artificial Sequence
  Description of Artificial Sequence: Synthetic oligonucleotide
aucacguccccacacuggc

SEQ ID NO: 2688688 - RNA, 19 nt, Artificial Sequence
  Description of Artificial Sequence: Synthetic oligonucleotide
aaggugcugugauaagggg

SEQ ID NO: 2688689 - RNA, 19 nt, Artificial Sequence
  Description of Artificial Sequence: Synthetic oligonucleotide
auauggaaauguccucagc

SEQ ID NO: 2688690 - RNA, 19 nt, Artificial Sequence
  Description of Artificial Sequence: Synthetic oligonucleotide
cucauaaguccccuggucc

SEQ ID NO: 2688691 - RNA, 19 nt, Artificial Sequence
  Description of Artificial Sequence: Synthetic oligonucleotide
ggugaagucacacaucuug

SEQ ID NO: 2688692 - RNA, 19 nt, Artificial Sequence
  Description of Artificial Sequence: Synthetic oligonucleotide
uauuuagugaaggcaaaca

SEQ ID NO: 2688693 - RNA, 19 nt, Artificial Sequence
  Description of Artificial Sequence: Synthetic oligonucleotide
uuuauuuagugaaggcaaa

SEQ ID NO: 2688694 - RNA, 19 nt, Artificial Sequence
  Description of Artificial Sequence: Synthetic oligonucleotide
gacgguaccauucccuucc

SEQ ID NO: 2688695 - RNA, 19 nt, Artificial Sequence
  Description of Artificial Sequence: Synthetic oligonucleotide
aagugcucaaaguccagca

SEQ ID NO: 2688696 - RNA, 19 nt, Artificial Sequence
  Description of Artificial Sequence: Synthetic oligonucleotide
auccucauaaguccccugg

SEQ ID NO: 2688697 - RNA, 19 nt, Artificial Sequence
  Description of Artificial Sequence: Synthetic oligonucleotide
aaggcaaacaucauccaga

SEQ ID NO: 2688698 - RNA, 19 nt, Artificial Sequence
  Description of Artificial Sequence: Synthetic oligonucleotide
ucuucauaguugaugcaac

SEQ ID NO: 2688699 - RNA, 19 nt, Artificial Sequence
  Description of Artificial Sequence: Synthetic oligonucleotide
caaacagcuggaaagcuuc

SEQ ID NO: 2688700 - RNA, 19 nt, Artificial Sequence
  Description of Artificial Sequence: Synthetic oligonucleotide
cuugcaauauggaaauguc

SEQ ID NO: 2688701 - RNA, 19 nt, Artificial Sequence
  Description of Artificial Sequence: Synthetic oligonucleotide
acaagcucuucauaguuga

SEQ ID NO: 2688702 - RNA, 19 nt, Artificial Sequence
  Description of Artificial Sequence: Synthetic oligonucleotide
ugcagcaugggcaggaagu

SEQ ID NO: 2688703 - RNA, 19 nt, Artificial Sequence
  Description of Artificial Sequence: Synthetic oligonucleotide
augacggauuucugcaccc

SEQ ID NO: 2688704 - RNA, 19 nt, Artificial Sequence
  Description of Artificial Sequence: Synthetic oligonucleotide
agugcucaaaguccagcac

SEQ ID NO: 2688705 - RNA, 19 nt, Artificial Sequence
  Description of Artificial Sequence: Synthetic oligonucleotide
cuugccaucgccaguucgg

SEQ ID NO: 2688706 - RNA, 19 nt, Artificial Sequence
  Description of Artificial Sequence: Synthetic oligonucleotide
gacaugacggauuucugca

SEQ ID NO: 2688707 - RNA, 19 nt, Artificial Sequence
  Description of Artificial Sequence: Synthetic oligonucleotide
aucucaucacuuuuggggu

SEQ ID NO: 2688708 - RNA, 19 nt, Artificial Sequence
  Description of Artificial Sequence: Synthetic oligonucleotide
cuucauaguugaugcaacc

SEQ ID NO: 2688709 - RNA, 19 nt, Artificial Sequence
  Description of Artificial Sequence: Synthetic oligonucleotide
ucaucucaucacuuuuggg

SEQ ID NO: 2688710 - RNA, 19 nt, Artificial Sequence
  Description of Artificial Sequence: Synthetic oligonucleotide
ucuugccaucgccaguucg

SEQ ID NO: 2688711 - RNA, 19 nt, Artificial Sequence
  Description of Artificial Sequence: Synthetic oligonucleotide
gaugcaaccguugcugucc

SEQ ID NO: 2688712 - RNA, 19 nt, Artificial Sequence
  Description of Artificial Sequence: Synthetic oligonucleotide
aucacuuuugggguucccc

SEQ ID NO: 2688713 - RNA, 19 nt, Artificial Sequence
  Description of Artificial Sequence: Synthetic oligonucleotide
caaaggugcugugauaagg

SEQ ID NO: 2688714 - RNA, 19 nt, Artificial Sequence
  Description of Artificial Sequence: Synthetic oligonucleotide
uggaaagcuuccuugaauu

SEQ ID NO: 2688715 - RNA, 19 nt, Artificial Sequence
  Description of Artificial Sequence: Synthetic oligonucleotide
aggccuucaacauaauccu

SEQ ID NO: 2688716 - RNA, 19 nt, Artificial Sequence
  Description of Artificial Sequence: Synthetic oligonucleotide
auaauccucauaagucccc

SEQ ID NO: 2688717 - RNA, 19 nt, Artificial Sequence
  Description of Artificial Sequence: Synthetic oligonucleotide
cacacgaaggccuucaaca

SEQ ID NO: 2688718 - RNA, 19 nt, Artificial Sequence
  Description of Artificial Sequence: Synthetic oligonucleotide
cuucacauucaucucauca

SEQ ID NO: 2688719 - RNA, 19 nt, Artificial Sequence
  Description of Artificial Sequence: Synthetic oligonucleotide
auggaaauguccucagcca

SEQ ID NO: 2688720 - RNA, 19 nt, Artificial Sequence
  Description of Artificial Sequence: Synthetic oligonucleotide
gaagagaccagaugggcaa

SEQ ID NO: 2688721 - RNA, 19 nt, Artificial Sequence
  Description of Artificial Sequence: Synthetic oligonucleotide
uuauuuagugaaggcaaac

SEQ ID NO: 2688722 - RNA, 19 nt, Artificial Sequence
  Description of Artificial Sequence: Synthetic oligonucleotide
ucauaaguccccugguccu

SEQ ID NO: 2688723 - RNA, 19 nt, Artificial Sequence
  Description of Artificial Sequence: Synthetic oligonucleotide
ucacuuuugggguucccca

SEQ ID NO: 2688724 - RNA, 19 nt, Artificial Sequence
  Description of Artificial Sequence: Synthetic oligonucleotide
gcuuccuugaauucugcgg

SEQ ID NO: 2688725 - RNA, 19 nt, Artificial Sequence
  Description of Artificial Sequence: Synthetic oligonucleotide
acaugacggauuucugcac

SEQ ID NO: 2688726 - RNA, 19 nt, Artificial Sequence
  Description of Artificial Sequence: Synthetic oligonucleotide
aaggggagccuucacucug

SEQ ID NO: 2688727 - RNA, 19 nt, Artificial Sequence
  Description of Artificial Sequence: Synthetic oligonucleotide
uuggccacagucugcagca

SEQ ID NO: 2688728 - RNA, 19 nt, Artificial Sequence
  Description of Artificial Sequence: Synthetic oligonucleotide
acuuuugggguuccccagg

SEQ ID NO: 2688729 - RNA, 19 nt, Artificial Sequence
  Description of Artificial Sequence: Synthetic oligonucleotide
gcauuuuauuuagugaagg

SEQ ID NO: 2688730 - RNA, 19 nt, Artificial Sequence
  Description of Artificial Sequence: Synthetic oligonucleotide
acacacgaaggccuucaac

SEQ ID NO: 2688731 - RNA, 19 nt, Artificial Sequence
  Description of Artificial Sequence: Synthetic oligonucleotide
aaacagcuggaaagcuucc

SEQ ID NO: 2688732 - RNA, 19 nt, Artificial Sequence
  Description of Artificial Sequence: Synthetic oligonucleotide
gugcucaaaguccagcacc

SEQ ID NO: 2688733 - RNA, 19 nt, Artificial Sequence
  Description of Artificial Sequence: Synthetic oligonucleotide
caugacggauuucugcacc

SEQ ID NO: 2688734 - RNA, 19 nt, Artificial Sequence
  Description of Artificial Sequence: Synthetic oligonucleotide
ucauccagaagagaccaga

SEQ ID NO: 2688735 - RNA, 19 nt, Artificial Sequence
  Description of Artificial Sequence: Synthetic oligonucleotide
uguccucagccauucagca

SEQ ID NO: 2688736 - RNA, 19 nt, Artificial Sequence
  Description of Artificial Sequence: Synthetic oligonucleotide
uggaaauguccucagccau

SEQ ID NO: 2688737 - RNA, 19 nt, Artificial Sequence
  Description of Artificial Sequence: Synthetic oligonucleotide
ucaucacguccccacacug

SEQ ID NO: 2688738 - RNA, 19 nt, Artificial Sequence
  Description of Artificial Sequence: Synthetic oligonucleotide
gaccagaugggcaaaggug

SEQ ID NO: 2688739 - RNA, 19 nt, Artificial Sequence
  Description of Artificial Sequence: Synthetic oligonucleotide
accguugcuguccucaugu

SEQ ID NO: 2688740 - RNA, 19 nt, Artificial Sequence
  Description of Artificial Sequence: Synthetic oligonucleotide
gguaccauucccuuccuug

SEQ ID NO: 2688741 - RNA, 19 nt, Artificial Sequence
  Description of Artificial Sequence: Synthetic oligonucleotide
auguccugccaccagcauc

SEQ ID NO: 2688742 - RNA, 19 nt, Artificial Sequence
  Description of Artificial Sequence: Synthetic oligonucleotide
ugugauaaggggagccuuc

SEQ ID NO: 2688743 - RNA, 19 nt, Artificial Sequence
  Description of Artificial Sequence: Synthetic oligonucleotide
auguccucagccauucagc

SEQ ID NO: 2688744 - RNA, 19 nt, Artificial Sequence
  Description of Artificial Sequence: Synthetic oligonucleotide
ucaaacagcuggaaagcuu

SEQ ID NO: 2688745 - RNA, 19 nt, Artificial Sequence
  Description of Artificial Sequence: Synthetic oligonucleotide
ggagccuucacucugggca

SEQ ID NO: 2688746 - RNA, 19 nt, Artificial Sequence
  Description of Artificial Sequence: Synthetic oligonucleotide
aggaucuugccaucgccag

SEQ ID NO: 2688747 - RNA, 19 nt, Artificial Sequence
  Description of Artificial Sequence: Synthetic oligonucleotide
ucugcacccaugacgguac

SEQ ID NO: 2688748 - RNA, 19 nt, Artificial Sequence
  Description of Artificial Sequence: Synthetic oligonucleotide
aauccucauaaguccccug

SEQ ID NO: 2688749 - RNA, 19 nt, Artificial Sequence
  Description of Artificial Sequence: Synthetic oligonucleotide
agugugacaaggacaugac

SEQ ID NO: 2688750 - RNA, 19 nt, Artificial Sequence
  Description of Artificial Sequence: Synthetic oligonucleotide
ucauguccugccaccagca

SEQ ID NO: 2688751 - RNA, 19 nt, Artificial Sequence
  Description of Artificial Sequence: Synthetic oligonucleotide
agccauucagcaccauccg

SEQ ID NO: 2688752 - RNA, 19 nt, Artificial Sequence
  Description of Artificial Sequence: Synthetic oligonucleotide
aaaguccagcaccuucaca

SEQ ID NO: 2688753 - RNA, 19 nt, Artificial Sequence
  Description of Artificial Sequence: Synthetic oligonucleotide
agcauuuuauuuagugaag

SEQ ID NO: 2688754 - RNA, 19 nt, Artificial Sequence
  Description of Artificial Sequence: Synthetic oligonucleotide
aguccccugguccuuguuc

SEQ ID NO: 2688755 - RNA, 19 nt, Artificial Sequence
  Description of Artificial Sequence: Synthetic oligonucleotide
gugugacaaggacaugacg

SEQ ID NO: 2688756 - RNA, 19 nt, Artificial Sequence
  Description of Artificial Sequence: Synthetic oligonucleotide
agaccagaugggcaaaggu

SEQ ID NO: 2688757 - RNA, 19 nt, Artificial Sequence
  Description of Artificial Sequence: Synthetic oligonucleotide
cuugaauucugcggucugg

SEQ ID NO: 2688758 - RNA, 19 nt, Artificial Sequence
  Description of Artificial Sequence: Synthetic oligonucleotide
ugggcaaaggugcugugau

SEQ ID NO: 2688759 - RNA, 19 nt, Artificial Sequence
  Description of Artificial Sequence: Synthetic oligonucleotide
auccagaagagaccagaug

SEQ ID NO: 2688760 - RNA, 19 nt, Artificial Sequence
  Description of Artificial Sequence: Synthetic oligonucleotide
gaagugcucaaaguccagc

SEQ ID NO: 2688761 - RNA, 19 nt, Artificial Sequence
  Description of Artificial Sequence: Synthetic oligonucleotide
aaacacacgaaggccuuca

SEQ ID NO: 2688762 - RNA, 19 nt, Artificial Sequence
  Description of Artificial Sequence: Synthetic oligonucleotide
ugguccucggugaagucac

SEQ ID NO: 2688763 - RNA, 19 nt, Artificial Sequence
  Description of Artificial Sequence: Synthetic oligonucleotide
ucagccauucagcaccauc

SEQ ID NO: 2688764 - RNA, 19 nt, Artificial Sequence
  Description of Artificial Sequence: Synthetic oligonucleotide
gacaagcucuucauaguug

SEQ ID NO: 2688765 - RNA, 19 nt, Artificial Sequence
  Description of Artificial Sequence: Synthetic oligonucleotide
cucauguccugccaccagc

SEQ ID NO: 2688766 - RNA, 19 nt, Artificial Sequence
  Description of Artificial Sequence: Synthetic oligonucleotide
cucaaaguccagcaccuuc

SEQ ID NO: 2688767 - RNA, 19 nt, Artificial Sequence
  Description of Artificial Sequence: Synthetic oligonucleotide
gaaauguccucagccauuc

SEQ ID NO: 2688768 - RNA, 19 nt, Artificial Sequence
  Description of Artificial Sequence: Synthetic oligonucleotide
gaaggccuucaacauaauc

SEQ ID NO: 2688769 - RNA, 19 nt, Artificial Sequence
  Description of Artificial Sequence: Synthetic oligonucleotide
caucacguccccacacugg

SEQ ID NO: 2688770 - RNA, 19 nt, Artificial Sequence
  Description of Artificial Sequence: Synthetic oligonucleotide
acaaggacaugacggauuu

SEQ ID NO: 2688771 - RNA, 19 nt, Artificial Sequence
  Description of Artificial Sequence: Synthetic oligonucleotide
acagucugcagcaugggca

SEQ ID NO: 2688772 - RNA, 19 nt, Artificial Sequence
  Description of Artificial Sequence: Synthetic oligonucleotide
ccuuccuugucaaacacac

SEQ ID NO: 2688773 - RNA, 19 nt, Artificial Sequence
  Description of Artificial Sequence: Synthetic oligonucleotide
caauauggaaauguccuca

SEQ ID NO: 2688774 - RNA, 19 nt, Artificial Sequence
  Description of Artificial Sequence: Synthetic oligonucleotide
gauaaggggagccuucacu

SEQ ID NO: 2688775 - RNA, 19 nt, Artificial Sequence
  Description of Artificial Sequence: Synthetic oligonucleotide
ggacaugacggauuucugc

SEQ ID NO: 2688776 - RNA, 19 nt, Artificial Sequence
  Description of Artificial Sequence: Synthetic oligonucleotide
auucaucucaucacuuuug

SEQ ID NO: 2688777 - RNA, 19 nt, Artificial Sequence
  Description of Artificial Sequence: Synthetic oligonucleotide
ucggucaaacagcuggaaa

SEQ ID NO: 2688778 - RNA, 19 nt, Artificial Sequence
  Description of Artificial Sequence: Synthetic oligonucleotide
cuuccuugucaaacacacg

SEQ ID NO: 2688779 - RNA, 19 nt, Artificial Sequence
  Description of Artificial Sequence: Synthetic oligonucleotide
cagaagagaccagaugggc

SEQ ID NO: 2688780 - RNA, 19 nt, Artificial Sequence
  Description of Artificial Sequence: Synthetic oligonucleotide
ugcggucugguccucggug

SEQ ID NO: 2688781 - RNA, 19 nt, Artificial Sequence
  Description of Artificial Sequence: Synthetic oligonucleotide
uguccucauguccugccac

SEQ ID NO: 2688782 - RNA, 19 nt, Artificial Sequence
  Description of Artificial Sequence: Synthetic oligonucleotide
acauucaucucaucacuuu

SEQ ID NO: 2688783 - RNA, 19 nt, Artificial Sequence
  Description of Artificial Sequence: Synthetic oligonucleotide
uucuuggccacagucugca

SEQ ID NO: 2688784 - RNA, 19 nt, Artificial Sequence
  Description of Artificial Sequence: Synthetic oligonucleotide
ucacucugggcaaggcacc

SEQ ID NO: 2688785 - RNA, 19 nt, Artificial Sequence
  Description of Artificial Sequence: Synthetic oligonucleotide
aaacaucauccagaagaga

SEQ ID NO: 2688786 - RNA, 19 nt, Artificial Sequence
  Description of Artificial Sequence: Synthetic oligonucleotide
ucaaacacacgaaggccuu

SEQ ID NO: 2688787 - RNA, 19 nt, Artificial Sequence
  Description of Artificial Sequence: Synthetic oligonucleotide
uugaauucugcggucuggu

SEQ ID NO: 2688788 - RNA, 19 nt, Artificial Sequence
  Description of Artificial Sequence: Synthetic oligonucleotide
uccucauaaguccccuggu

SEQ ID NO: 2688789 - RNA, 19 nt, Artificial Sequence
  Description of Artificial Sequence: Synthetic oligonucleotide
cauucagcaccauccggac

SEQ ID NO: 2688790 - RNA, 19 nt, Artificial Sequence
  Description of Artificial Sequence: Synthetic oligonucleotide
ucugcggucugguccucgg

SEQ ID NO: 2688791 - RNA, 19 nt, Artificial Sequence
  Description of Artificial Sequence: Synthetic oligonucleotide
aggcaaacaucauccagaa

SEQ ID NO: 2688792 - RNA, 19 nt, Artificial Sequence
  Description of Artificial Sequence: Synthetic oligonucleotide
gugacaaggacaugacgga

SEQ ID NO: 2688793 - RNA, 19 nt, Artificial Sequence
  Description of Artificial Sequence: Synthetic oligonucleotide
gcaggaagugcucaaaguc

SEQ ID NO: 2688794 - RNA, 19 nt, Artificial Sequence
  Description of Artificial Sequence: Synthetic oligonucleotide
uugaugcaaccguugcugu

SEQ ID NO: 2688795 - RNA, 19 nt, Artificial Sequence
  Description of Artificial Sequence: Synthetic oligonucleotide
aucgccaguucggucaaac

SEQ ID NO: 2688796 - RNA, 19 nt, Artificial Sequence
  Description of Artificial Sequence: Synthetic oligonucleotide
gagaccagaugggcaaagg

SEQ ID NO: 2688797 - RNA, 19 nt, Artificial Sequence
  Description of Artificial Sequence: Synthetic oligonucleotide
cagcuggaaagcuuccuug

SEQ ID NO: 2688798 - RNA, 19 nt, Artificial Sequence
  Description of Artificial Sequence: Synthetic oligonucleotide
acccaugacgguaccauuc

SEQ ID NO: 2688799 - RNA, 19 nt, Artificial Sequence
  Description of Artificial Sequence: Synthetic oligonucleotide
ucccuuccuugucaaacac

SEQ ID NO: 2688800 - RNA, 19 nt, Artificial Sequence
  Description of Artificial Sequence: Synthetic oligonucleotide
agaagagaccagaugggca

SEQ ID NO: 2688801 - RNA, 19 nt, Artificial Sequence
  Description of Artificial Sequence: Synthetic oligonucleotide
uaaggggagccuucacucu

SEQ ID NO: 2688802 - RNA, 19 nt, Artificial Sequence
  Description of Artificial Sequence: Synthetic oligonucleotide
cacuuuugggguuccccag

SEQ ID NO: 2688803 - RNA, 19 nt, Artificial Sequence
  Description of Artificial Sequence: Synthetic oligonucleotide
uccucggugaagucacaca

SEQ ID NO: 2688804 - RNA, 19 nt, Artificial Sequence
  Description of Artificial Sequence: Synthetic oligonucleotide
ugauaaggggagccuucac

SEQ ID NO: 2688805 - RNA, 19 nt, Artificial Sequence
  Description of Artificial Sequence: Synthetic oligonucleotide
uaauccucauaaguccccu

SEQ ID NO: 2688806 - RNA, 19 nt, Artificial Sequence
  Description of Artificial Sequence: Synthetic oligonucleotide
aacagcuggaaagcuuccu

SEQ ID NO: 2688807 - RNA, 19 nt, Artificial Sequence
  Description of Artificial Sequence: Synthetic oligonucleotide
ccggacaagcucuucauag

SEQ ID NO: 2688808 - RNA, 19 nt, Artificial Sequence
  Description of Artificial Sequence: Synthetic oligonucleotide
cacagucugcagcaugggc

SEQ ID NO: 2688809 - RNA, 19 nt, Artificial Sequence
  Description of Artificial Sequence: Synthetic oligonucleotide
acacgaaggccuucaacau

SEQ ID NO: 2688810 - RNA, 19 nt, Artificial Sequence
  Description of Artificial Sequence: Synthetic oligonucleotide
aaccguugcuguccucaug

SEQ ID NO: 2688811 - RNA, 19 nt, Artificial Sequence
  Description of Artificial Sequence: Synthetic oligonucleotide
ccagaagagaccagauggg

SEQ ID NO: 2688812 - RNA, 19 nt, Artificial Sequence
  Description of Artificial Sequence: Synthetic oligonucleotide
cagugugacaaggacauga

SEQ ID NO: 2688813 - RNA, 19 nt, Artificial Sequence
  Description of Artificial Sequence: Synthetic oligonucleotide
accggcuugcaauauggaa

SEQ ID NO: 2688814 - RNA, 19 nt, Artificial Sequence
  Description of Artificial Sequence: Synthetic oligonucleotide
aggaagugcucaaagucca

SEQ ID NO: 2688815 - RNA, 19 nt, Artificial Sequence
  Description of Artificial Sequence: Synthetic oligonucleotide
ccuugucaaacacacgaag

SEQ ID NO: 2688816 - RNA, 19 nt, Artificial Sequence
  Description of Artificial Sequence: Synthetic oligonucleotide
aaggcaccggcuugcaaua

SEQ ID NO: 2688817 - RNA, 19 nt, Artificial Sequence
  Description of Artificial Sequence: Synthetic oligonucleotide
cuuccuugaauucugcggu

SEQ ID NO: 2688818 - RNA, 19 nt, Artificial Sequence
  Description of Artificial Sequence: Synthetic oligonucleotide
aaauguccucagccauuca

SEQ ID NO: 2688819 - RNA, 19 nt, Artificial Sequence
  Description of Artificial Sequence: Synthetic oligonucleotide
acgaaggccuucaacauaa

SEQ ID NO: 2688820 - RNA, 19 nt, Artificial Sequence
  Description of Artificial Sequence: Synthetic oligonucleotide
agggcccucaucacguccc

SEQ ID NO: 2688821 - RNA, 19 nt, Artificial Sequence
  Description of Artificial Sequence: Synthetic oligonucleotide
uccuugaauucugcggucu

SEQ ID NO: 2688822 - RNA, 19 nt, Artificial Sequence
  Description of Artificial Sequence: Synthetic oligonucleotide
uccuuguucuuggccacag

SEQ ID NO: 2688823 - RNA, 19 nt, Artificial Sequence
  Description of Artificial Sequence: Synthetic oligonucleotide
cucugggcaaggcaccggc

SEQ ID NO: 2688824 - RNA, 19 nt, Artificial Sequence
  Description of Artificial Sequence: Synthetic oligonucleotide
ugaauucugcggucugguc

SEQ ID NO: 2688825 - RNA, 19 nt, Artificial Sequence
  Description of Artificial Sequence: Synthetic oligonucleotide
acagcuggaaagcuuccuu

SEQ ID NO: 2688826 - RNA, 19 nt, Artificial Sequence
  Description of Artificial Sequence: Synthetic oligonucleotide
uuuugggguuccccaggac

SEQ ID NO: 2688827 - RNA, 19 nt, Artificial Sequence
  Description of Artificial Sequence: Synthetic oligonucleotide
ugaugcaaccguugcuguc

SEQ ID NO: 2688828 - RNA, 19 nt, Artificial Sequence
  Description of Artificial Sequence: Synthetic oligonucleotide
agcaugggcaggaagugcu

SEQ ID NO: 2688829 - RNA, 19 nt, Artificial Sequence
  Description of Artificial Sequence: Synthetic oligonucleotide
cacguccccacacuggcug

SEQ ID NO: 2688830 - RNA, 19 nt, Artificial Sequence
  Description of Artificial Sequence: Synthetic oligonucleotide
cucuucauaguugaugcaa

SEQ ID NO: 2688831 - RNA, 19 nt, Artificial Sequence
  Description of Artificial Sequence: Synthetic oligonucleotide
augacgguaccauucccuu

SEQ ID NO: 2688832 - RNA, 19 nt, Artificial Sequence
  Description of Artificial Sequence: Synthetic oligonucleotide
caaaguccagcaccuucac

SEQ ID NO: 2688833 - RNA, 19 nt, Artificial Sequence
  Description of Artificial Sequence: Synthetic oligonucleotide
aacacacgaaggccuucaa

SEQ ID NO: 2688834 - RNA, 19 nt, Artificial Sequence
  Description of Artificial Sequence: Synthetic oligonucleotide
cagcaucuccaccuccucc

SEQ ID NO: 2688835 - RNA, 19 nt, Artificial Sequence
  Description of Artificial Sequence: Synthetic oligonucleotide
gaugggcaaaggugcugug

SEQ ID NO: 2688836 - RNA, 19 nt, Artificial Sequence
  Description of Artificial Sequence: Synthetic oligonucleotide
cacaucuuggccgcucagc

SEQ ID NO: 2688837 - RNA, 19 nt, Artificial Sequence
  Description of Artificial Sequence: Synthetic oligonucleotide
uuccuugaauucugcgguc

SEQ ID NO: 2688838 - RNA, 19 nt, Artificial Sequence
  Description of Artificial Sequence: Synthetic oligonucleotide
uagugaaggcaaacaucau

SEQ ID NO: 2688839 - RNA, 19 nt, Artificial Sequence
  Description of Artificial Sequence: Synthetic oligonucleotide
ugacaaggacaugacggau

SEQ ID NO: 2688840 - RNA, 19 nt, Artificial Sequence
  Description of Artificial Sequence: Synthetic oligonucleotide
uucugcacccaugacggua

SEQ ID NO: 2688841 - RNA, 19 nt, Artificial Sequence
  Description of Artificial Sequence: Synthetic oligonucleotide
cucggugaagucacacauc

SEQ ID NO: 2688842 - RNA, 19 nt, Artificial Sequence
  Description of Artificial Sequence: Synthetic oligonucleotide
gucaaacacacgaaggccu

SEQ ID NO: 2688843 - RNA, 19 nt, Artificial Sequence
  Description of Artificial Sequence: Synthetic oligonucleotide
agagaccagaugggcaaag

SEQ ID NO: 2688844 - RNA, 19 nt, Artificial Sequence
  Description of Artificial Sequence: Synthetic oligonucleotide
gcaauauggaaauguccuc

SEQ ID NO: 2688845 - RNA, 19 nt, Artificial Sequence
  Description of Artificial Sequence: Synthetic oligonucleotide
aggugcugugauaagggga

SEQ ID NO: 2688846 - RNA, 19 nt, Artificial Sequence
  Description of Artificial Sequence: Synthetic oligonucleotide
cauccggacaagcucuuca

SEQ ID NO: 2688847 - RNA, 19 nt, Artificial Sequence
  Description of Artificial Sequence: Synthetic oligonucleotide
auccggacaagcucuucau

SEQ ID NO: 2688848 - RNA, 19 nt, Artificial Sequence
  Description of Artificial Sequence: Synthetic oligonucleotide
agcaccauccggacaagcu

SEQ ID NO: 2688849 - RNA, 19 nt, Artificial Sequence
  Description of Artificial Sequence: Synthetic oligonucleotide
ugacgguaccauucccuuc

SEQ ID NO: 2688850 - RNA, 19 nt, Artificial Sequence
  Description of Artificial Sequence: Synthetic oligonucleotide
ucgccaguucggucaaaca

SEQ ID NO: 2688851 - RNA, 19 nt, Artificial Sequence
  Description of Artificial Sequence: Synthetic oligonucleotide
acacaucuuggccgcucag

SEQ ID NO: 2688852 - RNA, 19 nt, Artificial Sequence
  Description of Artificial Sequence: Synthetic oligonucleotide
gccaguucggucaaacagc

SEQ ID NO: 2688853 - RNA, 19 nt, Artificial Sequence
  Description of Artificial Sequence: Synthetic oligonucleotide
cuucacucugggcaaggca

SEQ ID NO: 2688854 - RNA, 19 nt, Artificial Sequence
  Description of Artificial Sequence: Synthetic oligonucleotide
uccggacaagcucuucaua

SEQ ID NO: 2688855 - RNA, 19 nt, Artificial Sequence
  Description of Artificial Sequence: Synthetic oligonucleotide
gccauucagcaccauccgg

SEQ ID NO: 2688856 - RNA, 19 nt, Artificial Sequence
  Description of Artificial Sequence: Synthetic oligonucleotide
ucugggcaaggcaccggcu

SEQ ID NO: 2688857 - RNA, 19 nt, Artificial Sequence
  Description of Artificial Sequence: Synthetic oligonucleotide
uccucauguccugccacca

SEQ ID NO: 2688858 - RNA, 19 nt, Artificial Sequence
  Description of Artificial Sequence: Synthetic oligonucleotide
gcaccggcuugcaauaugg

SEQ ID NO: 2688859 - RNA, 19 nt, Artificial Sequence
  Description of Artificial Sequence: Synthetic oligonucleotide
ggcaaaggugcugugauaa

SEQ ID NO: 2688860 - RNA, 19 nt, Artificial Sequence
  Description of Artificial Sequence: Synthetic oligonucleotide
ucaucacuuuugggguucc

SEQ ID NO: 2688861 - RNA, 19 nt, Artificial Sequence
  Description of Artificial Sequence: Synthetic oligonucleotide
auaaguccccugguccuug

SEQ ID NO: 2688862 - RNA, 19 nt, Artificial Sequence
  Description of Artificial Sequence: Synthetic oligonucleotide
ucuuggccacagucugcag

SEQ ID NO: 2688863 - RNA, 19 nt, Artificial Sequence
  Description of Artificial Sequence: Synthetic oligonucleotide
gccaucgccaguucgguca

SEQ ID NO: 2688864 - RNA, 19 nt, Artificial Sequence
  Description of Artificial Sequence: Synthetic oligonucleotide
cuuuugggguuccccagga

SEQ ID NO: 2688865 - RNA, 19 nt, Artificial Sequence
  Description of Artificial Sequence: Synthetic oligonucleotide
ugacggauuucugcaccca

SEQ ID NO: 2688866 - RNA, 19 nt, Artificial Sequence
  Description of Artificial Sequence: Synthetic oligonucleotide
uucggucaaacagcuggaa

SEQ ID NO: 2688867 - RNA, 19 nt, Artificial Sequence
  Description of Artificial Sequence: Synthetic oligonucleotide
guaccauucccuuccuugu

SEQ ID NO: 2688868 - RNA, 19 nt, Artificial Sequence
  Description of Artificial Sequence: Synthetic oligonucleotide
acggauuucugcacccaug

SEQ ID NO: 2688869 - RNA, 19 nt, Artificial Sequence
  Description of Artificial Sequence: Synthetic oligonucleotide
augggcaaaggugcuguga

SEQ ID NO: 2688870 - RNA, 19 nt, Artificial Sequence
  Description of Artificial Sequence: Synthetic oligonucleotide
ccauucagcaccauccgga

SEQ ID NO: 2688871 - RNA, 19 nt, Artificial Sequence
  Description of Artificial Sequence: Synthetic oligonucleotide
ucacguccccacacuggcu

SEQ ID NO: 2688872 - RNA, 19 nt, Artificial Sequence
  Description of Artificial Sequence: Synthetic oligonucleotide
cacucugggcaaggcaccg

SEQ ID NO: 2688873 - RNA, 19 nt, Artificial Sequence
  Description of Artificial Sequence: Synthetic oligonucleotide
gagccuucacucugggcaa

SEQ ID NO: 2688874 - RNA, 19 nt, Artificial Sequence
  Description of Artificial Sequence: Synthetic oligonucleotide
uucugcggucugguccucg

SEQ ID NO: 2688875 - RNA, 19 nt, Artificial Sequence
  Description of Artificial Sequence: Synthetic oligonucleotide
aagagaccagaugggcaaa

SEQ ID NO: 2688876 - RNA, 19 nt, Artificial Sequence
  Description of Artificial Sequence: Synthetic oligonucleotide
gcaaaggugcugugauaag

SEQ ID NO: 2688877 - RNA, 19 nt, Artificial Sequence
  Description of Artificial Sequence: Synthetic oligonucleotide
guucuuggccacagucugc

SEQ ID NO: 2688878 - RNA, 19 nt, Artificial Sequence
  Description of Artificial Sequence: Synthetic oligonucleotide
cgccaguucggucaaacag

SEQ ID NO: 2688879 - RNA, 19 nt, Artificial Sequence
  Description of Artificial Sequence: Synthetic oligonucleotide
guccucagccauucagcac

SEQ ID NO: 2688880 - RNA, 19 nt, Artificial Sequence
  Description of Artificial Sequence: Synthetic oligonucleotide
cagggcccucaucacgucc

SEQ ID NO: 2688881 - RNA, 19 nt, Artificial Sequence
  Description of Artificial Sequence: Synthetic oligonucleotide
gugauaaggggagccuuca

SEQ ID NO: 2688882 - RNA, 19 nt, Artificial Sequence
  Description of Artificial Sequence: Synthetic oligonucleotide
caaggcaccggcuugcaau

SEQ ID NO: 2688883 - RNA, 19 nt, Artificial Sequence
  Description of Artificial Sequence: Synthetic oligonucleotide
uugccaucgccaguucggu

SEQ ID NO: 2688884 - RNA, 19 nt, Artificial Sequence
  Description of Artificial Sequence: Synthetic oligonucleotide
aggggagccuucacucugg

SEQ ID NO: 2688885 - RNA, 19 nt, Artificial Sequence
  Description of Artificial Sequence: Synthetic oligonucleotide
aggacaugacggauuucug

SEQ ID NO: 2688886 - RNA, 19 nt, Artificial Sequence
  Description of Artificial Sequence: Synthetic oligonucleotide
aguccagcaccuucacauu

SEQ ID NO: 2688887 - RNA, 19 nt, Artificial Sequence
  Description of Artificial Sequence: Synthetic oligonucleotide
augcaaccguugcuguccu

SEQ ID NO: 2688888 - RNA, 19 nt, Artificial Sequence
  Description of Artificial Sequence: Synthetic oligonucleotide
cccaugacgguaccauucc

SEQ ID NO: 2688889 - RNA, 19 nt, Artificial Sequence
  Description of Artificial Sequence: Synthetic oligonucleotide
augggcaggaagugcucaa

SEQ ID NO: 2688890 - RNA, 19 nt, Artificial Sequence
  Description of Artificial Sequence: Synthetic oligonucleotide
cagcaugggcaggaagugc

SEQ ID NO: 2688891 - RNA, 19 nt, Artificial Sequence
  Description of Artificial Sequence: Synthetic oligonucleotide
uuucugcacccaugacggu

SEQ ID NO: 2688892 - RNA, 19 nt, Artificial Sequence
  Description of Artificial Sequence: Synthetic oligonucleotide
gcuugcaauauggaaaugu

SEQ ID NO: 2688893 - RNA, 19 nt, Artificial Sequence
  Description of Artificial Sequence: Synthetic oligonucleotide
agagagcauuuuauuuagu

SEQ ID NO: 2688894 - RNA, 19 nt, Artificial Sequence
  Description of Artificial Sequence: Synthetic oligonucleotide
gaucuugccaucgccaguu

SEQ ID NO: 2688895 - RNA, 19 nt, Artificial Sequence
  Description of Artificial Sequence: Synthetic oligonucleotide
ucugguccucggugaaguc

SEQ ID NO: 2688896 - RNA, 19 nt, Artificial Sequence
  Description of Artificial Sequence: Synthetic oligonucleotide
ucacacaucuuggccgcuc

SEQ ID NO: 2688897 - RNA, 19 nt, Artificial Sequence
  Description of Artificial Sequence: Synthetic oligonucleotide
ccggcuugcaauauggaaa

SEQ ID NO: 2688898 - RNA, 19 nt, Artificial Sequence
  Description of Artificial Sequence: Synthetic oligonucleotide
ggcaaacaucauccagaag

SEQ ID NO: 2688899 - RNA, 19 nt, Artificial Sequence
  Description of Artificial Sequence: Synthetic oligonucleotide
ucagcaccauccggacaag

SEQ ID NO: 2688900 - RNA, 19 nt, Artificial Sequence
  Description of Artificial Sequence: Synthetic oligonucleotide
aucauccagaagagaccag

SEQ ID NO: 2688901 - RNA, 19 nt, Artificial Sequence
  Description of Artificial Sequence: Synthetic oligonucleotide
acucugggcaaggcaccgg

SEQ ID NO: 2688902 - RNA, 19 nt, Artificial Sequence
  Description of Artificial Sequence: Synthetic oligonucleotide
guucggucaaacagcugga

SEQ ID NO: 2688903 - RNA, 19 nt, Artificial Sequence
  Description of Artificial Sequence: Synthetic oligonucleotide
cauucaucucaucacuuuu

SEQ ID NO: 2688904 - RNA, 19 nt, Artificial Sequence
  Description of Artificial Sequence: Synthetic oligonucleotide
caaacacacgaaggccuuc

SEQ ID NO: 2688905 - RNA, 19 nt, Artificial Sequence
  Description of Artificial Sequence: Synthetic oligonucleotide
cguugcuguccucaugucc

SEQ ID NO: 2688906 - RNA, 19 nt, Artificial Sequence
  Description of Artificial Sequence: Synthetic oligonucleotide
ugggcaggaagugcucaaa

SEQ ID NO: 2688907 - RNA, 19 nt, Artificial Sequence
  Description of Artificial Sequence: Synthetic oligonucleotide
caccauccggacaagcucu

SEQ ID NO: 2688908 - RNA, 19 nt, Artificial Sequence
  Description of Artificial Sequence: Synthetic oligonucleotide
ggauuucugcacccaugac

SEQ ID NO: 2688909 - RNA, 19 nt, Artificial Sequence
  Description of Artificial Sequence: Synthetic oligonucleotide
cacacaucuuggccgcuca

SEQ ID NO: 2688910 - RNA, 19 nt, Artificial Sequence
  Description of Artificial Sequence: Synthetic oligonucleotide
cugguccucggugaaguca

SEQ ID NO: 2688911 - RNA, 19 nt, Artificial Sequence
  Description of Artificial Sequence: Synthetic oligonucleotide
ccucauaaguccccugguc

SEQ ID NO: 2688912 - RNA, 19 nt, Artificial Sequence
  Description of Artificial Sequence: Synthetic oligonucleotide
gcaaccguugcuguccuca

SEQ ID NO: 2688913 - RNA, 19 nt, Artificial Sequence
  Description of Artificial Sequence: Synthetic oligonucleotide
gacaaggacaugacggauu

SEQ ID NO: 2688914 - RNA, 19 nt, Artificial Sequence
  Description of Artificial Sequence: Synthetic oligonucleotide
caguucggucaaacagcug

SEQ ID NO: 2688915 - RNA, 19 nt, Artificial Sequence
  Description of Artificial Sequence: Synthetic oligonucleotide
ggaagugcucaaaguccag

SEQ ID NO: 2688916 - RNA, 19 nt, Artificial Sequence
  Description of Artificial Sequence: Synthetic oligonucleotide
ugccaucgccaguucgguc

SEQ ID NO: 2688917 - RNA, 19 nt, Artificial Sequence
  Description of Artificial Sequence: Synthetic oligonucleotide
agucugcagcaugggcagg

SEQ ID NO: 2688918 - RNA, 19 nt, Artificial Sequence
  Description of Artificial Sequence: Synthetic oligonucleotide
ucugcagcaugggcaggaa

SEQ ID NO: 2688919 - RNA, 19 nt, Artificial Sequence
  Description of Artificial Sequence: Synthetic oligonucleotide
guccucggugaagucacac

SEQ ID NO: 2688920 - RNA, 19 nt, Artificial Sequence
  Description of Artificial Sequence: Synthetic oligonucleotide
ggcaccggcuugcaauaug

SEQ ID NO: 2688921 - RNA, 19 nt, Artificial Sequence
  Description of Artificial Sequence: Synthetic oligonucleotide
cuucaacauaauccucaua

SEQ ID NO: 2688922 - RNA, 19 nt, Artificial Sequence
  Description of Artificial Sequence: Synthetic oligonucleotide
guccccugguccuuguucu

SEQ ID NO: 2688923 - RNA, 19 nt, Artificial Sequence
  Description of Artificial Sequence: Synthetic oligonucleotide
gucaaacagcuggaaagcu

SEQ ID NO: 2688924 - RNA, 19 nt, Artificial Sequence
  Description of Artificial Sequence: Synthetic oligonucleotide
gacggauuucugcacccau

SEQ ID NO: 2688925 - RNA, 19 nt, Artificial Sequence
  Description of Artificial Sequence: Synthetic oligonucleotide
gcagcaugggcaggaagug

SEQ ID NO: 2688926 - RNA, 19 nt, Artificial Sequence
  Description of Artificial Sequence: Synthetic oligonucleotide
cacgaaggccuucaacaua

SEQ ID NO: 2688927 - RNA, 19 nt, Artificial Sequence
  Description of Artificial Sequence: Synthetic oligonucleotide
aaguccccugguccuuguu

SEQ ID NO: 2688928 - RNA, 19 nt, Artificial Sequence
  Description of Artificial Sequence: Synthetic oligonucleotide
acgguaccauucccuuccu

SEQ ID NO: 2688929 - RNA, 19 nt, Artificial Sequence
  Description of Artificial Sequence: Synthetic oligonucleotide
ccuugaauucugcggucug

SEQ ID NO: 2688930 - RNA, 19 nt, Artificial Sequence
  Description of Artificial Sequence: Synthetic oligonucleotide
cuguccucauguccugcca

SEQ ID NO: 2688931 - RNA, 19 nt, Artificial Sequence
  Description of Artificial Sequence: Synthetic oligonucleotide
cauccagaagagaccagau

SEQ ID NO: 2688932 - RNA, 19 nt, Artificial Sequence
  Description of Artificial Sequence: Synthetic oligonucleotide
ccucaucacguccccacac

SEQ ID NO: 2688933 - RNA, 19 nt, Artificial Sequence
  Description of Artificial Sequence: Synthetic oligonucleotide
ccaugacgguaccauuccc

SEQ ID NO: 2688934 - RNA, 19 nt, Artificial Sequence
  Description of Artificial Sequence: Synthetic oligonucleotide
gcccucaucacguccccac

SEQ ID NO: 2688935 - RNA, 19 nt, Artificial Sequence
  Description of Artificial Sequence: Synthetic oligonucleotide
acguccccacacuggcugu

SEQ ID NO: 2688936 - RNA, 19 nt, Artificial Sequence
  Description of Artificial Sequence: Synthetic oligonucleotide
cagcaccauccggacaagc

SEQ ID NO: 2688937 - RNA, 19 nt, Artificial Sequence
  Description of Artificial Sequence: Synthetic oligonucleotide
agccuucacucugggcaag

SEQ ID NO: 2688938 - RNA, 19 nt, Artificial Sequence
  Description of Artificial Sequence: Synthetic oligonucleotide
gcuggaaagcuuccuugaa

SEQ ID NO: 2688939 - RNA, 19 nt, Artificial Sequence
  Description of Artificial Sequence: Synthetic oligonucleotide
gcucuucauaguugaugca

SEQ ID NO: 2688940 - RNA, 19 nt, Artificial Sequence
  Description of Artificial Sequence: Synthetic oligonucleotide
cucaucacguccccacacu

SEQ ID NO: 2688941 - RNA, 19 nt, Artificial Sequence
  Description of Artificial Sequence: Synthetic oligonucleotide
cccagugugacaaggacau

SEQ ID NO: 2688942 - RNA, 19 nt, Artificial Sequence
  Description of Artificial Sequence: Synthetic oligonucleotide
cugcacccaugacgguacc

SEQ ID NO: 2688943 - RNA, 19 nt, Artificial Sequence
  Description of Artificial Sequence: Synthetic oligonucleotide
gugcugugauaaggggagc

SEQ ID NO: 2688944 - RNA, 19 nt, Artificial Sequence
  Description of Artificial Sequence: Synthetic oligonucleotide
caaggacaugacggauuuc

SEQ ID NO: 2688945 - RNA, 19 nt, Artificial Sequence
  Description of Artificial Sequence: Synthetic oligonucleotide
caccggcuugcaauaugga

SEQ ID NO: 2688946 - RNA, 19 nt, Artificial Sequence
  Description of Artificial Sequence: Synthetic oligonucleotide
ccccagugugacaaggaca

SEQ ID NO: 2688947 - RNA, 19 nt, Artificial Sequence
  Description of Artificial Sequence: Synthetic oligonucleotide
gggagccuucacucugggc

SEQ ID NO: 2688948 - RNA, 19 nt, Artificial Sequence
  Description of Artificial Sequence: Synthetic oligonucleotide
cggauuucugcacccauga

SEQ ID NO: 2688949 - RNA, 19 nt, Artificial Sequence
  Description of Artificial Sequence: Synthetic oligonucleotide
ugcaaccguugcuguccuc

SEQ ID NO: 2688950 - RNA, 19 nt, Artificial Sequence
  Description of Artificial Sequence: Synthetic oligonucleotide
auucugcggucugguccuc

SEQ ID NO: 2688951 - RNA, 19 nt, Artificial Sequence
  Description of Artificial Sequence: Synthetic oligonucleotide
ccucauguccugccaccag

SEQ ID NO: 2688952 - RNA, 19 nt, Artificial Sequence
  Description of Artificial Sequence: Synthetic oligonucleotide
ggucugguccucggugaag

SEQ ID NO: 2688953 - RNA, 19 nt, Artificial Sequence
  Description of Artificial Sequence: Synthetic oligonucleotide
gccuucacucugggcaagg

SEQ ID NO: 2688954 - RNA, 19 nt, Artificial Sequence
  Description of Artificial Sequence: Synthetic oligonucleotide
gcggucugguccucgguga

SEQ ID NO: 2688955 - RNA, 19 nt, Artificial Sequence
  Description of Artificial Sequence: Synthetic oligonucleotide
ccaguucggucaaacagcu

SEQ ID NO: 2688956 - RNA, 19 nt, Artificial Sequence
  Description of Artificial Sequence: Synthetic oligonucleotide
uccccugguccuuguucuu

SEQ ID NO: 2688957 - RNA, 19 nt, Artificial Sequence
  Description of Artificial Sequence: Synthetic oligonucleotide
gggcaaggcaccggcuugc

SEQ ID NO: 2688958 - RNA, 19 nt, Artificial Sequence
  Description of Artificial Sequence: Synthetic oligonucleotide
ccuucacucugggcaaggc

SEQ ID NO: 2688959 - RNA, 19 nt, Artificial Sequence
  Description of Artificial Sequence: Synthetic oligonucleotide
ggcuugcaauauggaaaug

SEQ ID NO: 2688960 - RNA, 19 nt, Artificial Sequence
  Description of Artificial Sequence: Synthetic oligonucleotide
cccuuccuugucaaacaca

SEQ ID NO: 2688961 - RNA, 19 nt, Artificial Sequence
  Description of Artificial Sequence: Synthetic oligonucleotide
ccacagucugcagcauggg

SEQ ID NO: 2688962 - RNA, 19 nt, Artificial Sequence
  Description of Artificial Sequence: Synthetic oligonucleotide
guccuuguucuuggccaca

SEQ ID NO: 2688963 - RNA, 19 nt, Artificial Sequence
  Description of Artificial Sequence: Synthetic oligonucleotide
ggaucuugccaucgccagu

SEQ ID NO: 2688964 - RNA, 19 nt, Artificial Sequence
  Description of Artificial Sequence: Synthetic oligonucleotide
ccucggugaagucacacau

SEQ ID NO: 2688965 - RNA, 19 nt, Artificial Sequence
  Description of Artificial Sequence: Synthetic oligonucleotide
gcugugauaaggggagccu

SEQ ID NO: 2688966 - RNA, 19 nt, Artificial Sequence
  Description of Artificial Sequence: Synthetic oligonucleotide
gggcccucaucacgucccc

SEQ ID NO: 2688967 - RNA, 19 nt, Artificial Sequence
  Description of Artificial Sequence: Synthetic oligonucleotide
cugugauaaggggagccuu

SEQ ID NO: 2688968 - RNA, 19 nt, Artificial Sequence
  Description of Artificial Sequence: Synthetic oligonucleotide
ggaaauguccucagccauu

SEQ ID NO: 2688969 - RNA, 19 nt, Artificial Sequence
  Description of Artificial Sequence: Synthetic oligonucleotide
gggcaaaggugcugugaua

SEQ ID NO: 2688970 - RNA, 19 nt, Artificial Sequence
  Description of Artificial Sequence: Synthetic oligonucleotide
ccuucaacauaauccucau

SEQ ID NO: 2688971 - RNA, 19 nt, Artificial Sequence
  Description of Artificial Sequence: Synthetic oligonucleotide
accauccggacaagcucuu

SEQ ID NO: 2688972 - RNA, 19 nt, Artificial Sequence
  Description of Artificial Sequence: Synthetic oligonucleotide
aggcaccggcuugcaauau

SEQ ID NO: 2688973 - RNA, 19 nt, Artificial Sequence
  Description of Artificial Sequence: Synthetic oligonucleotide
ccccugguccuuguucuug

SEQ ID NO: 2688974 - RNA, 19 nt, Artificial Sequence
  Description of Artificial Sequence: Synthetic oligonucleotide
caaccguugcuguccucau

SEQ ID NO: 2688975 - RNA, 19 nt, Artificial Sequence
  Description of Artificial Sequence: Synthetic oligonucleotide
gcaugggcaggaagugcuc

SEQ ID NO: 2688976 - RNA, 19 nt, Artificial Sequence
  Description of Artificial Sequence: Synthetic oligonucleotide
cauguccugccaccagcau

SEQ ID NO: 2688977 - RNA, 19 nt, Artificial Sequence
  Description of Artificial Sequence: Synthetic oligonucleotide
cauaaguccccugguccuu

SEQ ID NO: 2688978 - RNA, 19 nt, Artificial Sequence
  Description of Artificial Sequence: Synthetic oligonucleotide
ccguugcuguccucauguc

SEQ ID NO: 2688979 - RNA, 19 nt, Artificial Sequence
  Description of Artificial Sequence: Synthetic oligonucleotide
cccagggcccucaucacgu

SEQ ID NO: 2688980 - RNA, 19 nt, Artificial Sequence
  Description of Artificial Sequence: Synthetic oligonucleotide
gcaaggcaccggcuugcaa

SEQ ID NO: 2688981 - RNA, 19 nt, Artificial Sequence
  Description of Artificial Sequence: Synthetic oligonucleotide
cacccaugacgguaccauu

SEQ ID NO: 2688982 - RNA, 19 nt, Artificial Sequence
  Description of Artificial Sequence: Synthetic oligonucleotide
cggcuugcaauauggaaau

SEQ ID NO: 2688983 - RNA, 19 nt, Artificial Sequence
  Description of Artificial Sequence: Synthetic oligonucleotide
ccagugugacaaggacaug

SEQ ID NO: 2688984 - RNA, 19 nt, Artificial Sequence
  Description of Artificial Sequence: Synthetic oligonucleotide
cccucaucacguccccaca

SEQ ID NO: 2688985 - RNA, 19 nt, Artificial Sequence
  Description of Artificial Sequence: Synthetic oligonucleotide
ggcaaggcaccggcuugca

SEQ ID NO: 2688986 - RNA, 19 nt, Artificial Sequence
  Description of Artificial Sequence: Synthetic oligonucleotide
ccagggcccucaucacguc

SEQ ID NO: 2688987 - RNA, 19 nt, Artificial Sequence
  Description of Artificial Sequence: Synthetic oligonucleotide
cggacaagcucuucauagu

SEQ ID NO: 2688988 - RNA, 19 nt, Artificial Sequence
  Description of Artificial Sequence: Synthetic oligonucleotide
ccauccggacaagcucuuc

SEQ ID NO: 2688989 - RNA, 19 nt, Artificial Sequence
  Description of Artificial Sequence: Synthetic oligonucleotide
gucacacaucuuggccgcu

SEQ ID NO: 2688990 - RNA, 19 nt, Artificial Sequence
  Description of Artificial Sequence: Synthetic oligonucleotide
cugcggucugguccucggu

SEQ ID NO: 2688991 - RNA, 19 nt, Artificial Sequence
  Description of Artificial Sequence: Synthetic oligonucleotide
gguccucggugaagucaca

SEQ ID NO: 2688992 - RNA, 19 nt, Artificial Sequence
  Description of Artificial Sequence: Synthetic oligonucleotide
ccaucgccaguucggucaa

SEQ ID NO: 2688993 - RNA, 19 nt, Artificial Sequence
  Description of Artificial Sequence: Synthetic oligonucleotide
ggcccucaucacgucccca

SEQ ID NO: 2688994 - RNA, 19 nt, Artificial Sequence
  Description of Artificial Sequence: Synthetic oligonucleotide
caucgccaguucggucaaa

SEQ ID NO: 2688995 - RNA, 19 nt, Artificial Sequence
  Description of Artificial Sequence: Synthetic oligonucleotide
cggucugguccucggugaa

SEQ ID NO: 2688996 - RNA, 19 nt, Artificial Sequence
  Description of Artificial Sequence: Synthetic oligonucleotide
cucagccauucagcaccau

SEQ ID NO: 2688997 - RNA, 19 nt, Artificial Sequence
  Description of Artificial Sequence: Synthetic oligonucleotide
cgaaggccuucaacauaau

SEQ ID NO: 2688998 - RNA, 19 nt, Artificial Sequence
  Description of Artificial Sequence: Synthetic oligonucleotide
cggugaagucacacaucuu

SEQ ID NO: 2688999 - RNA, 19 nt, Artificial Sequence
  Description of Artificial Sequence: Synthetic oligonucleotide
cgguaccauucccuuccuu

SEQ ID NO: 2689000 - RNA, 19 nt, Artificial Sequence
  Description of Artificial Sequence: Synthetic oligonucleotide
ucugccagaacccagucgg

SEQ ID NO: 2689001 - RNA, 19 nt, Artificial Sequence
  Description of Artificial Sequence: Synthetic oligonucleotide
auaaucaauccccugcccc

SEQ ID NO: 2689002 - RNA, 19 nt, Artificial Sequence
  Description of Artificial Sequence: Synthetic oligonucleotide
aggaacacccaucucagcc

SEQ ID NO: 2689003 - RNA, 19 nt, Artificial Sequence
  Description of Artificial Sequence: Synthetic oligonucleotide
ucagcaguaagcuucagga

SEQ ID NO: 2689004 - RNA, 19 nt, Artificial Sequence
  Description of Artificial Sequence: Synthetic oligonucleotide
cuucucauaaucaaucccc

SEQ ID NO: 2689005 - RNA, 19 nt, Artificial Sequence
  Description of Artificial Sequence: Synthetic oligonucleotide
aacuugucugcugagaggg

SEQ ID NO: 2689006 - RNA, 19 nt, Artificial Sequence
  Description of Artificial Sequence: Synthetic oligonucleotide
agcaguaagcuucaggauc

SEQ ID NO: 2689007 - RNA, 19 nt, Artificial Sequence
  Description of Artificial Sequence: Synthetic oligonucleotide
gucgggacaguccagaucg

SEQ ID NO: 2689008 - RNA, 19 nt, Artificial Sequence
  Description of Artificial Sequence: Synthetic oligonucleotide
uccagaucgccacagaacc

SEQ ID NO: 2689009 - RNA, 19 nt, Artificial Sequence
  Description of Artificial Sequence: Synthetic oligonucleotide
ucugcugagagggacaugg

SEQ ID NO: 2689010 - RNA, 19 nt, Artificial Sequence
  Description of Artificial Sequence: Synthetic oligonucleotide
cauggaaauagguugggcc

SEQ ID NO: 2689011 - RNA, 19 nt, Artificial Sequence
  Description of Artificial Sequence: Synthetic oligonucleotide
aauccccugccccaggagc

SEQ ID NO: 2689012 - RNA, 19 nt, Artificial Sequence
  Description of Artificial Sequence: Synthetic oligonucleotide
gaugaaacucagcacugcg

SEQ ID NO: 2689013 - RNA, 19 nt, Artificial Sequence
  Description of Artificial Sequence: Synthetic oligonucleotide
cuuggcaucagcaguaagc

SEQ ID NO: 2689014 - RNA, 19 nt, Artificial Sequence
  Description of Artificial Sequence: Synthetic oligonucleotide
cucauaaucaauccccugc

SEQ ID NO: 2689015 - RNA, 19 nt, Artificial Sequence
  Description of Artificial Sequence: Synthetic oligonucleotide
aaauagguugggccagggc

SEQ ID NO: 2689016 - RNA, 19 nt, Artificial Sequence
  Description of Artificial Sequence: Synthetic oligonucleotide
aaggaaucacuguccacac

SEQ ID NO: 2689017 - RNA, 19 nt, Artificial Sequence
  Description of Artificial Sequence: Synthetic oligonucleotide
ucuucucauaaucaauccc

SEQ ID NO: 2689018 - RNA, 19 nt, Artificial Sequence
  Description of Artificial Sequence: Synthetic oligonucleotide
uucaccgaggaaaucuugg

SEQ ID NO: 2689019 - RNA, 19 nt, Artificial Sequence
  Description of Artificial Sequence: Synthetic oligonucleotide
ucauaaucaauccccugcc

SEQ ID NO: 2689020 - RNA, 19 nt, Artificial Sequence
  Description of Artificial Sequence: Synthetic oligonucleotide
ugaaacucagcacugcgac

SEQ ID NO: 2689021 - RNA, 19 nt, Artificial Sequence
  Description of Artificial Sequence: Synthetic oligonucleotide
uucucuucguaacagcggc

SEQ ID NO: 2689022 - RNA, 19 nt, Artificial Sequence
  Description of Artificial Sequence: Synthetic oligonucleotide
agaggaugaaacucagcac

SEQ ID NO: 2689023 - RNA, 19 nt, Artificial Sequence
  Description of Artificial Sequence: Synthetic oligonucleotide
aaacucagcacugcgacug

SEQ ID NO: 2689024 - RNA, 19 nt, Artificial Sequence
  Description of Artificial Sequence: Synthetic oligonucleotide
uuagcaccuggcuacacag

SEQ ID NO: 2689025 - RNA, 19 nt, Artificial Sequence
  Description of Artificial Sequence: Synthetic oligonucleotide
uggacaaggaaucacuguc

SEQ ID NO: 2689026 - RNA, 19 nt, Artificial Sequence
  Description of Artificial Sequence: Synthetic oligonucleotide
aggguuuugcuucucuucg

SEQ ID NO: 2689027 - RNA, 19 nt, Artificial Sequence
  Description of Artificial Sequence: Synthetic oligonucleotide
aaccggaaccucauggugc

SEQ ID NO: 2689028 - RNA, 19 nt, Artificial Sequence
  Description of Artificial Sequence: Synthetic oligonucleotide
agccuguucacacgcaggc

SEQ ID NO: 2689029 - RNA, 19 nt, Artificial Sequence
  Description of Artificial Sequence: Synthetic oligonucleotide
ugccaagagaccaaagcca

SEQ ID NO: 2689030 - RNA, 19 nt, Artificial Sequence
  Description of Artificial Sequence: Synthetic oligonucleotide
acucaaacuuggcaucagc

SEQ ID NO: 2689031 - RNA, 19 nt, Artificial Sequence
  Description of Artificial Sequence: Synthetic oligonucleotide
aaccucauggugccaagag

SEQ ID NO: 2689032 - RNA, 19 nt, Artificial Sequence
  Description of Artificial Sequence: Synthetic oligonucleotide
uuugcuucucuucguaaca

SEQ ID NO: 2689033 - RNA, 19 nt, Artificial Sequence
  Description of Artificial Sequence: Synthetic oligonucleotide
ugggcuccuccacagaacg

SEQ ID NO: 2689034 - RNA, 19 nt, Artificial Sequence
  Description of Artificial Sequence: Synthetic oligonucleotide
uguagcucacuggacaagg

SEQ ID NO: 2689035 - RNA, 19 nt, Artificial Sequence
  Description of Artificial Sequence: Synthetic oligonucleotide
auggaaauagguugggcca

SEQ ID NO: 2689036 - RNA, 19 nt, Artificial Sequence
  Description of Artificial Sequence: Synthetic oligonucleotide
gggacauggaaauagguug

SEQ ID NO: 2689037 - RNA, 19 nt, Artificial Sequence
  Description of Artificial Sequence: Synthetic oligonucleotide
acuggagaggaugaaacuc

SEQ ID NO: 2689038 - RNA, 19 nt, Artificial Sequence
  Description of Artificial Sequence: Synthetic oligonucleotide
uccuuuagcaccuggcuac

SEQ ID NO: 2689039 - RNA, 19 nt, Artificial Sequence
  Description of Artificial Sequence: Synthetic oligonucleotide
uccagacucaaacuuggca

SEQ ID NO: 2689040 - RNA, 19 nt, Artificial Sequence
  Description of Artificial Sequence: Synthetic oligonucleotide
uuuugcuucucuucguaac

SEQ ID NO: 2689041 - RNA, 19 nt, Artificial Sequence
  Description of Artificial Sequence: Synthetic oligonucleotide
cacaucuccagacucaaac

SEQ ID NO: 2689042 - RNA, 19 nt, Artificial Sequence
  Description of Artificial Sequence: Synthetic oligonucleotide
caggguguaguccacacgc

SEQ ID NO: 2689043 - RNA, 19 nt, Artificial Sequence
  Description of Artificial Sequence: Synthetic oligonucleotide
uucacacgcaggcugcagg

SEQ ID NO: 2689044 - RNA, 19 nt, Artificial Sequence
  Description of Artificial Sequence: Synthetic oligonucleotide
aaagcggucaucagggucu

SEQ ID NO: 2689045 - RNA, 19 nt, Artificial Sequence
  Description of Artificial Sequence: Synthetic oligonucleotide
aacggagcaggcuggagcu

SEQ ID NO: 2689046 - RNA, 19 nt, Artificial Sequence
  Description of Artificial Sequence: Synthetic oligonucleotide
gaacuugucugcugagagg

SEQ ID NO: 2689047 - RNA, 19 nt, Artificial Sequence
  Description of Artificial Sequence: Synthetic oligonucleotide
guagccuucacaucuccag

SEQ ID NO: 2689048 - RNA, 19 nt, Artificial Sequence
  Description of Artificial Sequence: Synthetic oligonucleotide
gaucucuagcugcaggugc

SEQ ID NO: 2689049 - RNA, 19 nt, Artificial Sequence
  Description of Artificial Sequence: Synthetic oligonucleotide
gugccaagagaccaaagcc

SEQ ID NO: 2689050 - RNA, 19 nt, Artificial Sequence
  Description of Artificial Sequence: Synthetic oligonucleotide
aucgccacagaaccggaac

SEQ ID NO: 2689051 - RNA, 19 nt, Artificial Sequence
  Description of Artificial Sequence: Synthetic oligonucleotide
aggcacgaucucuagcugc

SEQ ID NO: 2689052 - RNA, 19 nt, Artificial Sequence
  Description of Artificial Sequence: Synthetic oligonucleotide
cagaaccggaaccucaugg

SEQ ID NO: 2689053 - RNA, 19 nt, Artificial Sequence
  Description of Artificial Sequence: Synthetic oligonucleotide
uuuagcaccuggcuacaca

SEQ ID NO: 2689054 - RNA, 19 nt, Artificial Sequence
  Description of Artificial Sequence: Synthetic oligonucleotide
accgaggaaaucuuggcca

SEQ ID NO: 2689055 - RNA, 19 nt, Artificial Sequence
  Description of Artificial Sequence: Synthetic oligonucleotide
accggaaccucauggugcc

SEQ ID NO: 2689056 - RNA, 19 nt, Artificial Sequence
  Description of Artificial Sequence: Synthetic oligonucleotide
gaaccuggaacuugucugc

SEQ ID NO: 2689057 - RNA, 19 nt, Artificial Sequence
  Description of Artificial Sequence: Synthetic oligonucleotide
agccuucacaucuccagac

SEQ ID NO: 2689058 - RNA, 19 nt, Artificial Sequence
  Description of Artificial Sequence: Synthetic oligonucleotide
uucucauaaucaauccccu

SEQ ID NO: 2689059 - RNA, 19 nt, Artificial Sequence
  Description of Artificial Sequence: Synthetic oligonucleotide
cuucucuucguaacagcgg

SEQ ID NO: 2689060 - RNA, 19 nt, Artificial Sequence
  Description of Artificial Sequence: Synthetic oligonucleotide
gaacggagcaggcuggagc

SEQ ID NO: 2689061 - RNA, 19 nt, Artificial Sequence
  Description of Artificial Sequence: Synthetic oligonucleotide
cuguagaggguuuugcuuc

SEQ ID NO: 2689062 - RNA, 19 nt, Artificial Sequence
  Description of Artificial Sequence: Synthetic oligonucleotide
ucaggguguaguccacacg

SEQ ID NO: 2689063 - RNA, 19 nt, Artificial Sequence
  Description of Artificial Sequence: Synthetic oligonucleotide
uaugcuuggcugcacugga

SEQ ID NO: 2689064 - RNA, 19 nt, Artificial Sequence
  Description of Artificial Sequence: Synthetic oligonucleotide
cacacgccagcccacaugg

SEQ ID NO: 2689065 - RNA, 19 nt, Artificial Sequence
  Description of Artificial Sequence: Synthetic oligonucleotide
acacgcaggcugcaggccc

SEQ ID NO: 2689066 - RNA, 19 nt, Artificial Sequence
  Description of Artificial Sequence: Synthetic oligonucleotide
ugccaggagaaccuggaac

SEQ ID NO: 2689067 - RNA, 19 nt, Artificial Sequence
  Description of Artificial Sequence: Synthetic oligonucleotide
cacagaacggagcaggcug

SEQ ID NO: 2689068 - RNA, 19 nt, Artificial Sequence
  Description of Artificial Sequence: Synthetic oligonucleotide
guaacagcggcagaggcug

SEQ ID NO: 2689069 - RNA, 19 nt, Artificial Sequence
  Description of Artificial Sequence: Synthetic oligonucleotide
ucguaacagcggcagaggc

SEQ ID NO: 2689070 - RNA, 19 nt, Artificial Sequence
  Description of Artificial Sequence: Synthetic oligonucleotide
gcugaucucugccagaacc

SEQ ID NO: 2689071 - RNA, 19 nt, Artificial Sequence
  Description of Artificial Sequence: Synthetic oligonucleotide
ucauggugccaagagacca

SEQ ID NO: 2689072 - RNA, 19 nt, Artificial Sequence
  Description of Artificial Sequence: Synthetic oligonucleotide
ucagcacugcgacuguagc

SEQ ID NO: 2689073 - RNA, 19 nt, Artificial Sequence
  Description of Artificial Sequence: Synthetic oligonucleotide
gacuguagccuucacaucu

SEQ ID NO: 2689074 - RNA, 19 nt, Artificial Sequence
  Description of Artificial Sequence: Synthetic oligonucleotide
cuucguaacagcggcagag

SEQ ID NO: 2689075 - RNA, 19 nt, Artificial Sequence
  Description of Artificial Sequence: Synthetic oligonucleotide
ucucauaaucaauccccug

SEQ ID NO: 2689076 - RNA, 19 nt, Artificial Sequence
  Description of Artificial Sequence: Synthetic oligonucleotide
ucaccgaggaaaucuuggc

SEQ ID NO: 2689077 - RNA, 19 nt, Artificial Sequence
  Description of Artificial Sequence: Synthetic oligonucleotide
aacccagucgggacagucc

SEQ ID NO: 2689078 - RNA, 19 nt, Artificial Sequence
  Description of Artificial Sequence: Synthetic oligonucleotide
gaaccggaaccucauggug

SEQ ID NO: 2689079 - RNA, 19 nt, Artificial Sequence
  Description of Artificial Sequence: Synthetic oligonucleotide
ggaaaucuuggccagugug

SEQ ID NO: 2689080 - RNA, 19 nt, Artificial Sequence
  Description of Artificial Sequence: Synthetic oligonucleotide
ggugccaagagaccaaagc

SEQ ID NO: 2689081 - RNA, 19 nt, Artificial Sequence
  Description of Artificial Sequence: Synthetic oligonucleotide
cauaaucaauccccugccc

SEQ ID NO: 2689082 - RNA, 19 nt, Artificial Sequence
  Description of Artificial Sequence: Synthetic oligonucleotide
acaucuccagacucaaacu

SEQ ID NO: 2689083 - RNA, 19 nt, Artificial Sequence
  Description of Artificial Sequence: Synthetic oligonucleotide
agcaccuggcuacacagca

SEQ ID NO: 2689084 - RNA, 19 nt, Artificial Sequence
  Description of Artificial Sequence: Synthetic oligonucleotide
cuggcuacacagcagccgc

SEQ ID NO: 2689085 - RNA, 19 nt, Artificial Sequence
  Description of Artificial Sequence: Synthetic oligonucleotide
agaaccggaaccucauggu

SEQ ID NO: 2689086 - RNA, 19 nt, Artificial Sequence
  Description of Artificial Sequence: Synthetic oligonucleotide
ugcgacuguagccuucaca

SEQ ID NO: 2689087 - RNA, 19 nt, Artificial Sequence
  Description of Artificial Sequence: Synthetic oligonucleotide
uucguaacagcggcagagg

SEQ ID NO: 2689088 - RNA, 19 nt, Artificial Sequence
  Description of Artificial Sequence: Synthetic oligonucleotide
caaggaaucacuguccaca

SEQ ID NO: 2689089 - RNA, 19 nt, Artificial Sequence
  Description of Artificial Sequence: Synthetic oligonucleotide
uggaaauagguugggccag

SEQ ID NO: 2689090 - RNA, 19 nt, Artificial Sequence
  Description of Artificial Sequence: Synthetic oligonucleotide
auagguugggccagggcac

SEQ ID NO: 2689091 - RNA, 19 nt, Artificial Sequence
  Description of Artificial Sequence: Synthetic oligonucleotide
ugcaccaugggcuccucca

SEQ ID NO: 2689092 - RNA, 19 nt, Artificial Sequence
  Description of Artificial Sequence: Synthetic oligonucleotide
cccaucucagcccaaagcg

SEQ ID NO: 2689093 - RNA, 19 nt, Artificial Sequence
  Description of Artificial Sequence: Synthetic oligonucleotide
acgaucucuagcugcaggu

SEQ ID NO: 2689094 - RNA, 19 nt, Artificial Sequence
  Description of Artificial Sequence: Synthetic oligonucleotide
cagaucgccacagaaccgg

SEQ ID NO: 2689095 - RNA, 19 nt, Artificial Sequence
  Description of Artificial Sequence: Synthetic oligonucleotide
ucugggcagccccagcugc

SEQ ID NO: 2689096 - RNA, 19 nt, Artificial Sequence
  Description of Artificial Sequence: Synthetic oligonucleotide
uuggcugcacuggagagga

SEQ ID NO: 2689097 - RNA, 19 nt, Artificial Sequence
  Description of Artificial Sequence: Synthetic oligonucleotide
ucaucagggucugagccug

SEQ ID NO: 2689098 - RNA, 19 nt, Artificial Sequence
  Description of Artificial Sequence: Synthetic oligonucleotide
ucgccacagaaccggaacc

SEQ ID NO: 2689099 - RNA, 19 nt, Artificial Sequence
  Description of Artificial Sequence: Synthetic oligonucleotide
agcuucaccgaggaaaucu

SEQ ID NO: 2689100 - RNA, 19 nt, Artificial Sequence
  Description of Artificial Sequence: Synthetic oligonucleotide
aaucaauccccugccccag

SEQ ID NO: 2689101 - RNA, 19 nt, Artificial Sequence
  Description of Artificial Sequence: Synthetic oligonucleotide
agucgggacaguccagauc

SEQ ID NO: 2689102 - RNA, 19 nt, Artificial Sequence
  Description of Artificial Sequence: Synthetic oligonucleotide
acuaugcuuggcugcacug

SEQ ID NO: 2689103 - RNA, 19 nt, Artificial Sequence
  Description of Artificial Sequence: Synthetic oligonucleotide
ugcugagagggacauggaa

SEQ ID NO: 2689104 - RNA, 19 nt, Artificial Sequence
  Description of Artificial Sequence: Synthetic oligonucleotide
uguagccuucacaucucca

SEQ ID NO: 2689105 - RNA, 19 nt, Artificial Sequence
  Description of Artificial Sequence: Synthetic oligonucleotide
uguagaggguuuugcuucu

SEQ ID NO: 2689106 - RNA, 19 nt, Artificial Sequence
  Description of Artificial Sequence: Synthetic oligonucleotide
gaaauagguugggccaggg

SEQ ID NO: 2689107 - RNA, 19 nt, Artificial Sequence
  Description of Artificial Sequence: Synthetic oligonucleotide
agugugcugaucucugcca

SEQ ID NO: 2689108 - RNA, 19 nt, Artificial Sequence
  Description of Artificial Sequence: Synthetic oligonucleotide
cuucaguucugccaggaga

SEQ ID NO: 2689109 - RNA, 19 nt, Artificial Sequence
  Description of Artificial Sequence: Synthetic oligonucleotide
agcacugcgacuguagccu

SEQ ID NO: 2689110 - RNA, 19 nt, Artificial Sequence
  Description of Artificial Sequence: Synthetic oligonucleotide
agcugcuguagcucacugg

SEQ ID NO: 2689111 - RNA, 19 nt, Artificial Sequence
  Description of Artificial Sequence: Synthetic oligonucleotide
caccgaggaaaucuuggcc

SEQ ID NO: 2689112 - RNA, 19 nt, Artificial Sequence
  Description of Artificial Sequence: Synthetic oligonucleotide
cuaugcuuggcugcacugg

SEQ ID NO: 2689113 - RNA, 19 nt, Artificial Sequence
  Description of Artificial Sequence: Synthetic oligonucleotide
uagccuucacaucuccaga

SEQ ID NO: 2689114 - RNA, 19 nt, Artificial Sequence
  Description of Artificial Sequence: Synthetic oligonucleotide
ccucauggugccaagagac

SEQ ID NO: 2689115 - RNA, 19 nt, Artificial Sequence
  Description of Artificial Sequence: Synthetic oligonucleotide
cacgaucucuagcugcagg

SEQ ID NO: 2689116 - RNA, 19 nt, Artificial Sequence
  Description of Artificial Sequence: Synthetic oligonucleotide
uugucugcugagagggaca

SEQ ID NO: 2689117 - RNA, 19 nt, Artificial Sequence
  Description of Artificial Sequence: Synthetic oligonucleotide
cucauggugccaagagacc

SEQ ID NO: 2689118 - RNA, 19 nt, Artificial Sequence
  Description of Artificial Sequence: Synthetic oligonucleotide
cagacucaaacuuggcauc

SEQ ID NO: 2689119 - RNA, 19 nt, Artificial Sequence
  Description of Artificial Sequence: Synthetic oligonucleotide
gcuucucuucguaacagcg

SEQ ID NO: 2689120 - RNA, 19 nt, Artificial Sequence
  Description of Artificial Sequence: Synthetic oligonucleotide
cucagcacugcgacuguag

SEQ ID NO: 2689121 - RNA, 19 nt, Artificial Sequence
  Description of Artificial Sequence: Synthetic oligonucleotide
cucuucguaacagcggcag

SEQ ID NO: 2689122 - RNA, 19 nt, Artificial Sequence
  Description of Artificial Sequence: Synthetic oligonucleotide
cuguucacacgcaggcugc

SEQ ID NO: 2689123 - RNA, 19 nt, Artificial Sequence
  Description of Artificial Sequence: Synthetic oligonucleotide
caaagcggucaucaggguc

SEQ ID NO: 2689124 - RNA, 19 nt, Artificial Sequence
  Description of Artificial Sequence: Synthetic oligonucleotide
cuugucugcugagagggac

SEQ ID NO: 2689125 - RNA, 19 nt, Artificial Sequence
  Description of Artificial Sequence: Synthetic oligonucleotide
uguaguccacacgccagcc

SEQ ID NO: 2689126 - RNA, 19 nt, Artificial Sequence
  Description of Artificial Sequence: Synthetic oligonucleotide
ggaaucacuguccacacua

SEQ ID NO: 2689127 - RNA, 19 nt, Artificial Sequence
  Description of Artificial Sequence: Synthetic oligonucleotide
gagcucaggguguagucca

SEQ ID NO: 2689128 - RNA, 19 nt, Artificial Sequence
  Description of Artificial Sequence: Synthetic oligonucleotide
caguucugccaggagaacc

SEQ ID NO: 2689129 - RNA, 19 nt, Artificial Sequence
  Description of Artificial Sequence: Synthetic oligonucleotide
cacgccagcccacaugggc

SEQ ID NO: 2689130 - RNA, 19 nt, Artificial Sequence
  Description of Artificial Sequence: Synthetic oligonucleotide
ccugcuucaguucugccag

SEQ ID NO: 2689131 - RNA, 19 nt, Artificial Sequence
  Description of Artificial Sequence: Synthetic oligonucleotide
ggaacacccaucucagccc

SEQ ID NO: 2689132 - RNA, 19 nt, Artificial Sequence
  Description of Artificial Sequence: Synthetic oligonucleotide
ucucuucguaacagcggca

SEQ ID NO: 2689133 - RNA, 19 nt, Artificial Sequence
  Description of Artificial Sequence: Synthetic oligonucleotide
ucuucguaacagcggcaga

SEQ ID NO: 2689134 - RNA, 19 nt, Artificial Sequence
  Description of Artificial Sequence: Synthetic oligonucleotide
cagcacugcgacuguagcc

SEQ ID NO: 2689135 - RNA, 19 nt, Artificial Sequence
  Description of Artificial Sequence: Synthetic oligonucleotide
accucauggugccaagaga

SEQ ID NO: 2689136 - RNA, 19 nt, Artificial Sequence
  Description of Artificial Sequence: Synthetic oligonucleotide
cuucaccgaggaaaucuug

SEQ ID NO: 2689137 - RNA, 19 nt, Artificial Sequence
  Description of Artificial Sequence: Synthetic oligonucleotide
acuggacaaggaaucacug

SEQ ID NO: 2689138 - RNA, 19 nt, Artificial Sequence
  Description of Artificial Sequence: Synthetic oligonucleotide
gaacacccaucucagccca

SEQ ID NO: 2689139 - RNA, 19 nt, Artificial Sequence
  Description of Artificial Sequence: Synthetic oligonucleotide
gccaggaacacccaucuca

SEQ ID NO: 2689140 - RNA, 19 nt, Artificial Sequence
  Description of Artificial Sequence: Synthetic oligonucleotide
uggaacuugucugcugaga

SEQ ID NO: 2689141 - RNA, 19 nt, Artificial Sequence
  Description of Artificial Sequence: Synthetic oligonucleotide
acgccagcccacaugggcc

SEQ ID NO: 2689142 - RNA, 19 nt, Artificial Sequence
  Description of Artificial Sequence: Synthetic oligonucleotide
cucaggguguaguccacac

SEQ ID NO: 2689143 - RNA, 19 nt, Artificial Sequence
  Description of Artificial Sequence: Synthetic oligonucleotide
cucugccagaacccagucg

SEQ ID NO: 2689144 - RNA, 19 nt, Artificial Sequence
  Description of Artificial Sequence: Synthetic oligonucleotide
acagaacggagcaggcugg

SEQ ID NO: 2689145 - RNA, 19 nt, Artificial Sequence
  Description of Artificial Sequence: Synthetic oligonucleotide
gcugcuguagcucacugga

SEQ ID NO: 2689146 - RNA, 19 nt, Artificial Sequence
  Description of Artificial Sequence: Synthetic oligonucleotide
acuuggcaucagcaguaag

SEQ ID NO: 2689147 - RNA, 19 nt, Artificial Sequence
  Description of Artificial Sequence: Synthetic oligonucleotide
acccagucgggacagucca

SEQ ID NO: 2689148 - RNA, 19 nt, Artificial Sequence
  Description of Artificial Sequence: Synthetic oligonucleotide
cagccuguucacacgcagg

SEQ ID NO: 2689149 - RNA, 19 nt, Artificial Sequence
  Description of Artificial Sequence: Synthetic oligonucleotide
uggugccaagagaccaaag

SEQ ID NO: 2689150 - RNA, 19 nt, Artificial Sequence
  Description of Artificial Sequence: Synthetic oligonucleotide
acaguccagaucgccacag

SEQ ID NO: 2689151 - RNA, 19 nt, Artificial Sequence
  Description of Artificial Sequence: Synthetic oligonucleotide
ugcacuggagaggaugaaa

SEQ ID NO: 2689152 - RNA, 19 nt, Artificial Sequence
  Description of Artificial Sequence: Synthetic oligonucleotide
aacucagcacugcgacugu

SEQ ID NO: 2689153 - RNA, 19 nt, Artificial Sequence
  Description of Artificial Sequence: Synthetic oligonucleotide
gagaaccuggaacuugucu

SEQ ID NO: 2689154 - RNA, 19 nt, Artificial Sequence
  Description of Artificial Sequence: Synthetic oligonucleotide
augaaacucagcacugcga

SEQ ID NO: 2689155 - RNA, 19 nt, Artificial Sequence
  Description of Artificial Sequence: Synthetic oligonucleotide
aucaauccccugccccagg

SEQ ID NO: 2689156 - RNA, 19 nt, Artificial Sequence
  Description of Artificial Sequence: Synthetic oligonucleotide
cuguagccuucacaucucc

SEQ ID NO: 2689157 - RNA, 19 nt, Artificial Sequence
  Description of Artificial Sequence: Synthetic oligonucleotide
ugguggcgugcucucuggg

SEQ ID NO: 2689158 - RNA, 19 nt, Artificial Sequence
  Description of Artificial Sequence: Synthetic oligonucleotide
ucucagcccaaagcgguca

SEQ ID NO: 2689159 - RNA, 19 nt, Artificial Sequence
  Description of Artificial Sequence: Synthetic oligonucleotide
acuguagccuucacaucuc

SEQ ID NO: 2689160 - RNA, 19 nt, Artificial Sequence
  Description of Artificial Sequence: Synthetic oligonucleotide
aggguguaguccacacgcc

SEQ ID NO: 2689161 - RNA, 19 nt, Artificial Sequence
  Description of Artificial Sequence: Synthetic oligonucleotide
aggaaaucuuggccagugu

SEQ ID NO: 2689162 - RNA, 19 nt, Artificial Sequence
  Description of Artificial Sequence: Synthetic oligonucleotide
acagaaccggaaccucaug

SEQ ID NO: 2689163 - RNA, 19 nt, Artificial Sequence
  Description of Artificial Sequence: Synthetic oligonucleotide
uaacagcggcagaggcugg

SEQ ID NO: 2689164 - RNA, 19 nt, Artificial Sequence
  Description of Artificial Sequence: Synthetic oligonucleotide
ggacaaggaaucacugucc

SEQ ID NO: 2689165 - RNA, 19 nt, Artificial Sequence
  Description of Artificial Sequence: Synthetic oligonucleotide
ccuguucacacgcaggcug

SEQ ID NO: 2689166 - RNA, 19 nt, Artificial Sequence
  Description of Artificial Sequence: Synthetic oligonucleotide
ccaucucagcccaaagcgg

SEQ ID NO: 2689167 - RNA, 19 nt, Artificial Sequence
  Description of Artificial Sequence: Synthetic oligonucleotide
cuccagacucaaacuuggc

SEQ ID NO: 2689168 - RNA, 19 nt, Artificial Sequence
  Description of Artificial Sequence: Synthetic oligonucleotide
ccaggaacacccaucucag

SEQ ID NO: 2689169 - RNA, 19 nt, Artificial Sequence
  Description of Artificial Sequence: Synthetic oligonucleotide
agggacauggaaauagguu

SEQ ID NO: 2689170 - RNA, 19 nt, Artificial Sequence
  Description of Artificial Sequence: Synthetic oligonucleotide
cugguggcgugcucucugg

SEQ ID NO: 2689171 - RNA, 19 nt, Artificial Sequence
  Description of Artificial Sequence: Synthetic oligonucleotide
agcucacuggacaaggaau

SEQ ID NO: 2689172 - RNA, 19 nt, Artificial Sequence
  Description of Artificial Sequence: Synthetic oligonucleotide
aaccuggaacuugucugcu

SEQ ID NO: 2689173 - RNA, 19 nt, Artificial Sequence
  Description of Artificial Sequence: Synthetic oligonucleotide
accuggaacuugucugcug

SEQ ID NO: 2689174 - RNA, 19 nt, Artificial Sequence
  Description of Artificial Sequence: Synthetic oligonucleotide
ugccagaacccagucggga

SEQ ID NO: 2689175 - RNA, 19 nt, Artificial Sequence
  Description of Artificial Sequence: Synthetic oligonucleotide
gguguaguccacacgccag

SEQ ID NO: 2689176 - RNA, 19 nt, Artificial Sequence
  Description of Artificial Sequence: Synthetic oligonucleotide
guggcgugcucucugggca

SEQ ID NO: 2689177 - RNA, 19 nt, Artificial Sequence
  Description of Artificial Sequence: Synthetic oligonucleotide
ggacaguccagaucgccac

SEQ ID NO: 2689178 - RNA, 19 nt, Artificial Sequence
  Description of Artificial Sequence: Synthetic oligonucleotide
agggucugagccugcuuca

SEQ ID NO: 2689179 - RNA, 19 nt, Artificial Sequence
  Description of Artificial Sequence: Synthetic oligonucleotide
guccagaucgccacagaac

SEQ ID NO: 2689180 - RNA, 19 nt, Artificial Sequence
  Description of Artificial Sequence: Synthetic oligonucleotide
cacgcaggcugcaggcccg

SEQ ID NO: 2689181 - RNA, 19 nt, Artificial Sequence
  Description of Artificial Sequence: Synthetic oligonucleotide
caggagaaccuggaacuug

SEQ ID NO: 2689182 - RNA, 19 nt, Artificial Sequence
  Description of Artificial Sequence: Synthetic oligonucleotide
accuggcuacacagcagcc

SEQ ID NO: 2689183 - RNA, 19 nt, Artificial Sequence
  Description of Artificial Sequence: Synthetic oligonucleotide
ugucugcugagagggacau

SEQ ID NO: 2689184 - RNA, 19 nt, Artificial Sequence
  Description of Artificial Sequence: Synthetic oligonucleotide
gcccacaugggccagccug

SEQ ID NO: 2689185 - RNA, 19 nt, Artificial Sequence
  Description of Artificial Sequence: Synthetic oligonucleotide
caggaacacccaucucagc

SEQ ID NO: 2689186 - RNA, 19 nt, Artificial Sequence
  Description of Artificial Sequence: Synthetic oligonucleotide
uagcugcaggugcaccaug

SEQ ID NO: 2689187 - RNA, 19 nt, Artificial Sequence
  Description of Artificial Sequence: Synthetic oligonucleotide
ggaaauagguugggccagg

SEQ ID NO: 2689188 - RNA, 19 nt, Artificial Sequence
  Description of Artificial Sequence: Synthetic oligonucleotide
aucucugccagaacccagu

SEQ ID NO: 2689189 - RNA, 19 nt, Artificial Sequence
  Description of Artificial Sequence: Synthetic oligonucleotide
cagaacccagucgggacag

SEQ ID NO: 2689190 - RNA, 19 nt, Artificial Sequence
  Description of Artificial Sequence: Synthetic oligonucleotide
gaaacucagcacugcgacu

SEQ ID NO: 2689191 - RNA, 19 nt, Artificial Sequence
  Description of Artificial Sequence: Synthetic oligonucleotide
gcacuggagaggaugaaac

SEQ ID NO: 2689192 - RNA, 19 nt, Artificial Sequence
  Description of Artificial Sequence: Synthetic oligonucleotide
uggcuacacagcagccgca

SEQ ID NO: 2689193 - RNA, 19 nt, Artificial Sequence
  Description of Artificial Sequence: Synthetic oligonucleotide
ugcugaucucugccagaac

SEQ ID NO: 2689194 - RNA, 19 nt, Artificial Sequence
  Description of Artificial Sequence: Synthetic oligonucleotide
gaacccagucgggacaguc

SEQ ID NO: 2689195 - RNA, 19 nt, Artificial Sequence
  Description of Artificial Sequence: Synthetic oligonucleotide
aacagcggcagaggcuggu

SEQ ID NO: 2689196 - RNA, 19 nt, Artificial Sequence
  Description of Artificial Sequence: Synthetic oligonucleotide
caugggcuccuccacagaa

SEQ ID NO: 2689197 - RNA, 19 nt, Artificial Sequence
  Description of Artificial Sequence: Synthetic oligonucleotide
caucucagcccaaagcggu

SEQ ID NO: 2689198 - RNA, 19 nt, Artificial Sequence
  Description of Artificial Sequence: Synthetic oligonucleotide
gacaguccagaucgccaca

SEQ ID NO: 2689199 - RNA, 19 nt, Artificial Sequence
  Description of Artificial Sequence: Synthetic oligonucleotide
ccacacuaugcuuggcugc

SEQ ID NO: 2689200 - RNA, 19 nt, Artificial Sequence
  Description of Artificial Sequence: Synthetic oligonucleotide
aucucagcccaaagcgguc

SEQ ID NO: 2689201 - RNA, 19 nt, Artificial Sequence
  Description of Artificial Sequence: Synthetic oligonucleotide
cacuggacaaggaaucacu

SEQ ID NO: 2689202 - RNA, 19 nt, Artificial Sequence
  Description of Artificial Sequence: Synthetic oligonucleotide
uguucacacgcaggcugca

SEQ ID NO: 2689203 - RNA, 19 nt, Artificial Sequence
  Description of Artificial Sequence: Synthetic oligonucleotide
cuguagcucacuggacaag

SEQ ID NO: 2689204 - RNA, 19 nt, Artificial Sequence
  Description of Artificial Sequence: Synthetic oligonucleotide
ccuucacaucuccagacuc

SEQ ID NO: 2689205 - RNA, 19 nt, Artificial Sequence
  Description of Artificial Sequence: Synthetic oligonucleotide
gcgacuguagccuucacau

SEQ ID NO: 2689206 - RNA, 19 nt, Artificial Sequence
  Description of Artificial Sequence: Synthetic oligonucleotide
cuacacagcagccgcagcu

SEQ ID NO: 2689207 - RNA, 19 nt, Artificial Sequence
  Description of Artificial Sequence: Synthetic oligonucleotide
gguggcgugcucucugggc

SEQ ID NO: 2689208 - RNA, 19 nt, Artificial Sequence
  Description of Artificial Sequence: Synthetic oligonucleotide
aggagcuccuuuagcaccu

SEQ ID NO: 2689209 - RNA, 19 nt, Artificial Sequence
  Description of Artificial Sequence: Synthetic oligonucleotide
agaacggagcaggcuggag

SEQ ID NO: 2689210 - RNA, 19 nt, Artificial Sequence
  Description of Artificial Sequence: Synthetic oligonucleotide
cacccaucucagcccaaag

SEQ ID NO: 2689211 - RNA, 19 nt, Artificial Sequence
  Description of Artificial Sequence: Synthetic oligonucleotide
aggcugguggcgugcucuc

SEQ ID NO: 2689212 - RNA, 19 nt, Artificial Sequence
  Description of Artificial Sequence: Synthetic oligonucleotide
ugagagggacauggaaaua

SEQ ID NO: 2689213 - RNA, 19 nt, Artificial Sequence
  Description of Artificial Sequence: Synthetic oligonucleotide
ccagaucgccacagaaccg

SEQ ID NO: 2689214 - RNA, 19 nt, Artificial Sequence
  Description of Artificial Sequence: Synthetic oligonucleotide
cauggugccaagagaccaa

SEQ ID NO: 2689215 - RNA, 19 nt, Artificial Sequence
  Description of Artificial Sequence: Synthetic oligonucleotide
uacacagcagccgcagcuu

SEQ ID NO: 2689216 - RNA, 19 nt, Artificial Sequence
  Description of Artificial Sequence: Synthetic oligonucleotide
cacacuaugcuuggcugca

SEQ ID NO: 2689217 - RNA, 19 nt, Artificial Sequence
  Description of Artificial Sequence: Synthetic oligonucleotide
ggaaccucauggugccaag

SEQ ID NO: 2689218 - RNA, 19 nt, Artificial Sequence
  Description of Artificial Sequence: Synthetic oligonucleotide
ucucuagcugcaggugcac

SEQ ID NO: 2689219 - RNA, 19 nt, Artificial Sequence
  Description of Artificial Sequence: Synthetic oligonucleotide
gcugagagggacauggaaa

SEQ ID NO: 2689220 - RNA, 19 nt, Artificial Sequence
  Description of Artificial Sequence: Synthetic oligonucleotide
cucuagcugcaggugcacc

SEQ ID NO: 2689221 - RNA, 19 nt, Artificial Sequence
  Description of Artificial Sequence: Synthetic oligonucleotide
gaaccucauggugccaaga

SEQ ID NO: 2689222 - RNA, 19 nt, Artificial Sequence
  Description of Artificial Sequence: Synthetic oligonucleotide
cagcccaaagcggucauca

SEQ ID NO: 2689223 - RNA, 19 nt, Artificial Sequence
  Description of Artificial Sequence: Synthetic oligonucleotide
ggcugcacuggagaggaug

SEQ ID NO: 2689224 - RNA, 19 nt, Artificial Sequence
  Description of Artificial Sequence: Synthetic oligonucleotide
ccgaggaaaucuuggccag

SEQ ID NO: 2689225 - RNA, 19 nt, Artificial Sequence
  Description of Artificial Sequence: Synthetic oligonucleotide
gcucacuggacaaggaauc

SEQ ID NO: 2689226 - RNA, 19 nt, Artificial Sequence
  Description of Artificial Sequence: Synthetic oligonucleotide
guucacacgcaggcugcag

SEQ ID NO: 2689227 - RNA, 19 nt, Artificial Sequence
  Description of Artificial Sequence: Synthetic oligonucleotide
cuggacaaggaaucacugu

SEQ ID NO: 2689228 - RNA, 19 nt, Artificial Sequence
  Description of Artificial Sequence: Synthetic oligonucleotide
ggguguaguccacacgcca

SEQ ID NO: 2689229 - RNA, 19 nt, Artificial Sequence
  Description of Artificial Sequence: Synthetic oligonucleotide
gcggucaucagggucugag

SEQ ID NO: 2689230 - RNA, 19 nt, Artificial Sequence
  Description of Artificial Sequence: Synthetic oligonucleotide
gguuuugcuucucuucgua

SEQ ID NO: 2689231 - RNA, 19 nt, Artificial Sequence
  Description of Artificial Sequence: Synthetic oligonucleotide
ccuggcuacacagcagccg

SEQ ID NO: 2689232 - RNA, 19 nt, Artificial Sequence
  Description of Artificial Sequence: Synthetic oligonucleotide
cuuuagcaccuggcuacac

SEQ ID NO: 2689233 - RNA, 19 nt, Artificial Sequence
  Description of Artificial Sequence: Synthetic oligonucleotide
caucuccagacucaaacuu

SEQ ID NO: 2689234 - RNA, 19 nt, Artificial Sequence
  Description of Artificial Sequence: Synthetic oligonucleotide
gccagaacccagucgggac

SEQ ID NO: 2689235 - RNA, 19 nt, Artificial Sequence
  Description of Artificial Sequence: Synthetic oligonucleotide
agcucaggguguaguccac

SEQ ID NO: 2689236 - RNA, 19 nt, Artificial Sequence
  Description of Artificial Sequence: Synthetic oligonucleotide
ccuggaacuugucugcuga

SEQ ID NO: 2689237 - RNA, 19 nt, Artificial Sequence
  Description of Artificial Sequence: Synthetic oligonucleotide
uccacacgccagcccacau

SEQ ID NO: 2689238 - RNA, 19 nt, Artificial Sequence
  Description of Artificial Sequence: Synthetic oligonucleotide
guucugccaggagaaccug

SEQ ID NO: 2689239 - RNA, 19 nt, Artificial Sequence
  Description of Artificial Sequence: Synthetic oligonucleotide
caucagggucugagccugc

SEQ ID NO: 2689240 - RNA, 19 nt, Artificial Sequence
  Description of Artificial Sequence: Synthetic oligonucleotide
guagcucacuggacaagga

SEQ ID NO: 2689241 - RNA, 19 nt, Artificial Sequence
  Description of Artificial Sequence: Synthetic oligonucleotide
ccagccuguucacacgcag

SEQ ID NO: 2689242 - RNA, 19 nt, Artificial Sequence
  Description of Artificial Sequence: Synthetic oligonucleotide
augcuuggcugcacuggag

SEQ ID NO: 2689243 - RNA, 19 nt, Artificial Sequence
  Description of Artificial Sequence: Synthetic oligonucleotide
ccagacucaaacuuggcau

SEQ ID NO: 2689244 - RNA, 19 nt, Artificial Sequence
  Description of Artificial Sequence: Synthetic oligonucleotide
cacacgcaggcugcaggcc

SEQ ID NO: 2689245 - RNA, 19 nt, Artificial Sequence
  Description of Artificial Sequence: Synthetic oligonucleotide
gcugguggcgugcucucug

SEQ ID NO: 2689246 - RNA, 19 nt, Artificial Sequence
  Description of Artificial Sequence: Synthetic oligonucleotide
gugcugaucucugccagaa

SEQ ID NO: 2689247 - RNA, 19 nt, Artificial Sequence
  Description of Artificial Sequence: Synthetic oligonucleotide
auggugccaagagaccaaa

SEQ ID NO: 2689248 - RNA, 19 nt, Artificial Sequence
  Description of Artificial Sequence: Synthetic oligonucleotide
agccgcagcuucaccgagg

SEQ ID NO: 2689249 - RNA, 19 nt, Artificial Sequence
  Description of Artificial Sequence: Synthetic oligonucleotide
gcaguaagcuucaggaucu

SEQ ID NO: 2689250 - RNA, 19 nt, Artificial Sequence
  Description of Artificial Sequence: Synthetic oligonucleotide
cacugcgacuguagccuuc

SEQ ID NO: 2689251 - RNA, 19 nt, Artificial Sequence
  Description of Artificial Sequence: Synthetic oligonucleotide
auccccugccccaggagcu

SEQ ID NO: 2689252 - RNA, 19 nt, Artificial Sequence
  Description of Artificial Sequence: Synthetic oligonucleotide
ugcuccuguagaggguuuu

SEQ ID NO: 2689253 - RNA, 19 nt, Artificial Sequence
  Description of Artificial Sequence: Synthetic oligonucleotide
cagccgcagcuucaccgag

SEQ ID NO: 2689254 - RNA, 19 nt, Artificial Sequence
  Description of Artificial Sequence: Synthetic oligonucleotide
ucuuggccagugugcugau

SEQ ID NO: 2689255 - RNA, 19 nt, Artificial Sequence
  Description of Artificial Sequence: Synthetic oligonucleotide
gugcaccaugggcuccucc

SEQ ID NO: 2689256 - RNA, 19 nt, Artificial Sequence
  Description of Artificial Sequence: Synthetic oligonucleotide
ggcacgaucucuagcugca

SEQ ID NO: 2689257 - RNA, 19 nt, Artificial Sequence
  Description of Artificial Sequence: Synthetic oligonucleotide
caccaugggcuccuccaca

SEQ ID NO: 2689258 - RNA, 19 nt, Artificial Sequence
  Description of Artificial Sequence: Synthetic oligonucleotide
gcugcacuggagaggauga

SEQ ID NO: 2689259 - RNA, 19 nt, Artificial Sequence
  Description of Artificial Sequence: Synthetic oligonucleotide
gggacaguccagaucgcca

SEQ ID NO: 2689260 - RNA, 19 nt, Artificial Sequence
  Description of Artificial Sequence: Synthetic oligonucleotide
agaucgccacagaaccgga

SEQ ID NO: 2689261 - RNA, 19 nt, Artificial Sequence
  Description of Artificial Sequence: Synthetic oligonucleotide
gguugggccagggcacccg

SEQ ID NO: 2689262 - RNA, 19 nt, Artificial Sequence
  Description of Artificial Sequence: Synthetic oligonucleotide
gaucgccacagaaccggaa

SEQ ID NO: 2689263 - RNA, 19 nt, Artificial Sequence
  Description of Artificial Sequence: Synthetic oligonucleotide
cccgaaggugcuccuguag

SEQ ID NO: 2689264 - RNA, 19 nt, Artificial Sequence
  Description of Artificial Sequence: Synthetic oligonucleotide
cacagaaccggaaccucau

SEQ ID NO: 2689265 - RNA, 19 nt, Artificial Sequence
  Description of Artificial Sequence: Synthetic oligonucleotide
acggagcaggcuggagcuc

SEQ ID NO: 2689266 - RNA, 19 nt, Artificial Sequence
  Description of Artificial Sequence: Synthetic oligonucleotide
ccacagaaccggaaccuca

SEQ ID NO: 2689267 - RNA, 19 nt, Artificial Sequence
  Description of Artificial Sequence: Synthetic oligonucleotide
gccccaggagcuccuuuag

SEQ ID NO: 2689268 - RNA, 19 nt, Artificial Sequence
  Description of Artificial Sequence: Synthetic oligonucleotide
cacuaugcuuggcugcacu

SEQ ID NO: 2689269 - RNA, 19 nt, Artificial Sequence
  Description of Artificial Sequence: Synthetic oligonucleotide
gccgcagcuucaccgagga

SEQ ID NO: 2689270 - RNA, 19 nt, Artificial Sequence
  Description of Artificial Sequence: Synthetic oligonucleotide
caggugcaccaugggcucc

SEQ ID NO: 2689271 - RNA, 19 nt, Artificial Sequence
  Description of Artificial Sequence: Synthetic oligonucleotide
ccgaaggugcuccuguaga

SEQ ID NO: 2689272 - RNA, 19 nt, Artificial Sequence
  Description of Artificial Sequence: Synthetic oligonucleotide
gcaccaugggcuccuccac

SEQ ID NO: 2689273 - RNA, 19 nt, Artificial Sequence
  Description of Artificial Sequence: Synthetic oligonucleotide
cugcugagagggacaugga

SEQ ID NO: 2689274 - RNA, 19 nt, Artificial Sequence
  Description of Artificial Sequence: Synthetic oligonucleotide
cagggcacccggggcaggc

SEQ ID NO: 2689275 - RNA, 19 nt, Artificial Sequence
  Description of Artificial Sequence: Synthetic oligonucleotide
ccagaacccagucgggaca

SEQ ID NO: 2689276 - RNA, 19 nt, Artificial Sequence
  Description of Artificial Sequence: Synthetic oligonucleotide
gggucugagccugcuucag

SEQ ID NO: 2689277 - RNA, 19 nt, Artificial Sequence
  Description of Artificial Sequence: Synthetic oligonucleotide
acacgccagcccacauggg

SEQ ID NO: 2689278 - RNA, 19 nt, Artificial Sequence
  Description of Artificial Sequence: Synthetic oligonucleotide
gcuccuguagaggguuuug

SEQ ID NO: 2689279 - RNA, 19 nt, Artificial Sequence
  Description of Artificial Sequence: Synthetic oligonucleotide
cagcaguaagcuucaggau

SEQ ID NO: 2689280 - RNA, 19 nt, Artificial Sequence
  Description of Artificial Sequence: Synthetic oligonucleotide
gcaccuggcuacacagcag

SEQ ID NO: 2689281 - RNA, 19 nt, Artificial Sequence
  Description of Artificial Sequence: Synthetic oligonucleotide
cgcagcuucaccgaggaaa

SEQ ID NO: 2689282 - RNA, 19 nt, Artificial Sequence
  Description of Artificial Sequence: Synthetic oligonucleotide
aacacccaucucagcccaa

SEQ ID NO: 2689283 - RNA, 19 nt, Artificial Sequence
  Description of Artificial Sequence: Synthetic oligonucleotide
ccacacgccagcccacaug

SEQ ID NO: 2689284 - RNA, 19 nt, Artificial Sequence
  Description of Artificial Sequence: Synthetic oligonucleotide
caguccagaucgccacaga

SEQ ID NO: 2689285 - RNA, 19 nt, Artificial Sequence
  Description of Artificial Sequence: Synthetic oligonucleotide
cggucaucagggucugagc

SEQ ID NO: 2689286 - RNA, 19 nt, Artificial Sequence
  Description of Artificial Sequence: Synthetic oligonucleotide
acucagcacugcgacugua

SEQ ID NO: 2689287 - RNA, 19 nt, Artificial Sequence
  Description of Artificial Sequence: Synthetic oligonucleotide
cugccaggagaaccuggaa

SEQ ID NO: 2689288 - RNA, 19 nt, Artificial Sequence
  Description of Artificial Sequence: Synthetic oligonucleotide
ccccaggagcuccuuuagc

SEQ ID NO: 2689289 - RNA, 19 nt, Artificial Sequence
  Description of Artificial Sequence: Synthetic oligonucleotide
gucugcugagagggacaug

SEQ ID NO: 2689290 - RNA, 19 nt, Artificial Sequence
  Description of Artificial Sequence: Synthetic oligonucleotide
cugcgacuguagccuucac

SEQ ID NO: 2689291 - RNA, 19 nt, Artificial Sequence
  Description of Artificial Sequence: Synthetic oligonucleotide
gcagaggcugguggcgugc

SEQ ID NO: 2689292 - RNA, 19 nt, Artificial Sequence
  Description of Artificial Sequence: Synthetic oligonucleotide
agcccacaugggccagccu

SEQ ID NO: 2689293 - RNA, 19 nt, Artificial Sequence
  Description of Artificial Sequence: Synthetic oligonucleotide
agaacccagucgggacagu

SEQ ID NO: 2689294 - RNA, 19 nt, Artificial Sequence
  Description of Artificial Sequence: Synthetic oligonucleotide
ugcaggcccgaaggugcuc

SEQ ID NO: 2689295 - RNA, 19 nt, Artificial Sequence
  Description of Artificial Sequence: Synthetic oligonucleotide
cagaacggagcaggcugga

SEQ ID NO: 2689296 - RNA, 19 nt, Artificial Sequence
  Description of Artificial Sequence: Synthetic oligonucleotide
gggccagggcacccggggc

SEQ ID NO: 2689297 - RNA, 19 nt, Artificial Sequence
  Description of Artificial Sequence: Synthetic oligonucleotide
ggcacccggggcaggcacg

SEQ ID NO: 2689298 - RNA, 19 nt, Artificial Sequence
  Description of Artificial Sequence: Synthetic oligonucleotide
ggagaaccuggaacuuguc

SEQ ID NO: 2689299 - RNA, 19 nt, Artificial Sequence
  Description of Artificial Sequence: Synthetic oligonucleotide
gccacagaaccggaaccuc

SEQ ID NO: 2689300 - RNA, 19 nt, Artificial Sequence
  Description of Artificial Sequence: Synthetic oligonucleotide
ccuguagaggguuuugcuu

SEQ ID NO: 2689301 - RNA, 19 nt, Artificial Sequence
  Description of Artificial Sequence: Synthetic oligonucleotide
cgaucucuagcugcaggug

SEQ ID NO: 2689302 - RNA, 19 nt, Artificial Sequence
  Description of Artificial Sequence: Synthetic oligonucleotide
cccagucgggacaguccag

SEQ ID NO: 2689303 - RNA, 19 nt, Artificial Sequence
  Description of Artificial Sequence: Synthetic oligonucleotide
gggcacccggggcaggcac

SEQ ID NO: 2689304 - RNA, 19 nt, Artificial Sequence
  Description of Artificial Sequence: Synthetic oligonucleotide
ggucugagccugcuucagu

SEQ ID NO: 2689305 - RNA, 19 nt, Artificial Sequence
  Description of Artificial Sequence: Synthetic oligonucleotide
gcucucugggcagccccag

SEQ ID NO: 2689306 - RNA, 19 nt, Artificial Sequence
  Description of Artificial Sequence: Synthetic oligonucleotide
uggcugcacuggagaggau

SEQ ID NO: 2689307 - RNA, 19 nt, Artificial Sequence
  Description of Artificial Sequence: Synthetic oligonucleotide
cuagcugcaggugcaccau

SEQ ID NO: 2689308 - RNA, 19 nt, Artificial Sequence
  Description of Artificial Sequence: Synthetic oligonucleotide
ccagucgggacaguccaga

SEQ ID NO: 2689309 - RNA, 19 nt, Artificial Sequence
  Description of Artificial Sequence: Synthetic oligonucleotide
cgacuguagccuucacauc

SEQ ID NO: 2689310 - RNA, 19 nt, Artificial Sequence
  Description of Artificial Sequence: Synthetic oligonucleotide
cgggacaguccagaucgcc

SEQ ID NO: 2689311 - RNA, 19 nt, Artificial Sequence
  Description of Artificial Sequence: Synthetic oligonucleotide
ggagcuccuuuagcaccug

SEQ ID NO: 2689312 - RNA, 19 nt, Artificial Sequence
  Description of Artificial Sequence: Synthetic oligonucleotide
ggcgugcucucugggcagc

SEQ ID NO: 2689313 - RNA, 19 nt, Artificial Sequence
  Description of Artificial Sequence: Synthetic oligonucleotide
ggugcuccuguagaggguu

SEQ ID NO: 2689314 - RNA, 19 nt, Artificial Sequence
  Description of Artificial Sequence: Synthetic oligonucleotide
gcucaggguguaguccaca

SEQ ID NO: 2689315 - RNA, 19 nt, Artificial Sequence
  Description of Artificial Sequence: Synthetic oligonucleotide
cugcacuggagaggaugaa

SEQ ID NO: 2689316 - RNA, 19 nt, Artificial Sequence
  Description of Artificial Sequence: Synthetic oligonucleotide
cugggcagccccagcugcu

SEQ ID NO: 2689317 - RNA, 19 nt, Artificial Sequence
  Description of Artificial Sequence: Synthetic oligonucleotide
cguaacagcggcagaggcu

SEQ ID NO: 2689318 - RNA, 19 nt, Artificial Sequence
  Description of Artificial Sequence: Synthetic oligonucleotide
agggcacccggggcaggca

SEQ ID NO: 2689319 - RNA, 19 nt, Artificial Sequence
  Description of Artificial Sequence: Synthetic oligonucleotide
cagucgggacaguccagau

SEQ ID NO: 2689320 - RNA, 19 nt, Artificial Sequence
  Description of Artificial Sequence: Synthetic oligonucleotide
ccuuuagcaccuggcuaca

SEQ ID NO: 2689321 - RNA, 19 nt, Artificial Sequence
  Description of Artificial Sequence: Synthetic oligonucleotide
agcggucaucagggucuga

SEQ ID NO: 2689322 - RNA, 19 nt, Artificial Sequence
  Description of Artificial Sequence: Synthetic oligonucleotide
cucagcccaaagcggucau

SEQ ID NO: 2689323 - RNA, 19 nt, Artificial Sequence
  Description of Artificial Sequence: Synthetic oligonucleotide
cccggggcaggcacgaucu

SEQ ID NO: 2689324 - RNA, 19 nt, Artificial Sequence
  Description of Artificial Sequence: Synthetic oligonucleotide
gcuucaccgaggaaaucuu

SEQ ID NO: 2689325 - RNA, 19 nt, Artificial Sequence
  Description of Artificial Sequence: Synthetic oligonucleotide
gcgugcucucugggcagcc

SEQ ID NO: 2689326 - RNA, 19 nt, Artificial Sequence
  Description of Artificial Sequence: Synthetic oligonucleotide
cgugcucucugggcagccc

SEQ ID NO: 2689327 - RNA, 19 nt, Artificial Sequence
  Description of Artificial Sequence: Synthetic oligonucleotide
gccagccuguucacacgca

SEQ ID NO: 2689328 - RNA, 19 nt, Artificial Sequence
  Description of Artificial Sequence: Synthetic oligonucleotide
gcccgaaggugcuccugua

SEQ ID NO: 2689329 - RNA, 19 nt, Artificial Sequence
  Description of Artificial Sequence: Synthetic oligonucleotide
gccuguucacacgcaggcu

SEQ ID NO: 2689330 - RNA, 19 nt, Artificial Sequence
  Description of Artificial Sequence: Synthetic oligonucleotide
cagaggcugguggcgugcu

SEQ ID NO: 2689331 - RNA, 19 nt, Artificial Sequence
  Description of Artificial Sequence: Synthetic oligonucleotide
cggaaccucauggugccaa

SEQ ID NO: 2689332 - RNA, 19 nt, Artificial Sequence
  Description of Artificial Sequence: Synthetic oligonucleotide
ccacagaacggagcaggcu

SEQ ID NO: 2689333 - RNA, 19 nt, Artificial Sequence
  Description of Artificial Sequence: Synthetic oligonucleotide
ccagggcacccggggcagg

SEQ ID NO: 2689334 - RNA, 19 nt, Artificial Sequence
  Description of Artificial Sequence: Synthetic oligonucleotide
caguaagcuucaggaucuu

SEQ ID NO: 2689335 - RNA, 19 nt, Artificial Sequence
  Description of Artificial Sequence: Synthetic oligonucleotide
gcacugcgacuguagccuu

SEQ ID NO: 2689336 - RNA, 19 nt, Artificial Sequence
  Description of Artificial Sequence: Synthetic oligonucleotide
gugcuccuguagaggguuu

SEQ ID NO: 2689337 - RNA, 19 nt, Artificial Sequence
  Description of Artificial Sequence: Synthetic oligonucleotide
cgccacagaaccggaaccu

SEQ ID NO: 2689338 - RNA, 19 nt, Artificial Sequence
  Description of Artificial Sequence: Synthetic oligonucleotide
ccggggcaggcacgaucuc

SEQ ID NO: 2689339 - RNA, 19 nt, Artificial Sequence
  Description of Artificial Sequence: Synthetic oligonucleotide
ccaggagaaccuggaacuu

SEQ ID NO: 2689340 - RNA, 19 nt, Artificial Sequence
  Description of Artificial Sequence: Synthetic oligonucleotide
ggcugguggcgugcucucu

SEQ ID NO: 2689341 - RNA, 19 nt, Artificial Sequence
  Description of Artificial Sequence: Synthetic oligonucleotide
ccggaaccucauggugcca

SEQ ID NO: 2689342 - RNA, 19 nt, Artificial Sequence
  Description of Artificial Sequence: Synthetic oligonucleotide
cgaggaaaucuuggccagu

SEQ ID NO: 2689343 - RNA, 19 nt, Artificial Sequence
  Description of Artificial Sequence: Synthetic oligonucleotide
ccgcagcuucaccgaggaa

SEQ ID NO: 2689344 - RNA, 19 nt, Artificial Sequence
  Description of Artificial Sequence: Synthetic oligonucleotide
aauuucaguagacagaguc

SEQ ID NO: 2689345 - RNA, 19 nt, Artificial Sequence
  Description of Artificial Sequence: Synthetic oligonucleotide
ugaaauauuguuauuuggg

SEQ ID NO: 2689346 - RNA, 19 nt, Artificial Sequence
  Description of Artificial Sequence: Synthetic oligonucleotide
aaguaucugaaauggaucg

SEQ ID NO: 2689347 - RNA, 19 nt, Artificial Sequence
  Description of Artificial Sequence: Synthetic oligonucleotide
uuaaauaacagaaggguca

SEQ ID NO: 2689348 - RNA, 19 nt, Artificial Sequence
  Description of Artificial Sequence: Synthetic oligonucleotide
ucuuuaaauaacagaaggg

SEQ ID NO: 2689349 - RNA, 19 nt, Artificial Sequence
  Description of Artificial Sequence: Synthetic oligonucleotide
auaacugcauuucauagac

SEQ ID NO: 2689350 - RNA, 19 nt, Artificial Sequence
  Description of Artificial Sequence: Synthetic oligonucleotide
cauuucauagacaaggacg

SEQ ID NO: 2689351 - RNA, 19 nt, Artificial Sequence
  Description of Artificial Sequence: Synthetic oligonucleotide
gaaauauuguuauuugggg

SEQ ID NO: 2689352 - RNA, 19 nt, Artificial Sequence
  Description of Artificial Sequence: Synthetic oligonucleotide
aaugauaccauccaauaau

SEQ ID NO: 2689353 - RNA, 19 nt, Artificial Sequence
  Description of Artificial Sequence: Synthetic oligonucleotide
uaaacaaugagaacugaag

SEQ ID NO: 2689354 - RNA, 19 nt, Artificial Sequence
  Description of Artificial Sequence: Synthetic oligonucleotide
acgagcaauugauagaucc

SEQ ID NO: 2689355 - RNA, 19 nt, Artificial Sequence
  Description of Artificial Sequence: Synthetic oligonucleotide
uuuacaucuuuaaauaaca

SEQ ID NO: 2689356 - RNA, 19 nt, Artificial Sequence
  Description of Artificial Sequence: Synthetic oligonucleotide
uugaagauaauuucaguag

SEQ ID NO: 2689357 - RNA, 19 nt, Artificial Sequence
  Description of Artificial Sequence: Synthetic oligonucleotide
aauaacagaagggucacuc

SEQ ID NO: 2689358 - RNA, 19 nt, Artificial Sequence
  Description of Artificial Sequence: Synthetic oligonucleotide
agauaauuucaguagacag

SEQ ID NO: 2689359 - RNA, 19 nt, Artificial Sequence
  Description of Artificial Sequence: Synthetic oligonucleotide
uuccaaaggaaccuguugg

SEQ ID NO: 2689360 - RNA, 19 nt, Artificial Sequence
  Description of Artificial Sequence: Synthetic oligonucleotide
aguguaaacaaugagaacu

SEQ ID NO: 2689361 - RNA, 19 nt, Artificial Sequence
  Description of Artificial Sequence: Synthetic oligonucleotide
aaacaaugagaacugaagu

SEQ ID NO: 2689362 - RNA, 19 nt, Artificial Sequence
  Description of Artificial Sequence: Synthetic oligonucleotide
uuuuacaucuuuaaauaac

SEQ ID NO: 2689363 - RNA, 19 nt, Artificial Sequence
  Description of Artificial Sequence: Synthetic oligonucleotide
ugaaauggaucgaugauca

SEQ ID NO: 2689364 - RNA, 19 nt, Artificial Sequence
  Description of Artificial Sequence: Synthetic oligonucleotide
uuuaaauaacagaaggguc

SEQ ID NO: 2689365 - RNA, 19 nt, Artificial Sequence
  Description of Artificial Sequence: Synthetic oligonucleotide
uuuaucaacgagcaauuga

SEQ ID NO: 2689366 - RNA, 19 nt, Artificial Sequence
  Description of Artificial Sequence: Synthetic oligonucleotide
auaauuucaguagacagag

SEQ ID NO: 2689367 - RNA, 19 nt, Artificial Sequence
  Description of Artificial Sequence: Synthetic oligonucleotide
uguuauuucuggaagacau

SEQ ID NO: 2689368 - RNA, 19 nt, Artificial Sequence
  Description of Artificial Sequence: Synthetic oligonucleotide
agagguugaagauaauuuc

SEQ ID NO: 2689369 - RNA, 19 nt, Artificial Sequence
  Description of Artificial Sequence: Synthetic oligonucleotide
aauugauagauccauucau

SEQ ID NO: 2689370 - RNA, 19 nt, Artificial Sequence
  Description of Artificial Sequence: Synthetic oligonucleotide
acauccuuuguugacaucc

SEQ ID NO: 2689371 - RNA, 19 nt, Artificial Sequence
  Description of Artificial Sequence: Synthetic oligonucleotide
agaugaacagcuuuguuug

SEQ ID NO: 2689372 - RNA, 19 nt, Artificial Sequence
  Description of Artificial Sequence: Synthetic oligonucleotide
acaaugagaacugaagugg

SEQ ID NO: 2689373 - RNA, 19 nt, Artificial Sequence
  Description of Artificial Sequence: Synthetic oligonucleotide
uccaauaaugucccgauac

SEQ ID NO: 2689374 - RNA, 19 nt, Artificial Sequence
  Description of Artificial Sequence: Synthetic oligonucleotide
uuuguggagaugaacagcu

SEQ ID NO: 2689375 - RNA, 19 nt, Artificial Sequence
  Description of Artificial Sequence: Synthetic oligonucleotide
ugaagauaauuucaguaga

SEQ ID NO: 2689376 - RNA, 19 nt, Artificial Sequence
  Description of Artificial Sequence: Synthetic oligonucleotide
ugauaacugcauuucauag

SEQ ID NO: 2689377 - RNA, 19 nt, Artificial Sequence
  Description of Artificial Sequence: Synthetic oligonucleotide
agagcuuuguuauuucugg

SEQ ID NO: 2689378 - RNA, 19 nt, Artificial Sequence
  Description of Artificial Sequence: Synthetic oligonucleotide
aucaacgagcaauugauag

SEQ ID NO: 2689379 - RNA, 19 nt, Artificial Sequence
  Description of Artificial Sequence: Synthetic oligonucleotide
uuaucaacgagcaauugau

SEQ ID NO: 2689380 - RNA, 19 nt, Artificial Sequence
  Description of Artificial Sequence: Synthetic oligonucleotide
uuugcugccacaaguaucu

SEQ ID NO: 2689381 - RNA, 19 nt, Artificial Sequence
  Description of Artificial Sequence: Synthetic oligonucleotide
gauagauccauucauagcu

SEQ ID NO: 2689382 - RNA, 19 nt, Artificial Sequence
  Description of Artificial Sequence: Synthetic oligonucleotide
uugauagauccauucauag

SEQ ID NO: 2689383 - RNA, 19 nt, Artificial Sequence
  Description of Artificial Sequence: Synthetic oligonucleotide
uuccacuugagauacuagg

SEQ ID NO: 2689384 - RNA, 19 nt, Artificial Sequence
  Description of Artificial Sequence: Synthetic oligonucleotide
uacaucuuuaaauaacaga

SEQ ID NO: 2689385 - RNA, 19 nt, Artificial Sequence
  Description of Artificial Sequence: Synthetic oligonucleotide
auaccaaauuucuucaaag

SEQ ID NO: 2689386 - RNA, 19 nt, Artificial Sequence
  Description of Artificial Sequence: Synthetic oligonucleotide
cugaaauauuguuauuugg

SEQ ID NO: 2689387 - RNA, 19 nt, Artificial Sequence
  Description of Artificial Sequence: Synthetic oligonucleotide
gauaccauccaauaauguc

SEQ ID NO: 2689388 - RNA, 19 nt, Artificial Sequence
  Description of Artificial Sequence: Synthetic oligonucleotide
uugggcaucuuauaaaaca

SEQ ID NO: 2689389 - RNA, 19 nt, Artificial Sequence
  Description of Artificial Sequence: Synthetic oligonucleotide
acugaaguggcacuuuccg

SEQ ID NO: 2689390 - RNA, 19 nt, Artificial Sequence
  Description of Artificial Sequence: Synthetic oligonucleotide
auagacaaggacgacacuc

SEQ ID NO: 2689391 - RNA, 19 nt, Artificial Sequence
  Description of Artificial Sequence: Synthetic oligonucleotide
uuacaucuuuaaauaacag

SEQ ID NO: 2689392 - RNA, 19 nt, Artificial Sequence
  Description of Artificial Sequence: Synthetic oligonucleotide
cugcauuucauagacaagg

SEQ ID NO: 2689393 - RNA, 19 nt, Artificial Sequence
  Description of Artificial Sequence: Synthetic oligonucleotide
acauccuacaaaugauacc

SEQ ID NO: 2689394 - RNA, 19 nt, Artificial Sequence
  Description of Artificial Sequence: Synthetic oligonucleotide
uggaucgaugaucacauug

SEQ ID NO: 2689395 - RNA, 19 nt, Artificial Sequence
  Description of Artificial Sequence: Synthetic oligonucleotide
guugacauccuacaaauga

SEQ ID NO: 2689396 - RNA, 19 nt, Artificial Sequence
  Description of Artificial Sequence: Synthetic oligonucleotide
uugggguuuaucaacgagc

SEQ ID NO: 2689397 - RNA, 19 nt, Artificial Sequence
  Description of Artificial Sequence: Synthetic oligonucleotide
agauacuagguguucuugg

SEQ ID NO: 2689398 - RNA, 19 nt, Artificial Sequence
  Description of Artificial Sequence: Synthetic oligonucleotide
auaaugucccgauacucuc

SEQ ID NO: 2689399 - RNA, 19 nt, Artificial Sequence
  Description of Artificial Sequence: Synthetic oligonucleotide
ucuucaguguaaacaauga

SEQ ID NO: 2689400 - RNA, 19 nt, Artificial Sequence
  Description of Artificial Sequence: Synthetic oligonucleotide
aaauggaucgaugaucaca

SEQ ID NO: 2689401 - RNA, 19 nt, Artificial Sequence
  Description of Artificial Sequence: Synthetic oligonucleotide
aggaaacagguccaacugc

SEQ ID NO: 2689402 - RNA, 19 nt, Artificial Sequence
  Description of Artificial Sequence: Synthetic oligonucleotide
aauaaugucccgauacucu

SEQ ID NO: 2689403 - RNA, 19 nt, Artificial Sequence
  Description of Artificial Sequence: Synthetic oligonucleotide
uaccaaauuucuucaaagc

SEQ ID NO: 2689404 - RNA, 19 nt, Artificial Sequence
  Description of Artificial Sequence: Synthetic oligonucleotide
uuuugggcaucuuauaaaa

SEQ ID NO: 2689405 - RNA, 19 nt, Artificial Sequence
  Description of Artificial Sequence: Synthetic oligonucleotide
auuucaguagacagagucc

SEQ ID NO: 2689406 - RNA, 19 nt, Artificial Sequence
  Description of Artificial Sequence: Synthetic oligonucleotide
aacagaagggucacucugc

SEQ ID NO: 2689407 - RNA, 19 nt, Artificial Sequence
  Description of Artificial Sequence: Synthetic oligonucleotide
uguuuugggcaucuuauaa

SEQ ID NO: 2689408 - RNA, 19 nt, Artificial Sequence
  Description of Artificial Sequence: Synthetic oligonucleotide
uaacagaagggucacucug

SEQ ID NO: 2689409 - RNA, 19 nt, Artificial Sequence
  Description of Artificial Sequence: Synthetic oligonucleotide
aaaacauccuuuguugaca

SEQ ID NO: 2689410 - RNA, 19 nt, Artificial Sequence
  Description of Artificial Sequence: Synthetic oligonucleotide
ugugaugacaguuuauaua

SEQ ID NO: 2689411 - RNA, 19 nt, Artificial Sequence
  Description of Artificial Sequence: Synthetic oligonucleotide
uccgagauaccaaauuucu

SEQ ID NO: 2689412 - RNA, 19 nt, Artificial Sequence
  Description of Artificial Sequence: Synthetic oligonucleotide
caucuuuaaauaacagaag

SEQ ID NO: 2689413 - RNA, 19 nt, Artificial Sequence
  Description of Artificial Sequence: Synthetic oligonucleotide
ucaggaaacagguccaacu

SEQ ID NO: 2689414 - RNA, 19 nt, Artificial Sequence
  Description of Artificial Sequence: Synthetic oligonucleotide
aagauaauuucaguagaca

SEQ ID NO: 2689415 - RNA, 19 nt, Artificial Sequence
  Description of Artificial Sequence: Synthetic oligonucleotide
ugggguuuaucaacgagca

SEQ ID NO: 2689416 - RNA, 19 nt, Artificial Sequence
  Description of Artificial Sequence: Synthetic oligonucleotide
ugauagauccauucauagc

SEQ ID NO: 2689417 - RNA, 19 nt, Artificial Sequence
  Description of Artificial Sequence: Synthetic oligonucleotide
gaucgaugaucacauuggg

SEQ ID NO: 2689418 - RNA, 19 nt, Artificial Sequence
  Description of Artificial Sequence: Synthetic oligonucleotide
guuauuuggggagagguug

SEQ ID NO: 2689419 - RNA, 19 nt, Artificial Sequence
  Description of Artificial Sequence: Synthetic oligonucleotide
auaaaacauccuuuguuga

SEQ ID NO: 2689420 - RNA, 19 nt, Artificial Sequence
  Description of Artificial Sequence: Synthetic oligonucleotide
ugugauaacugcauuucau

SEQ ID NO: 2689421 - RNA, 19 nt, Artificial Sequence
  Description of Artificial Sequence: Synthetic oligonucleotide
uagacaaggacgacacucc

SEQ ID NO: 2689422 - RNA, 19 nt, Artificial Sequence
  Description of Artificial Sequence: Synthetic oligonucleotide
ucacucugcauucaggaaa

SEQ ID NO: 2689423 - RNA, 19 nt, Artificial Sequence
  Description of Artificial Sequence: Synthetic oligonucleotide
aucugaaauggaucgauga

SEQ ID NO: 2689424 - RNA, 19 nt, Artificial Sequence
  Description of Artificial Sequence: Synthetic oligonucleotide
guugaagauaauuucagua

SEQ ID NO: 2689425 - RNA, 19 nt, Artificial Sequence
  Description of Artificial Sequence: Synthetic oligonucleotide
gauaacugcauuucauaga

SEQ ID NO: 2689426 - RNA, 19 nt, Artificial Sequence
  Description of Artificial Sequence: Synthetic oligonucleotide
uuuguuauuucuggaagac

SEQ ID NO: 2689427 - RNA, 19 nt, Artificial Sequence
  Description of Artificial Sequence: Synthetic oligonucleotide
aauuucuucaaagccucug

SEQ ID NO: 2689428 - RNA, 19 nt, Artificial Sequence
  Description of Artificial Sequence: Synthetic oligonucleotide
aauggaucgaugaucacau

SEQ ID NO: 2689429 - RNA, 19 nt, Artificial Sequence
  Description of Artificial Sequence: Synthetic oligonucleotide
uuucaguagacagaguccu

SEQ ID NO: 2689430 - RNA, 19 nt, Artificial Sequence
  Description of Artificial Sequence: Synthetic oligonucleotide
gaugacaguuuauauaucu

SEQ ID NO: 2689431 - RNA, 19 nt, Artificial Sequence
  Description of Artificial Sequence: Synthetic oligonucleotide
ucaacgagcaauugauaga

SEQ ID NO: 2689432 - RNA, 19 nt, Artificial Sequence
  Description of Artificial Sequence: Synthetic oligonucleotide
auuucauagacaaggacga

SEQ ID NO: 2689433 - RNA, 19 nt, Artificial Sequence
  Description of Artificial Sequence: Synthetic oligonucleotide
uuauuuguuucucucccuc

SEQ ID NO: 2689434 - RNA, 19 nt, Artificial Sequence
  Description of Artificial Sequence: Synthetic oligonucleotide
aacagguccaacugcugug

SEQ ID NO: 2689435 - RNA, 19 nt, Artificial Sequence
  Description of Artificial Sequence: Synthetic oligonucleotide
uuuccgagauaccaaauuu

SEQ ID NO: 2689436 - RNA, 19 nt, Artificial Sequence
  Description of Artificial Sequence: Synthetic oligonucleotide
caaguaucugaaauggauc

SEQ ID NO: 2689437 - RNA, 19 nt, Artificial Sequence
  Description of Artificial Sequence: Synthetic oligonucleotide
caaagccucugaaauauug

SEQ ID NO: 2689438 - RNA, 19 nt, Artificial Sequence
  Description of Artificial Sequence: Synthetic oligonucleotide
aacugaaguggcacuuucc

SEQ ID NO: 2689439 - RNA, 19 nt, Artificial Sequence
  Description of Artificial Sequence: Synthetic oligonucleotide
uucaaagccucugaaauau

SEQ ID NO: 2689440 - RNA, 19 nt, Artificial Sequence
  Description of Artificial Sequence: Synthetic oligonucleotide
acuucugagagcuuuguua

SEQ ID NO: 2689441 - RNA, 19 nt, Artificial Sequence
  Description of Artificial Sequence: Synthetic oligonucleotide
uccuuuguugacauccuac

SEQ ID NO: 2689442 - RNA, 19 nt, Artificial Sequence
  Description of Artificial Sequence: Synthetic oligonucleotide
ccuacaaaugauaccaucc

SEQ ID NO: 2689443 - RNA, 19 nt, Artificial Sequence
  Description of Artificial Sequence: Synthetic oligonucleotide
uuggccuuccacuugagau

SEQ ID NO: 2689444 - RNA, 19 nt, Artificial Sequence
  Description of Artificial Sequence: Synthetic oligonucleotide
uuguuauuuggggagaggu

SEQ ID NO: 2689445 - RNA, 19 nt, Artificial Sequence
  Description of Artificial Sequence: Synthetic oligonucleotide
auugggguuuaucaacgag

SEQ ID NO: 2689446 - RNA, 19 nt, Artificial Sequence
  Description of Artificial Sequence: Synthetic oligonucleotide
ugcauuucauagacaagga

SEQ ID NO: 2689447 - RNA, 19 nt, Artificial Sequence
  Description of Artificial Sequence: Synthetic oligonucleotide
aaccuguuggccuuccacu

SEQ ID NO: 2689448 - RNA, 19 nt, Artificial Sequence
  Description of Artificial Sequence: Synthetic oligonucleotide
uacaaaugauaccauccaa

SEQ ID NO: 2689449 - RNA, 19 nt, Artificial Sequence
  Description of Artificial Sequence: Synthetic oligonucleotide
auuccaaaggaaccuguug

SEQ ID NO: 2689450 - RNA, 19 nt, Artificial Sequence
  Description of Artificial Sequence: Synthetic oligonucleotide
caaugagaacugaaguggc

SEQ ID NO: 2689451 - RNA, 19 nt, Artificial Sequence
  Description of Artificial Sequence: Synthetic oligonucleotide
uucuggaagacauuccaaa

SEQ ID NO: 2689452 - RNA, 19 nt, Artificial Sequence
  Description of Artificial Sequence: Synthetic oligonucleotide
uugacauccuacaaaugau

SEQ ID NO: 2689453 - RNA, 19 nt, Artificial Sequence
  Description of Artificial Sequence: Synthetic oligonucleotide
agaagggucacucugcauu

SEQ ID NO: 2689454 - RNA, 19 nt, Artificial Sequence
  Description of Artificial Sequence: Synthetic oligonucleotide
uaucugaaauggaucgaug

SEQ ID NO: 2689455 - RNA, 19 nt, Artificial Sequence
  Description of Artificial Sequence: Synthetic oligonucleotide
cuucaguguaaacaaugag

SEQ ID NO: 2689456 - RNA, 19 nt, Artificial Sequence
  Description of Artificial Sequence: Synthetic oligonucleotide
aaacauccuuuguugacau

SEQ ID NO: 2689457 - RNA, 19 nt, Artificial Sequence
  Description of Artificial Sequence: Synthetic oligonucleotide
ugccacaaguaucugaaau

SEQ ID NO: 2689458 - RNA, 19 nt, Artificial Sequence
  Description of Artificial Sequence: Synthetic oligonucleotide
uuuauuuguuucucucccu

SEQ ID NO: 2689459 - RNA, 19 nt, Artificial Sequence
  Description of Artificial Sequence: Synthetic oligonucleotide
gauaccaaauuucuucaaa

SEQ ID NO: 2689460 - RNA, 19 nt, Artificial Sequence
  Description of Artificial Sequence: Synthetic oligonucleotide
uccaaaggaaccuguuggc

SEQ ID NO: 2689461 - RNA, 19 nt, Artificial Sequence
  Description of Artificial Sequence: Synthetic oligonucleotide
ugauaccauccaauaaugu

SEQ ID NO: 2689462 - RNA, 19 nt, Artificial Sequence
  Description of Artificial Sequence: Synthetic oligonucleotide
ugggcaucuuauaaaacau

SEQ ID NO: 2689463 - RNA, 19 nt, Artificial Sequence
  Description of Artificial Sequence: Synthetic oligonucleotide
uuccgagauaccaaauuuc

SEQ ID NO: 2689464 - RNA, 19 nt, Artificial Sequence
  Description of Artificial Sequence: Synthetic oligonucleotide
uuauuuggggagagguuga

SEQ ID NO: 2689465 - RNA, 19 nt, Artificial Sequence
  Description of Artificial Sequence: Synthetic oligonucleotide
aguagacagaguccuuguc

SEQ ID NO: 2689466 - RNA, 19 nt, Artificial Sequence
  Description of Artificial Sequence: Synthetic oligonucleotide
gacauccuacaaaugauac

SEQ ID NO: 2689467 - RNA, 19 nt, Artificial Sequence
  Description of Artificial Sequence: Synthetic oligonucleotide
cuuuaaauaacagaagggu

SEQ ID NO: 2689468 - RNA, 19 nt, Artificial Sequence
  Description of Artificial Sequence: Synthetic oligonucleotide
uguggagaugaacagcuuu

SEQ ID NO: 2689469 - RNA, 19 nt, Artificial Sequence
  Description of Artificial Sequence: Synthetic oligonucleotide
uauuguuauuuggggagag

SEQ ID NO: 2689470 - RNA, 19 nt, Artificial Sequence
  Description of Artificial Sequence: Synthetic oligonucleotide
ggcaucuuauaaaacaucc

SEQ ID NO: 2689471 - RNA, 19 nt, Artificial Sequence
  Description of Artificial Sequence: Synthetic oligonucleotide
ugauguuuugggcaucuua

SEQ ID NO: 2689472 - RNA, 19 nt, Artificial Sequence
  Description of Artificial Sequence: Synthetic oligonucleotide
ugguuuauuuguuucucuc

SEQ ID NO: 2689473 - RNA, 19 nt, Artificial Sequence
  Description of Artificial Sequence: Synthetic oligonucleotide
gguuuauuuguuucucucc

SEQ ID NO: 2689474 - RNA, 19 nt, Artificial Sequence
  Description of Artificial Sequence: Synthetic oligonucleotide
acaaguaucugaaauggau

SEQ ID NO: 2689475 - RNA, 19 nt, Artificial Sequence
  Description of Artificial Sequence: Synthetic oligonucleotide
uauuuguuucucucccucu

SEQ ID NO: 2689476 - RNA, 19 nt, Artificial Sequence
  Description of Artificial Sequence: Synthetic oligonucleotide
acauugggguuuaucaacg

SEQ ID NO: 2689477 - RNA, 19 nt, Artificial Sequence
  Description of Artificial Sequence: Synthetic oligonucleotide
gagguugaagauaauuuca

SEQ ID NO: 2689478 - RNA, 19 nt, Artificial Sequence
  Description of Artificial Sequence: Synthetic oligonucleotide
ugacauccuacaaaugaua

SEQ ID NO: 2689479 - RNA, 19 nt, Artificial Sequence
  Description of Artificial Sequence: Synthetic oligonucleotide
auaacagaagggucacucu

SEQ ID NO: 2689480 - RNA, 19 nt, Artificial Sequence
  Description of Artificial Sequence: Synthetic oligonucleotide
cuuuguuauuucuggaaga

SEQ ID NO: 2689481 - RNA, 19 nt, Artificial Sequence
  Description of Artificial Sequence: Synthetic oligonucleotide
uugguuuauuuguuucucu

SEQ ID NO: 2689482 - RNA, 19 nt, Artificial Sequence
  Description of Artificial Sequence: Synthetic oligonucleotide
ugagagcuuuguuauuucu

SEQ ID NO: 2689483 - RNA, 19 nt, Artificial Sequence
  Description of Artificial Sequence: Synthetic oligonucleotide
uacuagguguucuugguuu

SEQ ID NO: 2689484 - RNA, 19 nt, Artificial Sequence
  Description of Artificial Sequence: Synthetic oligonucleotide
ggaucgaugaucacauugg

SEQ ID NO: 2689485 - RNA, 19 nt, Artificial Sequence
  Description of Artificial Sequence: Synthetic oligonucleotide
ucuucuugugaugacaguu

SEQ ID NO: 2689486 - RNA, 19 nt, Artificial Sequence
  Description of Artificial Sequence: Synthetic oligonucleotide
uguucuugguuuauuuguu

SEQ ID NO: 2689487 - RNA, 19 nt, Artificial Sequence
  Description of Artificial Sequence: Synthetic oligonucleotide
cugaaauggaucgaugauc

SEQ ID NO: 2689488 - RNA, 19 nt, Artificial Sequence
  Description of Artificial Sequence: Synthetic oligonucleotide
uacucucuucuugugauga

SEQ ID NO: 2689489 - RNA, 19 nt, Artificial Sequence
  Description of Artificial Sequence: Synthetic oligonucleotide
agguugaagauaauuucag

SEQ ID NO: 2689490 - RNA, 19 nt, Artificial Sequence
  Description of Artificial Sequence: Synthetic oligonucleotide
ucacauugggguuuaucaa

SEQ ID NO: 2689491 - RNA, 19 nt, Artificial Sequence
  Description of Artificial Sequence: Synthetic oligonucleotide
agcuuuguuauuucuggaa

SEQ ID NO: 2689492 - RNA, 19 nt, Artificial Sequence
  Description of Artificial Sequence: Synthetic oligonucleotide
aacauccuuuguugacauc

SEQ ID NO: 2689493 - RNA, 19 nt, Artificial Sequence
  Description of Artificial Sequence: Synthetic oligonucleotide
uguaaacaaugagaacuga

SEQ ID NO: 2689494 - RNA, 19 nt, Artificial Sequence
  Description of Artificial Sequence: Synthetic oligonucleotide
caggaaacagguccaacug

SEQ ID NO: 2689495 - RNA, 19 nt, Artificial Sequence
  Description of Artificial Sequence: Synthetic oligonucleotide
guguaaacaaugagaacug

SEQ ID NO: 2689496 - RNA, 19 nt, Artificial Sequence
  Description of Artificial Sequence: Synthetic oligonucleotide
gaugaacagcuuuguuugc

SEQ ID NO: 2689497 - RNA, 19 nt, Artificial Sequence
  Description of Artificial Sequence: Synthetic oligonucleotide
uugugaugacaguuuauau

SEQ ID NO: 2689498 - RNA, 19 nt, Artificial Sequence
  Description of Artificial Sequence: Synthetic oligonucleotide
ucccaguuuguggagauga

SEQ ID NO: 2689499 - RNA, 19 nt, Artificial Sequence
  Description of Artificial Sequence: Synthetic oligonucleotide
acaaaugauaccauccaau

SEQ ID NO: 2689500 - RNA, 19 nt, Artificial Sequence
  Description of Artificial Sequence: Synthetic oligonucleotide
gagagcuuuguuauuucug

SEQ ID NO: 2689501 - RNA, 19 nt, Artificial Sequence
  Description of Artificial Sequence: Synthetic oligonucleotide
cuacaaaugauaccaucca

SEQ ID NO: 2689502 - RNA, 19 nt, Artificial Sequence
  Description of Artificial Sequence: Synthetic oligonucleotide
ucugagagcuuuguuauuu

SEQ ID NO: 2689503 - RNA, 19 nt, Artificial Sequence
  Description of Artificial Sequence: Synthetic oligonucleotide
uucuugugaugacaguuua

SEQ ID NO: 2689504 - RNA, 19 nt, Artificial Sequence
  Description of Artificial Sequence: Synthetic oligonucleotide
auuguuauuuggggagagg

SEQ ID NO: 2689505 - RNA, 19 nt, Artificial Sequence
  Description of Artificial Sequence: Synthetic oligonucleotide
uaaugucccgauacucucu

SEQ ID NO: 2689506 - RNA, 19 nt, Artificial Sequence
  Description of Artificial Sequence: Synthetic oligonucleotide
uguuugcugccacaaguau

SEQ ID NO: 2689507 - RNA, 19 nt, Artificial Sequence
  Description of Artificial Sequence: Synthetic oligonucleotide
ucccgauacucucuucuug

SEQ ID NO: 2689508 - RNA, 19 nt, Artificial Sequence
  Description of Artificial Sequence: Synthetic oligonucleotide
gcaauugauagauccauuc

SEQ ID NO: 2689509 - RNA, 19 nt, Artificial Sequence
  Description of Artificial Sequence: Synthetic oligonucleotide
aaugucccgauacucucuu

SEQ ID NO: 2689510 - RNA, 19 nt, Artificial Sequence
  Description of Artificial Sequence: Synthetic oligonucleotide
augauaccauccaauaaug

SEQ ID NO: 2689511 - RNA, 19 nt, Artificial Sequence
  Description of Artificial Sequence: Synthetic oligonucleotide
gagaugaacagcuuuguuu

SEQ ID NO: 2689512 - RNA, 19 nt, Artificial Sequence
  Description of Artificial Sequence: Synthetic oligonucleotide
gaaccuguuggccuuccac

SEQ ID NO: 2689513 - RNA, 19 nt, Artificial Sequence
  Description of Artificial Sequence: Synthetic oligonucleotide
caauugauagauccauuca

SEQ ID NO: 2689514 - RNA, 19 nt, Artificial Sequence
  Description of Artificial Sequence: Synthetic oligonucleotide
caaaugauaccauccaaua

SEQ ID NO: 2689515 - RNA, 19 nt, Artificial Sequence
  Description of Artificial Sequence: Synthetic oligonucleotide
uagacagaguccuugucuu

SEQ ID NO: 2689516 - RNA, 19 nt, Artificial Sequence
  Description of Artificial Sequence: Synthetic oligonucleotide
uugagauacuagguguucu

SEQ ID NO: 2689517 - RNA, 19 nt, Artificial Sequence
  Description of Artificial Sequence: Synthetic oligonucleotide
ugcugugauaacugcauuu

SEQ ID NO: 2689518 - RNA, 19 nt, Artificial Sequence
  Description of Artificial Sequence: Synthetic oligonucleotide
agaguccuugucuucauuu

SEQ ID NO: 2689519 - RNA, 19 nt, Artificial Sequence
  Description of Artificial Sequence: Synthetic oligonucleotide
cuugguuuauuuguuucuc

SEQ ID NO: 2689520 - RNA, 19 nt, Artificial Sequence
  Description of Artificial Sequence: Synthetic oligonucleotide
gagauacuagguguucuug

SEQ ID NO: 2689521 - RNA, 19 nt, Artificial Sequence
  Description of Artificial Sequence: Synthetic oligonucleotide
guuuugggcaucuuauaaa

SEQ ID NO: 2689522 - RNA, 19 nt, Artificial Sequence
  Description of Artificial Sequence: Synthetic oligonucleotide
gacauuccaaaggaaccug

SEQ ID NO: 2689523 - RNA, 19 nt, Artificial Sequence
  Description of Artificial Sequence: Synthetic oligonucleotide
ucuugugaugacaguuuau

SEQ ID NO: 2689524 - RNA, 19 nt, Artificial Sequence
  Description of Artificial Sequence: Synthetic oligonucleotide
agacagaguccuugucuuc

SEQ ID NO: 2689525 - RNA, 19 nt, Artificial Sequence
  Description of Artificial Sequence: Synthetic oligonucleotide
cuuccacuugagauacuag

SEQ ID NO: 2689526 - RNA, 19 nt, Artificial Sequence
  Description of Artificial Sequence: Synthetic oligonucleotide
gaacugaaguggcacuuuc

SEQ ID NO: 2689527 - RNA, 19 nt, Artificial Sequence
  Description of Artificial Sequence: Synthetic oligonucleotide
cgagauaccaaauuucuuc

SEQ ID NO: 2689528 - RNA, 19 nt, Artificial Sequence
  Description of Artificial Sequence: Synthetic oligonucleotide
gauacuagguguucuuggu

SEQ ID NO: 2689529 - RNA, 19 nt, Artificial Sequence
  Description of Artificial Sequence: Synthetic oligonucleotide
ugaugacaguuuauauauc

SEQ ID NO: 2689530 - RNA, 19 nt, Artificial Sequence
  Description of Artificial Sequence: Synthetic oligonucleotide
caacugcugugauaacugc

SEQ ID NO: 2689531 - RNA, 19 nt, Artificial Sequence
  Description of Artificial Sequence: Synthetic oligonucleotide
ugagauacuagguguucuu

SEQ ID NO: 2689532 - RNA, 19 nt, Artificial Sequence
  Description of Artificial Sequence: Synthetic oligonucleotide
auuuguuucucucccucuu

SEQ ID NO: 2689533 - RNA, 19 nt, Artificial Sequence
  Description of Artificial Sequence: Synthetic oligonucleotide
gccacaaguaucugaaaug

SEQ ID NO: 2689534 - RNA, 19 nt, Artificial Sequence
  Description of Artificial Sequence: Synthetic oligonucleotide
guggagaugaacagcuuug

SEQ ID NO: 2689535 - RNA, 19 nt, Artificial Sequence
  Description of Artificial Sequence: Synthetic oligonucleotide
cauucaggaaacaggucca

SEQ ID NO: 2689536 - RNA, 19 nt, Artificial Sequence
  Description of Artificial Sequence: Synthetic oligonucleotide
ugcugccacaaguaucuga

SEQ ID NO: 2689537 - RNA, 19 nt, Artificial Sequence
  Description of Artificial Sequence: Synthetic oligonucleotide
caguguaaacaaugagaac

SEQ ID NO: 2689538 - RNA, 19 nt, Artificial Sequence
  Description of Artificial Sequence: Synthetic oligonucleotide
auugauagauccauucaua

SEQ ID NO: 2689539 - RNA, 19 nt, Artificial Sequence
  Description of Artificial Sequence: Synthetic oligonucleotide
uaacugcauuucauagaca

SEQ ID NO: 2689540 - RNA, 19 nt, Artificial Sequence
  Description of Artificial Sequence: Synthetic oligonucleotide
gugauaacugcauuucaua

SEQ ID NO: 2689541 - RNA, 19 nt, Artificial Sequence
  Description of Artificial Sequence: Synthetic oligonucleotide
gauguuuugggcaucuuau

SEQ ID NO: 2689542 - RNA, 19 nt, Artificial Sequence
  Description of Artificial Sequence: Synthetic oligonucleotide
guagacagaguccuugucu

SEQ ID NO: 2689543 - RNA, 19 nt, Artificial Sequence
  Description of Artificial Sequence: Synthetic oligonucleotide
agauaccaaauuucuucaa

SEQ ID NO: 2689544 - RNA, 19 nt, Artificial Sequence
  Description of Artificial Sequence: Synthetic oligonucleotide
aaauaacagaagggucacu

SEQ ID NO: 2689545 - RNA, 19 nt, Artificial Sequence
  Description of Artificial Sequence: Synthetic oligonucleotide
uuggggagagguugaagau

SEQ ID NO: 2689546 - RNA, 19 nt, Artificial Sequence
  Description of Artificial Sequence: Synthetic oligonucleotide
aaguggcacuuuccgagau

SEQ ID NO: 2689547 - RNA, 19 nt, Artificial Sequence
  Description of Artificial Sequence: Synthetic oligonucleotide
caucuuauaaaacauccuu

SEQ ID NO: 2689548 - RNA, 19 nt, Artificial Sequence
  Description of Artificial Sequence: Synthetic oligonucleotide
gaaauggaucgaugaucac

SEQ ID NO: 2689549 - RNA, 19 nt, Artificial Sequence
  Description of Artificial Sequence: Synthetic oligonucleotide
uuucccaguuuguggagau

SEQ ID NO: 2689550 - RNA, 19 nt, Artificial Sequence
  Description of Artificial Sequence: Synthetic oligonucleotide
aacgagcaauugauagauc

SEQ ID NO: 2689551 - RNA, 19 nt, Artificial Sequence
  Description of Artificial Sequence: Synthetic oligonucleotide
augaacagcuuuguuugcu

SEQ ID NO: 2689552 - RNA, 19 nt, Artificial Sequence
  Description of Artificial Sequence: Synthetic oligonucleotide
aguaucugaaauggaucga

SEQ ID NO: 2689553 - RNA, 19 nt, Artificial Sequence
  Description of Artificial Sequence: Synthetic oligonucleotide
uucucucccucuucagugu

SEQ ID NO: 2689554 - RNA, 19 nt, Artificial Sequence
  Description of Artificial Sequence: Synthetic oligonucleotide
guuuaucaacgagcaauug

SEQ ID NO: 2689555 - RNA, 19 nt, Artificial Sequence
  Description of Artificial Sequence: Synthetic oligonucleotide
cuugugaugacaguuuaua

SEQ ID NO: 2689556 - RNA, 19 nt, Artificial Sequence
  Description of Artificial Sequence: Synthetic oligonucleotide
gagcuuuguuauuucugga

SEQ ID NO: 2689557 - RNA, 19 nt, Artificial Sequence
  Description of Artificial Sequence: Synthetic oligonucleotide
guggcacuuuccgagauac

SEQ ID NO: 2689558 - RNA, 19 nt, Artificial Sequence
  Description of Artificial Sequence: Synthetic oligonucleotide
agguguucuugguuuauuu

SEQ ID NO: 2689559 - RNA, 19 nt, Artificial Sequence
  Description of Artificial Sequence: Synthetic oligonucleotide
gaaguggcacuuuccgaga

SEQ ID NO: 2689560 - RNA, 19 nt, Artificial Sequence
  Description of Artificial Sequence: Synthetic oligonucleotide
cuugagauacuagguguuc

SEQ ID NO: 2689561 - RNA, 19 nt, Artificial Sequence
  Description of Artificial Sequence: Synthetic oligonucleotide
acugcugugauaacugcau

SEQ ID NO: 2689562 - RNA, 19 nt, Artificial Sequence
  Description of Artificial Sequence: Synthetic oligonucleotide
auacuagguguucuugguu

SEQ ID NO: 2689563 - RNA, 19 nt, Artificial Sequence
  Description of Artificial Sequence: Synthetic oligonucleotide
uggccuuccacuugagaua

SEQ ID NO: 2689564 - RNA, 19 nt, Artificial Sequence
  Description of Artificial Sequence: Synthetic oligonucleotide
cugcauucaggaaacaggu

SEQ ID NO: 2689565 - RNA, 19 nt, Artificial Sequence
  Description of Artificial Sequence: Synthetic oligonucleotide
gagagguugaagauaauuu

SEQ ID NO: 2689566 - RNA, 19 nt, Artificial Sequence
  Description of Artificial Sequence: Synthetic oligonucleotide
gcauuucauagacaaggac

SEQ ID NO: 2689567 - RNA, 19 nt, Artificial Sequence
  Description of Artificial Sequence: Synthetic oligonucleotide
uuucauagacaaggacgac

SEQ ID NO: 2689568 - RNA, 19 nt, Artificial Sequence
  Description of Artificial Sequence: Synthetic oligonucleotide
auuuggggagagguugaag

SEQ ID NO: 2689569 - RNA, 19 nt, Artificial Sequence
  Description of Artificial Sequence: Synthetic oligonucleotide
guuugcugccacaaguauc

SEQ ID NO: 2689570 - RNA, 19 nt, Artificial Sequence
  Description of Artificial Sequence: Synthetic oligonucleotide
cugagagcuuuguuauuuc

SEQ ID NO: 2689571 - RNA, 19 nt, Artificial Sequence
  Description of Artificial Sequence: Synthetic oligonucleotide
accauccaauaaugucccg

SEQ ID NO: 2689572 - RNA, 19 nt, Artificial Sequence
  Description of Artificial Sequence: Synthetic oligonucleotide
cuucugagagcuuuguuau

SEQ ID NO: 2689573 - RNA, 19 nt, Artificial Sequence
  Description of Artificial Sequence: Synthetic oligonucleotide
gguccaacugcugugauaa

SEQ ID NO: 2689574 - RNA, 19 nt, Artificial Sequence
  Description of Artificial Sequence: Synthetic oligonucleotide
ggcacuuuccgagauacca

SEQ ID NO: 2689575 - RNA, 19 nt, Artificial Sequence
  Description of Artificial Sequence: Synthetic oligonucleotide
caaaggaaccuguuggccu

SEQ ID NO: 2689576 - RNA, 19 nt, Artificial Sequence
  Description of Artificial Sequence: Synthetic oligonucleotide
auguuuugggcaucuuaua

SEQ ID NO: 2689577 - RNA, 19 nt, Artificial Sequence
  Description of Artificial Sequence: Synthetic oligonucleotide
uguuggccuuccacuugag

SEQ ID NO: 2689578 - RNA, 19 nt, Artificial Sequence
  Description of Artificial Sequence: Synthetic oligonucleotide
acuagguguucuugguuua

SEQ ID NO: 2689579 - RNA, 19 nt, Artificial Sequence
  Description of Artificial Sequence: Synthetic oligonucleotide
cacaaguaucugaaaugga

SEQ ID NO: 2689580 - RNA, 19 nt, Artificial Sequence
  Description of Artificial Sequence: Synthetic oligonucleotide
cuucaaagccucugaaaua

SEQ ID NO: 2689581 - RNA, 19 nt, Artificial Sequence
  Description of Artificial Sequence: Synthetic oligonucleotide
acauuccaaaggaaccugu

SEQ ID NO: 2689582 - RNA, 19 nt, Artificial Sequence
  Description of Artificial Sequence: Synthetic oligonucleotide
ucaaagccucugaaauauu

SEQ ID NO: 2689583 - RNA, 19 nt, Artificial Sequence
  Description of Artificial Sequence: Synthetic oligonucleotide
cugaaguggcacuuuccga

SEQ ID NO: 2689584 - RNA, 19 nt, Artificial Sequence
  Description of Artificial Sequence: Synthetic oligonucleotide
uucaguagacagaguccuu

SEQ ID NO: 2689585 - RNA, 19 nt, Artificial Sequence
  Description of Artificial Sequence: Synthetic oligonucleotide
uggggagagguugaagaua

SEQ ID NO: 2689586 - RNA, 19 nt, Artificial Sequence
  Description of Artificial Sequence: Synthetic oligonucleotide
gcugugauaacugcauuuc

SEQ ID NO: 2689587 - RNA, 19 nt, Artificial Sequence
  Description of Artificial Sequence: Synthetic oligonucleotide
augucccgauacucucuuc

SEQ ID NO: 2689588 - RNA, 19 nt, Artificial Sequence
  Description of Artificial Sequence: Synthetic oligonucleotide
acuugagauacuagguguu

SEQ ID NO: 2689589 - RNA, 19 nt, Artificial Sequence
  Description of Artificial Sequence: Synthetic oligonucleotide
gagcaauugauagauccau

SEQ ID NO: 2689590 - RNA, 19 nt, Artificial Sequence
  Description of Artificial Sequence: Synthetic oligonucleotide
uggcacuuuccgagauacc

SEQ ID NO: 2689591 - RNA, 19 nt, Artificial Sequence
  Description of Artificial Sequence: Synthetic oligonucleotide
augacaguuuauauaucuu

SEQ ID NO: 2689592 - RNA, 19 nt, Artificial Sequence
  Description of Artificial Sequence: Synthetic oligonucleotide
ucucccucuucaguguaaa

SEQ ID NO: 2689593 - RNA, 19 nt, Artificial Sequence
  Description of Artificial Sequence: Synthetic oligonucleotide
uauuuggggagagguugaa

SEQ ID NO: 2689594 - RNA, 19 nt, Artificial Sequence
  Description of Artificial Sequence: Synthetic oligonucleotide
aggaaccuguuggccuucc

SEQ ID NO: 2689595 - RNA, 19 nt, Artificial Sequence
  Description of Artificial Sequence: Synthetic oligonucleotide
ggguuuaucaacgagcaau

SEQ ID NO: 2689596 - RNA, 19 nt, Artificial Sequence
  Description of Artificial Sequence: Synthetic oligonucleotide
cucucuucuugugaugaca

SEQ ID NO: 2689597 - RNA, 19 nt, Artificial Sequence
  Description of Artificial Sequence: Synthetic oligonucleotide
aagggucacucugcauuca

SEQ ID NO: 2689598 - RNA, 19 nt, Artificial Sequence
  Description of Artificial Sequence: Synthetic oligonucleotide
cauugggguuuaucaacga

SEQ ID NO: 2689599 - RNA, 19 nt, Artificial Sequence
  Description of Artificial Sequence: Synthetic oligonucleotide
auagauccauucauagcuu

SEQ ID NO: 2689600 - RNA, 19 nt, Artificial Sequence
  Description of Artificial Sequence: Synthetic oligonucleotide
auccaauaaugucccgaua

SEQ ID NO: 2689601 - RNA, 19 nt, Artificial Sequence
  Description of Artificial Sequence: Synthetic oligonucleotide
ccuuuguugacauccuaca

SEQ ID NO: 2689602 - RNA, 19 nt, Artificial Sequence
  Description of Artificial Sequence: Synthetic oligonucleotide
ccaaaggaaccuguuggcc

SEQ ID NO: 2689603 - RNA, 19 nt, Artificial Sequence
  Description of Artificial Sequence: Synthetic oligonucleotide
uguugauguuuugggcauc

SEQ ID NO: 2689604 - RNA, 19 nt, Artificial Sequence
  Description of Artificial Sequence: Synthetic oligonucleotide
cuguuggccuuccacuuga

SEQ ID NO: 2689605 - RNA, 19 nt, Artificial Sequence
  Description of Artificial Sequence: Synthetic oligonucleotide
agccucugaaauauuguua

SEQ ID NO: 2689606 - RNA, 19 nt, Artificial Sequence
  Description of Artificial Sequence: Synthetic oligonucleotide
uuguggagaugaacagcuu

SEQ ID NO: 2689607 - RNA, 19 nt, Artificial Sequence
  Description of Artificial Sequence: Synthetic oligonucleotide
uucugagagcuuuguuauu

SEQ ID NO: 2689608 - RNA, 19 nt, Artificial Sequence
  Description of Artificial Sequence: Synthetic oligonucleotide
gucacucugcauucaggaa

SEQ ID NO: 2689609 - RNA, 19 nt, Artificial Sequence
  Description of Artificial Sequence: Synthetic oligonucleotide
gguugaagauaauuucagu

SEQ ID NO: 2689610 - RNA, 19 nt, Artificial Sequence
  Description of Artificial Sequence: Synthetic oligonucleotide
guaucugaaauggaucgau

SEQ ID NO: 2689611 - RNA, 19 nt, Artificial Sequence
  Description of Artificial Sequence: Synthetic oligonucleotide
caacgagcaauugauagau

SEQ ID NO: 2689612 - RNA, 19 nt, Artificial Sequence
  Description of Artificial Sequence: Synthetic oligonucleotide
cauccaauaaugucccgau

SEQ ID NO: 2689613 - RNA, 19 nt, Artificial Sequence
  Description of Artificial Sequence: Synthetic oligonucleotide
guuggccuuccacuugaga

SEQ ID NO: 2689614 - RNA, 19 nt, Artificial Sequence
  Description of Artificial Sequence: Synthetic oligonucleotide
gccucugaaauauuguuau

SEQ ID NO: 2689615 - RNA, 19 nt, Artificial Sequence
  Description of Artificial Sequence: Synthetic oligonucleotide
agaacugaaguggcacuuu

SEQ ID NO: 2689616 - RNA, 19 nt, Artificial Sequence
  Description of Artificial Sequence: Synthetic oligonucleotide
aguggcacuuuccgagaua

SEQ ID NO: 2689617 - RNA, 19 nt, Artificial Sequence
  Description of Artificial Sequence: Synthetic oligonucleotide
auucaggaaacagguccaa

SEQ ID NO: 2689618 - RNA, 19 nt, Artificial Sequence
  Description of Artificial Sequence: Synthetic oligonucleotide
ggggagagguugaagauaa

SEQ ID NO: 2689619 - RNA, 19 nt, Artificial Sequence
  Description of Artificial Sequence: Synthetic oligonucleotide
cuuuccgagauaccaaauu

SEQ ID NO: 2689620 - RNA, 19 nt, Artificial Sequence
  Description of Artificial Sequence: Synthetic oligonucleotide
agguccaacugcugugaua

SEQ ID NO: 2689621 - RNA, 19 nt, Artificial Sequence
  Description of Artificial Sequence: Synthetic oligonucleotide
gcugccacaaguaucugaa

SEQ ID NO: 2689622 - RNA, 19 nt, Artificial Sequence
  Description of Artificial Sequence: Synthetic oligonucleotide
agcaauugauagauccauu

SEQ ID NO: 2689623 - RNA, 19 nt, Artificial Sequence
  Description of Artificial Sequence: Synthetic oligonucleotide
uucccaguuuguggagaug

SEQ ID NO: 2689624 - RNA, 19 nt, Artificial Sequence
  Description of Artificial Sequence: Synthetic oligonucleotide
agauccauucauagcuuuu

SEQ ID NO: 2689625 - RNA, 19 nt, Artificial Sequence
  Description of Artificial Sequence: Synthetic oligonucleotide
guugauguuuugggcaucu

SEQ ID NO: 2689626 - RNA, 19 nt, Artificial Sequence
  Description of Artificial Sequence: Synthetic oligonucleotide
ggaaacagguccaacugcu

SEQ ID NO: 2689627 - RNA, 19 nt, Artificial Sequence
  Description of Artificial Sequence: Synthetic oligonucleotide
acuuuccgagauaccaaau

SEQ ID NO: 2689628 - RNA, 19 nt, Artificial Sequence
  Description of Artificial Sequence: Synthetic oligonucleotide
ccaguuuguggagaugaac

SEQ ID NO: 2689629 - RNA, 19 nt, Artificial Sequence
  Description of Artificial Sequence: Synthetic oligonucleotide
gaguccuugucuucauuuu

SEQ ID NO: 2689630 - RNA, 19 nt, Artificial Sequence
  Description of Artificial Sequence: Synthetic oligonucleotide
gggcaucuuauaaaacauc

SEQ ID NO: 2689631 - RNA, 19 nt, Artificial Sequence
  Description of Artificial Sequence: Synthetic oligonucleotide
cauccuuuguugacauccu

SEQ ID NO: 2689632 - RNA, 19 nt, Artificial Sequence
  Description of Artificial Sequence: Synthetic oligonucleotide
caguagacagaguccuugu

SEQ ID NO: 2689633 - RNA, 19 nt, Artificial Sequence
  Description of Artificial Sequence: Synthetic oligonucleotide
cauuccaaaggaaccuguu

SEQ ID NO: 2689634 - RNA, 19 nt, Artificial Sequence
  Description of Artificial Sequence: Synthetic oligonucleotide
ccgauacucucuucuugug

SEQ ID NO: 2689635 - RNA, 19 nt, Artificial Sequence
  Description of Artificial Sequence: Synthetic oligonucleotide
auggaucgaugaucacauu

SEQ ID NO: 2689636 - RNA, 19 nt, Artificial Sequence
  Description of Artificial Sequence: Synthetic oligonucleotide
uugcugccacaaguaucug

SEQ ID NO: 2689637 - RNA, 19 nt, Artificial Sequence
  Description of Artificial Sequence: Synthetic oligonucleotide
ccauccaauaaugucccga

SEQ ID NO: 2689638 - RNA, 19 nt, Artificial Sequence
  Description of Artificial Sequence: Synthetic oligonucleotide
ggagagguugaagauaauu

SEQ ID NO: 2689639 - RNA, 19 nt, Artificial Sequence
  Description of Artificial Sequence: Synthetic oligonucleotide
uugauguuuugggcaucuu

SEQ ID NO: 2689640 - RNA, 19 nt, Artificial Sequence
  Description of Artificial Sequence: Synthetic oligonucleotide
cgagcaauugauagaucca

SEQ ID NO: 2689641 - RNA, 19 nt, Artificial Sequence
  Description of Artificial Sequence: Synthetic oligonucleotide
gguuuaucaacgagcaauu

SEQ ID NO: 2689642 - RNA, 19 nt, Artificial Sequence
  Description of Artificial Sequence: Synthetic oligonucleotide
gcaucuuauaaaacauccu

SEQ ID NO: 2689643 - RNA, 19 nt, Artificial Sequence
  Description of Artificial Sequence: Synthetic oligonucleotide
cucuucuugugaugacagu

SEQ ID NO: 2689644 - RNA, 19 nt, Artificial Sequence
  Description of Artificial Sequence: Synthetic oligonucleotide
cucucccucuucaguguaa

SEQ ID NO: 2689645 - RNA, 19 nt, Artificial Sequence
  Description of Artificial Sequence: Synthetic oligonucleotide
ccaauaaugucccgauacu

SEQ ID NO: 2689646 - RNA, 19 nt, Artificial Sequence
  Description of Artificial Sequence: Synthetic oligonucleotide
cugccacaaguaucugaaa

SEQ ID NO: 2689647 - RNA, 19 nt, Artificial Sequence
  Description of Artificial Sequence: Synthetic oligonucleotide
cauagacaaggacgacacu

SEQ ID NO: 2689648 - RNA, 19 nt, Artificial Sequence
  Description of Artificial Sequence: Synthetic oligonucleotide
cgauacucucuucuuguga

SEQ ID NO: 2689649 - RNA, 19 nt, Artificial Sequence
  Description of Artificial Sequence: Synthetic oligonucleotide
gcacuuuccgagauaccaa

SEQ ID NO: 2689650 - RNA, 19 nt, Artificial Sequence
  Description of Artificial Sequence: Synthetic oligonucleotide
ggagaugaacagcuuuguu

SEQ ID NO: 2689651 - RNA, 19 nt, Artificial Sequence
  Description of Artificial Sequence: Synthetic oligonucleotide
ugaucacauugggguuuau

SEQ ID NO: 2689652 - RNA, 19 nt, Artificial Sequence
  Description of Artificial Sequence: Synthetic oligonucleotide
cccgauacucucuucuugu

SEQ ID NO: 2689653 - RNA, 19 nt, Artificial Sequence
  Description of Artificial Sequence: Synthetic oligonucleotide
gggguuuaucaacgagcaa

SEQ ID NO: 2689654 - RNA, 19 nt, Artificial Sequence
  Description of Artificial Sequence: Synthetic oligonucleotide
ccuuccacuugagauacua

SEQ ID NO: 2689655 - RNA, 19 nt, Artificial Sequence
  Description of Artificial Sequence: Synthetic oligonucleotide
cuagguguucuugguuuau

SEQ ID NO: 2689656 - RNA, 19 nt, Artificial Sequence
  Description of Artificial Sequence: Synthetic oligonucleotide
cagaagggucacucugcau

SEQ ID NO: 2689657 - RNA, 19 nt, Artificial Sequence
  Description of Artificial Sequence: Synthetic oligonucleotide
cugcugugauaacugcauu

SEQ ID NO: 2689658 - RNA, 19 nt, Artificial Sequence
  Description of Artificial Sequence: Synthetic oligonucleotide
cccaguuuguggagaugaa

SEQ ID NO: 2689659 - RNA, 19 nt, Artificial Sequence
  Description of Artificial Sequence: Synthetic oligonucleotide
cagaguccuugucuucauu

SEQ ID NO: 2689660 - RNA, 19 nt, Artificial Sequence
  Description of Artificial Sequence: Synthetic oligonucleotide
ccgagauaccaaauuucuu

SEQ ID NO: 2689661 - RNA, 19 nt, Artificial Sequence
  Description of Artificial Sequence: Synthetic oligonucleotide
ccucuucaguguaaacaau

SEQ ID NO: 2689662 - RNA, 19 nt, Artificial Sequence
  Description of Artificial Sequence: Synthetic oligonucleotide
cagguccaacugcugugau

SEQ ID NO: 2689663 - RNA, 19 nt, Artificial Sequence
  Description of Artificial Sequence: Synthetic oligonucleotide
ccucugaaauauuguuauu

SEQ ID NO: 2689664 - RNA, 19 nt, Artificial Sequence
  Description of Artificial Sequence: Synthetic oligonucleotide
gggagagguugaagauaau

SEQ ID NO: 2689665 - RNA, 19 nt, Artificial Sequence
  Description of Artificial Sequence: Synthetic oligonucleotide
aauucaguucuuuauaaag

SEQ ID NO: 2689666 - RNA, 19 nt, Artificial Sequence
  Description of Artificial Sequence: Synthetic oligonucleotide
uuuguuuugaacuuuugug

SEQ ID NO: 2689667 - RNA, 19 nt, Artificial Sequence
  Description of Artificial Sequence: Synthetic oligonucleotide
ucaaacuuuguuuugaacu

SEQ ID NO: 2689668 - RNA, 19 nt, Artificial Sequence
  Description of Artificial Sequence: Synthetic oligonucleotide
aaagaguuccucuucaucu

SEQ ID NO: 2689669 - RNA, 19 nt, Artificial Sequence
  Description of Artificial Sequence: Synthetic oligonucleotide
aagagaaacuauuggcucg

SEQ ID NO: 2689670 - RNA, 19 nt, Artificial Sequence
  Description of Artificial Sequence: Synthetic oligonucleotide
uuguuuugaacuuuugugc

SEQ ID NO: 2689671 - RNA, 19 nt, Artificial Sequence
  Description of Artificial Sequence: Synthetic oligonucleotide
aaaagaaaggaaaggacag

SEQ ID NO: 2689672 - RNA, 19 nt, Artificial Sequence
  Description of Artificial Sequence: Synthetic oligonucleotide
accggaauagcuuugcucg

SEQ ID NO: 2689673 - RNA, 19 nt, Artificial Sequence
  Description of Artificial Sequence: Synthetic oligonucleotide
uuauaaaguacccuuguaa

SEQ ID NO: 2689674 - RNA, 19 nt, Artificial Sequence
  Description of Artificial Sequence: Synthetic oligonucleotide
aaaaccuuaaaggguaggg

SEQ ID NO: 2689675 - RNA, 19 nt, Artificial Sequence
  Description of Artificial Sequence: Synthetic oligonucleotide
aauagcuuugcucgcaucu

SEQ ID NO: 2689676 - RNA, 19 nt, Artificial Sequence
  Description of Artificial Sequence: Synthetic oligonucleotide
agugauucauugcuucucc

SEQ ID NO: 2689677 - RNA, 19 nt, Artificial Sequence
  Description of Artificial Sequence: Synthetic oligonucleotide
uauaaaguacccuuguaaa

SEQ ID NO: 2689678 - RNA, 19 nt, Artificial Sequence
  Description of Artificial Sequence: Synthetic oligonucleotide
aaccuuaaaggguagggga

SEQ ID NO: 2689679 - RNA, 19 nt, Artificial Sequence
  Description of Artificial Sequence: Synthetic oligonucleotide
ucuuuauaaaguacccuug

SEQ ID NO: 2689680 - RNA, 19 nt, Artificial Sequence
  Description of Artificial Sequence: Synthetic oligonucleotide
uuugcucgcaucuuaaaga

SEQ ID NO: 2689681 - RNA, 19 nt, Artificial Sequence
  Description of Artificial Sequence: Synthetic oligonucleotide
caguucuuuauaaaguacc

SEQ ID NO: 2689682 - RNA, 19 nt, Artificial Sequence
  Description of Artificial Sequence: Synthetic oligonucleotide
aacuuuugugcauucucag

SEQ ID NO: 2689683 - RNA, 19 nt, Artificial Sequence
  Description of Artificial Sequence: Synthetic oligonucleotide
uguuuugaacuuuugugca

SEQ ID NO: 2689684 - RNA, 19 nt, Artificial Sequence
  Description of Artificial Sequence: Synthetic oligonucleotide
caguguuuuaauuucuugc

SEQ ID NO: 2689685 - RNA, 19 nt, Artificial Sequence
  Description of Artificial Sequence: Synthetic oligonucleotide
aaccggaauagcuuugcuc

SEQ ID NO: 2689686 - RNA, 19 nt, Artificial Sequence
  Description of Artificial Sequence: Synthetic oligonucleotide
aaaccuuaaaggguagggg

SEQ ID NO: 2689687 - RNA, 19 nt, Artificial Sequence
  Description of Artificial Sequence: Synthetic oligonucleotide
aguucuuuauaaaguaccc

SEQ ID NO: 2689688 - RNA, 19 nt, Artificial Sequence
  Description of Artificial Sequence: Synthetic oligonucleotide
acuuuugugcauucucagc

SEQ ID NO: 2689689 - RNA, 19 nt, Artificial Sequence
  Description of Artificial Sequence: Synthetic oligonucleotide
aaaguacccuuguaaaaca

SEQ ID NO: 2689690 - RNA, 19 nt, Artificial Sequence
  Description of Artificial Sequence: Synthetic oligonucleotide
aucggugugauauaguggu

SEQ ID NO: 2689691 - RNA, 19 nt, Artificial Sequence
  Description of Artificial Sequence: Synthetic oligonucleotide
uaaaguacccuuguaaaac

SEQ ID NO: 2689692 - RNA, 19 nt, Artificial Sequence
  Description of Artificial Sequence: Synthetic oligonucleotide
ucaucggugugauauagug

SEQ ID NO: 2689693 - RNA, 19 nt, Artificial Sequence
  Description of Artificial Sequence: Synthetic oligonucleotide
aucaccagugccucgcucc

SEQ ID NO: 2689694 - RNA, 19 nt, Artificial Sequence
  Description of Artificial Sequence: Synthetic oligonucleotide
uucagcuccaucaucggug

SEQ ID NO: 2689695 - RNA, 19 nt, Artificial Sequence
  Description of Artificial Sequence: Synthetic oligonucleotide
auugcuucuccucagauuu

SEQ ID NO: 2689696 - RNA, 19 nt, Artificial Sequence
  Description of Artificial Sequence: Synthetic oligonucleotide
aaagucagcauggguauuc

SEQ ID NO: 2689697 - RNA, 19 nt, Artificial Sequence
  Description of Artificial Sequence: Synthetic oligonucleotide
uuuucucucucuucaaucu

SEQ ID NO: 2689698 - RNA, 19 nt, Artificial Sequence
  Description of Artificial Sequence: Synthetic oligonucleotide
gaagagaaacuauuggcuc

SEQ ID NO: 2689699 - RNA, 19 nt, Artificial Sequence
  Description of Artificial Sequence: Synthetic oligonucleotide
agcauucggcuucagcucc

SEQ ID NO: 2689700 - RNA, 19 nt, Artificial Sequence
  Description of Artificial Sequence: Synthetic oligonucleotide
ugaacuuuugugcauucuc

SEQ ID NO: 2689701 - RNA, 19 nt, Artificial Sequence
  Description of Artificial Sequence: Synthetic oligonucleotide
cuccuuaugcuucaggagc

SEQ ID NO: 2689702 - RNA, 19 nt, Artificial Sequence
  Description of Artificial Sequence: Synthetic oligonucleotide
uauuccagacccaggcacg

SEQ ID NO: 2689703 - RNA, 19 nt, Artificial Sequence
  Description of Artificial Sequence: Synthetic oligonucleotide
uagugguuggcgcauaucu

SEQ ID NO: 2689704 - RNA, 19 nt, Artificial Sequence
  Description of Artificial Sequence: Synthetic oligonucleotide
acagaaagggcuuccagcu

SEQ ID NO: 2689705 - RNA, 19 nt, Artificial Sequence
  Description of Artificial Sequence: Synthetic oligonucleotide
uucuccuuaugcuucagga

SEQ ID NO: 2689706 - RNA, 19 nt, Artificial Sequence
  Description of Artificial Sequence: Synthetic oligonucleotide
cucaugagaaggcggaugg

SEQ ID NO: 2689707 - RNA, 19 nt, Artificial Sequence
  Description of Artificial Sequence: Synthetic oligonucleotide
caggaagagaaacuauugg

SEQ ID NO: 2689708 - RNA, 19 nt, Artificial Sequence
  Description of Artificial Sequence: Synthetic oligonucleotide
uugcucgcaucuuaaagag

SEQ ID NO: 2689709 - RNA, 19 nt, Artificial Sequence
  Description of Artificial Sequence: Synthetic oligonucleotide
uccaucaucggugugauau

SEQ ID NO: 2689710 - RNA, 19 nt, Artificial Sequence
  Description of Artificial Sequence: Synthetic oligonucleotide
gauucauugcuucuccuca

SEQ ID NO: 2689711 - RNA, 19 nt, Artificial Sequence
  Description of Artificial Sequence: Synthetic oligonucleotide
aggacagagugauucauug

SEQ ID NO: 2689712 - RNA, 19 nt, Artificial Sequence
  Description of Artificial Sequence: Synthetic oligonucleotide
acugccagcauucggcuuc

SEQ ID NO: 2689713 - RNA, 19 nt, Artificial Sequence
  Description of Artificial Sequence: Synthetic oligonucleotide
auaucuucagagucuuauc

SEQ ID NO: 2689714 - RNA, 19 nt, Artificial Sequence
  Description of Artificial Sequence: Synthetic oligonucleotide
ccuuguaaaacaaaacaag

SEQ ID NO: 2689715 - RNA, 19 nt, Artificial Sequence
  Description of Artificial Sequence: Synthetic oligonucleotide
aauuucuugcucaggaaga

SEQ ID NO: 2689716 - RNA, 19 nt, Artificial Sequence
  Description of Artificial Sequence: Synthetic oligonucleotide
uuuauaaaguacccuugua

SEQ ID NO: 2689717 - RNA, 19 nt, Artificial Sequence
  Description of Artificial Sequence: Synthetic oligonucleotide
ucuuaaagaguuccucuuc

SEQ ID NO: 2689718 - RNA, 19 nt, Artificial Sequence
  Description of Artificial Sequence: Synthetic oligonucleotide
uuggcgcauaucuucagag

SEQ ID NO: 2689719 - RNA, 19 nt, Artificial Sequence
  Description of Artificial Sequence: Synthetic oligonucleotide
cuuugcucgcaucuuaaag

SEQ ID NO: 2689720 - RNA, 19 nt, Artificial Sequence
  Description of Artificial Sequence: Synthetic oligonucleotide
agcauggguauuccagacc

SEQ ID NO: 2689721 - RNA, 19 nt, Artificial Sequence
  Description of Artificial Sequence: Synthetic oligonucleotide
agcuugacaucaccagugc

SEQ ID NO: 2689722 - RNA, 19 nt, Artificial Sequence
  Description of Artificial Sequence: Synthetic oligonucleotide
auaaaguacccuuguaaaa

SEQ ID NO: 2689723 - RNA, 19 nt, Artificial Sequence
  Description of Artificial Sequence: Synthetic oligonucleotide
ucucuggccuccuucacag

SEQ ID NO: 2689724 - RNA, 19 nt, Artificial Sequence
  Description of Artificial Sequence: Synthetic oligonucleotide
augagaaggcggauggucc

SEQ ID NO: 2689725 - RNA, 19 nt, Artificial Sequence
  Description of Artificial Sequence: Synthetic oligonucleotide
uuaugcuucaggagcuuga

SEQ ID NO: 2689726 - RNA, 19 nt, Artificial Sequence
  Description of Artificial Sequence: Synthetic oligonucleotide
uuaauuucuugcucaggaa

SEQ ID NO: 2689727 - RNA, 19 nt, Artificial Sequence
  Description of Artificial Sequence: Synthetic oligonucleotide
aagucagcauggguauucc

SEQ ID NO: 2689728 - RNA, 19 nt, Artificial Sequence
  Description of Artificial Sequence: Synthetic oligonucleotide
uacccuuguaaaacaaaac

SEQ ID NO: 2689729 - RNA, 19 nt, Artificial Sequence
  Description of Artificial Sequence: Synthetic oligonucleotide
uucaaacuuuguuuugaac

SEQ ID NO: 2689730 - RNA, 19 nt, Artificial Sequence
  Description of Artificial Sequence: Synthetic oligonucleotide
agagucuuaucccuccuca

SEQ ID NO: 2689731 - RNA, 19 nt, Artificial Sequence
  Description of Artificial Sequence: Synthetic oligonucleotide
cuugcucaggaagagaaac

SEQ ID NO: 2689732 - RNA, 19 nt, Artificial Sequence
  Description of Artificial Sequence: Synthetic oligonucleotide
aggagcuugacaucaccag

SEQ ID NO: 2689733 - RNA, 19 nt, Artificial Sequence
  Description of Artificial Sequence: Synthetic oligonucleotide
ucaggaagcggauggcgag

SEQ ID NO: 2689734 - RNA, 19 nt, Artificial Sequence
  Description of Artificial Sequence: Synthetic oligonucleotide
guauuccagacccaggcac

SEQ ID NO: 2689735 - RNA, 19 nt, Artificial Sequence
  Description of Artificial Sequence: Synthetic oligonucleotide
gacagagugauucauugcu

SEQ ID NO: 2689736 - RNA, 19 nt, Artificial Sequence
  Description of Artificial Sequence: Synthetic oligonucleotide
caucggugugauauagugg

SEQ ID NO: 2689737 - RNA, 19 nt, Artificial Sequence
  Description of Artificial Sequence: Synthetic oligonucleotide
agucuuaucccuccucaug

SEQ ID NO: 2689738 - RNA, 19 nt, Artificial Sequence
  Description of Artificial Sequence: Synthetic oligonucleotide
ugggaggucauucucugaa

SEQ ID NO: 2689739 - RNA, 19 nt, Artificial Sequence
  Description of Artificial Sequence: Synthetic oligonucleotide
ugauucauugcuucuccuc

SEQ ID NO: 2689740 - RNA, 19 nt, Artificial Sequence
  Description of Artificial Sequence: Synthetic oligonucleotide
ucgcaucuuaaagaguucc

SEQ ID NO: 2689741 - RNA, 19 nt, Artificial Sequence
  Description of Artificial Sequence: Synthetic oligonucleotide
auucauugcuucuccucag

SEQ ID NO: 2689742 - RNA, 19 nt, Artificial Sequence
  Description of Artificial Sequence: Synthetic oligonucleotide
cuuaaagaguuccucuuca

SEQ ID NO: 2689743 - RNA, 19 nt, Artificial Sequence
  Description of Artificial Sequence: Synthetic oligonucleotide
gcauucaggaagcggaugg

SEQ ID NO: 2689744 - RNA, 19 nt, Artificial Sequence
  Description of Artificial Sequence: Synthetic oligonucleotide
uccugcauucuucaaacuu

SEQ ID NO: 2689745 - RNA, 19 nt, Artificial Sequence
  Description of Artificial Sequence: Synthetic oligonucleotide
ugaagcaaaccggaauagc

SEQ ID NO: 2689746 - RNA, 19 nt, Artificial Sequence
  Description of Artificial Sequence: Synthetic oligonucleotide
ggugugauauagugguugg

SEQ ID NO: 2689747 - RNA, 19 nt, Artificial Sequence
  Description of Artificial Sequence: Synthetic oligonucleotide
ugagaaggcggaugguccc

SEQ ID NO: 2689748 - RNA, 19 nt, Artificial Sequence
  Description of Artificial Sequence: Synthetic oligonucleotide
ucuuaucccuccucaugag

SEQ ID NO: 2689749 - RNA, 19 nt, Artificial Sequence
  Description of Artificial Sequence: Synthetic oligonucleotide
gauggcgagcagcucaggc

SEQ ID NO: 2689750 - RNA, 19 nt, Artificial Sequence
  Description of Artificial Sequence: Synthetic oligonucleotide
ucuggccuccuucacagaa

SEQ ID NO: 2689751 - RNA, 19 nt, Artificial Sequence
  Description of Artificial Sequence: Synthetic oligonucleotide
uaaaggguaggggaaauuu

SEQ ID NO: 2689752 - RNA, 19 nt, Artificial Sequence
  Description of Artificial Sequence: Synthetic oligonucleotide
gcauggguauuccagaccc

SEQ ID NO: 2689753 - RNA, 19 nt, Artificial Sequence
  Description of Artificial Sequence: Synthetic oligonucleotide
auuucuugcucaggaagag

SEQ ID NO: 2689754 - RNA, 19 nt, Artificial Sequence
  Description of Artificial Sequence: Synthetic oligonucleotide
gagcuugacaucaccagug

SEQ ID NO: 2689755 - RNA, 19 nt, Artificial Sequence
  Description of Artificial Sequence: Synthetic oligonucleotide
ucauucucugaagcaaacc

SEQ ID NO: 2689756 - RNA, 19 nt, Artificial Sequence
  Description of Artificial Sequence: Synthetic oligonucleotide
gccuccuucacagaaaggg

SEQ ID NO: 2689757 - RNA, 19 nt, Artificial Sequence
  Description of Artificial Sequence: Synthetic oligonucleotide
gaaaggacagagugauuca

SEQ ID NO: 2689758 - RNA, 19 nt, Artificial Sequence
  Description of Artificial Sequence: Synthetic oligonucleotide
uggguauuccagacccagg

SEQ ID NO: 2689759 - RNA, 19 nt, Artificial Sequence
  Description of Artificial Sequence: Synthetic oligonucleotide
gaacuuuugugcauucuca

SEQ ID NO: 2689760 - RNA, 19 nt, Artificial Sequence
  Description of Artificial Sequence: Synthetic oligonucleotide
agagugauucauugcuucu

SEQ ID NO: 2689761 - RNA, 19 nt, Artificial Sequence
  Description of Artificial Sequence: Synthetic oligonucleotide
gucagcauggguauuccag

SEQ ID NO: 2689762 - RNA, 19 nt, Artificial Sequence
  Description of Artificial Sequence: Synthetic oligonucleotide
cugcauucuucaaacuuug

SEQ ID NO: 2689763 - RNA, 19 nt, Artificial Sequence
  Description of Artificial Sequence: Synthetic oligonucleotide
gucuuaucccuccucauga

SEQ ID NO: 2689764 - RNA, 19 nt, Artificial Sequence
  Description of Artificial Sequence: Synthetic oligonucleotide
uugugcauucucagcauuc

SEQ ID NO: 2689765 - RNA, 19 nt, Artificial Sequence
  Description of Artificial Sequence: Synthetic oligonucleotide
uuaaagaguuccucuucau

SEQ ID NO: 2689766 - RNA, 19 nt, Artificial Sequence
  Description of Artificial Sequence: Synthetic oligonucleotide
aucuuaaagaguuccucuu

SEQ ID NO: 2689767 - RNA, 19 nt, Artificial Sequence
  Description of Artificial Sequence: Synthetic oligonucleotide
cagauuucucuucagccuc

SEQ ID NO: 2689768 - RNA, 19 nt, Artificial Sequence
  Description of Artificial Sequence: Synthetic oligonucleotide
gucacugccagcauucggc

SEQ ID NO: 2689769 - RNA, 19 nt, Artificial Sequence
  Description of Artificial Sequence: Synthetic oligonucleotide
uucauugcuucuccucaga

SEQ ID NO: 2689770 - RNA, 19 nt, Artificial Sequence
  Description of Artificial Sequence: Synthetic oligonucleotide
uugcucaggaagagaaacu

SEQ ID NO: 2689771 - RNA, 19 nt, Artificial Sequence
  Description of Artificial Sequence: Synthetic oligonucleotide
aaaccggaauagcuuugcu

SEQ ID NO: 2689772 - RNA, 19 nt, Artificial Sequence
  Description of Artificial Sequence: Synthetic oligonucleotide
uuugaacuuuugugcauuc

SEQ ID NO: 2689773 - RNA, 19 nt, Artificial Sequence
  Description of Artificial Sequence: Synthetic oligonucleotide
uaucccuccucaugagaag

SEQ ID NO: 2689774 - RNA, 19 nt, Artificial Sequence
  Description of Artificial Sequence: Synthetic oligonucleotide
agcaaaccggaauagcuuu

SEQ ID NO: 2689775 - RNA, 19 nt, Artificial Sequence
  Description of Artificial Sequence: Synthetic oligonucleotide
uuuugugcauucucagcau

SEQ ID NO: 2689776 - RNA, 19 nt, Artificial Sequence
  Description of Artificial Sequence: Synthetic oligonucleotide
ugugcauucucagcauuca

SEQ ID NO: 2689777 - RNA, 19 nt, Artificial Sequence
  Description of Artificial Sequence: Synthetic oligonucleotide
gaagcaaaccggaauagcu

SEQ ID NO: 2689778 - RNA, 19 nt, Artificial Sequence
  Description of Artificial Sequence: Synthetic oligonucleotide
ugguuggcgcauaucuuca

SEQ ID NO: 2689779 - RNA, 19 nt, Artificial Sequence
  Description of Artificial Sequence: Synthetic oligonucleotide
ucauugcuucuccucagau

SEQ ID NO: 2689780 - RNA, 19 nt, Artificial Sequence
  Description of Artificial Sequence: Synthetic oligonucleotide
accagugccucgcuccuuc

SEQ ID NO: 2689781 - RNA, 19 nt, Artificial Sequence
  Description of Artificial Sequence: Synthetic oligonucleotide
auggguauuccagacccag

SEQ ID NO: 2689782 - RNA, 19 nt, Artificial Sequence
  Description of Artificial Sequence: Synthetic oligonucleotide
gaagcggauggcgagcagc

SEQ ID NO: 2689783 - RNA, 19 nt, Artificial Sequence
  Description of Artificial Sequence: Synthetic oligonucleotide
ucaucuuccuccaguguuu

SEQ ID NO: 2689784 - RNA, 19 nt, Artificial Sequence
  Description of Artificial Sequence: Synthetic oligonucleotide
uuugccugguccuuucuuu

SEQ ID NO: 2689785 - RNA, 19 nt, Artificial Sequence
  Description of Artificial Sequence: Synthetic oligonucleotide
gugguuggcgcauaucuuc

SEQ ID NO: 2689786 - RNA, 19 nt, Artificial Sequence
  Description of Artificial Sequence: Synthetic oligonucleotide
uuugugcauucucagcauu

SEQ ID NO: 2689787 - RNA, 19 nt, Artificial Sequence
  Description of Artificial Sequence: Synthetic oligonucleotide
ggucccuuucuccuuaugc

SEQ ID NO: 2689788 - RNA, 19 nt, Artificial Sequence
  Description of Artificial Sequence: Synthetic oligonucleotide
ggaggucauucucugaagc

SEQ ID NO: 2689789 - RNA, 19 nt, Artificial Sequence
  Description of Artificial Sequence: Synthetic oligonucleotide
caucaucggugugauauag

SEQ ID NO: 2689790 - RNA, 19 nt, Artificial Sequence
  Description of Artificial Sequence: Synthetic oligonucleotide
ugcucaggaagagaaacua

SEQ ID NO: 2689791 - RNA, 19 nt, Artificial Sequence
  Description of Artificial Sequence: Synthetic oligonucleotide
aaacuuuguuuugaacuuu

SEQ ID NO: 2689792 - RNA, 19 nt, Artificial Sequence
  Description of Artificial Sequence: Synthetic oligonucleotide
cucagcauucaggaagcgg

SEQ ID NO: 2689793 - RNA, 19 nt, Artificial Sequence
  Description of Artificial Sequence: Synthetic oligonucleotide
cuugacaucaccagugccu

SEQ ID NO: 2689794 - RNA, 19 nt, Artificial Sequence
  Description of Artificial Sequence: Synthetic oligonucleotide
uggggcacucaucagcaaa

SEQ ID NO: 2689795 - RNA, 19 nt, Artificial Sequence
  Description of Artificial Sequence: Synthetic oligonucleotide
uauagugguuggcgcauau

SEQ ID NO: 2689796 - RNA, 19 nt, Artificial Sequence
  Description of Artificial Sequence: Synthetic oligonucleotide
caugagaaggcggaugguc

SEQ ID NO: 2689797 - RNA, 19 nt, Artificial Sequence
  Description of Artificial Sequence: Synthetic oligonucleotide
aaucucuuuccugcauucu

SEQ ID NO: 2689798 - RNA, 19 nt, Artificial Sequence
  Description of Artificial Sequence: Synthetic oligonucleotide
cucgcuccuuccauucugg

SEQ ID NO: 2689799 - RNA, 19 nt, Artificial Sequence
  Description of Artificial Sequence: Synthetic oligonucleotide
cugaagcaaaccggaauag

SEQ ID NO: 2689800 - RNA, 19 nt, Artificial Sequence
  Description of Artificial Sequence: Synthetic oligonucleotide
caaaccggaauagcuuugc

SEQ ID NO: 2689801 - RNA, 19 nt, Artificial Sequence
  Description of Artificial Sequence: Synthetic oligonucleotide
cuuggggcacucaucagca

SEQ ID NO: 2689802 - RNA, 19 nt, Artificial Sequence
  Description of Artificial Sequence: Synthetic oligonucleotide
uaugcuucaggagcuugac

SEQ ID NO: 2689803 - RNA, 19 nt, Artificial Sequence
  Description of Artificial Sequence: Synthetic oligonucleotide
uugacaucaccagugccuc

SEQ ID NO: 2689804 - RNA, 19 nt, Artificial Sequence
  Description of Artificial Sequence: Synthetic oligonucleotide
agagaaacuauuggcucga

SEQ ID NO: 2689805 - RNA, 19 nt, Artificial Sequence
  Description of Artificial Sequence: Synthetic oligonucleotide
ugcauucuucaaacuuugu

SEQ ID NO: 2689806 - RNA, 19 nt, Artificial Sequence
  Description of Artificial Sequence: Synthetic oligonucleotide
ucagagucuuaucccuccu

SEQ ID NO: 2689807 - RNA, 19 nt, Artificial Sequence
  Description of Artificial Sequence: Synthetic oligonucleotide
aacuuuguuuugaacuuuu

SEQ ID NO: 2689808 - RNA, 19 nt, Artificial Sequence
  Description of Artificial Sequence: Synthetic oligonucleotide
ucucagccaccuuuucggc

SEQ ID NO: 2689809 - RNA, 19 nt, Artificial Sequence
  Description of Artificial Sequence: Synthetic oligonucleotide
ggcgcauaucuucagaguc

SEQ ID NO: 2689810 - RNA, 19 nt, Artificial Sequence
  Description of Artificial Sequence: Synthetic oligonucleotide
cuuuauaaaguacccuugu

SEQ ID NO: 2689811 - RNA, 19 nt, Artificial Sequence
  Description of Artificial Sequence: Synthetic oligonucleotide
ugacaucaccagugccucg

SEQ ID NO: 2689812 - RNA, 19 nt, Artificial Sequence
  Description of Artificial Sequence: Synthetic oligonucleotide
accuuuucggcguuaucau

SEQ ID NO: 2689813 - RNA, 19 nt, Artificial Sequence
  Description of Artificial Sequence: Synthetic oligonucleotide
aagcaaaccggaauagcuu

SEQ ID NO: 2689814 - RNA, 19 nt, Artificial Sequence
  Description of Artificial Sequence: Synthetic oligonucleotide
ucccuccucaugagaaggc

SEQ ID NO: 2689815 - RNA, 19 nt, Artificial Sequence
  Description of Artificial Sequence: Synthetic oligonucleotide
uccuucacagaaagggcuu

SEQ ID NO: 2689816 - RNA, 19 nt, Artificial Sequence
  Description of Artificial Sequence: Synthetic oligonucleotide
uccagacccaggcacgguc

SEQ ID NO: 2689817 - RNA, 19 nt, Artificial Sequence
  Description of Artificial Sequence: Synthetic oligonucleotide
guacccuuguaaaacaaaa

SEQ ID NO: 2689818 - RNA, 19 nt, Artificial Sequence
  Description of Artificial Sequence: Synthetic oligonucleotide
gagugauucauugcuucuc

SEQ ID NO: 2689819 - RNA, 19 nt, Artificial Sequence
  Description of Artificial Sequence: Synthetic oligonucleotide
caucuuaaagaguuccucu

SEQ ID NO: 2689820 - RNA, 19 nt, Artificial Sequence
  Description of Artificial Sequence: Synthetic oligonucleotide
uugaacuuuugugcauucu

SEQ ID NO: 2689821 - RNA, 19 nt, Artificial Sequence
  Description of Artificial Sequence: Synthetic oligonucleotide
caccuuuucggcguuauca

SEQ ID NO: 2689822 - RNA, 19 nt, Artificial Sequence
  Description of Artificial Sequence: Synthetic oligonucleotide
gcacucaucagcaaaguca

SEQ ID NO: 2689823 - RNA, 19 nt, Artificial Sequence
  Description of Artificial Sequence: Synthetic oligonucleotide
uucacagaaagggcuucca

SEQ ID NO: 2689824 - RNA, 19 nt, Artificial Sequence
  Description of Artificial Sequence: Synthetic oligonucleotide
acggucacugccagcauuc

SEQ ID NO: 2689825 - RNA, 19 nt, Artificial Sequence
  Description of Artificial Sequence: Synthetic oligonucleotide
uggcgcauaucuucagagu

SEQ ID NO: 2689826 - RNA, 19 nt, Artificial Sequence
  Description of Artificial Sequence: Synthetic oligonucleotide
cagcauggguauuccagac

SEQ ID NO: 2689827 - RNA, 19 nt, Artificial Sequence
  Description of Artificial Sequence: Synthetic oligonucleotide
cuucacagaaagggcuucc

SEQ ID NO: 2689828 - RNA, 19 nt, Artificial Sequence
  Description of Artificial Sequence: Synthetic oligonucleotide
cuucaggagcuugacauca

SEQ ID NO: 2689829 - RNA, 19 nt, Artificial Sequence
  Description of Artificial Sequence: Synthetic oligonucleotide
gaauagcuuugcucgcauc

SEQ ID NO: 2689830 - RNA, 19 nt, Artificial Sequence
  Description of Artificial Sequence: Synthetic oligonucleotide
aggucauucucugaagcaa

SEQ ID NO: 2689831 - RNA, 19 nt, Artificial Sequence
  Description of Artificial Sequence: Synthetic oligonucleotide
uucaggagcuugacaucac

SEQ ID NO: 2689832 - RNA, 19 nt, Artificial Sequence
  Description of Artificial Sequence: Synthetic oligonucleotide
ucggcuucagcuccaucau

SEQ ID NO: 2689833 - RNA, 19 nt, Artificial Sequence
  Description of Artificial Sequence: Synthetic oligonucleotide
gacccaggcacggucacug

SEQ ID NO: 2689834 - RNA, 19 nt, Artificial Sequence
  Description of Artificial Sequence: Synthetic oligonucleotide
aaguacccuuguaaaacaa

SEQ ID NO: 2689835 - RNA, 19 nt, Artificial Sequence
  Description of Artificial Sequence: Synthetic oligonucleotide
ugcucgcaucuuaaagagu

SEQ ID NO: 2689836 - RNA, 19 nt, Artificial Sequence
  Description of Artificial Sequence: Synthetic oligonucleotide
uuuucggcguuaucauuuu

SEQ ID NO: 2689837 - RNA, 19 nt, Artificial Sequence
  Description of Artificial Sequence: Synthetic oligonucleotide
cagcauucggcuucagcuc

SEQ ID NO: 2689838 - RNA, 19 nt, Artificial Sequence
  Description of Artificial Sequence: Synthetic oligonucleotide
caaacuuuguuuugaacuu

SEQ ID NO: 2689839 - RNA, 19 nt, Artificial Sequence
  Description of Artificial Sequence: Synthetic oligonucleotide
aagcggauggcgagcagcu

SEQ ID NO: 2689840 - RNA, 19 nt, Artificial Sequence
  Description of Artificial Sequence: Synthetic oligonucleotide
ggacagagugauucauugc

SEQ ID NO: 2689841 - RNA, 19 nt, Artificial Sequence
  Description of Artificial Sequence: Synthetic oligonucleotide
cuccucaugagaaggcgga

SEQ ID NO: 2689842 - RNA, 19 nt, Artificial Sequence
  Description of Artificial Sequence: Synthetic oligonucleotide
ggaagagaaacuauuggcu

SEQ ID NO: 2689843 - RNA, 19 nt, Artificial Sequence
  Description of Artificial Sequence: Synthetic oligonucleotide
cuuaucccuccucaugaga

SEQ ID NO: 2689844 - RNA, 19 nt, Artificial Sequence
  Description of Artificial Sequence: Synthetic oligonucleotide
caggagcuugacaucacca

SEQ ID NO: 2689845 - RNA, 19 nt, Artificial Sequence
  Description of Artificial Sequence: Synthetic oligonucleotide
guuggcgcauaucuucaga

SEQ ID NO: 2689846 - RNA, 19 nt, Artificial Sequence
  Description of Artificial Sequence: Synthetic oligonucleotide
agugccucgcuccuuccau

SEQ ID NO: 2689847 - RNA, 19 nt, Artificial Sequence
  Description of Artificial Sequence: Synthetic oligonucleotide
uuaaaggguaggggaaauu

SEQ ID NO: 2689848 - RNA, 19 nt, Artificial Sequence
  Description of Artificial Sequence: Synthetic oligonucleotide
cuuuucggcguuaucauuu

SEQ ID NO: 2689849 - RNA, 19 nt, Artificial Sequence
  Description of Artificial Sequence: Synthetic oligonucleotide
ccucagauuucucuucagc

SEQ ID NO: 2689850 - RNA, 19 nt, Artificial Sequence
  Description of Artificial Sequence: Synthetic oligonucleotide
cucgcaucuuaaagaguuc

SEQ ID NO: 2689851 - RNA, 19 nt, Artificial Sequence
  Description of Artificial Sequence: Synthetic oligonucleotide
aaggacagagugauucauu

SEQ ID NO: 2689852 - RNA, 19 nt, Artificial Sequence
  Description of Artificial Sequence: Synthetic oligonucleotide
uuccugcauucuucaaacu

SEQ ID NO: 2689853 - RNA, 19 nt, Artificial Sequence
  Description of Artificial Sequence: Synthetic oligonucleotide
ccuccaguguuuuaauuuc

SEQ ID NO: 2689854 - RNA, 19 nt, Artificial Sequence
  Description of Artificial Sequence: Synthetic oligonucleotide
aguacccuuguaaaacaaa

SEQ ID NO: 2689855 - RNA, 19 nt, Artificial Sequence
  Description of Artificial Sequence: Synthetic oligonucleotide
gucauucucugaagcaaac

SEQ ID NO: 2689856 - RNA, 19 nt, Artificial Sequence
  Description of Artificial Sequence: Synthetic oligonucleotide
ccuccuucacagaaagggc

SEQ ID NO: 2689857 - RNA, 19 nt, Artificial Sequence
  Description of Artificial Sequence: Synthetic oligonucleotide
ggucacugccagcauucgg

SEQ ID NO: 2689858 - RNA, 19 nt, Artificial Sequence
  Description of Artificial Sequence: Synthetic oligonucleotide
uuccauucugggaggucau

SEQ ID NO: 2689859 - RNA, 19 nt, Artificial Sequence
  Description of Artificial Sequence: Synthetic oligonucleotide
cauaucuucagagucuuau

SEQ ID NO: 2689860 - RNA, 19 nt, Artificial Sequence
  Description of Artificial Sequence: Synthetic oligonucleotide
augcuucaggagcuugaca

SEQ ID NO: 2689861 - RNA, 19 nt, Artificial Sequence
  Description of Artificial Sequence: Synthetic oligonucleotide
guucuuuauaaaguacccu

SEQ ID NO: 2689862 - RNA, 19 nt, Artificial Sequence
  Description of Artificial Sequence: Synthetic oligonucleotide
accuuaaaggguaggggaa

SEQ ID NO: 2689863 - RNA, 19 nt, Artificial Sequence
  Description of Artificial Sequence: Synthetic oligonucleotide
cuccuucacagaaagggcu

SEQ ID NO: 2689864 - RNA, 19 nt, Artificial Sequence
  Description of Artificial Sequence: Synthetic oligonucleotide
acccaggcacggucacugc

SEQ ID NO: 2689865 - RNA, 19 nt, Artificial Sequence
  Description of Artificial Sequence: Synthetic oligonucleotide
cucaggaagagaaacuauu

SEQ ID NO: 2689866 - RNA, 19 nt, Artificial Sequence
  Description of Artificial Sequence: Synthetic oligonucleotide
gcuugacaucaccagugcc

SEQ ID NO: 2689867 - RNA, 19 nt, Artificial Sequence
  Description of Artificial Sequence: Synthetic oligonucleotide
cagagucuuaucccuccuc

SEQ ID NO: 2689868 - RNA, 19 nt, Artificial Sequence
  Description of Artificial Sequence: Synthetic oligonucleotide
ccuccucaugagaaggcgg

SEQ ID NO: 2689869 - RNA, 19 nt, Artificial Sequence
  Description of Artificial Sequence: Synthetic oligonucleotide
gcuucagcuccaucaucgg

SEQ ID NO: 2689870 - RNA, 19 nt, Artificial Sequence
  Description of Artificial Sequence: Synthetic oligonucleotide
ugccucgcuccuuccauuc

SEQ ID NO: 2689871 - RNA, 19 nt, Artificial Sequence
  Description of Artificial Sequence: Synthetic oligonucleotide
ugccugguccuuucuuuuc

SEQ ID NO: 2689872 - RNA, 19 nt, Artificial Sequence
  Description of Artificial Sequence: Synthetic oligonucleotide
gggaggucauucucugaag

SEQ ID NO: 2689873 - RNA, 19 nt, Artificial Sequence
  Description of Artificial Sequence: Synthetic oligonucleotide
guuuugaacuuuugugcau

SEQ ID NO: 2689874 - RNA, 19 nt, Artificial Sequence
  Description of Artificial Sequence: Synthetic oligonucleotide
gauauagugguuggcgcau

SEQ ID NO: 2689875 - RNA, 19 nt, Artificial Sequence
  Description of Artificial Sequence: Synthetic oligonucleotide
gguauuccagacccaggca

SEQ ID NO: 2689876 - RNA, 19 nt, Artificial Sequence
  Description of Artificial Sequence: Synthetic oligonucleotide
aggcacggucacugccagc

SEQ ID NO: 2689877 - RNA, 19 nt, Artificial Sequence
  Description of Artificial Sequence: Synthetic oligonucleotide
caggcuuggggcacucauc

SEQ ID NO: 2689878 - RNA, 19 nt, Artificial Sequence
  Description of Artificial Sequence: Synthetic oligonucleotide
gcggauggucccuuucucc

SEQ ID NO: 2689879 - RNA, 19 nt, Artificial Sequence
  Description of Artificial Sequence: Synthetic oligonucleotide
ccagcauucggcuucagcu

SEQ ID NO: 2689880 - RNA, 19 nt, Artificial Sequence
  Description of Artificial Sequence: Synthetic oligonucleotide
auagcuuugcucgcaucuu

SEQ ID NO: 2689881 - RNA, 19 nt, Artificial Sequence
  Description of Artificial Sequence: Synthetic oligonucleotide
gguuggcgcauaucuucag

SEQ ID NO: 2689882 - RNA, 19 nt, Artificial Sequence
  Description of Artificial Sequence: Synthetic oligonucleotide
ggcacggucacugccagca

SEQ ID NO: 2689883 - RNA, 19 nt, Artificial Sequence
  Description of Artificial Sequence: Synthetic oligonucleotide
aggaagcggauggcgagca

SEQ ID NO: 2689884 - RNA, 19 nt, Artificial Sequence
  Description of Artificial Sequence: Synthetic oligonucleotide
caggaagcggauggcgagc

SEQ ID NO: 2689885 - RNA, 19 nt, Artificial Sequence
  Description of Artificial Sequence: Synthetic oligonucleotide
acaucaccagugccucgcu

SEQ ID NO: 2689886 - RNA, 19 nt, Artificial Sequence
  Description of Artificial Sequence: Synthetic oligonucleotide
ucggugugauauagugguu

SEQ ID NO: 2689887 - RNA, 19 nt, Artificial Sequence
  Description of Artificial Sequence: Synthetic oligonucleotide
ggcacucaucagcaaaguc

SEQ ID NO: 2689888 - RNA, 19 nt, Artificial Sequence
  Description of Artificial Sequence: Synthetic oligonucleotide
aucaucggugugauauagu

SEQ ID NO: 2689889 - RNA, 19 nt, Artificial Sequence
  Description of Artificial Sequence: Synthetic oligonucleotide
cauggguauuccagaccca

SEQ ID NO: 2689890 - RNA, 19 nt, Artificial Sequence
  Description of Artificial Sequence: Synthetic oligonucleotide
uccuuccauucugggaggu

SEQ ID NO: 2689891 - RNA, 19 nt, Artificial Sequence
  Description of Artificial Sequence: Synthetic oligonucleotide
caucaccagugccucgcuc

SEQ ID NO: 2689892 - RNA, 19 nt, Artificial Sequence
  Description of Artificial Sequence: Synthetic oligonucleotide
agcuuugcucgcaucuuaa

SEQ ID NO: 2689893 - RNA, 19 nt, Artificial Sequence
  Description of Artificial Sequence: Synthetic oligonucleotide
agugguuggcgcauaucuu

SEQ ID NO: 2689894 - RNA, 19 nt, Artificial Sequence
  Description of Artificial Sequence: Synthetic oligonucleotide
gcaaagucagcauggguau

SEQ ID NO: 2689895 - RNA, 19 nt, Artificial Sequence
  Description of Artificial Sequence: Synthetic oligonucleotide
gugauucauugcuucuccu

SEQ ID NO: 2689896 - RNA, 19 nt, Artificial Sequence
  Description of Artificial Sequence: Synthetic oligonucleotide
cagacccaggcacggucac

SEQ ID NO: 2689897 - RNA, 19 nt, Artificial Sequence
  Description of Artificial Sequence: Synthetic oligonucleotide
gccagcauucggcuucagc

SEQ ID NO: 2689898 - RNA, 19 nt, Artificial Sequence
  Description of Artificial Sequence: Synthetic oligonucleotide
uuggggcacucaucagcaa

SEQ ID NO: 2689899 - RNA, 19 nt, Artificial Sequence
  Description of Artificial Sequence: Synthetic oligonucleotide
gagucuuaucccuccucau

SEQ ID NO: 2689900 - RNA, 19 nt, Artificial Sequence
  Description of Artificial Sequence: Synthetic oligonucleotide
ggucauucucugaagcaaa

SEQ ID NO: 2689901 - RNA, 19 nt, Artificial Sequence
  Description of Artificial Sequence: Synthetic oligonucleotide
ccggaauagcuuugcucgc

SEQ ID NO: 2689902 - RNA, 19 nt, Artificial Sequence
  Description of Artificial Sequence: Synthetic oligonucleotide
cauugcuucuccucagauu

SEQ ID NO: 2689903 - RNA, 19 nt, Artificial Sequence
  Description of Artificial Sequence: Synthetic oligonucleotide
cggugugauauagugguug

SEQ ID NO: 2689904 - RNA, 19 nt, Artificial Sequence
  Description of Artificial Sequence: Synthetic oligonucleotide
gcucgcaucuuaaagaguu

SEQ ID NO: 2689905 - RNA, 19 nt, Artificial Sequence
  Description of Artificial Sequence: Synthetic oligonucleotide
auauagugguuggcgcaua

SEQ ID NO: 2689906 - RNA, 19 nt, Artificial Sequence
  Description of Artificial Sequence: Synthetic oligonucleotide
gaaagggcuuccagcuucu

SEQ ID NO: 2689907 - RNA, 19 nt, Artificial Sequence
  Description of Artificial Sequence: Synthetic oligonucleotide
cuggccuccuucacagaaa

SEQ ID NO: 2689908 - RNA, 19 nt, Artificial Sequence
  Description of Artificial Sequence: Synthetic oligonucleotide
uuccagacccaggcacggu

SEQ ID NO: 2689909 - RNA, 19 nt, Artificial Sequence
  Description of Artificial Sequence: Synthetic oligonucleotide
cuuaaaggguaggggaaau

SEQ ID NO: 2689910 - RNA, 19 nt, Artificial Sequence
  Description of Artificial Sequence: Synthetic oligonucleotide
ggcggauggucccuuucuc

SEQ ID NO: 2689911 - RNA, 19 nt, Artificial Sequence
  Description of Artificial Sequence: Synthetic oligonucleotide
gagaaacuauuggcucgaa

SEQ ID NO: 2689912 - RNA, 19 nt, Artificial Sequence
  Description of Artificial Sequence: Synthetic oligonucleotide
cccaggcacggucacugcc

SEQ ID NO: 2689913 - RNA, 19 nt, Artificial Sequence
  Description of Artificial Sequence: Synthetic oligonucleotide
ccugcauucuucaaacuuu

SEQ ID NO: 2689914 - RNA, 19 nt, Artificial Sequence
  Description of Artificial Sequence: Synthetic oligonucleotide
cagcucaggcuuggggcac

SEQ ID NO: 2689915 - RNA, 19 nt, Artificial Sequence
  Description of Artificial Sequence: Synthetic oligonucleotide
agacccaggcacggucacu

SEQ ID NO: 2689916 - RNA, 19 nt, Artificial Sequence
  Description of Artificial Sequence: Synthetic oligonucleotide
agaaggcggauggucccuu

SEQ ID NO: 2689917 - RNA, 19 nt, Artificial Sequence
  Description of Artificial Sequence: Synthetic oligonucleotide
gagaaggcggauggucccu

SEQ ID NO: 2689918 - RNA, 19 nt, Artificial Sequence
  Description of Artificial Sequence: Synthetic oligonucleotide
ggccuccuucacagaaagg

SEQ ID NO: 2689919 - RNA, 19 nt, Artificial Sequence
  Description of Artificial Sequence: Synthetic oligonucleotide
gcgagcagcucaggcuugg

SEQ ID NO: 2689920 - RNA, 19 nt, Artificial Sequence
  Description of Artificial Sequence: Synthetic oligonucleotide
gauuucucuucagccucau

SEQ ID NO: 2689921 - RNA, 19 nt, Artificial Sequence
  Description of Artificial Sequence: Synthetic oligonucleotide
cagugccucgcuccuucca

SEQ ID NO: 2689922 - RNA, 19 nt, Artificial Sequence
  Description of Artificial Sequence: Synthetic oligonucleotide
agcucaggcuuggggcacu

SEQ ID NO: 2689923 - RNA, 19 nt, Artificial Sequence
  Description of Artificial Sequence: Synthetic oligonucleotide
ccuuaaaggguaggggaaa

SEQ ID NO: 2689924 - RNA, 19 nt, Artificial Sequence
  Description of Artificial Sequence: Synthetic oligonucleotide
ccagacccaggcacgguca

SEQ ID NO: 2689925 - RNA, 19 nt, Artificial Sequence
  Description of Artificial Sequence: Synthetic oligonucleotide
ggauggcgagcagcucagg

SEQ ID NO: 2689926 - RNA, 19 nt, Artificial Sequence
  Description of Artificial Sequence: Synthetic oligonucleotide
ccagugccucgcuccuucc

SEQ ID NO: 2689927 - RNA, 19 nt, Artificial Sequence
  Description of Artificial Sequence: Synthetic oligonucleotide
gcgcauaucuucagagucu

SEQ ID NO: 2689928 - RNA, 19 nt, Artificial Sequence
  Description of Artificial Sequence: Synthetic oligonucleotide
ugccagcauucggcuucag

SEQ ID NO: 2689929 - RNA, 19 nt, Artificial Sequence
  Description of Artificial Sequence: Synthetic oligonucleotide
gaaggcggauggucccuuu

SEQ ID NO: 2689930 - RNA, 19 nt, Artificial Sequence
  Description of Artificial Sequence: Synthetic oligonucleotide
cucucucuucaaucucuuu

SEQ ID NO: 2689931 - RNA, 19 nt, Artificial Sequence
  Description of Artificial Sequence: Synthetic oligonucleotide
cugccagcauucggcuuca

SEQ ID NO: 2689932 - RNA, 19 nt, Artificial Sequence
  Description of Artificial Sequence: Synthetic oligonucleotide
ggcgagcagcucaggcuug

SEQ ID NO: 2689933 - RNA, 19 nt, Artificial Sequence
  Description of Artificial Sequence: Synthetic oligonucleotide
cacggucacugccagcauu

SEQ ID NO: 2689934 - RNA, 19 nt, Artificial Sequence
  Description of Artificial Sequence: Synthetic oligonucleotide
ccaucaucggugugauaua

SEQ ID NO: 2689935 - RNA, 19 nt, Artificial Sequence
  Description of Artificial Sequence: Synthetic oligonucleotide
ccaccuuuucggcguuauc

SEQ ID NO: 2689936 - RNA, 19 nt, Artificial Sequence
  Description of Artificial Sequence: Synthetic oligonucleotide
ggauggucccuuucuccuu

SEQ ID NO: 2689937 - RNA, 19 nt, Artificial Sequence
  Description of Artificial Sequence: Synthetic oligonucleotide
gcauucggcuucagcucca

SEQ ID NO: 2689938 - RNA, 19 nt, Artificial Sequence
  Description of Artificial Sequence: Synthetic oligonucleotide
cgcaucuuaaagaguuccu

SEQ ID NO: 2689939 - RNA, 19 nt, Artificial Sequence
  Description of Artificial Sequence: Synthetic oligonucleotide
cggaauagcuuugcucgca

SEQ ID NO: 2689940 - RNA, 19 nt, Artificial Sequence
  Description of Artificial Sequence: Synthetic oligonucleotide
cggauggucccuuucuccu

SEQ ID NO: 2689941 - RNA, 19 nt, Artificial Sequence
  Description of Artificial Sequence: Synthetic oligonucleotide
cuccaucaucggugugaua

SEQ ID NO: 2689942 - RNA, 19 nt, Artificial Sequence
  Description of Artificial Sequence: Synthetic oligonucleotide
gugccucgcuccuuccauu

SEQ ID NO: 2689943 - RNA, 19 nt, Artificial Sequence
  Description of Artificial Sequence: Synthetic oligonucleotide
cggucacugccagcauucg

SEQ ID NO: 2689944 - RNA, 19 nt, Artificial Sequence
  Description of Artificial Sequence: Synthetic oligonucleotide
agccaccuuuucggcguua

SEQ ID NO: 2689945 - RNA, 19 nt, Artificial Sequence
  Description of Artificial Sequence: Synthetic oligonucleotide
ccuuuucggcguuaucauu

SEQ ID NO: 2689946 - RNA, 19 nt, Artificial Sequence
  Description of Artificial Sequence: Synthetic oligonucleotide
cauucggcuucagcuccau

SEQ ID NO: 2689947 - RNA, 19 nt, Artificial Sequence
  Description of Artificial Sequence: Synthetic oligonucleotide
gcucaggcuuggggcacuc

SEQ ID NO: 2689948 - RNA, 19 nt, Artificial Sequence
  Description of Artificial Sequence: Synthetic oligonucleotide
gccaccuuuucggcguuau

SEQ ID NO: 2689949 - RNA, 19 nt, Artificial Sequence
  Description of Artificial Sequence: Synthetic oligonucleotide
cgcauaucuucagagucuu

SEQ ID NO: 2689950 - RNA, 19 nt, Artificial Sequence
  Description of Artificial Sequence: Synthetic oligonucleotide
gcacggucacugccagcau

SEQ ID NO: 2689951 - RNA, 19 nt, Artificial Sequence
  Description of Artificial Sequence: Synthetic oligonucleotide
caccagugccucgcuccuu

SEQ ID NO: 2689952 - RNA, 19 nt, Artificial Sequence
  Description of Artificial Sequence: Synthetic oligonucleotide
aaugaauccaacagggucc

SEQ ID NO: 2689953 - RNA, 19 nt, Artificial Sequence
  Description of Artificial Sequence: Synthetic oligonucleotide
aagaaaagaccuuuucuuc

SEQ ID NO: 2689954 - RNA, 19 nt, Artificial Sequence
  Description of Artificial Sequence: Synthetic oligonucleotide
agaaaagaccuuuucuucc

SEQ ID NO: 2689955 - RNA, 19 nt, Artificial Sequence
  Description of Artificial Sequence: Synthetic oligonucleotide
aaagaaaagaccuuuucuu

SEQ ID NO: 2689956 - RNA, 19 nt, Artificial Sequence
  Description of Artificial Sequence: Synthetic oligonucleotide
uuuauuuucuccuccaacu

SEQ ID NO: 2689957 - RNA, 19 nt, Artificial Sequence
  Description of Artificial Sequence: Synthetic oligonucleotide
uugaauccuacuaugagcu

SEQ ID NO: 2689958 - RNA, 19 nt, Artificial Sequence
  Description of Artificial Sequence: Synthetic oligonucleotide
agugugaacaugcccaccc

SEQ ID NO: 2689959 - RNA, 19 nt, Artificial Sequence
  Description of Artificial Sequence: Synthetic oligonucleotide
guaagcaagaaucugcugc

SEQ ID NO: 2689960 - RNA, 19 nt, Artificial Sequence
  Description of Artificial Sequence: Synthetic oligonucleotide
cuuguaagcaagaaucugc

SEQ ID NO: 2689961 - RNA, 19 nt, Artificial Sequence
  Description of Artificial Sequence: Synthetic oligonucleotide
cuugaauccuacuaugagc

SEQ ID NO: 2689962 - RNA, 19 nt, Artificial Sequence
  Description of Artificial Sequence: Synthetic oligonucleotide
ucuugaauccuacuaugag

SEQ ID NO: 2689963 - RNA, 19 nt, Artificial Sequence
  Description of Artificial Sequence: Synthetic oligonucleotide
aauccaacaggguccuggc

SEQ ID NO: 2689964 - RNA, 19 nt, Artificial Sequence
  Description of Artificial Sequence: Synthetic oligonucleotide
auccuuguaagcaagaauc

SEQ ID NO: 2689965 - RNA, 19 nt, Artificial Sequence
  Description of Artificial Sequence: Synthetic oligonucleotide
acauauucaucccuacugg

SEQ ID NO: 2689966 - RNA, 19 nt, Artificial Sequence
  Description of Artificial Sequence: Synthetic oligonucleotide
ugucuauuaagccuggaaa

SEQ ID NO: 2689967 - RNA, 19 nt, Artificial Sequence
  Description of Artificial Sequence: Synthetic oligonucleotide
aucucuaaguacuuggcag

SEQ ID NO: 2689968 - RNA, 19 nt, Artificial Sequence
  Description of Artificial Sequence: Synthetic oligonucleotide
ugauuugaagucauccuug

SEQ ID NO: 2689969 - RNA, 19 nt, Artificial Sequence
  Description of Artificial Sequence: Synthetic oligonucleotide
gaaugaauccaacaggguc

SEQ ID NO: 2689970 - RNA, 19 nt, Artificial Sequence
  Description of Artificial Sequence: Synthetic oligonucleotide
ucauuuuauuuucuccucc

SEQ ID NO: 2689971 - RNA, 19 nt, Artificial Sequence
  Description of Artificial Sequence: Synthetic oligonucleotide
agucauuuuauuuucuccu

SEQ ID NO: 2689972 - RNA, 19 nt, Artificial Sequence
  Description of Artificial Sequence: Synthetic oligonucleotide
aagaaucugcugcucuagc

SEQ ID NO: 2689973 - RNA, 19 nt, Artificial Sequence
  Description of Artificial Sequence: Synthetic oligonucleotide
auuggcagcacucggacag

SEQ ID NO: 2689974 - RNA, 19 nt, Artificial Sequence
  Description of Artificial Sequence: Synthetic oligonucleotide
augcuugggacauacaaag

SEQ ID NO: 2689975 - RNA, 19 nt, Artificial Sequence
  Description of Artificial Sequence: Synthetic oligonucleotide
aacgcugccacuuagcauu

SEQ ID NO: 2689976 - RNA, 19 nt, Artificial Sequence
  Description of Artificial Sequence: Synthetic oligonucleotide
ucagcucaggcucaugagg

SEQ ID NO: 2689977 - RNA, 19 nt, Artificial Sequence
  Description of Artificial Sequence: Synthetic oligonucleotide
aagccuggaaaucuccuuc

SEQ ID NO: 2689978 - RNA, 19 nt, Artificial Sequence
  Description of Artificial Sequence: Synthetic oligonucleotide
gaauccuacuaugagcucg

SEQ ID NO: 2689979 - RNA, 19 nt, Artificial Sequence
  Description of Artificial Sequence: Synthetic oligonucleotide
aguuccaccuguugggacc

SEQ ID NO: 2689980 - RNA, 19 nt, Artificial Sequence
  Description of Artificial Sequence: Synthetic oligonucleotide
uuauuuucuccuccaacug

SEQ ID NO: 2689981 - RNA, 19 nt, Artificial Sequence
  Description of Artificial Sequence: Synthetic oligonucleotide
agugcauccaucucuaagu

SEQ ID NO: 2689982 - RNA, 19 nt, Artificial Sequence
  Description of Artificial Sequence: Synthetic oligonucleotide
uuagcugugcauguaaccc

SEQ ID NO: 2689983 - RNA, 19 nt, Artificial Sequence
  Description of Artificial Sequence: Synthetic oligonucleotide
uguucaucgcugaagcacc

SEQ ID NO: 2689984 - RNA, 19 nt, Artificial Sequence
  Description of Artificial Sequence: Synthetic oligonucleotide
ugccacuuagcauugaggu

SEQ ID NO: 2689985 - RNA, 19 nt, Artificial Sequence
  Description of Artificial Sequence: Synthetic oligonucleotide
acagucauuuuauuuucuc

SEQ ID NO: 2689986 - RNA, 19 nt, Artificial Sequence
  Description of Artificial Sequence: Synthetic oligonucleotide
uuuagcugugcauguaacc

SEQ ID NO: 2689987 - RNA, 19 nt, Artificial Sequence
  Description of Artificial Sequence: Synthetic oligonucleotide
ccuacuaugagcucguucc

SEQ ID NO: 2689988 - RNA, 19 nt, Artificial Sequence
  Description of Artificial Sequence: Synthetic oligonucleotide
aaccccuucacauauucau

SEQ ID NO: 2689989 - RNA, 19 nt, Artificial Sequence
  Description of Artificial Sequence: Synthetic oligonucleotide
uuguaagcaagaaucugcu

SEQ ID NO: 2689990 - RNA, 19 nt, Artificial Sequence
  Description of Artificial Sequence: Synthetic oligonucleotide
uuuugcuucggcacaguca

SEQ ID NO: 2689991 - RNA, 19 nt, Artificial Sequence
  Description of Artificial Sequence: Synthetic oligonucleotide
aguccugucucugggaugc

SEQ ID NO: 2689992 - RNA, 19 nt, Artificial Sequence
  Description of Artificial Sequence: Synthetic oligonucleotide
uucuugaauccuacuauga

SEQ ID NO: 2689993 - RNA, 19 nt, Artificial Sequence
  Description of Artificial Sequence: Synthetic oligonucleotide
uccaacugucuauuaagcc

SEQ ID NO: 2689994 - RNA, 19 nt, Artificial Sequence
  Description of Artificial Sequence: Synthetic oligonucleotide
aguucuugaauccuacuau

SEQ ID NO: 2689995 - RNA, 19 nt, Artificial Sequence
  Description of Artificial Sequence: Synthetic oligonucleotide
uaagcaagaaucugcugcu

SEQ ID NO: 2689996 - RNA, 19 nt, Artificial Sequence
  Description of Artificial Sequence: Synthetic oligonucleotide
uggaaguccugucucuggg

SEQ ID NO: 2689997 - RNA, 19 nt, Artificial Sequence
  Description of Artificial Sequence: Synthetic oligonucleotide
cagucauuuuauuuucucc

SEQ ID NO: 2689998 - RNA, 19 nt, Artificial Sequence
  Description of Artificial Sequence: Synthetic oligonucleotide
uauucaucccuacuggcau

SEQ ID NO: 2689999 - RNA, 19 nt, Artificial Sequence
  Description of Artificial Sequence: Synthetic oligonucleotide
aucacccugaccucugugg

SEQ ID NO: 2690000 - RNA, 19 nt, Artificial Sequence
  Description of Artificial Sequence: Synthetic oligonucleotide
auuaagccuggaaaucucc

SEQ ID NO: 2690001 - RNA, 19 nt, Artificial Sequence
  Description of Artificial Sequence: Synthetic oligonucleotide
acugaagaucacccugacc

SEQ ID NO: 2690002 - RNA, 19 nt, Artificial Sequence
  Description of Artificial Sequence: Synthetic oligonucleotide
caacugucuauuaagccug

SEQ ID NO: 2690003 - RNA, 19 nt, Artificial Sequence
  Description of Artificial Sequence: Synthetic oligonucleotide
acuggcaucguaacgcugc

SEQ ID NO: 2690004 - RNA, 19 nt, Artificial Sequence
  Description of Artificial Sequence: Synthetic oligonucleotide
cauauucaucccuacuggc

SEQ ID NO: 2690005 - RNA, 19 nt, Artificial Sequence
  Description of Artificial Sequence: Synthetic oligonucleotide
cugaagaucacccugaccu

SEQ ID NO: 2690006 - RNA, 19 nt, Artificial Sequence
  Description of Artificial Sequence: Synthetic oligonucleotide
uuuuagcugugcauguaac

SEQ ID NO: 2690007 - RNA, 19 nt, Artificial Sequence
  Description of Artificial Sequence: Synthetic oligonucleotide
agugagggcacugaagauc

SEQ ID NO: 2690008 - RNA, 19 nt, Artificial Sequence
  Description of Artificial Sequence: Synthetic oligonucleotide
ugugcauguaaccccuuca

SEQ ID NO: 2690009 - RNA, 19 nt, Artificial Sequence
  Description of Artificial Sequence: Synthetic oligonucleotide
ucacccugaccucuguggg

SEQ ID NO: 2690010 - RNA, 19 nt, Artificial Sequence
  Description of Artificial Sequence: Synthetic oligonucleotide
ugcccuuucugauuugaag

SEQ ID NO: 2690011 - RNA, 19 nt, Artificial Sequence
  Description of Artificial Sequence: Synthetic oligonucleotide
guucuugaauccuacuaug

SEQ ID NO: 2690012 - RNA, 19 nt, Artificial Sequence
  Description of Artificial Sequence: Synthetic oligonucleotide
uuguucaucgcugaagcac

SEQ ID NO: 2690013 - RNA, 19 nt, Artificial Sequence
  Description of Artificial Sequence: Synthetic oligonucleotide
ucucuaaguacuuggcagu

SEQ ID NO: 2690014 - RNA, 19 nt, Artificial Sequence
  Description of Artificial Sequence: Synthetic oligonucleotide
ugccacaugcuccagugca

SEQ ID NO: 2690015 - RNA, 19 nt, Artificial Sequence
  Description of Artificial Sequence: Synthetic oligonucleotide
aacaugcccacccucugca

SEQ ID NO: 2690016 - RNA, 19 nt, Artificial Sequence
  Description of Artificial Sequence: Synthetic oligonucleotide
ucuauuaagccuggaaauc

SEQ ID NO: 2690017 - RNA, 19 nt, Artificial Sequence
  Description of Artificial Sequence: Synthetic oligonucleotide
uccaacaggguccuggcuc

SEQ ID NO: 2690018 - RNA, 19 nt, Artificial Sequence
  Description of Artificial Sequence: Synthetic oligonucleotide
ugaggaaugccucgccuug

SEQ ID NO: 2690019 - RNA, 19 nt, Artificial Sequence
  Description of Artificial Sequence: Synthetic oligonucleotide
ccgaaugaauccaacaggg

SEQ ID NO: 2690020 - RNA, 19 nt, Artificial Sequence
  Description of Artificial Sequence: Synthetic oligonucleotide
uuaagccuggaaaucuccu

SEQ ID NO: 2690021 - RNA, 19 nt, Artificial Sequence
  Description of Artificial Sequence: Synthetic oligonucleotide
uauuaagccuggaaaucuc

SEQ ID NO: 2690022 - RNA, 19 nt, Artificial Sequence
  Description of Artificial Sequence: Synthetic oligonucleotide
cuccaacugucuauuaagc

SEQ ID NO: 2690023 - RNA, 19 nt, Artificial Sequence
  Description of Artificial Sequence: Synthetic oligonucleotide
ugcaggaaguuccaccugu

SEQ ID NO: 2690024 - RNA, 19 nt, Artificial Sequence
  Description of Artificial Sequence: Synthetic oligonucleotide
uccuguuuugcuucggcac

SEQ ID NO: 2690025 - RNA, 19 nt, Artificial Sequence
  Description of Artificial Sequence: Synthetic oligonucleotide
agggcacugaagaucaccc

SEQ ID NO: 2690026 - RNA, 19 nt, Artificial Sequence
  Description of Artificial Sequence: Synthetic oligonucleotide
gaaugccucgccuuguuca

SEQ ID NO: 2690027 - RNA, 19 nt, Artificial Sequence
  Description of Artificial Sequence: Synthetic oligonucleotide
cucaugagggaccugccgc

SEQ ID NO: 2690028 - RNA, 19 nt, Artificial Sequence
  Description of Artificial Sequence: Synthetic oligonucleotide
agaaucugcugcucuagca

SEQ ID NO: 2690029 - RNA, 19 nt, Artificial Sequence
  Description of Artificial Sequence: Synthetic oligonucleotide
ugcauguaaccccuucaca

SEQ ID NO: 2690030 - RNA, 19 nt, Artificial Sequence
  Description of Artificial Sequence: Synthetic oligonucleotide
ugccucgccuuguucaucg

SEQ ID NO: 2690031 - RNA, 19 nt, Artificial Sequence
  Description of Artificial Sequence: Synthetic oligonucleotide
uucaucccuacuggcaucg

SEQ ID NO: 2690032 - RNA, 19 nt, Artificial Sequence
  Description of Artificial Sequence: Synthetic oligonucleotide
aucugcacucgcuccagcg

SEQ ID NO: 2690033 - RNA, 19 nt, Artificial Sequence
  Description of Artificial Sequence: Synthetic oligonucleotide
uacuaugagcucguucccg

SEQ ID NO: 2690034 - RNA, 19 nt, Artificial Sequence
  Description of Artificial Sequence: Synthetic oligonucleotide
acucauuggcagcacucgg

SEQ ID NO: 2690035 - RNA, 19 nt, Artificial Sequence
  Description of Artificial Sequence: Synthetic oligonucleotide
ucaucgcugaagcaccgca

SEQ ID NO: 2690036 - RNA, 19 nt, Artificial Sequence
  Description of Artificial Sequence: Synthetic oligonucleotide
gacucauuggcagcacucg

SEQ ID NO: 2690037 - RNA, 19 nt, Artificial Sequence
  Description of Artificial Sequence: Synthetic oligonucleotide
uucggcacagucauuuuau

SEQ ID NO: 2690038 - RNA, 19 nt, Artificial Sequence
  Description of Artificial Sequence: Synthetic oligonucleotide
uccaguucuugaauccuac

SEQ ID NO: 2690039 - RNA, 19 nt, Artificial Sequence
  Description of Artificial Sequence: Synthetic oligonucleotide
uucacauauucaucccuac

SEQ ID NO: 2690040 - RNA, 19 nt, Artificial Sequence
  Description of Artificial Sequence: Synthetic oligonucleotide
uagcugugcauguaacccc

SEQ ID NO: 2690041 - RNA, 19 nt, Artificial Sequence
  Description of Artificial Sequence: Synthetic oligonucleotide
gcuaccaggugccacaugc

SEQ ID NO: 2690042 - RNA, 19 nt, Artificial Sequence
  Description of Artificial Sequence: Synthetic oligonucleotide
ucugcacucgcuccagcgc

SEQ ID NO: 2690043 - RNA, 19 nt, Artificial Sequence
  Description of Artificial Sequence: Synthetic oligonucleotide
agcaagaaucugcugcucu

SEQ ID NO: 2690044 - RNA, 19 nt, Artificial Sequence
  Description of Artificial Sequence: Synthetic oligonucleotide
ucaugagggaccugccgcc

SEQ ID NO: 2690045 - RNA, 19 nt, Artificial Sequence
  Description of Artificial Sequence: Synthetic oligonucleotide
gccgaaugaauccaacagg

SEQ ID NO: 2690046 - RNA, 19 nt, Artificial Sequence
  Description of Artificial Sequence: Synthetic oligonucleotide
uuuucgccgaaugaaucca

SEQ ID NO: 2690047 - RNA, 19 nt, Artificial Sequence
  Description of Artificial Sequence: Synthetic oligonucleotide
aagcaccgcaggcagugag

SEQ ID NO: 2690048 - RNA, 19 nt, Artificial Sequence
  Description of Artificial Sequence: Synthetic oligonucleotide
ugaacaugcccacccucug

SEQ ID NO: 2690049 - RNA, 19 nt, Artificial Sequence
  Description of Artificial Sequence: Synthetic oligonucleotide
ugacucauuggcagcacuc

SEQ ID NO: 2690050 - RNA, 19 nt, Artificial Sequence
  Description of Artificial Sequence: Synthetic oligonucleotide
cugccacuuagcauugagg

SEQ ID NO: 2690051 - RNA, 19 nt, Artificial Sequence
  Description of Artificial Sequence: Synthetic oligonucleotide
acuaugagcucguucccga

SEQ ID NO: 2690052 - RNA, 19 nt, Artificial Sequence
  Description of Artificial Sequence: Synthetic oligonucleotide
gucauuuuauuuucuccuc

SEQ ID NO: 2690053 - RNA, 19 nt, Artificial Sequence
  Description of Artificial Sequence: Synthetic oligonucleotide
agugucccgggccaucuuc

SEQ ID NO: 2690054 - RNA, 19 nt, Artificial Sequence
  Description of Artificial Sequence: Synthetic oligonucleotide
auguaaccccuucacauau

SEQ ID NO: 2690055 - RNA, 19 nt, Artificial Sequence
  Description of Artificial Sequence: Synthetic oligonucleotide
accaggugccacaugcucc

SEQ ID NO: 2690056 - RNA, 19 nt, Artificial Sequence
  Description of Artificial Sequence: Synthetic oligonucleotide
ugugaacaugcccacccuc

SEQ ID NO: 2690057 - RNA, 19 nt, Artificial Sequence
  Description of Artificial Sequence: Synthetic oligonucleotide
auucaucccuacuggcauc

SEQ ID NO: 2690058 - RNA, 19 nt, Artificial Sequence
  Description of Artificial Sequence: Synthetic oligonucleotide
uuccuguuuugcuucggca

SEQ ID NO: 2690059 - RNA, 19 nt, Artificial Sequence
  Description of Artificial Sequence: Synthetic oligonucleotide
guaaccccuucacauauuc

SEQ ID NO: 2690060 - RNA, 19 nt, Artificial Sequence
  Description of Artificial Sequence: Synthetic oligonucleotide
caaagaaaagaccuuuucu

SEQ ID NO: 2690061 - RNA, 19 nt, Artificial Sequence
  Description of Artificial Sequence: Synthetic oligonucleotide
ucguaacgcugccacuuag

SEQ ID NO: 2690062 - RNA, 19 nt, Artificial Sequence
  Description of Artificial Sequence: Synthetic oligonucleotide
aaguccugucucugggaug

SEQ ID NO: 2690063 - RNA, 19 nt, Artificial Sequence
  Description of Artificial Sequence: Synthetic oligonucleotide
auauucaucccuacuggca

SEQ ID NO: 2690064 - RNA, 19 nt, Artificial Sequence
  Description of Artificial Sequence: Synthetic oligonucleotide
aaugccucgccuuguucau

SEQ ID NO: 2690065 - RNA, 19 nt, Artificial Sequence
  Description of Artificial Sequence: Synthetic oligonucleotide
gaacaugcccacccucugc

SEQ ID NO: 2690066 - RNA, 19 nt, Artificial Sequence
  Description of Artificial Sequence: Synthetic oligonucleotide
cagugcauccaucucuaag

SEQ ID NO: 2690067 - RNA, 19 nt, Artificial Sequence
  Description of Artificial Sequence: Synthetic oligonucleotide
guaacgcugccacuuagca

SEQ ID NO: 2690068 - RNA, 19 nt, Artificial Sequence
  Description of Artificial Sequence: Synthetic oligonucleotide
gggacauacaaagaaaaga

SEQ ID NO: 2690069 - RNA, 19 nt, Artificial Sequence
  Description of Artificial Sequence: Synthetic oligonucleotide
cuugggacauacaaagaaa

SEQ ID NO: 2690070 - RNA, 19 nt, Artificial Sequence
  Description of Artificial Sequence: Synthetic oligonucleotide
ugcauccaucucuaaguac

SEQ ID NO: 2690071 - RNA, 19 nt, Artificial Sequence
  Description of Artificial Sequence: Synthetic oligonucleotide
ucgccgaaugaauccaaca

SEQ ID NO: 2690072 - RNA, 19 nt, Artificial Sequence
  Description of Artificial Sequence: Synthetic oligonucleotide
aauccuacuaugagcucgu

SEQ ID NO: 2690073 - RNA, 19 nt, Artificial Sequence
  Description of Artificial Sequence: Synthetic oligonucleotide
cuguugggacccaagagca

SEQ ID NO: 2690074 - RNA, 19 nt, Artificial Sequence
  Description of Artificial Sequence: Synthetic oligonucleotide
uccuacuaugagcucguuc

SEQ ID NO: 2690075 - RNA, 19 nt, Artificial Sequence
  Description of Artificial Sequence: Synthetic oligonucleotide
cucgccuuguucaucgcug

SEQ ID NO: 2690076 - RNA, 19 nt, Artificial Sequence
  Description of Artificial Sequence: Synthetic oligonucleotide
uaugagcucguucccgauc

SEQ ID NO: 2690077 - RNA, 19 nt, Artificial Sequence
  Description of Artificial Sequence: Synthetic oligonucleotide
aagcaagaaucugcugcuc

SEQ ID NO: 2690078 - RNA, 19 nt, Artificial Sequence
  Description of Artificial Sequence: Synthetic oligonucleotide
ugcuugggacauacaaaga

SEQ ID NO: 2690079 - RNA, 19 nt, Artificial Sequence
  Description of Artificial Sequence: Synthetic oligonucleotide
ccuacuggcaucguaacgc

SEQ ID NO: 2690080 - RNA, 19 nt, Artificial Sequence
  Description of Artificial Sequence: Synthetic oligonucleotide
uaaccccuucacauauuca

SEQ ID NO: 2690081 - RNA, 19 nt, Artificial Sequence
  Description of Artificial Sequence: Synthetic oligonucleotide
aacugucuauuaagccugg

SEQ ID NO: 2690082 - RNA, 19 nt, Artificial Sequence
  Description of Artificial Sequence: Synthetic oligonucleotide
cuacuaugagcucguuccc

SEQ ID NO: 2690083 - RNA, 19 nt, Artificial Sequence
  Description of Artificial Sequence: Synthetic oligonucleotide
gaugcuugggacauacaaa

SEQ ID NO: 2690084 - RNA, 19 nt, Artificial Sequence
  Description of Artificial Sequence: Synthetic oligonucleotide
ugggcagugugaacaugcc

SEQ ID NO: 2690085 - RNA, 19 nt, Artificial Sequence
  Description of Artificial Sequence: Synthetic oligonucleotide
caagaaucugcugcucuag

SEQ ID NO: 2690086 - RNA, 19 nt, Artificial Sequence
  Description of Artificial Sequence: Synthetic oligonucleotide
uccagugcauccaucucua

SEQ ID NO: 2690087 - RNA, 19 nt, Artificial Sequence
  Description of Artificial Sequence: Synthetic oligonucleotide
gacccaagagcaguccucc

SEQ ID NO: 2690088 - RNA, 19 nt, Artificial Sequence
  Description of Artificial Sequence: Synthetic oligonucleotide
uucgccgaaugaauccaac

SEQ ID NO: 2690089 - RNA, 19 nt, Artificial Sequence
  Description of Artificial Sequence: Synthetic oligonucleotide
guuccuguuuugcuucggc

SEQ ID NO: 2690090 - RNA, 19 nt, Artificial Sequence
  Description of Artificial Sequence: Synthetic oligonucleotide
uaccaggugccacaugcuc

SEQ ID NO: 2690091 - RNA, 19 nt, Artificial Sequence
  Description of Artificial Sequence: Synthetic oligonucleotide
gucuauuaagccuggaaau

SEQ ID NO: 2690092 - RNA, 19 nt, Artificial Sequence
  Description of Artificial Sequence: Synthetic oligonucleotide
ucauccuuguaagcaagaa

SEQ ID NO: 2690093 - RNA, 19 nt, Artificial Sequence
  Description of Artificial Sequence: Synthetic oligonucleotide
gugcauguaaccccuucac

SEQ ID NO: 2690094 - RNA, 19 nt, Artificial Sequence
  Description of Artificial Sequence: Synthetic oligonucleotide
ucccgaucugcccuuucug

SEQ ID NO: 2690095 - RNA, 19 nt, Artificial Sequence
  Description of Artificial Sequence: Synthetic oligonucleotide
gugggcagugugaacaugc

SEQ ID NO: 2690096 - RNA, 19 nt, Artificial Sequence
  Description of Artificial Sequence: Synthetic oligonucleotide
cugucucugggaugcuugg

SEQ ID NO: 2690097 - RNA, 19 nt, Artificial Sequence
  Description of Artificial Sequence: Synthetic oligonucleotide
gagggcacugaagaucacc

SEQ ID NO: 2690098 - RNA, 19 nt, Artificial Sequence
  Description of Artificial Sequence: Synthetic oligonucleotide
uucccgaucugcccuuucu

SEQ ID NO: 2690099 - RNA, 19 nt, Artificial Sequence
  Description of Artificial Sequence: Synthetic oligonucleotide
ucgcugaagcaccgcaggc

SEQ ID NO: 2690100 - RNA, 19 nt, Artificial Sequence
  Description of Artificial Sequence: Synthetic oligonucleotide
agcaucugcacucgcucca

SEQ ID NO: 2690101 - RNA, 19 nt, Artificial Sequence
  Description of Artificial Sequence: Synthetic oligonucleotide
gcagcacucggacaggugc

SEQ ID NO: 2690102 - RNA, 19 nt, Artificial Sequence
  Description of Artificial Sequence: Synthetic oligonucleotide
uaagccuggaaaucuccuu

SEQ ID NO: 2690103 - RNA, 19 nt, Artificial Sequence
  Description of Artificial Sequence: Synthetic oligonucleotide
caucgcugaagcaccgcag

SEQ ID NO: 2690104 - RNA, 19 nt, Artificial Sequence
  Description of Artificial Sequence: Synthetic oligonucleotide
gugccugaggaaugccucg

SEQ ID NO: 2690105 - RNA, 19 nt, Artificial Sequence
  Description of Artificial Sequence: Synthetic oligonucleotide
cuuuuagcugugcauguaa

SEQ ID NO: 2690106 - RNA, 19 nt, Artificial Sequence
  Description of Artificial Sequence: Synthetic oligonucleotide
ugggaugcuugggacauac

SEQ ID NO: 2690107 - RNA, 19 nt, Artificial Sequence
  Description of Artificial Sequence: Synthetic oligonucleotide
gcugaagcaccgcaggcag

SEQ ID NO: 2690108 - RNA, 19 nt, Artificial Sequence
  Description of Artificial Sequence: Synthetic oligonucleotide
agucauccuuguaagcaag

SEQ ID NO: 2690109 - RNA, 19 nt, Artificial Sequence
  Description of Artificial Sequence: Synthetic oligonucleotide
accgcaggcagugagggca

SEQ ID NO: 2690110 - RNA, 19 nt, Artificial Sequence
  Description of Artificial Sequence: Synthetic oligonucleotide
ggcaucguaacgcugccac

SEQ ID NO: 2690111 - RNA, 19 nt, Artificial Sequence
  Description of Artificial Sequence: Synthetic oligonucleotide
ggaugcuugggacauacaa

SEQ ID NO: 2690112 - RNA, 19 nt, Artificial Sequence
  Description of Artificial Sequence: Synthetic oligonucleotide
gcuugggacauacaaagaa

SEQ ID NO: 2690113 - RNA, 19 nt, Artificial Sequence
  Description of Artificial Sequence: Synthetic oligonucleotide
uuucuccuccaacugucua

SEQ ID NO: 2690114 - RNA, 19 nt, Artificial Sequence
  Description of Artificial Sequence: Synthetic oligonucleotide
uugccaguuccuguuuugc

SEQ ID NO: 2690115 - RNA, 19 nt, Artificial Sequence
  Description of Artificial Sequence: Synthetic oligonucleotide
ugcuucggcacagucauuu

SEQ ID NO: 2690116 - RNA, 19 nt, Artificial Sequence
  Description of Artificial Sequence: Synthetic oligonucleotide
agccuggaaaucuccuucu

SEQ ID NO: 2690117 - RNA, 19 nt, Artificial Sequence
  Description of Artificial Sequence: Synthetic oligonucleotide
caucagcucaggcucauga

SEQ ID NO: 2690118 - RNA, 19 nt, Artificial Sequence
  Description of Artificial Sequence: Synthetic oligonucleotide
uuucgccgaaugaauccaa

SEQ ID NO: 2690119 - RNA, 19 nt, Artificial Sequence
  Description of Artificial Sequence: Synthetic oligonucleotide
gaucacccugaccucugug

SEQ ID NO: 2690120 - RNA, 19 nt, Artificial Sequence
  Description of Artificial Sequence: Synthetic oligonucleotide
cuucacauauucaucccua

SEQ ID NO: 2690121 - RNA, 19 nt, Artificial Sequence
  Description of Artificial Sequence: Synthetic oligonucleotide
ugccgccucuuuuagcugu

SEQ ID NO: 2690122 - RNA, 19 nt, Artificial Sequence
  Description of Artificial Sequence: Synthetic oligonucleotide
uacuggcaucguaacgcug

SEQ ID NO: 2690123 - RNA, 19 nt, Artificial Sequence
  Description of Artificial Sequence: Synthetic oligonucleotide
accugccgccucuuuuagc

SEQ ID NO: 2690124 - RNA, 19 nt, Artificial Sequence
  Description of Artificial Sequence: Synthetic oligonucleotide
ugaauccuacuaugagcuc

SEQ ID NO: 2690125 - RNA, 19 nt, Artificial Sequence
  Description of Artificial Sequence: Synthetic oligonucleotide
cucauuggcagcacucgga

SEQ ID NO: 2690126 - RNA, 19 nt, Artificial Sequence
  Description of Artificial Sequence: Synthetic oligonucleotide
ggaaaucuccuucuucauc

SEQ ID NO: 2690127 - RNA, 19 nt, Artificial Sequence
  Description of Artificial Sequence: Synthetic oligonucleotide
uaacgcugccacuuagcau

SEQ ID NO: 2690128 - RNA, 19 nt, Artificial Sequence
  Description of Artificial Sequence: Synthetic oligonucleotide
gaccucugugggcagugug

SEQ ID NO: 2690129 - RNA, 19 nt, Artificial Sequence
  Description of Artificial Sequence: Synthetic oligonucleotide
ugagggaccugccgccucu

SEQ ID NO: 2690130 - RNA, 19 nt, Artificial Sequence
  Description of Artificial Sequence: Synthetic oligonucleotide
caguuccuguuuugcuucg

SEQ ID NO: 2690131 - RNA, 19 nt, Artificial Sequence
  Description of Artificial Sequence: Synthetic oligonucleotide
aagaucacccugaccucug

SEQ ID NO: 2690132 - RNA, 19 nt, Artificial Sequence
  Description of Artificial Sequence: Synthetic oligonucleotide
uugggacccaagagcaguc

SEQ ID NO: 2690133 - RNA, 19 nt, Artificial Sequence
  Description of Artificial Sequence: Synthetic oligonucleotide
caguucuugaauccuacua

SEQ ID NO: 2690134 - RNA, 19 nt, Artificial Sequence
  Description of Artificial Sequence: Synthetic oligonucleotide
augaauccaacaggguccu

SEQ ID NO: 2690135 - RNA, 19 nt, Artificial Sequence
  Description of Artificial Sequence: Synthetic oligonucleotide
ugcacucgcuccagcgcag

SEQ ID NO: 2690136 - RNA, 19 nt, Artificial Sequence
  Description of Artificial Sequence: Synthetic oligonucleotide
cagcacucggacaggugcc

SEQ ID NO: 2690137 - RNA, 19 nt, Artificial Sequence
  Description of Artificial Sequence: Synthetic oligonucleotide
accccuucacauauucauc

SEQ ID NO: 2690138 - RNA, 19 nt, Artificial Sequence
  Description of Artificial Sequence: Synthetic oligonucleotide
cuauuaagccuggaaaucu

SEQ ID NO: 2690139 - RNA, 19 nt, Artificial Sequence
  Description of Artificial Sequence: Synthetic oligonucleotide
ucgccuuguucaucgcuga

SEQ ID NO: 2690140 - RNA, 19 nt, Artificial Sequence
  Description of Artificial Sequence: Synthetic oligonucleotide
ucccuacuggcaucguaac

SEQ ID NO: 2690141 - RNA, 19 nt, Artificial Sequence
  Description of Artificial Sequence: Synthetic oligonucleotide
guucaucgcugaagcaccg

SEQ ID NO: 2690142 - RNA, 19 nt, Artificial Sequence
  Description of Artificial Sequence: Synthetic oligonucleotide
ucuuuuagcugugcaugua

SEQ ID NO: 2690143 - RNA, 19 nt, Artificial Sequence
  Description of Artificial Sequence: Synthetic oligonucleotide
augcccacccucugcagga

SEQ ID NO: 2690144 - RNA, 19 nt, Artificial Sequence
  Description of Artificial Sequence: Synthetic oligonucleotide
augagggaccugccgccuc

SEQ ID NO: 2690145 - RNA, 19 nt, Artificial Sequence
  Description of Artificial Sequence: Synthetic oligonucleotide
cauguaaccccuucacaua

SEQ ID NO: 2690146 - RNA, 19 nt, Artificial Sequence
  Description of Artificial Sequence: Synthetic oligonucleotide
aguuccuguuuugcuucgg

SEQ ID NO: 2690147 - RNA, 19 nt, Artificial Sequence
  Description of Artificial Sequence: Synthetic oligonucleotide
gcucaugagggaccugccg

SEQ ID NO: 2690148 - RNA, 19 nt, Artificial Sequence
  Description of Artificial Sequence: Synthetic oligonucleotide
gaccugccgccucuuuuag

SEQ ID NO: 2690149 - RNA, 19 nt, Artificial Sequence
  Description of Artificial Sequence: Synthetic oligonucleotide
gcugccacuuagcauugag

SEQ ID NO: 2690150 - RNA, 19 nt, Artificial Sequence
  Description of Artificial Sequence: Synthetic oligonucleotide
ccaagagcaguccuccagc

SEQ ID NO: 2690151 - RNA, 19 nt, Artificial Sequence
  Description of Artificial Sequence: Synthetic oligonucleotide
aucuucacaguugccaguu

SEQ ID NO: 2690152 - RNA, 19 nt, Artificial Sequence
  Description of Artificial Sequence: Synthetic oligonucleotide
uguaaccccuucacauauu

SEQ ID NO: 2690153 - RNA, 19 nt, Artificial Sequence
  Description of Artificial Sequence: Synthetic oligonucleotide
aguugccaguuccuguuuu

SEQ ID NO: 2690154 - RNA, 19 nt, Artificial Sequence
  Description of Artificial Sequence: Synthetic oligonucleotide
cuggcaucguaacgcugcc

SEQ ID NO: 2690155 - RNA, 19 nt, Artificial Sequence
  Description of Artificial Sequence: Synthetic oligonucleotide
cucgcuccagcgcaguguc

SEQ ID NO: 2690156 - RNA, 19 nt, Artificial Sequence
  Description of Artificial Sequence: Synthetic oligonucleotide
uucaucgcugaagcaccgc

SEQ ID NO: 2690157 - RNA, 19 nt, Artificial Sequence
  Description of Artificial Sequence: Synthetic oligonucleotide
ucuaaguacuuggcaguuu

SEQ ID NO: 2690158 - RNA, 19 nt, Artificial Sequence
  Description of Artificial Sequence: Synthetic oligonucleotide
cugugcauguaaccccuuc

SEQ ID NO: 2690159 - RNA, 19 nt, Artificial Sequence
  Description of Artificial Sequence: Synthetic oligonucleotide
cacccugaccucugugggc

SEQ ID NO: 2690160 - RNA, 19 nt, Artificial Sequence
  Description of Artificial Sequence: Synthetic oligonucleotide
acccugaccucugugggca

SEQ ID NO: 2690161 - RNA, 19 nt, Artificial Sequence
  Description of Artificial Sequence: Synthetic oligonucleotide
cuaaguacuuggcaguuuu

SEQ ID NO: 2690162 - RNA, 19 nt, Artificial Sequence
  Description of Artificial Sequence: Synthetic oligonucleotide
acaugcuccagugcaucca

SEQ ID NO: 2690163 - RNA, 19 nt, Artificial Sequence
  Description of Artificial Sequence: Synthetic oligonucleotide
cuuucugauuugaagucau

SEQ ID NO: 2690164 - RNA, 19 nt, Artificial Sequence
  Description of Artificial Sequence: Synthetic oligonucleotide
ccaacaggguccuggcucc

SEQ ID NO: 2690165 - RNA, 19 nt, Artificial Sequence
  Description of Artificial Sequence: Synthetic oligonucleotide
agcugugcauguaaccccu

SEQ ID NO: 2690166 - RNA, 19 nt, Artificial Sequence
  Description of Artificial Sequence: Synthetic oligonucleotide
agcaccgcaggcagugagg

SEQ ID NO: 2690167 - RNA, 19 nt, Artificial Sequence
  Description of Artificial Sequence: Synthetic oligonucleotide
guuccaccuguugggaccc

SEQ ID NO: 2690168 - RNA, 19 nt, Artificial Sequence
  Description of Artificial Sequence: Synthetic oligonucleotide
ugagcucguucccgaucug

SEQ ID NO: 2690169 - RNA, 19 nt, Artificial Sequence
  Description of Artificial Sequence: Synthetic oligonucleotide
gaucugcccuuucugauuu

SEQ ID NO: 2690170 - RNA, 19 nt, Artificial Sequence
  Description of Artificial Sequence: Synthetic oligonucleotide
ucugacucauuggcagcac

SEQ ID NO: 2690171 - RNA, 19 nt, Artificial Sequence
  Description of Artificial Sequence: Synthetic oligonucleotide
ugggacccaagagcagucc

SEQ ID NO: 2690172 - RNA, 19 nt, Artificial Sequence
  Description of Artificial Sequence: Synthetic oligonucleotide
ccaacugucuauuaagccu

SEQ ID NO: 2690173 - RNA, 19 nt, Artificial Sequence
  Description of Artificial Sequence: Synthetic oligonucleotide
cgccgaaugaauccaacag

SEQ ID NO: 2690174 - RNA, 19 nt, Artificial Sequence
  Description of Artificial Sequence: Synthetic oligonucleotide
agaucacccugaccucugu

SEQ ID NO: 2690175 - RNA, 19 nt, Artificial Sequence
  Description of Artificial Sequence: Synthetic oligonucleotide
ccuccagcuaccaggugcc

SEQ ID NO: 2690176 - RNA, 19 nt, Artificial Sequence
  Description of Artificial Sequence: Synthetic oligonucleotide
aacaggguccuggcuccug

SEQ ID NO: 2690177 - RNA, 19 nt, Artificial Sequence
  Description of Artificial Sequence: Synthetic oligonucleotide
cuuagcauugaggucuucu

SEQ ID NO: 2690178 - RNA, 19 nt, Artificial Sequence
  Description of Artificial Sequence: Synthetic oligonucleotide
ccuuguaagcaagaaucug

SEQ ID NO: 2690179 - RNA, 19 nt, Artificial Sequence
  Description of Artificial Sequence: Synthetic oligonucleotide
gcccuuucugauuugaagu

SEQ ID NO: 2690180 - RNA, 19 nt, Artificial Sequence
  Description of Artificial Sequence: Synthetic oligonucleotide
aucguaacgcugccacuua

SEQ ID NO: 2690181 - RNA, 19 nt, Artificial Sequence
  Description of Artificial Sequence: Synthetic oligonucleotide
cagcgcagugucccgggcc

SEQ ID NO: 2690182 - RNA, 19 nt, Artificial Sequence
  Description of Artificial Sequence: Synthetic oligonucleotide
cucuagcaucugcacucgc

SEQ ID NO: 2690183 - RNA, 19 nt, Artificial Sequence
  Description of Artificial Sequence: Synthetic oligonucleotide
cugcacucgcuccagcgca

SEQ ID NO: 2690184 - RNA, 19 nt, Artificial Sequence
  Description of Artificial Sequence: Synthetic oligonucleotide
gugcauccaucucuaagua

SEQ ID NO: 2690185 - RNA, 19 nt, Artificial Sequence
  Description of Artificial Sequence: Synthetic oligonucleotide
ucggcacagucauuuuauu

SEQ ID NO: 2690186 - RNA, 19 nt, Artificial Sequence
  Description of Artificial Sequence: Synthetic oligonucleotide
cuccagugcauccaucucu

SEQ ID NO: 2690187 - RNA, 19 nt, Artificial Sequence
  Description of Artificial Sequence: Synthetic oligonucleotide
gccuuguucaucgcugaag

SEQ ID NO: 2690188 - RNA, 19 nt, Artificial Sequence
  Description of Artificial Sequence: Synthetic oligonucleotide
acucgcuccagcgcagugu

SEQ ID NO: 2690189 - RNA, 19 nt, Artificial Sequence
  Description of Artificial Sequence: Synthetic oligonucleotide
aggugccacaugcuccagu

SEQ ID NO: 2690190 - RNA, 19 nt, Artificial Sequence
  Description of Artificial Sequence: Synthetic oligonucleotide
cccaagagcaguccuccag

SEQ ID NO: 2690191 - RNA, 19 nt, Artificial Sequence
  Description of Artificial Sequence: Synthetic oligonucleotide
cucggacaggugccugagg

SEQ ID NO: 2690192 - RNA, 19 nt, Artificial Sequence
  Description of Artificial Sequence: Synthetic oligonucleotide
caucugcacucgcuccagc

SEQ ID NO: 2690193 - RNA, 19 nt, Artificial Sequence
  Description of Artificial Sequence: Synthetic oligonucleotide
ugucccgggccaucuucac

SEQ ID NO: 2690194 - RNA, 19 nt, Artificial Sequence
  Description of Artificial Sequence: Synthetic oligonucleotide
cuucggcacagucauuuua

SEQ ID NO: 2690195 - RNA, 19 nt, Artificial Sequence
  Description of Artificial Sequence: Synthetic oligonucleotide
caccuguugggacccaaga

SEQ ID NO: 2690196 - RNA, 19 nt, Artificial Sequence
  Description of Artificial Sequence: Synthetic oligonucleotide
cagugugaacaugcccacc

SEQ ID NO: 2690197 - RNA, 19 nt, Artificial Sequence
  Description of Artificial Sequence: Synthetic oligonucleotide
cugcaggaaguuccaccug

SEQ ID NO: 2690198 - RNA, 19 nt, Artificial Sequence
  Description of Artificial Sequence: Synthetic oligonucleotide
cauccuuguaagcaagaau

SEQ ID NO: 2690199 - RNA, 19 nt, Artificial Sequence
  Description of Artificial Sequence: Synthetic oligonucleotide
guugggacccaagagcagu

SEQ ID NO: 2690200 - RNA, 19 nt, Artificial Sequence
  Description of Artificial Sequence: Synthetic oligonucleotide
aggaaugccucgccuuguu

SEQ ID NO: 2690201 - RNA, 19 nt, Artificial Sequence
  Description of Artificial Sequence: Synthetic oligonucleotide
gcaccgcaggcagugaggg

SEQ ID NO: 2690202 - RNA, 19 nt, Artificial Sequence
  Description of Artificial Sequence: Synthetic oligonucleotide
uucaucagcucaggcucau

SEQ ID NO: 2690203 - RNA, 19 nt, Artificial Sequence
  Description of Artificial Sequence: Synthetic oligonucleotide
cauuggcagcacucggaca

SEQ ID NO: 2690204 - RNA, 19 nt, Artificial Sequence
  Description of Artificial Sequence: Synthetic oligonucleotide
cucugugggcagugugaac

SEQ ID NO: 2690205 - RNA, 19 nt, Artificial Sequence
  Description of Artificial Sequence: Synthetic oligonucleotide
ugagggcacugaagaucac

SEQ ID NO: 2690206 - RNA, 19 nt, Artificial Sequence
  Description of Artificial Sequence: Synthetic oligonucleotide
gucauccuuguaagcaaga

SEQ ID NO: 2690207 - RNA, 19 nt, Artificial Sequence
  Description of Artificial Sequence: Synthetic oligonucleotide
acugucuauuaagccugga

SEQ ID NO: 2690208 - RNA, 19 nt, Artificial Sequence
  Description of Artificial Sequence: Synthetic oligonucleotide
cugaccucugugggcagug

SEQ ID NO: 2690209 - RNA, 19 nt, Artificial Sequence
  Description of Artificial Sequence: Synthetic oligonucleotide
cccuacuggcaucguaacg

SEQ ID NO: 2690210 - RNA, 19 nt, Artificial Sequence
  Description of Artificial Sequence: Synthetic oligonucleotide
ccacuuagcauugaggucu

SEQ ID NO: 2690211 - RNA, 19 nt, Artificial Sequence
  Description of Artificial Sequence: Synthetic oligonucleotide
gugaacaugcccacccucu

SEQ ID NO: 2690212 - RNA, 19 nt, Artificial Sequence
  Description of Artificial Sequence: Synthetic oligonucleotide
cguaacgcugccacuuagc

SEQ ID NO: 2690213 - RNA, 19 nt, Artificial Sequence
  Description of Artificial Sequence: Synthetic oligonucleotide
gcucuagcaucugcacucg

SEQ ID NO: 2690214 - RNA, 19 nt, Artificial Sequence
  Description of Artificial Sequence: Synthetic oligonucleotide
acuuagcauugaggucuuc

SEQ ID NO: 2690215 - RNA, 19 nt, Artificial Sequence
  Description of Artificial Sequence: Synthetic oligonucleotide
agcacucggacaggugccu

SEQ ID NO: 2690216 - RNA, 19 nt, Artificial Sequence
  Description of Artificial Sequence: Synthetic oligonucleotide
acccaagagcaguccucca

SEQ ID NO: 2690217 - RNA, 19 nt, Artificial Sequence
  Description of Artificial Sequence: Synthetic oligonucleotide
agcuaccaggugccacaug

SEQ ID NO: 2690218 - RNA, 19 nt, Artificial Sequence
  Description of Artificial Sequence: Synthetic oligonucleotide
uggcaucguaacgcugcca

SEQ ID NO: 2690219 - RNA, 19 nt, Artificial Sequence
  Description of Artificial Sequence: Synthetic oligonucleotide
ucgcuccagcgcagugucc

SEQ ID NO: 2690220 - RNA, 19 nt, Artificial Sequence
  Description of Artificial Sequence: Synthetic oligonucleotide
augccucgccuuguucauc

SEQ ID NO: 2690221 - RNA, 19 nt, Artificial Sequence
  Description of Artificial Sequence: Synthetic oligonucleotide
gcaagaaucugcugcucua

SEQ ID NO: 2690222 - RNA, 19 nt, Artificial Sequence
  Description of Artificial Sequence: Synthetic oligonucleotide
cacucggacaggugccuga

SEQ ID NO: 2690223 - RNA, 19 nt, Artificial Sequence
  Description of Artificial Sequence: Synthetic oligonucleotide
cuacuggcaucguaacgcu

SEQ ID NO: 2690224 - RNA, 19 nt, Artificial Sequence
  Description of Artificial Sequence: Synthetic oligonucleotide
cugccgccucuuuuagcug

SEQ ID NO: 2690225 - RNA, 19 nt, Artificial Sequence
  Description of Artificial Sequence: Synthetic oligonucleotide
ugaauccaacaggguccug

SEQ ID NO: 2690226 - RNA, 19 nt, Artificial Sequence
  Description of Artificial Sequence: Synthetic oligonucleotide
agcaguccuccagcuacca

SEQ ID NO: 2690227 - RNA, 19 nt, Artificial Sequence
  Description of Artificial Sequence: Synthetic oligonucleotide
caccgcaggcagugagggc

SEQ ID NO: 2690228 - RNA, 19 nt, Artificial Sequence
  Description of Artificial Sequence: Synthetic oligonucleotide
uccaccuguugggacccaa

SEQ ID NO: 2690229 - RNA, 19 nt, Artificial Sequence
  Description of Artificial Sequence: Synthetic oligonucleotide
ugaccucugugggcagugu

SEQ ID NO: 2690230 - RNA, 19 nt, Artificial Sequence
  Description of Artificial Sequence: Synthetic oligonucleotide
cacucgcuccagcgcagug

SEQ ID NO: 2690231 - RNA, 19 nt, Artificial Sequence
  Description of Artificial Sequence: Synthetic oligonucleotide
ucguucccgaucugcccuu

SEQ ID NO: 2690232 - RNA, 19 nt, Artificial Sequence
  Description of Artificial Sequence: Synthetic oligonucleotide
gccugaggaaugccucgcc

SEQ ID NO: 2690233 - RNA, 19 nt, Artificial Sequence
  Description of Artificial Sequence: Synthetic oligonucleotide
caucccuacuggcaucgua

SEQ ID NO: 2690234 - RNA, 19 nt, Artificial Sequence
  Description of Artificial Sequence: Synthetic oligonucleotide
ggaccugccgccucuuuua

SEQ ID NO: 2690235 - RNA, 19 nt, Artificial Sequence
  Description of Artificial Sequence: Synthetic oligonucleotide
gugugaacaugcccacccu

SEQ ID NO: 2690236 - RNA, 19 nt, Artificial Sequence
  Description of Artificial Sequence: Synthetic oligonucleotide
gcuccagcgcagugucccg

SEQ ID NO: 2690237 - RNA, 19 nt, Artificial Sequence
  Description of Artificial Sequence: Synthetic oligonucleotide
ccugccgccucuuuuagcu

SEQ ID NO: 2690238 - RNA, 19 nt, Artificial Sequence
  Description of Artificial Sequence: Synthetic oligonucleotide
caucguaacgcugccacuu

SEQ ID NO: 2690239 - RNA, 19 nt, Artificial Sequence
  Description of Artificial Sequence: Synthetic oligonucleotide
cugaggaaugccucgccuu

SEQ ID NO: 2690240 - RNA, 19 nt, Artificial Sequence
  Description of Artificial Sequence: Synthetic oligonucleotide
gaagcaccgcaggcaguga

SEQ ID NO: 2690241 - RNA, 19 nt, Artificial Sequence
  Description of Artificial Sequence: Synthetic oligonucleotide
ggacccaagagcaguccuc

SEQ ID NO: 2690242 - RNA, 19 nt, Artificial Sequence
  Description of Artificial Sequence: Synthetic oligonucleotide
ucaucccuacuggcaucgu

SEQ ID NO: 2690243 - RNA, 19 nt, Artificial Sequence
  Description of Artificial Sequence: Synthetic oligonucleotide
cgggccaucuucacaguug

SEQ ID NO: 2690244 - RNA, 19 nt, Artificial Sequence
  Description of Artificial Sequence: Synthetic oligonucleotide
gcaucugcacucgcuccag

SEQ ID NO: 2690245 - RNA, 19 nt, Artificial Sequence
  Description of Artificial Sequence: Synthetic oligonucleotide
ccaccuguugggacccaag

SEQ ID NO: 2690246 - RNA, 19 nt, Artificial Sequence
  Description of Artificial Sequence: Synthetic oligonucleotide
gugucccgggccaucuuca

SEQ ID NO: 2690247 - RNA, 19 nt, Artificial Sequence
  Description of Artificial Sequence: Synthetic oligonucleotide
gcuccagugcauccaucuc

SEQ ID NO: 2690248 - RNA, 19 nt, Artificial Sequence
  Description of Artificial Sequence: Synthetic oligonucleotide
cuaccaggugccacaugcu

SEQ ID NO: 2690249 - RNA, 19 nt, Artificial Sequence
  Description of Artificial Sequence: Synthetic oligonucleotide
cccgaucugcccuuucuga

SEQ ID NO: 2690250 - RNA, 19 nt, Artificial Sequence
  Description of Artificial Sequence: Synthetic oligonucleotide
caugcuccagugcauccau

SEQ ID NO: 2690251 - RNA, 19 nt, Artificial Sequence
  Description of Artificial Sequence: Synthetic oligonucleotide
ggcucaugagggaccugcc

SEQ ID NO: 2690252 - RNA, 19 nt, Artificial Sequence
  Description of Artificial Sequence: Synthetic oligonucleotide
gccucuuuuagcugugcau

SEQ ID NO: 2690253 - RNA, 19 nt, Artificial Sequence
  Description of Artificial Sequence: Synthetic oligonucleotide
uugcuucggcacagucauu

SEQ ID NO: 2690254 - RNA, 19 nt, Artificial Sequence
  Description of Artificial Sequence: Synthetic oligonucleotide
acgcugccacuuagcauug

SEQ ID NO: 2690255 - RNA, 19 nt, Artificial Sequence
  Description of Artificial Sequence: Synthetic oligonucleotide
cuaugagcucguucccgau

SEQ ID NO: 2690256 - RNA, 19 nt, Artificial Sequence
  Description of Artificial Sequence: Synthetic oligonucleotide
ccacaugcuccagugcauc

SEQ ID NO: 2690257 - RNA, 19 nt, Artificial Sequence
  Description of Artificial Sequence: Synthetic oligonucleotide
cucuaaguacuuggcaguu

SEQ ID NO: 2690258 - RNA, 19 nt, Artificial Sequence
  Description of Artificial Sequence: Synthetic oligonucleotide
gggacccaagagcaguccu

SEQ ID NO: 2690259 - RNA, 19 nt, Artificial Sequence
  Description of Artificial Sequence: Synthetic oligonucleotide
gcccacccucugcaggaag

SEQ ID NO: 2690260 - RNA, 19 nt, Artificial Sequence
  Description of Artificial Sequence: Synthetic oligonucleotide
gcaggcagugagggcacug

SEQ ID NO: 2690261 - RNA, 19 nt, Artificial Sequence
  Description of Artificial Sequence: Synthetic oligonucleotide
cagugagggcacugaagau

SEQ ID NO: 2690262 - RNA, 19 nt, Artificial Sequence
  Description of Artificial Sequence: Synthetic oligonucleotide
ugcccacccucugcaggaa

SEQ ID NO: 2690263 - RNA, 19 nt, Artificial Sequence
  Description of Artificial Sequence: Synthetic oligonucleotide
uuccaccuguugggaccca

SEQ ID NO: 2690264 - RNA, 19 nt, Artificial Sequence
  Description of Artificial Sequence: Synthetic oligonucleotide
agggaccugccgccucuuu

SEQ ID NO: 2690265 - RNA, 19 nt, Artificial Sequence
  Description of Artificial Sequence: Synthetic oligonucleotide
cugaagcaccgcaggcagu

SEQ ID NO: 2690266 - RNA, 19 nt, Artificial Sequence
  Description of Artificial Sequence: Synthetic oligonucleotide
cccucugcaggaaguucca

SEQ ID NO: 2690267 - RNA, 19 nt, Artificial Sequence
  Description of Artificial Sequence: Synthetic oligonucleotide
auccuacuaugagcucguu

SEQ ID NO: 2690268 - RNA, 19 nt, Artificial Sequence
  Description of Artificial Sequence: Synthetic oligonucleotide
ccagcgcagugucccgggc

SEQ ID NO: 2690269 - RNA, 19 nt, Artificial Sequence
  Description of Artificial Sequence: Synthetic oligonucleotide
gcaucguaacgcugccacu

SEQ ID NO: 2690270 - RNA, 19 nt, Artificial Sequence
  Description of Artificial Sequence: Synthetic oligonucleotide
gcacucggacaggugccug

SEQ ID NO: 2690271 - RNA, 19 nt, Artificial Sequence
  Description of Artificial Sequence: Synthetic oligonucleotide
cacuuagcauugaggucuu

SEQ ID NO: 2690272 - RNA, 19 nt, Artificial Sequence
  Description of Artificial Sequence: Synthetic oligonucleotide
caugagggaccugccgccu

SEQ ID NO: 2690273 - RNA, 19 nt, Artificial Sequence
  Description of Artificial Sequence: Synthetic oligonucleotide
ccugaggaaugccucgccu

SEQ ID NO: 2690274 - RNA, 19 nt, Artificial Sequence
  Description of Artificial Sequence: Synthetic oligonucleotide
ccaguucuugaauccuacu

SEQ ID NO: 2690275 - RNA, 19 nt, Artificial Sequence
  Description of Artificial Sequence: Synthetic oligonucleotide
gccucgccuuguucaucgc

SEQ ID NO: 2690276 - RNA, 19 nt, Artificial Sequence
  Description of Artificial Sequence: Synthetic oligonucleotide
gccgccucuuuuagcugug

SEQ ID NO: 2690277 - RNA, 19 nt, Artificial Sequence
  Description of Artificial Sequence: Synthetic oligonucleotide
gggaugcuugggacauaca

SEQ ID NO: 2690278 - RNA, 19 nt, Artificial Sequence
  Description of Artificial Sequence: Synthetic oligonucleotide
gggaccugccgccucuuuu

SEQ ID NO: 2690279 - RNA, 19 nt, Artificial Sequence
  Description of Artificial Sequence: Synthetic oligonucleotide
ccgaucugcccuuucugau

SEQ ID NO: 2690280 - RNA, 19 nt, Artificial Sequence
  Description of Artificial Sequence: Synthetic oligonucleotide
caguugccaguuccuguuu

SEQ ID NO: 2690281 - RNA, 19 nt, Artificial Sequence
  Description of Artificial Sequence: Synthetic oligonucleotide
cgccucuuuuagcugugca

SEQ ID NO: 2690282 - RNA, 19 nt, Artificial Sequence
  Description of Artificial Sequence: Synthetic oligonucleotide
ccgccucuuuuagcugugc

SEQ ID NO: 2690283 - RNA, 19 nt, Artificial Sequence
  Description of Artificial Sequence: Synthetic oligonucleotide
gcagugucccgggccaucu

SEQ ID NO: 2690284 - RNA, 19 nt, Artificial Sequence
  Description of Artificial Sequence: Synthetic oligonucleotide
ccagugcauccaucucuaa

SEQ ID NO: 2690285 - RNA, 19 nt, Artificial Sequence
  Description of Artificial Sequence: Synthetic oligonucleotide
gccuggaaaucuccuucuu

SEQ ID NO: 2690286 - RNA, 19 nt, Artificial Sequence
  Description of Artificial Sequence: Synthetic oligonucleotide
ccucgccuuguucaucgcu

SEQ ID NO: 2690287 - RNA, 19 nt, Artificial Sequence
  Description of Artificial Sequence: Synthetic oligonucleotide
gcuucggcacagucauuuu

SEQ ID NO: 2690288 - RNA, 19 nt, Artificial Sequence
  Description of Artificial Sequence: Synthetic oligonucleotide
cggcacagucauuuuauuu

SEQ ID NO: 2690289 - RNA, 19 nt, Artificial Sequence
  Description of Artificial Sequence: Synthetic oligonucleotide
cagcuaccaggugccacau

SEQ ID NO: 2690290 - RNA, 19 nt, Artificial Sequence
  Description of Artificial Sequence: Synthetic oligonucleotide
gcaggaaguuccaccuguu

SEQ ID NO: 2690291 - RNA, 19 nt, Artificial Sequence
  Description of Artificial Sequence: Synthetic oligonucleotide
cgaucugcccuuucugauu

SEQ ID NO: 2690292 - RNA, 19 nt, Artificial Sequence
  Description of Artificial Sequence: Synthetic oligonucleotide
gagggaccugccgccucuu

SEQ ID NO: 2690293 - RNA, 19 nt, Artificial Sequence
  Description of Artificial Sequence: Synthetic oligonucleotide
cgcagugucccgggccauc

SEQ ID NO: 2690294 - RNA, 19 nt, Artificial Sequence
  Description of Artificial Sequence: Synthetic oligonucleotide
cgccuuguucaucgcugaa

SEQ ID NO: 2690295 - RNA, 19 nt, Artificial Sequence
  Description of Artificial Sequence: Synthetic oligonucleotide
cagugucccgggccaucuu

SEQ ID NO: 2690296 - RNA, 19 nt, Artificial Sequence
  Description of Artificial Sequence: Synthetic oligonucleotide
ccgggccaucuucacaguu

SEQ ID NO: 2690297 - RNA, 19 nt, Artificial Sequence
  Description of Artificial Sequence: Synthetic oligonucleotide
gcugugcauguaaccccuu

SEQ ID NO: 2690298 - RNA, 19 nt, Artificial Sequence
  Description of Artificial Sequence: Synthetic oligonucleotide
ccacccucugcaggaaguu

SEQ ID NO: 2690299 - RNA, 19 nt, Artificial Sequence
  Description of Artificial Sequence: Synthetic oligonucleotide
cccgggccaucuucacagu

SEQ ID NO: 2690300 - RNA, 19 nt, Artificial Sequence
  Description of Artificial Sequence: Synthetic oligonucleotide
cgcugccacuuagcauuga

SEQ ID NO: 2690301 - RNA, 19 nt, Artificial Sequence
  Description of Artificial Sequence: Synthetic oligonucleotide
gcgcagugucccgggccau

SEQ ID NO: 2690302 - RNA, 19 nt, Artificial Sequence
  Description of Artificial Sequence: Synthetic oligonucleotide
cguucccgaucugcccuuu

SEQ ID NO: 2690303 - RNA, 19 nt, Artificial Sequence
  Description of Artificial Sequence: Synthetic oligonucleotide
aagaaauaaauccaguuac

SEQ ID NO: 2690304 - RNA, 19 nt, Artificial Sequence
  Description of Artificial Sequence: Synthetic oligonucleotide
auuuacaagauacacaagc

SEQ ID NO: 2690305 - RNA, 19 nt, Artificial Sequence
  Description of Artificial Sequence: Synthetic oligonucleotide
aauaaauccaguuacaaau

SEQ ID NO: 2690306 - RNA, 19 nt, Artificial Sequence
  Description of Artificial Sequence: Synthetic oligonucleotide
uuaaacauccacuucaugg

SEQ ID NO: 2690307 - RNA, 19 nt, Artificial Sequence
  Description of Artificial Sequence: Synthetic oligonucleotide
aaaguaacugaaaacagcc

SEQ ID NO: 2690308 - RNA, 19 nt, Artificial Sequence
  Description of Artificial Sequence: Synthetic oligonucleotide
agugaugucagauggaacc

SEQ ID NO: 2690309 - RNA, 19 nt, Artificial Sequence
  Description of Artificial Sequence: Synthetic oligonucleotide
uaauuuacuaaucuaagga

SEQ ID NO: 2690310 - RNA, 19 nt, Artificial Sequence
  Description of Artificial Sequence: Synthetic oligonucleotide
uaaucuaaggaaauaaacc

SEQ ID NO: 2690311 - RNA, 19 nt, Artificial Sequence
  Description of Artificial Sequence: Synthetic oligonucleotide
uuacaaauguacuaguagg

SEQ ID NO: 2690312 - RNA, 19 nt, Artificial Sequence
  Description of Artificial Sequence: Synthetic oligonucleotide
uauuaagaaauaaauccag

SEQ ID NO: 2690313 - RNA, 19 nt, Artificial Sequence
  Description of Artificial Sequence: Synthetic oligonucleotide
aaagcugucccauaguaag

SEQ ID NO: 2690314 - RNA, 19 nt, Artificial Sequence
  Description of Artificial Sequence: Synthetic oligonucleotide
uauaauuuacuaaucuaag

SEQ ID NO: 2690315 - RNA, 19 nt, Artificial Sequence
  Description of Artificial Sequence: Synthetic oligonucleotide
auaauuuacuaaucuaagg

SEQ ID NO: 2690316 - RNA, 19 nt, Artificial Sequence
  Description of Artificial Sequence: Synthetic oligonucleotide
aagauacacaagcaggaac

SEQ ID NO: 2690317 - RNA, 19 nt, Artificial Sequence
  Description of Artificial Sequence: Synthetic oligonucleotide
aauccaguuacaaauguac

SEQ ID NO: 2690318 - RNA, 19 nt, Artificial Sequence
  Description of Artificial Sequence: Synthetic oligonucleotide
aauuuacuaaucuaaggaa

SEQ ID NO: 2690319 - RNA, 19 nt, Artificial Sequence
  Description of Artificial Sequence: Synthetic oligonucleotide
uaaaguaacugaaaacagc

SEQ ID NO: 2690320 - RNA, 19 nt, Artificial Sequence
  Description of Artificial Sequence: Synthetic oligonucleotide
aguaacugaaaacagccag

SEQ ID NO: 2690321 - RNA, 19 nt, Artificial Sequence
  Description of Artificial Sequence: Synthetic oligonucleotide
aguuauuuacaagauacac

SEQ ID NO: 2690322 - RNA, 19 nt, Artificial Sequence
  Description of Artificial Sequence: Synthetic oligonucleotide
ucaaugucaacaaucugag

SEQ ID NO: 2690323 - RNA, 19 nt, Artificial Sequence
  Description of Artificial Sequence: Synthetic oligonucleotide
uuacaagauacacaagcag

SEQ ID NO: 2690324 - RNA, 19 nt, Artificial Sequence
  Description of Artificial Sequence: Synthetic oligonucleotide
gauggaaccagguacuucc

SEQ ID NO: 2690325 - RNA, 19 nt, Artificial Sequence
  Description of Artificial Sequence: Synthetic oligonucleotide
uuuacaagauacacaagca

SEQ ID NO: 2690326 - RNA, 19 nt, Artificial Sequence
  Description of Artificial Sequence: Synthetic oligonucleotide
ucagaaggaaguuggaucc

SEQ ID NO: 2690327 - RNA, 19 nt, Artificial Sequence
  Description of Artificial Sequence: Synthetic oligonucleotide
guuacaaauguacuaguag

SEQ ID NO: 2690328 - RNA, 19 nt, Artificial Sequence
  Description of Artificial Sequence: Synthetic oligonucleotide
uaaacauccacuucauggc

SEQ ID NO: 2690329 - RNA, 19 nt, Artificial Sequence
  Description of Artificial Sequence: Synthetic oligonucleotide
aaaaguguucucuccacug

SEQ ID NO: 2690330 - RNA, 19 nt, Artificial Sequence
  Description of Artificial Sequence: Synthetic oligonucleotide
acugaaaacagccaguuau

SEQ ID NO: 2690331 - RNA, 19 nt, Artificial Sequence
  Description of Artificial Sequence: Synthetic oligonucleotide
aaauaaacccuuccaauau

SEQ ID NO: 2690332 - RNA, 19 nt, Artificial Sequence
  Description of Artificial Sequence: Synthetic oligonucleotide
augucaacaaucugagagc

SEQ ID NO: 2690333 - RNA, 19 nt, Artificial Sequence
  Description of Artificial Sequence: Synthetic oligonucleotide
acaacaacaacggaggcgg

SEQ ID NO: 2690334 - RNA, 19 nt, Artificial Sequence
  Description of Artificial Sequence: Synthetic oligonucleotide
uucgcucugaucuuggcgg

SEQ ID NO: 2690335 - RNA, 19 nt, Artificial Sequence
  Description of Artificial Sequence: Synthetic oligonucleotide
aaacauccacuucauggcg

SEQ ID NO: 2690336 - RNA, 19 nt, Artificial Sequence
  Description of Artificial Sequence: Synthetic oligonucleotide
acaagaauccaucuucauc

SEQ ID NO: 2690337 - RNA, 19 nt, Artificial Sequence
  Description of Artificial Sequence: Synthetic oligonucleotide
aaauaaauccaguuacaaa

SEQ ID NO: 2690338 - RNA, 19 nt, Artificial Sequence
  Description of Artificial Sequence: Synthetic oligonucleotide
cuucucagaaggaaguugg

SEQ ID NO: 2690339 - RNA, 19 nt, Artificial Sequence
  Description of Artificial Sequence: Synthetic oligonucleotide
caaucugagagccugagac

SEQ ID NO: 2690340 - RNA, 19 nt, Artificial Sequence
  Description of Artificial Sequence: Synthetic oligonucleotide
uuuacuaaucuaaggaaau

SEQ ID NO: 2690341 - RNA, 19 nt, Artificial Sequence
  Description of Artificial Sequence: Synthetic oligonucleotide
cauacaagaauccaucuuc

SEQ ID NO: 2690342 - RNA, 19 nt, Artificial Sequence
  Description of Artificial Sequence: Synthetic oligonucleotide
uacacaagcaggaacggug

SEQ ID NO: 2690343 - RNA, 19 nt, Artificial Sequence
  Description of Artificial Sequence: Synthetic oligonucleotide
uuaagaaauaaauccaguu

SEQ ID NO: 2690344 - RNA, 19 nt, Artificial Sequence
  Description of Artificial Sequence: Synthetic oligonucleotide
uguacuaguaggucuaugu

SEQ ID NO: 2690345 - RNA, 19 nt, Artificial Sequence
  Description of Artificial Sequence: Synthetic oligonucleotide
uccucagaagccaaaagug

SEQ ID NO: 2690346 - RNA, 19 nt, Artificial Sequence
  Description of Artificial Sequence: Synthetic oligonucleotide
aaucaccggaacucggucg

SEQ ID NO: 2690347 - RNA, 19 nt, Artificial Sequence
  Description of Artificial Sequence: Synthetic oligonucleotide
ugugaagaggcucugguaa

SEQ ID NO: 2690348 - RNA, 19 nt, Artificial Sequence
  Description of Artificial Sequence: Synthetic oligonucleotide
uuguccacaaacaggaaga

SEQ ID NO: 2690349 - RNA, 19 nt, Artificial Sequence
  Description of Artificial Sequence: Synthetic oligonucleotide
aggaagauagccuucucag

SEQ ID NO: 2690350 - RNA, 19 nt, Artificial Sequence
  Description of Artificial Sequence: Synthetic oligonucleotide
uucucuguauauaauuuac

SEQ ID NO: 2690351 - RNA, 19 nt, Artificial Sequence
  Description of Artificial Sequence: Synthetic oligonucleotide
uacaaauguacuaguaggu

SEQ ID NO: 2690352 - RNA, 19 nt, Artificial Sequence
  Description of Artificial Sequence: Synthetic oligonucleotide
uaggucuaugugaagaggc

SEQ ID NO: 2690353 - RNA, 19 nt, Artificial Sequence
  Description of Artificial Sequence: Synthetic oligonucleotide
ugucccauaguaaggcugg

SEQ ID NO: 2690354 - RNA, 19 nt, Artificial Sequence
  Description of Artificial Sequence: Synthetic oligonucleotide
agauagccuucucagaagg

SEQ ID NO: 2690355 - RNA, 19 nt, Artificial Sequence
  Description of Artificial Sequence: Synthetic oligonucleotide
ucaacaaucugagagccug

SEQ ID NO: 2690356 - RNA, 19 nt, Artificial Sequence
  Description of Artificial Sequence: Synthetic oligonucleotide
aagccaaaaguguucucuc

SEQ ID NO: 2690357 - RNA, 19 nt, Artificial Sequence
  Description of Artificial Sequence: Synthetic oligonucleotide
uacuaguaggucuauguga

SEQ ID NO: 2690358 - RNA, 19 nt, Artificial Sequence
  Description of Artificial Sequence: Synthetic oligonucleotide
aguaaggcuggacuguggg

SEQ ID NO: 2690359 - RNA, 19 nt, Artificial Sequence
  Description of Artificial Sequence: Synthetic oligonucleotide
ccaguuauuuacaagauac

SEQ ID NO: 2690360 - RNA, 19 nt, Artificial Sequence
  Description of Artificial Sequence: Synthetic oligonucleotide
aagauagccuucucagaag

SEQ ID NO: 2690361 - RNA, 19 nt, Artificial Sequence
  Description of Artificial Sequence: Synthetic oligonucleotide
gucagauggaaccagguac

SEQ ID NO: 2690362 - RNA, 19 nt, Artificial Sequence
  Description of Artificial Sequence: Synthetic oligonucleotide
ucuaaggaaauaaacccuu

SEQ ID NO: 2690363 - RNA, 19 nt, Artificial Sequence
  Description of Artificial Sequence: Synthetic oligonucleotide
gguaaaguaacugaaaaca

SEQ ID NO: 2690364 - RNA, 19 nt, Artificial Sequence
  Description of Artificial Sequence: Synthetic oligonucleotide
aucuuggcggauuccacgc

SEQ ID NO: 2690365 - RNA, 19 nt, Artificial Sequence
  Description of Artificial Sequence: Synthetic oligonucleotide
guaaaguaacugaaaacag

SEQ ID NO: 2690366 - RNA, 19 nt, Artificial Sequence
  Description of Artificial Sequence: Synthetic oligonucleotide
uuuccuucucguaaagcug

SEQ ID NO: 2690367 - RNA, 19 nt, Artificial Sequence
  Description of Artificial Sequence: Synthetic oligonucleotide
ucguaaagcugucccauag

SEQ ID NO: 2690368 - RNA, 19 nt, Artificial Sequence
  Description of Artificial Sequence: Synthetic oligonucleotide
gaagauagccuucucagaa

SEQ ID NO: 2690369 - RNA, 19 nt, Artificial Sequence
  Description of Artificial Sequence: Synthetic oligonucleotide
gaccacaacaacaacggag

SEQ ID NO: 2690370 - RNA, 19 nt, Artificial Sequence
  Description of Artificial Sequence: Synthetic oligonucleotide
gaaauaaacccuuccaaua

SEQ ID NO: 2690371 - RNA, 19 nt, Artificial Sequence
  Description of Artificial Sequence: Synthetic oligonucleotide
cuuguccacaaacaggaag

SEQ ID NO: 2690372 - RNA, 19 nt, Artificial Sequence
  Description of Artificial Sequence: Synthetic oligonucleotide
aguaggucuaugugaagag

SEQ ID NO: 2690373 - RNA, 19 nt, Artificial Sequence
  Description of Artificial Sequence: Synthetic oligonucleotide
gauccacaugaacugagcc

SEQ ID NO: 2690374 - RNA, 19 nt, Artificial Sequence
  Description of Artificial Sequence: Synthetic oligonucleotide
accacaacaacaacggagg

SEQ ID NO: 2690375 - RNA, 19 nt, Artificial Sequence
  Description of Artificial Sequence: Synthetic oligonucleotide
ucagauggaaccagguacu

SEQ ID NO: 2690376 - RNA, 19 nt, Artificial Sequence
  Description of Artificial Sequence: Synthetic oligonucleotide
acaaauguacuaguagguc

SEQ ID NO: 2690377 - RNA, 19 nt, Artificial Sequence
  Description of Artificial Sequence: Synthetic oligonucleotide
agccaaaaguguucucucc

SEQ ID NO: 2690378 - RNA, 19 nt, Artificial Sequence
  Description of Artificial Sequence: Synthetic oligonucleotide
uauuuacaagauacacaag

SEQ ID NO: 2690379 - RNA, 19 nt, Artificial Sequence
  Description of Artificial Sequence: Synthetic oligonucleotide
gucaaugucaacaaucuga

SEQ ID NO: 2690380 - RNA, 19 nt, Artificial Sequence
  Description of Artificial Sequence: Synthetic oligonucleotide
caagaauccaucuucaucu

SEQ ID NO: 2690381 - RNA, 19 nt, Artificial Sequence
  Description of Artificial Sequence: Synthetic oligonucleotide
ugucaacaaucugagagcc

SEQ ID NO: 2690382 - RNA, 19 nt, Artificial Sequence
  Description of Artificial Sequence: Synthetic oligonucleotide
uacuaaucuaaggaaauaa

SEQ ID NO: 2690383 - RNA, 19 nt, Artificial Sequence
  Description of Artificial Sequence: Synthetic oligonucleotide
gcaucuguguuccagagag

SEQ ID NO: 2690384 - RNA, 19 nt, Artificial Sequence
  Description of Artificial Sequence: Synthetic oligonucleotide
ucucuguauauaauuuacu

SEQ ID NO: 2690385 - RNA, 19 nt, Artificial Sequence
  Description of Artificial Sequence: Synthetic oligonucleotide
aguuggauccuuuuccuga

SEQ ID NO: 2690386 - RNA, 19 nt, Artificial Sequence
  Description of Artificial Sequence: Synthetic oligonucleotide
aauaaacccuuccaauaua

SEQ ID NO: 2690387 - RNA, 19 nt, Artificial Sequence
  Description of Artificial Sequence: Synthetic oligonucleotide
aggaaguuggauccuuuuc

SEQ ID NO: 2690388 - RNA, 19 nt, Artificial Sequence
  Description of Artificial Sequence: Synthetic oligonucleotide
ucuguguuccagagagugg

SEQ ID NO: 2690389 - RNA, 19 nt, Artificial Sequence
  Description of Artificial Sequence: Synthetic oligonucleotide
aggaacggugcaccuagcc

SEQ ID NO: 2690390 - RNA, 19 nt, Artificial Sequence
  Description of Artificial Sequence: Synthetic oligonucleotide
ggaaguuggauccuuuucc

SEQ ID NO: 2690391 - RNA, 19 nt, Artificial Sequence
  Description of Artificial Sequence: Synthetic oligonucleotide
aacaacaacggaggcggcg

SEQ ID NO: 2690392 - RNA, 19 nt, Artificial Sequence
  Description of Artificial Sequence: Synthetic oligonucleotide
uccacaugaacugagccac

SEQ ID NO: 2690393 - RNA, 19 nt, Artificial Sequence
  Description of Artificial Sequence: Synthetic oligonucleotide
acucggucgggauacuucg

SEQ ID NO: 2690394 - RNA, 19 nt, Artificial Sequence
  Description of Artificial Sequence: Synthetic oligonucleotide
uuccuucucguaaagcugu

SEQ ID NO: 2690395 - RNA, 19 nt, Artificial Sequence
  Description of Artificial Sequence: Synthetic oligonucleotide
uccaguuacaaauguacua

SEQ ID NO: 2690396 - RNA, 19 nt, Artificial Sequence
  Description of Artificial Sequence: Synthetic oligonucleotide
agcugucccauaguaaggc

SEQ ID NO: 2690397 - RNA, 19 nt, Artificial Sequence
  Description of Artificial Sequence: Synthetic oligonucleotide
gauacacaagcaggaacgg

SEQ ID NO: 2690398 - RNA, 19 nt, Artificial Sequence
  Description of Artificial Sequence: Synthetic oligonucleotide
cuuccaauauauuaagaaa

SEQ ID NO: 2690399 - RNA, 19 nt, Artificial Sequence
  Description of Artificial Sequence: Synthetic oligonucleotide
aacauccacuucauggcgg

SEQ ID NO: 2690400 - RNA, 19 nt, Artificial Sequence
  Description of Artificial Sequence: Synthetic oligonucleotide
agcgaccacaacaacaacg

SEQ ID NO: 2690401 - RNA, 19 nt, Artificial Sequence
  Description of Artificial Sequence: Synthetic oligonucleotide
uagccuucucagaaggaag

SEQ ID NO: 2690402 - RNA, 19 nt, Artificial Sequence
  Description of Artificial Sequence: Synthetic oligonucleotide
gaacggugcaccuagccca

SEQ ID NO: 2690403 - RNA, 19 nt, Artificial Sequence
  Description of Artificial Sequence: Synthetic oligonucleotide
ugagccgcggacuucggag

SEQ ID NO: 2690404 - RNA, 19 nt, Artificial Sequence
  Description of Artificial Sequence: Synthetic oligonucleotide
auuuacuaaucuaaggaaa

SEQ ID NO: 2690405 - RNA, 19 nt, Artificial Sequence
  Description of Artificial Sequence: Synthetic oligonucleotide
aaguuggauccuuuuccug

SEQ ID NO: 2690406 - RNA, 19 nt, Artificial Sequence
  Description of Artificial Sequence: Synthetic oligonucleotide
aucaccggaacucggucgg

SEQ ID NO: 2690407 - RNA, 19 nt, Artificial Sequence
  Description of Artificial Sequence: Synthetic oligonucleotide
gaugucagauggaaccagg

SEQ ID NO: 2690408 - RNA, 19 nt, Artificial Sequence
  Description of Artificial Sequence: Synthetic oligonucleotide
ugucaaugucaacaaucug

SEQ ID NO: 2690409 - RNA, 19 nt, Artificial Sequence
  Description of Artificial Sequence: Synthetic oligonucleotide
auuaagaaauaaauccagu

SEQ ID NO: 2690410 - RNA, 19 nt, Artificial Sequence
  Description of Artificial Sequence: Synthetic oligonucleotide
aacaaucugagagccugag

SEQ ID NO: 2690411 - RNA, 19 nt, Artificial Sequence
  Description of Artificial Sequence: Synthetic oligonucleotide
ugauccacaugaacugagc

SEQ ID NO: 2690412 - RNA, 19 nt, Artificial Sequence
  Description of Artificial Sequence: Synthetic oligonucleotide
uaaagcugucccauaguaa

SEQ ID NO: 2690413 - RNA, 19 nt, Artificial Sequence
  Description of Artificial Sequence: Synthetic oligonucleotide
acagccaguuauuuacaag

SEQ ID NO: 2690414 - RNA, 19 nt, Artificial Sequence
  Description of Artificial Sequence: Synthetic oligonucleotide
cacaaacaggaagauagcc

SEQ ID NO: 2690415 - RNA, 19 nt, Artificial Sequence
  Description of Artificial Sequence: Synthetic oligonucleotide
aucuguguuccagagagug

SEQ ID NO: 2690416 - RNA, 19 nt, Artificial Sequence
  Description of Artificial Sequence: Synthetic oligonucleotide
acaagauacacaagcagga

SEQ ID NO: 2690417 - RNA, 19 nt, Artificial Sequence
  Description of Artificial Sequence: Synthetic oligonucleotide
cagccaguuauuuacaaga

SEQ ID NO: 2690418 - RNA, 19 nt, Artificial Sequence
  Description of Artificial Sequence: Synthetic oligonucleotide
guacuaguaggucuaugug

SEQ ID NO: 2690419 - RNA, 19 nt, Artificial Sequence
  Description of Artificial Sequence: Synthetic oligonucleotide
acccuuccaauauauuaag

SEQ ID NO: 2690420 - RNA, 19 nt, Artificial Sequence
  Description of Artificial Sequence: Synthetic oligonucleotide
cacaacaacaacggaggcg

SEQ ID NO: 2690421 - RNA, 19 nt, Artificial Sequence
  Description of Artificial Sequence: Synthetic oligonucleotide
aacagccaguuauuuacaa

SEQ ID NO: 2690422 - RNA, 19 nt, Artificial Sequence
  Description of Artificial Sequence: Synthetic oligonucleotide
auccacaugaacugagcca

SEQ ID NO: 2690423 - RNA, 19 nt, Artificial Sequence
  Description of Artificial Sequence: Synthetic oligonucleotide
cuucgcucugaucuuggcg

SEQ ID NO: 2690424 - RNA, 19 nt, Artificial Sequence
  Description of Artificial Sequence: Synthetic oligonucleotide
acacaagcaggaacggugc

SEQ ID NO: 2690425 - RNA, 19 nt, Artificial Sequence
  Description of Artificial Sequence: Synthetic oligonucleotide
aaauguacuaguaggucua

SEQ ID NO: 2690426 - RNA, 19 nt, Artificial Sequence
  Description of Artificial Sequence: Synthetic oligonucleotide
cucuguauauaauuuacua

SEQ ID NO: 2690427 - RNA, 19 nt, Artificial Sequence
  Description of Artificial Sequence: Synthetic oligonucleotide
cugaugauccacaugaacu

SEQ ID NO: 2690428 - RNA, 19 nt, Artificial Sequence
  Description of Artificial Sequence: Synthetic oligonucleotide
aagcgaccacaacaacaac

SEQ ID NO: 2690429 - RNA, 19 nt, Artificial Sequence
  Description of Artificial Sequence: Synthetic oligonucleotide
acaacaacggaggcggcgg

SEQ ID NO: 2690430 - RNA, 19 nt, Artificial Sequence
  Description of Artificial Sequence: Synthetic oligonucleotide
auuccacgcaucuguguuc

SEQ ID NO: 2690431 - RNA, 19 nt, Artificial Sequence
  Description of Artificial Sequence: Synthetic oligonucleotide
aucuaaggaaauaaacccu

SEQ ID NO: 2690432 - RNA, 19 nt, Artificial Sequence
  Description of Artificial Sequence: Synthetic oligonucleotide
uuuugucaaugucaacaau

SEQ ID NO: 2690433 - RNA, 19 nt, Artificial Sequence
  Description of Artificial Sequence: Synthetic oligonucleotide
uacuucgcucugaucuugg

SEQ ID NO: 2690434 - RNA, 19 nt, Artificial Sequence
  Description of Artificial Sequence: Synthetic oligonucleotide
uccacuucauggcggcggg

SEQ ID NO: 2690435 - RNA, 19 nt, Artificial Sequence
  Description of Artificial Sequence: Synthetic oligonucleotide
uaguaaggcuggacugugg

SEQ ID NO: 2690436 - RNA, 19 nt, Artificial Sequence
  Description of Artificial Sequence: Synthetic oligonucleotide
uuccacaaucaccggaacu

SEQ ID NO: 2690437 - RNA, 19 nt, Artificial Sequence
  Description of Artificial Sequence: Synthetic oligonucleotide
cuaaggaaauaaacccuuc

SEQ ID NO: 2690438 - RNA, 19 nt, Artificial Sequence
  Description of Artificial Sequence: Synthetic oligonucleotide
aacucggucgggauacuuc

SEQ ID NO: 2690439 - RNA, 19 nt, Artificial Sequence
  Description of Artificial Sequence: Synthetic oligonucleotide
gaagcgaccacaacaacaa

SEQ ID NO: 2690440 - RNA, 19 nt, Artificial Sequence
  Description of Artificial Sequence: Synthetic oligonucleotide
agaaauaaauccaguuaca

SEQ ID NO: 2690441 - RNA, 19 nt, Artificial Sequence
  Description of Artificial Sequence: Synthetic oligonucleotide
ugaagaggcucugguaaag

SEQ ID NO: 2690442 - RNA, 19 nt, Artificial Sequence
  Description of Artificial Sequence: Synthetic oligonucleotide
agguacuuccuuuugucaa

SEQ ID NO: 2690443 - RNA, 19 nt, Artificial Sequence
  Description of Artificial Sequence: Synthetic oligonucleotide
guaggucuaugugaagagg

SEQ ID NO: 2690444 - RNA, 19 nt, Artificial Sequence
  Description of Artificial Sequence: Synthetic oligonucleotide
gaaaacagccaguuauuua

SEQ ID NO: 2690445 - RNA, 19 nt, Artificial Sequence
  Description of Artificial Sequence: Synthetic oligonucleotide
agaagcgaccacaacaaca

SEQ ID NO: 2690446 - RNA, 19 nt, Artificial Sequence
  Description of Artificial Sequence: Synthetic oligonucleotide
uucucguaaagcuguccca

SEQ ID NO: 2690447 - RNA, 19 nt, Artificial Sequence
  Description of Artificial Sequence: Synthetic oligonucleotide
ugcaccuagcccagcacug

SEQ ID NO: 2690448 - RNA, 19 nt, Artificial Sequence
  Description of Artificial Sequence: Synthetic oligonucleotide
guguucucuccacuguagg

SEQ ID NO: 2690449 - RNA, 19 nt, Artificial Sequence
  Description of Artificial Sequence: Synthetic oligonucleotide
acauacaagaauccaucuu

SEQ ID NO: 2690450 - RNA, 19 nt, Artificial Sequence
  Description of Artificial Sequence: Synthetic oligonucleotide
acuaguaggucuaugugaa

SEQ ID NO: 2690451 - RNA, 19 nt, Artificial Sequence
  Description of Artificial Sequence: Synthetic oligonucleotide
aagaggcucugguaaagua

SEQ ID NO: 2690452 - RNA, 19 nt, Artificial Sequence
  Description of Artificial Sequence: Synthetic oligonucleotide
aaguaacugaaaacagcca

SEQ ID NO: 2690453 - RNA, 19 nt, Artificial Sequence
  Description of Artificial Sequence: Synthetic oligonucleotide
ugucagauggaaccaggua

SEQ ID NO: 2690454 - RNA, 19 nt, Artificial Sequence
  Description of Artificial Sequence: Synthetic oligonucleotide
cugucccauaguaaggcug

SEQ ID NO: 2690455 - RNA, 19 nt, Artificial Sequence
  Description of Artificial Sequence: Synthetic oligonucleotide
aaggaaguuggauccuuuu

SEQ ID NO: 2690456 - RNA, 19 nt, Artificial Sequence
  Description of Artificial Sequence: Synthetic oligonucleotide
acuucggagaagcgaccac

SEQ ID NO: 2690457 - RNA, 19 nt, Artificial Sequence
  Description of Artificial Sequence: Synthetic oligonucleotide
cuuuugucaaugucaacaa

SEQ ID NO: 2690458 - RNA, 19 nt, Artificial Sequence
  Description of Artificial Sequence: Synthetic oligonucleotide
aaguguucucuccacugua

SEQ ID NO: 2690459 - RNA, 19 nt, Artificial Sequence
  Description of Artificial Sequence: Synthetic oligonucleotide
cuuaaacauccacuucaug

SEQ ID NO: 2690460 - RNA, 19 nt, Artificial Sequence
  Description of Artificial Sequence: Synthetic oligonucleotide
caaauguacuaguaggucu

SEQ ID NO: 2690461 - RNA, 19 nt, Artificial Sequence
  Description of Artificial Sequence: Synthetic oligonucleotide
caagcaggaacggugcacc

SEQ ID NO: 2690462 - RNA, 19 nt, Artificial Sequence
  Description of Artificial Sequence: Synthetic oligonucleotide
cacaaucaccggaacucgg

SEQ ID NO: 2690463 - RNA, 19 nt, Artificial Sequence
  Description of Artificial Sequence: Synthetic oligonucleotide
guaaagcugucccauagua

SEQ ID NO: 2690464 - RNA, 19 nt, Artificial Sequence
  Description of Artificial Sequence: Synthetic oligonucleotide
ugaucuuggcggauuccac

SEQ ID NO: 2690465 - RNA, 19 nt, Artificial Sequence
  Description of Artificial Sequence: Synthetic oligonucleotide
uuacuaaucuaaggaaaua

SEQ ID NO: 2690466 - RNA, 19 nt, Artificial Sequence
  Description of Artificial Sequence: Synthetic oligonucleotide
uucucagaaggaaguugga

SEQ ID NO: 2690467 - RNA, 19 nt, Artificial Sequence
  Description of Artificial Sequence: Synthetic oligonucleotide
ugaaaacagccaguuauuu

SEQ ID NO: 2690468 - RNA, 19 nt, Artificial Sequence
  Description of Artificial Sequence: Synthetic oligonucleotide
aaauccaguuacaaaugua

SEQ ID NO: 2690469 - RNA, 19 nt, Artificial Sequence
  Description of Artificial Sequence: Synthetic oligonucleotide
auaaacccuuccaauauau

SEQ ID NO: 2690470 - RNA, 19 nt, Artificial Sequence
  Description of Artificial Sequence: Synthetic oligonucleotide
gaagccaaaaguguucucu

SEQ ID NO: 2690471 - RNA, 19 nt, Artificial Sequence
  Description of Artificial Sequence: Synthetic oligonucleotide
aacugaaaacagccaguua

SEQ ID NO: 2690472 - RNA, 19 nt, Artificial Sequence
  Description of Artificial Sequence: Synthetic oligonucleotide
uuuccacaaucaccggaac

SEQ ID NO: 2690473 - RNA, 19 nt, Artificial Sequence
  Description of Artificial Sequence: Synthetic oligonucleotide
aacaacggaggcggcggcg

SEQ ID NO: 2690474 - RNA, 19 nt, Artificial Sequence
  Description of Artificial Sequence: Synthetic oligonucleotide
uucggagaagcgaccacaa

SEQ ID NO: 2690475 - RNA, 19 nt, Artificial Sequence
  Description of Artificial Sequence: Synthetic oligonucleotide
gcgaccacaacaacaacgg

SEQ ID NO: 2690476 - RNA, 19 nt, Artificial Sequence
  Description of Artificial Sequence: Synthetic oligonucleotide
auacaagaauccaucuuca

SEQ ID NO: 2690477 - RNA, 19 nt, Artificial Sequence
  Description of Artificial Sequence: Synthetic oligonucleotide
uuccacgcaucuguguucc

SEQ ID NO: 2690478 - RNA, 19 nt, Artificial Sequence
  Description of Artificial Sequence: Synthetic oligonucleotide
accagguacuuccuuuugu

SEQ ID NO: 2690479 - RNA, 19 nt, Artificial Sequence
  Description of Artificial Sequence: Synthetic oligonucleotide
auccacuucauggcggcgg

SEQ ID NO: 2690480 - RNA, 19 nt, Artificial Sequence
  Description of Artificial Sequence: Synthetic oligonucleotide
ucggucgggauacuucgcu

SEQ ID NO: 2690481 - RNA, 19 nt, Artificial Sequence
  Description of Artificial Sequence: Synthetic oligonucleotide
acugucuuguccacaaaca

SEQ ID NO: 2690482 - RNA, 19 nt, Artificial Sequence
  Description of Artificial Sequence: Synthetic oligonucleotide
acaggaagauagccuucuc

SEQ ID NO: 2690483 - RNA, 19 nt, Artificial Sequence
  Description of Artificial Sequence: Synthetic oligonucleotide
uacaagaauccaucuucau

SEQ ID NO: 2690484 - RNA, 19 nt, Artificial Sequence
  Description of Artificial Sequence: Synthetic oligonucleotide
gaaguuggauccuuuuccu

SEQ ID NO: 2690485 - RNA, 19 nt, Artificial Sequence
  Description of Artificial Sequence: Synthetic oligonucleotide
auaguaaggcuggacugug

SEQ ID NO: 2690486 - RNA, 19 nt, Artificial Sequence
  Description of Artificial Sequence: Synthetic oligonucleotide
ucucguaaagcugucccau

SEQ ID NO: 2690487 - RNA, 19 nt, Artificial Sequence
  Description of Artificial Sequence: Synthetic oligonucleotide
agauggaaccagguacuuc

SEQ ID NO: 2690488 - RNA, 19 nt, Artificial Sequence
  Description of Artificial Sequence: Synthetic oligonucleotide
caguuauuuacaagauaca

SEQ ID NO: 2690489 - RNA, 19 nt, Artificial Sequence
  Description of Artificial Sequence: Synthetic oligonucleotide
aguguucucuccacuguag

SEQ ID NO: 2690490 - RNA, 19 nt, Artificial Sequence
  Description of Artificial Sequence: Synthetic oligonucleotide
cuucauggcggcgggaggc

SEQ ID NO: 2690491 - RNA, 19 nt, Artificial Sequence
  Description of Artificial Sequence: Synthetic oligonucleotide
uaaacccuuccaauauauu

SEQ ID NO: 2690492 - RNA, 19 nt, Artificial Sequence
  Description of Artificial Sequence: Synthetic oligonucleotide
cuuuuccugaugauccaca

SEQ ID NO: 2690493 - RNA, 19 nt, Artificial Sequence
  Description of Artificial Sequence: Synthetic oligonucleotide
cuaugugaagaggcucugg

SEQ ID NO: 2690494 - RNA, 19 nt, Artificial Sequence
  Description of Artificial Sequence: Synthetic oligonucleotide
ggaacggugcaccuagccc

SEQ ID NO: 2690495 - RNA, 19 nt, Artificial Sequence
  Description of Artificial Sequence: Synthetic oligonucleotide
aguuacaaauguacuagua

SEQ ID NO: 2690496 - RNA, 19 nt, Artificial Sequence
  Description of Artificial Sequence: Synthetic oligonucleotide
acaaucugagagccugaga

SEQ ID NO: 2690497 - RNA, 19 nt, Artificial Sequence
  Description of Artificial Sequence: Synthetic oligonucleotide
ccacauacaagaauccauc

SEQ ID NO: 2690498 - RNA, 19 nt, Artificial Sequence
  Description of Artificial Sequence: Synthetic oligonucleotide
uuggauccuuuuccugaug

SEQ ID NO: 2690499 - RNA, 19 nt, Artificial Sequence
  Description of Artificial Sequence: Synthetic oligonucleotide
aauguacuaguaggucuau

SEQ ID NO: 2690500 - RNA, 19 nt, Artificial Sequence
  Description of Artificial Sequence: Synthetic oligonucleotide
cucugagccgcggacuucg

SEQ ID NO: 2690501 - RNA, 19 nt, Artificial Sequence
  Description of Artificial Sequence: Synthetic oligonucleotide
caggaagauagccuucuca

SEQ ID NO: 2690502 - RNA, 19 nt, Artificial Sequence
  Description of Artificial Sequence: Synthetic oligonucleotide
ucugaucuuggcggauucc

SEQ ID NO: 2690503 - RNA, 19 nt, Artificial Sequence
  Description of Artificial Sequence: Synthetic oligonucleotide
uggcggauuccacgcaucu

SEQ ID NO: 2690504 - RNA, 19 nt, Artificial Sequence
  Description of Artificial Sequence: Synthetic oligonucleotide
ucuuggcggauuccacgca

SEQ ID NO: 2690505 - RNA, 19 nt, Artificial Sequence
  Description of Artificial Sequence: Synthetic oligonucleotide
guguuccagagaguggucc

SEQ ID NO: 2690506 - RNA, 19 nt, Artificial Sequence
  Description of Artificial Sequence: Synthetic oligonucleotide
auccaguuacaaauguacu

SEQ ID NO: 2690507 - RNA, 19 nt, Artificial Sequence
  Description of Artificial Sequence: Synthetic oligonucleotide
aagcaggaacggugcaccu

SEQ ID NO: 2690508 - RNA, 19 nt, Artificial Sequence
  Description of Artificial Sequence: Synthetic oligonucleotide
ggaaauaaacccuuccaau

SEQ ID NO: 2690509 - RNA, 19 nt, Artificial Sequence
  Description of Artificial Sequence: Synthetic oligonucleotide
gagaagcgaccacaacaac

SEQ ID NO: 2690510 - RNA, 19 nt, Artificial Sequence
  Description of Artificial Sequence: Synthetic oligonucleotide
gauuccacgcaucuguguu

SEQ ID NO: 2690511 - RNA, 19 nt, Artificial Sequence
  Description of Artificial Sequence: Synthetic oligonucleotide
acaacggaggcggcggcgg

SEQ ID NO: 2690512 - RNA, 19 nt, Artificial Sequence
  Description of Artificial Sequence: Synthetic oligonucleotide
caaucaccggaacucgguc

SEQ ID NO: 2690513 - RNA, 19 nt, Artificial Sequence
  Description of Artificial Sequence: Synthetic oligonucleotide
agagagugguccuccuuaa

SEQ ID NO: 2690514 - RNA, 19 nt, Artificial Sequence
  Description of Artificial Sequence: Synthetic oligonucleotide
uguguuccagagagugguc

SEQ ID NO: 2690515 - RNA, 19 nt, Artificial Sequence
  Description of Artificial Sequence: Synthetic oligonucleotide
augaacugagccacaguga

SEQ ID NO: 2690516 - RNA, 19 nt, Artificial Sequence
  Description of Artificial Sequence: Synthetic oligonucleotide
agaggcucugguaaaguaa

SEQ ID NO: 2690517 - RNA, 19 nt, Artificial Sequence
  Description of Artificial Sequence: Synthetic oligonucleotide
auacuucgcucugaucuug

SEQ ID NO: 2690518 - RNA, 19 nt, Artificial Sequence
  Description of Artificial Sequence: Synthetic oligonucleotide
cacuucauggcggcgggag

SEQ ID NO: 2690519 - RNA, 19 nt, Artificial Sequence
  Description of Artificial Sequence: Synthetic oligonucleotide
acaaucaccggaacucggu

SEQ ID NO: 2690520 - RNA, 19 nt, Artificial Sequence
  Description of Artificial Sequence: Synthetic oligonucleotide
gguccucagaagccaaaag

SEQ ID NO: 2690521 - RNA, 19 nt, Artificial Sequence
  Description of Artificial Sequence: Synthetic oligonucleotide
augugaagaggcucuggua

SEQ ID NO: 2690522 - RNA, 19 nt, Artificial Sequence
  Description of Artificial Sequence: Synthetic oligonucleotide
guacuuccuuuugucaaug

SEQ ID NO: 2690523 - RNA, 19 nt, Artificial Sequence
  Description of Artificial Sequence: Synthetic oligonucleotide
auacacaagcaggaacggu

SEQ ID NO: 2690524 - RNA, 19 nt, Artificial Sequence
  Description of Artificial Sequence: Synthetic oligonucleotide
ucggagaagcgaccacaac

SEQ ID NO: 2690525 - RNA, 19 nt, Artificial Sequence
  Description of Artificial Sequence: Synthetic oligonucleotide
aacggugcaccuagcccag

SEQ ID NO: 2690526 - RNA, 19 nt, Artificial Sequence
  Description of Artificial Sequence: Synthetic oligonucleotide
cagguacuuccuuuuguca

SEQ ID NO: 2690527 - RNA, 19 nt, Artificial Sequence
  Description of Artificial Sequence: Synthetic oligonucleotide
ccugaugauccacaugaac

SEQ ID NO: 2690528 - RNA, 19 nt, Artificial Sequence
  Description of Artificial Sequence: Synthetic oligonucleotide
uguccacaaacaggaagau

SEQ ID NO: 2690529 - RNA, 19 nt, Artificial Sequence
  Description of Artificial Sequence: Synthetic oligonucleotide
agccuucucagaaggaagu

SEQ ID NO: 2690530 - RNA, 19 nt, Artificial Sequence
  Description of Artificial Sequence: Synthetic oligonucleotide
ucugagccgcggacuucgg

SEQ ID NO: 2690531 - RNA, 19 nt, Artificial Sequence
  Description of Artificial Sequence: Synthetic oligonucleotide
gacuucggagaagcgacca

SEQ ID NO: 2690532 - RNA, 19 nt, Artificial Sequence
  Description of Artificial Sequence: Synthetic oligonucleotide
cucugaucuuggcggauuc

SEQ ID NO: 2690533 - RNA, 19 nt, Artificial Sequence
  Description of Artificial Sequence: Synthetic oligonucleotide
gauagccuucucagaagga

SEQ ID NO: 2690534 - RNA, 19 nt, Artificial Sequence
  Description of Artificial Sequence: Synthetic oligonucleotide
agccggcucucugagccgc

SEQ ID NO: 2690535 - RNA, 19 nt, Artificial Sequence
  Description of Artificial Sequence: Synthetic oligonucleotide
ccuagcccagcacuggucc

SEQ ID NO: 2690536 - RNA, 19 nt, Artificial Sequence
  Description of Artificial Sequence: Synthetic oligonucleotide
ggaagauagccuucucaga

SEQ ID NO: 2690537 - RNA, 19 nt, Artificial Sequence
  Description of Artificial Sequence: Synthetic oligonucleotide
uuggcggauuccacgcauc

SEQ ID NO: 2690538 - RNA, 19 nt, Artificial Sequence
  Description of Artificial Sequence: Synthetic oligonucleotide
guaaggcuggacuguggga

SEQ ID NO: 2690539 - RNA, 19 nt, Artificial Sequence
  Description of Artificial Sequence: Synthetic oligonucleotide
aggucuaugugaagaggcu

SEQ ID NO: 2690540 - RNA, 19 nt, Artificial Sequence
  Description of Artificial Sequence: Synthetic oligonucleotide
gacggagccggcucucuga

SEQ ID NO: 2690541 - RNA, 19 nt, Artificial Sequence
  Description of Artificial Sequence: Synthetic oligonucleotide
gugaugucagauggaacca

SEQ ID NO: 2690542 - RNA, 19 nt, Artificial Sequence
  Description of Artificial Sequence: Synthetic oligonucleotide
ucccauaguaaggcuggac

SEQ ID NO: 2690543 - RNA, 19 nt, Artificial Sequence
  Description of Artificial Sequence: Synthetic oligonucleotide
ucugagagccugagacuuu

SEQ ID NO: 2690544 - RNA, 19 nt, Artificial Sequence
  Description of Artificial Sequence: Synthetic oligonucleotide
cacauacaagaauccaucu

SEQ ID NO: 2690545 - RNA, 19 nt, Artificial Sequence
  Description of Artificial Sequence: Synthetic oligonucleotide
uggaaccagguacuuccuu

SEQ ID NO: 2690546 - RNA, 19 nt, Artificial Sequence
  Description of Artificial Sequence: Synthetic oligonucleotide
cuucggagaagcgaccaca

SEQ ID NO: 2690547 - RNA, 19 nt, Artificial Sequence
  Description of Artificial Sequence: Synthetic oligonucleotide
gucgggauacuucgcucug

SEQ ID NO: 2690548 - RNA, 19 nt, Artificial Sequence
  Description of Artificial Sequence: Synthetic oligonucleotide
ugguccucagaagccaaaa

SEQ ID NO: 2690549 - RNA, 19 nt, Artificial Sequence
  Description of Artificial Sequence: Synthetic oligonucleotide
ggagaagcgaccacaacaa

SEQ ID NO: 2690550 - RNA, 19 nt, Artificial Sequence
  Description of Artificial Sequence: Synthetic oligonucleotide
auguacuaguaggucuaug

SEQ ID NO: 2690551 - RNA, 19 nt, Artificial Sequence
  Description of Artificial Sequence: Synthetic oligonucleotide
uccuucucguaaagcuguc

SEQ ID NO: 2690552 - RNA, 19 nt, Artificial Sequence
  Description of Artificial Sequence: Synthetic oligonucleotide
gaggcgacggagccggcuc

SEQ ID NO: 2690553 - RNA, 19 nt, Artificial Sequence
  Description of Artificial Sequence: Synthetic oligonucleotide
ccacaaacaggaagauagc

SEQ ID NO: 2690554 - RNA, 19 nt, Artificial Sequence
  Description of Artificial Sequence: Synthetic oligonucleotide
gauacuucgcucugaucuu

SEQ ID NO: 2690555 - RNA, 19 nt, Artificial Sequence
  Description of Artificial Sequence: Synthetic oligonucleotide
gugaagaggcucugguaaa

SEQ ID NO: 2690556 - RNA, 19 nt, Artificial Sequence
  Description of Artificial Sequence: Synthetic oligonucleotide
cagcacugguccucagaag

SEQ ID NO: 2690557 - RNA, 19 nt, Artificial Sequence
  Description of Artificial Sequence: Synthetic oligonucleotide
cucggucgggauacuucgc

SEQ ID NO: 2690558 - RNA, 19 nt, Artificial Sequence
  Description of Artificial Sequence: Synthetic oligonucleotide
agaaggaaguuggauccuu

SEQ ID NO: 2690559 - RNA, 19 nt, Artificial Sequence
  Description of Artificial Sequence: Synthetic oligonucleotide
gagccggcucucugagccg

SEQ ID NO: 2690560 - RNA, 19 nt, Artificial Sequence
  Description of Artificial Sequence: Synthetic oligonucleotide
cucagaagccaaaaguguu

SEQ ID NO: 2690561 - RNA, 19 nt, Artificial Sequence
  Description of Artificial Sequence: Synthetic oligonucleotide
cagagagugguccuccuua

SEQ ID NO: 2690562 - RNA, 19 nt, Artificial Sequence
  Description of Artificial Sequence: Synthetic oligonucleotide
gucuaugugaagaggcucu

SEQ ID NO: 2690563 - RNA, 19 nt, Artificial Sequence
  Description of Artificial Sequence: Synthetic oligonucleotide
ucucuccacuguaggccac

SEQ ID NO: 2690564 - RNA, 19 nt, Artificial Sequence
  Description of Artificial Sequence: Synthetic oligonucleotide
agccaguuauuuacaagau

SEQ ID NO: 2690565 - RNA, 19 nt, Artificial Sequence
  Description of Artificial Sequence: Synthetic oligonucleotide
caaugucaacaaucugaga

SEQ ID NO: 2690566 - RNA, 19 nt, Artificial Sequence
  Description of Artificial Sequence: Synthetic oligonucleotide
guggcagcgacgacuacuc

SEQ ID NO: 2690567 - RNA, 19 nt, Artificial Sequence
  Description of Artificial Sequence: Synthetic oligonucleotide
cacagugaugucagaugga

SEQ ID NO: 2690568 - RNA, 19 nt, Artificial Sequence
  Description of Artificial Sequence: Synthetic oligonucleotide
caacaacaacggaggcggc

SEQ ID NO: 2690569 - RNA, 19 nt, Artificial Sequence
  Description of Artificial Sequence: Synthetic oligonucleotide
cuguguuccagagaguggu

SEQ ID NO: 2690570 - RNA, 19 nt, Artificial Sequence
  Description of Artificial Sequence: Synthetic oligonucleotide
ucgggauacuucgcucuga

SEQ ID NO: 2690571 - RNA, 19 nt, Artificial Sequence
  Description of Artificial Sequence: Synthetic oligonucleotide
caagauacacaagcaggaa

SEQ ID NO: 2690572 - RNA, 19 nt, Artificial Sequence
  Description of Artificial Sequence: Synthetic oligonucleotide
ggucuaugugaagaggcuc

SEQ ID NO: 2690573 - RNA, 19 nt, Artificial Sequence
  Description of Artificial Sequence: Synthetic oligonucleotide
ugggacugucuuguccaca

SEQ ID NO: 2690574 - RNA, 19 nt, Artificial Sequence
  Description of Artificial Sequence: Synthetic oligonucleotide
caacaacggaggcggcggc

SEQ ID NO: 2690575 - RNA, 19 nt, Artificial Sequence
  Description of Artificial Sequence: Synthetic oligonucleotide
cggacuucggagaagcgac

SEQ ID NO: 2690576 - RNA, 19 nt, Artificial Sequence
  Description of Artificial Sequence: Synthetic oligonucleotide
cauaguaaggcuggacugu

SEQ ID NO: 2690577 - RNA, 19 nt, Artificial Sequence
  Description of Artificial Sequence: Synthetic oligonucleotide
caacaaucugagagccuga

SEQ ID NO: 2690578 - RNA, 19 nt, Artificial Sequence
  Description of Artificial Sequence: Synthetic oligonucleotide
accuagcccagcacugguc

SEQ ID NO: 2690579 - RNA, 19 nt, Artificial Sequence
  Description of Artificial Sequence: Synthetic oligonucleotide
ucaccggaacucggucggg

SEQ ID NO: 2690580 - RNA, 19 nt, Artificial Sequence
  Description of Artificial Sequence: Synthetic oligonucleotide
gaaccagguacuuccuuuu

SEQ ID NO: 2690581 - RNA, 19 nt, Artificial Sequence
  Description of Artificial Sequence: Synthetic oligonucleotide
gagccgcggacuucggaga

SEQ ID NO: 2690582 - RNA, 19 nt, Artificial Sequence
  Description of Artificial Sequence: Synthetic oligonucleotide
aacggaggcggcggcggug

SEQ ID NO: 2690583 - RNA, 19 nt, Artificial Sequence
  Description of Artificial Sequence: Synthetic oligonucleotide
accggaacucggucgggau

SEQ ID NO: 2690584 - RNA, 19 nt, Artificial Sequence
  Description of Artificial Sequence: Synthetic oligonucleotide
gagagugguccuccuuaaa

SEQ ID NO: 2690585 - RNA, 19 nt, Artificial Sequence
  Description of Artificial Sequence: Synthetic oligonucleotide
gggacugucuuguccacaa

SEQ ID NO: 2690586 - RNA, 19 nt, Artificial Sequence
  Description of Artificial Sequence: Synthetic oligonucleotide
gaagaggcucugguaaagu

SEQ ID NO: 2690587 - RNA, 19 nt, Artificial Sequence
  Description of Artificial Sequence: Synthetic oligonucleotide
cauccacuucauggcggcg

SEQ ID NO: 2690588 - RNA, 19 nt, Artificial Sequence
  Description of Artificial Sequence: Synthetic oligonucleotide
guuggauccuuuuccugau

SEQ ID NO: 2690589 - RNA, 19 nt, Artificial Sequence
  Description of Artificial Sequence: Synthetic oligonucleotide
cggagaagcgaccacaaca

SEQ ID NO: 2690590 - RNA, 19 nt, Artificial Sequence
  Description of Artificial Sequence: Synthetic oligonucleotide
caggaacggugcaccuagc

SEQ ID NO: 2690591 - RNA, 19 nt, Artificial Sequence
  Description of Artificial Sequence: Synthetic oligonucleotide
gcggauuccacgcaucugu

SEQ ID NO: 2690592 - RNA, 19 nt, Artificial Sequence
  Description of Artificial Sequence: Synthetic oligonucleotide
ccacaacaacaacggaggc

SEQ ID NO: 2690593 - RNA, 19 nt, Artificial Sequence
  Description of Artificial Sequence: Synthetic oligonucleotide
gccaguuauuuacaagaua

SEQ ID NO: 2690594 - RNA, 19 nt, Artificial Sequence
  Description of Artificial Sequence: Synthetic oligonucleotide
uagcccagcacugguccuc

SEQ ID NO: 2690595 - RNA, 19 nt, Artificial Sequence
  Description of Artificial Sequence: Synthetic oligonucleotide
auggcggcgggaggcgacg

SEQ ID NO: 2690596 - RNA, 19 nt, Artificial Sequence
  Description of Artificial Sequence: Synthetic oligonucleotide
gugcaccuagcccagcacu

SEQ ID NO: 2690597 - RNA, 19 nt, Artificial Sequence
  Description of Artificial Sequence: Synthetic oligonucleotide
ggcgggaggcgacggagcc

SEQ ID NO: 2690598 - RNA, 19 nt, Artificial Sequence
  Description of Artificial Sequence: Synthetic oligonucleotide
cacaagcaggaacggugca

SEQ ID NO: 2690599 - RNA, 19 nt, Artificial Sequence
  Description of Artificial Sequence: Synthetic oligonucleotide
cacugguccucagaagcca

SEQ ID NO: 2690600 - RNA, 19 nt, Artificial Sequence
  Description of Artificial Sequence: Synthetic oligonucleotide
auggaaccagguacuuccu

SEQ ID NO: 2690601 - RNA, 19 nt, Artificial Sequence
  Description of Artificial Sequence: Synthetic oligonucleotide
gguacuuccuuuugucaau

SEQ ID NO: 2690602 - RNA, 19 nt, Artificial Sequence
  Description of Artificial Sequence: Synthetic oligonucleotide
gcacugguccucagaagcc

SEQ ID NO: 2690603 - RNA, 19 nt, Artificial Sequence
  Description of Artificial Sequence: Synthetic oligonucleotide
agccgcggacuucggagaa

SEQ ID NO: 2690604 - RNA, 19 nt, Artificial Sequence
  Description of Artificial Sequence: Synthetic oligonucleotide
ggucgggauacuucgcucu

SEQ ID NO: 2690605 - RNA, 19 nt, Artificial Sequence
  Description of Artificial Sequence: Synthetic oligonucleotide
ggaaccagguacuuccuuu

SEQ ID NO: 2690606 - RNA, 19 nt, Artificial Sequence
  Description of Artificial Sequence: Synthetic oligonucleotide
cucguaaagcugucccaua

SEQ ID NO: 2690607 - RNA, 19 nt, Artificial Sequence
  Description of Artificial Sequence: Synthetic oligonucleotide
cccauaguaaggcuggacu

SEQ ID NO: 2690608 - RNA, 19 nt, Artificial Sequence
  Description of Artificial Sequence: Synthetic oligonucleotide
ccuucucguaaagcugucc

SEQ ID NO: 2690609 - RNA, 19 nt, Artificial Sequence
  Description of Artificial Sequence: Synthetic oligonucleotide
aggcucugguaaaguaacu

SEQ ID NO: 2690610 - RNA, 19 nt, Artificial Sequence
  Description of Artificial Sequence: Synthetic oligonucleotide
uccacgcaucuguguucca

SEQ ID NO: 2690611 - RNA, 19 nt, Artificial Sequence
  Description of Artificial Sequence: Synthetic oligonucleotide
ucucugagccgcggacuuc

SEQ ID NO: 2690612 - RNA, 19 nt, Artificial Sequence
  Description of Artificial Sequence: Synthetic oligonucleotide
ccucagaagccaaaagugu

SEQ ID NO: 2690613 - RNA, 19 nt, Artificial Sequence
  Description of Artificial Sequence: Synthetic oligonucleotide
ccagcacugguccucagaa

SEQ ID NO: 2690614 - RNA, 19 nt, Artificial Sequence
  Description of Artificial Sequence: Synthetic oligonucleotide
gaaggaaguuggauccuuu

SEQ ID NO: 2690615 - RNA, 19 nt, Artificial Sequence
  Description of Artificial Sequence: Synthetic oligonucleotide
ggacuucggagaagcgacc

SEQ ID NO: 2690616 - RNA, 19 nt, Artificial Sequence
  Description of Artificial Sequence: Synthetic oligonucleotide
cccuuccaauauauuaaga

SEQ ID NO: 2690617 - RNA, 19 nt, Artificial Sequence
  Description of Artificial Sequence: Synthetic oligonucleotide
guccacaaacaggaagaua

SEQ ID NO: 2690618 - RNA, 19 nt, Artificial Sequence
  Description of Artificial Sequence: Synthetic oligonucleotide
gcggacuucggagaagcga

SEQ ID NO: 2690619 - RNA, 19 nt, Artificial Sequence
  Description of Artificial Sequence: Synthetic oligonucleotide
gggauacuucgcucugauc

SEQ ID NO: 2690620 - RNA, 19 nt, Artificial Sequence
  Description of Artificial Sequence: Synthetic oligonucleotide
cuuggcggauuccacgcau

SEQ ID NO: 2690621 - RNA, 19 nt, Artificial Sequence
  Description of Artificial Sequence: Synthetic oligonucleotide
agcccagcacugguccuca

SEQ ID NO: 2690622 - RNA, 19 nt, Artificial Sequence
  Description of Artificial Sequence: Synthetic oligonucleotide
gccacauacaagaauccau

SEQ ID NO: 2690623 - RNA, 19 nt, Artificial Sequence
  Description of Artificial Sequence: Synthetic oligonucleotide
ccuccuuaaacauccacuu

SEQ ID NO: 2690624 - RNA, 19 nt, Artificial Sequence
  Description of Artificial Sequence: Synthetic oligonucleotide
cggaacucggucgggauac

SEQ ID NO: 2690625 - RNA, 19 nt, Artificial Sequence
  Description of Artificial Sequence: Synthetic oligonucleotide
ccgcggacuucggagaagc

SEQ ID NO: 2690626 - RNA, 19 nt, Artificial Sequence
  Description of Artificial Sequence: Synthetic oligonucleotide
ggauuccacgcaucugugu

SEQ ID NO: 2690627 - RNA, 19 nt, Artificial Sequence
  Description of Artificial Sequence: Synthetic oligonucleotide
gguggcagcgacgacuacu

SEQ ID NO: 2690628 - RNA, 19 nt, Artificial Sequence
  Description of Artificial Sequence: Synthetic oligonucleotide
gucaacaaucugagagccu

SEQ ID NO: 2690629 - RNA, 19 nt, Artificial Sequence
  Description of Artificial Sequence: Synthetic oligonucleotide
cgggaggcgacggagccgg

SEQ ID NO: 2690630 - RNA, 19 nt, Artificial Sequence
  Description of Artificial Sequence: Synthetic oligonucleotide
caucuguguuccagagagu

SEQ ID NO: 2690631 - RNA, 19 nt, Artificial Sequence
  Description of Artificial Sequence: Synthetic oligonucleotide
gucccauaguaaggcugga

SEQ ID NO: 2690632 - RNA, 19 nt, Artificial Sequence
  Description of Artificial Sequence: Synthetic oligonucleotide
cggauuccacgcaucugug

SEQ ID NO: 2690633 - RNA, 19 nt, Artificial Sequence
  Description of Artificial Sequence: Synthetic oligonucleotide
gcugucccauaguaaggcu

SEQ ID NO: 2690634 - RNA, 19 nt, Artificial Sequence
  Description of Artificial Sequence: Synthetic oligonucleotide
cuagcccagcacugguccu

SEQ ID NO: 2690635 - RNA, 19 nt, Artificial Sequence
  Description of Artificial Sequence: Synthetic oligonucleotide
caccggaacucggucggga

SEQ ID NO: 2690636 - RNA, 19 nt, Artificial Sequence
  Description of Artificial Sequence: Synthetic oligonucleotide
cucucugagccgcggacuu

SEQ ID NO: 2690637 - RNA, 19 nt, Artificial Sequence
  Description of Artificial Sequence: Synthetic oligonucleotide
cagaaggaaguuggauccu

SEQ ID NO: 2690638 - RNA, 19 nt, Artificial Sequence
  Description of Artificial Sequence: Synthetic oligonucleotide
gaacucggucgggauacuu

SEQ ID NO: 2690639 - RNA, 19 nt, Artificial Sequence
  Description of Artificial Sequence: Synthetic oligonucleotide
caccuagcccagcacuggu

SEQ ID NO: 2690640 - RNA, 19 nt, Artificial Sequence
  Description of Artificial Sequence: Synthetic oligonucleotide
cugagagccugagacuuuu

SEQ ID NO: 2690641 - RNA, 19 nt, Artificial Sequence
  Description of Artificial Sequence: Synthetic oligonucleotide
gcgggaggcgacggagccg

SEQ ID NO: 2690642 - RNA, 19 nt, Artificial Sequence
  Description of Artificial Sequence: Synthetic oligonucleotide
cuccacuguaggccacaua

SEQ ID NO: 2690643 - RNA, 19 nt, Artificial Sequence
  Description of Artificial Sequence: Synthetic oligonucleotide
cgcggacuucggagaagcg

SEQ ID NO: 2690644 - RNA, 19 nt, Artificial Sequence
  Description of Artificial Sequence: Synthetic oligonucleotide
cggucgggauacuucgcuc

SEQ ID NO: 2690645 - RNA, 19 nt, Artificial Sequence
  Description of Artificial Sequence: Synthetic oligonucleotide
gccgcggacuucggagaag

SEQ ID NO: 2690646 - RNA, 19 nt, Artificial Sequence
  Description of Artificial Sequence: Synthetic oligonucleotide
cguaaagcugucccauagu

SEQ ID NO: 2690647 - RNA, 19 nt, Artificial Sequence
  Description of Artificial Sequence: Synthetic oligonucleotide
ccggcucucugagccgcgg

SEQ ID NO: 2690648 - RNA, 19 nt, Artificial Sequence
  Description of Artificial Sequence: Synthetic oligonucleotide
cgcaucuguguuccagaga

SEQ ID NO: 2690649 - RNA, 19 nt, Artificial Sequence
  Description of Artificial Sequence: Synthetic oligonucleotide
gcgguggcagcgacgacua

SEQ ID NO: 2690650 - RNA, 19 nt, Artificial Sequence
  Description of Artificial Sequence: Synthetic oligonucleotide
cgaccacaacaacaacgga

SEQ ID NO: 2690651 - RNA, 19 nt, Artificial Sequence
  Description of Artificial Sequence: Synthetic oligonucleotide
cggcgggaggcgacggagc

SEQ ID NO: 2690652 - RNA, 19 nt, Artificial Sequence
  Description of Artificial Sequence: Synthetic oligonucleotide
ccggaacucggucgggaua

SEQ ID NO: 2690653 - RNA, 19 nt, Artificial Sequence
  Description of Artificial Sequence: Synthetic oligonucleotide
cgacggagccggcucucug

SEQ ID NO: 2690654 - RNA, 19 nt, Artificial Sequence
  Description of Artificial Sequence: Synthetic oligonucleotide
ggcgacggagccggcucuc

SEQ ID NO: 2690655 - RNA, 19 nt, Artificial Sequence
  Description of Artificial Sequence: Synthetic oligonucleotide
cggagccggcucucugagc

SEQ ID NO: 2690656 - RNA, 19 nt, Artificial Sequence
  Description of Artificial Sequence: Synthetic oligonucleotide
caacggaggcggcggcggu

SEQ ID NO: 2690657 - RNA, 19 nt, Artificial Sequence
  Description of Artificial Sequence: Synthetic oligonucleotide
ggaggcgacggagccggcu

SEQ ID NO: 2690658 - RNA, 19 nt, Artificial Sequence
  Description of Artificial Sequence: Synthetic oligonucleotide
gcucugaucuuggcggauu

SEQ ID NO: 2690659 - RNA, 19 nt, Artificial Sequence
  Description of Artificial Sequence: Synthetic oligonucleotide
ggaacucggucgggauacu

SEQ ID NO: 2690660 - RNA, 19 nt, Artificial Sequence
  Description of Artificial Sequence: Synthetic oligonucleotide
cgggauacuucgcucugau

SEQ ID NO: 2690661 - RNA, 19 nt, Artificial Sequence
  Description of Artificial Sequence: Synthetic oligonucleotide
ggcuggacugugggacugu

SEQ ID NO: 2690662 - RNA, 19 nt, Artificial Sequence
  Description of Artificial Sequence: Synthetic oligonucleotide
ccagagagugguccuccuu

SEQ ID NO: 2690663 - RNA, 19 nt, Artificial Sequence
  Description of Artificial Sequence: Synthetic oligonucleotide
gggaggcgacggagccggc

SEQ ID NO: 2690664 - RNA, 19 nt, Artificial Sequence
  Description of Artificial Sequence: Synthetic oligonucleotide
gcgacggagccggcucucu

SEQ ID NO: 2690665 - RNA, 19 nt, Artificial Sequence
  Description of Artificial Sequence: Synthetic oligonucleotide
cggcgguggcagcgacgac

SEQ ID NO: 2690666 - RNA, 19 nt, Artificial Sequence
  Description of Artificial Sequence: Synthetic oligonucleotide
uggaaaauaauuccagcag

SEQ ID NO: 2690667 - RNA, 19 nt, Artificial Sequence
  Description of Artificial Sequence: Synthetic oligonucleotide
aaaucuagcuucaacuugg

SEQ ID NO: 2690668 - RNA, 19 nt, Artificial Sequence
  Description of Artificial Sequence: Synthetic oligonucleotide
aacaccaccacuuuccggu

SEQ ID NO: 2690669 - RNA, 19 nt, Artificial Sequence
  Description of Artificial Sequence: Synthetic oligonucleotide
uaggccgaagauuacagcg

SEQ ID NO: 2690670 - RNA, 19 nt, Artificial Sequence
  Description of Artificial Sequence: Synthetic oligonucleotide
aaagcucucuaccacaggu

SEQ ID NO: 2690671 - RNA, 19 nt, Artificial Sequence
  Description of Artificial Sequence: Synthetic oligonucleotide
guucauuucucuuuguuug

SEQ ID NO: 2690672 - RNA, 19 nt, Artificial Sequence
  Description of Artificial Sequence: Synthetic oligonucleotide
aagauuacagcguugucaa

SEQ ID NO: 2690673 - RNA, 19 nt, Artificial Sequence
  Description of Artificial Sequence: Synthetic oligonucleotide
agcagaacaagacccaccg

SEQ ID NO: 2690674 - RNA, 19 nt, Artificial Sequence
  Description of Artificial Sequence: Synthetic oligonucleotide
ucugaagggaguaugucca

SEQ ID NO: 2690675 - RNA, 19 nt, Artificial Sequence
  Description of Artificial Sequence: Synthetic oligonucleotide
gaguguggaaaauaauucc

SEQ ID NO: 2690676 - RNA, 19 nt, Artificial Sequence
  Description of Artificial Sequence: Synthetic oligonucleotide
ggaaaauaauuccagcagg

SEQ ID NO: 2690677 - RNA, 19 nt, Artificial Sequence
  Description of Artificial Sequence: Synthetic oligonucleotide
aaaaggccaguaugacucc

SEQ ID NO: 2690678 - RNA, 19 nt, Artificial Sequence
  Description of Artificial Sequence: Synthetic oligonucleotide
cuagcuucaacuugguaag

SEQ ID NO: 2690679 - RNA, 19 nt, Artificial Sequence
  Description of Artificial Sequence: Synthetic oligonucleotide
uucaacuugguaagcgggg

SEQ ID NO: 2690680 - RNA, 19 nt, Artificial Sequence
  Description of Artificial Sequence: Synthetic oligonucleotide
agacagcagaacaagaccc

SEQ ID NO: 2690681 - RNA, 19 nt, Artificial Sequence
  Description of Artificial Sequence: Synthetic oligonucleotide
gaaugcaaagcucucuacc

SEQ ID NO: 2690682 - RNA, 19 nt, Artificial Sequence
  Description of Artificial Sequence: Synthetic oligonucleotide
uguccaaaagggccuaggg

SEQ ID NO: 2690683 - RNA, 19 nt, Artificial Sequence
  Description of Artificial Sequence: Synthetic oligonucleotide
agggaguauguccaggugg

SEQ ID NO: 2690684 - RNA, 19 nt, Artificial Sequence
  Description of Artificial Sequence: Synthetic oligonucleotide
agaguguggaaaauaauuc

SEQ ID NO: 2690685 - RNA, 19 nt, Artificial Sequence
  Description of Artificial Sequence: Synthetic oligonucleotide
agaggcuguaacuugaggu

SEQ ID NO: 2690686 - RNA, 19 nt, Artificial Sequence
  Description of Artificial Sequence: Synthetic oligonucleotide
auuacagcguugucaaauc

SEQ ID NO: 2690687 - RNA, 19 nt, Artificial Sequence
  Description of Artificial Sequence: Synthetic oligonucleotide
gauacgaagcccugggcag

SEQ ID NO: 2690688 - RNA, 19 nt, Artificial Sequence
  Description of Artificial Sequence: Synthetic oligonucleotide
cagaacaagacccaccgag

SEQ ID NO: 2690689 - RNA, 19 nt, Artificial Sequence
  Description of Artificial Sequence: Synthetic oligonucleotide
uauguugcuccgcagucag

SEQ ID NO: 2690690 - RNA, 19 nt, Artificial Sequence
  Description of Artificial Sequence: Synthetic oligonucleotide
uucauuucucuuuguuugg

SEQ ID NO: 2690691 - RNA, 19 nt, Artificial Sequence
  Description of Artificial Sequence: Synthetic oligonucleotide
agcguugucaaaucuagcu

SEQ ID NO: 2690692 - RNA, 19 nt, Artificial Sequence
  Description of Artificial Sequence: Synthetic oligonucleotide
ucuaccacagguugggucu

SEQ ID NO: 2690693 - RNA, 19 nt, Artificial Sequence
  Description of Artificial Sequence: Synthetic oligonucleotide
cuucaacuugguaagcggg

SEQ ID NO: 2690694 - RNA, 19 nt, Artificial Sequence
  Description of Artificial Sequence: Synthetic oligonucleotide
gaacucaugaggucgcugc

SEQ ID NO: 2690695 - RNA, 19 nt, Artificial Sequence
  Description of Artificial Sequence: Synthetic oligonucleotide
auaggcaggagauggguag

SEQ ID NO: 2690696 - RNA, 19 nt, Artificial Sequence
  Description of Artificial Sequence: Synthetic oligonucleotide
aauaggccgaagauuacag

SEQ ID NO: 2690697 - RNA, 19 nt, Artificial Sequence
  Description of Artificial Sequence: Synthetic oligonucleotide
agguggaggauacgaagcc

SEQ ID NO: 2690698 - RNA, 19 nt, Artificial Sequence
  Description of Artificial Sequence: Synthetic oligonucleotide
aguauguccagguggagga

SEQ ID NO: 2690699 - RNA, 19 nt, Artificial Sequence
  Description of Artificial Sequence: Synthetic oligonucleotide
aggauggauaggaagagac

SEQ ID NO: 2690700 - RNA, 19 nt, Artificial Sequence
  Description of Artificial Sequence: Synthetic oligonucleotide
ucuuuguuugguccucggg

SEQ ID NO: 2690701 - RNA, 19 nt, Artificial Sequence
  Description of Artificial Sequence: Synthetic oligonucleotide
acagagacccacugggugg

SEQ ID NO: 2690702 - RNA, 19 nt, Artificial Sequence
  Description of Artificial Sequence: Synthetic oligonucleotide
gaggauacgaagcccuggg

SEQ ID NO: 2690703 - RNA, 19 nt, Artificial Sequence
  Description of Artificial Sequence: Synthetic oligonucleotide
accgagguagccccgagcg

SEQ ID NO: 2690704 - RNA, 19 nt, Artificial Sequence
  Description of Artificial Sequence: Synthetic oligonucleotide
uuuguuugguccucgggcu

SEQ ID NO: 2690705 - RNA, 19 nt, Artificial Sequence
  Description of Artificial Sequence: Synthetic oligonucleotide
ugucaaaucuagcuucaac

SEQ ID NO: 2690706 - RNA, 19 nt, Artificial Sequence
  Description of Artificial Sequence: Synthetic oligonucleotide
ucaaaucuagcuucaacuu

SEQ ID NO: 2690707 - RNA, 19 nt, Artificial Sequence
  Description of Artificial Sequence: Synthetic oligonucleotide
gguacagcaacucagccac

SEQ ID NO: 2690708 - RNA, 19 nt, Artificial Sequence
  Description of Artificial Sequence: Synthetic oligonucleotide
gagacccuuauguugcucc

SEQ ID NO: 2690709 - RNA, 19 nt, Artificial Sequence
  Description of Artificial Sequence: Synthetic oligonucleotide
ucccuuggaaugcaaagcu

SEQ ID NO: 2690710 - RNA, 19 nt, Artificial Sequence
  Description of Artificial Sequence: Synthetic oligonucleotide
caaaucuagcuucaacuug

SEQ ID NO: 2690711 - RNA, 19 nt, Artificial Sequence
  Description of Artificial Sequence: Synthetic oligonucleotide
uguugcuccgcagucagag

SEQ ID NO: 2690712 - RNA, 19 nt, Artificial Sequence
  Description of Artificial Sequence: Synthetic oligonucleotide
caggagacccuuauguugc

SEQ ID NO: 2690713 - RNA, 19 nt, Artificial Sequence
  Description of Artificial Sequence: Synthetic oligonucleotide
aggguacagcaacucagcc

SEQ ID NO: 2690714 - RNA, 19 nt, Artificial Sequence
  Description of Artificial Sequence: Synthetic oligonucleotide
augacaaggauggauagga

SEQ ID NO: 2690715 - RNA, 19 nt, Artificial Sequence
  Description of Artificial Sequence: Synthetic oligonucleotide
uugcuccgcagucagaggc

SEQ ID NO: 2690716 - RNA, 19 nt, Artificial Sequence
  Description of Artificial Sequence: Synthetic oligonucleotide
augcaaagcucucuaccac

SEQ ID NO: 2690717 - RNA, 19 nt, Artificial Sequence
  Description of Artificial Sequence: Synthetic oligonucleotide
gucugaagggaguaugucc

SEQ ID NO: 2690718 - RNA, 19 nt, Artificial Sequence
  Description of Artificial Sequence: Synthetic oligonucleotide
aacucagccacagcaugac

SEQ ID NO: 2690719 - RNA, 19 nt, Artificial Sequence
  Description of Artificial Sequence: Synthetic oligonucleotide
gacagagacccacugggug

SEQ ID NO: 2690720 - RNA, 19 nt, Artificial Sequence
  Description of Artificial Sequence: Synthetic oligonucleotide
acagguugggucuggaaca

SEQ ID NO: 2690721 - RNA, 19 nt, Artificial Sequence
  Description of Artificial Sequence: Synthetic oligonucleotide
gucaaaucuagcuucaacu

SEQ ID NO: 2690722 - RNA, 19 nt, Artificial Sequence
  Description of Artificial Sequence: Synthetic oligonucleotide
uuggcaauaggccgaagau

SEQ ID NO: 2690723 - RNA, 19 nt, Artificial Sequence
  Description of Artificial Sequence: Synthetic oligonucleotide
gaguauguccagguggagg

SEQ ID NO: 2690724 - RNA, 19 nt, Artificial Sequence
  Description of Artificial Sequence: Synthetic oligonucleotide
aaguucauuucucuuuguu

SEQ ID NO: 2690725 - RNA, 19 nt, Artificial Sequence
  Description of Artificial Sequence: Synthetic oligonucleotide
accacuuuccgguugucug

SEQ ID NO: 2690726 - RNA, 19 nt, Artificial Sequence
  Description of Artificial Sequence: Synthetic oligonucleotide
aacuugaggugcuggccag

SEQ ID NO: 2690727 - RNA, 19 nt, Artificial Sequence
  Description of Artificial Sequence: Synthetic oligonucleotide
agcucucuaccacagguug

SEQ ID NO: 2690728 - RNA, 19 nt, Artificial Sequence
  Description of Artificial Sequence: Synthetic oligonucleotide
uguccucauaggcaggaga

SEQ ID NO: 2690729 - RNA, 19 nt, Artificial Sequence
  Description of Artificial Sequence: Synthetic oligonucleotide
acucgcuguagucggcucc

SEQ ID NO: 2690730 - RNA, 19 nt, Artificial Sequence
  Description of Artificial Sequence: Synthetic oligonucleotide
gggacagagacccacuggg

SEQ ID NO: 2690731 - RNA, 19 nt, Artificial Sequence
  Description of Artificial Sequence: Synthetic oligonucleotide
auaauuccagcagggacag

SEQ ID NO: 2690732 - RNA, 19 nt, Artificial Sequence
  Description of Artificial Sequence: Synthetic oligonucleotide
cuuagcucuccucacuuug

SEQ ID NO: 2690733 - RNA, 19 nt, Artificial Sequence
  Description of Artificial Sequence: Synthetic oligonucleotide
aggcuguaacuugaggugc

SEQ ID NO: 2690734 - RNA, 19 nt, Artificial Sequence
  Description of Artificial Sequence: Synthetic oligonucleotide
cuugcuggucuucacucgg

SEQ ID NO: 2690735 - RNA, 19 nt, Artificial Sequence
  Description of Artificial Sequence: Synthetic oligonucleotide
aggauacgaagcccugggc

SEQ ID NO: 2690736 - RNA, 19 nt, Artificial Sequence
  Description of Artificial Sequence: Synthetic oligonucleotide
ugggucuggaacaccacca

SEQ ID NO: 2690737 - RNA, 19 nt, Artificial Sequence
  Description of Artificial Sequence: Synthetic oligonucleotide
agcuucaacuugguaagcg

SEQ ID NO: 2690738 - RNA, 19 nt, Artificial Sequence
  Description of Artificial Sequence: Synthetic oligonucleotide
uccaggucaccuccacucg

SEQ ID NO: 2690739 - RNA, 19 nt, Artificial Sequence
  Description of Artificial Sequence: Synthetic oligonucleotide
aggccaguaugacuccacc

SEQ ID NO: 2690740 - RNA, 19 nt, Artificial Sequence
  Description of Artificial Sequence: Synthetic oligonucleotide
uggaaugcaaagcucucua

SEQ ID NO: 2690741 - RNA, 19 nt, Artificial Sequence
  Description of Artificial Sequence: Synthetic oligonucleotide
uuacagcguugucaaaucu

SEQ ID NO: 2690742 - RNA, 19 nt, Artificial Sequence
  Description of Artificial Sequence: Synthetic oligonucleotide
ugaagggaguauguccagg

SEQ ID NO: 2690743 - RNA, 19 nt, Artificial Sequence
  Description of Artificial Sequence: Synthetic oligonucleotide
cuuauguugcuccgcaguc

SEQ ID NO: 2690744 - RNA, 19 nt, Artificial Sequence
  Description of Artificial Sequence: Synthetic oligonucleotide
agaacaagacccaccgagg

SEQ ID NO: 2690745 - RNA, 19 nt, Artificial Sequence
  Description of Artificial Sequence: Synthetic oligonucleotide
agucagaggcuguaacuug

SEQ ID NO: 2690746 - RNA, 19 nt, Artificial Sequence
  Description of Artificial Sequence: Synthetic oligonucleotide
gugaccaggguacagcaac

SEQ ID NO: 2690747 - RNA, 19 nt, Artificial Sequence
  Description of Artificial Sequence: Synthetic oligonucleotide
gaacaccaccacuuuccgg

SEQ ID NO: 2690748 - RNA, 19 nt, Artificial Sequence
  Description of Artificial Sequence: Synthetic oligonucleotide
uacagcguugucaaaucua

SEQ ID NO: 2690749 - RNA, 19 nt, Artificial Sequence
  Description of Artificial Sequence: Synthetic oligonucleotide
agggacagagacccacugg

SEQ ID NO: 2690750 - RNA, 19 nt, Artificial Sequence
  Description of Artificial Sequence: Synthetic oligonucleotide
agacccuuauguugcuccg

SEQ ID NO: 2690751 - RNA, 19 nt, Artificial Sequence
  Description of Artificial Sequence: Synthetic oligonucleotide
cucucuaccacagguuggg

SEQ ID NO: 2690752 - RNA, 19 nt, Artificial Sequence
  Description of Artificial Sequence: Synthetic oligonucleotide
uccucacuuuguccaaaag

SEQ ID NO: 2690753 - RNA, 19 nt, Artificial Sequence
  Description of Artificial Sequence: Synthetic oligonucleotide
agacccaccgagguagccc

SEQ ID NO: 2690754 - RNA, 19 nt, Artificial Sequence
  Description of Artificial Sequence: Synthetic oligonucleotide
caggguacagcaacucagc

SEQ ID NO: 2690755 - RNA, 19 nt, Artificial Sequence
  Description of Artificial Sequence: Synthetic oligonucleotide
agcagggacagagacccac

SEQ ID NO: 2690756 - RNA, 19 nt, Artificial Sequence
  Description of Artificial Sequence: Synthetic oligonucleotide
ucaugaggucgcugcagag

SEQ ID NO: 2690757 - RNA, 19 nt, Artificial Sequence
  Description of Artificial Sequence: Synthetic oligonucleotide
gccaguaugacuccaccag

SEQ ID NO: 2690758 - RNA, 19 nt, Artificial Sequence
  Description of Artificial Sequence: Synthetic oligonucleotide
uuguccaaaagggccuagg

SEQ ID NO: 2690759 - RNA, 19 nt, Artificial Sequence
  Description of Artificial Sequence: Synthetic oligonucleotide
cuccacucgcuguagucgg

SEQ ID NO: 2690760 - RNA, 19 nt, Artificial Sequence
  Description of Artificial Sequence: Synthetic oligonucleotide
uugcuggucuucacucggg

SEQ ID NO: 2690761 - RNA, 19 nt, Artificial Sequence
  Description of Artificial Sequence: Synthetic oligonucleotide
ucucuuuguuugguccucg

SEQ ID NO: 2690762 - RNA, 19 nt, Artificial Sequence
  Description of Artificial Sequence: Synthetic oligonucleotide
ugggagcccuuccagguca

SEQ ID NO: 2690763 - RNA, 19 nt, Artificial Sequence
  Description of Artificial Sequence: Synthetic oligonucleotide
guaacuugaggugcuggcc

SEQ ID NO: 2690764 - RNA, 19 nt, Artificial Sequence
  Description of Artificial Sequence: Synthetic oligonucleotide
cuuggcaauaggccgaaga

SEQ ID NO: 2690765 - RNA, 19 nt, Artificial Sequence
  Description of Artificial Sequence: Synthetic oligonucleotide
aacaagacccaccgaggua

SEQ ID NO: 2690766 - RNA, 19 nt, Artificial Sequence
  Description of Artificial Sequence: Synthetic oligonucleotide
cugaggaaguucauuucuc

SEQ ID NO: 2690767 - RNA, 19 nt, Artificial Sequence
  Description of Artificial Sequence: Synthetic oligonucleotide
aaggccaguaugacuccac

SEQ ID NO: 2690768 - RNA, 19 nt, Artificial Sequence
  Description of Artificial Sequence: Synthetic oligonucleotide
cuguagucggcucccuugg

SEQ ID NO: 2690769 - RNA, 19 nt, Artificial Sequence
  Description of Artificial Sequence: Synthetic oligonucleotide
uuauguugcuccgcaguca

SEQ ID NO: 2690770 - RNA, 19 nt, Artificial Sequence
  Description of Artificial Sequence: Synthetic oligonucleotide
ucauaggcaggagaugggu

SEQ ID NO: 2690771 - RNA, 19 nt, Artificial Sequence
  Description of Artificial Sequence: Synthetic oligonucleotide
guaugacuccaccaggaga

SEQ ID NO: 2690772 - RNA, 19 nt, Artificial Sequence
  Description of Artificial Sequence: Synthetic oligonucleotide
ccgguugucugucugaagg

SEQ ID NO: 2690773 - RNA, 19 nt, Artificial Sequence
  Description of Artificial Sequence: Synthetic oligonucleotide
caugugcaccuccagcgcc

SEQ ID NO: 2690774 - RNA, 19 nt, Artificial Sequence
  Description of Artificial Sequence: Synthetic oligonucleotide
ggacaugcagcugaggaag

SEQ ID NO: 2690775 - RNA, 19 nt, Artificial Sequence
  Description of Artificial Sequence: Synthetic oligonucleotide
uucacucgggucuuagcuc

SEQ ID NO: 2690776 - RNA, 19 nt, Artificial Sequence
  Description of Artificial Sequence: Synthetic oligonucleotide
uuuccgguugucugucuga

SEQ ID NO: 2690777 - RNA, 19 nt, Artificial Sequence
  Description of Artificial Sequence: Synthetic oligonucleotide
cauuucucuuuguuugguc

SEQ ID NO: 2690778 - RNA, 19 nt, Artificial Sequence
  Description of Artificial Sequence: Synthetic oligonucleotide
uuggaaugcaaagcucucu

SEQ ID NO: 2690779 - RNA, 19 nt, Artificial Sequence
  Description of Artificial Sequence: Synthetic oligonucleotide
aaggauggauaggaagaga

SEQ ID NO: 2690780 - RNA, 19 nt, Artificial Sequence
  Description of Artificial Sequence: Synthetic oligonucleotide
agcgccucggggugggagc

SEQ ID NO: 2690781 - RNA, 19 nt, Artificial Sequence
  Description of Artificial Sequence: Synthetic oligonucleotide
ucauuucucuuuguuuggu

SEQ ID NO: 2690782 - RNA, 19 nt, Artificial Sequence
  Description of Artificial Sequence: Synthetic oligonucleotide
acuuuguccaaaagggccu

SEQ ID NO: 2690783 - RNA, 19 nt, Artificial Sequence
  Description of Artificial Sequence: Synthetic oligonucleotide
ucuucacucgggucuuagc

SEQ ID NO: 2690784 - RNA, 19 nt, Artificial Sequence
  Description of Artificial Sequence: Synthetic oligonucleotide
uccaccaggagacccuuau

SEQ ID NO: 2690785 - RNA, 19 nt, Artificial Sequence
  Description of Artificial Sequence: Synthetic oligonucleotide
gauuacagcguugucaaau

SEQ ID NO: 2690786 - RNA, 19 nt, Artificial Sequence
  Description of Artificial Sequence: Synthetic oligonucleotide
cagcagaacaagacccacc

SEQ ID NO: 2690787 - RNA, 19 nt, Artificial Sequence
  Description of Artificial Sequence: Synthetic oligonucleotide
uguuugguccucgggcucc

SEQ ID NO: 2690788 - RNA, 19 nt, Artificial Sequence
  Description of Artificial Sequence: Synthetic oligonucleotide
uggaggauacgaagcccug

SEQ ID NO: 2690789 - RNA, 19 nt, Artificial Sequence
  Description of Artificial Sequence: Synthetic oligonucleotide
uccagguggaggauacgaa

SEQ ID NO: 2690790 - RNA, 19 nt, Artificial Sequence
  Description of Artificial Sequence: Synthetic oligonucleotide
cagcaacucagccacagca

SEQ ID NO: 2690791 - RNA, 19 nt, Artificial Sequence
  Description of Artificial Sequence: Synthetic oligonucleotide
cucgggcuccaccacagcc

SEQ ID NO: 2690792 - RNA, 19 nt, Artificial Sequence
  Description of Artificial Sequence: Synthetic oligonucleotide
cucuuuguuugguccucgg

SEQ ID NO: 2690793 - RNA, 19 nt, Artificial Sequence
  Description of Artificial Sequence: Synthetic oligonucleotide
auguccagguggaggauac

SEQ ID NO: 2690794 - RNA, 19 nt, Artificial Sequence
  Description of Artificial Sequence: Synthetic oligonucleotide
ugacaaggauggauaggaa

SEQ ID NO: 2690795 - RNA, 19 nt, Artificial Sequence
  Description of Artificial Sequence: Synthetic oligonucleotide
ggauacgaagcccugggca

SEQ ID NO: 2690796 - RNA, 19 nt, Artificial Sequence
  Description of Artificial Sequence: Synthetic oligonucleotide
cuguaacuugaggugcugg

SEQ ID NO: 2690797 - RNA, 19 nt, Artificial Sequence
  Description of Artificial Sequence: Synthetic oligonucleotide
agucggcucccuuggaaug

SEQ ID NO: 2690798 - RNA, 19 nt, Artificial Sequence
  Description of Artificial Sequence: Synthetic oligonucleotide
caaagcucucuaccacagg

SEQ ID NO: 2690799 - RNA, 19 nt, Artificial Sequence
  Description of Artificial Sequence: Synthetic oligonucleotide
ggaacaccaccacuuuccg

SEQ ID NO: 2690800 - RNA, 19 nt, Artificial Sequence
  Description of Artificial Sequence: Synthetic oligonucleotide
acccuuauguugcuccgca

SEQ ID NO: 2690801 - RNA, 19 nt, Artificial Sequence
  Description of Artificial Sequence: Synthetic oligonucleotide
accaggguacagcaacuca

SEQ ID NO: 2690802 - RNA, 19 nt, Artificial Sequence
  Description of Artificial Sequence: Synthetic oligonucleotide
cagaggcuguaacuugagg

SEQ ID NO: 2690803 - RNA, 19 nt, Artificial Sequence
  Description of Artificial Sequence: Synthetic oligonucleotide
uguggugaccaggguacag

SEQ ID NO: 2690804 - RNA, 19 nt, Artificial Sequence
  Description of Artificial Sequence: Synthetic oligonucleotide
gaacaagacccaccgaggu

SEQ ID NO: 2690805 - RNA, 19 nt, Artificial Sequence
  Description of Artificial Sequence: Synthetic oligonucleotide
gcaugacaaggauggauag

SEQ ID NO: 2690806 - RNA, 19 nt, Artificial Sequence
  Description of Artificial Sequence: Synthetic oligonucleotide
agcaugacaaggauggaua

SEQ ID NO: 2690807 - RNA, 19 nt, Artificial Sequence
  Description of Artificial Sequence: Synthetic oligonucleotide
caguaugacuccaccagga

SEQ ID NO: 2690808 - RNA, 19 nt, Artificial Sequence
  Description of Artificial Sequence: Synthetic oligonucleotide
ccaggguacagcaacucag

SEQ ID NO: 2690809 - RNA, 19 nt, Artificial Sequence
  Description of Artificial Sequence: Synthetic oligonucleotide
agcgccgggacaugcagcu

SEQ ID NO: 2690810 - RNA, 19 nt, Artificial Sequence
  Description of Artificial Sequence: Synthetic oligonucleotide
aaaggccaguaugacucca

SEQ ID NO: 2690811 - RNA, 19 nt, Artificial Sequence
  Description of Artificial Sequence: Synthetic oligonucleotide
ugacuccaccaggagaccc

SEQ ID NO: 2690812 - RNA, 19 nt, Artificial Sequence
  Description of Artificial Sequence: Synthetic oligonucleotide
cagaguguggaaaauaauu

SEQ ID NO: 2690813 - RNA, 19 nt, Artificial Sequence
  Description of Artificial Sequence: Synthetic oligonucleotide
ugcuggucuucacucgggu

SEQ ID NO: 2690814 - RNA, 19 nt, Artificial Sequence
  Description of Artificial Sequence: Synthetic oligonucleotide
guugcuccgcagucagagg

SEQ ID NO: 2690815 - RNA, 19 nt, Artificial Sequence
  Description of Artificial Sequence: Synthetic oligonucleotide
uagucggcucccuuggaau

SEQ ID NO: 2690816 - RNA, 19 nt, Artificial Sequence
  Description of Artificial Sequence: Synthetic oligonucleotide
ugucugaagggaguauguc

SEQ ID NO: 2690817 - RNA, 19 nt, Artificial Sequence
  Description of Artificial Sequence: Synthetic oligonucleotide
gcucccuuggaaugcaaag

SEQ ID NO: 2690818 - RNA, 19 nt, Artificial Sequence
  Description of Artificial Sequence: Synthetic oligonucleotide
aagcccugggcagaacuca

SEQ ID NO: 2690819 - RNA, 19 nt, Artificial Sequence
  Description of Artificial Sequence: Synthetic oligonucleotide
ccaggagacccuuauguug

SEQ ID NO: 2690820 - RNA, 19 nt, Artificial Sequence
  Description of Artificial Sequence: Synthetic oligonucleotide
guugucaaaucuagcuuca

SEQ ID NO: 2690821 - RNA, 19 nt, Artificial Sequence
  Description of Artificial Sequence: Synthetic oligonucleotide
aaucuagcuucaacuuggu

SEQ ID NO: 2690822 - RNA, 19 nt, Artificial Sequence
  Description of Artificial Sequence: Synthetic oligonucleotide
acucaugaggucgcugcag

SEQ ID NO: 2690823 - RNA, 19 nt, Artificial Sequence
  Description of Artificial Sequence: Synthetic oligonucleotide
uuguuugguccucgggcuc

SEQ ID NO: 2690824 - RNA, 19 nt, Artificial Sequence
  Description of Artificial Sequence: Synthetic oligonucleotide
acucgggucuuagcucucc

SEQ ID NO: 2690825 - RNA, 19 nt, Artificial Sequence
  Description of Artificial Sequence: Synthetic oligonucleotide
uguagucggcucccuugga

SEQ ID NO: 2690826 - RNA, 19 nt, Artificial Sequence
  Description of Artificial Sequence: Synthetic oligonucleotide
gacagcagaacaagaccca

SEQ ID NO: 2690827 - RNA, 19 nt, Artificial Sequence
  Description of Artificial Sequence: Synthetic oligonucleotide
gguguggugaccaggguac

SEQ ID NO: 2690828 - RNA, 19 nt, Artificial Sequence
  Description of Artificial Sequence: Synthetic oligonucleotide
augacuccaccaggagacc

SEQ ID NO: 2690829 - RNA, 19 nt, Artificial Sequence
  Description of Artificial Sequence: Synthetic oligonucleotide
ggcaauaggccgaagauua

SEQ ID NO: 2690830 - RNA, 19 nt, Artificial Sequence
  Description of Artificial Sequence: Synthetic oligonucleotide
caugcagcugaggaaguuc

SEQ ID NO: 2690831 - RNA, 19 nt, Artificial Sequence
  Description of Artificial Sequence: Synthetic oligonucleotide
uccucauaggcaggagaug

SEQ ID NO: 2690832 - RNA, 19 nt, Artificial Sequence
  Description of Artificial Sequence: Synthetic oligonucleotide
cuucacucgggucuuagcu

SEQ ID NO: 2690833 - RNA, 19 nt, Artificial Sequence
  Description of Artificial Sequence: Synthetic oligonucleotide
agacccacugggugguucu

SEQ ID NO: 2690834 - RNA, 19 nt, Artificial Sequence
  Description of Artificial Sequence: Synthetic oligonucleotide
cagcguugucaaaucuagc

SEQ ID NO: 2690835 - RNA, 19 nt, Artificial Sequence
  Description of Artificial Sequence: Synthetic oligonucleotide
uccgguugucugucugaag

SEQ ID NO: 2690836 - RNA, 19 nt, Artificial Sequence
  Description of Artificial Sequence: Synthetic oligonucleotide
ggaaugcaaagcucucuac

SEQ ID NO: 2690837 - RNA, 19 nt, Artificial Sequence
  Description of Artificial Sequence: Synthetic oligonucleotide
gcuguagucggcucccuug

SEQ ID NO: 2690838 - RNA, 19 nt, Artificial Sequence
  Description of Artificial Sequence: Synthetic oligonucleotide
agaacucaugaggucgcug

SEQ ID NO: 2690839 - RNA, 19 nt, Artificial Sequence
  Description of Artificial Sequence: Synthetic oligonucleotide
accaggagacccuuauguu

SEQ ID NO: 2690840 - RNA, 19 nt, Artificial Sequence
  Description of Artificial Sequence: Synthetic oligonucleotide
cuggaacaccaccacuuuc

SEQ ID NO: 2690841 - RNA, 19 nt, Artificial Sequence
  Description of Artificial Sequence: Synthetic oligonucleotide
uggcaauaggccgaagauu

SEQ ID NO: 2690842 - RNA, 19 nt, Artificial Sequence
  Description of Artificial Sequence: Synthetic oligonucleotide
uucucuuuguuugguccuc

SEQ ID NO: 2690843 - RNA, 19 nt, Artificial Sequence
  Description of Artificial Sequence: Synthetic oligonucleotide
cucaugaggucgcugcaga

SEQ ID NO: 2690844 - RNA, 19 nt, Artificial Sequence
  Description of Artificial Sequence: Synthetic oligonucleotide
aggcaggagauggguaggg

SEQ ID NO: 2690845 - RNA, 19 nt, Artificial Sequence
  Description of Artificial Sequence: Synthetic oligonucleotide
uccacucgcuguagucggc

SEQ ID NO: 2690846 - RNA, 19 nt, Artificial Sequence
  Description of Artificial Sequence: Synthetic oligonucleotide
ggguacagcaacucagcca

SEQ ID NO: 2690847 - RNA, 19 nt, Artificial Sequence
  Description of Artificial Sequence: Synthetic oligonucleotide
uguccagguggaggauacg

SEQ ID NO: 2690848 - RNA, 19 nt, Artificial Sequence
  Description of Artificial Sequence: Synthetic oligonucleotide
caccaggagacccuuaugu

SEQ ID NO: 2690849 - RNA, 19 nt, Artificial Sequence
  Description of Artificial Sequence: Synthetic oligonucleotide
agguugggucuggaacacc

SEQ ID NO: 2690850 - RNA, 19 nt, Artificial Sequence
  Description of Artificial Sequence: Synthetic oligonucleotide
gacccuuauguugcuccgc

SEQ ID NO: 2690851 - RNA, 19 nt, Artificial Sequence
  Description of Artificial Sequence: Synthetic oligonucleotide
acagccuugcuggucuuca

SEQ ID NO: 2690852 - RNA, 19 nt, Artificial Sequence
  Description of Artificial Sequence: Synthetic oligonucleotide
uagcuucaacuugguaagc

SEQ ID NO: 2690853 - RNA, 19 nt, Artificial Sequence
  Description of Artificial Sequence: Synthetic oligonucleotide
ucgggucuuagcucuccuc

SEQ ID NO: 2690854 - RNA, 19 nt, Artificial Sequence
  Description of Artificial Sequence: Synthetic oligonucleotide
gaagcccugggcagaacuc

SEQ ID NO: 2690855 - RNA, 19 nt, Artificial Sequence
  Description of Artificial Sequence: Synthetic oligonucleotide
guagucggcucccuuggaa

SEQ ID NO: 2690856 - RNA, 19 nt, Artificial Sequence
  Description of Artificial Sequence: Synthetic oligonucleotide
gaaguucauuucucuuugu

SEQ ID NO: 2690857 - RNA, 19 nt, Artificial Sequence
  Description of Artificial Sequence: Synthetic oligonucleotide
caagacccaccgagguagc

SEQ ID NO: 2690858 - RNA, 19 nt, Artificial Sequence
  Description of Artificial Sequence: Synthetic oligonucleotide
gguggaggauacgaagccc

SEQ ID NO: 2690859 - RNA, 19 nt, Artificial Sequence
  Description of Artificial Sequence: Synthetic oligonucleotide
ugcagcugaggaaguucau

SEQ ID NO: 2690860 - RNA, 19 nt, Artificial Sequence
  Description of Artificial Sequence: Synthetic oligonucleotide
gagguagccccgagcgccg

SEQ ID NO: 2690861 - RNA, 19 nt, Artificial Sequence
  Description of Artificial Sequence: Synthetic oligonucleotide
ccuugcuggucuucacucg

SEQ ID NO: 2690862 - RNA, 19 nt, Artificial Sequence
  Description of Artificial Sequence: Synthetic oligonucleotide
ucggggugggagcccuucc

SEQ ID NO: 2690863 - RNA, 19 nt, Artificial Sequence
  Description of Artificial Sequence: Synthetic oligonucleotide
aagcucucuaccacagguu

SEQ ID NO: 2690864 - RNA, 19 nt, Artificial Sequence
  Description of Artificial Sequence: Synthetic oligonucleotide
guccagguggaggauacga

SEQ ID NO: 2690865 - RNA, 19 nt, Artificial Sequence
  Description of Artificial Sequence: Synthetic oligonucleotide
aggccgaagauuacagcgu

SEQ ID NO: 2690866 - RNA, 19 nt, Artificial Sequence
  Description of Artificial Sequence: Synthetic oligonucleotide
aggucaccuccacucgcug

SEQ ID NO: 2690867 - RNA, 19 nt, Artificial Sequence
  Description of Artificial Sequence: Synthetic oligonucleotide
gcugaggaaguucauuucu

SEQ ID NO: 2690868 - RNA, 19 nt, Artificial Sequence
  Description of Artificial Sequence: Synthetic oligonucleotide
cauaggcaggagaugggua

SEQ ID NO: 2690869 - RNA, 19 nt, Artificial Sequence
  Description of Artificial Sequence: Synthetic oligonucleotide
gggugggagcccuuccagg

SEQ ID NO: 2690870 - RNA, 19 nt, Artificial Sequence
  Description of Artificial Sequence: Synthetic oligonucleotide
agauuacagcguugucaaa

SEQ ID NO: 2690871 - RNA, 19 nt, Artificial Sequence
  Description of Artificial Sequence: Synthetic oligonucleotide
agcaacucagccacagcau

SEQ ID NO: 2690872 - RNA, 19 nt, Artificial Sequence
  Description of Artificial Sequence: Synthetic oligonucleotide
gucggcucccuuggaaugc

SEQ ID NO: 2690873 - RNA, 19 nt, Artificial Sequence
  Description of Artificial Sequence: Synthetic oligonucleotide
acuuuccgguugucugucu

SEQ ID NO: 2690874 - RNA, 19 nt, Artificial Sequence
  Description of Artificial Sequence: Synthetic oligonucleotide
auacgaagcccugggcaga

SEQ ID NO: 2690875 - RNA, 19 nt, Artificial Sequence
  Description of Artificial Sequence: Synthetic oligonucleotide
ucuccucacuuuguccaaa

SEQ ID NO: 2690876 - RNA, 19 nt, Artificial Sequence
  Description of Artificial Sequence: Synthetic oligonucleotide
aggagacccuuauguugcu

SEQ ID NO: 2690877 - RNA, 19 nt, Artificial Sequence
  Description of Artificial Sequence: Synthetic oligonucleotide
ccuccacucgcuguagucg

SEQ ID NO: 2690878 - RNA, 19 nt, Artificial Sequence
  Description of Artificial Sequence: Synthetic oligonucleotide
ucgcugcagaguguggaaa

SEQ ID NO: 2690879 - RNA, 19 nt, Artificial Sequence
  Description of Artificial Sequence: Synthetic oligonucleotide
cagguugggucuggaacac

SEQ ID NO: 2690880 - RNA, 19 nt, Artificial Sequence
  Description of Artificial Sequence: Synthetic oligonucleotide
gcucucuaccacagguugg

SEQ ID NO: 2690881 - RNA, 19 nt, Artificial Sequence
  Description of Artificial Sequence: Synthetic oligonucleotide
ccacagcaugacaaggaug

SEQ ID NO: 2690882 - RNA, 19 nt, Artificial Sequence
  Description of Artificial Sequence: Synthetic oligonucleotide
uccagcgccucgggguggg

SEQ ID NO: 2690883 - RNA, 19 nt, Artificial Sequence
  Description of Artificial Sequence: Synthetic oligonucleotide
caccgagguagccccgagc

SEQ ID NO: 2690884 - RNA, 19 nt, Artificial Sequence
  Description of Artificial Sequence: Synthetic oligonucleotide
gguccaugugcaccuccag

SEQ ID NO: 2690885 - RNA, 19 nt, Artificial Sequence
  Description of Artificial Sequence: Synthetic oligonucleotide
ccuuggaaugcaaagcucu

SEQ ID NO: 2690886 - RNA, 19 nt, Artificial Sequence
  Description of Artificial Sequence: Synthetic oligonucleotide
gguugucugucugaaggga

SEQ ID NO: 2690887 - RNA, 19 nt, Artificial Sequence
  Description of Artificial Sequence: Synthetic oligonucleotide
ggauggauaggaagagaca

SEQ ID NO: 2690888 - RNA, 19 nt, Artificial Sequence
  Description of Artificial Sequence: Synthetic oligonucleotide
gcagaacucaugaggucgc

SEQ ID NO: 2690889 - RNA, 19 nt, Artificial Sequence
  Description of Artificial Sequence: Synthetic oligonucleotide
uacgaagcccugggcagaa

SEQ ID NO: 2690890 - RNA, 19 nt, Artificial Sequence
  Description of Artificial Sequence: Synthetic oligonucleotide
guggaggauacgaagcccu

SEQ ID NO: 2690891 - RNA, 19 nt, Artificial Sequence
  Description of Artificial Sequence: Synthetic oligonucleotide
cugucugaagggaguaugu

SEQ ID NO: 2690892 - RNA, 19 nt, Artificial Sequence
  Description of Artificial Sequence: Synthetic oligonucleotide
gggacaugcagcugaggaa

SEQ ID NO: 2690893 - RNA, 19 nt, Artificial Sequence
  Description of Artificial Sequence: Synthetic oligonucleotide
uccgcagucagaggcugua

SEQ ID NO: 2690894 - RNA, 19 nt, Artificial Sequence
  Description of Artificial Sequence: Synthetic oligonucleotide
cacuuuccgguugucuguc

SEQ ID NO: 2690895 - RNA, 19 nt, Artificial Sequence
  Description of Artificial Sequence: Synthetic oligonucleotide
gggucuggaacaccaccac

SEQ ID NO: 2690896 - RNA, 19 nt, Artificial Sequence
  Description of Artificial Sequence: Synthetic oligonucleotide
cagcugaggaaguucauuu

SEQ ID NO: 2690897 - RNA, 19 nt, Artificial Sequence
  Description of Artificial Sequence: Synthetic oligonucleotide
ggccaguaugacuccacca

SEQ ID NO: 2690898 - RNA, 19 nt, Artificial Sequence
  Description of Artificial Sequence: Synthetic oligonucleotide
guugggucuggaacaccac

SEQ ID NO: 2690899 - RNA, 19 nt, Artificial Sequence
  Description of Artificial Sequence: Synthetic oligonucleotide
ggggugggagcccuuccag

SEQ ID NO: 2690900 - RNA, 19 nt, Artificial Sequence
  Description of Artificial Sequence: Synthetic oligonucleotide
gggucuuagcucuccucac

SEQ ID NO: 2690901 - RNA, 19 nt, Artificial Sequence
  Description of Artificial Sequence: Synthetic oligonucleotide
ucggcucccuuggaaugca

SEQ ID NO: 2690902 - RNA, 19 nt, Artificial Sequence
  Description of Artificial Sequence: Synthetic oligonucleotide
cgguugucugucugaaggg

SEQ ID NO: 2690903 - RNA, 19 nt, Artificial Sequence
  Description of Artificial Sequence: Synthetic oligonucleotide
gucgcugcagaguguggaa

SEQ ID NO: 2690904 - RNA, 19 nt, Artificial Sequence
  Description of Artificial Sequence: Synthetic oligonucleotide
cuaccacagguugggucug

SEQ ID NO: 2690905 - RNA, 19 nt, Artificial Sequence
  Description of Artificial Sequence: Synthetic oligonucleotide
ggggcuguccucauaggca

SEQ ID NO: 2690906 - RNA, 19 nt, Artificial Sequence
  Description of Artificial Sequence: Synthetic oligonucleotide
cgagguagccccgagcgcc

SEQ ID NO: 2690907 - RNA, 19 nt, Artificial Sequence
  Description of Artificial Sequence: Synthetic oligonucleotide
ccugggcagaacucaugag

SEQ ID NO: 2690908 - RNA, 19 nt, Artificial Sequence
  Description of Artificial Sequence: Synthetic oligonucleotide
gagcgccgggacaugcagc

SEQ ID NO: 2690909 - RNA, 19 nt, Artificial Sequence
  Description of Artificial Sequence: Synthetic oligonucleotide
cacucgcuguagucggcuc

SEQ ID NO: 2690910 - RNA, 19 nt, Artificial Sequence
  Description of Artificial Sequence: Synthetic oligonucleotide
gugggagcccuuccagguc

SEQ ID NO: 2690911 - RNA, 19 nt, Artificial Sequence
  Description of Artificial Sequence: Synthetic oligonucleotide
gcagucagaggcuguaacu

SEQ ID NO: 2690912 - RNA, 19 nt, Artificial Sequence
  Description of Artificial Sequence: Synthetic oligonucleotide
ccaggucaccuccacucgc

SEQ ID NO: 2690913 - RNA, 19 nt, Artificial Sequence
  Description of Artificial Sequence: Synthetic oligonucleotide
acaugcagcugaggaaguu

SEQ ID NO: 2690914 - RNA, 19 nt, Artificial Sequence
  Description of Artificial Sequence: Synthetic oligonucleotide
cccuuggaaugcaaagcuc

SEQ ID NO: 2690915 - RNA, 19 nt, Artificial Sequence
  Description of Artificial Sequence: Synthetic oligonucleotide
ggguguggugaccagggua

SEQ ID NO: 2690916 - RNA, 19 nt, Artificial Sequence
  Description of Artificial Sequence: Synthetic oligonucleotide
ggaguauguccagguggag

SEQ ID NO: 2690917 - RNA, 19 nt, Artificial Sequence
  Description of Artificial Sequence: Synthetic oligonucleotide
gcuggucuucacucggguc

SEQ ID NO: 2690918 - RNA, 19 nt, Artificial Sequence
  Description of Artificial Sequence: Synthetic oligonucleotide
ggucgcugcagagugugga

SEQ ID NO: 2690919 - RNA, 19 nt, Artificial Sequence
  Description of Artificial Sequence: Synthetic oligonucleotide
gggguccaugugcaccucc

SEQ ID NO: 2690920 - RNA, 19 nt, Artificial Sequence
  Description of Artificial Sequence: Synthetic oligonucleotide
caugaggucgcugcagagu

SEQ ID NO: 2690921 - RNA, 19 nt, Artificial Sequence
  Description of Artificial Sequence: Synthetic oligonucleotide
ccaggguguggugaccagg

SEQ ID NO: 2690922 - RNA, 19 nt, Artificial Sequence
  Description of Artificial Sequence: Synthetic oligonucleotide
acgaagcccugggcagaac

SEQ ID NO: 2690923 - RNA, 19 nt, Artificial Sequence
  Description of Artificial Sequence: Synthetic oligonucleotide
gacuccaccaggagacccu

SEQ ID NO: 2690924 - RNA, 19 nt, Artificial Sequence
  Description of Artificial Sequence: Synthetic oligonucleotide
uaauuccagcagggacaga

SEQ ID NO: 2690925 - RNA, 19 nt, Artificial Sequence
  Description of Artificial Sequence: Synthetic oligonucleotide
uagccccgagcgccgggac

SEQ ID NO: 2690926 - RNA, 19 nt, Artificial Sequence
  Description of Artificial Sequence: Synthetic oligonucleotide
gcacuuggcaauaggccga

SEQ ID NO: 2690927 - RNA, 19 nt, Artificial Sequence
  Description of Artificial Sequence: Synthetic oligonucleotide
agccccgagcgccgggaca

SEQ ID NO: 2690928 - RNA, 19 nt, Artificial Sequence
  Description of Artificial Sequence: Synthetic oligonucleotide
gguagccccgagcgccggg

SEQ ID NO: 2690929 - RNA, 19 nt, Artificial Sequence
  Description of Artificial Sequence: Synthetic oligonucleotide
cccuuauguugcuccgcag

SEQ ID NO: 2690930 - RNA, 19 nt, Artificial Sequence
  Description of Artificial Sequence: Synthetic oligonucleotide
gcaauaggccgaagauuac

SEQ ID NO: 2690931 - RNA, 19 nt, Artificial Sequence
  Description of Artificial Sequence: Synthetic oligonucleotide
gcuguccucauaggcagga

SEQ ID NO: 2690932 - RNA, 19 nt, Artificial Sequence
  Description of Artificial Sequence: Synthetic oligonucleotide
cgggacaugcagcugagga

SEQ ID NO: 2690933 - RNA, 19 nt, Artificial Sequence
  Description of Artificial Sequence: Synthetic oligonucleotide
gacaugcagcugaggaagu

SEQ ID NO: 2690934 - RNA, 19 nt, Artificial Sequence
  Description of Artificial Sequence: Synthetic oligonucleotide
cagucagaggcuguaacuu

SEQ ID NO: 2690935 - RNA, 19 nt, Artificial Sequence
  Description of Artificial Sequence: Synthetic oligonucleotide
ccuuauguugcuccgcagu

SEQ ID NO: 2690936 - RNA, 19 nt, Artificial Sequence
  Description of Artificial Sequence: Synthetic oligonucleotide
caggucaccuccacucgcu

SEQ ID NO: 2690937 - RNA, 19 nt, Artificial Sequence
  Description of Artificial Sequence: Synthetic oligonucleotide
cacucgggucuuagcucuc

SEQ ID NO: 2690938 - RNA, 19 nt, Artificial Sequence
  Description of Artificial Sequence: Synthetic oligonucleotide
cagcaugacaaggauggau

SEQ ID NO: 2690939 - RNA, 19 nt, Artificial Sequence
  Description of Artificial Sequence: Synthetic oligonucleotide
gccgaagauuacagcguug

SEQ ID NO: 2690940 - RNA, 19 nt, Artificial Sequence
  Description of Artificial Sequence: Synthetic oligonucleotide
acuccaccaggagacccuu

SEQ ID NO: 2690941 - RNA, 19 nt, Artificial Sequence
  Description of Artificial Sequence: Synthetic oligonucleotide
aggugcuggccagggugug

SEQ ID NO: 2690942 - RNA, 19 nt, Artificial Sequence
  Description of Artificial Sequence: Synthetic oligonucleotide
uuugguccucgggcuccac

SEQ ID NO: 2690943 - RNA, 19 nt, Artificial Sequence
  Description of Artificial Sequence: Synthetic oligonucleotide
cucggggugggagcccuuc

SEQ ID NO: 2690944 - RNA, 19 nt, Artificial Sequence
  Description of Artificial Sequence: Synthetic oligonucleotide
cagcgccucggggugggag

SEQ ID NO: 2690945 - RNA, 19 nt, Artificial Sequence
  Description of Artificial Sequence: Synthetic oligonucleotide
cuuccaggucaccuccacu

SEQ ID NO: 2690946 - RNA, 19 nt, Artificial Sequence
  Description of Artificial Sequence: Synthetic oligonucleotide
gcguugucaaaucuagcuu

SEQ ID NO: 2690947 - RNA, 19 nt, Artificial Sequence
  Description of Artificial Sequence: Synthetic oligonucleotide
cgggucuuagcucuccuca

SEQ ID NO: 2690948 - RNA, 19 nt, Artificial Sequence
  Description of Artificial Sequence: Synthetic oligonucleotide
guagccccgagcgccggga

SEQ ID NO: 2690949 - RNA, 19 nt, Artificial Sequence
  Description of Artificial Sequence: Synthetic oligonucleotide
gccaggguguggugaccag

SEQ ID NO: 2690950 - RNA, 19 nt, Artificial Sequence
  Description of Artificial Sequence: Synthetic oligonucleotide
guuugguccucgggcucca

SEQ ID NO: 2690951 - RNA, 19 nt, Artificial Sequence
  Description of Artificial Sequence: Synthetic oligonucleotide
cgaagauuacagcguuguc

SEQ ID NO: 2690952 - RNA, 19 nt, Artificial Sequence
  Description of Artificial Sequence: Synthetic oligonucleotide
gcuggccagggugugguga

SEQ ID NO: 2690953 - RNA, 19 nt, Artificial Sequence
  Description of Artificial Sequence: Synthetic oligonucleotide
ucgcuguagucggcucccu

SEQ ID NO: 2690954 - RNA, 19 nt, Artificial Sequence
  Description of Artificial Sequence: Synthetic oligonucleotide
agcccugggcagaacucau

SEQ ID NO: 2690955 - RNA, 19 nt, Artificial Sequence
  Description of Artificial Sequence: Synthetic oligonucleotide
ggagauggguaggguaaaa

SEQ ID NO: 2690956 - RNA, 19 nt, Artificial Sequence
  Description of Artificial Sequence: Synthetic oligonucleotide
ccgaagauuacagcguugu

SEQ ID NO: 2690957 - RNA, 19 nt, Artificial Sequence
  Description of Artificial Sequence: Synthetic oligonucleotide
guguggugaccaggguaca

SEQ ID NO: 2690958 - RNA, 19 nt, Artificial Sequence
  Description of Artificial Sequence: Synthetic oligonucleotide
auguugcuccgcagucaga

SEQ ID NO: 2690959 - RNA, 19 nt, Artificial Sequence
  Description of Artificial Sequence: Synthetic oligonucleotide
cacuuggcaauaggccgaa

SEQ ID NO: 2690960 - RNA, 19 nt, Artificial Sequence
  Description of Artificial Sequence: Synthetic oligonucleotide
cgagcgccgggacaugcag

SEQ ID NO: 2690961 - RNA, 19 nt, Artificial Sequence
  Description of Artificial Sequence: Synthetic oligonucleotide
ccgagguagccccgagcgc

SEQ ID NO: 2690962 - RNA, 19 nt, Artificial Sequence
  Description of Artificial Sequence: Synthetic oligonucleotide
acccaccgagguagccccg

SEQ ID NO: 2690963 - RNA, 19 nt, Artificial Sequence
  Description of Artificial Sequence: Synthetic oligonucleotide
ggccgaagauuacagcguu

SEQ ID NO: 2690964 - RNA, 19 nt, Artificial Sequence
  Description of Artificial Sequence: Synthetic oligonucleotide
ggugaccaggguacagcaa

SEQ ID NO: 2690965 - RNA, 19 nt, Artificial Sequence
  Description of Artificial Sequence: Synthetic oligonucleotide
ggcucccuuggaaugcaaa

SEQ ID NO: 2690966 - RNA, 19 nt, Artificial Sequence
  Description of Artificial Sequence: Synthetic oligonucleotide
ggcuguaacuugaggugcu

SEQ ID NO: 2690967 - RNA, 19 nt, Artificial Sequence
  Description of Artificial Sequence: Synthetic oligonucleotide
caccacuuuccgguugucu

SEQ ID NO: 2690968 - RNA, 19 nt, Artificial Sequence
  Description of Artificial Sequence: Synthetic oligonucleotide
gcagaguguggaaaauaau

SEQ ID NO: 2690969 - RNA, 19 nt, Artificial Sequence
  Description of Artificial Sequence: Synthetic oligonucleotide
cucgggucuuagcucuccu

SEQ ID NO: 2690970 - RNA, 19 nt, Artificial Sequence
  Description of Artificial Sequence: Synthetic oligonucleotide
ccacuuuccgguugucugu

SEQ ID NO: 2690971 - RNA, 19 nt, Artificial Sequence
  Description of Artificial Sequence: Synthetic oligonucleotide
guauguccagguggaggau

SEQ ID NO: 2690972 - RNA, 19 nt, Artificial Sequence
  Description of Artificial Sequence: Synthetic oligonucleotide
ggacagagacccacugggu

SEQ ID NO: 2690973 - RNA, 19 nt, Artificial Sequence
  Description of Artificial Sequence: Synthetic oligonucleotide
cccacugggugguucuaaa

SEQ ID NO: 2690974 - RNA, 19 nt, Artificial Sequence
  Description of Artificial Sequence: Synthetic oligonucleotide
ccaccgagguagccccgag

SEQ ID NO: 2690975 - RNA, 19 nt, Artificial Sequence
  Description of Artificial Sequence: Synthetic oligonucleotide
cagaacucaugaggucgcu

SEQ ID NO: 2690976 - RNA, 19 nt, Artificial Sequence
  Description of Artificial Sequence: Synthetic oligonucleotide
cgcugcagaguguggaaaa

SEQ ID NO: 2690977 - RNA, 19 nt, Artificial Sequence
  Description of Artificial Sequence: Synthetic oligonucleotide
cccgagcgccgggacaugc

SEQ ID NO: 2690978 - RNA, 19 nt, Artificial Sequence
  Description of Artificial Sequence: Synthetic oligonucleotide
gcagcugaggaaguucauu

SEQ ID NO: 2690979 - RNA, 19 nt, Artificial Sequence
  Description of Artificial Sequence: Synthetic oligonucleotide
cgccgggacaugcagcuga

SEQ ID NO: 2690980 - RNA, 19 nt, Artificial Sequence
  Description of Artificial Sequence: Synthetic oligonucleotide
cuccaccaggagacccuua

SEQ ID NO: 2690981 - RNA, 19 nt, Artificial Sequence
  Description of Artificial Sequence: Synthetic oligonucleotide
ccgggacaugcagcugagg

SEQ ID NO: 2690982 - RNA, 19 nt, Artificial Sequence
  Description of Artificial Sequence: Synthetic oligonucleotide
gggagcccuuccaggucac

SEQ ID NO: 2690983 - RNA, 19 nt, Artificial Sequence
  Description of Artificial Sequence: Synthetic oligonucleotide
cgaagcccugggcagaacu

SEQ ID NO: 2690984 - RNA, 19 nt, Artificial Sequence
  Description of Artificial Sequence: Synthetic oligonucleotide
ccgagcgccgggacaugca

SEQ ID NO: 2690985 - RNA, 19 nt, Artificial Sequence
  Description of Artificial Sequence: Synthetic oligonucleotide
ccaccacuuuccgguuguc

SEQ ID NO: 2690986 - RNA, 19 nt, Artificial Sequence
  Description of Artificial Sequence: Synthetic oligonucleotide
gcgccgggacaugcagcug

SEQ ID NO: 2690987 - RNA, 19 nt, Artificial Sequence
  Description of Artificial Sequence: Synthetic oligonucleotide
cccaccgagguagccccga

SEQ ID NO: 2690988 - RNA, 19 nt, Artificial Sequence
  Description of Artificial Sequence: Synthetic oligonucleotide
gccccgagcgccgggacau

SEQ ID NO: 2690989 - RNA, 19 nt, Artificial Sequence
  Description of Artificial Sequence: Synthetic oligonucleotide
ccgcagucagaggcuguaa

SEQ ID NO: 2690990 - RNA, 19 nt, Artificial Sequence
  Description of Artificial Sequence: Synthetic oligonucleotide
cgccucggggugggagccc

SEQ ID NO: 2690991 - RNA, 19 nt, Artificial Sequence
  Description of Artificial Sequence: Synthetic oligonucleotide
cggcucccuuggaaugcaa

SEQ ID NO: 2690992 - RNA, 19 nt, Artificial Sequence
  Description of Artificial Sequence: Synthetic oligonucleotide
cgcuguagucggcucccuu

SEQ ID NO: 2690993 - RNA, 19 nt, Artificial Sequence
  Description of Artificial Sequence: Synthetic oligonucleotide
ccucggggugggagcccuu

SEQ ID NO: 2690994 - RNA, 19 nt, Artificial Sequence
  Description of Artificial Sequence: Synthetic oligonucleotide
uuuacuauuauuuacauua

SEQ ID NO: 2690995 - RNA, 19 nt, Artificial Sequence
  Description of Artificial Sequence: Synthetic oligonucleotide
aauucuaccauugagugca

SEQ ID NO: 2690996 - RNA, 19 nt, Artificial Sequence
  Description of Artificial Sequence: Synthetic oligonucleotide
uaauuuacuauuauuuaca

SEQ ID NO: 2690997 - RNA, 19 nt, Artificial Sequence
  Description of Artificial Sequence: Synthetic oligonucleotide
ucaugugcuuccuugaugg

SEQ ID NO: 2690998 - RNA, 19 nt, Artificial Sequence
  Description of Artificial Sequence: Synthetic oligonucleotide
aacaguaucacagccuggc

SEQ ID NO: 2690999 - RNA, 19 nt, Artificial Sequence
  Description of Artificial Sequence: Synthetic oligonucleotide
uuuacauuagcaaguguug

SEQ ID NO: 2691000 - RNA, 19 nt, Artificial Sequence
  Description of Artificial Sequence: Synthetic oligonucleotide
aagaacuccuccucgucgc

SEQ ID NO: 2691001 - RNA, 19 nt, Artificial Sequence
  Description of Artificial Sequence: Synthetic oligonucleotide
agaauuuagaauuuucuaa

SEQ ID NO: 2691002 - RNA, 19 nt, Artificial Sequence
  Description of Artificial Sequence: Synthetic oligonucleotide
uuaguagacacagugagga

SEQ ID NO: 2691003 - RNA, 19 nt, Artificial Sequence
  Description of Artificial Sequence: Synthetic oligonucleotide
uuucuaauaauuuacuauu

SEQ ID NO: 2691004 - RNA, 19 nt, Artificial Sequence
  Description of Artificial Sequence: Synthetic oligonucleotide
aaagaauuuagaauuuucu

SEQ ID NO: 2691005 - RNA, 19 nt, Artificial Sequence
  Description of Artificial Sequence: Synthetic oligonucleotide
ucuaccauugagugcaccg

SEQ ID NO: 2691006 - RNA, 19 nt, Artificial Sequence
  Description of Artificial Sequence: Synthetic oligonucleotide
gaauuuucuaauaauuuac

SEQ ID NO: 2691007 - RNA, 19 nt, Artificial Sequence
  Description of Artificial Sequence: Synthetic oligonucleotide
aagaauuuagaauuuucua

SEQ ID NO: 2691008 - RNA, 19 nt, Artificial Sequence
  Description of Artificial Sequence: Synthetic oligonucleotide
aauuuacuauuauuuacau

SEQ ID NO: 2691009 - RNA, 19 nt, Artificial Sequence
  Description of Artificial Sequence: Synthetic oligonucleotide
uucaugauggcaauucuac

SEQ ID NO: 2691010 - RNA, 19 nt, Artificial Sequence
  Description of Artificial Sequence: Synthetic oligonucleotide
acuucuagcacccuuggug

SEQ ID NO: 2691011 - RNA, 19 nt, Artificial Sequence
  Description of Artificial Sequence: Synthetic oligonucleotide
gaugcuggcagagaggagg

SEQ ID NO: 2691012 - RNA, 19 nt, Artificial Sequence
  Description of Artificial Sequence: Synthetic oligonucleotide
ucuaauaauuuacuauuau

SEQ ID NO: 2691013 - RNA, 19 nt, Artificial Sequence
  Description of Artificial Sequence: Synthetic oligonucleotide
acuauuauuuacauuagca

SEQ ID NO: 2691014 - RNA, 19 nt, Artificial Sequence
  Description of Artificial Sequence: Synthetic oligonucleotide
ucaaacaccgccgaggccc

SEQ ID NO: 2691015 - RNA, 19 nt, Artificial Sequence
  Description of Artificial Sequence: Synthetic oligonucleotide
uaugucaugugcuuccuug

SEQ ID NO: 2691016 - RNA, 19 nt, Artificial Sequence
  Description of Artificial Sequence: Synthetic oligonucleotide
uuacuauuauuuacauuag

SEQ ID NO: 2691017 - RNA, 19 nt, Artificial Sequence
  Description of Artificial Sequence: Synthetic oligonucleotide
uuacauuagcaaguguugg

SEQ ID NO: 2691018 - RNA, 19 nt, Artificial Sequence
  Description of Artificial Sequence: Synthetic oligonucleotide
agaauuuucuaauaauuua

SEQ ID NO: 2691019 - RNA, 19 nt, Artificial Sequence
  Description of Artificial Sequence: Synthetic oligonucleotide
aauuuucuaauaauuuacu

SEQ ID NO: 2691020 - RNA, 19 nt, Artificial Sequence
  Description of Artificial Sequence: Synthetic oligonucleotide
auuauuuacauuagcaagu

SEQ ID NO: 2691021 - RNA, 19 nt, Artificial Sequence
  Description of Artificial Sequence: Synthetic oligonucleotide
aauuuagaauuuucuaaua

SEQ ID NO: 2691022 - RNA, 19 nt, Artificial Sequence
  Description of Artificial Sequence: Synthetic oligonucleotide
uacuauuauuuacauuagc

SEQ ID NO: 2691023 - RNA, 19 nt, Artificial Sequence
  Description of Artificial Sequence: Synthetic oligonucleotide
uucugauucaugauggcaa

SEQ ID NO: 2691024 - RNA, 19 nt, Artificial Sequence
  Description of Artificial Sequence: Synthetic oligonucleotide
auguucacgagcgacgugc

SEQ ID NO: 2691025 - RNA, 19 nt, Artificial Sequence
  Description of Artificial Sequence: Synthetic oligonucleotide
gucguuaguagacacagug

SEQ ID NO: 2691026 - RNA, 19 nt, Artificial Sequence
  Description of Artificial Sequence: Synthetic oligonucleotide
guaacaguaucacagccug

SEQ ID NO: 2691027 - RNA, 19 nt, Artificial Sequence
  Description of Artificial Sequence: Synthetic oligonucleotide
cuucuagcacccuuggugg

SEQ ID NO: 2691028 - RNA, 19 nt, Artificial Sequence
  Description of Artificial Sequence: Synthetic oligonucleotide
auggcaagcaguccuugcc

SEQ ID NO: 2691029 - RNA, 19 nt, Artificial Sequence
  Description of Artificial Sequence: Synthetic oligonucleotide
aaguguuggucguuaguag

SEQ ID NO: 2691030 - RNA, 19 nt, Artificial Sequence
  Description of Artificial Sequence: Synthetic oligonucleotide
ggugguaacaguaucacag

SEQ ID NO: 2691031 - RNA, 19 nt, Artificial Sequence
  Description of Artificial Sequence: Synthetic oligonucleotide
cauuagcaaguguuggucg

SEQ ID NO: 2691032 - RNA, 19 nt, Artificial Sequence
  Description of Artificial Sequence: Synthetic oligonucleotide
aacauguucacgagcgacg

SEQ ID NO: 2691033 - RNA, 19 nt, Artificial Sequence
  Description of Artificial Sequence: Synthetic oligonucleotide
ugguaacaguaucacagcc

SEQ ID NO: 2691034 - RNA, 19 nt, Artificial Sequence
  Description of Artificial Sequence: Synthetic oligonucleotide
acgaacauguucacgagcg

SEQ ID NO: 2691035 - RNA, 19 nt, Artificial Sequence
  Description of Artificial Sequence: Synthetic oligonucleotide
cuauuauuuacauuagcaa

SEQ ID NO: 2691036 - RNA, 19 nt, Artificial Sequence
  Description of Artificial Sequence: Synthetic oligonucleotide
auuuucuaauaauuuacua

SEQ ID NO: 2691037 - RNA, 19 nt, Artificial Sequence
  Description of Artificial Sequence: Synthetic oligonucleotide
gagaugagcucgcaggacc

SEQ ID NO: 2691038 - RNA, 19 nt, Artificial Sequence
  Description of Artificial Sequence: Synthetic oligonucleotide
uggucguuaguagacacag

SEQ ID NO: 2691039 - RNA, 19 nt, Artificial Sequence
  Description of Artificial Sequence: Synthetic oligonucleotide
acauuagcaaguguugguc

SEQ ID NO: 2691040 - RNA, 19 nt, Artificial Sequence
  Description of Artificial Sequence: Synthetic oligonucleotide
caugauggcaauucuacca

SEQ ID NO: 2691041 - RNA, 19 nt, Artificial Sequence
  Description of Artificial Sequence: Synthetic oligonucleotide
ggaaggaacuucuagcacc

SEQ ID NO: 2691042 - RNA, 19 nt, Artificial Sequence
  Description of Artificial Sequence: Synthetic oligonucleotide
ugcagguagagcacgcugc

SEQ ID NO: 2691043 - RNA, 19 nt, Artificial Sequence
  Description of Artificial Sequence: Synthetic oligonucleotide
cucuaugucaugugcuucc

SEQ ID NO: 2691044 - RNA, 19 nt, Artificial Sequence
  Description of Artificial Sequence: Synthetic oligonucleotide
uggcaagcaguccuugccg

SEQ ID NO: 2691045 - RNA, 19 nt, Artificial Sequence
  Description of Artificial Sequence: Synthetic oligonucleotide
uggucucuaugucaugugc

SEQ ID NO: 2691046 - RNA, 19 nt, Artificial Sequence
  Description of Artificial Sequence: Synthetic oligonucleotide
uacauuagcaaguguuggu

SEQ ID NO: 2691047 - RNA, 19 nt, Artificial Sequence
  Description of Artificial Sequence: Synthetic oligonucleotide
cucagaugcuggcagagag

SEQ ID NO: 2691048 - RNA, 19 nt, Artificial Sequence
  Description of Artificial Sequence: Synthetic oligonucleotide
aucacagccuggcagagga

SEQ ID NO: 2691049 - RNA, 19 nt, Artificial Sequence
  Description of Artificial Sequence: Synthetic oligonucleotide
gcaauucuaccauugagug

SEQ ID NO: 2691050 - RNA, 19 nt, Artificial Sequence
  Description of Artificial Sequence: Synthetic oligonucleotide
ugauucaugauggcaauuc

SEQ ID NO: 2691051 - RNA, 19 nt, Artificial Sequence
  Description of Artificial Sequence: Synthetic oligonucleotide
uuucugauucaugauggca

SEQ ID NO: 2691052 - RNA, 19 nt, Artificial Sequence
  Description of Artificial Sequence: Synthetic oligonucleotide
gaggaggucauugagccug

SEQ ID NO: 2691053 - RNA, 19 nt, Artificial Sequence
  Description of Artificial Sequence: Synthetic oligonucleotide
ccuuucugauucaugaugg

SEQ ID NO: 2691054 - RNA, 19 nt, Artificial Sequence
  Description of Artificial Sequence: Synthetic oligonucleotide
gaacuucuagcacccuugg

SEQ ID NO: 2691055 - RNA, 19 nt, Artificial Sequence
  Description of Artificial Sequence: Synthetic oligonucleotide
ucguuaguagacacaguga

SEQ ID NO: 2691056 - RNA, 19 nt, Artificial Sequence
  Description of Artificial Sequence: Synthetic oligonucleotide
aguguuggucguuaguaga

SEQ ID NO: 2691057 - RNA, 19 nt, Artificial Sequence
  Description of Artificial Sequence: Synthetic oligonucleotide
uuccuugauggcaagcagu

SEQ ID NO: 2691058 - RNA, 19 nt, Artificial Sequence
  Description of Artificial Sequence: Synthetic oligonucleotide
gaaggaacuucuagcaccc

SEQ ID NO: 2691059 - RNA, 19 nt, Artificial Sequence
  Description of Artificial Sequence: Synthetic oligonucleotide
auuagcaaguguuggucgu

SEQ ID NO: 2691060 - RNA, 19 nt, Artificial Sequence
  Description of Artificial Sequence: Synthetic oligonucleotide
aagcuguaagcgucucuuc

SEQ ID NO: 2691061 - RNA, 19 nt, Artificial Sequence
  Description of Artificial Sequence: Synthetic oligonucleotide
caauucuaccauugagugc

SEQ ID NO: 2691062 - RNA, 19 nt, Artificial Sequence
  Description of Artificial Sequence: Synthetic oligonucleotide
guuaguagacacagugagg

SEQ ID NO: 2691063 - RNA, 19 nt, Artificial Sequence
  Description of Artificial Sequence: Synthetic oligonucleotide
aagcaguccuugccgcagc

SEQ ID NO: 2691064 - RNA, 19 nt, Artificial Sequence
  Description of Artificial Sequence: Synthetic oligonucleotide
uccuugauggcaagcaguc

SEQ ID NO: 2691065 - RNA, 19 nt, Artificial Sequence
  Description of Artificial Sequence: Synthetic oligonucleotide
uaacaguaucacagccugg

SEQ ID NO: 2691066 - RNA, 19 nt, Artificial Sequence
  Description of Artificial Sequence: Synthetic oligonucleotide
caguaucacagccuggcag

SEQ ID NO: 2691067 - RNA, 19 nt, Artificial Sequence
  Description of Artificial Sequence: Synthetic oligonucleotide
acacagugaggagaugagc

SEQ ID NO: 2691068 - RNA, 19 nt, Artificial Sequence
  Description of Artificial Sequence: Synthetic oligonucleotide
uuccugugguccaagcugu

SEQ ID NO: 2691069 - RNA, 19 nt, Artificial Sequence
  Description of Artificial Sequence: Synthetic oligonucleotide
augauggcaauucuaccau

SEQ ID NO: 2691070 - RNA, 19 nt, Artificial Sequence
  Description of Artificial Sequence: Synthetic oligonucleotide
uguaagcgucucuuccucc

SEQ ID NO: 2691071 - RNA, 19 nt, Artificial Sequence
  Description of Artificial Sequence: Synthetic oligonucleotide
agaacuccuccucgucgcc

SEQ ID NO: 2691072 - RNA, 19 nt, Artificial Sequence
  Description of Artificial Sequence: Synthetic oligonucleotide
guaagcgucucuuccuccc

SEQ ID NO: 2691073 - RNA, 19 nt, Artificial Sequence
  Description of Artificial Sequence: Synthetic oligonucleotide
gacgugcccucaaacaccg

SEQ ID NO: 2691074 - RNA, 19 nt, Artificial Sequence
  Description of Artificial Sequence: Synthetic oligonucleotide
ucugauucaugauggcaau

SEQ ID NO: 2691075 - RNA, 19 nt, Artificial Sequence
  Description of Artificial Sequence: Synthetic oligonucleotide
uuggucguuaguagacaca

SEQ ID NO: 2691076 - RNA, 19 nt, Artificial Sequence
  Description of Artificial Sequence: Synthetic oligonucleotide
cugcggaucccguucaccc

SEQ ID NO: 2691077 - RNA, 19 nt, Artificial Sequence
  Description of Artificial Sequence: Synthetic oligonucleotide
cugugguccaagcuguaag

SEQ ID NO: 2691078 - RNA, 19 nt, Artificial Sequence
  Description of Artificial Sequence: Synthetic oligonucleotide
cuaccauugagugcaccgg

SEQ ID NO: 2691079 - RNA, 19 nt, Artificial Sequence
  Description of Artificial Sequence: Synthetic oligonucleotide
uucacgagcgacgugcccu

SEQ ID NO: 2691080 - RNA, 19 nt, Artificial Sequence
  Description of Artificial Sequence: Synthetic oligonucleotide
uagagcacgcugcggucgg

SEQ ID NO: 2691081 - RNA, 19 nt, Artificial Sequence
  Description of Artificial Sequence: Synthetic oligonucleotide
ucgaagaacuccuccucgu

SEQ ID NO: 2691082 - RNA, 19 nt, Artificial Sequence
  Description of Artificial Sequence: Synthetic oligonucleotide
aacuucuagcacccuuggu

SEQ ID NO: 2691083 - RNA, 19 nt, Artificial Sequence
  Description of Artificial Sequence: Synthetic oligonucleotide
cacgaacauguucacgagc

SEQ ID NO: 2691084 - RNA, 19 nt, Artificial Sequence
  Description of Artificial Sequence: Synthetic oligonucleotide
cucggugcggaucucgaag

SEQ ID NO: 2691085 - RNA, 19 nt, Artificial Sequence
  Description of Artificial Sequence: Synthetic oligonucleotide
gacccagaccuuccugugg

SEQ ID NO: 2691086 - RNA, 19 nt, Artificial Sequence
  Description of Artificial Sequence: Synthetic oligonucleotide
cguuaguagacacagugag

SEQ ID NO: 2691087 - RNA, 19 nt, Artificial Sequence
  Description of Artificial Sequence: Synthetic oligonucleotide
ugguccaagcuguaagcgu

SEQ ID NO: 2691088 - RNA, 19 nt, Artificial Sequence
  Description of Artificial Sequence: Synthetic oligonucleotide
agugaggagaugagcucgc

SEQ ID NO: 2691089 - RNA, 19 nt, Artificial Sequence
  Description of Artificial Sequence: Synthetic oligonucleotide
uguucacgagcgacgugcc

SEQ ID NO: 2691090 - RNA, 19 nt, Artificial Sequence
  Description of Artificial Sequence: Synthetic oligonucleotide
gucaugugcuuccuugaug

SEQ ID NO: 2691091 - RNA, 19 nt, Artificial Sequence
  Description of Artificial Sequence: Synthetic oligonucleotide
aggacccagaccuuccugu

SEQ ID NO: 2691092 - RNA, 19 nt, Artificial Sequence
  Description of Artificial Sequence: Synthetic oligonucleotide
ugagccuggucucuauguc

SEQ ID NO: 2691093 - RNA, 19 nt, Artificial Sequence
  Description of Artificial Sequence: Synthetic oligonucleotide
agcgacgugcccucaaaca

SEQ ID NO: 2691094 - RNA, 19 nt, Artificial Sequence
  Description of Artificial Sequence: Synthetic oligonucleotide
acaccgccgaggcccaugc

SEQ ID NO: 2691095 - RNA, 19 nt, Artificial Sequence
  Description of Artificial Sequence: Synthetic oligonucleotide
ggucggaccacucggugcg

SEQ ID NO: 2691096 - RNA, 19 nt, Artificial Sequence
  Description of Artificial Sequence: Synthetic oligonucleotide
accuuccugugguccaagc

SEQ ID NO: 2691097 - RNA, 19 nt, Artificial Sequence
  Description of Artificial Sequence: Synthetic oligonucleotide
ugucaugugcuuccuugau

SEQ ID NO: 2691098 - RNA, 19 nt, Artificial Sequence
  Description of Artificial Sequence: Synthetic oligonucleotide
gugguccaagcuguaagcg

SEQ ID NO: 2691099 - RNA, 19 nt, Artificial Sequence
  Description of Artificial Sequence: Synthetic oligonucleotide
ucggugcggaucucgaaga

SEQ ID NO: 2691100 - RNA, 19 nt, Artificial Sequence
  Description of Artificial Sequence: Synthetic oligonucleotide
uggugguaacaguaucaca

SEQ ID NO: 2691101 - RNA, 19 nt, Artificial Sequence
  Description of Artificial Sequence: Synthetic oligonucleotide
ggagcucagaugcuggcag

SEQ ID NO: 2691102 - RNA, 19 nt, Artificial Sequence
  Description of Artificial Sequence: Synthetic oligonucleotide
uguuggucguuaguagaca

SEQ ID NO: 2691103 - RNA, 19 nt, Artificial Sequence
  Description of Artificial Sequence: Synthetic oligonucleotide
agcacgcugcggucggacc

SEQ ID NO: 2691104 - RNA, 19 nt, Artificial Sequence
  Description of Artificial Sequence: Synthetic oligonucleotide
guagagcacgcugcggucg

SEQ ID NO: 2691105 - RNA, 19 nt, Artificial Sequence
  Description of Artificial Sequence: Synthetic oligonucleotide
agcaaguguuggucguuag

SEQ ID NO: 2691106 - RNA, 19 nt, Artificial Sequence
  Description of Artificial Sequence: Synthetic oligonucleotide
gaaggcgucccggaggcgc

SEQ ID NO: 2691107 - RNA, 19 nt, Artificial Sequence
  Description of Artificial Sequence: Synthetic oligonucleotide
caguccuugccgcagcggc

SEQ ID NO: 2691108 - RNA, 19 nt, Artificial Sequence
  Description of Artificial Sequence: Synthetic oligonucleotide
ucagcgaagcugcggugca

SEQ ID NO: 2691109 - RNA, 19 nt, Artificial Sequence
  Description of Artificial Sequence: Synthetic oligonucleotide
gauucaugauggcaauucu

SEQ ID NO: 2691110 - RNA, 19 nt, Artificial Sequence
  Description of Artificial Sequence: Synthetic oligonucleotide
uaagcgucucuuccuccca

SEQ ID NO: 2691111 - RNA, 19 nt, Artificial Sequence
  Description of Artificial Sequence: Synthetic oligonucleotide
ugguggugguaacaguauc

SEQ ID NO: 2691112 - RNA, 19 nt, Artificial Sequence
  Description of Artificial Sequence: Synthetic oligonucleotide
ucuagcacccuugguggug

SEQ ID NO: 2691113 - RNA, 19 nt, Artificial Sequence
  Description of Artificial Sequence: Synthetic oligonucleotide
agcucgcaggacccagacc

SEQ ID NO: 2691114 - RNA, 19 nt, Artificial Sequence
  Description of Artificial Sequence: Synthetic oligonucleotide
ugacaaugagccugcggau

SEQ ID NO: 2691115 - RNA, 19 nt, Artificial Sequence
  Description of Artificial Sequence: Synthetic oligonucleotide
gacaaugagccugcggauc

SEQ ID NO: 2691116 - RNA, 19 nt, Artificial Sequence
  Description of Artificial Sequence: Synthetic oligonucleotide
agcaguccuugccgcagcg

SEQ ID NO: 2691117 - RNA, 19 nt, Artificial Sequence
  Description of Artificial Sequence: Synthetic oligonucleotide
cuagcacccuugguggugg

SEQ ID NO: 2691118 - RNA, 19 nt, Artificial Sequence
  Description of Artificial Sequence: Synthetic oligonucleotide
ggaacuucuagcacccuug

SEQ ID NO: 2691119 - RNA, 19 nt, Artificial Sequence
  Description of Artificial Sequence: Synthetic oligonucleotide
cuugcacaggcgacccagg

SEQ ID NO: 2691120 - RNA, 19 nt, Artificial Sequence
  Description of Artificial Sequence: Synthetic oligonucleotide
acauguucacgagcgacgu

SEQ ID NO: 2691121 - RNA, 19 nt, Artificial Sequence
  Description of Artificial Sequence: Synthetic oligonucleotide
ucucuaugucaugugcuuc

SEQ ID NO: 2691122 - RNA, 19 nt, Artificial Sequence
  Description of Artificial Sequence: Synthetic oligonucleotide
acaguaucacagccuggca

SEQ ID NO: 2691123 - RNA, 19 nt, Artificial Sequence
  Description of Artificial Sequence: Synthetic oligonucleotide
agcgaagcugcggugcagg

SEQ ID NO: 2691124 - RNA, 19 nt, Artificial Sequence
  Description of Artificial Sequence: Synthetic oligonucleotide
ugcccucaaacaccgccga

SEQ ID NO: 2691125 - RNA, 19 nt, Artificial Sequence
  Description of Artificial Sequence: Synthetic oligonucleotide
ucuaugucaugugcuuccu

SEQ ID NO: 2691126 - RNA, 19 nt, Artificial Sequence
  Description of Artificial Sequence: Synthetic oligonucleotide
accauugagugcaccgggg

SEQ ID NO: 2691127 - RNA, 19 nt, Artificial Sequence
  Description of Artificial Sequence: Synthetic oligonucleotide
cuguaagcgucucuuccuc

SEQ ID NO: 2691128 - RNA, 19 nt, Artificial Sequence
  Description of Artificial Sequence: Synthetic oligonucleotide
ugcacaggcgacccagguc

SEQ ID NO: 2691129 - RNA, 19 nt, Artificial Sequence
  Description of Artificial Sequence: Synthetic oligonucleotide
aggaacuucuagcacccuu

SEQ ID NO: 2691130 - RNA, 19 nt, Artificial Sequence
  Description of Artificial Sequence: Synthetic oligonucleotide
uugcacaggcgacccaggu

SEQ ID NO: 2691131 - RNA, 19 nt, Artificial Sequence
  Description of Artificial Sequence: Synthetic oligonucleotide
guggugguaacaguaucac

SEQ ID NO: 2691132 - RNA, 19 nt, Artificial Sequence
  Description of Artificial Sequence: Synthetic oligonucleotide
uugauggcaagcaguccuu

SEQ ID NO: 2691133 - RNA, 19 nt, Artificial Sequence
  Description of Artificial Sequence: Synthetic oligonucleotide
cugcggucggaccacucgg

SEQ ID NO: 2691134 - RNA, 19 nt, Artificial Sequence
  Description of Artificial Sequence: Synthetic oligonucleotide
agcgucucuuccucccauc

SEQ ID NO: 2691135 - RNA, 19 nt, Artificial Sequence
  Description of Artificial Sequence: Synthetic oligonucleotide
gcacaggcgacccagguca

SEQ ID NO: 2691136 - RNA, 19 nt, Artificial Sequence
  Description of Artificial Sequence: Synthetic oligonucleotide
caggcgacccaggucagcg

SEQ ID NO: 2691137 - RNA, 19 nt, Artificial Sequence
  Description of Artificial Sequence: Synthetic oligonucleotide
gaggcgcuugcacaggcga

SEQ ID NO: 2691138 - RNA, 19 nt, Artificial Sequence
  Description of Artificial Sequence: Synthetic oligonucleotide
gaggucauugagccugguc

SEQ ID NO: 2691139 - RNA, 19 nt, Artificial Sequence
  Description of Artificial Sequence: Synthetic oligonucleotide
gucagcgaagcugcggugc

SEQ ID NO: 2691140 - RNA, 19 nt, Artificial Sequence
  Description of Artificial Sequence: Synthetic oligonucleotide
ugauggcaagcaguccuug

SEQ ID NO: 2691141 - RNA, 19 nt, Artificial Sequence
  Description of Artificial Sequence: Synthetic oligonucleotide
ugagcucgcaggacccaga

SEQ ID NO: 2691142 - RNA, 19 nt, Artificial Sequence
  Description of Artificial Sequence: Synthetic oligonucleotide
gugcccucaaacaccgccg

SEQ ID NO: 2691143 - RNA, 19 nt, Artificial Sequence
  Description of Artificial Sequence: Synthetic oligonucleotide
caaguguuggucguuagua

SEQ ID NO: 2691144 - RNA, 19 nt, Artificial Sequence
  Description of Artificial Sequence: Synthetic oligonucleotide
gcugacaaugagccugcgg

SEQ ID NO: 2691145 - RNA, 19 nt, Artificial Sequence
  Description of Artificial Sequence: Synthetic oligonucleotide
auucaugauggcaauucua

SEQ ID NO: 2691146 - RNA, 19 nt, Artificial Sequence
  Description of Artificial Sequence: Synthetic oligonucleotide
caugccccugccuccgggg

SEQ ID NO: 2691147 - RNA, 19 nt, Artificial Sequence
  Description of Artificial Sequence: Synthetic oligonucleotide
aagcgucucuuccucccau

SEQ ID NO: 2691148 - RNA, 19 nt, Artificial Sequence
  Description of Artificial Sequence: Synthetic oligonucleotide
ucccggaggcgcuugcaca

SEQ ID NO: 2691149 - RNA, 19 nt, Artificial Sequence
  Description of Artificial Sequence: Synthetic oligonucleotide
ugcggaucucgaagaacuc

SEQ ID NO: 2691150 - RNA, 19 nt, Artificial Sequence
  Description of Artificial Sequence: Synthetic oligonucleotide
uucuagcacccuugguggu

SEQ ID NO: 2691151 - RNA, 19 nt, Artificial Sequence
  Description of Artificial Sequence: Synthetic oligonucleotide
ugcggaucccguucaccca

SEQ ID NO: 2691152 - RNA, 19 nt, Artificial Sequence
  Description of Artificial Sequence: Synthetic oligonucleotide
aggcccaugccgcgggccg

SEQ ID NO: 2691153 - RNA, 19 nt, Artificial Sequence
  Description of Artificial Sequence: Synthetic oligonucleotide
uucuaccauugagugcacc

SEQ ID NO: 2691154 - RNA, 19 nt, Artificial Sequence
  Description of Artificial Sequence: Synthetic oligonucleotide
ccucaaacaccgccgaggc

SEQ ID NO: 2691155 - RNA, 19 nt, Artificial Sequence
  Description of Artificial Sequence: Synthetic oligonucleotide
agaggaggucauugagccu

SEQ ID NO: 2691156 - RNA, 19 nt, Artificial Sequence
  Description of Artificial Sequence: Synthetic oligonucleotide
cucaaacaccgccgaggcc

SEQ ID NO: 2691157 - RNA, 19 nt, Artificial Sequence
  Description of Artificial Sequence: Synthetic oligonucleotide
gagcucgcaggacccagac

SEQ ID NO: 2691158 - RNA, 19 nt, Artificial Sequence
  Description of Artificial Sequence: Synthetic oligonucleotide
gagcgacgugcccucaaac

SEQ ID NO: 2691159 - RNA, 19 nt, Artificial Sequence
  Description of Artificial Sequence: Synthetic oligonucleotide
gcugcggucggaccacucg

SEQ ID NO: 2691160 - RNA, 19 nt, Artificial Sequence
  Description of Artificial Sequence: Synthetic oligonucleotide
gcucgcaggacccagaccu

SEQ ID NO: 2691161 - RNA, 19 nt, Artificial Sequence
  Description of Artificial Sequence: Synthetic oligonucleotide
gguggugguaacaguauca

SEQ ID NO: 2691162 - RNA, 19 nt, Artificial Sequence
  Description of Artificial Sequence: Synthetic oligonucleotide
ggcagagaggaggucauug

SEQ ID NO: 2691163 - RNA, 19 nt, Artificial Sequence
  Description of Artificial Sequence: Synthetic oligonucleotide
gcgacgugcccucaaacac

SEQ ID NO: 2691164 - RNA, 19 nt, Artificial Sequence
  Description of Artificial Sequence: Synthetic oligonucleotide
ugcggucggaccacucggu

SEQ ID NO: 2691165 - RNA, 19 nt, Artificial Sequence
  Description of Artificial Sequence: Synthetic oligonucleotide
ggcaagcaguccuugccgc

SEQ ID NO: 2691166 - RNA, 19 nt, Artificial Sequence
  Description of Artificial Sequence: Synthetic oligonucleotide
ggcaauucuaccauugagu

SEQ ID NO: 2691167 - RNA, 19 nt, Artificial Sequence
  Description of Artificial Sequence: Synthetic oligonucleotide
aguccuugccgcagcggcg

SEQ ID NO: 2691168 - RNA, 19 nt, Artificial Sequence
  Description of Artificial Sequence: Synthetic oligonucleotide
uuagcaaguguuggucguu

SEQ ID NO: 2691169 - RNA, 19 nt, Artificial Sequence
  Description of Artificial Sequence: Synthetic oligonucleotide
ucggggaaggcgucccgga

SEQ ID NO: 2691170 - RNA, 19 nt, Artificial Sequence
  Description of Artificial Sequence: Synthetic oligonucleotide
caggucagcgaagcugcgg

SEQ ID NO: 2691171 - RNA, 19 nt, Artificial Sequence
  Description of Artificial Sequence: Synthetic oligonucleotide
gguccaagcuguaagcguc

SEQ ID NO: 2691172 - RNA, 19 nt, Artificial Sequence
  Description of Artificial Sequence: Synthetic oligonucleotide
augagcucgcaggacccag

SEQ ID NO: 2691173 - RNA, 19 nt, Artificial Sequence
  Description of Artificial Sequence: Synthetic oligonucleotide
aacaccgccgaggcccaug

SEQ ID NO: 2691174 - RNA, 19 nt, Artificial Sequence
  Description of Artificial Sequence: Synthetic oligonucleotide
uucacccagcagccgcgca

SEQ ID NO: 2691175 - RNA, 19 nt, Artificial Sequence
  Description of Artificial Sequence: Synthetic oligonucleotide
acaggcgacccaggucagc

SEQ ID NO: 2691176 - RNA, 19 nt, Artificial Sequence
  Description of Artificial Sequence: Synthetic oligonucleotide
guucacgagcgacgugccc

SEQ ID NO: 2691177 - RNA, 19 nt, Artificial Sequence
  Description of Artificial Sequence: Synthetic oligonucleotide
ucacgagcgacgugcccuc

SEQ ID NO: 2691178 - RNA, 19 nt, Artificial Sequence
  Description of Artificial Sequence: Synthetic oligonucleotide
cucgggccgguccucgggg

SEQ ID NO: 2691179 - RNA, 19 nt, Artificial Sequence
  Description of Artificial Sequence: Synthetic oligonucleotide
cauguucacgagcgacgug

SEQ ID NO: 2691180 - RNA, 19 nt, Artificial Sequence
  Description of Artificial Sequence: Synthetic oligonucleotide
gagcucagaugcuggcaga

SEQ ID NO: 2691181 - RNA, 19 nt, Artificial Sequence
  Description of Artificial Sequence: Synthetic oligonucleotide
uagcaaguguuggucguua

SEQ ID NO: 2691182 - RNA, 19 nt, Artificial Sequence
  Description of Artificial Sequence: Synthetic oligonucleotide
aggagcucagaugcuggca

SEQ ID NO: 2691183 - RNA, 19 nt, Artificial Sequence
  Description of Artificial Sequence: Synthetic oligonucleotide
auucuaccauugagugcac

SEQ ID NO: 2691184 - RNA, 19 nt, Artificial Sequence
  Description of Artificial Sequence: Synthetic oligonucleotide
gaccacucggugcggaucu

SEQ ID NO: 2691185 - RNA, 19 nt, Artificial Sequence
  Description of Artificial Sequence: Synthetic oligonucleotide
cucggggaaggcgucccgg

SEQ ID NO: 2691186 - RNA, 19 nt, Artificial Sequence
  Description of Artificial Sequence: Synthetic oligonucleotide
ccggcugacaaugagccug

SEQ ID NO: 2691187 - RNA, 19 nt, Artificial Sequence
  Description of Artificial Sequence: Synthetic oligonucleotide
gcggaucccguucacccag

SEQ ID NO: 2691188 - RNA, 19 nt, Artificial Sequence
  Description of Artificial Sequence: Synthetic oligonucleotide
ugccgcagcggcgcgcgcg

SEQ ID NO: 2691189 - RNA, 19 nt, Artificial Sequence
  Description of Artificial Sequence: Synthetic oligonucleotide
caggacccagaccuuccug

SEQ ID NO: 2691190 - RNA, 19 nt, Artificial Sequence
  Description of Artificial Sequence: Synthetic oligonucleotide
gcggaucucgaagaacucc

SEQ ID NO: 2691191 - RNA, 19 nt, Artificial Sequence
  Description of Artificial Sequence: Synthetic oligonucleotide
cgugcccucaaacaccgcc

SEQ ID NO: 2691192 - RNA, 19 nt, Artificial Sequence
  Description of Artificial Sequence: Synthetic oligonucleotide
ucccuuccuuucugauuca

SEQ ID NO: 2691193 - RNA, 19 nt, Artificial Sequence
  Description of Artificial Sequence: Synthetic oligonucleotide
guccuugccgcagcggcgc

SEQ ID NO: 2691194 - RNA, 19 nt, Artificial Sequence
  Description of Artificial Sequence: Synthetic oligonucleotide
cgccggcugacaaugagcc

SEQ ID NO: 2691195 - RNA, 19 nt, Artificial Sequence
  Description of Artificial Sequence: Synthetic oligonucleotide
caaugagccugcggauccc

SEQ ID NO: 2691196 - RNA, 19 nt, Artificial Sequence
  Description of Artificial Sequence: Synthetic oligonucleotide
gguaacaguaucacagccu

SEQ ID NO: 2691197 - RNA, 19 nt, Artificial Sequence
  Description of Artificial Sequence: Synthetic oligonucleotide
aggcgcuugcacaggcgac

SEQ ID NO: 2691198 - RNA, 19 nt, Artificial Sequence
  Description of Artificial Sequence: Synthetic oligonucleotide
gcuggcagagaggagguca

SEQ ID NO: 2691199 - RNA, 19 nt, Artificial Sequence
  Description of Artificial Sequence: Synthetic oligonucleotide
ggacccagaccuuccugug

SEQ ID NO: 2691200 - RNA, 19 nt, Artificial Sequence
  Description of Artificial Sequence: Synthetic oligonucleotide
gaugagcucgcaggaccca

SEQ ID NO: 2691201 - RNA, 19 nt, Artificial Sequence
  Description of Artificial Sequence: Synthetic oligonucleotide
gucucuaugucaugugcuu

SEQ ID NO: 2691202 - RNA, 19 nt, Artificial Sequence
  Description of Artificial Sequence: Synthetic oligonucleotide
gguagagcacgcugcgguc

SEQ ID NO: 2691203 - RNA, 19 nt, Artificial Sequence
  Description of Artificial Sequence: Synthetic oligonucleotide
agcugcggugcagguagag

SEQ ID NO: 2691204 - RNA, 19 nt, Artificial Sequence
  Description of Artificial Sequence: Synthetic oligonucleotide
acucggugcggaucucgaa

SEQ ID NO: 2691205 - RNA, 19 nt, Artificial Sequence
  Description of Artificial Sequence: Synthetic oligonucleotide
uccaagcuguaagcgucuc

SEQ ID NO: 2691206 - RNA, 19 nt, Artificial Sequence
  Description of Artificial Sequence: Synthetic oligonucleotide
ucgcaggacccagaccuuc

SEQ ID NO: 2691207 - RNA, 19 nt, Artificial Sequence
  Description of Artificial Sequence: Synthetic oligonucleotide
gaccuuccugugguccaag

SEQ ID NO: 2691208 - RNA, 19 nt, Artificial Sequence
  Description of Artificial Sequence: Synthetic oligonucleotide
gucccggaggcgcuugcac

SEQ ID NO: 2691209 - RNA, 19 nt, Artificial Sequence
  Description of Artificial Sequence: Synthetic oligonucleotide
ccguucacccagcagccgc

SEQ ID NO: 2691210 - RNA, 19 nt, Artificial Sequence
  Description of Artificial Sequence: Synthetic oligonucleotide
ccgcgcacgaacauguuca

SEQ ID NO: 2691211 - RNA, 19 nt, Artificial Sequence
  Description of Artificial Sequence: Synthetic oligonucleotide
cacaggcgacccaggucag

SEQ ID NO: 2691212 - RNA, 19 nt, Artificial Sequence
  Description of Artificial Sequence: Synthetic oligonucleotide
cgacgugcccucaaacacc

SEQ ID NO: 2691213 - RNA, 19 nt, Artificial Sequence
  Description of Artificial Sequence: Synthetic oligonucleotide
ggcgcuugcacaggcgacc

SEQ ID NO: 2691214 - RNA, 19 nt, Artificial Sequence
  Description of Artificial Sequence: Synthetic oligonucleotide
uccucccaucccuuccuuu

SEQ ID NO: 2691215 - RNA, 19 nt, Artificial Sequence
  Description of Artificial Sequence: Synthetic oligonucleotide
agcagccgcgcacgaacau

SEQ ID NO: 2691216 - RNA, 19 nt, Artificial Sequence
  Description of Artificial Sequence: Synthetic oligonucleotide
aaggcgucccggaggcgcu

SEQ ID NO: 2691217 - RNA, 19 nt, Artificial Sequence
  Description of Artificial Sequence: Synthetic oligonucleotide
caaacaccgccgaggccca

SEQ ID NO: 2691218 - RNA, 19 nt, Artificial Sequence
  Description of Artificial Sequence: Synthetic oligonucleotide
gcuguaagcgucucuuccu

SEQ ID NO: 2691219 - RNA, 19 nt, Artificial Sequence
  Description of Artificial Sequence: Synthetic oligonucleotide
caagcuguaagcgucucuu

SEQ ID NO: 2691220 - RNA, 19 nt, Artificial Sequence
  Description of Artificial Sequence: Synthetic oligonucleotide
ggagaugagcucgcaggac

SEQ ID NO: 2691221 - RNA, 19 nt, Artificial Sequence
  Description of Artificial Sequence: Synthetic oligonucleotide
ucggaccacucggugcgga

SEQ ID NO: 2691222 - RNA, 19 nt, Artificial Sequence
  Description of Artificial Sequence: Synthetic oligonucleotide
cccggaggcgcuugcacag

SEQ ID NO: 2691223 - RNA, 19 nt, Artificial Sequence
  Description of Artificial Sequence: Synthetic oligonucleotide
cacucggugcggaucucga

SEQ ID NO: 2691224 - RNA, 19 nt, Artificial Sequence
  Description of Artificial Sequence: Synthetic oligonucleotide
ucgggccgguccucgggga

SEQ ID NO: 2691225 - RNA, 19 nt, Artificial Sequence
  Description of Artificial Sequence: Synthetic oligonucleotide
gagcacgcugcggucggac

SEQ ID NO: 2691226 - RNA, 19 nt, Artificial Sequence
  Description of Artificial Sequence: Synthetic oligonucleotide
ggaggcgcuugcacaggcg

SEQ ID NO: 2691227 - RNA, 19 nt, Artificial Sequence
  Description of Artificial Sequence: Synthetic oligonucleotide
guucacccagcagccgcgc

SEQ ID NO: 2691228 - RNA, 19 nt, Artificial Sequence
  Description of Artificial Sequence: Synthetic oligonucleotide
aggcgacccaggucagcga

SEQ ID NO: 2691229 - RNA, 19 nt, Artificial Sequence
  Description of Artificial Sequence: Synthetic oligonucleotide
ucgucgccgcgccggcuga

SEQ ID NO: 2691230 - RNA, 19 nt, Artificial Sequence
  Description of Artificial Sequence: Synthetic oligonucleotide
ggucucuaugucaugugcu

SEQ ID NO: 2691231 - RNA, 19 nt, Artificial Sequence
  Description of Artificial Sequence: Synthetic oligonucleotide
ucgccgcgccggcugacaa

SEQ ID NO: 2691232 - RNA, 19 nt, Artificial Sequence
  Description of Artificial Sequence: Synthetic oligonucleotide
gcaugccccugccuccggg

SEQ ID NO: 2691233 - RNA, 19 nt, Artificial Sequence
  Description of Artificial Sequence: Synthetic oligonucleotide
acgagcgacgugcccucaa

SEQ ID NO: 2691234 - RNA, 19 nt, Artificial Sequence
  Description of Artificial Sequence: Synthetic oligonucleotide
ccuugauggcaagcagucc

SEQ ID NO: 2691235 - RNA, 19 nt, Artificial Sequence
  Description of Artificial Sequence: Synthetic oligonucleotide
gcaagcaguccuugccgca

SEQ ID NO: 2691236 - RNA, 19 nt, Artificial Sequence
  Description of Artificial Sequence: Synthetic oligonucleotide
gcugcggugcagguagagc

SEQ ID NO: 2691237 - RNA, 19 nt, Artificial Sequence
  Description of Artificial Sequence: Synthetic oligonucleotide
gcgcacgaacauguucacg

SEQ ID NO: 2691238 - RNA, 19 nt, Artificial Sequence
  Description of Artificial Sequence: Synthetic oligonucleotide
cagccgcgcacgaacaugu

SEQ ID NO: 2691239 - RNA, 19 nt, Artificial Sequence
  Description of Artificial Sequence: Synthetic oligonucleotide
gcucgggccgguccucggg

SEQ ID NO: 2691240 - RNA, 19 nt, Artificial Sequence
  Description of Artificial Sequence: Synthetic oligonucleotide
gcgcgcgccagcucgggcc

SEQ ID NO: 2691241 - RNA, 19 nt, Artificial Sequence
  Description of Artificial Sequence: Synthetic oligonucleotide
gccgcgcacgaacauguuc

SEQ ID NO: 2691242 - RNA, 19 nt, Artificial Sequence
  Description of Artificial Sequence: Synthetic oligonucleotide
gcacgcugcggucggacca

SEQ ID NO: 2691243 - RNA, 19 nt, Artificial Sequence
  Description of Artificial Sequence: Synthetic oligonucleotide
cagcagccgcgcacgaaca

SEQ ID NO: 2691244 - RNA, 19 nt, Artificial Sequence
  Description of Artificial Sequence: Synthetic oligonucleotide
ggcgacccaggucagcgaa

SEQ ID NO: 2691245 - RNA, 19 nt, Artificial Sequence
  Description of Artificial Sequence: Synthetic oligonucleotide
ggaucucgaagaacuccuc

SEQ ID NO: 2691246 - RNA, 19 nt, Artificial Sequence
  Description of Artificial Sequence: Synthetic oligonucleotide
gucggaccacucggugcgg

SEQ ID NO: 2691247 - RNA, 19 nt, Artificial Sequence
  Description of Artificial Sequence: Synthetic oligonucleotide
cagcgaagcugcggugcag

SEQ ID NO: 2691248 - RNA, 19 nt, Artificial Sequence
  Description of Artificial Sequence: Synthetic oligonucleotide
gcaguccuugccgcagcgg

SEQ ID NO: 2691249 - RNA, 19 nt, Artificial Sequence
  Description of Artificial Sequence: Synthetic oligonucleotide
cagcucgggccgguccucg

SEQ ID NO: 2691250 - RNA, 19 nt, Artificial Sequence
  Description of Artificial Sequence: Synthetic oligonucleotide
gcagccgcgcacgaacaug

SEQ ID NO: 2691251 - RNA, 19 nt, Artificial Sequence
  Description of Artificial Sequence: Synthetic oligonucleotide
cgaagaacuccuccucguc

SEQ ID NO: 2691252 - RNA, 19 nt, Artificial Sequence
  Description of Artificial Sequence: Synthetic oligonucleotide
acgugcccucaaacaccgc

SEQ ID NO: 2691253 - RNA, 19 nt, Artificial Sequence
  Description of Artificial Sequence: Synthetic oligonucleotide
gcggucggaccacucggug

SEQ ID NO: 2691254 - RNA, 19 nt, Artificial Sequence
  Description of Artificial Sequence: Synthetic oligonucleotide
ugcuggcagagaggagguc

SEQ ID NO: 2691255 - RNA, 19 nt, Artificial Sequence
  Description of Artificial Sequence: Synthetic oligonucleotide
gccgcgccggcugacaaug

SEQ ID NO: 2691256 - RNA, 19 nt, Artificial Sequence
  Description of Artificial Sequence: Synthetic oligonucleotide
gcacccuugguggugguaa

SEQ ID NO: 2691257 - RNA, 19 nt, Artificial Sequence
  Description of Artificial Sequence: Synthetic oligonucleotide
cggucggaccacucggugc

SEQ ID NO: 2691258 - RNA, 19 nt, Artificial Sequence
  Description of Artificial Sequence: Synthetic oligonucleotide
gcccucaaacaccgccgag

SEQ ID NO: 2691259 - RNA, 19 nt, Artificial Sequence
  Description of Artificial Sequence: Synthetic oligonucleotide
ccacucggugcggaucucg

SEQ ID NO: 2691260 - RNA, 19 nt, Artificial Sequence
  Description of Artificial Sequence: Synthetic oligonucleotide
ccugcggaucccguucacc

SEQ ID NO: 2691261 - RNA, 19 nt, Artificial Sequence
  Description of Artificial Sequence: Synthetic oligonucleotide
gcgccggcugacaaugagc

SEQ ID NO: 2691262 - RNA, 19 nt, Artificial Sequence
  Description of Artificial Sequence: Synthetic oligonucleotide
ggccgguccucggggaagg

SEQ ID NO: 2691263 - RNA, 19 nt, Artificial Sequence
  Description of Artificial Sequence: Synthetic oligonucleotide
aagcugcggugcagguaga

SEQ ID NO: 2691264 - RNA, 19 nt, Artificial Sequence
  Description of Artificial Sequence: Synthetic oligonucleotide
cgcaggacccagaccuucc

SEQ ID NO: 2691265 - RNA, 19 nt, Artificial Sequence
  Description of Artificial Sequence: Synthetic oligonucleotide
cgacccaggucagcgaagc

SEQ ID NO: 2691266 - RNA, 19 nt, Artificial Sequence
  Description of Artificial Sequence: Synthetic oligonucleotide
ggaccacucggugcggauc

SEQ ID NO: 2691267 - RNA, 19 nt, Artificial Sequence
  Description of Artificial Sequence: Synthetic oligonucleotide
ggcugacaaugagccugcg

SEQ ID NO: 2691268 - RNA, 19 nt, Artificial Sequence
  Description of Artificial Sequence: Synthetic oligonucleotide
guccaagcuguaagcgucu

SEQ ID NO: 2691269 - RNA, 19 nt, Artificial Sequence
  Description of Artificial Sequence: Synthetic oligonucleotide
ccgcgcaugccccugccuc

SEQ ID NO: 2691270 - RNA, 19 nt, Artificial Sequence
  Description of Artificial Sequence: Synthetic oligonucleotide
ccgaggcccaugccgcggg

SEQ ID NO: 2691271 - RNA, 19 nt, Artificial Sequence
  Description of Artificial Sequence: Synthetic oligonucleotide
uugccgcagcggcgcgcgc

SEQ ID NO: 2691272 - RNA, 19 nt, Artificial Sequence
  Description of Artificial Sequence: Synthetic oligonucleotide
caccgccgaggcccaugcc

SEQ ID NO: 2691273 - RNA, 19 nt, Artificial Sequence
  Description of Artificial Sequence: Synthetic oligonucleotide
gcgcaugccccugccuccg

SEQ ID NO: 2691274 - RNA, 19 nt, Artificial Sequence
  Description of Artificial Sequence: Synthetic oligonucleotide
ccgguccucggggaaggcg

SEQ ID NO: 2691275 - RNA, 19 nt, Artificial Sequence
  Description of Artificial Sequence: Synthetic oligonucleotide
agagcacgcugcggucgga

SEQ ID NO: 2691276 - RNA, 19 nt, Artificial Sequence
  Description of Artificial Sequence: Synthetic oligonucleotide
aaacaccgccgaggcccau

SEQ ID NO: 2691277 - RNA, 19 nt, Artificial Sequence
  Description of Artificial Sequence: Synthetic oligonucleotide
ccuggucucuaugucaugu

SEQ ID NO: 2691278 - RNA, 19 nt, Artificial Sequence
  Description of Artificial Sequence: Synthetic oligonucleotide
ggaaggcgucccggaggcg

SEQ ID NO: 2691279 - RNA, 19 nt, Artificial Sequence
  Description of Artificial Sequence: Synthetic oligonucleotide
cgcgcaugccccugccucc

SEQ ID NO: 2691280 - RNA, 19 nt, Artificial Sequence
  Description of Artificial Sequence: Synthetic oligonucleotide
cuaugucaugugcuuccuu

SEQ ID NO: 2691281 - RNA, 19 nt, Artificial Sequence
  Description of Artificial Sequence: Synthetic oligonucleotide
agcacccuuggugguggua

SEQ ID NO: 2691282 - RNA, 19 nt, Artificial Sequence
  Description of Artificial Sequence: Synthetic oligonucleotide
cggugcagguagagcacgc

SEQ ID NO: 2691283 - RNA, 19 nt, Artificial Sequence
  Description of Artificial Sequence: Synthetic oligonucleotide
gcucagaugcuggcagaga

SEQ ID NO: 2691284 - RNA, 19 nt, Artificial Sequence
  Description of Artificial Sequence: Synthetic oligonucleotide
cggaucucgaagaacuccu

SEQ ID NO: 2691285 - RNA, 19 nt, Artificial Sequence
  Description of Artificial Sequence: Synthetic oligonucleotide
gcgacccaggucagcgaag

SEQ ID NO: 2691286 - RNA, 19 nt, Artificial Sequence
  Description of Artificial Sequence: Synthetic oligonucleotide
cggaggcgcuugcacaggc

SEQ ID NO: 2691287 - RNA, 19 nt, Artificial Sequence
  Description of Artificial Sequence: Synthetic oligonucleotide
gggccgguccucggggaag

SEQ ID NO: 2691288 - RNA, 19 nt, Artificial Sequence
  Description of Artificial Sequence: Synthetic oligonucleotide
augccgcgggccgcgcaug

SEQ ID NO: 2691289 - RNA, 19 nt, Artificial Sequence
  Description of Artificial Sequence: Synthetic oligonucleotide
ccuuccugugguccaagcu

SEQ ID NO: 2691290 - RNA, 19 nt, Artificial Sequence
  Description of Artificial Sequence: Synthetic oligonucleotide
cgcgccggcugacaaugag

SEQ ID NO: 2691291 - RNA, 19 nt, Artificial Sequence
  Description of Artificial Sequence: Synthetic oligonucleotide
cccguucacccagcagccg

SEQ ID NO: 2691292 - RNA, 19 nt, Artificial Sequence
  Description of Artificial Sequence: Synthetic oligonucleotide
cgcgcacgaacauguucac

SEQ ID NO: 2691293 - RNA, 19 nt, Artificial Sequence
  Description of Artificial Sequence: Synthetic oligonucleotide
cgaacauguucacgagcga

SEQ ID NO: 2691294 - RNA, 19 nt, Artificial Sequence
  Description of Artificial Sequence: Synthetic oligonucleotide
ggccgcgcaugccccugcc

SEQ ID NO: 2691295 - RNA, 19 nt, Artificial Sequence
  Description of Artificial Sequence: Synthetic oligonucleotide
gcaggacccagaccuuccu

SEQ ID NO: 2691296 - RNA, 19 nt, Artificial Sequence
  Description of Artificial Sequence: Synthetic oligonucleotide
cggggaaggcgucccggag

SEQ ID NO: 2691297 - RNA, 19 nt, Artificial Sequence
  Description of Artificial Sequence: Synthetic oligonucleotide
caugccgcgggccgcgcau

SEQ ID NO: 2691298 - RNA, 19 nt, Artificial Sequence
  Description of Artificial Sequence: Synthetic oligonucleotide
gucgccgcgccggcugaca

SEQ ID NO: 2691299 - RNA, 19 nt, Artificial Sequence
  Description of Artificial Sequence: Synthetic oligonucleotide
ccggaggcgcuugcacagg

SEQ ID NO: 2691300 - RNA, 19 nt, Artificial Sequence
  Description of Artificial Sequence: Synthetic oligonucleotide
ggucguuaguagacacagu

SEQ ID NO: 2691301 - RNA, 19 nt, Artificial Sequence
  Description of Artificial Sequence: Synthetic oligonucleotide
ccuugguggugguaacagu

SEQ ID NO: 2691302 - RNA, 19 nt, Artificial Sequence
  Description of Artificial Sequence: Synthetic oligonucleotide
cgcgcgccagcucgggccg

SEQ ID NO: 2691303 - RNA, 19 nt, Artificial Sequence
  Description of Artificial Sequence: Synthetic oligonucleotide
gccugcggaucccguucac

SEQ ID NO: 2691304 - RNA, 19 nt, Artificial Sequence
  Description of Artificial Sequence: Synthetic oligonucleotide
acgcugcggucggaccacu

SEQ ID NO: 2691305 - RNA, 19 nt, Artificial Sequence
  Description of Artificial Sequence: Synthetic oligonucleotide
cggaucccguucacccagc

SEQ ID NO: 2691306 - RNA, 19 nt, Artificial Sequence
  Description of Artificial Sequence: Synthetic oligonucleotide
gggccgcgcaugccccugc

SEQ ID NO: 2691307 - RNA, 19 nt, Artificial Sequence
  Description of Artificial Sequence: Synthetic oligonucleotide
ccugugguccaagcuguaa

SEQ ID NO: 2691308 - RNA, 19 nt, Artificial Sequence
  Description of Artificial Sequence: Synthetic oligonucleotide
ccuccucgucgccgcgccg

SEQ ID NO: 2691309 - RNA, 19 nt, Artificial Sequence
  Description of Artificial Sequence: Synthetic oligonucleotide
gcgucccggaggcgcuugc

SEQ ID NO: 2691310 - RNA, 19 nt, Artificial Sequence
  Description of Artificial Sequence: Synthetic oligonucleotide
ccaagcuguaagcgucucu

SEQ ID NO: 2691311 - RNA, 19 nt, Artificial Sequence
  Description of Artificial Sequence: Synthetic oligonucleotide
ggcgucccggaggcgcuug

SEQ ID NO: 2691312 - RNA, 19 nt, Artificial Sequence
  Description of Artificial Sequence: Synthetic oligonucleotide
cucgcaggacccagaccuu

SEQ ID NO: 2691313 - RNA, 19 nt, Artificial Sequence
  Description of Artificial Sequence: Synthetic oligonucleotide
cgccagcucgggccggucc

SEQ ID NO: 2691314 - RNA, 19 nt, Artificial Sequence
  Description of Artificial Sequence: Synthetic oligonucleotide
gcgaagcugcggugcaggu

SEQ ID NO: 2691315 - RNA, 19 nt, Artificial Sequence
  Description of Artificial Sequence: Synthetic oligonucleotide
cgcgggccgcgcaugcccc

SEQ ID NO: 2691316 - RNA, 19 nt, Artificial Sequence
  Description of Artificial Sequence: Synthetic oligonucleotide
cacgagcgacgugcccuca

SEQ ID NO: 2691317 - RNA, 19 nt, Artificial Sequence
  Description of Artificial Sequence: Synthetic oligonucleotide
ccaucccuuccuuucugau

SEQ ID NO: 2691318 - RNA, 19 nt, Artificial Sequence
  Description of Artificial Sequence: Synthetic oligonucleotide
agccgcgcacgaacauguu

SEQ ID NO: 2691319 - RNA, 19 nt, Artificial Sequence
  Description of Artificial Sequence: Synthetic oligonucleotide
gccggcugacaaugagccu

SEQ ID NO: 2691320 - RNA, 19 nt, Artificial Sequence
  Description of Artificial Sequence: Synthetic oligonucleotide
cgagcgacgugcccucaaa

SEQ ID NO: 2691321 - RNA, 19 nt, Artificial Sequence
  Description of Artificial Sequence: Synthetic oligonucleotide
cgcaugccccugccuccgg

SEQ ID NO: 2691322 - RNA, 19 nt, Artificial Sequence
  Description of Artificial Sequence: Synthetic oligonucleotide
aggcgucccggaggcgcuu

SEQ ID NO: 2691323 - RNA, 19 nt, Artificial Sequence
  Description of Artificial Sequence: Synthetic oligonucleotide
gccgguccucggggaaggc

SEQ ID NO: 2691324 - RNA, 19 nt, Artificial Sequence
  Description of Artificial Sequence: Synthetic oligonucleotide
gcgcgcgcgccagcucggg

SEQ ID NO: 2691325 - RNA, 19 nt, Artificial Sequence
  Description of Artificial Sequence: Synthetic oligonucleotide
cggugcggaucucgaagaa

SEQ ID NO: 2691326 - RNA, 19 nt, Artificial Sequence
  Description of Artificial Sequence: Synthetic oligonucleotide
cgcugcggucggaccacuc

SEQ ID NO: 2691327 - RNA, 19 nt, Artificial Sequence
  Description of Artificial Sequence: Synthetic oligonucleotide
cgcgcgcgccagcucgggc

SEQ ID NO: 2691328 - RNA, 19 nt, Artificial Sequence
  Description of Artificial Sequence: Synthetic oligonucleotide
ccaugccgcgggccgcgca

SEQ ID NO: 2691329 - RNA, 19 nt, Artificial Sequence
  Description of Artificial Sequence: Synthetic oligonucleotide
gccgcgcaugccccugccu

SEQ ID NO: 2691330 - RNA, 19 nt, Artificial Sequence
  Description of Artificial Sequence: Synthetic oligonucleotide
gcgcgccagcucgggccgg

SEQ ID NO: 2691331 - RNA, 19 nt, Artificial Sequence
  Description of Artificial Sequence: Synthetic oligonucleotide
cccaugccgcgggccgcgc

SEQ ID NO: 2691332 - RNA, 19 nt, Artificial Sequence
  Description of Artificial Sequence: Synthetic oligonucleotide
ccgcgccggcugacaauga

SEQ ID NO: 2691333 - RNA, 19 nt, Artificial Sequence
  Description of Artificial Sequence: Synthetic oligonucleotide
cgucccggaggcgcuugca

SEQ ID NO: 2691334 - RNA, 19 nt, Artificial Sequence
  Description of Artificial Sequence: Synthetic oligonucleotide
cgggccgcgcaugccccug

SEQ ID NO: 2691335 - RNA, 19 nt, Artificial Sequence
  Description of Artificial Sequence: Synthetic oligonucleotide
gcgccagcucgggccgguc

SEQ ID NO: 2691336 - RNA, 19 nt, Artificial Sequence
  Description of Artificial Sequence: Synthetic oligonucleotide
cggaccacucggugcggau

SEQ ID NO: 2691337 - RNA, 19 nt, Artificial Sequence
  Description of Artificial Sequence: Synthetic oligonucleotide
cgucgccgcgccggcugac

SEQ ID NO: 2691338 - RNA, 19 nt, Artificial Sequence
  Description of Artificial Sequence: Synthetic oligonucleotide
ccccacccgggguccuccu

SEQ ID NO: 2691339 - RNA, 19 nt, Artificial Sequence
  Description of Artificial Sequence: Synthetic oligonucleotide
cgccgcgccggcugacaau

SEQ ID NO: 2691340 - RNA, 19 nt, Artificial Sequence
  Description of Artificial Sequence: Synthetic oligonucleotide
uguugcuugauguaggagg

SEQ ID NO: 2691341 - RNA, 19 nt, Artificial Sequence
  Description of Artificial Sequence: Synthetic oligonucleotide
agugcauagaggaagaugc

SEQ ID NO: 2691342 - RNA, 19 nt, Artificial Sequence
  Description of Artificial Sequence: Synthetic oligonucleotide
ugaaagagaagacaaacuc

SEQ ID NO: 2691343 - RNA, 19 nt, Artificial Sequence
  Description of Artificial Sequence: Synthetic oligonucleotide
guuacaaggggacagaggc

SEQ ID NO: 2691344 - RNA, 19 nt, Artificial Sequence
  Description of Artificial Sequence: Synthetic oligonucleotide
aagacaaacuccuuucugu

SEQ ID NO: 2691345 - RNA, 19 nt, Artificial Sequence
  Description of Artificial Sequence: Synthetic oligonucleotide
uucaucaugcccaagccgc

SEQ ID NO: 2691346 - RNA, 19 nt, Artificial Sequence
  Description of Artificial Sequence: Synthetic oligonucleotide
aaagagaagacaaacuccu

SEQ ID NO: 2691347 - RNA, 19 nt, Artificial Sequence
  Description of Artificial Sequence: Synthetic oligonucleotide
cuuucugucacacaugcug

SEQ ID NO: 2691348 - RNA, 19 nt, Artificial Sequence
  Description of Artificial Sequence: Synthetic oligonucleotide
uuucugucacacaugcugg

SEQ ID NO: 2691349 - RNA, 19 nt, Artificial Sequence
  Description of Artificial Sequence: Synthetic oligonucleotide
auaccuagggauuccuugc

SEQ ID NO: 2691350 - RNA, 19 nt, Artificial Sequence
  Description of Artificial Sequence: Synthetic oligonucleotide
uuccuugcaguucugcugg

SEQ ID NO: 2691351 - RNA, 19 nt, Artificial Sequence
  Description of Artificial Sequence: Synthetic oligonucleotide
accgcagccgcccauauac

SEQ ID NO: 2691352 - RNA, 19 nt, Artificial Sequence
  Description of Artificial Sequence: Synthetic oligonucleotide
accaguagagugcauagag

SEQ ID NO: 2691353 - RNA, 19 nt, Artificial Sequence
  Description of Artificial Sequence: Synthetic oligonucleotide
gauaccuagggauuccuug

SEQ ID NO: 2691354 - RNA, 19 nt, Artificial Sequence
  Description of Artificial Sequence: Synthetic oligonucleotide
uccuuucugucacacaugc

SEQ ID NO: 2691355 - RNA, 19 nt, Artificial Sequence
  Description of Artificial Sequence: Synthetic oligonucleotide
acuguuuuggugcagguau

SEQ ID NO: 2691356 - RNA, 19 nt, Artificial Sequence
  Description of Artificial Sequence: Synthetic oligonucleotide
acuaggcaaagccaugccg

SEQ ID NO: 2691357 - RNA, 19 nt, Artificial Sequence
  Description of Artificial Sequence: Synthetic oligonucleotide
uguugggcgcgcaugagag

SEQ ID NO: 2691358 - RNA, 19 nt, Artificial Sequence
  Description of Artificial Sequence: Synthetic oligonucleotide
auucuccggcuccagaacc

SEQ ID NO: 2691359 - RNA, 19 nt, Artificial Sequence
  Description of Artificial Sequence: Synthetic oligonucleotide
auucaucaugcccaagccg

SEQ ID NO: 2691360 - RNA, 19 nt, Artificial Sequence
  Description of Artificial Sequence: Synthetic oligonucleotide
cacguugccagccaagugg

SEQ ID NO: 2691361 - RNA, 19 nt, Artificial Sequence
  Description of Artificial Sequence: Synthetic oligonucleotide
uggccauucaucaugccca

SEQ ID NO: 2691362 - RNA, 19 nt, Artificial Sequence
  Description of Artificial Sequence: Synthetic oligonucleotide
aaagccaugccguccacgu

SEQ ID NO: 2691363 - RNA, 19 nt, Artificial Sequence
  Description of Artificial Sequence: Synthetic oligonucleotide
agacaaacuccuuucuguc

SEQ ID NO: 2691364 - RNA, 19 nt, Artificial Sequence
  Description of Artificial Sequence: Synthetic oligonucleotide
gaagacaaacuccuuucug

SEQ ID NO: 2691365 - RNA, 19 nt, Artificial Sequence
  Description of Artificial Sequence: Synthetic oligonucleotide
cugugagugauaccuaggg

SEQ ID NO: 2691366 - RNA, 19 nt, Artificial Sequence
  Description of Artificial Sequence: Synthetic oligonucleotide
uggaguagacggcaugcgg

SEQ ID NO: 2691367 - RNA, 19 nt, Artificial Sequence
  Description of Artificial Sequence: Synthetic oligonucleotide
guagagugcauagaggaag

SEQ ID NO: 2691368 - RNA, 19 nt, Artificial Sequence
  Description of Artificial Sequence: Synthetic oligonucleotide
aucacacauggcuugaugu

SEQ ID NO: 2691369 - RNA, 19 nt, Artificial Sequence
  Description of Artificial Sequence: Synthetic oligonucleotide
agggaauguguggagaggc

SEQ ID NO: 2691370 - RNA, 19 nt, Artificial Sequence
  Description of Artificial Sequence: Synthetic oligonucleotide
uccggcuccagaaccaccg

SEQ ID NO: 2691371 - RNA, 19 nt, Artificial Sequence
  Description of Artificial Sequence: Synthetic oligonucleotide
gacugugagugauaccuag

SEQ ID NO: 2691372 - RNA, 19 nt, Artificial Sequence
  Description of Artificial Sequence: Synthetic oligonucleotide
gguaguaggacccuccacc

SEQ ID NO: 2691373 - RNA, 19 nt, Artificial Sequence
  Description of Artificial Sequence: Synthetic oligonucleotide
guaggugaccugcuggugg

SEQ ID NO: 2691374 - RNA, 19 nt, Artificial Sequence
  Description of Artificial Sequence: Synthetic oligonucleotide
ugagcugucguggugcggg

SEQ ID NO: 2691375 - RNA, 19 nt, Artificial Sequence
  Description of Artificial Sequence: Synthetic oligonucleotide
aaacuccuuucugucacac

SEQ ID NO: 2691376 - RNA, 19 nt, Artificial Sequence
  Description of Artificial Sequence: Synthetic oligonucleotide
acuccuuucugucacacau

SEQ ID NO: 2691377 - RNA, 19 nt, Artificial Sequence
  Description of Artificial Sequence: Synthetic oligonucleotide
aaguggccauucaucaugc

SEQ ID NO: 2691378 - RNA, 19 nt, Artificial Sequence
  Description of Artificial Sequence: Synthetic oligonucleotide
agggcggccaagcugcugc

SEQ ID NO: 2691379 - RNA, 19 nt, Artificial Sequence
  Description of Artificial Sequence: Synthetic oligonucleotide
ugugagugauaccuaggga

SEQ ID NO: 2691380 - RNA, 19 nt, Artificial Sequence
  Description of Artificial Sequence: Synthetic oligonucleotide
cauucaucaugcccaagcc

SEQ ID NO: 2691381 - RNA, 19 nt, Artificial Sequence
  Description of Artificial Sequence: Synthetic oligonucleotide
caguagagugcauagagga

SEQ ID NO: 2691382 - RNA, 19 nt, Artificial Sequence
  Description of Artificial Sequence: Synthetic oligonucleotide
agaggcuguugcuugaugu

SEQ ID NO: 2691383 - RNA, 19 nt, Artificial Sequence
  Description of Artificial Sequence: Synthetic oligonucleotide
caaguggccauucaucaug

SEQ ID NO: 2691384 - RNA, 19 nt, Artificial Sequence
  Description of Artificial Sequence: Synthetic oligonucleotide
ucacaucacacauggcuug

SEQ ID NO: 2691385 - RNA, 19 nt, Artificial Sequence
  Description of Artificial Sequence: Synthetic oligonucleotide
agugauaccuagggauucc

SEQ ID NO: 2691386 - RNA, 19 nt, Artificial Sequence
  Description of Artificial Sequence: Synthetic oligonucleotide
uugagagcugcggaggccg

SEQ ID NO: 2691387 - RNA, 19 nt, Artificial Sequence
  Description of Artificial Sequence: Synthetic oligonucleotide
uagaggaagaugccauggc

SEQ ID NO: 2691388 - RNA, 19 nt, Artificial Sequence
  Description of Artificial Sequence: Synthetic oligonucleotide
uggccgcuggguuacaagg

SEQ ID NO: 2691389 - RNA, 19 nt, Artificial Sequence
  Description of Artificial Sequence: Synthetic oligonucleotide
uucugucacacaugcuggg

SEQ ID NO: 2691390 - RNA, 19 nt, Artificial Sequence
  Description of Artificial Sequence: Synthetic oligonucleotide
agguguggcaccgagugac

SEQ ID NO: 2691391 - RNA, 19 nt, Artificial Sequence
  Description of Artificial Sequence: Synthetic oligonucleotide
agaaccaccgcagccgccc

SEQ ID NO: 2691392 - RNA, 19 nt, Artificial Sequence
  Description of Artificial Sequence: Synthetic oligonucleotide
uguugagagcugcggaggc

SEQ ID NO: 2691393 - RNA, 19 nt, Artificial Sequence
  Description of Artificial Sequence: Synthetic oligonucleotide
ugcugggcgacugugagug

SEQ ID NO: 2691394 - RNA, 19 nt, Artificial Sequence
  Description of Artificial Sequence: Synthetic oligonucleotide
cuugcaguucugcuggccc

SEQ ID NO: 2691395 - RNA, 19 nt, Artificial Sequence
  Description of Artificial Sequence: Synthetic oligonucleotide
aguaggacccuccaccagu

SEQ ID NO: 2691396 - RNA, 19 nt, Artificial Sequence
  Description of Artificial Sequence: Synthetic oligonucleotide
cugucacacaugcugggcg

SEQ ID NO: 2691397 - RNA, 19 nt, Artificial Sequence
  Description of Artificial Sequence: Synthetic oligonucleotide
ugagugauaccuagggauu

SEQ ID NO: 2691398 - RNA, 19 nt, Artificial Sequence
  Description of Artificial Sequence: Synthetic oligonucleotide
ugacuaggcaaagccaugc

SEQ ID NO: 2691399 - RNA, 19 nt, Artificial Sequence
  Description of Artificial Sequence: Synthetic oligonucleotide
guugcuugauguaggaggc

SEQ ID NO: 2691400 - RNA, 19 nt, Artificial Sequence
  Description of Artificial Sequence: Synthetic oligonucleotide
uugcaguucugcuggcccg

SEQ ID NO: 2691401 - RNA, 19 nt, Artificial Sequence
  Description of Artificial Sequence: Synthetic oligonucleotide
agcgccaggcuguugggcg

SEQ ID NO: 2691402 - RNA, 19 nt, Artificial Sequence
  Description of Artificial Sequence: Synthetic oligonucleotide
gaauguguggagaggcugc

SEQ ID NO: 2691403 - RNA, 19 nt, Artificial Sequence
  Description of Artificial Sequence: Synthetic oligonucleotide
uguggcaccgagugacuag

SEQ ID NO: 2691404 - RNA, 19 nt, Artificial Sequence
  Description of Artificial Sequence: Synthetic oligonucleotide
uauucuccggcuccagaac

SEQ ID NO: 2691405 - RNA, 19 nt, Artificial Sequence
  Description of Artificial Sequence: Synthetic oligonucleotide
caagcugcugcggagcugg

SEQ ID NO: 2691406 - RNA, 19 nt, Artificial Sequence
  Description of Artificial Sequence: Synthetic oligonucleotide
ugauguaggaggccccgcu

SEQ ID NO: 2691407 - RNA, 19 nt, Artificial Sequence
  Description of Artificial Sequence: Synthetic oligonucleotide
ucacacauggcuugauguc

SEQ ID NO: 2691408 - RNA, 19 nt, Artificial Sequence
  Description of Artificial Sequence: Synthetic oligonucleotide
agguauggcugguccaggg

SEQ ID NO: 2691409 - RNA, 19 nt, Artificial Sequence
  Description of Artificial Sequence: Synthetic oligonucleotide
gacaaacuccuuucuguca

SEQ ID NO: 2691410 - RNA, 19 nt, Artificial Sequence
  Description of Artificial Sequence: Synthetic oligonucleotide
gagugcauagaggaagaug

SEQ ID NO: 2691411 - RNA, 19 nt, Artificial Sequence
  Description of Artificial Sequence: Synthetic oligonucleotide
ugucacacaugcugggcga

SEQ ID NO: 2691412 - RNA, 19 nt, Artificial Sequence
  Description of Artificial Sequence: Synthetic oligonucleotide
gaugucuugguaggugacc

SEQ ID NO: 2691413 - RNA, 19 nt, Artificial Sequence
  Description of Artificial Sequence: Synthetic oligonucleotide
uugggcgcgcaugagaggc

SEQ ID NO: 2691414 - RNA, 19 nt, Artificial Sequence
  Description of Artificial Sequence: Synthetic oligonucleotide
ucaucaugcccaagccgcc

SEQ ID NO: 2691415 - RNA, 19 nt, Artificial Sequence
  Description of Artificial Sequence: Synthetic oligonucleotide
uacgaguggccgccguugg

SEQ ID NO: 2691416 - RNA, 19 nt, Artificial Sequence
  Description of Artificial Sequence: Synthetic oligonucleotide
ugaugucuugguaggugac

SEQ ID NO: 2691417 - RNA, 19 nt, Artificial Sequence
  Description of Artificial Sequence: Synthetic oligonucleotide
caugcugggcgacugugag

SEQ ID NO: 2691418 - RNA, 19 nt, Artificial Sequence
  Description of Artificial Sequence: Synthetic oligonucleotide
gugagugauaccuagggau

SEQ ID NO: 2691419 - RNA, 19 nt, Artificial Sequence
  Description of Artificial Sequence: Synthetic oligonucleotide
cuugauguaggaggccccg

SEQ ID NO: 2691420 - RNA, 19 nt, Artificial Sequence
  Description of Artificial Sequence: Synthetic oligonucleotide
agugacuaggcaaagccau

SEQ ID NO: 2691421 - RNA, 19 nt, Artificial Sequence
  Description of Artificial Sequence: Synthetic oligonucleotide
gacuaggcaaagccaugcc

SEQ ID NO: 2691422 - RNA, 19 nt, Artificial Sequence
  Description of Artificial Sequence: Synthetic oligonucleotide
ggcuccaugaccccgccgg

SEQ ID NO: 2691423 - RNA, 19 nt, Artificial Sequence
  Description of Artificial Sequence: Synthetic oligonucleotide
uaccuagggauuccuugca

SEQ ID NO: 2691424 - RNA, 19 nt, Artificial Sequence
  Description of Artificial Sequence: Synthetic oligonucleotide
uccaugaccccgccggcgc

SEQ ID NO: 2691425 - RNA, 19 nt, Artificial Sequence
  Description of Artificial Sequence: Synthetic oligonucleotide
cuggguuacaaggggacag

SEQ ID NO: 2691426 - RNA, 19 nt, Artificial Sequence
  Description of Artificial Sequence: Synthetic oligonucleotide
acguugccagccaaguggc

SEQ ID NO: 2691427 - RNA, 19 nt, Artificial Sequence
  Description of Artificial Sequence: Synthetic oligonucleotide
ucugucacacaugcugggc

SEQ ID NO: 2691428 - RNA, 19 nt, Artificial Sequence
  Description of Artificial Sequence: Synthetic oligonucleotide
aacuccuuucugucacaca

SEQ ID NO: 2691429 - RNA, 19 nt, Artificial Sequence
  Description of Artificial Sequence: Synthetic oligonucleotide
uaggaggccccgcuguuga

SEQ ID NO: 2691430 - RNA, 19 nt, Artificial Sequence
  Description of Artificial Sequence: Synthetic oligonucleotide
guagacggcaugcggcucc

SEQ ID NO: 2691431 - RNA, 19 nt, Artificial Sequence
  Description of Artificial Sequence: Synthetic oligonucleotide
gaggccccgcuguugagag

SEQ ID NO: 2691432 - RNA, 19 nt, Artificial Sequence
  Description of Artificial Sequence: Synthetic oligonucleotide
cuguugagagcugcggagg

SEQ ID NO: 2691433 - RNA, 19 nt, Artificial Sequence
  Description of Artificial Sequence: Synthetic oligonucleotide
acugugagugauaccuagg

SEQ ID NO: 2691434 - RNA, 19 nt, Artificial Sequence
  Description of Artificial Sequence: Synthetic oligonucleotide
acggcaugcggcuccauga

SEQ ID NO: 2691435 - RNA, 19 nt, Artificial Sequence
  Description of Artificial Sequence: Synthetic oligonucleotide
guaguaggacccuccacca

SEQ ID NO: 2691436 - RNA, 19 nt, Artificial Sequence
  Description of Artificial Sequence: Synthetic oligonucleotide
accuagggauuccuugcag

SEQ ID NO: 2691437 - RNA, 19 nt, Artificial Sequence
  Description of Artificial Sequence: Synthetic oligonucleotide
aguggccgccguuggaggg

SEQ ID NO: 2691438 - RNA, 19 nt, Artificial Sequence
  Description of Artificial Sequence: Synthetic oligonucleotide
ucuugguaggugaccugcu

SEQ ID NO: 2691439 - RNA, 19 nt, Artificial Sequence
  Description of Artificial Sequence: Synthetic oligonucleotide
cauugaaagagaagacaaa

SEQ ID NO: 2691440 - RNA, 19 nt, Artificial Sequence
  Description of Artificial Sequence: Synthetic oligonucleotide
aggcaaagccaugccgucc

SEQ ID NO: 2691441 - RNA, 19 nt, Artificial Sequence
  Description of Artificial Sequence: Synthetic oligonucleotide
gcggagcuggaguagacgg

SEQ ID NO: 2691442 - RNA, 19 nt, Artificial Sequence
  Description of Artificial Sequence: Synthetic oligonucleotide
ugcggagcuggaguagacg

SEQ ID NO: 2691443 - RNA, 19 nt, Artificial Sequence
  Description of Artificial Sequence: Synthetic oligonucleotide
gcuguugagagcugcggag

SEQ ID NO: 2691444 - RNA, 19 nt, Artificial Sequence
  Description of Artificial Sequence: Synthetic oligonucleotide
uugugacuguuuuggugca

SEQ ID NO: 2691445 - RNA, 19 nt, Artificial Sequence
  Description of Artificial Sequence: Synthetic oligonucleotide
gaagaugccauggcauuga

SEQ ID NO: 2691446 - RNA, 19 nt, Artificial Sequence
  Description of Artificial Sequence: Synthetic oligonucleotide
ugcagguauggcuggucca

SEQ ID NO: 2691447 - RNA, 19 nt, Artificial Sequence
  Description of Artificial Sequence: Synthetic oligonucleotide
cuugguaggugaccugcug

SEQ ID NO: 2691448 - RNA, 19 nt, Artificial Sequence
  Description of Artificial Sequence: Synthetic oligonucleotide
uauggcugguccagggaau

SEQ ID NO: 2691449 - RNA, 19 nt, Artificial Sequence
  Description of Artificial Sequence: Synthetic oligonucleotide
cacugagcugucguggugc

SEQ ID NO: 2691450 - RNA, 19 nt, Artificial Sequence
  Description of Artificial Sequence: Synthetic oligonucleotide
ugguaguaggacccuccac

SEQ ID NO: 2691451 - RNA, 19 nt, Artificial Sequence
  Description of Artificial Sequence: Synthetic oligonucleotide
aggaagaugccauggcauu

SEQ ID NO: 2691452 - RNA, 19 nt, Artificial Sequence
  Description of Artificial Sequence: Synthetic oligonucleotide
uuggccgcuggguuacaag

SEQ ID NO: 2691453 - RNA, 19 nt, Artificial Sequence
  Description of Artificial Sequence: Synthetic oligonucleotide
gugcagguauggcuggucc

SEQ ID NO: 2691454 - RNA, 19 nt, Artificial Sequence
  Description of Artificial Sequence: Synthetic oligonucleotide
uaggugaccugcugguggu

SEQ ID NO: 2691455 - RNA, 19 nt, Artificial Sequence
  Description of Artificial Sequence: Synthetic oligonucleotide
ccaguagagugcauagagg

SEQ ID NO: 2691456 - RNA, 19 nt, Artificial Sequence
  Description of Artificial Sequence: Synthetic oligonucleotide
uccagggaauguguggaga

SEQ ID NO: 2691457 - RNA, 19 nt, Artificial Sequence
  Description of Artificial Sequence: Synthetic oligonucleotide
gaguggccgccguuggagg

SEQ ID NO: 2691458 - RNA, 19 nt, Artificial Sequence
  Description of Artificial Sequence: Synthetic oligonucleotide
cuaggcaaagccaugccgu

SEQ ID NO: 2691459 - RNA, 19 nt, Artificial Sequence
  Description of Artificial Sequence: Synthetic oligonucleotide
ggaguagacggcaugcggc

SEQ ID NO: 2691460 - RNA, 19 nt, Artificial Sequence
  Description of Artificial Sequence: Synthetic oligonucleotide
cuguuuuggugcagguaug

SEQ ID NO: 2691461 - RNA, 19 nt, Artificial Sequence
  Description of Artificial Sequence: Synthetic oligonucleotide
uccaccaguagagugcaua

SEQ ID NO: 2691462 - RNA, 19 nt, Artificial Sequence
  Description of Artificial Sequence: Synthetic oligonucleotide
gaagcgggcacugagcugu

SEQ ID NO: 2691463 - RNA, 19 nt, Artificial Sequence
  Description of Artificial Sequence: Synthetic oligonucleotide
gagugauaccuagggauuc

SEQ ID NO: 2691464 - RNA, 19 nt, Artificial Sequence
  Description of Artificial Sequence: Synthetic oligonucleotide
guggcaccgagugacuagg

SEQ ID NO: 2691465 - RNA, 19 nt, Artificial Sequence
  Description of Artificial Sequence: Synthetic oligonucleotide
guauggcugguccagggaa

SEQ ID NO: 2691466 - RNA, 19 nt, Artificial Sequence
  Description of Artificial Sequence: Synthetic oligonucleotide
aagaugccauggcauugaa

SEQ ID NO: 2691467 - RNA, 19 nt, Artificial Sequence
  Description of Artificial Sequence: Synthetic oligonucleotide
augccauggcauugaaaga

SEQ ID NO: 2691468 - RNA, 19 nt, Artificial Sequence
  Description of Artificial Sequence: Synthetic oligonucleotide
gacggcaugcggcuccaug

SEQ ID NO: 2691469 - RNA, 19 nt, Artificial Sequence
  Description of Artificial Sequence: Synthetic oligonucleotide
gguuacaaggggacagagg

SEQ ID NO: 2691470 - RNA, 19 nt, Artificial Sequence
  Description of Artificial Sequence: Synthetic oligonucleotide
ugcuggcccguugugacug

SEQ ID NO: 2691471 - RNA, 19 nt, Artificial Sequence
  Description of Artificial Sequence: Synthetic oligonucleotide
gcccauauacgaguggccg

SEQ ID NO: 2691472 - RNA, 19 nt, Artificial Sequence
  Description of Artificial Sequence: Synthetic oligonucleotide
uaggcaaagccaugccguc

SEQ ID NO: 2691473 - RNA, 19 nt, Artificial Sequence
  Description of Artificial Sequence: Synthetic oligonucleotide
uauacgaguggccgccguu

SEQ ID NO: 2691474 - RNA, 19 nt, Artificial Sequence
  Description of Artificial Sequence: Synthetic oligonucleotide
ugugacuguuuuggugcag

SEQ ID NO: 2691475 - RNA, 19 nt, Artificial Sequence
  Description of Artificial Sequence: Synthetic oligonucleotide
gagcugcggaggccgaggg

SEQ ID NO: 2691476 - RNA, 19 nt, Artificial Sequence
  Description of Artificial Sequence: Synthetic oligonucleotide
ugauaccuagggauuccuu

SEQ ID NO: 2691477 - RNA, 19 nt, Artificial Sequence
  Description of Artificial Sequence: Synthetic oligonucleotide
cuggaguagacggcaugcg

SEQ ID NO: 2691478 - RNA, 19 nt, Artificial Sequence
  Description of Artificial Sequence: Synthetic oligonucleotide
cuccuuucugucacacaug

SEQ ID NO: 2691479 - RNA, 19 nt, Artificial Sequence
  Description of Artificial Sequence: Synthetic oligonucleotide
guggugcggguauucuccg

SEQ ID NO: 2691480 - RNA, 19 nt, Artificial Sequence
  Description of Artificial Sequence: Synthetic oligonucleotide
ggaauguguggagaggcug

SEQ ID NO: 2691481 - RNA, 19 nt, Artificial Sequence
  Description of Artificial Sequence: Synthetic oligonucleotide
guuuuggugcagguauggc

SEQ ID NO: 2691482 - RNA, 19 nt, Artificial Sequence
  Description of Artificial Sequence: Synthetic oligonucleotide
uggugcggguauucuccgg

SEQ ID NO: 2691483 - RNA, 19 nt, Artificial Sequence
  Description of Artificial Sequence: Synthetic oligonucleotide
auauacgaguggccgccgu

SEQ ID NO: 2691484 - RNA, 19 nt, Artificial Sequence
  Description of Artificial Sequence: Synthetic oligonucleotide
ggugcggguauucuccggc

SEQ ID NO: 2691485 - RNA, 19 nt, Artificial Sequence
  Description of Artificial Sequence: Synthetic oligonucleotide
caaagccaugccguccacg

SEQ ID NO: 2691486 - RNA, 19 nt, Artificial Sequence
  Description of Artificial Sequence: Synthetic oligonucleotide
auacgaguggccgccguug

SEQ ID NO: 2691487 - RNA, 19 nt, Artificial Sequence
  Description of Artificial Sequence: Synthetic oligonucleotide
gccaaguggccauucauca

SEQ ID NO: 2691488 - RNA, 19 nt, Artificial Sequence
  Description of Artificial Sequence: Synthetic oligonucleotide
gagggcagguguggcaccg

SEQ ID NO: 2691489 - RNA, 19 nt, Artificial Sequence
  Description of Artificial Sequence: Synthetic oligonucleotide
ggacagaggcuguugcuug

SEQ ID NO: 2691490 - RNA, 19 nt, Artificial Sequence
  Description of Artificial Sequence: Synthetic oligonucleotide
uggguuacaaggggacaga

SEQ ID NO: 2691491 - RNA, 19 nt, Artificial Sequence
  Description of Artificial Sequence: Synthetic oligonucleotide
ggacccuccaccaguagag

SEQ ID NO: 2691492 - RNA, 19 nt, Artificial Sequence
  Description of Artificial Sequence: Synthetic oligonucleotide
guugggcgcgcaugagagg

SEQ ID NO: 2691493 - RNA, 19 nt, Artificial Sequence
  Description of Artificial Sequence: Synthetic oligonucleotide
gcuggugguaguaggaccc

SEQ ID NO: 2691494 - RNA, 19 nt, Artificial Sequence
  Description of Artificial Sequence: Synthetic oligonucleotide
aucaugcccaagccgcccu

SEQ ID NO: 2691495 - RNA, 19 nt, Artificial Sequence
  Description of Artificial Sequence: Synthetic oligonucleotide
uucugcuggcccguuguga

SEQ ID NO: 2691496 - RNA, 19 nt, Artificial Sequence
  Description of Artificial Sequence: Synthetic oligonucleotide
uagggauuccuugcaguuc

SEQ ID NO: 2691497 - RNA, 19 nt, Artificial Sequence
  Description of Artificial Sequence: Synthetic oligonucleotide
gcaugagaggccuccggag

SEQ ID NO: 2691498 - RNA, 19 nt, Artificial Sequence
  Description of Artificial Sequence: Synthetic oligonucleotide
ugcggguauucuccggcuc

SEQ ID NO: 2691499 - RNA, 19 nt, Artificial Sequence
  Description of Artificial Sequence: Synthetic oligonucleotide
aguagacggcaugcggcuc

SEQ ID NO: 2691500 - RNA, 19 nt, Artificial Sequence
  Description of Artificial Sequence: Synthetic oligonucleotide
ugcccaagccgcccuccag

SEQ ID NO: 2691501 - RNA, 19 nt, Artificial Sequence
  Description of Artificial Sequence: Synthetic oligonucleotide
uugauguaggaggccccgc

SEQ ID NO: 2691502 - RNA, 19 nt, Artificial Sequence
  Description of Artificial Sequence: Synthetic oligonucleotide
guccagggaauguguggag

SEQ ID NO: 2691503 - RNA, 19 nt, Artificial Sequence
  Description of Artificial Sequence: Synthetic oligonucleotide
gccgcuggguuacaagggg

SEQ ID NO: 2691504 - RNA, 19 nt, Artificial Sequence
  Description of Artificial Sequence: Synthetic oligonucleotide
cauauacgaguggccgccg

SEQ ID NO: 2691505 - RNA, 19 nt, Artificial Sequence
  Description of Artificial Sequence: Synthetic oligonucleotide
cuguugcuugauguaggag

SEQ ID NO: 2691506 - RNA, 19 nt, Artificial Sequence
  Description of Artificial Sequence: Synthetic oligonucleotide
uugcuugauguaggaggcc

SEQ ID NO: 2691507 - RNA, 19 nt, Artificial Sequence
  Description of Artificial Sequence: Synthetic oligonucleotide
caugcggcuccaugacccc

SEQ ID NO: 2691508 - RNA, 19 nt, Artificial Sequence
  Description of Artificial Sequence: Synthetic oligonucleotide
gaguagacggcaugcggcu

SEQ ID NO: 2691509 - RNA, 19 nt, Artificial Sequence
  Description of Artificial Sequence: Synthetic oligonucleotide
ucguggugcggguauucuc

SEQ ID NO: 2691510 - RNA, 19 nt, Artificial Sequence
  Description of Artificial Sequence: Synthetic oligonucleotide
ccgagggcggccaagcugc

SEQ ID NO: 2691511 - RNA, 19 nt, Artificial Sequence
  Description of Artificial Sequence: Synthetic oligonucleotide
ccauauacgaguggccgcc

SEQ ID NO: 2691512 - RNA, 19 nt, Artificial Sequence
  Description of Artificial Sequence: Synthetic oligonucleotide
gcaugcggcuccaugaccc

SEQ ID NO: 2691513 - RNA, 19 nt, Artificial Sequence
  Description of Artificial Sequence: Synthetic oligonucleotide
ugagaggccuccggagccc

SEQ ID NO: 2691514 - RNA, 19 nt, Artificial Sequence
  Description of Artificial Sequence: Synthetic oligonucleotide
gcuggaguagacggcaugc

SEQ ID NO: 2691515 - RNA, 19 nt, Artificial Sequence
  Description of Artificial Sequence: Synthetic oligonucleotide
cguggugcggguauucucc

SEQ ID NO: 2691516 - RNA, 19 nt, Artificial Sequence
  Description of Artificial Sequence: Synthetic oligonucleotide
ggugguaguaggacccucc

SEQ ID NO: 2691517 - RNA, 19 nt, Artificial Sequence
  Description of Artificial Sequence: Synthetic oligonucleotide
caucaugcccaagccgccc

SEQ ID NO: 2691518 - RNA, 19 nt, Artificial Sequence
  Description of Artificial Sequence: Synthetic oligonucleotide
aggccgagggcggccaagc

SEQ ID NO: 2691519 - RNA, 19 nt, Artificial Sequence
  Description of Artificial Sequence: Synthetic oligonucleotide
gugacuaggcaaagccaug

SEQ ID NO: 2691520 - RNA, 19 nt, Artificial Sequence
  Description of Artificial Sequence: Synthetic oligonucleotide
cacacaugcugggcgacug

SEQ ID NO: 2691521 - RNA, 19 nt, Artificial Sequence
  Description of Artificial Sequence: Synthetic oligonucleotide
cacauggcuugaugucuug

SEQ ID NO: 2691522 - RNA, 19 nt, Artificial Sequence
  Description of Artificial Sequence: Synthetic oligonucleotide
gugguaguaggacccucca

SEQ ID NO: 2691523 - RNA, 19 nt, Artificial Sequence
  Description of Artificial Sequence: Synthetic oligonucleotide
uggcaccgagugacuaggc

SEQ ID NO: 2691524 - RNA, 19 nt, Artificial Sequence
  Description of Artificial Sequence: Synthetic oligonucleotide
gcgacugugagugauaccu

SEQ ID NO: 2691525 - RNA, 19 nt, Artificial Sequence
  Description of Artificial Sequence: Synthetic oligonucleotide
auggcugguccagggaaug

SEQ ID NO: 2691526 - RNA, 19 nt, Artificial Sequence
  Description of Artificial Sequence: Synthetic oligonucleotide
gaccugcuggugguaguag

SEQ ID NO: 2691527 - RNA, 19 nt, Artificial Sequence
  Description of Artificial Sequence: Synthetic oligonucleotide
cccauauacgaguggccgc

SEQ ID NO: 2691528 - RNA, 19 nt, Artificial Sequence
  Description of Artificial Sequence: Synthetic oligonucleotide
ugcugcggagcuggaguag

SEQ ID NO: 2691529 - RNA, 19 nt, Artificial Sequence
  Description of Artificial Sequence: Synthetic oligonucleotide
cguugugacuguuuuggug

SEQ ID NO: 2691530 - RNA, 19 nt, Artificial Sequence
  Description of Artificial Sequence: Synthetic oligonucleotide
cacaugcugggcgacugug

SEQ ID NO: 2691531 - RNA, 19 nt, Artificial Sequence
  Description of Artificial Sequence: Synthetic oligonucleotide
ugcaguucugcuggcccgu

SEQ ID NO: 2691532 - RNA, 19 nt, Artificial Sequence
  Description of Artificial Sequence: Synthetic oligonucleotide
caccgagugacuaggcaaa

SEQ ID NO: 2691533 - RNA, 19 nt, Artificial Sequence
  Description of Artificial Sequence: Synthetic oligonucleotide
cuccaugaccccgccggcg

SEQ ID NO: 2691534 - RNA, 19 nt, Artificial Sequence
  Description of Artificial Sequence: Synthetic oligonucleotide
accgagugacuaggcaaag

SEQ ID NO: 2691535 - RNA, 19 nt, Artificial Sequence
  Description of Artificial Sequence: Synthetic oligonucleotide
cauggcuugaugucuuggu

SEQ ID NO: 2691536 - RNA, 19 nt, Artificial Sequence
  Description of Artificial Sequence: Synthetic oligonucleotide
cagguauggcugguccagg

SEQ ID NO: 2691537 - RNA, 19 nt, Artificial Sequence
  Description of Artificial Sequence: Synthetic oligonucleotide
gcggguauucuccggcucc

SEQ ID NO: 2691538 - RNA, 19 nt, Artificial Sequence
  Description of Artificial Sequence: Synthetic oligonucleotide
caaacuccuuucugucaca

SEQ ID NO: 2691539 - RNA, 19 nt, Artificial Sequence
  Description of Artificial Sequence: Synthetic oligonucleotide
ugggcgcgcaugagaggcc

SEQ ID NO: 2691540 - RNA, 19 nt, Artificial Sequence
  Description of Artificial Sequence: Synthetic oligonucleotide
ggguuacaaggggacagag

SEQ ID NO: 2691541 - RNA, 19 nt, Artificial Sequence
  Description of Artificial Sequence: Synthetic oligonucleotide
caugccguccacguugcca

SEQ ID NO: 2691542 - RNA, 19 nt, Artificial Sequence
  Description of Artificial Sequence: Synthetic oligonucleotide
gcaccgagugacuaggcaa

SEQ ID NO: 2691543 - RNA, 19 nt, Artificial Sequence
  Description of Artificial Sequence: Synthetic oligonucleotide
ggugaccugcuggugguag

SEQ ID NO: 2691544 - RNA, 19 nt, Artificial Sequence
  Description of Artificial Sequence: Synthetic oligonucleotide
ggagcuggaguagacggca

SEQ ID NO: 2691545 - RNA, 19 nt, Artificial Sequence
  Description of Artificial Sequence: Synthetic oligonucleotide
aagccaugccguccacguu

SEQ ID NO: 2691546 - RNA, 19 nt, Artificial Sequence
  Description of Artificial Sequence: Synthetic oligonucleotide
ggauuccuugcaguucugc

SEQ ID NO: 2691547 - RNA, 19 nt, Artificial Sequence
  Description of Artificial Sequence: Synthetic oligonucleotide
ugggcgacugugagugaua

SEQ ID NO: 2691548 - RNA, 19 nt, Artificial Sequence
  Description of Artificial Sequence: Synthetic oligonucleotide
augcugggcgacugugagu

SEQ ID NO: 2691549 - RNA, 19 nt, Artificial Sequence
  Description of Artificial Sequence: Synthetic oligonucleotide
gacuguuuuggugcaggua

SEQ ID NO: 2691550 - RNA, 19 nt, Artificial Sequence
  Description of Artificial Sequence: Synthetic oligonucleotide
cuguugggcgcgcaugaga

SEQ ID NO: 2691551 - RNA, 19 nt, Artificial Sequence
  Description of Artificial Sequence: Synthetic oligonucleotide
ugucguggugcggguauuc

SEQ ID NO: 2691552 - RNA, 19 nt, Artificial Sequence
  Description of Artificial Sequence: Synthetic oligonucleotide
guaggaggccccgcuguug

SEQ ID NO: 2691553 - RNA, 19 nt, Artificial Sequence
  Description of Artificial Sequence: Synthetic oligonucleotide
gguauucuccggcuccaga

SEQ ID NO: 2691554 - RNA, 19 nt, Artificial Sequence
  Description of Artificial Sequence: Synthetic oligonucleotide
augcggcuccaugaccccg

SEQ ID NO: 2691555 - RNA, 19 nt, Artificial Sequence
  Description of Artificial Sequence: Synthetic oligonucleotide
cagaaccaccgcagccgcc

SEQ ID NO: 2691556 - RNA, 19 nt, Artificial Sequence
  Description of Artificial Sequence: Synthetic oligonucleotide
aggccccgcuguugagagc

SEQ ID NO: 2691557 - RNA, 19 nt, Artificial Sequence
  Description of Artificial Sequence: Synthetic oligonucleotide
cugcggaggccgagggcgg

SEQ ID NO: 2691558 - RNA, 19 nt, Artificial Sequence
  Description of Artificial Sequence: Synthetic oligonucleotide
gguauggcugguccaggga

SEQ ID NO: 2691559 - RNA, 19 nt, Artificial Sequence
  Description of Artificial Sequence: Synthetic oligonucleotide
cuagggauuccuugcaguu

SEQ ID NO: 2691560 - RNA, 19 nt, Artificial Sequence
  Description of Artificial Sequence: Synthetic oligonucleotide
caugaccccgccggcgccg

SEQ ID NO: 2691561 - RNA, 19 nt, Artificial Sequence
  Description of Artificial Sequence: Synthetic oligonucleotide
cugcggagcuggaguagac

SEQ ID NO: 2691562 - RNA, 19 nt, Artificial Sequence
  Description of Artificial Sequence: Synthetic oligonucleotide
gagagcugcggaggccgag

SEQ ID NO: 2691563 - RNA, 19 nt, Artificial Sequence
  Description of Artificial Sequence: Synthetic oligonucleotide
ggcaugcggcuccaugacc

SEQ ID NO: 2691564 - RNA, 19 nt, Artificial Sequence
  Description of Artificial Sequence: Synthetic oligonucleotide
cacacauggcuugaugucu

SEQ ID NO: 2691565 - RNA, 19 nt, Artificial Sequence
  Description of Artificial Sequence: Synthetic oligonucleotide
gcuccagaaccaccgcagc

SEQ ID NO: 2691566 - RNA, 19 nt, Artificial Sequence
  Description of Artificial Sequence: Synthetic oligonucleotide
acaugcugggcgacuguga

SEQ ID NO: 2691567 - RNA, 19 nt, Artificial Sequence
  Description of Artificial Sequence: Synthetic oligonucleotide
guccacguugccagccaag

SEQ ID NO: 2691568 - RNA, 19 nt, Artificial Sequence
  Description of Artificial Sequence: Synthetic oligonucleotide
ggccgcuggguuacaaggg

SEQ ID NO: 2691569 - RNA, 19 nt, Artificial Sequence
  Description of Artificial Sequence: Synthetic oligonucleotide
ccagaaccaccgcagccgc

SEQ ID NO: 2691570 - RNA, 19 nt, Artificial Sequence
  Description of Artificial Sequence: Synthetic oligonucleotide
aggcuguugggcgcgcaug

SEQ ID NO: 2691571 - RNA, 19 nt, Artificial Sequence
  Description of Artificial Sequence: Synthetic oligonucleotide
ggcaccgagugacuaggca

SEQ ID NO: 2691572 - RNA, 19 nt, Artificial Sequence
  Description of Artificial Sequence: Synthetic oligonucleotide
uggugguaguaggacccuc

SEQ ID NO: 2691573 - RNA, 19 nt, Artificial Sequence
  Description of Artificial Sequence: Synthetic oligonucleotide
acgaguggccgccguugga

SEQ ID NO: 2691574 - RNA, 19 nt, Artificial Sequence
  Description of Artificial Sequence: Synthetic oligonucleotide
cccaagccgcccuccagcg

SEQ ID NO: 2691575 - RNA, 19 nt, Artificial Sequence
  Description of Artificial Sequence: Synthetic oligonucleotide
aaccaccgcagccgcccau

SEQ ID NO: 2691576 - RNA, 19 nt, Artificial Sequence
  Description of Artificial Sequence: Synthetic oligonucleotide
ggaagcgggcacugagcug

SEQ ID NO: 2691577 - RNA, 19 nt, Artificial Sequence
  Description of Artificial Sequence: Synthetic oligonucleotide
agcugcugcggagcuggag

SEQ ID NO: 2691578 - RNA, 19 nt, Artificial Sequence
  Description of Artificial Sequence: Synthetic oligonucleotide
ccgcccauauacgaguggc

SEQ ID NO: 2691579 - RNA, 19 nt, Artificial Sequence
  Description of Artificial Sequence: Synthetic oligonucleotide
gcuugauguaggaggcccc

SEQ ID NO: 2691580 - RNA, 19 nt, Artificial Sequence
  Description of Artificial Sequence: Synthetic oligonucleotide
aggaggccccgcuguugag

SEQ ID NO: 2691581 - RNA, 19 nt, Artificial Sequence
  Description of Artificial Sequence: Synthetic oligonucleotide
gcccaagccgcccuccagc

SEQ ID NO: 2691582 - RNA, 19 nt, Artificial Sequence
  Description of Artificial Sequence: Synthetic oligonucleotide
cacaucacacauggcuuga

SEQ ID NO: 2691583 - RNA, 19 nt, Artificial Sequence
  Description of Artificial Sequence: Synthetic oligonucleotide
gcgcaugagaggccuccgg

SEQ ID NO: 2691584 - RNA, 19 nt, Artificial Sequence
  Description of Artificial Sequence: Synthetic oligonucleotide
uggcccguugugacuguuu

SEQ ID NO: 2691585 - RNA, 19 nt, Artificial Sequence
  Description of Artificial Sequence: Synthetic oligonucleotide
ggcugguccagggaaugug

SEQ ID NO: 2691586 - RNA, 19 nt, Artificial Sequence
  Description of Artificial Sequence: Synthetic oligonucleotide
uagacggcaugcggcucca

SEQ ID NO: 2691587 - RNA, 19 nt, Artificial Sequence
  Description of Artificial Sequence: Synthetic oligonucleotide
acaucacacauggcuugau

SEQ ID NO: 2691588 - RNA, 19 nt, Artificial Sequence
  Description of Artificial Sequence: Synthetic oligonucleotide
gccgagggcggccaagcug

SEQ ID NO: 2691589 - RNA, 19 nt, Artificial Sequence
  Description of Artificial Sequence: Synthetic oligonucleotide
gccgcccauauacgagugg

SEQ ID NO: 2691590 - RNA, 19 nt, Artificial Sequence
  Description of Artificial Sequence: Synthetic oligonucleotide
ugccguccacguugccagc

SEQ ID NO: 2691591 - RNA, 19 nt, Artificial Sequence
  Description of Artificial Sequence: Synthetic oligonucleotide
cccgcuguugagagcugcg

SEQ ID NO: 2691592 - RNA, 19 nt, Artificial Sequence
  Description of Artificial Sequence: Synthetic oligonucleotide
gggaagcgggcacugagcu

SEQ ID NO: 2691593 - RNA, 19 nt, Artificial Sequence
  Description of Artificial Sequence: Synthetic oligonucleotide
acaaggggacagaggcugu

SEQ ID NO: 2691594 - RNA, 19 nt, Artificial Sequence
  Description of Artificial Sequence: Synthetic oligonucleotide
ggcgacugugagugauacc

SEQ ID NO: 2691595 - RNA, 19 nt, Artificial Sequence
  Description of Artificial Sequence: Synthetic oligonucleotide
uggugcagguauggcuggu

SEQ ID NO: 2691596 - RNA, 19 nt, Artificial Sequence
  Description of Artificial Sequence: Synthetic oligonucleotide
agccgcccauauacgagug

SEQ ID NO: 2691597 - RNA, 19 nt, Artificial Sequence
  Description of Artificial Sequence: Synthetic oligonucleotide
aagcgggcacugagcuguc

SEQ ID NO: 2691598 - RNA, 19 nt, Artificial Sequence
  Description of Artificial Sequence: Synthetic oligonucleotide
gcugcugcggagcuggagu

SEQ ID NO: 2691599 - RNA, 19 nt, Artificial Sequence
  Description of Artificial Sequence: Synthetic oligonucleotide
gaaccaccgcagccgccca

SEQ ID NO: 2691600 - RNA, 19 nt, Artificial Sequence
  Description of Artificial Sequence: Synthetic oligonucleotide
agcgggcacugagcugucg

SEQ ID NO: 2691601 - RNA, 19 nt, Artificial Sequence
  Description of Artificial Sequence: Synthetic oligonucleotide
agcggggaagcgggcacug

SEQ ID NO: 2691602 - RNA, 19 nt, Artificial Sequence
  Description of Artificial Sequence: Synthetic oligonucleotide
uccggagcccuggaaccau

SEQ ID NO: 2691603 - RNA, 19 nt, Artificial Sequence
  Description of Artificial Sequence: Synthetic oligonucleotide
caccaguagagugcauaga

SEQ ID NO: 2691604 - RNA, 19 nt, Artificial Sequence
  Description of Artificial Sequence: Synthetic oligonucleotide
gggcgacugugagugauac

SEQ ID NO: 2691605 - RNA, 19 nt, Artificial Sequence
  Description of Artificial Sequence: Synthetic oligonucleotide
guggccgccguuggagggc

SEQ ID NO: 2691606 - RNA, 19 nt, Artificial Sequence
  Description of Artificial Sequence: Synthetic oligonucleotide
ccauggcauugaaagagaa

SEQ ID NO: 2691607 - RNA, 19 nt, Artificial Sequence
  Description of Artificial Sequence: Synthetic oligonucleotide
guaggacccuccaccagua

SEQ ID NO: 2691608 - RNA, 19 nt, Artificial Sequence
  Description of Artificial Sequence: Synthetic oligonucleotide
gugauaccuagggauuccu

SEQ ID NO: 2691609 - RNA, 19 nt, Artificial Sequence
  Description of Artificial Sequence: Synthetic oligonucleotide
cagccgcccauauacgagu

SEQ ID NO: 2691610 - RNA, 19 nt, Artificial Sequence
  Description of Artificial Sequence: Synthetic oligonucleotide
ccgagugacuaggcaaagc

SEQ ID NO: 2691611 - RNA, 19 nt, Artificial Sequence
  Description of Artificial Sequence: Synthetic oligonucleotide
cccuggaaccauagguguc

SEQ ID NO: 2691612 - RNA, 19 nt, Artificial Sequence
  Description of Artificial Sequence: Synthetic oligonucleotide
gcagcggggaagcgggcac

SEQ ID NO: 2691613 - RNA, 19 nt, Artificial Sequence
  Description of Artificial Sequence: Synthetic oligonucleotide
uggccgccguuggagggca

SEQ ID NO: 2691614 - RNA, 19 nt, Artificial Sequence
  Description of Artificial Sequence: Synthetic oligonucleotide
augaccccgccggcgccgg

SEQ ID NO: 2691615 - RNA, 19 nt, Artificial Sequence
  Description of Artificial Sequence: Synthetic oligonucleotide
ccuugcaguucugcuggcc

SEQ ID NO: 2691616 - RNA, 19 nt, Artificial Sequence
  Description of Artificial Sequence: Synthetic oligonucleotide
gccggcagcagcggggaag

SEQ ID NO: 2691617 - RNA, 19 nt, Artificial Sequence
  Description of Artificial Sequence: Synthetic oligonucleotide
gaccccgccggcgccggcc

SEQ ID NO: 2691618 - RNA, 19 nt, Artificial Sequence
  Description of Artificial Sequence: Synthetic oligonucleotide
cugcugcggagcuggagua

SEQ ID NO: 2691619 - RNA, 19 nt, Artificial Sequence
  Description of Artificial Sequence: Synthetic oligonucleotide
cagguguggcaccgaguga

SEQ ID NO: 2691620 - RNA, 19 nt, Artificial Sequence
  Description of Artificial Sequence: Synthetic oligonucleotide
gccguuggagggcaggugu

SEQ ID NO: 2691621 - RNA, 19 nt, Artificial Sequence
  Description of Artificial Sequence: Synthetic oligonucleotide
gagggcggccaagcugcug

SEQ ID NO: 2691622 - RNA, 19 nt, Artificial Sequence
  Description of Artificial Sequence: Synthetic oligonucleotide
cgcccauauacgaguggcc

SEQ ID NO: 2691623 - RNA, 19 nt, Artificial Sequence
  Description of Artificial Sequence: Synthetic oligonucleotide
gcuccaugaccccgccggc

SEQ ID NO: 2691624 - RNA, 19 nt, Artificial Sequence
  Description of Artificial Sequence: Synthetic oligonucleotide
ccacguugccagccaagug

SEQ ID NO: 2691625 - RNA, 19 nt, Artificial Sequence
  Description of Artificial Sequence: Synthetic oligonucleotide
ccgcuguugagagcugcgg

SEQ ID NO: 2691626 - RNA, 19 nt, Artificial Sequence
  Description of Artificial Sequence: Synthetic oligonucleotide
ggugcagguauggcugguc

SEQ ID NO: 2691627 - RNA, 19 nt, Artificial Sequence
  Description of Artificial Sequence: Synthetic oligonucleotide
gcggccaagcugcugcgga

SEQ ID NO: 2691628 - RNA, 19 nt, Artificial Sequence
  Description of Artificial Sequence: Synthetic oligonucleotide
ccuagggauuccuugcagu

SEQ ID NO: 2691629 - RNA, 19 nt, Artificial Sequence
  Description of Artificial Sequence: Synthetic oligonucleotide
gcuguugggcgcgcaugag

SEQ ID NO: 2691630 - RNA, 19 nt, Artificial Sequence
  Description of Artificial Sequence: Synthetic oligonucleotide
ggguuggccgcuggguuac

SEQ ID NO: 2691631 - RNA, 19 nt, Artificial Sequence
  Description of Artificial Sequence: Synthetic oligonucleotide
ccguuggagggcaggugug

SEQ ID NO: 2691632 - RNA, 19 nt, Artificial Sequence
  Description of Artificial Sequence: Synthetic oligonucleotide
ggccauucaucaugcccaa

SEQ ID NO: 2691633 - RNA, 19 nt, Artificial Sequence
  Description of Artificial Sequence: Synthetic oligonucleotide
cgaguggccgccguuggag

SEQ ID NO: 2691634 - RNA, 19 nt, Artificial Sequence
  Description of Artificial Sequence: Synthetic oligonucleotide
ggcacugagcugucguggu

SEQ ID NO: 2691635 - RNA, 19 nt, Artificial Sequence
  Description of Artificial Sequence: Synthetic oligonucleotide
cggggaagcgggcacugag

SEQ ID NO: 2691636 - RNA, 19 nt, Artificial Sequence
  Description of Artificial Sequence: Synthetic oligonucleotide
cagccaaguggccauucau

SEQ ID NO: 2691637 - RNA, 19 nt, Artificial Sequence
  Description of Artificial Sequence: Synthetic oligonucleotide
gugcggguauucuccggcu

SEQ ID NO: 2691638 - RNA, 19 nt, Artificial Sequence
  Description of Artificial Sequence: Synthetic oligonucleotide
aggccuccggagcccugga

SEQ ID NO: 2691639 - RNA, 19 nt, Artificial Sequence
  Description of Artificial Sequence: Synthetic oligonucleotide
gcugcggagcuggaguaga

SEQ ID NO: 2691640 - RNA, 19 nt, Artificial Sequence
  Description of Artificial Sequence: Synthetic oligonucleotide
gcgcgcaugagaggccucc

SEQ ID NO: 2691641 - RNA, 19 nt, Artificial Sequence
  Description of Artificial Sequence: Synthetic oligonucleotide
aagccgcccuccagcgcca

SEQ ID NO: 2691642 - RNA, 19 nt, Artificial Sequence
  Description of Artificial Sequence: Synthetic oligonucleotide
ccgcagccgcccauauacg

SEQ ID NO: 2691643 - RNA, 19 nt, Artificial Sequence
  Description of Artificial Sequence: Synthetic oligonucleotide
gccguccacguugccagcc

SEQ ID NO: 2691644 - RNA, 19 nt, Artificial Sequence
  Description of Artificial Sequence: Synthetic oligonucleotide
gcaaagccaugccguccac

SEQ ID NO: 2691645 - RNA, 19 nt, Artificial Sequence
  Description of Artificial Sequence: Synthetic oligonucleotide
guuggccgcuggguuacaa

SEQ ID NO: 2691646 - RNA, 19 nt, Artificial Sequence
  Description of Artificial Sequence: Synthetic oligonucleotide
accaccgcagccgcccaua

SEQ ID NO: 2691647 - RNA, 19 nt, Artificial Sequence
  Description of Artificial Sequence: Synthetic oligonucleotide
ggaggccccgcuguugaga

SEQ ID NO: 2691648 - RNA, 19 nt, Artificial Sequence
  Description of Artificial Sequence: Synthetic oligonucleotide
ggccccgcuguugagagcu

SEQ ID NO: 2691649 - RNA, 19 nt, Artificial Sequence
  Description of Artificial Sequence: Synthetic oligonucleotide
gcccuccagcgccaggcug

SEQ ID NO: 2691650 - RNA, 19 nt, Artificial Sequence
  Description of Artificial Sequence: Synthetic oligonucleotide
gggguuggccgcuggguua

SEQ ID NO: 2691651 - RNA, 19 nt, Artificial Sequence
  Description of Artificial Sequence: Synthetic oligonucleotide
gccauucaucaugcccaag

SEQ ID NO: 2691652 - RNA, 19 nt, Artificial Sequence
  Description of Artificial Sequence: Synthetic oligonucleotide
ggcggccaagcugcugcgg

SEQ ID NO: 2691653 - RNA, 19 nt, Artificial Sequence
  Description of Artificial Sequence: Synthetic oligonucleotide
ggggacagaggcuguugcu

SEQ ID NO: 2691654 - RNA, 19 nt, Artificial Sequence
  Description of Artificial Sequence: Synthetic oligonucleotide
gacccuccaccaguagagu

SEQ ID NO: 2691655 - RNA, 19 nt, Artificial Sequence
  Description of Artificial Sequence: Synthetic oligonucleotide
gucguggugcggguauucu

SEQ ID NO: 2691656 - RNA, 19 nt, Artificial Sequence
  Description of Artificial Sequence: Synthetic oligonucleotide
gccggccggcagcagcggg

SEQ ID NO: 2691657 - RNA, 19 nt, Artificial Sequence
  Description of Artificial Sequence: Synthetic oligonucleotide
ugaccccgccggcgccggc

SEQ ID NO: 2691658 - RNA, 19 nt, Artificial Sequence
  Description of Artificial Sequence: Synthetic oligonucleotide
aagcugcugcggagcugga

SEQ ID NO: 2691659 - RNA, 19 nt, Artificial Sequence
  Description of Artificial Sequence: Synthetic oligonucleotide
gagcugucguggugcgggu

SEQ ID NO: 2691660 - RNA, 19 nt, Artificial Sequence
  Description of Artificial Sequence: Synthetic oligonucleotide
ccaagccgcccuccagcgc

SEQ ID NO: 2691661 - RNA, 19 nt, Artificial Sequence
  Description of Artificial Sequence: Synthetic oligonucleotide
ccuccaccaguagagugca

SEQ ID NO: 2691662 - RNA, 19 nt, Artificial Sequence
  Description of Artificial Sequence: Synthetic oligonucleotide
gcugucguggugcggguau

SEQ ID NO: 2691663 - RNA, 19 nt, Artificial Sequence
  Description of Artificial Sequence: Synthetic oligonucleotide
gcugguccagggaaugugu

SEQ ID NO: 2691664 - RNA, 19 nt, Artificial Sequence
  Description of Artificial Sequence: Synthetic oligonucleotide
agcugucguggugcgggua

SEQ ID NO: 2691665 - RNA, 19 nt, Artificial Sequence
  Description of Artificial Sequence: Synthetic oligonucleotide
agggcagguguggcaccga

SEQ ID NO: 2691666 - RNA, 19 nt, Artificial Sequence
  Description of Artificial Sequence: Synthetic oligonucleotide
ccagccaaguggccauuca

SEQ ID NO: 2691667 - RNA, 19 nt, Artificial Sequence
  Description of Artificial Sequence: Synthetic oligonucleotide
ccgcuggguuacaagggga

SEQ ID NO: 2691668 - RNA, 19 nt, Artificial Sequence
  Description of Artificial Sequence: Synthetic oligonucleotide
ccggcuccagaaccaccgc

SEQ ID NO: 2691669 - RNA, 19 nt, Artificial Sequence
  Description of Artificial Sequence: Synthetic oligonucleotide
cugggcgacugugagugau

SEQ ID NO: 2691670 - RNA, 19 nt, Artificial Sequence
  Description of Artificial Sequence: Synthetic oligonucleotide
gggacagaggcuguugcuu

SEQ ID NO: 2691671 - RNA, 19 nt, Artificial Sequence
  Description of Artificial Sequence: Synthetic oligonucleotide
cgcuguugagagcugcgga

SEQ ID NO: 2691672 - RNA, 19 nt, Artificial Sequence
  Description of Artificial Sequence: Synthetic oligonucleotide
agaggccuccggagcccug

SEQ ID NO: 2691673 - RNA, 19 nt, Artificial Sequence
  Description of Artificial Sequence: Synthetic oligonucleotide
ccccgcuguugagagcugc

SEQ ID NO: 2691674 - RNA, 19 nt, Artificial Sequence
  Description of Artificial Sequence: Synthetic oligonucleotide
gcggcuccaugaccccgcc

SEQ ID NO: 2691675 - RNA, 19 nt, Artificial Sequence
  Description of Artificial Sequence: Synthetic oligonucleotide
cgcagccgcccauauacga

SEQ ID NO: 2691676 - RNA, 19 nt, Artificial Sequence
  Description of Artificial Sequence: Synthetic oligonucleotide
cggcaugcggcuccaugac

SEQ ID NO: 2691677 - RNA, 19 nt, Artificial Sequence
  Description of Artificial Sequence: Synthetic oligonucleotide
gcgggcacugagcugucgu

SEQ ID NO: 2691678 - RNA, 19 nt, Artificial Sequence
  Description of Artificial Sequence: Synthetic oligonucleotide
gccaagcugcugcggagcu

SEQ ID NO: 2691679 - RNA, 19 nt, Artificial Sequence
  Description of Artificial Sequence: Synthetic oligonucleotide
cuggugguaguaggacccu

SEQ ID NO: 2691680 - RNA, 19 nt, Artificial Sequence
  Description of Artificial Sequence: Synthetic oligonucleotide
ccaaguggccauucaucau

SEQ ID NO: 2691681 - RNA, 19 nt, Artificial Sequence
  Description of Artificial Sequence: Synthetic oligonucleotide
ccuuucugucacacaugcu

SEQ ID NO: 2691682 - RNA, 19 nt, Artificial Sequence
  Description of Artificial Sequence: Synthetic oligonucleotide
cccuccagcgccaggcugu

SEQ ID NO: 2691683 - RNA, 19 nt, Artificial Sequence
  Description of Artificial Sequence: Synthetic oligonucleotide
caggcuguugggcgcgcau

SEQ ID NO: 2691684 - RNA, 19 nt, Artificial Sequence
  Description of Artificial Sequence: Synthetic oligonucleotide
gcugggcgacugugaguga

SEQ ID NO: 2691685 - RNA, 19 nt, Artificial Sequence
  Description of Artificial Sequence: Synthetic oligonucleotide
cgcgcaugagaggccuccg

SEQ ID NO: 2691686 - RNA, 19 nt, Artificial Sequence
  Description of Artificial Sequence: Synthetic oligonucleotide
ccaugccguccacguugcc

SEQ ID NO: 2691687 - RNA, 19 nt, Artificial Sequence
  Description of Artificial Sequence: Synthetic oligonucleotide
caccgcagccgcccauaua

SEQ ID NO: 2691688 - RNA, 19 nt, Artificial Sequence
  Description of Artificial Sequence: Synthetic oligonucleotide
gguguggcaccgagugacu

SEQ ID NO: 2691689 - RNA, 19 nt, Artificial Sequence
  Description of Artificial Sequence: Synthetic oligonucleotide
ccguccacguugccagcca

SEQ ID NO: 2691690 - RNA, 19 nt, Artificial Sequence
  Description of Artificial Sequence: Synthetic oligonucleotide
agacggcaugcggcuccau

SEQ ID NO: 2691691 - RNA, 19 nt, Artificial Sequence
  Description of Artificial Sequence: Synthetic oligonucleotide
ggcagguguggcaccgagu

SEQ ID NO: 2691692 - RNA, 19 nt, Artificial Sequence
  Description of Artificial Sequence: Synthetic oligonucleotide
cgacugugagugauaccua

SEQ ID NO: 2691693 - RNA, 19 nt, Artificial Sequence
  Description of Artificial Sequence: Synthetic oligonucleotide
gggcgcgcaugagaggccu

SEQ ID NO: 2691694 - RNA, 19 nt, Artificial Sequence
  Description of Artificial Sequence: Synthetic oligonucleotide
cggcuccaugaccccgccg

SEQ ID NO: 2691695 - RNA, 19 nt, Artificial Sequence
  Description of Artificial Sequence: Synthetic oligonucleotide
gccaggcuguugggcgcgc

SEQ ID NO: 2691696 - RNA, 19 nt, Artificial Sequence
  Description of Artificial Sequence: Synthetic oligonucleotide
cagcggggaagcgggcacu

SEQ ID NO: 2691697 - RNA, 19 nt, Artificial Sequence
  Description of Artificial Sequence: Synthetic oligonucleotide
ggcgcgcaugagaggccuc

SEQ ID NO: 2691698 - RNA, 19 nt, Artificial Sequence
  Description of Artificial Sequence: Synthetic oligonucleotide
cuccaccaguagagugcau

SEQ ID NO: 2691699 - RNA, 19 nt, Artificial Sequence
  Description of Artificial Sequence: Synthetic oligonucleotide
cgccguuggagggcaggug

SEQ ID NO: 2691700 - RNA, 19 nt, Artificial Sequence
  Description of Artificial Sequence: Synthetic oligonucleotide
gcggggaagcgggcacuga

SEQ ID NO: 2691701 - RNA, 19 nt, Artificial Sequence
  Description of Artificial Sequence: Synthetic oligonucleotide
gguuggccgcuggguuaca

SEQ ID NO: 2691702 - RNA, 19 nt, Artificial Sequence
  Description of Artificial Sequence: Synthetic oligonucleotide
gcuggcccguugugacugu

SEQ ID NO: 2691703 - RNA, 19 nt, Artificial Sequence
  Description of Artificial Sequence: Synthetic oligonucleotide
cugucguggugcggguauu

SEQ ID NO: 2691704 - RNA, 19 nt, Artificial Sequence
  Description of Artificial Sequence: Synthetic oligonucleotide
gccccgcuguugagagcug

SEQ ID NO: 2691705 - RNA, 19 nt, Artificial Sequence
  Description of Artificial Sequence: Synthetic oligonucleotide
ccggagcccuggaaccaua

SEQ ID NO: 2691706 - RNA, 19 nt, Artificial Sequence
  Description of Artificial Sequence: Synthetic oligonucleotide
ccaggcuguugggcgcgca

SEQ ID NO: 2691707 - RNA, 19 nt, Artificial Sequence
  Description of Artificial Sequence: Synthetic oligonucleotide
cuggcccguugugacuguu

SEQ ID NO: 2691708 - RNA, 19 nt, Artificial Sequence
  Description of Artificial Sequence: Synthetic oligonucleotide
ccccgccggcgccggccgg

SEQ ID NO: 2691709 - RNA, 19 nt, Artificial Sequence
  Description of Artificial Sequence: Synthetic oligonucleotide
ccgccguuggagggcaggu

SEQ ID NO: 2691710 - RNA, 19 nt, Artificial Sequence
  Description of Artificial Sequence: Synthetic oligonucleotide
cggccggcagcagcgggga

SEQ ID NO: 2691711 - RNA, 19 nt, Artificial Sequence
  Description of Artificial Sequence: Synthetic oligonucleotide
cgagggcggccaagcugcu

SEQ ID NO: 2691712 - RNA, 19 nt, Artificial Sequence
  Description of Artificial Sequence: Synthetic oligonucleotide
auaaauaagaagugggugg

SEQ ID NO: 2691713 - RNA, 19 nt, Artificial Sequence
  Description of Artificial Sequence: Synthetic oligonucleotide
aaacucacgauacucuugc

SEQ ID NO: 2691714 - RNA, 19 nt, Artificial Sequence
  Description of Artificial Sequence: Synthetic oligonucleotide
uuuaggaagaauagggagg

SEQ ID NO: 2691715 - RNA, 19 nt, Artificial Sequence
  Description of Artificial Sequence: Synthetic oligonucleotide
agugcaaacagccuugacc

SEQ ID NO: 2691716 - RNA, 19 nt, Artificial Sequence
  Description of Artificial Sequence: Synthetic oligonucleotide
aagucuacagugcagguuc

SEQ ID NO: 2691717 - RNA, 19 nt, Artificial Sequence
  Description of Artificial Sequence: Synthetic oligonucleotide
aaaacuuagaccucucucu

SEQ ID NO: 2691718 - RNA, 19 nt, Artificial Sequence
  Description of Artificial Sequence: Synthetic oligonucleotide
uuugucucaagucuggugc

SEQ ID NO: 2691719 - RNA, 19 nt, Artificial Sequence
  Description of Artificial Sequence: Synthetic oligonucleotide
agagguauaacguucuagg

SEQ ID NO: 2691720 - RNA, 19 nt, Artificial Sequence
  Description of Artificial Sequence: Synthetic oligonucleotide
aaucgagaagucuacagug

SEQ ID NO: 2691721 - RNA, 19 nt, Artificial Sequence
  Description of Artificial Sequence: Synthetic oligonucleotide
ucauacaucuccugcaucg

SEQ ID NO: 2691722 - RNA, 19 nt, Artificial Sequence
  Description of Artificial Sequence: Synthetic oligonucleotide
ugugguuugaccauugaga

SEQ ID NO: 2691723 - RNA, 19 nt, Artificial Sequence
  Description of Artificial Sequence: Synthetic oligonucleotide
auaucugcuaucuuuccac

SEQ ID NO: 2691724 - RNA, 19 nt, Artificial Sequence
  Description of Artificial Sequence: Synthetic oligonucleotide
ucuggaccaaacuuggugg

SEQ ID NO: 2691725 - RNA, 19 nt, Artificial Sequence
  Description of Artificial Sequence: Synthetic oligonucleotide
agggagguaaaacuuagac

SEQ ID NO: 2691726 - RNA, 19 nt, Artificial Sequence
  Description of Artificial Sequence: Synthetic oligonucleotide
agguauaacguucuaggac

SEQ ID NO: 2691727 - RNA, 19 nt, Artificial Sequence
  Description of Artificial Sequence: Synthetic oligonucleotide
aacguucuguuugacaacc

SEQ ID NO: 2691728 - RNA, 19 nt, Artificial Sequence
  Description of Artificial Sequence: Synthetic oligonucleotide
ucaaaggaaaucgagaagu

SEQ ID NO: 2691729 - RNA, 19 nt, Artificial Sequence
  Description of Artificial Sequence: Synthetic oligonucleotide
ugaaucuccaaauagucuc

SEQ ID NO: 2691730 - RNA, 19 nt, Artificial Sequence
  Description of Artificial Sequence: Synthetic oligonucleotide
guuuaggaagaauagggag

SEQ ID NO: 2691731 - RNA, 19 nt, Artificial Sequence
  Description of Artificial Sequence: Synthetic oligonucleotide
ucugcuaucuuuccacacg

SEQ ID NO: 2691732 - RNA, 19 nt, Artificial Sequence
  Description of Artificial Sequence: Synthetic oligonucleotide
uaaauaagaaguggguggg

SEQ ID NO: 2691733 - RNA, 19 nt, Artificial Sequence
  Description of Artificial Sequence: Synthetic oligonucleotide
aaacauggucgccagcugg

SEQ ID NO: 2691734 - RNA, 19 nt, Artificial Sequence
  Description of Artificial Sequence: Synthetic oligonucleotide
aaaucgagaagucuacagu

SEQ ID NO: 2691735 - RNA, 19 nt, Artificial Sequence
  Description of Artificial Sequence: Synthetic oligonucleotide
agaauagggagguaaaacu

SEQ ID NO: 2691736 - RNA, 19 nt, Artificial Sequence
  Description of Artificial Sequence: Synthetic oligonucleotide
uacucuugcacauuggaca

SEQ ID NO: 2691737 - RNA, 19 nt, Artificial Sequence
  Description of Artificial Sequence: Synthetic oligonucleotide
gaaaucgagaagucuacag

SEQ ID NO: 2691738 - RNA, 19 nt, Artificial Sequence
  Description of Artificial Sequence: Synthetic oligonucleotide
aaauucaaaggaaaucgag

SEQ ID NO: 2691739 - RNA, 19 nt, Artificial Sequence
  Description of Artificial Sequence: Synthetic oligonucleotide
uggaacaucagcucucggg

SEQ ID NO: 2691740 - RNA, 19 nt, Artificial Sequence
  Description of Artificial Sequence: Synthetic oligonucleotide
agccaaaccaaauaaauaa

SEQ ID NO: 2691741 - RNA, 19 nt, Artificial Sequence
  Description of Artificial Sequence: Synthetic oligonucleotide
uuagaccucucucugagca

SEQ ID NO: 2691742 - RNA, 19 nt, Artificial Sequence
  Description of Artificial Sequence: Synthetic oligonucleotide
gaacccaaccuccagcugg

SEQ ID NO: 2691743 - RNA, 19 nt, Artificial Sequence
  Description of Artificial Sequence: Synthetic oligonucleotide
uaaaacuuagaccucucuc

SEQ ID NO: 2691744 - RNA, 19 nt, Artificial Sequence
  Description of Artificial Sequence: Synthetic oligonucleotide
agucuggugcacuucaugg

SEQ ID NO: 2691745 - RNA, 19 nt, Artificial Sequence
  Description of Artificial Sequence: Synthetic oligonucleotide
aauucaaaggaaaucgaga

SEQ ID NO: 2691746 - RNA, 19 nt, Artificial Sequence
  Description of Artificial Sequence: Synthetic oligonucleotide
cagagagcgaaauucaaag

SEQ ID NO: 2691747 - RNA, 19 nt, Artificial Sequence
  Description of Artificial Sequence: Synthetic oligonucleotide
aaacuuagaccucucucug

SEQ ID NO: 2691748 - RNA, 19 nt, Artificial Sequence
  Description of Artificial Sequence: Synthetic oligonucleotide
ugaccauugagacugcaga

SEQ ID NO: 2691749 - RNA, 19 nt, Artificial Sequence
  Description of Artificial Sequence: Synthetic oligonucleotide
uucaaaggaaaucgagaag

SEQ ID NO: 2691750 - RNA, 19 nt, Artificial Sequence
  Description of Artificial Sequence: Synthetic oligonucleotide
auuggacaccaccucauac

SEQ ID NO: 2691751 - RNA, 19 nt, Artificial Sequence
  Description of Artificial Sequence: Synthetic oligonucleotide
uccaaauagucuccaagug

SEQ ID NO: 2691752 - RNA, 19 nt, Artificial Sequence
  Description of Artificial Sequence: Synthetic oligonucleotide
gagagcgaaauucaaagga

SEQ ID NO: 2691753 - RNA, 19 nt, Artificial Sequence
  Description of Artificial Sequence: Synthetic oligonucleotide
acucacgauacucuugcac

SEQ ID NO: 2691754 - RNA, 19 nt, Artificial Sequence
  Description of Artificial Sequence: Synthetic oligonucleotide
aguaccuaggacaagagga

SEQ ID NO: 2691755 - RNA, 19 nt, Artificial Sequence
  Description of Artificial Sequence: Synthetic oligonucleotide
aguccuuugucucaagucu

SEQ ID NO: 2691756 - RNA, 19 nt, Artificial Sequence
  Description of Artificial Sequence: Synthetic oligonucleotide
agagagcgaaauucaaagg

SEQ ID NO: 2691757 - RNA, 19 nt, Artificial Sequence
  Description of Artificial Sequence: Synthetic oligonucleotide
aucuccugcaucgaguacc

SEQ ID NO: 2691758 - RNA, 19 nt, Artificial Sequence
  Description of Artificial Sequence: Synthetic oligonucleotide
ugcacauuggacaccaccu

SEQ ID NO: 2691759 - RNA, 19 nt, Artificial Sequence
  Description of Artificial Sequence: Synthetic oligonucleotide
gagaagucuacagugcagg

SEQ ID NO: 2691760 - RNA, 19 nt, Artificial Sequence
  Description of Artificial Sequence: Synthetic oligonucleotide
agacugcagagguauaacg

SEQ ID NO: 2691761 - RNA, 19 nt, Artificial Sequence
  Description of Artificial Sequence: Synthetic oligonucleotide
acugaaucuccaaauaguc

SEQ ID NO: 2691762 - RNA, 19 nt, Artificial Sequence
  Description of Artificial Sequence: Synthetic oligonucleotide
ugagcaagagccaaaccaa

SEQ ID NO: 2691763 - RNA, 19 nt, Artificial Sequence
  Description of Artificial Sequence: Synthetic oligonucleotide
uuaggaagaauagggaggu

SEQ ID NO: 2691764 - RNA, 19 nt, Artificial Sequence
  Description of Artificial Sequence: Synthetic oligonucleotide
cuaucuuuccacacgucag

SEQ ID NO: 2691765 - RNA, 19 nt, Artificial Sequence
  Description of Artificial Sequence: Synthetic oligonucleotide
gguauaacguucuaggaca

SEQ ID NO: 2691766 - RNA, 19 nt, Artificial Sequence
  Description of Artificial Sequence: Synthetic oligonucleotide
aaaggaaaucgagaagucu

SEQ ID NO: 2691767 - RNA, 19 nt, Artificial Sequence
  Description of Artificial Sequence: Synthetic oligonucleotide
ggaacaucagcucucgggg

SEQ ID NO: 2691768 - RNA, 19 nt, Artificial Sequence
  Description of Artificial Sequence: Synthetic oligonucleotide
gugcaaacagccuugacca

SEQ ID NO: 2691769 - RNA, 19 nt, Artificial Sequence
  Description of Artificial Sequence: Synthetic oligonucleotide
ucaagucuggugcacuuca

SEQ ID NO: 2691770 - RNA, 19 nt, Artificial Sequence
  Description of Artificial Sequence: Synthetic oligonucleotide
uucuguuugacaaccucgu

SEQ ID NO: 2691771 - RNA, 19 nt, Artificial Sequence
  Description of Artificial Sequence: Synthetic oligonucleotide
ucuccaagugguugaagag

SEQ ID NO: 2691772 - RNA, 19 nt, Artificial Sequence
  Description of Artificial Sequence: Synthetic oligonucleotide
cuuuccacacgucagccag

SEQ ID NO: 2691773 - RNA, 19 nt, Artificial Sequence
  Description of Artificial Sequence: Synthetic oligonucleotide
ucuaggacaggugggaacc

SEQ ID NO: 2691774 - RNA, 19 nt, Artificial Sequence
  Description of Artificial Sequence: Synthetic oligonucleotide
uuuacaccacggcacaaac

SEQ ID NO: 2691775 - RNA, 19 nt, Artificial Sequence
  Description of Artificial Sequence: Synthetic oligonucleotide
uugcacauuggacaccacc

SEQ ID NO: 2691776 - RNA, 19 nt, Artificial Sequence
  Description of Artificial Sequence: Synthetic oligonucleotide
aaaggcagcaacguucugu

SEQ ID NO: 2691777 - RNA, 19 nt, Artificial Sequence
  Description of Artificial Sequence: Synthetic oligonucleotide
uccauaucugcuaucuuuc

SEQ ID NO: 2691778 - RNA, 19 nt, Artificial Sequence
  Description of Artificial Sequence: Synthetic oligonucleotide
guucuguuugacaaccucg

SEQ ID NO: 2691779 - RNA, 19 nt, Artificial Sequence
  Description of Artificial Sequence: Synthetic oligonucleotide
auaagaagugggugggaag

SEQ ID NO: 2691780 - RNA, 19 nt, Artificial Sequence
  Description of Artificial Sequence: Synthetic oligonucleotide
gauacucuugcacauugga

SEQ ID NO: 2691781 - RNA, 19 nt, Artificial Sequence
  Description of Artificial Sequence: Synthetic oligonucleotide
accaugugugguuugacca

SEQ ID NO: 2691782 - RNA, 19 nt, Artificial Sequence
  Description of Artificial Sequence: Synthetic oligonucleotide
gugguuugaccauugagac

SEQ ID NO: 2691783 - RNA, 19 nt, Artificial Sequence
  Description of Artificial Sequence: Synthetic oligonucleotide
uaagaagugggugggaaga

SEQ ID NO: 2691784 - RNA, 19 nt, Artificial Sequence
  Description of Artificial Sequence: Synthetic oligonucleotide
uugaccauugagacugcag

SEQ ID NO: 2691785 - RNA, 19 nt, Artificial Sequence
  Description of Artificial Sequence: Synthetic oligonucleotide
gaguaccuaggacaagagg

SEQ ID NO: 2691786 - RNA, 19 nt, Artificial Sequence
  Description of Artificial Sequence: Synthetic oligonucleotide
aauaagaagugggugggaa

SEQ ID NO: 2691787 - RNA, 19 nt, Artificial Sequence
  Description of Artificial Sequence: Synthetic oligonucleotide
uuggacaccaccucauaca

SEQ ID NO: 2691788 - RNA, 19 nt, Artificial Sequence
  Description of Artificial Sequence: Synthetic oligonucleotide
aagugguugaagagcuugc

SEQ ID NO: 2691789 - RNA, 19 nt, Artificial Sequence
  Description of Artificial Sequence: Synthetic oligonucleotide
aaaacauggucgccagcug

SEQ ID NO: 2691790 - RNA, 19 nt, Artificial Sequence
  Description of Artificial Sequence: Synthetic oligonucleotide
gaccauugagacugcagag

SEQ ID NO: 2691791 - RNA, 19 nt, Artificial Sequence
  Description of Artificial Sequence: Synthetic oligonucleotide
cugagcaagagccaaacca

SEQ ID NO: 2691792 - RNA, 19 nt, Artificial Sequence
  Description of Artificial Sequence: Synthetic oligonucleotide
ucucacuuccauaucugcu

SEQ ID NO: 2691793 - RNA, 19 nt, Artificial Sequence
  Description of Artificial Sequence: Synthetic oligonucleotide
aaggaaaucgagaagucua

SEQ ID NO: 2691794 - RNA, 19 nt, Artificial Sequence
  Description of Artificial Sequence: Synthetic oligonucleotide
caaacuugguggcugcccg

SEQ ID NO: 2691795 - RNA, 19 nt, Artificial Sequence
  Description of Artificial Sequence: Synthetic oligonucleotide
acagccuugaccaugugug

SEQ ID NO: 2691796 - RNA, 19 nt, Artificial Sequence
  Description of Artificial Sequence: Synthetic oligonucleotide
ucuggugcacuucauggaa

SEQ ID NO: 2691797 - RNA, 19 nt, Artificial Sequence
  Description of Artificial Sequence: Synthetic oligonucleotide
aucugcuaucuuuccacac

SEQ ID NO: 2691798 - RNA, 19 nt, Artificial Sequence
  Description of Artificial Sequence: Synthetic oligonucleotide
ugcagcccgguuuaggaag

SEQ ID NO: 2691799 - RNA, 19 nt, Artificial Sequence
  Description of Artificial Sequence: Synthetic oligonucleotide
auaacguucuaggacaggu

SEQ ID NO: 2691800 - RNA, 19 nt, Artificial Sequence
  Description of Artificial Sequence: Synthetic oligonucleotide
aucgagaagucuacagugc

SEQ ID NO: 2691801 - RNA, 19 nt, Artificial Sequence
  Description of Artificial Sequence: Synthetic oligonucleotide
acgauacucuugcacauug

SEQ ID NO: 2691802 - RNA, 19 nt, Artificial Sequence
  Description of Artificial Sequence: Synthetic oligonucleotide
auugagacugcagagguau

SEQ ID NO: 2691803 - RNA, 19 nt, Artificial Sequence
  Description of Artificial Sequence: Synthetic oligonucleotide
cacacgucagccagcaugc

SEQ ID NO: 2691804 - RNA, 19 nt, Artificial Sequence
  Description of Artificial Sequence: Synthetic oligonucleotide
ccaaauagucuccaagugg

SEQ ID NO: 2691805 - RNA, 19 nt, Artificial Sequence
  Description of Artificial Sequence: Synthetic oligonucleotide
ugcagagguauaacguucu

SEQ ID NO: 2691806 - RNA, 19 nt, Artificial Sequence
  Description of Artificial Sequence: Synthetic oligonucleotide
aacuuagaccucucucuga

SEQ ID NO: 2691807 - RNA, 19 nt, Artificial Sequence
  Description of Artificial Sequence: Synthetic oligonucleotide
aggggaagaguccuuuguc

SEQ ID NO: 2691808 - RNA, 19 nt, Artificial Sequence
  Description of Artificial Sequence: Synthetic oligonucleotide
accauugagacugcagagg

SEQ ID NO: 2691809 - RNA, 19 nt, Artificial Sequence
  Description of Artificial Sequence: Synthetic oligonucleotide
cugggagugcagcagagag

SEQ ID NO: 2691810 - RNA, 19 nt, Artificial Sequence
  Description of Artificial Sequence: Synthetic oligonucleotide
uacaucuccugcaucgagu

SEQ ID NO: 2691811 - RNA, 19 nt, Artificial Sequence
  Description of Artificial Sequence: Synthetic oligonucleotide
auacucuugcacauuggac

SEQ ID NO: 2691812 - RNA, 19 nt, Artificial Sequence
  Description of Artificial Sequence: Synthetic oligonucleotide
ucgaguaccuaggacaaga

SEQ ID NO: 2691813 - RNA, 19 nt, Artificial Sequence
  Description of Artificial Sequence: Synthetic oligonucleotide
ggacugaaucuccaaauag

SEQ ID NO: 2691814 - RNA, 19 nt, Artificial Sequence
  Description of Artificial Sequence: Synthetic oligonucleotide
cucuggaccaaacuuggug

SEQ ID NO: 2691815 - RNA, 19 nt, Artificial Sequence
  Description of Artificial Sequence: Synthetic oligonucleotide
aacauggucgccagcuggg

SEQ ID NO: 2691816 - RNA, 19 nt, Artificial Sequence
  Description of Artificial Sequence: Synthetic oligonucleotide
ucuugcacauuggacacca

SEQ ID NO: 2691817 - RNA, 19 nt, Artificial Sequence
  Description of Artificial Sequence: Synthetic oligonucleotide
aggaaaucgagaagucuac

SEQ ID NO: 2691818 - RNA, 19 nt, Artificial Sequence
  Description of Artificial Sequence: Synthetic oligonucleotide
aauagggagguaaaacuua

SEQ ID NO: 2691819 - RNA, 19 nt, Artificial Sequence
  Description of Artificial Sequence: Synthetic oligonucleotide
acuuccauaucugcuaucu

SEQ ID NO: 2691820 - RNA, 19 nt, Artificial Sequence
  Description of Artificial Sequence: Synthetic oligonucleotide
gaccaugugugguuugacc

SEQ ID NO: 2691821 - RNA, 19 nt, Artificial Sequence
  Description of Artificial Sequence: Synthetic oligonucleotide
cucacgauacucuugcaca

SEQ ID NO: 2691822 - RNA, 19 nt, Artificial Sequence
  Description of Artificial Sequence: Synthetic oligonucleotide
uaacguucuaggacaggug

SEQ ID NO: 2691823 - RNA, 19 nt, Artificial Sequence
  Description of Artificial Sequence: Synthetic oligonucleotide
gaaucuccaaauagucucc

SEQ ID NO: 2691824 - RNA, 19 nt, Artificial Sequence
  Description of Artificial Sequence: Synthetic oligonucleotide
ucauggaacaucagcucuc

SEQ ID NO: 2691825 - RNA, 19 nt, Artificial Sequence
  Description of Artificial Sequence: Synthetic oligonucleotide
cuguuugacaaccucguca

SEQ ID NO: 2691826 - RNA, 19 nt, Artificial Sequence
  Description of Artificial Sequence: Synthetic oligonucleotide
cuuugucucaagucuggug

SEQ ID NO: 2691827 - RNA, 19 nt, Artificial Sequence
  Description of Artificial Sequence: Synthetic oligonucleotide
ucugagcaagagccaaacc

SEQ ID NO: 2691828 - RNA, 19 nt, Artificial Sequence
  Description of Artificial Sequence: Synthetic oligonucleotide
ucuacagugcagguucgag

SEQ ID NO: 2691829 - RNA, 19 nt, Artificial Sequence
  Description of Artificial Sequence: Synthetic oligonucleotide
gagguauaacguucuagga

SEQ ID NO: 2691830 - RNA, 19 nt, Artificial Sequence
  Description of Artificial Sequence: Synthetic oligonucleotide
ugggaacccaaccuccagc

SEQ ID NO: 2691831 - RNA, 19 nt, Artificial Sequence
  Description of Artificial Sequence: Synthetic oligonucleotide
gugugguuugaccauugag

SEQ ID NO: 2691832 - RNA, 19 nt, Artificial Sequence
  Description of Artificial Sequence: Synthetic oligonucleotide
gacccuugcggcuggauac

SEQ ID NO: 2691833 - RNA, 19 nt, Artificial Sequence
  Description of Artificial Sequence: Synthetic oligonucleotide
gaguccuuugucucaaguc

SEQ ID NO: 2691834 - RNA, 19 nt, Artificial Sequence
  Description of Artificial Sequence: Synthetic oligonucleotide
cgguuuaggaagaauaggg

SEQ ID NO: 2691835 - RNA, 19 nt, Artificial Sequence
  Description of Artificial Sequence: Synthetic oligonucleotide
uauaacguucuaggacagg

SEQ ID NO: 2691836 - RNA, 19 nt, Artificial Sequence
  Description of Artificial Sequence: Synthetic oligonucleotide
caaacucacgauacucuug

SEQ ID NO: 2691837 - RNA, 19 nt, Artificial Sequence
  Description of Artificial Sequence: Synthetic oligonucleotide
ugcaucgaguaccuaggac

SEQ ID NO: 2691838 - RNA, 19 nt, Artificial Sequence
  Description of Artificial Sequence: Synthetic oligonucleotide
auagggagguaaaacuuag

SEQ ID NO: 2691839 - RNA, 19 nt, Artificial Sequence
  Description of Artificial Sequence: Synthetic oligonucleotide
agagccaaaccaaauaaau

SEQ ID NO: 2691840 - RNA, 19 nt, Artificial Sequence
  Description of Artificial Sequence: Synthetic oligonucleotide
uggacaccaccucauacau

SEQ ID NO: 2691841 - RNA, 19 nt, Artificial Sequence
  Description of Artificial Sequence: Synthetic oligonucleotide
uaucugcuaucuuuccaca

SEQ ID NO: 2691842 - RNA, 19 nt, Artificial Sequence
  Description of Artificial Sequence: Synthetic oligonucleotide
ggcagcaacguucuguuug

SEQ ID NO: 2691843 - RNA, 19 nt, Artificial Sequence
  Description of Artificial Sequence: Synthetic oligonucleotide
aggaagaauagggagguaa

SEQ ID NO: 2691844 - RNA, 19 nt, Artificial Sequence
  Description of Artificial Sequence: Synthetic oligonucleotide
uucuaggacaggugggaac

SEQ ID NO: 2691845 - RNA, 19 nt, Artificial Sequence
  Description of Artificial Sequence: Synthetic oligonucleotide
gcaucgaguaccuaggaca

SEQ ID NO: 2691846 - RNA, 19 nt, Artificial Sequence
  Description of Artificial Sequence: Synthetic oligonucleotide
caccaccucauacaucucc

SEQ ID NO: 2691847 - RNA, 19 nt, Artificial Sequence
  Description of Artificial Sequence: Synthetic oligonucleotide
cuccaagugguugaagagc

SEQ ID NO: 2691848 - RNA, 19 nt, Artificial Sequence
  Description of Artificial Sequence: Synthetic oligonucleotide
cuuucaggugacccuugcg

SEQ ID NO: 2691849 - RNA, 19 nt, Artificial Sequence
  Description of Artificial Sequence: Synthetic oligonucleotide
gucucuggaccaaacuugg

SEQ ID NO: 2691850 - RNA, 19 nt, Artificial Sequence
  Description of Artificial Sequence: Synthetic oligonucleotide
agguaaaacuuagaccucu

SEQ ID NO: 2691851 - RNA, 19 nt, Artificial Sequence
  Description of Artificial Sequence: Synthetic oligonucleotide
acaaacucacgauacucuu

SEQ ID NO: 2691852 - RNA, 19 nt, Artificial Sequence
  Description of Artificial Sequence: Synthetic oligonucleotide
uuacaccacggcacaaacu

SEQ ID NO: 2691853 - RNA, 19 nt, Artificial Sequence
  Description of Artificial Sequence: Synthetic oligonucleotide
cauggaacaucagcucucg

SEQ ID NO: 2691854 - RNA, 19 nt, Artificial Sequence
  Description of Artificial Sequence: Synthetic oligonucleotide
aaauaagaaguggguggga

SEQ ID NO: 2691855 - RNA, 19 nt, Artificial Sequence
  Description of Artificial Sequence: Synthetic oligonucleotide
ugggagugcagcagagagc

SEQ ID NO: 2691856 - RNA, 19 nt, Artificial Sequence
  Description of Artificial Sequence: Synthetic oligonucleotide
agaguccuuugucucaagu

SEQ ID NO: 2691857 - RNA, 19 nt, Artificial Sequence
  Description of Artificial Sequence: Synthetic oligonucleotide
gcaacguucuguuugacaa

SEQ ID NO: 2691858 - RNA, 19 nt, Artificial Sequence
  Description of Artificial Sequence: Synthetic oligonucleotide
cuggaccaaacuugguggc

SEQ ID NO: 2691859 - RNA, 19 nt, Artificial Sequence
  Description of Artificial Sequence: Synthetic oligonucleotide
aaucuccaaauagucucca

SEQ ID NO: 2691860 - RNA, 19 nt, Artificial Sequence
  Description of Artificial Sequence: Synthetic oligonucleotide
uuuuacaccacggcacaaa

SEQ ID NO: 2691861 - RNA, 19 nt, Artificial Sequence
  Description of Artificial Sequence: Synthetic oligonucleotide
ucacuuccauaucugcuau

SEQ ID NO: 2691862 - RNA, 19 nt, Artificial Sequence
  Description of Artificial Sequence: Synthetic oligonucleotide
agcaacguucuguuugaca

SEQ ID NO: 2691863 - RNA, 19 nt, Artificial Sequence
  Description of Artificial Sequence: Synthetic oligonucleotide
ugugugguuugaccauuga

SEQ ID NO: 2691864 - RNA, 19 nt, Artificial Sequence
  Description of Artificial Sequence: Synthetic oligonucleotide
ucuuuccacacgucagcca

SEQ ID NO: 2691865 - RNA, 19 nt, Artificial Sequence
  Description of Artificial Sequence: Synthetic oligonucleotide
cugcagagguauaacguuc

SEQ ID NO: 2691866 - RNA, 19 nt, Artificial Sequence
  Description of Artificial Sequence: Synthetic oligonucleotide
agaagucuacagugcaggu

SEQ ID NO: 2691867 - RNA, 19 nt, Artificial Sequence
  Description of Artificial Sequence: Synthetic oligonucleotide
aagagccaaaccaaauaaa

SEQ ID NO: 2691868 - RNA, 19 nt, Artificial Sequence
  Description of Artificial Sequence: Synthetic oligonucleotide
uaggcagggauaccaggac

SEQ ID NO: 2691869 - RNA, 19 nt, Artificial Sequence
  Description of Artificial Sequence: Synthetic oligonucleotide
aggugggaacccaaccucc

SEQ ID NO: 2691870 - RNA, 19 nt, Artificial Sequence
  Description of Artificial Sequence: Synthetic oligonucleotide
ucacgauacucuugcacau

SEQ ID NO: 2691871 - RNA, 19 nt, Artificial Sequence
  Description of Artificial Sequence: Synthetic oligonucleotide
gauacgacaagugacuuuu

SEQ ID NO: 2691872 - RNA, 19 nt, Artificial Sequence
  Description of Artificial Sequence: Synthetic oligonucleotide
agaccucucucugagcaag

SEQ ID NO: 2691873 - RNA, 19 nt, Artificial Sequence
  Description of Artificial Sequence: Synthetic oligonucleotide
cugcccggcgcucaaaggc

SEQ ID NO: 2691874 - RNA, 19 nt, Artificial Sequence
  Description of Artificial Sequence: Synthetic oligonucleotide
ugccaucagugcaaacagc

SEQ ID NO: 2691875 - RNA, 19 nt, Artificial Sequence
  Description of Artificial Sequence: Synthetic oligonucleotide
ugggcuuucaggugacccu

SEQ ID NO: 2691876 - RNA, 19 nt, Artificial Sequence
  Description of Artificial Sequence: Synthetic oligonucleotide
ucucucugagcaagagcca

SEQ ID NO: 2691877 - RNA, 19 nt, Artificial Sequence
  Description of Artificial Sequence: Synthetic oligonucleotide
ugguuugaccauugagacu

SEQ ID NO: 2691878 - RNA, 19 nt, Artificial Sequence
  Description of Artificial Sequence: Synthetic oligonucleotide
aagaguccuuugucucaag

SEQ ID NO: 2691879 - RNA, 19 nt, Artificial Sequence
  Description of Artificial Sequence: Synthetic oligonucleotide
aggacugaaucuccaaaua

SEQ ID NO: 2691880 - RNA, 19 nt, Artificial Sequence
  Description of Artificial Sequence: Synthetic oligonucleotide
agagcgaaauucaaaggaa

SEQ ID NO: 2691881 - RNA, 19 nt, Artificial Sequence
  Description of Artificial Sequence: Synthetic oligonucleotide
ccaaaccaaauaaauaaga

SEQ ID NO: 2691882 - RNA, 19 nt, Artificial Sequence
  Description of Artificial Sequence: Synthetic oligonucleotide
caccacggcacaaacucac

SEQ ID NO: 2691883 - RNA, 19 nt, Artificial Sequence
  Description of Artificial Sequence: Synthetic oligonucleotide
gguaggcagggauaccagg

SEQ ID NO: 2691884 - RNA, 19 nt, Artificial Sequence
  Description of Artificial Sequence: Synthetic oligonucleotide
guauaacguucuaggacag

SEQ ID NO: 2691885 - RNA, 19 nt, Artificial Sequence
  Description of Artificial Sequence: Synthetic oligonucleotide
auggucgccagcugggagu

SEQ ID NO: 2691886 - RNA, 19 nt, Artificial Sequence
  Description of Artificial Sequence: Synthetic oligonucleotide
gaagaauagggagguaaaa

SEQ ID NO: 2691887 - RNA, 19 nt, Artificial Sequence
  Description of Artificial Sequence: Synthetic oligonucleotide
gcuaucuuuccacacguca

SEQ ID NO: 2691888 - RNA, 19 nt, Artificial Sequence
  Description of Artificial Sequence: Synthetic oligonucleotide
cagguucgaggguaggcag

SEQ ID NO: 2691889 - RNA, 19 nt, Artificial Sequence
  Description of Artificial Sequence: Synthetic oligonucleotide
acaucuccugcaucgagua

SEQ ID NO: 2691890 - RNA, 19 nt, Artificial Sequence
  Description of Artificial Sequence: Synthetic oligonucleotide
ugcggcuggauacgacaag

SEQ ID NO: 2691891 - RNA, 19 nt, Artificial Sequence
  Description of Artificial Sequence: Synthetic oligonucleotide
gacugaaucuccaaauagu

SEQ ID NO: 2691892 - RNA, 19 nt, Artificial Sequence
  Description of Artificial Sequence: Synthetic oligonucleotide
caugcagcccgguuuagga

SEQ ID NO: 2691893 - RNA, 19 nt, Artificial Sequence
  Description of Artificial Sequence: Synthetic oligonucleotide
cuugcggcuggauacgaca

SEQ ID NO: 2691894 - RNA, 19 nt, Artificial Sequence
  Description of Artificial Sequence: Synthetic oligonucleotide
aacucacgauacucuugca

SEQ ID NO: 2691895 - RNA, 19 nt, Artificial Sequence
  Description of Artificial Sequence: Synthetic oligonucleotide
ccugcaucgaguaccuagg

SEQ ID NO: 2691896 - RNA, 19 nt, Artificial Sequence
  Description of Artificial Sequence: Synthetic oligonucleotide
uugaccaugugugguuuga

SEQ ID NO: 2691897 - RNA, 19 nt, Artificial Sequence
  Description of Artificial Sequence: Synthetic oligonucleotide
agcgaaauucaaaggaaau

SEQ ID NO: 2691898 - RNA, 19 nt, Artificial Sequence
  Description of Artificial Sequence: Synthetic oligonucleotide
ugcagguucgaggguaggc

SEQ ID NO: 2691899 - RNA, 19 nt, Artificial Sequence
  Description of Artificial Sequence: Synthetic oligonucleotide
aggguaggcagggauacca

SEQ ID NO: 2691900 - RNA, 19 nt, Artificial Sequence
  Description of Artificial Sequence: Synthetic oligonucleotide
gcuggauacgacaagugac

SEQ ID NO: 2691901 - RNA, 19 nt, Artificial Sequence
  Description of Artificial Sequence: Synthetic oligonucleotide
cuccaaauagucuccaagu

SEQ ID NO: 2691902 - RNA, 19 nt, Artificial Sequence
  Description of Artificial Sequence: Synthetic oligonucleotide
caacguucuguuugacaac

SEQ ID NO: 2691903 - RNA, 19 nt, Artificial Sequence
  Description of Artificial Sequence: Synthetic oligonucleotide
gagacugcagagguauaac

SEQ ID NO: 2691904 - RNA, 19 nt, Artificial Sequence
  Description of Artificial Sequence: Synthetic oligonucleotide
gagcgaaauucaaaggaaa

SEQ ID NO: 2691905 - RNA, 19 nt, Artificial Sequence
  Description of Artificial Sequence: Synthetic oligonucleotide
cugggcuuucaggugaccc

SEQ ID NO: 2691906 - RNA, 19 nt, Artificial Sequence
  Description of Artificial Sequence: Synthetic oligonucleotide
acggcacaaacucacgaua

SEQ ID NO: 2691907 - RNA, 19 nt, Artificial Sequence
  Description of Artificial Sequence: Synthetic oligonucleotide
cacauuggacaccaccuca

SEQ ID NO: 2691908 - RNA, 19 nt, Artificial Sequence
  Description of Artificial Sequence: Synthetic oligonucleotide
auggaacaucagcucucgg

SEQ ID NO: 2691909 - RNA, 19 nt, Artificial Sequence
  Description of Artificial Sequence: Synthetic oligonucleotide
cuggugcacuucauggaac

SEQ ID NO: 2691910 - RNA, 19 nt, Artificial Sequence
  Description of Artificial Sequence: Synthetic oligonucleotide
aggcagggauaccaggacu

SEQ ID NO: 2691911 - RNA, 19 nt, Artificial Sequence
  Description of Artificial Sequence: Synthetic oligonucleotide
uugcggcuggauacgacaa

SEQ ID NO: 2691912 - RNA, 19 nt, Artificial Sequence
  Description of Artificial Sequence: Synthetic oligonucleotide
cucugagcaagagccaaac

SEQ ID NO: 2691913 - RNA, 19 nt, Artificial Sequence
  Description of Artificial Sequence: Synthetic oligonucleotide
uuccacacgucagccagca

SEQ ID NO: 2691914 - RNA, 19 nt, Artificial Sequence
  Description of Artificial Sequence: Synthetic oligonucleotide
gagccaaaccaaauaaaua

SEQ ID NO: 2691915 - RNA, 19 nt, Artificial Sequence
  Description of Artificial Sequence: Synthetic oligonucleotide
uuugaccauugagacugca

SEQ ID NO: 2691916 - RNA, 19 nt, Artificial Sequence
  Description of Artificial Sequence: Synthetic oligonucleotide
caucgaguaccuaggacaa

SEQ ID NO: 2691917 - RNA, 19 nt, Artificial Sequence
  Description of Artificial Sequence: Synthetic oligonucleotide
guaaaacuuagaccucucu

SEQ ID NO: 2691918 - RNA, 19 nt, Artificial Sequence
  Description of Artificial Sequence: Synthetic oligonucleotide
ucgaggguaggcagggaua

SEQ ID NO: 2691919 - RNA, 19 nt, Artificial Sequence
  Description of Artificial Sequence: Synthetic oligonucleotide
cccgguuuaggaagaauag

SEQ ID NO: 2691920 - RNA, 19 nt, Artificial Sequence
  Description of Artificial Sequence: Synthetic oligonucleotide
gagugcagcagagagcgaa

SEQ ID NO: 2691921 - RNA, 19 nt, Artificial Sequence
  Description of Artificial Sequence: Synthetic oligonucleotide
caggugggaacccaaccuc

SEQ ID NO: 2691922 - RNA, 19 nt, Artificial Sequence
  Description of Artificial Sequence: Synthetic oligonucleotide
acguucuaggacagguggg

SEQ ID NO: 2691923 - RNA, 19 nt, Artificial Sequence
  Description of Artificial Sequence: Synthetic oligonucleotide
cuggauacgacaagugacu

SEQ ID NO: 2691924 - RNA, 19 nt, Artificial Sequence
  Description of Artificial Sequence: Synthetic oligonucleotide
ucucaagucuggugcacuu

SEQ ID NO: 2691925 - RNA, 19 nt, Artificial Sequence
  Description of Artificial Sequence: Synthetic oligonucleotide
gguuuaggaagaauaggga

SEQ ID NO: 2691926 - RNA, 19 nt, Artificial Sequence
  Description of Artificial Sequence: Synthetic oligonucleotide
ggauggcugucucuggacc

SEQ ID NO: 2691927 - RNA, 19 nt, Artificial Sequence
  Description of Artificial Sequence: Synthetic oligonucleotide
guaggcagggauaccagga

SEQ ID NO: 2691928 - RNA, 19 nt, Artificial Sequence
  Description of Artificial Sequence: Synthetic oligonucleotide
gaauagggagguaaaacuu

SEQ ID NO: 2691929 - RNA, 19 nt, Artificial Sequence
  Description of Artificial Sequence: Synthetic oligonucleotide
ucucuggaccaaacuuggu

SEQ ID NO: 2691930 - RNA, 19 nt, Artificial Sequence
  Description of Artificial Sequence: Synthetic oligonucleotide
cacaaacucacgauacucu

SEQ ID NO: 2691931 - RNA, 19 nt, Artificial Sequence
  Description of Artificial Sequence: Synthetic oligonucleotide
guccuuugucucaagucug

SEQ ID NO: 2691932 - RNA, 19 nt, Artificial Sequence
  Description of Artificial Sequence: Synthetic oligonucleotide
cauggucgccagcugggag

SEQ ID NO: 2691933 - RNA, 19 nt, Artificial Sequence
  Description of Artificial Sequence: Synthetic oligonucleotide
ccacacgucagccagcaug

SEQ ID NO: 2691934 - RNA, 19 nt, Artificial Sequence
  Description of Artificial Sequence: Synthetic oligonucleotide
gacugcagagguauaacgu

SEQ ID NO: 2691935 - RNA, 19 nt, Artificial Sequence
  Description of Artificial Sequence: Synthetic oligonucleotide
cugaaucuccaaauagucu

SEQ ID NO: 2691936 - RNA, 19 nt, Artificial Sequence
  Description of Artificial Sequence: Synthetic oligonucleotide
cagcagagagcgaaauuca

SEQ ID NO: 2691937 - RNA, 19 nt, Artificial Sequence
  Description of Artificial Sequence: Synthetic oligonucleotide
ugcuaucuuuccacacguc

SEQ ID NO: 2691938 - RNA, 19 nt, Artificial Sequence
  Description of Artificial Sequence: Synthetic oligonucleotide
gguucgaggguaggcaggg

SEQ ID NO: 2691939 - RNA, 19 nt, Artificial Sequence
  Description of Artificial Sequence: Synthetic oligonucleotide
gucuggugcacuucaugga

SEQ ID NO: 2691940 - RNA, 19 nt, Artificial Sequence
  Description of Artificial Sequence: Synthetic oligonucleotide
gcgaaauucaaaggaaauc

SEQ ID NO: 2691941 - RNA, 19 nt, Artificial Sequence
  Description of Artificial Sequence: Synthetic oligonucleotide
gaagaguccuuugucucaa

SEQ ID NO: 2691942 - RNA, 19 nt, Artificial Sequence
  Description of Artificial Sequence: Synthetic oligonucleotide
gagguaaaacuuagaccuc

SEQ ID NO: 2691943 - RNA, 19 nt, Artificial Sequence
  Description of Artificial Sequence: Synthetic oligonucleotide
uggaccaaacuugguggcu

SEQ ID NO: 2691944 - RNA, 19 nt, Artificial Sequence
  Description of Artificial Sequence: Synthetic oligonucleotide
aaauagucuccaagugguu

SEQ ID NO: 2691945 - RNA, 19 nt, Artificial Sequence
  Description of Artificial Sequence: Synthetic oligonucleotide
agucuacagugcagguucg

SEQ ID NO: 2691946 - RNA, 19 nt, Artificial Sequence
  Description of Artificial Sequence: Synthetic oligonucleotide
ggcuggauacgacaaguga

SEQ ID NO: 2691947 - RNA, 19 nt, Artificial Sequence
  Description of Artificial Sequence: Synthetic oligonucleotide
uagaccucucucugagcaa

SEQ ID NO: 2691948 - RNA, 19 nt, Artificial Sequence
  Description of Artificial Sequence: Synthetic oligonucleotide
gguugaagagcuugccauc

SEQ ID NO: 2691949 - RNA, 19 nt, Artificial Sequence
  Description of Artificial Sequence: Synthetic oligonucleotide
uaccuaggacaagaggaau

SEQ ID NO: 2691950 - RNA, 19 nt, Artificial Sequence
  Description of Artificial Sequence: Synthetic oligonucleotide
guaccuaggacaagaggaa

SEQ ID NO: 2691951 - RNA, 19 nt, Artificial Sequence
  Description of Artificial Sequence: Synthetic oligonucleotide
ccauaucugcuaucuuucc

SEQ ID NO: 2691952 - RNA, 19 nt, Artificial Sequence
  Description of Artificial Sequence: Synthetic oligonucleotide
uaggacaggugggaaccca

SEQ ID NO: 2691953 - RNA, 19 nt, Artificial Sequence
  Description of Artificial Sequence: Synthetic oligonucleotide
agguucgaggguaggcagg

SEQ ID NO: 2691954 - RNA, 19 nt, Artificial Sequence
  Description of Artificial Sequence: Synthetic oligonucleotide
agggauaccaggacugaau

SEQ ID NO: 2691955 - RNA, 19 nt, Artificial Sequence
  Description of Artificial Sequence: Synthetic oligonucleotide
uggauacgacaagugacuu

SEQ ID NO: 2691956 - RNA, 19 nt, Artificial Sequence
  Description of Artificial Sequence: Synthetic oligonucleotide
gugcacuucauggaacauc

SEQ ID NO: 2691957 - RNA, 19 nt, Artificial Sequence
  Description of Artificial Sequence: Synthetic oligonucleotide
accaccucauacaucuccu

SEQ ID NO: 2691958 - RNA, 19 nt, Artificial Sequence
  Description of Artificial Sequence: Synthetic oligonucleotide
ugaccaugugugguuugac

SEQ ID NO: 2691959 - RNA, 19 nt, Artificial Sequence
  Description of Artificial Sequence: Synthetic oligonucleotide
ccgguuuaggaagaauagg

SEQ ID NO: 2691960 - RNA, 19 nt, Artificial Sequence
  Description of Artificial Sequence: Synthetic oligonucleotide
ggcgcucaaaggcagcaac

SEQ ID NO: 2691961 - RNA, 19 nt, Artificial Sequence
  Description of Artificial Sequence: Synthetic oligonucleotide
acauuggacaccaccucau

SEQ ID NO: 2691962 - RNA, 19 nt, Artificial Sequence
  Description of Artificial Sequence: Synthetic oligonucleotide
gcacaaacucacgauacuc

SEQ ID NO: 2691963 - RNA, 19 nt, Artificial Sequence
  Description of Artificial Sequence: Synthetic oligonucleotide
acagugcagguucgagggu

SEQ ID NO: 2691964 - RNA, 19 nt, Artificial Sequence
  Description of Artificial Sequence: Synthetic oligonucleotide
uggucgccagcugggagug

SEQ ID NO: 2691965 - RNA, 19 nt, Artificial Sequence
  Description of Artificial Sequence: Synthetic oligonucleotide
cuaggacaggugggaaccc

SEQ ID NO: 2691966 - RNA, 19 nt, Artificial Sequence
  Description of Artificial Sequence: Synthetic oligonucleotide
uugagacugcagagguaua

SEQ ID NO: 2691967 - RNA, 19 nt, Artificial Sequence
  Description of Artificial Sequence: Synthetic oligonucleotide
accacggcacaaacucacg

SEQ ID NO: 2691968 - RNA, 19 nt, Artificial Sequence
  Description of Artificial Sequence: Synthetic oligonucleotide
augcagcccgguuuaggaa

SEQ ID NO: 2691969 - RNA, 19 nt, Artificial Sequence
  Description of Artificial Sequence: Synthetic oligonucleotide
acccuugcggcuggauacg

SEQ ID NO: 2691970 - RNA, 19 nt, Artificial Sequence
  Description of Artificial Sequence: Synthetic oligonucleotide
aggugacccuugcggcugg

SEQ ID NO: 2691971 - RNA, 19 nt, Artificial Sequence
  Description of Artificial Sequence: Synthetic oligonucleotide
gagcaagagccaaaccaaa

SEQ ID NO: 2691972 - RNA, 19 nt, Artificial Sequence
  Description of Artificial Sequence: Synthetic oligonucleotide
augugugguuugaccauug

SEQ ID NO: 2691973 - RNA, 19 nt, Artificial Sequence
  Description of Artificial Sequence: Synthetic oligonucleotide
aucgaguaccuaggacaag

SEQ ID NO: 2691974 - RNA, 19 nt, Artificial Sequence
  Description of Artificial Sequence: Synthetic oligonucleotide
cucuugcacauuggacacc

SEQ ID NO: 2691975 - RNA, 19 nt, Artificial Sequence
  Description of Artificial Sequence: Synthetic oligonucleotide
cucaagucuggugcacuuc

SEQ ID NO: 2691976 - RNA, 19 nt, Artificial Sequence
  Description of Artificial Sequence: Synthetic oligonucleotide
caucuccugcaucgaguac

SEQ ID NO: 2691977 - RNA, 19 nt, Artificial Sequence
  Description of Artificial Sequence: Synthetic oligonucleotide
ggaagaauagggagguaaa

SEQ ID NO: 2691978 - RNA, 19 nt, Artificial Sequence
  Description of Artificial Sequence: Synthetic oligonucleotide
ucgccagcugggagugcag

SEQ ID NO: 2691979 - RNA, 19 nt, Artificial Sequence
  Description of Artificial Sequence: Synthetic oligonucleotide
gcuuucaggugacccuugc

SEQ ID NO: 2691980 - RNA, 19 nt, Artificial Sequence
  Description of Artificial Sequence: Synthetic oligonucleotide
gcagcaacguucuguuuga

SEQ ID NO: 2691981 - RNA, 19 nt, Artificial Sequence
  Description of Artificial Sequence: Synthetic oligonucleotide
caggacugaaucuccaaau

SEQ ID NO: 2691982 - RNA, 19 nt, Artificial Sequence
  Description of Artificial Sequence: Synthetic oligonucleotide
gagcuugccaucagugcaa

SEQ ID NO: 2691983 - RNA, 19 nt, Artificial Sequence
  Description of Artificial Sequence: Synthetic oligonucleotide
cugcuaucuuuccacacgu

SEQ ID NO: 2691984 - RNA, 19 nt, Artificial Sequence
  Description of Artificial Sequence: Synthetic oligonucleotide
gguaaaacuuagaccucuc

SEQ ID NO: 2691985 - RNA, 19 nt, Artificial Sequence
  Description of Artificial Sequence: Synthetic oligonucleotide
cuugcacauuggacaccac

SEQ ID NO: 2691986 - RNA, 19 nt, Artificial Sequence
  Description of Artificial Sequence: Synthetic oligonucleotide
cagugcaaacagccuugac

SEQ ID NO: 2691987 - RNA, 19 nt, Artificial Sequence
  Description of Artificial Sequence: Synthetic oligonucleotide
cgagaagucuacagugcag

SEQ ID NO: 2691988 - RNA, 19 nt, Artificial Sequence
  Description of Artificial Sequence: Synthetic oligonucleotide
ggaaaucgagaagucuaca

SEQ ID NO: 2691989 - RNA, 19 nt, Artificial Sequence
  Description of Artificial Sequence: Synthetic oligonucleotide
cagccagcaugcagcccgg

SEQ ID NO: 2691990 - RNA, 19 nt, Artificial Sequence
  Description of Artificial Sequence: Synthetic oligonucleotide
cucucugagcaagagccaa

SEQ ID NO: 2691991 - RNA, 19 nt, Artificial Sequence
  Description of Artificial Sequence: Synthetic oligonucleotide
gaagucuacagugcagguu

SEQ ID NO: 2691992 - RNA, 19 nt, Artificial Sequence
  Description of Artificial Sequence: Synthetic oligonucleotide
cauugagacugcagaggua

SEQ ID NO: 2691993 - RNA, 19 nt, Artificial Sequence
  Description of Artificial Sequence: Synthetic oligonucleotide
cggcacaaacucacgauac

SEQ ID NO: 2691994 - RNA, 19 nt, Artificial Sequence
  Description of Artificial Sequence: Synthetic oligonucleotide
ggaacccaaccuccagcug

SEQ ID NO: 2691995 - RNA, 19 nt, Artificial Sequence
  Description of Artificial Sequence: Synthetic oligonucleotide
caaaggcagcaacguucug

SEQ ID NO: 2691996 - RNA, 19 nt, Artificial Sequence
  Description of Artificial Sequence: Synthetic oligonucleotide
acaccacggcacaaacuca

SEQ ID NO: 2691997 - RNA, 19 nt, Artificial Sequence
  Description of Artificial Sequence: Synthetic oligonucleotide
cugcaucgaguaccuagga

SEQ ID NO: 2691998 - RNA, 19 nt, Artificial Sequence
  Description of Artificial Sequence: Synthetic oligonucleotide
gcugcccggcgcucaaagg

SEQ ID NO: 2691999 - RNA, 19 nt, Artificial Sequence
  Description of Artificial Sequence: Synthetic oligonucleotide
gcagguucgaggguaggca

SEQ ID NO: 2692000 - RNA, 19 nt, Artificial Sequence
  Description of Artificial Sequence: Synthetic oligonucleotide
agugcagcagagagcgaaa

SEQ ID NO: 2692001 - RNA, 19 nt, Artificial Sequence
  Description of Artificial Sequence: Synthetic oligonucleotide
gcaugcagcccgguuuagg

SEQ ID NO: 2692002 - RNA, 19 nt, Artificial Sequence
  Description of Artificial Sequence: Synthetic oligonucleotide
gcaggggaagaguccuuug

SEQ ID NO: 2692003 - RNA, 19 nt, Artificial Sequence
  Description of Artificial Sequence: Synthetic oligonucleotide
acauggucgccagcuggga

SEQ ID NO: 2692004 - RNA, 19 nt, Artificial Sequence
  Description of Artificial Sequence: Synthetic oligonucleotide
gcagagagcgaaauucaaa

SEQ ID NO: 2692005 - RNA, 19 nt, Artificial Sequence
  Description of Artificial Sequence: Synthetic oligonucleotide
cguucuguuugacaaccuc

SEQ ID NO: 2692006 - RNA, 19 nt, Artificial Sequence
  Description of Artificial Sequence: Synthetic oligonucleotide
guuugacaaccucgucaaa

SEQ ID NO: 2692007 - RNA, 19 nt, Artificial Sequence
  Description of Artificial Sequence: Synthetic oligonucleotide
cgaguaccuaggacaagag

SEQ ID NO: 2692008 - RNA, 19 nt, Artificial Sequence
  Description of Artificial Sequence: Synthetic oligonucleotide
acccaaccuccagcugggc

SEQ ID NO: 2692009 - RNA, 19 nt, Artificial Sequence
  Description of Artificial Sequence: Synthetic oligonucleotide
gugcagguucgaggguagg

SEQ ID NO: 2692010 - RNA, 19 nt, Artificial Sequence
  Description of Artificial Sequence: Synthetic oligonucleotide
auggcugucucuggaccaa

SEQ ID NO: 2692011 - RNA, 19 nt, Artificial Sequence
  Description of Artificial Sequence: Synthetic oligonucleotide
cauuggacaccaccucaua

SEQ ID NO: 2692012 - RNA, 19 nt, Artificial Sequence
  Description of Artificial Sequence: Synthetic oligonucleotide
uaggaagaauagggaggua

SEQ ID NO: 2692013 - RNA, 19 nt, Artificial Sequence
  Description of Artificial Sequence: Synthetic oligonucleotide
caggggaagaguccuuugu

SEQ ID NO: 2692014 - RNA, 19 nt, Artificial Sequence
  Description of Artificial Sequence: Synthetic oligonucleotide
cacggcacaaacucacgau

SEQ ID NO: 2692015 - RNA, 19 nt, Artificial Sequence
  Description of Artificial Sequence: Synthetic oligonucleotide
aggacaggugggaacccaa

SEQ ID NO: 2692016 - RNA, 19 nt, Artificial Sequence
  Description of Artificial Sequence: Synthetic oligonucleotide
acguucuguuugacaaccu

SEQ ID NO: 2692017 - RNA, 19 nt, Artificial Sequence
  Description of Artificial Sequence: Synthetic oligonucleotide
ggguaggcagggauaccag

SEQ ID NO: 2692018 - RNA, 19 nt, Artificial Sequence
  Description of Artificial Sequence: Synthetic oligonucleotide
cagcugggagugcagcaga

SEQ ID NO: 2692019 - RNA, 19 nt, Artificial Sequence
  Description of Artificial Sequence: Synthetic oligonucleotide
cagcaugcagcccgguuua

SEQ ID NO: 2692020 - RNA, 19 nt, Artificial Sequence
  Description of Artificial Sequence: Synthetic oligonucleotide
aaccuccagcugggcuuuc

SEQ ID NO: 2692021 - RNA, 19 nt, Artificial Sequence
  Description of Artificial Sequence: Synthetic oligonucleotide
cagugcagguucgagggua

SEQ ID NO: 2692022 - RNA, 19 nt, Artificial Sequence
  Description of Artificial Sequence: Synthetic oligonucleotide
gaccucucucugagcaaga

SEQ ID NO: 2692023 - RNA, 19 nt, Artificial Sequence
  Description of Artificial Sequence: Synthetic oligonucleotide
agcuugccaucagugcaaa

SEQ ID NO: 2692024 - RNA, 19 nt, Artificial Sequence
  Description of Artificial Sequence: Synthetic oligonucleotide
gucuacagugcagguucga

SEQ ID NO: 2692025 - RNA, 19 nt, Artificial Sequence
  Description of Artificial Sequence: Synthetic oligonucleotide
gcccgguuuaggaagaaua

SEQ ID NO: 2692026 - RNA, 19 nt, Artificial Sequence
  Description of Artificial Sequence: Synthetic oligonucleotide
uccacacgucagccagcau

SEQ ID NO: 2692027 - RNA, 19 nt, Artificial Sequence
  Description of Artificial Sequence: Synthetic oligonucleotide
ggugggaacccaaccucca

SEQ ID NO: 2692028 - RNA, 19 nt, Artificial Sequence
  Description of Artificial Sequence: Synthetic oligonucleotide
cgaggguaggcagggauac

SEQ ID NO: 2692029 - RNA, 19 nt, Artificial Sequence
  Description of Artificial Sequence: Synthetic oligonucleotide
ggacaggugggaacccaac

SEQ ID NO: 2692030 - RNA, 19 nt, Artificial Sequence
  Description of Artificial Sequence: Synthetic oligonucleotide
cagcaacguucuguuugac

SEQ ID NO: 2692031 - RNA, 19 nt, Artificial Sequence
  Description of Artificial Sequence: Synthetic oligonucleotide
uggcugucucuggaccaaa

SEQ ID NO: 2692032 - RNA, 19 nt, Artificial Sequence
  Description of Artificial Sequence: Synthetic oligonucleotide
agcccgguuuaggaagaau

SEQ ID NO: 2692033 - RNA, 19 nt, Artificial Sequence
  Description of Artificial Sequence: Synthetic oligonucleotide
aggcagcaacguucuguuu

SEQ ID NO: 2692034 - RNA, 19 nt, Artificial Sequence
  Description of Artificial Sequence: Synthetic oligonucleotide
gucucaagucuggugcacu

SEQ ID NO: 2692035 - RNA, 19 nt, Artificial Sequence
  Description of Artificial Sequence: Synthetic oligonucleotide
ccacggcacaaacucacga

SEQ ID NO: 2692036 - RNA, 19 nt, Artificial Sequence
  Description of Artificial Sequence: Synthetic oligonucleotide
cagggauaccaggacugaa

SEQ ID NO: 2692037 - RNA, 19 nt, Artificial Sequence
  Description of Artificial Sequence: Synthetic oligonucleotide
ggauacgacaagugacuuu

SEQ ID NO: 2692038 - RNA, 19 nt, Artificial Sequence
  Description of Artificial Sequence: Synthetic oligonucleotide
ccuugcggcuggauacgac

SEQ ID NO: 2692039 - RNA, 19 nt, Artificial Sequence
  Description of Artificial Sequence: Synthetic oligonucleotide
ggcuuucaggugacccuug

SEQ ID NO: 2692040 - RNA, 19 nt, Artificial Sequence
  Description of Artificial Sequence: Synthetic oligonucleotide
gcagggauaccaggacuga

SEQ ID NO: 2692041 - RNA, 19 nt, Artificial Sequence
  Description of Artificial Sequence: Synthetic oligonucleotide
cguucuaggacagguggga

SEQ ID NO: 2692042 - RNA, 19 nt, Artificial Sequence
  Description of Artificial Sequence: Synthetic oligonucleotide
caagucuggugcacuucau

SEQ ID NO: 2692043 - RNA, 19 nt, Artificial Sequence
  Description of Artificial Sequence: Synthetic oligonucleotide
cggcuggauacgacaagug

SEQ ID NO: 2692044 - RNA, 19 nt, Artificial Sequence
  Description of Artificial Sequence: Synthetic oligonucleotide
gcagagguauaacguucua

SEQ ID NO: 2692045 - RNA, 19 nt, Artificial Sequence
  Description of Artificial Sequence: Synthetic oligonucleotide
caugugugguuugaccauu

SEQ ID NO: 2692046 - RNA, 19 nt, Artificial Sequence
  Description of Artificial Sequence: Synthetic oligonucleotide
ggacaccaccucauacauc

SEQ ID NO: 2692047 - RNA, 19 nt, Artificial Sequence
  Description of Artificial Sequence: Synthetic oligonucleotide
gcggcuggauacgacaagu

SEQ ID NO: 2692048 - RNA, 19 nt, Artificial Sequence
  Description of Artificial Sequence: Synthetic oligonucleotide
gcugggagugcagcagaga

SEQ ID NO: 2692049 - RNA, 19 nt, Artificial Sequence
  Description of Artificial Sequence: Synthetic oligonucleotide
gcagcccgguuuaggaaga

SEQ ID NO: 2692050 - RNA, 19 nt, Artificial Sequence
  Description of Artificial Sequence: Synthetic oligonucleotide
gugcagcagagagcgaaau

SEQ ID NO: 2692051 - RNA, 19 nt, Artificial Sequence
  Description of Artificial Sequence: Synthetic oligonucleotide
gcucaaaggcagcaacguu

SEQ ID NO: 2692052 - RNA, 19 nt, Artificial Sequence
  Description of Artificial Sequence: Synthetic oligonucleotide
cccggcgcucaaaggcagc

SEQ ID NO: 2692053 - RNA, 19 nt, Artificial Sequence
  Description of Artificial Sequence: Synthetic oligonucleotide
ccagcaugcagcccgguuu

SEQ ID NO: 2692054 - RNA, 19 nt, Artificial Sequence
  Description of Artificial Sequence: Synthetic oligonucleotide
ccaugugugguuugaccau

SEQ ID NO: 2692055 - RNA, 19 nt, Artificial Sequence
  Description of Artificial Sequence: Synthetic oligonucleotide
guggcugcccggcgcucaa

SEQ ID NO: 2692056 - RNA, 19 nt, Artificial Sequence
  Description of Artificial Sequence: Synthetic oligonucleotide
cacgauacucuugcacauu

SEQ ID NO: 2692057 - RNA, 19 nt, Artificial Sequence
  Description of Artificial Sequence: Synthetic oligonucleotide
ggugcacuucauggaacau

SEQ ID NO: 2692058 - RNA, 19 nt, Artificial Sequence
  Description of Artificial Sequence: Synthetic oligonucleotide
gggcuuucaggugacccuu

SEQ ID NO: 2692059 - RNA, 19 nt, Artificial Sequence
  Description of Artificial Sequence: Synthetic oligonucleotide
cccaaccuccagcugggcu

SEQ ID NO: 2692060 - RNA, 19 nt, Artificial Sequence
  Description of Artificial Sequence: Synthetic oligonucleotide
ccggcgcucaaaggcagca

SEQ ID NO: 2692061 - RNA, 19 nt, Artificial Sequence
  Description of Artificial Sequence: Synthetic oligonucleotide
ggagugcagcagagagcga

SEQ ID NO: 2692062 - RNA, 19 nt, Artificial Sequence
  Description of Artificial Sequence: Synthetic oligonucleotide
cagcccgguuuaggaagaa

SEQ ID NO: 2692063 - RNA, 19 nt, Artificial Sequence
  Description of Artificial Sequence: Synthetic oligonucleotide
cgcucaaaggcagcaacgu

SEQ ID NO: 2692064 - RNA, 19 nt, Artificial Sequence
  Description of Artificial Sequence: Synthetic oligonucleotide
ccuuugucucaagucuggu

SEQ ID NO: 2692065 - RNA, 19 nt, Artificial Sequence
  Description of Artificial Sequence: Synthetic oligonucleotide
ggucgccagcugggagugc

SEQ ID NO: 2692066 - RNA, 19 nt, Artificial Sequence
  Description of Artificial Sequence: Synthetic oligonucleotide
gccagcaugcagcccgguu

SEQ ID NO: 2692067 - RNA, 19 nt, Artificial Sequence
  Description of Artificial Sequence: Synthetic oligonucleotide
ccuugaccaugugugguuu

SEQ ID NO: 2692068 - RNA, 19 nt, Artificial Sequence
  Description of Artificial Sequence: Synthetic oligonucleotide
cccuugcggcuggauacga

SEQ ID NO: 2692069 - RNA, 19 nt, Artificial Sequence
  Description of Artificial Sequence: Synthetic oligonucleotide
cggcgcucaaaggcagcaa

SEQ ID NO: 2692070 - RNA, 19 nt, Artificial Sequence
  Description of Artificial Sequence: Synthetic oligonucleotide
aaucugaaguucuucaguc

SEQ ID NO: 2692071 - RNA, 19 nt, Artificial Sequence
  Description of Artificial Sequence: Synthetic oligonucleotide
aaaaucucagaaauacccc

SEQ ID NO: 2692072 - RNA, 19 nt, Artificial Sequence
  Description of Artificial Sequence: Synthetic oligonucleotide
uuuggcuggaaucugaagu

SEQ ID NO: 2692073 - RNA, 19 nt, Artificial Sequence
  Description of Artificial Sequence: Synthetic oligonucleotide
aaaucucagaaauacccca

SEQ ID NO: 2692074 - RNA, 19 nt, Artificial Sequence
  Description of Artificial Sequence: Synthetic oligonucleotide
caugguggcgguuaaaucc

SEQ ID NO: 2692075 - RNA, 19 nt, Artificial Sequence
  Description of Artificial Sequence: Synthetic oligonucleotide
acagggaacauuuggcugg

SEQ ID NO: 2692076 - RNA, 19 nt, Artificial Sequence
  Description of Artificial Sequence: Synthetic oligonucleotide
aacagggaacauuuggcug

SEQ ID NO: 2692077 - RNA, 19 nt, Artificial Sequence
  Description of Artificial Sequence: Synthetic oligonucleotide
guuaaaucccugcucagcc

SEQ ID NO: 2692078 - RNA, 19 nt, Artificial Sequence
  Description of Artificial Sequence: Synthetic oligonucleotide
ucugaaguucuucagucgu

SEQ ID NO: 2692079 - RNA, 19 nt, Artificial Sequence
  Description of Artificial Sequence: Synthetic oligonucleotide
aaauaccccagguggcaac

SEQ ID NO: 2692080 - RNA, 19 nt, Artificial Sequence
  Description of Artificial Sequence: Synthetic oligonucleotide
ugcaauggguucuaggaga

SEQ ID NO: 2692081 - RNA, 19 nt, Artificial Sequence
  Description of Artificial Sequence: Synthetic oligonucleotide
uuaaaucccugcucagccg

SEQ ID NO: 2692082 - RNA, 19 nt, Artificial Sequence
  Description of Artificial Sequence: Synthetic oligonucleotide
uguaaguccuccuugucaa

SEQ ID NO: 2692083 - RNA, 19 nt, Artificial Sequence
  Description of Artificial Sequence: Synthetic oligonucleotide
uaaaucccugcucagccgc

SEQ ID NO: 2692084 - RNA, 19 nt, Artificial Sequence
  Description of Artificial Sequence: Synthetic oligonucleotide
uucucuuucgcuccgugcu

SEQ ID NO: 2692085 - RNA, 19 nt, Artificial Sequence
  Description of Artificial Sequence: Synthetic oligonucleotide
uggaaucugaaguucuuca

SEQ ID NO: 2692086 - RNA, 19 nt, Artificial Sequence
  Description of Artificial Sequence: Synthetic oligonucleotide
aauggguucuaggagaaaa

SEQ ID NO: 2692087 - RNA, 19 nt, Artificial Sequence
  Description of Artificial Sequence: Synthetic oligonucleotide
aucugaaguucuucagucg

SEQ ID NO: 2692088 - RNA, 19 nt, Artificial Sequence
  Description of Artificial Sequence: Synthetic oligonucleotide
caugcaauggguucuagga

SEQ ID NO: 2692089 - RNA, 19 nt, Artificial Sequence
  Description of Artificial Sequence: Synthetic oligonucleotide
aucucagaaauaccccagg

SEQ ID NO: 2692090 - RNA, 19 nt, Artificial Sequence
  Description of Artificial Sequence: Synthetic oligonucleotide
aaucucagaaauaccccag

SEQ ID NO: 2692091 - RNA, 19 nt, Artificial Sequence
  Description of Artificial Sequence: Synthetic oligonucleotide
uggcaaacacauuggaugu

SEQ ID NO: 2692092 - RNA, 19 nt, Artificial Sequence
  Description of Artificial Sequence: Synthetic oligonucleotide
ucucagaaauaccccaggu

SEQ ID NO: 2692093 - RNA, 19 nt, Artificial Sequence
  Description of Artificial Sequence: Synthetic oligonucleotide
auguaaguccuccuuguca

SEQ ID NO: 2692094 - RNA, 19 nt, Artificial Sequence
  Description of Artificial Sequence: Synthetic oligonucleotide
ggcaacagggaacauuugg

SEQ ID NO: 2692095 - RNA, 19 nt, Artificial Sequence
  Description of Artificial Sequence: Synthetic oligonucleotide
cucagaaauaccccaggug

SEQ ID NO: 2692096 - RNA, 19 nt, Artificial Sequence
  Description of Artificial Sequence: Synthetic oligonucleotide
augcaauggguucuaggag

SEQ ID NO: 2692097 - RNA, 19 nt, Artificial Sequence
  Description of Artificial Sequence: Synthetic oligonucleotide
gucauguaaguccuccuug

SEQ ID NO: 2692098 - RNA, 19 nt, Artificial Sequence
  Description of Artificial Sequence: Synthetic oligonucleotide
acaugguggcgguuaaauc

SEQ ID NO: 2692099 - RNA, 19 nt, Artificial Sequence
  Description of Artificial Sequence: Synthetic oligonucleotide
augguggcgguuaaauccc

SEQ ID NO: 2692100 - RNA, 19 nt, Artificial Sequence
  Description of Artificial Sequence: Synthetic oligonucleotide
gaaggucucuuugaacucc

SEQ ID NO: 2692101 - RNA, 19 nt, Artificial Sequence
  Description of Artificial Sequence: Synthetic oligonucleotide
aguggcuuccucgucaaag

SEQ ID NO: 2692102 - RNA, 19 nt, Artificial Sequence
  Description of Artificial Sequence: Synthetic oligonucleotide
aacauuuggcuggaaucug

SEQ ID NO: 2692103 - RNA, 19 nt, Artificial Sequence
  Description of Artificial Sequence: Synthetic oligonucleotide
ggaacauuuggcuggaauc

SEQ ID NO: 2692104 - RNA, 19 nt, Artificial Sequence
  Description of Artificial Sequence: Synthetic oligonucleotide
ugucauguaaguccuccuu

SEQ ID NO: 2692105 - RNA, 19 nt, Artificial Sequence
  Description of Artificial Sequence: Synthetic oligonucleotide
gauguugcgcgcugagggc

SEQ ID NO: 2692106 - RNA, 19 nt, Artificial Sequence
  Description of Artificial Sequence: Synthetic oligonucleotide
ggaaucugaaguucuucag

SEQ ID NO: 2692107 - RNA, 19 nt, Artificial Sequence
  Description of Artificial Sequence: Synthetic oligonucleotide
acauggcaaacacauugga

SEQ ID NO: 2692108 - RNA, 19 nt, Artificial Sequence
  Description of Artificial Sequence: Synthetic oligonucleotide
gaaucugaaguucuucagu

SEQ ID NO: 2692109 - RNA, 19 nt, Artificial Sequence
  Description of Artificial Sequence: Synthetic oligonucleotide
ggucucuuugaacuccugg

SEQ ID NO: 2692110 - RNA, 19 nt, Artificial Sequence
  Description of Artificial Sequence: Synthetic oligonucleotide
uuggcuggaaucugaaguu

SEQ ID NO: 2692111 - RNA, 19 nt, Artificial Sequence
  Description of Artificial Sequence: Synthetic oligonucleotide
ugaaggucucuuugaacuc

SEQ ID NO: 2692112 - RNA, 19 nt, Artificial Sequence
  Description of Artificial Sequence: Synthetic oligonucleotide
cauggcauccagguacucg

SEQ ID NO: 2692113 - RNA, 19 nt, Artificial Sequence
  Description of Artificial Sequence: Synthetic oligonucleotide
ucguccuucucuuucgcuc

SEQ ID NO: 2692114 - RNA, 19 nt, Artificial Sequence
  Description of Artificial Sequence: Synthetic oligonucleotide
cuucucuuucgcuccgugc

SEQ ID NO: 2692115 - RNA, 19 nt, Artificial Sequence
  Description of Artificial Sequence: Synthetic oligonucleotide
uaccccagguggcaacagg

SEQ ID NO: 2692116 - RNA, 19 nt, Artificial Sequence
  Description of Artificial Sequence: Synthetic oligonucleotide
ccagguacucgucaguugg

SEQ ID NO: 2692117 - RNA, 19 nt, Artificial Sequence
  Description of Artificial Sequence: Synthetic oligonucleotide
agaaauaccccagguggca

SEQ ID NO: 2692118 - RNA, 19 nt, Artificial Sequence
  Description of Artificial Sequence: Synthetic oligonucleotide
aauaccccagguggcaaca

SEQ ID NO: 2692119 - RNA, 19 nt, Artificial Sequence
  Description of Artificial Sequence: Synthetic oligonucleotide
gaacauuuggcuggaaucu

SEQ ID NO: 2692120 - RNA, 19 nt, Artificial Sequence
  Description of Artificial Sequence: Synthetic oligonucleotide
uggcuuccucgucaaagca

SEQ ID NO: 2692121 - RNA, 19 nt, Artificial Sequence
  Description of Artificial Sequence: Synthetic oligonucleotide
guggcgguuaaaucccugc

SEQ ID NO: 2692122 - RNA, 19 nt, Artificial Sequence
  Description of Artificial Sequence: Synthetic oligonucleotide
uuccccaucgaggcgagca

SEQ ID NO: 2692123 - RNA, 19 nt, Artificial Sequence
  Description of Artificial Sequence: Synthetic oligonucleotide
uccagguacucgucaguug

SEQ ID NO: 2692124 - RNA, 19 nt, Artificial Sequence
  Description of Artificial Sequence: Synthetic oligonucleotide
uggcgguuaaaucccugcu

SEQ ID NO: 2692125 - RNA, 19 nt, Artificial Sequence
  Description of Artificial Sequence: Synthetic oligonucleotide
auguugcgcgcugagggcg

SEQ ID NO: 2692126 - RNA, 19 nt, Artificial Sequence
  Description of Artificial Sequence: Synthetic oligonucleotide
aaucccugcucagccgcgg

SEQ ID NO: 2692127 - RNA, 19 nt, Artificial Sequence
  Description of Artificial Sequence: Synthetic oligonucleotide
uuuuccccaucgaggcgag

SEQ ID NO: 2692128 - RNA, 19 nt, Artificial Sequence
  Description of Artificial Sequence: Synthetic oligonucleotide
gcccuuuugcucgacaugg

SEQ ID NO: 2692129 - RNA, 19 nt, Artificial Sequence
  Description of Artificial Sequence: Synthetic oligonucleotide
augucauguaaguccuccu

SEQ ID NO: 2692130 - RNA, 19 nt, Artificial Sequence
  Description of Artificial Sequence: Synthetic oligonucleotide
gcaacagggaacauuuggc

SEQ ID NO: 2692131 - RNA, 19 nt, Artificial Sequence
  Description of Artificial Sequence: Synthetic oligonucleotide
cugaaguucuucagucguc

SEQ ID NO: 2692132 - RNA, 19 nt, Artificial Sequence
  Description of Artificial Sequence: Synthetic oligonucleotide
aaaucccugcucagccgcg

SEQ ID NO: 2692133 - RNA, 19 nt, Artificial Sequence
  Description of Artificial Sequence: Synthetic oligonucleotide
gcaugcaauggguucuagg

SEQ ID NO: 2692134 - RNA, 19 nt, Artificial Sequence
  Description of Artificial Sequence: Synthetic oligonucleotide
ugcucagccgcgggaaccg

SEQ ID NO: 2692135 - RNA, 19 nt, Artificial Sequence
  Description of Artificial Sequence: Synthetic oligonucleotide
uguugcgcgcugagggcgc

SEQ ID NO: 2692136 - RNA, 19 nt, Artificial Sequence
  Description of Artificial Sequence: Synthetic oligonucleotide
guacucgucaguuggauuu

SEQ ID NO: 2692137 - RNA, 19 nt, Artificial Sequence
  Description of Artificial Sequence: Synthetic oligonucleotide
gcgguuaaaucccugcuca

SEQ ID NO: 2692138 - RNA, 19 nt, Artificial Sequence
  Description of Artificial Sequence: Synthetic oligonucleotide
aaggucucuuugaacuccu

SEQ ID NO: 2692139 - RNA, 19 nt, Artificial Sequence
  Description of Artificial Sequence: Synthetic oligonucleotide
cuggaaucugaaguucuuc

SEQ ID NO: 2692140 - RNA, 19 nt, Artificial Sequence
  Description of Artificial Sequence: Synthetic oligonucleotide
uggcccuuuugcucgacau

SEQ ID NO: 2692141 - RNA, 19 nt, Artificial Sequence
  Description of Artificial Sequence: Synthetic oligonucleotide
acauuuggcuggaaucuga

SEQ ID NO: 2692142 - RNA, 19 nt, Artificial Sequence
  Description of Artificial Sequence: Synthetic oligonucleotide
aucgaggcgagcaugucau

SEQ ID NO: 2692143 - RNA, 19 nt, Artificial Sequence
  Description of Artificial Sequence: Synthetic oligonucleotide
uggcaacagggaacauuug

SEQ ID NO: 2692144 - RNA, 19 nt, Artificial Sequence
  Description of Artificial Sequence: Synthetic oligonucleotide
caacagggaacauuuggcu

SEQ ID NO: 2692145 - RNA, 19 nt, Artificial Sequence
  Description of Artificial Sequence: Synthetic oligonucleotide
uuggcccuuuugcucgaca

SEQ ID NO: 2692146 - RNA, 19 nt, Artificial Sequence
  Description of Artificial Sequence: Synthetic oligonucleotide
aggcgagcaugucauguaa

SEQ ID NO: 2692147 - RNA, 19 nt, Artificial Sequence
  Description of Artificial Sequence: Synthetic oligonucleotide
ucgacaugguggcgguuaa

SEQ ID NO: 2692148 - RNA, 19 nt, Artificial Sequence
  Description of Artificial Sequence: Synthetic oligonucleotide
caucgaggcgagcauguca

SEQ ID NO: 2692149 - RNA, 19 nt, Artificial Sequence
  Description of Artificial Sequence: Synthetic oligonucleotide
ucucuuucgcuccgugcuu

SEQ ID NO: 2692150 - RNA, 19 nt, Artificial Sequence
  Description of Artificial Sequence: Synthetic oligonucleotide
guccuucucuuucgcuccg

SEQ ID NO: 2692151 - RNA, 19 nt, Artificial Sequence
  Description of Artificial Sequence: Synthetic oligonucleotide
aucccugcucagccgcggg

SEQ ID NO: 2692152 - RNA, 19 nt, Artificial Sequence
  Description of Artificial Sequence: Synthetic oligonucleotide
cauuuggcuggaaucugaa

SEQ ID NO: 2692153 - RNA, 19 nt, Artificial Sequence
  Description of Artificial Sequence: Synthetic oligonucleotide
uggcuggaaucugaaguuc

SEQ ID NO: 2692154 - RNA, 19 nt, Artificial Sequence
  Description of Artificial Sequence: Synthetic oligonucleotide
gaaauaccccagguggcaa

SEQ ID NO: 2692155 - RNA, 19 nt, Artificial Sequence
  Description of Artificial Sequence: Synthetic oligonucleotide
ccagguggcaacagggaac

SEQ ID NO: 2692156 - RNA, 19 nt, Artificial Sequence
  Description of Artificial Sequence: Synthetic oligonucleotide
ggcgguuaaaucccugcuc

SEQ ID NO: 2692157 - RNA, 19 nt, Artificial Sequence
  Description of Artificial Sequence: Synthetic oligonucleotide
cauggcaaacacauuggau

SEQ ID NO: 2692158 - RNA, 19 nt, Artificial Sequence
  Description of Artificial Sequence: Synthetic oligonucleotide
ccuuuugcucgacauggug

SEQ ID NO: 2692159 - RNA, 19 nt, Artificial Sequence
  Description of Artificial Sequence: Synthetic oligonucleotide
gacaugguggcgguuaaau

SEQ ID NO: 2692160 - RNA, 19 nt, Artificial Sequence
  Description of Artificial Sequence: Synthetic oligonucleotide
cucagccgcgggaaccgag

SEQ ID NO: 2692161 - RNA, 19 nt, Artificial Sequence
  Description of Artificial Sequence: Synthetic oligonucleotide
gaggcgagcaugucaugua

SEQ ID NO: 2692162 - RNA, 19 nt, Artificial Sequence
  Description of Artificial Sequence: Synthetic oligonucleotide
ugguggcgguuaaaucccu

SEQ ID NO: 2692163 - RNA, 19 nt, Artificial Sequence
  Description of Artificial Sequence: Synthetic oligonucleotide
ucuuggcccuuuugcucga

SEQ ID NO: 2692164 - RNA, 19 nt, Artificial Sequence
  Description of Artificial Sequence: Synthetic oligonucleotide
cagguggcaacagggaaca

SEQ ID NO: 2692165 - RNA, 19 nt, Artificial Sequence
  Description of Artificial Sequence: Synthetic oligonucleotide
auccagguacucgucaguu

SEQ ID NO: 2692166 - RNA, 19 nt, Artificial Sequence
  Description of Artificial Sequence: Synthetic oligonucleotide
cugcucagccgcgggaacc

SEQ ID NO: 2692167 - RNA, 19 nt, Artificial Sequence
  Description of Artificial Sequence: Synthetic oligonucleotide
guggcaacagggaacauuu

SEQ ID NO: 2692168 - RNA, 19 nt, Artificial Sequence
  Description of Artificial Sequence: Synthetic oligonucleotide
uccccaucgaggcgagcau

SEQ ID NO: 2692169 - RNA, 19 nt, Artificial Sequence
  Description of Artificial Sequence: Synthetic oligonucleotide
agguacucgucaguuggau

SEQ ID NO: 2692170 - RNA, 19 nt, Artificial Sequence
  Description of Artificial Sequence: Synthetic oligonucleotide
ucgaggcgagcaugucaug

SEQ ID NO: 2692171 - RNA, 19 nt, Artificial Sequence
  Description of Artificial Sequence: Synthetic oligonucleotide
cguccuucucuuucgcucc

SEQ ID NO: 2692172 - RNA, 19 nt, Artificial Sequence
  Description of Artificial Sequence: Synthetic oligonucleotide
auaccccagguggcaacag

SEQ ID NO: 2692173 - RNA, 19 nt, Artificial Sequence
  Description of Artificial Sequence: Synthetic oligonucleotide
ggcauccagguacucguca

SEQ ID NO: 2692174 - RNA, 19 nt, Artificial Sequence
  Description of Artificial Sequence: Synthetic oligonucleotide
ggcccuuuugcucgacaug

SEQ ID NO: 2692175 - RNA, 19 nt, Artificial Sequence
  Description of Artificial Sequence: Synthetic oligonucleotide
uacucgucaguuggauuuu

SEQ ID NO: 2692176 - RNA, 19 nt, Artificial Sequence
  Description of Artificial Sequence: Synthetic oligonucleotide
ggcgagcaugucauguaag

SEQ ID NO: 2692177 - RNA, 19 nt, Artificial Sequence
  Description of Artificial Sequence: Synthetic oligonucleotide
cagguacucgucaguugga

SEQ ID NO: 2692178 - RNA, 19 nt, Artificial Sequence
  Description of Artificial Sequence: Synthetic oligonucleotide
uccuucucuuucgcuccgu

SEQ ID NO: 2692179 - RNA, 19 nt, Artificial Sequence
  Description of Artificial Sequence: Synthetic oligonucleotide
gcgagcaugucauguaagu

SEQ ID NO: 2692180 - RNA, 19 nt, Artificial Sequence
  Description of Artificial Sequence: Synthetic oligonucleotide
gggaacauuuggcuggaau

SEQ ID NO: 2692181 - RNA, 19 nt, Artificial Sequence
  Description of Artificial Sequence: Synthetic oligonucleotide
ucauggcauccagguacuc

SEQ ID NO: 2692182 - RNA, 19 nt, Artificial Sequence
  Description of Artificial Sequence: Synthetic oligonucleotide
gcaauggguucuaggagaa

SEQ ID NO: 2692183 - RNA, 19 nt, Artificial Sequence
  Description of Artificial Sequence: Synthetic oligonucleotide
ugcgcgcugagggcgcuuc

SEQ ID NO: 2692184 - RNA, 19 nt, Artificial Sequence
  Description of Artificial Sequence: Synthetic oligonucleotide
aggucucuuugaacuccug

SEQ ID NO: 2692185 - RNA, 19 nt, Artificial Sequence
  Description of Artificial Sequence: Synthetic oligonucleotide
ccuucucuuucgcuccgug

SEQ ID NO: 2692186 - RNA, 19 nt, Artificial Sequence
  Description of Artificial Sequence: Synthetic oligonucleotide
uggugccaguggcuuccuc

SEQ ID NO: 2692187 - RNA, 19 nt, Artificial Sequence
  Description of Artificial Sequence: Synthetic oligonucleotide
gguggcgguuaaaucccug

SEQ ID NO: 2692188 - RNA, 19 nt, Artificial Sequence
  Description of Artificial Sequence: Synthetic oligonucleotide
uuuccccaucgaggcgagc

SEQ ID NO: 2692189 - RNA, 19 nt, Artificial Sequence
  Description of Artificial Sequence: Synthetic oligonucleotide
cgguuaaaucccugcucag

SEQ ID NO: 2692190 - RNA, 19 nt, Artificial Sequence
  Description of Artificial Sequence: Synthetic oligonucleotide
cgagcaugucauguaaguc

SEQ ID NO: 2692191 - RNA, 19 nt, Artificial Sequence
  Description of Artificial Sequence: Synthetic oligonucleotide
cagggaacauuuggcugga

SEQ ID NO: 2692192 - RNA, 19 nt, Artificial Sequence
  Description of Artificial Sequence: Synthetic oligonucleotide
guaaguccuccuugucaau

SEQ ID NO: 2692193 - RNA, 19 nt, Artificial Sequence
  Description of Artificial Sequence: Synthetic oligonucleotide
ggcaugcaauggguucuag

SEQ ID NO: 2692194 - RNA, 19 nt, Artificial Sequence
  Description of Artificial Sequence: Synthetic oligonucleotide
cuuggcccuuuugcucgac

SEQ ID NO: 2692195 - RNA, 19 nt, Artificial Sequence
  Description of Artificial Sequence: Synthetic oligonucleotide
ggcuggaaucugaaguucu

SEQ ID NO: 2692196 - RNA, 19 nt, Artificial Sequence
  Description of Artificial Sequence: Synthetic oligonucleotide
gguacucgucaguuggauu

SEQ ID NO: 2692197 - RNA, 19 nt, Artificial Sequence
  Description of Artificial Sequence: Synthetic oligonucleotide
gguggcaacagggaacauu

SEQ ID NO: 2692198 - RNA, 19 nt, Artificial Sequence
  Description of Artificial Sequence: Synthetic oligonucleotide
caauggguucuaggagaaa

SEQ ID NO: 2692199 - RNA, 19 nt, Artificial Sequence
  Description of Artificial Sequence: Synthetic oligonucleotide
cccagguggcaacagggaa

SEQ ID NO: 2692200 - RNA, 19 nt, Artificial Sequence
  Description of Artificial Sequence: Synthetic oligonucleotide
auggugccaguggcuuccu

SEQ ID NO: 2692201 - RNA, 19 nt, Artificial Sequence
  Description of Artificial Sequence: Synthetic oligonucleotide
ccugcucagccgcgggaac

SEQ ID NO: 2692202 - RNA, 19 nt, Artificial Sequence
  Description of Artificial Sequence: Synthetic oligonucleotide
agggaacauuuggcuggaa

SEQ ID NO: 2692203 - RNA, 19 nt, Artificial Sequence
  Description of Artificial Sequence: Synthetic oligonucleotide
ccccagguggcaacaggga

SEQ ID NO: 2692204 - RNA, 19 nt, Artificial Sequence
  Description of Artificial Sequence: Synthetic oligonucleotide
ccccaucgaggcgagcaug

SEQ ID NO: 2692205 - RNA, 19 nt, Artificial Sequence
  Description of Artificial Sequence: Synthetic oligonucleotide
cccaucgaggcgagcaugu

SEQ ID NO: 2692206 - RNA, 19 nt, Artificial Sequence
  Description of Artificial Sequence: Synthetic oligonucleotide
agguggcaacagggaacau

SEQ ID NO: 2692207 - RNA, 19 nt, Artificial Sequence
  Description of Artificial Sequence: Synthetic oligonucleotide
gcuggaaucugaaguucuu

SEQ ID NO: 2692208 - RNA, 19 nt, Artificial Sequence
  Description of Artificial Sequence: Synthetic oligonucleotide
caguggcuuccucgucaaa

SEQ ID NO: 2692209 - RNA, 19 nt, Artificial Sequence
  Description of Artificial Sequence: Synthetic oligonucleotide
ccaucgaggcgagcauguc

SEQ ID NO: 2692210 - RNA, 19 nt, Artificial Sequence
  Description of Artificial Sequence: Synthetic oligonucleotide
uugcgcgcugagggcgcuu

SEQ ID NO: 2692211 - RNA, 19 nt, Artificial Sequence
  Description of Artificial Sequence: Synthetic oligonucleotide
gggcaugcaauggguucua

SEQ ID NO: 2692212 - RNA, 19 nt, Artificial Sequence
  Description of Artificial Sequence: Synthetic oligonucleotide
guugcgcgcugagggcgcu

SEQ ID NO: 2692213 - RNA, 19 nt, Artificial Sequence
  Description of Artificial Sequence: Synthetic oligonucleotide
cgaggcgagcaugucaugu

SEQ ID NO: 2692214 - RNA, 19 nt, Artificial Sequence
  Description of Artificial Sequence: Synthetic oligonucleotide
gcucagccgcgggaaccga

SEQ ID NO: 2692215 - RNA, 19 nt, Artificial Sequence
  Description of Artificial Sequence: Synthetic oligonucleotide
gcgcgcugagggcgcuucu

SEQ ID NO: 2692216 - RNA, 19 nt, Artificial Sequence
  Description of Artificial Sequence: Synthetic oligonucleotide
cgcgcugagggcgcuucuu

SEQ ID NO: 2692217 - RNA, 19 nt, Artificial Sequence
  Description of Artificial Sequence: Synthetic oligonucleotide
ucuacagacauccucuucc

SEQ ID NO: 2692218 - RNA, 19 nt, Artificial Sequence
  Description of Artificial Sequence: Synthetic oligonucleotide
uuaucuacagacauccucu

SEQ ID NO: 2692219 - RNA, 19 nt, Artificial Sequence
  Description of Artificial Sequence: Synthetic oligonucleotide
uuuaucuacagacauccuc

SEQ ID NO: 2692220 - RNA, 19 nt, Artificial Sequence
  Description of Artificial Sequence: Synthetic oligonucleotide
acagacauccucuuccgcg

SEQ ID NO: 2692221 - RNA, 19 nt, Artificial Sequence
  Description of Artificial Sequence: Synthetic oligonucleotide
uucuugggcaugaagaagu

SEQ ID NO: 2692222 - RNA, 19 nt, Artificial Sequence
  Description of Artificial Sequence: Synthetic oligonucleotide
ucagcaucugcucguggcg

SEQ ID NO: 2692223 - RNA, 19 nt, Artificial Sequence
  Description of Artificial Sequence: Synthetic oligonucleotide
uguucuugggcaugaagaa

SEQ ID NO: 2692224 - RNA, 19 nt, Artificial Sequence
  Description of Artificial Sequence: Synthetic oligonucleotide
guggcggggagucacaggg

SEQ ID NO: 2692225 - RNA, 19 nt, Artificial Sequence
  Description of Artificial Sequence: Synthetic oligonucleotide
cuacagacauccucuuccg

SEQ ID NO: 2692226 - RNA, 19 nt, Artificial Sequence
  Description of Artificial Sequence: Synthetic oligonucleotide
cagacauccucuuccgcgg

SEQ ID NO: 2692227 - RNA, 19 nt, Artificial Sequence
  Description of Artificial Sequence: Synthetic oligonucleotide
aucuacagacauccucuuc

SEQ ID NO: 2692228 - RNA, 19 nt, Artificial Sequence
  Description of Artificial Sequence: Synthetic oligonucleotide
cauguucuugggcaugaag

SEQ ID NO: 2692229 - RNA, 19 nt, Artificial Sequence
  Description of Artificial Sequence: Synthetic oligonucleotide
uuuuaucuacagacauccu

SEQ ID NO: 2692230 - RNA, 19 nt, Artificial Sequence
  Description of Artificial Sequence: Synthetic oligonucleotide
ucuugggcaugaagaagug

SEQ ID NO: 2692231 - RNA, 19 nt, Artificial Sequence
  Description of Artificial Sequence: Synthetic oligonucleotide
uacagacauccucuuccgc

SEQ ID NO: 2692232 - RNA, 19 nt, Artificial Sequence
  Description of Artificial Sequence: Synthetic oligonucleotide
agcaucugcucguggcggg

SEQ ID NO: 2692233 - RNA, 19 nt, Artificial Sequence
  Description of Artificial Sequence: Synthetic oligonucleotide
cuugggcaugaagaagugg

SEQ ID NO: 2692234 - RNA, 19 nt, Artificial Sequence
  Description of Artificial Sequence: Synthetic oligonucleotide
gccaucauguucuugggca

SEQ ID NO: 2692235 - RNA, 19 nt, Artificial Sequence
  Description of Artificial Sequence: Synthetic oligonucleotide
acauccucuuccgcggugg

SEQ ID NO: 2692236 - RNA, 19 nt, Artificial Sequence
  Description of Artificial Sequence: Synthetic oligonucleotide
cagggcagccaucauguuc

SEQ ID NO: 2692237 - RNA, 19 nt, Artificial Sequence
  Description of Artificial Sequence: Synthetic oligonucleotide
uaucuacagacauccucuu

SEQ ID NO: 2692238 - RNA, 19 nt, Artificial Sequence
  Description of Artificial Sequence: Synthetic oligonucleotide
aucauguucuugggcauga

SEQ ID NO: 2692239 - RNA, 19 nt, Artificial Sequence
  Description of Artificial Sequence: Synthetic oligonucleotide
gacauccucuuccgcggug

SEQ ID NO: 2692240 - RNA, 19 nt, Artificial Sequence
  Description of Artificial Sequence: Synthetic oligonucleotide
caucauguucuugggcaug

SEQ ID NO: 2692241 - RNA, 19 nt, Artificial Sequence
  Description of Artificial Sequence: Synthetic oligonucleotide
aucugcucguggcggggag

SEQ ID NO: 2692242 - RNA, 19 nt, Artificial Sequence
  Description of Artificial Sequence: Synthetic oligonucleotide
agacauccucuuccgcggu

SEQ ID NO: 2692243 - RNA, 19 nt, Artificial Sequence
  Description of Artificial Sequence: Synthetic oligonucleotide
uggcggggagucacagggc

SEQ ID NO: 2692244 - RNA, 19 nt, Artificial Sequence
  Description of Artificial Sequence: Synthetic oligonucleotide
ucguggcggggagucacag

SEQ ID NO: 2692245 - RNA, 19 nt, Artificial Sequence
  Description of Artificial Sequence: Synthetic oligonucleotide
cauccucuuccgcgguggc

SEQ ID NO: 2692246 - RNA, 19 nt, Artificial Sequence
  Description of Artificial Sequence: Synthetic oligonucleotide
ucauguucuugggcaugaa

SEQ ID NO: 2692247 - RNA, 19 nt, Artificial Sequence
  Description of Artificial Sequence: Synthetic oligonucleotide
ggcggggagucacagggca

SEQ ID NO: 2692248 - RNA, 19 nt, Artificial Sequence
  Description of Artificial Sequence: Synthetic oligonucleotide
ucugcucguggcggggagu

SEQ ID NO: 2692249 - RNA, 19 nt, Artificial Sequence
  Description of Artificial Sequence: Synthetic oligonucleotide
cugcucguggcggggaguc

SEQ ID NO: 2692250 - RNA, 19 nt, Artificial Sequence
  Description of Artificial Sequence: Synthetic oligonucleotide
gcaucugcucguggcgggg

SEQ ID NO: 2692251 - RNA, 19 nt, Artificial Sequence
  Description of Artificial Sequence: Synthetic oligonucleotide
gagucacagggcagccauc

SEQ ID NO: 2692252 - RNA, 19 nt, Artificial Sequence
  Description of Artificial Sequence: Synthetic oligonucleotide
acagggcagccaucauguu

SEQ ID NO: 2692253 - RNA, 19 nt, Artificial Sequence
  Description of Artificial Sequence: Synthetic oligonucleotide
ugcucguggcggggaguca

SEQ ID NO: 2692254 - RNA, 19 nt, Artificial Sequence
  Description of Artificial Sequence: Synthetic oligonucleotide
cucguggcggggagucaca

SEQ ID NO: 2692255 - RNA, 19 nt, Artificial Sequence
  Description of Artificial Sequence: Synthetic oligonucleotide
gcucguggcggggagucac

SEQ ID NO: 2692256 - RNA, 19 nt, Artificial Sequence
  Description of Artificial Sequence: Synthetic oligonucleotide
caucugcucguggcgggga

SEQ ID NO: 2692257 - RNA, 19 nt, Artificial Sequence
  Description of Artificial Sequence: Synthetic oligonucleotide
cggggagucacagggcagc

SEQ ID NO: 2692258 - RNA, 19 nt, Artificial Sequence
  Description of Artificial Sequence: Synthetic oligonucleotide
cguggcggggagucacagg

SEQ ID NO: 2692259 - RNA, 19 nt, Artificial Sequence
  Description of Artificial Sequence: Synthetic oligonucleotide
gcggggagucacagggcag

SEQ ID NO: 2692260 - RNA, 19 nt, Artificial Sequence
  Description of Artificial Sequence: Synthetic oligonucleotide
gggagucacagggcagcca

SEQ ID NO: 2692261 - RNA, 19 nt, Artificial Sequence
  Description of Artificial Sequence: Synthetic oligonucleotide
gucacagggcagccaucau

SEQ ID NO: 2692262 - RNA, 19 nt, Artificial Sequence
  Description of Artificial Sequence: Synthetic oligonucleotide
ccaucauguucuugggcau

SEQ ID NO: 2692263 - RNA, 19 nt, Artificial Sequence
  Description of Artificial Sequence: Synthetic oligonucleotide
uuuaauaucaacaaugaca

SEQ ID NO: 2692264 - RNA, 19 nt, Artificial Sequence
  Description of Artificial Sequence: Synthetic oligonucleotide
uuaauaucaacaaugacac

SEQ ID NO: 2692265 - RNA, 19 nt, Artificial Sequence
  Description of Artificial Sequence: Synthetic oligonucleotide
ucuucgaucucauugacgg

SEQ ID NO: 2692266 - RNA, 19 nt, Artificial Sequence
  Description of Artificial Sequence: Synthetic oligonucleotide
ucuacuaccaggaaauuag

SEQ ID NO: 2692267 - RNA, 19 nt, Artificial Sequence
  Description of Artificial Sequence: Synthetic oligonucleotide
aacaaugacacuguguaac

SEQ ID NO: 2692268 - RNA, 19 nt, Artificial Sequence
  Description of Artificial Sequence: Synthetic oligonucleotide
aagacuucaaacuuaaaua

SEQ ID NO: 2692269 - RNA, 19 nt, Artificial Sequence
  Description of Artificial Sequence: Synthetic oligonucleotide
agacuucaaacuuaaauag

SEQ ID NO: 2692270 - RNA, 19 nt, Artificial Sequence
  Description of Artificial Sequence: Synthetic oligonucleotide
ucuuuaauaucaacaauga

SEQ ID NO: 2692271 - RNA, 19 nt, Artificial Sequence
  Description of Artificial Sequence: Synthetic oligonucleotide
ucaacaaugacacugugua

SEQ ID NO: 2692272 - RNA, 19 nt, Artificial Sequence
  Description of Artificial Sequence: Synthetic oligonucleotide
agugaaaagaaagggaggg

SEQ ID NO: 2692273 - RNA, 19 nt, Artificial Sequence
  Description of Artificial Sequence: Synthetic oligonucleotide
agugucuucgaucucauug

SEQ ID NO: 2692274 - RNA, 19 nt, Artificial Sequence
  Description of Artificial Sequence: Synthetic oligonucleotide
accgcgaucaguuuacccc

SEQ ID NO: 2692275 - RNA, 19 nt, Artificial Sequence
  Description of Artificial Sequence: Synthetic oligonucleotide
aaacuuaaauagaggaugg

SEQ ID NO: 2692276 - RNA, 19 nt, Artificial Sequence
  Description of Artificial Sequence: Synthetic oligonucleotide
agaauauucuuuaauauca

SEQ ID NO: 2692277 - RNA, 19 nt, Artificial Sequence
  Description of Artificial Sequence: Synthetic oligonucleotide
uuagcagccacucagugaa

SEQ ID NO: 2692278 - RNA, 19 nt, Artificial Sequence
  Description of Artificial Sequence: Synthetic oligonucleotide
cuuucuuucccuaaccagc

SEQ ID NO: 2692279 - RNA, 19 nt, Artificial Sequence
  Description of Artificial Sequence: Synthetic oligonucleotide
acuuaaauagaggauggcg

SEQ ID NO: 2692280 - RNA, 19 nt, Artificial Sequence
  Description of Artificial Sequence: Synthetic oligonucleotide
caaacuuaaauagaggaug

SEQ ID NO: 2692281 - RNA, 19 nt, Artificial Sequence
  Description of Artificial Sequence: Synthetic oligonucleotide
ugaaaagaaagggaggggc

SEQ ID NO: 2692282 - RNA, 19 nt, Artificial Sequence
  Description of Artificial Sequence: Synthetic oligonucleotide
ucuccaaucaccgcgauca

SEQ ID NO: 2692283 - RNA, 19 nt, Artificial Sequence
  Description of Artificial Sequence: Synthetic oligonucleotide
aucucaacagcagagcccc

SEQ ID NO: 2692284 - RNA, 19 nt, Artificial Sequence
  Description of Artificial Sequence: Synthetic oligonucleotide
uacuaccaggaaauuaggg

SEQ ID NO: 2692285 - RNA, 19 nt, Artificial Sequence
  Description of Artificial Sequence: Synthetic oligonucleotide
uuaagcuccccuaugccgc

SEQ ID NO: 2692286 - RNA, 19 nt, Artificial Sequence
  Description of Artificial Sequence: Synthetic oligonucleotide
aacuuaaauagaggauggc

SEQ ID NO: 2692287 - RNA, 19 nt, Artificial Sequence
  Description of Artificial Sequence: Synthetic oligonucleotide
uucucuacuaccaggaaau

SEQ ID NO: 2692288 - RNA, 19 nt, Artificial Sequence
  Description of Artificial Sequence: Synthetic oligonucleotide
acuaccaggaaauuagggu

SEQ ID NO: 2692289 - RNA, 19 nt, Artificial Sequence
  Description of Artificial Sequence: Synthetic oligonucleotide
agagaauauucuuuaauau

SEQ ID NO: 2692290 - RNA, 19 nt, Artificial Sequence
  Description of Artificial Sequence: Synthetic oligonucleotide
cuaccaggaaauuagggug

SEQ ID NO: 2692291 - RNA, 19 nt, Artificial Sequence
  Description of Artificial Sequence: Synthetic oligonucleotide
ucaaacuuaaauagaggau

SEQ ID NO: 2692292 - RNA, 19 nt, Artificial Sequence
  Description of Artificial Sequence: Synthetic oligonucleotide
augagaaugaugccaaugu

SEQ ID NO: 2692293 - RNA, 19 nt, Artificial Sequence
  Description of Artificial Sequence: Synthetic oligonucleotide
ucuucggcggugaacaugc

SEQ ID NO: 2692294 - RNA, 19 nt, Artificial Sequence
  Description of Artificial Sequence: Synthetic oligonucleotide
cuuaaauagaggauggcga

SEQ ID NO: 2692295 - RNA, 19 nt, Artificial Sequence
  Description of Artificial Sequence: Synthetic oligonucleotide
guuaagcuccccuaugccg

SEQ ID NO: 2692296 - RNA, 19 nt, Artificial Sequence
  Description of Artificial Sequence: Synthetic oligonucleotide
uauggaugcuccuuggaug

SEQ ID NO: 2692297 - RNA, 19 nt, Artificial Sequence
  Description of Artificial Sequence: Synthetic oligonucleotide
uaccaggaaauuagggugg

SEQ ID NO: 2692298 - RNA, 19 nt, Artificial Sequence
  Description of Artificial Sequence: Synthetic oligonucleotide
aguggagagagaugguugg

SEQ ID NO: 2692299 - RNA, 19 nt, Artificial Sequence
  Description of Artificial Sequence: Synthetic oligonucleotide
agguaguggagagagaugg

SEQ ID NO: 2692300 - RNA, 19 nt, Artificial Sequence
  Description of Artificial Sequence: Synthetic oligonucleotide
uguaacagcacagggagga

SEQ ID NO: 2692301 - RNA, 19 nt, Artificial Sequence
  Description of Artificial Sequence: Synthetic oligonucleotide
uuaaauagaggauggcgaa

SEQ ID NO: 2692302 - RNA, 19 nt, Artificial Sequence
  Description of Artificial Sequence: Synthetic oligonucleotide
acucagugaaaagaaaggg

SEQ ID NO: 2692303 - RNA, 19 nt, Artificial Sequence
  Description of Artificial Sequence: Synthetic oligonucleotide
auggaugcuccuuggaugg

SEQ ID NO: 2692304 - RNA, 19 nt, Artificial Sequence
  Description of Artificial Sequence: Synthetic oligonucleotide
gaucaguuuaccccggccc

SEQ ID NO: 2692305 - RNA, 19 nt, Artificial Sequence
  Description of Artificial Sequence: Synthetic oligonucleotide
ucugcaauguacugguuga

SEQ ID NO: 2692306 - RNA, 19 nt, Artificial Sequence
  Description of Artificial Sequence: Synthetic oligonucleotide
gagagaauauucuuuaaua

SEQ ID NO: 2692307 - RNA, 19 nt, Artificial Sequence
  Description of Artificial Sequence: Synthetic oligonucleotide
aggauggcgaaacugggag

SEQ ID NO: 2692308 - RNA, 19 nt, Artificial Sequence
  Description of Artificial Sequence: Synthetic oligonucleotide
uccucgucuccaaucaccg

SEQ ID NO: 2692309 - RNA, 19 nt, Artificial Sequence
  Description of Artificial Sequence: Synthetic oligonucleotide
aaaagaaagggaggggcug

SEQ ID NO: 2692310 - RNA, 19 nt, Artificial Sequence
  Description of Artificial Sequence: Synthetic oligonucleotide
gaugguugggcuuucuuuc

SEQ ID NO: 2692311 - RNA, 19 nt, Artificial Sequence
  Description of Artificial Sequence: Synthetic oligonucleotide
uguuaagcuccccuaugcc

SEQ ID NO: 2692312 - RNA, 19 nt, Artificial Sequence
  Description of Artificial Sequence: Synthetic oligonucleotide
aauguacugguugaugaga

SEQ ID NO: 2692313 - RNA, 19 nt, Artificial Sequence
  Description of Artificial Sequence: Synthetic oligonucleotide
aucaguuuaccccggcccg

SEQ ID NO: 2692314 - RNA, 19 nt, Artificial Sequence
  Description of Artificial Sequence: Synthetic oligonucleotide
cuuuaauaucaacaaugac

SEQ ID NO: 2692315 - RNA, 19 nt, Artificial Sequence
  Description of Artificial Sequence: Synthetic oligonucleotide
ucuuucccuaaccagccug

SEQ ID NO: 2692316 - RNA, 19 nt, Artificial Sequence
  Description of Artificial Sequence: Synthetic oligonucleotide
gauggcgaaacugggagag

SEQ ID NO: 2692317 - RNA, 19 nt, Artificial Sequence
  Description of Artificial Sequence: Synthetic oligonucleotide
uucgaucucauugacggug

SEQ ID NO: 2692318 - RNA, 19 nt, Artificial Sequence
  Description of Artificial Sequence: Synthetic oligonucleotide
uaguggagagagaugguug

SEQ ID NO: 2692319 - RNA, 19 nt, Artificial Sequence
  Description of Artificial Sequence: Synthetic oligonucleotide
uccuucucuacuaccagga

SEQ ID NO: 2692320 - RNA, 19 nt, Artificial Sequence
  Description of Artificial Sequence: Synthetic oligonucleotide
cagugaaaagaaagggagg

SEQ ID NO: 2692321 - RNA, 19 nt, Artificial Sequence
  Description of Artificial Sequence: Synthetic oligonucleotide
gaggagguaguggagagag

SEQ ID NO: 2692322 - RNA, 19 nt, Artificial Sequence
  Description of Artificial Sequence: Synthetic oligonucleotide
ucgaucucauugacggugg

SEQ ID NO: 2692323 - RNA, 19 nt, Artificial Sequence
  Description of Artificial Sequence: Synthetic oligonucleotide
ucccuaaccagccuggauc

SEQ ID NO: 2692324 - RNA, 19 nt, Artificial Sequence
  Description of Artificial Sequence: Synthetic oligonucleotide
gagaaugaugccaauguca

SEQ ID NO: 2692325 - RNA, 19 nt, Artificial Sequence
  Description of Artificial Sequence: Synthetic oligonucleotide
uauccuucucuacuaccag

SEQ ID NO: 2692326 - RNA, 19 nt, Artificial Sequence
  Description of Artificial Sequence: Synthetic oligonucleotide
gaugagaaugaugccaaug

SEQ ID NO: 2692327 - RNA, 19 nt, Artificial Sequence
  Description of Artificial Sequence: Synthetic oligonucleotide
augguugggcuuucuuucc

SEQ ID NO: 2692328 - RNA, 19 nt, Artificial Sequence
  Description of Artificial Sequence: Synthetic oligonucleotide
ucugucggcagaacggagc

SEQ ID NO: 2692329 - RNA, 19 nt, Artificial Sequence
  Description of Artificial Sequence: Synthetic oligonucleotide
caggaaauuaggguggcgg

SEQ ID NO: 2692330 - RNA, 19 nt, Artificial Sequence
  Description of Artificial Sequence: Synthetic oligonucleotide
cuggaucucaacagcagag

SEQ ID NO: 2692331 - RNA, 19 nt, Artificial Sequence
  Description of Artificial Sequence: Synthetic oligonucleotide
aauagaggauggcgaaacu

SEQ ID NO: 2692332 - RNA, 19 nt, Artificial Sequence
  Description of Artificial Sequence: Synthetic oligonucleotide
ugagaaugaugccaauguc

SEQ ID NO: 2692333 - RNA, 19 nt, Artificial Sequence
  Description of Artificial Sequence: Synthetic oligonucleotide
gaaacugccugaaaguguc

SEQ ID NO: 2692334 - RNA, 19 nt, Artificial Sequence
  Description of Artificial Sequence: Synthetic oligonucleotide
gaggaaacccgucaccgug

SEQ ID NO: 2692335 - RNA, 19 nt, Artificial Sequence
  Description of Artificial Sequence: Synthetic oligonucleotide
ucggcggugaacaugcccu

SEQ ID NO: 2692336 - RNA, 19 nt, Artificial Sequence
  Description of Artificial Sequence: Synthetic oligonucleotide
aacggagcgcuuccccagc

SEQ ID NO: 2692337 - RNA, 19 nt, Artificial Sequence
  Description of Artificial Sequence: Synthetic oligonucleotide
cuuucccuaaccagccugg

SEQ ID NO: 2692338 - RNA, 19 nt, Artificial Sequence
  Description of Artificial Sequence: Synthetic oligonucleotide
guacugguugaugagaaug

SEQ ID NO: 2692339 - RNA, 19 nt, Artificial Sequence
  Description of Artificial Sequence: Synthetic oligonucleotide
uggcgaaacugggagaggg

SEQ ID NO: 2692340 - RNA, 19 nt, Artificial Sequence
  Description of Artificial Sequence: Synthetic oligonucleotide
aggggcuggaaaccaagac

SEQ ID NO: 2692341 - RNA, 19 nt, Artificial Sequence
  Description of Artificial Sequence: Synthetic oligonucleotide
cucagugaaaagaaaggga

SEQ ID NO: 2692342 - RNA, 19 nt, Artificial Sequence
  Description of Artificial Sequence: Synthetic oligonucleotide
ucuuguuaagcuccccuau

SEQ ID NO: 2692343 - RNA, 19 nt, Artificial Sequence
  Description of Artificial Sequence: Synthetic oligonucleotide
cuacuaccaggaaauuagg

SEQ ID NO: 2692344 - RNA, 19 nt, Artificial Sequence
  Description of Artificial Sequence: Synthetic oligonucleotide
augaugccaaugucauccc

SEQ ID NO: 2692345 - RNA, 19 nt, Artificial Sequence
  Description of Artificial Sequence: Synthetic oligonucleotide
uaucaacaaugacacugug

SEQ ID NO: 2692346 - RNA, 19 nt, Artificial Sequence
  Description of Artificial Sequence: Synthetic oligonucleotide
aggaggaaacccgucaccg

SEQ ID NO: 2692347 - RNA, 19 nt, Artificial Sequence
  Description of Artificial Sequence: Synthetic oligonucleotide
aucguauggaugcuccuug

SEQ ID NO: 2692348 - RNA, 19 nt, Artificial Sequence
  Description of Artificial Sequence: Synthetic oligonucleotide
acaaugacacuguguaaca

SEQ ID NO: 2692349 - RNA, 19 nt, Artificial Sequence
  Description of Artificial Sequence: Synthetic oligonucleotide
caauguacugguugaugag

SEQ ID NO: 2692350 - RNA, 19 nt, Artificial Sequence
  Description of Artificial Sequence: Synthetic oligonucleotide
uaacagcacagggaggagg

SEQ ID NO: 2692351 - RNA, 19 nt, Artificial Sequence
  Description of Artificial Sequence: Synthetic oligonucleotide
auagaggauggcgaaacug

SEQ ID NO: 2692352 - RNA, 19 nt, Artificial Sequence
  Description of Artificial Sequence: Synthetic oligonucleotide
gaucucaacagcagagccc

SEQ ID NO: 2692353 - RNA, 19 nt, Artificial Sequence
  Description of Artificial Sequence: Synthetic oligonucleotide
cucauugacggugguaucc

SEQ ID NO: 2692354 - RNA, 19 nt, Artificial Sequence
  Description of Artificial Sequence: Synthetic oligonucleotide
cagcuuagcagccacucag

SEQ ID NO: 2692355 - RNA, 19 nt, Artificial Sequence
  Description of Artificial Sequence: Synthetic oligonucleotide
aaucaccgcgaucaguuua

SEQ ID NO: 2692356 - RNA, 19 nt, Artificial Sequence
  Description of Artificial Sequence: Synthetic oligonucleotide
ucaagggcaugccggacca

SEQ ID NO: 2692357 - RNA, 19 nt, Artificial Sequence
  Description of Artificial Sequence: Synthetic oligonucleotide
gucaucccuguucagaaac

SEQ ID NO: 2692358 - RNA, 19 nt, Artificial Sequence
  Description of Artificial Sequence: Synthetic oligonucleotide
acugccugaaagugucuuc

SEQ ID NO: 2692359 - RNA, 19 nt, Artificial Sequence
  Description of Artificial Sequence: Synthetic oligonucleotide
cuagcgcaggucuucggcg

SEQ ID NO: 2692360 - RNA, 19 nt, Artificial Sequence
  Description of Artificial Sequence: Synthetic oligonucleotide
ucguauggaugcuccuugg

SEQ ID NO: 2692361 - RNA, 19 nt, Artificial Sequence
  Description of Artificial Sequence: Synthetic oligonucleotide
aucucauugacggugguau

SEQ ID NO: 2692362 - RNA, 19 nt, Artificial Sequence
  Description of Artificial Sequence: Synthetic oligonucleotide
cugguugaugagaaugaug

SEQ ID NO: 2692363 - RNA, 19 nt, Artificial Sequence
  Description of Artificial Sequence: Synthetic oligonucleotide
uggaaaccaagacuucaaa

SEQ ID NO: 2692364 - RNA, 19 nt, Artificial Sequence
  Description of Artificial Sequence: Synthetic oligonucleotide
cuuguuaagcuccccuaug

SEQ ID NO: 2692365 - RNA, 19 nt, Artificial Sequence
  Description of Artificial Sequence: Synthetic oligonucleotide
uugacggugguauccuucu

SEQ ID NO: 2692366 - RNA, 19 nt, Artificial Sequence
  Description of Artificial Sequence: Synthetic oligonucleotide
agaaugaugccaaugucau

SEQ ID NO: 2692367 - RNA, 19 nt, Artificial Sequence
  Description of Artificial Sequence: Synthetic oligonucleotide
gugaaaagaaagggagggg

SEQ ID NO: 2692368 - RNA, 19 nt, Artificial Sequence
  Description of Artificial Sequence: Synthetic oligonucleotide
aggaaauuaggguggcggu

SEQ ID NO: 2692369 - RNA, 19 nt, Artificial Sequence
  Description of Artificial Sequence: Synthetic oligonucleotide
auaucaacaaugacacugu

SEQ ID NO: 2692370 - RNA, 19 nt, Artificial Sequence
  Description of Artificial Sequence: Synthetic oligonucleotide
cugccugaaagugucuucg

SEQ ID NO: 2692371 - RNA, 19 nt, Artificial Sequence
  Description of Artificial Sequence: Synthetic oligonucleotide
cugucggcagaacggagcg

SEQ ID NO: 2692372 - RNA, 19 nt, Artificial Sequence
  Description of Artificial Sequence: Synthetic oligonucleotide
uucggcggugaacaugccc

SEQ ID NO: 2692373 - RNA, 19 nt, Artificial Sequence
  Description of Artificial Sequence: Synthetic oligonucleotide
ugucuucgaucucauugac

SEQ ID NO: 2692374 - RNA, 19 nt, Artificial Sequence
  Description of Artificial Sequence: Synthetic oligonucleotide
ggaucucaacagcagagcc

SEQ ID NO: 2692375 - RNA, 19 nt, Artificial Sequence
  Description of Artificial Sequence: Synthetic oligonucleotide
uggagagagaugguugggc

SEQ ID NO: 2692376 - RNA, 19 nt, Artificial Sequence
  Description of Artificial Sequence: Synthetic oligonucleotide
agaugguugggcuuucuuu

SEQ ID NO: 2692377 - RNA, 19 nt, Artificial Sequence
  Description of Artificial Sequence: Synthetic oligonucleotide
augucaucccuguucagaa

SEQ ID NO: 2692378 - RNA, 19 nt, Artificial Sequence
  Description of Artificial Sequence: Synthetic oligonucleotide
uggaucucaacagcagagc

SEQ ID NO: 2692379 - RNA, 19 nt, Artificial Sequence
  Description of Artificial Sequence: Synthetic oligonucleotide
agcagcuuagcagccacuc

SEQ ID NO: 2692380 - RNA, 19 nt, Artificial Sequence
  Description of Artificial Sequence: Synthetic oligonucleotide
uucuuguuaagcuccccua

SEQ ID NO: 2692381 - RNA, 19 nt, Artificial Sequence
  Description of Artificial Sequence: Synthetic oligonucleotide
augacacuguguaacagca

SEQ ID NO: 2692382 - RNA, 19 nt, Artificial Sequence
  Description of Artificial Sequence: Synthetic oligonucleotide
auugacggugguauccuuc

SEQ ID NO: 2692383 - RNA, 19 nt, Artificial Sequence
  Description of Artificial Sequence: Synthetic oligonucleotide
gaacggagcgcuuccccag

SEQ ID NO: 2692384 - RNA, 19 nt, Artificial Sequence
  Description of Artificial Sequence: Synthetic oligonucleotide
gcaauguacugguugauga

SEQ ID NO: 2692385 - RNA, 19 nt, Artificial Sequence
  Description of Artificial Sequence: Synthetic oligonucleotide
aucaccgcgaucaguuuac

SEQ ID NO: 2692386 - RNA, 19 nt, Artificial Sequence
  Description of Artificial Sequence: Synthetic oligonucleotide
uguucagaaacugccugaa

SEQ ID NO: 2692387 - RNA, 19 nt, Artificial Sequence
  Description of Artificial Sequence: Synthetic oligonucleotide
uccccuaugccgcccagga

SEQ ID NO: 2692388 - RNA, 19 nt, Artificial Sequence
  Description of Artificial Sequence: Synthetic oligonucleotide
cacuguguaacagcacagg

SEQ ID NO: 2692389 - RNA, 19 nt, Artificial Sequence
  Description of Artificial Sequence: Synthetic oligonucleotide
aggucuucggcggugaaca

SEQ ID NO: 2692390 - RNA, 19 nt, Artificial Sequence
  Description of Artificial Sequence: Synthetic oligonucleotide
uggcgguucuuguuaagcu

SEQ ID NO: 2692391 - RNA, 19 nt, Artificial Sequence
  Description of Artificial Sequence: Synthetic oligonucleotide
agaggauggcgaaacuggg

SEQ ID NO: 2692392 - RNA, 19 nt, Artificial Sequence
  Description of Artificial Sequence: Synthetic oligonucleotide
ugguugggcuuucuuuccc

SEQ ID NO: 2692393 - RNA, 19 nt, Artificial Sequence
  Description of Artificial Sequence: Synthetic oligonucleotide
agaacggagcgcuucccca

SEQ ID NO: 2692394 - RNA, 19 nt, Artificial Sequence
  Description of Artificial Sequence: Synthetic oligonucleotide
gucaagggcaugccggacc

SEQ ID NO: 2692395 - RNA, 19 nt, Artificial Sequence
  Description of Artificial Sequence: Synthetic oligonucleotide
guauccuucucuacuacca

SEQ ID NO: 2692396 - RNA, 19 nt, Artificial Sequence
  Description of Artificial Sequence: Synthetic oligonucleotide
uucugucggcagaacggag

SEQ ID NO: 2692397 - RNA, 19 nt, Artificial Sequence
  Description of Artificial Sequence: Synthetic oligonucleotide
ugguauccuucucuacuac

SEQ ID NO: 2692398 - RNA, 19 nt, Artificial Sequence
  Description of Artificial Sequence: Synthetic oligonucleotide
uccuuggccgcaucguaug

SEQ ID NO: 2692399 - RNA, 19 nt, Artificial Sequence
  Description of Artificial Sequence: Synthetic oligonucleotide
aucaacaaugacacugugu

SEQ ID NO: 2692400 - RNA, 19 nt, Artificial Sequence
  Description of Artificial Sequence: Synthetic oligonucleotide
gguauccuucucuacuacc

SEQ ID NO: 2692401 - RNA, 19 nt, Artificial Sequence
  Description of Artificial Sequence: Synthetic oligonucleotide
ugaugccaaugucaucccu

SEQ ID NO: 2692402 - RNA, 19 nt, Artificial Sequence
  Description of Artificial Sequence: Synthetic oligonucleotide
ucgucuccaaucaccgcga

SEQ ID NO: 2692403 - RNA, 19 nt, Artificial Sequence
  Description of Artificial Sequence: Synthetic oligonucleotide
cccuaugccgcccaggagg

SEQ ID NO: 2692404 - RNA, 19 nt, Artificial Sequence
  Description of Artificial Sequence: Synthetic oligonucleotide
aaccagccuggaucucaac

SEQ ID NO: 2692405 - RNA, 19 nt, Artificial Sequence
  Description of Artificial Sequence: Synthetic oligonucleotide
cuuagcagccacucaguga

SEQ ID NO: 2692406 - RNA, 19 nt, Artificial Sequence
  Description of Artificial Sequence: Synthetic oligonucleotide
ggccgcaucguauggaugc

SEQ ID NO: 2692407 - RNA, 19 nt, Artificial Sequence
  Description of Artificial Sequence: Synthetic oligonucleotide
caaugacacuguguaacag

SEQ ID NO: 2692408 - RNA, 19 nt, Artificial Sequence
  Description of Artificial Sequence: Synthetic oligonucleotide
gucuucgaucucauugacg

SEQ ID NO: 2692409 - RNA, 19 nt, Artificial Sequence
  Description of Artificial Sequence: Synthetic oligonucleotide
aggguuggggagcccuagc

SEQ ID NO: 2692410 - RNA, 19 nt, Artificial Sequence
  Description of Artificial Sequence: Synthetic oligonucleotide
ugacacuguguaacagcac

SEQ ID NO: 2692411 - RNA, 19 nt, Artificial Sequence
  Description of Artificial Sequence: Synthetic oligonucleotide
cuucucuacuaccaggaaa

SEQ ID NO: 2692412 - RNA, 19 nt, Artificial Sequence
  Description of Artificial Sequence: Synthetic oligonucleotide
gauggaccgcuggugggcg

SEQ ID NO: 2692413 - RNA, 19 nt, Artificial Sequence
  Description of Artificial Sequence: Synthetic oligonucleotide
uuaggguggcgguucuugu

SEQ ID NO: 2692414 - RNA, 19 nt, Artificial Sequence
  Description of Artificial Sequence: Synthetic oligonucleotide
aaccaagacuucaaacuua

SEQ ID NO: 2692415 - RNA, 19 nt, Artificial Sequence
  Description of Artificial Sequence: Synthetic oligonucleotide
uaagcuccccuaugccgcc

SEQ ID NO: 2692416 - RNA, 19 nt, Artificial Sequence
  Description of Artificial Sequence: Synthetic oligonucleotide
caugccggaccaucucugc

SEQ ID NO: 2692417 - RNA, 19 nt, Artificial Sequence
  Description of Artificial Sequence: Synthetic oligonucleotide
gguugaugagaaugaugcc

SEQ ID NO: 2692418 - RNA, 19 nt, Artificial Sequence
  Description of Artificial Sequence: Synthetic oligonucleotide
gaaaagaaagggaggggcu

SEQ ID NO: 2692419 - RNA, 19 nt, Artificial Sequence
  Description of Artificial Sequence: Synthetic oligonucleotide
ccugaaagugucuucgauc

SEQ ID NO: 2692420 - RNA, 19 nt, Artificial Sequence
  Description of Artificial Sequence: Synthetic oligonucleotide
cagaacggagcgcuucccc

SEQ ID NO: 2692421 - RNA, 19 nt, Artificial Sequence
  Description of Artificial Sequence: Synthetic oligonucleotide
uucuuucccuaaccagccu

SEQ ID NO: 2692422 - RNA, 19 nt, Artificial Sequence
  Description of Artificial Sequence: Synthetic oligonucleotide
uaaccagccuggaucucaa

SEQ ID NO: 2692423 - RNA, 19 nt, Artificial Sequence
  Description of Artificial Sequence: Synthetic oligonucleotide
accaagacuucaaacuuaa

SEQ ID NO: 2692424 - RNA, 19 nt, Artificial Sequence
  Description of Artificial Sequence: Synthetic oligonucleotide
uuggccgcaucguauggau

SEQ ID NO: 2692425 - RNA, 19 nt, Artificial Sequence
  Description of Artificial Sequence: Synthetic oligonucleotide
ggcgucaagggcaugccgg

SEQ ID NO: 2692426 - RNA, 19 nt, Artificial Sequence
  Description of Artificial Sequence: Synthetic oligonucleotide
uaugccgcccaggaggaaa

SEQ ID NO: 2692427 - RNA, 19 nt, Artificial Sequence
  Description of Artificial Sequence: Synthetic oligonucleotide
aacugccugaaagugucuu

SEQ ID NO: 2692428 - RNA, 19 nt, Artificial Sequence
  Description of Artificial Sequence: Synthetic oligonucleotide
caucccuguucagaaacug

SEQ ID NO: 2692429 - RNA, 19 nt, Artificial Sequence
  Description of Artificial Sequence: Synthetic oligonucleotide
guguccucgucuccaauca

SEQ ID NO: 2692430 - RNA, 19 nt, Artificial Sequence
  Description of Artificial Sequence: Synthetic oligonucleotide
ggguuggggagcccuagcg

SEQ ID NO: 2692431 - RNA, 19 nt, Artificial Sequence
  Description of Artificial Sequence: Synthetic oligonucleotide
agagagaugguugggcuuu

SEQ ID NO: 2692432 - RNA, 19 nt, Artificial Sequence
  Description of Artificial Sequence: Synthetic oligonucleotide
ggaguccuuggccgcaucg

SEQ ID NO: 2692433 - RNA, 19 nt, Artificial Sequence
  Description of Artificial Sequence: Synthetic oligonucleotide
uugggcuuucuuucccuaa

SEQ ID NO: 2692434 - RNA, 19 nt, Artificial Sequence
  Description of Artificial Sequence: Synthetic oligonucleotide
gacggugguauccuucucu

SEQ ID NO: 2692435 - RNA, 19 nt, Artificial Sequence
  Description of Artificial Sequence: Synthetic oligonucleotide
caccgcgaucaguuuaccc

SEQ ID NO: 2692436 - RNA, 19 nt, Artificial Sequence
  Description of Artificial Sequence: Synthetic oligonucleotide
ugccugaaagugucuucga

SEQ ID NO: 2692437 - RNA, 19 nt, Artificial Sequence
  Description of Artificial Sequence: Synthetic oligonucleotide
guucuuguuaagcuccccu

SEQ ID NO: 2692438 - RNA, 19 nt, Artificial Sequence
  Description of Artificial Sequence: Synthetic oligonucleotide
gggguugaggguuggggag

SEQ ID NO: 2692439 - RNA, 19 nt, Artificial Sequence
  Description of Artificial Sequence: Synthetic oligonucleotide
cuggaaaccaagacuucaa

SEQ ID NO: 2692440 - RNA, 19 nt, Artificial Sequence
  Description of Artificial Sequence: Synthetic oligonucleotide
gagguaguggagagagaug

SEQ ID NO: 2692441 - RNA, 19 nt, Artificial Sequence
  Description of Artificial Sequence: Synthetic oligonucleotide
gucaccguguccucgucuc

SEQ ID NO: 2692442 - RNA, 19 nt, Artificial Sequence
  Description of Artificial Sequence: Synthetic oligonucleotide
ugucaucccuguucagaaa

SEQ ID NO: 2692443 - RNA, 19 nt, Artificial Sequence
  Description of Artificial Sequence: Synthetic oligonucleotide
uucccuaaccagccuggau

SEQ ID NO: 2692444 - RNA, 19 nt, Artificial Sequence
  Description of Artificial Sequence: Synthetic oligonucleotide
guggagagagaugguuggg

SEQ ID NO: 2692445 - RNA, 19 nt, Artificial Sequence
  Description of Artificial Sequence: Synthetic oligonucleotide
uccaaucaccgcgaucagu

SEQ ID NO: 2692446 - RNA, 19 nt, Artificial Sequence
  Description of Artificial Sequence: Synthetic oligonucleotide
ucaccguguccucgucucc

SEQ ID NO: 2692447 - RNA, 19 nt, Artificial Sequence
  Description of Artificial Sequence: Synthetic oligonucleotide
aggguggcgguucuuguua

SEQ ID NO: 2692448 - RNA, 19 nt, Artificial Sequence
  Description of Artificial Sequence: Synthetic oligonucleotide
gcggugaacaugcccuugg

SEQ ID NO: 2692449 - RNA, 19 nt, Artificial Sequence
  Description of Artificial Sequence: Synthetic oligonucleotide
ggugguauccuucucuacu

SEQ ID NO: 2692450 - RNA, 19 nt, Artificial Sequence
  Description of Artificial Sequence: Synthetic oligonucleotide
ggacagccgggauggaccg

SEQ ID NO: 2692451 - RNA, 19 nt, Artificial Sequence
  Description of Artificial Sequence: Synthetic oligonucleotide
cuaaccagccuggaucuca

SEQ ID NO: 2692452 - RNA, 19 nt, Artificial Sequence
  Description of Artificial Sequence: Synthetic oligonucleotide
gugguauccuucucuacua

SEQ ID NO: 2692453 - RNA, 19 nt, Artificial Sequence
  Description of Artificial Sequence: Synthetic oligonucleotide
aagcuccccuaugccgccc

SEQ ID NO: 2692454 - RNA, 19 nt, Artificial Sequence
  Description of Artificial Sequence: Synthetic oligonucleotide
agccacucagugaaaagaa

SEQ ID NO: 2692455 - RNA, 19 nt, Artificial Sequence
  Description of Artificial Sequence: Synthetic oligonucleotide
guauggaugcuccuuggau

SEQ ID NO: 2692456 - RNA, 19 nt, Artificial Sequence
  Description of Artificial Sequence: Synthetic oligonucleotide
ccgcgaucaguuuaccccg

SEQ ID NO: 2692457 - RNA, 19 nt, Artificial Sequence
  Description of Artificial Sequence: Synthetic oligonucleotide
cagccacucagugaaaaga

SEQ ID NO: 2692458 - RNA, 19 nt, Artificial Sequence
  Description of Artificial Sequence: Synthetic oligonucleotide
gcuuagcagccacucagug

SEQ ID NO: 2692459 - RNA, 19 nt, Artificial Sequence
  Description of Artificial Sequence: Synthetic oligonucleotide
agccgggauggaccgcugg

SEQ ID NO: 2692460 - RNA, 19 nt, Artificial Sequence
  Description of Artificial Sequence: Synthetic oligonucleotide
gaggauggcgaaacuggga

SEQ ID NO: 2692461 - RNA, 19 nt, Artificial Sequence
  Description of Artificial Sequence: Synthetic oligonucleotide
acggugguauccuucucua

SEQ ID NO: 2692462 - RNA, 19 nt, Artificial Sequence
  Description of Artificial Sequence: Synthetic oligonucleotide
gugggcgucaagggcaugc

SEQ ID NO: 2692463 - RNA, 19 nt, Artificial Sequence
  Description of Artificial Sequence: Synthetic oligonucleotide
uggccgcaucguauggaug

SEQ ID NO: 2692464 - RNA, 19 nt, Artificial Sequence
  Description of Artificial Sequence: Synthetic oligonucleotide
gaucuccaggacagccggg

SEQ ID NO: 2692465 - RNA, 19 nt, Artificial Sequence
  Description of Artificial Sequence: Synthetic oligonucleotide
gcuggugggcgucaagggc

SEQ ID NO: 2692466 - RNA, 19 nt, Artificial Sequence
  Description of Artificial Sequence: Synthetic oligonucleotide
uuucccuaaccagccugga

SEQ ID NO: 2692467 - RNA, 19 nt, Artificial Sequence
  Description of Artificial Sequence: Synthetic oligonucleotide
uggaugcuccuuggauggg

SEQ ID NO: 2692468 - RNA, 19 nt, Artificial Sequence
  Description of Artificial Sequence: Synthetic oligonucleotide
ggcgguucuuguuaagcuc

SEQ ID NO: 2692469 - RNA, 19 nt, Artificial Sequence
  Description of Artificial Sequence: Synthetic oligonucleotide
gggauggaccgcugguggg

SEQ ID NO: 2692470 - RNA, 19 nt, Artificial Sequence
  Description of Artificial Sequence: Synthetic oligonucleotide
agcccuagcgcaggucuuc

SEQ ID NO: 2692471 - RNA, 19 nt, Artificial Sequence
  Description of Artificial Sequence: Synthetic oligonucleotide
aagugucuucgaucucauu

SEQ ID NO: 2692472 - RNA, 19 nt, Artificial Sequence
  Description of Artificial Sequence: Synthetic oligonucleotide
ccuagcgcaggucuucggc

SEQ ID NO: 2692473 - RNA, 19 nt, Artificial Sequence
  Description of Artificial Sequence: Synthetic oligonucleotide
aaacugccugaaagugucu

SEQ ID NO: 2692474 - RNA, 19 nt, Artificial Sequence
  Description of Artificial Sequence: Synthetic oligonucleotide
ggcagaacggagcgcuucc

SEQ ID NO: 2692475 - RNA, 19 nt, Artificial Sequence
  Description of Artificial Sequence: Synthetic oligonucleotide
gucuucggcggugaacaug

SEQ ID NO: 2692476 - RNA, 19 nt, Artificial Sequence
  Description of Artificial Sequence: Synthetic oligonucleotide
caacaaugacacuguguaa

SEQ ID NO: 2692477 - RNA, 19 nt, Artificial Sequence
  Description of Artificial Sequence: Synthetic oligonucleotide
auggcgaaacugggagagg

SEQ ID NO: 2692478 - RNA, 19 nt, Artificial Sequence
  Description of Artificial Sequence: Synthetic oligonucleotide
acagccgggauggaccgcu

SEQ ID NO: 2692479 - RNA, 19 nt, Artificial Sequence
  Description of Artificial Sequence: Synthetic oligonucleotide
ggauggaguccuuggccgc

SEQ ID NO: 2692480 - RNA, 19 nt, Artificial Sequence
  Description of Artificial Sequence: Synthetic oligonucleotide
uuuaccccggcccgccauu

SEQ ID NO: 2692481 - RNA, 19 nt, Artificial Sequence
  Description of Artificial Sequence: Synthetic oligonucleotide
augccgcccaggaggaaac

SEQ ID NO: 2692482 - RNA, 19 nt, Artificial Sequence
  Description of Artificial Sequence: Synthetic oligonucleotide
uaggguggcgguucuuguu

SEQ ID NO: 2692483 - RNA, 19 nt, Artificial Sequence
  Description of Artificial Sequence: Synthetic oligonucleotide
ugggcgucaagggcaugcc

SEQ ID NO: 2692484 - RNA, 19 nt, Artificial Sequence
  Description of Artificial Sequence: Synthetic oligonucleotide
ugacggugguauccuucuc

SEQ ID NO: 2692485 - RNA, 19 nt, Artificial Sequence
  Description of Artificial Sequence: Synthetic oligonucleotide
cucuacuaccaggaaauua

SEQ ID NO: 2692486 - RNA, 19 nt, Artificial Sequence
  Description of Artificial Sequence: Synthetic oligonucleotide
guucagaaacugccugaaa

SEQ ID NO: 2692487 - RNA, 19 nt, Artificial Sequence
  Description of Artificial Sequence: Synthetic oligonucleotide
gaucucauugacgguggua

SEQ ID NO: 2692488 - RNA, 19 nt, Artificial Sequence
  Description of Artificial Sequence: Synthetic oligonucleotide
cgcaucguauggaugcucc

SEQ ID NO: 2692489 - RNA, 19 nt, Artificial Sequence
  Description of Artificial Sequence: Synthetic oligonucleotide
caguuuaccccggcccgcc

SEQ ID NO: 2692490 - RNA, 19 nt, Artificial Sequence
  Description of Artificial Sequence: Synthetic oligonucleotide
agcuuagcagccacucagu

SEQ ID NO: 2692491 - RNA, 19 nt, Artificial Sequence
  Description of Artificial Sequence: Synthetic oligonucleotide
aggaaacccgucaccgugu

SEQ ID NO: 2692492 - RNA, 19 nt, Artificial Sequence
  Description of Artificial Sequence: Synthetic oligonucleotide
cuccaaucaccgcgaucag

SEQ ID NO: 2692493 - RNA, 19 nt, Artificial Sequence
  Description of Artificial Sequence: Synthetic oligonucleotide
uggugggcgucaagggcau

SEQ ID NO: 2692494 - RNA, 19 nt, Artificial Sequence
  Description of Artificial Sequence: Synthetic oligonucleotide
ggggcuggaaaccaagacu

SEQ ID NO: 2692495 - RNA, 19 nt, Artificial Sequence
  Description of Artificial Sequence: Synthetic oligonucleotide
aauuaggguggcgguucuu

SEQ ID NO: 2692496 - RNA, 19 nt, Artificial Sequence
  Description of Artificial Sequence: Synthetic oligonucleotide
ggagguaguggagagagau

SEQ ID NO: 2692497 - RNA, 19 nt, Artificial Sequence
  Description of Artificial Sequence: Synthetic oligonucleotide
ugucggcagaacggagcgc

SEQ ID NO: 2692498 - RNA, 19 nt, Artificial Sequence
  Description of Artificial Sequence: Synthetic oligonucleotide
gucuccaaucaccgcgauc

SEQ ID NO: 2692499 - RNA, 19 nt, Artificial Sequence
  Description of Artificial Sequence: Synthetic oligonucleotide
ucucugcaauguacugguu

SEQ ID NO: 2692500 - RNA, 19 nt, Artificial Sequence
  Description of Artificial Sequence: Synthetic oligonucleotide
ucaccgcgaucaguuuacc

SEQ ID NO: 2692501 - RNA, 19 nt, Artificial Sequence
  Description of Artificial Sequence: Synthetic oligonucleotide
accccggcccgccauucug

SEQ ID NO: 2692502 - RNA, 19 nt, Artificial Sequence
  Description of Artificial Sequence: Synthetic oligonucleotide
ucucuacuaccaggaaauu

SEQ ID NO: 2692503 - RNA, 19 nt, Artificial Sequence
  Description of Artificial Sequence: Synthetic oligonucleotide
aguuuaccccggcccgcca

SEQ ID NO: 2692504 - RNA, 19 nt, Artificial Sequence
  Description of Artificial Sequence: Synthetic oligonucleotide
gagagagaugguugggcuu

SEQ ID NO: 2692505 - RNA, 19 nt, Artificial Sequence
  Description of Artificial Sequence: Synthetic oligonucleotide
acugggagagggccuggua

SEQ ID NO: 2692506 - RNA, 19 nt, Artificial Sequence
  Description of Artificial Sequence: Synthetic oligonucleotide
guugggcuuucuuucccua

SEQ ID NO: 2692507 - RNA, 19 nt, Artificial Sequence
  Description of Artificial Sequence: Synthetic oligonucleotide
caggucuucggcggugaac

SEQ ID NO: 2692508 - RNA, 19 nt, Artificial Sequence
  Description of Artificial Sequence: Synthetic oligonucleotide
gggcgucaagggcaugccg

SEQ ID NO: 2692509 - RNA, 19 nt, Artificial Sequence
  Description of Artificial Sequence: Synthetic oligonucleotide
agcgcaggucuucggcggu

SEQ ID NO: 2692510 - RNA, 19 nt, Artificial Sequence
  Description of Artificial Sequence: Synthetic oligonucleotide
gguggcgguucuuguuaag

SEQ ID NO: 2692511 - RNA, 19 nt, Artificial Sequence
  Description of Artificial Sequence: Synthetic oligonucleotide
acccgucaccguguccucg

SEQ ID NO: 2692512 - RNA, 19 nt, Artificial Sequence
  Description of Artificial Sequence: Synthetic oligonucleotide
guaguggagagagaugguu

SEQ ID NO: 2692513 - RNA, 19 nt, Artificial Sequence
  Description of Artificial Sequence: Synthetic oligonucleotide
agagaugguugggcuuucu

SEQ ID NO: 2692514 - RNA, 19 nt, Artificial Sequence
  Description of Artificial Sequence: Synthetic oligonucleotide
gguugaggguuggggagcc

SEQ ID NO: 2692515 - RNA, 19 nt, Artificial Sequence
  Description of Artificial Sequence: Synthetic oligonucleotide
ggauggcgaaacugggaga

SEQ ID NO: 2692516 - RNA, 19 nt, Artificial Sequence
  Description of Artificial Sequence: Synthetic oligonucleotide
gucggcagaacggagcgcu

SEQ ID NO: 2692517 - RNA, 19 nt, Artificial Sequence
  Description of Artificial Sequence: Synthetic oligonucleotide
acggagcgcuuccccagca

SEQ ID NO: 2692518 - RNA, 19 nt, Artificial Sequence
  Description of Artificial Sequence: Synthetic oligonucleotide
accgcuggugggcgucaag

SEQ ID NO: 2692519 - RNA, 19 nt, Artificial Sequence
  Description of Artificial Sequence: Synthetic oligonucleotide
agggcaugccggaccaucu

SEQ ID NO: 2692520 - RNA, 19 nt, Artificial Sequence
  Description of Artificial Sequence: Synthetic oligonucleotide
cuucggcggugaacaugcc

SEQ ID NO: 2692521 - RNA, 19 nt, Artificial Sequence
  Description of Artificial Sequence: Synthetic oligonucleotide
agcuccccuaugccgccca

SEQ ID NO: 2692522 - RNA, 19 nt, Artificial Sequence
  Description of Artificial Sequence: Synthetic oligonucleotide
ggagcccuagcgcaggucu

SEQ ID NO: 2692523 - RNA, 19 nt, Artificial Sequence
  Description of Artificial Sequence: Synthetic oligonucleotide
cuccccuaugccgcccagg

SEQ ID NO: 2692524 - RNA, 19 nt, Artificial Sequence
  Description of Artificial Sequence: Synthetic oligonucleotide
ggguugaggguuggggagc

SEQ ID NO: 2692525 - RNA, 19 nt, Artificial Sequence
  Description of Artificial Sequence: Synthetic oligonucleotide
cgggauggaccgcuggugg

SEQ ID NO: 2692526 - RNA, 19 nt, Artificial Sequence
  Description of Artificial Sequence: Synthetic oligonucleotide
accguguccucgucuccaa

SEQ ID NO: 2692527 - RNA, 19 nt, Artificial Sequence
  Description of Artificial Sequence: Synthetic oligonucleotide
ggaaacccgucaccguguc

SEQ ID NO: 2692528 - RNA, 19 nt, Artificial Sequence
  Description of Artificial Sequence: Synthetic oligonucleotide
gagaugguugggcuuucuu

SEQ ID NO: 2692529 - RNA, 19 nt, Artificial Sequence
  Description of Artificial Sequence: Synthetic oligonucleotide
cgaucaguuuaccccggcc

SEQ ID NO: 2692530 - RNA, 19 nt, Artificial Sequence
  Description of Artificial Sequence: Synthetic oligonucleotide
ggcgaaacugggagagggc

SEQ ID NO: 2692531 - RNA, 19 nt, Artificial Sequence
  Description of Artificial Sequence: Synthetic oligonucleotide
gagagaugguugggcuuuc

SEQ ID NO: 2692532 - RNA, 19 nt, Artificial Sequence
  Description of Artificial Sequence: Synthetic oligonucleotide
cccgccauucugucggcag

SEQ ID NO: 2692533 - RNA, 19 nt, Artificial Sequence
  Description of Artificial Sequence: Synthetic oligonucleotide
uaccccggcccgccauucu

SEQ ID NO: 2692534 - RNA, 19 nt, Artificial Sequence
  Description of Artificial Sequence: Synthetic oligonucleotide
gcgaucaguuuaccccggc

SEQ ID NO: 2692535 - RNA, 19 nt, Artificial Sequence
  Description of Artificial Sequence: Synthetic oligonucleotide
uggaccgcuggugggcguc

SEQ ID NO: 2692536 - RNA, 19 nt, Artificial Sequence
  Description of Artificial Sequence: Synthetic oligonucleotide
cggcccgccauucugucgg

SEQ ID NO: 2692537 - RNA, 19 nt, Artificial Sequence
  Description of Artificial Sequence: Synthetic oligonucleotide
ccaaucaccgcgaucaguu

SEQ ID NO: 2692538 - RNA, 19 nt, Artificial Sequence
  Description of Artificial Sequence: Synthetic oligonucleotide
ccgcuggugggcgucaagg

SEQ ID NO: 2692539 - RNA, 19 nt, Artificial Sequence
  Description of Artificial Sequence: Synthetic oligonucleotide
uuaccccggcccgccauuc

SEQ ID NO: 2692540 - RNA, 19 nt, Artificial Sequence
  Description of Artificial Sequence: Synthetic oligonucleotide
ggaugcuccuuggauggga

SEQ ID NO: 2692541 - RNA, 19 nt, Artificial Sequence
  Description of Artificial Sequence: Synthetic oligonucleotide
ucggcagaacggagcgcuu

SEQ ID NO: 2692542 - RNA, 19 nt, Artificial Sequence
  Description of Artificial Sequence: Synthetic oligonucleotide
ccaggaaauuaggguggcg

SEQ ID NO: 2692543 - RNA, 19 nt, Artificial Sequence
  Description of Artificial Sequence: Synthetic oligonucleotide
auggaccgcuggugggcgu

SEQ ID NO: 2692544 - RNA, 19 nt, Artificial Sequence
  Description of Artificial Sequence: Synthetic oligonucleotide
gcaugccggaccaucucug

SEQ ID NO: 2692545 - RNA, 19 nt, Artificial Sequence
  Description of Artificial Sequence: Synthetic oligonucleotide
ugccgcccaggaggaaacc

SEQ ID NO: 2692546 - RNA, 19 nt, Artificial Sequence
  Description of Artificial Sequence: Synthetic oligonucleotide
cccugcgcaggauggaguc

SEQ ID NO: 2692547 - RNA, 19 nt, Artificial Sequence
  Description of Artificial Sequence: Synthetic oligonucleotide
cccaggaggaaacccguca

SEQ ID NO: 2692548 - RNA, 19 nt, Artificial Sequence
  Description of Artificial Sequence: Synthetic oligonucleotide
gaguccuuggccgcaucgu

SEQ ID NO: 2692549 - RNA, 19 nt, Artificial Sequence
  Description of Artificial Sequence: Synthetic oligonucleotide
gacagccgggauggaccgc

SEQ ID NO: 2692550 - RNA, 19 nt, Artificial Sequence
  Description of Artificial Sequence: Synthetic oligonucleotide
guugaggguuggggagccc

SEQ ID NO: 2692551 - RNA, 19 nt, Artificial Sequence
  Description of Artificial Sequence: Synthetic oligonucleotide
gggagagggccugguagug

SEQ ID NO: 2692552 - RNA, 19 nt, Artificial Sequence
  Description of Artificial Sequence: Synthetic oligonucleotide
cgcuggugggcgucaaggg

SEQ ID NO: 2692553 - RNA, 19 nt, Artificial Sequence
  Description of Artificial Sequence: Synthetic oligonucleotide
gguugggcuuucuuucccu

SEQ ID NO: 2692554 - RNA, 19 nt, Artificial Sequence
  Description of Artificial Sequence: Synthetic oligonucleotide
aggagguaguggagagaga

SEQ ID NO: 2692555 - RNA, 19 nt, Artificial Sequence
  Description of Artificial Sequence: Synthetic oligonucleotide
caccguguccucgucucca

SEQ ID NO: 2692556 - RNA, 19 nt, Artificial Sequence
  Description of Artificial Sequence: Synthetic oligonucleotide
ccuaugccgcccaggagga

SEQ ID NO: 2692557 - RNA, 19 nt, Artificial Sequence
  Description of Artificial Sequence: Synthetic oligonucleotide
gcgucaagggcaugccgga

SEQ ID NO: 2692558 - RNA, 19 nt, Artificial Sequence
  Description of Artificial Sequence: Synthetic oligonucleotide
ugcgcaggauggaguccuu

SEQ ID NO: 2692559 - RNA, 19 nt, Artificial Sequence
  Description of Artificial Sequence: Synthetic oligonucleotide
ggcccugcgcaggauggag

SEQ ID NO: 2692560 - RNA, 19 nt, Artificial Sequence
  Description of Artificial Sequence: Synthetic oligonucleotide
ggcaugccggaccaucucu

SEQ ID NO: 2692561 - RNA, 19 nt, Artificial Sequence
  Description of Artificial Sequence: Synthetic oligonucleotide
gcagaacggagcgcuuccc

SEQ ID NO: 2692562 - RNA, 19 nt, Artificial Sequence
  Description of Artificial Sequence: Synthetic oligonucleotide
uggcccugcgcaggaugga

SEQ ID NO: 2692563 - RNA, 19 nt, Artificial Sequence
  Description of Artificial Sequence: Synthetic oligonucleotide
ggaggaaacccgucaccgu

SEQ ID NO: 2692564 - RNA, 19 nt, Artificial Sequence
  Description of Artificial Sequence: Synthetic oligonucleotide
ggcggugaacaugcccuug

SEQ ID NO: 2692565 - RNA, 19 nt, Artificial Sequence
  Description of Artificial Sequence: Synthetic oligonucleotide
gccgcccaggaggaaaccc

SEQ ID NO: 2692566 - RNA, 19 nt, Artificial Sequence
  Description of Artificial Sequence: Synthetic oligonucleotide
auggaguccuuggccgcau

SEQ ID NO: 2692567 - RNA, 19 nt, Artificial Sequence
  Description of Artificial Sequence: Synthetic oligonucleotide
gcccuagcgcaggucuucg

SEQ ID NO: 2692568 - RNA, 19 nt, Artificial Sequence
  Description of Artificial Sequence: Synthetic oligonucleotide
cugcgcaggauggaguccu

SEQ ID NO: 2692569 - RNA, 19 nt, Artificial Sequence
  Description of Artificial Sequence: Synthetic oligonucleotide
guuuaccccggcccgccau

SEQ ID NO: 2692570 - RNA, 19 nt, Artificial Sequence
  Description of Artificial Sequence: Synthetic oligonucleotide
ggagagggccugguaguga

SEQ ID NO: 2692571 - RNA, 19 nt, Artificial Sequence
  Description of Artificial Sequence: Synthetic oligonucleotide
gcacagggaggagguagug

SEQ ID NO: 2692572 - RNA, 19 nt, Artificial Sequence
  Description of Artificial Sequence: Synthetic oligonucleotide
cgcgaucaguuuaccccgg

SEQ ID NO: 2692573 - RNA, 19 nt, Artificial Sequence
  Description of Artificial Sequence: Synthetic oligonucleotide
caucguauggaugcuccuu

SEQ ID NO: 2692574 - RNA, 19 nt, Artificial Sequence
  Description of Artificial Sequence: Synthetic oligonucleotide
ggaaauuaggguggcgguu

SEQ ID NO: 2692575 - RNA, 19 nt, Artificial Sequence
  Description of Artificial Sequence: Synthetic oligonucleotide
cccuaaccagccuggaucu

SEQ ID NO: 2692576 - RNA, 19 nt, Artificial Sequence
  Description of Artificial Sequence: Synthetic oligonucleotide
gccugaaagugucuucgau

SEQ ID NO: 2692577 - RNA, 19 nt, Artificial Sequence
  Description of Artificial Sequence: Synthetic oligonucleotide
ggguggcgguucuuguuaa

SEQ ID NO: 2692578 - RNA, 19 nt, Artificial Sequence
  Description of Artificial Sequence: Synthetic oligonucleotide
cagccgggauggaccgcug

SEQ ID NO: 2692579 - RNA, 19 nt, Artificial Sequence
  Description of Artificial Sequence: Synthetic oligonucleotide
ccggcccgccauucugucg

SEQ ID NO: 2692580 - RNA, 19 nt, Artificial Sequence
  Description of Artificial Sequence: Synthetic oligonucleotide
cguauggaugcuccuugga

SEQ ID NO: 2692581 - RNA, 19 nt, Artificial Sequence
  Description of Artificial Sequence: Synthetic oligonucleotide
ccugcgcaggauggagucc

SEQ ID NO: 2692582 - RNA, 19 nt, Artificial Sequence
  Description of Artificial Sequence: Synthetic oligonucleotide
guccuuggccgcaucguau

SEQ ID NO: 2692583 - RNA, 19 nt, Artificial Sequence
  Description of Artificial Sequence: Synthetic oligonucleotide
gcaucguauggaugcuccu

SEQ ID NO: 2692584 - RNA, 19 nt, Artificial Sequence
  Description of Artificial Sequence: Synthetic oligonucleotide
caaucaccgcgaucaguuu

SEQ ID NO: 2692585 - RNA, 19 nt, Artificial Sequence
  Description of Artificial Sequence: Synthetic oligonucleotide
gguaguggagagagauggu

SEQ ID NO: 2692586 - RNA, 19 nt, Artificial Sequence
  Description of Artificial Sequence: Synthetic oligonucleotide
cggugguauccuucucuac

SEQ ID NO: 2692587 - RNA, 19 nt, Artificial Sequence
  Description of Artificial Sequence: Synthetic oligonucleotide
ccuucucuacuaccaggaa

SEQ ID NO: 2692588 - RNA, 19 nt, Artificial Sequence
  Description of Artificial Sequence: Synthetic oligonucleotide
ccaagacuucaaacuuaaa

SEQ ID NO: 2692589 - RNA, 19 nt, Artificial Sequence
  Description of Artificial Sequence: Synthetic oligonucleotide
cauugacggugguauccuu

SEQ ID NO: 2692590 - RNA, 19 nt, Artificial Sequence
  Description of Artificial Sequence: Synthetic oligonucleotide
ccccuaugccgcccaggag

SEQ ID NO: 2692591 - RNA, 19 nt, Artificial Sequence
  Description of Artificial Sequence: Synthetic oligonucleotide
gcuccccuaugccgcccag

SEQ ID NO: 2692592 - RNA, 19 nt, Artificial Sequence
  Description of Artificial Sequence: Synthetic oligonucleotide
cagcagcuuagcagccacu

SEQ ID NO: 2692593 - RNA, 19 nt, Artificial Sequence
  Description of Artificial Sequence: Synthetic oligonucleotide
cugcaauguacugguugau

SEQ ID NO: 2692594 - RNA, 19 nt, Artificial Sequence
  Description of Artificial Sequence: Synthetic oligonucleotide
ggcccgccauucugucggc

SEQ ID NO: 2692595 - RNA, 19 nt, Artificial Sequence
  Description of Artificial Sequence: Synthetic oligonucleotide
ccgccauucugucggcaga

SEQ ID NO: 2692596 - RNA, 19 nt, Artificial Sequence
  Description of Artificial Sequence: Synthetic oligonucleotide
gccgggauggaccgcuggu

SEQ ID NO: 2692597 - RNA, 19 nt, Artificial Sequence
  Description of Artificial Sequence: Synthetic oligonucleotide
ccuaaccagccuggaucuc

SEQ ID NO: 2692598 - RNA, 19 nt, Artificial Sequence
  Description of Artificial Sequence: Synthetic oligonucleotide
ccgcaucguauggaugcuc

SEQ ID NO: 2692599 - RNA, 19 nt, Artificial Sequence
  Description of Artificial Sequence: Synthetic oligonucleotide
cggaccaucucugcaaugu

SEQ ID NO: 2692600 - RNA, 19 nt, Artificial Sequence
  Description of Artificial Sequence: Synthetic oligonucleotide
gcgcaggucuucggcggug

SEQ ID NO: 2692601 - RNA, 19 nt, Artificial Sequence
  Description of Artificial Sequence: Synthetic oligonucleotide
gaccgcuggugggcgucaa

SEQ ID NO: 2692602 - RNA, 19 nt, Artificial Sequence
  Description of Artificial Sequence: Synthetic oligonucleotide
cccggcccgccauucuguc

SEQ ID NO: 2692603 - RNA, 19 nt, Artificial Sequence
  Description of Artificial Sequence: Synthetic oligonucleotide
gcaggucuucggcggugaa

SEQ ID NO: 2692604 - RNA, 19 nt, Artificial Sequence
  Description of Artificial Sequence: Synthetic oligonucleotide
cuaugccgcccaggaggaa

SEQ ID NO: 2692605 - RNA, 19 nt, Artificial Sequence
  Description of Artificial Sequence: Synthetic oligonucleotide
ggugggcgucaagggcaug

SEQ ID NO: 2692606 - RNA, 19 nt, Artificial Sequence
  Description of Artificial Sequence: Synthetic oligonucleotide
gagcccuagcgcaggucuu

SEQ ID NO: 2692607 - RNA, 19 nt, Artificial Sequence
  Description of Artificial Sequence: Synthetic oligonucleotide
cggcagaacggagcgcuuc

SEQ ID NO: 2692608 - RNA, 19 nt, Artificial Sequence
  Description of Artificial Sequence: Synthetic oligonucleotide
ggucuucggcggugaacau

SEQ ID NO: 2692609 - RNA, 19 nt, Artificial Sequence
  Description of Artificial Sequence: Synthetic oligonucleotide
ggaccgcuggugggcguca

SEQ ID NO: 2692610 - RNA, 19 nt, Artificial Sequence
  Description of Artificial Sequence: Synthetic oligonucleotide
ccgucaccguguccucguc

SEQ ID NO: 2692611 - RNA, 19 nt, Artificial Sequence
  Description of Artificial Sequence: Synthetic oligonucleotide
cccgucaccguguccucgu

SEQ ID NO: 2692612 - RNA, 19 nt, Artificial Sequence
  Description of Artificial Sequence: Synthetic oligonucleotide
gccgcaucguauggaugcu

SEQ ID NO: 2692613 - RNA, 19 nt, Artificial Sequence
  Description of Artificial Sequence: Synthetic oligonucleotide
gcccgccauucugucggca

SEQ ID NO: 2692614 - RNA, 19 nt, Artificial Sequence
  Description of Artificial Sequence: Synthetic oligonucleotide
cgcccaggaggaaacccgu

SEQ ID NO: 2692615 - RNA, 19 nt, Artificial Sequence
  Description of Artificial Sequence: Synthetic oligonucleotide
cgcaggucuucggcgguga

SEQ ID NO: 2692616 - RNA, 19 nt, Artificial Sequence
  Description of Artificial Sequence: Synthetic oligonucleotide
cgucaccguguccucgucu

SEQ ID NO: 2692617 - RNA, 19 nt, Artificial Sequence
  Description of Artificial Sequence: Synthetic oligonucleotide
caagggcaugccggaccau

SEQ ID NO: 2692618 - RNA, 19 nt, Artificial Sequence
  Description of Artificial Sequence: Synthetic oligonucleotide
ccccggcccgccauucugu

SEQ ID NO: 2692619 - RNA, 19 nt, Artificial Sequence
  Description of Artificial Sequence: Synthetic oligonucleotide
ccguguccucgucuccaau

SEQ ID NO: 2692620 - RNA, 19 nt, Artificial Sequence
  Description of Artificial Sequence: Synthetic oligonucleotide
cggcggugaacaugcccuu

SEQ ID NO: 2692621 - RNA, 19 nt, Artificial Sequence
  Description of Artificial Sequence: Synthetic oligonucleotide
aauggagaaaacccaagac

SEQ ID NO: 2692622 - RNA, 19 nt, Artificial Sequence
  Description of Artificial Sequence: Synthetic oligonucleotide
aagguaagguccuugaguc

SEQ ID NO: 2692623 - RNA, 19 nt, Artificial Sequence
  Description of Artificial Sequence: Synthetic oligonucleotide
aaacccacgaaccagaaga

SEQ ID NO: 2692624 - RNA, 19 nt, Artificial Sequence
  Description of Artificial Sequence: Synthetic oligonucleotide
acagucacgccauagcugc

SEQ ID NO: 2692625 - RNA, 19 nt, Artificial Sequence
  Description of Artificial Sequence: Synthetic oligonucleotide
gugaaaauggagaagaaag

SEQ ID NO: 2692626 - RNA, 19 nt, Artificial Sequence
  Description of Artificial Sequence: Synthetic oligonucleotide
uguguuguauuccuccugg

SEQ ID NO: 2692627 - RNA, 19 nt, Artificial Sequence
  Description of Artificial Sequence: Synthetic oligonucleotide
gaaaauggagaagaaagag

SEQ ID NO: 2692628 - RNA, 19 nt, Artificial Sequence
  Description of Artificial Sequence: Synthetic oligonucleotide
uuguauuccuccuggaagg

SEQ ID NO: 2692629 - RNA, 19 nt, Artificial Sequence
  Description of Artificial Sequence: Synthetic oligonucleotide
agugaggaaggccagcacc

SEQ ID NO: 2692630 - RNA, 19 nt, Artificial Sequence
  Description of Artificial Sequence: Synthetic oligonucleotide
gaaaacccaagacacgacg

SEQ ID NO: 2692631 - RNA, 19 nt, Artificial Sequence
  Description of Artificial Sequence: Synthetic oligonucleotide
ugaaaauggagaagaaaga

SEQ ID NO: 2692632 - RNA, 19 nt, Artificial Sequence
  Description of Artificial Sequence: Synthetic oligonucleotide
aaauggagaagaaagagaa

SEQ ID NO: 2692633 - RNA, 19 nt, Artificial Sequence
  Description of Artificial Sequence: Synthetic oligonucleotide
aaaacccaagacacgacgc

SEQ ID NO: 2692634 - RNA, 19 nt, Artificial Sequence
  Description of Artificial Sequence: Synthetic oligonucleotide
aaacccaagacacgacgcg

SEQ ID NO: 2692635 - RNA, 19 nt, Artificial Sequence
  Description of Artificial Sequence: Synthetic oligonucleotide
gaaguacacauccagcgcc

SEQ ID NO: 2692636 - RNA, 19 nt, Artificial Sequence
  Description of Artificial Sequence: Synthetic oligonucleotide
aggcccagaagccagagac

SEQ ID NO: 2692637 - RNA, 19 nt, Artificial Sequence
  Description of Artificial Sequence: Synthetic oligonucleotide
gacacugcugaucuguggg

SEQ ID NO: 2692638 - RNA, 19 nt, Artificial Sequence
  Description of Artificial Sequence: Synthetic oligonucleotide
guuguauuccuccuggaag

SEQ ID NO: 2692639 - RNA, 19 nt, Artificial Sequence
  Description of Artificial Sequence: Synthetic oligonucleotide
auggagaaaacccaagaca

SEQ ID NO: 2692640 - RNA, 19 nt, Artificial Sequence
  Description of Artificial Sequence: Synthetic oligonucleotide
gagccaaagaccacaaugg

SEQ ID NO: 2692641 - RNA, 19 nt, Artificial Sequence
  Description of Artificial Sequence: Synthetic oligonucleotide
aaaauggagaagaaagaga

SEQ ID NO: 2692642 - RNA, 19 nt, Artificial Sequence
  Description of Artificial Sequence: Synthetic oligonucleotide
aagccagagacaccgaugu

SEQ ID NO: 2692643 - RNA, 19 nt, Artificial Sequence
  Description of Artificial Sequence: Synthetic oligonucleotide
cuuacgauccuugacacug

SEQ ID NO: 2692644 - RNA, 19 nt, Artificial Sequence
  Description of Artificial Sequence: Synthetic oligonucleotide
uccagcgccagguagagca

SEQ ID NO: 2692645 - RNA, 19 nt, Artificial Sequence
  Description of Artificial Sequence: Synthetic oligonucleotide
gaugucugacagcacagcc

SEQ ID NO: 2692646 - RNA, 19 nt, Artificial Sequence
  Description of Artificial Sequence: Synthetic oligonucleotide
gauaguguguggcugccgc

SEQ ID NO: 2692647 - RNA, 19 nt, Artificial Sequence
  Description of Artificial Sequence: Synthetic oligonucleotide
guugagguagcccucauuc

SEQ ID NO: 2692648 - RNA, 19 nt, Artificial Sequence
  Description of Artificial Sequence: Synthetic oligonucleotide
guagaugcagaacuccucc

SEQ ID NO: 2692649 - RNA, 19 nt, Artificial Sequence
  Description of Artificial Sequence: Synthetic oligonucleotide
uagcccucauucacgaugg

SEQ ID NO: 2692650 - RNA, 19 nt, Artificial Sequence
  Description of Artificial Sequence: Synthetic oligonucleotide
gggaaguacacauccagcg

SEQ ID NO: 2692651 - RNA, 19 nt, Artificial Sequence
  Description of Artificial Sequence: Synthetic oligonucleotide
gagacuugccacugguugg

SEQ ID NO: 2692652 - RNA, 19 nt, Artificial Sequence
  Description of Artificial Sequence: Synthetic oligonucleotide
uccuugacacugcugaucu

SEQ ID NO: 2692653 - RNA, 19 nt, Artificial Sequence
  Description of Artificial Sequence: Synthetic oligonucleotide
gacagcacagccuucuuac

SEQ ID NO: 2692654 - RNA, 19 nt, Artificial Sequence
  Description of Artificial Sequence: Synthetic oligonucleotide
aacccaagacacgacgcgc

SEQ ID NO: 2692655 - RNA, 19 nt, Artificial Sequence
  Description of Artificial Sequence: Synthetic oligonucleotide
gaugcagaacuccuccucc

SEQ ID NO: 2692656 - RNA, 19 nt, Artificial Sequence
  Description of Artificial Sequence: Synthetic oligonucleotide
uauuccuccuggaagguaa

SEQ ID NO: 2692657 - RNA, 19 nt, Artificial Sequence
  Description of Artificial Sequence: Synthetic oligonucleotide
cacgauggagccaaagacc

SEQ ID NO: 2692658 - RNA, 19 nt, Artificial Sequence
  Description of Artificial Sequence: Synthetic oligonucleotide
cugugggaaguacacaucc

SEQ ID NO: 2692659 - RNA, 19 nt, Artificial Sequence
  Description of Artificial Sequence: Synthetic oligonucleotide
agagacaccgaugucugac

SEQ ID NO: 2692660 - RNA, 19 nt, Artificial Sequence
  Description of Artificial Sequence: Synthetic oligonucleotide
agaugcagaacuccuccuc

SEQ ID NO: 2692661 - RNA, 19 nt, Artificial Sequence
  Description of Artificial Sequence: Synthetic oligonucleotide
cuucuuacgauccuugaca

SEQ ID NO: 2692662 - RNA, 19 nt, Artificial Sequence
  Description of Artificial Sequence: Synthetic oligonucleotide
aagugaggaaggccagcac

SEQ ID NO: 2692663 - RNA, 19 nt, Artificial Sequence
  Description of Artificial Sequence: Synthetic oligonucleotide
ugugaaaauggagaagaaa

SEQ ID NO: 2692664 - RNA, 19 nt, Artificial Sequence
  Description of Artificial Sequence: Synthetic oligonucleotide
uucuuacgauccuugacac

SEQ ID NO: 2692665 - RNA, 19 nt, Artificial Sequence
  Description of Artificial Sequence: Synthetic oligonucleotide
gaagaaagagaaggcaaug

SEQ ID NO: 2692666 - RNA, 19 nt, Artificial Sequence
  Description of Artificial Sequence: Synthetic oligonucleotide
ucauucagaggguuguccu

SEQ ID NO: 2692667 - RNA, 19 nt, Artificial Sequence
  Description of Artificial Sequence: Synthetic oligonucleotide
caguguguuguauuccucc

SEQ ID NO: 2692668 - RNA, 19 nt, Artificial Sequence
  Description of Artificial Sequence: Synthetic oligonucleotide
acgaaccagaagaaggccc

SEQ ID NO: 2692669 - RNA, 19 nt, Artificial Sequence
  Description of Artificial Sequence: Synthetic oligonucleotide
guagcccucauucacgaug

SEQ ID NO: 2692670 - RNA, 19 nt, Artificial Sequence
  Description of Artificial Sequence: Synthetic oligonucleotide
uuucgguuguagaugcaga

SEQ ID NO: 2692671 - RNA, 19 nt, Artificial Sequence
  Description of Artificial Sequence: Synthetic oligonucleotide
ugaggcggggaacagugug

SEQ ID NO: 2692672 - RNA, 19 nt, Artificial Sequence
  Description of Artificial Sequence: Synthetic oligonucleotide
cgucccuucauucagaggg

SEQ ID NO: 2692673 - RNA, 19 nt, Artificial Sequence
  Description of Artificial Sequence: Synthetic oligonucleotide
ucugcggacggccaaggcu

SEQ ID NO: 2692674 - RNA, 19 nt, Artificial Sequence
  Description of Artificial Sequence: Synthetic oligonucleotide
accgaugucugacagcaca

SEQ ID NO: 2692675 - RNA, 19 nt, Artificial Sequence
  Description of Artificial Sequence: Synthetic oligonucleotide
gacacgacgcgcaggauag

SEQ ID NO: 2692676 - RNA, 19 nt, Artificial Sequence
  Description of Artificial Sequence: Synthetic oligonucleotide
guuguagaugcagaacucc

SEQ ID NO: 2692677 - RNA, 19 nt, Artificial Sequence
  Description of Artificial Sequence: Synthetic oligonucleotide
ugacacugcugaucugugg

SEQ ID NO: 2692678 - RNA, 19 nt, Artificial Sequence
  Description of Artificial Sequence: Synthetic oligonucleotide
gaagguaagguccuugagu

SEQ ID NO: 2692679 - RNA, 19 nt, Artificial Sequence
  Description of Artificial Sequence: Synthetic oligonucleotide
gguguaagggucgaaggcg

SEQ ID NO: 2692680 - RNA, 19 nt, Artificial Sequence
  Description of Artificial Sequence: Synthetic oligonucleotide
agacuugccacugguuggc

SEQ ID NO: 2692681 - RNA, 19 nt, Artificial Sequence
  Description of Artificial Sequence: Synthetic oligonucleotide
uccuugucugaguuguuga

SEQ ID NO: 2692682 - RNA, 19 nt, Artificial Sequence
  Description of Artificial Sequence: Synthetic oligonucleotide
cccacgaaccagaagaagg

SEQ ID NO: 2692683 - RNA, 19 nt, Artificial Sequence
  Description of Artificial Sequence: Synthetic oligonucleotide
acaccgaugucugacagca

SEQ ID NO: 2692684 - RNA, 19 nt, Artificial Sequence
  Description of Artificial Sequence: Synthetic oligonucleotide
uucgguuguagaugcagaa

SEQ ID NO: 2692685 - RNA, 19 nt, Artificial Sequence
  Description of Artificial Sequence: Synthetic oligonucleotide
ggagacuugccacugguug

SEQ ID NO: 2692686 - RNA, 19 nt, Artificial Sequence
  Description of Artificial Sequence: Synthetic oligonucleotide
uccuugagucugcggacgg

SEQ ID NO: 2692687 - RNA, 19 nt, Artificial Sequence
  Description of Artificial Sequence: Synthetic oligonucleotide
uuggagacuugccacuggu

SEQ ID NO: 2692688 - RNA, 19 nt, Artificial Sequence
  Description of Artificial Sequence: Synthetic oligonucleotide
cuugccacugguuggccag

SEQ ID NO: 2692689 - RNA, 19 nt, Artificial Sequence
  Description of Artificial Sequence: Synthetic oligonucleotide
gaaacccacgaaccagaag

SEQ ID NO: 2692690 - RNA, 19 nt, Artificial Sequence
  Description of Artificial Sequence: Synthetic oligonucleotide
cagaggguuguccuggggc

SEQ ID NO: 2692691 - RNA, 19 nt, Artificial Sequence
  Description of Artificial Sequence: Synthetic oligonucleotide
guuucgguuguagaugcag

SEQ ID NO: 2692692 - RNA, 19 nt, Artificial Sequence
  Description of Artificial Sequence: Synthetic oligonucleotide
ugggguuucgguuguagau

SEQ ID NO: 2692693 - RNA, 19 nt, Artificial Sequence
  Description of Artificial Sequence: Synthetic oligonucleotide
aguguguuguauuccuccu

SEQ ID NO: 2692694 - RNA, 19 nt, Artificial Sequence
  Description of Artificial Sequence: Synthetic oligonucleotide
ccaaagaccacaauggaga

SEQ ID NO: 2692695 - RNA, 19 nt, Artificial Sequence
  Description of Artificial Sequence: Synthetic oligonucleotide
aguguguggcugccgcacc

SEQ ID NO: 2692696 - RNA, 19 nt, Artificial Sequence
  Description of Artificial Sequence: Synthetic oligonucleotide
agacaccgaugucugacag

SEQ ID NO: 2692697 - RNA, 19 nt, Artificial Sequence
  Description of Artificial Sequence: Synthetic oligonucleotide
aagguccuugagucugcgg

SEQ ID NO: 2692698 - RNA, 19 nt, Artificial Sequence
  Description of Artificial Sequence: Synthetic oligonucleotide
gagguagcccucauucacg

SEQ ID NO: 2692699 - RNA, 19 nt, Artificial Sequence
  Description of Artificial Sequence: Synthetic oligonucleotide
cccucauucacgauggagc

SEQ ID NO: 2692700 - RNA, 19 nt, Artificial Sequence
  Description of Artificial Sequence: Synthetic oligonucleotide
ucagaggguuguccugggg

SEQ ID NO: 2692701 - RNA, 19 nt, Artificial Sequence
  Description of Artificial Sequence: Synthetic oligonucleotide
uuacgauccuugacacugc

SEQ ID NO: 2692702 - RNA, 19 nt, Artificial Sequence
  Description of Artificial Sequence: Synthetic oligonucleotide
uguaagggucgaaggcgcc

SEQ ID NO: 2692703 - RNA, 19 nt, Artificial Sequence
  Description of Artificial Sequence: Synthetic oligonucleotide
ucaggcuccaugugaaaau

SEQ ID NO: 2692704 - RNA, 19 nt, Artificial Sequence
  Description of Artificial Sequence: Synthetic oligonucleotide
gaacaguguguuguauucc

SEQ ID NO: 2692705 - RNA, 19 nt, Artificial Sequence
  Description of Artificial Sequence: Synthetic oligonucleotide
agaaaacccaagacacgac

SEQ ID NO: 2692706 - RNA, 19 nt, Artificial Sequence
  Description of Artificial Sequence: Synthetic oligonucleotide
caggauaguguguggcugc

SEQ ID NO: 2692707 - RNA, 19 nt, Artificial Sequence
  Description of Artificial Sequence: Synthetic oligonucleotide
ugugcugaggcggggaaca

SEQ ID NO: 2692708 - RNA, 19 nt, Artificial Sequence
  Description of Artificial Sequence: Synthetic oligonucleotide
agaggguuguccuggggcu

SEQ ID NO: 2692709 - RNA, 19 nt, Artificial Sequence
  Description of Artificial Sequence: Synthetic oligonucleotide
acagcacagccuucuuacg

SEQ ID NO: 2692710 - RNA, 19 nt, Artificial Sequence
  Description of Artificial Sequence: Synthetic oligonucleotide
acugcugaucugugggaag

SEQ ID NO: 2692711 - RNA, 19 nt, Artificial Sequence
  Description of Artificial Sequence: Synthetic oligonucleotide
uccgucccuucauucagag

SEQ ID NO: 2692712 - RNA, 19 nt, Artificial Sequence
  Description of Artificial Sequence: Synthetic oligonucleotide
cugcggacggccaaggcug

SEQ ID NO: 2692713 - RNA, 19 nt, Artificial Sequence
  Description of Artificial Sequence: Synthetic oligonucleotide
cuuccaucguggcugcacc

SEQ ID NO: 2692714 - RNA, 19 nt, Artificial Sequence
  Description of Artificial Sequence: Synthetic oligonucleotide
acgauggagccaaagacca

SEQ ID NO: 2692715 - RNA, 19 nt, Artificial Sequence
  Description of Artificial Sequence: Synthetic oligonucleotide
ggaacaguguguuguauuc

SEQ ID NO: 2692716 - RNA, 19 nt, Artificial Sequence
  Description of Artificial Sequence: Synthetic oligonucleotide
cuugagucugcggacggcc

SEQ ID NO: 2692717 - RNA, 19 nt, Artificial Sequence
  Description of Artificial Sequence: Synthetic oligonucleotide
auccuugacacugcugauc

SEQ ID NO: 2692718 - RNA, 19 nt, Artificial Sequence
  Description of Artificial Sequence: Synthetic oligonucleotide
ggaaguacacauccagcgc

SEQ ID NO: 2692719 - RNA, 19 nt, Artificial Sequence
  Description of Artificial Sequence: Synthetic oligonucleotide
accagaagaaggcccagaa

SEQ ID NO: 2692720 - RNA, 19 nt, Artificial Sequence
  Description of Artificial Sequence: Synthetic oligonucleotide
gaagccagagacaccgaug

SEQ ID NO: 2692721 - RNA, 19 nt, Artificial Sequence
  Description of Artificial Sequence: Synthetic oligonucleotide
gcuauggcugugcugaggc

SEQ ID NO: 2692722 - RNA, 19 nt, Artificial Sequence
  Description of Artificial Sequence: Synthetic oligonucleotide
uccuggaagguaagguccu

SEQ ID NO: 2692723 - RNA, 19 nt, Artificial Sequence
  Description of Artificial Sequence: Synthetic oligonucleotide
aggauaguguguggcugcc

SEQ ID NO: 2692724 - RNA, 19 nt, Artificial Sequence
  Description of Artificial Sequence: Synthetic oligonucleotide
cauucagaggguuguccug

SEQ ID NO: 2692725 - RNA, 19 nt, Artificial Sequence
  Description of Artificial Sequence: Synthetic oligonucleotide
uugggguuucgguuguaga

SEQ ID NO: 2692726 - RNA, 19 nt, Artificial Sequence
  Description of Artificial Sequence: Synthetic oligonucleotide
uagaugcagaacuccuccu

SEQ ID NO: 2692727 - RNA, 19 nt, Artificial Sequence
  Description of Artificial Sequence: Synthetic oligonucleotide
uacgauccuugacacugcu

SEQ ID NO: 2692728 - RNA, 19 nt, Artificial Sequence
  Description of Artificial Sequence: Synthetic oligonucleotide
ucuuacgauccuugacacu

SEQ ID NO: 2692729 - RNA, 19 nt, Artificial Sequence
  Description of Artificial Sequence: Synthetic oligonucleotide
caagacacgacgcgcagga

SEQ ID NO: 2692730 - RNA, 19 nt, Artificial Sequence
  Description of Artificial Sequence: Synthetic oligonucleotide
uccuccuggaagguaaggu

SEQ ID NO: 2692731 - RNA, 19 nt, Artificial Sequence
  Description of Artificial Sequence: Synthetic oligonucleotide
uaagguccuugagucugcg

SEQ ID NO: 2692732 - RNA, 19 nt, Artificial Sequence
  Description of Artificial Sequence: Synthetic oligonucleotide
uaagggucgaaggcgcccc

SEQ ID NO: 2692733 - RNA, 19 nt, Artificial Sequence
  Description of Artificial Sequence: Synthetic oligonucleotide
auugggguuucgguuguag

SEQ ID NO: 2692734 - RNA, 19 nt, Artificial Sequence
  Description of Artificial Sequence: Synthetic oligonucleotide
aaguacacauccagcgcca

SEQ ID NO: 2692735 - RNA, 19 nt, Artificial Sequence
  Description of Artificial Sequence: Synthetic oligonucleotide
ccacgaaccagaagaaggc

SEQ ID NO: 2692736 - RNA, 19 nt, Artificial Sequence
  Description of Artificial Sequence: Synthetic oligonucleotide
ccucauucacgauggagcc

SEQ ID NO: 2692737 - RNA, 19 nt, Artificial Sequence
  Description of Artificial Sequence: Synthetic oligonucleotide
agguagcccucauucacga

SEQ ID NO: 2692738 - RNA, 19 nt, Artificial Sequence
  Description of Artificial Sequence: Synthetic oligonucleotide
guguguuguauuccuccug

SEQ ID NO: 2692739 - RNA, 19 nt, Artificial Sequence
  Description of Artificial Sequence: Synthetic oligonucleotide
ggguguaagggucgaaggc

SEQ ID NO: 2692740 - RNA, 19 nt, Artificial Sequence
  Description of Artificial Sequence: Synthetic oligonucleotide
agacacgacgcgcaggaua

SEQ ID NO: 2692741 - RNA, 19 nt, Artificial Sequence
  Description of Artificial Sequence: Synthetic oligonucleotide
uugagucugcggacggcca

SEQ ID NO: 2692742 - RNA, 19 nt, Artificial Sequence
  Description of Artificial Sequence: Synthetic oligonucleotide
ucacgccauagcugcaggc

SEQ ID NO: 2692743 - RNA, 19 nt, Artificial Sequence
  Description of Artificial Sequence: Synthetic oligonucleotide
ucgguuguagaugcagaac

SEQ ID NO: 2692744 - RNA, 19 nt, Artificial Sequence
  Description of Artificial Sequence: Synthetic oligonucleotide
cuauggcugugcugaggcg

SEQ ID NO: 2692745 - RNA, 19 nt, Artificial Sequence
  Description of Artificial Sequence: Synthetic oligonucleotide
guguaagggucgaaggcgc

SEQ ID NO: 2692746 - RNA, 19 nt, Artificial Sequence
  Description of Artificial Sequence: Synthetic oligonucleotide
ugccgcaccaggguguaag

SEQ ID NO: 2692747 - RNA, 19 nt, Artificial Sequence
  Description of Artificial Sequence: Synthetic oligonucleotide
caggguguaagggucgaag

SEQ ID NO: 2692748 - RNA, 19 nt, Artificial Sequence
  Description of Artificial Sequence: Synthetic oligonucleotide
ggaagguaagguccuugag

SEQ ID NO: 2692749 - RNA, 19 nt, Artificial Sequence
  Description of Artificial Sequence: Synthetic oligonucleotide
cacgaaccagaagaaggcc

SEQ ID NO: 2692750 - RNA, 19 nt, Artificial Sequence
  Description of Artificial Sequence: Synthetic oligonucleotide
uagcugcaggcauuggggu

SEQ ID NO: 2692751 - RNA, 19 nt, Artificial Sequence
  Description of Artificial Sequence: Synthetic oligonucleotide
cugaucugugggaaguaca

SEQ ID NO: 2692752 - RNA, 19 nt, Artificial Sequence
  Description of Artificial Sequence: Synthetic oligonucleotide
gagacaccgaugucugaca

SEQ ID NO: 2692753 - RNA, 19 nt, Artificial Sequence
  Description of Artificial Sequence: Synthetic oligonucleotide
caccaggguguaagggucg

SEQ ID NO: 2692754 - RNA, 19 nt, Artificial Sequence
  Description of Artificial Sequence: Synthetic oligonucleotide
gucacgccauagcugcagg

SEQ ID NO: 2692755 - RNA, 19 nt, Artificial Sequence
  Description of Artificial Sequence: Synthetic oligonucleotide
augcagaacuccuccuccu

SEQ ID NO: 2692756 - RNA, 19 nt, Artificial Sequence
  Description of Artificial Sequence: Synthetic oligonucleotide
agucacgccauagcugcag

SEQ ID NO: 2692757 - RNA, 19 nt, Artificial Sequence
  Description of Artificial Sequence: Synthetic oligonucleotide
aaccagaagaaggcccaga

SEQ ID NO: 2692758 - RNA, 19 nt, Artificial Sequence
  Description of Artificial Sequence: Synthetic oligonucleotide
ugagucugcggacggccaa

SEQ ID NO: 2692759 - RNA, 19 nt, Artificial Sequence
  Description of Artificial Sequence: Synthetic oligonucleotide
aaggcccagaagccagaga

SEQ ID NO: 2692760 - RNA, 19 nt, Artificial Sequence
  Description of Artificial Sequence: Synthetic oligonucleotide
uccaucguggcugcaccgc

SEQ ID NO: 2692761 - RNA, 19 nt, Artificial Sequence
  Description of Artificial Sequence: Synthetic oligonucleotide
aggcauugggguuucgguu

SEQ ID NO: 2692762 - RNA, 19 nt, Artificial Sequence
  Description of Artificial Sequence: Synthetic oligonucleotide
uaguguguggcugccgcac

SEQ ID NO: 2692763 - RNA, 19 nt, Artificial Sequence
  Description of Artificial Sequence: Synthetic oligonucleotide
cuccuugucugaguuguug

SEQ ID NO: 2692764 - RNA, 19 nt, Artificial Sequence
  Description of Artificial Sequence: Synthetic oligonucleotide
aggcuccaugugaaaaugg

SEQ ID NO: 2692765 - RNA, 19 nt, Artificial Sequence
  Description of Artificial Sequence: Synthetic oligonucleotide
agcgccagguagagcaggc

SEQ ID NO: 2692766 - RNA, 19 nt, Artificial Sequence
  Description of Artificial Sequence: Synthetic oligonucleotide
guaagggucgaaggcgccc

SEQ ID NO: 2692767 - RNA, 19 nt, Artificial Sequence
  Description of Artificial Sequence: Synthetic oligonucleotide
ggggcuauggcugugcuga

SEQ ID NO: 2692768 - RNA, 19 nt, Artificial Sequence
  Description of Artificial Sequence: Synthetic oligonucleotide
ugcagaacuccuccuccuu

SEQ ID NO: 2692769 - RNA, 19 nt, Artificial Sequence
  Description of Artificial Sequence: Synthetic oligonucleotide
caggcuccaugugaaaaug

SEQ ID NO: 2692770 - RNA, 19 nt, Artificial Sequence
  Description of Artificial Sequence: Synthetic oligonucleotide
gaucugugggaaguacaca

SEQ ID NO: 2692771 - RNA, 19 nt, Artificial Sequence
  Description of Artificial Sequence: Synthetic oligonucleotide
uggcugccgcaccagggug

SEQ ID NO: 2692772 - RNA, 19 nt, Artificial Sequence
  Description of Artificial Sequence: Synthetic oligonucleotide
ugcguccgucccuucauuc

SEQ ID NO: 2692773 - RNA, 19 nt, Artificial Sequence
  Description of Artificial Sequence: Synthetic oligonucleotide
agccagagacaccgauguc

SEQ ID NO: 2692774 - RNA, 19 nt, Artificial Sequence
  Description of Artificial Sequence: Synthetic oligonucleotide
caucguggcugcaccgcgc

SEQ ID NO: 2692775 - RNA, 19 nt, Artificial Sequence
  Description of Artificial Sequence: Synthetic oligonucleotide
guuguugagguagcccuca

SEQ ID NO: 2692776 - RNA, 19 nt, Artificial Sequence
  Description of Artificial Sequence: Synthetic oligonucleotide
acgcgcaggauagugugug

SEQ ID NO: 2692777 - RNA, 19 nt, Artificial Sequence
  Description of Artificial Sequence: Synthetic oligonucleotide
cagcacagccuucuuacga

SEQ ID NO: 2692778 - RNA, 19 nt, Artificial Sequence
  Description of Artificial Sequence: Synthetic oligonucleotide
aguacacauccagcgccag

SEQ ID NO: 2692779 - RNA, 19 nt, Artificial Sequence
  Description of Artificial Sequence: Synthetic oligonucleotide
ccuucuuacgauccuugac

SEQ ID NO: 2692780 - RNA, 19 nt, Artificial Sequence
  Description of Artificial Sequence: Synthetic oligonucleotide
ccagagacaccgaugucug

SEQ ID NO: 2692781 - RNA, 19 nt, Artificial Sequence
  Description of Artificial Sequence: Synthetic oligonucleotide
acccacgaaccagaagaag

SEQ ID NO: 2692782 - RNA, 19 nt, Artificial Sequence
  Description of Artificial Sequence: Synthetic oligonucleotide
aacccacgaaccagaagaa

SEQ ID NO: 2692783 - RNA, 19 nt, Artificial Sequence
  Description of Artificial Sequence: Synthetic oligonucleotide
ccuugucugaguuguugag

SEQ ID NO: 2692784 - RNA, 19 nt, Artificial Sequence
  Description of Artificial Sequence: Synthetic oligonucleotide
acgccauagcugcaggcau

SEQ ID NO: 2692785 - RNA, 19 nt, Artificial Sequence
  Description of Artificial Sequence: Synthetic oligonucleotide
cuuugcccgcuccguacgc

SEQ ID NO: 2692786 - RNA, 19 nt, Artificial Sequence
  Description of Artificial Sequence: Synthetic oligonucleotide
ggccaggaagcagaaaccc

SEQ ID NO: 2692787 - RNA, 19 nt, Artificial Sequence
  Description of Artificial Sequence: Synthetic oligonucleotide
gcuuugcccgcuccguacg

SEQ ID NO: 2692788 - RNA, 19 nt, Artificial Sequence
  Description of Artificial Sequence: Synthetic oligonucleotide
gggguuucgguuguagaug

SEQ ID NO: 2692789 - RNA, 19 nt, Artificial Sequence
  Description of Artificial Sequence: Synthetic oligonucleotide
ggggcuuggagacuugcca

SEQ ID NO: 2692790 - RNA, 19 nt, Artificial Sequence
  Description of Artificial Sequence: Synthetic oligonucleotide
cacgacgcgcaggauagug

SEQ ID NO: 2692791 - RNA, 19 nt, Artificial Sequence
  Description of Artificial Sequence: Synthetic oligonucleotide
cauccagcgccagguagag

SEQ ID NO: 2692792 - RNA, 19 nt, Artificial Sequence
  Description of Artificial Sequence: Synthetic oligonucleotide
gagucugcggacggccaag

SEQ ID NO: 2692793 - RNA, 19 nt, Artificial Sequence
  Description of Artificial Sequence: Synthetic oligonucleotide
gcugaggcggggaacagug

SEQ ID NO: 2692794 - RNA, 19 nt, Artificial Sequence
  Description of Artificial Sequence: Synthetic oligonucleotide
agucugcggacggccaagg

SEQ ID NO: 2692795 - RNA, 19 nt, Artificial Sequence
  Description of Artificial Sequence: Synthetic oligonucleotide
aggggcuauggcugugcug

SEQ ID NO: 2692796 - RNA, 19 nt, Artificial Sequence
  Description of Artificial Sequence: Synthetic oligonucleotide
uggagccaaagaccacaau

SEQ ID NO: 2692797 - RNA, 19 nt, Artificial Sequence
  Description of Artificial Sequence: Synthetic oligonucleotide
gggcuuggagacuugccac

SEQ ID NO: 2692798 - RNA, 19 nt, Artificial Sequence
  Description of Artificial Sequence: Synthetic oligonucleotide
cagucaggcuccaugugaa

SEQ ID NO: 2692799 - RNA, 19 nt, Artificial Sequence
  Description of Artificial Sequence: Synthetic oligonucleotide
uuugcccgcuccguacgca

SEQ ID NO: 2692800 - RNA, 19 nt, Artificial Sequence
  Description of Artificial Sequence: Synthetic oligonucleotide
gaacuccuccuccuugucu

SEQ ID NO: 2692801 - RNA, 19 nt, Artificial Sequence
  Description of Artificial Sequence: Synthetic oligonucleotide
acggccaaggcugcaguca

SEQ ID NO: 2692802 - RNA, 19 nt, Artificial Sequence
  Description of Artificial Sequence: Synthetic oligonucleotide
guggcugcaccgcgcggcg

SEQ ID NO: 2692803 - RNA, 19 nt, Artificial Sequence
  Description of Artificial Sequence: Synthetic oligonucleotide
uugcccgcuccguacgcac

SEQ ID NO: 2692804 - RNA, 19 nt, Artificial Sequence
  Description of Artificial Sequence: Synthetic oligonucleotide
gguuguagaugcagaacuc

SEQ ID NO: 2692805 - RNA, 19 nt, Artificial Sequence
  Description of Artificial Sequence: Synthetic oligonucleotide
ucguggcugcaccgcgcgg

SEQ ID NO: 2692806 - RNA, 19 nt, Artificial Sequence
  Description of Artificial Sequence: Synthetic oligonucleotide
uugccacugguuggccagg

SEQ ID NO: 2692807 - RNA, 19 nt, Artificial Sequence
  Description of Artificial Sequence: Synthetic oligonucleotide
uuguugagguagcccucau

SEQ ID NO: 2692808 - RNA, 19 nt, Artificial Sequence
  Description of Artificial Sequence: Synthetic oligonucleotide
ccagaagaaggcccagaag

SEQ ID NO: 2692809 - RNA, 19 nt, Artificial Sequence
  Description of Artificial Sequence: Synthetic oligonucleotide
gacggccaaggcugcaguc

SEQ ID NO: 2692810 - RNA, 19 nt, Artificial Sequence
  Description of Artificial Sequence: Synthetic oligonucleotide
ugcggacggccaaggcugc

SEQ ID NO: 2692811 - RNA, 19 nt, Artificial Sequence
  Description of Artificial Sequence: Synthetic oligonucleotide
cccacagucacgccauagc

SEQ ID NO: 2692812 - RNA, 19 nt, Artificial Sequence
  Description of Artificial Sequence: Synthetic oligonucleotide
cuucauucagaggguuguc

SEQ ID NO: 2692813 - RNA, 19 nt, Artificial Sequence
  Description of Artificial Sequence: Synthetic oligonucleotide
ugcccgcuccguacgcacc

SEQ ID NO: 2692814 - RNA, 19 nt, Artificial Sequence
  Description of Artificial Sequence: Synthetic oligonucleotide
acccaagacacgacgcgca

SEQ ID NO: 2692815 - RNA, 19 nt, Artificial Sequence
  Description of Artificial Sequence: Synthetic oligonucleotide
gcaauggcggcccgggcug

SEQ ID NO: 2692816 - RNA, 19 nt, Artificial Sequence
  Description of Artificial Sequence: Synthetic oligonucleotide
agucaggcuccaugugaaa

SEQ ID NO: 2692817 - RNA, 19 nt, Artificial Sequence
  Description of Artificial Sequence: Synthetic oligonucleotide
cacgccauagcugcaggca

SEQ ID NO: 2692818 - RNA, 19 nt, Artificial Sequence
  Description of Artificial Sequence: Synthetic oligonucleotide
ggcuccaugugaaaaugga

SEQ ID NO: 2692819 - RNA, 19 nt, Artificial Sequence
  Description of Artificial Sequence: Synthetic oligonucleotide
cuggggcuuggagacuugc

SEQ ID NO: 2692820 - RNA, 19 nt, Artificial Sequence
  Description of Artificial Sequence: Synthetic oligonucleotide
agaaacccacgaaccagaa

SEQ ID NO: 2692821 - RNA, 19 nt, Artificial Sequence
  Description of Artificial Sequence: Synthetic oligonucleotide
uccuggggcuuggagacuu

SEQ ID NO: 2692822 - RNA, 19 nt, Artificial Sequence
  Description of Artificial Sequence: Synthetic oligonucleotide
ggcaagugaggaaggccag

SEQ ID NO: 2692823 - RNA, 19 nt, Artificial Sequence
  Description of Artificial Sequence: Synthetic oligonucleotide
cagguagagcaggcaagug

SEQ ID NO: 2692824 - RNA, 19 nt, Artificial Sequence
  Description of Artificial Sequence: Synthetic oligonucleotide
ggcuuugcccgcuccguac

SEQ ID NO: 2692825 - RNA, 19 nt, Artificial Sequence
  Description of Artificial Sequence: Synthetic oligonucleotide
ggauaguguguggcugccg

SEQ ID NO: 2692826 - RNA, 19 nt, Artificial Sequence
  Description of Artificial Sequence: Synthetic oligonucleotide
auccagcgccagguagagc

SEQ ID NO: 2692827 - RNA, 19 nt, Artificial Sequence
  Description of Artificial Sequence: Synthetic oligonucleotide
caggcauugggguuucggu

SEQ ID NO: 2692828 - RNA, 19 nt, Artificial Sequence
  Description of Artificial Sequence: Synthetic oligonucleotide
ugcugaucugugggaagua

SEQ ID NO: 2692829 - RNA, 19 nt, Artificial Sequence
  Description of Artificial Sequence: Synthetic oligonucleotide
cugcagucaggcuccaugu

SEQ ID NO: 2692830 - RNA, 19 nt, Artificial Sequence
  Description of Artificial Sequence: Synthetic oligonucleotide
gucugcggacggccaaggc

SEQ ID NO: 2692831 - RNA, 19 nt, Artificial Sequence
  Description of Artificial Sequence: Synthetic oligonucleotide
gcccucauucacgauggag

SEQ ID NO: 2692832 - RNA, 19 nt, Artificial Sequence
  Description of Artificial Sequence: Synthetic oligonucleotide
ggcuauggcugugcugagg

SEQ ID NO: 2692833 - RNA, 19 nt, Artificial Sequence
  Description of Artificial Sequence: Synthetic oligonucleotide
acgauccuugacacugcug

SEQ ID NO: 2692834 - RNA, 19 nt, Artificial Sequence
  Description of Artificial Sequence: Synthetic oligonucleotide
gcugaucugugggaaguac

SEQ ID NO: 2692835 - RNA, 19 nt, Artificial Sequence
  Description of Artificial Sequence: Synthetic oligonucleotide
gccauagcugcaggcauug

SEQ ID NO: 2692836 - RNA, 19 nt, Artificial Sequence
  Description of Artificial Sequence: Synthetic oligonucleotide
ccaucguggcugcaccgcg

SEQ ID NO: 2692837 - RNA, 19 nt, Artificial Sequence
  Description of Artificial Sequence: Synthetic oligonucleotide
acgacgcgcaggauagugu

SEQ ID NO: 2692838 - RNA, 19 nt, Artificial Sequence
  Description of Artificial Sequence: Synthetic oligonucleotide
cccuucauucagaggguug

SEQ ID NO: 2692839 - RNA, 19 nt, Artificial Sequence
  Description of Artificial Sequence: Synthetic oligonucleotide
auggagccaaagaccacaa

SEQ ID NO: 2692840 - RNA, 19 nt, Artificial Sequence
  Description of Artificial Sequence: Synthetic oligonucleotide
agaaggcccagaagccaga

SEQ ID NO: 2692841 - RNA, 19 nt, Artificial Sequence
  Description of Artificial Sequence: Synthetic oligonucleotide
gccgcaccaggguguaagg

SEQ ID NO: 2692842 - RNA, 19 nt, Artificial Sequence
  Description of Artificial Sequence: Synthetic oligonucleotide
cucauucacgauggagcca

SEQ ID NO: 2692843 - RNA, 19 nt, Artificial Sequence
  Description of Artificial Sequence: Synthetic oligonucleotide
aagacacgacgcgcaggau

SEQ ID NO: 2692844 - RNA, 19 nt, Artificial Sequence
  Description of Artificial Sequence: Synthetic oligonucleotide
accaggguguaagggucga

SEQ ID NO: 2692845 - RNA, 19 nt, Artificial Sequence
  Description of Artificial Sequence: Synthetic oligonucleotide
gcaagugaggaaggccagc

SEQ ID NO: 2692846 - RNA, 19 nt, Artificial Sequence
  Description of Artificial Sequence: Synthetic oligonucleotide
ugccacugguuggccagga

SEQ ID NO: 2692847 - RNA, 19 nt, Artificial Sequence
  Description of Artificial Sequence: Synthetic oligonucleotide
cgaaccagaagaaggccca

SEQ ID NO: 2692848 - RNA, 19 nt, Artificial Sequence
  Description of Artificial Sequence: Synthetic oligonucleotide
gcgcaggauaguguguggc

SEQ ID NO: 2692849 - RNA, 19 nt, Artificial Sequence
  Description of Artificial Sequence: Synthetic oligonucleotide
ccaagacacgacgcgcagg

SEQ ID NO: 2692850 - RNA, 19 nt, Artificial Sequence
  Description of Artificial Sequence: Synthetic oligonucleotide
cacugcugaucugugggaa

SEQ ID NO: 2692851 - RNA, 19 nt, Artificial Sequence
  Description of Artificial Sequence: Synthetic oligonucleotide
ggcugcaccgcgcggcgcc

SEQ ID NO: 2692852 - RNA, 19 nt, Artificial Sequence
  Description of Artificial Sequence: Synthetic oligonucleotide
cgacgcgcaggauagugug

SEQ ID NO: 2692853 - RNA, 19 nt, Artificial Sequence
  Description of Artificial Sequence: Synthetic oligonucleotide
gccuucuuacgauccuuga

SEQ ID NO: 2692854 - RNA, 19 nt, Artificial Sequence
  Description of Artificial Sequence: Synthetic oligonucleotide
caccgaugucugacagcac

SEQ ID NO: 2692855 - RNA, 19 nt, Artificial Sequence
  Description of Artificial Sequence: Synthetic oligonucleotide
gcacagccuucuuacgauc

SEQ ID NO: 2692856 - RNA, 19 nt, Artificial Sequence
  Description of Artificial Sequence: Synthetic oligonucleotide
cguccgucccuucauucag

SEQ ID NO: 2692857 - RNA, 19 nt, Artificial Sequence
  Description of Artificial Sequence: Synthetic oligonucleotide
cagagacaccgaugucuga

SEQ ID NO: 2692858 - RNA, 19 nt, Artificial Sequence
  Description of Artificial Sequence: Synthetic oligonucleotide
cccaagacacgacgcgcag

SEQ ID NO: 2692859 - RNA, 19 nt, Artificial Sequence
  Description of Artificial Sequence: Synthetic oligonucleotide
cugcccuucaggggcuaug

SEQ ID NO: 2692860 - RNA, 19 nt, Artificial Sequence
  Description of Artificial Sequence: Synthetic oligonucleotide
gaggcggggaacagugugu

SEQ ID NO: 2692861 - RNA, 19 nt, Artificial Sequence
  Description of Artificial Sequence: Synthetic oligonucleotide
aggcggggaacaguguguu

SEQ ID NO: 2692862 - RNA, 19 nt, Artificial Sequence
  Description of Artificial Sequence: Synthetic oligonucleotide
ccuuccaucguggcugcac

SEQ ID NO: 2692863 - RNA, 19 nt, Artificial Sequence
  Description of Artificial Sequence: Synthetic oligonucleotide
gcguccgucccuucauuca

SEQ ID NO: 2692864 - RNA, 19 nt, Artificial Sequence
  Description of Artificial Sequence: Synthetic oligonucleotide
cagaagccagagacaccga

SEQ ID NO: 2692865 - RNA, 19 nt, Artificial Sequence
  Description of Artificial Sequence: Synthetic oligonucleotide
gggaacaguguguuguauu

SEQ ID NO: 2692866 - RNA, 19 nt, Artificial Sequence
  Description of Artificial Sequence: Synthetic oligonucleotide
ggcuuggagacuugccacu

SEQ ID NO: 2692867 - RNA, 19 nt, Artificial Sequence
  Description of Artificial Sequence: Synthetic oligonucleotide
gcccgcuccguacgcaccc

SEQ ID NO: 2692868 - RNA, 19 nt, Artificial Sequence
  Description of Artificial Sequence: Synthetic oligonucleotide
ccgucccuucauucagagg

SEQ ID NO: 2692869 - RNA, 19 nt, Artificial Sequence
  Description of Artificial Sequence: Synthetic oligonucleotide
gcggggaacaguguguugu

SEQ ID NO: 2692870 - RNA, 19 nt, Artificial Sequence
  Description of Artificial Sequence: Synthetic oligonucleotide
ggcggggaacaguguguug

SEQ ID NO: 2692871 - RNA, 19 nt, Artificial Sequence
  Description of Artificial Sequence: Synthetic oligonucleotide
guccgucccuucauucaga

SEQ ID NO: 2692872 - RNA, 19 nt, Artificial Sequence
  Description of Artificial Sequence: Synthetic oligonucleotide
cgaugucugacagcacagc

SEQ ID NO: 2692873 - RNA, 19 nt, Artificial Sequence
  Description of Artificial Sequence: Synthetic oligonucleotide
gggcuauggcugugcugag

SEQ ID NO: 2692874 - RNA, 19 nt, Artificial Sequence
  Description of Artificial Sequence: Synthetic oligonucleotide
ccgcaccaggguguaaggg

SEQ ID NO: 2692875 - RNA, 19 nt, Artificial Sequence
  Description of Artificial Sequence: Synthetic oligonucleotide
cucggcgcgcaccgccgac

SEQ ID NO: 2692876 - RNA, 19 nt, Artificial Sequence
  Description of Artificial Sequence: Synthetic oligonucleotide
ccuucauucagaggguugu

SEQ ID NO: 2692877 - RNA, 19 nt, Artificial Sequence
  Description of Artificial Sequence: Synthetic oligonucleotide
ccuugagucugcggacggc

SEQ ID NO: 2692878 - RNA, 19 nt, Artificial Sequence
  Description of Artificial Sequence: Synthetic oligonucleotide
cagucacgccauagcugca

SEQ ID NO: 2692879 - RNA, 19 nt, Artificial Sequence
  Description of Artificial Sequence: Synthetic oligonucleotide
ggcugcguccgucccuuca

SEQ ID NO: 2692880 - RNA, 19 nt, Artificial Sequence
  Description of Artificial Sequence: Synthetic oligonucleotide
gcccuucaggggcuauggc

SEQ ID NO: 2692881 - RNA, 19 nt, Artificial Sequence
  Description of Artificial Sequence: Synthetic oligonucleotide
gacgcgcaggauagugugu

SEQ ID NO: 2692882 - RNA, 19 nt, Artificial Sequence
  Description of Artificial Sequence: Synthetic oligonucleotide
cgcgcaggauagugugugg

SEQ ID NO: 2692883 - RNA, 19 nt, Artificial Sequence
  Description of Artificial Sequence: Synthetic oligonucleotide
uggcugcaccgcgcggcgc

SEQ ID NO: 2692884 - RNA, 19 nt, Artificial Sequence
  Description of Artificial Sequence: Synthetic oligonucleotide
gucccuucauucagagggu

SEQ ID NO: 2692885 - RNA, 19 nt, Artificial Sequence
  Description of Artificial Sequence: Synthetic oligonucleotide
cugcaggcauugggguuuc

SEQ ID NO: 2692886 - RNA, 19 nt, Artificial Sequence
  Description of Artificial Sequence: Synthetic oligonucleotide
cauucacgauggagccaaa

SEQ ID NO: 2692887 - RNA, 19 nt, Artificial Sequence
  Description of Artificial Sequence: Synthetic oligonucleotide
gguuucgguuguagaugca

SEQ ID NO: 2692888 - RNA, 19 nt, Artificial Sequence
  Description of Artificial Sequence: Synthetic oligonucleotide
ccccacagucacgccauag

SEQ ID NO: 2692889 - RNA, 19 nt, Artificial Sequence
  Description of Artificial Sequence: Synthetic oligonucleotide
acacgacgcgcaggauagu

SEQ ID NO: 2692890 - RNA, 19 nt, Artificial Sequence
  Description of Artificial Sequence: Synthetic oligonucleotide
cugaggcggggaacagugu

SEQ ID NO: 2692891 - RNA, 19 nt, Artificial Sequence
  Description of Artificial Sequence: Synthetic oligonucleotide
ccgcucggcgcgcaccgcc

SEQ ID NO: 2692892 - RNA, 19 nt, Artificial Sequence
  Description of Artificial Sequence: Synthetic oligonucleotide
gcccgggcugcguccgucc

SEQ ID NO: 2692893 - RNA, 19 nt, Artificial Sequence
  Description of Artificial Sequence: Synthetic oligonucleotide
gcugcaggcauugggguuu

SEQ ID NO: 2692894 - RNA, 19 nt, Artificial Sequence
  Description of Artificial Sequence: Synthetic oligonucleotide
cugcaccgcgcggcgcccc

SEQ ID NO: 2692895 - RNA, 19 nt, Artificial Sequence
  Description of Artificial Sequence: Synthetic oligonucleotide
ggacggccaaggcugcagu

SEQ ID NO: 2692896 - RNA, 19 nt, Artificial Sequence
  Description of Artificial Sequence: Synthetic oligonucleotide
gaggguuguccuggggcuu

SEQ ID NO: 2692897 - RNA, 19 nt, Artificial Sequence
  Description of Artificial Sequence: Synthetic oligonucleotide
cgcaccaggguguaagggu

SEQ ID NO: 2692898 - RNA, 19 nt, Artificial Sequence
  Description of Artificial Sequence: Synthetic oligonucleotide
gcugcguccgucccuucau

SEQ ID NO: 2692899 - RNA, 19 nt, Artificial Sequence
  Description of Artificial Sequence: Synthetic oligonucleotide
cugacagcacagccuucuu

SEQ ID NO: 2692900 - RNA, 19 nt, Artificial Sequence
  Description of Artificial Sequence: Synthetic oligonucleotide
cggacggccaaggcugcag

SEQ ID NO: 2692901 - RNA, 19 nt, Artificial Sequence
  Description of Artificial Sequence: Synthetic oligonucleotide
gguagcccucauucacgau

SEQ ID NO: 2692902 - RNA, 19 nt, Artificial Sequence
  Description of Artificial Sequence: Synthetic oligonucleotide
cauugggguuucgguugua

SEQ ID NO: 2692903 - RNA, 19 nt, Artificial Sequence
  Description of Artificial Sequence: Synthetic oligonucleotide
cgcaggauaguguguggcu

SEQ ID NO: 2692904 - RNA, 19 nt, Artificial Sequence
  Description of Artificial Sequence: Synthetic oligonucleotide
gcugcaccgcgcggcgccc

SEQ ID NO: 2692905 - RNA, 19 nt, Artificial Sequence
  Description of Artificial Sequence: Synthetic oligonucleotide
ccccggcuuugcccgcucc

SEQ ID NO: 2692906 - RNA, 19 nt, Artificial Sequence
  Description of Artificial Sequence: Synthetic oligonucleotide
gcgccagguagagcaggca

SEQ ID NO: 2692907 - RNA, 19 nt, Artificial Sequence
  Description of Artificial Sequence: Synthetic oligonucleotide
cccgcuccguacgcacccc

SEQ ID NO: 2692908 - RNA, 19 nt, Artificial Sequence
  Description of Artificial Sequence: Synthetic oligonucleotide
cugcguccgucccuucauu

SEQ ID NO: 2692909 - RNA, 19 nt, Artificial Sequence
  Description of Artificial Sequence: Synthetic oligonucleotide
gcugccgcaccagggugua

SEQ ID NO: 2692910 - RNA, 19 nt, Artificial Sequence
  Description of Artificial Sequence: Synthetic oligonucleotide
ccaaggcugcagucaggcu

SEQ ID NO: 2692911 - RNA, 19 nt, Artificial Sequence
  Description of Artificial Sequence: Synthetic oligonucleotide
guccuggggcuuggagacu

SEQ ID NO: 2692912 - RNA, 19 nt, Artificial Sequence
  Description of Artificial Sequence: Synthetic oligonucleotide
ggcccgggcugcguccguc

SEQ ID NO: 2692913 - RNA, 19 nt, Artificial Sequence
  Description of Artificial Sequence: Synthetic oligonucleotide
gcggacggccaaggcugca

SEQ ID NO: 2692914 - RNA, 19 nt, Artificial Sequence
  Description of Artificial Sequence: Synthetic oligonucleotide
ccaggguguaagggucgaa

SEQ ID NO: 2692915 - RNA, 19 nt, Artificial Sequence
  Description of Artificial Sequence: Synthetic oligonucleotide
gggcugcguccgucccuuc

SEQ ID NO: 2692916 - RNA, 19 nt, Artificial Sequence
  Description of Artificial Sequence: Synthetic oligonucleotide
cugccgcaccaggguguaa

SEQ ID NO: 2692917 - RNA, 19 nt, Artificial Sequence
  Description of Artificial Sequence: Synthetic oligonucleotide
cccgcucggcgcgcaccgc

SEQ ID NO: 2692918 - RNA, 19 nt, Artificial Sequence
  Description of Artificial Sequence: Synthetic oligonucleotide
cggcuuugcccgcuccgua

SEQ ID NO: 2692919 - RNA, 19 nt, Artificial Sequence
  Description of Artificial Sequence: Synthetic oligonucleotide
ccuggaagguaagguccuu

SEQ ID NO: 2692920 - RNA, 19 nt, Artificial Sequence
  Description of Artificial Sequence: Synthetic oligonucleotide
ccgggcugcguccgucccu

SEQ ID NO: 2692921 - RNA, 19 nt, Artificial Sequence
  Description of Artificial Sequence: Synthetic oligonucleotide
ccugcccuucaggggcuau

SEQ ID NO: 2692922 - RNA, 19 nt, Artificial Sequence
  Description of Artificial Sequence: Synthetic oligonucleotide
cgggcugcguccgucccuu

SEQ ID NO: 2692923 - RNA, 19 nt, Artificial Sequence
  Description of Artificial Sequence: Synthetic oligonucleotide
aaugcuacaucucacugcc

SEQ ID NO: 2692924 - RNA, 19 nt, Artificial Sequence
  Description of Artificial Sequence: Synthetic oligonucleotide
aagaccaaauauuauguac

SEQ ID NO: 2692925 - RNA, 19 nt, Artificial Sequence
  Description of Artificial Sequence: Synthetic oligonucleotide
acaacuacauagcauagcc

SEQ ID NO: 2692926 - RNA, 19 nt, Artificial Sequence
  Description of Artificial Sequence: Synthetic oligonucleotide
aacuacauagcauagccag

SEQ ID NO: 2692927 - RNA, 19 nt, Artificial Sequence
  Description of Artificial Sequence: Synthetic oligonucleotide
aaaccagugacuucacugc

SEQ ID NO: 2692928 - RNA, 19 nt, Artificial Sequence
  Description of Artificial Sequence: Synthetic oligonucleotide
aaaugcuacaucucacugc

SEQ ID NO: 2692929 - RNA, 19 nt, Artificial Sequence
  Description of Artificial Sequence: Synthetic oligonucleotide
gaaagcuuggggcagacgg

SEQ ID NO: 2692930 - RNA, 19 nt, Artificial Sequence
  Description of Artificial Sequence: Synthetic oligonucleotide
aaaauaaugguccccauua

SEQ ID NO: 2692931 - RNA, 19 nt, Artificial Sequence
  Description of Artificial Sequence: Synthetic oligonucleotide
aaauauuauguacagguua

SEQ ID NO: 2692932 - RNA, 19 nt, Artificial Sequence
  Description of Artificial Sequence: Synthetic oligonucleotide
uucuccuuaaggcagaaug

SEQ ID NO: 2692933 - RNA, 19 nt, Artificial Sequence
  Description of Artificial Sequence: Synthetic oligonucleotide
acugggaggaaugaaaugc

SEQ ID NO: 2692934 - RNA, 19 nt, Artificial Sequence
  Description of Artificial Sequence: Synthetic oligonucleotide
acuggggacaacuacauag

SEQ ID NO: 2692935 - RNA, 19 nt, Artificial Sequence
  Description of Artificial Sequence: Synthetic oligonucleotide
caaagcuaggcacauaugg

SEQ ID NO: 2692936 - RNA, 19 nt, Artificial Sequence
  Description of Artificial Sequence: Synthetic oligonucleotide
aaaagaccaaauauuaugu

SEQ ID NO: 2692937 - RNA, 19 nt, Artificial Sequence
  Description of Artificial Sequence: Synthetic oligonucleotide
uagacugccccaaauaccc

SEQ ID NO: 2692938 - RNA, 19 nt, Artificial Sequence
  Description of Artificial Sequence: Synthetic oligonucleotide
aaacaagcucugcacauag

SEQ ID NO: 2692939 - RNA, 19 nt, Artificial Sequence
  Description of Artificial Sequence: Synthetic oligonucleotide
cauagccagacuuugaaac

SEQ ID NO: 2692940 - RNA, 19 nt, Artificial Sequence
  Description of Artificial Sequence: Synthetic oligonucleotide
aaagagggguagugcaagc

SEQ ID NO: 2692941 - RNA, 19 nt, Artificial Sequence
  Description of Artificial Sequence: Synthetic oligonucleotide
agggcaaccaaacugggag

SEQ ID NO: 2692942 - RNA, 19 nt, Artificial Sequence
  Description of Artificial Sequence: Synthetic oligonucleotide
ugauugagcaagacaaggc

SEQ ID NO: 2692943 - RNA, 19 nt, Artificial Sequence
  Description of Artificial Sequence: Synthetic oligonucleotide
auaaugguccccauuauuc

SEQ ID NO: 2692944 - RNA, 19 nt, Artificial Sequence
  Description of Artificial Sequence: Synthetic oligonucleotide
aauauuauguacagguuaa

SEQ ID NO: 2692945 - RNA, 19 nt, Artificial Sequence
  Description of Artificial Sequence: Synthetic oligonucleotide
ugcuacaucucacugcccc

SEQ ID NO: 2692946 - RNA, 19 nt, Artificial Sequence
  Description of Artificial Sequence: Synthetic oligonucleotide
auuauucuccuuaaggcag

SEQ ID NO: 2692947 - RNA, 19 nt, Artificial Sequence
  Description of Artificial Sequence: Synthetic oligonucleotide
uauggaagagcccagcuuu

SEQ ID NO: 2692948 - RNA, 19 nt, Artificial Sequence
  Description of Artificial Sequence: Synthetic oligonucleotide
cauagcucuggacacagcc

SEQ ID NO: 2692949 - RNA, 19 nt, Artificial Sequence
  Description of Artificial Sequence: Synthetic oligonucleotide
uagaaagagggguagugca

SEQ ID NO: 2692950 - RNA, 19 nt, Artificial Sequence
  Description of Artificial Sequence: Synthetic oligonucleotide
ugaaacacagagacagggc

SEQ ID NO: 2692951 - RNA, 19 nt, Artificial Sequence
  Description of Artificial Sequence: Synthetic oligonucleotide
aggcacauauggaagagcc

SEQ ID NO: 2692952 - RNA, 19 nt, Artificial Sequence
  Description of Artificial Sequence: Synthetic oligonucleotide
aauaaugguccccauuauu

SEQ ID NO: 2692953 - RNA, 19 nt, Artificial Sequence
  Description of Artificial Sequence: Synthetic oligonucleotide
accucauagcaccuuggcc

SEQ ID NO: 2692954 - RNA, 19 nt, Artificial Sequence
  Description of Artificial Sequence: Synthetic oligonucleotide
cucugauugagcaagacaa

SEQ ID NO: 2692955 - RNA, 19 nt, Artificial Sequence
  Description of Artificial Sequence: Synthetic oligonucleotide
aagagggguagugcaagcc

SEQ ID NO: 2692956 - RNA, 19 nt, Artificial Sequence
  Description of Artificial Sequence: Synthetic oligonucleotide
ucugauugagcaagacaag

SEQ ID NO: 2692957 - RNA, 19 nt, Artificial Sequence
  Description of Artificial Sequence: Synthetic oligonucleotide
agaccugcagcucauagga

SEQ ID NO: 2692958 - RNA, 19 nt, Artificial Sequence
  Description of Artificial Sequence: Synthetic oligonucleotide
cauaggaaccccaggaaac

SEQ ID NO: 2692959 - RNA, 19 nt, Artificial Sequence
  Description of Artificial Sequence: Synthetic oligonucleotide
uuccuggaaagcuuggggc

SEQ ID NO: 2692960 - RNA, 19 nt, Artificial Sequence
  Description of Artificial Sequence: Synthetic oligonucleotide
augagacaccuguagaaag

SEQ ID NO: 2692961 - RNA, 19 nt, Artificial Sequence
  Description of Artificial Sequence: Synthetic oligonucleotide
augggguggaccaugagac

SEQ ID NO: 2692962 - RNA, 19 nt, Artificial Sequence
  Description of Artificial Sequence: Synthetic oligonucleotide
ugagacaccuguagaaaga

SEQ ID NO: 2692963 - RNA, 19 nt, Artificial Sequence
  Description of Artificial Sequence: Synthetic oligonucleotide
accccaggaaaccagugac

SEQ ID NO: 2692964 - RNA, 19 nt, Artificial Sequence
  Description of Artificial Sequence: Synthetic oligonucleotide
uguagaaagagggguagug

SEQ ID NO: 2692965 - RNA, 19 nt, Artificial Sequence
  Description of Artificial Sequence: Synthetic oligonucleotide
aaagaccaaauauuaugua

SEQ ID NO: 2692966 - RNA, 19 nt, Artificial Sequence
  Description of Artificial Sequence: Synthetic oligonucleotide
cugauugagcaagacaagg

SEQ ID NO: 2692967 - RNA, 19 nt, Artificial Sequence
  Description of Artificial Sequence: Synthetic oligonucleotide
uggaaacaagcucugcaca

SEQ ID NO: 2692968 - RNA, 19 nt, Artificial Sequence
  Description of Artificial Sequence: Synthetic oligonucleotide
uugagcaagacaaggccac

SEQ ID NO: 2692969 - RNA, 19 nt, Artificial Sequence
  Description of Artificial Sequence: Synthetic oligonucleotide
cuagacugccccaaauacc

SEQ ID NO: 2692970 - RNA, 19 nt, Artificial Sequence
  Description of Artificial Sequence: Synthetic oligonucleotide
uaaggcagaaugcccagac

SEQ ID NO: 2692971 - RNA, 19 nt, Artificial Sequence
  Description of Artificial Sequence: Synthetic oligonucleotide
ccauuauucuccuuaaggc

SEQ ID NO: 2692972 - RNA, 19 nt, Artificial Sequence
  Description of Artificial Sequence: Synthetic oligonucleotide
agcaagacaaggccacugg

SEQ ID NO: 2692973 - RNA, 19 nt, Artificial Sequence
  Description of Artificial Sequence: Synthetic oligonucleotide
guuccuggaaagcuugggg

SEQ ID NO: 2692974 - RNA, 19 nt, Artificial Sequence
  Description of Artificial Sequence: Synthetic oligonucleotide
aacugggaggaaugaaaug

SEQ ID NO: 2692975 - RNA, 19 nt, Artificial Sequence
  Description of Artificial Sequence: Synthetic oligonucleotide
uccuuaaggcagaaugccc

SEQ ID NO: 2692976 - RNA, 19 nt, Artificial Sequence
  Description of Artificial Sequence: Synthetic oligonucleotide
ucaagguugggcuuggguu

SEQ ID NO: 2692977 - RNA, 19 nt, Artificial Sequence
  Description of Artificial Sequence: Synthetic oligonucleotide
aaauaaugguccccauuau

SEQ ID NO: 2692978 - RNA, 19 nt, Artificial Sequence
  Description of Artificial Sequence: Synthetic oligonucleotide
agaccaaauauuauguaca

SEQ ID NO: 2692979 - RNA, 19 nt, Artificial Sequence
  Description of Artificial Sequence: Synthetic oligonucleotide
ugcacauagcucuggacac

SEQ ID NO: 2692980 - RNA, 19 nt, Artificial Sequence
  Description of Artificial Sequence: Synthetic oligonucleotide
cuggaaacaagcucugcac

SEQ ID NO: 2692981 - RNA, 19 nt, Artificial Sequence
  Description of Artificial Sequence: Synthetic oligonucleotide
aaagcuaggcacauaugga

SEQ ID NO: 2692982 - RNA, 19 nt, Artificial Sequence
  Description of Artificial Sequence: Synthetic oligonucleotide
uagcucuggacacagccca

SEQ ID NO: 2692983 - RNA, 19 nt, Artificial Sequence
  Description of Artificial Sequence: Synthetic oligonucleotide
gaaagagggguagugcaag

SEQ ID NO: 2692984 - RNA, 19 nt, Artificial Sequence
  Description of Artificial Sequence: Synthetic oligonucleotide
auagccagacuuugaaaca

SEQ ID NO: 2692985 - RNA, 19 nt, Artificial Sequence
  Description of Artificial Sequence: Synthetic oligonucleotide
aguucuguagacccagaga

SEQ ID NO: 2692986 - RNA, 19 nt, Artificial Sequence
  Description of Artificial Sequence: Synthetic oligonucleotide
gaagagcccagcuuuguuc

SEQ ID NO: 2692987 - RNA, 19 nt, Artificial Sequence
  Description of Artificial Sequence: Synthetic oligonucleotide
uuauucuccuuaaggcaga

SEQ ID NO: 2692988 - RNA, 19 nt, Artificial Sequence
  Description of Artificial Sequence: Synthetic oligonucleotide
cccauuauucuccuuaagg

SEQ ID NO: 2692989 - RNA, 19 nt, Artificial Sequence
  Description of Artificial Sequence: Synthetic oligonucleotide
augaaaugcuacaucucac

SEQ ID NO: 2692990 - RNA, 19 nt, Artificial Sequence
  Description of Artificial Sequence: Synthetic oligonucleotide
acauauggaagagcccagc

SEQ ID NO: 2692991 - RNA, 19 nt, Artificial Sequence
  Description of Artificial Sequence: Synthetic oligonucleotide
cucucuaggcccuggaaac

SEQ ID NO: 2692992 - RNA, 19 nt, Artificial Sequence
  Description of Artificial Sequence: Synthetic oligonucleotide
aagcuuggggcagacgggg

SEQ ID NO: 2692993 - RNA, 19 nt, Artificial Sequence
  Description of Artificial Sequence: Synthetic oligonucleotide
gacacagcccaucccuugg

SEQ ID NO: 2692994 - RNA, 19 nt, Artificial Sequence
  Description of Artificial Sequence: Synthetic oligonucleotide
aaagcuuggggcagacggg

SEQ ID NO: 2692995 - RNA, 19 nt, Artificial Sequence
  Description of Artificial Sequence: Synthetic oligonucleotide
acauagcauagccagacuu

SEQ ID NO: 2692996 - RNA, 19 nt, Artificial Sequence
  Description of Artificial Sequence: Synthetic oligonucleotide
aaccccaggaaaccaguga

SEQ ID NO: 2692997 - RNA, 19 nt, Artificial Sequence
  Description of Artificial Sequence: Synthetic oligonucleotide
auagcucuggacacagccc

SEQ ID NO: 2692998 - RNA, 19 nt, Artificial Sequence
  Description of Artificial Sequence: Synthetic oligonucleotide
cuggggacaacuacauagc

SEQ ID NO: 2692999 - RNA, 19 nt, Artificial Sequence
  Description of Artificial Sequence: Synthetic oligonucleotide
augguccccauuauucucc

SEQ ID NO: 2693000 - RNA, 19 nt, Artificial Sequence
  Description of Artificial Sequence: Synthetic oligonucleotide
accuuggccaaagcuaggc

SEQ ID NO: 2693001 - RNA, 19 nt, Artificial Sequence
  Description of Artificial Sequence: Synthetic oligonucleotide
gagacaccuguagaaagag

SEQ ID NO: 2693002 - RNA, 19 nt, Artificial Sequence
  Description of Artificial Sequence: Synthetic oligonucleotide
caaauacccacuccccgcc

SEQ ID NO: 2693003 - RNA, 19 nt, Artificial Sequence
  Description of Artificial Sequence: Synthetic oligonucleotide
agacaaggccacuggggac

SEQ ID NO: 2693004 - RNA, 19 nt, Artificial Sequence
  Description of Artificial Sequence: Synthetic oligonucleotide
aacaagcucugcacauagc

SEQ ID NO: 2693005 - RNA, 19 nt, Artificial Sequence
  Description of Artificial Sequence: Synthetic oligonucleotide
guucuguagacccagagau

SEQ ID NO: 2693006 - RNA, 19 nt, Artificial Sequence
  Description of Artificial Sequence: Synthetic oligonucleotide
gacaacuacauagcauagc

SEQ ID NO: 2693007 - RNA, 19 nt, Artificial Sequence
  Description of Artificial Sequence: Synthetic oligonucleotide
cauaccucauagcaccuug

SEQ ID NO: 2693008 - RNA, 19 nt, Artificial Sequence
  Description of Artificial Sequence: Synthetic oligonucleotide
cuaggcccuggaaacaagc

SEQ ID NO: 2693009 - RNA, 19 nt, Artificial Sequence
  Description of Artificial Sequence: Synthetic oligonucleotide
cuccuuaaggcagaaugcc

SEQ ID NO: 2693010 - RNA, 19 nt, Artificial Sequence
  Description of Artificial Sequence: Synthetic oligonucleotide
aaacugggaggaaugaaau

SEQ ID NO: 2693011 - RNA, 19 nt, Artificial Sequence
  Description of Artificial Sequence: Synthetic oligonucleotide
uggggacaacuacauagca

SEQ ID NO: 2693012 - RNA, 19 nt, Artificial Sequence
  Description of Artificial Sequence: Synthetic oligonucleotide
agcauagccagacuuugaa

SEQ ID NO: 2693013 - RNA, 19 nt, Artificial Sequence
  Description of Artificial Sequence: Synthetic oligonucleotide
ccaucaguucuguagaccc

SEQ ID NO: 2693014 - RNA, 19 nt, Artificial Sequence
  Description of Artificial Sequence: Synthetic oligonucleotide
ccaaauauuauguacaggu

SEQ ID NO: 2693015 - RNA, 19 nt, Artificial Sequence
  Description of Artificial Sequence: Synthetic oligonucleotide
guagaaagagggguagugc

SEQ ID NO: 2693016 - RNA, 19 nt, Artificial Sequence
  Description of Artificial Sequence: Synthetic oligonucleotide
auagcaccuuggccaaagc

SEQ ID NO: 2693017 - RNA, 19 nt, Artificial Sequence
  Description of Artificial Sequence: Synthetic oligonucleotide
cagaccugcagcucauagg

SEQ ID NO: 2693018 - RNA, 19 nt, Artificial Sequence
  Description of Artificial Sequence: Synthetic oligonucleotide
agcucauaggaaccccagg

SEQ ID NO: 2693019 - RNA, 19 nt, Artificial Sequence
  Description of Artificial Sequence: Synthetic oligonucleotide
agaaugcccagaccccagg

SEQ ID NO: 2693020 - RNA, 19 nt, Artificial Sequence
  Description of Artificial Sequence: Synthetic oligonucleotide
accaugagacaccuguaga

SEQ ID NO: 2693021 - RNA, 19 nt, Artificial Sequence
  Description of Artificial Sequence: Synthetic oligonucleotide
guugggcuuggguuugugg

SEQ ID NO: 2693022 - RNA, 19 nt, Artificial Sequence
  Description of Artificial Sequence: Synthetic oligonucleotide
caaacugggaggaaugaaa

SEQ ID NO: 2693023 - RNA, 19 nt, Artificial Sequence
  Description of Artificial Sequence: Synthetic oligonucleotide
uagcaccuuggccaaagcu

SEQ ID NO: 2693024 - RNA, 19 nt, Artificial Sequence
  Description of Artificial Sequence: Synthetic oligonucleotide
agagggguagugcaagccu

SEQ ID NO: 2693025 - RNA, 19 nt, Artificial Sequence
  Description of Artificial Sequence: Synthetic oligonucleotide
ucuggacacagcccauccc

SEQ ID NO: 2693026 - RNA, 19 nt, Artificial Sequence
  Description of Artificial Sequence: Synthetic oligonucleotide
auugagcaagacaaggcca

SEQ ID NO: 2693027 - RNA, 19 nt, Artificial Sequence
  Description of Artificial Sequence: Synthetic oligonucleotide
aagccuggcgcugcauacc

SEQ ID NO: 2693028 - RNA, 19 nt, Artificial Sequence
  Description of Artificial Sequence: Synthetic oligonucleotide
ucccuuggggcucuuuccc

SEQ ID NO: 2693029 - RNA, 19 nt, Artificial Sequence
  Description of Artificial Sequence: Synthetic oligonucleotide
agugcaagccuggcgcugc

SEQ ID NO: 2693030 - RNA, 19 nt, Artificial Sequence
  Description of Artificial Sequence: Synthetic oligonucleotide
ucuaggcccuggaaacaag

SEQ ID NO: 2693031 - RNA, 19 nt, Artificial Sequence
  Description of Artificial Sequence: Synthetic oligonucleotide
cuccccgccaugcucaagg

SEQ ID NO: 2693032 - RNA, 19 nt, Artificial Sequence
  Description of Artificial Sequence: Synthetic oligonucleotide
uagacccagagauggggug

SEQ ID NO: 2693033 - RNA, 19 nt, Artificial Sequence
  Description of Artificial Sequence: Synthetic oligonucleotide
uucccuuggggcucuuucc

SEQ ID NO: 2693034 - RNA, 19 nt, Artificial Sequence
  Description of Artificial Sequence: Synthetic oligonucleotide
ggcgcugcauaccucauag

SEQ ID NO: 2693035 - RNA, 19 nt, Artificial Sequence
  Description of Artificial Sequence: Synthetic oligonucleotide
auauggaagagcccagcuu

SEQ ID NO: 2693036 - RNA, 19 nt, Artificial Sequence
  Description of Artificial Sequence: Synthetic oligonucleotide
aauacccacuccccgccau

SEQ ID NO: 2693037 - RNA, 19 nt, Artificial Sequence
  Description of Artificial Sequence: Synthetic oligonucleotide
uacauagcauagccagacu

SEQ ID NO: 2693038 - RNA, 19 nt, Artificial Sequence
  Description of Artificial Sequence: Synthetic oligonucleotide
gggacaacuacauagcaua

SEQ ID NO: 2693039 - RNA, 19 nt, Artificial Sequence
  Description of Artificial Sequence: Synthetic oligonucleotide
gcuagacugccccaaauac

SEQ ID NO: 2693040 - RNA, 19 nt, Artificial Sequence
  Description of Artificial Sequence: Synthetic oligonucleotide
cacauauggaagagcccag

SEQ ID NO: 2693041 - RNA, 19 nt, Artificial Sequence
  Description of Artificial Sequence: Synthetic oligonucleotide
gacugccccaaauacccac

SEQ ID NO: 2693042 - RNA, 19 nt, Artificial Sequence
  Description of Artificial Sequence: Synthetic oligonucleotide
caguucuguagacccagag

SEQ ID NO: 2693043 - RNA, 19 nt, Artificial Sequence
  Description of Artificial Sequence: Synthetic oligonucleotide
cuaggcacauauggaagag

SEQ ID NO: 2693044 - RNA, 19 nt, Artificial Sequence
  Description of Artificial Sequence: Synthetic oligonucleotide
ggaggaaugaaaugcuaca

SEQ ID NO: 2693045 - RNA, 19 nt, Artificial Sequence
  Description of Artificial Sequence: Synthetic oligonucleotide
agacccagagauggggugg

SEQ ID NO: 2693046 - RNA, 19 nt, Artificial Sequence
  Description of Artificial Sequence: Synthetic oligonucleotide
aaauacccacuccccgcca

SEQ ID NO: 2693047 - RNA, 19 nt, Artificial Sequence
  Description of Artificial Sequence: Synthetic oligonucleotide
acaccuguagaaagagggg

SEQ ID NO: 2693048 - RNA, 19 nt, Artificial Sequence
  Description of Artificial Sequence: Synthetic oligonucleotide
ccucauagcaccuuggcca

SEQ ID NO: 2693049 - RNA, 19 nt, Artificial Sequence
  Description of Artificial Sequence: Synthetic oligonucleotide
cccagggcaaccaaacugg

SEQ ID NO: 2693050 - RNA, 19 nt, Artificial Sequence
  Description of Artificial Sequence: Synthetic oligonucleotide
ugacuucacugccuaguuc

SEQ ID NO: 2693051 - RNA, 19 nt, Artificial Sequence
  Description of Artificial Sequence: Synthetic oligonucleotide
ugccccaaauacccacucc

SEQ ID NO: 2693052 - RNA, 19 nt, Artificial Sequence
  Description of Artificial Sequence: Synthetic oligonucleotide
uagcauagccagacuuuga

SEQ ID NO: 2693053 - RNA, 19 nt, Artificial Sequence
  Description of Artificial Sequence: Synthetic oligonucleotide
cauagcaccuuggccaaag

SEQ ID NO: 2693054 - RNA, 19 nt, Artificial Sequence
  Description of Artificial Sequence: Synthetic oligonucleotide
uggguuuguggcuggggcu

SEQ ID NO: 2693055 - RNA, 19 nt, Artificial Sequence
  Description of Artificial Sequence: Synthetic oligonucleotide
cacauagcucuggacacag

SEQ ID NO: 2693056 - RNA, 19 nt, Artificial Sequence
  Description of Artificial Sequence: Synthetic oligonucleotide
ugcauaccucauagcaccu

SEQ ID NO: 2693057 - RNA, 19 nt, Artificial Sequence
  Description of Artificial Sequence: Synthetic oligonucleotide
uaggcacauauggaagagc

SEQ ID NO: 2693058 - RNA, 19 nt, Artificial Sequence
  Description of Artificial Sequence: Synthetic oligonucleotide
ccaaauacccacuccccgc

SEQ ID NO: 2693059 - RNA, 19 nt, Artificial Sequence
  Description of Artificial Sequence: Synthetic oligonucleotide
gugagggaggucgacuggg

SEQ ID NO: 2693060 - RNA, 19 nt, Artificial Sequence
  Description of Artificial Sequence: Synthetic oligonucleotide
caagccuggcgcugcauac

SEQ ID NO: 2693061 - RNA, 19 nt, Artificial Sequence
  Description of Artificial Sequence: Synthetic oligonucleotide
auaccucauagcaccuugg

SEQ ID NO: 2693062 - RNA, 19 nt, Artificial Sequence
  Description of Artificial Sequence: Synthetic oligonucleotide
accucugauugagcaagac

SEQ ID NO: 2693063 - RNA, 19 nt, Artificial Sequence
  Description of Artificial Sequence: Synthetic oligonucleotide
gcucauaggaaccccagga

SEQ ID NO: 2693064 - RNA, 19 nt, Artificial Sequence
  Description of Artificial Sequence: Synthetic oligonucleotide
cacagagacagggccaggc

SEQ ID NO: 2693065 - RNA, 19 nt, Artificial Sequence
  Description of Artificial Sequence: Synthetic oligonucleotide
ucaguucuguagacccaga

SEQ ID NO: 2693066 - RNA, 19 nt, Artificial Sequence
  Description of Artificial Sequence: Synthetic oligonucleotide
gagcaagacaaggccacug

SEQ ID NO: 2693067 - RNA, 19 nt, Artificial Sequence
  Description of Artificial Sequence: Synthetic oligonucleotide
gccccaaauacccacuccc

SEQ ID NO: 2693068 - RNA, 19 nt, Artificial Sequence
  Description of Artificial Sequence: Synthetic oligonucleotide
agagaugggguggaccaug

SEQ ID NO: 2693069 - RNA, 19 nt, Artificial Sequence
  Description of Artificial Sequence: Synthetic oligonucleotide
caacuacauagcauagcca

SEQ ID NO: 2693070 - RNA, 19 nt, Artificial Sequence
  Description of Artificial Sequence: Synthetic oligonucleotide
agacaccuguagaaagagg

SEQ ID NO: 2693071 - RNA, 19 nt, Artificial Sequence
  Description of Artificial Sequence: Synthetic oligonucleotide
cccgccaugcucaagguug

SEQ ID NO: 2693072 - RNA, 19 nt, Artificial Sequence
  Description of Artificial Sequence: Synthetic oligonucleotide
ugcagcucauaggaacccc

SEQ ID NO: 2693073 - RNA, 19 nt, Artificial Sequence
  Description of Artificial Sequence: Synthetic oligonucleotide
uaggaaccccaggaaacca

SEQ ID NO: 2693074 - RNA, 19 nt, Artificial Sequence
  Description of Artificial Sequence: Synthetic oligonucleotide
ggggccgugagggaggucg

SEQ ID NO: 2693075 - RNA, 19 nt, Artificial Sequence
  Description of Artificial Sequence: Synthetic oligonucleotide
agcaccuuggccaaagcua

SEQ ID NO: 2693076 - RNA, 19 nt, Artificial Sequence
  Description of Artificial Sequence: Synthetic oligonucleotide
guccccauuauucuccuua

SEQ ID NO: 2693077 - RNA, 19 nt, Artificial Sequence
  Description of Artificial Sequence: Synthetic oligonucleotide
cacagcccaucccuugggg

SEQ ID NO: 2693078 - RNA, 19 nt, Artificial Sequence
  Description of Artificial Sequence: Synthetic oligonucleotide
acuuugaaacacagagaca

SEQ ID NO: 2693079 - RNA, 19 nt, Artificial Sequence
  Description of Artificial Sequence: Synthetic oligonucleotide
ucucuaggcccuggaaaca

SEQ ID NO: 2693080 - RNA, 19 nt, Artificial Sequence
  Description of Artificial Sequence: Synthetic oligonucleotide
gggcaaccaaacugggagg

SEQ ID NO: 2693081 - RNA, 19 nt, Artificial Sequence
  Description of Artificial Sequence: Synthetic oligonucleotide
gcuaggcacauauggaaga

SEQ ID NO: 2693082 - RNA, 19 nt, Artificial Sequence
  Description of Artificial Sequence: Synthetic oligonucleotide
ugcucaagguugggcuugg

SEQ ID NO: 2693083 - RNA, 19 nt, Artificial Sequence
  Description of Artificial Sequence: Synthetic oligonucleotide
ggguagugcaagccuggcg

SEQ ID NO: 2693084 - RNA, 19 nt, Artificial Sequence
  Description of Artificial Sequence: Synthetic oligonucleotide
aggaaccccaggaaaccag

SEQ ID NO: 2693085 - RNA, 19 nt, Artificial Sequence
  Description of Artificial Sequence: Synthetic oligonucleotide
cucauaggaaccccaggaa

SEQ ID NO: 2693086 - RNA, 19 nt, Artificial Sequence
  Description of Artificial Sequence: Synthetic oligonucleotide
gaccccagggcaaccaaac

SEQ ID NO: 2693087 - RNA, 19 nt, Artificial Sequence
  Description of Artificial Sequence: Synthetic oligonucleotide
gaaccccaggaaaccagug

SEQ ID NO: 2693088 - RNA, 19 nt, Artificial Sequence
  Description of Artificial Sequence: Synthetic oligonucleotide
agggguagugcaagccugg

SEQ ID NO: 2693089 - RNA, 19 nt, Artificial Sequence
  Description of Artificial Sequence: Synthetic oligonucleotide
uggcuagacugccccaaau

SEQ ID NO: 2693090 - RNA, 19 nt, Artificial Sequence
  Description of Artificial Sequence: Synthetic oligonucleotide
agaaagagggguagugcaa

SEQ ID NO: 2693091 - RNA, 19 nt, Artificial Sequence
  Description of Artificial Sequence: Synthetic oligonucleotide
gaaacaagcucugcacaua

SEQ ID NO: 2693092 - RNA, 19 nt, Artificial Sequence
  Description of Artificial Sequence: Synthetic oligonucleotide
caugagacaccuguagaaa

SEQ ID NO: 2693093 - RNA, 19 nt, Artificial Sequence
  Description of Artificial Sequence: Synthetic oligonucleotide
augcucaagguugggcuug

SEQ ID NO: 2693094 - RNA, 19 nt, Artificial Sequence
  Description of Artificial Sequence: Synthetic oligonucleotide
gcuuuguucugcuguuccc

SEQ ID NO: 2693095 - RNA, 19 nt, Artificial Sequence
  Description of Artificial Sequence: Synthetic oligonucleotide
ggacaacuacauagcauag

SEQ ID NO: 2693096 - RNA, 19 nt, Artificial Sequence
  Description of Artificial Sequence: Synthetic oligonucleotide
caaauauuauguacagguu

SEQ ID NO: 2693097 - RNA, 19 nt, Artificial Sequence
  Description of Artificial Sequence: Synthetic oligonucleotide
uauucuccuuaaggcagaa

SEQ ID NO: 2693098 - RNA, 19 nt, Artificial Sequence
  Description of Artificial Sequence: Synthetic oligonucleotide
acauagcucuggacacagc

SEQ ID NO: 2693099 - RNA, 19 nt, Artificial Sequence
  Description of Artificial Sequence: Synthetic oligonucleotide
auacccacuccccgccaug

SEQ ID NO: 2693100 - RNA, 19 nt, Artificial Sequence
  Description of Artificial Sequence: Synthetic oligonucleotide
cugcagcucauaggaaccc

SEQ ID NO: 2693101 - RNA, 19 nt, Artificial Sequence
  Description of Artificial Sequence: Synthetic oligonucleotide
aggaaaccagugacuucac

SEQ ID NO: 2693102 - RNA, 19 nt, Artificial Sequence
  Description of Artificial Sequence: Synthetic oligonucleotide
ccuguagaaagagggguag

SEQ ID NO: 2693103 - RNA, 19 nt, Artificial Sequence
  Description of Artificial Sequence: Synthetic oligonucleotide
caucaguucuguagaccca

SEQ ID NO: 2693104 - RNA, 19 nt, Artificial Sequence
  Description of Artificial Sequence: Synthetic oligonucleotide
caccuuggccaaagcuagg

SEQ ID NO: 2693105 - RNA, 19 nt, Artificial Sequence
  Description of Artificial Sequence: Synthetic oligonucleotide
gaggucgacugggagguga

SEQ ID NO: 2693106 - RNA, 19 nt, Artificial Sequence
  Description of Artificial Sequence: Synthetic oligonucleotide
uggacacagcccaucccuu

SEQ ID NO: 2693107 - RNA, 19 nt, Artificial Sequence
  Description of Artificial Sequence: Synthetic oligonucleotide
cauauggaagagcccagcu

SEQ ID NO: 2693108 - RNA, 19 nt, Artificial Sequence
  Description of Artificial Sequence: Synthetic oligonucleotide
uagugcaagccuggcgcug

SEQ ID NO: 2693109 - RNA, 19 nt, Artificial Sequence
  Description of Artificial Sequence: Synthetic oligonucleotide
agagcccagcuuuguucug

SEQ ID NO: 2693110 - RNA, 19 nt, Artificial Sequence
  Description of Artificial Sequence: Synthetic oligonucleotide
gggguggaccaugagacac

SEQ ID NO: 2693111 - RNA, 19 nt, Artificial Sequence
  Description of Artificial Sequence: Synthetic oligonucleotide
ucgacugggaggugaucuu

SEQ ID NO: 2693112 - RNA, 19 nt, Artificial Sequence
  Description of Artificial Sequence: Synthetic oligonucleotide
auggaagagcccagcuuug

SEQ ID NO: 2693113 - RNA, 19 nt, Artificial Sequence
  Description of Artificial Sequence: Synthetic oligonucleotide
uggaaagcuuggggcagac

SEQ ID NO: 2693114 - RNA, 19 nt, Artificial Sequence
  Description of Artificial Sequence: Synthetic oligonucleotide
augcuacaucucacugccc

SEQ ID NO: 2693115 - RNA, 19 nt, Artificial Sequence
  Description of Artificial Sequence: Synthetic oligonucleotide
ggacacagcccaucccuug

SEQ ID NO: 2693116 - RNA, 19 nt, Artificial Sequence
  Description of Artificial Sequence: Synthetic oligonucleotide
accccagggcaaccaaacu

SEQ ID NO: 2693117 - RNA, 19 nt, Artificial Sequence
  Description of Artificial Sequence: Synthetic oligonucleotide
ccccagggcaaccaaacug

SEQ ID NO: 2693118 - RNA, 19 nt, Artificial Sequence
  Description of Artificial Sequence: Synthetic oligonucleotide
cugggaggaaugaaaugcu

SEQ ID NO: 2693119 - RNA, 19 nt, Artificial Sequence
  Description of Artificial Sequence: Synthetic oligonucleotide
ccaugagacaccuguagaa

SEQ ID NO: 2693120 - RNA, 19 nt, Artificial Sequence
  Description of Artificial Sequence: Synthetic oligonucleotide
ggaaacaagcucugcacau

SEQ ID NO: 2693121 - RNA, 19 nt, Artificial Sequence
  Description of Artificial Sequence: Synthetic oligonucleotide
ccagaccugcagcucauag

SEQ ID NO: 2693122 - RNA, 19 nt, Artificial Sequence
  Description of Artificial Sequence: Synthetic oligonucleotide
accuguagaaagaggggua

SEQ ID NO: 2693123 - RNA, 19 nt, Artificial Sequence
  Description of Artificial Sequence: Synthetic oligonucleotide
gagaugggguggaccauga

SEQ ID NO: 2693124 - RNA, 19 nt, Artificial Sequence
  Description of Artificial Sequence: Synthetic oligonucleotide
cugccccaaauacccacuc

SEQ ID NO: 2693125 - RNA, 19 nt, Artificial Sequence
  Description of Artificial Sequence: Synthetic oligonucleotide
ggcacauauggaagagccc

SEQ ID NO: 2693126 - RNA, 19 nt, Artificial Sequence
  Description of Artificial Sequence: Synthetic oligonucleotide
cucugcacauagcucugga

SEQ ID NO: 2693127 - RNA, 19 nt, Artificial Sequence
  Description of Artificial Sequence: Synthetic oligonucleotide
acugccccaaauacccacu

SEQ ID NO: 2693128 - RNA, 19 nt, Artificial Sequence
  Description of Artificial Sequence: Synthetic oligonucleotide
gcugggccucucuaggccc

SEQ ID NO: 2693129 - RNA, 19 nt, Artificial Sequence
  Description of Artificial Sequence: Synthetic oligonucleotide
agccagacuuugaaacaca

SEQ ID NO: 2693130 - RNA, 19 nt, Artificial Sequence
  Description of Artificial Sequence: Synthetic oligonucleotide
ggguuuguggcuggggcug

SEQ ID NO: 2693131 - RNA, 19 nt, Artificial Sequence
  Description of Artificial Sequence: Synthetic oligonucleotide
ggcaaccaaacugggagga

SEQ ID NO: 2693132 - RNA, 19 nt, Artificial Sequence
  Description of Artificial Sequence: Synthetic oligonucleotide
cagggcaaccaaacuggga

SEQ ID NO: 2693133 - RNA, 19 nt, Artificial Sequence
  Description of Artificial Sequence: Synthetic oligonucleotide
ccagggcaaccaaacuggg

SEQ ID NO: 2693134 - RNA, 19 nt, Artificial Sequence
  Description of Artificial Sequence: Synthetic oligonucleotide
caagguugggcuuggguuu

SEQ ID NO: 2693135 - RNA, 19 nt, Artificial Sequence
  Description of Artificial Sequence: Synthetic oligonucleotide
uggcgcugcauaccucaua

SEQ ID NO: 2693136 - RNA, 19 nt, Artificial Sequence
  Description of Artificial Sequence: Synthetic oligonucleotide
ccaaagcuaggcacauaug

SEQ ID NO: 2693137 - RNA, 19 nt, Artificial Sequence
  Description of Artificial Sequence: Synthetic oligonucleotide
ggccacuggggacaacuac

SEQ ID NO: 2693138 - RNA, 19 nt, Artificial Sequence
  Description of Artificial Sequence: Synthetic oligonucleotide
caccuguagaaagaggggu

SEQ ID NO: 2693139 - RNA, 19 nt, Artificial Sequence
  Description of Artificial Sequence: Synthetic oligonucleotide
cgcugcauaccucauagca

SEQ ID NO: 2693140 - RNA, 19 nt, Artificial Sequence
  Description of Artificial Sequence: Synthetic oligonucleotide
ccucugauugagcaagaca

SEQ ID NO: 2693141 - RNA, 19 nt, Artificial Sequence
  Description of Artificial Sequence: Synthetic oligonucleotide
cccaucaguucuguagacc

SEQ ID NO: 2693142 - RNA, 19 nt, Artificial Sequence
  Description of Artificial Sequence: Synthetic oligonucleotide
ggaaagcuuggggcagacg

SEQ ID NO: 2693143 - RNA, 19 nt, Artificial Sequence
  Description of Artificial Sequence: Synthetic oligonucleotide
uccccgccaugcucaaggu

SEQ ID NO: 2693144 - RNA, 19 nt, Artificial Sequence
  Description of Artificial Sequence: Synthetic oligonucleotide
ggcuagacugccccaaaua

SEQ ID NO: 2693145 - RNA, 19 nt, Artificial Sequence
  Description of Artificial Sequence: Synthetic oligonucleotide
ccgugagggaggucgacug

SEQ ID NO: 2693146 - RNA, 19 nt, Artificial Sequence
  Description of Artificial Sequence: Synthetic oligonucleotide
gcccuggcuagacugcccc

SEQ ID NO: 2693147 - RNA, 19 nt, Artificial Sequence
  Description of Artificial Sequence: Synthetic oligonucleotide
cucaagguugggcuugggu

SEQ ID NO: 2693148 - RNA, 19 nt, Artificial Sequence
  Description of Artificial Sequence: Synthetic oligonucleotide
gacccagagauggggugga

SEQ ID NO: 2693149 - RNA, 19 nt, Artificial Sequence
  Description of Artificial Sequence: Synthetic oligonucleotide
guagugcaagccuggcgcu

SEQ ID NO: 2693150 - RNA, 19 nt, Artificial Sequence
  Description of Artificial Sequence: Synthetic oligonucleotide
gccaugcucaagguugggc

SEQ ID NO: 2693151 - RNA, 19 nt, Artificial Sequence
  Description of Artificial Sequence: Synthetic oligonucleotide
cucuaggcccuggaaacaa

SEQ ID NO: 2693152 - RNA, 19 nt, Artificial Sequence
  Description of Artificial Sequence: Synthetic oligonucleotide
guagacccagagauggggu

SEQ ID NO: 2693153 - RNA, 19 nt, Artificial Sequence
  Description of Artificial Sequence: Synthetic oligonucleotide
ccccauuauucuccuuaag

SEQ ID NO: 2693154 - RNA, 19 nt, Artificial Sequence
  Description of Artificial Sequence: Synthetic oligonucleotide
gggcuuggguuuguggcug

SEQ ID NO: 2693155 - RNA, 19 nt, Artificial Sequence
  Description of Artificial Sequence: Synthetic oligonucleotide
caaccaaacugggaggaau

SEQ ID NO: 2693156 - RNA, 19 nt, Artificial Sequence
  Description of Artificial Sequence: Synthetic oligonucleotide
cccagagaugggguggacc

SEQ ID NO: 2693157 - RNA, 19 nt, Artificial Sequence
  Description of Artificial Sequence: Synthetic oligonucleotide
ucauagcaccuuggccaaa

SEQ ID NO: 2693158 - RNA, 19 nt, Artificial Sequence
  Description of Artificial Sequence: Synthetic oligonucleotide
agacugccccaaauaccca

SEQ ID NO: 2693159 - RNA, 19 nt, Artificial Sequence
  Description of Artificial Sequence: Synthetic oligonucleotide
cuggggcugcaaggcaggc

SEQ ID NO: 2693160 - RNA, 19 nt, Artificial Sequence
  Description of Artificial Sequence: Synthetic oligonucleotide
gggaggucgacugggaggu

SEQ ID NO: 2693161 - RNA, 19 nt, Artificial Sequence
  Description of Artificial Sequence: Synthetic oligonucleotide
cgugagggaggucgacugg

SEQ ID NO: 2693162 - RNA, 19 nt, Artificial Sequence
  Description of Artificial Sequence: Synthetic oligonucleotide
gguuuguggcuggggcugc

SEQ ID NO: 2693163 - RNA, 19 nt, Artificial Sequence
  Description of Artificial Sequence: Synthetic oligonucleotide
cuggcuagacugccccaaa

SEQ ID NO: 2693164 - RNA, 19 nt, Artificial Sequence
  Description of Artificial Sequence: Synthetic oligonucleotide
gggguagugcaagccuggc

SEQ ID NO: 2693165 - RNA, 19 nt, Artificial Sequence
  Description of Artificial Sequence: Synthetic oligonucleotide
ugcaagccuggcgcugcau

SEQ ID NO: 2693166 - RNA, 19 nt, Artificial Sequence
  Description of Artificial Sequence: Synthetic oligonucleotide
gcgcugcauaccucauagc

SEQ ID NO: 2693167 - RNA, 19 nt, Artificial Sequence
  Description of Artificial Sequence: Synthetic oligonucleotide
uguucccuuggggcucuuu

SEQ ID NO: 2693168 - RNA, 19 nt, Artificial Sequence
  Description of Artificial Sequence: Synthetic oligonucleotide
ccacuccccgccaugcuca

SEQ ID NO: 2693169 - RNA, 19 nt, Artificial Sequence
  Description of Artificial Sequence: Synthetic oligonucleotide
gcaagccuggcgcugcaua

SEQ ID NO: 2693170 - RNA, 19 nt, Artificial Sequence
  Description of Artificial Sequence: Synthetic oligonucleotide
gcacauagcucuggacaca

SEQ ID NO: 2693171 - RNA, 19 nt, Artificial Sequence
  Description of Artificial Sequence: Synthetic oligonucleotide
cuguagaaagagggguagu

SEQ ID NO: 2693172 - RNA, 19 nt, Artificial Sequence
  Description of Artificial Sequence: Synthetic oligonucleotide
cccacuccccgccaugcuc

SEQ ID NO: 2693173 - RNA, 19 nt, Artificial Sequence
  Description of Artificial Sequence: Synthetic oligonucleotide
gacugggaggugaucuuuu

SEQ ID NO: 2693174 - RNA, 19 nt, Artificial Sequence
  Description of Artificial Sequence: Synthetic oligonucleotide
ggggacaacuacauagcau

SEQ ID NO: 2693175 - RNA, 19 nt, Artificial Sequence
  Description of Artificial Sequence: Synthetic oligonucleotide
acuccccgccaugcucaag

SEQ ID NO: 2693176 - RNA, 19 nt, Artificial Sequence
  Description of Artificial Sequence: Synthetic oligonucleotide
agcucuggacacagcccau

SEQ ID NO: 2693177 - RNA, 19 nt, Artificial Sequence
  Description of Artificial Sequence: Synthetic oligonucleotide
cacuggggacaacuacaua

SEQ ID NO: 2693178 - RNA, 19 nt, Artificial Sequence
  Description of Artificial Sequence: Synthetic oligonucleotide
ggaaccccaggaaaccagu

SEQ ID NO: 2693179 - RNA, 19 nt, Artificial Sequence
  Description of Artificial Sequence: Synthetic oligonucleotide
gcccuggaaacaagcucug

SEQ ID NO: 2693180 - RNA, 19 nt, Artificial Sequence
  Description of Artificial Sequence: Synthetic oligonucleotide
gcucuggacacagcccauc

SEQ ID NO: 2693181 - RNA, 19 nt, Artificial Sequence
  Description of Artificial Sequence: Synthetic oligonucleotide
gggcccuggcuagacugcc

SEQ ID NO: 2693182 - RNA, 19 nt, Artificial Sequence
  Description of Artificial Sequence: Synthetic oligonucleotide
ggaagagcccagcuuuguu

SEQ ID NO: 2693183 - RNA, 19 nt, Artificial Sequence
  Description of Artificial Sequence: Synthetic oligonucleotide
gccucucuaggcccuggaa

SEQ ID NO: 2693184 - RNA, 19 nt, Artificial Sequence
  Description of Artificial Sequence: Synthetic oligonucleotide
gcccagcuuuguucugcug

SEQ ID NO: 2693185 - RNA, 19 nt, Artificial Sequence
  Description of Artificial Sequence: Synthetic oligonucleotide
ggaccaugagacaccugua

SEQ ID NO: 2693186 - RNA, 19 nt, Artificial Sequence
  Description of Artificial Sequence: Synthetic oligonucleotide
gggccucucuaggcccugg

SEQ ID NO: 2693187 - RNA, 19 nt, Artificial Sequence
  Description of Artificial Sequence: Synthetic oligonucleotide
gcugcaaggcaggccagcu

SEQ ID NO: 2693188 - RNA, 19 nt, Artificial Sequence
  Description of Artificial Sequence: Synthetic oligonucleotide
ggucgacugggaggugauc

SEQ ID NO: 2693189 - RNA, 19 nt, Artificial Sequence
  Description of Artificial Sequence: Synthetic oligonucleotide
ccuggcuagacugccccaa

SEQ ID NO: 2693190 - RNA, 19 nt, Artificial Sequence
  Description of Artificial Sequence: Synthetic oligonucleotide
cccaggaaaccagugacuu

SEQ ID NO: 2693191 - RNA, 19 nt, Artificial Sequence
  Description of Artificial Sequence: Synthetic oligonucleotide
cacuccccgccaugcucaa

SEQ ID NO: 2693192 - RNA, 19 nt, Artificial Sequence
  Description of Artificial Sequence: Synthetic oligonucleotide
gcccagaccccagggcaac

SEQ ID NO: 2693193 - RNA, 19 nt, Artificial Sequence
  Description of Artificial Sequence: Synthetic oligonucleotide
ggaggucgacugggaggug

SEQ ID NO: 2693194 - RNA, 19 nt, Artificial Sequence
  Description of Artificial Sequence: Synthetic oligonucleotide
ggccgugagggaggucgac

SEQ ID NO: 2693195 - RNA, 19 nt, Artificial Sequence
  Description of Artificial Sequence: Synthetic oligonucleotide
cuggcgcugcauaccucau

SEQ ID NO: 2693196 - RNA, 19 nt, Artificial Sequence
  Description of Artificial Sequence: Synthetic oligonucleotide
cagagaugggguggaccau

SEQ ID NO: 2693197 - RNA, 19 nt, Artificial Sequence
  Description of Artificial Sequence: Synthetic oligonucleotide
gccgugagggaggucgacu

SEQ ID NO: 2693198 - RNA, 19 nt, Artificial Sequence
  Description of Artificial Sequence: Synthetic oligonucleotide
cccuggcuagacugcccca

SEQ ID NO: 2693199 - RNA, 19 nt, Artificial Sequence
  Description of Artificial Sequence: Synthetic oligonucleotide
cgccaugcucaagguuggg

SEQ ID NO: 2693200 - RNA, 19 nt, Artificial Sequence
  Description of Artificial Sequence: Synthetic oligonucleotide
gcauaccucauagcaccuu

SEQ ID NO: 2693201 - RNA, 19 nt, Artificial Sequence
  Description of Artificial Sequence: Synthetic oligonucleotide
gggccgugagggaggucga

SEQ ID NO: 2693202 - RNA, 19 nt, Artificial Sequence
  Description of Artificial Sequence: Synthetic oligonucleotide
gguccccauuauucuccuu

SEQ ID NO: 2693203 - RNA, 19 nt, Artificial Sequence
  Description of Artificial Sequence: Synthetic oligonucleotide
cccagaccugcagcucaua

SEQ ID NO: 2693204 - RNA, 19 nt, Artificial Sequence
  Description of Artificial Sequence: Synthetic oligonucleotide
cgacugggaggugaucuuu

SEQ ID NO: 2693205 - RNA, 19 nt, Artificial Sequence
  Description of Artificial Sequence: Synthetic oligonucleotide
ccccgccaugcucaagguu

SEQ ID NO: 2693206 - RNA, 19 nt, Artificial Sequence
  Description of Artificial Sequence: Synthetic oligonucleotide
uuaauguucaaaccaaagg

SEQ ID NO: 2693207 - RNA, 19 nt, Artificial Sequence
  Description of Artificial Sequence: Synthetic oligonucleotide
ucaaagaucaaguuggugc

SEQ ID NO: 2693208 - RNA, 19 nt, Artificial Sequence
  Description of Artificial Sequence: Synthetic oligonucleotide
aaagagcaaaugcagaagg

SEQ ID NO: 2693209 - RNA, 19 nt, Artificial Sequence
  Description of Artificial Sequence: Synthetic oligonucleotide
aguagcuuaauguucaaac

SEQ ID NO: 2693210 - RNA, 19 nt, Artificial Sequence
  Description of Artificial Sequence: Synthetic oligonucleotide
aaaauuucuggcccauucc

SEQ ID NO: 2693211 - RNA, 19 nt, Artificial Sequence
  Description of Artificial Sequence: Synthetic oligonucleotide
uaagcugcagauaauagag

SEQ ID NO: 2693212 - RNA, 19 nt, Artificial Sequence
  Description of Artificial Sequence: Synthetic oligonucleotide
uagauuauaauuccaaaga

SEQ ID NO: 2693213 - RNA, 19 nt, Artificial Sequence
  Description of Artificial Sequence: Synthetic oligonucleotide
aagaggacaaaguaauggg

SEQ ID NO: 2693214 - RNA, 19 nt, Artificial Sequence
  Description of Artificial Sequence: Synthetic oligonucleotide
uuuugcagcagucagcuag

SEQ ID NO: 2693215 - RNA, 19 nt, Artificial Sequence
  Description of Artificial Sequence: Synthetic oligonucleotide
auggguagggcccugaagc

SEQ ID NO: 2693216 - RNA, 19 nt, Artificial Sequence
  Description of Artificial Sequence: Synthetic oligonucleotide
agaguauacacuccaggcc

SEQ ID NO: 2693217 - RNA, 19 nt, Artificial Sequence
  Description of Artificial Sequence: Synthetic oligonucleotide
agauuauaauuccaaagag

SEQ ID NO: 2693218 - RNA, 19 nt, Artificial Sequence
  Description of Artificial Sequence: Synthetic oligonucleotide
aaaguaaugggcucaucag

SEQ ID NO: 2693219 - RNA, 19 nt, Artificial Sequence
  Description of Artificial Sequence: Synthetic oligonucleotide
agauaauagagaaaguugg

SEQ ID NO: 2693220 - RNA, 19 nt, Artificial Sequence
  Description of Artificial Sequence: Synthetic oligonucleotide
cuagauuauaauuccaaag

SEQ ID NO: 2693221 - RNA, 19 nt, Artificial Sequence
  Description of Artificial Sequence: Synthetic oligonucleotide
gaagaggacaaaguaaugg

SEQ ID NO: 2693222 - RNA, 19 nt, Artificial Sequence
  Description of Artificial Sequence: Synthetic oligonucleotide
guauacuagacacagguug

SEQ ID NO: 2693223 - RNA, 19 nt, Artificial Sequence
  Description of Artificial Sequence: Synthetic oligonucleotide
ucaaguagcuuaauguuca

SEQ ID NO: 2693224 - RNA, 19 nt, Artificial Sequence
  Description of Artificial Sequence: Synthetic oligonucleotide
uuaacaguccccaggcugg

SEQ ID NO: 2693225 - RNA, 19 nt, Artificial Sequence
  Description of Artificial Sequence: Synthetic oligonucleotide
uguccuguauacuagacac

SEQ ID NO: 2693226 - RNA, 19 nt, Artificial Sequence
  Description of Artificial Sequence: Synthetic oligonucleotide
ucagaguauacacuccagg

SEQ ID NO: 2693227 - RNA, 19 nt, Artificial Sequence
  Description of Artificial Sequence: Synthetic oligonucleotide
aauagagaaaguuggcuaa

SEQ ID NO: 2693228 - RNA, 19 nt, Artificial Sequence
  Description of Artificial Sequence: Synthetic oligonucleotide
aaugcagaaggaugggcuc

SEQ ID NO: 2693229 - RNA, 19 nt, Artificial Sequence
  Description of Artificial Sequence: Synthetic oligonucleotide
agccuaaccaauaagcugc

SEQ ID NO: 2693230 - RNA, 19 nt, Artificial Sequence
  Description of Artificial Sequence: Synthetic oligonucleotide
uuggcuaaaauuucuggcc

SEQ ID NO: 2693231 - RNA, 19 nt, Artificial Sequence
  Description of Artificial Sequence: Synthetic oligonucleotide
aaauuucuggcccauucca

SEQ ID NO: 2693232 - RNA, 19 nt, Artificial Sequence
  Description of Artificial Sequence: Synthetic oligonucleotide
cagauaauagagaaaguug

SEQ ID NO: 2693233 - RNA, 19 nt, Artificial Sequence
  Description of Artificial Sequence: Synthetic oligonucleotide
cuuaauguucaaaccaaag

SEQ ID NO: 2693234 - RNA, 19 nt, Artificial Sequence
  Description of Artificial Sequence: Synthetic oligonucleotide
aguaaugggcucaucaggc

SEQ ID NO: 2693235 - RNA, 19 nt, Artificial Sequence
  Description of Artificial Sequence: Synthetic oligonucleotide
gaagucagaguauacacuc

SEQ ID NO: 2693236 - RNA, 19 nt, Artificial Sequence
  Description of Artificial Sequence: Synthetic oligonucleotide
acaguguaacuucuuggcc

SEQ ID NO: 2693237 - RNA, 19 nt, Artificial Sequence
  Description of Artificial Sequence: Synthetic oligonucleotide
aauguucaaaccaaaggca

SEQ ID NO: 2693238 - RNA, 19 nt, Artificial Sequence
  Description of Artificial Sequence: Synthetic oligonucleotide
aaccauacgaggcuggagu

SEQ ID NO: 2693239 - RNA, 19 nt, Artificial Sequence
  Description of Artificial Sequence: Synthetic oligonucleotide
uauacuagacacagguuga

SEQ ID NO: 2693240 - RNA, 19 nt, Artificial Sequence
  Description of Artificial Sequence: Synthetic oligonucleotide
aguuggcuaaaauuucugg

SEQ ID NO: 2693241 - RNA, 19 nt, Artificial Sequence
  Description of Artificial Sequence: Synthetic oligonucleotide
uaaaauuucuggcccauuc

SEQ ID NO: 2693242 - RNA, 19 nt, Artificial Sequence
  Description of Artificial Sequence: Synthetic oligonucleotide
uuuggggaaccauacgagg

SEQ ID NO: 2693243 - RNA, 19 nt, Artificial Sequence
  Description of Artificial Sequence: Synthetic oligonucleotide
uccuaguugaggcuucugg

SEQ ID NO: 2693244 - RNA, 19 nt, Artificial Sequence
  Description of Artificial Sequence: Synthetic oligonucleotide
aguuggugcacugugcucc

SEQ ID NO: 2693245 - RNA, 19 nt, Artificial Sequence
  Description of Artificial Sequence: Synthetic oligonucleotide
acagguugaagucagggcu

SEQ ID NO: 2693246 - RNA, 19 nt, Artificial Sequence
  Description of Artificial Sequence: Synthetic oligonucleotide
uuuggucuuggaagcaugg

SEQ ID NO: 2693247 - RNA, 19 nt, Artificial Sequence
  Description of Artificial Sequence: Synthetic oligonucleotide
aauaagcugcagauaauag

SEQ ID NO: 2693248 - RNA, 19 nt, Artificial Sequence
  Description of Artificial Sequence: Synthetic oligonucleotide
guuggcuaaaauuucuggc

SEQ ID NO: 2693249 - RNA, 19 nt, Artificial Sequence
  Description of Artificial Sequence: Synthetic oligonucleotide
gaagacaggaugaugguug

SEQ ID NO: 2693250 - RNA, 19 nt, Artificial Sequence
  Description of Artificial Sequence: Synthetic oligonucleotide
aggagccuaaccaauaagc

SEQ ID NO: 2693251 - RNA, 19 nt, Artificial Sequence
  Description of Artificial Sequence: Synthetic oligonucleotide
uaauagagaaaguuggcua

SEQ ID NO: 2693252 - RNA, 19 nt, Artificial Sequence
  Description of Artificial Sequence: Synthetic oligonucleotide
uaaccaauaagcugcagau

SEQ ID NO: 2693253 - RNA, 19 nt, Artificial Sequence
  Description of Artificial Sequence: Synthetic oligonucleotide
ugaagccagacuuuugcag

SEQ ID NO: 2693254 - RNA, 19 nt, Artificial Sequence
  Description of Artificial Sequence: Synthetic oligonucleotide
cagaguauacacuccaggc

SEQ ID NO: 2693255 - RNA, 19 nt, Artificial Sequence
  Description of Artificial Sequence: Synthetic oligonucleotide
auaagcugcagauaauaga

SEQ ID NO: 2693256 - RNA, 19 nt, Artificial Sequence
  Description of Artificial Sequence: Synthetic oligonucleotide
aacagucacaugucccugg

SEQ ID NO: 2693257 - RNA, 19 nt, Artificial Sequence
  Description of Artificial Sequence: Synthetic oligonucleotide
aguuuggggaaccauacga

SEQ ID NO: 2693258 - RNA, 19 nt, Artificial Sequence
  Description of Artificial Sequence: Synthetic oligonucleotide
acuagacacagguugaagu

SEQ ID NO: 2693259 - RNA, 19 nt, Artificial Sequence
  Description of Artificial Sequence: Synthetic oligonucleotide
guagcuuaauguucaaacc

SEQ ID NO: 2693260 - RNA, 19 nt, Artificial Sequence
  Description of Artificial Sequence: Synthetic oligonucleotide
acuucuuggcccuagauua

SEQ ID NO: 2693261 - RNA, 19 nt, Artificial Sequence
  Description of Artificial Sequence: Synthetic oligonucleotide
gaagccagacuuuugcagc

SEQ ID NO: 2693262 - RNA, 19 nt, Artificial Sequence
  Description of Artificial Sequence: Synthetic oligonucleotide
caguguaacuucuuggccc

SEQ ID NO: 2693263 - RNA, 19 nt, Artificial Sequence
  Description of Artificial Sequence: Synthetic oligonucleotide
uggcuaaaauuucuggccc

SEQ ID NO: 2693264 - RNA, 19 nt, Artificial Sequence
  Description of Artificial Sequence: Synthetic oligonucleotide
gauaauagagaaaguuggc

SEQ ID NO: 2693265 - RNA, 19 nt, Artificial Sequence
  Description of Artificial Sequence: Synthetic oligonucleotide
ugugcuuuuggucuuggaa

SEQ ID NO: 2693266 - RNA, 19 nt, Artificial Sequence
  Description of Artificial Sequence: Synthetic oligonucleotide
uguuaggggcuccacaggc

SEQ ID NO: 2693267 - RNA, 19 nt, Artificial Sequence
  Description of Artificial Sequence: Synthetic oligonucleotide
agaaggaugggcucaaaga

SEQ ID NO: 2693268 - RNA, 19 nt, Artificial Sequence
  Description of Artificial Sequence: Synthetic oligonucleotide
cacaguguaacuucuuggc

SEQ ID NO: 2693269 - RNA, 19 nt, Artificial Sequence
  Description of Artificial Sequence: Synthetic oligonucleotide
ggcucaaagaucaaguugg

SEQ ID NO: 2693270 - RNA, 19 nt, Artificial Sequence
  Description of Artificial Sequence: Synthetic oligonucleotide
gugcuuuuggucuuggaag

SEQ ID NO: 2693271 - RNA, 19 nt, Artificial Sequence
  Description of Artificial Sequence: Synthetic oligonucleotide
agaaaguuggcuaaaauuu

SEQ ID NO: 2693272 - RNA, 19 nt, Artificial Sequence
  Description of Artificial Sequence: Synthetic oligonucleotide
uuugcagcagucagcuagg

SEQ ID NO: 2693273 - RNA, 19 nt, Artificial Sequence
  Description of Artificial Sequence: Synthetic oligonucleotide
agucacaugucccugggug

SEQ ID NO: 2693274 - RNA, 19 nt, Artificial Sequence
  Description of Artificial Sequence: Synthetic oligonucleotide
uacacuccaggccuguuag

SEQ ID NO: 2693275 - RNA, 19 nt, Artificial Sequence
  Description of Artificial Sequence: Synthetic oligonucleotide
augaugguugcagaggugg

SEQ ID NO: 2693276 - RNA, 19 nt, Artificial Sequence
  Description of Artificial Sequence: Synthetic oligonucleotide
uaguugaggcuucugggag

SEQ ID NO: 2693277 - RNA, 19 nt, Artificial Sequence
  Description of Artificial Sequence: Synthetic oligonucleotide
cuuaacaguccccaggcug

SEQ ID NO: 2693278 - RNA, 19 nt, Artificial Sequence
  Description of Artificial Sequence: Synthetic oligonucleotide
auaauagagaaaguuggcu

SEQ ID NO: 2693279 - RNA, 19 nt, Artificial Sequence
  Description of Artificial Sequence: Synthetic oligonucleotide
agcaugguccucuuugagg

SEQ ID NO: 2693280 - RNA, 19 nt, Artificial Sequence
  Description of Artificial Sequence: Synthetic oligonucleotide
acaggcaucaccccagcuc

SEQ ID NO: 2693281 - RNA, 19 nt, Artificial Sequence
  Description of Artificial Sequence: Synthetic oligonucleotide
uuggggaaccauacgaggc

SEQ ID NO: 2693282 - RNA, 19 nt, Artificial Sequence
  Description of Artificial Sequence: Synthetic oligonucleotide
ucugggagcuccauaggag

SEQ ID NO: 2693283 - RNA, 19 nt, Artificial Sequence
  Description of Artificial Sequence: Synthetic oligonucleotide
agacuuuugcagcagucag

SEQ ID NO: 2693284 - RNA, 19 nt, Artificial Sequence
  Description of Artificial Sequence: Synthetic oligonucleotide
aauuucuggcccauuccac

SEQ ID NO: 2693285 - RNA, 19 nt, Artificial Sequence
  Description of Artificial Sequence: Synthetic oligonucleotide
aggacaaaguaaugggcuc

SEQ ID NO: 2693286 - RNA, 19 nt, Artificial Sequence
  Description of Artificial Sequence: Synthetic oligonucleotide
uggcccuagauuauaauuc

SEQ ID NO: 2693287 - RNA, 19 nt, Artificial Sequence
  Description of Artificial Sequence: Synthetic oligonucleotide
agaacagucacaugucccu

SEQ ID NO: 2693288 - RNA, 19 nt, Artificial Sequence
  Description of Artificial Sequence: Synthetic oligonucleotide
aguugaggcuucugggagc

SEQ ID NO: 2693289 - RNA, 19 nt, Artificial Sequence
  Description of Artificial Sequence: Synthetic oligonucleotide
cuggaguucggccacauug

SEQ ID NO: 2693290 - RNA, 19 nt, Artificial Sequence
  Description of Artificial Sequence: Synthetic oligonucleotide
cucuuugagggucaaguag

SEQ ID NO: 2693291 - RNA, 19 nt, Artificial Sequence
  Description of Artificial Sequence: Synthetic oligonucleotide
ugugguggauccaggaggc

SEQ ID NO: 2693292 - RNA, 19 nt, Artificial Sequence
  Description of Artificial Sequence: Synthetic oligonucleotide
aaaguuggcuaaaauuucu

SEQ ID NO: 2693293 - RNA, 19 nt, Artificial Sequence
  Description of Artificial Sequence: Synthetic oligonucleotide
gcagcagucagcuaggcag

SEQ ID NO: 2693294 - RNA, 19 nt, Artificial Sequence
  Description of Artificial Sequence: Synthetic oligonucleotide
aagucagggcucauuuucc

SEQ ID NO: 2693295 - RNA, 19 nt, Artificial Sequence
  Description of Artificial Sequence: Synthetic oligonucleotide
uguucaaaccaaaggcaga

SEQ ID NO: 2693296 - RNA, 19 nt, Artificial Sequence
  Description of Artificial Sequence: Synthetic oligonucleotide
gagccuaaccaauaagcug

SEQ ID NO: 2693297 - RNA, 19 nt, Artificial Sequence
  Description of Artificial Sequence: Synthetic oligonucleotide
aagucagaguauacacucc

SEQ ID NO: 2693298 - RNA, 19 nt, Artificial Sequence
  Description of Artificial Sequence: Synthetic oligonucleotide
aucaaguuggugcacugug

SEQ ID NO: 2693299 - RNA, 19 nt, Artificial Sequence
  Description of Artificial Sequence: Synthetic oligonucleotide
ucaaguuggugcacugugc

SEQ ID NO: 2693300 - RNA, 19 nt, Artificial Sequence
  Description of Artificial Sequence: Synthetic oligonucleotide
cucauuuuccuaguugagg

SEQ ID NO: 2693301 - RNA, 19 nt, Artificial Sequence
  Description of Artificial Sequence: Synthetic oligonucleotide
aaagaucaaguuggugcac

SEQ ID NO: 2693302 - RNA, 19 nt, Artificial Sequence
  Description of Artificial Sequence: Synthetic oligonucleotide
ugugcuccagaacagucac

SEQ ID NO: 2693303 - RNA, 19 nt, Artificial Sequence
  Description of Artificial Sequence: Synthetic oligonucleotide
caaaguaaugggcucauca

SEQ ID NO: 2693304 - RNA, 19 nt, Artificial Sequence
  Description of Artificial Sequence: Synthetic oligonucleotide
cuagacacagguugaaguc

SEQ ID NO: 2693305 - RNA, 19 nt, Artificial Sequence
  Description of Artificial Sequence: Synthetic oligonucleotide
gcaugguccucuuugaggg

SEQ ID NO: 2693306 - RNA, 19 nt, Artificial Sequence
  Description of Artificial Sequence: Synthetic oligonucleotide
aacuucuuggcccuagauu

SEQ ID NO: 2693307 - RNA, 19 nt, Artificial Sequence
  Description of Artificial Sequence: Synthetic oligonucleotide
aaggaugggcucaaagauc

SEQ ID NO: 2693308 - RNA, 19 nt, Artificial Sequence
  Description of Artificial Sequence: Synthetic oligonucleotide
agucagaguauacacucca

SEQ ID NO: 2693309 - RNA, 19 nt, Artificial Sequence
  Description of Artificial Sequence: Synthetic oligonucleotide
agcugcagauaauagagaa

SEQ ID NO: 2693310 - RNA, 19 nt, Artificial Sequence
  Description of Artificial Sequence: Synthetic oligonucleotide
uucugggagcuccauagga

SEQ ID NO: 2693311 - RNA, 19 nt, Artificial Sequence
  Description of Artificial Sequence: Synthetic oligonucleotide
ggagguugaagacaggaug

SEQ ID NO: 2693312 - RNA, 19 nt, Artificial Sequence
  Description of Artificial Sequence: Synthetic oligonucleotide
aggcaggauggguagggcc

SEQ ID NO: 2693313 - RNA, 19 nt, Artificial Sequence
  Description of Artificial Sequence: Synthetic oligonucleotide
auguucaaaccaaaggcag

SEQ ID NO: 2693314 - RNA, 19 nt, Artificial Sequence
  Description of Artificial Sequence: Synthetic oligonucleotide
uaggagccuaaccaauaag

SEQ ID NO: 2693315 - RNA, 19 nt, Artificial Sequence
  Description of Artificial Sequence: Synthetic oligonucleotide
uucggccacauuguggugg

SEQ ID NO: 2693316 - RNA, 19 nt, Artificial Sequence
  Description of Artificial Sequence: Synthetic oligonucleotide
caaagaucaaguuggugca

SEQ ID NO: 2693317 - RNA, 19 nt, Artificial Sequence
  Description of Artificial Sequence: Synthetic oligonucleotide
uugaagucagggcucauuu

SEQ ID NO: 2693318 - RNA, 19 nt, Artificial Sequence
  Description of Artificial Sequence: Synthetic oligonucleotide
cauacgaggcuggaguucg

SEQ ID NO: 2693319 - RNA, 19 nt, Artificial Sequence
  Description of Artificial Sequence: Synthetic oligonucleotide
uccucuuugagggucaagu

SEQ ID NO: 2693320 - RNA, 19 nt, Artificial Sequence
  Description of Artificial Sequence: Synthetic oligonucleotide
gaaaguuggcuaaaauuuc

SEQ ID NO: 2693321 - RNA, 19 nt, Artificial Sequence
  Description of Artificial Sequence: Synthetic oligonucleotide
acuuuugcagcagucagcu

SEQ ID NO: 2693322 - RNA, 19 nt, Artificial Sequence
  Description of Artificial Sequence: Synthetic oligonucleotide
cuaaccaauaagcugcaga

SEQ ID NO: 2693323 - RNA, 19 nt, Artificial Sequence
  Description of Artificial Sequence: Synthetic oligonucleotide
ucagcuaggcagcuguccu

SEQ ID NO: 2693324 - RNA, 19 nt, Artificial Sequence
  Description of Artificial Sequence: Synthetic oligonucleotide
uggucuuggaagcaugguc

SEQ ID NO: 2693325 - RNA, 19 nt, Artificial Sequence
  Description of Artificial Sequence: Synthetic oligonucleotide
aguguaacuucuuggcccu

SEQ ID NO: 2693326 - RNA, 19 nt, Artificial Sequence
  Description of Artificial Sequence: Synthetic oligonucleotide
ucuggcccauuccacagug

SEQ ID NO: 2693327 - RNA, 19 nt, Artificial Sequence
  Description of Artificial Sequence: Synthetic oligonucleotide
acacagguugaagucaggg

SEQ ID NO: 2693328 - RNA, 19 nt, Artificial Sequence
  Description of Artificial Sequence: Synthetic oligonucleotide
gaugggcucaaagaucaag

SEQ ID NO: 2693329 - RNA, 19 nt, Artificial Sequence
  Description of Artificial Sequence: Synthetic oligonucleotide
uccauaggagccuaaccaa

SEQ ID NO: 2693330 - RNA, 19 nt, Artificial Sequence
  Description of Artificial Sequence: Synthetic oligonucleotide
gaguauacacuccaggccu

SEQ ID NO: 2693331 - RNA, 19 nt, Artificial Sequence
  Description of Artificial Sequence: Synthetic oligonucleotide
cacagguugaagucagggc

SEQ ID NO: 2693332 - RNA, 19 nt, Artificial Sequence
  Description of Artificial Sequence: Synthetic oligonucleotide
ggaagcaugguccucuuug

SEQ ID NO: 2693333 - RNA, 19 nt, Artificial Sequence
  Description of Artificial Sequence: Synthetic oligonucleotide
agggucaaguagcuuaaug

SEQ ID NO: 2693334 - RNA, 19 nt, Artificial Sequence
  Description of Artificial Sequence: Synthetic oligonucleotide
gaguuuggggaaccauacg

SEQ ID NO: 2693335 - RNA, 19 nt, Artificial Sequence
  Description of Artificial Sequence: Synthetic oligonucleotide
uggcaggaaagguaugggc

SEQ ID NO: 2693336 - RNA, 19 nt, Artificial Sequence
  Description of Artificial Sequence: Synthetic oligonucleotide
aagaucaaguuggugcacu

SEQ ID NO: 2693337 - RNA, 19 nt, Artificial Sequence
  Description of Artificial Sequence: Synthetic oligonucleotide
agagguggccaucuggcug

SEQ ID NO: 2693338 - RNA, 19 nt, Artificial Sequence
  Description of Artificial Sequence: Synthetic oligonucleotide
acagucacaugucccuggg

SEQ ID NO: 2693339 - RNA, 19 nt, Artificial Sequence
  Description of Artificial Sequence: Synthetic oligonucleotide
aggaggcauagguagaagu

SEQ ID NO: 2693340 - RNA, 19 nt, Artificial Sequence
  Description of Artificial Sequence: Synthetic oligonucleotide
aggaugaugguugcagagg

SEQ ID NO: 2693341 - RNA, 19 nt, Artificial Sequence
  Description of Artificial Sequence: Synthetic oligonucleotide
caaagagcaaaugcagaag

SEQ ID NO: 2693342 - RNA, 19 nt, Artificial Sequence
  Description of Artificial Sequence: Synthetic oligonucleotide
uaugggccuuaacaguccc

SEQ ID NO: 2693343 - RNA, 19 nt, Artificial Sequence
  Description of Artificial Sequence: Synthetic oligonucleotide
cugggagcuccauaggagc

SEQ ID NO: 2693344 - RNA, 19 nt, Artificial Sequence
  Description of Artificial Sequence: Synthetic oligonucleotide
uggaguucggccacauugu

SEQ ID NO: 2693345 - RNA, 19 nt, Artificial Sequence
  Description of Artificial Sequence: Synthetic oligonucleotide
uugaagacaggaugauggu

SEQ ID NO: 2693346 - RNA, 19 nt, Artificial Sequence
  Description of Artificial Sequence: Synthetic oligonucleotide
uuggcccuagauuauaauu

SEQ ID NO: 2693347 - RNA, 19 nt, Artificial Sequence
  Description of Artificial Sequence: Synthetic oligonucleotide
caggaugaugguugcagag

SEQ ID NO: 2693348 - RNA, 19 nt, Artificial Sequence
  Description of Artificial Sequence: Synthetic oligonucleotide
cuguauacuagacacaggu

SEQ ID NO: 2693349 - RNA, 19 nt, Artificial Sequence
  Description of Artificial Sequence: Synthetic oligonucleotide
uguauacuagacacagguu

SEQ ID NO: 2693350 - RNA, 19 nt, Artificial Sequence
  Description of Artificial Sequence: Synthetic oligonucleotide
uggggaaccauacgaggcu

SEQ ID NO: 2693351 - RNA, 19 nt, Artificial Sequence
  Description of Artificial Sequence: Synthetic oligonucleotide
uccagaacagucacauguc

SEQ ID NO: 2693352 - RNA, 19 nt, Artificial Sequence
  Description of Artificial Sequence: Synthetic oligonucleotide
gaaggaugggcucaaagau

SEQ ID NO: 2693353 - RNA, 19 nt, Artificial Sequence
  Description of Artificial Sequence: Synthetic oligonucleotide
uagacacagguugaaguca

SEQ ID NO: 2693354 - RNA, 19 nt, Artificial Sequence
  Description of Artificial Sequence: Synthetic oligonucleotide
guagaagucagaguauaca

SEQ ID NO: 2693355 - RNA, 19 nt, Artificial Sequence
  Description of Artificial Sequence: Synthetic oligonucleotide
uguaacuucuuggcccuag

SEQ ID NO: 2693356 - RNA, 19 nt, Artificial Sequence
  Description of Artificial Sequence: Synthetic oligonucleotide
gagguugaagacaggauga

SEQ ID NO: 2693357 - RNA, 19 nt, Artificial Sequence
  Description of Artificial Sequence: Synthetic oligonucleotide
guuuggggaaccauacgag

SEQ ID NO: 2693358 - RNA, 19 nt, Artificial Sequence
  Description of Artificial Sequence: Synthetic oligonucleotide
cuccaggccuguuaggggc

SEQ ID NO: 2693359 - RNA, 19 nt, Artificial Sequence
  Description of Artificial Sequence: Synthetic oligonucleotide
ugaggcuucugggagcucc

SEQ ID NO: 2693360 - RNA, 19 nt, Artificial Sequence
  Description of Artificial Sequence: Synthetic oligonucleotide
ugggagcuccauaggagcc

SEQ ID NO: 2693361 - RNA, 19 nt, Artificial Sequence
  Description of Artificial Sequence: Synthetic oligonucleotide
agguaugggccuuaacagu

SEQ ID NO: 2693362 - RNA, 19 nt, Artificial Sequence
  Description of Artificial Sequence: Synthetic oligonucleotide
ggucuuggaagcauggucc

SEQ ID NO: 2693363 - RNA, 19 nt, Artificial Sequence
  Description of Artificial Sequence: Synthetic oligonucleotide
auaggagccuaaccaauaa

SEQ ID NO: 2693364 - RNA, 19 nt, Artificial Sequence
  Description of Artificial Sequence: Synthetic oligonucleotide
ugaugguugcagagguggc

SEQ ID NO: 2693365 - RNA, 19 nt, Artificial Sequence
  Description of Artificial Sequence: Synthetic oligonucleotide
agaucaaguuggugcacug

SEQ ID NO: 2693366 - RNA, 19 nt, Artificial Sequence
  Description of Artificial Sequence: Synthetic oligonucleotide
uuuuccuaguugaggcuuc

SEQ ID NO: 2693367 - RNA, 19 nt, Artificial Sequence
  Description of Artificial Sequence: Synthetic oligonucleotide
ccuaguugaggcuucuggg

SEQ ID NO: 2693368 - RNA, 19 nt, Artificial Sequence
  Description of Artificial Sequence: Synthetic oligonucleotide
uacuagacacagguugaag

SEQ ID NO: 2693369 - RNA, 19 nt, Artificial Sequence
  Description of Artificial Sequence: Synthetic oligonucleotide
acuccaggccuguuagggg

SEQ ID NO: 2693370 - RNA, 19 nt, Artificial Sequence
  Description of Artificial Sequence: Synthetic oligonucleotide
gaguucggccacauugugg

SEQ ID NO: 2693371 - RNA, 19 nt, Artificial Sequence
  Description of Artificial Sequence: Synthetic oligonucleotide
gaggcauagguagaaguca

SEQ ID NO: 2693372 - RNA, 19 nt, Artificial Sequence
  Description of Artificial Sequence: Synthetic oligonucleotide
cuaguugaggcuucuggga

SEQ ID NO: 2693373 - RNA, 19 nt, Artificial Sequence
  Description of Artificial Sequence: Synthetic oligonucleotide
gucaaguagcuuaauguuc

SEQ ID NO: 2693374 - RNA, 19 nt, Artificial Sequence
  Description of Artificial Sequence: Synthetic oligonucleotide
ucuggcugggacuccugag

SEQ ID NO: 2693375 - RNA, 19 nt, Artificial Sequence
  Description of Artificial Sequence: Synthetic oligonucleotide
gaagcaugguccucuuuga

SEQ ID NO: 2693376 - RNA, 19 nt, Artificial Sequence
  Description of Artificial Sequence: Synthetic oligonucleotide
agaagucagaguauacacu

SEQ ID NO: 2693377 - RNA, 19 nt, Artificial Sequence
  Description of Artificial Sequence: Synthetic oligonucleotide
gacuuuugcagcagucagc

SEQ ID NO: 2693378 - RNA, 19 nt, Artificial Sequence
  Description of Artificial Sequence: Synthetic oligonucleotide
cacauugugguggauccag

SEQ ID NO: 2693379 - RNA, 19 nt, Artificial Sequence
  Description of Artificial Sequence: Synthetic oligonucleotide
uggagguugaagacaggau

SEQ ID NO: 2693380 - RNA, 19 nt, Artificial Sequence
  Description of Artificial Sequence: Synthetic oligonucleotide
ucuuggcccuagauuauaa

SEQ ID NO: 2693381 - RNA, 19 nt, Artificial Sequence
  Description of Artificial Sequence: Synthetic oligonucleotide
ugggccuuaacagucccca

SEQ ID NO: 2693382 - RNA, 19 nt, Artificial Sequence
  Description of Artificial Sequence: Synthetic oligonucleotide
ggcucauuuuccuaguuga

SEQ ID NO: 2693383 - RNA, 19 nt, Artificial Sequence
  Description of Artificial Sequence: Synthetic oligonucleotide
aggcagcuguccuguauac

SEQ ID NO: 2693384 - RNA, 19 nt, Artificial Sequence
  Description of Artificial Sequence: Synthetic oligonucleotide
ggcccuagauuauaauucc

SEQ ID NO: 2693385 - RNA, 19 nt, Artificial Sequence
  Description of Artificial Sequence: Synthetic oligonucleotide
gcauagguagaagucagag

SEQ ID NO: 2693386 - RNA, 19 nt, Artificial Sequence
  Description of Artificial Sequence: Synthetic oligonucleotide
caggaagaggacaaaguaa

SEQ ID NO: 2693387 - RNA, 19 nt, Artificial Sequence
  Description of Artificial Sequence: Synthetic oligonucleotide
uggguagggcccugaagcc

SEQ ID NO: 2693388 - RNA, 19 nt, Artificial Sequence
  Description of Artificial Sequence: Synthetic oligonucleotide
uaggcagcuguccuguaua

SEQ ID NO: 2693389 - RNA, 19 nt, Artificial Sequence
  Description of Artificial Sequence: Synthetic oligonucleotide
ggcaggaaagguaugggcc

SEQ ID NO: 2693390 - RNA, 19 nt, Artificial Sequence
  Description of Artificial Sequence: Synthetic oligonucleotide
ggcucaucaggcaggaugg

SEQ ID NO: 2693391 - RNA, 19 nt, Artificial Sequence
  Description of Artificial Sequence: Synthetic oligonucleotide
gaggacaaaguaaugggcu

SEQ ID NO: 2693392 - RNA, 19 nt, Artificial Sequence
  Description of Artificial Sequence: Synthetic oligonucleotide
ggccuuaacaguccccagg

SEQ ID NO: 2693393 - RNA, 19 nt, Artificial Sequence
  Description of Artificial Sequence: Synthetic oligonucleotide
agacacagguugaagucag

SEQ ID NO: 2693394 - RNA, 19 nt, Artificial Sequence
  Description of Artificial Sequence: Synthetic oligonucleotide
augggcucaaagaucaagu

SEQ ID NO: 2693395 - RNA, 19 nt, Artificial Sequence
  Description of Artificial Sequence: Synthetic oligonucleotide
aaguagcuuaauguucaaa

SEQ ID NO: 2693396 - RNA, 19 nt, Artificial Sequence
  Description of Artificial Sequence: Synthetic oligonucleotide
guucaaaccaaaggcagaa

SEQ ID NO: 2693397 - RNA, 19 nt, Artificial Sequence
  Description of Artificial Sequence: Synthetic oligonucleotide
ugggacuccugaguuuggg

SEQ ID NO: 2693398 - RNA, 19 nt, Artificial Sequence
  Description of Artificial Sequence: Synthetic oligonucleotide
uggcccauuccacagugua

SEQ ID NO: 2693399 - RNA, 19 nt, Artificial Sequence
  Description of Artificial Sequence: Synthetic oligonucleotide
ucaccccagcucacaaugc

SEQ ID NO: 2693400 - RNA, 19 nt, Artificial Sequence
  Description of Artificial Sequence: Synthetic oligonucleotide
ucacaugucccugggugug

SEQ ID NO: 2693401 - RNA, 19 nt, Artificial Sequence
  Description of Artificial Sequence: Synthetic oligonucleotide
agucagggcucauuuuccu

SEQ ID NO: 2693402 - RNA, 19 nt, Artificial Sequence
  Description of Artificial Sequence: Synthetic oligonucleotide
auaauuccaaagagcaaau

SEQ ID NO: 2693403 - RNA, 19 nt, Artificial Sequence
  Description of Artificial Sequence: Synthetic oligonucleotide
aggcauagguagaagucag

SEQ ID NO: 2693404 - RNA, 19 nt, Artificial Sequence
  Description of Artificial Sequence: Synthetic oligonucleotide
agcuccauaggagccuaac

SEQ ID NO: 2693405 - RNA, 19 nt, Artificial Sequence
  Description of Artificial Sequence: Synthetic oligonucleotide
uagagaaaguuggcuaaaa

SEQ ID NO: 2693406 - RNA, 19 nt, Artificial Sequence
  Description of Artificial Sequence: Synthetic oligonucleotide
cuguuaggggcuccacagg

SEQ ID NO: 2693407 - RNA, 19 nt, Artificial Sequence
  Description of Artificial Sequence: Synthetic oligonucleotide
cagguugaagucagggcuc

SEQ ID NO: 2693408 - RNA, 19 nt, Artificial Sequence
  Description of Artificial Sequence: Synthetic oligonucleotide
ugggcucaaagaucaaguu

SEQ ID NO: 2693409 - RNA, 19 nt, Artificial Sequence
  Description of Artificial Sequence: Synthetic oligonucleotide
cucaaagaucaaguuggug

SEQ ID NO: 2693410 - RNA, 19 nt, Artificial Sequence
  Description of Artificial Sequence: Synthetic oligonucleotide
guggccaucuggcugggac

SEQ ID NO: 2693411 - RNA, 19 nt, Artificial Sequence
  Description of Artificial Sequence: Synthetic oligonucleotide
gccuuaacaguccccaggc

SEQ ID NO: 2693412 - RNA, 19 nt, Artificial Sequence
  Description of Artificial Sequence: Synthetic oligonucleotide
gaaccauacgaggcuggag

SEQ ID NO: 2693413 - RNA, 19 nt, Artificial Sequence
  Description of Artificial Sequence: Synthetic oligonucleotide
ugaagacaggaugaugguu

SEQ ID NO: 2693414 - RNA, 19 nt, Artificial Sequence
  Description of Artificial Sequence: Synthetic oligonucleotide
gaacagucacaugucccug

SEQ ID NO: 2693415 - RNA, 19 nt, Artificial Sequence
  Description of Artificial Sequence: Synthetic oligonucleotide
caccccagcucacaaugcc

SEQ ID NO: 2693416 - RNA, 19 nt, Artificial Sequence
  Description of Artificial Sequence: Synthetic oligonucleotide
cagcagucagcuaggcagc

SEQ ID NO: 2693417 - RNA, 19 nt, Artificial Sequence
  Description of Artificial Sequence: Synthetic oligonucleotide
uggugcacugugcuccaga

SEQ ID NO: 2693418 - RNA, 19 nt, Artificial Sequence
  Description of Artificial Sequence: Synthetic oligonucleotide
cauugugguggauccagga

SEQ ID NO: 2693419 - RNA, 19 nt, Artificial Sequence
  Description of Artificial Sequence: Synthetic oligonucleotide
caggcaucaccccagcuca

SEQ ID NO: 2693420 - RNA, 19 nt, Artificial Sequence
  Description of Artificial Sequence: Synthetic oligonucleotide
gggucaaguagcuuaaugu

SEQ ID NO: 2693421 - RNA, 19 nt, Artificial Sequence
  Description of Artificial Sequence: Synthetic oligonucleotide
guaaugggcucaucaggca

SEQ ID NO: 2693422 - RNA, 19 nt, Artificial Sequence
  Description of Artificial Sequence: Synthetic oligonucleotide
caauaagcugcagauaaua

SEQ ID NO: 2693423 - RNA, 19 nt, Artificial Sequence
  Description of Artificial Sequence: Synthetic oligonucleotide
gguaugggccuuaacaguc

SEQ ID NO: 2693424 - RNA, 19 nt, Artificial Sequence
  Description of Artificial Sequence: Synthetic oligonucleotide
aaccaauaagcugcagaua

SEQ ID NO: 2693425 - RNA, 19 nt, Artificial Sequence
  Description of Artificial Sequence: Synthetic oligonucleotide
gaggcuggaguucggccac

SEQ ID NO: 2693426 - RNA, 19 nt, Artificial Sequence
  Description of Artificial Sequence: Synthetic oligonucleotide
acaaaguaaugggcucauc

SEQ ID NO: 2693427 - RNA, 19 nt, Artificial Sequence
  Description of Artificial Sequence: Synthetic oligonucleotide
auacacuccaggccuguua

SEQ ID NO: 2693428 - RNA, 19 nt, Artificial Sequence
  Description of Artificial Sequence: Synthetic oligonucleotide
cugaguuuggggaaccaua

SEQ ID NO: 2693429 - RNA, 19 nt, Artificial Sequence
  Description of Artificial Sequence: Synthetic oligonucleotide
cuggagguugaagacagga

SEQ ID NO: 2693430 - RNA, 19 nt, Artificial Sequence
  Description of Artificial Sequence: Synthetic oligonucleotide
gacacagguugaagucagg

SEQ ID NO: 2693431 - RNA, 19 nt, Artificial Sequence
  Description of Artificial Sequence: Synthetic oligonucleotide
ggcuggagguugaagacag

SEQ ID NO: 2693432 - RNA, 19 nt, Artificial Sequence
  Description of Artificial Sequence: Synthetic oligonucleotide
gggacuccugaguuugggg

SEQ ID NO: 2693433 - RNA, 19 nt, Artificial Sequence
  Description of Artificial Sequence: Synthetic oligonucleotide
cugaagccagacuuuugca

SEQ ID NO: 2693434 - RNA, 19 nt, Artificial Sequence
  Description of Artificial Sequence: Synthetic oligonucleotide
cauaggagccuaaccaaua

SEQ ID NO: 2693435 - RNA, 19 nt, Artificial Sequence
  Description of Artificial Sequence: Synthetic oligonucleotide
agguagaagucagaguaua

SEQ ID NO: 2693436 - RNA, 19 nt, Artificial Sequence
  Description of Artificial Sequence: Synthetic oligonucleotide
gucagcuaggcagcugucc

SEQ ID NO: 2693437 - RNA, 19 nt, Artificial Sequence
  Description of Artificial Sequence: Synthetic oligonucleotide
guaugggccuuaacagucc

SEQ ID NO: 2693438 - RNA, 19 nt, Artificial Sequence
  Description of Artificial Sequence: Synthetic oligonucleotide
auuccacaguguaacuucu

SEQ ID NO: 2693439 - RNA, 19 nt, Artificial Sequence
  Description of Artificial Sequence: Synthetic oligonucleotide
ucggccacauuguggugga

SEQ ID NO: 2693440 - RNA, 19 nt, Artificial Sequence
  Description of Artificial Sequence: Synthetic oligonucleotide
uggccaucuggcugggacu

SEQ ID NO: 2693441 - RNA, 19 nt, Artificial Sequence
  Description of Artificial Sequence: Synthetic oligonucleotide
ugguggauccaggaggcau

SEQ ID NO: 2693442 - RNA, 19 nt, Artificial Sequence
  Description of Artificial Sequence: Synthetic oligonucleotide
aguauacacuccaggccug

SEQ ID NO: 2693443 - RNA, 19 nt, Artificial Sequence
  Description of Artificial Sequence: Synthetic oligonucleotide
uuggucuuggaagcauggu

SEQ ID NO: 2693444 - RNA, 19 nt, Artificial Sequence
  Description of Artificial Sequence: Synthetic oligonucleotide
uacgaggcuggaguucggc

SEQ ID NO: 2693445 - RNA, 19 nt, Artificial Sequence
  Description of Artificial Sequence: Synthetic oligonucleotide
uggcugggacuccugaguu

SEQ ID NO: 2693446 - RNA, 19 nt, Artificial Sequence
  Description of Artificial Sequence: Synthetic oligonucleotide
accauacgaggcuggaguu

SEQ ID NO: 2693447 - RNA, 19 nt, Artificial Sequence
  Description of Artificial Sequence: Synthetic oligonucleotide
cagggccaggcccaguggc

SEQ ID NO: 2693448 - RNA, 19 nt, Artificial Sequence
  Description of Artificial Sequence: Synthetic oligonucleotide
gggcucauuuuccuaguug

SEQ ID NO: 2693449 - RNA, 19 nt, Artificial Sequence
  Description of Artificial Sequence: Synthetic oligonucleotide
augggccuuaacagucccc

SEQ ID NO: 2693450 - RNA, 19 nt, Artificial Sequence
  Description of Artificial Sequence: Synthetic oligonucleotide
cauagguagaagucagagu

SEQ ID NO: 2693451 - RNA, 19 nt, Artificial Sequence
  Description of Artificial Sequence: Synthetic oligonucleotide
uuuccuaguugaggcuucu

SEQ ID NO: 2693452 - RNA, 19 nt, Artificial Sequence
  Description of Artificial Sequence: Synthetic oligonucleotide
cagacuuuugcagcaguca

SEQ ID NO: 2693453 - RNA, 19 nt, Artificial Sequence
  Description of Artificial Sequence: Synthetic oligonucleotide
ggaggcauagguagaaguc

SEQ ID NO: 2693454 - RNA, 19 nt, Artificial Sequence
  Description of Artificial Sequence: Synthetic oligonucleotide
gguugaagacaggaugaug

SEQ ID NO: 2693455 - RNA, 19 nt, Artificial Sequence
  Description of Artificial Sequence: Synthetic oligonucleotide
gcagcuguccuguauacua

SEQ ID NO: 2693456 - RNA, 19 nt, Artificial Sequence
  Description of Artificial Sequence: Synthetic oligonucleotide
auacuagacacagguugaa

SEQ ID NO: 2693457 - RNA, 19 nt, Artificial Sequence
  Description of Artificial Sequence: Synthetic oligonucleotide
cagaagaggcccagggcca

SEQ ID NO: 2693458 - RNA, 19 nt, Artificial Sequence
  Description of Artificial Sequence: Synthetic oligonucleotide
gguagaagucagaguauac

SEQ ID NO: 2693459 - RNA, 19 nt, Artificial Sequence
  Description of Artificial Sequence: Synthetic oligonucleotide
aacaguccccaggcuggag

SEQ ID NO: 2693460 - RNA, 19 nt, Artificial Sequence
  Description of Artificial Sequence: Synthetic oligonucleotide
gguagggcccugaagccag

SEQ ID NO: 2693461 - RNA, 19 nt, Artificial Sequence
  Description of Artificial Sequence: Synthetic oligonucleotide
ggcuaaaauuucuggccca

SEQ ID NO: 2693462 - RNA, 19 nt, Artificial Sequence
  Description of Artificial Sequence: Synthetic oligonucleotide
ccuagauuauaauuccaaa

SEQ ID NO: 2693463 - RNA, 19 nt, Artificial Sequence
  Description of Artificial Sequence: Synthetic oligonucleotide
gcugggacuccugaguuug

SEQ ID NO: 2693464 - RNA, 19 nt, Artificial Sequence
  Description of Artificial Sequence: Synthetic oligonucleotide
cugggacuccugaguuugg

SEQ ID NO: 2693465 - RNA, 19 nt, Artificial Sequence
  Description of Artificial Sequence: Synthetic oligonucleotide
ggaguucggccacauugug

SEQ ID NO: 2693466 - RNA, 19 nt, Artificial Sequence
  Description of Artificial Sequence: Synthetic oligonucleotide
ggucaaguagcuuaauguu

SEQ ID NO: 2693467 - RNA, 19 nt, Artificial Sequence
  Description of Artificial Sequence: Synthetic oligonucleotide
uugcagagguggccaucug

SEQ ID NO: 2693468 - RNA, 19 nt, Artificial Sequence
  Description of Artificial Sequence: Synthetic oligonucleotide
agguugaagucagggcuca

SEQ ID NO: 2693469 - RNA, 19 nt, Artificial Sequence
  Description of Artificial Sequence: Synthetic oligonucleotide
uucuuggcccuagauuaua

SEQ ID NO: 2693470 - RNA, 19 nt, Artificial Sequence
  Description of Artificial Sequence: Synthetic oligonucleotide
caaaggcagaagaggccca

SEQ ID NO: 2693471 - RNA, 19 nt, Artificial Sequence
  Description of Artificial Sequence: Synthetic oligonucleotide
cuuugagggucaaguagcu

SEQ ID NO: 2693472 - RNA, 19 nt, Artificial Sequence
  Description of Artificial Sequence: Synthetic oligonucleotide
cauuuuccuaguugaggcu

SEQ ID NO: 2693473 - RNA, 19 nt, Artificial Sequence
  Description of Artificial Sequence: Synthetic oligonucleotide
uuccuaguugaggcuucug

SEQ ID NO: 2693474 - RNA, 19 nt, Artificial Sequence
  Description of Artificial Sequence: Synthetic oligonucleotide
cccuagauuauaauuccaa

SEQ ID NO: 2693475 - RNA, 19 nt, Artificial Sequence
  Description of Artificial Sequence: Synthetic oligonucleotide
uaacaguccccaggcugga

SEQ ID NO: 2693476 - RNA, 19 nt, Artificial Sequence
  Description of Artificial Sequence: Synthetic oligonucleotide
guuggugcacugugcucca

SEQ ID NO: 2693477 - RNA, 19 nt, Artificial Sequence
  Description of Artificial Sequence: Synthetic oligonucleotide
uugcagcagucagcuaggc

SEQ ID NO: 2693478 - RNA, 19 nt, Artificial Sequence
  Description of Artificial Sequence: Synthetic oligonucleotide
agggcccugaagccagacu

SEQ ID NO: 2693479 - RNA, 19 nt, Artificial Sequence
  Description of Artificial Sequence: Synthetic oligonucleotide
cuccugaguuuggggaacc

SEQ ID NO: 2693480 - RNA, 19 nt, Artificial Sequence
  Description of Artificial Sequence: Synthetic oligonucleotide
caggaggcauagguagaag

SEQ ID NO: 2693481 - RNA, 19 nt, Artificial Sequence
  Description of Artificial Sequence: Synthetic oligonucleotide
ccagacuuuugcagcaguc

SEQ ID NO: 2693482 - RNA, 19 nt, Artificial Sequence
  Description of Artificial Sequence: Synthetic oligonucleotide
agucagcuaggcagcuguc

SEQ ID NO: 2693483 - RNA, 19 nt, Artificial Sequence
  Description of Artificial Sequence: Synthetic oligonucleotide
gaucaaguuggugcacugu

SEQ ID NO: 2693484 - RNA, 19 nt, Artificial Sequence
  Description of Artificial Sequence: Synthetic oligonucleotide
uggaagcaugguccucuuu

SEQ ID NO: 2693485 - RNA, 19 nt, Artificial Sequence
  Description of Artificial Sequence: Synthetic oligonucleotide
cagucagcuaggcagcugu

SEQ ID NO: 2693486 - RNA, 19 nt, Artificial Sequence
  Description of Artificial Sequence: Synthetic oligonucleotide
gggaaccauacgaggcugg

SEQ ID NO: 2693487 - RNA, 19 nt, Artificial Sequence
  Description of Artificial Sequence: Synthetic oligonucleotide
cacaugucccugggugugc

SEQ ID NO: 2693488 - RNA, 19 nt, Artificial Sequence
  Description of Artificial Sequence: Synthetic oligonucleotide
ggagccuaaccaauaagcu

SEQ ID NO: 2693489 - RNA, 19 nt, Artificial Sequence
  Description of Artificial Sequence: Synthetic oligonucleotide
caaguagcuuaauguucaa

SEQ ID NO: 2693490 - RNA, 19 nt, Artificial Sequence
  Description of Artificial Sequence: Synthetic oligonucleotide
caguggcaggaaagguaug

SEQ ID NO: 2693491 - RNA, 19 nt, Artificial Sequence
  Description of Artificial Sequence: Synthetic oligonucleotide
uaggggcuccacaggcauc

SEQ ID NO: 2693492 - RNA, 19 nt, Artificial Sequence
  Description of Artificial Sequence: Synthetic oligonucleotide
acaugucccugggugugcu

SEQ ID NO: 2693493 - RNA, 19 nt, Artificial Sequence
  Description of Artificial Sequence: Synthetic oligonucleotide
ugguugcagagguggccau

SEQ ID NO: 2693494 - RNA, 19 nt, Artificial Sequence
  Description of Artificial Sequence: Synthetic oligonucleotide
gucagggcucauuuuccua

SEQ ID NO: 2693495 - RNA, 19 nt, Artificial Sequence
  Description of Artificial Sequence: Synthetic oligonucleotide
uauacacuccaggccuguu

SEQ ID NO: 2693496 - RNA, 19 nt, Artificial Sequence
  Description of Artificial Sequence: Synthetic oligonucleotide
ugucccugggugugcuuuu

SEQ ID NO: 2693497 - RNA, 19 nt, Artificial Sequence
  Description of Artificial Sequence: Synthetic oligonucleotide
augucccugggugugcuuu

SEQ ID NO: 2693498 - RNA, 19 nt, Artificial Sequence
  Description of Artificial Sequence: Synthetic oligonucleotide
auacgaggcuggaguucgg

SEQ ID NO: 2693499 - RNA, 19 nt, Artificial Sequence
  Description of Artificial Sequence: Synthetic oligonucleotide
gcuguccuguauacuagac

SEQ ID NO: 2693500 - RNA, 19 nt, Artificial Sequence
  Description of Artificial Sequence: Synthetic oligonucleotide
uuggugcacugugcuccag

SEQ ID NO: 2693501 - RNA, 19 nt, Artificial Sequence
  Description of Artificial Sequence: Synthetic oligonucleotide
gugugcuuuuggucuugga

SEQ ID NO: 2693502 - RNA, 19 nt, Artificial Sequence
  Description of Artificial Sequence: Synthetic oligonucleotide
gcacugugcuccagaacag

SEQ ID NO: 2693503 - RNA, 19 nt, Artificial Sequence
  Description of Artificial Sequence: Synthetic oligonucleotide
cuggcugggacuccugagu

SEQ ID NO: 2693504 - RNA, 19 nt, Artificial Sequence
  Description of Artificial Sequence: Synthetic oligonucleotide
gggccuuaacaguccccag

SEQ ID NO: 2693505 - RNA, 19 nt, Artificial Sequence
  Description of Artificial Sequence: Synthetic oligonucleotide
gaggcuucugggagcucca

SEQ ID NO: 2693506 - RNA, 19 nt, Artificial Sequence
  Description of Artificial Sequence: Synthetic oligonucleotide
cuuggcccuagauuauaau

SEQ ID NO: 2693507 - RNA, 19 nt, Artificial Sequence
  Description of Artificial Sequence: Synthetic oligonucleotide
guccucuuugagggucaag

SEQ ID NO: 2693508 - RNA, 19 nt, Artificial Sequence
  Description of Artificial Sequence: Synthetic oligonucleotide
ggaaccauacgaggcugga

SEQ ID NO: 2693509 - RNA, 19 nt, Artificial Sequence
  Description of Artificial Sequence: Synthetic oligonucleotide
cuuuuggucuuggaagcau

SEQ ID NO: 2693510 - RNA, 19 nt, Artificial Sequence
  Description of Artificial Sequence: Synthetic oligonucleotide
aggaaagguaugggccuua

SEQ ID NO: 2693511 - RNA, 19 nt, Artificial Sequence
  Description of Artificial Sequence: Synthetic oligonucleotide
gcuuuuggucuuggaagca

SEQ ID NO: 2693512 - RNA, 19 nt, Artificial Sequence
  Description of Artificial Sequence: Synthetic oligonucleotide
gggcccugaagccagacuu

SEQ ID NO: 2693513 - RNA, 19 nt, Artificial Sequence
  Description of Artificial Sequence: Synthetic oligonucleotide
guugaagucagggcucauu

SEQ ID NO: 2693514 - RNA, 19 nt, Artificial Sequence
  Description of Artificial Sequence: Synthetic oligonucleotide
gucccugggugugcuuuug

SEQ ID NO: 2693515 - RNA, 19 nt, Artificial Sequence
  Description of Artificial Sequence: Synthetic oligonucleotide
ggcauagguagaagucaga

SEQ ID NO: 2693516 - RNA, 19 nt, Artificial Sequence
  Description of Artificial Sequence: Synthetic oligonucleotide
ccaguggcaggaaagguau

SEQ ID NO: 2693517 - RNA, 19 nt, Artificial Sequence
  Description of Artificial Sequence: Synthetic oligonucleotide
caggccuguuaggggcucc

SEQ ID NO: 2693518 - RNA, 19 nt, Artificial Sequence
  Description of Artificial Sequence: Synthetic oligonucleotide
aggccuguuaggggcucca

SEQ ID NO: 2693519 - RNA, 19 nt, Artificial Sequence
  Description of Artificial Sequence: Synthetic oligonucleotide
guauacacuccaggccugu

SEQ ID NO: 2693520 - RNA, 19 nt, Artificial Sequence
  Description of Artificial Sequence: Synthetic oligonucleotide
cccaguggcaggaaaggua

SEQ ID NO: 2693521 - RNA, 19 nt, Artificial Sequence
  Description of Artificial Sequence: Synthetic oligonucleotide
ggccaucuggcugggacuc

SEQ ID NO: 2693522 - RNA, 19 nt, Artificial Sequence
  Description of Artificial Sequence: Synthetic oligonucleotide
cccugaagccagacuuuug

SEQ ID NO: 2693523 - RNA, 19 nt, Artificial Sequence
  Description of Artificial Sequence: Synthetic oligonucleotide
gcccuagauuauaauucca

SEQ ID NO: 2693524 - RNA, 19 nt, Artificial Sequence
  Description of Artificial Sequence: Synthetic oligonucleotide
gcaucaccccagcucacaa

SEQ ID NO: 2693525 - RNA, 19 nt, Artificial Sequence
  Description of Artificial Sequence: Synthetic oligonucleotide
ccuaaccaauaagcugcag

SEQ ID NO: 2693526 - RNA, 19 nt, Artificial Sequence
  Description of Artificial Sequence: Synthetic oligonucleotide
cuuuugcagcagucagcua

SEQ ID NO: 2693527 - RNA, 19 nt, Artificial Sequence
  Description of Artificial Sequence: Synthetic oligonucleotide
agguggccaucuggcuggg

SEQ ID NO: 2693528 - RNA, 19 nt, Artificial Sequence
  Description of Artificial Sequence: Synthetic oligonucleotide
ccauacgaggcuggaguuc

SEQ ID NO: 2693529 - RNA, 19 nt, Artificial Sequence
  Description of Artificial Sequence: Synthetic oligonucleotide
ggguagggcccugaagcca

SEQ ID NO: 2693530 - RNA, 19 nt, Artificial Sequence
  Description of Artificial Sequence: Synthetic oligonucleotide
caugguccucuuugagggu

SEQ ID NO: 2693531 - RNA, 19 nt, Artificial Sequence
  Description of Artificial Sequence: Synthetic oligonucleotide
ggcaucaccccagcucaca

SEQ ID NO: 2693532 - RNA, 19 nt, Artificial Sequence
  Description of Artificial Sequence: Synthetic oligonucleotide
ggaaagguaugggccuuaa

SEQ ID NO: 2693533 - RNA, 19 nt, Artificial Sequence
  Description of Artificial Sequence: Synthetic oligonucleotide
caggcccaguggcaggaaa

SEQ ID NO: 2693534 - RNA, 19 nt, Artificial Sequence
  Description of Artificial Sequence: Synthetic oligonucleotide
gccuaaccaauaagcugca

SEQ ID NO: 2693535 - RNA, 19 nt, Artificial Sequence
  Description of Artificial Sequence: Synthetic oligonucleotide
caggauggguagggcccug

SEQ ID NO: 2693536 - RNA, 19 nt, Artificial Sequence
  Description of Artificial Sequence: Synthetic oligonucleotide
uugaggcuucugggagcuc

SEQ ID NO: 2693537 - RNA, 19 nt, Artificial Sequence
  Description of Artificial Sequence: Synthetic oligonucleotide
ccauaggagccuaaccaau

SEQ ID NO: 2693538 - RNA, 19 nt, Artificial Sequence
  Description of Artificial Sequence: Synthetic oligonucleotide
ggcccauuccacaguguaa

SEQ ID NO: 2693539 - RNA, 19 nt, Artificial Sequence
  Description of Artificial Sequence: Synthetic oligonucleotide
gugguggauccaggaggca

SEQ ID NO: 2693540 - RNA, 19 nt, Artificial Sequence
  Description of Artificial Sequence: Synthetic oligonucleotide
ggcuucugggagcuccaua

SEQ ID NO: 2693541 - RNA, 19 nt, Artificial Sequence
  Description of Artificial Sequence: Synthetic oligonucleotide
gccagacuuuugcagcagu

SEQ ID NO: 2693542 - RNA, 19 nt, Artificial Sequence
  Description of Artificial Sequence: Synthetic oligonucleotide
aggcuucugggagcuccau

SEQ ID NO: 2693543 - RNA, 19 nt, Artificial Sequence
  Description of Artificial Sequence: Synthetic oligonucleotide
ggagcuccauaggagccua

SEQ ID NO: 2693544 - RNA, 19 nt, Artificial Sequence
  Description of Artificial Sequence: Synthetic oligonucleotide
ugggcucaucaggcaggau

SEQ ID NO: 2693545 - RNA, 19 nt, Artificial Sequence
  Description of Artificial Sequence: Synthetic oligonucleotide
aggcuggaguucggccaca

SEQ ID NO: 2693546 - RNA, 19 nt, Artificial Sequence
  Description of Artificial Sequence: Synthetic oligonucleotide
cagucacaugucccugggu

SEQ ID NO: 2693547 - RNA, 19 nt, Artificial Sequence
  Description of Artificial Sequence: Synthetic oligonucleotide
gagggucaaguagcuuaau

SEQ ID NO: 2693548 - RNA, 19 nt, Artificial Sequence
  Description of Artificial Sequence: Synthetic oligonucleotide
guagggcccugaagccaga

SEQ ID NO: 2693549 - RNA, 19 nt, Artificial Sequence
  Description of Artificial Sequence: Synthetic oligonucleotide
gggagcuccauaggagccu

SEQ ID NO: 2693550 - RNA, 19 nt, Artificial Sequence
  Description of Artificial Sequence: Synthetic oligonucleotide
ggcagcuguccuguauacu

SEQ ID NO: 2693551 - RNA, 19 nt, Artificial Sequence
  Description of Artificial Sequence: Synthetic oligonucleotide
caggaaagguaugggccuu

SEQ ID NO: 2693552 - RNA, 19 nt, Artificial Sequence
  Description of Artificial Sequence: Synthetic oligonucleotide
ccuuaacaguccccaggcu

SEQ ID NO: 2693553 - RNA, 19 nt, Artificial Sequence
  Description of Artificial Sequence: Synthetic oligonucleotide
cccugggugugcuuuuggu

SEQ ID NO: 2693554 - RNA, 19 nt, Artificial Sequence
  Description of Artificial Sequence: Synthetic oligonucleotide
ccacauugugguggaucca

SEQ ID NO: 2693555 - RNA, 19 nt, Artificial Sequence
  Description of Artificial Sequence: Synthetic oligonucleotide
gguccucuuugagggucaa

SEQ ID NO: 2693556 - RNA, 19 nt, Artificial Sequence
  Description of Artificial Sequence: Synthetic oligonucleotide
gcaggauggguagggcccu

SEQ ID NO: 2693557 - RNA, 19 nt, Artificial Sequence
  Description of Artificial Sequence: Synthetic oligonucleotide
gcccaguggcaggaaaggu

SEQ ID NO: 2693558 - RNA, 19 nt, Artificial Sequence
  Description of Artificial Sequence: Synthetic oligonucleotide
gcccugaagccagacuuuu

SEQ ID NO: 2693559 - RNA, 19 nt, Artificial Sequence
  Description of Artificial Sequence: Synthetic oligonucleotide
ggcccugaagccagacuuu

SEQ ID NO: 2693560 - RNA, 19 nt, Artificial Sequence
  Description of Artificial Sequence: Synthetic oligonucleotide
gguggccaucuggcuggga

SEQ ID NO: 2693561 - RNA, 19 nt, Artificial Sequence
  Description of Artificial Sequence: Synthetic oligonucleotide
gguugaagucagggcucau

SEQ ID NO: 2693562 - RNA, 19 nt, Artificial Sequence
  Description of Artificial Sequence: Synthetic oligonucleotide
ggcuggaguucggccacau

SEQ ID NO: 2693563 - RNA, 19 nt, Artificial Sequence
  Description of Artificial Sequence: Synthetic oligonucleotide
aauuguuagacuuauuaac

SEQ ID NO: 2693564 - RNA, 19 nt, Artificial Sequence
  Description of Artificial Sequence: Synthetic oligonucleotide
uuuuauagcauucaguuac

SEQ ID NO: 2693565 - RNA, 19 nt, Artificial Sequence
  Description of Artificial Sequence: Synthetic oligonucleotide
uccaaguuuacaaagaacc

SEQ ID NO: 2693566 - RNA, 19 nt, Artificial Sequence
  Description of Artificial Sequence: Synthetic oligonucleotide
auauaauuuguacauuucc

SEQ ID NO: 2693567 - RNA, 19 nt, Artificial Sequence
  Description of Artificial Sequence: Synthetic oligonucleotide
auacucaauagcuagguac

SEQ ID NO: 2693568 - RNA, 19 nt, Artificial Sequence
  Description of Artificial Sequence: Synthetic oligonucleotide
aauagcuagguacaaguag

SEQ ID NO: 2693569 - RNA, 19 nt, Artificial Sequence
  Description of Artificial Sequence: Synthetic oligonucleotide
aaguuuacaaagaaccucc

SEQ ID NO: 2693570 - RNA, 19 nt, Artificial Sequence
  Description of Artificial Sequence: Synthetic oligonucleotide
uauaauuuguacauuuccc

SEQ ID NO: 2693571 - RNA, 19 nt, Artificial Sequence
  Description of Artificial Sequence: Synthetic oligonucleotide
aauuguaauuuagaacugc

SEQ ID NO: 2693572 - RNA, 19 nt, Artificial Sequence
  Description of Artificial Sequence: Synthetic oligonucleotide
gauaauuguaauuuagaac

SEQ ID NO: 2693573 - RNA, 19 nt, Artificial Sequence
  Description of Artificial Sequence: Synthetic oligonucleotide
agagcaaaacauuuuauag

SEQ ID NO: 2693574 - RNA, 19 nt, Artificial Sequence
  Description of Artificial Sequence: Synthetic oligonucleotide
uuuacaaagaaccuccagu

SEQ ID NO: 2693575 - RNA, 19 nt, Artificial Sequence
  Description of Artificial Sequence: Synthetic oligonucleotide
uaggacaauaacaaaacug

SEQ ID NO: 2693576 - RNA, 19 nt, Artificial Sequence
  Description of Artificial Sequence: Synthetic oligonucleotide
aacaguauuuuauguguac

SEQ ID NO: 2693577 - RNA, 19 nt, Artificial Sequence
  Description of Artificial Sequence: Synthetic oligonucleotide
uuaacaguauuuuaugugu

SEQ ID NO: 2693578 - RNA, 19 nt, Artificial Sequence
  Description of Artificial Sequence: Synthetic oligonucleotide
auuaacaguauuuuaugug

SEQ ID NO: 2693579 - RNA, 19 nt, Artificial Sequence
  Description of Artificial Sequence: Synthetic oligonucleotide
auuuuauguguacagagca

SEQ ID NO: 2693580 - RNA, 19 nt, Artificial Sequence
  Description of Artificial Sequence: Synthetic oligonucleotide
guuacaaagguaaauauac

SEQ ID NO: 2693581 - RNA, 19 nt, Artificial Sequence
  Description of Artificial Sequence: Synthetic oligonucleotide
guaauuuagaacugccugg

SEQ ID NO: 2693582 - RNA, 19 nt, Artificial Sequence
  Description of Artificial Sequence: Synthetic oligonucleotide
guauuuuauguguacagag

SEQ ID NO: 2693583 - RNA, 19 nt, Artificial Sequence
  Description of Artificial Sequence: Synthetic oligonucleotide
uccaauauaauuuguacau

SEQ ID NO: 2693584 - RNA, 19 nt, Artificial Sequence
  Description of Artificial Sequence: Synthetic oligonucleotide
ucuaggacaauaacaaaac

SEQ ID NO: 2693585 - RNA, 19 nt, Artificial Sequence
  Description of Artificial Sequence: Synthetic oligonucleotide
uggguaguaaucuacauuc

SEQ ID NO: 2693586 - RNA, 19 nt, Artificial Sequence
  Description of Artificial Sequence: Synthetic oligonucleotide
acgucuugaaacuugaugu

SEQ ID NO: 2693587 - RNA, 19 nt, Artificial Sequence
  Description of Artificial Sequence: Synthetic oligonucleotide
ucaauagcuagguacaagu

SEQ ID NO: 2693588 - RNA, 19 nt, Artificial Sequence
  Description of Artificial Sequence: Synthetic oligonucleotide
auaauuuguacauuucccu

SEQ ID NO: 2693589 - RNA, 19 nt, Artificial Sequence
  Description of Artificial Sequence: Synthetic oligonucleotide
uacaaagguaaauauacaa

SEQ ID NO: 2693590 - RNA, 19 nt, Artificial Sequence
  Description of Artificial Sequence: Synthetic oligonucleotide
auagcuagguacaaguagc

SEQ ID NO: 2693591 - RNA, 19 nt, Artificial Sequence
  Description of Artificial Sequence: Synthetic oligonucleotide
ugucauuccagucaagcac

SEQ ID NO: 2693592 - RNA, 19 nt, Artificial Sequence
  Description of Artificial Sequence: Synthetic oligonucleotide
ugaaacuugaugucauucc

SEQ ID NO: 2693593 - RNA, 19 nt, Artificial Sequence
  Description of Artificial Sequence: Synthetic oligonucleotide
gaugcgugccuucagaacc

SEQ ID NO: 2693594 - RNA, 19 nt, Artificial Sequence
  Description of Artificial Sequence: Synthetic oligonucleotide
auuguaauuuagaacugcc

SEQ ID NO: 2693595 - RNA, 19 nt, Artificial Sequence
  Description of Artificial Sequence: Synthetic oligonucleotide
aagagauugaugauguuug

SEQ ID NO: 2693596 - RNA, 19 nt, Artificial Sequence
  Description of Artificial Sequence: Synthetic oligonucleotide
uuguuagacuuauuaacag

SEQ ID NO: 2693597 - RNA, 19 nt, Artificial Sequence
  Description of Artificial Sequence: Synthetic oligonucleotide
acaaagaaccuccaguucu

SEQ ID NO: 2693598 - RNA, 19 nt, Artificial Sequence
  Description of Artificial Sequence: Synthetic oligonucleotide
aacaucuaggacaauaaca

SEQ ID NO: 2693599 - RNA, 19 nt, Artificial Sequence
  Description of Artificial Sequence: Synthetic oligonucleotide
agcgaagugaagaagcugc

SEQ ID NO: 2693600 - RNA, 19 nt, Artificial Sequence
  Description of Artificial Sequence: Synthetic oligonucleotide
cuagguacaaguagccucg

SEQ ID NO: 2693601 - RNA, 19 nt, Artificial Sequence
  Description of Artificial Sequence: Synthetic oligonucleotide
uaagccauccuucuugaug

SEQ ID NO: 2693602 - RNA, 19 nt, Artificial Sequence
  Description of Artificial Sequence: Synthetic oligonucleotide
ugcagcgaagugaagaagc

SEQ ID NO: 2693603 - RNA, 19 nt, Artificial Sequence
  Description of Artificial Sequence: Synthetic oligonucleotide
aaguaguccaucccucggg

SEQ ID NO: 2693604 - RNA, 19 nt, Artificial Sequence
  Description of Artificial Sequence: Synthetic oligonucleotide
aagaaccuccaguucuccc

SEQ ID NO: 2693605 - RNA, 19 nt, Artificial Sequence
  Description of Artificial Sequence: Synthetic oligonucleotide
uacucaauagcuagguaca

SEQ ID NO: 2693606 - RNA, 19 nt, Artificial Sequence
  Description of Artificial Sequence: Synthetic oligonucleotide
ccaacuaacgucuugaaac

SEQ ID NO: 2693607 - RNA, 19 nt, Artificial Sequence
  Description of Artificial Sequence: Synthetic oligonucleotide
aaauccaggagguuuccgu

SEQ ID NO: 2693608 - RNA, 19 nt, Artificial Sequence
  Description of Artificial Sequence: Synthetic oligonucleotide
uaauuguaauuuagaacug

SEQ ID NO: 2693609 - RNA, 19 nt, Artificial Sequence
  Description of Artificial Sequence: Synthetic oligonucleotide
uccagucaagcacagauaa

SEQ ID NO: 2693610 - RNA, 19 nt, Artificial Sequence
  Description of Artificial Sequence: Synthetic oligonucleotide
cucucaagggaauuguuag

SEQ ID NO: 2693611 - RNA, 19 nt, Artificial Sequence
  Description of Artificial Sequence: Synthetic oligonucleotide
cugugaucaucuuuggagg

SEQ ID NO: 2693612 - RNA, 19 nt, Artificial Sequence
  Description of Artificial Sequence: Synthetic oligonucleotide
ucaaguaguccaucccucg

SEQ ID NO: 2693613 - RNA, 19 nt, Artificial Sequence
  Description of Artificial Sequence: Synthetic oligonucleotide
aggacaauaacaaaacugu

SEQ ID NO: 2693614 - RNA, 19 nt, Artificial Sequence
  Description of Artificial Sequence: Synthetic oligonucleotide
uuacaaagguaaauauaca

SEQ ID NO: 2693615 - RNA, 19 nt, Artificial Sequence
  Description of Artificial Sequence: Synthetic oligonucleotide
uaaucuacauuccaauaua

SEQ ID NO: 2693616 - RNA, 19 nt, Artificial Sequence
  Description of Artificial Sequence: Synthetic oligonucleotide
auuccagucaagcacagau

SEQ ID NO: 2693617 - RNA, 19 nt, Artificial Sequence
  Description of Artificial Sequence: Synthetic oligonucleotide
uguuagacuuauuaacagu

SEQ ID NO: 2693618 - RNA, 19 nt, Artificial Sequence
  Description of Artificial Sequence: Synthetic oligonucleotide
agauugaugauguuuggau

SEQ ID NO: 2693619 - RNA, 19 nt, Artificial Sequence
  Description of Artificial Sequence: Synthetic oligonucleotide
ucaagcacagauaauugua

SEQ ID NO: 2693620 - RNA, 19 nt, Artificial Sequence
  Description of Artificial Sequence: Synthetic oligonucleotide
uuacaaagaaccuccaguu

SEQ ID NO: 2693621 - RNA, 19 nt, Artificial Sequence
  Description of Artificial Sequence: Synthetic oligonucleotide
uaauuuagaacugccuggc

SEQ ID NO: 2693622 - RNA, 19 nt, Artificial Sequence
  Description of Artificial Sequence: Synthetic oligonucleotide
gaugucauuccagucaagc

SEQ ID NO: 2693623 - RNA, 19 nt, Artificial Sequence
  Description of Artificial Sequence: Synthetic oligonucleotide
auuguuagacuuauuaaca

SEQ ID NO: 2693624 - RNA, 19 nt, Artificial Sequence
  Description of Artificial Sequence: Synthetic oligonucleotide
caguauuuuauguguacag

SEQ ID NO: 2693625 - RNA, 19 nt, Artificial Sequence
  Description of Artificial Sequence: Synthetic oligonucleotide
uacagagcaaaacauuuua

SEQ ID NO: 2693626 - RNA, 19 nt, Artificial Sequence
  Description of Artificial Sequence: Synthetic oligonucleotide
gaauuguuagacuuauuaa

SEQ ID NO: 2693627 - RNA, 19 nt, Artificial Sequence
  Description of Artificial Sequence: Synthetic oligonucleotide
aaagaaccuccaguucucc

SEQ ID NO: 2693628 - RNA, 19 nt, Artificial Sequence
  Description of Artificial Sequence: Synthetic oligonucleotide
uuuauguguacagagcaaa

SEQ ID NO: 2693629 - RNA, 19 nt, Artificial Sequence
  Description of Artificial Sequence: Synthetic oligonucleotide
gaaacuugaugucauucca

SEQ ID NO: 2693630 - RNA, 19 nt, Artificial Sequence
  Description of Artificial Sequence: Synthetic oligonucleotide
agccucgguguucacaugc

SEQ ID NO: 2693631 - RNA, 19 nt, Artificial Sequence
  Description of Artificial Sequence: Synthetic oligonucleotide
uguccaaguuuacaaagaa

SEQ ID NO: 2693632 - RNA, 19 nt, Artificial Sequence
  Description of Artificial Sequence: Synthetic oligonucleotide
ucuuggguaguaaucuaca

SEQ ID NO: 2693633 - RNA, 19 nt, Artificial Sequence
  Description of Artificial Sequence: Synthetic oligonucleotide
uuuauagcauucaguuaca

SEQ ID NO: 2693634 - RNA, 19 nt, Artificial Sequence
  Description of Artificial Sequence: Synthetic oligonucleotide
caucuuuggaggcauauuc

SEQ ID NO: 2693635 - RNA, 19 nt, Artificial Sequence
  Description of Artificial Sequence: Synthetic oligonucleotide
cuuauuaacaguauuuuau

SEQ ID NO: 2693636 - RNA, 19 nt, Artificial Sequence
  Description of Artificial Sequence: Synthetic oligonucleotide
agagauugaugauguuugg

SEQ ID NO: 2693637 - RNA, 19 nt, Artificial Sequence
  Description of Artificial Sequence: Synthetic oligonucleotide
cuagcacucggcuuuugcg

SEQ ID NO: 2693638 - RNA, 19 nt, Artificial Sequence
  Description of Artificial Sequence: Synthetic oligonucleotide
aaaagcugggucugucucu

SEQ ID NO: 2693639 - RNA, 19 nt, Artificial Sequence
  Description of Artificial Sequence: Synthetic oligonucleotide
uuuuauguguacagagcaa

SEQ ID NO: 2693640 - RNA, 19 nt, Artificial Sequence
  Description of Artificial Sequence: Synthetic oligonucleotide
aaaguugccucuccaacua

SEQ ID NO: 2693641 - RNA, 19 nt, Artificial Sequence
  Description of Artificial Sequence: Synthetic oligonucleotide
acaucuaggacaauaacaa

SEQ ID NO: 2693642 - RNA, 19 nt, Artificial Sequence
  Description of Artificial Sequence: Synthetic oligonucleotide
ucuugaaacuugaugucau

SEQ ID NO: 2693643 - RNA, 19 nt, Artificial Sequence
  Description of Artificial Sequence: Synthetic oligonucleotide
gaagaagcugcugugagga

SEQ ID NO: 2693644 - RNA, 19 nt, Artificial Sequence
  Description of Artificial Sequence: Synthetic oligonucleotide
uuagacuuauuaacaguau

SEQ ID NO: 2693645 - RNA, 19 nt, Artificial Sequence
  Description of Artificial Sequence: Synthetic oligonucleotide
uuuagaacugccuggcuuu

SEQ ID NO: 2693646 - RNA, 19 nt, Artificial Sequence
  Description of Artificial Sequence: Synthetic oligonucleotide
uugauggcagcguccaucc

SEQ ID NO: 2693647 - RNA, 19 nt, Artificial Sequence
  Description of Artificial Sequence: Synthetic oligonucleotide
uggcgauggcaaaagcugg

SEQ ID NO: 2693648 - RNA, 19 nt, Artificial Sequence
  Description of Artificial Sequence: Synthetic oligonucleotide
uucauccucuugauggcag

SEQ ID NO: 2693649 - RNA, 19 nt, Artificial Sequence
  Description of Artificial Sequence: Synthetic oligonucleotide
ccugugaucaucuuuggag

SEQ ID NO: 2693650 - RNA, 19 nt, Artificial Sequence
  Description of Artificial Sequence: Synthetic oligonucleotide
uagacuuauuaacaguauu

SEQ ID NO: 2693651 - RNA, 19 nt, Artificial Sequence
  Description of Artificial Sequence: Synthetic oligonucleotide
aauuuagaacugccuggcu

SEQ ID NO: 2693652 - RNA, 19 nt, Artificial Sequence
  Description of Artificial Sequence: Synthetic oligonucleotide
uauguguacagagcaaaac

SEQ ID NO: 2693653 - RNA, 19 nt, Artificial Sequence
  Description of Artificial Sequence: Synthetic oligonucleotide
uauagcauucaguuacaaa

SEQ ID NO: 2693654 - RNA, 19 nt, Artificial Sequence
  Description of Artificial Sequence: Synthetic oligonucleotide
uggaugguguccaaguuua

SEQ ID NO: 2693655 - RNA, 19 nt, Artificial Sequence
  Description of Artificial Sequence: Synthetic oligonucleotide
auuuagaacugccuggcuu

SEQ ID NO: 2693656 - RNA, 19 nt, Artificial Sequence
  Description of Artificial Sequence: Synthetic oligonucleotide
uccaggagguuuccgugcg

SEQ ID NO: 2693657 - RNA, 19 nt, Artificial Sequence
  Description of Artificial Sequence: Synthetic oligonucleotide
ucggcuuuugcgcaggaaa

SEQ ID NO: 2693658 - RNA, 19 nt, Artificial Sequence
  Description of Artificial Sequence: Synthetic oligonucleotide
aguucucccgcgaaguccc

SEQ ID NO: 2693659 - RNA, 19 nt, Artificial Sequence
  Description of Artificial Sequence: Synthetic oligonucleotide
acuuauuaacaguauuuua

SEQ ID NO: 2693660 - RNA, 19 nt, Artificial Sequence
  Description of Artificial Sequence: Synthetic oligonucleotide
aguauuuuauguguacaga

SEQ ID NO: 2693661 - RNA, 19 nt, Artificial Sequence
  Description of Artificial Sequence: Synthetic oligonucleotide
agcauucaguuacaaaggu

SEQ ID NO: 2693662 - RNA, 19 nt, Artificial Sequence
  Description of Artificial Sequence: Synthetic oligonucleotide
cuuucauccucuugauggc

SEQ ID NO: 2693663 - RNA, 19 nt, Artificial Sequence
  Description of Artificial Sequence: Synthetic oligonucleotide
ucuagcacucggcuuuugc

SEQ ID NO: 2693664 - RNA, 19 nt, Artificial Sequence
  Description of Artificial Sequence: Synthetic oligonucleotide
aagcacagauaauuguaau

SEQ ID NO: 2693665 - RNA, 19 nt, Artificial Sequence
  Description of Artificial Sequence: Synthetic oligonucleotide
uagcuagguacaaguagcc

SEQ ID NO: 2693666 - RNA, 19 nt, Artificial Sequence
  Description of Artificial Sequence: Synthetic oligonucleotide
ucuccaacuaacgucuuga

SEQ ID NO: 2693667 - RNA, 19 nt, Artificial Sequence
  Description of Artificial Sequence: Synthetic oligonucleotide
cucaagggaauuguuagac

SEQ ID NO: 2693668 - RNA, 19 nt, Artificial Sequence
  Description of Artificial Sequence: Synthetic oligonucleotide
gguacaaguagccucggug

SEQ ID NO: 2693669 - RNA, 19 nt, Artificial Sequence
  Description of Artificial Sequence: Synthetic oligonucleotide
augguguccaaguuuacaa

SEQ ID NO: 2693670 - RNA, 19 nt, Artificial Sequence
  Description of Artificial Sequence: Synthetic oligonucleotide
ggaauuguuagacuuauua

SEQ ID NO: 2693671 - RNA, 19 nt, Artificial Sequence
  Description of Artificial Sequence: Synthetic oligonucleotide
uuauguguacagagcaaaa

SEQ ID NO: 2693672 - RNA, 19 nt, Artificial Sequence
  Description of Artificial Sequence: Synthetic oligonucleotide
uugaaacuugaugucauuc

SEQ ID NO: 2693673 - RNA, 19 nt, Artificial Sequence
  Description of Artificial Sequence: Synthetic oligonucleotide
cagauaauuguaauuuaga

SEQ ID NO: 2693674 - RNA, 19 nt, Artificial Sequence
  Description of Artificial Sequence: Synthetic oligonucleotide
uacaaagaaccuccaguuc

SEQ ID NO: 2693675 - RNA, 19 nt, Artificial Sequence
  Description of Artificial Sequence: Synthetic oligonucleotide
uagcacucggcuuuugcgc

SEQ ID NO: 2693676 - RNA, 19 nt, Artificial Sequence
  Description of Artificial Sequence: Synthetic oligonucleotide
uguucacaugcucccaaga

SEQ ID NO: 2693677 - RNA, 19 nt, Artificial Sequence
  Description of Artificial Sequence: Synthetic oligonucleotide
agcugggucugucucuagc

SEQ ID NO: 2693678 - RNA, 19 nt, Artificial Sequence
  Description of Artificial Sequence: Synthetic oligonucleotide
ucugcagcgaagugaagaa

SEQ ID NO: 2693679 - RNA, 19 nt, Artificial Sequence
  Description of Artificial Sequence: Synthetic oligonucleotide
ugccuucagaaccuggcca

SEQ ID NO: 2693680 - RNA, 19 nt, Artificial Sequence
  Description of Artificial Sequence: Synthetic oligonucleotide
gugaagaagcugcugugag

SEQ ID NO: 2693681 - RNA, 19 nt, Artificial Sequence
  Description of Artificial Sequence: Synthetic oligonucleotide
acagcguggaagcagugcu

SEQ ID NO: 2693682 - RNA, 19 nt, Artificial Sequence
  Description of Artificial Sequence: Synthetic oligonucleotide
gauggcaaaagcugggucu

SEQ ID NO: 2693683 - RNA, 19 nt, Artificial Sequence
  Description of Artificial Sequence: Synthetic oligonucleotide
ucccaagagauugaugaug

SEQ ID NO: 2693684 - RNA, 19 nt, Artificial Sequence
  Description of Artificial Sequence: Synthetic oligonucleotide
uuggguaguaaucuacauu

SEQ ID NO: 2693685 - RNA, 19 nt, Artificial Sequence
  Description of Artificial Sequence: Synthetic oligonucleotide
uaacaguauuuuaugugua

SEQ ID NO: 2693686 - RNA, 19 nt, Artificial Sequence
  Description of Artificial Sequence: Synthetic oligonucleotide
gcucccaagagauugauga

SEQ ID NO: 2693687 - RNA, 19 nt, Artificial Sequence
  Description of Artificial Sequence: Synthetic oligonucleotide
auuuuauagcauucaguua

SEQ ID NO: 2693688 - RNA, 19 nt, Artificial Sequence
  Description of Artificial Sequence: Synthetic oligonucleotide
gugaggacagcguggaagc

SEQ ID NO: 2693689 - RNA, 19 nt, Artificial Sequence
  Description of Artificial Sequence: Synthetic oligonucleotide
uccaacuaacgucuugaaa

SEQ ID NO: 2693690 - RNA, 19 nt, Artificial Sequence
  Description of Artificial Sequence: Synthetic oligonucleotide
guuagacuuauuaacagua

SEQ ID NO: 2693691 - RNA, 19 nt, Artificial Sequence
  Description of Artificial Sequence: Synthetic oligonucleotide
cucuuggguaguaaucuac

SEQ ID NO: 2693692 - RNA, 19 nt, Artificial Sequence
  Description of Artificial Sequence: Synthetic oligonucleotide
uucuuucauccucuugaug

SEQ ID NO: 2693693 - RNA, 19 nt, Artificial Sequence
  Description of Artificial Sequence: Synthetic oligonucleotide
augucauuccagucaagca

SEQ ID NO: 2693694 - RNA, 19 nt, Artificial Sequence
  Description of Artificial Sequence: Synthetic oligonucleotide
ucaagggaauuguuagacu

SEQ ID NO: 2693695 - RNA, 19 nt, Artificial Sequence
  Description of Artificial Sequence: Synthetic oligonucleotide
ucucaagggaauuguuaga

SEQ ID NO: 2693696 - RNA, 19 nt, Artificial Sequence
  Description of Artificial Sequence: Synthetic oligonucleotide
agcacagauaauuguaauu

SEQ ID NO: 2693697 - RNA, 19 nt, Artificial Sequence
  Description of Artificial Sequence: Synthetic oligonucleotide
ugugcucucaagggaauug

SEQ ID NO: 2693698 - RNA, 19 nt, Artificial Sequence
  Description of Artificial Sequence: Synthetic oligonucleotide
guaaucuacauuccaauau

SEQ ID NO: 2693699 - RNA, 19 nt, Artificial Sequence
  Description of Artificial Sequence: Synthetic oligonucleotide
acaguauuuuauguguaca

SEQ ID NO: 2693700 - RNA, 19 nt, Artificial Sequence
  Description of Artificial Sequence: Synthetic oligonucleotide
uuggaugguguccaaguuu

SEQ ID NO: 2693701 - RNA, 19 nt, Artificial Sequence
  Description of Artificial Sequence: Synthetic oligonucleotide
acuaacgucuugaaacuug

SEQ ID NO: 2693702 - RNA, 19 nt, Artificial Sequence
  Description of Artificial Sequence: Synthetic oligonucleotide
agacuuauuaacaguauuu

SEQ ID NO: 2693703 - RNA, 19 nt, Artificial Sequence
  Description of Artificial Sequence: Synthetic oligonucleotide
caaguaguccaucccucgg

SEQ ID NO: 2693704 - RNA, 19 nt, Artificial Sequence
  Description of Artificial Sequence: Synthetic oligonucleotide
ucuugaugcgugccuucag

SEQ ID NO: 2693705 - RNA, 19 nt, Artificial Sequence
  Description of Artificial Sequence: Synthetic oligonucleotide
gggcauacucaauagcuag

SEQ ID NO: 2693706 - RNA, 19 nt, Artificial Sequence
  Description of Artificial Sequence: Synthetic oligonucleotide
ugccucuccaacuaacguc

SEQ ID NO: 2693707 - RNA, 19 nt, Artificial Sequence
  Description of Artificial Sequence: Synthetic oligonucleotide
ugcggggcauacucaauag

SEQ ID NO: 2693708 - RNA, 19 nt, Artificial Sequence
  Description of Artificial Sequence: Synthetic oligonucleotide
ucgggccacaucugcagcg

SEQ ID NO: 2693709 - RNA, 19 nt, Artificial Sequence
  Description of Artificial Sequence: Synthetic oligonucleotide
guugccucuccaacuaacg

SEQ ID NO: 2693710 - RNA, 19 nt, Artificial Sequence
  Description of Artificial Sequence: Synthetic oligonucleotide
uguuggcgauggcaaaagc

SEQ ID NO: 2693711 - RNA, 19 nt, Artificial Sequence
  Description of Artificial Sequence: Synthetic oligonucleotide
uggcucaaguaguccaucc

SEQ ID NO: 2693712 - RNA, 19 nt, Artificial Sequence
  Description of Artificial Sequence: Synthetic oligonucleotide
uuuggaugguguccaaguu

SEQ ID NO: 2693713 - RNA, 19 nt, Artificial Sequence
  Description of Artificial Sequence: Synthetic oligonucleotide
uugccucuccaacuaacgu

SEQ ID NO: 2693714 - RNA, 19 nt, Artificial Sequence
  Description of Artificial Sequence: Synthetic oligonucleotide
uguuuggaugguguccaag

SEQ ID NO: 2693715 - RNA, 19 nt, Artificial Sequence
  Description of Artificial Sequence: Synthetic oligonucleotide
gaaauccaggagguuuccg

SEQ ID NO: 2693716 - RNA, 19 nt, Artificial Sequence
  Description of Artificial Sequence: Synthetic oligonucleotide
aguuacaaagguaaauaua

SEQ ID NO: 2693717 - RNA, 19 nt, Artificial Sequence
  Description of Artificial Sequence: Synthetic oligonucleotide
cauccguaagccauccuuc

SEQ ID NO: 2693718 - RNA, 19 nt, Artificial Sequence
  Description of Artificial Sequence: Synthetic oligonucleotide
cuaacgucuugaaacuuga

SEQ ID NO: 2693719 - RNA, 19 nt, Artificial Sequence
  Description of Artificial Sequence: Synthetic oligonucleotide
caaagaaccuccaguucuc

SEQ ID NO: 2693720 - RNA, 19 nt, Artificial Sequence
  Description of Artificial Sequence: Synthetic oligonucleotide
cucaaguaguccaucccuc

SEQ ID NO: 2693721 - RNA, 19 nt, Artificial Sequence
  Description of Artificial Sequence: Synthetic oligonucleotide
gaaccuccaguucucccgc

SEQ ID NO: 2693722 - RNA, 19 nt, Artificial Sequence
  Description of Artificial Sequence: Synthetic oligonucleotide
uugaugcgugccuucagaa

SEQ ID NO: 2693723 - RNA, 19 nt, Artificial Sequence
  Description of Artificial Sequence: Synthetic oligonucleotide
uuggaggcauauucuuuca

SEQ ID NO: 2693724 - RNA, 19 nt, Artificial Sequence
  Description of Artificial Sequence: Synthetic oligonucleotide
gcuagguacaaguagccuc

SEQ ID NO: 2693725 - RNA, 19 nt, Artificial Sequence
  Description of Artificial Sequence: Synthetic oligonucleotide
acaaguagccucgguguuc

SEQ ID NO: 2693726 - RNA, 19 nt, Artificial Sequence
  Description of Artificial Sequence: Synthetic oligonucleotide
ugaugcgugccuucagaac

SEQ ID NO: 2693727 - RNA, 19 nt, Artificial Sequence
  Description of Artificial Sequence: Synthetic oligonucleotide
guaguaaucuacauuccaa

SEQ ID NO: 2693728 - RNA, 19 nt, Artificial Sequence
  Description of Artificial Sequence: Synthetic oligonucleotide
aguugccucuccaacuaac

SEQ ID NO: 2693729 - RNA, 19 nt, Artificial Sequence
  Description of Artificial Sequence: Synthetic oligonucleotide
cucaauagcuagguacaag

SEQ ID NO: 2693730 - RNA, 19 nt, Artificial Sequence
  Description of Artificial Sequence: Synthetic oligonucleotide
uuccgugcggggcauacuc

SEQ ID NO: 2693731 - RNA, 19 nt, Artificial Sequence
  Description of Artificial Sequence: Synthetic oligonucleotide
gacaauaacaaaacuguuu

SEQ ID NO: 2693732 - RNA, 19 nt, Artificial Sequence
  Description of Artificial Sequence: Synthetic oligonucleotide
ucauccucuugauggcagc

SEQ ID NO: 2693733 - RNA, 19 nt, Artificial Sequence
  Description of Artificial Sequence: Synthetic oligonucleotide
cagagcaaaacauuuuaua

SEQ ID NO: 2693734 - RNA, 19 nt, Artificial Sequence
  Description of Artificial Sequence: Synthetic oligonucleotide
ugggucugucucuagcacu

SEQ ID NO: 2693735 - RNA, 19 nt, Artificial Sequence
  Description of Artificial Sequence: Synthetic oligonucleotide
aggcauauucuuucauccu

SEQ ID NO: 2693736 - RNA, 19 nt, Artificial Sequence
  Description of Artificial Sequence: Synthetic oligonucleotide
aaccuggccaaaguugccu

SEQ ID NO: 2693737 - RNA, 19 nt, Artificial Sequence
  Description of Artificial Sequence: Synthetic oligonucleotide
uccucuugauggcagcguc

SEQ ID NO: 2693738 - RNA, 19 nt, Artificial Sequence
  Description of Artificial Sequence: Synthetic oligonucleotide
gaggacagcguggaagcag

SEQ ID NO: 2693739 - RNA, 19 nt, Artificial Sequence
  Description of Artificial Sequence: Synthetic oligonucleotide
cauccuucuugaugcgugc

SEQ ID NO: 2693740 - RNA, 19 nt, Artificial Sequence
  Description of Artificial Sequence: Synthetic oligonucleotide
ugguguccaaguuuacaaa

SEQ ID NO: 2693741 - RNA, 19 nt, Artificial Sequence
  Description of Artificial Sequence: Synthetic oligonucleotide
caagcacagauaauuguaa

SEQ ID NO: 2693742 - RNA, 19 nt, Artificial Sequence
  Description of Artificial Sequence: Synthetic oligonucleotide
gagauugaugauguuugga

SEQ ID NO: 2693743 - RNA, 19 nt, Artificial Sequence
  Description of Artificial Sequence: Synthetic oligonucleotide
accuggccaaaguugccuc

SEQ ID NO: 2693744 - RNA, 19 nt, Artificial Sequence
  Description of Artificial Sequence: Synthetic oligonucleotide
uuucauccucuugauggca

SEQ ID NO: 2693745 - RNA, 19 nt, Artificial Sequence
  Description of Artificial Sequence: Synthetic oligonucleotide
ggcauauucuuucauccuc

SEQ ID NO: 2693746 - RNA, 19 nt, Artificial Sequence
  Description of Artificial Sequence: Synthetic oligonucleotide
uuuguacauuucccuugcu

SEQ ID NO: 2693747 - RNA, 19 nt, Artificial Sequence
  Description of Artificial Sequence: Synthetic oligonucleotide
gucugucucuagcacucgg

SEQ ID NO: 2693748 - RNA, 19 nt, Artificial Sequence
  Description of Artificial Sequence: Synthetic oligonucleotide
guacaaguagccucggugu

SEQ ID NO: 2693749 - RNA, 19 nt, Artificial Sequence
  Description of Artificial Sequence: Synthetic oligonucleotide
agcacucggcuuuugcgca

SEQ ID NO: 2693750 - RNA, 19 nt, Artificial Sequence
  Description of Artificial Sequence: Synthetic oligonucleotide
auccguaagccauccuucu

SEQ ID NO: 2693751 - RNA, 19 nt, Artificial Sequence
  Description of Artificial Sequence: Synthetic oligonucleotide
uuccagucaagcacagaua

SEQ ID NO: 2693752 - RNA, 19 nt, Artificial Sequence
  Description of Artificial Sequence: Synthetic oligonucleotide
uuauagcauucaguuacaa

SEQ ID NO: 2693753 - RNA, 19 nt, Artificial Sequence
  Description of Artificial Sequence: Synthetic oligonucleotide
aaccuccaguucucccgcg

SEQ ID NO: 2693754 - RNA, 19 nt, Artificial Sequence
  Description of Artificial Sequence: Synthetic oligonucleotide
ugaucaucuuuggaggcau

SEQ ID NO: 2693755 - RNA, 19 nt, Artificial Sequence
  Description of Artificial Sequence: Synthetic oligonucleotide
uccaguucucccgcgaagu

SEQ ID NO: 2693756 - RNA, 19 nt, Artificial Sequence
  Description of Artificial Sequence: Synthetic oligonucleotide
uacaaguagccucgguguu

SEQ ID NO: 2693757 - RNA, 19 nt, Artificial Sequence
  Description of Artificial Sequence: Synthetic oligonucleotide
auggcaaaagcugggucug

SEQ ID NO: 2693758 - RNA, 19 nt, Artificial Sequence
  Description of Artificial Sequence: Synthetic oligonucleotide
ugcucccaagagauugaug

SEQ ID NO: 2693759 - RNA, 19 nt, Artificial Sequence
  Description of Artificial Sequence: Synthetic oligonucleotide
acaucugcagcgaagugaa

SEQ ID NO: 2693760 - RNA, 19 nt, Artificial Sequence
  Description of Artificial Sequence: Synthetic oligonucleotide
uucuugaugcgugccuuca

SEQ ID NO: 2693761 - RNA, 19 nt, Artificial Sequence
  Description of Artificial Sequence: Synthetic oligonucleotide
guuuggaugguguccaagu

SEQ ID NO: 2693762 - RNA, 19 nt, Artificial Sequence
  Description of Artificial Sequence: Synthetic oligonucleotide
cauccucuugauggcagcg

SEQ ID NO: 2693763 - RNA, 19 nt, Artificial Sequence
  Description of Artificial Sequence: Synthetic oligonucleotide
gacagcguggaagcagugc

SEQ ID NO: 2693764 - RNA, 19 nt, Artificial Sequence
  Description of Artificial Sequence: Synthetic oligonucleotide
gcuuuugcgcaggaaaucc

SEQ ID NO: 2693765 - RNA, 19 nt, Artificial Sequence
  Description of Artificial Sequence: Synthetic oligonucleotide
cuugaugcgugccuucaga

SEQ ID NO: 2693766 - RNA, 19 nt, Artificial Sequence
  Description of Artificial Sequence: Synthetic oligonucleotide
guccaaguuuacaaagaac

SEQ ID NO: 2693767 - RNA, 19 nt, Artificial Sequence
  Description of Artificial Sequence: Synthetic oligonucleotide
agggaauuguuagacuuau

SEQ ID NO: 2693768 - RNA, 19 nt, Artificial Sequence
  Description of Artificial Sequence: Synthetic oligonucleotide
ugauggcagcguccauccg

SEQ ID NO: 2693769 - RNA, 19 nt, Artificial Sequence
  Description of Artificial Sequence: Synthetic oligonucleotide
uggaggcauauucuuucau

SEQ ID NO: 2693770 - RNA, 19 nt, Artificial Sequence
  Description of Artificial Sequence: Synthetic oligonucleotide
gucaagcacagauaauugu

SEQ ID NO: 2693771 - RNA, 19 nt, Artificial Sequence
  Description of Artificial Sequence: Synthetic oligonucleotide
aagggaauuguuagacuua

SEQ ID NO: 2693772 - RNA, 19 nt, Artificial Sequence
  Description of Artificial Sequence: Synthetic oligonucleotide
aaguugccucuccaacuaa

SEQ ID NO: 2693773 - RNA, 19 nt, Artificial Sequence
  Description of Artificial Sequence: Synthetic oligonucleotide
gagguuuccgugcggggca

SEQ ID NO: 2693774 - RNA, 19 nt, Artificial Sequence
  Description of Artificial Sequence: Synthetic oligonucleotide
gugccuucagaaccuggcc

SEQ ID NO: 2693775 - RNA, 19 nt, Artificial Sequence
  Description of Artificial Sequence: Synthetic oligonucleotide
cacaucugcagcgaaguga

SEQ ID NO: 2693776 - RNA, 19 nt, Artificial Sequence
  Description of Artificial Sequence: Synthetic oligonucleotide
caguucucccgcgaagucc

SEQ ID NO: 2693777 - RNA, 19 nt, Artificial Sequence
  Description of Artificial Sequence: Synthetic oligonucleotide
caagggaauuguuagacuu

SEQ ID NO: 2693778 - RNA, 19 nt, Artificial Sequence
  Description of Artificial Sequence: Synthetic oligonucleotide
aacuaacgucuugaaacuu

SEQ ID NO: 2693779 - RNA, 19 nt, Artificial Sequence
  Description of Artificial Sequence: Synthetic oligonucleotide
ucccucgggccacaucugc

SEQ ID NO: 2693780 - RNA, 19 nt, Artificial Sequence
  Description of Artificial Sequence: Synthetic oligonucleotide
cugcugugaggacagcgug

SEQ ID NO: 2693781 - RNA, 19 nt, Artificial Sequence
  Description of Artificial Sequence: Synthetic oligonucleotide
cacagauaauuguaauuua

SEQ ID NO: 2693782 - RNA, 19 nt, Artificial Sequence
  Description of Artificial Sequence: Synthetic oligonucleotide
cugggucugucucuagcac

SEQ ID NO: 2693783 - RNA, 19 nt, Artificial Sequence
  Description of Artificial Sequence: Synthetic oligonucleotide
ucucccgcgaagucccugu

SEQ ID NO: 2693784 - RNA, 19 nt, Artificial Sequence
  Description of Artificial Sequence: Synthetic oligonucleotide
uaacgucuugaaacuugau

SEQ ID NO: 2693785 - RNA, 19 nt, Artificial Sequence
  Description of Artificial Sequence: Synthetic oligonucleotide
aagcagugcuguuggcgau

SEQ ID NO: 2693786 - RNA, 19 nt, Artificial Sequence
  Description of Artificial Sequence: Synthetic oligonucleotide
ugucucuagcacucggcuu

SEQ ID NO: 2693787 - RNA, 19 nt, Artificial Sequence
  Description of Artificial Sequence: Synthetic oligonucleotide
aaguagccucgguguucac

SEQ ID NO: 2693788 - RNA, 19 nt, Artificial Sequence
  Description of Artificial Sequence: Synthetic oligonucleotide
caacuaacgucuugaaacu

SEQ ID NO: 2693789 - RNA, 19 nt, Artificial Sequence
  Description of Artificial Sequence: Synthetic oligonucleotide
cucuccaacuaacgucuug

SEQ ID NO: 2693790 - RNA, 19 nt, Artificial Sequence
  Description of Artificial Sequence: Synthetic oligonucleotide
cuucuugaugcgugccuuc

SEQ ID NO: 2693791 - RNA, 19 nt, Artificial Sequence
  Description of Artificial Sequence: Synthetic oligonucleotide
agccauccuucuugaugcg

SEQ ID NO: 2693792 - RNA, 19 nt, Artificial Sequence
  Description of Artificial Sequence: Synthetic oligonucleotide
cuguuggcgauggcaaaag

SEQ ID NO: 2693793 - RNA, 19 nt, Artificial Sequence
  Description of Artificial Sequence: Synthetic oligonucleotide
aguuuacaaagaaccucca

SEQ ID NO: 2693794 - RNA, 19 nt, Artificial Sequence
  Description of Artificial Sequence: Synthetic oligonucleotide
uagguacaaguagccucgg

SEQ ID NO: 2693795 - RNA, 19 nt, Artificial Sequence
  Description of Artificial Sequence: Synthetic oligonucleotide
ggcucaaguaguccauccc

SEQ ID NO: 2693796 - RNA, 19 nt, Artificial Sequence
  Description of Artificial Sequence: Synthetic oligonucleotide
aguccaucccucgggccac

SEQ ID NO: 2693797 - RNA, 19 nt, Artificial Sequence
  Description of Artificial Sequence: Synthetic oligonucleotide
agcguggaagcagugcugu

SEQ ID NO: 2693798 - RNA, 19 nt, Artificial Sequence
  Description of Artificial Sequence: Synthetic oligonucleotide
ugcucucaagggaauuguu

SEQ ID NO: 2693799 - RNA, 19 nt, Artificial Sequence
  Description of Artificial Sequence: Synthetic oligonucleotide
cuaggacaauaacaaaacu

SEQ ID NO: 2693800 - RNA, 19 nt, Artificial Sequence
  Description of Artificial Sequence: Synthetic oligonucleotide
caauagcuagguacaagua

SEQ ID NO: 2693801 - RNA, 19 nt, Artificial Sequence
  Description of Artificial Sequence: Synthetic oligonucleotide
uccgugcggggcauacuca

SEQ ID NO: 2693802 - RNA, 19 nt, Artificial Sequence
  Description of Artificial Sequence: Synthetic oligonucleotide
caucuaggacaauaacaaa

SEQ ID NO: 2693803 - RNA, 19 nt, Artificial Sequence
  Description of Artificial Sequence: Synthetic oligonucleotide
caguuacaaagguaaauau

SEQ ID NO: 2693804 - RNA, 19 nt, Artificial Sequence
  Description of Artificial Sequence: Synthetic oligonucleotide
agcuagguacaaguagccu

SEQ ID NO: 2693805 - RNA, 19 nt, Artificial Sequence
  Description of Artificial Sequence: Synthetic oligonucleotide
cuccaguucucccgcgaag

SEQ ID NO: 2693806 - RNA, 19 nt, Artificial Sequence
  Description of Artificial Sequence: Synthetic oligonucleotide
caucccucgggccacaucu

SEQ ID NO: 2693807 - RNA, 19 nt, Artificial Sequence
  Description of Artificial Sequence: Synthetic oligonucleotide
ucccgcgaagucccuguga

SEQ ID NO: 2693808 - RNA, 19 nt, Artificial Sequence
  Description of Artificial Sequence: Synthetic oligonucleotide
ccauccuucuugaugcgug

SEQ ID NO: 2693809 - RNA, 19 nt, Artificial Sequence
  Description of Artificial Sequence: Synthetic oligonucleotide
ccguaagccauccuucuug

SEQ ID NO: 2693810 - RNA, 19 nt, Artificial Sequence
  Description of Artificial Sequence: Synthetic oligonucleotide
guagccucgguguucacau

SEQ ID NO: 2693811 - RNA, 19 nt, Artificial Sequence
  Description of Artificial Sequence: Synthetic oligonucleotide
agguacaaguagccucggu

SEQ ID NO: 2693812 - RNA, 19 nt, Artificial Sequence
  Description of Artificial Sequence: Synthetic oligonucleotide
auucaguuacaaagguaaa

SEQ ID NO: 2693813 - RNA, 19 nt, Artificial Sequence
  Description of Artificial Sequence: Synthetic oligonucleotide
gugaucaucuuuggaggca

SEQ ID NO: 2693814 - RNA, 19 nt, Artificial Sequence
  Description of Artificial Sequence: Synthetic oligonucleotide
caaguagccucgguguuca

SEQ ID NO: 2693815 - RNA, 19 nt, Artificial Sequence
  Description of Artificial Sequence: Synthetic oligonucleotide
ggcgauggcaaaagcuggg

SEQ ID NO: 2693816 - RNA, 19 nt, Artificial Sequence
  Description of Artificial Sequence: Synthetic oligonucleotide
aggacagcguggaagcagu

SEQ ID NO: 2693817 - RNA, 19 nt, Artificial Sequence
  Description of Artificial Sequence: Synthetic oligonucleotide
cagcgaagugaagaagcug

SEQ ID NO: 2693818 - RNA, 19 nt, Artificial Sequence
  Description of Artificial Sequence: Synthetic oligonucleotide
caagagauugaugauguuu

SEQ ID NO: 2693819 - RNA, 19 nt, Artificial Sequence
  Description of Artificial Sequence: Synthetic oligonucleotide
cugcagcgaagugaagaag

SEQ ID NO: 2693820 - RNA, 19 nt, Artificial Sequence
  Description of Artificial Sequence: Synthetic oligonucleotide
ggagguuuccgugcggggc

SEQ ID NO: 2693821 - RNA, 19 nt, Artificial Sequence
  Description of Artificial Sequence: Synthetic oligonucleotide
acucaauagcuagguacaa

SEQ ID NO: 2693822 - RNA, 19 nt, Artificial Sequence
  Description of Artificial Sequence: Synthetic oligonucleotide
ugaggacagcguggaagca

SEQ ID NO: 2693823 - RNA, 19 nt, Artificial Sequence
  Description of Artificial Sequence: Synthetic oligonucleotide
uuggcucaaguaguccauc

SEQ ID NO: 2693824 - RNA, 19 nt, Artificial Sequence
  Description of Artificial Sequence: Synthetic oligonucleotide
gucucuagcacucggcuuu

SEQ ID NO: 2693825 - RNA, 19 nt, Artificial Sequence
  Description of Artificial Sequence: Synthetic oligonucleotide
cagcguccauccguaagcc

SEQ ID NO: 2693826 - RNA, 19 nt, Artificial Sequence
  Description of Artificial Sequence: Synthetic oligonucleotide
cgugccuucagaaccuggc

SEQ ID NO: 2693827 - RNA, 19 nt, Artificial Sequence
  Description of Artificial Sequence: Synthetic oligonucleotide
uccauccguaagccauccu

SEQ ID NO: 2693828 - RNA, 19 nt, Artificial Sequence
  Description of Artificial Sequence: Synthetic oligonucleotide
agcguccauccguaagcca

SEQ ID NO: 2693829 - RNA, 19 nt, Artificial Sequence
  Description of Artificial Sequence: Synthetic oligonucleotide
cauacucaauagcuaggua

SEQ ID NO: 2693830 - RNA, 19 nt, Artificial Sequence
  Description of Artificial Sequence: Synthetic oligonucleotide
gcugggucugucucuagca

SEQ ID NO: 2693831 - RNA, 19 nt, Artificial Sequence
  Description of Artificial Sequence: Synthetic oligonucleotide
accuccaguucucccgcga

SEQ ID NO: 2693832 - RNA, 19 nt, Artificial Sequence
  Description of Artificial Sequence: Synthetic oligonucleotide
aagucccugugaucaucuu

SEQ ID NO: 2693833 - RNA, 19 nt, Artificial Sequence
  Description of Artificial Sequence: Synthetic oligonucleotide
ucuugauggcagcguccau

SEQ ID NO: 2693834 - RNA, 19 nt, Artificial Sequence
  Description of Artificial Sequence: Synthetic oligonucleotide
gcacagauaauuguaauuu

SEQ ID NO: 2693835 - RNA, 19 nt, Artificial Sequence
  Description of Artificial Sequence: Synthetic oligonucleotide
uuagaacugccuggcuuuu

SEQ ID NO: 2693836 - RNA, 19 nt, Artificial Sequence
  Description of Artificial Sequence: Synthetic oligonucleotide
guacauuucccuugcuuuu

SEQ ID NO: 2693837 - RNA, 19 nt, Artificial Sequence
  Description of Artificial Sequence: Synthetic oligonucleotide
ccucuugauggcagcgucc

SEQ ID NO: 2693838 - RNA, 19 nt, Artificial Sequence
  Description of Artificial Sequence: Synthetic oligonucleotide
cuuggguaguaaucuacau

SEQ ID NO: 2693839 - RNA, 19 nt, Artificial Sequence
  Description of Artificial Sequence: Synthetic oligonucleotide
guuuccgugcggggcauac

SEQ ID NO: 2693840 - RNA, 19 nt, Artificial Sequence
  Description of Artificial Sequence: Synthetic oligonucleotide
auccucuugauggcagcgu

SEQ ID NO: 2693841 - RNA, 19 nt, Artificial Sequence
  Description of Artificial Sequence: Synthetic oligonucleotide
ggaaauccaggagguuucc

SEQ ID NO: 2693842 - RNA, 19 nt, Artificial Sequence
  Description of Artificial Sequence: Synthetic oligonucleotide
guccauccguaagccaucc

SEQ ID NO: 2693843 - RNA, 19 nt, Artificial Sequence
  Description of Artificial Sequence: Synthetic oligonucleotide
gugcggggcauacucaaua

SEQ ID NO: 2693844 - RNA, 19 nt, Artificial Sequence
  Description of Artificial Sequence: Synthetic oligonucleotide
caucugcagcgaagugaag

SEQ ID NO: 2693845 - RNA, 19 nt, Artificial Sequence
  Description of Artificial Sequence: Synthetic oligonucleotide
uagccucgguguucacaug

SEQ ID NO: 2693846 - RNA, 19 nt, Artificial Sequence
  Description of Artificial Sequence: Synthetic oligonucleotide
uucucccgcgaagucccug

SEQ ID NO: 2693847 - RNA, 19 nt, Artificial Sequence
  Description of Artificial Sequence: Synthetic oligonucleotide
cgucuugaaacuugauguc

SEQ ID NO: 2693848 - RNA, 19 nt, Artificial Sequence
  Description of Artificial Sequence: Synthetic oligonucleotide
cuccaacuaacgucuugaa

SEQ ID NO: 2693849 - RNA, 19 nt, Artificial Sequence
  Description of Artificial Sequence: Synthetic oligonucleotide
cugucucuagcacucggcu

SEQ ID NO: 2693850 - RNA, 19 nt, Artificial Sequence
  Description of Artificial Sequence: Synthetic oligonucleotide
augcgugccuucagaaccu

SEQ ID NO: 2693851 - RNA, 19 nt, Artificial Sequence
  Description of Artificial Sequence: Synthetic oligonucleotide
gcggggcauacucaauagc

SEQ ID NO: 2693852 - RNA, 19 nt, Artificial Sequence
  Description of Artificial Sequence: Synthetic oligonucleotide
cccaagagauugaugaugu

SEQ ID NO: 2693853 - RNA, 19 nt, Artificial Sequence
  Description of Artificial Sequence: Synthetic oligonucleotide
ugcgugccuucagaaccug

SEQ ID NO: 2693854 - RNA, 19 nt, Artificial Sequence
  Description of Artificial Sequence: Synthetic oligonucleotide
uuuccgugcggggcauacu

SEQ ID NO: 2693855 - RNA, 19 nt, Artificial Sequence
  Description of Artificial Sequence: Synthetic oligonucleotide
uggcaaaagcugggucugu

SEQ ID NO: 2693856 - RNA, 19 nt, Artificial Sequence
  Description of Artificial Sequence: Synthetic oligonucleotide
gccaaaguugccucuccaa

SEQ ID NO: 2693857 - RNA, 19 nt, Artificial Sequence
  Description of Artificial Sequence: Synthetic oligonucleotide
caggaaauccaggagguuu

SEQ ID NO: 2693858 - RNA, 19 nt, Artificial Sequence
  Description of Artificial Sequence: Synthetic oligonucleotide
ggcuuuugcgcaggaaauc

SEQ ID NO: 2693859 - RNA, 19 nt, Artificial Sequence
  Description of Artificial Sequence: Synthetic oligonucleotide
gcauacucaauagcuaggu

SEQ ID NO: 2693860 - RNA, 19 nt, Artificial Sequence
  Description of Artificial Sequence: Synthetic oligonucleotide
ggucugucucuagcacucg

SEQ ID NO: 2693861 - RNA, 19 nt, Artificial Sequence
  Description of Artificial Sequence: Synthetic oligonucleotide
cuugaaacuugaugucauu

SEQ ID NO: 2693862 - RNA, 19 nt, Artificial Sequence
  Description of Artificial Sequence: Synthetic oligonucleotide
augcucccaagagauugau

SEQ ID NO: 2693863 - RNA, 19 nt, Artificial Sequence
  Description of Artificial Sequence: Synthetic oligonucleotide
guacagagcaaaacauuuu

SEQ ID NO: 2693864 - RNA, 19 nt, Artificial Sequence
  Description of Artificial Sequence: Synthetic oligonucleotide
acucggcuuuugcgcagga

SEQ ID NO: 2693865 - RNA, 19 nt, Artificial Sequence
  Description of Artificial Sequence: Synthetic oligonucleotide
auggcagcguccauccgua

SEQ ID NO: 2693866 - RNA, 19 nt, Artificial Sequence
  Description of Artificial Sequence: Synthetic oligonucleotide
gcucucaagggaauuguua

SEQ ID NO: 2693867 - RNA, 19 nt, Artificial Sequence
  Description of Artificial Sequence: Synthetic oligonucleotide
gcauucaguuacaaaggua

SEQ ID NO: 2693868 - RNA, 19 nt, Artificial Sequence
  Description of Artificial Sequence: Synthetic oligonucleotide
cgcgaagucccugugauca

SEQ ID NO: 2693869 - RNA, 19 nt, Artificial Sequence
  Description of Artificial Sequence: Synthetic oligonucleotide
ggcaaaagcugggucuguc

SEQ ID NO: 2693870 - RNA, 19 nt, Artificial Sequence
  Description of Artificial Sequence: Synthetic oligonucleotide
gccucuccaacuaacgucu

SEQ ID NO: 2693871 - RNA, 19 nt, Artificial Sequence
  Description of Artificial Sequence: Synthetic oligonucleotide
gcacucggcuuuugcgcag

SEQ ID NO: 2693872 - RNA, 19 nt, Artificial Sequence
  Description of Artificial Sequence: Synthetic oligonucleotide
gccucuuggguaguaaucu

SEQ ID NO: 2693873 - RNA, 19 nt, Artificial Sequence
  Description of Artificial Sequence: Synthetic oligonucleotide
gugcucucaagggaauugu

SEQ ID NO: 2693874 - RNA, 19 nt, Artificial Sequence
  Description of Artificial Sequence: Synthetic oligonucleotide
cucccgcgaagucccugug

SEQ ID NO: 2693875 - RNA, 19 nt, Artificial Sequence
  Description of Artificial Sequence: Synthetic oligonucleotide
gaucaucuuuggaggcaua

SEQ ID NO: 2693876 - RNA, 19 nt, Artificial Sequence
  Description of Artificial Sequence: Synthetic oligonucleotide
gcuguuggcgauggcaaaa

SEQ ID NO: 2693877 - RNA, 19 nt, Artificial Sequence
  Description of Artificial Sequence: Synthetic oligonucleotide
cguaagccauccuucuuga

SEQ ID NO: 2693878 - RNA, 19 nt, Artificial Sequence
  Description of Artificial Sequence: Synthetic oligonucleotide
ggggcauacucaauagcua

SEQ ID NO: 2693879 - RNA, 19 nt, Artificial Sequence
  Description of Artificial Sequence: Synthetic oligonucleotide
ccaggagguuuccgugcgg

SEQ ID NO: 2693880 - RNA, 19 nt, Artificial Sequence
  Description of Artificial Sequence: Synthetic oligonucleotide
ccaguucucccgcgaaguc

SEQ ID NO: 2693881 - RNA, 19 nt, Artificial Sequence
  Description of Artificial Sequence: Synthetic oligonucleotide
cucuagcacucggcuuuug

SEQ ID NO: 2693882 - RNA, 19 nt, Artificial Sequence
  Description of Artificial Sequence: Synthetic oligonucleotide
aucccucgggccacaucug

SEQ ID NO: 2693883 - RNA, 19 nt, Artificial Sequence
  Description of Artificial Sequence: Synthetic oligonucleotide
ccucgguguucacaugcuc

SEQ ID NO: 2693884 - RNA, 19 nt, Artificial Sequence
  Description of Artificial Sequence: Synthetic oligonucleotide
cggggcauacucaauagcu

SEQ ID NO: 2693885 - RNA, 19 nt, Artificial Sequence
  Description of Artificial Sequence: Synthetic oligonucleotide
guaagccauccuucuugau

SEQ ID NO: 2693886 - RNA, 19 nt, Artificial Sequence
  Description of Artificial Sequence: Synthetic oligonucleotide
ggaugguguccaaguuuac

SEQ ID NO: 2693887 - RNA, 19 nt, Artificial Sequence
  Description of Artificial Sequence: Synthetic oligonucleotide
gcgugccuucagaaccugg

SEQ ID NO: 2693888 - RNA, 19 nt, Artificial Sequence
  Description of Artificial Sequence: Synthetic oligonucleotide
gcagcgaagugaagaagcu

SEQ ID NO: 2693889 - RNA, 19 nt, Artificial Sequence
  Description of Artificial Sequence: Synthetic oligonucleotide
cccugugaucaucuuugga

SEQ ID NO: 2693890 - RNA, 19 nt, Artificial Sequence
  Description of Artificial Sequence: Synthetic oligonucleotide
agguuuccgugcggggcau

SEQ ID NO: 2693891 - RNA, 19 nt, Artificial Sequence
  Description of Artificial Sequence: Synthetic oligonucleotide
cguccauccguaagccauc

SEQ ID NO: 2693892 - RNA, 19 nt, Artificial Sequence
  Description of Artificial Sequence: Synthetic oligonucleotide
ggacagcguggaagcagug

SEQ ID NO: 2693893 - RNA, 19 nt, Artificial Sequence
  Description of Artificial Sequence: Synthetic oligonucleotide
gcguccauccguaagccau

SEQ ID NO: 2693894 - RNA, 19 nt, Artificial Sequence
  Description of Artificial Sequence: Synthetic oligonucleotide
ccauccguaagccauccuu

SEQ ID NO: 2693895 - RNA, 19 nt, Artificial Sequence
  Description of Artificial Sequence: Synthetic oligonucleotide
uccaucccucgggccacau

SEQ ID NO: 2693896 - RNA, 19 nt, Artificial Sequence
  Description of Artificial Sequence: Synthetic oligonucleotide
ccucuuggguaguaaucua

SEQ ID NO: 2693897 - RNA, 19 nt, Artificial Sequence
  Description of Artificial Sequence: Synthetic oligonucleotide
cgcaggaaauccaggaggu

SEQ ID NO: 2693898 - RNA, 19 nt, Artificial Sequence
  Description of Artificial Sequence: Synthetic oligonucleotide
cucggcuuuugcgcaggaa

SEQ ID NO: 2693899 - RNA, 19 nt, Artificial Sequence
  Description of Artificial Sequence: Synthetic oligonucleotide
gcgaagugaagaagcugcu

SEQ ID NO: 2693900 - RNA, 19 nt, Artificial Sequence
  Description of Artificial Sequence: Synthetic oligonucleotide
gcgauggcaaaagcugggu

SEQ ID NO: 2693901 - RNA, 19 nt, Artificial Sequence
  Description of Artificial Sequence: Synthetic oligonucleotide
ccgugcggggcauacucaa

SEQ ID NO: 2693902 - RNA, 19 nt, Artificial Sequence
  Description of Artificial Sequence: Synthetic oligonucleotide
ccgcgaagucccugugauc

SEQ ID NO: 2693903 - RNA, 19 nt, Artificial Sequence
  Description of Artificial Sequence: Synthetic oligonucleotide
ccuccaguucucccgcgaa

SEQ ID NO: 2693904 - RNA, 19 nt, Artificial Sequence
  Description of Artificial Sequence: Synthetic oligonucleotide
gggccacaucugcagcgaa

SEQ ID NO: 2693905 - RNA, 19 nt, Artificial Sequence
  Description of Artificial Sequence: Synthetic oligonucleotide
ccaucccucgggccacauc

SEQ ID NO: 2693906 - RNA, 19 nt, Artificial Sequence
  Description of Artificial Sequence: Synthetic oligonucleotide
gccauccuucuugaugcgu

SEQ ID NO: 2693907 - RNA, 19 nt, Artificial Sequence
  Description of Artificial Sequence: Synthetic oligonucleotide
cccgcgaagucccugugau

SEQ ID NO: 2693908 - RNA, 19 nt, Artificial Sequence
  Description of Artificial Sequence: Synthetic oligonucleotide
guccaucccucgggccaca

SEQ ID NO: 2693909 - RNA, 19 nt, Artificial Sequence
  Description of Artificial Sequence: Synthetic oligonucleotide
ccuucagaaccuggccaaa

SEQ ID NO: 2693910 - RNA, 19 nt, Artificial Sequence
  Description of Artificial Sequence: Synthetic oligonucleotide
cggcuuuugcgcaggaaau

SEQ ID NO: 2693911 - RNA, 19 nt, Artificial Sequence
  Description of Artificial Sequence: Synthetic oligonucleotide
gggaauuguuagacuuauu

SEQ ID NO: 2693912 - RNA, 19 nt, Artificial Sequence
  Description of Artificial Sequence: Synthetic oligonucleotide
gcgaagucccugugaucau

SEQ ID NO: 2693913 - RNA, 19 nt, Artificial Sequence
  Description of Artificial Sequence: Synthetic oligonucleotide
gccucgguguucacaugcu

SEQ ID NO: 2693914 - RNA, 19 nt, Artificial Sequence
  Description of Artificial Sequence: Synthetic oligonucleotide
ccaagagauugaugauguu

SEQ ID NO: 2693915 - RNA, 19 nt, Artificial Sequence
  Description of Artificial Sequence: Synthetic oligonucleotide
guucucccgcgaagucccu

SEQ ID NO: 2693916 - RNA, 19 nt, Artificial Sequence
  Description of Artificial Sequence: Synthetic oligonucleotide
gcaggaaauccaggagguu

SEQ ID NO: 2693917 - RNA, 19 nt, Artificial Sequence
  Description of Artificial Sequence: Synthetic oligonucleotide
gguuuccgugcggggcaua

SEQ ID NO: 2693918 - RNA, 19 nt, Artificial Sequence
  Description of Artificial Sequence: Synthetic oligonucleotide
gcguggaagcagugcuguu

SEQ ID NO: 2693919 - RNA, 19 nt, Artificial Sequence
  Description of Artificial Sequence: Synthetic oligonucleotide
cgugcggggcauacucaau

SEQ ID NO: 2693920 - RNA, 19 nt, Artificial Sequence
  Description of Artificial Sequence: Synthetic oligonucleotide
aucauuuuguccuuagccc

SEQ ID NO: 2693921 - RNA, 19 nt, Artificial Sequence
  Description of Artificial Sequence: Synthetic oligonucleotide
aaaaccgauuucaugagcc

SEQ ID NO: 2693922 - RNA, 19 nt, Artificial Sequence
  Description of Artificial Sequence: Synthetic oligonucleotide
uaucauuuuguccuuagcc

SEQ ID NO: 2693923 - RNA, 19 nt, Artificial Sequence
  Description of Artificial Sequence: Synthetic oligonucleotide
uccaaaaccgauuucauga

SEQ ID NO: 2693924 - RNA, 19 nt, Artificial Sequence
  Description of Artificial Sequence: Synthetic oligonucleotide
ugacuuuaaucccagcucg

SEQ ID NO: 2693925 - RNA, 19 nt, Artificial Sequence
  Description of Artificial Sequence: Synthetic oligonucleotide
aaaucauuacaucacggcu

SEQ ID NO: 2693926 - RNA, 19 nt, Artificial Sequence
  Description of Artificial Sequence: Synthetic oligonucleotide
accauuuaucauuuugucc

SEQ ID NO: 2693927 - RNA, 19 nt, Artificial Sequence
  Description of Artificial Sequence: Synthetic oligonucleotide
auucugugcacccagauug

SEQ ID NO: 2693928 - RNA, 19 nt, Artificial Sequence
  Description of Artificial Sequence: Synthetic oligonucleotide
gcaauagugacuuuaaucc

SEQ ID NO: 2693929 - RNA, 19 nt, Artificial Sequence
  Description of Artificial Sequence: Synthetic oligonucleotide
uggaagaaccaccacgucg

SEQ ID NO: 2693930 - RNA, 19 nt, Artificial Sequence
  Description of Artificial Sequence: Synthetic oligonucleotide
uguguugugaccuugcuuc

SEQ ID NO: 2693931 - RNA, 19 nt, Artificial Sequence
  Description of Artificial Sequence: Synthetic oligonucleotide
uaauucuuaaagaucugca

SEQ ID NO: 2693932 - RNA, 19 nt, Artificial Sequence
  Description of Artificial Sequence: Synthetic oligonucleotide
agcugacucagauaaauuc

SEQ ID NO: 2693933 - RNA, 19 nt, Artificial Sequence
  Description of Artificial Sequence: Synthetic oligonucleotide
aggacaaaucauuacauca

SEQ ID NO: 2693934 - RNA, 19 nt, Artificial Sequence
  Description of Artificial Sequence: Synthetic oligonucleotide
uccuggaagaaccaccacg

SEQ ID NO: 2693935 - RNA, 19 nt, Artificial Sequence
  Description of Artificial Sequence: Synthetic oligonucleotide
gauuucaugagccaacaga

SEQ ID NO: 2693936 - RNA, 19 nt, Artificial Sequence
  Description of Artificial Sequence: Synthetic oligonucleotide
caaaucauuacaucacggc

SEQ ID NO: 2693937 - RNA, 19 nt, Artificial Sequence
  Description of Artificial Sequence: Synthetic oligonucleotide
aucauuacaucacggcuac

SEQ ID NO: 2693938 - RNA, 19 nt, Artificial Sequence
  Description of Artificial Sequence: Synthetic oligonucleotide
ucauuuuguccuuagcccc

SEQ ID NO: 2693939 - RNA, 19 nt, Artificial Sequence
  Description of Artificial Sequence: Synthetic oligonucleotide
auaaauucugugcacccag

SEQ ID NO: 2693940 - RNA, 19 nt, Artificial Sequence
  Description of Artificial Sequence: Synthetic oligonucleotide
ugaccuugcuuccaaaacc

SEQ ID NO: 2693941 - RNA, 19 nt, Artificial Sequence
  Description of Artificial Sequence: Synthetic oligonucleotide
auuucaugagccaacagag

SEQ ID NO: 2693942 - RNA, 19 nt, Artificial Sequence
  Description of Artificial Sequence: Synthetic oligonucleotide
augaccagagcucuuuugg

SEQ ID NO: 2693943 - RNA, 19 nt, Artificial Sequence
  Description of Artificial Sequence: Synthetic oligonucleotide
agugacuuuaaucccagcu

SEQ ID NO: 2693944 - RNA, 19 nt, Artificial Sequence
  Description of Artificial Sequence: Synthetic oligonucleotide
uuacaucacggcuacacug

SEQ ID NO: 2693945 - RNA, 19 nt, Artificial Sequence
  Description of Artificial Sequence: Synthetic oligonucleotide
aucacggcuacacugcacg

SEQ ID NO: 2693946 - RNA, 19 nt, Artificial Sequence
  Description of Artificial Sequence: Synthetic oligonucleotide
aauagugacuuuaauccca

SEQ ID NO: 2693947 - RNA, 19 nt, Artificial Sequence
  Description of Artificial Sequence: Synthetic oligonucleotide
ucaugagccaacagagcgg

SEQ ID NO: 2693948 - RNA, 19 nt, Artificial Sequence
  Description of Artificial Sequence: Synthetic oligonucleotide
ugcaccuuuggccaggaug

SEQ ID NO: 2693949 - RNA, 19 nt, Artificial Sequence
  Description of Artificial Sequence: Synthetic oligonucleotide
cuaauucuuaaagaucugc

SEQ ID NO: 2693950 - RNA, 19 nt, Artificial Sequence
  Description of Artificial Sequence: Synthetic oligonucleotide
cuuuaaucccagcucgucg

SEQ ID NO: 2693951 - RNA, 19 nt, Artificial Sequence
  Description of Artificial Sequence: Synthetic oligonucleotide
agaaccaccacgucguaug

SEQ ID NO: 2693952 - RNA, 19 nt, Artificial Sequence
  Description of Artificial Sequence: Synthetic oligonucleotide
aucuccuugccacugagug

SEQ ID NO: 2693953 - RNA, 19 nt, Artificial Sequence
  Description of Artificial Sequence: Synthetic oligonucleotide
gacucagauaaauucugug

SEQ ID NO: 2693954 - RNA, 19 nt, Artificial Sequence
  Description of Artificial Sequence: Synthetic oligonucleotide
uguccuuagccccugggug

SEQ ID NO: 2693955 - RNA, 19 nt, Artificial Sequence
  Description of Artificial Sequence: Synthetic oligonucleotide
caauagugacuuuaauccc

SEQ ID NO: 2693956 - RNA, 19 nt, Artificial Sequence
  Description of Artificial Sequence: Synthetic oligonucleotide
uguagugaccaccauuuau

SEQ ID NO: 2693957 - RNA, 19 nt, Artificial Sequence
  Description of Artificial Sequence: Synthetic oligonucleotide
accaccauuuaucauuuug

SEQ ID NO: 2693958 - RNA, 19 nt, Artificial Sequence
  Description of Artificial Sequence: Synthetic oligonucleotide
ucaggacaaaucauuacau

SEQ ID NO: 2693959 - RNA, 19 nt, Artificial Sequence
  Description of Artificial Sequence: Synthetic oligonucleotide
ucuaauucuuaaagaucug

SEQ ID NO: 2693960 - RNA, 19 nt, Artificial Sequence
  Description of Artificial Sequence: Synthetic oligonucleotide
ugcaucuucaagacuggug

SEQ ID NO: 2693961 - RNA, 19 nt, Artificial Sequence
  Description of Artificial Sequence: Synthetic oligonucleotide
ucgcaugacauccacggga

SEQ ID NO: 2693962 - RNA, 19 nt, Artificial Sequence
  Description of Artificial Sequence: Synthetic oligonucleotide
agcgguaggaccugcacag

SEQ ID NO: 2693963 - RNA, 19 nt, Artificial Sequence
  Description of Artificial Sequence: Synthetic oligonucleotide
uucaccacagcugacucag

SEQ ID NO: 2693964 - RNA, 19 nt, Artificial Sequence
  Description of Artificial Sequence: Synthetic oligonucleotide
uguguagcuguagugacca

SEQ ID NO: 2693965 - RNA, 19 nt, Artificial Sequence
  Description of Artificial Sequence: Synthetic oligonucleotide
ugagccaacagagcgguag

SEQ ID NO: 2693966 - RNA, 19 nt, Artificial Sequence
  Description of Artificial Sequence: Synthetic oligonucleotide
acauccacgggaaucaccg

SEQ ID NO: 2693967 - RNA, 19 nt, Artificial Sequence
  Description of Artificial Sequence: Synthetic oligonucleotide
acugagugccuccacaaug

SEQ ID NO: 2693968 - RNA, 19 nt, Artificial Sequence
  Description of Artificial Sequence: Synthetic oligonucleotide
agcucgucgcaugacaucc

SEQ ID NO: 2693969 - RNA, 19 nt, Artificial Sequence
  Description of Artificial Sequence: Synthetic oligonucleotide
ugggcucuaguccuugagg

SEQ ID NO: 2693970 - RNA, 19 nt, Artificial Sequence
  Description of Artificial Sequence: Synthetic oligonucleotide
uucaagacuggugucagga

SEQ ID NO: 2693971 - RNA, 19 nt, Artificial Sequence
  Description of Artificial Sequence: Synthetic oligonucleotide
gaccuugcuuccaaaaccg

SEQ ID NO: 2693972 - RNA, 19 nt, Artificial Sequence
  Description of Artificial Sequence: Synthetic oligonucleotide
acaaaucauuacaucacgg

SEQ ID NO: 2693973 - RNA, 19 nt, Artificial Sequence
  Description of Artificial Sequence: Synthetic oligonucleotide
uuucuguguagcuguagug

SEQ ID NO: 2693974 - RNA, 19 nt, Artificial Sequence
  Description of Artificial Sequence: Synthetic oligonucleotide
uuuguccuuagccccuggg

SEQ ID NO: 2693975 - RNA, 19 nt, Artificial Sequence
  Description of Artificial Sequence: Synthetic oligonucleotide
uuucaugagccaacagagc

SEQ ID NO: 2693976 - RNA, 19 nt, Artificial Sequence
  Description of Artificial Sequence: Synthetic oligonucleotide
gucaggacaaaucauuaca

SEQ ID NO: 2693977 - RNA, 19 nt, Artificial Sequence
  Description of Artificial Sequence: Synthetic oligonucleotide
cauuucuaauucuuaaaga

SEQ ID NO: 2693978 - RNA, 19 nt, Artificial Sequence
  Description of Artificial Sequence: Synthetic oligonucleotide
ugaggaucaggccaucccu

SEQ ID NO: 2693979 - RNA, 19 nt, Artificial Sequence
  Description of Artificial Sequence: Synthetic oligonucleotide
accaccacgucguaugguc

SEQ ID NO: 2693980 - RNA, 19 nt, Artificial Sequence
  Description of Artificial Sequence: Synthetic oligonucleotide
aaauucugugcacccagau

SEQ ID NO: 2693981 - RNA, 19 nt, Artificial Sequence
  Description of Artificial Sequence: Synthetic oligonucleotide
uucacuuugucagccaucu

SEQ ID NO: 2693982 - RNA, 19 nt, Artificial Sequence
  Description of Artificial Sequence: Synthetic oligonucleotide
cauuacaucacggcuacac

SEQ ID NO: 2693983 - RNA, 19 nt, Artificial Sequence
  Description of Artificial Sequence: Synthetic oligonucleotide
uuccaaaaccgauuucaug

SEQ ID NO: 2693984 - RNA, 19 nt, Artificial Sequence
  Description of Artificial Sequence: Synthetic oligonucleotide
uuccacacggcuuucugug

SEQ ID NO: 2693985 - RNA, 19 nt, Artificial Sequence
  Description of Artificial Sequence: Synthetic oligonucleotide
aaaccgauuucaugagcca

SEQ ID NO: 2693986 - RNA, 19 nt, Artificial Sequence
  Description of Artificial Sequence: Synthetic oligonucleotide
gcaaacucgaagcuggucc

SEQ ID NO: 2693987 - RNA, 19 nt, Artificial Sequence
  Description of Artificial Sequence: Synthetic oligonucleotide
uggcuggugaggaucaggc

SEQ ID NO: 2693988 - RNA, 19 nt, Artificial Sequence
  Description of Artificial Sequence: Synthetic oligonucleotide
gaucaggccaucccuuucc

SEQ ID NO: 2693989 - RNA, 19 nt, Artificial Sequence
  Description of Artificial Sequence: Synthetic oligonucleotide
acuggugucaggacaaauc

SEQ ID NO: 2693990 - RNA, 19 nt, Artificial Sequence
  Description of Artificial Sequence: Synthetic oligonucleotide
acggcuacacugcacgggg

SEQ ID NO: 2693991 - RNA, 19 nt, Artificial Sequence
  Description of Artificial Sequence: Synthetic oligonucleotide
aauucugugcacccagauu

SEQ ID NO: 2693992 - RNA, 19 nt, Artificial Sequence
  Description of Artificial Sequence: Synthetic oligonucleotide
ugucaggacaaaucauuac

SEQ ID NO: 2693993 - RNA, 19 nt, Artificial Sequence
  Description of Artificial Sequence: Synthetic oligonucleotide
caaacucgaagcugguccc

SEQ ID NO: 2693994 - RNA, 19 nt, Artificial Sequence
  Description of Artificial Sequence: Synthetic oligonucleotide
acugcacggggucuuuccc

SEQ ID NO: 2693995 - RNA, 19 nt, Artificial Sequence
  Description of Artificial Sequence: Synthetic oligonucleotide
uagugaccaccauuuauca

SEQ ID NO: 2693996 - RNA, 19 nt, Artificial Sequence
  Description of Artificial Sequence: Synthetic oligonucleotide
auccacgggaaucaccguc

SEQ ID NO: 2693997 - RNA, 19 nt, Artificial Sequence
  Description of Artificial Sequence: Synthetic oligonucleotide
auuacaucacggcuacacu

SEQ ID NO: 2693998 - RNA, 19 nt, Artificial Sequence
  Description of Artificial Sequence: Synthetic oligonucleotide
ugacucagauaaauucugu

SEQ ID NO: 2693999 - RNA, 19 nt, Artificial Sequence
  Description of Artificial Sequence: Synthetic oligonucleotide
cuccuugccacugagugcc

SEQ ID NO: 2694000 - RNA, 19 nt, Artificial Sequence
  Description of Artificial Sequence: Synthetic oligonucleotide
gugacuuuaaucccagcuc

SEQ ID NO: 2694001 - RNA, 19 nt, Artificial Sequence
  Description of Artificial Sequence: Synthetic oligonucleotide
ucuucaagacuggugucag

SEQ ID NO: 2694002 - RNA, 19 nt, Artificial Sequence
  Description of Artificial Sequence: Synthetic oligonucleotide
aaucccagcucgucgcaug

SEQ ID NO: 2694003 - RNA, 19 nt, Artificial Sequence
  Description of Artificial Sequence: Synthetic oligonucleotide
uaaauucugugcacccaga

SEQ ID NO: 2694004 - RNA, 19 nt, Artificial Sequence
  Description of Artificial Sequence: Synthetic oligonucleotide
agagcgguaggaccugcac

SEQ ID NO: 2694005 - RNA, 19 nt, Artificial Sequence
  Description of Artificial Sequence: Synthetic oligonucleotide
caaaaccgauuucaugagc

SEQ ID NO: 2694006 - RNA, 19 nt, Artificial Sequence
  Description of Artificial Sequence: Synthetic oligonucleotide
aauggccagcgcaaacucg

SEQ ID NO: 2694007 - RNA, 19 nt, Artificial Sequence
  Description of Artificial Sequence: Synthetic oligonucleotide
agcuaugaggcccuuccug

SEQ ID NO: 2694008 - RNA, 19 nt, Artificial Sequence
  Description of Artificial Sequence: Synthetic oligonucleotide
aguccuugaggagaagcgg

SEQ ID NO: 2694009 - RNA, 19 nt, Artificial Sequence
  Description of Artificial Sequence: Synthetic oligonucleotide
aggccaucccuuuccacac

SEQ ID NO: 2694010 - RNA, 19 nt, Artificial Sequence
  Description of Artificial Sequence: Synthetic oligonucleotide
cuugaggagaagcggugcc

SEQ ID NO: 2694011 - RNA, 19 nt, Artificial Sequence
  Description of Artificial Sequence: Synthetic oligonucleotide
caccauuuaucauuuuguc

SEQ ID NO: 2694012 - RNA, 19 nt, Artificial Sequence
  Description of Artificial Sequence: Synthetic oligonucleotide
ugugaccuugcuuccaaaa

SEQ ID NO: 2694013 - RNA, 19 nt, Artificial Sequence
  Description of Artificial Sequence: Synthetic oligonucleotide
agccauuucuaauucuuaa

SEQ ID NO: 2694014 - RNA, 19 nt, Artificial Sequence
  Description of Artificial Sequence: Synthetic oligonucleotide
cuucaagaucuccuucacc

SEQ ID NO: 2694015 - RNA, 19 nt, Artificial Sequence
  Description of Artificial Sequence: Synthetic oligonucleotide
uuguccuuagccccugggu

SEQ ID NO: 2694016 - RNA, 19 nt, Artificial Sequence
  Description of Artificial Sequence: Synthetic oligonucleotide
uugggcucuaguccuugag

SEQ ID NO: 2694017 - RNA, 19 nt, Artificial Sequence
  Description of Artificial Sequence: Synthetic oligonucleotide
uccacgggaaucaccgucu

SEQ ID NO: 2694018 - RNA, 19 nt, Artificial Sequence
  Description of Artificial Sequence: Synthetic oligonucleotide
gauaaauucugugcaccca

SEQ ID NO: 2694019 - RNA, 19 nt, Artificial Sequence
  Description of Artificial Sequence: Synthetic oligonucleotide
gaaccaccacgucguaugg

SEQ ID NO: 2694020 - RNA, 19 nt, Artificial Sequence
  Description of Artificial Sequence: Synthetic oligonucleotide
aagcggugccuucacuuug

SEQ ID NO: 2694021 - RNA, 19 nt, Artificial Sequence
  Description of Artificial Sequence: Synthetic oligonucleotide
ucaagaucuccuucaccac

SEQ ID NO: 2694022 - RNA, 19 nt, Artificial Sequence
  Description of Artificial Sequence: Synthetic oligonucleotide
ugaccagagcucuuuugga

SEQ ID NO: 2694023 - RNA, 19 nt, Artificial Sequence
  Description of Artificial Sequence: Synthetic oligonucleotide
caggguuugggcucuaguc

SEQ ID NO: 2694024 - RNA, 19 nt, Artificial Sequence
  Description of Artificial Sequence: Synthetic oligonucleotide
gagccaacagagcgguagg

SEQ ID NO: 2694025 - RNA, 19 nt, Artificial Sequence
  Description of Artificial Sequence: Synthetic oligonucleotide
cuggugucaggacaaauca

SEQ ID NO: 2694026 - RNA, 19 nt, Artificial Sequence
  Description of Artificial Sequence: Synthetic oligonucleotide
ucuccuugccacugagugc

SEQ ID NO: 2694027 - RNA, 19 nt, Artificial Sequence
  Description of Artificial Sequence: Synthetic oligonucleotide
caggacaaaucauuacauc

SEQ ID NO: 2694028 - RNA, 19 nt, Artificial Sequence
  Description of Artificial Sequence: Synthetic oligonucleotide
uuuuguccuuagccccugg

SEQ ID NO: 2694029 - RNA, 19 nt, Artificial Sequence
  Description of Artificial Sequence: Synthetic oligonucleotide
accgauuucaugagccaac

SEQ ID NO: 2694030 - RNA, 19 nt, Artificial Sequence
  Description of Artificial Sequence: Synthetic oligonucleotide
ugcacggggucuuucccag

SEQ ID NO: 2694031 - RNA, 19 nt, Artificial Sequence
  Description of Artificial Sequence: Synthetic oligonucleotide
auagugacuuuaaucccag

SEQ ID NO: 2694032 - RNA, 19 nt, Artificial Sequence
  Description of Artificial Sequence: Synthetic oligonucleotide
gugaccuugcuuccaaaac

SEQ ID NO: 2694033 - RNA, 19 nt, Artificial Sequence
  Description of Artificial Sequence: Synthetic oligonucleotide
ucgucgcaugacauccacg

SEQ ID NO: 2694034 - RNA, 19 nt, Artificial Sequence
  Description of Artificial Sequence: Synthetic oligonucleotide
agaagcggugccuucacuu

SEQ ID NO: 2694035 - RNA, 19 nt, Artificial Sequence
  Description of Artificial Sequence: Synthetic oligonucleotide
aauggccugccucaaucuu

SEQ ID NO: 2694036 - RNA, 19 nt, Artificial Sequence
  Description of Artificial Sequence: Synthetic oligonucleotide
ugaccaccauuuaucauuu

SEQ ID NO: 2694037 - RNA, 19 nt, Artificial Sequence
  Description of Artificial Sequence: Synthetic oligonucleotide
cuguguagcuguagugacc

SEQ ID NO: 2694038 - RNA, 19 nt, Artificial Sequence
  Description of Artificial Sequence: Synthetic oligonucleotide
cuuccaauggccugccuca

SEQ ID NO: 2694039 - RNA, 19 nt, Artificial Sequence
  Description of Artificial Sequence: Synthetic oligonucleotide
accuuuggccaggaugacc

SEQ ID NO: 2694040 - RNA, 19 nt, Artificial Sequence
  Description of Artificial Sequence: Synthetic oligonucleotide
acgggaaucaccgucucca

SEQ ID NO: 2694041 - RNA, 19 nt, Artificial Sequence
  Description of Artificial Sequence: Synthetic oligonucleotide
cagauugccuccuggaaga

SEQ ID NO: 2694042 - RNA, 19 nt, Artificial Sequence
  Description of Artificial Sequence: Synthetic oligonucleotide
ucaagacuggugucaggac

SEQ ID NO: 2694043 - RNA, 19 nt, Artificial Sequence
  Description of Artificial Sequence: Synthetic oligonucleotide
caagacuggugucaggaca

SEQ ID NO: 2694044 - RNA, 19 nt, Artificial Sequence
  Description of Artificial Sequence: Synthetic oligonucleotide
gcuaugaggcccuuccugc

SEQ ID NO: 2694045 - RNA, 19 nt, Artificial Sequence
  Description of Artificial Sequence: Synthetic oligonucleotide
uuggcuggugaggaucagg

SEQ ID NO: 2694046 - RNA, 19 nt, Artificial Sequence
  Description of Artificial Sequence: Synthetic oligonucleotide
ucacggcuacacugcacgg

SEQ ID NO: 2694047 - RNA, 19 nt, Artificial Sequence
  Description of Artificial Sequence: Synthetic oligonucleotide
ugggauccaggguuugggc

SEQ ID NO: 2694048 - RNA, 19 nt, Artificial Sequence
  Description of Artificial Sequence: Synthetic oligonucleotide
gccagcgcaaacucgaagc

SEQ ID NO: 2694049 - RNA, 19 nt, Artificial Sequence
  Description of Artificial Sequence: Synthetic oligonucleotide
aacucgaagcuggucccag

SEQ ID NO: 2694050 - RNA, 19 nt, Artificial Sequence
  Description of Artificial Sequence: Synthetic oligonucleotide
aaccgauuucaugagccaa

SEQ ID NO: 2694051 - RNA, 19 nt, Artificial Sequence
  Description of Artificial Sequence: Synthetic oligonucleotide
ccaacagagcgguaggacc

SEQ ID NO: 2694052 - RNA, 19 nt, Artificial Sequence
  Description of Artificial Sequence: Synthetic oligonucleotide
ugccucaaucuugggaucc

SEQ ID NO: 2694053 - RNA, 19 nt, Artificial Sequence
  Description of Artificial Sequence: Synthetic oligonucleotide
cuucaagacuggugucagg

SEQ ID NO: 2694054 - RNA, 19 nt, Artificial Sequence
  Description of Artificial Sequence: Synthetic oligonucleotide
cuuuccacacggcuuucug

SEQ ID NO: 2694055 - RNA, 19 nt, Artificial Sequence
  Description of Artificial Sequence: Synthetic oligonucleotide
gaccagagcucuuuuggaa

SEQ ID NO: 2694056 - RNA, 19 nt, Artificial Sequence
  Description of Artificial Sequence: Synthetic oligonucleotide
uggugucaggacaaaucau

SEQ ID NO: 2694057 - RNA, 19 nt, Artificial Sequence
  Description of Artificial Sequence: Synthetic oligonucleotide
ugccuucacuuugucagcc

SEQ ID NO: 2694058 - RNA, 19 nt, Artificial Sequence
  Description of Artificial Sequence: Synthetic oligonucleotide
cgucgcaugacauccacgg

SEQ ID NO: 2694059 - RNA, 19 nt, Artificial Sequence
  Description of Artificial Sequence: Synthetic oligonucleotide
caccacgucguaugguccc

SEQ ID NO: 2694060 - RNA, 19 nt, Artificial Sequence
  Description of Artificial Sequence: Synthetic oligonucleotide
gcuggugaggaucaggcca

SEQ ID NO: 2694061 - RNA, 19 nt, Artificial Sequence
  Description of Artificial Sequence: Synthetic oligonucleotide
cacggggucuuucccagcc

SEQ ID NO: 2694062 - RNA, 19 nt, Artificial Sequence
  Description of Artificial Sequence: Synthetic oligonucleotide
agcuguagugaccaccauu

SEQ ID NO: 2694063 - RNA, 19 nt, Artificial Sequence
  Description of Artificial Sequence: Synthetic oligonucleotide
gucgcaugacauccacggg

SEQ ID NO: 2694064 - RNA, 19 nt, Artificial Sequence
  Description of Artificial Sequence: Synthetic oligonucleotide
cuucacuuugucagccauc

SEQ ID NO: 2694065 - RNA, 19 nt, Artificial Sequence
  Description of Artificial Sequence: Synthetic oligonucleotide
acggcuuucuguguagcug

SEQ ID NO: 2694066 - RNA, 19 nt, Artificial Sequence
  Description of Artificial Sequence: Synthetic oligonucleotide
cuuuuggaagccauuucua

SEQ ID NO: 2694067 - RNA, 19 nt, Artificial Sequence
  Description of Artificial Sequence: Synthetic oligonucleotide
ccagauugccuccuggaag

SEQ ID NO: 2694068 - RNA, 19 nt, Artificial Sequence
  Description of Artificial Sequence: Synthetic oligonucleotide
agugaccaccauuuaucau

SEQ ID NO: 2694069 - RNA, 19 nt, Artificial Sequence
  Description of Artificial Sequence: Synthetic oligonucleotide
gacauccacgggaaucacc

SEQ ID NO: 2694070 - RNA, 19 nt, Artificial Sequence
  Description of Artificial Sequence: Synthetic oligonucleotide
ccaaaaccgauuucaugag

SEQ ID NO: 2694071 - RNA, 19 nt, Artificial Sequence
  Description of Artificial Sequence: Synthetic oligonucleotide
cacugcacggggucuuucc

SEQ ID NO: 2694072 - RNA, 19 nt, Artificial Sequence
  Description of Artificial Sequence: Synthetic oligonucleotide
cacagauggcagcuaugag

SEQ ID NO: 2694073 - RNA, 19 nt, Artificial Sequence
  Description of Artificial Sequence: Synthetic oligonucleotide
caauggccagcgcaaacuc

SEQ ID NO: 2694074 - RNA, 19 nt, Artificial Sequence
  Description of Artificial Sequence: Synthetic oligonucleotide
gagugccuccacaauggcc

SEQ ID NO: 2694075 - RNA, 19 nt, Artificial Sequence
  Description of Artificial Sequence: Synthetic oligonucleotide
uguugugaccuugcuucca

SEQ ID NO: 2694076 - RNA, 19 nt, Artificial Sequence
  Description of Artificial Sequence: Synthetic oligonucleotide
uugaggagaagcggugccu

SEQ ID NO: 2694077 - RNA, 19 nt, Artificial Sequence
  Description of Artificial Sequence: Synthetic oligonucleotide
aacagagcgguaggaccug

SEQ ID NO: 2694078 - RNA, 19 nt, Artificial Sequence
  Description of Artificial Sequence: Synthetic oligonucleotide
acccagauugccuccugga

SEQ ID NO: 2694079 - RNA, 19 nt, Artificial Sequence
  Description of Artificial Sequence: Synthetic oligonucleotide
gagcgguaggaccugcaca

SEQ ID NO: 2694080 - RNA, 19 nt, Artificial Sequence
  Description of Artificial Sequence: Synthetic oligonucleotide
cacacggcuuucuguguag

SEQ ID NO: 2694081 - RNA, 19 nt, Artificial Sequence
  Description of Artificial Sequence: Synthetic oligonucleotide
uuugggcucuaguccuuga

SEQ ID NO: 2694082 - RNA, 19 nt, Artificial Sequence
  Description of Artificial Sequence: Synthetic oligonucleotide
guguugugaccuugcuucc

SEQ ID NO: 2694083 - RNA, 19 nt, Artificial Sequence
  Description of Artificial Sequence: Synthetic oligonucleotide
aucaccgucuccaucuccu

SEQ ID NO: 2694084 - RNA, 19 nt, Artificial Sequence
  Description of Artificial Sequence: Synthetic oligonucleotide
acaucacggcuacacugca

SEQ ID NO: 2694085 - RNA, 19 nt, Artificial Sequence
  Description of Artificial Sequence: Synthetic oligonucleotide
aaacucgaagcugguccca

SEQ ID NO: 2694086 - RNA, 19 nt, Artificial Sequence
  Description of Artificial Sequence: Synthetic oligonucleotide
uagugacuuuaaucccagc

SEQ ID NO: 2694087 - RNA, 19 nt, Artificial Sequence
  Description of Artificial Sequence: Synthetic oligonucleotide
aagaaccaccacgucguau

SEQ ID NO: 2694088 - RNA, 19 nt, Artificial Sequence
  Description of Artificial Sequence: Synthetic oligonucleotide
gucccaggcccuuggcugg

SEQ ID NO: 2694089 - RNA, 19 nt, Artificial Sequence
  Description of Artificial Sequence: Synthetic oligonucleotide
ugcuuccaaaaccgauuuc

SEQ ID NO: 2694090 - RNA, 19 nt, Artificial Sequence
  Description of Artificial Sequence: Synthetic oligonucleotide
gaucuccuucaccacagcu

SEQ ID NO: 2694091 - RNA, 19 nt, Artificial Sequence
  Description of Artificial Sequence: Synthetic oligonucleotide
cacggcuacacugcacggg

SEQ ID NO: 2694092 - RNA, 19 nt, Artificial Sequence
  Description of Artificial Sequence: Synthetic oligonucleotide
aagccauuucuaauucuua

SEQ ID NO: 2694093 - RNA, 19 nt, Artificial Sequence
  Description of Artificial Sequence: Synthetic oligonucleotide
acagagcgguaggaccugc

SEQ ID NO: 2694094 - RNA, 19 nt, Artificial Sequence
  Description of Artificial Sequence: Synthetic oligonucleotide
ccuuuggccaggaugacca

SEQ ID NO: 2694095 - RNA, 19 nt, Artificial Sequence
  Description of Artificial Sequence: Synthetic oligonucleotide
cucgucgcaugacauccac

SEQ ID NO: 2694096 - RNA, 19 nt, Artificial Sequence
  Description of Artificial Sequence: Synthetic oligonucleotide
guugugaccuugcuuccaa

SEQ ID NO: 2694097 - RNA, 19 nt, Artificial Sequence
  Description of Artificial Sequence: Synthetic oligonucleotide
gaagccauuucuaauucuu

SEQ ID NO: 2694098 - RNA, 19 nt, Artificial Sequence
  Description of Artificial Sequence: Synthetic oligonucleotide
gggcucuaguccuugagga

SEQ ID NO: 2694099 - RNA, 19 nt, Artificial Sequence
  Description of Artificial Sequence: Synthetic oligonucleotide
gugccuucacuuugucagc

SEQ ID NO: 2694100 - RNA, 19 nt, Artificial Sequence
  Description of Artificial Sequence: Synthetic oligonucleotide
cagagcucuuuuggaagcc

SEQ ID NO: 2694101 - RNA, 19 nt, Artificial Sequence
  Description of Artificial Sequence: Synthetic oligonucleotide
aucaggccaucccuuucca

SEQ ID NO: 2694102 - RNA, 19 nt, Artificial Sequence
  Description of Artificial Sequence: Synthetic oligonucleotide
uggguguguugugaccuug

SEQ ID NO: 2694103 - RNA, 19 nt, Artificial Sequence
  Description of Artificial Sequence: Synthetic oligonucleotide
cacgucguauggucccugc

SEQ ID NO: 2694104 - RNA, 19 nt, Artificial Sequence
  Description of Artificial Sequence: Synthetic oligonucleotide
auggccugccucaaucuug

SEQ ID NO: 2694105 - RNA, 19 nt, Artificial Sequence
  Description of Artificial Sequence: Synthetic oligonucleotide
gauugccuccuggaagaac

SEQ ID NO: 2694106 - RNA, 19 nt, Artificial Sequence
  Description of Artificial Sequence: Synthetic oligonucleotide
caucacggcuacacugcac

SEQ ID NO: 2694107 - RNA, 19 nt, Artificial Sequence
  Description of Artificial Sequence: Synthetic oligonucleotide
accacagcugacucagaua

SEQ ID NO: 2694108 - RNA, 19 nt, Artificial Sequence
  Description of Artificial Sequence: Synthetic oligonucleotide
uuagccccuggguguguug

SEQ ID NO: 2694109 - RNA, 19 nt, Artificial Sequence
  Description of Artificial Sequence: Synthetic oligonucleotide
ucuaguccuugaggagaag

SEQ ID NO: 2694110 - RNA, 19 nt, Artificial Sequence
  Description of Artificial Sequence: Synthetic oligonucleotide
cuugcuuccaaaaccgauu

SEQ ID NO: 2694111 - RNA, 19 nt, Artificial Sequence
  Description of Artificial Sequence: Synthetic oligonucleotide
ccacagcugacucagauaa

SEQ ID NO: 2694112 - RNA, 19 nt, Artificial Sequence
  Description of Artificial Sequence: Synthetic oligonucleotide
ugaggagaagcggugccuu

SEQ ID NO: 2694113 - RNA, 19 nt, Artificial Sequence
  Description of Artificial Sequence: Synthetic oligonucleotide
caacagagcgguaggaccu

SEQ ID NO: 2694114 - RNA, 19 nt, Artificial Sequence
  Description of Artificial Sequence: Synthetic oligonucleotide
gcuuccaauggccugccuc

SEQ ID NO: 2694115 - RNA, 19 nt, Artificial Sequence
  Description of Artificial Sequence: Synthetic oligonucleotide
agagcucuuuuggaagcca

SEQ ID NO: 2694116 - RNA, 19 nt, Artificial Sequence
  Description of Artificial Sequence: Synthetic oligonucleotide
aggagaagcggugccuuca

SEQ ID NO: 2694117 - RNA, 19 nt, Artificial Sequence
  Description of Artificial Sequence: Synthetic oligonucleotide
uccuuagccccugggugug

SEQ ID NO: 2694118 - RNA, 19 nt, Artificial Sequence
  Description of Artificial Sequence: Synthetic oligonucleotide
uugcaucuucaagacuggu

SEQ ID NO: 2694119 - RNA, 19 nt, Artificial Sequence
  Description of Artificial Sequence: Synthetic oligonucleotide
aucccagcucgucgcauga

SEQ ID NO: 2694120 - RNA, 19 nt, Artificial Sequence
  Description of Artificial Sequence: Synthetic oligonucleotide
cacgggaaucaccgucucc

SEQ ID NO: 2694121 - RNA, 19 nt, Artificial Sequence
  Description of Artificial Sequence: Synthetic oligonucleotide
aaccaccacgucguauggu

SEQ ID NO: 2694122 - RNA, 19 nt, Artificial Sequence
  Description of Artificial Sequence: Synthetic oligonucleotide
aggaucaggccaucccuuu

SEQ ID NO: 2694123 - RNA, 19 nt, Artificial Sequence
  Description of Artificial Sequence: Synthetic oligonucleotide
cuucaccacagcugacuca

SEQ ID NO: 2694124 - RNA, 19 nt, Artificial Sequence
  Description of Artificial Sequence: Synthetic oligonucleotide
uccaauggccugccucaau

SEQ ID NO: 2694125 - RNA, 19 nt, Artificial Sequence
  Description of Artificial Sequence: Synthetic oligonucleotide
ggaagaaccaccacgucgu

SEQ ID NO: 2694126 - RNA, 19 nt, Artificial Sequence
  Description of Artificial Sequence: Synthetic oligonucleotide
gaggagaagcggugccuuc

SEQ ID NO: 2694127 - RNA, 19 nt, Artificial Sequence
  Description of Artificial Sequence: Synthetic oligonucleotide
cuggaagaaccaccacguc

SEQ ID NO: 2694128 - RNA, 19 nt, Artificial Sequence
  Description of Artificial Sequence: Synthetic oligonucleotide
guuugggcucuaguccuug

SEQ ID NO: 2694129 - RNA, 19 nt, Artificial Sequence
  Description of Artificial Sequence: Synthetic oligonucleotide
ggaccugcacagauggcag

SEQ ID NO: 2694130 - RNA, 19 nt, Artificial Sequence
  Description of Artificial Sequence: Synthetic oligonucleotide
ccaauggccugccucaauc

SEQ ID NO: 2694131 - RNA, 19 nt, Artificial Sequence
  Description of Artificial Sequence: Synthetic oligonucleotide
acgucguauggucccugcu

SEQ ID NO: 2694132 - RNA, 19 nt, Artificial Sequence
  Description of Artificial Sequence: Synthetic oligonucleotide
aggaugaccagagcucuuu

SEQ ID NO: 2694133 - RNA, 19 nt, Artificial Sequence
  Description of Artificial Sequence: Synthetic oligonucleotide
gugucaggacaaaucauua

SEQ ID NO: 2694134 - RNA, 19 nt, Artificial Sequence
  Description of Artificial Sequence: Synthetic oligonucleotide
cagcgcaaacucgaagcug

SEQ ID NO: 2694135 - RNA, 19 nt, Artificial Sequence
  Description of Artificial Sequence: Synthetic oligonucleotide
ggcccuuccugcuuuccug

SEQ ID NO: 2694136 - RNA, 19 nt, Artificial Sequence
  Description of Artificial Sequence: Synthetic oligonucleotide
caggcccuuggcuggugag

SEQ ID NO: 2694137 - RNA, 19 nt, Artificial Sequence
  Description of Artificial Sequence: Synthetic oligonucleotide
caaucuugggauccagggu

SEQ ID NO: 2694138 - RNA, 19 nt, Artificial Sequence
  Description of Artificial Sequence: Synthetic oligonucleotide
ugacauccacgggaaucac

SEQ ID NO: 2694139 - RNA, 19 nt, Artificial Sequence
  Description of Artificial Sequence: Synthetic oligonucleotide
ucaccacagcugacucaga

SEQ ID NO: 2694140 - RNA, 19 nt, Artificial Sequence
  Description of Artificial Sequence: Synthetic oligonucleotide
ucguauggucccugcuuuu

SEQ ID NO: 2694141 - RNA, 19 nt, Artificial Sequence
  Description of Artificial Sequence: Synthetic oligonucleotide
ucugcaccuuuggccagga

SEQ ID NO: 2694142 - RNA, 19 nt, Artificial Sequence
  Description of Artificial Sequence: Synthetic oligonucleotide
ccaggccugcaauagugac

SEQ ID NO: 2694143 - RNA, 19 nt, Artificial Sequence
  Description of Artificial Sequence: Synthetic oligonucleotide
gugcacccagauugccucc

SEQ ID NO: 2694144 - RNA, 19 nt, Artificial Sequence
  Description of Artificial Sequence: Synthetic oligonucleotide
guccuuagccccugggugu

SEQ ID NO: 2694145 - RNA, 19 nt, Artificial Sequence
  Description of Artificial Sequence: Synthetic oligonucleotide
uccaggguuugggcucuag

SEQ ID NO: 2694146 - RNA, 19 nt, Artificial Sequence
  Description of Artificial Sequence: Synthetic oligonucleotide
cagcucgucgcaugacauc

SEQ ID NO: 2694147 - RNA, 19 nt, Artificial Sequence
  Description of Artificial Sequence: Synthetic oligonucleotide
gaagcggugccuucacuuu

SEQ ID NO: 2694148 - RNA, 19 nt, Artificial Sequence
  Description of Artificial Sequence: Synthetic oligonucleotide
auggcagcuaugaggcccu

SEQ ID NO: 2694149 - RNA, 19 nt, Artificial Sequence
  Description of Artificial Sequence: Synthetic oligonucleotide
ucauuacaucacggcuaca

SEQ ID NO: 2694150 - RNA, 19 nt, Artificial Sequence
  Description of Artificial Sequence: Synthetic oligonucleotide
caugagccaacagagcggu

SEQ ID NO: 2694151 - RNA, 19 nt, Artificial Sequence
  Description of Artificial Sequence: Synthetic oligonucleotide
ggcuacacugcacgggguc

SEQ ID NO: 2694152 - RNA, 19 nt, Artificial Sequence
  Description of Artificial Sequence: Synthetic oligonucleotide
uagcuguagugaccaccau

SEQ ID NO: 2694153 - RNA, 19 nt, Artificial Sequence
  Description of Artificial Sequence: Synthetic oligonucleotide
ggccagcgcaaacucgaag

SEQ ID NO: 2694154 - RNA, 19 nt, Artificial Sequence
  Description of Artificial Sequence: Synthetic oligonucleotide
aucccuuuccacacggcuu

SEQ ID NO: 2694155 - RNA, 19 nt, Artificial Sequence
  Description of Artificial Sequence: Synthetic oligonucleotide
uggccagcgcaaacucgaa

SEQ ID NO: 2694156 - RNA, 19 nt, Artificial Sequence
  Description of Artificial Sequence: Synthetic oligonucleotide
gccuccuggaagaaccacc

SEQ ID NO: 2694157 - RNA, 19 nt, Artificial Sequence
  Description of Artificial Sequence: Synthetic oligonucleotide
ccaccauuuaucauuuugu

SEQ ID NO: 2694158 - RNA, 19 nt, Artificial Sequence
  Description of Artificial Sequence: Synthetic oligonucleotide
ggugaggaucaggccaucc

SEQ ID NO: 2694159 - RNA, 19 nt, Artificial Sequence
  Description of Artificial Sequence: Synthetic oligonucleotide
ccuggaagaaccaccacgu

SEQ ID NO: 2694160 - RNA, 19 nt, Artificial Sequence
  Description of Artificial Sequence: Synthetic oligonucleotide
ccuccuggaagaaccacca

SEQ ID NO: 2694161 - RNA, 19 nt, Artificial Sequence
  Description of Artificial Sequence: Synthetic oligonucleotide
ccuugaggagaagcggugc

SEQ ID NO: 2694162 - RNA, 19 nt, Artificial Sequence
  Description of Artificial Sequence: Synthetic oligonucleotide
gucguauggucccugcuuu

SEQ ID NO: 2694163 - RNA, 19 nt, Artificial Sequence
  Description of Artificial Sequence: Synthetic oligonucleotide
ccuucaccacagcugacuc

SEQ ID NO: 2694164 - RNA, 19 nt, Artificial Sequence
  Description of Artificial Sequence: Synthetic oligonucleotide
gccaggaugaccagagcuc

SEQ ID NO: 2694165 - RNA, 19 nt, Artificial Sequence
  Description of Artificial Sequence: Synthetic oligonucleotide
ccaccacgucguauggucc

SEQ ID NO: 2694166 - RNA, 19 nt, Artificial Sequence
  Description of Artificial Sequence: Synthetic oligonucleotide
gggaaucaccgucuccauc

SEQ ID NO: 2694167 - RNA, 19 nt, Artificial Sequence
  Description of Artificial Sequence: Synthetic oligonucleotide
agcggugccuucacuuugu

SEQ ID NO: 2694168 - RNA, 19 nt, Artificial Sequence
  Description of Artificial Sequence: Synthetic oligonucleotide
gcuguagugaccaccauuu

SEQ ID NO: 2694169 - RNA, 19 nt, Artificial Sequence
  Description of Artificial Sequence: Synthetic oligonucleotide
gccugccucaaucuuggga

SEQ ID NO: 2694170 - RNA, 19 nt, Artificial Sequence
  Description of Artificial Sequence: Synthetic oligonucleotide
caauggccugccucaaucu

SEQ ID NO: 2694171 - RNA, 19 nt, Artificial Sequence
  Description of Artificial Sequence: Synthetic oligonucleotide
ggaucaggccaucccuuuc

SEQ ID NO: 2694172 - RNA, 19 nt, Artificial Sequence
  Description of Artificial Sequence: Synthetic oligonucleotide
ggguuugggcucuaguccu

SEQ ID NO: 2694173 - RNA, 19 nt, Artificial Sequence
  Description of Artificial Sequence: Synthetic oligonucleotide
uuccaauggccugccucaa

SEQ ID NO: 2694174 - RNA, 19 nt, Artificial Sequence
  Description of Artificial Sequence: Synthetic oligonucleotide
gccacugagugccuccaca

SEQ ID NO: 2694175 - RNA, 19 nt, Artificial Sequence
  Description of Artificial Sequence: Synthetic oligonucleotide
ggaagccauuucuaauucu

SEQ ID NO: 2694176 - RNA, 19 nt, Artificial Sequence
  Description of Artificial Sequence: Synthetic oligonucleotide
cuuggcuggugaggaucag

SEQ ID NO: 2694177 - RNA, 19 nt, Artificial Sequence
  Description of Artificial Sequence: Synthetic oligonucleotide
ggccaucccuuuccacacg

SEQ ID NO: 2694178 - RNA, 19 nt, Artificial Sequence
  Description of Artificial Sequence: Synthetic oligonucleotide
gccaacagagcgguaggac

SEQ ID NO: 2694179 - RNA, 19 nt, Artificial Sequence
  Description of Artificial Sequence: Synthetic oligonucleotide
agccccuggguguguugug

SEQ ID NO: 2694180 - RNA, 19 nt, Artificial Sequence
  Description of Artificial Sequence: Synthetic oligonucleotide
accuugcuuccaaaaccga

SEQ ID NO: 2694181 - RNA, 19 nt, Artificial Sequence
  Description of Artificial Sequence: Synthetic oligonucleotide
cuaugaggcccuuccugcu

SEQ ID NO: 2694182 - RNA, 19 nt, Artificial Sequence
  Description of Artificial Sequence: Synthetic oligonucleotide
cuuucccagccaggccugc

SEQ ID NO: 2694183 - RNA, 19 nt, Artificial Sequence
  Description of Artificial Sequence: Synthetic oligonucleotide
cugugcacccagauugccu

SEQ ID NO: 2694184 - RNA, 19 nt, Artificial Sequence
  Description of Artificial Sequence: Synthetic oligonucleotide
agcucuuuuggaagccauu

SEQ ID NO: 2694185 - RNA, 19 nt, Artificial Sequence
  Description of Artificial Sequence: Synthetic oligonucleotide
cuggugaggaucaggccau

SEQ ID NO: 2694186 - RNA, 19 nt, Artificial Sequence
  Description of Artificial Sequence: Synthetic oligonucleotide
gggauccaggguuugggcu

SEQ ID NO: 2694187 - RNA, 19 nt, Artificial Sequence
  Description of Artificial Sequence: Synthetic oligonucleotide
ggguguguugugaccuugc

SEQ ID NO: 2694188 - RNA, 19 nt, Artificial Sequence
  Description of Artificial Sequence: Synthetic oligonucleotide
accacgucguauggucccu

SEQ ID NO: 2694189 - RNA, 19 nt, Artificial Sequence
  Description of Artificial Sequence: Synthetic oligonucleotide
gagaagcggugccuucacu

SEQ ID NO: 2694190 - RNA, 19 nt, Artificial Sequence
  Description of Artificial Sequence: Synthetic oligonucleotide
guguguugugaccuugcuu

SEQ ID NO: 2694191 - RNA, 19 nt, Artificial Sequence
  Description of Artificial Sequence: Synthetic oligonucleotide
ggggucuuucccagccagg

SEQ ID NO: 2694192 - RNA, 19 nt, Artificial Sequence
  Description of Artificial Sequence: Synthetic oligonucleotide
cagagcgguaggaccugca

SEQ ID NO: 2694193 - RNA, 19 nt, Artificial Sequence
  Description of Artificial Sequence: Synthetic oligonucleotide
agauugccuccuggaagaa

SEQ ID NO: 2694194 - RNA, 19 nt, Artificial Sequence
  Description of Artificial Sequence: Synthetic oligonucleotide
cgauuucaugagccaacag

SEQ ID NO: 2694195 - RNA, 19 nt, Artificial Sequence
  Description of Artificial Sequence: Synthetic oligonucleotide
cccuggguguguugugacc

SEQ ID NO: 2694196 - RNA, 19 nt, Artificial Sequence
  Description of Artificial Sequence: Synthetic oligonucleotide
uacacugcacggggucuuu

SEQ ID NO: 2694197 - RNA, 19 nt, Artificial Sequence
  Description of Artificial Sequence: Synthetic oligonucleotide
cacagcugacucagauaaa

SEQ ID NO: 2694198 - RNA, 19 nt, Artificial Sequence
  Description of Artificial Sequence: Synthetic oligonucleotide
ccuuggcuggugaggauca

SEQ ID NO: 2694199 - RNA, 19 nt, Artificial Sequence
  Description of Artificial Sequence: Synthetic oligonucleotide
caccacagcugacucagau

SEQ ID NO: 2694200 - RNA, 19 nt, Artificial Sequence
  Description of Artificial Sequence: Synthetic oligonucleotide
ucccagcucgucgcaugac

SEQ ID NO: 2694201 - RNA, 19 nt, Artificial Sequence
  Description of Artificial Sequence: Synthetic oligonucleotide
gccugcaauagugacuuua

SEQ ID NO: 2694202 - RNA, 19 nt, Artificial Sequence
  Description of Artificial Sequence: Synthetic oligonucleotide
gguguguugugaccuugcu

SEQ ID NO: 2694203 - RNA, 19 nt, Artificial Sequence
  Description of Artificial Sequence: Synthetic oligonucleotide
cuguagugaccaccauuua

SEQ ID NO: 2694204 - RNA, 19 nt, Artificial Sequence
  Description of Artificial Sequence: Synthetic oligonucleotide
ccaucccuuuccacacggc

SEQ ID NO: 2694205 - RNA, 19 nt, Artificial Sequence
  Description of Artificial Sequence: Synthetic oligonucleotide
gagcucuuuuggaagccau

SEQ ID NO: 2694206 - RNA, 19 nt, Artificial Sequence
  Description of Artificial Sequence: Synthetic oligonucleotide
agacuggugucaggacaaa

SEQ ID NO: 2694207 - RNA, 19 nt, Artificial Sequence
  Description of Artificial Sequence: Synthetic oligonucleotide
gaggaucaggccaucccuu

SEQ ID NO: 2694208 - RNA, 19 nt, Artificial Sequence
  Description of Artificial Sequence: Synthetic oligonucleotide
gacuggugucaggacaaau

SEQ ID NO: 2694209 - RNA, 19 nt, Artificial Sequence
  Description of Artificial Sequence: Synthetic oligonucleotide
ccgauuucaugagccaaca

SEQ ID NO: 2694210 - RNA, 19 nt, Artificial Sequence
  Description of Artificial Sequence: Synthetic oligonucleotide
cccuuggcuggugaggauc

SEQ ID NO: 2694211 - RNA, 19 nt, Artificial Sequence
  Description of Artificial Sequence: Synthetic oligonucleotide
gcucuuuuggaagccauuu

SEQ ID NO: 2694212 - RNA, 19 nt, Artificial Sequence
  Description of Artificial Sequence: Synthetic oligonucleotide
ccucugcaccuuuggccag

SEQ ID NO: 2694213 - RNA, 19 nt, Artificial Sequence
  Description of Artificial Sequence: Synthetic oligonucleotide
ggccugccucaaucuuggg

SEQ ID NO: 2694214 - RNA, 19 nt, Artificial Sequence
  Description of Artificial Sequence: Synthetic oligonucleotide
ucccaggcccuuggcuggu

SEQ ID NO: 2694215 - RNA, 19 nt, Artificial Sequence
  Description of Artificial Sequence: Synthetic oligonucleotide
ccuugcuuccaaaaccgau

SEQ ID NO: 2694216 - RNA, 19 nt, Artificial Sequence
  Description of Artificial Sequence: Synthetic oligonucleotide
cccagcucgucgcaugaca

SEQ ID NO: 2694217 - RNA, 19 nt, Artificial Sequence
  Description of Artificial Sequence: Synthetic oligonucleotide
cgcaugacauccacgggaa

SEQ ID NO: 2694218 - RNA, 19 nt, Artificial Sequence
  Description of Artificial Sequence: Synthetic oligonucleotide
ccccuggguguguugugac

SEQ ID NO: 2694219 - RNA, 19 nt, Artificial Sequence
  Description of Artificial Sequence: Synthetic oligonucleotide
cccagauugccuccuggaa

SEQ ID NO: 2694220 - RNA, 19 nt, Artificial Sequence
  Description of Artificial Sequence: Synthetic oligonucleotide
cacugagugccuccacaau

SEQ ID NO: 2694221 - RNA, 19 nt, Artificial Sequence
  Description of Artificial Sequence: Synthetic oligonucleotide
gcacggggucuuucccagc

SEQ ID NO: 2694222 - RNA, 19 nt, Artificial Sequence
  Description of Artificial Sequence: Synthetic oligonucleotide
cauccacgggaaucaccgu

SEQ ID NO: 2694223 - RNA, 19 nt, Artificial Sequence
  Description of Artificial Sequence: Synthetic oligonucleotide
ccuggguguguugugaccu

SEQ ID NO: 2694224 - RNA, 19 nt, Artificial Sequence
  Description of Artificial Sequence: Synthetic oligonucleotide
cagcuaugaggcccuuccu

SEQ ID NO: 2694225 - RNA, 19 nt, Artificial Sequence
  Description of Artificial Sequence: Synthetic oligonucleotide
gccucaaucuugggaucca

SEQ ID NO: 2694226 - RNA, 19 nt, Artificial Sequence
  Description of Artificial Sequence: Synthetic oligonucleotide
ccagcgcaaacucgaagcu

SEQ ID NO: 2694227 - RNA, 19 nt, Artificial Sequence
  Description of Artificial Sequence: Synthetic oligonucleotide
ccacgggaaucaccgucuc

SEQ ID NO: 2694228 - RNA, 19 nt, Artificial Sequence
  Description of Artificial Sequence: Synthetic oligonucleotide
ccaggaugaccagagcucu

SEQ ID NO: 2694229 - RNA, 19 nt, Artificial Sequence
  Description of Artificial Sequence: Synthetic oligonucleotide
gaccaccauuuaucauuuu

SEQ ID NO: 2694230 - RNA, 19 nt, Artificial Sequence
  Description of Artificial Sequence: Synthetic oligonucleotide
ggaugaccagagcucuuuu

SEQ ID NO: 2694231 - RNA, 19 nt, Artificial Sequence
  Description of Artificial Sequence: Synthetic oligonucleotide
ccuucacuuugucagccau

SEQ ID NO: 2694232 - RNA, 19 nt, Artificial Sequence
  Description of Artificial Sequence: Synthetic oligonucleotide
ccacacggcuuucugugua

SEQ ID NO: 2694233 - RNA, 19 nt, Artificial Sequence
  Description of Artificial Sequence: Synthetic oligonucleotide
cgcaaacucgaagcugguc

SEQ ID NO: 2694234 - RNA, 19 nt, Artificial Sequence
  Description of Artificial Sequence: Synthetic oligonucleotide
ccagcucgucgcaugacau

SEQ ID NO: 2694235 - RNA, 19 nt, Artificial Sequence
  Description of Artificial Sequence: Synthetic oligonucleotide
cggcuuucuguguagcugu

SEQ ID NO: 2694236 - RNA, 19 nt, Artificial Sequence
  Description of Artificial Sequence: Synthetic oligonucleotide
cuggguguguugugaccuu

SEQ ID NO: 2694237 - RNA, 19 nt, Artificial Sequence
  Description of Artificial Sequence: Synthetic oligonucleotide
cuacacugcacggggucuu

SEQ ID NO: 2694238 - RNA, 19 nt, Artificial Sequence
  Description of Artificial Sequence: Synthetic oligonucleotide
gcucgucgcaugacaucca

SEQ ID NO: 2694239 - RNA, 19 nt, Artificial Sequence
  Description of Artificial Sequence: Synthetic oligonucleotide
augagccaacagagcggua

SEQ ID NO: 2694240 - RNA, 19 nt, Artificial Sequence
  Description of Artificial Sequence: Synthetic oligonucleotide
ccacgucguauggucccug

SEQ ID NO: 2694241 - RNA, 19 nt, Artificial Sequence
  Description of Artificial Sequence: Synthetic oligonucleotide
cuuagccccuggguguguu

SEQ ID NO: 2694242 - RNA, 19 nt, Artificial Sequence
  Description of Artificial Sequence: Synthetic oligonucleotide
ccaggcccuuggcugguga

SEQ ID NO: 2694243 - RNA, 19 nt, Artificial Sequence
  Description of Artificial Sequence: Synthetic oligonucleotide
uggcagcuaugaggcccuu

SEQ ID NO: 2694244 - RNA, 19 nt, Artificial Sequence
  Description of Artificial Sequence: Synthetic oligonucleotide
gcgguaggaccugcacaga

SEQ ID NO: 2694245 - RNA, 19 nt, Artificial Sequence
  Description of Artificial Sequence: Synthetic oligonucleotide
cgucguauggucccugcuu

SEQ ID NO: 2694246 - RNA, 19 nt, Artificial Sequence
  Description of Artificial Sequence: Synthetic oligonucleotide
gguuugggcucuaguccuu

SEQ ID NO: 2694247 - RNA, 19 nt, Artificial Sequence
  Description of Artificial Sequence: Synthetic oligonucleotide
auccaggguuugggcucua

SEQ ID NO: 2694248 - RNA, 19 nt, Artificial Sequence
  Description of Artificial Sequence: Synthetic oligonucleotide
cugcaccuuuggccaggau

SEQ ID NO: 2694249 - RNA, 19 nt, Artificial Sequence
  Description of Artificial Sequence: Synthetic oligonucleotide
gcccuuggcuggugaggau

SEQ ID NO: 2694250 - RNA, 19 nt, Artificial Sequence
  Description of Artificial Sequence: Synthetic oligonucleotide
cgggaaucaccgucuccau

SEQ ID NO: 2694251 - RNA, 19 nt, Artificial Sequence
  Description of Artificial Sequence: Synthetic oligonucleotide
cggcuacacugcacggggu

SEQ ID NO: 2694252 - RNA, 19 nt, Artificial Sequence
  Description of Artificial Sequence: Synthetic oligonucleotide
ccuuagccccugggugugu

SEQ ID NO: 2694253 - RNA, 19 nt, Artificial Sequence
  Description of Artificial Sequence: Synthetic oligonucleotide
aaaauaaaucaggauaugc

SEQ ID NO: 2694254 - RNA, 19 nt, Artificial Sequence
  Description of Artificial Sequence: Synthetic oligonucleotide
aauaaaucaggauaugcug

SEQ ID NO: 2694255 - RNA, 19 nt, Artificial Sequence
  Description of Artificial Sequence: Synthetic oligonucleotide
ucuaaagggacaaagagcu

SEQ ID NO: 2694256 - RNA, 19 nt, Artificial Sequence
  Description of Artificial Sequence: Synthetic oligonucleotide
aacuuuuauaguugugucc

SEQ ID NO: 2694257 - RNA, 19 nt, Artificial Sequence
  Description of Artificial Sequence: Synthetic oligonucleotide
uuagauguggaucuuacag

SEQ ID NO: 2694258 - RNA, 19 nt, Artificial Sequence
  Description of Artificial Sequence: Synthetic oligonucleotide
uuauauacuacaauguugu

SEQ ID NO: 2694259 - RNA, 19 nt, Artificial Sequence
  Description of Artificial Sequence: Synthetic oligonucleotide
guuauuuuaacacucagac

SEQ ID NO: 2694260 - RNA, 19 nt, Artificial Sequence
  Description of Artificial Sequence: Synthetic oligonucleotide
uauacuacaauguuguugu

SEQ ID NO: 2694261 - RNA, 19 nt, Artificial Sequence
  Description of Artificial Sequence: Synthetic oligonucleotide
ucaaguggcuucaugaugg

SEQ ID NO: 2694262 - RNA, 19 nt, Artificial Sequence
  Description of Artificial Sequence: Synthetic oligonucleotide
uuuaaauuacauuuagaug

SEQ ID NO: 2694263 - RNA, 19 nt, Artificial Sequence
  Description of Artificial Sequence: Synthetic oligonucleotide
ucuaauauuaacccuaauc

SEQ ID NO: 2694264 - RNA, 19 nt, Artificial Sequence
  Description of Artificial Sequence: Synthetic oligonucleotide
cuuacaguuauuuuaacac

SEQ ID NO: 2694265 - RNA, 19 nt, Artificial Sequence
  Description of Artificial Sequence: Synthetic oligonucleotide
uuuauaguuguguccaugg

SEQ ID NO: 2694266 - RNA, 19 nt, Artificial Sequence
  Description of Artificial Sequence: Synthetic oligonucleotide
gucaccacaacuuuuauag

SEQ ID NO: 2694267 - RNA, 19 nt, Artificial Sequence
  Description of Artificial Sequence: Synthetic oligonucleotide
uguaggaagaaguuucugg

SEQ ID NO: 2694268 - RNA, 19 nt, Artificial Sequence
  Description of Artificial Sequence: Synthetic oligonucleotide
uguaaagaacuccuguagg

SEQ ID NO: 2694269 - RNA, 19 nt, Artificial Sequence
  Description of Artificial Sequence: Synthetic oligonucleotide
aauauuaacccuaaucucu

SEQ ID NO: 2694270 - RNA, 19 nt, Artificial Sequence
  Description of Artificial Sequence: Synthetic oligonucleotide
uguaacaggaucaaccucu

SEQ ID NO: 2694271 - RNA, 19 nt, Artificial Sequence
  Description of Artificial Sequence: Synthetic oligonucleotide
gacauucuagaguacaacg

SEQ ID NO: 2694272 - RNA, 19 nt, Artificial Sequence
  Description of Artificial Sequence: Synthetic oligonucleotide
auucuaaagggacaaagag

SEQ ID NO: 2694273 - RNA, 19 nt, Artificial Sequence
  Description of Artificial Sequence: Synthetic oligonucleotide
ugcuggauauucuaaaggg

SEQ ID NO: 2694274 - RNA, 19 nt, Artificial Sequence
  Description of Artificial Sequence: Synthetic oligonucleotide
ucuauucucccuuauauac

SEQ ID NO: 2694275 - RNA, 19 nt, Artificial Sequence
  Description of Artificial Sequence: Synthetic oligonucleotide
uuaaaagcaauuaagccuu

SEQ ID NO: 2694276 - RNA, 19 nt, Artificial Sequence
  Description of Artificial Sequence: Synthetic oligonucleotide
aagcaauuaagccuuucuc

SEQ ID NO: 2694277 - RNA, 19 nt, Artificial Sequence
  Description of Artificial Sequence: Synthetic oligonucleotide
aacacaaguauguggugac

SEQ ID NO: 2694278 - RNA, 19 nt, Artificial Sequence
  Description of Artificial Sequence: Synthetic oligonucleotide
ugcaaaguagggcacaucc

SEQ ID NO: 2694279 - RNA, 19 nt, Artificial Sequence
  Description of Artificial Sequence: Synthetic oligonucleotide
cucaccaaaauaaaucagg

SEQ ID NO: 2694280 - RNA, 19 nt, Artificial Sequence
  Description of Artificial Sequence: Synthetic oligonucleotide
aaauucauaaccauuccug

SEQ ID NO: 2694281 - RNA, 19 nt, Artificial Sequence
  Description of Artificial Sequence: Synthetic oligonucleotide
cuuauauacuacaauguug

SEQ ID NO: 2694282 - RNA, 19 nt, Artificial Sequence
  Description of Artificial Sequence: Synthetic oligonucleotide
uauaguuguguccauggcc

SEQ ID NO: 2694283 - RNA, 19 nt, Artificial Sequence
  Description of Artificial Sequence: Synthetic oligonucleotide
aguuucauaaacuuuuacu

SEQ ID NO: 2694284 - RNA, 19 nt, Artificial Sequence
  Description of Artificial Sequence: Synthetic oligonucleotide
accaaaauaaaucaggaua

SEQ ID NO: 2694285 - RNA, 19 nt, Artificial Sequence
  Description of Artificial Sequence: Synthetic oligonucleotide
uuguaaagaacuccuguag

SEQ ID NO: 2694286 - RNA, 19 nt, Artificial Sequence
  Description of Artificial Sequence: Synthetic oligonucleotide
uccuguaacaggaucaacc

SEQ ID NO: 2694287 - RNA, 19 nt, Artificial Sequence
  Description of Artificial Sequence: Synthetic oligonucleotide
aacaggaucaaccucucca

SEQ ID NO: 2694288 - RNA, 19 nt, Artificial Sequence
  Description of Artificial Sequence: Synthetic oligonucleotide
aauucauaaccauuccugu

SEQ ID NO: 2694289 - RNA, 19 nt, Artificial Sequence
  Description of Artificial Sequence: Synthetic oligonucleotide
acuacaauguuguugucag

SEQ ID NO: 2694290 - RNA, 19 nt, Artificial Sequence
  Description of Artificial Sequence: Synthetic oligonucleotide
aaauaaaucaggauaugcu

SEQ ID NO: 2694291 - RNA, 19 nt, Artificial Sequence
  Description of Artificial Sequence: Synthetic oligonucleotide
ucccuuauauacuacaaug

SEQ ID NO: 2694292 - RNA, 19 nt, Artificial Sequence
  Description of Artificial Sequence: Synthetic oligonucleotide
uggaaacacaaguaugugg

SEQ ID NO: 2694293 - RNA, 19 nt, Artificial Sequence
  Description of Artificial Sequence: Synthetic oligonucleotide
ucagucaaauucauaacca

SEQ ID NO: 2694294 - RNA, 19 nt, Artificial Sequence
  Description of Artificial Sequence: Synthetic oligonucleotide
aaagcaauuaagccuuucu

SEQ ID NO: 2694295 - RNA, 19 nt, Artificial Sequence
  Description of Artificial Sequence: Synthetic oligonucleotide
uauucuaaagggacaaaga

SEQ ID NO: 2694296 - RNA, 19 nt, Artificial Sequence
  Description of Artificial Sequence: Synthetic oligonucleotide
ucuuacaguuauuuuaaca

SEQ ID NO: 2694297 - RNA, 19 nt, Artificial Sequence
  Description of Artificial Sequence: Synthetic oligonucleotide
uuuacuuuguaaagaacuc

SEQ ID NO: 2694298 - RNA, 19 nt, Artificial Sequence
  Description of Artificial Sequence: Synthetic oligonucleotide
aacccuaaucucuauucuc

SEQ ID NO: 2694299 - RNA, 19 nt, Artificial Sequence
  Description of Artificial Sequence: Synthetic oligonucleotide
uauucuuugaggucaguca

SEQ ID NO: 2694300 - RNA, 19 nt, Artificial Sequence
  Description of Artificial Sequence: Synthetic oligonucleotide
uagaguacaacguggaaac

SEQ ID NO: 2694301 - RNA, 19 nt, Artificial Sequence
  Description of Artificial Sequence: Synthetic oligonucleotide
uguacugucaccacaacuu

SEQ ID NO: 2694302 - RNA, 19 nt, Artificial Sequence
  Description of Artificial Sequence: Synthetic oligonucleotide
ucaccaaaauaaaucagga

SEQ ID NO: 2694303 - RNA, 19 nt, Artificial Sequence
  Description of Artificial Sequence: Synthetic oligonucleotide
aaagccacccgccacgcuc

SEQ ID NO: 2694304 - RNA, 19 nt, Artificial Sequence
  Description of Artificial Sequence: Synthetic oligonucleotide
uucuguugugcuuacaaca

SEQ ID NO: 2694305 - RNA, 19 nt, Artificial Sequence
  Description of Artificial Sequence: Synthetic oligonucleotide
uucauaaccauuccuguaa

SEQ ID NO: 2694306 - RNA, 19 nt, Artificial Sequence
  Description of Artificial Sequence: Synthetic oligonucleotide
gucagucaaauucauaacc

SEQ ID NO: 2694307 - RNA, 19 nt, Artificial Sequence
  Description of Artificial Sequence: Synthetic oligonucleotide
ucaaauucauaaccauucc

SEQ ID NO: 2694308 - RNA, 19 nt, Artificial Sequence
  Description of Artificial Sequence: Synthetic oligonucleotide
cuaauauuaacccuaaucu

SEQ ID NO: 2694309 - RNA, 19 nt, Artificial Sequence
  Description of Artificial Sequence: Synthetic oligonucleotide
acaacguggaaacacaagu

SEQ ID NO: 2694310 - RNA, 19 nt, Artificial Sequence
  Description of Artificial Sequence: Synthetic oligonucleotide
uacaguuauuuuaacacuc

SEQ ID NO: 2694311 - RNA, 19 nt, Artificial Sequence
  Description of Artificial Sequence: Synthetic oligonucleotide
uaauauuaacccuaaucuc

SEQ ID NO: 2694312 - RNA, 19 nt, Artificial Sequence
  Description of Artificial Sequence: Synthetic oligonucleotide
acaaguauguggugacugc

SEQ ID NO: 2694313 - RNA, 19 nt, Artificial Sequence
  Description of Artificial Sequence: Synthetic oligonucleotide
agcaauuaagccuuucucu

SEQ ID NO: 2694314 - RNA, 19 nt, Artificial Sequence
  Description of Artificial Sequence: Synthetic oligonucleotide
cuggauauucuaaagggac

SEQ ID NO: 2694315 - RNA, 19 nt, Artificial Sequence
  Description of Artificial Sequence: Synthetic oligonucleotide
uaacacucagacauucuag

SEQ ID NO: 2694316 - RNA, 19 nt, Artificial Sequence
  Description of Artificial Sequence: Synthetic oligonucleotide
aacacucagacauucuaga

SEQ ID NO: 2694317 - RNA, 19 nt, Artificial Sequence
  Description of Artificial Sequence: Synthetic oligonucleotide
uaaccauuccuguaacagg

SEQ ID NO: 2694318 - RNA, 19 nt, Artificial Sequence
  Description of Artificial Sequence: Synthetic oligonucleotide
uucucuaauauuaacccua

SEQ ID NO: 2694319 - RNA, 19 nt, Artificial Sequence
  Description of Artificial Sequence: Synthetic oligonucleotide
guagggcacauccagaucc

SEQ ID NO: 2694320 - RNA, 19 nt, Artificial Sequence
  Description of Artificial Sequence: Synthetic oligonucleotide
ucucuauucucccuuauau

SEQ ID NO: 2694321 - RNA, 19 nt, Artificial Sequence
  Description of Artificial Sequence: Synthetic oligonucleotide
auaaccauuccuguaacag

SEQ ID NO: 2694322 - RNA, 19 nt, Artificial Sequence
  Description of Artificial Sequence: Synthetic oligonucleotide
uccauggccauucggauug

SEQ ID NO: 2694323 - RNA, 19 nt, Artificial Sequence
  Description of Artificial Sequence: Synthetic oligonucleotide
uuaacccuaaucucuauuc

SEQ ID NO: 2694324 - RNA, 19 nt, Artificial Sequence
  Description of Artificial Sequence: Synthetic oligonucleotide
uguugugcuuacaacaccu

SEQ ID NO: 2694325 - RNA, 19 nt, Artificial Sequence
  Description of Artificial Sequence: Synthetic oligonucleotide
aguuucuggaggcuuuccc

SEQ ID NO: 2694326 - RNA, 19 nt, Artificial Sequence
  Description of Artificial Sequence: Synthetic oligonucleotide
ugugcuuacaacaccugca

SEQ ID NO: 2694327 - RNA, 19 nt, Artificial Sequence
  Description of Artificial Sequence: Synthetic oligonucleotide
auauucuaaagggacaaag

SEQ ID NO: 2694328 - RNA, 19 nt, Artificial Sequence
  Description of Artificial Sequence: Synthetic oligonucleotide
aggucagucaaauucauaa

SEQ ID NO: 2694329 - RNA, 19 nt, Artificial Sequence
  Description of Artificial Sequence: Synthetic oligonucleotide
auaaacuuuuacuuuguaa

SEQ ID NO: 2694330 - RNA, 19 nt, Artificial Sequence
  Description of Artificial Sequence: Synthetic oligonucleotide
auauacuacaauguuguug

SEQ ID NO: 2694331 - RNA, 19 nt, Artificial Sequence
  Description of Artificial Sequence: Synthetic oligonucleotide
aaauuacauuuagaugugg

SEQ ID NO: 2694332 - RNA, 19 nt, Artificial Sequence
  Description of Artificial Sequence: Synthetic oligonucleotide
uuacaguuauuuuaacacu

SEQ ID NO: 2694333 - RNA, 19 nt, Artificial Sequence
  Description of Artificial Sequence: Synthetic oligonucleotide
uugaggucagucaaauuca

SEQ ID NO: 2694334 - RNA, 19 nt, Artificial Sequence
  Description of Artificial Sequence: Synthetic oligonucleotide
aacuuuuacuuuguaaaga

SEQ ID NO: 2694335 - RNA, 19 nt, Artificial Sequence
  Description of Artificial Sequence: Synthetic oligonucleotide
uuauuuuaacacucagaca

SEQ ID NO: 2694336 - RNA, 19 nt, Artificial Sequence
  Description of Artificial Sequence: Synthetic oligonucleotide
uccuguaggaagaaguuuc

SEQ ID NO: 2694337 - RNA, 19 nt, Artificial Sequence
  Description of Artificial Sequence: Synthetic oligonucleotide
aauuaagccuuucucuaau

SEQ ID NO: 2694338 - RNA, 19 nt, Artificial Sequence
  Description of Artificial Sequence: Synthetic oligonucleotide
ucuguugugcuuacaacac

SEQ ID NO: 2694339 - RNA, 19 nt, Artificial Sequence
  Description of Artificial Sequence: Synthetic oligonucleotide
uguugucaguuucauaaac

SEQ ID NO: 2694340 - RNA, 19 nt, Artificial Sequence
  Description of Artificial Sequence: Synthetic oligonucleotide
uuacuuuguaaagaacucc

SEQ ID NO: 2694341 - RNA, 19 nt, Artificial Sequence
  Description of Artificial Sequence: Synthetic oligonucleotide
uuuguaaagaacuccugua

SEQ ID NO: 2694342 - RNA, 19 nt, Artificial Sequence
  Description of Artificial Sequence: Synthetic oligonucleotide
uuacauuuagauguggauc

SEQ ID NO: 2694343 - RNA, 19 nt, Artificial Sequence
  Description of Artificial Sequence: Synthetic oligonucleotide
uuucccaaacacuuucaag

SEQ ID NO: 2694344 - RNA, 19 nt, Artificial Sequence
  Description of Artificial Sequence: Synthetic oligonucleotide
uuaacacucagacauucua

SEQ ID NO: 2694345 - RNA, 19 nt, Artificial Sequence
  Description of Artificial Sequence: Synthetic oligonucleotide
acaacuuuuauaguugugu

SEQ ID NO: 2694346 - RNA, 19 nt, Artificial Sequence
  Description of Artificial Sequence: Synthetic oligonucleotide
aauuacauuuagaugugga

SEQ ID NO: 2694347 - RNA, 19 nt, Artificial Sequence
  Description of Artificial Sequence: Synthetic oligonucleotide
aaacacaaguaugugguga

SEQ ID NO: 2694348 - RNA, 19 nt, Artificial Sequence
  Description of Artificial Sequence: Synthetic oligonucleotide
auuacauuuagauguggau

SEQ ID NO: 2694349 - RNA, 19 nt, Artificial Sequence
  Description of Artificial Sequence: Synthetic oligonucleotide
cuucaucacucagagaugg

SEQ ID NO: 2694350 - RNA, 19 nt, Artificial Sequence
  Description of Artificial Sequence: Synthetic oligonucleotide
uucggauuguugcauuucc

SEQ ID NO: 2694351 - RNA, 19 nt, Artificial Sequence
  Description of Artificial Sequence: Synthetic oligonucleotide
cauucuagaguacaacgug

SEQ ID NO: 2694352 - RNA, 19 nt, Artificial Sequence
  Description of Artificial Sequence: Synthetic oligonucleotide
gguucuugugaucaagugg

SEQ ID NO: 2694353 - RNA, 19 nt, Artificial Sequence
  Description of Artificial Sequence: Synthetic oligonucleotide
auuuagauguggaucuuac

SEQ ID NO: 2694354 - RNA, 19 nt, Artificial Sequence
  Description of Artificial Sequence: Synthetic oligonucleotide
uggauauucuaaagggaca

SEQ ID NO: 2694355 - RNA, 19 nt, Artificial Sequence
  Description of Artificial Sequence: Synthetic oligonucleotide
acagcuacauuuucuguug

SEQ ID NO: 2694356 - RNA, 19 nt, Artificial Sequence
  Description of Artificial Sequence: Synthetic oligonucleotide
acucagacauucuagagua

SEQ ID NO: 2694357 - RNA, 19 nt, Artificial Sequence
  Description of Artificial Sequence: Synthetic oligonucleotide
uuauaguuguguccauggc

SEQ ID NO: 2694358 - RNA, 19 nt, Artificial Sequence
  Description of Artificial Sequence: Synthetic oligonucleotide
acugcuggauauucuaaag

SEQ ID NO: 2694359 - RNA, 19 nt, Artificial Sequence
  Description of Artificial Sequence: Synthetic oligonucleotide
uucuagaguacaacgugga

SEQ ID NO: 2694360 - RNA, 19 nt, Artificial Sequence
  Description of Artificial Sequence: Synthetic oligonucleotide
agagaugggcugugcagcc

SEQ ID NO: 2694361 - RNA, 19 nt, Artificial Sequence
  Description of Artificial Sequence: Synthetic oligonucleotide
acccuaaucucuauucucc

SEQ ID NO: 2694362 - RNA, 19 nt, Artificial Sequence
  Description of Artificial Sequence: Synthetic oligonucleotide
uggccauucggauuguugc

SEQ ID NO: 2694363 - RNA, 19 nt, Artificial Sequence
  Description of Artificial Sequence: Synthetic oligonucleotide
gugacagucgcgcacggcg

SEQ ID NO: 2694364 - RNA, 19 nt, Artificial Sequence
  Description of Artificial Sequence: Synthetic oligonucleotide
uugugcuuacaacaccugc

SEQ ID NO: 2694365 - RNA, 19 nt, Artificial Sequence
  Description of Artificial Sequence: Synthetic oligonucleotide
uuaagccuuucucuaauau

SEQ ID NO: 2694366 - RNA, 19 nt, Artificial Sequence
  Description of Artificial Sequence: Synthetic oligonucleotide
aaccauuccuguaacagga

SEQ ID NO: 2694367 - RNA, 19 nt, Artificial Sequence
  Description of Artificial Sequence: Synthetic oligonucleotide
ccuuucucuaauauuaacc

SEQ ID NO: 2694368 - RNA, 19 nt, Artificial Sequence
  Description of Artificial Sequence: Synthetic oligonucleotide
uagauguggaucuuacagu

SEQ ID NO: 2694369 - RNA, 19 nt, Artificial Sequence
  Description of Artificial Sequence: Synthetic oligonucleotide
auucuagaguacaacgugg

SEQ ID NO: 2694370 - RNA, 19 nt, Artificial Sequence
  Description of Artificial Sequence: Synthetic oligonucleotide
aaguagggcacauccagau

SEQ ID NO: 2694371 - RNA, 19 nt, Artificial Sequence
  Description of Artificial Sequence: Synthetic oligonucleotide
guaaagaacuccuguagga

SEQ ID NO: 2694372 - RNA, 19 nt, Artificial Sequence
  Description of Artificial Sequence: Synthetic oligonucleotide
cugcuggauauucuaaagg

SEQ ID NO: 2694373 - RNA, 19 nt, Artificial Sequence
  Description of Artificial Sequence: Synthetic oligonucleotide
ucagacauucuagaguaca

SEQ ID NO: 2694374 - RNA, 19 nt, Artificial Sequence
  Description of Artificial Sequence: Synthetic oligonucleotide
aacuccuguaggaagaagu

SEQ ID NO: 2694375 - RNA, 19 nt, Artificial Sequence
  Description of Artificial Sequence: Synthetic oligonucleotide
guaggaagaaguuucugga

SEQ ID NO: 2694376 - RNA, 19 nt, Artificial Sequence
  Description of Artificial Sequence: Synthetic oligonucleotide
uauucucccuuauauacua

SEQ ID NO: 2694377 - RNA, 19 nt, Artificial Sequence
  Description of Artificial Sequence: Synthetic oligonucleotide
aagccuuucucuaauauua

SEQ ID NO: 2694378 - RNA, 19 nt, Artificial Sequence
  Description of Artificial Sequence: Synthetic oligonucleotide
uuuuauaguuguguccaug

SEQ ID NO: 2694379 - RNA, 19 nt, Artificial Sequence
  Description of Artificial Sequence: Synthetic oligonucleotide
auucuuugaggucagucaa

SEQ ID NO: 2694380 - RNA, 19 nt, Artificial Sequence
  Description of Artificial Sequence: Synthetic oligonucleotide
agacauucuagaguacaac

SEQ ID NO: 2694381 - RNA, 19 nt, Artificial Sequence
  Description of Artificial Sequence: Synthetic oligonucleotide
uaacccuaaucucuauucu

SEQ ID NO: 2694382 - RNA, 19 nt, Artificial Sequence
  Description of Artificial Sequence: Synthetic oligonucleotide
uuuagauguggaucuuaca

SEQ ID NO: 2694383 - RNA, 19 nt, Artificial Sequence
  Description of Artificial Sequence: Synthetic oligonucleotide
uugucaguuucauaaacuu

SEQ ID NO: 2694384 - RNA, 19 nt, Artificial Sequence
  Description of Artificial Sequence: Synthetic oligonucleotide
agauguggaucuuacaguu

SEQ ID NO: 2694385 - RNA, 19 nt, Artificial Sequence
  Description of Artificial Sequence: Synthetic oligonucleotide
aucaaguggcuucaugaug

SEQ ID NO: 2694386 - RNA, 19 nt, Artificial Sequence
  Description of Artificial Sequence: Synthetic oligonucleotide
uguguccauggccauucgg

SEQ ID NO: 2694387 - RNA, 19 nt, Artificial Sequence
  Description of Artificial Sequence: Synthetic oligonucleotide
aucuuacaguuauuuuaac

SEQ ID NO: 2694388 - RNA, 19 nt, Artificial Sequence
  Description of Artificial Sequence: Synthetic oligonucleotide
uacuacaauguuguuguca

SEQ ID NO: 2694389 - RNA, 19 nt, Artificial Sequence
  Description of Artificial Sequence: Synthetic oligonucleotide
caacuuuuauaguuguguc

SEQ ID NO: 2694390 - RNA, 19 nt, Artificial Sequence
  Description of Artificial Sequence: Synthetic oligonucleotide
aauguuguugucaguuuca

SEQ ID NO: 2694391 - RNA, 19 nt, Artificial Sequence
  Description of Artificial Sequence: Synthetic oligonucleotide
cauguauucuuugagguca

SEQ ID NO: 2694392 - RNA, 19 nt, Artificial Sequence
  Description of Artificial Sequence: Synthetic oligonucleotide
uaaagggacaaagagcuuu

SEQ ID NO: 2694393 - RNA, 19 nt, Artificial Sequence
  Description of Artificial Sequence: Synthetic oligonucleotide
ucucuaauauuaacccuaa

SEQ ID NO: 2694394 - RNA, 19 nt, Artificial Sequence
  Description of Artificial Sequence: Synthetic oligonucleotide
auaguuguguccauggcca

SEQ ID NO: 2694395 - RNA, 19 nt, Artificial Sequence
  Description of Artificial Sequence: Synthetic oligonucleotide
uuucuguugugcuuacaac

SEQ ID NO: 2694396 - RNA, 19 nt, Artificial Sequence
  Description of Artificial Sequence: Synthetic oligonucleotide
ucauaaccauuccuguaac

SEQ ID NO: 2694397 - RNA, 19 nt, Artificial Sequence
  Description of Artificial Sequence: Synthetic oligonucleotide
aggaucaaccucuccaugu

SEQ ID NO: 2694398 - RNA, 19 nt, Artificial Sequence
  Description of Artificial Sequence: Synthetic oligonucleotide
auguggaucuuacaguuau

SEQ ID NO: 2694399 - RNA, 19 nt, Artificial Sequence
  Description of Artificial Sequence: Synthetic oligonucleotide
ucuucaucacucagagaug

SEQ ID NO: 2694400 - RNA, 19 nt, Artificial Sequence
  Description of Artificial Sequence: Synthetic oligonucleotide
gaaacacaaguauguggug

SEQ ID NO: 2694401 - RNA, 19 nt, Artificial Sequence
  Description of Artificial Sequence: Synthetic oligonucleotide
ucaaccucuccauguacug

SEQ ID NO: 2694402 - RNA, 19 nt, Artificial Sequence
  Description of Artificial Sequence: Synthetic oligonucleotide
gaucuuacaguuauuuuaa

SEQ ID NO: 2694403 - RNA, 19 nt, Artificial Sequence
  Description of Artificial Sequence: Synthetic oligonucleotide
uguggugacugcuggauau

SEQ ID NO: 2694404 - RNA, 19 nt, Artificial Sequence
  Description of Artificial Sequence: Synthetic oligonucleotide
cauuccuguaacaggauca

SEQ ID NO: 2694405 - RNA, 19 nt, Artificial Sequence
  Description of Artificial Sequence: Synthetic oligonucleotide
acaacaccugcaaaguagg

SEQ ID NO: 2694406 - RNA, 19 nt, Artificial Sequence
  Description of Artificial Sequence: Synthetic oligonucleotide
aguuauuuuaacacucaga

SEQ ID NO: 2694407 - RNA, 19 nt, Artificial Sequence
  Description of Artificial Sequence: Synthetic oligonucleotide
gaguacaacguggaaacac

SEQ ID NO: 2694408 - RNA, 19 nt, Artificial Sequence
  Description of Artificial Sequence: Synthetic oligonucleotide
uucccagauauagacagcu

SEQ ID NO: 2694409 - RNA, 19 nt, Artificial Sequence
  Description of Artificial Sequence: Synthetic oligonucleotide
gauuguugcauuucccaaa

SEQ ID NO: 2694410 - RNA, 19 nt, Artificial Sequence
  Description of Artificial Sequence: Synthetic oligonucleotide
uaaagaacuccuguaggaa

SEQ ID NO: 2694411 - RNA, 19 nt, Artificial Sequence
  Description of Artificial Sequence: Synthetic oligonucleotide
caguuauuuuaacacucag

SEQ ID NO: 2694412 - RNA, 19 nt, Artificial Sequence
  Description of Artificial Sequence: Synthetic oligonucleotide
ggaagaaguuucuggaggc

SEQ ID NO: 2694413 - RNA, 19 nt, Artificial Sequence
  Description of Artificial Sequence: Synthetic oligonucleotide
ugucaguuucauaaacuuu

SEQ ID NO: 2694414 - RNA, 19 nt, Artificial Sequence
  Description of Artificial Sequence: Synthetic oligonucleotide
auguacugucaccacaacu

SEQ ID NO: 2694415 - RNA, 19 nt, Artificial Sequence
  Description of Artificial Sequence: Synthetic oligonucleotide
aucacucagagaugggcug

SEQ ID NO: 2694416 - RNA, 19 nt, Artificial Sequence
  Description of Artificial Sequence: Synthetic oligonucleotide
ucggauuguugcauuuccc

SEQ ID NO: 2694417 - RNA, 19 nt, Artificial Sequence
  Description of Artificial Sequence: Synthetic oligonucleotide
agaugggcugugcagccgg

SEQ ID NO: 2694418 - RNA, 19 nt, Artificial Sequence
  Description of Artificial Sequence: Synthetic oligonucleotide
uggaggcuuucccagauau

SEQ ID NO: 2694419 - RNA, 19 nt, Artificial Sequence
  Description of Artificial Sequence: Synthetic oligonucleotide
cacugaaggacacgaggcg

SEQ ID NO: 2694420 - RNA, 19 nt, Artificial Sequence
  Description of Artificial Sequence: Synthetic oligonucleotide
ggaucuuacaguuauuuua

SEQ ID NO: 2694421 - RNA, 19 nt, Artificial Sequence
  Description of Artificial Sequence: Synthetic oligonucleotide
agguucuugugaucaagug

SEQ ID NO: 2694422 - RNA, 19 nt, Artificial Sequence
  Description of Artificial Sequence: Synthetic oligonucleotide
agauccagguucuugugau

SEQ ID NO: 2694423 - RNA, 19 nt, Artificial Sequence
  Description of Artificial Sequence: Synthetic oligonucleotide
aaguucucuucaucacuca

SEQ ID NO: 2694424 - RNA, 19 nt, Artificial Sequence
  Description of Artificial Sequence: Synthetic oligonucleotide
ucuagaguacaacguggaa

SEQ ID NO: 2694425 - RNA, 19 nt, Artificial Sequence
  Description of Artificial Sequence: Synthetic oligonucleotide
ucaguuucauaaacuuuua

SEQ ID NO: 2694426 - RNA, 19 nt, Artificial Sequence
  Description of Artificial Sequence: Synthetic oligonucleotide
aguagggcacauccagauc

SEQ ID NO: 2694427 - RNA, 19 nt, Artificial Sequence
  Description of Artificial Sequence: Synthetic oligonucleotide
augauggccuccuccaugu

SEQ ID NO: 2694428 - RNA, 19 nt, Artificial Sequence
  Description of Artificial Sequence: Synthetic oligonucleotide
accacaacuuuuauaguug

SEQ ID NO: 2694429 - RNA, 19 nt, Artificial Sequence
  Description of Artificial Sequence: Synthetic oligonucleotide
acauucuagaguacaacgu

SEQ ID NO: 2694430 - RNA, 19 nt, Artificial Sequence
  Description of Artificial Sequence: Synthetic oligonucleotide
auuaacccuaaucucuauu

SEQ ID NO: 2694431 - RNA, 19 nt, Artificial Sequence
  Description of Artificial Sequence: Synthetic oligonucleotide
uuacaacaccugcaaagua

SEQ ID NO: 2694432 - RNA, 19 nt, Artificial Sequence
  Description of Artificial Sequence: Synthetic oligonucleotide
ucaggauaugcuguaaguu

SEQ ID NO: 2694433 - RNA, 19 nt, Artificial Sequence
  Description of Artificial Sequence: Synthetic oligonucleotide
ucuuugaggucagucaaau

SEQ ID NO: 2694434 - RNA, 19 nt, Artificial Sequence
  Description of Artificial Sequence: Synthetic oligonucleotide
aaguauguggugacugcug

SEQ ID NO: 2694435 - RNA, 19 nt, Artificial Sequence
  Description of Artificial Sequence: Synthetic oligonucleotide
aaucucuauucucccuuau

SEQ ID NO: 2694436 - RNA, 19 nt, Artificial Sequence
  Description of Artificial Sequence: Synthetic oligonucleotide
aguacaacguggaaacaca

SEQ ID NO: 2694437 - RNA, 19 nt, Artificial Sequence
  Description of Artificial Sequence: Synthetic oligonucleotide
auuucccaaacacuuucaa

SEQ ID NO: 2694438 - RNA, 19 nt, Artificial Sequence
  Description of Artificial Sequence: Synthetic oligonucleotide
auaugcuguaaguuuugau

SEQ ID NO: 2694439 - RNA, 19 nt, Artificial Sequence
  Description of Artificial Sequence: Synthetic oligonucleotide
gaucaaccucuccauguac

SEQ ID NO: 2694440 - RNA, 19 nt, Artificial Sequence
  Description of Artificial Sequence: Synthetic oligonucleotide
guuucuggaggcuuuccca

SEQ ID NO: 2694441 - RNA, 19 nt, Artificial Sequence
  Description of Artificial Sequence: Synthetic oligonucleotide
cacaaguauguggugacug

SEQ ID NO: 2694442 - RNA, 19 nt, Artificial Sequence
  Description of Artificial Sequence: Synthetic oligonucleotide
caguuucauaaacuuuuac

SEQ ID NO: 2694443 - RNA, 19 nt, Artificial Sequence
  Description of Artificial Sequence: Synthetic oligonucleotide
agcuacauuuucuguugug

SEQ ID NO: 2694444 - RNA, 19 nt, Artificial Sequence
  Description of Artificial Sequence: Synthetic oligonucleotide
auucggauuguugcauuuc

SEQ ID NO: 2694445 - RNA, 19 nt, Artificial Sequence
  Description of Artificial Sequence: Synthetic oligonucleotide
ugacugcuggauauucuaa

SEQ ID NO: 2694446 - RNA, 19 nt, Artificial Sequence
  Description of Artificial Sequence: Synthetic oligonucleotide
cuguugugcuuacaacacc

SEQ ID NO: 2694447 - RNA, 19 nt, Artificial Sequence
  Description of Artificial Sequence: Synthetic oligonucleotide
uucuuugaggucagucaaa

SEQ ID NO: 2694448 - RNA, 19 nt, Artificial Sequence
  Description of Artificial Sequence: Synthetic oligonucleotide
cuagaguacaacguggaaa

SEQ ID NO: 2694449 - RNA, 19 nt, Artificial Sequence
  Description of Artificial Sequence: Synthetic oligonucleotide
cugaaggacacgaggcgug

SEQ ID NO: 2694450 - RNA, 19 nt, Artificial Sequence
  Description of Artificial Sequence: Synthetic oligonucleotide
gcuacauuuucuguugugc

SEQ ID NO: 2694451 - RNA, 19 nt, Artificial Sequence
  Description of Artificial Sequence: Synthetic oligonucleotide
agauauagacagcuacauu

SEQ ID NO: 2694452 - RNA, 19 nt, Artificial Sequence
  Description of Artificial Sequence: Synthetic oligonucleotide
ugucaccacaacuuuuaua

SEQ ID NO: 2694453 - RNA, 19 nt, Artificial Sequence
  Description of Artificial Sequence: Synthetic oligonucleotide
cacaacuuuuauaguugug

SEQ ID NO: 2694454 - RNA, 19 nt, Artificial Sequence
  Description of Artificial Sequence: Synthetic oligonucleotide
ucccaaacacuuucaaguu

SEQ ID NO: 2694455 - RNA, 19 nt, Artificial Sequence
  Description of Artificial Sequence: Synthetic oligonucleotide
cagagaugggcugugcagc

SEQ ID NO: 2694456 - RNA, 19 nt, Artificial Sequence
  Description of Artificial Sequence: Synthetic oligonucleotide
uggaucuuacaguuauuuu

SEQ ID NO: 2694457 - RNA, 19 nt, Artificial Sequence
  Description of Artificial Sequence: Synthetic oligonucleotide
gacacgaggcgugacaguc

SEQ ID NO: 2694458 - RNA, 19 nt, Artificial Sequence
  Description of Artificial Sequence: Synthetic oligonucleotide
guauucuuugaggucaguc

SEQ ID NO: 2694459 - RNA, 19 nt, Artificial Sequence
  Description of Artificial Sequence: Synthetic oligonucleotide
agacagcuacauuuucugu

SEQ ID NO: 2694460 - RNA, 19 nt, Artificial Sequence
  Description of Artificial Sequence: Synthetic oligonucleotide
aggcgugacagucgcgcac

SEQ ID NO: 2694461 - RNA, 19 nt, Artificial Sequence
  Description of Artificial Sequence: Synthetic oligonucleotide
auacuacaauguuguuguc

SEQ ID NO: 2694462 - RNA, 19 nt, Artificial Sequence
  Description of Artificial Sequence: Synthetic oligonucleotide
acugaaggacacgaggcgu

SEQ ID NO: 2694463 - RNA, 19 nt, Artificial Sequence
  Description of Artificial Sequence: Synthetic oligonucleotide
uugugaucaaguggcuuca

SEQ ID NO: 2694464 - RNA, 19 nt, Artificial Sequence
  Description of Artificial Sequence: Synthetic oligonucleotide
aaaucaggauaugcuguaa

SEQ ID NO: 2694465 - RNA, 19 nt, Artificial Sequence
  Description of Artificial Sequence: Synthetic oligonucleotide
ugcauuucccaaacacuuu

SEQ ID NO: 2694466 - RNA, 19 nt, Artificial Sequence
  Description of Artificial Sequence: Synthetic oligonucleotide
uauauacuacaauguuguu

SEQ ID NO: 2694467 - RNA, 19 nt, Artificial Sequence
  Description of Artificial Sequence: Synthetic oligonucleotide
acaauguuguugucaguuu

SEQ ID NO: 2694468 - RNA, 19 nt, Artificial Sequence
  Description of Artificial Sequence: Synthetic oligonucleotide
cccagauauagacagcuac

SEQ ID NO: 2694469 - RNA, 19 nt, Artificial Sequence
  Description of Artificial Sequence: Synthetic oligonucleotide
ugcuuacaacaccugcaaa

SEQ ID NO: 2694470 - RNA, 19 nt, Artificial Sequence
  Description of Artificial Sequence: Synthetic oligonucleotide
acguggaaacacaaguaug

SEQ ID NO: 2694471 - RNA, 19 nt, Artificial Sequence
  Description of Artificial Sequence: Synthetic oligonucleotide
auuaagccuuucucuaaua

SEQ ID NO: 2694472 - RNA, 19 nt, Artificial Sequence
  Description of Artificial Sequence: Synthetic oligonucleotide
gauaugcuguaaguuuuga

SEQ ID NO: 2694473 - RNA, 19 nt, Artificial Sequence
  Description of Artificial Sequence: Synthetic oligonucleotide
uggcucgcacugaaggaca

SEQ ID NO: 2694474 - RNA, 19 nt, Artificial Sequence
  Description of Artificial Sequence: Synthetic oligonucleotide
cacgaggcgugacagucgc

SEQ ID NO: 2694475 - RNA, 19 nt, Artificial Sequence
  Description of Artificial Sequence: Synthetic oligonucleotide
gacagcuacauuuucuguu

SEQ ID NO: 2694476 - RNA, 19 nt, Artificial Sequence
  Description of Artificial Sequence: Synthetic oligonucleotide
uuguugcauuucccaaaca

SEQ ID NO: 2694477 - RNA, 19 nt, Artificial Sequence
  Description of Artificial Sequence: Synthetic oligonucleotide
uuguguccauggccauucg

SEQ ID NO: 2694478 - RNA, 19 nt, Artificial Sequence
  Description of Artificial Sequence: Synthetic oligonucleotide
guggaaacacaaguaugug

SEQ ID NO: 2694479 - RNA, 19 nt, Artificial Sequence
  Description of Artificial Sequence: Synthetic oligonucleotide
ugcuguaaguuuugauuuu

SEQ ID NO: 2694480 - RNA, 19 nt, Artificial Sequence
  Description of Artificial Sequence: Synthetic oligonucleotide
ggucagucaaauucauaac

SEQ ID NO: 2694481 - RNA, 19 nt, Artificial Sequence
  Description of Artificial Sequence: Synthetic oligonucleotide
caaauucauaaccauuccu

SEQ ID NO: 2694482 - RNA, 19 nt, Artificial Sequence
  Description of Artificial Sequence: Synthetic oligonucleotide
cuguaacaggaucaaccuc

SEQ ID NO: 2694483 - RNA, 19 nt, Artificial Sequence
  Description of Artificial Sequence: Synthetic oligonucleotide
auauuaacccuaaucucua

SEQ ID NO: 2694484 - RNA, 19 nt, Artificial Sequence
  Description of Artificial Sequence: Synthetic oligonucleotide
uagggcacauccagaucca

SEQ ID NO: 2694485 - RNA, 19 nt, Artificial Sequence
  Description of Artificial Sequence: Synthetic oligonucleotide
uacugucaccacaacuuuu

SEQ ID NO: 2694486 - RNA, 19 nt, Artificial Sequence
  Description of Artificial Sequence: Synthetic oligonucleotide
aucaaccucuccauguacu

SEQ ID NO: 2694487 - RNA, 19 nt, Artificial Sequence
  Description of Artificial Sequence: Synthetic oligonucleotide
caauuaagccuuucucuaa

SEQ ID NO: 2694488 - RNA, 19 nt, Artificial Sequence
  Description of Artificial Sequence: Synthetic oligonucleotide
ucgcacugaaggacacgag

SEQ ID NO: 2694489 - RNA, 19 nt, Artificial Sequence
  Description of Artificial Sequence: Synthetic oligonucleotide
cauaaccauuccuguaaca

SEQ ID NO: 2694490 - RNA, 19 nt, Artificial Sequence
  Description of Artificial Sequence: Synthetic oligonucleotide
auucucccuuauauacuac

SEQ ID NO: 2694491 - RNA, 19 nt, Artificial Sequence
  Description of Artificial Sequence: Synthetic oligonucleotide
gcauuucccaaacacuuuc

SEQ ID NO: 2694492 - RNA, 19 nt, Artificial Sequence
  Description of Artificial Sequence: Synthetic oligonucleotide
gcaauuaagccuuucucua

SEQ ID NO: 2694493 - RNA, 19 nt, Artificial Sequence
  Description of Artificial Sequence: Synthetic oligonucleotide
uucuggaggcuuucccaga

SEQ ID NO: 2694494 - RNA, 19 nt, Artificial Sequence
  Description of Artificial Sequence: Synthetic oligonucleotide
caaguggcuucaugauggc

SEQ ID NO: 2694495 - RNA, 19 nt, Artificial Sequence
  Description of Artificial Sequence: Synthetic oligonucleotide
aucucuauucucccuuaua

SEQ ID NO: 2694496 - RNA, 19 nt, Artificial Sequence
  Description of Artificial Sequence: Synthetic oligonucleotide
gaucaaguggcuucaugau

SEQ ID NO: 2694497 - RNA, 19 nt, Artificial Sequence
  Description of Artificial Sequence: Synthetic oligonucleotide
cuacauuuucuguugugcu

SEQ ID NO: 2694498 - RNA, 19 nt, Artificial Sequence
  Description of Artificial Sequence: Synthetic oligonucleotide
acugucaccacaacuuuua

SEQ ID NO: 2694499 - RNA, 19 nt, Artificial Sequence
  Description of Artificial Sequence: Synthetic oligonucleotide
gugcuuacaacaccugcaa

SEQ ID NO: 2694500 - RNA, 19 nt, Artificial Sequence
  Description of Artificial Sequence: Synthetic oligonucleotide
ugaaggacacgaggcguga

SEQ ID NO: 2694501 - RNA, 19 nt, Artificial Sequence
  Description of Artificial Sequence: Synthetic oligonucleotide
gcgaaagccacccgccacg

SEQ ID NO: 2694502 - RNA, 19 nt, Artificial Sequence
  Description of Artificial Sequence: Synthetic oligonucleotide
ucacucagagaugggcugu

SEQ ID NO: 2694503 - RNA, 19 nt, Artificial Sequence
  Description of Artificial Sequence: Synthetic oligonucleotide
ggauauucuaaagggacaa

SEQ ID NO: 2694504 - RNA, 19 nt, Artificial Sequence
  Description of Artificial Sequence: Synthetic oligonucleotide
gauauucuaaagggacaaa

SEQ ID NO: 2694505 - RNA, 19 nt, Artificial Sequence
  Description of Artificial Sequence: Synthetic oligonucleotide
auuccuguaacaggaucaa

SEQ ID NO: 2694506 - RNA, 19 nt, Artificial Sequence
  Description of Artificial Sequence: Synthetic oligonucleotide
gugacugcuggauauucua

SEQ ID NO: 2694507 - RNA, 19 nt, Artificial Sequence
  Description of Artificial Sequence: Synthetic oligonucleotide
gcacugaaggacacgaggc

SEQ ID NO: 2694508 - RNA, 19 nt, Artificial Sequence
  Description of Artificial Sequence: Synthetic oligonucleotide
gacagucgcgcacggcggc

SEQ ID NO: 2694509 - RNA, 19 nt, Artificial Sequence
  Description of Artificial Sequence: Synthetic oligonucleotide
guugcauuucccaaacacu

SEQ ID NO: 2694510 - RNA, 19 nt, Artificial Sequence
  Description of Artificial Sequence: Synthetic oligonucleotide
cauguacugucaccacaac

SEQ ID NO: 2694511 - RNA, 19 nt, Artificial Sequence
  Description of Artificial Sequence: Synthetic oligonucleotide
gauccagguucuugugauc

SEQ ID NO: 2694512 - RNA, 19 nt, Artificial Sequence
  Description of Artificial Sequence: Synthetic oligonucleotide
uguggaucuuacaguuauu

SEQ ID NO: 2694513 - RNA, 19 nt, Artificial Sequence
  Description of Artificial Sequence: Synthetic oligonucleotide
cugugcagccgguggcucg

SEQ ID NO: 2694514 - RNA, 19 nt, Artificial Sequence
  Description of Artificial Sequence: Synthetic oligonucleotide
cagacauucuagaguacaa

SEQ ID NO: 2694515 - RNA, 19 nt, Artificial Sequence
  Description of Artificial Sequence: Synthetic oligonucleotide
auggccauucggauuguug

SEQ ID NO: 2694516 - RNA, 19 nt, Artificial Sequence
  Description of Artificial Sequence: Synthetic oligonucleotide
gaaguuucuggaggcuuuc

SEQ ID NO: 2694517 - RNA, 19 nt, Artificial Sequence
  Description of Artificial Sequence: Synthetic oligonucleotide
guugugcuuacaacaccug

SEQ ID NO: 2694518 - RNA, 19 nt, Artificial Sequence
  Description of Artificial Sequence: Synthetic oligonucleotide
gagaugggcugugcagccg

SEQ ID NO: 2694519 - RNA, 19 nt, Artificial Sequence
  Description of Artificial Sequence: Synthetic oligonucleotide
cuauucucccuuauauacu

SEQ ID NO: 2694520 - RNA, 19 nt, Artificial Sequence
  Description of Artificial Sequence: Synthetic oligonucleotide
caggaucaaccucuccaug

SEQ ID NO: 2694521 - RNA, 19 nt, Artificial Sequence
  Description of Artificial Sequence: Synthetic oligonucleotide
cucuauucucccuuauaua

SEQ ID NO: 2694522 - RNA, 19 nt, Artificial Sequence
  Description of Artificial Sequence: Synthetic oligonucleotide
auguauucuuugaggucag

SEQ ID NO: 2694523 - RNA, 19 nt, Artificial Sequence
  Description of Artificial Sequence: Synthetic oligonucleotide
cacucagacauucuagagu

SEQ ID NO: 2694524 - RNA, 19 nt, Artificial Sequence
  Description of Artificial Sequence: Synthetic oligonucleotide
guggcucgcacugaaggac

SEQ ID NO: 2694525 - RNA, 19 nt, Artificial Sequence
  Description of Artificial Sequence: Synthetic oligonucleotide
ucccagauauagacagcua

SEQ ID NO: 2694526 - RNA, 19 nt, Artificial Sequence
  Description of Artificial Sequence: Synthetic oligonucleotide
ggauuguugcauuucccaa

SEQ ID NO: 2694527 - RNA, 19 nt, Artificial Sequence
  Description of Artificial Sequence: Synthetic oligonucleotide
caucacucagagaugggcu

SEQ ID NO: 2694528 - RNA, 19 nt, Artificial Sequence
  Description of Artificial Sequence: Synthetic oligonucleotide
ccagauauagacagcuaca

SEQ ID NO: 2694529 - RNA, 19 nt, Artificial Sequence
  Description of Artificial Sequence: Synthetic oligonucleotide
ucgcgcacggcggcgaaag

SEQ ID NO: 2694530 - RNA, 19 nt, Artificial Sequence
  Description of Artificial Sequence: Synthetic oligonucleotide
ugugcagccgguggcucgc

SEQ ID NO: 2694531 - RNA, 19 nt, Artificial Sequence
  Description of Artificial Sequence: Synthetic oligonucleotide
cucgcacugaaggacacga

SEQ ID NO: 2694532 - RNA, 19 nt, Artificial Sequence
  Description of Artificial Sequence: Synthetic oligonucleotide
auuuuaacacucagacauu

SEQ ID NO: 2694533 - RNA, 19 nt, Artificial Sequence
  Description of Artificial Sequence: Synthetic oligonucleotide
guauguggugacugcugga

SEQ ID NO: 2694534 - RNA, 19 nt, Artificial Sequence
  Description of Artificial Sequence: Synthetic oligonucleotide
ggcacauccagauccaggu

SEQ ID NO: 2694535 - RNA, 19 nt, Artificial Sequence
  Description of Artificial Sequence: Synthetic oligonucleotide
cagauccagguucuuguga

SEQ ID NO: 2694536 - RNA, 19 nt, Artificial Sequence
  Description of Artificial Sequence: Synthetic oligonucleotide
cccuaaucucuauucuccc

SEQ ID NO: 2694537 - RNA, 19 nt, Artificial Sequence
  Description of Artificial Sequence: Synthetic oligonucleotide
agaaguuucuggaggcuuu

SEQ ID NO: 2694538 - RNA, 19 nt, Artificial Sequence
  Description of Artificial Sequence: Synthetic oligonucleotide
cuaaucucuauucucccuu

SEQ ID NO: 2694539 - RNA, 19 nt, Artificial Sequence
  Description of Artificial Sequence: Synthetic oligonucleotide
ggauaugcuguaaguuuug

SEQ ID NO: 2694540 - RNA, 19 nt, Artificial Sequence
  Description of Artificial Sequence: Synthetic oligonucleotide
caccugcaaaguagggcac

SEQ ID NO: 2694541 - RNA, 19 nt, Artificial Sequence
  Description of Artificial Sequence: Synthetic oligonucleotide
uuccuguaacaggaucaac

SEQ ID NO: 2694542 - RNA, 19 nt, Artificial Sequence
  Description of Artificial Sequence: Synthetic oligonucleotide
ccauguauucuuugagguc

SEQ ID NO: 2694543 - RNA, 19 nt, Artificial Sequence
  Description of Artificial Sequence: Synthetic oligonucleotide
acacgaggcgugacagucg

SEQ ID NO: 2694544 - RNA, 19 nt, Artificial Sequence
  Description of Artificial Sequence: Synthetic oligonucleotide
ggcggcgaaagccacccgc

SEQ ID NO: 2694545 - RNA, 19 nt, Artificial Sequence
  Description of Artificial Sequence: Synthetic oligonucleotide
gcuggauauucuaaaggga

SEQ ID NO: 2694546 - RNA, 19 nt, Artificial Sequence
  Description of Artificial Sequence: Synthetic oligonucleotide
agaguacaacguggaaaca

SEQ ID NO: 2694547 - RNA, 19 nt, Artificial Sequence
  Description of Artificial Sequence: Synthetic oligonucleotide
acacaaguauguggugacu

SEQ ID NO: 2694548 - RNA, 19 nt, Artificial Sequence
  Description of Artificial Sequence: Synthetic oligonucleotide
guaacaggaucaaccucuc

SEQ ID NO: 2694549 - RNA, 19 nt, Artificial Sequence
  Description of Artificial Sequence: Synthetic oligonucleotide
uaguuguguccauggccau

SEQ ID NO: 2694550 - RNA, 19 nt, Artificial Sequence
  Description of Artificial Sequence: Synthetic oligonucleotide
ggcgugacagucgcgcacg

SEQ ID NO: 2694551 - RNA, 19 nt, Artificial Sequence
  Description of Artificial Sequence: Synthetic oligonucleotide
aagccacccgccacgcuca

SEQ ID NO: 2694552 - RNA, 19 nt, Artificial Sequence
  Description of Artificial Sequence: Synthetic oligonucleotide
guacaacguggaaacacaa

SEQ ID NO: 2694553 - RNA, 19 nt, Artificial Sequence
  Description of Artificial Sequence: Synthetic oligonucleotide
auguggugacugcuggaua

SEQ ID NO: 2694554 - RNA, 19 nt, Artificial Sequence
  Description of Artificial Sequence: Synthetic oligonucleotide
caccaaaauaaaucaggau

SEQ ID NO: 2694555 - RNA, 19 nt, Artificial Sequence
  Description of Artificial Sequence: Synthetic oligonucleotide
gauguggaucuuacaguua

SEQ ID NO: 2694556 - RNA, 19 nt, Artificial Sequence
  Description of Artificial Sequence: Synthetic oligonucleotide
cccaaacacuuucaaguuc

SEQ ID NO: 2694557 - RNA, 19 nt, Artificial Sequence
  Description of Artificial Sequence: Synthetic oligonucleotide
accugcaaaguagggcaca

SEQ ID NO: 2694558 - RNA, 19 nt, Artificial Sequence
  Description of Artificial Sequence: Synthetic oligonucleotide
guggaucuuacaguuauuu

SEQ ID NO: 2694559 - RNA, 19 nt, Artificial Sequence
  Description of Artificial Sequence: Synthetic oligonucleotide
acagucgcgcacggcggcg

SEQ ID NO: 2694560 - RNA, 19 nt, Artificial Sequence
  Description of Artificial Sequence: Synthetic oligonucleotide
gaaggacacgaggcgugac

SEQ ID NO: 2694561 - RNA, 19 nt, Artificial Sequence
  Description of Artificial Sequence: Synthetic oligonucleotide
cauuuagauguggaucuua

SEQ ID NO: 2694562 - RNA, 19 nt, Artificial Sequence
  Description of Artificial Sequence: Synthetic oligonucleotide
cagauauagacagcuacau

SEQ ID NO: 2694563 - RNA, 19 nt, Artificial Sequence
  Description of Artificial Sequence: Synthetic oligonucleotide
gaggcgugacagucgcgca

SEQ ID NO: 2694564 - RNA, 19 nt, Artificial Sequence
  Description of Artificial Sequence: Synthetic oligonucleotide
gguggcucgcacugaagga

SEQ ID NO: 2694565 - RNA, 19 nt, Artificial Sequence
  Description of Artificial Sequence: Synthetic oligonucleotide
ccauuccuguaacaggauc

SEQ ID NO: 2694566 - RNA, 19 nt, Artificial Sequence
  Description of Artificial Sequence: Synthetic oligonucleotide
cagguucuugugaucaagu

SEQ ID NO: 2694567 - RNA, 19 nt, Artificial Sequence
  Description of Artificial Sequence: Synthetic oligonucleotide
ugugaucaaguggcuucau

SEQ ID NO: 2694568 - RNA, 19 nt, Artificial Sequence
  Description of Artificial Sequence: Synthetic oligonucleotide
cacggcggcgaaagccacc

SEQ ID NO: 2694569 - RNA, 19 nt, Artificial Sequence
  Description of Artificial Sequence: Synthetic oligonucleotide
agccuuucucuaauauuaa

SEQ ID NO: 2694570 - RNA, 19 nt, Artificial Sequence
  Description of Artificial Sequence: Synthetic oligonucleotide
cccuuauauacuacaaugu

SEQ ID NO: 2694571 - RNA, 19 nt, Artificial Sequence
  Description of Artificial Sequence: Synthetic oligonucleotide
acauuuagauguggaucuu

SEQ ID NO: 2694572 - RNA, 19 nt, Artificial Sequence
  Description of Artificial Sequence: Synthetic oligonucleotide
ggcgaaagccacccgccac

SEQ ID NO: 2694573 - RNA, 19 nt, Artificial Sequence
  Description of Artificial Sequence: Synthetic oligonucleotide
agggcacauccagauccag

SEQ ID NO: 2694574 - RNA, 19 nt, Artificial Sequence
  Description of Artificial Sequence: Synthetic oligonucleotide
ggaucaaccucuccaugua

SEQ ID NO: 2694575 - RNA, 19 nt, Artificial Sequence
  Description of Artificial Sequence: Synthetic oligonucleotide
cgguggcucgcacugaagg

SEQ ID NO: 2694576 - RNA, 19 nt, Artificial Sequence
  Description of Artificial Sequence: Synthetic oligonucleotide
ggccauucggauuguugca

SEQ ID NO: 2694577 - RNA, 19 nt, Artificial Sequence
  Description of Artificial Sequence: Synthetic oligonucleotide
cguggaaacacaaguaugu

SEQ ID NO: 2694578 - RNA, 19 nt, Artificial Sequence
  Description of Artificial Sequence: Synthetic oligonucleotide
aggcuuucccagauauaga

SEQ ID NO: 2694579 - RNA, 19 nt, Artificial Sequence
  Description of Artificial Sequence: Synthetic oligonucleotide
cacucagagaugggcugug

SEQ ID NO: 2694580 - RNA, 19 nt, Artificial Sequence
  Description of Artificial Sequence: Synthetic oligonucleotide
caaguauguggugacugcu

SEQ ID NO: 2694581 - RNA, 19 nt, Artificial Sequence
  Description of Artificial Sequence: Synthetic oligonucleotide
ccagauccagguucuugug

SEQ ID NO: 2694582 - RNA, 19 nt, Artificial Sequence
  Description of Artificial Sequence: Synthetic oligonucleotide
aguuguguccauggccauu

SEQ ID NO: 2694583 - RNA, 19 nt, Artificial Sequence
  Description of Artificial Sequence: Synthetic oligonucleotide
guacugucaccacaacuuu

SEQ ID NO: 2694584 - RNA, 19 nt, Artificial Sequence
  Description of Artificial Sequence: Synthetic oligonucleotide
ugcagccgguggcucgcac

SEQ ID NO: 2694585 - RNA, 19 nt, Artificial Sequence
  Description of Artificial Sequence: Synthetic oligonucleotide
ccuuauauacuacaauguu

SEQ ID NO: 2694586 - RNA, 19 nt, Artificial Sequence
  Description of Artificial Sequence: Synthetic oligonucleotide
accucuccauguacuguca

SEQ ID NO: 2694587 - RNA, 19 nt, Artificial Sequence
  Description of Artificial Sequence: Synthetic oligonucleotide
cuuuuauaguuguguccau

SEQ ID NO: 2694588 - RNA, 19 nt, Artificial Sequence
  Description of Artificial Sequence: Synthetic oligonucleotide
cgaggcgugacagucgcgc

SEQ ID NO: 2694589 - RNA, 19 nt, Artificial Sequence
  Description of Artificial Sequence: Synthetic oligonucleotide
accauuccuguaacaggau

SEQ ID NO: 2694590 - RNA, 19 nt, Artificial Sequence
  Description of Artificial Sequence: Synthetic oligonucleotide
cauucggauuguugcauuu

SEQ ID NO: 2694591 - RNA, 19 nt, Artificial Sequence
  Description of Artificial Sequence: Synthetic oligonucleotide
gcucgcacugaaggacacg

SEQ ID NO: 2694592 - RNA, 19 nt, Artificial Sequence
  Description of Artificial Sequence: Synthetic oligonucleotide
gcggcgaaagccacccgcc

SEQ ID NO: 2694593 - RNA, 19 nt, Artificial Sequence
  Description of Artificial Sequence: Synthetic oligonucleotide
ccucuccauguacugucac

SEQ ID NO: 2694594 - RNA, 19 nt, Artificial Sequence
  Description of Artificial Sequence: Synthetic oligonucleotide
acgaggcgugacagucgcg

SEQ ID NO: 2694595 - RNA, 19 nt, Artificial Sequence
  Description of Artificial Sequence: Synthetic oligonucleotide
cuaaagggacaaagagcuu

SEQ ID NO: 2694596 - RNA, 19 nt, Artificial Sequence
  Description of Artificial Sequence: Synthetic oligonucleotide
cucuaauauuaacccuaau

SEQ ID NO: 2694597 - RNA, 19 nt, Artificial Sequence
  Description of Artificial Sequence: Synthetic oligonucleotide
ccacaacuuuuauaguugu

SEQ ID NO: 2694598 - RNA, 19 nt, Artificial Sequence
  Description of Artificial Sequence: Synthetic oligonucleotide
ccuaaucucuauucucccu

SEQ ID NO: 2694599 - RNA, 19 nt, Artificial Sequence
  Description of Artificial Sequence: Synthetic oligonucleotide
guccauggccauucggauu

SEQ ID NO: 2694600 - RNA, 19 nt, Artificial Sequence
  Description of Artificial Sequence: Synthetic oligonucleotide
cagcuacauuuucuguugu

SEQ ID NO: 2694601 - RNA, 19 nt, Artificial Sequence
  Description of Artificial Sequence: Synthetic oligonucleotide
agucgcgcacggcggcgaa

SEQ ID NO: 2694602 - RNA, 19 nt, Artificial Sequence
  Description of Artificial Sequence: Synthetic oligonucleotide
ggugacugcuggauauucu

SEQ ID NO: 2694603 - RNA, 19 nt, Artificial Sequence
  Description of Artificial Sequence: Synthetic oligonucleotide
cuccuguaggaagaaguuu

SEQ ID NO: 2694604 - RNA, 19 nt, Artificial Sequence
  Description of Artificial Sequence: Synthetic oligonucleotide
ggcucgcacugaaggacac

SEQ ID NO: 2694605 - RNA, 19 nt, Artificial Sequence
  Description of Artificial Sequence: Synthetic oligonucleotide
cgaaagccacccgccacgc

SEQ ID NO: 2694606 - RNA, 19 nt, Artificial Sequence
  Description of Artificial Sequence: Synthetic oligonucleotide
cgcacggcggcgaaagcca

SEQ ID NO: 2694607 - RNA, 19 nt, Artificial Sequence
  Description of Artificial Sequence: Synthetic oligonucleotide
ccgguggcucgcacugaag

SEQ ID NO: 2694608 - RNA, 19 nt, Artificial Sequence
  Description of Artificial Sequence: Synthetic oligonucleotide
gaugggcugugcagccggu

SEQ ID NO: 2694609 - RNA, 19 nt, Artificial Sequence
  Description of Artificial Sequence: Synthetic oligonucleotide
gccgguggcucgcacugaa

SEQ ID NO: 2694610 - RNA, 19 nt, Artificial Sequence
  Description of Artificial Sequence: Synthetic oligonucleotide
agccgguggcucgcacuga

SEQ ID NO: 2694611 - RNA, 19 nt, Artificial Sequence
  Description of Artificial Sequence: Synthetic oligonucleotide
gccauucggauuguugcau

SEQ ID NO: 2694612 - RNA, 19 nt, Artificial Sequence
  Description of Artificial Sequence: Synthetic oligonucleotide
ggacacgaggcgugacagu

SEQ ID NO: 2694613 - RNA, 19 nt, Artificial Sequence
  Description of Artificial Sequence: Synthetic oligonucleotide
gcugugcagccgguggcuc

SEQ ID NO: 2694614 - RNA, 19 nt, Artificial Sequence
  Description of Artificial Sequence: Synthetic oligonucleotide
gcagccgguggcucgcacu

SEQ ID NO: 2694615 - RNA, 19 nt, Artificial Sequence
  Description of Artificial Sequence: Synthetic oligonucleotide
cagucgcgcacggcggcga

SEQ ID NO: 2694616 - RNA, 19 nt, Artificial Sequence
  Description of Artificial Sequence: Synthetic oligonucleotide
cgugacagucgcgcacggc

SEQ ID NO: 2694617 - RNA, 19 nt, Artificial Sequence
  Description of Artificial Sequence: Synthetic oligonucleotide
gcacggcggcgaaagccac

SEQ ID NO: 2694618 - RNA, 19 nt, Artificial Sequence
  Description of Artificial Sequence: Synthetic oligonucleotide
ccauucggauuguugcauu

SEQ ID NO: 2694619 - RNA, 19 nt, Artificial Sequence
  Description of Artificial Sequence: Synthetic oligonucleotide
gucgcgcacggcggcgaaa

SEQ ID NO: 2694620 - RNA, 19 nt, Artificial Sequence
  Description of Artificial Sequence: Synthetic oligonucleotide
gugcagccgguggcucgca

SEQ ID NO: 2694621 - RNA, 19 nt, Artificial Sequence
  Description of Artificial Sequence: Synthetic oligonucleotide
cauggccauucggauuguu

SEQ ID NO: 2694622 - RNA, 19 nt, Artificial Sequence
  Description of Artificial Sequence: Synthetic oligonucleotide
cggcgaaagccacccgcca

SEQ ID NO: 2694623 - RNA, 19 nt, Artificial Sequence
  Description of Artificial Sequence: Synthetic oligonucleotide
gccacccgccacgcucaug

SEQ ID NO: 2694624 - RNA, 19 nt, Artificial Sequence
  Description of Artificial Sequence: Synthetic oligonucleotide
cggcggcgaaagccacccg

SEQ ID NO: 2694625 - RNA, 19 nt, Artificial Sequence
  Description of Artificial Sequence: Synthetic oligonucleotide
ccauggccauucggauugu

SEQ ID NO: 2694626 - RNA, 19 nt, Artificial Sequence
  Description of Artificial Sequence: Synthetic oligonucleotide
uuaagguuaacccucuagg

SEQ ID NO: 2694627 - RNA, 19 nt, Artificial Sequence
  Description of Artificial Sequence: Synthetic oligonucleotide
aaggguauugcuucggccc

SEQ ID NO: 2694628 - RNA, 19 nt, Artificial Sequence
  Description of Artificial Sequence: Synthetic oligonucleotide
aaugagggcacaaaagccc

SEQ ID NO: 2694629 - RNA, 19 nt, Artificial Sequence
  Description of Artificial Sequence: Synthetic oligonucleotide
guuucauuaagguuaaccc

SEQ ID NO: 2694630 - RNA, 19 nt, Artificial Sequence
  Description of Artificial Sequence: Synthetic oligonucleotide
gauauacaugucuaggucc

SEQ ID NO: 2694631 - RNA, 19 nt, Artificial Sequence
  Description of Artificial Sequence: Synthetic oligonucleotide
uuuauuagugguuucauua

SEQ ID NO: 2694632 - RNA, 19 nt, Artificial Sequence
  Description of Artificial Sequence: Synthetic oligonucleotide
auguuuacacaugacaugc

SEQ ID NO: 2694633 - RNA, 19 nt, Artificial Sequence
  Description of Artificial Sequence: Synthetic oligonucleotide
ucaaccucaggucugagug

SEQ ID NO: 2694634 - RNA, 19 nt, Artificial Sequence
  Description of Artificial Sequence: Synthetic oligonucleotide
auagugaaccaccugcucg

SEQ ID NO: 2694635 - RNA, 19 nt, Artificial Sequence
  Description of Artificial Sequence: Synthetic oligonucleotide
uucuuugguaggaucaccg

SEQ ID NO: 2694636 - RNA, 19 nt, Artificial Sequence
  Description of Artificial Sequence: Synthetic oligonucleotide
ucagaucucauagugaacc

SEQ ID NO: 2694637 - RNA, 19 nt, Artificial Sequence
  Description of Artificial Sequence: Synthetic oligonucleotide
acaugaaagccaugaaggc

SEQ ID NO: 2694638 - RNA, 19 nt, Artificial Sequence
  Description of Artificial Sequence: Synthetic oligonucleotide
uucauuaagguuaacccuc

SEQ ID NO: 2694639 - RNA, 19 nt, Artificial Sequence
  Description of Artificial Sequence: Synthetic oligonucleotide
agauuguacuucuuggcgg

SEQ ID NO: 2694640 - RNA, 19 nt, Artificial Sequence
  Description of Artificial Sequence: Synthetic oligonucleotide
aggaucaccgccucguucc

SEQ ID NO: 2694641 - RNA, 19 nt, Artificial Sequence
  Description of Artificial Sequence: Synthetic oligonucleotide
cucauagugaaccaccugc

SEQ ID NO: 2694642 - RNA, 19 nt, Artificial Sequence
  Description of Artificial Sequence: Synthetic oligonucleotide
aagagauguuuacacauga

SEQ ID NO: 2694643 - RNA, 19 nt, Artificial Sequence
  Description of Artificial Sequence: Synthetic oligonucleotide
auuaagguuaacccucuag

SEQ ID NO: 2694644 - RNA, 19 nt, Artificial Sequence
  Description of Artificial Sequence: Synthetic oligonucleotide
ucauguggaaggcuguccg

SEQ ID NO: 2694645 - RNA, 19 nt, Artificial Sequence
  Description of Artificial Sequence: Synthetic oligonucleotide
gauguuuacacaugacaug

SEQ ID NO: 2694646 - RNA, 19 nt, Artificial Sequence
  Description of Artificial Sequence: Synthetic oligonucleotide
agguguaggggauguaucc

SEQ ID NO: 2694647 - RNA, 19 nt, Artificial Sequence
  Description of Artificial Sequence: Synthetic oligonucleotide
uuacacaugacaugccaag

SEQ ID NO: 2694648 - RNA, 19 nt, Artificial Sequence
  Description of Artificial Sequence: Synthetic oligonucleotide
agggaaaacgcgcccaacc

SEQ ID NO: 2694649 - RNA, 19 nt, Artificial Sequence
  Description of Artificial Sequence: Synthetic oligonucleotide
uaacccucuaggaaugagg

SEQ ID NO: 2694650 - RNA, 19 nt, Artificial Sequence
  Description of Artificial Sequence: Synthetic oligonucleotide
aggggauguauccacacgg

SEQ ID NO: 2694651 - RNA, 19 nt, Artificial Sequence
  Description of Artificial Sequence: Synthetic oligonucleotide
ugauauacaugucuagguc

SEQ ID NO: 2694652 - RNA, 19 nt, Artificial Sequence
  Description of Artificial Sequence: Synthetic oligonucleotide
auaccauggaucccucucc

SEQ ID NO: 2694653 - RNA, 19 nt, Artificial Sequence
  Description of Artificial Sequence: Synthetic oligonucleotide
uauugcuucggccccacag

SEQ ID NO: 2694654 - RNA, 19 nt, Artificial Sequence
  Description of Artificial Sequence: Synthetic oligonucleotide
aagccgaagagauguuuac

SEQ ID NO: 2694655 - RNA, 19 nt, Artificial Sequence
  Description of Artificial Sequence: Synthetic oligonucleotide
auauacaugucuagguccc

SEQ ID NO: 2694656 - RNA, 19 nt, Artificial Sequence
  Description of Artificial Sequence: Synthetic oligonucleotide
uuagugguuucauuaaggu

SEQ ID NO: 2694657 - RNA, 19 nt, Artificial Sequence
  Description of Artificial Sequence: Synthetic oligonucleotide
gagauguuuacacaugaca

SEQ ID NO: 2694658 - RNA, 19 nt, Artificial Sequence
  Description of Artificial Sequence: Synthetic oligonucleotide
guacagauuguuguaaggg

SEQ ID NO: 2694659 - RNA, 19 nt, Artificial Sequence
  Description of Artificial Sequence: Synthetic oligonucleotide
cagauuguacuucuuggcg

SEQ ID NO: 2694660 - RNA, 19 nt, Artificial Sequence
  Description of Artificial Sequence: Synthetic oligonucleotide
ugaguggucccacucauac

SEQ ID NO: 2694661 - RNA, 19 nt, Artificial Sequence
  Description of Artificial Sequence: Synthetic oligonucleotide
uagugaaccaccugcucgg

SEQ ID NO: 2694662 - RNA, 19 nt, Artificial Sequence
  Description of Artificial Sequence: Synthetic oligonucleotide
aaggccacgaagccgaaga

SEQ ID NO: 2694663 - RNA, 19 nt, Artificial Sequence
  Description of Artificial Sequence: Synthetic oligonucleotide
gauuguacuucuuggcggc

SEQ ID NO: 2694664 - RNA, 19 nt, Artificial Sequence
  Description of Artificial Sequence: Synthetic oligonucleotide
ucuaggucccagugcaucg

SEQ ID NO: 2694665 - RNA, 19 nt, Artificial Sequence
  Description of Artificial Sequence: Synthetic oligonucleotide
caagaaacagguguagggg

SEQ ID NO: 2694666 - RNA, 19 nt, Artificial Sequence
  Description of Artificial Sequence: Synthetic oligonucleotide
uguuguaaggguauugcuu

SEQ ID NO: 2694667 - RNA, 19 nt, Artificial Sequence
  Description of Artificial Sequence: Synthetic oligonucleotide
uuauuagugguuucauuaa

SEQ ID NO: 2694668 - RNA, 19 nt, Artificial Sequence
  Description of Artificial Sequence: Synthetic oligonucleotide
acaugacaugccaagaaac

SEQ ID NO: 2694669 - RNA, 19 nt, Artificial Sequence
  Description of Artificial Sequence: Synthetic oligonucleotide
uacagauuguuguaagggu

SEQ ID NO: 2694670 - RNA, 19 nt, Artificial Sequence
  Description of Artificial Sequence: Synthetic oligonucleotide
auugcuucggccccacagg

SEQ ID NO: 2694671 - RNA, 19 nt, Artificial Sequence
  Description of Artificial Sequence: Synthetic oligonucleotide
aaagccaugaaggccacga

SEQ ID NO: 2694672 - RNA, 19 nt, Artificial Sequence
  Description of Artificial Sequence: Synthetic oligonucleotide
uuuacacaugacaugccaa

SEQ ID NO: 2694673 - RNA, 19 nt, Artificial Sequence
  Description of Artificial Sequence: Synthetic oligonucleotide
cuuugguaggaucaccgcc

SEQ ID NO: 2694674 - RNA, 19 nt, Artificial Sequence
  Description of Artificial Sequence: Synthetic oligonucleotide
accgccucguuccagguac

SEQ ID NO: 2694675 - RNA, 19 nt, Artificial Sequence
  Description of Artificial Sequence: Synthetic oligonucleotide
caugaaagccaugaaggcc

SEQ ID NO: 2694676 - RNA, 19 nt, Artificial Sequence
  Description of Artificial Sequence: Synthetic oligonucleotide
ugggauacggcccgggcag

SEQ ID NO: 2694677 - RNA, 19 nt, Artificial Sequence
  Description of Artificial Sequence: Synthetic oligonucleotide
augucuaggucccagugca

SEQ ID NO: 2694678 - RNA, 19 nt, Artificial Sequence
  Description of Artificial Sequence: Synthetic oligonucleotide
aggguauugcuucggcccc

SEQ ID NO: 2694679 - RNA, 19 nt, Artificial Sequence
  Description of Artificial Sequence: Synthetic oligonucleotide
ucauagugaaccaccugcu

SEQ ID NO: 2694680 - RNA, 19 nt, Artificial Sequence
  Description of Artificial Sequence: Synthetic oligonucleotide
uaggaaugagggcacaaaa

SEQ ID NO: 2694681 - RNA, 19 nt, Artificial Sequence
  Description of Artificial Sequence: Synthetic oligonucleotide
aggaagggaaaacgcgccc

SEQ ID NO: 2694682 - RNA, 19 nt, Artificial Sequence
  Description of Artificial Sequence: Synthetic oligonucleotide
uccugauauacaugucuag

SEQ ID NO: 2694683 - RNA, 19 nt, Artificial Sequence
  Description of Artificial Sequence: Synthetic oligonucleotide
uaggggauguauccacacg

SEQ ID NO: 2694684 - RNA, 19 nt, Artificial Sequence
  Description of Artificial Sequence: Synthetic oligonucleotide
agauguuuacacaugacau

SEQ ID NO: 2694685 - RNA, 19 nt, Artificial Sequence
  Description of Artificial Sequence: Synthetic oligonucleotide
uguuuacacaugacaugcc

SEQ ID NO: 2694686 - RNA, 19 nt, Artificial Sequence
  Description of Artificial Sequence: Synthetic oligonucleotide
gguuucauuaagguuaacc

SEQ ID NO: 2694687 - RNA, 19 nt, Artificial Sequence
  Description of Artificial Sequence: Synthetic oligonucleotide
ucauuaagguuaacccucu

SEQ ID NO: 2694688 - RNA, 19 nt, Artificial Sequence
  Description of Artificial Sequence: Synthetic oligonucleotide
gaaaacgcgcccaacccag

SEQ ID NO: 2694689 - RNA, 19 nt, Artificial Sequence
  Description of Artificial Sequence: Synthetic oligonucleotide
uguaaggguauugcuucgg

SEQ ID NO: 2694690 - RNA, 19 nt, Artificial Sequence
  Description of Artificial Sequence: Synthetic oligonucleotide
guuuacacaugacaugcca

SEQ ID NO: 2694691 - RNA, 19 nt, Artificial Sequence
  Description of Artificial Sequence: Synthetic oligonucleotide
aacgcgcccaacccagaac

SEQ ID NO: 2694692 - RNA, 19 nt, Artificial Sequence
  Description of Artificial Sequence: Synthetic oligonucleotide
gguacagauuguuguaagg

SEQ ID NO: 2694693 - RNA, 19 nt, Artificial Sequence
  Description of Artificial Sequence: Synthetic oligonucleotide
agugcaucguuucacccca

SEQ ID NO: 2694694 - RNA, 19 nt, Artificial Sequence
  Description of Artificial Sequence: Synthetic oligonucleotide
ccaagaaacagguguaggg

SEQ ID NO: 2694695 - RNA, 19 nt, Artificial Sequence
  Description of Artificial Sequence: Synthetic oligonucleotide
agguacagauuguuguaag

SEQ ID NO: 2694696 - RNA, 19 nt, Artificial Sequence
  Description of Artificial Sequence: Synthetic oligonucleotide
guaggaagggaaaacgcgc

SEQ ID NO: 2694697 - RNA, 19 nt, Artificial Sequence
  Description of Artificial Sequence: Synthetic oligonucleotide
uuguuguaaggguauugcu

SEQ ID NO: 2694698 - RNA, 19 nt, Artificial Sequence
  Description of Artificial Sequence: Synthetic oligonucleotide
ucuuugguaggaucaccgc

SEQ ID NO: 2694699 - RNA, 19 nt, Artificial Sequence
  Description of Artificial Sequence: Synthetic oligonucleotide
uuucaccccaguucaaccu

SEQ ID NO: 2694700 - RNA, 19 nt, Artificial Sequence
  Description of Artificial Sequence: Synthetic oligonucleotide
gcugggaucggucagggag

SEQ ID NO: 2694701 - RNA, 19 nt, Artificial Sequence
  Description of Artificial Sequence: Synthetic oligonucleotide
gaagagauguuuacacaug

SEQ ID NO: 2694702 - RNA, 19 nt, Artificial Sequence
  Description of Artificial Sequence: Synthetic oligonucleotide
gguaggaagggaaaacgcg

SEQ ID NO: 2694703 - RNA, 19 nt, Artificial Sequence
  Description of Artificial Sequence: Synthetic oligonucleotide
caucguuucaccccaguuc

SEQ ID NO: 2694704 - RNA, 19 nt, Artificial Sequence
  Description of Artificial Sequence: Synthetic oligonucleotide
ucucauagugaaccaccug

SEQ ID NO: 2694705 - RNA, 19 nt, Artificial Sequence
  Description of Artificial Sequence: Synthetic oligonucleotide
caugccaagaaacaggugu

SEQ ID NO: 2694706 - RNA, 19 nt, Artificial Sequence
  Description of Artificial Sequence: Synthetic oligonucleotide
ccaacccagaacaugaaag

SEQ ID NO: 2694707 - RNA, 19 nt, Artificial Sequence
  Description of Artificial Sequence: Synthetic oligonucleotide
guuucaccccaguucaacc

SEQ ID NO: 2694708 - RNA, 19 nt, Artificial Sequence
  Description of Artificial Sequence: Synthetic oligonucleotide
uccucagaucucauaguga

SEQ ID NO: 2694709 - RNA, 19 nt, Artificial Sequence
  Description of Artificial Sequence: Synthetic oligonucleotide
caugacaugccaagaaaca

SEQ ID NO: 2694710 - RNA, 19 nt, Artificial Sequence
  Description of Artificial Sequence: Synthetic oligonucleotide
caugucuaggucccagugc

SEQ ID NO: 2694711 - RNA, 19 nt, Artificial Sequence
  Description of Artificial Sequence: Synthetic oligonucleotide
acaugucuaggucccagug

SEQ ID NO: 2694712 - RNA, 19 nt, Artificial Sequence
  Description of Artificial Sequence: Synthetic oligonucleotide
ucggucagggagcuucggg

SEQ ID NO: 2694713 - RNA, 19 nt, Artificial Sequence
  Description of Artificial Sequence: Synthetic oligonucleotide
cucguaguccuccacgcgc

SEQ ID NO: 2694714 - RNA, 19 nt, Artificial Sequence
  Description of Artificial Sequence: Synthetic oligonucleotide
acucauaccauggaucccu

SEQ ID NO: 2694715 - RNA, 19 nt, Artificial Sequence
  Description of Artificial Sequence: Synthetic oligonucleotide
cauaccauggaucccucuc

SEQ ID NO: 2694716 - RNA, 19 nt, Artificial Sequence
  Description of Artificial Sequence: Synthetic oligonucleotide
agagauguuuacacaugac

SEQ ID NO: 2694717 - RNA, 19 nt, Artificial Sequence
  Description of Artificial Sequence: Synthetic oligonucleotide
caugaaggccacgaagccg

SEQ ID NO: 2694718 - RNA, 19 nt, Artificial Sequence
  Description of Artificial Sequence: Synthetic oligonucleotide
aucaccgccucguuccagg

SEQ ID NO: 2694719 - RNA, 19 nt, Artificial Sequence
  Description of Artificial Sequence: Synthetic oligonucleotide
uccacacgguuccugauau

SEQ ID NO: 2694720 - RNA, 19 nt, Artificial Sequence
  Description of Artificial Sequence: Synthetic oligonucleotide
cagugcaucguuucacccc

SEQ ID NO: 2694721 - RNA, 19 nt, Artificial Sequence
  Description of Artificial Sequence: Synthetic oligonucleotide
acccucuaggaaugagggc

SEQ ID NO: 2694722 - RNA, 19 nt, Artificial Sequence
  Description of Artificial Sequence: Synthetic oligonucleotide
uuaacccucuaggaaugag

SEQ ID NO: 2694723 - RNA, 19 nt, Artificial Sequence
  Description of Artificial Sequence: Synthetic oligonucleotide
guaaggguauugcuucggc

SEQ ID NO: 2694724 - RNA, 19 nt, Artificial Sequence
  Description of Artificial Sequence: Synthetic oligonucleotide
uugcuucggccccacaggc

SEQ ID NO: 2694725 - RNA, 19 nt, Artificial Sequence
  Description of Artificial Sequence: Synthetic oligonucleotide
ucugaguggucccacucau

SEQ ID NO: 2694726 - RNA, 19 nt, Artificial Sequence
  Description of Artificial Sequence: Synthetic oligonucleotide
acaaaagcccacguggccu

SEQ ID NO: 2694727 - RNA, 19 nt, Artificial Sequence
  Description of Artificial Sequence: Synthetic oligonucleotide
aggaccgcagccccggccg

SEQ ID NO: 2694728 - RNA, 19 nt, Artificial Sequence
  Description of Artificial Sequence: Synthetic oligonucleotide
aagggaaaacgcgcccaac

SEQ ID NO: 2694729 - RNA, 19 nt, Artificial Sequence
  Description of Artificial Sequence: Synthetic oligonucleotide
guuccugauauacaugucu

SEQ ID NO: 2694730 - RNA, 19 nt, Artificial Sequence
  Description of Artificial Sequence: Synthetic oligonucleotide
aaacagguguaggggaugu

SEQ ID NO: 2694731 - RNA, 19 nt, Artificial Sequence
  Description of Artificial Sequence: Synthetic oligonucleotide
ugaaccaccugcucggguu

SEQ ID NO: 2694732 - RNA, 19 nt, Artificial Sequence
  Description of Artificial Sequence: Synthetic oligonucleotide
cacaaaagcccacguggcc

SEQ ID NO: 2694733 - RNA, 19 nt, Artificial Sequence
  Description of Artificial Sequence: Synthetic oligonucleotide
uucggguagucaccgugcc

SEQ ID NO: 2694734 - RNA, 19 nt, Artificial Sequence
  Description of Artificial Sequence: Synthetic oligonucleotide
aaccucaggucugaguggu

SEQ ID NO: 2694735 - RNA, 19 nt, Artificial Sequence
  Description of Artificial Sequence: Synthetic oligonucleotide
uccacgcgcagauuguacu

SEQ ID NO: 2694736 - RNA, 19 nt, Artificial Sequence
  Description of Artificial Sequence: Synthetic oligonucleotide
uucaaccucaggucugagu

SEQ ID NO: 2694737 - RNA, 19 nt, Artificial Sequence
  Description of Artificial Sequence: Synthetic oligonucleotide
accugcucggguucuuugg

SEQ ID NO: 2694738 - RNA, 19 nt, Artificial Sequence
  Description of Artificial Sequence: Synthetic oligonucleotide
ccacucauaccauggaucc

SEQ ID NO: 2694739 - RNA, 19 nt, Artificial Sequence
  Description of Artificial Sequence: Synthetic oligonucleotide
gcagauuguacuucuuggc

SEQ ID NO: 2694740 - RNA, 19 nt, Artificial Sequence
  Description of Artificial Sequence: Synthetic oligonucleotide
gagggcacaaaagcccacg

SEQ ID NO: 2694741 - RNA, 19 nt, Artificial Sequence
  Description of Artificial Sequence: Synthetic oligonucleotide
uagugguuucauuaagguu

SEQ ID NO: 2694742 - RNA, 19 nt, Artificial Sequence
  Description of Artificial Sequence: Synthetic oligonucleotide
ccugauauacaugucuagg

SEQ ID NO: 2694743 - RNA, 19 nt, Artificial Sequence
  Description of Artificial Sequence: Synthetic oligonucleotide
ugccaagaaacagguguag

SEQ ID NO: 2694744 - RNA, 19 nt, Artificial Sequence
  Description of Artificial Sequence: Synthetic oligonucleotide
cugggaucggucagggagc

SEQ ID NO: 2694745 - RNA, 19 nt, Artificial Sequence
  Description of Artificial Sequence: Synthetic oligonucleotide
uguauccacacgguuccug

SEQ ID NO: 2694746 - RNA, 19 nt, Artificial Sequence
  Description of Artificial Sequence: Synthetic oligonucleotide
ucguaguccuccacgcgca

SEQ ID NO: 2694747 - RNA, 19 nt, Artificial Sequence
  Description of Artificial Sequence: Synthetic oligonucleotide
caaccucaggucugagugg

SEQ ID NO: 2694748 - RNA, 19 nt, Artificial Sequence
  Description of Artificial Sequence: Synthetic oligonucleotide
uucaccccaguucaaccuc

SEQ ID NO: 2694749 - RNA, 19 nt, Artificial Sequence
  Description of Artificial Sequence: Synthetic oligonucleotide
uaccauggaucccucuccu

SEQ ID NO: 2694750 - RNA, 19 nt, Artificial Sequence
  Description of Artificial Sequence: Synthetic oligonucleotide
gaaacagguguaggggaug

SEQ ID NO: 2694751 - RNA, 19 nt, Artificial Sequence
  Description of Artificial Sequence: Synthetic oligonucleotide
acgcgcccaacccagaaca

SEQ ID NO: 2694752 - RNA, 19 nt, Artificial Sequence
  Description of Artificial Sequence: Synthetic oligonucleotide
gccgaagagauguuuacac

SEQ ID NO: 2694753 - RNA, 19 nt, Artificial Sequence
  Description of Artificial Sequence: Synthetic oligonucleotide
cugauauacaugucuaggu

SEQ ID NO: 2694754 - RNA, 19 nt, Artificial Sequence
  Description of Artificial Sequence: Synthetic oligonucleotide
auacaugucuaggucccag

SEQ ID NO: 2694755 - RNA, 19 nt, Artificial Sequence
  Description of Artificial Sequence: Synthetic oligonucleotide
uacaugucuaggucccagu

SEQ ID NO: 2694756 - RNA, 19 nt, Artificial Sequence
  Description of Artificial Sequence: Synthetic oligonucleotide
guaggggauguauccacac

SEQ ID NO: 2694757 - RNA, 19 nt, Artificial Sequence
  Description of Artificial Sequence: Synthetic oligonucleotide
ugguaggaucaccgccucg

SEQ ID NO: 2694758 - RNA, 19 nt, Artificial Sequence
  Description of Artificial Sequence: Synthetic oligonucleotide
guguaggggauguauccac

SEQ ID NO: 2694759 - RNA, 19 nt, Artificial Sequence
  Description of Artificial Sequence: Synthetic oligonucleotide
agucaccgugccccgugcc

SEQ ID NO: 2694760 - RNA, 19 nt, Artificial Sequence
  Description of Artificial Sequence: Synthetic oligonucleotide
cauagugaaccaccugcuc

SEQ ID NO: 2694761 - RNA, 19 nt, Artificial Sequence
  Description of Artificial Sequence: Synthetic oligonucleotide
ucaccccaguucaaccuca

SEQ ID NO: 2694762 - RNA, 19 nt, Artificial Sequence
  Description of Artificial Sequence: Synthetic oligonucleotide
ucccacucauaccauggau

SEQ ID NO: 2694763 - RNA, 19 nt, Artificial Sequence
  Description of Artificial Sequence: Synthetic oligonucleotide
guccuccacgcgcagauug

SEQ ID NO: 2694764 - RNA, 19 nt, Artificial Sequence
  Description of Artificial Sequence: Synthetic oligonucleotide
gggaaaacgcgcccaaccc

SEQ ID NO: 2694765 - RNA, 19 nt, Artificial Sequence
  Description of Artificial Sequence: Synthetic oligonucleotide
cucagaucucauagugaac

SEQ ID NO: 2694766 - RNA, 19 nt, Artificial Sequence
  Description of Artificial Sequence: Synthetic oligonucleotide
aaacgcgcccaacccagaa

SEQ ID NO: 2694767 - RNA, 19 nt, Artificial Sequence
  Description of Artificial Sequence: Synthetic oligonucleotide
acagauuguuguaagggua

SEQ ID NO: 2694768 - RNA, 19 nt, Artificial Sequence
  Description of Artificial Sequence: Synthetic oligonucleotide
acguggccuccucagaucu

SEQ ID NO: 2694769 - RNA, 19 nt, Artificial Sequence
  Description of Artificial Sequence: Synthetic oligonucleotide
gaguggucccacucauacc

SEQ ID NO: 2694770 - RNA, 19 nt, Artificial Sequence
  Description of Artificial Sequence: Synthetic oligonucleotide
gccaugaaggccacgaagc

SEQ ID NO: 2694771 - RNA, 19 nt, Artificial Sequence
  Description of Artificial Sequence: Synthetic oligonucleotide
cucaggucugagugguccc

SEQ ID NO: 2694772 - RNA, 19 nt, Artificial Sequence
  Description of Artificial Sequence: Synthetic oligonucleotide
gucaccgugccccgugccg

SEQ ID NO: 2694773 - RNA, 19 nt, Artificial Sequence
  Description of Artificial Sequence: Synthetic oligonucleotide
agcauguccuuggucaugu

SEQ ID NO: 2694774 - RNA, 19 nt, Artificial Sequence
  Description of Artificial Sequence: Synthetic oligonucleotide
caguucaaccucaggucug

SEQ ID NO: 2694775 - RNA, 19 nt, Artificial Sequence
  Description of Artificial Sequence: Synthetic oligonucleotide
ucuaggaaugagggcacaa

SEQ ID NO: 2694776 - RNA, 19 nt, Artificial Sequence
  Description of Artificial Sequence: Synthetic oligonucleotide
auguggaaggcuguccgug

SEQ ID NO: 2694777 - RNA, 19 nt, Artificial Sequence
  Description of Artificial Sequence: Synthetic oligonucleotide
uggucccacucauaccaug

SEQ ID NO: 2694778 - RNA, 19 nt, Artificial Sequence
  Description of Artificial Sequence: Synthetic oligonucleotide
acagguguaggggauguau

SEQ ID NO: 2694779 - RNA, 19 nt, Artificial Sequence
  Description of Artificial Sequence: Synthetic oligonucleotide
uguccuuggucauguggaa

SEQ ID NO: 2694780 - RNA, 19 nt, Artificial Sequence
  Description of Artificial Sequence: Synthetic oligonucleotide
cgcagauuguacuucuugg

SEQ ID NO: 2694781 - RNA, 19 nt, Artificial Sequence
  Description of Artificial Sequence: Synthetic oligonucleotide
ggauguauccacacgguuc

SEQ ID NO: 2694782 - RNA, 19 nt, Artificial Sequence
  Description of Artificial Sequence: Synthetic oligonucleotide
caaaagcccacguggccuc

SEQ ID NO: 2694783 - RNA, 19 nt, Artificial Sequence
  Description of Artificial Sequence: Synthetic oligonucleotide
cagguguaggggauguauc

SEQ ID NO: 2694784 - RNA, 19 nt, Artificial Sequence
  Description of Artificial Sequence: Synthetic oligonucleotide
gguccugggauacggcccg

SEQ ID NO: 2694785 - RNA, 19 nt, Artificial Sequence
  Description of Artificial Sequence: Synthetic oligonucleotide
ugcaucguuucaccccagu

SEQ ID NO: 2694786 - RNA, 19 nt, Artificial Sequence
  Description of Artificial Sequence: Synthetic oligonucleotide
gggagcuucggguagucac

SEQ ID NO: 2694787 - RNA, 19 nt, Artificial Sequence
  Description of Artificial Sequence: Synthetic oligonucleotide
cacaugacaugccaagaaa

SEQ ID NO: 2694788 - RNA, 19 nt, Artificial Sequence
  Description of Artificial Sequence: Synthetic oligonucleotide
ucauaccauggaucccucu

SEQ ID NO: 2694789 - RNA, 19 nt, Artificial Sequence
  Description of Artificial Sequence: Synthetic oligonucleotide
guagucaccgugccccgug

SEQ ID NO: 2694790 - RNA, 19 nt, Artificial Sequence
  Description of Artificial Sequence: Synthetic oligonucleotide
ggucccacucauaccaugg

SEQ ID NO: 2694791 - RNA, 19 nt, Artificial Sequence
  Description of Artificial Sequence: Synthetic oligonucleotide
uccggguacggcucguagu

SEQ ID NO: 2694792 - RNA, 19 nt, Artificial Sequence
  Description of Artificial Sequence: Synthetic oligonucleotide
uugguaggaucaccgccuc

SEQ ID NO: 2694793 - RNA, 19 nt, Artificial Sequence
  Description of Artificial Sequence: Synthetic oligonucleotide
aucucauagugaaccaccu

SEQ ID NO: 2694794 - RNA, 19 nt, Artificial Sequence
  Description of Artificial Sequence: Synthetic oligonucleotide
aagcccacguggccuccuc

SEQ ID NO: 2694795 - RNA, 19 nt, Artificial Sequence
  Description of Artificial Sequence: Synthetic oligonucleotide
gaagggaaaacgcgcccaa

SEQ ID NO: 2694796 - RNA, 19 nt, Artificial Sequence
  Description of Artificial Sequence: Synthetic oligonucleotide
gaucggucagggagcuucg

SEQ ID NO: 2694797 - RNA, 19 nt, Artificial Sequence
  Description of Artificial Sequence: Synthetic oligonucleotide
aguucaaccucaggucuga

SEQ ID NO: 2694798 - RNA, 19 nt, Artificial Sequence
  Description of Artificial Sequence: Synthetic oligonucleotide
ugagggcacaaaagcccac

SEQ ID NO: 2694799 - RNA, 19 nt, Artificial Sequence
  Description of Artificial Sequence: Synthetic oligonucleotide
gaagccgaagagauguuua

SEQ ID NO: 2694800 - RNA, 19 nt, Artificial Sequence
  Description of Artificial Sequence: Synthetic oligonucleotide
gucauguggaaggcugucc

SEQ ID NO: 2694801 - RNA, 19 nt, Artificial Sequence
  Description of Artificial Sequence: Synthetic oligonucleotide
auggaucccucuccugcug

SEQ ID NO: 2694802 - RNA, 19 nt, Artificial Sequence
  Description of Artificial Sequence: Synthetic oligonucleotide
ucgcccuccgcagccaccg

SEQ ID NO: 2694803 - RNA, 19 nt, Artificial Sequence
  Description of Artificial Sequence: Synthetic oligonucleotide
acggcucguaguccuccac

SEQ ID NO: 2694804 - RNA, 19 nt, Artificial Sequence
  Description of Artificial Sequence: Synthetic oligonucleotide
uccuccacgcgcagauugu

SEQ ID NO: 2694805 - RNA, 19 nt, Artificial Sequence
  Description of Artificial Sequence: Synthetic oligonucleotide
gguuaacccucuaggaaug

SEQ ID NO: 2694806 - RNA, 19 nt, Artificial Sequence
  Description of Artificial Sequence: Synthetic oligonucleotide
ucaggucugagugguccca

SEQ ID NO: 2694807 - RNA, 19 nt, Artificial Sequence
  Description of Artificial Sequence: Synthetic oligonucleotide
ucccagugcaucguuucac

SEQ ID NO: 2694808 - RNA, 19 nt, Artificial Sequence
  Description of Artificial Sequence: Synthetic oligonucleotide
cacgaagccgaagagaugu

SEQ ID NO: 2694809 - RNA, 19 nt, Artificial Sequence
  Description of Artificial Sequence: Synthetic oligonucleotide
gaaagccaugaaggccacg

SEQ ID NO: 2694810 - RNA, 19 nt, Artificial Sequence
  Description of Artificial Sequence: Synthetic oligonucleotide
agugaaccaccugcucggg

SEQ ID NO: 2694811 - RNA, 19 nt, Artificial Sequence
  Description of Artificial Sequence: Synthetic oligonucleotide
gaaccaccugcucggguuc

SEQ ID NO: 2694812 - RNA, 19 nt, Artificial Sequence
  Description of Artificial Sequence: Synthetic oligonucleotide
acgcgcagauuguacuucu

SEQ ID NO: 2694813 - RNA, 19 nt, Artificial Sequence
  Description of Artificial Sequence: Synthetic oligonucleotide
cagaucucauagugaacca

SEQ ID NO: 2694814 - RNA, 19 nt, Artificial Sequence
  Description of Artificial Sequence: Synthetic oligonucleotide
cccacucauaccauggauc

SEQ ID NO: 2694815 - RNA, 19 nt, Artificial Sequence
  Description of Artificial Sequence: Synthetic oligonucleotide
accauggaucccucuccug

SEQ ID NO: 2694816 - RNA, 19 nt, Artificial Sequence
  Description of Artificial Sequence: Synthetic oligonucleotide
ggaaaacgcgcccaaccca

SEQ ID NO: 2694817 - RNA, 19 nt, Artificial Sequence
  Description of Artificial Sequence: Synthetic oligonucleotide
gcuucggguagucaccgug

SEQ ID NO: 2694818 - RNA, 19 nt, Artificial Sequence
  Description of Artificial Sequence: Synthetic oligonucleotide
ggcucguaguccuccacgc

SEQ ID NO: 2694819 - RNA, 19 nt, Artificial Sequence
  Description of Artificial Sequence: Synthetic oligonucleotide
cccaguucaaccucagguc

SEQ ID NO: 2694820 - RNA, 19 nt, Artificial Sequence
  Description of Artificial Sequence: Synthetic oligonucleotide
auacggcccgggcagcaug

SEQ ID NO: 2694821 - RNA, 19 nt, Artificial Sequence
  Description of Artificial Sequence: Synthetic oligonucleotide
agccgaagagauguuuaca

SEQ ID NO: 2694822 - RNA, 19 nt, Artificial Sequence
  Description of Artificial Sequence: Synthetic oligonucleotide
caccgggcucccaggaccg

SEQ ID NO: 2694823 - RNA, 19 nt, Artificial Sequence
  Description of Artificial Sequence: Synthetic oligonucleotide
ggaucggucagggagcuuc

SEQ ID NO: 2694824 - RNA, 19 nt, Artificial Sequence
  Description of Artificial Sequence: Synthetic oligonucleotide
ccucagaucucauagugaa

SEQ ID NO: 2694825 - RNA, 19 nt, Artificial Sequence
  Description of Artificial Sequence: Synthetic oligonucleotide
ugcuucggccccacaggcu

SEQ ID NO: 2694826 - RNA, 19 nt, Artificial Sequence
  Description of Artificial Sequence: Synthetic oligonucleotide
ucccaggaccgcagccccg

SEQ ID NO: 2694827 - RNA, 19 nt, Artificial Sequence
  Description of Artificial Sequence: Synthetic oligonucleotide
cacgguuccugauauacau

SEQ ID NO: 2694828 - RNA, 19 nt, Artificial Sequence
  Description of Artificial Sequence: Synthetic oligonucleotide
gcgcagauuguacuucuug

SEQ ID NO: 2694829 - RNA, 19 nt, Artificial Sequence
  Description of Artificial Sequence: Synthetic oligonucleotide
uucuuggcggcggcggccc

SEQ ID NO: 2694830 - RNA, 19 nt, Artificial Sequence
  Description of Artificial Sequence: Synthetic oligonucleotide
cuucggccccacaggcugg

SEQ ID NO: 2694831 - RNA, 19 nt, Artificial Sequence
  Description of Artificial Sequence: Synthetic oligonucleotide
cucauaccauggaucccuc

SEQ ID NO: 2694832 - RNA, 19 nt, Artificial Sequence
  Description of Artificial Sequence: Synthetic oligonucleotide
cacucauaccauggauccc

SEQ ID NO: 2694833 - RNA, 19 nt, Artificial Sequence
  Description of Artificial Sequence: Synthetic oligonucleotide
cagauuguuguaaggguau

SEQ ID NO: 2694834 - RNA, 19 nt, Artificial Sequence
  Description of Artificial Sequence: Synthetic oligonucleotide
ugucuaggucccagugcau

SEQ ID NO: 2694835 - RNA, 19 nt, Artificial Sequence
  Description of Artificial Sequence: Synthetic oligonucleotide
guacuucuuggcggcggcg

SEQ ID NO: 2694836 - RNA, 19 nt, Artificial Sequence
  Description of Artificial Sequence: Synthetic oligonucleotide
uacggcucguaguccucca

SEQ ID NO: 2694837 - RNA, 19 nt, Artificial Sequence
  Description of Artificial Sequence: Synthetic oligonucleotide
gucguccggguacggcucg

SEQ ID NO: 2694838 - RNA, 19 nt, Artificial Sequence
  Description of Artificial Sequence: Synthetic oligonucleotide
cugggauacggcccgggca

SEQ ID NO: 2694839 - RNA, 19 nt, Artificial Sequence
  Description of Artificial Sequence: Synthetic oligonucleotide
ucagggagcuucggguagu

SEQ ID NO: 2694840 - RNA, 19 nt, Artificial Sequence
  Description of Artificial Sequence: Synthetic oligonucleotide
uccugggauacggcccggg

SEQ ID NO: 2694841 - RNA, 19 nt, Artificial Sequence
  Description of Artificial Sequence: Synthetic oligonucleotide
cccucuaggaaugagggca

SEQ ID NO: 2694842 - RNA, 19 nt, Artificial Sequence
  Description of Artificial Sequence: Synthetic oligonucleotide
ccagugcaucguuucaccc

SEQ ID NO: 2694843 - RNA, 19 nt, Artificial Sequence
  Description of Artificial Sequence: Synthetic oligonucleotide
guccggguacggcucguag

SEQ ID NO: 2694844 - RNA, 19 nt, Artificial Sequence
  Description of Artificial Sequence: Synthetic oligonucleotide
gcacaaaagcccacguggc

SEQ ID NO: 2694845 - RNA, 19 nt, Artificial Sequence
  Description of Artificial Sequence: Synthetic oligonucleotide
ggagcuucggguagucacc

SEQ ID NO: 2694846 - RNA, 19 nt, Artificial Sequence
  Description of Artificial Sequence: Synthetic oligonucleotide
cccagugcaucguuucacc

SEQ ID NO: 2694847 - RNA, 19 nt, Artificial Sequence
  Description of Artificial Sequence: Synthetic oligonucleotide
gcucguaguccuccacgcg

SEQ ID NO: 2694848 - RNA, 19 nt, Artificial Sequence
  Description of Artificial Sequence: Synthetic oligonucleotide
gguucuuugguaggaucac

SEQ ID NO: 2694849 - RNA, 19 nt, Artificial Sequence
  Description of Artificial Sequence: Synthetic oligonucleotide
cugcugggaucggucaggg

SEQ ID NO: 2694850 - RNA, 19 nt, Artificial Sequence
  Description of Artificial Sequence: Synthetic oligonucleotide
cuucuuggcggcggcggcc

SEQ ID NO: 2694851 - RNA, 19 nt, Artificial Sequence
  Description of Artificial Sequence: Synthetic oligonucleotide
guacggcucguaguccucc

SEQ ID NO: 2694852 - RNA, 19 nt, Artificial Sequence
  Description of Artificial Sequence: Synthetic oligonucleotide
aaaacgcgcccaacccaga

SEQ ID NO: 2694853 - RNA, 19 nt, Artificial Sequence
  Description of Artificial Sequence: Synthetic oligonucleotide
ugggaucggucagggagcu

SEQ ID NO: 2694854 - RNA, 19 nt, Artificial Sequence
  Description of Artificial Sequence: Synthetic oligonucleotide
ucguuucaccccaguucaa

SEQ ID NO: 2694855 - RNA, 19 nt, Artificial Sequence
  Description of Artificial Sequence: Synthetic oligonucleotide
acgguuccugauauacaug

SEQ ID NO: 2694856 - RNA, 19 nt, Artificial Sequence
  Description of Artificial Sequence: Synthetic oligonucleotide
cacguggccuccucagauc

SEQ ID NO: 2694857 - RNA, 19 nt, Artificial Sequence
  Description of Artificial Sequence: Synthetic oligonucleotide
gcucggguucuuugguagg

SEQ ID NO: 2694858 - RNA, 19 nt, Artificial Sequence
  Description of Artificial Sequence: Synthetic oligonucleotide
ucccucuccugcugggauc

SEQ ID NO: 2694859 - RNA, 19 nt, Artificial Sequence
  Description of Artificial Sequence: Synthetic oligonucleotide
augccaagaaacaggugua

SEQ ID NO: 2694860 - RNA, 19 nt, Artificial Sequence
  Description of Artificial Sequence: Synthetic oligonucleotide
ucaccgugccccgugccgu

SEQ ID NO: 2694861 - RNA, 19 nt, Artificial Sequence
  Description of Artificial Sequence: Synthetic oligonucleotide
caccugcucggguucuuug

SEQ ID NO: 2694862 - RNA, 19 nt, Artificial Sequence
  Description of Artificial Sequence: Synthetic oligonucleotide
gaucaccgccucguuccag

SEQ ID NO: 2694863 - RNA, 19 nt, Artificial Sequence
  Description of Artificial Sequence: Synthetic oligonucleotide
uaggucccagugcaucguu

SEQ ID NO: 2694864 - RNA, 19 nt, Artificial Sequence
  Description of Artificial Sequence: Synthetic oligonucleotide
ucaccgccucguuccaggu

SEQ ID NO: 2694865 - RNA, 19 nt, Artificial Sequence
  Description of Artificial Sequence: Synthetic oligonucleotide
guggccuccucagaucuca

SEQ ID NO: 2694866 - RNA, 19 nt, Artificial Sequence
  Description of Artificial Sequence: Synthetic oligonucleotide
caccccaguucaaccucag

SEQ ID NO: 2694867 - RNA, 19 nt, Artificial Sequence
  Description of Artificial Sequence: Synthetic oligonucleotide
acacgguuccugauauaca

SEQ ID NO: 2694868 - RNA, 19 nt, Artificial Sequence
  Description of Artificial Sequence: Synthetic oligonucleotide
ucuuggcggcggcggcccg

SEQ ID NO: 2694869 - RNA, 19 nt, Artificial Sequence
  Description of Artificial Sequence: Synthetic oligonucleotide
guuaacccucuaggaauga

SEQ ID NO: 2694870 - RNA, 19 nt, Artificial Sequence
  Description of Artificial Sequence: Synthetic oligonucleotide
cagguacagauuguuguaa

SEQ ID NO: 2694871 - RNA, 19 nt, Artificial Sequence
  Description of Artificial Sequence: Synthetic oligonucleotide
gucccacucauaccaugga

SEQ ID NO: 2694872 - RNA, 19 nt, Artificial Sequence
  Description of Artificial Sequence: Synthetic oligonucleotide
cacgcgcagauuguacuuc

SEQ ID NO: 2694873 - RNA, 19 nt, Artificial Sequence
  Description of Artificial Sequence: Synthetic oligonucleotide
ggucugaguggucccacuc

SEQ ID NO: 2694874 - RNA, 19 nt, Artificial Sequence
  Description of Artificial Sequence: Synthetic oligonucleotide
aucggucagggagcuucgg

SEQ ID NO: 2694875 - RNA, 19 nt, Artificial Sequence
  Description of Artificial Sequence: Synthetic oligonucleotide
ggaagggaaaacgcgccca

SEQ ID NO: 2694876 - RNA, 19 nt, Artificial Sequence
  Description of Artificial Sequence: Synthetic oligonucleotide
acaugccaagaaacaggug

SEQ ID NO: 2694877 - RNA, 19 nt, Artificial Sequence
  Description of Artificial Sequence: Synthetic oligonucleotide
caggaccgcagccccggcc

SEQ ID NO: 2694878 - RNA, 19 nt, Artificial Sequence
  Description of Artificial Sequence: Synthetic oligonucleotide
aaagcccacguggccuccu

SEQ ID NO: 2694879 - RNA, 19 nt, Artificial Sequence
  Description of Artificial Sequence: Synthetic oligonucleotide
gguguaggggauguaucca

SEQ ID NO: 2694880 - RNA, 19 nt, Artificial Sequence
  Description of Artificial Sequence: Synthetic oligonucleotide
ccucuaggaaugagggcac

SEQ ID NO: 2694881 - RNA, 19 nt, Artificial Sequence
  Description of Artificial Sequence: Synthetic oligonucleotide
ucggguucuuugguaggau

SEQ ID NO: 2694882 - RNA, 19 nt, Artificial Sequence
  Description of Artificial Sequence: Synthetic oligonucleotide
cggguagucaccgugcccc

SEQ ID NO: 2694883 - RNA, 19 nt, Artificial Sequence
  Description of Artificial Sequence: Synthetic oligonucleotide
uuccgggguccugggauac

SEQ ID NO: 2694884 - RNA, 19 nt, Artificial Sequence
  Description of Artificial Sequence: Synthetic oligonucleotide
ccaccgggcucccaggacc

SEQ ID NO: 2694885 - RNA, 19 nt, Artificial Sequence
  Description of Artificial Sequence: Synthetic oligonucleotide
guucaaccucaggucugag

SEQ ID NO: 2694886 - RNA, 19 nt, Artificial Sequence
  Description of Artificial Sequence: Synthetic oligonucleotide
cucggguucuuugguagga

SEQ ID NO: 2694887 - RNA, 19 nt, Artificial Sequence
  Description of Artificial Sequence: Synthetic oligonucleotide
ugcugggaucggucaggga

SEQ ID NO: 2694888 - RNA, 19 nt, Artificial Sequence
  Description of Artificial Sequence: Synthetic oligonucleotide
uccgggguccugggauacg

SEQ ID NO: 2694889 - RNA, 19 nt, Artificial Sequence
  Description of Artificial Sequence: Synthetic oligonucleotide
ccgaagagauguuuacaca

SEQ ID NO: 2694890 - RNA, 19 nt, Artificial Sequence
  Description of Artificial Sequence: Synthetic oligonucleotide
ggguagucaccgugccccg

SEQ ID NO: 2694891 - RNA, 19 nt, Artificial Sequence
  Description of Artificial Sequence: Synthetic oligonucleotide
cauggaucccucuccugcu

SEQ ID NO: 2694892 - RNA, 19 nt, Artificial Sequence
  Description of Artificial Sequence: Synthetic oligonucleotide
ccccagaggcaccacgccg

SEQ ID NO: 2694893 - RNA, 19 nt, Artificial Sequence
  Description of Artificial Sequence: Synthetic oligonucleotide
aacagguguaggggaugua

SEQ ID NO: 2694894 - RNA, 19 nt, Artificial Sequence
  Description of Artificial Sequence: Synthetic oligonucleotide
ccggguacggcucguaguc

SEQ ID NO: 2694895 - RNA, 19 nt, Artificial Sequence
  Description of Artificial Sequence: Synthetic oligonucleotide
ggguccugggauacggccc

SEQ ID NO: 2694896 - RNA, 19 nt, Artificial Sequence
  Description of Artificial Sequence: Synthetic oligonucleotide
gugccgucguccggguacg

SEQ ID NO: 2694897 - RNA, 19 nt, Artificial Sequence
  Description of Artificial Sequence: Synthetic oligonucleotide
gguaggaucaccgccucgu

SEQ ID NO: 2694898 - RNA, 19 nt, Artificial Sequence
  Description of Artificial Sequence: Synthetic oligonucleotide
agcccacguggccuccuca

SEQ ID NO: 2694899 - RNA, 19 nt, Artificial Sequence
  Description of Artificial Sequence: Synthetic oligonucleotide
agcuucggguagucaccgu

SEQ ID NO: 2694900 - RNA, 19 nt, Artificial Sequence
  Description of Artificial Sequence: Synthetic oligonucleotide
aggcaccacgccgcggguc

SEQ ID NO: 2694901 - RNA, 19 nt, Artificial Sequence
  Description of Artificial Sequence: Synthetic oligonucleotide
cccucuccugcugggaucg

SEQ ID NO: 2694902 - RNA, 19 nt, Artificial Sequence
  Description of Artificial Sequence: Synthetic oligonucleotide
ccucguuccagguacagau

SEQ ID NO: 2694903 - RNA, 19 nt, Artificial Sequence
  Description of Artificial Sequence: Synthetic oligonucleotide
gcccacguggccuccucag

SEQ ID NO: 2694904 - RNA, 19 nt, Artificial Sequence
  Description of Artificial Sequence: Synthetic oligonucleotide
cauuaagguuaacccucua

SEQ ID NO: 2694905 - RNA, 19 nt, Artificial Sequence
  Description of Artificial Sequence: Synthetic oligonucleotide
ccuuggucauguggaaggc

SEQ ID NO: 2694906 - RNA, 19 nt, Artificial Sequence
  Description of Artificial Sequence: Synthetic oligonucleotide
ugguuucauuaagguuaac

SEQ ID NO: 2694907 - RNA, 19 nt, Artificial Sequence
  Description of Artificial Sequence: Synthetic oligonucleotide
gguuccugauauacauguc

SEQ ID NO: 2694908 - RNA, 19 nt, Artificial Sequence
  Description of Artificial Sequence: Synthetic oligonucleotide
gcucuuccgggguccuggg

SEQ ID NO: 2694909 - RNA, 19 nt, Artificial Sequence
  Description of Artificial Sequence: Synthetic oligonucleotide
cauguggaaggcuguccgu

SEQ ID NO: 2694910 - RNA, 19 nt, Artificial Sequence
  Description of Artificial Sequence: Synthetic oligonucleotide
auguauccacacgguuccu

SEQ ID NO: 2694911 - RNA, 19 nt, Artificial Sequence
  Description of Artificial Sequence: Synthetic oligonucleotide
cgugccgucguccggguac

SEQ ID NO: 2694912 - RNA, 19 nt, Artificial Sequence
  Description of Artificial Sequence: Synthetic oligonucleotide
ccugggauacggcccgggc

SEQ ID NO: 2694913 - RNA, 19 nt, Artificial Sequence
  Description of Artificial Sequence: Synthetic oligonucleotide
ggucauguggaaggcuguc

SEQ ID NO: 2694914 - RNA, 19 nt, Artificial Sequence
  Description of Artificial Sequence: Synthetic oligonucleotide
guuccagguacagauuguu

SEQ ID NO: 2694915 - RNA, 19 nt, Artificial Sequence
  Description of Artificial Sequence: Synthetic oligonucleotide
ccaguucaaccucaggucu

SEQ ID NO: 2694916 - RNA, 19 nt, Artificial Sequence
  Description of Artificial Sequence: Synthetic oligonucleotide
guaguccuccacgcgcaga

SEQ ID NO: 2694917 - RNA, 19 nt, Artificial Sequence
  Description of Artificial Sequence: Synthetic oligonucleotide
gccacgaagccgaagagau

SEQ ID NO: 2694918 - RNA, 19 nt, Artificial Sequence
  Description of Artificial Sequence: Synthetic oligonucleotide
aggcugguaggaagggaaa

SEQ ID NO: 2694919 - RNA, 19 nt, Artificial Sequence
  Description of Artificial Sequence: Synthetic oligonucleotide
accgugccccgugccgucg

SEQ ID NO: 2694920 - RNA, 19 nt, Artificial Sequence
  Description of Artificial Sequence: Synthetic oligonucleotide
cuuccgggguccugggaua

SEQ ID NO: 2694921 - RNA, 19 nt, Artificial Sequence
  Description of Artificial Sequence: Synthetic oligonucleotide
cgcccaacccagaacauga

SEQ ID NO: 2694922 - RNA, 19 nt, Artificial Sequence
  Description of Artificial Sequence: Synthetic oligonucleotide
agggagcuucggguaguca

SEQ ID NO: 2694923 - RNA, 19 nt, Artificial Sequence
  Description of Artificial Sequence: Synthetic oligonucleotide
cggcucguaguccuccacg

SEQ ID NO: 2694924 - RNA, 19 nt, Artificial Sequence
  Description of Artificial Sequence: Synthetic oligonucleotide
gguauugcuucggccccac

SEQ ID NO: 2694925 - RNA, 19 nt, Artificial Sequence
  Description of Artificial Sequence: Synthetic oligonucleotide
cucuaggaaugagggcaca

SEQ ID NO: 2694926 - RNA, 19 nt, Artificial Sequence
  Description of Artificial Sequence: Synthetic oligonucleotide
guauugcuucggccccaca

SEQ ID NO: 2694927 - RNA, 19 nt, Artificial Sequence
  Description of Artificial Sequence: Synthetic oligonucleotide
cugaguggucccacucaua

SEQ ID NO: 2694928 - RNA, 19 nt, Artificial Sequence
  Description of Artificial Sequence: Synthetic oligonucleotide
cguuucaccccaguucaac

SEQ ID NO: 2694929 - RNA, 19 nt, Artificial Sequence
  Description of Artificial Sequence: Synthetic oligonucleotide
ugccgucguccggguacgg

SEQ ID NO: 2694930 - RNA, 19 nt, Artificial Sequence
  Description of Artificial Sequence: Synthetic oligonucleotide
gugaaccaccugcucgggu

SEQ ID NO: 2694931 - RNA, 19 nt, Artificial Sequence
  Description of Artificial Sequence: Synthetic oligonucleotide
gugcaucguuucaccccag

SEQ ID NO: 2694932 - RNA, 19 nt, Artificial Sequence
  Description of Artificial Sequence: Synthetic oligonucleotide
gcgcccaacccagaacaug

SEQ ID NO: 2694933 - RNA, 19 nt, Artificial Sequence
  Description of Artificial Sequence: Synthetic oligonucleotide
cagggagcuucggguaguc

SEQ ID NO: 2694934 - RNA, 19 nt, Artificial Sequence
  Description of Artificial Sequence: Synthetic oligonucleotide
cggguucuuugguaggauc

SEQ ID NO: 2694935 - RNA, 19 nt, Artificial Sequence
  Description of Artificial Sequence: Synthetic oligonucleotide
gugccccgugccgucgucc

SEQ ID NO: 2694936 - RNA, 19 nt, Artificial Sequence
  Description of Artificial Sequence: Synthetic oligonucleotide
cacgccgcgggucgcccuc

SEQ ID NO: 2694937 - RNA, 19 nt, Artificial Sequence
  Description of Artificial Sequence: Synthetic oligonucleotide
acgccgcgggucgcccucc

SEQ ID NO: 2694938 - RNA, 19 nt, Artificial Sequence
  Description of Artificial Sequence: Synthetic oligonucleotide
gggauguauccacacgguu

SEQ ID NO: 2694939 - RNA, 19 nt, Artificial Sequence
  Description of Artificial Sequence: Synthetic oligonucleotide
ggaucaccgccucguucca

SEQ ID NO: 2694940 - RNA, 19 nt, Artificial Sequence
  Description of Artificial Sequence: Synthetic oligonucleotide
cccaggaccgcagccccgg

SEQ ID NO: 2694941 - RNA, 19 nt, Artificial Sequence
  Description of Artificial Sequence: Synthetic oligonucleotide
cgcucuuccgggguccugg

SEQ ID NO: 2694942 - RNA, 19 nt, Artificial Sequence
  Description of Artificial Sequence: Synthetic oligonucleotide
caccgugccccgugccguc

SEQ ID NO: 2694943 - RNA, 19 nt, Artificial Sequence
  Description of Artificial Sequence: Synthetic oligonucleotide
aggucccagugcaucguuu

SEQ ID NO: 2694944 - RNA, 19 nt, Artificial Sequence
  Description of Artificial Sequence: Synthetic oligonucleotide
cccaacccagaacaugaaa

SEQ ID NO: 2694945 - RNA, 19 nt, Artificial Sequence
  Description of Artificial Sequence: Synthetic oligonucleotide
gucgcccuccgcagccacc

SEQ ID NO: 2694946 - RNA, 19 nt, Artificial Sequence
  Description of Artificial Sequence: Synthetic oligonucleotide
acggcccgggcagcauguc

SEQ ID NO: 2694947 - RNA, 19 nt, Artificial Sequence
  Description of Artificial Sequence: Synthetic oligonucleotide
cuaggucccagugcaucgu

SEQ ID NO: 2694948 - RNA, 19 nt, Artificial Sequence
  Description of Artificial Sequence: Synthetic oligonucleotide
gcggcccgcucuuccgggg

SEQ ID NO: 2694949 - RNA, 19 nt, Artificial Sequence
  Description of Artificial Sequence: Synthetic oligonucleotide
guaggaucaccgccucguu

SEQ ID NO: 2694950 - RNA, 19 nt, Artificial Sequence
  Description of Artificial Sequence: Synthetic oligonucleotide
ucguccggguacggcucgu

SEQ ID NO: 2694951 - RNA, 19 nt, Artificial Sequence
  Description of Artificial Sequence: Synthetic oligonucleotide
gguacggcucguaguccuc

SEQ ID NO: 2694952 - RNA, 19 nt, Artificial Sequence
  Description of Artificial Sequence: Synthetic oligonucleotide
cucguuccagguacagauu

SEQ ID NO: 2694953 - RNA, 19 nt, Artificial Sequence
  Description of Artificial Sequence: Synthetic oligonucleotide
acgaagccgaagagauguu

SEQ ID NO: 2694954 - RNA, 19 nt, Artificial Sequence
  Description of Artificial Sequence: Synthetic oligonucleotide
gcaucguuucaccccaguu

SEQ ID NO: 2694955 - RNA, 19 nt, Artificial Sequence
  Description of Artificial Sequence: Synthetic oligonucleotide
ccccgugccgucguccggg

SEQ ID NO: 2694956 - RNA, 19 nt, Artificial Sequence
  Description of Artificial Sequence: Synthetic oligonucleotide
ggucgcccuccgcagccac

SEQ ID NO: 2694957 - RNA, 19 nt, Artificial Sequence
  Description of Artificial Sequence: Synthetic oligonucleotide
ggggauguauccacacggu

SEQ ID NO: 2694958 - RNA, 19 nt, Artificial Sequence
  Description of Artificial Sequence: Synthetic oligonucleotide
ggauacggcccgggcagca

SEQ ID NO: 2694959 - RNA, 19 nt, Artificial Sequence
  Description of Artificial Sequence: Synthetic oligonucleotide
gccaccgggcucccaggac

SEQ ID NO: 2694960 - RNA, 19 nt, Artificial Sequence
  Description of Artificial Sequence: Synthetic oligonucleotide
gauacggcccgggcagcau

SEQ ID NO: 2694961 - RNA, 19 nt, Artificial Sequence
  Description of Artificial Sequence: Synthetic oligonucleotide
ggguauugcuucggcccca

SEQ ID NO: 2694962 - RNA, 19 nt, Artificial Sequence
  Description of Artificial Sequence: Synthetic oligonucleotide
gcgggucgcccuccgcagc

SEQ ID NO: 2694963 - RNA, 19 nt, Artificial Sequence
  Description of Artificial Sequence: Synthetic oligonucleotide
cggccccacaggcugguag

SEQ ID NO: 2694964 - RNA, 19 nt, Artificial Sequence
  Description of Artificial Sequence: Synthetic oligonucleotide
cguaguccuccacgcgcag

SEQ ID NO: 2694965 - RNA, 19 nt, Artificial Sequence
  Description of Artificial Sequence: Synthetic oligonucleotide
gccucguuccagguacaga

SEQ ID NO: 2694966 - RNA, 19 nt, Artificial Sequence
  Description of Artificial Sequence: Synthetic oligonucleotide
gccgucguccggguacggc

SEQ ID NO: 2694967 - RNA, 19 nt, Artificial Sequence
  Description of Artificial Sequence: Synthetic oligonucleotide
gggauacggcccgggcagc

SEQ ID NO: 2694968 - RNA, 19 nt, Artificial Sequence
  Description of Artificial Sequence: Synthetic oligonucleotide
gaggcaccacgccgcgggu

SEQ ID NO: 2694969 - RNA, 19 nt, Artificial Sequence
  Description of Artificial Sequence: Synthetic oligonucleotide
cgggucgcccuccgcagcc

SEQ ID NO: 2694970 - RNA, 19 nt, Artificial Sequence
  Description of Artificial Sequence: Synthetic oligonucleotide
cgucguccggguacggcuc

SEQ ID NO: 2694971 - RNA, 19 nt, Artificial Sequence
  Description of Artificial Sequence: Synthetic oligonucleotide
gccccgugccgucguccgg

SEQ ID NO: 2694972 - RNA, 19 nt, Artificial Sequence
  Description of Artificial Sequence: Synthetic oligonucleotide
ccuccucagaucucauagu

SEQ ID NO: 2694973 - RNA, 19 nt, Artificial Sequence
  Description of Artificial Sequence: Synthetic oligonucleotide
ggcccgggcagcauguccu

SEQ ID NO: 2694974 - RNA, 19 nt, Artificial Sequence
  Description of Artificial Sequence: Synthetic oligonucleotide
caccgccucguuccaggua

SEQ ID NO: 2694975 - RNA, 19 nt, Artificial Sequence
  Description of Artificial Sequence: Synthetic oligonucleotide
cgcgggucgcccuccgcag

SEQ ID NO: 2694976 - RNA, 19 nt, Artificial Sequence
  Description of Artificial Sequence: Synthetic oligonucleotide
ccgucguccggguacggcu

SEQ ID NO: 2694977 - RNA, 19 nt, Artificial Sequence
  Description of Artificial Sequence: Synthetic oligonucleotide
cggguacggcucguagucc

SEQ ID NO: 2694978 - RNA, 19 nt, Artificial Sequence
  Description of Artificial Sequence: Synthetic oligonucleotide
cccacguggccuccucaga

SEQ ID NO: 2694979 - RNA, 19 nt, Artificial Sequence
  Description of Artificial Sequence: Synthetic oligonucleotide
guggucccacucauaccau

SEQ ID NO: 2694980 - RNA, 19 nt, Artificial Sequence
  Description of Artificial Sequence: Synthetic oligonucleotide
ccacguggccuccucagau

SEQ ID NO: 2694981 - RNA, 19 nt, Artificial Sequence
  Description of Artificial Sequence: Synthetic oligonucleotide
ccgcgggucgcccuccgca

SEQ ID NO: 2694982 - RNA, 19 nt, Artificial Sequence
  Description of Artificial Sequence: Synthetic oligonucleotide
cguuccagguacagauugu

SEQ ID NO: 2694983 - RNA, 19 nt, Artificial Sequence
  Description of Artificial Sequence: Synthetic oligonucleotide
gguagucaccgugccccgu

SEQ ID NO: 2694984 - RNA, 19 nt, Artificial Sequence
  Description of Artificial Sequence: Synthetic oligonucleotide
gccgcgggucgcccuccgc

SEQ ID NO: 2694985 - RNA, 19 nt, Artificial Sequence
  Description of Artificial Sequence: Synthetic oligonucleotide
ccucuccugcugggaucgg

SEQ ID NO: 2694986 - RNA, 19 nt, Artificial Sequence
  Description of Artificial Sequence: Synthetic oligonucleotide
ccacgcgcagauuguacuu

SEQ ID NO: 2694987 - RNA, 19 nt, Artificial Sequence
  Description of Artificial Sequence: Synthetic oligonucleotide
gcaccacgccgcgggucgc

SEQ ID NO: 2694988 - RNA, 19 nt, Artificial Sequence
  Description of Artificial Sequence: Synthetic oligonucleotide
ccacacgguuccugauaua

SEQ ID NO: 2694989 - RNA, 19 nt, Artificial Sequence
  Description of Artificial Sequence: Synthetic oligonucleotide
gggucgcccuccgcagcca

SEQ ID NO: 2694990 - RNA, 19 nt, Artificial Sequence
  Description of Artificial Sequence: Synthetic oligonucleotide
ccgccucguuccagguaca

SEQ ID NO: 2694991 - RNA, 19 nt, Artificial Sequence
  Description of Artificial Sequence: Synthetic oligonucleotide
cgaagccgaagagauguuu

SEQ ID NO: 2694992 - RNA, 19 nt, Artificial Sequence
  Description of Artificial Sequence: Synthetic oligonucleotide
cgcccuccgcagccaccgg

SEQ ID NO: 2694993 - RNA, 19 nt, Artificial Sequence
  Description of Artificial Sequence: Synthetic oligonucleotide
cgugccccgugccgucguc

SEQ ID NO: 2694994 - RNA, 19 nt, Artificial Sequence
  Description of Artificial Sequence: Synthetic oligonucleotide
cgccgcgggucgcccuccg

SEQ ID NO: 2694995 - RNA, 19 nt, Artificial Sequence
  Description of Artificial Sequence: Synthetic oligonucleotide
gcccgggcagcauguccuu

SEQ ID NO: 2694996 - RNA, 19 nt, Artificial Sequence
  Description of Artificial Sequence: Synthetic oligonucleotide
cgggcagcauguccuuggu

SEQ ID NO: 2694997 - RNA, 19 nt, Artificial Sequence
  Description of Artificial Sequence: Synthetic oligonucleotide
gcggcggcggcccgcucuu

SEQ ID NO: 2694998 - RNA, 19 nt, Artificial Sequence
  Description of Artificial Sequence: Synthetic oligonucleotide
cgcgcagauuguacuucuu

SEQ ID NO: 2694999 - RNA, 19 nt, Artificial Sequence
  Description of Artificial Sequence: Synthetic oligonucleotide
cccgugccgucguccgggu

SEQ ID NO: 2695000 - RNA, 19 nt, Artificial Sequence
  Description of Artificial Sequence: Synthetic oligonucleotide
ccaccugcucggguucuuu

SEQ ID NO: 2695001 - RNA, 19 nt, Artificial Sequence
  Description of Artificial Sequence: Synthetic oligonucleotide
ccacgccgcgggucgcccu

SEQ ID NO: 2695002 - RNA, 19 nt, Artificial Sequence
  Description of Artificial Sequence: Synthetic oligonucleotide
ccgugccgucguccgggua

SEQ ID NO: 2695003 - RNA, 19 nt, Artificial Sequence
  Description of Artificial Sequence: Synthetic oligonucleotide
gggaucggucagggagcuu

SEQ ID NO: 2695004 - RNA, 19 nt, Artificial Sequence
  Description of Artificial Sequence: Synthetic oligonucleotide
ccgugccccgugccgucgu

SEQ ID NO: 2695005 - RNA, 19 nt, Artificial Sequence
  Description of Artificial Sequence: Synthetic oligonucleotide
cguccggguacggcucgua

SEQ ID NO: 2695006 - RNA, 19 nt, Artificial Sequence
  Description of Artificial Sequence: Synthetic oligonucleotide
cggcccgcucuuccggggu

SEQ ID NO: 2695007 - RNA, 19 nt, Artificial Sequence
  Description of Artificial Sequence: Synthetic oligonucleotide
aacauauugaucucgucgc

SEQ ID NO: 2695008 - RNA, 19 nt, Artificial Sequence
  Description of Artificial Sequence: Synthetic oligonucleotide
guaauuucgacuuaaaagc

SEQ ID NO: 2695009 - RNA, 19 nt, Artificial Sequence
  Description of Artificial Sequence: Synthetic oligonucleotide
gauacugagagcuucauuc

SEQ ID NO: 2695010 - RNA, 19 nt, Artificial Sequence
  Description of Artificial Sequence: Synthetic oligonucleotide
gguaauuucgacuuaaaag

SEQ ID NO: 2695011 - RNA, 19 nt, Artificial Sequence
  Description of Artificial Sequence: Synthetic oligonucleotide
ucauucugucuccagaucg

SEQ ID NO: 2695012 - RNA, 19 nt, Artificial Sequence
  Description of Artificial Sequence: Synthetic oligonucleotide
acuuaaaagcacgaguucc

SEQ ID NO: 2695013 - RNA, 19 nt, Artificial Sequence
  Description of Artificial Sequence: Synthetic oligonucleotide
ucaacugucauccuccaca

SEQ ID NO: 2695014 - RNA, 19 nt, Artificial Sequence
  Description of Artificial Sequence: Synthetic oligonucleotide
caacauauugaucucgucg

SEQ ID NO: 2695015 - RNA, 19 nt, Artificial Sequence
  Description of Artificial Sequence: Synthetic oligonucleotide
aauuucgacuuaaaagcac

SEQ ID NO: 2695016 - RNA, 19 nt, Artificial Sequence
  Description of Artificial Sequence: Synthetic oligonucleotide
uccuguaccaacauauuga

SEQ ID NO: 2695017 - RNA, 19 nt, Artificial Sequence
  Description of Artificial Sequence: Synthetic oligonucleotide
uaauuucgacuuaaaagca

SEQ ID NO: 2695018 - RNA, 19 nt, Artificial Sequence
  Description of Artificial Sequence: Synthetic oligonucleotide
gugguuacggguuacgagg

SEQ ID NO: 2695019 - RNA, 19 nt, Artificial Sequence
  Description of Artificial Sequence: Synthetic oligonucleotide
aaaagcacgaguuccggau

SEQ ID NO: 2695020 - RNA, 19 nt, Artificial Sequence
  Description of Artificial Sequence: Synthetic oligonucleotide
ucgaagacgguuccagucg

SEQ ID NO: 2695021 - RNA, 19 nt, Artificial Sequence
  Description of Artificial Sequence: Synthetic oligonucleotide
uuagcaggcgcccacaggu

SEQ ID NO: 2695022 - RNA, 19 nt, Artificial Sequence
  Description of Artificial Sequence: Synthetic oligonucleotide
ucgacuuaaaagcacgagu

SEQ ID NO: 2695023 - RNA, 19 nt, Artificial Sequence
  Description of Artificial Sequence: Synthetic oligonucleotide
auauugaucucgucgcggg

SEQ ID NO: 2695024 - RNA, 19 nt, Artificial Sequence
  Description of Artificial Sequence: Synthetic oligonucleotide
agagcuucauucugucucc

SEQ ID NO: 2695025 - RNA, 19 nt, Artificial Sequence
  Description of Artificial Sequence: Synthetic oligonucleotide
gacgguuccagucgggucg

SEQ ID NO: 2695026 - RNA, 19 nt, Artificial Sequence
  Description of Artificial Sequence: Synthetic oligonucleotide
cuuccguugcuuuuggagg

SEQ ID NO: 2695027 - RNA, 19 nt, Artificial Sequence
  Description of Artificial Sequence: Synthetic oligonucleotide
acuuccguugcuuuuggag

SEQ ID NO: 2695028 - RNA, 19 nt, Artificial Sequence
  Description of Artificial Sequence: Synthetic oligonucleotide
cuaguuccugguaauuucg

SEQ ID NO: 2695029 - RNA, 19 nt, Artificial Sequence
  Description of Artificial Sequence: Synthetic oligonucleotide
auuucgacuuaaaagcacg

SEQ ID NO: 2695030 - RNA, 19 nt, Artificial Sequence
  Description of Artificial Sequence: Synthetic oligonucleotide
cagguugugguacaguggg

SEQ ID NO: 2695031 - RNA, 19 nt, Artificial Sequence
  Description of Artificial Sequence: Synthetic oligonucleotide
aaagcacgaguuccggauc

SEQ ID NO: 2695032 - RNA, 19 nt, Artificial Sequence
  Description of Artificial Sequence: Synthetic oligonucleotide
ugggaugcgcucuaguucc

SEQ ID NO: 2695033 - RNA, 19 nt, Artificial Sequence
  Description of Artificial Sequence: Synthetic oligonucleotide
ugugguuacggguuacgag

SEQ ID NO: 2695034 - RNA, 19 nt, Artificial Sequence
  Description of Artificial Sequence: Synthetic oligonucleotide
uuagaaggaagaagacccc

SEQ ID NO: 2695035 - RNA, 19 nt, Artificial Sequence
  Description of Artificial Sequence: Synthetic oligonucleotide
uuaaaagcacgaguuccgg

SEQ ID NO: 2695036 - RNA, 19 nt, Artificial Sequence
  Description of Artificial Sequence: Synthetic oligonucleotide
guuuagaaggaagaagacc

SEQ ID NO: 2695037 - RNA, 19 nt, Artificial Sequence
  Description of Artificial Sequence: Synthetic oligonucleotide
aagaagaccccacuuccgu

SEQ ID NO: 2695038 - RNA, 19 nt, Artificial Sequence
  Description of Artificial Sequence: Synthetic oligonucleotide
ucugaagcguccucgggag

SEQ ID NO: 2695039 - RNA, 19 nt, Artificial Sequence
  Description of Artificial Sequence: Synthetic oligonucleotide
aagaccccacuuccguugc

SEQ ID NO: 2695040 - RNA, 19 nt, Artificial Sequence
  Description of Artificial Sequence: Synthetic oligonucleotide
acgaguuccggaucugccc

SEQ ID NO: 2695041 - RNA, 19 nt, Artificial Sequence
  Description of Artificial Sequence: Synthetic oligonucleotide
uccuuuaggcgauucaacu

SEQ ID NO: 2695042 - RNA, 19 nt, Artificial Sequence
  Description of Artificial Sequence: Synthetic oligonucleotide
ugguaauuucgacuuaaaa

SEQ ID NO: 2695043 - RNA, 19 nt, Artificial Sequence
  Description of Artificial Sequence: Synthetic oligonucleotide
ggucauuucgcugaguggg

SEQ ID NO: 2695044 - RNA, 19 nt, Artificial Sequence
  Description of Artificial Sequence: Synthetic oligonucleotide
acauauugaucucgucgcg

SEQ ID NO: 2695045 - RNA, 19 nt, Artificial Sequence
  Description of Artificial Sequence: Synthetic oligonucleotide
uuacggguuacgaggucgg

SEQ ID NO: 2695046 - RNA, 19 nt, Artificial Sequence
  Description of Artificial Sequence: Synthetic oligonucleotide
uaccaacauauugaucucg

SEQ ID NO: 2695047 - RNA, 19 nt, Artificial Sequence
  Description of Artificial Sequence: Synthetic oligonucleotide
uuucgacuuaaaagcacga

SEQ ID NO: 2695048 - RNA, 19 nt, Artificial Sequence
  Description of Artificial Sequence: Synthetic oligonucleotide
uugcgauagaagccgagcu

SEQ ID NO: 2695049 - RNA, 19 nt, Artificial Sequence
  Description of Artificial Sequence: Synthetic oligonucleotide
guuacggguuacgaggucg

SEQ ID NO: 2695050 - RNA, 19 nt, Artificial Sequence
  Description of Artificial Sequence: Synthetic oligonucleotide
accagguugugguacagug

SEQ ID NO: 2695051 - RNA, 19 nt, Artificial Sequence
  Description of Artificial Sequence: Synthetic oligonucleotide
ggcgauucaacugucaucc

SEQ ID NO: 2695052 - RNA, 19 nt, Artificial Sequence
  Description of Artificial Sequence: Synthetic oligonucleotide
gaagaccccacuuccguug

SEQ ID NO: 2695053 - RNA, 19 nt, Artificial Sequence
  Description of Artificial Sequence: Synthetic oligonucleotide
caggcugcacccaaacucg

SEQ ID NO: 2695054 - RNA, 19 nt, Artificial Sequence
  Description of Artificial Sequence: Synthetic oligonucleotide
gaugcgcucuaguuccugg

SEQ ID NO: 2695055 - RNA, 19 nt, Artificial Sequence
  Description of Artificial Sequence: Synthetic oligonucleotide
cacaagggccgccagaagc

SEQ ID NO: 2695056 - RNA, 19 nt, Artificial Sequence
  Description of Artificial Sequence: Synthetic oligonucleotide
uacugagagcuucauucug

SEQ ID NO: 2695057 - RNA, 19 nt, Artificial Sequence
  Description of Artificial Sequence: Synthetic oligonucleotide
gaagccgagcuccuguacc

SEQ ID NO: 2695058 - RNA, 19 nt, Artificial Sequence
  Description of Artificial Sequence: Synthetic oligonucleotide
uccuccacaggucuccacc

SEQ ID NO: 2695059 - RNA, 19 nt, Artificial Sequence
  Description of Artificial Sequence: Synthetic oligonucleotide
uuccugguaauuucgacuu

SEQ ID NO: 2695060 - RNA, 19 nt, Artificial Sequence
  Description of Artificial Sequence: Synthetic oligonucleotide
uucgacuuaaaagcacgag

SEQ ID NO: 2695061 - RNA, 19 nt, Artificial Sequence
  Description of Artificial Sequence: Synthetic oligonucleotide
cauauugaucucgucgcgg

SEQ ID NO: 2695062 - RNA, 19 nt, Artificial Sequence
  Description of Artificial Sequence: Synthetic oligonucleotide
gaagaagaccccacuuccg

SEQ ID NO: 2695063 - RNA, 19 nt, Artificial Sequence
  Description of Artificial Sequence: Synthetic oligonucleotide
gacuuaaaagcacgaguuc

SEQ ID NO: 2695064 - RNA, 19 nt, Artificial Sequence
  Description of Artificial Sequence: Synthetic oligonucleotide
cauucugucuccagaucgc

SEQ ID NO: 2695065 - RNA, 19 nt, Artificial Sequence
  Description of Artificial Sequence: Synthetic oligonucleotide
aagcacgaguuccggaucu

SEQ ID NO: 2695066 - RNA, 19 nt, Artificial Sequence
  Description of Artificial Sequence: Synthetic oligonucleotide
auagaagccgagcuccugu

SEQ ID NO: 2695067 - RNA, 19 nt, Artificial Sequence
  Description of Artificial Sequence: Synthetic oligonucleotide
acaggucuccacccguccc

SEQ ID NO: 2695068 - RNA, 19 nt, Artificial Sequence
  Description of Artificial Sequence: Synthetic oligonucleotide
agcaggcgcccacaggugc

SEQ ID NO: 2695069 - RNA, 19 nt, Artificial Sequence
  Description of Artificial Sequence: Synthetic oligonucleotide
ugugcuuggcaggagacgu

SEQ ID NO: 2695070 - RNA, 19 nt, Artificial Sequence
  Description of Artificial Sequence: Synthetic oligonucleotide
uaaaagcacgaguuccgga

SEQ ID NO: 2695071 - RNA, 19 nt, Artificial Sequence
  Description of Artificial Sequence: Synthetic oligonucleotide
auugaucucgucgcggguc

SEQ ID NO: 2695072 - RNA, 19 nt, Artificial Sequence
  Description of Artificial Sequence: Synthetic oligonucleotide
auacugagagcuucauucu

SEQ ID NO: 2695073 - RNA, 19 nt, Artificial Sequence
  Description of Artificial Sequence: Synthetic oligonucleotide
cucgucgcgggucauuucg

SEQ ID NO: 2695074 - RNA, 19 nt, Artificial Sequence
  Description of Artificial Sequence: Synthetic oligonucleotide
uccacugugguuacggguu

SEQ ID NO: 2695075 - RNA, 19 nt, Artificial Sequence
  Description of Artificial Sequence: Synthetic oligonucleotide
aggcgauucaacugucauc

SEQ ID NO: 2695076 - RNA, 19 nt, Artificial Sequence
  Description of Artificial Sequence: Synthetic oligonucleotide
ugcgauagaagccgagcuc

SEQ ID NO: 2695077 - RNA, 19 nt, Artificial Sequence
  Description of Artificial Sequence: Synthetic oligonucleotide
ucugugcuuggcaggagac

SEQ ID NO: 2695078 - RNA, 19 nt, Artificial Sequence
  Description of Artificial Sequence: Synthetic oligonucleotide
uuaggcgauucaacuguca

SEQ ID NO: 2695079 - RNA, 19 nt, Artificial Sequence
  Description of Artificial Sequence: Synthetic oligonucleotide
ggugacaaaggccuucacc

SEQ ID NO: 2695080 - RNA, 19 nt, Artificial Sequence
  Description of Artificial Sequence: Synthetic oligonucleotide
ugcucugaagcguccucgg

SEQ ID NO: 2695081 - RNA, 19 nt, Artificial Sequence
  Description of Artificial Sequence: Synthetic oligonucleotide
ggugucagcccucagcaag

SEQ ID NO: 2695082 - RNA, 19 nt, Artificial Sequence
  Description of Artificial Sequence: Synthetic oligonucleotide
gccgacuugcgauagaagc

SEQ ID NO: 2695083 - RNA, 19 nt, Artificial Sequence
  Description of Artificial Sequence: Synthetic oligonucleotide
agaagccgagcuccuguac

SEQ ID NO: 2695084 - RNA, 19 nt, Artificial Sequence
  Description of Artificial Sequence: Synthetic oligonucleotide
cuuggcaggagacguuccg

SEQ ID NO: 2695085 - RNA, 19 nt, Artificial Sequence
  Description of Artificial Sequence: Synthetic oligonucleotide
cucgaagacgguuccaguc

SEQ ID NO: 2695086 - RNA, 19 nt, Artificial Sequence
  Description of Artificial Sequence: Synthetic oligonucleotide
aacugucauccuccacagg

SEQ ID NO: 2695087 - RNA, 19 nt, Artificial Sequence
  Description of Artificial Sequence: Synthetic oligonucleotide
acuaggaugcucaucugug

SEQ ID NO: 2695088 - RNA, 19 nt, Artificial Sequence
  Description of Artificial Sequence: Synthetic oligonucleotide
uaggcgauucaacugucau

SEQ ID NO: 2695089 - RNA, 19 nt, Artificial Sequence
  Description of Artificial Sequence: Synthetic oligonucleotide
cuugcgauagaagccgagc

SEQ ID NO: 2695090 - RNA, 19 nt, Artificial Sequence
  Description of Artificial Sequence: Synthetic oligonucleotide
ucccgggauacugagagcu

SEQ ID NO: 2695091 - RNA, 19 nt, Artificial Sequence
  Description of Artificial Sequence: Synthetic oligonucleotide
uugaucucgucgcggguca

SEQ ID NO: 2695092 - RNA, 19 nt, Artificial Sequence
  Description of Artificial Sequence: Synthetic oligonucleotide
uuuaggcgauucaacuguc

SEQ ID NO: 2695093 - RNA, 19 nt, Artificial Sequence
  Description of Artificial Sequence: Synthetic oligonucleotide
uucauucugucuccagauc

SEQ ID NO: 2695094 - RNA, 19 nt, Artificial Sequence
  Description of Artificial Sequence: Synthetic oligonucleotide
ugguacagugggauguccu

SEQ ID NO: 2695095 - RNA, 19 nt, Artificial Sequence
  Description of Artificial Sequence: Synthetic oligonucleotide
uaguuccugguaauuucga

SEQ ID NO: 2695096 - RNA, 19 nt, Artificial Sequence
  Description of Artificial Sequence: Synthetic oligonucleotide
ugguuacggguuacgaggu

SEQ ID NO: 2695097 - RNA, 19 nt, Artificial Sequence
  Description of Artificial Sequence: Synthetic oligonucleotide
ucuccagaucgcuggcagg

SEQ ID NO: 2695098 - RNA, 19 nt, Artificial Sequence
  Description of Artificial Sequence: Synthetic oligonucleotide
uccucgggaggcuuagcag

SEQ ID NO: 2695099 - RNA, 19 nt, Artificial Sequence
  Description of Artificial Sequence: Synthetic oligonucleotide
agcuccacugugguuacgg

SEQ ID NO: 2695100 - RNA, 19 nt, Artificial Sequence
  Description of Artificial Sequence: Synthetic oligonucleotide
aagggagaugcucccggga

SEQ ID NO: 2695101 - RNA, 19 nt, Artificial Sequence
  Description of Artificial Sequence: Synthetic oligonucleotide
acguuccgcaggcugcacc

SEQ ID NO: 2695102 - RNA, 19 nt, Artificial Sequence
  Description of Artificial Sequence: Synthetic oligonucleotide
cacacuaggaugcucaucu

SEQ ID NO: 2695103 - RNA, 19 nt, Artificial Sequence
  Description of Artificial Sequence: Synthetic oligonucleotide
cuccagaucgcuggcaggg

SEQ ID NO: 2695104 - RNA, 19 nt, Artificial Sequence
  Description of Artificial Sequence: Synthetic oligonucleotide
ucgcgggucauuucgcuga

SEQ ID NO: 2695105 - RNA, 19 nt, Artificial Sequence
  Description of Artificial Sequence: Synthetic oligonucleotide
agacgguuccagucggguc

SEQ ID NO: 2695106 - RNA, 19 nt, Artificial Sequence
  Description of Artificial Sequence: Synthetic oligonucleotide
gucggcgugcucugaagcg

SEQ ID NO: 2695107 - RNA, 19 nt, Artificial Sequence
  Description of Artificial Sequence: Synthetic oligonucleotide
agugggaugcgcucuaguu

SEQ ID NO: 2695108 - RNA, 19 nt, Artificial Sequence
  Description of Artificial Sequence: Synthetic oligonucleotide
cuccuuuaggcgauucaac

SEQ ID NO: 2695109 - RNA, 19 nt, Artificial Sequence
  Description of Artificial Sequence: Synthetic oligonucleotide
uacgaggucggcgugcucu

SEQ ID NO: 2695110 - RNA, 19 nt, Artificial Sequence
  Description of Artificial Sequence: Synthetic oligonucleotide
gaugcucaucugugcuugg

SEQ ID NO: 2695111 - RNA, 19 nt, Artificial Sequence
  Description of Artificial Sequence: Synthetic oligonucleotide
uauugaucucgucgcgggu

SEQ ID NO: 2695112 - RNA, 19 nt, Artificial Sequence
  Description of Artificial Sequence: Synthetic oligonucleotide
agcuccuguaccaacauau

SEQ ID NO: 2695113 - RNA, 19 nt, Artificial Sequence
  Description of Artificial Sequence: Synthetic oligonucleotide
gcucccgggauacugagag

SEQ ID NO: 2695114 - RNA, 19 nt, Artificial Sequence
  Description of Artificial Sequence: Synthetic oligonucleotide
guugugguacagugggaug

SEQ ID NO: 2695115 - RNA, 19 nt, Artificial Sequence
  Description of Artificial Sequence: Synthetic oligonucleotide
cuuagcaggcgcccacagg

SEQ ID NO: 2695116 - RNA, 19 nt, Artificial Sequence
  Description of Artificial Sequence: Synthetic oligonucleotide
cuuuaggcgauucaacugu

SEQ ID NO: 2695117 - RNA, 19 nt, Artificial Sequence
  Description of Artificial Sequence: Synthetic oligonucleotide
cacgaguuccggaucugcc

SEQ ID NO: 2695118 - RNA, 19 nt, Artificial Sequence
  Description of Artificial Sequence: Synthetic oligonucleotide
uucaccuccuuuaggcgau

SEQ ID NO: 2695119 - RNA, 19 nt, Artificial Sequence
  Description of Artificial Sequence: Synthetic oligonucleotide
aucugugcuuggcaggaga

SEQ ID NO: 2695120 - RNA, 19 nt, Artificial Sequence
  Description of Artificial Sequence: Synthetic oligonucleotide
caagggagaugcucccggg

SEQ ID NO: 2695121 - RNA, 19 nt, Artificial Sequence
  Description of Artificial Sequence: Synthetic oligonucleotide
aagacgguuccagucgggu

SEQ ID NO: 2695122 - RNA, 19 nt, Artificial Sequence
  Description of Artificial Sequence: Synthetic oligonucleotide
uggcaggagacguuccgca

SEQ ID NO: 2695123 - RNA, 19 nt, Artificial Sequence
  Description of Artificial Sequence: Synthetic oligonucleotide
ugacaaaggccuucaccuc

SEQ ID NO: 2695124 - RNA, 19 nt, Artificial Sequence
  Description of Artificial Sequence: Synthetic oligonucleotide
augcucaucugugcuuggc

SEQ ID NO: 2695125 - RNA, 19 nt, Artificial Sequence
  Description of Artificial Sequence: Synthetic oligonucleotide
caggagacguuccgcaggc

SEQ ID NO: 2695126 - RNA, 19 nt, Artificial Sequence
  Description of Artificial Sequence: Synthetic oligonucleotide
acugagagcuucauucugu

SEQ ID NO: 2695127 - RNA, 19 nt, Artificial Sequence
  Description of Artificial Sequence: Synthetic oligonucleotide
uucaacugucauccuccac

SEQ ID NO: 2695128 - RNA, 19 nt, Artificial Sequence
  Description of Artificial Sequence: Synthetic oligonucleotide
guuccugguaauuucgacu

SEQ ID NO: 2695129 - RNA, 19 nt, Artificial Sequence
  Description of Artificial Sequence: Synthetic oligonucleotide
gagacguuccgcaggcugc

SEQ ID NO: 2695130 - RNA, 19 nt, Artificial Sequence
  Description of Artificial Sequence: Synthetic oligonucleotide
cucgggaggcuuagcaggc

SEQ ID NO: 2695131 - RNA, 19 nt, Artificial Sequence
  Description of Artificial Sequence: Synthetic oligonucleotide
gugggaugcgcucuaguuc

SEQ ID NO: 2695132 - RNA, 19 nt, Artificial Sequence
  Description of Artificial Sequence: Synthetic oligonucleotide
auucaacugucauccucca

SEQ ID NO: 2695133 - RNA, 19 nt, Artificial Sequence
  Description of Artificial Sequence: Synthetic oligonucleotide
aggcuuagcaggcgcccac

SEQ ID NO: 2695134 - RNA, 19 nt, Artificial Sequence
  Description of Artificial Sequence: Synthetic oligonucleotide
cugagagcuucauucuguc

SEQ ID NO: 2695135 - RNA, 19 nt, Artificial Sequence
  Description of Artificial Sequence: Synthetic oligonucleotide
acugugguuacggguuacg

SEQ ID NO: 2695136 - RNA, 19 nt, Artificial Sequence
  Description of Artificial Sequence: Synthetic oligonucleotide
acggguuacgaggucggcg

SEQ ID NO: 2695137 - RNA, 19 nt, Artificial Sequence
  Description of Artificial Sequence: Synthetic oligonucleotide
cauuucgcugagugggaug

SEQ ID NO: 2695138 - RNA, 19 nt, Artificial Sequence
  Description of Artificial Sequence: Synthetic oligonucleotide
gauagaagccgagcuccug

SEQ ID NO: 2695139 - RNA, 19 nt, Artificial Sequence
  Description of Artificial Sequence: Synthetic oligonucleotide
aggccuucaccuccuuuag

SEQ ID NO: 2695140 - RNA, 19 nt, Artificial Sequence
  Description of Artificial Sequence: Synthetic oligonucleotide
gaaggaagaagaccccacu

SEQ ID NO: 2695141 - RNA, 19 nt, Artificial Sequence
  Description of Artificial Sequence: Synthetic oligonucleotide
uucgcugagugggaugcgc

SEQ ID NO: 2695142 - RNA, 19 nt, Artificial Sequence
  Description of Artificial Sequence: Synthetic oligonucleotide
gguacagugggauguccug

SEQ ID NO: 2695143 - RNA, 19 nt, Artificial Sequence
  Description of Artificial Sequence: Synthetic oligonucleotide
gcaagggagaugcucccgg

SEQ ID NO: 2695144 - RNA, 19 nt, Artificial Sequence
  Description of Artificial Sequence: Synthetic oligonucleotide
uccggaucugccccaggga

SEQ ID NO: 2695145 - RNA, 19 nt, Artificial Sequence
  Description of Artificial Sequence: Synthetic oligonucleotide
gugcuucaucaccagguug

SEQ ID NO: 2695146 - RNA, 19 nt, Artificial Sequence
  Description of Artificial Sequence: Synthetic oligonucleotide
guaccaacauauugaucuc

SEQ ID NO: 2695147 - RNA, 19 nt, Artificial Sequence
  Description of Artificial Sequence: Synthetic oligonucleotide
gucuccacccguccccugg

SEQ ID NO: 2695148 - RNA, 19 nt, Artificial Sequence
  Description of Artificial Sequence: Synthetic oligonucleotide
ccgacuugcgauagaagcc

SEQ ID NO: 2695149 - RNA, 19 nt, Artificial Sequence
  Description of Artificial Sequence: Synthetic oligonucleotide
agaugcucccgggauacug

SEQ ID NO: 2695150 - RNA, 19 nt, Artificial Sequence
  Description of Artificial Sequence: Synthetic oligonucleotide
gcgauagaagccgagcucc

SEQ ID NO: 2695151 - RNA, 19 nt, Artificial Sequence
  Description of Artificial Sequence: Synthetic oligonucleotide
caggccucgaagacgguuc

SEQ ID NO: 2695152 - RNA, 19 nt, Artificial Sequence
  Description of Artificial Sequence: Synthetic oligonucleotide
agggagaugcucccgggau

SEQ ID NO: 2695153 - RNA, 19 nt, Artificial Sequence
  Description of Artificial Sequence: Synthetic oligonucleotide
ccucgggaggcuuagcagg

SEQ ID NO: 2695154 - RNA, 19 nt, Artificial Sequence
  Description of Artificial Sequence: Synthetic oligonucleotide
ugucagcccucagcaaggg

SEQ ID NO: 2695155 - RNA, 19 nt, Artificial Sequence
  Description of Artificial Sequence: Synthetic oligonucleotide
gaagacgguuccagucggg

SEQ ID NO: 2695156 - RNA, 19 nt, Artificial Sequence
  Description of Artificial Sequence: Synthetic oligonucleotide
gcaggagacguuccgcagg

SEQ ID NO: 2695157 - RNA, 19 nt, Artificial Sequence
  Description of Artificial Sequence: Synthetic oligonucleotide
ggagacguuccgcaggcug

SEQ ID NO: 2695158 - RNA, 19 nt, Artificial Sequence
  Description of Artificial Sequence: Synthetic oligonucleotide
gggucauuucgcugagugg

SEQ ID NO: 2695159 - RNA, 19 nt, Artificial Sequence
  Description of Artificial Sequence: Synthetic oligonucleotide
caggucuccacccgucccc

SEQ ID NO: 2695160 - RNA, 19 nt, Artificial Sequence
  Description of Artificial Sequence: Synthetic oligonucleotide
ugggugacaaaggccuuca

SEQ ID NO: 2695161 - RNA, 19 nt, Artificial Sequence
  Description of Artificial Sequence: Synthetic oligonucleotide
cuguaccaacauauugauc

SEQ ID NO: 2695162 - RNA, 19 nt, Artificial Sequence
  Description of Artificial Sequence: Synthetic oligonucleotide
cccucagcaagggagaugc

SEQ ID NO: 2695163 - RNA, 19 nt, Artificial Sequence
  Description of Artificial Sequence: Synthetic oligonucleotide
ugguggcggccacacuagg

SEQ ID NO: 2695164 - RNA, 19 nt, Artificial Sequence
  Description of Artificial Sequence: Synthetic oligonucleotide
augcucccgggauacugag

SEQ ID NO: 2695165 - RNA, 19 nt, Artificial Sequence
  Description of Artificial Sequence: Synthetic oligonucleotide
ucgcugagugggaugcgcu

SEQ ID NO: 2695166 - RNA, 19 nt, Artificial Sequence
  Description of Artificial Sequence: Synthetic oligonucleotide
uccggcgccgacuugcgau

SEQ ID NO: 2695167 - RNA, 19 nt, Artificial Sequence
  Description of Artificial Sequence: Synthetic oligonucleotide
agcaagggagaugcucccg

SEQ ID NO: 2695168 - RNA, 19 nt, Artificial Sequence
  Description of Artificial Sequence: Synthetic oligonucleotide
acaagggccgccagaagca

SEQ ID NO: 2695169 - RNA, 19 nt, Artificial Sequence
  Description of Artificial Sequence: Synthetic oligonucleotide
uccagaucgcuggcagggg

SEQ ID NO: 2695170 - RNA, 19 nt, Artificial Sequence
  Description of Artificial Sequence: Synthetic oligonucleotide
ugcuuggcaggagacguuc

SEQ ID NO: 2695171 - RNA, 19 nt, Artificial Sequence
  Description of Artificial Sequence: Synthetic oligonucleotide
ugcgcucuaguuccuggua

SEQ ID NO: 2695172 - RNA, 19 nt, Artificial Sequence
  Description of Artificial Sequence: Synthetic oligonucleotide
acacuaggaugcucaucug

SEQ ID NO: 2695173 - RNA, 19 nt, Artificial Sequence
  Description of Artificial Sequence: Synthetic oligonucleotide
cugugcuuggcaggagacg

SEQ ID NO: 2695174 - RNA, 19 nt, Artificial Sequence
  Description of Artificial Sequence: Synthetic oligonucleotide
ucuccacccguccccuggc

SEQ ID NO: 2695175 - RNA, 19 nt, Artificial Sequence
  Description of Artificial Sequence: Synthetic oligonucleotide
ucgucgcgggucauuucgc

SEQ ID NO: 2695176 - RNA, 19 nt, Artificial Sequence
  Description of Artificial Sequence: Synthetic oligonucleotide
uccacccguccccuggcca

SEQ ID NO: 2695177 - RNA, 19 nt, Artificial Sequence
  Description of Artificial Sequence: Synthetic oligonucleotide
agaagaccccacuuccguu

SEQ ID NO: 2695178 - RNA, 19 nt, Artificial Sequence
  Description of Artificial Sequence: Synthetic oligonucleotide
gaugcucccgggauacuga

SEQ ID NO: 2695179 - RNA, 19 nt, Artificial Sequence
  Description of Artificial Sequence: Synthetic oligonucleotide
ugugguacagugggauguc

SEQ ID NO: 2695180 - RNA, 19 nt, Artificial Sequence
  Description of Artificial Sequence: Synthetic oligonucleotide
ucauuucgcugagugggau

SEQ ID NO: 2695181 - RNA, 19 nt, Artificial Sequence
  Description of Artificial Sequence: Synthetic oligonucleotide
uagcaggcgcccacaggug

SEQ ID NO: 2695182 - RNA, 19 nt, Artificial Sequence
  Description of Artificial Sequence: Synthetic oligonucleotide
ucaccagguugugguacag

SEQ ID NO: 2695183 - RNA, 19 nt, Artificial Sequence
  Description of Artificial Sequence: Synthetic oligonucleotide
aggucggcgugcucugaag

SEQ ID NO: 2695184 - RNA, 19 nt, Artificial Sequence
  Description of Artificial Sequence: Synthetic oligonucleotide
ucgggucgguagguggugg

SEQ ID NO: 2695185 - RNA, 19 nt, Artificial Sequence
  Description of Artificial Sequence: Synthetic oligonucleotide
guccucgggaggcuuagca

SEQ ID NO: 2695186 - RNA, 19 nt, Artificial Sequence
  Description of Artificial Sequence: Synthetic oligonucleotide
gucgguaggugguggcggc

SEQ ID NO: 2695187 - RNA, 19 nt, Artificial Sequence
  Description of Artificial Sequence: Synthetic oligonucleotide
gucgcgggucauuucgcug

SEQ ID NO: 2695188 - RNA, 19 nt, Artificial Sequence
  Description of Artificial Sequence: Synthetic oligonucleotide
guccugggugacaaaggcc

SEQ ID NO: 2695189 - RNA, 19 nt, Artificial Sequence
  Description of Artificial Sequence: Synthetic oligonucleotide
ucggcgugcucugaagcgu

SEQ ID NO: 2695190 - RNA, 19 nt, Artificial Sequence
  Description of Artificial Sequence: Synthetic oligonucleotide
ugucuccagaucgcuggca

SEQ ID NO: 2695191 - RNA, 19 nt, Artificial Sequence
  Description of Artificial Sequence: Synthetic oligonucleotide
cugucuccagaucgcuggc

SEQ ID NO: 2695192 - RNA, 19 nt, Artificial Sequence
  Description of Artificial Sequence: Synthetic oligonucleotide
cugaagcguccucgggagg

SEQ ID NO: 2695193 - RNA, 19 nt, Artificial Sequence
  Description of Artificial Sequence: Synthetic oligonucleotide
uccugguaauuucgacuua

SEQ ID NO: 2695194 - RNA, 19 nt, Artificial Sequence
  Description of Artificial Sequence: Synthetic oligonucleotide
ucgggaggcuuagcaggcg

SEQ ID NO: 2695195 - RNA, 19 nt, Artificial Sequence
  Description of Artificial Sequence: Synthetic oligonucleotide
ggucggcgugcucugaagc

SEQ ID NO: 2695196 - RNA, 19 nt, Artificial Sequence
  Description of Artificial Sequence: Synthetic oligonucleotide
cgacuugcgauagaagccg

SEQ ID NO: 2695197 - RNA, 19 nt, Artificial Sequence
  Description of Artificial Sequence: Synthetic oligonucleotide
ugcucccgggauacugaga

SEQ ID NO: 2695198 - RNA, 19 nt, Artificial Sequence
  Description of Artificial Sequence: Synthetic oligonucleotide
ggagaugcucccgggauac

SEQ ID NO: 2695199 - RNA, 19 nt, Artificial Sequence
  Description of Artificial Sequence: Synthetic oligonucleotide
uuccgcaggcugcacccaa

SEQ ID NO: 2695200 - RNA, 19 nt, Artificial Sequence
  Description of Artificial Sequence: Synthetic oligonucleotide
ggucgguaggugguggcgg

SEQ ID NO: 2695201 - RNA, 19 nt, Artificial Sequence
  Description of Artificial Sequence: Synthetic oligonucleotide
cugguaauuucgacuuaaa

SEQ ID NO: 2695202 - RNA, 19 nt, Artificial Sequence
  Description of Artificial Sequence: Synthetic oligonucleotide
ggcaggagacguuccgcag

SEQ ID NO: 2695203 - RNA, 19 nt, Artificial Sequence
  Description of Artificial Sequence: Synthetic oligonucleotide
acgaggucggcgugcucug

SEQ ID NO: 2695204 - RNA, 19 nt, Artificial Sequence
  Description of Artificial Sequence: Synthetic oligonucleotide
ggcggccacacuaggaugc

SEQ ID NO: 2695205 - RNA, 19 nt, Artificial Sequence
  Description of Artificial Sequence: Synthetic oligonucleotide
gcuuuuggaggcugguguc

SEQ ID NO: 2695206 - RNA, 19 nt, Artificial Sequence
  Description of Artificial Sequence: Synthetic oligonucleotide
ccggaucugccccagggag

SEQ ID NO: 2695207 - RNA, 19 nt, Artificial Sequence
  Description of Artificial Sequence: Synthetic oligonucleotide
gugguacagugggaugucc

SEQ ID NO: 2695208 - RNA, 19 nt, Artificial Sequence
  Description of Artificial Sequence: Synthetic oligonucleotide
cugggugacaaaggccuuc

SEQ ID NO: 2695209 - RNA, 19 nt, Artificial Sequence
  Description of Artificial Sequence: Synthetic oligonucleotide
aguuccggaucugccccag

SEQ ID NO: 2695210 - RNA, 19 nt, Artificial Sequence
  Description of Artificial Sequence: Synthetic oligonucleotide
agggccgccagaagcagca

SEQ ID NO: 2695211 - RNA, 19 nt, Artificial Sequence
  Description of Artificial Sequence: Synthetic oligonucleotide
cacuaggaugcucaucugu

SEQ ID NO: 2695212 - RNA, 19 nt, Artificial Sequence
  Description of Artificial Sequence: Synthetic oligonucleotide
acgguuccagucgggucgg

SEQ ID NO: 2695213 - RNA, 19 nt, Artificial Sequence
  Description of Artificial Sequence: Synthetic oligonucleotide
cucccgggauacugagagc

SEQ ID NO: 2695214 - RNA, 19 nt, Artificial Sequence
  Description of Artificial Sequence: Synthetic oligonucleotide
uccguugcuuuuggaggcu

SEQ ID NO: 2695215 - RNA, 19 nt, Artificial Sequence
  Description of Artificial Sequence: Synthetic oligonucleotide
uacggguuacgaggucggc

SEQ ID NO: 2695216 - RNA, 19 nt, Artificial Sequence
  Description of Artificial Sequence: Synthetic oligonucleotide
ccuccacaggucuccaccc

SEQ ID NO: 2695217 - RNA, 19 nt, Artificial Sequence
  Description of Artificial Sequence: Synthetic oligonucleotide
gagccacaagggccgccag

SEQ ID NO: 2695218 - RNA, 19 nt, Artificial Sequence
  Description of Artificial Sequence: Synthetic oligonucleotide
uccgcaggcugcacccaaa

SEQ ID NO: 2695219 - RNA, 19 nt, Artificial Sequence
  Description of Artificial Sequence: Synthetic oligonucleotide
gcuuagcaggcgcccacag

SEQ ID NO: 2695220 - RNA, 19 nt, Artificial Sequence
  Description of Artificial Sequence: Synthetic oligonucleotide
ccaacauauugaucucguc

SEQ ID NO: 2695221 - RNA, 19 nt, Artificial Sequence
  Description of Artificial Sequence: Synthetic oligonucleotide
gccucgaagacgguuccag

SEQ ID NO: 2695222 - RNA, 19 nt, Artificial Sequence
  Description of Artificial Sequence: Synthetic oligonucleotide
gguuacgaggucggcgugc

SEQ ID NO: 2695223 - RNA, 19 nt, Artificial Sequence
  Description of Artificial Sequence: Synthetic oligonucleotide
caagggccgccagaagcag

SEQ ID NO: 2695224 - RNA, 19 nt, Artificial Sequence
  Description of Artificial Sequence: Synthetic oligonucleotide
agucgggucgguagguggu

SEQ ID NO: 2695225 - RNA, 19 nt, Artificial Sequence
  Description of Artificial Sequence: Synthetic oligonucleotide
agacguuccgcaggcugca

SEQ ID NO: 2695226 - RNA, 19 nt, Artificial Sequence
  Description of Artificial Sequence: Synthetic oligonucleotide
cgggucauuucgcugagug

SEQ ID NO: 2695227 - RNA, 19 nt, Artificial Sequence
  Description of Artificial Sequence: Synthetic oligonucleotide
cgaguuccggaucugcccc

SEQ ID NO: 2695228 - RNA, 19 nt, Artificial Sequence
  Description of Artificial Sequence: Synthetic oligonucleotide
gucauuucgcugaguggga

SEQ ID NO: 2695229 - RNA, 19 nt, Artificial Sequence
  Description of Artificial Sequence: Synthetic oligonucleotide
cgaagacgguuccagucgg

SEQ ID NO: 2695230 - RNA, 19 nt, Artificial Sequence
  Description of Artificial Sequence: Synthetic oligonucleotide
cgauucaacugucauccuc

SEQ ID NO: 2695231 - RNA, 19 nt, Artificial Sequence
  Description of Artificial Sequence: Synthetic oligonucleotide
cugugguuacggguuacga

SEQ ID NO: 2695232 - RNA, 19 nt, Artificial Sequence
  Description of Artificial Sequence: Synthetic oligonucleotide
ggccacacuaggaugcuca

SEQ ID NO: 2695233 - RNA, 19 nt, Artificial Sequence
  Description of Artificial Sequence: Synthetic oligonucleotide
aggcugcacccaaacucgg

SEQ ID NO: 2695234 - RNA, 19 nt, Artificial Sequence
  Description of Artificial Sequence: Synthetic oligonucleotide
gacuugcgauagaagccga

SEQ ID NO: 2695235 - RNA, 19 nt, Artificial Sequence
  Description of Artificial Sequence: Synthetic oligonucleotide
gaggucggcgugcucugaa

SEQ ID NO: 2695236 - RNA, 19 nt, Artificial Sequence
  Description of Artificial Sequence: Synthetic oligonucleotide
aucucgucgcgggucauuu

SEQ ID NO: 2695237 - RNA, 19 nt, Artificial Sequence
  Description of Artificial Sequence: Synthetic oligonucleotide
ucucgucgcgggucauuuc

SEQ ID NO: 2695238 - RNA, 19 nt, Artificial Sequence
  Description of Artificial Sequence: Synthetic oligonucleotide
cagcccucagcaagggaga

SEQ ID NO: 2695239 - RNA, 19 nt, Artificial Sequence
  Description of Artificial Sequence: Synthetic oligonucleotide
ggaggcuuagcaggcgccc

SEQ ID NO: 2695240 - RNA, 19 nt, Artificial Sequence
  Description of Artificial Sequence: Synthetic oligonucleotide
cguuccgcaggcugcaccc

SEQ ID NO: 2695241 - RNA, 19 nt, Artificial Sequence
  Description of Artificial Sequence: Synthetic oligonucleotide
gaggcuuagcaggcgccca

SEQ ID NO: 2695242 - RNA, 19 nt, Artificial Sequence
  Description of Artificial Sequence: Synthetic oligonucleotide
agcacgaguuccggaucug

SEQ ID NO: 2695243 - RNA, 19 nt, Artificial Sequence
  Description of Artificial Sequence: Synthetic oligonucleotide
gagcuccuguaccaacaua

SEQ ID NO: 2695244 - RNA, 19 nt, Artificial Sequence
  Description of Artificial Sequence: Synthetic oligonucleotide
cacugugguuacggguuac

SEQ ID NO: 2695245 - RNA, 19 nt, Artificial Sequence
  Description of Artificial Sequence: Synthetic oligonucleotide
caucugugcuuggcaggag

SEQ ID NO: 2695246 - RNA, 19 nt, Artificial Sequence
  Description of Artificial Sequence: Synthetic oligonucleotide
ugcgcguccggcgccgacu

SEQ ID NO: 2695247 - RNA, 19 nt, Artificial Sequence
  Description of Artificial Sequence: Synthetic oligonucleotide
gggucgguaggugguggcg

SEQ ID NO: 2695248 - RNA, 19 nt, Artificial Sequence
  Description of Artificial Sequence: Synthetic oligonucleotide
gagcuucauucugucucca

SEQ ID NO: 2695249 - RNA, 19 nt, Artificial Sequence
  Description of Artificial Sequence: Synthetic oligonucleotide
cguugcuuuuggaggcugg

SEQ ID NO: 2695250 - RNA, 19 nt, Artificial Sequence
  Description of Artificial Sequence: Synthetic oligonucleotide
uuacgaggucggcgugcuc

SEQ ID NO: 2695251 - RNA, 19 nt, Artificial Sequence
  Description of Artificial Sequence: Synthetic oligonucleotide
ccacuuccguugcuuuugg

SEQ ID NO: 2695252 - RNA, 19 nt, Artificial Sequence
  Description of Artificial Sequence: Synthetic oligonucleotide
agaccccacuuccguugcu

SEQ ID NO: 2695253 - RNA, 19 nt, Artificial Sequence
  Description of Artificial Sequence: Synthetic oligonucleotide
cuccacccguccccuggcc

SEQ ID NO: 2695254 - RNA, 19 nt, Artificial Sequence
  Description of Artificial Sequence: Synthetic oligonucleotide
gguugugguacagugggau

SEQ ID NO: 2695255 - RNA, 19 nt, Artificial Sequence
  Description of Artificial Sequence: Synthetic oligonucleotide
cccacuuccguugcuuuug

SEQ ID NO: 2695256 - RNA, 19 nt, Artificial Sequence
  Description of Artificial Sequence: Synthetic oligonucleotide
gcaccugcgcguccggcgc

SEQ ID NO: 2695257 - RNA, 19 nt, Artificial Sequence
  Description of Artificial Sequence: Synthetic oligonucleotide
gucagcccucagcaaggga

SEQ ID NO: 2695258 - RNA, 19 nt, Artificial Sequence
  Description of Artificial Sequence: Synthetic oligonucleotide
gguuacggguuacgagguc

SEQ ID NO: 2695259 - RNA, 19 nt, Artificial Sequence
  Description of Artificial Sequence: Synthetic oligonucleotide
gaggcuggugucagcccuc

SEQ ID NO: 2695260 - RNA, 19 nt, Artificial Sequence
  Description of Artificial Sequence: Synthetic oligonucleotide
agguugugguacaguggga

SEQ ID NO: 2695261 - RNA, 19 nt, Artificial Sequence
  Description of Artificial Sequence: Synthetic oligonucleotide
guuacgaggucggcgugcu

SEQ ID NO: 2695262 - RNA, 19 nt, Artificial Sequence
  Description of Artificial Sequence: Synthetic oligonucleotide
gggauguccugggugacaa

SEQ ID NO: 2695263 - RNA, 19 nt, Artificial Sequence
  Description of Artificial Sequence: Synthetic oligonucleotide
cggaucugccccagggagg

SEQ ID NO: 2695264 - RNA, 19 nt, Artificial Sequence
  Description of Artificial Sequence: Synthetic oligonucleotide
ggaggcuggugucagcccu

SEQ ID NO: 2695265 - RNA, 19 nt, Artificial Sequence
  Description of Artificial Sequence: Synthetic oligonucleotide
gcacgaguuccggaucugc

SEQ ID NO: 2695266 - RNA, 19 nt, Artificial Sequence
  Description of Artificial Sequence: Synthetic oligonucleotide
cgacuuaaaagcacgaguu

SEQ ID NO: 2695267 - RNA, 19 nt, Artificial Sequence
  Description of Artificial Sequence: Synthetic oligonucleotide
accugcgcguccggcgccg

SEQ ID NO: 2695268 - RNA, 19 nt, Artificial Sequence
  Description of Artificial Sequence: Synthetic oligonucleotide
cucuaguuccugguaauuu

SEQ ID NO: 2695269 - RNA, 19 nt, Artificial Sequence
  Description of Artificial Sequence: Synthetic oligonucleotide
cacuuccguugcuuuugga

SEQ ID NO: 2695270 - RNA, 19 nt, Artificial Sequence
  Description of Artificial Sequence: Synthetic oligonucleotide
ccuguaccaacauauugau

SEQ ID NO: 2695271 - RNA, 19 nt, Artificial Sequence
  Description of Artificial Sequence: Synthetic oligonucleotide
gcgcucuaguuccugguaa

SEQ ID NO: 2695272 - RNA, 19 nt, Artificial Sequence
  Description of Artificial Sequence: Synthetic oligonucleotide
gugggauguccugggugac

SEQ ID NO: 2695273 - RNA, 19 nt, Artificial Sequence
  Description of Artificial Sequence: Synthetic oligonucleotide
agcagugguggcggccaca

SEQ ID NO: 2695274 - RNA, 19 nt, Artificial Sequence
  Description of Artificial Sequence: Synthetic oligonucleotide
ccuggccaggccucgaaga

SEQ ID NO: 2695275 - RNA, 19 nt, Artificial Sequence
  Description of Artificial Sequence: Synthetic oligonucleotide
ccacccguccccuggccag

SEQ ID NO: 2695276 - RNA, 19 nt, Artificial Sequence
  Description of Artificial Sequence: Synthetic oligonucleotide
ggguuacgaggucggcgug

SEQ ID NO: 2695277 - RNA, 19 nt, Artificial Sequence
  Description of Artificial Sequence: Synthetic oligonucleotide
ccgggauacugagagcuuc

SEQ ID NO: 2695278 - RNA, 19 nt, Artificial Sequence
  Description of Artificial Sequence: Synthetic oligonucleotide
ggaugcgcucuaguuccug

SEQ ID NO: 2695279 - RNA, 19 nt, Artificial Sequence
  Description of Artificial Sequence: Synthetic oligonucleotide
caccugcgcguccggcgcc

SEQ ID NO: 2695280 - RNA, 19 nt, Artificial Sequence
  Description of Artificial Sequence: Synthetic oligonucleotide
gccgagcuccuguaccaac

SEQ ID NO: 2695281 - RNA, 19 nt, Artificial Sequence
  Description of Artificial Sequence: Synthetic oligonucleotide
caccuccuuuaggcgauuc

SEQ ID NO: 2695282 - RNA, 19 nt, Artificial Sequence
  Description of Artificial Sequence: Synthetic oligonucleotide
cugagugggaugcgcucua

SEQ ID NO: 2695283 - RNA, 19 nt, Artificial Sequence
  Description of Artificial Sequence: Synthetic oligonucleotide
gcuuggcaggagacguucc

SEQ ID NO: 2695284 - RNA, 19 nt, Artificial Sequence
  Description of Artificial Sequence: Synthetic oligonucleotide
ccagcuccacugugguuac

SEQ ID NO: 2695285 - RNA, 19 nt, Artificial Sequence
  Description of Artificial Sequence: Synthetic oligonucleotide
cacccguccccuggccagg

SEQ ID NO: 2695286 - RNA, 19 nt, Artificial Sequence
  Description of Artificial Sequence: Synthetic oligonucleotide
gcguccggcgccgacuugc

SEQ ID NO: 2695287 - RNA, 19 nt, Artificial Sequence
  Description of Artificial Sequence: Synthetic oligonucleotide
gacguuccgcaggcugcac

SEQ ID NO: 2695288 - RNA, 19 nt, Artificial Sequence
  Description of Artificial Sequence: Synthetic oligonucleotide
ugaucucgucgcgggucau

SEQ ID NO: 2695289 - RNA, 19 nt, Artificial Sequence
  Description of Artificial Sequence: Synthetic oligonucleotide
agcccucagcaagggagau

SEQ ID NO: 2695290 - RNA, 19 nt, Artificial Sequence
  Description of Artificial Sequence: Synthetic oligonucleotide
cuggagccacaagggccgc

SEQ ID NO: 2695291 - RNA, 19 nt, Artificial Sequence
  Description of Artificial Sequence: Synthetic oligonucleotide
ggaucugccccagggaggu

SEQ ID NO: 2695292 - RNA, 19 nt, Artificial Sequence
  Description of Artificial Sequence: Synthetic oligonucleotide
gggagaugcucccgggaua

SEQ ID NO: 2695293 - RNA, 19 nt, Artificial Sequence
  Description of Artificial Sequence: Synthetic oligonucleotide
gaucugccccagggaggug

SEQ ID NO: 2695294 - RNA, 19 nt, Artificial Sequence
  Description of Artificial Sequence: Synthetic oligonucleotide
gaagcguccucgggaggcu

SEQ ID NO: 2695295 - RNA, 19 nt, Artificial Sequence
  Description of Artificial Sequence: Synthetic oligonucleotide
ggauacugagagcuucauu

SEQ ID NO: 2695296 - RNA, 19 nt, Artificial Sequence
  Description of Artificial Sequence: Synthetic oligonucleotide
aggagacguuccgcaggcu

SEQ ID NO: 2695297 - RNA, 19 nt, Artificial Sequence
  Description of Artificial Sequence: Synthetic oligonucleotide
cagcagugguggcggccac

SEQ ID NO: 2695298 - RNA, 19 nt, Artificial Sequence
  Description of Artificial Sequence: Synthetic oligonucleotide
gcgcccacaggugcuuggg

SEQ ID NO: 2695299 - RNA, 19 nt, Artificial Sequence
  Description of Artificial Sequence: Synthetic oligonucleotide
agccgagcuccuguaccaa

SEQ ID NO: 2695300 - RNA, 19 nt, Artificial Sequence
  Description of Artificial Sequence: Synthetic oligonucleotide
cgggaggcuuagcaggcgc

SEQ ID NO: 2695301 - RNA, 19 nt, Artificial Sequence
  Description of Artificial Sequence: Synthetic oligonucleotide
cagcuccacugugguuacg

SEQ ID NO: 2695302 - RNA, 19 nt, Artificial Sequence
  Description of Artificial Sequence: Synthetic oligonucleotide
ggcgugcucugaagcgucc

SEQ ID NO: 2695303 - RNA, 19 nt, Artificial Sequence
  Description of Artificial Sequence: Synthetic oligonucleotide
guuccgcaggcugcaccca

SEQ ID NO: 2695304 - RNA, 19 nt, Artificial Sequence
  Description of Artificial Sequence: Synthetic oligonucleotide
ccacaagggccgccagaag

SEQ ID NO: 2695305 - RNA, 19 nt, Artificial Sequence
  Description of Artificial Sequence: Synthetic oligonucleotide
ccgcaggcugcacccaaac

SEQ ID NO: 2695306 - RNA, 19 nt, Artificial Sequence
  Description of Artificial Sequence: Synthetic oligonucleotide
gcugagugggaugcgcucu

SEQ ID NO: 2695307 - RNA, 19 nt, Artificial Sequence
  Description of Artificial Sequence: Synthetic oligonucleotide
aggcgcccacaggugcuug

SEQ ID NO: 2695308 - RNA, 19 nt, Artificial Sequence
  Description of Artificial Sequence: Synthetic oligonucleotide
ucaccuccuuuaggcgauu

SEQ ID NO: 2695309 - RNA, 19 nt, Artificial Sequence
  Description of Artificial Sequence: Synthetic oligonucleotide
uccccuggccaggccucga

SEQ ID NO: 2695310 - RNA, 19 nt, Artificial Sequence
  Description of Artificial Sequence: Synthetic oligonucleotide
ccacacuaggaugcucauc

SEQ ID NO: 2695311 - RNA, 19 nt, Artificial Sequence
  Description of Artificial Sequence: Synthetic oligonucleotide
gaccccacuuccguugcuu

SEQ ID NO: 2695312 - RNA, 19 nt, Artificial Sequence
  Description of Artificial Sequence: Synthetic oligonucleotide
ggggcaccugcgcguccgg

SEQ ID NO: 2695313 - RNA, 19 nt, Artificial Sequence
  Description of Artificial Sequence: Synthetic oligonucleotide
ggucuccacccguccccug

SEQ ID NO: 2695314 - RNA, 19 nt, Artificial Sequence
  Description of Artificial Sequence: Synthetic oligonucleotide
gcgccgacuugcgauagaa

SEQ ID NO: 2695315 - RNA, 19 nt, Artificial Sequence
  Description of Artificial Sequence: Synthetic oligonucleotide
cgccgacuugcgauagaag

SEQ ID NO: 2695316 - RNA, 19 nt, Artificial Sequence
  Description of Artificial Sequence: Synthetic oligonucleotide
gcguccucgggaggcuuag

SEQ ID NO: 2695317 - RNA, 19 nt, Artificial Sequence
  Description of Artificial Sequence: Synthetic oligonucleotide
cgggauacugagagcuuca

SEQ ID NO: 2695318 - RNA, 19 nt, Artificial Sequence
  Description of Artificial Sequence: Synthetic oligonucleotide
gcccucagcaagggagaug

SEQ ID NO: 2695319 - RNA, 19 nt, Artificial Sequence
  Description of Artificial Sequence: Synthetic oligonucleotide
cgguaggugguggcggcgg

SEQ ID NO: 2695320 - RNA, 19 nt, Artificial Sequence
  Description of Artificial Sequence: Synthetic oligonucleotide
cugcgcguccggcgccgac

SEQ ID NO: 2695321 - RNA, 19 nt, Artificial Sequence
  Description of Artificial Sequence: Synthetic oligonucleotide
agcguccucgggaggcuua

SEQ ID NO: 2695322 - RNA, 19 nt, Artificial Sequence
  Description of Artificial Sequence: Synthetic oligonucleotide
cgggucgguaggugguggc

SEQ ID NO: 2695323 - RNA, 19 nt, Artificial Sequence
  Description of Artificial Sequence: Synthetic oligonucleotide
guccggcgccgacuugcga

SEQ ID NO: 2695324 - RNA, 19 nt, Artificial Sequence
  Description of Artificial Sequence: Synthetic oligonucleotide
cgcccacaggugcuugggg

SEQ ID NO: 2695325 - RNA, 19 nt, Artificial Sequence
  Description of Artificial Sequence: Synthetic oligonucleotide
ccguugcuuuuggaggcug

SEQ ID NO: 2695326 - RNA, 19 nt, Artificial Sequence
  Description of Artificial Sequence: Synthetic oligonucleotide
gaucucgucgcgggucauu

SEQ ID NO: 2695327 - RNA, 19 nt, Artificial Sequence
  Description of Artificial Sequence: Synthetic oligonucleotide
cguccggcgccgacuugcg

SEQ ID NO: 2695328 - RNA, 19 nt, Artificial Sequence
  Description of Artificial Sequence: Synthetic oligonucleotide
cggguuacgaggucggcgu

SEQ ID NO: 2695329 - RNA, 19 nt, Artificial Sequence
  Description of Artificial Sequence: Synthetic oligonucleotide
gguuccagucgggucggua

SEQ ID NO: 2695330 - RNA, 19 nt, Artificial Sequence
  Description of Artificial Sequence: Synthetic oligonucleotide
gagaugcucccgggauacu

SEQ ID NO: 2695331 - RNA, 19 nt, Artificial Sequence
  Description of Artificial Sequence: Synthetic oligonucleotide
ggcgccgacuugcgauaga

SEQ ID NO: 2695332 - RNA, 19 nt, Artificial Sequence
  Description of Artificial Sequence: Synthetic oligonucleotide
caccagguugugguacagu

SEQ ID NO: 2695333 - RNA, 19 nt, Artificial Sequence
  Description of Artificial Sequence: Synthetic oligonucleotide
cggcgugcucugaagcguc

SEQ ID NO: 2695334 - RNA, 19 nt, Artificial Sequence
  Description of Artificial Sequence: Synthetic oligonucleotide
gggauacugagagcuucau

SEQ ID NO: 2695335 - RNA, 19 nt, Artificial Sequence
  Description of Artificial Sequence: Synthetic oligonucleotide
gggcaccugcgcguccggc

SEQ ID NO: 2695336 - RNA, 19 nt, Artificial Sequence
  Description of Artificial Sequence: Synthetic oligonucleotide
ccucgaagacgguuccagu

SEQ ID NO: 2695337 - RNA, 19 nt, Artificial Sequence
  Description of Artificial Sequence: Synthetic oligonucleotide
gccacacuaggaugcucau

SEQ ID NO: 2695338 - RNA, 19 nt, Artificial Sequence
  Description of Artificial Sequence: Synthetic oligonucleotide
gcggcgguggcuggagcca

SEQ ID NO: 2695339 - RNA, 19 nt, Artificial Sequence
  Description of Artificial Sequence: Synthetic oligonucleotide
ggccucgaagacgguucca

SEQ ID NO: 2695340 - RNA, 19 nt, Artificial Sequence
  Description of Artificial Sequence: Synthetic oligonucleotide
gcucuaguuccugguaauu

SEQ ID NO: 2695341 - RNA, 19 nt, Artificial Sequence
  Description of Artificial Sequence: Synthetic oligonucleotide
gggccgccagaagcagcag

SEQ ID NO: 2695342 - RNA, 19 nt, Artificial Sequence
  Description of Artificial Sequence: Synthetic oligonucleotide
ggggucccagcuccacugu

SEQ ID NO: 2695343 - RNA, 19 nt, Artificial Sequence
  Description of Artificial Sequence: Synthetic oligonucleotide
ccacugugguuacggguua

SEQ ID NO: 2695344 - RNA, 19 nt, Artificial Sequence
  Description of Artificial Sequence: Synthetic oligonucleotide
gugcuuggcaggagacguu

SEQ ID NO: 2695345 - RNA, 19 nt, Artificial Sequence
  Description of Artificial Sequence: Synthetic oligonucleotide
cccguccccuggccaggcc

SEQ ID NO: 2695346 - RNA, 19 nt, Artificial Sequence
  Description of Artificial Sequence: Synthetic oligonucleotide
cgauagaagccgagcuccu

SEQ ID NO: 2695347 - RNA, 19 nt, Artificial Sequence
  Description of Artificial Sequence: Synthetic oligonucleotide
cgguggcuggagccacaag

SEQ ID NO: 2695348 - RNA, 19 nt, Artificial Sequence
  Description of Artificial Sequence: Synthetic oligonucleotide
cgcucuaguuccugguaau

SEQ ID NO: 2695349 - RNA, 19 nt, Artificial Sequence
  Description of Artificial Sequence: Synthetic oligonucleotide
ccggcgccgacuugcgaua

SEQ ID NO: 2695350 - RNA, 19 nt, Artificial Sequence
  Description of Artificial Sequence: Synthetic oligonucleotide
gcgugcucugaagcguccu

SEQ ID NO: 2695351 - RNA, 19 nt, Artificial Sequence
  Description of Artificial Sequence: Synthetic oligonucleotide
cguccucgggaggcuuagc

SEQ ID NO: 2695352 - RNA, 19 nt, Artificial Sequence
  Description of Artificial Sequence: Synthetic oligonucleotide
cggcgccgacuugcgauag

SEQ ID NO: 2695353 - RNA, 19 nt, Artificial Sequence
  Description of Artificial Sequence: Synthetic oligonucleotide
cgucgcgggucauuucgcu

SEQ ID NO: 2695354 - RNA, 19 nt, Artificial Sequence
  Description of Artificial Sequence: Synthetic oligonucleotide
cgagcuccuguaccaacau

SEQ ID NO: 2695355 - RNA, 19 nt, Artificial Sequence
  Description of Artificial Sequence: Synthetic oligonucleotide
gcggccacacuaggaugcu

SEQ ID NO: 2695356 - RNA, 19 nt, Artificial Sequence
  Description of Artificial Sequence: Synthetic oligonucleotide
ccugggugacaaaggccuu

SEQ ID NO: 2695357 - RNA, 19 nt, Artificial Sequence
  Description of Artificial Sequence: Synthetic oligonucleotide
ccaggccucgaagacgguu

SEQ ID NO: 2695358 - RNA, 19 nt, Artificial Sequence
  Description of Artificial Sequence: Synthetic oligonucleotide
cgcaggcugcacccaaacu

SEQ ID NO: 2695359 - RNA, 19 nt, Artificial Sequence
  Description of Artificial Sequence: Synthetic oligonucleotide
ccccacuuccguugcuuuu

SEQ ID NO: 2695360 - RNA, 19 nt, Artificial Sequence
  Description of Artificial Sequence: Synthetic oligonucleotide
ccccuggccaggccucgaa

SEQ ID NO: 2695361 - RNA, 19 nt, Artificial Sequence
  Description of Artificial Sequence: Synthetic oligonucleotide
cggccacacuaggaugcuc

SEQ ID NO: 2695362 - RNA, 19 nt, Artificial Sequence
  Description of Artificial Sequence: Synthetic oligonucleotide
cggcgguggcuggagccac

SEQ ID NO: 2695363 - RNA, 19 nt, Artificial Sequence
  Description of Artificial Sequence: Synthetic oligonucleotide
ccucagcaagggagaugcu

SEQ ID NO: 2695364 - RNA, 19 nt, Artificial Sequence
  Description of Artificial Sequence: Synthetic oligonucleotide
cccgggauacugagagcuu

SEQ ID NO: 2695365 - RNA, 19 nt, Artificial Sequence
  Description of Artificial Sequence: Synthetic oligonucleotide
gcgcguccggcgccgacuu

SEQ ID NO: 2695366 - RNA, 19 nt, Artificial Sequence
  Description of Artificial Sequence: Synthetic oligonucleotide
cgcguccggcgccgacuug

SEQ ID NO: 2695367 - RNA, 19 nt, Artificial Sequence
  Description of Artificial Sequence: Synthetic oligonucleotide
cgaggucggcgugcucuga

SEQ ID NO: 2695368 - RNA, 19 nt, Artificial Sequence
  Description of Artificial Sequence: Synthetic oligonucleotide
ccugcgcguccggcgccga

SEQ ID NO: 2695369 - RNA, 19 nt, Artificial Sequence
  Description of Artificial Sequence: Synthetic oligonucleotide
gccaggccucgaagacggu

SEQ ID NO: 2695370 - RNA, 19 nt, Artificial Sequence
  Description of Artificial Sequence: Synthetic oligonucleotide
cgguuccagucgggucggu

SEQ ID NO: 2695371 - RNA, 19 nt, Artificial Sequence
  Description of Artificial Sequence: Synthetic oligonucleotide
aaguuugcuacaaagaugc

SEQ ID NO: 2695372 - RNA, 19 nt, Artificial Sequence
  Description of Artificial Sequence: Synthetic oligonucleotide
acuauuuuagccucucggc

SEQ ID NO: 2695373 - RNA, 19 nt, Artificial Sequence
  Description of Artificial Sequence: Synthetic oligonucleotide
uaugaggacuauuuuagcc

SEQ ID NO: 2695374 - RNA, 19 nt, Artificial Sequence
  Description of Artificial Sequence: Synthetic oligonucleotide
gacuauuuuagccucucgg

SEQ ID NO: 2695375 - RNA, 19 nt, Artificial Sequence
  Description of Artificial Sequence: Synthetic oligonucleotide
aauuuccccuuucuuuagc

SEQ ID NO: 2695376 - RNA, 19 nt, Artificial Sequence
  Description of Artificial Sequence: Synthetic oligonucleotide
uuugcuacaaagaugcaua

SEQ ID NO: 2695377 - RNA, 19 nt, Artificial Sequence
  Description of Artificial Sequence: Synthetic oligonucleotide
aaagaugcauaugaggacu

SEQ ID NO: 2695378 - RNA, 19 nt, Artificial Sequence
  Description of Artificial Sequence: Synthetic oligonucleotide
auaugaggacuauuuuagc

SEQ ID NO: 2695379 - RNA, 19 nt, Artificial Sequence
  Description of Artificial Sequence: Synthetic oligonucleotide
ucauccucuucauaucggg

SEQ ID NO: 2695380 - RNA, 19 nt, Artificial Sequence
  Description of Artificial Sequence: Synthetic oligonucleotide
aaauuuccccuuucuuuag

SEQ ID NO: 2695381 - RNA, 19 nt, Artificial Sequence
  Description of Artificial Sequence: Synthetic oligonucleotide
augaggacuauuuuagccu

SEQ ID NO: 2695382 - RNA, 19 nt, Artificial Sequence
  Description of Artificial Sequence: Synthetic oligonucleotide
gcuacaaagaugcauauga

SEQ ID NO: 2695383 - RNA, 19 nt, Artificial Sequence
  Description of Artificial Sequence: Synthetic oligonucleotide
caaguuugcuacaaagaug

SEQ ID NO: 2695384 - RNA, 19 nt, Artificial Sequence
  Description of Artificial Sequence: Synthetic oligonucleotide
cuacaaagaugcauaugag

SEQ ID NO: 2695385 - RNA, 19 nt, Artificial Sequence
  Description of Artificial Sequence: Synthetic oligonucleotide
caaagaugcauaugaggac

SEQ ID NO: 2695386 - RNA, 19 nt, Artificial Sequence
  Description of Artificial Sequence: Synthetic oligonucleotide
cucucggcaaguuugcuac

SEQ ID NO: 2695387 - RNA, 19 nt, Artificial Sequence
  Description of Artificial Sequence: Synthetic oligonucleotide
aucggguuuuccuuuagcu

SEQ ID NO: 2695388 - RNA, 19 nt, Artificial Sequence
  Description of Artificial Sequence: Synthetic oligonucleotide
uuccuuuagcucuguaagc

SEQ ID NO: 2695389 - RNA, 19 nt, Artificial Sequence
  Description of Artificial Sequence: Synthetic oligonucleotide
uauuuuagccucucggcuu

SEQ ID NO: 2695390 - RNA, 19 nt, Artificial Sequence
  Description of Artificial Sequence: Synthetic oligonucleotide
ugaggacuauuuuagccuc

SEQ ID NO: 2695391 - RNA, 19 nt, Artificial Sequence
  Description of Artificial Sequence: Synthetic oligonucleotide
uuccccuuucuuuagcaga

SEQ ID NO: 2695392 - RNA, 19 nt, Artificial Sequence
  Description of Artificial Sequence: Synthetic oligonucleotide
uugaacuucuuuuggucuc

SEQ ID NO: 2695393 - RNA, 19 nt, Artificial Sequence
  Description of Artificial Sequence: Synthetic oligonucleotide
uuuccccuuucuuuagcag

SEQ ID NO: 2695394 - RNA, 19 nt, Artificial Sequence
  Description of Artificial Sequence: Synthetic oligonucleotide
uucauaucggguuuuccuu

SEQ ID NO: 2695395 - RNA, 19 nt, Artificial Sequence
  Description of Artificial Sequence: Synthetic oligonucleotide
uccuugaacuucuuuuggu

SEQ ID NO: 2695396 - RNA, 19 nt, Artificial Sequence
  Description of Artificial Sequence: Synthetic oligonucleotide
auuuccccuuucuuuagca

SEQ ID NO: 2695397 - RNA, 19 nt, Artificial Sequence
  Description of Artificial Sequence: Synthetic oligonucleotide
uaucggguuuuccuuuagc

SEQ ID NO: 2695398 - RNA, 19 nt, Artificial Sequence
  Description of Artificial Sequence: Synthetic oligonucleotide
uccccuuucuuuagcagac

SEQ ID NO: 2695399 - RNA, 19 nt, Artificial Sequence
  Description of Artificial Sequence: Synthetic oligonucleotide
cucauccucuucauaucgg

SEQ ID NO: 2695400 - RNA, 19 nt, Artificial Sequence
  Description of Artificial Sequence: Synthetic oligonucleotide
uagccucucggcuucuuag

SEQ ID NO: 2695401 - RNA, 19 nt, Artificial Sequence
  Description of Artificial Sequence: Synthetic oligonucleotide
ugcauaugaggacuauuuu

SEQ ID NO: 2695402 - RNA, 19 nt, Artificial Sequence
  Description of Artificial Sequence: Synthetic oligonucleotide
caaauuuccccuuucuuua

SEQ ID NO: 2695403 - RNA, 19 nt, Artificial Sequence
  Description of Artificial Sequence: Synthetic oligonucleotide
ugaacuucuuuuggucucc

SEQ ID NO: 2695404 - RNA, 19 nt, Artificial Sequence
  Description of Artificial Sequence: Synthetic oligonucleotide
ucggguuuuccuuuagcuc

SEQ ID NO: 2695405 - RNA, 19 nt, Artificial Sequence
  Description of Artificial Sequence: Synthetic oligonucleotide
ucuuuuggucuccccuuug

SEQ ID NO: 2695406 - RNA, 19 nt, Artificial Sequence
  Description of Artificial Sequence: Synthetic oligonucleotide
ucuucauaucggguuuucc

SEQ ID NO: 2695407 - RNA, 19 nt, Artificial Sequence
  Description of Artificial Sequence: Synthetic oligonucleotide
auccucuucauaucggguu

SEQ ID NO: 2695408 - RNA, 19 nt, Artificial Sequence
  Description of Artificial Sequence: Synthetic oligonucleotide
ucauaucggguuuuccuuu

SEQ ID NO: 2695409 - RNA, 19 nt, Artificial Sequence
  Description of Artificial Sequence: Synthetic oligonucleotide
ugcuacaaagaugcauaug

SEQ ID NO: 2695410 - RNA, 19 nt, Artificial Sequence
  Description of Artificial Sequence: Synthetic oligonucleotide
auaucggguuuuccuuuag

SEQ ID NO: 2695411 - RNA, 19 nt, Artificial Sequence
  Description of Artificial Sequence: Synthetic oligonucleotide
aggacuauuuuagccucuc

SEQ ID NO: 2695412 - RNA, 19 nt, Artificial Sequence
  Description of Artificial Sequence: Synthetic oligonucleotide
uccucuucauaucggguuu

SEQ ID NO: 2695413 - RNA, 19 nt, Artificial Sequence
  Description of Artificial Sequence: Synthetic oligonucleotide
uugcuacaaagaugcauau

SEQ ID NO: 2695414 - RNA, 19 nt, Artificial Sequence
  Description of Artificial Sequence: Synthetic oligonucleotide
cuucauaucggguuuuccu

SEQ ID NO: 2695415 - RNA, 19 nt, Artificial Sequence
  Description of Artificial Sequence: Synthetic oligonucleotide
cuugaacuucuuuuggucu

SEQ ID NO: 2695416 - RNA, 19 nt, Artificial Sequence
  Description of Artificial Sequence: Synthetic oligonucleotide
ccucauccucuucauaucg

SEQ ID NO: 2695417 - RNA, 19 nt, Artificial Sequence
  Description of Artificial Sequence: Synthetic oligonucleotide
uccucauccucuucauauc

SEQ ID NO: 2695418 - RNA, 19 nt, Artificial Sequence
  Description of Artificial Sequence: Synthetic oligonucleotide
cuauuuuagccucucggcu

SEQ ID NO: 2695419 - RNA, 19 nt, Artificial Sequence
  Description of Artificial Sequence: Synthetic oligonucleotide
uucuuuuggucuccccuuu

SEQ ID NO: 2695420 - RNA, 19 nt, Artificial Sequence
  Description of Artificial Sequence: Synthetic oligonucleotide
ccuugaacuucuuuugguc

SEQ ID NO: 2695421 - RNA, 19 nt, Artificial Sequence
  Description of Artificial Sequence: Synthetic oligonucleotide
ggacuauuuuagccucucg

SEQ ID NO: 2695422 - RNA, 19 nt, Artificial Sequence
  Description of Artificial Sequence: Synthetic oligonucleotide
uuagccucucggcuucuua

SEQ ID NO: 2695423 - RNA, 19 nt, Artificial Sequence
  Description of Artificial Sequence: Synthetic oligonucleotide
gcaaguuugcuacaaagau

SEQ ID NO: 2695424 - RNA, 19 nt, Artificial Sequence
  Description of Artificial Sequence: Synthetic oligonucleotide
ucggcaaguuugcuacaaa

SEQ ID NO: 2695425 - RNA, 19 nt, Artificial Sequence
  Description of Artificial Sequence: Synthetic oligonucleotide
aagaugcauaugaggacua

SEQ ID NO: 2695426 - RNA, 19 nt, Artificial Sequence
  Description of Artificial Sequence: Synthetic oligonucleotide
ggcaaguuugcuacaaaga

SEQ ID NO: 2695427 - RNA, 19 nt, Artificial Sequence
  Description of Artificial Sequence: Synthetic oligonucleotide
gaacuucuuuuggucuccc

SEQ ID NO: 2695428 - RNA, 19 nt, Artificial Sequence
  Description of Artificial Sequence: Synthetic oligonucleotide
guuugcuacaaagaugcau

SEQ ID NO: 2695429 - RNA, 19 nt, Artificial Sequence
  Description of Artificial Sequence: Synthetic oligonucleotide
ccuuucuuuagcagacaug

SEQ ID NO: 2695430 - RNA, 19 nt, Artificial Sequence
  Description of Artificial Sequence: Synthetic oligonucleotide
ucucggcaaguuugcuaca

SEQ ID NO: 2695431 - RNA, 19 nt, Artificial Sequence
  Description of Artificial Sequence: Synthetic oligonucleotide
cggcaaguuugcuacaaag

SEQ ID NO: 2695432 - RNA, 19 nt, Artificial Sequence
  Description of Artificial Sequence: Synthetic oligonucleotide
cauaucggguuuuccuuua

SEQ ID NO: 2695433 - RNA, 19 nt, Artificial Sequence
  Description of Artificial Sequence: Synthetic oligonucleotide
agaugcauaugaggacuau

SEQ ID NO: 2695434 - RNA, 19 nt, Artificial Sequence
  Description of Artificial Sequence: Synthetic oligonucleotide
cucuucauaucggguuuuc

SEQ ID NO: 2695435 - RNA, 19 nt, Artificial Sequence
  Description of Artificial Sequence: Synthetic oligonucleotide
gaugcauaugaggacuauu

SEQ ID NO: 2695436 - RNA, 19 nt, Artificial Sequence
  Description of Artificial Sequence: Synthetic oligonucleotide
cucaaauuuccccuuucuu

SEQ ID NO: 2695437 - RNA, 19 nt, Artificial Sequence
  Description of Artificial Sequence: Synthetic oligonucleotide
uuuuagccucucggcuucu

SEQ ID NO: 2695438 - RNA, 19 nt, Artificial Sequence
  Description of Artificial Sequence: Synthetic oligonucleotide
aguuugcuacaaagaugca

SEQ ID NO: 2695439 - RNA, 19 nt, Artificial Sequence
  Description of Artificial Sequence: Synthetic oligonucleotide
cauccucuucauaucgggu

SEQ ID NO: 2695440 - RNA, 19 nt, Artificial Sequence
  Description of Artificial Sequence: Synthetic oligonucleotide
cucggcaaguuugcuacaa

SEQ ID NO: 2695441 - RNA, 19 nt, Artificial Sequence
  Description of Artificial Sequence: Synthetic oligonucleotide
uuuagccucucggcuucuu

SEQ ID NO: 2695442 - RNA, 19 nt, Artificial Sequence
  Description of Artificial Sequence: Synthetic oligonucleotide
gaggacuauuuuagccucu

SEQ ID NO: 2695443 - RNA, 19 nt, Artificial Sequence
  Description of Artificial Sequence: Synthetic oligonucleotide
cccuuucuuuagcagacau

SEQ ID NO: 2695444 - RNA, 19 nt, Artificial Sequence
  Description of Artificial Sequence: Synthetic oligonucleotide
gguuuuccuuuagcucugu

SEQ ID NO: 2695445 - RNA, 19 nt, Artificial Sequence
  Description of Artificial Sequence: Synthetic oligonucleotide
ccccuuucuuuagcagaca

SEQ ID NO: 2695446 - RNA, 19 nt, Artificial Sequence
  Description of Artificial Sequence: Synthetic oligonucleotide
ccucuucauaucggguuuu

SEQ ID NO: 2695447 - RNA, 19 nt, Artificial Sequence
  Description of Artificial Sequence: Synthetic oligonucleotide
uucuucauaaaccaguugg

SEQ ID NO: 2695448 - RNA, 19 nt, Artificial Sequence
  Description of Artificial Sequence: Synthetic oligonucleotide
aaucacgccauucuucagc

SEQ ID NO: 2695449 - RNA, 19 nt, Artificial Sequence
  Description of Artificial Sequence: Synthetic oligonucleotide
aauccacuccacuagccgc

SEQ ID NO: 2695450 - RNA, 19 nt, Artificial Sequence
  Description of Artificial Sequence: Synthetic oligonucleotide
ugcuugaagaccauggaag

SEQ ID NO: 2695451 - RNA, 19 nt, Artificial Sequence
  Description of Artificial Sequence: Synthetic oligonucleotide
ugcauuacaauccacucca

SEQ ID NO: 2695452 - RNA, 19 nt, Artificial Sequence
  Description of Artificial Sequence: Synthetic oligonucleotide
gauccuucaggauacaggc

SEQ ID NO: 2695453 - RNA, 19 nt, Artificial Sequence
  Description of Artificial Sequence: Synthetic oligonucleotide
ucuucauaaaccaguuggg

SEQ ID NO: 2695454 - RNA, 19 nt, Artificial Sequence
  Description of Artificial Sequence: Synthetic oligonucleotide
aaugacgugcuuccccucc

SEQ ID NO: 2695455 - RNA, 19 nt, Artificial Sequence
  Description of Artificial Sequence: Synthetic oligonucleotide
ugucuuugccuucaaagag

SEQ ID NO: 2695456 - RNA, 19 nt, Artificial Sequence
  Description of Artificial Sequence: Synthetic oligonucleotide
uuuggacuguacuucacgg

SEQ ID NO: 2695457 - RNA, 19 nt, Artificial Sequence
  Description of Artificial Sequence: Synthetic oligonucleotide
uuuuggacuguacuucacg

SEQ ID NO: 2695458 - RNA, 19 nt, Artificial Sequence
  Description of Artificial Sequence: Synthetic oligonucleotide
  modified_base (16)..(16): a, c, u, g, unknown or other
ucuaacugaugaucunccg

SEQ ID NO: 2695459 - RNA, 19 nt, Artificial Sequence
  Description of Artificial Sequence: Synthetic oligonucleotide
uguacuucacggcucaugc

SEQ ID NO: 2695460 - RNA, 19 nt, Artificial Sequence
  Description of Artificial Sequence: Synthetic oligonucleotide
ugugaacucccucuuaugc

SEQ ID NO: 2695461 - RNA, 19 nt, Artificial Sequence
  Description of Artificial Sequence: Synthetic oligonucleotide
ucaacagucuggaacaugu

SEQ ID NO: 2695462 - RNA, 19 nt, Artificial Sequence
  Description of Artificial Sequence: Synthetic oligonucleotide
gaacaugucagucuuggug

SEQ ID NO: 2695463 - RNA, 19 nt, Artificial Sequence
  Description of Artificial Sequence: Synthetic oligonucleotide
aagguggauucucaggcac

SEQ ID NO: 2695464 - RNA, 19 nt, Artificial Sequence
  Description of Artificial Sequence: Synthetic oligonucleotide
uuacaauccacuccacuag

SEQ ID NO: 2695465 - RNA, 19 nt, Artificial Sequence
  Description of Artificial Sequence: Synthetic oligonucleotide
uucuucucaauuuuggacu

SEQ ID NO: 2695466 - RNA, 19 nt, Artificial Sequence
  Description of Artificial Sequence: Synthetic oligonucleotide
auacaggcuauucaccagc

SEQ ID NO: 2695467 - RNA, 19 nt, Artificial Sequence
  Description of Artificial Sequence: Synthetic oligonucleotide
auaggauggaccuuuguug

SEQ ID NO: 2695468 - RNA, 19 nt, Artificial Sequence
  Description of Artificial Sequence: Synthetic oligonucleotide
uuggucaccgccaagcugc

SEQ ID NO: 2695469 - RNA, 19 nt, Artificial Sequence
  Description of Artificial Sequence: Synthetic oligonucleotide
caucugaaggccaaugacg

SEQ ID NO: 2695470 - RNA, 19 nt, Artificial Sequence
  Description of Artificial Sequence: Synthetic oligonucleotide
aauuuuggacuguacuuca

SEQ ID NO: 2695471 - RNA, 19 nt, Artificial Sequence
  Description of Artificial Sequence: Synthetic oligonucleotide
uuguuggccauguugaggc

SEQ ID NO: 2695472 - RNA, 19 nt, Artificial Sequence
  Description of Artificial Sequence: Synthetic oligonucleotide
uucucaggcaccuucacug

SEQ ID NO: 2695473 - RNA, 19 nt, Artificial Sequence
  Description of Artificial Sequence: Synthetic oligonucleotide
ucauaaaccaguugggauc

SEQ ID NO: 2695474 - RNA, 19 nt, Artificial Sequence
  Description of Artificial Sequence: Synthetic oligonucleotide
ugaagaccauggaaggugg

SEQ ID NO: 2695475 - RNA, 19 nt, Artificial Sequence
  Description of Artificial Sequence: Synthetic oligonucleotide
acugcauuacaauccacuc

SEQ ID NO: 2695476 - RNA, 19 nt, Artificial Sequence
  Description of Artificial Sequence: Synthetic oligonucleotide
  modified_base (15)..(15): a, c, u, g, unknown or other
cuaacugaugaucunccgg

SEQ ID NO: 2695477 - RNA, 19 nt, Artificial Sequence
  Description of Artificial Sequence: Synthetic oligonucleotide
gaauugagccaccuguucc

SEQ ID NO: 2695478 - RNA, 19 nt, Artificial Sequence
  Description of Artificial Sequence: Synthetic oligonucleotide
aucacgccauucuucagcc

SEQ ID NO: 2695479 - RNA, 19 nt, Artificial Sequence
  Description of Artificial Sequence: Synthetic oligonucleotide
cuuggugacuccauagucc

SEQ ID NO: 2695480 - RNA, 19 nt, Artificial Sequence
  Description of Artificial Sequence: Synthetic oligonucleotide
gaggucaacagucuggaac

SEQ ID NO: 2695481 - RNA, 19 nt, Artificial Sequence
  Description of Artificial Sequence: Synthetic oligonucleotide
aauugagccaccuguucca

SEQ ID NO: 2695482 - RNA, 19 nt, Artificial Sequence
  Description of Artificial Sequence: Synthetic oligonucleotide
uuccccuucuaacugauga

SEQ ID NO: 2695483 - RNA, 19 nt, Artificial Sequence
  Description of Artificial Sequence: Synthetic oligonucleotide
uacuucacggcucaugcca

SEQ ID NO: 2695484 - RNA, 19 nt, Artificial Sequence
  Description of Artificial Sequence: Synthetic oligonucleotide
aaagccauuagaguccucu

SEQ ID NO: 2695485 - RNA, 19 nt, Artificial Sequence
  Description of Artificial Sequence: Synthetic oligonucleotide
cuauucaccagcuugcuca

SEQ ID NO: 2695486 - RNA, 19 nt, Artificial Sequence
  Description of Artificial Sequence: Synthetic oligonucleotide
auuacaauccacuccacua

SEQ ID NO: 2695487 - RNA, 19 nt, Artificial Sequence
  Description of Artificial Sequence: Synthetic oligonucleotide
agccauuagaguccucugc

SEQ ID NO: 2695488 - RNA, 19 nt, Artificial Sequence
  Description of Artificial Sequence: Synthetic oligonucleotide
  modified_base (10)..(10): a, c, u, g, unknown or other
ugaugaucunccggggucg

SEQ ID NO: 2695489 - RNA, 19 nt, Artificial Sequence
  Description of Artificial Sequence: Synthetic oligonucleotide
ucaauuuuggacuguacuu

SEQ ID NO: 2695490 - RNA, 19 nt, Artificial Sequence
  Description of Artificial Sequence: Synthetic oligonucleotide
auuagaguccucugcacug

SEQ ID NO: 2695491 - RNA, 19 nt, Artificial Sequence
  Description of Artificial Sequence: Synthetic oligonucleotide
cacaucagggccuaacugc

SEQ ID NO: 2695492 - RNA, 19 nt, Artificial Sequence
  Description of Artificial Sequence: Synthetic oligonucleotide
uggaacaugucagucuugg

SEQ ID NO: 2695493 - RNA, 19 nt, Artificial Sequence
  Description of Artificial Sequence: Synthetic oligonucleotide
aggccaaugacgugcuucc

SEQ ID NO: 2695494 - RNA, 19 nt, Artificial Sequence
  Description of Artificial Sequence: Synthetic oligonucleotide
uucauaaaccaguugggau

SEQ ID NO: 2695495 - RNA, 19 nt, Artificial Sequence
  Description of Artificial Sequence: Synthetic oligonucleotide
uggacuguacuucacggcu

SEQ ID NO: 2695496 - RNA, 19 nt, Artificial Sequence
  Description of Artificial Sequence: Synthetic oligonucleotide
agaaucacgccauucuuca

SEQ ID NO: 2695497 - RNA, 19 nt, Artificial Sequence
  Description of Artificial Sequence: Synthetic oligonucleotide
uugaagaccauggaaggug

SEQ ID NO: 2695498 - RNA, 19 nt, Artificial Sequence
  Description of Artificial Sequence: Synthetic oligonucleotide
uuuguuggccauguugagg

SEQ ID NO: 2695499 - RNA, 19 nt, Artificial Sequence
  Description of Artificial Sequence: Synthetic oligonucleotide
aaggccaaugacgugcuuc

SEQ ID NO: 2695500 - RNA, 19 nt, Artificial Sequence
  Description of Artificial Sequence: Synthetic oligonucleotide
cuuggauccuucaggauac

SEQ ID NO: 2695501 - RNA, 19 nt, Artificial Sequence
  Description of Artificial Sequence: Synthetic oligonucleotide
uggaagguggauucucagg

SEQ ID NO: 2695502 - RNA, 19 nt, Artificial Sequence
  Description of Artificial Sequence: Synthetic oligonucleotide
caggauacaggcuauucac

SEQ ID NO: 2695503 - RNA, 19 nt, Artificial Sequence
  Description of Artificial Sequence: Synthetic oligonucleotide
ugccuucaggaauugagcc

SEQ ID NO: 2695504 - RNA, 19 nt, Artificial Sequence
  Description of Artificial Sequence: Synthetic oligonucleotide
ucuucucaauuuuggacug

SEQ ID NO: 2695505 - RNA, 19 nt, Artificial Sequence
  Description of Artificial Sequence: Synthetic oligonucleotide
cugcccaaagccauuagag

SEQ ID NO: 2695506 - RNA, 19 nt, Artificial Sequence
  Description of Artificial Sequence: Synthetic oligonucleotide
gauacaggcuauucaccag

SEQ ID NO: 2695507 - RNA, 19 nt, Artificial Sequence
  Description of Artificial Sequence: Synthetic oligonucleotide
aacugcauuacaauccacu

SEQ ID NO: 2695508 - RNA, 19 nt, Artificial Sequence
  Description of Artificial Sequence: Synthetic oligonucleotide
ccuaacugcauuacaaucc

SEQ ID NO: 2695509 - RNA, 19 nt, Artificial Sequence
  Description of Artificial Sequence: Synthetic oligonucleotide
uccuucaggauacaggcua

SEQ ID NO: 2695510 - RNA, 19 nt, Artificial Sequence
  Description of Artificial Sequence: Synthetic oligonucleotide
accuuuguuggccauguug

SEQ ID NO: 2695511 - RNA, 19 nt, Artificial Sequence
  Description of Artificial Sequence: Synthetic oligonucleotide
agucuuggugacuccauag

SEQ ID NO: 2695512 - RNA, 19 nt, Artificial Sequence
  Description of Artificial Sequence: Synthetic oligonucleotide
ugagccaccuguuccaucu

SEQ ID NO: 2695513 - RNA, 19 nt, Artificial Sequence
  Description of Artificial Sequence: Synthetic oligonucleotide
  modified_base (7)..(7): a, c, u, g, unknown or other
ugaucunccggggucgucc

SEQ ID NO: 2695514 - RNA, 19 nt, Artificial Sequence
  Description of Artificial Sequence: Synthetic oligonucleotide
uacaauccacuccacuagc

SEQ ID NO: 2695515 - RNA, 19 nt, Artificial Sequence
  Description of Artificial Sequence: Synthetic oligonucleotide
ggaagguggauucucaggc

SEQ ID NO: 2695516 - RNA, 19 nt, Artificial Sequence
  Description of Artificial Sequence: Synthetic oligonucleotide
agcuugcucagaaucacgc

SEQ ID NO: 2695517 - RNA, 19 nt, Artificial Sequence
  Description of Artificial Sequence: Synthetic oligonucleotide
caggcuauucaccagcuug

SEQ ID NO: 2695518 - RNA, 19 nt, Artificial Sequence
  Description of Artificial Sequence: Synthetic oligonucleotide
ucugugaacucccucuuau

SEQ ID NO: 2695519 - RNA, 19 nt, Artificial Sequence
  Description of Artificial Sequence: Synthetic oligonucleotide
uccucagcugccuucagga

SEQ ID NO: 2695520 - RNA, 19 nt, Artificial Sequence
  Description of Artificial Sequence: Synthetic oligonucleotide
cuccauaguccucagcugc

SEQ ID NO: 2695521 - RNA, 19 nt, Artificial Sequence
  Description of Artificial Sequence: Synthetic oligonucleotide
uuggugacuccauaguccu

SEQ ID NO: 2695522 - RNA, 19 nt, Artificial Sequence
  Description of Artificial Sequence: Synthetic oligonucleotide
cugcauuacaauccacucc

SEQ ID NO: 2695523 - RNA, 19 nt, Artificial Sequence
  Description of Artificial Sequence: Synthetic oligonucleotide
ugggcggcccacaucaggg

SEQ ID NO: 2695524 - RNA, 19 nt, Artificial Sequence
  Description of Artificial Sequence: Synthetic oligonucleotide
ucaucauacuucuucucaa

SEQ ID NO: 2695525 - RNA, 19 nt, Artificial Sequence
  Description of Artificial Sequence: Synthetic oligonucleotide
guaguguccaucauucuug

SEQ ID NO: 2695526 - RNA, 19 nt, Artificial Sequence
  Description of Artificial Sequence: Synthetic oligonucleotide
caauccacuccacuagccg

SEQ ID NO: 2695527 - RNA, 19 nt, Artificial Sequence
  Description of Artificial Sequence: Synthetic oligonucleotide
ucuucagccacaccuggaa

SEQ ID NO: 2695528 - RNA, 19 nt, Artificial Sequence
  Description of Artificial Sequence: Synthetic oligonucleotide
uucuuggucaccgccaagc

SEQ ID NO: 2695529 - RNA, 19 nt, Artificial Sequence
  Description of Artificial Sequence: Synthetic oligonucleotide
ucaugccauaggauggacc

SEQ ID NO: 2695530 - RNA, 19 nt, Artificial Sequence
  Description of Artificial Sequence: Synthetic oligonucleotide
acgguaguguccaucauuc

SEQ ID NO: 2695531 - RNA, 19 nt, Artificial Sequence
  Description of Artificial Sequence: Synthetic oligonucleotide
aucugggcggcccacauca

SEQ ID NO: 2695532 - RNA, 19 nt, Artificial Sequence
  Description of Artificial Sequence: Synthetic oligonucleotide
gacgcccacgaucugggcg

SEQ ID NO: 2695533 - RNA, 19 nt, Artificial Sequence
  Description of Artificial Sequence: Synthetic oligonucleotide
caauuuuggacuguacuuc

SEQ ID NO: 2695534 - RNA, 19 nt, Artificial Sequence
  Description of Artificial Sequence: Synthetic oligonucleotide
aagaggucaacagucugga

SEQ ID NO: 2695535 - RNA, 19 nt, Artificial Sequence
  Description of Artificial Sequence: Synthetic oligonucleotide
augucagucuuggugacuc

SEQ ID NO: 2695536 - RNA, 19 nt, Artificial Sequence
  Description of Artificial Sequence: Synthetic oligonucleotide
  modified_base (13)..(13): a, c, u, g, unknown or other
aacugaugaucunccgggg

SEQ ID NO: 2695537 - RNA, 19 nt, Artificial Sequence
  Description of Artificial Sequence: Synthetic oligonucleotide
gcuugaagaccauggaagg

SEQ ID NO: 2695538 - RNA, 19 nt, Artificial Sequence
  Description of Artificial Sequence: Synthetic oligonucleotide
gacuccauaguccucagcu

SEQ ID NO: 2695539 - RNA, 19 nt, Artificial Sequence
  Description of Artificial Sequence: Synthetic oligonucleotide
aggauacaggcuauucacc

SEQ ID NO: 2695540 - RNA, 19 nt, Artificial Sequence
  Description of Artificial Sequence: Synthetic oligonucleotide
uuggacuguacuucacggc

SEQ ID NO: 2695541 - RNA, 19 nt, Artificial Sequence
  Description of Artificial Sequence: Synthetic oligonucleotide
aggcuauucaccagcuugc

SEQ ID NO: 2695542 - RNA, 19 nt, Artificial Sequence
  Description of Artificial Sequence: Synthetic oligonucleotide
aggauggaccuuuguuggc

SEQ ID NO: 2695543 - RNA, 19 nt, Artificial Sequence
  Description of Artificial Sequence: Synthetic oligonucleotide
ucaggaauugagccaccug

SEQ ID NO: 2695544 - RNA, 19 nt, Artificial Sequence
  Description of Artificial Sequence: Synthetic oligonucleotide
ucucaggcaccuucacugg

SEQ ID NO: 2695545 - RNA, 19 nt, Artificial Sequence
  Description of Artificial Sequence: Synthetic oligonucleotide
ugacucucugugaacuccc

SEQ ID NO: 2695546 - RNA, 19 nt, Artificial Sequence
  Description of Artificial Sequence: Synthetic oligonucleotide
aagccauuagaguccucug

SEQ ID NO: 2695547 - RNA, 19 nt, Artificial Sequence
  Description of Artificial Sequence: Synthetic oligonucleotide
cugccuucaggaauugagc

SEQ ID NO: 2695548 - RNA, 19 nt, Artificial Sequence
  Description of Artificial Sequence: Synthetic oligonucleotide
aguugacucucugugaacu

SEQ ID NO: 2695549 - RNA, 19 nt, Artificial Sequence
  Description of Artificial Sequence: Synthetic oligonucleotide
guuccaucugcuugaagac

SEQ ID NO: 2695550 - RNA, 19 nt, Artificial Sequence
  Description of Artificial Sequence: Synthetic oligonucleotide
agcccagacgcccacgauc

SEQ ID NO: 2695551 - RNA, 19 nt, Artificial Sequence
  Description of Artificial Sequence: Synthetic oligonucleotide
cuugcucagaaucacgcca

SEQ ID NO: 2695552 - RNA, 19 nt, Artificial Sequence
  Description of Artificial Sequence: Synthetic oligonucleotide
ucagaaucacgccauucuu

SEQ ID NO: 2695553 - RNA, 19 nt, Artificial Sequence
  Description of Artificial Sequence: Synthetic oligonucleotide
agccaccuguuccaucugc

SEQ ID NO: 2695554 - RNA, 19 nt, Artificial Sequence
  Description of Artificial Sequence: Synthetic oligonucleotide
cuaacugcauuacaaucca

SEQ ID NO: 2695555 - RNA, 19 nt, Artificial Sequence
  Description of Artificial Sequence: Synthetic oligonucleotide
cugcaguugacucucugug

SEQ ID NO: 2695556 - RNA, 19 nt, Artificial Sequence
  Description of Artificial Sequence: Synthetic oligonucleotide
auagccugucaugccagcc

SEQ ID NO: 2695557 - RNA, 19 nt, Artificial Sequence
  Description of Artificial Sequence: Synthetic oligonucleotide
ucucaauuuuggacuguac

SEQ ID NO: 2695558 - RNA, 19 nt, Artificial Sequence
  Description of Artificial Sequence: Synthetic oligonucleotide
caaagaggucaacagucug

SEQ ID NO: 2695559 - RNA, 19 nt, Artificial Sequence
  Description of Artificial Sequence: Synthetic oligonucleotide
acgcccacgaucugggcgg

SEQ ID NO: 2695560 - RNA, 19 nt, Artificial Sequence
  Description of Artificial Sequence: Synthetic oligonucleotide
ccuucaaagaggucaacag

SEQ ID NO: 2695561 - RNA, 19 nt, Artificial Sequence
  Description of Artificial Sequence: Synthetic oligonucleotide
ucguccauagccugucaug

SEQ ID NO: 2695562 - RNA, 19 nt, Artificial Sequence
  Description of Artificial Sequence: Synthetic oligonucleotide
ugcaguugacucucuguga

SEQ ID NO: 2695563 - RNA, 19 nt, Artificial Sequence
  Description of Artificial Sequence: Synthetic oligonucleotide
agucuggaacaugucaguc

SEQ ID NO: 2695564 - RNA, 19 nt, Artificial Sequence
  Description of Artificial Sequence: Synthetic oligonucleotide
aucugaaggccaaugacgu

SEQ ID NO: 2695565 - RNA, 19 nt, Artificial Sequence
  Description of Artificial Sequence: Synthetic oligonucleotide
cacgccauucuucagccac

SEQ ID NO: 2695566 - RNA, 19 nt, Artificial Sequence
  Description of Artificial Sequence: Synthetic oligonucleotide
ucaggcaccuucacuggcu

SEQ ID NO: 2695567 - RNA, 19 nt, Artificial Sequence
  Description of Artificial Sequence: Synthetic oligonucleotide
ccaguugggaucuccacgg

SEQ ID NO: 2695568 - RNA, 19 nt, Artificial Sequence
  Description of Artificial Sequence: Synthetic oligonucleotide
  modified_base (11)..(11): a, c, u, g, unknown or other
cugaugaucunccgggguc

SEQ ID NO: 2695569 - RNA, 19 nt, Artificial Sequence
  Description of Artificial Sequence: Synthetic oligonucleotide
uacaggcuauucaccagcu

SEQ ID NO: 2695570 - RNA, 19 nt, Artificial Sequence
  Description of Artificial Sequence: Synthetic oligonucleotide
uuagaguccucugcacugc

SEQ ID NO: 2695571 - RNA, 19 nt, Artificial Sequence
  Description of Artificial Sequence: Synthetic oligonucleotide
ugaaggccaaugacgugcu

SEQ ID NO: 2695572 - RNA, 19 nt, Artificial Sequence
  Description of Artificial Sequence: Synthetic oligonucleotide
acucucugugaacucccuc

SEQ ID NO: 2695573 - RNA, 19 nt, Artificial Sequence
  Description of Artificial Sequence: Synthetic oligonucleotide
acuccauaguccucagcug

SEQ ID NO: 2695574 - RNA, 19 nt, Artificial Sequence
  Description of Artificial Sequence: Synthetic oligonucleotide
ucaugccagccugugaggc

SEQ ID NO: 2695575 - RNA, 19 nt, Artificial Sequence
  Description of Artificial Sequence: Synthetic oligonucleotide
ggauacaggcuauucacca

SEQ ID NO: 2695576 - RNA, 19 nt, Artificial Sequence
  Description of Artificial Sequence: Synthetic oligonucleotide
uugcucagaaucacgccau

SEQ ID NO: 2695577 - RNA, 19 nt, Artificial Sequence
  Description of Artificial Sequence: Synthetic oligonucleotide
ucccucuuaugcuccuggg

SEQ ID NO: 2695578 - RNA, 19 nt, Artificial Sequence
  Description of Artificial Sequence: Synthetic oligonucleotide
uagccugucaugccagccu

SEQ ID NO: 2695579 - RNA, 19 nt, Artificial Sequence
  Description of Artificial Sequence: Synthetic oligonucleotide
gaaucacgccauucuucag

SEQ ID NO: 2695580 - RNA, 19 nt, Artificial Sequence
  Description of Artificial Sequence: Synthetic oligonucleotide
uucacggcucaugccauag

SEQ ID NO: 2695581 - RNA, 19 nt, Artificial Sequence
  Description of Artificial Sequence: Synthetic oligonucleotide
uccacuagccgcuccucca

SEQ ID NO: 2695582 - RNA, 19 nt, Artificial Sequence
  Description of Artificial Sequence: Synthetic oligonucleotide
caugccauaggauggaccu

SEQ ID NO: 2695583 - RNA, 19 nt, Artificial Sequence
  Description of Artificial Sequence: Synthetic oligonucleotide
uugcugcccaucugaaggc

SEQ ID NO: 2695584 - RNA, 19 nt, Artificial Sequence
  Description of Artificial Sequence: Synthetic oligonucleotide
aagaccauggaagguggau

SEQ ID NO: 2695585 - RNA, 19 nt, Artificial Sequence
  Description of Artificial Sequence: Synthetic oligonucleotide
cucaauuuuggacuguacu

SEQ ID NO: 2695586 - RNA, 19 nt, Artificial Sequence
  Description of Artificial Sequence: Synthetic oligonucleotide
caccagcuugcucagaauc

SEQ ID NO: 2695587 - RNA, 19 nt, Artificial Sequence
  Description of Artificial Sequence: Synthetic oligonucleotide
cagacgcccacgaucuggg

SEQ ID NO: 2695588 - RNA, 19 nt, Artificial Sequence
  Description of Artificial Sequence: Synthetic oligonucleotide
uucaggauacaggcuauuc

SEQ ID NO: 2695589 - RNA, 19 nt, Artificial Sequence
  Description of Artificial Sequence: Synthetic oligonucleotide
ucacggcucaugccauagg

SEQ ID NO: 2695590 - RNA, 19 nt, Artificial Sequence
  Description of Artificial Sequence: Synthetic oligonucleotide
cucccucuuaugcuccugg

SEQ ID NO: 2695591 - RNA, 19 nt, Artificial Sequence
  Description of Artificial Sequence: Synthetic oligonucleotide
gacuguacuucacggcuca

SEQ ID NO: 2695592 - RNA, 19 nt, Artificial Sequence
  Description of Artificial Sequence: Synthetic oligonucleotide
cccaaagccauuagagucc

SEQ ID NO: 2695593 - RNA, 19 nt, Artificial Sequence
  Description of Artificial Sequence: Synthetic oligonucleotide
uaacugcauuacaauccac

SEQ ID NO: 2695594 - RNA, 19 nt, Artificial Sequence
  Description of Artificial Sequence: Synthetic oligonucleotide
cuucauaaaccaguuggga

SEQ ID NO: 2695595 - RNA, 19 nt, Artificial Sequence
  Description of Artificial Sequence: Synthetic oligonucleotide
cagcuugcucagaaucacg

SEQ ID NO: 2695596 - RNA, 19 nt, Artificial Sequence
  Description of Artificial Sequence: Synthetic oligonucleotide
agguggauucucaggcacc

SEQ ID NO: 2695597 - RNA, 19 nt, Artificial Sequence
  Description of Artificial Sequence: Synthetic oligonucleotide
cuucagccacaccuggaag

SEQ ID NO: 2695598 - RNA, 19 nt, Artificial Sequence
  Description of Artificial Sequence: Synthetic oligonucleotide
cuuggucaccgccaagcug

SEQ ID NO: 2695599 - RNA, 19 nt, Artificial Sequence
  Description of Artificial Sequence: Synthetic oligonucleotide
gcugccuucaggaauugag

SEQ ID NO: 2695600 - RNA, 19 nt, Artificial Sequence
  Description of Artificial Sequence: Synthetic oligonucleotide
aucuccacgguagugucca

SEQ ID NO: 2695601 - RNA, 19 nt, Artificial Sequence
  Description of Artificial Sequence: Synthetic oligonucleotide
gucaugccagccugugagg

SEQ ID NO: 2695602 - RNA, 19 nt, Artificial Sequence
  Description of Artificial Sequence: Synthetic oligonucleotide
agccugucaugccagccug

SEQ ID NO: 2695603 - RNA, 19 nt, Artificial Sequence
  Description of Artificial Sequence: Synthetic oligonucleotide
guuggccauguugaggcag

SEQ ID NO: 2695604 - RNA, 19 nt, Artificial Sequence
  Description of Artificial Sequence: Synthetic oligonucleotide
accgccaagcugcccaaag

SEQ ID NO: 2695605 - RNA, 19 nt, Artificial Sequence
  Description of Artificial Sequence: Synthetic oligonucleotide
caucauucuuggucaccgc

SEQ ID NO: 2695606 - RNA, 19 nt, Artificial Sequence
  Description of Artificial Sequence: Synthetic oligonucleotide
uccugcaguugacucucug

SEQ ID NO: 2695607 - RNA, 19 nt, Artificial Sequence
  Description of Artificial Sequence: Synthetic oligonucleotide
caggaauugagccaccugu

SEQ ID NO: 2695608 - RNA, 19 nt, Artificial Sequence
  Description of Artificial Sequence: Synthetic oligonucleotide
cauggaagguggauucuca

SEQ ID NO: 2695609 - RNA, 19 nt, Artificial Sequence
  Description of Artificial Sequence: Synthetic oligonucleotide
caugccagccugugaggcc

SEQ ID NO: 2695610 - RNA, 19 nt, Artificial Sequence
  Description of Artificial Sequence: Synthetic oligonucleotide
ugacuccauaguccucagc

SEQ ID NO: 2695611 - RNA, 19 nt, Artificial Sequence
  Description of Artificial Sequence: Synthetic oligonucleotide
  modified_base (3)..(3): a, c, u, g, unknown or other
cunccggggucguccauag

SEQ ID NO: 2695612 - RNA, 19 nt, Artificial Sequence
  Description of Artificial Sequence: Synthetic oligonucleotide
guacuucacggcucaugcc

SEQ ID NO: 2695613 - RNA, 19 nt, Artificial Sequence
  Description of Artificial Sequence: Synthetic oligonucleotide
cugugaacucccucuuaug

SEQ ID NO: 2695614 - RNA, 19 nt, Artificial Sequence
  Description of Artificial Sequence: Synthetic oligonucleotide
cauagccugucaugccagc

SEQ ID NO: 2695615 - RNA, 19 nt, Artificial Sequence
  Description of Artificial Sequence: Synthetic oligonucleotide
ccuuuguuggccauguuga

SEQ ID NO: 2695616 - RNA, 19 nt, Artificial Sequence
  Description of Artificial Sequence: Synthetic oligonucleotide
acuagccgcuccuccaacu

SEQ ID NO: 2695617 - RNA, 19 nt, Artificial Sequence
  Description of Artificial Sequence: Synthetic oligonucleotide
ggcaccuucacuggcuugg

SEQ ID NO: 2695618 - RNA, 19 nt, Artificial Sequence
  Description of Artificial Sequence: Synthetic oligonucleotide
cuucaaagaggucaacagu

SEQ ID NO: 2695619 - RNA, 19 nt, Artificial Sequence
  Description of Artificial Sequence: Synthetic oligonucleotide
uugggaucuccacgguagu

SEQ ID NO: 2695620 - RNA, 19 nt, Artificial Sequence
  Description of Artificial Sequence: Synthetic oligonucleotide
gaagcccagacgcccacga

SEQ ID NO: 2695621 - RNA, 19 nt, Artificial Sequence
  Description of Artificial Sequence: Synthetic oligonucleotide
gacgugcuuccccuccugc

SEQ ID NO: 2695622 - RNA, 19 nt, Artificial Sequence
  Description of Artificial Sequence: Synthetic oligonucleotide
uccucugcacugcugccau

SEQ ID NO: 2695623 - RNA, 19 nt, Artificial Sequence
  Description of Artificial Sequence: Synthetic oligonucleotide
ugccauaggauggaccuuu

SEQ ID NO: 2695624 - RNA, 19 nt, Artificial Sequence
  Description of Artificial Sequence: Synthetic oligonucleotide
guugacucucugugaacuc

SEQ ID NO: 2695625 - RNA, 19 nt, Artificial Sequence
  Description of Artificial Sequence: Synthetic oligonucleotide
agggccuaacugcauuaca

SEQ ID NO: 2695626 - RNA, 19 nt, Artificial Sequence
  Description of Artificial Sequence: Synthetic oligonucleotide
gccuaacugcauuacaauc

SEQ ID NO: 2695627 - RNA, 19 nt, Artificial Sequence
  Description of Artificial Sequence: Synthetic oligonucleotide
cucagaaucacgccauucu

SEQ ID NO: 2695628 - RNA, 19 nt, Artificial Sequence
  Description of Artificial Sequence: Synthetic oligonucleotide
guccauagccugucaugcc

SEQ ID NO: 2695629 - RNA, 19 nt, Artificial Sequence
  Description of Artificial Sequence: Synthetic oligonucleotide
cuucaggaauugagccacc

SEQ ID NO: 2695630 - RNA, 19 nt, Artificial Sequence
  Description of Artificial Sequence: Synthetic oligonucleotide
ugacgugcuuccccuccug

SEQ ID NO: 2695631 - RNA, 19 nt, Artificial Sequence
  Description of Artificial Sequence: Synthetic oligonucleotide
gccauuagaguccucugca

SEQ ID NO: 2695632 - RNA, 19 nt, Artificial Sequence
  Description of Artificial Sequence: Synthetic oligonucleotide
ggaauugagccaccuguuc

SEQ ID NO: 2695633 - RNA, 19 nt, Artificial Sequence
  Description of Artificial Sequence: Synthetic oligonucleotide
aucagggccuaacugcauu

SEQ ID NO: 2695634 - RNA, 19 nt, Artificial Sequence
  Description of Artificial Sequence: Synthetic oligonucleotide
cauacuucuucucaauuuu

SEQ ID NO: 2695635 - RNA, 19 nt, Artificial Sequence
  Description of Artificial Sequence: Synthetic oligonucleotide
ugcugccaugucuuugccu

SEQ ID NO: 2695636 - RNA, 19 nt, Artificial Sequence
  Description of Artificial Sequence: Synthetic oligonucleotide
agacgcccacgaucugggc

SEQ ID NO: 2695637 - RNA, 19 nt, Artificial Sequence
  Description of Artificial Sequence: Synthetic oligonucleotide
ugccaugucuuugccuuca

SEQ ID NO: 2695638 - RNA, 19 nt, Artificial Sequence
  Description of Artificial Sequence: Synthetic oligonucleotide
cacggcucaugccauagga

SEQ ID NO: 2695639 - RNA, 19 nt, Artificial Sequence
  Description of Artificial Sequence: Synthetic oligonucleotide
ccuucaggaauugagccac

SEQ ID NO: 2695640 - RNA, 19 nt, Artificial Sequence
  Description of Artificial Sequence: Synthetic oligonucleotide
gcuuggauccuucaggaua

SEQ ID NO: 2695641 - RNA, 19 nt, Artificial Sequence
  Description of Artificial Sequence: Synthetic oligonucleotide
ggauggaccuuuguuggcc

SEQ ID NO: 2695642 - RNA, 19 nt, Artificial Sequence
  Description of Artificial Sequence: Synthetic oligonucleotide
caguugacucucugugaac

SEQ ID NO: 2695643 - RNA, 19 nt, Artificial Sequence
  Description of Artificial Sequence: Synthetic oligonucleotide
gaucuccacgguagugucc

SEQ ID NO: 2695644 - RNA, 19 nt, Artificial Sequence
  Description of Artificial Sequence: Synthetic oligonucleotide
uggaccuuuguuggccaug

SEQ ID NO: 2695645 - RNA, 19 nt, Artificial Sequence
  Description of Artificial Sequence: Synthetic oligonucleotide
uguuggccauguugaggca

SEQ ID NO: 2695646 - RNA, 19 nt, Artificial Sequence
  Description of Artificial Sequence: Synthetic oligonucleotide
cugugaggccccucuguug

SEQ ID NO: 2695647 - RNA, 19 nt, Artificial Sequence
  Description of Artificial Sequence: Synthetic oligonucleotide
cauuagaguccucugcacu

SEQ ID NO: 2695648 - RNA, 19 nt, Artificial Sequence
  Description of Artificial Sequence: Synthetic oligonucleotide
gugaacucccucuuaugcu

SEQ ID NO: 2695649 - RNA, 19 nt, Artificial Sequence
  Description of Artificial Sequence: Synthetic oligonucleotide
  modified_base (4)..(4): a, c, u, g, unknown or other
ucunccggggucguccaua

SEQ ID NO: 2695650 - RNA, 19 nt, Artificial Sequence
  Description of Artificial Sequence: Synthetic oligonucleotide
gcuggcuuccccuucuaac

SEQ ID NO: 2695651 - RNA, 19 nt, Artificial Sequence
  Description of Artificial Sequence: Synthetic oligonucleotide
cuuucuucauaaaccaguu

SEQ ID NO: 2695652 - RNA, 19 nt, Artificial Sequence
  Description of Artificial Sequence: Synthetic oligonucleotide
agaccauggaagguggauu

SEQ ID NO: 2695653 - RNA, 19 nt, Artificial Sequence
  Description of Artificial Sequence: Synthetic oligonucleotide
gucaacagucuggaacaug

SEQ ID NO: 2695654 - RNA, 19 nt, Artificial Sequence
  Description of Artificial Sequence: Synthetic oligonucleotide
gucuggaacaugucagucu

SEQ ID NO: 2695655 - RNA, 19 nt, Artificial Sequence
  Description of Artificial Sequence: Synthetic oligonucleotide
caacagucuggaacauguc

SEQ ID NO: 2695656 - RNA, 19 nt, Artificial Sequence
  Description of Artificial Sequence: Synthetic oligonucleotide
gcuugcucagaaucacgcc

SEQ ID NO: 2695657 - RNA, 19 nt, Artificial Sequence
  Description of Artificial Sequence: Synthetic oligonucleotide
  modified_base (6)..(6): a, c, u, g, unknown or other
gaucunccggggucgucca

SEQ ID NO: 2695658 - RNA, 19 nt, Artificial Sequence
  Description of Artificial Sequence: Synthetic oligonucleotide
ucuuaugcuccugggcuuu

SEQ ID NO: 2695659 - RNA, 19 nt, Artificial Sequence
  Description of Artificial Sequence: Synthetic oligonucleotide
acgugcuuccccuccugca

SEQ ID NO: 2695660 - RNA, 19 nt, Artificial Sequence
  Description of Artificial Sequence: Synthetic oligonucleotide
cauaggauggaccuuuguu

SEQ ID NO: 2695661 - RNA, 19 nt, Artificial Sequence
  Description of Artificial Sequence: Synthetic oligonucleotide
augacgugcuuccccuccu

SEQ ID NO: 2695662 - RNA, 19 nt, Artificial Sequence
  Description of Artificial Sequence: Synthetic oligonucleotide
gcaguugacucucugugaa

SEQ ID NO: 2695663 - RNA, 19 nt, Artificial Sequence
  Description of Artificial Sequence: Synthetic oligonucleotide
agcugcccaaagccauuag

SEQ ID NO: 2695664 - RNA, 19 nt, Artificial Sequence
  Description of Artificial Sequence: Synthetic oligonucleotide
cauaaaccaguugggaucu

SEQ ID NO: 2695665 - RNA, 19 nt, Artificial Sequence
  Description of Artificial Sequence: Synthetic oligonucleotide
cauuacaauccacuccacu

SEQ ID NO: 2695666 - RNA, 19 nt, Artificial Sequence
  Description of Artificial Sequence: Synthetic oligonucleotide
cuggcuuccccuucuaacu

SEQ ID NO: 2695667 - RNA, 19 nt, Artificial Sequence
  Description of Artificial Sequence: Synthetic oligonucleotide
gcuuucuucauaaaccagu

SEQ ID NO: 2695668 - RNA, 19 nt, Artificial Sequence
  Description of Artificial Sequence: Synthetic oligonucleotide
ugaggccccucuguugcug

SEQ ID NO: 2695669 - RNA, 19 nt, Artificial Sequence
  Description of Artificial Sequence: Synthetic oligonucleotide
ucugggcggcccacaucag

SEQ ID NO: 2695670 - RNA, 19 nt, Artificial Sequence
  Description of Artificial Sequence: Synthetic oligonucleotide
uuaugcuccugggcuuucu

SEQ ID NO: 2695671 - RNA, 19 nt, Artificial Sequence
  Description of Artificial Sequence: Synthetic oligonucleotide
gucuuggugacuccauagu

SEQ ID NO: 2695672 - RNA, 19 nt, Artificial Sequence
  Description of Artificial Sequence: Synthetic oligonucleotide
uucacuggcuuggauccuu

SEQ ID NO: 2695673 - RNA, 19 nt, Artificial Sequence
  Description of Artificial Sequence: Synthetic oligonucleotide
uggucaccgccaagcugcc

SEQ ID NO: 2695674 - RNA, 19 nt, Artificial Sequence
  Description of Artificial Sequence: Synthetic oligonucleotide
auccacuccacuagccgcu

SEQ ID NO: 2695675 - RNA, 19 nt, Artificial Sequence
  Description of Artificial Sequence: Synthetic oligonucleotide
cuuccccuucuaacugaug

SEQ ID NO: 2695676 - RNA, 19 nt, Artificial Sequence
  Description of Artificial Sequence: Synthetic oligonucleotide
ccauuagaguccucugcac

SEQ ID NO: 2695677 - RNA, 19 nt, Artificial Sequence
  Description of Artificial Sequence: Synthetic oligonucleotide
auaaaccaguugggaucuc

SEQ ID NO: 2695678 - RNA, 19 nt, Artificial Sequence
  Description of Artificial Sequence: Synthetic oligonucleotide
ggaucuccacgguaguguc

SEQ ID NO: 2695679 - RNA, 19 nt, Artificial Sequence
  Description of Artificial Sequence: Synthetic oligonucleotide
aagcugcccaaagccauua

SEQ ID NO: 2695680 - RNA, 19 nt, Artificial Sequence
  Description of Artificial Sequence: Synthetic oligonucleotide
ucacgccauucuucagcca

SEQ ID NO: 2695681 - RNA, 19 nt, Artificial Sequence
  Description of Artificial Sequence: Synthetic oligonucleotide
aagcccagacgcccacgau

SEQ ID NO: 2695682 - RNA, 19 nt, Artificial Sequence
  Description of Artificial Sequence: Synthetic oligonucleotide
agccacaccuggaagccca

SEQ ID NO: 2695683 - RNA, 19 nt, Artificial Sequence
  Description of Artificial Sequence: Synthetic oligonucleotide
ccauagccugucaugccag

SEQ ID NO: 2695684 - RNA, 19 nt, Artificial Sequence
  Description of Artificial Sequence: Synthetic oligonucleotide
agaggucaacagucuggaa

SEQ ID NO: 2695685 - RNA, 19 nt, Artificial Sequence
  Description of Artificial Sequence: Synthetic oligonucleotide
aggaauugagccaccuguu

SEQ ID NO: 2695686 - RNA, 19 nt, Artificial Sequence
  Description of Artificial Sequence: Synthetic oligonucleotide
  modified_base (8)..(8): a, c, u, g, unknown or other
augaucunccggggucguc

SEQ ID NO: 2695687 - RNA, 19 nt, Artificial Sequence
  Description of Artificial Sequence: Synthetic oligonucleotide
ccacaucagggccuaacug

SEQ ID NO: 2695688 - RNA, 19 nt, Artificial Sequence
  Description of Artificial Sequence: Synthetic oligonucleotide
gaucugggcggcccacauc

SEQ ID NO: 2695689 - RNA, 19 nt, Artificial Sequence
  Description of Artificial Sequence: Synthetic oligonucleotide
caaugacgugcuuccccuc

SEQ ID NO: 2695690 - RNA, 19 nt, Artificial Sequence
  Description of Artificial Sequence: Synthetic oligonucleotide
gguaguguccaucauucuu

SEQ ID NO: 2695691 - RNA, 19 nt, Artificial Sequence
  Description of Artificial Sequence: Synthetic oligonucleotide
accauggaagguggauucu

SEQ ID NO: 2695692 - RNA, 19 nt, Artificial Sequence
  Description of Artificial Sequence: Synthetic oligonucleotide
ccuggaagcccagacgccc

SEQ ID NO: 2695693 - RNA, 19 nt, Artificial Sequence
  Description of Artificial Sequence: Synthetic oligonucleotide
cugcugccaugucuuugcc

SEQ ID NO: 2695694 - RNA, 19 nt, Artificial Sequence
  Description of Artificial Sequence: Synthetic oligonucleotide
uggugacuccauaguccuc

SEQ ID NO: 2695695 - RNA, 19 nt, Artificial Sequence
  Description of Artificial Sequence: Synthetic oligonucleotide
cccucuuaugcuccugggc

SEQ ID NO: 2695696 - RNA, 19 nt, Artificial Sequence
  Description of Artificial Sequence: Synthetic oligonucleotide
cucaugccauaggauggac

SEQ ID NO: 2695697 - RNA, 19 nt, Artificial Sequence
  Description of Artificial Sequence: Synthetic oligonucleotide
gcugcccaaagccauuaga

SEQ ID NO: 2695698 - RNA, 19 nt, Artificial Sequence
  Description of Artificial Sequence: Synthetic oligonucleotide
cguccauagccugucaugc

SEQ ID NO: 2695699 - RNA, 19 nt, Artificial Sequence
  Description of Artificial Sequence: Synthetic oligonucleotide
acaggcuauucaccagcuu

SEQ ID NO: 2695700 - RNA, 19 nt, Artificial Sequence
  Description of Artificial Sequence: Synthetic oligonucleotide
ccagacgcccacgaucugg

SEQ ID NO: 2695701 - RNA, 19 nt, Artificial Sequence
  Description of Artificial Sequence: Synthetic oligonucleotide
gcuauucaccagcuugcuc

SEQ ID NO: 2695702 - RNA, 19 nt, Artificial Sequence
  Description of Artificial Sequence: Synthetic oligonucleotide
cagggccuaacugcauuac

SEQ ID NO: 2695703 - RNA, 19 nt, Artificial Sequence
  Description of Artificial Sequence: Synthetic oligonucleotide
auggaccuuuguuggccau

SEQ ID NO: 2695704 - RNA, 19 nt, Artificial Sequence
  Description of Artificial Sequence: Synthetic oligonucleotide
cuugaagaccauggaaggu

SEQ ID NO: 2695705 - RNA, 19 nt, Artificial Sequence
  Description of Artificial Sequence: Synthetic oligonucleotide
gggccuaacugcauuacaa

SEQ ID NO: 2695706 - RNA, 19 nt, Artificial Sequence
  Description of Artificial Sequence: Synthetic oligonucleotide
  modified_base (2)..(2): a, c, u, g, unknown or other
unccggggucguccauagc

SEQ ID NO: 2695707 - RNA, 19 nt, Artificial Sequence
  Description of Artificial Sequence: Synthetic oligonucleotide
ugcuuccccuccugcaguu

SEQ ID NO: 2695708 - RNA, 19 nt, Artificial Sequence
  Description of Artificial Sequence: Synthetic oligonucleotide
cacuagccgcuccuccaac

SEQ ID NO: 2695709 - RNA, 19 nt, Artificial Sequence
  Description of Artificial Sequence: Synthetic oligonucleotide
cuggaagcccagacgccca

SEQ ID NO: 2695710 - RNA, 19 nt, Artificial Sequence
  Description of Artificial Sequence: Synthetic oligonucleotide
uuggauccuucaggauaca

SEQ ID NO: 2695711 - RNA, 19 nt, Artificial Sequence
  Description of Artificial Sequence: Synthetic oligonucleotide
acuucacggcucaugccau

SEQ ID NO: 2695712 - RNA, 19 nt, Artificial Sequence
  Description of Artificial Sequence: Synthetic oligonucleotide
ccucuuaugcuccugggcu

SEQ ID NO: 2695713 - RNA, 19 nt, Artificial Sequence
  Description of Artificial Sequence: Synthetic oligonucleotide
cagucuggaacaugucagu

SEQ ID NO: 2695714 - RNA, 19 nt, Artificial Sequence
  Description of Artificial Sequence: Synthetic oligonucleotide
cuccacgguaguguccauc

SEQ ID NO: 2695715 - RNA, 19 nt, Artificial Sequence
  Description of Artificial Sequence: Synthetic oligonucleotide
cuguugcugcccaucugaa

SEQ ID NO: 2695716 - RNA, 19 nt, Artificial Sequence
  Description of Artificial Sequence: Synthetic oligonucleotide
ggcuuccccuucuaacuga

SEQ ID NO: 2695717 - RNA, 19 nt, Artificial Sequence
  Description of Artificial Sequence: Synthetic oligonucleotide
acggcucaugccauaggau

SEQ ID NO: 2695718 - RNA, 19 nt, Artificial Sequence
  Description of Artificial Sequence: Synthetic oligonucleotide
cugucaugccagccuguga

SEQ ID NO: 2695719 - RNA, 19 nt, Artificial Sequence
  Description of Artificial Sequence: Synthetic oligonucleotide
acucccucuuaugcuccug

SEQ ID NO: 2695720 - RNA, 19 nt, Artificial Sequence
  Description of Artificial Sequence: Synthetic oligonucleotide
ccccuucuaacugaugauc

SEQ ID NO: 2695721 - RNA, 19 nt, Artificial Sequence
  Description of Artificial Sequence: Synthetic oligonucleotide
cuuaugcuccugggcuuuc

SEQ ID NO: 2695722 - RNA, 19 nt, Artificial Sequence
  Description of Artificial Sequence: Synthetic oligonucleotide
  modified_base (9)..(9): a, c, u, g, unknown or other
gaugaucunccggggucgu

SEQ ID NO: 2695723 - RNA, 19 nt, Artificial Sequence
  Description of Artificial Sequence: Synthetic oligonucleotide
caaagccauuagaguccuc

SEQ ID NO: 2695724 - RNA, 19 nt, Artificial Sequence
  Description of Artificial Sequence: Synthetic oligonucleotide
acgccauucuucagccaca

SEQ ID NO: 2695725 - RNA, 19 nt, Artificial Sequence
  Description of Artificial Sequence: Synthetic oligonucleotide
ggaagcccagacgcccacg

SEQ ID NO: 2695726 - RNA, 19 nt, Artificial Sequence
  Description of Artificial Sequence: Synthetic oligonucleotide
cagucuuggugacuccaua

SEQ ID NO: 2695727 - RNA, 19 nt, Artificial Sequence
  Description of Artificial Sequence: Synthetic oligonucleotide
ggacuguacuucacggcuc

SEQ ID NO: 2695728 - RNA, 19 nt, Artificial Sequence
  Description of Artificial Sequence: Synthetic oligonucleotide
cugcacugcugccaugucu

SEQ ID NO: 2695729 - RNA, 19 nt, Artificial Sequence
  Description of Artificial Sequence: Synthetic oligonucleotide
uccacuccacuagccgcuc

SEQ ID NO: 2695730 - RNA, 19 nt, Artificial Sequence
  Description of Artificial Sequence: Synthetic oligonucleotide
ccgccaagcugcccaaagc

SEQ ID NO: 2695731 - RNA, 19 nt, Artificial Sequence
  Description of Artificial Sequence: Synthetic oligonucleotide
cacuggcuuggauccuuca

SEQ ID NO: 2695732 - RNA, 19 nt, Artificial Sequence
  Description of Artificial Sequence: Synthetic oligonucleotide
gucguccauagccugucau

SEQ ID NO: 2695733 - RNA, 19 nt, Artificial Sequence
  Description of Artificial Sequence: Synthetic oligonucleotide
cacgguaguguccaucauu

SEQ ID NO: 2695734 - RNA, 19 nt, Artificial Sequence
  Description of Artificial Sequence: Synthetic oligonucleotide
  modified_base (5)..(5): a, c, u, g, unknown or other
aucunccggggucguccau

SEQ ID NO: 2695735 - RNA, 19 nt, Artificial Sequence
  Description of Artificial Sequence: Synthetic oligonucleotide
ccauggaagguggauucuc

SEQ ID NO: 2695736 - RNA, 19 nt, Artificial Sequence
  Description of Artificial Sequence: Synthetic oligonucleotide
agcugccuucaggaauuga

SEQ ID NO: 2695737 - RNA, 19 nt, Artificial Sequence
  Description of Artificial Sequence: Synthetic oligonucleotide
ggccuaacugcauuacaau

SEQ ID NO: 2695738 - RNA, 19 nt, Artificial Sequence
  Description of Artificial Sequence: Synthetic oligonucleotide
gguggauucucaggcaccu

SEQ ID NO: 2695739 - RNA, 19 nt, Artificial Sequence
  Description of Artificial Sequence: Synthetic oligonucleotide
gccaagcugcccaaagcca

SEQ ID NO: 2695740 - RNA, 19 nt, Artificial Sequence
  Description of Artificial Sequence: Synthetic oligonucleotide
cacgaucugggcggcccac

SEQ ID NO: 2695741 - RNA, 19 nt, Artificial Sequence
  Description of Artificial Sequence: Synthetic oligonucleotide
cucuuaugcuccugggcuu

SEQ ID NO: 2695742 - RNA, 19 nt, Artificial Sequence
  Description of Artificial Sequence: Synthetic oligonucleotide
  modified_base (19)..(19): a, c, u, g, unknown or other
ccuucuaacugaugaucun

SEQ ID NO: 2695743 - RNA, 19 nt, Artificial Sequence
  Description of Artificial Sequence: Synthetic oligonucleotide
ccaaugacgugcuuccccu

SEQ ID NO: 2695744 - RNA, 19 nt, Artificial Sequence
  Description of Artificial Sequence: Synthetic oligonucleotide
acgaucugggcggcccaca

SEQ ID NO: 2695745 - RNA, 19 nt, Artificial Sequence
  Description of Artificial Sequence: Synthetic oligonucleotide
ccugucaugccagccugug

SEQ ID NO: 2695746 - RNA, 19 nt, Artificial Sequence
  Description of Artificial Sequence: Synthetic oligonucleotide
cccacgaucugggcggccc

SEQ ID NO: 2695747 - RNA, 19 nt, Artificial Sequence
  Description of Artificial Sequence: Synthetic oligonucleotide
augccauaggauggaccuu

SEQ ID NO: 2695748 - RNA, 19 nt, Artificial Sequence
  Description of Artificial Sequence: Synthetic oligonucleotide
ucuccacgguaguguccau

SEQ ID NO: 2695749 - RNA, 19 nt, Artificial Sequence
  Description of Artificial Sequence: Synthetic oligonucleotide
cuucacggcucaugccaua

SEQ ID NO: 2695750 - RNA, 19 nt, Artificial Sequence
  Description of Artificial Sequence: Synthetic oligonucleotide
ggaacaugucagucuuggu

SEQ ID NO: 2695751 - RNA, 19 nt, Artificial Sequence
  Description of Artificial Sequence: Synthetic oligonucleotide
cacuccacuagccgcuccu

SEQ ID NO: 2695752 - RNA, 19 nt, Artificial Sequence
  Description of Artificial Sequence: Synthetic oligonucleotide
gcauuacaauccacuccac

SEQ ID NO: 2695753 - RNA, 19 nt, Artificial Sequence
  Description of Artificial Sequence: Synthetic oligonucleotide
gggcggcccacaucagggc

SEQ ID NO: 2695754 - RNA, 19 nt, Artificial Sequence
  Description of Artificial Sequence: Synthetic oligonucleotide
ggaccuuuguuggccaugu

SEQ ID NO: 2695755 - RNA, 19 nt, Artificial Sequence
  Description of Artificial Sequence: Synthetic oligonucleotide
ccugcaguugacucucugu

SEQ ID NO: 2695756 - RNA, 19 nt, Artificial Sequence
  Description of Artificial Sequence: Synthetic oligonucleotide
gccauaggauggaccuuug

SEQ ID NO: 2695757 - RNA, 19 nt, Artificial Sequence
  Description of Artificial Sequence: Synthetic oligonucleotide
ggucguccauagccuguca

SEQ ID NO: 2695758 - RNA, 19 nt, Artificial Sequence
  Description of Artificial Sequence: Synthetic oligonucleotide
cagcugccuucaggaauug

SEQ ID NO: 2695759 - RNA, 19 nt, Artificial Sequence
  Description of Artificial Sequence: Synthetic oligonucleotide
gcccacaucagggccuaac

SEQ ID NO: 2695760 - RNA, 19 nt, Artificial Sequence
  Description of Artificial Sequence: Synthetic oligonucleotide
caugucagucuuggugacu

SEQ ID NO: 2695761 - RNA, 19 nt, Artificial Sequence
  Description of Artificial Sequence: Synthetic oligonucleotide
gcccagacgcccacgaucu

SEQ ID NO: 2695762 - RNA, 19 nt, Artificial Sequence
  Description of Artificial Sequence: Synthetic oligonucleotide
ccacuccacuagccgcucc

SEQ ID NO: 2695763 - RNA, 19 nt, Artificial Sequence
  Description of Artificial Sequence: Synthetic oligonucleotide
caucagggccuaacugcau

SEQ ID NO: 2695764 - RNA, 19 nt, Artificial Sequence
  Description of Artificial Sequence: Synthetic oligonucleotide
ggcuggcuuccccuucuaa

SEQ ID NO: 2695765 - RNA, 19 nt, Artificial Sequence
  Description of Artificial Sequence: Synthetic oligonucleotide
cccucuguugcugcccauc

SEQ ID NO: 2695766 - RNA, 19 nt, Artificial Sequence
  Description of Artificial Sequence: Synthetic oligonucleotide
ggcuauucaccagcuugcu

SEQ ID NO: 2695767 - RNA, 19 nt, Artificial Sequence
  Description of Artificial Sequence: Synthetic oligonucleotide
cccacaucagggccuaacu

SEQ ID NO: 2695768 - RNA, 19 nt, Artificial Sequence
  Description of Artificial Sequence: Synthetic oligonucleotide
gaaggccaaugacgugcuu

SEQ ID NO: 2695769 - RNA, 19 nt, Artificial Sequence
  Description of Artificial Sequence: Synthetic oligonucleotide
caguugggaucuccacggu

SEQ ID NO: 2695770 - RNA, 19 nt, Artificial Sequence
  Description of Artificial Sequence: Synthetic oligonucleotide
gaccuuuguuggccauguu

SEQ ID NO: 2695771 - RNA, 19 nt, Artificial Sequence
  Description of Artificial Sequence: Synthetic oligonucleotide
ggcuuggauccuucaggau

SEQ ID NO: 2695772 - RNA, 19 nt, Artificial Sequence
  Description of Artificial Sequence: Synthetic oligonucleotide
cgccauucuucagccacac

SEQ ID NO: 2695773 - RNA, 19 nt, Artificial Sequence
  Description of Artificial Sequence: Synthetic oligonucleotide
cuucaggauacaggcuauu

SEQ ID NO: 2695774 - RNA, 19 nt, Artificial Sequence
  Description of Artificial Sequence: Synthetic oligonucleotide
ggucaccgccaagcugccc

SEQ ID NO: 2695775 - RNA, 19 nt, Artificial Sequence
  Description of Artificial Sequence: Synthetic oligonucleotide
caggcaccuucacuggcuu

SEQ ID NO: 2695776 - RNA, 19 nt, Artificial Sequence
  Description of Artificial Sequence: Synthetic oligonucleotide
gccaugucuuugccuucaa

SEQ ID NO: 2695777 - RNA, 19 nt, Artificial Sequence
  Description of Artificial Sequence: Synthetic oligonucleotide
ccacuagccgcuccuccaa

SEQ ID NO: 2695778 - RNA, 19 nt, Artificial Sequence
  Description of Artificial Sequence: Synthetic oligonucleotide
gccaccuguuccaucugcu

SEQ ID NO: 2695779 - RNA, 19 nt, Artificial Sequence
  Description of Artificial Sequence: Synthetic oligonucleotide
gcaccuucacuggcuugga

SEQ ID NO: 2695780 - RNA, 19 nt, Artificial Sequence
  Description of Artificial Sequence: Synthetic oligonucleotide
ccauaggauggaccuuugu

SEQ ID NO: 2695781 - RNA, 19 nt, Artificial Sequence
  Description of Artificial Sequence: Synthetic oligonucleotide
caccuucacuggcuuggau

SEQ ID NO: 2695782 - RNA, 19 nt, Artificial Sequence
  Description of Artificial Sequence: Synthetic oligonucleotide
ggucaacagucuggaacau

SEQ ID NO: 2695783 - RNA, 19 nt, Artificial Sequence
  Description of Artificial Sequence: Synthetic oligonucleotide
ccggggucguccauagccu

SEQ ID NO: 2695784 - RNA, 19 nt, Artificial Sequence
  Description of Artificial Sequence: Synthetic oligonucleotide
cccagacgcccacgaucug

SEQ ID NO: 2695785 - RNA, 19 nt, Artificial Sequence
  Description of Artificial Sequence: Synthetic oligonucleotide
ccacgaucugggcggccca

SEQ ID NO: 2695786 - RNA, 19 nt, Artificial Sequence
  Description of Artificial Sequence: Synthetic oligonucleotide
ccugugaggccccucuguu

SEQ ID NO: 2695787 - RNA, 19 nt, Artificial Sequence
  Description of Artificial Sequence: Synthetic oligonucleotide
guggauucucaggcaccuu

SEQ ID NO: 2695788 - RNA, 19 nt, Artificial Sequence
  Description of Artificial Sequence: Synthetic oligonucleotide
ccauaguccucagcugccu

SEQ ID NO: 2695789 - RNA, 19 nt, Artificial Sequence
  Description of Artificial Sequence: Synthetic oligonucleotide
caccgccaagcugcccaaa

SEQ ID NO: 2695790 - RNA, 19 nt, Artificial Sequence
  Description of Artificial Sequence: Synthetic oligonucleotide
ccagccugugaggccccuc

SEQ ID NO: 2695791 - RNA, 19 nt, Artificial Sequence
  Description of Artificial Sequence: Synthetic oligonucleotide
ccacaccuggaagcccaga

SEQ ID NO: 2695792 - RNA, 19 nt, Artificial Sequence
  Description of Artificial Sequence: Synthetic oligonucleotide
cgguaguguccaucauucu

SEQ ID NO: 2695793 - RNA, 19 nt, Artificial Sequence
  Description of Artificial Sequence: Synthetic oligonucleotide
gccugucaugccagccugu

SEQ ID NO: 2695794 - RNA, 19 nt, Artificial Sequence
  Description of Artificial Sequence: Synthetic oligonucleotide
ggcccacaucagggccuaa

SEQ ID NO: 2695795 - RNA, 19 nt, Artificial Sequence
  Description of Artificial Sequence: Synthetic oligonucleotide
ccccucuguugcugcccau

SEQ ID NO: 2695796 - RNA, 19 nt, Artificial Sequence
  Description of Artificial Sequence: Synthetic oligonucleotide
  modified_base (1)..(1): a, c, u, g, unknown or other
nccggggucguccauagcc

SEQ ID NO: 2695797 - RNA, 19 nt, Artificial Sequence
  Description of Artificial Sequence: Synthetic oligonucleotide
agaaguaagaaauucaucc

SEQ ID NO: 2695798 - RNA, 19 nt, Artificial Sequence
  Description of Artificial Sequence: Synthetic oligonucleotide
agcaauuuuaaacacaucg

SEQ ID NO: 2695799 - RNA, 19 nt, Artificial Sequence
  Description of Artificial Sequence: Synthetic oligonucleotide
aacaguaacagauuucucg

SEQ ID NO: 2695800 - RNA, 19 nt, Artificial Sequence
  Description of Artificial Sequence: Synthetic oligonucleotide
aagagccauauucaaagcc

SEQ ID NO: 2695801 - RNA, 19 nt, Artificial Sequence
  Description of Artificial Sequence: Synthetic oligonucleotide
uacuucagauaccagaugg

SEQ ID NO: 2695802 - RNA, 19 nt, Artificial Sequence
  Description of Artificial Sequence: Synthetic oligonucleotide
gauagcagcaaauugaaca

SEQ ID NO: 2695803 - RNA, 19 nt, Artificial Sequence
  Description of Artificial Sequence: Synthetic oligonucleotide
agccaaaagagauagcagc

SEQ ID NO: 2695804 - RNA, 19 nt, Artificial Sequence
  Description of Artificial Sequence: Synthetic oligonucleotide
gaaauaaugcccaaaguag

SEQ ID NO: 2695805 - RNA, 19 nt, Artificial Sequence
  Description of Artificial Sequence: Synthetic oligonucleotide
auuccaaagauguagaagu

SEQ ID NO: 2695806 - RNA, 19 nt, Artificial Sequence
  Description of Artificial Sequence: Synthetic oligonucleotide
gaacaggucaccaacaugg

SEQ ID NO: 2695807 - RNA, 19 nt, Artificial Sequence
  Description of Artificial Sequence: Synthetic oligonucleotide
aauaaugcccaaaguaggc

SEQ ID NO: 2695808 - RNA, 19 nt, Artificial Sequence
  Description of Artificial Sequence: Synthetic oligonucleotide
gauuucucgaaauaaugcc

SEQ ID NO: 2695809 - RNA, 19 nt, Artificial Sequence
  Description of Artificial Sequence: Synthetic oligonucleotide
aacauggugauaauaacuc

SEQ ID NO: 2695810 - RNA, 19 nt, Artificial Sequence
  Description of Artificial Sequence: Synthetic oligonucleotide
aaguaagaaauucauccug

SEQ ID NO: 2695811 - RNA, 19 nt, Artificial Sequence
  Description of Artificial Sequence: Synthetic oligonucleotide
uguagaaguaagaaauuca

SEQ ID NO: 2695812 - RNA, 19 nt, Artificial Sequence
  Description of Artificial Sequence: Synthetic oligonucleotide
aaauaaugcccaaaguagg

SEQ ID NO: 2695813 - RNA, 19 nt, Artificial Sequence
  Description of Artificial Sequence: Synthetic oligonucleotide
uuggggauaaaccagggca

SEQ ID NO: 2695814 - RNA, 19 nt, Artificial Sequence
  Description of Artificial Sequence: Synthetic oligonucleotide
ucuugcagcaauuuuaaac

SEQ ID NO: 2695815 - RNA, 19 nt, Artificial Sequence
  Description of Artificial Sequence: Synthetic oligonucleotide
uagagcuugauguacaucu

SEQ ID NO: 2695816 - RNA, 19 nt, Artificial Sequence
  Description of Artificial Sequence: Synthetic oligonucleotide
aaucagccaaaagagauag

SEQ ID NO: 2695817 - RNA, 19 nt, Artificial Sequence
  Description of Artificial Sequence: Synthetic oligonucleotide
uuaaacacaucgcugacuc

SEQ ID NO: 2695818 - RNA, 19 nt, Artificial Sequence
  Description of Artificial Sequence: Synthetic oligonucleotide
agauuucucgaaauaaugc

SEQ ID NO: 2695819 - RNA, 19 nt, Artificial Sequence
  Description of Artificial Sequence: Synthetic oligonucleotide
uuuauuccaaagauguaga

SEQ ID NO: 2695820 - RNA, 19 nt, Artificial Sequence
  Description of Artificial Sequence: Synthetic oligonucleotide
ucuuauuugucuugcagca

SEQ ID NO: 2695821 - RNA, 19 nt, Artificial Sequence
  Description of Artificial Sequence: Synthetic oligonucleotide
uguacaucugcuuggguag

SEQ ID NO: 2695822 - RNA, 19 nt, Artificial Sequence
  Description of Artificial Sequence: Synthetic oligonucleotide
uccaagacaacaguaacag

SEQ ID NO: 2695823 - RNA, 19 nt, Artificial Sequence
  Description of Artificial Sequence: Synthetic oligonucleotide
aaacacaucgcugacucuc

SEQ ID NO: 2695824 - RNA, 19 nt, Artificial Sequence
  Description of Artificial Sequence: Synthetic oligonucleotide
auuucucgaaauaaugccc

SEQ ID NO: 2695825 - RNA, 19 nt, Artificial Sequence
  Description of Artificial Sequence: Synthetic oligonucleotide
cauggugauaauaacuccc

SEQ ID NO: 2695826 - RNA, 19 nt, Artificial Sequence
  Description of Artificial Sequence: Synthetic oligonucleotide
aaagauguagaaguaagaa

SEQ ID NO: 2695827 - RNA, 19 nt, Artificial Sequence
  Description of Artificial Sequence: Synthetic oligonucleotide
acauggugauaauaacucc

SEQ ID NO: 2695828 - RNA, 19 nt, Artificial Sequence
  Description of Artificial Sequence: Synthetic oligonucleotide
aucuagaaggcauucuuuc

SEQ ID NO: 2695829 - RNA, 19 nt, Artificial Sequence
  Description of Artificial Sequence: Synthetic oligonucleotide
uuuccuauagaaagaagaa

SEQ ID NO: 2695830 - RNA, 19 nt, Artificial Sequence
  Description of Artificial Sequence: Synthetic oligonucleotide
ucagccaaaagagauagca

SEQ ID NO: 2695831 - RNA, 19 nt, Artificial Sequence
  Description of Artificial Sequence: Synthetic oligonucleotide
uuucucgaaauaaugccca

SEQ ID NO: 2695832 - RNA, 19 nt, Artificial Sequence
  Description of Artificial Sequence: Synthetic oligonucleotide
aaagccacggguuccaaga

SEQ ID NO: 2695833 - RNA, 19 nt, Artificial Sequence
  Description of Artificial Sequence: Synthetic oligonucleotide
uuucucugaucucagggcc

SEQ ID NO: 2695834 - RNA, 19 nt, Artificial Sequence
  Description of Artificial Sequence: Synthetic oligonucleotide
aaaacgcucaucacgauca

SEQ ID NO: 2695835 - RNA, 19 nt, Artificial Sequence
  Description of Artificial Sequence: Synthetic oligonucleotide
agauguagaaguaagaaau

SEQ ID NO: 2695836 - RNA, 19 nt, Artificial Sequence
  Description of Artificial Sequence: Synthetic oligonucleotide
aaaccagggcacgagaagg

SEQ ID NO: 2695837 - RNA, 19 nt, Artificial Sequence
  Description of Artificial Sequence: Synthetic oligonucleotide
cuugauguacaucugcuug

SEQ ID NO: 2695838 - RNA, 19 nt, Artificial Sequence
  Description of Artificial Sequence: Synthetic oligonucleotide
aauugcaaucagccaaaag

SEQ ID NO: 2695839 - RNA, 19 nt, Artificial Sequence
  Description of Artificial Sequence: Synthetic oligonucleotide
uuuugcaucuagaaggcau

SEQ ID NO: 2695840 - RNA, 19 nt, Artificial Sequence
  Description of Artificial Sequence: Synthetic oligonucleotide
cucgaaauaaugcccaaag

SEQ ID NO: 2695841 - RNA, 19 nt, Artificial Sequence
  Description of Artificial Sequence: Synthetic oligonucleotide
auaauaacuccccgguuag

SEQ ID NO: 2695842 - RNA, 19 nt, Artificial Sequence
  Description of Artificial Sequence: Synthetic oligonucleotide
agucuuauuugucuugcag

SEQ ID NO: 2695843 - RNA, 19 nt, Artificial Sequence
  Description of Artificial Sequence: Synthetic oligonucleotide
auguagaaguaagaaauuc

SEQ ID NO: 2695844 - RNA, 19 nt, Artificial Sequence
  Description of Artificial Sequence: Synthetic oligonucleotide
uaggcuaccgaagaaagug

SEQ ID NO: 2695845 - RNA, 19 nt, Artificial Sequence
  Description of Artificial Sequence: Synthetic oligonucleotide
uuauuugucuugcagcaau

SEQ ID NO: 2695846 - RNA, 19 nt, Artificial Sequence
  Description of Artificial Sequence: Synthetic oligonucleotide
cauguugugagcuggcaag

SEQ ID NO: 2695847 - RNA, 19 nt, Artificial Sequence
  Description of Artificial Sequence: Synthetic oligonucleotide
acaguaacagauuucucga

SEQ ID NO: 2695848 - RNA, 19 nt, Artificial Sequence
  Description of Artificial Sequence: Synthetic oligonucleotide
agcaaauugaacaggucac

SEQ ID NO: 2695849 - RNA, 19 nt, Artificial Sequence
  Description of Artificial Sequence: Synthetic oligonucleotide
gauaauaacuccccgguua

SEQ ID NO: 2695850 - RNA, 19 nt, Artificial Sequence
  Description of Artificial Sequence: Synthetic oligonucleotide
cugaaaauagagcuugaug

SEQ ID NO: 2695851 - RNA, 19 nt, Artificial Sequence
  Description of Artificial Sequence: Synthetic oligonucleotide
aacugugguccaaagagag

SEQ ID NO: 2695852 - RNA, 19 nt, Artificial Sequence
  Description of Artificial Sequence: Synthetic oligonucleotide
uuccaagacaacaguaaca

SEQ ID NO: 2695853 - RNA, 19 nt, Artificial Sequence
  Description of Artificial Sequence: Synthetic oligonucleotide
aacagauuucucgaaauaa

SEQ ID NO: 2695854 - RNA, 19 nt, Artificial Sequence
  Description of Artificial Sequence: Synthetic oligonucleotide
gcaagagccauauucaaag

SEQ ID NO: 2695855 - RNA, 19 nt, Artificial Sequence
  Description of Artificial Sequence: Synthetic oligonucleotide
ucauccucaaggccagugg

SEQ ID NO: 2695856 - RNA, 19 nt, Artificial Sequence
  Description of Artificial Sequence: Synthetic oligonucleotide
agagauagcagcaaauuga

SEQ ID NO: 2695857 - RNA, 19 nt, Artificial Sequence
  Description of Artificial Sequence: Synthetic oligonucleotide
ggugauaauaacuccccgg

SEQ ID NO: 2695858 - RNA, 19 nt, Artificial Sequence
  Description of Artificial Sequence: Synthetic oligonucleotide
aauaacuccccgguuagga

SEQ ID NO: 2695859 - RNA, 19 nt, Artificial Sequence
  Description of Artificial Sequence: Synthetic oligonucleotide
cagauuucucgaaauaaug

SEQ ID NO: 2695860 - RNA, 19 nt, Artificial Sequence
  Description of Artificial Sequence: Synthetic oligonucleotide
uaaaccagggcacgagaag

SEQ ID NO: 2695861 - RNA, 19 nt, Artificial Sequence
  Description of Artificial Sequence: Synthetic oligonucleotide
cuuucucugaucucagggc

SEQ ID NO: 2695862 - RNA, 19 nt, Artificial Sequence
  Description of Artificial Sequence: Synthetic oligonucleotide
gagaggauugagcugggcc

SEQ ID NO: 2695863 - RNA, 19 nt, Artificial Sequence
  Description of Artificial Sequence: Synthetic oligonucleotide
cugacucucauguugugag

SEQ ID NO: 2695864 - RNA, 19 nt, Artificial Sequence
  Description of Artificial Sequence: Synthetic oligonucleotide
acaucgcugacucucaugu

SEQ ID NO: 2695865 - RNA, 19 nt, Artificial Sequence
  Description of Artificial Sequence: Synthetic oligonucleotide
uugucuugcagcaauuuua
